United States Patent Application Publication US 2005/0244851 A1 - sequence listing, part 26

SEQ ID NO: 998711 - DNA, 25 bp, Homo sapien
tgaatgccagtgttgctcaagatcc

SEQ ID NO: 998712 - DNA, 25 bp, Homo sapien
cagtagtatgcactgtgaatgccag

SEQ ID NO: 998713 - DNA, 25 bp, Homo sapien
catcacctttactgggaaagaagct

SEQ ID NO: 998714 - DNA, 25 bp, Homo sapien
ccccactatggtcgatcagtattaa

SEQ ID NO: 998715 - DNA, 25 bp, Homo sapien
tttgtggacactcattgcccagacc

SEQ ID NO: 998716 - DNA, 25 bp, Homo sapien
ggttagctccaaacacttaatgtct

SEQ ID NO: 998717 - DNA, 25 bp, Homo sapien
tgtcctcttaagttcagtacctggg

SEQ ID NO: 998718 - DNA, 25 bp, Homo sapien
cccagcttagtagggaaaagaggca

SEQ ID NO: 998719 - DNA, 25 bp, Homo sapien
cagtttacaaactataaggcagagg

SEQ ID NO: 998720 - DNA, 25 bp, Homo sapien
gaaggttacttaacagcagcctctg

SEQ ID NO: 998721 - DNA, 25 bp, Homo sapien
tggaccatgagaattagctgacagc

SEQ ID NO: 998722 - DNA, 25 bp, Homo sapien
ccttggtcaagtcctcgaacttttg

SEQ ID NO: 998723 - DNA, 25 bp, Homo sapien
agatggagctgttttacctacttca

SEQ ID NO: 998724 - DNA, 25 bp, Homo sapien
cttcataagacagttgcgaggtgcc

SEQ ID NO: 998725 - DNA, 25 bp, Homo sapien
gcaactgctgctttcggagatggct

SEQ ID NO: 998726 - DNA, 25 bp, Homo sapien
gagaagttggtctgtcatctcccat

SEQ ID NO: 998727 - DNA, 25 bp, Homo sapien
gaacagctctaccaagacagtctgc

SEQ ID NO: 998728 - DNA, 25 bp, Homo sapien
ctcaagtaggccaagaaacagttct

SEQ ID NO: 998729 - DNA, 25 bp, Homo sapien
gaaatcaacatcttggagaaactaa

SEQ ID NO: 998730 - DNA, 25 bp, Homo sapien
taagtcctacgtgttttcagtgtaa

SEQ ID NO: 998731 - DNA, 25 bp, Homo sapien
cacccttcagatactccgtgggagg

SEQ ID NO: 998732 - DNA, 25 bp, Homo sapien
tgtaaaccaagaactagcaagaaac

SEQ ID NO: 998733 - DNA, 25 bp, Homo sapien
taccgagtagactgctattagccag

SEQ ID NO: 998734 - DNA, 25 bp, Homo sapien
tagttgtagtcgtgtagccgcagcg

SEQ ID NO: 998735 - DNA, 25 bp, Homo sapien
taaaggcaggcgataacagatctgg

SEQ ID NO: 998736 - DNA, 25 bp, Homo sapien
tactggagtccaaaaaacgaattca

SEQ ID NO: 998737 - DNA, 25 bp, Homo sapien
gtatcccataaagatcgtttgcctt

SEQ ID NO: 998738 - DNA, 25 bp, Homo sapien
cttctgtatcccataaagatcgttt

SEQ ID NO: 998739 - DNA, 25 bp, Homo sapien
cataaagatcgtttgcctttagcca

SEQ ID NO: 998740 - DNA, 25 bp, Homo sapien
cccataaagatcgtttgcctttagc

SEQ ID NO: 998741 - DNA, 25 bp, Homo sapien
gcgtatcgccacactttcccctgca

SEQ ID NO: 998742 - DNA, 25 bp, Homo sapien
tgcgtatcgccacactttcccctgc

SEQ ID NO: 998743 - DNA, 25 bp, Homo sapien
ctgcgtatcgccacactttcccctg

SEQ ID NO: 998744 - DNA, 25 bp, Homo sapien
cgtatcgccacactttcccctgcag

SEQ ID NO: 998745 - DNA, 25 bp, Homo sapien
ggcatcccgagcaaacagatacaac

SEQ ID NO: 998746 - DNA, 25 bp, Homo sapien
tcaggagaaaccgacaccgccagca

SEQ ID NO: 998747 - DNA, 25 bp, Homo sapien
ttgttatggcatcccgagcaaacag

SEQ ID NO: 998748 - DNA, 25 bp, Homo sapien
tatggcatcccgagcaaacagatac

SEQ ID NO: 998749 - DNA, 25 bp, Homo sapien
gcactgaatggatgagagctacttt

SEQ ID NO: 998750 - DNA, 25 bp, Homo sapien
tctcaataatacgtcttcaggcggg

SEQ ID NO: 998751 - DNA, 25 bp, Homo sapien
gaacactggaccacataggcactga

SEQ ID NO: 998752 - DNA, 25 bp, Homo sapien
tcattagtctcgtgcccaggcttgg

SEQ ID NO: 998753 - DNA, 25 bp, Homo sapien
gagtgcactgccttcgaatgttgaa

SEQ ID NO: 998754 - DNA, 25 bp, Homo sapien
tgctacagcttggatgcttgtccct

SEQ ID NO: 998755 - DNA, 25 bp, Homo sapien
tccaacctggaaccatgctacagct

SEQ ID NO: 998756 - DNA, 25 bp, Homo sapien
gatgggaatctgcacggcttcagat

SEQ ID NO: 998757 - DNA, 25 bp, Homo sapien
tagccattgattctcaccgaatgct

SEQ ID NO: 998758 - DNA, 25 bp, Homo sapien
cagggatgattgagcgtagacacaa

SEQ ID NO: 998759 - DNA, 25 bp, Homo sapien
attgtaagctccatatagccattga

SEQ ID NO: 998760 - DNA, 25 bp, Homo sapien
ttctgcatctgtagtcagcgtaggg

SEQ ID NO: 998761 - DNA, 25 bp, Homo sapien
caagctactagcgtgtggtcagagt

SEQ ID NO: 998762 - DNA, 25 bp, Homo sapien
ggagcattcgccaagagaccttctg

SEQ ID NO: 998763 - DNA, 25 bp, Homo sapien
gagatgggccctgtatcccatgaca

SEQ ID NO: 998764 - DNA, 25 bp, Homo sapien
aacaaaacaataagtcaggccccag

SEQ ID NO: 998765 - DNA, 25 bp, Homo sapien
agtctccaaatacactatgtttctc

SEQ ID NO: 998766 - DNA, 25 bp, Homo sapien
ctccaaatacactatgtttctccag

SEQ ID NO: 998767 - DNA, 25 bp, Homo sapien
gtctccaaatacactatgtttctcc

SEQ ID NO: 998768 - DNA, 25 bp, Homo sapien
tccaaatacactatgtttctccagg

SEQ ID NO: 998769 - DNA, 25 bp, Homo sapien
gaacaccacgtgatctctggcacct

SEQ ID NO: 998770 - DNA, 25 bp, Homo sapien
cagagtcctcggcactatgcttata

SEQ ID NO: 998771 - DNA, 25 bp, Homo sapien
catcccttttcggaagatgtgcaga

SEQ ID NO: 998772 - DNA, 25 bp, Homo sapien
tataatttggactttgaacaccacg

SEQ ID NO: 998773 - DNA, 25 bp, Homo sapien
cattgttatgagctgttgataaaca

SEQ ID NO: 998774 - DNA, 25 bp, Homo sapien
ctgttgataaacaaggcttaatata

SEQ ID NO: 998775 - DNA, 25 bp, Homo sapien
gctgttgataaacaaggcttaatat

SEQ ID NO: 998776 - DNA, 25 bp, Homo sapien
catgaactgtcttgatcgctgccaa

SEQ ID NO: 998777 - DNA, 25 bp, Homo sapien
tcgtggctcaatgacctagggaccc

SEQ ID NO: 998778 - DNA, 25 bp, Homo sapien
tagggaccccaagcattcaccataa

SEQ ID NO: 998779 - DNA, 25 bp, Homo sapien
ttactaggactactgagatatgctg

SEQ ID NO: 998780 - DNA, 25 bp, Homo sapien
gattgaaggtacacttctccctagc

SEQ ID NO: 998781 - DNA, 25 bp, Homo sapien
tgaaggtacacttctccctagcacc

SEQ ID NO: 998782 - DNA, 25 bp, Homo sapien
ttgaaggtacacttctccctagcac

SEQ ID NO: 998783 - DNA, 25 bp, Homo sapien
gggattgaaggtacacttctcccta

SEQ ID NO: 998784 - DNA, 25 bp, Homo sapien
gcctctcagctacaacgtgcggaaa

SEQ ID NO: 998785 - DNA, 25 bp, Homo sapien
tgtaaaaactgtccggagagcgagg

SEQ ID NO: 998786 - DNA, 25 bp, Homo sapien
cattttagatgacagcattgcggga

SEQ ID NO: 998787 - DNA, 25 bp, Homo sapien
tcacagaattgcacaggtactccct

SEQ ID NO: 998788 - DNA, 25 bp, Homo sapien
tgtatggctgcaggttcaagattcc

SEQ ID NO: 998789 - DNA, 25 bp, Homo sapien
gaatgtatggctgcaggttcaagat

SEQ ID NO: 998790 - DNA, 25 bp, Homo sapien
ccgaatgtatggctgcaggttcaag

SEQ ID NO: 998791 - DNA, 25 bp, Homo sapien
atgtatggctgcaggttcaagattc

SEQ ID NO: 998792 - DNA, 25 bp, Homo sapien
actaatcaagaacagcccagggcat

SEQ ID NO: 998793 - DNA, 25 bp, Homo sapien
taagaaactgccagcctcgatggag

SEQ ID NO: 998794 - DNA, 25 bp, Homo sapien
tatgcttcaccacatgaccctaggg

SEQ ID NO: 998795 - DNA, 25 bp, Homo sapien
aaatgggtccgtatctttctaggca

SEQ ID NO: 998796 - DNA, 25 bp, Homo sapien
tatttgagtacctaagagctgcagg

SEQ ID NO: 998797 - DNA, 25 bp, Homo sapien
tctgaattacatggaggacaagctc

SEQ ID NO: 998798 - DNA, 25 bp, Homo sapien
tctaataggagacgacaggagcagg

SEQ ID NO: 998799 - DNA, 25 bp, Homo sapien
tgactttccgtaaactcgcattagg

SEQ ID NO: 998800 - DNA, 25 bp, Homo sapien
caggactgcatttgctacgggaatg

SEQ ID NO: 998801 - DNA, 25 bp, Homo sapien
ggactgcatttgctacgggaatgtt

SEQ ID NO: 998802 - DNA, 25 bp, Homo sapien
ctgcatttgctacgggaatgttctt

SEQ ID NO: 998803 - DNA, 25 bp, Homo sapien
tccaggactgcatttgctacgggaa

SEQ ID NO: 998804 - DNA, 25 bp, Homo sapien
gccttttctgcctttctcatattct

SEQ ID NO: 998805 - DNA, 25 bp, Homo sapien
ttctgcctttctcatattctgcact

SEQ ID NO: 998806 - DNA, 25 bp, Homo sapien
ctttctcatattctgcactactcat

SEQ ID NO: 998807 - DNA, 25 bp, Homo sapien
cctttctcatattctgcactactca

SEQ ID NO: 998808 - DNA, 25 bp, Homo sapien
caaactttgggtcatccgagagaga

SEQ ID NO: 998809 - DNA, 25 bp, Homo sapien
tacagggaaggttgacccactcagc

SEQ ID NO: 998810 - DNA, 25 bp, Homo sapien
tcccggtcgacaaaggtgtggagtc

SEQ ID NO: 998811 - DNA, 25 bp, Homo sapien
gatttctgtcccagagcggtacagg

SEQ ID NO: 998812 - DNA, 25 bp, Homo sapien
aggcctggactacgcactgggaaaa

SEQ ID NO: 998813 - DNA, 25 bp, Homo sapien
agcacgattcatcgcgcctggaggc

SEQ ID NO: 998814 - DNA, 25 bp, Homo sapien
ccgagccgcggtgtcgcagtgactc

SEQ ID NO: 998815 - DNA, 25 bp, Homo sapien
ccccggtagctgagggacgcagcta

SEQ ID NO: 998816 - DNA, 25 bp, Homo sapien
tttcagcaagatgctttttagcaaa

SEQ ID NO: 998817 - DNA, 25 bp, Homo sapien
ttcagcaagatgctttttagcaaat

SEQ ID NO: 998818 - DNA, 25 bp, Homo sapien
attttcagcaagatgctttttagca

SEQ ID NO: 998819 - DNA, 25 bp, Homo sapien
gcagatacttattcaaggccccaca

SEQ ID NO: 998820 - DNA, 25 bp, Homo sapien
gatacactagcttccaaaatctgct

SEQ ID NO: 998821 - DNA, 25 bp, Homo sapien
gttcacttagtgatacactagcttc

SEQ ID NO: 998822 - DNA, 25 bp, Homo sapien
ttattgatgaatagattcatgttca

SEQ ID NO: 998823 - DNA, 25 bp, Homo sapien
tctttataccagactttgaatccag

SEQ ID NO: 998824 - DNA, 25 bp, Homo sapien
gaacatggtcgtctttataccagac

SEQ ID NO: 998825 - DNA, 25 bp, Homo sapien
tgaatccagggttgcatacctccag

SEQ ID NO: 998826 - DNA, 25 bp, Homo sapien
tgggcagaacatggtcgtctttata

SEQ ID NO: 998827 - DNA, 25 bp, Homo sapien
tgctttctactcgttcagagctatg

SEQ ID NO: 998828 - DNA, 25 bp, Homo sapien
ctgcagccaggtttcattgctttct

SEQ ID NO: 998829 - DNA, 25 bp, Homo sapien
tgagcgagtcgtttccatttctact

SEQ ID NO: 998830 - DNA, 25 bp, Homo sapien
gctatgttcttgaaggccgtggctc

SEQ ID NO: 998831 - DNA, 25 bp, Homo sapien
gtcctcatccatgaatgcgaaactc

SEQ ID NO: 998832 - DNA, 25 bp, Homo sapien
tggacctctctagagtcctcatcca

SEQ ID NO: 998833 - DNA, 25 bp, Homo sapien
ctcagttcttggacctctctagagt

SEQ ID NO: 998834 - DNA, 25 bp, Homo sapien
tccatagccgcttctcacactgctt

SEQ ID NO: 998835 - DNA, 25 bp, Homo sapien
gattcaacggagcttcaggtttaaa

SEQ ID NO: 998836 - DNA, 25 bp, Homo sapien
aaagatgcggctcccactattcgtg

SEQ ID NO: 998837 - DNA, 25 bp, Homo sapien
gtttttggtccacgatgtgcatggg

SEQ ID NO: 998838 - DNA, 25 bp, Homo sapien
ctattcgtgtggttggagatgcacc

SEQ ID NO: 998839 - DNA, 25 bp, Homo sapien
cagaagttactgaattcttgtattc

SEQ ID NO: 998840 - DNA, 25 bp, Homo sapien
cacgtccagccttgggaatttctta

SEQ ID NO: 998841 - DNA, 25 bp, Homo sapien
tatttttgctcataaggcggtgaga

SEQ ID NO: 998842 - DNA, 25 bp, Homo sapien
gactttgtatgctagcagaagttac

SEQ ID NO: 998843 - DNA, 25 bp, Homo sapien
tcctaaaggcttgctcgctgtgaca

SEQ ID NO: 998844 - DNA, 25 bp, Homo sapien
cgctgtgacatctaatacttgcagt

SEQ ID NO: 998845 - DNA, 25 bp, Homo sapien
ttacccattgtctatcctggaggag

SEQ ID NO: 998846 - DNA, 25 bp, Homo sapien
aaaattagacatgcctcatcagcag

SEQ ID NO: 998847 - DNA, 25 bp, Homo sapien
ggacaccgtgccaggacacgctggt

SEQ ID NO: 998848 - DNA, 25 bp, Homo sapien
ctctgcacctgccagttgagcagtc

SEQ ID NO: 998849 - DNA, 25 bp, Homo sapien
tcagtaagtcataacataagcacat

SEQ ID NO: 998850 - DNA, 25 bp, Homo sapien
tcaatctgctgagcccttggagcct

SEQ ID NO: 998851 - DNA, 25 bp, Homo sapien
gccttcctgcttcgcctgctcactg

SEQ ID NO: 998852 - DNA, 25 bp, Homo sapien
ttcctgcttcgcctgctcactgcaa

SEQ ID NO: 998853 - DNA, 25 bp, Homo sapien
agccttcctgcttcgcctgctcact

SEQ ID NO: 998854 - DNA, 25 bp, Homo sapien
ctgcttcgcctgctcactgcaaaat

SEQ ID NO: 998855 - DNA, 25 bp, Homo sapien
ccagtgtgggctttcgcggtctcat

SEQ ID NO: 998856 - DNA, 25 bp, Homo sapien
cactcttaagtgtaaccctgttgca

SEQ ID NO: 998857 - DNA, 25 bp, Homo sapien
accatttcctggcagtgtgcttagc

SEQ ID NO: 998858 - DNA, 25 bp, Homo sapien
tgcatgcctagcagcagcgctgttt

SEQ ID NO: 998859 - DNA, 25 bp, Homo sapien
atcgggcacgttcagttcagagtgg

SEQ ID NO: 998860 - DNA, 25 bp, Homo sapien
ccaggccccaccctgttcgcttctg

SEQ ID NO: 998861 - DNA, 25 bp, Homo sapien
tgagcatacccatttccagtagctg

SEQ ID NO: 998862 - DNA, 25 bp, Homo sapien
taatgttatttgtagatggcctctg

SEQ ID NO: 998863 - DNA, 25 bp, Homo sapien
cagtttgctgtaggtaaggaaagtc

SEQ ID NO: 998864 - DNA, 25 bp, Homo sapien
tacagtatgagattgccagtttgct

SEQ ID NO: 998865 - DNA, 25 bp, Homo sapien
cacaaaaacatcgaggaagaccgca

SEQ ID NO: 998866 - DNA, 25 bp, Homo sapien
gacattttcacggagagctcacaga

SEQ ID NO: 998867 - DNA, 25 bp, Homo sapien
ggaaactaggccatgatcggactct

SEQ ID NO: 998868 - DNA, 25 bp, Homo sapien
gatgtccctgttaatggccgagtag

SEQ ID NO: 998869 - DNA, 25 bp, Homo sapien
tgcccacagtactcgaggttcctga

SEQ ID NO: 998870 - DNA, 25 bp, Homo sapien
tcagaatttcaaactgcatgttctt

SEQ ID NO: 998871 - DNA, 25 bp, Homo sapien
cgaggttcctgaagctaaggcagct

SEQ ID NO: 998872 - DNA, 25 bp, Homo sapien
tttttctaaattgcccacagtactc

SEQ ID NO: 998873 - DNA, 25 bp, Homo sapien
catacttcagggcatcagcctggct

SEQ ID NO: 998874 - DNA, 25 bp, Homo sapien
acttcagggcatcagcctggctgta

SEQ ID NO: 998875 - DNA, 25 bp, Homo sapien
tacttcagggcatcagcctggctgt

SEQ ID NO: 998876 - DNA, 25 bp, Homo sapien
cttcagggcatcagcctggctgtat

SEQ ID NO: 998877 - DNA, 25 bp, Homo sapien
aggagatgtccgctggatggccacc

SEQ ID NO: 998878 - DNA, 25 bp, Homo sapien
gatggccacccatccaacatgtgct

SEQ ID NO: 998879 - DNA, 25 bp, Homo sapien
tgtgctgagacttaacacaacaaag

SEQ ID NO: 998880 - DNA, 25 bp, Homo sapien
aaagcctgctgaagatagtgggtgc

SEQ ID NO: 998881 - DNA, 25 bp, Homo sapien
ctgtgatcaccgttaaccatcataa

SEQ ID NO: 998882 - DNA, 25 bp, Homo sapien
tcttggcaaaaatacctatcctgtg

SEQ ID NO: 998883 - DNA, 25 bp, Homo sapien
aaaaaacagctcttcgccagtctgg

SEQ ID NO: 998884 - DNA, 25 bp, Homo sapien
tctggatggctctcttggcaaaaat

SEQ ID NO: 998885 - DNA, 25 bp, Homo sapien
taccgaatgatttgcaaaacgaatt

SEQ ID NO: 998886 - DNA, 25 bp, Homo sapien
ttttgcatagcagtttggatttacc

SEQ ID NO: 998887 - DNA, 25 bp, Homo sapien
gcatagcagtttggatttaccgaat

SEQ ID NO: 998888 - DNA, 25 bp, Homo sapien
agtttggatttaccgaatgatttgc

SEQ ID NO: 998889 - DNA, 25 bp, Homo sapien
cacactattgttccaggttaaaatt

SEQ ID NO: 998890 - DNA, 25 bp, Homo sapien
cagggtttgcctgcaaaagcaaata

SEQ ID NO: 998891 - DNA, 25 bp, Homo sapien
tgcaactggttacagttcttcaggg

SEQ ID NO: 998892 - DNA, 25 bp, Homo sapien
tgacatttggaagaacacactattg

SEQ ID NO: 998893 - DNA, 25 bp, Homo sapien
cgtttctgaacactcggccggcaga

SEQ ID NO: 998894 - DNA, 25 bp, Homo sapien
gaaggctgccacatgcaactcagga

SEQ ID NO: 998895 - DNA, 25 bp, Homo sapien
tccagagaggcggtttcctgcacat

SEQ ID NO: 998896 - DNA, 25 bp, Homo sapien
gccagatgctgggatagtgccaccc

SEQ ID NO: 998897 - DNA, 25 bp, Homo sapien
gaacagaaagctgcacatgtattta

SEQ ID NO: 998898 - DNA, 25 bp, Homo sapien
ttgaacagaaagctgcacatgtatt

SEQ ID NO: 998899 - DNA, 25 bp, Homo sapien
tgaacagaaagctgcacatgtattt

SEQ ID NO: 998900 - DNA, 25 bp, Homo sapien
gttgaacagaaagctgcacatgtat

SEQ ID NO: 998901 - DNA, 25 bp, Homo sapien
gataaaggtgatcaagcctgacaga

SEQ ID NO: 998902 - DNA, 25 bp, Homo sapien
ttcttttggataaaggtgatcaagc

SEQ ID NO: 998903 - DNA, 25 bp, Homo sapien
ggtgatcaagcctgacagaacacac

SEQ ID NO: 998904 - DNA, 25 bp, Homo sapien
gatcaagcctgacagaacacacaaa

SEQ ID NO: 998905 - DNA, 25 bp, Homo sapien
cccccagcctgccacgtcagatggt

SEQ ID NO: 998906 - DNA, 25 bp, Homo sapien
tctgcacaggatctttgataaaaat

SEQ ID NO: 998907 - DNA, 25 bp, Homo sapien
ctgcacaggatctttgataaaaatc

SEQ ID NO: 998908 - DNA, 25 bp, Homo sapien
ccagcctgccacgtcagatggtgcc

SEQ ID NO: 998909 - DNA, 25 bp, Homo sapien
catcatcaaaaaaggagggtgaaaa

SEQ ID NO: 998910 - DNA, 25 bp, Homo sapien
gactggggacaaagtagactacaga

SEQ ID NO: 998911 - DNA, 25 bp, Homo sapien
cacatcatcaaaaaaggagggtgaa

SEQ ID NO: 998912 - DNA, 25 bp, Homo sapien
catcaaaaaaggagggtgaaaatgg

SEQ ID NO: 998913 - DNA, 25 bp, Homo sapien
tttggagccccgctgaatactgcag

SEQ ID NO: 998914 - DNA, 25 bp, Homo sapien
tcagcggctccacaagtaagacaga

SEQ ID NO: 998915 - DNA, 25 bp, Homo sapien
ttttactgtcccaatggtcagcggc

SEQ ID NO: 998916 - DNA, 25 bp, Homo sapien
gcggcatcccggaaagcggttttga

SEQ ID NO: 998917 - DNA, 25 bp, Homo sapien
gaacaatatccatggtccttgacca

SEQ ID NO: 998918 - DNA, 25 bp, Homo sapien
tgagtttcgtcaagtaaacaaggga

SEQ ID NO: 998919 - DNA, 25 bp, Homo sapien
tgtgaataaagggtctggatggaac

SEQ ID NO: 998920 - DNA, 25 bp, Homo sapien
tgggtagctccttctagattcctct

SEQ ID NO: 998921 - DNA, 25 bp, Homo sapien
ttttgtgctatcacacaagggcacg

SEQ ID NO: 998922 - DNA, 25 bp, Homo sapien
ctgccgtggatgatcacagggttga

SEQ ID NO: 998923 - DNA, 25 bp, Homo sapien
cgaactgtcacaaggctgccgtgga

SEQ ID NO: 998924 - DNA, 25 bp, Homo sapien
ttgtaaacatggttagaggagccgt

SEQ ID NO: 998925 - DNA, 25 bp, Homo sapien
tattccggtttccacaacgatggca

SEQ ID NO: 998926 - DNA, 25 bp, Homo sapien
taacatcatgcaggccaatgaatcc

SEQ ID NO: 998927 - DNA, 25 bp, Homo sapien
gattcatcagtagacgtcctccatt

SEQ ID NO: 998928 - DNA, 25 bp, Homo sapien
tctaaagcacggctacatctcagtc

SEQ ID NO: 998929 - DNA, 25 bp, Homo sapien
atctttctgcagtgtgcagcccaca

SEQ ID NO: 998930 - DNA, 25 bp, Homo sapien
tatctttctgcagtgtgcagcccac

SEQ ID NO: 998931 - DNA, 25 bp, Homo sapien
ttttcagctgtatctttctgcagtg

SEQ ID NO: 998932 - DNA, 25 bp, Homo sapien
cctttttcagctgtatctttctgca

SEQ ID NO: 998933 - DNA, 25 bp, Homo sapien
tgcgttaaagccaagagtcatgccc

SEQ ID NO: 998934 - DNA, 25 bp, Homo sapien
ccaggtgtggcaagacgtcatttcc

SEQ ID NO: 998935 - DNA, 25 bp, Homo sapien
aaccaaatttctgcgggaagctaca

SEQ ID NO: 998936 - DNA, 25 bp, Homo sapien
taaaccaagcaagtgaactacgtgg

SEQ ID NO: 998937 - DNA, 25 bp, Homo sapien
tagagcagatagtccactcatcaat

SEQ ID NO: 998938 - DNA, 25 bp, Homo sapien
gattagagcagatagtccactcatc

SEQ ID NO: 998939 - DNA, 25 bp, Homo sapien
taaaaatgtgaggtagaggtatggg

SEQ ID NO: 998940 - DNA, 25 bp, Homo sapien
gggagattagagcagatagtccact

SEQ ID NO: 998941 - DNA, 25 bp, Homo sapien
catttacaaatcaaatcagcctgaa

SEQ ID NO: 998942 - DNA, 25 bp, Homo sapien
taacccaaatgcagtctggtaaccg

SEQ ID NO: 998943 - DNA, 25 bp, Homo sapien
ggagtatcggaatgcaatgccacac

SEQ ID NO: 998944 - DNA, 25 bp, Homo sapien
accaaatatactgaaggctgctgta

SEQ ID NO: 998945 - DNA, 25 bp, Homo sapien
cacaagcttaaagtagggtacccat

SEQ ID NO: 998946 - DNA, 25 bp, Homo sapien
ctttttccttggaggagtatccaca

SEQ ID NO: 998947 - DNA, 25 bp, Homo sapien
gtatccacatcctcagcgggagctg

SEQ ID NO: 998948 - DNA, 25 bp, Homo sapien
gattctttgactctaaactcataca

SEQ ID NO: 998949 - DNA, 25 bp, Homo sapien
ggagctggagctatgatgctagatt

SEQ ID NO: 998950 - DNA, 25 bp, Homo sapien
gtagctgtaattatattctggtcaa

SEQ ID NO: 998951 - DNA, 25 bp, Homo sapien
taccctcacattaggggtagctgta

SEQ ID NO: 998952 - DNA, 25 bp, Homo sapien
agagccatgaggacagtcttattta

SEQ ID NO: 998953 - DNA, 25 bp, Homo sapien
gatataacacacatcgctgtcccta

SEQ ID NO: 998954 - DNA, 25 bp, Homo sapien
cactccacattctcaggaggttcaa

SEQ ID NO: 998955 - DNA, 25 bp, Homo sapien
acagaaattgtcatagtaagtgcca

SEQ ID NO: 998956 - DNA, 25 bp, Homo sapien
taaacattgaggcttcagcaccact

SEQ ID NO: 998957 - DNA, 25 bp, Homo sapien
ggtcccaattaacctagcaatggca

SEQ ID NO: 998958 - DNA, 25 bp, Homo sapien
tgaggacaactcaaatccaatcggc

SEQ ID NO: 998959 - DNA, 25 bp, Homo sapien
tcggcaaaacactaacccatcgtag

SEQ ID NO: 998960 - DNA, 25 bp, Homo sapien
ttaagaagtacaattcagggtgtgc

SEQ ID NO: 998961 - DNA, 25 bp, Homo sapien
cacagaacgtcaagaatattaaacc

SEQ ID NO: 998962 - DNA, 25 bp, Homo sapien
agtgcatcatcagctttcaaacaac

SEQ ID NO: 998963 - DNA, 25 bp, Homo sapien
cagtaaaacccagttattagacgtg

SEQ ID NO: 998964 - DNA, 25 bp, Homo sapien
caccacaagctagggtacgggtgca

SEQ ID NO: 998965 - DNA, 25 bp, Homo sapien
caacacgaactttcacagaacagta

SEQ ID NO: 998966 - DNA, 25 bp, Homo sapien
tctgcggcctcctggacgttttggt

SEQ ID NO: 998967 - DNA, 25 bp, Homo sapien
tttgattccagcacattaatggtgg

SEQ ID NO: 998968 - DNA, 25 bp, Homo sapien
tgctactgttattgggaagccgtcc

SEQ ID NO: 998969 - DNA, 25 bp, Homo sapien
tccgctcagcggtgagagcagcagc

SEQ ID NO: 998970 - DNA, 25 bp, Homo sapien
caacatcagggcaaagttctaaaac

SEQ ID NO: 998971 - DNA, 25 bp, Homo sapien
tataagccaggttagtcaaaaaatg

SEQ ID NO: 998972 - DNA, 25 bp, Homo sapien
tcatttgcatgtctaatatacttgt

SEQ ID NO: 998973 - DNA, 25 bp, Homo sapien
aatatgggttctatatattcctaga

SEQ ID NO: 998974 - DNA, 25 bp, Homo sapien
taaaacaagtgctcaagaattccat

SEQ ID NO: 998975 - DNA, 25 bp, Homo sapien
aaataggataccttctgcaggtgcc

SEQ ID NO: 998976 - DNA, 25 bp, Homo sapien
taagagcatggtttatagagaccac

SEQ ID NO: 998977 - DNA, 25 bp, Homo sapien
gaagggagaagtttgacagcagcca

SEQ ID NO: 998978 - DNA, 25 bp, Homo sapien
caaatgctggtaacactgtggtcca

SEQ ID NO: 998979 - DNA, 25 bp, Homo sapien
tataagtgttgggtgttgcatgaaa

SEQ ID NO: 998980 - DNA, 25 bp, Homo sapien
ttctgtgttcttccgcttataagtg

SEQ ID NO: 998981 - DNA, 25 bp, Homo sapien
aatgctggtaacactgtggtccaca

SEQ ID NO: 998982 - DNA, 25 bp, Homo sapien
gaagcgtgtgagcaattaggctcca

SEQ ID NO: 998983 - DNA, 25 bp, Homo sapien
ccaatccaagaacctggtgagagct

SEQ ID NO: 998984 - DNA, 25 bp, Homo sapien
taatgataaagaggacagccccaga

SEQ ID NO: 998985 - DNA, 25 bp, Homo sapien
aaagattcaaatgcgggtacactgc

SEQ ID NO: 998986 - DNA, 25 bp, Homo sapien
acttgggagataattaaaggacaca

SEQ ID NO: 998987 - DNA, 25 bp, Homo sapien
gatggtatggttagttagacttaac

SEQ ID NO: 998988 - DNA, 25 bp, Homo sapien
cctaagaatgtactgagaaactgat

SEQ ID NO: 998989 - DNA, 25 bp, Homo sapien
ggattccaataaacataccactaat

SEQ ID NO: 998990 - DNA, 25 bp, Homo sapien
tctcaaggtagtgaaagatgaactt

SEQ ID NO: 998991 - DNA, 25 bp, Homo sapien
taatcttggaatgggaaagctaact

SEQ ID NO: 998992 - DNA, 25 bp, Homo sapien
taccgcctcatgaatagactaaagg

SEQ ID NO: 998993 - DNA, 25 bp, Homo sapien
caggagatctctgaataccgcctca

SEQ ID NO: 998994 - DNA, 25 bp, Homo sapien
taccgtatccccaagataagagacc

SEQ ID NO: 998995 - DNA, 25 bp, Homo sapien
caatagctaacaagagccaggtacc

SEQ ID NO: 998996 - DNA, 25 bp, Homo sapien
tattcaacataaaatcgaccaggcg

SEQ ID NO: 998997 - DNA, 25 bp, Homo sapien
gctctgtaaaggaagtactaccgta

SEQ ID NO: 998998 - DNA, 25 bp, Homo sapien
aaaggagtgtaagctttgctctctc

SEQ ID NO: 998999 - DNA, 25 bp, Homo sapien
gaacagatttagcatttggtccatc

SEQ ID NO: 999000 - DNA, 25 bp, Homo sapien
agctgctgttcggtgagttctttat

SEQ ID NO: 999001 - DNA, 25 bp, Homo sapien
taaaacatcgcctacagaaaagcgt

SEQ ID NO: 999002 - DNA, 25 bp, Homo sapien
tagttcttctgctgtgcccttatct

SEQ ID NO: 999003 - DNA, 25 bp, Homo sapien
aacattgaggaaatggcttcaaaaa

SEQ ID NO: 999004 - DNA, 25 bp, Homo sapien
gcccttatctggaaacattgaggaa

SEQ ID NO: 999005 - DNA, 25 bp, Homo sapien
tcagaaggaaatttccgaggtgggc

SEQ ID NO: 999006 - DNA, 25 bp, Homo sapien
tctcggtgatcctccagatctttct

SEQ ID NO: 999007 - DNA, 25 bp, Homo sapien
ctcggtgatcctccagatctttctg

SEQ ID NO: 999008 - DNA, 25 bp, Homo sapien
aagtaccatcctgatctaaaacttc

SEQ ID NO: 999009 - DNA, 25 bp, Homo sapien
ctatccccgtgtactttcccatcat

SEQ ID NO: 999010 - DNA, 25 bp, Homo sapien
aacttcatctcccatataaggaatg

SEQ ID NO: 999011 - DNA, 25 bp, Homo sapien
ctctatccccgtgtactttcccatc

SEQ ID NO: 999012 - DNA, 25 bp, Homo sapien
acattatgggtactgaagcaactgc

SEQ ID NO: 999013 - DNA, 25 bp, Homo sapien
gggagaccaagaatacattatgggt

SEQ ID NO: 999014 - DNA, 25 bp, Homo sapien
gatgacttgtgttggaaaatccaag

SEQ ID NO: 999015 - DNA, 25 bp, Homo sapien
cagagtctttaatgggatgacttgt

SEQ ID NO: 999016 - DNA, 25 bp, Homo sapien
acaataggcgactgtgtggctggac

SEQ ID NO: 999017 - DNA, 25 bp, Homo sapien
tacaataggcgactgtgtggctgga

SEQ ID NO: 999018 - DNA, 25 bp, Homo sapien
cagctggtacaataggcgactgtgt

SEQ ID NO: 999019 - DNA, 25 bp, Homo sapien
atcaaccagctggtacaataggcga

SEQ ID NO: 999020 - DNA, 25 bp, Homo sapien
tagttgtaggagtacacaaccaaac

SEQ ID NO: 999021 - DNA, 25 bp, Homo sapien
gagagggaagtcaagccaaaaatag

SEQ ID NO: 999022 - DNA, 25 bp, Homo sapien
tgagactcttggcagaaggctggtt

SEQ ID NO: 999023 - DNA, 25 bp, Homo sapien
aggctggttccaagtaaaaactgtg

SEQ ID NO: 999024 - DNA, 25 bp, Homo sapien
gagtgatgttcatccaccacatgta

SEQ ID NO: 999025 - DNA, 25 bp, Homo sapien
cctaggttaaaatcctgaagggctg

SEQ ID NO: 999026 - DNA, 25 bp, Homo sapien
gcagctttgcggaaaaactccagtt

SEQ ID NO: 999027 - DNA, 25 bp, Homo sapien
ccgggccctgaatgaaaggaatcac

SEQ ID NO: 999028 - DNA, 25 bp, Homo sapien
tttgggttcaaatgcagagctccct

SEQ ID NO: 999029 - DNA, 25 bp, Homo sapien
ttgggttcaaatgcagagctccctg

SEQ ID NO: 999030 - DNA, 25 bp, Homo sapien
tctttgggttcaaatgcagagctcc

SEQ ID NO: 999031 - DNA, 25 bp, Homo sapien
tggtctttgggttcaaatgcagagc

SEQ ID NO: 999032 - DNA, 25 bp, Homo sapien
tccctagtcccgcgcaatgagctca

SEQ ID NO: 999033 - DNA, 25 bp, Homo sapien
ccctagtcccgcgcaatgagctcac

SEQ ID NO: 999034 - DNA, 25 bp, Homo sapien
ctccctagtcccgcgcaatgagctc

SEQ ID NO: 999035 - DNA, 25 bp, Homo sapien
tccaaaattttctgacgattggaac

SEQ ID NO: 999036 - DNA, 25 bp, Homo sapien
tatccttcgctgtttccattcttgg

SEQ ID NO: 999037 - DNA, 25 bp, Homo sapien
gtgcacaggctgtatccttcgctgt

SEQ ID NO: 999038 - DNA, 25 bp, Homo sapien
ttttctgacgattggaactaaacat

SEQ ID NO: 999039 - DNA, 25 bp, Homo sapien
tgtctcagtcgcatgtactctgatt

SEQ ID NO: 999040 - DNA, 25 bp, Homo sapien
tactctgattttacacgcttccgcc

SEQ ID NO: 999041 - DNA, 25 bp, Homo sapien
tcatcagctcgtctgaacctcttga

SEQ ID NO: 999042 - DNA, 25 bp, Homo sapien
gattttacacgcttccgccaacaaa

SEQ ID NO: 999043 - DNA, 25 bp, Homo sapien
taatgacaagcaaaacagtacagac

SEQ ID NO: 999044 - DNA, 25 bp, Homo sapien
aacagtacagacatgttcagtacag

SEQ ID NO: 999045 - DNA, 25 bp, Homo sapien
gaactcacggatatggaaggctgac

SEQ ID NO: 999046 - DNA, 25 bp, Homo sapien
catgaattcaggatccatggatttg

SEQ ID NO: 999047 - DNA, 25 bp, Homo sapien
gtaacgtgtttagttttcactgatg

SEQ ID NO: 999048 - DNA, 25 bp, Homo sapien
caataaggcctagggtagtaacgtg

SEQ ID NO: 999049 - DNA, 25 bp, Homo sapien
tttctccttggaggtagcacccctg

SEQ ID NO: 999050 - DNA, 25 bp, Homo sapien
taatgtgggtgttattacaatttct

SEQ ID NO: 999051 - DNA, 25 bp, Homo sapien
gcaacacagtgagacgagactccgt

SEQ ID NO: 999052 - DNA, 25 bp, Homo sapien
aaaagattcttttaaggagtgtgca

SEQ ID NO: 999053 - DNA, 25 bp, Homo sapien
tgcactccagcctaggcaacacagt

SEQ ID NO: 999054 - DNA, 25 bp, Homo sapien
ttgaggtgagccaggatcatgccac

SEQ ID NO: 999055 - DNA, 25 bp, Homo sapien
ggatttgctaaatcaagggaatgac

SEQ ID NO: 999056 - DNA, 25 bp, Homo sapien
atcaagggaatgaccacctatttgg

SEQ ID NO: 999057 - DNA, 25 bp, Homo sapien
attctacctcaaggatttgctaaat

SEQ ID NO: 999058 - DNA, 25 bp, Homo sapien
agggaatgaccacctatttggtctg

SEQ ID NO: 999059 - DNA, 25 bp, Homo sapien
cagcgcccgccctgttctattattt

SEQ ID NO: 999060 - DNA, 25 bp, Homo sapien
atctgcagttgttgaatgcacagaa

SEQ ID NO: 999061 - DNA, 25 bp, Homo sapien
ccacagcgcccgccctgttctatta

SEQ ID NO: 999062 - DNA, 25 bp, Homo sapien
ctgcagttgttgaatgcacagaagc

SEQ ID NO: 999063 - DNA, 25 bp, Homo sapien
gaaatggggcctcactttgttgtcc

SEQ ID NO: 999064 - DNA, 25 bp, Homo sapien
gaccctctcacctcactctcccatg

SEQ ID NO: 999065 - DNA, 25 bp, Homo sapien
tcacctcactctcccatgcagctgg

SEQ ID NO: 999066 - DNA, 25 bp, Homo sapien
cctctcacctcactctcccatgcag

SEQ ID NO: 999067 - DNA, 25 bp, Homo sapien
tgagccatcatcgtgccactgcacc

SEQ ID NO: 999068 - DNA, 25 bp, Homo sapien
tgccactgcacctaggtgacagagt

SEQ ID NO: 999069 - DNA, 25 bp, Homo sapien
atcatcgtgccactgcacctaggtg

SEQ ID NO: 999070 - DNA, 25 bp, Homo sapien
atcgtgccactgcacctaggtgaca

SEQ ID NO: 999071 - DNA, 25 bp, Homo sapien
tccagcctggatgacacagcgagac

SEQ ID NO: 999072 - DNA, 25 bp, Homo sapien
cattccagcctggatgacacagcga

SEQ ID NO: 999073 - DNA, 25 bp, Homo sapien
actgcattccagcctggatgacaca

SEQ ID NO: 999074 - DNA, 25 bp, Homo sapien
ggctgcagtaagccaagactgcgcc

SEQ ID NO: 999075 - DNA, 25 bp, Homo sapien
gacacaaattggtagctcagggact

SEQ ID NO: 999076 - DNA, 25 bp, Homo sapien
gcttggcaggcggtatctagtctcc

SEQ ID NO: 999077 - DNA, 25 bp, Homo sapien
gaactaagtttggatcccgaatgca

SEQ ID NO: 999078 - DNA, 25 bp, Homo sapien
tggtaaacaacacccaatggaggtc

SEQ ID NO: 999079 - DNA, 25 bp, Homo sapien
ttttccaaaagatcgtgcttctcga

SEQ ID NO: 999080 - DNA, 25 bp, Homo sapien
aacacaatcaatagagagcagagca

SEQ ID NO: 999081 - DNA, 25 bp, Homo sapien
gaagtgggaattcaacaggacgccc

SEQ ID NO: 999082 - DNA, 25 bp, Homo sapien
ttcaaaaagtaaccctgtggcacag

SEQ ID NO: 999083 - DNA, 25 bp, Homo sapien
cgcgcgccgactcgcgttgttcccg

SEQ ID NO: 999084 - DNA, 25 bp, Homo sapien
actcgcgttgttcccgcgcgtcgcc

SEQ ID NO: 999085 - DNA, 25 bp, Homo sapien
gccgactcgcgttgttcccgcgcgt

SEQ ID NO: 999086 - DNA, 25 bp, Homo sapien
gtcccgcgcgccgactcgcgttgtt

SEQ ID NO: 999087 - DNA, 25 bp, Homo sapien
ggtgtcggacgcgaccggaccgagc

SEQ ID NO: 999088 - DNA, 25 bp, Homo sapien
cggaccgagcgccaaacgcggcagc

SEQ ID NO: 999089 - DNA, 25 bp, Homo sapien
gcccaatcgccatcgcttttatttg

SEQ ID NO: 999090 - DNA, 25 bp, Homo sapien
ccaaacgcggcagcccaatcgccat

SEQ ID NO: 999091 - DNA, 25 bp, Homo sapien
acacacggcgcctctcaggaaggcg

SEQ ID NO: 999092 - DNA, 25 bp, Homo sapien
tttgttctttcgctgaacacacggc

SEQ ID NO: 999093 - DNA, 25 bp, Homo sapien
tcaggaaggcggtgtgcaggcacgc

SEQ ID NO: 999094 - DNA, 25 bp, Homo sapien
ttcgctgtaagggacgccactggcc

SEQ ID NO: 999095 - DNA, 25 bp, Homo sapien
gccggcaggcagagtaccgtcgcac

SEQ ID NO: 999096 - DNA, 25 bp, Homo sapien
tatctggcctgttggcccaggtcac

SEQ ID NO: 999097 - DNA, 25 bp, Homo sapien
agagtaccgtcgcacacactcgctg

SEQ ID NO: 999098 - DNA, 25 bp, Homo sapien
ttttgtcctagacacgtgggccggc

SEQ ID NO: 999099 - DNA, 25 bp, Homo sapien
atttacgagccctagagccagccta

SEQ ID NO: 999100 - DNA, 25 bp, Homo sapien
tacgagccctagagccagcctactt

SEQ ID NO: 999101 - DNA, 25 bp, Homo sapien
catatttacgagccctagagccagc

SEQ ID NO: 999102 - DNA, 25 bp, Homo sapien
agagccagcctacttcccaagtcct

SEQ ID NO: 999103 - DNA, 25 bp, Homo sapien
catggcctgctcaatggacaaggac

SEQ ID NO: 999104 - DNA, 25 bp, Homo sapien
caaggactatgttgtcgctcagggc

SEQ ID NO: 999105 - DNA, 25 bp, Homo sapien
gactgaagtcatttagcccgttagt

SEQ ID NO: 999106 - DNA, 25 bp, Homo sapien
tagaaaagcggatctgttccaagtc

SEQ ID NO: 999107 - DNA, 25 bp, Homo sapien
caggcacgcgagtgacgggatttcc

SEQ ID NO: 999108 - DNA, 25 bp, Homo sapien
tgacacgaaacggacaagacaagct

SEQ ID NO: 999109 - DNA, 25 bp, Homo sapien
gatttcctggatcattgacccgcgg

SEQ ID NO: 999110 - DNA, 25 bp, Homo sapien
tgaaacaaagccgacaggtggtacc

SEQ ID NO: 999111 - DNA, 25 bp, Homo sapien
ttccttgactgctaaacctcgtttg

SEQ ID NO: 999112 - DNA, 25 bp, Homo sapien
tgtccagctgagtctatcccttctg

SEQ ID NO: 999113 - DNA, 25 bp, Homo sapien
gacagatccttgctgttccacagtt

SEQ ID NO: 999114 - DNA, 25 bp, Homo sapien
ttccacagtttcatgggactggacc

SEQ ID NO: 999115 - DNA, 25 bp, Homo sapien
agctggtgcgtcaggcatgaagcag

SEQ ID NO: 999116 - DNA, 25 bp, Homo sapien
tggtgcgtcaggcatgaagcagcag

SEQ ID NO: 999117 - DNA, 25 bp, Homo sapien
ctggtgcgtcaggcatgaagcagca

SEQ ID NO: 999118 - DNA, 25 bp, Homo sapien
ggagctggtgcgtcaggcatgaagc

SEQ ID NO: 999119 - DNA, 25 bp, Homo sapien
gatggccccggtgtccaactgcctt

SEQ ID NO: 999120 - DNA, 25 bp, Homo sapien
ttctggtgccacgtcccaggctgat

SEQ ID NO: 999121 - DNA, 25 bp, Homo sapien
tctggtgccacgtcccaggctgatg

SEQ ID NO: 999122 - DNA, 25 bp, Homo sapien
ctgcttgggatctactgggatcgga

SEQ ID NO: 999123 - DNA, 25 bp, Homo sapien
taagatgaagtgtcccattaacagc

SEQ ID NO: 999124 - DNA, 25 bp, Homo sapien
aaaatcggagattagaggatgtgga

SEQ ID NO: 999125 - DNA, 25 bp, Homo sapien
ctactgggatcggacagcagaaagg

SEQ ID NO: 999126 - DNA, 25 bp, Homo sapien
gcaacctccactctccgagttcaag

SEQ ID NO: 999127 - DNA, 25 bp, Homo sapien
cctccactctccgagttcaagcgat

SEQ ID NO: 999128 - DNA, 25 bp, Homo sapien
tgccaccgctcccggctaacttttg

SEQ ID NO: 999129 - DNA, 25 bp, Homo sapien
ataggcgcctgccaccgctcccggc

SEQ ID NO: 999130 - DNA, 25 bp, Homo sapien
ggtccgtagtatctattactattta

SEQ ID NO: 999131 - DNA, 25 bp, Homo sapien
atctttaccaataattggtccgtag

SEQ ID NO: 999132 - DNA, 25 bp, Homo sapien
tgtctgtgatgggttttcccaaatt

SEQ ID NO: 999133 - DNA, 25 bp, Homo sapien
taccaataattggtccgtagtatct

SEQ ID NO: 999134 - DNA, 25 bp, Homo sapien
ggtggtcccatagcccttgtggtca

SEQ ID NO: 999135 - DNA, 25 bp, Homo sapien
agggtggtcccatagcccttgtggt

SEQ ID NO: 999136 - DNA, 25 bp, Homo sapien
tggtcccatagcccttgtggtcagc

SEQ ID NO: 999137 - DNA, 25 bp, Homo sapien
ggtcccatagcccttgtggtcagcc

SEQ ID NO: 999138 - DNA, 25 bp, Homo sapien
aactcgtggatctgtgggatgtgta

SEQ ID NO: 999139 - DNA, 25 bp, Homo sapien
ccttgaagtcaaaggtcctatccat

SEQ ID NO: 999140 - DNA, 25 bp, Homo sapien
tgttaggagagctgatcattcggga

SEQ ID NO: 999141 - DNA, 25 bp, Homo sapien
cattcgggaactcgtggatctgtgg

SEQ ID NO: 999142 - DNA, 25 bp, Homo sapien
gaggctcttcacccaagaaccccac

SEQ ID NO: 999143 - DNA, 25 bp, Homo sapien
aggctcttcacccaagaaccccacg

SEQ ID NO: 999144 - DNA, 25 bp, Homo sapien
gctcttcacccaagaaccccacgga

SEQ ID NO: 999145 - DNA, 25 bp, Homo sapien
agaggctcttcacccaagaacccca

SEQ ID NO: 999146 - DNA, 25 bp, Homo sapien
agctctcactttgtgctcaacagga

SEQ ID NO: 999147 - DNA, 25 bp, Homo sapien
gggaccctggatcatgcccctttgc

SEQ ID NO: 999148 - DNA, 25 bp, Homo sapien
gagatactgtcgtttgttgccggcc

SEQ ID NO: 999149 - DNA, 25 bp, Homo sapien
ccagcccttggtttgcagggaggcc

SEQ ID NO: 999150 - DNA, 25 bp, Homo sapien
tgtacacgggctctagctgcttgca

SEQ ID NO: 999151 - DNA, 25 bp, Homo sapien
gcaccatggcgcgtagaactcgatg

SEQ ID NO: 999152 - DNA, 25 bp, Homo sapien
cgtcgttggcagtggcgtccatctt

SEQ ID NO: 999153 - DNA, 25 bp, Homo sapien
gaagccctccaccttatagcggtcg

SEQ ID NO: 999154 - DNA, 25 bp, Homo sapien
gtctggattccgcacgaggagcaca

SEQ ID NO: 999155 - DNA, 25 bp, Homo sapien
cctggcctgtctggattccgcacga

SEQ ID NO: 999156 - DNA, 25 bp, Homo sapien
ccgacatttctctggacgagaagtc

SEQ ID NO: 999157 - DNA, 25 bp, Homo sapien
tctctggacgagaagtcagagtccc

SEQ ID NO: 999158 - DNA, 25 bp, Homo sapien
cactctcgtccaggatggcggcatt

SEQ ID NO: 999159 - DNA, 25 bp, Homo sapien
tcttcgtccgcaatggcaaaggtgt

SEQ ID NO: 999160 - DNA, 25 bp, Homo sapien
actttgctccgccaaaactgagttg

SEQ ID NO: 999161 - DNA, 25 bp, Homo sapien
gaaagcagtgacaaactcgcggagg

SEQ ID NO: 999162 - DNA, 25 bp, Homo sapien
tgacaccttgcggtggccaaccagg

SEQ ID NO: 999163 - DNA, 25 bp, Homo sapien
ggcgcctggtgtagcgcttagcatc

SEQ ID NO: 999164 - DNA, 25 bp, Homo sapien
ggcagggcgtacttcagcacgaagt

SEQ ID NO: 999165 - DNA, 25 bp, Homo sapien
tccacactgtagtagacgaccacca

SEQ ID NO: 999166 - DNA, 25 bp, Homo sapien
cttgagtacaatgtttgagggactt

SEQ ID NO: 999167 - DNA, 25 bp, Homo sapien
ctttccctccagtgaaccgtaggtg

SEQ ID NO: 999168 - DNA, 25 bp, Homo sapien
cagtcattccctaccgtcttttggg

SEQ ID NO: 999169 - DNA, 25 bp, Homo sapien
gatcagtcttaggaggcaaaacacc

SEQ ID NO: 999170 - DNA, 25 bp, Homo sapien
tgacatggcgctgcgtgcacttcac

SEQ ID NO: 999171 - DNA, 25 bp, Homo sapien
caaacaggatctggcgtgacagcac

SEQ ID NO: 999172 - DNA, 25 bp, Homo sapien
gcaggaggccgtggagtctttaacc

SEQ ID NO: 999173 - DNA, 25 bp, Homo sapien
catgctaaggcacagataatccaac

SEQ ID NO: 999174 - DNA, 25 bp, Homo sapien
gctcatacttggactggaatttctc

SEQ ID NO: 999175 - DNA, 25 bp, Homo sapien
catcatgtggctccggggctcatac

SEQ ID NO: 999176 - DNA, 25 bp, Homo sapien
aagtgtggtgaaatttgtaatcttc

SEQ ID NO: 999177 - DNA, 25 bp, Homo sapien
cctgggagactttcaagaactttgc

SEQ ID NO: 999178 - DNA, 25 bp, Homo sapien
gcatcctggtattgctggtaggctg

SEQ ID NO: 999179 - DNA, 25 bp, Homo sapien
gtctccatccttcaggaactcctgg

SEQ ID NO: 999180 - DNA, 25 bp, Homo sapien
agggaggcccggactgctcgatcat

SEQ ID NO: 999181 - DNA, 25 bp, Homo sapien
tgacatcgtctccatccttcaggaa

SEQ ID NO: 999182 - DNA, 25 bp, Homo sapien
gactgctcgatcatgtaatcaacga

SEQ ID NO: 999183 - DNA, 25 bp, Homo sapien
tctcgtgggccgttgtagtcataag

SEQ ID NO: 999184 - DNA, 25 bp, Homo sapien
aattggaggagaacgcttgctgagc

SEQ ID NO: 999185 - DNA, 25 bp, Homo sapien
ccaggtctgtttctgcggtggcgtc

SEQ ID NO: 999186 - DNA, 25 bp, Homo sapien
tagtcataaggccttcctttgcgga

SEQ ID NO: 999187 - DNA, 25 bp, Homo sapien
ctcaggtttgggcttatccaggcat

SEQ ID NO: 999188 - DNA, 25 bp, Homo sapien
gcaactcccaggtttctgctgcaga

SEQ ID NO: 999189 - DNA, 25 bp, Homo sapien
ttttcatctgcacatccagcaactc

SEQ ID NO: 999190 - DNA, 25 bp, Homo sapien
aggtttgggcttatccaggcattgc

SEQ ID NO: 999191 - DNA, 25 bp, Homo sapien
aagttctctttggtcaacacaagcg

SEQ ID NO: 999192 - DNA, 25 bp, Homo sapien
cagtcgggctgggagacttctctga

SEQ ID NO: 999193 - DNA, 25 bp, Homo sapien
aacacaagcgtgacttctggtggag

SEQ ID NO: 999194 - DNA, 25 bp, Homo sapien
gggcataaaactccaccagaatgat

SEQ ID NO: 999195 - DNA, 25 bp, Homo sapien
cctgggagacagaggaagactccat

SEQ ID NO: 999196 - DNA, 25 bp, Homo sapien
gccaagattgcaccactgcacactc

SEQ ID NO: 999197 - DNA, 25 bp, Homo sapien
cagcctgggagacagaggaagactc

SEQ ID NO: 999198 - DNA, 25 bp, Homo sapien
cccggaggtggaggctgttcggtga

SEQ ID NO: 999199 - DNA, 25 bp, Homo sapien
ctgagattgcgccatcgtactgcag

SEQ ID NO: 999200 - DNA, 25 bp, Homo sapien
cagcctgggccacagaagcaaaact

SEQ ID NO: 999201 - DNA, 25 bp, Homo sapien
gcctgggccacagaagcaaaactcc

SEQ ID NO: 999202 - DNA, 25 bp, Homo sapien
ctgggccacagaagcaaaactccgt

SEQ ID NO: 999203 - DNA, 25 bp, Homo sapien
tgcgggaaggagttcttcctctacg

SEQ ID NO: 999204 - DNA, 25 bp, Homo sapien
tctacgagctcaggtaccagctcac

SEQ ID NO: 999205 - DNA, 25 bp, Homo sapien
tcttcctctattagccaaattccca

SEQ ID NO: 999206 - DNA, 25 bp, Homo sapien
caaattcccattccctgcgggaagg

SEQ ID NO: 999207 - DNA, 25 bp, Homo sapien
gggttctggagccctcgtagtctac

SEQ ID NO: 999208 - DNA, 25 bp, Homo sapien
tcctgggttctggagccctcgtagt

SEQ ID NO: 999209 - DNA, 25 bp, Homo sapien
cttcctgggttctggagccctcgta

SEQ ID NO: 999210 - DNA, 25 bp, Homo sapien
ctgggttctggagccctcgtagtct

SEQ ID NO: 999211 - DNA, 25 bp, Homo sapien
caacaggaatgggaggatctttatc

SEQ ID NO: 999212 - DNA, 25 bp, Homo sapien
catattccggagcaaactgcttgca

SEQ ID NO: 999213 - DNA, 25 bp, Homo sapien
tctttatcctttaatatgttggcaa

SEQ ID NO: 999214 - DNA, 25 bp, Homo sapien
gacgctgaggttgcatcgatcttgg

SEQ ID NO: 999215 - DNA, 25 bp, Homo sapien
caaagtttgcatcatttaggaccaa

SEQ ID NO: 999216 - DNA, 25 bp, Homo sapien
cttcctcatcatcatcttcctcctc

SEQ ID NO: 999217 - DNA, 25 bp, Homo sapien
tcttcctcatcatcatcttcctcct

SEQ ID NO: 999218 - DNA, 25 bp, Homo sapien
ttcttcctcatcatcatcttcctcc

SEQ ID NO: 999219 - DNA, 25 bp, Homo sapien
ctcaatggcattttctctgttagaa

SEQ ID NO: 999220 - DNA, 25 bp, Homo sapien
caatggcattttctctgttagaaga

SEQ ID NO: 999221 - DNA, 25 bp, Homo sapien
atggcattttctctgttagaagaat

SEQ ID NO: 999222 - DNA, 25 bp, Homo sapien
tcaatggcattttctctgttagaag

SEQ ID NO: 999223 - DNA, 25 bp, Homo sapien
cacagcaagcacggcaatttcatta

SEQ ID NO: 999224 - DNA, 25 bp, Homo sapien
caagcacggcaatttcattaacgct

SEQ ID NO: 999225 - DNA, 25 bp, Homo sapien
gccagaatgtttccggggccaatta

SEQ ID NO: 999226 - DNA, 25 bp, Homo sapien
tttcattaacgctgaagccagaatg

SEQ ID NO: 999227 - DNA, 25 bp, Homo sapien
aacttaatcaactcttccaggtagg

SEQ ID NO: 999228 - DNA, 25 bp, Homo sapien
ggctcggtgcacagcataagactga

SEQ ID NO: 999229 - DNA, 25 bp, Homo sapien
gaagggaaactaattggctcggtgc

SEQ ID NO: 999230 - DNA, 25 bp, Homo sapien
taagactgacgtttgcagcgaagag

SEQ ID NO: 999231 - DNA, 25 bp, Homo sapien
tagctctagccttctatctaccaga

SEQ ID NO: 999232 - DNA, 25 bp, Homo sapien
ggaaggtgctagctctagccttcta

SEQ ID NO: 999233 - DNA, 25 bp, Homo sapien
caatttgggaaggtgctagctctag

SEQ ID NO: 999234 - DNA, 25 bp, Homo sapien
agacaagccaggattgattcctctg

SEQ ID NO: 999235 - DNA, 25 bp, Homo sapien
agcaggttgcctcaatccctgtcca

SEQ ID NO: 999236 - DNA, 25 bp, Homo sapien
tgaaaagatgcaaccttcctcagca

SEQ ID NO: 999237 - DNA, 25 bp, Homo sapien
cattgctcagcccacatgctaaggc

SEQ ID NO: 999238 - DNA, 25 bp, Homo sapien
cctgagcaggttgcctcaatccctg

SEQ ID NO: 999239 - DNA, 25 bp, Homo sapien
tctgcagctagctcacttcgaagaa

SEQ ID NO: 999240 - DNA, 25 bp, Homo sapien
tagcacttcctaatcttcagagttc

SEQ ID NO: 999241 - DNA, 25 bp, Homo sapien
tagttgttactattcctactggagt

SEQ ID NO: 999242 - DNA, 25 bp, Homo sapien
cctactggagtacgcgcttcatggg

SEQ ID NO: 999243 - DNA, 25 bp, Homo sapien
gaactcgcacttgtttcttcacgcc

SEQ ID NO: 999244 - DNA, 25 bp, Homo sapien
gagttagcctggacctgacgaaaat

SEQ ID NO: 999245 - DNA, 25 bp, Homo sapien
tgttccaaagaactcgcacttgttt

SEQ ID NO: 999246 - DNA, 25 bp, Homo sapien
cactgcctgggcgcgttcgcctgga

SEQ ID NO: 999247 - DNA, 25 bp, Homo sapien
gcaggaaggctttccggggcctcat

SEQ ID NO: 999248 - DNA, 25 bp, Homo sapien
tcgtccgggccctcggcacccgcca

SEQ ID NO: 999249 - DNA, 25 bp, Homo sapien
gcaggagcaggaaggctttccgggg

SEQ ID NO: 999250 - DNA, 25 bp, Homo sapien
agctgcaccagccccaagagcagca

SEQ ID NO: 999251 - DNA, 25 bp, Homo sapien
ccgctgagcgcaccgagaactcggg

SEQ ID NO: 999252 - DNA, 25 bp, Homo sapien
aatcccagactgacgccggcacgga

SEQ ID NO: 999253 - DNA, 25 bp, Homo sapien
cacggaagtcgtccccggcgattgg

SEQ ID NO: 999254 - DNA, 25 bp, Homo sapien
agaactcggggtctggccgacagcc

SEQ ID NO: 999255 - DNA, 25 bp, Homo sapien
tagaacgattgtcaaaacgtgaagg

SEQ ID NO: 999256 - DNA, 25 bp, Homo sapien
gagggtaatggagcctcaggcaatt

SEQ ID NO: 999257 - DNA, 25 bp, Homo sapien
gacagctgaatacagcaggcgactc

SEQ ID NO: 999258 - DNA, 25 bp, Homo sapien
ctaaactggctccttttgcgaaaag

SEQ ID NO: 999259 - DNA, 25 bp, Homo sapien
tctagatatttgctgagggctgaaa

SEQ ID NO: 999260 - DNA, 25 bp, Homo sapien
aacaagcaagctgttaatgcctgaa

SEQ ID NO: 999261 - DNA, 25 bp, Homo sapien
catattagtatgtacatggtcaggt

SEQ ID NO: 999262 - DNA, 25 bp, Homo sapien
cagactgaccagtttcaggataagg

SEQ ID NO: 999263 - DNA, 25 bp, Homo sapien
catctgcagacttccataattggta

SEQ ID NO: 999264 - DNA, 25 bp, Homo sapien
ttgtaactggagaaacacaatctga

SEQ ID NO: 999265 - DNA, 25 bp, Homo sapien
ggacatagttctgtaagcacctagc

SEQ ID NO: 999266 - DNA, 25 bp, Homo sapien
tatagtactgcgtgataaagtacac

SEQ ID NO: 999267 - DNA, 25 bp, Homo sapien
tcacatgtgccctttatgggaatcc

SEQ ID NO: 999268 - DNA, 25 bp, Homo sapien
catgtgccctttatgggaatccttt

SEQ ID NO: 999269 - DNA, 25 bp, Homo sapien
tgtgccctttatgggaatccttttc

SEQ ID NO: 999270 - DNA, 25 bp, Homo sapien
cacatgtgccctttatgggaatcct

SEQ ID NO: 999271 - DNA, 25 bp, Homo sapien
atcaatgggtgcgtgcgggactcct

SEQ ID NO: 999272 - DNA, 25 bp, Homo sapien
acaagctgcgcttagggaagcaggc

SEQ ID NO: 999273 - DNA, 25 bp, Homo sapien
tggactgagtaaaatcaatgggtgc

SEQ ID NO: 999274 - DNA, 25 bp, Homo sapien
agcaggcactctccggaaactctgg

SEQ ID NO: 999275 - DNA, 25 bp, Homo sapien
cggcggccgttgcccagggcacagg

SEQ ID NO: 999276 - DNA, 25 bp, Homo sapien
accccgggatctcgctcggcggcgg

SEQ ID NO: 999277 - DNA, 25 bp, Homo sapien
cgaccccgggatctcgctcggcggc

SEQ ID NO: 999278 - DNA, 25 bp, Homo sapien
gcggccgttgcccagggcacaggca

SEQ ID NO: 999279 - DNA, 25 bp, Homo sapien
cattgtacaggtgattcactactcc

SEQ ID NO: 999280 - DNA, 25 bp, Homo sapien
tgccattgtacaggtgattcactac

SEQ ID NO: 999281 - DNA, 25 bp, Homo sapien
ttgtacaggtgattcactactccac

SEQ ID NO: 999282 - DNA, 25 bp, Homo sapien
acagtgccattgtacaggtgattca

SEQ ID NO: 999283 - DNA, 25 bp, Homo sapien
tactcacaatgacggttttcaacat

SEQ ID NO: 999284 - DNA, 25 bp, Homo sapien
ctactcacaatgacggttttcaaca

SEQ ID NO: 999285 - DNA, 25 bp, Homo sapien
taagaatgagaattcggcagccagg

SEQ ID NO: 999286 - DNA, 25 bp, Homo sapien
tctcccgacccactagaaatgtcag

SEQ ID NO: 999287 - DNA, 25 bp, Homo sapien
caggtgatggttcagcaattaacaa

SEQ ID NO: 999288 - DNA, 25 bp, Homo sapien
tagttaggcatcaacagggcagcag

SEQ ID NO: 999289 - DNA, 25 bp, Homo sapien
gtcatactatgtcatccatactgga

SEQ ID NO: 999290 - DNA, 25 bp, Homo sapien
agacagtgtcatactatgtcatcca

SEQ ID NO: 999291 - DNA, 25 bp, Homo sapien
cagtgtcatactatgtcatccatac

SEQ ID NO: 999292 - DNA, 25 bp, Homo sapien
gtgtcatactatgtcatccatactg

SEQ ID NO: 999293 - DNA, 25 bp, Homo sapien
gatacctgctcctaaaacccgtcta

SEQ ID NO: 999294 - DNA, 25 bp, Homo sapien
taccagcgggtctggctactgttgc

SEQ ID NO: 999295 - DNA, 25 bp, Homo sapien
tcttgctcaaagaaggatacctgct

SEQ ID NO: 999296 - DNA, 25 bp, Homo sapien
gattcctgggcaataccaatcctgc

SEQ ID NO: 999297 - DNA, 25 bp, Homo sapien
cacttgggacactgaaaaggcttct

SEQ ID NO: 999298 - DNA, 25 bp, Homo sapien
cacactctgggcactgaaagggctt

SEQ ID NO: 999299 - DNA, 25 bp, Homo sapien
gattgtctggtgaagcccttgccac

SEQ ID NO: 999300 - DNA, 25 bp, Homo sapien
tgtgtactctgatgtgctccgcaag

SEQ ID NO: 999301 - DNA, 25 bp, Homo sapien
ctctccccaccgtgcgcgtgctggt

SEQ ID NO: 999302 - DNA, 25 bp, Homo sapien
agcgcttggtgcaatgcgcacactg

SEQ ID NO: 999303 - DNA, 25 bp, Homo sapien
agaacggtctctccccaccgtgcgc

SEQ ID NO: 999304 - DNA, 25 bp, Homo sapien
caggcggaagcgcttggtgcaatgc

SEQ ID NO: 999305 - DNA, 25 bp, Homo sapien
ggtttctgtcccgagtgcacactgc

SEQ ID NO: 999306 - DNA, 25 bp, Homo sapien
ggaagcacatttcaccgtcagcgtt

SEQ ID NO: 999307 - DNA, 25 bp, Homo sapien
tgggtcagctcgtgtcggaagcaca

SEQ ID NO: 999308 - DNA, 25 bp, Homo sapien
gaatttctcccaggccctacgtgtc

SEQ ID NO: 999309 - DNA, 25 bp, Homo sapien
ctcccaacagctttccccgcagaca

SEQ ID NO: 999310 - DNA, 25 bp, Homo sapien
ctttccccgcagacaggccaagggt

SEQ ID NO: 999311 - DNA, 25 bp, Homo sapien
tcccaacagctttccccgcagacag

SEQ ID NO: 999312 - DNA, 25 bp, Homo sapien
gctcccgagggtgatgccttggtca

SEQ ID NO: 999313 - DNA, 25 bp, Homo sapien
ttcctgaattcatagcctgctggct

SEQ ID NO: 999314 - DNA, 25 bp, Homo sapien
gaagatccagatttctgggacctgg

SEQ ID NO: 999315 - DNA, 25 bp, Homo sapien
cactggctttcaggatctaattgga

SEQ ID NO: 999316 - DNA, 25 bp, Homo sapien
tgcatatcaacagaggagcaaatta

SEQ ID NO: 999317 - DNA, 25 bp, Homo sapien
ccaggatattagttctggttttgga

SEQ ID NO: 999318 - DNA, 25 bp, Homo sapien
gctgttcctcaaaacctggatcaaa

SEQ ID NO: 999319 - DNA, 25 bp, Homo sapien
ccccgtgttcaatccaggatattag

SEQ ID NO: 999320 - DNA, 25 bp, Homo sapien
tgagtaaagattaacaatgttgaca

SEQ ID NO: 999321 - DNA, 25 bp, Homo sapien
gtaacaatgtctacccttgagtaaa

SEQ ID NO: 999322 - DNA, 25 bp, Homo sapien
tgtctacccttgagtaaagattaac

SEQ ID NO: 999323 - DNA, 25 bp, Homo sapien
gacaaaagtattaacaatagattgc

SEQ ID NO: 999324 - DNA, 25 bp, Homo sapien
tgaccccttacaggatccagttcca

SEQ ID NO: 999325 - DNA, 25 bp, Homo sapien
ttccatgacctacccacaaaggtga

SEQ ID NO: 999326 - DNA, 25 bp, Homo sapien
gcatcaagtgactgtgaccccttac

SEQ ID NO: 999327 - DNA, 25 bp, Homo sapien
gactgtgaccccttacaggatccag

SEQ ID NO: 999328 - DNA, 25 bp, Homo sapien
gccattcttgctcggagaaataaat

SEQ ID NO: 999329 - DNA, 25 bp, Homo sapien
cttctgccatgcctctagatcctgc

SEQ ID NO: 999330 - DNA, 25 bp, Homo sapien
tagagagacgagagtctcataattg

SEQ ID NO: 999331 - DNA, 25 bp, Homo sapien
tctcataattgcttctcatcacatg

SEQ ID NO: 999332 - DNA, 25 bp, Homo sapien
aagtgttctcatgcgctttctaggt

SEQ ID NO: 999333 - DNA, 25 bp, Homo sapien
aaaaaagtgttctcatgcgctttct

SEQ ID NO: 999334 - DNA, 25 bp, Homo sapien
cgctttctaggtattagtgctttta

SEQ ID NO: 999335 - DNA, 25 bp, Homo sapien
ttctaggtattagtgcttttacttc

SEQ ID NO: 999336 - DNA, 25 bp, Homo sapien
gggcgtccaaacaggctagcccgct

SEQ ID NO: 999337 - DNA, 25 bp, Homo sapien
ccgggcgtccaaacaggctagcccg

SEQ ID NO: 999338 - DNA, 25 bp, Homo sapien
ggcgtccaaacaggctagcccgctt

SEQ ID NO: 999339 - DNA, 25 bp, Homo sapien
cgtccaaacaggctagcccgcttac

SEQ ID NO: 999340 - DNA, 25 bp, Homo sapien
gctgcctgagcgtcggtcctcagag

SEQ ID NO: 999341 - DNA, 25 bp, Homo sapien
gccgggcgcggtgcatgctgggacc

SEQ ID NO: 999342 - DNA, 25 bp, Homo sapien
gcggctgccgctcagtcctacagcg

SEQ ID NO: 999343 - DNA, 25 bp, Homo sapien
gcagcacgccggtctttgagggacc

SEQ ID NO: 999344 - DNA, 25 bp, Homo sapien
tgaaagccgactgcgtgactgctgc

SEQ ID NO: 999345 - DNA, 25 bp, Homo sapien
tgtgcccgatcttaccctgtgaatc

SEQ ID NO: 999346 - DNA, 25 bp, Homo sapien
tcaacttgagccaacagagctgctg

SEQ ID NO: 999347 - DNA, 25 bp, Homo sapien
cactgaagagatcgttggactagca

SEQ ID NO: 999348 - DNA, 25 bp, Homo sapien
tctttggcatgcactgcaatgtggg

SEQ ID NO: 999349 - DNA, 25 bp, Homo sapien
cttctctttggcatgcactgcaatg

SEQ ID NO: 999350 - DNA, 25 bp, Homo sapien
ggcatgcactgcaatgtgggtcttg

SEQ ID NO: 999351 - DNA, 25 bp, Homo sapien
gcactgcaatgtgggtcttgagcgc

SEQ ID NO: 999352 - DNA, 25 bp, Homo sapien
tctctccactgtgcttatacaagtg

SEQ ID NO: 999353 - DNA, 25 bp, Homo sapien
gaccttcaagctgcccctgatgcag

SEQ ID NO: 999354 - DNA, 25 bp, Homo sapien
gtgcttatacaagtggaccttcaag

SEQ ID NO: 999355 - DNA, 25 bp, Homo sapien
cacagatgggccttcaggcttctct

SEQ ID NO: 999356 - DNA, 25 bp, Homo sapien
tcccttgaggcggaaagtcttctcg

SEQ ID NO: 999357 - DNA, 25 bp, Homo sapien
tgagccgcgactgctgagaaaaggt

SEQ ID NO: 999358 - DNA, 25 bp, Homo sapien
tcgcattcaggacactggtagggct

SEQ ID NO: 999359 - DNA, 25 bp, Homo sapien
ggtctttttgcactcgccgcaggga

SEQ ID NO: 999360 - DNA, 25 bp, Homo sapien
actctggtgtggcaggcgagcttgg

SEQ ID NO: 999361 - DNA, 25 bp, Homo sapien
catggcgttcctccagaagaagccc

SEQ ID NO: 999362 - DNA, 25 bp, Homo sapien
aggcgagcttggaaggccgcgtgaa

SEQ ID NO: 999363 - DNA, 25 bp, Homo sapien
ttttgctcgctgtgcaggcgctggt

SEQ ID NO: 999364 - DNA, 25 bp, Homo sapien
tcaggcttctcttgaggcggaaact

SEQ ID NO: 999365 - DNA, 25 bp, Homo sapien
tcatgcccctcttcaggcggaagca

SEQ ID NO: 999366 - DNA, 25 bp, Homo sapien
agaaaacggcttttcctcgctgtgc

SEQ ID NO: 999367 - DNA, 25 bp, Homo sapien
tgaactctgatgtgctcgtccagct

SEQ ID NO: 999368 - DNA, 25 bp, Homo sapien
tagcaaatccctccttacttggaag

SEQ ID NO: 999369 - DNA, 25 bp, Homo sapien
gaagactttcctacagacatagcag

SEQ ID NO: 999370 - DNA, 25 bp, Homo sapien
tccccgcggtgtagacacaggtgct

SEQ ID NO: 999371 - DNA, 25 bp, Homo sapien
cctgatgagtgacgaggctgccctt

SEQ ID NO: 999372 - DNA, 25 bp, Homo sapien
ggtctcccgaggcttatgccgcagg

SEQ ID NO: 999373 - DNA, 25 bp, Homo sapien
gccctggggtctcccgaggcttatg

SEQ ID NO: 999374 - DNA, 25 bp, Homo sapien
cccgaggcttatgccgcaggtcttt

SEQ ID NO: 999375 - DNA, 25 bp, Homo sapien
ggcttatgccgcaggtctttcttgt

SEQ ID NO: 999376 - DNA, 25 bp, Homo sapien
cagcacacaagtcctgtttttgagg

SEQ ID NO: 999377 - DNA, 25 bp, Homo sapien
tttccctcgtaaggcagcacacaag

SEQ ID NO: 999378 - DNA, 25 bp, Homo sapien
tgaggaccatttaaacggcaatcct

SEQ ID NO: 999379 - DNA, 25 bp, Homo sapien
ttctctctttccctcgtaaggcagc

SEQ ID NO: 999380 - DNA, 25 bp, Homo sapien
ggagcagaaagaagtatcactctca

SEQ ID NO: 999381 - DNA, 25 bp, Homo sapien
gagcagaaagaagtatcactctcat

SEQ ID NO: 999382 - DNA, 25 bp, Homo sapien
tggagcagaaagaagtatcactctc

SEQ ID NO: 999383 - DNA, 25 bp, Homo sapien
ctggagcagaaagaagtatcactct

SEQ ID NO: 999384 - DNA, 25 bp, Homo sapien
aaataattcatgatcttaaatccat

SEQ ID NO: 999385 - DNA, 25 bp, Homo sapien
tttttattgactagatctagtcaga

SEQ ID NO: 999386 - DNA, 25 bp, Homo sapien
gatatccaaaaagaaagattcagga

SEQ ID NO: 999387 - DNA, 25 bp, Homo sapien
gatctagtcagatatccaaaaagaa

SEQ ID NO: 999388 - DNA, 25 bp, Homo sapien
tcatcagtaggagggctagttgtcc

SEQ ID NO: 999389 - DNA, 25 bp, Homo sapien
gctgattaatagcattctcccttgt

SEQ ID NO: 999390 - DNA, 25 bp, Homo sapien
tcttcatgttcaactgttcatcagt

SEQ ID NO: 999391 - DNA, 25 bp, Homo sapien
tttatctaagcatccctgttcgctg

SEQ ID NO: 999392 - DNA, 25 bp, Homo sapien
gcaaatagagtccacacagactttg

SEQ ID NO: 999393 - DNA, 25 bp, Homo sapien
tgcaaatagagtccacacagacttt

SEQ ID NO: 999394 - DNA, 25 bp, Homo sapien
ctgcaaatagagtccacacagactt

SEQ ID NO: 999395 - DNA, 25 bp, Homo sapien
aaatcattttcatagttgacttcga

SEQ ID NO: 999396 - DNA, 25 bp, Homo sapien
aatcattttcatagttgacttcgat

SEQ ID NO: 999397 - DNA, 25 bp, Homo sapien
tcattttcatagttgacttcgattc

SEQ ID NO: 999398 - DNA, 25 bp, Homo sapien
atcattttcatagttgacttcgatt

SEQ ID NO: 999399 - DNA, 25 bp, Homo sapien
ctagagacgttgagatcaaagttaa

SEQ ID NO: 999400 - DNA, 25 bp, Homo sapien
cttaccaagactttagttcaggcca

SEQ ID NO: 999401 - DNA, 25 bp, Homo sapien
gaaagccgttgaaatgacatgaatg

SEQ ID NO: 999402 - DNA, 25 bp, Homo sapien
aaaatgaaagccgttgaaatgacat

SEQ ID NO: 999403 - DNA, 25 bp, Homo sapien
gggtctcgtaattggtcttcatctc

SEQ ID NO: 999404 - DNA, 25 bp, Homo sapien
agggaatcaagggtctcgtaattgg

SEQ ID NO: 999405 - DNA, 25 bp, Homo sapien
tcaagggtctcgtaattggtcttca

SEQ ID NO: 999406 - DNA, 25 bp, Homo sapien
gaatcaagggtctcgtaattggtct

SEQ ID NO: 999407 - DNA, 25 bp, Homo sapien
tcctaccagcaatctataagacagc

SEQ ID NO: 999408 - DNA, 25 bp, Homo sapien
gcatttcttagcaccatcgccagca

SEQ ID NO: 999409 - DNA, 25 bp, Homo sapien
cattatgcctggtcgccatttcaca

SEQ ID NO: 999410 - DNA, 25 bp, Homo sapien
tgtatagtgatctctaactgtggct

SEQ ID NO: 999411 - DNA, 25 bp, Homo sapien
tcccaatcacttaaagaggagagaa

SEQ ID NO: 999412 - DNA, 25 bp, Homo sapien
tggattaagcctcaggatacgcctt

SEQ ID NO: 999413 - DNA, 25 bp, Homo sapien
tttcaaactctaaaaccggtgctca

SEQ ID NO: 999414 - DNA, 25 bp, Homo sapien
gaatattccaggagattcccaatca

SEQ ID NO: 999415 - DNA, 25 bp, Homo sapien
agccttccgagtggccggggccaca

SEQ ID NO: 999416 - DNA, 25 bp, Homo sapien
cggacctagcgcatatacagcgcag

SEQ ID NO: 999417 - DNA, 25 bp, Homo sapien
gaactcagaggcaccgcgcgacgga

SEQ ID NO: 999418 - DNA, 25 bp, Homo sapien
cactggggttttgccctgctcggtt

SEQ ID NO: 999419 - DNA, 25 bp, Homo sapien
gtgggccactgccaacccccaggcc

SEQ ID NO: 999420 - DNA, 25 bp, Homo sapien
ggagctcagtccgtgggccactgcc

SEQ ID NO: 999421 - DNA, 25 bp, Homo sapien
tccctggacgcggaccccaatccag

SEQ ID NO: 999422 - DNA, 25 bp, Homo sapien
agctcagtccgtgggccactgccaa

SEQ ID NO: 999423 - DNA, 25 bp, Homo sapien
ccaactcccaggtacagccctgctg

SEQ ID NO: 999424 - DNA, 25 bp, Homo sapien
aacccaactcccaggtacagccctg

SEQ ID NO: 999425 - DNA, 25 bp, Homo sapien
agccggctcggccatggcggttccg

SEQ ID NO: 999426 - DNA, 25 bp, Homo sapien
gccatggcggttccgcacgaaccgg

SEQ ID NO: 999427 - DNA, 25 bp, Homo sapien
tgtccccagaaaatcaacctcgcat

SEQ ID NO: 999428 - DNA, 25 bp, Homo sapien
cacgaagacgcaaaaacgggagagg

SEQ ID NO: 999429 - DNA, 25 bp, Homo sapien
ggccatgacacagggcgtgagaaac

SEQ ID NO: 999430 - DNA, 25 bp, Homo sapien
gggactcagggtcgcccagggatgc

SEQ ID NO: 999431 - DNA, 25 bp, Homo sapien
tccggtgaaacagttgagttcaacc

SEQ ID NO: 999432 - DNA, 25 bp, Homo sapien
aagcattaatcaggctgcacttcgg

SEQ ID NO: 999433 - DNA, 25 bp, Homo sapien
tttttcagaccacgagttccggtga

SEQ ID NO: 999434 - DNA, 25 bp, Homo sapien
gactaagaattgatttgcatccctg

SEQ ID NO: 999435 - DNA, 25 bp, Homo sapien
tgcggctccctccaggtattaaggg

SEQ ID NO: 999436 - DNA, 25 bp, Homo sapien
ccctccaggtattaagggagatatc

SEQ ID NO: 999437 - DNA, 25 bp, Homo sapien
tggatcctgcggctccctccaggta

SEQ ID NO: 999438 - DNA, 25 bp, Homo sapien
tccaggtattaagggagatatccca

SEQ ID NO: 999439 - DNA, 25 bp, Homo sapien
gaagggcaactacgagtctctcatc

SEQ ID NO: 999440 - DNA, 25 bp, Homo sapien
gcaaaaggaactttacaagaatatc

SEQ ID NO: 999441 - DNA, 25 bp, Homo sapien
actttacaagaatatcatgaagggc

SEQ ID NO: 999442 - DNA, 25 bp, Homo sapien
gaatatcatgaagggcaactacgag

SEQ ID NO: 999443 - DNA, 25 bp, Homo sapien
agaaggggaacataatacagaggac

SEQ ID NO: 999444 - DNA, 25 bp, Homo sapien
gatgtcttatctcagattcaaccag

SEQ ID NO: 999445 - DNA, 25 bp, Homo sapien
ttatgctataaatcaacctgatgtc

SEQ ID NO: 999446 - DNA, 25 bp, Homo sapien
tgagattcccacagaccccagtgaa

SEQ ID NO: 999447 - DNA, 25 bp, Homo sapien
tggtatttcaacatcagatattctg

SEQ ID NO: 999448 - DNA, 25 bp, Homo sapien
tattctgtcttggattaaacaagaa

SEQ ID NO: 999449 - DNA, 25 bp, Homo sapien
acaagaagaagagcctcaggttggg

SEQ ID NO: 999450 - DNA, 25 bp, Homo sapien
agcctggtatttcaacatcagatat

SEQ ID NO: 999451 - DNA, 25 bp, Homo sapien
gacatgttgctgacccaccaatgta

SEQ ID NO: 999452 - DNA, 25 bp, Homo sapien
gcaagaatctcagccaagacatgtt

SEQ ID NO: 999453 - DNA, 25 bp, Homo sapien
tccagttggcgagcaggtgttctca

SEQ ID NO: 999454 - DNA, 25 bp, Homo sapien
tgaaggccttgctagatcctcgttg

SEQ ID NO: 999455 - DNA, 25 bp, Homo sapien
tgcagaagtatcatgggccagagca

SEQ ID NO: 999456 - DNA, 25 bp, Homo sapien
cacaggaggtgttcagtatatcggc

SEQ ID NO: 999457 - DNA, 25 bp, Homo sapien
atttgccaaaaacggaggctgctct

SEQ ID NO: 999458 - DNA, 25 bp, Homo sapien
cagattttacaggaccaaccagacg

SEQ ID NO: 999459 - DNA, 25 bp, Homo sapien
tagaactggatcacttggccctttt

SEQ ID NO: 999460 - DNA, 25 bp, Homo sapien
gaaaatcggcttagtttgcccacca

SEQ ID NO: 999461 - DNA, 25 bp, Homo sapien
tggatcacttggccctttttccgga

SEQ ID NO: 999462 - DNA, 25 bp, Homo sapien
actggatcacttggccctttttccg

SEQ ID NO: 999463 - DNA, 25 bp, Homo sapien
cttcttgtactgtgtcactttatgg

SEQ ID NO: 999464 - DNA, 25 bp, Homo sapien
gtactgtgtcactttatggggttgg

SEQ ID NO: 999465 - DNA, 25 bp, Homo sapien
cataacgccgctttccctgggcatg

SEQ ID NO: 999466 - DNA, 25 bp, Homo sapien
cacttcttacagaaagtccgtcggg

SEQ ID NO: 999467 - DNA, 25 bp, Homo sapien
tgagatgtgatttacagaccataac

SEQ ID NO: 999468 - DNA, 25 bp, Homo sapien
cattttcctgaaactcatcttagaa

SEQ ID NO: 999469 - DNA, 25 bp, Homo sapien
aatgcagctctcaaggccacactct

SEQ ID NO: 999470 - DNA, 25 bp, Homo sapien
atgcccggccgtgtcctccgttgtt

SEQ ID NO: 999471 - DNA, 25 bp, Homo sapien
aaggattccccttcacgttggtgca

SEQ ID NO: 999472 - DNA, 25 bp, Homo sapien
gaacagattggctacggaacgcccc

SEQ ID NO: 999473 - DNA, 25 bp, Homo sapien
tgctcacggacatggatacagaccc

SEQ ID NO: 999474 - DNA, 25 bp, Homo sapien
gcttttgctgtgagagtagccgtca

SEQ ID NO: 999475 - DNA, 25 bp, Homo sapien
cttgacttttgagtgactgagccct

SEQ ID NO: 999476 - DNA, 25 bp, Homo sapien
tgggcatacggaagacagcaggatc

SEQ ID NO: 999477 - DNA, 25 bp, Homo sapien
caaagcatttagcagagtgctgggc

SEQ ID NO: 999478 - DNA, 25 bp, Homo sapien
ctttgcctgaaacgcggaacctggt

SEQ ID NO: 999479 - DNA, 25 bp, Homo sapien
gactggagccatggcggagtcggcg

SEQ ID NO: 999480 - DNA, 25 bp, Homo sapien
ggtggatttgtgaccctgcccacac

SEQ ID NO: 999481 - DNA, 25 bp, Homo sapien
ctgacgcttgctttaggttggtgga

SEQ ID NO: 999482 - DNA, 25 bp, Homo sapien
cgcctgctcgggtaaagaggcaccg

SEQ ID NO: 999483 - DNA, 25 bp, Homo sapien
gcataggtaacagaacatacacgct

SEQ ID NO: 999484 - DNA, 25 bp, Homo sapien
ttttcaaacgggtgacatgatcaac

SEQ ID NO: 999485 - DNA, 25 bp, Homo sapien
tcccagctgctagagtgcaaagatg

SEQ ID NO: 999486 - DNA, 25 bp, Homo sapien
taggtcttgtaggtcctgctaagga

SEQ ID NO: 999487 - DNA, 25 bp, Homo sapien
taggttccctcgtgcagtgcctggt

SEQ ID NO: 999488 - DNA, 25 bp, Homo sapien
aatgaactgcttagccctgctctga

SEQ ID NO: 999489 - DNA, 25 bp, Homo sapien
cactgatgcttacttaggccggaga

SEQ ID NO: 999490 - DNA, 25 bp, Homo sapien
tgggacttgcggtgtctcggcatac

SEQ ID NO: 999491 - DNA, 25 bp, Homo sapien
tcgaaggcattgaccgggcggccca

SEQ ID NO: 999492 - DNA, 25 bp, Homo sapien
gtcagcggctgacgatccggcccat

SEQ ID NO: 999493 - DNA, 25 bp, Homo sapien
tggctcgggacgcagttcgctgccg

SEQ ID NO: 999494 - DNA, 25 bp, Homo sapien
cagtagctctcaggttaggcgggtc

SEQ ID NO: 999495 - DNA, 25 bp, Homo sapien
caaggagctgcgtggagtcttcacc

SEQ ID NO: 999496 - DNA, 25 bp, Homo sapien
tgctgacttgcaggctgcttgatcc

SEQ ID NO: 999497 - DNA, 25 bp, Homo sapien
aactgatggaagtggcatttttgga

SEQ ID NO: 999498 - DNA, 25 bp, Homo sapien
ttttggagaggcctaggactgcccc

SEQ ID NO: 999499 - DNA, 25 bp, Homo sapien
cagtgtgtcctacctcagagttgtc

SEQ ID NO: 999500 - DNA, 25 bp, Homo sapien
gaaactgaagcctggacacgtctcc

SEQ ID NO: 999501 - DNA, 25 bp, Homo sapien
cactgggacaaatatgaagcctagc

SEQ ID NO: 999502 - DNA, 25 bp, Homo sapien
taagatccattgactggaccccaga

SEQ ID NO: 999503 - DNA, 25 bp, Homo sapien
caaactttgagctaggtcttgtgag

SEQ ID NO: 999504 - DNA, 25 bp, Homo sapien
cattgaaacaagtcaaccgaagctt

SEQ ID NO: 999505 - DNA, 25 bp, Homo sapien
gagtttgcctagcactcagacctgt

SEQ ID NO: 999506 - DNA, 25 bp, Homo sapien
aaccgaagctttgtggtgcaggagc

SEQ ID NO: 999507 - DNA, 25 bp, Homo sapien
gctcgcacctgtcgggcgtgcacaa

SEQ ID NO: 999508 - DNA, 25 bp, Homo sapien
acagctgccgcgctgacgcgttttc

SEQ ID NO: 999509 - DNA, 25 bp, Homo sapien
gttgttggcataaacgagtgcgtgc

SEQ ID NO: 999510 - DNA, 25 bp, Homo sapien
ctggcgacacctgcgggctgttggg

SEQ ID NO: 999511 - DNA, 25 bp, Homo sapien
cataggacacggtgaaccagctgca

SEQ ID NO: 999512 - DNA, 25 bp, Homo sapien
ttccttcgggctgcgtggaggctgc

SEQ ID NO: 999513 - DNA, 25 bp, Homo sapien
gtgaacagctcataggacacggtga

SEQ ID NO: 999514 - DNA, 25 bp, Homo sapien
acagctcataggacacggtgaacca

SEQ ID NO: 999515 - DNA, 25 bp, Homo sapien
ccaacactgtgcaatgaccatcctt

SEQ ID NO: 999516 - DNA, 25 bp, Homo sapien
tgctgcaccagtagacagaacttgg

SEQ ID NO: 999517 - DNA, 25 bp, Homo sapien
tctcttgtgctgcaccagtagacag

SEQ ID NO: 999518 - DNA, 25 bp, Homo sapien
caccagtagacagaacttgggttcg

SEQ ID NO: 999519 - DNA, 25 bp, Homo sapien
gacagaacttgggttcgttttatga

SEQ ID NO: 999520 - DNA, 25 bp, Homo sapien
atgttatggttttctacgaagtcag

SEQ ID NO: 999521 - DNA, 25 bp, Homo sapien
ggattttcaatgtggtgtgttttca

SEQ ID NO: 999522 - DNA, 25 bp, Homo sapien
cgaagtcagtgcttacttagctcac

SEQ ID NO: 999523 - DNA, 25 bp, Homo sapien
tgttttcaagcctcactcactcatc

SEQ ID NO: 999524 - DNA, 25 bp, Homo sapien
gatctgcagtcaaatgctctacccc

SEQ ID NO: 999525 - DNA, 25 bp, Homo sapien
gaactggggacctcttgatctgcag

SEQ ID NO: 999526 - DNA, 25 bp, Homo sapien
tcaaatgctctacccctgagctata

SEQ ID NO: 999527 - DNA, 25 bp, Homo sapien
tagggggcacccagatttgaactgg

SEQ ID NO: 999528 - DNA, 25 bp, Homo sapien
tcaacaccctgtcttagaggaagca

SEQ ID NO: 999529 - DNA, 25 bp, Homo sapien
cagttcctgagtaagtgcagggatc

SEQ ID NO: 999530 - DNA, 25 bp, Homo sapien
caacaccctgtcttagaggaagcaa

SEQ ID NO: 999531 - DNA, 25 bp, Homo sapien
gttcctgagtaagtgcagggatctg

SEQ ID NO: 999532 - DNA, 25 bp, Homo sapien
ggagggtattgggatggacttggtc

SEQ ID NO: 999533 - DNA, 25 bp, Homo sapien
actgtttcataagctcatcagcttc

SEQ ID NO: 999534 - DNA, 25 bp, Homo sapien
ccttggtctctaaggcagtgctgag

SEQ ID NO: 999535 - DNA, 25 bp, Homo sapien
ctgtgagtggactgcactatggtct

SEQ ID NO: 999536 - DNA, 25 bp, Homo sapien
acccagagttgatccagggacctct

SEQ ID NO: 999537 - DNA, 25 bp, Homo sapien
gcacccagagttgatccagggacct

SEQ ID NO: 999538 - DNA, 25 bp, Homo sapien
gggcacccagagttgatccagggac

SEQ ID NO: 999539 - DNA, 25 bp, Homo sapien
cacccagagttgatccagggacctc

SEQ ID NO: 999540 - DNA, 25 bp, Homo sapien
caacaagcttaagcttatgtctaca

SEQ ID NO: 999541 - DNA, 25 bp, Homo sapien
cagccactaggtctgcaattcctct

SEQ ID NO: 999542 - DNA, 25 bp, Homo sapien
caaacagccactaggtctgcaattc

SEQ ID NO: 999543 - DNA, 25 bp, Homo sapien
gtgaacaacaagcttaagcttatgt

SEQ ID NO: 999544 - DNA, 25 bp, Homo sapien
tgtgcctatgctccccacctggata

SEQ ID NO: 999545 - DNA, 25 bp, Homo sapien
gtgtgcctatgctccccacctggat

SEQ ID NO: 999546 - DNA, 25 bp, Homo sapien
ttctgtgtgcctatgctccccacct

SEQ ID NO: 999547 - DNA, 25 bp, Homo sapien
ctgtgtgcctatgctccccacctgg

SEQ ID NO: 999548 - DNA, 25 bp, Homo sapien
acagattctctctgttggggtccat

SEQ ID NO: 999549 - DNA, 25 bp, Homo sapien
ctctggctttctgggttccatgtca

SEQ ID NO: 999550 - DNA, 25 bp, Homo sapien
tgggttccatgtcacacagattctc

SEQ ID NO: 999551 - DNA, 25 bp, Homo sapien
tgcacctctggctttctgggttcca

SEQ ID NO: 999552 - DNA, 25 bp, Homo sapien
ctacccctccaggaaatgattatgg

SEQ ID NO: 999553 - DNA, 25 bp, Homo sapien
gaaccagggacctcttgatctgcag

SEQ ID NO: 999554 - DNA, 25 bp, Homo sapien
aagggggcacctggatttgaaccag

SEQ ID NO: 999555 - DNA, 25 bp, Homo sapien
gcagtcaaatgctctacccctgaac

SEQ ID NO: 999556 - DNA, 25 bp, Homo sapien
tcaaatgctctacccctgaactata

SEQ ID NO: 999557 - DNA, 25 bp, Homo sapien
tggatttgaaccagggacctcttga

SEQ ID NO: 999558 - DNA, 25 bp, Homo sapien
cctggatttgaaccagggacctctt

SEQ ID NO: 999559 - DNA, 25 bp, Homo sapien
ggcacctggatttgaaccagggacc

SEQ ID NO: 999560 - DNA, 25 bp, Homo sapien
tcaaatgctctacccctgagctata

SEQ ID NO: 999561 - DNA, 25 bp, Homo sapien
tgactcctacaaccagaaaggactt

SEQ ID NO: 999562 - DNA, 25 bp, Homo sapien
tctgtggctaaaaatgttgactcct

SEQ ID NO: 999563 - DNA, 25 bp, Homo sapien
ttctgagttggagacagctgatcaa

SEQ ID NO: 999564 - DNA, 25 bp, Homo sapien
cttctgagttggagacagctgatca

SEQ ID NO: 999565 - DNA, 25 bp, Homo sapien
tcccttgcatatccaacattccatt

SEQ ID NO: 999566 - DNA, 25 bp, Homo sapien
ccttgcatatccaacattccattca

SEQ ID NO: 999567 - DNA, 25 bp, Homo sapien
ttcccttgcatatccaacattccat

SEQ ID NO: 999568 - DNA, 25 bp, Homo sapien
ttcttcccttgcatatccaacattc

SEQ ID NO: 999569 - DNA, 25 bp, Homo sapien
gatctgcagccaaatggtttactcc

SEQ ID NO: 999570 - DNA, 25 bp, Homo sapien
aatggtttactcctcagctataccc

SEQ ID NO: 999571 - DNA, 25 bp, Homo sapien
gaccacttgatctgcagccaaatgg

SEQ ID NO: 999572 - DNA, 25 bp, Homo sapien
tagagggcacccatatttgaaccag

SEQ ID NO: 999573 - DNA, 25 bp, Homo sapien
aatgctctaccgctaagctataccc

SEQ ID NO: 999574 - DNA, 25 bp, Homo sapien
atctgcagtcaaatgctctaccgct

SEQ ID NO: 999575 - DNA, 25 bp, Homo sapien
gcagtcaaatgctctaccgctaagc

SEQ ID NO: 999576 - DNA, 25 bp, Homo sapien
tcaaatgctctaccgctaagctata

SEQ ID NO: 999577 - DNA, 25 bp, Homo sapien
taaacaagggattccggaggctaca

SEQ ID NO: 999578 - DNA, 25 bp, Homo sapien
cacaggtggagatggttagaagtcc

SEQ ID NO: 999579 - DNA, 25 bp, Homo sapien
gaagtcctcatactgggtggttaaa

SEQ ID NO: 999580 - DNA, 25 bp, Homo sapien
tgaagtgcaaaaaatttggctgacc

SEQ ID NO: 999581 - DNA, 25 bp, Homo sapien
ttatcagagacagccgcctaaaggc

SEQ ID NO: 999582 - DNA, 25 bp, Homo sapien
tgcttcaggaaaggtctcccacaga

SEQ ID NO: 999583 - DNA, 25 bp, Homo sapien
gcaacaagaggcttcagcagcagta

SEQ ID NO: 999584 - DNA, 25 bp, Homo sapien
tgatcccttaatctgaggagctgcc

SEQ ID NO: 999585 - DNA, 25 bp, Homo sapien
atagaaccacagtatccaaaaggta

SEQ ID NO: 999586 - DNA, 25 bp, Homo sapien
aaatagaaccacagtatccaaaagg

SEQ ID NO: 999587 - DNA, 25 bp, Homo sapien
tattattatcaaatagaaccacagt

SEQ ID NO: 999588 - DNA, 25 bp, Homo sapien
tatcaaatagaaccacagtatccaa

SEQ ID NO: 999589 - DNA, 25 bp, Homo sapien
tatccccaactagatgggccctaca

SEQ ID NO: 999590 - DNA, 25 bp, Homo sapien
ccctctgagtggccggcggccaaat

SEQ ID NO: 999591 - DNA, 25 bp, Homo sapien
gcagcaagggacctggtctcactgc

SEQ ID NO: 999592 - DNA, 25 bp, Homo sapien
ccccgtgctgattggtttcatccat

SEQ ID NO: 999593 - DNA, 25 bp, Homo sapien
cgtgcacgcgctgatggatcaccaa

SEQ ID NO: 999594 - DNA, 25 bp, Homo sapien
aggagacctcatgcttgcccgcgtg

SEQ ID NO: 999595 - DNA, 25 bp, Homo sapien
gacttctcgctgaagctcttctcgc

SEQ ID NO: 999596 - DNA, 25 bp, Homo sapien
gcttgtagcggaagcacttggcgca

SEQ ID NO: 999597 - DNA, 25 bp, Homo sapien
gctgttgcttgtgccggaagctgat

SEQ ID NO: 999598 - DNA, 25 bp, Homo sapien
atactggcctcatatctcccggaca

SEQ ID NO: 999599 - DNA, 25 bp, Homo sapien
tcgtagggcccctccttgatgtggt

SEQ ID NO: 999600 - DNA, 25 bp, Homo sapien
ggaagctgatctcgcattcggcgca

SEQ ID NO: 999601 - DNA, 25 bp, Homo sapien
gttcctctgtcttgatcacgatccc

SEQ ID NO: 999602 - DNA, 25 bp, Homo sapien
tcctctgtcttgatcacgatcccct

SEQ ID NO: 999603 - DNA, 25 bp, Homo sapien
ttcctctgtcttgatcacgatcccc

SEQ ID NO: 999604 - DNA, 25 bp, Homo sapien
ggatcaggaacccagccttttgcag

SEQ ID NO: 999605 - DNA, 25 bp, Homo sapien
cagtcagactcgaccacccttgaat

SEQ ID NO: 999606 - DNA, 25 bp, Homo sapien
ccagggatcaggaacccagcctttt

SEQ ID NO: 999607 - DNA, 25 bp, Homo sapien
tcatgggtggaagatgcaccggcac

SEQ ID NO: 999608 - DNA, 25 bp, Homo sapien
agctgcagagtgtggtaactagttg

SEQ ID NO: 999609 - DNA, 25 bp, Homo sapien
ctgcagagtgtggtaactagttgcc

SEQ ID NO: 999610 - DNA, 25 bp, Homo sapien
gtaactagttgccctggtgtttatc

SEQ ID NO: 999611 - DNA, 25 bp, Homo sapien
aactagttgccctggtgtttatcct

SEQ ID NO: 999612 - DNA, 25 bp, Homo sapien
tcatggcaacccttccccggccgtc

SEQ ID NO: 999613 - DNA, 25 bp, Homo sapien
caaactttctgagccctcgtcgttg

SEQ ID NO: 999614 - DNA, 25 bp, Homo sapien
ttggtctgtacctcgatcttaatca

SEQ ID NO: 999615 - DNA, 25 bp, Homo sapien
gcttcagttcgctgaactcgctgga

SEQ ID NO: 999616 - DNA, 25 bp, Homo sapien
gatcttaatcacgatcccatcgtgc

SEQ ID NO: 999617 - DNA, 25 bp, Homo sapien
cctcatttacattgggaaacctcat

SEQ ID NO: 999618 - DNA, 25 bp, Homo sapien
gccacgaagatcacatggtcaacat

SEQ ID NO: 999619 - DNA, 25 bp, Homo sapien
agctttgttatggaactgtcactca

SEQ ID NO: 999620 - DNA, 25 bp, Homo sapien
cataaatatgtagatgggctggaag

SEQ ID NO: 999621 - DNA, 25 bp, Homo sapien
ttgctaaacagcagggaacgccagc

SEQ ID NO: 999622 - DNA, 25 bp, Homo sapien
gaaattgtgccctcaaagccacctg

SEQ ID NO: 999623 - DNA, 25 bp, Homo sapien
gaagacgagtgccttcaatacctgg

SEQ ID NO: 999624 - DNA, 25 bp, Homo sapien
catgggtacctcagcttgaagacga

SEQ ID NO: 999625 - DNA, 25 bp, Homo sapien
gatctgtgatcatagtgtttactaa

SEQ ID NO: 999626 - DNA, 25 bp, Homo sapien
ttgagatgctcacagacctaagatc

SEQ ID NO: 999627 - DNA, 25 bp, Homo sapien
tgaggcgggtaacgtcaggacaaac

SEQ ID NO: 999628 - DNA, 25 bp, Homo sapien
acttgatacgaaacccagattggga

SEQ ID NO: 999629 - DNA, 25 bp, Homo sapien
tattaactcttgagccccaagcagg

SEQ ID NO: 999630 - DNA, 25 bp, Homo sapien
ggtgaggcctgctaactatgggact

SEQ ID NO: 999631 - DNA, 25 bp, Homo sapien
ggaggtctcaacatctgcacgtcaa

SEQ ID NO: 999632 - DNA, 25 bp, Homo sapien
tgttggcaacatttcgggagtcgag

SEQ ID NO: 999633 - DNA, 25 bp, Homo sapien
gacatgaggtctggtttggaaattg

SEQ ID NO: 999634 - DNA, 25 bp, Homo sapien
cggcgtttcgccctcctcagagtct

SEQ ID NO: 999635 - DNA, 25 bp, Homo sapien
cagcactgggatctgtcggcgtttc

SEQ ID NO: 999636 - DNA, 25 bp, Homo sapien
ccatctgtgacatgaggtctggttt

SEQ ID NO: 999637 - DNA, 25 bp, Homo sapien
tccttgcttgcaactattggctctg

SEQ ID NO: 999638 - DNA, 25 bp, Homo sapien
tgttctccttgcttgcaactattgg

SEQ ID NO: 999639 - DNA, 25 bp, Homo sapien
agcccccagcgagcgaaggcttctc

SEQ ID NO: 999640 - DNA, 25 bp, Homo sapien
ttgcttgcaactattggctctgctg

SEQ ID NO: 999641 - DNA, 25 bp, Homo sapien
ccagggactcgtagttgcccctcat

SEQ ID NO: 999642 - DNA, 25 bp, Homo sapien
accagggactcgtagttgcccctca

SEQ ID NO: 999643 - DNA, 25 bp, Homo sapien
ccatggaaaccagggactcgtagtt

SEQ ID NO: 999644 - DNA, 25 bp, Homo sapien
tggaaaccagggactcgtagttgcc

SEQ ID NO: 999645 - DNA, 25 bp, Homo sapien
cactcctgctccgagaagtgcacag

SEQ ID NO: 999646 - DNA, 25 bp, Homo sapien
tgctccgagaagtgcacagcaacat

SEQ ID NO: 999647 - DNA, 25 bp, Homo sapien
tcctgctccgagaagtgcacagcaa

SEQ ID NO: 999648 - DNA, 25 bp, Homo sapien
tccgagaagtgcacagcaacatcat

SEQ ID NO: 999649 - DNA, 25 bp, Homo sapien
ataactcggctcagacccgctggaa

SEQ ID NO: 999650 - DNA, 25 bp, Homo sapien
acaataactcggctcagacccgctg

SEQ ID NO: 999651 - DNA, 25 bp, Homo sapien
actcggctcagacccgctggaaggc

SEQ ID NO: 999652 - DNA, 25 bp, Homo sapien
gaaaccacacaataactcggctcag

SEQ ID NO: 999653 - DNA, 25 bp, Homo sapien
acttctccattgctgccggggggca

SEQ ID NO: 999654 - DNA, 25 bp, Homo sapien
ggaacttctccattgctgccggggg

SEQ ID NO: 999655 - DNA, 25 bp, Homo sapien
ttctccattgctgccggggggcagc

SEQ ID NO: 999656 - DNA, 25 bp, Homo sapien
gaacttctccattgctgccgggggg

SEQ ID NO: 999657 - DNA, 25 bp, Homo sapien
gaagtctcttgctcagaagcggcag

SEQ ID NO: 999658 - DNA, 25 bp, Homo sapien
gagcacatgtggcatccggccagaa

SEQ ID NO: 999659 - DNA, 25 bp, Homo sapien
acagccaagcgggtgatctctgccg

SEQ ID NO: 999660 - DNA, 25 bp, Homo sapien
cagaggtgatgagcgttggttctcc

SEQ ID NO: 999661 - DNA, 25 bp, Homo sapien
cctggggtttccgacatggggaatg

SEQ ID NO: 999662 - DNA, 25 bp, Homo sapien
ctggggtttccgacatggggaatga

SEQ ID NO: 999663 - DNA, 25 bp, Homo sapien
tggggtttccgacatggggaatgag

SEQ ID NO: 999664 - DNA, 25 bp, Homo sapien
cctgccatactcacatcgagagaat

SEQ ID NO: 999665 - DNA, 25 bp, Homo sapien
gccatactcacatcgagagaattcc

SEQ ID NO: 999666 - DNA, 25 bp, Homo sapien
tactcacatcgagagaattcctgaa

SEQ ID NO: 999667 - DNA, 25 bp, Homo sapien
catactcacatcgagagaattcctg

SEQ ID NO: 999668 - DNA, 25 bp, Homo sapien
tcatcagtatctttattggaaccta

SEQ ID NO: 999669 - DNA, 25 bp, Homo sapien
cagtatctttattggaacctaacac

SEQ ID NO: 999670 - DNA, 25 bp, Homo sapien
tcagtatctttattggaacctaaca

SEQ ID NO: 999671 - DNA, 25 bp, Homo sapien
catcagtatctttattggaacctaa

SEQ ID NO: 999672 - DNA, 25 bp, Homo sapien
cgccgccagagccaccccctccccg

SEQ ID NO: 999673 - DNA, 25 bp, Homo sapien
gcaggcctttctggggctgccgcac

SEQ ID NO: 999674 - DNA, 25 bp, Homo sapien
cagccctctgggcaggcctttctgg

SEQ ID NO: 999675 - DNA, 25 bp, Homo sapien
cccgtccaggcccgcagccctctgg

SEQ ID NO: 999676 - DNA, 25 bp, Homo sapien
tgccacggatgccttgctacgtgac

SEQ ID NO: 999677 - DNA, 25 bp, Homo sapien
gtgccacggatgccttgctacgtga

SEQ ID NO: 999678 - DNA, 25 bp, Homo sapien
cgtgccacggatgccttgctacgtg

SEQ ID NO: 999679 - DNA, 25 bp, Homo sapien
cgggtcgccgccaggtgtctgtgcc

SEQ ID NO: 999680 - DNA, 25 bp, Homo sapien
gcgggtcgccgccaggtgtctgtgc

SEQ ID NO: 999681 - DNA, 25 bp, Homo sapien
ggcgggtcgccgccaggtgtctgtg

SEQ ID NO: 999682 - DNA, 25 bp, Homo sapien
aaatgggagagccgcgtcagcgccg

SEQ ID NO: 999683 - DNA, 25 bp, Homo sapien
ctgcgaaatgggagagccgcgtcag

SEQ ID NO: 999684 - DNA, 25 bp, Homo sapien
cgaaatgggagagccgcgtcagcgc

SEQ ID NO: 999685 - DNA, 25 bp, Homo sapien
tgcgaaatgggagagccgcgtcagc

SEQ ID NO: 999686 - DNA, 25 bp, Homo sapien
tacagccggtaggagcgaacagtgt

SEQ ID NO: 999687 - DNA, 25 bp, Homo sapien
gctcgtcggaggctgccggaaccca

SEQ ID NO: 999688 - DNA, 25 bp, Homo sapien
atgtccctctcaggccgtttaaaga

SEQ ID NO: 999689 - DNA, 25 bp, Homo sapien
tttaaagagaaacactccgaggctc

SEQ ID NO: 999690 - DNA, 25 bp, Homo sapien
taagaaacccgtcacaccagagaaa

SEQ ID NO: 999691 - DNA, 25 bp, Homo sapien
taattgaatacctacgaggtggcga

SEQ ID NO: 999692 - DNA, 25 bp, Homo sapien
gccagacgggtcatttaggaggaaa

SEQ ID NO: 999693 - DNA, 25 bp, Homo sapien
gaaagcccggagttcatgtgaccag

SEQ ID NO: 999694 - DNA, 25 bp, Homo sapien
gatatgtgtctcctgaagtgtgtgg

SEQ ID NO: 999695 - DNA, 25 bp, Homo sapien
cagagtagggcttaaggcaacatag

SEQ ID NO: 999696 - DNA, 25 bp, Homo sapien
caacccgatggtgcgatgagacctc

SEQ ID NO: 999697 - DNA, 25 bp, Homo sapien
gaagaagtaactcatcagagtaggg

SEQ ID NO: 999698 - DNA, 25 bp, Homo sapien
ggtcaatactttccagatccctctc

SEQ ID NO: 999699 - DNA, 25 bp, Homo sapien
cttaggagtgattctcagtgtcaga

SEQ ID NO: 999700 - DNA, 25 bp, Homo sapien
cagatccctctcttaggagtgattc

SEQ ID NO: 999701 - DNA, 25 bp, Homo sapien
tgagaaagagttagggtcaatactt

SEQ ID NO: 999702 - DNA, 25 bp, Homo sapien
tgtaagcacattctcctctatctcc

SEQ ID NO: 999703 - DNA, 25 bp, Homo sapien
acagatgtaagcacattctcctcta

SEQ ID NO: 999704 - DNA, 25 bp, Homo sapien
tggacaccaccataccagcagatgc

SEQ ID NO: 999705 - DNA, 25 bp, Homo sapien
gtggaaccaagctgaatgaaggttc

SEQ ID NO: 999706 - DNA, 25 bp, Homo sapien
aagccaaaagtgaagctttgtgaag

SEQ ID NO: 999707 - DNA, 25 bp, Homo sapien
tatgaaggaagcatgacagggtctg

SEQ ID NO: 999708 - DNA, 25 bp, Homo sapien
gagcagaccacatgttctcttcacc

SEQ ID NO: 999709 - DNA, 25 bp, Homo sapien
ggcctaggctagtgtctgtatgaag

SEQ ID NO: 999710 - DNA, 25 bp, Homo sapien
ctgtctgggtccaaggtgaccaagc

SEQ ID NO: 999711 - DNA, 25 bp, Homo sapien
gacagaagcatctcacggagtggga

SEQ ID NO: 999712 - DNA, 25 bp, Homo sapien
gatagtgacagaaatgcacgccctg

SEQ ID NO: 999713 - DNA, 25 bp, Homo sapien
tagacgtttgtggtgcagctcccca

SEQ ID NO: 999714 - DNA, 25 bp, Homo sapien
tgtggtcgaatcaagaaatctgggc

SEQ ID NO: 999715 - DNA, 25 bp, Homo sapien
aagcgcttctcacactcggtgcagg

SEQ ID NO: 999716 - DNA, 25 bp, Homo sapien
tctgtggaggccaaaggtcctttgg

SEQ ID NO: 999717 - DNA, 25 bp, Homo sapien
gatgaagcttttgccgcagacggtg

SEQ ID NO: 999718 - DNA, 25 bp, Homo sapien
gctgaggccacaagtccagtcggtc

SEQ ID NO: 999719 - DNA, 25 bp, Homo sapien
tggcggatgaggtgcgcggggcgcg

SEQ ID NO: 999720 - DNA, 25 bp, Homo sapien
ggggcgcgtgaagcaacggccgcac

SEQ ID NO: 999721 - DNA, 25 bp, Homo sapien
tgcgcggggcgcgtgaagcaacggc

SEQ ID NO: 999722 - DNA, 25 bp, Homo sapien
cgatggcggatgaggtgcgcggggc

SEQ ID NO: 999723 - DNA, 25 bp, Homo sapien
ctgccatcccgtgcgctgcccccac

SEQ ID NO: 999724 - DNA, 25 bp, Homo sapien
ccatcccgtgcgctgcccccaccgc

SEQ ID NO: 999725 - DNA, 25 bp, Homo sapien
tcttcccacacgtggcgcaggtgaa

SEQ ID NO: 999726 - DNA, 25 bp, Homo sapien
tatttacagggttcgttgaatggcc

SEQ ID NO: 999727 - DNA, 25 bp, Homo sapien
caagatggcctctccgttgtccggg

SEQ ID NO: 999728 - DNA, 25 bp, Homo sapien
ggttcaggcccactggcggtttaca

SEQ ID NO: 999729 - DNA, 25 bp, Homo sapien
gcttggcctggtccaaacagggtcc

SEQ ID NO: 999730 - DNA, 25 bp, Homo sapien
aacagggtcccgtgagcctctaggt

SEQ ID NO: 999731 - DNA, 25 bp, Homo sapien
acagcaggactgagctcacccatgt

SEQ ID NO: 999732 - DNA, 25 bp, Homo sapien
cctctaggtcagtaggatgtacggg

SEQ ID NO: 999733 - DNA, 25 bp, Homo sapien
caccagtgaaaatgggatgcctgga

SEQ ID NO: 999734 - DNA, 25 bp, Homo sapien
tgggatgcctggaccgaggtactcc

SEQ ID NO: 999735 - DNA, 25 bp, Homo sapien
accagtgaaaatgggatgcctggac

SEQ ID NO: 999736 - DNA, 25 bp, Homo sapien
gatgcctggaccgaggtactcccca

SEQ ID NO: 999737 - DNA, 25 bp, Homo sapien
tgttgagcttcagggtcccgtccga

SEQ ID NO: 999738 - DNA, 25 bp, Homo sapien
ggaggctgctgtgttgagcttcagg

SEQ ID NO: 999739 - DNA, 25 bp, Homo sapien
gagcttcagggtcccgtccgagcat

SEQ ID NO: 999740 - DNA, 25 bp, Homo sapien
tggaggctgctgtgttgagcttcag

SEQ ID NO: 999741 - DNA, 25 bp, Homo sapien
gggagggagatccgtttgccaggag

SEQ ID NO: 999742 - DNA, 25 bp, Homo sapien
ggggagggagatccgtttgccagga

SEQ ID NO: 999743 - DNA, 25 bp, Homo sapien
tccccaatatctggctgcccggctg

SEQ ID NO: 999744 - DNA, 25 bp, Homo sapien
cccagggctcctccccaatatctgg

SEQ ID NO: 999745 - DNA, 25 bp, Homo sapien
tggcatccgtggagatgtctcctgc

SEQ ID NO: 999746 - DNA, 25 bp, Homo sapien
tccgtggagatgtctcctgctccgg

SEQ ID NO: 999747 - DNA, 25 bp, Homo sapien
caagaggtctggggcgggaactggg

SEQ ID NO: 999748 - DNA, 25 bp, Homo sapien
agtgagtgtgaggatacagcatcac

SEQ ID NO: 999749 - DNA, 25 bp, Homo sapien
atccagccggagagatagacacagg

SEQ ID NO: 999750 - DNA, 25 bp, Homo sapien
tacaagggtccaacagcaaaagagc

SEQ ID NO: 999751 - DNA, 25 bp, Homo sapien
tgtgaggatacagcatcacggcccc

SEQ ID NO: 999752 - DNA, 25 bp, Homo sapien
cagaaaattcctagggaggcctggg

SEQ ID NO: 999753 - DNA, 25 bp, Homo sapien
tacaacgttaaagacctgccaccga

SEQ ID NO: 999754 - DNA, 25 bp, Homo sapien
tgaaatcaagcctacgacgtggtga

SEQ ID NO: 999755 - DNA, 25 bp, Homo sapien
tctaaaagggattactctgctgggc

SEQ ID NO: 999756 - DNA, 25 bp, Homo sapien
tctctgcagccacgtgcagctgctt

SEQ ID NO: 999757 - DNA, 25 bp, Homo sapien
gttctctgcagccacgtgcagctgc

SEQ ID NO: 999758 - DNA, 25 bp, Homo sapien
ctggttctctgcagccacgtgcagc

SEQ ID NO: 999759 - DNA, 25 bp, Homo sapien
tggttctctgcagccacgtgcagct

SEQ ID NO: 999760 - DNA, 25 bp, Homo sapien
tcagtgtcagacgaaagggaaaacc

SEQ ID NO: 999761 - DNA, 25 bp, Homo sapien
caatgtcccgatgacgactggcaaa

SEQ ID NO: 999762 - DNA, 25 bp, Homo sapien
caccagacggaattgaagggacggc

SEQ ID NO: 999763 - DNA, 25 bp, Homo sapien
gaacatcatacggtgcagctagaga

SEQ ID NO: 999764 - DNA, 25 bp, Homo sapien
gtccacaggaacatctggaatcttg

SEQ ID NO: 999765 - DNA, 25 bp, Homo sapien
acatctggaatcttggggccagggc

SEQ ID NO: 999766 - DNA, 25 bp, Homo sapien
catctggaatcttggggccagggcg

SEQ ID NO: 999767 - DNA, 25 bp, Homo sapien
caggaacatctggaatcttggggcc

SEQ ID NO: 999768 - DNA, 25 bp, Homo sapien
ccttcccttgttcaatctgggagag

SEQ ID NO: 999769 - DNA, 25 bp, Homo sapien
agggagaccagcgtctcgtagttgc

SEQ ID NO: 999770 - DNA, 25 bp, Homo sapien
ggagaccagcgtctcgtagttgccc

SEQ ID NO: 999771 - DNA, 25 bp, Homo sapien
cagggagaccagcgtctcgtagttg

SEQ ID NO: 999772 - DNA, 25 bp, Homo sapien
gggagaccagcgtctcgtagttgcc

SEQ ID NO: 999773 - DNA, 25 bp, Homo sapien
gctcggagaaatacacggccacatc

SEQ ID NO: 999774 - DNA, 25 bp, Homo sapien
tcggagaaatacacggccacatcat

SEQ ID NO: 999775 - DNA, 25 bp, Homo sapien
ctgctcggagaaatacacggccaca

SEQ ID NO: 999776 - DNA, 25 bp, Homo sapien
cggagaaatacacggccacatcatc

SEQ ID NO: 999777 - DNA, 25 bp, Homo sapien
cggctgtcttctcgcaatcagccag

SEQ ID NO: 999778 - DNA, 25 bp, Homo sapien
gagcagcctgcgattcaatcttcct

SEQ ID NO: 999779 - DNA, 25 bp, Homo sapien
ctccacggctgtcttctcgcaatca

SEQ ID NO: 999780 - DNA, 25 bp, Homo sapien
gcagcctgcgattcaatcttcctct

SEQ ID NO: 999781 - DNA, 25 bp, Homo sapien
cttgctctcaaggagtaggtggtcc

SEQ ID NO: 999782 - DNA, 25 bp, Homo sapien
gattctggacaagctgaactgtttc

SEQ ID NO: 999783 - DNA, 25 bp, Homo sapien
tgtttctaggcgaaaaccccaatgc

SEQ ID NO: 999784 - DNA, 25 bp, Homo sapien
gtcttcaaggctgggagattctgga

SEQ ID NO: 999785 - DNA, 25 bp, Homo sapien
tgcacgattattgcccgcgtacctg

SEQ ID NO: 999786 - DNA, 25 bp, Homo sapien
ctgaaagcaccaccggtctagctgg

SEQ ID NO: 999787 - DNA, 25 bp, Homo sapien
taaaagcccggctcaaatcacagag

SEQ ID NO: 999788 - DNA, 25 bp, Homo sapien
taacgcctcaacagggcttgtggaa

SEQ ID NO: 999789 - DNA, 25 bp, Homo sapien
accccgggaagctgggcacgtagtg

SEQ ID NO: 999790 - DNA, 25 bp, Homo sapien
tgtatgcggattcgaagccggacac

SEQ ID NO: 999791 - DNA, 25 bp, Homo sapien
cacgtagtgggagtcggtgtatgcg

SEQ ID NO: 999792 - DNA, 25 bp, Homo sapien
agtcggtgtatgcggattcgaagcc

SEQ ID NO: 999793 - DNA, 25 bp, Homo sapien
agatggagagggacctacaggccga

SEQ ID NO: 999794 - DNA, 25 bp, Homo sapien
ggagatggagagggacctacaggcc

SEQ ID NO: 999795 - DNA, 25 bp, Homo sapien
atggagagggacctacaggccgagc

SEQ ID NO: 999796 - DNA, 25 bp, Homo sapien
gagatggagagggacctacaggccg

SEQ ID NO: 999797 - DNA, 25 bp, Homo sapien
gggacaaccgttccgccagcgctcg

SEQ ID NO: 999798 - DNA, 25 bp, Homo sapien
cgccgccgcgcgcggcaccacgcag

SEQ ID NO: 999799 - DNA, 25 bp, Homo sapien
gccctgcgctgtcccgcccggcccg

SEQ ID NO: 999800 - DNA, 25 bp, Homo sapien
cgcgcgcggcaccacgcaggcccgg

SEQ ID NO: 999801 - DNA, 25 bp, Homo sapien
ccctgcgctgtcccgcccggcccgg

SEQ ID NO: 999802 - DNA, 25 bp, Homo sapien
tcctcgctggctgcccctgcgccgc

SEQ ID NO: 999803 - DNA, 25 bp, Homo sapien
ccgctcctcgctggctgcccctgcg

SEQ ID NO: 999804 - DNA, 25 bp, Homo sapien
ctgccgccgctcctcgctggctgcc

SEQ ID NO: 999805 - DNA, 25 bp, Homo sapien
cgccgctcctcgctggctgcccctg

SEQ ID NO: 999806 - DNA, 25 bp, Homo sapien
gcccggcagacgaaggcccgtgagg

SEQ ID NO: 999807 - DNA, 25 bp, Homo sapien
gcggcccggcagacgaaggcccgtg

SEQ ID NO: 999808 - DNA, 25 bp, Homo sapien
ccggcagacgaaggcccgtgaggct

SEQ ID NO: 999809 - DNA, 25 bp, Homo sapien
ggcccggcagacgaaggcccgtgag

SEQ ID NO: 999810 - DNA, 25 bp, Homo sapien
ggacaacttctaatggcctgggact

SEQ ID NO: 999811 - DNA, 25 bp, Homo sapien
ccctgaggctggtaatctaatatgg

SEQ ID NO: 999812 - DNA, 25 bp, Homo sapien
aagaaaagacgccatggattccatt

SEQ ID NO: 999813 - DNA, 25 bp, Homo sapien
tatgcctgtttattaggccctagaa

SEQ ID NO: 999814 - DNA, 25 bp, Homo sapien
gaatccactggtaactgtctgtatg

SEQ ID NO: 999815 - DNA, 25 bp, Homo sapien
tgttgcaacaacagctgtcagaggg

SEQ ID NO: 999816 - DNA, 25 bp, Homo sapien
ctactgctaatggacagggctggcc

SEQ ID NO: 999817 - DNA, 25 bp, Homo sapien
cttcctaaagcatggcaaggtggac

SEQ ID NO: 999818 - DNA, 25 bp, Homo sapien
ttacagtcaaattactcaaaaccag

SEQ ID NO: 999819 - DNA, 25 bp, Homo sapien
cagtcaaattactcaaaaccagtaa

SEQ ID NO: 999820 - DNA, 25 bp, Homo sapien
gggaaaatgctatgtacggaagaac

SEQ ID NO: 999821 - DNA, 25 bp, Homo sapien
aaatgctatgtacggaagaaccaaa

SEQ ID NO: 999822 - DNA, 25 bp, Homo sapien
aagttgatgccccttattaacagag

SEQ ID NO: 999823 - DNA, 25 bp, Homo sapien
aacatctacatgctgctccaaagaa

SEQ ID NO: 999824 - DNA, 25 bp, Homo sapien
tttagacgaacaaatattaccatag

SEQ ID NO: 999825 - DNA, 25 bp, Homo sapien
gaaagctggattatctacattagca

SEQ ID NO: 999826 - DNA, 25 bp, Homo sapien
tacatgcctaattacagagttccaa

SEQ ID NO: 999827 - DNA, 25 bp, Homo sapien
taacacaacatccaacaactacaca

SEQ ID NO: 999828 - DNA, 25 bp, Homo sapien
caattataactggagattttagtac

SEQ ID NO: 999829 - DNA, 25 bp, Homo sapien
tccttagtaacaagtaacacaaaca

SEQ ID NO: 999830 - DNA, 25 bp, Homo sapien
taccttggaagacccaccttctgag

SEQ ID NO: 999831 - DNA, 25 bp, Homo sapien
tcattggcagcgctctaccttggaa

SEQ ID NO: 999832 - DNA, 25 bp, Homo sapien
gaggctgtggcactctgcaaactac

SEQ ID NO: 999833 - DNA, 25 bp, Homo sapien
caatgacccttaatgctggaagcac

SEQ ID NO: 999834 - DNA, 25 bp, Homo sapien
tgctgtgaggcaaaatgtccaaatc

SEQ ID NO: 999835 - DNA, 25 bp, Homo sapien
cctaagacgagatggaagtgagctg

SEQ ID NO: 999836 - DNA, 25 bp, Homo sapien
gcaggtgtcttggaagtggtcctaa

SEQ ID NO: 999837 - DNA, 25 bp, Homo sapien
ttggcaatgattcttcaagcaggtg

SEQ ID NO: 999838 - DNA, 25 bp, Homo sapien
attaatctgcagtttgtaccacttg

SEQ ID NO: 999839 - DNA, 25 bp, Homo sapien
ttgtaccacttgctcgagtccagtg

SEQ ID NO: 999840 - DNA, 25 bp, Homo sapien
tgatgcagaacactcacacagcaag

SEQ ID NO: 999841 - DNA, 25 bp, Homo sapien
cacttgctcgagtccagtgatgcag

SEQ ID NO: 999842 - DNA, 25 bp, Homo sapien
ggctgttcccatggactcaccaaga

SEQ ID NO: 999843 - DNA, 25 bp, Homo sapien
caagggcaacttggatcattgggct

SEQ ID NO: 999844 - DNA, 25 bp, Homo sapien
tggccaaggccatccggagacttgt

SEQ ID NO: 999845 - DNA, 25 bp, Homo sapien
cattgggctaaagcgttgcaggaca

SEQ ID NO: 999846 - DNA, 25 bp, Homo sapien
aactgaaggtacagcatttgcctgc

SEQ ID NO: 999847 - DNA, 25 bp, Homo sapien
gccttttcacctcgggtctattata

SEQ ID NO: 999848 - DNA, 25 bp, Homo sapien
cctcgggtctattatactggaatct

SEQ ID NO: 999849 - DNA, 25 bp, Homo sapien
gcaggccaagcggtctctggttcaa

SEQ ID NO: 999850 - DNA, 25 bp, Homo sapien
tgttcaccctgtctgtagcacctgg

SEQ ID NO: 999851 - DNA, 25 bp, Homo sapien
gctacttttagtcaggaggccccac

SEQ ID NO: 999852 - DNA, 25 bp, Homo sapien
gagctgcaacgtcttctcagggagg

SEQ ID NO: 999853 - DNA, 25 bp, Homo sapien
gacagcatagagctttgccaggaag

SEQ ID NO: 999854 - DNA, 25 bp, Homo sapien
gctgcctcgttttatactagttgaa

SEQ ID NO: 999855 - DNA, 25 bp, Homo sapien
cggtctctccatggagttaaaagca

SEQ ID NO: 999856 - DNA, 25 bp, Homo sapien
gcggtatcagacttccacgtgtggg

SEQ ID NO: 999857 - DNA, 25 bp, Homo sapien
aattcccttctgcaagcggtatcag

SEQ ID NO: 999858 - DNA, 25 bp, Homo sapien
atgatggggaatcttccagaccagg

SEQ ID NO: 999859 - DNA, 25 bp, Homo sapien
tcttccagaccaggtatgaccactg

SEQ ID NO: 999860 - DNA, 25 bp, Homo sapien
ctttattcgagatgatggggaatct

SEQ ID NO: 999861 - DNA, 25 bp, Homo sapien
cttccagaccaggtatgaccactgg

SEQ ID NO: 999862 - DNA, 25 bp, Homo sapien
ttctacaaacacctgtaccatatca

SEQ ID NO: 999863 - DNA, 25 bp, Homo sapien
tccgatcactaatcactcaacatac

SEQ ID NO: 999864 - DNA, 25 bp, Homo sapien
gtaccatatcactcgtagtttccga

SEQ ID NO: 999865 - DNA, 25 bp, Homo sapien
tgatcaatggctttactgttcttct

SEQ ID NO: 999866 - DNA, 25 bp, Homo sapien
ttcttggtgtctgttatgttaacca

SEQ ID NO: 999867 - DNA, 25 bp, Homo sapien
tctttgtgcgtcttttcagcttccc

SEQ ID NO: 999868 - DNA, 25 bp, Homo sapien
ttatggccattctttgtgcgtcttt

SEQ ID NO: 999869 - DNA, 25 bp, Homo sapien
ccctttcttggtgtctgttatgtta

SEQ ID NO: 999870 - DNA, 25 bp, Homo sapien
ttaaccctgtgtgggcagaactgca

SEQ ID NO: 999871 - DNA, 25 bp, Homo sapien
tggttattaaccctgtgtgggcaga

SEQ ID NO: 999872 - DNA, 25 bp, Homo sapien
agaatctgattggttattaaccctg

SEQ ID NO: 999873 - DNA, 25 bp, Homo sapien
gattggttattaaccctgtgtgggc

SEQ ID NO: 999874 - DNA, 25 bp, Homo sapien
tcagtaagcctagccattcaggagg

SEQ ID NO: 999875 - DNA, 25 bp, Homo sapien
aaaataaagctgaggcagcttccca

SEQ ID NO: 999876 - DNA, 25 bp, Homo sapien
cagaggttcaagtttatcgtgagca

SEQ ID NO: 999877 - DNA, 25 bp, Homo sapien
caactaacaggcttggcactgtggc

SEQ ID NO: 999878 - DNA, 25 bp, Homo sapien
cattcccagaaaacaactggaggac

SEQ ID NO: 999879 - DNA, 25 bp, Homo sapien
ttccagggcaaccagaacaaacaga

SEQ ID NO: 999880 - DNA, 25 bp, Homo sapien
ttaagaaacattcaagacatggaat

SEQ ID NO: 999881 - DNA, 25 bp, Homo sapien
gagaaagggacttgcacacaggaga

SEQ ID NO: 999882 - DNA, 25 bp, Homo sapien
tgatttctattccaagaggcaggct

SEQ ID NO: 999883 - DNA, 25 bp, Homo sapien
cctcagagttcctgtgggatgtctg

SEQ ID NO: 999884 - DNA, 25 bp, Homo sapien
ggtgagtgacaactcgcataagtta

SEQ ID NO: 999885 - DNA, 25 bp, Homo sapien
ccccgctctggaattacgaagatca

SEQ ID NO: 999886 - DNA, 25 bp, Homo sapien
tcaatctctgctgggcctcagtttc

SEQ ID NO: 999887 - DNA, 25 bp, Homo sapien
tctctgctgggcctcagtttctgca

SEQ ID NO: 999888 - DNA, 25 bp, Homo sapien
ctctgctgggcctcagtttctgcat

SEQ ID NO: 999889 - DNA, 25 bp, Homo sapien
aatctctgctgggcctcagtttctg

SEQ ID NO: 999890 - DNA, 25 bp, Homo sapien
tccagagagctattgacctatacag

SEQ ID NO: 999891 - DNA, 25 bp, Homo sapien
tctccctctgggtgagaacaaaact

SEQ ID NO: 999892 - DNA, 25 bp, Homo sapien
cagagtcagcagtcaatcccctcaa

SEQ ID NO: 999893 - DNA, 25 bp, Homo sapien
tcttacatcagcagggttgacccac

SEQ ID NO: 999894 - DNA, 25 bp, Homo sapien
caggtgtgcctgcttgcatatggag

SEQ ID NO: 999895 - DNA, 25 bp, Homo sapien
tctaaaagaaagacccaggtgtgtg

SEQ ID NO: 999896 - DNA, 25 bp, Homo sapien
gaagcgggtgactagactcaagact

SEQ ID NO: 999897 - DNA, 25 bp, Homo sapien
ggcatgccagccagaaaacgcagag

SEQ ID NO: 999898 - DNA, 25 bp, Homo sapien
ttaatctactttagtttagcagtac

SEQ ID NO: 999899 - DNA, 25 bp, Homo sapien
tctcccttctcattaatctacttta

SEQ ID NO: 999900 - DNA, 25 bp, Homo sapien
attaatctactttagtttagcagta

SEQ ID NO: 999901 - DNA, 25 bp, Homo sapien
ctctcccttctcattaatctacttt

SEQ ID NO: 999902 - DNA, 25 bp, Homo sapien
tatcaccatggactagtcttgcctg

SEQ ID NO: 999903 - DNA, 25 bp, Homo sapien
cagaaatcttcaacgtacagctcaa

SEQ ID NO: 999904 - DNA, 25 bp, Homo sapien
tccactgtagtggtactctgtcctt

SEQ ID NO: 999905 - DNA, 25 bp, Homo sapien
ctctcccgaaaaggtaacactattg

SEQ ID NO: 999906 - DNA, 25 bp, Homo sapien
gactgcatggtagctccttttcaaa

SEQ ID NO: 999907 - DNA, 25 bp, Homo sapien
cctacagcctgggatagtgaactgt

SEQ ID NO: 999908 - DNA, 25 bp, Homo sapien
tcctgaagtgcaataccctgtgggt

SEQ ID NO: 999909 - DNA, 25 bp, Homo sapien
ggtcctctacaagacatcgactgca

SEQ ID NO: 999910 - DNA, 25 bp, Homo sapien
cattaagcctaatcctatgtagtgg

SEQ ID NO: 999911 - DNA, 25 bp, Homo sapien
ttcattaagcctaatcctatgtagt

SEQ ID NO: 999912 - DNA, 25 bp, Homo sapien
agcctaatcctatgtagtggttaaa

SEQ ID NO: 999913 - DNA, 25 bp, Homo sapien
taagcctaatcctatgtagtggtta

SEQ ID NO: 999914 - DNA, 25 bp, Homo sapien
ccctcaagtaggtgccagtgtgtgg

SEQ ID NO: 999915 - DNA, 25 bp, Homo sapien
agttagagttccatccccagcctag

SEQ ID NO: 999916 - DNA, 25 bp, Homo sapien
taaagctcaacaaggctaccagggt

SEQ ID NO: 999917 - DNA, 25 bp, Homo sapien
attcagagaaacaaccggcgtagac

SEQ ID NO: 999918 - DNA, 25 bp, Homo sapien
gaagtgcagactcaatagccctcag

SEQ ID NO: 999919 - DNA, 25 bp, Homo sapien
cagacagatacagatcatgggctcc

SEQ ID NO: 999920 - DNA, 25 bp, Homo sapien
gataccactccaggacttttgcaga

SEQ ID NO: 999921 - DNA, 25 bp, Homo sapien
tgcccgcctccaacaggtatgagaa

SEQ ID NO: 999922 - DNA, 25 bp, Homo sapien
caatggcatgatccagttcctaaaa

SEQ ID NO: 999923 - DNA, 25 bp, Homo sapien
cagattaccctccaaaatgtgagtg

SEQ ID NO: 999924 - DNA, 25 bp, Homo sapien
gatgtttgtccataccaatctggat

SEQ ID NO: 999925 - DNA, 25 bp, Homo sapien
tgagtgggcctcatgcgatcagatg

SEQ ID NO: 999926 - DNA, 25 bp, Homo sapien
tctacagcttctggtgtcaggtgag

SEQ ID NO: 999927 - DNA, 25 bp, Homo sapien
aatgacagccttctagaaactgggt

SEQ ID NO: 999928 - DNA, 25 bp, Homo sapien
caggtgaggctttctagtgaagacc

SEQ ID NO: 999929 - DNA, 25 bp, Homo sapien
tgcagaatgaatccatgtgttgaag

SEQ ID NO: 999930 - DNA, 25 bp, Homo sapien
gagggggcacctggatttgaaccag

SEQ ID NO: 999931 - DNA, 25 bp, Homo sapien
tggatttgaaccagggacctcttga

SEQ ID NO: 999932 - DNA, 25 bp, Homo sapien
gacctcttgatctgcagtcaagtgc

SEQ ID NO: 999933 - DNA, 25 bp, Homo sapien
tctgcagtcaagtgctctacccctg

SEQ ID NO: 999934 - DNA, 25 bp, Homo sapien
cagtgtcctgggtgacgagaagata

SEQ ID NO: 999935 - DNA, 25 bp, Homo sapien
ctaggtgcctagaatgattatatga

SEQ ID NO: 999936 - DNA, 25 bp, Homo sapien
gaagcagcaaaaagacgaggcctga

SEQ ID NO: 999937 - DNA, 25 bp, Homo sapien
acatacatatacatgatgctgtctg

SEQ ID NO: 999938 - DNA, 25 bp, Homo sapien
cccactgggatgttgtttagaatga

SEQ ID NO: 999939 - DNA, 25 bp, Homo sapien
cagtgatggactgaaggcaggcact

SEQ ID NO: 999940 - DNA, 25 bp, Homo sapien
tgttctgtcagtaatgctgatgcaa

SEQ ID NO: 999941 - DNA, 25 bp, Homo sapien
cctcctcagtcctactaaattggaa

SEQ ID NO: 999942 - DNA, 25 bp, Homo sapien
gtcaaatgctctacctgtgagctat

SEQ ID NO: 999943 - DNA, 25 bp, Homo sapien
gcagtcaaatgctctacctgtgagc

SEQ ID NO: 999944 - DNA, 25 bp, Homo sapien
caaatgctctacctgtgagctatac

SEQ ID NO: 999945 - DNA, 25 bp, Homo sapien
aatgctctacctgtgagctataccc

SEQ ID NO: 999946 - DNA, 25 bp, Homo sapien
tccacgttcctattttaagcgattc

SEQ ID NO: 999947 - DNA, 25 bp, Homo sapien
tggagagcagctgcgcgatctggac

SEQ ID NO: 999948 - DNA, 25 bp, Homo sapien
gagagcagctgcgcgatctggactc

SEQ ID NO: 999949 - DNA, 25 bp, Homo sapien
ctgcaacctccacgttcctatttta

SEQ ID NO: 999950 - DNA, 25 bp, Homo sapien
tctggtccttgaaactatgttaacg

SEQ ID NO: 999951 - DNA, 25 bp, Homo sapien
tcaagtggggttgttgtctagcaac

SEQ ID NO: 999952 - DNA, 25 bp, Homo sapien
gttgtctagcaacatattctggtcc

SEQ ID NO: 999953 - DNA, 25 bp, Homo sapien
ctatgttaacgctggccctcttaag

SEQ ID NO: 999954 - DNA, 25 bp, Homo sapien
tatctcataagcaagcagagcggtg

SEQ ID NO: 999955 - DNA, 25 bp, Homo sapien
gaattttgccaaggctgcggatgca

SEQ ID NO: 999956 - DNA, 25 bp, Homo sapien
gaggccaccagtttgattccagatg

SEQ ID NO: 999957 - DNA, 25 bp, Homo sapien
cctgaagagtccgtaaaagtgccac

SEQ ID NO: 999958 - DNA, 25 bp, Homo sapien
aaacacttagagctttggcctagaa

SEQ ID NO: 999959 - DNA, 25 bp, Homo sapien
tatacgctcactagatacccacaaa

SEQ ID NO: 999960 - DNA, 25 bp, Homo sapien
tggcctagaacttgggtacttgccc

SEQ ID NO: 999961 - DNA, 25 bp, Homo sapien
tctattagtggaaacggtctctcgg

SEQ ID NO: 999962 - DNA, 25 bp, Homo sapien
gcctcgttctccacgttgcccccaa

SEQ ID NO: 999963 - DNA, 25 bp, Homo sapien
tctccacgttgcccccaaactccag

SEQ ID NO: 999964 - DNA, 25 bp, Homo sapien
cagcctcgttctccacgttgccccc

SEQ ID NO: 999965 - DNA, 25 bp, Homo sapien
ccacgttgcccccaaactccagctc

SEQ ID NO: 999966 - DNA, 25 bp, Homo sapien
tctccatgcttctcctctctcaaag

SEQ ID NO: 999967 - DNA, 25 bp, Homo sapien
ctctccatgcttctcctctctcaaa

SEQ ID NO: 999968 - DNA, 25 bp, Homo sapien
tccatgcttctcctctctcaaagcc

SEQ ID NO: 999969 - DNA, 25 bp, Homo sapien
catgcttctcctctctcaaagccat

SEQ ID NO: 999970 - DNA, 25 bp, Homo sapien
agcttggcttccctatcatcaaggg

SEQ ID NO: 999971 - DNA, 25 bp, Homo sapien
cactgtccgtgactggatattttgg

SEQ ID NO: 999972 - DNA, 25 bp, Homo sapien
ggcctaatatgggaaatcgggcaga

SEQ ID NO: 999973 - DNA, 25 bp, Homo sapien
tatgtggatatttcccactcctcca

SEQ ID NO: 999974 - DNA, 25 bp, Homo sapien
gaagacgtcatctaaggttactgta

SEQ ID NO: 999975 - DNA, 25 bp, Homo sapien
aagaagctcatgcaccttagggaag

SEQ ID NO: 999976 - DNA, 25 bp, Homo sapien
tcgtcaaataggcaggaccggctgg

SEQ ID NO: 999977 - DNA, 25 bp, Homo sapien
cctggtaccagcaagggcactttga

SEQ ID NO: 999978 - DNA, 25 bp, Homo sapien
aagggggcacctggatttgaatcag

SEQ ID NO: 999979 - DNA, 25 bp, Homo sapien
tttgaatcagggacctcttgatttg

SEQ ID NO: 999980 - DNA, 25 bp, Homo sapien
atcagggacctcttgatttgcagtc

SEQ ID NO: 999981 - DNA, 25 bp, Homo sapien
gggcacctggatttgaatcagggac

SEQ ID NO: 999982 - DNA, 25 bp, Homo sapien
tcactgcggtttgcagccagaacat

SEQ ID NO: 999983 - DNA, 25 bp, Homo sapien
aatcactgcggtttgcagccagaac

SEQ ID NO: 999984 - DNA, 25 bp, Homo sapien
atcactgcggtttgcagccagaaca

SEQ ID NO: 999985 - DNA, 25 bp, Homo sapien
actgcggtttgcagccagaacatcc

SEQ ID NO: 999986 - DNA, 25 bp, Homo sapien
gtggtcacagacatgacacaggacg

SEQ ID NO: 999987 - DNA, 25 bp, Homo sapien
tggtcacagacatgacacaggacgg

SEQ ID NO: 999988 - DNA, 25 bp, Homo sapien
gacgcaatcatgagaggcgaggacc

SEQ ID NO: 999989 - DNA, 25 bp, Homo sapien
aggctggcagagacgcaatcatgag

SEQ ID NO: 999990 - DNA, 25 bp, Homo sapien
atgagaggcgaggaccctgtccctg

SEQ ID NO: 999991 - DNA, 25 bp, Homo sapien
acctggcgggtctgctgagccctaa

SEQ ID NO: 999992 - DNA, 25 bp, Homo sapien
ctctctctggaaagatcacaccctt

SEQ ID NO: 999993 - DNA, 25 bp, Homo sapien
tttcatgtttctcctcgactctctc

SEQ ID NO: 999994 - DNA, 25 bp, Homo sapien
cacaaaatacctgatgcctccctgg

SEQ ID NO: 999995 - DNA, 25 bp, Homo sapien
aaagatcacacccttcctggccttt

SEQ ID NO: 999996 - DNA, 25 bp, Homo sapien
ccttcccttgttcaatctgggagag

SEQ ID NO: 999997 - DNA, 25 bp, Homo sapien
tcagcccgggaagaaacagagtcca

SEQ ID NO: 999998 - DNA, 25 bp, Homo sapien
aaatgtccacagtgccgggatgaag

SEQ ID NO: 999999 - DNA, 25 bp, Homo sapien
tcaaacaaggagagcagcagtagcc

SEQ ID NO: 1000000 - DNA, 25 bp, Homo sapien
ttttgtcacgttccagtcagagctg

SEQ ID NO: 1000001 - DNA, 25 bp, Homo sapien
aaagagaccagcatctcgcagttgc

SEQ ID NO: 1000002 - DNA, 25 bp, Homo sapien
caaagagaccagcatctcgcagttg

SEQ ID NO: 1000003 - DNA, 25 bp, Homo sapien
aagagaccagcatctcgcagttgcc

SEQ ID NO: 1000004 - DNA, 25 bp, Homo sapien
agagaccagcatctcgcagttgccc

SEQ ID NO: 1000005 - DNA, 25 bp, Homo sapien
cacagccacatcatcaaatgtcata

SEQ ID NO: 1000006 - DNA, 25 bp, Homo sapien
ccacatcatcaaatgtcataggcac

SEQ ID NO: 1000007 - DNA, 25 bp, Homo sapien
gccacatcatcaaatgtcataggca

SEQ ID NO: 1000008 - DNA, 25 bp, Homo sapien
cagccacatcatcaaatgtcatagg

SEQ ID NO: 1000009 - DNA, 25 bp, Homo sapien
gctcacaggcttggcccgcggcctc

SEQ ID NO: 1000010 - DNA, 25 bp, Homo sapien
ccacacgctcacaggcttggcccgc

SEQ ID NO: 1000011 - DNA, 25 bp, Homo sapien
acgctcacaggcttggcccgcggcc

SEQ ID NO: 1000012 - DNA, 25 bp, Homo sapien
acacgctcacaggcttggcccgcgg

SEQ ID NO: 1000013 - DNA, 25 bp, Homo sapien
cggctgtcttctcgcaatcagccag

SEQ ID NO: 1000014 - DNA, 25 bp, Homo sapien
ctccacggctgtcttctcgcaatca

SEQ ID NO: 1000015 - DNA, 25 bp, Homo sapien
cacggctgtcttctcgcaatcagcc

SEQ ID NO: 1000016 - DNA, 25 bp, Homo sapien
tccacggctgtcttctcgcaatcag

SEQ ID NO: 1000017 - DNA, 25 bp, Homo sapien
gagcagcctgcgattcaatcttcct

SEQ ID NO: 1000018 - DNA, 25 bp, Homo sapien
agcagcctgcgattcaatcttcctc

SEQ ID NO: 1000019 - DNA, 25 bp, Homo sapien
gcagcctgcgattcaatcttcctct

SEQ ID NO: 1000020 - DNA, 25 bp, Homo sapien
tcccaggtaccactaagccgctggg

SEQ ID NO: 1000021 - DNA, 25 bp, Homo sapien
cccaggtaccactaagccgctgggg

SEQ ID NO: 1000022 - DNA, 25 bp, Homo sapien
ccaggtaccactaagccgctggggg

SEQ ID NO: 1000023 - DNA, 25 bp, Homo sapien
caggtaccactaagccgctgggggg

SEQ ID NO: 1000024 - DNA, 25 bp, Homo sapien
gagcgccaagcagagaaaagagcct

SEQ ID NO: 1000025 - DNA, 25 bp, Homo sapien
aatccaggccgcgagttcgtgcgcg

SEQ ID NO: 1000026 - DNA, 25 bp, Homo sapien
aggcgcggtagtacggctcggctcc

SEQ ID NO: 1000027 - DNA, 25 bp, Homo sapien
caagcgcagtaggccccggcagacg

SEQ ID NO: 1000028 - DNA, 25 bp, Homo sapien
ccccgcggcccagataaagtcgtcg

SEQ ID NO: 1000029 - DNA, 25 bp, Homo sapien
cccagataaagtcgtcgccgctgct

SEQ ID NO: 1000030 - DNA, 25 bp, Homo sapien
ggcccagataaagtcgtcgccgctg

SEQ ID NO: 1000031 - DNA, 25 bp, Homo sapien
cgcggcccagataaagtcgtcgccg

SEQ ID NO: 1000032 - DNA, 25 bp, Homo sapien
gcccgcagttgcgtcaacgccttta

SEQ ID NO: 1000033 - DNA, 25 bp, Homo sapien
ttgcgtcaacgcctttagcgcccgg

SEQ ID NO: 1000034 - DNA, 25 bp, Homo sapien
ggccgacgaaggcacatgaggcttc

SEQ ID NO: 1000035 - DNA, 25 bp, Homo sapien
tgccgccgctgctccctgactgccc

SEQ ID NO: 1000036 - DNA, 25 bp, Homo sapien
cctgcagctccggaggcgaactgca

SEQ ID NO: 1000037 - DNA, 25 bp, Homo sapien
tggaataaatacttcgaacaatagg

SEQ ID NO: 1000038 - DNA, 25 bp, Homo sapien
ggcgcggccgaacaggcacttctgc

SEQ ID NO: 1000039 - DNA, 25 bp, Homo sapien
cgtgtgcgcgcgcagtcactgcgct

SEQ ID NO: 1000040 - DNA, 25 bp, Homo sapien
ccaggtcctcggaccagaagtggag

SEQ ID NO: 1000041 - DNA, 25 bp, Homo sapien
cccaggtcctcggaccagaagtgga

SEQ ID NO: 1000042 - DNA, 25 bp, Homo sapien
ttcccaggtcctcggaccagaagtg

SEQ ID NO: 1000043 - DNA, 25 bp, Homo sapien
tcccaggtcctcggaccagaagtgg

SEQ ID NO: 1000044 - DNA, 25 bp, Homo sapien
atttctcttgctgtatatgtggttt

SEQ ID NO: 1000045 - DNA, 25 bp, Homo sapien
cgaggtatgactagaaagacctttc

SEQ ID NO: 1000046 - DNA, 25 bp, Homo sapien
ccttgatcgtcttcctcgaggtatg

SEQ ID NO: 1000047 - DNA, 25 bp, Homo sapien
tctcatacagggaagacgacttgtc

SEQ ID NO: 1000048 - DNA, 25 bp, Homo sapien
gtgatgttccagccgggtggacagt

SEQ ID NO: 1000049 - DNA, 25 bp, Homo sapien
ttccagccgggtggacagtggacaa

SEQ ID NO: 1000050 - DNA, 25 bp, Homo sapien
ccagccgggtggacagtggacaact

SEQ ID NO: 1000051 - DNA, 25 bp, Homo sapien
tgttccagccgggtggacagtggac

SEQ ID NO: 1000052 - DNA, 25 bp, Homo sapien
cctgttttatggcagctggatctct

SEQ ID NO: 1000053 - DNA, 25 bp, Homo sapien
gatctcttgccctcaatgggctcca

SEQ ID NO: 1000054 - DNA, 25 bp, Homo sapien
ctgtagcttctcctgttttatggca

SEQ ID NO: 1000055 - DNA, 25 bp, Homo sapien
gttttatggcagctggatctcttgc

SEQ ID NO: 1000056 - DNA, 25 bp, Homo sapien
tgatctgagtcaaatactctactcc

SEQ ID NO: 1000057 - DNA, 25 bp, Homo sapien
cttgatctgagtcaaatactctact

SEQ ID NO: 1000058 - DNA, 25 bp, Homo sapien
gatctgagtcaaatactctactcct

SEQ ID NO: 1000059 - DNA, 25 bp, Homo sapien
ggacagctggatttgagccagggac

SEQ ID NO: 1000060 - DNA, 25 bp, Homo sapien
ccaccccgggggctactgatgatgt

SEQ ID NO: 1000061 - DNA, 25 bp, Homo sapien
aacctgtagtgagggatgccactgc

SEQ ID NO: 1000062 - DNA, 25 bp, Homo sapien
gagcacctaagacgcctcatggatg

SEQ ID NO: 1000063 - DNA, 25 bp, Homo sapien
tctgtcaggcaaacctgtagtgagg

SEQ ID NO: 1000064 - DNA, 25 bp, Homo sapien
ggcctaatatgggaaatcgggcaga

SEQ ID NO: 1000065 - DNA, 25 bp, Homo sapien
tatgtggatatttcccactcctcca

SEQ ID NO: 1000066 - DNA, 25 bp, Homo sapien
cactgtccgtgactggatattttgg

SEQ ID NO: 1000067 - DNA, 25 bp, Homo sapien
agcttggcttccctatcatcaaggg

SEQ ID NO: 1000068 - DNA, 25 bp, Homo sapien
tactctcaccgtaggtcaagagaca

SEQ ID NO: 1000069 - DNA, 25 bp, Homo sapien
ggtgtgtgaatcttcgtctctcagc

SEQ ID NO: 1000070 - DNA, 25 bp, Homo sapien
tccacatctacatatgttcttgagg

SEQ ID NO: 1000071 - DNA, 25 bp, Homo sapien
ctggtcggctttcaggcaggaagaa

SEQ ID NO: 1000072 - DNA, 25 bp, Homo sapien
tcaaatgctctacccctaagctata

SEQ ID NO: 1000073 - DNA, 25 bp, Homo sapien
gaaggggcacctggatttgaaccag

SEQ ID NO: 1000074 - DNA, 25 bp, Homo sapien
agtcaaatgctctacccctaagcta

SEQ ID NO: 1000075 - DNA, 25 bp, Homo sapien
tggatttgaaccagggaccttttga

SEQ ID NO: 1000076 - DNA, 25 bp, Homo sapien
cattcgctgaatcccacgatgtgtc

SEQ ID NO: 1000077 - DNA, 25 bp, Homo sapien
ccattcgctgaatcccacgatgtgt

SEQ ID NO: 1000078 - DNA, 25 bp, Homo sapien
agtagccttatgcagtttatctctg

SEQ ID NO: 1000079 - DNA, 25 bp, Homo sapien
agcagagtagccttatgcagtttat

SEQ ID NO: 1000080 - DNA, 25 bp, Homo sapien
gcacactcctgcataaccacttgtg

SEQ ID NO: 1000081 - DNA, 25 bp, Homo sapien
caagctcaaatgcacactcctgcat

SEQ ID NO: 1000082 - DNA, 25 bp, Homo sapien
gtgcctcagcctcctgtgtggctgg

SEQ ID NO: 1000083 - DNA, 25 bp, Homo sapien
ttgtttaccttttcaaagatccagc

SEQ ID NO: 1000084 - DNA, 25 bp, Homo sapien
caatctcagctcactctgacttctg

SEQ ID NO: 1000085 - DNA, 25 bp, Homo sapien
cctcccaggttcaagtgattctcgt

SEQ ID NO: 1000086 - DNA, 25 bp, Homo sapien
tccttcctatagcttgtgtcagttt

SEQ ID NO: 1000087 - DNA, 25 bp, Homo sapien
cttgtgtcagttttctcagatgact

SEQ ID NO: 1000088 - DNA, 25 bp, Homo sapien
ctatagcttgtgtcagttttctcag

SEQ ID NO: 1000089 - DNA, 25 bp, Homo sapien
tagcttgtgtcagttttctcagatg

SEQ ID NO: 1000090 - DNA, 25 bp, Homo sapien
cctgcaaggtggacgagagggtaag

SEQ ID NO: 1000091 - DNA, 25 bp, Homo sapien
tcctgcaaggtggacgagagggtaa

SEQ ID NO: 1000092 - DNA, 25 bp, Homo sapien
tgcaaggtggacgagagggtaagga

SEQ ID NO: 1000093 - DNA, 25 bp, Homo sapien
ttcctgcaaggtggacgagagggta

SEQ ID NO: 1000094 - DNA, 25 bp, Homo sapien
tcaatggttgcttatggctggcatt

SEQ ID NO: 1000095 - DNA, 25 bp, Homo sapien
ctggtaggtattcaatggttgctta

SEQ ID NO: 1000096 - DNA, 25 bp, Homo sapien
tttttcagatttctcttcctctctc

SEQ ID NO: 1000097 - DNA, 25 bp, Homo sapien
ccacctcagccctaccaaaatgcta

SEQ ID NO: 1000098 - DNA, 25 bp, Homo sapien
ctcagccctaccaaaatgctaggat

SEQ ID NO: 1000099 - DNA, 25 bp, Homo sapien
atccgcccacctcagccctaccaaa

SEQ ID NO: 1000100 - DNA, 25 bp, Homo sapien
tgctctacccctgagctatatcccc

SEQ ID NO: 1000101 - DNA, 25 bp, Homo sapien
aatgctctacccctgagctatatcc

SEQ ID NO: 1000102 - DNA, 25 bp, Homo sapien
tcaaatgctctacccctgagctata

SEQ ID NO: 1000103 - DNA, 25 bp, Homo sapien
gatctgcagtcaaatgctctacccc

SEQ ID NO: 1000104 - DNA, 25 bp, Homo sapien
tcataaatcagacaaagctcgggca

SEQ ID NO: 1000105 - DNA, 25 bp, Homo sapien
ggacaaatccaagagttagttattg

SEQ ID NO: 1000106 - DNA, 25 bp, Homo sapien
ctaggaaggaaacttagaagataca

SEQ ID NO: 1000107 - DNA, 25 bp, Homo sapien
taatgcagcaatcaaatagatatgt

SEQ ID NO: 1000108 - DNA, 25 bp, Homo sapien
tctggttccatgcaaggctatggct

SEQ ID NO: 1000109 - DNA, 25 bp, Homo sapien
tgttgcctgcaacctggtgagctgg

SEQ ID NO: 1000110 - DNA, 25 bp, Homo sapien
gagacgccatggcacccaaaagctt

SEQ ID NO: 1000111 - DNA, 25 bp, Homo sapien
ctccaagggcgatccaggtgcagag

SEQ ID NO: 1000112 - DNA, 25 bp, Homo sapien
tgcctgaaggacacaagttgctttg

SEQ ID NO: 1000113 - DNA, 25 bp, Homo sapien
aggaaagaccatctctcccgggcat

SEQ ID NO: 1000114 - DNA, 25 bp, Homo sapien
gcacagctctaaaacgtcatgacag

SEQ ID NO: 1000115 - DNA, 25 bp, Homo sapien
aattgctcagataacaccgggtggg

SEQ ID NO: 1000116 - DNA, 25 bp, Homo sapien
tgcgcctttcctcggaggccgggac

SEQ ID NO: 1000117 - DNA, 25 bp, Homo sapien
gcccgagtgggcgtgcgcctttcct

SEQ ID NO: 1000118 - DNA, 25 bp, Homo sapien
gcatcgtacccgagtccgtgatcat

SEQ ID NO: 1000119 - DNA, 25 bp, Homo sapien
aaggtgtctcgggtatgaccgaggg

SEQ ID NO: 1000120 - DNA, 25 bp, Homo sapien
taaggcgtttagatctgagaactgg

SEQ ID NO: 1000121 - DNA, 25 bp, Homo sapien
cccaagttttgtcttgggaagcctg

SEQ ID NO: 1000122 - DNA, 25 bp, Homo sapien
cctgggcaccgtttgggctaggttg

SEQ ID NO: 1000123 - DNA, 25 bp, Homo sapien
ttgtgtgtgggctgtgacgatgctg

SEQ ID NO: 1000124 - DNA, 25 bp, Homo sapien
gttctgcaaccgtggtggctcctga

SEQ ID NO: 1000125 - DNA, 25 bp, Homo sapien
ctggagccagttctgcaaccgtggt

SEQ ID NO: 1000126 - DNA, 25 bp, Homo sapien
aaccgtggtggctcctgagctttgg

SEQ ID NO: 1000127 - DNA, 25 bp, Homo sapien
tggccagtccgaggcagccatggat

SEQ ID NO: 1000128 - DNA, 25 bp, Homo sapien
taggcaaattggatgttgttgggca

SEQ ID NO: 1000129 - DNA, 25 bp, Homo sapien
aggtctggctgcacagttaagtagc

SEQ ID NO: 1000130 - DNA, 25 bp, Homo sapien
cagggacagtcaagtgtccttttca

SEQ ID NO: 1000131 - DNA, 25 bp, Homo sapien
gccattgacctttcagatctgatga

SEQ ID NO: 1000132 - DNA, 25 bp, Homo sapien
tgttcacagtgaaccaacagtcttg

SEQ ID NO: 1000133 - DNA, 25 bp, Homo sapien
tcctctatgggaaccagatctggtg

SEQ ID NO: 1000134 - DNA, 25 bp, Homo sapien
gccaaattccgaggctgggctcagg

SEQ ID NO: 1000135 - DNA, 25 bp, Homo sapien
tggcctacatgtcaaggctgccggc

SEQ ID NO: 1000136 - DNA, 25 bp, Homo sapien
gagaataatcgagccagactttcct

SEQ ID NO: 1000137 - DNA, 25 bp, Homo sapien
ctttcaatcgactttgaggctgctg

SEQ ID NO: 1000138 - DNA, 25 bp, Homo sapien
tcccgggtcgcagctgagaataatc

SEQ ID NO: 1000139 - DNA, 25 bp, Homo sapien
tctgaatctggaatgcctttgctcc

SEQ ID NO: 1000140 - DNA, 25 bp, Homo sapien
cagggctgcaactggtccccgtagg

SEQ ID NO: 1000141 - DNA, 25 bp, Homo sapien
agggctgcaactggtccccgtaggg

SEQ ID NO: 1000142 - DNA, 25 bp, Homo sapien
tcagggctgcaactggtccccgtag

SEQ ID NO: 1000143 - DNA, 25 bp, Homo sapien
tgtccagtcccgaagcaggaaaagg

SEQ ID NO: 1000144 - DNA, 25 bp, Homo sapien
cttttgtccagtcccgaagcaggaa

SEQ ID NO: 1000145 - DNA, 25 bp, Homo sapien
ttgtccagtcccgaagcaggaaaag

SEQ ID NO: 1000146 - DNA, 25 bp, Homo sapien
ctgcttttgtccagtcccgaagcag

SEQ ID NO: 1000147 - DNA, 25 bp, Homo sapien
ttggatcttcactgagggctgcaac

SEQ ID NO: 1000148 - DNA, 25 bp, Homo sapien
ctctggcagggatgactgaatctga

SEQ ID NO: 1000149 - DNA, 25 bp, Homo sapien
ctcattagtttatgggtgtagcccc

SEQ ID NO: 1000150 - DNA, 25 bp, Homo sapien
ggcttgtgaactctctggcagggat

SEQ ID NO: 1000151 - DNA, 25 bp, Homo sapien
tggcattgaagcagatggcccagaa

SEQ ID NO: 1000152 - DNA, 25 bp, Homo sapien
cattgaagcagatggcccagaagaa

SEQ ID NO: 1000153 - DNA, 25 bp, Homo sapien
ggcattgaagcagatggcccagaag

SEQ ID NO: 1000154 - DNA, 25 bp, Homo sapien
gcattgaagcagatggcccagaaga

SEQ ID NO: 1000155 - DNA, 25 bp, Homo sapien
tgattaataaccttgattccagttg

SEQ ID NO: 1000156 - DNA, 25 bp, Homo sapien
tttcctttagtggtcaagaacgaga

SEQ ID NO: 1000157 - DNA, 25 bp, Homo sapien
tcaagaacgagacattgttcagact

SEQ ID NO: 1000158 - DNA, 25 bp, Homo sapien
gacattgttcagactattgccatct

SEQ ID NO: 1000159 - DNA, 25 bp, Homo sapien
tggtcaccagcattggccctcagaa

SEQ ID NO: 1000160 - DNA, 25 bp, Homo sapien
cataattgcatttgagcagtaagtt

SEQ ID NO: 1000161 - DNA, 25 bp, Homo sapien
gagcagtaagtttagctttaaccat

SEQ ID NO: 1000162 - DNA, 25 bp, Homo sapien
cagatatctaactcacataattgca

SEQ ID NO: 1000163 - DNA, 25 bp, Homo sapien
ttgagcagtaagtttagctttaacc

SEQ ID NO: 1000164 - DNA, 25 bp, Homo sapien
ggaattaagtaggagcctcagtcac

SEQ ID NO: 1000165 - DNA, 25 bp, Homo sapien
gaggaaccatgacagcttaaaggag

SEQ ID NO: 1000166 - DNA, 25 bp, Homo sapien
acacattttaggcacacgcggacac

SEQ ID NO: 1000167 - DNA, 25 bp, Homo sapien
gaagtcagggcagtaggcactttgt

SEQ ID NO: 1000168 - DNA, 25 bp, Homo sapien
tggggggacagtactgggagggtca

SEQ ID NO: 1000169 - DNA, 25 bp, Homo sapien
tgataggagaaggttgcccactggc

SEQ ID NO: 1000170 - DNA, 25 bp, Homo sapien
taggagaaggttgcccactggcctg

SEQ ID NO: 1000171 - DNA, 25 bp, Homo sapien
ctgataggagaaggttgcccactgg

SEQ ID NO: 1000172 - DNA, 25 bp, Homo sapien
tacgagcaggttcttgagtcccagg

SEQ ID NO: 1000173 - DNA, 25 bp, Homo sapien
aattgtggccgtgcgccctcttctg

SEQ ID NO: 1000174 - DNA, 25 bp, Homo sapien
tgtctgccttcagtcggcccatctg

SEQ ID NO: 1000175 - DNA, 25 bp, Homo sapien
ggaaaccagcatgtcccgtgaacgc

SEQ ID NO: 1000176 - DNA, 25 bp, Homo sapien
ggctccccttcaagccctctcccca

SEQ ID NO: 1000177 - DNA, 25 bp, Homo sapien
caactttgacacagtattttactca

SEQ ID NO: 1000178 - DNA, 25 bp, Homo sapien
ccaataccaggagccctcatttcag

SEQ ID NO: 1000179 - DNA, 25 bp, Homo sapien
aaacatagcacagggtggatccaag

SEQ ID NO: 1000180 - DNA, 25 bp, Homo sapien
atgaattgaattgcgccccccaaga

SEQ ID NO: 1000181 - DNA, 25 bp, Homo sapien
atgtaactcacccaggacagaaggg

SEQ ID NO: 1000182 - DNA, 25 bp, Homo sapien
taaggagagtcaggtgttccctccc

SEQ ID NO: 1000183 - DNA, 25 bp, Homo sapien
tggctaaggagagtcaggtgttccc

SEQ ID NO: 1000184 - DNA, 25 bp, Homo sapien
taaatgtaactcacccaggacagaa

SEQ ID NO: 1000185 - DNA, 25 bp, Homo sapien
tatgctgtgcggacgcagacactgc

SEQ ID NO: 1000186 - DNA, 25 bp, Homo sapien
ggtgggagccttccaagaacttcag

SEQ ID NO: 1000187 - DNA, 25 bp, Homo sapien
cagacactgcgggaaggaaacaggt

SEQ ID NO: 1000188 - DNA, 25 bp, Homo sapien
ccagcaagggttcgctgagtctctg

SEQ ID NO: 1000189 - DNA, 25 bp, Homo sapien
gcaagaaagggtcctcgtgagaact

SEQ ID NO: 1000190 - DNA, 25 bp, Homo sapien
gaaagggtcctcgtgagaactaggc

SEQ ID NO: 1000191 - DNA, 25 bp, Homo sapien
ctgtgggcaagaaagggtcctcgtg

SEQ ID NO: 1000192 - DNA, 25 bp, Homo sapien
aagaaagggtcctcgtgagaactag

SEQ ID NO: 1000193 - DNA, 25 bp, Homo sapien
cgggagcctgtgtggatcgcctggt

SEQ ID NO: 1000194 - DNA, 25 bp, Homo sapien
gcggcttcgccgtgaatgagctggt

SEQ ID NO: 1000195 - DNA, 25 bp, Homo sapien
gcccaggtgcgacttgcggctgaag

SEQ ID NO: 1000196 - DNA, 25 bp, Homo sapien
actaggttggttttggagctgaagc

SEQ ID NO: 1000197 - DNA, 25 bp, Homo sapien
gtgggcgaccagattaggccgcgag

SEQ ID NO: 1000198 - DNA, 25 bp, Homo sapien
acgcgcgggtgccgcgccaggtgct

SEQ ID NO: 1000199 - DNA, 25 bp, Homo sapien
gcgaccagattaggccgcgagccga

SEQ ID NO: 1000200 - DNA, 25 bp, Homo sapien
cgagccgaagcggcggtcacactgc

SEQ ID NO: 1000201 - DNA, 25 bp, Homo sapien
gcagtcggagcacgcgaaaggcttt

SEQ ID NO: 1000202 - DNA, 25 bp, Homo sapien
ccctcgctgcggtgcagacactggt

SEQ ID NO: 1000203 - DNA, 25 bp, Homo sapien
agccgaagctcaagccgcagtcgga

SEQ ID NO: 1000204 - DNA, 25 bp, Homo sapien
gcgaggttctttttccagccgaagc

SEQ ID NO: 1000205 - DNA, 25 bp, Homo sapien
tgcttgtgcgtgaagctgcgtgcgc

SEQ ID NO: 1000206 - DNA, 25 bp, Homo sapien
cttgtgcgtgaagctgcgtgcgcac

SEQ ID NO: 1000207 - DNA, 25 bp, Homo sapien
ggtgccgcaccaagtgctgcttgtg

SEQ ID NO: 1000208 - DNA, 25 bp, Homo sapien
tgctgcttgtgcgtgaagctgcgtg

SEQ ID NO: 1000209 - DNA, 25 bp, Homo sapien
cagatgggccttcttgctgaagcgc

SEQ ID NO: 1000210 - DNA, 25 bp, Homo sapien
tgcgagcccaggtggatcttctggc

SEQ ID NO: 1000211 - DNA, 25 bp, Homo sapien
gctggtgccgaatcaagtgcgtctt

SEQ ID NO: 1000212 - DNA, 25 bp, Homo sapien
gaaagcgcttctcgcattccgtgca

SEQ ID NO: 1000213 - DNA, 25 bp, Homo sapien
gctgggaagtaacgatagatgctgg

SEQ ID NO: 1000214 - DNA, 25 bp, Homo sapien
gccgtagggcttctccggcatcgga

SEQ ID NO: 1000215 - DNA, 25 bp, Homo sapien
cctggctccagtttgtacgcggcag

SEQ ID NO: 1000216 - DNA, 25 bp, Homo sapien
gtgcagtcgcaacgtcagctggtcc

SEQ ID NO: 1000217 - DNA, 25 bp, Homo sapien
aaacaagaattgtctattgagctcc

SEQ ID NO: 1000218 - DNA, 25 bp, Homo sapien
tattgagctccacgtgcggcaacgt

SEQ ID NO: 1000219 - DNA, 25 bp, Homo sapien
gtgcggcaacgtctatttaaccaca

SEQ ID NO: 1000220 - DNA, 25 bp, Homo sapien
tggagccccgcggtctggctctgct

SEQ ID NO: 1000221 - DNA, 25 bp, Homo sapien
ctcctgaacctgtgatgcgtgtgaa

SEQ ID NO: 1000222 - DNA, 25 bp, Homo sapien
cgcttcccgggagtgaccaaatccg

SEQ ID NO: 1000223 - DNA, 25 bp, Homo sapien
gtgtgaacaccacacggctcccggg

SEQ ID NO: 1000224 - DNA, 25 bp, Homo sapien
gaccaaatccgcagctcttctcagg

SEQ ID NO: 1000225 - DNA, 25 bp, Homo sapien
gaggcagtgaaaatgttgatcaaag

SEQ ID NO: 1000226 - DNA, 25 bp, Homo sapien
aggcagtgaaaatgttgatcaaagc

SEQ ID NO: 1000227 - DNA, 25 bp, Homo sapien
tgcagggagcctcggcttgttctgt

SEQ ID NO: 1000228 - DNA, 25 bp, Homo sapien
tcctccggtgtaggggcctcgtgcc

SEQ ID NO: 1000229 - DNA, 25 bp, Homo sapien
gcctcggcttgttctgtgtgggcac

SEQ ID NO: 1000230 - DNA, 25 bp, Homo sapien
ccttctgtgctgagcacgcctggcc

SEQ ID NO: 1000231 - DNA, 25 bp, Homo sapien
tgagcacacccccagtgctctctct

SEQ ID NO: 1000232 - DNA, 25 bp, Homo sapien
tctgctcctgggcattatgggatcc

SEQ ID NO: 1000233 - DNA, 25 bp, Homo sapien
ccctagaagaggacatctgctcctg

SEQ ID NO: 1000234 - DNA, 25 bp, Homo sapien
tctcttccctagaagaggacatctg

SEQ ID NO: 1000235 - DNA, 25 bp, Homo sapien
atctctggctgtcccacagagaatc

SEQ ID NO: 1000236 - DNA, 25 bp, Homo sapien
ggccatctctggctgtcccacagag

SEQ ID NO: 1000237 - DNA, 25 bp, Homo sapien
tttggggggccatctctggctgtcc

SEQ ID NO: 1000238 - DNA, 25 bp, Homo sapien
gggggccatctctggctgtcccaca

SEQ ID NO: 1000239 - DNA, 25 bp, Homo sapien
ggagctgagggcctccaaggtctct

SEQ ID NO: 1000240 - DNA, 25 bp, Homo sapien
tgagggcctccaaggtctctctcat

SEQ ID NO: 1000241 - DNA, 25 bp, Homo sapien
gggagctgagggcctccaaggtctc

SEQ ID NO: 1000242 - DNA, 25 bp, Homo sapien
agctgagggcctccaaggtctctct

SEQ ID NO: 1000243 - DNA, 25 bp, Homo sapien
tcctcctggggatcaggccacagaa

SEQ ID NO: 1000244 - DNA, 25 bp, Homo sapien
ctcctcctggggatcaggccacaga

SEQ ID NO: 1000245 - DNA, 25 bp, Homo sapien
ctccgcccgcgccgcggggacccag

SEQ ID NO: 1000246 - DNA, 25 bp, Homo sapien
cctcctgccccgccggctctgctca

SEQ ID NO: 1000247 - DNA, 25 bp, Homo sapien
gctggccggccgctccgcccgcgcc

SEQ ID NO: 1000248 - DNA, 25 bp, Homo sapien
caggcgcccgggcctcctgccccgc

SEQ ID NO: 1000249 - DNA, 25 bp, Homo sapien
ctcgggtgctgacggcctgaaagac

SEQ ID NO: 1000250 - DNA, 25 bp, Homo sapien
tgctgacggcctgaaagactgacag

SEQ ID NO: 1000251 - DNA, 25 bp, Homo sapien
cctgcagctcgggtgctgacggcct

SEQ ID NO: 1000252 - DNA, 25 bp, Homo sapien
tgacagactgacagccccgaaactt

SEQ ID NO: 1000253 - DNA, 25 bp, Homo sapien
gcttaggtgggcaggtgatggtcct

SEQ ID NO: 1000254 - DNA, 25 bp, Homo sapien
tggtcctaaggctccgagcctggag

SEQ ID NO: 1000255 - DNA, 25 bp, Homo sapien
gcctggagtaggtgtggaagtggga

SEQ ID NO: 1000256 - DNA, 25 bp, Homo sapien
gtgtggaagtgggagctcaggacgg

SEQ ID NO: 1000257 - DNA, 25 bp, Homo sapien
caaggctgacattgctatgcaggct

SEQ ID NO: 1000258 - DNA, 25 bp, Homo sapien
cctcttgtgatcatgggactcagca

SEQ ID NO: 1000259 - DNA, 25 bp, Homo sapien
cgctaacaggctccgctgggtgagt

SEQ ID NO: 1000260 - DNA, 25 bp, Homo sapien
ggtgacttctcaaagcgctaacagg

SEQ ID NO: 1000261 - DNA, 25 bp, Homo sapien
agatgagtagtggaaaccaatctcc

SEQ ID NO: 1000262 - DNA, 25 bp, Homo sapien
tcaagcgatccaaagatgagtagtg

SEQ ID NO: 1000263 - DNA, 25 bp, Homo sapien
acccacaggcccagttgcttgtgtg

SEQ ID NO: 1000264 - DNA, 25 bp, Homo sapien
taagtatattcaagcgatccaaaga

SEQ ID NO: 1000265 - DNA, 25 bp, Homo sapien
tcaggaccgatgagaggaccaagct

SEQ ID NO: 1000266 - DNA, 25 bp, Homo sapien
tacaggccccgttccattcagaggt

SEQ ID NO: 1000267 - DNA, 25 bp, Homo sapien
gatattaggcaagtaccgcaatcgc

SEQ ID NO: 1000268 - DNA, 25 bp, Homo sapien
ggtgtcacatgatcccagggtagct

SEQ ID NO: 1000269 - DNA, 25 bp, Homo sapien
cctgtgggtgggccctttctccata

SEQ ID NO: 1000270 - DNA, 25 bp, Homo sapien
ttctccatagtctgccgcttcccat

SEQ ID NO: 1000271 - DNA, 25 bp, Homo sapien
cattcccagggtagatgctggcatc

SEQ ID NO: 1000272 - DNA, 25 bp, Homo sapien
gccgcttcccattcccagggtagat

SEQ ID NO: 1000273 - DNA, 25 bp, Homo sapien
cacagtgagcatccttatcagaggc

SEQ ID NO: 1000274 - DNA, 25 bp, Homo sapien
tgatgactgatacccaccgggtctg

SEQ ID NO: 1000275 - DNA, 25 bp, Homo sapien
ccttagagtatgtgaccgcgctcca

SEQ ID NO: 1000276 - DNA, 25 bp, Homo sapien
tactatctgcgtggctaaggcacac

SEQ ID NO: 1000277 - DNA, 25 bp, Homo sapien
ttggtgaagacctgaccccgtggtg

SEQ ID NO: 1000278 - DNA, 25 bp, Homo sapien
caaagggaatgtcctggtccaggga

SEQ ID NO: 1000279 - DNA, 25 bp, Homo sapien
gcccagttcagtgagcccggtaaaa

SEQ ID NO: 1000280 - DNA, 25 bp, Homo sapien
cacacttggcacagatggatggctt

SEQ ID NO: 1000281 - DNA, 25 bp, Homo sapien
ggctgggaatccttcacccaaagct

SEQ ID NO: 1000282 - DNA, 25 bp, Homo sapien
agctcatgttccctttcaagtctac

SEQ ID NO: 1000283 - DNA, 25 bp, Homo sapien
ctgttgggggctgggaatccttcac

SEQ ID NO: 1000284 - DNA, 25 bp, Homo sapien
tacaagtgatctctggtttggcagc

SEQ ID NO: 1000285 - DNA, 25 bp, Homo sapien
ggttttaatcccttcatggacctca

SEQ ID NO: 1000286 - DNA, 25 bp, Homo sapien
aacagccagggcttgtgggcccaga

SEQ ID NO: 1000287 - DNA, 25 bp, Homo sapien
aagctgctcacatcttccagtcacg

SEQ ID NO: 1000288 - DNA, 25 bp, Homo sapien
ttccagtcacgctccagggaacagc

SEQ ID NO: 1000289 - DNA, 25 bp, Homo sapien
gccactgcgctcagccctcgtggtg

SEQ ID NO: 1000290 - DNA, 25 bp, Homo sapien
ccactgcgctcagccctcgtggtga

SEQ ID NO: 1000291 - DNA, 25 bp, Homo sapien
cggctcactgcaagtgcaagctctg

SEQ ID NO: 1000292 - DNA, 25 bp, Homo sapien
tcactgcaagtgcaagctctgcctc

SEQ ID NO: 1000293 - DNA, 25 bp, Homo sapien
tgcagatggatgtccgcgaggacgc

SEQ ID NO: 1000294 - DNA, 25 bp, Homo sapien
tactgacgcaaggagtcaaggatct

SEQ ID NO: 1000295 - DNA, 25 bp, Homo sapien
cttaactactgacgcaaggagtcaa

SEQ ID NO: 1000296 - DNA, 25 bp, Homo sapien
caaggagtcaaggatctaatcccaa

SEQ ID NO: 1000297 - DNA, 25 bp, Homo sapien
cgccgctcgctagtcctgggagtga

SEQ ID NO: 1000298 - DNA, 25 bp, Homo sapien
tcccgctgcgtctctgaaagcgagg

SEQ ID NO: 1000299 - DNA, 25 bp, Homo sapien
ggctgacgcggaccctataacccat

SEQ ID NO: 1000300 - DNA, 25 bp, Homo sapien
aataagaatgcggcgtgacgttggc

SEQ ID NO: 1000301 - DNA, 25 bp, Homo sapien
ggccgcgcccctattcctcggcatt

SEQ ID NO: 1000302 - DNA, 25 bp, Homo sapien
gcggccgcgcccctattcctcggca

SEQ ID NO: 1000303 - DNA, 25 bp, Homo sapien
cgggcggccgcgcccctattcctcg

SEQ ID NO: 1000304 - DNA, 25 bp, Homo sapien
gcgcccctattcctcggcatttctc

SEQ ID NO: 1000305 - DNA, 25 bp, Homo sapien
tctgtatggactgctgatgtggcct

SEQ ID NO: 1000306 - DNA, 25 bp, Homo sapien
gggaagaaacgacagcctcacttct

SEQ ID NO: 1000307 - DNA, 25 bp, Homo sapien
ctgttcagcgggcattgtctttgga

SEQ ID NO: 1000308 - DNA, 25 bp, Homo sapien
caggagaataggatgcctctcactc

SEQ ID NO: 1000309 - DNA, 25 bp, Homo sapien
tttcctggtgagtcgtgtgtgtcca

SEQ ID NO: 1000310 - DNA, 25 bp, Homo sapien
tgtgacccatagagaccgaggctgc

SEQ ID NO: 1000311 - DNA, 25 bp, Homo sapien
ttgtttcctggtgagtcgtgtgtgt

SEQ ID NO: 1000312 - DNA, 25 bp, Homo sapien
ctgtgacccatagagaccgaggctg

SEQ ID NO: 1000313 - DNA, 25 bp, Homo sapien
gtttgggaatcatgcgccgggtgca

SEQ ID NO: 1000314 - DNA, 25 bp, Homo sapien
tgcagcctgcagtgctacttgtcaa

SEQ ID NO: 1000315 - DNA, 25 bp, Homo sapien
ccacacagggccagagtttgggaat

SEQ ID NO: 1000316 - DNA, 25 bp, Homo sapien
gccatgtctattacaagagaacctc

SEQ ID NO: 1000317 - DNA, 25 bp, Homo sapien
gatggatgttctcacccctacagga

SEQ ID NO: 1000318 - DNA, 25 bp, Homo sapien
agtcagctgtgatgccaggtgcaaa

SEQ ID NO: 1000319 - DNA, 25 bp, Homo sapien
tcctctgacaaagacctgggacaca

SEQ ID NO: 1000320 - DNA, 25 bp, Homo sapien
cttggccggcagcaattgattcagc

SEQ ID NO: 1000321 - DNA, 25 bp, Homo sapien
tctgttcctgtcatggtcaccacac

SEQ ID NO: 1000322 - DNA, 25 bp, Homo sapien
cccttttctgttcctgtcatggtca

SEQ ID NO: 1000323 - DNA, 25 bp, Homo sapien
ttattctgccaggatctcagcttcc

SEQ ID NO: 1000324 - DNA, 25 bp, Homo sapien
tccccttttctgttcctgtcatggt

SEQ ID NO: 1000325 - DNA, 25 bp, Homo sapien
gagttggtatataaactggctccca

SEQ ID NO: 1000326 - DNA, 25 bp, Homo sapien
caggctggacgtaccatcaggagtt

SEQ ID NO: 1000327 - DNA, 25 bp, Homo sapien
taacctgcttattacagagagcgag

SEQ ID NO: 1000328 - DNA, 25 bp, Homo sapien
cagagctgcccatagtgtcgctggc

SEQ ID NO: 1000329 - DNA, 25 bp, Homo sapien
taatacaggccagctgatgcagaca

SEQ ID NO: 1000330 - DNA, 25 bp, Homo sapien
tacactcaaccaaccttgtggcatg

SEQ ID NO: 1000331 - DNA, 25 bp, Homo sapien
tcatgcagcattattgcggcacacc

SEQ ID NO: 1000332 - DNA, 25 bp, Homo sapien
gcggcacacctgactgatacaatac

SEQ ID NO: 1000333 - DNA, 25 bp, Homo sapien
aataatggtcctcaggttcagctcg

SEQ ID NO: 1000334 - DNA, 25 bp, Homo sapien
aaataatggtcctcaggttcagctc

SEQ ID NO: 1000335 - DNA, 25 bp, Homo sapien
ataatggtcctcaggttcagctcga

SEQ ID NO: 1000336 - DNA, 25 bp, Homo sapien
taatggtcctcaggttcagctcgaa

SEQ ID NO: 1000337 - DNA, 25 bp, Homo sapien
cataagatcccagtcttcaatgatt

SEQ ID NO: 1000338 - DNA, 25 bp, Homo sapien
caatgattccatgtcgtatcggcca

SEQ ID NO: 1000339 - DNA, 25 bp, Homo sapien
atgaacctttccataagatcccagt

SEQ ID NO: 1000340 - DNA, 25 bp, Homo sapien
tcttcaatgattccatgtcgtatcg

SEQ ID NO: 1000341 - DNA, 25 bp, Homo sapien
aggtcatcaactcccctcaacactc

SEQ ID NO: 1000342 - DNA, 25 bp, Homo sapien
tggtcaactacctttgctgactctc

SEQ ID NO: 1000343 - DNA, 25 bp, Homo sapien
gtttatcgatggcttcatctcctat

SEQ ID NO: 1000344 - DNA, 25 bp, Homo sapien
ctttgtagcatatgtaggtttatcg

SEQ ID NO: 1000345 - DNA, 25 bp, Homo sapien
cactacctatcagggtggtgagtat

SEQ ID NO: 1000346 - DNA, 25 bp, Homo sapien
tacatgaatgagcacacagactctg

SEQ ID NO: 1000347 - DNA, 25 bp, Homo sapien
gcacttactagttagctgacttgag

SEQ ID NO: 1000348 - DNA, 25 bp, Homo sapien
taacagaacaagacccagtcacaga

SEQ ID NO: 1000349 - DNA, 25 bp, Homo sapien
gcctgcgtagccaagcttggtatac

SEQ ID NO: 1000350 - DNA, 25 bp, Homo sapien
gggctcagtgttgcctgcgtagcca

SEQ ID NO: 1000351 - DNA, 25 bp, Homo sapien
tgttgcctgcgtagccaagcttggt

SEQ ID NO: 1000352 - DNA, 25 bp, Homo sapien
tcagtgttgcctgcgtagccaagct

SEQ ID NO: 1000353 - DNA, 25 bp, Homo sapien
agcggaaggaccaatatttgcaaga

SEQ ID NO: 1000354 - DNA, 25 bp, Homo sapien
aggaccaatatttgcaagagggatg

SEQ ID NO: 1000355 - DNA, 25 bp, Homo sapien
gaaggaccaatatttgcaagaggga

SEQ ID NO: 1000356 - DNA, 25 bp, Homo sapien
cggaaggaccaatatttgcaagagg

SEQ ID NO: 1000357 - DNA, 25 bp, Homo sapien
gagccctcactgattcatctttcag

SEQ ID NO: 1000358 - DNA, 25 bp, Homo sapien
caggaaattttgctatggcatgtta

SEQ ID NO: 1000359 - DNA, 25 bp, Homo sapien
aagatacgacaattagcacagtggt

SEQ ID NO: 1000360 - DNA, 25 bp, Homo sapien
ggttgagtcggtatttattcaattg

SEQ ID NO: 1000361 - DNA, 25 bp, Homo sapien
ccatgatggctgattattcaaaata

SEQ ID NO: 1000362 - DNA, 25 bp, Homo sapien
gtgcacttttaccgaactggtctca

SEQ ID NO: 1000363 - DNA, 25 bp, Homo sapien
tcttacatctcaaggtaggaacaaa

SEQ ID NO: 1000364 - DNA, 25 bp, Homo sapien
gccttcttacatctcaaggtaggaa

SEQ ID NO: 1000365 - DNA, 25 bp, Homo sapien
cagtgacacgccatggctttgcatt

SEQ ID NO: 1000366 - DNA, 25 bp, Homo sapien
taaggagctgcttcatggagcacct

SEQ ID NO: 1000367 - DNA, 25 bp, Homo sapien
agcactaaggagctgcttcatggag

SEQ ID NO: 1000368 - DNA, 25 bp, Homo sapien
ccagaagcaggtttgcacccacagt

SEQ ID NO: 1000369 - DNA, 25 bp, Homo sapien
gtggaaggctcagtagagagcgggc

SEQ ID NO: 1000370 - DNA, 25 bp, Homo sapien
aaggctcagtagagagcgggcctga

SEQ ID NO: 1000371 - DNA, 25 bp, Homo sapien
gctcagtagagagcgggcctgagct

SEQ ID NO: 1000372 - DNA, 25 bp, Homo sapien
gaaggctcagtagagagcgggcctg

SEQ ID NO: 1000373 - DNA, 25 bp, Homo sapien
ccagaaggcagactcgttcaaagac

SEQ ID NO: 1000374 - DNA, 25 bp, Homo sapien
agactaacatcagggccacaaaagc

SEQ ID NO: 1000375 - DNA, 25 bp, Homo sapien
ctcgttcaaagactaacatcagggc

SEQ ID NO: 1000376 - DNA, 25 bp, Homo sapien
ctataatcccagagtaaaagttcac

SEQ ID NO: 1000377 - DNA, 25 bp, Homo sapien
cactgaaaacttagcttggcttgtc

SEQ ID NO: 1000378 - DNA, 25 bp, Homo sapien
tacactgaaaacttagcttggcttg

SEQ ID NO: 1000379 - DNA, 25 bp, Homo sapien
ctgaaaacttagcttggcttgtcca

SEQ ID NO: 1000380 - DNA, 25 bp, Homo sapien
tgtacactgaaaacttagcttggct

SEQ ID NO: 1000381 - DNA, 25 bp, Homo sapien
gtaaatcaccaacagccatccacct

SEQ ID NO: 1000382 - DNA, 25 bp, Homo sapien
ccatgtaaatcaccaacagccatcc

SEQ ID NO: 1000383 - DNA, 25 bp, Homo sapien
catgtaaatcaccaacagccatcca

SEQ ID NO: 1000384 - DNA, 25 bp, Homo sapien
atgtaaatcaccaacagccatccac

SEQ ID NO: 1000385 - DNA, 25 bp, Homo sapien
agctggaacaatatggcacttgcag

SEQ ID NO: 1000386 - DNA, 25 bp, Homo sapien
cagctggaacaatatggcacttgca

SEQ ID NO: 1000387 - DNA, 25 bp, Homo sapien
tcgaatcgtgatgctcgatggacac

SEQ ID NO: 1000388 - DNA, 25 bp, Homo sapien
tcataagatgagagcacgtccaggt

SEQ ID NO: 1000389 - DNA, 25 bp, Homo sapien
tgatctaccaagagggcaggctcct

SEQ ID NO: 1000390 - DNA, 25 bp, Homo sapien
gatggacactcctgaaagctacacc

SEQ ID NO: 1000391 - DNA, 25 bp, Homo sapien
acaaggctcaggcagttatttactg

SEQ ID NO: 1000392 - DNA, 25 bp, Homo sapien
gaagtcattccggatcttgggagga

SEQ ID NO: 1000393 - DNA, 25 bp, Homo sapien
cagattgagctttaattgaatttaa

SEQ ID NO: 1000394 - DNA, 25 bp, Homo sapien
aggacagaagtacaaggctcaggca

SEQ ID NO: 1000395 - DNA, 25 bp, Homo sapien
ttcggtctgcgggagttcatattct

SEQ ID NO: 1000396 - DNA, 25 bp, Homo sapien
aagtctttgaggatcgttgaaggca

SEQ ID NO: 1000397 - DNA, 25 bp, Homo sapien
aaggcaattcggtctgcgggagttc

SEQ ID NO: 1000398 - DNA, 25 bp, Homo sapien
ttgaggatcgttgaaggcaattcgg

SEQ ID NO: 1000399 - DNA, 25 bp, Homo sapien
cttgagtggtgcctaagtggcctct

SEQ ID NO: 1000400 - DNA, 25 bp, Homo sapien
tgccttgagtggtgcctaagtggcc

SEQ ID NO: 1000401 - DNA, 25 bp, Homo sapien
tcaatgccttgagtggtgcctaagt

SEQ ID NO: 1000402 - DNA, 25 bp, Homo sapien
gtggtgcctaagtggcctctgttta

SEQ ID NO: 1000403 - DNA, 25 bp, Homo sapien
catgagctgatgagtggcagaaggg

SEQ ID NO: 1000404 - DNA, 25 bp, Homo sapien
ctttgagggcacaaaggcatttgtc

SEQ ID NO: 1000405 - DNA, 25 bp, Homo sapien
gcctttgagggcacaaaggcatttg

SEQ ID NO: 1000406 - DNA, 25 bp, Homo sapien
ggttgcctttgagggcacaaaggca

SEQ ID NO: 1000407 - DNA, 25 bp, Homo sapien
ttgcctttgagggcacaaaggcatt

SEQ ID NO: 1000408 - DNA, 25 bp, Homo sapien
tctgagctctatgaagtaccctcac

SEQ ID NO: 1000409 - DNA, 25 bp, Homo sapien
gccctcagtgggccatattacaggg

SEQ ID NO: 1000410 - DNA, 25 bp, Homo sapien
tctccttcctccactgctgcctcat

SEQ ID NO: 1000411 - DNA, 25 bp, Homo sapien
ctctccttcctccactgctgcctca

SEQ ID NO: 1000412 - DNA, 25 bp, Homo sapien
ctccttcctccactgctgcctcatg

SEQ ID NO: 1000413 - DNA, 25 bp, Homo sapien
tccttcctccactgctgcctcatgc

SEQ ID NO: 1000414 - DNA, 25 bp, Homo sapien
ttgacttgtgtgactgcccacactt

SEQ ID NO: 1000415 - DNA, 25 bp, Homo sapien
cttgacttgtgtgactgcccacact

SEQ ID NO: 1000416 - DNA, 25 bp, Homo sapien
tgttgctcctctacccactgcctct

SEQ ID NO: 1000417 - DNA, 25 bp, Homo sapien
tgctcctctacccactgcctcttac

SEQ ID NO: 1000418 - DNA, 25 bp, Homo sapien
gttgctcctctacccactgcctctt

SEQ ID NO: 1000419 - DNA, 25 bp, Homo sapien
ctgttgctcctctacccactgcctc

SEQ ID NO: 1000420 - DNA, 25 bp, Homo sapien
gctcagccttttcaccagaatgtca

SEQ ID NO: 1000421 - DNA, 25 bp, Homo sapien
cagcagcagcatgagtggccactga

SEQ ID NO: 1000422 - DNA, 25 bp, Homo sapien
tgtttgctcagccttttcaccagaa

SEQ ID NO: 1000423 - DNA, 25 bp, Homo sapien
agcagcagcatgagtggccactgaa

SEQ ID NO: 1000424 - DNA, 25 bp, Homo sapien
taaaagctgcacgatgaacaaaatg

SEQ ID NO: 1000425 - DNA, 25 bp, Homo sapien
tgtgatgtccacacgtcctagatga

SEQ ID NO: 1000426 - DNA, 25 bp, Homo sapien
gggtagtgaatgtccacatcacctc

SEQ ID NO: 1000427 - DNA, 25 bp, Homo sapien
tgttgagaaccaccaagggtcagcc

SEQ ID NO: 1000428 - DNA, 25 bp, Homo sapien
tgcctgcgtgaggactgccgtggga

SEQ ID NO: 1000429 - DNA, 25 bp, Homo sapien
gataaccacattctgatttccttgc

SEQ ID NO: 1000430 - DNA, 25 bp, Homo sapien
tttccttgcatttcacgtcgatttc

SEQ ID NO: 1000431 - DNA, 25 bp, Homo sapien
atttcacgtcgatttcatgagtggg

SEQ ID NO: 1000432 - DNA, 25 bp, Homo sapien
cactttctttatgggtaaagtcagt

SEQ ID NO: 1000433 - DNA, 25 bp, Homo sapien
gccactttctttatgggtaaagtca

SEQ ID NO: 1000434 - DNA, 25 bp, Homo sapien
ccactttctttatgggtaaagtcag

SEQ ID NO: 1000435 - DNA, 25 bp, Homo sapien
ttcatcttgacctgtctcaggtcca

SEQ ID NO: 1000436 - DNA, 25 bp, Homo sapien
acctgtctcaggtccattggattcc

SEQ ID NO: 1000437 - DNA, 25 bp, Homo sapien
ctgaatttctgatgagctatgccct

SEQ ID NO: 1000438 - DNA, 25 bp, Homo sapien
tgagctatgcccttctcatatttgt

SEQ ID NO: 1000439 - DNA, 25 bp, Homo sapien
ctattctccttcagaacttccatgt

SEQ ID NO: 1000440 - DNA, 25 bp, Homo sapien
agtttttccagacaggaataccaat

SEQ ID NO: 1000441 - DNA, 25 bp, Homo sapien
tccagacaggaataccaatttctcc

SEQ ID NO: 1000442 - DNA, 25 bp, Homo sapien
tgcacctgttgagtatatatgttct

SEQ ID NO: 1000443 - DNA, 25 bp, Homo sapien
atttccccgaaggttatgacatgca

SEQ ID NO: 1000444 - DNA, 25 bp, Homo sapien
ggcttccgacagttgctttccttca

SEQ ID NO: 1000445 - DNA, 25 bp, Homo sapien
ggcctgtggcttccgacagttgctt

SEQ ID NO: 1000446 - DNA, 25 bp, Homo sapien
tgtggcttccgacagttgctttcct

SEQ ID NO: 1000447 - DNA, 25 bp, Homo sapien
cctgtggcttccgacagttgctttc

SEQ ID NO: 1000448 - DNA, 25 bp, Homo sapien
ccaagcccttgggctcattagcatg

SEQ ID NO: 1000449 - DNA, 25 bp, Homo sapien
agcccttgggctcattagcatggtg

SEQ ID NO: 1000450 - DNA, 25 bp, Homo sapien
aagcccttgggctcattagcatggt

SEQ ID NO: 1000451 - DNA, 25 bp, Homo sapien
agcccaagcccttgggctcattagc

SEQ ID NO: 1000452 - DNA, 25 bp, Homo sapien
tcttcgtggcatagagcacatgcgt

SEQ ID NO: 1000453 - DNA, 25 bp, Homo sapien
tggcagtttcccatgtgaatgcctg

SEQ ID NO: 1000454 - DNA, 25 bp, Homo sapien
gcacatgcgtgttaacctggctcca

SEQ ID NO: 1000455 - DNA, 25 bp, Homo sapien
cttggtgggtgttcttcgtggcata

SEQ ID NO: 1000456 - DNA, 25 bp, Homo sapien
gcaggccagtcagaagacatccttg

SEQ ID NO: 1000457 - DNA, 25 bp, Homo sapien
ctcatgcaggccagtcagaagacat

SEQ ID NO: 1000458 - DNA, 25 bp, Homo sapien
tgaagccctcatgcaggccagtcag

SEQ ID NO: 1000459 - DNA, 25 bp, Homo sapien
aagccctcatgcaggccagtcagaa

SEQ ID NO: 1000460 - DNA, 25 bp, Homo sapien
acaatttctgctctcgggggtgggg

SEQ ID NO: 1000461 - DNA, 25 bp, Homo sapien
ctgctctcgggggtgggggtactag

SEQ ID NO: 1000462 - DNA, 25 bp, Homo sapien
caatttctgctctcgggggtggggg

SEQ ID NO: 1000463 - DNA, 25 bp, Homo sapien
cacgtaaggtcggaagatttgaact

SEQ ID NO: 1000464 - DNA, 25 bp, Homo sapien
gctgcgttcggacccgtcggatcgt

SEQ ID NO: 1000465 - DNA, 25 bp, Homo sapien
cgtcggatcgtaaatcccacgtaag

SEQ ID NO: 1000466 - DNA, 25 bp, Homo sapien
tgttcccgagctgcgttcggacccg

SEQ ID NO: 1000467 - DNA, 25 bp, Homo sapien
ctgtaggtgggtacaccaagcactg

SEQ ID NO: 1000468 - DNA, 25 bp, Homo sapien
taaagttgatagatcccaaggacac

SEQ ID NO: 1000469 - DNA, 25 bp, Homo sapien
aaagattggttggttgtcgaagaca

SEQ ID NO: 1000470 - DNA, 25 bp, Homo sapien
aattggcccttccaaggctggtgga

SEQ ID NO: 1000471 - DNA, 25 bp, Homo sapien
catagcggatgatgaaattggccct

SEQ ID NO: 1000472 - DNA, 25 bp, Homo sapien
taagcacaggccgatcgaattctct

SEQ ID NO: 1000473 - DNA, 25 bp, Homo sapien
taaaaacagacatccgcacatccag

SEQ ID NO: 1000474 - DNA, 25 bp, Homo sapien
aaataaaccaactcgtaagcacagg

SEQ ID NO: 1000475 - DNA, 25 bp, Homo sapien
tgtgttcccggagcacgaaataaat

SEQ ID NO: 1000476 - DNA, 25 bp, Homo sapien
ctccgcgcctggtactggaaccggg

SEQ ID NO: 1000477 - DNA, 25 bp, Homo sapien
gtcaccatcgctccgcgcctggtac

SEQ ID NO: 1000478 - DNA, 25 bp, Homo sapien
catcgctccgcgcctggtactggaa

SEQ ID NO: 1000479 - DNA, 25 bp, Homo sapien
caggaggtgactcgcctccgggggc

SEQ ID NO: 1000480 - DNA, 25 bp, Homo sapien
tgaacctctggtacagcgaagccat

SEQ ID NO: 1000481 - DNA, 25 bp, Homo sapien
gtgaacctctggtacagcgaagcca

SEQ ID NO: 1000482 - DNA, 25 bp, Homo sapien
tttgtgccccgaatttgtgctctga

SEQ ID NO: 1000483 - DNA, 25 bp, Homo sapien
caccattgtgctcctgtataaccca

SEQ ID NO: 1000484 - DNA, 25 bp, Homo sapien
cattaactcagtcctctgcagcgca

SEQ ID NO: 1000485 - DNA, 25 bp, Homo sapien
caaattacatcattgatgcagaccc

SEQ ID NO: 1000486 - DNA, 25 bp, Homo sapien
taggacatactgcacacctggttct

SEQ ID NO: 1000487 - DNA, 25 bp, Homo sapien
gctcttgcaccaggataggtcgcta

SEQ ID NO: 1000488 - DNA, 25 bp, Homo sapien
gataggtcgctaagcatcagacgct

SEQ ID NO: 1000489 - DNA, 25 bp, Homo sapien
gacgctcatctatggcataagcatg

SEQ ID NO: 1000490 - DNA, 25 bp, Homo sapien
gtataaccctcggatgaattcagcc

SEQ ID NO: 1000491 - DNA, 25 bp, Homo sapien
tttgtataaccctcggatgaattca

SEQ ID NO: 1000492 - DNA, 25 bp, Homo sapien
tataaccctcggatgaattcagcca

SEQ ID NO: 1000493 - DNA, 25 bp, Homo sapien
ttgatttgtataaccctcggatgaa

SEQ ID NO: 1000494 - DNA, 25 bp, Homo sapien
accacctcctggcttttgaggtctt

SEQ ID NO: 1000495 - DNA, 25 bp, Homo sapien
cacacaccacctcctggcttttgag

SEQ ID NO: 1000496 - DNA, 25 bp, Homo sapien
acctcctggcttttgaggtcttcca

SEQ ID NO: 1000497 - DNA, 25 bp, Homo sapien
acacaccacctcctggcttttgagg

SEQ ID NO: 1000498 - DNA, 25 bp, Homo sapien
ggatggtgtggtcggagctgctcag

SEQ ID NO: 1000499 - DNA, 25 bp, Homo sapien
gaggatggtgtggtcggagctgctc

SEQ ID NO: 1000500 - DNA, 25 bp, Homo sapien
aggatggtgtggtcggagctgctca

SEQ ID NO: 1000501 - DNA, 25 bp, Homo sapien
accatgcagtggtctgtggactgca

SEQ ID NO: 1000502 - DNA, 25 bp, Homo sapien
aagcaccatgcagtggtctgtggac

SEQ ID NO: 1000503 - DNA, 25 bp, Homo sapien
agcaccatgcagtggtctgtggact

SEQ ID NO: 1000504 - DNA, 25 bp, Homo sapien
ccatgcagtggtctgtggactgcat

SEQ ID NO: 1000505 - DNA, 25 bp, Homo sapien
tctgagtggtaaggtgctgcaatgt

SEQ ID NO: 1000506 - DNA, 25 bp, Homo sapien
cgctgatgacgggatgggtcctcat

SEQ ID NO: 1000507 - DNA, 25 bp, Homo sapien
tgagcattggcaccgctgatgacgg

SEQ ID NO: 1000508 - DNA, 25 bp, Homo sapien
tgctgcaatgtgagcattggcaccg

SEQ ID NO: 1000509 - DNA, 25 bp, Homo sapien
ggatggctctttctagaccctgcta

SEQ ID NO: 1000510 - DNA, 25 bp, Homo sapien
tatgtttcctgcaagtctaaatcca

SEQ ID NO: 1000511 - DNA, 25 bp, Homo sapien
cagggcacaaaggttatcacagaca

SEQ ID NO: 1000512 - DNA, 25 bp, Homo sapien
gcaacttctggcagatgttcaggaa

SEQ ID NO: 1000513 - DNA, 25 bp, Homo sapien
gaaaactagtaacagccactgcaaa

SEQ ID NO: 1000514 - DNA, 25 bp, Homo sapien
ggaaaactagtaacagccactgcaa

SEQ ID NO: 1000515 - DNA, 25 bp, Homo sapien
gggaaaactagtaacagccactgca

SEQ ID NO: 1000516 - DNA, 25 bp, Homo sapien
agtggcagccccgatgtcccttcca

SEQ ID NO: 1000517 - DNA, 25 bp, Homo sapien
tctcctggtggagcatgaggtgtga

SEQ ID NO: 1000518 - DNA, 25 bp, Homo sapien
ccacggagccacgtggcaaggctga

SEQ ID NO: 1000519 - DNA, 25 bp, Homo sapien
ccaggccacggagccacgtggcaag

SEQ ID NO: 1000520 - DNA, 25 bp, Homo sapien
gacatggtcgaagaagccagcgcat

SEQ ID NO: 1000521 - DNA, 25 bp, Homo sapien
gaacccttagccaaatgtgagccct

SEQ ID NO: 1000522 - DNA, 25 bp, Homo sapien
gaaacgagagagttgccactgcaga

SEQ ID NO: 1000523 - DNA, 25 bp, Homo sapien
caaacggaccctgaaatgagactag

SEQ ID NO: 1000524 - DNA, 25 bp, Homo sapien
taagctatttacacccttgtctgtg

SEQ ID NO: 1000525 - DNA, 25 bp, Homo sapien
tcaacagcctgatgaaactaagcta

SEQ ID NO: 1000526 - DNA, 25 bp, Homo sapien
ttcatgctcagtggccatgaggagc

SEQ ID NO: 1000527 - DNA, 25 bp, Homo sapien
tgtgtaggatatcactgcagggatc

SEQ ID NO: 1000528 - DNA, 25 bp, Homo sapien
cttccctcctaccctcacgttagct

SEQ ID NO: 1000529 - DNA, 25 bp, Homo sapien
ctcctaccctcacgttagcttcctt

SEQ ID NO: 1000530 - DNA, 25 bp, Homo sapien
ctcacgttagcttcctttttactct

SEQ ID NO: 1000531 - DNA, 25 bp, Homo sapien
cacgttagcttcctttttactctca

SEQ ID NO: 1000532 - DNA, 25 bp, Homo sapien
cttaggaggttgtcttcgctcaggg

SEQ ID NO: 1000533 - DNA, 25 bp, Homo sapien
ggttcttaggaggttgtcttcgctc

SEQ ID NO: 1000534 - DNA, 25 bp, Homo sapien
ttgaaacaatgagggttcttaggag

SEQ ID NO: 1000535 - DNA, 25 bp, Homo sapien
cttgaaacaatgagggttcttagga

SEQ ID NO: 1000536 - DNA, 25 bp, Homo sapien
ttggatagccaactgtgaaacactg

SEQ ID NO: 1000537 - DNA, 25 bp, Homo sapien
tccctttggatagccaactgtgaaa

SEQ ID NO: 1000538 - DNA, 25 bp, Homo sapien
agtcctccctttggatagccaactg

SEQ ID NO: 1000539 - DNA, 25 bp, Homo sapien
gaacagtcctccctttggatagcca

SEQ ID NO: 1000540 - DNA, 25 bp, Homo sapien
tcttcatccccccgcttagagcttg

SEQ ID NO: 1000541 - DNA, 25 bp, Homo sapien
ccgcttagagcttgcacccctgact

SEQ ID NO: 1000542 - DNA, 25 bp, Homo sapien
gcagaagccgggaggcaagaggccc

SEQ ID NO: 1000543 - DNA, 25 bp, Homo sapien
ccccgcttagagcttgcacccctga

SEQ ID NO: 1000544 - DNA, 25 bp, Homo sapien
tcatctcacagagcttgtcactgga

SEQ ID NO: 1000545 - DNA, 25 bp, Homo sapien
tctcacagagcttgtcactggaggt

SEQ ID NO: 1000546 - DNA, 25 bp, Homo sapien
ctttcctgccataggccttgtggtc

SEQ ID NO: 1000547 - DNA, 25 bp, Homo sapien
tttcctgccataggccttgtggtct

SEQ ID NO: 1000548 - DNA, 25 bp, Homo sapien
caggagtgttgatgaccagatctct

SEQ ID NO: 1000549 - DNA, 25 bp, Homo sapien
tgacattggaaaccttagctagctt

SEQ ID NO: 1000550 - DNA, 25 bp, Homo sapien
tttagggaagctgtaccaggttatc

SEQ ID NO: 1000551 - DNA, 25 bp, Homo sapien
gccaatttgtgcagatgaacttcgg

SEQ ID NO: 1000552 - DNA, 25 bp, Homo sapien
tcaagccacaggatcgattcgtcgt

SEQ ID NO: 1000553 - DNA, 25 bp, Homo sapien
tagaggcttctttcaagccacagga

SEQ ID NO: 1000554 - DNA, 25 bp, Homo sapien
tgcctctgtccagattaacagatgt

SEQ ID NO: 1000555 - DNA, 25 bp, Homo sapien
tatgtcttcatttcaggccacgctg

SEQ ID NO: 1000556 - DNA, 25 bp, Homo sapien
tggatgagaagtttaaacttcaatg

SEQ ID NO: 1000557 - DNA, 25 bp, Homo sapien
tttagaggaagtggcaaatttcaaa

SEQ ID NO: 1000558 - DNA, 25 bp, Homo sapien
taagcttgctacacacatggatgag

SEQ ID NO: 1000559 - DNA, 25 bp, Homo sapien
aatgaggaaatgttatgggctatac

SEQ ID NO: 1000560 - DNA, 25 bp, Homo sapien
caaaagtcaatgctgtcctagcaaa

SEQ ID NO: 1000561 - DNA, 25 bp, Homo sapien
taagtcagctcagtacatggccaat

SEQ ID NO: 1000562 - DNA, 25 bp, Homo sapien
tggtcttagcaaacataagcagtag

SEQ ID NO: 1000563 - DNA, 25 bp, Homo sapien
taaacacttggctcctatacatttg

SEQ ID NO: 1000564 - DNA, 25 bp, Homo sapien
gattctgttattctaggcttcccac

SEQ ID NO: 1000565 - DNA, 25 bp, Homo sapien
tgtcttcacagtgccacggttcgct

SEQ ID NO: 1000566 - DNA, 25 bp, Homo sapien
gcccaccacaatatacagaaggaga

SEQ ID NO: 1000567 - DNA, 25 bp, Homo sapien
ccttcatgggaactaaatggattct

SEQ ID NO: 1000568 - DNA, 25 bp, Homo sapien
gatgttgtatctaagtctcaatgtc

SEQ ID NO: 1000569 - DNA, 25 bp, Homo sapien
gcaaatactctttaccagcctgtgg

SEQ ID NO: 1000570 - DNA, 25 bp, Homo sapien
caaagtccagttagtgattctttcc

SEQ ID NO: 1000571 - DNA, 25 bp, Homo sapien
catagattaaatttacacgtgagtc

SEQ ID NO: 1000572 - DNA, 25 bp, Homo sapien
tatcaacctattacttatgcccatg

SEQ ID NO: 1000573 - DNA, 25 bp, Homo sapien
cattttattggtggttgccctaagg

SEQ ID NO: 1000574 - DNA, 25 bp, Homo sapien
ttacacattttattggtggttgccc

SEQ ID NO: 1000575 - DNA, 25 bp, Homo sapien
ttctcccagcgggacgtggtgcctc

SEQ ID NO: 1000576 - DNA, 25 bp, Homo sapien
caccatagataccttttaaccatgc

SEQ ID NO: 1000577 - DNA, 25 bp, Homo sapien
tactttctgtgaagtgtaaggatca

SEQ ID NO: 1000578 - DNA, 25 bp, Homo sapien
aggaggaactgggaacatactgtta

SEQ ID NO: 1000579 - DNA, 25 bp, Homo sapien
acaacaatgtatgctgtgaaggagg

SEQ ID NO: 1000580 - DNA, 25 bp, Homo sapien
aatggttgccaagtgtccctgcagc

SEQ ID NO: 1000581 - DNA, 25 bp, Homo sapien
aattggttagcgcacatttacaata

SEQ ID NO: 1000582 - DNA, 25 bp, Homo sapien
cctccaaatagagagtgagtggaat

SEQ ID NO: 1000583 - DNA, 25 bp, Homo sapien
ggaaacctccaaatagagagtgagt

SEQ ID NO: 1000584 - DNA, 25 bp, Homo sapien
tgggaaatcccactaggaattaatg

SEQ ID NO: 1000585 - DNA, 25 bp, Homo sapien
cacttttacgtaatggtacatttca

SEQ ID NO: 1000586 - DNA, 25 bp, Homo sapien
tcagaacactgagagttggaaagga

SEQ ID NO: 1000587 - DNA, 25 bp, Homo sapien
gacaaatttcacatgactgcatcag

SEQ ID NO: 1000588 - DNA, 25 bp, Homo sapien
aggcaggcagttcacctgaagatag

SEQ ID NO: 1000589 - DNA, 25 bp, Homo sapien
aggcagttcacctgaagataggagt

SEQ ID NO: 1000590 - DNA, 25 bp, Homo sapien
gcaggcagttcacctgaagatagga

SEQ ID NO: 1000591 - DNA, 25 bp, Homo sapien
gagaggctgaggcagtttcaggatc

SEQ ID NO: 1000592 - DNA, 25 bp, Homo sapien
tcagtagaaaccaagtaacccaatc

SEQ ID NO: 1000593 - DNA, 25 bp, Homo sapien
gcttaacatcatcagccattgcaaa

SEQ ID NO: 1000594 - DNA, 25 bp, Homo sapien
taaatggctcatattgaagactgat

SEQ ID NO: 1000595 - DNA, 25 bp, Homo sapien
agaaaccctttagccaagaggatat

SEQ ID NO: 1000596 - DNA, 25 bp, Homo sapien
cctcaatgtacttactaaacatggt

SEQ ID NO: 1000597 - DNA, 25 bp, Homo sapien
gtatccagtgtttgcaatatctttt

SEQ ID NO: 1000598 - DNA, 25 bp, Homo sapien
tgcacatgtgcacacgtcaatactt

SEQ ID NO: 1000599 - DNA, 25 bp, Homo sapien
cattctaaatatgcacagtcaacta

SEQ ID NO: 1000600 - DNA, 25 bp, Homo sapien
taaaacgtctcataatgcctaaatg

SEQ ID NO: 1000601 - DNA, 25 bp, Homo sapien
catttactgccctctattcctggaa

SEQ ID NO: 1000602 - DNA, 25 bp, Homo sapien
gactaaatccatattgctgagactg

SEQ ID NO: 1000603 - DNA, 25 bp, Homo sapien
tctaaagccctaaagatgagggagg

SEQ ID NO: 1000604 - DNA, 25 bp, Homo sapien
ctaatcatttagagggagggcttcc

SEQ ID NO: 1000605 - DNA, 25 bp, Homo sapien
gcagcaactggtgaaacgccgtaag

SEQ ID NO: 1000606 - DNA, 25 bp, Homo sapien
gagaatagtacctgcaaccatgagt

SEQ ID NO: 1000607 - DNA, 25 bp, Homo sapien
gaatgtgccaaaacctagaatcagg

SEQ ID NO: 1000608 - DNA, 25 bp, Homo sapien
tattggagactcctgcggtttgatt

SEQ ID NO: 1000609 - DNA, 25 bp, Homo sapien
ttggagactcctgcggtttgattca

SEQ ID NO: 1000610 - DNA, 25 bp, Homo sapien
attggagactcctgcggtttgattc

SEQ ID NO: 1000611 - DNA, 25 bp, Homo sapien
catagtagtaggtgttcatcagccg

SEQ ID NO: 1000612 - DNA, 25 bp, Homo sapien
tcagcttggagatcagcgtaatgca

SEQ ID NO: 1000613 - DNA, 25 bp, Homo sapien
cagaaatactaatgtgcagcaggtg

SEQ ID NO: 1000614 - DNA, 25 bp, Homo sapien
gcagcaggtgcttcgcatagtagta

SEQ ID NO: 1000615 - DNA, 25 bp, Homo sapien
tgtgtttgcctgcacgagcatgcga

SEQ ID NO: 1000616 - DNA, 25 bp, Homo sapien
catgcagcctacactgaaggagtga

SEQ ID NO: 1000617 - DNA, 25 bp, Homo sapien
gaactctttgtaaggaggcgtctac

SEQ ID NO: 1000618 - DNA, 25 bp, Homo sapien
tctgagtcctctagctgacagagaa

SEQ ID NO: 1000619 - DNA, 25 bp, Homo sapien
tcaggtgtggccatcatgcagtgca

SEQ ID NO: 1000620 - DNA, 25 bp, Homo sapien
atttgaaaatccctagtcaccaatg

SEQ ID NO: 1000621 - DNA, 25 bp, Homo sapien
tgcagtgcaatagatcacttaactt

SEQ ID NO: 1000622 - DNA, 25 bp, Homo sapien
catctcaccaacttaacattgtgtg

SEQ ID NO: 1000623 - DNA, 25 bp, Homo sapien
ttgactattctaggccaattctagg

SEQ ID NO: 1000624 - DNA, 25 bp, Homo sapien
tgaacatggactatcattctcgata

SEQ ID NO: 1000625 - DNA, 25 bp, Homo sapien
tctgtagacaaagtctgggataatt

SEQ ID NO: 1000626 - DNA, 25 bp, Homo sapien
taaagatcagcagactctgcataga

SEQ ID NO: 1000627 - DNA, 25 bp, Homo sapien
tattatagaggatttggttcagtct

SEQ ID NO: 1000628 - DNA, 25 bp, Homo sapien
taaatgttaaaccagtcatacattc

SEQ ID NO: 1000629 - DNA, 25 bp, Homo sapien
tgcccagccttagagtgattacttt

SEQ ID NO: 1000630 - DNA, 25 bp, Homo sapien
tatctggaagatattatagaggatt

SEQ ID NO: 1000631 - DNA, 25 bp, Homo sapien
cccagaatgtgacctatcttgctgt

SEQ ID NO: 1000632 - DNA, 25 bp, Homo sapien
tacctgctgagctatgaattactaa

SEQ ID NO: 1000633 - DNA, 25 bp, Homo sapien
gatagtgttcctcaagtcaactgta

SEQ ID NO: 1000634 - DNA, 25 bp, Homo sapien
gcatgatgcatctcgtatagcctat

SEQ ID NO: 1000635 - DNA, 25 bp, Homo sapien
tacctcaagtgggataagtctctgc

SEQ ID NO: 1000636 - DNA, 25 bp, Homo sapien
gagtgtaccccgtgaaagctccgta

SEQ ID NO: 1000637 - DNA, 25 bp, Homo sapien
taaccctgtatctgggagaagcacg

SEQ ID NO: 1000638 - DNA, 25 bp, Homo sapien
actgcggagagggaccatatggacc

SEQ ID NO: 1000639 - DNA, 25 bp, Homo sapien
tgattctgtttcaggcacgctggct

SEQ ID NO: 1000640 - DNA, 25 bp, Homo sapien
gacctgcacactttagcacagacag

SEQ ID NO: 1000641 - DNA, 25 bp, Homo sapien
gactcgaatgcactaattcctcagg

SEQ ID NO: 1000642 - DNA, 25 bp, Homo sapien
gtctgattatatggcactcctgaag

SEQ ID NO: 1000643 - DNA, 25 bp, Homo sapien
ggatacacaggccagactatactta

SEQ ID NO: 1000644 - DNA, 25 bp, Homo sapien
gggaccctcctgcagataccgaaat

SEQ ID NO: 1000645 - DNA, 25 bp, Homo sapien
ggtagaactccagctactggcatcg

SEQ ID NO: 1000646 - DNA, 25 bp, Homo sapien
gagtggttaagtccaagacacagaa

SEQ ID NO: 1000647 - DNA, 25 bp, Homo sapien
taataaccgagtagcaactgccctc

SEQ ID NO: 1000648 - DNA, 25 bp, Homo sapien
gagtaatgatacagctgcagaccct

SEQ ID NO: 1000649 - DNA, 25 bp, Homo sapien
cagaccttcagagctattcgcacag

SEQ ID NO: 1000650 - DNA, 25 bp, Homo sapien
tgggaagaattctcacagcctgtct

SEQ ID NO: 1000651 - DNA, 25 bp, Homo sapien
caccctggttaatctccttccactc

SEQ ID NO: 1000652 - DNA, 25 bp, Homo sapien
aaacagcaagtaattttgtttattg

SEQ ID NO: 1000653 - DNA, 25 bp, Homo sapien
acagcaagtaattttgtttattgcc

SEQ ID NO: 1000654 - DNA, 25 bp, Homo sapien
ttgtttattgccaccctggttaatc

SEQ ID NO: 1000655 - DNA, 25 bp, Homo sapien
aaattattcacccagatgtaagtgt

SEQ ID NO: 1000656 - DNA, 25 bp, Homo sapien
cccagatgtaagtgtcggtatgtta

SEQ ID NO: 1000657 - DNA, 25 bp, Homo sapien
tgtgcaagcgtgagttaagagattt

SEQ ID NO: 1000658 - DNA, 25 bp, Homo sapien
tatgttattaatactttctccaaga

SEQ ID NO: 1000659 - DNA, 25 bp, Homo sapien
cccacgtagtaaggatgcaacagtt

SEQ ID NO: 1000660 - DNA, 25 bp, Homo sapien
gctgccccacgtagtaaggatgcaa

SEQ ID NO: 1000661 - DNA, 25 bp, Homo sapien
cacgtagtaaggatgcaacagtttg

SEQ ID NO: 1000662 - DNA, 25 bp, Homo sapien
gccccacgtagtaaggatgcaacag

SEQ ID NO: 1000663 - DNA, 25 bp, Homo sapien
gacatgtaaacaattgatatgagag

SEQ ID NO: 1000664 - DNA, 25 bp, Homo sapien
tatgagagtttttcttgagaatgaa

SEQ ID NO: 1000665 - DNA, 25 bp, Homo sapien
catgtaaacaattgatatgagagtt

SEQ ID NO: 1000666 - DNA, 25 bp, Homo sapien
caattgatatgagagtttttcttga

SEQ ID NO: 1000667 - DNA, 25 bp, Homo sapien
tcagcaggatgcagagtaagcccac

SEQ ID NO: 1000668 - DNA, 25 bp, Homo sapien
caactcaaggtagagtggtccgcgt

SEQ ID NO: 1000669 - DNA, 25 bp, Homo sapien
tccaccaggcatcgatgatacagaa

SEQ ID NO: 1000670 - DNA, 25 bp, Homo sapien
aaactacaatggaacctgcccctgc

SEQ ID NO: 1000671 - DNA, 25 bp, Homo sapien
ctacgcatgggctcaatatatcatc

SEQ ID NO: 1000672 - DNA, 25 bp, Homo sapien
aataaaaggctacgcatgggctcaa

SEQ ID NO: 1000673 - DNA, 25 bp, Homo sapien
aaggctacgcatgggctcaatatat

SEQ ID NO: 1000674 - DNA, 25 bp, Homo sapien
tcaaataaaaggctacgcatgggct

SEQ ID NO: 1000675 - DNA, 25 bp, Homo sapien
tccgtgaccttgaggatagctcagt

SEQ ID NO: 1000676 - DNA, 25 bp, Homo sapien
tggaatccgtgaccttgaggatagc

SEQ ID NO: 1000677 - DNA, 25 bp, Homo sapien
aggatggaatccgtgaccttgagga

SEQ ID NO: 1000678 - DNA, 25 bp, Homo sapien
gtgacagaggatggaatccgtgacc

SEQ ID NO: 1000679 - DNA, 25 bp, Homo sapien
cagtacgacggattaggaggctatt

SEQ ID NO: 1000680 - DNA, 25 bp, Homo sapien
ccagacaaggccattgcgagtggag

SEQ ID NO: 1000681 - DNA, 25 bp, Homo sapien
gatctttaggatggctcccggaagt

SEQ ID NO: 1000682 - DNA, 25 bp, Homo sapien
ggctatttcaggaatccagacaagg

SEQ ID NO: 1000683 - DNA, 25 bp, Homo sapien
tcctgtacccacctgcaaacttgag

SEQ ID NO: 1000684 - DNA, 25 bp, Homo sapien
tgtcatagtgaagccaagggtaact

SEQ ID NO: 1000685 - DNA, 25 bp, Homo sapien
tagggtacctagcagtctgagcttg

SEQ ID NO: 1000686 - DNA, 25 bp, Homo sapien
tatagactcagtcagtagggtacct

SEQ ID NO: 1000687 - DNA, 25 bp, Homo sapien
tcataattatagagcctgtggtgtc

SEQ ID NO: 1000688 - DNA, 25 bp, Homo sapien
gtcctaattccctgtagattgcgtg

SEQ ID NO: 1000689 - DNA, 25 bp, Homo sapien
ccaaaagtcacagcgtaagaacatg

SEQ ID NO: 1000690 - DNA, 25 bp, Homo sapien
aatatgcattaagccaaattgtccc

SEQ ID NO: 1000691 - DNA, 25 bp, Homo sapien
tgttaacagactaggcagatgccca

SEQ ID NO: 1000692 - DNA, 25 bp, Homo sapien
ccttcagagtacagagtcaagttca

SEQ ID NO: 1000693 - DNA, 25 bp, Homo sapien
tgacttgaacgctagtaggctccca

SEQ ID NO: 1000694 - DNA, 25 bp, Homo sapien
tcctgaaatctagaccttaggtgcc

SEQ ID NO: 1000695 - DNA, 25 bp, Homo sapien
ccattagtgtattcataagggagca

SEQ ID NO: 1000696 - DNA, 25 bp, Homo sapien
tattcataagggagcatatgctttt

SEQ ID NO: 1000697 - DNA, 25 bp, Homo sapien
tttaaattgtccattagtgtattca

SEQ ID NO: 1000698 - DNA, 25 bp, Homo sapien
aattgtccattagtgtattcataag

SEQ ID NO: 1000699 - DNA, 25 bp, Homo sapien
aaatttacttgtgcactctctagcc

SEQ ID NO: 1000700 - DNA, 25 bp, Homo sapien
taatttctgctggtgagaccgtcac

SEQ ID NO: 1000701 - DNA, 25 bp, Homo sapien
actgtacctttatcaggagttggag

SEQ ID NO: 1000702 - DNA, 25 bp, Homo sapien
caggtattgctaatgcaactgtggc

SEQ ID NO: 1000703 - DNA, 25 bp, Homo sapien
aatagagctccttgcggtcagcact

SEQ ID NO: 1000704 - DNA, 25 bp, Homo sapien
tcagcacggaatagagctccttgcg

SEQ ID NO: 1000705 - DNA, 25 bp, Homo sapien
cacggaatagagctccttgcggtca

SEQ ID NO: 1000706 - DNA, 25 bp, Homo sapien
tccagctcagcacggaatagagctc

SEQ ID NO: 1000707 - DNA, 25 bp, Homo sapien
ggcaaaaatttcttagctagcacat

SEQ ID NO: 1000708 - DNA, 25 bp, Homo sapien
taattgatatccatggagtgagagg

SEQ ID NO: 1000709 - DNA, 25 bp, Homo sapien
cttgagaagtattacatgatcttga

SEQ ID NO: 1000710 - DNA, 25 bp, Homo sapien
caaacagtgctatgcatatgtggtc

SEQ ID NO: 1000711 - DNA, 25 bp, Homo sapien
catcaggatcatacagcttaaatcc

SEQ ID NO: 1000712 - DNA, 25 bp, Homo sapien
tgggttaagacgaacaactgcaact

SEQ ID NO: 1000713 - DNA, 25 bp, Homo sapien
tcatcaggatcatacagcttaaatc

SEQ ID NO: 1000714 - DNA, 25 bp, Homo sapien
taagacgaacaactgcaactcttgt

SEQ ID NO: 1000715 - DNA, 25 bp, Homo sapien
tacagagggtgtggtaccatctaca

SEQ ID NO: 1000716 - DNA, 25 bp, Homo sapien
taatagccccacagcacgagagtgg

SEQ ID NO: 1000717 - DNA, 25 bp, Homo sapien
tgccccacggataagaagggactcc

SEQ ID NO: 1000718 - DNA, 25 bp, Homo sapien
gggactcctgtatatgaaacttcgg

SEQ ID NO: 1000719 - DNA, 25 bp, Homo sapien
acagcagaagtttcaggggacaagg

SEQ ID NO: 1000720 - DNA, 25 bp, Homo sapien
ccgacagcagaagtttcaggggaca

SEQ ID NO: 1000721 - DNA, 25 bp, Homo sapien
cgccgccgacagcagaagtttcagg

SEQ ID NO: 1000722 - DNA, 25 bp, Homo sapien
gccgccgacagcagaagtttcaggg

SEQ ID NO: 1000723 - DNA, 25 bp, Homo sapien
actccccccgctgtctggtgctggg

SEQ ID NO: 1000724 - DNA, 25 bp, Homo sapien
ctgtgaagacatcaccaggccgctc

SEQ ID NO: 1000725 - DNA, 25 bp, Homo sapien
gaagacatcaccaggccgctcgcag

SEQ ID NO: 1000726 - DNA, 25 bp, Homo sapien
gtgaagacatcaccaggccgctcgc

SEQ ID NO: 1000727 - DNA, 25 bp, Homo sapien
tctgtgaagacatcaccaggccgct

SEQ ID NO: 1000728 - DNA, 25 bp, Homo sapien
ttccagctcctggtcttaaacaatc

SEQ ID NO: 1000729 - DNA, 25 bp, Homo sapien
gtggtgcaatcctaactccctgtag

SEQ ID NO: 1000730 - DNA, 25 bp, Homo sapien
gcaatcctaactccctgtagcctcc

SEQ ID NO: 1000731 - DNA, 25 bp, Homo sapien
tacaggtgcatccaacacatccagc

SEQ ID NO: 1000732 - DNA, 25 bp, Homo sapien
cctgcacccagcttaacatgacttc

SEQ ID NO: 1000733 - DNA, 25 bp, Homo sapien
acccagcttaacatgacttcctaaa

SEQ ID NO: 1000734 - DNA, 25 bp, Homo sapien
atgacttcctaaaatcagattctga

SEQ ID NO: 1000735 - DNA, 25 bp, Homo sapien
tgcacccagcttaacatgacttcct

SEQ ID NO: 1000736 - DNA, 25 bp, Homo sapien
gttctcttcggtgcacctctgacca

SEQ ID NO: 1000737 - DNA, 25 bp, Homo sapien
cagcgactacaaaggagtaacttct

SEQ ID NO: 1000738 - DNA, 25 bp, Homo sapien
attggaaatcatgcactctgctcat

SEQ ID NO: 1000739 - DNA, 25 bp, Homo sapien
ggtcagccaccgtctatttattcag

SEQ ID NO: 1000740 - DNA, 25 bp, Homo sapien
tgatacccaacagtgtcctaggaga

SEQ ID NO: 1000741 - DNA, 25 bp, Homo sapien
tgctgaactgaacccagagattgca

SEQ ID NO: 1000742 - DNA, 25 bp, Homo sapien
aaatacgggctgttatgatacccaa

SEQ ID NO: 1000743 - DNA, 25 bp, Homo sapien
gattgcaatcccagcgaagtctgaa

SEQ ID NO: 1000744 - DNA, 25 bp, Homo sapien
caggtttcaaaattccctgaaatct

SEQ ID NO: 1000745 - DNA, 25 bp, Homo sapien
ctcattccaggtttcaaaattccct

SEQ ID NO: 1000746 - DNA, 25 bp, Homo sapien
tcaaaattccctgaaatctaagaat

SEQ ID NO: 1000747 - DNA, 25 bp, Homo sapien
tcatatagactagattttcctcatt

SEQ ID NO: 1000748 - DNA, 25 bp, Homo sapien
atctgagatggactccatagagtct

SEQ ID NO: 1000749 - DNA, 25 bp, Homo sapien
tattacttcatcaacaacatctgag

SEQ ID NO: 1000750 - DNA, 25 bp, Homo sapien
ttatacagcggacgccgcacatcga

SEQ ID NO: 1000751 - DNA, 25 bp, Homo sapien
gttctgtattacttcatcaacaaca

SEQ ID NO: 1000752 - DNA, 25 bp, Homo sapien
tctggttgatcgcattgatacccgt

SEQ ID NO: 1000753 - DNA, 25 bp, Homo sapien
gaatctttcgtaaccaacgtctata

SEQ ID NO: 1000754 - DNA, 25 bp, Homo sapien
cttctggttgatcgcattgataccc

SEQ ID NO: 1000755 - DNA, 25 bp, Homo sapien
tctttcgtaaccaacgtctataaca

SEQ ID NO: 1000756 - DNA, 25 bp, Homo sapien
ccaaaccagccggtttcccatctgt

SEQ ID NO: 1000757 - DNA, 25 bp, Homo sapien
cccaaaccagccggtttcccatctg

SEQ ID NO: 1000758 - DNA, 25 bp, Homo sapien
caaaccagccggtttcccatctgtt

SEQ ID NO: 1000759 - DNA, 25 bp, Homo sapien
ttgaatgaaatacgtaatatctcta

SEQ ID NO: 1000760 - DNA, 25 bp, Homo sapien
tgaatgaaatacgtaatatctctac

SEQ ID NO: 1000761 - DNA, 25 bp, Homo sapien
gttgaatgaaatacgtaatatctct

SEQ ID NO: 1000762 - DNA, 25 bp, Homo sapien
tgttgaatgaaatacgtaatatctc

SEQ ID NO: 1000763 - DNA, 25 bp, Homo sapien
atcgggatgtgtttgatgcagcttc

SEQ ID NO: 1000764 - DNA, 25 bp, Homo sapien
tcgggatgtgtttgatgcagcttcc

SEQ ID NO: 1000765 - DNA, 25 bp, Homo sapien
gggatgtgtttgatgcagcttccaa

SEQ ID NO: 1000766 - DNA, 25 bp, Homo sapien
cgggatgtgtttgatgcagcttcca

SEQ ID NO: 1000767 - DNA, 25 bp, Homo sapien
cgctgtcaatgactatccccgttaa

SEQ ID NO: 1000768 - DNA, 25 bp, Homo sapien
tccgctgtcaatgactatccccgtt

SEQ ID NO: 1000769 - DNA, 25 bp, Homo sapien
catctccgctgtcaatgactatccc

SEQ ID NO: 1000770 - DNA, 25 bp, Homo sapien
tctccgctgtcaatgactatccccg

SEQ ID NO: 1000771 - DNA, 25 bp, Homo sapien
aactgcaatgtagagtcctggaacg

SEQ ID NO: 1000772 - DNA, 25 bp, Homo sapien
gtcctggaacgttaaatgattcgaa

SEQ ID NO: 1000773 - DNA, 25 bp, Homo sapien
agagtcctggaacgttaaatgattc

SEQ ID NO: 1000774 - DNA, 25 bp, Homo sapien
cctggaacgttaaatgattcgaaca

SEQ ID NO: 1000775 - DNA, 25 bp, Homo sapien
tctgttttctggtgtattgagtgga

SEQ ID NO: 1000776 - DNA, 25 bp, Homo sapien
ctgttttctggtgtattgagtggag

SEQ ID NO: 1000777 - DNA, 25 bp, Homo sapien
tggccagaggctccctaacatgggt

SEQ ID NO: 1000778 - DNA, 25 bp, Homo sapien
tgggtgacactctccacataggtaa

SEQ ID NO: 1000779 - DNA, 25 bp, Homo sapien
atccagccagagttgtgaaagcagc

SEQ ID NO: 1000780 - DNA, 25 bp, Homo sapien
ggagacgcagcacatcttgccacag

SEQ ID NO: 1000781 - DNA, 25 bp, Homo sapien
tcgacctcagcatgtacaaaaccaa

SEQ ID NO: 1000782 - DNA, 25 bp, Homo sapien
gtagcccagtcagacccttcgacct

SEQ ID NO: 1000783 - DNA, 25 bp, Homo sapien
agtcagacccttcgacctcagcatg

SEQ ID NO: 1000784 - DNA, 25 bp, Homo sapien
agacccttcgacctcagcatgtaca

SEQ ID NO: 1000785 - DNA, 25 bp, Homo sapien
cagaaaacatgctcaggatggaaga

SEQ ID NO: 1000786 - DNA, 25 bp, Homo sapien
ttccaaagtggatatgcacatagcc

SEQ ID NO: 1000787 - DNA, 25 bp, Homo sapien
taaggtggaaacagcaagctacagc

SEQ ID NO: 1000788 - DNA, 25 bp, Homo sapien
tagcaacgcctacaaatcaatcagg

SEQ ID NO: 1000789 - DNA, 25 bp, Homo sapien
tttattgttagtaaacagctggagt

SEQ ID NO: 1000790 - DNA, 25 bp, Homo sapien
cctgaacatgataagcttttccatt

SEQ ID NO: 1000791 - DNA, 25 bp, Homo sapien
tagcctattttagggagaaccgata

SEQ ID NO: 1000792 - DNA, 25 bp, Homo sapien
ttagatatttagtcctcctgcccct

SEQ ID NO: 1000793 - DNA, 25 bp, Homo sapien
cttatcgtctttgtggccccttcca

SEQ ID NO: 1000794 - DNA, 25 bp, Homo sapien
tagatgagccttccacgcgggagac

SEQ ID NO: 1000795 - DNA, 25 bp, Homo sapien
ttccatctgcacgtgcggacgaggt

SEQ ID NO: 1000796 - DNA, 25 bp, Homo sapien
gtccgggtcgcactcgggcggtcag

SEQ ID NO: 1000797 - DNA, 25 bp, Homo sapien
caccgagtccgggaggaaatctagg

SEQ ID NO: 1000798 - DNA, 25 bp, Homo sapien
aggccgccatccgtccggagactgg

SEQ ID NO: 1000799 - DNA, 25 bp, Homo sapien
ggaggaaatctaggccgccatccgt

SEQ ID NO: 1000800 - DNA, 25 bp, Homo sapien
gccttgggtgccaccgagtccggga

SEQ ID NO: 1000801 - DNA, 25 bp, Homo sapien
cctgggcgcgttccgggagctcagg

SEQ ID NO: 1000802 - DNA, 25 bp, Homo sapien
tggcgcatcccggaatccagagcgc

SEQ ID NO: 1000803 - DNA, 25 bp, Homo sapien
ctgcgcttccggaagtaacccctgg

SEQ ID NO: 1000804 - DNA, 25 bp, Homo sapien
taggaggaacgtaccaactgcgagg

SEQ ID NO: 1000805 - DNA, 25 bp, Homo sapien
aggaggcgccggctctgcggtgcgg

SEQ ID NO: 1000806 - DNA, 25 bp, Homo sapien
gttgcgccggacttcccagcttggc

SEQ ID NO: 1000807 - DNA, 25 bp, Homo sapien
tgcggtgcggagttgcgccggactt

SEQ ID NO: 1000808 - DNA, 25 bp, Homo sapien
cagcggtgccctcgcgccgaaacac

SEQ ID NO: 1000809 - DNA, 25 bp, Homo sapien
atcttccggaacagccagcccttac

SEQ ID NO: 1000810 - DNA, 25 bp, Homo sapien
aatcttccggaacagccagccctta

SEQ ID NO: 1000811 - DNA, 25 bp, Homo sapien
gaatcttccggaacagccagccctt

SEQ ID NO: 1000812 - DNA, 25 bp, Homo sapien
tcttccggaacagccagcccttacc

SEQ ID NO: 1000813 - DNA, 25 bp, Homo sapien
cagtttctctagaaacttgcctgaa

SEQ ID NO: 1000814 - DNA, 25 bp, Homo sapien
gacctgtatgaggaaagaggctcac

SEQ ID NO: 1000815 - DNA, 25 bp, Homo sapien
acatggacctgtatgaggaaagagg

SEQ ID NO: 1000816 - DNA, 25 bp, Homo sapien
ttcagtttctctagaaacttgcctg

SEQ ID NO: 1000817 - DNA, 25 bp, Homo sapien
ctcttccacttgaggcttaggcatg

SEQ ID NO: 1000818 - DNA, 25 bp, Homo sapien
cctcttccacttgaggcttaggcat

SEQ ID NO: 1000819 - DNA, 25 bp, Homo sapien
gtctatttccagactactggaaacg

SEQ ID NO: 1000820 - DNA, 25 bp, Homo sapien
tcatcatggattgctcagagttcct

SEQ ID NO: 1000821 - DNA, 25 bp, Homo sapien
aaggatgtgtgtagcacacactcat

SEQ ID NO: 1000822 - DNA, 25 bp, Homo sapien
cagtcctcaaatggcgttcttacca

SEQ ID NO: 1000823 - DNA, 25 bp, Homo sapien
actgacccagttcctcagggcattc

SEQ ID NO: 1000824 - DNA, 25 bp, Homo sapien
ggcattcacttaacctctgcagtcc

SEQ ID NO: 1000825 - DNA, 25 bp, Homo sapien
aagccactgacccagttcctcaggg

SEQ ID NO: 1000826 - DNA, 25 bp, Homo sapien
gggcattcacttaacctctgcagtc

SEQ ID NO: 1000827 - DNA, 25 bp, Homo sapien
gcctcatctcgtctgagtccagtgg

SEQ ID NO: 1000828 - DNA, 25 bp, Homo sapien
tccagtggggcgtcctagtagtgtt

SEQ ID NO: 1000829 - DNA, 25 bp, Homo sapien
cctcatctcgtctgagtccagtggg

SEQ ID NO: 1000830 - DNA, 25 bp, Homo sapien
cgtcctagtagtgttggtctcactc

SEQ ID NO: 1000831 - DNA, 25 bp, Homo sapien
tcactcctgaaatagcgggtgggtg

SEQ ID NO: 1000832 - DNA, 25 bp, Homo sapien
gaggcctgcgagttcttagagagct

SEQ ID NO: 1000833 - DNA, 25 bp, Homo sapien
gctgctcgtgcataggacatcttcc

SEQ ID NO: 1000834 - DNA, 25 bp, Homo sapien
cgttcattcagcctcgtaggtcagc

SEQ ID NO: 1000835 - DNA, 25 bp, Homo sapien
tgcagagtctcaatgccgcaggcaa

SEQ ID NO: 1000836 - DNA, 25 bp, Homo sapien
gagtggctggacctatcaggcaacg

SEQ ID NO: 1000837 - DNA, 25 bp, Homo sapien
tagtgagttctaccagctgtgccga

SEQ ID NO: 1000838 - DNA, 25 bp, Homo sapien
aatgtctccaacaatcggctgacgg

SEQ ID NO: 1000839 - DNA, 25 bp, Homo sapien
ccagcctgcaacttagtggaaggaa

SEQ ID NO: 1000840 - DNA, 25 bp, Homo sapien
tgcaaatgtgcctctccagactgct

SEQ ID NO: 1000841 - DNA, 25 bp, Homo sapien
tcttctgaacgtggcctatggccca

SEQ ID NO: 1000842 - DNA, 25 bp, Homo sapien
agcactcctggaagtgggactcccc

SEQ ID NO: 1000843 - DNA, 25 bp, Homo sapien
gctggggatagaacgggttcctctc

SEQ ID NO: 1000844 - DNA, 25 bp, Homo sapien
ttaccacccgcagcggtcctggagg

SEQ ID NO: 1000845 - DNA, 25 bp, Homo sapien
agcggtcctggaggcaccacgcatc

SEQ ID NO: 1000846 - DNA, 25 bp, Homo sapien
ggtcttccactggttaccacccgca

SEQ ID NO: 1000847 - DNA, 25 bp, Homo sapien
ccttggagaaggcgaactgtccagg

SEQ ID NO: 1000848 - DNA, 25 bp, Homo sapien
gccttggagaaggcgaactgtccag

SEQ ID NO: 1000849 - DNA, 25 bp, Homo sapien
acctgtgcacccttgccccttctta

SEQ ID NO: 1000850 - DNA, 25 bp, Homo sapien
agaatgtccaaacaggcacagcgct

SEQ ID NO: 1000851 - DNA, 25 bp, Homo sapien
tcgagaccagcccataggctcagct

SEQ ID NO: 1000852 - DNA, 25 bp, Homo sapien
ggccaagctttagcctcgagaccag

SEQ ID NO: 1000853 - DNA, 25 bp, Homo sapien
agaacttgggtctctatggggcagt

SEQ ID NO: 1000854 - DNA, 25 bp, Homo sapien
tctctatggggcagtggaccaaccg

SEQ ID NO: 1000855 - DNA, 25 bp, Homo sapien
cagtggaccaaccggcccagaactt

SEQ ID NO: 1000856 - DNA, 25 bp, Homo sapien
ccgcagaacttgggtctctatgggg

SEQ ID NO: 1000857 - DNA, 25 bp, Homo sapien
cccattgggcctgactttgcactcg

SEQ ID NO: 1000858 - DNA, 25 bp, Homo sapien
ttgcactcgggtttcttccagtccc

SEQ ID NO: 1000859 - DNA, 25 bp, Homo sapien
ttgtctgctgcagcttaaattccag

SEQ ID NO: 1000860 - DNA, 25 bp, Homo sapien
agtccctcttccggcagcttgtctg

SEQ ID NO: 1000861 - DNA, 25 bp, Homo sapien
cttcgtgggaatgcgctggtctcct

SEQ ID NO: 1000862 - DNA, 25 bp, Homo sapien
gcaagccctggtgtgatccgcacct

SEQ ID NO: 1000863 - DNA, 25 bp, Homo sapien
ggctcagagcccaagcacttctgtc

SEQ ID NO: 1000864 - DNA, 25 bp, Homo sapien
gtgatccgcacctccctcacgcagt

SEQ ID NO: 1000865 - DNA, 25 bp, Homo sapien
acgggcgggtgcttgtgaaattcct

SEQ ID NO: 1000866 - DNA, 25 bp, Homo sapien
ctgggcttccgtgagctcggcgacg

SEQ ID NO: 1000867 - DNA, 25 bp, Homo sapien
gtgagctcggcgacgcccacgccca

SEQ ID NO: 1000868 - DNA, 25 bp, Homo sapien
cgggcgggtgcttgtgaaattcctc

SEQ ID NO: 1000869 - DNA, 25 bp, Homo sapien
caaattgaccttagggtccgcctgg

SEQ ID NO: 1000870 - DNA, 25 bp, Homo sapien
caggcctgtagaacgctgggcacag

SEQ ID NO: 1000871 - DNA, 25 bp, Homo sapien
taggaatcagtcagttcgcactccc

SEQ ID NO: 1000872 - DNA, 25 bp, Homo sapien
agccagccccagtcgctaggaatgg

SEQ ID NO: 1000873 - DNA, 25 bp, Homo sapien
agccccgtcggtcctggtggtcttg

SEQ ID NO: 1000874 - DNA, 25 bp, Homo sapien
tgccagggtggtcgccttagagcaa

SEQ ID NO: 1000875 - DNA, 25 bp, Homo sapien
ggcgttcctcattccgcctgcgcag

SEQ ID NO: 1000876 - DNA, 25 bp, Homo sapien
gtcttgggaccggagagcgacagat

SEQ ID NO: 1000877 - DNA, 25 bp, Homo sapien
ctgaccgtcccgcagctgaaatctt

SEQ ID NO: 1000878 - DNA, 25 bp, Homo sapien
agctgaaatcttggcctcgctgtcc

SEQ ID NO: 1000879 - DNA, 25 bp, Homo sapien
tcccgcagctgaaatcttggcctcg

SEQ ID NO: 1000880 - DNA, 25 bp, Homo sapien
ggaggtctcccctgaccgtcccgca

SEQ ID NO: 1000881 - DNA, 25 bp, Homo sapien
tgcatatttgccgtagggatgcggc

SEQ ID NO: 1000882 - DNA, 25 bp, Homo sapien
gactgctaccagagatttgcccctc

SEQ ID NO: 1000883 - DNA, 25 bp, Homo sapien
taaatagagttagtaaagcgccttc

SEQ ID NO: 1000884 - DNA, 25 bp, Homo sapien
gctccaggcccataagagtctaaag

SEQ ID NO: 1000885 - DNA, 25 bp, Homo sapien
gaaggcacagtcatacttagtttcc

SEQ ID NO: 1000886 - DNA, 25 bp, Homo sapien
tcgcaactcctttgccactcatttt

SEQ ID NO: 1000887 - DNA, 25 bp, Homo sapien
ttctgcagagtgaaggcacagtcat

SEQ ID NO: 1000888 - DNA, 25 bp, Homo sapien
tccagctggcataaaggctcaggaa

SEQ ID NO: 1000889 - DNA, 25 bp, Homo sapien
gctagtgggtgagtcatgggcacag

SEQ ID NO: 1000890 - DNA, 25 bp, Homo sapien
tgggtgagtcatgggcacaggctcg

SEQ ID NO: 1000891 - DNA, 25 bp, Homo sapien
gtgagtcatgggcacaggctcgcac

SEQ ID NO: 1000892 - DNA, 25 bp, Homo sapien
ctgctagtgggtgagtcatgggcac

SEQ ID NO: 1000893 - DNA, 25 bp, Homo sapien
tgccaccgcagacgccacacaggct

SEQ ID NO: 1000894 - DNA, 25 bp, Homo sapien
agcctttccaagcgaaatgccccac

SEQ ID NO: 1000895 - DNA, 25 bp, Homo sapien
ctgccaccgcagacgccacacaggc

SEQ ID NO: 1000896 - DNA, 25 bp, Homo sapien
ctgagcctttccaagcgaaatgccc

SEQ ID NO: 1000897 - DNA, 25 bp, Homo sapien
gccacctcggccgtcgccccacgct

SEQ ID NO: 1000898 - DNA, 25 bp, Homo sapien
tcgccccacgcttggcccgcagcca

SEQ ID NO: 1000899 - DNA, 25 bp, Homo sapien
cacctcggccgtcgccccacgcttg

SEQ ID NO: 1000900 - DNA, 25 bp, Homo sapien
ccacctcggccgtcgccccacgctt

SEQ ID NO: 1000901 - DNA, 25 bp, Homo sapien
gggcggggagcgagagtgggccgcg

SEQ ID NO: 1000902 - DNA, 25 bp, Homo sapien
gcggggcggggagcgagagtgggcc

SEQ ID NO: 1000903 - DNA, 25 bp, Homo sapien
gggagcgagagtgggccgcggaggc

SEQ ID NO: 1000904 - DNA, 25 bp, Homo sapien
cggggagcgagagtgggccgcggag

SEQ ID NO: 1000905 - DNA, 25 bp, Homo sapien
tctgacggagtcgtggtcacaccag

SEQ ID NO: 1000906 - DNA, 25 bp, Homo sapien
gagttcctgccataggccggccttt

SEQ ID NO: 1000907 - DNA, 25 bp, Homo sapien
aaatggctcactcgcaagaacggga

SEQ ID NO: 1000908 - DNA, 25 bp, Homo sapien
gaggacacgcatcagtacaaaaggg

SEQ ID NO: 1000909 - DNA, 25 bp, Homo sapien
gggactgagattgcagtctcatctt

SEQ ID NO: 1000910 - DNA, 25 bp, Homo sapien
gagccggtgatcaggccccgagggc

SEQ ID NO: 1000911 - DNA, 25 bp, Homo sapien
tgtggaagagctgaacatggggcag

SEQ ID NO: 1000912 - DNA, 25 bp, Homo sapien
ccgagggaggcagagccggtgatca

SEQ ID NO: 1000913 - DNA, 25 bp, Homo sapien
cagtgtgcctgttgtggcaagcgct

SEQ ID NO: 1000914 - DNA, 25 bp, Homo sapien
aagccctacccgtgcaaagagtgcg

SEQ ID NO: 1000915 - DNA, 25 bp, Homo sapien
ccgagtgcgggaagcgctttaccaa

SEQ ID NO: 1000916 - DNA, 25 bp, Homo sapien
gcaagattcacaagcgatccgaggg

SEQ ID NO: 1000917 - DNA, 25 bp, Homo sapien
ccttcgacgacgaggagagactcct

SEQ ID NO: 1000918 - DNA, 25 bp, Homo sapien
ccttgttagacagcacttgggcctt

SEQ ID NO: 1000919 - DNA, 25 bp, Homo sapien
agagctcagcatgtcacggcaagga

SEQ ID NO: 1000920 - DNA, 25 bp, Homo sapien
gaacttcggcaagaagacgcacctg

SEQ ID NO: 1000921 - DNA, 25 bp, Homo sapien
gaacgttgaggatatctacatgtgg

SEQ ID NO: 1000922 - DNA, 25 bp, Homo sapien
tcctctctaggaagatgggcacagc

SEQ ID NO: 1000923 - DNA, 25 bp, Homo sapien
tggagatgggtcctccttcggccct

SEQ ID NO: 1000924 - DNA, 25 bp, Homo sapien
tcgggtgtggcggagaactcctctc

SEQ ID NO: 1000925 - DNA, 25 bp, Homo sapien
actgcccgacctggggcgctgaggc

SEQ ID NO: 1000926 - DNA, 25 bp, Homo sapien
ctgcttctgactgcccgacctgggg

SEQ ID NO: 1000927 - DNA, 25 bp, Homo sapien
ttctgactgcccgacctggggcgct

SEQ ID NO: 1000928 - DNA, 25 bp, Homo sapien
ctgactgcccgacctggggcgctga

SEQ ID NO: 1000929 - DNA, 25 bp, Homo sapien
ccggtggattccttaaggctctgaa

SEQ ID NO: 1000930 - DNA, 25 bp, Homo sapien
tcttcagaggttggaccccaggctt

SEQ ID NO: 1000931 - DNA, 25 bp, Homo sapien
gttctagaagcgtcccaaagggtgc

SEQ ID NO: 1000932 - DNA, 25 bp, Homo sapien
aagactcggcgataccaaggatgga

SEQ ID NO: 1000933 - DNA, 25 bp, Homo sapien
ttaatcctctgtatctggaaaatac

SEQ ID NO: 1000934 - DNA, 25 bp, Homo sapien
gtatctggaaaatactccagttgta

SEQ ID NO: 1000935 - DNA, 25 bp, Homo sapien
tctggaaaatactccagttgtagat

SEQ ID NO: 1000936 - DNA, 25 bp, Homo sapien
taatcctctgtatctggaaaatact

SEQ ID NO: 1000937 - DNA, 25 bp, Homo sapien
ttaaaggatttagatcgggtctatg

SEQ ID NO: 1000938 - DNA, 25 bp, Homo sapien
ggtctatggccaggtaagtgcagac

SEQ ID NO: 1000939 - DNA, 25 bp, Homo sapien
aaggatttagatcgggtctatggcc

SEQ ID NO: 1000940 - DNA, 25 bp, Homo sapien
gggtctatggccaggtaagtgcaga

SEQ ID NO: 1000941 - DNA, 25 bp, Homo sapien
ttttggcaagggacacgagcttcaa

SEQ ID NO: 1000942 - DNA, 25 bp, Homo sapien
tcattgagagggtttggtgtcccac

SEQ ID NO: 1000943 - DNA, 25 bp, Homo sapien
gagcttcaagtcgtccggtaaggca

SEQ ID NO: 1000944 - DNA, 25 bp, Homo sapien
tgtggaaacatcctgcaaatgcagc

SEQ ID NO: 1000945 - DNA, 25 bp, Homo sapien
ctgcctgacggagggtagactgcag

SEQ ID NO: 1000946 - DNA, 25 bp, Homo sapien
tgcagtgaccagaggcagccgctca

SEQ ID NO: 1000947 - DNA, 25 bp, Homo sapien
gtagactgcagtgaccagaggcagc

SEQ ID NO: 1000948 - DNA, 25 bp, Homo sapien
tgaccagaggcagccgctcagccat

SEQ ID NO: 1000949 - DNA, 25 bp, Homo sapien
tattggcactctatcgtgcttgccg

SEQ ID NO: 1000950 - DNA, 25 bp, Homo sapien
gctgttctccaggacgccttggttg

SEQ ID NO: 1000951 - DNA, 25 bp, Homo sapien
cagctgccatatggatctgtcagaa

SEQ ID NO: 1000952 - DNA, 25 bp, Homo sapien
ctgtcagaatagtggtgatccctgt

SEQ ID NO: 1000953 - DNA, 25 bp, Homo sapien
aaaatgccaatttccgtgggacgtg

SEQ ID NO: 1000954 - DNA, 25 bp, Homo sapien
cagtgttgatgtgctccgagtggag

SEQ ID NO: 1000955 - DNA, 25 bp, Homo sapien
catctgtcctatggactagtttctt

SEQ ID NO: 1000956 - DNA, 25 bp, Homo sapien
tagtattcccttcccgttgtctctg

SEQ ID NO: 1000957 - DNA, 25 bp, Homo sapien
tggaattcttcagttcccaggctcc

SEQ ID NO: 1000958 - DNA, 25 bp, Homo sapien
ctccagaaggcacagtgggcacctg

SEQ ID NO: 1000959 - DNA, 25 bp, Homo sapien
gcacagtgggcacctgcagagctgc

SEQ ID NO: 1000960 - DNA, 25 bp, Homo sapien
gcagagctgcagagaggaccctcat

SEQ ID NO: 1000961 - DNA, 25 bp, Homo sapien
tcgggaggcccgcatctctcaatgc

SEQ ID NO: 1000962 - DNA, 25 bp, Homo sapien
ggtatcgggaggcccgcatctctca

SEQ ID NO: 1000963 - DNA, 25 bp, Homo sapien
aggcacagcgccaccccaaccacca

SEQ ID NO: 1000964 - DNA, 25 bp, Homo sapien
gcgccaccccaaccaccacatccat

SEQ ID NO: 1000965 - DNA, 25 bp, Homo sapien
gactttggcgaaactgtcagcgagg

SEQ ID NO: 1000966 - DNA, 25 bp, Homo sapien
tagggatggtgctataacggccgaa

SEQ ID NO: 1000967 - DNA, 25 bp, Homo sapien
ggaaggttcccacgagatcataaca

SEQ ID NO: 1000968 - DNA, 25 bp, Homo sapien
taacccaggccatatagtcaggcag

SEQ ID NO: 1000969 - DNA, 25 bp, Homo sapien
ggaatgtctgggtcggcggatcggg

SEQ ID NO: 1000970 - DNA, 25 bp, Homo sapien
ccgggctgccggagagttagacctc

SEQ ID NO: 1000971 - DNA, 25 bp, Homo sapien
ctgcagcggagacggaaggctcggg

SEQ ID NO: 1000972 - DNA, 25 bp, Homo sapien
tgtgcggctgcgacgacgccggcga

SEQ ID NO: 1000973 - DNA, 25 bp, Homo sapien
cgtatttgccgggtcccgcgcaggt

SEQ ID NO: 1000974 - DNA, 25 bp, Homo sapien
cgtatttaccgaggccagagccgga

SEQ ID NO: 1000975 - DNA, 25 bp, Homo sapien
tttatccagggttgcgtggctccgc

SEQ ID NO: 1000976 - DNA, 25 bp, Homo sapien
cactgcgggcgtgctaccgtatttg

SEQ ID NO: 1000977 - DNA, 25 bp, Homo sapien
tgcttccggctcctgccatggttct

SEQ ID NO: 1000978 - DNA, 25 bp, Homo sapien
gcgagggctcgctcaagacccatca

SEQ ID NO: 1000979 - DNA, 25 bp, Homo sapien
ctcttgaaggtgtgggccgccgcca

SEQ ID NO: 1000980 - DNA, 25 bp, Homo sapien
taggacgcgtgctatgatgcgcccg

SEQ ID NO: 1000981 - DNA, 25 bp, Homo sapien
gagtgcgtggtgttgattcttgatg

SEQ ID NO: 1000982 - DNA, 25 bp, Homo sapien
tggagtgcgtggtgttgattcttga

SEQ ID NO: 1000983 - DNA, 25 bp, Homo sapien
tgcgtggtgttgattcttgatggca

SEQ ID NO: 1000984 - DNA, 25 bp, Homo sapien
tcttgatggcaggtggggcggtctg

SEQ ID NO: 1000985 - DNA, 25 bp, Homo sapien
ttcatccccagaatgtcagagttga

SEQ ID NO: 1000986 - DNA, 25 bp, Homo sapien
tcttcatccccagaatgtcagagtt

SEQ ID NO: 1000987 - DNA, 25 bp, Homo sapien
cggatcttcatccccagaatgtcag

SEQ ID NO: 1000988 - DNA, 25 bp, Homo sapien
gatcttcatccccagaatgtcagag

SEQ ID NO: 1000989 - DNA, 25 bp, Homo sapien
ggctcctgtacacactctctgctgt

SEQ ID NO: 1000990 - DNA, 25 bp, Homo sapien
cttggagaggccactttccacaaac

SEQ ID NO: 1000991 - DNA, 25 bp, Homo sapien
tggctcctgtacacactctctgctg

SEQ ID NO: 1000992 - DNA, 25 bp, Homo sapien
tctgtcgacagttgcagagtgggca

SEQ ID NO: 1000993 - DNA, 25 bp, Homo sapien
taggacagattcagggtaggccagc

SEQ ID NO: 1000994 - DNA, 25 bp, Homo sapien
ttaagacccgataggtgcagaaccc

SEQ ID NO: 1000995 - DNA, 25 bp, Homo sapien
ggattcattcaaaccctaggacaga

SEQ ID NO: 1000996 - DNA, 25 bp, Homo sapien
tgacgtagactcaaaaaccccaagc

SEQ ID NO: 1000997 - DNA, 25 bp, Homo sapien
caggaagtgattggtctaagctaac

SEQ ID NO: 1000998 - DNA, 25 bp, Homo sapien
gaaaatctgatgaaggttacggacc

SEQ ID NO: 1000999 - DNA, 25 bp, Homo sapien
tggactccaggctaagaacctcagc

SEQ ID NO: 1001000 - DNA, 25 bp, Homo sapien
ctctgatttcactgtgtggtctcag

SEQ ID NO: 1001001 - DNA, 25 bp, Homo sapien
tctggtctgagtctgccccagggag

SEQ ID NO: 1001002 - DNA, 25 bp, Homo sapien
atgcagcagtgcagttgaagggaac

SEQ ID NO: 1001003 - DNA, 25 bp, Homo sapien
atgagggcctcgctcctggtgcctg

SEQ ID NO: 1001004 - DNA, 25 bp, Homo sapien
cattcctgtgactcgggttttgctc

SEQ ID NO: 1001005 - DNA, 25 bp, Homo sapien
tcttgggtgcttccccgactgcttg

SEQ ID NO: 1001006 - DNA, 25 bp, Homo sapien
ttttgctctgcgctaggctaccacc

SEQ ID NO: 1001007 - DNA, 25 bp, Homo sapien
tgctctgtacagacgcttggtgaac

SEQ ID NO: 1001008 - DNA, 25 bp, Homo sapien
aagcccctgtgtgacaatctccacc

SEQ ID NO: 1001009 - DNA, 25 bp, Homo sapien
agcctcacaggccttgtgtcatttc

SEQ ID NO: 1001010 - DNA, 25 bp, Homo sapien
catttcccactataggaccagggaa

SEQ ID NO: 1001011 - DNA, 25 bp, Homo sapien
ggccttgtgtcatttcccactatag

SEQ ID NO: 1001012 - DNA, 25 bp, Homo sapien
tctggaggcatctccaaccaccctg

SEQ ID NO: 1001013 - DNA, 25 bp, Homo sapien
ctgtaagtgggaactgcgattagat

SEQ ID NO: 1001014 - DNA, 25 bp, Homo sapien
gtctaaggtcttccccacgctgggc

SEQ ID NO: 1001015 - DNA, 25 bp, Homo sapien
accctgctctgtaagtgggaactgc

SEQ ID NO: 1001016 - DNA, 25 bp, Homo sapien
ttcctgacccacagattatagggca

SEQ ID NO: 1001017 - DNA, 25 bp, Homo sapien
cagattatagggcagcgtgtaggct

SEQ ID NO: 1001018 - DNA, 25 bp, Homo sapien
catcgtcctcatgtatgttggtggg

SEQ ID NO: 1001019 - DNA, 25 bp, Homo sapien
tgtggcgggcttgcgtttcctgacc

SEQ ID NO: 1001020 - DNA, 25 bp, Homo sapien
ggaaaatctcgcacccattattaac

SEQ ID NO: 1001021 - DNA, 25 bp, Homo sapien
tagtataatggaaaatctcgcaccc

SEQ ID NO: 1001022 - DNA, 25 bp, Homo sapien
aatggaaaatctcgcacccattatt

SEQ ID NO: 1001023 - DNA, 25 bp, Homo sapien
tataatggaaaatctcgcacccatt

SEQ ID NO: 1001024 - DNA, 25 bp, Homo sapien
tatagtagactgtattacaagagcc

SEQ ID NO: 1001025 - DNA, 25 bp, Homo sapien
cacacagcaagtagagaattgctgc

SEQ ID NO: 1001026 - DNA, 25 bp, Homo sapien
gtcaagtttacaatcacacagcaag

SEQ ID NO: 1001027 - DNA, 25 bp, Homo sapien
tctgggcaccaagcaaagtatgtaa

SEQ ID NO: 1001028 - DNA, 25 bp, Homo sapien
gcccactgttgatacttctgtttag

SEQ ID NO: 1001029 - DNA, 25 bp, Homo sapien
ggctatagttgccataaatagtgat

SEQ ID NO: 1001030 - DNA, 25 bp, Homo sapien
tatacaaggagatttcatgcctgct

SEQ ID NO: 1001031 - DNA, 25 bp, Homo sapien
catttggtcacccaagatctcttat

SEQ ID NO: 1001032 - DNA, 25 bp, Homo sapien
tagaattcccaatatgaatcttttt

SEQ ID NO: 1001033 - DNA, 25 bp, Homo sapien
ctagaattcccaatatgaatctttt

SEQ ID NO: 1001034 - DNA, 25 bp, Homo sapien
gaatctttttcatcaggaaaaccac

SEQ ID NO: 1001035 - DNA, 25 bp, Homo sapien
caggaaaaccacattctggctcagt

SEQ ID NO: 1001036 - DNA, 25 bp, Homo sapien
ccaaggtaacaccggaggcagtgat

SEQ ID NO: 1001037 - DNA, 25 bp, Homo sapien
taacaccggaggcagtgatattgat

SEQ ID NO: 1001038 - DNA, 25 bp, Homo sapien
ggtaacaccggaggcagtgatattg

SEQ ID NO: 1001039 - DNA, 25 bp, Homo sapien
acaccggaggcagtgatattgatgg

SEQ ID NO: 1001040 - DNA, 25 bp, Homo sapien
aaacatgggacaataaactgcttgc

SEQ ID NO: 1001041 - DNA, 25 bp, Homo sapien
aaaacatgggacaataaactgcttg

SEQ ID NO: 1001042 - DNA, 25 bp, Homo sapien
ggacaataaactgcttgctgatggc

SEQ ID NO: 1001043 - DNA, 25 bp, Homo sapien
catgggacaataaactgcttgctga

SEQ ID NO: 1001044 - DNA, 25 bp, Homo sapien
tgtgtgagttccactggagacaagc

SEQ ID NO: 1001045 - DNA, 25 bp, Homo sapien
gagggaaaatactgatatccaatgg

SEQ ID NO: 1001046 - DNA, 25 bp, Homo sapien
ggatggtgtgtgtaatcggtcacta

SEQ ID NO: 1001047 - DNA, 25 bp, Homo sapien
aatcggtcactatttactgtgtgag

SEQ ID NO: 1001048 - DNA, 25 bp, Homo sapien
ttctatgcacgtcctggaaaggcac

SEQ ID NO: 1001049 - DNA, 25 bp, Homo sapien
catctgagttctatgcacgtcctgg

SEQ ID NO: 1001050 - DNA, 25 bp, Homo sapien
taacagcatctgagttctatgcacg

SEQ ID NO: 1001051 - DNA, 25 bp, Homo sapien
ctgttaacagcatctgagttctatg

SEQ ID NO: 1001052 - DNA, 25 bp, Homo sapien
attggtagagatagttcaatcctct

SEQ ID NO: 1001053 - DNA, 25 bp, Homo sapien
catattggtagagatagttcaatcc

SEQ ID NO: 1001054 - DNA, 25 bp, Homo sapien
gccatattggtagagatagttcaat

SEQ ID NO: 1001055 - DNA, 25 bp, Homo sapien
tattggtagagatagttcaatcctc

SEQ ID NO: 1001056 - DNA, 25 bp, Homo sapien
tgtaatattgggatgccggaaaaag

SEQ ID NO: 1001057 - DNA, 25 bp, Homo sapien
taagttgtaatattgggatgccgga

SEQ ID NO: 1001058 - DNA, 25 bp, Homo sapien
tgccggaaaaagtgggatagaatca

SEQ ID NO: 1001059 - DNA, 25 bp, Homo sapien
atgccggaaaaagtgggatagaatc

SEQ ID NO: 1001060 - DNA, 25 bp, Homo sapien
ccgtaggagtatgccgtgctagatg

SEQ ID NO: 1001061 - DNA, 25 bp, Homo sapien
cgttcccgtaggagtatgccgtgct

SEQ ID NO: 1001062 - DNA, 25 bp, Homo sapien
ttcccgtaggagtatgccgtgctag

SEQ ID NO: 1001063 - DNA, 25 bp, Homo sapien
cagcgttcccgtaggagtatgccgt

SEQ ID NO: 1001064 - DNA, 25 bp, Homo sapien
tgagtgattcaacttgtgttcttga

SEQ ID NO: 1001065 - DNA, 25 bp, Homo sapien
ttgagtgattcaacttgtgttcttg

SEQ ID NO: 1001066 - DNA, 25 bp, Homo sapien
gtttgagtgattcaacttgtgttct

SEQ ID NO: 1001067 - DNA, 25 bp, Homo sapien
gtgattcaacttgtgttcttgaact

SEQ ID NO: 1001068 - DNA, 25 bp, Homo sapien
tatttccaggagtcatcaccagatg

SEQ ID NO: 1001069 - DNA, 25 bp, Homo sapien
cagttagatcttttaggtccaagcc

SEQ ID NO: 1001070 - DNA, 25 bp, Homo sapien
tcagctccgctcattggaatattga

SEQ ID NO: 1001071 - DNA, 25 bp, Homo sapien
aagccagtggaagattctgcccaaa

SEQ ID NO: 1001072 - DNA, 25 bp, Homo sapien
taatgacaggtatgttataggtttc

SEQ ID NO: 1001073 - DNA, 25 bp, Homo sapien
taaggaatctctgatttgaaaggcc

SEQ ID NO: 1001074 - DNA, 25 bp, Homo sapien
aaaaacagtgttcaaggctagaatc

SEQ ID NO: 1001075 - DNA, 25 bp, Homo sapien
tctcaaagctattcaagtcagggat

SEQ ID NO: 1001076 - DNA, 25 bp, Homo sapien
gcctcggtaaaataacaagtctcca

SEQ ID NO: 1001077 - DNA, 25 bp, Homo sapien
ctcacagcctcggtaaaataacaag

SEQ ID NO: 1001078 - DNA, 25 bp, Homo sapien
cacagcctcggtaaaataacaagtc

SEQ ID NO: 1001079 - DNA, 25 bp, Homo sapien
ttctctcacagcctcggtaaaataa

SEQ ID NO: 1001080 - DNA, 25 bp, Homo sapien
aactaggcgtggagaacagtagacc

SEQ ID NO: 1001081 - DNA, 25 bp, Homo sapien
gatctgcactgccatcatcattgga

SEQ ID NO: 1001082 - DNA, 25 bp, Homo sapien
cattgtcggacacagagcttgccag

SEQ ID NO: 1001083 - DNA, 25 bp, Homo sapien
tgtatgaagggcacacacagtcctg

SEQ ID NO: 1001084 - DNA, 25 bp, Homo sapien
tccacggtttgtcctgagacttcag

SEQ ID NO: 1001085 - DNA, 25 bp, Homo sapien
tggttatcagttggtccgggcatcc

SEQ ID NO: 1001086 - DNA, 25 bp, Homo sapien
ggagttcagccaagtaagaggtcta

SEQ ID NO: 1001087 - DNA, 25 bp, Homo sapien
gcagattgcaggaggtccacggttt

SEQ ID NO: 1001088 - DNA, 25 bp, Homo sapien
ttggaaatactatgtccagaatttt

SEQ ID NO: 1001089 - DNA, 25 bp, Homo sapien
tggaaatactatgtccagaattttt

SEQ ID NO: 1001090 - DNA, 25 bp, Homo sapien
tagaactgcttgataagttattgat

SEQ ID NO: 1001091 - DNA, 25 bp, Homo sapien
cctggaacgaattgttgatcatggc

SEQ ID NO: 1001092 - DNA, 25 bp, Homo sapien
ggaacgaattgttgatcatggcaat

SEQ ID NO: 1001093 - DNA, 25 bp, Homo sapien
caatttcctggaacgaattgttgat

SEQ ID NO: 1001094 - DNA, 25 bp, Homo sapien
aacgaattgttgatcatggcaatta

SEQ ID NO: 1001095 - DNA, 25 bp, Homo sapien
tgtggttatagttgatgatcactga

SEQ ID NO: 1001096 - DNA, 25 bp, Homo sapien
cattgtaacattacagactccataa

SEQ ID NO: 1001097 - DNA, 25 bp, Homo sapien
ttgtaacattacagactccataaag

SEQ ID NO: 1001098 - DNA, 25 bp, Homo sapien
cagactccataaagaacataaccaa

SEQ ID NO: 1001099 - DNA, 25 bp, Homo sapien
agtccaaatatagcccagaacattg

SEQ ID NO: 1001100 - DNA, 25 bp, Homo sapien
tcacttcagaaagtccaaatatagc

SEQ ID NO: 1001101 - DNA, 25 bp, Homo sapien
ttcagaaagtccaaatatagcccag

SEQ ID NO: 1001102 - DNA, 25 bp, Homo sapien
cagaaagtccaaatatagcccagaa

SEQ ID NO: 1001103 - DNA, 25 bp, Homo sapien
cttcagacaccacccaaggatcaga

SEQ ID NO: 1001104 - DNA, 25 bp, Homo sapien
cagacaccacccaaggatcagaggg

SEQ ID NO: 1001105 - DNA, 25 bp, Homo sapien
gaccttcagacaccacccaaggatc

SEQ ID NO: 1001106 - DNA, 25 bp, Homo sapien
tcagacaccacccaaggatcagagg

SEQ ID NO: 1001107 - DNA, 25 bp, Homo sapien
tcccagtgttacttctgtcaagtcc

SEQ ID NO: 1001108 - DNA, 25 bp, Homo sapien
gtatcatttgcatcaatgatgcttt

SEQ ID NO: 1001109 - DNA, 25 bp, Homo sapien
tttgcatcaatgatgctttgggctt

SEQ ID NO: 1001110 - DNA, 25 bp, Homo sapien
tccctcctggccaaattgtagtatt

SEQ ID NO: 1001111 - DNA, 25 bp, Homo sapien
cacaactcaaacaaatattccttgg

SEQ ID NO: 1001112 - DNA, 25 bp, Homo sapien
tattccttggggccttgagtccaaa

SEQ ID NO: 1001113 - DNA, 25 bp, Homo sapien
aacaaatattccttggggccttgag

SEQ ID NO: 1001114 - DNA, 25 bp, Homo sapien
ctcaaacaaatattccttggggcct

SEQ ID NO: 1001115 - DNA, 25 bp, Homo sapien
aaaagaggttcagcacgctgatgac

SEQ ID NO: 1001116 - DNA, 25 bp, Homo sapien
gacaaagcatcagaggcaagtatct

SEQ ID NO: 1001117 - DNA, 25 bp, Homo sapien
tatctataggatgaatgcagaagca

SEQ ID NO: 1001118 - DNA, 25 bp, Homo sapien
gctggaaagttcatagtcacataat

SEQ ID NO: 1001119 - DNA, 25 bp, Homo sapien
aatgacatgttttgagtgccttgcc

SEQ ID NO: 1001120 - DNA, 25 bp, Homo sapien
cgctgaatggatctcatttggtcaa

SEQ ID NO: 1001121 - DNA, 25 bp, Homo sapien
gaagactgaggcaaaaattggctcc

SEQ ID NO: 1001122 - DNA, 25 bp, Homo sapien
gtgccttgccagttagtcgctgaat

SEQ ID NO: 1001123 - DNA, 25 bp, Homo sapien
gaatctgttagcaagagaaatgctg

SEQ ID NO: 1001124 - DNA, 25 bp, Homo sapien
tgttgcatgttcagttcaatgggaa

SEQ ID NO: 1001125 - DNA, 25 bp, Homo sapien
taataagtgattgtggcacaaaggc

SEQ ID NO: 1001126 - DNA, 25 bp, Homo sapien
attctgaccaaatcttaaggagtgt

SEQ ID NO: 1001127 - DNA, 25 bp, Homo sapien
ttcagagcaagaggccacaggtcgg

SEQ ID NO: 1001128 - DNA, 25 bp, Homo sapien
cagtggatgagtgtccaggtagacc

SEQ ID NO: 1001129 - DNA, 25 bp, Homo sapien
gagcatctgtgtctagctgttgagc

SEQ ID NO: 1001130 - DNA, 25 bp, Homo sapien
gccacaggtcggctgtgagcatctg

SEQ ID NO: 1001131 - DNA, 25 bp, Homo sapien
tactttgctagggaacccgtttgca

SEQ ID NO: 1001132 - DNA, 25 bp, Homo sapien
tataaaccccgtctgtaggaacagc

SEQ ID NO: 1001133 - DNA, 25 bp, Homo sapien
caagagtgaataaaagggctgctcc

SEQ ID NO: 1001134 - DNA, 25 bp, Homo sapien
tggcaggcagcttcctatccgaggc

SEQ ID NO: 1001135 - DNA, 25 bp, Homo sapien
ggtccaataggaagacagcgtgctg

SEQ ID NO: 1001136 - DNA, 25 bp, Homo sapien
caacagcttgcatggagttgccgca

SEQ ID NO: 1001137 - DNA, 25 bp, Homo sapien
gatggtgtccttggctcaagtccag

SEQ ID NO: 1001138 - DNA, 25 bp, Homo sapien
gagactgggaagcactccatgggat

SEQ ID NO: 1001139 - DNA, 25 bp, Homo sapien
ctggatctgggacagtccttccagc

SEQ ID NO: 1001140 - DNA, 25 bp, Homo sapien
tgtgggcttcctcagattccttctg

SEQ ID NO: 1001141 - DNA, 25 bp, Homo sapien
tgggacagtccttccagccaagact

SEQ ID NO: 1001142 - DNA, 25 bp, Homo sapien
gattccttctggatctgggacagtc

SEQ ID NO: 1001143 - DNA, 25 bp, Homo sapien
gtcctcagagccttggccctggctt

SEQ ID NO: 1001144 - DNA, 25 bp, Homo sapien
ggcacgtcctcagagccttggccct

SEQ ID NO: 1001145 - DNA, 25 bp, Homo sapien
cctcagagccttggccctggcttac

SEQ ID NO: 1001146 - DNA, 25 bp, Homo sapien
caggcacgtcctcagagccttggcc

SEQ ID NO: 1001147 - DNA, 25 bp, Homo sapien
ggtatattggtaagccttgttgctg

SEQ ID NO: 1001148 - DNA, 25 bp, Homo sapien
ggtaagccttgttgctgtaataatc

SEQ ID NO: 1001149 - DNA, 25 bp, Homo sapien
gttttgctgggtatattggtaagcc

SEQ ID NO: 1001150 - DNA, 25 bp, Homo sapien
tgctgtaataatctccttcgttttc

SEQ ID NO: 1001151 - DNA, 25 bp, Homo sapien
cctgttgttgaagccgcaatggcgc

SEQ ID NO: 1001152 - DNA, 25 bp, Homo sapien
tgaagccgcaatggcgccgtgcaag

SEQ ID NO: 1001153 - DNA, 25 bp, Homo sapien
ttgttgaagccgcaatggcgccgtg

SEQ ID NO: 1001154 - DNA, 25 bp, Homo sapien
cgcaatggcgccgtgcaagggtcac

SEQ ID NO: 1001155 - DNA, 25 bp, Homo sapien
gggcctggttgttggtctctcgcac

SEQ ID NO: 1001156 - DNA, 25 bp, Homo sapien
caagggcctggttgttggtctctcg

SEQ ID NO: 1001157 - DNA, 25 bp, Homo sapien
ccagccaggcaagggcctggttgtt

SEQ ID NO: 1001158 - DNA, 25 bp, Homo sapien
atccagccaggcaagggcctggttg

SEQ ID NO: 1001159 - DNA, 25 bp, Homo sapien
ccagggagccgccagccaggtcttc

SEQ ID NO: 1001160 - DNA, 25 bp, Homo sapien
aacaccaggatggtgtgacccagaa

SEQ ID NO: 1001161 - DNA, 25 bp, Homo sapien
acaccaggatggtgtgacccagaac

SEQ ID NO: 1001162 - DNA, 25 bp, Homo sapien
tgaacaccaggatggtgtgacccag

SEQ ID NO: 1001163 - DNA, 25 bp, Homo sapien
tgctgatcctcatccgtgaaccggc

SEQ ID NO: 1001164 - DNA, 25 bp, Homo sapien
accggcccagttgtgtcaccaggag

SEQ ID NO: 1001165 - DNA, 25 bp, Homo sapien
taagacgatggcttggcagatagcg

SEQ ID NO: 1001166 - DNA, 25 bp, Homo sapien
gcagatagcgtctgccacctctggc

SEQ ID NO: 1001167 - DNA, 25 bp, Homo sapien
acagaatgttgggtgtgtcaatcac

SEQ ID NO: 1001168 - DNA, 25 bp, Homo sapien
ggggacagaatgttgggtgtgtcaa

SEQ ID NO: 1001169 - DNA, 25 bp, Homo sapien
ctggggggacagaatgttgggtgtg

SEQ ID NO: 1001170 - DNA, 25 bp, Homo sapien
ggacagaatgttgggtgtgtcaatc

SEQ ID NO: 1001171 - DNA, 25 bp, Homo sapien
cgtccctgccgaggatgctgtttcc

SEQ ID NO: 1001172 - DNA, 25 bp, Homo sapien
ccactctcggctccgtctctgggag

SEQ ID NO: 1001173 - DNA, 25 bp, Homo sapien
gctgagtttagactcgaagacgtcc

SEQ ID NO: 1001174 - DNA, 25 bp, Homo sapien
tttccccatgagaatgagcctcagt

SEQ ID NO: 1001175 - DNA, 25 bp, Homo sapien
ttgtaaaagaccaacatctgccctg

SEQ ID NO: 1001176 - DNA, 25 bp, Homo sapien
cctagaaagaagagcgagacttggc

SEQ ID NO: 1001177 - DNA, 25 bp, Homo sapien
agggcccatgtaccccatcttgtca

SEQ ID NO: 1001178 - DNA, 25 bp, Homo sapien
atctgccctgaaaccagcgctgggc

SEQ ID NO: 1001179 - DNA, 25 bp, Homo sapien
aaagggacgccctcgataaggcaga

SEQ ID NO: 1001180 - DNA, 25 bp, Homo sapien
gttgagcccatgaaagttaagcgcc

SEQ ID NO: 1001181 - DNA, 25 bp, Homo sapien
gcctccccaggatgaatgacgaagt

SEQ ID NO: 1001182 - DNA, 25 bp, Homo sapien
gttaagcgcctgaccctgtgcaatg

SEQ ID NO: 1001183 - DNA, 25 bp, Homo sapien
gggattctcctggggaatttgttca

SEQ ID NO: 1001184 - DNA, 25 bp, Homo sapien
aggatcctgggacagctcttctggg

SEQ ID NO: 1001185 - DNA, 25 bp, Homo sapien
ggacagctcttctgggggattctcc

SEQ ID NO: 1001186 - DNA, 25 bp, Homo sapien
tcctgacagctccagcacaggatcc

SEQ ID NO: 1001187 - DNA, 25 bp, Homo sapien
gaccacgtttctggtctcccggcca

SEQ ID NO: 1001188 - DNA, 25 bp, Homo sapien
gacaaggccgatgtttgcttatatt

SEQ ID NO: 1001189 - DNA, 25 bp, Homo sapien
tggagacctgcccttgaaagagcag

SEQ ID NO: 1001190 - DNA, 25 bp, Homo sapien
tggtctcccggccacgcactctcac

SEQ ID NO: 1001191 - DNA, 25 bp, Homo sapien
acccaaatcagatgcccggccctat

SEQ ID NO: 1001192 - DNA, 25 bp, Homo sapien
gatgcccggccctatgcttcttgta

SEQ ID NO: 1001193 - DNA, 25 bp, Homo sapien
gcttggcaactctcttgatccctct

SEQ ID NO: 1001194 - DNA, 25 bp, Homo sapien
aaaagagcttggcaactctcttgat

SEQ ID NO: 1001195 - DNA, 25 bp, Homo sapien
tgacaaagtccactgggaacctaaa

SEQ ID NO: 1001196 - DNA, 25 bp, Homo sapien
ttttactgttagtgcaggaccttga

SEQ ID NO: 1001197 - DNA, 25 bp, Homo sapien
catagtgtatgtgtcttaccaaggc

SEQ ID NO: 1001198 - DNA, 25 bp, Homo sapien
ttaccaaggcctgtaaggtacttgc

SEQ ID NO: 1001199 - DNA, 25 bp, Homo sapien
ttgagtatctttggctcgattttgg

SEQ ID NO: 1001200 - DNA, 25 bp, Homo sapien
cagctagcttgatccagttgtgaca

SEQ ID NO: 1001201 - DNA, 25 bp, Homo sapien
tacttggtcataaaaggtgcagcta

SEQ ID NO: 1001202 - DNA, 25 bp, Homo sapien
tgggctgcaatgaaacttgtacttg

SEQ ID NO: 1001203 - DNA, 25 bp, Homo sapien
ggtcatcttgcctactcctgaggaa

SEQ ID NO: 1001204 - DNA, 25 bp, Homo sapien
ttgcctactcctgaggaagtcagaa

SEQ ID NO: 1001205 - DNA, 25 bp, Homo sapien
ctgcttcaactaagtggtcatcttg

SEQ ID NO: 1001206 - DNA, 25 bp, Homo sapien
taagtggtcatcttgcctactcctg

SEQ ID NO: 1001207 - DNA, 25 bp, Homo sapien
tgtcactctcctggtctggtcacca

SEQ ID NO: 1001208 - DNA, 25 bp, Homo sapien
tcccagggttggcattgtcactctc

SEQ ID NO: 1001209 - DNA, 25 bp, Homo sapien
tctggtcaccaggtatggtctccat

SEQ ID NO: 1001210 - DNA, 25 bp, Homo sapien
gcattgtcactctcctggtctggtc

SEQ ID NO: 1001211 - DNA, 25 bp, Homo sapien
ggaaaatctcgcacccattattaac

SEQ ID NO: 1001212 - DNA, 25 bp, Homo sapien
tataatggaaaatctcgcacccatt

SEQ ID NO: 1001213 - DNA, 25 bp, Homo sapien
tagtataatggaaaatctcgcaccc

SEQ ID NO: 1001214 - DNA, 25 bp, Homo sapien
aatggaaaatctcgcacccattatt

SEQ ID NO: 1001215 - DNA, 25 bp, Homo sapien
tatagtagactgtattacaagagcc

SEQ ID NO: 1001216 - DNA, 25 bp, Homo sapien
tctgggcaccaagcaaagtatgtaa

SEQ ID NO: 1001217 - DNA, 25 bp, Homo sapien
cacacagcaagtagagaattgctgc

SEQ ID NO: 1001218 - DNA, 25 bp, Homo sapien
gtcaagtttacaatcacacagcaag

SEQ ID NO: 1001219 - DNA, 25 bp, Homo sapien
gaaggacctatctccagttgctggg

SEQ ID NO: 1001220 - DNA, 25 bp, Homo sapien
tgttgagccgtcagacctgtccaga

SEQ ID NO: 1001221 - DNA, 25 bp, Homo sapien
ccatattggacagggcagacagtaa

SEQ ID NO: 1001222 - DNA, 25 bp, Homo sapien
tatgctcatgttcagaagggacagg

SEQ ID NO: 1001223 - DNA, 25 bp, Homo sapien
tacatttaaatctctggaccctgga

SEQ ID NO: 1001224 - DNA, 25 bp, Homo sapien
tctgggcgtgacactgggactctca

SEQ ID NO: 1001225 - DNA, 25 bp, Homo sapien
tcagatcctcgtggtctatggagca

SEQ ID NO: 1001226 - DNA, 25 bp, Homo sapien
ccaacctgagattgaaggcagtgcc

SEQ ID NO: 1001227 - DNA, 25 bp, Homo sapien
cccggcagcccggttgttgaaggca

SEQ ID NO: 1001228 - DNA, 25 bp, Homo sapien
tccttcaggctgaggttgtccatgt

SEQ ID NO: 1001229 - DNA, 25 bp, Homo sapien
cggcagcccggttgttgaaggcaca

SEQ ID NO: 1001230 - DNA, 25 bp, Homo sapien
ctccccggcagcccggttgttgaag

SEQ ID NO: 1001231 - DNA, 25 bp, Homo sapien
gtcctgagcagtgaaacgcccagct

SEQ ID NO: 1001232 - DNA, 25 bp, Homo sapien
gtgtcctgagcagtgaaacgcccag

SEQ ID NO: 1001233 - DNA, 25 bp, Homo sapien
ctgagcagtgaaacgcccagctgga

SEQ ID NO: 1001234 - DNA, 25 bp, Homo sapien
gcagtgaaacgcccagctggatcac

SEQ ID NO: 1001235 - DNA, 25 bp, Homo sapien
tcctgtctccacctggcatgtcctg

SEQ ID NO: 1001236 - DNA, 25 bp, Homo sapien
gtctccacctggcatgtcctggtta

SEQ ID NO: 1001237 - DNA, 25 bp, Homo sapien
cacatggggcccgagggcagagagc

SEQ ID NO: 1001238 - DNA, 25 bp, Homo sapien
ccacctggcatgtcctggttactga

SEQ ID NO: 1001239 - DNA, 25 bp, Homo sapien
ttttgcccaccaggaggatcagcag

SEQ ID NO: 1001240 - DNA, 25 bp, Homo sapien
gttttgcccaccaggaggatcagca

SEQ ID NO: 1001241 - DNA, 25 bp, Homo sapien
tgttttgcccaccaggaggatcagc

SEQ ID NO: 1001242 - DNA, 25 bp, Homo sapien
ctgttttgcccaccaggaggatcag

SEQ ID NO: 1001243 - DNA, 25 bp, Homo sapien
gcgggtgaagagtgagggtataaaa

SEQ ID NO: 1001244 - DNA, 25 bp, Homo sapien
ctgtgagagcgggtgaagagtgagg

SEQ ID NO: 1001245 - DNA, 25 bp, Homo sapien
cactggcaccctgggtcagtgagga

SEQ ID NO: 1001246 - DNA, 25 bp, Homo sapien
gcactggcaccctgggtcagtgagg

SEQ ID NO: 1001247 - DNA, 25 bp, Homo sapien
tgtagcacatctagaccatggaatc

SEQ ID NO: 1001248 - DNA, 25 bp, Homo sapien
catctagaccatggaatcttattca

SEQ ID NO: 1001249 - DNA, 25 bp, Homo sapien
tcattcaaaaagtaactgggctaac

SEQ ID NO: 1001250 - DNA, 25 bp, Homo sapien
gggctaacaagtcatgagaaagcat

SEQ ID NO: 1001251 - DNA, 25 bp, Homo sapien
ctatatctctgctttgtacaagtac

SEQ ID NO: 1001252 - DNA, 25 bp, Homo sapien
catgagcatttgtttgtgccctctt

SEQ ID NO: 1001253 - DNA, 25 bp, Homo sapien
tgtgatattatttgtgaggactctg

SEQ ID NO: 1001254 - DNA, 25 bp, Homo sapien
tctctgctttgtacaagtaccatgc

SEQ ID NO: 1001255 - DNA, 25 bp, Homo sapien
cagttgggcttccatccaagttgag

SEQ ID NO: 1001256 - DNA, 25 bp, Homo sapien
ttagggagaacacctttcacatggg

SEQ ID NO: 1001257 - DNA, 25 bp, Homo sapien
tattccccgtatcttattgacacag

SEQ ID NO: 1001258 - DNA, 25 bp, Homo sapien
acagttgcgtctcattttaggaggc

SEQ ID NO: 1001259 - DNA, 25 bp, Homo sapien
ccaggccaatggtgggatcttaaag

SEQ ID NO: 1001260 - DNA, 25 bp, Homo sapien
tgtggtcaactacagatagcgtagg

SEQ ID NO: 1001261 - DNA, 25 bp, Homo sapien
ttggacctatacaaacaactatggt

SEQ ID NO: 1001262 - DNA, 25 bp, Homo sapien
tgttttgcccaacatcgggttaaca

SEQ ID NO: 1001263 - DNA, 25 bp, Homo sapien
ccacgtagctaggatgtagtcccaa

SEQ ID NO: 1001264 - DNA, 25 bp, Homo sapien
tcaaaacatacaggtgggcaacacc

SEQ ID NO: 1001265 - DNA, 25 bp, Homo sapien
gacggcggtataacgtagaggcaca

SEQ ID NO: 1001266 - DNA, 25 bp, Homo sapien
tgttgatagatgcacgagactgcca

SEQ ID NO: 1001267 - DNA, 25 bp, Homo sapien
tcttggatcagttctcctctgtctt

SEQ ID NO: 1001268 - DNA, 25 bp, Homo sapien
ctcttggatcagttctcctctgtct

SEQ ID NO: 1001269 - DNA, 25 bp, Homo sapien
gtacgtgatgcccactcccatctcc

SEQ ID NO: 1001270 - DNA, 25 bp, Homo sapien
cgccctctggctgtacgtgatgccc

SEQ ID NO: 1001271 - DNA, 25 bp, Homo sapien
tctttcctcaagctaacttcacctt

SEQ ID NO: 1001272 - DNA, 25 bp, Homo sapien
acattttccgcttgtgtccttgact

SEQ ID NO: 1001273 - DNA, 25 bp, Homo sapien
tcctcaagctaacttcaccttattt

SEQ ID NO: 1001274 - DNA, 25 bp, Homo sapien
atctttgcacattttccgcttgtgt

SEQ ID NO: 1001275 - DNA, 25 bp, Homo sapien
tcattctgaagctcctggggtggtc

SEQ ID NO: 1001276 - DNA, 25 bp, Homo sapien
ccaagtggacttttcacagggcaat

SEQ ID NO: 1001277 - DNA, 25 bp, Homo sapien
ttcacagggcaatgatggctgccac

SEQ ID NO: 1001278 - DNA, 25 bp, Homo sapien
ggacttttcacagggcaatgatggc

SEQ ID NO: 1001279 - DNA, 25 bp, Homo sapien
tatccctggaactaaggacagagcc

SEQ ID NO: 1001280 - DNA, 25 bp, Homo sapien
tactctgatatgacccattcaggcc

SEQ ID NO: 1001281 - DNA, 25 bp, Homo sapien
gatctgcggtttaagtttgggtcac

SEQ ID NO: 1001282 - DNA, 25 bp, Homo sapien
tgatggtggcataacccagaagccc

SEQ ID NO: 1001283 - DNA, 25 bp, Homo sapien
ctttgctgaagaagggcaaggccca

SEQ ID NO: 1001284 - DNA, 25 bp, Homo sapien
tgaagaagggcaaggcccatctcct

SEQ ID NO: 1001285 - DNA, 25 bp, Homo sapien
gctgaagaagggcaaggcccatctc

SEQ ID NO: 1001286 - DNA, 25 bp, Homo sapien
aagaagggcaaggcccatctcctgg

SEQ ID NO: 1001287 - DNA, 25 bp, Homo sapien
ccatcgccttggatctgaagaccag

SEQ ID NO: 1001288 - DNA, 25 bp, Homo sapien
tacaaaattcaatggcaggctggat

SEQ ID NO: 1001289 - DNA, 25 bp, Homo sapien
cagttctcttaagtctacaggccga

SEQ ID NO: 1001290 - DNA, 25 bp, Homo sapien
taggagcctagacaatctcagcagg

SEQ ID NO: 1001291 - DNA, 25 bp, Homo sapien
ttcatggcgcacgaggtgtataaac

SEQ ID NO: 1001292 - DNA, 25 bp, Homo sapien
tggcgcacgaggtgtataaacaaag

SEQ ID NO: 1001293 - DNA, 25 bp, Homo sapien
cgcacgaggtgtataaacaaaggga

SEQ ID NO: 1001294 - DNA, 25 bp, Homo sapien
cctttcatggcgcacgaggtgtata

SEQ ID NO: 1001295 - DNA, 25 bp, Homo sapien
aatgcaacaatatctgttcatggac

SEQ ID NO: 1001296 - DNA, 25 bp, Homo sapien
tattatgtttaatcagcattgtgga

SEQ ID NO: 1001297 - DNA, 25 bp, Homo sapien
taatcagcattgtggaaaatgcaac

SEQ ID NO: 1001298 - DNA, 25 bp, Homo sapien
gagaaccccagagtgggaacagcag

SEQ ID NO: 1001299 - DNA, 25 bp, Homo sapien
ggcgaagggggcactgaattctccc

SEQ ID NO: 1001300 - DNA, 25 bp, Homo sapien
gcgaagggggcactgaattctcccc

SEQ ID NO: 1001301 - DNA, 25 bp, Homo sapien
gggcgaagggggcactgaattctcc

SEQ ID NO: 1001302 - DNA, 25 bp, Homo sapien
gagggcgaagggggcactgaattct

SEQ ID NO: 1001303 - DNA, 25 bp, Homo sapien
aggagggcgcagagaggcacagggc

SEQ ID NO: 1001304 - DNA, 25 bp, Homo sapien
acagcaaaggggagagctgcatatg

SEQ ID NO: 1001305 - DNA, 25 bp, Homo sapien
cagcctcaggttcgggtgcccctgg

SEQ ID NO: 1001306 - DNA, 25 bp, Homo sapien
agggcggcgacagttggcccaggac

SEQ ID NO: 1001307 - DNA, 25 bp, Homo sapien
caagtttcgaagacctactcccaag

SEQ ID NO: 1001308 - DNA, 25 bp, Homo sapien
gggcacggattgctgtgaacaactt

SEQ ID NO: 1001309 - DNA, 25 bp, Homo sapien
gaacagggcacggattgctgtgaac

SEQ ID NO: 1001310 - DNA, 25 bp, Homo sapien
tctggccacacaagtttcgaagacc

SEQ ID NO: 1001311 - DNA, 25 bp, Homo sapien
tgaagctattcacgcagaggacaac

SEQ ID NO: 1001312 - DNA, 25 bp, Homo sapien
gccattggttctcttgacttcgccg

SEQ ID NO: 1001313 - DNA, 25 bp, Homo sapien
gggtctgagcgatcacacacagtgt

SEQ ID NO: 1001314 - DNA, 25 bp, Homo sapien
gccatagctgtagcaaagcctgcca

SEQ ID NO: 1001315 - DNA, 25 bp, Homo sapien
cgggtgcttctcatggacaatggcc

SEQ ID NO: 1001316 - DNA, 25 bp, Homo sapien
tcatggacaatggccccagctcctg

SEQ ID NO: 1001317 - DNA, 25 bp, Homo sapien
gtttgcccgggtgcttctcatggac

SEQ ID NO: 1001318 - DNA, 25 bp, Homo sapien
tgcccgggtgcttctcatggacaat

SEQ ID NO: 1001319 - DNA, 25 bp, Homo sapien
cacagcctgaggcactcagcacagt

SEQ ID NO: 1001320 - DNA, 25 bp, Homo sapien
acagcctgaggcactcagcacagtc

SEQ ID NO: 1001321 - DNA, 25 bp, Homo sapien
gcacagcctgaggcactcagcacag

SEQ ID NO: 1001322 - DNA, 25 bp, Homo sapien
agaccccttcccgtgagtccacatg

SEQ ID NO: 1001323 - DNA, 25 bp, Homo sapien
tggctcctacctaggtggctctcct

SEQ ID NO: 1001324 - DNA, 25 bp, Homo sapien
gcagctctgattctggaagattctg

SEQ ID NO: 1001325 - DNA, 25 bp, Homo sapien
gattctgtccccttaaaatccatga

SEQ ID NO: 1001326 - DNA, 25 bp, Homo sapien
ggcctagaggccatagcaactccat

SEQ ID NO: 1001327 - DNA, 25 bp, Homo sapien
gctcataaccaatcctggctgtgga

SEQ ID NO: 1001328 - DNA, 25 bp, Homo sapien
tgtcaaagctgactcctggtggatg

SEQ ID NO: 1001329 - DNA, 25 bp, Homo sapien
gagaacctccagctttcagcagttg

SEQ ID NO: 1001330 - DNA, 25 bp, Homo sapien
aaatagtgtctttgtcaagatccca

SEQ ID NO: 1001331 - DNA, 25 bp, Homo sapien
tgaggtctgggaactaggcgaggga

SEQ ID NO: 1001332 - DNA, 25 bp, Homo sapien
ggagaagacatatagcagtgaggtc

SEQ ID NO: 1001333 - DNA, 25 bp, Homo sapien
gtctttgtcaagatcccagctgggc

SEQ ID NO: 1001334 - DNA, 25 bp, Homo sapien
tccacggaggtggtagcaattcaca

SEQ ID NO: 1001335 - DNA, 25 bp, Homo sapien
gacaatgtggaattggcagggcacc

SEQ ID NO: 1001336 - DNA, 25 bp, Homo sapien
gggcaccaggaatgcgcatttgcaa

SEQ ID NO: 1001337 - DNA, 25 bp, Homo sapien
tggttccctattggcagacatttag

SEQ ID NO: 1001338 - DNA, 25 bp, Homo sapien
cggccagttctctttttttagagag

SEQ ID NO: 1001339 - DNA, 25 bp, Homo sapien
cattctatttatggtgtctagctct

SEQ ID NO: 1001340 - DNA, 25 bp, Homo sapien
tctatggaagttctttatctattca

SEQ ID NO: 1001341 - DNA, 25 bp, Homo sapien
taccgtttgtgatatgagtttcaaa

SEQ ID NO: 1001342 - DNA, 25 bp, Homo sapien
tatctattcacaaaattaccgtttg

SEQ ID NO: 1001343 - DNA, 25 bp, Homo sapien
tctcatgggctaggcatcattacca

SEQ ID NO: 1001344 - DNA, 25 bp, Homo sapien
tgaagttcccctaggaatgtaggcc

SEQ ID NO: 1001345 - DNA, 25 bp, Homo sapien
caggagttagacaattccgcacacg

SEQ ID NO: 1001346 - DNA, 25 bp, Homo sapien
tgaagagtcggatctgaaccaggcc

SEQ ID NO: 1001347 - DNA, 25 bp, Homo sapien
agccagggtccaggcgtgcaggcgg

SEQ ID NO: 1001348 - DNA, 25 bp, Homo sapien
agggtcctgcggcaagagggtctcc

SEQ ID NO: 1001349 - DNA, 25 bp, Homo sapien
ttctggggagaaacacctgcaccca

SEQ ID NO: 1001350 - DNA, 25 bp, Homo sapien
gggactcctcgtgacagagggtcct

SEQ ID NO: 1001351 - DNA, 25 bp, Homo sapien
caggctgcgcggtttcccgaaacca

SEQ ID NO: 1001352 - DNA, 25 bp, Homo sapien
cggagacggcagatgcacgggtggg

SEQ ID NO: 1001353 - DNA, 25 bp, Homo sapien
ggacactagctgaccccgagcaggg

SEQ ID NO: 1001354 - DNA, 25 bp, Homo sapien
cggccgagcagagcggacactagct

SEQ ID NO: 1001355 - DNA, 25 bp, Homo sapien
gcgtgaacccgtcgggcgtgagcag

SEQ ID NO: 1001356 - DNA, 25 bp, Homo sapien
gcagcagtcggtggagcgggaggtc

SEQ ID NO: 1001357 - DNA, 25 bp, Homo sapien
cagcgcggtccttcacggggcaggg

SEQ ID NO: 1001358 - DNA, 25 bp, Homo sapien
ggatgggggtatccggagcgcagcc

SEQ ID NO: 1001359 - DNA, 25 bp, Homo sapien
ggcgctgcttgacccagacgccagg

SEQ ID NO: 1001360 - DNA, 25 bp, Homo sapien
caaggactcggtcctgtcccagagc

SEQ ID NO: 1001361 - DNA, 25 bp, Homo sapien
gctacacacattcccctcgtgaggg

SEQ ID NO: 1001362 - DNA, 25 bp, Homo sapien
gtcgccgcagttccagcatggtcag

SEQ ID NO: 1001363 - DNA, 25 bp, Homo sapien
tgggaacagccgacagtgatgagat

SEQ ID NO: 1001364 - DNA, 25 bp, Homo sapien
ttagcggttaatccctgcagtggca

SEQ ID NO: 1001365 - DNA, 25 bp, Homo sapien
gaacaggacaccgagccagttatgt

SEQ ID NO: 1001366 - DNA, 25 bp, Homo sapien
catagactgtgtccctgacaatggg

SEQ ID NO: 1001367 - DNA, 25 bp, Homo sapien
gaggaacacatgtctgtccctgcca

SEQ ID NO: 1001368 - DNA, 25 bp, Homo sapien
tagaaaggtggtgctatccccagtg

SEQ ID NO: 1001369 - DNA, 25 bp, Homo sapien
gaagctgagagtatgaacgcccatg

SEQ ID NO: 1001370 - DNA, 25 bp, Homo sapien
gagtgaatcccaaaccaggagtgtt

SEQ ID NO: 1001371 - DNA, 25 bp, Homo sapien
ttcccaacagagtatgtagccagcc

SEQ ID NO: 1001372 - DNA, 25 bp, Homo sapien
gtggaaaccaaagcgggtctgcttg

SEQ ID NO: 1001373 - DNA, 25 bp, Homo sapien
tttttcagcttagtcttccctatga

SEQ ID NO: 1001374 - DNA, 25 bp, Homo sapien
tgaaggcagaacacatgggttgagc

SEQ ID NO: 1001375 - DNA, 25 bp, Homo sapien
ccaaaatcagtctggctgggccaaa

SEQ ID NO: 1001376 - DNA, 25 bp, Homo sapien
tagtttaatcgcatctgcagagtcc

SEQ ID NO: 1001377 - DNA, 25 bp, Homo sapien
tgggccaaagtcaaggtgtaatcag

SEQ ID NO: 1001378 - DNA, 25 bp, Homo sapien
gctggcttcttctggtatctctgaa

SEQ ID NO: 1001379 - DNA, 25 bp, Homo sapien
tccatgctgcgtgtatcagtctcag

SEQ ID NO: 1001380 - DNA, 25 bp, Homo sapien
ggccacaatcagatagttcccttat

SEQ ID NO: 1001381 - DNA, 25 bp, Homo sapien
gaatctgacttctcttacttgacac

SEQ ID NO: 1001382 - DNA, 25 bp, Homo sapien
tacttgacacaatgtcctgaagact

SEQ ID NO: 1001383 - DNA, 25 bp, Homo sapien
aactcaatgggacaaggattccgac

SEQ ID NO: 1001384 - DNA, 25 bp, Homo sapien
cagggcttcaagatgggtgttctca

SEQ ID NO: 1001385 - DNA, 25 bp, Homo sapien
gaactgtagaccaagcacctatgtg

SEQ ID NO: 1001386 - DNA, 25 bp, Homo sapien
ggaggactcggaagctgatagcatc

SEQ ID NO: 1001387 - DNA, 25 bp, Homo sapien
aaaccgtgctctttgatagtatggc

SEQ ID NO: 1001388 - DNA, 25 bp, Homo sapien
gctcaagagtagaccaacagaccaa

SEQ ID NO: 1001389 - DNA, 25 bp, Homo sapien
tacagaccatgttctgagaccataa

SEQ ID NO: 1001390 - DNA, 25 bp, Homo sapien
taagttacactataaagccatggaa

SEQ ID NO: 1001391 - DNA, 25 bp, Homo sapien
aggggttgctcaggtgaccgggccg

SEQ ID NO: 1001392 - DNA, 25 bp, Homo sapien
tttggaccacttggttcaaattcag

SEQ ID NO: 1001393 - DNA, 25 bp, Homo sapien
gaggggttgctcaggtgaccgggcc

SEQ ID NO: 1001394 - DNA, 25 bp, Homo sapien
gtttggaccacttggttcaaattca

SEQ ID NO: 1001395 - DNA, 25 bp, Homo sapien
gggaggctacagacagaatgaccac

SEQ ID NO: 1001396 - DNA, 25 bp, Homo sapien
aatgggaggctacagacagaatgac

SEQ ID NO: 1001397 - DNA, 25 bp, Homo sapien
ggaggaatgggaggctacagacaga

SEQ ID NO: 1001398 - DNA, 25 bp, Homo sapien
gggaggaatgggaggctacagacag

SEQ ID NO: 1001399 - DNA, 25 bp, Homo sapien
tgtgatgagccccagtccttttgat

SEQ ID NO: 1001400 - DNA, 25 bp, Homo sapien
atgagccccagtccttttgattctt

SEQ ID NO: 1001401 - DNA, 25 bp, Homo sapien
tgatgagccccagtccttttgattc

SEQ ID NO: 1001402 - DNA, 25 bp, Homo sapien
ctgtgatgagccccagtccttttga

SEQ ID NO: 1001403 - DNA, 25 bp, Homo sapien
gggctgagctatgtccctccaggac

SEQ ID NO: 1001404 - DNA, 25 bp, Homo sapien
tgagctatgtccctccaggacagtg

SEQ ID NO: 1001405 - DNA, 25 bp, Homo sapien
ttgtaagccaccagcttgtaagtca

SEQ ID NO: 1001406 - DNA, 25 bp, Homo sapien
tgtaagtcatggagttgcctgtggt

SEQ ID NO: 1001407 - DNA, 25 bp, Homo sapien
ctgagatccattgtgattgctgtca

SEQ ID NO: 1001408 - DNA, 25 bp, Homo sapien
agatccattgtgattgctgtcaatc

SEQ ID NO: 1001409 - DNA, 25 bp, Homo sapien
gacactgagatccattgtgattgct

SEQ ID NO: 1001410 - DNA, 25 bp, Homo sapien
ggacactgagatccattgtgattgc

SEQ ID NO: 1001411 - DNA, 25 bp, Homo sapien
aagcgggactgggttacagccacag

SEQ ID NO: 1001412 - DNA, 25 bp, Homo sapien
acagagtccctgtggatgaccgacc

SEQ ID NO: 1001413 - DNA, 25 bp, Homo sapien
agagtccctgtggatgaccgaccct

SEQ ID NO: 1001414 - DNA, 25 bp, Homo sapien
gagaaaagcgggactgggttacagc

SEQ ID NO: 1001415 - DNA, 25 bp, Homo sapien
caagaaataggacatgagcagctag

SEQ ID NO: 1001416 - DNA, 25 bp, Homo sapien
gcaagaaataggacatgagcagcta

SEQ ID NO: 1001417 - DNA, 25 bp, Homo sapien
catgagcagctagaagcgcaggtgc

SEQ ID NO: 1001418 - DNA, 25 bp, Homo sapien
taggacatgagcagctagaagcgca

SEQ ID NO: 1001419 - DNA, 25 bp, Homo sapien
gaaaagtccttgaggtgcctaaggc

SEQ ID NO: 1001420 - DNA, 25 bp, Homo sapien
tattattcatagtcatcagcatctt

SEQ ID NO: 1001421 - DNA, 25 bp, Homo sapien
gagcagtaaatagcagaaaagtcct

SEQ ID NO: 1001422 - DNA, 25 bp, Homo sapien
tagaccagctaatgccctcagggca

SEQ ID NO: 1001423 - DNA, 25 bp, Homo sapien
agctggcccggtagggagaggcgtc

SEQ ID NO: 1001424 - DNA, 25 bp, Homo sapien
gggtccgagccgtgtctgtgcaggg

SEQ ID NO: 1001425 - DNA, 25 bp, Homo sapien
ctcctcacacgccatgaactgggaa

SEQ ID NO: 1001426 - DNA, 25 bp, Homo sapien
gggggcagctcctcacacgccatga

SEQ ID NO: 1001427 - DNA, 25 bp, Homo sapien
ctgagaaagcgagtccaaggtgagg

SEQ ID NO: 1001428 - DNA, 25 bp, Homo sapien
gtaggcgggcgggaccagcgtcatc

SEQ ID NO: 1001429 - DNA, 25 bp, Homo sapien
cgggaccagcgtcatctgcctctgt

SEQ ID NO: 1001430 - DNA, 25 bp, Homo sapien
atgtctgcactcagccgggtctcca

SEQ ID NO: 1001431 - DNA, 25 bp, Homo sapien
gttgagctggcgctggagggcatcc

SEQ ID NO: 1001432 - DNA, 25 bp, Homo sapien
gaaaatgttggacactcctgagaag

SEQ ID NO: 1001433 - DNA, 25 bp, Homo sapien
atgttggacactcctgagaaggcgc

SEQ ID NO: 1001434 - DNA, 25 bp, Homo sapien
aagctgaaaatgttggacactcctg

SEQ ID NO: 1001435 - DNA, 25 bp, Homo sapien
gacagggggttgcaagtgtcgctgc

SEQ ID NO: 1001436 - DNA, 25 bp, Homo sapien
gcaagtgtcgctgctcttctcgcag

SEQ ID NO: 1001437 - DNA, 25 bp, Homo sapien
ctgacagggggttgcaagtgtcgct

SEQ ID NO: 1001438 - DNA, 25 bp, Homo sapien
aagtgtcgctgctcttctcgcagtc

SEQ ID NO: 1001439 - DNA, 25 bp, Homo sapien
atcctcactgctctcagggctggag

SEQ ID NO: 1001440 - DNA, 25 bp, Homo sapien
tggagctgcggcctgggccctcatc

SEQ ID NO: 1001441 - DNA, 25 bp, Homo sapien
ctggagaagggcaccaggcggaggg

SEQ ID NO: 1001442 - DNA, 25 bp, Homo sapien
agaagggcaccaggcggagggggct

SEQ ID NO: 1001443 - DNA, 25 bp, Homo sapien
gccggccccggctactcggccctgc

SEQ ID NO: 1001444 - DNA, 25 bp, Homo sapien
ccttgtccgtgcgcctgcggaagga

SEQ ID NO: 1001445 - DNA, 25 bp, Homo sapien
tgtccgtgcgcctgcggaaggacaa

SEQ ID NO: 1001446 - DNA, 25 bp, Homo sapien
gtccgtgcgcctgcggaaggacaac

SEQ ID NO: 1001447 - DNA, 25 bp, Homo sapien
ttgtccgtgcgcctgcggaaggaca

SEQ ID NO: 1001448 - DNA, 25 bp, Homo sapien
cgcttgcgttgccgactgaagccac

SEQ ID NO: 1001449 - DNA, 25 bp, Homo sapien
ttgcgcttgcgttgccgactgaagc

SEQ ID NO: 1001450 - DNA, 25 bp, Homo sapien
tgcgcttgcgttgccgactgaagcc

SEQ ID NO: 1001451 - DNA, 25 bp, Homo sapien
gcgcttgcgttgccgactgaagcca

SEQ ID NO: 1001452 - DNA, 25 bp, Homo sapien
ctctaactccgtactgccgggggag

SEQ ID NO: 1001453 - DNA, 25 bp, Homo sapien
tctaactccgtactgccgggggagc

SEQ ID NO: 1001454 - DNA, 25 bp, Homo sapien
ccgggggagcccgggatcatgttgg

SEQ ID NO: 1001455 - DNA, 25 bp, Homo sapien
cgggggagcccgggatcatgttggt

SEQ ID NO: 1001456 - DNA, 25 bp, Homo sapien
gaaccaaaatcagtatcagggccct

SEQ ID NO: 1001457 - DNA, 25 bp, Homo sapien
gctctcctgccccaccggggtcagg

SEQ ID NO: 1001458 - DNA, 25 bp, Homo sapien
ggaaccaaaatcagtatcagggccc

SEQ ID NO: 1001459 - DNA, 25 bp, Homo sapien
ccaaaatcagtatcagggccctttc

SEQ ID NO: 1001460 - DNA, 25 bp, Homo sapien
gtcacagtaggtgagggcccgcaca

SEQ ID NO: 1001461 - DNA, 25 bp, Homo sapien
cctccagcaggtcgtcccgatggat

SEQ ID NO: 1001462 - DNA, 25 bp, Homo sapien
tggaccagaagtggtcggagaactc

SEQ ID NO: 1001463 - DNA, 25 bp, Homo sapien
cccgatggatcttgtgtaggtcaca

SEQ ID NO: 1001464 - DNA, 25 bp, Homo sapien
taaggcccagtgttatgtagtgaaa

SEQ ID NO: 1001465 - DNA, 25 bp, Homo sapien
tagtatagcttagcacagcacagaa

SEQ ID NO: 1001466 - DNA, 25 bp, Homo sapien
aaagagcttgctatatctgccctga

SEQ ID NO: 1001467 - DNA, 25 bp, Homo sapien
caaatgccgagcttccaggctagca

SEQ ID NO: 1001468 - DNA, 25 bp, Homo sapien
cagccccagtgactgcatattcaga

SEQ ID NO: 1001469 - DNA, 25 bp, Homo sapien
tgaattaaaggagcccagtgaccct

SEQ ID NO: 1001470 - DNA, 25 bp, Homo sapien
gccccgcttggagggcctgagttta

SEQ ID NO: 1001471 - DNA, 25 bp, Homo sapien
aaaagtgtctgtttgtggcggatcc

SEQ ID NO: 1001472 - DNA, 25 bp, Homo sapien
agggcatttccagtccagtgcccgc

SEQ ID NO: 1001473 - DNA, 25 bp, Homo sapien
ttgaggctgcagagggcatttccag

SEQ ID NO: 1001474 - DNA, 25 bp, Homo sapien
ctcttgaggctgcagagggcatttc

SEQ ID NO: 1001475 - DNA, 25 bp, Homo sapien
gagggcatttccagtccagtgcccg

SEQ ID NO: 1001476 - DNA, 25 bp, Homo sapien
tcccctggcggtgcatgtgtggtct

SEQ ID NO: 1001477 - DNA, 25 bp, Homo sapien
gagatgaagtacagggcggtgagca

SEQ ID NO: 1001478 - DNA, 25 bp, Homo sapien
aggatggccacgacgacgtcgcccc

SEQ ID NO: 1001479 - DNA, 25 bp, Homo sapien
ccctcggaagggtttgcagtgctgc

SEQ ID NO: 1001480 - DNA, 25 bp, Homo sapien
ggtgggggcagctcagcacaccctc

SEQ ID NO: 1001481 - DNA, 25 bp, Homo sapien
agggtgggggcagctcagcacaccc

SEQ ID NO: 1001482 - DNA, 25 bp, Homo sapien
gcagggtgggggcagctcagcacac

SEQ ID NO: 1001483 - DNA, 25 bp, Homo sapien
gtgggggcagctcagcacaccctcc

SEQ ID NO: 1001484 - DNA, 25 bp, Homo sapien
ccgcctgagacttgtttgctgtgcc

SEQ ID NO: 1001485 - DNA, 25 bp, Homo sapien
gggcaacgtgcctccagggtcctta

SEQ ID NO: 1001486 - DNA, 25 bp, Homo sapien
cagggtccttactactgactgtgac

SEQ ID NO: 1001487 - DNA, 25 bp, Homo sapien
ttactactgactgtgaccgcctgag

SEQ ID NO: 1001488 - DNA, 25 bp, Homo sapien
cgggctgtgcccgagtacagccgct

SEQ ID NO: 1001489 - DNA, 25 bp, Homo sapien
ccgaagatgctagcatacatgaggg

SEQ ID NO: 1001490 - DNA, 25 bp, Homo sapien
gatgatggccgacacgttgccgaag

SEQ ID NO: 1001491 - DNA, 25 bp, Homo sapien
gcatctgtgtgtggtagcgggctgt

SEQ ID NO: 1001492 - DNA, 25 bp, Homo sapien
cgtactctgagtagcgatccagctt

SEQ ID NO: 1001493 - DNA, 25 bp, Homo sapien
tatctggtcgcccaggttgtgcagc

SEQ ID NO: 1001494 - DNA, 25 bp, Homo sapien
tagccagtgcgcgatgagcgcaaag

SEQ ID NO: 1001495 - DNA, 25 bp, Homo sapien
gaaggtgaagtagagcgccgtcaca

SEQ ID NO: 1001496 - DNA, 25 bp, Homo sapien
ccagagccgaagatgagcaggtcga

SEQ ID NO: 1001497 - DNA, 25 bp, Homo sapien
cacctcctcgttggcattgacgtag

SEQ ID NO: 1001498 - DNA, 25 bp, Homo sapien
cactcggtagcaggcgggccttctt

SEQ ID NO: 1001499 - DNA, 25 bp, Homo sapien
ctggcaggcgtagccacactcggta

SEQ ID NO: 1001500 - DNA, 25 bp, Homo sapien
gtgaggcaggccatgggacctcggg

SEQ ID NO: 1001501 - DNA, 25 bp, Homo sapien
gggaaggcggaggtgtgggtgaggc

SEQ ID NO: 1001502 - DNA, 25 bp, Homo sapien
ctcgggggcaggagcgatgacatct

SEQ ID NO: 1001503 - DNA, 25 bp, Homo sapien
ctgcacccggggaaggcggaggtgt

SEQ ID NO: 1001504 - DNA, 25 bp, Homo sapien
tggagatgcgcacggcccgcctcac

SEQ ID NO: 1001505 - DNA, 25 bp, Homo sapien
gaggctggagatgcgcacggcccgc

SEQ ID NO: 1001506 - DNA, 25 bp, Homo sapien
gctggagatgcgcacggcccgcctc

SEQ ID NO: 1001507 - DNA, 25 bp, Homo sapien
acgaggctggagatgcgcacggccc

SEQ ID NO: 1001508 - DNA, 25 bp, Homo sapien
ctgcacccccgaggctggccgactg

SEQ ID NO: 1001509 - DNA, 25 bp, Homo sapien
ccgaggctggccgactggcaaccag

SEQ ID NO: 1001510 - DNA, 25 bp, Homo sapien
ggctgcacccccgaggctggccgac

SEQ ID NO: 1001511 - DNA, 25 bp, Homo sapien
tggccgactggcaaccagagcagcc

SEQ ID NO: 1001512 - DNA, 25 bp, Homo sapien
tgcccatggccccgtggcgtgggcc

SEQ ID NO: 1001513 - DNA, 25 bp, Homo sapien
gggtcaccctggcagtaagcgtggg

SEQ ID NO: 1001514 - DNA, 25 bp, Homo sapien
tcaccctggcagtaagcgtgggcag

SEQ ID NO: 1001515 - DNA, 25 bp, Homo sapien
agcggccgcactcggaacctcagct

SEQ ID NO: 1001516 - DNA, 25 bp, Homo sapien
tgaagccatggaggggtcgcaggtc

SEQ ID NO: 1001517 - DNA, 25 bp, Homo sapien
aaggctaggataaggtgtcgggtgg

SEQ ID NO: 1001518 - DNA, 25 bp, Homo sapien
gccatggaggggtcgcaggtcctct

SEQ ID NO: 1001519 - DNA, 25 bp, Homo sapien
taggataaggtgtcgggtggatgaa

SEQ ID NO: 1001520 - DNA, 25 bp, Homo sapien
tcttgctaatggtgcggtagcgcac

SEQ ID NO: 1001521 - DNA, 25 bp, Homo sapien
ggtgctatgatctcacggtcactgg

SEQ ID NO: 1001522 - DNA, 25 bp, Homo sapien
gtgacattgtgggttcgctccttta

SEQ ID NO: 1001523 - DNA, 25 bp, Homo sapien
ggtccacaaagttgagggtgatttg

SEQ ID NO: 1001524 - DNA, 25 bp, Homo sapien
gcgtcggggttgaggctgtgcgccc

SEQ ID NO: 1001525 - DNA, 25 bp, Homo sapien
tcgggagcgcgtccgggccaggctg

SEQ ID NO: 1001526 - DNA, 25 bp, Homo sapien
cacgctggcgcagctttctcgggag

SEQ ID NO: 1001527 - DNA, 25 bp, Homo sapien
cctcgatgtcgtcggccgacgaggc

SEQ ID NO: 1001528 - DNA, 25 bp, Homo sapien
tgtccatggctgtcacttcgtccag

SEQ ID NO: 1001529 - DNA, 25 bp, Homo sapien
cgagccctgccacgtggttgtccat

SEQ ID NO: 1001530 - DNA, 25 bp, Homo sapien
ccatggctgtcacttcgtccagggc

SEQ ID NO: 1001531 - DNA, 25 bp, Homo sapien
agccctgccacgtggttgtccatgg

SEQ ID NO: 1001532 - DNA, 25 bp, Homo sapien
cgcgggcgtcaggtccacgtccacc

SEQ ID NO: 1001533 - DNA, 25 bp, Homo sapien
ccgcgggcgtcaggtccacgtccac

SEQ ID NO: 1001534 - DNA, 25 bp, Homo sapien
cggggcgcccgcgccgcccgcgccg

SEQ ID NO: 1001535 - DNA, 25 bp, Homo sapien
gcccgcgccgcccgcgccgcccgac

SEQ ID NO: 1001536 - DNA, 25 bp, Homo sapien
cgcccgcgccgcccgcgccgcccga

SEQ ID NO: 1001537 - DNA, 25 bp, Homo sapien
ggcgcccgcgccgcccgcgccgccc

SEQ ID NO: 1001538 - DNA, 25 bp, Homo sapien
cgacgactcccgggccgtcagcgcc

SEQ ID NO: 1001539 - DNA, 25 bp, Homo sapien
cgggcagcttcaggcggaaggtctt

SEQ ID NO: 1001540 - DNA, 25 bp, Homo sapien
tggttggtgtcatgagccggggacc

SEQ ID NO: 1001541 - DNA, 25 bp, Homo sapien
gtggttggtgtcatgagccggggac

SEQ ID NO: 1001542 - DNA, 25 bp, Homo sapien
ggttggtgtcatgagccggggaccc

SEQ ID NO: 1001543 - DNA, 25 bp, Homo sapien
acctcgaaattgaggatgaacatga

SEQ ID NO: 1001544 - DNA, 25 bp, Homo sapien
tccaccagacataggaagcagctcc

SEQ ID NO: 1001545 - DNA, 25 bp, Homo sapien
tccatcaccacctcgaaattgagga

SEQ ID NO: 1001546 - DNA, 25 bp, Homo sapien
cacgggcaccacatccaccagacat

SEQ ID NO: 1001547 - DNA, 25 bp, Homo sapien
gccaggcctggacacattcccagag

SEQ ID NO: 1001548 - DNA, 25 bp, Homo sapien
gaggccatgcagctcagagcagagc

SEQ ID NO: 1001549 - DNA, 25 bp, Homo sapien
agagcagagcgggagagccaggcct

SEQ ID NO: 1001550 - DNA, 25 bp, Homo sapien
cctggacacattcccagagtggcag

SEQ ID NO: 1001551 - DNA, 25 bp, Homo sapien
cacccagcagtctacctggggtggg

SEQ ID NO: 1001552 - DNA, 25 bp, Homo sapien
tcatttggtgccaatccacacccag

SEQ ID NO: 1001553 - DNA, 25 bp, Homo sapien
acacaacgccggcttgctttcattt

SEQ ID NO: 1001554 - DNA, 25 bp, Homo sapien
aacccatccgaggtcaggggctcca

SEQ ID NO: 1001555 - DNA, 25 bp, Homo sapien
tcaggttatatttagcctggtggcg

SEQ ID NO: 1001556 - DNA, 25 bp, Homo sapien
aggttatatttagcctggtggcggc

SEQ ID NO: 1001557 - DNA, 25 bp, Homo sapien
atatttagcctggtggcggcgacag

SEQ ID NO: 1001558 - DNA, 25 bp, Homo sapien
gttatatttagcctggtggcggcga

SEQ ID NO: 1001559 - DNA, 25 bp, Homo sapien
tggacgctgctcttggagaacttgt

SEQ ID NO: 1001560 - DNA, 25 bp, Homo sapien
caaacaatgcccatcgtctagaagg

SEQ ID NO: 1001561 - DNA, 25 bp, Homo sapien
gcttccccgtccatccgagtcagag

SEQ ID NO: 1001562 - DNA, 25 bp, Homo sapien
cgtctagaaggccactgtacactgg

SEQ ID NO: 1001563 - DNA, 25 bp, Homo sapien
gaccaggacagacagccgcagctca

SEQ ID NO: 1001564 - DNA, 25 bp, Homo sapien
agctcaggaatgacccccgtggagc

SEQ ID NO: 1001565 - DNA, 25 bp, Homo sapien
caggactgggataggaagactgcag

SEQ ID NO: 1001566 - DNA, 25 bp, Homo sapien
gtggagcccctccaacaggcctctg

SEQ ID NO: 1001567 - DNA, 25 bp, Homo sapien
tgcgcggcccgtgcaggaagtcgca

SEQ ID NO: 1001568 - DNA, 25 bp, Homo sapien
catctttccggtagaaggcgatttc

SEQ ID NO: 1001569 - DNA, 25 bp, Homo sapien
gatttccactttgcgctcctcggcg

SEQ ID NO: 1001570 - DNA, 25 bp, Homo sapien
cagcagtgcctgcgcgatctgcgcg

SEQ ID NO: 1001571 - DNA, 25 bp, Homo sapien
ggcccgcgagtagccgcacagctcg

SEQ ID NO: 1001572 - DNA, 25 bp, Homo sapien
ccacccgagcgttggcgatgatgaa

SEQ ID NO: 1001573 - DNA, 25 bp, Homo sapien
tagatgacggcgcagttctccaccc

SEQ ID NO: 1001574 - DNA, 25 bp, Homo sapien
ggcgcagttctccacccgagcgttg

SEQ ID NO: 1001575 - DNA, 25 bp, Homo sapien
taggcccaggccatcaggacttggc

SEQ ID NO: 1001576 - DNA, 25 bp, Homo sapien
cagggcaccctgagataggcccagg

SEQ ID NO: 1001577 - DNA, 25 bp, Homo sapien
ccctcaggttgcagccctaggcaat

SEQ ID NO: 1001578 - DNA, 25 bp, Homo sapien
ggcaatcctacgtgcaaagctgggc

SEQ ID NO: 1001579 - DNA, 25 bp, Homo sapien
tggccctcaaacttgcggatgatgg

SEQ ID NO: 1001580 - DNA, 25 bp, Homo sapien
tcaaacttgcggatgatggtgtcca

SEQ ID NO: 1001581 - DNA, 25 bp, Homo sapien
aggaaggtgttctgcggcgcgacgt

SEQ ID NO: 1001582 - DNA, 25 bp, Homo sapien
tgcggcgcgacgtggcccctccgca

SEQ ID NO: 1001583 - DNA, 25 bp, Homo sapien
gccgggtcctcgctcggctcccggc

SEQ ID NO: 1001584 - DNA, 25 bp, Homo sapien
gcggccaagccgagcacgggcgcgg

SEQ ID NO: 1001585 - DNA, 25 bp, Homo sapien
ccagcactaggcttcgggtggcccg

SEQ ID NO: 1001586 - DNA, 25 bp, Homo sapien
acgggcgcggccaagactggactgc

SEQ ID NO: 1001587 - DNA, 25 bp, Homo sapien
cacgccgagcactggcttggtatac

SEQ ID NO: 1001588 - DNA, 25 bp, Homo sapien
agcacgcgctcagtgcctactgtgg

SEQ ID NO: 1001589 - DNA, 25 bp, Homo sapien
gggcaacgcctggaccctcgaagac

SEQ ID NO: 1001590 - DNA, 25 bp, Homo sapien
cctcgaagacgagcccggagtcaag

SEQ ID NO: 1001591 - DNA, 25 bp, Homo sapien
tgcttgcgtctgagtgagggtctcc

SEQ ID NO: 1001592 - DNA, 25 bp, Homo sapien
gcgcggtgtcctcggacttagcagt

SEQ ID NO: 1001593 - DNA, 25 bp, Homo sapien
tcatcgcctgcttgcgtctgagtga

SEQ ID NO: 1001594 - DNA, 25 bp, Homo sapien
tcctcggacttagcagtcaggcagg

SEQ ID NO: 1001595 - DNA, 25 bp, Homo sapien
gcatttggcatcaggtgcatcaaca

SEQ ID NO: 1001596 - DNA, 25 bp, Homo sapien
tagaacctagtccacgactggccca

SEQ ID NO: 1001597 - DNA, 25 bp, Homo sapien
ccgggtagaacctagtccacgactg

SEQ ID NO: 1001598 - DNA, 25 bp, Homo sapien
catcaacacatctgggttccgggta

SEQ ID NO: 1001599 - DNA, 25 bp, Homo sapien
cagaggcatctgcagttgagcacca

SEQ ID NO: 1001600 - DNA, 25 bp, Homo sapien
ctaactctggcgcacttgggaacca

SEQ ID NO: 1001601 - DNA, 25 bp, Homo sapien
gcgtttgagagagcacctgttccca

SEQ ID NO: 1001602 - DNA, 25 bp, Homo sapien
gaactgagagtttgtccacccatga

SEQ ID NO: 1001603 - DNA, 25 bp, Homo sapien
ggctgccacccgatcccagcttgcc

SEQ ID NO: 1001604 - DNA, 25 bp, Homo sapien
aggcactggcattgcccccttccgg

SEQ ID NO: 1001605 - DNA, 25 bp, Homo sapien
aaaggcaaaggggacctgatggagt

SEQ ID NO: 1001606 - DNA, 25 bp, Homo sapien
aaggggacctgatggagtgtctctc

SEQ ID NO: 1001607 - DNA, 25 bp, Homo sapien
gggagtcacacaatctagggacaga

SEQ ID NO: 1001608 - DNA, 25 bp, Homo sapien
agggagtcacacaatctagggacag

SEQ ID NO: 1001609 - DNA, 25 bp, Homo sapien
caaagctgaaaagacgctcatgaga

SEQ ID NO: 1001610 - DNA, 25 bp, Homo sapien
gaaaagacgctcatgagaccaaggg

SEQ ID NO: 1001611 - DNA, 25 bp, Homo sapien
tgacaaccccaaggtgtgagaccct

SEQ ID NO: 1001612 - DNA, 25 bp, Homo sapien
catgactttggtgttcggctgccga

SEQ ID NO: 1001613 - DNA, 25 bp, Homo sapien
tggaattctgagtccgaagccgcgc

SEQ ID NO: 1001614 - DNA, 25 bp, Homo sapien
caaagaagaactgcccaaggtggat

SEQ ID NO: 1001615 - DNA, 25 bp, Homo sapien
tgtctgcggcgatgttaccatggca

SEQ ID NO: 1001616 - DNA, 25 bp, Homo sapien
aacgtcctgcagaccgtgcagcgca

SEQ ID NO: 1001617 - DNA, 25 bp, Homo sapien
cgacatggagctggacgaggccggc

SEQ ID NO: 1001618 - DNA, 25 bp, Homo sapien
aggtgcaccgcgtgctgtgcctcga

SEQ ID NO: 1001619 - DNA, 25 bp, Homo sapien
cgaagacattttcgggctcacgctg

SEQ ID NO: 1001620 - DNA, 25 bp, Homo sapien
tcagcaacgctaccacgaagacatt

SEQ ID NO: 1001621 - DNA, 25 bp, Homo sapien
gggttcctgctaaggtctccgagtc

SEQ ID NO: 1001622 - DNA, 25 bp, Homo sapien
tcttttccgacaggatcagcaacgc

SEQ ID NO: 1001623 - DNA, 25 bp, Homo sapien
ttccagttccgggagagcggctgcc

SEQ ID NO: 1001624 - DNA, 25 bp, Homo sapien
gggcgcagtgccctgggcgttcgac

SEQ ID NO: 1001625 - DNA, 25 bp, Homo sapien
tttccttgcaggagcgtcagttgcg

SEQ ID NO: 1001626 - DNA, 25 bp, Homo sapien
tcctcccctcttgaggtggtgcctt

SEQ ID NO: 1001627 - DNA, 25 bp, Homo sapien
tctctaggcctgttgcctcgggcct

SEQ ID NO: 1001628 - DNA, 25 bp, Homo sapien
agcagcggtaccccagggcctactg

SEQ ID NO: 1001629 - DNA, 25 bp, Homo sapien
ctcgggcctgggtccgccttaatct

SEQ ID NO: 1001630 - DNA, 25 bp, Homo sapien
ttaatctggaaggcccctcccagca

SEQ ID NO: 1001631 - DNA, 25 bp, Homo sapien
cggagtctccctctgccgcccgggc

SEQ ID NO: 1001632 - DNA, 25 bp, Homo sapien
caacctccaccccacaagttcaagt

SEQ ID NO: 1001633 - DNA, 25 bp, Homo sapien
tgcaacctccaccccacaagttcaa

SEQ ID NO: 1001634 - DNA, 25 bp, Homo sapien
acctccaccccacaagttcaagtga

SEQ ID NO: 1001635 - DNA, 25 bp, Homo sapien
cacccggcgtggattacaattataa

SEQ ID NO: 1001636 - DNA, 25 bp, Homo sapien
ctgcacccggcgtggattacaatta

SEQ ID NO: 1001637 - DNA, 25 bp, Homo sapien
ccggcgtggattacaattataaaat

SEQ ID NO: 1001638 - DNA, 25 bp, Homo sapien
cgtggattacaattataaaatgaca

SEQ ID NO: 1001639 - DNA, 25 bp, Homo sapien
aaaggggtcattcttttgacagagt

SEQ ID NO: 1001640 - DNA, 25 bp, Homo sapien
gaaaggggtcattcttttgacagag

SEQ ID NO: 1001641 - DNA, 25 bp, Homo sapien
ggaaaggggtcattcttttgacaga

SEQ ID NO: 1001642 - DNA, 25 bp, Homo sapien
cccgtgcagttctcaggctcgtgat

SEQ ID NO: 1001643 - DNA, 25 bp, Homo sapien
tgctcccccgtgcagttctcaggct

SEQ ID NO: 1001644 - DNA, 25 bp, Homo sapien
cgccacttgaccctgcactctgaaa

SEQ ID NO: 1001645 - DNA, 25 bp, Homo sapien
gctcgtgatcgagaaggcaggtgca

SEQ ID NO: 1001646 - DNA, 25 bp, Homo sapien
tgacgaatccacagccttaaagccc

SEQ ID NO: 1001647 - DNA, 25 bp, Homo sapien
cagagatgtgcaacagccatgagca

SEQ ID NO: 1001648 - DNA, 25 bp, Homo sapien
tgggacatcacacccgtactgaagt

SEQ ID NO: 1001649 - DNA, 25 bp, Homo sapien
actgtcgcccttccatttagctcgg

SEQ ID NO: 1001650 - DNA, 25 bp, Homo sapien
tgtctccccttattccctctgggtg

SEQ ID NO: 1001651 - DNA, 25 bp, Homo sapien
gggtgcagaccatctctaagacttg

SEQ ID NO: 1001652 - DNA, 25 bp, Homo sapien
ggtcctgcccaactaaagcacctgg

SEQ ID NO: 1001653 - DNA, 25 bp, Homo sapien
gggcctctaacaatgactccttgtg

SEQ ID NO: 1001654 - DNA, 25 bp, Homo sapien
ttcaagtcggactccaaaccaacta

SEQ ID NO: 1001655 - DNA, 25 bp, Homo sapien
accaactacctatgccgtcctttct

SEQ ID NO: 1001656 - DNA, 25 bp, Homo sapien
tgctcccatcgcttcaagtcggact

SEQ ID NO: 1001657 - DNA, 25 bp, Homo sapien
ctgtgggaggagacggctcttggca

SEQ ID NO: 1001658 - DNA, 25 bp, Homo sapien
aagaggcccggtcaggctccttctg

SEQ ID NO: 1001659 - DNA, 25 bp, Homo sapien
gcaagaggcccggtcaggctccttc

SEQ ID NO: 1001660 - DNA, 25 bp, Homo sapien
gtgcaagaggcccggtcaggctcct

SEQ ID NO: 1001661 - DNA, 25 bp, Homo sapien
gtcagtgcaagaggcccggtcaggc

SEQ ID NO: 1001662 - DNA, 25 bp, Homo sapien
ttccatgatgcccagtgtccaccag

SEQ ID NO: 1001663 - DNA, 25 bp, Homo sapien
ggtgaaaaaggccatcagctgggca

SEQ ID NO: 1001664 - DNA, 25 bp, Homo sapien
gctgggcagttccatgatgcccagt

SEQ ID NO: 1001665 - DNA, 25 bp, Homo sapien
gtccaccaggctctgtcccctgcag

SEQ ID NO: 1001666 - DNA, 25 bp, Homo sapien
gatggcttctcctcatcaggcgagg

SEQ ID NO: 1001667 - DNA, 25 bp, Homo sapien
aggatggcttctcctcatcaggcga

SEQ ID NO: 1001668 - DNA, 25 bp, Homo sapien
tggcttctcctcatcaggcgagggt

SEQ ID NO: 1001669 - DNA, 25 bp, Homo sapien
ttctcctcatcaggcgagggtggct

SEQ ID NO: 1001670 - DNA, 25 bp, Homo sapien
ggtagatgacatggagactcatctc

SEQ ID NO: 1001671 - DNA, 25 bp, Homo sapien
gacatggagactcatctcggcagaa

SEQ ID NO: 1001672 - DNA, 25 bp, Homo sapien
tagatgacatggagactcatctcgg

SEQ ID NO: 1001673 - DNA, 25 bp, Homo sapien
gatgacatggagactcatctcggca

SEQ ID NO: 1001674 - DNA, 25 bp, Homo sapien
ggtcctgggcaattcgggaaatgga

SEQ ID NO: 1001675 - DNA, 25 bp, Homo sapien
tcctgggcaattcgggaaatggagg

SEQ ID NO: 1001676 - DNA, 25 bp, Homo sapien
cctgggcaattcgggaaatggaggc

SEQ ID NO: 1001677 - DNA, 25 bp, Homo sapien
tgggcaattcgggaaatggaggcaa

SEQ ID NO: 1001678 - DNA, 25 bp, Homo sapien
acagggggctgtcgggctcagatct

SEQ ID NO: 1001679 - DNA, 25 bp, Homo sapien
ctggacagggggctgtcgggctcag

SEQ ID NO: 1001680 - DNA, 25 bp, Homo sapien
gacagggggctgtcgggctcagatc

SEQ ID NO: 1001681 - DNA, 25 bp, Homo sapien
ggacagggggctgtcgggctcagat

SEQ ID NO: 1001682 - DNA, 25 bp, Homo sapien
agagggtgcacgaagaggttggcca

SEQ ID NO: 1001683 - DNA, 25 bp, Homo sapien
agggtgcacgaagaggttggccagg

SEQ ID NO: 1001684 - DNA, 25 bp, Homo sapien
gggtgcacgaagaggttggccagga

SEQ ID NO: 1001685 - DNA, 25 bp, Homo sapien
gagggtgcacgaagaggttggccag

SEQ ID NO: 1001686 - DNA, 25 bp, Homo sapien
ggtgcagttgctgagcacccccggg

SEQ ID NO: 1001687 - DNA, 25 bp, Homo sapien
gttgctgagcacccccggggtggag

SEQ ID NO: 1001688 - DNA, 25 bp, Homo sapien
cagttgctgagcacccccggggtgg

SEQ ID NO: 1001689 - DNA, 25 bp, Homo sapien
tgctgagcacccccggggtggaggg

SEQ ID NO: 1001690 - DNA, 25 bp, Homo sapien
atcttgttgtactcggccccagagg

SEQ ID NO: 1001691 - DNA, 25 bp, Homo sapien
ctgagacagcgaggcctcagtctgt

SEQ ID NO: 1001692 - DNA, 25 bp, Homo sapien
cgccagagtggatgcgccagggaga

SEQ ID NO: 1001693 - DNA, 25 bp, Homo sapien
agaaagctcagtcttgccgtcctcc

SEQ ID NO: 1001694 - DNA, 25 bp, Homo sapien
agggagaaccgcatcaaagaaagct

SEQ ID NO: 1001695 - DNA, 25 bp, Homo sapien
tcgataatctccagggcacgagggc

SEQ ID NO: 1001696 - DNA, 25 bp, Homo sapien
gcgcttcacatccataagggcaaag

SEQ ID NO: 1001697 - DNA, 25 bp, Homo sapien
gccacatccacagtgaagtgatgaa

SEQ ID NO: 1001698 - DNA, 25 bp, Homo sapien
ctgagggtgtccgtggcgcttcaca

SEQ ID NO: 1001699 - DNA, 25 bp, Homo sapien
ccatctgccggtaggcgcggtccct

SEQ ID NO: 1001700 - DNA, 25 bp, Homo sapien
cagcagctgcgccatctgccggtag

SEQ ID NO: 1001701 - DNA, 25 bp, Homo sapien
gaggtagtgcatgtgggccagggct

SEQ ID NO: 1001702 - DNA, 25 bp, Homo sapien
cagctgcgccatctgccggtaggcg

SEQ ID NO: 1001703 - DNA, 25 bp, Homo sapien
tggcactgctcttccggaatgaaag

SEQ ID NO: 1001704 - DNA, 25 bp, Homo sapien
ggcactgctcttccggaatgaaaga

SEQ ID NO: 1001705 - DNA, 25 bp, Homo sapien
ctggcactgctcttccggaatgaaa

SEQ ID NO: 1001706 - DNA, 25 bp, Homo sapien
acggtggcggtgaccccgagcgcgg

SEQ ID NO: 1001707 - DNA, 25 bp, Homo sapien
cgacggtggcggtgaccccgagcgc

SEQ ID NO: 1001708 - DNA, 25 bp, Homo sapien
cggtggcggtgaccccgagcgcggt

SEQ ID NO: 1001709 - DNA, 25 bp, Homo sapien
tggcggtgaccccgagcgcggtcat

SEQ ID NO: 1001710 - DNA, 25 bp, Homo sapien
gcgaagagtgcacccgcgaagaaaa

SEQ ID NO: 1001711 - DNA, 25 bp, Homo sapien
acggctagcacgtcctcgtcgtaga

SEQ ID NO: 1001712 - DNA, 25 bp, Homo sapien
tcgtagacggtgagcacaagcagcg

SEQ ID NO: 1001713 - DNA, 25 bp, Homo sapien
tcctcgtcgtagacggtgagcacaa

SEQ ID NO: 1001714 - DNA, 25 bp, Homo sapien
ggcgcagcggtgcgcaggaaggcgg

SEQ ID NO: 1001715 - DNA, 25 bp, Homo sapien
gggcgcagcggtgcgcaggaaggcg

SEQ ID NO: 1001716 - DNA, 25 bp, Homo sapien
ggggcgcagcggtgcgcaggaaggc

SEQ ID NO: 1001717 - DNA, 25 bp, Homo sapien
cggtggtggatgtccagctccgtca

SEQ ID NO: 1001718 - DNA, 25 bp, Homo sapien
ccacctggtagttggtgtagcgcag

SEQ ID NO: 1001719 - DNA, 25 bp, Homo sapien
tccacgtggctatagaagacgtgca

SEQ ID NO: 1001720 - DNA, 25 bp, Homo sapien
aagagcagcaggtcgacattgagcg

SEQ ID NO: 1001721 - DNA, 25 bp, Homo sapien
gcagtgccaagaggcgggactgcac

SEQ ID NO: 1001722 - DNA, 25 bp, Homo sapien
cagtgccaagaggcgggactgcacc

SEQ ID NO: 1001723 - DNA, 25 bp, Homo sapien
tgcctgggcatgctttacactccca

SEQ ID NO: 1001724 - DNA, 25 bp, Homo sapien
gtcagatctcatttgaaggctgcaa

SEQ ID NO: 1001725 - DNA, 25 bp, Homo sapien
gccatcttcggctctgtcaccagaa

SEQ ID NO: 1001726 - DNA, 25 bp, Homo sapien
ttctagtgcacccaccaactctgga

SEQ ID NO: 1001727 - DNA, 25 bp, Homo sapien
gctggcctctccagtacatcccagt

SEQ ID NO: 1001728 - DNA, 25 bp, Homo sapien
tggcctctccagtacatcccagtgt

SEQ ID NO: 1001729 - DNA, 25 bp, Homo sapien
tagtcaagtcccccaggctggcctc

SEQ ID NO: 1001730 - DNA, 25 bp, Homo sapien
ttagtcaagtcccccaggctggcct

SEQ ID NO: 1001731 - DNA, 25 bp, Homo sapien
aataagacctcgctctttctgccct

SEQ ID NO: 1001732 - DNA, 25 bp, Homo sapien
ctgacattattctgggcctagggca

SEQ ID NO: 1001733 - DNA, 25 bp, Homo sapien
tagggtaagggccatgctctctagg

SEQ ID NO: 1001734 - DNA, 25 bp, Homo sapien
gcctagggcaggtgtcaataagacc

SEQ ID NO: 1001735 - DNA, 25 bp, Homo sapien
gatgtgcagggcctccctgtaaaac

SEQ ID NO: 1001736 - DNA, 25 bp, Homo sapien
cagggcctccctgtaaaacacctgg

SEQ ID NO: 1001737 - DNA, 25 bp, Homo sapien
tcccagtagctgaagaggttgcaga

SEQ ID NO: 1001738 - DNA, 25 bp, Homo sapien
gactgagcgaagcagttggaccagc

SEQ ID NO: 1001739 - DNA, 25 bp, Homo sapien
ctgtatggggttgggcgggcagtgg

SEQ ID NO: 1001740 - DNA, 25 bp, Homo sapien
ggcagtgggggagaaaggtgggcgc

SEQ ID NO: 1001741 - DNA, 25 bp, Homo sapien
tgtatggggttgggcgggcagtggg

SEQ ID NO: 1001742 - DNA, 25 bp, Homo sapien
gggaggaaggttgtgaaggcaacaa

SEQ ID NO: 1001743 - DNA, 25 bp, Homo sapien
acattgcaatccatgcttcagggag

SEQ ID NO: 1001744 - DNA, 25 bp, Homo sapien
aataacggcccaggtctggaacagt

SEQ ID NO: 1001745 - DNA, 25 bp, Homo sapien
caaagagaacattgcaatccatgct

SEQ ID NO: 1001746 - DNA, 25 bp, Homo sapien
ggtcactttgctgtggaacggccca

SEQ ID NO: 1001747 - DNA, 25 bp, Homo sapien
gaacggcccaggtctggtatggtta

SEQ ID NO: 1001748 - DNA, 25 bp, Homo sapien
ccacgcatcgaaggaggaaggttgt

SEQ ID NO: 1001749 - DNA, 25 bp, Homo sapien
gagaacattgtaatccacgcatcga

SEQ ID NO: 1001750 - DNA, 25 bp, Homo sapien
aggcaaagccattccgctggtggta

SEQ ID NO: 1001751 - DNA, 25 bp, Homo sapien
ggcaaagccattccgctggtggtag

SEQ ID NO: 1001752 - DNA, 25 bp, Homo sapien
tctcctgaggacacctcccctcagc

SEQ ID NO: 1001753 - DNA, 25 bp, Homo sapien
acccatgacgccctcacggagtctc

SEQ ID NO: 1001754 - DNA, 25 bp, Homo sapien
ctgcgtgtcaaggaacaagcctgag

SEQ ID NO: 1001755 - DNA, 25 bp, Homo sapien
ctcacggagtctccctgccaagaac

SEQ ID NO: 1001756 - DNA, 25 bp, Homo sapien
tgaagaaactgtccaggttctggat

SEQ ID NO: 1001757 - DNA, 25 bp, Homo sapien
gaagaaactgtccaggttctggatg

SEQ ID NO: 1001758 - DNA, 25 bp, Homo sapien
ggtgaagaaactgtccaggttctgg

SEQ ID NO: 1001759 - DNA, 25 bp, Homo sapien
gtgaagaaactgtccaggttctgga

SEQ ID NO: 1001760 - DNA, 25 bp, Homo sapien
tgggtgagtcttgggacccctcagg

SEQ ID NO: 1001761 - DNA, 25 bp, Homo sapien
tcacagtcctccagccgctcataat

SEQ ID NO: 1001762 - DNA, 25 bp, Homo sapien
gctcctccccgtggatgggtgagtc

SEQ ID NO: 1001763 - DNA, 25 bp, Homo sapien
cctccccgtggatgggtgagtcttg

SEQ ID NO: 1001764 - DNA, 25 bp, Homo sapien
agggatcaaagggcctacccgcagc

SEQ ID NO: 1001765 - DNA, 25 bp, Homo sapien
tcagggatcaaagggcctacccgca

SEQ ID NO: 1001766 - DNA, 25 bp, Homo sapien
gggatcaaagggcctacccgcagcc

SEQ ID NO: 1001767 - DNA, 25 bp, Homo sapien
ttcagggatcaaagggcctacccgc

SEQ ID NO: 1001768 - DNA, 25 bp, Homo sapien
ggtggagtgggatccccaggaggga

SEQ ID NO: 1001769 - DNA, 25 bp, Homo sapien
ctgtgagggagtgggggttgccggg

SEQ ID NO: 1001770 - DNA, 25 bp, Homo sapien
gtggggtggagtgggatccccagga

SEQ ID NO: 1001771 - DNA, 25 bp, Homo sapien
agggagatgcagaggcaggtgtcat

SEQ ID NO: 1001772 - DNA, 25 bp, Homo sapien
tgtggcaagactgagaagcccctgt

SEQ ID NO: 1001773 - DNA, 25 bp, Homo sapien
tgtcccctgtagcactgagcaaggg

SEQ ID NO: 1001774 - DNA, 25 bp, Homo sapien
caggtccccggcatgaaggaggagg

SEQ ID NO: 1001775 - DNA, 25 bp, Homo sapien
gggatagggagagcactgtggcaag

SEQ ID NO: 1001776 - DNA, 25 bp, Homo sapien
tgcttccacaaaggtctgtgacact

SEQ ID NO: 1001777 - DNA, 25 bp, Homo sapien
ttgcttccacaaaggtctgtgacac

SEQ ID NO: 1001778 - DNA, 25 bp, Homo sapien
acacacactacagtgatcaacagag

SEQ ID NO: 1001779 - DNA, 25 bp, Homo sapien
cacacacactacagtgatcaacaga

SEQ ID NO: 1001780 - DNA, 25 bp, Homo sapien
tgaaatggcgatatggacactgtgc

SEQ ID NO: 1001781 - DNA, 25 bp, Homo sapien
tcccagattgttcactggaggcaat

SEQ ID NO: 1001782 - DNA, 25 bp, Homo sapien
tgcttcccagattgttcactggagg

SEQ ID NO: 1001783 - DNA, 25 bp, Homo sapien
ccagattgttcactggaggcaatca

SEQ ID NO: 1001784 - DNA, 25 bp, Homo sapien
gctgctcctgctcacaataaagccg

SEQ ID NO: 1001785 - DNA, 25 bp, Homo sapien
tgctcacaataaagccggggccgag

SEQ ID NO: 1001786 - DNA, 25 bp, Homo sapien
ggggagcctactggggactgagccc

SEQ ID NO: 1001787 - DNA, 25 bp, Homo sapien
agcatgtggagagtcgctgcggctg

SEQ ID NO: 1001788 - DNA, 25 bp, Homo sapien
cacatttgggaccaagtgcggcaca

SEQ ID NO: 1001789 - DNA, 25 bp, Homo sapien
taaagtcctaatgcatcagcctcag

SEQ ID NO: 1001790 - DNA, 25 bp, Homo sapien
gagatcctagactacctctgtgagg

SEQ ID NO: 1001791 - DNA, 25 bp, Homo sapien
tcaactatgagaccgtggagcagaa

SEQ ID NO: 1001792 - DNA, 25 bp, Homo sapien
agcactgctggagcacagcgcacca

SEQ ID NO: 1001793 - DNA, 25 bp, Homo sapien
tgtgggaaaggagccaatttatgaa

SEQ ID NO: 1001794 - DNA, 25 bp, Homo sapien
tctcaagagggggcttaaataggcc

SEQ ID NO: 1001795 - DNA, 25 bp, Homo sapien
tgctggagcacagcgcaccaggcac

SEQ ID NO: 1001796 - DNA, 25 bp, Homo sapien
gatacgctggacagggttacacttc

SEQ ID NO: 1001797 - DNA, 25 bp, Homo sapien
agatacgctggacagggttacactt

SEQ ID NO: 1001798 - DNA, 25 bp, Homo sapien
atacgctggacagggttacacttca

SEQ ID NO: 1001799 - DNA, 25 bp, Homo sapien
acgttcaccagggatgttgtggccg

SEQ ID NO: 1001800 - DNA, 25 bp, Homo sapien
ttgtggccgggtacatcggataggg

SEQ ID NO: 1001801 - DNA, 25 bp, Homo sapien
tgagtttgggcacgacgttcaccag

SEQ ID NO: 1001802 - DNA, 25 bp, Homo sapien
gcagcagatccctccctgtggcatt

SEQ ID NO: 1001803 - DNA, 25 bp, Homo sapien
gggccactgctcctcggtgggcgtc

SEQ ID NO: 1001804 - DNA, 25 bp, Homo sapien
cagcttggtcatagagggccactgc

SEQ ID NO: 1001805 - DNA, 25 bp, Homo sapien
ggccactgctcctcggtgggcgtcc

SEQ ID NO: 1001806 - DNA, 25 bp, Homo sapien
cttatagtctggcagcttggtcata

SEQ ID NO: 1001807 - DNA, 25 bp, Homo sapien
ggcagggtgagggcctcttcccctc

SEQ ID NO: 1001808 - DNA, 25 bp, Homo sapien
cttcaggggcagggtgagggcctct

SEQ ID NO: 1001809 - DNA, 25 bp, Homo sapien
caggggcagggtgagggcctcttcc

SEQ ID NO: 1001810 - DNA, 25 bp, Homo sapien
tcaggggcagggtgagggcctcttc

SEQ ID NO: 1001811 - DNA, 25 bp, Homo sapien
aagatcctcttcaactggtcatcga

SEQ ID NO: 1001812 - DNA, 25 bp, Homo sapien
agatcctcttcaactggtcatcgac

SEQ ID NO: 1001813 - DNA, 25 bp, Homo sapien
gaagatcctcttcaactggtcatcg

SEQ ID NO: 1001814 - DNA, 25 bp, Homo sapien
ccggctgaccacatgtcgatggacg

SEQ ID NO: 1001815 - DNA, 25 bp, Homo sapien
ggctgaccacatgtcgatggacgtg

SEQ ID NO: 1001816 - DNA, 25 bp, Homo sapien
agccggctgaccacatgtcgatgga

SEQ ID NO: 1001817 - DNA, 25 bp, Homo sapien
aggacatccggtgggcggtaccaca

SEQ ID NO: 1001818 - DNA, 25 bp, Homo sapien
gagtaacagcggacgggaatcccaa

SEQ ID NO: 1001819 - DNA, 25 bp, Homo sapien
agctgagtaacagcggacgggaatc

SEQ ID NO: 1001820 - DNA, 25 bp, Homo sapien
gcggacgggaatcccaaaggctcga

SEQ ID NO: 1001821 - DNA, 25 bp, Homo sapien
acagcggacgggaatcccaaaggct

SEQ ID NO: 1001822 - DNA, 25 bp, Homo sapien
cctgtgtagcacattgcggctatga

SEQ ID NO: 1001823 - DNA, 25 bp, Homo sapien
aggtccctgtgtagcacattgcggc

SEQ ID NO: 1001824 - DNA, 25 bp, Homo sapien
gacagaatcccagcccttttagtag

SEQ ID NO: 1001825 - DNA, 25 bp, Homo sapien
attgcggctatgacagaatcccagc

SEQ ID NO: 1001826 - DNA, 25 bp, Homo sapien
caccattgcaactgtcaaaatactt

SEQ ID NO: 1001827 - DNA, 25 bp, Homo sapien
tcaccattgcaactgtcaaaatact

SEQ ID NO: 1001828 - DNA, 25 bp, Homo sapien
gcttcttgtcgctgtgcaggacgtc

SEQ ID NO: 1001829 - DNA, 25 bp, Homo sapien
aaagtcagcttcttgtcgctgtgca

SEQ ID NO: 1001830 - DNA, 25 bp, Homo sapien
agaattcaaaaaccaaagtcagctt

SEQ ID NO: 1001831 - DNA, 25 bp, Homo sapien
tgtcgctgtgcaggacgtcatgaag

SEQ ID NO: 1001832 - DNA, 25 bp, Homo sapien
gacgatgttcttgtgcttcagctcc

SEQ ID NO: 1001833 - DNA, 25 bp, Homo sapien
tgacgatgttcttgtgcttcagctc

SEQ ID NO: 1001834 - DNA, 25 bp, Homo sapien
ctgacgatgttcttgtgcttcagct

SEQ ID NO: 1001835 - DNA, 25 bp, Homo sapien
cagatctcccggagggcggaactcg

SEQ ID NO: 1001836 - DNA, 25 bp, Homo sapien
gagtaggcagatctcccggagggcg

SEQ ID NO: 1001837 - DNA, 25 bp, Homo sapien
tcccggagggcggaactcggcacac

SEQ ID NO: 1001838 - DNA, 25 bp, Homo sapien
gtaggcagatctcccggagggcgga

SEQ ID NO: 1001839 - DNA, 25 bp, Homo sapien
cccaggccgtatcccactccccagt

SEQ ID NO: 1001840 - DNA, 25 bp, Homo sapien
caggccgtatcccactccccagtcc

SEQ ID NO: 1001841 - DNA, 25 bp, Homo sapien
ccaggccgtatcccactccccagtc

SEQ ID NO: 1001842 - DNA, 25 bp, Homo sapien
ttggccttgaacacagttccgtagg

SEQ ID NO: 1001843 - DNA, 25 bp, Homo sapien
tggccttgaacacagttccgtaggt

SEQ ID NO: 1001844 - DNA, 25 bp, Homo sapien
ggccttgaacacagttccgtaggtg

SEQ ID NO: 1001845 - DNA, 25 bp, Homo sapien
gccttgaacacagttccgtaggtgc

SEQ ID NO: 1001846 - DNA, 25 bp, Homo sapien
tttccagtttctcgtatttctgcat

SEQ ID NO: 1001847 - DNA, 25 bp, Homo sapien
atcttttccagtttctcgtatttct

SEQ ID NO: 1001848 - DNA, 25 bp, Homo sapien
cccaatcttttccagtttctcgtat

SEQ ID NO: 1001849 - DNA, 25 bp, Homo sapien
ccaatcttttccagtttctcgtatt

SEQ ID NO: 1001850 - DNA, 25 bp, Homo sapien
ccccggcgttgcagaggaggcggca

SEQ ID NO: 1001851 - DNA, 25 bp, Homo sapien
tctggccccggcgttgcagaggagg

SEQ ID NO: 1001852 - DNA, 25 bp, Homo sapien
agactctggccccggcgttgcagag

SEQ ID NO: 1001853 - DNA, 25 bp, Homo sapien
tttaagactctggccccggcgttgc

SEQ ID NO: 1001854 - DNA, 25 bp, Homo sapien
ggaatcttttctgcagtccagctga

SEQ ID NO: 1001855 - DNA, 25 bp, Homo sapien
tatacccaggtaaggtgctgcccac

SEQ ID NO: 1001856 - DNA, 25 bp, Homo sapien
tgcccactcagatccggcgggtgat

SEQ ID NO: 1001857 - DNA, 25 bp, Homo sapien
tgcgcaaattcaagaacagccggtt

SEQ ID NO: 1001858 - DNA, 25 bp, Homo sapien
ctgtagacagcagaaaaaccccgat

SEQ ID NO: 1001859 - DNA, 25 bp, Homo sapien
aaaaccccgatgtttgctgggacag

SEQ ID NO: 1001860 - DNA, 25 bp, Homo sapien
cccgatgtttgctgggacaggaaca

SEQ ID NO: 1001861 - DNA, 25 bp, Homo sapien
gctgtcatggacgataagggctggg

SEQ ID NO: 1001862 - DNA, 25 bp, Homo sapien
cacagctggatgctaacgaggcaga

SEQ ID NO: 1001863 - DNA, 25 bp, Homo sapien
agtgccgctccgcatggtggtgctc

SEQ ID NO: 1001864 - DNA, 25 bp, Homo sapien
tcaccgaccgagagatgaaatgtgt

SEQ ID NO: 1001865 - DNA, 25 bp, Homo sapien
tggtggtgctcacccgtatcttcac

SEQ ID NO: 1001866 - DNA, 25 bp, Homo sapien
tccccgtcccaaaactgagattcac

SEQ ID NO: 1001867 - DNA, 25 bp, Homo sapien
tgctccccgtcccaaaactgagatt

SEQ ID NO: 1001868 - DNA, 25 bp, Homo sapien
gctccccgtcccaaaactgagattc

SEQ ID NO: 1001869 - DNA, 25 bp, Homo sapien
ccccgtcccaaaactgagattcaca

SEQ ID NO: 1001870 - DNA, 25 bp, Homo sapien
gaaaggaactttaatgagaaatcaa

SEQ ID NO: 1001871 - DNA, 25 bp, Homo sapien
catgggggggccatcctgaacccca

SEQ ID NO: 1001872 - DNA, 25 bp, Homo sapien
gaaccaaagtgcaaatcatccaccc

SEQ ID NO: 1001873 - DNA, 25 bp, Homo sapien
tcaaaacacagggaaccaaagtgca

SEQ ID NO: 1001874 - DNA, 25 bp, Homo sapien
ccttcaggcccccagcgcaggccca

SEQ ID NO: 1001875 - DNA, 25 bp, Homo sapien
ccccttcaggcccccagcgcaggcc

SEQ ID NO: 1001876 - DNA, 25 bp, Homo sapien
ttcaggcccccagcgcaggcccagg

SEQ ID NO: 1001877 - DNA, 25 bp, Homo sapien
aggcccagggcctggagcttctgcc

SEQ ID NO: 1001878 - DNA, 25 bp, Homo sapien
tgggactccagttcctcgaagggta

SEQ ID NO: 1001879 - DNA, 25 bp, Homo sapien
ggcggcaggttacccgcaggctggg

SEQ ID NO: 1001880 - DNA, 25 bp, Homo sapien
ggctgggagtgaggatgcgccacgg

SEQ ID NO: 1001881 - DNA, 25 bp, Homo sapien
gggagtgaggatgcgccacgggcca

SEQ ID NO: 1001882 - DNA, 25 bp, Homo sapien
aggagagggcggcaggttacccgca

SEQ ID NO: 1001883 - DNA, 25 bp, Homo sapien
ggtagcccatcaggcctaggtgccg

SEQ ID NO: 1001884 - DNA, 25 bp, Homo sapien
ggcaggagctggtagcccatcaggc

SEQ ID NO: 1001885 - DNA, 25 bp, Homo sapien
ctggtagcccatcaggcctaggtgc

SEQ ID NO: 1001886 - DNA, 25 bp, Homo sapien
ctcagggccctcgagcccagcagca

SEQ ID NO: 1001887 - DNA, 25 bp, Homo sapien
gcgttcccgcaacaccagcaccacc

SEQ ID NO: 1001888 - DNA, 25 bp, Homo sapien
cagcgttcccgcaacaccagcacca

SEQ ID NO: 1001889 - DNA, 25 bp, Homo sapien
agcgttcccgcaacaccagcaccac

SEQ ID NO: 1001890 - DNA, 25 bp, Homo sapien
gctcagggcatggcgggcaaggtgg

SEQ ID NO: 1001891 - DNA, 25 bp, Homo sapien
gggcatggcgggcaaggtggccagg

SEQ ID NO: 1001892 - DNA, 25 bp, Homo sapien
tcagggcatggcgggcaaggtggcc

SEQ ID NO: 1001893 - DNA, 25 bp, Homo sapien
ggcatggcgggcaaggtggccaggg

SEQ ID NO: 1001894 - DNA, 25 bp, Homo sapien
tagtggcgctagaggcagcctggcc

SEQ ID NO: 1001895 - DNA, 25 bp, Homo sapien
tctgggcagggtctcgagtagtggc

SEQ ID NO: 1001896 - DNA, 25 bp, Homo sapien
cgagtagtggcgctagaggcagcct

SEQ ID NO: 1001897 - DNA, 25 bp, Homo sapien
cagggtctcgagtagtggcgctaga

SEQ ID NO: 1001898 - DNA, 25 bp, Homo sapien
ggtcctcacgggaagcacagcacca

SEQ ID NO: 1001899 - DNA, 25 bp, Homo sapien
ctgggtcctcacgggaagcacagca

SEQ ID NO: 1001900 - DNA, 25 bp, Homo sapien
tcctgggtcctcacgggaagcacag

SEQ ID NO: 1001901 - DNA, 25 bp, Homo sapien
gggtcctcacgggaagcacagcacc

SEQ ID NO: 1001902 - DNA, 25 bp, Homo sapien
gcagggccggcggccttagccaggg

SEQ ID NO: 1001903 - DNA, 25 bp, Homo sapien
gggccggcggccttagccagggctc

SEQ ID NO: 1001904 - DNA, 25 bp, Homo sapien
agggccggcggccttagccagggct

SEQ ID NO: 1001905 - DNA, 25 bp, Homo sapien
ccggcggccttagccagggctccgt

SEQ ID NO: 1001906 - DNA, 25 bp, Homo sapien
ctggcgcaacccctcagctactatg

SEQ ID NO: 1001907 - DNA, 25 bp, Homo sapien
cagcagctggcgcaacccctcagct

SEQ ID NO: 1001908 - DNA, 25 bp, Homo sapien
cagctggcgcaacccctcagctact

SEQ ID NO: 1001909 - DNA, 25 bp, Homo sapien
tggcgcaacccctcagctactatgt

SEQ ID NO: 1001910 - DNA, 25 bp, Homo sapien
atctgtcccagtctagtgccaccac

SEQ ID NO: 1001911 - DNA, 25 bp, Homo sapien
ggcccggcacctcatcctaatctgt

SEQ ID NO: 1001912 - DNA, 25 bp, Homo sapien
ccgagagctccttagctttggcgct

SEQ ID NO: 1001913 - DNA, 25 bp, Homo sapien
tagctttggcgcttcatggtccctc

SEQ ID NO: 1001914 - DNA, 25 bp, Homo sapien
agcgggcacggtcggtgatgagagg

SEQ ID NO: 1001915 - DNA, 25 bp, Homo sapien
tgagaggctggggaaagatgggcac

SEQ ID NO: 1001916 - DNA, 25 bp, Homo sapien
atgagaggctggggaaagatgggca

SEQ ID NO: 1001917 - DNA, 25 bp, Homo sapien
gggcacggtcggtgatgagaggctg

SEQ ID NO: 1001918 - DNA, 25 bp, Homo sapien
ggtagcgacgcacaatcagagcatg

SEQ ID NO: 1001919 - DNA, 25 bp, Homo sapien
gaggtagcgacgcacaatcagagca

SEQ ID NO: 1001920 - DNA, 25 bp, Homo sapien
ggagaggtagcgacgcacaatcaga

SEQ ID NO: 1001921 - DNA, 25 bp, Homo sapien
tccagctccacggccgtgtccagca

SEQ ID NO: 1001922 - DNA, 25 bp, Homo sapien
cctctccagccctcaggggcccagc

SEQ ID NO: 1001923 - DNA, 25 bp, Homo sapien
gctctgggctgcaggccaccctgct

SEQ ID NO: 1001924 - DNA, 25 bp, Homo sapien
tgcaggccaccctgctcccctgcct

SEQ ID NO: 1001925 - DNA, 25 bp, Homo sapien
cccagccagccatcctggctgcgta

SEQ ID NO: 1001926 - DNA, 25 bp, Homo sapien
aggtagttcagtcgcccaaagggca

SEQ ID NO: 1001927 - DNA, 25 bp, Homo sapien
acaaagtgcagggctctgaagggca

SEQ ID NO: 1001928 - DNA, 25 bp, Homo sapien
ggcaccgcagttggcacagtgacat

SEQ ID NO: 1001929 - DNA, 25 bp, Homo sapien
catcaagatgttgactgtagccagg

SEQ ID NO: 1001930 - DNA, 25 bp, Homo sapien
gcaccatcacgtggggagtcagttc

SEQ ID NO: 1001931 - DNA, 25 bp, Homo sapien
ctgctgagttgcgtttcctgaacca

SEQ ID NO: 1001932 - DNA, 25 bp, Homo sapien
cgcaaccggtgccgggccaggtgct

SEQ ID NO: 1001933 - DNA, 25 bp, Homo sapien
gttgcgtttcctgaaccaccaggaa

SEQ ID NO: 1001934 - DNA, 25 bp, Homo sapien
taccgcagaaaacgggggcagctta

SEQ ID NO: 1001935 - DNA, 25 bp, Homo sapien
tgctgccgtggataccgcagaaaac

SEQ ID NO: 1001936 - DNA, 25 bp, Homo sapien
gatgctgccgtggataccgcagaaa

SEQ ID NO: 1001937 - DNA, 25 bp, Homo sapien
ctgccgtggataccgcagaaaacgg

SEQ ID NO: 1001938 - DNA, 25 bp, Homo sapien
accaggggaccatcagatggaaagc

SEQ ID NO: 1001939 - DNA, 25 bp, Homo sapien
cacacaccaggggaccatcagatgg

SEQ ID NO: 1001940 - DNA, 25 bp, Homo sapien
ggcggagccttcgctcctgttccag

SEQ ID NO: 1001941 - DNA, 25 bp, Homo sapien
cggagccttcgctcctgttccaggg

SEQ ID NO: 1001942 - DNA, 25 bp, Homo sapien
aaattatggtggcttcctagggcac

SEQ ID NO: 1001943 - DNA, 25 bp, Homo sapien
catgtggctatgaggtatcgaaacg

SEQ ID NO: 1001944 - DNA, 25 bp, Homo sapien
ttcctgggcaaacgcctgagaggct

SEQ ID NO: 1001945 - DNA, 25 bp, Homo sapien
ggcactctattagcaggaatctggg

SEQ ID NO: 1001946 - DNA, 25 bp, Homo sapien
agtaagactgcaaggtgcagacaca

SEQ ID NO: 1001947 - DNA, 25 bp, Homo sapien
caagtaagactgcaaggtgcagaca

SEQ ID NO: 1001948 - DNA, 25 bp, Homo sapien
aagtaagactgcaaggtgcagacac

SEQ ID NO: 1001949 - DNA, 25 bp, Homo sapien
gtaagactgcaaggtgcagacacac

SEQ ID NO: 1001950 - DNA, 25 bp, Homo sapien
aagagctggcccagacgacgaagcg

SEQ ID NO: 1001951 - DNA, 25 bp, Homo sapien
cgacgaagcgccaccgagtagtggt

SEQ ID NO: 1001952 - DNA, 25 bp, Homo sapien
gtagtggtgggcgcgcaccttgctg

SEQ ID NO: 1001953 - DNA, 25 bp, Homo sapien
cagtttcggatgatgagctgactca

SEQ ID NO: 1001954 - DNA, 25 bp, Homo sapien
ccaaacagcagggctgtactggagg

SEQ ID NO: 1001955 - DNA, 25 bp, Homo sapien
ccatttgctgggccccaaacagcag

SEQ ID NO: 1001956 - DNA, 25 bp, Homo sapien
ggctgtactggagggatcagcagca

SEQ ID NO: 1001957 - DNA, 25 bp, Homo sapien
atttgctgggccccaaacagcaggg

SEQ ID NO: 1001958 - DNA, 25 bp, Homo sapien
gagcagagagcaggactcgaagcat

SEQ ID NO: 1001959 - DNA, 25 bp, Homo sapien
ctgagcagagagcaggactcgaagc

SEQ ID NO: 1001960 - DNA, 25 bp, Homo sapien
tgagcagagagcaggactcgaagca

SEQ ID NO: 1001961 - DNA, 25 bp, Homo sapien
gctcagcgcagcactacttgcaaag

SEQ ID NO: 1001962 - DNA, 25 bp, Homo sapien
tctgatgctccttacacgcccatga

SEQ ID NO: 1001963 - DNA, 25 bp, Homo sapien
caatcataatcctcagtgcgctcag

SEQ ID NO: 1001964 - DNA, 25 bp, Homo sapien
tgcttacctcactcctcatttaggg

SEQ ID NO: 1001965 - DNA, 25 bp, Homo sapien
tcattaaccgggttagtggtcgcgc

SEQ ID NO: 1001966 - DNA, 25 bp, Homo sapien
tggtcgcgcccagtctggagcccag

SEQ ID NO: 1001967 - DNA, 25 bp, Homo sapien
agcccaggcggcaccggcgtgcact

SEQ ID NO: 1001968 - DNA, 25 bp, Homo sapien
tcatttcaccggtggagaaacgcag

SEQ ID NO: 1001969 - DNA, 25 bp, Homo sapien
cagagggtggaacgcgggctccgcg

SEQ ID NO: 1001970 - DNA, 25 bp, Homo sapien
tgctgggttccatgctgggcgctcc

SEQ ID NO: 1001971 - DNA, 25 bp, Homo sapien
gacggtgctgggttccatgctgggc

SEQ ID NO: 1001972 - DNA, 25 bp, Homo sapien
gggttccatgctgggcgctcccact

SEQ ID NO: 1001973 - DNA, 25 bp, Homo sapien
gcgtggagcccgagtgcaccgcttt

SEQ ID NO: 1001974 - DNA, 25 bp, Homo sapien
aagtggcttcgtctctctaagtctc

SEQ ID NO: 1001975 - DNA, 25 bp, Homo sapien
tcctcacccgtgaaatgaaaacgca

SEQ ID NO: 1001976 - DNA, 25 bp, Homo sapien
caccgctttgcgatggcgcggagtc

SEQ ID NO: 1001977 - DNA, 25 bp, Homo sapien
tgcgcaggtcgctccctcagtcggt

SEQ ID NO: 1001978 - DNA, 25 bp, Homo sapien
gggccctgcgcaggtcgctccctca

SEQ ID NO: 1001979 - DNA, 25 bp, Homo sapien
tccccgggccctgcgcaggtcgctc

SEQ ID NO: 1001980 - DNA, 25 bp, Homo sapien
ggtcgctccctcagtcggtctcggg

SEQ ID NO: 1001981 - DNA, 25 bp, Homo sapien
atagccgcccggacgccaatcccga

SEQ ID NO: 1001982 - DNA, 25 bp, Homo sapien
cttcccagcagcccctagatagccg

SEQ ID NO: 1001983 - DNA, 25 bp, Homo sapien
agcccctagatagccgcccggacgc

SEQ ID NO: 1001984 - DNA, 25 bp, Homo sapien
cgcccggacgccaatcccgaagcag

SEQ ID NO: 1001985 - DNA, 25 bp, Homo sapien
tcttcggagacgtggctcccggcag

SEQ ID NO: 1001986 - DNA, 25 bp, Homo sapien
aggccggcgccaaagccagagcaga

SEQ ID NO: 1001987 - DNA, 25 bp, Homo sapien
cacggaggccggcgccaaagccaga

SEQ ID NO: 1001988 - DNA, 25 bp, Homo sapien
tatcggtcttcggagacgtggctcc

SEQ ID NO: 1001989 - DNA, 25 bp, Homo sapien
cagttactttaatctgcacgggttc

SEQ ID NO: 1001990 - DNA, 25 bp, Homo sapien
cttcacagttactttaatctgcacg

SEQ ID NO: 1001991 - DNA, 25 bp, Homo sapien
cacagttactttaatctgcacgggt

SEQ ID NO: 1001992 - DNA, 25 bp, Homo sapien
tcacagttactttaatctgcacggg

SEQ ID NO: 1001993 - DNA, 25 bp, Homo sapien
cgggagtcctctgcggcgcagggct

SEQ ID NO: 1001994 - DNA, 25 bp, Homo sapien
gaggcagcgacagcagatgcccgac

SEQ ID NO: 1001995 - DNA, 25 bp, Homo sapien
cactcccagtgcgggctgagggtca

SEQ ID NO: 1001996 - DNA, 25 bp, Homo sapien
gggtcctccggcagaacactaagac

SEQ ID NO: 1001997 - DNA, 25 bp, Homo sapien
cagagtggcggtcaggggaaagaag

SEQ ID NO: 1001998 - DNA, 25 bp, Homo sapien
aaagaagggccggtactggatctgg

SEQ ID NO: 1001999 - DNA, 25 bp, Homo sapien
tacgggcggtacatggcaaaggcca

SEQ ID NO: 1002000 - DNA, 25 bp, Homo sapien
ggccggtactggatctggcagtacc

SEQ ID NO: 1002001 - DNA, 25 bp, Homo sapien
tctcgtggacacgtggcagtggaga

SEQ ID NO: 1002002 - DNA, 25 bp, Homo sapien
tggcagtggagaacgcagttgggag

SEQ ID NO: 1002003 - DNA, 25 bp, Homo sapien
cccagggtctgggtgtcgtcgccta

SEQ ID NO: 1002004 - DNA, 25 bp, Homo sapien
cagctgcccttggtagatgagtcgc

SEQ ID NO: 1002005 - DNA, 25 bp, Homo sapien
ctgctgttcccggccgggaaactgg

SEQ ID NO: 1002006 - DNA, 25 bp, Homo sapien
tgaggagagagggacctgggtaaga

SEQ ID NO: 1002007 - DNA, 25 bp, Homo sapien
aggagagagggacctgggtaagaga

SEQ ID NO: 1002008 - DNA, 25 bp, Homo sapien
gagagagggacctgggtaagagagc

SEQ ID NO: 1002009 - DNA, 25 bp, Homo sapien
ctgaggagagagggacctgggtaag

SEQ ID NO: 1002010 - DNA, 25 bp, Homo sapien
gccacctgctctgaatcattgagga

SEQ ID NO: 1002011 - DNA, 25 bp, Homo sapien
cattgaggaatttcagccgtagcac

SEQ ID NO: 1002012 - DNA, 25 bp, Homo sapien
tgaggaatttcagccgtagcacgag

SEQ ID NO: 1002013 - DNA, 25 bp, Homo sapien
cacctgctctgaatcattgaggaat

SEQ ID NO: 1002014 - DNA, 25 bp, Homo sapien
cggtgttgctgtgaaccccgtgctg

SEQ ID NO: 1002015 - DNA, 25 bp, Homo sapien
gcaagcaccgagaaaaggacggtca

SEQ ID NO: 1002016 - DNA, 25 bp, Homo sapien
cctcagcggtgtgcgttgagaccca

SEQ ID NO: 1002017 - DNA, 25 bp, Homo sapien
tcatgctgtcggtagctgccatggc

SEQ ID NO: 1002018 - DNA, 25 bp, Homo sapien
ctgcctcccagtcgccccaaacttg

SEQ ID NO: 1002019 - DNA, 25 bp, Homo sapien
cacaaagagcccgtgaggcccgggc

SEQ ID NO: 1002020 - DNA, 25 bp, Homo sapien
caccccagggtaccggcttctctgc

SEQ ID NO: 1002021 - DNA, 25 bp, Homo sapien
ccgcgacgctcccaccgtcctcagc

SEQ ID NO: 1002022 - DNA, 25 bp, Homo sapien
cagtgtgtctactccttcaccgact

SEQ ID NO: 1002023 - DNA, 25 bp, Homo sapien
caaggtaagggcctaagcaacgcct

SEQ ID NO: 1002024 - DNA, 25 bp, Homo sapien
tactccgctgctaaagtttctaaga

SEQ ID NO: 1002025 - DNA, 25 bp, Homo sapien
aagcgtatctattctcctgcccact

SEQ ID NO: 1002026 - DNA, 25 bp, Homo sapien
cagctcggccccctccaggtcccct

SEQ ID NO: 1002027 - DNA, 25 bp, Homo sapien
gctcggccccctccaggtcccctca

SEQ ID NO: 1002028 - DNA, 25 bp, Homo sapien
gaagccgcaggagggcacggcgatc

SEQ ID NO: 1002029 - DNA, 25 bp, Homo sapien
cgccccccgaagccgcaggagggca

SEQ ID NO: 1002030 - DNA, 25 bp, Homo sapien
cccgaagccgcaggagggcacggcg

SEQ ID NO: 1002031 - DNA, 25 bp, Homo sapien
gccgcaggagggcacggcgatcccg

SEQ ID NO: 1002032 - DNA, 25 bp, Homo sapien
gaggtcgcaggcacctgaagcaccc

SEQ ID NO: 1002033 - DNA, 25 bp, Homo sapien
gcgcggaggtcgcaggcacctgaag

SEQ ID NO: 1002034 - DNA, 25 bp, Homo sapien
ccatcgcggcccctcgggcacttcc

SEQ ID NO: 1002035 - DNA, 25 bp, Homo sapien
ggaggcgcggaggtcgcaggcacct

SEQ ID NO: 1002036 - DNA, 25 bp, Homo sapien
tgacgtgggacctgcggtcaggatc

SEQ ID NO: 1002037 - DNA, 25 bp, Homo sapien
ccagctctgaaggtgacgtgggacc

SEQ ID NO: 1002038 - DNA, 25 bp, Homo sapien
tgtttgtcccagctctgaaggtgac

SEQ ID NO: 1002039 - DNA, 25 bp, Homo sapien
aagggtttgtttgtcccagctctga

SEQ ID NO: 1002040 - DNA, 25 bp, Homo sapien
gcacttgggcctcctgtagtctctg

SEQ ID NO: 1002041 - DNA, 25 bp, Homo sapien
tgggcctcctgtagtctctgccact

SEQ ID NO: 1002042 - DNA, 25 bp, Homo sapien
acttgggcctcctgtagtctctgcc

SEQ ID NO: 1002043 - DNA, 25 bp, Homo sapien
tcacttctgaccccgtgtccaggac

SEQ ID NO: 1002044 - DNA, 25 bp, Homo sapien
acaggagcccgcttccggcttggca

SEQ ID NO: 1002045 - DNA, 25 bp, Homo sapien
tcaacaggagcccgcttccggcttg

SEQ ID NO: 1002046 - DNA, 25 bp, Homo sapien
aacaggagcccgcttccggcttggc

SEQ ID NO: 1002047 - DNA, 25 bp, Homo sapien
aggagcccgcttccggcttggcact

SEQ ID NO: 1002048 - DNA, 25 bp, Homo sapien
gcagtgagcgctccctgacagcttg

SEQ ID NO: 1002049 - DNA, 25 bp, Homo sapien
tgcagtgagcgctccctgacagctt

SEQ ID NO: 1002050 - DNA, 25 bp, Homo sapien
ctggaggactggcatgatggtcccc

SEQ ID NO: 1002051 - DNA, 25 bp, Homo sapien
tctgttcgtcctgtgacttgatcct

SEQ ID NO: 1002052 - DNA, 25 bp, Homo sapien
atcctggaggactggcatgatggtc

SEQ ID NO: 1002053 - DNA, 25 bp, Homo sapien
tgtctgtttctgttcgtcctgtgac

SEQ ID NO: 1002054 - DNA, 25 bp, Homo sapien
taggctttcgcagcaaacgtgggat

SEQ ID NO: 1002055 - DNA, 25 bp, Homo sapien
cacattctggttgtctatgcagcta

SEQ ID NO: 1002056 - DNA, 25 bp, Homo sapien
catttgcgtatttggcagctcctag

SEQ ID NO: 1002057 - DNA, 25 bp, Homo sapien
aaggaggctcccgtgttcatttgcg

SEQ ID NO: 1002058 - DNA, 25 bp, Homo sapien
tggcacgcgtcaatcctggcgtccg

SEQ ID NO: 1002059 - DNA, 25 bp, Homo sapien
ctcaccacctccctgatggatgttg

SEQ ID NO: 1002060 - DNA, 25 bp, Homo sapien
ccacctccctgatggatgttgagcc

SEQ ID NO: 1002061 - DNA, 25 bp, Homo sapien
ctggcgtccgcatcactcaccacct

SEQ ID NO: 1002062 - DNA, 25 bp, Homo sapien
ccaagtggaactgcccagccatccc

SEQ ID NO: 1002063 - DNA, 25 bp, Homo sapien
gaactgcccagccatccccgggtcc

SEQ ID NO: 1002064 - DNA, 25 bp, Homo sapien
agtggaactgcccagccatccccgg

SEQ ID NO: 1002065 - DNA, 25 bp, Homo sapien
gtgcttgagccaccaaggagcctcc

SEQ ID NO: 1002066 - DNA, 25 bp, Homo sapien
gcaggcacttgaggaagcagcttgc

SEQ ID NO: 1002067 - DNA, 25 bp, Homo sapien
gcagcttgcagggacccgtgcattg

SEQ ID NO: 1002068 - DNA, 25 bp, Homo sapien
cagggacccgtgcattgctatctcc

SEQ ID NO: 1002069 - DNA, 25 bp, Homo sapien
gggaatggctgtcaggcaggcactt

SEQ ID NO: 1002070 - DNA, 25 bp, Homo sapien
agctcagcgggaacacccggttcct

SEQ ID NO: 1002071 - DNA, 25 bp, Homo sapien
tttcctgtagaaggcccgagtcctg

SEQ ID NO: 1002072 - DNA, 25 bp, Homo sapien
ggacttattgtagggccaggaccca

SEQ ID NO: 1002073 - DNA, 25 bp, Homo sapien
tgaactgtgatctggaagctcagcg

SEQ ID NO: 1002074 - DNA, 25 bp, Homo sapien
tcaccagtaattctaaccagaggca

SEQ ID NO: 1002075 - DNA, 25 bp, Homo sapien
gtcaccagtaattctaaccagaggc

SEQ ID NO: 1002076 - DNA, 25 bp, Homo sapien
caccagtaattctaaccagaggcag

SEQ ID NO: 1002077 - DNA, 25 bp, Homo sapien
accttcgcacgtctgcacctgcact

SEQ ID NO: 1002078 - DNA, 25 bp, Homo sapien
tcacagtgcagcaccttcgcacgtc

SEQ ID NO: 1002079 - DNA, 25 bp, Homo sapien
agtgcagcaccttcgcacgtctgca

SEQ ID NO: 1002080 - DNA, 25 bp, Homo sapien
ccttcgcacgtctgcacctgcactt

SEQ ID NO: 1002081 - DNA, 25 bp, Homo sapien
accctgcggagctggccacaagctc

SEQ ID NO: 1002082 - DNA, 25 bp, Homo sapien
cacaagctccggctttcaggagaag

SEQ ID NO: 1002083 - DNA, 25 bp, Homo sapien
tcatctcctcgaaagaaatctgcca

SEQ ID NO: 1002084 - DNA, 25 bp, Homo sapien
ccctcatctcctcgaaagaaatctg

SEQ ID NO: 1002085 - DNA, 25 bp, Homo sapien
cctcatctcctcgaaagaaatctgc

SEQ ID NO: 1002086 - DNA, 25 bp, Homo sapien
ctcatctcctcgaaagaaatctgcc

SEQ ID NO: 1002087 - DNA, 25 bp, Homo sapien
agggcccctctgctggtacttccat

SEQ ID NO: 1002088 - DNA, 25 bp, Homo sapien
gaagggcccctctgctggtacttcc

SEQ ID NO: 1002089 - DNA, 25 bp, Homo sapien
ctgggaagggcccctctgctggtac

SEQ ID NO: 1002090 - DNA, 25 bp, Homo sapien
ggacctgggaagggcccctctgctg

SEQ ID NO: 1002091 - DNA, 25 bp, Homo sapien
ttccagacggtgtacaactacttcc

SEQ ID NO: 1002092 - DNA, 25 bp, Homo sapien
gccaggtccagttgcgggtgctaat

SEQ ID NO: 1002093 - DNA, 25 bp, Homo sapien
cctgcatgggagtttgccaggtcca

SEQ ID NO: 1002094 - DNA, 25 bp, Homo sapien
tgctctaccctagtttgctgcctgg

SEQ ID NO: 1002095 - DNA, 25 bp, Homo sapien
catttagccggcaccgtagccttgg

SEQ ID NO: 1002096 - DNA, 25 bp, Homo sapien
gcttggaaacattggttggaattcc

SEQ ID NO: 1002097 - DNA, 25 bp, Homo sapien
gttggaattccatttagccggcacc

SEQ ID NO: 1002098 - DNA, 25 bp, Homo sapien
ggcctcccagccttgcatgttgctt

SEQ ID NO: 1002099 - DNA, 25 bp, Homo sapien
tgtctgtgccgcagacgggccatct

SEQ ID NO: 1002100 - DNA, 25 bp, Homo sapien
tgcatggacctctgccgttcctgct

SEQ ID NO: 1002101 - DNA, 25 bp, Homo sapien
tatttcctaggatccgcattcgggt

SEQ ID NO: 1002102 - DNA, 25 bp, Homo sapien
tcacttgtggactttgcgctcccgg

SEQ ID NO: 1002103 - DNA, 25 bp, Homo sapien
catgtaaactttgtacattggaata

SEQ ID NO: 1002104 - DNA, 25 bp, Homo sapien
agacgaggggtgatctgtgagtccc

SEQ ID NO: 1002105 - DNA, 25 bp, Homo sapien
ccctcacacgccttcatcctgaaac

SEQ ID NO: 1002106 - DNA, 25 bp, Homo sapien
acaggaagaggacggcaccaagttg

SEQ ID NO: 1002107 - DNA, 25 bp, Homo sapien
tgggctccaaatactagcaatagtc

SEQ ID NO: 1002108 - DNA, 25 bp, Homo sapien
tccagccgtgccagaatgacaatgg

SEQ ID NO: 1002109 - DNA, 25 bp, Homo sapien
tactgctttgaacaggttaggaggc

SEQ ID NO: 1002110 - DNA, 25 bp, Homo sapien
tgtaggaataggttcctgggctcca

SEQ ID NO: 1002111 - DNA, 25 bp, Homo sapien
tgcagaactgtccaggaaaccgtca

SEQ ID NO: 1002112 - DNA, 25 bp, Homo sapien
tccatttgttggtgctggctccgca

SEQ ID NO: 1002113 - DNA, 25 bp, Homo sapien
cattgccagctttgatgcgcttcca

SEQ ID NO: 1002114 - DNA, 25 bp, Homo sapien
tggctccgcacagcaaacctgttga

SEQ ID NO: 1002115 - DNA, 25 bp, Homo sapien
gaatcctgaggcccctaagcttgat

SEQ ID NO: 1002116 - DNA, 25 bp, Homo sapien
cagaatcctgaggcccctaagcttg

SEQ ID NO: 1002117 - DNA, 25 bp, Homo sapien
agaatcctgaggcccctaagcttga

SEQ ID NO: 1002118 - DNA, 25 bp, Homo sapien
aatcctgaggcccctaagcttgatg

SEQ ID NO: 1002119 - DNA, 25 bp, Homo sapien
tgtagagttcacgtcaagggcatta

SEQ ID NO: 1002120 - DNA, 25 bp, Homo sapien
cacgtcaagggcattaatctcattc

SEQ ID NO: 1002121 - DNA, 25 bp, Homo sapien
tgctccaggagacgtgcttgcatgg

SEQ ID NO: 1002122 - DNA, 25 bp, Homo sapien
actcatgctccaggagacgtgcttg

SEQ ID NO: 1002123 - DNA, 25 bp, Homo sapien
cattgctgaattgacagctgcttca

SEQ ID NO: 1002124 - DNA, 25 bp, Homo sapien
aagccagaacgtgccctccattgct

SEQ ID NO: 1002125 - DNA, 25 bp, Homo sapien
gctgaattgacagctgcttcaacat

SEQ ID NO: 1002126 - DNA, 25 bp, Homo sapien
tgccctccattgctgaattgacagc

SEQ ID NO: 1002127 - DNA, 25 bp, Homo sapien
atcttggtgcccccggaaatcccat

SEQ ID NO: 1002128 - DNA, 25 bp, Homo sapien
catcttggtgcccccggaaatccca

SEQ ID NO: 1002129 - DNA, 25 bp, Homo sapien
gaaatcccatccttgtagcttgtct

SEQ ID NO: 1002130 - DNA, 25 bp, Homo sapien
atcccatccttgtagcttgtctacc

SEQ ID NO: 1002131 - DNA, 25 bp, Homo sapien
ccactttctcccgggccggcagcag

SEQ ID NO: 1002132 - DNA, 25 bp, Homo sapien
tctgccactttctcccgggccggca

SEQ ID NO: 1002133 - DNA, 25 bp, Homo sapien
caccctctgggcgtcggccgcctgg

SEQ ID NO: 1002134 - DNA, 25 bp, Homo sapien
tgccactttctcccgggccggcagc

SEQ ID NO: 1002135 - DNA, 25 bp, Homo sapien
cgaagctgggcagcgcggtggtcag

SEQ ID NO: 1002136 - DNA, 25 bp, Homo sapien
ctcggggttgtttcgggcggcagtg

SEQ ID NO: 1002137 - DNA, 25 bp, Homo sapien
ccgtagaaagcgtcgggcggctccg

SEQ ID NO: 1002138 - DNA, 25 bp, Homo sapien
ctcctggggcccgtagaaagcgtcg

SEQ ID NO: 1002139 - DNA, 25 bp, Homo sapien
aggcggccggcgaaagaggctagcg

SEQ ID NO: 1002140 - DNA, 25 bp, Homo sapien
ccagccccgcgcagaaggtgttggt

SEQ ID NO: 1002141 - DNA, 25 bp, Homo sapien
tgcggcagcacgagcggccggtagg

SEQ ID NO: 1002142 - DNA, 25 bp, Homo sapien
cagaaggtgttggtaaggcggccgg

SEQ ID NO: 1002143 - DNA, 25 bp, Homo sapien
gtgtacagcaagtggccggagcgcg

SEQ ID NO: 1002144 - DNA, 25 bp, Homo sapien
ggcggcggcccgattagggagtcga

SEQ ID NO: 1002145 - DNA, 25 bp, Homo sapien
gggtagccggtgtacagcaagtggc

SEQ ID NO: 1002146 - DNA, 25 bp, Homo sapien
ttagggagtcgatggagaaggcagt

SEQ ID NO: 1002147 - DNA, 25 bp, Homo sapien
gcgggctcggcgcagtgtggctccg

SEQ ID NO: 1002148 - DNA, 25 bp, Homo sapien
cgcggacacgcagggctcgctccct

SEQ ID NO: 1002149 - DNA, 25 bp, Homo sapien
cgccccgcgcggacacgcagggctc

SEQ ID NO: 1002150 - DNA, 25 bp, Homo sapien
gctcggcgcagtgtggctccggcgc

SEQ ID NO: 1002151 - DNA, 25 bp, Homo sapien
gacgttgtggcggtccccagagcaa

SEQ ID NO: 1002152 - DNA, 25 bp, Homo sapien
gccgagcgtggatgggacaccgggc

SEQ ID NO: 1002153 - DNA, 25 bp, Homo sapien
ctaggagggcaagcgggaggtggcc

SEQ ID NO: 1002154 - DNA, 25 bp, Homo sapien
ttctgcggcttagggccactcttac

SEQ ID NO: 1002155 - DNA, 25 bp, Homo sapien
ccaattcccagcagtagagttgtca

SEQ ID NO: 1002156 - DNA, 25 bp, Homo sapien
aattcccagcagtagagttgtcaat

SEQ ID NO: 1002157 - DNA, 25 bp, Homo sapien
cctcctcccaattcccagcagtaga

SEQ ID NO: 1002158 - DNA, 25 bp, Homo sapien
cctcccaattcccagcagtagagtt

SEQ ID NO: 1002159 - DNA, 25 bp, Homo sapien
gcctgacctgtgttgccaaccagca

SEQ ID NO: 1002160 - DNA, 25 bp, Homo sapien
cctgacctgtgttgccaaccagcac

SEQ ID NO: 1002161 - DNA, 25 bp, Homo sapien
tcaagtcaaagaccacaaatctata

SEQ ID NO: 1002162 - DNA, 25 bp, Homo sapien
caagtcaaagaccacaaatctatac

SEQ ID NO: 1002163 - DNA, 25 bp, Homo sapien
tctcatggtgggcagcgtcgggcct

SEQ ID NO: 1002164 - DNA, 25 bp, Homo sapien
agagaaagtcctctcatggtgggca

SEQ ID NO: 1002165 - DNA, 25 bp, Homo sapien
cagagaaagtcctctcatggtgggc

SEQ ID NO: 1002166 - DNA, 25 bp, Homo sapien
ccagagaaagtcctctcatggtggg

SEQ ID NO: 1002167 - DNA, 25 bp, Homo sapien
acaaaccatcgagcactagggcgtc

SEQ ID NO: 1002168 - DNA, 25 bp, Homo sapien
gtgcggcggtgcctgaacgcagcag

SEQ ID NO: 1002169 - DNA, 25 bp, Homo sapien
gccctggaacggctgcggaacaaac

SEQ ID NO: 1002170 - DNA, 25 bp, Homo sapien
taccccgcgcaagcggaccctggtg

SEQ ID NO: 1002171 - DNA, 25 bp, Homo sapien
gagcctccaccgcttgcccacccgc

SEQ ID NO: 1002172 - DNA, 25 bp, Homo sapien
cctgtgcggtcggggtccgcctggg

SEQ ID NO: 1002173 - DNA, 25 bp, Homo sapien
cagccgcttcctgcccgcgaggtgg

SEQ ID NO: 1002174 - DNA, 25 bp, Homo sapien
tcctgcccgcgaggtggggcctgtg

SEQ ID NO: 1002175 - DNA, 25 bp, Homo sapien
ttctaaacctgggcctttcgctgtc

SEQ ID NO: 1002176 - DNA, 25 bp, Homo sapien
acctgggcctttcgctgtcacctga

SEQ ID NO: 1002177 - DNA, 25 bp, Homo sapien
ctaaacctgggcctttcgctgtcac

SEQ ID NO: 1002178 - DNA, 25 bp, Homo sapien
ggcctttcgctgtcacctgagccat

SEQ ID NO: 1002179 - DNA, 25 bp, Homo sapien
tttaatgcacatacagggtttgcac

SEQ ID NO: 1002180 - DNA, 25 bp, Homo sapien
taatgcacatacagggtttgcacag

SEQ ID NO: 1002181 - DNA, 25 bp, Homo sapien
aatgcacatacagggtttgcacagg

SEQ ID NO: 1002182 - DNA, 25 bp, Homo sapien
ttaatgcacatacagggtttgcaca

SEQ ID NO: 1002183 - DNA, 25 bp, Homo sapien
tgcattgggaattgcagcatccaca

SEQ ID NO: 1002184 - DNA, 25 bp, Homo sapien
gagtgtgtcttcatcagacatcacc

SEQ ID NO: 1002185 - DNA, 25 bp, Homo sapien
ggctacctggcctgagttagtgcag

SEQ ID NO: 1002186 - DNA, 25 bp, Homo sapien
gagccccagtaggagtgtgtcttca

SEQ ID NO: 1002187 - DNA, 25 bp, Homo sapien
ggagaggtttggattcagaggcttc

SEQ ID NO: 1002188 - DNA, 25 bp, Homo sapien
gactgctcacagatcccggggctca

SEQ ID NO: 1002189 - DNA, 25 bp, Homo sapien
gctgtgactgctcacagatcccggg

SEQ ID NO: 1002190 - DNA, 25 bp, Homo sapien
agaggtttggattcagaggcttctg

SEQ ID NO: 1002191 - DNA, 25 bp, Homo sapien
gagcggagcgcacagcggctcaaat

SEQ ID NO: 1002192 - DNA, 25 bp, Homo sapien
ctgcaggtagcggagcaggcgcggt

SEQ ID NO: 1002193 - DNA, 25 bp, Homo sapien
ctccaggtgggagcggagcgcacag

SEQ ID NO: 1002194 - DNA, 25 bp, Homo sapien
cggctcaaatgctgcagcgacctgg

SEQ ID NO: 1002195 - DNA, 25 bp, Homo sapien
gggaggagtagaaacgctgatgttt

SEQ ID NO: 1002196 - DNA, 25 bp, Homo sapien
taggtgttcatcaggacctcgatgg

SEQ ID NO: 1002197 - DNA, 25 bp, Homo sapien
tcgggaagctgcacaacactgtagg

SEQ ID NO: 1002198 - DNA, 25 bp, Homo sapien
tcaggacctcgatggtccgagggca

SEQ ID NO: 1002199 - DNA, 25 bp, Homo sapien
gtccgagggcacgtgctccagcgct

SEQ ID NO: 1002200 - DNA, 25 bp, Homo sapien
cctcggcatcggtgatggactggca

SEQ ID NO: 1002201 - DNA, 25 bp, Homo sapien
catggttgagcagagcccgaaccac

SEQ ID NO: 1002202 - DNA, 25 bp, Homo sapien
ctggtccgcagcatcagcgtctgct

SEQ ID NO: 1002203 - DNA, 25 bp, Homo sapien
gccttcggcattgcgggcatcagga

SEQ ID NO: 1002204 - DNA, 25 bp, Homo sapien
tcatccgtgggaataaacgtcacca

SEQ ID NO: 1002205 - DNA, 25 bp, Homo sapien
acaggcgcctgctaagggttttacg

SEQ ID NO: 1002206 - DNA, 25 bp, Homo sapien
ggtaggctctcttaaggcactcatg

SEQ ID NO: 1002207 - DNA, 25 bp, Homo sapien
cacatgagtggttagaacaggcgcc

SEQ ID NO: 1002208 - DNA, 25 bp, Homo sapien
cgatgttggggtcggctcctgccac

SEQ ID NO: 1002209 - DNA, 25 bp, Homo sapien
ggtcagctcctcttcgtatgtcaga

SEQ ID NO: 1002210 - DNA, 25 bp, Homo sapien
gcaggacttccgtgtggccacggct

SEQ ID NO: 1002211 - DNA, 25 bp, Homo sapien
tcccatcctggtcagcgatgttggg

SEQ ID NO: 1002212 - DNA, 25 bp, Homo sapien
tgagagcccccagtgccccggcccg

SEQ ID NO: 1002213 - DNA, 25 bp, Homo sapien
ctgagagcccccagtgccccggccc

SEQ ID NO: 1002214 - DNA, 25 bp, Homo sapien
ccactgagagcccccagtgccccgg

SEQ ID NO: 1002215 - DNA, 25 bp, Homo sapien
actgagagcccccagtgccccggcc

SEQ ID NO: 1002216 - DNA, 25 bp, Homo sapien
cggaaatccctccatcgctctgggt

SEQ ID NO: 1002217 - DNA, 25 bp, Homo sapien
tggtatcaaagacggaatcaggagc

SEQ ID NO: 1002218 - DNA, 25 bp, Homo sapien
ccagtactggagtccgcgaggatgc

SEQ ID NO: 1002219 - DNA, 25 bp, Homo sapien
cagagcacggatgttgaagcggaaa

SEQ ID NO: 1002220 - DNA, 25 bp, Homo sapien
gtctgtcatcgaggggctctccctg

SEQ ID NO: 1002221 - DNA, 25 bp, Homo sapien
cagagggggtgtctgtcatcgaggg

SEQ ID NO: 1002222 - DNA, 25 bp, Homo sapien
ggtgtctgtcatcgaggggctctcc

SEQ ID NO: 1002223 - DNA, 25 bp, Homo sapien
gcacagagggggtgtctgtcatcga

SEQ ID NO: 1002224 - DNA, 25 bp, Homo sapien
ctgtgtcccacgctccgaggctgac

SEQ ID NO: 1002225 - DNA, 25 bp, Homo sapien
gaggtatatgccaaaggcagagaga

SEQ ID NO: 1002226 - DNA, 25 bp, Homo sapien
ggaggagaggtatatgccaaaggca

SEQ ID NO: 1002227 - DNA, 25 bp, Homo sapien
gactgtgttcttgggccaaggtgta

SEQ ID NO: 1002228 - DNA, 25 bp, Homo sapien
acatgactgtgttcttgggccaagg

SEQ ID NO: 1002229 - DNA, 25 bp, Homo sapien
tccacatgactgtgttcttgggcca

SEQ ID NO: 1002230 - DNA, 25 bp, Homo sapien
ggctccacatgactgtgttcttggg

SEQ ID NO: 1002231 - DNA, 25 bp, Homo sapien
ctttgaggtcggggagaaacagccg

SEQ ID NO: 1002232 - DNA, 25 bp, Homo sapien
gtggctgctccagcgaggctctgcg

SEQ ID NO: 1002233 - DNA, 25 bp, Homo sapien
gggaacagctcctgcaaccttgcca

SEQ ID NO: 1002234 - DNA, 25 bp, Homo sapien
gcagcaggtcggctgtgctgtgcgg

SEQ ID NO: 1002235 - DNA, 25 bp, Homo sapien
tccccggtgtagagggcattctgca

SEQ ID NO: 1002236 - DNA, 25 bp, Homo sapien
gagcagtggtgatggccgagggggc

SEQ ID NO: 1002237 - DNA, 25 bp, Homo sapien
tggcagagcagtggtgatggccgag

SEQ ID NO: 1002238 - DNA, 25 bp, Homo sapien
tggtgatggccgagggggctcccag

SEQ ID NO: 1002239 - DNA, 25 bp, Homo sapien
gtcttggcagagcagtggtgatggc

SEQ ID NO: 1002240 - DNA, 25 bp, Homo sapien
caaagcagcacgactcccagcgatg

SEQ ID NO: 1002241 - DNA, 25 bp, Homo sapien
gagaggagttctttccccagggcat

SEQ ID NO: 1002242 - DNA, 25 bp, Homo sapien
cagggcatggcttgttctgggagag

SEQ ID NO: 1002243 - DNA, 25 bp, Homo sapien
agcagcacgactcccagcgatgttg

SEQ ID NO: 1002244 - DNA, 25 bp, Homo sapien
ctgctgtggttacatggggtctctt

SEQ ID NO: 1002245 - DNA, 25 bp, Homo sapien
ccctgctgtggttacatggggtctc

SEQ ID NO: 1002246 - DNA, 25 bp, Homo sapien
tcccctgctgtggttacatggggtc

SEQ ID NO: 1002247 - DNA, 25 bp, Homo sapien
ctcccctgctgtggttacatggggt

SEQ ID NO: 1002248 - DNA, 25 bp, Homo sapien
catccctttacccttgggccactgc

SEQ ID NO: 1002249 - DNA, 25 bp, Homo sapien
ctcaggtgcccgcaagccttagcca

SEQ ID NO: 1002250 - DNA, 25 bp, Homo sapien
ctgtcccacgccactaatctcaggt

SEQ ID NO: 1002251 - DNA, 25 bp, Homo sapien
ccactgccctgtcccacgccactaa

SEQ ID NO: 1002252 - DNA, 25 bp, Homo sapien
ggcctccaactggtccatcctgtgt

SEQ ID NO: 1002253 - DNA, 25 bp, Homo sapien
aactggtccatcctgtgtttcatgc

SEQ ID NO: 1002254 - DNA, 25 bp, Homo sapien
ccagtggggtcttgaagtaccagtc

SEQ ID NO: 1002255 - DNA, 25 bp, Homo sapien
gctcttcttgcccagtggggtcttg

SEQ ID NO: 1002256 - DNA, 25 bp, Homo sapien
acagcccctggccctgccacctcac

SEQ ID NO: 1002257 - DNA, 25 bp, Homo sapien
cacagcccctggccctgccacctca

SEQ ID NO: 1002258 - DNA, 25 bp, Homo sapien
ccacagcccctggccctgccacctc

SEQ ID NO: 1002259 - DNA, 25 bp, Homo sapien
catcggagaccttggctagggcact

SEQ ID NO: 1002260 - DNA, 25 bp, Homo sapien
cgctcactcagcaccgattggatgg

SEQ ID NO: 1002261 - DNA, 25 bp, Homo sapien
ccagttgtcccaggaactcagaggc

SEQ ID NO: 1002262 - DNA, 25 bp, Homo sapien
gccgcttggacagttgcaggaaccg

SEQ ID NO: 1002263 - DNA, 25 bp, Homo sapien
ctgcaggcatgtggaagacatgggg

SEQ ID NO: 1002264 - DNA, 25 bp, Homo sapien
caggctttggtaggcgcagccgtcc

SEQ ID NO: 1002265 - DNA, 25 bp, Homo sapien
aggccactgggctgcttgtccagca

SEQ ID NO: 1002266 - DNA, 25 bp, Homo sapien
ggtgagggctcgcagcagcaatggg

SEQ ID NO: 1002267 - DNA, 25 bp, Homo sapien
cagcaatggggtatggggcgggagg

SEQ ID NO: 1002268 - DNA, 25 bp, Homo sapien
ctgtggccgggaggttgtcccaatc

SEQ ID NO: 1002269 - DNA, 25 bp, Homo sapien
catgaagaggatccgctcgtagacc

SEQ ID NO: 1002270 - DNA, 25 bp, Homo sapien
gcatcacacggtctccgggagtcag

SEQ ID NO: 1002271 - DNA, 25 bp, Homo sapien
tgaggtccttctttatccgctttgg

SEQ ID NO: 1002272 - DNA, 25 bp, Homo sapien
tcttctttgggggtcttcttataga

SEQ ID NO: 1002273 - DNA, 25 bp, Homo sapien
tcttatagaaattcttctcagcatt

SEQ ID NO: 1002274 - DNA, 25 bp, Homo sapien
agaaccgcaaatgccaaaagctggg

SEQ ID NO: 1002275 - DNA, 25 bp, Homo sapien
tacccagtaggctgatgggtgacgt

SEQ ID NO: 1002276 - DNA, 25 bp, Homo sapien
gatgggtgacgtgacctcaaagccc

SEQ ID NO: 1002277 - DNA, 25 bp, Homo sapien
tcctttgttgccacaggtctgagaa

SEQ ID NO: 1002278 - DNA, 25 bp, Homo sapien
ttccggcgacaggtcgaacaggttg

SEQ ID NO: 1002279 - DNA, 25 bp, Homo sapien
ttggcgccagtttctgtgcacactg

SEQ ID NO: 1002280 - DNA, 25 bp, Homo sapien
ggtcgaacaggttggcgccagtttc

SEQ ID NO: 1002281 - DNA, 25 bp, Homo sapien
cccagcaggttttccggcgacaggt

SEQ ID NO: 1002282 - DNA, 25 bp, Homo sapien
cattctgtcgtatgtcaaacaggga

SEQ ID NO: 1002283 - DNA, 25 bp, Homo sapien
ccgaaggaccgcatacaaagccaca

SEQ ID NO: 1002284 - DNA, 25 bp, Homo sapien
tcaccaaactcagagtggatccaag

SEQ ID NO: 1002285 - DNA, 25 bp, Homo sapien
ggcatgggcaacttcttcaccaaac

SEQ ID NO: 1002286 - DNA, 25 bp, Homo sapien
tatgtagtctttcaatgctactgac

SEQ ID NO: 1002287 - DNA, 25 bp, Homo sapien
ctatgtagtctttcaatgctactga

SEQ ID NO: 1002288 - DNA, 25 bp, Homo sapien
atgtagtctttcaatgctactgact

SEQ ID NO: 1002289 - DNA, 25 bp, Homo sapien
aaataacaagctcttcgtacagaga

SEQ ID NO: 1002290 - DNA, 25 bp, Homo sapien
aagctcttcgtacagagactccaca

SEQ ID NO: 1002291 - DNA, 25 bp, Homo sapien
taacaagctcttcgtacagagactc

SEQ ID NO: 1002292 - DNA, 25 bp, Homo sapien
gccagaaataacaagctcttcgtac

SEQ ID NO: 1002293 - DNA, 25 bp, Homo sapien
ctgtctgaggtcagatctttttcct

SEQ ID NO: 1002294 - DNA, 25 bp, Homo sapien
gtctgaggtcagatctttttccttc

SEQ ID NO: 1002295 - DNA, 25 bp, Homo sapien
tctgaggtcagatctttttccttct

SEQ ID NO: 1002296 - DNA, 25 bp, Homo sapien
tgaggtcagatctttttccttcttt

SEQ ID NO: 1002297 - DNA, 25 bp, Homo sapien
aacgagtgcgtaggtcactgtgccc

SEQ ID NO: 1002298 - DNA, 25 bp, Homo sapien
gaaacgagtgcgtaggtcactgtgc

SEQ ID NO: 1002299 - DNA, 25 bp, Homo sapien
ttggaaacgagtgcgtaggtcactg

SEQ ID NO: 1002300 - DNA, 25 bp, Homo sapien
ctggttggaaacgagtgcgtaggtc

SEQ ID NO: 1002301 - DNA, 25 bp, Homo sapien
cagcccctcatcttgcctttggagc

SEQ ID NO: 1002302 - DNA, 25 bp, Homo sapien
ccccagcccctcatcttgcctttgg

SEQ ID NO: 1002303 - DNA, 25 bp, Homo sapien
ccagcccctcatcttgcctttggag

SEQ ID NO: 1002304 - DNA, 25 bp, Homo sapien
gcccctcatcttgcctttggagccc

SEQ ID NO: 1002305 - DNA, 25 bp, Homo sapien
ggtctttttcctccttgtccacagc

SEQ ID NO: 1002306 - DNA, 25 bp, Homo sapien
ttttcctccttgtccacagccagac

SEQ ID NO: 1002307 - DNA, 25 bp, Homo sapien
tttttcctccttgtccacagccaga

SEQ ID NO: 1002308 - DNA, 25 bp, Homo sapien
tctttttcctccttgtccacagcca

SEQ ID NO: 1002309 - DNA, 25 bp, Homo sapien
cagctcctgacgcatcagctcatcc

SEQ ID NO: 1002310 - DNA, 25 bp, Homo sapien
gctcctgacgcatcagctcatccac

SEQ ID NO: 1002311 - DNA, 25 bp, Homo sapien
ctcagctcctgacgcatcagctcat

SEQ ID NO: 1002312 - DNA, 25 bp, Homo sapien
tcctcagctcctgacgcatcagctc

SEQ ID NO: 1002313 - DNA, 25 bp, Homo sapien
ataattctgactggggtgtatgctc

SEQ ID NO: 1002314 - DNA, 25 bp, Homo sapien
agggtctcggagtcataattctgac

SEQ ID NO: 1002315 - DNA, 25 bp, Homo sapien
tctgactggggtgtatgctctcaca

SEQ ID NO: 1002316 - DNA, 25 bp, Homo sapien
cggagggtctcggagtcataattct

SEQ ID NO: 1002317 - DNA, 25 bp, Homo sapien
ttcatgcccggcacagatcataggg

SEQ ID NO: 1002318 - DNA, 25 bp, Homo sapien
gatggcaacacttgcaacaccgcat

SEQ ID NO: 1002319 - DNA, 25 bp, Homo sapien
tagggatacatttggatggcaacac

SEQ ID NO: 1002320 - DNA, 25 bp, Homo sapien
ccggcacagatcatagggatacatt

SEQ ID NO: 1002321 - DNA, 25 bp, Homo sapien
ttttctgttctcttgcatctgcatt

SEQ ID NO: 1002322 - DNA, 25 bp, Homo sapien
ctgttctcttgcatctgcatttcca

SEQ ID NO: 1002323 - DNA, 25 bp, Homo sapien
tgctcttctcttgttccttttttct

SEQ ID NO: 1002324 - DNA, 25 bp, Homo sapien
tctgcatttccagttccattctcac

SEQ ID NO: 1002325 - DNA, 25 bp, Homo sapien
ccctaggcctagagtaactgatggg

SEQ ID NO: 1002326 - DNA, 25 bp, Homo sapien
ttccctaggcctagagtaactgatg

SEQ ID NO: 1002327 - DNA, 25 bp, Homo sapien
ctagagtaactgatggggtcgggac

SEQ ID NO: 1002328 - DNA, 25 bp, Homo sapien
gattccctaggcctagagtaactga

SEQ ID NO: 1002329 - DNA, 25 bp, Homo sapien
tccaaggagaaagggtgcccaagaa

SEQ ID NO: 1002330 - DNA, 25 bp, Homo sapien
aggagaaagggtgcccaagaaggag

SEQ ID NO: 1002331 - DNA, 25 bp, Homo sapien
agaaagggtgcccaagaaggagcgt

SEQ ID NO: 1002332 - DNA, 25 bp, Homo sapien
caaggagaaagggtgcccaagaagg

SEQ ID NO: 1002333 - DNA, 25 bp, Homo sapien
cactgcagtctacccagacatcctt

SEQ ID NO: 1002334 - DNA, 25 bp, Homo sapien
agccactgcagtctacccagacatc

SEQ ID NO: 1002335 - DNA, 25 bp, Homo sapien
tctggagccactgcagtctacccag

SEQ ID NO: 1002336 - DNA, 25 bp, Homo sapien
gatctggagccactgcagtctaccc

SEQ ID NO: 1002337 - DNA, 25 bp, Homo sapien
ctgttctggcgttttgtctgcaaag

SEQ ID NO: 1002338 - DNA, 25 bp, Homo sapien
tgtctgcaaagattgagtaggatcc

SEQ ID NO: 1002339 - DNA, 25 bp, Homo sapien
tctgcaaagattgagtaggatccac

SEQ ID NO: 1002340 - DNA, 25 bp, Homo sapien
ttttgtctgcaaagattgagtagga

SEQ ID NO: 1002341 - DNA, 25 bp, Homo sapien
ctgaagacgcatctggataatcagg

SEQ ID NO: 1002342 - DNA, 25 bp, Homo sapien
tgaagacgcatctggataatcaggg

SEQ ID NO: 1002343 - DNA, 25 bp, Homo sapien
ggataatcagggaaccggccagtaa

SEQ ID NO: 1002344 - DNA, 25 bp, Homo sapien
ataatcagggaaccggccagtaagg

SEQ ID NO: 1002345 - DNA, 25 bp, Homo sapien
gcactcgataaaccactgtcggatt

SEQ ID NO: 1002346 - DNA, 25 bp, Homo sapien
cgataaaccactgtcggatttgctc

SEQ ID NO: 1002347 - DNA, 25 bp, Homo sapien
ctcgataaaccactgtcggatttgc

SEQ ID NO: 1002348 - DNA, 25 bp, Homo sapien
tccttcatgtcaggcccctctgtct

SEQ ID NO: 1002349 - DNA, 25 bp, Homo sapien
atcatgggccttcaccattgctgcc

SEQ ID NO: 1002350 - DNA, 25 bp, Homo sapien
cagagaatcatgggccttcaccatt

SEQ ID NO: 1002351 - DNA, 25 bp, Homo sapien
agaatcatgggccttcaccattgct

SEQ ID NO: 1002352 - DNA, 25 bp, Homo sapien
ttgctgcccggaactcctcctcttt

SEQ ID NO: 1002353 - DNA, 25 bp, Homo sapien
tctggacatcctccacgaggcatgg

SEQ ID NO: 1002354 - DNA, 25 bp, Homo sapien
tggacatcctccacgaggcatggct

SEQ ID NO: 1002355 - DNA, 25 bp, Homo sapien
cacgaggcatggctgggagatgatg

SEQ ID NO: 1002356 - DNA, 25 bp, Homo sapien
acatcctccacgaggcatggctggg

SEQ ID NO: 1002357 - DNA, 25 bp, Homo sapien
tgaactccatctccattcgccggtc

SEQ ID NO: 1002358 - DNA, 25 bp, Homo sapien
gcgtttcctctgcagatagcctttc

SEQ ID NO: 1002359 - DNA, 25 bp, Homo sapien
ggtcctgctgagtgcgtttcctctg

SEQ ID NO: 1002360 - DNA, 25 bp, Homo sapien
ctccattcgccggtcctgctgagtg

SEQ ID NO: 1002361 - DNA, 25 bp, Homo sapien
agaattatggcctcagtccggtgca

SEQ ID NO: 1002362 - DNA, 25 bp, Homo sapien
tcgaatctctcgcatgaaggtggct

SEQ ID NO: 1002363 - DNA, 25 bp, Homo sapien
tgactgaacttgtgccatccatcct

SEQ ID NO: 1002364 - DNA, 25 bp, Homo sapien
gctgcttggccctgactgaacttgt

SEQ ID NO: 1002365 - DNA, 25 bp, Homo sapien
cagtctggacaggatctcggccagt

SEQ ID NO: 1002366 - DNA, 25 bp, Homo sapien
ggacactggctccagtctggacagg

SEQ ID NO: 1002367 - DNA, 25 bp, Homo sapien
gacactggctccagtctggacagga

SEQ ID NO: 1002368 - DNA, 25 bp, Homo sapien
ggatctcggccagtatcagccctcg

SEQ ID NO: 1002369 - DNA, 25 bp, Homo sapien
tggggtgagcttgaaatcctgcagc

SEQ ID NO: 1002370 - DNA, 25 bp, Homo sapien
tcacacaggtcggcgcgcaccagct

SEQ ID NO: 1002371 - DNA, 25 bp, Homo sapien
aggtcggcgcgcaccagctcgtcct

SEQ ID NO: 1002372 - DNA, 25 bp, Homo sapien
gggtgagcttgaaatcctgcagcac

SEQ ID NO: 1002373 - DNA, 25 bp, Homo sapien
tagagcgatgcgagcctgtactgga

SEQ ID NO: 1002374 - DNA, 25 bp, Homo sapien
ccccaggtagtgcaggtagagcgat

SEQ ID NO: 1002375 - DNA, 25 bp, Homo sapien
tcatagacggtgtcgaagcggcgca

SEQ ID NO: 1002376 - DNA, 25 bp, Homo sapien
tactggaaggactgccgctcccggt

SEQ ID NO: 1002377 - DNA, 25 bp, Homo sapien
acagttcaccctttatttttgtcag

SEQ ID NO: 1002378 - DNA, 25 bp, Homo sapien
caccctttatttttgtcaggccctg

SEQ ID NO: 1002379 - DNA, 25 bp, Homo sapien
cagttcaccctttatttttgtcagg

SEQ ID NO: 1002380 - DNA, 25 bp, Homo sapien
gccagctgctcaaacacgtcgttta

SEQ ID NO: 1002381 - DNA, 25 bp, Homo sapien
cacgtcgtttacaaacgagttcatg

SEQ ID NO: 1002382 - DNA, 25 bp, Homo sapien
cgggcagcctcacacgccagctgct

SEQ ID NO: 1002383 - DNA, 25 bp, Homo sapien
acttctcgggatgtcagggtggtcc

SEQ ID NO: 1002384 - DNA, 25 bp, Homo sapien
cttggcagagatgccaatgtcaggg

SEQ ID NO: 1002385 - DNA, 25 bp, Homo sapien
gccttggcagagatgccaatgtcag

SEQ ID NO: 1002386 - DNA, 25 bp, Homo sapien
cagagatgccaatgtcagggtgcac

SEQ ID NO: 1002387 - DNA, 25 bp, Homo sapien
tggcagagatgccaatgtcagggtg

SEQ ID NO: 1002388 - DNA, 25 bp, Homo sapien
tggagtaggactccttgcgccgaca

SEQ ID NO: 1002389 - DNA, 25 bp, Homo sapien
tatacatggagtaggactccttgcg

SEQ ID NO: 1002390 - DNA, 25 bp, Homo sapien
gatatacatggagtaggactccttg

SEQ ID NO: 1002391 - DNA, 25 bp, Homo sapien
tacatggagtaggactccttgcgcc

SEQ ID NO: 1002392 - DNA, 25 bp, Homo sapien
ctttttatcaagtcagctgccccac

SEQ ID NO: 1002393 - DNA, 25 bp, Homo sapien
ggactttttgttcccagaactgcga

SEQ ID NO: 1002394 - DNA, 25 bp, Homo sapien
tcctgcttctcgaatagccctcacc

SEQ ID NO: 1002395 - DNA, 25 bp, Homo sapien
gctgtccatactcagcgctcatcct

SEQ ID NO: 1002396 - DNA, 25 bp, Homo sapien
agcccaccagcctgtaatcacggag

SEQ ID NO: 1002397 - DNA, 25 bp, Homo sapien
taaaagttcaggcaactccagccca

SEQ ID NO: 1002398 - DNA, 25 bp, Homo sapien
ctgtaatcacggagcacacaggtgc

SEQ ID NO: 1002399 - DNA, 25 bp, Homo sapien
ccagaaggaatgcaagctccctccc

SEQ ID NO: 1002400 - DNA, 25 bp, Homo sapien
ggttcacatcaaaccaccagagaag

SEQ ID NO: 1002401 - DNA, 25 bp, Homo sapien
gtggtacccatggtgaggagggctc

SEQ ID NO: 1002402 - DNA, 25 bp, Homo sapien
ggccgcttcttggtacaaatgggta

SEQ ID NO: 1002403 - DNA, 25 bp, Homo sapien
aggagggctcgagtagctagaggcc

SEQ ID NO: 1002404 - DNA, 25 bp, Homo sapien
gaatcagtgtgagcggagtataatg

SEQ ID NO: 1002405 - DNA, 25 bp, Homo sapien
atgagagaaagaaacggtgtgaaag

SEQ ID NO: 1002406 - DNA, 25 bp, Homo sapien
gaaacggtgtgaaaggtagagtgga

SEQ ID NO: 1002407 - DNA, 25 bp, Homo sapien
ctttaattgggaagaatgagagaaa

SEQ ID NO: 1002408 - DNA, 25 bp, Homo sapien
gctctggactctcaggacagactaa

SEQ ID NO: 1002409 - DNA, 25 bp, Homo sapien
tccttaagtatcaagggctctgtcc

SEQ ID NO: 1002410 - DNA, 25 bp, Homo sapien
tggagactctggagatcccgagact

SEQ ID NO: 1002411 - DNA, 25 bp, Homo sapien
tgaagatctcctgtcctagtatgga

SEQ ID NO: 1002412 - DNA, 25 bp, Homo sapien
tccaggccccacttaaggcataaag

SEQ ID NO: 1002413 - DNA, 25 bp, Homo sapien
ctccaggccccacttaaggcataaa

SEQ ID NO: 1002414 - DNA, 25 bp, Homo sapien
caggccccacttaaggcataaagca

SEQ ID NO: 1002415 - DNA, 25 bp, Homo sapien
ccaggccccacttaaggcataaagc

SEQ ID NO: 1002416 - DNA, 25 bp, Homo sapien
tctgggcagctactcacaagaaatt

SEQ ID NO: 1002417 - DNA, 25 bp, Homo sapien
gacccagataaggtatgcagagccc

SEQ ID NO: 1002418 - DNA, 25 bp, Homo sapien
gggtttaagcaccatctgggacagt

SEQ ID NO: 1002419 - DNA, 25 bp, Homo sapien
caagaagatcatgagctcctaaggg

SEQ ID NO: 1002420 - DNA, 25 bp, Homo sapien
gggcagaacctcagatcacaatcag

SEQ ID NO: 1002421 - DNA, 25 bp, Homo sapien
gattccaggcacataaagacgggtt

SEQ ID NO: 1002422 - DNA, 25 bp, Homo sapien
tcccaaggtgatgagcttacagtcg

SEQ ID NO: 1002423 - DNA, 25 bp, Homo sapien
tattgaaccagaaacgctgaggcga

SEQ ID NO: 1002424 - DNA, 25 bp, Homo sapien
taaagtctgtgaatcacaggcctga

SEQ ID NO: 1002425 - DNA, 25 bp, Homo sapien
agttcccatcgacacactgacgctg

SEQ ID NO: 1002426 - DNA, 25 bp, Homo sapien
tctgattgcatgagccctccaggtg

SEQ ID NO: 1002427 - DNA, 25 bp, Homo sapien
ccagctcctatggactagtcttcag

SEQ ID NO: 1002428 - DNA, 25 bp, Homo sapien
ttattgggcgctttgtagatgtcac

SEQ ID NO: 1002429 - DNA, 25 bp, Homo sapien
tattgggcgctttgtagatgtcacg

SEQ ID NO: 1002430 - DNA, 25 bp, Homo sapien
attgggcgctttgtagatgtcacgc

SEQ ID NO: 1002431 - DNA, 25 bp, Homo sapien
ttgggcgctttgtagatgtcacgca

SEQ ID NO: 1002432 - DNA, 25 bp, Homo sapien
ggtcctggtccggagctccaaacca

SEQ ID NO: 1002433 - DNA, 25 bp, Homo sapien
tgaccaggacgaaggtcctggtccg

SEQ ID NO: 1002434 - DNA, 25 bp, Homo sapien
aactgaccaggacgaaggtcctggt

SEQ ID NO: 1002435 - DNA, 25 bp, Homo sapien
gacgaaggtcctggtccggagctcc

SEQ ID NO: 1002436 - DNA, 25 bp, Homo sapien
agctcctgacccgaacccaggtaga

SEQ ID NO: 1002437 - DNA, 25 bp, Homo sapien
ctcctgacccgaacccaggtagagg

SEQ ID NO: 1002438 - DNA, 25 bp, Homo sapien
tgtcctgagcggctggtcaggttag

SEQ ID NO: 1002439 - DNA, 25 bp, Homo sapien
cttggacttgaggtgctccttgtaa

SEQ ID NO: 1002440 - DNA, 25 bp, Homo sapien
ccacttggtgattgtctgcttctca

SEQ ID NO: 1002441 - DNA, 25 bp, Homo sapien
ccaggccacttggtgattgtctgct

SEQ ID NO: 1002442 - DNA, 25 bp, Homo sapien
ccttgtaagccaggatgtctccagg

SEQ ID NO: 1002443 - DNA, 25 bp, Homo sapien
tgattggtgggttcatccaggaaga

SEQ ID NO: 1002444 - DNA, 25 bp, Homo sapien
caccctcaaactcattgatggcatc

SEQ ID NO: 1002445 - DNA, 25 bp, Homo sapien
ttctgcccgtctgacaagttccgga

SEQ ID NO: 1002446 - DNA, 25 bp, Homo sapien
atctgccagggcgtcgatggtctcg

SEQ ID NO: 1002447 - DNA, 25 bp, Homo sapien
tcatgtactccaaaggtgagagatc

SEQ ID NO: 1002448 - DNA, 25 bp, Homo sapien
tccaaaggtgagagatctaagtcca

SEQ ID NO: 1002449 - DNA, 25 bp, Homo sapien
ttcatcatgtactccaaaggtgaga

SEQ ID NO: 1002450 - DNA, 25 bp, Homo sapien
gtactccaaaggtgagagatctaag

SEQ ID NO: 1002451 - DNA, 25 bp, Homo sapien
gccctatcttgacatgagagtgttt

SEQ ID NO: 1002452 - DNA, 25 bp, Homo sapien
ccctatcttgacatgagagtgtttt

SEQ ID NO: 1002453 - DNA, 25 bp, Homo sapien
aattctagattattgtagatgcaag

SEQ ID NO: 1002454 - DNA, 25 bp, Homo sapien
attctagattattgtagatgcaagg

SEQ ID NO: 1002455 - DNA, 25 bp, Homo sapien
ttgcaccataatgacaggtggaggg

SEQ ID NO: 1002456 - DNA, 25 bp, Homo sapien
ccatcttttgtatacttgaagctca

SEQ ID NO: 1002457 - DNA, 25 bp, Homo sapien
catcttttgtatacttgaagctcac

SEQ ID NO: 1002458 - DNA, 25 bp, Homo sapien
cacattttgcaccataatgacaggt

SEQ ID NO: 1002459 - DNA, 25 bp, Homo sapien
ttggcactgccatgaccaaacctcg

SEQ ID NO: 1002460 - DNA, 25 bp, Homo sapien
catgaccaaacctcgcaatgtagtt

SEQ ID NO: 1002461 - DNA, 25 bp, Homo sapien
actgccatgaccaaacctcgcaatg

SEQ ID NO: 1002462 - DNA, 25 bp, Homo sapien
ggccagcttggcactgccatgacca

SEQ ID NO: 1002463 - DNA, 25 bp, Homo sapien
ttgctcccagtgaaacctcttcatc

SEQ ID NO: 1002464 - DNA, 25 bp, Homo sapien
tgctcccagtgaaacctcttcatct

SEQ ID NO: 1002465 - DNA, 25 bp, Homo sapien
agtttcttgttgtgcatgtgaatga

SEQ ID NO: 1002466 - DNA, 25 bp, Homo sapien
tcagtttcttgttgtgcatgtgaat

SEQ ID NO: 1002467 - DNA, 25 bp, Homo sapien
cagtttcttgttgtgcatgtgaatg

SEQ ID NO: 1002468 - DNA, 25 bp, Homo sapien
gtttcttgttgtgcatgtgaatgat

SEQ ID NO: 1002469 - DNA, 25 bp, Homo sapien
tgtggcgagacagcctgagtttcct

SEQ ID NO: 1002470 - DNA, 25 bp, Homo sapien
gccacgactcgacaatctaactgta

SEQ ID NO: 1002471 - DNA, 25 bp, Homo sapien
tcctggctgttagcaagcacctaag

SEQ ID NO: 1002472 - DNA, 25 bp, Homo sapien
tatttggacgcctttcagtgtggcg

SEQ ID NO: 1002473 - DNA, 25 bp, Homo sapien
cacgcaagcatctaggtccaggtgg

SEQ ID NO: 1002474 - DNA, 25 bp, Homo sapien
cgcaagcatctaggtccaggtggtt

SEQ ID NO: 1002475 - DNA, 25 bp, Homo sapien
aaccacacgcaagcatctaggtcca

SEQ ID NO: 1002476 - DNA, 25 bp, Homo sapien
cacacgcaagcatctaggtccaggt

SEQ ID NO: 1002477 - DNA, 25 bp, Homo sapien
gagtttatgagccttgtgcactgaa

SEQ ID NO: 1002478 - DNA, 25 bp, Homo sapien
tagcgagggatagactctaaagctc

SEQ ID NO: 1002479 - DNA, 25 bp, Homo sapien
tttaggctctatacctcagagggaa

SEQ ID NO: 1002480 - DNA, 25 bp, Homo sapien
tataaggacagttcgaggcaaggct

SEQ ID NO: 1002481 - DNA, 25 bp, Homo sapien
gtccatgcaagatccgcgaggccct

SEQ ID NO: 1002482 - DNA, 25 bp, Homo sapien
aggtgtgaaacccagtccatgcaag

SEQ ID NO: 1002483 - DNA, 25 bp, Homo sapien
ctcctccaggcgctcgtagagctcc

SEQ ID NO: 1002484 - DNA, 25 bp, Homo sapien
ccaggcgctcgtagagctccatgag

SEQ ID NO: 1002485 - DNA, 25 bp, Homo sapien
ttctccagcatggcccgctctgtgt

SEQ ID NO: 1002486 - DNA, 25 bp, Homo sapien
cgcttcccaatagcagagagcagca

SEQ ID NO: 1002487 - DNA, 25 bp, Homo sapien
gggcacttcacgcttcccaatagca

SEQ ID NO: 1002488 - DNA, 25 bp, Homo sapien
tcagggatgggcacttcacgcttcc

SEQ ID NO: 1002489 - DNA, 25 bp, Homo sapien
ttcacgcttcccaatagcagagagc

SEQ ID NO: 1002490 - DNA, 25 bp, Homo sapien
tcccacctccccttccaaggcctca

SEQ ID NO: 1002491 - DNA, 25 bp, Homo sapien
ttgatgatgtgaacatcagtactgt

SEQ ID NO: 1002492 - DNA, 25 bp, Homo sapien
tgatgtgaacatcagtactgttggg

SEQ ID NO: 1002493 - DNA, 25 bp, Homo sapien
aacgacggcctgagtttaattccag

SEQ ID NO: 1002494 - DNA, 25 bp, Homo sapien
aaccaatgaggccataacgacggcc

SEQ ID NO: 1002495 - DNA, 25 bp, Homo sapien
tgccattggcctcattcttctctgc

SEQ ID NO: 1002496 - DNA, 25 bp, Homo sapien
tgtggtctctctgccattggcctca

SEQ ID NO: 1002497 - DNA, 25 bp, Homo sapien
cattggcctcattcttctctgccac

SEQ ID NO: 1002498 - DNA, 25 bp, Homo sapien
ctgtggtctctctgccattggcctc

SEQ ID NO: 1002499 - DNA, 25 bp, Homo sapien
cgctgtcgagctttggcagcctcct

SEQ ID NO: 1002500 - DNA, 25 bp, Homo sapien
gccgctgtcgagctttggcagcctc

SEQ ID NO: 1002501 - DNA, 25 bp, Homo sapien
ggccgctgtcgagctttggcagcct

SEQ ID NO: 1002502 - DNA, 25 bp, Homo sapien
tgggccgctgtcgagctttggcagc

SEQ ID NO: 1002503 - DNA, 25 bp, Homo sapien
atgatgacccacaggggtaggttac

SEQ ID NO: 1002504 - DNA, 25 bp, Homo sapien
atgacccacaggggtaggttactgt

SEQ ID NO: 1002505 - DNA, 25 bp, Homo sapien
caggggtaggttactgttgtttcag

SEQ ID NO: 1002506 - DNA, 25 bp, Homo sapien
gtaggttactgttgtttcagggagc

SEQ ID NO: 1002507 - DNA, 25 bp, Homo sapien
cctctcaggaatcttcgtatcaaca

SEQ ID NO: 1002508 - DNA, 25 bp, Homo sapien
cctaaacttactagtaagaatgcct

SEQ ID NO: 1002509 - DNA, 25 bp, Homo sapien
ccatccctctcaggaatcttcgtat

SEQ ID NO: 1002510 - DNA, 25 bp, Homo sapien
cttactagtaagaatgcctgggccc

SEQ ID NO: 1002511 - DNA, 25 bp, Homo sapien
tcccgtccgtctcgggcctcttctc

SEQ ID NO: 1002512 - DNA, 25 bp, Homo sapien
ctcctcccgtccgtctcgggcctct

SEQ ID NO: 1002513 - DNA, 25 bp, Homo sapien
ctcccgtccgtctcgggcctcttct

SEQ ID NO: 1002514 - DNA, 25 bp, Homo sapien
cgtccgtctcgggcctcttctcgat

SEQ ID NO: 1002515 - DNA, 25 bp, Homo sapien
ctatgtatcccacagacctcgcggg

SEQ ID NO: 1002516 - DNA, 25 bp, Homo sapien
cagattgctcgttggataaaccggc

SEQ ID NO: 1002517 - DNA, 25 bp, Homo sapien
gaagtgtagtcctcaagttgcagcg

SEQ ID NO: 1002518 - DNA, 25 bp, Homo sapien
gctgctcggcctatgtcgcaacaga

SEQ ID NO: 1002519 - DNA, 25 bp, Homo sapien
ttttgagacgaacggcgaagactcg

SEQ ID NO: 1002520 - DNA, 25 bp, Homo sapien
gatgggattccacagccaattggga

SEQ ID NO: 1002521 - DNA, 25 bp, Homo sapien
tgtttacccagcactcacgaagatg

SEQ ID NO: 1002522 - DNA, 25 bp, Homo sapien
gatgaacgtacgtgcctggcaaaca

SEQ ID NO: 1002523 - DNA, 25 bp, Homo sapien
ggtaaaaccaggcaccgaatcgctc

SEQ ID NO: 1002524 - DNA, 25 bp, Homo sapien
tctctgatcgccgagaggtagcgca

SEQ ID NO: 1002525 - DNA, 25 bp, Homo sapien
gggttccgaggagaatgccctgcaa

SEQ ID NO: 1002526 - DNA, 25 bp, Homo sapien
cgcgcttctgtttgcgttcccagga

SEQ ID NO: 1002527 - DNA, 25 bp, Homo sapien
tcggctagaccaaagtgatgaagac

SEQ ID NO: 1002528 - DNA, 25 bp, Homo sapien
ccagattccagagctcggctagacc

SEQ ID NO: 1002529 - DNA, 25 bp, Homo sapien
tgcgactgagctccctgttggctct

SEQ ID NO: 1002530 - DNA, 25 bp, Homo sapien
gaagatccctgtgtcgaggctgtag

SEQ ID NO: 1002531 - DNA, 25 bp, Homo sapien
tgacgagtggcttggacgctgcctc

SEQ ID NO: 1002532 - DNA, 25 bp, Homo sapien
ggctttggctacctgttgtcacgga

SEQ ID NO: 1002533 - DNA, 25 bp, Homo sapien
caagacctgtacttaggccgggcag

SEQ ID NO: 1002534 - DNA, 25 bp, Homo sapien
tcattgactctctgggcgtcggctg

SEQ ID NO: 1002535 - DNA, 25 bp, Homo sapien
ttggagcgggcttacagtgaaatag

SEQ ID NO: 1002536 - DNA, 25 bp, Homo sapien
actggccaaaaatagggaccctgag

SEQ ID NO: 1002537 - DNA, 25 bp, Homo sapien
aacgcttcagcgctctggagttgga

SEQ ID NO: 1002538 - DNA, 25 bp, Homo sapien
gggcagcagtatcgctcatttgaac

SEQ ID NO: 1002539 - DNA, 25 bp, Homo sapien
tcctggagccacgagaacatgcatt

SEQ ID NO: 1002540 - DNA, 25 bp, Homo sapien
actgagccgggtggaaatcctacct

SEQ ID NO: 1002541 - DNA, 25 bp, Homo sapien
tgggactacttcacagagcagcaca

SEQ ID NO: 1002542 - DNA, 25 bp, Homo sapien
aatgtgtgacacagcgtgggcaccg

SEQ ID NO: 1002543 - DNA, 25 bp, Homo sapien
tctttcgggccgtagagccagggct

SEQ ID NO: 1002544 - DNA, 25 bp, Homo sapien
gcaggagcaggccaatagcacttag

SEQ ID NO: 1002545 - DNA, 25 bp, Homo sapien
tgcagcccacggctcagtgaagaac

SEQ ID NO: 1002546 - DNA, 25 bp, Homo sapien
tctacaacgctgactacctggcggc

SEQ ID NO: 1002547 - DNA, 25 bp, Homo sapien
tggtggacagatagagaattgttgc

SEQ ID NO: 1002548 - DNA, 25 bp, Homo sapien
taaacatgtcttctgccaaactgtt

SEQ ID NO: 1002549 - DNA, 25 bp, Homo sapien
gaaaattgagtaaggagaagaatcc

SEQ ID NO: 1002550 - DNA, 25 bp, Homo sapien
ggagtcgtcccgagggacccactgc

SEQ ID NO: 1002551 - DNA, 25 bp, Homo sapien
aatgacttttaatccagccccacac

SEQ ID NO: 1002552 - DNA, 25 bp, Homo sapien
gctgaaagttccgtcgtgctgctta

SEQ ID NO: 1002553 - DNA, 25 bp, Homo sapien
agttccgtcgtgctgcttatttttg

SEQ ID NO: 1002554 - DNA, 25 bp, Homo sapien
ggacacggctgaaagttccgtcgtg

SEQ ID NO: 1002555 - DNA, 25 bp, Homo sapien
ctaggtgttgcgcacaaccagcgac

SEQ ID NO: 1002556 - DNA, 25 bp, Homo sapien
aggtgttgcgcacaaccagcgactg

SEQ ID NO: 1002557 - DNA, 25 bp, Homo sapien
gtgttgcgcacaaccagcgactgct

SEQ ID NO: 1002558 - DNA, 25 bp, Homo sapien
tgttgcgcacaaccagcgactgctc

SEQ ID NO: 1002559 - DNA, 25 bp, Homo sapien
gtgtcagtgttctggtgagtgatca

SEQ ID NO: 1002560 - DNA, 25 bp, Homo sapien
tctggtgagtgatcaggacaatccc

SEQ ID NO: 1002561 - DNA, 25 bp, Homo sapien
tgatcaggacaatcccacctactga

SEQ ID NO: 1002562 - DNA, 25 bp, Homo sapien
tactgacaccgcctgccctgaaaga

SEQ ID NO: 1002563 - DNA, 25 bp, Homo sapien
cctcagggcaagggtccctgcatac

SEQ ID NO: 1002564 - DNA, 25 bp, Homo sapien
ccacaagctgaacagggaggtttct

SEQ ID NO: 1002565 - DNA, 25 bp, Homo sapien
gcctcagggcaagggtccctgcata

SEQ ID NO: 1002566 - DNA, 25 bp, Homo sapien
cacaagctgaacagggaggtttctc

SEQ ID NO: 1002567 - DNA, 25 bp, Homo sapien
tggtggtagaactcagcccggcgct

SEQ ID NO: 1002568 - DNA, 25 bp, Homo sapien
actgacggcctcctgggaccagggc

SEQ ID NO: 1002569 - DNA, 25 bp, Homo sapien
tcctcttcagggttgccggctacat

SEQ ID NO: 1002570 - DNA, 25 bp, Homo sapien
tgcagtagaagtagcgactgacggc

SEQ ID NO: 1002571 - DNA, 25 bp, Homo sapien
ctgggagggagcgtggggtgagccc

SEQ ID NO: 1002572 - DNA, 25 bp, Homo sapien
ggagggagcgtggggtgagccctga

SEQ ID NO: 1002573 - DNA, 25 bp, Homo sapien
gggagcgtggggtgagccctgagcc

SEQ ID NO: 1002574 - DNA, 25 bp, Homo sapien
agccctgagccctgaatcccctcac

SEQ ID NO: 1002575 - DNA, 25 bp, Homo sapien
acaacgtttactctctttcccgctg

SEQ ID NO: 1002576 - DNA, 25 bp, Homo sapien
tttactctctttcccgctgtgcttg

SEQ ID NO: 1002577 - DNA, 25 bp, Homo sapien
tctctttcccgctgtgcttgtcttc

SEQ ID NO: 1002578 - DNA, 25 bp, Homo sapien
tttcccgctgtgcttgtcttccact

SEQ ID NO: 1002579 - DNA, 25 bp, Homo sapien
gaagtccctctggatcttgagctgg

SEQ ID NO: 1002580 - DNA, 25 bp, Homo sapien
gcggagcaggtcttggacatagcct

SEQ ID NO: 1002581 - DNA, 25 bp, Homo sapien
tctggagaagcttagcatgaagtcc

SEQ ID NO: 1002582 - DNA, 25 bp, Homo sapien
gatcttgagctggtttatggactca

SEQ ID NO: 1002583 - DNA, 25 bp, Homo sapien
ctcatctgcaaccacaccctggtct

SEQ ID NO: 1002584 - DNA, 25 bp, Homo sapien
tgctcatctgcaaccacaccctggt

SEQ ID NO: 1002585 - DNA, 25 bp, Homo sapien
tctcagaaaagtctcctctatcatc

SEQ ID NO: 1002586 - DNA, 25 bp, Homo sapien
gtctcagaaaagtctcctctatcat

SEQ ID NO: 1002587 - DNA, 25 bp, Homo sapien
gagcactgatctcctgctggttggc

SEQ ID NO: 1002588 - DNA, 25 bp, Homo sapien
gctgctcatctgcccctttaatggc

SEQ ID NO: 1002589 - DNA, 25 bp, Homo sapien
gctggttggccgtggataggaggaa

SEQ ID NO: 1002590 - DNA, 25 bp, Homo sapien
acctccacgtcaatgtcatagcacg

SEQ ID NO: 1002591 - DNA, 25 bp, Homo sapien
agggaaggcaggaacgagatcattc

SEQ ID NO: 1002592 - DNA, 25 bp, Homo sapien
aagtccagcccttcgtgtccacgat

SEQ ID NO: 1002593 - DNA, 25 bp, Homo sapien
tccctggtctgagaagcaagctggg

SEQ ID NO: 1002594 - DNA, 25 bp, Homo sapien
gaacgagatcattccctggtctgag

SEQ ID NO: 1002595 - DNA, 25 bp, Homo sapien
atggttgatgacaattgggtcaggg

SEQ ID NO: 1002596 - DNA, 25 bp, Homo sapien
cagaaaacttcagccggggacaatc

SEQ ID NO: 1002597 - DNA, 25 bp, Homo sapien
acttcagccggggacaatcaaaaat

SEQ ID NO: 1002598 - DNA, 25 bp, Homo sapien
cagggggcaatagcagggctgtgag

SEQ ID NO: 1002599 - DNA, 25 bp, Homo sapien
gagagagagatcactcttcttgaag

SEQ ID NO: 1002600 - DNA, 25 bp, Homo sapien
gagatcactcttcttgaagagatca

SEQ ID NO: 1002601 - DNA, 25 bp, Homo sapien
actcttcttgaagagatcatcatgc

SEQ ID NO: 1002602 - DNA, 25 bp, Homo sapien
cttcttgaagagatcatcatgcagt

SEQ ID NO: 1002603 - DNA, 25 bp, Homo sapien
ctaacatggattggctgcagcacag

SEQ ID NO: 1002604 - DNA, 25 bp, Homo sapien
gaatcgctgagtcacttacccagag

SEQ ID NO: 1002605 - DNA, 25 bp, Homo sapien
gcacagagctaatccacagtagggc

SEQ ID NO: 1002606 - DNA, 25 bp, Homo sapien
tagggcctgaactagaatcctggtc

SEQ ID NO: 1002607 - DNA, 25 bp, Homo sapien
ttggtagaggtacttcccctgctgg

SEQ ID NO: 1002608 - DNA, 25 bp, Homo sapien
cctgcagcctgttggtcttcacata

SEQ ID NO: 1002609 - DNA, 25 bp, Homo sapien
tggaaatacttgtccccattgatgt

SEQ ID NO: 1002610 - DNA, 25 bp, Homo sapien
cagcctgttggtcttcacatactgc

SEQ ID NO: 1002611 - DNA, 25 bp, Homo sapien
ttgtccccattgatgtattccttgt

SEQ ID NO: 1002612 - DNA, 25 bp, Homo sapien
ggcgtgtacggggcagcatggcagg

SEQ ID NO: 1002613 - DNA, 25 bp, Homo sapien
cactttgggacctagccctgccctg

SEQ ID NO: 1002614 - DNA, 25 bp, Homo sapien
tgccctgagggccttgtgtggcgtg

SEQ ID NO: 1002615 - DNA, 25 bp, Homo sapien
tgagggccttgtgtggcgtgtacgg

SEQ ID NO: 1002616 - DNA, 25 bp, Homo sapien
ctcaggtccccaggccgtttcacct

SEQ ID NO: 1002617 - DNA, 25 bp, Homo sapien
tccgtctcctgggtcgtgggtgtcc

SEQ ID NO: 1002618 - DNA, 25 bp, Homo sapien
cctgggtcgtgggtgtccgatgcca

SEQ ID NO: 1002619 - DNA, 25 bp, Homo sapien
cagcgtgcagcgcacactcaggtcc

SEQ ID NO: 1002620 - DNA, 25 bp, Homo sapien
gagaacttccgcttctgtttgctgg

SEQ ID NO: 1002621 - DNA, 25 bp, Homo sapien
tctttgtccagctcgatgaccaaac

SEQ ID NO: 1002622 - DNA, 25 bp, Homo sapien
ggttgtcagggccataaagatcttt

SEQ ID NO: 1002623 - DNA, 25 bp, Homo sapien
gctcgatgaccaaactcttgaagaa

SEQ ID NO: 1002624 - DNA, 25 bp, Homo sapien
ttggaatgtctctaggcctgcccct

SEQ ID NO: 1002625 - DNA, 25 bp, Homo sapien
gactccctagcccttagtgcagaca

SEQ ID NO: 1002626 - DNA, 25 bp, Homo sapien
gacaccttgttctgttctcagtgca

SEQ ID NO: 1002627 - DNA, 25 bp, Homo sapien
ggcagtgggcttagatgaaatcctc

SEQ ID NO: 1002628 - DNA, 25 bp, Homo sapien
tgccgtcggaatcctcagcatcagg

SEQ ID NO: 1002629 - DNA, 25 bp, Homo sapien
aaagtgttggagatatagagtcgca

SEQ ID NO: 1002630 - DNA, 25 bp, Homo sapien
tatagagtcgcagcttccgcttttg

SEQ ID NO: 1002631 - DNA, 25 bp, Homo sapien
cagcatcaggcttcgcagggttaaa

SEQ ID NO: 1002632 - DNA, 25 bp, Homo sapien
tgtccacccgcttccgcatgatggt

SEQ ID NO: 1002633 - DNA, 25 bp, Homo sapien
ccaagaggtccatgtaagcctggga

SEQ ID NO: 1002634 - DNA, 25 bp, Homo sapien
aggtccatgtaagcctgggactcgg

SEQ ID NO: 1002635 - DNA, 25 bp, Homo sapien
gcatgatggtttgatccagtttcct

SEQ ID NO: 1002636 - DNA, 25 bp, Homo sapien
agtccagggttgtaccatggaatgt

SEQ ID NO: 1002637 - DNA, 25 bp, Homo sapien
gggttgtaccatggaatgtatgcat

SEQ ID NO: 1002638 - DNA, 25 bp, Homo sapien
cagggttgtaccatggaatgtatgc

SEQ ID NO: 1002639 - DNA, 25 bp, Homo sapien
tgtaccatggaatgtatgcatgttg

SEQ ID NO: 1002640 - DNA, 25 bp, Homo sapien
ctttgagggaggattttgtcagcca

SEQ ID NO: 1002641 - DNA, 25 bp, Homo sapien
ttgagggaggattttgtcagccatc

SEQ ID NO: 1002642 - DNA, 25 bp, Homo sapien
cctttgagggaggattttgtcagcc

SEQ ID NO: 1002643 - DNA, 25 bp, Homo sapien
gagggaggattttgtcagccatctt

SEQ ID NO: 1002644 - DNA, 25 bp, Homo sapien
cggctgccgacgccgcagcctgtct

SEQ ID NO: 1002645 - DNA, 25 bp, Homo sapien
cgggggcgctgctcgcttgcgggcg

SEQ ID NO: 1002646 - DNA, 25 bp, Homo sapien
ctgctcgcttgcgggcgggctccat

SEQ ID NO: 1002647 - DNA, 25 bp, Homo sapien
ttgcgggcgggctccatgcccgcgg

SEQ ID NO: 1002648 - DNA, 25 bp, Homo sapien
tgcgggcgggctccatgcccgcggg

SEQ ID NO: 1002649 - DNA, 25 bp, Homo sapien
ggtggggcatccgggctccagacgg

SEQ ID NO: 1002650 - DNA, 25 bp, Homo sapien
ggggctgcccatgtacggggagccc

SEQ ID NO: 1002651 - DNA, 25 bp, Homo sapien
gctgcccatgtacggggagcccggg

SEQ ID NO: 1002652 - DNA, 25 bp, Homo sapien
ggggcatccgggctccagacggcat

SEQ ID NO: 1002653 - DNA, 25 bp, Homo sapien
gtgaccctgagcgttgagcgatggg

SEQ ID NO: 1002654 - DNA, 25 bp, Homo sapien
tggctgcaggaagctaactgaagcc

SEQ ID NO: 1002655 - DNA, 25 bp, Homo sapien
accgcacagggcattgcgagcctcg

SEQ ID NO: 1002656 - DNA, 25 bp, Homo sapien
gaatctgcgcggctctggcggaggg

SEQ ID NO: 1002657 - DNA, 25 bp, Homo sapien
ccccacttgacggatggggccactg

SEQ ID NO: 1002658 - DNA, 25 bp, Homo sapien
gaaaaatgacctcgccaaggtcaca

SEQ ID NO: 1002659 - DNA, 25 bp, Homo sapien
ctttcatccccacttgacggatggg

SEQ ID NO: 1002660 - DNA, 25 bp, Homo sapien
aaggagaaaaatgacctcgccaagg

SEQ ID NO: 1002661 - DNA, 25 bp, Homo sapien
cccgagccagctcgcttgccctccc

SEQ ID NO: 1002662 - DNA, 25 bp, Homo sapien
cagcccgagccagctcgcttgccct

SEQ ID NO: 1002663 - DNA, 25 bp, Homo sapien
agcccgagccagctcgcttgccctc

SEQ ID NO: 1002664 - DNA, 25 bp, Homo sapien
gcccgagccagctcgcttgccctcc

SEQ ID NO: 1002665 - DNA, 25 bp, Homo sapien
aaagtttgcttttcgtggctttgcg

SEQ ID NO: 1002666 - DNA, 25 bp, Homo sapien
gtttgcttttcgtggctttgcgcgc

SEQ ID NO: 1002667 - DNA, 25 bp, Homo sapien
ctccggcaacttcgtccgcggccat

SEQ ID NO: 1002668 - DNA, 25 bp, Homo sapien
gcttttcgtggctttgcgcgcccct

SEQ ID NO: 1002669 - DNA, 25 bp, Homo sapien
aaacagcgcagataagcggcgaggc

SEQ ID NO: 1002670 - DNA, 25 bp, Homo sapien
cacacttctactcgagcggagtggg

SEQ ID NO: 1002671 - DNA, 25 bp, Homo sapien
gcattcctgcactgataagacagaa

SEQ ID NO: 1002672 - DNA, 25 bp, Homo sapien
taagacagaaatagtccggcggccc

SEQ ID NO: 1002673 - DNA, 25 bp, Homo sapien
gatgtttctgtacccccgacactct

SEQ ID NO: 1002674 - DNA, 25 bp, Homo sapien
ctctgctgctatcaagggggctgtc

SEQ ID NO: 1002675 - DNA, 25 bp, Homo sapien
tgttgggatgtttctgtacccccga

SEQ ID NO: 1002676 - DNA, 25 bp, Homo sapien
ctatcaagggggctgtctctctgtg

SEQ ID NO: 1002677 - DNA, 25 bp, Homo sapien
gaattgggcagtgccctgacctgct

SEQ ID NO: 1002678 - DNA, 25 bp, Homo sapien
ctctgctggcgggcaatagggccac

SEQ ID NO: 1002679 - DNA, 25 bp, Homo sapien
ctggcgggcaatagggccacgtcca

SEQ ID NO: 1002680 - DNA, 25 bp, Homo sapien
gggaccctgaattgggcagtgccct

SEQ ID NO: 1002681 - DNA, 25 bp, Homo sapien
gggaatgccgtttcctccctggagc

SEQ ID NO: 1002682 - DNA, 25 bp, Homo sapien
acttgggatctgctcatgtcgggcc

SEQ ID NO: 1002683 - DNA, 25 bp, Homo sapien
tgcatccagatgttggctgccaggg

SEQ ID NO: 1002684 - DNA, 25 bp, Homo sapien
tgtggcttctggtcgacttgggatc

SEQ ID NO: 1002685 - DNA, 25 bp, Homo sapien
ggtgccacttggtgctaggtttgga

SEQ ID NO: 1002686 - DNA, 25 bp, Homo sapien
tggtgccacttggtgctaggtttgg

SEQ ID NO: 1002687 - DNA, 25 bp, Homo sapien
gtgccacttggtgctaggtttggag

SEQ ID NO: 1002688 - DNA, 25 bp, Homo sapien
ggagaacttggaggatccaactggc

SEQ ID NO: 1002689 - DNA, 25 bp, Homo sapien
gactagatcctagcccagagactgt

SEQ ID NO: 1002690 - DNA, 25 bp, Homo sapien
tcaaggccgaagctgtaaccacaac

SEQ ID NO: 1002691 - DNA, 25 bp, Homo sapien
ttctgagggatctaaatcaaggccg

SEQ ID NO: 1002692 - DNA, 25 bp, Homo sapien
ggtagcctgtgtctagactagatcc

SEQ ID NO: 1002693 - DNA, 25 bp, Homo sapien
tgcccactgaatggatctaaagtgt

SEQ ID NO: 1002694 - DNA, 25 bp, Homo sapien
ttactggctgctattactctgcccc

SEQ ID NO: 1002695 - DNA, 25 bp, Homo sapien
aaagcccacaatgatccctcagtct

SEQ ID NO: 1002696 - DNA, 25 bp, Homo sapien
acttcactctttcacttcctgcagg

SEQ ID NO: 1002697 - DNA, 25 bp, Homo sapien
gatggttaggagtccagccacagct

SEQ ID NO: 1002698 - DNA, 25 bp, Homo sapien
tggaaagtcaagaaaccgaacgcgc

SEQ ID NO: 1002699 - DNA, 25 bp, Homo sapien
tatgagtcaccaaggattcccacac

SEQ ID NO: 1002700 - DNA, 25 bp, Homo sapien
ccgaacgcgctatcccaaaatgtgg

SEQ ID NO: 1002701 - DNA, 25 bp, Homo sapien
ataagggtgggacgtttgcttggag

SEQ ID NO: 1002702 - DNA, 25 bp, Homo sapien
gataagggtgggacgtttgcttgga

SEQ ID NO: 1002703 - DNA, 25 bp, Homo sapien
aaccaccacaaactgagcaaccagt

SEQ ID NO: 1002704 - DNA, 25 bp, Homo sapien
atttcagctaaaacaccaaccacca

SEQ ID NO: 1002705 - DNA, 25 bp, Homo sapien
cacggtgggtgggtgctgaagacct

SEQ ID NO: 1002706 - DNA, 25 bp, Homo sapien
ggtgggtgctgaagacctggagtca

SEQ ID NO: 1002707 - DNA, 25 bp, Homo sapien
ctgtaccacggtgggtgggtgctga

SEQ ID NO: 1002708 - DNA, 25 bp, Homo sapien
gggtgggtgctgaagacctggagtc

SEQ ID NO: 1002709 - DNA, 25 bp, Homo sapien
gagtcatccagtgccccctcggtgc

SEQ ID NO: 1002710 - DNA, 25 bp, Homo sapien
ctcggtgcctgggcccggagcccac

SEQ ID NO: 1002711 - DNA, 25 bp, Homo sapien
gcagcaccaagggccattctgagga

SEQ ID NO: 1002712 - DNA, 25 bp, Homo sapien
gcagggtcctgcacctggagagtca

SEQ ID NO: 1002713 - DNA, 25 bp, Homo sapien
aaaggagaggtcagaccctgagccc

SEQ ID NO: 1002714 - DNA, 25 bp, Homo sapien
tgagccccagcgtagattcaaggag

SEQ ID NO: 1002715 - DNA, 25 bp, Homo sapien
ccaaactccccggagtggaggtctg

SEQ ID NO: 1002716 - DNA, 25 bp, Homo sapien
gcctaggatggaggcaaccagcatg

SEQ ID NO: 1002717 - DNA, 25 bp, Homo sapien
ggtcaggatggtaactgggatggcc

SEQ ID NO: 1002718 - DNA, 25 bp, Homo sapien
caggtcaggatggtaactgggatgg

SEQ ID NO: 1002719 - DNA, 25 bp, Homo sapien
tcaggatggtaactgggatggccct

SEQ ID NO: 1002720 - DNA, 25 bp, Homo sapien
ccagttttgggggtgtggcaatggt

SEQ ID NO: 1002721 - DNA, 25 bp, Homo sapien
gcctccagctcgttgggtcaggacc

SEQ ID NO: 1002722 - DNA, 25 bp, Homo sapien
ctggtccctgctagtgcctgctctg

SEQ ID NO: 1002723 - DNA, 25 bp, Homo sapien
atgactaccagctggcctaggcgcc

SEQ ID NO: 1002724 - DNA, 25 bp, Homo sapien
tgggagctaagaagagagcagtgct

SEQ ID NO: 1002725 - DNA, 25 bp, Homo sapien
taataatgagttagggaccggagca

SEQ ID NO: 1002726 - DNA, 25 bp, Homo sapien
gacccgttgtgatcttcagcctgta

SEQ ID NO: 1002727 - DNA, 25 bp, Homo sapien
tggctgcagacattacctagacgag

SEQ ID NO: 1002728 - DNA, 25 bp, Homo sapien
cacaaacggttgtcctcacacagat

SEQ ID NO: 1002729 - DNA, 25 bp, Homo sapien
tgggtccatcaagcctcagggccat

SEQ ID NO: 1002730 - DNA, 25 bp, Homo sapien
ctttgggtccatcaagcctcagggc

SEQ ID NO: 1002731 - DNA, 25 bp, Homo sapien
ggctttgggtccatcaagcctcagg

SEQ ID NO: 1002732 - DNA, 25 bp, Homo sapien
cctgggaggctttgggtccatcaag

SEQ ID NO: 1002733 - DNA, 25 bp, Homo sapien
ccttttatgtactcaatacttaaat

SEQ ID NO: 1002734 - DNA, 25 bp, Homo sapien
agacattcatctgcaggtcatctgc

SEQ ID NO: 1002735 - DNA, 25 bp, Homo sapien
gcagcctttcaggaataaacactca

SEQ ID NO: 1002736 - DNA, 25 bp, Homo sapien
catcgcagggcgtccggttgtggga

SEQ ID NO: 1002737 - DNA, 25 bp, Homo sapien
gccatttgcagtttgactcaggatc

SEQ ID NO: 1002738 - DNA, 25 bp, Homo sapien
ggtcctgacggtctcagcagcaggc

SEQ ID NO: 1002739 - DNA, 25 bp, Homo sapien
caaggtcctgacggtctcagcagca

SEQ ID NO: 1002740 - DNA, 25 bp, Homo sapien
aaggtcctgacggtctcagcagcag

SEQ ID NO: 1002741 - DNA, 25 bp, Homo sapien
tcctgacggtctcagcagcaggctg

SEQ ID NO: 1002742 - DNA, 25 bp, Homo sapien
gggtccctatacatattgtcatggc

SEQ ID NO: 1002743 - DNA, 25 bp, Homo sapien
cacatgtcctaattggacttggagt

SEQ ID NO: 1002744 - DNA, 25 bp, Homo sapien
tcagcaacaatagtatcaagtcatt

SEQ ID NO: 1002745 - DNA, 25 bp, Homo sapien
tcaagtcattttagccagaagcccc

SEQ ID NO: 1002746 - DNA, 25 bp, Homo sapien
tttcatcgtattcgtcaaactcatc

SEQ ID NO: 1002747 - DNA, 25 bp, Homo sapien
gggtttcatcgtattcgtcaaactc

SEQ ID NO: 1002748 - DNA, 25 bp, Homo sapien
catcgtattcgtcaaactcatctcg

SEQ ID NO: 1002749 - DNA, 25 bp, Homo sapien
tattcgtcaaactcatctcgaactc

SEQ ID NO: 1002750 - DNA, 25 bp, Homo sapien
gaaatgtcactgtggcaaggcaccc

SEQ ID NO: 1002751 - DNA, 25 bp, Homo sapien
catggccaggtagtttgcatctaga

SEQ ID NO: 1002752 - DNA, 25 bp, Homo sapien
tcttgggactgatcgatgccagcac

SEQ ID NO: 1002753 - DNA, 25 bp, Homo sapien
tcagagggcagtccgctgagtgctc

SEQ ID NO: 1002754 - DNA, 25 bp, Homo sapien
agcccttttgagtcttctgctcagt

SEQ ID NO: 1002755 - DNA, 25 bp, Homo sapien
gcccttttgagtcttctgctcagta

SEQ ID NO: 1002756 - DNA, 25 bp, Homo sapien
gatacatttttcttgccgcacccac

SEQ ID NO: 1002757 - DNA, 25 bp, Homo sapien
ggcaggaaatctcaacacgactgtg

SEQ ID NO: 1002758 - DNA, 25 bp, Homo sapien
ccgtagatttggagaaagcacccct

SEQ ID NO: 1002759 - DNA, 25 bp, Homo sapien
gagaagttcggccacatgcccattg

SEQ ID NO: 1002760 - DNA, 25 bp, Homo sapien
tgctagtcatagaaccccatcagtg

SEQ ID NO: 1002761 - DNA, 25 bp, Homo sapien
gaacatgaatgccttgtcagagccg

SEQ ID NO: 1002762 - DNA, 25 bp, Homo sapien
cctggaacagctggaatgccttgat

SEQ ID NO: 1002763 - DNA, 25 bp, Homo sapien
tcatgttgcccctctggagaccaag

SEQ ID NO: 1002764 - DNA, 25 bp, Homo sapien
ctgctgtggtggcaaacggtcccct

SEQ ID NO: 1002765 - DNA, 25 bp, Homo sapien
ttttcacatgctgcagtctccttag

SEQ ID NO: 1002766 - DNA, 25 bp, Homo sapien
gtctccttagttttgtttcctgctg

SEQ ID NO: 1002767 - DNA, 25 bp, Homo sapien
cgcgcctggccgaaacttgtctttt

SEQ ID NO: 1002768 - DNA, 25 bp, Homo sapien
ggttgccaccttagcccattcaggg

SEQ ID NO: 1002769 - DNA, 25 bp, Homo sapien
caatgtcccacagaaagtgagctcc

SEQ ID NO: 1002770 - DNA, 25 bp, Homo sapien
tgagcttcttgtgattgggcagcct

SEQ ID NO: 1002771 - DNA, 25 bp, Homo sapien
tgtcatccagtcacaacaagggcca

SEQ ID NO: 1002772 - DNA, 25 bp, Homo sapien
tagcagaataaggagctggtgcctc

SEQ ID NO: 1002773 - DNA, 25 bp, Homo sapien
tctgaaagggatgggctactccacg

SEQ ID NO: 1002774 - DNA, 25 bp, Homo sapien
tgactggaatgacggagcctgctgc

SEQ ID NO: 1002775 - DNA, 25 bp, Homo sapien
taggtaatgcccaggtccgctggct

SEQ ID NO: 1002776 - DNA, 25 bp, Homo sapien
tccatcgtacatgttggcaaaggga

SEQ ID NO: 1002777 - DNA, 25 bp, Homo sapien
gaagcatatcgaatcctcagtaggg

SEQ ID NO: 1002778 - DNA, 25 bp, Homo sapien
agtgacagcaggttgggatccagac

SEQ ID NO: 1002779 - DNA, 25 bp, Homo sapien
gacaaactcagagcacacgtggtga

SEQ ID NO: 1002780 - DNA, 25 bp, Homo sapien
cctgagctgcttgagacctttctgt

SEQ ID NO: 1002781 - DNA, 25 bp, Homo sapien
tctgtagctctgacaaaacctgttt

SEQ ID NO: 1002782 - DNA, 25 bp, Homo sapien
tattcgaagggactgatgggtctca

SEQ ID NO: 1002783 - DNA, 25 bp, Homo sapien
cattttaagtctagagggcatgacg

SEQ ID NO: 1002784 - DNA, 25 bp, Homo sapien
tacgctcacattgcacagaagcatg

SEQ ID NO: 1002785 - DNA, 25 bp, Homo sapien
tttgtatcccaagtgacggctctgt

SEQ ID NO: 1002786 - DNA, 25 bp, Homo sapien
catgggttttgatgcactcgtggcc

SEQ ID NO: 1002787 - DNA, 25 bp, Homo sapien
taaacatgagagtcggctgtccact

SEQ ID NO: 1002788 - DNA, 25 bp, Homo sapien
tgtgtcggctccagcagtaaccgtc

SEQ ID NO: 1002789 - DNA, 25 bp, Homo sapien
tgccaggtgcatccaagactttccc

SEQ ID NO: 1002790 - DNA, 25 bp, Homo sapien
tctgctgtgaaagatgccgcacgcc

SEQ ID NO: 1002791 - DNA, 25 bp, Homo sapien
taacaaatcgctgtcctgcgcttgg

SEQ ID NO: 1002792 - DNA, 25 bp, Homo sapien
tgcgctatgtccagaatgggctgcc

SEQ ID NO: 1002793 - DNA, 25 bp, Homo sapien
caaaactcttccgtgtcttgtgaag

SEQ ID NO: 1002794 - DNA, 25 bp, Homo sapien
tttttagccatcatagaagcaatgc

SEQ ID NO: 1002795 - DNA, 25 bp, Homo sapien
ctgctccaccggacaggcggtagag

SEQ ID NO: 1002796 - DNA, 25 bp, Homo sapien
cacaatggtgtgcacaactggtcag

SEQ ID NO: 1002797 - DNA, 25 bp, Homo sapien
tgacatgttcatgggctgccagaag

SEQ ID NO: 1002798 - DNA, 25 bp, Homo sapien
tatgtcctatgggtagctcctgtcc

SEQ ID NO: 1002799 - DNA, 25 bp, Homo sapien
tcattcatagcaaggcgacagtggt

SEQ ID NO: 1002800 - DNA, 25 bp, Homo sapien
tgttttgggtccatgccccactggg

SEQ ID NO: 1002801 - DNA, 25 bp, Homo sapien
tctggatggcttgatgcatgctcca

SEQ ID NO: 1002802 - DNA, 25 bp, Homo sapien
ccccactgggtttctctggatggct

SEQ ID NO: 1002803 - DNA, 25 bp, Homo sapien
aatgcaaagtgagtgcagcgcccgt

SEQ ID NO: 1002804 - DNA, 25 bp, Homo sapien
tcttcggcaagcaggagtcagtgtg

SEQ ID NO: 1002805 - DNA, 25 bp, Homo sapien
gaaccgtcccttcagcacgatggaa

SEQ ID NO: 1002806 - DNA, 25 bp, Homo sapien
tctggtaggtatgccccttgtggca

SEQ ID NO: 1002807 - DNA, 25 bp, Homo sapien
caggcagcactcaaggcggttctct

SEQ ID NO: 1002808 - DNA, 25 bp, Homo sapien
gggttctcctgcaccgatctgcttg

SEQ ID NO: 1002809 - DNA, 25 bp, Homo sapien
ccccgaggtctgtgtgtgcttaagt

SEQ ID NO: 1002810 - DNA, 25 bp, Homo sapien
aagtctcacccggagaacagtgcat

SEQ ID NO: 1002811 - DNA, 25 bp, Homo sapien
aacagtgcatggtgccgtttctgcg

SEQ ID NO: 1002812 - DNA, 25 bp, Homo sapien
cagggtttggaggtttggcctagag

SEQ ID NO: 1002813 - DNA, 25 bp, Homo sapien
gagttacagcgcctgcgtcctttcc

SEQ ID NO: 1002814 - DNA, 25 bp, Homo sapien
aggtttggcctagaggagttacagc

SEQ ID NO: 1002815 - DNA, 25 bp, Homo sapien
ttccttcctactgcccacagtgcaa

SEQ ID NO: 1002816 - DNA, 25 bp, Homo sapien
ttaagactatgaagcgcatgctgct

SEQ ID NO: 1002817 - DNA, 25 bp, Homo sapien
ctctctgcagcgagatgatgagctc

SEQ ID NO: 1002818 - DNA, 25 bp, Homo sapien
gccccggccgtctctgatgaagtat

SEQ ID NO: 1002819 - DNA, 25 bp, Homo sapien
gcacatggatgcagaaagtggcacc

SEQ ID NO: 1002820 - DNA, 25 bp, Homo sapien
agggcccctcggcagactgagcccc

SEQ ID NO: 1002821 - DNA, 25 bp, Homo sapien
ctggcatgtgtgttgcgccttccag

SEQ ID NO: 1002822 - DNA, 25 bp, Homo sapien
ggcatgtgtgttgcgccttccagca

SEQ ID NO: 1002823 - DNA, 25 bp, Homo sapien
ctgcagggcccctcggcagactgag

SEQ ID NO: 1002824 - DNA, 25 bp, Homo sapien
gtccccaggactaggcctttcgcca

SEQ ID NO: 1002825 - DNA, 25 bp, Homo sapien
caaggccctcgagacggacgatttg

SEQ ID NO: 1002826 - DNA, 25 bp, Homo sapien
cacttttaacgttcaggctgtatat

SEQ ID NO: 1002827 - DNA, 25 bp, Homo sapien
caggttcagtggcttctgtaaaaag

SEQ ID NO: 1002828 - DNA, 25 bp, Homo sapien
agggcgagcactcccgctcccagcg

SEQ ID NO: 1002829 - DNA, 25 bp, Homo sapien
aaaccagacgcctgcgacgggctct

SEQ ID NO: 1002830 - DNA, 25 bp, Homo sapien
ccaccaccgcgggtagcagggcggg

SEQ ID NO: 1002831 - DNA, 25 bp, Homo sapien
ccaccaaagaaaaaccagacgcctg

SEQ ID NO: 1002832 - DNA, 25 bp, Homo sapien
caggccggctgcaggggcgcggcgg

SEQ ID NO: 1002833 - DNA, 25 bp, Homo sapien
tcaggccggctgcaggggcgcggcg

SEQ ID NO: 1002834 - DNA, 25 bp, Homo sapien
gctgcaggggcgcggcggcgcagcc

SEQ ID NO: 1002835 - DNA, 25 bp, Homo sapien
gcaggggcgcggcggcgcagcccac

SEQ ID NO: 1002836 - DNA, 25 bp, Homo sapien
cttgttgctgaagagccgcgagagg

SEQ ID NO: 1002837 - DNA, 25 bp, Homo sapien
cgcggggcacctcggagcccgcgca

SEQ ID NO: 1002838 - DNA, 25 bp, Homo sapien
gccgcggggcacctcggagcccgcg

SEQ ID NO: 1002839 - DNA, 25 bp, Homo sapien
gcggggcacctcggagcccgcgcac

SEQ ID NO: 1002840 - DNA, 25 bp, Homo sapien
ggccgcggggcacctcggagcccgc

SEQ ID NO: 1002841 - DNA, 25 bp, Homo sapien
tgcgaggcggtgtagagcacctggc

SEQ ID NO: 1002842 - DNA, 25 bp, Homo sapien
gggcgccgtcgtgcgaggcggtgta

SEQ ID NO: 1002843 - DNA, 25 bp, Homo sapien
cgcagggcgccgtcgtgcgaggcgg

SEQ ID NO: 1002844 - DNA, 25 bp, Homo sapien
gccgtcgtgcgaggcggtgtagagc

SEQ ID NO: 1002845 - DNA, 25 bp, Homo sapien
tccagactgcgcgtcgaaggcccgg

SEQ ID NO: 1002846 - DNA, 25 bp, Homo sapien
ctggatgcagttgatgatgaatgtg

SEQ ID NO: 1002847 - DNA, 25 bp, Homo sapien
tgatgaatgtgtggccccggaacac

SEQ ID NO: 1002848 - DNA, 25 bp, Homo sapien
gcagctctccagactgcgcgtcgaa

SEQ ID NO: 1002849 - DNA, 25 bp, Homo sapien
caggaaacgctcacagggaaatggg

SEQ ID NO: 1002850 - DNA, 25 bp, Homo sapien
gctgggctacctatctatctgaggg

SEQ ID NO: 1002851 - DNA, 25 bp, Homo sapien
gacttgatgcagacagttcacctgg

SEQ ID NO: 1002852 - DNA, 25 bp, Homo sapien
agcaggtaactacggtgggcagcta

SEQ ID NO: 1002853 - DNA, 25 bp, Homo sapien
caaatggcccgagagtgtgacaagt

SEQ ID NO: 1002854 - DNA, 25 bp, Homo sapien
tcacagagaggtatgtagaagccct

SEQ ID NO: 1002855 - DNA, 25 bp, Homo sapien
tgtgtcagacacctgaatcctgagg

SEQ ID NO: 1002856 - DNA, 25 bp, Homo sapien
cgtgttcaattagaggacccagact

SEQ ID NO: 1002857 - DNA, 25 bp, Homo sapien
agccagcacttgacggtcctgtccg

SEQ ID NO: 1002858 - DNA, 25 bp, Homo sapien
tctgtgggccgtgaacgtgcgcaca

SEQ ID NO: 1002859 - DNA, 25 bp, Homo sapien
gctgccagagtacacgagtcggttc

SEQ ID NO: 1002860 - DNA, 25 bp, Homo sapien
cccgcgtggtacttgagggcgctca

SEQ ID NO: 1002861 - DNA, 25 bp, Homo sapien
cagggaaggtcggcagctggggcag

SEQ ID NO: 1002862 - DNA, 25 bp, Homo sapien
ctggggcagctctgaagccccccag

SEQ ID NO: 1002863 - DNA, 25 bp, Homo sapien
agggaaggtcggcagctggggcagc

SEQ ID NO: 1002864 - DNA, 25 bp, Homo sapien
ctggtcagcagtcacggacgagaag

SEQ ID NO: 1002865 - DNA, 25 bp, Homo sapien
gcagtgacctggcgcgatggcacag

SEQ ID NO: 1002866 - DNA, 25 bp, Homo sapien
tcagcagtcacggacgagaaggcca

SEQ ID NO: 1002867 - DNA, 25 bp, Homo sapien
gcacaggagacaggcgcaggcttca

SEQ ID NO: 1002868 - DNA, 25 bp, Homo sapien
ccctcacgaccacgctctgggccac

SEQ ID NO: 1002869 - DNA, 25 bp, Homo sapien
tcccctcacgaccacgctctgggcc

SEQ ID NO: 1002870 - DNA, 25 bp, Homo sapien
ccactttccactgccggttccccat

SEQ ID NO: 1002871 - DNA, 25 bp, Homo sapien
cccctcacgaccacgctctgggcca

SEQ ID NO: 1002872 - DNA, 25 bp, Homo sapien
caagacgaaggacgtggcaagagca

SEQ ID NO: 1002873 - DNA, 25 bp, Homo sapien
acgtgctggcgcctagaccttggat

SEQ ID NO: 1002874 - DNA, 25 bp, Homo sapien
tcatccaagacgaaggacgtggcaa

SEQ ID NO: 1002875 - DNA, 25 bp, Homo sapien
tggcgcctagaccttggatttccca

SEQ ID NO: 1002876 - DNA, 25 bp, Homo sapien
gcaaaacgatttcagaggcgacaca

SEQ ID NO: 1002877 - DNA, 25 bp, Homo sapien
gcaatggaccaggactctgcgaaac

SEQ ID NO: 1002878 - DNA, 25 bp, Homo sapien
tctgcgaaactgcacggtctcctct

SEQ ID NO: 1002879 - DNA, 25 bp, Homo sapien
gcacacacgcttcttcggcaaaacg

SEQ ID NO: 1002880 - DNA, 25 bp, Homo sapien
gagccaggggctgaatgcacaatct

SEQ ID NO: 1002881 - DNA, 25 bp, Homo sapien
gggccccaaaaggatccaaatgcaa

SEQ ID NO: 1002882 - DNA, 25 bp, Homo sapien
tgaatgcacaatctccagcccagca

SEQ ID NO: 1002883 - DNA, 25 bp, Homo sapien
cctggtgccacgaaccaagggacag

SEQ ID NO: 1002884 - DNA, 25 bp, Homo sapien
gggagacggagcactcgcagggcca

SEQ ID NO: 1002885 - DNA, 25 bp, Homo sapien
cggggagacggagcactcgcagggc

SEQ ID NO: 1002886 - DNA, 25 bp, Homo sapien
tcggggagacggagcactcgcaggg

SEQ ID NO: 1002887 - DNA, 25 bp, Homo sapien
ggggagacggagcactcgcagggcc

SEQ ID NO: 1002888 - DNA, 25 bp, Homo sapien
gagaattaccaagtcatccgcagtc

SEQ ID NO: 1002889 - DNA, 25 bp, Homo sapien
tggttcagccctcaacgacagagct

SEQ ID NO: 1002890 - DNA, 25 bp, Homo sapien
catatacccgagaactgaaggcagg

SEQ ID NO: 1002891 - DNA, 25 bp, Homo sapien
aggaagcctccggaagttgcacagc

SEQ ID NO: 1002892 - DNA, 25 bp, Homo sapien
cccatctgatgaaggctgtggcggc

SEQ ID NO: 1002893 - DNA, 25 bp, Homo sapien
ctagaaaggcagatcgtgagcggca

SEQ ID NO: 1002894 - DNA, 25 bp, Homo sapien
cgatggccctcggtcagagaagcca

SEQ ID NO: 1002895 - DNA, 25 bp, Homo sapien
ctgtggcggcgatggccctcggtca

SEQ ID NO: 1002896 - DNA, 25 bp, Homo sapien
accatcagacgtttggctgccttca

SEQ ID NO: 1002897 - DNA, 25 bp, Homo sapien
aaaccatcagacgtttggctgcctt

SEQ ID NO: 1002898 - DNA, 25 bp, Homo sapien
agccccttcagacgctcagggcagg

SEQ ID NO: 1002899 - DNA, 25 bp, Homo sapien
agcagagccccaaaccatcagacgt

SEQ ID NO: 1002900 - DNA, 25 bp, Homo sapien
agacagatgacggagccccggtgct

SEQ ID NO: 1002901 - DNA, 25 bp, Homo sapien
tctgtgctgccggtcaccagaagcc

SEQ ID NO: 1002902 - DNA, 25 bp, Homo sapien
tctagcactaggcacagcactgcac

SEQ ID NO: 1002903 - DNA, 25 bp, Homo sapien
tcagcacgcagttgcggtggccccg

SEQ ID NO: 1002904 - DNA, 25 bp, Homo sapien
cgagctgtccggtcataggagctgc

SEQ ID NO: 1002905 - DNA, 25 bp, Homo sapien
tccagacccgagctgtccggtcata

SEQ ID NO: 1002906 - DNA, 25 bp, Homo sapien
gtccggtcataggagctgctgaaga

SEQ ID NO: 1002907 - DNA, 25 bp, Homo sapien
gacccgagctgtccggtcataggag

SEQ ID NO: 1002908 - DNA, 25 bp, Homo sapien
acacctgcagacactgcccggtcag

SEQ ID NO: 1002909 - DNA, 25 bp, Homo sapien
ctgttcacgatggacgtgtgtcctc

SEQ ID NO: 1002910 - DNA, 25 bp, Homo sapien
gatggacgtgtgtcctcggtacacc

SEQ ID NO: 1002911 - DNA, 25 bp, Homo sapien
cgtgtgtcctcggtacacctgcaga

SEQ ID NO: 1002912 - DNA, 25 bp, Homo sapien
ggcagaaggtcacatagctttcatg

SEQ ID NO: 1002913 - DNA, 25 bp, Homo sapien
catcctccagctggcagaaggtcac

SEQ ID NO: 1002914 - DNA, 25 bp, Homo sapien
tgcatgtgaaggcagcctcatcctc

SEQ ID NO: 1002915 - DNA, 25 bp, Homo sapien
cctgatggtgcagtcggcgctgcat

SEQ ID NO: 1002916 - DNA, 25 bp, Homo sapien
atgcctgcctcacgggatgtagcgc

SEQ ID NO: 1002917 - DNA, 25 bp, Homo sapien
aatgcctgcctcacgggatgtagcg

SEQ ID NO: 1002918 - DNA, 25 bp, Homo sapien
acaatgcctgcctcacgggatgtag

SEQ ID NO: 1002919 - DNA, 25 bp, Homo sapien
cctgcctcacgggatgtagcgcaga

SEQ ID NO: 1002920 - DNA, 25 bp, Homo sapien
gggaatggcacatgttcgctatttt

SEQ ID NO: 1002921 - DNA, 25 bp, Homo sapien
cagagggaatggcacatgttcgcta

SEQ ID NO: 1002922 - DNA, 25 bp, Homo sapien
gagggaatggcacatgttcgctatt

SEQ ID NO: 1002923 - DNA, 25 bp, Homo sapien
aatggcacatgttcgctattttcct

SEQ ID NO: 1002924 - DNA, 25 bp, Homo sapien
actgaagcctgaagccagggatgct

SEQ ID NO: 1002925 - DNA, 25 bp, Homo sapien
ggaactgaagcctgaagccagggat

SEQ ID NO: 1002926 - DNA, 25 bp, Homo sapien
tggtggaactgaagcctgaagccag

SEQ ID NO: 1002927 - DNA, 25 bp, Homo sapien
ctggtggaactgaagcctgaagcca

SEQ ID NO: 1002928 - DNA, 25 bp, Homo sapien
tggtgcccctgacttgcgtggaagc

SEQ ID NO: 1002929 - DNA, 25 bp, Homo sapien
tggaagccgtgtctcccttccctgt

SEQ ID NO: 1002930 - DNA, 25 bp, Homo sapien
cagctttagacaacggactggacag

SEQ ID NO: 1002931 - DNA, 25 bp, Homo sapien
gacctggtttgctccagcccttgta

SEQ ID NO: 1002932 - DNA, 25 bp, Homo sapien
tgctgccatgaacagagccagaggt

SEQ ID NO: 1002933 - DNA, 25 bp, Homo sapien
actttcctaagctctgcgagacacc

SEQ ID NO: 1002934 - DNA, 25 bp, Homo sapien
aagctctgcgagacacccaggaaag

SEQ ID NO: 1002935 - DNA, 25 bp, Homo sapien
ggaaagcctgcggtccctgattgcc

SEQ ID NO: 1002936 - DNA, 25 bp, Homo sapien
aaagcgtacgtaggagtcgccagcc

SEQ ID NO: 1002937 - DNA, 25 bp, Homo sapien
agaaatccaggaccggccaaccaca

SEQ ID NO: 1002938 - DNA, 25 bp, Homo sapien
ccactctgctcgagaaatccaggac

SEQ ID NO: 1002939 - DNA, 25 bp, Homo sapien
tagaggaaaagcgtacgtaggagtc

SEQ ID NO: 1002940 - DNA, 25 bp, Homo sapien
ggatgttggcgacagcacccacccc

SEQ ID NO: 1002941 - DNA, 25 bp, Homo sapien
cagcacccaccccattatcgatggt

SEQ ID NO: 1002942 - DNA, 25 bp, Homo sapien
agggatgttggcgacagcacccacc

SEQ ID NO: 1002943 - DNA, 25 bp, Homo sapien
cgagggatgttggcgacagcaccca

SEQ ID NO: 1002944 - DNA, 25 bp, Homo sapien
gggatccacacaaaaggactgtcac

SEQ ID NO: 1002945 - DNA, 25 bp, Homo sapien
gagcgtatcagtagaatctcaggat

SEQ ID NO: 1002946 - DNA, 25 bp, Homo sapien
tctcaggataaagaaagatgacctc

SEQ ID NO: 1002947 - DNA, 25 bp, Homo sapien
gatgacctctgtccccgtccttgaa

SEQ ID NO: 1002948 - DNA, 25 bp, Homo sapien
cattccagtgtcctgcttgagcggg

SEQ ID NO: 1002949 - DNA, 25 bp, Homo sapien
gatagccctgccctcaattagggca

SEQ ID NO: 1002950 - DNA, 25 bp, Homo sapien
ccaggctaccggcagcctggcaaag

SEQ ID NO: 1002951 - DNA, 25 bp, Homo sapien
gtacctcaaggggacaagcagccgt

SEQ ID NO: 1002952 - DNA, 25 bp, Homo sapien
gttagaaatgccaattctaggccgg

SEQ ID NO: 1002953 - DNA, 25 bp, Homo sapien
agaaatgccaattctaggccgggtg

SEQ ID NO: 1002954 - DNA, 25 bp, Homo sapien
gcttgttagaaatgccaattctagg

SEQ ID NO: 1002955 - DNA, 25 bp, Homo sapien
ttgttagaaatgccaattctaggcc

SEQ ID NO: 1002956 - DNA, 25 bp, Homo sapien
tcctggttgaatgcctataagtgtg

SEQ ID NO: 1002957 - DNA, 25 bp, Homo sapien
tgtgttagtttgtggccacctctcc

SEQ ID NO: 1002958 - DNA, 25 bp, Homo sapien
agtcttatgtttgggagcaatacca

SEQ ID NO: 1002959 - DNA, 25 bp, Homo sapien
taacatttctaaaagacctcatatt

SEQ ID NO: 1002960 - DNA, 25 bp, Homo sapien
taaagaactacccacagcagaaagc

SEQ ID NO: 1002961 - DNA, 25 bp, Homo sapien
gactacgtgtgctacctgggcagta

SEQ ID NO: 1002962 - DNA, 25 bp, Homo sapien
tgaaagggacctcacagtgcatggg

SEQ ID NO: 1002963 - DNA, 25 bp, Homo sapien
actgatgatggtggaaaagcccgcg

SEQ ID NO: 1002964 - DNA, 25 bp, Homo sapien
gggtaacatagtgtgacgacggcac

SEQ ID NO: 1002965 - DNA, 25 bp, Homo sapien
tgtgacgacggcacacttctccgca

SEQ ID NO: 1002966 - DNA, 25 bp, Homo sapien
gcctgtttccacgtctgtatgtggg

SEQ ID NO: 1002967 - DNA, 25 bp, Homo sapien
ccagcctgtttccacgtctgtatgt

SEQ ID NO: 1002968 - DNA, 25 bp, Homo sapien
caagcgtctactgttgctgtgagag

SEQ ID NO: 1002969 - DNA, 25 bp, Homo sapien
tctactgttgctgtgagagtcgtca

SEQ ID NO: 1002970 - DNA, 25 bp, Homo sapien
gctggcccttaacaagcgtctactg

SEQ ID NO: 1002971 - DNA, 25 bp, Homo sapien
tgagagtcgtcaacaggaaatgcca

SEQ ID NO: 1002972 - DNA, 25 bp, Homo sapien
cgtgcgctcaacagccagatgctgg

SEQ ID NO: 1002973 - DNA, 25 bp, Homo sapien
cagacaagcgctcttccgctagtgt

SEQ ID NO: 1002974 - DNA, 25 bp, Homo sapien
gctggacttctagaaaggggtctgc

SEQ ID NO: 1002975 - DNA, 25 bp, Homo sapien
cttccgctagtgtgccgggatgagc

SEQ ID NO: 1002976 - DNA, 25 bp, Homo sapien
gcggcgaagaggtcagggagggagt

SEQ ID NO: 1002977 - DNA, 25 bp, Homo sapien
tcagggagggagtgggagggtctac

SEQ ID NO: 1002978 - DNA, 25 bp, Homo sapien
agaggtcagggagggagtgggaggg

SEQ ID NO: 1002979 - DNA, 25 bp, Homo sapien
ctgcggcgaagaggtcagggaggga

SEQ ID NO: 1002980 - DNA, 25 bp, Homo sapien
gcggtgctccagagccgggccgtgc

SEQ ID NO: 1002981 - DNA, 25 bp, Homo sapien
ctcaggctcagccagttgatgcccc

SEQ ID NO: 1002982 - DNA, 25 bp, Homo sapien
ggtggtcggcgcagaccctcagggc

SEQ ID NO: 1002983 - DNA, 25 bp, Homo sapien
cttgcaggagcgcgcagcactggcc

SEQ ID NO: 1002984 - DNA, 25 bp, Homo sapien
gcggcggctccgtacgactgcggcc

SEQ ID NO: 1002985 - DNA, 25 bp, Homo sapien
gcggccatcgcggggaacggggagc

SEQ ID NO: 1002986 - DNA, 25 bp, Homo sapien
cggctccgtacgactgcggcccgcg

SEQ ID NO: 1002987 - DNA, 25 bp, Homo sapien
agaaggagctgcgccccgctaggga

SEQ ID NO: 1002988 - DNA, 25 bp, Homo sapien
gaaggaccctagctccccgctgcct

SEQ ID NO: 1002989 - DNA, 25 bp, Homo sapien
aaggaccctagctccccgctgcctc

SEQ ID NO: 1002990 - DNA, 25 bp, Homo sapien
ggtgaaggaccctagctccccgctg

SEQ ID NO: 1002991 - DNA, 25 bp, Homo sapien
caccgggcgaacaaggcagctgcgt

SEQ ID NO: 1002992 - DNA, 25 bp, Homo sapien
aaggcagctgcgtctctggtgcaca

SEQ ID NO: 1002993 - DNA, 25 bp, Homo sapien
cctccgccctgggtagagtcctggg

SEQ ID NO: 1002994 - DNA, 25 bp, Homo sapien
tgcgtctctggtgcacaaggagccc

SEQ ID NO: 1002995 - DNA, 25 bp, Homo sapien
gggatgaggtgcgagccgctgcggg

SEQ ID NO: 1002996 - DNA, 25 bp, Homo sapien
ttggtctggccggagtggggatgag

SEQ ID NO: 1002997 - DNA, 25 bp, Homo sapien
tggtctggccggagtggggatgagg

SEQ ID NO: 1002998 - DNA, 25 bp, Homo sapien
tgcgagccgctgcggggtcggtgga

SEQ ID NO: 1002999 - DNA, 25 bp, Homo sapien
ctggggcgcctctaatggaccccgg

SEQ ID NO: 1003000 - DNA, 25 bp, Homo sapien
ctcggcctggggcgcctctaatgga

SEQ ID NO: 1003001 - DNA, 25 bp, Homo sapien
ggcctggggcgcctctaatggaccc

SEQ ID NO: 1003002 - DNA, 25 bp, Homo sapien
cggcctggggcgcctctaatggacc

SEQ ID NO: 1003003 - DNA, 25 bp, Homo sapien
tagggcagttccggcgccgacttcg

SEQ ID NO: 1003004 - DNA, 25 bp, Homo sapien
gtagcaggatttccagaacgctcca

SEQ ID NO: 1003005 - DNA, 25 bp, Homo sapien
atttccagaacgctccagggctctc

SEQ ID NO: 1003006 - DNA, 25 bp, Homo sapien
gatcccccaggtcctaaaggtagca

SEQ ID NO: 1003007 - DNA, 25 bp, Homo sapien
ggtcctaaaggtagcaggatttcca

SEQ ID NO: 1003008 - DNA, 25 bp, Homo sapien
catccaggtgtgaaactgcggtgtg

SEQ ID NO: 1003009 - DNA, 25 bp, Homo sapien
tgtgaaactgcggtgtggcctccag

SEQ ID NO: 1003010 - DNA, 25 bp, Homo sapien
tcctcttaggaaccggtgaacctca

SEQ ID NO: 1003011 - DNA, 25 bp, Homo sapien
tggcctccaggtgaggacagactcg

SEQ ID NO: 1003012 - DNA, 25 bp, Homo sapien
tcttgcaggtcgtagattacagact

SEQ ID NO: 1003013 - DNA, 25 bp, Homo sapien
gtcgtagattacagactctcctctg

SEQ ID NO: 1003014 - DNA, 25 bp, Homo sapien
tttctcttgcaggtcgtagattaca

SEQ ID NO: 1003015 - DNA, 25 bp, Homo sapien
ggttgagtctggactgtagagctgt

SEQ ID NO: 1003016 - DNA, 25 bp, Homo sapien
gaacagcgttctctccatctggctc

SEQ ID NO: 1003017 - DNA, 25 bp, Homo sapien
ctccaaggggtcaatgtctattcca

SEQ ID NO: 1003018 - DNA, 25 bp, Homo sapien
tgtctattccagtcaggttccgcat

SEQ ID NO: 1003019 - DNA, 25 bp, Homo sapien
attcagaacagcgttctctccatct

SEQ ID NO: 1003020 - DNA, 25 bp, Homo sapien
cagggctatgttataaggacagggc

SEQ ID NO: 1003021 - DNA, 25 bp, Homo sapien
atgttataaggacagggcggttctg

SEQ ID NO: 1003022 - DNA, 25 bp, Homo sapien
gctatgttataaggacagggcggtt

SEQ ID NO: 1003023 - DNA, 25 bp, Homo sapien
tcactttatcccccatacagcctct

SEQ ID NO: 1003024 - DNA, 25 bp, Homo sapien
tggcctcggtcccaggaattgctgg

SEQ ID NO: 1003025 - DNA, 25 bp, Homo sapien
ctgggcttcttccggaaaactagct

SEQ ID NO: 1003026 - DNA, 25 bp, Homo sapien
gactgagcgaatgatggagctgatc

SEQ ID NO: 1003027 - DNA, 25 bp, Homo sapien
cagcggacccgtggaagaaacttct

SEQ ID NO: 1003028 - DNA, 25 bp, Homo sapien
gtcccaggtaaccacagggacgctc

SEQ ID NO: 1003029 - DNA, 25 bp, Homo sapien
cgcaatcaataagcaggtgatagct

SEQ ID NO: 1003030 - DNA, 25 bp, Homo sapien
ccgatgggacccacgcaatcaataa

SEQ ID NO: 1003031 - DNA, 25 bp, Homo sapien
aagagccctgccaagccgatgggac

SEQ ID NO: 1003032 - DNA, 25 bp, Homo sapien
tcatccaacaggctttgattgaaga

SEQ ID NO: 1003033 - DNA, 25 bp, Homo sapien
tccaacaggctttgattgaagatct

SEQ ID NO: 1003034 - DNA, 25 bp, Homo sapien
catccaacaggctttgattgaagat

SEQ ID NO: 1003035 - DNA, 25 bp, Homo sapien
caacaggctttgattgaagatctgt

SEQ ID NO: 1003036 - DNA, 25 bp, Homo sapien
tccagccaagaaggcggtagcctgc

SEQ ID NO: 1003037 - DNA, 25 bp, Homo sapien
caacagagacttcttggaccagccc

SEQ ID NO: 1003038 - DNA, 25 bp, Homo sapien
gaagaggtgagccaagaagcctcca

SEQ ID NO: 1003039 - DNA, 25 bp, Homo sapien
tcagactgggcctgataaacagtgc

SEQ ID NO: 1003040 - DNA, 25 bp, Homo sapien
ccctggacggacttcagataaatta

SEQ ID NO: 1003041 - DNA, 25 bp, Homo sapien
taaattacaagctgcccacaagcac

SEQ ID NO: 1003042 - DNA, 25 bp, Homo sapien
catcgacccctggacggacttcaga

SEQ ID NO: 1003043 - DNA, 25 bp, Homo sapien
ctcggtccatcgacccctggacgga

SEQ ID NO: 1003044 - DNA, 25 bp, Homo sapien
cccattcgagaagcattaaatcacc

SEQ ID NO: 1003045 - DNA, 25 bp, Homo sapien
cattcgagaagcattaaatcaccag

SEQ ID NO: 1003046 - DNA, 25 bp, Homo sapien
gcccattcgagaagcattaaatcac

SEQ ID NO: 1003047 - DNA, 25 bp, Homo sapien
aagcccattcgagaagcattaaatc

SEQ ID NO: 1003048 - DNA, 25 bp, Homo sapien
aatgagatgctgctaagccttggtg

SEQ ID NO: 1003049 - DNA, 25 bp, Homo sapien
cagatatgacacacagaaggctcca

SEQ ID NO: 1003050 - DNA, 25 bp, Homo sapien
taggaacgaaaaggatcaatcagcc

SEQ ID NO: 1003051 - DNA, 25 bp, Homo sapien
catttacatgtcaatcggttccagg

SEQ ID NO: 1003052 - DNA, 25 bp, Homo sapien
ggctcagaaacggtgcaggtgcatt

SEQ ID NO: 1003053 - DNA, 25 bp, Homo sapien
tggtggcctcttccggtccttgatc

SEQ ID NO: 1003054 - DNA, 25 bp, Homo sapien
cagctccgaagcttctagggctcca

SEQ ID NO: 1003055 - DNA, 25 bp, Homo sapien
gctggttttgtggtggcctcttccg

SEQ ID NO: 1003056 - DNA, 25 bp, Homo sapien
cctcagctccgaagcttctagggct

SEQ ID NO: 1003057 - DNA, 25 bp, Homo sapien
aagccgcccgttggctttgaggact

SEQ ID NO: 1003058 - DNA, 25 bp, Homo sapien
ggaaagcgccctggatcatccagct

SEQ ID NO: 1003059 - DNA, 25 bp, Homo sapien
ttgaggacttttatcgcccaaggtc

SEQ ID NO: 1003060 - DNA, 25 bp, Homo sapien
atgcccactgccgagagagcactca

SEQ ID NO: 1003061 - DNA, 25 bp, Homo sapien
cgcaaggggttgcccctgtccccag

SEQ ID NO: 1003062 - DNA, 25 bp, Homo sapien
ccatcccggtgggagggctcggctg

SEQ ID NO: 1003063 - DNA, 25 bp, Homo sapien
ccggccatcccggtgggagggctcg

SEQ ID NO: 1003064 - DNA, 25 bp, Homo sapien
ggccatcccggtgggagggctcggc

SEQ ID NO: 1003065 - DNA, 25 bp, Homo sapien
cttgtggagcgactgcactcgtgcg

SEQ ID NO: 1003066 - DNA, 25 bp, Homo sapien
tagttgggctcctcatacaggaccc

SEQ ID NO: 1003067 - DNA, 25 bp, Homo sapien
tccaccacgtacatgcggccgtggt

SEQ ID NO: 1003068 - DNA, 25 bp, Homo sapien
gagaagctgcggaagtcgccactct

SEQ ID NO: 1003069 - DNA, 25 bp, Homo sapien
gcccgtgaagttgcaaccctcgaag

SEQ ID NO: 1003070 - DNA, 25 bp, Homo sapien
ccttgatggtgttcacacagttctt

SEQ ID NO: 1003071 - DNA, 25 bp, Homo sapien
gatttctaggcggaaatgttctccg

SEQ ID NO: 1003072 - DNA, 25 bp, Homo sapien
cgtacaccttgatggtgttcacaca

SEQ ID NO: 1003073 - DNA, 25 bp, Homo sapien
cagtcttacagactttaaagccggg

SEQ ID NO: 1003074 - DNA, 25 bp, Homo sapien
agccttcggtggacgggcccactca

SEQ ID NO: 1003075 - DNA, 25 bp, Homo sapien
gcaggtggctctgggtatagctcct

SEQ ID NO: 1003076 - DNA, 25 bp, Homo sapien
caggaagactcagccttcggtggac

SEQ ID NO: 1003077 - DNA, 25 bp, Homo sapien
ggtagtcgccgtgctccaagatgaa

SEQ ID NO: 1003078 - DNA, 25 bp, Homo sapien
ggagttcactcggttcataaagccc

SEQ ID NO: 1003079 - DNA, 25 bp, Homo sapien
ggaagttgtcacagtccccgaagac

SEQ ID NO: 1003080 - DNA, 25 bp, Homo sapien
cataaagccccggtcctggaagttg

SEQ ID NO: 1003081 - DNA, 25 bp, Homo sapien
cgccgccccggacaaaagatttgct

SEQ ID NO: 1003082 - DNA, 25 bp, Homo sapien
gtttacaccgggcagcgccctgctg

SEQ ID NO: 1003083 - DNA, 25 bp, Homo sapien
ccgccccggacaaaagatttgctgg

SEQ ID NO: 1003084 - DNA, 25 bp, Homo sapien
tcagcgccgccccggacaaaagatt

SEQ ID NO: 1003085 - DNA, 25 bp, Homo sapien
gaagatcctgcctagggtgaccagg

SEQ ID NO: 1003086 - DNA, 25 bp, Homo sapien
tgcaggtagtctcgccttggtgcca

SEQ ID NO: 1003087 - DNA, 25 bp, Homo sapien
tgtctccacgaggatgcaacccaag

SEQ ID NO: 1003088 - DNA, 25 bp, Homo sapien
ggacgcccaggatcagtttacagca

SEQ ID NO: 1003089 - DNA, 25 bp, Homo sapien
taagcaaagcggtcatctaaaaagg

SEQ ID NO: 1003090 - DNA, 25 bp, Homo sapien
gctgaaatcccagagatagactcca

SEQ ID NO: 1003091 - DNA, 25 bp, Homo sapien
gagataagcaaagcggtcatctaaa

SEQ ID NO: 1003092 - DNA, 25 bp, Homo sapien
tcagagagataagcaaagcggtcat

SEQ ID NO: 1003093 - DNA, 25 bp, Homo sapien
tcagacacgtgctgtgcgctgtctc

SEQ ID NO: 1003094 - DNA, 25 bp, Homo sapien
tatggagcctgcatgcccggcttgg

SEQ ID NO: 1003095 - DNA, 25 bp, Homo sapien
aaggacctggctgtcattgcgctgc

SEQ ID NO: 1003096 - DNA, 25 bp, Homo sapien
tagttccaggggttatggagcctgc

SEQ ID NO: 1003097 - DNA, 25 bp, Homo sapien
cacggcaagtgggagcaagacagac

SEQ ID NO: 1003098 - DNA, 25 bp, Homo sapien
ccctgactcattttaacaaccggat

SEQ ID NO: 1003099 - DNA, 25 bp, Homo sapien
tcacgtgtgaactcagaatgagaac

SEQ ID NO: 1003100 - DNA, 25 bp, Homo sapien
gatgaagggcagtcagtgtacccca

SEQ ID NO: 1003101 - DNA, 25 bp, Homo sapien
ataccacaaggaaaccgccaaggct

SEQ ID NO: 1003102 - DNA, 25 bp, Homo sapien
tgccctccgaagtggtggcctgagc

SEQ ID NO: 1003103 - DNA, 25 bp, Homo sapien
aaggcttacaacttgtgccctccga

SEQ ID NO: 1003104 - DNA, 25 bp, Homo sapien
tgcacctgcagtcttaataccacaa

SEQ ID NO: 1003105 - DNA, 25 bp, Homo sapien
tcagcatgtgattcggagggaacac

SEQ ID NO: 1003106 - DNA, 25 bp, Homo sapien
cacagttcggaaggctgtacacgaa

SEQ ID NO: 1003107 - DNA, 25 bp, Homo sapien
tcttggcagatcacaactttgagca

SEQ ID NO: 1003108 - DNA, 25 bp, Homo sapien
tatatcactggcgactcttggcaga

SEQ ID NO: 1003109 - DNA, 25 bp, Homo sapien
tctcggatttggtaaactcgtttgc

SEQ ID NO: 1003110 - DNA, 25 bp, Homo sapien
gctttggatgtgtagcccaggaata

SEQ ID NO: 1003111 - DNA, 25 bp, Homo sapien
ggtaagtcgtggtgttccgtattgc

SEQ ID NO: 1003112 - DNA, 25 bp, Homo sapien
gcactgcaggattccggagccaccc

SEQ ID NO: 1003113 - DNA, 25 bp, Homo sapien
tgttgccctctaggaagtcattgag

SEQ ID NO: 1003114 - DNA, 25 bp, Homo sapien
tggaatctcccaaggaatgctttga

SEQ ID NO: 1003115 - DNA, 25 bp, Homo sapien
caggctcatgggctatgtcccaatg

SEQ ID NO: 1003116 - DNA, 25 bp, Homo sapien
ggccaggaccggaatgttccaagtc

SEQ ID NO: 1003117 - DNA, 25 bp, Homo sapien
ggttggatggcttcacccttccgca

SEQ ID NO: 1003118 - DNA, 25 bp, Homo sapien
atgccgaactcagtgtacacacagg

SEQ ID NO: 1003119 - DNA, 25 bp, Homo sapien
ggattagcacggcatactacagccc

SEQ ID NO: 1003120 - DNA, 25 bp, Homo sapien
tggctatgttgctagctggagggca

SEQ ID NO: 1003121 - DNA, 25 bp, Homo sapien
gacacggacatcgagctaagctatg

SEQ ID NO: 1003122 - DNA, 25 bp, Homo sapien
ccttcctgaagccaagtgagaaact

SEQ ID NO: 1003123 - DNA, 25 bp, Homo sapien
taagctatgagcaagggcgaacaat

SEQ ID NO: 1003124 - DNA, 25 bp, Homo sapien
taaactccagggtgttctaggacag

SEQ ID NO: 1003125 - DNA, 25 bp, Homo sapien
acagactcagagttaacataatctg

SEQ ID NO: 1003126 - DNA, 25 bp, Homo sapien
ttggacagactcagagttaacataa

SEQ ID NO: 1003127 - DNA, 25 bp, Homo sapien
ggagctctgacccaaatgatatctt

SEQ ID NO: 1003128 - DNA, 25 bp, Homo sapien
ggggagctctgacccaaatgatatc

SEQ ID NO: 1003129 - DNA, 25 bp, Homo sapien
atgaagacttgccttgtgaagctgc

SEQ ID NO: 1003130 - DNA, 25 bp, Homo sapien
aaagagaaagaaacccaatcacagt

SEQ ID NO: 1003131 - DNA, 25 bp, Homo sapien
gaaaagagaaagaaacccaatcaca

SEQ ID NO: 1003132 - DNA, 25 bp, Homo sapien
aaaagagaaagaaacccaatcacag

SEQ ID NO: 1003133 - DNA, 25 bp, Homo sapien
gaagtaccctgttctcctaatcacc

SEQ ID NO: 1003134 - DNA, 25 bp, Homo sapien
tgcagtcctgtggtcatgaaaaact

SEQ ID NO: 1003135 - DNA, 25 bp, Homo sapien
ggctggcctcgaaagcctagcctcg

SEQ ID NO: 1003136 - DNA, 25 bp, Homo sapien
tccttatgcaccaggacaacaggcc

SEQ ID NO: 1003137 - DNA, 25 bp, Homo sapien
aagccacattcatgaaagaactcca

SEQ ID NO: 1003138 - DNA, 25 bp, Homo sapien
cacatcctccatccaccaagctgac

SEQ ID NO: 1003139 - DNA, 25 bp, Homo sapien
gaagccacattcatgaaagaactcc

SEQ ID NO: 1003140 - DNA, 25 bp, Homo sapien
tccaccaagctgacccacccacttg

SEQ ID NO: 1003141 - DNA, 25 bp, Homo sapien
ttacacaggagtgatcaagacagag

SEQ ID NO: 1003142 - DNA, 25 bp, Homo sapien
catccctgcgactgatgagaacgca

SEQ ID NO: 1003143 - DNA, 25 bp, Homo sapien
ttggtattagaaatggaggaaggcc

SEQ ID NO: 1003144 - DNA, 25 bp, Homo sapien
caaatatcctaggttccactgtaag

SEQ ID NO: 1003145 - DNA, 25 bp, Homo sapien
ctgattttctttagcagaagattcc

SEQ ID NO: 1003146 - DNA, 25 bp, Homo sapien
gctgcattccaagattctgccaaag

SEQ ID NO: 1003147 - DNA, 25 bp, Homo sapien
gctttcccttcttcataactgatca

SEQ ID NO: 1003148 - DNA, 25 bp, Homo sapien
cagaagattccaaaaaagctgcatt

SEQ ID NO: 1003149 - DNA, 25 bp, Homo sapien
tgaacggataaaaatgctacagcta

SEQ ID NO: 1003150 - DNA, 25 bp, Homo sapien
cgaccataacacctctgaacggata

SEQ ID NO: 1003151 - DNA, 25 bp, Homo sapien
gctttatgcaaagtggcagataacc

SEQ ID NO: 1003152 - DNA, 25 bp, Homo sapien
ggtactcaaaaaccacttgctgcat

SEQ ID NO: 1003153 - DNA, 25 bp, Homo sapien
tttccatatgcaggtctttcttatt

SEQ ID NO: 1003154 - DNA, 25 bp, Homo sapien
tcttattcccaaccaacataatagg

SEQ ID NO: 1003155 - DNA, 25 bp, Homo sapien
catatgcaggtctttcttattccca

SEQ ID NO: 1003156 - DNA, 25 bp, Homo sapien
tccatatgcaggtctttcttattcc

SEQ ID NO: 1003157 - DNA, 25 bp, Homo sapien
gtattgctcagaagatactattaaa

SEQ ID NO: 1003158 - DNA, 25 bp, Homo sapien
tttctctaacaagcagataaaatgg

SEQ ID NO: 1003159 - DNA, 25 bp, Homo sapien
gccagattgtattgctcagaagata

SEQ ID NO: 1003160 - DNA, 25 bp, Homo sapien
aaaccagtaagtgccagattgtatt

SEQ ID NO: 1003161 - DNA, 25 bp, Homo sapien
caacaatttgccatggataacttta

SEQ ID NO: 1003162 - DNA, 25 bp, Homo sapien
ccatatccaacaatttgccatggat

SEQ ID NO: 1003163 - DNA, 25 bp, Homo sapien
tttccccaccatatccaacaatttg

SEQ ID NO: 1003164 - DNA, 25 bp, Homo sapien
ccaccatatccaacaatttgccatg

SEQ ID NO: 1003165 - DNA, 25 bp, Homo sapien
caggtaaggcattcaaacggaaagc

SEQ ID NO: 1003166 - DNA, 25 bp, Homo sapien
gatcaatgagccgatgactctagga

SEQ ID NO: 1003167 - DNA, 25 bp, Homo sapien
aacggaaagcctaccactgggctga

SEQ ID NO: 1003168 - DNA, 25 bp, Homo sapien
cagatggacggtgcctggttcaaca

SEQ ID NO: 1003169 - DNA, 25 bp, Homo sapien
aatatagccattaatatctatggag

SEQ ID NO: 1003170 - DNA, 25 bp, Homo sapien
tatagccattaatatctatggagta

SEQ ID NO: 1003171 - DNA, 25 bp, Homo sapien
gaatatagccattaatatctatgga

SEQ ID NO: 1003172 - DNA, 25 bp, Homo sapien
aagaatatagccattaatatctatg

SEQ ID NO: 1003173 - DNA, 25 bp, Homo sapien
agggtgaaaccacggcaggacatgc

SEQ ID NO: 1003174 - DNA, 25 bp, Homo sapien
tgagtttgttatcatccagttttca

SEQ ID NO: 1003175 - DNA, 25 bp, Homo sapien
gaagggtgaaaccacggcaggacat

SEQ ID NO: 1003176 - DNA, 25 bp, Homo sapien
agaatgaagggtgaaaccacggcag

SEQ ID NO: 1003177 - DNA, 25 bp, Homo sapien
gaagatgatattcttgtccatttac

SEQ ID NO: 1003178 - DNA, 25 bp, Homo sapien
cccggctgtgtctacaagttgaaga

SEQ ID NO: 1003179 - DNA, 25 bp, Homo sapien
ttgcccggctgtgtctacaagttga

SEQ ID NO: 1003180 - DNA, 25 bp, Homo sapien
gctgtgtctacaagttgaagatgat

SEQ ID NO: 1003181 - DNA, 25 bp, Homo sapien
caatgacaaccaatcaagcacagag

SEQ ID NO: 1003182 - DNA, 25 bp, Homo sapien
tctgacttgtatagattctccccta

SEQ ID NO: 1003183 - DNA, 25 bp, Homo sapien
ggaaatacggtgactggctaaaatc

SEQ ID NO: 1003184 - DNA, 25 bp, Homo sapien
agcacagagtccctagcagtctcag

SEQ ID NO: 1003185 - DNA, 25 bp, Homo sapien
aattgaatcgtcaatgaggatttcc

SEQ ID NO: 1003186 - DNA, 25 bp, Homo sapien
gttggatcgtaggagtccacaaatt

SEQ ID NO: 1003187 - DNA, 25 bp, Homo sapien
acaaattggccttcaacaaattgaa

SEQ ID NO: 1003188 - DNA, 25 bp, Homo sapien
cgtaggagtccacaaattggccttc

SEQ ID NO: 1003189 - DNA, 25 bp, Homo sapien
tactaaggtggctacagacgaaaag

SEQ ID NO: 1003190 - DNA, 25 bp, Homo sapien
tagggcccttcaacaaacctctatg

SEQ ID NO: 1003191 - DNA, 25 bp, Homo sapien
tatacagtataagccccaagacaaa

SEQ ID NO: 1003192 - DNA, 25 bp, Homo sapien
tactaaaccatgaccttgaatctcc

SEQ ID NO: 1003193 - DNA, 25 bp, Homo sapien
gcaagctaaggtctatccctccatg

SEQ ID NO: 1003194 - DNA, 25 bp, Homo sapien
ggctggtgacccttagcaagctaag

SEQ ID NO: 1003195 - DNA, 25 bp, Homo sapien
tgagctcagctacagaaaattccac

SEQ ID NO: 1003196 - DNA, 25 bp, Homo sapien
taatctaatcaactgcctttgtgag

SEQ ID NO: 1003197 - DNA, 25 bp, Homo sapien
taagacatgctatgacttctgagct

SEQ ID NO: 1003198 - DNA, 25 bp, Homo sapien
tattatcacctatcgcctccagagt

SEQ ID NO: 1003199 - DNA, 25 bp, Homo sapien
tctgagctatgaggacggcactcgc

SEQ ID NO: 1003200 - DNA, 25 bp, Homo sapien
cacttaaaggacacctactatgggc

SEQ ID NO: 1003201 - DNA, 25 bp, Homo sapien
tcctcctcctgaattagttataaac

SEQ ID NO: 1003202 - DNA, 25 bp, Homo sapien
tgttctctagatcccacactccctc

SEQ ID NO: 1003203 - DNA, 25 bp, Homo sapien
caccggaggaagagttagccaccct

SEQ ID NO: 1003204 - DNA, 25 bp, Homo sapien
aaaagctgttctatccccttgttct

SEQ ID NO: 1003205 - DNA, 25 bp, Homo sapien
acaccactcacaacaggtgcgtagg

SEQ ID NO: 1003206 - DNA, 25 bp, Homo sapien
gggatgcacctgtgcgccctgcaga

SEQ ID NO: 1003207 - DNA, 25 bp, Homo sapien
tgcagaactataacaccactcacaa

SEQ ID NO: 1003208 - DNA, 25 bp, Homo sapien
aacaggtgcgtaggtcctggcttga

SEQ ID NO: 1003209 - DNA, 25 bp, Homo sapien
cttagactgcataagaaatagatgt

SEQ ID NO: 1003210 - DNA, 25 bp, Homo sapien
tctgtgctattgctgggattggggg

SEQ ID NO: 1003211 - DNA, 25 bp, Homo sapien
tcccagcttagactgcataagaaat

SEQ ID NO: 1003212 - DNA, 25 bp, Homo sapien
ttcccagcttagactgcataagaaa

SEQ ID NO: 1003213 - DNA, 25 bp, Homo sapien
ttcctgacacgatacaaaataaaca

SEQ ID NO: 1003214 - DNA, 25 bp, Homo sapien
aaatcttcacccttacctcatacat

SEQ ID NO: 1003215 - DNA, 25 bp, Homo sapien
cgaaaaagtgaaccgagtttcatca

SEQ ID NO: 1003216 - DNA, 25 bp, Homo sapien
tgatcttcaggtagacagattcctg

SEQ ID NO: 1003217 - DNA, 25 bp, Homo sapien
gaaatgactgtgtgtccacgaagac

SEQ ID NO: 1003218 - DNA, 25 bp, Homo sapien
gggtgatcagataaacaaattaagg

SEQ ID NO: 1003219 - DNA, 25 bp, Homo sapien
aatatccaccaatgggtgatcagat

SEQ ID NO: 1003220 - DNA, 25 bp, Homo sapien
ttcttaatagttaaatactgggata

SEQ ID NO: 1003221 - DNA, 25 bp, Homo sapien
tgtaaatggacatcataatggtacc

SEQ ID NO: 1003222 - DNA, 25 bp, Homo sapien
aaatgtataccaaacatctggcatg

SEQ ID NO: 1003223 - DNA, 25 bp, Homo sapien
tactaaacagtatgagatggtggtt

SEQ ID NO: 1003224 - DNA, 25 bp, Homo sapien
aatggtacctatcctataacgtgct

SEQ ID NO: 1003225 - DNA, 25 bp, Homo sapien
taaagcctggaactggcacatcacc

SEQ ID NO: 1003226 - DNA, 25 bp, Homo sapien
tctagtaagaaatgtgtagctcccc

SEQ ID NO: 1003227 - DNA, 25 bp, Homo sapien
tctgcaggctcaagacagtcacagg

SEQ ID NO: 1003228 - DNA, 25 bp, Homo sapien
tcatggttctacagtcaacgctggg

SEQ ID NO: 1003229 - DNA, 25 bp, Homo sapien
gatacctgcaaaaccgtgaaacacc

SEQ ID NO: 1003230 - DNA, 25 bp, Homo sapien
cacttcatctcggacaagggaattc

SEQ ID NO: 1003231 - DNA, 25 bp, Homo sapien
aagttagaggactcatatgccccta

SEQ ID NO: 1003232 - DNA, 25 bp, Homo sapien
caagatcgtatggtactggcaggac

SEQ ID NO: 1003233 - DNA, 25 bp, Homo sapien
taaaatcccagtgaaagatgtacca

SEQ ID NO: 1003234 - DNA, 25 bp, Homo sapien
tatgacaaccagcttttaattatgg

SEQ ID NO: 1003235 - DNA, 25 bp, Homo sapien
gacatctttcctcatgaagactcta

SEQ ID NO: 1003236 - DNA, 25 bp, Homo sapien
cctgtgatcccatccctcttattaa

SEQ ID NO: 1003237 - DNA, 25 bp, Homo sapien
ccccagaatataggacaaacagctc

SEQ ID NO: 1003238 - DNA, 25 bp, Homo sapien
tactagaagaaacctgctggcaaaa

SEQ ID NO: 1003239 - DNA, 25 bp, Homo sapien
tctcaaaagggtggcttactagaag

SEQ ID NO: 1003240 - DNA, 25 bp, Homo sapien
catgccagtaagctcccagaagtga

SEQ ID NO: 1003241 - DNA, 25 bp, Homo sapien
gactaaaagtgaccctgtatcccac

SEQ ID NO: 1003242 - DNA, 25 bp, Homo sapien
tatcccaccggagactaagttagca

SEQ ID NO: 1003243 - DNA, 25 bp, Homo sapien
tggatttcaactggacataaggaac

SEQ ID NO: 1003244 - DNA, 25 bp, Homo sapien
aaagtgataaaactagccctgctca

SEQ ID NO: 1003245 - DNA, 25 bp, Homo sapien
tagagctaccatttcgacatttgaa

SEQ ID NO: 1003246 - DNA, 25 bp, Homo sapien
gaaaagggtaaatcagtcaagatct

SEQ ID NO: 1003247 - DNA, 25 bp, Homo sapien
caaagactagagctaccatttcgac

SEQ ID NO: 1003248 - DNA, 25 bp, Homo sapien
ctaccatttcgacatttgaaaaggg

SEQ ID NO: 1003249 - DNA, 25 bp, Homo sapien
ttcagcaccgcatcgcacaagagtt

SEQ ID NO: 1003250 - DNA, 25 bp, Homo sapien
gctgccaataaaggctggatcccag

SEQ ID NO: 1003251 - DNA, 25 bp, Homo sapien
caagagcatggattcaggctgccaa

SEQ ID NO: 1003252 - DNA, 25 bp, Homo sapien
ggcaggtacaagcttcccatgacag

SEQ ID NO: 1003253 - DNA, 25 bp, Homo sapien
tagacagttacttcaaaacagcccg

SEQ ID NO: 1003254 - DNA, 25 bp, Homo sapien
caataaggcgactgctaggaactgt

SEQ ID NO: 1003255 - DNA, 25 bp, Homo sapien
tgtcgggagacaatacagcctcacc

SEQ ID NO: 1003256 - DNA, 25 bp, Homo sapien
cacaggccagaaaaccgctcgttct

SEQ ID NO: 1003257 - DNA, 25 bp, Homo sapien
ggcaccgagagatcagacattcctt

SEQ ID NO: 1003258 - DNA, 25 bp, Homo sapien
aacagcctggttgcaagtacctgac

SEQ ID NO: 1003259 - DNA, 25 bp, Homo sapien
cagaaaacttgcgttcagtgcccaa

SEQ ID NO: 1003260 - DNA, 25 bp, Homo sapien
cacagatggaatgaagccgaggcgc

SEQ ID NO: 1003261 - DNA, 25 bp, Homo sapien
tcgcggcagcctctagcgcggctcc

SEQ ID NO: 1003262 - DNA, 25 bp, Homo sapien
ggcaggtgtgactccctcgcggcag

SEQ ID NO: 1003263 - DNA, 25 bp, Homo sapien
ctcacttccccagacgagacccgga

SEQ ID NO: 1003264 - DNA, 25 bp, Homo sapien
agacgagacccggactcctcggcgg

SEQ ID NO: 1003265 - DNA, 25 bp, Homo sapien
cagaatggtggttacgaaacgcgcg

SEQ ID NO: 1003266 - DNA, 25 bp, Homo sapien
caccacctccgctcagaatggtggt

SEQ ID NO: 1003267 - DNA, 25 bp, Homo sapien
cgcgacccggctcccaggcgaggcc

SEQ ID NO: 1003268 - DNA, 25 bp, Homo sapien
cggctccaaacttcgcaggcccggc

SEQ ID NO: 1003269 - DNA, 25 bp, Homo sapien
accggtagcccaggatcgcgatctt

SEQ ID NO: 1003270 - DNA, 25 bp, Homo sapien
cacagaccggtagcccaggatcgcg

SEQ ID NO: 1003271 - DNA, 25 bp, Homo sapien
ccaggatcgcgatcttccgggactt

SEQ ID NO: 1003272 - DNA, 25 bp, Homo sapien
gtagcccaggatcgcgatcttccgg

SEQ ID NO: 1003273 - DNA, 25 bp, Homo sapien
cacgactgaaactcgctgcgtcatg

SEQ ID NO: 1003274 - DNA, 25 bp, Homo sapien
ctgaaactcgctgcgtcatgaccct

SEQ ID NO: 1003275 - DNA, 25 bp, Homo sapien
aagtcacgactgaaactcgctgcgt

SEQ ID NO: 1003276 - DNA, 25 bp, Homo sapien
aaaagtcacgactgaaactcgctgc

SEQ ID NO: 1003277 - DNA, 25 bp, Homo sapien
ttaattacgccattctccccgagcg

SEQ ID NO: 1003278 - DNA, 25 bp, Homo sapien
gtcggaaactccatctcccattggg

SEQ ID NO: 1003279 - DNA, 25 bp, Homo sapien
cgagcgccgattggacagctcctgc

SEQ ID NO: 1003280 - DNA, 25 bp, Homo sapien
cacagccgcgcgatgacgtgtcgga

SEQ ID NO: 1003281 - DNA, 25 bp, Homo sapien
tactggtccatctgatcctgatact

SEQ ID NO: 1003282 - DNA, 25 bp, Homo sapien
tggattgataagtaggtaactgtcc

SEQ ID NO: 1003283 - DNA, 25 bp, Homo sapien
tttaatgatgttgtgacgcttgtac

SEQ ID NO: 1003284 - DNA, 25 bp, Homo sapien
tcctgatactctctggattgataag

SEQ ID NO: 1003285 - DNA, 25 bp, Homo sapien
tagtaggatctattttaatttttca

SEQ ID NO: 1003286 - DNA, 25 bp, Homo sapien
tttacaaaaacaatcgcatcagcag

SEQ ID NO: 1003287 - DNA, 25 bp, Homo sapien
gcatcagcagtcataacaaacatca

SEQ ID NO: 1003288 - DNA, 25 bp, Homo sapien
gtatgacaatactgtatatgccaca

SEQ ID NO: 1003289 - DNA, 25 bp, Homo sapien
aatagacatcttcccggcacttggc

SEQ ID NO: 1003290 - DNA, 25 bp, Homo sapien
gacacggtagcccagaacaaaacac

SEQ ID NO: 1003291 - DNA, 25 bp, Homo sapien
caagctcggtgttgtttcacacgcg

SEQ ID NO: 1003292 - DNA, 25 bp, Homo sapien
tgtgatctgaacataccgtgcactc

SEQ ID NO: 1003293 - DNA, 25 bp, Homo sapien
taaagcagcctcgttgacacggtag

SEQ ID NO: 1003294 - DNA, 25 bp, Homo sapien
tcctagggcgtctacattcacggcg

SEQ ID NO: 1003295 - DNA, 25 bp, Homo sapien
caggacacagtgcactttaatgaca

SEQ ID NO: 1003296 - DNA, 25 bp, Homo sapien
ttgttcaagttctcctcctagggcg

SEQ ID NO: 1003297 - DNA, 25 bp, Homo sapien
gaggcaaaacgtgacccagagactt

SEQ ID NO: 1003298 - DNA, 25 bp, Homo sapien
tcactccgtttctgtctccttttgt

SEQ ID NO: 1003299 - DNA, 25 bp, Homo sapien
gtttctgtctccttttgtttggcac

SEQ ID NO: 1003300 - DNA, 25 bp, Homo sapien
cgtttctgtctccttttgtttggca

SEQ ID NO: 1003301 - DNA, 25 bp, Homo sapien
ctccgtttctgtctccttttgtttg

SEQ ID NO: 1003302 - DNA, 25 bp, Homo sapien
tttcaaagctcatggtaacagcagg

SEQ ID NO: 1003303 - DNA, 25 bp, Homo sapien
gaggagggcgatgtgggaaggagca

SEQ ID NO: 1003304 - DNA, 25 bp, Homo sapien
tggcagtgccttaggaggatgatcc

SEQ ID NO: 1003305 - DNA, 25 bp, Homo sapien
ttaggaggatgatccagaggcttcg

SEQ ID NO: 1003306 - DNA, 25 bp, Homo sapien
taatttttcaccagacgctagaccc

SEQ ID NO: 1003307 - DNA, 25 bp, Homo sapien
aaacaccgtagctcctggcatcaga

SEQ ID NO: 1003308 - DNA, 25 bp, Homo sapien
gacccctgaaagagatcggcaatct

SEQ ID NO: 1003309 - DNA, 25 bp, Homo sapien
caatctattagagcgtgtggctgaa

SEQ ID NO: 1003310 - DNA, 25 bp, Homo sapien
tcatagcaacataggagggagacgg

SEQ ID NO: 1003311 - DNA, 25 bp, Homo sapien
ttacattcagacagcgctcgggtgg

SEQ ID NO: 1003312 - DNA, 25 bp, Homo sapien
ttgttgatcagatgcaggcgctccc

SEQ ID NO: 1003313 - DNA, 25 bp, Homo sapien
tggccattgcccgatgaaaagaatc

SEQ ID NO: 1003314 - DNA, 25 bp, Homo sapien
gagattcctccactgttgaatgcag

SEQ ID NO: 1003315 - DNA, 25 bp, Homo sapien
tgggcagactgtgtcccgtggtcca

SEQ ID NO: 1003316 - DNA, 25 bp, Homo sapien
ctgacattcagcctgacccgctggg

SEQ ID NO: 1003317 - DNA, 25 bp, Homo sapien
gaaggtgccaagctatatacctgtg

SEQ ID NO: 1003318 - DNA, 25 bp, Homo sapien
gctgtttgctcccacatcgggtcca

SEQ ID NO: 1003319 - DNA, 25 bp, Homo sapien
ttcaaagggcatgctgtttgctccc

SEQ ID NO: 1003320 - DNA, 25 bp, Homo sapien
acatcgggtccatgtggccctgaca

SEQ ID NO: 1003321 - DNA, 25 bp, Homo sapien
gtccatgtggccctgacaaaggctg

SEQ ID NO: 1003322 - DNA, 25 bp, Homo sapien
ccttcctagacgccgatggcaaagg

SEQ ID NO: 1003323 - DNA, 25 bp, Homo sapien
ctagacgccgatggcaaaggtcaga

SEQ ID NO: 1003324 - DNA, 25 bp, Homo sapien
tcctagacgccgatggcaaaggtca

SEQ ID NO: 1003325 - DNA, 25 bp, Homo sapien
ttcctagacgccgatggcaaaggtc

SEQ ID NO: 1003326 - DNA, 25 bp, Homo sapien
ctggtgtgaggatcagggcttgcag

SEQ ID NO: 1003327 - DNA, 25 bp, Homo sapien
gaggatcagggcttgcagaatgtcc

SEQ ID NO: 1003328 - DNA, 25 bp, Homo sapien
gatcagggcttgcagaatgtccgac

SEQ ID NO: 1003329 - DNA, 25 bp, Homo sapien
gtgtgaggatcagggcttgcagaat

SEQ ID NO: 1003330 - DNA, 25 bp, Homo sapien
cacaatactatctgcttcatttacc

SEQ ID NO: 1003331 - DNA, 25 bp, Homo sapien
ttattggattcacctatgataccag

SEQ ID NO: 1003332 - DNA, 25 bp, Homo sapien
tggattcacctatgataccaggact

SEQ ID NO: 1003333 - DNA, 25 bp, Homo sapien
gattcacctatgataccaggacttt

SEQ ID NO: 1003334 - DNA, 25 bp, Homo sapien
cagtttattggattcacctatgata

SEQ ID NO: 1003335 - DNA, 25 bp, Homo sapien
gcctgggtcaccgtgatatctaggt

SEQ ID NO: 1003336 - DNA, 25 bp, Homo sapien
tattctgtccacgatggtctccagt

SEQ ID NO: 1003337 - DNA, 25 bp, Homo sapien
tactgtgaacggtgctgaagggcct

SEQ ID NO: 1003338 - DNA, 25 bp, Homo sapien
cagtatttccagcttattgcacttc

SEQ ID NO: 1003339 - DNA, 25 bp, Homo sapien
cacttcaatgaccaaaattagtgag

SEQ ID NO: 1003340 - DNA, 25 bp, Homo sapien
tcacttcaatgaccaaaattagtga

SEQ ID NO: 1003341 - DNA, 25 bp, Homo sapien
ttcatttcagttcacttcaatgacc

SEQ ID NO: 1003342 - DNA, 25 bp, Homo sapien
tgagtccacgtgtgcactgcgcacg

SEQ ID NO: 1003343 - DNA, 25 bp, Homo sapien
taaatcaggcctcctacgtggaaac

SEQ ID NO: 1003344 - DNA, 25 bp, Homo sapien
ctaagcaatgggatgcgcccgacaa

SEQ ID NO: 1003345 - DNA, 25 bp, Homo sapien
tgcgcacgcgtctagaggcgaataa

SEQ ID NO: 1003346 - DNA, 25 bp, Homo sapien
tacatcaaatttggaataaatatct

SEQ ID NO: 1003347 - DNA, 25 bp, Homo sapien
caaatttggaataaatatctacaac

SEQ ID NO: 1003348 - DNA, 25 bp, Homo sapien
ttggaataaatatctacaacttttc

SEQ ID NO: 1003349 - DNA, 25 bp, Homo sapien
catcaaatttggaataaatatctac

SEQ ID NO: 1003350 - DNA, 25 bp, Homo sapien
catgaaggcaggctttggcatatca

SEQ ID NO: 1003351 - DNA, 25 bp, Homo sapien
caatgttgtggtacgttcctattcc

SEQ ID NO: 1003352 - DNA, 25 bp, Homo sapien
tattccaagctcatccaggttctgc

SEQ ID NO: 1003353 - DNA, 25 bp, Homo sapien
gagctgatattcgtctttccacaaa

SEQ ID NO: 1003354 - DNA, 25 bp, Homo sapien
cactgatagggtcaataacgggcaa

SEQ ID NO: 1003355 - DNA, 25 bp, Homo sapien
caaggagtatacagcatcgaagagg

SEQ ID NO: 1003356 - DNA, 25 bp, Homo sapien
gaacttgaggattcttttgtgggta

SEQ ID NO: 1003357 - DNA, 25 bp, Homo sapien
tataaagtgcattcccactgatagg

SEQ ID NO: 1003358 - DNA, 25 bp, Homo sapien
ctggagatatattcactaaaggctt

SEQ ID NO: 1003359 - DNA, 25 bp, Homo sapien
ggagatatattcactaaaggcttaa

SEQ ID NO: 1003360 - DNA, 25 bp, Homo sapien
tggagatatattcactaaaggctta

SEQ ID NO: 1003361 - DNA, 25 bp, Homo sapien
tatacagaaggcgtttaagaatatt

SEQ ID NO: 1003362 - DNA, 25 bp, Homo sapien
taccaaagtttctatacagaaggcg

SEQ ID NO: 1003363 - DNA, 25 bp, Homo sapien
gaaggcgtttaagaatattttggca

SEQ ID NO: 1003364 - DNA, 25 bp, Homo sapien
agtttctatacagaaggcgtttaag

SEQ ID NO: 1003365 - DNA, 25 bp, Homo sapien
caaaggctccgctgttgcagacaga

SEQ ID NO: 1003366 - DNA, 25 bp, Homo sapien
tagacttagtagtgagcggtggccc

SEQ ID NO: 1003367 - DNA, 25 bp, Homo sapien
tttcacagccagctacaaaggttgc

SEQ ID NO: 1003368 - DNA, 25 bp, Homo sapien
ctttggttcaagttaggcatgcctc

SEQ ID NO: 1003369 - DNA, 25 bp, Homo sapien
gttcctctaattcataaatctgtac

SEQ ID NO: 1003370 - DNA, 25 bp, Homo sapien
atgttcctctaattcataaatctgt

SEQ ID NO: 1003371 - DNA, 25 bp, Homo sapien
tttcaattttatgttcctctaattc

SEQ ID NO: 1003372 - DNA, 25 bp, Homo sapien
tcaattttatgttcctctaattcat

SEQ ID NO: 1003373 - DNA, 25 bp, Homo sapien
tctattcaaaaatcacactcatgct

SEQ ID NO: 1003374 - DNA, 25 bp, Homo sapien
tgaccactataaggaaagcccgtgt

SEQ ID NO: 1003375 - DNA, 25 bp, Homo sapien
gatatgaccactataaggaaagccc

SEQ ID NO: 1003376 - DNA, 25 bp, Homo sapien
aaaagcagagatatgaccactataa

SEQ ID NO: 1003377 - DNA, 25 bp, Homo sapien
gaaccattgtactagggaccagaga

SEQ ID NO: 1003378 - DNA, 25 bp, Homo sapien
tactgacataggaactggtgccact

SEQ ID NO: 1003379 - DNA, 25 bp, Homo sapien
aattaagctctaccacctcaacagg

SEQ ID NO: 1003380 - DNA, 25 bp, Homo sapien
tcaacaggcccgcagagataagcaa

SEQ ID NO: 1003381 - DNA, 25 bp, Homo sapien
ctatgtagtatatttatgaaatctg

SEQ ID NO: 1003382 - DNA, 25 bp, Homo sapien
cataggtgatttatagtatctatgt

SEQ ID NO: 1003383 - DNA, 25 bp, Homo sapien
taggtgatttatagtatctatgtag

SEQ ID NO: 1003384 - DNA, 25 bp, Homo sapien
atgaaatctgtaattgttagcattc

SEQ ID NO: 1003385 - DNA, 25 bp, Homo sapien
tcggacaccgttggctaccaaagca

SEQ ID NO: 1003386 - DNA, 25 bp, Homo sapien
gctgctcggacaccgttggctacca

SEQ ID NO: 1003387 - DNA, 25 bp, Homo sapien
acagtggcgctgctcggacaccgtt

SEQ ID NO: 1003388 - DNA, 25 bp, Homo sapien
gacaccgttggctaccaaagcaaag

SEQ ID NO: 1003389 - DNA, 25 bp, Homo sapien
acatactttcaaagtccaggaagaa

SEQ ID NO: 1003390 - DNA, 25 bp, Homo sapien
aacaaaacatactttcaaagtccag

SEQ ID NO: 1003391 - DNA, 25 bp, Homo sapien
caaaacatactttcaaagtccagga

SEQ ID NO: 1003392 - DNA, 25 bp, Homo sapien
aaacatactttcaaagtccaggaag

SEQ ID NO: 1003393 - DNA, 25 bp, Homo sapien
gacacaaatgggtcaggcactaaca

SEQ ID NO: 1003394 - DNA, 25 bp, Homo sapien
caagggctattataaaaccactggt

SEQ ID NO: 1003395 - DNA, 25 bp, Homo sapien
gaattacacctaaaggcatacaggg

SEQ ID NO: 1003396 - DNA, 25 bp, Homo sapien
gcaaataagtacagggaaaatgtcc

SEQ ID NO: 1003397 - DNA, 25 bp, Homo sapien
actgtactccagcctgagtgaagag

SEQ ID NO: 1003398 - DNA, 25 bp, Homo sapien
aggctgtagtgagccgagaacacgc

SEQ ID NO: 1003399 - DNA, 25 bp, Homo sapien
gactctgtctcaaacaagcaaacaa

SEQ ID NO: 1003400 - DNA, 25 bp, Homo sapien
agcctgagtgaagagtgagactctg

SEQ ID NO: 1003401 - DNA, 25 bp, Homo sapien
ctggttggaacgatgtcataacact

SEQ ID NO: 1003402 - DNA, 25 bp, Homo sapien
tttgaactggttggaacgatgtcat

SEQ ID NO: 1003403 - DNA, 25 bp, Homo sapien
gaacgatgtcataacacttgtgtga

SEQ ID NO: 1003404 - DNA, 25 bp, Homo sapien
tgtcataacacttgtgtgacctcat

SEQ ID NO: 1003405 - DNA, 25 bp, Homo sapien
atcgcatgtaaacaccactttctga

SEQ ID NO: 1003406 - DNA, 25 bp, Homo sapien
gcatgtaaacaccactttctgagtc

SEQ ID NO: 1003407 - DNA, 25 bp, Homo sapien
atgtaaacaccactttctgagtctt

SEQ ID NO: 1003408 - DNA, 25 bp, Homo sapien
gaatcgcatgtaaacaccactttct

SEQ ID NO: 1003409 - DNA, 25 bp, Homo sapien
atttcaatccaacctcaacggacat

SEQ ID NO: 1003410 - DNA, 25 bp, Homo sapien
ttgccttaaacgtcctcctccttga

SEQ ID NO: 1003411 - DNA, 25 bp, Homo sapien
cgtcctcaccgcacacggagggaca

SEQ ID NO: 1003412 - DNA, 25 bp, Homo sapien
cacacggagggacacgctccgtcct

SEQ ID NO: 1003413 - DNA, 25 bp, Homo sapien
acacggagggacacgctccgtcctc

SEQ ID NO: 1003414 - DNA, 25 bp, Homo sapien
cacggagggacacgctccgtcctca

SEQ ID NO: 1003415 - DNA, 25 bp, Homo sapien
caaggttctagaactcgaactctaa

SEQ ID NO: 1003416 - DNA, 25 bp, Homo sapien
tgagaatgcgttcctcatgcttctg

SEQ ID NO: 1003417 - DNA, 25 bp, Homo sapien
agcactgtggttataagcatgagtc

SEQ ID NO: 1003418 - DNA, 25 bp, Homo sapien
tatcacatcccctaggaatctcatc

SEQ ID NO: 1003419 - DNA, 25 bp, Homo sapien
tgtcagcaaatgaagcacgcaggtt

SEQ ID NO: 1003420 - DNA, 25 bp, Homo sapien
gagcccctcaggtcggaattaactg

SEQ ID NO: 1003421 - DNA, 25 bp, Homo sapien
gcttcgtgagtcacacacaccttgt

SEQ ID NO: 1003422 - DNA, 25 bp, Homo sapien
gacatgcctgttaatgcttcgtgag

SEQ ID NO: 1003423 - DNA, 25 bp, Homo sapien
ccaccctcaagttccacacttcttt

SEQ ID NO: 1003424 - DNA, 25 bp, Homo sapien
cttttggtccagtcctggaactctt

SEQ ID NO: 1003425 - DNA, 25 bp, Homo sapien
tcttttggtccagtcctggaactct

SEQ ID NO: 1003426 - DNA, 25 bp, Homo sapien
ccctcaagttccacacttcttttgg

SEQ ID NO: 1003427 - DNA, 25 bp, Homo sapien
agccccatttctaagatgatgctca

SEQ ID NO: 1003428 - DNA, 25 bp, Homo sapien
ccccatttctaagatgatgctcagc

SEQ ID NO: 1003429 - DNA, 25 bp, Homo sapien
cttcatagtgcacagccccatttct

SEQ ID NO: 1003430 - DNA, 25 bp, Homo sapien
gccccatttctaagatgatgctcag

SEQ ID NO: 1003431 - DNA, 25 bp, Homo sapien
tgcccggcagcagtcccaagcattt

SEQ ID NO: 1003432 - DNA, 25 bp, Homo sapien
tgtgcccggcagcagtcccaagcat

SEQ ID NO: 1003433 - DNA, 25 bp, Homo sapien
cactgtgcccggcagcagtcccaag

SEQ ID NO: 1003434 - DNA, 25 bp, Homo sapien
actgtgcccggcagcagtcccaagc

SEQ ID NO: 1003435 - DNA, 25 bp, Homo sapien
tccagtgaccaactctctggtctca

SEQ ID NO: 1003436 - DNA, 25 bp, Homo sapien
acggctatgctgagcgccccagcca

SEQ ID NO: 1003437 - DNA, 25 bp, Homo sapien
gccccgttcccacggctatgctgag

SEQ ID NO: 1003438 - DNA, 25 bp, Homo sapien
tggtctcactggagccgaccaggag

SEQ ID NO: 1003439 - DNA, 25 bp, Homo sapien
aaaaaatcagggctgcgtggacgct

SEQ ID NO: 1003440 - DNA, 25 bp, Homo sapien
tgtgctctgtactactttatcctgg

SEQ ID NO: 1003441 - DNA, 25 bp, Homo sapien
cgtggacgctcagtcagaggagaaa

SEQ ID NO: 1003442 - DNA, 25 bp, Homo sapien
ggtcggttacgttgggcgcttggca

SEQ ID NO: 1003443 - DNA, 25 bp, Homo sapien
cggatgccagattccgcaggcgagc

SEQ ID NO: 1003444 - DNA, 25 bp, Homo sapien
cttagcacaagtgtaatcacggcca

SEQ ID NO: 1003445 - DNA, 25 bp, Homo sapien
caagtgtaatcacggccatgaaagg

SEQ ID NO: 1003446 - DNA, 25 bp, Homo sapien
ggaaggtgtcaaggcgatttcctcg

SEQ ID NO: 1003447 - DNA, 25 bp, Homo sapien
ggtccgaagcatgggtaaggactca

SEQ ID NO: 1003448 - DNA, 25 bp, Homo sapien
atgggtaaggactcagcacagctgg

SEQ ID NO: 1003449 - DNA, 25 bp, Homo sapien
tatatcacaggggtccgaagcatgg

SEQ ID NO: 1003450 - DNA, 25 bp, Homo sapien
aagcatgggtaaggactcagcacag

SEQ ID NO: 1003451 - DNA, 25 bp, Homo sapien
gaggagtgaggccatcaaacccacc

SEQ ID NO: 1003452 - DNA, 25 bp, Homo sapien
tcttgtcgtggtaagaagggttgac

SEQ ID NO: 1003453 - DNA, 25 bp, Homo sapien
caagaccttcccatagaggagtgag

SEQ ID NO: 1003454 - DNA, 25 bp, Homo sapien
tcggatatacggacagaggaacgtg

SEQ ID NO: 1003455 - DNA, 25 bp, Homo sapien
ctgtggacagcggccaagatttggc

SEQ ID NO: 1003456 - DNA, 25 bp, Homo sapien
ccaccctgtggacagcggccaagat

SEQ ID NO: 1003457 - DNA, 25 bp, Homo sapien
accctgtggacagcggccaagattt

SEQ ID NO: 1003458 - DNA, 25 bp, Homo sapien
cattccaccctgtggacagcggcca

SEQ ID NO: 1003459 - DNA, 25 bp, Homo sapien
gttaacagcctccaaataagatcca

SEQ ID NO: 1003460 - DNA, 25 bp, Homo sapien
taacagcctccaaataagatccaag

SEQ ID NO: 1003461 - DNA, 25 bp, Homo sapien
ttaacagcctccaaataagatccaa

SEQ ID NO: 1003462 - DNA, 25 bp, Homo sapien
aggcgacagaaatgacggagtgaga

SEQ ID NO: 1003463 - DNA, 25 bp, Homo sapien
gagagggtcgcctgaactcaacacc

SEQ ID NO: 1003464 - DNA, 25 bp, Homo sapien
actcaacaccgattcaataacctct

SEQ ID NO: 1003465 - DNA, 25 bp, Homo sapien
agtgagaggagaggcgacagaaatg

SEQ ID NO: 1003466 - DNA, 25 bp, Homo sapien
cgagttcggcgagtaaggacaaaag

SEQ ID NO: 1003467 - DNA, 25 bp, Homo sapien
tcttcacaggcgcagataagggcac

SEQ ID NO: 1003468 - DNA, 25 bp, Homo sapien
caccttgctgtaattcgagttcggc

SEQ ID NO: 1003469 - DNA, 25 bp, Homo sapien
tgcctccgagtgcatggtgacaagc

SEQ ID NO: 1003470 - DNA, 25 bp, Homo sapien
gtcctcgaactccagcttctccagc

SEQ ID NO: 1003471 - DNA, 25 bp, Homo sapien
cttcgtcctcgaactccagcttctc

SEQ ID NO: 1003472 - DNA, 25 bp, Homo sapien
cctcgaactccagcttctccagcat

SEQ ID NO: 1003473 - DNA, 25 bp, Homo sapien
tcgtcctcgaactccagcttctcca

SEQ ID NO: 1003474 - DNA, 25 bp, Homo sapien
gggtcccagggccgccgccagcgcc

SEQ ID NO: 1003475 - DNA, 25 bp, Homo sapien
tccgcgggtcccagggccgccgcca

SEQ ID NO: 1003476 - DNA, 25 bp, Homo sapien
cgcgggtcccagggccgccgccagc

SEQ ID NO: 1003477 - DNA, 25 bp, Homo sapien
gtcccagggccgccgccagcgccgc

SEQ ID NO: 1003478 - DNA, 25 bp, Homo sapien
ggggaggaggaggacagcgatcagc

SEQ ID NO: 1003479 - DNA, 25 bp, Homo sapien
gggggaggaggaggacagcgatcag

SEQ ID NO: 1003480 - DNA, 25 bp, Homo sapien
gggaggaggaggacagcgatcagca

SEQ ID NO: 1003481 - DNA, 25 bp, Homo sapien
ggaggaggaggacagcgatcagcat

SEQ ID NO: 1003482 - DNA, 25 bp, Homo sapien
gcctggcaggggacgcgggcagcgg

SEQ ID NO: 1003483 - DNA, 25 bp, Homo sapien
gggcggagcgggagcgctgccccca

SEQ ID NO: 1003484 - DNA, 25 bp, Homo sapien
tggctctgccgcgccgccgggagga

SEQ ID NO: 1003485 - DNA, 25 bp, Homo sapien
gggctcgcggccggccgagcgctgg

SEQ ID NO: 1003486 - DNA, 25 bp, Homo sapien
agactctactatggccaactcaggt

SEQ ID NO: 1003487 - DNA, 25 bp, Homo sapien
gcgtcctctcttcgcagccgagtgt

SEQ ID NO: 1003488 - DNA, 25 bp, Homo sapien
tgccaaaaacgtacacaccctgaat

SEQ ID NO: 1003489 - DNA, 25 bp, Homo sapien
tccagcatggaactcttaattcgcg

SEQ ID NO: 1003490 - DNA, 25 bp, Homo sapien
gctgtaagggtttctgagcattctg

SEQ ID NO: 1003491 - DNA, 25 bp, Homo sapien
ctggaatagaccatacactccctgc

SEQ ID NO: 1003492 - DNA, 25 bp, Homo sapien
cctgctgtaagggtttctgagcatt

SEQ ID NO: 1003493 - DNA, 25 bp, Homo sapien
cccacacctaaaccttaaggcattg

SEQ ID NO: 1003494 - DNA, 25 bp, Homo sapien
tagttttcaccatggaggtcttaca

SEQ ID NO: 1003495 - DNA, 25 bp, Homo sapien
attcacttgtaagttctagtggtaa

SEQ ID NO: 1003496 - DNA, 25 bp, Homo sapien
aattcacttgtaagttctagtggta

SEQ ID NO: 1003497 - DNA, 25 bp, Homo sapien
tgtagttttcaccatggaggtctta

SEQ ID NO: 1003498 - DNA, 25 bp, Homo sapien
ttccagtgtcatttggcggagagga

SEQ ID NO: 1003499 - DNA, 25 bp, Homo sapien
ccagtgtcatttggcggagaggagg

SEQ ID NO: 1003500 - DNA, 25 bp, Homo sapien
agcttccagtgtcatttggcggaga

SEQ ID NO: 1003501 - DNA, 25 bp, Homo sapien
gcttccagtgtcatttggcggagag

SEQ ID NO: 1003502 - DNA, 25 bp, Homo sapien
gaccaactgatttgataactactga

SEQ ID NO: 1003503 - DNA, 25 bp, Homo sapien
atatccaaaaaagcccattgggtct

SEQ ID NO: 1003504 - DNA, 25 bp, Homo sapien
gcttgtttgggtctcaataattatg

SEQ ID NO: 1003505 - DNA, 25 bp, Homo sapien
tagtagatggaacccaatatccaaa

SEQ ID NO: 1003506 - DNA, 25 bp, Homo sapien
cagcccatgcagaatcacctgtgtg

SEQ ID NO: 1003507 - DNA, 25 bp, Homo sapien
aaagggtacgccatctctggacagc

SEQ ID NO: 1003508 - DNA, 25 bp, Homo sapien
gctgatcgctcctaagaatcgtgag

SEQ ID NO: 1003509 - DNA, 25 bp, Homo sapien
tatttggcccaaaagtactctgtgc

SEQ ID NO: 1003510 - DNA, 25 bp, Homo sapien
ttattagatctgagtagtgaacaca

SEQ ID NO: 1003511 - DNA, 25 bp, Homo sapien
gactggtattcagagattccccaaa

SEQ ID NO: 1003512 - DNA, 25 bp, Homo sapien
gaacgtggacagatcttaagaagga

SEQ ID NO: 1003513 - DNA, 25 bp, Homo sapien
agtgaaagggcagattcaagtccag

SEQ ID NO: 1003514 - DNA, 25 bp, Homo sapien
cgcataaattccagcctctagcctg

SEQ ID NO: 1003515 - DNA, 25 bp, Homo sapien
taaaatgcaagtctgttgctgggcg

SEQ ID NO: 1003516 - DNA, 25 bp, Homo sapien
tctggtttagtcttttccgcataaa

SEQ ID NO: 1003517 - DNA, 25 bp, Homo sapien
ccactcctgtggctgtaattcagcc

SEQ ID NO: 1003518 - DNA, 25 bp, Homo sapien
tgtctctgagtgctcagtgcctagg

SEQ ID NO: 1003519 - DNA, 25 bp, Homo sapien
tgccaagcagataggaaatgaccac

SEQ ID NO: 1003520 - DNA, 25 bp, Homo sapien
gttctgcttctacaggatgcacccc

SEQ ID NO: 1003521 - DNA, 25 bp, Homo sapien
tgaccactgaacaagtgagtcccct

SEQ ID NO: 1003522 - DNA, 25 bp, Homo sapien
atcaggtaaccaatggggacattct

SEQ ID NO: 1003523 - DNA, 25 bp, Homo sapien
catcaggtaaccaatggggacattc

SEQ ID NO: 1003524 - DNA, 25 bp, Homo sapien
tgttggccttgaccaagggctgcgt

SEQ ID NO: 1003525 - DNA, 25 bp, Homo sapien
agctgacagcaaacccagagcactc

SEQ ID NO: 1003526 - DNA, 25 bp, Homo sapien
tttctttcaactgggaaggctctgg

SEQ ID NO: 1003527 - DNA, 25 bp, Homo sapien
tgctgccgtcaaacatcagggactc

SEQ ID NO: 1003528 - DNA, 25 bp, Homo sapien
agcccagcaggtgacgtgccttgaa

SEQ ID NO: 1003529 - DNA, 25 bp, Homo sapien
gaaataatactttgctacacctgtg

SEQ ID NO: 1003530 - DNA, 25 bp, Homo sapien
gcagtttaacctttggcacctgaaa

SEQ ID NO: 1003531 - DNA, 25 bp, Homo sapien
ttgcccttatcagaccagcggtttt

SEQ ID NO: 1003532 - DNA, 25 bp, Homo sapien
gctgggcacgggaataatactgggt

SEQ ID NO: 1003533 - DNA, 25 bp, Homo sapien
agtgtcgctgggcacgggaataata

SEQ ID NO: 1003534 - DNA, 25 bp, Homo sapien
tgtcgctgggcacgggaataatact

SEQ ID NO: 1003535 - DNA, 25 bp, Homo sapien
tgggcacgggaataatactgggtac

SEQ ID NO: 1003536 - DNA, 25 bp, Homo sapien
ctgcagatagactgctcagcttggg

SEQ ID NO: 1003537 - DNA, 25 bp, Homo sapien
tatcctgaagatgtcgggagcacac

SEQ ID NO: 1003538 - DNA, 25 bp, Homo sapien
cttggggcaataactgctctgccct

SEQ ID NO: 1003539 - DNA, 25 bp, Homo sapien
cagcctcggctgcagatagactgct

SEQ ID NO: 1003540 - DNA, 25 bp, Homo sapien
agcatagtgtgtcggtgatgccagt

SEQ ID NO: 1003541 - DNA, 25 bp, Homo sapien
tcaggctcgtgcttataggattcca

SEQ ID NO: 1003542 - DNA, 25 bp, Homo sapien
ggcagaacctctgccctgtgtccgg

SEQ ID NO: 1003543 - DNA, 25 bp, Homo sapien
gcatagatgcgattctctaaccgtt

SEQ ID NO: 1003544 - DNA, 25 bp, Homo sapien
aggacggtcagaggtccggcttcca

SEQ ID NO: 1003545 - DNA, 25 bp, Homo sapien
acaccaaggacggtcagaggtccgg

SEQ ID NO: 1003546 - DNA, 25 bp, Homo sapien
acggtcagaggtccggcttccagga

SEQ ID NO: 1003547 - DNA, 25 bp, Homo sapien
caaggacggtcagaggtccggcttc

SEQ ID NO: 1003548 - DNA, 25 bp, Homo sapien
aggcctggttcactctccccaggca

SEQ ID NO: 1003549 - DNA, 25 bp, Homo sapien
gccacaggcctggttcactctcccc

SEQ ID NO: 1003550 - DNA, 25 bp, Homo sapien
agagccacaggcctggttcactctc

SEQ ID NO: 1003551 - DNA, 25 bp, Homo sapien
acaggcctggttcactctccccagg

SEQ ID NO: 1003552 - DNA, 25 bp, Homo sapien
tgatgcagggagggctttcagtcac

SEQ ID NO: 1003553 - DNA, 25 bp, Homo sapien
tgcagggagggctttcagtcaccat

SEQ ID NO: 1003554 - DNA, 25 bp, Homo sapien
ggctctggatgaggcacaggtggga

SEQ ID NO: 1003555 - DNA, 25 bp, Homo sapien
ggctgtgggtgatgcagggagggct

SEQ ID NO: 1003556 - DNA, 25 bp, Homo sapien
ttttaatagacaggtaaccactcat

SEQ ID NO: 1003557 - DNA, 25 bp, Homo sapien
gaagccctcactggtttctagagtg

SEQ ID NO: 1003558 - DNA, 25 bp, Homo sapien
cgtgaatggcagtgagtctcgctta

SEQ ID NO: 1003559 - DNA, 25 bp, Homo sapien
cctcgggtcttccactaagcgtgaa

SEQ ID NO: 1003560 - DNA, 25 bp, Homo sapien
gttgtttcctgatgcacctcgggtc

SEQ ID NO: 1003561 - DNA, 25 bp, Homo sapien
actttcagaggaaaacgtggcgcgc

SEQ ID NO: 1003562 - DNA, 25 bp, Homo sapien
ttcagaggaaaacgtggcgcgcccg

SEQ ID NO: 1003563 - DNA, 25 bp, Homo sapien
cagaggaaaacgtggcgcgcccggg

SEQ ID NO: 1003564 - DNA, 25 bp, Homo sapien
ctttcagaggaaaacgtggcgcgcc

SEQ ID NO: 1003565 - DNA, 25 bp, Homo sapien
caactggtagcatcaggagagtatg

SEQ ID NO: 1003566 - DNA, 25 bp, Homo sapien
tggtggatgtggcaaagcatctgct

SEQ ID NO: 1003567 - DNA, 25 bp, Homo sapien
agcgcaacgccacaggaccttgtgg

SEQ ID NO: 1003568 - DNA, 25 bp, Homo sapien
tcccagctccaatggcaactggtag

SEQ ID NO: 1003569 - DNA, 25 bp, Homo sapien
aggcccaggcctgccggcgcctcag

SEQ ID NO: 1003570 - DNA, 25 bp, Homo sapien
aggaagtgagcgcttctcaggagca

SEQ ID NO: 1003571 - DNA, 25 bp, Homo sapien
gagcagagccaggtcgtctctgcag

SEQ ID NO: 1003572 - DNA, 25 bp, Homo sapien
gccggcgcctcagccctgacgccat

SEQ ID NO: 1003573 - DNA, 25 bp, Homo sapien
ccgggaaggacgctctgctggctca

SEQ ID NO: 1003574 - DNA, 25 bp, Homo sapien
tggtacagtgaccactcagcagctc

SEQ ID NO: 1003575 - DNA, 25 bp, Homo sapien
gctggtacagtgaccactcagcagc

SEQ ID NO: 1003576 - DNA, 25 bp, Homo sapien
ggtacagtgaccactcagcagctct

SEQ ID NO: 1003577 - DNA, 25 bp, Homo sapien
ctggtacagtgaccactcagcagct

SEQ ID NO: 1003578 - DNA, 25 bp, Homo sapien
gggcctggcatgtgtgagtagccat

SEQ ID NO: 1003579 - DNA, 25 bp, Homo sapien
gagggcctggcatgtgtgagtagcc

SEQ ID NO: 1003580 - DNA, 25 bp, Homo sapien
gatggggagggcctggcatgtgtga

SEQ ID NO: 1003581 - DNA, 25 bp, Homo sapien
gggagggcctggcatgtgtgagtag

SEQ ID NO: 1003582 - DNA, 25 bp, Homo sapien
ctgcgcgggcccttggagggtagag

SEQ ID NO: 1003583 - DNA, 25 bp, Homo sapien
aggatgggaacttctgcgcgggccc

SEQ ID NO: 1003584 - DNA, 25 bp, Homo sapien
atgggaacttctgcgcgggcccttg

SEQ ID NO: 1003585 - DNA, 25 bp, Homo sapien
tctgcgcgggcccttggagggtaga

SEQ ID NO: 1003586 - DNA, 25 bp, Homo sapien
gattccagagcttgcacactcccta

SEQ ID NO: 1003587 - DNA, 25 bp, Homo sapien
ctgctagggctccaagtgccgactt

SEQ ID NO: 1003588 - DNA, 25 bp, Homo sapien
gctccaagtgccgacttgcagaggc

SEQ ID NO: 1003589 - DNA, 25 bp, Homo sapien
tcggaccctgcgcaggattccagag

SEQ ID NO: 1003590 - DNA, 25 bp, Homo sapien
tgcgcagagccggatggtggcagaa

SEQ ID NO: 1003591 - DNA, 25 bp, Homo sapien
ctgcgtgtgcgcagagccggatggt

SEQ ID NO: 1003592 - DNA, 25 bp, Homo sapien
tcaactaccaggtgaggcaaagcac

SEQ ID NO: 1003593 - DNA, 25 bp, Homo sapien
tggcagaagagagctggcatgcagg

SEQ ID NO: 1003594 - DNA, 25 bp, Homo sapien
gatgtgagtcatcaaaacttcctcc

SEQ ID NO: 1003595 - DNA, 25 bp, Homo sapien
tgatgtgagtcatcaaaacttcctc

SEQ ID NO: 1003596 - DNA, 25 bp, Homo sapien
tcttccagccaaaagtggggcccag

SEQ ID NO: 1003597 - DNA, 25 bp, Homo sapien
ttccagccaaaagtggggcccagcc

SEQ ID NO: 1003598 - DNA, 25 bp, Homo sapien
ggcccagcagagtgtttgaccacgg

SEQ ID NO: 1003599 - DNA, 25 bp, Homo sapien
ggcccgtcctccgtggatccctcca

SEQ ID NO: 1003600 - DNA, 25 bp, Homo sapien
gtcctccgtggatccctccaggccc

SEQ ID NO: 1003601 - DNA, 25 bp, Homo sapien
cctcctgcagtcatgctcttagcct

SEQ ID NO: 1003602 - DNA, 25 bp, Homo sapien
cgtccacaggcgatgctcacctgtt

SEQ ID NO: 1003603 - DNA, 25 bp, Homo sapien
agggttccaccaggcagcgcttggt

SEQ ID NO: 1003604 - DNA, 25 bp, Homo sapien
aaggacacgcaccagagctgctttg

SEQ ID NO: 1003605 - DNA, 25 bp, Homo sapien
ctgccaccctgtgaggtgacagccg

SEQ ID NO: 1003606 - DNA, 25 bp, Homo sapien
ggcgggcgggcctcaccaaatccac

SEQ ID NO: 1003607 - DNA, 25 bp, Homo sapien
gtggcgggcgggcctcaccaaatcc

SEQ ID NO: 1003608 - DNA, 25 bp, Homo sapien
tggcgggcgggcctcaccaaatcca

SEQ ID NO: 1003609 - DNA, 25 bp, Homo sapien
cagcagaacaatgggcaccagggct

SEQ ID NO: 1003610 - DNA, 25 bp, Homo sapien
cgcacccctaggagtcttctgtttg

SEQ ID NO: 1003611 - DNA, 25 bp, Homo sapien
caccagggctggacggttttgggtg

SEQ ID NO: 1003612 - DNA, 25 bp, Homo sapien
acaaggatgccgcacccctaggagt

SEQ ID NO: 1003613 - DNA, 25 bp, Homo sapien
tcgtcacttgtctagcgcctggagc

SEQ ID NO: 1003614 - DNA, 25 bp, Homo sapien
aaggcttagccaagctcgtcacttg

SEQ ID NO: 1003615 - DNA, 25 bp, Homo sapien
taattgcagagggtgaaagcgctac

SEQ ID NO: 1003616 - DNA, 25 bp, Homo sapien
gagcttcccttctgtgccagacatg

SEQ ID NO: 1003617 - DNA, 25 bp, Homo sapien
cacaggctttccagtggaaatgcca

SEQ ID NO: 1003618 - DNA, 25 bp, Homo sapien
tacgaatggacctggtgattccggg

SEQ ID NO: 1003619 - DNA, 25 bp, Homo sapien
caaggccagcgggtgaacatttcca

SEQ ID NO: 1003620 - DNA, 25 bp, Homo sapien
ggaaatgccatccaccgcaattacg

SEQ ID NO: 1003621 - DNA, 25 bp, Homo sapien
tggactcaaacgagccacgtacctc

SEQ ID NO: 1003622 - DNA, 25 bp, Homo sapien
gagagggcgttgctgagagggaatt

SEQ ID NO: 1003623 - DNA, 25 bp, Homo sapien
cagccctgagattctatctccggga

SEQ ID NO: 1003624 - DNA, 25 bp, Homo sapien
aataactgtatgaaggagagggcgt

SEQ ID NO: 1003625 - DNA, 25 bp, Homo sapien
tatgccatgcaagcagtaacgctgg

SEQ ID NO: 1003626 - DNA, 25 bp, Homo sapien
ccctgttacacataatgacaatatt

SEQ ID NO: 1003627 - DNA, 25 bp, Homo sapien
tccacttaacacatcacattccggt

SEQ ID NO: 1003628 - DNA, 25 bp, Homo sapien
cattttactcatcccctaggctgtg

SEQ ID NO: 1003629 - DNA, 25 bp, Homo sapien
gaaacagctactgcttaggagggtg

SEQ ID NO: 1003630 - DNA, 25 bp, Homo sapien
cagctactgcttaggagggtgtgca

SEQ ID NO: 1003631 - DNA, 25 bp, Homo sapien
tactgcttaggagggtgtgcacaca

SEQ ID NO: 1003632 - DNA, 25 bp, Homo sapien
ggctggaaacagctactgcttagga

SEQ ID NO: 1003633 - DNA, 25 bp, Homo sapien
aggggctcgggaatgggcagagtcc

SEQ ID NO: 1003634 - DNA, 25 bp, Homo sapien
tcctgaggctcccaaagcgcttcat

SEQ ID NO: 1003635 - DNA, 25 bp, Homo sapien
aaggccatgaggctccgactggcgc

SEQ ID NO: 1003636 - DNA, 25 bp, Homo sapien
cgtgcttcgattttggtccttgtgt

SEQ ID NO: 1003637 - DNA, 25 bp, Homo sapien
gactggcgcctctccgtgcttcgat

SEQ ID NO: 1003638 - DNA, 25 bp, Homo sapien
cacaggagtggcgacaggtgaacat

SEQ ID NO: 1003639 - DNA, 25 bp, Homo sapien
ccagggggtcttcagggcgacctca

SEQ ID NO: 1003640 - DNA, 25 bp, Homo sapien
aggtgaacatatcaggacccacaga

SEQ ID NO: 1003641 - DNA, 25 bp, Homo sapien
cacagaaccggtgtcagccccaggt

SEQ ID NO: 1003642 - DNA, 25 bp, Homo sapien
gccagggagtggagccgtcctgacg

SEQ ID NO: 1003643 - DNA, 25 bp, Homo sapien
cacagcagctggagcgtcagcccgg

SEQ ID NO: 1003644 - DNA, 25 bp, Homo sapien
ggagccgtcctgacggggctgcacc

SEQ ID NO: 1003645 - DNA, 25 bp, Homo sapien
gtggagccgtcctgacggggctgca

SEQ ID NO: 1003646 - DNA, 25 bp, Homo sapien
cagctccccgactggaatttaacgg

SEQ ID NO: 1003647 - DNA, 25 bp, Homo sapien
tttgattcatgggttccagggcccc

SEQ ID NO: 1003648 - DNA, 25 bp, Homo sapien
gaagccacacaagtccctgggctgg

SEQ ID NO: 1003649 - DNA, 25 bp, Homo sapien
gcagcaatgccgtcttcaaggaggg

SEQ ID NO: 1003650 - DNA, 25 bp, Homo sapien
gaagccagagatgcccagatctgcc

SEQ ID NO: 1003651 - DNA, 25 bp, Homo sapien
cagaagccagagatgcccagatctg

SEQ ID NO: 1003652 - DNA, 25 bp, Homo sapien
agaagccagagatgcccagatctgc

SEQ ID NO: 1003653 - DNA, 25 bp, Homo sapien
gccagagatgcccagatctgccact

SEQ ID NO: 1003654 - DNA, 25 bp, Homo sapien
agatgcccagatctgccactgccat

SEQ ID NO: 1003655 - DNA, 25 bp, Homo sapien
ggggcctctgttgggagcaagcccc

SEQ ID NO: 1003656 - DNA, 25 bp, Homo sapien
cataatggccctaacgcacaagctg

SEQ ID NO: 1003657 - DNA, 25 bp, Homo sapien
ccctaacgcacaagctggaaggttg

SEQ ID NO: 1003658 - DNA, 25 bp, Homo sapien
atggccctaacgcacaagctggaag

SEQ ID NO: 1003659 - DNA, 25 bp, Homo sapien
caagaagcctgctcggccccggcat

SEQ ID NO: 1003660 - DNA, 25 bp, Homo sapien
ccttctaacagaatgcttttcacac

SEQ ID NO: 1003661 - DNA, 25 bp, Homo sapien
ttctgtttccgccagtcgatgatcc

SEQ ID NO: 1003662 - DNA, 25 bp, Homo sapien
ttccgccagtcgatgatcccacatg

SEQ ID NO: 1003663 - DNA, 25 bp, Homo sapien
tgctcagagttccttctaacagaat

SEQ ID NO: 1003664 - DNA, 25 bp, Homo sapien
tgctgctccatgctcggcatccctg

SEQ ID NO: 1003665 - DNA, 25 bp, Homo sapien
agcatgatgggtcagggaacagcaa

SEQ ID NO: 1003666 - DNA, 25 bp, Homo sapien
gtcagggaacagcaagccagctgct

SEQ ID NO: 1003667 - DNA, 25 bp, Homo sapien
cctggaggacgcttttgtggctgtt

SEQ ID NO: 1003668 - DNA, 25 bp, Homo sapien
cccgcagcagtttcctacattcttc

SEQ ID NO: 1003669 - DNA, 25 bp, Homo sapien
cctgcggctgtacagagctgggaga

SEQ ID NO: 1003670 - DNA, 25 bp, Homo sapien
ctgggagactttgcccgcagcagtt

SEQ ID NO: 1003671 - DNA, 25 bp, Homo sapien
tacagagctgggagactttgcccgc

SEQ ID NO: 1003672 - DNA, 25 bp, Homo sapien
tccagcggcaagaacctgccctgat

SEQ ID NO: 1003673 - DNA, 25 bp, Homo sapien
tctgagggctccagcggcaagaacc

SEQ ID NO: 1003674 - DNA, 25 bp, Homo sapien
cggcaagaacctgccctgattccag

SEQ ID NO: 1003675 - DNA, 25 bp, Homo sapien
gaagctgagcgctgggctcaacggg

SEQ ID NO: 1003676 - DNA, 25 bp, Homo sapien
ctctcaggagctccactagctcagg

SEQ ID NO: 1003677 - DNA, 25 bp, Homo sapien
caaacagaggacatggccattctct

SEQ ID NO: 1003678 - DNA, 25 bp, Homo sapien
ggtgattaaataagacagaatagca

SEQ ID NO: 1003679 - DNA, 25 bp, Homo sapien
caggcacaaggtgcccgaaaggacc

SEQ ID NO: 1003680 - DNA, 25 bp, Homo sapien
ggctgacggttttcctcatagaggc

SEQ ID NO: 1003681 - DNA, 25 bp, Homo sapien
gcctgggtgttttggagcctccgag

SEQ ID NO: 1003682 - DNA, 25 bp, Homo sapien
tgtctccagagaggagatgctcaaa

SEQ ID NO: 1003683 - DNA, 25 bp, Homo sapien
ttttctgggctttaggcaacatggg

SEQ ID NO: 1003684 - DNA, 25 bp, Homo sapien
tcaggaaacttggatgccgcacata

SEQ ID NO: 1003685 - DNA, 25 bp, Homo sapien
tgccaggccacataactctgcaatg

SEQ ID NO: 1003686 - DNA, 25 bp, Homo sapien
tagaggactctaactcgctgagggc

SEQ ID NO: 1003687 - DNA, 25 bp, Homo sapien
ctggacacaggatgtgcaggccagc

SEQ ID NO: 1003688 - DNA, 25 bp, Homo sapien
tgtgtctatctgcaggaagggtcgc

SEQ ID NO: 1003689 - DNA, 25 bp, Homo sapien
cactgtggtattggaaagttggagc

SEQ ID NO: 1003690 - DNA, 25 bp, Homo sapien
cttccttccgaaggccactgtggta

SEQ ID NO: 1003691 - DNA, 25 bp, Homo sapien
caggaagggtcgctgcaggctctct

SEQ ID NO: 1003692 - DNA, 25 bp, Homo sapien
atataaatcacctgtgcacaccatg

SEQ ID NO: 1003693 - DNA, 25 bp, Homo sapien
gctcgtgttctttggtattaatgat

SEQ ID NO: 1003694 - DNA, 25 bp, Homo sapien
acaccatgaggttcctccaggaggc

SEQ ID NO: 1003695 - DNA, 25 bp, Homo sapien
tagcagttgctcgtgttctttggta

SEQ ID NO: 1003696 - DNA, 25 bp, Homo sapien
ccccaaagcaggtctcgcctctgca

SEQ ID NO: 1003697 - DNA, 25 bp, Homo sapien
caggtctcgcctctgcaccatcggt

SEQ ID NO: 1003698 - DNA, 25 bp, Homo sapien
tcccatcccccattggtctcctcct

SEQ ID NO: 1003699 - DNA, 25 bp, Homo sapien
accatcggtacagtcccacaggccc

SEQ ID NO: 1003700 - DNA, 25 bp, Homo sapien
tcaagttgctgggatataaaggaag

SEQ ID NO: 1003701 - DNA, 25 bp, Homo sapien
tgaaaaataaactcaagttgctggg

SEQ ID NO: 1003702 - DNA, 25 bp, Homo sapien
tgtctgtgatccaacgctgaaatgg

SEQ ID NO: 1003703 - DNA, 25 bp, Homo sapien
gactcattcgaatttcaaacagctc

SEQ ID NO: 1003704 - DNA, 25 bp, Homo sapien
ccactgcatgattttagggttctgg

SEQ ID NO: 1003705 - DNA, 25 bp, Homo sapien
tatgagataaatgtgtcaactaccc

SEQ ID NO: 1003706 - DNA, 25 bp, Homo sapien
gaagacagtcgcttccaaaaagaga

SEQ ID NO: 1003707 - DNA, 25 bp, Homo sapien
ggttttgatgctaggaattctttct

SEQ ID NO: 1003708 - DNA, 25 bp, Homo sapien
ctttaagttctataatgtctatttt

SEQ ID NO: 1003709 - DNA, 25 bp, Homo sapien
taaatatttttgccagaactgtttc

SEQ ID NO: 1003710 - DNA, 25 bp, Homo sapien
taagttctataatgtctattttaaa

SEQ ID NO: 1003711 - DNA, 25 bp, Homo sapien
atatttttgccagaactgtttccat

SEQ ID NO: 1003712 - DNA, 25 bp, Homo sapien
aatgagggagagatttaacatcgac

SEQ ID NO: 1003713 - DNA, 25 bp, Homo sapien
ttccttctagtacgggctccaggct

SEQ ID NO: 1003714 - DNA, 25 bp, Homo sapien
ctgagcggctgtcccaagatgtgga

SEQ ID NO: 1003715 - DNA, 25 bp, Homo sapien
gactttttctacgagtgaactcaga

SEQ ID NO: 1003716 - DNA, 25 bp, Homo sapien
aaacccgcaagctctggacagaaca

SEQ ID NO: 1003717 - DNA, 25 bp, Homo sapien
taacacccatttgcagctgacagtg

SEQ ID NO: 1003718 - DNA, 25 bp, Homo sapien
tgtctgtctccagatgccgtgcctg

SEQ ID NO: 1003719 - DNA, 25 bp, Homo sapien
tgtgcgtctctacaggagttggtgt

SEQ ID NO: 1003720 - DNA, 25 bp, Homo sapien
ctgtgggccatgaaggcacggatgc

SEQ ID NO: 1003721 - DNA, 25 bp, Homo sapien
gaaggcacggatgctgcagccgcat

SEQ ID NO: 1003722 - DNA, 25 bp, Homo sapien
tgtgggccatgaaggcacggatgct

SEQ ID NO: 1003723 - DNA, 25 bp, Homo sapien
gccatgaaggcacggatgctgcagc

SEQ ID NO: 1003724 - DNA, 25 bp, Homo sapien
aggtcccgctcccttcgcagctgtc

SEQ ID NO: 1003725 - DNA, 25 bp, Homo sapien
ggtcccgctcccttcgcagctgtct

SEQ ID NO: 1003726 - DNA, 25 bp, Homo sapien
ccaccaacaataaagagctgcagtg

SEQ ID NO: 1003727 - DNA, 25 bp, Homo sapien
aacaaggcaaactgcgcacacatcc

SEQ ID NO: 1003728 - DNA, 25 bp, Homo sapien
agcacattcaatctacacaacatcg

SEQ ID NO: 1003729 - DNA, 25 bp, Homo sapien
ctctgactaggagcccttgaaggca

SEQ ID NO: 1003730 - DNA, 25 bp, Homo sapien
aacatcgcaagttccccaacaaggc

SEQ ID NO: 1003731 - DNA, 25 bp, Homo sapien
tgaaacaatagcatcaaggtcttac

SEQ ID NO: 1003732 - DNA, 25 bp, Homo sapien
ctgaaacaatagcatcaaggtctta

SEQ ID NO: 1003733 - DNA, 25 bp, Homo sapien
ggcgaggtagcagggttggagttgg

SEQ ID NO: 1003734 - DNA, 25 bp, Homo sapien
aacctgatgcccccgggcgaggtag

SEQ ID NO: 1003735 - DNA, 25 bp, Homo sapien
ggaggagcggaagatcccactgaag

SEQ ID NO: 1003736 - DNA, 25 bp, Homo sapien
cactgaagctcatgcgtcgagggga

SEQ ID NO: 1003737 - DNA, 25 bp, Homo sapien
cacggttttgggagagccggggctg

SEQ ID NO: 1003738 - DNA, 25 bp, Homo sapien
ggagagccggggctggtcttgggcc

SEQ ID NO: 1003739 - DNA, 25 bp, Homo sapien
agccggggctggtcttgggcctcac

SEQ ID NO: 1003740 - DNA, 25 bp, Homo sapien
agagccggggctggtcttgggcctc

SEQ ID NO: 1003741 - DNA, 25 bp, Homo sapien
tgcccgggccgaaggggctgtccac

SEQ ID NO: 1003742 - DNA, 25 bp, Homo sapien
ccacctaactatgggaatcaggaca

SEQ ID NO: 1003743 - DNA, 25 bp, Homo sapien
taggaccttgtaactcaagctaagt

SEQ ID NO: 1003744 - DNA, 25 bp, Homo sapien
gtttatagaatatcccagttagcca

SEQ ID NO: 1003745 - DNA, 25 bp, Homo sapien
aagaagagtgtggtgctataggacc

SEQ ID NO: 1003746 - DNA, 25 bp, Homo sapien
cagggtggtcctatcacaaggtgac

SEQ ID NO: 1003747 - DNA, 25 bp, Homo sapien
gagggccgagccaatgcaaatgtcc

SEQ ID NO: 1003748 - DNA, 25 bp, Homo sapien
acagctcagtttcccgcaatgtgga

SEQ ID NO: 1003749 - DNA, 25 bp, Homo sapien
tctgtttacagcatagggagcttgc

SEQ ID NO: 1003750 - DNA, 25 bp, Homo sapien
cgagaggaatgctttccggaaccct

SEQ ID NO: 1003751 - DNA, 25 bp, Homo sapien
accctccaggtctccgtccaggagc

SEQ ID NO: 1003752 - DNA, 25 bp, Homo sapien
gaggaatgctttccggaaccctcca

SEQ ID NO: 1003753 - DNA, 25 bp, Homo sapien
ctttcgagaggaatgctttccggaa

SEQ ID NO: 1003754 - DNA, 25 bp, Homo sapien
ggctgactgagacacgccagtgaga

SEQ ID NO: 1003755 - DNA, 25 bp, Homo sapien
gatctcagatgtgcagattccagac

SEQ ID NO: 1003756 - DNA, 25 bp, Homo sapien
gatgtgcagattccagactcagcct

SEQ ID NO: 1003757 - DNA, 25 bp, Homo sapien
actgagacacgccagtgagatctca

SEQ ID NO: 1003758 - DNA, 25 bp, Homo sapien
ctcttgcgcctgcagcaagcatggg

SEQ ID NO: 1003759 - DNA, 25 bp, Homo sapien
ttggcctcatactgtacccggcagg

SEQ ID NO: 1003760 - DNA, 25 bp, Homo sapien
gatgtgtttgaattaactccccgac

SEQ ID NO: 1003761 - DNA, 25 bp, Homo sapien
tgggccagtgaaccatcaggccaca

SEQ ID NO: 1003762 - DNA, 25 bp, Homo sapien
ccagggtgggtctcttatcgcccat

SEQ ID NO: 1003763 - DNA, 25 bp, Homo sapien
aggaagtgacgagggaccagggtgg

SEQ ID NO: 1003764 - DNA, 25 bp, Homo sapien
ctaggaagtgacgagggaccagggt

SEQ ID NO: 1003765 - DNA, 25 bp, Homo sapien
taggaagtgacgagggaccagggtg

SEQ ID NO: 1003766 - DNA, 25 bp, Homo sapien
tccagtgtgtaaaaggaggccatca

SEQ ID NO: 1003767 - DNA, 25 bp, Homo sapien
gatgattcatgacttgtgcacggca

SEQ ID NO: 1003768 - DNA, 25 bp, Homo sapien
ggagcacgccctttaaaatccagga

SEQ ID NO: 1003769 - DNA, 25 bp, Homo sapien
cgttcccaaggtgaaagccaagatg

SEQ ID NO: 1003770 - DNA, 25 bp, Homo sapien
ggcgcatttgcatggtctgtgcagc

SEQ ID NO: 1003771 - DNA, 25 bp, Homo sapien
ctgggctgcaggttgccgcctccat

SEQ ID NO: 1003772 - DNA, 25 bp, Homo sapien
gaggccccgggacatgcaggttggg

SEQ ID NO: 1003773 - DNA, 25 bp, Homo sapien
tctgtgcagccgtctcctcgaggac

SEQ ID NO: 1003774 - DNA, 25 bp, Homo sapien
agcagatcatgctgaatgatgtggg

SEQ ID NO: 1003775 - DNA, 25 bp, Homo sapien
gatcatgctgaatgatgtgggtggg

SEQ ID NO: 1003776 - DNA, 25 bp, Homo sapien
aagcagatcatgctgaatgatgtgg

SEQ ID NO: 1003777 - DNA, 25 bp, Homo sapien
gcagatcatgctgaatgatgtgggt

SEQ ID NO: 1003778 - DNA, 25 bp, Homo sapien
agacagcgcaggcaacggtcttggt

SEQ ID NO: 1003779 - DNA, 25 bp, Homo sapien
tgcctcactcgaaaggtccatcaga

SEQ ID NO: 1003780 - DNA, 25 bp, Homo sapien
gcatgggctggcctaagacagcgca

SEQ ID NO: 1003781 - DNA, 25 bp, Homo sapien
cacaggcaatttctagggttcggct

SEQ ID NO: 1003782 - DNA, 25 bp, Homo sapien
cccaggccgagaggaacctatctgt

SEQ ID NO: 1003783 - DNA, 25 bp, Homo sapien
cacctggggtcgctgatagaagttc

SEQ ID NO: 1003784 - DNA, 25 bp, Homo sapien
tatctgtccgcaggctgaccgggag

SEQ ID NO: 1003785 - DNA, 25 bp, Homo sapien
tcagcggtttgccattcgccattct

SEQ ID NO: 1003786 - DNA, 25 bp, Homo sapien
gcctccactcggcaaagaatctcaa

SEQ ID NO: 1003787 - DNA, 25 bp, Homo sapien
ctgcacgaaatctccaagatggagg

SEQ ID NO: 1003788 - DNA, 25 bp, Homo sapien
ctggctgctgcacgaaatctccaag

SEQ ID NO: 1003789 - DNA, 25 bp, Homo sapien
tgctgcatccaccagaacaaactca

SEQ ID NO: 1003790 - DNA, 25 bp, Homo sapien
gggccaccagatgcctggaacccag

SEQ ID NO: 1003791 - DNA, 25 bp, Homo sapien
caggggccaccagatgcctggaacc

SEQ ID NO: 1003792 - DNA, 25 bp, Homo sapien
ctagaagggtacaggggccaccaga

SEQ ID NO: 1003793 - DNA, 25 bp, Homo sapien
tagaagggtacaggggccaccagat

SEQ ID NO: 1003794 - DNA, 25 bp, Homo sapien
caggacagggtgtgacgaatgatgt

SEQ ID NO: 1003795 - DNA, 25 bp, Homo sapien
ctgttccagctgctgagcggaggag

SEQ ID NO: 1003796 - DNA, 25 bp, Homo sapien
tcaaaggctgttccagctgctgagc

SEQ ID NO: 1003797 - DNA, 25 bp, Homo sapien
aaggctgttccagctgctgagcgga

SEQ ID NO: 1003798 - DNA, 25 bp, Homo sapien
tgttccagctgctgagcggaggagg

SEQ ID NO: 1003799 - DNA, 25 bp, Homo sapien
cagctgggggtgaatccgggcgacc

SEQ ID NO: 1003800 - DNA, 25 bp, Homo sapien
tcggcgctcgcagggcgttgagagt

SEQ ID NO: 1003801 - DNA, 25 bp, Homo sapien
tccatccaaccgtcggcgctcgcag

SEQ ID NO: 1003802 - DNA, 25 bp, Homo sapien
tattttgaaatgaccctcaattcca

SEQ ID NO: 1003803 - DNA, 25 bp, Homo sapien
cgtgatattctcagacatcagccaa

SEQ ID NO: 1003804 - DNA, 25 bp, Homo sapien
gaatcagaaaagtcgtgatattctc

SEQ ID NO: 1003805 - DNA, 25 bp, Homo sapien
cagccaactacagactggcctgcag

SEQ ID NO: 1003806 - DNA, 25 bp, Homo sapien
cagaagcttcctagaaaaccacatc

SEQ ID NO: 1003807 - DNA, 25 bp, Homo sapien
taaatccggtctgatgatttacata

SEQ ID NO: 1003808 - DNA, 25 bp, Homo sapien
acccacgagaattccttcagcaggg

SEQ ID NO: 1003809 - DNA, 25 bp, Homo sapien
taatgcttcacccacgagaattcct

SEQ ID NO: 1003810 - DNA, 25 bp, Homo sapien
tccggtctgatgatttacataatgc

SEQ ID NO: 1003811 - DNA, 25 bp, Homo sapien
cttgggtagtggtccatccagggcc

SEQ ID NO: 1003812 - DNA, 25 bp, Homo sapien
ggccagccagcccaacgtagcaggg

SEQ ID NO: 1003813 - DNA, 25 bp, Homo sapien
gagcttgggtagtggtccatccagg

SEQ ID NO: 1003814 - DNA, 25 bp, Homo sapien
cgtagcaggggcccgccttccccag

SEQ ID NO: 1003815 - DNA, 25 bp, Homo sapien
gatggaggggtttacaccggagcga

SEQ ID NO: 1003816 - DNA, 25 bp, Homo sapien
ctgcccacccgagtctcaggctcct

SEQ ID NO: 1003817 - DNA, 25 bp, Homo sapien
tccgtcgccagagtggtccagcagg

SEQ ID NO: 1003818 - DNA, 25 bp, Homo sapien
gtttacaccggagcgaggagctgcc

SEQ ID NO: 1003819 - DNA, 25 bp, Homo sapien
tcacagcccgcaggtgaggagagtt

SEQ ID NO: 1003820 - DNA, 25 bp, Homo sapien
acagcccgcaggtgaggagagttgg

SEQ ID NO: 1003821 - DNA, 25 bp, Homo sapien
aggagagttggggaggccagccacc

SEQ ID NO: 1003822 - DNA, 25 bp, Homo sapien
ggggaggccagccaccgagccgtac

SEQ ID NO: 1003823 - DNA, 25 bp, Homo sapien
aggacctgggtactgctccacggtt

SEQ ID NO: 1003824 - DNA, 25 bp, Homo sapien
tgttctgaacgaaaatgggttccca

SEQ ID NO: 1003825 - DNA, 25 bp, Homo sapien
tgggtactgctccacggttcctctc

SEQ ID NO: 1003826 - DNA, 25 bp, Homo sapien
tctcccaatggctcctgcagggtgt

SEQ ID NO: 1003827 - DNA, 25 bp, Homo sapien
ttgtgcatgctgggcgtgttcccac

SEQ ID NO: 1003828 - DNA, 25 bp, Homo sapien
caatccgtgccacttgtgcatgctg

SEQ ID NO: 1003829 - DNA, 25 bp, Homo sapien
tcaatccgtgccacttgtgcatgct

SEQ ID NO: 1003830 - DNA, 25 bp, Homo sapien
aatccgtgccacttgtgcatgctgg

SEQ ID NO: 1003831 - DNA, 25 bp, Homo sapien
ccggagcgtgctgtagctaggcaca

SEQ ID NO: 1003832 - DNA, 25 bp, Homo sapien
tttccggagcgtgctgtagctaggc

SEQ ID NO: 1003833 - DNA, 25 bp, Homo sapien
acgtttgccattttccggagcgtgc

SEQ ID NO: 1003834 - DNA, 25 bp, Homo sapien
tgccattttccggagcgtgctgtag

SEQ ID NO: 1003835 - DNA, 25 bp, Homo sapien
gagcgagacacaccagggaggctga

SEQ ID NO: 1003836 - DNA, 25 bp, Homo sapien
gggggagcgagacacaccagggagg

SEQ ID NO: 1003837 - DNA, 25 bp, Homo sapien
tgcagggggagcgagacacaccagg

SEQ ID NO: 1003838 - DNA, 25 bp, Homo sapien
gggagcgagacacaccagggaggct

SEQ ID NO: 1003839 - DNA, 25 bp, Homo sapien
cctaaaccgaggggccgtgcacaca

SEQ ID NO: 1003840 - DNA, 25 bp, Homo sapien
gcaggggaaccgtagcaccaattac

SEQ ID NO: 1003841 - DNA, 25 bp, Homo sapien
gtgcaggggaaccgtagcaccaatt

SEQ ID NO: 1003842 - DNA, 25 bp, Homo sapien
cgcctaaaccgaggggccgtgcaca

SEQ ID NO: 1003843 - DNA, 25 bp, Homo sapien
agtgtttaatggaaagacgcctgtc

SEQ ID NO: 1003844 - DNA, 25 bp, Homo sapien
tggaggtacagtcccctcacctaga

SEQ ID NO: 1003845 - DNA, 25 bp, Homo sapien
caaatgattacacagggacagtggg

SEQ ID NO: 1003846 - DNA, 25 bp, Homo sapien
tcacctagaacgcttcttgagtgtt

SEQ ID NO: 1003847 - DNA, 25 bp, Homo sapien
catggcccttgtgccccaccagcat

SEQ ID NO: 1003848 - DNA, 25 bp, Homo sapien
caccagcatccacccgccccaccgg

SEQ ID NO: 1003849 - DNA, 25 bp, Homo sapien
tcctgtgtccaggaacatggccctt

SEQ ID NO: 1003850 - DNA, 25 bp, Homo sapien
ccaggaacatggcccttgtgcccca

SEQ ID NO: 1003851 - DNA, 25 bp, Homo sapien
actcgagggcctcatggaatgctaa

SEQ ID NO: 1003852 - DNA, 25 bp, Homo sapien
tctggacttagcagcacacggacca

SEQ ID NO: 1003853 - DNA, 25 bp, Homo sapien
gaatgctaatggctacggacagcac

SEQ ID NO: 1003854 - DNA, 25 bp, Homo sapien
acacggaccagctggatgcttgtgg

SEQ ID NO: 1003855 - DNA, 25 bp, Homo sapien
cgcttaggcgaaagctgagctccat

SEQ ID NO: 1003856 - DNA, 25 bp, Homo sapien
gagtctgtgtcctcgcttaggcgaa

SEQ ID NO: 1003857 - DNA, 25 bp, Homo sapien
tcacagatgagtctgtgtcctcgct

SEQ ID NO: 1003858 - DNA, 25 bp, Homo sapien
tccagaccatatggacctcacagat

SEQ ID NO: 1003859 - DNA, 25 bp, Homo sapien
aaaagaaactactggactgcagccc

SEQ ID NO: 1003860 - DNA, 25 bp, Homo sapien
tagggctccagagacactaaccagt

SEQ ID NO: 1003861 - DNA, 25 bp, Homo sapien
aaccagtgtaatttttgcaggcaac

SEQ ID NO: 1003862 - DNA, 25 bp, Homo sapien
catctatttgcaattaggcaagggc

SEQ ID NO: 1003863 - DNA, 25 bp, Homo sapien
tcagagggcactggtaggtctctgg

SEQ ID NO: 1003864 - DNA, 25 bp, Homo sapien
gggagcactggtagatctccgggtg

SEQ ID NO: 1003865 - DNA, 25 bp, Homo sapien
agcactggtagatctccgggtgcag

SEQ ID NO: 1003866 - DNA, 25 bp, Homo sapien
ttcagagggcactggtaggcctctg

SEQ ID NO: 1003867 - DNA, 25 bp, Homo sapien
ctggggtgcagggggtgctggtaga

SEQ ID NO: 1003868 - DNA, 25 bp, Homo sapien
tggggtgcagggggtgctggtagac

SEQ ID NO: 1003869 - DNA, 25 bp, Homo sapien
cactggtagaccccagggtacaggg

SEQ ID NO: 1003870 - DNA, 25 bp, Homo sapien
gcactggtagaccccagggtacagg

SEQ ID NO: 1003871 - DNA, 25 bp, Homo sapien
tgctggtaggtccccgggtagaggc

SEQ ID NO: 1003872 - DNA, 25 bp, Homo sapien
ggtaggtccccgggtagaggcagca

SEQ ID NO: 1003873 - DNA, 25 bp, Homo sapien
gctgagcataaccttcaggtgaagg

SEQ ID NO: 1003874 - DNA, 25 bp, Homo sapien
agctgagcataaccttcaggtgaag

SEQ ID NO: 1003875 - DNA, 25 bp, Homo sapien
cagctgagcataaccttcaggtgaa

SEQ ID NO: 1003876 - DNA, 25 bp, Homo sapien
tcatggaaaagacgctgggagcctg

SEQ ID NO: 1003877 - DNA, 25 bp, Homo sapien
ttggctcatggaaaagacgctggga

SEQ ID NO: 1003878 - DNA, 25 bp, Homo sapien
ccaggaccaggcctttggctcatgg

SEQ ID NO: 1003879 - DNA, 25 bp, Homo sapien
ctttggctcatggaaaagacgctgg

SEQ ID NO: 1003880 - DNA, 25 bp, Homo sapien
gccccaaagcctggtgatagccgat

SEQ ID NO: 1003881 - DNA, 25 bp, Homo sapien
tcactgccaggtcagagtatatcaa

SEQ ID NO: 1003882 - DNA, 25 bp, Homo sapien
tctttgtcgtgcattcatcagcagc

SEQ ID NO: 1003883 - DNA, 25 bp, Homo sapien
tccgtgaccagccatgggttggcag

SEQ ID NO: 1003884 - DNA, 25 bp, Homo sapien
cggtgatcacgttcattggtcccat

SEQ ID NO: 1003885 - DNA, 25 bp, Homo sapien
agacagctggtgcttcatcggtgat

SEQ ID NO: 1003886 - DNA, 25 bp, Homo sapien
ggtgcttcatcggtgatcacgttca

SEQ ID NO: 1003887 - DNA, 25 bp, Homo sapien
gtcctgaaaggacggcagacagctg

SEQ ID NO: 1003888 - DNA, 25 bp, Homo sapien
cattccagccggatagaggctatgg

SEQ ID NO: 1003889 - DNA, 25 bp, Homo sapien
tggagttcccaaactggctcattcc

SEQ ID NO: 1003890 - DNA, 25 bp, Homo sapien
gggtgcaaaggtcccaggccatcac

SEQ ID NO: 1003891 - DNA, 25 bp, Homo sapien
ggccatcaccagctcggagggtgcg

SEQ ID NO: 1003892 - DNA, 25 bp, Homo sapien
gatcactgtttaagaggtttgtggc

SEQ ID NO: 1003893 - DNA, 25 bp, Homo sapien
tttgacaaatgggagaaacagtagt

SEQ ID NO: 1003894 - DNA, 25 bp, Homo sapien
tttcaatatccgtataaagcaggaa

SEQ ID NO: 1003895 - DNA, 25 bp, Homo sapien
cacggttagctcaagtgatcactgt

SEQ ID NO: 1003896 - DNA, 25 bp, Homo sapien
tgggccggagtttacacaggaggac

SEQ ID NO: 1003897 - DNA, 25 bp, Homo sapien
tacttggcatcaggtgtctggagac

SEQ ID NO: 1003898 - DNA, 25 bp, Homo sapien
ctgcataatcgagtcaccaccgtgg

SEQ ID NO: 1003899 - DNA, 25 bp, Homo sapien
tcacccaagcgttaggcacgtgtgg

SEQ ID NO: 1003900 - DNA, 25 bp, Homo sapien
tggtgtccataaccgcgcttcccat

SEQ ID NO: 1003901 - DNA, 25 bp, Homo sapien
tgtgcacgcgcagcgaacgcctctt

SEQ ID NO: 1003902 - DNA, 25 bp, Homo sapien
ttcttcttggtgtccataaccgcgc

SEQ ID NO: 1003903 - DNA, 25 bp, Homo sapien
aatgtgcacgcgcagcgaacgcctc

SEQ ID NO: 1003904 - DNA, 25 bp, Homo sapien
gcataaatgtaatcctcggccgcag

SEQ ID NO: 1003905 - DNA, 25 bp, Homo sapien
cgcagaataaaccagctcggagcct

SEQ ID NO: 1003906 - DNA, 25 bp, Homo sapien
tacggaaccctcgtaggcaaatcag

SEQ ID NO: 1003907 - DNA, 25 bp, Homo sapien
tctcccgctgggtgacaaagttttc

SEQ ID NO: 1003908 - DNA, 25 bp, Homo sapien
gctgcgcgcgaagtagcacgtgctt

SEQ ID NO: 1003909 - DNA, 25 bp, Homo sapien
gcccagagagcggtgcgtggcgctg

SEQ ID NO: 1003910 - DNA, 25 bp, Homo sapien
gcacgtgcttctcgaaacaccgcag

SEQ ID NO: 1003911 - DNA, 25 bp, Homo sapien
ctcgctgcgagctggtttcggatcc

SEQ ID NO: 1003912 - DNA, 25 bp, Homo sapien
agagctgggctttgcgcaggggact

SEQ ID NO: 1003913 - DNA, 25 bp, Homo sapien
gggaggagaccctggtggccaccgc

SEQ ID NO: 1003914 - DNA, 25 bp, Homo sapien
aggagaccctggtggccaccgccat

SEQ ID NO: 1003915 - DNA, 25 bp, Homo sapien
caccaaggctgtggcaggttctcag

SEQ ID NO: 1003916 - DNA, 25 bp, Homo sapien
ctccacaccaccaaggctgtggcag

SEQ ID NO: 1003917 - DNA, 25 bp, Homo sapien
tcaatgattgggcagtgactcccaa

SEQ ID NO: 1003918 - DNA, 25 bp, Homo sapien
gaaaccctggtaattatgcatcgcc

SEQ ID NO: 1003919 - DNA, 25 bp, Homo sapien
agtgaaaccctggtaattatgcatc

SEQ ID NO: 1003920 - DNA, 25 bp, Homo sapien
tcaatcgtcaatgattgggcagtga

SEQ ID NO: 1003921 - DNA, 25 bp, Homo sapien
agctctgcttattcccgaggccaac

SEQ ID NO: 1003922 - DNA, 25 bp, Homo sapien
cacatgggccaatctaagctctgct

SEQ ID NO: 1003923 - DNA, 25 bp, Homo sapien
cacgaggccttgttgagcttggaga

SEQ ID NO: 1003924 - DNA, 25 bp, Homo sapien
tggccaaatatttcgcacatgggcc

SEQ ID NO: 1003925 - DNA, 25 bp, Homo sapien
ggcgaggagacttaaggctgtaaaa

SEQ ID NO: 1003926 - DNA, 25 bp, Homo sapien
tcattctcgggcgaggagacttaag

SEQ ID NO: 1003927 - DNA, 25 bp, Homo sapien
ttctcgggcgaggagacttaaggct

SEQ ID NO: 1003928 - DNA, 25 bp, Homo sapien
gacttaaggctgtaaaatctccatt

SEQ ID NO: 1003929 - DNA, 25 bp, Homo sapien
gcagtggatttagtgaaacagacat

SEQ ID NO: 1003930 - DNA, 25 bp, Homo sapien
tctcgcagtggatttagtgaaacag

SEQ ID NO: 1003931 - DNA, 25 bp, Homo sapien
ttcctcttctcgcagtggatttagt

SEQ ID NO: 1003932 - DNA, 25 bp, Homo sapien
cctcttctcgcagtggatttagtga

SEQ ID NO: 1003933 - DNA, 25 bp, Homo sapien
gggtacgtggccaactcatgacccc

SEQ ID NO: 1003934 - DNA, 25 bp, Homo sapien
cagccagtcttggtggacggacgtc

SEQ ID NO: 1003935 - DNA, 25 bp, Homo sapien
caagtgcctgtaacggattgggctg

SEQ ID NO: 1003936 - DNA, 25 bp, Homo sapien
ctggagtggagatcaaaggtcaacc

SEQ ID NO: 1003937 - DNA, 25 bp, Homo sapien
tcagatggcctgtgggcttgttttt

SEQ ID NO: 1003938 - DNA, 25 bp, Homo sapien
tattttctccgcttagtgccggaca

SEQ ID NO: 1003939 - DNA, 25 bp, Homo sapien
aattgtcacaacgtcatctcgtttg

SEQ ID NO: 1003940 - DNA, 25 bp, Homo sapien
ggtctgagctatctcattaattgtc

SEQ ID NO: 1003941 - DNA, 25 bp, Homo sapien
ggtgctgctgtccatccggtgacac

SEQ ID NO: 1003942 - DNA, 25 bp, Homo sapien
gtcacctccctggaactgtcccgac

SEQ ID NO: 1003943 - DNA, 25 bp, Homo sapien
catccggtgacactggataacattt

SEQ ID NO: 1003944 - DNA, 25 bp, Homo sapien
gataacatttgattctgagcccgtg

SEQ ID NO: 1003945 - DNA, 25 bp, Homo sapien
ctctacttcgacgatgacaccataa

SEQ ID NO: 1003946 - DNA, 25 bp, Homo sapien
ctacttcgacgatgacaccataacc

SEQ ID NO: 1003947 - DNA, 25 bp, Homo sapien
caggcaaatgagtctctacttcgac

SEQ ID NO: 1003948 - DNA, 25 bp, Homo sapien
ggcaaatgagtctctacttcgacga

SEQ ID NO: 1003949 - DNA, 25 bp, Homo sapien
tagttctttaggagaaggctcccaa

SEQ ID NO: 1003950 - DNA, 25 bp, Homo sapien
tccaaaggtggccagaacacggtcc

SEQ ID NO: 1003951 - DNA, 25 bp, Homo sapien
gcattagcctggataaaagccagct

SEQ ID NO: 1003952 - DNA, 25 bp, Homo sapien
tctggtttctggttgattagttctt

SEQ ID NO: 1003953 - DNA, 25 bp, Homo sapien
ctttactggtgaattggccgctggc

SEQ ID NO: 1003954 - DNA, 25 bp, Homo sapien
aagctctttactggtgaattggccg

SEQ ID NO: 1003955 - DNA, 25 bp, Homo sapien
tgaattggccgctggcagcattttc

SEQ ID NO: 1003956 - DNA, 25 bp, Homo sapien
ttatatgattgtgtaataaaagctc

SEQ ID NO: 1003957 - DNA, 25 bp, Homo sapien
tcagtccggagattggaaagaggat

SEQ ID NO: 1003958 - DNA, 25 bp, Homo sapien
ttatcccttttcagtccggagattg

SEQ ID NO: 1003959 - DNA, 25 bp, Homo sapien
cttttcagtccggagattggaaaga

SEQ ID NO: 1003960 - DNA, 25 bp, Homo sapien
tcccttttcagtccggagattggaa

SEQ ID NO: 1003961 - DNA, 25 bp, Homo sapien
tcattgcaaattgaccaacacggag

SEQ ID NO: 1003962 - DNA, 25 bp, Homo sapien
tttcattgcaaattgaccaacacgg

SEQ ID NO: 1003963 - DNA, 25 bp, Homo sapien
ttcattgcaaattgaccaacacgga

SEQ ID NO: 1003964 - DNA, 25 bp, Homo sapien
gaaactccagttggccatattgggt

SEQ ID NO: 1003965 - DNA, 25 bp, Homo sapien
tgctgtgtgcaaatcaaattccggg

SEQ ID NO: 1003966 - DNA, 25 bp, Homo sapien
agtttcagtatctaccccaggaggt

SEQ ID NO: 1003967 - DNA, 25 bp, Homo sapien
caggaggtcacgattgcccattgtg

SEQ ID NO: 1003968 - DNA, 25 bp, Homo sapien
agcagccaatgcaattatctcaagg

SEQ ID NO: 1003969 - DNA, 25 bp, Homo sapien
gacccctgcctcattcagctgtgac

SEQ ID NO: 1003970 - DNA, 25 bp, Homo sapien
tgactctgcttggaaaattcatcag

SEQ ID NO: 1003971 - DNA, 25 bp, Homo sapien
tacatctctcagttcattcggcaca

SEQ ID NO: 1003972 - DNA, 25 bp, Homo sapien
aaaggccaatcacacacctcttaca

SEQ ID NO: 1003973 - DNA, 25 bp, Homo sapien
aagtccaaaggccaatcacacacct

SEQ ID NO: 1003974 - DNA, 25 bp, Homo sapien
agacacaaagtccaaaggccaatca

SEQ ID NO: 1003975 - DNA, 25 bp, Homo sapien
acacacctcttacatcgatctcttg

SEQ ID NO: 1003976 - DNA, 25 bp, Homo sapien
tgggcctcacttggctctaggctca

SEQ ID NO: 1003977 - DNA, 25 bp, Homo sapien
gtgaggtgcttgtcacagagaaaac

SEQ ID NO: 1003978 - DNA, 25 bp, Homo sapien
tttcaatgtcactttgccagctgga

SEQ ID NO: 1003979 - DNA, 25 bp, Homo sapien
tgttcacgtctaaagagaattcccc

SEQ ID NO: 1003980 - DNA, 25 bp, Homo sapien
ttcggagcagatctggggacaaaca

SEQ ID NO: 1003981 - DNA, 25 bp, Homo sapien
attcggagcagatctggggacaaac

SEQ ID NO: 1003982 - DNA, 25 bp, Homo sapien
tattcggagcagatctggggacaaa

SEQ ID NO: 1003983 - DNA, 25 bp, Homo sapien
ttattcggagcagatctggggacaa

SEQ ID NO: 1003984 - DNA, 25 bp, Homo sapien
gcaaagcggcttgcctcggtcatga

SEQ ID NO: 1003985 - DNA, 25 bp, Homo sapien
cctgtggcagctacttctcatggca

SEQ ID NO: 1003986 - DNA, 25 bp, Homo sapien
ccagatagacaagggagctgcaccc

SEQ ID NO: 1003987 - DNA, 25 bp, Homo sapien
cagtctttgaatgcgagatccccag

SEQ ID NO: 1003988 - DNA, 25 bp, Homo sapien
tatggctcagagcaaataccaaaac

SEQ ID NO: 1003989 - DNA, 25 bp, Homo sapien
aggtttattctatgggtccttgaca

SEQ ID NO: 1003990 - DNA, 25 bp, Homo sapien
tccttgacatttgggatctggacag

SEQ ID NO: 1003991 - DNA, 25 bp, Homo sapien
catgtaatagtcaaaaggactgatg

SEQ ID NO: 1003992 - DNA, 25 bp, Homo sapien
cgtgtcgccgcgcaatgggcacagc

SEQ ID NO: 1003993 - DNA, 25 bp, Homo sapien
gatgcggaacacagatgcgtgtcgc

SEQ ID NO: 1003994 - DNA, 25 bp, Homo sapien
gcaatgggcacagcgcatacagcgc

SEQ ID NO: 1003995 - DNA, 25 bp, Homo sapien
gaggtcaccacaccgatgcggaaca

SEQ ID NO: 1003996 - DNA, 25 bp, Homo sapien
aacgattgttaggagtgtgtggaga

SEQ ID NO: 1003997 - DNA, 25 bp, Homo sapien
taaacgattgttaggagtgtgtgga

SEQ ID NO: 1003998 - DNA, 25 bp, Homo sapien
ttaaacgattgttaggagtgtgtgg

SEQ ID NO: 1003999 - DNA, 25 bp, Homo sapien
aggagttgctgttgcaatttgagtc

SEQ ID NO: 1004000 - DNA, 25 bp, Homo sapien
cacctagcccagatactttcttttt

SEQ ID NO: 1004001 - DNA, 25 bp, Homo sapien
agtaaaatgggctgacttcgtaata

SEQ ID NO: 1004002 - DNA, 25 bp, Homo sapien
tgggctgacttcgtaataagatttg

SEQ ID NO: 1004003 - DNA, 25 bp, Homo sapien
aaatgggctgacttcgtaataagat

SEQ ID NO: 1004004 - DNA, 25 bp, Homo sapien
ctgacttcgtaataagatttgaggg

SEQ ID NO: 1004005 - DNA, 25 bp, Homo sapien
ttaattatgttatttgagaccatgt

SEQ ID NO: 1004006 - DNA, 25 bp, Homo sapien
gtgcaagcttagatctttcttccta

SEQ ID NO: 1004007 - DNA, 25 bp, Homo sapien
tcatttaatgctgcacgtttttctc

SEQ ID NO: 1004008 - DNA, 25 bp, Homo sapien
ttctctaaacactgtgtgctttgta

SEQ ID NO: 1004009 - DNA, 25 bp, Homo sapien
ctgcagctgacatagcagcgctttc

SEQ ID NO: 1004010 - DNA, 25 bp, Homo sapien
tttgtactattgtcatttccagcca

SEQ ID NO: 1004011 - DNA, 25 bp, Homo sapien
tagcagcgctttcactggcgcctga

SEQ ID NO: 1004012 - DNA, 25 bp, Homo sapien
tcactggcgcctgattttcctttgt

SEQ ID NO: 1004013 - DNA, 25 bp, Homo sapien
ttaggagatcagaaatgctgcatca

SEQ ID NO: 1004014 - DNA, 25 bp, Homo sapien
gagttatattctaatttatccagtt

SEQ ID NO: 1004015 - DNA, 25 bp, Homo sapien
ctcttctgaattaggtaagtatatg

SEQ ID NO: 1004016 - DNA, 25 bp, Homo sapien
tgtttgtgaactacctgaagttctg

SEQ ID NO: 1004017 - DNA, 25 bp, Homo sapien
gattcatggcaaataggaattaaca

SEQ ID NO: 1004018 - DNA, 25 bp, Homo sapien
tctgtttgctacacgccgtcttgag

SEQ ID NO: 1004019 - DNA, 25 bp, Homo sapien
caaaggcttttcgtgcatgtggtca

SEQ ID NO: 1004020 - DNA, 25 bp, Homo sapien
cttacatgagtaagggctgtgacag

SEQ ID NO: 1004021 - DNA, 25 bp, Homo sapien
tcccttattggacacaggctatgag

SEQ ID NO: 1004022 - DNA, 25 bp, Homo sapien
tgaggcatcgacgaaaatggcagcc

SEQ ID NO: 1004023 - DNA, 25 bp, Homo sapien
tccttttgagcatagtgatggcgca

SEQ ID NO: 1004024 - DNA, 25 bp, Homo sapien
tgcatgtggccagtagctcccttat

SEQ ID NO: 1004025 - DNA, 25 bp, Homo sapien
ccatggcgatctgcgatggctcctc

SEQ ID NO: 1004026 - DNA, 25 bp, Homo sapien
ggtcagaagggctctgtcgccatgg

SEQ ID NO: 1004027 - DNA, 25 bp, Homo sapien
caggtgtcggttggacagtgcctga

SEQ ID NO: 1004028 - DNA, 25 bp, Homo sapien
gagcagtggatcccctgggtcagaa

SEQ ID NO: 1004029 - DNA, 25 bp, Homo sapien
gatggaacattcagtgctgagaaga

SEQ ID NO: 1004030 - DNA, 25 bp, Homo sapien
gatgttaagaatatattactcagtg

SEQ ID NO: 1004031 - DNA, 25 bp, Homo sapien
gaaaagtcatggagggatgttaaga

SEQ ID NO: 1004032 - DNA, 25 bp, Homo sapien
gaattaagccataagccttgaaaag

SEQ ID NO: 1004033 - DNA, 25 bp, Homo sapien
taggtggcaaggtagctgcaaattc

SEQ ID NO: 1004034 - DNA, 25 bp, Homo sapien
ctctgcgaggctgggaaagccgtct

SEQ ID NO: 1004035 - DNA, 25 bp, Homo sapien
aaccgaggaatcagtgcagcaaaca

SEQ ID NO: 1004036 - DNA, 25 bp, Homo sapien
tagagaggcaaacccaaaacccatg

SEQ ID NO: 1004037 - DNA, 25 bp, Homo sapien
agaaggcgcgcatctctggcttctt

SEQ ID NO: 1004038 - DNA, 25 bp, Homo sapien
gaaggcgcgcatctctggcttcttg

SEQ ID NO: 1004039 - DNA, 25 bp, Homo sapien
aaggcgcgcatctctggcttcttga

SEQ ID NO: 1004040 - DNA, 25 bp, Homo sapien
gctgctggattgaagccctgagccg

SEQ ID NO: 1004041 - DNA, 25 bp, Homo sapien
tcaaggtcagggaatagcaggtcgt

SEQ ID NO: 1004042 - DNA, 25 bp, Homo sapien
tcgaggcaggcgcatgcatttcaag

SEQ ID NO: 1004043 - DNA, 25 bp, Homo sapien
tctgttctgaaagcgaagcgtcttc

SEQ ID NO: 1004044 - DNA, 25 bp, Homo sapien
taaatggtgatcttctaaatctgtg

SEQ ID NO: 1004045 - DNA, 25 bp, Homo sapien
tctgtgtccacaaattccaaaaccc

SEQ ID NO: 1004046 - DNA, 25 bp, Homo sapien
ggatgtcaggatattgtacaagaga

SEQ ID NO: 1004047 - DNA, 25 bp, Homo sapien
ccggtaggacaaatactggtaggat

SEQ ID NO: 1004048 - DNA, 25 bp, Homo sapien
cagtccacttgaattgtgcacacaa

SEQ ID NO: 1004049 - DNA, 25 bp, Homo sapien
acatcatgccatatacaagttcaga

SEQ ID NO: 1004050 - DNA, 25 bp, Homo sapien
tagcctgtgaagtgtcagtaccaga

SEQ ID NO: 1004051 - DNA, 25 bp, Homo sapien
gaactgcatcactgaatataccaac

SEQ ID NO: 1004052 - DNA, 25 bp, Homo sapien
gcagagcctggtagcatttggtcaa

SEQ ID NO: 1004053 - DNA, 25 bp, Homo sapien
aaaaaccctattgccagagtcctgc

SEQ ID NO: 1004054 - DNA, 25 bp, Homo sapien
gttgtagtcgtagcatacgccccgc

SEQ ID NO: 1004055 - DNA, 25 bp, Homo sapien
ttacattcataggaaggcccctgcc

SEQ ID NO: 1004056 - DNA, 25 bp, Homo sapien
agctccacagtgacacggaatcttg

SEQ ID NO: 1004057 - DNA, 25 bp, Homo sapien
cagttcatccacttccggcagttca

SEQ ID NO: 1004058 - DNA, 25 bp, Homo sapien
gttcatccacttccggcagttcaca

SEQ ID NO: 1004059 - DNA, 25 bp, Homo sapien
agtgacacggaatcttgtgctggtc

SEQ ID NO: 1004060 - DNA, 25 bp, Homo sapien
tggcactcggcattttgaagacaac

SEQ ID NO: 1004061 - DNA, 25 bp, Homo sapien
caaatgcgggacgtttcctacagaa

SEQ ID NO: 1004062 - DNA, 25 bp, Homo sapien
tatgttcacgaagggagaggagcac

SEQ ID NO: 1004063 - DNA, 25 bp, Homo sapien
tctagacgctagctggaaagacctt

SEQ ID NO: 1004064 - DNA, 25 bp, Homo sapien
cctttctggattctccgactggagc

SEQ ID NO: 1004065 - DNA, 25 bp, Homo sapien
aggtgcacacgaatggttgatatac

SEQ ID NO: 1004066 - DNA, 25 bp, Homo sapien
gtcaccacttcagccacacaattag

SEQ ID NO: 1004067 - DNA, 25 bp, Homo sapien
ttgtgtcctctctcaaaagtcacca

SEQ ID NO: 1004068 - DNA, 25 bp, Homo sapien
gccctcctgtgagcgtcgcgtcaat

SEQ ID NO: 1004069 - DNA, 25 bp, Homo sapien
tccatgcggaacatgtacacaccac

SEQ ID NO: 1004070 - DNA, 25 bp, Homo sapien
cgtcgcgtcaatcacatggtcgtta

SEQ ID NO: 1004071 - DNA, 25 bp, Homo sapien
cacatggtcgttatccatgcggaac

SEQ ID NO: 1004072 - DNA, 25 bp, Homo sapien
tcaatgaccatggtgtgtttctcaa

SEQ ID NO: 1004073 - DNA, 25 bp, Homo sapien
gatagtcccgatgtactcaatgacc

SEQ ID NO: 1004074 - DNA, 25 bp, Homo sapien
tcctgttggctacttcgtttcgaat

SEQ ID NO: 1004075 - DNA, 25 bp, Homo sapien
ctgagactcataaagcttctctttc

SEQ ID NO: 1004076 - DNA, 25 bp, Homo sapien
gatgagatagctgagttcccaccaa

SEQ ID NO: 1004077 - DNA, 25 bp, Homo sapien
tctagtcggaattactaggaggacc

SEQ ID NO: 1004078 - DNA, 25 bp, Homo sapien
tcaccctcgggtcttattagaagcc

SEQ ID NO: 1004079 - DNA, 25 bp, Homo sapien
gtaaacagggttcagacttggctct

SEQ ID NO: 1004080 - DNA, 25 bp, Homo sapien
gaaaacagtctcacatgctgcagga

SEQ ID NO: 1004081 - DNA, 25 bp, Homo sapien
tccaaatggcggacatgaaaagctg

SEQ ID NO: 1004082 - DNA, 25 bp, Homo sapien
tgagtgggttacttctaaatggccc

SEQ ID NO: 1004083 - DNA, 25 bp, Homo sapien
gaagctacgtcagttgatcgagagg

SEQ ID NO: 1004084 - DNA, 25 bp, Homo sapien
actataaggtgcgttcagttctcca

SEQ ID NO: 1004085 - DNA, 25 bp, Homo sapien
aacaaactgtttactataaggtgcg

SEQ ID NO: 1004086 - DNA, 25 bp, Homo sapien
tcttccggtactgcgatgacttgga

SEQ ID NO: 1004087 - DNA, 25 bp, Homo sapien
gagaccgtgccagatacacattgga

SEQ ID NO: 1004088 - DNA, 25 bp, Homo sapien
catgagaggatttcggccgtatcgg

SEQ ID NO: 1004089 - DNA, 25 bp, Homo sapien
catgggcactcattttaggttcaga

SEQ ID NO: 1004090 - DNA, 25 bp, Homo sapien
gttcagaacgggcacaacctgtggg

SEQ ID NO: 1004091 - DNA, 25 bp, Homo sapien
gttaacggcaagaggaagttccatg

SEQ ID NO: 1004092 - DNA, 25 bp, Homo sapien
tggccataaatacccaagtgtcagg

SEQ ID NO: 1004093 - DNA, 25 bp, Homo sapien
ggcagggcgattccaaagaaaacaa

SEQ ID NO: 1004094 - DNA, 25 bp, Homo sapien
gacagaaatcagtgctgctgcgatc

SEQ ID NO: 1004095 - DNA, 25 bp, Homo sapien
gaggttatcgctctccatgtcctgg

SEQ ID NO: 1004096 - DNA, 25 bp, Homo sapien
acaggctccaaaatcttatcccaga

SEQ ID NO: 1004097 - DNA, 25 bp, Homo sapien
tgattccgctatgcgtgccactgca

SEQ ID NO: 1004098 - DNA, 25 bp, Homo sapien
gcagagacggtcaggccaaacagat

SEQ ID NO: 1004099 - DNA, 25 bp, Homo sapien
ggccaaacagatcctctccttttaa

SEQ ID NO: 1004100 - DNA, 25 bp, Homo sapien
gtggaccacagagcgcagttcaagt

SEQ ID NO: 1004101 - DNA, 25 bp, Homo sapien
tagtggcacccgtcttgtgacagaa

SEQ ID NO: 1004102 - DNA, 25 bp, Homo sapien
catggacagctcttagccgaggctt

SEQ ID NO: 1004103 - DNA, 25 bp, Homo sapien
tcctcaatggagcacaggtagcggc

SEQ ID NO: 1004104 - DNA, 25 bp, Homo sapien
tctctcataggtgattgtggcaatg

SEQ ID NO: 1004105 - DNA, 25 bp, Homo sapien
tgaaatgctttggaaggcgtttctc

SEQ ID NO: 1004106 - DNA, 25 bp, Homo sapien
gatgttgttgctgtactgatgaaat

SEQ ID NO: 1004107 - DNA, 25 bp, Homo sapien
cataggtgattgtggcaatgaagga

SEQ ID NO: 1004108 - DNA, 25 bp, Homo sapien
cttctctaccctcttggtgctttct

SEQ ID NO: 1004109 - DNA, 25 bp, Homo sapien
cgcttgtgcagttgatgaataaaga

SEQ ID NO: 1004110 - DNA, 25 bp, Homo sapien
ctgagtttttcgcttgtgcagttga

SEQ ID NO: 1004111 - DNA, 25 bp, Homo sapien
tccttctctaccctcttggtgcttt

SEQ ID NO: 1004112 - DNA, 25 bp, Homo sapien
gatttccgcacaccacttccaagaa

SEQ ID NO: 1004113 - DNA, 25 bp, Homo sapien
tctttgaaagatttccgcacaccac

SEQ ID NO: 1004114 - DNA, 25 bp, Homo sapien
aatgacaacaccactgtggtctgag

SEQ ID NO: 1004115 - DNA, 25 bp, Homo sapien
agaataaccactttacaatgacaac

SEQ ID NO: 1004116 - DNA, 25 bp, Homo sapien
gactagaatccttatatccagaaag

SEQ ID NO: 1004117 - DNA, 25 bp, Homo sapien
taccatgactagaatccttatatcc

SEQ ID NO: 1004118 - DNA, 25 bp, Homo sapien
catgactagaatccttatatccaga

SEQ ID NO: 1004119 - DNA, 25 bp, Homo sapien
gcaataccatgactagaatccttat

SEQ ID NO: 1004120 - DNA, 25 bp, Homo sapien
taatctgggagggtttgcagatcct

SEQ ID NO: 1004121 - DNA, 25 bp, Homo sapien
gaggcccacggagaagtaaatgctg

SEQ ID NO: 1004122 - DNA, 25 bp, Homo sapien
gaaatggtacattaggctgcttcag

SEQ ID NO: 1004123 - DNA, 25 bp, Homo sapien
ctgcttcagccggtaagagctcact

SEQ ID NO: 1004124 - DNA, 25 bp, Homo sapien
taacctcatagctgttagggattcg

SEQ ID NO: 1004125 - DNA, 25 bp, Homo sapien
tctggagcactgctaacctcatagc

SEQ ID NO: 1004126 - DNA, 25 bp, Homo sapien
ctgttagggattcggacgtgaagaa

SEQ ID NO: 1004127 - DNA, 25 bp, Homo sapien
ggacgtgaagaaggtcggaaaatgc

SEQ ID NO: 1004128 - DNA, 25 bp, Homo sapien
gtaattgctacagatataagacctg

SEQ ID NO: 1004129 - DNA, 25 bp, Homo sapien
aaggtgacgcaaaatataaagtgcc

SEQ ID NO: 1004130 - DNA, 25 bp, Homo sapien
aagacctgatctgggaccatttggg

SEQ ID NO: 1004131 - DNA, 25 bp, Homo sapien
ggaccaaaaggtgacgcaaaatata

SEQ ID NO: 1004132 - DNA, 25 bp, Homo sapien
caaaactgtcaggagtatctcgatc

SEQ ID NO: 1004133 - DNA, 25 bp, Homo sapien
gatctggatacctgctcacttctac

SEQ ID NO: 1004134 - DNA, 25 bp, Homo sapien
tcctccttgaccaatgacagatctg

SEQ ID NO: 1004135 - DNA, 25 bp, Homo sapien
actctcaggagaggatgagggaaca

SEQ ID NO: 1004136 - DNA, 25 bp, Homo sapien
aaagagttggctagcgatcatctac

SEQ ID NO: 1004137 - DNA, 25 bp, Homo sapien
gttaaagaactgacacaaagacatc

SEQ ID NO: 1004138 - DNA, 25 bp, Homo sapien
cacgacggcgttctctgatatagca

SEQ ID NO: 1004139 - DNA, 25 bp, Homo sapien
ggagattttccactaccttcatgtc

SEQ ID NO: 1004140 - DNA, 25 bp, Homo sapien
tctgaagggcagctgaaatggttta

SEQ ID NO: 1004141 - DNA, 25 bp, Homo sapien
tcttcctgattgttatgaggtggtg

SEQ ID NO: 1004142 - DNA, 25 bp, Homo sapien
gagctcgggccaacaagtcgtcctg

SEQ ID NO: 1004143 - DNA, 25 bp, Homo sapien
cacatcaactgtcttggggccctga

SEQ ID NO: 1004144 - DNA, 25 bp, Homo sapien
agttgttgcaaaaccattggccatc

SEQ ID NO: 1004145 - DNA, 25 bp, Homo sapien
cagttgttgcaaaaccattggccat

SEQ ID NO: 1004146 - DNA, 25 bp, Homo sapien
catggctcactaacactccggcttt

SEQ ID NO: 1004147 - DNA, 25 bp, Homo sapien
taacactccggcttttccagcaagt

SEQ ID NO: 1004148 - DNA, 25 bp, Homo sapien
gaggcagggggtgttggaggattac

SEQ ID NO: 1004149 - DNA, 25 bp, Homo sapien
aggcagggggtgttggaggattact

SEQ ID NO: 1004150 - DNA, 25 bp, Homo sapien
gcagggggtgttggaggattactta

SEQ ID NO: 1004151 - DNA, 25 bp, Homo sapien
ctgagaatagtagtccgaaacccct

SEQ ID NO: 1004152 - DNA, 25 bp, Homo sapien
tgattggttccattagagggagcag

SEQ ID NO: 1004153 - DNA, 25 bp, Homo sapien
ccataaggaagaaagtgcgcaaagt

SEQ ID NO: 1004154 - DNA, 25 bp, Homo sapien
tccagggtagcactgccaaaagttc

SEQ ID NO: 1004155 - DNA, 25 bp, Homo sapien
tggctaagctcatctagaactcatg

SEQ ID NO: 1004156 - DNA, 25 bp, Homo sapien
agctcatctagaactcatgcctcaa

SEQ ID NO: 1004157 - DNA, 25 bp, Homo sapien
taagctcatctagaactcatgcctc

SEQ ID NO: 1004158 - DNA, 25 bp, Homo sapien
gttggctaagctcatctagaactca

SEQ ID NO: 1004159 - DNA, 25 bp, Homo sapien
agtgctagagtacatagcttgtttc

SEQ ID NO: 1004160 - DNA, 25 bp, Homo sapien
ttcaagtgggtaaacgtgtcagtgc

SEQ ID NO: 1004161 - DNA, 25 bp, Homo sapien
tgagtccgtttgcttcgctgtttct

SEQ ID NO: 1004162 - DNA, 25 bp, Homo sapien
tccttttctttgagcgaggtgctgc

SEQ ID NO: 1004163 - DNA, 25 bp, Homo sapien
ggttgccacatccaaaaccaccttg

SEQ ID NO: 1004164 - DNA, 25 bp, Homo sapien
tggttgccacatccaaaaccacctt

SEQ ID NO: 1004165 - DNA, 25 bp, Homo sapien
gagagaacagatagcaccagacaac

SEQ ID NO: 1004166 - DNA, 25 bp, Homo sapien
gcagaactcattagtaaggccacag

SEQ ID NO: 1004167 - DNA, 25 bp, Homo sapien
tgcagtgccaagctatgacgcgtca

SEQ ID NO: 1004168 - DNA, 25 bp, Homo sapien
gacgcgtcatcctaacatggcacta

SEQ ID NO: 1004169 - DNA, 25 bp, Homo sapien
gctggagcccagcaatcttggttta

SEQ ID NO: 1004170 - DNA, 25 bp, Homo sapien
ctaaatagtttagcgcatggatggc

SEQ ID NO: 1004171 - DNA, 25 bp, Homo sapien
taaatattgtaagcctctgtaggcc

SEQ ID NO: 1004172 - DNA, 25 bp, Homo sapien
cataaatcaatgagcttggctgcgt

SEQ ID NO: 1004173 - DNA, 25 bp, Homo sapien
gcaagttattcagtactcctcaggg

SEQ ID NO: 1004174 - DNA, 25 bp, Homo sapien
tctctactgaatggtcaaagacaag

SEQ ID NO: 1004175 - DNA, 25 bp, Homo sapien
ctcctcagggtataagatgtcttgg

SEQ ID NO: 1004176 - DNA, 25 bp, Homo sapien
gagactgtgctggagagttgcctat

SEQ ID NO: 1004177 - DNA, 25 bp, Homo sapien
cacgttatatatgaaatgcaataca

SEQ ID NO: 1004178 - DNA, 25 bp, Homo sapien
accagttgctacacatcacgttata

SEQ ID NO: 1004179 - DNA, 25 bp, Homo sapien
tatcaactcaatgtggtaataacca

SEQ ID NO: 1004180 - DNA, 25 bp, Homo sapien
gttgctggtactaatctgctgtaag

SEQ ID NO: 1004181 - DNA, 25 bp, Homo sapien
tgtttcagaagttcattccctgagt

SEQ ID NO: 1004182 - DNA, 25 bp, Homo sapien
gcttctcaactagtttattatcctt

SEQ ID NO: 1004183 - DNA, 25 bp, Homo sapien
tatcctttgtacagtcatcttctga

SEQ ID NO: 1004184 - DNA, 25 bp, Homo sapien
acaaatactgccctcaggtttttga

SEQ ID NO: 1004185 - DNA, 25 bp, Homo sapien
gcagcaggggccccagcagaatggg

SEQ ID NO: 1004186 - DNA, 25 bp, Homo sapien
ctttggcagcaggggccccagcaga

SEQ ID NO: 1004187 - DNA, 25 bp, Homo sapien
caggggccccagcagaatggggagg

SEQ ID NO: 1004188 - DNA, 25 bp, Homo sapien
gggccccagcagaatggggaggact

SEQ ID NO: 1004189 - DNA, 25 bp, Homo sapien
acaggacaggctacagcgtttcctt

SEQ ID NO: 1004190 - DNA, 25 bp, Homo sapien
gacaggacaggctacagcgtttcct

SEQ ID NO: 1004191 - DNA, 25 bp, Homo sapien
tggatgggccgactggttccaccga

SEQ ID NO: 1004192 - DNA, 25 bp, Homo sapien
aattctgtacatagctggcctgctg

SEQ ID NO: 1004193 - DNA, 25 bp, Homo sapien
tcggcttgttgaggaagctcactgg

SEQ ID NO: 1004194 - DNA, 25 bp, Homo sapien
tttggagttgcttgtgagaaatcac

SEQ ID NO: 1004195 - DNA, 25 bp, Homo sapien
aggagtagaggtagtttctgagatg

SEQ ID NO: 1004196 - DNA, 25 bp, Homo sapien
caggagtagaggtagtttctgagat

SEQ ID NO: 1004197 - DNA, 25 bp, Homo sapien
ggagtagaggtagtttctgagatgc

SEQ ID NO: 1004198 - DNA, 25 bp, Homo sapien
gagtcggtggggcagttatatctga

SEQ ID NO: 1004199 - DNA, 25 bp, Homo sapien
ctggagtcggtggggcagttatatc

SEQ ID NO: 1004200 - DNA, 25 bp, Homo sapien
tcggtggggcagttatatctgaatg

SEQ ID NO: 1004201 - DNA, 25 bp, Homo sapien
tatatctgaatggggagttgatgga

SEQ ID NO: 1004202 - DNA, 25 bp, Homo sapien
gagcgattgggttgatcccggataa

SEQ ID NO: 1004203 - DNA, 25 bp, Homo sapien
tgatcccggataactgtgtccatgg

SEQ ID NO: 1004204 - DNA, 25 bp, Homo sapien
catgggttatagtagaatcttggcc

SEQ ID NO: 1004205 - DNA, 25 bp, Homo sapien
aatacaactgaatgagcgattgggt

SEQ ID NO: 1004206 - DNA, 25 bp, Homo sapien
gactgctattagctactggaggtgc

SEQ ID NO: 1004207 - DNA, 25 bp, Homo sapien
gtgctgctggtaaagcaggtgtaaa

SEQ ID NO: 1004208 - DNA, 25 bp, Homo sapien
ctattagctactggaggtgctgctg

SEQ ID NO: 1004209 - DNA, 25 bp, Homo sapien
tgggagactgctattagctactgga

SEQ ID NO: 1004210 - DNA, 25 bp, Homo sapien
gaacaaatgaaggagggcctacctg

SEQ ID NO: 1004211 - DNA, 25 bp, Homo sapien
tagtctgcatgaaagtttgggtgga

SEQ ID NO: 1004212 - DNA, 25 bp, Homo sapien
ccaacagggattgatggtgaatcag

SEQ ID NO: 1004213 - DNA, 25 bp, Homo sapien
tacctgccttcgctcattagtctgc

SEQ ID NO: 1004214 - DNA, 25 bp, Homo sapien
tctgctgctgtaaaacctgccccat

SEQ ID NO: 1004215 - DNA, 25 bp, Homo sapien
tattctgctgctgtaaaacctgccc

SEQ ID NO: 1004216 - DNA, 25 bp, Homo sapien
ctgctgctgtaaaacctgccccatt

SEQ ID NO: 1004217 - DNA, 25 bp, Homo sapien
cccatttgctgttggtgttgtggag

SEQ ID NO: 1004218 - DNA, 25 bp, Homo sapien
taagtcggaactgtagaagggaatc

SEQ ID NO: 1004219 - DNA, 25 bp, Homo sapien
aagtcggaactgtagaagggaatct

SEQ ID NO: 1004220 - DNA, 25 bp, Homo sapien
tcggaactgtagaagggaatctggg

SEQ ID NO: 1004221 - DNA, 25 bp, Homo sapien
agtcggaactgtagaagggaatctg

SEQ ID NO: 1004222 - DNA, 25 bp, Homo sapien
cactgttgggttgccatccaggtaa

SEQ ID NO: 1004223 - DNA, 25 bp, Homo sapien
gatttgcatttgagactgtccctgg

SEQ ID NO: 1004224 - DNA, 25 bp, Homo sapien
tgtcatcaaattctacccgaggtgg

SEQ ID NO: 1004225 - DNA, 25 bp, Homo sapien
taaactgggcattctaacagggcta

SEQ ID NO: 1004226 - DNA, 25 bp, Homo sapien
gctgtttgatccgataatcttcaat

SEQ ID NO: 1004227 - DNA, 25 bp, Homo sapien
ccgataatcttcaatcaattcagca

SEQ ID NO: 1004228 - DNA, 25 bp, Homo sapien
cttcaatcaattcagcatgttcttt

SEQ ID NO: 1004229 - DNA, 25 bp, Homo sapien
ctgctgctgtttgatccgataatct

SEQ ID NO: 1004230 - DNA, 25 bp, Homo sapien
tcatactgcttacgctgtgaatcat

SEQ ID NO: 1004231 - DNA, 25 bp, Homo sapien
tcttagattttctgtgagcaccaat

SEQ ID NO: 1004232 - DNA, 25 bp, Homo sapien
cgttgtttagctgaaagggccttct

SEQ ID NO: 1004233 - DNA, 25 bp, Homo sapien
gaaccatgctttgctgttcagtaac

SEQ ID NO: 1004234 - DNA, 25 bp, Homo sapien
gggcaccttgcatacctgaccttta

SEQ ID NO: 1004235 - DNA, 25 bp, Homo sapien
tgggacccctgcaaataactagaaa

SEQ ID NO: 1004236 - DNA, 25 bp, Homo sapien
taaacactatcctgaaccaccttgg

SEQ ID NO: 1004237 - DNA, 25 bp, Homo sapien
tgacctttacaccatgctgctaacc

SEQ ID NO: 1004238 - DNA, 25 bp, Homo sapien
tttggaggattaggcctagaaatct

SEQ ID NO: 1004239 - DNA, 25 bp, Homo sapien
tggaggattaggcctagaaatctga

SEQ ID NO: 1004240 - DNA, 25 bp, Homo sapien
ggaggattaggcctagaaatctgat

SEQ ID NO: 1004241 - DNA, 25 bp, Homo sapien
gaggattaggcctagaaatctgatg

SEQ ID NO: 1004242 - DNA, 25 bp, Homo sapien
tgtgttccagttaccacctggccca

SEQ ID NO: 1004243 - DNA, 25 bp, Homo sapien
tgttccagttaccacctggcccata

SEQ ID NO: 1004244 - DNA, 25 bp, Homo sapien
gtgttccagttaccacctggcccat

SEQ ID NO: 1004245 - DNA, 25 bp, Homo sapien
tgtgccatcactttatttatacctt

SEQ ID NO: 1004246 - DNA, 25 bp, Homo sapien
tgcccagattgttttgtgccatcac

SEQ ID NO: 1004247 - DNA, 25 bp, Homo sapien
cattataggatctgtaattgcatca

SEQ ID NO: 1004248 - DNA, 25 bp, Homo sapien
caccattggtggcatgcccagattg

SEQ ID NO: 1004249 - DNA, 25 bp, Homo sapien
caatattagggaagaacggttctga

SEQ ID NO: 1004250 - DNA, 25 bp, Homo sapien
aagaacggttctgatcgctgacgaa

SEQ ID NO: 1004251 - DNA, 25 bp, Homo sapien
tagggaagaacggttctgatcgctg

SEQ ID NO: 1004252 - DNA, 25 bp, Homo sapien
ttctgatcgctgacgaatcatggct

SEQ ID NO: 1004253 - DNA, 25 bp, Homo sapien
gttaactgttgattgacctggaatg

SEQ ID NO: 1004254 - DNA, 25 bp, Homo sapien
gaggcccagtttgagttgcaggttt

SEQ ID NO: 1004255 - DNA, 25 bp, Homo sapien
catgctactggtaccagactgactt

SEQ ID NO: 1004256 - DNA, 25 bp, Homo sapien
gggtccagacatgctactggtacca

SEQ ID NO: 1004257 - DNA, 25 bp, Homo sapien
gaccccgatggcctaatgtctgaat

SEQ ID NO: 1004258 - DNA, 25 bp, Homo sapien
gcattatccaaaacacggccaggcg

SEQ ID NO: 1004259 - DNA, 25 bp, Homo sapien
gttgatccagttatgccacaagagt

SEQ ID NO: 1004260 - DNA, 25 bp, Homo sapien
caaacttgacacatgattggatggg

SEQ ID NO: 1004261 - DNA, 25 bp, Homo sapien
ggatcacaaggatgcaaagaagtct

SEQ ID NO: 1004262 - DNA, 25 bp, Homo sapien
tggtgaatgtttatcagagagaacc

SEQ ID NO: 1004263 - DNA, 25 bp, Homo sapien
catttaggtctgagtgagcagaagc

SEQ ID NO: 1004264 - DNA, 25 bp, Homo sapien
tagaatttggagacagtacttccgt

SEQ ID NO: 1004265 - DNA, 25 bp, Homo sapien
tccatgtctcagattagaagatgcc

SEQ ID NO: 1004266 - DNA, 25 bp, Homo sapien
aagatgcctctacaacgctgccagg

SEQ ID NO: 1004267 - DNA, 25 bp, Homo sapien
cacctagtggatggttcagagtcct

SEQ ID NO: 1004268 - DNA, 25 bp, Homo sapien
cagacgttgtttcagacggtacaga

SEQ ID NO: 1004269 - DNA, 25 bp, Homo sapien
gccttccgtcaggagccctatgtct

SEQ ID NO: 1004270 - DNA, 25 bp, Homo sapien
tgaaaggcagccgttgccttccgtc

SEQ ID NO: 1004271 - DNA, 25 bp, Homo sapien
tcagttcaatatatgcttggcccag

SEQ ID NO: 1004272 - DNA, 25 bp, Homo sapien
ttggcccagtatgttgtgctgctga

SEQ ID NO: 1004273 - DNA, 25 bp, Homo sapien
aaggcctaggcatatctacagatac

SEQ ID NO: 1004274 - DNA, 25 bp, Homo sapien
caaggaagcgctcttgactcggcat

SEQ ID NO: 1004275 - DNA, 25 bp, Homo sapien
gatactgatcttcttagctgtggag

SEQ ID NO: 1004276 - DNA, 25 bp, Homo sapien
gaaaaatgctgaggaagtccaactg

SEQ ID NO: 1004277 - DNA, 25 bp, Homo sapien
gaaaacagcatatctaggtcctaaa

SEQ ID NO: 1004278 - DNA, 25 bp, Homo sapien
gcaacaggagacctaatgttcccag

SEQ ID NO: 1004279 - DNA, 25 bp, Homo sapien
gaatgatttcacgtaacttctgccg

SEQ ID NO: 1004280 - DNA, 25 bp, Homo sapien
catgaggtctcatccccatactagc

SEQ ID NO: 1004281 - DNA, 25 bp, Homo sapien
taagaatctacaacaggtcgtggag

SEQ ID NO: 1004282 - DNA, 25 bp, Homo sapien
caacaagggtcgtgcatatgagtca

SEQ ID NO: 1004283 - DNA, 25 bp, Homo sapien
tatcaggtggccttaccaacgggcc

SEQ ID NO: 1004284 - DNA, 25 bp, Homo sapien
gaggacccaggtgaaaacacttgcg

SEQ ID NO: 1004285 - DNA, 25 bp, Homo sapien
gaggtggagcttgtggctttacaaa

SEQ ID NO: 1004286 - DNA, 25 bp, Homo sapien
tggagcttgtggctttacaaacaca

SEQ ID NO: 1004287 - DNA, 25 bp, Homo sapien
aggaggtggagcttgtggctttaca

SEQ ID NO: 1004288 - DNA, 25 bp, Homo sapien
ggtggagcttgtggctttacaaaca

SEQ ID NO: 1004289 - DNA, 25 bp, Homo sapien
gaagatgtagacgtaggggtactgg

SEQ ID NO: 1004290 - DNA, 25 bp, Homo sapien
aagatgtagacgtaggggtactggg

SEQ ID NO: 1004291 - DNA, 25 bp, Homo sapien
tgaagatgtagacgtaggggtactg

SEQ ID NO: 1004292 - DNA, 25 bp, Homo sapien
ctgaagatgtagacgtaggggtact

SEQ ID NO: 1004293 - DNA, 25 bp, Homo sapien
ctgttttgtaaacagttctttatgg

SEQ ID NO: 1004294 - DNA, 25 bp, Homo sapien
ttgtaaacagttctttatggaatga

SEQ ID NO: 1004295 - DNA, 25 bp, Homo sapien
tgttttgtaaacagttctttatgga

SEQ ID NO: 1004296 - DNA, 25 bp, Homo sapien
tttgtaaacagttctttatggaatg

SEQ ID NO: 1004297 - DNA, 25 bp, Homo sapien
tgtatctgaaccagactgcaccaga

SEQ ID NO: 1004298 - DNA, 25 bp, Homo sapien
agacatatttccattgccaggctga

SEQ ID NO: 1004299 - DNA, 25 bp, Homo sapien
tgtatcccactacttggtgtatctg

SEQ ID NO: 1004300 - DNA, 25 bp, Homo sapien
gctgaggtgtcaagggactctgtat

SEQ ID NO: 1004301 - DNA, 25 bp, Homo sapien
gctgctgctgctgctcatttttcac

SEQ ID NO: 1004302 - DNA, 25 bp, Homo sapien
ttgctgttgttgctgctgctgctgc

SEQ ID NO: 1004303 - DNA, 25 bp, Homo sapien
accaaattgctgttgttgctgctgc

SEQ ID NO: 1004304 - DNA, 25 bp, Homo sapien
aaattgctgttgttgctgctgctgc

SEQ ID NO: 1004305 - DNA, 25 bp, Homo sapien
gcttcaattttagcttgctgcttac

SEQ ID NO: 1004306 - DNA, 25 bp, Homo sapien
gctgcttacttttctgacgcatttg

SEQ ID NO: 1004307 - DNA, 25 bp, Homo sapien
gtgtggcttcaattttagcttgctg

SEQ ID NO: 1004308 - DNA, 25 bp, Homo sapien
cttgctgcttacttttctgacgcat

SEQ ID NO: 1004309 - DNA, 25 bp, Homo sapien
gatcaatgctatcttgctgttgctg

SEQ ID NO: 1004310 - DNA, 25 bp, Homo sapien
catggaatcatttgacatctgtact

SEQ ID NO: 1004311 - DNA, 25 bp, Homo sapien
tttattaatgcgtaaagcagctctg

SEQ ID NO: 1004312 - DNA, 25 bp, Homo sapien
tcaatacgagagctgggatcaatgc

SEQ ID NO: 1004313 - DNA, 25 bp, Homo sapien
aatttgcttcactctagtagtccaa

SEQ ID NO: 1004314 - DNA, 25 bp, Homo sapien
tctccacaatttggcaatttgcttc

SEQ ID NO: 1004315 - DNA, 25 bp, Homo sapien
tttctccacaatttggcaatttgct

SEQ ID NO: 1004316 - DNA, 25 bp, Homo sapien
cacaatttggcaatttgcttcactc

SEQ ID NO: 1004317 - DNA, 25 bp, Homo sapien
tccacagtgggagctgatgatgtcc

SEQ ID NO: 1004318 - DNA, 25 bp, Homo sapien
tctctgggcattcgacattgtgtca

SEQ ID NO: 1004319 - DNA, 25 bp, Homo sapien
aattaatattggtgtagagaactgg

SEQ ID NO: 1004320 - DNA, 25 bp, Homo sapien
tcccacttaagcgtgcttctctggg

SEQ ID NO: 1004321 - DNA, 25 bp, Homo sapien
caaagaattatgtgggagatgagga

SEQ ID NO: 1004322 - DNA, 25 bp, Homo sapien
tggcatcaggataagaggattgtgc

SEQ ID NO: 1004323 - DNA, 25 bp, Homo sapien
tgaggactggatccaataaggccat

SEQ ID NO: 1004324 - DNA, 25 bp, Homo sapien
aattgcagagaaagttcccagtccg

SEQ ID NO: 1004325 - DNA, 25 bp, Homo sapien
ttagttttgagtaagcaatatatct

SEQ ID NO: 1004326 - DNA, 25 bp, Homo sapien
tgtgtccaccccacctatgattctt

SEQ ID NO: 1004327 - DNA, 25 bp, Homo sapien
gtccaccccacctatgattcttaaa

SEQ ID NO: 1004328 - DNA, 25 bp, Homo sapien
gatactttctctaaattagttttga

SEQ ID NO: 1004329 - DNA, 25 bp, Homo sapien
ttaccctactaaatgccacagctgg

SEQ ID NO: 1004330 - DNA, 25 bp, Homo sapien
tctgactttcacaaacgggcttacc

SEQ ID NO: 1004331 - DNA, 25 bp, Homo sapien
tgtggaaatacacaaggcctctgtt

SEQ ID NO: 1004332 - DNA, 25 bp, Homo sapien
gagccatactattacaggagatcca

SEQ ID NO: 1004333 - DNA, 25 bp, Homo sapien
ttatatccattcagtagcacagtcc

SEQ ID NO: 1004334 - DNA, 25 bp, Homo sapien
tgcaactgcctgtaagtcaaaatag

SEQ ID NO: 1004335 - DNA, 25 bp, Homo sapien
ttcatgattatcctctgggcccctg

SEQ ID NO: 1004336 - DNA, 25 bp, Homo sapien
tgggcccctggtttatacatagtct

SEQ ID NO: 1004337 - DNA, 25 bp, Homo sapien
caatggagttggctgagtgttcgca

SEQ ID NO: 1004338 - DNA, 25 bp, Homo sapien
cctgattgtgtattggcaacagctg

SEQ ID NO: 1004339 - DNA, 25 bp, Homo sapien
tcgcaggactaagtacagctgtaaa

SEQ ID NO: 1004340 - DNA, 25 bp, Homo sapien
tcttcaacatcttttccgccaagct

SEQ ID NO: 1004341 - DNA, 25 bp, Homo sapien
ttatataattttccaagaattgctc

SEQ ID NO: 1004342 - DNA, 25 bp, Homo sapien
ctggaattttatataattttccaag

SEQ ID NO: 1004343 - DNA, 25 bp, Homo sapien
tggaattttatataattttccaaga

SEQ ID NO: 1004344 - DNA, 25 bp, Homo sapien
attttatataattttccaagaattg

SEQ ID NO: 1004345 - DNA, 25 bp, Homo sapien
tttagaaagcctagatgtagggcaa

SEQ ID NO: 1004346 - DNA, 25 bp, Homo sapien
tagaaagcctagatgtagggcaaat

SEQ ID NO: 1004347 - DNA, 25 bp, Homo sapien
aaagcctagatgtagggcaaatatt

SEQ ID NO: 1004348 - DNA, 25 bp, Homo sapien
gaaagcctagatgtagggcaaatat

SEQ ID NO: 1004349 - DNA, 25 bp, Homo sapien
gactgaggatcccatctagctgttc

SEQ ID NO: 1004350 - DNA, 25 bp, Homo sapien
ctctgattgacatttggctgaggca

SEQ ID NO: 1004351 - DNA, 25 bp, Homo sapien
aagaggaaggatcatcagtgacagg

SEQ ID NO: 1004352 - DNA, 25 bp, Homo sapien
gttcttcacttaatggtcgtgaact

SEQ ID NO: 1004353 - DNA, 25 bp, Homo sapien
caactgattttgctagatcatctga

SEQ ID NO: 1004354 - DNA, 25 bp, Homo sapien
ctgaaattattccaagaatgtcatc

SEQ ID NO: 1004355 - DNA, 25 bp, Homo sapien
tcagctaatgggtcatcagcaggac

SEQ ID NO: 1004356 - DNA, 25 bp, Homo sapien
aacttcagaaatatcagctaatggg

SEQ ID NO: 1004357 - DNA, 25 bp, Homo sapien
ggaaggatccaagaaacctgtgttc

SEQ ID NO: 1004358 - DNA, 25 bp, Homo sapien
tccagattttgttggagccgaggat

SEQ ID NO: 1004359 - DNA, 25 bp, Homo sapien
aactaagtagtggatctaaggaagg

SEQ ID NO: 1004360 - DNA, 25 bp, Homo sapien
tggagccgaggatgaactaagtagt

SEQ ID NO: 1004361 - DNA, 25 bp, Homo sapien
gacagattatctaaacttatcttgc

SEQ ID NO: 1004362 - DNA, 25 bp, Homo sapien
ttgtctacttgtatctagaagatct

SEQ ID NO: 1004363 - DNA, 25 bp, Homo sapien
tgtctacttgtatctagaagatctt

SEQ ID NO: 1004364 - DNA, 25 bp, Homo sapien
ttgttttatataaaagctgagctcc

SEQ ID NO: 1004365 - DNA, 25 bp, Homo sapien
caactaaagtatctggtaactgctc

SEQ ID NO: 1004366 - DNA, 25 bp, Homo sapien
taaagtatctggtaactgctcactc

SEQ ID NO: 1004367 - DNA, 25 bp, Homo sapien
gtatctggtaactgctcactccagc

SEQ ID NO: 1004368 - DNA, 25 bp, Homo sapien
atcaactaaagtatctggtaactgc

SEQ ID NO: 1004369 - DNA, 25 bp, Homo sapien
tcccttgcccagttcgacttctttg

SEQ ID NO: 1004370 - DNA, 25 bp, Homo sapien
cagttcgacttctttgccgcaccat

SEQ ID NO: 1004371 - DNA, 25 bp, Homo sapien
agttcgacttctttgccgcaccata

SEQ ID NO: 1004372 - DNA, 25 bp, Homo sapien
tgcccagttcgacttctttgccgca

SEQ ID NO: 1004373 - DNA, 25 bp, Homo sapien
gactagattctgattttccatcaca

SEQ ID NO: 1004374 - DNA, 25 bp, Homo sapien
cacagcttcccgctcaggactagat

SEQ ID NO: 1004375 - DNA, 25 bp, Homo sapien
tttccatcacaatccataagttctc

SEQ ID NO: 1004376 - DNA, 25 bp, Homo sapien
cccgctcaggactagattctgattt

SEQ ID NO: 1004377 - DNA, 25 bp, Homo sapien
tatggcaaagtgtggcaatactgaa

SEQ ID NO: 1004378 - DNA, 25 bp, Homo sapien
taggaatgtacctttccttctgcaa

SEQ ID NO: 1004379 - DNA, 25 bp, Homo sapien
tgagatcctggcacgtaaatgaaca

SEQ ID NO: 1004380 - DNA, 25 bp, Homo sapien
gagggactagtcatgaaaatgctgt

SEQ ID NO: 1004381 - DNA, 25 bp, Homo sapien
caatactttatgatgcacactggtg

SEQ ID NO: 1004382 - DNA, 25 bp, Homo sapien
gcaaactaaagtcaagccctctgta

SEQ ID NO: 1004383 - DNA, 25 bp, Homo sapien
ggtattatccaagctcacagtatct

SEQ ID NO: 1004384 - DNA, 25 bp, Homo sapien
tgtatgcatcaactaccttaactga

SEQ ID NO: 1004385 - DNA, 25 bp, Homo sapien
caaagatatggtgctccttgagatt

SEQ ID NO: 1004386 - DNA, 25 bp, Homo sapien
gatatggtgctccttgagatttctg

SEQ ID NO: 1004387 - DNA, 25 bp, Homo sapien
tgctccttgagatttctgtaaggta

SEQ ID NO: 1004388 - DNA, 25 bp, Homo sapien
gtgatcttcaaagatatggtgctcc

SEQ ID NO: 1004389 - DNA, 25 bp, Homo sapien
aaatggcaagggtcagtcacatcag

SEQ ID NO: 1004390 - DNA, 25 bp, Homo sapien
aattcttgcacacatatttcatgga

SEQ ID NO: 1004391 - DNA, 25 bp, Homo sapien
taagtcagtgtgatttaccctttgg

SEQ ID NO: 1004392 - DNA, 25 bp, Homo sapien
agaagatcactcatttggaaatggc

SEQ ID NO: 1004393 - DNA, 25 bp, Homo sapien
ttcttggaactgtaactgtgaggct

SEQ ID NO: 1004394 - DNA, 25 bp, Homo sapien
ttgtgacaatttgtgctacaagtga

SEQ ID NO: 1004395 - DNA, 25 bp, Homo sapien
tgacaatttgtgctacaagtgaaga

SEQ ID NO: 1004396 - DNA, 25 bp, Homo sapien
gtgacaatttgtgctacaagtgaag

SEQ ID NO: 1004397 - DNA, 25 bp, Homo sapien
gacaatttgtgctacaagtgaagat

SEQ ID NO: 1004398 - DNA, 25 bp, Homo sapien
aaaaccaatgtctgctacattttcc

SEQ ID NO: 1004399 - DNA, 25 bp, Homo sapien
caaaaccaatgtctgctacattttc

SEQ ID NO: 1004400 - DNA, 25 bp, Homo sapien
atcaaaaccaatgtctgctacattt

SEQ ID NO: 1004401 - DNA, 25 bp, Homo sapien
tcaaaaccaatgtctgctacatttt

SEQ ID NO: 1004402 - DNA, 25 bp, Homo sapien
taaaaagatgaaaaaatagcacaat

SEQ ID NO: 1004403 - DNA, 25 bp, Homo sapien
gctttaaaaagatgaaaaaatagca

SEQ ID NO: 1004404 - DNA, 25 bp, Homo sapien
aaaagatgaaaaaatagcacaatac

SEQ ID NO: 1004405 - DNA, 25 bp, Homo sapien
tttaaaaagatgaaaaaatagcaca

SEQ ID NO: 1004406 - DNA, 25 bp, Homo sapien
agacctgcagatgttgctccacagt

SEQ ID NO: 1004407 - DNA, 25 bp, Homo sapien
ttgcacaaggagcgcactgtgtgta

SEQ ID NO: 1004408 - DNA, 25 bp, Homo sapien
caaggagcgcactgtgtgtaattgt

SEQ ID NO: 1004409 - DNA, 25 bp, Homo sapien
gccattcacatcttagacctgcaga

SEQ ID NO: 1004410 - DNA, 25 bp, Homo sapien
cttgaaagactaacaaggcaaacaa

SEQ ID NO: 1004411 - DNA, 25 bp, Homo sapien
ccaaagtggtatgagaaagctctga

SEQ ID NO: 1004412 - DNA, 25 bp, Homo sapien
ggaagctacatacgaacataatggg

SEQ ID NO: 1004413 - DNA, 25 bp, Homo sapien
taattcaggaagctacatacgaaca

SEQ ID NO: 1004414 - DNA, 25 bp, Homo sapien
gagggtctaggcagtaggtgtgata

SEQ ID NO: 1004415 - DNA, 25 bp, Homo sapien
cagttgccttcccacaggcctcaca

SEQ ID NO: 1004416 - DNA, 25 bp, Homo sapien
gacacctccaacctttgctaagaac

SEQ ID NO: 1004417 - DNA, 25 bp, Homo sapien
tgtctgcaatggagggtctaggcag

SEQ ID NO: 1004418 - DNA, 25 bp, Homo sapien
tagagctatagcattaaccacaaga

SEQ ID NO: 1004419 - DNA, 25 bp, Homo sapien
tcagacgtggaggtagagtaagaca

SEQ ID NO: 1004420 - DNA, 25 bp, Homo sapien
tacaactatattgggagaaggatgg

SEQ ID NO: 1004421 - DNA, 25 bp, Homo sapien
aaaagattaaaagcgactgcctcag

SEQ ID NO: 1004422 - DNA, 25 bp, Homo sapien
attttccagaatgctgcccagggag

SEQ ID NO: 1004423 - DNA, 25 bp, Homo sapien
tggtggaacaccaagccgtacttct

SEQ ID NO: 1004424 - DNA, 25 bp, Homo sapien
tattggacaacacatagtacaggag

SEQ ID NO: 1004425 - DNA, 25 bp, Homo sapien
gagtacaatcaatggcctcgctgag

SEQ ID NO: 1004426 - DNA, 25 bp, Homo sapien
caaaaactatggagtccccagtaat

SEQ ID NO: 1004427 - DNA, 25 bp, Homo sapien
tgcaagctgagccaattcacatatc

SEQ ID NO: 1004428 - DNA, 25 bp, Homo sapien
cagtgtcatcgtgcaaaaggaacca

SEQ ID NO: 1004429 - DNA, 25 bp, Homo sapien
gaagactttctagacttgccccagc

SEQ ID NO: 1004430 - DNA, 25 bp, Homo sapien
atggatggtaacactgaccacactg

SEQ ID NO: 1004431 - DNA, 25 bp, Homo sapien
cagtatggatggtaacactgaccac

SEQ ID NO: 1004432 - DNA, 25 bp, Homo sapien
cacagtatggatggtaacactgacc

SEQ ID NO: 1004433 - DNA, 25 bp, Homo sapien
gtatggatggtaacactgaccacac

SEQ ID NO: 1004434 - DNA, 25 bp, Homo sapien
caaagtgaacttgtcactgctagaa

SEQ ID NO: 1004435 - DNA, 25 bp, Homo sapien
gattcaaagtgaacttgtcactgct

SEQ ID NO: 1004436 - DNA, 25 bp, Homo sapien
ctgattcaaagtgaacttgtcactg

SEQ ID NO: 1004437 - DNA, 25 bp, Homo sapien
tgaacttgtcactgctagaaaacaa

SEQ ID NO: 1004438 - DNA, 25 bp, Homo sapien
ttgatgaaatatctgcagtagacac

SEQ ID NO: 1004439 - DNA, 25 bp, Homo sapien
tctttgagaaaatacgtgctattgt

SEQ ID NO: 1004440 - DNA, 25 bp, Homo sapien
gcctgcatagataatagtgtgattt

SEQ ID NO: 1004441 - DNA, 25 bp, Homo sapien
gctattgttgcctgcatagataata

SEQ ID NO: 1004442 - DNA, 25 bp, Homo sapien
cttgagggcaaaggtaatctttgag

SEQ ID NO: 1004443 - DNA, 25 bp, Homo sapien
aacagctccgattccacttttcagc

SEQ ID NO: 1004444 - DNA, 25 bp, Homo sapien
aatacaacagctccgattccacttt

SEQ ID NO: 1004445 - DNA, 25 bp, Homo sapien
caacagctccgattccacttttcag

SEQ ID NO: 1004446 - DNA, 25 bp, Homo sapien
tacaacagctccgattccacttttc

SEQ ID NO: 1004447 - DNA, 25 bp, Homo sapien
taattcttaacatccagtagggcaa

SEQ ID NO: 1004448 - DNA, 25 bp, Homo sapien
ggtctacatgtcaaggacttctccc

SEQ ID NO: 1004449 - DNA, 25 bp, Homo sapien
gacttctccctcataaaaacagtag

SEQ ID NO: 1004450 - DNA, 25 bp, Homo sapien
cagtagtaatcacaacaaaaggaat

SEQ ID NO: 1004451 - DNA, 25 bp, Homo sapien
ggtgggctcactgtattatgggtac

SEQ ID NO: 1004452 - DNA, 25 bp, Homo sapien
tgggctcactgtattatgggtactc

SEQ ID NO: 1004453 - DNA, 25 bp, Homo sapien
ggctcactgtattatgggtactcca

SEQ ID NO: 1004454 - DNA, 25 bp, Homo sapien
gggctcactgtattatgggtactcc

SEQ ID NO: 1004455 - DNA, 25 bp, Homo sapien
ggtcaaagccagcaactaaggaatt

SEQ ID NO: 1004456 - DNA, 25 bp, Homo sapien
ttaggacaaattgcttcaaggaagg

SEQ ID NO: 1004457 - DNA, 25 bp, Homo sapien
agaaaatagatgtgtaaaactcagc

SEQ ID NO: 1004458 - DNA, 25 bp, Homo sapien
tgcaaacgtatggaaatttaggaca

SEQ ID NO: 1004459 - DNA, 25 bp, Homo sapien
tgaagaaacgttaaagcaaattgtc

SEQ ID NO: 1004460 - DNA, 25 bp, Homo sapien
gaaaagccacacaagcaatagactg

SEQ ID NO: 1004461 - DNA, 25 bp, Homo sapien
aattaggtaattcaatggtgcatgc

SEQ ID NO: 1004462 - DNA, 25 bp, Homo sapien
accagaaataagaatgtgactactc

SEQ ID NO: 1004463 - DNA, 25 bp, Homo sapien
ctatgttaagcaccctgttcagcac

SEQ ID NO: 1004464 - DNA, 25 bp, Homo sapien
aatgcctccaccagtaataacctag

SEQ ID NO: 1004465 - DNA, 25 bp, Homo sapien
actcagaaaaggttagctgcccctg

SEQ ID NO: 1004466 - DNA, 25 bp, Homo sapien
gggctcttcccctacaatccagttg

SEQ ID NO: 1004467 - DNA, 25 bp, Homo sapien
ccaggtgtgttgacgtgcgcccgta

SEQ ID NO: 1004468 - DNA, 25 bp, Homo sapien
ggtttaacactatggttctctggct

SEQ ID NO: 1004469 - DNA, 25 bp, Homo sapien
caaattaggtggcactagcaacagt

SEQ ID NO: 1004470 - DNA, 25 bp, Homo sapien
agtctggtacttctaatcggctgtg

SEQ ID NO: 1004471 - DNA, 25 bp, Homo sapien
gcattccttacagtattcagtttaa

SEQ ID NO: 1004472 - DNA, 25 bp, Homo sapien
gaatagataacttcaataaaagatg

SEQ ID NO: 1004473 - DNA, 25 bp, Homo sapien
ttaaacccaggtcgcaaagtacata

SEQ ID NO: 1004474 - DNA, 25 bp, Homo sapien
aaagagcattccttacagtattcag

SEQ ID NO: 1004475 - DNA, 25 bp, Homo sapien
tgtattgaacctggtttctcaattg

SEQ ID NO: 1004476 - DNA, 25 bp, Homo sapien
ttgaacctggtttctcaattgaaac

SEQ ID NO: 1004477 - DNA, 25 bp, Homo sapien
ctaatgtattgaacctggtttctca

SEQ ID NO: 1004478 - DNA, 25 bp, Homo sapien
gaacctggtttctcaattgaaacaa

SEQ ID NO: 1004479 - DNA, 25 bp, Homo sapien
ctgtttggaccgaggtctaccagga

SEQ ID NO: 1004480 - DNA, 25 bp, Homo sapien
tggagtgactgagatgtaagttgtt

SEQ ID NO: 1004481 - DNA, 25 bp, Homo sapien
tggaccgaggtctaccaggagaaaa

SEQ ID NO: 1004482 - DNA, 25 bp, Homo sapien
cagcagaggaactaagagctgaagg

SEQ ID NO: 1004483 - DNA, 25 bp, Homo sapien
cagagtccatcaatccagtagaaag

SEQ ID NO: 1004484 - DNA, 25 bp, Homo sapien
taaggtttctagtggaagagtgaca

SEQ ID NO: 1004485 - DNA, 25 bp, Homo sapien
cacacaaccctcaattgtaggagtc

SEQ ID NO: 1004486 - DNA, 25 bp, Homo sapien
gcctccttggtatgaaacatctttc

SEQ ID NO: 1004487 - DNA, 25 bp, Homo sapien
gaagactatctgtgtcaagactttc

SEQ ID NO: 1004488 - DNA, 25 bp, Homo sapien
caataagaagactatctgtgtcaag

SEQ ID NO: 1004489 - DNA, 25 bp, Homo sapien
gactatctgtgtcaagactttctga

SEQ ID NO: 1004490 - DNA, 25 bp, Homo sapien
taagaagactatctgtgtcaagact

SEQ ID NO: 1004491 - DNA, 25 bp, Homo sapien
caactagacctcacaagaaagatta

SEQ ID NO: 1004492 - DNA, 25 bp, Homo sapien
cagatgagcctgtgattaaatgtaa

SEQ ID NO: 1004493 - DNA, 25 bp, Homo sapien
tgaactacaaatacacgcatgtcct

SEQ ID NO: 1004494 - DNA, 25 bp, Homo sapien
taagtctagatggtagctgaactac

SEQ ID NO: 1004495 - DNA, 25 bp, Homo sapien
gactcctgaccgttgacatctttat

SEQ ID NO: 1004496 - DNA, 25 bp, Homo sapien
gatcttcagggccttcaacttccat

SEQ ID NO: 1004497 - DNA, 25 bp, Homo sapien
tctggaacaattccaggagtggact

SEQ ID NO: 1004498 - DNA, 25 bp, Homo sapien
gaataccatttgatcttcagggcct

SEQ ID NO: 1004499 - DNA, 25 bp, Homo sapien
taatgcatcaaaaggtgggccaacc

SEQ ID NO: 1004500 - DNA, 25 bp, Homo sapien
caaaagctgccactcataatgatga

SEQ ID NO: 1004501 - DNA, 25 bp, Homo sapien
ggccaaccgtggtagttcatgcctg

SEQ ID NO: 1004502 - DNA, 25 bp, Homo sapien
aagacggaaggaacgcttgaagcca

SEQ ID NO: 1004503 - DNA, 25 bp, Homo sapien
caaactaagcaaacccaaagactgg

SEQ ID NO: 1004504 - DNA, 25 bp, Homo sapien
ggaatacaggatcctctcttcctga

SEQ ID NO: 1004505 - DNA, 25 bp, Homo sapien
ctgtcggcctgaagaacacaagtga

SEQ ID NO: 1004506 - DNA, 25 bp, Homo sapien
ggaaagcacactagacccggaattc

SEQ ID NO: 1004507 - DNA, 25 bp, Homo sapien
tagtgagctcagctatctccacttc

SEQ ID NO: 1004508 - DNA, 25 bp, Homo sapien
gagctcagctatctccacttcctca

SEQ ID NO: 1004509 - DNA, 25 bp, Homo sapien
gtgagctcagctatctccacttcct

SEQ ID NO: 1004510 - DNA, 25 bp, Homo sapien
tgtagtgagctcagctatctccact

SEQ ID NO: 1004511 - DNA, 25 bp, Homo sapien
caatacatgcagatatactcttctt

SEQ ID NO: 1004512 - DNA, 25 bp, Homo sapien
ctgttggtttgtcacactctaggtg

SEQ ID NO: 1004513 - DNA, 25 bp, Homo sapien
tgcagatatactcttctttgagctg

SEQ ID NO: 1004514 - DNA, 25 bp, Homo sapien
gtttgtcacactctaggtgaaccca

SEQ ID NO: 1004515 - DNA, 25 bp, Homo sapien
tgtggtgccactgagaactagaccg

SEQ ID NO: 1004516 - DNA, 25 bp, Homo sapien
cacatatcaggcaattgtggtgcca

SEQ ID NO: 1004517 - DNA, 25 bp, Homo sapien
gaccgtgtgccacactctatacata

SEQ ID NO: 1004518 - DNA, 25 bp, Homo sapien
cacagaagggacataagttatcctg

SEQ ID NO: 1004519 - DNA, 25 bp, Homo sapien
cagggtgcaggtacagaatctccct

SEQ ID NO: 1004520 - DNA, 25 bp, Homo sapien
ggtgcaggtacagaatctccctgcg

SEQ ID NO: 1004521 - DNA, 25 bp, Homo sapien
ggacagggtgcaggtacagaatctc

SEQ ID NO: 1004522 - DNA, 25 bp, Homo sapien
gacagggtgcaggtacagaatctcc

SEQ ID NO: 1004523 - DNA, 25 bp, Homo sapien
taggtatccgatttgtctggtctcc

SEQ ID NO: 1004524 - DNA, 25 bp, Homo sapien
agcagactaggaagacagagtttgg

SEQ ID NO: 1004525 - DNA, 25 bp, Homo sapien
gtttgggtttgaacagccacaaagc

SEQ ID NO: 1004526 - DNA, 25 bp, Homo sapien
caagaggcaccaggaaacttttgag

SEQ ID NO: 1004527 - DNA, 25 bp, Homo sapien
attggttggtactgatttcataact

SEQ ID NO: 1004528 - DNA, 25 bp, Homo sapien
cattggttggtactgatttcataac

SEQ ID NO: 1004529 - DNA, 25 bp, Homo sapien
gcattaatgatgccttatctttaaa

SEQ ID NO: 1004530 - DNA, 25 bp, Homo sapien
cattaatgatgccttatctttaaac

SEQ ID NO: 1004531 - DNA, 25 bp, Homo sapien
ttccatgatagtgctgaccacaagt

SEQ ID NO: 1004532 - DNA, 25 bp, Homo sapien
tttgcactcaggacattgccaacct

SEQ ID NO: 1004533 - DNA, 25 bp, Homo sapien
ttgccaacctgcacgttttaatgga

SEQ ID NO: 1004534 - DNA, 25 bp, Homo sapien
gggctgtcgcacactgcacagtttg

SEQ ID NO: 1004535 - DNA, 25 bp, Homo sapien
tacattagtgaggttgccaatgccc

SEQ ID NO: 1004536 - DNA, 25 bp, Homo sapien
ttcaaaatgtggacgctggctggac

SEQ ID NO: 1004537 - DNA, 25 bp, Homo sapien
taattcctcgcttgagggcagtaca

SEQ ID NO: 1004538 - DNA, 25 bp, Homo sapien
tggacctctgacgtacttcatgaag

SEQ ID NO: 1004539 - DNA, 25 bp, Homo sapien
aatgatacatctgggtacatttctc

SEQ ID NO: 1004540 - DNA, 25 bp, Homo sapien
ctgcagcacaaggataatgatacat

SEQ ID NO: 1004541 - DNA, 25 bp, Homo sapien
gagcttggtcaatgtgttctggaca

SEQ ID NO: 1004542 - DNA, 25 bp, Homo sapien
tctggacaaagcaggaagatgtgac

SEQ ID NO: 1004543 - DNA, 25 bp, Homo sapien
gtttaagcgattctctgtctcggcc

SEQ ID NO: 1004544 - DNA, 25 bp, Homo sapien
tctcggcctcccccgtagatgggac

SEQ ID NO: 1004545 - DNA, 25 bp, Homo sapien
tgcgcccggcccataaattataatt

SEQ ID NO: 1004546 - DNA, 25 bp, Homo sapien
ctgtctcggcctcccccgtagatgg

SEQ ID NO: 1004547 - DNA, 25 bp, Homo sapien
aatttaaggtcaggccaaactctgc

SEQ ID NO: 1004548 - DNA, 25 bp, Homo sapien
tcatgtcccacataaacacagctgg

SEQ ID NO: 1004549 - DNA, 25 bp, Homo sapien
gcagcaaccaactctgacactgtag

SEQ ID NO: 1004550 - DNA, 25 bp, Homo sapien
acagctggaggaccgaatgtgaccc

SEQ ID NO: 1004551 - DNA, 25 bp, Homo sapien
taggattatcttgctgtaccgacac

SEQ ID NO: 1004552 - DNA, 25 bp, Homo sapien
gtacaatgcttagaggtcctgccca

SEQ ID NO: 1004553 - DNA, 25 bp, Homo sapien
ttaagatatgaacgctcggctgggc

SEQ ID NO: 1004554 - DNA, 25 bp, Homo sapien
catttcacacggtttcaggctcagc

SEQ ID NO: 1004555 - DNA, 25 bp, Homo sapien
ataatactagcaccttggcaggccc

SEQ ID NO: 1004556 - DNA, 25 bp, Homo sapien
taccttacgtaaagattcaagtcag

SEQ ID NO: 1004557 - DNA, 25 bp, Homo sapien
tttacatggaaaaacactaggattc

SEQ ID NO: 1004558 - DNA, 25 bp, Homo sapien
gaagtagaagcaaacaactataggg

SEQ ID NO: 1004559 - DNA, 25 bp, Homo sapien
cattggttggaggagagacttttac

SEQ ID NO: 1004560 - DNA, 25 bp, Homo sapien
aggaaggctatttttgtttctgcag

SEQ ID NO: 1004561 - DNA, 25 bp, Homo sapien
taggaaggctatttttgtttctgca

SEQ ID NO: 1004562 - DNA, 25 bp, Homo sapien
tataggaaggctatttttgtttctg

SEQ ID NO: 1004563 - DNA, 25 bp, Homo sapien
ggaaggctatttttgtttctgcagt

SEQ ID NO: 1004564 - DNA, 25 bp, Homo sapien
attatccagatttccaagatgttgg

SEQ ID NO: 1004565 - DNA, 25 bp, Homo sapien
tcactgtttgccatgttcttttctc

SEQ ID NO: 1004566 - DNA, 25 bp, Homo sapien
gttggtagcaccctgagagcttcaa

SEQ ID NO: 1004567 - DNA, 25 bp, Homo sapien
aaattgcttgacaaaaatgccatgt

SEQ ID NO: 1004568 - DNA, 25 bp, Homo sapien
cacatgcattatgaaaggccctgag

SEQ ID NO: 1004569 - DNA, 25 bp, Homo sapien
tagcaaaggcctcactgtaaagtca

SEQ ID NO: 1004570 - DNA, 25 bp, Homo sapien
cacatcctggttggtggcaattgca

SEQ ID NO: 1004571 - DNA, 25 bp, Homo sapien
caatagctatatcgcccctagggaa

SEQ ID NO: 1004572 - DNA, 25 bp, Homo sapien
taactaccttcctagcaaacagagg

SEQ ID NO: 1004573 - DNA, 25 bp, Homo sapien
tctaatgcctaaacaaagtcggaag

SEQ ID NO: 1004574 - DNA, 25 bp, Homo sapien
gcatttaacttgcttaggcccacca

SEQ ID NO: 1004575 - DNA, 25 bp, Homo sapien
aagtcggaagggatgcaatgtctcc

SEQ ID NO: 1004576 - DNA, 25 bp, Homo sapien
tttcaagtgaacttctgattaaagt

SEQ ID NO: 1004577 - DNA, 25 bp, Homo sapien
cctttcaagtgaacttctgattaaa

SEQ ID NO: 1004578 - DNA, 25 bp, Homo sapien
ctttcaagtgaacttctgattaaag

SEQ ID NO: 1004579 - DNA, 25 bp, Homo sapien
ttcaagtgaacttctgattaaagtg

SEQ ID NO: 1004580 - DNA, 25 bp, Homo sapien
cacacaacggtgatgagcccaacaa

SEQ ID NO: 1004581 - DNA, 25 bp, Homo sapien
acagctttgtccacgttcactaaca

SEQ ID NO: 1004582 - DNA, 25 bp, Homo sapien
gtgctccctgagacaacagctttgt

SEQ ID NO: 1004583 - DNA, 25 bp, Homo sapien
tagtgaccactccacacaacggtga

SEQ ID NO: 1004584 - DNA, 25 bp, Homo sapien
tggaagcccaaccagactgagttca

SEQ ID NO: 1004585 - DNA, 25 bp, Homo sapien
gaagctgtctgggtgcttacactta

SEQ ID NO: 1004586 - DNA, 25 bp, Homo sapien
caagatactatattctgctgaggag

SEQ ID NO: 1004587 - DNA, 25 bp, Homo sapien
aggcttggatatcaatggcatctgg

SEQ ID NO: 1004588 - DNA, 25 bp, Homo sapien
actgtttaaatgcaatgtactgcca

SEQ ID NO: 1004589 - DNA, 25 bp, Homo sapien
tctgttagtattatccatggtataa

SEQ ID NO: 1004590 - DNA, 25 bp, Homo sapien
tatcagccattaactgtcataaaac

SEQ ID NO: 1004591 - DNA, 25 bp, Homo sapien
ggtataatattaaactgggttgcca

SEQ ID NO: 1004592 - DNA, 25 bp, Homo sapien
taattgcctacccttcaatgatgcc

SEQ ID NO: 1004593 - DNA, 25 bp, Homo sapien
gaaatgcatacccacaaaattctta

SEQ ID NO: 1004594 - DNA, 25 bp, Homo sapien
acagcagcccagcttagaaagagat

SEQ ID NO: 1004595 - DNA, 25 bp, Homo sapien
taagatatcaatgtcaacactaagg

SEQ ID NO: 1004596 - DNA, 25 bp, Homo sapien
cccacagtaacaaaaagcgcagagc

SEQ ID NO: 1004597 - DNA, 25 bp, Homo sapien
tcctctttgttttcgtggtgctgag

SEQ ID NO: 1004598 - DNA, 25 bp, Homo sapien
taaatccaggcgttattctgaattg

SEQ ID NO: 1004599 - DNA, 25 bp, Homo sapien
ttgcattttctcataggttccattg

SEQ ID NO: 1004600 - DNA, 25 bp, Homo sapien
gagtagcaccaccaagtcctactaa

SEQ ID NO: 1004601 - DNA, 25 bp, Homo sapien
ctcctgagtagcaccaccaagtcct

SEQ ID NO: 1004602 - DNA, 25 bp, Homo sapien
cagggctttgtcatgttcaagtcag

SEQ ID NO: 1004603 - DNA, 25 bp, Homo sapien
ctgagtagcaccaccaagtcctact

SEQ ID NO: 1004604 - DNA, 25 bp, Homo sapien
tgttgaaagagacttccttcctcac

SEQ ID NO: 1004605 - DNA, 25 bp, Homo sapien
tactgaatcccctaaaatgtgagta

SEQ ID NO: 1004606 - DNA, 25 bp, Homo sapien
tcttcatgggtcctttggcttatcc

SEQ ID NO: 1004607 - DNA, 25 bp, Homo sapien
catgtatctgtatctgggttcccta

SEQ ID NO: 1004608 - DNA, 25 bp, Homo sapien
gactacagtataacaaacaccagtg

SEQ ID NO: 1004609 - DNA, 25 bp, Homo sapien
tgagactaagctggatgtggccctt

SEQ ID NO: 1004610 - DNA, 25 bp, Homo sapien
cagaggaggctagtattatcagcaa

SEQ ID NO: 1004611 - DNA, 25 bp, Homo sapien
ttttcctaagctgactgagactaag

SEQ ID NO: 1004612 - DNA, 25 bp, Homo sapien
tagagacgtcaagcagacagttgga

SEQ ID NO: 1004613 - DNA, 25 bp, Homo sapien
gcacacacagaggttacagccatta

SEQ ID NO: 1004614 - DNA, 25 bp, Homo sapien
tggaggcagaatcaagcatggtact

SEQ ID NO: 1004615 - DNA, 25 bp, Homo sapien
aatgaacacgtgagactcttaaggg

SEQ ID NO: 1004616 - DNA, 25 bp, Homo sapien
agtaaaaccgtagtgtgctgccctg

SEQ ID NO: 1004617 - DNA, 25 bp, Homo sapien
gtaactcatcccaactaaacacaga

SEQ ID NO: 1004618 - DNA, 25 bp, Homo sapien
tctacaattgcctaagcccacagat

SEQ ID NO: 1004619 - DNA, 25 bp, Homo sapien
taaacacagaggtatcagcttcaaa

SEQ ID NO: 1004620 - DNA, 25 bp, Homo sapien
gattcctcagacacagatcgctgaa

SEQ ID NO: 1004621 - DNA, 25 bp, Homo sapien
agtttgccgattcctcagacacaga

SEQ ID NO: 1004622 - DNA, 25 bp, Homo sapien
cacagatcgctgaagagttggaatt

SEQ ID NO: 1004623 - DNA, 25 bp, Homo sapien
tcgctgaagagttggaattagctgt

SEQ ID NO: 1004624 - DNA, 25 bp, Homo sapien
aacagtccaggtttggcgactccac

SEQ ID NO: 1004625 - DNA, 25 bp, Homo sapien
taaaaatgatgtcaaccagggatcc

SEQ ID NO: 1004626 - DNA, 25 bp, Homo sapien
gatgctctggatgaaatggctacaa

SEQ ID NO: 1004627 - DNA, 25 bp, Homo sapien
taaagaggactctatgactgcttcc

SEQ ID NO: 1004628 - DNA, 25 bp, Homo sapien
cctggcagagcatcaaagtgtagca

SEQ ID NO: 1004629 - DNA, 25 bp, Homo sapien
caaagctgggatacaaaatcgggtt

SEQ ID NO: 1004630 - DNA, 25 bp, Homo sapien
tgtgtaactctaaagcctgatgtgc

SEQ ID NO: 1004631 - DNA, 25 bp, Homo sapien
tcagaaaggtattagaagcccagct

SEQ ID NO: 1004632 - DNA, 25 bp, Homo sapien
ggtgtcacctgaatagcaataaatg

SEQ ID NO: 1004633 - DNA, 25 bp, Homo sapien
aatgaaactgtcttggaccctctag

SEQ ID NO: 1004634 - DNA, 25 bp, Homo sapien
gagtccaatacttgtcaaaagccaa

SEQ ID NO: 1004635 - DNA, 25 bp, Homo sapien
caataaatgactctggtggatgcca

SEQ ID NO: 1004636 - DNA, 25 bp, Homo sapien
cacctggtcacatcatattaaaaac

SEQ ID NO: 1004637 - DNA, 25 bp, Homo sapien
ttgtcagatgacctaccttgcaaga

SEQ ID NO: 1004638 - DNA, 25 bp, Homo sapien
cagagagaacaagaacggtacaggt

SEQ ID NO: 1004639 - DNA, 25 bp, Homo sapien
gtcaaaaacttagacctatatcaag

SEQ ID NO: 1004640 - DNA, 25 bp, Homo sapien
tgacctctcataggagacagcatga

SEQ ID NO: 1004641 - DNA, 25 bp, Homo sapien
tagccaaagtcagatcaatggagcc

SEQ ID NO: 1004642 - DNA, 25 bp, Homo sapien
actctggctactatgtgtgggacaa

SEQ ID NO: 1004643 - DNA, 25 bp, Homo sapien
tacagtggcaatataccagaggtgg

SEQ ID NO: 1004644 - DNA, 25 bp, Homo sapien
ttctgttgtctccagcccatccatg

SEQ ID NO: 1004645 - DNA, 25 bp, Homo sapien
ctgttgtctccagcccatccatgct

SEQ ID NO: 1004646 - DNA, 25 bp, Homo sapien
tctgttgtctccagcccatccatgc

SEQ ID NO: 1004647 - DNA, 25 bp, Homo sapien
agaaaatatcagagtttacagtcat

SEQ ID NO: 1004648 - DNA, 25 bp, Homo sapien
aggcattagcctcccggcccagtgt

SEQ ID NO: 1004649 - DNA, 25 bp, Homo sapien
tttcaattgtctttcaggtagacag

SEQ ID NO: 1004650 - DNA, 25 bp, Homo sapien
gaatataattaggtctaaaatagat

SEQ ID NO: 1004651 - DNA, 25 bp, Homo sapien
tccagcttaatttgattagtgttgg

SEQ ID NO: 1004652 - DNA, 25 bp, Homo sapien
caatctcctaagtgaattaaaccag

SEQ ID NO: 1004653 - DNA, 25 bp, Homo sapien
gacatatgcgatactacaacataaa

SEQ ID NO: 1004654 - DNA, 25 bp, Homo sapien
aaggaatttctgacatatgcgatac

SEQ ID NO: 1004655 - DNA, 25 bp, Homo sapien
gtggtacagacataccacattggca

SEQ ID NO: 1004656 - DNA, 25 bp, Homo sapien
tttcttgaagaaatctgtagtcaga

SEQ ID NO: 1004657 - DNA, 25 bp, Homo sapien
cttgcggaatccacaggtctttctt

SEQ ID NO: 1004658 - DNA, 25 bp, Homo sapien
cttgaagaaatctgtagtcagaact

SEQ ID NO: 1004659 - DNA, 25 bp, Homo sapien
ctgggctcttgctcttgcggaatcc

SEQ ID NO: 1004660 - DNA, 25 bp, Homo sapien
aaaaatagttaagggccaggagcag

SEQ ID NO: 1004661 - DNA, 25 bp, Homo sapien
ggtttgaatatcatttgtcctcacc

SEQ ID NO: 1004662 - DNA, 25 bp, Homo sapien
gagggattaatgtcgttctgaaagg

SEQ ID NO: 1004663 - DNA, 25 bp, Homo sapien
gttgaagcttggtctgcaatgtagc

SEQ ID NO: 1004664 - DNA, 25 bp, Homo sapien
ttctgaaaggagttctcactcttgg

SEQ ID NO: 1004665 - DNA, 25 bp, Homo sapien
tagctttaaaggactgaggctgaaa

SEQ ID NO: 1004666 - DNA, 25 bp, Homo sapien
gaaaagaattaagctctccaataag

SEQ ID NO: 1004667 - DNA, 25 bp, Homo sapien
tatacatgccccaatttggagcacc

SEQ ID NO: 1004668 - DNA, 25 bp, Homo sapien
tccaataagacacagattgaatgga

SEQ ID NO: 1004669 - DNA, 25 bp, Homo sapien
tcttgtaccactcagccaattgtga

SEQ ID NO: 1004670 - DNA, 25 bp, Homo sapien
catgtgcctctcactttaactgaaa

SEQ ID NO: 1004671 - DNA, 25 bp, Homo sapien
tagttaaccctaatcctacaatggc

SEQ ID NO: 1004672 - DNA, 25 bp, Homo sapien
gcctaaggctagacctcttgtacca

SEQ ID NO: 1004673 - DNA, 25 bp, Homo sapien
cgtgaagagttgtgctgctaggaca

SEQ ID NO: 1004674 - DNA, 25 bp, Homo sapien
gctgccccaagagttccacagtttg

SEQ ID NO: 1004675 - DNA, 25 bp, Homo sapien
aaggagatccgagaggcagacatgt

SEQ ID NO: 1004676 - DNA, 25 bp, Homo sapien
gaactaagactctagaaggagatcc

SEQ ID NO: 1004677 - DNA, 25 bp, Homo sapien
tgatggctgcgctagcaggccaaac

SEQ ID NO: 1004678 - DNA, 25 bp, Homo sapien
gagctggaggctacactctttttca

SEQ ID NO: 1004679 - DNA, 25 bp, Homo sapien
gaggcacacaggttgaaaactacct

SEQ ID NO: 1004680 - DNA, 25 bp, Homo sapien
tattgggtactagggtcactttgga

SEQ ID NO: 1004681 - DNA, 25 bp, Homo sapien
tttaactcaatcgtaaggcatgcca

SEQ ID NO: 1004682 - DNA, 25 bp, Homo sapien
gcaactatcgacaacaagctgagta

SEQ ID NO: 1004683 - DNA, 25 bp, Homo sapien
gaagctgcaaagtacccgaaatagg

SEQ ID NO: 1004684 - DNA, 25 bp, Homo sapien
cccgtgcttatggactactgcctaa

SEQ ID NO: 1004685 - DNA, 25 bp, Homo sapien
ttcttaccacggtgtgaagggcact

SEQ ID NO: 1004686 - DNA, 25 bp, Homo sapien
tactttcacagccttatgggtgccc

SEQ ID NO: 1004687 - DNA, 25 bp, Homo sapien
tctaagggcttttgctgcactaagg

SEQ ID NO: 1004688 - DNA, 25 bp, Homo sapien
ggatcccttgagtataacacacttg

SEQ ID NO: 1004689 - DNA, 25 bp, Homo sapien
aataaaatgctggttaagtgaccag

SEQ ID NO: 1004690 - DNA, 25 bp, Homo sapien
aaacccctcaaacttgcaatgctat

SEQ ID NO: 1004691 - DNA, 25 bp, Homo sapien
acttgcaatgctatacccgaatcac

SEQ ID NO: 1004692 - DNA, 25 bp, Homo sapien
aaaatgctggttaagtgaccagagg

SEQ ID NO: 1004693 - DNA, 25 bp, Homo sapien
gcccctctacaaggcagttgactgt

SEQ ID NO: 1004694 - DNA, 25 bp, Homo sapien
aaatgcacagtggtcttggatcaca

SEQ ID NO: 1004695 - DNA, 25 bp, Homo sapien
gctggtaaataagggtcaagttctg

SEQ ID NO: 1004696 - DNA, 25 bp, Homo sapien
tgaggccaaggtcaagaaattactt

SEQ ID NO: 1004697 - DNA, 25 bp, Homo sapien
tatgaggccagacgcgatggctcat

SEQ ID NO: 1004698 - DNA, 25 bp, Homo sapien
gcgggcggaccactaggtcagaaat

SEQ ID NO: 1004699 - DNA, 25 bp, Homo sapien
cgggcggaccactaggtcagaaatt

SEQ ID NO: 1004700 - DNA, 25 bp, Homo sapien
aatgtatgaggccagacgcgatggc

SEQ ID NO: 1004701 - DNA, 25 bp, Homo sapien
caggtgatggcatccggccttcaat

SEQ ID NO: 1004702 - DNA, 25 bp, Homo sapien
gcatccggccttcaatattttctgg

SEQ ID NO: 1004703 - DNA, 25 bp, Homo sapien
gccttcaatattttctggatgaaag

SEQ ID NO: 1004704 - DNA, 25 bp, Homo sapien
ggattacaggtgatggcatccggcc

SEQ ID NO: 1004705 - DNA, 25 bp, Homo sapien
gacactgagatagttaagcctccct

SEQ ID NO: 1004706 - DNA, 25 bp, Homo sapien
tgacagcttcttgcacggcagcaac

SEQ ID NO: 1004707 - DNA, 25 bp, Homo sapien
caagtcaactaagggctgaaggcag

SEQ ID NO: 1004708 - DNA, 25 bp, Homo sapien
tgagtcacagggctaggcgagatac

SEQ ID NO: 1004709 - DNA, 25 bp, Homo sapien
caggtgaggcaaccatagcacaaaa

SEQ ID NO: 1004710 - DNA, 25 bp, Homo sapien
gaaggtctaggctctataatcagtg

SEQ ID NO: 1004711 - DNA, 25 bp, Homo sapien
tattattacgtcctctctacaggtg

SEQ ID NO: 1004712 - DNA, 25 bp, Homo sapien
ggacttagtctatgccagaaactgt

SEQ ID NO: 1004713 - DNA, 25 bp, Homo sapien
tcaaatagcaaccatcagccagaat

SEQ ID NO: 1004714 - DNA, 25 bp, Homo sapien
tatcagtttcaccttaagcagggca

SEQ ID NO: 1004715 - DNA, 25 bp, Homo sapien
ggcataaggactcctagacttcccc

SEQ ID NO: 1004716 - DNA, 25 bp, Homo sapien
tttccgccctcttgaaaaatctaga

SEQ ID NO: 1004717 - DNA, 25 bp, Homo sapien
tactgtacgctcaaaggcaggcgac

SEQ ID NO: 1004718 - DNA, 25 bp, Homo sapien
ctcttggtattctgccttacgaggg

SEQ ID NO: 1004719 - DNA, 25 bp, Homo sapien
gacttacgagggaagcgacatttac

SEQ ID NO: 1004720 - DNA, 25 bp, Homo sapien
gggacgctggctacgtctccaaaac

SEQ ID NO: 1004721 - DNA, 25 bp, Homo sapien
cacaggacttgtgctttcggagccc

SEQ ID NO: 1004722 - DNA, 25 bp, Homo sapien
tcccacaggacttgtgctttcggag

SEQ ID NO: 1004723 - DNA, 25 bp, Homo sapien
ttccccgaagctgggggatcccaca

SEQ ID NO: 1004724 - DNA, 25 bp, Homo sapien
gatcccacaggacttgtgctttcgg

SEQ ID NO: 1004725 - DNA, 25 bp, Homo sapien
agttccaggagcaagtcgctgacaa

SEQ ID NO: 1004726 - DNA, 25 bp, Homo sapien
gagcaagtcgctgacaaacaaaagc

SEQ ID NO: 1004727 - DNA, 25 bp, Homo sapien
caaatggcttcctaatatatcatca

SEQ ID NO: 1004728 - DNA, 25 bp, Homo sapien
aaaagctgcactcgcccggccgctt

SEQ ID NO: 1004729 - DNA, 25 bp, Homo sapien
gccaagacgcggctacgagaaattt

SEQ ID NO: 1004730 - DNA, 25 bp, Homo sapien
ccaaaagaagagtcgcggagaagac

SEQ ID NO: 1004731 - DNA, 25 bp, Homo sapien
gacgcggctacgagaaatttctcca

SEQ ID NO: 1004732 - DNA, 25 bp, Homo sapien
tcgcggagaagacccagtgaaaagg

SEQ ID NO: 1004733 - DNA, 25 bp, Homo sapien
gccggccccgaggtcttttgtctgc

SEQ ID NO: 1004734 - DNA, 25 bp, Homo sapien
ccccgaggtcttttgtctgcggctg

SEQ ID NO: 1004735 - DNA, 25 bp, Homo sapien
cggccccgaggtcttttgtctgcgg

SEQ ID NO: 1004736 - DNA, 25 bp, Homo sapien
gccccgaggtcttttgtctgcggct

SEQ ID NO: 1004737 - DNA, 25 bp, Homo sapien
caggaaagacacatggatcccggtc

SEQ ID NO: 1004738 - DNA, 25 bp, Homo sapien
ggaaagacacatggatcccggtcct

SEQ ID NO: 1004739 - DNA, 25 bp, Homo sapien
aaagacacatggatcccggtcctcc

SEQ ID NO: 1004740 - DNA, 25 bp, Homo sapien
ccaggaaagacacatggatcccggt

SEQ ID NO: 1004741 - DNA, 25 bp, Homo sapien
cagcaggtaccgggagaggcggcaa

SEQ ID NO: 1004742 - DNA, 25 bp, Homo sapien
agcaggtaccgggagaggcggcaac

SEQ ID NO: 1004743 - DNA, 25 bp, Homo sapien
caggtaccgggagaggcggcaacat

SEQ ID NO: 1004744 - DNA, 25 bp, Homo sapien
ggtaccgggagaggcggcaacatgg

SEQ ID NO: 1004745 - DNA, 25 bp, Homo sapien
acaggcgtccgccactaagccagac

SEQ ID NO: 1004746 - DNA, 25 bp, Homo sapien
gtccgccactaagccagactaattt

SEQ ID NO: 1004747 - DNA, 25 bp, Homo sapien
gcgtccgccactaagccagactaat

SEQ ID NO: 1004748 - DNA, 25 bp, Homo sapien
aggcgtccgccactaagccagacta

SEQ ID NO: 1004749 - DNA, 25 bp, Homo sapien
tgcagcgccacataagaaagaccag

SEQ ID NO: 1004750 - DNA, 25 bp, Homo sapien
cccggccaaatgtgaatactgaata

SEQ ID NO: 1004751 - DNA, 25 bp, Homo sapien
gacactgtcctctgggtattaccaa

SEQ ID NO: 1004752 - DNA, 25 bp, Homo sapien
taccaacagggtttgacactagtaa

SEQ ID NO: 1004753 - DNA, 25 bp, Homo sapien
ttcatatccagatcaacattcattt

SEQ ID NO: 1004754 - DNA, 25 bp, Homo sapien
tcatatccagatcaacattcatttc

SEQ ID NO: 1004755 - DNA, 25 bp, Homo sapien
caagggtttctcgtgtttgatgcca

SEQ ID NO: 1004756 - DNA, 25 bp, Homo sapien
ccccatgataggtaggaaggcagct

SEQ ID NO: 1004757 - DNA, 25 bp, Homo sapien
tgacagacgagctaagccaggcgaa

SEQ ID NO: 1004758 - DNA, 25 bp, Homo sapien
aatgcctccccaaggtgacagacga

SEQ ID NO: 1004759 - DNA, 25 bp, Homo sapien
aagcacagaggggtcaggttccggg

SEQ ID NO: 1004760 - DNA, 25 bp, Homo sapien
agctcaggcagccggcaccgggagc

SEQ ID NO: 1004761 - DNA, 25 bp, Homo sapien
ttcagggaagaaaaccgagaagtga

SEQ ID NO: 1004762 - DNA, 25 bp, Homo sapien
agaaaaccgagaagtgaagcacaga

SEQ ID NO: 1004763 - DNA, 25 bp, Homo sapien
gggtgcaaccgggcaagagcgctcg

SEQ ID NO: 1004764 - DNA, 25 bp, Homo sapien
gtgcaaccgggcaagagcgctcggg

SEQ ID NO: 1004765 - DNA, 25 bp, Homo sapien
ggtgcaaccgggcaagagcgctcgg

SEQ ID NO: 1004766 - DNA, 25 bp, Homo sapien
cggggtgcaaccgggcaagagcgct

SEQ ID NO: 1004767 - DNA, 25 bp, Homo sapien
actcgtcctcgcgagcctgggttgg

SEQ ID NO: 1004768 - DNA, 25 bp, Homo sapien
gtcgcactacttggcgcggaagggc

SEQ ID NO: 1004769 - DNA, 25 bp, Homo sapien
aggagccgcgaggatccgcagtggg

SEQ ID NO: 1004770 - DNA, 25 bp, Homo sapien
gcgtgccgcggtcgcttgtttcccg

SEQ ID NO: 1004771 - DNA, 25 bp, Homo sapien
tcttggacgtttatatgcaaagcaa

SEQ ID NO: 1004772 - DNA, 25 bp, Homo sapien
gatgtggaggcggactaatcaacta

SEQ ID NO: 1004773 - DNA, 25 bp, Homo sapien
caatattatggcgtttcggaacaga

SEQ ID NO: 1004774 - DNA, 25 bp, Homo sapien
ctttccctaacaaggtgacgcattg

SEQ ID NO: 1004775 - DNA, 25 bp, Homo sapien
tctatgccaagagaggaggtacatg

SEQ ID NO: 1004776 - DNA, 25 bp, Homo sapien
aatgttacctccattgtccttgagg

SEQ ID NO: 1004777 - DNA, 25 bp, Homo sapien
taatagtgggctacttcactgagca

SEQ ID NO: 1004778 - DNA, 25 bp, Homo sapien
gaggtacatgcaagaggtaagagca

SEQ ID NO: 1004779 - DNA, 25 bp, Homo sapien
ttgactgccagctggatttctcttg

SEQ ID NO: 1004780 - DNA, 25 bp, Homo sapien
gtatcaccatcgttaccagtattca

SEQ ID NO: 1004781 - DNA, 25 bp, Homo sapien
cctccaatattcttactagtatcac

SEQ ID NO: 1004782 - DNA, 25 bp, Homo sapien
tcctatcacccctcctccaatattc

SEQ ID NO: 1004783 - DNA, 25 bp, Homo sapien
tgtaagggcatagaaagtagcttgc

SEQ ID NO: 1004784 - DNA, 25 bp, Homo sapien
cccgtcggcttctggtatgcttgaa

SEQ ID NO: 1004785 - DNA, 25 bp, Homo sapien
gcttgcaaggcacacactaagtgag

SEQ ID NO: 1004786 - DNA, 25 bp, Homo sapien
ctatatcctgatatgtatgcaaggc

SEQ ID NO: 1004787 - DNA, 25 bp, Homo sapien
caggcaggatgaatccagagtccat

SEQ ID NO: 1004788 - DNA, 25 bp, Homo sapien
tacagcccaattaggaaggttctat

SEQ ID NO: 1004789 - DNA, 25 bp, Homo sapien
gtcattgatgtcatgtcaactgcca

SEQ ID NO: 1004790 - DNA, 25 bp, Homo sapien
ccattactgtatggcaggcaatgcc

SEQ ID NO: 1004791 - DNA, 25 bp, Homo sapien
cacaggacgttggagtttggatctt

SEQ ID NO: 1004792 - DNA, 25 bp, Homo sapien
tggatgtaagtggtccccttctttg

SEQ ID NO: 1004793 - DNA, 25 bp, Homo sapien
gatcttgctcatggctggcgaagtg

SEQ ID NO: 1004794 - DNA, 25 bp, Homo sapien
gctggcgaagtgtttagatcctttt

SEQ ID NO: 1004795 - DNA, 25 bp, Homo sapien
tctctactaaaaatacaaaattagc

SEQ ID NO: 1004796 - DNA, 25 bp, Homo sapien
aaaaaattggccaggctcggtggct

SEQ ID NO: 1004797 - DNA, 25 bp, Homo sapien
ctgggcaacaggagtgaaattctgt

SEQ ID NO: 1004798 - DNA, 25 bp, Homo sapien
gcctgaccaacatgaggcaaccctg

SEQ ID NO: 1004799 - DNA, 25 bp, Homo sapien
tcgcctgaggactaggagcaggtga

SEQ ID NO: 1004800 - DNA, 25 bp, Homo sapien
gcaggtgactgatttgtattgcagc

SEQ ID NO: 1004801 - DNA, 25 bp, Homo sapien
caaggaagacaaaattcgtgaccac

SEQ ID NO: 1004802 - DNA, 25 bp, Homo sapien
ggcttccctctcatttacgtactcg

SEQ ID NO: 1004803 - DNA, 25 bp, Homo sapien
gtggccgtcactaatccaggtacct

SEQ ID NO: 1004804 - DNA, 25 bp, Homo sapien
tctgtggccgtcactaatccaggta

SEQ ID NO: 1004805 - DNA, 25 bp, Homo sapien
ctgcctggcggcatcctactcttgc

SEQ ID NO: 1004806 - DNA, 25 bp, Homo sapien
ttctgtggccgtcactaatccaggt

SEQ ID NO: 1004807 - DNA, 25 bp, Homo sapien
tcttagtgatgcactttgggccagg

SEQ ID NO: 1004808 - DNA, 25 bp, Homo sapien
cagcttgaggctacaggatacacat

SEQ ID NO: 1004809 - DNA, 25 bp, Homo sapien
gaagaagtgctctttcacggaatgg

SEQ ID NO: 1004810 - DNA, 25 bp, Homo sapien
tcttgtgcattggtggctcagcccg

SEQ ID NO: 1004811 - DNA, 25 bp, Homo sapien
gccagctctccctcgaagacgtcct

SEQ ID NO: 1004812 - DNA, 25 bp, Homo sapien
tgccagctctccctcgaagacgtcc

SEQ ID NO: 1004813 - DNA, 25 bp, Homo sapien
ctccctcgaagacgtcctcctccat

SEQ ID NO: 1004814 - DNA, 25 bp, Homo sapien
agctctccctcgaagacgtcctcct

SEQ ID NO: 1004815 - DNA, 25 bp, Homo sapien
cctgtcgttgctcaggacactctca

SEQ ID NO: 1004816 - DNA, 25 bp, Homo sapien
tccctccagacgttagcttgcagct

SEQ ID NO: 1004817 - DNA, 25 bp, Homo sapien
gggttgctgtcattctccactaaat

SEQ ID NO: 1004818 - DNA, 25 bp, Homo sapien
taaattctcggtaatgctggcatgt

SEQ ID NO: 1004819 - DNA, 25 bp, Homo sapien
cgcgctccacttcgtgccccacgca

SEQ ID NO: 1004820 - DNA, 25 bp, Homo sapien
ctgcgggatcgcgctccacttcgtg

SEQ ID NO: 1004821 - DNA, 25 bp, Homo sapien
gctccacttcgtgccccacgcatac

SEQ ID NO: 1004822 - DNA, 25 bp, Homo sapien
tgcgggatcgcgctccacttcgtgc

SEQ ID NO: 1004823 - DNA, 25 bp, Homo sapien
tgcccacagatagctacgagtcgaa

SEQ ID NO: 1004824 - DNA, 25 bp, Homo sapien
agtgctgggcatccaccaacgatga

SEQ ID NO: 1004825 - DNA, 25 bp, Homo sapien
tagtcctagatcagtcagtgctggg

SEQ ID NO: 1004826 - DNA, 25 bp, Homo sapien
taccaggccggagtatttctttctc

SEQ ID NO: 1004827 - DNA, 25 bp, Homo sapien
ctgcggccttggccttccgcagtgt

SEQ ID NO: 1004828 - DNA, 25 bp, Homo sapien
ggaccctgcggccttggccttccgc

SEQ ID NO: 1004829 - DNA, 25 bp, Homo sapien
gaccctgcggccttggccttccgca

SEQ ID NO: 1004830 - DNA, 25 bp, Homo sapien
ccctgcggccttggccttccgcagt

SEQ ID NO: 1004831 - DNA, 25 bp, Homo sapien
tcctggctcaataccgatggagtca

SEQ ID NO: 1004832 - DNA, 25 bp, Homo sapien
tcttggtaggcattccagttggtcc

SEQ ID NO: 1004833 - DNA, 25 bp, Homo sapien
taagacagtcgacttaagcatctgc

SEQ ID NO: 1004834 - DNA, 25 bp, Homo sapien
tttgtccctctgatcaagtgggcac

SEQ ID NO: 1004835 - DNA, 25 bp, Homo sapien
tccacgggtgattttacagtatctt

SEQ ID NO: 1004836 - DNA, 25 bp, Homo sapien
ctccacgggtgattttacagtatct

SEQ ID NO: 1004837 - DNA, 25 bp, Homo sapien
cacgggtgattttacagtatcttta

SEQ ID NO: 1004838 - DNA, 25 bp, Homo sapien
gtgattttacagtatctttaaaagc

SEQ ID NO: 1004839 - DNA, 25 bp, Homo sapien
gcattcagggtggtatggcgggaga

SEQ ID NO: 1004840 - DNA, 25 bp, Homo sapien
gtgcattcagggtggtatggcggga

SEQ ID NO: 1004841 - DNA, 25 bp, Homo sapien
cttcccagatcagactagatcgggt

SEQ ID NO: 1004842 - DNA, 25 bp, Homo sapien
gggtgcattcagggtggtatggcgg

SEQ ID NO: 1004843 - DNA, 25 bp, Homo sapien
atcacttggccctttctcttcttac

SEQ ID NO: 1004844 - DNA, 25 bp, Homo sapien
ttagaactggatcacttggcccttt

SEQ ID NO: 1004845 - DNA, 25 bp, Homo sapien
ctggatcacttggccctttctcttc

SEQ ID NO: 1004846 - DNA, 25 bp, Homo sapien
gaactggatcacttggccctttctc

SEQ ID NO: 1004847 - DNA, 25 bp, Homo sapien
tttccggaaaatcggcttagtctgc

SEQ ID NO: 1004848 - DNA, 25 bp, Homo sapien
agtctgcccactatagccactcggc

SEQ ID NO: 1004849 - DNA, 25 bp, Homo sapien
gaaaatcggcttagtctgcccacta

SEQ ID NO: 1004850 - DNA, 25 bp, Homo sapien
ttgggctcaatgcactcaagcctta

SEQ ID NO: 1004851 - DNA, 25 bp, Homo sapien
ataacccactcaccctgggcataca

SEQ ID NO: 1004852 - DNA, 25 bp, Homo sapien
aacccactcaccctgggcatacaga

SEQ ID NO: 1004853 - DNA, 25 bp, Homo sapien
ctgtcataacccactcaccctgggc

SEQ ID NO: 1004854 - DNA, 25 bp, Homo sapien
tcataacccactcaccctgggcata

SEQ ID NO: 1004855 - DNA, 25 bp, Homo sapien
cctgctgcctgatgaggactaattg

SEQ ID NO: 1004856 - DNA, 25 bp, Homo sapien
gactaattgcttgccggcgtctaag

SEQ ID NO: 1004857 - DNA, 25 bp, Homo sapien
cccaatcgatagaaatggaaatcca

SEQ ID NO: 1004858 - DNA, 25 bp, Homo sapien
ggcagtccccttaggaaactcctgc

SEQ ID NO: 1004859 - DNA, 25 bp, Homo sapien
taacacgtcacttcctgatcttgtc

SEQ ID NO: 1004860 - DNA, 25 bp, Homo sapien
aattcacatctgtggagcatgtaac

SEQ ID NO: 1004861 - DNA, 25 bp, Homo sapien
tatttgttggttggaataatctcca

SEQ ID NO: 1004862 - DNA, 25 bp, Homo sapien
taatctccaatgcagtgaattcaca

SEQ ID NO: 1004863 - DNA, 25 bp, Homo sapien
cagcagcctgatcatgactccctgc

SEQ ID NO: 1004864 - DNA, 25 bp, Homo sapien
gcagcctgatcatgactccctgcag

SEQ ID NO: 1004865 - DNA, 25 bp, Homo sapien
cagcctgatcatgactccctgcagt

SEQ ID NO: 1004866 - DNA, 25 bp, Homo sapien
agcagcctgatcatgactccctgca

SEQ ID NO: 1004867 - DNA, 25 bp, Homo sapien
tatgctaaagtccatacgtgtgggt

SEQ ID NO: 1004868 - DNA, 25 bp, Homo sapien
taaacgtgttgttcgcatgggttgc

SEQ ID NO: 1004869 - DNA, 25 bp, Homo sapien
gcgactcggtaatgtcagcctttaa

SEQ ID NO: 1004870 - DNA, 25 bp, Homo sapien
taaatttctgtcatccaagtgtgcg

SEQ ID NO: 1004871 - DNA, 25 bp, Homo sapien
cagtggtgtgatctcggcttagtgc

SEQ ID NO: 1004872 - DNA, 25 bp, Homo sapien
ggtgtgatctcggcttagtgcaact

SEQ ID NO: 1004873 - DNA, 25 bp, Homo sapien
gtggtgtgatctcggcttagtgcaa

SEQ ID NO: 1004874 - DNA, 25 bp, Homo sapien
tgatctcggcttagtgcaacttccg

SEQ ID NO: 1004875 - DNA, 25 bp, Homo sapien
gaagaaagaacacttagctcggatc

SEQ ID NO: 1004876 - DNA, 25 bp, Homo sapien
gctcggatctccctttgaaagtgag

SEQ ID NO: 1004877 - DNA, 25 bp, Homo sapien
tgaaagtgagttatctgacagcgtc

SEQ ID NO: 1004878 - DNA, 25 bp, Homo sapien
agcctgggcgaagaagcaagcctct

SEQ ID NO: 1004879 - DNA, 25 bp, Homo sapien
cccgagataactttgccacgaaata

SEQ ID NO: 1004880 - DNA, 25 bp, Homo sapien
ctgcagcgtttaccccgagataact

SEQ ID NO: 1004881 - DNA, 25 bp, Homo sapien
cgttctcaacagttagccgaagatt

SEQ ID NO: 1004882 - DNA, 25 bp, Homo sapien
tactcaccggcagtgcttacagctg

SEQ ID NO: 1004883 - DNA, 25 bp, Homo sapien
ttatcaattcaagggactcagctag

SEQ ID NO: 1004884 - DNA, 25 bp, Homo sapien
tgttgctggtacttagaaaaactta

SEQ ID NO: 1004885 - DNA, 25 bp, Homo sapien
tgatgttttagctcgcaaatttgct

SEQ ID NO: 1004886 - DNA, 25 bp, Homo sapien
tacaagtagtaatagcaggcactct

SEQ ID NO: 1004887 - DNA, 25 bp, Homo sapien
tatatggcataaggaaggcgtccat

SEQ ID NO: 1004888 - DNA, 25 bp, Homo sapien
cagtctacgtgtgtttttgtgccag

SEQ ID NO: 1004889 - DNA, 25 bp, Homo sapien
cactgatgggcagtgctgcaacgaa

SEQ ID NO: 1004890 - DNA, 25 bp, Homo sapien
tcccggacaatgcaaggaccttagc

SEQ ID NO: 1004891 - DNA, 25 bp, Homo sapien
aagaaaacttttggccacgagcagt

SEQ ID NO: 1004892 - DNA, 25 bp, Homo sapien
tactgtgctagtttaacaaatccat

SEQ ID NO: 1004893 - DNA, 25 bp, Homo sapien
cctagaaacagaatagtctttactt

SEQ ID NO: 1004894 - DNA, 25 bp, Homo sapien
tttaaggcttgcgtagtaccctgca

SEQ ID NO: 1004895 - DNA, 25 bp, Homo sapien
attcaaccccactttctccaataat

SEQ ID NO: 1004896 - DNA, 25 bp, Homo sapien
ttcaaccccactttctccaataata

SEQ ID NO: 1004897 - DNA, 25 bp, Homo sapien
tcaaccccactttctccaataataa

SEQ ID NO: 1004898 - DNA, 25 bp, Homo sapien
cactttctccaataataaaaaaatg

SEQ ID NO: 1004899 - DNA, 25 bp, Homo sapien
caacgtgaaactaatgaaaattggt

SEQ ID NO: 1004900 - DNA, 25 bp, Homo sapien
gtgaaactaatgaaaattggttgct

SEQ ID NO: 1004901 - DNA, 25 bp, Homo sapien
aacaacgtgaaactaatgaaaattg

SEQ ID NO: 1004902 - DNA, 25 bp, Homo sapien
acgtgaaactaatgaaaattggttg

SEQ ID NO: 1004903 - DNA, 25 bp, Homo sapien
gaacatttcctcagagtagactcct

SEQ ID NO: 1004904 - DNA, 25 bp, Homo sapien
gaaccaggcgatagtcatttacaag

SEQ ID NO: 1004905 - DNA, 25 bp, Homo sapien
tctgatgagctcgaggctttctgca

SEQ ID NO: 1004906 - DNA, 25 bp, Homo sapien
cacacagtcgtcgagaggcatgaga

SEQ ID NO: 1004907 - DNA, 25 bp, Homo sapien
tcaagaattgtaactagccggagca

SEQ ID NO: 1004908 - DNA, 25 bp, Homo sapien
cagagctttgggatagtctgtgctc

SEQ ID NO: 1004909 - DNA, 25 bp, Homo sapien
gatttgggaagtatacatcgtgctg

SEQ ID NO: 1004910 - DNA, 25 bp, Homo sapien
gaagtaagtgggtgctactactgca

SEQ ID NO: 1004911 - DNA, 25 bp, Homo sapien
tagctcaagggtaggttacaaaatg

SEQ ID NO: 1004912 - DNA, 25 bp, Homo sapien
gtagttgattacactatatccattc

SEQ ID NO: 1004913 - DNA, 25 bp, Homo sapien
ctggtagttgattacactatatcca

SEQ ID NO: 1004914 - DNA, 25 bp, Homo sapien
ggtagttgattacactatatccatt

SEQ ID NO: 1004915 - DNA, 25 bp, Homo sapien
ttctggtagttgattacactatatc

SEQ ID NO: 1004916 - DNA, 25 bp, Homo sapien
cttcttctcaagatcctcttgagag

SEQ ID NO: 1004917 - DNA, 25 bp, Homo sapien
tcttctcaagatcctcttgagagac

SEQ ID NO: 1004918 - DNA, 25 bp, Homo sapien
ttctcaagatcctcttgagagacat

SEQ ID NO: 1004919 - DNA, 25 bp, Homo sapien
cttctcaagatcctcttgagagaca

SEQ ID NO: 1004920 - DNA, 25 bp, Homo sapien
cactgcgctcggctataacctgatt

SEQ ID NO: 1004921 - DNA, 25 bp, Homo sapien
tacccaacatcattggccgtgagga

SEQ ID NO: 1004922 - DNA, 25 bp, Homo sapien
aacacttcatactgactaggatggc

SEQ ID NO: 1004923 - DNA, 25 bp, Homo sapien
caataagcctgtgcaaagataccca

SEQ ID NO: 1004924 - DNA, 25 bp, Homo sapien
caaggaacttctaccttcaagtcgg

SEQ ID NO: 1004925 - DNA, 25 bp, Homo sapien
tcaaggaacttctaccttcaagtcg

SEQ ID NO: 1004926 - DNA, 25 bp, Homo sapien
ttcaaggaacttctaccttcaagtc

SEQ ID NO: 1004927 - DNA, 25 bp, Homo sapien
aggctgcccaggggcggacccctgg

SEQ ID NO: 1004928 - DNA, 25 bp, Homo sapien
caggctgcccaggggcggacccctg

SEQ ID NO: 1004929 - DNA, 25 bp, Homo sapien
ccagactcagccctatggaaggcac

SEQ ID NO: 1004930 - DNA, 25 bp, Homo sapien
ctcagccctatggaaggcactacac

SEQ ID NO: 1004931 - DNA, 25 bp, Homo sapien
gtcccagactcagccctatggaagg

SEQ ID NO: 1004932 - DNA, 25 bp, Homo sapien
tcggtcccagactcagccctatgga

SEQ ID NO: 1004933 - DNA, 25 bp, Homo sapien
aggagagactcaactttcccgccac

SEQ ID NO: 1004934 - DNA, 25 bp, Homo sapien
gccccgaaggctcggcgcaggagag

SEQ ID NO: 1004935 - DNA, 25 bp, Homo sapien
cgccaccaacgccattcaccaactg

SEQ ID NO: 1004936 - DNA, 25 bp, Homo sapien
ttcaccaactgcgcagactctacgg

SEQ ID NO: 1004937 - DNA, 25 bp, Homo sapien
cagactggatttgaatcactatttt

SEQ ID NO: 1004938 - DNA, 25 bp, Homo sapien
tgaatcactattttagtgtagcagt

SEQ ID NO: 1004939 - DNA, 25 bp, Homo sapien
cactattttagtgtagcagttctca

SEQ ID NO: 1004940 - DNA, 25 bp, Homo sapien
tttggggccaacaactctgtactct

SEQ ID NO: 1004941 - DNA, 25 bp, Homo sapien
acaggcagtgatgaaaccagaaact

SEQ ID NO: 1004942 - DNA, 25 bp, Homo sapien
ttcactatttacaggcagtgatgaa

SEQ ID NO: 1004943 - DNA, 25 bp, Homo sapien
agtaagatacttcttgaaggctggg

SEQ ID NO: 1004944 - DNA, 25 bp, Homo sapien
aactttgggaggtctatttcaggag

SEQ ID NO: 1004945 - DNA, 25 bp, Homo sapien
cctgtcaacgtggtgcattgctggt

SEQ ID NO: 1004946 - DNA, 25 bp, Homo sapien
tcagagtaagatgcccatacttcct

SEQ ID NO: 1004947 - DNA, 25 bp, Homo sapien
gcccatacttcctgtcaacgtggtg

SEQ ID NO: 1004948 - DNA, 25 bp, Homo sapien
tacttcctgtcaacgtggtgcattg

SEQ ID NO: 1004949 - DNA, 25 bp, Homo sapien
aagacagactcaagccctatcctag

SEQ ID NO: 1004950 - DNA, 25 bp, Homo sapien
ggaacaacttccctcgcaaggtgac

SEQ ID NO: 1004951 - DNA, 25 bp, Homo sapien
gagcgaagacttacaggaggagaaa

SEQ ID NO: 1004952 - DNA, 25 bp, Homo sapien
taggaatgaaaccaacagattgttg

SEQ ID NO: 1004953 - DNA, 25 bp, Homo sapien
ctgcgcgcggggctagcgggcggcg

SEQ ID NO: 1004954 - DNA, 25 bp, Homo sapien
ggcggctcgcgggagacgctgcgcg

SEQ ID NO: 1004955 - DNA, 25 bp, Homo sapien
ggggcgctctcgggctgccggcggg

SEQ ID NO: 1004956 - DNA, 25 bp, Homo sapien
gccgccgagcatccgggctcccggc

SEQ ID NO: 1004957 - DNA, 25 bp, Homo sapien
cacaaaggggaggttacaggattgc

SEQ ID NO: 1004958 - DNA, 25 bp, Homo sapien
taatcagctatcatggtccccattt

SEQ ID NO: 1004959 - DNA, 25 bp, Homo sapien
ccatttttgtccctaccttgagatg

SEQ ID NO: 1004960 - DNA, 25 bp, Homo sapien
accagttcagtaaaagtgcacacct

SEQ ID NO: 1004961 - DNA, 25 bp, Homo sapien
atttgatccaagctcccttgccact

SEQ ID NO: 1004962 - DNA, 25 bp, Homo sapien
actatttgatccaagctcccttgcc

SEQ ID NO: 1004963 - DNA, 25 bp, Homo sapien
gggttcgaaactagcccaggtgata

SEQ ID NO: 1004964 - DNA, 25 bp, Homo sapien
ggttcgaaactagcccaggtgatat

SEQ ID NO: 1004965 - DNA, 25 bp, Homo sapien
gtagtggcggcttcagggaggagtg

SEQ ID NO: 1004966 - DNA, 25 bp, Homo sapien
tggacggaccgggtgtagacctggc

SEQ ID NO: 1004967 - DNA, 25 bp, Homo sapien
ctgtgtgtagtggcggcttcaggga

SEQ ID NO: 1004968 - DNA, 25 bp, Homo sapien
gaggagtggacggaccgggtgtaga

SEQ ID NO: 1004969 - DNA, 25 bp, Homo sapien
gagtgctcttgcctgtccgggatgt

SEQ ID NO: 1004970 - DNA, 25 bp, Homo sapien
tgtgtgtagaagacagcccctcctt

SEQ ID NO: 1004971 - DNA, 25 bp, Homo sapien
acacctgtgtccctcgctggactga

SEQ ID NO: 1004972 - DNA, 25 bp, Homo sapien
tttaccaatgcaccaatgacacctg

SEQ ID NO: 1004973 - DNA, 25 bp, Homo sapien
taggtgccccgtagacacttaacta

SEQ ID NO: 1004974 - DNA, 25 bp, Homo sapien
tcacaaggtctggtaggtgccccgt

SEQ ID NO: 1004975 - DNA, 25 bp, Homo sapien
ctgcgtgtgctctggtgctgagaca

SEQ ID NO: 1004976 - DNA, 25 bp, Homo sapien
ttaactaagctcctatccgacaaga

SEQ ID NO: 1004977 - DNA, 25 bp, Homo sapien
ttttctctagagtcatggagcagac

SEQ ID NO: 1004978 - DNA, 25 bp, Homo sapien
tggagcttttctctagagtcatgga

SEQ ID NO: 1004979 - DNA, 25 bp, Homo sapien
gcttttctctagagtcatggagcag

SEQ ID NO: 1004980 - DNA, 25 bp, Homo sapien
ctagaaggtttgcccgagaggtgga

SEQ ID NO: 1004981 - DNA, 25 bp, Homo sapien
gggattagaatccagtctgtgtcca

SEQ ID NO: 1004982 - DNA, 25 bp, Homo sapien
taccaggaggcgatgacttgtgatg

SEQ ID NO: 1004983 - DNA, 25 bp, Homo sapien
tgtccataagacacagtcaagtcca

SEQ ID NO: 1004984 - DNA, 25 bp, Homo sapien
cagtcaagtccactgttacacagga

SEQ ID NO: 1004985 - DNA, 25 bp, Homo sapien
gaacaacaccgattactcggtcctg

SEQ ID NO: 1004986 - DNA, 25 bp, Homo sapien
acaacaccgattactcggtcctggc

SEQ ID NO: 1004987 - DNA, 25 bp, Homo sapien
tcctggcccgggggaccatggcttc

SEQ ID NO: 1004988 - DNA, 25 bp, Homo sapien
catggcttcctatggagcagccgct

SEQ ID NO: 1004989 - DNA, 25 bp, Homo sapien
ttgtggacagagtttctccgtgtcg

SEQ ID NO: 1004990 - DNA, 25 bp, Homo sapien
cagagtttctccgtgtcgtggccat

SEQ ID NO: 1004991 - DNA, 25 bp, Homo sapien
tgggcatcgtgtttgtggacagagt

SEQ ID NO: 1004992 - DNA, 25 bp, Homo sapien
ctcttgtgagtagtgggcatcgtgt

SEQ ID NO: 1004993 - DNA, 25 bp, Homo sapien
gcatgctgggccatggtagttcctg

SEQ ID NO: 1004994 - DNA, 25 bp, Homo sapien
gactgatgcctgttattgacagcac

SEQ ID NO: 1004995 - DNA, 25 bp, Homo sapien
ggataaataagccacagcatgctgg

SEQ ID NO: 1004996 - DNA, 25 bp, Homo sapien
tgggccatggtagttcctgactctc

SEQ ID NO: 1004997 - DNA, 25 bp, Homo sapien
gctccagtacaaggcccagcgtgga

SEQ ID NO: 1004998 - DNA, 25 bp, Homo sapien
cagtacaaggcccagcgtggaagtg

SEQ ID NO: 1004999 - DNA, 25 bp, Homo sapien
acaaggcccagcgtggaagtgctca

SEQ ID NO: 1005000 - DNA, 25 bp, Homo sapien
aaggcccagcgtggaagtgctcagc

SEQ ID NO: 1005001 - DNA, 25 bp, Homo sapien
agggacaggtgaggccatttgggtc

SEQ ID NO: 1005002 - DNA, 25 bp, Homo sapien
acaggtgaggccatttgggtctgct

SEQ ID NO: 1005003 - DNA, 25 bp, Homo sapien
ggacaggtgaggccatttgggtctg

SEQ ID NO: 1005004 - DNA, 25 bp, Homo sapien
ggtgaggccatttgggtctgctgtg

SEQ ID NO: 1005005 - DNA, 25 bp, Homo sapien
gtaagagatgtctactgggatgctc

SEQ ID NO: 1005006 - DNA, 25 bp, Homo sapien
cacagcttagcaagacagcttcctg

SEQ ID NO: 1005007 - DNA, 25 bp, Homo sapien
tgagagcacagcttagcaagacagc

SEQ ID NO: 1005008 - DNA, 25 bp, Homo sapien
tactgggatgctctgagagcacagc

SEQ ID NO: 1005009 - DNA, 25 bp, Homo sapien
atctggcctcgataagggaaagaag

SEQ ID NO: 1005010 - DNA, 25 bp, Homo sapien
tcaggatctggcctcgataagggaa

SEQ ID NO: 1005011 - DNA, 25 bp, Homo sapien
cctgcaaaggtctgcttgggatggg

SEQ ID NO: 1005012 - DNA, 25 bp, Homo sapien
gatggggatcaggagtagcgtctga

SEQ ID NO: 1005013 - DNA, 25 bp, Homo sapien
agcccacaacccctcggaagggcag

SEQ ID NO: 1005014 - DNA, 25 bp, Homo sapien
ctgccttccgctgcaggcacgcggg

SEQ ID NO: 1005015 - DNA, 25 bp, Homo sapien
ttccgctgcaggcacgcgggcctcc

SEQ ID NO: 1005016 - DNA, 25 bp, Homo sapien
tgctgcagcccacaacccctcggaa

SEQ ID NO: 1005017 - DNA, 25 bp, Homo sapien
acaaatgatgaaccaggggagcagg

SEQ ID NO: 1005018 - DNA, 25 bp, Homo sapien
gaagtagtgaagtgacaaatgatga

SEQ ID NO: 1005019 - DNA, 25 bp, Homo sapien
agtgaagtgacaaatgatgaaccag

SEQ ID NO: 1005020 - DNA, 25 bp, Homo sapien
ccttgaagtagtgaagtgacaaatg

SEQ ID NO: 1005021 - DNA, 25 bp, Homo sapien
tagccgctgccgatgctctttcctt

SEQ ID NO: 1005022 - DNA, 25 bp, Homo sapien
caccaactgctctctcgggcccagg

SEQ ID NO: 1005023 - DNA, 25 bp, Homo sapien
ttctggtgccagatgcagcttcagt

SEQ ID NO: 1005024 - DNA, 25 bp, Homo sapien
cagggtggcgatgggttgtagccgc

SEQ ID NO: 1005025 - DNA, 25 bp, Homo sapien
tctagtggatattcttcgtggatgt

SEQ ID NO: 1005026 - DNA, 25 bp, Homo sapien
gcacttgagaggaaacgtgcttgct

SEQ ID NO: 1005027 - DNA, 25 bp, Homo sapien
tgcttgctgttccaattctagtgga

SEQ ID NO: 1005028 - DNA, 25 bp, Homo sapien
gatgattggagtcagcacttgagag

SEQ ID NO: 1005029 - DNA, 25 bp, Homo sapien
tcctgcgttgggtctgcattgctct

SEQ ID NO: 1005030 - DNA, 25 bp, Homo sapien
ccttgtgacggtggctgctgactgc

SEQ ID NO: 1005031 - DNA, 25 bp, Homo sapien
gctcctgggacacgcctgaccttgt

SEQ ID NO: 1005032 - DNA, 25 bp, Homo sapien
atgctgcgtcaaagggctggcggtc

SEQ ID NO: 1005033 - DNA, 25 bp, Homo sapien
ctggaaggaagtgaaggaccgaggg

SEQ ID NO: 1005034 - DNA, 25 bp, Homo sapien
ggtgtccctacgggcgaccacacag

SEQ ID NO: 1005035 - DNA, 25 bp, Homo sapien
tcctcacagtgcatccccacggtgt

SEQ ID NO: 1005036 - DNA, 25 bp, Homo sapien
gtccccacagcttgcctccacagtg

SEQ ID NO: 1005037 - DNA, 25 bp, Homo sapien
tccacagggcgtccccacagcgtgt

SEQ ID NO: 1005038 - DNA, 25 bp, Homo sapien
gagctcagggttcctctcccttgtc

SEQ ID NO: 1005039 - DNA, 25 bp, Homo sapien
ctgttgtcaacacccggtaacactg

SEQ ID NO: 1005040 - DNA, 25 bp, Homo sapien
tcctggctgttgtcaacacccggta

SEQ ID NO: 1005041 - DNA, 25 bp, Homo sapien
cacagcggtgactccggagagtgtc

SEQ ID NO: 1005042 - DNA, 25 bp, Homo sapien
ggagagtgtcggtggaggtcttcct

SEQ ID NO: 1005043 - DNA, 25 bp, Homo sapien
ttgggaagctctgccatcgggtatg

SEQ ID NO: 1005044 - DNA, 25 bp, Homo sapien
ccagaggatgggtggacggttccga

SEQ ID NO: 1005045 - DNA, 25 bp, Homo sapien
gacatgtggccagtcgtccacacgg

SEQ ID NO: 1005046 - DNA, 25 bp, Homo sapien
ccatcgggtatgatgccagaggatg

SEQ ID NO: 1005047 - DNA, 25 bp, Homo sapien
agacacaaagctgacggcccgcttt

SEQ ID NO: 1005048 - DNA, 25 bp, Homo sapien
ttggctggacctctcctgacgtgct

SEQ ID NO: 1005049 - DNA, 25 bp, Homo sapien
tctgcaccagagtgtgcaagcctgg

SEQ ID NO: 1005050 - DNA, 25 bp, Homo sapien
gtggctgccttcatcccgtgttttc

SEQ ID NO: 1005051 - DNA, 25 bp, Homo sapien
tcctgtggcattgccggcagtccct

SEQ ID NO: 1005052 - DNA, 25 bp, Homo sapien
tagattcctcaaccacaggctgtgc

SEQ ID NO: 1005053 - DNA, 25 bp, Homo sapien
cggcagtccctgtagattcctcaac

SEQ ID NO: 1005054 - DNA, 25 bp, Homo sapien
gtgcagtacacagcccggctcgcag

SEQ ID NO: 1005055 - DNA, 25 bp, Homo sapien
ttggcttcctttaatcacgataagg

SEQ ID NO: 1005056 - DNA, 25 bp, Homo sapien
ggctgcctgtactgtgtggatagat

SEQ ID NO: 1005057 - DNA, 25 bp, Homo sapien
gatagatccaatctgacgttggctt

SEQ ID NO: 1005058 - DNA, 25 bp, Homo sapien
gcctgtactgtgtggatagatccaa

SEQ ID NO: 1005059 - DNA, 25 bp, Homo sapien
atcccgctcaggccgcatgccgccc

SEQ ID NO: 1005060 - DNA, 25 bp, Homo sapien
cccgctcaggccgcatgccgcccgc

SEQ ID NO: 1005061 - DNA, 25 bp, Homo sapien
tcccgctcaggccgcatgccgcccg

SEQ ID NO: 1005062 - DNA, 25 bp, Homo sapien
catcccgctcaggccgcatgccgcc

SEQ ID NO: 1005063 - DNA, 25 bp, Homo sapien
acctcgttaggtgagtagcaggcca

SEQ ID NO: 1005064 - DNA, 25 bp, Homo sapien
gcacctcgttaggtgagtagcaggc

SEQ ID NO: 1005065 - DNA, 25 bp, Homo sapien
cctcgttaggtgagtagcaggccag

SEQ ID NO: 1005066 - DNA, 25 bp, Homo sapien
gcagcacctcgttaggtgagtagca

SEQ ID NO: 1005067 - DNA, 25 bp, Homo sapien
ttacgacagacaggacgggcgacct

SEQ ID NO: 1005068 - DNA, 25 bp, Homo sapien
tggctttggcttgtcaattcccgtg

SEQ ID NO: 1005069 - DNA, 25 bp, Homo sapien
gacctttgtaaagcagcctggctgg

SEQ ID NO: 1005070 - DNA, 25 bp, Homo sapien
tatgaagttggcgttacgacagaca

SEQ ID NO: 1005071 - DNA, 25 bp, Homo sapien
gccatgaccaaaaccacaccgccta

SEQ ID NO: 1005072 - DNA, 25 bp, Homo sapien
catgaccaaaaccacaccgcctacg

SEQ ID NO: 1005073 - DNA, 25 bp, Homo sapien
atgaccaaaaccacaccgcctacgg

SEQ ID NO: 1005074 - DNA, 25 bp, Homo sapien
tgaccaaaaccacaccgcctacggc

SEQ ID NO: 1005075 - DNA, 25 bp, Homo sapien
cttcataggtctgtagggcttgcga

SEQ ID NO: 1005076 - DNA, 25 bp, Homo sapien
tcataggtctgtagggcttgcgaga

SEQ ID NO: 1005077 - DNA, 25 bp, Homo sapien
tctgtagggcttgcgagagagacac

SEQ ID NO: 1005078 - DNA, 25 bp, Homo sapien
tagggcttgcgagagagacacaaat

SEQ ID NO: 1005079 - DNA, 25 bp, Homo sapien
tcttgacagtgtcgagaagagcacg

SEQ ID NO: 1005080 - DNA, 25 bp, Homo sapien
tgccaccagagctgcatcgcagccg

SEQ ID NO: 1005081 - DNA, 25 bp, Homo sapien
tgctcccatgtgaagagacggcaca

SEQ ID NO: 1005082 - DNA, 25 bp, Homo sapien
gaagagcacgggtactctgctccca

SEQ ID NO: 1005083 - DNA, 25 bp, Homo sapien
catccaagggcttctggaaggcact

SEQ ID NO: 1005084 - DNA, 25 bp, Homo sapien
ggaaggcactgaatgtcagactgac

SEQ ID NO: 1005085 - DNA, 25 bp, Homo sapien
tcagcatccaagggcttctggaagg

SEQ ID NO: 1005086 - DNA, 25 bp, Homo sapien
caagggcttctggaaggcactgaat

SEQ ID NO: 1005087 - DNA, 25 bp, Homo sapien
tgcgcttccccgacaagatgaagtg

SEQ ID NO: 1005088 - DNA, 25 bp, Homo sapien
gtcgaagccattggacacagagccc

SEQ ID NO: 1005089 - DNA, 25 bp, Homo sapien
tcctgtgctgatgattcctatcggg

SEQ ID NO: 1005090 - DNA, 25 bp, Homo sapien
tcctatcgggccatatatttcctgg

SEQ ID NO: 1005091 - DNA, 25 bp, Homo sapien
cacacagaactttccaataaagatt

SEQ ID NO: 1005092 - DNA, 25 bp, Homo sapien
ctgacacacagaactttccaataaa

SEQ ID NO: 1005093 - DNA, 25 bp, Homo sapien
ataaagatttcattgtctccttcct

SEQ ID NO: 1005094 - DNA, 25 bp, Homo sapien
cagaactttccaataaagatttcat

SEQ ID NO: 1005095 - DNA, 25 bp, Homo sapien
tgtcggagtctcgaaaagctcccct

SEQ ID NO: 1005096 - DNA, 25 bp, Homo sapien
tcacttctgaaatgtcggagtctcg

SEQ ID NO: 1005097 - DNA, 25 bp, Homo sapien
tctgaaatgtcggagtctcgaaaag

SEQ ID NO: 1005098 - DNA, 25 bp, Homo sapien
gagtctcgaaaagctcccctgaatt

SEQ ID NO: 1005099 - DNA, 25 bp, Homo sapien
ttccatggctatgccattgtctctg

SEQ ID NO: 1005100 - DNA, 25 bp, Homo sapien
gacttccatggctatgccattgtct

SEQ ID NO: 1005101 - DNA, 25 bp, Homo sapien
ggtgtttgtggtaggagcctggaga

SEQ ID NO: 1005102 - DNA, 25 bp, Homo sapien
gccattgtctctggtgtttgtggta

SEQ ID NO: 1005103 - DNA, 25 bp, Homo sapien
caccaggaaagaccccatcttcgag

SEQ ID NO: 1005104 - DNA, 25 bp, Homo sapien
ggcaccaggaaagaccccatcttcg

SEQ ID NO: 1005105 - DNA, 25 bp, Homo sapien
gcaccaggaaagaccccatcttcga

SEQ ID NO: 1005106 - DNA, 25 bp, Homo sapien
gcttaatggagcttcacaatgcaca

SEQ ID NO: 1005107 - DNA, 25 bp, Homo sapien
tggtggttgataggtcccctgcaaa

SEQ ID NO: 1005108 - DNA, 25 bp, Homo sapien
tttcagaagcctccacttaacgatg

SEQ ID NO: 1005109 - DNA, 25 bp, Homo sapien
caaataatcaggttaccagggaggg

SEQ ID NO: 1005110 - DNA, 25 bp, Homo sapien
gagcccaggccgtttgcctctggtt

SEQ ID NO: 1005111 - DNA, 25 bp, Homo sapien
tgcccgctcaatgccttgtactgct

SEQ ID NO: 1005112 - DNA, 25 bp, Homo sapien
cgattcgagcccaggccgtttgcct

SEQ ID NO: 1005113 - DNA, 25 bp, Homo sapien
cgggcgattcgagcccaggccgttt

SEQ ID NO: 1005114 - DNA, 25 bp, Homo sapien
ctgcgtgcaaccgaaaggctggcga

SEQ ID NO: 1005115 - DNA, 25 bp, Homo sapien
gtagcttgtcagattcagatatggt

SEQ ID NO: 1005116 - DNA, 25 bp, Homo sapien
gaaaggctggcgacctgtagcttgt

SEQ ID NO: 1005117 - DNA, 25 bp, Homo sapien
aaccgaaaggctggcgacctgtagc

SEQ ID NO: 1005118 - DNA, 25 bp, Homo sapien
tagagacaaggttaaattccaggtg

SEQ ID NO: 1005119 - DNA, 25 bp, Homo sapien
taaattccaggtgaacgcggttcca

SEQ ID NO: 1005120 - DNA, 25 bp, Homo sapien
tgaacgcggttccagagtggctggg

SEQ ID NO: 1005121 - DNA, 25 bp, Homo sapien
cgttagagacaaggttaaattccag

SEQ ID NO: 1005122 - DNA, 25 bp, Homo sapien
ctcttccgggcccagacgtcctaat

SEQ ID NO: 1005123 - DNA, 25 bp, Homo sapien
gaagcgttcctccagcatgcgtgga

SEQ ID NO: 1005124 - DNA, 25 bp, Homo sapien
gtgtgtgccacggaggccgctgggt

SEQ ID NO: 1005125 - DNA, 25 bp, Homo sapien
tggatatcctgaggactcacggaca

SEQ ID NO: 1005126 - DNA, 25 bp, Homo sapien
tgaggtgagatcccgttttccccca

SEQ ID NO: 1005127 - DNA, 25 bp, Homo sapien
aaagggactccggagccgcattcac

SEQ ID NO: 1005128 - DNA, 25 bp, Homo sapien
gccaaagggactccggagccgcatt

SEQ ID NO: 1005129 - DNA, 25 bp, Homo sapien
cccagccaaagggactccggagccg

SEQ ID NO: 1005130 - DNA, 25 bp, Homo sapien
cgccttcctcgagttctcagggcaa

SEQ ID NO: 1005131 - DNA, 25 bp, Homo sapien
gccagcgcccgccttcctcgagttc

SEQ ID NO: 1005132 - DNA, 25 bp, Homo sapien
gattttagtcatttggcaattggtg

SEQ ID NO: 1005133 - DNA, 25 bp, Homo sapien
ggattttagtcatttggcaattggt

SEQ ID NO: 1005134 - DNA, 25 bp, Homo sapien
cttttctgctattaaagctctccca

SEQ ID NO: 1005135 - DNA, 25 bp, Homo sapien
tttctgctattaaagctctcccatt

SEQ ID NO: 1005136 - DNA, 25 bp, Homo sapien
ttttctgctattaaagctctcccat

SEQ ID NO: 1005137 - DNA, 25 bp, Homo sapien
tctgctattaaagctctcccatttt

SEQ ID NO: 1005138 - DNA, 25 bp, Homo sapien
actgagcaccgagtcagggaaggat

SEQ ID NO: 1005139 - DNA, 25 bp, Homo sapien
agttggagagggcatatcgtctgtt

SEQ ID NO: 1005140 - DNA, 25 bp, Homo sapien
tgcagactgagcaccgagtcaggga

SEQ ID NO: 1005141 - DNA, 25 bp, Homo sapien
ggcatatcgtctgttcttggatacc

SEQ ID NO: 1005142 - DNA, 25 bp, Homo sapien
ccttccttccttcgtgcattgctga

SEQ ID NO: 1005143 - DNA, 25 bp, Homo sapien
ccttccttcgtgcattgctgaccat

SEQ ID NO: 1005144 - DNA, 25 bp, Homo sapien
tccttccttcgtgcattgctgacca

SEQ ID NO: 1005145 - DNA, 25 bp, Homo sapien
ttccttccttcgtgcattgctgacc

SEQ ID NO: 1005146 - DNA, 25 bp, Homo sapien
cctctcagcttgtaggatggcttgg

SEQ ID NO: 1005147 - DNA, 25 bp, Homo sapien
taaactaagagggtcaacttgctga

SEQ ID NO: 1005148 - DNA, 25 bp, Homo sapien
tgtacttagtgggacgatgcaacct

SEQ ID NO: 1005149 - DNA, 25 bp, Homo sapien
ttggacgcttgacagctgttattgc

SEQ ID NO: 1005150 - DNA, 25 bp, Homo sapien
cattgaagctttcagcctgaattag

SEQ ID NO: 1005151 - DNA, 25 bp, Homo sapien
acattgaagctttcagcctgaatta

SEQ ID NO: 1005152 - DNA, 25 bp, Homo sapien
gacattgaagctttcagcctgaatt

SEQ ID NO: 1005153 - DNA, 25 bp, Homo sapien
gaatcttgtgggctgttggccagtt

SEQ ID NO: 1005154 - DNA, 25 bp, Homo sapien
cctgaatcttgtgggctgttggcca

SEQ ID NO: 1005155 - DNA, 25 bp, Homo sapien
ccctgaatcttgtgggctgttggcc

SEQ ID NO: 1005156 - DNA, 25 bp, Homo sapien
atcttgtgggctgttggccagtttc

SEQ ID NO: 1005157 - DNA, 25 bp, Homo sapien
aaccctctgccttcgctgcattgaa

SEQ ID NO: 1005158 - DNA, 25 bp, Homo sapien
gatctcacctcagtgtcatggtgca

SEQ ID NO: 1005159 - DNA, 25 bp, Homo sapien
catgccgaacagtgatagaagctct

SEQ ID NO: 1005160 - DNA, 25 bp, Homo sapien
catgcttctgattggcctgcgagac

SEQ ID NO: 1005161 - DNA, 25 bp, Homo sapien
ctctcagaatctgccttcggaccat

SEQ ID NO: 1005162 - DNA, 25 bp, Homo sapien
tcctctcagaatctgccttcggacc

SEQ ID NO: 1005163 - DNA, 25 bp, Homo sapien
cctctcagaatctgccttcggacca

SEQ ID NO: 1005164 - DNA, 25 bp, Homo sapien
atcaggaagctcatcacatgcccca

SEQ ID NO: 1005165 - DNA, 25 bp, Homo sapien
ttccatcaggaagctcatcacatgc

SEQ ID NO: 1005166 - DNA, 25 bp, Homo sapien
tcaggaagctcatcacatgccccat

SEQ ID NO: 1005167 - DNA, 25 bp, Homo sapien
gttttccatcaggaagctcatcaca

SEQ ID NO: 1005168 - DNA, 25 bp, Homo sapien
tgtcttgagacttatgtccaggtcc

SEQ ID NO: 1005169 - DNA, 25 bp, Homo sapien
tcttgagacttatgtccaggtccat

SEQ ID NO: 1005170 - DNA, 25 bp, Homo sapien
tgctgtcttgagacttatgtccagg

SEQ ID NO: 1005171 - DNA, 25 bp, Homo sapien
gctgtcttgagacttatgtccaggt

SEQ ID NO: 1005172 - DNA, 25 bp, Homo sapien
cttccttacaaatccctgggcctca

SEQ ID NO: 1005173 - DNA, 25 bp, Homo sapien
ttccttacaaatccctgggcctcaa

SEQ ID NO: 1005174 - DNA, 25 bp, Homo sapien
ttacaaatccctgggcctcaaacca

SEQ ID NO: 1005175 - DNA, 25 bp, Homo sapien
caaatccctgggcctcaaaccaagg

SEQ ID NO: 1005176 - DNA, 25 bp, Homo sapien
cacagggatattgaaacctcggggt

SEQ ID NO: 1005177 - DNA, 25 bp, Homo sapien
gatattgaaacctcggggtagatca

SEQ ID NO: 1005178 - DNA, 25 bp, Homo sapien
ctggtcaagtcctctgatggggtac

SEQ ID NO: 1005179 - DNA, 25 bp, Homo sapien
tctgatggggtacacagggatattg

SEQ ID NO: 1005180 - DNA, 25 bp, Homo sapien
gaaaaagactatgaataatggacca

SEQ ID NO: 1005181 - DNA, 25 bp, Homo sapien
tttctatattaataagagcattcca

SEQ ID NO: 1005182 - DNA, 25 bp, Homo sapien
tatgaataatggaccaactcatttc

SEQ ID NO: 1005183 - DNA, 25 bp, Homo sapien
tcctcagtcctaaatgtaccccagg

SEQ ID NO: 1005184 - DNA, 25 bp, Homo sapien
aagaagttgaatgggtgcttcagtg

SEQ ID NO: 1005185 - DNA, 25 bp, Homo sapien
ctagtaggcggtcactaaatggttg

SEQ ID NO: 1005186 - DNA, 25 bp, Homo sapien
tggataagaagttgaatgggtgctt

SEQ ID NO: 1005187 - DNA, 25 bp, Homo sapien
gcggtcactaaatggttgttggata

SEQ ID NO: 1005188 - DNA, 25 bp, Homo sapien
gttttaagtctgccactgtgagtgt

SEQ ID NO: 1005189 - DNA, 25 bp, Homo sapien
tgagtgtgggtgaagcagaaacctt

SEQ ID NO: 1005190 - DNA, 25 bp, Homo sapien
tgctttacagctatacatgaatgtt

SEQ ID NO: 1005191 - DNA, 25 bp, Homo sapien
cactgtgagtgtgggtgaagcagaa

SEQ ID NO: 1005192 - DNA, 25 bp, Homo sapien
taacgttcaatcttaggttcctgaa

SEQ ID NO: 1005193 - DNA, 25 bp, Homo sapien
ccggtggatgggatttacactctgc

SEQ ID NO: 1005194 - DNA, 25 bp, Homo sapien
ggcagtctgccaattgggtgattca

SEQ ID NO: 1005195 - DNA, 25 bp, Homo sapien
tttcataatttttaggaccagctta

SEQ ID NO: 1005196 - DNA, 25 bp, Homo sapien
tgtcttgcatcctagacaagagagt

SEQ ID NO: 1005197 - DNA, 25 bp, Homo sapien
ttgtcttgcatcctagacaagagag

SEQ ID NO: 1005198 - DNA, 25 bp, Homo sapien
gtcttgcatcctagacaagagagtt

SEQ ID NO: 1005199 - DNA, 25 bp, Homo sapien
gcttgtcttgcatcctagacaagag

SEQ ID NO: 1005200 - DNA, 25 bp, Homo sapien
aatagtttgagaacatgacggtttt

SEQ ID NO: 1005201 - DNA, 25 bp, Homo sapien
gttttctggtttggcgatggtccca

SEQ ID NO: 1005202 - DNA, 25 bp, Homo sapien
acatgacggttttctggtttggcga

SEQ ID NO: 1005203 - DNA, 25 bp, Homo sapien
gcgatggtcccaggttgagcctcat

SEQ ID NO: 1005204 - DNA, 25 bp, Homo sapien
ctgggagttgaacatgaccatgcat

SEQ ID NO: 1005205 - DNA, 25 bp, Homo sapien
agcacattcagagtccaccttgcct

SEQ ID NO: 1005206 - DNA, 25 bp, Homo sapien
attcagagtccaccttgcctttcaa

SEQ ID NO: 1005207 - DNA, 25 bp, Homo sapien
tcacgacgtccagttgtcagcacat

SEQ ID NO: 1005208 - DNA, 25 bp, Homo sapien
cacattcagagtccaccttgccttt

SEQ ID NO: 1005209 - DNA, 25 bp, Homo sapien
aagcctcaataatgtgcattccccc

SEQ ID NO: 1005210 - DNA, 25 bp, Homo sapien
aaagcctcaataatgtgcattcccc

SEQ ID NO: 1005211 - DNA, 25 bp, Homo sapien
caaagcctcaataatgtgcattccc

SEQ ID NO: 1005212 - DNA, 25 bp, Homo sapien
gacattgctggggtccccgtcatcc

SEQ ID NO: 1005213 - DNA, 25 bp, Homo sapien
cctcctggtacctggagacattgct

SEQ ID NO: 1005214 - DNA, 25 bp, Homo sapien
cctggtacctggagacattgctggg

SEQ ID NO: 1005215 - DNA, 25 bp, Homo sapien
gctggggtccccgtcatcccatcct

SEQ ID NO: 1005216 - DNA, 25 bp, Homo sapien
tgagttgaggcaaacttggtgtctg

SEQ ID NO: 1005217 - DNA, 25 bp, Homo sapien
agttgaggcaaacttggtgtctgta

SEQ ID NO: 1005218 - DNA, 25 bp, Homo sapien
ttgagttgaggcaaacttggtgtct

SEQ ID NO: 1005219 - DNA, 25 bp, Homo sapien
gagttgaggcaaacttggtgtctgt

SEQ ID NO: 1005220 - DNA, 25 bp, Homo sapien
tttgttggccatgacgagcaccaga

SEQ ID NO: 1005221 - DNA, 25 bp, Homo sapien
gcgttcattaatttactaagtggcg

SEQ ID NO: 1005222 - DNA, 25 bp, Homo sapien
tcattcacagtaggcgttcattaat

SEQ ID NO: 1005223 - DNA, 25 bp, Homo sapien
cagtcttaactccttcgttggaatt

SEQ ID NO: 1005224 - DNA, 25 bp, Homo sapien
cgtagggatacacagaaagattaaa

SEQ ID NO: 1005225 - DNA, 25 bp, Homo sapien
tccaagtgggatcgtagggatacac

SEQ ID NO: 1005226 - DNA, 25 bp, Homo sapien
tgtgggttatactccaagtgggatc

SEQ ID NO: 1005227 - DNA, 25 bp, Homo sapien
aaagattaaactgagctttgcctgc

SEQ ID NO: 1005228 - DNA, 25 bp, Homo sapien
tggctcaaggccaggaaggattaag

SEQ ID NO: 1005229 - DNA, 25 bp, Homo sapien
cttgcaaatcctgtgacctctagaa

SEQ ID NO: 1005230 - DNA, 25 bp, Homo sapien
tgtctcctgaagttagcttggctca

SEQ ID NO: 1005231 - DNA, 25 bp, Homo sapien
aaatggtcctcttgtgggctcagtc

SEQ ID NO: 1005232 - DNA, 25 bp, Homo sapien
cttcatgagtaacgccgagggtcca

SEQ ID NO: 1005233 - DNA, 25 bp, Homo sapien
gttactgagggagatacctgaatcc

SEQ ID NO: 1005234 - DNA, 25 bp, Homo sapien
ggagatacctgaatccgcagcctct

SEQ ID NO: 1005235 - DNA, 25 bp, Homo sapien
cgagggtccagccatgttgtaatgt

SEQ ID NO: 1005236 - DNA, 25 bp, Homo sapien
ttcgaggtgcttatcacccacacag

SEQ ID NO: 1005237 - DNA, 25 bp, Homo sapien
ggacctgcttctgactcccagactg

SEQ ID NO: 1005238 - DNA, 25 bp, Homo sapien
gactgcattcttcgaggtgcttatc

SEQ ID NO: 1005239 - DNA, 25 bp, Homo sapien
gatgggacctgcttctgactcccag

SEQ ID NO: 1005240 - DNA, 25 bp, Homo sapien
cacttcgtgtatggtccaggtccac

SEQ ID NO: 1005241 - DNA, 25 bp, Homo sapien
cagggagatgtacttcttgaagacc

SEQ ID NO: 1005242 - DNA, 25 bp, Homo sapien
tctttctgattaggcttggcgtcca

SEQ ID NO: 1005243 - DNA, 25 bp, Homo sapien
gacccaaggtcgtgaaagtagagca

SEQ ID NO: 1005244 - DNA, 25 bp, Homo sapien
cttgattgggttagaaagggcaatc

SEQ ID NO: 1005245 - DNA, 25 bp, Homo sapien
atcttcccttgattgggttagaaag

SEQ ID NO: 1005246 - DNA, 25 bp, Homo sapien
gcatcttcccttgattgggttagaa

SEQ ID NO: 1005247 - DNA, 25 bp, Homo sapien
tcccttgattgggttagaaagggca

SEQ ID NO: 1005248 - DNA, 25 bp, Homo sapien
ggagttctagacttatgcagggtct

SEQ ID NO: 1005249 - DNA, 25 bp, Homo sapien
gatctagttgtagcatagtttctct

SEQ ID NO: 1005250 - DNA, 25 bp, Homo sapien
ctagacttatgcagggtctcagaat

SEQ ID NO: 1005251 - DNA, 25 bp, Homo sapien
catttcttatttaaacccgcattct

SEQ ID NO: 1005252 - DNA, 25 bp, Homo sapien
gaagagagaagtgctaccttcagat

SEQ ID NO: 1005253 - DNA, 25 bp, Homo sapien
actggattgaagattggcacttgcc

SEQ ID NO: 1005254 - DNA, 25 bp, Homo sapien
ggcacttgccttcaaggtagctggg

SEQ ID NO: 1005255 - DNA, 25 bp, Homo sapien
tccttagaattgatgcatcctgagt

SEQ ID NO: 1005256 - DNA, 25 bp, Homo sapien
ggaaaaagcgctggaagggcagagc

SEQ ID NO: 1005257 - DNA, 25 bp, Homo sapien
aaaaagcgctggaagggcagagcac

SEQ ID NO: 1005258 - DNA, 25 bp, Homo sapien
gaaaaagcgctggaagggcagagca

SEQ ID NO: 1005259 - DNA, 25 bp, Homo sapien
cgctttgtctacatcctcgtagctg

SEQ ID NO: 1005260 - DNA, 25 bp, Homo sapien
ctggggctggtttgtctgcattctc

SEQ ID NO: 1005261 - DNA, 25 bp, Homo sapien
tcctcgtagctgctattgtgctggg

SEQ ID NO: 1005262 - DNA, 25 bp, Homo sapien
ttgtcctggccgctttgtctacatc

SEQ ID NO: 1005263 - DNA, 25 bp, Homo sapien
aaggacgggactgacagtgtttctg

SEQ ID NO: 1005264 - DNA, 25 bp, Homo sapien
tggtggctgaggactgattctcctc

SEQ ID NO: 1005265 - DNA, 25 bp, Homo sapien
tggaaggacgggactgacagtgttt

SEQ ID NO: 1005266 - DNA, 25 bp, Homo sapien
tggtggtccacttacaggagggagg

SEQ ID NO: 1005267 - DNA, 25 bp, Homo sapien
atttttgggctgagcatcacagcta

SEQ ID NO: 1005268 - DNA, 25 bp, Homo sapien
tcagtatgtaatgaagatggtggac

SEQ ID NO: 1005269 - DNA, 25 bp, Homo sapien
ttctggtggaatggggacctcagta

SEQ ID NO: 1005270 - DNA, 25 bp, Homo sapien
aatttttgggctgagcatcacagct

SEQ ID NO: 1005271 - DNA, 25 bp, Homo sapien
caggataaacaaggaccatcacagc

SEQ ID NO: 1005272 - DNA, 25 bp, Homo sapien
tcacagcagcttcaaggcacagctg

SEQ ID NO: 1005273 - DNA, 25 bp, Homo sapien
tgctgtccatccaggataaacaagg

SEQ ID NO: 1005274 - DNA, 25 bp, Homo sapien
gcacagctgatgcattgtaggcttt

SEQ ID NO: 1005275 - DNA, 25 bp, Homo sapien
gacaaggcaaaggatgctggagccc

SEQ ID NO: 1005276 - DNA, 25 bp, Homo sapien
ctgagacaaggcaaaggatgctgga

SEQ ID NO: 1005277 - DNA, 25 bp, Homo sapien
gagacaaggcaaaggatgctggagc

SEQ ID NO: 1005278 - DNA, 25 bp, Homo sapien
caaggcaaaggatgctggagcccct

SEQ ID NO: 1005279 - DNA, 25 bp, Homo sapien
ctgtgtaggtgtttccagtattcaa

SEQ ID NO: 1005280 - DNA, 25 bp, Homo sapien
ctgctggttaggcaaatggcaaacc

SEQ ID NO: 1005281 - DNA, 25 bp, Homo sapien
ctgcacagcaaaagcacgggttctg

SEQ ID NO: 1005282 - DNA, 25 bp, Homo sapien
taaaaggccattgcaatcttaagga

SEQ ID NO: 1005283 - DNA, 25 bp, Homo sapien
ggcaaaccaaagtgcctgctcaggg

SEQ ID NO: 1005284 - DNA, 25 bp, Homo sapien
tatgccattagcttgctgaatacat

SEQ ID NO: 1005285 - DNA, 25 bp, Homo sapien
ttggagactctgatctatgccatta

SEQ ID NO: 1005286 - DNA, 25 bp, Homo sapien
gatctatgccattagcttgctgaat

SEQ ID NO: 1005287 - DNA, 25 bp, Homo sapien
tcctctttggagactctgatctatg

SEQ ID NO: 1005288 - DNA, 25 bp, Homo sapien
tttcgccaggccattgagtagactg

SEQ ID NO: 1005289 - DNA, 25 bp, Homo sapien
cttggtcctgattctgcatgcaaga

SEQ ID NO: 1005290 - DNA, 25 bp, Homo sapien
caggccattgagtagactggacagc

SEQ ID NO: 1005291 - DNA, 25 bp, Homo sapien
gtcctgattctgcatgcaagagatc

SEQ ID NO: 1005292 - DNA, 25 bp, Homo sapien
aggcctagtaggtcgagtgtgctca

SEQ ID NO: 1005293 - DNA, 25 bp, Homo sapien
caacctttagagggaggcctagtag

SEQ ID NO: 1005294 - DNA, 25 bp, Homo sapien
tctgcattgttctaacaacctttag

SEQ ID NO: 1005295 - DNA, 25 bp, Homo sapien
ggcctagtaggtcgagtgtgctcat

SEQ ID NO: 1005296 - DNA, 25 bp, Homo sapien
tcaacatgacctatcagggagcctg

SEQ ID NO: 1005297 - DNA, 25 bp, Homo sapien
attgctcagaatcccagtttggttg

SEQ ID NO: 1005298 - DNA, 25 bp, Homo sapien
tgtttcactggccaacgttcatcaa

SEQ ID NO: 1005299 - DNA, 25 bp, Homo sapien
gttccctttggattgacgcattctt

SEQ ID NO: 1005300 - DNA, 25 bp, Homo sapien
cactgcccacaattgcttggaccca

SEQ ID NO: 1005301 - DNA, 25 bp, Homo sapien
tgcccacaattgcttggacccacat

SEQ ID NO: 1005302 - DNA, 25 bp, Homo sapien
cacacttcactgcccacaattgctt

SEQ ID NO: 1005303 - DNA, 25 bp, Homo sapien
ttcactgcccacaattgcttggacc

SEQ ID NO: 1005304 - DNA, 25 bp, Homo sapien
tgtgtgggctgaccagttaccctcc

SEQ ID NO: 1005305 - DNA, 25 bp, Homo sapien
tgaccagttaccctccccatgggag

SEQ ID NO: 1005306 - DNA, 25 bp, Homo sapien
gtgtgggctgaccagttaccctccc

SEQ ID NO: 1005307 - DNA, 25 bp, Homo sapien
gggctgaccagttaccctccccatg

SEQ ID NO: 1005308 - DNA, 25 bp, Homo sapien
ctttgtctgtgagagatatttccaa

SEQ ID NO: 1005309 - DNA, 25 bp, Homo sapien
tttgtctgtgagagatatttccaag

SEQ ID NO: 1005310 - DNA, 25 bp, Homo sapien
gagatatttccaagctgtcatcttc

SEQ ID NO: 1005311 - DNA, 25 bp, Homo sapien
atatttccaagctgtcatcttccat

SEQ ID NO: 1005312 - DNA, 25 bp, Homo sapien
ttagggtgctggatacttgaatgca

SEQ ID NO: 1005313 - DNA, 25 bp, Homo sapien
tacttgaatgcagcccggtctgagc

SEQ ID NO: 1005314 - DNA, 25 bp, Homo sapien
cgtaagtcttgatttagaattttgc

SEQ ID NO: 1005315 - DNA, 25 bp, Homo sapien
gatctgagtcgtggtaccaaaagca

SEQ ID NO: 1005316 - DNA, 25 bp, Homo sapien
gagctggtcggcatgcaccacaccc

SEQ ID NO: 1005317 - DNA, 25 bp, Homo sapien
gagcaggagctggtcggcatgcacc

SEQ ID NO: 1005318 - DNA, 25 bp, Homo sapien
gcctcttgctctccacgtaaggaaa

SEQ ID NO: 1005319 - DNA, 25 bp, Homo sapien
taaggaaatgttccaggtccacggc

SEQ ID NO: 1005320 - DNA, 25 bp, Homo sapien
caaacaaggccatgtgcacagcatg

SEQ ID NO: 1005321 - DNA, 25 bp, Homo sapien
tgcacatcgctcgtggaacagggaa

SEQ ID NO: 1005322 - DNA, 25 bp, Homo sapien
cagtttcttcgtccacctttggtct

SEQ ID NO: 1005323 - DNA, 25 bp, Homo sapien
tatgagataccctgagaactacccg

SEQ ID NO: 1005324 - DNA, 25 bp, Homo sapien
catacacttggcttgacctgagagt

SEQ ID NO: 1005325 - DNA, 25 bp, Homo sapien
gaactacccgaaatacttgtgcagg

SEQ ID NO: 1005326 - DNA, 25 bp, Homo sapien
tggcagttccggtagctccaggctt

SEQ ID NO: 1005327 - DNA, 25 bp, Homo sapien
gtaatacttcccattgctgcattgc

SEQ ID NO: 1005328 - DNA, 25 bp, Homo sapien
tgtggtaatacttcccattgctgca

SEQ ID NO: 1005329 - DNA, 25 bp, Homo sapien
tgctgtggtaatacttcccattgct

SEQ ID NO: 1005330 - DNA, 25 bp, Homo sapien
atcattcccaattctccctttgctg

SEQ ID NO: 1005331 - DNA, 25 bp, Homo sapien
cagagtgaactcgagttgggtccta

SEQ ID NO: 1005332 - DNA, 25 bp, Homo sapien
aatgctgggttatcttccactcttg

SEQ ID NO: 1005333 - DNA, 25 bp, Homo sapien
gggcatgcccaaatggagatcttta

SEQ ID NO: 1005334 - DNA, 25 bp, Homo sapien
ggacagtccctaacaacttcatggc

SEQ ID NO: 1005335 - DNA, 25 bp, Homo sapien
agcaagcgaatgactgagtgacagg

SEQ ID NO: 1005336 - DNA, 25 bp, Homo sapien
aagcaagcgaatgactgagtgacag

SEQ ID NO: 1005337 - DNA, 25 bp, Homo sapien
gaagcaagcgaatgactgagtgaca

SEQ ID NO: 1005338 - DNA, 25 bp, Homo sapien
cttcttcatccagggcaagcttgac

SEQ ID NO: 1005339 - DNA, 25 bp, Homo sapien
tggggccactgctaggacacaagga

SEQ ID NO: 1005340 - DNA, 25 bp, Homo sapien
ggccactgctaggacacaaggagcc

SEQ ID NO: 1005341 - DNA, 25 bp, Homo sapien
actgctaggacacaaggagccccag

SEQ ID NO: 1005342 - DNA, 25 bp, Homo sapien
ctatggggccactgctaggacacaa

SEQ ID NO: 1005343 - DNA, 25 bp, Homo sapien
tggctgcagcttcatgtttcctctc

SEQ ID NO: 1005344 - DNA, 25 bp, Homo sapien
gcagtggctcctccccgtagctcag

SEQ ID NO: 1005345 - DNA, 25 bp, Homo sapien
cagcagtggctcctccccgtagctc

SEQ ID NO: 1005346 - DNA, 25 bp, Homo sapien
tggctcctccccgtagctcagcgag

SEQ ID NO: 1005347 - DNA, 25 bp, Homo sapien
ttcaggagaaatgcttctcctggtg

SEQ ID NO: 1005348 - DNA, 25 bp, Homo sapien
cttcaggagaaatgcttctcctggt

SEQ ID NO: 1005349 - DNA, 25 bp, Homo sapien
agtagggcacatcgttcagggagct

SEQ ID NO: 1005350 - DNA, 25 bp, Homo sapien
tgggcaaagcctgtgaagacccggt

SEQ ID NO: 1005351 - DNA, 25 bp, Homo sapien
aagcctgtgaagacccggtcctgag

SEQ ID NO: 1005352 - DNA, 25 bp, Homo sapien
tcctgagtagggcacatcgttcagg

SEQ ID NO: 1005353 - DNA, 25 bp, Homo sapien
tctcccaactcaggtcctttcttca

SEQ ID NO: 1005354 - DNA, 25 bp, Homo sapien
ttctcccaactcaggtcctttcttc

SEQ ID NO: 1005355 - DNA, 25 bp, Homo sapien
ctcccaactcaggtcctttcttcat

SEQ ID NO: 1005356 - DNA, 25 bp, Homo sapien
tctttgtcggcccataattgtgctt

SEQ ID NO: 1005357 - DNA, 25 bp, Homo sapien
gttcctctttgtcggcccataattg

SEQ ID NO: 1005358 - DNA, 25 bp, Homo sapien
gttgttcctctttgtcggcccataa

SEQ ID NO: 1005359 - DNA, 25 bp, Homo sapien
ttgtcggcccataattgtgcttctc

SEQ ID NO: 1005360 - DNA, 25 bp, Homo sapien
tgctgcattgccttctcatttttcc

SEQ ID NO: 1005361 - DNA, 25 bp, Homo sapien
tctgctttccctctgttgaggttca

SEQ ID NO: 1005362 - DNA, 25 bp, Homo sapien
ctgttgttttgggcctgctgcattg

SEQ ID NO: 1005363 - DNA, 25 bp, Homo sapien
ctgctttccctctgttgaggttcat

SEQ ID NO: 1005364 - DNA, 25 bp, Homo sapien
cactttgcttaaagttagtcctcct

SEQ ID NO: 1005365 - DNA, 25 bp, Homo sapien
ttcactttgcttaaagttagtcctc

SEQ ID NO: 1005366 - DNA, 25 bp, Homo sapien
tgcttcactttgcttaaagttagtc

SEQ ID NO: 1005367 - DNA, 25 bp, Homo sapien
gcttcactttgcttaaagttagtcc

SEQ ID NO: 1005368 - DNA, 25 bp, Homo sapien
tctgtagagcctcgcattggccacc

SEQ ID NO: 1005369 - DNA, 25 bp, Homo sapien
aaaaaggatgctgcattccagggcc

SEQ ID NO: 1005370 - DNA, 25 bp, Homo sapien
gcaaggacaggctcgcccttctgta

SEQ ID NO: 1005371 - DNA, 25 bp, Homo sapien
tccagggccaaacgctgcagatgtc

SEQ ID NO: 1005372 - DNA, 25 bp, Homo sapien
cccaaggtgagaaggtctcgctgtg

SEQ ID NO: 1005373 - DNA, 25 bp, Homo sapien
ccaaggtgagaaggtctcgctgtgg

SEQ ID NO: 1005374 - DNA, 25 bp, Homo sapien
aggtgagaaggtctcgctgtgggaa

SEQ ID NO: 1005375 - DNA, 25 bp, Homo sapien
ctcgaacttttggactccgcttcat

SEQ ID NO: 1005376 - DNA, 25 bp, Homo sapien
gggactggattatagagatggatca

SEQ ID NO: 1005377 - DNA, 25 bp, Homo sapien
gctttcttgctctatggctggacca

SEQ ID NO: 1005378 - DNA, 25 bp, Homo sapien
gattatagagatggatcagtgtgct

SEQ ID NO: 1005379 - DNA, 25 bp, Homo sapien
ttcttgctctatggctggaccattt

SEQ ID NO: 1005380 - DNA, 25 bp, Homo sapien
gttctaggggcatcccctgtctcca

SEQ ID NO: 1005381 - DNA, 25 bp, Homo sapien
cccaagcctcgattcctggttctag

SEQ ID NO: 1005382 - DNA, 25 bp, Homo sapien
ggcatcccctgtctccatagcttca

SEQ ID NO: 1005383 - DNA, 25 bp, Homo sapien
caagcctcgattcctggttctaggg

SEQ ID NO: 1005384 - DNA, 25 bp, Homo sapien
tgaacgtccttgcaggatgcctagg

SEQ ID NO: 1005385 - DNA, 25 bp, Homo sapien
gagcagctggcattgtgaacgtcct

SEQ ID NO: 1005386 - DNA, 25 bp, Homo sapien
tgtgacgatctcagccctcgtgcaa

SEQ ID NO: 1005387 - DNA, 25 bp, Homo sapien
cctaggacgagggtgacaagcagca

SEQ ID NO: 1005388 - DNA, 25 bp, Homo sapien
ctgcatgtcttgtgggaatgaaggg

SEQ ID NO: 1005389 - DNA, 25 bp, Homo sapien
gccatccaggcttgattcctgggac

SEQ ID NO: 1005390 - DNA, 25 bp, Homo sapien
agggagccatccaggcttgattcct

SEQ ID NO: 1005391 - DNA, 25 bp, Homo sapien
aaaagggagccatccaggcttgatt

SEQ ID NO: 1005392 - DNA, 25 bp, Homo sapien
tttgatggacgtccgcatggcggtc

SEQ ID NO: 1005393 - DNA, 25 bp, Homo sapien
tagagctacttatgaaccctggaaa

SEQ ID NO: 1005394 - DNA, 25 bp, Homo sapien
caaaattctgaacttgactcgcagc

SEQ ID NO: 1005395 - DNA, 25 bp, Homo sapien
ccccgtgaggagagtttggccattg

SEQ ID NO: 1005396 - DNA, 25 bp, Homo sapien
tgccttgtccttgctagatcaagct

SEQ ID NO: 1005397 - DNA, 25 bp, Homo sapien
tccttctttcccatgtctacagccg

SEQ ID NO: 1005398 - DNA, 25 bp, Homo sapien
tttcccatgtctacagccggctcct

SEQ ID NO: 1005399 - DNA, 25 bp, Homo sapien
cccatgtctacagccggctccttgc

SEQ ID NO: 1005400 - DNA, 25 bp, Homo sapien
ttctttcccatgtctacagccggct

SEQ ID NO: 1005401 - DNA, 25 bp, Homo sapien
gaatttgttgattgcattgtccgag

SEQ ID NO: 1005402 - DNA, 25 bp, Homo sapien
gactcactcatgatgtgaacatggg

SEQ ID NO: 1005403 - DNA, 25 bp, Homo sapien
gcattgtccgagttagaagactcac

SEQ ID NO: 1005404 - DNA, 25 bp, Homo sapien
ctttggagccagtgccaccggaatt

SEQ ID NO: 1005405 - DNA, 25 bp, Homo sapien
gagtagactctatgtgtttggtagc

SEQ ID NO: 1005406 - DNA, 25 bp, Homo sapien
cagcatcggaacagttctgcaccaa

SEQ ID NO: 1005407 - DNA, 25 bp, Homo sapien
ttgcagaatttttatgagagcagta

SEQ ID NO: 1005408 - DNA, 25 bp, Homo sapien
gtttggtagcatttagagatggtcg

SEQ ID NO: 1005409 - DNA, 25 bp, Homo sapien
gctggtaagctctttctcggctgac

SEQ ID NO: 1005410 - DNA, 25 bp, Homo sapien
atgctgccgtggctactagtctaga

SEQ ID NO: 1005411 - DNA, 25 bp, Homo sapien
gggatgctgccgtggctactagtct

SEQ ID NO: 1005412 - DNA, 25 bp, Homo sapien
gctactagtctagaggacactgcct

SEQ ID NO: 1005413 - DNA, 25 bp, Homo sapien
tactagtctagaggacactgcctgt

SEQ ID NO: 1005414 - DNA, 25 bp, Homo sapien
ccaagtggcctgatgttgtgtaggt

SEQ ID NO: 1005415 - DNA, 25 bp, Homo sapien
agtggcctgatgttgtgtaggtgcc

SEQ ID NO: 1005416 - DNA, 25 bp, Homo sapien
aagtggcctgatgttgtgtaggtgc

SEQ ID NO: 1005417 - DNA, 25 bp, Homo sapien
tggcctgatgttgtgtaggtgcctt

SEQ ID NO: 1005418 - DNA, 25 bp, Homo sapien
ctgccgtcggtgttgtaagaattac

SEQ ID NO: 1005419 - DNA, 25 bp, Homo sapien
gaaatatggtaccaggagggaaggc

SEQ ID NO: 1005420 - DNA, 25 bp, Homo sapien
cctataagtttagctgccgtcggtg

SEQ ID NO: 1005421 - DNA, 25 bp, Homo sapien
gagggaaggcctataagtttagctg

SEQ ID NO: 1005422 - DNA, 25 bp, Homo sapien
cctcttgcctggaggtcttttacta

SEQ ID NO: 1005423 - DNA, 25 bp, Homo sapien
acctcttgcctggaggtcttttact

SEQ ID NO: 1005424 - DNA, 25 bp, Homo sapien
tcttgcctggaggtcttttactagt

SEQ ID NO: 1005425 - DNA, 25 bp, Homo sapien
ctcttgcctggaggtcttttactag

SEQ ID NO: 1005426 - DNA, 25 bp, Homo sapien
ctcctggggttattatggccggact

SEQ ID NO: 1005427 - DNA, 25 bp, Homo sapien
ggtcggtgtgttctcttagcagctc

SEQ ID NO: 1005428 - DNA, 25 bp, Homo sapien
tctgggctgagtggtccgggctttg

SEQ ID NO: 1005429 - DNA, 25 bp, Homo sapien
tattatggccggactgtctgggctg

SEQ ID NO: 1005430 - DNA, 25 bp, Homo sapien
ccaagaggtgggttattcacaggga

SEQ ID NO: 1005431 - DNA, 25 bp, Homo sapien
tagggcaggtacgtgccaagaggtg

SEQ ID NO: 1005432 - DNA, 25 bp, Homo sapien
ggtgaggtagggcaggtacgtgcca

SEQ ID NO: 1005433 - DNA, 25 bp, Homo sapien
gccaagaggtgggttattcacaggg

SEQ ID NO: 1005434 - DNA, 25 bp, Homo sapien
tcttcagtcgtcatccagttggagg

SEQ ID NO: 1005435 - DNA, 25 bp, Homo sapien
tgaagcattaccctgggctcggcaa

SEQ ID NO: 1005436 - DNA, 25 bp, Homo sapien
taagaatgcgggtaagatggaagcc

SEQ ID NO: 1005437 - DNA, 25 bp, Homo sapien
ggaaatggacttacccgctacctga

SEQ ID NO: 1005438 - DNA, 25 bp, Homo sapien
aaggaagtaagatggcggcagtgag

SEQ ID NO: 1005439 - DNA, 25 bp, Homo sapien
cagtgcagaaggagatggcggcaga

SEQ ID NO: 1005440 - DNA, 25 bp, Homo sapien
caaggggaaggctagccacagggac

SEQ ID NO: 1005441 - DNA, 25 bp, Homo sapien
tgaggaagcaggtagtaagatggcg

SEQ ID NO: 1005442 - DNA, 25 bp, Homo sapien
cccagaacctttgaacaaatttgat

SEQ ID NO: 1005443 - DNA, 25 bp, Homo sapien
gcagcggtccgacgagagcggaggt

SEQ ID NO: 1005444 - DNA, 25 bp, Homo sapien
gagcggaggtcccagaacctttgaa

SEQ ID NO: 1005445 - DNA, 25 bp, Homo sapien
gcctcgcctctgacaaaaattggta

SEQ ID NO: 1005446 - DNA, 25 bp, Homo sapien
ggttgtccaaggtatattgcagcca

SEQ ID NO: 1005447 - DNA, 25 bp, Homo sapien
ttgtccaaggtatattgcagccagg

SEQ ID NO: 1005448 - DNA, 25 bp, Homo sapien
gattggttgtccaaggtatattgca

SEQ ID NO: 1005449 - DNA, 25 bp, Homo sapien
ctttggggggccagcgagattggtt

SEQ ID NO: 1005450 - DNA, 25 bp, Homo sapien
aggttgcgcagaaggcaccctaagg

SEQ ID NO: 1005451 - DNA, 25 bp, Homo sapien
agtgccgatttggacttcccctggg

SEQ ID NO: 1005452 - DNA, 25 bp, Homo sapien
tcggatcggctacttcagacatgga

SEQ ID NO: 1005453 - DNA, 25 bp, Homo sapien
agaaggaaactctccctgggtgtgc

SEQ ID NO: 1005454 - DNA, 25 bp, Homo sapien
tggcagcaagtaaccggacgaaatg

SEQ ID NO: 1005455 - DNA, 25 bp, Homo sapien
agctgcagcaactgcgacctggcag

SEQ ID NO: 1005456 - DNA, 25 bp, Homo sapien
gtaaccggacgaaatggacagatgg

SEQ ID NO: 1005457 - DNA, 25 bp, Homo sapien
tgcgacctggcagcaagtaaccgga

SEQ ID NO: 1005458 - DNA, 25 bp, Homo sapien
caatgaaaggcaatggaagggcacc

SEQ ID NO: 1005459 - DNA, 25 bp, Homo sapien
tgatttatggggttaagagggccat

SEQ ID NO: 1005460 - DNA, 25 bp, Homo sapien
ttggagtcacggaagggcatacaag

SEQ ID NO: 1005461 - DNA, 25 bp, Homo sapien
ttggtgatgaagacgttgacttgta

SEQ ID NO: 1005462 - DNA, 25 bp, Homo sapien
gacgttgacttgtaattggagtcac

SEQ ID NO: 1005463 - DNA, 25 bp, Homo sapien
gggtatgcaacatgagagctcagct

SEQ ID NO: 1005464 - DNA, 25 bp, Homo sapien
ctgggtatgcaacatgagagctcag

SEQ ID NO: 1005465 - DNA, 25 bp, Homo sapien
gtatgcaacatgagagctcagcttt

SEQ ID NO: 1005466 - DNA, 25 bp, Homo sapien
tgcaacatgagagctcagctttgtt

SEQ ID NO: 1005467 - DNA, 25 bp, Homo sapien
aaatcttcatgagcaatggaaatgg

SEQ ID NO: 1005468 - DNA, 25 bp, Homo sapien
agaatttggaaggaagtcgctggta

SEQ ID NO: 1005469 - DNA, 25 bp, Homo sapien
aatcttcatgagcaatggaaatggc

SEQ ID NO: 1005470 - DNA, 25 bp, Homo sapien
gaaggaagtcgctggtactgtctct

SEQ ID NO: 1005471 - DNA, 25 bp, Homo sapien
actgaaggcttcagagggcacctcc

SEQ ID NO: 1005472 - DNA, 25 bp, Homo sapien
ccaagagactctctggttcaatttc

SEQ ID NO: 1005473 - DNA, 25 bp, Homo sapien
gactgaaggcttcagagggcacctc

SEQ ID NO: 1005474 - DNA, 25 bp, Homo sapien
catctatgtcgtctgccactccaag

SEQ ID NO: 1005475 - DNA, 25 bp, Homo sapien
ggagggcagtgcgttctttgttctc

SEQ ID NO: 1005476 - DNA, 25 bp, Homo sapien
tctttagcaaggctgtaagagaggc

SEQ ID NO: 1005477 - DNA, 25 bp, Homo sapien
taagagaggctctcattttgtctct

SEQ ID NO: 1005478 - DNA, 25 bp, Homo sapien
aggctctcattttgtctctggtgga

SEQ ID NO: 1005479 - DNA, 25 bp, Homo sapien
tgttggagaatgttaatgcagcccc

SEQ ID NO: 1005480 - DNA, 25 bp, Homo sapien
caagtctctgtcatgccatggcggg

SEQ ID NO: 1005481 - DNA, 25 bp, Homo sapien
gatctctgttggagaatgttaatgc

SEQ ID NO: 1005482 - DNA, 25 bp, Homo sapien
ccaatgatgatctttgtgggatgat

SEQ ID NO: 1005483 - DNA, 25 bp, Homo sapien
gaaagaggatcagctgctgttgact

SEQ ID NO: 1005484 - DNA, 25 bp, Homo sapien
tgtgggaaagaggatcagctgctgt

SEQ ID NO: 1005485 - DNA, 25 bp, Homo sapien
tttgctgtgggaaagaggatcagct

SEQ ID NO: 1005486 - DNA, 25 bp, Homo sapien
ccctctctttgctgtgggaaagagg

SEQ ID NO: 1005487 - DNA, 25 bp, Homo sapien
tgctctcttgtgggtggcagctcat

SEQ ID NO: 1005488 - DNA, 25 bp, Homo sapien
tgcattctacacaccacccaataac

SEQ ID NO: 1005489 - DNA, 25 bp, Homo sapien
cattctacacaccacccaataactc

SEQ ID NO: 1005490 - DNA, 25 bp, Homo sapien
tcctgcattctacacaccacccaat

SEQ ID NO: 1005491 - DNA, 25 bp, Homo sapien
cctgcattctacacaccacccaata

SEQ ID NO: 1005492 - DNA, 25 bp, Homo sapien
cagcattttgtaaaccttcccaagg

SEQ ID NO: 1005493 - DNA, 25 bp, Homo sapien
tgaaccacttggtgaagttcggccg

SEQ ID NO: 1005494 - DNA, 25 bp, Homo sapien
ttcccaaggcctcagccaggtgctg

SEQ ID NO: 1005495 - DNA, 25 bp, Homo sapien
gtgctgggcacgatgaaccacttgg

SEQ ID NO: 1005496 - DNA, 25 bp, Homo sapien
gaaagcgctgcattcaagtttcctg

SEQ ID NO: 1005497 - DNA, 25 bp, Homo sapien
tgtttagggcttaaagaaagcgctg

SEQ ID NO: 1005498 - DNA, 25 bp, Homo sapien
cgcctatgatgtacagaagactgtc

SEQ ID NO: 1005499 - DNA, 25 bp, Homo sapien
agaagactgtcccaggtgtttaggg

SEQ ID NO: 1005500 - DNA, 25 bp, Homo sapien
aaaggcttaatggacgggcagtacg

SEQ ID NO: 1005501 - DNA, 25 bp, Homo sapien
tggacgggcagtacggaccccacag

SEQ ID NO: 1005502 - DNA, 25 bp, Homo sapien
gggcagtacggaccccacagggctc

SEQ ID NO: 1005503 - DNA, 25 bp, Homo sapien
taatggacgggcagtacggacccca

SEQ ID NO: 1005504 - DNA, 25 bp, Homo sapien
aatgctgctgattcgaaggtccaga

SEQ ID NO: 1005505 - DNA, 25 bp, Homo sapien
tcaatgctgctgattcgaaggtcca

SEQ ID NO: 1005506 - DNA, 25 bp, Homo sapien
aggtccagatgctggtggtgacttg

SEQ ID NO: 1005507 - DNA, 25 bp, Homo sapien
tgctgctgattcgaaggtccagatg

SEQ ID NO: 1005508 - DNA, 25 bp, Homo sapien
gcatgtgttgaatcaggccattaat

SEQ ID NO: 1005509 - DNA, 25 bp, Homo sapien
tgttctttcgggttatgtttgataa

SEQ ID NO: 1005510 - DNA, 25 bp, Homo sapien
tttcgggttatgtttgataagaaca

SEQ ID NO: 1005511 - DNA, 25 bp, Homo sapien
cctcttctgcttatgtgatagagca

SEQ ID NO: 1005512 - DNA, 25 bp, Homo sapien
tcagaataatcggacacttccctcc

SEQ ID NO: 1005513 - DNA, 25 bp, Homo sapien
ttcagaataatcggacacttccctc

SEQ ID NO: 1005514 - DNA, 25 bp, Homo sapien
cagaataatcggacacttccctcca

SEQ ID NO: 1005515 - DNA, 25 bp, Homo sapien
ttcccctggagtgtacagaatcgac

SEQ ID NO: 1005516 - DNA, 25 bp, Homo sapien
caagaaaactacgtggaggctgcag

SEQ ID NO: 1005517 - DNA, 25 bp, Homo sapien
tgagcaagcgtcatctccacagaca

SEQ ID NO: 1005518 - DNA, 25 bp, Homo sapien
gatccccagataagctcaaagagag

SEQ ID NO: 1005519 - DNA, 25 bp, Homo sapien
catgggtctcttgcaatactgtcct

SEQ ID NO: 1005520 - DNA, 25 bp, Homo sapien
tgctgactattttgcatgggtctcc

SEQ ID NO: 1005521 - DNA, 25 bp, Homo sapien
tcctgtagtgctcccctgctgacta

SEQ ID NO: 1005522 - DNA, 25 bp, Homo sapien
taatgctcccctgcatgggtcttct

SEQ ID NO: 1005523 - DNA, 25 bp, Homo sapien
tctggcaggcattgattcgggggaa

SEQ ID NO: 1005524 - DNA, 25 bp, Homo sapien
gctctggcaggcattgattcggggg

SEQ ID NO: 1005525 - DNA, 25 bp, Homo sapien
tggcaggcattgattcgggggaagg

SEQ ID NO: 1005526 - DNA, 25 bp, Homo sapien
cagctctggcaggcattgattcggg

SEQ ID NO: 1005527 - DNA, 25 bp, Homo sapien
tgcatctgctcgtatgggcagttgg

SEQ ID NO: 1005528 - DNA, 25 bp, Homo sapien
ctcctgcatctgctcgtatgggcag

SEQ ID NO: 1005529 - DNA, 25 bp, Homo sapien
cctgcatctgctcgtatgggcagtt

SEQ ID NO: 1005530 - DNA, 25 bp, Homo sapien
gcatctgctcgtatgggcagttggc

SEQ ID NO: 1005531 - DNA, 25 bp, Homo sapien
gggtctgtcgatagggtggagccac

SEQ ID NO: 1005532 - DNA, 25 bp, Homo sapien
aagggtctgtcgatagggtggagcc

SEQ ID NO: 1005533 - DNA, 25 bp, Homo sapien
aggaagggtctgtcgatagggtgga

SEQ ID NO: 1005534 - DNA, 25 bp, Homo sapien
gtcaggaagggtctgtcgatagggt

SEQ ID NO: 1005535 - DNA, 25 bp, Homo sapien
ttcagcccgaggtgcaaggtcagat

SEQ ID NO: 1005536 - DNA, 25 bp, Homo sapien
catttagagtgagcactgtgagccg

SEQ ID NO: 1005537 - DNA, 25 bp, Homo sapien
gattccatggtgtgcacggcagcga

SEQ ID NO: 1005538 - DNA, 25 bp, Homo sapien
gactggttctctcggcagcatttag

SEQ ID NO: 1005539 - DNA, 25 bp, Homo sapien
aaaagctagatctcttgcagcaaac

SEQ ID NO: 1005540 - DNA, 25 bp, Homo sapien
ctgagatggaccaaaagctaggatg

SEQ ID NO: 1005541 - DNA, 25 bp, Homo sapien
caaaggaatatgtcttgaagggaat

SEQ ID NO: 1005542 - DNA, 25 bp, Homo sapien
ggaccaaaagctagatctcttgcag

SEQ ID NO: 1005543 - DNA, 25 bp, Homo sapien
caaaattgatggtcctcggtgtgac

SEQ ID NO: 1005544 - DNA, 25 bp, Homo sapien
ggtgacctaactccacatggctgag

SEQ ID NO: 1005545 - DNA, 25 bp, Homo sapien
aagccttcctgctaccgggtggatc

SEQ ID NO: 1005546 - DNA, 25 bp, Homo sapien
cacgcctggttttagtgcccggtga

SEQ ID NO: 1005547 - DNA, 25 bp, Homo sapien
tctgagagtccttgtagggcataag

SEQ ID NO: 1005548 - DNA, 25 bp, Homo sapien
tgaaaggcttggtttgaactgaagc

SEQ ID NO: 1005549 - DNA, 25 bp, Homo sapien
ctccatagattagttgtgcaactgc

SEQ ID NO: 1005550 - DNA, 25 bp, Homo sapien
caactgcgaataacaggatgaatca

SEQ ID NO: 1005551 - DNA, 25 bp, Homo sapien
ggatagaagacatcaggtttaaaaa

SEQ ID NO: 1005552 - DNA, 25 bp, Homo sapien
caggatagaagacatcaggtttaaa

SEQ ID NO: 1005553 - DNA, 25 bp, Homo sapien
gatagaagacatcaggtttaaaaac

SEQ ID NO: 1005554 - DNA, 25 bp, Homo sapien
tcaggatagaagacatcaggtttaa

SEQ ID NO: 1005555 - DNA, 25 bp, Homo sapien
cagccccatcatacaaggtcatatc

SEQ ID NO: 1005556 - DNA, 25 bp, Homo sapien
gccccatcatacaaggtcatatcct

SEQ ID NO: 1005557 - DNA, 25 bp, Homo sapien
gctccgtgtatgaatcctctgccct

SEQ ID NO: 1005558 - DNA, 25 bp, Homo sapien
ctagctccgtgtatgaatcctctgc

SEQ ID NO: 1005559 - DNA, 25 bp, Homo sapien
cagtgaatctgaggaagccgtcatt

SEQ ID NO: 1005560 - DNA, 25 bp, Homo sapien
cgtcattctgattcagtgaagaaga

SEQ ID NO: 1005561 - DNA, 25 bp, Homo sapien
gaatctgaggaagccgtcattctga

SEQ ID NO: 1005562 - DNA, 25 bp, Homo sapien
gaggaagccgtcattctgattcagt

SEQ ID NO: 1005563 - DNA, 25 bp, Homo sapien
agaagacctgtcatctcagaaagtc

SEQ ID NO: 1005564 - DNA, 25 bp, Homo sapien
gcagaagacctgtcatctcagaaag

SEQ ID NO: 1005565 - DNA, 25 bp, Homo sapien
ctgcagaagacctgtcatctcagaa

SEQ ID NO: 1005566 - DNA, 25 bp, Homo sapien
cagcaactccatccaccgcctcagc

SEQ ID NO: 1005567 - DNA, 25 bp, Homo sapien
agaggtaggttcgttgatctcaggc

SEQ ID NO: 1005568 - DNA, 25 bp, Homo sapien
tgttaccagagcaaatcatgcgtgg

SEQ ID NO: 1005569 - DNA, 25 bp, Homo sapien
tctgacgctgggatgtctgttacca

SEQ ID NO: 1005570 - DNA, 25 bp, Homo sapien
gctttgcaaagataaggcagtgctg

SEQ ID NO: 1005571 - DNA, 25 bp, Homo sapien
tctgctgatgagagtcacgggcact

SEQ ID NO: 1005572 - DNA, 25 bp, Homo sapien
acagccaggagtgagtacgggatcc

SEQ ID NO: 1005573 - DNA, 25 bp, Homo sapien
ggaactctagcgcactcaggcaggg

SEQ ID NO: 1005574 - DNA, 25 bp, Homo sapien
ttgaaagggctcctcgaagcctgcg

SEQ ID NO: 1005575 - DNA, 25 bp, Homo sapien
ctgccaccaacacagcaaggacttt

SEQ ID NO: 1005576 - DNA, 25 bp, Homo sapien
tcagaagtgggctaagatgtggccc

SEQ ID NO: 1005577 - DNA, 25 bp, Homo sapien
tcccataaaacgtgtggccacacgc

SEQ ID NO: 1005578 - DNA, 25 bp, Homo sapien
ggctcccgggaatttcgtgctgata

SEQ ID NO: 1005579 - DNA, 25 bp, Homo sapien
tgctgataggttcacgcagatcagg

SEQ ID NO: 1005580 - DNA, 25 bp, Homo sapien
gagagacacttgactgttgcatgtg

SEQ ID NO: 1005581 - DNA, 25 bp, Homo sapien
catccagcaggtaccggcagtgtgg

SEQ ID NO: 1005582 - DNA, 25 bp, Homo sapien
tgagagcgcccatcagtgtgagaga

SEQ ID NO: 1005583 - DNA, 25 bp, Homo sapien
catcactcgtgtagagtcctaactc

SEQ ID NO: 1005584 - DNA, 25 bp, Homo sapien
ctctctgcccttgtgtctctttggc

SEQ ID NO: 1005585 - DNA, 25 bp, Homo sapien
tgccttgatgccaatgaggtcctct

SEQ ID NO: 1005586 - DNA, 25 bp, Homo sapien
cttttgccttgatgccaatgaggtc

SEQ ID NO: 1005587 - DNA, 25 bp, Homo sapien
ttgccttgatgccaatgaggtcctc

SEQ ID NO: 1005588 - DNA, 25 bp, Homo sapien
gacacacgcctgtgcttctcgcggg

SEQ ID NO: 1005589 - DNA, 25 bp, Homo sapien
ccaccagctcgatcttgttttctct

SEQ ID NO: 1005590 - DNA, 25 bp, Homo sapien
ttttccacagagctctgattcggac

SEQ ID NO: 1005591 - DNA, 25 bp, Homo sapien
tctgattcggacctgagtgtactcc

SEQ ID NO: 1005592 - DNA, 25 bp, Homo sapien
ccgattgcctaaactcagccttgga

SEQ ID NO: 1005593 - DNA, 25 bp, Homo sapien
ttggacttcattccgaccccatgca

SEQ ID NO: 1005594 - DNA, 25 bp, Homo sapien
ttccgaccccatgcaaggctgtgtg

SEQ ID NO: 1005595 - DNA, 25 bp, Homo sapien
gctgtgtggataagccgctgtgaaa

SEQ ID NO: 1005596 - DNA, 25 bp, Homo sapien
tggtacaacgtgatgacgagcagag

SEQ ID NO: 1005597 - DNA, 25 bp, Homo sapien
ctggtacaacgtgatgacgagcaga

SEQ ID NO: 1005598 - DNA, 25 bp, Homo sapien
catagacacctctaatgatacagag

SEQ ID NO: 1005599 - DNA, 25 bp, Homo sapien
taaactctacacaaaatcgtctccc

SEQ ID NO: 1005600 - DNA, 25 bp, Homo sapien
tcagggcctgatgtaattctcctat

SEQ ID NO: 1005601 - DNA, 25 bp, Homo sapien
tcccaccatagacacctctaatgat

SEQ ID NO: 1005602 - DNA, 25 bp, Homo sapien
cgtcctagccttagtgtcatgtggg

SEQ ID NO: 1005603 - DNA, 25 bp, Homo sapien
cagggctgctgacgtcctagcctta

SEQ ID NO: 1005604 - DNA, 25 bp, Homo sapien
cagaacggagttctcgagtgtggaa

SEQ ID NO: 1005605 - DNA, 25 bp, Homo sapien
taaggaggctcatatcataccccag

SEQ ID NO: 1005606 - DNA, 25 bp, Homo sapien
aaagctgcaacctcagacctgaggt

SEQ ID NO: 1005607 - DNA, 25 bp, Homo sapien
gctgcaacctcagacctgaggtctg

SEQ ID NO: 1005608 - DNA, 25 bp, Homo sapien
tcacagcaaagctgcaacctcagac

SEQ ID NO: 1005609 - DNA, 25 bp, Homo sapien
agcaaagctgcaacctcagacctga

SEQ ID NO: 1005610 - DNA, 25 bp, Homo sapien
ctcttagccgggaatttgagaaagg

SEQ ID NO: 1005611 - DNA, 25 bp, Homo sapien
ttctgcttcttcaacaagggacaga

SEQ ID NO: 1005612 - DNA, 25 bp, Homo sapien
ctgcttcttcaacaagggacagaga

SEQ ID NO: 1005613 - DNA, 25 bp, Homo sapien
gagacactcttagccgggaatttga

SEQ ID NO: 1005614 - DNA, 25 bp, Homo sapien
ttggattcacgggggaaaccaagca

SEQ ID NO: 1005615 - DNA, 25 bp, Homo sapien
gctccttccttggattcacggggga

SEQ ID NO: 1005616 - DNA, 25 bp, Homo sapien
agctccttccttggattcacggggg

SEQ ID NO: 1005617 - DNA, 25 bp, Homo sapien
gtttgttttatggtgtagccaacca

SEQ ID NO: 1005618 - DNA, 25 bp, Homo sapien
taccgggtccccagcatctgtccca

SEQ ID NO: 1005619 - DNA, 25 bp, Homo sapien
ttttatggtgtagccaaccatgcat

SEQ ID NO: 1005620 - DNA, 25 bp, Homo sapien
ttgttttatggtgtagccaaccatg

SEQ ID NO: 1005621 - DNA, 25 bp, Homo sapien
tggccatccgaaagccctgagcttt

SEQ ID NO: 1005622 - DNA, 25 bp, Homo sapien
taatggccatccgaaagccctgagc

SEQ ID NO: 1005623 - DNA, 25 bp, Homo sapien
aatggccatccgaaagccctgagct

SEQ ID NO: 1005624 - DNA, 25 bp, Homo sapien
ctaatggccatccgaaagccctgag

SEQ ID NO: 1005625 - DNA, 25 bp, Homo sapien
tggcgcctccacggcgcctgctcca

SEQ ID NO: 1005626 - DNA, 25 bp, Homo sapien
tcagcgtggcgcctccacggcgcct

SEQ ID NO: 1005627 - DNA, 25 bp, Homo sapien
cagcgtggcgcctccacggcgcctg

SEQ ID NO: 1005628 - DNA, 25 bp, Homo sapien
gcgtggcgcctccacggcgcctgct

SEQ ID NO: 1005629 - DNA, 25 bp, Homo sapien
cctcagctcctctgcgtgctccaga

SEQ ID NO: 1005630 - DNA, 25 bp, Homo sapien
gtctggctgcccttggactccttgg

SEQ ID NO: 1005631 - DNA, 25 bp, Homo sapien
tctgtggccacttgctgctcctttc

SEQ ID NO: 1005632 - DNA, 25 bp, Homo sapien
gtgctccagatctgccttggacagc

SEQ ID NO: 1005633 - DNA, 25 bp, Homo sapien
tccaggttcgcagcttgctgaaagc

SEQ ID NO: 1005634 - DNA, 25 bp, Homo sapien
gataattggccctaacgctctaggg

SEQ ID NO: 1005635 - DNA, 25 bp, Homo sapien
agctctgcattgataattggcccta

SEQ ID NO: 1005636 - DNA, 25 bp, Homo sapien
ttcgcagcttgctgaaagccagcca

SEQ ID NO: 1005637 - DNA, 25 bp, Homo sapien
gttaacttagggtgatctaccgcta

SEQ ID NO: 1005638 - DNA, 25 bp, Homo sapien
gtgatctaccgctaattcccctttc

SEQ ID NO: 1005639 - DNA, 25 bp, Homo sapien
ttctatcactagagttaacttaggg

SEQ ID NO: 1005640 - DNA, 25 bp, Homo sapien
cagtcacgaaattctatcactagag

SEQ ID NO: 1005641 - DNA, 25 bp, Homo sapien
ttacagcaagttagagagagattca

SEQ ID NO: 1005642 - DNA, 25 bp, Homo sapien
tatgactgcatagaacctacactaa

SEQ ID NO: 1005643 - DNA, 25 bp, Homo sapien
tatatgactgcatagaacctacact

SEQ ID NO: 1005644 - DNA, 25 bp, Homo sapien
acagcaagttagagagagattcaaa

SEQ ID NO: 1005645 - DNA, 25 bp, Homo sapien
gcagcttcagcaactcatccaggat

SEQ ID NO: 1005646 - DNA, 25 bp, Homo sapien
tcgtgccaagtacgatgccaggctg

SEQ ID NO: 1005647 - DNA, 25 bp, Homo sapien
ccgtggagcgcaggttaagtctaat

SEQ ID NO: 1005648 - DNA, 25 bp, Homo sapien
cacaggcagcactcgtttaactcag

SEQ ID NO: 1005649 - DNA, 25 bp, Homo sapien
cagctgccagatccccttctacacg

SEQ ID NO: 1005650 - DNA, 25 bp, Homo sapien
cagatccccttctacacgttcttgt

SEQ ID NO: 1005651 - DNA, 25 bp, Homo sapien
gccagatccccttctacacgttctt

SEQ ID NO: 1005652 - DNA, 25 bp, Homo sapien
ctgccagatccccttctacacgttc

SEQ ID NO: 1005653 - DNA, 25 bp, Homo sapien
gcaaactgctcccttgcagtgagct

SEQ ID NO: 1005654 - DNA, 25 bp, Homo sapien
caaactgctcccttgcagtgagctt

SEQ ID NO: 1005655 - DNA, 25 bp, Homo sapien
ggcaaactgctcccttgcagtgagc

SEQ ID NO: 1005656 - DNA, 25 bp, Homo sapien
ctagaggataaagaggtgtaggata

SEQ ID NO: 1005657 - DNA, 25 bp, Homo sapien
ataaagaggtgtaggataatttgct

SEQ ID NO: 1005658 - DNA, 25 bp, Homo sapien
tggcagcctttatatatttcagaac

SEQ ID NO: 1005659 - DNA, 25 bp, Homo sapien
agaggtgtaggataatttgctctgt

SEQ ID NO: 1005660 - DNA, 25 bp, Homo sapien
tccaagggtgctgttgggtccgctc

SEQ ID NO: 1005661 - DNA, 25 bp, Homo sapien
cagtatacgtaaaaacagcccagcc

SEQ ID NO: 1005662 - DNA, 25 bp, Homo sapien
ttcaagtacacgtcattcagcagcg

SEQ ID NO: 1005663 - DNA, 25 bp, Homo sapien
catctttacacagcgtgggcagagg

SEQ ID NO: 1005664 - DNA, 25 bp, Homo sapien
cgctgctgaatctgccgagttgtca

SEQ ID NO: 1005665 - DNA, 25 bp, Homo sapien
gtttgctcttatataaatatcaccc

SEQ ID NO: 1005666 - DNA, 25 bp, Homo sapien
gccgagttgtcatctgtttaaagtt

SEQ ID NO: 1005667 - DNA, 25 bp, Homo sapien
gaatctgccgagttgtcatctgttt

SEQ ID NO: 1005668 - DNA, 25 bp, Homo sapien
agagacggttctgcctttggctttc

SEQ ID NO: 1005669 - DNA, 25 bp, Homo sapien
gagacggttctgcctttggctttcc

SEQ ID NO: 1005670 - DNA, 25 bp, Homo sapien
gaaagaggtgtttgaatacatttga

SEQ ID NO: 1005671 - DNA, 25 bp, Homo sapien
gaactgagaacgcatctgagtttca

SEQ ID NO: 1005672 - DNA, 25 bp, Homo sapien
aatggatgaaggaggttgctccaaa

SEQ ID NO: 1005673 - DNA, 25 bp, Homo sapien
gaaaagagtgtttgccagaatggat

SEQ ID NO: 1005674 - DNA, 25 bp, Homo sapien
tcaatggaggtccatatggtccctc

SEQ ID NO: 1005675 - DNA, 25 bp, Homo sapien
gaggtccatatggtccctctccgca

SEQ ID NO: 1005676 - DNA, 25 bp, Homo sapien
tggaggtccatatggtccctctccg

SEQ ID NO: 1005677 - DNA, 25 bp, Homo sapien
ggtccatatggtccctctccgcagt

SEQ ID NO: 1005678 - DNA, 25 bp, Homo sapien
gcctaacgttttgtaatctattgtg

SEQ ID NO: 1005679 - DNA, 25 bp, Homo sapien
tcttgaagcctaacgttttgtaatc

SEQ ID NO: 1005680 - DNA, 25 bp, Homo sapien
tgtaatctattgtgttgtcttgatc

SEQ ID NO: 1005681 - DNA, 25 bp, Homo sapien
taatctattgtgttgtcttgatcat

SEQ ID NO: 1005682 - DNA, 25 bp, Homo sapien
taccgccctggtcaagccaattggg

SEQ ID NO: 1005683 - DNA, 25 bp, Homo sapien
aaggaatggatgtactctgttgccc

SEQ ID NO: 1005684 - DNA, 25 bp, Homo sapien
tcgtgcagcctgtgctaacgagccc

SEQ ID NO: 1005685 - DNA, 25 bp, Homo sapien
gcctgcccaattgacagagcgctcg

SEQ ID NO: 1005686 - DNA, 25 bp, Homo sapien
tggtcttgagcgtcctgaactgttt

SEQ ID NO: 1005687 - DNA, 25 bp, Homo sapien
agctccttttgggtttgctcccgct

SEQ ID NO: 1005688 - DNA, 25 bp, Homo sapien
agcactgggcagagcgccctcggag

SEQ ID NO: 1005689 - DNA, 25 bp, Homo sapien
ctctgggctgcggattttaccgccc

SEQ ID NO: 1005690 - DNA, 25 bp, Homo sapien
gctcccctcgcgctcgcccagactc

SEQ ID NO: 1005691 - DNA, 25 bp, Homo sapien
tcccctcgcgctcgcccagactcgg

SEQ ID NO: 1005692 - DNA, 25 bp, Homo sapien
acagaagcctgcagcgtggaggctc

SEQ ID NO: 1005693 - DNA, 25 bp, Homo sapien
aagcctgcagcgtggaggctcccct

SEQ ID NO: 1005694 - DNA, 25 bp, Homo sapien
ctcgcgtctcccccgaggcgcgcac

SEQ ID NO: 1005695 - DNA, 25 bp, Homo sapien
gagatcctaccctgctttgcggctg

SEQ ID NO: 1005696 - DNA, 25 bp, Homo sapien
tggacatgaatcaaaccgcaggagt

SEQ ID NO: 1005697 - DNA, 25 bp, Homo sapien
gcaggagtctccaatagcgtcaggt

SEQ ID NO: 1005698 - DNA, 25 bp, Homo sapien
tttgaaggtagagaatctgggcccc

SEQ ID NO: 1005699 - DNA, 25 bp, Homo sapien
tcattaactttaatggagcgatgcg

SEQ ID NO: 1005700 - DNA, 25 bp, Homo sapien
cacggacacgtgcttcattaacttt

SEQ ID NO: 1005701 - DNA, 25 bp, Homo sapien
ttaactttaatggagcgatgcgtgc

SEQ ID NO: 1005702 - DNA, 25 bp, Homo sapien
tgctgtcacggacacgtgcttcatt

SEQ ID NO: 1005703 - DNA, 25 bp, Homo sapien
tgcaaggcttatggcgtttcaccag

SEQ ID NO: 1005704 - DNA, 25 bp, Homo sapien
tctcacacacttggcttcagaacca

SEQ ID NO: 1005705 - DNA, 25 bp, Homo sapien
aggctatgggacatggcaaactcat

SEQ ID NO: 1005706 - DNA, 25 bp, Homo sapien
cagttgctgccataacagcaggtcc

SEQ ID NO: 1005707 - DNA, 25 bp, Homo sapien
agaaaggatacagcgtcacatggtg

SEQ ID NO: 1005708 - DNA, 25 bp, Homo sapien
gagaaaggatacagcgtcacatggt

SEQ ID NO: 1005709 - DNA, 25 bp, Homo sapien
tctggtgatgggtctctctggatgt

SEQ ID NO: 1005710 - DNA, 25 bp, Homo sapien
ggtggttatggatctcatctggtga

SEQ ID NO: 1005711 - DNA, 25 bp, Homo sapien
tcactgtgatgccttcacacatcct

SEQ ID NO: 1005712 - DNA, 25 bp, Homo sapien
tggtcctttggctctattgggtgga

SEQ ID NO: 1005713 - DNA, 25 bp, Homo sapien
agttccttacaaaatggctcttggg

SEQ ID NO: 1005714 - DNA, 25 bp, Homo sapien
catagaatgttggaagatggctttt

SEQ ID NO: 1005715 - DNA, 25 bp, Homo sapien
gagcagttgcagcattgggcagtaa

SEQ ID NO: 1005716 - DNA, 25 bp, Homo sapien
tccagatcggtccatgtgagagatg

SEQ ID NO: 1005717 - DNA, 25 bp, Homo sapien
ctgggccccgtaaggaacagctggt

SEQ ID NO: 1005718 - DNA, 25 bp, Homo sapien
tcaaaattccccaggactgcaaggg

SEQ ID NO: 1005719 - DNA, 25 bp, Homo sapien
ccctgtgcatctctccgctctgtgt

SEQ ID NO: 1005720 - DNA, 25 bp, Homo sapien
ctgtgcatctctccgctctgtgttg

SEQ ID NO: 1005721 - DNA, 25 bp, Homo sapien
cctgtgcatctctccgctctgtgtt

SEQ ID NO: 1005722 - DNA, 25 bp, Homo sapien
gctgaaatgcggaatgtggcctgca

SEQ ID NO: 1005723 - DNA, 25 bp, Homo sapien
gcagcctgggatttttaacgccatg

SEQ ID NO: 1005724 - DNA, 25 bp, Homo sapien
ccaggttccagtcaaggtccataga

SEQ ID NO: 1005725 - DNA, 25 bp, Homo sapien
acttgtatagaccaccactctgctg

SEQ ID NO: 1005726 - DNA, 25 bp, Homo sapien
tggaacacagtagttaccctataca

SEQ ID NO: 1005727 - DNA, 25 bp, Homo sapien
ggaacacagtagttaccctatacat

SEQ ID NO: 1005728 - DNA, 25 bp, Homo sapien
cttttctatttgttgatctttttca

SEQ ID NO: 1005729 - DNA, 25 bp, Homo sapien
ctatttgttgatctttttcaagcat

SEQ ID NO: 1005730 - DNA, 25 bp, Homo sapien
tttctatttgttgatctttttcaag

SEQ ID NO: 1005731 - DNA, 25 bp, Homo sapien
tctatttgttgatctttttcaagca

SEQ ID NO: 1005732 - DNA, 25 bp, Homo sapien
tgattccttccacgacgaatcgatc

SEQ ID NO: 1005733 - DNA, 25 bp, Homo sapien
ccagtattgattccttccacgacga

SEQ ID NO: 1005734 - DNA, 25 bp, Homo sapien
tattgattccttccacgacgaatcg

SEQ ID NO: 1005735 - DNA, 25 bp, Homo sapien
agtattgattccttccacgacgaat

SEQ ID NO: 1005736 - DNA, 25 bp, Homo sapien
gagcatttttccctgcattagagaa

SEQ ID NO: 1005737 - DNA, 25 bp, Homo sapien
gctctggaatatggcccattaaatg

SEQ ID NO: 1005738 - DNA, 25 bp, Homo sapien
gacttttactctctcaaatgcgctg

SEQ ID NO: 1005739 - DNA, 25 bp, Homo sapien
caaggcagcccaatgagaattggtg

SEQ ID NO: 1005740 - DNA, 25 bp, Homo sapien
tcaacatccaaaatttgagtcgtcc

SEQ ID NO: 1005741 - DNA, 25 bp, Homo sapien
ttcagggaccctctgccagtcgaag

SEQ ID NO: 1005742 - DNA, 25 bp, Homo sapien
tgagtcgtccacttcatgatctcct

SEQ ID NO: 1005743 - DNA, 25 bp, Homo sapien
tctgccagtcgaaggcattgtgtcc

SEQ ID NO: 1005744 - DNA, 25 bp, Homo sapien
cattgacaccggcaaaattgctttt

SEQ ID NO: 1005745 - DNA, 25 bp, Homo sapien
gaaataaggaagtggatctgtgttc

SEQ ID NO: 1005746 - DNA, 25 bp, Homo sapien
tctctgagaacttggagagagaata

SEQ ID NO: 1005747 - DNA, 25 bp, Homo sapien
cagagctgtccaccacagaactagc

SEQ ID NO: 1005748 - DNA, 25 bp, Homo sapien
ccaacgattggttttgaggacagac

SEQ ID NO: 1005749 - DNA, 25 bp, Homo sapien
catccaacgattggttttgaggaca

SEQ ID NO: 1005750 - DNA, 25 bp, Homo sapien
tccaacgattggttttgaggacaga

SEQ ID NO: 1005751 - DNA, 25 bp, Homo sapien
tcatccaacgattggttttgaggac

SEQ ID NO: 1005752 - DNA, 25 bp, Homo sapien
aaaactgcacttccagttcactggc

SEQ ID NO: 1005753 - DNA, 25 bp, Homo sapien
tctgagcatgcctggtacaacagtc

SEQ ID NO: 1005754 - DNA, 25 bp, Homo sapien
cagtccagggggtggaattattacg

SEQ ID NO: 1005755 - DNA, 25 bp, Homo sapien
ggtggaattattacggcagctgccc

SEQ ID NO: 1005756 - DNA, 25 bp, Homo sapien
cagaaccaggaatcccatgcataag

SEQ ID NO: 1005757 - DNA, 25 bp, Homo sapien
ccatgcataagggttccactggatt

SEQ ID NO: 1005758 - DNA, 25 bp, Homo sapien
cagttgactgttgagtcaaggttgc

SEQ ID NO: 1005759 - DNA, 25 bp, Homo sapien
ttccacactccaagcagcagttgac

SEQ ID NO: 1005760 - DNA, 25 bp, Homo sapien
gttcaaatgagggtttctcgtctga

SEQ ID NO: 1005761 - DNA, 25 bp, Homo sapien
tgagggtttctcgtctgagctgagc

SEQ ID NO: 1005762 - DNA, 25 bp, Homo sapien
aagaagttcaaatgagggtttctcg

SEQ ID NO: 1005763 - DNA, 25 bp, Homo sapien
caaatgagggtttctcgtctgagct

SEQ ID NO: 1005764 - DNA, 25 bp, Homo sapien
atctacaatgaactccaacaaattt

SEQ ID NO: 1005765 - DNA, 25 bp, Homo sapien
tccagaatctacaatgaactccaac

SEQ ID NO: 1005766 - DNA, 25 bp, Homo sapien
caatgaactccaacaaatttacaag

SEQ ID NO: 1005767 - DNA, 25 bp, Homo sapien
ccagaatctacaatgaactccaaca

SEQ ID NO: 1005768 - DNA, 25 bp, Homo sapien
cggtgtaaacacttgtttctccagg

SEQ ID NO: 1005769 - DNA, 25 bp, Homo sapien
tttcagggtgtcaggtaaaaacaga

SEQ ID NO: 1005770 - DNA, 25 bp, Homo sapien
aaaacagagacgctagtaacggtgt

SEQ ID NO: 1005771 - DNA, 25 bp, Homo sapien
ggacctggctcaagacgggactctt

SEQ ID NO: 1005772 - DNA, 25 bp, Homo sapien
cttttcgtcactgtgacttcatcag

SEQ ID NO: 1005773 - DNA, 25 bp, Homo sapien
cctgcagcaaacaccgctgcgaata

SEQ ID NO: 1005774 - DNA, 25 bp, Homo sapien
cagcaaacaccgctgcgaatatgga

SEQ ID NO: 1005775 - DNA, 25 bp, Homo sapien
gtcactgtgacttcatcaggaacaa

SEQ ID NO: 1005776 - DNA, 25 bp, Homo sapien
tgagtgttggtggtagggaagctgc

SEQ ID NO: 1005777 - DNA, 25 bp, Homo sapien
gatgaacctgaaatacagtctatta

SEQ ID NO: 1005778 - DNA, 25 bp, Homo sapien
gagatgaacctgaaatacagtctat

SEQ ID NO: 1005779 - DNA, 25 bp, Homo sapien
ctgagatgaacctgaaatacagtct

SEQ ID NO: 1005780 - DNA, 25 bp, Homo sapien
atgaacctgaaatacagtctattac

SEQ ID NO: 1005781 - DNA, 25 bp, Homo sapien
cttggctgcgacattcctgtttttg

SEQ ID NO: 1005782 - DNA, 25 bp, Homo sapien
ggccttggctgcgacattcctgttt

SEQ ID NO: 1005783 - DNA, 25 bp, Homo sapien
tgtaggacacggctcacatggctct

SEQ ID NO: 1005784 - DNA, 25 bp, Homo sapien
tgtttttgtaggacacggctcacat

SEQ ID NO: 1005785 - DNA, 25 bp, Homo sapien
tccctgtttgtgaatgcaatagcac

SEQ ID NO: 1005786 - DNA, 25 bp, Homo sapien
gcatccccgtttgcgaaaatgttga

SEQ ID NO: 1005787 - DNA, 25 bp, Homo sapien
taaatataggaccaccttcgcatcc

SEQ ID NO: 1005788 - DNA, 25 bp, Homo sapien
cttcgcatccctgtttgtgaaactg

SEQ ID NO: 1005789 - DNA, 25 bp, Homo sapien
aaattgcaactttgcggctccgcgg

SEQ ID NO: 1005790 - DNA, 25 bp, Homo sapien
ccaaaagcttgactgtgccggagga

SEQ ID NO: 1005791 - DNA, 25 bp, Homo sapien
agtccccggaactcgagacctgttg

SEQ ID NO: 1005792 - DNA, 25 bp, Homo sapien
tgatcaagaccgctaagatgcaggg

SEQ ID NO: 1005793 - DNA, 25 bp, Homo sapien
gggacagttctgcacggataacttt

SEQ ID NO: 1005794 - DNA, 25 bp, Homo sapien
aggggacagttctgcacggataact

SEQ ID NO: 1005795 - DNA, 25 bp, Homo sapien
ggggacagttctgcacggataactt

SEQ ID NO: 1005796 - DNA, 25 bp, Homo sapien
cacgtggcttcagttgagtgatcat

SEQ ID NO: 1005797 - DNA, 25 bp, Homo sapien
catgttccaaggaaatccacgtggc

SEQ ID NO: 1005798 - DNA, 25 bp, Homo sapien
gaattgataattatggctccacagc

SEQ ID NO: 1005799 - DNA, 25 bp, Homo sapien
taagaagtgtcatcggagcaaggtg

SEQ ID NO: 1005800 - DNA, 25 bp, Homo sapien
cttggattagatgactggcaaattc

SEQ ID NO: 1005801 - DNA, 25 bp, Homo sapien
ttacattcaagatgaggactgaatg

SEQ ID NO: 1005802 - DNA, 25 bp, Homo sapien
gattagatgactggcaaattctttg

SEQ ID NO: 1005803 - DNA, 25 bp, Homo sapien
ggaagactcttgctaatcacagcct

SEQ ID NO: 1005804 - DNA, 25 bp, Homo sapien
tggaccaggacaacgggagagggta

SEQ ID NO: 1005805 - DNA, 25 bp, Homo sapien
tcctccaactctaatgactttatta

SEQ ID NO: 1005806 - DNA, 25 bp, Homo sapien
tggggcattttccctgttctcagca

SEQ ID NO: 1005807 - DNA, 25 bp, Homo sapien
tgtggaccaggacaacgggagaggg

SEQ ID NO: 1005808 - DNA, 25 bp, Homo sapien
gagcaatggggaggaccaacacacg

SEQ ID NO: 1005809 - DNA, 25 bp, Homo sapien
gaccaacacacgagcagcatctgct

SEQ ID NO: 1005810 - DNA, 25 bp, Homo sapien
gtggagactgaattgcggtttgatc

SEQ ID NO: 1005811 - DNA, 25 bp, Homo sapien
gaacaaggaagtccgtgggagcaat

SEQ ID NO: 1005812 - DNA, 25 bp, Homo sapien
gagttctttatagcttccgtgcatc

SEQ ID NO: 1005813 - DNA, 25 bp, Homo sapien
taatgcatgctgtgaagggctaaga

SEQ ID NO: 1005814 - DNA, 25 bp, Homo sapien
tcagaccacagctggataggaacaa

SEQ ID NO: 1005815 - DNA, 25 bp, Homo sapien
ccacttgtgcaaggtactgtagaat

SEQ ID NO: 1005816 - DNA, 25 bp, Homo sapien
accagtgaggcacagttgttcagca

SEQ ID NO: 1005817 - DNA, 25 bp, Homo sapien
gttagcaccagtgaggcacagttgt

SEQ ID NO: 1005818 - DNA, 25 bp, Homo sapien
agtgaggcacagttgttcagcagag

SEQ ID NO: 1005819 - DNA, 25 bp, Homo sapien
ccccaggttagcaccagtgaggcac

SEQ ID NO: 1005820 - DNA, 25 bp, Homo sapien
caactggcttgctatccaaagtgct

SEQ ID NO: 1005821 - DNA, 25 bp, Homo sapien
taattagcttccctgaaagtcgagg

SEQ ID NO: 1005822 - DNA, 25 bp, Homo sapien
gaatcttttgcgatgctgtgtggca

SEQ ID NO: 1005823 - DNA, 25 bp, Homo sapien
tgagagaaccgacaagcaactggct

SEQ ID NO: 1005824 - DNA, 25 bp, Homo sapien
tgatgaagggagaccatccgcatag

SEQ ID NO: 1005825 - DNA, 25 bp, Homo sapien
tatcctgcatgatcgagggtccctg

SEQ ID NO: 1005826 - DNA, 25 bp, Homo sapien
tccgcatagtagaaggtccccaaga

SEQ ID NO: 1005827 - DNA, 25 bp, Homo sapien
gaagggagatcatcccgcatcgtgg

SEQ ID NO: 1005828 - DNA, 25 bp, Homo sapien
tggtgccttaatttgcatcgcctga

SEQ ID NO: 1005829 - DNA, 25 bp, Homo sapien
gaaacaatcttcgtgcaccggctaa

SEQ ID NO: 1005830 - DNA, 25 bp, Homo sapien
tgtcttctgatcagagctgcacaag

SEQ ID NO: 1005831 - DNA, 25 bp, Homo sapien
catcgcctgatcagctgaggatctg

SEQ ID NO: 1005832 - DNA, 25 bp, Homo sapien
ccagatgctttgctgagtcagggca

SEQ ID NO: 1005833 - DNA, 25 bp, Homo sapien
acaaggcttcggcactgaggtagcg

SEQ ID NO: 1005834 - DNA, 25 bp, Homo sapien
ccacttgcaggaaacgaggaagcag

SEQ ID NO: 1005835 - DNA, 25 bp, Homo sapien
aatgtcctgacataacgctgtgccc

SEQ ID NO: 1005836 - DNA, 25 bp, Homo sapien
caggtgtggtcgctggtggacttag

SEQ ID NO: 1005837 - DNA, 25 bp, Homo sapien
ctctaggcaggtgtggtcgctggtg

SEQ ID NO: 1005838 - DNA, 25 bp, Homo sapien
ggaccttggggaggctcagatccca

SEQ ID NO: 1005839 - DNA, 25 bp, Homo sapien
gtcgctggtggacttagggtcccat

SEQ ID NO: 1005840 - DNA, 25 bp, Homo sapien
caatgacacgtaagtgccagttccc

SEQ ID NO: 1005841 - DNA, 25 bp, Homo sapien
ctttaggaatggacggaggagcttc

SEQ ID NO: 1005842 - DNA, 25 bp, Homo sapien
ggctggaattggatcctttgctgaa

SEQ ID NO: 1005843 - DNA, 25 bp, Homo sapien
gccagttccctgtgagatcttgagg

SEQ ID NO: 1005844 - DNA, 25 bp, Homo sapien
gagttggctctctaggtctggaaca

SEQ ID NO: 1005845 - DNA, 25 bp, Homo sapien
ggtcgaacctgaagatcaagctggg

SEQ ID NO: 1005846 - DNA, 25 bp, Homo sapien
caacatgtctcgtggaatgcaagcc

SEQ ID NO: 1005847 - DNA, 25 bp, Homo sapien
caatggcaaggaacatatcggtggt

SEQ ID NO: 1005848 - DNA, 25 bp, Homo sapien
ttttctgatgacacaaacttgatga

SEQ ID NO: 1005849 - DNA, 25 bp, Homo sapien
caccaaactaatgccacttccattg

SEQ ID NO: 1005850 - DNA, 25 bp, Homo sapien
cattgctaagcccactaggacactc

SEQ ID NO: 1005851 - DNA, 25 bp, Homo sapien
aaacttcaatgcctgaccctcatgc

SEQ ID NO: 1005852 - DNA, 25 bp, Homo sapien
taggacactccctaaaacttcaatg

SEQ ID NO: 1005853 - DNA, 25 bp, Homo sapien
tacccgatgaacccttagccatcct

SEQ ID NO: 1005854 - DNA, 25 bp, Homo sapien
ttacccgatgaacccttagccatcc

SEQ ID NO: 1005855 - DNA, 25 bp, Homo sapien
tttacccgatgaacccttagccatc

SEQ ID NO: 1005856 - DNA, 25 bp, Homo sapien
cattggagcctgaccgtcttaaaaa

SEQ ID NO: 1005857 - DNA, 25 bp, Homo sapien
cacattggagcctgaccgtcttaaa

SEQ ID NO: 1005858 - DNA, 25 bp, Homo sapien
gggcacattggagcctgaccgtctt

SEQ ID NO: 1005859 - DNA, 25 bp, Homo sapien
tggagcctgaccgtcttaaaaaagc

SEQ ID NO: 1005860 - DNA, 25 bp, Homo sapien
cagagagactctggtgcaaggcagt

SEQ ID NO: 1005861 - DNA, 25 bp, Homo sapien
ccctgagggtcggttgcaaagtgct

SEQ ID NO: 1005862 - DNA, 25 bp, Homo sapien
cagggtccgtttgttgacacttgaa

SEQ ID NO: 1005863 - DNA, 25 bp, Homo sapien
gaagtcaagcgctgtgtcatcagag

SEQ ID NO: 1005864 - DNA, 25 bp, Homo sapien
ggagggtgaactgcaaacctgagta

SEQ ID NO: 1005865 - DNA, 25 bp, Homo sapien
caaacctgagtaagggtgaaggaga

SEQ ID NO: 1005866 - DNA, 25 bp, Homo sapien
ctgcagtgtgtgaggtcttaggctg

SEQ ID NO: 1005867 - DNA, 25 bp, Homo sapien
tgtgaggtcttaggctgtgcttgga

SEQ ID NO: 1005868 - DNA, 25 bp, Homo sapien
taaggaacatctgacataaaaggag

SEQ ID NO: 1005869 - DNA, 25 bp, Homo sapien
taaaaggagggagtgtaattcatca

SEQ ID NO: 1005870 - DNA, 25 bp, Homo sapien
ggaagtcacaatgaagcattaagga

SEQ ID NO: 1005871 - DNA, 25 bp, Homo sapien
tgtaattcatcaagaggatgcccat

SEQ ID NO: 1005872 - DNA, 25 bp, Homo sapien
ggtttgttgccatggatgagttaac

SEQ ID NO: 1005873 - DNA, 25 bp, Homo sapien
atcagatgatgtttcaagagacact

SEQ ID NO: 1005874 - DNA, 25 bp, Homo sapien
gatgatgtttcaagagacactccac

SEQ ID NO: 1005875 - DNA, 25 bp, Homo sapien
acccagtaggccctcaggtttgttg

SEQ ID NO: 1005876 - DNA, 25 bp, Homo sapien
tctccaatagtggtaatttttacag

SEQ ID NO: 1005877 - DNA, 25 bp, Homo sapien
gcagccctcttgaataatgtccttc

SEQ ID NO: 1005878 - DNA, 25 bp, Homo sapien
tcgtctccaatagtggtaattttta

SEQ ID NO: 1005879 - DNA, 25 bp, Homo sapien
gtctccaatagtggtaatttttaca

SEQ ID NO: 1005880 - DNA, 25 bp, Homo sapien
tggctggccgatgactgattccttc

SEQ ID NO: 1005881 - DNA, 25 bp, Homo sapien
gtggctggccgatgactgattcctt

SEQ ID NO: 1005882 - DNA, 25 bp, Homo sapien
cacagagaaaggtcgaacgcttggt

SEQ ID NO: 1005883 - DNA, 25 bp, Homo sapien
gggctgaactttagcaggttccact

SEQ ID NO: 1005884 - DNA, 25 bp, Homo sapien
ccttgtggtcagaccccgggatttg

SEQ ID NO: 1005885 - DNA, 25 bp, Homo sapien
tccactagtgctgttgggagctcca

SEQ ID NO: 1005886 - DNA, 25 bp, Homo sapien
tgagtggtgccccagtgttgggata

SEQ ID NO: 1005887 - DNA, 25 bp, Homo sapien
gtggtgccccagtgttgggataggg

SEQ ID NO: 1005888 - DNA, 25 bp, Homo sapien
tgtgagtggtgccccagtgttggga

SEQ ID NO: 1005889 - DNA, 25 bp, Homo sapien
actgtgagtggtgccccagtgttgg

SEQ ID NO: 1005890 - DNA, 25 bp, Homo sapien
ggtgtgtgggcagacgagagagtgt

SEQ ID NO: 1005891 - DNA, 25 bp, Homo sapien
tgtgggcagacgagagagtgtggtc

SEQ ID NO: 1005892 - DNA, 25 bp, Homo sapien
tgggcagacgagagagtgtggtcat

SEQ ID NO: 1005893 - DNA, 25 bp, Homo sapien
tcgggatccttcacagccaggtgtg

SEQ ID NO: 1005894 - DNA, 25 bp, Homo sapien
ttgaaagaaatcttagtgcagattg

SEQ ID NO: 1005895 - DNA, 25 bp, Homo sapien
agaaatcttagtgcagattgtggtc

SEQ ID NO: 1005896 - DNA, 25 bp, Homo sapien
tcttagtgcagattgtggtcttgca

SEQ ID NO: 1005897 - DNA, 25 bp, Homo sapien
aatcttagtgcagattgtggtcttg

SEQ ID NO: 1005898 - DNA, 25 bp, Homo sapien
tttagagtagtctcagggaacctgg

SEQ ID NO: 1005899 - DNA, 25 bp, Homo sapien
gaacatgtagctcaagcctgggcct

SEQ ID NO: 1005900 - DNA, 25 bp, Homo sapien
gaacagtacatctaattcagaaaag

SEQ ID NO: 1005901 - DNA, 25 bp, Homo sapien
tgctgtaatatatcagaacagtaca

SEQ ID NO: 1005902 - DNA, 25 bp, Homo sapien
atccaacacataaaaagaaagttca

SEQ ID NO: 1005903 - DNA, 25 bp, Homo sapien
tataaaatcagaatccaacacataa

SEQ ID NO: 1005904 - DNA, 25 bp, Homo sapien
cacagtagggtttgtccttgtgttt

SEQ ID NO: 1005905 - DNA, 25 bp, Homo sapien
ttcagagtccacatgaatggaaatg

SEQ ID NO: 1005906 - DNA, 25 bp, Homo sapien
tcatcgatgtgcacgctggtgccta

SEQ ID NO: 1005907 - DNA, 25 bp, Homo sapien
aaccacgttctggagtttggcagac

SEQ ID NO: 1005908 - DNA, 25 bp, Homo sapien
ctttggatatctgccctgaagaagc

SEQ ID NO: 1005909 - DNA, 25 bp, Homo sapien
aaggatccctgtggcaagccctctt

SEQ ID NO: 1005910 - DNA, 25 bp, Homo sapien
tgtgagtgattccataagctagacc

SEQ ID NO: 1005911 - DNA, 25 bp, Homo sapien
ttccataagctagaccagcagttgc

SEQ ID NO: 1005912 - DNA, 25 bp, Homo sapien
cattgtgagtgattccataagctag

SEQ ID NO: 1005913 - DNA, 25 bp, Homo sapien
gagtgattccataagctagaccagc

SEQ ID NO: 1005914 - DNA, 25 bp, Homo sapien
taatatcttccatccgatcacctct

SEQ ID NO: 1005915 - DNA, 25 bp, Homo sapien
cgtcactggtatctcagtagccacc

SEQ ID NO: 1005916 - DNA, 25 bp, Homo sapien
cactgttgttaacgatgtagcacct

SEQ ID NO: 1005917 - DNA, 25 bp, Homo sapien
cagtagattatagttcatcattttt

SEQ ID NO: 1005918 - DNA, 25 bp, Homo sapien
agcattgacacacatttgcctccag

SEQ ID NO: 1005919 - DNA, 25 bp, Homo sapien
acatatttaagaggccttcgagcat

SEQ ID NO: 1005920 - DNA, 25 bp, Homo sapien
aacatctcacaaaacatgttctctt

SEQ ID NO: 1005921 - DNA, 25 bp, Homo sapien
ataacaaataatcaggtgggaaggc

SEQ ID NO: 1005922 - DNA, 25 bp, Homo sapien
tgaatcagggttttgcactgatacc

SEQ ID NO: 1005923 - DNA, 25 bp, Homo sapien
ttcaagaaaagctaccgatctacct

SEQ ID NO: 1005924 - DNA, 25 bp, Homo sapien
catgcttgaaaggagtggattcagg

SEQ ID NO: 1005925 - DNA, 25 bp, Homo sapien
tagagggaatcttaagtgacggtga

SEQ ID NO: 1005926 - DNA, 25 bp, Homo sapien
gatgtgataggtccttcccggccgg

SEQ ID NO: 1005927 - DNA, 25 bp, Homo sapien
tcacaggttcccccctctggagttg

SEQ ID NO: 1005928 - DNA, 25 bp, Homo sapien
ctctctggatgtgataggtccttcc

SEQ ID NO: 1005929 - DNA, 25 bp, Homo sapien
tgtgataggtccttcccggccggga

SEQ ID NO: 1005930 - DNA, 25 bp, Homo sapien
aggcgagtcacctcctgggcggcca

SEQ ID NO: 1005931 - DNA, 25 bp, Homo sapien
tgtaccagaggttcactggcaagat

SEQ ID NO: 1005932 - DNA, 25 bp, Homo sapien
cgcggtgcccgatggcttcgctgta

SEQ ID NO: 1005933 - DNA, 25 bp, Homo sapien
ggcaagatcaacacctcgaggtcct

SEQ ID NO: 1005934 - DNA, 25 bp, Homo sapien
cacgctggttccctgtttcgtattt

SEQ ID NO: 1005935 - DNA, 25 bp, Homo sapien
ccacgctggttccctgtttcgtatt

SEQ ID NO: 1005936 - DNA, 25 bp, Homo sapien
gaattgtggatgtttggaatgagaa

SEQ ID NO: 1005937 - DNA, 25 bp, Homo sapien
ttttctcaacaggctctaggtgtcg

SEQ ID NO: 1005938 - DNA, 25 bp, Homo sapien
cttaaatctgacttaaaattgttga

SEQ ID NO: 1005939 - DNA, 25 bp, Homo sapien
aaattgttgaattgtggatgtttgg

SEQ ID NO: 1005940 - DNA, 25 bp, Homo sapien
ttggcttagcgcaggagaaatctcc

SEQ ID NO: 1005941 - DNA, 25 bp, Homo sapien
agaaacagcttcgctgccttggtca

SEQ ID NO: 1005942 - DNA, 25 bp, Homo sapien
tgctgacaacctcaagacaaaccga

SEQ ID NO: 1005943 - DNA, 25 bp, Homo sapien
ggaagactgttccaaggtacagaaa

SEQ ID NO: 1005944 - DNA, 25 bp, Homo sapien
ctaagatgatggcaagcagcatacc

SEQ ID NO: 1005945 - DNA, 25 bp, Homo sapien
ataatccttaggactttgtacctgt

SEQ ID NO: 1005946 - DNA, 25 bp, Homo sapien
cagcatacctttataatccttagga

SEQ ID NO: 1005947 - DNA, 25 bp, Homo sapien
gactttgtacctgttgtccttctgt

SEQ ID NO: 1005948 - DNA, 25 bp, Homo sapien
cctctggctcttgtgacccccatca

SEQ ID NO: 1005949 - DNA, 25 bp, Homo sapien
tcttgtgacccccatcacagggtgg

SEQ ID NO: 1005950 - DNA, 25 bp, Homo sapien
tccccctctggctcttgtgaccccc

SEQ ID NO: 1005951 - DNA, 25 bp, Homo sapien
ccccatcacagggtggggagacacc

SEQ ID NO: 1005952 - DNA, 25 bp, Homo sapien
tcttgggactcccattgcgggtgga

SEQ ID NO: 1005953 - DNA, 25 bp, Homo sapien
cccccagcttaggacccacatcgtt

SEQ ID NO: 1005954 - DNA, 25 bp, Homo sapien
cccagcttaggacccacatcgttga

SEQ ID NO: 1005955 - DNA, 25 bp, Homo sapien
cccccccagcttaggacccacatcg

SEQ ID NO: 1005956 - DNA, 25 bp, Homo sapien
cagcttaggacccacatcgttgatc

SEQ ID NO: 1005957 - DNA, 25 bp, Homo sapien
taccttacgtgggattactgagagc

SEQ ID NO: 1005958 - DNA, 25 bp, Homo sapien
cttacgtgggattactgagagccag

SEQ ID NO: 1005959 - DNA, 25 bp, Homo sapien
gcaggtaccttacgtgggattactg

SEQ ID NO: 1005960 - DNA, 25 bp, Homo sapien
acgtgggattactgagagccagtcc

SEQ ID NO: 1005961 - DNA, 25 bp, Homo sapien
gcaccccccgcgaggcagggactga

SEQ ID NO: 1005962 - DNA, 25 bp, Homo sapien
aggcaccccccgcgaggcagggact

SEQ ID NO: 1005963 - DNA, 25 bp, Homo sapien
ggaggcaccccccgcgaggcaggga

SEQ ID NO: 1005964 - DNA, 25 bp, Homo sapien
accccccgcgaggcagggactgaga

SEQ ID NO: 1005965 - DNA, 25 bp, Homo sapien
gggagggaggcacccctcgcgacgc

SEQ ID NO: 1005966 - DNA, 25 bp, Homo sapien
ttgcacccccatcgcagggagggag

SEQ ID NO: 1005967 - DNA, 25 bp, Homo sapien
cagggggggaggcaatccccgcgag

SEQ ID NO: 1005968 - DNA, 25 bp, Homo sapien
ttcctcccctggctctttgcacccc

SEQ ID NO: 1005969 - DNA, 25 bp, Homo sapien
gagagtggggactgagagctatccc

SEQ ID NO: 1005970 - DNA, 25 bp, Homo sapien
gagtggggactgagagctatcccct

SEQ ID NO: 1005971 - DNA, 25 bp, Homo sapien
acgagagtggggactgagagctatc

SEQ ID NO: 1005972 - DNA, 25 bp, Homo sapien
agagtggggactgagagctatcccc

SEQ ID NO: 1005973 - DNA, 25 bp, Homo sapien
cctgctacactcttctgtgagtctc

SEQ ID NO: 1005974 - DNA, 25 bp, Homo sapien
ggtcttgattgttggggccctcgca

SEQ ID NO: 1005975 - DNA, 25 bp, Homo sapien
gcaatcattgcactggcccgtcctg

SEQ ID NO: 1005976 - DNA, 25 bp, Homo sapien
gcagcgtcaagtgcctggaatccac

SEQ ID NO: 1005977 - DNA, 25 bp, Homo sapien
gcatagaggccctgagttggactca

SEQ ID NO: 1005978 - DNA, 25 bp, Homo sapien
aagcctgagtcctgtgttccacgga

SEQ ID NO: 1005979 - DNA, 25 bp, Homo sapien
tgtgttccacggacatcagtggcat

SEQ ID NO: 1005980 - DNA, 25 bp, Homo sapien
tcagtggcatagaggccctgagttg

SEQ ID NO: 1005981 - DNA, 25 bp, Homo sapien
aatccttcagaaattttagcaccac

SEQ ID NO: 1005982 - DNA, 25 bp, Homo sapien
gcagacattaagtgtgctgaaggta

SEQ ID NO: 1005983 - DNA, 25 bp, Homo sapien
gctttttccaagcagacattaagtg

SEQ ID NO: 1005984 - DNA, 25 bp, Homo sapien
gctgaaggtagttgtgttgtcatct

SEQ ID NO: 1005985 - DNA, 25 bp, Homo sapien
tggacccttcgatgttcctggccca

SEQ ID NO: 1005986 - DNA, 25 bp, Homo sapien
acctgcgctacctattcttgccccg

SEQ ID NO: 1005987 - DNA, 25 bp, Homo sapien
tcctctgcaggatccctgatgccca

SEQ ID NO: 1005988 - DNA, 25 bp, Homo sapien
tattcttgccccgctctgctctagt

SEQ ID NO: 1005989 - DNA, 25 bp, Homo sapien
tggaggacttcaaccctcttagaac

SEQ ID NO: 1005990 - DNA, 25 bp, Homo sapien
ggagatggtgctcaagggttggagc

SEQ ID NO: 1005991 - DNA, 25 bp, Homo sapien
gaaccttactctgcatgtgaacaca

SEQ ID NO: 1005992 - DNA, 25 bp, Homo sapien
tctacgggagatggtgctcaagggt

SEQ ID NO: 1005993 - DNA, 25 bp, Homo sapien
cttcctccactgtcagaggcagcat

SEQ ID NO: 1005994 - DNA, 25 bp, Homo sapien
cccttcctccactgtcagaggcagc

SEQ ID NO: 1005995 - DNA, 25 bp, Homo sapien
ccttcctccactgtcagaggcagca

SEQ ID NO: 1005996 - DNA, 25 bp, Homo sapien
ctttacccataaagaaagtggcagc

SEQ ID NO: 1005997 - DNA, 25 bp, Homo sapien
cacagcatgccgagcagggtataga

SEQ ID NO: 1005998 - DNA, 25 bp, Homo sapien
catggaccagttgctaggcacagtt

SEQ ID NO: 1005999 - DNA, 25 bp, Homo sapien
cagggctcgtttctgagcatggacc

SEQ ID NO: 1006000 - DNA, 25 bp, Homo sapien
gttgagcagacttatagcttctcat

SEQ ID NO: 1006001 - DNA, 25 bp, Homo sapien
attttgagcggtctatggctttctg

SEQ ID NO: 1006002 - DNA, 25 bp, Homo sapien
gtattttgagcggtctatggctttc

SEQ ID NO: 1006003 - DNA, 25 bp, Homo sapien
tgttgagcagacttatagcttctca

SEQ ID NO: 1006004 - DNA, 25 bp, Homo sapien
cctcaggagatagggcggtgtcact

SEQ ID NO: 1006005 - DNA, 25 bp, Homo sapien
cgcaaggagttgatgtggacatcca

SEQ ID NO: 1006006 - DNA, 25 bp, Homo sapien
aagagaccgggtcagtaacgcaagg

SEQ ID NO: 1006007 - DNA, 25 bp, Homo sapien
gaccctcccgatgtaccagatgaag

SEQ ID NO: 1006008 - DNA, 25 bp, Homo sapien
cacaaggtcttttccggtgttctgc

SEQ ID NO: 1006009 - DNA, 25 bp, Homo sapien
gataagaagtcttcacaaggtcttt

SEQ ID NO: 1006010 - DNA, 25 bp, Homo sapien
tgtccctgagacctcctgtgatgct

SEQ ID NO: 1006011 - DNA, 25 bp, Homo sapien
catttttcttgggtgtcgtctggtg

SEQ ID NO: 1006012 - DNA, 25 bp, Homo sapien
gctggcctcctagcagtctcgtcag

SEQ ID NO: 1006013 - DNA, 25 bp, Homo sapien
tcagtttttcctgcaatgtgagtca

SEQ ID NO: 1006014 - DNA, 25 bp, Homo sapien
accagccaattgcatatccacagtc

SEQ ID NO: 1006015 - DNA, 25 bp, Homo sapien
tgagtcactccctttgctgtagcct

SEQ ID NO: 1006016 - DNA, 25 bp, Homo sapien
cccgtgaccgtgcagcgtgctgctg

SEQ ID NO: 1006017 - DNA, 25 bp, Homo sapien
ccctgacggagctgtggttggtcct

SEQ ID NO: 1006018 - DNA, 25 bp, Homo sapien
tggtcctgtgtttacctcttcggcc

SEQ ID NO: 1006019 - DNA, 25 bp, Homo sapien
agaggtccgcctcttgtctccaggt

SEQ ID NO: 1006020 - DNA, 25 bp, Homo sapien
aactgaccagttggacactcaccaa

SEQ ID NO: 1006021 - DNA, 25 bp, Homo sapien
actgaccagttggacactcaccaac

SEQ ID NO: 1006022 - DNA, 25 bp, Homo sapien
ctaactgaccagttggacactcacc

SEQ ID NO: 1006023 - DNA, 25 bp, Homo sapien
taactgaccagttggacactcacca

SEQ ID NO: 1006024 - DNA, 25 bp, Homo sapien
tgccatgtggtgttctggaaagctt

SEQ ID NO: 1006025 - DNA, 25 bp, Homo sapien
ctgaatgccatgtggtgttctggaa

SEQ ID NO: 1006026 - DNA, 25 bp, Homo sapien
ccatgtggtgttctggaaagcttcc

SEQ ID NO: 1006027 - DNA, 25 bp, Homo sapien
gaatgccatgtggtgttctggaaag

SEQ ID NO: 1006028 - DNA, 25 bp, Homo sapien
acaatacttattgctccaatggggt

SEQ ID NO: 1006029 - DNA, 25 bp, Homo sapien
gatcacaatacttattgctccaatg

SEQ ID NO: 1006030 - DNA, 25 bp, Homo sapien
atcacaatacttattgctccaatgg

SEQ ID NO: 1006031 - DNA, 25 bp, Homo sapien
tcacaatacttattgctccaatggg

SEQ ID NO: 1006032 - DNA, 25 bp, Homo sapien
tgccacgttcacttctacgtggcct

SEQ ID NO: 1006033 - DNA, 25 bp, Homo sapien
tgtctcttctttgccacgttcactt

SEQ ID NO: 1006034 - DNA, 25 bp, Homo sapien
tctttgccacgttcacttctacgtg

SEQ ID NO: 1006035 - DNA, 25 bp, Homo sapien
tcttctttgccacgttcacttctac

SEQ ID NO: 1006036 - DNA, 25 bp, Homo sapien
gaacccacgtggccttgcctttctg

SEQ ID NO: 1006037 - DNA, 25 bp, Homo sapien
gccttgcctttctggaatcgcagtc

SEQ ID NO: 1006038 - DNA, 25 bp, Homo sapien
ttgcctttctggaatcgcagtctcc

SEQ ID NO: 1006039 - DNA, 25 bp, Homo sapien
tttctggaatcgcagtctcctccat

SEQ ID NO: 1006040 - DNA, 25 bp, Homo sapien
ggagatgcgtcacctgtagctgatg

SEQ ID NO: 1006041 - DNA, 25 bp, Homo sapien
tgatggataatcacttggaaatgca

SEQ ID NO: 1006042 - DNA, 25 bp, Homo sapien
ctgtagctgatggataatcacttgg

SEQ ID NO: 1006043 - DNA, 25 bp, Homo sapien
cgggaaggggttgtgcatttctcat

SEQ ID NO: 1006044 - DNA, 25 bp, Homo sapien
cagggacagatcctcgggcactgtt

SEQ ID NO: 1006045 - DNA, 25 bp, Homo sapien
agggacagatcctcgggcactgttt

SEQ ID NO: 1006046 - DNA, 25 bp, Homo sapien
cgattcgaaacctgaattttcaggg

SEQ ID NO: 1006047 - DNA, 25 bp, Homo sapien
tcaggagtgtccatcgagcatcacg

SEQ ID NO: 1006048 - DNA, 25 bp, Homo sapien
caagatgaacatgggtgtagctttc

SEQ ID NO: 1006049 - DNA, 25 bp, Homo sapien
ttccaagatgaacatgggtgtagct

SEQ ID NO: 1006050 - DNA, 25 bp, Homo sapien
ctctctgccccatgcatgacttgcc

SEQ ID NO: 1006051 - DNA, 25 bp, Homo sapien
ttcccagcgttagcttagcaaccag

SEQ ID NO: 1006052 - DNA, 25 bp, Homo sapien
ccagcgttagcttagcaaccagagc

SEQ ID NO: 1006053 - DNA, 25 bp, Homo sapien
gttagcttagcaaccagagctgcag

SEQ ID NO: 1006054 - DNA, 25 bp, Homo sapien
ccacagttcccagcgttagcttagc

SEQ ID NO: 1006055 - DNA, 25 bp, Homo sapien
cagttttgtgcctcggtgtgaaagc

SEQ ID NO: 1006056 - DNA, 25 bp, Homo sapien
ccagagttcatttttagaggacaga

SEQ ID NO: 1006057 - DNA, 25 bp, Homo sapien
cactcattgtggctagtgtcaccaa

SEQ ID NO: 1006058 - DNA, 25 bp, Homo sapien
aaacatagacatgggccaggcacgg

SEQ ID NO: 1006059 - DNA, 25 bp, Homo sapien
tgccgaggatgtgcacacaaagcaa

SEQ ID NO: 1006060 - DNA, 25 bp, Homo sapien
gtgagatacgtagtttctggatagc

SEQ ID NO: 1006061 - DNA, 25 bp, Homo sapien
cagtcttcagattgagaacacttcc

SEQ ID NO: 1006062 - DNA, 25 bp, Homo sapien
cagtttggcgtgaatgagtgagata

SEQ ID NO: 1006063 - DNA, 25 bp, Homo sapien
aggtggccgagtgtctgcttcctgt

SEQ ID NO: 1006064 - DNA, 25 bp, Homo sapien
agggagaaggtggccgagtgtctgc

SEQ ID NO: 1006065 - DNA, 25 bp, Homo sapien
gaaggtggccgagtgtctgcttcct

SEQ ID NO: 1006066 - DNA, 25 bp, Homo sapien
gagaaggtggccgagtgtctgcttc

SEQ ID NO: 1006067 - DNA, 25 bp, Homo sapien
gatctcttgactactttttacccca

SEQ ID NO: 1006068 - DNA, 25 bp, Homo sapien
ttttaccccatcagttgtaccatcc

SEQ ID NO: 1006069 - DNA, 25 bp, Homo sapien
tccggtgaaatgcatttgatctctt

SEQ ID NO: 1006070 - DNA, 25 bp, Homo sapien
catagcctaagaagtccggtgaaat

SEQ ID NO: 1006071 - DNA, 25 bp, Homo sapien
ttcattgcccagtgcgactgggtct

SEQ ID NO: 1006072 - DNA, 25 bp, Homo sapien
ggtggagggagcaagccgcgcggct

SEQ ID NO: 1006073 - DNA, 25 bp, Homo sapien
tgcttgggcagatttctcttgtctc

SEQ ID NO: 1006074 - DNA, 25 bp, Homo sapien
tccctgtccagggagtgcactcgct

SEQ ID NO: 1006075 - DNA, 25 bp, Homo sapien
aaataacacaggattggtcctgggg

SEQ ID NO: 1006076 - DNA, 25 bp, Homo sapien
ttccatcctcatgaaatcttggctt

SEQ ID NO: 1006077 - DNA, 25 bp, Homo sapien
tgcaggaagcgtccaaaataacaca

SEQ ID NO: 1006078 - DNA, 25 bp, Homo sapien
gaggtcagaagggtctccatggttc

SEQ ID NO: 1006079 - DNA, 25 bp, Homo sapien
agttctcattctctcgtccagtctt

SEQ ID NO: 1006080 - DNA, 25 bp, Homo sapien
cttcactagctcacttccttcctgc

SEQ ID NO: 1006081 - DNA, 25 bp, Homo sapien
gcccagttctcattctctcgtccag

SEQ ID NO: 1006082 - DNA, 25 bp, Homo sapien
tctctcgtccagtcttttctttgtc

SEQ ID NO: 1006083 - DNA, 25 bp, Homo sapien
ctgcacatgtttgctggccaacgtt

SEQ ID NO: 1006084 - DNA, 25 bp, Homo sapien
gggtcagcctcagactctctgcaca

SEQ ID NO: 1006085 - DNA, 25 bp, Homo sapien
gctggccaacgttccagccagcggg

SEQ ID NO: 1006086 - DNA, 25 bp, Homo sapien
gcctcagactctctgcacatgtttg

SEQ ID NO: 1006087 - DNA, 25 bp, Homo sapien
tgatgaatggcacctcagaagtgtg

SEQ ID NO: 1006088 - DNA, 25 bp, Homo sapien
gaggctgcccaagcacctagcgaag

SEQ ID NO: 1006089 - DNA, 25 bp, Homo sapien
gatgcttggctctgggcctgttgtt

SEQ ID NO: 1006090 - DNA, 25 bp, Homo sapien
ctccgaagctccatctggtgcaaca

SEQ ID NO: 1006091 - DNA, 25 bp, Homo sapien
aatagctctggggattctgaactgc

SEQ ID NO: 1006092 - DNA, 25 bp, Homo sapien
attgcaaaacttaaatagctctggg

SEQ ID NO: 1006093 - DNA, 25 bp, Homo sapien
catgattgcaaaacttaaatagctc

SEQ ID NO: 1006094 - DNA, 25 bp, Homo sapien
tagctctggggattctgaactgctc

SEQ ID NO: 1006095 - DNA, 25 bp, Homo sapien
gggtactcgcctgccaacctgctga

SEQ ID NO: 1006096 - DNA, 25 bp, Homo sapien
ggagcacaggggtactcgcctgcca

SEQ ID NO: 1006097 - DNA, 25 bp, Homo sapien
gggggaaaccaatcctgggagcaca

SEQ ID NO: 1006098 - DNA, 25 bp, Homo sapien
ggggaaaccaatcctgggagcacag

SEQ ID NO: 1006099 - DNA, 25 bp, Homo sapien
gggctccgtggagacatggcttttt

SEQ ID NO: 1006100 - DNA, 25 bp, Homo sapien
gaccaaataccagggctccgtggag

SEQ ID NO: 1006101 - DNA, 25 bp, Homo sapien
tgggaccaaataccagggctccgtg

SEQ ID NO: 1006102 - DNA, 25 bp, Homo sapien
ctctgggaccaaataccagggctcc

SEQ ID NO: 1006103 - DNA, 25 bp, Homo sapien
acagtcctgattcctggagcgctgg

SEQ ID NO: 1006104 - DNA, 25 bp, Homo sapien
cagtcctgattcctggagcgctggc

SEQ ID NO: 1006105 - DNA, 25 bp, Homo sapien
gcacagtcctgattcctggagcgct

SEQ ID NO: 1006106 - DNA, 25 bp, Homo sapien
ctgcacagtcctgattcctggagcg

SEQ ID NO: 1006107 - DNA, 25 bp, Homo sapien
gacagccaatacacctgcaggtcca

SEQ ID NO: 1006108 - DNA, 25 bp, Homo sapien
ccctctgctggtcattttctgacca

SEQ ID NO: 1006109 - DNA, 25 bp, Homo sapien
gataaaaggcacttgttacatcagc

SEQ ID NO: 1006110 - DNA, 25 bp, Homo sapien
cattgataaagatgggtgcttctga

SEQ ID NO: 1006111 - DNA, 25 bp, Homo sapien
gcagagagacagatgccattttggg

SEQ ID NO: 1006112 - DNA, 25 bp, Homo sapien
tctctgaactgccaacagctgaacc

SEQ ID NO: 1006113 - DNA, 25 bp, Homo sapien
cagtgtccttgggtatttacaatcc

SEQ ID NO: 1006114 - DNA, 25 bp, Homo sapien
aatccctcgatccttgcctgattgg

SEQ ID NO: 1006115 - DNA, 25 bp, Homo sapien
agatttgtcaatcagaggtgctcca

SEQ ID NO: 1006116 - DNA, 25 bp, Homo sapien
ttagatttgtcaatcagaggtgctc

SEQ ID NO: 1006117 - DNA, 25 bp, Homo sapien
ctattttagatttgtcaatcagagg

SEQ ID NO: 1006118 - DNA, 25 bp, Homo sapien
ttttagatttgtcaatcagaggtgc

SEQ ID NO: 1006119 - DNA, 25 bp, Homo sapien
cttcccagtatctgcagacccttct

SEQ ID NO: 1006120 - DNA, 25 bp, Homo sapien
ggccgcgcagatccagggccacaga

SEQ ID NO: 1006121 - DNA, 25 bp, Homo sapien
taaacgcattgatcaccctgctagg

SEQ ID NO: 1006122 - DNA, 25 bp, Homo sapien
gacagacacataaacgcattgatca

SEQ ID NO: 1006123 - DNA, 25 bp, Homo sapien
tgatcaccctgctagggcctactgg

SEQ ID NO: 1006124 - DNA, 25 bp, Homo sapien
cacaatgaaacaggacgcaaggact

SEQ ID NO: 1006125 - DNA, 25 bp, Homo sapien
ccacaatgaaacaggacgcaaggac

SEQ ID NO: 1006126 - DNA, 25 bp, Homo sapien
tccacaatgaaacaggacgcaagga

SEQ ID NO: 1006127 - DNA, 25 bp, Homo sapien
tacacgtctcgacaactgcatagcc

SEQ ID NO: 1006128 - DNA, 25 bp, Homo sapien
aactgcatagcccttttgctccctg

SEQ ID NO: 1006129 - DNA, 25 bp, Homo sapien
tcatttaatacacgtctcgacaact

SEQ ID NO: 1006130 - DNA, 25 bp, Homo sapien
ctgcatagcccttttgctccctgag

SEQ ID NO: 1006131 - DNA, 25 bp, Homo sapien
aggctcaccaaggaacgaccactca

SEQ ID NO: 1006132 - DNA, 25 bp, Homo sapien
ggtctgacatcctgagaatcaccat

SEQ ID NO: 1006133 - DNA, 25 bp, Homo sapien
gagtgggtctgacatcctgagaatc

SEQ ID NO: 1006134 - DNA, 25 bp, Homo sapien
caaggaacgaccactcagggagagt

SEQ ID NO: 1006135 - DNA, 25 bp, Homo sapien
ctgcctctgacgggcgggaccctga

SEQ ID NO: 1006136 - DNA, 25 bp, Homo sapien
accctgacacccaccttagctgtga

SEQ ID NO: 1006137 - DNA, 25 bp, Homo sapien
caaaccagtgggacatccggggcct

SEQ ID NO: 1006138 - DNA, 25 bp, Homo sapien
accagtgggacatccggggcctttg

SEQ ID NO: 1006139 - DNA, 25 bp, Homo sapien
ctggggctttcagggacacacttcc

SEQ ID NO: 1006140 - DNA, 25 bp, Homo sapien
tggcgaccctcggaagagtcgagca

SEQ ID NO: 1006141 - DNA, 25 bp, Homo sapien
ttatggcgaccctcggaagagtcga

SEQ ID NO: 1006142 - DNA, 25 bp, Homo sapien
ccctcggaagagtcgagcaggcagc

SEQ ID NO: 1006143 - DNA, 25 bp, Homo sapien
ggtaataagaatggtactccagtac

SEQ ID NO: 1006144 - DNA, 25 bp, Homo sapien
aatacggtactttgatagcgcacta

SEQ ID NO: 1006145 - DNA, 25 bp, Homo sapien
tgtgatgtcaggcaatgatggtaat

SEQ ID NO: 1006146 - DNA, 25 bp, Homo sapien
tccagtactaggagtaatacggtac

SEQ ID NO: 1006147 - DNA, 25 bp, Homo sapien
taaacgcttcgtataacccataggc

SEQ ID NO: 1006148 - DNA, 25 bp, Homo sapien
ggtggatgtgaaattaaacgcttcg

SEQ ID NO: 1006149 - DNA, 25 bp, Homo sapien
gtataacccataggcgatgttgttg

SEQ ID NO: 1006150 - DNA, 25 bp, Homo sapien
tgtgaaattaaacgcttcgtataac

SEQ ID NO: 1006151 - DNA, 25 bp, Homo sapien
gatgcagatcgtcttgtggtcacgg

SEQ ID NO: 1006152 - DNA, 25 bp, Homo sapien
ctctttctcaatgtcagagcacgat

SEQ ID NO: 1006153 - DNA, 25 bp, Homo sapien
tgaagatgctaatggctctttctca

SEQ ID NO: 1006154 - DNA, 25 bp, Homo sapien
tggtcacggtggttctcttgactct

SEQ ID NO: 1006155 - DNA, 25 bp, Homo sapien
ctgttgggtaaaccgcatcaggctg

SEQ ID NO: 1006156 - DNA, 25 bp, Homo sapien
tcaggctgcattcacggatgctctt

SEQ ID NO: 1006157 - DNA, 25 bp, Homo sapien
cggcagcctgttgggtaaaccgcat

SEQ ID NO: 1006158 - DNA, 25 bp, Homo sapien
tgtggcactgatgggatgactccag

SEQ ID NO: 1006159 - DNA, 25 bp, Homo sapien
ctagcttggtgcactgataccatac

SEQ ID NO: 1006160 - DNA, 25 bp, Homo sapien
tgcaaacaagaggtagtccagcttg

SEQ ID NO: 1006161 - DNA, 25 bp, Homo sapien
tcctgatttcgcttttgcaaacaag

SEQ ID NO: 1006162 - DNA, 25 bp, Homo sapien
tcggaacacccggtcatcagagagt

SEQ ID NO: 1006163 - DNA, 25 bp, Homo sapien
cacccggtcatcagagagtgttcct

SEQ ID NO: 1006164 - DNA, 25 bp, Homo sapien
atctccatgtttcttcccgacccct

SEQ ID NO: 1006165 - DNA, 25 bp, Homo sapien
cactgggtttttccagcgagcaccc

SEQ ID NO: 1006166 - DNA, 25 bp, Homo sapien
tgggtttttccagcgagcacccctc

SEQ ID NO: 1006167 - DNA, 25 bp, Homo sapien
ggagtcactgggtttttccagcgag

SEQ ID NO: 1006168 - DNA, 25 bp, Homo sapien
gtgttgaggttctgtaagcacgtgc

SEQ ID NO: 1006169 - DNA, 25 bp, Homo sapien
gctgcattctggtcggtcctctttt

SEQ ID NO: 1006170 - DNA, 25 bp, Homo sapien
tgcagagagggcagtcgtgggccca

SEQ ID NO: 1006171 - DNA, 25 bp, Homo sapien
tgggcccagtgaacagctgcattct

SEQ ID NO: 1006172 - DNA, 25 bp, Homo sapien
gaggtatgcggaagggccagttcca

SEQ ID NO: 1006173 - DNA, 25 bp, Homo sapien
atttggaagattgaggtatgcggaa

SEQ ID NO: 1006174 - DNA, 25 bp, Homo sapien
ccatcataacatagggatttggaag

SEQ ID NO: 1006175 - DNA, 25 bp, Homo sapien
atagagctcatgcttggtccaagga

SEQ ID NO: 1006176 - DNA, 25 bp, Homo sapien
aggagaaaccatggccagagttctg

SEQ ID NO: 1006177 - DNA, 25 bp, Homo sapien
gattaggcccatggagaagtgggag

SEQ ID NO: 1006178 - DNA, 25 bp, Homo sapien
ggagattaggcccatggagaagtgg

SEQ ID NO: 1006179 - DNA, 25 bp, Homo sapien
ggggaggagaaaccatggccagagt

SEQ ID NO: 1006180 - DNA, 25 bp, Homo sapien
catcatgtctgcaaggtgctctttc

SEQ ID NO: 1006181 - DNA, 25 bp, Homo sapien
tcagaaattccagtaagatccaaaa

SEQ ID NO: 1006182 - DNA, 25 bp, Homo sapien
tgcaaggtgctctttcagaaattcc

SEQ ID NO: 1006183 - DNA, 25 bp, Homo sapien
gaaattccagtaagatccaaaagca

SEQ ID NO: 1006184 - DNA, 25 bp, Homo sapien
ttgccactcaaaaacattgactgaa

SEQ ID NO: 1006185 - DNA, 25 bp, Homo sapien
tgaatgagccctgagtgccggatac

SEQ ID NO: 1006186 - DNA, 25 bp, Homo sapien
aaacattgactgaatgagccctgag

SEQ ID NO: 1006187 - DNA, 25 bp, Homo sapien
gccggatactgttctaacctataga

SEQ ID NO: 1006188 - DNA, 25 bp, Homo sapien
cccagttttgggcattcagtccaag

SEQ ID NO: 1006189 - DNA, 25 bp, Homo sapien
ttacaggcacgctgagcatcccagt

SEQ ID NO: 1006190 - DNA, 25 bp, Homo sapien
tcagtccaagttttgtgtgaggaca

SEQ ID NO: 1006191 - DNA, 25 bp, Homo sapien
ggagcctccctaggaatacgagtac

SEQ ID NO: 1006192 - DNA, 25 bp, Homo sapien
tccttcagtgcatcaggcagtatga

SEQ ID NO: 1006193 - DNA, 25 bp, Homo sapien
gattagaaccacgatgtaagtgtca

SEQ ID NO: 1006194 - DNA, 25 bp, Homo sapien
gataacatcgggcatgagagtctgt

SEQ ID NO: 1006195 - DNA, 25 bp, Homo sapien
tgtaagtgtcaggataacatcgggc

SEQ ID NO: 1006196 - DNA, 25 bp, Homo sapien
tctcctggagcacttgcgagccaca

SEQ ID NO: 1006197 - DNA, 25 bp, Homo sapien
tggagcacttgcgagccacagatga

SEQ ID NO: 1006198 - DNA, 25 bp, Homo sapien
ggagcacttgcgagccacagatgag

SEQ ID NO: 1006199 - DNA, 25 bp, Homo sapien
cctggagcacttgcgagccacagat

SEQ ID NO: 1006200 - DNA, 25 bp, Homo sapien
ctgattacagcctaaaggctccagg

SEQ ID NO: 1006201 - DNA, 25 bp, Homo sapien
tcagtgactgattacagcctaaagg

SEQ ID NO: 1006202 - DNA, 25 bp, Homo sapien
ggaaacagccaccactgcgggcttc

SEQ ID NO: 1006203 - DNA, 25 bp, Homo sapien
tgactgattacagcctaaaggctcc

SEQ ID NO: 1006204 - DNA, 25 bp, Homo sapien
catggtgctgcttcgcatccagagg

SEQ ID NO: 1006205 - DNA, 25 bp, Homo sapien
agcatacttgtagcccttgaggtca

SEQ ID NO: 1006206 - DNA, 25 bp, Homo sapien
caaccggcttccttggagatggcca

SEQ ID NO: 1006207 - DNA, 25 bp, Homo sapien
taccagccagggaggaactgtccat

SEQ ID NO: 1006208 - DNA, 25 bp, Homo sapien
ggctgtgtatggagaaccaatggcc

SEQ ID NO: 1006209 - DNA, 25 bp, Homo sapien
caatggccctgttagaaagggtgga

SEQ ID NO: 1006210 - DNA, 25 bp, Homo sapien
cttccatgaggttggttgtgaatcc

SEQ ID NO: 1006211 - DNA, 25 bp, Homo sapien
agggtggacactgggcagctcatcc

SEQ ID NO: 1006212 - DNA, 25 bp, Homo sapien
caatgattttccctgcgatgacacg

SEQ ID NO: 1006213 - DNA, 25 bp, Homo sapien
actggacctggtgactttgaattac

SEQ ID NO: 1006214 - DNA, 25 bp, Homo sapien
gattgttttaacacaagatcctgtc

SEQ ID NO: 1006215 - DNA, 25 bp, Homo sapien
tgtagttcaaactaggagaactgtg

SEQ ID NO: 1006216 - DNA, 25 bp, Homo sapien
ccatcatacagagcaaggacaacca

SEQ ID NO: 1006217 - DNA, 25 bp, Homo sapien
ctattttccatcatacagagcaagg

SEQ ID NO: 1006218 - DNA, 25 bp, Homo sapien
catcatacagagcaaggacaaccag

SEQ ID NO: 1006219 - DNA, 25 bp, Homo sapien
ttttccatcatacagagcaaggaca

SEQ ID NO: 1006220 - DNA, 25 bp, Homo sapien
tctgtttgaaaagagtgtacctgct

SEQ ID NO: 1006221 - DNA, 25 bp, Homo sapien
gtacctgctcagtgggaccagcaag

SEQ ID NO: 1006222 - DNA, 25 bp, Homo sapien
tgaaataggctgttctgtttgaaaa

SEQ ID NO: 1006223 - DNA, 25 bp, Homo sapien
tgaaaagagtgtacctgctcagtgg

SEQ ID NO: 1006224 - DNA, 25 bp, Homo sapien
ccgtcgccaaggtcatctggtggca

SEQ ID NO: 1006225 - DNA, 25 bp, Homo sapien
gctgccgtcgccaaggtcatctggt

SEQ ID NO: 1006226 - DNA, 25 bp, Homo sapien
tgccgtcgccaaggtcatctggtgg

SEQ ID NO: 1006227 - DNA, 25 bp, Homo sapien
cgtcgccaaggtcatctggtggcag

SEQ ID NO: 1006228 - DNA, 25 bp, Homo sapien
tttacttgacctgcaacagagttgc

SEQ ID NO: 1006229 - DNA, 25 bp, Homo sapien
tacccttgtttagatgctcatgcac

SEQ ID NO: 1006230 - DNA, 25 bp, Homo sapien
ttttacactttacggctacatggcc

SEQ ID NO: 1006231 - DNA, 25 bp, Homo sapien
gctcatgcacttgctacacctggaa

SEQ ID NO: 1006232 - DNA, 25 bp, Homo sapien
aggagccttcactagggaggcactg

SEQ ID NO: 1006233 - DNA, 25 bp, Homo sapien
caggagccttcactagggaggcact

SEQ ID NO: 1006234 - DNA, 25 bp, Homo sapien
ggtacttgtgctccatcaaattgca

SEQ ID NO: 1006235 - DNA, 25 bp, Homo sapien
tccaagatgctccttgcaaggtact

SEQ ID NO: 1006236 - DNA, 25 bp, Homo sapien
gggagtgctggacagtccgtctcct

SEQ ID NO: 1006237 - DNA, 25 bp, Homo sapien
gctggacagtccgtctcctgtcctg

SEQ ID NO: 1006238 - DNA, 25 bp, Homo sapien
agggagtgctggacagtccgtctcc

SEQ ID NO: 1006239 - DNA, 25 bp, Homo sapien
agtccgtctcctgtcctgctttgtc

SEQ ID NO: 1006240 - DNA, 25 bp, Homo sapien
cgcttggactctggtggctcccaac

SEQ ID NO: 1006241 - DNA, 25 bp, Homo sapien
ttggactctggtggctcccaactcg

SEQ ID NO: 1006242 - DNA, 25 bp, Homo sapien
tggtggctcccaactcgccgtcaga

SEQ ID NO: 1006243 - DNA, 25 bp, Homo sapien
ctggtggctcccaactcgccgtcag

SEQ ID NO: 1006244 - DNA, 25 bp, Homo sapien
tgggaagcgcctggacagaccatga

SEQ ID NO: 1006245 - DNA, 25 bp, Homo sapien
atgaccacagccaaggagccaagcg

SEQ ID NO: 1006246 - DNA, 25 bp, Homo sapien
ctgccccggtggtgggaagcgcctg

SEQ ID NO: 1006247 - DNA, 25 bp, Homo sapien
gcgcctggacagaccatgaccacag

SEQ ID NO: 1006248 - DNA, 25 bp, Homo sapien
cttcggggaaatccgtgcagcagca

SEQ ID NO: 1006249 - DNA, 25 bp, Homo sapien
ctctgtcaaggtaaacttgatgtga

SEQ ID NO: 1006250 - DNA, 25 bp, Homo sapien
tgtcaaggtaaacttgatgtgaaac

SEQ ID NO: 1006251 - DNA, 25 bp, Homo sapien
tcaaggtaaacttgatgtgaaacac

SEQ ID NO: 1006252 - DNA, 25 bp, Homo sapien
tctgtcaaggtaaacttgatgtgaa

SEQ ID NO: 1006253 - DNA, 25 bp, Homo sapien
ggttgtagccagaaacatcagcgta

SEQ ID NO: 1006254 - DNA, 25 bp, Homo sapien
gaaggttcccagctagtactttgta

SEQ ID NO: 1006255 - DNA, 25 bp, Homo sapien
tctctctacagagccgccagatcta

SEQ ID NO: 1006256 - DNA, 25 bp, Homo sapien
cagatctaacgagttccctgggaag

SEQ ID NO: 1006257 - DNA, 25 bp, Homo sapien
tgtccctgctagagaagccgaagga

SEQ ID NO: 1006258 - DNA, 25 bp, Homo sapien
tctttggatacctcgtggccctttc

SEQ ID NO: 1006259 - DNA, 25 bp, Homo sapien
tagagaagccgaaggatagacggtc

SEQ ID NO: 1006260 - DNA, 25 bp, Homo sapien
tcggccgagaaggtgcaggtttaaa

SEQ ID NO: 1006261 - DNA, 25 bp, Homo sapien
atggcacagggcggccgctcgcctt

SEQ ID NO: 1006262 - DNA, 25 bp, Homo sapien
ctgcgtgggtcccacatggcacagg

SEQ ID NO: 1006263 - DNA, 25 bp, Homo sapien
gcggacggggaaggctgcgtgggtc

SEQ ID NO: 1006264 - DNA, 25 bp, Homo sapien
aaggctgcgtgggtcccacatggca

SEQ ID NO: 1006265 - DNA, 25 bp, Homo sapien
agccgcttcaccacgcgtgtagaca

SEQ ID NO: 1006266 - DNA, 25 bp, Homo sapien
tggaagatcttgagggttcttgtct

SEQ ID NO: 1006267 - DNA, 25 bp, Homo sapien
gagaagaccacggtctgcagaggcc

SEQ ID NO: 1006268 - DNA, 25 bp, Homo sapien
tagacatcgtaattccctccttgga

SEQ ID NO: 1006269 - DNA, 25 bp, Homo sapien
tgggttttggaggacctatgagctc

SEQ ID NO: 1006270 - DNA, 25 bp, Homo sapien
tggaggacctatgagctcttggttt

SEQ ID NO: 1006271 - DNA, 25 bp, Homo sapien
gaggacctatgagctcttggtttga

SEQ ID NO: 1006272 - DNA, 25 bp, Homo sapien
ttttggaggacctatgagctcttgg

SEQ ID NO: 1006273 - DNA, 25 bp, Homo sapien
ggaaatcccatgtccttgaacctat

SEQ ID NO: 1006274 - DNA, 25 bp, Homo sapien
taaactgatataaaactgaagagca

SEQ ID NO: 1006275 - DNA, 25 bp, Homo sapien
cattggaaatcccatgtccttgaac

SEQ ID NO: 1006276 - DNA, 25 bp, Homo sapien
ttgaacctattcaatcggagaaggc

SEQ ID NO: 1006277 - DNA, 25 bp, Homo sapien
tttgaaagcatacaatggaaaacag

SEQ ID NO: 1006278 - DNA, 25 bp, Homo sapien
ggaaaacagcaatgggcttgtaaag

SEQ ID NO: 1006279 - DNA, 25 bp, Homo sapien
ggtgcctggacccaaggtgcagcca

SEQ ID NO: 1006280 - DNA, 25 bp, Homo sapien
aaggtgcagccagcggtctgctgga

SEQ ID NO: 1006281 - DNA, 25 bp, Homo sapien
gttcctaaggttcacattcccttca

SEQ ID NO: 1006282 - DNA, 25 bp, Homo sapien
aggttgagcgtctctgtggtcacca

SEQ ID NO: 1006283 - DNA, 25 bp, Homo sapien
ctgtctgtggactccaggttgagcg

SEQ ID NO: 1006284 - DNA, 25 bp, Homo sapien
gactccaggttgagcgtctctgtgg

SEQ ID NO: 1006285 - DNA, 25 bp, Homo sapien
cttttgttaccagtccaggcagcag

SEQ ID NO: 1006286 - DNA, 25 bp, Homo sapien
ttgttaccagtccaggcagcaggct

SEQ ID NO: 1006287 - DNA, 25 bp, Homo sapien
taccagtccaggcagcaggctccat

SEQ ID NO: 1006288 - DNA, 25 bp, Homo sapien
gttaccagtccaggcagcaggctcc

SEQ ID NO: 1006289 - DNA, 25 bp, Homo sapien
tctttacgaacggactgagaccgct

SEQ ID NO: 1006290 - DNA, 25 bp, Homo sapien
aaaagatgagcgtgatatgattcct

SEQ ID NO: 1006291 - DNA, 25 bp, Homo sapien
ggtcctgtgagagcacggaaaagat

SEQ ID NO: 1006292 - DNA, 25 bp, Homo sapien
tgtcactgtgggaataaggtcctgt

SEQ ID NO: 1006293 - DNA, 25 bp, Homo sapien
tgcgtgcacgttggtgtacacaccc

SEQ ID NO: 1006294 - DNA, 25 bp, Homo sapien
gagcaaacatacattctcagcagtg

SEQ ID NO: 1006295 - DNA, 25 bp, Homo sapien
gagcgccagaggcaaccgtgtactt

SEQ ID NO: 1006296 - DNA, 25 bp, Homo sapien
tcagcagtgtaaagagcagagcgcc

SEQ ID NO: 1006297 - DNA, 25 bp, Homo sapien
tcccctccgacaacagttttgtgct

SEQ ID NO: 1006298 - DNA, 25 bp, Homo sapien
ccctccgacaacagttttgtgctct

SEQ ID NO: 1006299 - DNA, 25 bp, Homo sapien
atctcccctccgacaacagttttgt

SEQ ID NO: 1006300 - DNA, 25 bp, Homo sapien
cagtcatctcccctccgacaacagt

SEQ ID NO: 1006301 - DNA, 25 bp, Homo sapien
agagcccctctgatacagtatctga

SEQ ID NO: 1006302 - DNA, 25 bp, Homo sapien
ttccaagaatcttgatgtcccagag

SEQ ID NO: 1006303 - DNA, 25 bp, Homo sapien
cagttgtactccagcaggactgtca

SEQ ID NO: 1006304 - DNA, 25 bp, Homo sapien
taaatttcttcgaagggctccatga

SEQ ID NO: 1006305 - DNA, 25 bp, Homo sapien
tccccagctttcagcacattgctgt

SEQ ID NO: 1006306 - DNA, 25 bp, Homo sapien
aggtgtccattgggtccttggttct

SEQ ID NO: 1006307 - DNA, 25 bp, Homo sapien
cattgggtccttggttctttgcttc

SEQ ID NO: 1006308 - DNA, 25 bp, Homo sapien
gccgtcttgaaggaaagcccttcat

SEQ ID NO: 1006309 - DNA, 25 bp, Homo sapien
ccttgatgacatttaagactgcacc

SEQ ID NO: 1006310 - DNA, 25 bp, Homo sapien
gatgacatttaagactgcacccatt

SEQ ID NO: 1006311 - DNA, 25 bp, Homo sapien
ttgatgacatttaagactgcaccca

SEQ ID NO: 1006312 - DNA, 25 bp, Homo sapien
ctccttgatgacatttaagactgca

SEQ ID NO: 1006313 - DNA, 25 bp, Homo sapien
tgttgtagatcttgtcaaaatggct

SEQ ID NO: 1006314 - DNA, 25 bp, Homo sapien
gttgtagatcttgtcaaaatggctg

SEQ ID NO: 1006315 - DNA, 25 bp, Homo sapien
gtgttgtagatcttgtcaaaatggc

SEQ ID NO: 1006316 - DNA, 25 bp, Homo sapien
aggattgttgtctcacgtatcagtg

SEQ ID NO: 1006317 - DNA, 25 bp, Homo sapien
gcggcttgaagtccaaaatcacacc

SEQ ID NO: 1006318 - DNA, 25 bp, Homo sapien
tgaagtccaaaatcacacccgtgca

SEQ ID NO: 1006319 - DNA, 25 bp, Homo sapien
cacccgtgcacatgtaggattgttg

SEQ ID NO: 1006320 - DNA, 25 bp, Homo sapien
tgagagcccagaggtcagctatgct

SEQ ID NO: 1006321 - DNA, 25 bp, Homo sapien
agcccagaggtcagctatgcttccc

SEQ ID NO: 1006322 - DNA, 25 bp, Homo sapien
ttccgccccacattggctgagagcc

SEQ ID NO: 1006323 - DNA, 25 bp, Homo sapien
gctgttcctccttccgccccacatt

SEQ ID NO: 1006324 - DNA, 25 bp, Homo sapien
actctgccatatgcatccataaagg

SEQ ID NO: 1006325 - DNA, 25 bp, Homo sapien
gactctgccatatgcatccataaag

SEQ ID NO: 1006326 - DNA, 25 bp, Homo sapien
ctctgccatatgcatccataaaggc

SEQ ID NO: 1006327 - DNA, 25 bp, Homo sapien
gcagagctgcttccataggcggacc

SEQ ID NO: 1006328 - DNA, 25 bp, Homo sapien
gagcaccggcttgtctcaagaacag

SEQ ID NO: 1006329 - DNA, 25 bp, Homo sapien
cgaccagcctgctcctatagcaatg

SEQ ID NO: 1006330 - DNA, 25 bp, Homo sapien
caagaacaggctactgcatggcacc

SEQ ID NO: 1006331 - DNA, 25 bp, Homo sapien
gcatcaacggctttggtaaggtcaa

SEQ ID NO: 1006332 - DNA, 25 bp, Homo sapien
taatgaagtaaggtcaattgcatgc

SEQ ID NO: 1006333 - DNA, 25 bp, Homo sapien
ttctagccaaattgctgttaattgc

SEQ ID NO: 1006334 - DNA, 25 bp, Homo sapien
attgcatgcaattttattctagcca

SEQ ID NO: 1006335 - DNA, 25 bp, Homo sapien
tcagccgtgcagcctaggtcagtgt

SEQ ID NO: 1006336 - DNA, 25 bp, Homo sapien
cgtgcagcctaggtcagtgtaagga

SEQ ID NO: 1006337 - DNA, 25 bp, Homo sapien
gccgtgcagcctaggtcagtgtaag

SEQ ID NO: 1006338 - DNA, 25 bp, Homo sapien
gaggggatatattacctggacccat

SEQ ID NO: 1006339 - DNA, 25 bp, Homo sapien
gcaagttgtcactgcaagattgatt

SEQ ID NO: 1006340 - DNA, 25 bp, Homo sapien
tgttcctcattttctcggaaaagtc

SEQ ID NO: 1006341 - DNA, 25 bp, Homo sapien
taacaagcagaagctgactaacagc

SEQ ID NO: 1006342 - DNA, 25 bp, Homo sapien
gatttctagtgacaataacaagcag

SEQ ID NO: 1006343 - DNA, 25 bp, Homo sapien
tgttggcagttgatcggtaatttcc

SEQ ID NO: 1006344 - DNA, 25 bp, Homo sapien
gggcggttctcagtcagaaaatacc

SEQ ID NO: 1006345 - DNA, 25 bp, Homo sapien
gtaatttccaccgatgcccctgtac

SEQ ID NO: 1006346 - DNA, 25 bp, Homo sapien
gagcagccgccgcatcttagaattt

SEQ ID NO: 1006347 - DNA, 25 bp, Homo sapien
tagatgcttaaacacgctgctgcct

SEQ ID NO: 1006348 - DNA, 25 bp, Homo sapien
agggtttggcactgttgcgctcgcc

SEQ ID NO: 1006349 - DNA, 25 bp, Homo sapien
ctcctcgacggccttagatgcttaa

SEQ ID NO: 1006350 - DNA, 25 bp, Homo sapien
tcatctctggaccaaggctttcgtt

SEQ ID NO: 1006351 - DNA, 25 bp, Homo sapien
tcctgcatctgacgtgctcttccat

SEQ ID NO: 1006352 - DNA, 25 bp, Homo sapien
ccagtccatcatggtaaattcttgt

SEQ ID NO: 1006353 - DNA, 25 bp, Homo sapien
caccctgaaggtccagactgctgga

SEQ ID NO: 1006354 - DNA, 25 bp, Homo sapien
agactgctggactcttcagccgccg

SEQ ID NO: 1006355 - DNA, 25 bp, Homo sapien
cagtacgcgtgatgaatttcctaga

SEQ ID NO: 1006356 - DNA, 25 bp, Homo sapien
tttagcagtgtctccagagtccctc

SEQ ID NO: 1006357 - DNA, 25 bp, Homo sapien
cctctaatttgcacggaactgaaaa

SEQ ID NO: 1006358 - DNA, 25 bp, Homo sapien
gaactgaaaacttggtctcagcagc

SEQ ID NO: 1006359 - DNA, 25 bp, Homo sapien
tctgctccttgatcgtcacctcggt

SEQ ID NO: 1006360 - DNA, 25 bp, Homo sapien
aaaggaatagcaattgcactgcttg

SEQ ID NO: 1006361 - DNA, 25 bp, Homo sapien
tgcactgcttgtcattctggtcatc

SEQ ID NO: 1006362 - DNA, 25 bp, Homo sapien
taaccctccgcagaggaattggaaa

SEQ ID NO: 1006363 - DNA, 25 bp, Homo sapien
caaggtttaggcctctcccacaggg

SEQ ID NO: 1006364 - DNA, 25 bp, Homo sapien
gtgtccaaggtttaggcctctccca

SEQ ID NO: 1006365 - DNA, 25 bp, Homo sapien
gtccaaggtttaggcctctcccaca

SEQ ID NO: 1006366 - DNA, 25 bp, Homo sapien
agcaaatgttgcaccgctgctcccg

SEQ ID NO: 1006367 - DNA, 25 bp, Homo sapien
aatacagcaatggcttgtgttttgg

SEQ ID NO: 1006368 - DNA, 25 bp, Homo sapien
gcaatacagcaatggcttgtgtttt

SEQ ID NO: 1006369 - DNA, 25 bp, Homo sapien
ctgcaatacagcaatggcttgtgtt

SEQ ID NO: 1006370 - DNA, 25 bp, Homo sapien
tgcaatacagcaatggcttgtgttt

SEQ ID NO: 1006371 - DNA, 25 bp, Homo sapien
gagaagaatctcatgcgcatggtgg

SEQ ID NO: 1006372 - DNA, 25 bp, Homo sapien
atgacgcagacctggaagggcctca

SEQ ID NO: 1006373 - DNA, 25 bp, Homo sapien
tcagtcgttttgtgaaagtggttcc

SEQ ID NO: 1006374 - DNA, 25 bp, Homo sapien
tggagtgccctcctgatgacgcaga

SEQ ID NO: 1006375 - DNA, 25 bp, Homo sapien
atctgcagcggactgactggattgg

SEQ ID NO: 1006376 - DNA, 25 bp, Homo sapien
aaacacagagttgttttggctgctg

SEQ ID NO: 1006377 - DNA, 25 bp, Homo sapien
tgtctactctgatcatgaaacacag

SEQ ID NO: 1006378 - DNA, 25 bp, Homo sapien
gagtgggttctggtattgttcattt

SEQ ID NO: 1006379 - DNA, 25 bp, Homo sapien
tttgtgtatggatgagatgttacca

SEQ ID NO: 1006380 - DNA, 25 bp, Homo sapien
ttgtgtatggatgagatgttaccat

SEQ ID NO: 1006381 - DNA, 25 bp, Homo sapien
ggcttcccaccttcggtatctccca

SEQ ID NO: 1006382 - DNA, 25 bp, Homo sapien
cctgtacaattagtgggtgttatgg

SEQ ID NO: 1006383 - DNA, 25 bp, Homo sapien
tatgggaacgtgcacctctggcttc

SEQ ID NO: 1006384 - DNA, 25 bp, Homo sapien
tatctcccacttcctgtacttgttt

SEQ ID NO: 1006385 - DNA, 25 bp, Homo sapien
tctggggcggggatcgccttcctga

SEQ ID NO: 1006386 - DNA, 25 bp, Homo sapien
ctggggcggggatcgccttcctgat

SEQ ID NO: 1006387 - DNA, 25 bp, Homo sapien
tggggcggggatcgccttcctgatc

SEQ ID NO: 1006388 - DNA, 25 bp, Homo sapien
gggcggggatcgccttcctgatcat

SEQ ID NO: 1006389 - DNA, 25 bp, Homo sapien
tcaaaagttgaggagagttccttga

SEQ ID NO: 1006390 - DNA, 25 bp, Homo sapien
tctactgtcttaatagaaggcaaaa

SEQ ID NO: 1006391 - DNA, 25 bp, Homo sapien
taagtactctctttaatgaccggga

SEQ ID NO: 1006392 - DNA, 25 bp, Homo sapien
gagactgtggaatgttgaaacaaat

SEQ ID NO: 1006393 - DNA, 25 bp, Homo sapien
aaacaaatacttctactgtcttaat

SEQ ID NO: 1006394 - DNA, 25 bp, Homo sapien
tccttccttggctctgcgaaggctc

SEQ ID NO: 1006395 - DNA, 25 bp, Homo sapien
ccttccttggctctgcgaaggctca

SEQ ID NO: 1006396 - DNA, 25 bp, Homo sapien
tttccttccttggctctgcgaaggc

SEQ ID NO: 1006397 - DNA, 25 bp, Homo sapien
cttccttggctctgcgaaggctcat

SEQ ID NO: 1006398 - DNA, 25 bp, Homo sapien
cttatcatcgcatgtgggccaggtt

SEQ ID NO: 1006399 - DNA, 25 bp, Homo sapien
ttgctagcaacatggggtagatcat

SEQ ID NO: 1006400 - DNA, 25 bp, Homo sapien
gtgggccaggttgctagcaacatgg

SEQ ID NO: 1006401 - DNA, 25 bp, Homo sapien
caggttgctagcaacatggggtaga

SEQ ID NO: 1006402 - DNA, 25 bp, Homo sapien
gctagcatccttgaacatacacaaa

SEQ ID NO: 1006403 - DNA, 25 bp, Homo sapien
taaatgtatagcttggctagcatcc

SEQ ID NO: 1006404 - DNA, 25 bp, Homo sapien
gagcctaaaaagtagcctagtatta

SEQ ID NO: 1006405 - DNA, 25 bp, Homo sapien
tgtatctaattagagcagccatgct

SEQ ID NO: 1006406 - DNA, 25 bp, Homo sapien
cacctctgggaaccagttgatccaa

SEQ ID NO: 1006407 - DNA, 25 bp, Homo sapien
ctggacgaaggccttgcacattctc

SEQ ID NO: 1006408 - DNA, 25 bp, Homo sapien
tgtgggggctgctatcagaattgca

SEQ ID NO: 1006409 - DNA, 25 bp, Homo sapien
gatccaagcgttttctgctggacga

SEQ ID NO: 1006410 - DNA, 25 bp, Homo sapien
ggcctgcgtgtgccatttctaccac

SEQ ID NO: 1006411 - DNA, 25 bp, Homo sapien
cagggcctgcgtgtgccatttctac

SEQ ID NO: 1006412 - DNA, 25 bp, Homo sapien
agggcctgcgtgtgccatttctacc

SEQ ID NO: 1006413 - DNA, 25 bp, Homo sapien
gggcctgcgtgtgccatttctacca

SEQ ID NO: 1006414 - DNA, 25 bp, Homo sapien
tgccgccctttctgcatcagcccag

SEQ ID NO: 1006415 - DNA, 25 bp, Homo sapien
tgcagcagcaggaggcgagtctcac

SEQ ID NO: 1006416 - DNA, 25 bp, Homo sapien
catcagcccagtagctgctgcagca

SEQ ID NO: 1006417 - DNA, 25 bp, Homo sapien
cgccctttctgcatcagcccagtag

SEQ ID NO: 1006418 - DNA, 25 bp, Homo sapien
accacccactgagaccagaagctgc

SEQ ID NO: 1006419 - DNA, 25 bp, Homo sapien
gccccttcactgcctggaagtgcat

SEQ ID NO: 1006420 - DNA, 25 bp, Homo sapien
ggcagtggatgaacagcctgtccac

SEQ ID NO: 1006421 - DNA, 25 bp, Homo sapien
ttcagcacgttctccttctgagaag

SEQ ID NO: 1006422 - DNA, 25 bp, Homo sapien
gcatttgttgttggcattgaggtta

SEQ ID NO: 1006423 - DNA, 25 bp, Homo sapien
tatagaccggtggtgcaaagacgag

SEQ ID NO: 1006424 - DNA, 25 bp, Homo sapien
gtgcaaagacgaggccacaagggcc

SEQ ID NO: 1006425 - DNA, 25 bp, Homo sapien
tgaggttatagaccggtggtgcaaa

SEQ ID NO: 1006426 - DNA, 25 bp, Homo sapien
gggaggagagcccaatggctagaat

SEQ ID NO: 1006427 - DNA, 25 bp, Homo sapien
agggaggagagcccaatggctagaa

SEQ ID NO: 1006428 - DNA, 25 bp, Homo sapien
ttgcttgaaaaccatgtttctctga

SEQ ID NO: 1006429 - DNA, 25 bp, Homo sapien
atgtttctctgaactatttggtggt

SEQ ID NO: 1006430 - DNA, 25 bp, Homo sapien
ctttgcttgaaaaccatgtttctct

SEQ ID NO: 1006431 - DNA, 25 bp, Homo sapien
ttctctgaactatttggtggtttca

SEQ ID NO: 1006432 - DNA, 25 bp, Homo sapien
ccatgaagtcctcactccttgacca

SEQ ID NO: 1006433 - DNA, 25 bp, Homo sapien
ataactgcccctcttggtagtcctc

SEQ ID NO: 1006434 - DNA, 25 bp, Homo sapien
ctccatgaagtcctcactccttgac

SEQ ID NO: 1006435 - DNA, 25 bp, Homo sapien
tcaataactgcccctcttggtagtc

SEQ ID NO: 1006436 - DNA, 25 bp, Homo sapien
gtcttctctacatccaactggatgg

SEQ ID NO: 1006437 - DNA, 25 bp, Homo sapien
ctctaagaatttcagcagaatccgg

SEQ ID NO: 1006438 - DNA, 25 bp, Homo sapien
agaatttcagcagaatccgggacat

SEQ ID NO: 1006439 - DNA, 25 bp, Homo sapien
tctaagaatttcagcagaatccggg

SEQ ID NO: 1006440 - DNA, 25 bp, Homo sapien
taagaatttcagcagaatccgggac

SEQ ID NO: 1006441 - DNA, 25 bp, Homo sapien
cgttgggctgatgatgggttagagg

SEQ ID NO: 1006442 - DNA, 25 bp, Homo sapien
attggaccaagaccggtaggcgttg

SEQ ID NO: 1006443 - DNA, 25 bp, Homo sapien
gaccggtaggcgttgggctgatgat

SEQ ID NO: 1006444 - DNA, 25 bp, Homo sapien
tggattggaccaagaccggtaggcg

SEQ ID NO: 1006445 - DNA, 25 bp, Homo sapien
ttttaaggtgtacacaggcccagtg

SEQ ID NO: 1006446 - DNA, 25 bp, Homo sapien
attttaaggtgtacacaggcccagt

SEQ ID NO: 1006447 - DNA, 25 bp, Homo sapien
ggcccagtggacatgtgtcctaaag

SEQ ID NO: 1006448 - DNA, 25 bp, Homo sapien
cacaggcccagtggacatgtgtcct

SEQ ID NO: 1006449 - DNA, 25 bp, Homo sapien
gagaatggaacggtgcccatgagac

SEQ ID NO: 1006450 - DNA, 25 bp, Homo sapien
catgagactgtaggacttcatgacc

SEQ ID NO: 1006451 - DNA, 25 bp, Homo sapien
tggaacggtgcccatgagactgtag

SEQ ID NO: 1006452 - DNA, 25 bp, Homo sapien
gactgtaggacttcatgaccttcag

SEQ ID NO: 1006453 - DNA, 25 bp, Homo sapien
gacgggataacgagcccctgtaggc

SEQ ID NO: 1006454 - DNA, 25 bp, Homo sapien
tccaaaacctggaagatctgagtaa

SEQ ID NO: 1006455 - DNA, 25 bp, Homo sapien
gcactaatgagcagcagtgagctga

SEQ ID NO: 1006456 - DNA, 25 bp, Homo sapien
aggaagacgaagagccagaggactc

SEQ ID NO: 1006457 - DNA, 25 bp, Homo sapien
agcccagagatacggcaggcttttt

SEQ ID NO: 1006458 - DNA, 25 bp, Homo sapien
tagcccagagatacggcaggctttt

SEQ ID NO: 1006459 - DNA, 25 bp, Homo sapien
aatagcccagagatacggcaggctt

SEQ ID NO: 1006460 - DNA, 25 bp, Homo sapien
ccagagatacggcaggctttttgga

SEQ ID NO: 1006461 - DNA, 25 bp, Homo sapien
gacagtgggcttgggtgtttcaaca

SEQ ID NO: 1006462 - DNA, 25 bp, Homo sapien
ccacagttgggttgaggccacagaa

SEQ ID NO: 1006463 - DNA, 25 bp, Homo sapien
atgccccgctccagcatgtcagaga

SEQ ID NO: 1006464 - DNA, 25 bp, Homo sapien
cacagaatccattgcagatgcaggt

SEQ ID NO: 1006465 - DNA, 25 bp, Homo sapien
caggggtccatctggttgggacact

SEQ ID NO: 1006466 - DNA, 25 bp, Homo sapien
ggacgccaggggtccatctggttgg

SEQ ID NO: 1006467 - DNA, 25 bp, Homo sapien
ctgaggggacgccaggggtccatct

SEQ ID NO: 1006468 - DNA, 25 bp, Homo sapien
atcagagttgggttgagaaagcagg

SEQ ID NO: 1006469 - DNA, 25 bp, Homo sapien
taaggcaccttgcaataagctccct

SEQ ID NO: 1006470 - DNA, 25 bp, Homo sapien
tcatctcttcaatgcgaaggttcgt

SEQ ID NO: 1006471 - DNA, 25 bp, Homo sapien
gataatcgcaaggagagccatcaga

SEQ ID NO: 1006472 - DNA, 25 bp, Homo sapien
gaaggttcgtaattgtcacatgcac

SEQ ID NO: 1006473 - DNA, 25 bp, Homo sapien
aggcagggacggataggacttccac

SEQ ID NO: 1006474 - DNA, 25 bp, Homo sapien
ccccgaggcagggacggataggact

SEQ ID NO: 1006475 - DNA, 25 bp, Homo sapien
gcgcccccgaggcagggacggatag

SEQ ID NO: 1006476 - DNA, 25 bp, Homo sapien
gagggaagaagcaacgtgggagggc

SEQ ID NO: 1006477 - DNA, 25 bp, Homo sapien
tcgaaagcagtgaccacatccacac

SEQ ID NO: 1006478 - DNA, 25 bp, Homo sapien
ctcgaaagcagtgaccacatccaca

SEQ ID NO: 1006479 - DNA, 25 bp, Homo sapien
ttactcgaaagcagtgaccacatcc

SEQ ID NO: 1006480 - DNA, 25 bp, Homo sapien
tactcgaaagcagtgaccacatcca

SEQ ID NO: 1006481 - DNA, 25 bp, Homo sapien
gggtgtgtgacgaggcccacagata

SEQ ID NO: 1006482 - DNA, 25 bp, Homo sapien
ccacagatacatgccgatttgcagg

SEQ ID NO: 1006483 - DNA, 25 bp, Homo sapien
acagggtgtgtgacgaggcccacag

SEQ ID NO: 1006484 - DNA, 25 bp, Homo sapien
ggtgtgtgacgaggcccacagatac

SEQ ID NO: 1006485 - DNA, 25 bp, Homo sapien
gtctggggagccatcatcctccaca

SEQ ID NO: 1006486 - DNA, 25 bp, Homo sapien
tgggtctggggagccatcatcctcc

SEQ ID NO: 1006487 - DNA, 25 bp, Homo sapien
actgggtctggggagccatcatcct

SEQ ID NO: 1006488 - DNA, 25 bp, Homo sapien
atcctccacaggagacagcgaccac

SEQ ID NO: 1006489 - DNA, 25 bp, Homo sapien
aagcctgctaggatggtccttgtcc

SEQ ID NO: 1006490 - DNA, 25 bp, Homo sapien
acctccttaaggtgctgtgttccca

SEQ ID NO: 1006491 - DNA, 25 bp, Homo sapien
catcccacctccttaaggtgctgtg

SEQ ID NO: 1006492 - DNA, 25 bp, Homo sapien
gatttcagcctcgaaagtctagctc

SEQ ID NO: 1006493 - DNA, 25 bp, Homo sapien
acttgattcagctcgcgagatattc

SEQ ID NO: 1006494 - DNA, 25 bp, Homo sapien
gatgatagcttgttgtgatacttga

SEQ ID NO: 1006495 - DNA, 25 bp, Homo sapien
gatagcttgttgtgatacttgattc

SEQ ID NO: 1006496 - DNA, 25 bp, Homo sapien
tgatacttgattcagctcgcgagat

SEQ ID NO: 1006497 - DNA, 25 bp, Homo sapien
gatggaaaatctccggcacacggga

SEQ ID NO: 1006498 - DNA, 25 bp, Homo sapien
taagagggccttcgtacggtgcctg

SEQ ID NO: 1006499 - DNA, 25 bp, Homo sapien
cactggcatagtcgtggtgagcgca

SEQ ID NO: 1006500 - DNA, 25 bp, Homo sapien
tcaggccttcacaggttggcagagg

SEQ ID NO: 1006501 - DNA, 25 bp, Homo sapien
ccttcaggtgggcaaacactgcctc

SEQ ID NO: 1006502 - DNA, 25 bp, Homo sapien
ggaactgtagttggcagttactttg

SEQ ID NO: 1006503 - DNA, 25 bp, Homo sapien
tgcctcttgcagacatgttcttgcc

SEQ ID NO: 1006504 - DNA, 25 bp, Homo sapien
aactgtagttggcagttactttgaa

SEQ ID NO: 1006505 - DNA, 25 bp, Homo sapien
gcagactgagcatggcattggaccc

SEQ ID NO: 1006506 - DNA, 25 bp, Homo sapien
cattggacccgatggccttgcttcc

SEQ ID NO: 1006507 - DNA, 25 bp, Homo sapien
cacaaaatagtaaccggcagggctc

SEQ ID NO: 1006508 - DNA, 25 bp, Homo sapien
acggccttccgcagtagttgaattc

SEQ ID NO: 1006509 - DNA, 25 bp, Homo sapien
ggatacaacttttgccatcttcaag

SEQ ID NO: 1006510 - DNA, 25 bp, Homo sapien
ctggatacaacttttgccatcttca

SEQ ID NO: 1006511 - DNA, 25 bp, Homo sapien
gcagccattgaacaccgactgtccc

SEQ ID NO: 1006512 - DNA, 25 bp, Homo sapien
tgtccccggatgtatctttcttttc

SEQ ID NO: 1006513 - DNA, 25 bp, Homo sapien
tctgagcttctattggcactgccaa

SEQ ID NO: 1006514 - DNA, 25 bp, Homo sapien
cctctgagcttctattggcactgcc

SEQ ID NO: 1006515 - DNA, 25 bp, Homo sapien
ggcctctgagcttctattggcactg

SEQ ID NO: 1006516 - DNA, 25 bp, Homo sapien
tgagcttctattggcactgccaaag

SEQ ID NO: 1006517 - DNA, 25 bp, Homo sapien
gggagcgaggctcaatgagctgcag

SEQ ID NO: 1006518 - DNA, 25 bp, Homo sapien
ggagcgaggctcaatgagctgcagc

SEQ ID NO: 1006519 - DNA, 25 bp, Homo sapien
ggggagcgaggctcaatgagctgca

SEQ ID NO: 1006520 - DNA, 25 bp, Homo sapien
gagcgaggctcaatgagctgcagca

SEQ ID NO: 1006521 - DNA, 25 bp, Homo sapien
gcagggaggggcagggcatgcaggc

SEQ ID NO: 1006522 - DNA, 25 bp, Homo sapien
ggaggggcagggcatgcaggcacat

SEQ ID NO: 1006523 - DNA, 25 bp, Homo sapien
cagggaggggcagggcatgcaggca

SEQ ID NO: 1006524 - DNA, 25 bp, Homo sapien
agggaggggcagggcatgcaggcac

SEQ ID NO: 1006525 - DNA, 25 bp, Homo sapien
tgggcttggctgtgaaatgccacca

SEQ ID NO: 1006526 - DNA, 25 bp, Homo sapien
gccccactgcccttagagcctggct

SEQ ID NO: 1006527 - DNA, 25 bp, Homo sapien
atcatgggcagcgtgcctgctgcag

SEQ ID NO: 1006528 - DNA, 25 bp, Homo sapien
ccaccccaggaggatcatgggcagc

SEQ ID NO: 1006529 - DNA, 25 bp, Homo sapien
gctatctcttcaagcctccaagagg

SEQ ID NO: 1006530 - DNA, 25 bp, Homo sapien
gaagaatggtaaggcctggaccttg

SEQ ID NO: 1006531 - DNA, 25 bp, Homo sapien
cacacatgagtagaagcacttcctt

SEQ ID NO: 1006532 - DNA, 25 bp, Homo sapien
tttgtctcaaggagctccccgcctg

SEQ ID NO: 1006533 - DNA, 25 bp, Homo sapien
gtcccgcgccagtgcagattcttta

SEQ ID NO: 1006534 - DNA, 25 bp, Homo sapien
ggcgtttccagggagtactacatca

SEQ ID NO: 1006535 - DNA, 25 bp, Homo sapien
aagaggtaatgactgggcggcccct

SEQ ID NO: 1006536 - DNA, 25 bp, Homo sapien
cagatttcagaagctcgcaggctgg

SEQ ID NO: 1006537 - DNA, 25 bp, Homo sapien
aaggacgcacgtgcaagaccggata

SEQ ID NO: 1006538 - DNA, 25 bp, Homo sapien
gaatagcacagaacgtgtacgtggc

SEQ ID NO: 1006539 - DNA, 25 bp, Homo sapien
gtggagccagttctcaggacaacag

SEQ ID NO: 1006540 - DNA, 25 bp, Homo sapien
cagaggtgcctccttataagtgacc

SEQ ID NO: 1006541 - DNA, 25 bp, Homo sapien
gctcctcggactgctgtatgggaaa

SEQ ID NO: 1006542 - DNA, 25 bp, Homo sapien
gacacataaaattggattgaagcaa

SEQ ID NO: 1006543 - DNA, 25 bp, Homo sapien
cccatcttttgtgagcgtgtaaaac

SEQ ID NO: 1006544 - DNA, 25 bp, Homo sapien
ggatcactttcaagttccctggaca

SEQ ID NO: 1006545 - DNA, 25 bp, Homo sapien
aggagtccccgcatagacctctgaa

SEQ ID NO: 1006546 - DNA, 25 bp, Homo sapien
cgtctggtggttgtactggccacat

SEQ ID NO: 1006547 - DNA, 25 bp, Homo sapien
atagacctctgaaccatggaccgcg

SEQ ID NO: 1006548 - DNA, 25 bp, Homo sapien
catggaccgcgtctggtggttgtac

SEQ ID NO: 1006549 - DNA, 25 bp, Homo sapien
gaggcactggtctcctacaataagc

SEQ ID NO: 1006550 - DNA, 25 bp, Homo sapien
caggttctccaagggttacagctga

SEQ ID NO: 1006551 - DNA, 25 bp, Homo sapien
tacagctgaggcgtcgagatgacct

SEQ ID NO: 1006552 - DNA, 25 bp, Homo sapien
gcacctgggatgatcatgtcagcag

SEQ ID NO: 1006553 - DNA, 25 bp, Homo sapien
cagatcggaagtaactgctccctcc

SEQ ID NO: 1006554 - DNA, 25 bp, Homo sapien
gactttgcgcttgatgaagaagcag

SEQ ID NO: 1006555 - DNA, 25 bp, Homo sapien
taacctgatgctccactgtctccgt

SEQ ID NO: 1006556 - DNA, 25 bp, Homo sapien
tccagtccacgtgtagactttgcgc

SEQ ID NO: 1006557 - DNA, 25 bp, Homo sapien
tatttacatccgtccttacaaccat

SEQ ID NO: 1006558 - DNA, 25 bp, Homo sapien
gacagccaatagcacccattaaaag

SEQ ID NO: 1006559 - DNA, 25 bp, Homo sapien
cccactcagctatgctagggcttgg

SEQ ID NO: 1006560 - DNA, 25 bp, Homo sapien
cttggctgtaggtgtgcactgtcta

SEQ ID NO: 1006561 - DNA, 25 bp, Homo sapien
cactgtggccgatctggactctaga

SEQ ID NO: 1006562 - DNA, 25 bp, Homo sapien
tatccacatgagctctgaacgtccg

SEQ ID NO: 1006563 - DNA, 25 bp, Homo sapien
catttgtgaaaggaccaacgtgctg

SEQ ID NO: 1006564 - DNA, 25 bp, Homo sapien
caatgggcctgaacgactacaaagc

SEQ ID NO: 1006565 - DNA, 25 bp, Homo sapien
gcagacgggcagccttccagggctg

SEQ ID NO: 1006566 - DNA, 25 bp, Homo sapien
agacgggcagccttccagggctgct

SEQ ID NO: 1006567 - DNA, 25 bp, Homo sapien
cagacgggcagccttccagggctgc

SEQ ID NO: 1006568 - DNA, 25 bp, Homo sapien
tcatgagctcagtgagtcgagttct

SEQ ID NO: 1006569 - DNA, 25 bp, Homo sapien
tccatgtgtaaaccacaagcatagg

SEQ ID NO: 1006570 - DNA, 25 bp, Homo sapien
ccacaagcataggtacggtagtata

SEQ ID NO: 1006571 - DNA, 25 bp, Homo sapien
gagtcgagttctgttagcttccatg

SEQ ID NO: 1006572 - DNA, 25 bp, Homo sapien
cagacagcctgcaccctgctttcat

SEQ ID NO: 1006573 - DNA, 25 bp, Homo sapien
acagagggatggagccgcagcagac

SEQ ID NO: 1006574 - DNA, 25 bp, Homo sapien
gaccggccgaccaccctgagtgtgg

SEQ ID NO: 1006575 - DNA, 25 bp, Homo sapien
ccacctggaggcgaagaccagaccg

SEQ ID NO: 1006576 - DNA, 25 bp, Homo sapien
accacacctggctaatttttatatt

SEQ ID NO: 1006577 - DNA, 25 bp, Homo sapien
cacacctggctaatttttatatttt

SEQ ID NO: 1006578 - DNA, 25 bp, Homo sapien
ggaactacagatgtgcgccaccaca

SEQ ID NO: 1006579 - DNA, 25 bp, Homo sapien
tatatttttatagagacgggctttc

SEQ ID NO: 1006580 - DNA, 25 bp, Homo sapien
tgtctgggaatgcacagtccagccc

SEQ ID NO: 1006581 - DNA, 25 bp, Homo sapien
gtctgggaatgcacagtccagccca

SEQ ID NO: 1006582 - DNA, 25 bp, Homo sapien
aacatccataatttagagatagcaa

SEQ ID NO: 1006583 - DNA, 25 bp, Homo sapien
tccataatttagagatagcaaggtc

SEQ ID NO: 1006584 - DNA, 25 bp, Homo sapien
tgtgggcaagatatcaatataaaag

SEQ ID NO: 1006585 - DNA, 25 bp, Homo sapien
tatttaaaatgtgggcaagatatca

SEQ ID NO: 1006586 - DNA, 25 bp, Homo sapien
tatttctagttgaagtcccgtaaca

SEQ ID NO: 1006587 - DNA, 25 bp, Homo sapien
cctaatgtgggctcttaaagtcata

SEQ ID NO: 1006588 - DNA, 25 bp, Homo sapien
gcaccgcaggagtcgacatgcacgg

SEQ ID NO: 1006589 - DNA, 25 bp, Homo sapien
caagagcatgtgaaggaagcgcagc

SEQ ID NO: 1006590 - DNA, 25 bp, Homo sapien
gaaaccaagggttccaacattcatc

SEQ ID NO: 1006591 - DNA, 25 bp, Homo sapien
cagtttcagagacacccttgaagga

SEQ ID NO: 1006592 - DNA, 25 bp, Homo sapien
aggtatccaccatgcggccagaact

SEQ ID NO: 1006593 - DNA, 25 bp, Homo sapien
ttacccattcaaaccagtcgctctg

SEQ ID NO: 1006594 - DNA, 25 bp, Homo sapien
caccacaaatagctgactcctactt

SEQ ID NO: 1006595 - DNA, 25 bp, Homo sapien
ggagcaggtagtgacctctgcaatt

SEQ ID NO: 1006596 - DNA, 25 bp, Homo sapien
tcctacttatacctgcaggagcagg

SEQ ID NO: 1006597 - DNA, 25 bp, Homo sapien
ctctgcaattctaaaccgtccactt

SEQ ID NO: 1006598 - DNA, 25 bp, Homo sapien
gctctttagcgttaagaggaaaatg

SEQ ID NO: 1006599 - DNA, 25 bp, Homo sapien
tattataaccataagctctttagcg

SEQ ID NO: 1006600 - DNA, 25 bp, Homo sapien
tatcaaggtcttctgtctactatta

SEQ ID NO: 1006601 - DNA, 25 bp, Homo sapien
tctctcagtgatatcaaggtcttct

SEQ ID NO: 1006602 - DNA, 25 bp, Homo sapien
ctctgcaatgggaaacggaagtgga

SEQ ID NO: 1006603 - DNA, 25 bp, Homo sapien
gaagcagtcctatcccaaacacaaa

SEQ ID NO: 1006604 - DNA, 25 bp, Homo sapien
ccctgcttaaggaaaggtccactga

SEQ ID NO: 1006605 - DNA, 25 bp, Homo sapien
tccactgaggttgacactggtcaga

SEQ ID NO: 1006606 - DNA, 25 bp, Homo sapien
gattcatagtccagcgtttgagtga

SEQ ID NO: 1006607 - DNA, 25 bp, Homo sapien
gcactccagtcagaacgaactctgc

SEQ ID NO: 1006608 - DNA, 25 bp, Homo sapien
tccagcgtttgagtgagcactccag

SEQ ID NO: 1006609 - DNA, 25 bp, Homo sapien
agaacgaactctgcattgtgaacat

SEQ ID NO: 1006610 - DNA, 25 bp, Homo sapien
gcaaaatattctcggcataaatgaa

SEQ ID NO: 1006611 - DNA, 25 bp, Homo sapien
ggcaaaatattctcggcataaatga

SEQ ID NO: 1006612 - DNA, 25 bp, Homo sapien
ctggcaaaatattctcggcataaat

SEQ ID NO: 1006613 - DNA, 25 bp, Homo sapien
tggcaaaatattctcggcataaatg

SEQ ID NO: 1006614 - DNA, 25 bp, Homo sapien
acagggcaatgacggactcgctggc

SEQ ID NO: 1006615 - DNA, 25 bp, Homo sapien
atgacggactcgctggcggactcca

SEQ ID NO: 1006616 - DNA, 25 bp, Homo sapien
tgtgatacagggcaatgacggactc

SEQ ID NO: 1006617 - DNA, 25 bp, Homo sapien
cgaacgctgaatgtgatacagggca

SEQ ID NO: 1006618 - DNA, 25 bp, Homo sapien
gatggctgcttggataacacctttc

SEQ ID NO: 1006619 - DNA, 25 bp, Homo sapien
catgagcttccggaaagatggctgc

SEQ ID NO: 1006620 - DNA, 25 bp, Homo sapien
tttcctcctgcacactctacgattg

SEQ ID NO: 1006621 - DNA, 25 bp, Homo sapien
tctacgattgccttcatagtggaaa

SEQ ID NO: 1006622 - DNA, 25 bp, Homo sapien
ttcaccacacttatctgcccagcaa

SEQ ID NO: 1006623 - DNA, 25 bp, Homo sapien
atatttcaccacacttatctgccca

SEQ ID NO: 1006624 - DNA, 25 bp, Homo sapien
ctccatattatttgaactcagagca

SEQ ID NO: 1006625 - DNA, 25 bp, Homo sapien
ttctccatattatttgaactcagag

SEQ ID NO: 1006626 - DNA, 25 bp, Homo sapien
ccttgagcaggtccgtgtgttatgc

SEQ ID NO: 1006627 - DNA, 25 bp, Homo sapien
gagcaggtccgtgtgttatgcttac

SEQ ID NO: 1006628 - DNA, 25 bp, Homo sapien
cccttgagcaggtccgtgtgttatg

SEQ ID NO: 1006629 - DNA, 25 bp, Homo sapien
ttgagcaggtccgtgtgttatgctt

SEQ ID NO: 1006630 - DNA, 25 bp, Homo sapien
cttaaagagtggagaaacgtgtgcc

SEQ ID NO: 1006631 - DNA, 25 bp, Homo sapien
tgtgcccgttttaaggattcttcca

SEQ ID NO: 1006632 - DNA, 25 bp, Homo sapien
cgttttaaggattcttccaagctga

SEQ ID NO: 1006633 - DNA, 25 bp, Homo sapien
aaagagtggagaaacgtgtgcccgt

SEQ ID NO: 1006634 - DNA, 25 bp, Homo sapien
tatatacactaactcctcaaggact

SEQ ID NO: 1006635 - DNA, 25 bp, Homo sapien
cgcagatctcaggttaaaatctcca

SEQ ID NO: 1006636 - DNA, 25 bp, Homo sapien
tctccagtcctagaaagacaagctt

SEQ ID NO: 1006637 - DNA, 25 bp, Homo sapien
tgaaaaatatgaaccctcttcccat

SEQ ID NO: 1006638 - DNA, 25 bp, Homo sapien
cagggttatgttaccttagtagtag

SEQ ID NO: 1006639 - DNA, 25 bp, Homo sapien
gtagcaatgtaaagactcaacctga

SEQ ID NO: 1006640 - DNA, 25 bp, Homo sapien
gctaagacgatcctgtcacagatga

SEQ ID NO: 1006641 - DNA, 25 bp, Homo sapien
cacagatgagacattgagattttgg

SEQ ID NO: 1006642 - DNA, 25 bp, Homo sapien
tgacgcactggggacaccaaccctg

SEQ ID NO: 1006643 - DNA, 25 bp, Homo sapien
gacgcactggggacaccaaccctgc

SEQ ID NO: 1006644 - DNA, 25 bp, Homo sapien
tgcacttctgtgcagactccgcaac

SEQ ID NO: 1006645 - DNA, 25 bp, Homo sapien
tatgtgcttcacgacagaaatcgcc

SEQ ID NO: 1006646 - DNA, 25 bp, Homo sapien
agaaatcgccgtcaggaacttcacg

SEQ ID NO: 1006647 - DNA, 25 bp, Homo sapien
gaacttcacggtgcgagtcactttg

SEQ ID NO: 1006648 - DNA, 25 bp, Homo sapien
acctggacaggctcgaatccagtga

SEQ ID NO: 1006649 - DNA, 25 bp, Homo sapien
tagtgggaggtggtacgtcttcaat

SEQ ID NO: 1006650 - DNA, 25 bp, Homo sapien
gctcgaatccagtgaaaagcacaaa

SEQ ID NO: 1006651 - DNA, 25 bp, Homo sapien
cacaaaaggggtcaattctggagtt

SEQ ID NO: 1006652 - DNA, 25 bp, Homo sapien
tcagtttgggaggtagtcttatact

SEQ ID NO: 1006653 - DNA, 25 bp, Homo sapien
tggacattagctacttcattctgtt

SEQ ID NO: 1006654 - DNA, 25 bp, Homo sapien
gctggacattagctacttcattctg

SEQ ID NO: 1006655 - DNA, 25 bp, Homo sapien
tttcagtttgggaggtagtcttata

SEQ ID NO: 1006656 - DNA, 25 bp, Homo sapien
gcagacacttttaagggaactctcc

SEQ ID NO: 1006657 - DNA, 25 bp, Homo sapien
ctgcagacacttttaagggaactct

SEQ ID NO: 1006658 - DNA, 25 bp, Homo sapien
cagacacttttaagggaactctcca

SEQ ID NO: 1006659 - DNA, 25 bp, Homo sapien
tgcagacacttttaagggaactctc

SEQ ID NO: 1006660 - DNA, 25 bp, Homo sapien
gaagaatgtcgccaagccactgggc

SEQ ID NO: 1006661 - DNA, 25 bp, Homo sapien
tagcgactatactgaatctgcctca

SEQ ID NO: 1006662 - DNA, 25 bp, Homo sapien
tggatcctgcagactgaatgccgtg

SEQ ID NO: 1006663 - DNA, 25 bp, Homo sapien
cactgggcgttgacacagggtatcc

SEQ ID NO: 1006664 - DNA, 25 bp, Homo sapien
gctgcggcatagataacccgtatat

SEQ ID NO: 1006665 - DNA, 25 bp, Homo sapien
ttggcacctgccaaataagccatta

SEQ ID NO: 1006666 - DNA, 25 bp, Homo sapien
gataacccgtatatttggcacctgc

SEQ ID NO: 1006667 - DNA, 25 bp, Homo sapien
ggactgtgttgctgcggcatagata

SEQ ID NO: 1006668 - DNA, 25 bp, Homo sapien
gtgtgcagtaacacatctctttctt

SEQ ID NO: 1006669 - DNA, 25 bp, Homo sapien
taagactgtgtttaaccagtgtgca

SEQ ID NO: 1006670 - DNA, 25 bp, Homo sapien
gaagtgaagggctcggtgcggcggt

SEQ ID NO: 1006671 - DNA, 25 bp, Homo sapien
tcggtgcggcggtaccattttcttc

SEQ ID NO: 1006672 - DNA, 25 bp, Homo sapien
acagtgccgccatgtgcctggatta

SEQ ID NO: 1006673 - DNA, 25 bp, Homo sapien
aaggtgcgtgcatcgactcgtgaag

SEQ ID NO: 1006674 - DNA, 25 bp, Homo sapien
acgcgctgctgacttgactctcaca

SEQ ID NO: 1006675 - DNA, 25 bp, Homo sapien
tgacttgactctcacagagaaggtg

SEQ ID NO: 1006676 - DNA, 25 bp, Homo sapien
tgaggcacaggacaaaaccacaggt

SEQ ID NO: 1006677 - DNA, 25 bp, Homo sapien
caaaagacaccataacgctgcgggt

SEQ ID NO: 1006678 - DNA, 25 bp, Homo sapien
tttctgacccacgaccaaactgaga

SEQ ID NO: 1006679 - DNA, 25 bp, Homo sapien
gaacaatggaatgcactccagggct

SEQ ID NO: 1006680 - DNA, 25 bp, Homo sapien
tgcactggaggctcccgaaatcacc

SEQ ID NO: 1006681 - DNA, 25 bp, Homo sapien
cagttttctctaccagcattgtgaa

SEQ ID NO: 1006682 - DNA, 25 bp, Homo sapien
ttttcaacctgagggcacatggcct

SEQ ID NO: 1006683 - DNA, 25 bp, Homo sapien
aatgttcccagttgccttatcatgg

SEQ ID NO: 1006684 - DNA, 25 bp, Homo sapien
tgttaatcaaaatgcccgtcacaca

SEQ ID NO: 1006685 - DNA, 25 bp, Homo sapien
gaatgcagctaagtgaacacagtta

SEQ ID NO: 1006686 - DNA, 25 bp, Homo sapien
gagaaaactgatgcccagaaaagtg

SEQ ID NO: 1006687 - DNA, 25 bp, Homo sapien
cagtttcacaattgggctggaagaa

SEQ ID NO: 1006688 - DNA, 25 bp, Homo sapien
atctgctctggataatccgcaattg

SEQ ID NO: 1006689 - DNA, 25 bp, Homo sapien
ggataatccgcaattgcaaacacac

SEQ ID NO: 1006690 - DNA, 25 bp, Homo sapien
aaacacacatcccaataagaagcct

SEQ ID NO: 1006691 - DNA, 25 bp, Homo sapien
aacacacatcccaataagaagcctt

SEQ ID NO: 1006692 - DNA, 25 bp, Homo sapien
gatcatgtccaaaaagctgatgctg

SEQ ID NO: 1006693 - DNA, 25 bp, Homo sapien
tggatcatgtccaaaaagctgatgc

SEQ ID NO: 1006694 - DNA, 25 bp, Homo sapien
gctggatcatgtccaaaaagctgat

SEQ ID NO: 1006695 - DNA, 25 bp, Homo sapien
ggatcatgtccaaaaagctgatgct

SEQ ID NO: 1006696 - DNA, 25 bp, Homo sapien
aggtggaacctgatgctgcagcgcc

SEQ ID NO: 1006697 - DNA, 25 bp, Homo sapien
cctgatgctgcagcgcctgtgacgt

SEQ ID NO: 1006698 - DNA, 25 bp, Homo sapien
tggaacctgatgctgcagcgcctgt

SEQ ID NO: 1006699 - DNA, 25 bp, Homo sapien
aacctgatgctgcagcgcctgtgac

SEQ ID NO: 1006700 - DNA, 25 bp, Homo sapien
ctgctgctggtgcatgcgctggagc

SEQ ID NO: 1006701 - DNA, 25 bp, Homo sapien
tcaagtgtggcgctgtctgactttg

SEQ ID NO: 1006702 - DNA, 25 bp, Homo sapien
ctgctggtgcatgcgctggagctgc

SEQ ID NO: 1006703 - DNA, 25 bp, Homo sapien
tggcgctgtctgactttgcatctgc

SEQ ID NO: 1006704 - DNA, 25 bp, Homo sapien
ctgctgtggaggatgcaactgttgc

SEQ ID NO: 1006705 - DNA, 25 bp, Homo sapien
tgctgtggaggatgcaactgttgct

SEQ ID NO: 1006706 - DNA, 25 bp, Homo sapien
ctgctgagggcgatgcagctgctgt

SEQ ID NO: 1006707 - DNA, 25 bp, Homo sapien
ttgctgtgaaaactgatgcggatgg

SEQ ID NO: 1006708 - DNA, 25 bp, Homo sapien
tgctgtgaaaactgatgcggatggg

SEQ ID NO: 1006709 - DNA, 25 bp, Homo sapien
ctgtgaaaactgatgcggatgggct

SEQ ID NO: 1006710 - DNA, 25 bp, Homo sapien
gctgtgaaaactgatgcggatgggc

SEQ ID NO: 1006711 - DNA, 25 bp, Homo sapien
ctgtgaaaatggatgcggcggctgc

SEQ ID NO: 1006712 - DNA, 25 bp, Homo sapien
gctgaaggtgtaaaaccgggtgctg

SEQ ID NO: 1006713 - DNA, 25 bp, Homo sapien
ggggtaaggttgctgagagatctgc

SEQ ID NO: 1006714 - DNA, 25 bp, Homo sapien
tgaaggtgtaaaaccgggtgctgct

SEQ ID NO: 1006715 - DNA, 25 bp, Homo sapien
cagcactgcattggcatttgtatgt

SEQ ID NO: 1006716 - DNA, 25 bp, Homo sapien
acttggctaaacagcactgcattgg

SEQ ID NO: 1006717 - DNA, 25 bp, Homo sapien
cacttggctaaacagcactgcattg

SEQ ID NO: 1006718 - DNA, 25 bp, Homo sapien
ttcacttggctaaacagcactgcat

SEQ ID NO: 1006719 - DNA, 25 bp, Homo sapien
tctaaatttttcgtaggtgctgaaa

SEQ ID NO: 1006720 - DNA, 25 bp, Homo sapien
cgtaggtgctgaaagagtctgtaag

SEQ ID NO: 1006721 - DNA, 25 bp, Homo sapien
tttcgtaggtgctgaaagagtctgt

SEQ ID NO: 1006722 - DNA, 25 bp, Homo sapien
aaatttttcgtaggtgctgaaagag

SEQ ID NO: 1006723 - DNA, 25 bp, Homo sapien
catttcctcttgtcttacagcccag

SEQ ID NO: 1006724 - DNA, 25 bp, Homo sapien
ttcctcttgtcttacagcccagagt

SEQ ID NO: 1006725 - DNA, 25 bp, Homo sapien
cccatttcctcttgtcttacagccc

SEQ ID NO: 1006726 - DNA, 25 bp, Homo sapien
acagctgccacttcccatttcctct

SEQ ID NO: 1006727 - DNA, 25 bp, Homo sapien
gtaatattcctcagtgtccgtacag

SEQ ID NO: 1006728 - DNA, 25 bp, Homo sapien
tgtgctacatttgatggccggttca

SEQ ID NO: 1006729 - DNA, 25 bp, Homo sapien
cagtgtccgtacagctggactccag

SEQ ID NO: 1006730 - DNA, 25 bp, Homo sapien
catctgctgaatgtcagcattatta

SEQ ID NO: 1006731 - DNA, 25 bp, Homo sapien
tttggaggttttgtccagcagccat

SEQ ID NO: 1006732 - DNA, 25 bp, Homo sapien
ctttggaggttttgtccagcagcca

SEQ ID NO: 1006733 - DNA, 25 bp, Homo sapien
tctctcctgtttttccggtgatgaa

SEQ ID NO: 1006734 - DNA, 25 bp, Homo sapien
agctaactgtgggacttcggccggg

SEQ ID NO: 1006735 - DNA, 25 bp, Homo sapien
tggcacacaagttaatcaacccagg

SEQ ID NO: 1006736 - DNA, 25 bp, Homo sapien
ctgtttttccggtgatgaatctgaa

SEQ ID NO: 1006737 - DNA, 25 bp, Homo sapien
ttcagtgttggatttaggtgaaaac

SEQ ID NO: 1006738 - DNA, 25 bp, Homo sapien
tgttggatttaggtgaaaactgctg

SEQ ID NO: 1006739 - DNA, 25 bp, Homo sapien
agacccttcttgagagctggcaggg

SEQ ID NO: 1006740 - DNA, 25 bp, Homo sapien
agctggcagggcttgacttctcatc

SEQ ID NO: 1006741 - DNA, 25 bp, Homo sapien
ctgagaatcttgttcctcattttct

SEQ ID NO: 1006742 - DNA, 25 bp, Homo sapien
agaatcttgttcctcattttctact

SEQ ID NO: 1006743 - DNA, 25 bp, Homo sapien
tgttcctcattttctacttcctcct

SEQ ID NO: 1006744 - DNA, 25 bp, Homo sapien
ttgttcctcattttctacttcctcc

SEQ ID NO: 1006745 - DNA, 25 bp, Homo sapien
taatcagacgaggatgataaaatgc

SEQ ID NO: 1006746 - DNA, 25 bp, Homo sapien
cataaataatcagacgaggatgata

SEQ ID NO: 1006747 - DNA, 25 bp, Homo sapien
ttcctcttcataaataatcagacga

SEQ ID NO: 1006748 - DNA, 25 bp, Homo sapien
tgataaaatgcttcgtcctttttgg

SEQ ID NO: 1006749 - DNA, 25 bp, Homo sapien
aatacttgctcgctttaaagcacat

SEQ ID NO: 1006750 - DNA, 25 bp, Homo sapien
cagaacccagtcaggagtcacaatt

SEQ ID NO: 1006751 - DNA, 25 bp, Homo sapien
cccagtcaggagtcacaattttaat

SEQ ID NO: 1006752 - DNA, 25 bp, Homo sapien
gtcacaattttaatacttgctcgct

SEQ ID NO: 1006753 - DNA, 25 bp, Homo sapien
tattgagggttagctggcaatctcc

SEQ ID NO: 1006754 - DNA, 25 bp, Homo sapien
atagaacgtaaccaaagcccacagg

SEQ ID NO: 1006755 - DNA, 25 bp, Homo sapien
ggcaatctcccccatagaacgtaac

SEQ ID NO: 1006756 - DNA, 25 bp, Homo sapien
caatcaaatgcgtgcatttcttatt

SEQ ID NO: 1006757 - DNA, 25 bp, Homo sapien
caatctgtgcatggctatattttca

SEQ ID NO: 1006758 - DNA, 25 bp, Homo sapien
tcactttagtaatatactgcaacaa

SEQ ID NO: 1006759 - DNA, 25 bp, Homo sapien
caggaagaactagtatgccattcca

SEQ ID NO: 1006760 - DNA, 25 bp, Homo sapien
aagaaggcttttaccatacatttca

SEQ ID NO: 1006761 - DNA, 25 bp, Homo sapien
gattcaaatcatgacctagccaggc

SEQ ID NO: 1006762 - DNA, 25 bp, Homo sapien
caaggcacatgggtaggcagtcaag

SEQ ID NO: 1006763 - DNA, 25 bp, Homo sapien
gagatctttcacagcacctagtaca

SEQ ID NO: 1006764 - DNA, 25 bp, Homo sapien
caggagcagaggactagaatttcaa

SEQ ID NO: 1006765 - DNA, 25 bp, Homo sapien
ggaagactccaacaaagagctccag

SEQ ID NO: 1006766 - DNA, 25 bp, Homo sapien
cagcacattacaacagaggcctcag

SEQ ID NO: 1006767 - DNA, 25 bp, Homo sapien
tctgtgcttcccaacttctgctgga

SEQ ID NO: 1006768 - DNA, 25 bp, Homo sapien
tcagcctgcatcaataccgggtcag

SEQ ID NO: 1006769 - DNA, 25 bp, Homo sapien
ataatctttggcatccaccatggga

SEQ ID NO: 1006770 - DNA, 25 bp, Homo sapien
tcgccaatcaggctcctccctattt

SEQ ID NO: 1006771 - DNA, 25 bp, Homo sapien
aatgacataatctttggcatccacc

SEQ ID NO: 1006772 - DNA, 25 bp, Homo sapien
tcaggctcctccctatttcccagct

SEQ ID NO: 1006773 - DNA, 25 bp, Homo sapien
gtatacagtgagtgctggcttctca

SEQ ID NO: 1006774 - DNA, 25 bp, Homo sapien
tatacagtgagtgctggcttctcac

SEQ ID NO: 1006775 - DNA, 25 bp, Homo sapien
aggtatacagtgagtgctggcttct

SEQ ID NO: 1006776 - DNA, 25 bp, Homo sapien
ctggcacagggaggtatacagtgag

SEQ ID NO: 1006777 - DNA, 25 bp, Homo sapien
gctgagtcccatctgttgctaagtc

SEQ ID NO: 1006778 - DNA, 25 bp, Homo sapien
ctgctgagtcccatctgttgctaag

SEQ ID NO: 1006779 - DNA, 25 bp, Homo sapien
gtccccaatacctgctgagtcccat

SEQ ID NO: 1006780 - DNA, 25 bp, Homo sapien
gagtcccatctgttgctaagtccca

SEQ ID NO: 1006781 - DNA, 25 bp, Homo sapien
aaggcaggcagtgattccaaaaaaa

SEQ ID NO: 1006782 - DNA, 25 bp, Homo sapien
aaaaaatctgacatgattctggaga

SEQ ID NO: 1006783 - DNA, 25 bp, Homo sapien
aaatctgacatgattctggagaaaa

SEQ ID NO: 1006784 - DNA, 25 bp, Homo sapien
tctgacatgattctggagaaaaacc

SEQ ID NO: 1006785 - DNA, 25 bp, Homo sapien
caggaactaatttccttcaactctt

SEQ ID NO: 1006786 - DNA, 25 bp, Homo sapien
tggagttgctaaagttctacacatc

SEQ ID NO: 1006787 - DNA, 25 bp, Homo sapien
gagaataaatgacctggaacaacaa

SEQ ID NO: 1006788 - DNA, 25 bp, Homo sapien
aatattagaacttctgagttggagt

SEQ ID NO: 1006789 - DNA, 25 bp, Homo sapien
gaaatatccctcatctagctagcac

SEQ ID NO: 1006790 - DNA, 25 bp, Homo sapien
ccagttcccggcctagagttacttg

SEQ ID NO: 1006791 - DNA, 25 bp, Homo sapien
aaaagctgaagagaaccggagctcc

SEQ ID NO: 1006792 - DNA, 25 bp, Homo sapien
tgaatgctccatgaacgaacaatgc

SEQ ID NO: 1006793 - DNA, 25 bp, Homo sapien
ttccacactgaacggacagaatcac

SEQ ID NO: 1006794 - DNA, 25 bp, Homo sapien
gttccacactgaacggacagaatca

SEQ ID NO: 1006795 - DNA, 25 bp, Homo sapien
aagagttccacactgaacggacaga

SEQ ID NO: 1006796 - DNA, 25 bp, Homo sapien
gagttccacactgaacggacagaat

SEQ ID NO: 1006797 - DNA, 25 bp, Homo sapien
gctagtgcattgtaggaaacttcct

SEQ ID NO: 1006798 - DNA, 25 bp, Homo sapien
gcttttccagccttgagaagctgaa

SEQ ID NO: 1006799 - DNA, 25 bp, Homo sapien
atcctctgagattatgtgtgaggct

SEQ ID NO: 1006800 - DNA, 25 bp, Homo sapien
ttacaacaggtaagtcaaagacttc

SEQ ID NO: 1006801 - DNA, 25 bp, Homo sapien
aaatatgagtctccgcccttccagg

SEQ ID NO: 1006802 - DNA, 25 bp, Homo sapien
tgtctactttgcaccccagtggaga

SEQ ID NO: 1006803 - DNA, 25 bp, Homo sapien
tacaaggacgaacctcaagaaggcc

SEQ ID NO: 1006804 - DNA, 25 bp, Homo sapien
tagcttcacgcatccattcgactgg

SEQ ID NO: 1006805 - DNA, 25 bp, Homo sapien
tgcgggtcgatgtcgcccaccgcgt

SEQ ID NO: 1006806 - DNA, 25 bp, Homo sapien
ccgcgtaatacttgacctccctgaa

SEQ ID NO: 1006807 - DNA, 25 bp, Homo sapien
ggtcctgcgaatcggggtccgctcc

SEQ ID NO: 1006808 - DNA, 25 bp, Homo sapien
tgggcgcctggtccgacatgatcgc

SEQ ID NO: 1006809 - DNA, 25 bp, Homo sapien
caggaggtaaacaacgcacatttaa

SEQ ID NO: 1006810 - DNA, 25 bp, Homo sapien
tgttggttcgttgatcagcatgcaa

SEQ ID NO: 1006811 - DNA, 25 bp, Homo sapien
taatcaggtgactacagttttgtcc

SEQ ID NO: 1006812 - DNA, 25 bp, Homo sapien
tgaactctggctcttgttaatcagg

SEQ ID NO: 1006813 - DNA, 25 bp, Homo sapien
ttgcaggcacaaacaggccatagtt

SEQ ID NO: 1006814 - DNA, 25 bp, Homo sapien
tagttgaaggagaaactgcgaactc

SEQ ID NO: 1006815 - DNA, 25 bp, Homo sapien
agggtcagaatactccagttgcagg

SEQ ID NO: 1006816 - DNA, 25 bp, Homo sapien
ccatagtttagttgaaggagaaact

SEQ ID NO: 1006817 - DNA, 25 bp, Homo sapien
agctgccaccagtgtcatgtagcta

SEQ ID NO: 1006818 - DNA, 25 bp, Homo sapien
gccaccagtgtcatgtagctattca

SEQ ID NO: 1006819 - DNA, 25 bp, Homo sapien
catgtagctattcagtgtcggaaaa

SEQ ID NO: 1006820 - DNA, 25 bp, Homo sapien
cagtgtcatgtagctattcagtgtc

SEQ ID NO: 1006821 - DNA, 25 bp, Homo sapien
gggaatccgtattcgctcaccgact

SEQ ID NO: 1006822 - DNA, 25 bp, Homo sapien
tatcgaaggtattctctgctggcaa

SEQ ID NO: 1006823 - DNA, 25 bp, Homo sapien
ttcctgtaagcaagaccaagtgtct

SEQ ID NO: 1006824 - DNA, 25 bp, Homo sapien
tggcaaatgatttatggcgctggct

SEQ ID NO: 1006825 - DNA, 25 bp, Homo sapien
ttgtacaccgtagcccgagcacact

SEQ ID NO: 1006826 - DNA, 25 bp, Homo sapien
accgtagcccgagcacactaggccc

SEQ ID NO: 1006827 - DNA, 25 bp, Homo sapien
ctttgtacaccgtagcccgagcaca

SEQ ID NO: 1006828 - DNA, 25 bp, Homo sapien
cgtagcccgagcacactaggcccat

SEQ ID NO: 1006829 - DNA, 25 bp, Homo sapien
tcatagagatccattgaggcccgcc

SEQ ID NO: 1006830 - DNA, 25 bp, Homo sapien
taagaggtgacaacccaggaaggta

SEQ ID NO: 1006831 - DNA, 25 bp, Homo sapien
tgtcagtcagattgaatgaggccct

SEQ ID NO: 1006832 - DNA, 25 bp, Homo sapien
tcagaggtaccatatggcagacggg

SEQ ID NO: 1006833 - DNA, 25 bp, Homo sapien
cagcatctggaacgtgacggccata

SEQ ID NO: 1006834 - DNA, 25 bp, Homo sapien
catcacgcgccacatggaatacacg

SEQ ID NO: 1006835 - DNA, 25 bp, Homo sapien
gccagctttggatcgcgtgcgacgt

SEQ ID NO: 1006836 - DNA, 25 bp, Homo sapien
gcaagtgcgtctccaacgtcatgat

SEQ ID NO: 1006837 - DNA, 25 bp, Homo sapien
tccatggtgttaccagtgttaccag

SEQ ID NO: 1006838 - DNA, 25 bp, Homo sapien
tcagcatccgtggtgtctccagtgg

SEQ ID NO: 1006839 - DNA, 25 bp, Homo sapien
gaacagcatccatggtgtcaccagt

SEQ ID NO: 1006840 - DNA, 25 bp, Homo sapien
catccacagtgtgaacgacatccac

SEQ ID NO: 1006841 - DNA, 25 bp, Homo sapien
ccactgtcagctgattaaatggctc

SEQ ID NO: 1006842 - DNA, 25 bp, Homo sapien
tcaaactcattatcccttctgtcat

SEQ ID NO: 1006843 - DNA, 25 bp, Homo sapien
tagcagtctcgggtgctgtggtcca

SEQ ID NO: 1006844 - DNA, 25 bp, Homo sapien
gggctgggcactgatggttcactgg

SEQ ID NO: 1006845 - DNA, 25 bp, Homo sapien
agggaagagagtcggtgccccattg

SEQ ID NO: 1006846 - DNA, 25 bp, Homo sapien
gaagggaagagagtcggtgccccat

SEQ ID NO: 1006847 - DNA, 25 bp, Homo sapien
aagagagtcggtgccccattggttt

SEQ ID NO: 1006848 - DNA, 25 bp, Homo sapien
ggaagagagtcggtgccccattggt

SEQ ID NO: 1006849 - DNA, 25 bp, Homo sapien
gtttggccaccgacgggctcactgt

SEQ ID NO: 1006850 - DNA, 25 bp, Homo sapien
caccgttaaggtgcaatgggtcctt

SEQ ID NO: 1006851 - DNA, 25 bp, Homo sapien
tgtcacctcaccgagggtgcctctg

SEQ ID NO: 1006852 - DNA, 25 bp, Homo sapien
tgcgacaagtcagtttccacgtaga

SEQ ID NO: 1006853 - DNA, 25 bp, Homo sapien
cctgctccttaagatagttggatgt

SEQ ID NO: 1006854 - DNA, 25 bp, Homo sapien
taagatagttggatgtttttcccac

SEQ ID NO: 1006855 - DNA, 25 bp, Homo sapien
ctctcacttcgctttcttcatcctt

SEQ ID NO: 1006856 - DNA, 25 bp, Homo sapien
ccttcctgctccttaagatagttgg

SEQ ID NO: 1006857 - DNA, 25 bp, Homo sapien
caatgaagtcccctatcacgggcag

SEQ ID NO: 1006858 - DNA, 25 bp, Homo sapien
gccttgcttagaagagcccgagagc

SEQ ID NO: 1006859 - DNA, 25 bp, Homo sapien
taaatggaatctaagactgaacgaa

SEQ ID NO: 1006860 - DNA, 25 bp, Homo sapien
actgaacgaatccccagctgggtgc

SEQ ID NO: 1006861 - DNA, 25 bp, Homo sapien
gctttagggagcattatataattgt

SEQ ID NO: 1006862 - DNA, 25 bp, Homo sapien
ggctttcttaggacgacaacagtat

SEQ ID NO: 1006863 - DNA, 25 bp, Homo sapien
agtataagatggactccaggctctc

SEQ ID NO: 1006864 - DNA, 25 bp, Homo sapien
tataattgtacactggctcaggctt

SEQ ID NO: 1006865 - DNA, 25 bp, Homo sapien
cgggttgggtatcttccttctccat

SEQ ID NO: 1006866 - DNA, 25 bp, Homo sapien
tcaaatttttgtgcacattttgcac

SEQ ID NO: 1006867 - DNA, 25 bp, Homo sapien
tctgttagttatcttccccagtccc

SEQ ID NO: 1006868 - DNA, 25 bp, Homo sapien
tgctgagggatctgtttgtggagct

SEQ ID NO: 1006869 - DNA, 25 bp, Homo sapien
gtcccattttgcctggacattggct

SEQ ID NO: 1006870 - DNA, 25 bp, Homo sapien
cttccggtctcatgggtcgctgcct

SEQ ID NO: 1006871 - DNA, 25 bp, Homo sapien
gctggtcccaccaataggactaaag

SEQ ID NO: 1006872 - DNA, 25 bp, Homo sapien
tggctggccgctgccagtgccgtca

SEQ ID NO: 1006873 - DNA, 25 bp, Homo sapien
aaggctcccggctaagtctcttccg

SEQ ID NO: 1006874 - DNA, 25 bp, Homo sapien
gctggaggcatcctctagcaagcca

SEQ ID NO: 1006875 - DNA, 25 bp, Homo sapien
gcatcctctagcaagccacgtgttt

SEQ ID NO: 1006876 - DNA, 25 bp, Homo sapien
ctagcaagccacgtgttttggatgc

SEQ ID NO: 1006877 - DNA, 25 bp, Homo sapien
ccacgtgttttggatgcctgcatcc

SEQ ID NO: 1006878 - DNA, 25 bp, Homo sapien
gcaaaaatgtccaatctacacctac

SEQ ID NO: 1006879 - DNA, 25 bp, Homo sapien
ccgcaaaagagaatggcaaaaatgt

SEQ ID NO: 1006880 - DNA, 25 bp, Homo sapien
gaatggcaaaaatgtccaatctaca

SEQ ID NO: 1006881 - DNA, 25 bp, Homo sapien
caccgcaaaagagaatggcaaaaat

SEQ ID NO: 1006882 - DNA, 25 bp, Homo sapien
tgatgtgcaccacagggatttggaa

SEQ ID NO: 1006883 - DNA, 25 bp, Homo sapien
gttctttagaagtctctgcatgatg

SEQ ID NO: 1006884 - DNA, 25 bp, Homo sapien
atgcagctgacctgggggagtcaca

SEQ ID NO: 1006885 - DNA, 25 bp, Homo sapien
atgtgcaccacagggatttggaaga

SEQ ID NO: 1006886 - DNA, 25 bp, Homo sapien
gcagcagggacgtgctgggcatgtt

SEQ ID NO: 1006887 - DNA, 25 bp, Homo sapien
caaaggctgcagcagggacgtgctg

SEQ ID NO: 1006888 - DNA, 25 bp, Homo sapien
ggctgcagcagggacgtgctgggca

SEQ ID NO: 1006889 - DNA, 25 bp, Homo sapien
aaaggctgcagcagggacgtgctgg

SEQ ID NO: 1006890 - DNA, 25 bp, Homo sapien
tcagcacagacatagtttccttggg

SEQ ID NO: 1006891 - DNA, 25 bp, Homo sapien
ctatgctggtaataccctttccagt

SEQ ID NO: 1006892 - DNA, 25 bp, Homo sapien
agaagtcagcacagacatagtttcc

SEQ ID NO: 1006893 - DNA, 25 bp, Homo sapien
atgctggtaataccctttccagtgc

SEQ ID NO: 1006894 - DNA, 25 bp, Homo sapien
tcagctaatgcaatggtcagccctg

SEQ ID NO: 1006895 - DNA, 25 bp, Homo sapien
gctaatgcaatggtcagccctgatg

SEQ ID NO: 1006896 - DNA, 25 bp, Homo sapien
cagctaatgcaatggtcagccctga

SEQ ID NO: 1006897 - DNA, 25 bp, Homo sapien
aatgcaatggtcagccctgatgtgc

SEQ ID NO: 1006898 - DNA, 25 bp, Homo sapien
ctggcagcacggaaggcctcctcat

SEQ ID NO: 1006899 - DNA, 25 bp, Homo sapien
ctcctcatgagctttctggagtgtt

SEQ ID NO: 1006900 - DNA, 25 bp, Homo sapien
gggctggcagcacggaaggcctcct

SEQ ID NO: 1006901 - DNA, 25 bp, Homo sapien
acggaaggcctcctcatgagctttc

SEQ ID NO: 1006902 - DNA, 25 bp, Homo sapien
aggcctgactgtcacgggcacctac

SEQ ID NO: 1006903 - DNA, 25 bp, Homo sapien
ctgccagtgacctcgcagcagctgc

SEQ ID NO: 1006904 - DNA, 25 bp, Homo sapien
gcataaccctgccagtgacctcgca

SEQ ID NO: 1006905 - DNA, 25 bp, Homo sapien
aggcccgcgctgcaagggagccaca

SEQ ID NO: 1006906 - DNA, 25 bp, Homo sapien
ccaggcccgcgctgcaagggagcca

SEQ ID NO: 1006907 - DNA, 25 bp, Homo sapien
tcctcggcggtcatcactattcagt

SEQ ID NO: 1006908 - DNA, 25 bp, Homo sapien
tgggctttgtcggacaccacacaaa

SEQ ID NO: 1006909 - DNA, 25 bp, Homo sapien
gcttgtcctcccataaagggtcaga

SEQ ID NO: 1006910 - DNA, 25 bp, Homo sapien
tatggttttgcacaactcctcggcg

SEQ ID NO: 1006911 - DNA, 25 bp, Homo sapien
tctgtgattctctggcagtctgggc

SEQ ID NO: 1006912 - DNA, 25 bp, Homo sapien
tgggcactgtcacacaagagcactg

SEQ ID NO: 1006913 - DNA, 25 bp, Homo sapien
gaaaccgcagaaacccacaaggatg

SEQ ID NO: 1006914 - DNA, 25 bp, Homo sapien
ggtgagcagatgttctttactgggc

SEQ ID NO: 1006915 - DNA, 25 bp, Homo sapien
tatgcaggccatggcgaacaagcac

SEQ ID NO: 1006916 - DNA, 25 bp, Homo sapien
taatcatcctgacaactccgggtgg

SEQ ID NO: 1006917 - DNA, 25 bp, Homo sapien
tacacagtggcttcatatccagcgc

SEQ ID NO: 1006918 - DNA, 25 bp, Homo sapien
tgtagtcatgacagcctcgcggaaa

SEQ ID NO: 1006919 - DNA, 25 bp, Homo sapien
gaccagcagcatagtggtgcagctc

SEQ ID NO: 1006920 - DNA, 25 bp, Homo sapien
atttccagttcctctggttggagag

SEQ ID NO: 1006921 - DNA, 25 bp, Homo sapien
gtgctattgtatagttccacatgac

SEQ ID NO: 1006922 - DNA, 25 bp, Homo sapien
gagccaagtggcaacagtaaagagg

SEQ ID NO: 1006923 - DNA, 25 bp, Homo sapien
tttcagcgttcccagtgggacggta

SEQ ID NO: 1006924 - DNA, 25 bp, Homo sapien
gacggaagtgcacgtattccacctt

SEQ ID NO: 1006925 - DNA, 25 bp, Homo sapien
ccaccttggctggtaccagtggtca

SEQ ID NO: 1006926 - DNA, 25 bp, Homo sapien
gctcagggagttgttctttatgttc

SEQ ID NO: 1006927 - DNA, 25 bp, Homo sapien
acaggcatgactacgcaggaaggca

SEQ ID NO: 1006928 - DNA, 25 bp, Homo sapien
ggcagaggatcgctgtgggccggag

SEQ ID NO: 1006929 - DNA, 25 bp, Homo sapien
gaatcactcagtgctgtgtcacgtg

SEQ ID NO: 1006930 - DNA, 25 bp, Homo sapien
ccggacgtttttccttgagtgacag

SEQ ID NO: 1006931 - DNA, 25 bp, Homo sapien
tcatgccacggccttggtgcaggca

SEQ ID NO: 1006932 - DNA, 25 bp, Homo sapien
ggcattcctggcaggcgtcacgtcc

SEQ ID NO: 1006933 - DNA, 25 bp, Homo sapien
tcacgtcccctttggcggcagattg

SEQ ID NO: 1006934 - DNA, 25 bp, Homo sapien
ggtgcaggcaccacatgatctacta

SEQ ID NO: 1006935 - DNA, 25 bp, Homo sapien
tcatgccctgtgcagaacacgtgag

SEQ ID NO: 1006936 - DNA, 25 bp, Homo sapien
tctgggatgccttccatggagcggc

SEQ ID NO: 1006937 - DNA, 25 bp, Homo sapien
tttgggaatcttgaacactcatggg

SEQ ID NO: 1006938 - DNA, 25 bp, Homo sapien
cactcatgggaagattgataggctt

SEQ ID NO: 1006939 - DNA, 25 bp, Homo sapien
acgggaaacgtgttgtcagctgtga

SEQ ID NO: 1006940 - DNA, 25 bp, Homo sapien
tcacacgggaaacgtgttgtcagct

SEQ ID NO: 1006941 - DNA, 25 bp, Homo sapien
ggggtggagataattgccatgagcc

SEQ ID NO: 1006942 - DNA, 25 bp, Homo sapien
cacgggaaacgtgttgtcagctgtg

SEQ ID NO: 1006943 - DNA, 25 bp, Homo sapien
tcctcataagaacgcagtagtaatt

SEQ ID NO: 1006944 - DNA, 25 bp, Homo sapien
ggttcgcgaccgtgatctgctgaca

SEQ ID NO: 1006945 - DNA, 25 bp, Homo sapien
tctgctgacaggttggacaggcact

SEQ ID NO: 1006946 - DNA, 25 bp, Homo sapien
taccaagacgttagatgctgcaaag

SEQ ID NO: 1006947 - DNA, 25 bp, Homo sapien
acagcctgctccgaagatcagggca

SEQ ID NO: 1006948 - DNA, 25 bp, Homo sapien
gtaaggacaagggacaaaagcgcag

SEQ ID NO: 1006949 - DNA, 25 bp, Homo sapien
tgcggtttcaaccagtccttcagaa

SEQ ID NO: 1006950 - DNA, 25 bp, Homo sapien
cacttagaagaacgctgcggtttca

SEQ ID NO: 1006951 - DNA, 25 bp, Homo sapien
gggtggtgagcaatgtctggaggag

SEQ ID NO: 1006952 - DNA, 25 bp, Homo sapien
ggtgagcaatgtctggaggaggcga

SEQ ID NO: 1006953 - DNA, 25 bp, Homo sapien
cgatgctgtggcagctgttcccgca

SEQ ID NO: 1006954 - DNA, 25 bp, Homo sapien
ccaggggtggtgagcaatgtctgga

SEQ ID NO: 1006955 - DNA, 25 bp, Homo sapien
tcagtgagcaccgtcccaagaaaga

SEQ ID NO: 1006956 - DNA, 25 bp, Homo sapien
ccgtcagtgagcaccgtcccaagaa

SEQ ID NO: 1006957 - DNA, 25 bp, Homo sapien
tgagcaccgtcccaagaaagaggac

SEQ ID NO: 1006958 - DNA, 25 bp, Homo sapien
catggggcccgtcagtgagcaccgt

SEQ ID NO: 1006959 - DNA, 25 bp, Homo sapien
tcttccaaacaagtacgctcatttt

SEQ ID NO: 1006960 - DNA, 25 bp, Homo sapien
cactccaggttctggaattaaggtc

SEQ ID NO: 1006961 - DNA, 25 bp, Homo sapien
aggttctggaattaaggtcaggtgt

SEQ ID NO: 1006962 - DNA, 25 bp, Homo sapien
actccaggttctggaattaaggtca

SEQ ID NO: 1006963 - DNA, 25 bp, Homo sapien
ggtcctcgggatcctcctggaatct

SEQ ID NO: 1006964 - DNA, 25 bp, Homo sapien
ctcgggatcctcctggaatctcttc

SEQ ID NO: 1006965 - DNA, 25 bp, Homo sapien
tcctcgggatcctcctggaatctct

SEQ ID NO: 1006966 - DNA, 25 bp, Homo sapien
gggtcctcgggatcctcctggaatc

SEQ ID NO: 1006967 - DNA, 25 bp, Homo sapien
catctatggggttccatatactctg

SEQ ID NO: 1006968 - DNA, 25 bp, Homo sapien
tatggggttccatatactctgtctc

SEQ ID NO: 1006969 - DNA, 25 bp, Homo sapien
tggggttccatatactctgtctccc

SEQ ID NO: 1006970 - DNA, 25 bp, Homo sapien
cagttgcatctatggggttccatat

SEQ ID NO: 1006971 - DNA, 25 bp, Homo sapien
aagagatagtaaagaaactgtcttt

SEQ ID NO: 1006972 - DNA, 25 bp, Homo sapien
aaagagatagtaaagaaactgtctt

SEQ ID NO: 1006973 - DNA, 25 bp, Homo sapien
ggtggaattggccacgcagacggcc

SEQ ID NO: 1006974 - DNA, 25 bp, Homo sapien
ccccattttcacatacggcaaaatt

SEQ ID NO: 1006975 - DNA, 25 bp, Homo sapien
attgagtgggtggaattggccacgc

SEQ ID NO: 1006976 - DNA, 25 bp, Homo sapien
cggcaaaattaggagctgtgctatg

SEQ ID NO: 1006977 - DNA, 25 bp, Homo sapien
gagtgtcaccttgattccacagcca

SEQ ID NO: 1006978 - DNA, 25 bp, Homo sapien
tggaatgttccggagagacctaagg

SEQ ID NO: 1006979 - DNA, 25 bp, Homo sapien
tgctcaaagaggaacgcacacaggc

SEQ ID NO: 1006980 - DNA, 25 bp, Homo sapien
gccagtggagtaccagggacatctt

SEQ ID NO: 1006981 - DNA, 25 bp, Homo sapien
gcagctgaaatgtcctggcagtaac

SEQ ID NO: 1006982 - DNA, 25 bp, Homo sapien
gtcactgcgtggtctgcaaatagca

SEQ ID NO: 1006983 - DNA, 25 bp, Homo sapien
aatgggtcactgcgtggtctgcaaa

SEQ ID NO: 1006984 - DNA, 25 bp, Homo sapien
cgaatgggtcactgcgtggtctgca

SEQ ID NO: 1006985 - DNA, 25 bp, Homo sapien
gggtcactgcgtggtctgcaaatag

SEQ ID NO: 1006986 - DNA, 25 bp, Homo sapien
atgctgcgctgagtgaagatcttca

SEQ ID NO: 1006987 - DNA, 25 bp, Homo sapien
tgctgcgctgagtgaagatcttcat

SEQ ID NO: 1006988 - DNA, 25 bp, Homo sapien
gatgctgcgctgagtgaagatcttc

SEQ ID NO: 1006989 - DNA, 25 bp, Homo sapien
gtcttccctcttgagcttggtgaac

SEQ ID NO: 1006990 - DNA, 25 bp, Homo sapien
cacttgtcttccctcttgagcttgg

SEQ ID NO: 1006991 - DNA, 25 bp, Homo sapien
cttgtcttccctcttgagcttggtg

SEQ ID NO: 1006992 - DNA, 25 bp, Homo sapien
tgtcttccctcttgagcttggtgaa

SEQ ID NO: 1006993 - DNA, 25 bp, Homo sapien
ctgcgtgtgccaaacacggttgtga

SEQ ID NO: 1006994 - DNA, 25 bp, Homo sapien
gtgtgccaaacacggttgtgagctc

SEQ ID NO: 1006995 - DNA, 25 bp, Homo sapien
tgcgtgtgccaaacacggttgtgag

SEQ ID NO: 1006996 - DNA, 25 bp, Homo sapien
tgccaaacacggttgtgagctccca

SEQ ID NO: 1006997 - DNA, 25 bp, Homo sapien
cagggcaccggcaaggacaggcaaa

SEQ ID NO: 1006998 - DNA, 25 bp, Homo sapien
tcgttgactgaattcacggagagca

SEQ ID NO: 1006999 - DNA, 25 bp, Homo sapien
tgaattcacggagagcagagactgc

SEQ ID NO: 1007000 - DNA, 25 bp, Homo sapien
gacaggcaaagcctcgttgactgaa

SEQ ID NO: 1007001 - DNA, 25 bp, Homo sapien
tgccccattgcttcacggacgatgc

SEQ ID NO: 1007002 - DNA, 25 bp, Homo sapien
atgcgtgccgacagcacactctcgg

SEQ ID NO: 1007003 - DNA, 25 bp, Homo sapien
tatgacgatgcacaaaacagcgatg

SEQ ID NO: 1007004 - DNA, 25 bp, Homo sapien
cagcgatgcataggttgaagtaagg

SEQ ID NO: 1007005 - DNA, 25 bp, Homo sapien
aatcctcagatacaggagcaagctg

SEQ ID NO: 1007006 - DNA, 25 bp, Homo sapien
tcagctggtatcactgttaaagcag

SEQ ID NO: 1007007 - DNA, 25 bp, Homo sapien
gttaaagcagaattcctactgtaaa

SEQ ID NO: 1007008 - DNA, 25 bp, Homo sapien
tgtgacacgtgctgattcgggacca

SEQ ID NO: 1007009 - DNA, 25 bp, Homo sapien
tggggcatcgatctatgaacacatc

SEQ ID NO: 1007010 - DNA, 25 bp, Homo sapien
tgcaacaaccagcatgtcaaagacc

SEQ ID NO: 1007011 - DNA, 25 bp, Homo sapien
tgtcaaagacctgtccactgagaaa

SEQ ID NO: 1007012 - DNA, 25 bp, Homo sapien
gtgccaaccaatgcttccctgcctg

SEQ ID NO: 1007013 - DNA, 25 bp, Homo sapien
tctgctgtgtttgaatacctttaat

SEQ ID NO: 1007014 - DNA, 25 bp, Homo sapien
tcacagctgatcgagtaaatctgct

SEQ ID NO: 1007015 - DNA, 25 bp, Homo sapien
gctgtaaccacaattttaccttgag

SEQ ID NO: 1007016 - DNA, 25 bp, Homo sapien
tgtgtttgaatacctttaattgctg

SEQ ID NO: 1007017 - DNA, 25 bp, Homo sapien
gacagggcgatcttaccttcttaaa

SEQ ID NO: 1007018 - DNA, 25 bp, Homo sapien
ccttcttaaatgcacgtagagctca

SEQ ID NO: 1007019 - DNA, 25 bp, Homo sapien
tcctcgcatcccagacaatgcaggg

SEQ ID NO: 1007020 - DNA, 25 bp, Homo sapien
tcagtgtttcgtattagaagtgtgc

SEQ ID NO: 1007021 - DNA, 25 bp, Homo sapien
gaatttgtatctttcccagagacat

SEQ ID NO: 1007022 - DNA, 25 bp, Homo sapien
aatttgtatctttcccagagacatg

SEQ ID NO: 1007023 - DNA, 25 bp, Homo sapien
atttgtatctttcccagagacatga

SEQ ID NO: 1007024 - DNA, 25 bp, Homo sapien
ttgcttctggatcgcaatggcctgg

SEQ ID NO: 1007025 - DNA, 25 bp, Homo sapien
tctgatttgccgaattctctcagct

SEQ ID NO: 1007026 - DNA, 25 bp, Homo sapien
tgaggaggggttgtcattttgttct

SEQ ID NO: 1007027 - DNA, 25 bp, Homo sapien
tctttgcttctggatcgcaatggcc

SEQ ID NO: 1007028 - DNA, 25 bp, Homo sapien
tcagaaaccccctgtgatggttgat

SEQ ID NO: 1007029 - DNA, 25 bp, Homo sapien
gaaaccccctgtgatggttgatact

SEQ ID NO: 1007030 - DNA, 25 bp, Homo sapien
cagaaaccccctgtgatggttgata

SEQ ID NO: 1007031 - DNA, 25 bp, Homo sapien
aaccccctgtgatggttgatactga

SEQ ID NO: 1007032 - DNA, 25 bp, Homo sapien
tcaccgtaggtctatggtacaccca

SEQ ID NO: 1007033 - DNA, 25 bp, Homo sapien
gactggtgaagctaagtgcctttcc

SEQ ID NO: 1007034 - DNA, 25 bp, Homo sapien
tgtgaagtgacgacccactgtggtt

SEQ ID NO: 1007035 - DNA, 25 bp, Homo sapien
tactagtgcctgttccatgtcaccg

SEQ ID NO: 1007036 - DNA, 25 bp, Homo sapien
gctccttagagtccttgtcgccagc

SEQ ID NO: 1007037 - DNA, 25 bp, Homo sapien
aaacaacaggcaaggggaagtcacg

SEQ ID NO: 1007038 - DNA, 25 bp, Homo sapien
tcgtcacgaacaccgcacggtcctg

SEQ ID NO: 1007039 - DNA, 25 bp, Homo sapien
agctccttagagtccttgtcgccag

SEQ ID NO: 1007040 - DNA, 25 bp, Homo sapien
ggaggtgaatggaagccacggtctt

SEQ ID NO: 1007041 - DNA, 25 bp, Homo sapien
gtgaatggaagccacggtcttcccg

SEQ ID NO: 1007042 - DNA, 25 bp, Homo sapien
aggtgaatggaagccacggtcttcc

SEQ ID NO: 1007043 - DNA, 25 bp, Homo sapien
gaggtgaatggaagccacggtcttc

SEQ ID NO: 1007044 - DNA, 25 bp, Homo sapien
ggcctcagccagaccgtccgctgca

SEQ ID NO: 1007045 - DNA, 25 bp, Homo sapien
ctactactcagcagacggggggacc

SEQ ID NO: 1007046 - DNA, 25 bp, Homo sapien
gcacaaataccaagcgtgcgctgct

SEQ ID NO: 1007047 - DNA, 25 bp, Homo sapien
tcgggccatcctgatctccagtctg

SEQ ID NO: 1007048 - DNA, 25 bp, Homo sapien
gaacatgacgtgtccgatcaacacg

SEQ ID NO: 1007049 - DNA, 25 bp, Homo sapien
aacatgacgtgtccgatcaacacgg

SEQ ID NO: 1007050 - DNA, 25 bp, Homo sapien
gagaacgcgactgcagctctccctg

SEQ ID NO: 1007051 - DNA, 25 bp, Homo sapien
ggccatgcctccgagaacgcgactg

SEQ ID NO: 1007052 - DNA, 25 bp, Homo sapien
cagaaccggagctccatacgcgggc

SEQ ID NO: 1007053 - DNA, 25 bp, Homo sapien
acagaaccggagctccatacgcggg

SEQ ID NO: 1007054 - DNA, 25 bp, Homo sapien
tacagaaccggagctccatacgcgg

SEQ ID NO: 1007055 - DNA, 25 bp, Homo sapien
ctacagaaccggagctccatacgcg

SEQ ID NO: 1007056 - DNA, 25 bp, Homo sapien
tagtaattctctgtaaggagatgac

SEQ ID NO: 1007057 - DNA, 25 bp, Homo sapien
tctgtaaggagatgacgagtgacca

SEQ ID NO: 1007058 - DNA, 25 bp, Homo sapien
tagagtcaccatactctcataatct

SEQ ID NO: 1007059 - DNA, 25 bp, Homo sapien
ctctcataatctacactgttttaat

SEQ ID NO: 1007060 - DNA, 25 bp, Homo sapien
ttacgacacgcggtgcatggcatgg

SEQ ID NO: 1007061 - DNA, 25 bp, Homo sapien
catggcacatggtcggcatggtaga

SEQ ID NO: 1007062 - DNA, 25 bp, Homo sapien
tattaagatacaacctgaaccacaa

SEQ ID NO: 1007063 - DNA, 25 bp, Homo sapien
tagatgctgggttgctgccacaccc

SEQ ID NO: 1007064 - DNA, 25 bp, Homo sapien
ccccagacatgattggtctctgtct

SEQ ID NO: 1007065 - DNA, 25 bp, Homo sapien
tcacaggacccccagacatgattgg

SEQ ID NO: 1007066 - DNA, 25 bp, Homo sapien
caggacccccagacatgattggtct

SEQ ID NO: 1007067 - DNA, 25 bp, Homo sapien
gacccccagacatgattggtctctg

SEQ ID NO: 1007068 - DNA, 25 bp, Homo sapien
gagtccactgttggctgtggaatct

SEQ ID NO: 1007069 - DNA, 25 bp, Homo sapien
gttgtcccatcagccgcagcgtggg

SEQ ID NO: 1007070 - DNA, 25 bp, Homo sapien
tctgaggatgagtccactgttggct

SEQ ID NO: 1007071 - DNA, 25 bp, Homo sapien
gctgtggaatctggttgtcccatca

SEQ ID NO: 1007072 - DNA, 25 bp, Homo sapien
ggtgcctctatgactccaggatctt

SEQ ID NO: 1007073 - DNA, 25 bp, Homo sapien
cattcccacgggacatcttggtcgg

SEQ ID NO: 1007074 - DNA, 25 bp, Homo sapien
cagagccacagggtgcctctatgac

SEQ ID NO: 1007075 - DNA, 25 bp, Homo sapien
gtgtaagtgcaacagccacagagcc

SEQ ID NO: 1007076 - DNA, 25 bp, Homo sapien
tgcagagcagctggataggtcgcta

SEQ ID NO: 1007077 - DNA, 25 bp, Homo sapien
tattgtcatgaggtatgcacctgcc

SEQ ID NO: 1007078 - DNA, 25 bp, Homo sapien
ttagcaagccaactagctcaaggaa

SEQ ID NO: 1007079 - DNA, 25 bp, Homo sapien
tacaaatgacgggaaacaaagccag

SEQ ID NO: 1007080 - DNA, 25 bp, Homo sapien
cacacctggataaaccagttattga

SEQ ID NO: 1007081 - DNA, 25 bp, Homo sapien
tcgggtctcacacacctggataaac

SEQ ID NO: 1007082 - DNA, 25 bp, Homo sapien
tctcacacacctggataaaccagtt

SEQ ID NO: 1007083 - DNA, 25 bp, Homo sapien
ctgcttatcgggtctcacacacctg

SEQ ID NO: 1007084 - DNA, 25 bp, Homo sapien
tctctaggcgtgagcaaaggccaca

SEQ ID NO: 1007085 - DNA, 25 bp, Homo sapien
gatgctcggaatttcgcccctaaag

SEQ ID NO: 1007086 - DNA, 25 bp, Homo sapien
taattgaatgggtgactgccccgca

SEQ ID NO: 1007087 - DNA, 25 bp, Homo sapien
gactcacgtttctaagcctgcaggg

SEQ ID NO: 1007088 - DNA, 25 bp, Homo sapien
tctcggccaggtacgcggccggctg

SEQ ID NO: 1007089 - DNA, 25 bp, Homo sapien
tcgcgggcgggctttggtcgcgcag

SEQ ID NO: 1007090 - DNA, 25 bp, Homo sapien
tgctgctcgctgtgagcgcgggtcc

SEQ ID NO: 1007091 - DNA, 25 bp, Homo sapien
aggccgggcaggctcacgtgatgcg

SEQ ID NO: 1007092 - DNA, 25 bp, Homo sapien
tctcttccccgaggaggtgatcgcc

SEQ ID NO: 1007093 - DNA, 25 bp, Homo sapien
gcgtgtgaccgatgcccagattgca

SEQ ID NO: 1007094 - DNA, 25 bp, Homo sapien
gattgcacgaccacttctggagctg

SEQ ID NO: 1007095 - DNA, 25 bp, Homo sapien
tgatcaacgtttccgtgtccgggcc

SEQ ID NO: 1007096 - DNA, 25 bp, Homo sapien
acatctagaaatggttggaggaaac

SEQ ID NO: 1007097 - DNA, 25 bp, Homo sapien
tgttctcgtatcttaaaactggagg

SEQ ID NO: 1007098 - DNA, 25 bp, Homo sapien
tatatgtcaaggctttttaaatcgg

SEQ ID NO: 1007099 - DNA, 25 bp, Homo sapien
tggtggaggtagaaatttcacaaca

SEQ ID NO: 1007100 - DNA, 25 bp, Homo sapien
ttcgtggtgcgtgttttctcccagg

SEQ ID NO: 1007101 - DNA, 25 bp, Homo sapien
gcattcgtggtgcgtgttttctccc

SEQ ID NO: 1007102 - DNA, 25 bp, Homo sapien
tcgtggtgcgtgttttctcccaggg

SEQ ID NO: 1007103 - DNA, 25 bp, Homo sapien
cattcgtggtgcgtgttttctccca

SEQ ID NO: 1007104 - DNA, 25 bp, Homo sapien
gagattccgaggctcagttcagcac

SEQ ID NO: 1007105 - DNA, 25 bp, Homo sapien
gatgacgagagtgaagttgttgaca

SEQ ID NO: 1007106 - DNA, 25 bp, Homo sapien
cagtctgaaggtgaagagattccga

SEQ ID NO: 1007107 - DNA, 25 bp, Homo sapien
gatccagggtaatttgaggtctgtg

SEQ ID NO: 1007108 - DNA, 25 bp, Homo sapien
caagagtaagctgcaaactgccaac

SEQ ID NO: 1007109 - DNA, 25 bp, Homo sapien
tgccaacagcaatcaagcctgtcct

SEQ ID NO: 1007110 - DNA, 25 bp, Homo sapien
gttgctgtttgtagcttcaagtcct

SEQ ID NO: 1007111 - DNA, 25 bp, Homo sapien
caagtcctttctcaagagtaagctg

SEQ ID NO: 1007112 - DNA, 25 bp, Homo sapien
ggcctctgtcgaccagggattctaa

SEQ ID NO: 1007113 - DNA, 25 bp, Homo sapien
tcagcacattagtgaacagggagtc

SEQ ID NO: 1007114 - DNA, 25 bp, Homo sapien
agtttgtatagaaccctcccagtgt

SEQ ID NO: 1007115 - DNA, 25 bp, Homo sapien
caccattaggcaacactgctggaag

SEQ ID NO: 1007116 - DNA, 25 bp, Homo sapien
gatgagtaatctccgtcattgctga

SEQ ID NO: 1007117 - DNA, 25 bp, Homo sapien
gagtaatctccgtcattgctgaagg

SEQ ID NO: 1007118 - DNA, 25 bp, Homo sapien
atctccgtcattgctgaaggtgagg

SEQ ID NO: 1007119 - DNA, 25 bp, Homo sapien
tttctggatgagtaatctccgtcat

SEQ ID NO: 1007120 - DNA, 25 bp, Homo sapien
taatctatttagatcgggctgactg

SEQ ID NO: 1007121 - DNA, 25 bp, Homo sapien
tggaagaaaatctgactgtggatta

SEQ ID NO: 1007122 - DNA, 25 bp, Homo sapien
ctgtggattatgacaaagattatct

SEQ ID NO: 1007123 - DNA, 25 bp, Homo sapien
tcaaaaccaccgattctgagagcaa

SEQ ID NO: 1007124 - DNA, 25 bp, Homo sapien
cctcccgtggcagtttgtgtagaca

SEQ ID NO: 1007125 - DNA, 25 bp, Homo sapien
aggaacttgcctgtgagcgctggtc

SEQ ID NO: 1007126 - DNA, 25 bp, Homo sapien
cagtgctgcctggaggaaactcggc

SEQ ID NO: 1007127 - DNA, 25 bp, Homo sapien
cccgcagttttgtgtcagtgcccaa

SEQ ID NO: 1007128 - DNA, 25 bp, Homo sapien
aaatatttctgggtgcctatcatga

SEQ ID NO: 1007129 - DNA, 25 bp, Homo sapien
gagtccccttctgatttgtgatctc

SEQ ID NO: 1007130 - DNA, 25 bp, Homo sapien
gaaatatttctgggtgcctatcatg

SEQ ID NO: 1007131 - DNA, 25 bp, Homo sapien
gaaggctgcttgcttcggtatgtga

SEQ ID NO: 1007132 - DNA, 25 bp, Homo sapien
ttggaagtgtgctgaaccgtccaca

SEQ ID NO: 1007133 - DNA, 25 bp, Homo sapien
ggcagcaccagtacagagtccttga

SEQ ID NO: 1007134 - DNA, 25 bp, Homo sapien
cgagctgttacaggattagggattc

SEQ ID NO: 1007135 - DNA, 25 bp, Homo sapien
ccagtgtctgccggagcttgggctg

SEQ ID NO: 1007136 - DNA, 25 bp, Homo sapien
agtgtctgccggagcttgggctgtg

SEQ ID NO: 1007137 - DNA, 25 bp, Homo sapien
gccagtgtctgccggagcttgggct

SEQ ID NO: 1007138 - DNA, 25 bp, Homo sapien
cagtgtctgccggagcttgggctgt

SEQ ID NO: 1007139 - DNA, 25 bp, Homo sapien
tactactacgcaaggaggcgttctg

SEQ ID NO: 1007140 - DNA, 25 bp, Homo sapien
tactacgcaaggaggcgttctggcg

SEQ ID NO: 1007141 - DNA, 25 bp, Homo sapien
ttgtaactactactacgcaaggagg

SEQ ID NO: 1007142 - DNA, 25 bp, Homo sapien
caaggaggcgttctggcgaccagaa

SEQ ID NO: 1007143 - DNA, 25 bp, Homo sapien
gactgaggggcaacagccccacatc

SEQ ID NO: 1007144 - DNA, 25 bp, Homo sapien
gaggggcaacagccccacatccgtg

SEQ ID NO: 1007145 - DNA, 25 bp, Homo sapien
ctgggtgactgaggggcaacagccc

SEQ ID NO: 1007146 - DNA, 25 bp, Homo sapien
ctgaggggcaacagccccacatccg

SEQ ID NO: 1007147 - DNA, 25 bp, Homo sapien
cctgttgactttcgccctgtgcagc

SEQ ID NO: 1007148 - DNA, 25 bp, Homo sapien
tgtgcctgttgactttcgccctgtg

SEQ ID NO: 1007149 - DNA, 25 bp, Homo sapien
tgcctgttgactttcgccctgtgca

SEQ ID NO: 1007150 - DNA, 25 bp, Homo sapien
cgtgtgcctgttgactttcgccctg

SEQ ID NO: 1007151 - DNA, 25 bp, Homo sapien
gagtcaccgactcatctcgtttcct

SEQ ID NO: 1007152 - DNA, 25 bp, Homo sapien
cgtgcagatgcttcgggtagcagcc

SEQ ID NO: 1007153 - DNA, 25 bp, Homo sapien
gtgcccctgtggcaacgagtcaccg

SEQ ID NO: 1007154 - DNA, 25 bp, Homo sapien
ggtagcagcccagcgctcttcactg

SEQ ID NO: 1007155 - DNA, 25 bp, Homo sapien
caggaactatgatggggagacgaca

SEQ ID NO: 1007156 - DNA, 25 bp, Homo sapien
ttatacggttccagagacgtgtggt

SEQ ID NO: 1007157 - DNA, 25 bp, Homo sapien
ttccagagacgtgtggtgcaggaac

SEQ ID NO: 1007158 - DNA, 25 bp, Homo sapien
aactatgatggggagacgacagcag

SEQ ID NO: 1007159 - DNA, 25 bp, Homo sapien
gcgtggcctccacaccacgggcccc

SEQ ID NO: 1007160 - DNA, 25 bp, Homo sapien
agcagcgtggcctccacaccacggg

SEQ ID NO: 1007161 - DNA, 25 bp, Homo sapien
cccagcggggcccatcttcctgaga

SEQ ID NO: 1007162 - DNA, 25 bp, Homo sapien
gcagcgtggcctccacaccacgggc

SEQ ID NO: 1007163 - DNA, 25 bp, Homo sapien
gcccagcactcgcccagggaggtgc

SEQ ID NO: 1007164 - DNA, 25 bp, Homo sapien
cccagcactcgcccagggaggtgcc

SEQ ID NO: 1007165 - DNA, 25 bp, Homo sapien
cattctgtctagaatagaggtgatc

SEQ ID NO: 1007166 - DNA, 25 bp, Homo sapien
ggcttctgacctataggacctggaa

SEQ ID NO: 1007167 - DNA, 25 bp, Homo sapien
ggttccagttttgcttatcaacaac

SEQ ID NO: 1007168 - DNA, 25 bp, Homo sapien
cccggtgagcacattcggagtggct

SEQ ID NO: 1007169 - DNA, 25 bp, Homo sapien
ttaggtgggcgggagcacagcaaat

SEQ ID NO: 1007170 - DNA, 25 bp, Homo sapien
ctctgaagctcgggccccaaatgct

SEQ ID NO: 1007171 - DNA, 25 bp, Homo sapien
aatgctcaaaacgaacactgactct

SEQ ID NO: 1007172 - DNA, 25 bp, Homo sapien
ctgactctgccaaacgcccgcagga

SEQ ID NO: 1007173 - DNA, 25 bp, Homo sapien
gcagcgactgtctgatggacagtgt

SEQ ID NO: 1007174 - DNA, 25 bp, Homo sapien
agcgactgtctgatggacagtgttc

SEQ ID NO: 1007175 - DNA, 25 bp, Homo sapien
agcagcagcgactgtctgatggaca

SEQ ID NO: 1007176 - DNA, 25 bp, Homo sapien
cagcagcgactgtctgatggacagt

SEQ ID NO: 1007177 - DNA, 25 bp, Homo sapien
agagctggttaggaggccatgcaac

SEQ ID NO: 1007178 - DNA, 25 bp, Homo sapien
ttttgaccaagggtaggtctgagct

SEQ ID NO: 1007179 - DNA, 25 bp, Homo sapien
ccttgaaggacattgtaaggatgtg

SEQ ID NO: 1007180 - DNA, 25 bp, Homo sapien
gctgaagcttactctgttgtaggga

SEQ ID NO: 1007181 - DNA, 25 bp, Homo sapien
tgcacgaggtgcagatgaacttgtg

SEQ ID NO: 1007182 - DNA, 25 bp, Homo sapien
cctgagctttcagggctgctttgca

SEQ ID NO: 1007183 - DNA, 25 bp, Homo sapien
tagagaggttttcaatcgaaggagc

SEQ ID NO: 1007184 - DNA, 25 bp, Homo sapien
ttgatccgaaatcctttctggccgc

SEQ ID NO: 1007185 - DNA, 25 bp, Homo sapien
caagcgggtggtcgcgggcgctctc

SEQ ID NO: 1007186 - DNA, 25 bp, Homo sapien
gagaaatatggaggaccgtcctccg

SEQ ID NO: 1007187 - DNA, 25 bp, Homo sapien
gaccgtcctccgcaagcgggtggtc

SEQ ID NO: 1007188 - DNA, 25 bp, Homo sapien
tgctttcctgctcgccctctccgag

SEQ ID NO: 1007189 - DNA, 25 bp, Homo sapien
ggggagaaagcggaggctctgggct

SEQ ID NO: 1007190 - DNA, 25 bp, Homo sapien
gggagaaagcggaggctctgggctc

SEQ ID NO: 1007191 - DNA, 25 bp, Homo sapien
ggagagacacgccactgccccgcat

SEQ ID NO: 1007192 - DNA, 25 bp, Homo sapien
ccgcatccccagaaagcgcgaggcg

SEQ ID NO: 1007193 - DNA, 25 bp, Homo sapien
gccccgcatccccagaaagcgcgag

SEQ ID NO: 1007194 - DNA, 25 bp, Homo sapien
atccccagaaagcgcgaggcgccgt

SEQ ID NO: 1007195 - DNA, 25 bp, Homo sapien
tggcacagggcttgtacaaccactc

SEQ ID NO: 1007196 - DNA, 25 bp, Homo sapien
gaacaagcgcgccaagatcaagaag

SEQ ID NO: 1007197 - DNA, 25 bp, Homo sapien
tctcagtccgcgctaaacaatgcaa

SEQ ID NO: 1007198 - DNA, 25 bp, Homo sapien
tcaagaaggccacgggcaacaagaa

SEQ ID NO: 1007199 - DNA, 25 bp, Homo sapien
tcaaaagaactcagaatcctccagg

SEQ ID NO: 1007200 - DNA, 25 bp, Homo sapien
caaaagaactcagaatcctccagga

SEQ ID NO: 1007201 - DNA, 25 bp, Homo sapien
aaaagaactcagaatcctccaggat

SEQ ID NO: 1007202 - DNA, 25 bp, Homo sapien
agctgggccgttggcgttcccaggc

SEQ ID NO: 1007203 - DNA, 25 bp, Homo sapien
tgggccgttggcgttcccaggcgga

SEQ ID NO: 1007204 - DNA, 25 bp, Homo sapien
gcagctgggccgttggcgttcccag

SEQ ID NO: 1007205 - DNA, 25 bp, Homo sapien
aggcagctgggccgttggcgttccc

SEQ ID NO: 1007206 - DNA, 25 bp, Homo sapien
gactcccgagttctcgttgcctggg

SEQ ID NO: 1007207 - DNA, 25 bp, Homo sapien
gcggagactcccgagttctcgttgc

SEQ ID NO: 1007208 - DNA, 25 bp, Homo sapien
agttctcgttgcctgggcccgagct

SEQ ID NO: 1007209 - DNA, 25 bp, Homo sapien
ccgagttctcgttgcctgggcccga

SEQ ID NO: 1007210 - DNA, 25 bp, Homo sapien
acctgcctgctttcgccatggagac

SEQ ID NO: 1007211 - DNA, 25 bp, Homo sapien
ctgcagggaagtcggtgcgcctttc

SEQ ID NO: 1007212 - DNA, 25 bp, Homo sapien
tgccgcggatctggacccggactgc

SEQ ID NO: 1007213 - DNA, 25 bp, Homo sapien
catggagaccggagtcaggcctgca

SEQ ID NO: 1007214 - DNA, 25 bp, Homo sapien
cgcgctcttgccacgcaaggcagat

SEQ ID NO: 1007215 - DNA, 25 bp, Homo sapien
caaggcagatcaaagtgccctgcca

SEQ ID NO: 1007216 - DNA, 25 bp, Homo sapien
tttcacactcggcagtcggatcgct

SEQ ID NO: 1007217 - DNA, 25 bp, Homo sapien
tatgcaatgagacgcgggagctttg

SEQ ID NO: 1007218 - DNA, 25 bp, Homo sapien
gttcccatagagcagacccataagg

SEQ ID NO: 1007219 - DNA, 25 bp, Homo sapien
tggaagctaaagaactttttatgag

SEQ ID NO: 1007220 - DNA, 25 bp, Homo sapien
tcatgcgagggaatctggttcccat

SEQ ID NO: 1007221 - DNA, 25 bp, Homo sapien
taaggtctagagctgaacttctcaa

SEQ ID NO: 1007222 - DNA, 25 bp, Homo sapien
gcagctgtgccgcattgctactgcc

SEQ ID NO: 1007223 - DNA, 25 bp, Homo sapien
agcccaggcagcttcggatctcctg

SEQ ID NO: 1007224 - DNA, 25 bp, Homo sapien
cattgctactgcctgggacctggtc

SEQ ID NO: 1007225 - DNA, 25 bp, Homo sapien
accgcgggagtaggaaacacagcgc

SEQ ID NO: 1007226 - DNA, 25 bp, Homo sapien
ctccgggaggcgatacagggataca

SEQ ID NO: 1007227 - DNA, 25 bp, Homo sapien
cactggacagacgtgactctgttca

SEQ ID NO: 1007228 - DNA, 25 bp, Homo sapien
gggatacagcaacgccgagctccca

SEQ ID NO: 1007229 - DNA, 25 bp, Homo sapien
tcccactggacagacgtgactctgt

SEQ ID NO: 1007230 - DNA, 25 bp, Homo sapien
tttctaatcaggagcctgggctagg

SEQ ID NO: 1007231 - DNA, 25 bp, Homo sapien
ttgcaggcaaatccgagaaggctac

SEQ ID NO: 1007232 - DNA, 25 bp, Homo sapien
agaaggctacggcttcagaaggaaa

SEQ ID NO: 1007233 - DNA, 25 bp, Homo sapien
aaaaggagggacctctcaggaagtg

SEQ ID NO: 1007234 - DNA, 25 bp, Homo sapien
gaaactggtgtagaccataccctga

SEQ ID NO: 1007235 - DNA, 25 bp, Homo sapien
ttacttagtgtcacaggtcccgcca

SEQ ID NO: 1007236 - DNA, 25 bp, Homo sapien
ggtcccgccatgttcctgtgaaggt

SEQ ID NO: 1007237 - DNA, 25 bp, Homo sapien
tatttccatcgtgtgtcagctcggg

SEQ ID NO: 1007238 - DNA, 25 bp, Homo sapien
tgtcatgatgtcaaccaacagattt

SEQ ID NO: 1007239 - DNA, 25 bp, Homo sapien
tcataaacggagacaaacacggtat

SEQ ID NO: 1007240 - DNA, 25 bp, Homo sapien
aaaaacgcagggtttgtcatgatgt

SEQ ID NO: 1007241 - DNA, 25 bp, Homo sapien
aatttttcttatcatgaaagacaac

SEQ ID NO: 1007242 - DNA, 25 bp, Homo sapien
gtgactttactcctctctacgacca

SEQ ID NO: 1007243 - DNA, 25 bp, Homo sapien
tctctacgaccagcagaacggcact

SEQ ID NO: 1007244 - DNA, 25 bp, Homo sapien
ttactcctctctacgaccagcagaa

SEQ ID NO: 1007245 - DNA, 25 bp, Homo sapien
ctctctacgaccagcagaacggcac

SEQ ID NO: 1007246 - DNA, 25 bp, Homo sapien
agagctcagtatgattagcagaagt

SEQ ID NO: 1007247 - DNA, 25 bp, Homo sapien
ctagagctcagtatgattagcagaa

SEQ ID NO: 1007248 - DNA, 25 bp, Homo sapien
gagctcagtatgattagcagaagtt

SEQ ID NO: 1007249 - DNA, 25 bp, Homo sapien
tagagctcagtatgattagcagaag

SEQ ID NO: 1007250 - DNA, 25 bp, Homo sapien
gcttcactacgtagcggctcaatgg

SEQ ID NO: 1007251 - DNA, 25 bp, Homo sapien
ccgcttcactacgtagcggctcaat

SEQ ID NO: 1007252 - DNA, 25 bp, Homo sapien
tagcggctcaatggtggcttgcacc

SEQ ID NO: 1007253 - DNA, 25 bp, Homo sapien
actacgtagcggctcaatggtggct

SEQ ID NO: 1007254 - DNA, 25 bp, Homo sapien
cgtggatcgcagaggcagcgaggct

SEQ ID NO: 1007255 - DNA, 25 bp, Homo sapien
tcgtttctgattcagcggagacggg

SEQ ID NO: 1007256 - DNA, 25 bp, Homo sapien
atgctgtcgtttctgattcagcgga

SEQ ID NO: 1007257 - DNA, 25 bp, Homo sapien
ggatcctgtgtcagagccgtggatc

SEQ ID NO: 1007258 - DNA, 25 bp, Homo sapien
gagagggtgtgcgagcagcgagcac

SEQ ID NO: 1007259 - DNA, 25 bp, Homo sapien
cagcgagcacatgttacatcagaca

SEQ ID NO: 1007260 - DNA, 25 bp, Homo sapien
gagcacatgttacatcagacacagt

SEQ ID NO: 1007261 - DNA, 25 bp, Homo sapien
tgcgagcagcgagcacatgttacat

SEQ ID NO: 1007262 - DNA, 25 bp, Homo sapien
gatagtgtgtctcctgggcgataag

SEQ ID NO: 1007263 - DNA, 25 bp, Homo sapien
tgtctcctgggcgataagtgaggat

SEQ ID NO: 1007264 - DNA, 25 bp, Homo sapien
ggcgataagtgaggatatttcatct

SEQ ID NO: 1007265 - DNA, 25 bp, Homo sapien
ttgtcagctagatagtgtgtctcct

SEQ ID NO: 1007266 - DNA, 25 bp, Homo sapien
cctttcctaggagcgaatctcttga

SEQ ID NO: 1007267 - DNA, 25 bp, Homo sapien
agggtcttcctcaagcttgtagtcg

SEQ ID NO: 1007268 - DNA, 25 bp, Homo sapien
gaaagttctctccttcgtcacaggg

SEQ ID NO: 1007269 - DNA, 25 bp, Homo sapien
gatccgttaggaacgcctccgactg

SEQ ID NO: 1007270 - DNA, 25 bp, Homo sapien
gaaagacagggcgaggaaacttgtc

SEQ ID NO: 1007271 - DNA, 25 bp, Homo sapien
ctaagaagaaagacagggcgaggaa

SEQ ID NO: 1007272 - DNA, 25 bp, Homo sapien
gacagggcgaggaaacttgtcttaa

SEQ ID NO: 1007273 - DNA, 25 bp, Homo sapien
gcgaggaaacttgtcttaatgttaa

SEQ ID NO: 1007274 - DNA, 25 bp, Homo sapien
ttcaaagaccttccggcgagtccac

SEQ ID NO: 1007275 - DNA, 25 bp, Homo sapien
agaccttccggcgagtccacatgga

SEQ ID NO: 1007276 - DNA, 25 bp, Homo sapien
cgagtccacatggaaacgccacact

SEQ ID NO: 1007277 - DNA, 25 bp, Homo sapien
agtccacatggaaacgccacactct

SEQ ID NO: 1007278 - DNA, 25 bp, Homo sapien
ggaacagctggtgcacgtccccgcg

SEQ ID NO: 1007279 - DNA, 25 bp, Homo sapien
tcctcggctgctttctttgggaaca

SEQ ID NO: 1007280 - DNA, 25 bp, Homo sapien
ctctccctccggaattcggcgagga

SEQ ID NO: 1007281 - DNA, 25 bp, Homo sapien
cgaggattcagctggaccctttggc

SEQ ID NO: 1007282 - DNA, 25 bp, Homo sapien
cgttcggggccgtctagacaggtca

SEQ ID NO: 1007283 - DNA, 25 bp, Homo sapien
gcgtggagccgccaagggcgccgga

SEQ ID NO: 1007284 - DNA, 25 bp, Homo sapien
ctagacaggtcaaggtgcaggatgc

SEQ ID NO: 1007285 - DNA, 25 bp, Homo sapien
cgcagcccgggcctttgcgggcttt

SEQ ID NO: 1007286 - DNA, 25 bp, Homo sapien
gatctgcatgtttcaccgtcttgtt

SEQ ID NO: 1007287 - DNA, 25 bp, Homo sapien
tataaccctttgtcatcgattgtcg

SEQ ID NO: 1007288 - DNA, 25 bp, Homo sapien
tgatgatccgtttggaaccacctct

SEQ ID NO: 1007289 - DNA, 25 bp, Homo sapien
cataatggttgatgagtgatgatcc

SEQ ID NO: 1007290 - DNA, 25 bp, Homo sapien
cggaggtgcatctcttggcagattt

SEQ ID NO: 1007291 - DNA, 25 bp, Homo sapien
gggatttctcggaggtgcatctctt

SEQ ID NO: 1007292 - DNA, 25 bp, Homo sapien
cccctgatgtccagtcacaaatcga

SEQ ID NO: 1007293 - DNA, 25 bp, Homo sapien
tccagtcacaaatcgagaggtgtgg

SEQ ID NO: 1007294 - DNA, 25 bp, Homo sapien
aggactggattccagtactcaggga

SEQ ID NO: 1007295 - DNA, 25 bp, Homo sapien
tggtggaaggctaccttgcgcaggc

SEQ ID NO: 1007296 - DNA, 25 bp, Homo sapien
tgtggtggaaggctaccttgcgcag

SEQ ID NO: 1007297 - DNA, 25 bp, Homo sapien
gtgtggtggaaggctaccttgcgca

SEQ ID NO: 1007298 - DNA, 25 bp, Homo sapien
aaccttcaggcagcttgagagctcc

SEQ ID NO: 1007299 - DNA, 25 bp, Homo sapien
ttccccaaaccttcaggcagcttga

SEQ ID NO: 1007300 - DNA, 25 bp, Homo sapien
gccctggtggccccgaaggagttca

SEQ ID NO: 1007301 - DNA, 25 bp, Homo sapien
tggccccgaaggagttcaggctcct

SEQ ID NO: 1007302 - DNA, 25 bp, Homo sapien
taacgggacaaactctcagcggctt

SEQ ID NO: 1007303 - DNA, 25 bp, Homo sapien
gcggctttgctctcccggcattgtt

SEQ ID NO: 1007304 - DNA, 25 bp, Homo sapien
cctgtagtacagtccgtccttcacg

SEQ ID NO: 1007305 - DNA, 25 bp, Homo sapien
gtccttcacgcctggatctaacggg

SEQ ID NO: 1007306 - DNA, 25 bp, Homo sapien
tagtaaaccctccgggatgatattc

SEQ ID NO: 1007307 - DNA, 25 bp, Homo sapien
cctccgggatgatattctgggctgg

SEQ ID NO: 1007308 - DNA, 25 bp, Homo sapien
gcaaggtttggctgtaggtagtaaa

SEQ ID NO: 1007309 - DNA, 25 bp, Homo sapien
atttggtgcaaggtttggctgtagg

SEQ ID NO: 1007310 - DNA, 25 bp, Homo sapien
ctgagacgtggcgttcacactggcg

SEQ ID NO: 1007311 - DNA, 25 bp, Homo sapien
ttcactctctgagacgtggcgttca

SEQ ID NO: 1007312 - DNA, 25 bp, Homo sapien
tagtccacaccacatgtagacccgg

SEQ ID NO: 1007313 - DNA, 25 bp, Homo sapien
ctctgggtcagagtgtgagctccta

SEQ ID NO: 1007314 - DNA, 25 bp, Homo sapien
cgtaggccgctaagccaaagctgtc

SEQ ID NO: 1007315 - DNA, 25 bp, Homo sapien
ggattcagaggagatgttctgattt

SEQ ID NO: 1007316 - DNA, 25 bp, Homo sapien
tcactgctgtaatatgaggattcag

SEQ ID NO: 1007317 - DNA, 25 bp, Homo sapien
ttggtccatagaaagcgtaggccgc

SEQ ID NO: 1007318 - DNA, 25 bp, Homo sapien
tactggaaggcagccaatgaacgct

SEQ ID NO: 1007319 - DNA, 25 bp, Homo sapien
gaaaccacggcagccctatagaggg

SEQ ID NO: 1007320 - DNA, 25 bp, Homo sapien
tgaacgctgtgtttgcaagccggct

SEQ ID NO: 1007321 - DNA, 25 bp, Homo sapien
tcaaaggtgggtaagcagccctggt

SEQ ID NO: 1007322 - DNA, 25 bp, Homo sapien
cagagagaagtctccgtgtgatgct

SEQ ID NO: 1007323 - DNA, 25 bp, Homo sapien
gatgagagaccttctagaagtttcc

SEQ ID NO: 1007324 - DNA, 25 bp, Homo sapien
taaagacgagttctccaacacgagg

SEQ ID NO: 1007325 - DNA, 25 bp, Homo sapien
tgctgtgagttagccagaagcagga

SEQ ID NO: 1007326 - DNA, 25 bp, Homo sapien
tggcccaggagcactaatgatgtgt

SEQ ID NO: 1007327 - DNA, 25 bp, Homo sapien
ctcccctttgttgggcctgtagaga

SEQ ID NO: 1007328 - DNA, 25 bp, Homo sapien
ttggctcccctttgttgggcctgta

SEQ ID NO: 1007329 - DNA, 25 bp, Homo sapien
tgggcctgtagagaaagacttcctt

SEQ ID NO: 1007330 - DNA, 25 bp, Homo sapien
tggacttgccagacacggctcttga

SEQ ID NO: 1007331 - DNA, 25 bp, Homo sapien
tcctgcattcaggtgaccacaaagg

SEQ ID NO: 1007332 - DNA, 25 bp, Homo sapien
ttccctggccctgcttgacagtggg

SEQ ID NO: 1007333 - DNA, 25 bp, Homo sapien
tgacagtgggaatcagctcccggct

SEQ ID NO: 1007334 - DNA, 25 bp, Homo sapien
cgaaatgtctttcgacttgacgaga

SEQ ID NO: 1007335 - DNA, 25 bp, Homo sapien
gacttgacgagacacaaaatttagg

SEQ ID NO: 1007336 - DNA, 25 bp, Homo sapien
caagaaccacagacgcgctattttt

SEQ ID NO: 1007337 - DNA, 25 bp, Homo sapien
gatgaagaacagtgccgaaatgtct

SEQ ID NO: 1007338 - DNA, 25 bp, Homo sapien
acttcaatttcaagcttaaagatta

SEQ ID NO: 1007339 - DNA, 25 bp, Homo sapien
gatacttcaatttcaagcttaaaga

SEQ ID NO: 1007340 - DNA, 25 bp, Homo sapien
gagatacttcaatttcaagcttaaa

SEQ ID NO: 1007341 - DNA, 25 bp, Homo sapien
agagatacttcaatttcaagcttaa

SEQ ID NO: 1007342 - DNA, 25 bp, Homo sapien
cctctcctgagtcccatcgggattg

SEQ ID NO: 1007343 - DNA, 25 bp, Homo sapien
gagtcccatcgggattgattcggaa

SEQ ID NO: 1007344 - DNA, 25 bp, Homo sapien
ccatcgggattgattcggaaggatc

SEQ ID NO: 1007345 - DNA, 25 bp, Homo sapien
tcgggattgattcggaaggatccca

SEQ ID NO: 1007346 - DNA, 25 bp, Homo sapien
tgatgtcgtgctctatctcgtccat

SEQ ID NO: 1007347 - DNA, 25 bp, Homo sapien
gccttggtgatgtcgtgctctatct

SEQ ID NO: 1007348 - DNA, 25 bp, Homo sapien
ttctgccgagccttggtgatgtcgt

SEQ ID NO: 1007349 - DNA, 25 bp, Homo sapien
tgccgagccttggtgatgtcgtgct

SEQ ID NO: 1007350 - DNA, 25 bp, Homo sapien
tggaataagaaaggaccctccatgg

SEQ ID NO: 1007351 - DNA, 25 bp, Homo sapien
ggtgaacagcccagtaggctcagat

SEQ ID NO: 1007352 - DNA, 25 bp, Homo sapien
ccagtaggctcagatgaggagtcct

SEQ ID NO: 1007353 - DNA, 25 bp, Homo sapien
ggcccacaggtggtgaacagcccag

SEQ ID NO: 1007354 - DNA, 25 bp, Homo sapien
agtgccagcgtcaaaccctgctggg

SEQ ID NO: 1007355 - DNA, 25 bp, Homo sapien
aaagaatgtggccttgccgtcaagt

SEQ ID NO: 1007356 - DNA, 25 bp, Homo sapien
tgtggccttgccgtcaagtgccagc

SEQ ID NO: 1007357 - DNA, 25 bp, Homo sapien
ttgccgtcaagtgccagcgtcaaac

SEQ ID NO: 1007358 - DNA, 25 bp, Homo sapien
agggaagatgaagccccgactccca

SEQ ID NO: 1007359 - DNA, 25 bp, Homo sapien
attgcatctcctgcatggctgtgcc

SEQ ID NO: 1007360 - DNA, 25 bp, Homo sapien
ccacactcctttgagggaagatgaa

SEQ ID NO: 1007361 - DNA, 25 bp, Homo sapien
ccccacactcctttgagggaagatg

SEQ ID NO: 1007362 - DNA, 25 bp, Homo sapien
aaagatgatcaggcatttaccaggt

SEQ ID NO: 1007363 - DNA, 25 bp, Homo sapien
atgaaggtgtatttgccaaaacacc

SEQ ID NO: 1007364 - DNA, 25 bp, Homo sapien
tcaaagaacacgggaggcttcccta

SEQ ID NO: 1007365 - DNA, 25 bp, Homo sapien
agagcatgacaagtaggacctgaaa

SEQ ID NO: 1007366 - DNA, 25 bp, Homo sapien
gtgccggccccagggttgacaaaga

SEQ ID NO: 1007367 - DNA, 25 bp, Homo sapien
gcagcatgggggacgctccccagtc

SEQ ID NO: 1007368 - DNA, 25 bp, Homo sapien
ttgacaaagagtcccgcagcatggg

SEQ ID NO: 1007369 - DNA, 25 bp, Homo sapien
cccagggttgacaaagagtcccgca

SEQ ID NO: 1007370 - DNA, 25 bp, Homo sapien
ggcaaagaatgctggtttcatgcat

SEQ ID NO: 1007371 - DNA, 25 bp, Homo sapien
tagcaatgattagcgagaaggtggc

SEQ ID NO: 1007372 - DNA, 25 bp, Homo sapien
tctctctccgagaaaatagcaatga

SEQ ID NO: 1007373 - DNA, 25 bp, Homo sapien
gctgcgatgtcaccacccaaatatt

SEQ ID NO: 1007374 - DNA, 25 bp, Homo sapien
ctccacagaacacctccgggtcccg

SEQ ID NO: 1007375 - DNA, 25 bp, Homo sapien
gtcccgggcactccgggccagcgca

SEQ ID NO: 1007376 - DNA, 25 bp, Homo sapien
ggccagcgcaggccccagcagcagg

SEQ ID NO: 1007377 - DNA, 25 bp, Homo sapien
gccagcagagccagaggcagcagca

SEQ ID NO: 1007378 - DNA, 25 bp, Homo sapien
ccttgggtgtggcattggtgtcact

SEQ ID NO: 1007379 - DNA, 25 bp, Homo sapien
acacggttgacgctacctggaggca

SEQ ID NO: 1007380 - DNA, 25 bp, Homo sapien
cctggaggcactggtgtcaccttgg

SEQ ID NO: 1007381 - DNA, 25 bp, Homo sapien
tccatggcctgtgtcaagtgagtca

SEQ ID NO: 1007382 - DNA, 25 bp, Homo sapien
ctgaaacaccacaggaaggccaggg

SEQ ID NO: 1007383 - DNA, 25 bp, Homo sapien
gaacctctgtacttcccagacagac

SEQ ID NO: 1007384 - DNA, 25 bp, Homo sapien
tacttcccagacagaccccatccca

SEQ ID NO: 1007385 - DNA, 25 bp, Homo sapien
caggaaggccaggggaacctctgta

SEQ ID NO: 1007386 - DNA, 25 bp, Homo sapien
ggatgagcgtagagtttaaatagcc

SEQ ID NO: 1007387 - DNA, 25 bp, Homo sapien
tgagcatcagcgcagcatcgtttgg

SEQ ID NO: 1007388 - DNA, 25 bp, Homo sapien
tctgtctgccgatagtgactccggg

SEQ ID NO: 1007389 - DNA, 25 bp, Homo sapien
cccagctctgaggaaaacgctggcc

SEQ ID NO: 1007390 - DNA, 25 bp, Homo sapien
cccttccaaagaggcccaggcacat

SEQ ID NO: 1007391 - DNA, 25 bp, Homo sapien
ttccaaagaggcccaggcacatggt

SEQ ID NO: 1007392 - DNA, 25 bp, Homo sapien
cacatggtgatgacattttcagtca

SEQ ID NO: 1007393 - DNA, 25 bp, Homo sapien
ggcacatggtgatgacattttcagt

SEQ ID NO: 1007394 - DNA, 25 bp, Homo sapien
tcatgctgccgtccaaatactgcaa

SEQ ID NO: 1007395 - DNA, 25 bp, Homo sapien
tgagctgtatctggcctctttggac

SEQ ID NO: 1007396 - DNA, 25 bp, Homo sapien
acatcttggtgttccgacggagggc

SEQ ID NO: 1007397 - DNA, 25 bp, Homo sapien
gtcagtgtcgggctgagctgtatct

SEQ ID NO: 1007398 - DNA, 25 bp, Homo sapien
caggagctcggcctaaatgaggcat

SEQ ID NO: 1007399 - DNA, 25 bp, Homo sapien
tctggcggccaaatgcagagcgtcc

SEQ ID NO: 1007400 - DNA, 25 bp, Homo sapien
ggagaccagccccaacaatggacta

SEQ ID NO: 1007401 - DNA, 25 bp, Homo sapien
catcaaaagagactagccagggctt

SEQ ID NO: 1007402 - DNA, 25 bp, Homo sapien
tgggtaatgacacgcctcaaactca

SEQ ID NO: 1007403 - DNA, 25 bp, Homo sapien
ggaaaatctacgtctcccactcaga

SEQ ID NO: 1007404 - DNA, 25 bp, Homo sapien
gcaacactcacacctgatgcgggaa

SEQ ID NO: 1007405 - DNA, 25 bp, Homo sapien
cctggaaacccacgctgacttggct

SEQ ID NO: 1007406 - DNA, 25 bp, Homo sapien
taaacgccacactggccatggacac

SEQ ID NO: 1007407 - DNA, 25 bp, Homo sapien
ctaaacgccacactggccatggaca

SEQ ID NO: 1007408 - DNA, 25 bp, Homo sapien
tcacagggtcgggatgttcctctcc

SEQ ID NO: 1007409 - DNA, 25 bp, Homo sapien
ctgcggaccagaatgtgacacagca

SEQ ID NO: 1007410 - DNA, 25 bp, Homo sapien
tggttcctaagtggtgtggattctg

SEQ ID NO: 1007411 - DNA, 25 bp, Homo sapien
agcatttggcagttcacagggtcgg

SEQ ID NO: 1007412 - DNA, 25 bp, Homo sapien
gcttagaatcctttcgcagctcccc

SEQ ID NO: 1007413 - DNA, 25 bp, Homo sapien
ttagaatcctttcgcagctccccac

SEQ ID NO: 1007414 - DNA, 25 bp, Homo sapien
cttagaatcctttcgcagctcccca

SEQ ID NO: 1007415 - DNA, 25 bp, Homo sapien
gaaaacggcttgtgaggcttcaggc

SEQ ID NO: 1007416 - DNA, 25 bp, Homo sapien
gatagtaacagatccctcaaaaggg

SEQ ID NO: 1007417 - DNA, 25 bp, Homo sapien
aattgggacaaaggatgactctgac

SEQ ID NO: 1007418 - DNA, 25 bp, Homo sapien
gagcaggtagctccccaagagtaag

SEQ ID NO: 1007419 - DNA, 25 bp, Homo sapien
ttgataaatgcaagatctcttattt

SEQ ID NO: 1007420 - DNA, 25 bp, Homo sapien
tctgatttaatctgtgtatgcaaaa

SEQ ID NO: 1007421 - DNA, 25 bp, Homo sapien
cacacagggatttctgctccacaca

SEQ ID NO: 1007422 - DNA, 25 bp, Homo sapien
tgttaagagtccagtgcagactggg

SEQ ID NO: 1007423 - DNA, 25 bp, Homo sapien
cagcaaaccaatatggcacatctat

SEQ ID NO: 1007424 - DNA, 25 bp, Homo sapien
aaccaatatggcacatctataccta

SEQ ID NO: 1007425 - DNA, 25 bp, Homo sapien
gggcctgtcagtgggtggggggctg

SEQ ID NO: 1007426 - DNA, 25 bp, Homo sapien
ggcctgtcagtgggtggggggctgg

SEQ ID NO: 1007427 - DNA, 25 bp, Homo sapien
ttaactttataagaacctgccactc

SEQ ID NO: 1007428 - DNA, 25 bp, Homo sapien
aactttagcccttctaacaggtgtg

SEQ ID NO: 1007429 - DNA, 25 bp, Homo sapien
cctagactggtgtaaattctgtcac

SEQ ID NO: 1007430 - DNA, 25 bp, Homo sapien
tccaaagtgacgtacaaatgctgca

SEQ ID NO: 1007431 - DNA, 25 bp, Homo sapien
atgtaaaactgcaatatgatctggt

SEQ ID NO: 1007432 - DNA, 25 bp, Homo sapien
gaagcacactaggaaatcaacacaa

SEQ ID NO: 1007433 - DNA, 25 bp, Homo sapien
tgatctggttgaagttagtgtcact

SEQ ID NO: 1007434 - DNA, 25 bp, Homo sapien
tagtgtcactttaacatgattcttt

SEQ ID NO: 1007435 - DNA, 25 bp, Homo sapien
acagtgttttagtccttcaggctgc

SEQ ID NO: 1007436 - DNA, 25 bp, Homo sapien
tagtttcaccacgtctagatgtgga

SEQ ID NO: 1007437 - DNA, 25 bp, Homo sapien
tcatcttttcgaatattgcctctcc

SEQ ID NO: 1007438 - DNA, 25 bp, Homo sapien
tgtaatgaaataacacagtctgtgt

SEQ ID NO: 1007439 - DNA, 25 bp, Homo sapien
tatcaatatttgtatagacacaagc

SEQ ID NO: 1007440 - DNA, 25 bp, Homo sapien
agcacttccttgatttttggaggga

SEQ ID NO: 1007441 - DNA, 25 bp, Homo sapien
ggaacaccttaactattttgatata

SEQ ID NO: 1007442 - DNA, 25 bp, Homo sapien
tctgctttggcccattaaatctcac

SEQ ID NO: 1007443 - DNA, 25 bp, Homo sapien
tgtgtaggtccccttataactggag

SEQ ID NO: 1007444 - DNA, 25 bp, Homo sapien
tattctagtgacacaccatagggtt

SEQ ID NO: 1007445 - DNA, 25 bp, Homo sapien
taagtaactccctatttgcacagtg

SEQ ID NO: 1007446 - DNA, 25 bp, Homo sapien
taactggagttctgattccctgtgc

SEQ ID NO: 1007447 - DNA, 25 bp, Homo sapien
tgtgtgactccccatgttgaactgc

SEQ ID NO: 1007448 - DNA, 25 bp, Homo sapien
aactctcacgatgcttgtgttctgc

SEQ ID NO: 1007449 - DNA, 25 bp, Homo sapien
ggatcatgtcctagtaacccggtca

SEQ ID NO: 1007450 - DNA, 25 bp, Homo sapien
gaaacctgtggtgctctcacatgcc

SEQ ID NO: 1007451 - DNA, 25 bp, Homo sapien
agttcatcattactgagacgagaaa

SEQ ID NO: 1007452 - DNA, 25 bp, Homo sapien
cagttcatcattactgagacgagaa

SEQ ID NO: 1007453 - DNA, 25 bp, Homo sapien
tttccagttcatcattactgagacg

SEQ ID NO: 1007454 - DNA, 25 bp, Homo sapien
tccagttcatcattactgagacgag

SEQ ID NO: 1007455 - DNA, 25 bp, Homo sapien
cagaggctaaaggtatggcttccca

SEQ ID NO: 1007456 - DNA, 25 bp, Homo sapien
gaaactgcagcgctcactaggtagt

SEQ ID NO: 1007457 - DNA, 25 bp, Homo sapien
caattcaggagcaaaccattatggg

SEQ ID NO: 1007458 - DNA, 25 bp, Homo sapien
tcagtactttcaagccagaggcagt

SEQ ID NO: 1007459 - DNA, 25 bp, Homo sapien
cattgcagggtcctctacgttgttg

SEQ ID NO: 1007460 - DNA, 25 bp, Homo sapien
actggacctccagtttcatgcctct

SEQ ID NO: 1007461 - DNA, 25 bp, Homo sapien
tcctgtatggacgtcttgattgtta

SEQ ID NO: 1007462 - DNA, 25 bp, Homo sapien
gattgttaactcacggcactggacc

SEQ ID NO: 1007463 - DNA, 25 bp, Homo sapien
ctttctcactgctcaaaatgcaaac

SEQ ID NO: 1007464 - DNA, 25 bp, Homo sapien
ttctcactgctcaaaatgcaaactc

SEQ ID NO: 1007465 - DNA, 25 bp, Homo sapien
ctcactgctcaaaatgcaaactcag

SEQ ID NO: 1007466 - DNA, 25 bp, Homo sapien
tctcactgctcaaaatgcaaactca

SEQ ID NO: 1007467 - DNA, 25 bp, Homo sapien
tcaacacaagccgtcggcgttcact

SEQ ID NO: 1007468 - DNA, 25 bp, Homo sapien
acctgccggagctgtgtgcaccctt

SEQ ID NO: 1007469 - DNA, 25 bp, Homo sapien
ggcgttcactactgtagctcattca

SEQ ID NO: 1007470 - DNA, 25 bp, Homo sapien
ccggagctgtgtgcaccctttcctg

SEQ ID NO: 1007471 - DNA, 25 bp, Homo sapien
catctctggcgttggcgggcattaa

SEQ ID NO: 1007472 - DNA, 25 bp, Homo sapien
tccccgcttaggagaggacgaggct

SEQ ID NO: 1007473 - DNA, 25 bp, Homo sapien
tccgctgtgcagatcgtacttacct

SEQ ID NO: 1007474 - DNA, 25 bp, Homo sapien
tgtcctatgggtaggagagcgcccc

SEQ ID NO: 1007475 - DNA, 25 bp, Homo sapien
taaaggacttctgtttcgtactgaa

SEQ ID NO: 1007476 - DNA, 25 bp, Homo sapien
gaaaagtacctgtccagctggcatg

SEQ ID NO: 1007477 - DNA, 25 bp, Homo sapien
taatggtgggtacattctctggtgt

SEQ ID NO: 1007478 - DNA, 25 bp, Homo sapien
tttgtgacaagtagggagcatatgc

SEQ ID NO: 1007479 - DNA, 25 bp, Homo sapien
gttggtctcaaactcctgacctcat

SEQ ID NO: 1007480 - DNA, 25 bp, Homo sapien
tgggataacaggcgctcgccaccaa

SEQ ID NO: 1007481 - DNA, 25 bp, Homo sapien
ggataacaggcgctcgccaccaagc

SEQ ID NO: 1007482 - DNA, 25 bp, Homo sapien
caagcctggctagtttttgtatttt

SEQ ID NO: 1007483 - DNA, 25 bp, Homo sapien
tgccctctttaatatccagtgtgat

SEQ ID NO: 1007484 - DNA, 25 bp, Homo sapien
tatgtagacatcagtcgtcattgaa

SEQ ID NO: 1007485 - DNA, 25 bp, Homo sapien
tggcagcataactcaagtctttggc

SEQ ID NO: 1007486 - DNA, 25 bp, Homo sapien
gtgatctcatccgaacttgattata

SEQ ID NO: 1007487 - DNA, 25 bp, Homo sapien
tacctggcgctctctcttgagtggg

SEQ ID NO: 1007488 - DNA, 25 bp, Homo sapien
tcctgagggatctttactgaacgca

SEQ ID NO: 1007489 - DNA, 25 bp, Homo sapien
tgaacgcagcaccttgactacctgg

SEQ ID NO: 1007490 - DNA, 25 bp, Homo sapien
gagggctgccaatagatcataggtc

SEQ ID NO: 1007491 - DNA, 25 bp, Homo sapien
gtccaaggcactctggcagttactg

SEQ ID NO: 1007492 - DNA, 25 bp, Homo sapien
cagttactggattgtgacagcgtta

SEQ ID NO: 1007493 - DNA, 25 bp, Homo sapien
ttttaagtgcgcagggaattgactg

SEQ ID NO: 1007494 - DNA, 25 bp, Homo sapien
gattagttcctactttgtccaaggc

SEQ ID NO: 1007495 - DNA, 25 bp, Homo sapien
ggttggatttctatctctaggcaag

SEQ ID NO: 1007496 - DNA, 25 bp, Homo sapien
taagttgctcatgtgggctggaacc

SEQ ID NO: 1007497 - DNA, 25 bp, Homo sapien
tctaggcaagcctcatgtcatggtt

SEQ ID NO: 1007498 - DNA, 25 bp, Homo sapien
agtgcattccgacgcctcagtggag

SEQ ID NO: 1007499 - DNA, 25 bp, Homo sapien
tctggcctgagggtggaaacattta

SEQ ID NO: 1007500 - DNA, 25 bp, Homo sapien
tatatgctacagtgtccctagtcac

SEQ ID NO: 1007501 - DNA, 25 bp, Homo sapien
ttactctcaggtgtccgtcgtccag

SEQ ID NO: 1007502 - DNA, 25 bp, Homo sapien
cgtcgtccagcctcagcaattttag

SEQ ID NO: 1007503 - DNA, 25 bp, Homo sapien
tgtagcttgtcaatggcatgctagg

SEQ ID NO: 1007504 - DNA, 25 bp, Homo sapien
catcagtggaatgtagcttgtcaat

SEQ ID NO: 1007505 - DNA, 25 bp, Homo sapien
ggcatgctaggtaatatttgttaaa

SEQ ID NO: 1007506 - DNA, 25 bp, Homo sapien
tcaatggcatgctaggtaatatttg

SEQ ID NO: 1007507 - DNA, 25 bp, Homo sapien
aaatgttgatttcggtgaacttttg

SEQ ID NO: 1007508 - DNA, 25 bp, Homo sapien
caagttgttactacagacttcttac

SEQ ID NO: 1007509 - DNA, 25 bp, Homo sapien
tgcagccgctgcttccggtgcagca

SEQ ID NO: 1007510 - DNA, 25 bp, Homo sapien
gactgtagccctcattgtgaagaag

SEQ ID NO: 1007511 - DNA, 25 bp, Homo sapien
tagcaaagccgtctggagatttctt

SEQ ID NO: 1007512 - DNA, 25 bp, Homo sapien
tgaggatctactttatgtcaagtgc

SEQ ID NO: 1007513 - DNA, 25 bp, Homo sapien
tgtcaagtgctctgcatagtgctgt

SEQ ID NO: 1007514 - DNA, 25 bp, Homo sapien
gaaacctaacttatgtccttgaagc

SEQ ID NO: 1007515 - DNA, 25 bp, Homo sapien
ggatgccgctgttctggtcgcttga

SEQ ID NO: 1007516 - DNA, 25 bp, Homo sapien
ttagcctctaaggtcccggacagga

SEQ ID NO: 1007517 - DNA, 25 bp, Homo sapien
ttcctaggatgatctctggcagcgc

SEQ ID NO: 1007518 - DNA, 25 bp, Homo sapien
tctggtcgcttgatttctggcagaa

SEQ ID NO: 1007519 - DNA, 25 bp, Homo sapien
gaagggagactgagtgtaaatggct

SEQ ID NO: 1007520 - DNA, 25 bp, Homo sapien
tctgaacttgcccatgagaagggca

SEQ ID NO: 1007521 - DNA, 25 bp, Homo sapien
gctgcaggtggatttccaacaggcc

SEQ ID NO: 1007522 - DNA, 25 bp, Homo sapien
gaagcgactcagaagtagggttccc

SEQ ID NO: 1007523 - DNA, 25 bp, Homo sapien
ggtagtcggcatcacaagactctga

SEQ ID NO: 1007524 - DNA, 25 bp, Homo sapien
gagcaggtttgtaggaagagtcttt

SEQ ID NO: 1007525 - DNA, 25 bp, Homo sapien
gcaggtttgtaggaagagtctttcc

SEQ ID NO: 1007526 - DNA, 25 bp, Homo sapien
tccttgaaagttgggtagtcggcat

SEQ ID NO: 1007527 - DNA, 25 bp, Homo sapien
tttgtgatgctcttcggcgcttcag

SEQ ID NO: 1007528 - DNA, 25 bp, Homo sapien
tcttggaaatccacgtactctgtag

SEQ ID NO: 1007529 - DNA, 25 bp, Homo sapien
tgtagttgctaatggcacttgtaac

SEQ ID NO: 1007530 - DNA, 25 bp, Homo sapien
taaggttcttcgtagagtaaatgcg

SEQ ID NO: 1007531 - DNA, 25 bp, Homo sapien
tcgcagatctcttatatgaatatag

SEQ ID NO: 1007532 - DNA, 25 bp, Homo sapien
catattgttagaacctgaccactct

SEQ ID NO: 1007533 - DNA, 25 bp, Homo sapien
aaagggcatcttagtgtttgaaatt

SEQ ID NO: 1007534 - DNA, 25 bp, Homo sapien
tgaatatagtaattaaagggcatct

SEQ ID NO: 1007535 - DNA, 25 bp, Homo sapien
tgcccgcaaggtgacgctgaccagg

SEQ ID NO: 1007536 - DNA, 25 bp, Homo sapien
gtggagcagacactgaacaacgtgc

SEQ ID NO: 1007537 - DNA, 25 bp, Homo sapien
atccaaggaattcacccggcgaaga

SEQ ID NO: 1007538 - DNA, 25 bp, Homo sapien
gaaatgacaagtttcgagtcacact

SEQ ID NO: 1007539 - DNA, 25 bp, Homo sapien
attcataagtgaaccatcatttcct

SEQ ID NO: 1007540 - DNA, 25 bp, Homo sapien
ttcataagtgaaccatcatttcctt

SEQ ID NO: 1007541 - DNA, 25 bp, Homo sapien
tctggctttgaaaacgcgttaacat

SEQ ID NO: 1007542 - DNA, 25 bp, Homo sapien
tcatttcctttgttctggctttgaa

SEQ ID NO: 1007543 - DNA, 25 bp, Homo sapien
tgcgctctggagaacggcaagtctg

SEQ ID NO: 1007544 - DNA, 25 bp, Homo sapien
cagccctgctttgcgctctggagaa

SEQ ID NO: 1007545 - DNA, 25 bp, Homo sapien
gagaacggcaagtctgcccgctcat

SEQ ID NO: 1007546 - DNA, 25 bp, Homo sapien
tgggcgcagccctgctttgcgctct

SEQ ID NO: 1007547 - DNA, 25 bp, Homo sapien
aactgtctacacgtgcacataggca

SEQ ID NO: 1007548 - DNA, 25 bp, Homo sapien
cagtgggaaggcctaccgacttact

SEQ ID NO: 1007549 - DNA, 25 bp, Homo sapien
gattagaacagtccaacacagtccg

SEQ ID NO: 1007550 - DNA, 25 bp, Homo sapien
tttggctcagtccacagctgcgttg

SEQ ID NO: 1007551 - DNA, 25 bp, Homo sapien
tatgctgctcacgtgaagtcagccc

SEQ ID NO: 1007552 - DNA, 25 bp, Homo sapien
gatgcaagagcatttagcataccat

SEQ ID NO: 1007553 - DNA, 25 bp, Homo sapien
tcagccacatcttagctattagttc

SEQ ID NO: 1007554 - DNA, 25 bp, Homo sapien
aaccctcgtggaagatctgctgcaa

SEQ ID NO: 1007555 - DNA, 25 bp, Homo sapien
ggcacaggggcatccgctggatggc

SEQ ID NO: 1007556 - DNA, 25 bp, Homo sapien
catccagtccggtcggtggagttga

SEQ ID NO: 1007557 - DNA, 25 bp, Homo sapien
tgtttggcggcacaggggcatccgc

SEQ ID NO: 1007558 - DNA, 25 bp, Homo sapien
gtggagttgagagcccttgggccag

SEQ ID NO: 1007559 - DNA, 25 bp, Homo sapien
gcttcgacaggtcttcactcacgat

SEQ ID NO: 1007560 - DNA, 25 bp, Homo sapien
tcagccttgagaactccacgtgggc

SEQ ID NO: 1007561 - DNA, 25 bp, Homo sapien
ttcaactgggtgagggccgtattcc

SEQ ID NO: 1007562 - DNA, 25 bp, Homo sapien
aggtgctgacgattttcacactgtg

SEQ ID NO: 1007563 - DNA, 25 bp, Homo sapien
tcgcgttaactgctgtggtaacttt

SEQ ID NO: 1007564 - DNA, 25 bp, Homo sapien
gttaactgctgtggtaactttttca

SEQ ID NO: 1007565 - DNA, 25 bp, Homo sapien
tcacttcgcgttaactgctgtggta

SEQ ID NO: 1007566 - DNA, 25 bp, Homo sapien
aactgctgtggtaactttttcagga

SEQ ID NO: 1007567 - DNA, 25 bp, Homo sapien
tcattagtgggccacgaaggtcaag

SEQ ID NO: 1007568 - DNA, 25 bp, Homo sapien
attctgggcgctgcatgactccgaa

SEQ ID NO: 1007569 - DNA, 25 bp, Homo sapien
tgtgtgtccgagacggtgcttccgc

SEQ ID NO: 1007570 - DNA, 25 bp, Homo sapien
ggctttcacgcagctctctcattag

SEQ ID NO: 1007571 - DNA, 25 bp, Homo sapien
cctgcctgtgtactgtgatgggccg

SEQ ID NO: 1007572 - DNA, 25 bp, Homo sapien
cttcccctctcacccggatgctggt

SEQ ID NO: 1007573 - DNA, 25 bp, Homo sapien
gtgtactgtgatgggccggcttccc

SEQ ID NO: 1007574 - DNA, 25 bp, Homo sapien
cctgtgtactgtgatgggccggctt

SEQ ID NO: 1007575 - DNA, 25 bp, Homo sapien
tcctttggtcccttgagtttgatgg

SEQ ID NO: 1007576 - DNA, 25 bp, Homo sapien
tctcccattcttcgtgggacagcct

SEQ ID NO: 1007577 - DNA, 25 bp, Homo sapien
gtggctcccttgacaggcctctccc

SEQ ID NO: 1007578 - DNA, 25 bp, Homo sapien
tcttcgtgggacagcctgtgggtca

SEQ ID NO: 1007579 - DNA, 25 bp, Homo sapien
tgtgaaagccaaagcagattgggac

SEQ ID NO: 1007580 - DNA, 25 bp, Homo sapien
ctgtgaaagccaaagcagattggga

SEQ ID NO: 1007581 - DNA, 25 bp, Homo sapien
tgaaagccaaagcagattgggacat

SEQ ID NO: 1007582 - DNA, 25 bp, Homo sapien
gtgaaagccaaagcagattgggaca

SEQ ID NO: 1007583 - DNA, 25 bp, Homo sapien
gcaccctttctgtcatccccctggt

SEQ ID NO: 1007584 - DNA, 25 bp, Homo sapien
cggtgtgcagggcttgacagagcca

SEQ ID NO: 1007585 - DNA, 25 bp, Homo sapien
gtgcagggcttgacagagccacccg

SEQ ID NO: 1007586 - DNA, 25 bp, Homo sapien
aggccggtgtgcagggcttgacaga

SEQ ID NO: 1007587 - DNA, 25 bp, Homo sapien
tgcgtccgagcaaggggtccgggcc

SEQ ID NO: 1007588 - DNA, 25 bp, Homo sapien
ctggctgcgtccgagcaaggggtcc

SEQ ID NO: 1007589 - DNA, 25 bp, Homo sapien
ccgcctgagcccgcggctaaaggag

SEQ ID NO: 1007590 - DNA, 25 bp, Homo sapien
tgagcccgcggctaaaggaggccgg

SEQ ID NO: 1007591 - DNA, 25 bp, Homo sapien
ctgtgtctgtcacgtagaatgtaaa

SEQ ID NO: 1007592 - DNA, 25 bp, Homo sapien
tcatccccccggaactgcggggctg

SEQ ID NO: 1007593 - DNA, 25 bp, Homo sapien
tgtctgtcacgtagaatgtaaagac

SEQ ID NO: 1007594 - DNA, 25 bp, Homo sapien
ccggaactgcggggctggccctgaa

SEQ ID NO: 1007595 - DNA, 25 bp, Homo sapien
ccgccagcaccatccggaggtcaaa

SEQ ID NO: 1007596 - DNA, 25 bp, Homo sapien
aggcgaaggcgggctcagaaccact

SEQ ID NO: 1007597 - DNA, 25 bp, Homo sapien
tttcatcagtgataggatgagcgga

SEQ ID NO: 1007598 - DNA, 25 bp, Homo sapien
ttccttgtctgtgatctgagcagac

SEQ ID NO: 1007599 - DNA, 25 bp, Homo sapien
tgctccttggtggaggccaaggtca

SEQ ID NO: 1007600 - DNA, 25 bp, Homo sapien
ctgctccttggtggaggccaaggtc

SEQ ID NO: 1007601 - DNA, 25 bp, Homo sapien
ccttggtggaggccaaggtcacagg

SEQ ID NO: 1007602 - DNA, 25 bp, Homo sapien
ctccttggtggaggccaaggtcaca

SEQ ID NO: 1007603 - DNA, 25 bp, Homo sapien
tatgcatttagtcatgagggaggct

SEQ ID NO: 1007604 - DNA, 25 bp, Homo sapien
tgcacaaactcttggctccgtcaac

SEQ ID NO: 1007605 - DNA, 25 bp, Homo sapien
tcaaccctgaatgagaagtcggcgc

SEQ ID NO: 1007606 - DNA, 25 bp, Homo sapien
gatgccctgtacctagtgtctctaa

SEQ ID NO: 1007607 - DNA, 25 bp, Homo sapien
tgctctctcaacagggatcaaagtc

SEQ ID NO: 1007608 - DNA, 25 bp, Homo sapien
ggaccaccttctacacaggctgcag

SEQ ID NO: 1007609 - DNA, 25 bp, Homo sapien
caccttccgtaagccaaagaactgg

SEQ ID NO: 1007610 - DNA, 25 bp, Homo sapien
cagacaaccagtgtagcctgaggac

SEQ ID NO: 1007611 - DNA, 25 bp, Homo sapien
tcgtcactatgtgcgcttttaaaaa

SEQ ID NO: 1007612 - DNA, 25 bp, Homo sapien
tagtaaatttacagcgttatttctc

SEQ ID NO: 1007613 - DNA, 25 bp, Homo sapien
catcctcgtgggctcgtcactatgt

SEQ ID NO: 1007614 - DNA, 25 bp, Homo sapien
tactaagcgttctgtgcatggcaca

SEQ ID NO: 1007615 - DNA, 25 bp, Homo sapien
tgagcaggttgcttggcctcacaaa

SEQ ID NO: 1007616 - DNA, 25 bp, Homo sapien
ttgctttctgacagccgggacgagg

SEQ ID NO: 1007617 - DNA, 25 bp, Homo sapien
ctatttaaggctcttgaaggtccgg

SEQ ID NO: 1007618 - DNA, 25 bp, Homo sapien
cacgtttgagtttgcacttgctgag

SEQ ID NO: 1007619 - DNA, 25 bp, Homo sapien
gagccaggtgcctatttggtagagc

SEQ ID NO: 1007620 - DNA, 25 bp, Homo sapien
agctggacttgaccgccatgcccag

SEQ ID NO: 1007621 - DNA, 25 bp, Homo sapien
gccaggtgcctatttggtagagcag

SEQ ID NO: 1007622 - DNA, 25 bp, Homo sapien
tgcccagcgggtgcagggcctcgct

SEQ ID NO: 1007623 - DNA, 25 bp, Homo sapien
agtgcagccaggagcgcgtgcgcca

SEQ ID NO: 1007624 - DNA, 25 bp, Homo sapien
aaggcccggtgcgcccagctgtgct

SEQ ID NO: 1007625 - DNA, 25 bp, Homo sapien
gcacctggagcggttagggctactc

SEQ ID NO: 1007626 - DNA, 25 bp, Homo sapien
ctgcgagtaccagtggatgcccgcg

SEQ ID NO: 1007627 - DNA, 25 bp, Homo sapien
cgcggcctcctcgcttagggtcacg

SEQ ID NO: 1007628 - DNA, 25 bp, Homo sapien
cctgggccgtgagcggcgcgtaggc

SEQ ID NO: 1007629 - DNA, 25 bp, Homo sapien
tgagcggcgcgtaggcgcccgcggc

SEQ ID NO: 1007630 - DNA, 25 bp, Homo sapien
gccctgggccgtgagcggcgcgtag

SEQ ID NO: 1007631 - DNA, 25 bp, Homo sapien
cggcggtccccgtcacgctcggcca

SEQ ID NO: 1007632 - DNA, 25 bp, Homo sapien
gtccccgtcacgctcggccaccacg

SEQ ID NO: 1007633 - DNA, 25 bp, Homo sapien
ggagccggcggtccccgtcacgctc

SEQ ID NO: 1007634 - DNA, 25 bp, Homo sapien
ccccgtcacgctcggccaccacgta

SEQ ID NO: 1007635 - DNA, 25 bp, Homo sapien
cgcgtctcgatcacgtagaagacct

SEQ ID NO: 1007636 - DNA, 25 bp, Homo sapien
gccgagtcgttgtgcggcgccacaa

SEQ ID NO: 1007637 - DNA, 25 bp, Homo sapien
tagaagaccttcttggcgccgtcgt

SEQ ID NO: 1007638 - DNA, 25 bp, Homo sapien
acaaagagcaggtgcgcggcggtga

SEQ ID NO: 1007639 - DNA, 25 bp, Homo sapien
gccctcgtagtgcagagactcctct

SEQ ID NO: 1007640 - DNA, 25 bp, Homo sapien
tcaccgagcagtggatatgtgcctt

SEQ ID NO: 1007641 - DNA, 25 bp, Homo sapien
tcagacgtggtgatgtccactgcgc

SEQ ID NO: 1007642 - DNA, 25 bp, Homo sapien
catcaccgagatggccaaagcgttc

SEQ ID NO: 1007643 - DNA, 25 bp, Homo sapien
tctggaagtgttcggcttctcgtaa

SEQ ID NO: 1007644 - DNA, 25 bp, Homo sapien
gagcaaacagagttaagtctggaag

SEQ ID NO: 1007645 - DNA, 25 bp, Homo sapien
tcctatctgcccgaagagcaaacag

SEQ ID NO: 1007646 - DNA, 25 bp, Homo sapien
taagtctggaagtgttcggcttctc

SEQ ID NO: 1007647 - DNA, 25 bp, Homo sapien
cttcatccttaaatatgatgtcggg

SEQ ID NO: 1007648 - DNA, 25 bp, Homo sapien
ataccttccgctggcgcctagggtc

SEQ ID NO: 1007649 - DNA, 25 bp, Homo sapien
gataaactgcttgtaggctaaaggg

SEQ ID NO: 1007650 - DNA, 25 bp, Homo sapien
taaatcgctcggagtttctggagat

SEQ ID NO: 1007651 - DNA, 25 bp, Homo sapien
tcccgagcataccagcagcgaggag

SEQ ID NO: 1007652 - DNA, 25 bp, Homo sapien
gagacgaggactagcagcagacatc

SEQ ID NO: 1007653 - DNA, 25 bp, Homo sapien
ggtccgcacgccagtcccgagcata

SEQ ID NO: 1007654 - DNA, 25 bp, Homo sapien
cagcgaggagacgaggactagcagc

SEQ ID NO: 1007655 - DNA, 25 bp, Homo sapien
tgccggccgctgataacggaacaca

SEQ ID NO: 1007656 - DNA, 25 bp, Homo sapien
cacatcggagttgggtcgcgagaca

SEQ ID NO: 1007657 - DNA, 25 bp, Homo sapien
gaactgatgacttccgagctgtccc

SEQ ID NO: 1007658 - DNA, 25 bp, Homo sapien
tgtgcgtgtgcgctctctcttgcgc

SEQ ID NO: 1007659 - DNA, 25 bp, Homo sapien
actcccattggaggacggctccctg

SEQ ID NO: 1007660 - DNA, 25 bp, Homo sapien
cagccactcccattggaggacggct

SEQ ID NO: 1007661 - DNA, 25 bp, Homo sapien
cactcccattggaggacggctccct

SEQ ID NO: 1007662 - DNA, 25 bp, Homo sapien
agccactcccattggaggacggctc

SEQ ID NO: 1007663 - DNA, 25 bp, Homo sapien
cttcactcgagtgagtgccagccgg

SEQ ID NO: 1007664 - DNA, 25 bp, Homo sapien
cactcgagtgagtgccagccggcgt

SEQ ID NO: 1007665 - DNA, 25 bp, Homo sapien
gccttggctctgtccttcactcgag

SEQ ID NO: 1007666 - DNA, 25 bp, Homo sapien
ttggctctgtccttcactcgagtga

SEQ ID NO: 1007667 - DNA, 25 bp, Homo sapien
ccaggcaggaagtagtcccgaggtt

SEQ ID NO: 1007668 - DNA, 25 bp, Homo sapien
tacccagggccatgcattttgggcc

SEQ ID NO: 1007669 - DNA, 25 bp, Homo sapien
cagggccatgcattttgggccaggc

SEQ ID NO: 1007670 - DNA, 25 bp, Homo sapien
acagtacccagggccatgcattttg

SEQ ID NO: 1007671 - DNA, 25 bp, Homo sapien
ccaggtcaggagaagcactacacac

SEQ ID NO: 1007672 - DNA, 25 bp, Homo sapien
cagatgctcctctgcggtccacggc

SEQ ID NO: 1007673 - DNA, 25 bp, Homo sapien
ctcctctgcggtccacggctccact

SEQ ID NO: 1007674 - DNA, 25 bp, Homo sapien
gacgtcccaggagcgtgtcagagaa

SEQ ID NO: 1007675 - DNA, 25 bp, Homo sapien
cctctgcggtccacggctccactgg

SEQ ID NO: 1007676 - DNA, 25 bp, Homo sapien
tgttgtttgtttgaagggtgaaggc

SEQ ID NO: 1007677 - DNA, 25 bp, Homo sapien
tgtgtgcctgatctcttttgtgtct

SEQ ID NO: 1007678 - DNA, 25 bp, Homo sapien
ggtgaaggctgtgtgcctgatctct

SEQ ID NO: 1007679 - DNA, 25 bp, Homo sapien
ggctgtgtgcctgatctcttttgtg

SEQ ID NO: 1007680 - DNA, 25 bp, Homo sapien
tggcactgttgggatctccagttcc

SEQ ID NO: 1007681 - DNA, 25 bp, Homo sapien
accccggatgcacccgaggaggtga

SEQ ID NO: 1007682 - DNA, 25 bp, Homo sapien
tctgcgttccgggcaccaagggaga

SEQ ID NO: 1007683 - DNA, 25 bp, Homo sapien
agaaatcttgtttccgaagcgcctc

SEQ ID NO: 1007684 - DNA, 25 bp, Homo sapien
gttctgccgagccactgcccgaaca

SEQ ID NO: 1007685 - DNA, 25 bp, Homo sapien
cagcatccctagttccagccacgcc

SEQ ID NO: 1007686 - DNA, 25 bp, Homo sapien
gacaccacctgtgggtaggaggcca

SEQ ID NO: 1007687 - DNA, 25 bp, Homo sapien
ggttctgggagcagcccttggtcca

SEQ ID NO: 1007688 - DNA, 25 bp, Homo sapien
taggaggccacgggctcaggttctg

SEQ ID NO: 1007689 - DNA, 25 bp, Homo sapien
tggtgcatggcccgggctgtagagg

SEQ ID NO: 1007690 - DNA, 25 bp, Homo sapien
ctgtgtagctcaggactggtgtgag

SEQ ID NO: 1007691 - DNA, 25 bp, Homo sapien
tagagggcgcgacagggctggtgtc

SEQ ID NO: 1007692 - DNA, 25 bp, Homo sapien
aggctctggccctcggtagctggac

SEQ ID NO: 1007693 - DNA, 25 bp, Homo sapien
tgtgtttctgtacaccctgggtgct

SEQ ID NO: 1007694 - DNA, 25 bp, Homo sapien
cttaaggccgactgccaatgttttg

SEQ ID NO: 1007695 - DNA, 25 bp, Homo sapien
tgaactggcagttaaactgtcctgg

SEQ ID NO: 1007696 - DNA, 25 bp, Homo sapien
tgaccaatttgtcactaaacagcat

SEQ ID NO: 1007697 - DNA, 25 bp, Homo sapien
ttcatccacgtctcaggtctgggag

SEQ ID NO: 1007698 - DNA, 25 bp, Homo sapien
ggcctgctggcctaggccagggctg

SEQ ID NO: 1007699 - DNA, 25 bp, Homo sapien
tggaagtgaatgcaggctgtccaca

SEQ ID NO: 1007700 - DNA, 25 bp, Homo sapien
gatttctatctgtggtcacagagag

SEQ ID NO: 1007701 - DNA, 25 bp, Homo sapien
tcccgatttctatctgtggtcacag

SEQ ID NO: 1007702 - DNA, 25 bp, Homo sapien
ttccccgctagaaacctggaagtga

SEQ ID NO: 1007703 - DNA, 25 bp, Homo sapien
tcttatcgggtctggcagcccggtc

SEQ ID NO: 1007704 - DNA, 25 bp, Homo sapien
gggtagacccggacttcctgctcag

SEQ ID NO: 1007705 - DNA, 25 bp, Homo sapien
atgatggcgcccgacgggtcctgca

SEQ ID NO: 1007706 - DNA, 25 bp, Homo sapien
gcaggaccagctctttcacaggagg

SEQ ID NO: 1007707 - DNA, 25 bp, Homo sapien
aacagtcgccctcacatgcagtgcg

SEQ ID NO: 1007708 - DNA, 25 bp, Homo sapien
cagtcgccctcacatgcagtgcggg

SEQ ID NO: 1007709 - DNA, 25 bp, Homo sapien
ttttcagaacagtcgccctcacatg

SEQ ID NO: 1007710 - DNA, 25 bp, Homo sapien
tcctgcttttcagaacagtcgccct

SEQ ID NO: 1007711 - DNA, 25 bp, Homo sapien
caggggctgacgcatctttacttgg

SEQ ID NO: 1007712 - DNA, 25 bp, Homo sapien
ggggctgacgcatctttacttggga

SEQ ID NO: 1007713 - DNA, 25 bp, Homo sapien
gggctgacgcatctttacttgggaa

SEQ ID NO: 1007714 - DNA, 25 bp, Homo sapien
gctgacgcatctttacttgggaaga

SEQ ID NO: 1007715 - DNA, 25 bp, Homo sapien
aagggacagggtgtgacacggatgt

SEQ ID NO: 1007716 - DNA, 25 bp, Homo sapien
gggacagggtgtgacacggatgtag

SEQ ID NO: 1007717 - DNA, 25 bp, Homo sapien
aggatttatggttgtaggggtgaag

SEQ ID NO: 1007718 - DNA, 25 bp, Homo sapien
tgaagggacagggtgtgacacggat

SEQ ID NO: 1007719 - DNA, 25 bp, Homo sapien
caagagggagttggtgctgtctgtt

SEQ ID NO: 1007720 - DNA, 25 bp, Homo sapien
gattgggtgtagcaacagtgcttgc

SEQ ID NO: 1007721 - DNA, 25 bp, Homo sapien
aacctgagcaccgtgtccacacacc

SEQ ID NO: 1007722 - DNA, 25 bp, Homo sapien
tgccttttgtctaatctgttgggca

SEQ ID NO: 1007723 - DNA, 25 bp, Homo sapien
gggtggatccagtagcagtgatgcc

SEQ ID NO: 1007724 - DNA, 25 bp, Homo sapien
ctggggtggatccagtagcagtgat

SEQ ID NO: 1007725 - DNA, 25 bp, Homo sapien
ggggtggatccagtagcagtgatgc

SEQ ID NO: 1007726 - DNA, 25 bp, Homo sapien
tggggtggatccagtagcagtgatg

SEQ ID NO: 1007727 - DNA, 25 bp, Homo sapien
gaacacgcctggattaacatctgct

SEQ ID NO: 1007728 - DNA, 25 bp, Homo sapien
ggaagccaatagaacacgcctggat

SEQ ID NO: 1007729 - DNA, 25 bp, Homo sapien
tctcaggaagccaatagaacacgcc

SEQ ID NO: 1007730 - DNA, 25 bp, Homo sapien
tctacgatgttctcaggaagccaat

SEQ ID NO: 1007731 - DNA, 25 bp, Homo sapien
catcctacttggcatgaacaggtca

SEQ ID NO: 1007732 - DNA, 25 bp, Homo sapien
cgtggggaacacgtctgccccgact

SEQ ID NO: 1007733 - DNA, 25 bp, Homo sapien
cgacttccacgccaaagggtggcag

SEQ ID NO: 1007734 - DNA, 25 bp, Homo sapien
cagggagacgcatcctacttggcat

SEQ ID NO: 1007735 - DNA, 25 bp, Homo sapien
ggaaagggtcttctcggcttgtaga

SEQ ID NO: 1007736 - DNA, 25 bp, Homo sapien
tcggcttgtagaaccgggagcgtcc

SEQ ID NO: 1007737 - DNA, 25 bp, Homo sapien
gtcttctcggcttgtagaaccggga

SEQ ID NO: 1007738 - DNA, 25 bp, Homo sapien
tgtagaaccgggagcgtccttctgg

SEQ ID NO: 1007739 - DNA, 25 bp, Homo sapien
tgtgggtatggacaacatcatcata

SEQ ID NO: 1007740 - DNA, 25 bp, Homo sapien
aacatcatcataaaatgacgagatg

SEQ ID NO: 1007741 - DNA, 25 bp, Homo sapien
ctgatgtgggtatggacaacatcat

SEQ ID NO: 1007742 - DNA, 25 bp, Homo sapien
aatgacgagatgaaatgctaagctg

SEQ ID NO: 1007743 - DNA, 25 bp, Homo sapien
aaagcagtgtaggatgaatagtgcc

SEQ ID NO: 1007744 - DNA, 25 bp, Homo sapien
gccgagcccatgatgaagaatgtca

SEQ ID NO: 1007745 - DNA, 25 bp, Homo sapien
agggaccagtccctgggtcatcaaa

SEQ ID NO: 1007746 - DNA, 25 bp, Homo sapien
taaccgggtatcaacaacaaagcag

SEQ ID NO: 1007747 - DNA, 25 bp, Homo sapien
aagctgacgtctgctcatatttgca

SEQ ID NO: 1007748 - DNA, 25 bp, Homo sapien
ctttcttgcaaaacggccccttctg

SEQ ID NO: 1007749 - DNA, 25 bp, Homo sapien
gagagcatttggcaggcagcccgct

SEQ ID NO: 1007750 - DNA, 25 bp, Homo sapien
caaggcacggtttcatcattgagag

SEQ ID NO: 1007751 - DNA, 25 bp, Homo sapien
gacgtcgtcacagtcatctttcttt

SEQ ID NO: 1007752 - DNA, 25 bp, Homo sapien
tcccattccaggcaagggacacttc

SEQ ID NO: 1007753 - DNA, 25 bp, Homo sapien
cacggcgatgacgtcgtcacagtca

SEQ ID NO: 1007754 - DNA, 25 bp, Homo sapien
ctttttattggaggcactgtccttc

SEQ ID NO: 1007755 - DNA, 25 bp, Homo sapien
tttttatccttatccagaactgcca

SEQ ID NO: 1007756 - DNA, 25 bp, Homo sapien
ctttttatccttatccagaactgcc

SEQ ID NO: 1007757 - DNA, 25 bp, Homo sapien
ttttatccttatccagaactgccat

SEQ ID NO: 1007758 - DNA, 25 bp, Homo sapien
cgaccccgaggcaacagcttgtcct

SEQ ID NO: 1007759 - DNA, 25 bp, Homo sapien
ccttggtaagcatcattctctgggt

SEQ ID NO: 1007760 - DNA, 25 bp, Homo sapien
tctcctgtggggtccgctctaagga

SEQ ID NO: 1007761 - DNA, 25 bp, Homo sapien
gaagatctcttggttgtgtagctcc

SEQ ID NO: 1007762 - DNA, 25 bp, Homo sapien
gccgctgactgtggctagatcttag

SEQ ID NO: 1007763 - DNA, 25 bp, Homo sapien
cttgttgcagatgcttggaagccgc

SEQ ID NO: 1007764 - DNA, 25 bp, Homo sapien
tagatcttagcaagggttctgagct

SEQ ID NO: 1007765 - DNA, 25 bp, Homo sapien
ctttagagtcctccccatgaagccc

SEQ ID NO: 1007766 - DNA, 25 bp, Homo sapien
gccagccataccttggctgtccgtt

SEQ ID NO: 1007767 - DNA, 25 bp, Homo sapien
atccaggaacagagcgtatgacttg

SEQ ID NO: 1007768 - DNA, 25 bp, Homo sapien
tcttctacacgactccttggattct

SEQ ID NO: 1007769 - DNA, 25 bp, Homo sapien
gaacagagcgtatgacttggtctcc

SEQ ID NO: 1007770 - DNA, 25 bp, Homo sapien
ctcgtccaccccgttggagatcctc

SEQ ID NO: 1007771 - DNA, 25 bp, Homo sapien
ccaccccgttggagatcctcctcat

SEQ ID NO: 1007772 - DNA, 25 bp, Homo sapien
gggcctggacctgccgcacttctct

SEQ ID NO: 1007773 - DNA, 25 bp, Homo sapien
tgggtcttctcggggcctggacctg

SEQ ID NO: 1007774 - DNA, 25 bp, Homo sapien
caggcccctcgtagggcccctggag

SEQ ID NO: 1007775 - DNA, 25 bp, Homo sapien
gctctgcctgtgttcgcccttggtt

SEQ ID NO: 1007776 - DNA, 25 bp, Homo sapien
tctgcctgtgttcgcccttggttcc

SEQ ID NO: 1007777 - DNA, 25 bp, Homo sapien
gcccctggagcccgtcacagaggct

SEQ ID NO: 1007778 - DNA, 25 bp, Homo sapien
gcctgcgttcttcatgatcttccca

SEQ ID NO: 1007779 - DNA, 25 bp, Homo sapien
ggctcagagggacgcctgcgttctt

SEQ ID NO: 1007780 - DNA, 25 bp, Homo sapien
aaggccaactcggagggcaagctgg

SEQ ID NO: 1007781 - DNA, 25 bp, Homo sapien
ccaagacttgctgcacgtcggcttc

SEQ ID NO: 1007782 - DNA, 25 bp, Homo sapien
atgatgctggcaaatggttctctag

SEQ ID NO: 1007783 - DNA, 25 bp, Homo sapien
tatattgtccatgtaagatgatgct

SEQ ID NO: 1007784 - DNA, 25 bp, Homo sapien
catatattgtccatgtaagatgatg

SEQ ID NO: 1007785 - DNA, 25 bp, Homo sapien
caaatggttctctagtggctggatc

SEQ ID NO: 1007786 - DNA, 25 bp, Homo sapien
gtaggagacgaattcgtgaaccttc

SEQ ID NO: 1007787 - DNA, 25 bp, Homo sapien
agagggcgaagcctgatctcccagg

SEQ ID NO: 1007788 - DNA, 25 bp, Homo sapien
agggatcccgtgctgcaaccaggag

SEQ ID NO: 1007789 - DNA, 25 bp, Homo sapien
catttgaagtaggagacgaattcgt

SEQ ID NO: 1007790 - DNA, 25 bp, Homo sapien
gtgaatggccgaagatgtggtaaga

SEQ ID NO: 1007791 - DNA, 25 bp, Homo sapien
cgaggacccatagagcacaggctgt

SEQ ID NO: 1007792 - DNA, 25 bp, Homo sapien
tggccgaagatgtggtaagaggtgg

SEQ ID NO: 1007793 - DNA, 25 bp, Homo sapien
ctagggcccgaggacccatagagca

SEQ ID NO: 1007794 - DNA, 25 bp, Homo sapien
cctggagatccaaaatgccagtgac

SEQ ID NO: 1007795 - DNA, 25 bp, Homo sapien
gccagtgacaatgcgtgttgaggat

SEQ ID NO: 1007796 - DNA, 25 bp, Homo sapien
acaatgcgtgttgaggatgggtcca

SEQ ID NO: 1007797 - DNA, 25 bp, Homo sapien
ccaaaatgccagtgacaatgcgtgt

SEQ ID NO: 1007798 - DNA, 25 bp, Homo sapien
tcgcagaaggccattctgtgggcct

SEQ ID NO: 1007799 - DNA, 25 bp, Homo sapien
tcttaaactcggtgcatgtggggct

SEQ ID NO: 1007800 - DNA, 25 bp, Homo sapien
cttcagggtcagatagtgcattgcc

SEQ ID NO: 1007801 - DNA, 25 bp, Homo sapien
gaggcctcgcgtctgctgtgttcct

SEQ ID NO: 1007802 - DNA, 25 bp, Homo sapien
acgggtcctgacttcggcttcctga

SEQ ID NO: 1007803 - DNA, 25 bp, Homo sapien
cagaccggcagaggccacgtttctg

SEQ ID NO: 1007804 - DNA, 25 bp, Homo sapien
tgttttgtgctgaccacactcgatt

SEQ ID NO: 1007805 - DNA, 25 bp, Homo sapien
tacgggaatgaatgtaaggtgctga

SEQ ID NO: 1007806 - DNA, 25 bp, Homo sapien
ggcgatgacctgtgaagcttccagc

SEQ ID NO: 1007807 - DNA, 25 bp, Homo sapien
gagggctggggcgatgacctgtgaa

SEQ ID NO: 1007808 - DNA, 25 bp, Homo sapien
acatgccgcagccccttaaatcagg

SEQ ID NO: 1007809 - DNA, 25 bp, Homo sapien
catgccgcagccccttaaatcaggg

SEQ ID NO: 1007810 - DNA, 25 bp, Homo sapien
gctccagcaccatgccctcctgcac

SEQ ID NO: 1007811 - DNA, 25 bp, Homo sapien
tgcaccagcatcacgtcctcctgct

SEQ ID NO: 1007812 - DNA, 25 bp, Homo sapien
cctgcaccagcatcacgtcctcctg

SEQ ID NO: 1007813 - DNA, 25 bp, Homo sapien
accagcatcacgtcctcctgctcca

SEQ ID NO: 1007814 - DNA, 25 bp, Homo sapien
gggtcatacggagctggtcactcat

SEQ ID NO: 1007815 - DNA, 25 bp, Homo sapien
tgctggattacacggagctggtcac

SEQ ID NO: 1007816 - DNA, 25 bp, Homo sapien
cctttatggttagacatggctgcat

SEQ ID NO: 1007817 - DNA, 25 bp, Homo sapien
ggccacacgtcccaggtcctttatg

SEQ ID NO: 1007818 - DNA, 25 bp, Homo sapien
tcttgtgaaggctgcactatgctgt

SEQ ID NO: 1007819 - DNA, 25 bp, Homo sapien
tgcactatgctgtccgcggcacgct

SEQ ID NO: 1007820 - DNA, 25 bp, Homo sapien
tgaaggctgcactatgctgtccgcg

SEQ ID NO: 1007821 - DNA, 25 bp, Homo sapien
ttcatcttgtgaaggctgcactatg

SEQ ID NO: 1007822 - DNA, 25 bp, Homo sapien
ggccttgcatagagtagggcatcaa

SEQ ID NO: 1007823 - DNA, 25 bp, Homo sapien
cgtgcctgcccgggccttgcataga

SEQ ID NO: 1007824 - DNA, 25 bp, Homo sapien
cccgggccttgcatagagtagggca

SEQ ID NO: 1007825 - DNA, 25 bp, Homo sapien
ctgcccgggccttgcatagagtagg

SEQ ID NO: 1007826 - DNA, 25 bp, Homo sapien
ttccagagcacaaatcgaagcggat

SEQ ID NO: 1007827 - DNA, 25 bp, Homo sapien
gggcatctgttctccgagaaaagac

SEQ ID NO: 1007828 - DNA, 25 bp, Homo sapien
caggcctaactccagttgctggact

SEQ ID NO: 1007829 - DNA, 25 bp, Homo sapien
tcgaagcggatagtggtgcacagaa

SEQ ID NO: 1007830 - DNA, 25 bp, Homo sapien
agcagcttggacttgcggcccctga

SEQ ID NO: 1007831 - DNA, 25 bp, Homo sapien
gaccctttgtgcagcgtggcatgaa

SEQ ID NO: 1007832 - DNA, 25 bp, Homo sapien
ccattgtgtcaaggaagaagccaac

SEQ ID NO: 1007833 - DNA, 25 bp, Homo sapien
gcatgaacagcatggatggtaccaa

SEQ ID NO: 1007834 - DNA, 25 bp, Homo sapien
ctaggcccgacacctggtatctgtg

SEQ ID NO: 1007835 - DNA, 25 bp, Homo sapien
gtgggtccgcccgtggtcgctgcgg

SEQ ID NO: 1007836 - DNA, 25 bp, Homo sapien
ttttctaggcccgacacctggtatc

SEQ ID NO: 1007837 - DNA, 25 bp, Homo sapien
tgttgttttctaggcccgacacctg

SEQ ID NO: 1007838 - DNA, 25 bp, Homo sapien
ctgaaagacgggctctgcagcccga

SEQ ID NO: 1007839 - DNA, 25 bp, Homo sapien
ccagctctgaaagacgggctctgca

SEQ ID NO: 1007840 - DNA, 25 bp, Homo sapien
agcccgacagggcattgtgcagcgc

SEQ ID NO: 1007841 - DNA, 25 bp, Homo sapien
agggcattgtgcagcgcctgtccgt

SEQ ID NO: 1007842 - DNA, 25 bp, Homo sapien
gctttggaggcacacactaaatgct

SEQ ID NO: 1007843 - DNA, 25 bp, Homo sapien
cactgataaacgaaggaggccctga

SEQ ID NO: 1007844 - DNA, 25 bp, Homo sapien
aatgcttgctgatcaaacccactga

SEQ ID NO: 1007845 - DNA, 25 bp, Homo sapien
tggatgaggacattcaggccaccag

SEQ ID NO: 1007846 - DNA, 25 bp, Homo sapien
gcctcagaacttcgaagcagcatga

SEQ ID NO: 1007847 - DNA, 25 bp, Homo sapien
tgaaaagagcacctcattcttggct

SEQ ID NO: 1007848 - DNA, 25 bp, Homo sapien
caggatcttaggatcttgcctcaga

SEQ ID NO: 1007849 - DNA, 25 bp, Homo sapien
gagcttgtgaggttgcaggatctta

SEQ ID NO: 1007850 - DNA, 25 bp, Homo sapien
actgctcatgacgtatgtgcgccat

SEQ ID NO: 1007851 - DNA, 25 bp, Homo sapien
accaactgctcatgacgtatgtgcg

SEQ ID NO: 1007852 - DNA, 25 bp, Homo sapien
aactgattcaaccaactgctcatga

SEQ ID NO: 1007853 - DNA, 25 bp, Homo sapien
gattcaaccaactgctcatgacgta

SEQ ID NO: 1007854 - DNA, 25 bp, Homo sapien
tgctcctcttccttatgccatcttt

SEQ ID NO: 1007855 - DNA, 25 bp, Homo sapien
cctcttccttatgccatctttcaag

SEQ ID NO: 1007856 - DNA, 25 bp, Homo sapien
tccttatgccatctttcaagccccc

SEQ ID NO: 1007857 - DNA, 25 bp, Homo sapien
ccttatgccatctttcaagccccct

SEQ ID NO: 1007858 - DNA, 25 bp, Homo sapien
tttcctcttgtcgatgaggtcagag

SEQ ID NO: 1007859 - DNA, 25 bp, Homo sapien
tcctcttgtcgatgaggtcagagga

SEQ ID NO: 1007860 - DNA, 25 bp, Homo sapien
tcacaggggctcggtcctctctttc

SEQ ID NO: 1007861 - DNA, 25 bp, Homo sapien
tctttcctcttgtcgatgaggtcag

SEQ ID NO: 1007862 - DNA, 25 bp, Homo sapien
agcttgtaggagcagaacgggccca

SEQ ID NO: 1007863 - DNA, 25 bp, Homo sapien
tcatggagcttgagaactgggtgct

SEQ ID NO: 1007864 - DNA, 25 bp, Homo sapien
gcccaggtgtggtcttcatggagct

SEQ ID NO: 1007865 - DNA, 25 bp, Homo sapien
gaaggtgccattttactggtcagag

SEQ ID NO: 1007866 - DNA, 25 bp, Homo sapien
tggttccgatcaaaacgctcttctg

SEQ ID NO: 1007867 - DNA, 25 bp, Homo sapien
ggcaagaacactatcgccagcgcga

SEQ ID NO: 1007868 - DNA, 25 bp, Homo sapien
taacatgggccgctttgatcttcct

SEQ ID NO: 1007869 - DNA, 25 bp, Homo sapien
gccagcgcgattccaaactcgtggt

SEQ ID NO: 1007870 - DNA, 25 bp, Homo sapien
tatctccgtgctgggtgccacttgg

SEQ ID NO: 1007871 - DNA, 25 bp, Homo sapien
ccgttgtgtagaacttgatgggtcc

SEQ ID NO: 1007872 - DNA, 25 bp, Homo sapien
agcaggacgaggaaacgggcgcttt

SEQ ID NO: 1007873 - DNA, 25 bp, Homo sapien
tgatgggtccgatctctcccttgat

SEQ ID NO: 1007874 - DNA, 25 bp, Homo sapien
tgggaagtctttaactttctggctg

SEQ ID NO: 1007875 - DNA, 25 bp, Homo sapien
gctggcatgaagtcggccctgtgat

SEQ ID NO: 1007876 - DNA, 25 bp, Homo sapien
tctttaactttctggctggcatgaa

SEQ ID NO: 1007877 - DNA, 25 bp, Homo sapien
ttctggctggcatgaagtcggccct

SEQ ID NO: 1007878 - DNA, 25 bp, Homo sapien
ccagtgttttagcacattcagaatt

SEQ ID NO: 1007879 - DNA, 25 bp, Homo sapien
tctggaagcagcgtttgtttcttac

SEQ ID NO: 1007880 - DNA, 25 bp, Homo sapien
caactctttggattcaccttacacc

SEQ ID NO: 1007881 - DNA, 25 bp, Homo sapien
ttggattcaccttacaccagtgttt

SEQ ID NO: 1007882 - DNA, 25 bp, Homo sapien
tctcagcagtgggagctgcgttgct

SEQ ID NO: 1007883 - DNA, 25 bp, Homo sapien
gcttttccgaggtctttagcaggcg

SEQ ID NO: 1007884 - DNA, 25 bp, Homo sapien
aggtctttagcaggcggctgttctc

SEQ ID NO: 1007885 - DNA, 25 bp, Homo sapien
tcctctggcttttccgaggtcttta

SEQ ID NO: 1007886 - DNA, 25 bp, Homo sapien
caagggttgcccctgtggctgagat

SEQ ID NO: 1007887 - DNA, 25 bp, Homo sapien
ctgcacaagggttgcccctgtggct

SEQ ID NO: 1007888 - DNA, 25 bp, Homo sapien
cacaagggttgcccctgtggctgag

SEQ ID NO: 1007889 - DNA, 25 bp, Homo sapien
tggctgagatgggtaggggctgagc

SEQ ID NO: 1007890 - DNA, 25 bp, Homo sapien
cacatatgaccattctcaggctgtc

SEQ ID NO: 1007891 - DNA, 25 bp, Homo sapien
attgtcctctcaacagtgccctgct

SEQ ID NO: 1007892 - DNA, 25 bp, Homo sapien
ccacagcgaggtagctttagcttgt

SEQ ID NO: 1007893 - DNA, 25 bp, Homo sapien
gccggcgtggaaggaccattgtcct

SEQ ID NO: 1007894 - DNA, 25 bp, Homo sapien
atctcattagccaccaggacgtcca

SEQ ID NO: 1007895 - DNA, 25 bp, Homo sapien
tgcagaggcccctgatcgatgcctg

SEQ ID NO: 1007896 - DNA, 25 bp, Homo sapien
cagaagcaaagtgaatcgagggtcc

SEQ ID NO: 1007897 - DNA, 25 bp, Homo sapien
acgcagtggccaagcacgctgcaga

SEQ ID NO: 1007898 - DNA, 25 bp, Homo sapien
ccaacgtggcagcatctggtgtcct

SEQ ID NO: 1007899 - DNA, 25 bp, Homo sapien
cacagtgaaacccaacgtggcagca

SEQ ID NO: 1007900 - DNA, 25 bp, Homo sapien
gtgtccttccatcgagagcatccaa

SEQ ID NO: 1007901 - DNA, 25 bp, Homo sapien
cgtgctcttccccggtaggaagttg

SEQ ID NO: 1007902 - DNA, 25 bp, Homo sapien
ctgctggaaacccaccctggaggtg

SEQ ID NO: 1007903 - DNA, 25 bp, Homo sapien
cccaccctggaggtggtcctgggat

SEQ ID NO: 1007904 - DNA, 25 bp, Homo sapien
ccaccctggaggtggtcctgggatg

SEQ ID NO: 1007905 - DNA, 25 bp, Homo sapien
tgctggaaacccaccctggaggtgg

SEQ ID NO: 1007906 - DNA, 25 bp, Homo sapien
ggtcccacggcaaacacttcctgga

SEQ ID NO: 1007907 - DNA, 25 bp, Homo sapien
acaattgctgactgtccttgttcct

SEQ ID NO: 1007908 - DNA, 25 bp, Homo sapien
gagcatttaaaccagcaaggcgatg

SEQ ID NO: 1007909 - DNA, 25 bp, Homo sapien
tgccgttggtcccacggcaaacact

SEQ ID NO: 1007910 - DNA, 25 bp, Homo sapien
caagaaacacggaggaagtgaagcg

SEQ ID NO: 1007911 - DNA, 25 bp, Homo sapien
gaaacacggaggaagtgaagcgtca

SEQ ID NO: 1007912 - DNA, 25 bp, Homo sapien
aacacggaggaagtgaagcgtcaga

SEQ ID NO: 1007913 - DNA, 25 bp, Homo sapien
acggggtgccgcagaggagaaggag

SEQ ID NO: 1007914 - DNA, 25 bp, Homo sapien
gtctgctcttgagctactcgcatga

SEQ ID NO: 1007915 - DNA, 25 bp, Homo sapien
gctactcgcatgataagtctttgtt

SEQ ID NO: 1007916 - DNA, 25 bp, Homo sapien
tcttgagctactcgcatgataagtc

SEQ ID NO: 1007917 - DNA, 25 bp, Homo sapien
atctgagttggcattctgtgtctgc

SEQ ID NO: 1007918 - DNA, 25 bp, Homo sapien
tgggactatagcacttgttctccca

SEQ ID NO: 1007919 - DNA, 25 bp, Homo sapien
ctgggactatagcacttgttctccc

SEQ ID NO: 1007920 - DNA, 25 bp, Homo sapien
gagatgaagggcgtcatgtttcgta

SEQ ID NO: 1007921 - DNA, 25 bp, Homo sapien
cacccatggacaatttggctccttg

SEQ ID NO: 1007922 - DNA, 25 bp, Homo sapien
gcgtcatgtttcgtagccactcaac

SEQ ID NO: 1007923 - DNA, 25 bp, Homo sapien
cactcaacacccatggacaatttgg

SEQ ID NO: 1007924 - DNA, 25 bp, Homo sapien
caagaccctggtgaggatggacgtc

SEQ ID NO: 1007925 - DNA, 25 bp, Homo sapien
gggtgttcagcacgttccctccagg

SEQ ID NO: 1007926 - DNA, 25 bp, Homo sapien
cagcctgacgcagggaagtttttaa

SEQ ID NO: 1007927 - DNA, 25 bp, Homo sapien
tccaggaagtttagagtggcatctc

SEQ ID NO: 1007928 - DNA, 25 bp, Homo sapien
atcaagtctttcagaagggaggtgc

SEQ ID NO: 1007929 - DNA, 25 bp, Homo sapien
gtgctacacggagctagggaggagt

SEQ ID NO: 1007930 - DNA, 25 bp, Homo sapien
gagttgaacctagaggaacagctga

SEQ ID NO: 1007931 - DNA, 25 bp, Homo sapien
gaacctccaatcacagggaagcagg

SEQ ID NO: 1007932 - DNA, 25 bp, Homo sapien
cagacatggcatctctgcctggaag

SEQ ID NO: 1007933 - DNA, 25 bp, Homo sapien
catggcatctctgcctggaagccca

SEQ ID NO: 1007934 - DNA, 25 bp, Homo sapien
tcagacatggcatctctgcctggaa

SEQ ID NO: 1007935 - DNA, 25 bp, Homo sapien
gacatggcatctctgcctggaagcc

SEQ ID NO: 1007936 - DNA, 25 bp, Homo sapien
tgtccatggtgttcgtggctgccac

SEQ ID NO: 1007937 - DNA, 25 bp, Homo sapien
tcctccggccttgagtcccaggctt

SEQ ID NO: 1007938 - DNA, 25 bp, Homo sapien
caggcttgccccttaaggcccgtgt

SEQ ID NO: 1007939 - DNA, 25 bp, Homo sapien
cttaaggcccgtgtccatggtgttc

SEQ ID NO: 1007940 - DNA, 25 bp, Homo sapien
tagtctaaggttctgcccgttggcg

SEQ ID NO: 1007941 - DNA, 25 bp, Homo sapien
aaggttctgcccgttggcgtgcgcc

SEQ ID NO: 1007942 - DNA, 25 bp, Homo sapien
gttctgcccgttggcgtgcgcctct

SEQ ID NO: 1007943 - DNA, 25 bp, Homo sapien
gtctaaggttctgcccgttggcgtg

SEQ ID NO: 1007944 - DNA, 25 bp, Homo sapien
cgtggggcaccttcaactgacctga

SEQ ID NO: 1007945 - DNA, 25 bp, Homo sapien
tggggcaccttcaactgacctgact

SEQ ID NO: 1007946 - DNA, 25 bp, Homo sapien
gggcaccttcaactgacctgactcc

SEQ ID NO: 1007947 - DNA, 25 bp, Homo sapien
ccgtggggcaccttcaactgacctg

SEQ ID NO: 1007948 - DNA, 25 bp, Homo sapien
gggtgattgtcccagcatagccact

SEQ ID NO: 1007949 - DNA, 25 bp, Homo sapien
gattgtcccagcatagccactcagc

SEQ ID NO: 1007950 - DNA, 25 bp, Homo sapien
ggtgattgtcccagcatagccactc

SEQ ID NO: 1007951 - DNA, 25 bp, Homo sapien
attgggtgattgtcccagcatagcc

SEQ ID NO: 1007952 - DNA, 25 bp, Homo sapien
gaagttctaaggcaggctctgcggc

SEQ ID NO: 1007953 - DNA, 25 bp, Homo sapien
tctgcggctcctggcaggaacaaga

SEQ ID NO: 1007954 - DNA, 25 bp, Homo sapien
cagatttgatggacgcgtgtgcagc

SEQ ID NO: 1007955 - DNA, 25 bp, Homo sapien
gagatatccgggtactttccaatta

SEQ ID NO: 1007956 - DNA, 25 bp, Homo sapien
gagtaaagagcttcgagccgctgaa

SEQ ID NO: 1007957 - DNA, 25 bp, Homo sapien
cccagagctgtcgttgggttctgag

SEQ ID NO: 1007958 - DNA, 25 bp, Homo sapien
gtgagtaaagagcttcgagccgctg

SEQ ID NO: 1007959 - DNA, 25 bp, Homo sapien
cagcacccagagctgtcgttgggtt

SEQ ID NO: 1007960 - DNA, 25 bp, Homo sapien
gaagggcccagatggcgtgtggcag

SEQ ID NO: 1007961 - DNA, 25 bp, Homo sapien
ggcccagatggcgtgtggcagtcag

SEQ ID NO: 1007962 - DNA, 25 bp, Homo sapien
gatgttcagacaggcggcctctgtt

SEQ ID NO: 1007963 - DNA, 25 bp, Homo sapien
acagggatgttcagacaggcggcct

SEQ ID NO: 1007964 - DNA, 25 bp, Homo sapien
cagctggacgggccgtccctcctcg

SEQ ID NO: 1007965 - DNA, 25 bp, Homo sapien
ccagccctcagctggacgggccgtc

SEQ ID NO: 1007966 - DNA, 25 bp, Homo sapien
gccctcagctggacgggccgtccct

SEQ ID NO: 1007967 - DNA, 25 bp, Homo sapien
ccctcagctggacgggccgtccctc

SEQ ID NO: 1007968 - DNA, 25 bp, Homo sapien
cccggtgcaggtgggatttggccca

SEQ ID NO: 1007969 - DNA, 25 bp, Homo sapien
ccggtgcaggtgggatttggcccat

SEQ ID NO: 1007970 - DNA, 25 bp, Homo sapien
tttgagtcgggctgtgtgaacatct

SEQ ID NO: 1007971 - DNA, 25 bp, Homo sapien
tgggtctggcccatagtggacccag

SEQ ID NO: 1007972 - DNA, 25 bp, Homo sapien
tcgggctgtgtgaacatctgcagct

SEQ ID NO: 1007973 - DNA, 25 bp, Homo sapien
tggacccaggcgcacctttgccagg

SEQ ID NO: 1007974 - DNA, 25 bp, Homo sapien
cgcggtcccgcagtggcatcctcgc

SEQ ID NO: 1007975 - DNA, 25 bp, Homo sapien
cggtcccgcagtggcatcctcgcct

SEQ ID NO: 1007976 - DNA, 25 bp, Homo sapien
tttgcagccgtagccccttgtttct

SEQ ID NO: 1007977 - DNA, 25 bp, Homo sapien
atctttgcagccgtagccccttgtt

SEQ ID NO: 1007978 - DNA, 25 bp, Homo sapien
acccggctgctgtcaattttcatag

SEQ ID NO: 1007979 - DNA, 25 bp, Homo sapien
ccggctgctgtcaattttcatagct

SEQ ID NO: 1007980 - DNA, 25 bp, Homo sapien
gctgctgtcaattttcatagctctt

SEQ ID NO: 1007981 - DNA, 25 bp, Homo sapien
ctcacccggctgctgtcaattttca

SEQ ID NO: 1007982 - DNA, 25 bp, Homo sapien
tacacgagaagtcggtgctgccggg

SEQ ID NO: 1007983 - DNA, 25 bp, Homo sapien
ttcagctctggtggcggcatctggt

SEQ ID NO: 1007984 - DNA, 25 bp, Homo sapien
caggcttggcctcgcatggctggaa

SEQ ID NO: 1007985 - DNA, 25 bp, Homo sapien
cagccggcccgacgggtacacgaga

SEQ ID NO: 1007986 - DNA, 25 bp, Homo sapien
ggcagaagacatgggccccgtcttc

SEQ ID NO: 1007987 - DNA, 25 bp, Homo sapien
tcttctgtgccagctcggacagtgg

SEQ ID NO: 1007988 - DNA, 25 bp, Homo sapien
gggcagaagacatgggccccgtctt

SEQ ID NO: 1007989 - DNA, 25 bp, Homo sapien
tctgtgccagctcggacagtggcat

SEQ ID NO: 1007990 - DNA, 25 bp, Homo sapien
gaacttcacgtcaatacagattctg

SEQ ID NO: 1007991 - DNA, 25 bp, Homo sapien
ttgtcttgaacttcacgtcaataca

SEQ ID NO: 1007992 - DNA, 25 bp, Homo sapien
ttgctcaactaatgaatgcaggaag

SEQ ID NO: 1007993 - DNA, 25 bp, Homo sapien
tacagattctgcattgctcaactaa

SEQ ID NO: 1007994 - DNA, 25 bp, Homo sapien
gttcttcttggtctgagtcctttcc

SEQ ID NO: 1007995 - DNA, 25 bp, Homo sapien
cttcttggtctgagtcctttcctgg

SEQ ID NO: 1007996 - DNA, 25 bp, Homo sapien
cagcagttcttcttggtctgagtcc

SEQ ID NO: 1007997 - DNA, 25 bp, Homo sapien
gcagttcttcttggtctgagtcctt

SEQ ID NO: 1007998 - DNA, 25 bp, Homo sapien
agagaaagcgcaacactgtgttcat

SEQ ID NO: 1007999 - DNA, 25 bp, Homo sapien
gagaacagagaaagcgcaacactgt

SEQ ID NO: 1008000 - DNA, 25 bp, Homo sapien
acagagaaagcgcaacactgtgttc

SEQ ID NO: 1008001 - DNA, 25 bp, Homo sapien
gagagaacagagaaagcgcaacact

SEQ ID NO: 1008002 - DNA, 25 bp, Homo sapien
gatcttctgccttgattcccagtgt

SEQ ID NO: 1008003 - DNA, 25 bp, Homo sapien
tgccttgattcccagtgtccaaata

SEQ ID NO: 1008004 - DNA, 25 bp, Homo sapien
gattcccagtgtccaaatacaaaag

SEQ ID NO: 1008005 - DNA, 25 bp, Homo sapien
tttgtatcttctgttagatcttctg

SEQ ID NO: 1008006 - DNA, 25 bp, Homo sapien
tactgtccctgatgtgacgagcagg

SEQ ID NO: 1008007 - DNA, 25 bp, Homo sapien
catctttcagttccaggtaggagtg

SEQ ID NO: 1008008 - DNA, 25 bp, Homo sapien
gacgagcaggatctattgaagccga

SEQ ID NO: 1008009 - DNA, 25 bp, Homo sapien
caggcatgatcgctgtgatggataa

SEQ ID NO: 1008010 - DNA, 25 bp, Homo sapien
gaaccagcgacttagtcaccagccg

SEQ ID NO: 1008011 - DNA, 25 bp, Homo sapien
aatgaatgaaccagcgacttagtca

SEQ ID NO: 1008012 - DNA, 25 bp, Homo sapien
tgaatgaaccagcgacttagtcacc

SEQ ID NO: 1008013 - DNA, 25 bp, Homo sapien
aatgaaccagcgacttagtcaccag

SEQ ID NO: 1008014 - DNA, 25 bp, Homo sapien
cccaggactgcgtgtgtcatcaagg

SEQ ID NO: 1008015 - DNA, 25 bp, Homo sapien
tgcgtgtgtcatcaaggaccagtgg

SEQ ID NO: 1008016 - DNA, 25 bp, Homo sapien
tgtgtcatcaaggaccagtggatga

SEQ ID NO: 1008017 - DNA, 25 bp, Homo sapien
gactgcgtgtgtcatcaaggaccag

SEQ ID NO: 1008018 - DNA, 25 bp, Homo sapien
catttcagaaggacctgaccggacc

SEQ ID NO: 1008019 - DNA, 25 bp, Homo sapien
cagtcagatatcagctgaggctaca

SEQ ID NO: 1008020 - DNA, 25 bp, Homo sapien
gaccggaccgttgtcatgtgaagcc

SEQ ID NO: 1008021 - DNA, 25 bp, Homo sapien
gggcgcaacctgtgtctggcaagtt

SEQ ID NO: 1008022 - DNA, 25 bp, Homo sapien
tcttcttgctcagatgtttgagccc

SEQ ID NO: 1008023 - DNA, 25 bp, Homo sapien
ttcttgctcagatgtttgagccctg

SEQ ID NO: 1008024 - DNA, 25 bp, Homo sapien
cttcttgctcagatgtttgagccct

SEQ ID NO: 1008025 - DNA, 25 bp, Homo sapien
tcttgctcagatgtttgagccctgc

SEQ ID NO: 1008026 - DNA, 25 bp, Homo sapien
ttttattaatagcatccgccagaaa

SEQ ID NO: 1008027 - DNA, 25 bp, Homo sapien
catccgccagaaaaggtagaaataa

SEQ ID NO: 1008028 - DNA, 25 bp, Homo sapien
agaaataaacaaggagtcagggagc

SEQ ID NO: 1008029 - DNA, 25 bp, Homo sapien
catagggagtccacacatgattcac

SEQ ID NO: 1008030 - DNA, 25 bp, Homo sapien
ggccggtacgtggagcacatgcttt

SEQ ID NO: 1008031 - DNA, 25 bp, Homo sapien
gtggagcacatgctttctgctgcag

SEQ ID NO: 1008032 - DNA, 25 bp, Homo sapien
agggatcggcgctggtctggtggga

SEQ ID NO: 1008033 - DNA, 25 bp, Homo sapien
tcagctcccacagggatcggcgctg

SEQ ID NO: 1008034 - DNA, 25 bp, Homo sapien
tcttgtcctgacctctgcatgctca

SEQ ID NO: 1008035 - DNA, 25 bp, Homo sapien
agaggccccggtgagcacaggtgaa

SEQ ID NO: 1008036 - DNA, 25 bp, Homo sapien
gaagaggccccggtgagcacaggtg

SEQ ID NO: 1008037 - DNA, 25 bp, Homo sapien
gctcttgtcctgacctctgcatgct

SEQ ID NO: 1008038 - DNA, 25 bp, Homo sapien
gcccacggacactcaatggacggaa

SEQ ID NO: 1008039 - DNA, 25 bp, Homo sapien
gatttcataacattgggcccacgga

SEQ ID NO: 1008040 - DNA, 25 bp, Homo sapien
tcagaaggacataccccacagtgtg

SEQ ID NO: 1008041 - DNA, 25 bp, Homo sapien
gaagaagggccacctactttcctga

SEQ ID NO: 1008042 - DNA, 25 bp, Homo sapien
tacaatcctggcaaagggtgaaggg

SEQ ID NO: 1008043 - DNA, 25 bp, Homo sapien
tctcactgtcagcaggagagagcga

SEQ ID NO: 1008044 - DNA, 25 bp, Homo sapien
ggaagcaagcccatcttctcactgt

SEQ ID NO: 1008045 - DNA, 25 bp, Homo sapien
gcaggctgtacagaagcctcaggaa

SEQ ID NO: 1008046 - DNA, 25 bp, Homo sapien
gacagcatgcccgtgtctgcatgct

SEQ ID NO: 1008047 - DNA, 25 bp, Homo sapien
tgggtttaagagctgcaggcgcagc

SEQ ID NO: 1008048 - DNA, 25 bp, Homo sapien
gcatgcccgtgtctgcatgctcttt

SEQ ID NO: 1008049 - DNA, 25 bp, Homo sapien
cttcttgactctcatgacagcatgc

SEQ ID NO: 1008050 - DNA, 25 bp, Homo sapien
ttggtgatgatgacctgaatctgag

SEQ ID NO: 1008051 - DNA, 25 bp, Homo sapien
cctgaatctgagtgaacggttttat

SEQ ID NO: 1008052 - DNA, 25 bp, Homo sapien
cacaggcattttggtgatgatgacc

SEQ ID NO: 1008053 - DNA, 25 bp, Homo sapien
cctcgggcgcagagtgcacaggcat

SEQ ID NO: 1008054 - DNA, 25 bp, Homo sapien
agcctgagtatcggggcttcccagg

SEQ ID NO: 1008055 - DNA, 25 bp, Homo sapien
cctgccgtccaatcacagggcgggg

SEQ ID NO: 1008056 - DNA, 25 bp, Homo sapien
gcccctgccgtccaatcacagggcg

SEQ ID NO: 1008057 - DNA, 25 bp, Homo sapien
gagcctgagtatcggggcttcccag

SEQ ID NO: 1008058 - DNA, 25 bp, Homo sapien
accctcgcctcaggcggcacgctga

SEQ ID NO: 1008059 - DNA, 25 bp, Homo sapien
tcttggggtgctcgccggtatggat

SEQ ID NO: 1008060 - DNA, 25 bp, Homo sapien
ggggaccctcgcctcaggcggcacg

SEQ ID NO: 1008061 - DNA, 25 bp, Homo sapien
ggaccctcgcctcaggcggcacgct

SEQ ID NO: 1008062 - DNA, 25 bp, Homo sapien
cggatgatccaaggtcccccgtgtg

SEQ ID NO: 1008063 - DNA, 25 bp, Homo sapien
ctacagcggatgatccaaggtcccc

SEQ ID NO: 1008064 - DNA, 25 bp, Homo sapien
atgatccaaggtcccccgtgtgcgt

SEQ ID NO: 1008065 - DNA, 25 bp, Homo sapien
caaggtcccccgtgtgcgtgaagtc

SEQ ID NO: 1008066 - DNA, 25 bp, Homo sapien
gcccgttatccagagcgagactttg

SEQ ID NO: 1008067 - DNA, 25 bp, Homo sapien
gagtaacgaccgctgcgcccgttat

SEQ ID NO: 1008068 - DNA, 25 bp, Homo sapien
tgcttgctgcaggtaaacatcgagg

SEQ ID NO: 1008069 - DNA, 25 bp, Homo sapien
cacaatcgtagagtcggtttatcag

SEQ ID NO: 1008070 - DNA, 25 bp, Homo sapien
tgcatcctttcagacagctgatcgg

SEQ ID NO: 1008071 - DNA, 25 bp, Homo sapien
gttactcatttcacccattcctgtg

SEQ ID NO: 1008072 - DNA, 25 bp, Homo sapien
tgttggcagctctgaatgcatcctt

SEQ ID NO: 1008073 - DNA, 25 bp, Homo sapien
atcgggtgttaagaacgtgcatgca

SEQ ID NO: 1008074 - DNA, 25 bp, Homo sapien
tgtgccatggcacaaggacgtgcaa

SEQ ID NO: 1008075 - DNA, 25 bp, Homo sapien
taccatcagcgtttttcagaccggg

SEQ ID NO: 1008076 - DNA, 25 bp, Homo sapien
ttaggctgcatcgaactgtccaggc

SEQ ID NO: 1008077 - DNA, 25 bp, Homo sapien
caacagtaactttccgtgggaatca

SEQ ID NO: 1008078 - DNA, 25 bp, Homo sapien
acagggcagcgaggcaaatgggagc

SEQ ID NO: 1008079 - DNA, 25 bp, Homo sapien
acagcagactcgctggagccctggg

SEQ ID NO: 1008080 - DNA, 25 bp, Homo sapien
agggaacagcagactcgctggagcc

SEQ ID NO: 1008081 - DNA, 25 bp, Homo sapien
tgggtgtcctcgtggacagggcagc

SEQ ID NO: 1008082 - DNA, 25 bp, Homo sapien
tcctcaatcagtggggggagtttca

SEQ ID NO: 1008083 - DNA, 25 bp, Homo sapien
ccaggcaacgtggactttccccgtg

SEQ ID NO: 1008084 - DNA, 25 bp, Homo sapien
catcacagtcatgactcgcagaggg

SEQ ID NO: 1008085 - DNA, 25 bp, Homo sapien
tttccccgtggtcctcaatcagtgg

SEQ ID NO: 1008086 - DNA, 25 bp, Homo sapien
ggaacatgcgtgcttctctccgcca

SEQ ID NO: 1008087 - DNA, 25 bp, Homo sapien
tcatcaggatcctcccttgacacct

SEQ ID NO: 1008088 - DNA, 25 bp, Homo sapien
ttgacacctgatcccgtgtcccctt

SEQ ID NO: 1008089 - DNA, 25 bp, Homo sapien
tggctgggaacatgcgtgcttctct

SEQ ID NO: 1008090 - DNA, 25 bp, Homo sapien
cttgctctagtgactaggagtcccc

SEQ ID NO: 1008091 - DNA, 25 bp, Homo sapien
cctccttgcatcagacttgctctag

SEQ ID NO: 1008092 - DNA, 25 bp, Homo sapien
gcatcagacttgctctagtgactag

SEQ ID NO: 1008093 - DNA, 25 bp, Homo sapien
tctagtgactaggagtcccccgagg

SEQ ID NO: 1008094 - DNA, 25 bp, Homo sapien
ggggcctagttccaggccccactga

SEQ ID NO: 1008095 - DNA, 25 bp, Homo sapien
gggcctagttccaggccccactgac

SEQ ID NO: 1008096 - DNA, 25 bp, Homo sapien
ttctgctgcagggtaaattcttgat

SEQ ID NO: 1008097 - DNA, 25 bp, Homo sapien
gctctagctgaacttttctgctgca

SEQ ID NO: 1008098 - DNA, 25 bp, Homo sapien
gctgcagggtaaattcttgatcttg

SEQ ID NO: 1008099 - DNA, 25 bp, Homo sapien
ggtctctgctctagctgaacttttc

SEQ ID NO: 1008100 - DNA, 25 bp, Homo sapien
gctgtagctactaggagtccccaga

SEQ ID NO: 1008101 - DNA, 25 bp, Homo sapien
cttgctgtagctactaggagtcccc

SEQ ID NO: 1008102 - DNA, 25 bp, Homo sapien
aagtgaccggcagcacgtactccct

SEQ ID NO: 1008103 - DNA, 25 bp, Homo sapien
tgctgtagctactaggagtccccag

SEQ ID NO: 1008104 - DNA, 25 bp, Homo sapien
cagagatgttcgtgtctgtctgaaa

SEQ ID NO: 1008105 - DNA, 25 bp, Homo sapien
ctgacattgtatcccggagctgctt

SEQ ID NO: 1008106 - DNA, 25 bp, Homo sapien
ctgtctgaaacagatgttggtgatg

SEQ ID NO: 1008107 - DNA, 25 bp, Homo sapien
cgtgtctgtctgaaacagatgttgg

SEQ ID NO: 1008108 - DNA, 25 bp, Homo sapien
agttactatcgggtacccggctgcg

SEQ ID NO: 1008109 - DNA, 25 bp, Homo sapien
ttgttgagtgattattgtgttagtt

SEQ ID NO: 1008110 - DNA, 25 bp, Homo sapien
tgttgttgagtgattattgtgttag

SEQ ID NO: 1008111 - DNA, 25 bp, Homo sapien
tagttactatcgggtacccggctgc

SEQ ID NO: 1008112 - DNA, 25 bp, Homo sapien
tatttttaggccttgtgcaaatatg

SEQ ID NO: 1008113 - DNA, 25 bp, Homo sapien
tctatttttaggccttgtgcaaata

SEQ ID NO: 1008114 - DNA, 25 bp, Homo sapien
ctctatttttaggccttgtgcaaat

SEQ ID NO: 1008115 - DNA, 25 bp, Homo sapien
ctatttttaggccttgtgcaaatat

SEQ ID NO: 1008116 - DNA, 25 bp, Homo sapien
tgtcggccctctaagtaacaagtga

SEQ ID NO: 1008117 - DNA, 25 bp, Homo sapien
aacattgagtgacagccggtaggca

SEQ ID NO: 1008118 - DNA, 25 bp, Homo sapien
gagacgcttaggcatgggaccctaa

SEQ ID NO: 1008119 - DNA, 25 bp, Homo sapien
gggtcacagacactccctagaggca

SEQ ID NO: 1008120 - DNA, 25 bp, Homo sapien
gctcagcgatgaatccatttcctgt

SEQ ID NO: 1008121 - DNA, 25 bp, Homo sapien
atccttgactgctcagcgatgaatc

SEQ ID NO: 1008122 - DNA, 25 bp, Homo sapien
cttgactgctcagcgatgaatccat

SEQ ID NO: 1008123 - DNA, 25 bp, Homo sapien
actgctcagcgatgaatccatttcc

SEQ ID NO: 1008124 - DNA, 25 bp, Homo sapien
tgcagaaggaagcccatttcaggga

SEQ ID NO: 1008125 - DNA, 25 bp, Homo sapien
agaaggaagcccatttcagggacac

SEQ ID NO: 1008126 - DNA, 25 bp, Homo sapien
ctgcagaaggaagcccatttcaggg

SEQ ID NO: 1008127 - DNA, 25 bp, Homo sapien
cagaaggaagcccatttcagggaca

SEQ ID NO: 1008128 - DNA, 25 bp, Homo sapien
catgtggaatagagacatccagggc

SEQ ID NO: 1008129 - DNA, 25 bp, Homo sapien
tgagtgcatagaaggtgcccagccc

SEQ ID NO: 1008130 - DNA, 25 bp, Homo sapien
ccttggtgcctcgatccatgctgag

SEQ ID NO: 1008131 - DNA, 25 bp, Homo sapien
agaaggcgtccctgcggagcagacc

SEQ ID NO: 1008132 - DNA, 25 bp, Homo sapien
gctacatcctgcagttcctttggga

SEQ ID NO: 1008133 - DNA, 25 bp, Homo sapien
gaatctaatcccataatactctcct

SEQ ID NO: 1008134 - DNA, 25 bp, Homo sapien
ttcctttgggatatactccttgatg

SEQ ID NO: 1008135 - DNA, 25 bp, Homo sapien
gtttcctttgaactagcacccctga

SEQ ID NO: 1008136 - DNA, 25 bp, Homo sapien
ctctgatctgctccccgggagatgc

SEQ ID NO: 1008137 - DNA, 25 bp, Homo sapien
ggcgcttcttcacgtgtcccacttg

SEQ ID NO: 1008138 - DNA, 25 bp, Homo sapien
tgcagagatggcgaggcgcttcttc

SEQ ID NO: 1008139 - DNA, 25 bp, Homo sapien
cccctgatgtgacgcgttgtcagac

SEQ ID NO: 1008140 - DNA, 25 bp, Homo sapien
tgggtcctgaccctttggtgctcag

SEQ ID NO: 1008141 - DNA, 25 bp, Homo sapien
caagtgtctgctgacggctgcatcc

SEQ ID NO: 1008142 - DNA, 25 bp, Homo sapien
tcaggactcagagagcgcgacaccg

SEQ ID NO: 1008143 - DNA, 25 bp, Homo sapien
cgattccagcagtggttgtgggcaa

SEQ ID NO: 1008144 - DNA, 25 bp, Homo sapien
cttgtaattcgtggcattatctttg

SEQ ID NO: 1008145 - DNA, 25 bp, Homo sapien
gtaattcgtggcattatctttgagt

SEQ ID NO: 1008146 - DNA, 25 bp, Homo sapien
taattcgtggcattatctttgagtg

SEQ ID NO: 1008147 - DNA, 25 bp, Homo sapien
tgtaattcgtggcattatctttgag

SEQ ID NO: 1008148 - DNA, 25 bp, Homo sapien
acatactttgcctgttgatccagaa

SEQ ID NO: 1008149 - DNA, 25 bp, Homo sapien
tgcatagaaggaggcgtgagaagta

SEQ ID NO: 1008150 - DNA, 25 bp, Homo sapien
gggaagacaatgataatcatacata

SEQ ID NO: 1008151 - DNA, 25 bp, Homo sapien
gttgatccagaatccctaagagcca

SEQ ID NO: 1008152 - DNA, 25 bp, Homo sapien
ggcagccatgccgaagctggttaaa

SEQ ID NO: 1008153 - DNA, 25 bp, Homo sapien
tctgctgttgcctgtggcctgagaa

SEQ ID NO: 1008154 - DNA, 25 bp, Homo sapien
gagtctgctgttgcctgtggcctga

SEQ ID NO: 1008155 - DNA, 25 bp, Homo sapien
aggtgtggggacgagaaacatctga

SEQ ID NO: 1008156 - DNA, 25 bp, Homo sapien
cactggcccatagtgatacagaggt

SEQ ID NO: 1008157 - DNA, 25 bp, Homo sapien
tctcggtgccactggttcactggcc

SEQ ID NO: 1008158 - DNA, 25 bp, Homo sapien
atgagcccctggccacatctcggtg

SEQ ID NO: 1008159 - DNA, 25 bp, Homo sapien
actggcccatagtgatacagaggtg

SEQ ID NO: 1008160 - DNA, 25 bp, Homo sapien
tgagcaaagacggaaggggagagcg

SEQ ID NO: 1008161 - DNA, 25 bp, Homo sapien
aaccgggctctgctgcaagccgggc

SEQ ID NO: 1008162 - DNA, 25 bp, Homo sapien
agaccaccgggcacagtcaaaggca

SEQ ID NO: 1008163 - DNA, 25 bp, Homo sapien
gagggagaccaccgggcacagtcaa

SEQ ID NO: 1008164 - DNA, 25 bp, Homo sapien
ggagagccggatgccacagggtgtc

SEQ ID NO: 1008165 - DNA, 25 bp, Homo sapien
agagccggatgccacagggtgtcct

SEQ ID NO: 1008166 - DNA, 25 bp, Homo sapien
ctggagagccggatgccacagggtg

SEQ ID NO: 1008167 - DNA, 25 bp, Homo sapien
tggagagccggatgccacagggtgt

SEQ ID NO: 1008168 - DNA, 25 bp, Homo sapien
gcgacccagggctctggcatttgga

SEQ ID NO: 1008169 - DNA, 25 bp, Homo sapien
acccagggctctggcatttggaatg

SEQ ID NO: 1008170 - DNA, 25 bp, Homo sapien
ccagggctctggcatttggaatgag

SEQ ID NO: 1008171 - DNA, 25 bp, Homo sapien
gctggcgacccagggctctggcatt

SEQ ID NO: 1008172 - DNA, 25 bp, Homo sapien
gaaacagcgtgatccaagagcatgt

SEQ ID NO: 1008173 - DNA, 25 bp, Homo sapien
ctgaggacaagattagaggcagaaa

SEQ ID NO: 1008174 - DNA, 25 bp, Homo sapien
gttatccacgacaagggaagatggg

SEQ ID NO: 1008175 - DNA, 25 bp, Homo sapien
catttcccgcttcaggaaccctgag

SEQ ID NO: 1008176 - DNA, 25 bp, Homo sapien
catgttgtcgttgctggtccatgga

SEQ ID NO: 1008177 - DNA, 25 bp, Homo sapien
agagtccccagtgggtatccctgat

SEQ ID NO: 1008178 - DNA, 25 bp, Homo sapien
gggccagcccatgttgtcgttgctg

SEQ ID NO: 1008179 - DNA, 25 bp, Homo sapien
ccagggccagcccatgttgtcgttg

SEQ ID NO: 1008180 - DNA, 25 bp, Homo sapien
ggacaatgaggcccatgggccgagg

SEQ ID NO: 1008181 - DNA, 25 bp, Homo sapien
gacaatgaggcccatgggccgaggg

SEQ ID NO: 1008182 - DNA, 25 bp, Homo sapien
gcgttttggccacatgccgcaggat

SEQ ID NO: 1008183 - DNA, 25 bp, Homo sapien
gaaggccaaattccagtctcttgtg

SEQ ID NO: 1008184 - DNA, 25 bp, Homo sapien
tctgcgagtgcacatgtaacaggcc

SEQ ID NO: 1008185 - DNA, 25 bp, Homo sapien
tagacccgggaagtgtcgcatacac

SEQ ID NO: 1008186 - DNA, 25 bp, Homo sapien
tagagtgtcgcaaacaccctcctct

SEQ ID NO: 1008187 - DNA, 25 bp, Homo sapien
ccggagaatctacaccacgcaggtg

SEQ ID NO: 1008188 - DNA, 25 bp, Homo sapien
tgccaccggctgacacccttagagt

SEQ ID NO: 1008189 - DNA, 25 bp, Homo sapien
gggtcgatgccggagaatctacacc

SEQ ID NO: 1008190 - DNA, 25 bp, Homo sapien
tgccttggctcccagtaacttaaag

SEQ ID NO: 1008191 - DNA, 25 bp, Homo sapien
tcacatgtaggacctgcaagaactt

SEQ ID NO: 1008192 - DNA, 25 bp, Homo sapien
gatgcataccaatttgtggctgccc

SEQ ID NO: 1008193 - DNA, 25 bp, Homo sapien
tatgaaaatgggacagagtactcag

SEQ ID NO: 1008194 - DNA, 25 bp, Homo sapien
tgctgaagacactcgcactgctgtt

SEQ ID NO: 1008195 - DNA, 25 bp, Homo sapien
tgttcagcttccagaggaccccagg

SEQ ID NO: 1008196 - DNA, 25 bp, Homo sapien
tgttgactccaagaggtatccctgc

SEQ ID NO: 1008197 - DNA, 25 bp, Homo sapien
tgcagggcttcctacagccgtccat

SEQ ID NO: 1008198 - DNA, 25 bp, Homo sapien
gatcgaacgctgagggtaatgttaa

SEQ ID NO: 1008199 - DNA, 25 bp, Homo sapien
ttcatgttcaaagatacggggtcag

SEQ ID NO: 1008200 - DNA, 25 bp, Homo sapien
caaagatacggggtcagagtctgga

SEQ ID NO: 1008201 - DNA, 25 bp, Homo sapien
ggtcagagtctggagatcgaacgct

SEQ ID NO: 1008202 - DNA, 25 bp, Homo sapien
tatctcgtggatggcgttggatttg

SEQ ID NO: 1008203 - DNA, 25 bp, Homo sapien
gaatgtgtatctcgtggatggcgtt

SEQ ID NO: 1008204 - DNA, 25 bp, Homo sapien
ttagggaatgtgtatctcgtggatg

SEQ ID NO: 1008205 - DNA, 25 bp, Homo sapien
tgtatctcgtggatggcgttggatt

SEQ ID NO: 1008206 - DNA, 25 bp, Homo sapien
ggaggctgagaagatccacgcttac

SEQ ID NO: 1008207 - DNA, 25 bp, Homo sapien
tcctgctccggagggtgactgttag

SEQ ID NO: 1008208 - DNA, 25 bp, Homo sapien
cctgctccggagggtgactgttagc

SEQ ID NO: 1008209 - DNA, 25 bp, Homo sapien
ctgctccggagggtgactgttagca

SEQ ID NO: 1008210 - DNA, 25 bp, Homo sapien
tgctccggagggtgactgttagcat

SEQ ID NO: 1008211 - DNA, 25 bp, Homo sapien
cttggggttgctacgagccactgga

SEQ ID NO: 1008212 - DNA, 25 bp, Homo sapien
gggttgctacgagccactggactcg

SEQ ID NO: 1008213 - DNA, 25 bp, Homo sapien
caccttggggttgctacgagccact

SEQ ID NO: 1008214 - DNA, 25 bp, Homo sapien
gccaccttggggttgctacgagcca

SEQ ID NO: 1008215 - DNA, 25 bp, Homo sapien
gctttgacaaggcaacatcggcaac

SEQ ID NO: 1008216 - DNA, 25 bp, Homo sapien
tgctgggctttgacaaggcaacatc

SEQ ID NO: 1008217 - DNA, 25 bp, Homo sapien
gacaaggcaacatcggcaacatctg

SEQ ID NO: 1008218 - DNA, 25 bp, Homo sapien
ggcaacatcggcaacatctgaaact

SEQ ID NO: 1008219 - DNA, 25 bp, Homo sapien
tgcccacaacgcagcatcagagata

SEQ ID NO: 1008220 - DNA, 25 bp, Homo sapien
tgcttcagcaatcgagggcacatgt

SEQ ID NO: 1008221 - DNA, 25 bp, Homo sapien
acatgtgcccacaacgcagcatcag

SEQ ID NO: 1008222 - DNA, 25 bp, Homo sapien
atcagagataatggccacataaaac

SEQ ID NO: 1008223 - DNA, 25 bp, Homo sapien
tgtgcaaggatatcgtgaaagattt

SEQ ID NO: 1008224 - DNA, 25 bp, Homo sapien
gatatcgtgaaagatttttggcaaa

SEQ ID NO: 1008225 - DNA, 25 bp, Homo sapien
ctagatgtgcaaggatatcgtgaaa

SEQ ID NO: 1008226 - DNA, 25 bp, Homo sapien
caaggatatcgtgaaagatttttgg

SEQ ID NO: 1008227 - DNA, 25 bp, Homo sapien
cgaatctttgatgtggtgggtctgt

SEQ ID NO: 1008228 - DNA, 25 bp, Homo sapien
gcgaatctttgatgtggtgggtctg

SEQ ID NO: 1008229 - DNA, 25 bp, Homo sapien
aatctttgatgtggtgggtctgtga

SEQ ID NO: 1008230 - DNA, 25 bp, Homo sapien
atctttgatgtggtgggtctgtgac

SEQ ID NO: 1008231 - DNA, 25 bp, Homo sapien
tggaacccagtagaacaccaggaac

SEQ ID NO: 1008232 - DNA, 25 bp, Homo sapien
tgtctaatggccaggtgctctgttt

SEQ ID NO: 1008233 - DNA, 25 bp, Homo sapien
ttgtctctgcgaggtcagtctgtgt

SEQ ID NO: 1008234 - DNA, 25 bp, Homo sapien
aacaggcatgtaattctctgctgca

SEQ ID NO: 1008235 - DNA, 25 bp, Homo sapien
acgatgcccgccctgttgcagggtc

SEQ ID NO: 1008236 - DNA, 25 bp, Homo sapien
tgcagggtctgggtttgctcacgat

SEQ ID NO: 1008237 - DNA, 25 bp, Homo sapien
gatgcccgccctgttgcagggtctg

SEQ ID NO: 1008238 - DNA, 25 bp, Homo sapien
tttgctcacgatatgtctgctcggg

SEQ ID NO: 1008239 - DNA, 25 bp, Homo sapien
gctctgtgagaaatacggcccctgg

SEQ ID NO: 1008240 - DNA, 25 bp, Homo sapien
ttttcatcgtacaggagctcaggac

SEQ ID NO: 1008241 - DNA, 25 bp, Homo sapien
tatgcgaagccccacagaagtgtca

SEQ ID NO: 1008242 - DNA, 25 bp, Homo sapien
tagctgaagcaaacacacgaagcgc

SEQ ID NO: 1008243 - DNA, 25 bp, Homo sapien
gggtcccagtctgcagggagcacag

SEQ ID NO: 1008244 - DNA, 25 bp, Homo sapien
aggaggtcctcagtctgcagggagt

SEQ ID NO: 1008245 - DNA, 25 bp, Homo sapien
caggaggaggtcctcagtctgcagg

SEQ ID NO: 1008246 - DNA, 25 bp, Homo sapien
tcctcagtctgcagggagtgcggag

SEQ ID NO: 1008247 - DNA, 25 bp, Homo sapien
tctgcagggagcacggagcaggagg

SEQ ID NO: 1008248 - DNA, 25 bp, Homo sapien
tcagtctgcagggagcacggagcag

SEQ ID NO: 1008249 - DNA, 25 bp, Homo sapien
ctgcagggagcacggagcaggagga

SEQ ID NO: 1008250 - DNA, 25 bp, Homo sapien
agtctgcagggagcacggagcagga

SEQ ID NO: 1008251 - DNA, 25 bp, Homo sapien
ggagcacggagcaggaggaggtcct

SEQ ID NO: 1008252 - DNA, 25 bp, Homo sapien
ctgcagggagcacggagcaggagga

SEQ ID NO: 1008253 - DNA, 25 bp, Homo sapien
cacggagcaggaggaggtcctcagt

SEQ ID NO: 1008254 - DNA, 25 bp, Homo sapien
agcacggagcaggaggaggtcctca

SEQ ID NO: 1008255 - DNA, 25 bp, Homo sapien
gggctggaggtgctgttgttgttga

SEQ ID NO: 1008256 - DNA, 25 bp, Homo sapien
actggtgagtccggctcggatgaca

SEQ ID NO: 1008257 - DNA, 25 bp, Homo sapien
acctgcttcgcgagcctcagatggc

SEQ ID NO: 1008258 - DNA, 25 bp, Homo sapien
gagtccggctcggatgacagcagca

SEQ ID NO: 1008259 - DNA, 25 bp, Homo sapien
ggtaacaaggcagaggcatcaggct

SEQ ID NO: 1008260 - DNA, 25 bp, Homo sapien
aacaaggcagaggcatcaggctttt

SEQ ID NO: 1008261 - DNA, 25 bp, Homo sapien
taacaaggcagaggcatcaggcttt

SEQ ID NO: 1008262 - DNA, 25 bp, Homo sapien
gtaacaaggcagaggcatcaggctt

SEQ ID NO: 1008263 - DNA, 25 bp, Homo sapien
gcttcatggacgttaccacgacagt

SEQ ID NO: 1008264 - DNA, 25 bp, Homo sapien
tccagcatgagcttcatggacgtta

SEQ ID NO: 1008265 - DNA, 25 bp, Homo sapien
ccacgacagtaacaatattaggatc

SEQ ID NO: 1008266 - DNA, 25 bp, Homo sapien
caatattaggatcagtgacgcttcc

SEQ ID NO: 1008267 - DNA, 25 bp, Homo sapien
ccatttctaaaatctgcttgagggc

SEQ ID NO: 1008268 - DNA, 25 bp, Homo sapien
gagacttcttttctctggccacaaa

SEQ ID NO: 1008269 - DNA, 25 bp, Homo sapien
ctaaaatctgcttgagggcagagac

SEQ ID NO: 1008270 - DNA, 25 bp, Homo sapien
ttcccattacataggatttcctcca

SEQ ID NO: 1008271 - DNA, 25 bp, Homo sapien
tcaggatctccttgtgaagcgtgat

SEQ ID NO: 1008272 - DNA, 25 bp, Homo sapien
aaaaccaaagttcaagctgttccat

SEQ ID NO: 1008273 - DNA, 25 bp, Homo sapien
cttcttacaaatggcagtatagagg

SEQ ID NO: 1008274 - DNA, 25 bp, Homo sapien
gttccatgccacaactcaggatctc

SEQ ID NO: 1008275 - DNA, 25 bp, Homo sapien
tgagcacccgaatgcaaatgcgcac

SEQ ID NO: 1008276 - DNA, 25 bp, Homo sapien
gaagaatcccttcaagagccagtaa

SEQ ID NO: 1008277 - DNA, 25 bp, Homo sapien
tcagaatgtcaacgacaagggcagc

SEQ ID NO: 1008278 - DNA, 25 bp, Homo sapien
ggcttaaacggcacaggacaggtct

SEQ ID NO: 1008279 - DNA, 25 bp, Homo sapien
cttgcaggcggacttggcctggaag

SEQ ID NO: 1008280 - DNA, 25 bp, Homo sapien
cggacttggcctggaaggtagagcc

SEQ ID NO: 1008281 - DNA, 25 bp, Homo sapien
gcggacttggcctggaaggtagagc

SEQ ID NO: 1008282 - DNA, 25 bp, Homo sapien
ttgcaggcggacttggcctggaagg

SEQ ID NO: 1008283 - DNA, 25 bp, Homo sapien
cataaagtctcgtcagtttgggcaa

SEQ ID NO: 1008284 - DNA, 25 bp, Homo sapien
tccttattaaggaagtgagtcccaa

SEQ ID NO: 1008285 - DNA, 25 bp, Homo sapien
tgagtcccaagcatcctcagtcgtc

SEQ ID NO: 1008286 - DNA, 25 bp, Homo sapien
catgcactctttgtgctggacacag

SEQ ID NO: 1008287 - DNA, 25 bp, Homo sapien
tgcagcgttgacacccgtcccgtgc

SEQ ID NO: 1008288 - DNA, 25 bp, Homo sapien
tcccgtgcggtgcacactgccctgg

SEQ ID NO: 1008289 - DNA, 25 bp, Homo sapien
ctcccctgagcgtgccccgtgtggg

SEQ ID NO: 1008290 - DNA, 25 bp, Homo sapien
gaggctgcagcgcagctcccctgag

SEQ ID NO: 1008291 - DNA, 25 bp, Homo sapien
tgcaaggaaagcggcagggccttac

SEQ ID NO: 1008292 - DNA, 25 bp, Homo sapien
cttacccgggagcagaaagccctgg

SEQ ID NO: 1008293 - DNA, 25 bp, Homo sapien
cttggagcccttcctggaggtccgg

SEQ ID NO: 1008294 - DNA, 25 bp, Homo sapien
caggtggtcggcttccaggttgggc

SEQ ID NO: 1008295 - DNA, 25 bp, Homo sapien
agattattttggctagtgtggacat

SEQ ID NO: 1008296 - DNA, 25 bp, Homo sapien
tagattattttggctagtgtggaca

SEQ ID NO: 1008297 - DNA, 25 bp, Homo sapien
gattattttggctagtgtggacatt

SEQ ID NO: 1008298 - DNA, 25 bp, Homo sapien
gtagattattttggctagtgtggac

SEQ ID NO: 1008299 - DNA, 25 bp, Homo sapien
aggagtgtccacaccccgtcagcag

SEQ ID NO: 1008300 - DNA, 25 bp, Homo sapien
acaccccgtcagcagctcagcgtca

SEQ ID NO: 1008301 - DNA, 25 bp, Homo sapien
taggagtgtccacaccccgtcagca

SEQ ID NO: 1008302 - DNA, 25 bp, Homo sapien
ccccgtcagcagctcagcgtcactg

SEQ ID NO: 1008303 - DNA, 25 bp, Homo sapien
atggtgaagacccaggggcctccat

SEQ ID NO: 1008304 - DNA, 25 bp, Homo sapien
ccatcaccgctgaacaaatgtccat

SEQ ID NO: 1008305 - DNA, 25 bp, Homo sapien
gggcctccatcaccgctgaacaaat

SEQ ID NO: 1008306 - DNA, 25 bp, Homo sapien
ggtgaagacccaggggcctccatca

SEQ ID NO: 1008307 - DNA, 25 bp, Homo sapien
ctgtttctcctctatgctgagtctg

SEQ ID NO: 1008308 - DNA, 25 bp, Homo sapien
cctgtttctcctctatgctgagtct

SEQ ID NO: 1008309 - DNA, 25 bp, Homo sapien
gtcctgtttctcctctatgctgagt

SEQ ID NO: 1008310 - DNA, 25 bp, Homo sapien
tcctgtttctcctctatgctgagtc

SEQ ID NO: 1008311 - DNA, 25 bp, Homo sapien
tacatggtggaaaccgtcgtgtttc

SEQ ID NO: 1008312 - DNA, 25 bp, Homo sapien
tctacatggtggaaaccgtcgtgtt

SEQ ID NO: 1008313 - DNA, 25 bp, Homo sapien
tgtctacatggtggaaaccgtcgtg

SEQ ID NO: 1008314 - DNA, 25 bp, Homo sapien
tctgtctacatggtggaaaccgtcg

SEQ ID NO: 1008315 - DNA, 25 bp, Homo sapien
tcatgtggacaaaacaaaccccggc

SEQ ID NO: 1008316 - DNA, 25 bp, Homo sapien
agagagataattggcactgcggcga

SEQ ID NO: 1008317 - DNA, 25 bp, Homo sapien
tattcatcagttgcctgggtgcgtg

SEQ ID NO: 1008318 - DNA, 25 bp, Homo sapien
tcttcgcatcgcacatgactcaggc

SEQ ID NO: 1008319 - DNA, 25 bp, Homo sapien
aattgataaaacaggacaacaatgt

SEQ ID NO: 1008320 - DNA, 25 bp, Homo sapien
attgataaaacaggacaacaatgtt

SEQ ID NO: 1008321 - DNA, 25 bp, Homo sapien
tctgtttgcttctaatgaccacaca

SEQ ID NO: 1008322 - DNA, 25 bp, Homo sapien
cacccaattaaaaggtagaagtgtg

SEQ ID NO: 1008323 - DNA, 25 bp, Homo sapien
gtctattccacgacatctgcttcct

SEQ ID NO: 1008324 - DNA, 25 bp, Homo sapien
ttctgtctattccacgacatctgct

SEQ ID NO: 1008325 - DNA, 25 bp, Homo sapien
acagtgcttgagtttattgtatggc

SEQ ID NO: 1008326 - DNA, 25 bp, Homo sapien
cttgagtttattgtatggcaggtga

SEQ ID NO: 1008327 - DNA, 25 bp, Homo sapien
cagtttcgcagcatggtttccacca

SEQ ID NO: 1008328 - DNA, 25 bp, Homo sapien
cctaagaagtctactagtaggtccg

SEQ ID NO: 1008329 - DNA, 25 bp, Homo sapien
tctactagtaggtccgccttaggca

SEQ ID NO: 1008330 - DNA, 25 bp, Homo sapien
gtgttcttatccaggtgggtggaca

SEQ ID NO: 1008331 - DNA, 25 bp, Homo sapien
atttgactgcttgagatcatgctca

SEQ ID NO: 1008332 - DNA, 25 bp, Homo sapien
tgcttgagatcatgctcacgtctgc

SEQ ID NO: 1008333 - DNA, 25 bp, Homo sapien
gctgttgaacatttccgactgttca

SEQ ID NO: 1008334 - DNA, 25 bp, Homo sapien
tcatgctcacgtctgctgttgaaca

SEQ ID NO: 1008335 - DNA, 25 bp, Homo sapien
ggaaggcagttcctcggagagccat

SEQ ID NO: 1008336 - DNA, 25 bp, Homo sapien
gataacacttgaggaaggcagttcc

SEQ ID NO: 1008337 - DNA, 25 bp, Homo sapien
cctgagaagtaatgaggccgtagtg

SEQ ID NO: 1008338 - DNA, 25 bp, Homo sapien
tggatgccaaacagtcctctgataa

SEQ ID NO: 1008339 - DNA, 25 bp, Homo sapien
cagctccttcgtggaagtagagtca

SEQ ID NO: 1008340 - DNA, 25 bp, Homo sapien
gctgcattccgtcagtagcagaggc

SEQ ID NO: 1008341 - DNA, 25 bp, Homo sapien
ggactcaaagagtcaggactggcat

SEQ ID NO: 1008342 - DNA, 25 bp, Homo sapien
tcaggactggcatcgggctgcattc

SEQ ID NO: 1008343 - DNA, 25 bp, Homo sapien
tcaatgaatcaggacgactggcact

SEQ ID NO: 1008344 - DNA, 25 bp, Homo sapien
tgaatcaggacgactggcactgtct

SEQ ID NO: 1008345 - DNA, 25 bp, Homo sapien
aatgaatcaggacgactggcactgt

SEQ ID NO: 1008346 - DNA, 25 bp, Homo sapien
caatgaatcaggacgactggcactg

SEQ ID NO: 1008347 - DNA, 25 bp, Homo sapien
gaggagtgctccttacatcttaggt

SEQ ID NO: 1008348 - DNA, 25 bp, Homo sapien
ccttatcctaagcaaggaggagtgc

SEQ ID NO: 1008349 - DNA, 25 bp, Homo sapien
ggtagaaaattgcaggccttatcct

SEQ ID NO: 1008350 - DNA, 25 bp, Homo sapien
ggattaattcctaggtgccaatgaa

SEQ ID NO: 1008351 - DNA, 25 bp, Homo sapien
aagagccgactattctctgatcgag

SEQ ID NO: 1008352 - DNA, 25 bp, Homo sapien
gaaacaatgtgccttctaagagccg

SEQ ID NO: 1008353 - DNA, 25 bp, Homo sapien
tctgaacgtcacacgaagaccaggc

SEQ ID NO: 1008354 - DNA, 25 bp, Homo sapien
caggcatcttgcaagggtctcatca

SEQ ID NO: 1008355 - DNA, 25 bp, Homo sapien
ccagagggagatgccattctttcac

SEQ ID NO: 1008356 - DNA, 25 bp, Homo sapien
gtgacacgcatttgacccacacaag

SEQ ID NO: 1008357 - DNA, 25 bp, Homo sapien
gcctgatgtagcatgttcctccgta

SEQ ID NO: 1008358 - DNA, 25 bp, Homo sapien
tattgactttatgcaaggccggcct

SEQ ID NO: 1008359 - DNA, 25 bp, Homo sapien
ttcattttcacaccggtacgtcctg

SEQ ID NO: 1008360 - DNA, 25 bp, Homo sapien
aaagcctggaatgagaaaggttcat

SEQ ID NO: 1008361 - DNA, 25 bp, Homo sapien
ttttcacaccggtacgtcctggctc

SEQ ID NO: 1008362 - DNA, 25 bp, Homo sapien
ttcgtgcccggcagtccttcctcca

SEQ ID NO: 1008363 - DNA, 25 bp, Homo sapien
tctccacgtcaacacaggtggccat

SEQ ID NO: 1008364 - DNA, 25 bp, Homo sapien
aaggaaaattcttcgagcagccaag

SEQ ID NO: 1008365 - DNA, 25 bp, Homo sapien
tgctgccagcaggtcgtaaggaact

SEQ ID NO: 1008366 - DNA, 25 bp, Homo sapien
tttgcgttcccaatgaaaatcagga

SEQ ID NO: 1008367 - DNA, 25 bp, Homo sapien
tttaatagagaagaagaacatccca

SEQ ID NO: 1008368 - DNA, 25 bp, Homo sapien
tccagggcatgcgacgtgatcattt

SEQ ID NO: 1008369 - DNA, 25 bp, Homo sapien
tgatcattttcacgaatgcagcgtg

SEQ ID NO: 1008370 - DNA, 25 bp, Homo sapien
cagtatttcaggtggccacgcgtga

SEQ ID NO: 1008371 - DNA, 25 bp, Homo sapien
gcgtgatgctgctccttccgtgtta

SEQ ID NO: 1008372 - DNA, 25 bp, Homo sapien
tcaggcagctcgatcagtttccagc

SEQ ID NO: 1008373 - DNA, 25 bp, Homo sapien
tgggacgtcttctctgcagatgcag

SEQ ID NO: 1008374 - DNA, 25 bp, Homo sapien
taacggacactctacattgggacgt

SEQ ID NO: 1008375 - DNA, 25 bp, Homo sapien
taggcgataaatccatcatcactgg

SEQ ID NO: 1008376 - DNA, 25 bp, Homo sapien
aggtgggtgaatgccctggctgttg

SEQ ID NO: 1008377 - DNA, 25 bp, Homo sapien
ctgttagagcatcatgggagaggtg

SEQ ID NO: 1008378 - DNA, 25 bp, Homo sapien
agaggtgggtgaatgccctggctgt

SEQ ID NO: 1008379 - DNA, 25 bp, Homo sapien
ttagagcatcatgggagaggtgggt

SEQ ID NO: 1008380 - DNA, 25 bp, Homo sapien
ggaagccaggaatatgtccgcagtt

SEQ ID NO: 1008381 - DNA, 25 bp, Homo sapien
ggaatatgtccgcagtttcatccac

SEQ ID NO: 1008382 - DNA, 25 bp, Homo sapien
tatgtccgcagtttcatccaccggc

SEQ ID NO: 1008383 - DNA, 25 bp, Homo sapien
agccaggaatatgtccgcagtttca

SEQ ID NO: 1008384 - DNA, 25 bp, Homo sapien
atcagcaggtcctcgacaccgtggc

SEQ ID NO: 1008385 - DNA, 25 bp, Homo sapien
ctgatcagcaggtcctcgacaccgt

SEQ ID NO: 1008386 - DNA, 25 bp, Homo sapien
cagtcgtcattaccgccctgatcag

SEQ ID NO: 1008387 - DNA, 25 bp, Homo sapien
caaagtgcttgtcccgctgttcagt

SEQ ID NO: 1008388 - DNA, 25 bp, Homo sapien
gggaacacatgacggtttcaccatt

SEQ ID NO: 1008389 - DNA, 25 bp, Homo sapien
gactgttagcttcaatgggtgtttt

SEQ ID NO: 1008390 - DNA, 25 bp, Homo sapien
tccttggatgtgactgttagcttca

SEQ ID NO: 1008391 - DNA, 25 bp, Homo sapien
cagcagaacagtgtttttccttgga

SEQ ID NO: 1008392 - DNA, 25 bp, Homo sapien
ctgctgaccacaaacaccagatgcc

SEQ ID NO: 1008393 - DNA, 25 bp, Homo sapien
accacaaacaccagatgcctaggca

SEQ ID NO: 1008394 - DNA, 25 bp, Homo sapien
tgctgaccacaaacaccagatgcct

SEQ ID NO: 1008395 - DNA, 25 bp, Homo sapien
acaaacaccagatgcctaggcagca

SEQ ID NO: 1008396 - DNA, 25 bp, Homo sapien
ccaggcgggggtctgatccacacta

SEQ ID NO: 1008397 - DNA, 25 bp, Homo sapien
gcgggggtctgatccacactaggca

SEQ ID NO: 1008398 - DNA, 25 bp, Homo sapien
aggcgggggtctgatccacactagg

SEQ ID NO: 1008399 - DNA, 25 bp, Homo sapien
cgggggtctgatccacactaggcaa

SEQ ID NO: 1008400 - DNA, 25 bp, Homo sapien
ggcaagctcatctgaagcccaatcc

SEQ ID NO: 1008401 - DNA, 25 bp, Homo sapien
atctgaagcccaatccacctgctct

SEQ ID NO: 1008402 - DNA, 25 bp, Homo sapien
caagctcatctgaagcccaatccac

SEQ ID NO: 1008403 - DNA, 25 bp, Homo sapien
agctcatctgaagcccaatccacct

SEQ ID NO: 1008404 - DNA, 25 bp, Homo sapien
ttagcacttgcccagaagtacaggg

SEQ ID NO: 1008405 - DNA, 25 bp, Homo sapien
caggcacagctgttcactggatata

SEQ ID NO: 1008406 - DNA, 25 bp, Homo sapien
cagttaccaggcacagctgttcact

SEQ ID NO: 1008407 - DNA, 25 bp, Homo sapien
ctgacagccagttaccaggcacagc

SEQ ID NO: 1008408 - DNA, 25 bp, Homo sapien
tcactaccatgtcccaaatatatcc

SEQ ID NO: 1008409 - DNA, 25 bp, Homo sapien
cacggatcttgggactcatcagcct

SEQ ID NO: 1008410 - DNA, 25 bp, Homo sapien
gagaacagcttcctaacggtacatt

SEQ ID NO: 1008411 - DNA, 25 bp, Homo sapien
ggcaaagaatatcatccacacctgt

SEQ ID NO: 1008412 - DNA, 25 bp, Homo sapien
tgaaatctgaggttgtccaaaggca

SEQ ID NO: 1008413 - DNA, 25 bp, Homo sapien
tgcgtgcatatatacaaagcttggc

SEQ ID NO: 1008414 - DNA, 25 bp, Homo sapien
tctcaaagctatagaccagcagggc

SEQ ID NO: 1008415 - DNA, 25 bp, Homo sapien
taggactcgggattccagcaaggac

SEQ ID NO: 1008416 - DNA, 25 bp, Homo sapien
gaccaagccctgaggatccaaatct

SEQ ID NO: 1008417 - DNA, 25 bp, Homo sapien
aagtacctgattccattaagagtag

SEQ ID NO: 1008418 - DNA, 25 bp, Homo sapien
tttgggcctcttagtgaagtacctg

SEQ ID NO: 1008419 - DNA, 25 bp, Homo sapien
ctttgggcctcttagtgaagtacct

SEQ ID NO: 1008420 - DNA, 25 bp, Homo sapien
gtctatcaacacagacgtcttagag

SEQ ID NO: 1008421 - DNA, 25 bp, Homo sapien
tcttagagtctctgggacctcgttc

SEQ ID NO: 1008422 - DNA, 25 bp, Homo sapien
tctgggacctcgttctatacgggac

SEQ ID NO: 1008423 - DNA, 25 bp, Homo sapien
cctcgttctatacgggacttgtctt

SEQ ID NO: 1008424 - DNA, 25 bp, Homo sapien
aatgagtaacatggcccttagtggg

SEQ ID NO: 1008425 - DNA, 25 bp, Homo sapien
tgtgcaaaggatccccgaagtgagc

SEQ ID NO: 1008426 - DNA, 25 bp, Homo sapien
cttcgatatggagaaggcccatgct

SEQ ID NO: 1008427 - DNA, 25 bp, Homo sapien
cagcggacaacttttgaacttggcc

SEQ ID NO: 1008428 - DNA, 25 bp, Homo sapien
aaagttcttgcgtacatgaagctgc

SEQ ID NO: 1008429 - DNA, 25 bp, Homo sapien
ccaggtgcatttaagtggtggtcta

SEQ ID NO: 1008430 - DNA, 25 bp, Homo sapien
tatgaagaagaaacacgcttgtatt

SEQ ID NO: 1008431 - DNA, 25 bp, Homo sapien
tgttcctaaaacaaagcatatgaag

SEQ ID NO: 1008432 - DNA, 25 bp, Homo sapien
tgtgtgttggcgtgccaagccacct

SEQ ID NO: 1008433 - DNA, 25 bp, Homo sapien
gtgtgttggcgtgccaagccacctg

SEQ ID NO: 1008434 - DNA, 25 bp, Homo sapien
atggatggagtgtgggcttggtgcc

SEQ ID NO: 1008435 - DNA, 25 bp, Homo sapien
ctccctgggaatggatggagtgtgg

SEQ ID NO: 1008436 - DNA, 25 bp, Homo sapien
cacggctgctccctgggaatggatg

SEQ ID NO: 1008437 - DNA, 25 bp, Homo sapien
agtcactcctgtgcccacggctgct

SEQ ID NO: 1008438 - DNA, 25 bp, Homo sapien
acttgtcctcccttcgtaccctgtg

SEQ ID NO: 1008439 - DNA, 25 bp, Homo sapien
attctcgttcttccaaacgccactt

SEQ ID NO: 1008440 - DNA, 25 bp, Homo sapien
ccgctgtcaacttccctctgtacat

SEQ ID NO: 1008441 - DNA, 25 bp, Homo sapien
tacatgctcacgacactgcacttgt

SEQ ID NO: 1008442 - DNA, 25 bp, Homo sapien
ggcagtgtgaaaacatcccggcccg

SEQ ID NO: 1008443 - DNA, 25 bp, Homo sapien
tcaatgagcctaccaaaatggcggc

SEQ ID NO: 1008444 - DNA, 25 bp, Homo sapien
caccgaggtgcagactttggacgaa

SEQ ID NO: 1008445 - DNA, 25 bp, Homo sapien
gactctaggatctaaccaaaggtgg

SEQ ID NO: 1008446 - DNA, 25 bp, Homo sapien
ttctttttggtgcatttagcatgca

SEQ ID NO: 1008447 - DNA, 25 bp, Homo sapien
tcatattaaacggtgtttatcactg

SEQ ID NO: 1008448 - DNA, 25 bp, Homo sapien
ttagcatgcacggtgccaaagcacc

SEQ ID NO: 1008449 - DNA, 25 bp, Homo sapien
atcactgtagcagtagatgactttc

SEQ ID NO: 1008450 - DNA, 25 bp, Homo sapien
tccagcccggtcgtccggagcatgg

SEQ ID NO: 1008451 - DNA, 25 bp, Homo sapien
cccggtcgtccggagcatggcagtt

SEQ ID NO: 1008452 - DNA, 25 bp, Homo sapien
cggagcatggcagttctgctcttct

SEQ ID NO: 1008453 - DNA, 25 bp, Homo sapien
tcgtccggagcatggcagttctgct

SEQ ID NO: 1008454 - DNA, 25 bp, Homo sapien
gatttatttatcagacgactggagg

SEQ ID NO: 1008455 - DNA, 25 bp, Homo sapien
taatggacagaaaagcccagaatcc

SEQ ID NO: 1008456 - DNA, 25 bp, Homo sapien
tcagagaagtgcatgaggactgcca

SEQ ID NO: 1008457 - DNA, 25 bp, Homo sapien
tgtcgctattggcaagtcacactga

SEQ ID NO: 1008458 - DNA, 25 bp, Homo sapien
taacgctgcgtccatgagctgctaa

SEQ ID NO: 1008459 - DNA, 25 bp, Homo sapien
ggttccttagaaagctctgcccgca

SEQ ID NO: 1008460 - DNA, 25 bp, Homo sapien
tgagatactaagttcaaagtcagcc

SEQ ID NO: 1008461 - DNA, 25 bp, Homo sapien
ttgaagttcaaagccggtgacacag

SEQ ID NO: 1008462 - DNA, 25 bp, Homo sapien
ggagagggcatcaaagacacacttc

SEQ ID NO: 1008463 - DNA, 25 bp, Homo sapien
gttgggcccagctccggttacagct

SEQ ID NO: 1008464 - DNA, 25 bp, Homo sapien
gctgcaccatttgctcagggttggg

SEQ ID NO: 1008465 - DNA, 25 bp, Homo sapien
ggttacagctccataatccattgtg

SEQ ID NO: 1008466 - DNA, 25 bp, Homo sapien
gtccgacctcggcagcattctctta

SEQ ID NO: 1008467 - DNA, 25 bp, Homo sapien
agcattctcttactctttcaggaag

SEQ ID NO: 1008468 - DNA, 25 bp, Homo sapien
tgggagctttggtgcagtccgacct

SEQ ID NO: 1008469 - DNA, 25 bp, Homo sapien
ggtgcagtccgacctcggcagcatt

SEQ ID NO: 1008470 - DNA, 25 bp, Homo sapien
gaaggctaatgcaaggtgctgttgg

SEQ ID NO: 1008471 - DNA, 25 bp, Homo sapien
cacacaaggcgtatgccaggacagc

SEQ ID NO: 1008472 - DNA, 25 bp, Homo sapien
ggagtgaacagccaagacgccctgg

SEQ ID NO: 1008473 - DNA, 25 bp, Homo sapien
acaagaggcaaaccctgcacaggag

SEQ ID NO: 1008474 - DNA, 25 bp, Homo sapien
tgtctgctggcagcattcccgggag

SEQ ID NO: 1008475 - DNA, 25 bp, Homo sapien
tgaagcggttcccagggaatgccga

SEQ ID NO: 1008476 - DNA, 25 bp, Homo sapien
aatgccgacggtgagtgctgtctgc

SEQ ID NO: 1008477 - DNA, 25 bp, Homo sapien
cccgggagctggaggaattcatcct

SEQ ID NO: 1008478 - DNA, 25 bp, Homo sapien
tgaggagcagaggtaaatatctgag

SEQ ID NO: 1008479 - DNA, 25 bp, Homo sapien
ctctgaggagcagaggtaaatatct

SEQ ID NO: 1008480 - DNA, 25 bp, Homo sapien
agaggtaaatatctgagtaaccaaa

SEQ ID NO: 1008481 - DNA, 25 bp, Homo sapien
gaggtaaatatctgagtaaccaaaa

SEQ ID NO: 1008482 - DNA, 25 bp, Homo sapien
gcatgatctgattatgtaggaacat

SEQ ID NO: 1008483 - DNA, 25 bp, Homo sapien
ctgcatgatctgattatgtaggaac

SEQ ID NO: 1008484 - DNA, 25 bp, Homo sapien
ataaggacagtcactctcagtgaca

SEQ ID NO: 1008485 - DNA, 25 bp, Homo sapien
tgtaggaacataaggacagtcactc

SEQ ID NO: 1008486 - DNA, 25 bp, Homo sapien
gagaccgttacgacacatgcctatg

SEQ ID NO: 1008487 - DNA, 25 bp, Homo sapien
agacgtggccccttcatgagcagag

SEQ ID NO: 1008488 - DNA, 25 bp, Homo sapien
gaaacatgggcctttattgcacctc

SEQ ID NO: 1008489 - DNA, 25 bp, Homo sapien
tgattgagggaacgaagccatctcc

SEQ ID NO: 1008490 - DNA, 25 bp, Homo sapien
acccattttacactcgctgctcgtg

SEQ ID NO: 1008491 - DNA, 25 bp, Homo sapien
tcccagtgccaacctcgaaaggctt

SEQ ID NO: 1008492 - DNA, 25 bp, Homo sapien
gctcgtgttttcaggctgtatccca

SEQ ID NO: 1008493 - DNA, 25 bp, Homo sapien
taggcatccgcatgctccgtggaag

SEQ ID NO: 1008494 - DNA, 25 bp, Homo sapien
gaaactctcgtaactagcgtccagt

SEQ ID NO: 1008495 - DNA, 25 bp, Homo sapien
gcagctgctcccgaaactctcgtaa

SEQ ID NO: 1008496 - DNA, 25 bp, Homo sapien
gtgaagacggcgctgcgctgacggg

SEQ ID NO: 1008497 - DNA, 25 bp, Homo sapien
gtaactagcgtccagtagcaagtgt

SEQ ID NO: 1008498 - DNA, 25 bp, Homo sapien
agcctcatcgggacctttggcacca

SEQ ID NO: 1008499 - DNA, 25 bp, Homo sapien
atcgggacctttggcaccagcagga

SEQ ID NO: 1008500 - DNA, 25 bp, Homo sapien
ggaggttccacgcagacaatgccag

SEQ ID NO: 1008501 - DNA, 25 bp, Homo sapien
cagcaggaggttccacgcagacaat

SEQ ID NO: 1008502 - DNA, 25 bp, Homo sapien
tgtgggagactgtacgagtgaggct

SEQ ID NO: 1008503 - DNA, 25 bp, Homo sapien
cgtgtaagggaagctgtgtattgca

SEQ ID NO: 1008504 - DNA, 25 bp, Homo sapien
tgagggacgcatgtgagggaagccc

SEQ ID NO: 1008505 - DNA, 25 bp, Homo sapien
ctgtgtattgcaggcccatgaggga

SEQ ID NO: 1008506 - DNA, 25 bp, Homo sapien
tagtagccacacgaagcagaaagtc

SEQ ID NO: 1008507 - DNA, 25 bp, Homo sapien
gacatgaggaccagcttgcgactcc

SEQ ID NO: 1008508 - DNA, 25 bp, Homo sapien
cccgccgtgctaagtggaattttca

SEQ ID NO: 1008509 - DNA, 25 bp, Homo sapien
taataacgggaatcctaggcattcg

SEQ ID NO: 1008510 - DNA, 25 bp, Homo sapien
ttccaattcattgaaaggagaggca

SEQ ID NO: 1008511 - DNA, 25 bp, Homo sapien
gcattccaattcattgaaaggagag

SEQ ID NO: 1008512 - DNA, 25 bp, Homo sapien
cattccaattcattgaaaggagagg

SEQ ID NO: 1008513 - DNA, 25 bp, Homo sapien
ccaattcattgaaaggagaggcaga

SEQ ID NO: 1008514 - DNA, 25 bp, Homo sapien
tgcgaggtggctctgcgaggtttgg

SEQ ID NO: 1008515 - DNA, 25 bp, Homo sapien
tggctctgcgaggtttggctggagc

SEQ ID NO: 1008516 - DNA, 25 bp, Homo sapien
accgggcacgcgcacatgtgagaag

SEQ ID NO: 1008517 - DNA, 25 bp, Homo sapien
ccgggcacgcgcacatgtgagaagc

SEQ ID NO: 1008518 - DNA, 25 bp, Homo sapien
attatggttgcccttgcaggtgaaa

SEQ ID NO: 1008519 - DNA, 25 bp, Homo sapien
cattaagcccaaccaaagctcgtgg

SEQ ID NO: 1008520 - DNA, 25 bp, Homo sapien
cataggtgatgctgccctcctctag

SEQ ID NO: 1008521 - DNA, 25 bp, Homo sapien
tagcccacgttctttcttatggaaa

SEQ ID NO: 1008522 - DNA, 25 bp, Homo sapien
atatccacgcggaattccctttcct

SEQ ID NO: 1008523 - DNA, 25 bp, Homo sapien
gaaggtgctccccaaaatatccacg

SEQ ID NO: 1008524 - DNA, 25 bp, Homo sapien
gctccccaaaatatccacgcggaat

SEQ ID NO: 1008525 - DNA, 25 bp, Homo sapien
ccaaaatatccacgcggaattccct

SEQ ID NO: 1008526 - DNA, 25 bp, Homo sapien
tcctctgaggcgctgaggacatcct

SEQ ID NO: 1008527 - DNA, 25 bp, Homo sapien
gcgctgaggacatcctctggcccag

SEQ ID NO: 1008528 - DNA, 25 bp, Homo sapien
gaatcgggaacaagcggtcctgctc

SEQ ID NO: 1008529 - DNA, 25 bp, Homo sapien
tcagaagctgcggaatcgggaacaa

SEQ ID NO: 1008530 - DNA, 25 bp, Homo sapien
cctcaggcagggcgaggatggaggc

SEQ ID NO: 1008531 - DNA, 25 bp, Homo sapien
gggtggcgtgggagcacctcggcat

SEQ ID NO: 1008532 - DNA, 25 bp, Homo sapien
ggggtggcgtgggagcacctcggca

SEQ ID NO: 1008533 - DNA, 25 bp, Homo sapien
gcctcaggcagggcgaggatggagg

SEQ ID NO: 1008534 - DNA, 25 bp, Homo sapien
ctctgcatactgtttcttgatactg

SEQ ID NO: 1008535 - DNA, 25 bp, Homo sapien
tctctgcatactgtttcttgatact

SEQ ID NO: 1008536 - DNA, 25 bp, Homo sapien
gtctctgcatactgtttcttgatac

SEQ ID NO: 1008537 - DNA, 25 bp, Homo sapien
tgtgcttgaacatcagtcctggtga

SEQ ID NO: 1008538 - DNA, 25 bp, Homo sapien
tctggaaagactgatgcgctgtgct

SEQ ID NO: 1008539 - DNA, 25 bp, Homo sapien
gcagagacactacatgaaagaccaa

SEQ ID NO: 1008540 - DNA, 25 bp, Homo sapien
taaccctaagttgcccagtgaggag

SEQ ID NO: 1008541 - DNA, 25 bp, Homo sapien
ccaagtctgaagtcggcctggatgg

SEQ ID NO: 1008542 - DNA, 25 bp, Homo sapien
cagtcggttcatgagccttcctttc

SEQ ID NO: 1008543 - DNA, 25 bp, Homo sapien
ttccccgtgaaatgtcaggaccaga

SEQ ID NO: 1008544 - DNA, 25 bp, Homo sapien
tagccgctcaaccatgtctcagtcg

SEQ ID NO: 1008545 - DNA, 25 bp, Homo sapien
aaggcgcattacctgggcccagaag

SEQ ID NO: 1008546 - DNA, 25 bp, Homo sapien
taatagctccataaaatcgcccctg

SEQ ID NO: 1008547 - DNA, 25 bp, Homo sapien
gaatttccaactgagctcgccagtg

SEQ ID NO: 1008548 - DNA, 25 bp, Homo sapien
gatgtgtctgccgtggaactcctat

SEQ ID NO: 1008549 - DNA, 25 bp, Homo sapien
aggcttcgtcgtttagcctctgtcc

SEQ ID NO: 1008550 - DNA, 25 bp, Homo sapien
ggctgggcaagcgtgggtggtgggc

SEQ ID NO: 1008551 - DNA, 25 bp, Homo sapien
aggcaggtgcactgggactgcaggg

SEQ ID NO: 1008552 - DNA, 25 bp, Homo sapien
gacaggtccctggatgagcaggcag

SEQ ID NO: 1008553 - DNA, 25 bp, Homo sapien
aggggacgtgatgggatctcaccag

SEQ ID NO: 1008554 - DNA, 25 bp, Homo sapien
cccctggagatatcatgcagagcag

SEQ ID NO: 1008555 - DNA, 25 bp, Homo sapien
ggagatatcatgcagagcagatgac

SEQ ID NO: 1008556 - DNA, 25 bp, Homo sapien
ggtccccctggagatatcatgcaga

SEQ ID NO: 1008557 - DNA, 25 bp, Homo sapien
tctgggccattgtctgttaaaaatc

SEQ ID NO: 1008558 - DNA, 25 bp, Homo sapien
gtcacactgtgcgacactgctctaa

SEQ ID NO: 1008559 - DNA, 25 bp, Homo sapien
cagacttaggtatgcaacaatgttc

SEQ ID NO: 1008560 - DNA, 25 bp, Homo sapien
gctatcctgggacacgattaattta

SEQ ID NO: 1008561 - DNA, 25 bp, Homo sapien
tagatagaggcctcagacgtctgac

SEQ ID NO: 1008562 - DNA, 25 bp, Homo sapien
gggctgatccctgcaaagtcaaagg

SEQ ID NO: 1008563 - DNA, 25 bp, Homo sapien
aaatatgtcctctacatcgaacggg

SEQ ID NO: 1008564 - DNA, 25 bp, Homo sapien
gaggtatccacgctgagtccagaca

SEQ ID NO: 1008565 - DNA, 25 bp, Homo sapien
tacgtcgcggaacggaagagtccta

SEQ ID NO: 1008566 - DNA, 25 bp, Homo sapien
tcaaatacgtcaccaggacatgggt

SEQ ID NO: 1008567 - DNA, 25 bp, Homo sapien
aaatactgagtccacctggttggcc

SEQ ID NO: 1008568 - DNA, 25 bp, Homo sapien
tgttatcctaacacctacgtcgcgg

SEQ ID NO: 1008569 - DNA, 25 bp, Homo sapien
gggtggccttctcgagtcttcccga

SEQ ID NO: 1008570 - DNA, 25 bp, Homo sapien
atggtttccaggcaccggacgacag

SEQ ID NO: 1008571 - DNA, 25 bp, Homo sapien
tcttcccgagcaggtctgtgcagcg

SEQ ID NO: 1008572 - DNA, 25 bp, Homo sapien
gggaagcagcgagccagagtatcca

SEQ ID NO: 1008573 - DNA, 25 bp, Homo sapien
tatttgtggcgtcgagtaaagcacc

SEQ ID NO: 1008574 - DNA, 25 bp, Homo sapien
ggaagagttctagctcgcgacagcc

SEQ ID NO: 1008575 - DNA, 25 bp, Homo sapien
cgatgtgtcacacacgcggctcagt

SEQ ID NO: 1008576 - DNA, 25 bp, Homo sapien
caagcctggaaaggaacgcgttgcc

SEQ ID NO: 1008577 - DNA, 25 bp, Homo sapien
tgcgtctagacgctgacgccgtgcg

SEQ ID NO: 1008578 - DNA, 25 bp, Homo sapien
ctgcgtctagacgctgacgccgtgc

SEQ ID NO: 1008579 - DNA, 25 bp, Homo sapien
gattaaagcgtgttttgttctctcc

SEQ ID NO: 1008580 - DNA, 25 bp, Homo sapien
gaaaatcgacgagattaaagcgtgt

SEQ ID NO: 1008581 - DNA, 25 bp, Homo sapien
ttgttttgcttatgatactgggaaa

SEQ ID NO: 1008582 - DNA, 25 bp, Homo sapien
ttcacatttagatgtcaccacagtt

SEQ ID NO: 1008583 - DNA, 25 bp, Homo sapien
gagcaatgtggtgttctatattaca

SEQ ID NO: 1008584 - DNA, 25 bp, Homo sapien
ttactgcagaagatcgagatttagc

SEQ ID NO: 1008585 - DNA, 25 bp, Homo sapien
tctgttacaattccgtgacttcact

SEQ ID NO: 1008586 - DNA, 25 bp, Homo sapien
tataccagggcactttatcaatggg

SEQ ID NO: 1008587 - DNA, 25 bp, Homo sapien
tgagcatccttggaatgtcctggaa

SEQ ID NO: 1008588 - DNA, 25 bp, Homo sapien
gaaggtgaaacagcgctctctcctg

SEQ ID NO: 1008589 - DNA, 25 bp, Homo sapien
tcattaaagttataggtgggtgcca

SEQ ID NO: 1008590 - DNA, 25 bp, Homo sapien
tattggtaatcgagatgactggcag

SEQ ID NO: 1008591 - DNA, 25 bp, Homo sapien
tcaaatgactcatagtaggccgacg

SEQ ID NO: 1008592 - DNA, 25 bp, Homo sapien
tcagagggccttcaattaattccgt

SEQ ID NO: 1008593 - DNA, 25 bp, Homo sapien
taattccgtatagtaggcattctgc

SEQ ID NO: 1008594 - DNA, 25 bp, Homo sapien
taggccgacgcagaaagtatcagag

SEQ ID NO: 1008595 - DNA, 25 bp, Homo sapien
cccctgctttcctccccgttgctga

SEQ ID NO: 1008596 - DNA, 25 bp, Homo sapien
cacccaagtcagattcttgacaaaa

SEQ ID NO: 1008597 - DNA, 25 bp, Homo sapien
caccgctttgctcagtctcacaagt

SEQ ID NO: 1008598 - DNA, 25 bp, Homo sapien
gattgaaacctcacccaggagtgcc

SEQ ID NO: 1008599 - DNA, 25 bp, Homo sapien
tgtgttccacaaagtaagtccaccc

SEQ ID NO: 1008600 - DNA, 25 bp, Homo sapien
aactgttggatacatgctgcttctc

SEQ ID NO: 1008601 - DNA, 25 bp, Homo sapien
tcattttcaaggctcctaaggagag

SEQ ID NO: 1008602 - DNA, 25 bp, Homo sapien
ccaggtgctgcacatgtcgctctca

SEQ ID NO: 1008603 - DNA, 25 bp, Homo sapien
gcccgtttggcgctaagcagacaca

SEQ ID NO: 1008604 - DNA, 25 bp, Homo sapien
tatggtctccgtgcgggtggttcac

SEQ ID NO: 1008605 - DNA, 25 bp, Homo sapien
gaatccaagcctactggagaggatg

SEQ ID NO: 1008606 - DNA, 25 bp, Homo sapien
cagacacagatcaggctatgacaac

SEQ ID NO: 1008607 - DNA, 25 bp, Homo sapien
gtagttgagaacaaactgtataagt

SEQ ID NO: 1008608 - DNA, 25 bp, Homo sapien
ggctttcagacttttcctcaaccac

SEQ ID NO: 1008609 - DNA, 25 bp, Homo sapien
taggcaagagccataggctagggca

SEQ ID NO: 1008610 - DNA, 25 bp, Homo sapien
tgactctgactgatacgagtgactg

SEQ ID NO: 1008611 - DNA, 25 bp, Homo sapien
tatttttagcttacagcaatgaccc

SEQ ID NO: 1008612 - DNA, 25 bp, Homo sapien
cagaaacgtaactttcgcaaagcaa

SEQ ID NO: 1008613 - DNA, 25 bp, Homo sapien
catgtatacagttaacagaaacgta

SEQ ID NO: 1008614 - DNA, 25 bp, Homo sapien
tgacccaccacatgtatacagttaa

SEQ ID NO: 1008615 - DNA, 25 bp, Homo sapien
gaaagtcacacatctcagcatacag

SEQ ID NO: 1008616 - DNA, 25 bp, Homo sapien
cagattgatgagatagaacagcctt

SEQ ID NO: 1008617 - DNA, 25 bp, Homo sapien
gccaaacaaggaatgtaccacactg

SEQ ID NO: 1008618 - DNA, 25 bp, Homo sapien
cccaaaggagtaggattggctgtgc

SEQ ID NO: 1008619 - DNA, 25 bp, Homo sapien
gggcttcaacaaagtcagtgccaac

SEQ ID NO: 1008620 - DNA, 25 bp, Homo sapien
ctgctgaactatgagagaaatctgg

SEQ ID NO: 1008621 - DNA, 25 bp, Homo sapien
taggagaaatcaatcacatgacgca

SEQ ID NO: 1008622 - DNA, 25 bp, Homo sapien
caaagttaaaggtacgtcagcgtca

SEQ ID NO: 1008623 - DNA, 25 bp, Homo sapien
caaagatgaattggtgcttccctga

SEQ ID NO: 1008624 - DNA, 25 bp, Homo sapien
ccaggtacctgggacacatggatcc

SEQ ID NO: 1008625 - DNA, 25 bp, Homo sapien
catctgcccagagcgccttgtaggc

SEQ ID NO: 1008626 - DNA, 25 bp, Homo sapien
tgacttgcacctgtgggtcttgcca

SEQ ID NO: 1008627 - DNA, 25 bp, Homo sapien
tttccatcgtcagcggggcttttct

SEQ ID NO: 1008628 - DNA, 25 bp, Homo sapien
tccgtgtctcccggagtccagtgcc

SEQ ID NO: 1008629 - DNA, 25 bp, Homo sapien
agcacgctttccatcgtcagcgggg

SEQ ID NO: 1008630 - DNA, 25 bp, Homo sapien
tcgtcagcggggcttttcttgctac

SEQ ID NO: 1008631 - DNA, 25 bp, Homo sapien
aaattagactcaactgcatgaaaag

SEQ ID NO: 1008632 - DNA, 25 bp, Homo sapien
gagttgtgtactttgtgagccttca

SEQ ID NO: 1008633 - DNA, 25 bp, Homo sapien
ccttcattgtaaagggtgtgctgac

SEQ ID NO: 1008634 - DNA, 25 bp, Homo sapien
catgaaaagtctatgcgaactgctt

SEQ ID NO: 1008635 - DNA, 25 bp, Homo sapien
cacccagccggcgtgcctgtctagg

SEQ ID NO: 1008636 - DNA, 25 bp, Homo sapien
gtgagcacccagccggcgtgcctgt

SEQ ID NO: 1008637 - DNA, 25 bp, Homo sapien
agcacccagccggcgtgcctgtcta

SEQ ID NO: 1008638 - DNA, 25 bp, Homo sapien
cccagccggcgtgcctgtctaggtg

SEQ ID NO: 1008639 - DNA, 25 bp, Homo sapien
tggaggccgctcgggtggttcgcgc

SEQ ID NO: 1008640 - DNA, 25 bp, Homo sapien
gccgctcgggtggttcgcgcctgct

SEQ ID NO: 1008641 - DNA, 25 bp, Homo sapien
gaggccgctcgggtggttcgcgcct

SEQ ID NO: 1008642 - DNA, 25 bp, Homo sapien
gctcgggtggttcgcgcctgctgca

SEQ ID NO: 1008643 - DNA, 25 bp, Homo sapien
caattttcaagaataagtgccagga

SEQ ID NO: 1008644 - DNA, 25 bp, Homo sapien
atgcaccctgaacccaaatggagga

SEQ ID NO: 1008645 - DNA, 25 bp, Homo sapien
cagcacggcttagcatgtgggaggg

SEQ ID NO: 1008646 - DNA, 25 bp, Homo sapien
tggaggaaccgtgccgttccctgga

SEQ ID NO: 1008647 - DNA, 25 bp, Homo sapien
gaagcccaaggaagcccaatatgat

SEQ ID NO: 1008648 - DNA, 25 bp, Homo sapien
ggacctgcagatttcccagtgggag

SEQ ID NO: 1008649 - DNA, 25 bp, Homo sapien
tccgtgtgtcgggagagacctaacc

SEQ ID NO: 1008650 - DNA, 25 bp, Homo sapien
tgtctagtgagcctgcagaacacaa

SEQ ID NO: 1008651 - DNA, 25 bp, Homo sapien
ttccttttacaatgtatagagaact

SEQ ID NO: 1008652 - DNA, 25 bp, Homo sapien
tttttccttttacaatgtatagaga

SEQ ID NO: 1008653 - DNA, 25 bp, Homo sapien
taactgtgtatatttccaagtaatt

SEQ ID NO: 1008654 - DNA, 25 bp, Homo sapien
gtaactgtgtatatttccaagtaat

SEQ ID NO: 1008655 - DNA, 25 bp, Homo sapien
taaatgtgtgagatctccacgggac

SEQ ID NO: 1008656 - DNA, 25 bp, Homo sapien
aatagatggtcaggctcgagagcgc

SEQ ID NO: 1008657 - DNA, 25 bp, Homo sapien
gaaatcgatcagtgcttggccataa

SEQ ID NO: 1008658 - DNA, 25 bp, Homo sapien
taaatacacactacgttctgccagg

SEQ ID NO: 1008659 - DNA, 25 bp, Homo sapien
catgcgtgtctgctggcactagagg

SEQ ID NO: 1008660 - DNA, 25 bp, Homo sapien
ggcgttccagagagatggccctcct

SEQ ID NO: 1008661 - DNA, 25 bp, Homo sapien
ctagaggagttctccgtgggagaca

SEQ ID NO: 1008662 - DNA, 25 bp, Homo sapien
ggagacccacgagtgctccatctgc

SEQ ID NO: 1008663 - DNA, 25 bp, Homo sapien
gaagattcttgaatgttgaattcat

SEQ ID NO: 1008664 - DNA, 25 bp, Homo sapien
ttcatagtcaaggaaagttaggtaa

SEQ ID NO: 1008665 - DNA, 25 bp, Homo sapien
ttgaattcatagtcaaggaaagtta

SEQ ID NO: 1008666 - DNA, 25 bp, Homo sapien
gaattcatagtcaaggaaagttagg

SEQ ID NO: 1008667 - DNA, 25 bp, Homo sapien
tccccatagcgttgacaggcaaagc

SEQ ID NO: 1008668 - DNA, 25 bp, Homo sapien
gagagtcccggagatacatggatca

SEQ ID NO: 1008669 - DNA, 25 bp, Homo sapien
gatgagggtcgcgaaaatcccatga

SEQ ID NO: 1008670 - DNA, 25 bp, Homo sapien
caggcacgtgtcaaaggccagagca

SEQ ID NO: 1008671 - DNA, 25 bp, Homo sapien
taggagcctaccattccatgggcgg

SEQ ID NO: 1008672 - DNA, 25 bp, Homo sapien
tataaaaactgggacactgaccaag

SEQ ID NO: 1008673 - DNA, 25 bp, Homo sapien
cagctacagcagtccctacgggatg

SEQ ID NO: 1008674 - DNA, 25 bp, Homo sapien
cagtcaccttgcaagatgaagccac

SEQ ID NO: 1008675 - DNA, 25 bp, Homo sapien
agttcatctgcccactgtaagcgtg

SEQ ID NO: 1008676 - DNA, 25 bp, Homo sapien
gaccccaggcaaatgtctgcagctt

SEQ ID NO: 1008677 - DNA, 25 bp, Homo sapien
cactgtaagcgtgaccccaggcaaa

SEQ ID NO: 1008678 - DNA, 25 bp, Homo sapien
tgaccccaggcaaatgtctgcagct

SEQ ID NO: 1008679 - DNA, 25 bp, Homo sapien
tattttcggcttcgcaaggtggtcc

SEQ ID NO: 1008680 - DNA, 25 bp, Homo sapien
ggtgactgtgggacgacaaagaact

SEQ ID NO: 1008681 - DNA, 25 bp, Homo sapien
tgggacgacaaagaactcgaccctc

SEQ ID NO: 1008682 - DNA, 25 bp, Homo sapien
tcagtggcgttccttgtcggtaaaa

SEQ ID NO: 1008683 - DNA, 25 bp, Homo sapien
ttttgcttatacgtatctgagagac

SEQ ID NO: 1008684 - DNA, 25 bp, Homo sapien
cagcatgcacacttaggaaaaacaa

SEQ ID NO: 1008685 - DNA, 25 bp, Homo sapien
gcaacaagtaatttgcgtacacagt

SEQ ID NO: 1008686 - DNA, 25 bp, Homo sapien
ccatctattaggaggccacaaagta

SEQ ID NO: 1008687 - DNA, 25 bp, Homo sapien
taagtaggcttctgtctgccagtaa

SEQ ID NO: 1008688 - DNA, 25 bp, Homo sapien
gaactctgggttaagctgtccagac

SEQ ID NO: 1008689 - DNA, 25 bp, Homo sapien
aattaaccagatgctaacagcattt

SEQ ID NO: 1008690 - DNA, 25 bp, Homo sapien
gaccacaagtaggtgctgttcagtc

SEQ ID NO: 1008691 - DNA, 25 bp, Homo sapien
caattactagtgtgtccaaatgtta

SEQ ID NO: 1008692 - DNA, 25 bp, Homo sapien
cacactaaaagtatctcatagaaac

SEQ ID NO: 1008693 - DNA, 25 bp, Homo sapien
tgcattaaataacgtgctaccaaca

SEQ ID NO: 1008694 - DNA, 25 bp, Homo sapien
acttgtaagaattctgcctttatgc

SEQ ID NO: 1008695 - DNA, 25 bp, Homo sapien
tagcacataagagcctgtaaatgat

SEQ ID NO: 1008696 - DNA, 25 bp, Homo sapien
ctagcacataagagcctgtaaatga

SEQ ID NO: 1008697 - DNA, 25 bp, Homo sapien
gcacataagagcctgtaaatgatga

SEQ ID NO: 1008698 - DNA, 25 bp, Homo sapien
agcacataagagcctgtaaatgatg

SEQ ID NO: 1008699 - DNA, 25 bp, Homo sapien
tactaaccagcaccttagtgcagca

SEQ ID NO: 1008700 - DNA, 25 bp, Homo sapien
tgagagcaggtacacgtgcgccttt

SEQ ID NO: 1008701 - DNA, 25 bp, Homo sapien
catctgagagcaaaacgcgagaggc

SEQ ID NO: 1008702 - DNA, 25 bp, Homo sapien
gagaggctccgtccatctctactaa

SEQ ID NO: 1008703 - DNA, 25 bp, Homo sapien
ccagaattgacctgatgatgagcat

SEQ ID NO: 1008704 - DNA, 25 bp, Homo sapien
ctttcactggcgtgcaggaactgca

SEQ ID NO: 1008705 - DNA, 25 bp, Homo sapien
tctggaaccatagtgcctaatgccc

SEQ ID NO: 1008706 - DNA, 25 bp, Homo sapien
ggtgcatccctatccagtcagaaac

SEQ ID NO: 1008707 - DNA, 25 bp, Homo sapien
gagcctcgaggaaccgtgattacgc

SEQ ID NO: 1008708 - DNA, 25 bp, Homo sapien
tggagttcgtcatataaagcagcct

SEQ ID NO: 1008709 - DNA, 25 bp, Homo sapien
atgagtcccaggttcgaagccgtcc

SEQ ID NO: 1008710 - DNA, 25 bp, Homo sapien
gactcagaacgtttggcctccgtat

SEQ ID NO: 1008711 - DNA, 25 bp, Homo sapien
tatcctagtggatggttgacacaga

SEQ ID NO: 1008712 - DNA, 25 bp, Homo sapien
gcagactgcataactacgaattgtg

SEQ ID NO: 1008713 - DNA, 25 bp, Homo sapien
cattttagaaagatgtgaagctcgg

SEQ ID NO: 1008714 - DNA, 25 bp, Homo sapien
gatgtcaaatagacacagcctgcgt

SEQ ID NO: 1008715 - DNA, 25 bp, Homo sapien
tggacttaaagccaagaaaccatcc

SEQ ID NO: 1008716 - DNA, 25 bp, Homo sapien
ttcatagtttttattcagtggactt

SEQ ID NO: 1008717 - DNA, 25 bp, Homo sapien
gacttaaagccaagaaaccatccca

SEQ ID NO: 1008718 - DNA, 25 bp, Homo sapien
tttttattcagtggacttaaagcca

SEQ ID NO: 1008719 - DNA, 25 bp, Homo sapien
tctcttggtggcagaagacgccgtc

SEQ ID NO: 1008720 - DNA, 25 bp, Homo sapien
taagcttcacttagtaccaaggatg

SEQ ID NO: 1008721 - DNA, 25 bp, Homo sapien
ggctctctaaggctccaggtttaaa

SEQ ID NO: 1008722 - DNA, 25 bp, Homo sapien
tatgcaaatgtaaccaaagcctgag

SEQ ID NO: 1008723 - DNA, 25 bp, Homo sapien
agtgctttctgatgcccatttacag

SEQ ID NO: 1008724 - DNA, 25 bp, Homo sapien
ctttctgatgcccatttacagaagg

SEQ ID NO: 1008725 - DNA, 25 bp, Homo sapien
tctgatgcccatttacagaaggctt

SEQ ID NO: 1008726 - DNA, 25 bp, Homo sapien
tgatgcccatttacagaaggcttgg

SEQ ID NO: 1008727 - DNA, 25 bp, Homo sapien
aatcccttgaagtatttggtaagtg

SEQ ID NO: 1008728 - DNA, 25 bp, Homo sapien
tttctgaatcccttgaagtatttgg

SEQ ID NO: 1008729 - DNA, 25 bp, Homo sapien
ctgtttctgaatcccttgaagtatt

SEQ ID NO: 1008730 - DNA, 25 bp, Homo sapien
tgaatcccttgaagtatttggtaag

SEQ ID NO: 1008731 - DNA, 25 bp, Homo sapien
tgaattttcggaccagacacaatgt

SEQ ID NO: 1008732 - DNA, 25 bp, Homo sapien
gacacaatgttgtcacaatagcaaa

SEQ ID NO: 1008733 - DNA, 25 bp, Homo sapien
caaagtcgccaagtagatcaaatct

SEQ ID NO: 1008734 - DNA, 25 bp, Homo sapien
aaaagttcttctcgaactgcagagg

SEQ ID NO: 1008735 - DNA, 25 bp, Homo sapien
gggagcactccacgagaacaaggat

SEQ ID NO: 1008736 - DNA, 25 bp, Homo sapien
tcgctgccacagtcggaacaaggga

SEQ ID NO: 1008737 - DNA, 25 bp, Homo sapien
tgggttcgctgccacagtcggaaca

SEQ ID NO: 1008738 - DNA, 25 bp, Homo sapien
gataggagagggacacaagttccat

SEQ ID NO: 1008739 - DNA, 25 bp, Homo sapien
taggaagtatattcgccattggtac

SEQ ID NO: 1008740 - DNA, 25 bp, Homo sapien
ttggtactacccatccccagaattc

SEQ ID NO: 1008741 - DNA, 25 bp, Homo sapien
tccaacgatggacactttgattgtt

SEQ ID NO: 1008742 - DNA, 25 bp, Homo sapien
cctggcaactcatgaaatgaactac

SEQ ID NO: 1008743 - DNA, 25 bp, Homo sapien
gtttctggtttgaccacttggatag

SEQ ID NO: 1008744 - DNA, 25 bp, Homo sapien
agtttctggtttgaccacttggata

SEQ ID NO: 1008745 - DNA, 25 bp, Homo sapien
ttctggtttgaccacttggatagaa

SEQ ID NO: 1008746 - DNA, 25 bp, Homo sapien
tttctggtttgaccacttggataga

SEQ ID NO: 1008747 - DNA, 25 bp, Homo sapien
aatcaggttgctaaagagcatactt

SEQ ID NO: 1008748 - DNA, 25 bp, Homo sapien
tcaaatcaggttgctaaagagcata

SEQ ID NO: 1008749 - DNA, 25 bp, Homo sapien
tcaggttgctaaagagcatactttt

SEQ ID NO: 1008750 - DNA, 25 bp, Homo sapien
caaatcaggttgctaaagagcatac

SEQ ID NO: 1008751 - DNA, 25 bp, Homo sapien
ccagtgttctcgacatcacaggcag

SEQ ID NO: 1008752 - DNA, 25 bp, Homo sapien
cagtgttctcgacatcacaggcaga

SEQ ID NO: 1008753 - DNA, 25 bp, Homo sapien
ggctatagaagccgacaacagagga

SEQ ID NO: 1008754 - DNA, 25 bp, Homo sapien
tttccaaaaaatcgaaggctataga

SEQ ID NO: 1008755 - DNA, 25 bp, Homo sapien
aaggctatagaagccgacaacagag

SEQ ID NO: 1008756 - DNA, 25 bp, Homo sapien
ccaaaaaatcgaaggctatagaagc

SEQ ID NO: 1008757 - DNA, 25 bp, Homo sapien
aaccaaacgtagaaagagaggcatt

SEQ ID NO: 1008758 - DNA, 25 bp, Homo sapien
atcaaaatgatttcaagcgcagctc

SEQ ID NO: 1008759 - DNA, 25 bp, Homo sapien
aaatgatttcaagcgcagctcccac

SEQ ID NO: 1008760 - DNA, 25 bp, Homo sapien
gcagctcccacaaaaccaaacgtag

SEQ ID NO: 1008761 - DNA, 25 bp, Homo sapien
gatggcacaaggtcctggaaagact

SEQ ID NO: 1008762 - DNA, 25 bp, Homo sapien
gagcatgatggtgggcttgtactca

SEQ ID NO: 1008763 - DNA, 25 bp, Homo sapien
tctgaatcaagactatggctaaagg

SEQ ID NO: 1008764 - DNA, 25 bp, Homo sapien
tgaagtatatacatgcacaaaggtg

SEQ ID NO: 1008765 - DNA, 25 bp, Homo sapien
ttacaagccaccaagaggaccgaga

SEQ ID NO: 1008766 - DNA, 25 bp, Homo sapien
aatattacaagccaccaagaggacc

SEQ ID NO: 1008767 - DNA, 25 bp, Homo sapien
aagccaccaagaggaccgagatgga

SEQ ID NO: 1008768 - DNA, 25 bp, Homo sapien
gctgtttcatcaaccaataggcaaa

SEQ ID NO: 1008769 - DNA, 25 bp, Homo sapien
actgtcagctctcaagatttttcac

SEQ ID NO: 1008770 - DNA, 25 bp, Homo sapien
gacaaacagcaaactgtcagctctc

SEQ ID NO: 1008771 - DNA, 25 bp, Homo sapien
agacaaacagcaaactgtcagctct

SEQ ID NO: 1008772 - DNA, 25 bp, Homo sapien
gtcagctctcaagatttttcaccaa

SEQ ID NO: 1008773 - DNA, 25 bp, Homo sapien
cagcgggatacaccaaatttctttc

SEQ ID NO: 1008774 - DNA, 25 bp, Homo sapien
tcccatgctgaagccttttttcgcc

SEQ ID NO: 1008775 - DNA, 25 bp, Homo sapien
ccataacagcgggatacaccaaatt

SEQ ID NO: 1008776 - DNA, 25 bp, Homo sapien
agaaggagaaccataacagcgggat

SEQ ID NO: 1008777 - DNA, 25 bp, Homo sapien
ttatgttgtattccaccgatgaaga

SEQ ID NO: 1008778 - DNA, 25 bp, Homo sapien
tatgttgtattccaccgatgaagac

SEQ ID NO: 1008779 - DNA, 25 bp, Homo sapien
ttgtattccaccgatgaagacagcc

SEQ ID NO: 1008780 - DNA, 25 bp, Homo sapien
tgttgtattccaccgatgaagacag

SEQ ID NO: 1008781 - DNA, 25 bp, Homo sapien
ctggatttcccgcacaaagcattcc

SEQ ID NO: 1008782 - DNA, 25 bp, Homo sapien
agtagctgtccagcttgttcttctg

SEQ ID NO: 1008783 - DNA, 25 bp, Homo sapien
ggatttcccgcacaaagcattccca

SEQ ID NO: 1008784 - DNA, 25 bp, Homo sapien
tttcccaaaagtagctgtccagctt

SEQ ID NO: 1008785 - DNA, 25 bp, Homo sapien
tacaaattatcataaagtttctggc

SEQ ID NO: 1008786 - DNA, 25 bp, Homo sapien
tagttcttccccttgattctgcaag

SEQ ID NO: 1008787 - DNA, 25 bp, Homo sapien
ttttgaaggactatattagtatgct

SEQ ID NO: 1008788 - DNA, 25 bp, Homo sapien
tctgcaagatgattaattcaatttt

SEQ ID NO: 1008789 - DNA, 25 bp, Homo sapien
ataaatttgttcatccaggtcttca

SEQ ID NO: 1008790 - DNA, 25 bp, Homo sapien
tagtcgtctctggagtgcttcttcc

SEQ ID NO: 1008791 - DNA, 25 bp, Homo sapien
ttcttcctctaaggtaatgatataa

SEQ ID NO: 1008792 - DNA, 25 bp, Homo sapien
tttgttcatccaggtcttcaagaat

SEQ ID NO: 1008793 - DNA, 25 bp, Homo sapien
gttggcttcactagcaactgaccca

SEQ ID NO: 1008794 - DNA, 25 bp, Homo sapien
tcactagcaactgacccatcactgt

SEQ ID NO: 1008795 - DNA, 25 bp, Homo sapien
ggcttcactagcaactgacccatca

SEQ ID NO: 1008796 - DNA, 25 bp, Homo sapien
tagcaactgacccatcactgtgaac

SEQ ID NO: 1008797 - DNA, 25 bp, Homo sapien
tataaatagggtagatagaactccc

SEQ ID NO: 1008798 - DNA, 25 bp, Homo sapien
caggaatataaatagggtagataga

SEQ ID NO: 1008799 - DNA, 25 bp, Homo sapien
ccatcaatgatatacaggaatataa

SEQ ID NO: 1008800 - DNA, 25 bp, Homo sapien
tagggtagatagaactcccagagat

SEQ ID NO: 1008801 - DNA, 25 bp, Homo sapien
tcaatgagtgctgaagctacccaca

SEQ ID NO: 1008802 - DNA, 25 bp, Homo sapien
caaagtctctaaaatgcgggctcgg

SEQ ID NO: 1008803 - DNA, 25 bp, Homo sapien
tcccaagaatgagtaacgcaagaag

SEQ ID NO: 1008804 - DNA, 25 bp, Homo sapien
tataaagattccatgcttgcggcat

SEQ ID NO: 1008805 - DNA, 25 bp, Homo sapien
ccaccaccagatctgaaggtctttt

SEQ ID NO: 1008806 - DNA, 25 bp, Homo sapien
actgagttgagcacatccaccacca

SEQ ID NO: 1008807 - DNA, 25 bp, Homo sapien
ccaccagatctgaaggtcttttcat

SEQ ID NO: 1008808 - DNA, 25 bp, Homo sapien
cactgagttgagcacatccaccacc

SEQ ID NO: 1008809 - DNA, 25 bp, Homo sapien
ccttgggcgaattactaagctttgc

SEQ ID NO: 1008810 - DNA, 25 bp, Homo sapien
cagaagtaaattgcttgggtccaaa

SEQ ID NO: 1008811 - DNA, 25 bp, Homo sapien
taagagccccaatgccagaagtaaa

SEQ ID NO: 1008812 - DNA, 25 bp, Homo sapien
cagtttatgagacatactaggctgg

SEQ ID NO: 1008813 - DNA, 25 bp, Homo sapien
gatgaacatttaaacaaggttttgc

SEQ ID NO: 1008814 - DNA, 25 bp, Homo sapien
gtcatgtttctatggtgatgaacat

SEQ ID NO: 1008815 - DNA, 25 bp, Homo sapien
ggttttgcctggacatcttgccctc

SEQ ID NO: 1008816 - DNA, 25 bp, Homo sapien
aagctctatggagaagctgtcatgt

SEQ ID NO: 1008817 - DNA, 25 bp, Homo sapien
ctttgagtaatacaccgagtttggg

SEQ ID NO: 1008818 - DNA, 25 bp, Homo sapien
gctctgaatggtgtagaatgactca

SEQ ID NO: 1008819 - DNA, 25 bp, Homo sapien
gcaggcaggactaattctgggagct

SEQ ID NO: 1008820 - DNA, 25 bp, Homo sapien
gactcagcagcatgcatttctggca

SEQ ID NO: 1008821 - DNA, 25 bp, Homo sapien
aatccagataacctggaggtctttt

SEQ ID NO: 1008822 - DNA, 25 bp, Homo sapien
taatccagataacctggaggtcttt

SEQ ID NO: 1008823 - DNA, 25 bp, Homo sapien
ttaatccagataacctggaggtctt

SEQ ID NO: 1008824 - DNA, 25 bp, Homo sapien
ctgcacccggccattgactaaattt

SEQ ID NO: 1008825 - DNA, 25 bp, Homo sapien
tcttaatgtcaggtttgactgccag

SEQ ID NO: 1008826 - DNA, 25 bp, Homo sapien
ttttaattgcctgtcttaagaatac

SEQ ID NO: 1008827 - DNA, 25 bp, Homo sapien
ggtacccatcgccacacccagttaa

SEQ ID NO: 1008828 - DNA, 25 bp, Homo sapien
ctttttcaggccagcaaagccttct

SEQ ID NO: 1008829 - DNA, 25 bp, Homo sapien
tttttcaggccagcaaagccttctg

SEQ ID NO: 1008830 - DNA, 25 bp, Homo sapien
gaaaaaagggaagcaagattccaca

SEQ ID NO: 1008831 - DNA, 25 bp, Homo sapien
tggaaaaaagggaagcaagattcca

SEQ ID NO: 1008832 - DNA, 25 bp, Homo sapien
taatctattgctttatttaggcgtg

SEQ ID NO: 1008833 - DNA, 25 bp, Homo sapien
tttacacaagatagttttattccaa

SEQ ID NO: 1008834 - DNA, 25 bp, Homo sapien
gaaaaatacatgaccgtttcaaatc

SEQ ID NO: 1008835 - DNA, 25 bp, Homo sapien
taaaggtcagtgtgtcacgaattat

SEQ ID NO: 1008836 - DNA, 25 bp, Homo sapien
actggaattagaggtggatcctgaa

SEQ ID NO: 1008837 - DNA, 25 bp, Homo sapien
gtaaaaatagcaagaggactggaat

SEQ ID NO: 1008838 - DNA, 25 bp, Homo sapien
gtttgagatgtcagtggagaaagtc

SEQ ID NO: 1008839 - DNA, 25 bp, Homo sapien
aaacttgaaatgaacgaggagctgc

SEQ ID NO: 1008840 - DNA, 25 bp, Homo sapien
gcttccattcgtggcgaaaggcgaa

SEQ ID NO: 1008841 - DNA, 25 bp, Homo sapien
tccaaactacagcactattgtcact

SEQ ID NO: 1008842 - DNA, 25 bp, Homo sapien
gcttggtgccaacagctgctgtgag

SEQ ID NO: 1008843 - DNA, 25 bp, Homo sapien
tgagaataaagaactcactcaccca

SEQ ID NO: 1008844 - DNA, 25 bp, Homo sapien
tatgttgcatggtgtactggttttc

SEQ ID NO: 1008845 - DNA, 25 bp, Homo sapien
gaatccttcctactatctgtgggtg

SEQ ID NO: 1008846 - DNA, 25 bp, Homo sapien
caggaccacgctccttccaaagtct

SEQ ID NO: 1008847 - DNA, 25 bp, Homo sapien
ccacaaaccgaatggcttcaagcaa

SEQ ID NO: 1008848 - DNA, 25 bp, Homo sapien
tccagaaaagcactccactgtttgg

SEQ ID NO: 1008849 - DNA, 25 bp, Homo sapien
cactgtttggatcgacaagatatga

SEQ ID NO: 1008850 - DNA, 25 bp, Homo sapien
tctggtatctctgtatatcaacaaa

SEQ ID NO: 1008851 - DNA, 25 bp, Homo sapien
ctgagcccaaatgactaggaacatt

SEQ ID NO: 1008852 - DNA, 25 bp, Homo sapien
cttagccaaaattgggccccactgg

SEQ ID NO: 1008853 - DNA, 25 bp, Homo sapien
aactgttcatttgcaatggtgtgca

SEQ ID NO: 1008854 - DNA, 25 bp, Homo sapien
tatttaagggtacaatctaactcca

SEQ ID NO: 1008855 - DNA, 25 bp, Homo sapien
taagtgagtggacagcttagccaaa

SEQ ID NO: 1008856 - DNA, 25 bp, Homo sapien
caagctattttctcactgcagacag

SEQ ID NO: 1008857 - DNA, 25 bp, Homo sapien
tgagtactcacagaatcccataaat

SEQ ID NO: 1008858 - DNA, 25 bp, Homo sapien
gctccatgggagattaaaggaatct

SEQ ID NO: 1008859 - DNA, 25 bp, Homo sapien
ttgcccagaaaagtaaagtagcatt

SEQ ID NO: 1008860 - DNA, 25 bp, Homo sapien
aaaggtataaactgcatatgctata

SEQ ID NO: 1008861 - DNA, 25 bp, Homo sapien
ctggagggataaatggttccaccct

SEQ ID NO: 1008862 - DNA, 25 bp, Homo sapien
ctttaaaatgacgaaatagcctttg

SEQ ID NO: 1008863 - DNA, 25 bp, Homo sapien
taaatacatggctcaggttacacca

SEQ ID NO: 1008864 - DNA, 25 bp, Homo sapien
tttagccactgaatatagtagttct

SEQ ID NO: 1008865 - DNA, 25 bp, Homo sapien
gaaagcaggatttcattgctgatga

SEQ ID NO: 1008866 - DNA, 25 bp, Homo sapien
ctgatgattgagaagggtaaaagca

SEQ ID NO: 1008867 - DNA, 25 bp, Homo sapien
cccagctgacactgcgagagtgaac

SEQ ID NO: 1008868 - DNA, 25 bp, Homo sapien
aaggagagtcaccatcacaagtgat

SEQ ID NO: 1008869 - DNA, 25 bp, Homo sapien
agaaaggagagtcaccatcacaagt

SEQ ID NO: 1008870 - DNA, 25 bp, Homo sapien
aaaggagagtcaccatcacaagtga

SEQ ID NO: 1008871 - DNA, 25 bp, Homo sapien
gaaaggagagtcaccatcacaagtg

SEQ ID NO: 1008872 - DNA, 25 bp, Homo sapien
gatacagaaaccacccgtgactcgg

SEQ ID NO: 1008873 - DNA, 25 bp, Homo sapien
gactcaagttaatcatgggtccaga

SEQ ID NO: 1008874 - DNA, 25 bp, Homo sapien
tgctcctgggcatctaccataagga

SEQ ID NO: 1008875 - DNA, 25 bp, Homo sapien
gagactagtcagactcctcctcagg

SEQ ID NO: 1008876 - DNA, 25 bp, Homo sapien
ttactatggtccatccacaatgcag

SEQ ID NO: 1008877 - DNA, 25 bp, Homo sapien
gatggaattgcacactatgtggcct

SEQ ID NO: 1008878 - DNA, 25 bp, Homo sapien
caatgttgcacaatcacctctttct

SEQ ID NO: 1008879 - DNA, 25 bp, Homo sapien
ccttgcaatcatcaatctgctttta

SEQ ID NO: 1008880 - DNA, 25 bp, Homo sapien
gagtgtgagtggtaccgctgtctat

SEQ ID NO: 1008881 - DNA, 25 bp, Homo sapien
ttatcaaggtcaggaaagtcaagga

SEQ ID NO: 1008882 - DNA, 25 bp, Homo sapien
gatacataggtagaatgcactgttt

SEQ ID NO: 1008883 - DNA, 25 bp, Homo sapien
tctgaaggagactaaaggacatgac

SEQ ID NO: 1008884 - DNA, 25 bp, Homo sapien
aatgtgctgggtgaatattttccat

SEQ ID NO: 1008885 - DNA, 25 bp, Homo sapien
tgctgggtgaatattttccatactt

SEQ ID NO: 1008886 - DNA, 25 bp, Homo sapien
tgtgctgggtgaatattttccatac

SEQ ID NO: 1008887 - DNA, 25 bp, Homo sapien
gctgggtgaatattttccatacttc

SEQ ID NO: 1008888 - DNA, 25 bp, Homo sapien
gaaatcctgttgacgatggcatctt

SEQ ID NO: 1008889 - DNA, 25 bp, Homo sapien
aaatcctgttgacgatggcatcttc

SEQ ID NO: 1008890 - DNA, 25 bp, Homo sapien
ctgcaaaaatgtttaaggtattaat

SEQ ID NO: 1008891 - DNA, 25 bp, Homo sapien
tgcaaaaatgtttaaggtattaata

SEQ ID NO: 1008892 - DNA, 25 bp, Homo sapien
aataatagtaacaaggagtctcctg

SEQ ID NO: 1008893 - DNA, 25 bp, Homo sapien
ggtgataacagccaacaaaagttac

SEQ ID NO: 1008894 - DNA, 25 bp, Homo sapien
tagtacaaccttaggaccactacaa

SEQ ID NO: 1008895 - DNA, 25 bp, Homo sapien
caatgttaagtgaaactgctaataa

SEQ ID NO: 1008896 - DNA, 25 bp, Homo sapien
ctctccggcctaggggacagaagga

SEQ ID NO: 1008897 - DNA, 25 bp, Homo sapien
tgccccactgctctccggcctaggg

SEQ ID NO: 1008898 - DNA, 25 bp, Homo sapien
agtcagccatgattgccccactgct

SEQ ID NO: 1008899 - DNA, 25 bp, Homo sapien
ctgctctccggcctaggggacagaa

SEQ ID NO: 1008900 - DNA, 25 bp, Homo sapien
tgtgatgatgaagtaggaaacaacg

SEQ ID NO: 1008901 - DNA, 25 bp, Homo sapien
gatgaagtaggaaacaacgtagaga

SEQ ID NO: 1008902 - DNA, 25 bp, Homo sapien
gatgatgaagtaggaaacaacgtag

SEQ ID NO: 1008903 - DNA, 25 bp, Homo sapien
cttgtgatgatgaagtaggaaacaa

SEQ ID NO: 1008904 - DNA, 25 bp, Homo sapien
tatatacccagcagaagtactgctg

SEQ ID NO: 1008905 - DNA, 25 bp, Homo sapien
tataacggccatactaatttgcatt

SEQ ID NO: 1008906 - DNA, 25 bp, Homo sapien
ttacagccaccctaacagatgtgag

SEQ ID NO: 1008907 - DNA, 25 bp, Homo sapien
atggtggttttgacttatatgtccc

SEQ ID NO: 1008908 - DNA, 25 bp, Homo sapien
gaagactactagctgtgtgccaaag

SEQ ID NO: 1008909 - DNA, 25 bp, Homo sapien
tggaccaggatagtggacattccct

SEQ ID NO: 1008910 - DNA, 25 bp, Homo sapien
tttctgaagaagtactggtggccat

SEQ ID NO: 1008911 - DNA, 25 bp, Homo sapien
tatgactgagaacaactttggacca

SEQ ID NO: 1008912 - DNA, 25 bp, Homo sapien
cccctgtggcggaggatagccttct

SEQ ID NO: 1008913 - DNA, 25 bp, Homo sapien
ccctgtggcggaggatagccttctg

SEQ ID NO: 1008914 - DNA, 25 bp, Homo sapien
cctgtggcggaggatagccttctgt

SEQ ID NO: 1008915 - DNA, 25 bp, Homo sapien
tcggatgtaagtgactctaccacag

SEQ ID NO: 1008916 - DNA, 25 bp, Homo sapien
gatccttgtgatagttcttatctca

SEQ ID NO: 1008917 - DNA, 25 bp, Homo sapien
catacaagcgtgagaccttcgtcat

SEQ ID NO: 1008918 - DNA, 25 bp, Homo sapien
tccactttgtttgggtcggatgtaa

SEQ ID NO: 1008919 - DNA, 25 bp, Homo sapien
tatcttactaccaaggtgttcagga

SEQ ID NO: 1008920 - DNA, 25 bp, Homo sapien
tctgaacatcagactctcatgtcta

SEQ ID NO: 1008921 - DNA, 25 bp, Homo sapien
caaatatctactacagacgtgaaga

SEQ ID NO: 1008922 - DNA, 25 bp, Homo sapien
aaaagcttaaggctctcggagactt

SEQ ID NO: 1008923 - DNA, 25 bp, Homo sapien
tgtggaagtgctgctcccgcgccga

SEQ ID NO: 1008924 - DNA, 25 bp, Homo sapien
gtggactcccgcacttggctgtgga

SEQ ID NO: 1008925 - DNA, 25 bp, Homo sapien
ccgacacctcgtcctgcccttccat

SEQ ID NO: 1008926 - DNA, 25 bp, Homo sapien
cgtggactcccgcacttggctgtgg

SEQ ID NO: 1008927 - DNA, 25 bp, Homo sapien
cgcccgcgtccgcgtgctccgccac

SEQ ID NO: 1008928 - DNA, 25 bp, Homo sapien
cccgcgtccgcgtgctccgccacac

SEQ ID NO: 1008929 - DNA, 25 bp, Homo sapien
gcccgcgtccgcgtgctccgccaca

SEQ ID NO: 1008930 - DNA, 25 bp, Homo sapien
gccgcccgcgtccgcgtgctccgcc

SEQ ID NO: 1008931 - DNA, 25 bp, Homo sapien
cgtgttggaacaggtaccgcgacca

SEQ ID NO: 1008932 - DNA, 25 bp, Homo sapien
cccgcgagccgtgttggaacaggta

SEQ ID NO: 1008933 - DNA, 25 bp, Homo sapien
ttggaacaggtaccgcgaccacgac

SEQ ID NO: 1008934 - DNA, 25 bp, Homo sapien
gcacgggcccgcgagccgtgttgga

SEQ ID NO: 1008935 - DNA, 25 bp, Homo sapien
ccaagatagtggacaaaagtatttg

SEQ ID NO: 1008936 - DNA, 25 bp, Homo sapien
agccaagatagtggacaaaagtatt

SEQ ID NO: 1008937 - DNA, 25 bp, Homo sapien
gccaagatagtggacaaaagtattt

SEQ ID NO: 1008938 - DNA, 25 bp, Homo sapien
aagatagtggacaaaagtatttgaa

SEQ ID NO: 1008939 - DNA, 25 bp, Homo sapien
cagcaaagggcagccgtaaaagaac

SEQ ID NO: 1008940 - DNA, 25 bp, Homo sapien
acagcaaagggcagccgtaaaagaa

SEQ ID NO: 1008941 - DNA, 25 bp, Homo sapien
agattcatagaaatggcttatgtag

SEQ ID NO: 1008942 - DNA, 25 bp, Homo sapien
gtgagtccacagtaacagattcata

SEQ ID NO: 1008943 - DNA, 25 bp, Homo sapien
cttgagaagcaaactagttttttgg

SEQ ID NO: 1008944 - DNA, 25 bp, Homo sapien
gctctccaacatccatgagaaggtt

SEQ ID NO: 1008945 - DNA, 25 bp, Homo sapien
tggttttctatctggtaccctccaa

SEQ ID NO: 1008946 - DNA, 25 bp, Homo sapien
acccattaagtgtagcttccaagta

SEQ ID NO: 1008947 - DNA, 25 bp, Homo sapien
ctttgaatgtcaataagaatttcac

SEQ ID NO: 1008948 - DNA, 25 bp, Homo sapien
caaaataagcaaatgtatcttggta

SEQ ID NO: 1008949 - DNA, 25 bp, Homo sapien
agcaaatgtatcttggtagatgttt

SEQ ID NO: 1008950 - DNA, 25 bp, Homo sapien
aatgtatcttggtagatgtttactc

SEQ ID NO: 1008951 - DNA, 25 bp, Homo sapien
gtcagcgcaggtctatagtccgggg

SEQ ID NO: 1008952 - DNA, 25 bp, Homo sapien
tagtccggggacaactccttactca

SEQ ID NO: 1008953 - DNA, 25 bp, Homo sapien
agtccggggacaactccttactcat

SEQ ID NO: 1008954 - DNA, 25 bp, Homo sapien
atgtcagcgcaggtctatagtccgg

SEQ ID NO: 1008955 - DNA, 25 bp, Homo sapien
ctctttcccatgcgactgggtgatg

SEQ ID NO: 1008956 - DNA, 25 bp, Homo sapien
actctttcccatgcgactgggtgat

SEQ ID NO: 1008957 - DNA, 25 bp, Homo sapien
gactctttcccatgcgactgggtga

SEQ ID NO: 1008958 - DNA, 25 bp, Homo sapien
gcgattgggtgacgaggagcacgct

SEQ ID NO: 1008959 - DNA, 25 bp, Homo sapien
aatgggtgacgaggcgcgattgggt

SEQ ID NO: 1008960 - DNA, 25 bp, Homo sapien
agaggtgtgcgctgggtgacgaggt

SEQ ID NO: 1008961 - DNA, 25 bp, Homo sapien
tgacgaggcgcgaatgggtgacgag

SEQ ID NO: 1008962 - DNA, 25 bp, Homo sapien
acgaggcgcaaatgggtgacgaggc

SEQ ID NO: 1008963 - DNA, 25 bp, Homo sapien
cgcgattgggtgacgaggagcacgc

SEQ ID NO: 1008964 - DNA, 25 bp, Homo sapien
tcgttgggtgacgaggcgcgactgg

SEQ ID NO: 1008965 - DNA, 25 bp, Homo sapien
gatgaggcgcgaatgggtgacgagg

SEQ ID NO: 1008966 - DNA, 25 bp, Homo sapien
aggcgcgactgggtgacgaggcgca

SEQ ID NO: 1008967 - DNA, 25 bp, Homo sapien
ctgggtgacgaggcgcgactgggtg

SEQ ID NO: 1008968 - DNA, 25 bp, Homo sapien
acgaggcgcgactgggtgacgaggc

SEQ ID NO: 1008969 - DNA, 25 bp, Homo sapien
gtgacgaggcgcgactgggtgacga

SEQ ID NO: 1008970 - DNA, 25 bp, Homo sapien
acgaggcgcgactgggtgacgaatg

SEQ ID NO: 1008971 - DNA, 25 bp, Homo sapien
tgacgaatgggtgacgaggcgtgac

SEQ ID NO: 1008972 - DNA, 25 bp, Homo sapien
ggcgtgaccaggtgacgaggcgcaa

SEQ ID NO: 1008973 - DNA, 25 bp, Homo sapien
acgaggtgtcgggtgacgaggcgca

SEQ ID NO: 1008974 - DNA, 25 bp, Homo sapien
tgacgaggcgcgattgggtgacgag

SEQ ID NO: 1008975 - DNA, 25 bp, Homo sapien
tcgttgggtgacgaggcgcgactgg

SEQ ID NO: 1008976 - DNA, 25 bp, Homo sapien
acgaggcgcgaatgggtgacgaggc

SEQ ID NO: 1008977 - DNA, 25 bp, Homo sapien
acgaggcgcgattgggtgacgaggc

SEQ ID NO: 1008978 - DNA, 25 bp, Homo sapien
caggcctcagagaacgatcacagac

SEQ ID NO: 1008979 - DNA, 25 bp, Homo sapien
tggcccagcggccaccggccaggcc

SEQ ID NO: 1008980 - DNA, 25 bp, Homo sapien
cctcagagaacgatcacagacagaa

SEQ ID NO: 1008981 - DNA, 25 bp, Homo sapien
ggcctcagagaacgatcacagacag

SEQ ID NO: 1008982 - DNA, 25 bp, Homo sapien
accaaccactgagccgttctgtgcg

SEQ ID NO: 1008983 - DNA, 25 bp, Homo sapien
ggcgcaagtaatcgattttcactca

SEQ ID NO: 1008984 - DNA, 25 bp, Homo sapien
cggctgagcactcggcgcaagtaat

SEQ ID NO: 1008985 - DNA, 25 bp, Homo sapien
ttctgtgcgccagaccccggctgag

SEQ ID NO: 1008986 - DNA, 25 bp, Homo sapien
gacacacagaaacaggccccagctg

SEQ ID NO: 1008987 - DNA, 25 bp, Homo sapien
gctacgggaatcctggctcccccca

SEQ ID NO: 1008988 - DNA, 25 bp, Homo sapien
tcctctccatgaaccgagtggcaaa

SEQ ID NO: 1008989 - DNA, 25 bp, Homo sapien
cccagctgaaggtgcggcgggccgg

SEQ ID NO: 1008990 - DNA, 25 bp, Homo sapien
gcaggcgccaggatccccgggaact

SEQ ID NO: 1008991 - DNA, 25 bp, Homo sapien
gccctgacgctttgttccagcacag

SEQ ID NO: 1008992 - DNA, 25 bp, Homo sapien
cccgagcagaccgtggtcagcggct

SEQ ID NO: 1008993 - DNA, 25 bp, Homo sapien
gccagagtgcaggtcgggctcccac

SEQ ID NO: 1008994 - DNA, 25 bp, Homo sapien
tggctgccgtgaggatgaaggacga

SEQ ID NO: 1008995 - DNA, 25 bp, Homo sapien
ctgccgtgaggatgaaggacgaggc

SEQ ID NO: 1008996 - DNA, 25 bp, Homo sapien
cactgcaggtgggatacatgctctt

SEQ ID NO: 1008997 - DNA, 25 bp, Homo sapien
actgcaggtgggatacatgctcttg

SEQ ID NO: 1008998 - DNA, 25 bp, Homo sapien
cccaatactttaggatttgagctta

SEQ ID NO: 1008999 - DNA, 25 bp, Homo sapien
ccaatactttaggatttgagcttag

SEQ ID NO: 1009000 - DNA, 25 bp, Homo sapien
caatactttaggatttgagcttagg

SEQ ID NO: 1009001 - DNA, 25 bp, Homo sapien
tgtaaagaattccttgccgggtgtg

SEQ ID NO: 1009002 - DNA, 25 bp, Homo sapien
acagtcggggatcactgcacccttg

SEQ ID NO: 1009003 - DNA, 25 bp, Homo sapien
cacccctggccgagttcattaatta

SEQ ID NO: 1009004 - DNA, 25 bp, Homo sapien
tcacatcttctattgaagctctcta

SEQ ID NO: 1009005 - DNA, 25 bp, Homo sapien
ccaatgatctatctttgagtttgta

SEQ ID NO: 1009006 - DNA, 25 bp, Homo sapien
ggccgaggagctccattcaacagtg

SEQ ID NO: 1009007 - DNA, 25 bp, Homo sapien
ggcagccggccagtcgtggccgagg

SEQ ID NO: 1009008 - DNA, 25 bp, Homo sapien
tcataaagctggtcagacgccccct

SEQ ID NO: 1009009 - DNA, 25 bp, Homo sapien
cccaggtagggaggcatagagtgaa

SEQ ID NO: 1009010 - DNA, 25 bp, Homo sapien
caggtccatcggtggcagctgggtg

SEQ ID NO: 1009011 - DNA, 25 bp, Homo sapien
agaggctgcatctgcacgacggcag

SEQ ID NO: 1009012 - DNA, 25 bp, Homo sapien
gctgggcacaggtccatcggtggca

SEQ ID NO: 1009013 - DNA, 25 bp, Homo sapien
gcggagggccaggagaaggctgggc

SEQ ID NO: 1009014 - DNA, 25 bp, Homo sapien
tgtgtagagagtgttatcaaagtgc

SEQ ID NO: 1009015 - DNA, 25 bp, Homo sapien
tcaaagtgctataaaacttggattt

SEQ ID NO: 1009016 - DNA, 25 bp, Homo sapien
tagagagtgttatcaaagtgctata

SEQ ID NO: 1009017 - DNA, 25 bp, Homo sapien
gttatcaaagtgctataaaacttgg

SEQ ID NO: 1009018 - DNA, 25 bp, Homo sapien
atgacgatgcttggccccaggactt

SEQ ID NO: 1009019 - DNA, 25 bp, Homo sapien
ctttccgagcacgactgaccatggc

SEQ ID NO: 1009020 - DNA, 25 bp, Homo sapien
tgaccatggccaccgcggtgtttcc

SEQ ID NO: 1009021 - DNA, 25 bp, Homo sapien
acatgtccagatgacgatgcttggc

SEQ ID NO: 1009022 - DNA, 25 bp, Homo sapien
ctcctcctgaccgtcagccagggca

SEQ ID NO: 1009023 - DNA, 25 bp, Homo sapien
tcctgaccgtcagccagggcaccac

SEQ ID NO: 1009024 - DNA, 25 bp, Homo sapien
ctggcctcctcctgaccgtcagcca

SEQ ID NO: 1009025 - DNA, 25 bp, Homo sapien
caccacccactctgagctgctgtgg

SEQ ID NO: 1009026 - DNA, 25 bp, Homo sapien
tggagcaaccctcagatcgccagta

SEQ ID NO: 1009027 - DNA, 25 bp, Homo sapien
ggaaatgcaagtcagtccggtccca

SEQ ID NO: 1009028 - DNA, 25 bp, Homo sapien
cagcgggtatatcacacaagatgca

SEQ ID NO: 1009029 - DNA, 25 bp, Homo sapien
tgaatcagacttaacagggccgacg

SEQ ID NO: 1009030 - DNA, 25 bp, Homo sapien
actctgaggcatcacgggcaaggca

SEQ ID NO: 1009031 - DNA, 25 bp, Homo sapien
gagagagcgggattttcactttgcc

SEQ ID NO: 1009032 - DNA, 25 bp, Homo sapien
cactttgccgtctttcactccaggg

SEQ ID NO: 1009033 - DNA, 25 bp, Homo sapien
gacgaatctgagttgccgcagctcc

SEQ ID NO: 1009034 - DNA, 25 bp, Homo sapien
gagaaggccgtggaaatcttgaggt

SEQ ID NO: 1009035 - DNA, 25 bp, Homo sapien
tagaagggagaaggccgtggaaatc

SEQ ID NO: 1009036 - DNA, 25 bp, Homo sapien
gggggtgccacggaagggcagcatc

SEQ ID NO: 1009037 - DNA, 25 bp, Homo sapien
aagatagaagggagaaggccgtgga

SEQ ID NO: 1009038 - DNA, 25 bp, Homo sapien
cttcttccaacattggagtcaatct

SEQ ID NO: 1009039 - DNA, 25 bp, Homo sapien
agtcaatcttctcgaaccctcaaat

SEQ ID NO: 1009040 - DNA, 25 bp, Homo sapien
cttccaacattggagtcaatcttct

SEQ ID NO: 1009041 - DNA, 25 bp, Homo sapien
ggagtcaatcttctcgaaccctcaa

SEQ ID NO: 1009042 - DNA, 25 bp, Homo sapien
ggcagaattcgcccacagcaaggcc

SEQ ID NO: 1009043 - DNA, 25 bp, Homo sapien
ggcttcctccacatgcgtttgcacg

SEQ ID NO: 1009044 - DNA, 25 bp, Homo sapien
gggcgtgtgtgaactgttttctccc

SEQ ID NO: 1009045 - DNA, 25 bp, Homo sapien
catgcgtttgcacgcccggcagaat

SEQ ID NO: 1009046 - DNA, 25 bp, Homo sapien
ttgaaggcagtgagatccgcaggcc

SEQ ID NO: 1009047 - DNA, 25 bp, Homo sapien
aggcagtgagatccgcaggcctccg

SEQ ID NO: 1009048 - DNA, 25 bp, Homo sapien
ctgttgaaggcagtgagatccgcag

SEQ ID NO: 1009049 - DNA, 25 bp, Homo sapien
ttctgttgaaggcagtgagatccgc

SEQ ID NO: 1009050 - DNA, 25 bp, Homo sapien
gagccaagaagaccgatcctggcca

SEQ ID NO: 1009051 - DNA, 25 bp, Homo sapien
gagcgctgctgcagtccgccgctgt

SEQ ID NO: 1009052 - DNA, 25 bp, Homo sapien
aagaccgatcctggccagccaagga

SEQ ID NO: 1009053 - DNA, 25 bp, Homo sapien
gtcctcgcggacttgtttgcacaga

SEQ ID NO: 1009054 - DNA, 25 bp, Homo sapien
ggtgggtcggttcttctcacacgca

SEQ ID NO: 1009055 - DNA, 25 bp, Homo sapien
tattttacattccatcgtgggcgat

SEQ ID NO: 1009056 - DNA, 25 bp, Homo sapien
tcataagtcaggtaacactgtgggt

SEQ ID NO: 1009057 - DNA, 25 bp, Homo sapien
agaaccagagttcaagtttcagccc

SEQ ID NO: 1009058 - DNA, 25 bp, Homo sapien
aggcggcgtccgctgcccttgtctc

SEQ ID NO: 1009059 - DNA, 25 bp, Homo sapien
gcggcgagtcgtcctccgaggagca

SEQ ID NO: 1009060 - DNA, 25 bp, Homo sapien
actgtccctcaagtcccgcaggcgg

SEQ ID NO: 1009061 - DNA, 25 bp, Homo sapien
ggcgtggacgctggcgccgttgctg

SEQ ID NO: 1009062 - DNA, 25 bp, Homo sapien
tctgtttctccgcttcctgcgccgc

SEQ ID NO: 1009063 - DNA, 25 bp, Homo sapien
cgccgccgcccttctgtttctccgc

SEQ ID NO: 1009064 - DNA, 25 bp, Homo sapien
gcgccgcctgctctttggccttttt

SEQ ID NO: 1009065 - DNA, 25 bp, Homo sapien
gctctttggcctttttgctgcgttt

SEQ ID NO: 1009066 - DNA, 25 bp, Homo sapien
catttcatccgccggttctggaacc

SEQ ID NO: 1009067 - DNA, 25 bp, Homo sapien
atccgccggttctggaaccaaatct

SEQ ID NO: 1009068 - DNA, 25 bp, Homo sapien
ttcatccgccggttctggaaccaaa

SEQ ID NO: 1009069 - DNA, 25 bp, Homo sapien
tttcatccgccggttctggaaccaa

SEQ ID NO: 1009070 - DNA, 25 bp, Homo sapien
cttgggccgcgacaggtacttgttg

SEQ ID NO: 1009071 - DNA, 25 bp, Homo sapien
cgaggtggccacctcgaagcgcttg

SEQ ID NO: 1009072 - DNA, 25 bp, Homo sapien
acttccccaggaggttcgactgcgc

SEQ ID NO: 1009073 - DNA, 25 bp, Homo sapien
tgagcatgagcgaggtggccacctc

SEQ ID NO: 1009074 - DNA, 25 bp, Homo sapien
tagcagtggattgacccagaggcaa

SEQ ID NO: 1009075 - DNA, 25 bp, Homo sapien
tctgtgtgttcaaggaggcctgccc

SEQ ID NO: 1009076 - DNA, 25 bp, Homo sapien
aatttcgcacggttacatcacagag

SEQ ID NO: 1009077 - DNA, 25 bp, Homo sapien
tcattacgcaaattacaggcagagg

SEQ ID NO: 1009078 - DNA, 25 bp, Homo sapien
ttcggcggctgaaagcgttgagcca

SEQ ID NO: 1009079 - DNA, 25 bp, Homo sapien
ctcataagtagctgaccccgatggg

SEQ ID NO: 1009080 - DNA, 25 bp, Homo sapien
ggcaggcacctactgttgagagtcc

SEQ ID NO: 1009081 - DNA, 25 bp, Homo sapien
cattcgttaccttgttgggcgccca

SEQ ID NO: 1009082 - DNA, 25 bp, Homo sapien
tccagctggaaggtgccggcgccca

SEQ ID NO: 1009083 - DNA, 25 bp, Homo sapien
gttgaagtcgggcatcttaggcagg

SEQ ID NO: 1009084 - DNA, 25 bp, Homo sapien
ccggcgcccagcttgatggggtcgg

SEQ ID NO: 1009085 - DNA, 25 bp, Homo sapien
cggtggacgcgcgcagccactggtc

SEQ ID NO: 1009086 - DNA, 25 bp, Homo sapien
gccgccgcggagtagccgtagaccg

SEQ ID NO: 1009087 - DNA, 25 bp, Homo sapien
cgtagaccgggtggccgtagagcgc

SEQ ID NO: 1009088 - DNA, 25 bp, Homo sapien
ctgcgggtacgagtaggagagcgcc

SEQ ID NO: 1009089 - DNA, 25 bp, Homo sapien
ctgcagctgccgctagtcccgccgc

SEQ ID NO: 1009090 - DNA, 25 bp, Homo sapien
ggcgcgctctgcgcagaggcggctc

SEQ ID NO: 1009091 - DNA, 25 bp, Homo sapien
cgcgctctgcgcagaggcggctcgt

SEQ ID NO: 1009092 - DNA, 25 bp, Homo sapien
gcgcgctctgcgcagaggcggctcg

SEQ ID NO: 1009093 - DNA, 25 bp, Homo sapien
ccagcagggcgtcgatgcggaaatt

SEQ ID NO: 1009094 - DNA, 25 bp, Homo sapien
cagcagggcgtcgatgcggaaattt

SEQ ID NO: 1009095 - DNA, 25 bp, Homo sapien
cagggcgtcgatgcggaaatttttg

SEQ ID NO: 1009096 - DNA, 25 bp, Homo sapien
ggcgtcgatgcggaaatttttggat

SEQ ID NO: 1009097 - DNA, 25 bp, Homo sapien
ggctcggtattgttatggtggttat

SEQ ID NO: 1009098 - DNA, 25 bp, Homo sapien
cgccgccggaaactcagccgagggt

SEQ ID NO: 1009099 - DNA, 25 bp, Homo sapien
ggagtcagtgcgtgcggtgcaagcc

SEQ ID NO: 1009100 - DNA, 25 bp, Homo sapien
ccaataatcaaagtcgccgccggaa

SEQ ID NO: 1009101 - DNA, 25 bp, Homo sapien
cactgaagaccgtggtgtttcccaa

SEQ ID NO: 1009102 - DNA, 25 bp, Homo sapien
ctctgcgaggcgacggcagcgcact

SEQ ID NO: 1009103 - DNA, 25 bp, Homo sapien
cgctggagtgggtccacgtctgcct

SEQ ID NO: 1009104 - DNA, 25 bp, Homo sapien
caaagctctgcaggtcgaaccttat

SEQ ID NO: 1009105 - DNA, 25 bp, Homo sapien
gacctcctctatggcccctgggagc

SEQ ID NO: 1009106 - DNA, 25 bp, Homo sapien
tgacctcctctatggcccctgggag

SEQ ID NO: 1009107 - DNA, 25 bp, Homo sapien
tgaccacaagccccgtagaccaggg

SEQ ID NO: 1009108 - DNA, 25 bp, Homo sapien
aggacccaggcacgaagagtgtcac

SEQ ID NO: 1009109 - DNA, 25 bp, Homo sapien
ccaggcacgaagagtgtcaccagct

SEQ ID NO: 1009110 - DNA, 25 bp, Homo sapien
acccaggcacgaagagtgtcaccag

SEQ ID NO: 1009111 - DNA, 25 bp, Homo sapien
ggttgatggcattagttattatatt

SEQ ID NO: 1009112 - DNA, 25 bp, Homo sapien
cataatcggggttgatggcattagt

SEQ ID NO: 1009113 - DNA, 25 bp, Homo sapien
cattagttattatattataacctcc

SEQ ID NO: 1009114 - DNA, 25 bp, Homo sapien
ctgcgtccataatcggggttgatgg

SEQ ID NO: 1009115 - DNA, 25 bp, Homo sapien
tgccacccaagcttggggtatgcgg

SEQ ID NO: 1009116 - DNA, 25 bp, Homo sapien
cctaacactgggctcggagctaggg

SEQ ID NO: 1009117 - DNA, 25 bp, Homo sapien
cagaaccccgaactcgcaccgggct

SEQ ID NO: 1009118 - DNA, 25 bp, Homo sapien
tggagcaactcctaacactgggctc

SEQ ID NO: 1009119 - DNA, 25 bp, Homo sapien
agtttccacgcgaggcggagcctag

SEQ ID NO: 1009120 - DNA, 25 bp, Homo sapien
ggctccgcgctatggctccaaggct

SEQ ID NO: 1009121 - DNA, 25 bp, Homo sapien
cacgacccggatgcacataactgtg

SEQ ID NO: 1009122 - DNA, 25 bp, Homo sapien
ggccctggcgtctgggctcggtcgg

SEQ ID NO: 1009123 - DNA, 25 bp, Homo sapien
aaatacgcaaactaatggcatccga

SEQ ID NO: 1009124 - DNA, 25 bp, Homo sapien
atggcatccgaaggcaggagatggc

SEQ ID NO: 1009125 - DNA, 25 bp, Homo sapien
ggcatcaggacacagtcgcaaaata

SEQ ID NO: 1009126 - DNA, 25 bp, Homo sapien
caaacggagaggttataaaactgtg

SEQ ID NO: 1009127 - DNA, 25 bp, Homo sapien
cctgtggaaagccgcggccatcgcg

SEQ ID NO: 1009128 - DNA, 25 bp, Homo sapien
aagccgcggccatcgcgatgagggc

SEQ ID NO: 1009129 - DNA, 25 bp, Homo sapien
tggaaagccgcggccatcgcgatga

SEQ ID NO: 1009130 - DNA, 25 bp, Homo sapien
tgtggaaagccgcggccatcgcgat

SEQ ID NO: 1009131 - DNA, 25 bp, Homo sapien
agcagagcctgggcttgcagggcca

SEQ ID NO: 1009132 - DNA, 25 bp, Homo sapien
ctgaaagagcagagcctgggcttgc

SEQ ID NO: 1009133 - DNA, 25 bp, Homo sapien
gcagagcctgggcttgcagggccat

SEQ ID NO: 1009134 - DNA, 25 bp, Homo sapien
aaagagcagagcctgggcttgcagg

SEQ ID NO: 1009135 - DNA, 25 bp, Homo sapien
ggtgatagagatccctcggtgggac

SEQ ID NO: 1009136 - DNA, 25 bp, Homo sapien
cgtggggtgggaggcaggagtgagc

SEQ ID NO: 1009137 - DNA, 25 bp, Homo sapien
ggggtgggaggcaggagtgagctgg

SEQ ID NO: 1009138 - DNA, 25 bp, Homo sapien
ctgggcccaggacgtggggtgggag

SEQ ID NO: 1009139 - DNA, 25 bp, Homo sapien
ggcccaggacgtggggtgggaggca

SEQ ID NO: 1009140 - DNA, 25 bp, Homo sapien
agcccccggcaaacgtcaggctgtg

SEQ ID NO: 1009141 - DNA, 25 bp, Homo sapien
ggcaggaaccgtctgaggcagcccc

SEQ ID NO: 1009142 - DNA, 25 bp, Homo sapien
ccggcaaacgtcaggctgtgtggct

SEQ ID NO: 1009143 - DNA, 25 bp, Homo sapien
ctgtgtggctcagacccggcacagc

SEQ ID NO: 1009144 - DNA, 25 bp, Homo sapien
ttcaacagcacaccgcgaaaacgtg

SEQ ID NO: 1009145 - DNA, 25 bp, Homo sapien
cagcacaccgcgaaaacgtgcaggc

SEQ ID NO: 1009146 - DNA, 25 bp, Homo sapien
cacaagggtcgctgctagggaagct

SEQ ID NO: 1009147 - DNA, 25 bp, Homo sapien
tgcccttcgacagggcgggctgatc

SEQ ID NO: 1009148 - DNA, 25 bp, Homo sapien
gaagtggcaacgaaggatccgagtc

SEQ ID NO: 1009149 - DNA, 25 bp, Homo sapien
cgagtctccctatctgctgggcaga

SEQ ID NO: 1009150 - DNA, 25 bp, Homo sapien
gggtgttcagacacgcggcaatgct

SEQ ID NO: 1009151 - DNA, 25 bp, Homo sapien
tgtctgtgcacacgggaagtggcaa

SEQ ID NO: 1009152 - DNA, 25 bp, Homo sapien
ttccgggtgtcatccccacccatga

SEQ ID NO: 1009153 - DNA, 25 bp, Homo sapien
acccatgactccagtgcctagtgct

SEQ ID NO: 1009154 - DNA, 25 bp, Homo sapien
gcccggcacagggttggcatctgtc

SEQ ID NO: 1009155 - DNA, 25 bp, Homo sapien
ccagtgcctagtgctgctgctgtgc

SEQ ID NO: 1009156 - DNA, 25 bp, Homo sapien
tagaaacccactcggccttgcctgg

SEQ ID NO: 1009157 - DNA, 25 bp, Homo sapien
tacaaggaatagaaacccactcggc

SEQ ID NO: 1009158 - DNA, 25 bp, Homo sapien
ggaatagaaacccactcggccttgc

SEQ ID NO: 1009159 - DNA, 25 bp, Homo sapien
ggttgtgtggttacaaggaatagaa

SEQ ID NO: 1009160 - DNA, 25 bp, Homo sapien
gggaatggacatggtcagactcaca

SEQ ID NO: 1009161 - DNA, 25 bp, Homo sapien
agacaccgccgtggcaatttggcca

SEQ ID NO: 1009162 - DNA, 25 bp, Homo sapien
caggaacagcctgccgctttcgtga

SEQ ID NO: 1009163 - DNA, 25 bp, Homo sapien
tgtggaacattctgaacactgcacc

SEQ ID NO: 1009164 - DNA, 25 bp, Homo sapien
taatgaatcccgcagcatggagaga

SEQ ID NO: 1009165 - DNA, 25 bp, Homo sapien
atcatggtaatgaatcccgcagcat

SEQ ID NO: 1009166 - DNA, 25 bp, Homo sapien
cacatctgatacgtggggctattac

SEQ ID NO: 1009167 - DNA, 25 bp, Homo sapien
tacgtggggctattacttcaggact

SEQ ID NO: 1009168 - DNA, 25 bp, Homo sapien
caagtctctgcggagccataaaaaa

SEQ ID NO: 1009169 - DNA, 25 bp, Homo sapien
caaggtgaagtgcatcccaagtctc

SEQ ID NO: 1009170 - DNA, 25 bp, Homo sapien
gaatggcagggaacgtcctgagcct

SEQ ID NO: 1009171 - DNA, 25 bp, Homo sapien
tgaggccaacagttcagcaaggagg

SEQ ID NO: 1009172 - DNA, 25 bp, Homo sapien
tgcacaaacagatgagcttgcccca

SEQ ID NO: 1009173 - DNA, 25 bp, Homo sapien
tctgagcagaagtatcggcgccagg

SEQ ID NO: 1009174 - DNA, 25 bp, Homo sapien
tctgaaatccttgcagttggaagtg

SEQ ID NO: 1009175 - DNA, 25 bp, Homo sapien
tacccttggtgattaaccgttggca

SEQ ID NO: 1009176 - DNA, 25 bp, Homo sapien
tgggtctggcgggttctcatcttga

SEQ ID NO: 1009177 - DNA, 25 bp, Homo sapien
agtgggaggtcaccatggacagtca

SEQ ID NO: 1009178 - DNA, 25 bp, Homo sapien
tcaggcttctgggtcaagtgtgagc

SEQ ID NO: 1009179 - DNA, 25 bp, Homo sapien
aagtctacacgtccttaaccttgcg

SEQ ID NO: 1009180 - DNA, 25 bp, Homo sapien
tgggcgaccttcacaaagagcactg

SEQ ID NO: 1009181 - DNA, 25 bp, Homo sapien
tgttccggaggatcaactcactttg

SEQ ID NO: 1009182 - DNA, 25 bp, Homo sapien
taagaaatggcaggtctaatcggcg

SEQ ID NO: 1009183 - DNA, 25 bp, Homo sapien
taatcggcggtgtgcattccagggt

SEQ ID NO: 1009184 - DNA, 25 bp, Homo sapien
gagcctgtgagcctcgactaacttg

SEQ ID NO: 1009185 - DNA, 25 bp, Homo sapien
gggttgagcctgtgagcctcgacta

SEQ ID NO: 1009186 - DNA, 25 bp, Homo sapien
cctgtgagcctcgactaacttgggc

SEQ ID NO: 1009187 - DNA, 25 bp, Homo sapien
tgtgagcctcgactaacttgggcac

SEQ ID NO: 1009188 - DNA, 25 bp, Homo sapien
ctctcagggctgcttgtgaatcaag

SEQ ID NO: 1009189 - DNA, 25 bp, Homo sapien
catcactgtggcctctcgtgtcaca

SEQ ID NO: 1009190 - DNA, 25 bp, Homo sapien
aagtcccacagctgtccccttgatg

SEQ ID NO: 1009191 - DNA, 25 bp, Homo sapien
cagctgtccccttgatgcccgggag

SEQ ID NO: 1009192 - DNA, 25 bp, Homo sapien
aaggctgccttttccgggatgaaga

SEQ ID NO: 1009193 - DNA, 25 bp, Homo sapien
caaagccggtaaacatgaggttgta

SEQ ID NO: 1009194 - DNA, 25 bp, Homo sapien
tgaatacggcactctggcaaccgag

SEQ ID NO: 1009195 - DNA, 25 bp, Homo sapien
gactgtgtggcgttgagatatctaa

SEQ ID NO: 1009196 - DNA, 25 bp, Homo sapien
gaccaccacaggacgtctgacttga

SEQ ID NO: 1009197 - DNA, 25 bp, Homo sapien
tcctggagtgacgtgcattgtccca

SEQ ID NO: 1009198 - DNA, 25 bp, Homo sapien
gagttgctcacgtagaactggtcca

SEQ ID NO: 1009199 - DNA, 25 bp, Homo sapien
cctggtgtcaggtcgagagtgccac

SEQ ID NO: 1009200 - DNA, 25 bp, Homo sapien
catcaggatggccacggttgactct

SEQ ID NO: 1009201 - DNA, 25 bp, Homo sapien
tgctggtcaagctgcctcatcagga

SEQ ID NO: 1009202 - DNA, 25 bp, Homo sapien
tgggaaatccggagtagacaagtac

SEQ ID NO: 1009203 - DNA, 25 bp, Homo sapien
actctggctggctggttagtggccc

SEQ ID NO: 1009204 - DNA, 25 bp, Homo sapien
ttaatggcgcttggcatgttctctg

SEQ ID NO: 1009205 - DNA, 25 bp, Homo sapien
gccactttgattcatcagattccat

SEQ ID NO: 1009206 - DNA, 25 bp, Homo sapien
agccactttgattcatcagattcca

SEQ ID NO: 1009207 - DNA, 25 bp, Homo sapien
atggcgcttggcatgttctctgact

SEQ ID NO: 1009208 - DNA, 25 bp, Homo sapien
tctggtatatgtccataaaagctgg

SEQ ID NO: 1009209 - DNA, 25 bp, Homo sapien
ctttctggtatatgtccataaaagc

SEQ ID NO: 1009210 - DNA, 25 bp, Homo sapien
tggtatatgtccataaaagctggaa

SEQ ID NO: 1009211 - DNA, 25 bp, Homo sapien
ctccctttctggtatatgtccataa

SEQ ID NO: 1009212 - DNA, 25 bp, Homo sapien
ggcagctgagtcatcatacccatcc

SEQ ID NO: 1009213 - DNA, 25 bp, Homo sapien
ctgtctgggcagctgagtcatcata

SEQ ID NO: 1009214 - DNA, 25 bp, Homo sapien
catacccatcctgaagcccactcat

SEQ ID NO: 1009215 - DNA, 25 bp, Homo sapien
gctgagtcatcatacccatcctgaa

SEQ ID NO: 1009216 - DNA, 25 bp, Homo sapien
taagattgccaacgggcctgtgtgg

SEQ ID NO: 1009217 - DNA, 25 bp, Homo sapien
gggcccctagatgatcccacgtctt

SEQ ID NO: 1009218 - DNA, 25 bp, Homo sapien
tctagggaccgtgggataagattgc

SEQ ID NO: 1009219 - DNA, 25 bp, Homo sapien
agggccgtgtgccacttctcatcac

SEQ ID NO: 1009220 - DNA, 25 bp, Homo sapien
tcctgtcaagaagcgtgagctcctg

SEQ ID NO: 1009221 - DNA, 25 bp, Homo sapien
acacacagcggttctcgggaggaaa

SEQ ID NO: 1009222 - DNA, 25 bp, Homo sapien
tgttcacaatgaccgtgccggcctt

SEQ ID NO: 1009223 - DNA, 25 bp, Homo sapien
catgacgtagcctgccctgacaatt

SEQ ID NO: 1009224 - DNA, 25 bp, Homo sapien
cagcgcgccttgcggggccgcgcac

SEQ ID NO: 1009225 - DNA, 25 bp, Homo sapien
tccagcgcgccttgcggggccgcgc

SEQ ID NO: 1009226 - DNA, 25 bp, Homo sapien
ctccagcgcgccttgcggggccgcg

SEQ ID NO: 1009227 - DNA, 25 bp, Homo sapien
ccagcgcgccttgcggggccgcgca

SEQ ID NO: 1009228 - DNA, 25 bp, Homo sapien
gggccgcgcacgcactgacggctga

SEQ ID NO: 1009229 - DNA, 25 bp, Homo sapien
cggaaccgccgggaagagcgccgtg

SEQ ID NO: 1009230 - DNA, 25 bp, Homo sapien
gagcgccgtgccgtcaatggcggag

SEQ ID NO: 1009231 - DNA, 25 bp, Homo sapien
tcccgaggcggcagttccaggtgca

SEQ ID NO: 1009232 - DNA, 25 bp, Homo sapien
ttctgggtgtttcctttcagaaatg

SEQ ID NO: 1009233 - DNA, 25 bp, Homo sapien
ttcctttcagaaatgcgctttccat

SEQ ID NO: 1009234 - DNA, 25 bp, Homo sapien
gggtgtttcctttcagaaatgcgct

SEQ ID NO: 1009235 - DNA, 25 bp, Homo sapien
gtttcctttcagaaatgcgctttcc

SEQ ID NO: 1009236 - DNA, 25 bp, Homo sapien
aaggtgaacggcacgcatttgctga

SEQ ID NO: 1009237 - DNA, 25 bp, Homo sapien
tgaacggcacgcatttgctgatgtc

SEQ ID NO: 1009238 - DNA, 25 bp, Homo sapien
gttgtagaaggtgaacggcacgcat

SEQ ID NO: 1009239 - DNA, 25 bp, Homo sapien
tttcggttgtagaaggtgaacggca

SEQ ID NO: 1009240 - DNA, 25 bp, Homo sapien
ctaaagtagaggcagaacgtctcat

SEQ ID NO: 1009241 - DNA, 25 bp, Homo sapien
catttgtcagcatgaaggagaagcc

SEQ ID NO: 1009242 - DNA, 25 bp, Homo sapien
agaagccatgctttccatagcccat

SEQ ID NO: 1009243 - DNA, 25 bp, Homo sapien
tgtcagcatgaaggagaagccatgc

SEQ ID NO: 1009244 - DNA, 25 bp, Homo sapien
tttgtcagcatgaaggagaagccat

SEQ ID NO: 1009245 - DNA, 25 bp, Homo sapien
tataactggttgtagtcagacttta

SEQ ID NO: 1009246 - DNA, 25 bp, Homo sapien
taactggttgtagtcagactttatt

SEQ ID NO: 1009247 - DNA, 25 bp, Homo sapien
aactggttgtagtcagactttattt

SEQ ID NO: 1009248 - DNA, 25 bp, Homo sapien
tctataactggttgtagtcagactt

SEQ ID NO: 1009249 - DNA, 25 bp, Homo sapien
ccctttgggtgtttgatggaccttg

SEQ ID NO: 1009250 - DNA, 25 bp, Homo sapien
cgtgcacgctgtcaggacgatggcc

SEQ ID NO: 1009251 - DNA, 25 bp, Homo sapien
ttcacattggtgggtagttacagca

SEQ ID NO: 1009252 - DNA, 25 bp, Homo sapien
ctcggtcgtttcagagaccctttgg

SEQ ID NO: 1009253 - DNA, 25 bp, Homo sapien
gacggtaatagtccatgctgtgcat

SEQ ID NO: 1009254 - DNA, 25 bp, Homo sapien
gcagctactgaattcttaagcgaga

SEQ ID NO: 1009255 - DNA, 25 bp, Homo sapien
tccatgctagtgatgtggacggtaa

SEQ ID NO: 1009256 - DNA, 25 bp, Homo sapien
ttatgaatatcagcatgtggctcac

SEQ ID NO: 1009257 - DNA, 25 bp, Homo sapien
tatgtaatactctcacttattttgc

SEQ ID NO: 1009258 - DNA, 25 bp, Homo sapien
aaaatgccattagatgatgatagtt

SEQ ID NO: 1009259 - DNA, 25 bp, Homo sapien
gatagtttcactatgtatggttgtc

SEQ ID NO: 1009260 - DNA, 25 bp, Homo sapien
ttgcttaaactgtgatctcaaatta

SEQ ID NO: 1009261 - DNA, 25 bp, Homo sapien
aacattctttattagtaagcagaca

SEQ ID NO: 1009262 - DNA, 25 bp, Homo sapien
tacatagcacacatgaaatactgtt

SEQ ID NO: 1009263 - DNA, 25 bp, Homo sapien
gactctcaatgaagcaaaacactac

SEQ ID NO: 1009264 - DNA, 25 bp, Homo sapien
gtttttgtatgtgcatctataggca

SEQ ID NO: 1009265 - DNA, 25 bp, Homo sapien
tttgtatcaaacgactcccatctgc

SEQ ID NO: 1009266 - DNA, 25 bp, Homo sapien
tacaataaagttccggacatccagg

SEQ ID NO: 1009267 - DNA, 25 bp, Homo sapien
catctgttagctctttattcggaaa

SEQ ID NO: 1009268 - DNA, 25 bp, Homo sapien
catctaaactgaaaccattgctcca

SEQ ID NO: 1009269 - DNA, 25 bp, Homo sapien
cagttcttccaaggccagtttattt

SEQ ID NO: 1009270 - DNA, 25 bp, Homo sapien
cttgaagactgcagctttaggtctg

SEQ ID NO: 1009271 - DNA, 25 bp, Homo sapien
ctgtgcgctcggaggccacagcctg

SEQ ID NO: 1009272 - DNA, 25 bp, Homo sapien
acagcctggaagatctcctctcctg

SEQ ID NO: 1009273 - DNA, 25 bp, Homo sapien
taagttctgcaaatcctgtgcgctc

SEQ ID NO: 1009274 - DNA, 25 bp, Homo sapien
ctgcaaatcctgtgcgctcggaggc

SEQ ID NO: 1009275 - DNA, 25 bp, Homo sapien
gctcagggccgccgccctccgccat

SEQ ID NO: 1009276 - DNA, 25 bp, Homo sapien
cgagctcagggccgccgccctccgc

SEQ ID NO: 1009277 - DNA, 25 bp, Homo sapien
agctcagggccgccgccctccgcca

SEQ ID NO: 1009278 - DNA, 25 bp, Homo sapien
gagctcagggccgccgccctccgcc

SEQ ID NO: 1009279 - DNA, 25 bp, Homo sapien
agcggttgatgatggcagtgccctc

SEQ ID NO: 1009280 - DNA, 25 bp, Homo sapien
gcggttgatgatggcagtgccctcc

SEQ ID NO: 1009281 - DNA, 25 bp, Homo sapien
gtggacatagtgtatcttctctgtg

SEQ ID NO: 1009282 - DNA, 25 bp, Homo sapien
aggttgtgtagcatgtggacatagt

SEQ ID NO: 1009283 - DNA, 25 bp, Homo sapien
tacttcatataacttaccacactgg

SEQ ID NO: 1009284 - DNA, 25 bp, Homo sapien
tcagctagatacagctagttgttcc

SEQ ID NO: 1009285 - DNA, 25 bp, Homo sapien
catgagaggaggcacaagagttaac

SEQ ID NO: 1009286 - DNA, 25 bp, Homo sapien
tgatctggcgtggaagaacatgaga

SEQ ID NO: 1009287 - DNA, 25 bp, Homo sapien
caagaagatattaaagcagataagg

SEQ ID NO: 1009288 - DNA, 25 bp, Homo sapien
gttgaagtccagagacacgaggaga

SEQ ID NO: 1009289 - DNA, 25 bp, Homo sapien
gcagataaggtgttattgaaagatc

SEQ ID NO: 1009290 - DNA, 25 bp, Homo sapien
tacattcagcttgtgtctttctgga

SEQ ID NO: 1009291 - DNA, 25 bp, Homo sapien
cagtagtatgatacgttagtaaaaa

SEQ ID NO: 1009292 - DNA, 25 bp, Homo sapien
taaagcagattcagtagtatgatac

SEQ ID NO: 1009293 - DNA, 25 bp, Homo sapien
gacaaatttgaatattactaatacc

SEQ ID NO: 1009294 - DNA, 25 bp, Homo sapien
tgctatgtttgcccgtggtggtctc

SEQ ID NO: 1009295 - DNA, 25 bp, Homo sapien
tcacagaaatattcgaggagagaaa

SEQ ID NO: 1009296 - DNA, 25 bp, Homo sapien
tgttgcatctaactctgcccactga

SEQ ID NO: 1009297 - DNA, 25 bp, Homo sapien
cataagatatttgtgagttaagcct

SEQ ID NO: 1009298 - DNA, 25 bp, Homo sapien
caaggtagagcaatggtggcagatc

SEQ ID NO: 1009299 - DNA, 25 bp, Homo sapien
catgagggtgcaattagcaaaatct

SEQ ID NO: 1009300 - DNA, 25 bp, Homo sapien
gaaacataggggttagaagtacatc

SEQ ID NO: 1009301 - DNA, 25 bp, Homo sapien
aacctctacatctaactacaaaatt

SEQ ID NO: 1009302 - DNA, 25 bp, Homo sapien
ggagaccgaagtatgtggatcacct

SEQ ID NO: 1009303 - DNA, 25 bp, Homo sapien
gcctccaaagggaaccatgctgtgt

SEQ ID NO: 1009304 - DNA, 25 bp, Homo sapien
ggctccttttggtcagcacgctgca

SEQ ID NO: 1009305 - DNA, 25 bp, Homo sapien
tgttgctcagcagtattccagtgtg

SEQ ID NO: 1009306 - DNA, 25 bp, Homo sapien
tctctgggaatacgagtacagctgc

SEQ ID NO: 1009307 - DNA, 25 bp, Homo sapien
gaagccatagaactagaagtcgagg

SEQ ID NO: 1009308 - DNA, 25 bp, Homo sapien
aaaggaagcgtcaactccaagctgc

SEQ ID NO: 1009309 - DNA, 25 bp, Homo sapien
gagtgtaaaactgtcctcagatgct

SEQ ID NO: 1009310 - DNA, 25 bp, Homo sapien
catattgtggctcgatcgctggaag

SEQ ID NO: 1009311 - DNA, 25 bp, Homo sapien
cattaaagatgaggtatgttgccag

SEQ ID NO: 1009312 - DNA, 25 bp, Homo sapien
tggtccctgacatatagttggcact

SEQ ID NO: 1009313 - DNA, 25 bp, Homo sapien
aatgggtgttgacgtatacataacc

SEQ ID NO: 1009314 - DNA, 25 bp, Homo sapien
tacataacctgaaacccacaatccg

SEQ ID NO: 1009315 - DNA, 25 bp, Homo sapien
tgtgcctaggagtgcgagagccttc

SEQ ID NO: 1009316 - DNA, 25 bp, Homo sapien
tccgggttcgtgcatggccacttgt

SEQ ID NO: 1009317 - DNA, 25 bp, Homo sapien
taaagagccagcaataacgtgtgcc

SEQ ID NO: 1009318 - DNA, 25 bp, Homo sapien
caataaaaattcgaagtcctgccag

SEQ ID NO: 1009319 - DNA, 25 bp, Homo sapien
ccagttcagaatgctcacatctctt

SEQ ID NO: 1009320 - DNA, 25 bp, Homo sapien
gcatcctcttacatctgcacctatg

SEQ ID NO: 1009321 - DNA, 25 bp, Homo sapien
agcacaagcttcttcgtagttctag

SEQ ID NO: 1009322 - DNA, 25 bp, Homo sapien
caccgtagccgctatgcttcgtgtc

SEQ ID NO: 1009323 - DNA, 25 bp, Homo sapien
tctgactcgaagacgggacagtccc

SEQ ID NO: 1009324 - DNA, 25 bp, Homo sapien
tttgtcccgatgctagccgtgccgg

SEQ ID NO: 1009325 - DNA, 25 bp, Homo sapien
tgtttgaaccaaagtggcggctgca

SEQ ID NO: 1009326 - DNA, 25 bp, Homo sapien
gagggtctgccaagctactgcaaca

SEQ ID NO: 1009327 - DNA, 25 bp, Homo sapien
aagctgaatgacacttttaagacaa

SEQ ID NO: 1009328 - DNA, 25 bp, Homo sapien
ggctgtcatagttaattgaccataa

SEQ ID NO: 1009329 - DNA, 25 bp, Homo sapien
attttactgtcactggaggctctgt

SEQ ID NO: 1009330 - DNA, 25 bp, Homo sapien
tctgagactgaagagaaattgacaa

SEQ ID NO: 1009331 - DNA, 25 bp, Homo sapien
cgtgctaggtaatgggatggcgccg

SEQ ID NO: 1009332 - DNA, 25 bp, Homo sapien
atggcgccgatggactgatgagttt

SEQ ID NO: 1009333 - DNA, 25 bp, Homo sapien
ttgaggtgatgactgaatggatgct

SEQ ID NO: 1009334 - DNA, 25 bp, Homo sapien
gatgctgtcgtgcttgcatccacag

SEQ ID NO: 1009335 - DNA, 25 bp, Homo sapien
caggacccccagtcgaaggatccct

SEQ ID NO: 1009336 - DNA, 25 bp, Homo sapien
ggcttccagttcagaaagaatgggc

SEQ ID NO: 1009337 - DNA, 25 bp, Homo sapien
gaggcttccagttcagaaagaatgg

SEQ ID NO: 1009338 - DNA, 25 bp, Homo sapien
tgggcctggggcggtctttatcttc

SEQ ID NO: 1009339 - DNA, 25 bp, Homo sapien
cttgccagggtctgcagattcaggg

SEQ ID NO: 1009340 - DNA, 25 bp, Homo sapien
cgcggtggccgtaggggccttgcca

SEQ ID NO: 1009341 - DNA, 25 bp, Homo sapien
cgtaggggccttgccagggtctgca

SEQ ID NO: 1009342 - DNA, 25 bp, Homo sapien
gccttgccagggtctgcagattcag

SEQ ID NO: 1009343 - DNA, 25 bp, Homo sapien
cacagtccccgtgcagcaatgatgt

SEQ ID NO: 1009344 - DNA, 25 bp, Homo sapien
tgcacagtccccgtgcagcaatgat

SEQ ID NO: 1009345 - DNA, 25 bp, Homo sapien
agcagaaggcgtccttgcacagtcc

SEQ ID NO: 1009346 - DNA, 25 bp, Homo sapien
gcagcagaaggcgtccttgcacagt

SEQ ID NO: 1009347 - DNA, 25 bp, Homo sapien
tgggctccttcgcaggcgctgccca

SEQ ID NO: 1009348 - DNA, 25 bp, Homo sapien
gtgtgggctccttcgcaggcgctgc

SEQ ID NO: 1009349 - DNA, 25 bp, Homo sapien
gggtgtgggctccttcgcaggcgct

SEQ ID NO: 1009350 - DNA, 25 bp, Homo sapien
ccgggtgtgggctccttcgcaggcg

SEQ ID NO: 1009351 - DNA, 25 bp, Homo sapien
tgcagccactcatggccggctctgg

SEQ ID NO: 1009352 - DNA, 25 bp, Homo sapien
ccggaaggcacacacattgaggaag

SEQ ID NO: 1009353 - DNA, 25 bp, Homo sapien
ctggatccccggaaggcacacacat

SEQ ID NO: 1009354 - DNA, 25 bp, Homo sapien
ggatccccggaaggcacacacattg

SEQ ID NO: 1009355 - DNA, 25 bp, Homo sapien
gggcagtccttggccggctgcccat

SEQ ID NO: 1009356 - DNA, 25 bp, Homo sapien
ttcatttccgtattcgtccgctcgc

SEQ ID NO: 1009357 - DNA, 25 bp, Homo sapien
gcacgaggcccacttcatttccgta

SEQ ID NO: 1009358 - DNA, 25 bp, Homo sapien
gtgcccacaccgaacccagcacgag

SEQ ID NO: 1009359 - DNA, 25 bp, Homo sapien
gtaaacagtgagaacgcgcaaatcc

SEQ ID NO: 1009360 - DNA, 25 bp, Homo sapien
agtcccacccgacaaggacttcaga

SEQ ID NO: 1009361 - DNA, 25 bp, Homo sapien
ggcacagggtaccagaaggttccgc

SEQ ID NO: 1009362 - DNA, 25 bp, Homo sapien
ccatggaggctgtcgggaaagcgcc

SEQ ID NO: 1009363 - DNA, 25 bp, Homo sapien
gctgagaaaggagctgccggccatg

SEQ ID NO: 1009364 - DNA, 25 bp, Homo sapien
gacgctcccagggtgtaaggccaag

SEQ ID NO: 1009365 - DNA, 25 bp, Homo sapien
cgatgagagatgcacgagggtcctc

SEQ ID NO: 1009366 - DNA, 25 bp, Homo sapien
ctccgtggcctccttggtaccatga

SEQ ID NO: 1009367 - DNA, 25 bp, Homo sapien
ggtgttccggcgtgctcagtccttc

SEQ ID NO: 1009368 - DNA, 25 bp, Homo sapien
tccagagaggctctgcacggggtca

SEQ ID NO: 1009369 - DNA, 25 bp, Homo sapien
ggtcaccctgctggcgatcagctgc

SEQ ID NO: 1009370 - DNA, 25 bp, Homo sapien
agaggctctgcacggggtcaccctg

SEQ ID NO: 1009371 - DNA, 25 bp, Homo sapien
cctgcccgtggacccgggatttgtg

SEQ ID NO: 1009372 - DNA, 25 bp, Homo sapien
tggccgcctggcatttgcagggcta

SEQ ID NO: 1009373 - DNA, 25 bp, Homo sapien
cctggcatttgcagggctagggcta

SEQ ID NO: 1009374 - DNA, 25 bp, Homo sapien
aggctggccgcctggcatttgcagg

SEQ ID NO: 1009375 - DNA, 25 bp, Homo sapien
ggctagggctagggctgggccaggg

SEQ ID NO: 1009376 - DNA, 25 bp, Homo sapien
ggtaacgtccagtaccacggtgctc

SEQ ID NO: 1009377 - DNA, 25 bp, Homo sapien
aacgtccagtaccacggtgctcact

SEQ ID NO: 1009378 - DNA, 25 bp, Homo sapien
cgtccagtaccacggtgctcactcc

SEQ ID NO: 1009379 - DNA, 25 bp, Homo sapien
gtaacgtccagtaccacggtgctca

SEQ ID NO: 1009380 - DNA, 25 bp, Homo sapien
cctccccacgactgccatccgcagg

SEQ ID NO: 1009381 - DNA, 25 bp, Homo sapien
ggacaagagtgagagtagcctctgc

SEQ ID NO: 1009382 - DNA, 25 bp, Homo sapien
gtccctccccacgactgccatccgc

SEQ ID NO: 1009383 - DNA, 25 bp, Homo sapien
cacagacatctcagagaagcactgg

SEQ ID NO: 1009384 - DNA, 25 bp, Homo sapien
gatggcaaggtcagctcgttcgcac

SEQ ID NO: 1009385 - DNA, 25 bp, Homo sapien
gttcgcactcacatgtaaatgactg

SEQ ID NO: 1009386 - DNA, 25 bp, Homo sapien
caggcggctctgtctcagcaagatg

SEQ ID NO: 1009387 - DNA, 25 bp, Homo sapien
tgcctttccctgaacaggcggctct

SEQ ID NO: 1009388 - DNA, 25 bp, Homo sapien
gtgcagctccggttgcttcccagtt

SEQ ID NO: 1009389 - DNA, 25 bp, Homo sapien
cctgcacggcccagtgcagcgagtg

SEQ ID NO: 1009390 - DNA, 25 bp, Homo sapien
aaggctttgcccctaggacacggcg

SEQ ID NO: 1009391 - DNA, 25 bp, Homo sapien
cagcgagtgggtgacccgtgcagct

SEQ ID NO: 1009392 - DNA, 25 bp, Homo sapien
tcaggctgaagaggtaccgtcggtc

SEQ ID NO: 1009393 - DNA, 25 bp, Homo sapien
gatctgtgtcatctgatccatcagg

SEQ ID NO: 1009394 - DNA, 25 bp, Homo sapien
ggtaccgtcggtccgaggtcactgc

SEQ ID NO: 1009395 - DNA, 25 bp, Homo sapien
tttcttgtccagatgctcaggctga

SEQ ID NO: 1009396 - DNA, 25 bp, Homo sapien
aggaacttccaaatcttagagtgag

SEQ ID NO: 1009397 - DNA, 25 bp, Homo sapien
cttccaaatcttagagtgaggcagc

SEQ ID NO: 1009398 - DNA, 25 bp, Homo sapien
ggctgaggtccgctgtgaggagccc

SEQ ID NO: 1009399 - DNA, 25 bp, Homo sapien
caaatcttagagtgaggcagccacg

SEQ ID NO: 1009400 - DNA, 25 bp, Homo sapien
tgcgttcagacagccttgaagggcc

SEQ ID NO: 1009401 - DNA, 25 bp, Homo sapien
tggggatgcgttcagacagccttga

SEQ ID NO: 1009402 - DNA, 25 bp, Homo sapien
gatgcgttcagacagccttgaaggg

SEQ ID NO: 1009403 - DNA, 25 bp, Homo sapien
gttcagacagccttgaagggccgtg

SEQ ID NO: 1009404 - DNA, 25 bp, Homo sapien
gcagaattctcccacgtgtgtcagg

SEQ ID NO: 1009405 - DNA, 25 bp, Homo sapien
ctctcacacgcatgcagaattctcc

SEQ ID NO: 1009406 - DNA, 25 bp, Homo sapien
agaattctcccacgtgtgtcaggga

SEQ ID NO: 1009407 - DNA, 25 bp, Homo sapien
cagaattctcccacgtgtgtcaggg

SEQ ID NO: 1009408 - DNA, 25 bp, Homo sapien
gagcgtctcgcactctgcagtctgg

SEQ ID NO: 1009409 - DNA, 25 bp, Homo sapien
ccaatcggattggaagagggcccac

SEQ ID NO: 1009410 - DNA, 25 bp, Homo sapien
ctttgctgatcgatggcccttggcc

SEQ ID NO: 1009411 - DNA, 25 bp, Homo sapien
tcttctggtaaggaccccaatcgga

SEQ ID NO: 1009412 - DNA, 25 bp, Homo sapien
gaagctcttaacctgctcctgttcc

SEQ ID NO: 1009413 - DNA, 25 bp, Homo sapien
taatcaatttaacacactgcagcct

SEQ ID NO: 1009414 - DNA, 25 bp, Homo sapien
ttccccgctgacatgggctcgttca

SEQ ID NO: 1009415 - DNA, 25 bp, Homo sapien
gcatggacacctaatcaatttaaca

SEQ ID NO: 1009416 - DNA, 25 bp, Homo sapien
gaatatagtcgtgattcatacagat

SEQ ID NO: 1009417 - DNA, 25 bp, Homo sapien
taactcgttcagatgttacaactgg

SEQ ID NO: 1009418 - DNA, 25 bp, Homo sapien
gtagtgcactcacggcccactacaa

SEQ ID NO: 1009419 - DNA, 25 bp, Homo sapien
acacacatataggaaatgtcaaaga

SEQ ID NO: 1009420 - DNA, 25 bp, Homo sapien
tgggtttctcggtcccctgcttctg

SEQ ID NO: 1009421 - DNA, 25 bp, Homo sapien
tcggacagacttgggtttctcggtc

SEQ ID NO: 1009422 - DNA, 25 bp, Homo sapien
ccctgcttctgaattatctgctccc

SEQ ID NO: 1009423 - DNA, 25 bp, Homo sapien
ctgctcgtcggacagacttgggttt

SEQ ID NO: 1009424 - DNA, 25 bp, Homo sapien
tttcttccgcataacaaggcaacgt

SEQ ID NO: 1009425 - DNA, 25 bp, Homo sapien
ttccgcataacaaggcaacgtttgt

SEQ ID NO: 1009426 - DNA, 25 bp, Homo sapien
ggctttcttccgcataacaaggcaa

SEQ ID NO: 1009427 - DNA, 25 bp, Homo sapien
caaggcaacgtttgttcaccagacc

SEQ ID NO: 1009428 - DNA, 25 bp, Homo sapien
ggacacggagatggctctcagatcg

SEQ ID NO: 1009429 - DNA, 25 bp, Homo sapien
agggacacggagatggctctcagat

SEQ ID NO: 1009430 - DNA, 25 bp, Homo sapien
tctcagatcgtccagccattctggg

SEQ ID NO: 1009431 - DNA, 25 bp, Homo sapien
ggctctcagatcgtccagccattct

SEQ ID NO: 1009432 - DNA, 25 bp, Homo sapien
tttctggccgccatgctgggcaagg

SEQ ID NO: 1009433 - DNA, 25 bp, Homo sapien
gggcaccctcgactgtgggcggcat

SEQ ID NO: 1009434 - DNA, 25 bp, Homo sapien
gcctgcagggcaccctcgactgtgg

SEQ ID NO: 1009435 - DNA, 25 bp, Homo sapien
ggatgcaggactcctgccctgcctt

SEQ ID NO: 1009436 - DNA, 25 bp, Homo sapien
gaatgggagcctgtctgactgcact

SEQ ID NO: 1009437 - DNA, 25 bp, Homo sapien
tgcgggaccctttcgctactgggaa

SEQ ID NO: 1009438 - DNA, 25 bp, Homo sapien
ttagaaccagaacccctgaggacgc

SEQ ID NO: 1009439 - DNA, 25 bp, Homo sapien
agtccagctatcaaaatgcgccgcg

SEQ ID NO: 1009440 - DNA, 25 bp, Homo sapien
ggtaacctttcatggagtttgtcaa

SEQ ID NO: 1009441 - DNA, 25 bp, Homo sapien
tataggtagccttgaaattctgagg

SEQ ID NO: 1009442 - DNA, 25 bp, Homo sapien
taaggagtgagcttgcagcaaacag

SEQ ID NO: 1009443 - DNA, 25 bp, Homo sapien
cagctctgcaggtttccttggagac

SEQ ID NO: 1009444 - DNA, 25 bp, Homo sapien
tgaaaggacttccataaaaacaaga

SEQ ID NO: 1009445 - DNA, 25 bp, Homo sapien
agtttgatgttagtcattctgtcga

SEQ ID NO: 1009446 - DNA, 25 bp, Homo sapien
taaattccgtatcttgtagttggca

SEQ ID NO: 1009447 - DNA, 25 bp, Homo sapien
gatcctgatttccattatagttttt

SEQ ID NO: 1009448 - DNA, 25 bp, Homo sapien
caggccccttcttaacattattatt

SEQ ID NO: 1009449 - DNA, 25 bp, Homo sapien
acaggccccttcttaacattattat

SEQ ID NO: 1009450 - DNA, 25 bp, Homo sapien
cattattattaaacaggccccttct

SEQ ID NO: 1009451 - DNA, 25 bp, Homo sapien
cattattattaaatgggacccttct

SEQ ID NO: 1009452 - DNA, 25 bp, Homo sapien
cattattattaaagaggccctttct

SEQ ID NO: 1009453 - DNA, 25 bp, Homo sapien
acaggccccttcttaacattattat

SEQ ID NO: 1009454 - DNA, 25 bp, Homo sapien
cattattattaaacaggccccttct

SEQ ID NO: 1009455 - DNA, 25 bp, Homo sapien
tgtatagttgtgatgcccgcggtcg

SEQ ID NO: 1009456 - DNA, 25 bp, Homo sapien
gcgctgtatagttgtgatgcccaca

SEQ ID NO: 1009457 - DNA, 25 bp, Homo sapien
ggttacgcacgctcagcaacttagt

SEQ ID NO: 1009458 - DNA, 25 bp, Homo sapien
gggagcattgtagcacgcgctgtat

SEQ ID NO: 1009459 - DNA, 25 bp, Homo sapien
aaatgtgagccacgtagtgtcggcc

SEQ ID NO: 1009460 - DNA, 25 bp, Homo sapien
tctagttgtgcatgaatgctggcaa

SEQ ID NO: 1009461 - DNA, 25 bp, Homo sapien
gtgaagttaacattgccaggacgat

SEQ ID NO: 1009462 - DNA, 25 bp, Homo sapien
tattaaacgtactccaaggtgagtc

SEQ ID NO: 1009463 - DNA, 25 bp, Homo sapien
cagccgtatctttccgtgtccatgg

SEQ ID NO: 1009464 - DNA, 25 bp, Homo sapien
cttccagggatgctttacataatgc

SEQ ID NO: 1009465 - DNA, 25 bp, Homo sapien
tgttttccacgagtcttttcagccg

SEQ ID NO: 1009466 - DNA, 25 bp, Homo sapien
gatgaattggcactggacacggcct

SEQ ID NO: 1009467 - DNA, 25 bp, Homo sapien
tgggatgcctgggtccccgcgcctt

SEQ ID NO: 1009468 - DNA, 25 bp, Homo sapien
gggtccccgcgcctttgtgtatgtg

SEQ ID NO: 1009469 - DNA, 25 bp, Homo sapien
tgcagtaacgggaaagcaagttcta

SEQ ID NO: 1009470 - DNA, 25 bp, Homo sapien
tgtgctcgcgtctagggagttctga

SEQ ID NO: 1009471 - DNA, 25 bp, Homo sapien
tccgtaaccgtagcttgaggcacat

SEQ ID NO: 1009472 - DNA, 25 bp, Homo sapien
aagcaggtactcagcggcctctgca

SEQ ID NO: 1009473 - DNA, 25 bp, Homo sapien
aacgcttggcggttctgaacgcgca

SEQ ID NO: 1009474 - DNA, 25 bp, Homo sapien
aaatatgcagcatggaacgcttggc

SEQ ID NO: 1009475 - DNA, 25 bp, Homo sapien
gggccggtatttacacacgcgcaaa

SEQ ID NO: 1009476 - DNA, 25 bp, Homo sapien
tagatgcgcccacttccggtcatta

SEQ ID NO: 1009477 - DNA, 25 bp, Homo sapien
cccagagacggcacaaggaggttga

SEQ ID NO: 1009478 - DNA, 25 bp, Homo sapien
cctagtgtccatgggttagggccat

SEQ ID NO: 1009479 - DNA, 25 bp, Homo sapien
aagctgggaattttttggcgcaatc

SEQ ID NO: 1009480 - DNA, 25 bp, Homo sapien
tctgtggacaatgtaaccctaaaca

SEQ ID NO: 1009481 - DNA, 25 bp, Homo sapien
cgcaatccatgtagcagtgacccag

SEQ ID NO: 1009482 - DNA, 25 bp, Homo sapien
tccctttcacatgaggatctgccgt

SEQ ID NO: 1009483 - DNA, 25 bp, Homo sapien
ctgggccagacacgcgctcagtgct

SEQ ID NO: 1009484 - DNA, 25 bp, Homo sapien
agactgggccagacacgcgctcagt

SEQ ID NO: 1009485 - DNA, 25 bp, Homo sapien
gcgctcagtgctgacatcctggcgt

SEQ ID NO: 1009486 - DNA, 25 bp, Homo sapien
ctctgctggcgaccaagactgggcc

SEQ ID NO: 1009487 - DNA, 25 bp, Homo sapien
cgtcgtcacctttgtgacgtcccaa

SEQ ID NO: 1009488 - DNA, 25 bp, Homo sapien
cctttgtgacgtcccaagcactggg

SEQ ID NO: 1009489 - DNA, 25 bp, Homo sapien
ctgtcgtcgtcacctttgtgacgtc

SEQ ID NO: 1009490 - DNA, 25 bp, Homo sapien
tcacctttgtgacgtcccaagcact

SEQ ID NO: 1009491 - DNA, 25 bp, Homo sapien
gagacgctgagtgcagtcaccgtag

SEQ ID NO: 1009492 - DNA, 25 bp, Homo sapien
acctggcggtcctgctggagacgct

SEQ ID NO: 1009493 - DNA, 25 bp, Homo sapien
tcctgtgtggcggagccccgtgcgc

SEQ ID NO: 1009494 - DNA, 25 bp, Homo sapien
taggacctgcagtcacacatctggg

SEQ ID NO: 1009495 - DNA, 25 bp, Homo sapien
tgggaaagacatcgcatcaggaaat

SEQ ID NO: 1009496 - DNA, 25 bp, Homo sapien
tgtgctttacccaacgatatgctgg

SEQ ID NO: 1009497 - DNA, 25 bp, Homo sapien
cagaattcctttgtaccgagatgac

SEQ ID NO: 1009498 - DNA, 25 bp, Homo sapien
cagtgccgttcttactcctgcgggc

SEQ ID NO: 1009499 - DNA, 25 bp, Homo sapien
tcagatccacgcctaggccgggaga

SEQ ID NO: 1009500 - DNA, 25 bp, Homo sapien
gcttcagatccacgcctaggccggg

SEQ ID NO: 1009501 - DNA, 25 bp, Homo sapien
gatccacgcctaggccgggagaagt

SEQ ID NO: 1009502 - DNA, 25 bp, Homo sapien
gcagcttcagatccacgcctaggcc

SEQ ID NO: 1009503 - DNA, 25 bp, Homo sapien
gggctgcgttcagccctccagagga

SEQ ID NO: 1009504 - DNA, 25 bp, Homo sapien
agaggacgggctctgatgtgctgcc

SEQ ID NO: 1009505 - DNA, 25 bp, Homo sapien
gagatggatgtgctccctgcgcagt

SEQ ID NO: 1009506 - DNA, 25 bp, Homo sapien
gtgctcacagcggcactggccatgg

SEQ ID NO: 1009507 - DNA, 25 bp, Homo sapien
caggagctgtcttgagactcggcag

SEQ ID NO: 1009508 - DNA, 25 bp, Homo sapien
cctgaccgagaacgttgaggaccag

SEQ ID NO: 1009509 - DNA, 25 bp, Homo sapien
accaggcagcggtcaaggttggccc

SEQ ID NO: 1009510 - DNA, 25 bp, Homo sapien
agcagacggacacggcccaaggacg

SEQ ID NO: 1009511 - DNA, 25 bp, Homo sapien
gccagcggctttgctggggactgac

SEQ ID NO: 1009512 - DNA, 25 bp, Homo sapien
cccaggacccggctgagcagagtga

SEQ ID NO: 1009513 - DNA, 25 bp, Homo sapien
cagaagtgtgggtgttcacatcagg

SEQ ID NO: 1009514 - DNA, 25 bp, Homo sapien
gagcagagtgagtggtcagggtcca

SEQ ID NO: 1009515 - DNA, 25 bp, Homo sapien
caccttggaccctgcgggcgaggct

SEQ ID NO: 1009516 - DNA, 25 bp, Homo sapien
gggacctggattgccggggcctgaa

SEQ ID NO: 1009517 - DNA, 25 bp, Homo sapien
tccacagagggaaacaccttggacc

SEQ ID NO: 1009518 - DNA, 25 bp, Homo sapien
gacccctctggagggacctggattg

SEQ ID NO: 1009519 - DNA, 25 bp, Homo sapien
cagaacctgagagcaagtcgtgttt

SEQ ID NO: 1009520 - DNA, 25 bp, Homo sapien
cagccgaccctgagagagggacctg

SEQ ID NO: 1009521 - DNA, 25 bp, Homo sapien
gtttcacggaagagggaatggaggc

SEQ ID NO: 1009522 - DNA, 25 bp, Homo sapien
ctgagagcaagtcgtgtttcacgga

SEQ ID NO: 1009523 - DNA, 25 bp, Homo sapien
ccggtcggcgcctgacgtagcgtct

SEQ ID NO: 1009524 - DNA, 25 bp, Homo sapien
tcggcgcctgacgtagcgtctgtgg

SEQ ID NO: 1009525 - DNA, 25 bp, Homo sapien
cacgcgggcgcctgacgtagcgtct

SEQ ID NO: 1009526 - DNA, 25 bp, Homo sapien
ctgtggtgggctcttccggtcggcg

SEQ ID NO: 1009527 - DNA, 25 bp, Homo sapien
ccagtgtcactaggcccctctgaga

SEQ ID NO: 1009528 - DNA, 25 bp, Homo sapien
ggccaccaagggtcacttccttgag

SEQ ID NO: 1009529 - DNA, 25 bp, Homo sapien
agaggccaccaagggtcacttcctt

SEQ ID NO: 1009530 - DNA, 25 bp, Homo sapien
gcagaggccaccaagggtcacttcc

SEQ ID NO: 1009531 - DNA, 25 bp, Homo sapien
catggtggtggtgtctgaaacaaga

SEQ ID NO: 1009532 - DNA, 25 bp, Homo sapien
tgtctgaaacaagaccctttttgct

SEQ ID NO: 1009533 - DNA, 25 bp, Homo sapien
gctttctgtagaactggcatagacc

SEQ ID NO: 1009534 - DNA, 25 bp, Homo sapien
catagaccgtgtggtgcaggttcag

SEQ ID NO: 1009535 - DNA, 25 bp, Homo sapien
gcttctggactggatctggcagccc

SEQ ID NO: 1009536 - DNA, 25 bp, Homo sapien
ctcaggagacgcccgtgagggtttt

SEQ ID NO: 1009537 - DNA, 25 bp, Homo sapien
tgcaccgtcagctgggcttctggac

SEQ ID NO: 1009538 - DNA, 25 bp, Homo sapien
tcacacggggacagctgtttaaccc

SEQ ID NO: 1009539 - DNA, 25 bp, Homo sapien
ggagccacaaggcacggagctaacg

SEQ ID NO: 1009540 - DNA, 25 bp, Homo sapien
gagccacaaggcacggagctaacgt

SEQ ID NO: 1009541 - DNA, 25 bp, Homo sapien
agccacaaggcacggagctaacgtg

SEQ ID NO: 1009542 - DNA, 25 bp, Homo sapien
tggagccacaaggcacggagctaac

SEQ ID NO: 1009543 - DNA, 25 bp, Homo sapien
ttgggtgtgtccggcgctggcctgc

SEQ ID NO: 1009544 - DNA, 25 bp, Homo sapien
gtgcccggtgctggcctgcgttggg

SEQ ID NO: 1009545 - DNA, 25 bp, Homo sapien
tccgtgtgtccggtgttggcctgtg

SEQ ID NO: 1009546 - DNA, 25 bp, Homo sapien
gtctgtgtgtctggcgctccagcgg

SEQ ID NO: 1009547 - DNA, 25 bp, Homo sapien
ttagcaaatcgggattccctgtcag

SEQ ID NO: 1009548 - DNA, 25 bp, Homo sapien
tgctcgggttgacagcatgtttggt

SEQ ID NO: 1009549 - DNA, 25 bp, Homo sapien
atgtttggtggttttagcaaatcgg

SEQ ID NO: 1009550 - DNA, 25 bp, Homo sapien
ctttcgcacggtggtccttgcagcg

SEQ ID NO: 1009551 - DNA, 25 bp, Homo sapien
gaaattcaccccaggtagctgagtg

SEQ ID NO: 1009552 - DNA, 25 bp, Homo sapien
tagtgatgttttggagccgtggacc

SEQ ID NO: 1009553 - DNA, 25 bp, Homo sapien
gaccagggcaccacgtttcactgaa

SEQ ID NO: 1009554 - DNA, 25 bp, Homo sapien
cgtctccagcgtcccgatgttgtga

SEQ ID NO: 1009555 - DNA, 25 bp, Homo sapien
gatgaaaatgacaaacctcatgcca

SEQ ID NO: 1009556 - DNA, 25 bp, Homo sapien
gacaaacctcatgccagaagcgtcc

SEQ ID NO: 1009557 - DNA, 25 bp, Homo sapien
gttggatcggtcaatccgtggaaga

SEQ ID NO: 1009558 - DNA, 25 bp, Homo sapien
ggtcaatccgtggaagacactgatg

SEQ ID NO: 1009559 - DNA, 25 bp, Homo sapien
caggaggtttgcagtgccaggtcca

SEQ ID NO: 1009560 - DNA, 25 bp, Homo sapien
ggctgacgtgtcctccgccactggg

SEQ ID NO: 1009561 - DNA, 25 bp, Homo sapien
ggtcagtttggcctcggaccaggca

SEQ ID NO: 1009562 - DNA, 25 bp, Homo sapien
gctgggaaggctgatcaggaggttt

SEQ ID NO: 1009563 - DNA, 25 bp, Homo sapien
ggtgctgtcttctcgctggtgctga

SEQ ID NO: 1009564 - DNA, 25 bp, Homo sapien
ctggcactgagagttcctaaaggct

SEQ ID NO: 1009565 - DNA, 25 bp, Homo sapien
gcttgtcttgggcacacagtgtgag

SEQ ID NO: 1009566 - DNA, 25 bp, Homo sapien
agcattggcatctcgggtagaacca

SEQ ID NO: 1009567 - DNA, 25 bp, Homo sapien
cctgaagcctcagagctactgatga

SEQ ID NO: 1009568 - DNA, 25 bp, Homo sapien
tcccttctaggaagatgctgaacat

SEQ ID NO: 1009569 - DNA, 25 bp, Homo sapien
gaaagaggcaaacattcaggagcca

SEQ ID NO: 1009570 - DNA, 25 bp, Homo sapien
ggcaaacattcaggagccacagtgc

SEQ ID NO: 1009571 - DNA, 25 bp, Homo sapien
tcttccgtttgtgccgtctgtaaac

SEQ ID NO: 1009572 - DNA, 25 bp, Homo sapien
tttgtgccgtctgtaaaccagggag

SEQ ID NO: 1009573 - DNA, 25 bp, Homo sapien
tccgtttgtgccgtctgtaaaccag

SEQ ID NO: 1009574 - DNA, 25 bp, Homo sapien
tcttcttccgtttgtgccgtctgta

SEQ ID NO: 1009575 - DNA, 25 bp, Homo sapien
accagcgtggacgtccccttttctg

SEQ ID NO: 1009576 - DNA, 25 bp, Homo sapien
gtagcttcagcaatgcgttttctgc

SEQ ID NO: 1009577 - DNA, 25 bp, Homo sapien
cagcgtggacgtccccttttctgga

SEQ ID NO: 1009578 - DNA, 25 bp, Homo sapien
tcagcaatgcgttttctgccttcat

SEQ ID NO: 1009579 - DNA, 25 bp, Homo sapien
cacatgacggtgaccagaggccact

SEQ ID NO: 1009580 - DNA, 25 bp, Homo sapien
cctcggctggcacgtactccctccg

SEQ ID NO: 1009581 - DNA, 25 bp, Homo sapien
tcacatgacggtgaccagaggccac

SEQ ID NO: 1009582 - DNA, 25 bp, Homo sapien
atgacgggcacctcggctggcacgc

SEQ ID NO: 1009583 - DNA, 25 bp, Homo sapien
cacacagcttttgccgtcgtttgga

SEQ ID NO: 1009584 - DNA, 25 bp, Homo sapien
cgctcagagccattgtgcacgtttg

SEQ ID NO: 1009585 - DNA, 25 bp, Homo sapien
tttggagaattactgcgtgcactgc

SEQ ID NO: 1009586 - DNA, 25 bp, Homo sapien
taacagcctgcacgtttccagcgtt

SEQ ID NO: 1009587 - DNA, 25 bp, Homo sapien
ggaccagccctgttcattgtctaac

SEQ ID NO: 1009588 - DNA, 25 bp, Homo sapien
gccctgttcattgtctaacacagca

SEQ ID NO: 1009589 - DNA, 25 bp, Homo sapien
cagcagaagctgtgcacactgactt

SEQ ID NO: 1009590 - DNA, 25 bp, Homo sapien
cagaagctgtgcacactgactttcc

SEQ ID NO: 1009591 - DNA, 25 bp, Homo sapien
cacgacgtttgaaggtgtgaccttt

SEQ ID NO: 1009592 - DNA, 25 bp, Homo sapien
ttgtctcccgctcaaacgcttcttg

SEQ ID NO: 1009593 - DNA, 25 bp, Homo sapien
ttgattcggttgcaccaaaggcctc

SEQ ID NO: 1009594 - DNA, 25 bp, Homo sapien
caaaggcctccgtcattttggcttc

SEQ ID NO: 1009595 - DNA, 25 bp, Homo sapien
agggattcggatgtcctgaggaccc

SEQ ID NO: 1009596 - DNA, 25 bp, Homo sapien
tgtttctgagggattcggatgtcct

SEQ ID NO: 1009597 - DNA, 25 bp, Homo sapien
ttctgagggattcggatgtcctgag

SEQ ID NO: 1009598 - DNA, 25 bp, Homo sapien
gattcggatgtcctgaggacccctt

SEQ ID NO: 1009599 - DNA, 25 bp, Homo sapien
tggcttccacgatgaatgccacaga

SEQ ID NO: 1009600 - DNA, 25 bp, Homo sapien
tctgtggcagcctcgaagggggtgg

SEQ ID NO: 1009601 - DNA, 25 bp, Homo sapien
tgtttcagatgattttgatctgtaa

SEQ ID NO: 1009602 - DNA, 25 bp, Homo sapien
ccacagataggagcactgcggcctc

SEQ ID NO: 1009603 - DNA, 25 bp, Homo sapien
tcacctgcatcctgggggtttcctg

SEQ ID NO: 1009604 - DNA, 25 bp, Homo sapien
cttcacctgcatcctgggggtttcc

SEQ ID NO: 1009605 - DNA, 25 bp, Homo sapien
gggcttcacctgcatcctgggggtt

SEQ ID NO: 1009606 - DNA, 25 bp, Homo sapien
ctcaggggcttcacctgcatcctgg

SEQ ID NO: 1009607 - DNA, 25 bp, Homo sapien
ctctttgggtcgtgccctctgcggg

SEQ ID NO: 1009608 - DNA, 25 bp, Homo sapien
caggctctttgggtcgtgccctctg

SEQ ID NO: 1009609 - DNA, 25 bp, Homo sapien
ctgccgacagggagaaggcgggccc

SEQ ID NO: 1009610 - DNA, 25 bp, Homo sapien
ggctctttgggtcgtgccctctgcg

SEQ ID NO: 1009611 - DNA, 25 bp, Homo sapien
ggatgtaactggctgggaccccata

SEQ ID NO: 1009612 - DNA, 25 bp, Homo sapien
tcgggatgtaactggctgggacccc

SEQ ID NO: 1009613 - DNA, 25 bp, Homo sapien
gtaactggctgggaccccatagctc

SEQ ID NO: 1009614 - DNA, 25 bp, Homo sapien
cccaaggtgtgagggtcgggatgta

SEQ ID NO: 1009615 - DNA, 25 bp, Homo sapien
tcccaaggtagtctgcagctggtgg

SEQ ID NO: 1009616 - DNA, 25 bp, Homo sapien
tggaaaattccgtactcgcaccgat

SEQ ID NO: 1009617 - DNA, 25 bp, Homo sapien
ttccacccgagagcaggtgtgcggt

SEQ ID NO: 1009618 - DNA, 25 bp, Homo sapien
gagtgtgaccgtgggctttcagagg

SEQ ID NO: 1009619 - DNA, 25 bp, Homo sapien
tatttgtatatctcacaccggaggt

SEQ ID NO: 1009620 - DNA, 25 bp, Homo sapien
ggttcattaagtgatcccgggaaga

SEQ ID NO: 1009621 - DNA, 25 bp, Homo sapien
cattctgtccgctcagtaggccgtg

SEQ ID NO: 1009622 - DNA, 25 bp, Homo sapien
tctcccgggagggaaatgctcgcag

SEQ ID NO: 1009623 - DNA, 25 bp, Homo sapien
tcaaccaagaaggtgaacgggtgct

SEQ ID NO: 1009624 - DNA, 25 bp, Homo sapien
tacccggcgcagtgttgatggagac

SEQ ID NO: 1009625 - DNA, 25 bp, Homo sapien
tgattgtctcacttgccccgaagct

SEQ ID NO: 1009626 - DNA, 25 bp, Homo sapien
gaaaccgcctcgaacgtgctggcta

SEQ ID NO: 1009627 - DNA, 25 bp, Homo sapien
cttttaactgctaaactgcgctgac

SEQ ID NO: 1009628 - DNA, 25 bp, Homo sapien
actgcgctgactacgggagagctaa

SEQ ID NO: 1009629 - DNA, 25 bp, Homo sapien
gagctaagggccctattactatgca

SEQ ID NO: 1009630 - DNA, 25 bp, Homo sapien
catgattcctgacaacatccgtggg

SEQ ID NO: 1009631 - DNA, 25 bp, Homo sapien
ggctgtcagcgcgaactcaaactgc

SEQ ID NO: 1009632 - DNA, 25 bp, Homo sapien
tcagccacggctgtcagcgcgaact

SEQ ID NO: 1009633 - DNA, 25 bp, Homo sapien
ctgtcagcgcgaactcaaactgctc

SEQ ID NO: 1009634 - DNA, 25 bp, Homo sapien
ccacggctgtcagcgcgaactcaaa

SEQ ID NO: 1009635 - DNA, 25 bp, Homo sapien
agtgcggcaagatggacccttccaa

SEQ ID NO: 1009636 - DNA, 25 bp, Homo sapien
caaggttggacccttccatggcaca

SEQ ID NO: 1009637 - DNA, 25 bp, Homo sapien
tggtatgtgccagccttgacaaggc

SEQ ID NO: 1009638 - DNA, 25 bp, Homo sapien
cctgaggtggctctcgctgaccatt

SEQ ID NO: 1009639 - DNA, 25 bp, Homo sapien
tgttgagccaaagctcatgagaact

SEQ ID NO: 1009640 - DNA, 25 bp, Homo sapien
cctgttgagccaaagctcatgagaa

SEQ ID NO: 1009641 - DNA, 25 bp, Homo sapien
tgagccaaagctcatgagaactttt

SEQ ID NO: 1009642 - DNA, 25 bp, Homo sapien
ctcctctctcgacagcctcgcaaca

SEQ ID NO: 1009643 - DNA, 25 bp, Homo sapien
cagaggaaccatgatgcccctcgcg

SEQ ID NO: 1009644 - DNA, 25 bp, Homo sapien
agccgtgaagcgtcccggacagcag

SEQ ID NO: 1009645 - DNA, 25 bp, Homo sapien
aggaaccatgatgcccctcgcgtgg

SEQ ID NO: 1009646 - DNA, 25 bp, Homo sapien
gccgccctgggcgtgtcctgctcca

SEQ ID NO: 1009647 - DNA, 25 bp, Homo sapien
ctccagggtcgctgcgatatcaatc

SEQ ID NO: 1009648 - DNA, 25 bp, Homo sapien
gctgcgatatcaatctctttagcac

SEQ ID NO: 1009649 - DNA, 25 bp, Homo sapien
ggaccatgccgggtctctggtccct

SEQ ID NO: 1009650 - DNA, 25 bp, Homo sapien
cagggtcgctgcgatatcaatctct

SEQ ID NO: 1009651 - DNA, 25 bp, Homo sapien
gactgggtaaaggtgcccgtagcta

SEQ ID NO: 1009652 - DNA, 25 bp, Homo sapien
gctcagtggttcaccaaaagctcca

SEQ ID NO: 1009653 - DNA, 25 bp, Homo sapien
gacagcaccgatctcacggcaggtg

SEQ ID NO: 1009654 - DNA, 25 bp, Homo sapien
acacttcagggaatgtagtacctca

SEQ ID NO: 1009655 - DNA, 25 bp, Homo sapien
tgaggaaatagagacgcggccaatg

SEQ ID NO: 1009656 - DNA, 25 bp, Homo sapien
gccaatggcatgtccaagccacaga

SEQ ID NO: 1009657 - DNA, 25 bp, Homo sapien
ggtcacccgagtcgcagatgaggaa

SEQ ID NO: 1009658 - DNA, 25 bp, Homo sapien
accccaactaccgtgggcaggacag

SEQ ID NO: 1009659 - DNA, 25 bp, Homo sapien
gaatctacagggaagtgacgcaggc

SEQ ID NO: 1009660 - DNA, 25 bp, Homo sapien
tgagcaccggccaagtcagtttggg

SEQ ID NO: 1009661 - DNA, 25 bp, Homo sapien
ggaagacccacctctctcgtgttag

SEQ ID NO: 1009662 - DNA, 25 bp, Homo sapien
tcccgtgccaagctcagcaaatgta

SEQ ID NO: 1009663 - DNA, 25 bp, Homo sapien
gaatgagtactgtcattttaaagtc

SEQ ID NO: 1009664 - DNA, 25 bp, Homo sapien
tgtagaagtgtatgaatgagtactg

SEQ ID NO: 1009665 - DNA, 25 bp, Homo sapien
gaagtgtatgaatgagtactgtcat

SEQ ID NO: 1009666 - DNA, 25 bp, Homo sapien
aaaatgtagaagtgtatgaatgagt

SEQ ID NO: 1009667 - DNA, 25 bp, Homo sapien
gaaagacgaatacgatggctccaca

SEQ ID NO: 1009668 - DNA, 25 bp, Homo sapien
catccccaatactccaggaggacag

SEQ ID NO: 1009669 - DNA, 25 bp, Homo sapien
catcccataatactgttgaggtgct

SEQ ID NO: 1009670 - DNA, 25 bp, Homo sapien
tatcgactgctggaccatcccataa

SEQ ID NO: 1009671 - DNA, 25 bp, Homo sapien
ggtgggacctgaacgacattttgcg

SEQ ID NO: 1009672 - DNA, 25 bp, Homo sapien
cagctgtgccgcaggaaatggagca

SEQ ID NO: 1009673 - DNA, 25 bp, Homo sapien
tccacgatgtggctaggtcctcaac

SEQ ID NO: 1009674 - DNA, 25 bp, Homo sapien
tcagaatcaacaagcatgtgcggtc

SEQ ID NO: 1009675 - DNA, 25 bp, Homo sapien
cacacggatgcccagagcgtgttcc

SEQ ID NO: 1009676 - DNA, 25 bp, Homo sapien
tgagctggtacactcagtgaggacg

SEQ ID NO: 1009677 - DNA, 25 bp, Homo sapien
gcgggtctcatgctgtccacacgct

SEQ ID NO: 1009678 - DNA, 25 bp, Homo sapien
acggctccatgcacagggacgaaga

SEQ ID NO: 1009679 - DNA, 25 bp, Homo sapien
cagcttgcaacagagtggtcagaac

SEQ ID NO: 1009680 - DNA, 25 bp, Homo sapien
tagtttccatgagagccccaaagga

SEQ ID NO: 1009681 - DNA, 25 bp, Homo sapien
tctcttgcaccagaatagctcaggg

SEQ ID NO: 1009682 - DNA, 25 bp, Homo sapien
tgcctgagcgagacaagagacactg

SEQ ID NO: 1009683 - DNA, 25 bp, Homo sapien
tacggtcgatgtggcgattccgccc

SEQ ID NO: 1009684 - DNA, 25 bp, Homo sapien
cggaaacaacggcactgtccattaa

SEQ ID NO: 1009685 - DNA, 25 bp, Homo sapien
cactagttgttagggagatgcatgc

SEQ ID NO: 1009686 - DNA, 25 bp, Homo sapien
gccccagggacatatccagggatgt

SEQ ID NO: 1009687 - DNA, 25 bp, Homo sapien
agctctgagccgcaacaaagcggca

SEQ ID NO: 1009688 - DNA, 25 bp, Homo sapien
tctgagccgcaacaaagcggcagtg

SEQ ID NO: 1009689 - DNA, 25 bp, Homo sapien
atagcgacgccatcccagctctgag

SEQ ID NO: 1009690 - DNA, 25 bp, Homo sapien
gttgccatagcgacgccatcccagc

SEQ ID NO: 1009691 - DNA, 25 bp, Homo sapien
tgtcgatcaggacgtaggtgccgct

SEQ ID NO: 1009692 - DNA, 25 bp, Homo sapien
atcaggacgtaggtgccgctccggc

SEQ ID NO: 1009693 - DNA, 25 bp, Homo sapien
ctttggccatcttgttgagaaccat

SEQ ID NO: 1009694 - DNA, 25 bp, Homo sapien
ttgagaaccatgtcgatcaggacgt

SEQ ID NO: 1009695 - DNA, 25 bp, Homo sapien
aaggagagaaatgaaagtgctgccg

SEQ ID NO: 1009696 - DNA, 25 bp, Homo sapien
ctgccaacagaaggagagaaatgaa

SEQ ID NO: 1009697 - DNA, 25 bp, Homo sapien
ggagagaaatgaaagtgctgccgtc

SEQ ID NO: 1009698 - DNA, 25 bp, Homo sapien
agagaaatgaaagtgctgccgtcca

SEQ ID NO: 1009699 - DNA, 25 bp, Homo sapien
cctcttgcttgttcccccctctttg

SEQ ID NO: 1009700 - DNA, 25 bp, Homo sapien
agatgtggtaaattttgccagaaca

SEQ ID NO: 1009701 - DNA, 25 bp, Homo sapien
ccctgggggcttcgagcctctgagc

SEQ ID NO: 1009702 - DNA, 25 bp, Homo sapien
cagcttgtagcttgtgggatgagct

SEQ ID NO: 1009703 - DNA, 25 bp, Homo sapien
aagaacggcccctgtagcacttgtt

SEQ ID NO: 1009704 - DNA, 25 bp, Homo sapien
ttattggacaagaacggcccctgta

SEQ ID NO: 1009705 - DNA, 25 bp, Homo sapien
cggcccctgtagcacttgtttactt

SEQ ID NO: 1009706 - DNA, 25 bp, Homo sapien
gcaatgaacaattattggacaagaa

SEQ ID NO: 1009707 - DNA, 25 bp, Homo sapien
tgactatgcaactgggctcatatta

SEQ ID NO: 1009708 - DNA, 25 bp, Homo sapien
tgggctcatattactagctgcaaca

SEQ ID NO: 1009709 - DNA, 25 bp, Homo sapien
tatgcaactgggctcatattactag

SEQ ID NO: 1009710 - DNA, 25 bp, Homo sapien
caactgggctcatattactagctgc

SEQ ID NO: 1009711 - DNA, 25 bp, Homo sapien
gcgcgtctcgttggtctgcaggttc

SEQ ID NO: 1009712 - DNA, 25 bp, Homo sapien
cggtcataccaactcaggaagtgga

SEQ ID NO: 1009713 - DNA, 25 bp, Homo sapien
actgcgtcacggtgcgcgtctcgtt

SEQ ID NO: 1009714 - DNA, 25 bp, Homo sapien
aggaggaagggactcctcggtcata

SEQ ID NO: 1009715 - DNA, 25 bp, Homo sapien
tgccggacgccgttctccgcgaggg

SEQ ID NO: 1009716 - DNA, 25 bp, Homo sapien
tggagccttcatccggccagtagtg

SEQ ID NO: 1009717 - DNA, 25 bp, Homo sapien
catagatgtggtagagattggagcc

SEQ ID NO: 1009718 - DNA, 25 bp, Homo sapien
tccggccagtagtggtagcactgcc

SEQ ID NO: 1009719 - DNA, 25 bp, Homo sapien
acactcttaaaataagctctcctga

SEQ ID NO: 1009720 - DNA, 25 bp, Homo sapien
gacgccagccgaggccaagtttcct

SEQ ID NO: 1009721 - DNA, 25 bp, Homo sapien
gtgctctatgccgaggacggctttt

SEQ ID NO: 1009722 - DNA, 25 bp, Homo sapien
tgccgaggacggctttttctgcctc

SEQ ID NO: 1009723 - DNA, 25 bp, Homo sapien
caagtttccttgtgacgtctgggct

SEQ ID NO: 1009724 - DNA, 25 bp, Homo sapien
gtcgttgagcgtggatgccgagagc

SEQ ID NO: 1009725 - DNA, 25 bp, Homo sapien
ggatgtgggcatcattgtggtcgtt

SEQ ID NO: 1009726 - DNA, 25 bp, Homo sapien
atcattgtggtcgttgagcgtggat

SEQ ID NO: 1009727 - DNA, 25 bp, Homo sapien
gatgtgggcatcattgtggtcgttg

SEQ ID NO: 1009728 - DNA, 25 bp, Homo sapien
cgtggtcgttgagcatggacaccga

SEQ ID NO: 1009729 - DNA, 25 bp, Homo sapien
gtcgttgagcatggacaccgagagc

SEQ ID NO: 1009730 - DNA, 25 bp, Homo sapien
catcgtggtcgttgagcatggacac

SEQ ID NO: 1009731 - DNA, 25 bp, Homo sapien
atcatcgtggtcgttgagcatggac

SEQ ID NO: 1009732 - DNA, 25 bp, Homo sapien
atcatcgtggtcattgagtgtggat

SEQ ID NO: 1009733 - DNA, 25 bp, Homo sapien
attcaagacatgattcgtgacccag

SEQ ID NO: 1009734 - DNA, 25 bp, Homo sapien
atttgtaagaagtttgattggccta

SEQ ID NO: 1009735 - DNA, 25 bp, Homo sapien
ttgattggcctaatcagattcaaga

SEQ ID NO: 1009736 - DNA, 25 bp, Homo sapien
gattcgtgacccagttattgagatc

SEQ ID NO: 1009737 - DNA, 25 bp, Homo sapien
gccaaaagtcagccacggtggcggg

SEQ ID NO: 1009738 - DNA, 25 bp, Homo sapien
caaaagtcagccacggtggcgggca

SEQ ID NO: 1009739 - DNA, 25 bp, Homo sapien
cctgggtggcgatgtacgcggggtt

SEQ ID NO: 1009740 - DNA, 25 bp, Homo sapien
gcggggttcctcgggtcgtgatcca

SEQ ID NO: 1009741 - DNA, 25 bp, Homo sapien
gcttccctgctggagttaactcgtt

SEQ ID NO: 1009742 - DNA, 25 bp, Homo sapien
ctgcttccctgctggagttaactcg

SEQ ID NO: 1009743 - DNA, 25 bp, Homo sapien
tgctggagttaactcgttgtgtgtg

SEQ ID NO: 1009744 - DNA, 25 bp, Homo sapien
tccctgctggagttaactcgttgtg

SEQ ID NO: 1009745 - DNA, 25 bp, Homo sapien
ccagctcgacacagttgctgcactg

SEQ ID NO: 1009746 - DNA, 25 bp, Homo sapien
tcccacatgggatgaaagctgtcca

SEQ ID NO: 1009747 - DNA, 25 bp, Homo sapien
gctgtggcctggaatagcgcagaca

SEQ ID NO: 1009748 - DNA, 25 bp, Homo sapien
gatgaaagctgtccaccgtttccag

SEQ ID NO: 1009749 - DNA, 25 bp, Homo sapien
tccgtcatcagtggccgctgagacc

SEQ ID NO: 1009750 - DNA, 25 bp, Homo sapien
gagctgagagctgagcgccatctgc

SEQ ID NO: 1009751 - DNA, 25 bp, Homo sapien
tgagcgccatctgccatcagtggcc

SEQ ID NO: 1009752 - DNA, 25 bp, Homo sapien
ctgagagctgagcaccgtccgtcat

SEQ ID NO: 1009753 - DNA, 25 bp, Homo sapien
ctgcaggcagttgggccaatacttt

SEQ ID NO: 1009754 - DNA, 25 bp, Homo sapien
agcactgtccgccatcagtggccgt

SEQ ID NO: 1009755 - DNA, 25 bp, Homo sapien
gagccgagagctgagcactgtccgc

SEQ ID NO: 1009756 - DNA, 25 bp, Homo sapien
gcagttgggccaatactttcatcca

SEQ ID NO: 1009757 - DNA, 25 bp, Homo sapien
tgcgatttgtgcctcgatcacctgc

SEQ ID NO: 1009758 - DNA, 25 bp, Homo sapien
tggacgagcaaagaaactttgggac

SEQ ID NO: 1009759 - DNA, 25 bp, Homo sapien
tcactcagccctagaacagcattgc

SEQ ID NO: 1009760 - DNA, 25 bp, Homo sapien
tgcaggcaccatgtttgattaaagg

SEQ ID NO: 1009761 - DNA, 25 bp, Homo sapien
cgttgatgtagtctgagtggctgtg

SEQ ID NO: 1009762 - DNA, 25 bp, Homo sapien
ggctgtggctgttctccgccttcag

SEQ ID NO: 1009763 - DNA, 25 bp, Homo sapien
gggctagcgttgatgtagtctgagt

SEQ ID NO: 1009764 - DNA, 25 bp, Homo sapien
ccttcagcaggacccgggagtggtc

SEQ ID NO: 1009765 - DNA, 25 bp, Homo sapien
ctgctggcaagtggacaatccatgg

SEQ ID NO: 1009766 - DNA, 25 bp, Homo sapien
gctggcaagtggacaatccatgggc

SEQ ID NO: 1009767 - DNA, 25 bp, Homo sapien
tgctggcaagtggacaatccatggg

SEQ ID NO: 1009768 - DNA, 25 bp, Homo sapien
tggcaagtggacaatccatgggctt

SEQ ID NO: 1009769 - DNA, 25 bp, Homo sapien
cccgtggtggcagaacatatggagc

SEQ ID NO: 1009770 - DNA, 25 bp, Homo sapien
cagctaagcatgctagaggacgcgg

SEQ ID NO: 1009771 - DNA, 25 bp, Homo sapien
gacgcggcggtatagtcattaatca

SEQ ID NO: 1009772 - DNA, 25 bp, Homo sapien
caaagcgtgttcttgctgccccgtg

SEQ ID NO: 1009773 - DNA, 25 bp, Homo sapien
cggtctcttccgatagttctggcag

SEQ ID NO: 1009774 - DNA, 25 bp, Homo sapien
cagctcagcaggtgacttattccca

SEQ ID NO: 1009775 - DNA, 25 bp, Homo sapien
gctgacgaggccgttttctgggcta

SEQ ID NO: 1009776 - DNA, 25 bp, Homo sapien
tgaagcggtccgcaaacaggtcgag

SEQ ID NO: 1009777 - DNA, 25 bp, Homo sapien
gggcctcaatcgacagaacgtgtca

SEQ ID NO: 1009778 - DNA, 25 bp, Homo sapien
tgaactgccgtttgtcgcgtagtcc

SEQ ID NO: 1009779 - DNA, 25 bp, Homo sapien
tagtcctcgagtctcggagcgcagg

SEQ ID NO: 1009780 - DNA, 25 bp, Homo sapien
gaacgtgccagaatcgtctccctaa

SEQ ID NO: 1009781 - DNA, 25 bp, Homo sapien
gcctcagaatcagccggcgctgaga

SEQ ID NO: 1009782 - DNA, 25 bp, Homo sapien
gcacctggcaggatgaacgtaactt

SEQ ID NO: 1009783 - DNA, 25 bp, Homo sapien
tgggctccaccgaagaccttaagga

SEQ ID NO: 1009784 - DNA, 25 bp, Homo sapien
gatgttagtgggttcggcctcagaa

SEQ ID NO: 1009785 - DNA, 25 bp, Homo sapien
gtggccaccctgttggcaccggctg

SEQ ID NO: 1009786 - DNA, 25 bp, Homo sapien
aggcgcccatccacatgtggccacc

SEQ ID NO: 1009787 - DNA, 25 bp, Homo sapien
acggaccacttcaccatcactaggt

SEQ ID NO: 1009788 - DNA, 25 bp, Homo sapien
gtgtcccatctgagcacggaccact

SEQ ID NO: 1009789 - DNA, 25 bp, Homo sapien
caggcttcctgcccccggggctggt

SEQ ID NO: 1009790 - DNA, 25 bp, Homo sapien
ccaggcttcctgcccccggggctgg

SEQ ID NO: 1009791 - DNA, 25 bp, Homo sapien
gcgcacagcgcttcccactccttct

SEQ ID NO: 1009792 - DNA, 25 bp, Homo sapien
ttgggctccgcctggtaggcgcaca

SEQ ID NO: 1009793 - DNA, 25 bp, Homo sapien
ctctgggccacgaacgagctgttgg

SEQ ID NO: 1009794 - DNA, 25 bp, Homo sapien
cagggagcggttcttgggcacgttc

SEQ ID NO: 1009795 - DNA, 25 bp, Homo sapien
ctcagggtgggcactctaaggccgt

SEQ ID NO: 1009796 - DNA, 25 bp, Homo sapien
gtgtggtggtgagggacaatcgcct

SEQ ID NO: 1009797 - DNA, 25 bp, Homo sapien
acctgtgctgtttgcgcgacacccc

SEQ ID NO: 1009798 - DNA, 25 bp, Homo sapien
cacacgggagcaggtgcatcgggca

SEQ ID NO: 1009799 - DNA, 25 bp, Homo sapien
tggcgtttctggtgcaaaatataac

SEQ ID NO: 1009800 - DNA, 25 bp, Homo sapien
ccaggttggcgtttctggtgcaaaa

SEQ ID NO: 1009801 - DNA, 25 bp, Homo sapien
tgaacgaccaggttggcgtttctgg

SEQ ID NO: 1009802 - DNA, 25 bp, Homo sapien
gctttttcactgaacgaccaggttg

SEQ ID NO: 1009803 - DNA, 25 bp, Homo sapien
tccagatgtggttccatgtgaatcc

SEQ ID NO: 1009804 - DNA, 25 bp, Homo sapien
gcatctggagacttgtaaagggtcc

SEQ ID NO: 1009805 - DNA, 25 bp, Homo sapien
aaacatgctcgccttcctgttggca

SEQ ID NO: 1009806 - DNA, 25 bp, Homo sapien
gtgcatctgatgcaggacccgctca

SEQ ID NO: 1009807 - DNA, 25 bp, Homo sapien
ctgccaaagacaccgcagaacccat

SEQ ID NO: 1009808 - DNA, 25 bp, Homo sapien
cagggaactgggaagtggtcaacac

SEQ ID NO: 1009809 - DNA, 25 bp, Homo sapien
agatgaaactggcaaaagcctcctc

SEQ ID NO: 1009810 - DNA, 25 bp, Homo sapien
tcaacacagatgaaactggcaaaag

SEQ ID NO: 1009811 - DNA, 25 bp, Homo sapien
agtggtcaacacagatgaaactggc

SEQ ID NO: 1009812 - DNA, 25 bp, Homo sapien
cctagaatctctggcaagcccagag

SEQ ID NO: 1009813 - DNA, 25 bp, Homo sapien
ccctgcgtcttaatgtgacttagaa

SEQ ID NO: 1009814 - DNA, 25 bp, Homo sapien
tattctgaggaccacctagaatctc

SEQ ID NO: 1009815 - DNA, 25 bp, Homo sapien
aaactgttctccctgcgtcttaatg

SEQ ID NO: 1009816 - DNA, 25 bp, Homo sapien
caacagtgagtagtaagaagatgcg

SEQ ID NO: 1009817 - DNA, 25 bp, Homo sapien
ggtgcaaaccatcatacgaaaacga

SEQ ID NO: 1009818 - DNA, 25 bp, Homo sapien
gaagatgcggacaagagtcacgacg

SEQ ID NO: 1009819 - DNA, 25 bp, Homo sapien
cgagtccccgatgctaaggacctgg

SEQ ID NO: 1009820 - DNA, 25 bp, Homo sapien
ggacgccgtgatgtgcttgtccaca

SEQ ID NO: 1009821 - DNA, 25 bp, Homo sapien
gaaacacagaccaaggcatccgggt

SEQ ID NO: 1009822 - DNA, 25 bp, Homo sapien
gatgaggcaactcctgaaacacaga

SEQ ID NO: 1009823 - DNA, 25 bp, Homo sapien
tcaatgcatcgcgaccgggcatggt

SEQ ID NO: 1009824 - DNA, 25 bp, Homo sapien
ccatcagacatagcgatcaggaagg

SEQ ID NO: 1009825 - DNA, 25 bp, Homo sapien
accaccatcagacatagcgatcagg

SEQ ID NO: 1009826 - DNA, 25 bp, Homo sapien
caccatcagacatagcgatcaggaa

SEQ ID NO: 1009827 - DNA, 25 bp, Homo sapien
ggaaccaccatcagacatagcgatc

SEQ ID NO: 1009828 - DNA, 25 bp, Homo sapien
ctcaaggtgttcactcgagtccagg

SEQ ID NO: 1009829 - DNA, 25 bp, Homo sapien
tcaaggtgttcactcgagtccaggc

SEQ ID NO: 1009830 - DNA, 25 bp, Homo sapien
tctccgtcaggcctcgaaggttcgt

SEQ ID NO: 1009831 - DNA, 25 bp, Homo sapien
tcgtgcagcagatagacggcagtcc

SEQ ID NO: 1009832 - DNA, 25 bp, Homo sapien
cgtcaccaactcgtgcagcagatag

SEQ ID NO: 1009833 - DNA, 25 bp, Homo sapien
gaaggttcgtcaccaactcgtgcag

SEQ ID NO: 1009834 - DNA, 25 bp, Homo sapien
gtgcactgaactcggtgggtcggac

SEQ ID NO: 1009835 - DNA, 25 bp, Homo sapien
gtgcactgaactcggtgggtcagac

SEQ ID NO: 1009836 - DNA, 25 bp, Homo sapien
cgtgcactgaactcggtgggtcaga

SEQ ID NO: 1009837 - DNA, 25 bp, Homo sapien
agcgtgcactgaactcggtgggtca

SEQ ID NO: 1009838 - DNA, 25 bp, Homo sapien
tccagcatgcactgaactcggtggg

SEQ ID NO: 1009839 - DNA, 25 bp, Homo sapien
tccagcgtgcactgaactcggtggg

SEQ ID NO: 1009840 - DNA, 25 bp, Homo sapien
cactgaactcggtgggttggaccca

SEQ ID NO: 1009841 - DNA, 25 bp, Homo sapien
ggtcggacccattcgctgtgcactg

SEQ ID NO: 1009842 - DNA, 25 bp, Homo sapien
tccagcatgcactgaactcggtggg

SEQ ID NO: 1009843 - DNA, 25 bp, Homo sapien
tccagcgtgcactgaactcggtggg

SEQ ID NO: 1009844 - DNA, 25 bp, Homo sapien
cagcatgcactgaactcggtgggtc

SEQ ID NO: 1009845 - DNA, 25 bp, Homo sapien
cactgaactcggtgggttggaccca

SEQ ID NO: 1009846 - DNA, 25 bp, Homo sapien
actgaactcggtgggtcggacccat

SEQ ID NO: 1009847 - DNA, 25 bp, Homo sapien
gtgggtcggacccattcactgtgca

SEQ ID NO: 1009848 - DNA, 25 bp, Homo sapien
catccagcgtgcactgaactcggtg

SEQ ID NO: 1009849 - DNA, 25 bp, Homo sapien
tccagcgtgcactgaactcggtggg

SEQ ID NO: 1009850 - DNA, 25 bp, Homo sapien
ccatccagcgtgcactgaactcggt

SEQ ID NO: 1009851 - DNA, 25 bp, Homo sapien
cactgaactcggtgggttggaccca

SEQ ID NO: 1009852 - DNA, 25 bp, Homo sapien
gtgggtcggacccattcactgtgca

SEQ ID NO: 1009853 - DNA, 25 bp, Homo sapien
tccagcgtgcactgaactcggtggg

SEQ ID NO: 1009854 - DNA, 25 bp, Homo sapien
gaggccctcctggttcggtgactta

SEQ ID NO: 1009855 - DNA, 25 bp, Homo sapien
tctggcatggtttcgcgaggccctc

SEQ ID NO: 1009856 - DNA, 25 bp, Homo sapien
cacgtgggaacgatggaatggaatc

SEQ ID NO: 1009857 - DNA, 25 bp, Homo sapien
atctgtgcccgtcaaccacgtggga

SEQ ID NO: 1009858 - DNA, 25 bp, Homo sapien
tctggcggaaacgaggctttgcgca

SEQ ID NO: 1009859 - DNA, 25 bp, Homo sapien
ccaacctgcatgtgctttctacagc

SEQ ID NO: 1009860 - DNA, 25 bp, Homo sapien
aaggtcggcgactctgatgcgttcc

SEQ ID NO: 1009861 - DNA, 25 bp, Homo sapien
tgctggatcaccacggaattggctg

SEQ ID NO: 1009862 - DNA, 25 bp, Homo sapien
taataccaaatctcatcacaaatat

SEQ ID NO: 1009863 - DNA, 25 bp, Homo sapien
ggtttggccctaataccaaatctca

SEQ ID NO: 1009864 - DNA, 25 bp, Homo sapien
ttggccctaataccaaatctcatca

SEQ ID NO: 1009865 - DNA, 25 bp, Homo sapien
gccctaataccaaatctcatcacaa

SEQ ID NO: 1009866 - DNA, 25 bp, Homo sapien
caggatgaggcgctgctgcgtgcgg

SEQ ID NO: 1009867 - DNA, 25 bp, Homo sapien
atgaggcgctgctgcgtgcggaggg

SEQ ID NO: 1009868 - DNA, 25 bp, Homo sapien
aggatcatgtggccggtggagatgt

SEQ ID NO: 1009869 - DNA, 25 bp, Homo sapien
tgtccatgttggactgcacaggctc

SEQ ID NO: 1009870 - DNA, 25 bp, Homo sapien
tcgctgaactgggatgagacgctgc

SEQ ID NO: 1009871 - DNA, 25 bp, Homo sapien
tgcgggccctcaggtcggtctggtg

SEQ ID NO: 1009872 - DNA, 25 bp, Homo sapien
tcaggtcggtctggtggccgcgtgg

SEQ ID NO: 1009873 - DNA, 25 bp, Homo sapien
ctgatgcgtgacgtgtgcgggccct

SEQ ID NO: 1009874 - DNA, 25 bp, Homo sapien
gtcaaaggccttgcactccccaagg

SEQ ID NO: 1009875 - DNA, 25 bp, Homo sapien
cgccaaagctcaggaaacactccat

SEQ ID NO: 1009876 - DNA, 25 bp, Homo sapien
caaggcaatcgccaaagctcaggaa

SEQ ID NO: 1009877 - DNA, 25 bp, Homo sapien
tccccacagccgtgtgcgtcaaagg

SEQ ID NO: 1009878 - DNA, 25 bp, Homo sapien
gaacaaaactctcctggtcagacgg

SEQ ID NO: 1009879 - DNA, 25 bp, Homo sapien
taaccggcagtggtgccaagcagga

SEQ ID NO: 1009880 - DNA, 25 bp, Homo sapien
gatggctctgtttatgatccgcgac

SEQ ID NO: 1009881 - DNA, 25 bp, Homo sapien
cctcggtaaacacaaagggtgcatc

SEQ ID NO: 1009882 - DNA, 25 bp, Homo sapien
aaacgcaggtgctccacgtgaagca

SEQ ID NO: 1009883 - DNA, 25 bp, Homo sapien
cacagcatctacgtggtgcagaggg

SEQ ID NO: 1009884 - DNA, 25 bp, Homo sapien
tggcctccagatcacggctcgctca

SEQ ID NO: 1009885 - DNA, 25 bp, Homo sapien
gctcgctcagggaccgagtgtccca

SEQ ID NO: 1009886 - DNA, 25 bp, Homo sapien
ccccatggaacaggaaaagccgctg

SEQ ID NO: 1009887 - DNA, 25 bp, Homo sapien
aagaagggagcactattctgcagcc

SEQ ID NO: 1009888 - DNA, 25 bp, Homo sapien
tatcccgaggttccaaggctgtctg

SEQ ID NO: 1009889 - DNA, 25 bp, Homo sapien
gagaggagtagctagctgtctgccc

SEQ ID NO: 1009890 - DNA, 25 bp, Homo sapien
gaggggagcagctcatgccgaggag

SEQ ID NO: 1009891 - DNA, 25 bp, Homo sapien
ggaggggagcagctcatgccgagga

SEQ ID NO: 1009892 - DNA, 25 bp, Homo sapien
aggggagcagctcatgccgaggagg

SEQ ID NO: 1009893 - DNA, 25 bp, Homo sapien
ctaatcaggtctaagggaggggagc

SEQ ID NO: 1009894 - DNA, 25 bp, Homo sapien
ggctgaccccacatactgatgatct

SEQ ID NO: 1009895 - DNA, 25 bp, Homo sapien
tgtaccccaacgagcagcatgcttc

SEQ ID NO: 1009896 - DNA, 25 bp, Homo sapien
gaagatcgagctctatctctcagga

SEQ ID NO: 1009897 - DNA, 25 bp, Homo sapien
cagaaaaacgttcagactcatggtg

SEQ ID NO: 1009898 - DNA, 25 bp, Homo sapien
taattagagctgtcactgggaaggc

SEQ ID NO: 1009899 - DNA, 25 bp, Homo sapien
cacgcatggaacagaactggtgtga

SEQ ID NO: 1009900 - DNA, 25 bp, Homo sapien
tgatcttccgtctctcacgcatgga

SEQ ID NO: 1009901 - DNA, 25 bp, Homo sapien
caaagtatatcaaagggcgccacgc

SEQ ID NO: 1009902 - DNA, 25 bp, Homo sapien
cttgactggtgtaagtattctgggc

SEQ ID NO: 1009903 - DNA, 25 bp, Homo sapien
ggaatatcttctcggaattaaatga

SEQ ID NO: 1009904 - DNA, 25 bp, Homo sapien
tatgcaaaggaatcaaacgccttga

SEQ ID NO: 1009905 - DNA, 25 bp, Homo sapien
tcccagatgggaatatcttctcgga

SEQ ID NO: 1009906 - DNA, 25 bp, Homo sapien
gatgaacttggtggagtcttcttgc

SEQ ID NO: 1009907 - DNA, 25 bp, Homo sapien
gacgcccaggatgcaggcgagggag

SEQ ID NO: 1009908 - DNA, 25 bp, Homo sapien
agaccagggtgagcgcgatgaactt

SEQ ID NO: 1009909 - DNA, 25 bp, Homo sapien
gagtcttcttgctccgcctgaggag

SEQ ID NO: 1009910 - DNA, 25 bp, Homo sapien
cagagcttgcacaatgattgtcggg

SEQ ID NO: 1009911 - DNA, 25 bp, Homo sapien
tgtccagagcttgcacaatgattgt

SEQ ID NO: 1009912 - DNA, 25 bp, Homo sapien
gtttgtccagagcttgcacaatgat

SEQ ID NO: 1009913 - DNA, 25 bp, Homo sapien
cagtttgtccagagcttgcacaatg

SEQ ID NO: 1009914 - DNA, 25 bp, Homo sapien
cacctccccgcgccggtccacaagg

SEQ ID NO: 1009915 - DNA, 25 bp, Homo sapien
ctccccgcgccggtccacaaggagg

SEQ ID NO: 1009916 - DNA, 25 bp, Homo sapien
tccccgcgccggtccacaaggaggc

SEQ ID NO: 1009917 - DNA, 25 bp, Homo sapien
cctccccgcgccggtccacaaggag

SEQ ID NO: 1009918 - DNA, 25 bp, Homo sapien
taaaatctgggatcggcgacgcaag

SEQ ID NO: 1009919 - DNA, 25 bp, Homo sapien
tggtttggcgaagacccctcggaca

SEQ ID NO: 1009920 - DNA, 25 bp, Homo sapien
tcctctcttgttcgatcgcgtccta

SEQ ID NO: 1009921 - DNA, 25 bp, Homo sapien
tgttcgatcgcgtcctaaaatctgg

SEQ ID NO: 1009922 - DNA, 25 bp, Homo sapien
gggggaggcgctgagaaagcgcagt

SEQ ID NO: 1009923 - DNA, 25 bp, Homo sapien
cccctcggttccctgcaattcgccg

SEQ ID NO: 1009924 - DNA, 25 bp, Homo sapien
ctgggatactcccatggctcggagg

SEQ ID NO: 1009925 - DNA, 25 bp, Homo sapien
gcaattcgccgcccgctgggatact

SEQ ID NO: 1009926 - DNA, 25 bp, Homo sapien
gcgcgctcccggaccctggtgagga

SEQ ID NO: 1009927 - DNA, 25 bp, Homo sapien
agaggaaaatgcgcccacactggcg

SEQ ID NO: 1009928 - DNA, 25 bp, Homo sapien
tgagaggaaaatgcgcccacactgg

SEQ ID NO: 1009929 - DNA, 25 bp, Homo sapien
ctgagaggaaaatgcgcccacactg

SEQ ID NO: 1009930 - DNA, 25 bp, Homo sapien
ggaaaatgcgcccacactggcgcct

SEQ ID NO: 1009931 - DNA, 25 bp, Homo sapien
tgcttccctgcgctggagccacaga

SEQ ID NO: 1009932 - DNA, 25 bp, Homo sapien
actagcggggtcatccgcttctgac

SEQ ID NO: 1009933 - DNA, 25 bp, Homo sapien
ctgcgctggagccacagactagcgg

SEQ ID NO: 1009934 - DNA, 25 bp, Homo sapien
gtcatccgcttctgaccacaaactt

SEQ ID NO: 1009935 - DNA, 25 bp, Homo sapien
aacccaacatctgtgtgtacaatgc

SEQ ID NO: 1009936 - DNA, 25 bp, Homo sapien
cggagctggcgagagccggagagct

SEQ ID NO: 1009937 - DNA, 25 bp, Homo sapien
cggagagctgaaacccaacatctgt

SEQ ID NO: 1009938 - DNA, 25 bp, Homo sapien
tgtgtgtacaatgcgctctccgagg

SEQ ID NO: 1009939 - DNA, 25 bp, Homo sapien
gcaacaatagggcagtgaaacaact

SEQ ID NO: 1009940 - DNA, 25 bp, Homo sapien
gaaggtaagtccattgcaacaatag

SEQ ID NO: 1009941 - DNA, 25 bp, Homo sapien
gaaacaactgcatcttagtagagcc

SEQ ID NO: 1009942 - DNA, 25 bp, Homo sapien
caaggacaatatttggaagagcatc

SEQ ID NO: 1009943 - DNA, 25 bp, Homo sapien
cccatgcatactgggtcttggcaga

SEQ ID NO: 1009944 - DNA, 25 bp, Homo sapien
tactggatcttagtagagccctcac

SEQ ID NO: 1009945 - DNA, 25 bp, Homo sapien
catactggatcttagtagagccctc

SEQ ID NO: 1009946 - DNA, 25 bp, Homo sapien
tgcatactggatcttagtagagccc

SEQ ID NO: 1009947 - DNA, 25 bp, Homo sapien
ctacccatgcatactgggtcttagt

SEQ ID NO: 1009948 - DNA, 25 bp, Homo sapien
catactgggtcttagtagagccctc

SEQ ID NO: 1009949 - DNA, 25 bp, Homo sapien
cccatgcatactgggtcttagtaga

SEQ ID NO: 1009950 - DNA, 25 bp, Homo sapien
tgcatactgggtcttagtagagccc

SEQ ID NO: 1009951 - DNA, 25 bp, Homo sapien
tacccatgcatactggatcttggca

SEQ ID NO: 1009952 - DNA, 25 bp, Homo sapien
catactggatcttagtagagccctc

SEQ ID NO: 1009953 - DNA, 25 bp, Homo sapien
actggatcttagtagagccctcacc

SEQ ID NO: 1009954 - DNA, 25 bp, Homo sapien
tgcatactggatcttagtagagccc

SEQ ID NO: 1009955 - DNA, 25 bp, Homo sapien
catgcatactgggtcttagcagagc

SEQ ID NO: 1009956 - DNA, 25 bp, Homo sapien
tacccatgcatactggatcttggca

SEQ ID NO: 1009957 - DNA, 25 bp, Homo sapien
acacatgcatactgggtcttggcag

SEQ ID NO: 1009958 - DNA, 25 bp, Homo sapien
tacacatgcatactgggtcttggca

SEQ ID NO: 1009959 - DNA, 25 bp, Homo sapien
ctacccatgcatactgggtcttggc

SEQ ID NO: 1009960 - DNA, 25 bp, Homo sapien
tacccatgcatactgggtcttggca

SEQ ID NO: 1009961 - DNA, 25 bp, Homo sapien
acccatgcatactgggtcttggcag

SEQ ID NO: 1009962 - DNA, 25 bp, Homo sapien
cccatgcatactgggtcttggcaga

SEQ ID NO: 1009963 - DNA, 25 bp, Homo sapien
gcatactgtgtcttggcagattcct

SEQ ID NO: 1009964 - DNA, 25 bp, Homo sapien
catgcatactgtgtcttggcagatt

SEQ ID NO: 1009965 - DNA, 25 bp, Homo sapien
tgcatactgtgtcttggcagattcc

SEQ ID NO: 1009966 - DNA, 25 bp, Homo sapien
atgcatactgtgtcttggcagattc

SEQ ID NO: 1009967 - DNA, 25 bp, Homo sapien
catgcatactgggtcttagcagagc

SEQ ID NO: 1009968 - DNA, 25 bp, Homo sapien
tctacccatgcatactggatcttgg

SEQ ID NO: 1009969 - DNA, 25 bp, Homo sapien
tgcatactgggtcttagtagagccc

SEQ ID NO: 1009970 - DNA, 25 bp, Homo sapien
tacccatgcatactggatcttggca

SEQ ID NO: 1009971 - DNA, 25 bp, Homo sapien
tctacccatgcatactggaagcaga

SEQ ID NO: 1009972 - DNA, 25 bp, Homo sapien
tacccatgcatactggaagcagagt

SEQ ID NO: 1009973 - DNA, 25 bp, Homo sapien
ctacccatgcatactggaagcagag

SEQ ID NO: 1009974 - DNA, 25 bp, Homo sapien
acccatgcatactggaagcagagtt

SEQ ID NO: 1009975 - DNA, 25 bp, Homo sapien
ctgggaagatttttaagataagatt

SEQ ID NO: 1009976 - DNA, 25 bp, Homo sapien
gaagatttttaagataagattttgc

SEQ ID NO: 1009977 - DNA, 25 bp, Homo sapien
tttttaagataagattttgccacat

SEQ ID NO: 1009978 - DNA, 25 bp, Homo sapien
gatttttaagataagattttgccac

SEQ ID NO: 1009979 - DNA, 25 bp, Homo sapien
gtggccaactgcatggagccgccgc

SEQ ID NO: 1009980 - DNA, 25 bp, Homo sapien
ggccaactgcatggagccgccgcat

SEQ ID NO: 1009981 - DNA, 25 bp, Homo sapien
aagtggccaactgcatggagccgcc

SEQ ID NO: 1009982 - DNA, 25 bp, Homo sapien
agtggccaactgcatggagccgccg

SEQ ID NO: 1009983 - DNA, 25 bp, Homo sapien
tgcctggccacgtagactctgcggg

SEQ ID NO: 1009984 - DNA, 25 bp, Homo sapien
cctggccacgtagactctgcgggaa

SEQ ID NO: 1009985 - DNA, 25 bp, Homo sapien
ctggccacgtagactctgcgggaac

SEQ ID NO: 1009986 - DNA, 25 bp, Homo sapien
tggccacgtagactctgcgggaaca

SEQ ID NO: 1009987 - DNA, 25 bp, Homo sapien
ccacgtagactctgcgggaacactg

SEQ ID NO: 1009988 - DNA, 25 bp, Homo sapien
tggccacgtagactctgcgggaaca

SEQ ID NO: 1009989 - DNA, 25 bp, Homo sapien
tagactctgcgggaacactgcctgg

SEQ ID NO: 1009990 - DNA, 25 bp, Homo sapien
gccacgtagactctgcgggaacact

SEQ ID NO: 1009991 - DNA, 25 bp, Homo sapien
acattcagtcccacccgtgtcatgg

SEQ ID NO: 1009992 - DNA, 25 bp, Homo sapien
caatattgatgtcgacgtgggaggc

SEQ ID NO: 1009993 - DNA, 25 bp, Homo sapien
ataacctggaactgtaagggtcctg

SEQ ID NO: 1009994 - DNA, 25 bp, Homo sapien
cgtgtcatggatgaacccgggacca

SEQ ID NO: 1009995 - DNA, 25 bp, Homo sapien
taggcattgaagtcgtcatcacggc

SEQ ID NO: 1009996 - DNA, 25 bp, Homo sapien
tgagctgacgcttaggacaaaatcc

SEQ ID NO: 1009997 - DNA, 25 bp, Homo sapien
tcaagaccagggactcatggaagca

SEQ ID NO: 1009998 - DNA, 25 bp, Homo sapien
tcccgggttgtttgtggtgcagcca

SEQ ID NO: 1009999 - DNA, 25 bp, Homo sapien
ctgtttctggacacgtgttttaggg

SEQ ID NO: 1010000 - DNA, 25 bp, Homo sapien
gctgtttctggacacgtgttttagg

SEQ ID NO: 1010001 - DNA, 25 bp, Homo sapien
tgctgtttctggacacgtgttttag

SEQ ID NO: 1010002 - DNA, 25 bp, Homo sapien
atttcagagctccgtgctgtttctg

SEQ ID NO: 1010003 - DNA, 25 bp, Homo sapien
tccccagcgactttggtttggagga

SEQ ID NO: 1010004 - DNA, 25 bp, Homo sapien
tattccaaggagctttgagtggttt

SEQ ID NO: 1010005 - DNA, 25 bp, Homo sapien
tcataggctcctgcaattcagatag

SEQ ID NO: 1010006 - DNA, 25 bp, Homo sapien
agacagagcacctggaaggatttga

SEQ ID NO: 1010007 - DNA, 25 bp, Homo sapien
actggttgtacgtggagtcctctaa

SEQ ID NO: 1010008 - DNA, 25 bp, Homo sapien
ttactggttgtacgtggagtcctct

SEQ ID NO: 1010009 - DNA, 25 bp, Homo sapien
tactggttgtacgtggagtcctcta

SEQ ID NO: 1010010 - DNA, 25 bp, Homo sapien
ctggttgtacgtggagtcctctaag

SEQ ID NO: 1010011 - DNA, 25 bp, Homo sapien
tggagctcgtacagtcagcaacggt

SEQ ID NO: 1010012 - DNA, 25 bp, Homo sapien
tggaggccgctgctttgctctcaaa

SEQ ID NO: 1010013 - DNA, 25 bp, Homo sapien
tgtaaacattgctccagacgaacgc

SEQ ID NO: 1010014 - DNA, 25 bp, Homo sapien
cagccagtgatctgctggatgagaa

SEQ ID NO: 1010015 - DNA, 25 bp, Homo sapien
catccctgagctgcgggcagttgag

SEQ ID NO: 1010016 - DNA, 25 bp, Homo sapien
tgacccctgcgtctctgagctgtag

SEQ ID NO: 1010017 - DNA, 25 bp, Homo sapien
tccgggcgattgtgaggcctgtgtc

SEQ ID NO: 1010018 - DNA, 25 bp, Homo sapien
cagtgtgggaatccgcatgtgttga

SEQ ID NO: 1010019 - DNA, 25 bp, Homo sapien
agccgtcaggacactgagccacgtt

SEQ ID NO: 1010020 - DNA, 25 bp, Homo sapien
gccgtcaggacactgagccacgtta

SEQ ID NO: 1010021 - DNA, 25 bp, Homo sapien
ccgtcaggacactgagccacgttac

SEQ ID NO: 1010022 - DNA, 25 bp, Homo sapien
gagccgtcaggacactgagccacgt

SEQ ID NO: 1010023 - DNA, 25 bp, Homo sapien
ccaaacagggtggtccaagcactga

SEQ ID NO: 1010024 - DNA, 25 bp, Homo sapien
gggcaggcggacatgccccgacact

SEQ ID NO: 1010025 - DNA, 25 bp, Homo sapien
acactcggcttccaccaaacagggt

SEQ ID NO: 1010026 - DNA, 25 bp, Homo sapien
cagcatgggcctgtctagcaaagca

SEQ ID NO: 1010027 - DNA, 25 bp, Homo sapien
cataggaattaaggccaaaccattt

SEQ ID NO: 1010028 - DNA, 25 bp, Homo sapien
ttcataggaattaaggccaaaccat

SEQ ID NO: 1010029 - DNA, 25 bp, Homo sapien
tcataggaattaaggccaaaccatt

SEQ ID NO: 1010030 - DNA, 25 bp, Homo sapien
tgtgtgctgacgctggcatcaggtt

SEQ ID NO: 1010031 - DNA, 25 bp, Homo sapien
catcaggttgcacgtgccagtcagc

SEQ ID NO: 1010032 - DNA, 25 bp, Homo sapien
ttcattaaccacagcgaacgggagg

SEQ ID NO: 1010033 - DNA, 25 bp, Homo sapien
taattactgtcaccgctgtgtgctg

SEQ ID NO: 1010034 - DNA, 25 bp, Homo sapien
cagctcgccctgctggaattccaca

SEQ ID NO: 1010035 - DNA, 25 bp, Homo sapien
ctaggtgtgacaggttgactaagca

SEQ ID NO: 1010036 - DNA, 25 bp, Homo sapien
ggcagttaaggaaggtgtattgact

SEQ ID NO: 1010037 - DNA, 25 bp, Homo sapien
taattactgctaatctgagaggcca

SEQ ID NO: 1010038 - DNA, 25 bp, Homo sapien
tcagactcgagagactggcagctcc

SEQ ID NO: 1010039 - DNA, 25 bp, Homo sapien
cttctgggctcagactcgagagact

SEQ ID NO: 1010040 - DNA, 25 bp, Homo sapien
gctgtgggcccgcttggccggttga

SEQ ID NO: 1010041 - DNA, 25 bp, Homo sapien
gaagtaacgccctgccagtttctgg

SEQ ID NO: 1010042 - DNA, 25 bp, Homo sapien
ttaacagccacccaccatgtcacgg

SEQ ID NO: 1010043 - DNA, 25 bp, Homo sapien
accatgtcacgggtgcagagtgctg

SEQ ID NO: 1010044 - DNA, 25 bp, Homo sapien
cacccaccatgtcacgggtgcagag

SEQ ID NO: 1010045 - DNA, 25 bp, Homo sapien
aacagccacccaccatgtcacgggt

SEQ ID NO: 1010046 - DNA, 25 bp, Homo sapien
ttcccagcaccacccgtgtcttcat

SEQ ID NO: 1010047 - DNA, 25 bp, Homo sapien
ccccacagacgcctttgctcaagcc

SEQ ID NO: 1010048 - DNA, 25 bp, Homo sapien
gcagtccccacagacgcctttgctc

SEQ ID NO: 1010049 - DNA, 25 bp, Homo sapien
agcaccacccgtgtcttcatctggg

SEQ ID NO: 1010050 - DNA, 25 bp, Homo sapien
caggggcccctatgcactcaacatc

SEQ ID NO: 1010051 - DNA, 25 bp, Homo sapien
gagggccaggggcccctatgcactc

SEQ ID NO: 1010052 - DNA, 25 bp, Homo sapien
aacatcagcttcacaaagatgtagt

SEQ ID NO: 1010053 - DNA, 25 bp, Homo sapien
gggccaggggcccctatgcactcaa

SEQ ID NO: 1010054 - DNA, 25 bp, Homo sapien
gacagtgtcggcaaaagtgggctca

SEQ ID NO: 1010055 - DNA, 25 bp, Homo sapien
ggaggtcttcgagtcaacaatggga

SEQ ID NO: 1010056 - DNA, 25 bp, Homo sapien
gaagtagaaatctgcccaagatgag

SEQ ID NO: 1010057 - DNA, 25 bp, Homo sapien
gagtgactcagcctcatggtacagc

SEQ ID NO: 1010058 - DNA, 25 bp, Homo sapien
tgttcatgacctacagtaacgccgc

SEQ ID NO: 1010059 - DNA, 25 bp, Homo sapien
cagtaacgccgctgtctctgtgatg

SEQ ID NO: 1010060 - DNA, 25 bp, Homo sapien
tgtttgagccgtttctgttcatgac

SEQ ID NO: 1010061 - DNA, 25 bp, Homo sapien
caagtaagcctggcgtggccagaac

SEQ ID NO: 1010062 - DNA, 25 bp, Homo sapien
ctcctcctcgctcttctcctcgtcc

SEQ ID NO: 1010063 - DNA, 25 bp, Homo sapien
ccctcctcctcgctcttctcctcgt

SEQ ID NO: 1010064 - DNA, 25 bp, Homo sapien
ccccctcctcctcgctcttctcctc

SEQ ID NO: 1010065 - DNA, 25 bp, Homo sapien
cctcctcgctcttctcctcgtcctt

SEQ ID NO: 1010066 - DNA, 25 bp, Homo sapien
caggtatcgaatgcctatgtagaca

SEQ ID NO: 1010067 - DNA, 25 bp, Homo sapien
gaatacaggcactggatgcccacgt

SEQ ID NO: 1010068 - DNA, 25 bp, Homo sapien
cacgtgaatacaggtgccgccgaat

SEQ ID NO: 1010069 - DNA, 25 bp, Homo sapien
gcactgaacgcccatgtaaacatgt

SEQ ID NO: 1010070 - DNA, 25 bp, Homo sapien
ctctgcacaggaccgtagaccccat

SEQ ID NO: 1010071 - DNA, 25 bp, Homo sapien
gctctgcacaggaccgtagacccca

SEQ ID NO: 1010072 - DNA, 25 bp, Homo sapien
aacgtgaaatgagaagtaggtagcc

SEQ ID NO: 1010073 - DNA, 25 bp, Homo sapien
taggatccgtgaaacctccaacgtg

SEQ ID NO: 1010074 - DNA, 25 bp, Homo sapien
gattcaactgcaccgaaatcccagc

SEQ ID NO: 1010075 - DNA, 25 bp, Homo sapien
taggtagcctcgaatctgcacccag

SEQ ID NO: 1010076 - DNA, 25 bp, Homo sapien
cttcacggggacggcgggacttctg

SEQ ID NO: 1010077 - DNA, 25 bp, Homo sapien
tgggctcttcacggggacggcggga

SEQ ID NO: 1010078 - DNA, 25 bp, Homo sapien
ggctgggctcttcacggggacggcg

SEQ ID NO: 1010079 - DNA, 25 bp, Homo sapien
ctgggctcttcacggggacggcggg

SEQ ID NO: 1010080 - DNA, 25 bp, Homo sapien
aagtatgcgacgtggccggcgccca

SEQ ID NO: 1010081 - DNA, 25 bp, Homo sapien
ctgtgatgagatggcgggattctcc

SEQ ID NO: 1010082 - DNA, 25 bp, Homo sapien
tagccaactggtcaaagaactgtga

SEQ ID NO: 1010083 - DNA, 25 bp, Homo sapien
caggaagtatgcgacgtggccagcg

SEQ ID NO: 1010084 - DNA, 25 bp, Homo sapien
cttccacggagaggaaaggtgcaga

SEQ ID NO: 1010085 - DNA, 25 bp, Homo sapien
aggcccctccacgtcatcggtgtgg

SEQ ID NO: 1010086 - DNA, 25 bp, Homo sapien
atgcaggcccctccacgtcatgggt

SEQ ID NO: 1010087 - DNA, 25 bp, Homo sapien
tcatgggtgtggaacgcaggccttt

SEQ ID NO: 1010088 - DNA, 25 bp, Homo sapien
tccacatcgtgggtgtggaatgcag

SEQ ID NO: 1010089 - DNA, 25 bp, Homo sapien
tccagccaggcaatgaagatgagcc

SEQ ID NO: 1010090 - DNA, 25 bp, Homo sapien
gatgaaagggctgggtctgcgtcca

SEQ ID NO: 1010091 - DNA, 25 bp, Homo sapien
ccgccaggaagcgagattcacggca

SEQ ID NO: 1010092 - DNA, 25 bp, Homo sapien
gattcacggcacctctgtcagatga

SEQ ID NO: 1010093 - DNA, 25 bp, Homo sapien
aacgcttgtcctgaatggtggcccg

SEQ ID NO: 1010094 - DNA, 25 bp, Homo sapien
catgaaggttctgtaagccagagct

SEQ ID NO: 1010095 - DNA, 25 bp, Homo sapien
caggtcgtccacaggaacgcttgtc

SEQ ID NO: 1010096 - DNA, 25 bp, Homo sapien
ctgacagaaatgacggcttccgcgg

SEQ ID NO: 1010097 - DNA, 25 bp, Homo sapien
gtctccgaatttccgacgtgggtgc

SEQ ID NO: 1010098 - DNA, 25 bp, Homo sapien
caggtctccgaatttccatttccga

SEQ ID NO: 1010099 - DNA, 25 bp, Homo sapien
gaatttccgacgtggggtgcctcac

SEQ ID NO: 1010100 - DNA, 25 bp, Homo sapien
ggtgtgtgcaccacagactacatat

SEQ ID NO: 1010101 - DNA, 25 bp, Homo sapien
aagtcccaaaatccagcacaagccc

SEQ ID NO: 1010102 - DNA, 25 bp, Homo sapien
caggcccacggtcttggggcacttt

SEQ ID NO: 1010103 - DNA, 25 bp, Homo sapien
cctttgccgtcttctttgtgtgtaa

SEQ ID NO: 1010104 - DNA, 25 bp, Homo sapien
tgtacaggctgaagagaaaagtccc

SEQ ID NO: 1010105 - DNA, 25 bp, Homo sapien
gagtttgccgcagacaaccagcaag

SEQ ID NO: 1010106 - DNA, 25 bp, Homo sapien
tgtgtggcacacagttctactggtt

SEQ ID NO: 1010107 - DNA, 25 bp, Homo sapien
tcaaccctcttacatgagtttgccg

SEQ ID NO: 1010108 - DNA, 25 bp, Homo sapien
caaaggttaactcacagtagtgcaa

SEQ ID NO: 1010109 - DNA, 25 bp, Homo sapien
caagcctatggagaggccacgttga

SEQ ID NO: 1010110 - DNA, 25 bp, Homo sapien
aggtccgtgcgcctcatggccacat

SEQ ID NO: 1010111 - DNA, 25 bp, Homo sapien
atggccacatcacggcacccgttca

SEQ ID NO: 1010112 - DNA, 25 bp, Homo sapien
acgttgagtccagaggtccgtgcgc

SEQ ID NO: 1010113 - DNA, 25 bp, Homo sapien
tgcatcatccgcctgacctgtttcc

SEQ ID NO: 1010114 - DNA, 25 bp, Homo sapien
ccttctgcatcatccgcctgacctg

SEQ ID NO: 1010115 - DNA, 25 bp, Homo sapien
caccggggagtcacagctccttctg

SEQ ID NO: 1010116 - DNA, 25 bp, Homo sapien
cagtggccaccggggagtcacagct

SEQ ID NO: 1010117 - DNA, 25 bp, Homo sapien
atgagaggcctggattgcaccggaa

SEQ ID NO: 1010118 - DNA, 25 bp, Homo sapien
gaacaaaggactccagacggatggg

SEQ ID NO: 1010119 - DNA, 25 bp, Homo sapien
aataatggaaccgaagccctctgtg

SEQ ID NO: 1010120 - DNA, 25 bp, Homo sapien
tagtttttcacggaactgaccaggc

SEQ ID NO: 1010121 - DNA, 25 bp, Homo sapien
ggcacggatgccacgtgcacagacc

SEQ ID NO: 1010122 - DNA, 25 bp, Homo sapien
agctccgggaagcacaagcctggtg

SEQ ID NO: 1010123 - DNA, 25 bp, Homo sapien
ggcctgcaacgcctttagaggcacg

SEQ ID NO: 1010124 - DNA, 25 bp, Homo sapien
ggcgaggaccggctttaaagtcaca

SEQ ID NO: 1010125 - DNA, 25 bp, Homo sapien
tgcaggagggtagcacacggcaccc

SEQ ID NO: 1010126 - DNA, 25 bp, Homo sapien
gagggtagcacacggcaccctctcg

SEQ ID NO: 1010127 - DNA, 25 bp, Homo sapien
ttacaggtctcacggagccagtggg

SEQ ID NO: 1010128 - DNA, 25 bp, Homo sapien
aacctttgcttttacaggtctcacg

SEQ ID NO: 1010129 - DNA, 25 bp, Homo sapien
gtgagctgctgaaacgcagcctggc

SEQ ID NO: 1010130 - DNA, 25 bp, Homo sapien
ctgtgagctgctgaaacgcagcctg

SEQ ID NO: 1010131 - DNA, 25 bp, Homo sapien
aacgcagcctggcggccaggaacca

SEQ ID NO: 1010132 - DNA, 25 bp, Homo sapien
tgaaacgcagcctggcggccaggaa

SEQ ID NO: 1010133 - DNA, 25 bp, Homo sapien
agagatgctcatcctcatgcatgca

SEQ ID NO: 1010134 - DNA, 25 bp, Homo sapien
ccacagagatgctcatcctcatgca

SEQ ID NO: 1010135 - DNA, 25 bp, Homo sapien
gatgctcatcctcatgcatgcacac

SEQ ID NO: 1010136 - DNA, 25 bp, Homo sapien
tgctcatcctcatgcatgcacacgt

SEQ ID NO: 1010137 - DNA, 25 bp, Homo sapien
ctgaggagagcgcagcactcggcat

SEQ ID NO: 1010138 - DNA, 25 bp, Homo sapien
tactgaggagagcgcagcactcggc

SEQ ID NO: 1010139 - DNA, 25 bp, Homo sapien
tgaggagagcgcagcactcggcatc

SEQ ID NO: 1010140 - DNA, 25 bp, Homo sapien
gtactgaggagagcgcagcactcgg

SEQ ID NO: 1010141 - DNA, 25 bp, Homo sapien
caagagagacagtgtgaaccccagc

SEQ ID NO: 1010142 - DNA, 25 bp, Homo sapien
ggcccatgccagaagcgacatctga

SEQ ID NO: 1010143 - DNA, 25 bp, Homo sapien
gacatctgatagagtggccacctca

SEQ ID NO: 1010144 - DNA, 25 bp, Homo sapien
tggctgttgtctaagaggcccatgc

SEQ ID NO: 1010145 - DNA, 25 bp, Homo sapien
tctacccgccgcacaccaaaatgaa

SEQ ID NO: 1010146 - DNA, 25 bp, Homo sapien
aataaattcattactctacccgccg

SEQ ID NO: 1010147 - DNA, 25 bp, Homo sapien
gttgctgctgaaggtagcatcataa

SEQ ID NO: 1010148 - DNA, 25 bp, Homo sapien
gaaggtagcatcataaaatgccact

SEQ ID NO: 1010149 - DNA, 25 bp, Homo sapien
ccagagaggacgcacatggtcaaca

SEQ ID NO: 1010150 - DNA, 25 bp, Homo sapien
acttcagccaccaggattgtgagca

SEQ ID NO: 1010151 - DNA, 25 bp, Homo sapien
tcgtggaacgttaagtccaagtgct

SEQ ID NO: 1010152 - DNA, 25 bp, Homo sapien
gcgtctctgcctacgagaaaggaga

SEQ ID NO: 1010153 - DNA, 25 bp, Homo sapien
gtctgggccatcgaggtccttgtca

SEQ ID NO: 1010154 - DNA, 25 bp, Homo sapien
acagagccaagcccaccacggtggg

SEQ ID NO: 1010155 - DNA, 25 bp, Homo sapien
gccaagcccacagcgggcctgtcct

SEQ ID NO: 1010156 - DNA, 25 bp, Homo sapien
ggctgtctgggccatcgaggtcctt

SEQ ID NO: 1010157 - DNA, 25 bp, Homo sapien
ccaaggaaccccgtgaactctgaca

SEQ ID NO: 1010158 - DNA, 25 bp, Homo sapien
agatactgctgaacccaccgctttc

SEQ ID NO: 1010159 - DNA, 25 bp, Homo sapien
gtgatctcttccttcagatactgct

SEQ ID NO: 1010160 - DNA, 25 bp, Homo sapien
caaggaaccccgtgaactctgacac

SEQ ID NO: 1010161 - DNA, 25 bp, Homo sapien
ccagcatttggtggaacgagaacaa

SEQ ID NO: 1010162 - DNA, 25 bp, Homo sapien
tgaaataaacactctagcgtttggt

SEQ ID NO: 1010163 - DNA, 25 bp, Homo sapien
tgtggccagatcgtaaccagtgggt

SEQ ID NO: 1010164 - DNA, 25 bp, Homo sapien
gacacaggttggatgtggatggaag

SEQ ID NO: 1010165 - DNA, 25 bp, Homo sapien
agaggtttcctccagtttgtctttg

SEQ ID NO: 1010166 - DNA, 25 bp, Homo sapien
cgactccggtttgaagaattttcag

SEQ ID NO: 1010167 - DNA, 25 bp, Homo sapien
gaagaattttcagtccagaggtttc

SEQ ID NO: 1010168 - DNA, 25 bp, Homo sapien
tccagaggtttcctccagtttgtct

SEQ ID NO: 1010169 - DNA, 25 bp, Homo sapien
ctgaagtgggaccttcctgtccgtg

SEQ ID NO: 1010170 - DNA, 25 bp, Homo sapien
tggttctgaagtgggaccttcctgt

SEQ ID NO: 1010171 - DNA, 25 bp, Homo sapien
gttctgaagtgggaccttcctgtcc

SEQ ID NO: 1010172 - DNA, 25 bp, Homo sapien
cttggttctgaagtgggaccttcct

SEQ ID NO: 1010173 - DNA, 25 bp, Homo sapien
tggatttccatgcacgcttcacaag

SEQ ID NO: 1010174 - DNA, 25 bp, Homo sapien
ttaactcgccgatcagtgcttctgc

SEQ ID NO: 1010175 - DNA, 25 bp, Homo sapien
gaaagtgctgtatctgctgcgtgtc

SEQ ID NO: 1010176 - DNA, 25 bp, Homo sapien
gactaatccatgtgccctcgtgaca

SEQ ID NO: 1010177 - DNA, 25 bp, Homo sapien
tcagagcccatatgctcccggtgtc

SEQ ID NO: 1010178 - DNA, 25 bp, Homo sapien
agagcccatatgctcccggtgtcac

SEQ ID NO: 1010179 - DNA, 25 bp, Homo sapien
tcccgtggccctgcacagggtctgc

SEQ ID NO: 1010180 - DNA, 25 bp, Homo sapien
agcccatatgctcccggtgtcactg

SEQ ID NO: 1010181 - DNA, 25 bp, Homo sapien
gggagtctcacaaagcacagaatcc

SEQ ID NO: 1010182 - DNA, 25 bp, Homo sapien
aaagcacagaatccgggtcccggag

SEQ ID NO: 1010183 - DNA, 25 bp, Homo sapien
cagggaaatctctttggagattgct

SEQ ID NO: 1010184 - DNA, 25 bp, Homo sapien
atcctctggaaagcccgacagtgcc

SEQ ID NO: 1010185 - DNA, 25 bp, Homo sapien
gagagaatcgaaacacagagaggcc

SEQ ID NO: 1010186 - DNA, 25 bp, Homo sapien
tgttccggccgctttcagcgatgcc

SEQ ID NO: 1010187 - DNA, 25 bp, Homo sapien
gggcgtcagctgacttcacgcggcc

SEQ ID NO: 1010188 - DNA, 25 bp, Homo sapien
agcgatgcctgtccttgctagttca

SEQ ID NO: 1010189 - DNA, 25 bp, Homo sapien
ctgcatcgcgaacgctgcacaaggg

SEQ ID NO: 1010190 - DNA, 25 bp, Homo sapien
atcgcgaacgctgcacaagggcagc

SEQ ID NO: 1010191 - DNA, 25 bp, Homo sapien
tcctgcatcgcgaacgctgcacaag

SEQ ID NO: 1010192 - DNA, 25 bp, Homo sapien
gcatcgcgaacgctgcacaagggca

SEQ ID NO: 1010193 - DNA, 25 bp, Homo sapien
tgcaaattacctgaagaagcggaac

SEQ ID NO: 1010194 - DNA, 25 bp, Homo sapien
cacagaataacagagaaagcccgtt

SEQ ID NO: 1010195 - DNA, 25 bp, Homo sapien
tctgatcctgacacgtctgcactgg

SEQ ID NO: 1010196 - DNA, 25 bp, Homo sapien
tatgttttgagccaagctctgggcc

SEQ ID NO: 1010197 - DNA, 25 bp, Homo sapien
aacgggcgcagaatcacacacgtac

SEQ ID NO: 1010198 - DNA, 25 bp, Homo sapien
cacgtacgccgtaggaacgggcgca

SEQ ID NO: 1010199 - DNA, 25 bp, Homo sapien
cacacgtacaccgttctgcacagct

SEQ ID NO: 1010200 - DNA, 25 bp, Homo sapien
acagctggcggacgcttcctctttc

SEQ ID NO: 1010201 - DNA, 25 bp, Homo sapien
gctggctccattgaagccacactcg

SEQ ID NO: 1010202 - DNA, 25 bp, Homo sapien
tgaagccacactcgttctccttttc

SEQ ID NO: 1010203 - DNA, 25 bp, Homo sapien
ggctccattgaagccacactcgttc

SEQ ID NO: 1010204 - DNA, 25 bp, Homo sapien
cacatccatggcctcttcacttgga

SEQ ID NO: 1010205 - DNA, 25 bp, Homo sapien
tcctgcttagacctgagaagtagcc

SEQ ID NO: 1010206 - DNA, 25 bp, Homo sapien
ctgctgttgggtaagagtcgcctcc

SEQ ID NO: 1010207 - DNA, 25 bp, Homo sapien
caccggctcactgtctgcaagcaaa

SEQ ID NO: 1010208 - DNA, 25 bp, Homo sapien
gagcagagacctcacgtctgctggg

SEQ ID NO: 1010209 - DNA, 25 bp, Homo sapien
ggagggctccgtgttcaatatgtga

SEQ ID NO: 1010210 - DNA, 25 bp, Homo sapien
gagtgtcctcccaggatacagcgga

SEQ ID NO: 1010211 - DNA, 25 bp, Homo sapien
gcatgcaccatgttgactgtacccg

SEQ ID NO: 1010212 - DNA, 25 bp, Homo sapien
tgtgagaagcctccttcctagggcc

SEQ ID NO: 1010213 - DNA, 25 bp, Homo sapien
tctgaccactgctgttgacgttggc

SEQ ID NO: 1010214 - DNA, 25 bp, Homo sapien
gctggacggtgggttggcggtgttg

SEQ ID NO: 1010215 - DNA, 25 bp, Homo sapien
gctgcacaggtcatgagcgccggcc

SEQ ID NO: 1010216 - DNA, 25 bp, Homo sapien
tgaccactgctgttgacgttggcgg

SEQ ID NO: 1010217 - DNA, 25 bp, Homo sapien
cttgcagccggaccaccgaagggct

SEQ ID NO: 1010218 - DNA, 25 bp, Homo sapien
tgtaactgtactgggtctggatccc

SEQ ID NO: 1010219 - DNA, 25 bp, Homo sapien
gtagaaactcactctaacgtgaccc

SEQ ID NO: 1010220 - DNA, 25 bp, Homo sapien
tgacccacgctagcatgagataccg

SEQ ID NO: 1010221 - DNA, 25 bp, Homo sapien
tgtaaataagctgtgggacagccgc

SEQ ID NO: 1010222 - DNA, 25 bp, Homo sapien
gctgcttgtaaataagctgtgggac

SEQ ID NO: 1010223 - DNA, 25 bp, Homo sapien
cccgaagctgcttgtaaataagctg

SEQ ID NO: 1010224 - DNA, 25 bp, Homo sapien
aggcatttgcccgaagctgcttgta

SEQ ID NO: 1010225 - DNA, 25 bp, Homo sapien
catgttcatgtgcacaaggtccaca

SEQ ID NO: 1010226 - DNA, 25 bp, Homo sapien
catctgccatgttcatgtgcacaag

SEQ ID NO: 1010227 - DNA, 25 bp, Homo sapien
acaaggtccacaacggcagccagac

SEQ ID NO: 1010228 - DNA, 25 bp, Homo sapien
tcatgtgcacaaggtccacaacggc

SEQ ID NO: 1010229 - DNA, 25 bp, Homo sapien
ccgtcgggcggtgactgattacaat

SEQ ID NO: 1010230 - DNA, 25 bp, Homo sapien
tgagtccacgcagggatgaagccac

SEQ ID NO: 1010231 - DNA, 25 bp, Homo sapien
gctttgtccgtgtcgctcagctgcc

SEQ ID NO: 1010232 - DNA, 25 bp, Homo sapien
tactgatgtgcacaaaggacccagg

SEQ ID NO: 1010233 - DNA, 25 bp, Homo sapien
cagcataaacagtcgtggtggcaaa

SEQ ID NO: 1010234 - DNA, 25 bp, Homo sapien
tcggcgctgaaccatcattgaggag

SEQ ID NO: 1010235 - DNA, 25 bp, Homo sapien
caattacttgtgtcgtccgtgagca

SEQ ID NO: 1010236 - DNA, 25 bp, Homo sapien
caagcgctcggcagagaaatggacc

SEQ ID NO: 1010237 - DNA, 25 bp, Homo sapien
tgcaatagcctcagtaaagcgacgg

SEQ ID NO: 1010238 - DNA, 25 bp, Homo sapien
acagggcccttcgatccatgtggaa

SEQ ID NO: 1010239 - DNA, 25 bp, Homo sapien
gttacccagacgaccaagacgagat

SEQ ID NO: 1010240 - DNA, 25 bp, Homo sapien
tctgagcaggaacccactagtgaca

SEQ ID NO: 1010241 - DNA, 25 bp, Homo sapien
tggtgaagtcccttacgaatacatc

SEQ ID NO: 1010242 - DNA, 25 bp, Homo sapien
ctacaggagaacgttaacgctaaga

SEQ ID NO: 1010243 - DNA, 25 bp, Homo sapien
taatgccaagcagacggcaaggctg

SEQ ID NO: 1010244 - DNA, 25 bp, Homo sapien
gagttgtggtgactctcacctggtg

SEQ ID NO: 1010245 - DNA, 25 bp, Homo sapien
tcatcgcatctcgttagtgaagcgg

SEQ ID NO: 1010246 - DNA, 25 bp, Homo sapien
gaagcggcctcatcttgacactgaa

SEQ ID NO: 1010247 - DNA, 25 bp, Homo sapien
gaggatgtgataaccctgctgccga

SEQ ID NO: 1010248 - DNA, 25 bp, Homo sapien
gacacggtgggtcttatcagctcaa

SEQ ID NO: 1010249 - DNA, 25 bp, Homo sapien
cacagcgttgtgttgtctgcgctca

SEQ ID NO: 1010250 - DNA, 25 bp, Homo sapien
tgaaggcggctttcgggacttgtaa

SEQ ID NO: 1010251 - DNA, 25 bp, Homo sapien
cttgtaattacagagccatgggtgg

SEQ ID NO: 1010252 - DNA, 25 bp, Homo sapien
cgctggtagccctgtcgatggcgat

SEQ ID NO: 1010253 - DNA, 25 bp, Homo sapien
aacctcatggctgcggagcagcagg

SEQ ID NO: 1010254 - DNA, 25 bp, Homo sapien
tcctcatcgtctgtgtctgtgccgt

SEQ ID NO: 1010255 - DNA, 25 bp, Homo sapien
agctgtgggatcgtcaacctcatgg

SEQ ID NO: 1010256 - DNA, 25 bp, Homo sapien
tctgtgccgtgagtcagggatgttc

SEQ ID NO: 1010257 - DNA, 25 bp, Homo sapien
aaagtcaccgtacctctgaatacag

SEQ ID NO: 1010258 - DNA, 25 bp, Homo sapien
gaggcgccgctactgaaatgacacg

SEQ ID NO: 1010259 - DNA, 25 bp, Homo sapien
gcttcacaaagatgccgaacaggca

SEQ ID NO: 1010260 - DNA, 25 bp, Homo sapien
cagaagcaggaggacgtcacggaaa

SEQ ID NO: 1010261 - DNA, 25 bp, Homo sapien
tcctcagtggtcacgttttggacat

SEQ ID NO: 1010262 - DNA, 25 bp, Homo sapien
tcacgttttggacattggcgctcac

SEQ ID NO: 1010263 - DNA, 25 bp, Homo sapien
cagtggtcacgttttggacattggc

SEQ ID NO: 1010264 - DNA, 25 bp, Homo sapien
tggacattggcgctcactttgaagg

SEQ ID NO: 1010265 - DNA, 25 bp, Homo sapien
aaagagggagtcttcacacaaacct

SEQ ID NO: 1010266 - DNA, 25 bp, Homo sapien
agagggagtcttcacacaaaccttc

SEQ ID NO: 1010267 - DNA, 25 bp, Homo sapien
agggagtcttcacacaaaccttctt

SEQ ID NO: 1010268 - DNA, 25 bp, Homo sapien
tgaaagagggagtcttcacacaaac

SEQ ID NO: 1010269 - DNA, 25 bp, Homo sapien
cttcttcccctgatgaaagggggag

SEQ ID NO: 1010270 - DNA, 25 bp, Homo sapien
gacgaaagagggagtcttcacacac

SEQ ID NO: 1010271 - DNA, 25 bp, Homo sapien
cttcttcccctgacgaaagagggag

SEQ ID NO: 1010272 - DNA, 25 bp, Homo sapien
gaaagggggagtcttcacacacatc

SEQ ID NO: 1010273 - DNA, 25 bp, Homo sapien
cttcttcccctgatgaaagggggag

SEQ ID NO: 1010274 - DNA, 25 bp, Homo sapien
cttcttcccctgacgaaagagggag

SEQ ID NO: 1010275 - DNA, 25 bp, Homo sapien
gacgaaagagggagtcttcacacac

SEQ ID NO: 1010276 - DNA, 25 bp, Homo sapien
gaaagggggagtcttcacacacatc

SEQ ID NO: 1010277 - DNA, 25 bp, Homo sapien
cacttaacctgagaaatgccacctt

SEQ ID NO: 1010278 - DNA, 25 bp, Homo sapien
tgtctcgagacactagcttgcacct

SEQ ID NO: 1010279 - DNA, 25 bp, Homo sapien
gcttgcacctttgcaactgcttgta

SEQ ID NO: 1010280 - DNA, 25 bp, Homo sapien
tgtctcatcttaaagacgggacggg

SEQ ID NO: 1010281 - DNA, 25 bp, Homo sapien
accagaactcaagacccagcgtggg

SEQ ID NO: 1010282 - DNA, 25 bp, Homo sapien
acgcacgcaggcaccagaactcaag

SEQ ID NO: 1010283 - DNA, 25 bp, Homo sapien
gaagtaaggcttgcgtggtcccctg

SEQ ID NO: 1010284 - DNA, 25 bp, Homo sapien
tcgagccggtgcatttgccaagtgt

SEQ ID NO: 1010285 - DNA, 25 bp, Homo sapien
caaaggatcctgcgggtgaggccac

SEQ ID NO: 1010286 - DNA, 25 bp, Homo sapien
cttcagctccgcaatgtgggcaggg

SEQ ID NO: 1010287 - DNA, 25 bp, Homo sapien
gcagcaagaatcaggcttcagctcc

SEQ ID NO: 1010288 - DNA, 25 bp, Homo sapien
ctcggagaagcgctggacgcagcaa

SEQ ID NO: 1010289 - DNA, 25 bp, Homo sapien
tggagaggtccagattcccgaaggc

SEQ ID NO: 1010290 - DNA, 25 bp, Homo sapien
caggtttgactctgtaggaaagagg

SEQ ID NO: 1010291 - DNA, 25 bp, Homo sapien
gacgggcggcgggactcaggtttga

SEQ ID NO: 1010292 - DNA, 25 bp, Homo sapien
tccagattcccgaaggctccgaggg

SEQ ID NO: 1010293 - DNA, 25 bp, Homo sapien
agaagccgtccgtgctcagaatccg

SEQ ID NO: 1010294 - DNA, 25 bp, Homo sapien
tcagaatccgtcttccgacagcgaa

SEQ ID NO: 1010295 - DNA, 25 bp, Homo sapien
gccctgctcccggaatgcggagaag

SEQ ID NO: 1010296 - DNA, 25 bp, Homo sapien
tcttccgacagcgaaggcggtggcc

SEQ ID NO: 1010297 - DNA, 25 bp, Homo sapien
caggcagtgttgagttacatgagta

SEQ ID NO: 1010298 - DNA, 25 bp, Homo sapien
tgtgcgcatggcctgggcccacgat

SEQ ID NO: 1010299 - DNA, 25 bp, Homo sapien
ggcccacgatgagttcctgagtcct

SEQ ID NO: 1010300 - DNA, 25 bp, Homo sapien
gagttcctgagtcctaaaactaggc

SEQ ID NO: 1010301 - DNA, 25 bp, Homo sapien
ctgagtcctaaaactaggcgccttc

SEQ ID NO: 1010302 - DNA, 25 bp, Homo sapien
atgacatcacccctgtgtgaagggg

SEQ ID NO: 1010303 - DNA, 25 bp, Homo sapien
gaatgacataactcctgagtgaagg

SEQ ID NO: 1010304 - DNA, 25 bp, Homo sapien
tgtgtgaagactctgtgagtgaatg

SEQ ID NO: 1010305 - DNA, 25 bp, Homo sapien
gtgagtgaatgatgtcaccccatat

SEQ ID NO: 1010306 - DNA, 25 bp, Homo sapien
gaggcgggcgacgtcctccaccagc

SEQ ID NO: 1010307 - DNA, 25 bp, Homo sapien
cacgtcagcgaacgcactgctgggc

SEQ ID NO: 1010308 - DNA, 25 bp, Homo sapien
aggcgggcgacgtcctccaccagcc

SEQ ID NO: 1010309 - DNA, 25 bp, Homo sapien
gtcagcgaacgcactgctgggcacc

SEQ ID NO: 1010310 - DNA, 25 bp, Homo sapien
tgcagattcagactcatgagcaggc

SEQ ID NO: 1010311 - DNA, 25 bp, Homo sapien
agggcctgcagattcagactcatga

SEQ ID NO: 1010312 - DNA, 25 bp, Homo sapien
gcctgcagattcagactcatgagca

SEQ ID NO: 1010313 - DNA, 25 bp, Homo sapien
gattcagactcatgagcaggcgcat

SEQ ID NO: 1010314 - DNA, 25 bp, Homo sapien
gacaggaaatgacccaatgtgatag

SEQ ID NO: 1010315 - DNA, 25 bp, Homo sapien
cagggtgagcccattagcagcaatg

SEQ ID NO: 1010316 - DNA, 25 bp, Homo sapien
gattgtcggctctgaaggttcccta

SEQ ID NO: 1010317 - DNA, 25 bp, Homo sapien
gggtgaacacctcggcatccatttg

SEQ ID NO: 1010318 - DNA, 25 bp, Homo sapien
gccgctgaaggtgattctgacccgc

SEQ ID NO: 1010319 - DNA, 25 bp, Homo sapien
tgaaggtgattctgacccgcagaga

SEQ ID NO: 1010320 - DNA, 25 bp, Homo sapien
gcctggccgccgctgaaggtgattc

SEQ ID NO: 1010321 - DNA, 25 bp, Homo sapien
aggtgattctgacccgcagagaggc

SEQ ID NO: 1010322 - DNA, 25 bp, Homo sapien
tggctcttgacgttctccactccgg

SEQ ID NO: 1010323 - DNA, 25 bp, Homo sapien
gatctttggaatacgtctggctctt

SEQ ID NO: 1010324 - DNA, 25 bp, Homo sapien
tctgtctgtcacgatgtagccccgc

SEQ ID NO: 1010325 - DNA, 25 bp, Homo sapien
gaaggctggacctccaattgcaggc

SEQ ID NO: 1010326 - DNA, 25 bp, Homo sapien
tctccatgtcgaggggccttgcaaa

SEQ ID NO: 1010327 - DNA, 25 bp, Homo sapien
caggtaagagtcgagacccgtggtc

SEQ ID NO: 1010328 - DNA, 25 bp, Homo sapien
cgagtgtggcactcagacgatggac

SEQ ID NO: 1010329 - DNA, 25 bp, Homo sapien
ggctccaggtaagagtcgagacccg

SEQ ID NO: 1010330 - DNA, 25 bp, Homo sapien
agagaggacattccgtgagggacgt

SEQ ID NO: 1010331 - DNA, 25 bp, Homo sapien
ctgacagagaggacattccgtgagg

SEQ ID NO: 1010332 - DNA, 25 bp, Homo sapien
gacagagaggacattccgtgaggga

SEQ ID NO: 1010333 - DNA, 25 bp, Homo sapien
acagagaggacattccgtgagggac

SEQ ID NO: 1010334 - DNA, 25 bp, Homo sapien
aagtctatcatcgtcgtcctgcact

SEQ ID NO: 1010335 - DNA, 25 bp, Homo sapien
cttggtaaagtctatcatcgtcgtc

SEQ ID NO: 1010336 - DNA, 25 bp, Homo sapien
ggtaaagtctatcatcgtcgtcctg

SEQ ID NO: 1010337 - DNA, 25 bp, Homo sapien
ctcttggtaaagtctatcatcgtcg

SEQ ID NO: 1010338 - DNA, 25 bp, Homo sapien
tggtccacgccttgcatcaggccag

SEQ ID NO: 1010339 - DNA, 25 bp, Homo sapien
ccttcaggagggtatgaatccgtgc

SEQ ID NO: 1010340 - DNA, 25 bp, Homo sapien
gggctgcctcgagctactccatggt

SEQ ID NO: 1010341 - DNA, 25 bp, Homo sapien
atcagctcagccatgccgtccagct

SEQ ID NO: 1010342 - DNA, 25 bp, Homo sapien
gcgtggccgctggttccaggcccac

SEQ ID NO: 1010343 - DNA, 25 bp, Homo sapien
gttccaggcccacatgcgtccaacg

SEQ ID NO: 1010344 - DNA, 25 bp, Homo sapien
aggaggaagcgtcgggtgtgagggt

SEQ ID NO: 1010345 - DNA, 25 bp, Homo sapien
tgcgtccaacgcgtcatcgtgtcca

SEQ ID NO: 1010346 - DNA, 25 bp, Homo sapien
gccgtgtgtatactccccctcaaca

SEQ ID NO: 1010347 - DNA, 25 bp, Homo sapien
tcgccgtgtgtatactccccctcaa

SEQ ID NO: 1010348 - DNA, 25 bp, Homo sapien
ctcgccgtgtgtatactccccctca

SEQ ID NO: 1010349 - DNA, 25 bp, Homo sapien
cgtgtgtatactccccctcaacagc

SEQ ID NO: 1010350 - DNA, 25 bp, Homo sapien
catctcagcctcgcaaccgagccac

SEQ ID NO: 1010351 - DNA, 25 bp, Homo sapien
gcctcgcaaccgagccaccgagcca

SEQ ID NO: 1010352 - DNA, 25 bp, Homo sapien
tcagcctcgcaaccgagccaccgag

SEQ ID NO: 1010353 - DNA, 25 bp, Homo sapien
tcgcaaccgagccaccgagccacga

SEQ ID NO: 1010354 - DNA, 25 bp, Homo sapien
gacagtcttatctcgctcgtccacg

SEQ ID NO: 1010355 - DNA, 25 bp, Homo sapien
gaggcgagggatgtctccacacatg

SEQ ID NO: 1010356 - DNA, 25 bp, Homo sapien
gctggcaacaaagggctcactcatc

SEQ ID NO: 1010357 - DNA, 25 bp, Homo sapien
cagtcggcgtcctccgtgcttagga

SEQ ID NO: 1010358 - DNA, 25 bp, Homo sapien
agccaagatgtgtgtcagagtcggc

SEQ ID NO: 1010359 - DNA, 25 bp, Homo sapien
ctgcactagccaagatgtgtgtcag

SEQ ID NO: 1010360 - DNA, 25 bp, Homo sapien
tgcactagccaagatgtgtgtcaga

SEQ ID NO: 1010361 - DNA, 25 bp, Homo sapien
caagatgtgtgtcagagtcggcccg

SEQ ID NO: 1010362 - DNA, 25 bp, Homo sapien
gacttccctcacatcatcgtgagaa

SEQ ID NO: 1010363 - DNA, 25 bp, Homo sapien
tgacataatcatatgccagcatgtt

SEQ ID NO: 1010364 - DNA, 25 bp, Homo sapien
gaaactgacataatcatatgccagc

SEQ ID NO: 1010365 - DNA, 25 bp, Homo sapien
gacataatcatatgccagcatgttg

SEQ ID NO: 1010366 - DNA, 25 bp, Homo sapien
actgacataatcatatgccagcatg

SEQ ID NO: 1010367 - DNA, 25 bp, Homo sapien
gttgggacttcggagctgcccacat

SEQ ID NO: 1010368 - DNA, 25 bp, Homo sapien
cagaaacgccctcgtaatgggaaca

SEQ ID NO: 1010369 - DNA, 25 bp, Homo sapien
ctaagccgacatctgcagaaacgcc

SEQ ID NO: 1010370 - DNA, 25 bp, Homo sapien
cattcgctaaatgagctaagccgac

SEQ ID NO: 1010371 - DNA, 25 bp, Homo sapien
tgaaaatgacaacgagacaccacca

SEQ ID NO: 1010372 - DNA, 25 bp, Homo sapien
ttgacaacacccaatgcaggcgagg

SEQ ID NO: 1010373 - DNA, 25 bp, Homo sapien
gggccggaacccagaacattgacaa

SEQ ID NO: 1010374 - DNA, 25 bp, Homo sapien
tggtggcacgcagaatgcagaatgc

SEQ ID NO: 1010375 - DNA, 25 bp, Homo sapien
tcaggacgcttgttccgaagatcca

SEQ ID NO: 1010376 - DNA, 25 bp, Homo sapien
tcagaatatcaccagcatcgcaggg

SEQ ID NO: 1010377 - DNA, 25 bp, Homo sapien
cacattgtgtaactcgtagggatca

SEQ ID NO: 1010378 - DNA, 25 bp, Homo sapien
aagcgcacagtgcagtttggaagtc

SEQ ID NO: 1010379 - DNA, 25 bp, Homo sapien
tgaagaccccctgatagcgtccagg

SEQ ID NO: 1010380 - DNA, 25 bp, Homo sapien
ccaaggtcgcaagtgaagaccccct

SEQ ID NO: 1010381 - DNA, 25 bp, Homo sapien
agtgaagaccccctgatagcgtcca

SEQ ID NO: 1010382 - DNA, 25 bp, Homo sapien
gtcgcaagtgaagaccccctgatag

SEQ ID NO: 1010383 - DNA, 25 bp, Homo sapien
cctgggcattcttgagggtgcacgc

SEQ ID NO: 1010384 - DNA, 25 bp, Homo sapien
tcttgagggtgcacgcagaaggtac

SEQ ID NO: 1010385 - DNA, 25 bp, Homo sapien
gaggggtcttcggaatctcccagag

SEQ ID NO: 1010386 - DNA, 25 bp, Homo sapien
tcttcggaatctcccagaggtgaag

SEQ ID NO: 1010387 - DNA, 25 bp, Homo sapien
gtccaccttagggctgagctcatct

SEQ ID NO: 1010388 - DNA, 25 bp, Homo sapien
gacccgggagggtaggtcagcgcag

SEQ ID NO: 1010389 - DNA, 25 bp, Homo sapien
actgagggccgccatcagatggtgt

SEQ ID NO: 1010390 - DNA, 25 bp, Homo sapien
gtcagcgcagacgtgtgggccacat

SEQ ID NO: 1010391 - DNA, 25 bp, Homo sapien
tattttctacttgcacctccttggg

SEQ ID NO: 1010392 - DNA, 25 bp, Homo sapien
tgtggacaccccagtttaaatccca

SEQ ID NO: 1010393 - DNA, 25 bp, Homo sapien
tggacacacaagctgagctccctgg

SEQ ID NO: 1010394 - DNA, 25 bp, Homo sapien
tagagactttcgaatcctggacaca

SEQ ID NO: 1010395 - DNA, 25 bp, Homo sapien
cactatctccaacagcatccccacc

SEQ ID NO: 1010396 - DNA, 25 bp, Homo sapien
tctccactatctccaacagcatccc

SEQ ID NO: 1010397 - DNA, 25 bp, Homo sapien
tccactatctccaacagcatcccca

SEQ ID NO: 1010398 - DNA, 25 bp, Homo sapien
ctccactatctccaacagcatcccc

SEQ ID NO: 1010399 - DNA, 25 bp, Homo sapien
ctggtggaatatttgacatgaccgg

SEQ ID NO: 1010400 - DNA, 25 bp, Homo sapien
tatcagaaggtggaccctggctgct

SEQ ID NO: 1010401 - DNA, 25 bp, Homo sapien
atatttgacatgaccggtgcccacg

SEQ ID NO: 1010402 - DNA, 25 bp, Homo sapien
catcgtgtgtaggagattccaaggt

SEQ ID NO: 1010403 - DNA, 25 bp, Homo sapien
ctgtcctgcgccgtatgggtcctgg

SEQ ID NO: 1010404 - DNA, 25 bp, Homo sapien
ctcccgactgtacctcctctcgctg

SEQ ID NO: 1010405 - DNA, 25 bp, Homo sapien
cctggcgagcacgtctgaggctggg

SEQ ID NO: 1010406 - DNA, 25 bp, Homo sapien
caggtggcgtcggagggcgttggcc

SEQ ID NO: 1010407 - DNA, 25 bp, Homo sapien
ttctgaaacgtctgcaccagaaaga

SEQ ID NO: 1010408 - DNA, 25 bp, Homo sapien
gcaccagaaagatggtgggtgcttt

SEQ ID NO: 1010409 - DNA, 25 bp, Homo sapien
ctgcaccagaaagatggtgggtgct

SEQ ID NO: 1010410 - DNA, 25 bp, Homo sapien
tttctgaaacgtctgcaccagaaag

SEQ ID NO: 1010411 - DNA, 25 bp, Homo sapien
ttttcgggaggtctgcaagttcctg

SEQ ID NO: 1010412 - DNA, 25 bp, Homo sapien
gcttcaggacgcctcaggtaggttt

SEQ ID NO: 1010413 - DNA, 25 bp, Homo sapien
caggacgcctcaggtaggttttcgg

SEQ ID NO: 1010414 - DNA, 25 bp, Homo sapien
gttcctggtccatcacatactgagt

SEQ ID NO: 1010415 - DNA, 25 bp, Homo sapien
catcgtccttgccattgctggccgt

SEQ ID NO: 1010416 - DNA, 25 bp, Homo sapien
tcgtccttgccattgctggccgtca

SEQ ID NO: 1010417 - DNA, 25 bp, Homo sapien
atcgtccttgccattgctggccgtc

SEQ ID NO: 1010418 - DNA, 25 bp, Homo sapien
cgtccttgccattgctggccgtcat

SEQ ID NO: 1010419 - DNA, 25 bp, Homo sapien
ggctctaggtcatgacagctcagca

SEQ ID NO: 1010420 - DNA, 25 bp, Homo sapien
tggtaggtacagcaaggaggactcc

SEQ ID NO: 1010421 - DNA, 25 bp, Homo sapien
ggaggactcccctgcaagtctggag

SEQ ID NO: 1010422 - DNA, 25 bp, Homo sapien
caggattccagggaccgacggattc

SEQ ID NO: 1010423 - DNA, 25 bp, Homo sapien
ggtgcgggcaatacacagactaaga

SEQ ID NO: 1010424 - DNA, 25 bp, Homo sapien
tggatgcacgccaagacaagacgtc

SEQ ID NO: 1010425 - DNA, 25 bp, Homo sapien
tggatgaagggaacgtagatgacac

SEQ ID NO: 1010426 - DNA, 25 bp, Homo sapien
ccattgggtcacgaaatccttgcta

SEQ ID NO: 1010427 - DNA, 25 bp, Homo sapien
gcccacaaaggttgatttggaagaa

SEQ ID NO: 1010428 - DNA, 25 bp, Homo sapien
ccacaaaggttgatttggaagaagc

SEQ ID NO: 1010429 - DNA, 25 bp, Homo sapien
cccacaaaggttgatttggaagaag

SEQ ID NO: 1010430 - DNA, 25 bp, Homo sapien
gccgtgggagaagcgacaggcctga

SEQ ID NO: 1010431 - DNA, 25 bp, Homo sapien
cgtcgtcttgaggatggcctcgtga

SEQ ID NO: 1010432 - DNA, 25 bp, Homo sapien
tgtcatgtggacaagtgacgtcgtc

SEQ ID NO: 1010433 - DNA, 25 bp, Homo sapien
gaaatgagatgaggcgtccagccct

SEQ ID NO: 1010434 - DNA, 25 bp, Homo sapien
tgcacgtgacccacgatgggaaaag

SEQ ID NO: 1010435 - DNA, 25 bp, Homo sapien
cgtggtcatgccagaatccgtggcc

SEQ ID NO: 1010436 - DNA, 25 bp, Homo sapien
tgccggaatccactgatggtgcacg

SEQ ID NO: 1010437 - DNA, 25 bp, Homo sapien
gtggccatgccggaatccatggcca

SEQ ID NO: 1010438 - DNA, 25 bp, Homo sapien
tgctttcctgatgtaaacacagaca

SEQ ID NO: 1010439 - DNA, 25 bp, Homo sapien
atacacacttgcatggacacacagg

SEQ ID NO: 1010440 - DNA, 25 bp, Homo sapien
acaggcactcacactcacagatgca

SEQ ID NO: 1010441 - DNA, 25 bp, Homo sapien
gctttcctgatgtaaacacagacac

SEQ ID NO: 1010442 - DNA, 25 bp, Homo sapien
cgggcacacacctgtgggcacacac

SEQ ID NO: 1010443 - DNA, 25 bp, Homo sapien
tgcgggcacacacctgtgggcacac

SEQ ID NO: 1010444 - DNA, 25 bp, Homo sapien
gcgggcacacacctgtgggcacaca

SEQ ID NO: 1010445 - DNA, 25 bp, Homo sapien
ctgcgggcacacacctgtgggcaca

SEQ ID NO: 1010446 - DNA, 25 bp, Homo sapien
ggacggcgtctgctgcggggtattg

SEQ ID NO: 1010447 - DNA, 25 bp, Homo sapien
acggcgtctgctgcggggtattgtc

SEQ ID NO: 1010448 - DNA, 25 bp, Homo sapien
gacggcgtctgctgcggggtattgt

SEQ ID NO: 1010449 - DNA, 25 bp, Homo sapien
ctgcggggtattgtctggcagtgag

SEQ ID NO: 1010450 - DNA, 25 bp, Homo sapien
tgaggaacagcctgacagagggacc

SEQ ID NO: 1010451 - DNA, 25 bp, Homo sapien
agcggcctcaggacaggcacaacgg

SEQ ID NO: 1010452 - DNA, 25 bp, Homo sapien
tcaggacaggcacaacggccacttc

SEQ ID NO: 1010453 - DNA, 25 bp, Homo sapien
gcatcaggcctgaattccgtgaact

SEQ ID NO: 1010454 - DNA, 25 bp, Homo sapien
cagccctgtcccagcgtcgtggatg

SEQ ID NO: 1010455 - DNA, 25 bp, Homo sapien
agatgcagaaccaagggcagaagca

SEQ ID NO: 1010456 - DNA, 25 bp, Homo sapien
tcccagcgtcgtggatgcagacacg

SEQ ID NO: 1010457 - DNA, 25 bp, Homo sapien
aggagatgcagaaccaagggcagaa

SEQ ID NO: 1010458 - DNA, 25 bp, Homo sapien
ggaacaccaaatcctaaatccacag

SEQ ID NO: 1010459 - DNA, 25 bp, Homo sapien
tcaagcacatctggttttcccgggc

SEQ ID NO: 1010460 - DNA, 25 bp, Homo sapien
cgcataatatgaattgtgtcccttc

SEQ ID NO: 1010461 - DNA, 25 bp, Homo sapien
cgggcccaatcggaaagcaggtcct

SEQ ID NO: 1010462 - DNA, 25 bp, Homo sapien
gcagctcagcccgttttcaaatcca

SEQ ID NO: 1010463 - DNA, 25 bp, Homo sapien
acagccactgccgattgtcctggga

SEQ ID NO: 1010464 - DNA, 25 bp, Homo sapien
ctgagccacaggaacacgatgcctc

SEQ ID NO: 1010465 - DNA, 25 bp, Homo sapien
acaggaacacgatgcctctgtggcc

SEQ ID NO: 1010466 - DNA, 25 bp, Homo sapien
cagagcagttggcggttcccaggcc

SEQ ID NO: 1010467 - DNA, 25 bp, Homo sapien
atgaatctgacaactgcacctgcaa

SEQ ID NO: 1010468 - DNA, 25 bp, Homo sapien
aagactctgaaggccgcgcaagcag

SEQ ID NO: 1010469 - DNA, 25 bp, Homo sapien
aatgaatctgacaactgcacctgca

SEQ ID NO: 1010470 - DNA, 25 bp, Homo sapien
caatgaatctgacaactgcacctgc

SEQ ID NO: 1010471 - DNA, 25 bp, Homo sapien
gaagccaagcccgtgcggtcgctca

SEQ ID NO: 1010472 - DNA, 25 bp, Homo sapien
aggagaagccaagcccgtgcggtcg

SEQ ID NO: 1010473 - DNA, 25 bp, Homo sapien
gctcagtgcggcagccgccgagcct

SEQ ID NO: 1010474 - DNA, 25 bp, Homo sapien
caagcccgtgcggtcgctcagtgcg

SEQ ID NO: 1010475 - DNA, 25 bp, Homo sapien
cattgccggaaccttctggcacctt

SEQ ID NO: 1010476 - DNA, 25 bp, Homo sapien
agggccacgggcgacacctcgtagc

SEQ ID NO: 1010477 - DNA, 25 bp, Homo sapien
cctcgtagcggtaaaagtccattgc

SEQ ID NO: 1010478 - DNA, 25 bp, Homo sapien
tagcggtaaaagtccattgccggaa

SEQ ID NO: 1010479 - DNA, 25 bp, Homo sapien
tcagatttaaggagccgttggatcc

SEQ ID NO: 1010480 - DNA, 25 bp, Homo sapien
tgcgtccaaggcaggactgctgtga

SEQ ID NO: 1010481 - DNA, 25 bp, Homo sapien
tgagcagcttagttcgtaatgaaac

SEQ ID NO: 1010482 - DNA, 25 bp, Homo sapien
cgttggatccgtgggctgcgtccaa

SEQ ID NO: 1010483 - DNA, 25 bp, Homo sapien
cataagagctgacatctacagacat

SEQ ID NO: 1010484 - DNA, 25 bp, Homo sapien
acatcatccaataccacgatgcaga

SEQ ID NO: 1010485 - DNA, 25 bp, Homo sapien
atggggcactctagcatcccactgt

SEQ ID NO: 1010486 - DNA, 25 bp, Homo sapien
cacatcatccaataccacgatgcag

SEQ ID NO: 1010487 - DNA, 25 bp, Homo sapien
ggcactctagcatcccactgttttc

SEQ ID NO: 1010488 - DNA, 25 bp, Homo sapien
cctcctcgccgagtgagttttgtgc

SEQ ID NO: 1010489 - DNA, 25 bp, Homo sapien
cagcatcgtgaggtgaagtctgtgt

SEQ ID NO: 1010490 - DNA, 25 bp, Homo sapien
gccaggatgttagaggccacccaga

SEQ ID NO: 1010491 - DNA, 25 bp, Homo sapien
catgaatgtgtcacgtgtgtgcacg

SEQ ID NO: 1010492 - DNA, 25 bp, Homo sapien
tgttcaaccagactagcaacccgtc

SEQ ID NO: 1010493 - DNA, 25 bp, Homo sapien
tcaaaaccagggtggtagcaagatt

SEQ ID NO: 1010494 - DNA, 25 bp, Homo sapien
gggctcggtgagtgtcttctaactg

SEQ ID NO: 1010495 - DNA, 25 bp, Homo sapien
ttatcccactagacactgaaaacgg

SEQ ID NO: 1010496 - DNA, 25 bp, Homo sapien
tgtaaatgctatccccaactaggct

SEQ ID NO: 1010497 - DNA, 25 bp, Homo sapien
ctaggctatgtagtacgctgtgact

SEQ ID NO: 1010498 - DNA, 25 bp, Homo sapien
tgctacagaagatgggcctacctct

SEQ ID NO: 1010499 - DNA, 25 bp, Homo sapien
cgcatttctactccccagaggtaag

SEQ ID NO: 1010500 - DNA, 25 bp, Homo sapien
gagtcatcgatgagtctccttccaa

SEQ ID NO: 1010501 - DNA, 25 bp, Homo sapien
catatttggcagataaattaaagcc

SEQ ID NO: 1010502 - DNA, 25 bp, Homo sapien
ttccaatgcagctgtccatgcggcc

SEQ ID NO: 1010503 - DNA, 25 bp, Homo sapien
ccccaaaatgcagagtcatcgatga

SEQ ID NO: 1010504 - DNA, 25 bp, Homo sapien
tatccatgcatgtggccgcacactg

SEQ ID NO: 1010505 - DNA, 25 bp, Homo sapien
gcctgcacttggaaaactcggaaaa

SEQ ID NO: 1010506 - DNA, 25 bp, Homo sapien
cccggtggctcatccgtgagacatg

SEQ ID NO: 1010507 - DNA, 25 bp, Homo sapien
gtgaaacttatctgtgtgtggagcc

SEQ ID NO: 1010508 - DNA, 25 bp, Homo sapien
cccgcagtggctcatccatgagaca

SEQ ID NO: 1010509 - DNA, 25 bp, Homo sapien
agatcccgcagtggctcatccatga

SEQ ID NO: 1010510 - DNA, 25 bp, Homo sapien
ctgagatcccgcagtggctcatcca

SEQ ID NO: 1010511 - DNA, 25 bp, Homo sapien
atcccgcagtggctcatccatgaga

SEQ ID NO: 1010512 - DNA, 25 bp, Homo sapien
tccttgccacgaagccgatgtggaa

SEQ ID NO: 1010513 - DNA, 25 bp, Homo sapien
tggattgagacagaagaccctgggc

SEQ ID NO: 1010514 - DNA, 25 bp, Homo sapien
tgagcgtgctcaggctgtcagcaag

SEQ ID NO: 1010515 - DNA, 25 bp, Homo sapien
ggagacccagcaagagaaccaacat

SEQ ID NO: 1010516 - DNA, 25 bp, Homo sapien
cacaaacccttagacccgctggtga

SEQ ID NO: 1010517 - DNA, 25 bp, Homo sapien
tggtgagctaatggcctgaaatgtc

SEQ ID NO: 1010518 - DNA, 25 bp, Homo sapien
cgctggtgatgtgctagctccctca

SEQ ID NO: 1010519 - DNA, 25 bp, Homo sapien
catatggaaagatgggctcaactca

SEQ ID NO: 1010520 - DNA, 25 bp, Homo sapien
caagaccatgtcagtgctcagaagc

SEQ ID NO: 1010521 - DNA, 25 bp, Homo sapien
gagcagcagacgcatcatcagtgga

SEQ ID NO: 1010522 - DNA, 25 bp, Homo sapien
gaacagcttcctgccgcatcttggg

SEQ ID NO: 1010523 - DNA, 25 bp, Homo sapien
gggccgtcctccaacaatgagtggg

SEQ ID NO: 1010524 - DNA, 25 bp, Homo sapien
tttcataatagccatgtattgcttc

SEQ ID NO: 1010525 - DNA, 25 bp, Homo sapien
caaacagaagtctccgcagacccag

SEQ ID NO: 1010526 - DNA, 25 bp, Homo sapien
ggtttccacactgctttcatcaggc

SEQ ID NO: 1010527 - DNA, 25 bp, Homo sapien
tctccgcagacccaggtctgggcag

SEQ ID NO: 1010528 - DNA, 25 bp, Homo sapien
tgttcaggacatgaagggccgtgac

SEQ ID NO: 1010529 - DNA, 25 bp, Homo sapien
ccagcgtttccaatggtcaggagca

SEQ ID NO: 1010530 - DNA, 25 bp, Homo sapien
gttaggagaccagtgggatgccaca

SEQ ID NO: 1010531 - DNA, 25 bp, Homo sapien
tcagagctgaactgacaagtgttcc

SEQ ID NO: 1010532 - DNA, 25 bp, Homo sapien
ccaagaatgattagacggcgcctct

SEQ ID NO: 1010533 - DNA, 25 bp, Homo sapien
taccaagggatcttcaacagggtct

SEQ ID NO: 1010534 - DNA, 25 bp, Homo sapien
aaaccttactaatggctgggcgcag

SEQ ID NO: 1010535 - DNA, 25 bp, Homo sapien
aagactctgacaattggcgggcgcc

SEQ ID NO: 1010536 - DNA, 25 bp, Homo sapien
gaagcctgcgtatcagagacctcca

SEQ ID NO: 1010537 - DNA, 25 bp, Homo sapien
ggtgatcataagaaccccggctgca

SEQ ID NO: 1010538 - DNA, 25 bp, Homo sapien
cagcgggtgcttcgtaaactgcaaa

SEQ ID NO: 1010539 - DNA, 25 bp, Homo sapien
gaaagtttgaggagcgaaccgcatc

SEQ ID NO: 1010540 - DNA, 25 bp, Homo sapien
aagaagctgcagttggagacgtgaa

SEQ ID NO: 1010541 - DNA, 25 bp, Homo sapien
accatcagcgtggccggcggagtga

SEQ ID NO: 1010542 - DNA, 25 bp, Homo sapien
gagtgagccacgagcgcaagggcac

SEQ ID NO: 1010543 - DNA, 25 bp, Homo sapien
cacccctcccagccgctgttgctgt

SEQ ID NO: 1010544 - DNA, 25 bp, Homo sapien
caggaatctcccgaaagaagagaaa

SEQ ID NO: 1010545 - DNA, 25 bp, Homo sapien
ctcttggcgcctccaccgtggcttc

SEQ ID NO: 1010546 - DNA, 25 bp, Homo sapien
cggttcccacttgtcacactcggca

SEQ ID NO: 1010547 - DNA, 25 bp, Homo sapien
aagctgccgccgctgaggacctgct

SEQ ID NO: 1010548 - DNA, 25 bp, Homo sapien
cgctgctcgccgtatttcataataa

SEQ ID NO: 1010549 - DNA, 25 bp, Homo sapien
tgaaaacacagcgtttgcactgttt

SEQ ID NO: 1010550 - DNA, 25 bp, Homo sapien
catgggctttcagcccaacctgaaa

SEQ ID NO: 1010551 - DNA, 25 bp, Homo sapien
taataactgccgtcctcatgggctt

SEQ ID NO: 1010552 - DNA, 25 bp, Homo sapien
cggggttccatccgcctcctctcgg

SEQ ID NO: 1010553 - DNA, 25 bp, Homo sapien
ccggggttccatccgcctcctctcg

SEQ ID NO: 1010554 - DNA, 25 bp, Homo sapien
acacaggcctcggacgctccgcaga

SEQ ID NO: 1010555 - DNA, 25 bp, Homo sapien
gttcacacaggcctcggacgctccg

SEQ ID NO: 1010556 - DNA, 25 bp, Homo sapien
gcagaggccctcctcgagcaggcag

SEQ ID NO: 1010557 - DNA, 25 bp, Homo sapien
acaggcctcggacgctccgcagagg

SEQ ID NO: 1010558 - DNA, 25 bp, Homo sapien
gccaggtgtggtgtgaacgcgcagt

SEQ ID NO: 1010559 - DNA, 25 bp, Homo sapien
tgaacgcgcagtgtctttcactcat

SEQ ID NO: 1010560 - DNA, 25 bp, Homo sapien
tgtggtgtgaacgcgcagtgtcttt

SEQ ID NO: 1010561 - DNA, 25 bp, Homo sapien
ggtgtgaacgcgcagtgtctttcac

SEQ ID NO: 1010562 - DNA, 25 bp, Homo sapien
aaggaacacacacagatttcctcat

SEQ ID NO: 1010563 - DNA, 25 bp, Homo sapien
gtacaaggaacacacacagatttcc

SEQ ID NO: 1010564 - DNA, 25 bp, Homo sapien
ttggtacaaggaacacacacagatt

SEQ ID NO: 1010565 - DNA, 25 bp, Homo sapien
tacaaggaacacacacagatttcct

SEQ ID NO: 1010566 - DNA, 25 bp, Homo sapien
tgctctggtacagggcacacaaggc

SEQ ID NO: 1010567 - DNA, 25 bp, Homo sapien
acaaggccggtgctgagacactgtg

SEQ ID NO: 1010568 - DNA, 25 bp, Homo sapien
atgtgatggccgaggggccacctca

SEQ ID NO: 1010569 - DNA, 25 bp, Homo sapien
tttccagagggcttgggacgtgctc

SEQ ID NO: 1010570 - DNA, 25 bp, Homo sapien
tctgggcaggaaatcacatacacgg

SEQ ID NO: 1010571 - DNA, 25 bp, Homo sapien
gaaagctttcgatggtcggcaggac

SEQ ID NO: 1010572 - DNA, 25 bp, Homo sapien
gacactgtggtcatccgaaagcttt

SEQ ID NO: 1010573 - DNA, 25 bp, Homo sapien
actatgaattgaaccagtcagcggg

SEQ ID NO: 1010574 - DNA, 25 bp, Homo sapien
gctcggagcaggtgcggaagtggct

SEQ ID NO: 1010575 - DNA, 25 bp, Homo sapien
tgggacgctcggagcaggtgcggaa

SEQ ID NO: 1010576 - DNA, 25 bp, Homo sapien
gggacgctcggagcaggtgcggaag

SEQ ID NO: 1010577 - DNA, 25 bp, Homo sapien
gacgctcggagcaggtgcggaagtg

SEQ ID NO: 1010578 - DNA, 25 bp, Homo sapien
ctgtttgtggagagcccctgaaaac

SEQ ID NO: 1010579 - DNA, 25 bp, Homo sapien
gcagtacattctcctcgtttatcaa

SEQ ID NO: 1010580 - DNA, 25 bp, Homo sapien
aacacagcagtacattctcctcgtt

SEQ ID NO: 1010581 - DNA, 25 bp, Homo sapien
tatacctggtatacctctggctgtt

SEQ ID NO: 1010582 - DNA, 25 bp, Homo sapien
aagacagggcgggtggcattgaccc

SEQ ID NO: 1010583 - DNA, 25 bp, Homo sapien
gacagaacagtacaacgctggttcc

SEQ ID NO: 1010584 - DNA, 25 bp, Homo sapien
cacagtgtggtcctcactgaagaca

SEQ ID NO: 1010585 - DNA, 25 bp, Homo sapien
tggactgggcacaacacgattcatc

SEQ ID NO: 1010586 - DNA, 25 bp, Homo sapien
tctgggcggccttccactgttttgt

SEQ ID NO: 1010587 - DNA, 25 bp, Homo sapien
catgcccttcggtagacagtttcta

SEQ ID NO: 1010588 - DNA, 25 bp, Homo sapien
ccttccgtcaggagcaacagtggct

SEQ ID NO: 1010589 - DNA, 25 bp, Homo sapien
tacgaagaacgatcgggtggctgct

SEQ ID NO: 1010590 - DNA, 25 bp, Homo sapien
gcgaagggaactgacaccactcctt

SEQ ID NO: 1010591 - DNA, 25 bp, Homo sapien
ggtagagccacgctcacgagaacca

SEQ ID NO: 1010592 - DNA, 25 bp, Homo sapien
gggacgctgcagagataaccaggta

SEQ ID NO: 1010593 - DNA, 25 bp, Homo sapien
actccttcccggtgagctcggcagg

SEQ ID NO: 1010594 - DNA, 25 bp, Homo sapien
gcaacgacgagccatggtgacagct

SEQ ID NO: 1010595 - DNA, 25 bp, Homo sapien
acggccagcaacgacgagccatggt

SEQ ID NO: 1010596 - DNA, 25 bp, Homo sapien
cagctgcaaactcacatcgctgcct

SEQ ID NO: 1010597 - DNA, 25 bp, Homo sapien
acgagccatggtgacagctcacaca

SEQ ID NO: 1010598 - DNA, 25 bp, Homo sapien
aagatgtggatgcagaatgaacacc

SEQ ID NO: 1010599 - DNA, 25 bp, Homo sapien
cgggtacatcccaaagtcgcacgtc

SEQ ID NO: 1010600 - DNA, 25 bp, Homo sapien
gatgcaggggctaccctccctgggc

SEQ ID NO: 1010601 - DNA, 25 bp, Homo sapien
gggatgccttgcctgaagatgcagg

SEQ ID NO: 1010602 - DNA, 25 bp, Homo sapien
gcttcggttctcagcagtgaatatt

SEQ ID NO: 1010603 - DNA, 25 bp, Homo sapien
caaggtacgaacgttagttaatctg

SEQ ID NO: 1010604 - DNA, 25 bp, Homo sapien
ctccctcgtctgtggacctgaaaca

SEQ ID NO: 1010605 - DNA, 25 bp, Homo sapien
tcttcatagtaggaaagctggcttc

SEQ ID NO: 1010606 - DNA, 25 bp, Homo sapien
ctgctgctgaaatccaacactgggg

SEQ ID NO: 1010607 - DNA, 25 bp, Homo sapien
tgctgctgaaatccaacactgggga

SEQ ID NO: 1010608 - DNA, 25 bp, Homo sapien
ggagatgaataagaacttcccgagc

SEQ ID NO: 1010609 - DNA, 25 bp, Homo sapien
ttcaccaaagtcttatcacacgtgg

SEQ ID NO: 1010610 - DNA, 25 bp, Homo sapien
gacttgagggatcaaatgcgtggtt

SEQ ID NO: 1010611 - DNA, 25 bp, Homo sapien
aaagcacctatttcttaaggatcca

SEQ ID NO: 1010612 - DNA, 25 bp, Homo sapien
tactggacacagcactcagagatct

SEQ ID NO: 1010613 - DNA, 25 bp, Homo sapien
cagcctgctgggtcctaactcgagt

SEQ ID NO: 1010614 - DNA, 25 bp, Homo sapien
tctgtgcctacgaagacagctgtct

SEQ ID NO: 1010615 - DNA, 25 bp, Homo sapien
gaccggctgacacctctggaaaaca

SEQ ID NO: 1010616 - DNA, 25 bp, Homo sapien
ggtggcgccatcagacactgagaca

SEQ ID NO: 1010617 - DNA, 25 bp, Homo sapien
cagttgtggcagttactctagccag

SEQ ID NO: 1010618 - DNA, 25 bp, Homo sapien
tgggcttccttcctaaggttagatg

SEQ ID NO: 1010619 - DNA, 25 bp, Homo sapien
aatgcacatttctgttggtggcgcc

SEQ ID NO: 1010620 - DNA, 25 bp, Homo sapien
ggccaggttttacatctatatttca

SEQ ID NO: 1010621 - DNA, 25 bp, Homo sapien
gccaggttttacatctatatttcaa

SEQ ID NO: 1010622 - DNA, 25 bp, Homo sapien
ccggccaggttttacatctatattt

SEQ ID NO: 1010623 - DNA, 25 bp, Homo sapien
cccggccaggttttacatctatatt

SEQ ID NO: 1010624 - DNA, 25 bp, Homo sapien
ggtgcacccactggttctgaatctg

SEQ ID NO: 1010625 - DNA, 25 bp, Homo sapien
tctatcattggcaagtgaaagttgt

SEQ ID NO: 1010626 - DNA, 25 bp, Homo sapien
tctgtgtaggcaaatcggaaggcca

SEQ ID NO: 1010627 - DNA, 25 bp, Homo sapien
agcagagtcctgctccgatggctct

SEQ ID NO: 1010628 - DNA, 25 bp, Homo sapien
gatgtctgcatccttaatgttttcc

SEQ ID NO: 1010629 - DNA, 25 bp, Homo sapien
tcacctggagtcctcgaaacaattt

SEQ ID NO: 1010630 - DNA, 25 bp, Homo sapien
gagaatgtaggtgatgcctttcacc

SEQ ID NO: 1010631 - DNA, 25 bp, Homo sapien
cataagtctctttatgacacagcct

SEQ ID NO: 1010632 - DNA, 25 bp, Homo sapien
gcaggcaggacgcgtggcggcagca

SEQ ID NO: 1010633 - DNA, 25 bp, Homo sapien
cggcaggcaggacgcgtggcggcag

SEQ ID NO: 1010634 - DNA, 25 bp, Homo sapien
ggcaggcaggacgcgtggcggcagc

SEQ ID NO: 1010635 - DNA, 25 bp, Homo sapien
caggcaggacgcgtggcggcagcag

SEQ ID NO: 1010636 - DNA, 25 bp, Homo sapien
ggcggcgctcagtccatggccgcgc

SEQ ID NO: 1010637 - DNA, 25 bp, Homo sapien
cgctcagtccatggccgcgcgggag

SEQ ID NO: 1010638 - DNA, 25 bp, Homo sapien
gctcttgcggcgacgccgggccgag

SEQ ID NO: 1010639 - DNA, 25 bp, Homo sapien
gcgcctctcgcgctcttgcggcgac

SEQ ID NO: 1010640 - DNA, 25 bp, Homo sapien
cagttttcaggatagcagtttgccc

SEQ ID NO: 1010641 - DNA, 25 bp, Homo sapien
taattacatttgtcagttggcctgt

SEQ ID NO: 1010642 - DNA, 25 bp, Homo sapien
gtaaaccagtttaatgctgccctaa

SEQ ID NO: 1010643 - DNA, 25 bp, Homo sapien
cagcagtgataacttccaagctctt

SEQ ID NO: 1010644 - DNA, 25 bp, Homo sapien
gcagcaggtgctgcgaacactgaag

SEQ ID NO: 1010645 - DNA, 25 bp, Homo sapien
caggcatcatcgctaaccactaaag

SEQ ID NO: 1010646 - DNA, 25 bp, Homo sapien
aggacagaaagaccccggagcgcag

SEQ ID NO: 1010647 - DNA, 25 bp, Homo sapien
ctgattcaacaaggacagaaagacc

SEQ ID NO: 1010648 - DNA, 25 bp, Homo sapien
ttgtggactgttgtgggatcccgct

SEQ ID NO: 1010649 - DNA, 25 bp, Homo sapien
cctgtgggccggcattgactttgtg

SEQ ID NO: 1010650 - DNA, 25 bp, Homo sapien
ccggcattgactttgtggactgttg

SEQ ID NO: 1010651 - DNA, 25 bp, Homo sapien
gtgggatcccgctggtgagaaaggt

SEQ ID NO: 1010652 - DNA, 25 bp, Homo sapien
tgaaagttccagataaagaggtggg

SEQ ID NO: 1010653 - DNA, 25 bp, Homo sapien
catgtgcaccaccaaaacaagggag

SEQ ID NO: 1010654 - DNA, 25 bp, Homo sapien
cactgagtaacctgcataatgttga

SEQ ID NO: 1010655 - DNA, 25 bp, Homo sapien
tgcaaagatgtgacaaagggcactg

SEQ ID NO: 1010656 - DNA, 25 bp, Homo sapien
aaacggttttctatgatcttgacat

SEQ ID NO: 1010657 - DNA, 25 bp, Homo sapien
cggttttctatgatcttgacatttt

SEQ ID NO: 1010658 - DNA, 25 bp, Homo sapien
aaaacggttttctatgatcttgaca

SEQ ID NO: 1010659 - DNA, 25 bp, Homo sapien
aacggttttctatgatcttgacatt

SEQ ID NO: 1010660 - DNA, 25 bp, Homo sapien
tcttcgatgtctatgtcttccactt

SEQ ID NO: 1010661 - DNA, 25 bp, Homo sapien
cttcgatgtctatgtcttccacttc

SEQ ID NO: 1010662 - DNA, 25 bp, Homo sapien
ccatggaattacttgtaaagtttgg

SEQ ID NO: 1010663 - DNA, 25 bp, Homo sapien
gtatcttggttaactgatgtttcca

SEQ ID NO: 1010664 - DNA, 25 bp, Homo sapien
ttaattgtgctgaataagaatggat

SEQ ID NO: 1010665 - DNA, 25 bp, Homo sapien
gatgtttccaaggtagattctggtt

SEQ ID NO: 1010666 - DNA, 25 bp, Homo sapien
gagagtcaggagtaaaatggtcact

SEQ ID NO: 1010667 - DNA, 25 bp, Homo sapien
aaaactcagcttccggtctttattg

SEQ ID NO: 1010668 - DNA, 25 bp, Homo sapien
aactggtatttactgggaacccatg

SEQ ID NO: 1010669 - DNA, 25 bp, Homo sapien
taaatatcgaataccccatctgatg

SEQ ID NO: 1010670 - DNA, 25 bp, Homo sapien
tgcgccgggcccctaatactttcaa

SEQ ID NO: 1010671 - DNA, 25 bp, Homo sapien
ggcactaggcaaaattgaagaagtt

SEQ ID NO: 1010672 - DNA, 25 bp, Homo sapien
catacctggagtcctttatattaaa

SEQ ID NO: 1010673 - DNA, 25 bp, Homo sapien
taaatatattatttacgcaggcact

SEQ ID NO: 1010674 - DNA, 25 bp, Homo sapien
tggatttctacaccattcatacctg

SEQ ID NO: 1010675 - DNA, 25 bp, Homo sapien
tcttgatgatgattcatagagaaat

SEQ ID NO: 1010676 - DNA, 25 bp, Homo sapien
ttcttgatgatgattcatagagaaa

SEQ ID NO: 1010677 - DNA, 25 bp, Homo sapien
aatggtttgcaaccatgcatttaaa

SEQ ID NO: 1010678 - DNA, 25 bp, Homo sapien
aaaatggtttgcaaccatgcattta

SEQ ID NO: 1010679 - DNA, 25 bp, Homo sapien
aaatggtttgcaaccatgcatttaa

SEQ ID NO: 1010680 - DNA, 25 bp, Homo sapien
catggcttccctttttactgtccca

SEQ ID NO: 1010681 - DNA, 25 bp, Homo sapien
tggcttccctttttactgtcccaca

SEQ ID NO: 1010682 - DNA, 25 bp, Homo sapien
ttttactgtcccacaactcctgcat

SEQ ID NO: 1010683 - DNA, 25 bp, Homo sapien
cctttttactgtcccacaactcctg

SEQ ID NO: 1010684 - DNA, 25 bp, Homo sapien
gaggttgttactacatcctgtgaaa

SEQ ID NO: 1010685 - DNA, 25 bp, Homo sapien
ggaccatttacatcattgccactta

SEQ ID NO: 1010686 - DNA, 25 bp, Homo sapien
tttaatatttgtgcctgatggacca

SEQ ID NO: 1010687 - DNA, 25 bp, Homo sapien
aagaaaaatgcttagacttttgagg

SEQ ID NO: 1010688 - DNA, 25 bp, Homo sapien
cggcgatgtgcctgtataccagcta

SEQ ID NO: 1010689 - DNA, 25 bp, Homo sapien
gatactacacgagccaagaagagag

SEQ ID NO: 1010690 - DNA, 25 bp, Homo sapien
tacaaggaacgagaggcaaggatta

SEQ ID NO: 1010691 - DNA, 25 bp, Homo sapien
gccagtagacatgccttgaaagaag

SEQ ID NO: 1010692 - DNA, 25 bp, Homo sapien
ctagccaattgggactgaggcagaa

SEQ ID NO: 1010693 - DNA, 25 bp, Homo sapien
ctatcctcttccaaagtaatttcca

SEQ ID NO: 1010694 - DNA, 25 bp, Homo sapien
tgctatcctcttccaaagtaatttc

SEQ ID NO: 1010695 - DNA, 25 bp, Homo sapien
ctttcaatgctatcctcttccaaag

SEQ ID NO: 1010696 - DNA, 25 bp, Homo sapien
tcaatgctatcctcttccaaagtaa

SEQ ID NO: 1010697 - DNA, 25 bp, Homo sapien
cctccctcacttttgagcttttatg

SEQ ID NO: 1010698 - DNA, 25 bp, Homo sapien
acctccctcacttttgagcttttat

SEQ ID NO: 1010699 - DNA, 25 bp, Homo sapien
ttcaatatcattagaagccacacat

SEQ ID NO: 1010700 - DNA, 25 bp, Homo sapien
taaccaggataatatgcacagcagc

SEQ ID NO: 1010701 - DNA, 25 bp, Homo sapien
acaatgccttcaatatcattagaag

SEQ ID NO: 1010702 - DNA, 25 bp, Homo sapien
cacacatgcctttaattcatccaaa

SEQ ID NO: 1010703 - DNA, 25 bp, Homo sapien
ctgaccacattcgaagactttatta

SEQ ID NO: 1010704 - DNA, 25 bp, Homo sapien
ctggaggggtaagctcttctacgtc

SEQ ID NO: 1010705 - DNA, 25 bp, Homo sapien
tattattcctattaaacaccttgaa

SEQ ID NO: 1010706 - DNA, 25 bp, Homo sapien
tgctctggaggggtaagctcttcta

SEQ ID NO: 1010707 - DNA, 25 bp, Homo sapien
tcaataagtctttcatcaaaaagtc

SEQ ID NO: 1010708 - DNA, 25 bp, Homo sapien
tgtagtgagccatgtatcatggcac

SEQ ID NO: 1010709 - DNA, 25 bp, Homo sapien
cgaaagtgtttattcagtgagacaa

SEQ ID NO: 1010710 - DNA, 25 bp, Homo sapien
gacatcctgtctcaatatgacaaaa

SEQ ID NO: 1010711 - DNA, 25 bp, Homo sapien
caccatcttgtgtcatcaataagag

SEQ ID NO: 1010712 - DNA, 25 bp, Homo sapien
atcaataagaggcacagcagtttca

SEQ ID NO: 1010713 - DNA, 25 bp, Homo sapien
catcttgtgtcatcaataagaggca

SEQ ID NO: 1010714 - DNA, 25 bp, Homo sapien
tgtcatcaataagaggcacagcagt

SEQ ID NO: 1010715 - DNA, 25 bp, Homo sapien
gagtagaaagtacaccccggtgcac

SEQ ID NO: 1010716 - DNA, 25 bp, Homo sapien
cttccgtagctggtgacttatctca

SEQ ID NO: 1010717 - DNA, 25 bp, Homo sapien
tgtctgtgtgccgagactgaacagc

SEQ ID NO: 1010718 - DNA, 25 bp, Homo sapien
tggtgacttatctcaaccacaggcc

SEQ ID NO: 1010719 - DNA, 25 bp, Homo sapien
gaagctccgtgcaatacattccaac

SEQ ID NO: 1010720 - DNA, 25 bp, Homo sapien
aggaacttccagttatctctttcag

SEQ ID NO: 1010721 - DNA, 25 bp, Homo sapien
gccttcttccggctgcttcctgaag

SEQ ID NO: 1010722 - DNA, 25 bp, Homo sapien
tgtgtccaacagcattgcaacttct

SEQ ID NO: 1010723 - DNA, 25 bp, Homo sapien
aggcctaccataacaacatctttac

SEQ ID NO: 1010724 - DNA, 25 bp, Homo sapien
gcatgattccaagactccgctgtaa

SEQ ID NO: 1010725 - DNA, 25 bp, Homo sapien
gtaagagttgcatctgaaactgatg

SEQ ID NO: 1010726 - DNA, 25 bp, Homo sapien
catctgaaactgatggtcaccaagg

SEQ ID NO: 1010727 - DNA, 25 bp, Homo sapien
tcacaaagcttctcctatccatgtg

SEQ ID NO: 1010728 - DNA, 25 bp, Homo sapien
aaagcttctcctatccatgtgctag

SEQ ID NO: 1010729 - DNA, 25 bp, Homo sapien
ggagtaaatccagcctcacaaagct

SEQ ID NO: 1010730 - DNA, 25 bp, Homo sapien
cacagcttagcaacaaaggccattt

SEQ ID NO: 1010731 - DNA, 25 bp, Homo sapien
gctgataaatgaccctatgaagctt

SEQ ID NO: 1010732 - DNA, 25 bp, Homo sapien
gataaatgaccctatgaagcttcag

SEQ ID NO: 1010733 - DNA, 25 bp, Homo sapien
tgataaatgaccctatgaagcttca

SEQ ID NO: 1010734 - DNA, 25 bp, Homo sapien
ttgctgataaatgaccctatgaagc

SEQ ID NO: 1010735 - DNA, 25 bp, Homo sapien
tcagtaacaaaaagagcactgtgta

SEQ ID NO: 1010736 - DNA, 25 bp, Homo sapien
actgtgtatcatcctaatagagggc

SEQ ID NO: 1010737 - DNA, 25 bp, Homo sapien
aaaaagagcactgtgtatcatccta

SEQ ID NO: 1010738 - DNA, 25 bp, Homo sapien
tatcatcctaatagagggccaggag

SEQ ID NO: 1010739 - DNA, 25 bp, Homo sapien
gaggcttcccacccggtgtctgcag

SEQ ID NO: 1010740 - DNA, 25 bp, Homo sapien
gctcaggcgacagtggagaccaaag

SEQ ID NO: 1010741 - DNA, 25 bp, Homo sapien
tgcttcactgaagccacgaggcttc

SEQ ID NO: 1010742 - DNA, 25 bp, Homo sapien
tgctgaagatggatgctcaggcgac

SEQ ID NO: 1010743 - DNA, 25 bp, Homo sapien
tcgcggttctttggatgagtcagca

SEQ ID NO: 1010744 - DNA, 25 bp, Homo sapien
taagtttcttccgaggagcagagag

SEQ ID NO: 1010745 - DNA, 25 bp, Homo sapien
tggatctgcaccctacctttagaag

SEQ ID NO: 1010746 - DNA, 25 bp, Homo sapien
actgggcgtgtgtcatggatctgca

SEQ ID NO: 1010747 - DNA, 25 bp, Homo sapien
gcttctcagcgtggaaatcacacca

SEQ ID NO: 1010748 - DNA, 25 bp, Homo sapien
tctcagcgtggaaatcacaccacag

SEQ ID NO: 1010749 - DNA, 25 bp, Homo sapien
agaggcaatccaacaaagtgcagta

SEQ ID NO: 1010750 - DNA, 25 bp, Homo sapien
gcagaggcaatccaacaaagtgcag

SEQ ID NO: 1010751 - DNA, 25 bp, Homo sapien
tgaataaagggatcttgcagcgatc

SEQ ID NO: 1010752 - DNA, 25 bp, Homo sapien
ggcataaaggacattagcatgaata

SEQ ID NO: 1010753 - DNA, 25 bp, Homo sapien
cattagcatgaataaagggatcttg

SEQ ID NO: 1010754 - DNA, 25 bp, Homo sapien
agcagaggccggcataaaggacatt

SEQ ID NO: 1010755 - DNA, 25 bp, Homo sapien
gggaccaaaaggcacaggccatcaa

SEQ ID NO: 1010756 - DNA, 25 bp, Homo sapien
gaccaaaaggcacaggccatcaagc

SEQ ID NO: 1010757 - DNA, 25 bp, Homo sapien
ctgggaccaaaaggcacaggccatc

SEQ ID NO: 1010758 - DNA, 25 bp, Homo sapien
ccaaaaggcacaggccatcaagccc

SEQ ID NO: 1010759 - DNA, 25 bp, Homo sapien
tgttaatcgtgtaaagtttggcctc

SEQ ID NO: 1010760 - DNA, 25 bp, Homo sapien
atcacaatgatttctagtaaacctg

SEQ ID NO: 1010761 - DNA, 25 bp, Homo sapien
catacttctgtcaatacttttccag

SEQ ID NO: 1010762 - DNA, 25 bp, Homo sapien
taaacctgccatgcatgcaacatcg

SEQ ID NO: 1010763 - DNA, 25 bp, Homo sapien
caatgacgaataacgtgaatcagct

SEQ ID NO: 1010764 - DNA, 25 bp, Homo sapien
taagcaatgacgaataacgtgaatc

SEQ ID NO: 1010765 - DNA, 25 bp, Homo sapien
tttaagcaatgacgaataacgtgaa

SEQ ID NO: 1010766 - DNA, 25 bp, Homo sapien
gcatttaagcaatgacgaataacgt

SEQ ID NO: 1010767 - DNA, 25 bp, Homo sapien
gcagcggcgtggttcatctgcacca

SEQ ID NO: 1010768 - DNA, 25 bp, Homo sapien
ggcgtactgatagaacctcctggca

SEQ ID NO: 1010769 - DNA, 25 bp, Homo sapien
gccgagacacaggtcgagaatcagt

SEQ ID NO: 1010770 - DNA, 25 bp, Homo sapien
tccagacgaaccagaatgtgctcca

SEQ ID NO: 1010771 - DNA, 25 bp, Homo sapien
aataatggtagagtggttttaagtg

SEQ ID NO: 1010772 - DNA, 25 bp, Homo sapien
atggtagagtggttttaagtgctta

SEQ ID NO: 1010773 - DNA, 25 bp, Homo sapien
taatggtagagtggttttaagtgct

SEQ ID NO: 1010774 - DNA, 25 bp, Homo sapien
ggtagagtggttttaagtgcttatc

SEQ ID NO: 1010775 - DNA, 25 bp, Homo sapien
tccgaattgtcgtggagactgtatc

SEQ ID NO: 1010776 - DNA, 25 bp, Homo sapien
caatgggtggctcagtttgttgtcc

SEQ ID NO: 1010777 - DNA, 25 bp, Homo sapien
gccctcacagctttgatcttcaaca

SEQ ID NO: 1010778 - DNA, 25 bp, Homo sapien
gctaccctcactttctccgaattgt

SEQ ID NO: 1010779 - DNA, 25 bp, Homo sapien
tcaggaggtcaataagaatggtcgg

SEQ ID NO: 1010780 - DNA, 25 bp, Homo sapien
tggtcgggggcatcatttcccagta

SEQ ID NO: 1010781 - DNA, 25 bp, Homo sapien
accttcttcaggaggtcaataagaa

SEQ ID NO: 1010782 - DNA, 25 bp, Homo sapien
cagctgagctcgtgtcaaatgccag

SEQ ID NO: 1010783 - DNA, 25 bp, Homo sapien
ctgtggaacggaccatcgggtaagg

SEQ ID NO: 1010784 - DNA, 25 bp, Homo sapien
tggaacggaccatcgggtaaggatc

SEQ ID NO: 1010785 - DNA, 25 bp, Homo sapien
catcgggtaaggatcttctaaaagg

SEQ ID NO: 1010786 - DNA, 25 bp, Homo sapien
acggaccatcgggtaaggatcttct

SEQ ID NO: 1010787 - DNA, 25 bp, Homo sapien
tgatgtcccaaatatgtttcaagac

SEQ ID NO: 1010788 - DNA, 25 bp, Homo sapien
aaatcagattgggattagtcagcaa

SEQ ID NO: 1010789 - DNA, 25 bp, Homo sapien
caaagacactaagcaatcatcgtta

SEQ ID NO: 1010790 - DNA, 25 bp, Homo sapien
aaatgagagcaacgaatgggtaccc

SEQ ID NO: 1010791 - DNA, 25 bp, Homo sapien
tttcactatccatttcaatagcatg

SEQ ID NO: 1010792 - DNA, 25 bp, Homo sapien
gcttcaacaaacaacaatgcagcat

SEQ ID NO: 1010793 - DNA, 25 bp, Homo sapien
gcagcatttgatcgaacttcagagt

SEQ ID NO: 1010794 - DNA, 25 bp, Homo sapien
tgaaggtttggatccctaataggaa

SEQ ID NO: 1010795 - DNA, 25 bp, Homo sapien
aaggatgggcttatataatctataa

SEQ ID NO: 1010796 - DNA, 25 bp, Homo sapien
tccaaaggatgggcttatataatct

SEQ ID NO: 1010797 - DNA, 25 bp, Homo sapien
caaaggatgggcttatataatctat

SEQ ID NO: 1010798 - DNA, 25 bp, Homo sapien
ccaaaggatgggcttatataatcta

SEQ ID NO: 1010799 - DNA, 25 bp, Homo sapien
agacctcctcggaaggtgtatcccg

SEQ ID NO: 1010800 - DNA, 25 bp, Homo sapien
ttggaatgcactggagacctcctcg

SEQ ID NO: 1010801 - DNA, 25 bp, Homo sapien
cctggatgcaatcattttcaatcgc

SEQ ID NO: 1010802 - DNA, 25 bp, Homo sapien
cgtggaacatgaagtcctggatgca

SEQ ID NO: 1010803 - DNA, 25 bp, Homo sapien
tatttcagggccactgttgacaagg

SEQ ID NO: 1010804 - DNA, 25 bp, Homo sapien
gcaactgggaaaaggcctagcctct

SEQ ID NO: 1010805 - DNA, 25 bp, Homo sapien
tggtactcagagtgcagcaactggg

SEQ ID NO: 1010806 - DNA, 25 bp, Homo sapien
gcatcacttaatgtgggacaaccac

SEQ ID NO: 1010807 - DNA, 25 bp, Homo sapien
atttctgcaatgtataccatcaaag

SEQ ID NO: 1010808 - DNA, 25 bp, Homo sapien
aaatttctgcaatgtataccatcaa

SEQ ID NO: 1010809 - DNA, 25 bp, Homo sapien
taaatttctgcaatgtataccatca

SEQ ID NO: 1010810 - DNA, 25 bp, Homo sapien
ttctgcaatgtataccatcaaagac

SEQ ID NO: 1010811 - DNA, 25 bp, Homo sapien
taatggtcccgtggatcattttgat

SEQ ID NO: 1010812 - DNA, 25 bp, Homo sapien
tttaatggtcccgtggatcattttg

SEQ ID NO: 1010813 - DNA, 25 bp, Homo sapien
tggtttttaatggtcccgtggatca

SEQ ID NO: 1010814 - DNA, 25 bp, Homo sapien
aatggtcccgtggatcattttgatg

SEQ ID NO: 1010815 - DNA, 25 bp, Homo sapien
tatttatgaagcactcaagtaacat

SEQ ID NO: 1010816 - DNA, 25 bp, Homo sapien
ttaatatttatgaagcactcaagta

SEQ ID NO: 1010817 - DNA, 25 bp, Homo sapien
aatatttatgaagcactcaagtaac

SEQ ID NO: 1010818 - DNA, 25 bp, Homo sapien
ctcttctttcttgatataattaata

SEQ ID NO: 1010819 - DNA, 25 bp, Homo sapien
tacgccaaagccgacatacgtctgc

SEQ ID NO: 1010820 - DNA, 25 bp, Homo sapien
tggatacgccaaagccgacatacgt

SEQ ID NO: 1010821 - DNA, 25 bp, Homo sapien
atataaagcttgatggatacgccaa

SEQ ID NO: 1010822 - DNA, 25 bp, Homo sapien
gcttgatggatacgccaaagccgac

SEQ ID NO: 1010823 - DNA, 25 bp, Homo sapien
agtaacatgacaaaggctgtctttc

SEQ ID NO: 1010824 - DNA, 25 bp, Homo sapien
tagtaacatgacaaaggctgtcttt

SEQ ID NO: 1010825 - DNA, 25 bp, Homo sapien
ctgtagttttcgttcagactcaggt

SEQ ID NO: 1010826 - DNA, 25 bp, Homo sapien
tcacagatgtaattgcataaattat

SEQ ID NO: 1010827 - DNA, 25 bp, Homo sapien
tagggcttcgtagttctcactttca

SEQ ID NO: 1010828 - DNA, 25 bp, Homo sapien
tccagtagggcttcgtagttctcac

SEQ ID NO: 1010829 - DNA, 25 bp, Homo sapien
aataacacattccagtagggcttcg

SEQ ID NO: 1010830 - DNA, 25 bp, Homo sapien
catttttgagccatgttcggtttcc

SEQ ID NO: 1010831 - DNA, 25 bp, Homo sapien
catgttcggtttccatattgtcttc

SEQ ID NO: 1010832 - DNA, 25 bp, Homo sapien
ttttgagccatgttcggtttccata

SEQ ID NO: 1010833 - DNA, 25 bp, Homo sapien
gagccatgttcggtttccatattgt

SEQ ID NO: 1010834 - DNA, 25 bp, Homo sapien
caacacatctgtcaataaattcttc

SEQ ID NO: 1010835 - DNA, 25 bp, Homo sapien
aaattcttcagcctttgccataatt

SEQ ID NO: 1010836 - DNA, 25 bp, Homo sapien
catccactgggctttctaacaacac

SEQ ID NO: 1010837 - DNA, 25 bp, Homo sapien
tcatttaggctgaaaggatcagagg

SEQ ID NO: 1010838 - DNA, 25 bp, Homo sapien
tttggtgcccactaatgaggtctcc

SEQ ID NO: 1010839 - DNA, 25 bp, Homo sapien
ggcacaatgcctacaactgactcaa

SEQ ID NO: 1010840 - DNA, 25 bp, Homo sapien
aatattccgtccgtcaaagcagcac

SEQ ID NO: 1010841 - DNA, 25 bp, Homo sapien
ttcttacatgacaaccacgggctcc

SEQ ID NO: 1010842 - DNA, 25 bp, Homo sapien
cacggcttgtacaaacgtctcacgt

SEQ ID NO: 1010843 - DNA, 25 bp, Homo sapien
cagctccttagacacggcttgtaca

SEQ ID NO: 1010844 - DNA, 25 bp, Homo sapien
ccttagacacggcttgtacaaacgt

SEQ ID NO: 1010845 - DNA, 25 bp, Homo sapien
tgtacaaacgtctcacgtttttcca

SEQ ID NO: 1010846 - DNA, 25 bp, Homo sapien
ttcaaatggcatttattttgtaacc

SEQ ID NO: 1010847 - DNA, 25 bp, Homo sapien
gttcaaatggcatttattttgtaac

SEQ ID NO: 1010848 - DNA, 25 bp, Homo sapien
agatggcactgttcaaatggcattt

SEQ ID NO: 1010849 - DNA, 25 bp, Homo sapien
gacagatggcactgttcaaatggca

SEQ ID NO: 1010850 - DNA, 25 bp, Homo sapien
cagagctgagttgattcaacaaaag

SEQ ID NO: 1010851 - DNA, 25 bp, Homo sapien
gatcccagctgcagattctgaagat

SEQ ID NO: 1010852 - DNA, 25 bp, Homo sapien
caagatgctggctcggcagagctga

SEQ ID NO: 1010853 - DNA, 25 bp, Homo sapien
aaagaacaatctgatcccagctgca

SEQ ID NO: 1010854 - DNA, 25 bp, Homo sapien
tatcagtccgaagagcaggttactc

SEQ ID NO: 1010855 - DNA, 25 bp, Homo sapien
aagagcaggttactcttcgcacagg

SEQ ID NO: 1010856 - DNA, 25 bp, Homo sapien
tactcttcgcacaggaggtctggta

SEQ ID NO: 1010857 - DNA, 25 bp, Homo sapien
catccagttatcagtccgaagagca

SEQ ID NO: 1010858 - DNA, 25 bp, Homo sapien
ggcagtgcccatgctcaggactgag

SEQ ID NO: 1010859 - DNA, 25 bp, Homo sapien
cagtgcccatgctcaggactgaggg

SEQ ID NO: 1010860 - DNA, 25 bp, Homo sapien
tctctgagggtagtgcccatgccca

SEQ ID NO: 1010861 - DNA, 25 bp, Homo sapien
gagggtagtgcccatgcccaggact

SEQ ID NO: 1010862 - DNA, 25 bp, Homo sapien
ctcccggtcgtcatcaggcgccgct

SEQ ID NO: 1010863 - DNA, 25 bp, Homo sapien
gcgctcggaccagattcaaacgcac

SEQ ID NO: 1010864 - DNA, 25 bp, Homo sapien
gtttcccgcgctcggaccagattca

SEQ ID NO: 1010865 - DNA, 25 bp, Homo sapien
tcaggcgccgctctcgcgagagctg

SEQ ID NO: 1010866 - DNA, 25 bp, Homo sapien
tagagttcagccacgcttcctttcg

SEQ ID NO: 1010867 - DNA, 25 bp, Homo sapien
catcaagggaatagatattgttcaa

SEQ ID NO: 1010868 - DNA, 25 bp, Homo sapien
gcaaagctgggagtcgaccgcgttc

SEQ ID NO: 1010869 - DNA, 25 bp, Homo sapien
ccgcaggtgtgaccgcggcaaagct

SEQ ID NO: 1010870 - DNA, 25 bp, Homo sapien
ggataagaacccacatgtacgagct

SEQ ID NO: 1010871 - DNA, 25 bp, Homo sapien
catggagcggattacacactggact

SEQ ID NO: 1010872 - DNA, 25 bp, Homo sapien
gagtgtctgacatcgctgggatcct

SEQ ID NO: 1010873 - DNA, 25 bp, Homo sapien
taaggcacaggatcaggataagaac

SEQ ID NO: 1010874 - DNA, 25 bp, Homo sapien
tacagtcgcatgtcattcagcagga

SEQ ID NO: 1010875 - DNA, 25 bp, Homo sapien
ttcagcaggagggaatatactggtc

SEQ ID NO: 1010876 - DNA, 25 bp, Homo sapien
agtgcacatcggctcaaaggtccca

SEQ ID NO: 1010877 - DNA, 25 bp, Homo sapien
ggttcctgacaataatgagatcgag

SEQ ID NO: 1010878 - DNA, 25 bp, Homo sapien
atccgactcctacggacacagctga

SEQ ID NO: 1010879 - DNA, 25 bp, Homo sapien
actgcacgttgtaggaactggcgaa

SEQ ID NO: 1010880 - DNA, 25 bp, Homo sapien
taaacaaggccataataaagcacag

SEQ ID NO: 1010881 - DNA, 25 bp, Homo sapien
taacattggtacgtctgtgagaggg

SEQ ID NO: 1010882 - DNA, 25 bp, Homo sapien
tatgtcatcgcctgaggcctcgtcc

SEQ ID NO: 1010883 - DNA, 25 bp, Homo sapien
tcgtcccatcttccgtgaggtcata

SEQ ID NO: 1010884 - DNA, 25 bp, Homo sapien
gaggcctcgtcccatcttccgtgag

SEQ ID NO: 1010885 - DNA, 25 bp, Homo sapien
ctatgtcatcgcctgaggcctcgtc

SEQ ID NO: 1010886 - DNA, 25 bp, Homo sapien
cactgggtccagcctttggcaagtt

SEQ ID NO: 1010887 - DNA, 25 bp, Homo sapien
actgggtccagcctttggcaagttc

SEQ ID NO: 1010888 - DNA, 25 bp, Homo sapien
ctgggtccagcctttggcaagttct

SEQ ID NO: 1010889 - DNA, 25 bp, Homo sapien
ctaaacactgcactgcaggtaaatg

SEQ ID NO: 1010890 - DNA, 25 bp, Homo sapien
ggttgaggattcgtttggcacttac

SEQ ID NO: 1010891 - DNA, 25 bp, Homo sapien
ttacaaactgcaggaactggttgag

SEQ ID NO: 1010892 - DNA, 25 bp, Homo sapien
taaacactgcactgcaggtaaatgt

SEQ ID NO: 1010893 - DNA, 25 bp, Homo sapien
gcacttctggtaacgaaacactgaa

SEQ ID NO: 1010894 - DNA, 25 bp, Homo sapien
gcaacgtcgagcgttctcctctgca

SEQ ID NO: 1010895 - DNA, 25 bp, Homo sapien
acaggaagccgccactgttcttcac

SEQ ID NO: 1010896 - DNA, 25 bp, Homo sapien
caaggagccctttgtctttggacag

SEQ ID NO: 1010897 - DNA, 25 bp, Homo sapien
taatccgtcacttcaaccgggcagt

SEQ ID NO: 1010898 - DNA, 25 bp, Homo sapien
ccaaaaatgagttcttcagggccat

SEQ ID NO: 1010899 - DNA, 25 bp, Homo sapien
tcctcagctggataaaataccgtac

SEQ ID NO: 1010900 - DNA, 25 bp, Homo sapien
catttagggccttcttaatccgtca

SEQ ID NO: 1010901 - DNA, 25 bp, Homo sapien
tttctttgacacgtgtgttttcctc

SEQ ID NO: 1010902 - DNA, 25 bp, Homo sapien
ttctttgacacgtgtgttttcctcc

SEQ ID NO: 1010903 - DNA, 25 bp, Homo sapien
tgttttctttgacacgtgtgttttc

SEQ ID NO: 1010904 - DNA, 25 bp, Homo sapien
aggggtcagagccgtcttcagagaa

SEQ ID NO: 1010905 - DNA, 25 bp, Homo sapien
tcagagccgtcttcagagaaggcaa

SEQ ID NO: 1010906 - DNA, 25 bp, Homo sapien
cagagccgtcttcagagaaggcaat

SEQ ID NO: 1010907 - DNA, 25 bp, Homo sapien
ggtcagagccgtcttcagagaaggc

SEQ ID NO: 1010908 - DNA, 25 bp, Homo sapien
gcaattaatgcaacagtcacctgac

SEQ ID NO: 1010909 - DNA, 25 bp, Homo sapien
ctttgcagcaaacgcggtcaggtgc

SEQ ID NO: 1010910 - DNA, 25 bp, Homo sapien
gaaaatagttcgtaagcccacagta

SEQ ID NO: 1010911 - DNA, 25 bp, Homo sapien
tctacaaaccgagaagcaacaagga

SEQ ID NO: 1010912 - DNA, 25 bp, Homo sapien
tacttcggtgaccaaaacgttgtca

SEQ ID NO: 1010913 - DNA, 25 bp, Homo sapien
cctttacgagcaccgtctctagagg

SEQ ID NO: 1010914 - DNA, 25 bp, Homo sapien
tcatgtgacatacgcagtggtgaca

SEQ ID NO: 1010915 - DNA, 25 bp, Homo sapien
tggaaatcctaaaggcggtgtctac

SEQ ID NO: 1010916 - DNA, 25 bp, Homo sapien
gcatgcacgaccacgataagcttgt

SEQ ID NO: 1010917 - DNA, 25 bp, Homo sapien
ctgtgccggatggtcagctggatct

SEQ ID NO: 1010918 - DNA, 25 bp, Homo sapien
gcttgtttctctgcgagctgtgccg

SEQ ID NO: 1010919 - DNA, 25 bp, Homo sapien
cagtggagactgtcccagggtcgtc

SEQ ID NO: 1010920 - DNA, 25 bp, Homo sapien
ggtggcgatgggcagcgagatgtcc

SEQ ID NO: 1010921 - DNA, 25 bp, Homo sapien
tgggggtcggctccttgactgagat

SEQ ID NO: 1010922 - DNA, 25 bp, Homo sapien
tgggcagcgagatgtccgaggcgat

SEQ ID NO: 1010923 - DNA, 25 bp, Homo sapien
tttgccgcagctcctgggtggcgat

SEQ ID NO: 1010924 - DNA, 25 bp, Homo sapien
ctggggaggccaggaggctggagga

SEQ ID NO: 1010925 - DNA, 25 bp, Homo sapien
gcctggggaggccaggaggctggag

SEQ ID NO: 1010926 - DNA, 25 bp, Homo sapien
ggggaggccaggaggctggaggagc

SEQ ID NO: 1010927 - DNA, 25 bp, Homo sapien
gtggcctggggaggccaggaggctg

SEQ ID NO: 1010928 - DNA, 25 bp, Homo sapien
ctgggccttttcttccataccaggc

SEQ ID NO: 1010929 - DNA, 25 bp, Homo sapien
cttccataccaggcttatcactgcc

SEQ ID NO: 1010930 - DNA, 25 bp, Homo sapien
gctgggccttttcttccataccagg

SEQ ID NO: 1010931 - DNA, 25 bp, Homo sapien
ccataccaggcttatcactgccccc

SEQ ID NO: 1010932 - DNA, 25 bp, Homo sapien
ctggaggcctttctcgcttttcgag

SEQ ID NO: 1010933 - DNA, 25 bp, Homo sapien
cccagacatatgagatttgatggat

SEQ ID NO: 1010934 - DNA, 25 bp, Homo sapien
cacagagggacgtttgacttgagct

SEQ ID NO: 1010935 - DNA, 25 bp, Homo sapien
cctctttggacacagagggacgttt

SEQ ID NO: 1010936 - DNA, 25 bp, Homo sapien
gggcatcgccgaggcctgcgtcttc

SEQ ID NO: 1010937 - DNA, 25 bp, Homo sapien
tgccacacaacctgggcagaagctc

SEQ ID NO: 1010938 - DNA, 25 bp, Homo sapien
ggccacgtctcaggcaaggagcccc

SEQ ID NO: 1010939 - DNA, 25 bp, Homo sapien
cggtggcagtgataagcctggtgtg

SEQ ID NO: 1010940 - DNA, 25 bp, Homo sapien
tcgacacaagaccaaagcccgtatt

SEQ ID NO: 1010941 - DNA, 25 bp, Homo sapien
catcaagagcccagagtcgcatttc

SEQ ID NO: 1010942 - DNA, 25 bp, Homo sapien
tgtgtgagcacatgagctggtccct

SEQ ID NO: 1010943 - DNA, 25 bp, Homo sapien
ggaagaaagtccagaacccctgcta

SEQ ID NO: 1010944 - DNA, 25 bp, Homo sapien
ggaaccctctgatacccagcaacaa

SEQ ID NO: 1010945 - DNA, 25 bp, Homo sapien
caacctggaaacgtggcctgttcta

SEQ ID NO: 1010946 - DNA, 25 bp, Homo sapien
agccgtgggcctgctcgggcaacct

SEQ ID NO: 1010947 - DNA, 25 bp, Homo sapien
aagcactgtttgagtagccgtgggc

SEQ ID NO: 1010948 - DNA, 25 bp, Homo sapien
atggtgttcactgcaggacgacacg

SEQ ID NO: 1010949 - DNA, 25 bp, Homo sapien
ggtgttcactgcaggacgacacgat

SEQ ID NO: 1010950 - DNA, 25 bp, Homo sapien
tgttcactgcaggacgacacgatac

SEQ ID NO: 1010951 - DNA, 25 bp, Homo sapien
ctatggtgttcactgcaggacgaca

SEQ ID NO: 1010952 - DNA, 25 bp, Homo sapien
tggaagcgctggctcacagtcatgt

SEQ ID NO: 1010953 - DNA, 25 bp, Homo sapien
cagggaacactggtgctgctcgtct

SEQ ID NO: 1010954 - DNA, 25 bp, Homo sapien
tggacccgagttactgagctggaag

SEQ ID NO: 1010955 - DNA, 25 bp, Homo sapien
ttgatggtgctgtttggacccgagt

SEQ ID NO: 1010956 - DNA, 25 bp, Homo sapien
tggtggcaatacacactcataacga

SEQ ID NO: 1010957 - DNA, 25 bp, Homo sapien
tctcaggctatacaaaaatggtcag

SEQ ID NO: 1010958 - DNA, 25 bp, Homo sapien
caataatgaccaatcggttcggaga

SEQ ID NO: 1010959 - DNA, 25 bp, Homo sapien
gaaacactggcataactaggatcat

SEQ ID NO: 1010960 - DNA, 25 bp, Homo sapien
aataaagcaccaataataaagacag

SEQ ID NO: 1010961 - DNA, 25 bp, Homo sapien
ttaagaagctaaacatgaacctggc

SEQ ID NO: 1010962 - DNA, 25 bp, Homo sapien
tatacacgggtcacaactcagcaaa

SEQ ID NO: 1010963 - DNA, 25 bp, Homo sapien
tagacaactagaggacataccgcat

SEQ ID NO: 1010964 - DNA, 25 bp, Homo sapien
ttagtaatgacgctgaaaccacccg

SEQ ID NO: 1010965 - DNA, 25 bp, Homo sapien
tcctggcgcttgggattgtgaatga

SEQ ID NO: 1010966 - DNA, 25 bp, Homo sapien
gttttcctcccacacaggttcattg

SEQ ID NO: 1010967 - DNA, 25 bp, Homo sapien
cccacacaggttcattggttttgta

SEQ ID NO: 1010968 - DNA, 25 bp, Homo sapien
caacttcaaggtcctggcgcttggg

SEQ ID NO: 1010969 - DNA, 25 bp, Homo sapien
gacaaacttaggaattgttcccatg

SEQ ID NO: 1010970 - DNA, 25 bp, Homo sapien
atagccataccctcttttcaagtcg

SEQ ID NO: 1010971 - DNA, 25 bp, Homo sapien
tatttatagagtgctcaagacaaac

SEQ ID NO: 1010972 - DNA, 25 bp, Homo sapien
caagtcgtaattctaactgtattgg

SEQ ID NO: 1010973 - DNA, 25 bp, Homo sapien
gctctcctgggccttgtgcccaact

SEQ ID NO: 1010974 - DNA, 25 bp, Homo sapien
tctcctgggccttgtgcccaactga

SEQ ID NO: 1010975 - DNA, 25 bp, Homo sapien
ttgctctcctgggccttgtgcccaa

SEQ ID NO: 1010976 - DNA, 25 bp, Homo sapien
cctgggccttgtgcccaactgacat

SEQ ID NO: 1010977 - DNA, 25 bp, Homo sapien
aggatttgggttgctgcttattttc

SEQ ID NO: 1010978 - DNA, 25 bp, Homo sapien
acaacaggatttgggttgctgctta

SEQ ID NO: 1010979 - DNA, 25 bp, Homo sapien
ctggacaacaggatttgggttgctg

SEQ ID NO: 1010980 - DNA, 25 bp, Homo sapien
aacaggatttgggttgctgcttatt

SEQ ID NO: 1010981 - DNA, 25 bp, Homo sapien
gagtcaagactcaacaatacagcag

SEQ ID NO: 1010982 - DNA, 25 bp, Homo sapien
aagcagcagatacgtgtgacatgag

SEQ ID NO: 1010983 - DNA, 25 bp, Homo sapien
taacttagccccacaagaagatgca

SEQ ID NO: 1010984 - DNA, 25 bp, Homo sapien
tctctggcgggaataaaaatagtac

SEQ ID NO: 1010985 - DNA, 25 bp, Homo sapien
gcagtcttcttcaagacatcggggt

SEQ ID NO: 1010986 - DNA, 25 bp, Homo sapien
tttaaagctctctgaactgcagtct

SEQ ID NO: 1010987 - DNA, 25 bp, Homo sapien
tcttcaagacatcggggttaaattc

SEQ ID NO: 1010988 - DNA, 25 bp, Homo sapien
ctttaaagctctctgaactgcagtc

SEQ ID NO: 1010989 - DNA, 25 bp, Homo sapien
tgctgcccggaaggactgacattct

SEQ ID NO: 1010990 - DNA, 25 bp, Homo sapien
tcgggctactcaccatcaggaagca

SEQ ID NO: 1010991 - DNA, 25 bp, Homo sapien
acatgaccctaaagctgccggtgga

SEQ ID NO: 1010992 - DNA, 25 bp, Homo sapien
tagaccaggcaagtgcttcaggcag

SEQ ID NO: 1010993 - DNA, 25 bp, Homo sapien
gaagaggtcgtttccagcctacgaa

SEQ ID NO: 1010994 - DNA, 25 bp, Homo sapien
taaacaagtagcaacctgagacccc

SEQ ID NO: 1010995 - DNA, 25 bp, Homo sapien
gaatctctagtctgtgtcatctggg

SEQ ID NO: 1010996 - DNA, 25 bp, Homo sapien
tgaagccgtgcctgggaatctctag

SEQ ID NO: 1010997 - DNA, 25 bp, Homo sapien
ctaataaggaagtacagtgtgcaac

SEQ ID NO: 1010998 - DNA, 25 bp, Homo sapien
taacgctcctgatacaaggtcagag

SEQ ID NO: 1010999 - DNA, 25 bp, Homo sapien
gttcacatttgttttacggaacatc

SEQ ID NO: 1011000 - DNA, 25 bp, Homo sapien
tacggaacatcttaggtgatgcata

SEQ ID NO: 1011001 - DNA, 25 bp, Homo sapien
catcaggcattatggaagcctttac

SEQ ID NO: 1011002 - DNA, 25 bp, Homo sapien
gctaaaagcaaacaattctactgta

SEQ ID NO: 1011003 - DNA, 25 bp, Homo sapien
caacaaacattaccatggctaaaag

SEQ ID NO: 1011004 - DNA, 25 bp, Homo sapien
ggcctaaccttttgtagtcaattca

SEQ ID NO: 1011005 - DNA, 25 bp, Homo sapien
tgctaggaaatacgcacccacaggt

SEQ ID NO: 1011006 - DNA, 25 bp, Homo sapien
tgttctgcgagaaacatcccaggca

SEQ ID NO: 1011007 - DNA, 25 bp, Homo sapien
cagaaatgtatgcactcccagagca

SEQ ID NO: 1011008 - DNA, 25 bp, Homo sapien
tgtatctggcagtaggtcattccga

SEQ ID NO: 1011009 - DNA, 25 bp, Homo sapien
gaggaaagaccatcgttggcttggt

SEQ ID NO: 1011010 - DNA, 25 bp, Homo sapien
tacaagatcagcaatgcagaggaaa

SEQ ID NO: 1011011 - DNA, 25 bp, Homo sapien
aaggttccttgctgaatccaagtac

SEQ ID NO: 1011012 - DNA, 25 bp, Homo sapien
tggtctttgtcagctttgatgtctg

SEQ ID NO: 1011013 - DNA, 25 bp, Homo sapien
tgggaacctcgtccagagtgaacca

SEQ ID NO: 1011014 - DNA, 25 bp, Homo sapien
tccagtctcaagtgtagcttcccct

SEQ ID NO: 1011015 - DNA, 25 bp, Homo sapien
tcaagtgtagcttccccttgggaac

SEQ ID NO: 1011016 - DNA, 25 bp, Homo sapien
cttgtcgaggtttgacgcatttggc

SEQ ID NO: 1011017 - DNA, 25 bp, Homo sapien
caacttcaatgaggtcaatcataag

SEQ ID NO: 1011018 - DNA, 25 bp, Homo sapien
ggcgctccttttcaacttcaatgag

SEQ ID NO: 1011019 - DNA, 25 bp, Homo sapien
ttttcaacttcaatgaggtcaatca

SEQ ID NO: 1011020 - DNA, 25 bp, Homo sapien
tccttttcaacttcaatgaggtcaa

SEQ ID NO: 1011021 - DNA, 25 bp, Homo sapien
gtccaggatgttcatacactaaagc

SEQ ID NO: 1011022 - DNA, 25 bp, Homo sapien
ttgtctgggtcttcatcaaagagct

SEQ ID NO: 1011023 - DNA, 25 bp, Homo sapien
ttgtccaggatgttcatacactaaa

SEQ ID NO: 1011024 - DNA, 25 bp, Homo sapien
ttcctaaaaagtcatccttgtctgg

SEQ ID NO: 1011025 - DNA, 25 bp, Homo sapien
gatgctatcttggaataaccacgag

SEQ ID NO: 1011026 - DNA, 25 bp, Homo sapien
tatctgcttagcaccactcagggta

SEQ ID NO: 1011027 - DNA, 25 bp, Homo sapien
taaatcacacgactgtcctgaaggg

SEQ ID NO: 1011028 - DNA, 25 bp, Homo sapien
ggcatgagacagaccaaagatccag

SEQ ID NO: 1011029 - DNA, 25 bp, Homo sapien
tctttcccctgaagatcctgagctt

SEQ ID NO: 1011030 - DNA, 25 bp, Homo sapien
ctaatgattccataggggtctgact

SEQ ID NO: 1011031 - DNA, 25 bp, Homo sapien
tgactttcccttgacaagtccctta

SEQ ID NO: 1011032 - DNA, 25 bp, Homo sapien
tttggaagatttggttgccaactct

SEQ ID NO: 1011033 - DNA, 25 bp, Homo sapien
ctgaaaagaagaacaaactgaagtt

SEQ ID NO: 1011034 - DNA, 25 bp, Homo sapien
gaatgccagcgatataaccaatttg

SEQ ID NO: 1011035 - DNA, 25 bp, Homo sapien
ccacatctattgacagcaccggctg

SEQ ID NO: 1011036 - DNA, 25 bp, Homo sapien
cacttggaaaactcgaagcagctct

SEQ ID NO: 1011037 - DNA, 25 bp, Homo sapien
tgtactcagagcataagaggcttag

SEQ ID NO: 1011038 - DNA, 25 bp, Homo sapien
tttggtacaggaaaccgcaactgag

SEQ ID NO: 1011039 - DNA, 25 bp, Homo sapien
tgggaagcaccagatagtttgatat

SEQ ID NO: 1011040 - DNA, 25 bp, Homo sapien
gaacttcactgacaagtggaacggt

SEQ ID NO: 1011041 - DNA, 25 bp, Homo sapien
gaacggtgattcgattgggaagcac

SEQ ID NO: 1011042 - DNA, 25 bp, Homo sapien
tccagaagattcgtcagtcctgtcc

SEQ ID NO: 1011043 - DNA, 25 bp, Homo sapien
gattcgtcagtcctgtccagttaat

SEQ ID NO: 1011044 - DNA, 25 bp, Homo sapien
gacatccagaagattcgtcagtcct

SEQ ID NO: 1011045 - DNA, 25 bp, Homo sapien
gaagattcgtcagtcctgtccagtt

SEQ ID NO: 1011046 - DNA, 25 bp, Homo sapien
gaacagctttcaaaagcggagtcat

SEQ ID NO: 1011047 - DNA, 25 bp, Homo sapien
gcgcgtcataatctggctggtagag

SEQ ID NO: 1011048 - DNA, 25 bp, Homo sapien
tttgtctcctcatgaatcactagtg

SEQ ID NO: 1011049 - DNA, 25 bp, Homo sapien
tccttaaactttgatcctgagactg

SEQ ID NO: 1011050 - DNA, 25 bp, Homo sapien
tacataaaggccactgcagggttgt

SEQ ID NO: 1011051 - DNA, 25 bp, Homo sapien
taaagcgaggtgtgcctatgaacac

SEQ ID NO: 1011052 - DNA, 25 bp, Homo sapien
gaattgccgaaacatgacacagagc

SEQ ID NO: 1011053 - DNA, 25 bp, Homo sapien
tgttcgcttcacagcacggacaggc

SEQ ID NO: 1011054 - DNA, 25 bp, Homo sapien
tacagctgacaaaacccctagcctg

SEQ ID NO: 1011055 - DNA, 25 bp, Homo sapien
agatggcttcttgcctatcaaaaca

SEQ ID NO: 1011056 - DNA, 25 bp, Homo sapien
gctcctcttgtaggcaaactatcta

SEQ ID NO: 1011057 - DNA, 25 bp, Homo sapien
acatgaagactttaaaggcctggga

SEQ ID NO: 1011058 - DNA, 25 bp, Homo sapien
tcaaagcacaactgaccaaacataa

SEQ ID NO: 1011059 - DNA, 25 bp, Homo sapien
cagagactatttctgaccaattgtc

SEQ ID NO: 1011060 - DNA, 25 bp, Homo sapien
tcaacgatggagtattaaaaacaca

SEQ ID NO: 1011061 - DNA, 25 bp, Homo sapien
aggaaccatctataatcaaagcaca

SEQ ID NO: 1011062 - DNA, 25 bp, Homo sapien
gataagctctcagttaaggcacaaa

SEQ ID NO: 1011063 - DNA, 25 bp, Homo sapien
gagagctgtttatcaagagataagc

SEQ ID NO: 1011064 - DNA, 25 bp, Homo sapien
aacagaaagggacaacggtgagttg

SEQ ID NO: 1011065 - DNA, 25 bp, Homo sapien
cttccacgggtatgtatttttgcca

SEQ ID NO: 1011066 - DNA, 25 bp, Homo sapien
gacaaagctccaactaagggcatat

SEQ ID NO: 1011067 - DNA, 25 bp, Homo sapien
taagggcatatctccaatcaacggt

SEQ ID NO: 1011068 - DNA, 25 bp, Homo sapien
ctccaatcaacggttccaggatcac

SEQ ID NO: 1011069 - DNA, 25 bp, Homo sapien
caggatcacccgcatggtaccatga

SEQ ID NO: 1011070 - DNA, 25 bp, Homo sapien
aaaatatcgtttgatctccaaatca

SEQ ID NO: 1011071 - DNA, 25 bp, Homo sapien
ctacaaaaatatcgtttgatctcca

SEQ ID NO: 1011072 - DNA, 25 bp, Homo sapien
caaaaatatcgtttgatctccaaat

SEQ ID NO: 1011073 - DNA, 25 bp, Homo sapien
tatcgtttgatctccaaatcaatct

SEQ ID NO: 1011074 - DNA, 25 bp, Homo sapien
caacggccgctatctgggttcaggt

SEQ ID NO: 1011075 - DNA, 25 bp, Homo sapien
tcacgaagcctggtatcagcccagt

SEQ ID NO: 1011076 - DNA, 25 bp, Homo sapien
tgatggactcaaactcgctcggtgc

SEQ ID NO: 1011077 - DNA, 25 bp, Homo sapien
gatacttggcatatgttacggcagc

SEQ ID NO: 1011078 - DNA, 25 bp, Homo sapien
aatgctgctaagaatgtgggtgtgc

SEQ ID NO: 1011079 - DNA, 25 bp, Homo sapien
cggattcatgattatagggactgca

SEQ ID NO: 1011080 - DNA, 25 bp, Homo sapien
ggatgatgactgcttatcggattca

SEQ ID NO: 1011081 - DNA, 25 bp, Homo sapien
ggtatgtacacagaggcgggatttc

SEQ ID NO: 1011082 - DNA, 25 bp, Homo sapien
tatgaatggcaatgatcaaggctgt

SEQ ID NO: 1011083 - DNA, 25 bp, Homo sapien
taagacgtgtgctcactgtatcctc

SEQ ID NO: 1011084 - DNA, 25 bp, Homo sapien
caaggctgttagaaactgagaccca

SEQ ID NO: 1011085 - DNA, 25 bp, Homo sapien
tacagctaagtgacattacacgcca

SEQ ID NO: 1011086 - DNA, 25 bp, Homo sapien
tttcagtgtataccttaacaccatt

SEQ ID NO: 1011087 - DNA, 25 bp, Homo sapien
attttcagtgtataccttaacacca

SEQ ID NO: 1011088 - DNA, 25 bp, Homo sapien
accttaacaccattgatcctgaggg

SEQ ID NO: 1011089 - DNA, 25 bp, Homo sapien
cagtgtataccttaacaccattgat

SEQ ID NO: 1011090 - DNA, 25 bp, Homo sapien
ctgaaataagaagtagcttatttta

SEQ ID NO: 1011091 - DNA, 25 bp, Homo sapien
aagaagtagcttattttaagataca

SEQ ID NO: 1011092 - DNA, 25 bp, Homo sapien
agtagcttattttaagatacagagg

SEQ ID NO: 1011093 - DNA, 25 bp, Homo sapien
tagcttattttaagatacagaggtt

SEQ ID NO: 1011094 - DNA, 25 bp, Homo sapien
tccccgcacggctggttctatagtt

SEQ ID NO: 1011095 - DNA, 25 bp, Homo sapien
taaggtgggtgtttgctccccgcac

SEQ ID NO: 1011096 - DNA, 25 bp, Homo sapien
tcgtgaaactaaaggtgctaaggtg

SEQ ID NO: 1011097 - DNA, 25 bp, Homo sapien
gctggcccacgtcgaccttcgtgaa

SEQ ID NO: 1011098 - DNA, 25 bp, Homo sapien
cttatttagccattctgctctttca

SEQ ID NO: 1011099 - DNA, 25 bp, Homo sapien
cattctgctctttcagtgtctggaa

SEQ ID NO: 1011100 - DNA, 25 bp, Homo sapien
ctgctctttcagtgtctggaaaatg

SEQ ID NO: 1011101 - DNA, 25 bp, Homo sapien
tctgctctttcagtgtctggaaaat

SEQ ID NO: 1011102 - DNA, 25 bp, Homo sapien
tagtgctgcaccctagtctggacaa

SEQ ID NO: 1011103 - DNA, 25 bp, Homo sapien
gggatccctcttacaattctccagg

SEQ ID NO: 1011104 - DNA, 25 bp, Homo sapien
tggcccaaaccagctaagagacacc

SEQ ID NO: 1011105 - DNA, 25 bp, Homo sapien
caaccatgcctgtgattagtgctgc

SEQ ID NO: 1011106 - DNA, 25 bp, Homo sapien
catgttgtccatcactgcctcactg

SEQ ID NO: 1011107 - DNA, 25 bp, Homo sapien
tcactgcctcactgtaggcatgggt

SEQ ID NO: 1011108 - DNA, 25 bp, Homo sapien
gactctccctctgtcatcgacgctg

SEQ ID NO: 1011109 - DNA, 25 bp, Homo sapien
tcactgtaggcatgggtgccaaccc

SEQ ID NO: 1011110 - DNA, 25 bp, Homo sapien
aatgaacaacatctaagcgggtagc

SEQ ID NO: 1011111 - DNA, 25 bp, Homo sapien
tacttaaacagatgtggcctgcgtt

SEQ ID NO: 1011112 - DNA, 25 bp, Homo sapien
gagagggtcacccatttactggcca

SEQ ID NO: 1011113 - DNA, 25 bp, Homo sapien
gttccccggagcacacctaagtgag

SEQ ID NO: 1011114 - DNA, 25 bp, Homo sapien
ctctgggcctgtgactcagacggct

SEQ ID NO: 1011115 - DNA, 25 bp, Homo sapien
cctgtgactcagacggctgacccga

SEQ ID NO: 1011116 - DNA, 25 bp, Homo sapien
gctgacccgaggacatgcctccctg

SEQ ID NO: 1011117 - DNA, 25 bp, Homo sapien
tccctgcccgcccatgtccagtgtg

SEQ ID NO: 1011118 - DNA, 25 bp, Homo sapien
tcttccaaaggttattcagacaaaa

SEQ ID NO: 1011119 - DNA, 25 bp, Homo sapien
tgtgactcattatggagggaatgct

SEQ ID NO: 1011120 - DNA, 25 bp, Homo sapien
gcaaactttaatataccaacacagc

SEQ ID NO: 1011121 - DNA, 25 bp, Homo sapien
gagatagggataaatcctctgtctt

SEQ ID NO: 1011122 - DNA, 25 bp, Homo sapien
gcctggcaacagagcgagattccgt

SEQ ID NO: 1011123 - DNA, 25 bp, Homo sapien
ggcggaagggaagcgcctgcctgga

SEQ ID NO: 1011124 - DNA, 25 bp, Homo sapien
ttggcaggtcgcaggaaccggcccg

SEQ ID NO: 1011125 - DNA, 25 bp, Homo sapien
ctaggttggcaggtcgcaggaaccg

SEQ ID NO: 1011126 - DNA, 25 bp, Homo sapien
aagggaagcgcctgcctggaccggg

SEQ ID NO: 1011127 - DNA, 25 bp, Homo sapien
ccaggcggcaggtcgcggggagggg

SEQ ID NO: 1011128 - DNA, 25 bp, Homo sapien
gcggcaggtcgcggggaggggagtg

SEQ ID NO: 1011129 - DNA, 25 bp, Homo sapien
gcaggtcgcggggaggggagtgcct

SEQ ID NO: 1011130 - DNA, 25 bp, Homo sapien
aggtcgcggggaggggagtgcctgc

SEQ ID NO: 1011131 - DNA, 25 bp, Homo sapien
ccaggcgggcaggtcgcaggcgcgc

SEQ ID NO: 1011132 - DNA, 25 bp, Homo sapien
aggcgggcaggtcgcaggcgcgcac

SEQ ID NO: 1011133 - DNA, 25 bp, Homo sapien
ccccaggcgcacgacgcgctcctcg

SEQ ID NO: 1011134 - DNA, 25 bp, Homo sapien
gcgcacgacgcgctcctcgtcttcc

SEQ ID NO: 1011135 - DNA, 25 bp, Homo sapien
gcagcagcgcgaagctccgcgccag

SEQ ID NO: 1011136 - DNA, 25 bp, Homo sapien
ccaggtagcccagcgcgtacacggg

SEQ ID NO: 1011137 - DNA, 25 bp, Homo sapien
agaacccagctgaagctgagcccca

SEQ ID NO: 1011138 - DNA, 25 bp, Homo sapien
ctgcggcgacaccaggcgagcagcg

SEQ ID NO: 1011139 - DNA, 25 bp, Homo sapien
agctccacgctcagcacgcccccgg

SEQ ID NO: 1011140 - DNA, 25 bp, Homo sapien
ggccctcgccccgggcgccgctcat

SEQ ID NO: 1011141 - DNA, 25 bp, Homo sapien
cgccgcgcggcccccagccccgccg

SEQ ID NO: 1011142 - DNA, 25 bp, Homo sapien
gggccctcgccccgggcgccgctca

SEQ ID NO: 1011143 - DNA, 25 bp, Homo sapien
cagccccgccggcgcccgcctccgg

SEQ ID NO: 1011144 - DNA, 25 bp, Homo sapien
gctcgcgctgatcccgggcggctca

SEQ ID NO: 1011145 - DNA, 25 bp, Homo sapien
tgggtgctcgcgctgatcccgggcg

SEQ ID NO: 1011146 - DNA, 25 bp, Homo sapien
cctccgcccgggacggtggcgtcat

SEQ ID NO: 1011147 - DNA, 25 bp, Homo sapien
ggcgggctgggtgctcgcgctgatc

SEQ ID NO: 1011148 - DNA, 25 bp, Homo sapien
gctggcacgtcaccgggagcgggcg

SEQ ID NO: 1011149 - DNA, 25 bp, Homo sapien
ggctggcacgtcaccgggagcgggc

SEQ ID NO: 1011150 - DNA, 25 bp, Homo sapien
gtcgtcaaacccaaaggctgaccgc

SEQ ID NO: 1011151 - DNA, 25 bp, Homo sapien
gggcggttttggctcggcgtcgcgc

SEQ ID NO: 1011152 - DNA, 25 bp, Homo sapien
ttgccgtcgtcaaacccaaaggctg

SEQ ID NO: 1011153 - DNA, 25 bp, Homo sapien
gggtgcgtggctgcgctcgccgagg

SEQ ID NO: 1011154 - DNA, 25 bp, Homo sapien
cctgtttgcggtcattttgcggcca

SEQ ID NO: 1011155 - DNA, 25 bp, Homo sapien
agagggcggcgtccctgtttgcggt

SEQ ID NO: 1011156 - DNA, 25 bp, Homo sapien
agggcggcgtccctgtttgcggtca

SEQ ID NO: 1011157 - DNA, 25 bp, Homo sapien
tttgcggtcattttgcggccaggag

SEQ ID NO: 1011158 - DNA, 25 bp, Homo sapien
ttgcctagccagtgtgcaaggttgt

SEQ ID NO: 1011159 - DNA, 25 bp, Homo sapien
caaggttgtggcttttgcggagtct

SEQ ID NO: 1011160 - DNA, 25 bp, Homo sapien
tatttttcggtgtgaggttgcctag

SEQ ID NO: 1011161 - DNA, 25 bp, Homo sapien
ggagtctctcgggacggtcttgtta

SEQ ID NO: 1011162 - DNA, 25 bp, Homo sapien
ttttctactgaatacagctccgctt

SEQ ID NO: 1011163 - DNA, 25 bp, Homo sapien
ttgtgctcgtcactgtgatcacctt

SEQ ID NO: 1011164 - DNA, 25 bp, Homo sapien
tgtgctcgtcactgtgatcaccttt

SEQ ID NO: 1011165 - DNA, 25 bp, Homo sapien
gatcaccttttctactgaatacagc

SEQ ID NO: 1011166 - DNA, 25 bp, Homo sapien
ggatgctaatgtgactccgtaacac

SEQ ID NO: 1011167 - DNA, 25 bp, Homo sapien
gctaatgtgactccgtaacacctga

SEQ ID NO: 1011168 - DNA, 25 bp, Homo sapien
tgctaatgtgactccgtaacacctg

SEQ ID NO: 1011169 - DNA, 25 bp, Homo sapien
tatgactccataacacctgactgca

SEQ ID NO: 1011170 - DNA, 25 bp, Homo sapien
tacattcctgtgaggcaccggtgag

SEQ ID NO: 1011171 - DNA, 25 bp, Homo sapien
ggaattgcaggaaagtcaatcatgc

SEQ ID NO: 1011172 - DNA, 25 bp, Homo sapien
tgaatctactttacatgtggaaaga

SEQ ID NO: 1011173 - DNA, 25 bp, Homo sapien
gagacacaagttacagtaggatctg

SEQ ID NO: 1011174 - DNA, 25 bp, Homo sapien
tcctgcctggcggttgctaggagcc

SEQ ID NO: 1011175 - DNA, 25 bp, Homo sapien
cctgcttgtcggttgctaggcgctg

SEQ ID NO: 1011176 - DNA, 25 bp, Homo sapien
tcgagcttcgcggactccttcgggc

SEQ ID NO: 1011177 - DNA, 25 bp, Homo sapien
tttgcgcagcggttctctcggccgg

SEQ ID NO: 1011178 - DNA, 25 bp, Homo sapien
tcccctctctgtggtaccctggtct

SEQ ID NO: 1011179 - DNA, 25 bp, Homo sapien
catgtctcctggttggactgtccct

SEQ ID NO: 1011180 - DNA, 25 bp, Homo sapien
cgtttcctggttggactgccccttg

SEQ ID NO: 1011181 - DNA, 25 bp, Homo sapien
tggactgtccccgagtatcctgggc

SEQ ID NO: 1011182 - DNA, 25 bp, Homo sapien
aagcacctgcgtgttctgcactgag

SEQ ID NO: 1011183 - DNA, 25 bp, Homo sapien
tgtggcatggtgataagcacctgcg

SEQ ID NO: 1011184 - DNA, 25 bp, Homo sapien
ttgttggagtgtgttactgtggcat

SEQ ID NO: 1011185 - DNA, 25 bp, Homo sapien
tagggctgtaccctgtgttgttgga

SEQ ID NO: 1011186 - DNA, 25 bp, Homo sapien
tgggaggcccatgataccttctgtc

SEQ ID NO: 1011187 - DNA, 25 bp, Homo sapien
caggcagaaacccattgtcctggga

SEQ ID NO: 1011188 - DNA, 25 bp, Homo sapien
gaggaccaggcagaaacccattgtc

SEQ ID NO: 1011189 - DNA, 25 bp, Homo sapien
tgtgagggaccctctgggctgtggc

SEQ ID NO: 1011190 - DNA, 25 bp, Homo sapien
caggaggtagagaagtattttctgg

SEQ ID NO: 1011191 - DNA, 25 bp, Homo sapien
gaggtagagaagtattttctggcat

SEQ ID NO: 1011192 - DNA, 25 bp, Homo sapien
agaagagacgcaaaagaccgggaga

SEQ ID NO: 1011193 - DNA, 25 bp, Homo sapien
catcgagaggcagaaaagtctcaca

SEQ ID NO: 1011194 - DNA, 25 bp, Homo sapien
aagtccacaccgctaaggagagtcc

SEQ ID NO: 1011195 - DNA, 25 bp, Homo sapien
gctgaaggagaaacatcgagaggca

SEQ ID NO: 1011196 - DNA, 25 bp, Homo sapien
ccactatgcctggctaatttaaaaa

SEQ ID NO: 1011197 - DNA, 25 bp, Homo sapien
ctgggacctgtacaggtgcatgcca

SEQ ID NO: 1011198 - DNA, 25 bp, Homo sapien
tgccactatgcctggctaatttaaa

SEQ ID NO: 1011199 - DNA, 25 bp, Homo sapien
actatgcctggctaatttaaaaaat

SEQ ID NO: 1011200 - DNA, 25 bp, Homo sapien
ggtggcatgtggaggcaaatggagg

SEQ ID NO: 1011201 - DNA, 25 bp, Homo sapien
tggtggcatgtggaggcaaatggag

SEQ ID NO: 1011202 - DNA, 25 bp, Homo sapien
aacaaaaccaatcagctgggtacag

SEQ ID NO: 1011203 - DNA, 25 bp, Homo sapien
tgagggaaggttgattgagcctagg

SEQ ID NO: 1011204 - DNA, 25 bp, Homo sapien
tgtacttcagtctaggtcacagaat

SEQ ID NO: 1011205 - DNA, 25 bp, Homo sapien
taacttgttttagggctgggtgctg

SEQ ID NO: 1011206 - DNA, 25 bp, Homo sapien
tggctgcggctgtaggatccacaag

SEQ ID NO: 1011207 - DNA, 25 bp, Homo sapien
cacgtccacagttaaagcggcagcg

SEQ ID NO: 1011208 - DNA, 25 bp, Homo sapien
taaaatccgcataatctgccccgtg

SEQ ID NO: 1011209 - DNA, 25 bp, Homo sapien
tctcatgtgagcgtctagaccggga

SEQ ID NO: 1011210 - DNA, 25 bp, Homo sapien
aggctgggaagtggctccgtaagcg

SEQ ID NO: 1011211 - DNA, 25 bp, Homo sapien
gcgccggggcctgcaccgtaggagg

SEQ ID NO: 1011212 - DNA, 25 bp, Homo sapien
ggcctgcaccgtaggaggaggggac

SEQ ID NO: 1011213 - DNA, 25 bp, Homo sapien
tgggaagtggctccgtaagcgccgg

SEQ ID NO: 1011214 - DNA, 25 bp, Homo sapien
gaactgggtcctgaacaccctgttg

SEQ ID NO: 1011215 - DNA, 25 bp, Homo sapien
cagccctgaactgggtcctgaacac

SEQ ID NO: 1011216 - DNA, 25 bp, Homo sapien
gggtcctgaacaccctgttgtctgt

SEQ ID NO: 1011217 - DNA, 25 bp, Homo sapien
tgtctgttgatctatttcgctgctg

SEQ ID NO: 1011218 - DNA, 25 bp, Homo sapien
aatgcactcggcactcgtgaggtcc

SEQ ID NO: 1011219 - DNA, 25 bp, Homo sapien
gggagcaaatgcactcggcactcgt

SEQ ID NO: 1011220 - DNA, 25 bp, Homo sapien
cggaggccacctggcaagcctctgt

SEQ ID NO: 1011221 - DNA, 25 bp, Homo sapien
tgattatctgctgcagacgccgagg

SEQ ID NO: 1011222 - DNA, 25 bp, Homo sapien
cagacacgccccaggtcgtggagag

SEQ ID NO: 1011223 - DNA, 25 bp, Homo sapien
cacagccacaccctaggtcgtggag

SEQ ID NO: 1011224 - DNA, 25 bp, Homo sapien
agccacaccctaggtcgtggagagg

SEQ ID NO: 1011225 - DNA, 25 bp, Homo sapien
cgtcagccacagacacgccccaggt

SEQ ID NO: 1011226 - DNA, 25 bp, Homo sapien
aagcgtgcgcgttctctcttcctca

SEQ ID NO: 1011227 - DNA, 25 bp, Homo sapien
agatctgaagcgtgcgcgttctctc

SEQ ID NO: 1011228 - DNA, 25 bp, Homo sapien
ccagagatctgaagcgtgcgcgttc

SEQ ID NO: 1011229 - DNA, 25 bp, Homo sapien
cgaccagagatctgaagcgtgcgcg

SEQ ID NO: 1011230 - DNA, 25 bp, Homo sapien
ttctgtgcgcggatcagctgctggt

SEQ ID NO: 1011231 - DNA, 25 bp, Homo sapien
tgcgcggatcagctgctggtgtctg

SEQ ID NO: 1011232 - DNA, 25 bp, Homo sapien
gtgcgcggatcagctgctggtgtct

SEQ ID NO: 1011233 - DNA, 25 bp, Homo sapien
ctgttctgtgcgcggatcagctgct

SEQ ID NO: 1011234 - DNA, 25 bp, Homo sapien
ccgtttttgtctcttgccgacttgt

SEQ ID NO: 1011235 - DNA, 25 bp, Homo sapien
gacttgttcggtatcttggcttcac

SEQ ID NO: 1011236 - DNA, 25 bp, Homo sapien
aacggatgctcgtcctggcatctcc

SEQ ID NO: 1011237 - DNA, 25 bp, Homo sapien
gcagaacggatgctcgtcctggcat

SEQ ID NO: 1011238 - DNA, 25 bp, Homo sapien
tgggcccctctgaacgctcctgtga

SEQ ID NO: 1011239 - DNA, 25 bp, Homo sapien
cagtgaagcgcaggcataagtggtg

SEQ ID NO: 1011240 - DNA, 25 bp, Homo sapien
atagccctgcggacctcagtgaagc

SEQ ID NO: 1011241 - DNA, 25 bp, Homo sapien
gccaactgcagacctgacgtttggg

SEQ ID NO: 1011242 - DNA, 25 bp, Homo sapien
tcttctgttcgagtgagcctgggag

SEQ ID NO: 1011243 - DNA, 25 bp, Homo sapien
tcctgctcgagtgggaaagtcttct

SEQ ID NO: 1011244 - DNA, 25 bp, Homo sapien
ggaaagtcttctgttcgagtgagcc

SEQ ID NO: 1011245 - DNA, 25 bp, Homo sapien
taaacactcctgctcgagtgggaag

SEQ ID NO: 1011246 - DNA, 25 bp, Homo sapien
gggacagcgctgagagtgagactgg

SEQ ID NO: 1011247 - DNA, 25 bp, Homo sapien
ctcctccgtcgtgggggacagcgct

SEQ ID NO: 1011248 - DNA, 25 bp, Homo sapien
gactgggacggctcctccgttgtcg

SEQ ID NO: 1011249 - DNA, 25 bp, Homo sapien
agagctgagactgggacggctcctc

SEQ ID NO: 1011250 - DNA, 25 bp, Homo sapien
tgctttgcgcacctgctgggtgcac

SEQ ID NO: 1011251 - DNA, 25 bp, Homo sapien
tatttagtggctattttatcgagca

SEQ ID NO: 1011252 - DNA, 25 bp, Homo sapien
gactatgaactagaagaatcaactg

SEQ ID NO: 1011253 - DNA, 25 bp, Homo sapien
ttctttctatctgccagctttgtgc

SEQ ID NO: 1011254 - DNA, 25 bp, Homo sapien
tggaaaaacacgaacaacagcaggg

SEQ ID NO: 1011255 - DNA, 25 bp, Homo sapien
tagacaaaggtaagctgccggtggc

SEQ ID NO: 1011256 - DNA, 25 bp, Homo sapien
ccggtggcgccacatttcagggctt

SEQ ID NO: 1011257 - DNA, 25 bp, Homo sapien
gcttggttaaagctctggcatcggt

SEQ ID NO: 1011258 - DNA, 25 bp, Homo sapien
aggctgctcccaccgccttggctct

SEQ ID NO: 1011259 - DNA, 25 bp, Homo sapien
caagttccaggtctagagtctccat

SEQ ID NO: 1011260 - DNA, 25 bp, Homo sapien
gtggtcgtagcttgcacaggcccct

SEQ ID NO: 1011261 - DNA, 25 bp, Homo sapien
gttgcaccggtggtcgtagcttgca

SEQ ID NO: 1011262 - DNA, 25 bp, Homo sapien
tggtggtttatctgcgtggcctctg

SEQ ID NO: 1011263 - DNA, 25 bp, Homo sapien
caggcgggtgtggataggtgtcctc

SEQ ID NO: 1011264 - DNA, 25 bp, Homo sapien
tccctacgtatcttaagaaacagtc

SEQ ID NO: 1011265 - DNA, 25 bp, Homo sapien
aaacggcttgcttgctagtctgaaa

SEQ ID NO: 1011266 - DNA, 25 bp, Homo sapien
ctgcagcacgtctggatgagcgccc

SEQ ID NO: 1011267 - DNA, 25 bp, Homo sapien
tggccccagcatcggtcacaagtgc

SEQ ID NO: 1011268 - DNA, 25 bp, Homo sapien
catcggtcacaagtgcaaggtggca

SEQ ID NO: 1011269 - DNA, 25 bp, Homo sapien
tctttagagaacatagccccacgta

SEQ ID NO: 1011270 - DNA, 25 bp, Homo sapien
tagggtcaggatcccatggtgtcca

SEQ ID NO: 1011271 - DNA, 25 bp, Homo sapien
catttccagggcatacggtggtccc

SEQ ID NO: 1011272 - DNA, 25 bp, Homo sapien
tatagttggacccagtgttggccca

SEQ ID NO: 1011273 - DNA, 25 bp, Homo sapien
taatccacgctagctccaaagagag

SEQ ID NO: 1011274 - DNA, 25 bp, Homo sapien
cacggagattcgcatatgtgtgcac

SEQ ID NO: 1011275 - DNA, 25 bp, Homo sapien
tgtgcatcacatgaacgcgcgtgca

SEQ ID NO: 1011276 - DNA, 25 bp, Homo sapien
gggtccgtgactctcctcagggaga

SEQ ID NO: 1011277 - DNA, 25 bp, Homo sapien
gctaaggctcagcacacacggagat

SEQ ID NO: 1011278 - DNA, 25 bp, Homo sapien
cactgacaggatgtgtgagcttccc

SEQ ID NO: 1011279 - DNA, 25 bp, Homo sapien
cacctgatgactgatgactgcccac

SEQ ID NO: 1011280 - DNA, 25 bp, Homo sapien
tagtggacaaccagcttgacggagt

SEQ ID NO: 1011281 - DNA, 25 bp, Homo sapien
ccctgatgtgggacggatgtcaccc

SEQ ID NO: 1011282 - DNA, 25 bp, Homo sapien
tgaccgaggtctccgtttgcaggaa

SEQ ID NO: 1011283 - DNA, 25 bp, Homo sapien
ctagatgaccgaggtctccgtttgc

SEQ ID NO: 1011284 - DNA, 25 bp, Homo sapien
cctccgagccgttgcgggagaagga

SEQ ID NO: 1011285 - DNA, 25 bp, Homo sapien
agggcgccctccgagccgttgcggg

SEQ ID NO: 1011286 - DNA, 25 bp, Homo sapien
ctgctatgggaagcgcggcccgcga

SEQ ID NO: 1011287 - DNA, 25 bp, Homo sapien
gtgcgggcggctgctatgggaagcg

SEQ ID NO: 1011288 - DNA, 25 bp, Homo sapien
cagcgggaacgcccgtgagcctggg

SEQ ID NO: 1011289 - DNA, 25 bp, Homo sapien
gggcggctgctatgggaagcgcggc

SEQ ID NO: 1011290 - DNA, 25 bp, Homo sapien
tggtcaggagcgagacgccgaccat

SEQ ID NO: 1011291 - DNA, 25 bp, Homo sapien
aagctatggtcaggagcgagacgcc

SEQ ID NO: 1011292 - DNA, 25 bp, Homo sapien
atggtcaggagcgagacgccgacca

SEQ ID NO: 1011293 - DNA, 25 bp, Homo sapien
ctatggtcaggagcgagacgccgac

SEQ ID NO: 1011294 - DNA, 25 bp, Homo sapien
tcgagcccgcggaagacaggcatgt

SEQ ID NO: 1011295 - DNA, 25 bp, Homo sapien
cgggcagtaactcgagcccgcggaa

SEQ ID NO: 1011296 - DNA, 25 bp, Homo sapien
tcaggaagcaagtgagtacctgtgc

SEQ ID NO: 1011297 - DNA, 25 bp, Homo sapien
tgcttggttccaaggcggccatgaa

SEQ ID NO: 1011298 - DNA, 25 bp, Homo sapien
gttcaggaaacagtagaggacggcc

SEQ ID NO: 1011299 - DNA, 25 bp, Homo sapien
ctgttcaggaaacagtagaggacgg

SEQ ID NO: 1011300 - DNA, 25 bp, Homo sapien
actgttcaggaaacagtagaggacg

SEQ ID NO: 1011301 - DNA, 25 bp, Homo sapien
tgttcaggaaacagtagaggacggc

SEQ ID NO: 1011302 - DNA, 25 bp, Homo sapien
gatgctgatgggaaacacggcaaac

SEQ ID NO: 1011303 - DNA, 25 bp, Homo sapien
tagtggacgccgaacagcgggataa

SEQ ID NO: 1011304 - DNA, 25 bp, Homo sapien
aaacagtatctggtatttggaggag

SEQ ID NO: 1011305 - DNA, 25 bp, Homo sapien
tggaacgacccgaggcacagctcaa

SEQ ID NO: 1011306 - DNA, 25 bp, Homo sapien
tctttacgtttatgtctgaggcccc

SEQ ID NO: 1011307 - DNA, 25 bp, Homo sapien
accctcggaccctctgcaagcctgg

SEQ ID NO: 1011308 - DNA, 25 bp, Homo sapien
tttacgtttatgtctgaggcccctg

SEQ ID NO: 1011309 - DNA, 25 bp, Homo sapien
tacgtttatgtctgaggcccctgtg

SEQ ID NO: 1011310 - DNA, 25 bp, Homo sapien
cagtctgagcccgaggcaccttctg

SEQ ID NO: 1011311 - DNA, 25 bp, Homo sapien
taggctgggcggcagggttcctgcc

SEQ ID NO: 1011312 - DNA, 25 bp, Homo sapien
ggcagggttcctgccatggtacagc

SEQ ID NO: 1011313 - DNA, 25 bp, Homo sapien
tctgggctgggccaaccacttccac

SEQ ID NO: 1011314 - DNA, 25 bp, Homo sapien
gattccccggatcatcatgaattag

SEQ ID NO: 1011315 - DNA, 25 bp, Homo sapien
tggagtctttgcattactttataga

SEQ ID NO: 1011316 - DNA, 25 bp, Homo sapien
gatcatcatgaattagctggatgac

SEQ ID NO: 1011317 - DNA, 25 bp, Homo sapien
gcattactttatagattccccggat

SEQ ID NO: 1011318 - DNA, 25 bp, Homo sapien
caggctgtataacatgtaagtgggc

SEQ ID NO: 1011319 - DNA, 25 bp, Homo sapien
taagtacaaggcctggtattagggc

SEQ ID NO: 1011320 - DNA, 25 bp, Homo sapien
gtaagtgggcggatgcttaaacaag

SEQ ID NO: 1011321 - DNA, 25 bp, Homo sapien
ggcagtagacacacggccatggaca

SEQ ID NO: 1011322 - DNA, 25 bp, Homo sapien
aaccaccaaattttggagtgatttg

SEQ ID NO: 1011323 - DNA, 25 bp, Homo sapien
ccaccaaattttggagtgatttgtt

SEQ ID NO: 1011324 - DNA, 25 bp, Homo sapien
accaccaaattttggagtgatttgt

SEQ ID NO: 1011325 - DNA, 25 bp, Homo sapien
ccagcctcgaggtgtgacagtggcg

SEQ ID NO: 1011326 - DNA, 25 bp, Homo sapien
gtgtgacagtggcggaggcggagtc

SEQ ID NO: 1011327 - DNA, 25 bp, Homo sapien
ggacggccaggccgggacacacact

SEQ ID NO: 1011328 - DNA, 25 bp, Homo sapien
ggcatccccatcagggacggccagg

SEQ ID NO: 1011329 - DNA, 25 bp, Homo sapien
ctcctgtctccacacggcatcccca

SEQ ID NO: 1011330 - DNA, 25 bp, Homo sapien
acggcatccccatcagggacggcca

SEQ ID NO: 1011331 - DNA, 25 bp, Homo sapien
gtactgagactggtcgttgccgccg

SEQ ID NO: 1011332 - DNA, 25 bp, Homo sapien
actgagactggtcgttgccgccgac

SEQ ID NO: 1011333 - DNA, 25 bp, Homo sapien
tgagactggtcgttgccgccgacat

SEQ ID NO: 1011334 - DNA, 25 bp, Homo sapien
ttgtactgagactggtcgttgccgc

SEQ ID NO: 1011335 - DNA, 25 bp, Homo sapien
agcaaaattcgtataatactaatga

SEQ ID NO: 1011336 - DNA, 25 bp, Homo sapien
ctgcagcaaaattcgtataatacta

SEQ ID NO: 1011337 - DNA, 25 bp, Homo sapien
gcagcaaaattcgtataatactaat

SEQ ID NO: 1011338 - DNA, 25 bp, Homo sapien
tgcagcaaaattcgtataatactaa

SEQ ID NO: 1011339 - DNA, 25 bp, Homo sapien
actgtggtcgtttgtatcccagcaa

SEQ ID NO: 1011340 - DNA, 25 bp, Homo sapien
tgatggaaattaaaatcggtattcg

SEQ ID NO: 1011341 - DNA, 25 bp, Homo sapien
cggtattcgtatgacccaccagggc

SEQ ID NO: 1011342 - DNA, 25 bp, Homo sapien
cagggcacactgtggtcgtttgtat

SEQ ID NO: 1011343 - DNA, 25 bp, Homo sapien
ccggtgtcttctaagtagagcctgg

SEQ ID NO: 1011344 - DNA, 25 bp, Homo sapien
tggccgcagtccatgcaccgatgca

SEQ ID NO: 1011345 - DNA, 25 bp, Homo sapien
taagtagagcctggccgcagtccat

SEQ ID NO: 1011346 - DNA, 25 bp, Homo sapien
gtccatgcaccgatgcagacggtgg

SEQ ID NO: 1011347 - DNA, 25 bp, Homo sapien
ggagggtgtggaggtagagcccctc

SEQ ID NO: 1011348 - DNA, 25 bp, Homo sapien
tgcaggaagaccaggctcagcttgc

SEQ ID NO: 1011349 - DNA, 25 bp, Homo sapien
cccatccgatcaggaggtaggccag

SEQ ID NO: 1011350 - DNA, 25 bp, Homo sapien
cagccagaagaagttggccatgatg

SEQ ID NO: 1011351 - DNA, 25 bp, Homo sapien
cttcaacacgggaacccccgcagtg

SEQ ID NO: 1011352 - DNA, 25 bp, Homo sapien
ctgcttcaacacgggaacccccgca

SEQ ID NO: 1011353 - DNA, 25 bp, Homo sapien
tgcttcaacacgggaacccccgcag

SEQ ID NO: 1011354 - DNA, 25 bp, Homo sapien
gaaagatgccagttctcagcaggtg

SEQ ID NO: 1011355 - DNA, 25 bp, Homo sapien
ccggaacagcttgtggaaagatgcc

SEQ ID NO: 1011356 - DNA, 25 bp, Homo sapien
gccaatattacagatgaatgcggtg

SEQ ID NO: 1011357 - DNA, 25 bp, Homo sapien
tggtgtgatcccacgtgcagctgtc

SEQ ID NO: 1011358 - DNA, 25 bp, Homo sapien
gaacaccagtccataaagacgcatg

SEQ ID NO: 1011359 - DNA, 25 bp, Homo sapien
tggcgagttccacctgacagaaata

SEQ ID NO: 1011360 - DNA, 25 bp, Homo sapien
cgagttccacctgacagaaataaga

SEQ ID NO: 1011361 - DNA, 25 bp, Homo sapien
cataaagacgcatgtccggtgatgc

SEQ ID NO: 1011362 - DNA, 25 bp, Homo sapien
accgtgtgccgcctgaaagcaggcg

SEQ ID NO: 1011363 - DNA, 25 bp, Homo sapien
cagaggatgggctacgcggagaaca

SEQ ID NO: 1011364 - DNA, 25 bp, Homo sapien
ccatgccacatgagggaccgtgtgc

SEQ ID NO: 1011365 - DNA, 25 bp, Homo sapien
ggagaacaccatgccacatgaggga

SEQ ID NO: 1011366 - DNA, 25 bp, Homo sapien
tagagaacgtcgtccttgaccagca

SEQ ID NO: 1011367 - DNA, 25 bp, Homo sapien
ccagagctggagtagagaacgtcgt

SEQ ID NO: 1011368 - DNA, 25 bp, Homo sapien
ctggtcagggcagtgcaacgtgcca

SEQ ID NO: 1011369 - DNA, 25 bp, Homo sapien
cagggcagtgcaacgtgccagagct

SEQ ID NO: 1011370 - DNA, 25 bp, Homo sapien
tgtgaacttgcagagaggtcaaatg

SEQ ID NO: 1011371 - DNA, 25 bp, Homo sapien
acctctgaccgtatgtgatccgcct

SEQ ID NO: 1011372 - DNA, 25 bp, Homo sapien
gcctaagagacttgtggaattccat

SEQ ID NO: 1011373 - DNA, 25 bp, Homo sapien
cctggcctaggtttgagcaggcaaa

SEQ ID NO: 1011374 - DNA, 25 bp, Homo sapien
cgccacagcagaaacgggagataag

SEQ ID NO: 1011375 - DNA, 25 bp, Homo sapien
ccgccacagcagaaacgggagataa

SEQ ID NO: 1011376 - DNA, 25 bp, Homo sapien
acagcagaaacgggagataagggct

SEQ ID NO: 1011377 - DNA, 25 bp, Homo sapien
agcttcatgggtgccgggtggcaag

SEQ ID NO: 1011378 - DNA, 25 bp, Homo sapien
tgcctgcagcttcatgggtgccggg

SEQ ID NO: 1011379 - DNA, 25 bp, Homo sapien
tttggtctctgagatggctgtgtgt

SEQ ID NO: 1011380 - DNA, 25 bp, Homo sapien
ttggtctctgagatggctgtgtgtt

SEQ ID NO: 1011381 - DNA, 25 bp, Homo sapien
cccttcatgggggagtcccgaatag

SEQ ID NO: 1011382 - DNA, 25 bp, Homo sapien
agggtggcagggttcccttcatggg

SEQ ID NO: 1011383 - DNA, 25 bp, Homo sapien
tcccttcatgggggagtcccgaata

SEQ ID NO: 1011384 - DNA, 25 bp, Homo sapien
gagggtggcagggttcccttcatgg

SEQ ID NO: 1011385 - DNA, 25 bp, Homo sapien
ggtgccgttttgcttcccactgatt

SEQ ID NO: 1011386 - DNA, 25 bp, Homo sapien
cggtgccgttttgcttcccactgat

SEQ ID NO: 1011387 - DNA, 25 bp, Homo sapien
cattgctcagagatgagcatgcttt

SEQ ID NO: 1011388 - DNA, 25 bp, Homo sapien
cttttggtccagttagcaagccatc

SEQ ID NO: 1011389 - DNA, 25 bp, Homo sapien
gatgagcatgcttttggtccagtta

SEQ ID NO: 1011390 - DNA, 25 bp, Homo sapien
tcagagatgagcatgcttttggtcc

SEQ ID NO: 1011391 - DNA, 25 bp, Homo sapien
tgaagaggcacagaattatgcttcc

SEQ ID NO: 1011392 - DNA, 25 bp, Homo sapien
gagagacactgtagcccagtgtata

SEQ ID NO: 1011393 - DNA, 25 bp, Homo sapien
ccagtgtataaatggccttcaccag

SEQ ID NO: 1011394 - DNA, 25 bp, Homo sapien
ttgcaagagacatcagagagacact

SEQ ID NO: 1011395 - DNA, 25 bp, Homo sapien
gccactcccaaaggccgcttcctgg

SEQ ID NO: 1011396 - DNA, 25 bp, Homo sapien
cgccactcccaaaggccgcttcctg

SEQ ID NO: 1011397 - DNA, 25 bp, Homo sapien
cactcccaaaggccgcttcctggtc

SEQ ID NO: 1011398 - DNA, 25 bp, Homo sapien
actcccaaaggccgcttcctggtct

SEQ ID NO: 1011399 - DNA, 25 bp, Homo sapien
aactccgtgggacttggagccatgg

SEQ ID NO: 1011400 - DNA, 25 bp, Homo sapien
tttgatgaagtgtggaggaagctcc

SEQ ID NO: 1011401 - DNA, 25 bp, Homo sapien
gagggcggaaatcacaacacggtgt

SEQ ID NO: 1011402 - DNA, 25 bp, Homo sapien
gttgttctaggatctcaacccctgg

SEQ ID NO: 1011403 - DNA, 25 bp, Homo sapien
cgcaccgtccatgggattgcaggat

SEQ ID NO: 1011404 - DNA, 25 bp, Homo sapien
tccaggatgcctgatcccacgttgt

SEQ ID NO: 1011405 - DNA, 25 bp, Homo sapien
cccgcggcgtccgtggattccagga

SEQ ID NO: 1011406 - DNA, 25 bp, Homo sapien
tgggattccacgatgcctgctccgc

SEQ ID NO: 1011407 - DNA, 25 bp, Homo sapien
cacaccatccgtgggattctaggat

SEQ ID NO: 1011408 - DNA, 25 bp, Homo sapien
aagggattccaggatgcctgatcct

SEQ ID NO: 1011409 - DNA, 25 bp, Homo sapien
gttcccgcaccatctgtgggattcc

SEQ ID NO: 1011410 - DNA, 25 bp, Homo sapien
gttcccacaccatccgtgggattct

SEQ ID NO: 1011411 - DNA, 25 bp, Homo sapien
accaacggcccagaacccagcgtgc

SEQ ID NO: 1011412 - DNA, 25 bp, Homo sapien
ttccaccaacggcccagaacccagc

SEQ ID NO: 1011413 - DNA, 25 bp, Homo sapien
ccaccaacggcccagaacccagcgt

SEQ ID NO: 1011414 - DNA, 25 bp, Homo sapien
caacggcccagaacccagcgtgcat

SEQ ID NO: 1011415 - DNA, 25 bp, Homo sapien
catgtgacacggataatctttggtg

SEQ ID NO: 1011416 - DNA, 25 bp, Homo sapien
cttggttgcttagcctggagtggct

SEQ ID NO: 1011417 - DNA, 25 bp, Homo sapien
tggttatcaccaaaactttgactgg

SEQ ID NO: 1011418 - DNA, 25 bp, Homo sapien
tacaaaattgtgcaagtccatggct

SEQ ID NO: 1011419 - DNA, 25 bp, Homo sapien
gaagtcgaaggctggagcttccttt

SEQ ID NO: 1011420 - DNA, 25 bp, Homo sapien
ttccaagggcatcatggcccatgga

SEQ ID NO: 1011421 - DNA, 25 bp, Homo sapien
tctcaaatgttttagacaccgtcag

SEQ ID NO: 1011422 - DNA, 25 bp, Homo sapien
cagaaaccataacctatttttgtgg

SEQ ID NO: 1011423 - DNA, 25 bp, Homo sapien
caagattcaggatgagaacactgca

SEQ ID NO: 1011424 - DNA, 25 bp, Homo sapien
ctgtttcaagattcaggatgagaac

SEQ ID NO: 1011425 - DNA, 25 bp, Homo sapien
tcaagattcaggatgagaacactgc

SEQ ID NO: 1011426 - DNA, 25 bp, Homo sapien
tttcaagattcaggatgagaacact

SEQ ID NO: 1011427 - DNA, 25 bp, Homo sapien
agcacacccgtataccacacacaag

SEQ ID NO: 1011428 - DNA, 25 bp, Homo sapien
gcggcagtacacctgaacacctgca

SEQ ID NO: 1011429 - DNA, 25 bp, Homo sapien
gctgttcatccgcacacatgctgca

SEQ ID NO: 1011430 - DNA, 25 bp, Homo sapien
agcacacctgtacacctgcggcagt

SEQ ID NO: 1011431 - DNA, 25 bp, Homo sapien
tgagtaggatttcttggagaagcca

SEQ ID NO: 1011432 - DNA, 25 bp, Homo sapien
ggatttcttggagaagccactgtct

SEQ ID NO: 1011433 - DNA, 25 bp, Homo sapien
tttcttggagaagccactgtctgag

SEQ ID NO: 1011434 - DNA, 25 bp, Homo sapien
ctgagtaggatttcttggagaagcc

SEQ ID NO: 1011435 - DNA, 25 bp, Homo sapien
tagaagcatcgaattgtggtttacg

SEQ ID NO: 1011436 - DNA, 25 bp, Homo sapien
ctccgtagaagcatcgaattgtggt

SEQ ID NO: 1011437 - DNA, 25 bp, Homo sapien
aagcatcgaattgtggtttacggaa

SEQ ID NO: 1011438 - DNA, 25 bp, Homo sapien
tgccccaggagctccgtagaagcat

SEQ ID NO: 1011439 - DNA, 25 bp, Homo sapien
actggtgccgtccactcagagaacc

SEQ ID NO: 1011440 - DNA, 25 bp, Homo sapien
tcagagaacccgtctagcagcggag

SEQ ID NO: 1011441 - DNA, 25 bp, Homo sapien
ccaagctgagagatgtggtcctgcg

SEQ ID NO: 1011442 - DNA, 25 bp, Homo sapien
tagcagcggagatgctgctcccaag

SEQ ID NO: 1011443 - DNA, 25 bp, Homo sapien
gtgcccaagctgaacatctgccgcc

SEQ ID NO: 1011444 - DNA, 25 bp, Homo sapien
aagctgaacatctgccgcccacata

SEQ ID NO: 1011445 - DNA, 25 bp, Homo sapien
atctgccgcccacatacagacctcc

SEQ ID NO: 1011446 - DNA, 25 bp, Homo sapien
gcccaagctgaacatctgccgccca

SEQ ID NO: 1011447 - DNA, 25 bp, Homo sapien
caccgctgtgtttcctacaggtccg

SEQ ID NO: 1011448 - DNA, 25 bp, Homo sapien
ctgtgtttcctacaggtccgctgcc

SEQ ID NO: 1011449 - DNA, 25 bp, Homo sapien
ctggcgcaccgctgtgtttcctaca

SEQ ID NO: 1011450 - DNA, 25 bp, Homo sapien
aagcgcctggcgcaccgctgtgttt

SEQ ID NO: 1011451 - DNA, 25 bp, Homo sapien
tcgatgagccaatgccctcgtggct

SEQ ID NO: 1011452 - DNA, 25 bp, Homo sapien
tccgccgtactgtgtccatggctga

SEQ ID NO: 1011453 - DNA, 25 bp, Homo sapien
gttcccatcactcgatgagccaatg

SEQ ID NO: 1011454 - DNA, 25 bp, Homo sapien
ctcgggatgcttccgccgtactgtg

SEQ ID NO: 1011455 - DNA, 25 bp, Homo sapien
cattcccgggaacgccacactccgc

SEQ ID NO: 1011456 - DNA, 25 bp, Homo sapien
ccctcgcgtgcccaccacggtgtgc

SEQ ID NO: 1011457 - DNA, 25 bp, Homo sapien
tgaggccattcccgggaacgccaca

SEQ ID NO: 1011458 - DNA, 25 bp, Homo sapien
ggaacgccacactccgccctggcca

SEQ ID NO: 1011459 - DNA, 25 bp, Homo sapien
gcctcgatgaaggaccagtggaccc

SEQ ID NO: 1011460 - DNA, 25 bp, Homo sapien
acccagaagagcttgccacgtgtcc

SEQ ID NO: 1011461 - DNA, 25 bp, Homo sapien
aggcctcgatgaaggaccagtggac

SEQ ID NO: 1011462 - DNA, 25 bp, Homo sapien
gatgaaggaccagtggacccagaag

SEQ ID NO: 1011463 - DNA, 25 bp, Homo sapien
agcacctctgtcctaatgtctccca

SEQ ID NO: 1011464 - DNA, 25 bp, Homo sapien
cagcacctctgtcctaatgtctccc

SEQ ID NO: 1011465 - DNA, 25 bp, Homo sapien
acctctgtcctaatgtctcccaggc

SEQ ID NO: 1011466 - DNA, 25 bp, Homo sapien
gggatcccacctggaccttgaaatc

SEQ ID NO: 1011467 - DNA, 25 bp, Homo sapien
agaagcccctgagacccctggctgc

SEQ ID NO: 1011468 - DNA, 25 bp, Homo sapien
ccttgaaatcccccccaggccacag

SEQ ID NO: 1011469 - DNA, 25 bp, Homo sapien
caggccacagaagcccctgagaccc

SEQ ID NO: 1011470 - DNA, 25 bp, Homo sapien
cgccacccacacggtgctgccaggg

SEQ ID NO: 1011471 - DNA, 25 bp, Homo sapien
gccacccacacggtgctgccagggc

SEQ ID NO: 1011472 - DNA, 25 bp, Homo sapien
tgccagggctgccggcaaggatgga

SEQ ID NO: 1011473 - DNA, 25 bp, Homo sapien
gctgccggcaaggatggaggtctgt

SEQ ID NO: 1011474 - DNA, 25 bp, Homo sapien
caccgtagcaccacgcaggagccta

SEQ ID NO: 1011475 - DNA, 25 bp, Homo sapien
accgtagcaccacgcaggagcctac

SEQ ID NO: 1011476 - DNA, 25 bp, Homo sapien
ccgtcactcgtacagtttttgctta

SEQ ID NO: 1011477 - DNA, 25 bp, Homo sapien
tcctccgggtcgctgtagccacagg

SEQ ID NO: 1011478 - DNA, 25 bp, Homo sapien
caggcatcgacgaaatctgggaacg

SEQ ID NO: 1011479 - DNA, 25 bp, Homo sapien
tctgaccatccgtcactcgtacagt

SEQ ID NO: 1011480 - DNA, 25 bp, Homo sapien
tggaaagtgaagttcagatatttta

SEQ ID NO: 1011481 - DNA, 25 bp, Homo sapien
ctggaaagtgaagttcagatatttt

SEQ ID NO: 1011482 - DNA, 25 bp, Homo sapien
ggaaagtgaagttcagatattttat

SEQ ID NO: 1011483 - DNA, 25 bp, Homo sapien
tcgccactgacggtgaccagatgcc

SEQ ID NO: 1011484 - DNA, 25 bp, Homo sapien
agttcccaacagcacgacagtgacc

SEQ ID NO: 1011485 - DNA, 25 bp, Homo sapien
acagcacgacagtgaccaggtgtcc

SEQ ID NO: 1011486 - DNA, 25 bp, Homo sapien
acagtgaccgggtaccccgcctgct

SEQ ID NO: 1011487 - DNA, 25 bp, Homo sapien
tgtgctggatgggcggctgagctgc

SEQ ID NO: 1011488 - DNA, 25 bp, Homo sapien
ccctgggtctggctaaaacagtgcc

SEQ ID NO: 1011489 - DNA, 25 bp, Homo sapien
tgggtctggctaaaacagtgccatg

SEQ ID NO: 1011490 - DNA, 25 bp, Homo sapien
gtctggctaaaacagtgccatgcag

SEQ ID NO: 1011491 - DNA, 25 bp, Homo sapien
atgcagacagttggctcattgcctc

SEQ ID NO: 1011492 - DNA, 25 bp, Homo sapien
ctctatgcagacagttggctcattg

SEQ ID NO: 1011493 - DNA, 25 bp, Homo sapien
tatgcagacagttggctcattgcct

SEQ ID NO: 1011494 - DNA, 25 bp, Homo sapien
tctatgcagacagttggctcattgc

SEQ ID NO: 1011495 - DNA, 25 bp, Homo sapien
agggcagggttaggacctgaaggag

SEQ ID NO: 1011496 - DNA, 25 bp, Homo sapien
cagggcagggttaggacctgaagga

SEQ ID NO: 1011497 - DNA, 25 bp, Homo sapien
tgcagggcaggggttaggacctgga

SEQ ID NO: 1011498 - DNA, 25 bp, Homo sapien
tggagaaggagctgcccactgcttc

SEQ ID NO: 1011499 - DNA, 25 bp, Homo sapien
gcaggggttaggacctggagaagga

SEQ ID NO: 1011500 - DNA, 25 bp, Homo sapien
gcccactgcttctggacagggccca

SEQ ID NO: 1011501 - DNA, 25 bp, Homo sapien
tatgacccagctctccttacaggtc

SEQ ID NO: 1011502 - DNA, 25 bp, Homo sapien
cttacaggtcatgggaggagcagcc

SEQ ID NO: 1011503 - DNA, 25 bp, Homo sapien
aatgattccacgtgtgttctatgac

SEQ ID NO: 1011504 - DNA, 25 bp, Homo sapien
gagcagccatcacatgtgtagagtg

SEQ ID NO: 1011505 - DNA, 25 bp, Homo sapien
aaatggacgctcagatgcaaacacc

SEQ ID NO: 1011506 - DNA, 25 bp, Homo sapien
tcagatgcaaacaccctggaggagc

SEQ ID NO: 1011507 - DNA, 25 bp, Homo sapien
ctgaaggaaagtgatgttcctgctt

SEQ ID NO: 1011508 - DNA, 25 bp, Homo sapien
cttggatggaaaaaatggacgctca

SEQ ID NO: 1011509 - DNA, 25 bp, Homo sapien
aggccgccagcacgtgatgttgtcc

SEQ ID NO: 1011510 - DNA, 25 bp, Homo sapien
accgtgacggtctctcccacattgg

SEQ ID NO: 1011511 - DNA, 25 bp, Homo sapien
gtgatgttgtcccagacgccactgc

SEQ ID NO: 1011512 - DNA, 25 bp, Homo sapien
tgctgaagacttttgggcagggcac

SEQ ID NO: 1011513 - DNA, 25 bp, Homo sapien
ctgggaccgaccctgactgtgagga

SEQ ID NO: 1011514 - DNA, 25 bp, Homo sapien
acttgggaccggatcctgaccgtga

SEQ ID NO: 1011515 - DNA, 25 bp, Homo sapien
ctacttgggaccggatcctgaccgt

SEQ ID NO: 1011516 - DNA, 25 bp, Homo sapien
tacttgggaccggatcctgaccgtg

SEQ ID NO: 1011517 - DNA, 25 bp, Homo sapien
tggaaggtggtcatcacggaagggc

SEQ ID NO: 1011518 - DNA, 25 bp, Homo sapien
gaaggtggtcatcacggaagggctg

SEQ ID NO: 1011519 - DNA, 25 bp, Homo sapien
ggaaggtggtcatcacggaagggct

SEQ ID NO: 1011520 - DNA, 25 bp, Homo sapien
tctggaaggtggtcatcacggaagg

SEQ ID NO: 1011521 - DNA, 25 bp, Homo sapien
cgagcagtcgggcttctgggtcact

SEQ ID NO: 1011522 - DNA, 25 bp, Homo sapien
tagaaggtcccttgccatctcagac

SEQ ID NO: 1011523 - DNA, 25 bp, Homo sapien
taaacctccggcgtgaatgaggatg

SEQ ID NO: 1011524 - DNA, 25 bp, Homo sapien
tgtataccacacacgaggcttcctg

SEQ ID NO: 1011525 - DNA, 25 bp, Homo sapien
gcaactccagttgtcacctgcacca

SEQ ID NO: 1011526 - DNA, 25 bp, Homo sapien
tcatggacacagatgggtgcaactc

SEQ ID NO: 1011527 - DNA, 25 bp, Homo sapien
agtcatggacacagatgggtgcaac

SEQ ID NO: 1011528 - DNA, 25 bp, Homo sapien
acacagatgggtgcaactccagttg

SEQ ID NO: 1011529 - DNA, 25 bp, Homo sapien
gggggcgtcccagtcatcgaatact

SEQ ID NO: 1011530 - DNA, 25 bp, Homo sapien
cacagcaaataacgggctgaaggat

SEQ ID NO: 1011531 - DNA, 25 bp, Homo sapien
gtcatcgaatactccccttgcacag

SEQ ID NO: 1011532 - DNA, 25 bp, Homo sapien
ccctgtgaccactccttccgaaggt

SEQ ID NO: 1011533 - DNA, 25 bp, Homo sapien
cttctgccccaaacggtaacaggat

SEQ ID NO: 1011534 - DNA, 25 bp, Homo sapien
tgagttctctgcaatcctcgccgct

SEQ ID NO: 1011535 - DNA, 25 bp, Homo sapien
cttcccagccgcatgtctgagtggt

SEQ ID NO: 1011536 - DNA, 25 bp, Homo sapien
cagccgcatgtctgagtggttgagt

SEQ ID NO: 1011537 - DNA, 25 bp, Homo sapien
ctggagatagccacgaggaaaagac

SEQ ID NO: 1011538 - DNA, 25 bp, Homo sapien
cagtctttcctgcagtgtaagatgt

SEQ ID NO: 1011539 - DNA, 25 bp, Homo sapien
tatagggaagacacagtctttcctg

SEQ ID NO: 1011540 - DNA, 25 bp, Homo sapien
cttgcaaatccagttggcgtccatg

SEQ ID NO: 1011541 - DNA, 25 bp, Homo sapien
cagttggcgtccatgcctataggga

SEQ ID NO: 1011542 - DNA, 25 bp, Homo sapien
atctgcaaaccacgcaatatatttt

SEQ ID NO: 1011543 - DNA, 25 bp, Homo sapien
gaacaaggaatcgtgagtatctgca

SEQ ID NO: 1011544 - DNA, 25 bp, Homo sapien
cacggacgggctcattcaagaacaa

SEQ ID NO: 1011545 - DNA, 25 bp, Homo sapien
catgaaatcattcacggacgggctc

SEQ ID NO: 1011546 - DNA, 25 bp, Homo sapien
gccaaaactgctcggttcagacctt

SEQ ID NO: 1011547 - DNA, 25 bp, Homo sapien
tgctctctgccgtggatgccaaaac

SEQ ID NO: 1011548 - DNA, 25 bp, Homo sapien
catcagaggaacctacttctctgct

SEQ ID NO: 1011549 - DNA, 25 bp, Homo sapien
gtctacaccatcaatattgacatca

SEQ ID NO: 1011550 - DNA, 25 bp, Homo sapien
gtctgccttgaatatctgctgagga

SEQ ID NO: 1011551 - DNA, 25 bp, Homo sapien
ctgaggaccacgaacagcgagctcc

SEQ ID NO: 1011552 - DNA, 25 bp, Homo sapien
gaggaccacgaacagcgagctccca

SEQ ID NO: 1011553 - DNA, 25 bp, Homo sapien
ccttgaatatctgctgaggaccacg

SEQ ID NO: 1011554 - DNA, 25 bp, Homo sapien
cgaggtggaatgctgcagccacaca

SEQ ID NO: 1011555 - DNA, 25 bp, Homo sapien
gggtcagtgcccacatgacgctgtg

SEQ ID NO: 1011556 - DNA, 25 bp, Homo sapien
gcaagaacccatttgtggacactgt

SEQ ID NO: 1011557 - DNA, 25 bp, Homo sapien
accacagagcgaggtggaatgctgc

SEQ ID NO: 1011558 - DNA, 25 bp, Homo sapien
tgtagattccggttcacatcgctga

SEQ ID NO: 1011559 - DNA, 25 bp, Homo sapien
tacatccctggcatttgagccacgc

SEQ ID NO: 1011560 - DNA, 25 bp, Homo sapien
tgttgtctcgtggagtcactcagcc

SEQ ID NO: 1011561 - DNA, 25 bp, Homo sapien
gagccttcaatatgagatgtccagg

SEQ ID NO: 1011562 - DNA, 25 bp, Homo sapien
gagacctcagaagctctgcacattt

SEQ ID NO: 1011563 - DNA, 25 bp, Homo sapien
atttccagatgaaatcggcattctg

SEQ ID NO: 1011564 - DNA, 25 bp, Homo sapien
tgagacctcagaagctctgcacatt

SEQ ID NO: 1011565 - DNA, 25 bp, Homo sapien
aaatcggcattctgggtgaatgctg

SEQ ID NO: 1011566 - DNA, 25 bp, Homo sapien
cgccctccgcgaagtcagcacaggc

SEQ ID NO: 1011567 - DNA, 25 bp, Homo sapien
ttcacgccctccgcgaagtcagcac

SEQ ID NO: 1011568 - DNA, 25 bp, Homo sapien
cacgccctccgcgaagtcagcacag

SEQ ID NO: 1011569 - DNA, 25 bp, Homo sapien
acgccctccgcgaagtcagcacagg

SEQ ID NO: 1011570 - DNA, 25 bp, Homo sapien
gacggccccgaacgagctcatcgtt

SEQ ID NO: 1011571 - DNA, 25 bp, Homo sapien
tgacgcgtccaggaagaaacgatcc

SEQ ID NO: 1011572 - DNA, 25 bp, Homo sapien
tacagggagggaccgagaggcatct

SEQ ID NO: 1011573 - DNA, 25 bp, Homo sapien
agcgcttcacgctctccgggaggaa

SEQ ID NO: 1011574 - DNA, 25 bp, Homo sapien
gcgcgggaggcagcagcgtccgcat

SEQ ID NO: 1011575 - DNA, 25 bp, Homo sapien
agcgcgggaggcagcagcgtccgca

SEQ ID NO: 1011576 - DNA, 25 bp, Homo sapien
agccagcaggtcagcagcgcgggag

SEQ ID NO: 1011577 - DNA, 25 bp, Homo sapien
gggggcgagcagccagcaggtcagc

SEQ ID NO: 1011578 - DNA, 25 bp, Homo sapien
cccgagctcagcgtgccgggggccg

SEQ ID NO: 1011579 - DNA, 25 bp, Homo sapien
cgagctcagcgtgccgggggccgcc

SEQ ID NO: 1011580 - DNA, 25 bp, Homo sapien
ccgagctcagcgtgccgggggccgc

SEQ ID NO: 1011581 - DNA, 25 bp, Homo sapien
agctggagcgcgctcaatgcacgcc

SEQ ID NO: 1011582 - DNA, 25 bp, Homo sapien
gggagcgagtgcgcggagacctcgg

SEQ ID NO: 1011583 - DNA, 25 bp, Homo sapien
cgggccccgcagctgtagccgagcg

SEQ ID NO: 1011584 - DNA, 25 bp, Homo sapien
ccctccgtcccggcagctggagcgc

SEQ ID NO: 1011585 - DNA, 25 bp, Homo sapien
aagaaagcggccagagacccgtccg

SEQ ID NO: 1011586 - DNA, 25 bp, Homo sapien
tgcctttctaaacaactgcggaagc

SEQ ID NO: 1011587 - DNA, 25 bp, Homo sapien
tgggcgcgccgtctttgtagccagt

SEQ ID NO: 1011588 - DNA, 25 bp, Homo sapien
tcaaagaggacatcaggtcgaacag

SEQ ID NO: 1011589 - DNA, 25 bp, Homo sapien
tagtagagcatcacatgacggccag

SEQ ID NO: 1011590 - DNA, 25 bp, Homo sapien
gcaaattcccaccagactctagtag

SEQ ID NO: 1011591 - DNA, 25 bp, Homo sapien
taatcacgggctttgctgaacaccc

SEQ ID NO: 1011592 - DNA, 25 bp, Homo sapien
cctgcggttacctgatgctcttaga

SEQ ID NO: 1011593 - DNA, 25 bp, Homo sapien
tgacagttgcgtggagttcagagtc

SEQ ID NO: 1011594 - DNA, 25 bp, Homo sapien
caccaccggcatgttgacagttgcg

SEQ ID NO: 1011595 - DNA, 25 bp, Homo sapien
tcgtgacttgttccctggaacctgg

SEQ ID NO: 1011596 - DNA, 25 bp, Homo sapien
ttttcataagcaccaccggcatgtt

SEQ ID NO: 1011597 - DNA, 25 bp, Homo sapien
gtgaagcaaagctgtgcggctccgt

SEQ ID NO: 1011598 - DNA, 25 bp, Homo sapien
aatcttagcgacttttctagggtga

SEQ ID NO: 1011599 - DNA, 25 bp, Homo sapien
tcacttcgagatgcagagtcacgag

SEQ ID NO: 1011600 - DNA, 25 bp, Homo sapien
ctcagctggacccttagacgggaaa

SEQ ID NO: 1011601 - DNA, 25 bp, Homo sapien
agggtgacccaacagtgcagcgctg

SEQ ID NO: 1011602 - DNA, 25 bp, Homo sapien
tccacgttgtctgatcctgagggca

SEQ ID NO: 1011603 - DNA, 25 bp, Homo sapien
cattgtccacggttgcactgcaagg

SEQ ID NO: 1011604 - DNA, 25 bp, Homo sapien
aaagccattgttgtccaaggttgcc

SEQ ID NO: 1011605 - DNA, 25 bp, Homo sapien
tgaatgtgcccgtccgtgatgattt

SEQ ID NO: 1011606 - DNA, 25 bp, Homo sapien
ttgaatgtgcccgtccgtgatgatt

SEQ ID NO: 1011607 - DNA, 25 bp, Homo sapien
gaatgtgcccgtccgtgatgatttc

SEQ ID NO: 1011608 - DNA, 25 bp, Homo sapien
catcccaatgctgcctcatccctgc

SEQ ID NO: 1011609 - DNA, 25 bp, Homo sapien
ggcataaccgggctccatcccaatg

SEQ ID NO: 1011610 - DNA, 25 bp, Homo sapien
agtgatcgagggcataaccgggctc

SEQ ID NO: 1011611 - DNA, 25 bp, Homo sapien
ccgcacaggtgacgcaggcttcaga

SEQ ID NO: 1011612 - DNA, 25 bp, Homo sapien
aaggccgccatgaggatcgcgtgag

SEQ ID NO: 1011613 - DNA, 25 bp, Homo sapien
ccgccatgaggatcgcgtgagcaga

SEQ ID NO: 1011614 - DNA, 25 bp, Homo sapien
ggccgccatgaggatcgcgtgagca

SEQ ID NO: 1011615 - DNA, 25 bp, Homo sapien
cgccatgaggatcgcgtgagcagaa

SEQ ID NO: 1011616 - DNA, 25 bp, Homo sapien
tccttctgggctgccggatttcctg

SEQ ID NO: 1011617 - DNA, 25 bp, Homo sapien
ctgggctgccggatttcctgtgggt

SEQ ID NO: 1011618 - DNA, 25 bp, Homo sapien
ctccttctgggctgccggatttcct

SEQ ID NO: 1011619 - DNA, 25 bp, Homo sapien
ttctcctgggctgccgaatttcctg

SEQ ID NO: 1011620 - DNA, 25 bp, Homo sapien
agggtgagaccacccaaggcatctc

SEQ ID NO: 1011621 - DNA, 25 bp, Homo sapien
ggtgagatcagagagctcagtaaaa

SEQ ID NO: 1011622 - DNA, 25 bp, Homo sapien
tgaccaccagtgaattttcccttca

SEQ ID NO: 1011623 - DNA, 25 bp, Homo sapien
tgcaggcaatgaagatgtcgctgga

SEQ ID NO: 1011624 - DNA, 25 bp, Homo sapien
ctgctggtctgtgatccccgctgac

SEQ ID NO: 1011625 - DNA, 25 bp, Homo sapien
tgcttcaccttgcagtaggcacctg

SEQ ID NO: 1011626 - DNA, 25 bp, Homo sapien
aagttttgatgctggtgtggctcct

SEQ ID NO: 1011627 - DNA, 25 bp, Homo sapien
gctccaagatgacatcccagtatct

SEQ ID NO: 1011628 - DNA, 25 bp, Homo sapien
caccttgcagtaggcacctgtctct

SEQ ID NO: 1011629 - DNA, 25 bp, Homo sapien
tatccttagtgatcaggaaaatgca

SEQ ID NO: 1011630 - DNA, 25 bp, Homo sapien
caacaaatatatgcagaggccgaat

SEQ ID NO: 1011631 - DNA, 25 bp, Homo sapien
cacagagataacattttactgtcat

SEQ ID NO: 1011632 - DNA, 25 bp, Homo sapien
ctgatggcaccaagcaaaggggcag

SEQ ID NO: 1011633 - DNA, 25 bp, Homo sapien
atggaggctgagccccagtttgcat

SEQ ID NO: 1011634 - DNA, 25 bp, Homo sapien
ggctgagccccagtttgcatgccat

SEQ ID NO: 1011635 - DNA, 25 bp, Homo sapien
gaggctgagccccagtttgcatgcc

SEQ ID NO: 1011636 - DNA, 25 bp, Homo sapien
ggcgctgcatgtgggaagatggagg

SEQ ID NO: 1011637 - DNA, 25 bp, Homo sapien
tgtgggtcgagcatctgcaagttct

SEQ ID NO: 1011638 - DNA, 25 bp, Homo sapien
tgtgcacgtggtgaatatcatgacc

SEQ ID NO: 1011639 - DNA, 25 bp, Homo sapien
tgcaagttctgacgcaggagccctc

SEQ ID NO: 1011640 - DNA, 25 bp, Homo sapien
tcctcgggggccgtgagaacagatt

SEQ ID NO: 1011641 - DNA, 25 bp, Homo sapien
gcccggcatctcacaggtcaagaga

SEQ ID NO: 1011642 - DNA, 25 bp, Homo sapien
tctgtgtgacatagtaagcccggca

SEQ ID NO: 1011643 - DNA, 25 bp, Homo sapien
ccttggaagcccctagacactgagg

SEQ ID NO: 1011644 - DNA, 25 bp, Homo sapien
aatcagagccgaaactccatccagg

SEQ ID NO: 1011645 - DNA, 25 bp, Homo sapien
gctcagcatggccttacgggccagt

SEQ ID NO: 1011646 - DNA, 25 bp, Homo sapien
ggccacatgcgggccacgaaggcca

SEQ ID NO: 1011647 - DNA, 25 bp, Homo sapien
gaagcacaagagagtgcgccgagca

SEQ ID NO: 1011648 - DNA, 25 bp, Homo sapien
agcatggccttacgggccagtcctt

SEQ ID NO: 1011649 - DNA, 25 bp, Homo sapien
gaacacaaacatgtacgagagcatc

SEQ ID NO: 1011650 - DNA, 25 bp, Homo sapien
caaacatgtacgagagcatcctcca

SEQ ID NO: 1011651 - DNA, 25 bp, Homo sapien
aatgtgtggtagaaggttagggtca

SEQ ID NO: 1011652 - DNA, 25 bp, Homo sapien
gcccatgaacacaaacatgtacgag

SEQ ID NO: 1011653 - DNA, 25 bp, Homo sapien
gaacaccaccatgtacgacatcatc

SEQ ID NO: 1011654 - DNA, 25 bp, Homo sapien
catgaacaccaccatgtacgacatc

SEQ ID NO: 1011655 - DNA, 25 bp, Homo sapien
cgaacaccatcatgtacgacatcat

SEQ ID NO: 1011656 - DNA, 25 bp, Homo sapien
cagtgtggccccgaacaccatcatg

SEQ ID NO: 1011657 - DNA, 25 bp, Homo sapien
tactctatatcaggaccaagtggaa

SEQ ID NO: 1011658 - DNA, 25 bp, Homo sapien
gaatacagaagcaatatcccaaatt

SEQ ID NO: 1011659 - DNA, 25 bp, Homo sapien
tgagagtccagcaagtacaatagac

SEQ ID NO: 1011660 - DNA, 25 bp, Homo sapien
taagcataaggttcctgaatacaga

SEQ ID NO: 1011661 - DNA, 25 bp, Homo sapien
agaggagagtaattttgtgttttag

SEQ ID NO: 1011662 - DNA, 25 bp, Homo sapien
aggagagtaattttgtgttttagct

SEQ ID NO: 1011663 - DNA, 25 bp, Homo sapien
caaagaggagagtaattttgtgttt

SEQ ID NO: 1011664 - DNA, 25 bp, Homo sapien
tcaaagaggagagtaattttgtgtt

SEQ ID NO: 1011665 - DNA, 25 bp, Homo sapien
aattgacccgacacccagggcaatt

SEQ ID NO: 1011666 - DNA, 25 bp, Homo sapien
gatcctccagcaacaatacaccaag

SEQ ID NO: 1011667 - DNA, 25 bp, Homo sapien
taggttgagttgtgggataaattcc

SEQ ID NO: 1011668 - DNA, 25 bp, Homo sapien
tccttttgggtgaattgacccgaca

SEQ ID NO: 1011669 - DNA, 25 bp, Homo sapien
tcgttggtcagagggaactgccttc

SEQ ID NO: 1011670 - DNA, 25 bp, Homo sapien
tacatcaggatttagtaaacgggcc

SEQ ID NO: 1011671 - DNA, 25 bp, Homo sapien
gatcagatagtttccaagccgtttc

SEQ ID NO: 1011672 - DNA, 25 bp, Homo sapien
taatgagtggtcagcttgaatccca

SEQ ID NO: 1011673 - DNA, 25 bp, Homo sapien
aagccatggactccttccaggtcaa

SEQ ID NO: 1011674 - DNA, 25 bp, Homo sapien
ttccaggtcaatggcctccccagtt

SEQ ID NO: 1011675 - DNA, 25 bp, Homo sapien
tactcattcttgaagccatggactc

SEQ ID NO: 1011676 - DNA, 25 bp, Homo sapien
gggctcatactcattcttgaagcca

SEQ ID NO: 1011677 - DNA, 25 bp, Homo sapien
cacctgtcgtgagcagtctgaggct

SEQ ID NO: 1011678 - DNA, 25 bp, Homo sapien
taagcttggttacgatgagaacaca

SEQ ID NO: 1011679 - DNA, 25 bp, Homo sapien
gagtcaaccatgtgccacttggtgg

SEQ ID NO: 1011680 - DNA, 25 bp, Homo sapien
tggaatcaggagaaggataagctac

SEQ ID NO: 1011681 - DNA, 25 bp, Homo sapien
gcccatagcagtgtcctgttgtgtc

SEQ ID NO: 1011682 - DNA, 25 bp, Homo sapien
acactgagactgcccatagcagtgt

SEQ ID NO: 1011683 - DNA, 25 bp, Homo sapien
agactgcccatagcagtgtcctgtt

SEQ ID NO: 1011684 - DNA, 25 bp, Homo sapien
gtagtagttacaacactgagactgc

SEQ ID NO: 1011685 - DNA, 25 bp, Homo sapien
accaaaatgaccataggcggtaatt

SEQ ID NO: 1011686 - DNA, 25 bp, Homo sapien
tctcagtctggcattctcggatctc

SEQ ID NO: 1011687 - DNA, 25 bp, Homo sapien
ggtaattccccaggccgtgtgatct

SEQ ID NO: 1011688 - DNA, 25 bp, Homo sapien
ctggcattctcggatctccaaggca

SEQ ID NO: 1011689 - DNA, 25 bp, Homo sapien
caggggaacacagccgcagagtgac

SEQ ID NO: 1011690 - DNA, 25 bp, Homo sapien
agccgcagagtgaccttccacattc

SEQ ID NO: 1011691 - DNA, 25 bp, Homo sapien
acagccgcagagtgaccttccacat

SEQ ID NO: 1011692 - DNA, 25 bp, Homo sapien
ggaacacagccgcagagtgaccttc

SEQ ID NO: 1011693 - DNA, 25 bp, Homo sapien
ggccgcccagggtcaacactccctg

SEQ ID NO: 1011694 - DNA, 25 bp, Homo sapien
caaagtgtgtggggttgcgggccct

SEQ ID NO: 1011695 - DNA, 25 bp, Homo sapien
cgcccagggtcaacactccctgtcc

SEQ ID NO: 1011696 - DNA, 25 bp, Homo sapien
ccagggtcaacactccctgtcccac

SEQ ID NO: 1011697 - DNA, 25 bp, Homo sapien
tggtagaggcaactgggtgtcagga

SEQ ID NO: 1011698 - DNA, 25 bp, Homo sapien
agtggtagaggcaactgggtgtcag

SEQ ID NO: 1011699 - DNA, 25 bp, Homo sapien
ctgacatcatctgagtggtagaggc

SEQ ID NO: 1011700 - DNA, 25 bp, Homo sapien
gacatcatctgagtggtagaggcaa

SEQ ID NO: 1011701 - DNA, 25 bp, Homo sapien
agcgccactcatgggccaccagatg

SEQ ID NO: 1011702 - DNA, 25 bp, Homo sapien
caccagatgtggtccttgtcccatt

SEQ ID NO: 1011703 - DNA, 25 bp, Homo sapien
cagatgtggtccttgtcccatttgt

SEQ ID NO: 1011704 - DNA, 25 bp, Homo sapien
ggccaccagatgtggtccttgtccc

SEQ ID NO: 1011705 - DNA, 25 bp, Homo sapien
gccaggtcgtatttctgcatctcac

SEQ ID NO: 1011706 - DNA, 25 bp, Homo sapien
aggccaggtcgtatttctgcatctc

SEQ ID NO: 1011707 - DNA, 25 bp, Homo sapien
aggtcgtatttctgcatctcactgg

SEQ ID NO: 1011708 - DNA, 25 bp, Homo sapien
caggtcgtatttctgcatctcactg

SEQ ID NO: 1011709 - DNA, 25 bp, Homo sapien
cccacgagcccttgttacactgctg

SEQ ID NO: 1011710 - DNA, 25 bp, Homo sapien
agcccttgttacactgctgctagcc

SEQ ID NO: 1011711 - DNA, 25 bp, Homo sapien
ttgttacactgctgctagcccctgg

SEQ ID NO: 1011712 - DNA, 25 bp, Homo sapien
cgagcccttgttacactgctgctag

SEQ ID NO: 1011713 - DNA, 25 bp, Homo sapien
tcgctgtgtcctcactggccatgtg

SEQ ID NO: 1011714 - DNA, 25 bp, Homo sapien
accgtgtgctcctcgtcactcgctg

SEQ ID NO: 1011715 - DNA, 25 bp, Homo sapien
cgtgtgctcctcgtcactcgctgtg

SEQ ID NO: 1011716 - DNA, 25 bp, Homo sapien
tgtgctcctcgtcactcgctgtgtc

SEQ ID NO: 1011717 - DNA, 25 bp, Homo sapien
ggtgtcggtggtgctaaagccatca

SEQ ID NO: 1011718 - DNA, 25 bp, Homo sapien
ccttgaacttgagatcggtgtcggt

SEQ ID NO: 1011719 - DNA, 25 bp, Homo sapien
cttgaacttgagatcggtgtcggtg

SEQ ID NO: 1011720 - DNA, 25 bp, Homo sapien
atcggtgtcggtggtgctaaagcca

SEQ ID NO: 1011721 - DNA, 25 bp, Homo sapien
gaggaaggaatgacaggtgcaaata

SEQ ID NO: 1011722 - DNA, 25 bp, Homo sapien
gaatgacaggtgcaaataccttccc

SEQ ID NO: 1011723 - DNA, 25 bp, Homo sapien
gcaaggggcggcaggagtaaaggag

SEQ ID NO: 1011724 - DNA, 25 bp, Homo sapien
acgctgggggctcaggatccagcaa

SEQ ID NO: 1011725 - DNA, 25 bp, Homo sapien
gacagggtgtgaccatagactgcca

SEQ ID NO: 1011726 - DNA, 25 bp, Homo sapien
gggtgtgaccatagactgccaaaag

SEQ ID NO: 1011727 - DNA, 25 bp, Homo sapien
cagggtgtgaccatagactgccaaa

SEQ ID NO: 1011728 - DNA, 25 bp, Homo sapien
ggacagggtgtgaccatagactgcc

SEQ ID NO: 1011729 - DNA, 25 bp, Homo sapien
tgccccgacccctaaagcccagtca

SEQ ID NO: 1011730 - DNA, 25 bp, Homo sapien
tcagtttctcttcaggctctgctcc

SEQ ID NO: 1011731 - DNA, 25 bp, Homo sapien
ccagctcctgcctaggaaagcctta

SEQ ID NO: 1011732 - DNA, 25 bp, Homo sapien
ccttagtgttgggagggaccctgat

SEQ ID NO: 1011733 - DNA, 25 bp, Homo sapien
ctgtacaggcaaaggggaagctgtc

SEQ ID NO: 1011734 - DNA, 25 bp, Homo sapien
gtacaggcaaaggggaagctgtccc

SEQ ID NO: 1011735 - DNA, 25 bp, Homo sapien
gcaaaggggaagctgtccccatcac

SEQ ID NO: 1011736 - DNA, 25 bp, Homo sapien
aggcaaaggggaagctgtccccatc

SEQ ID NO: 1011737 - DNA, 25 bp, Homo sapien
gggccggcactggtccagggcacgt

SEQ ID NO: 1011738 - DNA, 25 bp, Homo sapien
cgtgcagtgaagaggacagctcctt

SEQ ID NO: 1011739 - DNA, 25 bp, Homo sapien
ctgagcctgtcctcggcttctccac

SEQ ID NO: 1011740 - DNA, 25 bp, Homo sapien
aggacagctccttctcggtctccgg

SEQ ID NO: 1011741 - DNA, 25 bp, Homo sapien
gtgtgcatagtgggcctggagggcg

SEQ ID NO: 1011742 - DNA, 25 bp, Homo sapien
agatgtgtgcatagtgggcctggag

SEQ ID NO: 1011743 - DNA, 25 bp, Homo sapien
gaagatgtgtgcatagtgggcctgg

SEQ ID NO: 1011744 - DNA, 25 bp, Homo sapien
ggggaagatgtgtgcatagtgggcc

SEQ ID NO: 1011745 - DNA, 25 bp, Homo sapien
ctgggagtcagggcaggggcagaac

SEQ ID NO: 1011746 - DNA, 25 bp, Homo sapien
gagtcagggcaggggcagaacaaac

SEQ ID NO: 1011747 - DNA, 25 bp, Homo sapien
ggagtcagggcaggggcagaacaaa

SEQ ID NO: 1011748 - DNA, 25 bp, Homo sapien
tgggagtcagggcaggggcagaaca

SEQ ID NO: 1011749 - DNA, 25 bp, Homo sapien
ccagggcagcgtcaagagtctgagc

SEQ ID NO: 1011750 - DNA, 25 bp, Homo sapien
gccagggcagcgtcaagagtctgag

SEQ ID NO: 1011751 - DNA, 25 bp, Homo sapien
ccccaactggcaccactgctgcccc

SEQ ID NO: 1011752 - DNA, 25 bp, Homo sapien
agaagatcatgcagtcatcagtccc

SEQ ID NO: 1011753 - DNA, 25 bp, Homo sapien
gaagatcatgcagtcatcagtccca

SEQ ID NO: 1011754 - DNA, 25 bp, Homo sapien
gcttcagttggcacctgccccagtc

SEQ ID NO: 1011755 - DNA, 25 bp, Homo sapien
ggcagcagcagtggacccgctatgc

SEQ ID NO: 1011756 - DNA, 25 bp, Homo sapien
agcagtggacccgctatgcacacat

SEQ ID NO: 1011757 - DNA, 25 bp, Homo sapien
ggtttgtgtgcagaacatcctgccc

SEQ ID NO: 1011758 - DNA, 25 bp, Homo sapien
cccacaattcatggtatgtacaggg

SEQ ID NO: 1011759 - DNA, 25 bp, Homo sapien
gaggagggaaattgcccagctttcc

SEQ ID NO: 1011760 - DNA, 25 bp, Homo sapien
attgcccagctttcccccggcacag

SEQ ID NO: 1011761 - DNA, 25 bp, Homo sapien
gggctcggaggagggaaattgccca

SEQ ID NO: 1011762 - DNA, 25 bp, Homo sapien
tttaatgacggtcatggcaactttt

SEQ ID NO: 1011763 - DNA, 25 bp, Homo sapien
acaatgaaaaatatcgcccatgatc

SEQ ID NO: 1011764 - DNA, 25 bp, Homo sapien
atatcgcccatgatcaacgtgttct

SEQ ID NO: 1011765 - DNA, 25 bp, Homo sapien
aacaggtttaatgacggtcatggca

SEQ ID NO: 1011766 - DNA, 25 bp, Homo sapien
ggtggtgatgccctgaaattcagca

SEQ ID NO: 1011767 - DNA, 25 bp, Homo sapien
gtcagaatgtgtcagtcatcactcg

SEQ ID NO: 1011768 - DNA, 25 bp, Homo sapien
cacgtgttgttctaccccaggtcag

SEQ ID NO: 1011769 - DNA, 25 bp, Homo sapien
tctgtacaaaagtcttaacataaca

SEQ ID NO: 1011770 - DNA, 25 bp, Homo sapien
agtcattttgctttcggctcacagg

SEQ ID NO: 1011771 - DNA, 25 bp, Homo sapien
tggtgactcctgtgcagatttggca

SEQ ID NO: 1011772 - DNA, 25 bp, Homo sapien
cagcgggtgaaatcccatgccctgg

SEQ ID NO: 1011773 - DNA, 25 bp, Homo sapien
gaacagtcccattgccagcgggtga

SEQ ID NO: 1011774 - DNA, 25 bp, Homo sapien
ctgctaatccccacatctgagacat

SEQ ID NO: 1011775 - DNA, 25 bp, Homo sapien
gtgctcccctgagtcatccagaaag

SEQ ID NO: 1011776 - DNA, 25 bp, Homo sapien
acagaggccaaagtgctcccctgag

SEQ ID NO: 1011777 - DNA, 25 bp, Homo sapien
aatccccacatctgagacatctgtg

SEQ ID NO: 1011778 - DNA, 25 bp, Homo sapien
ctgtgcactgaaaggatttggacac

SEQ ID NO: 1011779 - DNA, 25 bp, Homo sapien
gagatctttctcatgcgctgttttc

SEQ ID NO: 1011780 - DNA, 25 bp, Homo sapien
gctgtgcactgaaaggatttggaca

SEQ ID NO: 1011781 - DNA, 25 bp, Homo sapien
tgtgcactgaaaggatttggacaca

SEQ ID NO: 1011782 - DNA, 25 bp, Homo sapien
atgtcccgtggaccagaggtggtca

SEQ ID NO: 1011783 - DNA, 25 bp, Homo sapien
catagaggaatttaagtgtgatgtc

SEQ ID NO: 1011784 - DNA, 25 bp, Homo sapien
tcacaagccatagaggaatttaagt

SEQ ID NO: 1011785 - DNA, 25 bp, Homo sapien
ttaagtgtgatgtcccgtggaccag

SEQ ID NO: 1011786 - DNA, 25 bp, Homo sapien
taaaagaataaagccgcagaccttc

SEQ ID NO: 1011787 - DNA, 25 bp, Homo sapien
gcatgagctggatagacttcaggct

SEQ ID NO: 1011788 - DNA, 25 bp, Homo sapien
tgaaccatcccacaatctgtcaagg

SEQ ID NO: 1011789 - DNA, 25 bp, Homo sapien
gacgtcctggtctcttgagatgaga

SEQ ID NO: 1011790 - DNA, 25 bp, Homo sapien
aaaagccaggcttccgtacgggcag

SEQ ID NO: 1011791 - DNA, 25 bp, Homo sapien
cagcctgcgtggttaatatcccgga

SEQ ID NO: 1011792 - DNA, 25 bp, Homo sapien
tcagtagtgaagagcaacatgtggc

SEQ ID NO: 1011793 - DNA, 25 bp, Homo sapien
tatgatgccccgaaaatcgtccaga

SEQ ID NO: 1011794 - DNA, 25 bp, Homo sapien
aatcgggtgtctgacggacaggcac

SEQ ID NO: 1011795 - DNA, 25 bp, Homo sapien
taaacagtcagtcttgcaaaatcgg

SEQ ID NO: 1011796 - DNA, 25 bp, Homo sapien
gggtcacaaccttcctggacgtcac

SEQ ID NO: 1011797 - DNA, 25 bp, Homo sapien
tttgtccactagtgtgcaggctcct

SEQ ID NO: 1011798 - DNA, 25 bp, Homo sapien
ggcagtggtgggatctcggttcact

SEQ ID NO: 1011799 - DNA, 25 bp, Homo sapien
ttcaagcaattctgcctcagcctcc

SEQ ID NO: 1011800 - DNA, 25 bp, Homo sapien
tgctctgttaccaggttggagggca

SEQ ID NO: 1011801 - DNA, 25 bp, Homo sapien
gcaacatccacctcctgggttcaag

SEQ ID NO: 1011802 - DNA, 25 bp, Homo sapien
ctccagccccacatctcagcaatcc

SEQ ID NO: 1011803 - DNA, 25 bp, Homo sapien
gtggcttctgatggctcacagttgc

SEQ ID NO: 1011804 - DNA, 25 bp, Homo sapien
gacttactgactaatcgcacacggg

SEQ ID NO: 1011805 - DNA, 25 bp, Homo sapien
gttgagcaggatccttccccggagt

SEQ ID NO: 1011806 - DNA, 25 bp, Homo sapien
cgtgagtcaaggatccaagcctgga

SEQ ID NO: 1011807 - DNA, 25 bp, Homo sapien
catcttgagaggaactgggaataca

SEQ ID NO: 1011808 - DNA, 25 bp, Homo sapien
gaaaaccttctggaggtgacgtctg

SEQ ID NO: 1011809 - DNA, 25 bp, Homo sapien
catgaaaaccttctggaggtgacgt

SEQ ID NO: 1011810 - DNA, 25 bp, Homo sapien
cacaagccatgaaaaccttctggag

SEQ ID NO: 1011811 - DNA, 25 bp, Homo sapien
agctttgtcttgccagttgatctcg

SEQ ID NO: 1011812 - DNA, 25 bp, Homo sapien
tagatttcatccgacactccacagg

SEQ ID NO: 1011813 - DNA, 25 bp, Homo sapien
tgaaactgcgccatcattgtgtggg

SEQ ID NO: 1011814 - DNA, 25 bp, Homo sapien
cagggaagaggccacgagatagtca

SEQ ID NO: 1011815 - DNA, 25 bp, Homo sapien
tgattgtggatacgcctcaggaggc

SEQ ID NO: 1011816 - DNA, 25 bp, Homo sapien
aaggccagggcgatccaagctgata

SEQ ID NO: 1011817 - DNA, 25 bp, Homo sapien
ctgttgtgcgctggatacggcttaa

SEQ ID NO: 1011818 - DNA, 25 bp, Homo sapien
gatatttgagttccattaccaggca

SEQ ID NO: 1011819 - DNA, 25 bp, Homo sapien
agataaagcccctgtgccacggatt

SEQ ID NO: 1011820 - DNA, 25 bp, Homo sapien
ctgctggtcccagtgcttctcggag

SEQ ID NO: 1011821 - DNA, 25 bp, Homo sapien
cgatgtagctgactacaccgtagtc

SEQ ID NO: 1011822 - DNA, 25 bp, Homo sapien
gactacaccgtagtcaattttttga

SEQ ID NO: 1011823 - DNA, 25 bp, Homo sapien
ttgaaaattggtacacgatgtagct

SEQ ID NO: 1011824 - DNA, 25 bp, Homo sapien
ttggtacacgatgtagctgactaca

SEQ ID NO: 1011825 - DNA, 25 bp, Homo sapien
gatgacttggcttgtgcgggactct

SEQ ID NO: 1011826 - DNA, 25 bp, Homo sapien
gtagttggtatctgcattaatagcc

SEQ ID NO: 1011827 - DNA, 25 bp, Homo sapien
acttgggcaacaacacggtggctgt

SEQ ID NO: 1011828 - DNA, 25 bp, Homo sapien
ggagcatatcacttccagtagttgg

SEQ ID NO: 1011829 - DNA, 25 bp, Homo sapien
aggctcccaggttatctgtggcgga

SEQ ID NO: 1011830 - DNA, 25 bp, Homo sapien
ccacaggctcccaggttatctgtgg

SEQ ID NO: 1011831 - DNA, 25 bp, Homo sapien
cccaggttatctgtggcggaggtca

SEQ ID NO: 1011832 - DNA, 25 bp, Homo sapien
cctgctgaccgtgcccacaggctcc

SEQ ID NO: 1011833 - DNA, 25 bp, Homo sapien
ctggagaacgcgtggttctgtgacc

SEQ ID NO: 1011834 - DNA, 25 bp, Homo sapien
tgtttctgtgatgccagcgcaggca

SEQ ID NO: 1011835 - DNA, 25 bp, Homo sapien
aacttttgtttctgtgatgccagcg

SEQ ID NO: 1011836 - DNA, 25 bp, Homo sapien
cgcgtggttctgtgaccaaaacagt

SEQ ID NO: 1011837 - DNA, 25 bp, Homo sapien
aagcggctcgcgtcccgttgaagaa

SEQ ID NO: 1011838 - DNA, 25 bp, Homo sapien
gatggctctaaactctggctgtaca

SEQ ID NO: 1011839 - DNA, 25 bp, Homo sapien
aaggtgcatgctacggccagaaaga

SEQ ID NO: 1011840 - DNA, 25 bp, Homo sapien
gagacgtcgccacaaatgaaaccca

SEQ ID NO: 1011841 - DNA, 25 bp, Homo sapien
aatgatgagcagcacacagacggca

SEQ ID NO: 1011842 - DNA, 25 bp, Homo sapien
cagacggcattttgctgagcatcag

SEQ ID NO: 1011843 - DNA, 25 bp, Homo sapien
gggtgagacctctgctcgacagcaa

SEQ ID NO: 1011844 - DNA, 25 bp, Homo sapien
gactctgataagaagctgggcgttc

SEQ ID NO: 1011845 - DNA, 25 bp, Homo sapien
ggtggaaaagtgacgcccaggaatc

SEQ ID NO: 1011846 - DNA, 25 bp, Homo sapien
tggtctgttgcgaggcactttcccc

SEQ ID NO: 1011847 - DNA, 25 bp, Homo sapien
ttttctaccagtgacgcgcagcttg

SEQ ID NO: 1011848 - DNA, 25 bp, Homo sapien
gagtctggcatctcgctgtgaagcg

SEQ ID NO: 1011849 - DNA, 25 bp, Homo sapien
tctggatactggaaataggttaagg

SEQ ID NO: 1011850 - DNA, 25 bp, Homo sapien
tgaatgaagtttgtctggatttcct

SEQ ID NO: 1011851 - DNA, 25 bp, Homo sapien
gacagggtttgaagtgaatgaagtt

SEQ ID NO: 1011852 - DNA, 25 bp, Homo sapien
ttgaagtgaatgaagtttgtctgga

SEQ ID NO: 1011853 - DNA, 25 bp, Homo sapien
ctgccaagcgtttcacgggaacgtc

SEQ ID NO: 1011854 - DNA, 25 bp, Homo sapien
cggcttcaggattagcaaccaccat

SEQ ID NO: 1011855 - DNA, 25 bp, Homo sapien
catctggggagtcaacggcttcagg

SEQ ID NO: 1011856 - DNA, 25 bp, Homo sapien
gcgtttcacgggaacgtcatctggg

SEQ ID NO: 1011857 - DNA, 25 bp, Homo sapien
tgtcacgatgacacgataatgccgc

SEQ ID NO: 1011858 - DNA, 25 bp, Homo sapien
actgaggacccgagttcctcttgca

SEQ ID NO: 1011859 - DNA, 25 bp, Homo sapien
taatgccgctggactttgtcggcct

SEQ ID NO: 1011860 - DNA, 25 bp, Homo sapien
cggccttggtaaacggcactgagga

SEQ ID NO: 1011861 - DNA, 25 bp, Homo sapien
ctgcttctatccaggcatcatccag

SEQ ID NO: 1011862 - DNA, 25 bp, Homo sapien
tgcttctatccaggcatcatccagg

SEQ ID NO: 1011863 - DNA, 25 bp, Homo sapien
gcttctatccaggcatcatccaggg

SEQ ID NO: 1011864 - DNA, 25 bp, Homo sapien
cgtgaaggtggctcaacacaagtct

SEQ ID NO: 1011865 - DNA, 25 bp, Homo sapien
cctctggtgcgtgtgagtcattagc

SEQ ID NO: 1011866 - DNA, 25 bp, Homo sapien
gaaaccgagcatgagtggctccacg

SEQ ID NO: 1011867 - DNA, 25 bp, Homo sapien
ggctccacgagtgcgtctagtgtca

SEQ ID NO: 1011868 - DNA, 25 bp, Homo sapien
ggaggaagcgattgcgtgcccccat

SEQ ID NO: 1011869 - DNA, 25 bp, Homo sapien
aggaggaagcgattgcgtgccccca

SEQ ID NO: 1011870 - DNA, 25 bp, Homo sapien
ggaggaggaagcgattgcgtgcccc

SEQ ID NO: 1011871 - DNA, 25 bp, Homo sapien
gggaggaggaagcgattgcgtgccc

SEQ ID NO: 1011872 - DNA, 25 bp, Homo sapien
ccaccaaattcttacgagagccaca

SEQ ID NO: 1011873 - DNA, 25 bp, Homo sapien
aaattcttacgagagccacatccag

SEQ ID NO: 1011874 - DNA, 25 bp, Homo sapien
cagattctcatgagaggccacttcc

SEQ ID NO: 1011875 - DNA, 25 bp, Homo sapien
caaattctcttgagagccacctcca

SEQ ID NO: 1011876 - DNA, 25 bp, Homo sapien
ttccaggctctccccacagccttcc

SEQ ID NO: 1011877 - DNA, 25 bp, Homo sapien
tccaggctctccccacagccttcca

SEQ ID NO: 1011878 - DNA, 25 bp, Homo sapien
ccaggctctccccacagccttccac

SEQ ID NO: 1011879 - DNA, 25 bp, Homo sapien
aaaggagtccaactgatgtgttcca

SEQ ID NO: 1011880 - DNA, 25 bp, Homo sapien
tgttccatatgtgccaagctcccag

SEQ ID NO: 1011881 - DNA, 25 bp, Homo sapien
actgatgtgttccatatgtgccaag

SEQ ID NO: 1011882 - DNA, 25 bp, Homo sapien
gagtccaactgatgtgttccatatg

SEQ ID NO: 1011883 - DNA, 25 bp, Homo sapien
cagatacagcttgatcatggacagc

SEQ ID NO: 1011884 - DNA, 25 bp, Homo sapien
ctgctgccacagatacagcttgatc

SEQ ID NO: 1011885 - DNA, 25 bp, Homo sapien
gatacagcttgatcatggacagcat

SEQ ID NO: 1011886 - DNA, 25 bp, Homo sapien
gccacagatacagcttgatcatgga

SEQ ID NO: 1011887 - DNA, 25 bp, Homo sapien
ggcattgaactgaacacctggcgcc

SEQ ID NO: 1011888 - DNA, 25 bp, Homo sapien
atcgtcaatgatggcattgaactga

SEQ ID NO: 1011889 - DNA, 25 bp, Homo sapien
tggcgcccgctctacatacatcaga

SEQ ID NO: 1011890 - DNA, 25 bp, Homo sapien
gagagtggcgccagaagccatcgtc

SEQ ID NO: 1011891 - DNA, 25 bp, Homo sapien
cattttcatcagtgtttgacaggac

SEQ ID NO: 1011892 - DNA, 25 bp, Homo sapien
ttttcatcagtgtttgacaggactc

SEQ ID NO: 1011893 - DNA, 25 bp, Homo sapien
catcattttcatcagtgtttgacag

SEQ ID NO: 1011894 - DNA, 25 bp, Homo sapien
ctttttaatctcaggagaataatca

SEQ ID NO: 1011895 - DNA, 25 bp, Homo sapien
tgggggagcagatggctggatctct

SEQ ID NO: 1011896 - DNA, 25 bp, Homo sapien
tatgccgggaaatggtcccgccttg

SEQ ID NO: 1011897 - DNA, 25 bp, Homo sapien
tgtcaacaagtcagcggcagggacc

SEQ ID NO: 1011898 - DNA, 25 bp, Homo sapien
attcgtagtcgggttcctggctgcc

SEQ ID NO: 1011899 - DNA, 25 bp, Homo sapien
tgagtgctcgcagtgtcaacaagtc

SEQ ID NO: 1011900 - DNA, 25 bp, Homo sapien
tggctgaaggcgaacgctagcgccc

SEQ ID NO: 1011901 - DNA, 25 bp, Homo sapien
ggtggctgaaggcgaacgctagcgc

SEQ ID NO: 1011902 - DNA, 25 bp, Homo sapien
gctgaaggcgaacgctagcgccccg

SEQ ID NO: 1011903 - DNA, 25 bp, Homo sapien
tgaaggcgaacgctagcgccccggc

SEQ ID NO: 1011904 - DNA, 25 bp, Homo sapien
gggctcgagtcgtcgggcagccgac

SEQ ID NO: 1011905 - DNA, 25 bp, Homo sapien
cagcgcgaacgagggaagacgttac

SEQ ID NO: 1011906 - DNA, 25 bp, Homo sapien
gagcggaggcaaacccagcgcgaac

SEQ ID NO: 1011907 - DNA, 25 bp, Homo sapien
cggcgagacggcagggcgtcggagc

SEQ ID NO: 1011908 - DNA, 25 bp, Homo sapien
aaaacgcaccggctggcaaggcagg

SEQ ID NO: 1011909 - DNA, 25 bp, Homo sapien
caaagggcgcggcttgtttcagcca

SEQ ID NO: 1011910 - DNA, 25 bp, Homo sapien
gcttgtttcagccacgaaaacgcac

SEQ ID NO: 1011911 - DNA, 25 bp, Homo sapien
tcagccacgaaaacgcaccggctgg

SEQ ID NO: 1011912 - DNA, 25 bp, Homo sapien
tgctgaaaacggtggagagtgaaca

SEQ ID NO: 1011913 - DNA, 25 bp, Homo sapien
gttgatcccttaggcaaccatctgt

SEQ ID NO: 1011914 - DNA, 25 bp, Homo sapien
tgaagaatctttgggtcatttacca

SEQ ID NO: 1011915 - DNA, 25 bp, Homo sapien
catattagtgctggacaatgctgac

SEQ ID NO: 1011916 - DNA, 25 bp, Homo sapien
ctgacactccagtcctgtgcatgca

SEQ ID NO: 1011917 - DNA, 25 bp, Homo sapien
ctccgtgacggcgatggcggggtcc

SEQ ID NO: 1011918 - DNA, 25 bp, Homo sapien
tccgtgacggcgatggcggggtcct

SEQ ID NO: 1011919 - DNA, 25 bp, Homo sapien
ccgtgacggcgatggcggggtcctg

SEQ ID NO: 1011920 - DNA, 25 bp, Homo sapien
tgaaaatggtatgaaaaacaggaaa

SEQ ID NO: 1011921 - DNA, 25 bp, Homo sapien
acgtacactcccttcgtcaccatgc

SEQ ID NO: 1011922 - DNA, 25 bp, Homo sapien
tgtgtgcacgtacactcccttcgtc

SEQ ID NO: 1011923 - DNA, 25 bp, Homo sapien
cttgaaaatggtatgaaaaacagga

SEQ ID NO: 1011924 - DNA, 25 bp, Homo sapien
tctaagtggatggtattgcagaagg

SEQ ID NO: 1011925 - DNA, 25 bp, Homo sapien
cagactctaagtggatggtattgca

SEQ ID NO: 1011926 - DNA, 25 bp, Homo sapien
catggcagactctaagtggatggta

SEQ ID NO: 1011927 - DNA, 25 bp, Homo sapien
acatgagcatggcagactctaagtg

SEQ ID NO: 1011928 - DNA, 25 bp, Homo sapien
tgaagttgccgatgtacaggccggg

SEQ ID NO: 1011929 - DNA, 25 bp, Homo sapien
agttgccgatgtacaggccgggcag

SEQ ID NO: 1011930 - DNA, 25 bp, Homo sapien
ttgccgatgtacaggccgggcagga

SEQ ID NO: 1011931 - DNA, 25 bp, Homo sapien
aagttgccgatgtacaggccgggca

SEQ ID NO: 1011932 - DNA, 25 bp, Homo sapien
tgctcaattgttccgcgtctctggc

SEQ ID NO: 1011933 - DNA, 25 bp, Homo sapien
cagaatatgtgtcaccttgttcttg

SEQ ID NO: 1011934 - DNA, 25 bp, Homo sapien
accttgttcttgctcaattgttccg

SEQ ID NO: 1011935 - DNA, 25 bp, Homo sapien
tggcactatcgtggacagacagaat

SEQ ID NO: 1011936 - DNA, 25 bp, Homo sapien
gcctcaggcccacgtggccgctggg

SEQ ID NO: 1011937 - DNA, 25 bp, Homo sapien
cttctggcttgctttacatttggga

SEQ ID NO: 1011938 - DNA, 25 bp, Homo sapien
gggtggatcagcaagaggaacacgt

SEQ ID NO: 1011939 - DNA, 25 bp, Homo sapien
ttcaagagaaatggggtggatcagc

SEQ ID NO: 1011940 - DNA, 25 bp, Homo sapien
tttgctttgtaccaatcggccgtgg

SEQ ID NO: 1011941 - DNA, 25 bp, Homo sapien
tggacaacaggatgtagcttgcctg

SEQ ID NO: 1011942 - DNA, 25 bp, Homo sapien
caacaggatgtagcttgcctgacat

SEQ ID NO: 1011943 - DNA, 25 bp, Homo sapien
ccaatcggccgtggacaacaggatg

SEQ ID NO: 1011944 - DNA, 25 bp, Homo sapien
gagaaacctagatacagcttgcttc

SEQ ID NO: 1011945 - DNA, 25 bp, Homo sapien
caagaaagagcgattactagacagt

SEQ ID NO: 1011946 - DNA, 25 bp, Homo sapien
tagacagttttcgatccctgctata

SEQ ID NO: 1011947 - DNA, 25 bp, Homo sapien
ttgcctcaacacacgaaagctgctg

SEQ ID NO: 1011948 - DNA, 25 bp, Homo sapien
aagaaatcggaatgtgtcacctggc

SEQ ID NO: 1011949 - DNA, 25 bp, Homo sapien
tacttcaagagctttcgagggtctc

SEQ ID NO: 1011950 - DNA, 25 bp, Homo sapien
gaagttcagactccacagcttaaca

SEQ ID NO: 1011951 - DNA, 25 bp, Homo sapien
taaaaaatatccagtccccagcatc

SEQ ID NO: 1011952 - DNA, 25 bp, Homo sapien
aacagccaaacacgagggtcttctt

SEQ ID NO: 1011953 - DNA, 25 bp, Homo sapien
agccaaacacgagggtcttcttggg

SEQ ID NO: 1011954 - DNA, 25 bp, Homo sapien
aaacagccaaacacgagggtcttct

SEQ ID NO: 1011955 - DNA, 25 bp, Homo sapien
acagccaaacacgagggtcttcttg

SEQ ID NO: 1011956 - DNA, 25 bp, Homo sapien
cagacttgctattcacgtcacctag

SEQ ID NO: 1011957 - DNA, 25 bp, Homo sapien
cttctctttcaaacgccttacagaa

SEQ ID NO: 1011958 - DNA, 25 bp, Homo sapien
agaattgcatctcctctgaaagcat

SEQ ID NO: 1011959 - DNA, 25 bp, Homo sapien
ttgctattcacgtcacctagtctcc

SEQ ID NO: 1011960 - DNA, 25 bp, Homo sapien
ttcctattgcagactcgaaggcccc

SEQ ID NO: 1011961 - DNA, 25 bp, Homo sapien
taagctttctgctagtcagccagcc

SEQ ID NO: 1011962 - DNA, 25 bp, Homo sapien
aacccacggaatctccctggactag

SEQ ID NO: 1011963 - DNA, 25 bp, Homo sapien
tggatgctctccacggatattctcc

SEQ ID NO: 1011964 - DNA, 25 bp, Homo sapien
cagtgatgaatgctgaaacttgacg

SEQ ID NO: 1011965 - DNA, 25 bp, Homo sapien
ggcgatgcccctgctcagtgatgaa

SEQ ID NO: 1011966 - DNA, 25 bp, Homo sapien
aggccagagctagctggcgatgccc

SEQ ID NO: 1011967 - DNA, 25 bp, Homo sapien
acgctggcagtagctgcggtgataa

SEQ ID NO: 1011968 - DNA, 25 bp, Homo sapien
aagacacgcaaaggctggacgtggt

SEQ ID NO: 1011969 - DNA, 25 bp, Homo sapien
ctcctcaacaccaggagggacaccc

SEQ ID NO: 1011970 - DNA, 25 bp, Homo sapien
cagggctgaggctcaagacacgcaa

SEQ ID NO: 1011971 - DNA, 25 bp, Homo sapien
tgaggctcaagacacgcaaaggctg

SEQ ID NO: 1011972 - DNA, 25 bp, Homo sapien
acactgctcttcaagctgtgtgctg

SEQ ID NO: 1011973 - DNA, 25 bp, Homo sapien
agctgtgtgctgtacctatctccct

SEQ ID NO: 1011974 - DNA, 25 bp, Homo sapien
cacactgctcttcaagctgtgtgct

SEQ ID NO: 1011975 - DNA, 25 bp, Homo sapien
tgctgtacctatctccctgagccag

SEQ ID NO: 1011976 - DNA, 25 bp, Homo sapien
actgcacacaccaggacgcggaagc

SEQ ID NO: 1011977 - DNA, 25 bp, Homo sapien
actgcacacaccaggacgcagaagc

SEQ ID NO: 1011978 - DNA, 25 bp, Homo sapien
actctccaggcacccgcagatacag

SEQ ID NO: 1011979 - DNA, 25 bp, Homo sapien
ggcacccgcagatacagcattgcac

SEQ ID NO: 1011980 - DNA, 25 bp, Homo sapien
gactctccaggcacccgcagataca

SEQ ID NO: 1011981 - DNA, 25 bp, Homo sapien
tgactccaggcaccagcagatacag

SEQ ID NO: 1011982 - DNA, 25 bp, Homo sapien
gcccagggcagatgactccaggcac

SEQ ID NO: 1011983 - DNA, 25 bp, Homo sapien
cgcagaagcccagggcagatgactc

SEQ ID NO: 1011984 - DNA, 25 bp, Homo sapien
caggacgcagaagcccagggcagat

SEQ ID NO: 1011985 - DNA, 25 bp, Homo sapien
attgcacacaccaggacgcggaagc

SEQ ID NO: 1011986 - DNA, 25 bp, Homo sapien
actctccaggcacccgcagatacag

SEQ ID NO: 1011987 - DNA, 25 bp, Homo sapien
ggcacccgcagatacagcattgcac

SEQ ID NO: 1011988 - DNA, 25 bp, Homo sapien
acagcattgcacacaccaggacgcg

SEQ ID NO: 1011989 - DNA, 25 bp, Homo sapien
accagcagatacagcattgcacaca

SEQ ID NO: 1011990 - DNA, 25 bp, Homo sapien
attgcacacaccaggacgcggaagc

SEQ ID NO: 1011991 - DNA, 25 bp, Homo sapien
accagcagatacagcattgcacaca

SEQ ID NO: 1011992 - DNA, 25 bp, Homo sapien
actgcacacacgaggatgcggaagc

SEQ ID NO: 1011993 - DNA, 25 bp, Homo sapien
acacacgaggatgcggaagcccagg

SEQ ID NO: 1011994 - DNA, 25 bp, Homo sapien
caggacacagaagccgagggaagac

SEQ ID NO: 1011995 - DNA, 25 bp, Homo sapien
aagccgagggaagacgactctccag

SEQ ID NO: 1011996 - DNA, 25 bp, Homo sapien
cagaagccgagggaagacgactctc

SEQ ID NO: 1011997 - DNA, 25 bp, Homo sapien
acacagaagccgagggaagacgact

SEQ ID NO: 1011998 - DNA, 25 bp, Homo sapien
gcaccagcagatacagcactgcaca

SEQ ID NO: 1011999 - DNA, 25 bp, Homo sapien
actctccaggcaccagcagatacag

SEQ ID NO: 1012000 - DNA, 25 bp, Homo sapien
ccagggcagatgactctccaggcac

SEQ ID NO: 1012001 - DNA, 25 bp, Homo sapien
caggacgcagaagcccagggcagat

SEQ ID NO: 1012002 - DNA, 25 bp, Homo sapien
accagcagatacagcattgcacaca

SEQ ID NO: 1012003 - DNA, 25 bp, Homo sapien
ccagggcagatgactctccagacac

SEQ ID NO: 1012004 - DNA, 25 bp, Homo sapien
agaagcccagggcagatgactctcc

SEQ ID NO: 1012005 - DNA, 25 bp, Homo sapien
agcccagggcagatgactctccaga

SEQ ID NO: 1012006 - DNA, 25 bp, Homo sapien
cagaacgcagaagcccagggcagat

SEQ ID NO: 1012007 - DNA, 25 bp, Homo sapien
acgcggaagcccagggcagatgact

SEQ ID NO: 1012008 - DNA, 25 bp, Homo sapien
tgactccaggcaccagcagatacag

SEQ ID NO: 1012009 - DNA, 25 bp, Homo sapien
gcccagggcagatgactccaggcac

SEQ ID NO: 1012010 - DNA, 25 bp, Homo sapien
atgactccaggcaccagcagataca

SEQ ID NO: 1012011 - DNA, 25 bp, Homo sapien
gactctccaggcacccgcagataca

SEQ ID NO: 1012012 - DNA, 25 bp, Homo sapien
actctccaggcacccgcagatacag

SEQ ID NO: 1012013 - DNA, 25 bp, Homo sapien
actgcacacaccaggacgcggaagc

SEQ ID NO: 1012014 - DNA, 25 bp, Homo sapien
tctcaagagcgactttcaccacatt

SEQ ID NO: 1012015 - DNA, 25 bp, Homo sapien
ccagccagcgaactctcaagagcga

SEQ ID NO: 1012016 - DNA, 25 bp, Homo sapien
actgagcgaaaccagccagcgaact

SEQ ID NO: 1012017 - DNA, 25 bp, Homo sapien
accacaattaacaactgagcgaaac

SEQ ID NO: 1012018 - DNA, 25 bp, Homo sapien
cgatcagtccagaagcttgtgaaat

SEQ ID NO: 1012019 - DNA, 25 bp, Homo sapien
acaagcttgttggtatagatgcaca

SEQ ID NO: 1012020 - DNA, 25 bp, Homo sapien
cttaagtgagagttggcagtcgatc

SEQ ID NO: 1012021 - DNA, 25 bp, Homo sapien
tcctgcagccaccattgaaatgact

SEQ ID NO: 1012022 - DNA, 25 bp, Homo sapien
atggtgaatccgctgctgggatgca

SEQ ID NO: 1012023 - DNA, 25 bp, Homo sapien
aggttttgagatggtgaatccgctg

SEQ ID NO: 1012024 - DNA, 25 bp, Homo sapien
tgaatccgctgctgggatgcacagg

SEQ ID NO: 1012025 - DNA, 25 bp, Homo sapien
tttgagatggtgaatccgctgctgg

SEQ ID NO: 1012026 - DNA, 25 bp, Homo sapien
cagcgttcaataactcccagagtgg

SEQ ID NO: 1012027 - DNA, 25 bp, Homo sapien
cacacctagggtcctgaacattggg

SEQ ID NO: 1012028 - DNA, 25 bp, Homo sapien
gatccatagggtgtgcgtgcaccag

SEQ ID NO: 1012029 - DNA, 25 bp, Homo sapien
gggaatccagacgagcctgaggact

SEQ ID NO: 1012030 - DNA, 25 bp, Homo sapien
cttttcatgagctacggtcctgact

SEQ ID NO: 1012031 - DNA, 25 bp, Homo sapien
tcatgagctacggtcctgacttcct

SEQ ID NO: 1012032 - DNA, 25 bp, Homo sapien
tgagctacggtcctgacttcctttt

SEQ ID NO: 1012033 - DNA, 25 bp, Homo sapien
gctacggtcctgacttcctttttca

SEQ ID NO: 1012034 - DNA, 25 bp, Homo sapien
gacagaaaactgacctttccgggca

SEQ ID NO: 1012035 - DNA, 25 bp, Homo sapien
caacagctagtctcaaaggtcacac

SEQ ID NO: 1012036 - DNA, 25 bp, Homo sapien
gccagaattcctgttcgtgcaggga

SEQ ID NO: 1012037 - DNA, 25 bp, Homo sapien
catttgatacaaactctaggacgcc

SEQ ID NO: 1012038 - DNA, 25 bp, Homo sapien
actttgcctgttggagtgggagccc

SEQ ID NO: 1012039 - DNA, 25 bp, Homo sapien
gaagaatgttcctcatcagacagac

SEQ ID NO: 1012040 - DNA, 25 bp, Homo sapien
ttctgcatcaaaggccaagagccag

SEQ ID NO: 1012041 - DNA, 25 bp, Homo sapien
tagagtattctatctgggtccaggc

SEQ ID NO: 1012042 - DNA, 25 bp, Homo sapien
gagttaagtccagtagagcccacag

SEQ ID NO: 1012043 - DNA, 25 bp, Homo sapien
tcatggacacaattcggcacaaggc

SEQ ID NO: 1012044 - DNA, 25 bp, Homo sapien
gaggttatggagaggtgaccccact

SEQ ID NO: 1012045 - DNA, 25 bp, Homo sapien
tagaaatgaatgacgaccgcctgag

SEQ ID NO: 1012046 - DNA, 25 bp, Homo sapien
ggtcaccacaagcacaaatccctag

SEQ ID NO: 1012047 - DNA, 25 bp, Homo sapien
gtaaataagaacagaccagagtggg

SEQ ID NO: 1012048 - DNA, 25 bp, Homo sapien
tctgacctgacatctctaactagca

SEQ ID NO: 1012049 - DNA, 25 bp, Homo sapien
tctgcaacaactgcaagggtcacca

SEQ ID NO: 1012050 - DNA, 25 bp, Homo sapien
aactcagcgacctcacggcaggtgc

SEQ ID NO: 1012051 - DNA, 25 bp, Homo sapien
actgactgcagaagaaactcagcga

SEQ ID NO: 1012052 - DNA, 25 bp, Homo sapien
gactgcagaagaaactcagcgacct

SEQ ID NO: 1012053 - DNA, 25 bp, Homo sapien
agaagaaactcagcgacctcacggc

SEQ ID NO: 1012054 - DNA, 25 bp, Homo sapien
ctaaatggactgaacgcggtggcac

SEQ ID NO: 1012055 - DNA, 25 bp, Homo sapien
gacacctcgggatggatagcacatg

SEQ ID NO: 1012056 - DNA, 25 bp, Homo sapien
gaatgagaaattcaggcacggccta

SEQ ID NO: 1012057 - DNA, 25 bp, Homo sapien
tacaatgctgaggtctagggaaggc

SEQ ID NO: 1012058 - DNA, 25 bp, Homo sapien
ccgcggagccggcactcgtgaatga

SEQ ID NO: 1012059 - DNA, 25 bp, Homo sapien
gtacaaggcagctctcaccgcggag

SEQ ID NO: 1012060 - DNA, 25 bp, Homo sapien
ccggcactcgtgaatgaatttaata

SEQ ID NO: 1012061 - DNA, 25 bp, Homo sapien
cagtgtacaaggcagctctcaccgc

SEQ ID NO: 1012062 - DNA, 25 bp, Homo sapien
agtgagacccgttttacatgtacat

SEQ ID NO: 1012063 - DNA, 25 bp, Homo sapien
cggttagggtcagttacctggagca

SEQ ID NO: 1012064 - DNA, 25 bp, Homo sapien
tacatgcaaatgaaggcggtcacag

SEQ ID NO: 1012065 - DNA, 25 bp, Homo sapien
acccttgcaggcagtaacggttagg

SEQ ID NO: 1012066 - DNA, 25 bp, Homo sapien
gatcaccagtgtcacgctcctggag

SEQ ID NO: 1012067 - DNA, 25 bp, Homo sapien
gatgtatgcgatcaccagtgtcacg

SEQ ID NO: 1012068 - DNA, 25 bp, Homo sapien
tgcgatcaccagtgtcacgctcctg

SEQ ID NO: 1012069 - DNA, 25 bp, Homo sapien
agtgtcacgctcctggagaccccgg

SEQ ID NO: 1012070 - DNA, 25 bp, Homo sapien
ccagcacgcacggtgtgcagggcat

SEQ ID NO: 1012071 - DNA, 25 bp, Homo sapien
gatctcccagcacgcacggtgtgca

SEQ ID NO: 1012072 - DNA, 25 bp, Homo sapien
gcacgcacggtgtgcagggcatcct

SEQ ID NO: 1012073 - DNA, 25 bp, Homo sapien
tctcccagcacgcacggtgtgcagg

SEQ ID NO: 1012074 - DNA, 25 bp, Homo sapien
cctgtgacttcaccacagagatggt

SEQ ID NO: 1012075 - DNA, 25 bp, Homo sapien
catccacgtgggcttgcacctgtga

SEQ ID NO: 1012076 - DNA, 25 bp, Homo sapien
tgacttcaccacagagatggtgcca

SEQ ID NO: 1012077 - DNA, 25 bp, Homo sapien
aaacccgaaacgtcacacacatgtg

SEQ ID NO: 1012078 - DNA, 25 bp, Homo sapien
ttctgcatcctgcaaagggctctct

SEQ ID NO: 1012079 - DNA, 25 bp, Homo sapien
gagccagtgccggaaaactgctcca

SEQ ID NO: 1012080 - DNA, 25 bp, Homo sapien
taattatcgtaggtcagcggagcca

SEQ ID NO: 1012081 - DNA, 25 bp, Homo sapien
ttaggtctccgtcgtataattatcg

SEQ ID NO: 1012082 - DNA, 25 bp, Homo sapien
gctctgtgcgcccttgctccttata

SEQ ID NO: 1012083 - DNA, 25 bp, Homo sapien
gagttctcacggtctgctcagaggc

SEQ ID NO: 1012084 - DNA, 25 bp, Homo sapien
aagtagaactcagggctcgatgggc

SEQ ID NO: 1012085 - DNA, 25 bp, Homo sapien
gggcagtctctcacgttttccaggg

SEQ ID NO: 1012086 - DNA, 25 bp, Homo sapien
gagttggtataaagtgctggcccac

SEQ ID NO: 1012087 - DNA, 25 bp, Homo sapien
ctctcgtggcctgaatgtggaattt

SEQ ID NO: 1012088 - DNA, 25 bp, Homo sapien
tctcgtggcctgaatgtggaatttt

SEQ ID NO: 1012089 - DNA, 25 bp, Homo sapien
tggaattttacccaccagaaagcat

SEQ ID NO: 1012090 - DNA, 25 bp, Homo sapien
gtggaattttacccaccagaaagca

SEQ ID NO: 1012091 - DNA, 25 bp, Homo sapien
tgaattgcgtacagcgtcccaggat

SEQ ID NO: 1012092 - DNA, 25 bp, Homo sapien
cactgaattgcgtacagcgtcccag

SEQ ID NO: 1012093 - DNA, 25 bp, Homo sapien
ttgcgtacagcgtcccaggatgcct

SEQ ID NO: 1012094 - DNA, 25 bp, Homo sapien
cgtacagcgtcccaggatgcctgca

SEQ ID NO: 1012095 - DNA, 25 bp, Homo sapien
tagacggatggatgattctacagcc

SEQ ID NO: 1012096 - DNA, 25 bp, Homo sapien
tcgagtgactctgcatgcttaagga

SEQ ID NO: 1012097 - DNA, 25 bp, Homo sapien
tgcacctgcgcggaatcaggcaact

SEQ ID NO: 1012098 - DNA, 25 bp, Homo sapien
gacacaccctctatatgcacaggaa

SEQ ID NO: 1012099 - DNA, 25 bp, Homo sapien
ttaagcattcaagctatatcctaaa

SEQ ID NO: 1012100 - DNA, 25 bp, Homo sapien
tgagaggtttgtaaaggtgcacata

SEQ ID NO: 1012101 - DNA, 25 bp, Homo sapien
aaaacaacatttcaagaactccaag

SEQ ID NO: 1012102 - DNA, 25 bp, Homo sapien
agaactccaagaatacactgagagg

SEQ ID NO: 1012103 - DNA, 25 bp, Homo sapien
gagaaaggcccagaacttcagaatt

SEQ ID NO: 1012104 - DNA, 25 bp, Homo sapien
tgagaaaggcccagaacttcagaat

SEQ ID NO: 1012105 - DNA, 25 bp, Homo sapien
gttcacaggaagcaatcacgagcgc

SEQ ID NO: 1012106 - DNA, 25 bp, Homo sapien
gatccttacaggcatccaagcgagg

SEQ ID NO: 1012107 - DNA, 25 bp, Homo sapien
ggcagcaccagcctaaactctgtgg

SEQ ID NO: 1012108 - DNA, 25 bp, Homo sapien
tcgtccttgggaggcgttcacagga

SEQ ID NO: 1012109 - DNA, 25 bp, Homo sapien
agataaaacccacaccaagggctat

SEQ ID NO: 1012110 - DNA, 25 bp, Homo sapien
gggaatttgagaacacacgggcaga

SEQ ID NO: 1012111 - DNA, 25 bp, Homo sapien
cacaccaagggctatttcccaagct

SEQ ID NO: 1012112 - DNA, 25 bp, Homo sapien
caccacggagaacacaaaccagaga

SEQ ID NO: 1012113 - DNA, 25 bp, Homo sapien
taacgaaaacatagagctttcggtc

SEQ ID NO: 1012114 - DNA, 25 bp, Homo sapien
ctttattaacgaaaacatagagctt

SEQ ID NO: 1012115 - DNA, 25 bp, Homo sapien
acgaaaacatagagctttcggtcaa

SEQ ID NO: 1012116 - DNA, 25 bp, Homo sapien
tgccctttattaacgaaaacataga

SEQ ID NO: 1012117 - DNA, 25 bp, Homo sapien
tttatgactagaggctggtgtgcag

SEQ ID NO: 1012118 - DNA, 25 bp, Homo sapien
gtgcgatgagggcttggccattcct

SEQ ID NO: 1012119 - DNA, 25 bp, Homo sapien
ggccattcctcggagtgctttcagg

SEQ ID NO: 1012120 - DNA, 25 bp, Homo sapien
gagacatctgatgtgggatcacagg

SEQ ID NO: 1012121 - DNA, 25 bp, Homo sapien
cagatgttcaaacatgcactggcaa

SEQ ID NO: 1012122 - DNA, 25 bp, Homo sapien
cactaattgtgatactgcaagtctc

SEQ ID NO: 1012123 - DNA, 25 bp, Homo sapien
gaaagaaacacatgcagacccagca

SEQ ID NO: 1012124 - DNA, 25 bp, Homo sapien
gcactcgcacccttcagtcagatgg

SEQ ID NO: 1012125 - DNA, 25 bp, Homo sapien
gccagtctggttgctctgacaccca

SEQ ID NO: 1012126 - DNA, 25 bp, Homo sapien
catgggcaggaatgcttccgaagca

SEQ ID NO: 1012127 - DNA, 25 bp, Homo sapien
gccactctgaacacatagggtgctt

SEQ ID NO: 1012128 - DNA, 25 bp, Homo sapien
cagggtccaggtcctaatgggctca

SEQ ID NO: 1012129 - DNA, 25 bp, Homo sapien
acacagatgaccttccctgggaggg

SEQ ID NO: 1012130 - DNA, 25 bp, Homo sapien
gggtctcttacgaggacacagttca

SEQ ID NO: 1012131 - DNA, 25 bp, Homo sapien
acagttcatagcagatgctcccacg

SEQ ID NO: 1012132 - DNA, 25 bp, Homo sapien
atagcagatgctcccacgcccataa

SEQ ID NO: 1012133 - DNA, 25 bp, Homo sapien
tctccccaggataggtcctcagcgt

SEQ ID NO: 1012134 - DNA, 25 bp, Homo sapien
agaggtccctgaggcgtccagtcca

SEQ ID NO: 1012135 - DNA, 25 bp, Homo sapien
tcttgccttctagtctctggtctcc

SEQ ID NO: 1012136 - DNA, 25 bp, Homo sapien
caggcctaaatcaagccccagggcc

SEQ ID NO: 1012137 - DNA, 25 bp, Homo sapien
tcttggcacagaaagagggcgtgct

SEQ ID NO: 1012138 - DNA, 25 bp, Homo sapien
gatcatatcgctcaacagaggtgca

SEQ ID NO: 1012139 - DNA, 25 bp, Homo sapien
gaccgagctgtagttggaggaccca

SEQ ID NO: 1012140 - DNA, 25 bp, Homo sapien
taaaaaagggacatgcacgtggcga

SEQ ID NO: 1012141 - DNA, 25 bp, Homo sapien
gtctcttagcgggagggatacccac

SEQ ID NO: 1012142 - DNA, 25 bp, Homo sapien
tctatcggcctcctgtgagacgcag

SEQ ID NO: 1012143 - DNA, 25 bp, Homo sapien
tccagagtcctcaacaatcaccagt

SEQ ID NO: 1012144 - DNA, 25 bp, Homo sapien
gagaaacagggaagcttccgcctct

SEQ ID NO: 1012145 - DNA, 25 bp, Homo sapien
tttaaacgggtggttgtcacagcca

SEQ ID NO: 1012146 - DNA, 25 bp, Homo sapien
ggtggttgtcacagccactttttaa

SEQ ID NO: 1012147 - DNA, 25 bp, Homo sapien
taaacgggtggttgtcacagccact

SEQ ID NO: 1012148 - DNA, 25 bp, Homo sapien
aacgggtggttgtcacagccacttt

SEQ ID NO: 1012149 - DNA, 25 bp, Homo sapien
gaagctggtagacgtcgaagagggc

SEQ ID NO: 1012150 - DNA, 25 bp, Homo sapien
aggaggacgcccaccattccactga

SEQ ID NO: 1012151 - DNA, 25 bp, Homo sapien
tggtgtgccgagtcagttcagtctg

SEQ ID NO: 1012152 - DNA, 25 bp, Homo sapien
gaagctggtagacgtcgaagagggt

SEQ ID NO: 1012153 - DNA, 25 bp, Homo sapien
gaggtttacatcgagcaccacttgg

SEQ ID NO: 1012154 - DNA, 25 bp, Homo sapien
catgggatcttagcctgcgtcagcc

SEQ ID NO: 1012155 - DNA, 25 bp, Homo sapien
tagcatgcagcactctcaaagggaa

SEQ ID NO: 1012156 - DNA, 25 bp, Homo sapien
tcctctcgtggacagtgcatactac

SEQ ID NO: 1012157 - DNA, 25 bp, Homo sapien
ccccggagtgcgtcccatggcctcc

SEQ ID NO: 1012158 - DNA, 25 bp, Homo sapien
catatatttctggtgctgttattct

SEQ ID NO: 1012159 - DNA, 25 bp, Homo sapien
agtgcgtcccatggcctccccatgt

SEQ ID NO: 1012160 - DNA, 25 bp, Homo sapien
atatttctggtgctgttattcttgg

SEQ ID NO: 1012161 - DNA, 25 bp, Homo sapien
tcaataagcgtggaatggattcgca

SEQ ID NO: 1012162 - DNA, 25 bp, Homo sapien
gatgtcacttttccctggctgcgca

SEQ ID NO: 1012163 - DNA, 25 bp, Homo sapien
tcactgtttttagggctgatgtcac

SEQ ID NO: 1012164 - DNA, 25 bp, Homo sapien
tggattcgcagtccagtcactcggc

SEQ ID NO: 1012165 - DNA, 25 bp, Homo sapien
tgcagtccgctcccttcacatccca

SEQ ID NO: 1012166 - DNA, 25 bp, Homo sapien
gggagggcttccatgggccctcaca

SEQ ID NO: 1012167 - DNA, 25 bp, Homo sapien
ctgcagtccgctcccttcacatccc

SEQ ID NO: 1012168 - DNA, 25 bp, Homo sapien
tgggccctcacagggcagcaagcca

SEQ ID NO: 1012169 - DNA, 25 bp, Homo sapien
tccaggccgggaatcgatccatgaa

SEQ ID NO: 1012170 - DNA, 25 bp, Homo sapien
tggttgcagtgtccacccatggctc

SEQ ID NO: 1012171 - DNA, 25 bp, Homo sapien
ttctggccccataagatgtctgagg

SEQ ID NO: 1012172 - DNA, 25 bp, Homo sapien
gggccaccgaatagcaacgtgagaa

SEQ ID NO: 1012173 - DNA, 25 bp, Homo sapien
cagactgcttatgacccgctgggta

SEQ ID NO: 1012174 - DNA, 25 bp, Homo sapien
cgctgggtatctaactgaactcctc

SEQ ID NO: 1012175 - DNA, 25 bp, Homo sapien
cttcaagtcgcctccccagtgtggg

SEQ ID NO: 1012176 - DNA, 25 bp, Homo sapien
gctttgggggtgttccgcacacaca

SEQ ID NO: 1012177 - DNA, 25 bp, Homo sapien
cctggcaaaaatccaatggcctcat

SEQ ID NO: 1012178 - DNA, 25 bp, Homo sapien
tcctggcaaaaatccaatggcctca

SEQ ID NO: 1012179 - DNA, 25 bp, Homo sapien
tttcctggcaaaaatccaatggcct

SEQ ID NO: 1012180 - DNA, 25 bp, Homo sapien
ttcctggcaaaaatccaatggcctc

SEQ ID NO: 1012181 - DNA, 25 bp, Homo sapien
cttttaccaaaaccaccagtgacat

SEQ ID NO: 1012182 - DNA, 25 bp, Homo sapien
tgttgggcagacgcacgtggggagc

SEQ ID NO: 1012183 - DNA, 25 bp, Homo sapien
ttgggcagacgcacgtggggagcgg

SEQ ID NO: 1012184 - DNA, 25 bp, Homo sapien
ctgttgggcagacgcacgtggggag

SEQ ID NO: 1012185 - DNA, 25 bp, Homo sapien
gttgggcagacgcacgtggggagcg

SEQ ID NO: 1012186 - DNA, 25 bp, Homo sapien
agcgaggtaacttcctgtccaggct

SEQ ID NO: 1012187 - DNA, 25 bp, Homo sapien
ggctctggaagtgccgcaggtgtcc

SEQ ID NO: 1012188 - DNA, 25 bp, Homo sapien
ttcctgtccaggctgccgggctctg

SEQ ID NO: 1012189 - DNA, 25 bp, Homo sapien
gaacagcgaggtaacttcctgtcca

SEQ ID NO: 1012190 - DNA, 25 bp, Homo sapien
cctctgaccgtagcgctgatcactt

SEQ ID NO: 1012191 - DNA, 25 bp, Homo sapien
tgaccgtagcgctgatcacttccct

SEQ ID NO: 1012192 - DNA, 25 bp, Homo sapien
tttcctctgaccgtagcgctgatca

SEQ ID NO: 1012193 - DNA, 25 bp, Homo sapien
tagcgctgatcacttccctgcaggc

SEQ ID NO: 1012194 - DNA, 25 bp, Homo sapien
tgaggctcccattcaggaatgcagt

SEQ ID NO: 1012195 - DNA, 25 bp, Homo sapien
tttccactgggacaaggccttagag

SEQ ID NO: 1012196 - DNA, 25 bp, Homo sapien
tttcagaagcgtgagcagctaccca

SEQ ID NO: 1012197 - DNA, 25 bp, Homo sapien
caggccaagtgggagggcatttcca

SEQ ID NO: 1012198 - DNA, 25 bp, Homo sapien
ttctgacgcagtgtgcgagcgagct

SEQ ID NO: 1012199 - DNA, 25 bp, Homo sapien
cttggctcgtactgaggacaagcac

SEQ ID NO: 1012200 - DNA, 25 bp, Homo sapien
tgtgaaggtttctgacgcagtgtgc

SEQ ID NO: 1012201 - DNA, 25 bp, Homo sapien
gacaagcactatgtgaaggtttctg

SEQ ID NO: 1012202 - DNA, 25 bp, Homo sapien
actggtcacggtgcccttcctggtc

SEQ ID NO: 1012203 - DNA, 25 bp, Homo sapien
tttgaactggtcacggtgcccttcc

SEQ ID NO: 1012204 - DNA, 25 bp, Homo sapien
ctggtccaggggtgctgcacctcca

SEQ ID NO: 1012205 - DNA, 25 bp, Homo sapien
gctttgaactggtcacggtgccctt

SEQ ID NO: 1012206 - DNA, 25 bp, Homo sapien
tcccaagatcgagcggtgaaactga

SEQ ID NO: 1012207 - DNA, 25 bp, Homo sapien
aagatcgagcggtgaaactgagagt

SEQ ID NO: 1012208 - DNA, 25 bp, Homo sapien
tgggtcccaagatcgagcggtgaaa

SEQ ID NO: 1012209 - DNA, 25 bp, Homo sapien
ggcagcggtgggtcccaagatcgag

SEQ ID NO: 1012210 - DNA, 25 bp, Homo sapien
gcgtgccgtgtcagggtcgtccggg

SEQ ID NO: 1012211 - DNA, 25 bp, Homo sapien
ccggaagaaggcaccttcgcggccg

SEQ ID NO: 1012212 - DNA, 25 bp, Homo sapien
gccagtgaccacgaggccccggagt

SEQ ID NO: 1012213 - DNA, 25 bp, Homo sapien
cccggagtctttgaggctgcgaagc

SEQ ID NO: 1012214 - DNA, 25 bp, Homo sapien
gccccgcgtgccgtccgcgcccgcg

SEQ ID NO: 1012215 - DNA, 25 bp, Homo sapien
cgcccggggtcctccgcccgctctg

SEQ ID NO: 1012216 - DNA, 25 bp, Homo sapien
ggtcctccgcccgctctgctctgca

SEQ ID NO: 1012217 - DNA, 25 bp, Homo sapien
ggggtcctccgcccgctctgctctg

SEQ ID NO: 1012218 - DNA, 25 bp, Homo sapien
atgccgaactctccgcctcggccgc

SEQ ID NO: 1012219 - DNA, 25 bp, Homo sapien
catgccgaactctccgcctcggccg

SEQ ID NO: 1012220 - DNA, 25 bp, Homo sapien
agcccggggtacttgccgctgtcga

SEQ ID NO: 1012221 - DNA, 25 bp, Homo sapien
ccgctgtcgatctggtcgatcagcc

SEQ ID NO: 1012222 - DNA, 25 bp, Homo sapien
tacttgccgctgtcgatctggtcga

SEQ ID NO: 1012223 - DNA, 25 bp, Homo sapien
gggtacttgccgctgtcgatctggt

SEQ ID NO: 1012224 - DNA, 25 bp, Homo sapien
tgcttgcccgcgtgcttccagggga

SEQ ID NO: 1012225 - DNA, 25 bp, Homo sapien
cttgaagagcgcggcgtcctcctcg

SEQ ID NO: 1012226 - DNA, 25 bp, Homo sapien
gtcctcctcgcggttgtagtcctgc

SEQ ID NO: 1012227 - DNA, 25 bp, Homo sapien
tcgcggttgtagtcctgcttgcccg

SEQ ID NO: 1012228 - DNA, 25 bp, Homo sapien
gagggtccggcttgtcgatgccttc

SEQ ID NO: 1012229 - DNA, 25 bp, Homo sapien
ccctcaggaacaatcctgtacactt

SEQ ID NO: 1012230 - DNA, 25 bp, Homo sapien
caccgcaggcgcgtcttccaggtgg

SEQ ID NO: 1012231 - DNA, 25 bp, Homo sapien
gctcttgttcaaagcgcaccgcagg

SEQ ID NO: 1012232 - DNA, 25 bp, Homo sapien
tgggctgggagcgaagggtaaggcg

SEQ ID NO: 1012233 - DNA, 25 bp, Homo sapien
gagcgaagggtaaggcgttgtcatg

SEQ ID NO: 1012234 - DNA, 25 bp, Homo sapien
gtaggggtggctcatggacatctgc

SEQ ID NO: 1012235 - DNA, 25 bp, Homo sapien
ggtaaggcgttgtcatggtgtaggg

SEQ ID NO: 1012236 - DNA, 25 bp, Homo sapien
tgttggagcagccatagcaaatggc

SEQ ID NO: 1012237 - DNA, 25 bp, Homo sapien
gctgttggagcagccatagcaaatg

SEQ ID NO: 1012238 - DNA, 25 bp, Homo sapien
tctgggctgttggagcagccatagc

SEQ ID NO: 1012239 - DNA, 25 bp, Homo sapien
ttttctgggctgttggagcagccat

SEQ ID NO: 1012240 - DNA, 25 bp, Homo sapien
tggaaagtgagacattcgttcagtg

SEQ ID NO: 1012241 - DNA, 25 bp, Homo sapien
gaaagtgagacattcgttcagtgac

SEQ ID NO: 1012242 - DNA, 25 bp, Homo sapien
cgtgtggaaagtgagacattcgttc

SEQ ID NO: 1012243 - DNA, 25 bp, Homo sapien
tgtggaaagtgagacattcgttcag

SEQ ID NO: 1012244 - DNA, 25 bp, Homo sapien
agcctgaagagatcagctgccctgt

SEQ ID NO: 1012245 - DNA, 25 bp, Homo sapien
cacatgataaggcactacttccaaa

SEQ ID NO: 1012246 - DNA, 25 bp, Homo sapien
gtttcacatgataaggcactacttc

SEQ ID NO: 1012247 - DNA, 25 bp, Homo sapien
gaaagcctgaagagatcagctgccc

SEQ ID NO: 1012248 - DNA, 25 bp, Homo sapien
gataagaagcactggcatcgagacg

SEQ ID NO: 1012249 - DNA, 25 bp, Homo sapien
ggtaaaggagtgcaggagaggctga

SEQ ID NO: 1012250 - DNA, 25 bp, Homo sapien
gagataagaagcactggcatcgaga

SEQ ID NO: 1012251 - DNA, 25 bp, Homo sapien
gcactggcattgagacgggggtaaa

SEQ ID NO: 1012252 - DNA, 25 bp, Homo sapien
taaaggagtgcaggagaggctgaga

SEQ ID NO: 1012253 - DNA, 25 bp, Homo sapien
gagataagaagcactggcattgaga

SEQ ID NO: 1012254 - DNA, 25 bp, Homo sapien
aggagaggctgagataagaagcact

SEQ ID NO: 1012255 - DNA, 25 bp, Homo sapien
ataagaagcactggcattgagacgg

SEQ ID NO: 1012256 - DNA, 25 bp, Homo sapien
gggtccaaacgtcatgggacattgg

SEQ ID NO: 1012257 - DNA, 25 bp, Homo sapien
gatccgggacgtagtccctccagct

SEQ ID NO: 1012258 - DNA, 25 bp, Homo sapien
catgggacattggtacgggatttcc

SEQ ID NO: 1012259 - DNA, 25 bp, Homo sapien
cgggatttccgggtgtggctgatcc

SEQ ID NO: 1012260 - DNA, 25 bp, Homo sapien
catcccacaggagtgagaaaacccc

SEQ ID NO: 1012261 - DNA, 25 bp, Homo sapien
taagatcccacgaagggcagtgcct

SEQ ID NO: 1012262 - DNA, 25 bp, Homo sapien
cctagcatggatcctgagagtaaac

SEQ ID NO: 1012263 - DNA, 25 bp, Homo sapien
ggacagaccaggattcgccatggcc

SEQ ID NO: 1012264 - DNA, 25 bp, Homo sapien
ggtggggcacaagcataaaaggttc

SEQ ID NO: 1012265 - DNA, 25 bp, Homo sapien
tgagaacgccaaggcttcggcagac

SEQ ID NO: 1012266 - DNA, 25 bp, Homo sapien
gcagaccttatgcttggctctgtgg

SEQ ID NO: 1012267 - DNA, 25 bp, Homo sapien
gggactccgggagcctgggactcag

SEQ ID NO: 1012268 - DNA, 25 bp, Homo sapien
gagaggtgccagtgaagaagccaaa

SEQ ID NO: 1012269 - DNA, 25 bp, Homo sapien
ggacttatttgtggctcaacctgga

SEQ ID NO: 1012270 - DNA, 25 bp, Homo sapien
gaccagaactaatgtccccagggag

SEQ ID NO: 1012271 - DNA, 25 bp, Homo sapien
tgaaacggtcagcagaaccacaagc

SEQ ID NO: 1012272 - DNA, 25 bp, Homo sapien
tatgtccatgggagatccggcagcc

SEQ ID NO: 1012273 - DNA, 25 bp, Homo sapien
gttgctggcgtcatacgtatgtcca

SEQ ID NO: 1012274 - DNA, 25 bp, Homo sapien
tcccggtagtacaggcagatgtgca

SEQ ID NO: 1012275 - DNA, 25 bp, Homo sapien
gtcttttcgcatagagcccgtcggg

SEQ ID NO: 1012276 - DNA, 25 bp, Homo sapien
ggaccatctgatccggactctctgc

SEQ ID NO: 1012277 - DNA, 25 bp, Homo sapien
cattctaacagataacgaggtgcct

SEQ ID NO: 1012278 - DNA, 25 bp, Homo sapien
gaactgttttaagaggcgactgctg

SEQ ID NO: 1012279 - DNA, 25 bp, Homo sapien
gagccgccacatcagcagacgtatt

SEQ ID NO: 1012280 - DNA, 25 bp, Homo sapien
acaatatgcttccaacctttatgat

SEQ ID NO: 1012281 - DNA, 25 bp, Homo sapien
aatatgcttccaacctttatgattt

SEQ ID NO: 1012282 - DNA, 25 bp, Homo sapien
aacaatatgcttccaacctttatga

SEQ ID NO: 1012283 - DNA, 25 bp, Homo sapien
caatatgcttccaacctttatgatt

SEQ ID NO: 1012284 - DNA, 25 bp, Homo sapien
tgtgcaaaaccagtacagtccactc

SEQ ID NO: 1012285 - DNA, 25 bp, Homo sapien
tagaaatgttcatatcacagagcca

SEQ ID NO: 1012286 - DNA, 25 bp, Homo sapien
gccagcatctgcatgagggtgacac

SEQ ID NO: 1012287 - DNA, 25 bp, Homo sapien
ccagaggttcgctgaattgtcatga

SEQ ID NO: 1012288 - DNA, 25 bp, Homo sapien
ggcccagtgggccttagccttcctg

SEQ ID NO: 1012289 - DNA, 25 bp, Homo sapien
tgtggtatcttctgaatccactggc

SEQ ID NO: 1012290 - DNA, 25 bp, Homo sapien
atgtgagctcttccagatcccaagg

SEQ ID NO: 1012291 - DNA, 25 bp, Homo sapien
gagtcttcagaaatccaggcccagt

SEQ ID NO: 1012292 - DNA, 25 bp, Homo sapien
tccttatcagatacacaccctcggg

SEQ ID NO: 1012293 - DNA, 25 bp, Homo sapien
cagaacagacgcgtccttatcagat

SEQ ID NO: 1012294 - DNA, 25 bp, Homo sapien
cagacgcgtccttatcagatacaca

SEQ ID NO: 1012295 - DNA, 25 bp, Homo sapien
ctgcagaacagacgcgtccttatca

SEQ ID NO: 1012296 - DNA, 25 bp, Homo sapien
aaactcctctccaaagcatagagtc

SEQ ID NO: 1012297 - DNA, 25 bp, Homo sapien
aagcatagagtcacctggaatcttg

SEQ ID NO: 1012298 - DNA, 25 bp, Homo sapien
ccgtggtgagcaaacgcttgcagct

SEQ ID NO: 1012299 - DNA, 25 bp, Homo sapien
cagggagcggccgtggtgagcaaac

SEQ ID NO: 1012300 - DNA, 25 bp, Homo sapien
taaaagaggtgctaggacacagctg

SEQ ID NO: 1012301 - DNA, 25 bp, Homo sapien
tgctcagcatgcaagcccgttaata

SEQ ID NO: 1012302 - DNA, 25 bp, Homo sapien
tgctagagaacattacgagagggtc

SEQ ID NO: 1012303 - DNA, 25 bp, Homo sapien
tacaaaatgcctccagggaatggat

SEQ ID NO: 1012304 - DNA, 25 bp, Homo sapien
tcaatcatgatattagagactgtat

SEQ ID NO: 1012305 - DNA, 25 bp, Homo sapien
caaaaacgccttaatgttcagcttt

SEQ ID NO: 1012306 - DNA, 25 bp, Homo sapien
ctctccatcaatcatgatattagag

SEQ ID NO: 1012307 - DNA, 25 bp, Homo sapien
tgaatttacagcatctaaggcaagc

SEQ ID NO: 1012308 - DNA, 25 bp, Homo sapien
aataatatagttgtctggctagcag

SEQ ID NO: 1012309 - DNA, 25 bp, Homo sapien
gttctggtaaatcgtagcccctcag

SEQ ID NO: 1012310 - DNA, 25 bp, Homo sapien
aatggcggatagatctgtggtaatc

SEQ ID NO: 1012311 - DNA, 25 bp, Homo sapien
cttctggattgctgatgtgttctgg

SEQ ID NO: 1012312 - DNA, 25 bp, Homo sapien
taatgaaatgtcaaaccctactggg

SEQ ID NO: 1012313 - DNA, 25 bp, Homo sapien
cctgtagtatgagaaacggcctgga

SEQ ID NO: 1012314 - DNA, 25 bp, Homo sapien
aaaatgtcccatccaagagtagcgc

SEQ ID NO: 1012315 - DNA, 25 bp, Homo sapien
caaagccaagaggtgcgagtaccca

SEQ ID NO: 1012316 - DNA, 25 bp, Homo sapien
cattcagacagatgcagctggccac

SEQ ID NO: 1012317 - DNA, 25 bp, Homo sapien
cgggagatacgtaatacaaataaag

SEQ ID NO: 1012318 - DNA, 25 bp, Homo sapien
agaggacttcgggagatacgtaata

SEQ ID NO: 1012319 - DNA, 25 bp, Homo sapien
ttcagacagatgcagctggccacag

SEQ ID NO: 1012320 - DNA, 25 bp, Homo sapien
gaccccattgcctgttaagtcccat

SEQ ID NO: 1012321 - DNA, 25 bp, Homo sapien
tctgtctcagtttgaagcaacacgg

SEQ ID NO: 1012322 - DNA, 25 bp, Homo sapien
catcgagatcagtctcaaaaacggg

SEQ ID NO: 1012323 - DNA, 25 bp, Homo sapien
caaggagatccacctgcatcgagat

SEQ ID NO: 1012324 - DNA, 25 bp, Homo sapien
ctgctggcagttctttcagcagaaa

SEQ ID NO: 1012325 - DNA, 25 bp, Homo sapien
agcagaaagtggggtacgggggatg

SEQ ID NO: 1012326 - DNA, 25 bp, Homo sapien
tgctggcagttctttcagcagaaag

SEQ ID NO: 1012327 - DNA, 25 bp, Homo sapien
ctttcagcagaaagtggggtacggg

SEQ ID NO: 1012328 - DNA, 25 bp, Homo sapien
ctcagcaaaacgcagagccagtagg

SEQ ID NO: 1012329 - DNA, 25 bp, Homo sapien
tctacctcagtttgtgaagcatcct

SEQ ID NO: 1012330 - DNA, 25 bp, Homo sapien
aatttgctttgcagagcaatttaca

SEQ ID NO: 1012331 - DNA, 25 bp, Homo sapien
taccaacgacagcatagcattatct

SEQ ID NO: 1012332 - DNA, 25 bp, Homo sapien
gccagcgtttgtctctttaacaagg

SEQ ID NO: 1012333 - DNA, 25 bp, Homo sapien
gatttcagagacacgtacagcagcc

SEQ ID NO: 1012334 - DNA, 25 bp, Homo sapien
ggcacttggccagcgtttgtctctt

SEQ ID NO: 1012335 - DNA, 25 bp, Homo sapien
ttactcttcacagacactcctctgt

SEQ ID NO: 1012336 - DNA, 25 bp, Homo sapien
ctctatgtaaccttcagctgcaagg

SEQ ID NO: 1012337 - DNA, 25 bp, Homo sapien
tctgacagctctatgtaaccttcag

SEQ ID NO: 1012338 - DNA, 25 bp, Homo sapien
gctgcaaggattttagcaccagcag

SEQ ID NO: 1012339 - DNA, 25 bp, Homo sapien
tcagctgcaaggattttagcaccag

SEQ ID NO: 1012340 - DNA, 25 bp, Homo sapien
tcctcttctggctgtggtcactggt

SEQ ID NO: 1012341 - DNA, 25 bp, Homo sapien
ttctggctgtggtcactggtgaggg

SEQ ID NO: 1012342 - DNA, 25 bp, Homo sapien
tcttctggctgtggtcactggtgag

SEQ ID NO: 1012343 - DNA, 25 bp, Homo sapien
cctcttctggctgtggtcactggtg

SEQ ID NO: 1012344 - DNA, 25 bp, Homo sapien
ttctccattggttcggactggcggg

SEQ ID NO: 1012345 - DNA, 25 bp, Homo sapien
tcccctggccggaagttgtgctttc

SEQ ID NO: 1012346 - DNA, 25 bp, Homo sapien
agccgaggcctagcgccgcatggtt

SEQ ID NO: 1012347 - DNA, 25 bp, Homo sapien
ttcccatcgcgaagcagttctccat

SEQ ID NO: 1012348 - DNA, 25 bp, Homo sapien
gagggacaggtccaccaggcgggca

SEQ ID NO: 1012349 - DNA, 25 bp, Homo sapien
ggagggacaggtccaccaggcgggc

SEQ ID NO: 1012350 - DNA, 25 bp, Homo sapien
gctgtttggatccacatcagcgacc

SEQ ID NO: 1012351 - DNA, 25 bp, Homo sapien
agcaccccccactgaagagactcct

SEQ ID NO: 1012352 - DNA, 25 bp, Homo sapien
tgcagtccacattcccagtgacacc

SEQ ID NO: 1012353 - DNA, 25 bp, Homo sapien
agagactcctctgtgtggctgtttg

SEQ ID NO: 1012354 - DNA, 25 bp, Homo sapien
cattaaacacaattgaggcacattc

SEQ ID NO: 1012355 - DNA, 25 bp, Homo sapien
gacagagacttgaggaactacccca

SEQ ID NO: 1012356 - DNA, 25 bp, Homo sapien
gatctgtaaattagctcacaatagt

SEQ ID NO: 1012357 - DNA, 25 bp, Homo sapien
ccagaaaaaggacgtcagtgagcca

SEQ ID NO: 1012358 - DNA, 25 bp, Homo sapien
gtcaccgggacttctctcagagtca

SEQ ID NO: 1012359 - DNA, 25 bp, Homo sapien
tcataccgtcgcatctgaaaatttt

SEQ ID NO: 1012360 - DNA, 25 bp, Homo sapien
gactggcttcactggaataggttca

SEQ ID NO: 1012361 - DNA, 25 bp, Homo sapien
tagtcggcttgtcagggttttcaag

SEQ ID NO: 1012362 - DNA, 25 bp, Homo sapien
tcaccaggcaatgggagctgtagac

SEQ ID NO: 1012363 - DNA, 25 bp, Homo sapien
ctctgaaacttcaggatgctccttg

SEQ ID NO: 1012364 - DNA, 25 bp, Homo sapien
tgctgaaggatcttgctcagtagct

SEQ ID NO: 1012365 - DNA, 25 bp, Homo sapien
cttggtcaccaggcaatgggagctg

SEQ ID NO: 1012366 - DNA, 25 bp, Homo sapien
tgtgttatctgtgatggagtgtgaa

SEQ ID NO: 1012367 - DNA, 25 bp, Homo sapien
tgtgaatgtgtaacgggcactgtgt

SEQ ID NO: 1012368 - DNA, 25 bp, Homo sapien
tgtgttacactctgaggtgttggcg

SEQ ID NO: 1012369 - DNA, 25 bp, Homo sapien
tcttaatttgtcgtgcgtcactaca

SEQ ID NO: 1012370 - DNA, 25 bp, Homo sapien
gatttggaaagctatgtagacatct

SEQ ID NO: 1012371 - DNA, 25 bp, Homo sapien
ttggaaagctatgtagacatctttg

SEQ ID NO: 1012372 - DNA, 25 bp, Homo sapien
atttggaaagctatgtagacatctt

SEQ ID NO: 1012373 - DNA, 25 bp, Homo sapien
tttggaaagctatgtagacatcttt

SEQ ID NO: 1012374 - DNA, 25 bp, Homo sapien
gctcccacgacacacggagagactg

SEQ ID NO: 1012375 - DNA, 25 bp, Homo sapien
gagttttctggaatggcgtggcaca

SEQ ID NO: 1012376 - DNA, 25 bp, Homo sapien
catttctcagtgtcccgttcacgga

SEQ ID NO: 1012377 - DNA, 25 bp, Homo sapien
ggaagcgcaggcagctcccacgaca

SEQ ID NO: 1012378 - DNA, 25 bp, Homo sapien
catttcaaccaaaatgacctcattt

SEQ ID NO: 1012379 - DNA, 25 bp, Homo sapien
ttcttactagatcagatcctgtatg

SEQ ID NO: 1012380 - DNA, 25 bp, Homo sapien
tgcccaggaagtatttgttttgcca

SEQ ID NO: 1012381 - DNA, 25 bp, Homo sapien
gatcagatcctgtatgactttaaaa

SEQ ID NO: 1012382 - DNA, 25 bp, Homo sapien
aaaattagatgacttgggccgggcg

SEQ ID NO: 1012383 - DNA, 25 bp, Homo sapien
aaccgtgaaataatctcttgacctc

SEQ ID NO: 1012384 - DNA, 25 bp, Homo sapien
acccagttcttggttgctgcatcca

SEQ ID NO: 1012385 - DNA, 25 bp, Homo sapien
ttgacctcagtactgttaaacccag

SEQ ID NO: 1012386 - DNA, 25 bp, Homo sapien
gaaatgctggcaccgtgaatgcagt

SEQ ID NO: 1012387 - DNA, 25 bp, Homo sapien
tgtcacatggcatcgacgcacagag

SEQ ID NO: 1012388 - DNA, 25 bp, Homo sapien
gccgggcccatagacaggcacatgt

SEQ ID NO: 1012389 - DNA, 25 bp, Homo sapien
aaatttcataaatgcccaggctccc

SEQ ID NO: 1012390 - DNA, 25 bp, Homo sapien
gcattcactcgtgtagccacaggga

SEQ ID NO: 1012391 - DNA, 25 bp, Homo sapien
gctccacggtaatgactgcagtcaa

SEQ ID NO: 1012392 - DNA, 25 bp, Homo sapien
gcctggcattttgcaccatcttgcg

SEQ ID NO: 1012393 - DNA, 25 bp, Homo sapien
accatcttgcgtgccaggccatggc

SEQ ID NO: 1012394 - DNA, 25 bp, Homo sapien
tggacccccgctatattgagaatag

SEQ ID NO: 1012395 - DNA, 25 bp, Homo sapien
gctatattgagaataggagctatac

SEQ ID NO: 1012396 - DNA, 25 bp, Homo sapien
ggctatttcttcaattgcatatgga

SEQ ID NO: 1012397 - DNA, 25 bp, Homo sapien
gttttacggctatttcttcaattgc

SEQ ID NO: 1012398 - DNA, 25 bp, Homo sapien
tgcacgtaaaccgtgggtgaccacg

SEQ ID NO: 1012399 - DNA, 25 bp, Homo sapien
tgaccacgccgtgctcttggtacgg

SEQ ID NO: 1012400 - DNA, 25 bp, Homo sapien
cgtgtgcagccgcactgcacgtaaa

SEQ ID NO: 1012401 - DNA, 25 bp, Homo sapien
tgctgctcgtggacacgtgggccgt

SEQ ID NO: 1012402 - DNA, 25 bp, Homo sapien
cccaaagtcagttctacagctgggc

SEQ ID NO: 1012403 - DNA, 25 bp, Homo sapien
aaagtcagttctacagctgggcggg

SEQ ID NO: 1012404 - DNA, 25 bp, Homo sapien
caaagtcagttctacagctgggcgg

SEQ ID NO: 1012405 - DNA, 25 bp, Homo sapien
ccaaagtcagttctacagctgggcg

SEQ ID NO: 1012406 - DNA, 25 bp, Homo sapien
ttttcgtctccgagtgtggacggcg

SEQ ID NO: 1012407 - DNA, 25 bp, Homo sapien
tgcgtggtggttctcgtctccgagt

SEQ ID NO: 1012408 - DNA, 25 bp, Homo sapien
tggttctcgtctccgagtgtggacg

SEQ ID NO: 1012409 - DNA, 25 bp, Homo sapien
tttcgtctccgagtgtggacggcga

SEQ ID NO: 1012410 - DNA, 25 bp, Homo sapien
agtgttggtgctcggtgggtggtgg

SEQ ID NO: 1012411 - DNA, 25 bp, Homo sapien
ggtgagtgttggtgctcggtgggtg

SEQ ID NO: 1012412 - DNA, 25 bp, Homo sapien
gacggtgagtgttggtgctcggtgg

SEQ ID NO: 1012413 - DNA, 25 bp, Homo sapien
tcatctccgagtgtggacggtgagt

SEQ ID NO: 1012414 - DNA, 25 bp, Homo sapien
gatgacacctctacgtaattacagt

SEQ ID NO: 1012415 - DNA, 25 bp, Homo sapien
catgctgacctcttcacaagatgac

SEQ ID NO: 1012416 - DNA, 25 bp, Homo sapien
ggtagtcatgggacgaccagaggca

SEQ ID NO: 1012417 - DNA, 25 bp, Homo sapien
taattacagtcattgccgagtctgg

SEQ ID NO: 1012418 - DNA, 25 bp, Homo sapien
aagcactggagagccgtcaaaagcc

SEQ ID NO: 1012419 - DNA, 25 bp, Homo sapien
cttgcaccagccagatctgagggcc

SEQ ID NO: 1012420 - DNA, 25 bp, Homo sapien
gaggaaagcctctagtcattgcaag

SEQ ID NO: 1012421 - DNA, 25 bp, Homo sapien
gatgcagccaaagaaacactcgatg

SEQ ID NO: 1012422 - DNA, 25 bp, Homo sapien
ttgtagtttccattagagattttcc

SEQ ID NO: 1012423 - DNA, 25 bp, Homo sapien
tccgtcggccgtcaactcgagtgta

SEQ ID NO: 1012424 - DNA, 25 bp, Homo sapien
gctccgtcggccgtcaactcgagtg

SEQ ID NO: 1012425 - DNA, 25 bp, Homo sapien
tcggccgtcaactcgagtgtacgct

SEQ ID NO: 1012426 - DNA, 25 bp, Homo sapien
gccgtcaactcgagtgtacgctccg

SEQ ID NO: 1012427 - DNA, 25 bp, Homo sapien
aaaatcttgatcgtccaccaaagcc

SEQ ID NO: 1012428 - DNA, 25 bp, Homo sapien
tccattcccgaagtgcaaggtgcac

SEQ ID NO: 1012429 - DNA, 25 bp, Homo sapien
tctcggcactagaacagcatgtcac

SEQ ID NO: 1012430 - DNA, 25 bp, Homo sapien
catcctttgttaagcctgtagggcc

SEQ ID NO: 1012431 - DNA, 25 bp, Homo sapien
tgtacggctgccagtgggcggacct

SEQ ID NO: 1012432 - DNA, 25 bp, Homo sapien
tacggctgccagtgggcggacctcc

SEQ ID NO: 1012433 - DNA, 25 bp, Homo sapien
acggctgccagtgggcggacctcca

SEQ ID NO: 1012434 - DNA, 25 bp, Homo sapien
ctgtgtacggctgccagtgggcgga

SEQ ID NO: 1012435 - DNA, 25 bp, Homo sapien
agcctgcagcggatgccacctctct

SEQ ID NO: 1012436 - DNA, 25 bp, Homo sapien
gtctggttattttctgatgcccggg

SEQ ID NO: 1012437 - DNA, 25 bp, Homo sapien
ccttgaattgattatagctgtctac

SEQ ID NO: 1012438 - DNA, 25 bp, Homo sapien
cccggggctcggtgacagagtactt

SEQ ID NO: 1012439 - DNA, 25 bp, Homo sapien
gagcaagcttgttgcgcaccttgtt

SEQ ID NO: 1012440 - DNA, 25 bp, Homo sapien
agcaagcttgttgcgcaccttgttc

SEQ ID NO: 1012441 - DNA, 25 bp, Homo sapien
caagcttgttgcgcaccttgttcat

SEQ ID NO: 1012442 - DNA, 25 bp, Homo sapien
gcaagcttgttgcgcaccttgttca

SEQ ID NO: 1012443 - DNA, 25 bp, Homo sapien
gctcgacaaatgtcactgctctcca

SEQ ID NO: 1012444 - DNA, 25 bp, Homo sapien
gggtgctcgacggtcagttctctag

SEQ ID NO: 1012445 - DNA, 25 bp, Homo sapien
gacaccgtgcgggtgctcgacaaat

SEQ ID NO: 1012446 - DNA, 25 bp, Homo sapien
caggtgctcgacagtcagttctctg

SEQ ID NO: 1012447 - DNA, 25 bp, Homo sapien
gtggattcgcacacggggtgttctt

SEQ ID NO: 1012448 - DNA, 25 bp, Homo sapien
tgtggattcgcacacggggtgttct

SEQ ID NO: 1012449 - DNA, 25 bp, Homo sapien
tggattcgcacacggggtgttcttg

SEQ ID NO: 1012450 - DNA, 25 bp, Homo sapien
gaatgtgtgtggattcgcagacggg

SEQ ID NO: 1012451 - DNA, 25 bp, Homo sapien
tgcctatgggcactggtcacctgaa

SEQ ID NO: 1012452 - DNA, 25 bp, Homo sapien
cagagcctgcatggacagtagaggt

SEQ ID NO: 1012453 - DNA, 25 bp, Homo sapien
tccatgagtcatggctggaggagtc

SEQ ID NO: 1012454 - DNA, 25 bp, Homo sapien
tctgcggtaagactgagaccactgg

SEQ ID NO: 1012455 - DNA, 25 bp, Homo sapien
tcgtgagtttacacagtagggtctc

SEQ ID NO: 1012456 - DNA, 25 bp, Homo sapien
tctgagccgggacttcacttggaaa

SEQ ID NO: 1012457 - DNA, 25 bp, Homo sapien
aaacatatctgttcagggtggcagg

SEQ ID NO: 1012458 - DNA, 25 bp, Homo sapien
ggcaggaattgtccgtgactgaaac

SEQ ID NO: 1012459 - DNA, 25 bp, Homo sapien
gagtcagttgttgcaccactagtgt

SEQ ID NO: 1012460 - DNA, 25 bp, Homo sapien
tctacatgggtgttatgggcgatgc

SEQ ID NO: 1012461 - DNA, 25 bp, Homo sapien
aatcggcctggcttcaaacagaaag

SEQ ID NO: 1012462 - DNA, 25 bp, Homo sapien
cccaccacatttagaagactgtatt

SEQ ID NO: 1012463 - DNA, 25 bp, Homo sapien
gagatgaagactggcccagcaaagc

SEQ ID NO: 1012464 - DNA, 25 bp, Homo sapien
aagactggcccagcaaagcctccag

SEQ ID NO: 1012465 - DNA, 25 bp, Homo sapien
tgaagactggcccagcaaagcctcc

SEQ ID NO: 1012466 - DNA, 25 bp, Homo sapien
cttgagatgaagactggcccagcaa

SEQ ID NO: 1012467 - DNA, 25 bp, Homo sapien
caacgtacgcaaaagtacgatggct

SEQ ID NO: 1012468 - DNA, 25 bp, Homo sapien
gcaacgtacgcaaaagtacgatggc

SEQ ID NO: 1012469 - DNA, 25 bp, Homo sapien
aggcaacgtacgcaaaagtacgatg

SEQ ID NO: 1012470 - DNA, 25 bp, Homo sapien
ctaggcaacgtacgcaaaagtacga

SEQ ID NO: 1012471 - DNA, 25 bp, Homo sapien
gactttggctttagcaacgagctca

SEQ ID NO: 1012472 - DNA, 25 bp, Homo sapien
aacttctgtgtcagtgcttcttaca

SEQ ID NO: 1012473 - DNA, 25 bp, Homo sapien
gcaacgagctcacctttggcagcag

SEQ ID NO: 1012474 - DNA, 25 bp, Homo sapien
ggcagcagggtagataacttctgtg

SEQ ID NO: 1012475 - DNA, 25 bp, Homo sapien
aaagaacctgcttgtgtggatgctg

SEQ ID NO: 1012476 - DNA, 25 bp, Homo sapien
caccagaggaacctgtcctttccgt

SEQ ID NO: 1012477 - DNA, 25 bp, Homo sapien
tgtcctttccgtaatgttgaagagt

SEQ ID NO: 1012478 - DNA, 25 bp, Homo sapien
cctttccgtaatgttgaagagtatg

SEQ ID NO: 1012479 - DNA, 25 bp, Homo sapien
gctgtcctttccgtaatgttgaaga

SEQ ID NO: 1012480 - DNA, 25 bp, Homo sapien
caccagaggaacctgtcctttccgt

SEQ ID NO: 1012481 - DNA, 25 bp, Homo sapien
aaagctgtcctttccgtaatgttga

SEQ ID NO: 1012482 - DNA, 25 bp, Homo sapien
aagctgtcctttccgtaatgttgaa

SEQ ID NO: 1012483 - DNA, 25 bp, Homo sapien
gctgtcctttccgtaatgttgaaga

SEQ ID NO: 1012484 - DNA, 25 bp, Homo sapien
aaatccctataaagtgtaatatggg

SEQ ID NO: 1012485 - DNA, 25 bp, Homo sapien
taatgaaggggtcaaaatccctata

SEQ ID NO: 1012486 - DNA, 25 bp, Homo sapien
agtgtaatatgggaaaccacagagt

SEQ ID NO: 1012487 - DNA, 25 bp, Homo sapien
gaaaccacagagtcgccaggggaac

SEQ ID NO: 1012488 - DNA, 25 bp, Homo sapien
tgtgcactaaacacaaaaacttcaa

SEQ ID NO: 1012489 - DNA, 25 bp, Homo sapien
tgcactaaacacaaaaacttcaacc

SEQ ID NO: 1012490 - DNA, 25 bp, Homo sapien
ctaactgtgcactaaacacaaaaac

SEQ ID NO: 1012491 - DNA, 25 bp, Homo sapien
actgtgcactaaacacaaaaacttc

SEQ ID NO: 1012492 - DNA, 25 bp, Homo sapien
gcgtgctcacggtcacactgaagaa

SEQ ID NO: 1012493 - DNA, 25 bp, Homo sapien
gcatctctcattgcgtgctcacggt

SEQ ID NO: 1012494 - DNA, 25 bp, Homo sapien
ccttcgtgccagttagcatctctca

SEQ ID NO: 1012495 - DNA, 25 bp, Homo sapien
aaaactgttggtcatgtccttcgtg

SEQ ID NO: 1012496 - DNA, 25 bp, Homo sapien
ccggccaccgtttcactgagtgtct

SEQ ID NO: 1012497 - DNA, 25 bp, Homo sapien
agcccggccaccgtttcactgagtg

SEQ ID NO: 1012498 - DNA, 25 bp, Homo sapien
tgcatccccagatctggtcagcccg

SEQ ID NO: 1012499 - DNA, 25 bp, Homo sapien
agatgaaagaagagcccgtgcatcc

SEQ ID NO: 1012500 - DNA, 25 bp, Homo sapien
gccagcgggacatggacgtcagctg

SEQ ID NO: 1012501 - DNA, 25 bp, Homo sapien
gggccctgtctgtgccggccgtgag

SEQ ID NO: 1012502 - DNA, 25 bp, Homo sapien
caggcctcagcggtgaagggacagc

SEQ ID NO: 1012503 - DNA, 25 bp, Homo sapien
caggacggctggaggtatgtgtggg

SEQ ID NO: 1012504 - DNA, 25 bp, Homo sapien
gactgccaggcggatctacacgctc

SEQ ID NO: 1012505 - DNA, 25 bp, Homo sapien
ccatcgaggactcggcgctcgactg

SEQ ID NO: 1012506 - DNA, 25 bp, Homo sapien
ctgaaggctccgcccatcgaggact

SEQ ID NO: 1012507 - DNA, 25 bp, Homo sapien
gccgcggagtcttcggcgagaccta

SEQ ID NO: 1012508 - DNA, 25 bp, Homo sapien
actccgccaagaactccacactgat

SEQ ID NO: 1012509 - DNA, 25 bp, Homo sapien
gcccaactccgccaagaactccaca

SEQ ID NO: 1012510 - DNA, 25 bp, Homo sapien
gcagcccaactccgccaagaactcc

SEQ ID NO: 1012511 - DNA, 25 bp, Homo sapien
ccaactccgccaagaactccacact

SEQ ID NO: 1012512 - DNA, 25 bp, Homo sapien
ccaaaagcaggcacatactcttggt

SEQ ID NO: 1012513 - DNA, 25 bp, Homo sapien
gcaccaaaagcaggcacatactctt

SEQ ID NO: 1012514 - DNA, 25 bp, Homo sapien
ttgggaatttctgcaccaaaagcag

SEQ ID NO: 1012515 - DNA, 25 bp, Homo sapien
tgcaccaaaagcaggcacatactct

SEQ ID NO: 1012516 - DNA, 25 bp, Homo sapien
tgtagcctccaaccctgtgaatggc

SEQ ID NO: 1012517 - DNA, 25 bp, Homo sapien
ccgggcaggcatttgtgtaagacac

SEQ ID NO: 1012518 - DNA, 25 bp, Homo sapien
tatccacagcatggttatgcagctg

SEQ ID NO: 1012519 - DNA, 25 bp, Homo sapien
tcacaggcccattgtgcagagactg

SEQ ID NO: 1012520 - DNA, 25 bp, Homo sapien
atgtctttcctattactgctgacat

SEQ ID NO: 1012521 - DNA, 25 bp, Homo sapien
gtgggtaaaactgggaagatggtgc

SEQ ID NO: 1012522 - DNA, 25 bp, Homo sapien
ctttcctattactgctgacatcact

SEQ ID NO: 1012523 - DNA, 25 bp, Homo sapien
gtctttcctattactgctgacatca

SEQ ID NO: 1012524 - DNA, 25 bp, Homo sapien
tcctcgtcctttagtaccacagaga

SEQ ID NO: 1012525 - DNA, 25 bp, Homo sapien
tagtaccacagagagttcaaagatg

SEQ ID NO: 1012526 - DNA, 25 bp, Homo sapien
aatcctgcatgtactcctcgtcctt

SEQ ID NO: 1012527 - DNA, 25 bp, Homo sapien
tgcatgtactcctcgtcctttagta

SEQ ID NO: 1012528 - DNA, 25 bp, Homo sapien
tggtttggctttctatgtccataac

SEQ ID NO: 1012529 - DNA, 25 bp, Homo sapien
cttgtggccaggaagccgaaaccct

SEQ ID NO: 1012530 - DNA, 25 bp, Homo sapien
taaaaaattcgaatgccactgtcag

SEQ ID NO: 1012531 - DNA, 25 bp, Homo sapien
tgaacaatcctcctatgatgagtgg

SEQ ID NO: 1012532 - DNA, 25 bp, Homo sapien
taaaacgaggctaagatacaatgga

SEQ ID NO: 1012533 - DNA, 25 bp, Homo sapien
gattagtttacctaaagcatcaggc

SEQ ID NO: 1012534 - DNA, 25 bp, Homo sapien
ggcactataactaagagagcaaggt

SEQ ID NO: 1012535 - DNA, 25 bp, Homo sapien
tctgaacactttctcgtgacacacg

SEQ ID NO: 1012536 - DNA, 25 bp, Homo sapien
gtccagcgcaaagacggtcaactta

SEQ ID NO: 1012537 - DNA, 25 bp, Homo sapien
cctgggcttttgtgggtaagtctga

SEQ ID NO: 1012538 - DNA, 25 bp, Homo sapien
ccctttcctggtatggcaagaggct

SEQ ID NO: 1012539 - DNA, 25 bp, Homo sapien
tcttcctggtagtgaacctctggct

SEQ ID NO: 1012540 - DNA, 25 bp, Homo sapien
atgacacctgggttgttatagtcca

SEQ ID NO: 1012541 - DNA, 25 bp, Homo sapien
cttgaaacggaaaatgataagaact

SEQ ID NO: 1012542 - DNA, 25 bp, Homo sapien
cagagaaacacaacggagggaagga

SEQ ID NO: 1012543 - DNA, 25 bp, Homo sapien
gcaggagtctgtacacatgtgccct

SEQ ID NO: 1012544 - DNA, 25 bp, Homo sapien
caccagtgattcgaacatttcagag

SEQ ID NO: 1012545 - DNA, 25 bp, Homo sapien
taagtgctcccgtcacaccagtgat

SEQ ID NO: 1012546 - DNA, 25 bp, Homo sapien
cttgattttcccctcgtcttgtctt

SEQ ID NO: 1012547 - DNA, 25 bp, Homo sapien
tcccctcgtcttgtcttcagttcag

SEQ ID NO: 1012548 - DNA, 25 bp, Homo sapien
tggaaagctgcaaacgctgtagtga

SEQ ID NO: 1012549 - DNA, 25 bp, Homo sapien
aagctgcaaacgctgtagtgatgat

SEQ ID NO: 1012550 - DNA, 25 bp, Homo sapien
aaatgggctcaactggaagaagctg

SEQ ID NO: 1012551 - DNA, 25 bp, Homo sapien
ggacaccacggtgctgcggaaaaac

SEQ ID NO: 1012552 - DNA, 25 bp, Homo sapien
cagataaaacgtatcccaagccggg

SEQ ID NO: 1012553 - DNA, 25 bp, Homo sapien
ttgaagagctcgcttgtgagttcct

SEQ ID NO: 1012554 - DNA, 25 bp, Homo sapien
cagctgcgcatgctccgtgggccat

SEQ ID NO: 1012555 - DNA, 25 bp, Homo sapien
aaggccacagctgcgcatgctccgt

SEQ ID NO: 1012556 - DNA, 25 bp, Homo sapien
ctggaaggccacagctgcgcatgct

SEQ ID NO: 1012557 - DNA, 25 bp, Homo sapien
acagctgcgcatgctccgtgggcca

SEQ ID NO: 1012558 - DNA, 25 bp, Homo sapien
gaagaagcagcctttatccagatta

SEQ ID NO: 1012559 - DNA, 25 bp, Homo sapien
aagaagcagcctttatccagattaa

SEQ ID NO: 1012560 - DNA, 25 bp, Homo sapien
gctgtgttaggctgcagttacaagc

SEQ ID NO: 1012561 - DNA, 25 bp, Homo sapien
gacgctttctgaaacacaggtggct

SEQ ID NO: 1012562 - DNA, 25 bp, Homo sapien
tgctctgttttgacgacactggatg

SEQ ID NO: 1012563 - DNA, 25 bp, Homo sapien
tatcagtcggctgaggctgtgttag

SEQ ID NO: 1012564 - DNA, 25 bp, Homo sapien
tgccagtgtcactagttttaagcaa

SEQ ID NO: 1012565 - DNA, 25 bp, Homo sapien
gtgtgccagtgtcactagttttaag

SEQ ID NO: 1012566 - DNA, 25 bp, Homo sapien
cagtgtcactagttttaagcaacag

SEQ ID NO: 1012567 - DNA, 25 bp, Homo sapien
gccagtgtcactagttttaagcaac

SEQ ID NO: 1012568 - DNA, 25 bp, Homo sapien
gagaaatacccacagctgtagagga

SEQ ID NO: 1012569 - DNA, 25 bp, Homo sapien
gggtcaacagccgtaatatattcta

SEQ ID NO: 1012570 - DNA, 25 bp, Homo sapien
tgtggtttcacaagagaaataccca

SEQ ID NO: 1012571 - DNA, 25 bp, Homo sapien
gaggaaaccacgaagatctggaaac

SEQ ID NO: 1012572 - DNA, 25 bp, Homo sapien
ctacacagacacgtctatatcctgg

SEQ ID NO: 1012573 - DNA, 25 bp, Homo sapien
cagacacgtctatatcctggatgga

SEQ ID NO: 1012574 - DNA, 25 bp, Homo sapien
cacagacacgtctatatcctggatg

SEQ ID NO: 1012575 - DNA, 25 bp, Homo sapien
cacgtctatatcctggatggatggg

SEQ ID NO: 1012576 - DNA, 25 bp, Homo sapien
gaacaagaacattccgctaatggtg

SEQ ID NO: 1012577 - DNA, 25 bp, Homo sapien
cattccgctaatggtgatgccctga

SEQ ID NO: 1012578 - DNA, 25 bp, Homo sapien
tccccgttatagaacaagaacattc

SEQ ID NO: 1012579 - DNA, 25 bp, Homo sapien
ccctcatcatgaattattgaagtca

SEQ ID NO: 1012580 - DNA, 25 bp, Homo sapien
caaaccggtggctgccgaagatgag

SEQ ID NO: 1012581 - DNA, 25 bp, Homo sapien
ctgtttctcaaacaatgagccggct

SEQ ID NO: 1012582 - DNA, 25 bp, Homo sapien
aatgcttagcaaaccggtggctgcc

SEQ ID NO: 1012583 - DNA, 25 bp, Homo sapien
gccgaagatgaggtcaattcaccca

SEQ ID NO: 1012584 - DNA, 25 bp, Homo sapien
tggcaggaagtgaggagctcccact

SEQ ID NO: 1012585 - DNA, 25 bp, Homo sapien
gcaggaagtgaggagctcccactaa

SEQ ID NO: 1012586 - DNA, 25 bp, Homo sapien
caggaagtgaggagctcccactaag

SEQ ID NO: 1012587 - DNA, 25 bp, Homo sapien
atggcaggaagtgaggagctcccac

SEQ ID NO: 1012588 - DNA, 25 bp, Homo sapien
ggctgtgccttcatcgaagctgcag

SEQ ID NO: 1012589 - DNA, 25 bp, Homo sapien
tgtgccttcatcgaagctgcagctc

SEQ ID NO: 1012590 - DNA, 25 bp, Homo sapien
gcccatacatcaggcagagctcagc

SEQ ID NO: 1012591 - DNA, 25 bp, Homo sapien
cacagcccatacatcaggcagagct

SEQ ID NO: 1012592 - DNA, 25 bp, Homo sapien
gaatgtgcacctgtttatgagcaga

SEQ ID NO: 1012593 - DNA, 25 bp, Homo sapien
cacctgtttatgagcagattcccca

SEQ ID NO: 1012594 - DNA, 25 bp, Homo sapien
tgcacctgtttatgagcagattccc

SEQ ID NO: 1012595 - DNA, 25 bp, Homo sapien
ctgaggggaatgtgcacctgtttat

SEQ ID NO: 1012596 - DNA, 25 bp, Homo sapien
gatctaatcttattatgggcctggt

SEQ ID NO: 1012597 - DNA, 25 bp, Homo sapien
ccatctgggctgtgttgggatctaa

SEQ ID NO: 1012598 - DNA, 25 bp, Homo sapien
ggctccagcagatgtacactggcaa

SEQ ID NO: 1012599 - DNA, 25 bp, Homo sapien
gatagactatctcctccaaaaccag

SEQ ID NO: 1012600 - DNA, 25 bp, Homo sapien
atgcacacacgtataattcaaaaca

SEQ ID NO: 1012601 - DNA, 25 bp, Homo sapien
taattccacttcagacatagccctt

SEQ ID NO: 1012602 - DNA, 25 bp, Homo sapien
tcccctggttacaaaaacaatgtgc

SEQ ID NO: 1012603 - DNA, 25 bp, Homo sapien
cagaaatatatgtgggtatacacag

SEQ ID NO: 1012604 - DNA, 25 bp, Homo sapien
ttaagggaaatgcacggccacgctg

SEQ ID NO: 1012605 - DNA, 25 bp, Homo sapien
accgcttcgcatctgtcagccgagg

SEQ ID NO: 1012606 - DNA, 25 bp, Homo sapien
cgggtttctcggagctgccctaaca

SEQ ID NO: 1012607 - DNA, 25 bp, Homo sapien
accacaggcacattctctcaggctt

SEQ ID NO: 1012608 - DNA, 25 bp, Homo sapien
cgagctccgtgcaccagctcccgag

SEQ ID NO: 1012609 - DNA, 25 bp, Homo sapien
ctttccgagctccgtgcaccagctc

SEQ ID NO: 1012610 - DNA, 25 bp, Homo sapien
tttccgagctccgtgcaccagctcc

SEQ ID NO: 1012611 - DNA, 25 bp, Homo sapien
tccgagctccgtgcaccagctcccg

SEQ ID NO: 1012612 - DNA, 25 bp, Homo sapien
tttcctctgggtctgaaactagact

SEQ ID NO: 1012613 - DNA, 25 bp, Homo sapien
cctctgggtctgaaactagactggg

SEQ ID NO: 1012614 - DNA, 25 bp, Homo sapien
tagactggggaagacgtgcctttct

SEQ ID NO: 1012615 - DNA, 25 bp, Homo sapien
ttctcaaaatccagagagctgcccc

SEQ ID NO: 1012616 - DNA, 25 bp, Homo sapien
tatgccctcggtcctcagcttccag

SEQ ID NO: 1012617 - DNA, 25 bp, Homo sapien
cttatgccctcggtcctcagcttcc

SEQ ID NO: 1012618 - DNA, 25 bp, Homo sapien
ttatgccctcggtcctcagcttcca

SEQ ID NO: 1012619 - DNA, 25 bp, Homo sapien
ccttatgccctcggtcctcagcttc

SEQ ID NO: 1012620 - DNA, 25 bp, Homo sapien
aggcacatgctgccgcgcccagata

SEQ ID NO: 1012621 - DNA, 25 bp, Homo sapien
ggcacatgctgccgcgcccagataa

SEQ ID NO: 1012622 - DNA, 25 bp, Homo sapien
ctcgggagcggataaacgtttggct

SEQ ID NO: 1012623 - DNA, 25 bp, Homo sapien
ttcatgtttcccagttttgaagatg

SEQ ID NO: 1012624 - DNA, 25 bp, Homo sapien
aagatgtggttgtaatgttgtcctc

SEQ ID NO: 1012625 - DNA, 25 bp, Homo sapien
cgtttggctgtactggaaggtgctc

SEQ ID NO: 1012626 - DNA, 25 bp, Homo sapien
tctccatcagttgccatccctccct

SEQ ID NO: 1012627 - DNA, 25 bp, Homo sapien
gactgggtcctccatgcttgcattt

SEQ ID NO: 1012628 - DNA, 25 bp, Homo sapien
ctgggtcctccatgcttgcatttga

SEQ ID NO: 1012629 - DNA, 25 bp, Homo sapien
ccatcagttgccatccctccctgga

SEQ ID NO: 1012630 - DNA, 25 bp, Homo sapien
gaggaagtgtggctccctagtgaca

SEQ ID NO: 1012631 - DNA, 25 bp, Homo sapien
ggtcttggagtgtatccctcacgga

SEQ ID NO: 1012632 - DNA, 25 bp, Homo sapien
acatagtctacacagggtttgatac

SEQ ID NO: 1012633 - DNA, 25 bp, Homo sapien
cccacacagtaaggatggaagctca

SEQ ID NO: 1012634 - DNA, 25 bp, Homo sapien
aaatttcaacacatacccaggttca

SEQ ID NO: 1012635 - DNA, 25 bp, Homo sapien
tttcaacacatacccaggttcatag

SEQ ID NO: 1012636 - DNA, 25 bp, Homo sapien
ttcaacacatacccaggttcatagc

SEQ ID NO: 1012637 - DNA, 25 bp, Homo sapien
aatttcaacacatacccaggttcat

SEQ ID NO: 1012638 - DNA, 25 bp, Homo sapien
tgctgctagagccttataagcctca

SEQ ID NO: 1012639 - DNA, 25 bp, Homo sapien
gcaccagggcatggaaagaatagca

SEQ ID NO: 1012640 - DNA, 25 bp, Homo sapien
gttgctgggtgctgcttatgcacca

SEQ ID NO: 1012641 - DNA, 25 bp, Homo sapien
ggacagctttatctacagggcgggc

SEQ ID NO: 1012642 - DNA, 25 bp, Homo sapien
tagcaatgtgctgattcctccatat

SEQ ID NO: 1012643 - DNA, 25 bp, Homo sapien
tccataagccaacattgacacgtca

SEQ ID NO: 1012644 - DNA, 25 bp, Homo sapien
aaatctcccgtaatcctgttcagcc

SEQ ID NO: 1012645 - DNA, 25 bp, Homo sapien
tggtgcatttgtcgcaatccataag

SEQ ID NO: 1012646 - DNA, 25 bp, Homo sapien
gcttatactgatcgttacttctaca

SEQ ID NO: 1012647 - DNA, 25 bp, Homo sapien
gggatggtctgctcagctgcttata

SEQ ID NO: 1012648 - DNA, 25 bp, Homo sapien
ctgggagtgtcttttactaacagcg

SEQ ID NO: 1012649 - DNA, 25 bp, Homo sapien
caaccagaggttactgtggtcccac

SEQ ID NO: 1012650 - DNA, 25 bp, Homo sapien
ccttgacttatttgcagaggctaaa

SEQ ID NO: 1012651 - DNA, 25 bp, Homo sapien
tatttgcagaggctaaatttaggct

SEQ ID NO: 1012652 - DNA, 25 bp, Homo sapien
aggctaaatttaggctggtgagaga

SEQ ID NO: 1012653 - DNA, 25 bp, Homo sapien
gcagaggctaaatttaggctggtga

SEQ ID NO: 1012654 - DNA, 25 bp, Homo sapien
cggaagataagcagtagggagctgc

SEQ ID NO: 1012655 - DNA, 25 bp, Homo sapien
aactggtggaccaacactggacgcc

SEQ ID NO: 1012656 - DNA, 25 bp, Homo sapien
acgccacgggcctccggaagataag

SEQ ID NO: 1012657 - DNA, 25 bp, Homo sapien
gtggaccaacactggacgccacggg

SEQ ID NO: 1012658 - DNA, 25 bp, Homo sapien
tcctcggtgacacacgggctttgca

SEQ ID NO: 1012659 - DNA, 25 bp, Homo sapien
tacaaattgtccataccagcaagga

SEQ ID NO: 1012660 - DNA, 25 bp, Homo sapien
tcacaccagcatctagaagtggcct

SEQ ID NO: 1012661 - DNA, 25 bp, Homo sapien
cccaagggccttatggttgattaca

SEQ ID NO: 1012662 - DNA, 25 bp, Homo sapien
gagcctctcctgcatgctgcaccag

SEQ ID NO: 1012663 - DNA, 25 bp, Homo sapien
cagagcctctcctgcatgctgcacc

SEQ ID NO: 1012664 - DNA, 25 bp, Homo sapien
gtgaagacaggccagtggggaggag

SEQ ID NO: 1012665 - DNA, 25 bp, Homo sapien
ggggctccaggcaccagagcctctc

SEQ ID NO: 1012666 - DNA, 25 bp, Homo sapien
ctgttcctccttccttcgatgaccc

SEQ ID NO: 1012667 - DNA, 25 bp, Homo sapien
gctctgagcctacagaagccacaga

SEQ ID NO: 1012668 - DNA, 25 bp, Homo sapien
ttccttcgatgaccctggcactggt

SEQ ID NO: 1012669 - DNA, 25 bp, Homo sapien
tctgagcctacagaagccacagaac

SEQ ID NO: 1012670 - DNA, 25 bp, Homo sapien
tggccgccaaattcagtgctgaagt

SEQ ID NO: 1012671 - DNA, 25 bp, Homo sapien
agcaaactcgaactgaaaccctgca

SEQ ID NO: 1012672 - DNA, 25 bp, Homo sapien
cagcaaactcgaactgaaaccctgc

SEQ ID NO: 1012673 - DNA, 25 bp, Homo sapien
cggcccgttctgtggccgccaaatt

SEQ ID NO: 1012674 - DNA, 25 bp, Homo sapien
acagtaagtcacacactttaagatt

SEQ ID NO: 1012675 - DNA, 25 bp, Homo sapien
taaatttgtctaacacaagcagatc

SEQ ID NO: 1012676 - DNA, 25 bp, Homo sapien
ggtagaggagtttgcgccaggcaga

SEQ ID NO: 1012677 - DNA, 25 bp, Homo sapien
gtaagtcacacactttaagattata

SEQ ID NO: 1012678 - DNA, 25 bp, Homo sapien
cctactgcagaatttaggtcctgga

SEQ ID NO: 1012679 - DNA, 25 bp, Homo sapien
gtcagggcagatggccctactgcag

SEQ ID NO: 1012680 - DNA, 25 bp, Homo sapien
gacccttttggaaggtgtcagggca

SEQ ID NO: 1012681 - DNA, 25 bp, Homo sapien
gcctggctctagagacttcccctgt

SEQ ID NO: 1012682 - DNA, 25 bp, Homo sapien
agatgaaatcctcgcagacttctgc

SEQ ID NO: 1012683 - DNA, 25 bp, Homo sapien
aagatgaaatcctcgcagacttctg

SEQ ID NO: 1012684 - DNA, 25 bp, Homo sapien
ggaagatgaaatcctcgcagacttc

SEQ ID NO: 1012685 - DNA, 25 bp, Homo sapien
tgaaatcctcgcagacttctgcttc

SEQ ID NO: 1012686 - DNA, 25 bp, Homo sapien
acaggaaatacccaggagaccactc

SEQ ID NO: 1012687 - DNA, 25 bp, Homo sapien
agtgagggatggtcgaagtaacagg

SEQ ID NO: 1012688 - DNA, 25 bp, Homo sapien
gggatggtcgaagtaacaggaaata

SEQ ID NO: 1012689 - DNA, 25 bp, Homo sapien
ccagtgagggatggtcgaagtaaca

SEQ ID NO: 1012690 - DNA, 25 bp, Homo sapien
gtgtgtaggaaacataacttccttg

SEQ ID NO: 1012691 - DNA, 25 bp, Homo sapien
cagttcccgattgcaagtgtgtagg

SEQ ID NO: 1012692 - DNA, 25 bp, Homo sapien
gacctcgatgagaagccccattctg

SEQ ID NO: 1012693 - DNA, 25 bp, Homo sapien
ctgtaggtgagctgacctcgatgag

SEQ ID NO: 1012694 - DNA, 25 bp, Homo sapien
gctgtcttctgctttgtacggattt

SEQ ID NO: 1012695 - DNA, 25 bp, Homo sapien
cttgggtgactgaacggtccctcac

SEQ ID NO: 1012696 - DNA, 25 bp, Homo sapien
tgctttgtacggatttcatacacag

SEQ ID NO: 1012697 - DNA, 25 bp, Homo sapien
tccctcacacgtcccactgaagcat

SEQ ID NO: 1012698 - DNA, 25 bp, Homo sapien
caggatggcacaggtaccagcaggc

SEQ ID NO: 1012699 - DNA, 25 bp, Homo sapien
ggtaccagcaggcttcaacagctcc

SEQ ID NO: 1012700 - DNA, 25 bp, Homo sapien
aggaagaaagggctctgcccgtcct

SEQ ID NO: 1012701 - DNA, 25 bp, Homo sapien
ggcacaggtaccagcaggcttcaac

SEQ ID NO: 1012702 - DNA, 25 bp, Homo sapien
aacccacgctagcacaggaagacaa

SEQ ID NO: 1012703 - DNA, 25 bp, Homo sapien
tgttggatgcaacagctgaatctgt

SEQ ID NO: 1012704 - DNA, 25 bp, Homo sapien
agacaagaattggaaaggcaccggg

SEQ ID NO: 1012705 - DNA, 25 bp, Homo sapien
tggccttgttggatgcaacagctga

SEQ ID NO: 1012706 - DNA, 25 bp, Homo sapien
tgaggtgagaagaccatcgatgaca

SEQ ID NO: 1012707 - DNA, 25 bp, Homo sapien
gctcagagctgagaagaccgttgat

SEQ ID NO: 1012708 - DNA, 25 bp, Homo sapien
gagctgagaagaccgttgatgacat

SEQ ID NO: 1012709 - DNA, 25 bp, Homo sapien
cagagctgagaagaccgttgatgac

SEQ ID NO: 1012710 - DNA, 25 bp, Homo sapien
gaagaccgtcgatgacatgatgtca

SEQ ID NO: 1012711 - DNA, 25 bp, Homo sapien
gagagagcaccagcaggactcactg

SEQ ID NO: 1012712 - DNA, 25 bp, Homo sapien
agagagcaccagcaggactcactgc

SEQ ID NO: 1012713 - DNA, 25 bp, Homo sapien
aggccccaggatggctccatcctct

SEQ ID NO: 1012714 - DNA, 25 bp, Homo sapien
catcctctgactgcttcttgtccag

SEQ ID NO: 1012715 - DNA, 25 bp, Homo sapien
ggctccatcctctgactgcttcttg

SEQ ID NO: 1012716 - DNA, 25 bp, Homo sapien
cctctgactgcttcttgtccagcag

SEQ ID NO: 1012717 - DNA, 25 bp, Homo sapien
aggacacacggctgaagtccgcaga

SEQ ID NO: 1012718 - DNA, 25 bp, Homo sapien
gacacacggctgaagtccgcagacc

SEQ ID NO: 1012719 - DNA, 25 bp, Homo sapien
acggctgaagtccgcagaccccggg

SEQ ID NO: 1012720 - DNA, 25 bp, Homo sapien
acacggctgaagtccgcagaccccg

SEQ ID NO: 1012721 - DNA, 25 bp, Homo sapien
gaagccctgccagtgtcccctgaag

SEQ ID NO: 1012722 - DNA, 25 bp, Homo sapien
actctcccctttgctctggcagatt

SEQ ID NO: 1012723 - DNA, 25 bp, Homo sapien
gcagggctttggcagtggactgaca

SEQ ID NO: 1012724 - DNA, 25 bp, Homo sapien
gacaccaggtgacctgcctctccag

SEQ ID NO: 1012725 - DNA, 25 bp, Homo sapien
tttcctcacgagaagcagtcctggg

SEQ ID NO: 1012726 - DNA, 25 bp, Homo sapien
tactgactaaaccacgccaaccagt

SEQ ID NO: 1012727 - DNA, 25 bp, Homo sapien
ccatctgatgatagtgggctatgtc

SEQ ID NO: 1012728 - DNA, 25 bp, Homo sapien
gctatgtctttaggagtaagcccct

SEQ ID NO: 1012729 - DNA, 25 bp, Homo sapien
caagattacttgtcggtctgcacaa

SEQ ID NO: 1012730 - DNA, 25 bp, Homo sapien
taaggaagatcattgtgtaagggta

SEQ ID NO: 1012731 - DNA, 25 bp, Homo sapien
aagaatagaacgaaagtcaccggca

SEQ ID NO: 1012732 - DNA, 25 bp, Homo sapien
gataaatgacgatggcaaaactcaa

SEQ ID NO: 1012733 - DNA, 25 bp, Homo sapien
ccctcttcttctggttggatttcat

SEQ ID NO: 1012734 - DNA, 25 bp, Homo sapien
tcccctcttcttctggttggatttc

SEQ ID NO: 1012735 - DNA, 25 bp, Homo sapien
ctttcccctcttcttctggttggat

SEQ ID NO: 1012736 - DNA, 25 bp, Homo sapien
cccctcttcttctggttggatttca

SEQ ID NO: 1012737 - DNA, 25 bp, Homo sapien
tggggaggccagtctgatgaaggaa

SEQ ID NO: 1012738 - DNA, 25 bp, Homo sapien
tggtatgatgcagtcgatggcgtgt

SEQ ID NO: 1012739 - DNA, 25 bp, Homo sapien
tatgatgcagtcgatggcgtgtggg

SEQ ID NO: 1012740 - DNA, 25 bp, Homo sapien
cgtggtatgatgcagtcgatggcgt

SEQ ID NO: 1012741 - DNA, 25 bp, Homo sapien
cctgctctctgtgtgcttagggcat

SEQ ID NO: 1012742 - DNA, 25 bp, Homo sapien
acctgctctctgtgtgcttagggca

SEQ ID NO: 1012743 - DNA, 25 bp, Homo sapien
tagggcatgtactccaggagaacac

SEQ ID NO: 1012744 - DNA, 25 bp, Homo sapien
ttagggcatgtactccaggagaaca

SEQ ID NO: 1012745 - DNA, 25 bp, Homo sapien
ccagattaccctcctctccctccat

SEQ ID NO: 1012746 - DNA, 25 bp, Homo sapien
gtggaaccaccagccgtcagtgtct

SEQ ID NO: 1012747 - DNA, 25 bp, Homo sapien
ctgaggtggaaccaccagccgtcag

SEQ ID NO: 1012748 - DNA, 25 bp, Homo sapien
tgaggtggaaccaccagccgtcagt

SEQ ID NO: 1012749 - DNA, 25 bp, Homo sapien
aggtggaaccaccagccgtcagtgt

SEQ ID NO: 1012750 - DNA, 25 bp, Homo sapien
tctcacagggttcagtcacataggt

SEQ ID NO: 1012751 - DNA, 25 bp, Homo sapien
gtttcagtcacgcagctggttccag

SEQ ID NO: 1012752 - DNA, 25 bp, Homo sapien
tcacagggtgttttggtctcacagg

SEQ ID NO: 1012753 - DNA, 25 bp, Homo sapien
tcacagagtgtttcagacacacagg

SEQ ID NO: 1012754 - DNA, 25 bp, Homo sapien
gcatgggtagttacagtttcacaga

SEQ ID NO: 1012755 - DNA, 25 bp, Homo sapien
tgcatgggtagttacagtttcacag

SEQ ID NO: 1012756 - DNA, 25 bp, Homo sapien
gttacagtttcacagagtgtctcac

SEQ ID NO: 1012757 - DNA, 25 bp, Homo sapien
ctgcatgggtagttacagtttcaca

SEQ ID NO: 1012758 - DNA, 25 bp, Homo sapien
ccacacaggtagctacagtcttgca

SEQ ID NO: 1012759 - DNA, 25 bp, Homo sapien
ccacatgggtagttacagcctcaca

SEQ ID NO: 1012760 - DNA, 25 bp, Homo sapien
tgcaggatgtttccgccacatgggt

SEQ ID NO: 1012761 - DNA, 25 bp, Homo sapien
caggtagttacaatctcacagggca

SEQ ID NO: 1012762 - DNA, 25 bp, Homo sapien
cttctgttttattggtgaggttcac

SEQ ID NO: 1012763 - DNA, 25 bp, Homo sapien
ccagattcaagatgttcaaagggtt

SEQ ID NO: 1012764 - DNA, 25 bp, Homo sapien
ccaggcagtatgaaattgagcaagc

SEQ ID NO: 1012765 - DNA, 25 bp, Homo sapien
gagcaagcgactttctctctcctag

SEQ ID NO: 1012766 - DNA, 25 bp, Homo sapien
taatacttggatagtccctggcaca

SEQ ID NO: 1012767 - DNA, 25 bp, Homo sapien
gaatgactacttcttggccttaaat

SEQ ID NO: 1012768 - DNA, 25 bp, Homo sapien
ccagggcccggtactctgttctttg

SEQ ID NO: 1012769 - DNA, 25 bp, Homo sapien
gagctggttgaccttgtctgaggtc

SEQ ID NO: 1012770 - DNA, 25 bp, Homo sapien
gctggttgaccttgtctgaggtcat

SEQ ID NO: 1012771 - DNA, 25 bp, Homo sapien
tttggcgggagctggttgaccttgt

SEQ ID NO: 1012772 - DNA, 25 bp, Homo sapien
gccttcctcggtgggcgagaaactc

SEQ ID NO: 1012773 - DNA, 25 bp, Homo sapien
tcggtgggcgagaaactcttcaact

SEQ ID NO: 1012774 - DNA, 25 bp, Homo sapien
cctcggtgggcgagaaactcttcaa

SEQ ID NO: 1012775 - DNA, 25 bp, Homo sapien
tcctgagccttcctcggtgggcgag

SEQ ID NO: 1012776 - DNA, 25 bp, Homo sapien
tttaataagcagctctcccgcagca

SEQ ID NO: 1012777 - DNA, 25 bp, Homo sapien
caaagccggagtggatgtgtcacat

SEQ ID NO: 1012778 - DNA, 25 bp, Homo sapien
caagtcacgcatgagggaactgctc

SEQ ID NO: 1012779 - DNA, 25 bp, Homo sapien
caagaagcatagtgtcaggaactgc

SEQ ID NO: 1012780 - DNA, 25 bp, Homo sapien
agtttctgtaggaattccgacattc

SEQ ID NO: 1012781 - DNA, 25 bp, Homo sapien
aagagtttctgtaggaattccgaca

SEQ ID NO: 1012782 - DNA, 25 bp, Homo sapien
gcaagagtttctgtaggaattccga

SEQ ID NO: 1012783 - DNA, 25 bp, Homo sapien
cttggcaagagtttctgtaggaatt

SEQ ID NO: 1012784 - DNA, 25 bp, Homo sapien
actggcaggtcccaaagctggcaga

SEQ ID NO: 1012785 - DNA, 25 bp, Homo sapien
cagaggccagagccaaaggcctcat

SEQ ID NO: 1012786 - DNA, 25 bp, Homo sapien
tcagctgcactggcaggtcccaaag

SEQ ID NO: 1012787 - DNA, 25 bp, Homo sapien
agctgcactggcaggtcccaaagct

SEQ ID NO: 1012788 - DNA, 25 bp, Homo sapien
ctgaaaggagtcccacagtattggg

SEQ ID NO: 1012789 - DNA, 25 bp, Homo sapien
cagagtatggtggcttcacgtcctc

SEQ ID NO: 1012790 - DNA, 25 bp, Homo sapien
agtatggtggcttcacgtcctctga

SEQ ID NO: 1012791 - DNA, 25 bp, Homo sapien
ttcacgtcctctgaaacctgttgca

SEQ ID NO: 1012792 - DNA, 25 bp, Homo sapien
tattctcaacaccaggttaccgaaa

SEQ ID NO: 1012793 - DNA, 25 bp, Homo sapien
aacaccaggttaccgaaatcaatga

SEQ ID NO: 1012794 - DNA, 25 bp, Homo sapien
ccaaaaggtacccactcttgtgctt

SEQ ID NO: 1012795 - DNA, 25 bp, Homo sapien
caaaaggtacccactcttgtgcttt

SEQ ID NO: 1012796 - DNA, 25 bp, Homo sapien
tcctttggatatatcttccacgttt

SEQ ID NO: 1012797 - DNA, 25 bp, Homo sapien
tatcttccacgtttgtggctcttat

SEQ ID NO: 1012798 - DNA, 25 bp, Homo sapien
ttggatatatcttccacgtttgtgg

SEQ ID NO: 1012799 - DNA, 25 bp, Homo sapien
gatatatcttccacgtttgtggctc

SEQ ID NO: 1012800 - DNA, 25 bp, Homo sapien
taagagtaaaccatactccgggcaa

SEQ ID NO: 1012801 - DNA, 25 bp, Homo sapien
gaccttctgtgcctcccaatgaaag

SEQ ID NO: 1012802 - DNA, 25 bp, Homo sapien
tgaactcaggcaaccctccagatat

SEQ ID NO: 1012803 - DNA, 25 bp, Homo sapien
cattcaacaccacctacgaaggatt

SEQ ID NO: 1012804 - DNA, 25 bp, Homo sapien
ttctctcgaaagacgcttaccggct

SEQ ID NO: 1012805 - DNA, 25 bp, Homo sapien
tgtgtcacagggctttaggatttgg

SEQ ID NO: 1012806 - DNA, 25 bp, Homo sapien
tccagggttctcaaaaaggcattct

SEQ ID NO: 1012807 - DNA, 25 bp, Homo sapien
gcagtcttgagacagtaccaggcat

SEQ ID NO: 1012808 - DNA, 25 bp, Homo sapien
tgtgcttggaactcgcctgcaacgg

SEQ ID NO: 1012809 - DNA, 25 bp, Homo sapien
ctgcaacgggacaaagccatctcac

SEQ ID NO: 1012810 - DNA, 25 bp, Homo sapien
gacagttgtgggttacaatcccttc

SEQ ID NO: 1012811 - DNA, 25 bp, Homo sapien
gcctgtgtataaagcagaagcagca

SEQ ID NO: 1012812 - DNA, 25 bp, Homo sapien
ttgaaactgacacttcgggccgtgg

SEQ ID NO: 1012813 - DNA, 25 bp, Homo sapien
gagcactggcatgtacatcaggagg

SEQ ID NO: 1012814 - DNA, 25 bp, Homo sapien
aactgtaggctaatgaggtcacctc

SEQ ID NO: 1012815 - DNA, 25 bp, Homo sapien
agaagtcggctctctcatcgtgagt

SEQ ID NO: 1012816 - DNA, 25 bp, Homo sapien
ccttggcttagcgtggtggcaaccc

SEQ ID NO: 1012817 - DNA, 25 bp, Homo sapien
gtaagatcaatccacccctgctggg

SEQ ID NO: 1012818 - DNA, 25 bp, Homo sapien
cattgtatctgtgcgcctctggtag

SEQ ID NO: 1012819 - DNA, 25 bp, Homo sapien
tcatttgcatgccaagaagagcccc

SEQ ID NO: 1012820 - DNA, 25 bp, Homo sapien
agatgttgccctggccatgatcaag

SEQ ID NO: 1012821 - DNA, 25 bp, Homo sapien
gacacaaacggtggccttttgcagg

SEQ ID NO: 1012822 - DNA, 25 bp, Homo sapien
ggcactggtagcttctctctgcagg

SEQ ID NO: 1012823 - DNA, 25 bp, Homo sapien
cttttgcagggagaaccgccgtgga

SEQ ID NO: 1012824 - DNA, 25 bp, Homo sapien
tcattagggtttcccacaactggca

SEQ ID NO: 1012825 - DNA, 25 bp, Homo sapien
cattagggtttcccacaactggcaa

SEQ ID NO: 1012826 - DNA, 25 bp, Homo sapien
gcttctggagaacagcccgtgacat

SEQ ID NO: 1012827 - DNA, 25 bp, Homo sapien
gagcctgaggctgttcagtgagaac

SEQ ID NO: 1012828 - DNA, 25 bp, Homo sapien
tggcaggctgtaaagaagacgcagc

SEQ ID NO: 1012829 - DNA, 25 bp, Homo sapien
aaacattgggtttaactggcaggct

SEQ ID NO: 1012830 - DNA, 25 bp, Homo sapien
aggtgggaaaggaaggacattactg

SEQ ID NO: 1012831 - DNA, 25 bp, Homo sapien
tggaggtgggaaaggaaggacatta

SEQ ID NO: 1012832 - DNA, 25 bp, Homo sapien
tgggaaaggaaggacattactgcag

SEQ ID NO: 1012833 - DNA, 25 bp, Homo sapien
tggtggaggtgggaaaggaaggaca

SEQ ID NO: 1012834 - DNA, 25 bp, Homo sapien
tccataccaggaactgtaggggtgg

SEQ ID NO: 1012835 - DNA, 25 bp, Homo sapien
tgtctgcccagcaggaatattaccg

SEQ ID NO: 1012836 - DNA, 25 bp, Homo sapien
cagcaggaatattaccgtttttact

SEQ ID NO: 1012837 - DNA, 25 bp, Homo sapien
tggttgggattgcacacaggatgtc

SEQ ID NO: 1012838 - DNA, 25 bp, Homo sapien
tgggacttggcaccctgattggtcc

SEQ ID NO: 1012839 - DNA, 25 bp, Homo sapien
ggcgagtccaggatgagagcatact

SEQ ID NO: 1012840 - DNA, 25 bp, Homo sapien
caggatgagagcatacttgtctcca

SEQ ID NO: 1012841 - DNA, 25 bp, Homo sapien
catgactagactgtggtccaggctg

SEQ ID NO: 1012842 - DNA, 25 bp, Homo sapien
gtctgatcactattttccaggctca

SEQ ID NO: 1012843 - DNA, 25 bp, Homo sapien
catgtttcgtatccagtctgatcac

SEQ ID NO: 1012844 - DNA, 25 bp, Homo sapien
gtttcgtatccagtctgatcactat

SEQ ID NO: 1012845 - DNA, 25 bp, Homo sapien
gtatccagtctgatcactattttcc

SEQ ID NO: 1012846 - DNA, 25 bp, Homo sapien
gcatagaacaccaaacgtgcccaag

SEQ ID NO: 1012847 - DNA, 25 bp, Homo sapien
tctcacccaacacaatggagcatag

SEQ ID NO: 1012848 - DNA, 25 bp, Homo sapien
aagcctacagactcagccggttcag

SEQ ID NO: 1012849 - DNA, 25 bp, Homo sapien
tcagatggatcctggatcgggtcca

SEQ ID NO: 1012850 - DNA, 25 bp, Homo sapien
gtcaccagggcgtggcaccacctga

SEQ ID NO: 1012851 - DNA, 25 bp, Homo sapien
tcaccagggcgtggcaccacctgaa

SEQ ID NO: 1012852 - DNA, 25 bp, Homo sapien
gcgtggcaccacctgaaccccacca

SEQ ID NO: 1012853 - DNA, 25 bp, Homo sapien
tggcaccacctgaaccccaccaggt

SEQ ID NO: 1012854 - DNA, 25 bp, Homo sapien
ttccagccctagtgggtagccagta

SEQ ID NO: 1012855 - DNA, 25 bp, Homo sapien
atggcacccctcacgttaactcttt

SEQ ID NO: 1012856 - DNA, 25 bp, Homo sapien
agtaatgttagggagcctccaaccg

SEQ ID NO: 1012857 - DNA, 25 bp, Homo sapien
ccctagtgggtagccagtaatgtta

SEQ ID NO: 1012858 - DNA, 25 bp, Homo sapien
tgcagaaaagaagagactttgcctg

SEQ ID NO: 1012859 - DNA, 25 bp, Homo sapien
aaagaagagactttgcctgcagcag

SEQ ID NO: 1012860 - DNA, 25 bp, Homo sapien
agaaaagaagagactttgcctgcag

SEQ ID NO: 1012861 - DNA, 25 bp, Homo sapien
tttgcctgcagcagccgtgggccat

SEQ ID NO: 1012862 - DNA, 25 bp, Homo sapien
tttgcacacatctgcggggctttca

SEQ ID NO: 1012863 - DNA, 25 bp, Homo sapien
catggcaagcaagaaggaacccatt

SEQ ID NO: 1012864 - DNA, 25 bp, Homo sapien
ggctgcttctttctaggcatggcaa

SEQ ID NO: 1012865 - DNA, 25 bp, Homo sapien
gatgtactcaatcggccttgagaga

SEQ ID NO: 1012866 - DNA, 25 bp, Homo sapien
gtgcaacttcaccaacaaaagctgc

SEQ ID NO: 1012867 - DNA, 25 bp, Homo sapien
ccatgggcgagagtacacgggccct

SEQ ID NO: 1012868 - DNA, 25 bp, Homo sapien
cctttccagtcaggagaaacgggtg

SEQ ID NO: 1012869 - DNA, 25 bp, Homo sapien
tggtcccatccgtgaagaggaggtt

SEQ ID NO: 1012870 - DNA, 25 bp, Homo sapien
gaaaatgtgagcctcctggaatcag

SEQ ID NO: 1012871 - DNA, 25 bp, Homo sapien
catggtgccgtggttgcaatcctga

SEQ ID NO: 1012872 - DNA, 25 bp, Homo sapien
tttgcaatgcgggtgactgtcatct

SEQ ID NO: 1012873 - DNA, 25 bp, Homo sapien
gaacttttagagatgctgcccatga

SEQ ID NO: 1012874 - DNA, 25 bp, Homo sapien
tagagtcagcggcttctggctgcat

SEQ ID NO: 1012875 - DNA, 25 bp, Homo sapien
ctggaaagcactcaaggccgtcttc

SEQ ID NO: 1012876 - DNA, 25 bp, Homo sapien
aaggccgtcttccattcttcgtaga

SEQ ID NO: 1012877 - DNA, 25 bp, Homo sapien
ttccattcttcgtagagtcagcggc

SEQ ID NO: 1012878 - DNA, 25 bp, Homo sapien
cagcagtcatgcttacactgtgtca

SEQ ID NO: 1012879 - DNA, 25 bp, Homo sapien
tacactgtgtcatgcccgtgtttac

SEQ ID NO: 1012880 - DNA, 25 bp, Homo sapien
tgtgtcatgcccgtgtttaccacct

SEQ ID NO: 1012881 - DNA, 25 bp, Homo sapien
tcatgcttacactgtgtcatgcccg

SEQ ID NO: 1012882 - DNA, 25 bp, Homo sapien
ctctgcctttgtgttagtgttgctt

SEQ ID NO: 1012883 - DNA, 25 bp, Homo sapien
cagtagtcccggattccaggttttg

SEQ ID NO: 1012884 - DNA, 25 bp, Homo sapien
caggttttggagtgaagcctcctga

SEQ ID NO: 1012885 - DNA, 25 bp, Homo sapien
gcctttgtgttagtgttgcttggga

SEQ ID NO: 1012886 - DNA, 25 bp, Homo sapien
gttatttaaatcgttgagatcaggc

SEQ ID NO: 1012887 - DNA, 25 bp, Homo sapien
tttaaatcgttgagatcaggcttcc

SEQ ID NO: 1012888 - DNA, 25 bp, Homo sapien
tatgttatttaaatcgttgagatca

SEQ ID NO: 1012889 - DNA, 25 bp, Homo sapien
tccatttgtccctttaggcaattaa

SEQ ID NO: 1012890 - DNA, 25 bp, Homo sapien
gatgggtgatgtgccgacatcataa

SEQ ID NO: 1012891 - DNA, 25 bp, Homo sapien
tgatgtgccgacatcataacgaggt

SEQ ID NO: 1012892 - DNA, 25 bp, Homo sapien
ggtgatgtgccgacatcataacgag

SEQ ID NO: 1012893 - DNA, 25 bp, Homo sapien
tgggtgatgtgccgacatcataacg

SEQ ID NO: 1012894 - DNA, 25 bp, Homo sapien
tggtggagaagatgccacttttttg

SEQ ID NO: 1012895 - DNA, 25 bp, Homo sapien
caaaggatcgtcagtggtggagaag

SEQ ID NO: 1012896 - DNA, 25 bp, Homo sapien
gatgcaaaggatcgtcagtggtgga

SEQ ID NO: 1012897 - DNA, 25 bp, Homo sapien
ggagagggatgcaaaggatcgtcag

SEQ ID NO: 1012898 - DNA, 25 bp, Homo sapien
gtagcacgggcttgaggaggggctg

SEQ ID NO: 1012899 - DNA, 25 bp, Homo sapien
ctggtagcacgggcttgaggagggg

SEQ ID NO: 1012900 - DNA, 25 bp, Homo sapien
tggtagcacgggcttgaggaggggc

SEQ ID NO: 1012901 - DNA, 25 bp, Homo sapien
ggtagcacgggcttgaggaggggct

SEQ ID NO: 1012902 - DNA, 25 bp, Homo sapien
tagacagctgaccaggccaaaagac

SEQ ID NO: 1012903 - DNA, 25 bp, Homo sapien
cctgctcttgaccaatgcaagcatg

SEQ ID NO: 1012904 - DNA, 25 bp, Homo sapien
gactggaagccgacagtctccctgc

SEQ ID NO: 1012905 - DNA, 25 bp, Homo sapien
catgtcctgagaatcagcttgcttc

SEQ ID NO: 1012906 - DNA, 25 bp, Homo sapien
aggtggctgtaacctgattggagtt

SEQ ID NO: 1012907 - DNA, 25 bp, Homo sapien
agttaaagggacaggagccatccgg

SEQ ID NO: 1012908 - DNA, 25 bp, Homo sapien
taacctgattggagttaaagggaca

SEQ ID NO: 1012909 - DNA, 25 bp, Homo sapien
attggagttaaagggacaggagcca

SEQ ID NO: 1012910 - DNA, 25 bp, Homo sapien
aaggtgattggcagtcagtcacagg

SEQ ID NO: 1012911 - DNA, 25 bp, Homo sapien
ggtgataccactactctctagggca

SEQ ID NO: 1012912 - DNA, 25 bp, Homo sapien
tcatgtcagaattatagggcgggtg

SEQ ID NO: 1012913 - DNA, 25 bp, Homo sapien
actctctagggcaaaggtatttcca

SEQ ID NO: 1012914 - DNA, 25 bp, Homo sapien
tttcacctcgcgcttctccacctcc

SEQ ID NO: 1012915 - DNA, 25 bp, Homo sapien
ctttcacctcgcgcttctccacctc

SEQ ID NO: 1012916 - DNA, 25 bp, Homo sapien
ttgcaggcggatgcaagcaggacct

SEQ ID NO: 1012917 - DNA, 25 bp, Homo sapien
caggacctgggtaggctgctaccgc

SEQ ID NO: 1012918 - DNA, 25 bp, Homo sapien
ttggcctctccagttttcgctccag

SEQ ID NO: 1012919 - DNA, 25 bp, Homo sapien
tagatcctagaagcctgaagcactg

SEQ ID NO: 1012920 - DNA, 25 bp, Homo sapien
cggagagagtgtggtctcaggctga

SEQ ID NO: 1012921 - DNA, 25 bp, Homo sapien
tcagtccctgaagtgtgagaagccg

SEQ ID NO: 1012922 - DNA, 25 bp, Homo sapien
gggatgttttgcatgcggagagagt

SEQ ID NO: 1012923 - DNA, 25 bp, Homo sapien
tccctgaagtgtgagaagccgatgg

SEQ ID NO: 1012924 - DNA, 25 bp, Homo sapien
ctcgataatggtgtctgcaggcttt

SEQ ID NO: 1012925 - DNA, 25 bp, Homo sapien
gctgaatatctaaatccactcgata

SEQ ID NO: 1012926 - DNA, 25 bp, Homo sapien
cagtgccagaattgtgagttcaaat

SEQ ID NO: 1012927 - DNA, 25 bp, Homo sapien
cctcagtgccagaattgtgagttca

SEQ ID NO: 1012928 - DNA, 25 bp, Homo sapien
ctgagttcactctccaaggctgcat

SEQ ID NO: 1012929 - DNA, 25 bp, Homo sapien
aagcagcacagccctgagttcactc

SEQ ID NO: 1012930 - DNA, 25 bp, Homo sapien
agccctgagttcactctccaaggct

SEQ ID NO: 1012931 - DNA, 25 bp, Homo sapien
agcagcacagccctgagttcactct

SEQ ID NO: 1012932 - DNA, 25 bp, Homo sapien
ctccaaagccgtcccatgtgcagat

SEQ ID NO: 1012933 - DNA, 25 bp, Homo sapien
tttctccaaagccgtcccatgtgca

SEQ ID NO: 1012934 - DNA, 25 bp, Homo sapien
tattccatacagtgtctttctccaa

SEQ ID NO: 1012935 - DNA, 25 bp, Homo sapien
ttattccatacagtgtctttctcca

SEQ ID NO: 1012936 - DNA, 25 bp, Homo sapien
cagggttatgctggtgcctcttcca

SEQ ID NO: 1012937 - DNA, 25 bp, Homo sapien
gagaaagtcacttgtcagcaccccg

SEQ ID NO: 1012938 - DNA, 25 bp, Homo sapien
tttccaatgtgatgcagtccgcgct

SEQ ID NO: 1012939 - DNA, 25 bp, Homo sapien
gcgaataaggctgcactcgtctctt

SEQ ID NO: 1012940 - DNA, 25 bp, Homo sapien
tcccattcctcgtagacagccaggg

SEQ ID NO: 1012941 - DNA, 25 bp, Homo sapien
ccattcctcgtagacagccaggggc

SEQ ID NO: 1012942 - DNA, 25 bp, Homo sapien
ctcccattcctcgtagacagccagg

SEQ ID NO: 1012943 - DNA, 25 bp, Homo sapien
cattcctcgtagacagccaggggcc

SEQ ID NO: 1012944 - DNA, 25 bp, Homo sapien
tctccctcgggacaaaatagcctgt

SEQ ID NO: 1012945 - DNA, 25 bp, Homo sapien
tgccacggatctccctcgggacaaa

SEQ ID NO: 1012946 - DNA, 25 bp, Homo sapien
cacggatctccctcgggacaaaata

SEQ ID NO: 1012947 - DNA, 25 bp, Homo sapien
aaaatagcctgtcctttgggatgta

SEQ ID NO: 1012948 - DNA, 25 bp, Homo sapien
tggaatccaaactgataagcggcat

SEQ ID NO: 1012949 - DNA, 25 bp, Homo sapien
ctttcctctggaatccaaactgata

SEQ ID NO: 1012950 - DNA, 25 bp, Homo sapien
tcactattatatggggagcccttct

SEQ ID NO: 1012951 - DNA, 25 bp, Homo sapien
atcactattatatggggagcccttc

SEQ ID NO: 1012952 - DNA, 25 bp, Homo sapien
cagctggatccaacatgtggacggt

SEQ ID NO: 1012953 - DNA, 25 bp, Homo sapien
ggacggtatgtgtagccttcttgag

SEQ ID NO: 1012954 - DNA, 25 bp, Homo sapien
gcagttcaaagggttggccgtgttc

SEQ ID NO: 1012955 - DNA, 25 bp, Homo sapien
gccgtgttcgattcagctggatcca

SEQ ID NO: 1012956 - DNA, 25 bp, Homo sapien
gtggtgctcgttccagtgtaaggtc

SEQ ID NO: 1012957 - DNA, 25 bp, Homo sapien
ggtggtgctcgttccagtgtaaggt

SEQ ID NO: 1012958 - DNA, 25 bp, Homo sapien
ctgcaagacgattggcatcacaggt

SEQ ID NO: 1012959 - DNA, 25 bp, Homo sapien
tctgccaatttttgaagcccttcat

SEQ ID NO: 1012960 - DNA, 25 bp, Homo sapien
tcatctgccaatttttgaagccctt

SEQ ID NO: 1012961 - DNA, 25 bp, Homo sapien
catctgccaatttttgaagcccttc

SEQ ID NO: 1012962 - DNA, 25 bp, Homo sapien
atctgccaatttttgaagcccttca

SEQ ID NO: 1012963 - DNA, 25 bp, Homo sapien
ggctcagtgctctctttgttccatt

SEQ ID NO: 1012964 - DNA, 25 bp, Homo sapien
tgactagacagcctccgctttggct

SEQ ID NO: 1012965 - DNA, 25 bp, Homo sapien
caggtggagaccttgactagacagc

SEQ ID NO: 1012966 - DNA, 25 bp, Homo sapien
aggtggagaccttgaggccacaccg

SEQ ID NO: 1012967 - DNA, 25 bp, Homo sapien
tgagggggcttgtaaattatacatt

SEQ ID NO: 1012968 - DNA, 25 bp, Homo sapien
ggtgagggggcttgtaaattataca

SEQ ID NO: 1012969 - DNA, 25 bp, Homo sapien
gagggggcttgtaaattatacattg

SEQ ID NO: 1012970 - DNA, 25 bp, Homo sapien
gtgagggggcttgtaaattatacat

SEQ ID NO: 1012971 - DNA, 25 bp, Homo sapien
tatcagcatcatgagggcaatcaca

SEQ ID NO: 1012972 - DNA, 25 bp, Homo sapien
aagtgtgagagacaacagggagatc

SEQ ID NO: 1012973 - DNA, 25 bp, Homo sapien
caacagggagatcgatatcagcatc

SEQ ID NO: 1012974 - DNA, 25 bp, Homo sapien
gatcgatatcagcatcatgagggca

SEQ ID NO: 1012975 - DNA, 25 bp, Homo sapien
cttccccagtgaaaatagccctcat

SEQ ID NO: 1012976 - DNA, 25 bp, Homo sapien
aaaatagccctcatgtcactgccct

SEQ ID NO: 1012977 - DNA, 25 bp, Homo sapien
tgtcactgccctcgaggactagggt

SEQ ID NO: 1012978 - DNA, 25 bp, Homo sapien
cactgccctcgaggactagggtttt

SEQ ID NO: 1012979 - DNA, 25 bp, Homo sapien
tacacctagtgacttgggagcaaag

SEQ ID NO: 1012980 - DNA, 25 bp, Homo sapien
ggccatcacagaagcacccatcatt

SEQ ID NO: 1012981 - DNA, 25 bp, Homo sapien
cccagagcttggcaagacgtagttg

SEQ ID NO: 1012982 - DNA, 25 bp, Homo sapien
gatgtatatgaagcattcagcccag

SEQ ID NO: 1012983 - DNA, 25 bp, Homo sapien
gacttgcgagaaggatcctttgtag

SEQ ID NO: 1012984 - DNA, 25 bp, Homo sapien
ctggctattgtctggggacttgcga

SEQ ID NO: 1012985 - DNA, 25 bp, Homo sapien
ctggggacttgcgagaaggatcctt

SEQ ID NO: 1012986 - DNA, 25 bp, Homo sapien
ctattgtctggggacttgcgagaag

SEQ ID NO: 1012987 - DNA, 25 bp, Homo sapien
tcaaactgttcacctacagctgtat

SEQ ID NO: 1012988 - DNA, 25 bp, Homo sapien
tgggctgtttcaacacaactgtcaa

SEQ ID NO: 1012989 - DNA, 25 bp, Homo sapien
tgttcacctacagctgtattttctc

SEQ ID NO: 1012990 - DNA, 25 bp, Homo sapien
ctcttgcaatgggtgaataaggtac

SEQ ID NO: 1012991 - DNA, 25 bp, Homo sapien
cactgcccggtcaagggacgttgaa

SEQ ID NO: 1012992 - DNA, 25 bp, Homo sapien
catgggcaggatccaagtggagctt

SEQ ID NO: 1012993 - DNA, 25 bp, Homo sapien
tcttaaaataagtggctccaggact

SEQ ID NO: 1012994 - DNA, 25 bp, Homo sapien
tgaagatccacactacaggccatgt

SEQ ID NO: 1012995 - DNA, 25 bp, Homo sapien
ctggacatcatgtgcaagctccgtg

SEQ ID NO: 1012996 - DNA, 25 bp, Homo sapien
gacatcatgtgcaagctccgtggat

SEQ ID NO: 1012997 - DNA, 25 bp, Homo sapien
ccgtggatggcctgagattcatcct

SEQ ID NO: 1012998 - DNA, 25 bp, Homo sapien
tccgtggatggcctgagattcatcc

SEQ ID NO: 1012999 - DNA, 25 bp, Homo sapien
tgtccttctggaatgcgcccaagat

SEQ ID NO: 1013000 - DNA, 25 bp, Homo sapien
tgtgtaggcatactcccgaaagtgg

SEQ ID NO: 1013001 - DNA, 25 bp, Homo sapien
gaaccagcctgtatgttgacatgtc

SEQ ID NO: 1013002 - DNA, 25 bp, Homo sapien
tggtctgctcagtaagtcgtgtgtg

SEQ ID NO: 1013003 - DNA, 25 bp, Homo sapien
ctgaatatcagtcacatcaatgtaa

SEQ ID NO: 1013004 - DNA, 25 bp, Homo sapien
cagtcacatcaatgtaattacttat

SEQ ID NO: 1013005 - DNA, 25 bp, Homo sapien
ctgggtccctatgctgaatatcagt

SEQ ID NO: 1013006 - DNA, 25 bp, Homo sapien
gggtccctatgctgaatatcagtca

SEQ ID NO: 1013007 - DNA, 25 bp, Homo sapien
aactctgttctagcccatttcatgg

SEQ ID NO: 1013008 - DNA, 25 bp, Homo sapien
ctttgtccaactctgttctagccca

SEQ ID NO: 1013009 - DNA, 25 bp, Homo sapien
ctgttctagcccatttcatggtctg

SEQ ID NO: 1013010 - DNA, 25 bp, Homo sapien
gattcttttggtagatgctgaacac

SEQ ID NO: 1013011 - DNA, 25 bp, Homo sapien
tttatgtctatcctgtgggctgctg

SEQ ID NO: 1013012 - DNA, 25 bp, Homo sapien
gtgggctgctgtctgcaagtttgga

SEQ ID NO: 1013013 - DNA, 25 bp, Homo sapien
cttttatgtctatcctgtgggctgc

SEQ ID NO: 1013014 - DNA, 25 bp, Homo sapien
gggctgctgtctgcaagtttggagc

SEQ ID NO: 1013015 - DNA, 25 bp, Homo sapien
tctagccttggagttgatggttcac

SEQ ID NO: 1013016 - DNA, 25 bp, Homo sapien
ccttggagttgatggttcactagac

SEQ ID NO: 1013017 - DNA, 25 bp, Homo sapien
cagctctagccttggagttgatggt

SEQ ID NO: 1013018 - DNA, 25 bp, Homo sapien
tttattaagtatgcgcctcgggagc

SEQ ID NO: 1013019 - DNA, 25 bp, Homo sapien
caagaacaaaccggttcacggccat

SEQ ID NO: 1013020 - DNA, 25 bp, Homo sapien
ctcactggcaccagtgtcggacaat

SEQ ID NO: 1013021 - DNA, 25 bp, Homo sapien
acaggaacgacggagagggcgtgtt

SEQ ID NO: 1013022 - DNA, 25 bp, Homo sapien
cctttgggacttttgctgtgacctc

SEQ ID NO: 1013023 - DNA, 25 bp, Homo sapien
agctccgccgcttggttcccgggat

SEQ ID NO: 1013024 - DNA, 25 bp, Homo sapien
gagctccgccgcttggttcccggga

SEQ ID NO: 1013025 - DNA, 25 bp, Homo sapien
ggaagcctcagatgccgccgagctc

SEQ ID NO: 1013026 - DNA, 25 bp, Homo sapien
gcacttgtgtccctgcggaagcctc

SEQ ID NO: 1013027 - DNA, 25 bp, Homo sapien
gagcgcgcgcgccgctgtgggtttg

SEQ ID NO: 1013028 - DNA, 25 bp, Homo sapien
cgcgcgcgccgctgtgggtttgcgc

SEQ ID NO: 1013029 - DNA, 25 bp, Homo sapien
gcgcgcgcgccgctgtgggtttgcg

SEQ ID NO: 1013030 - DNA, 25 bp, Homo sapien
gcgcgccgctgtgggtttgcgcgtg

SEQ ID NO: 1013031 - DNA, 25 bp, Homo sapien
gtctcgcctccaccttcgggccggc

SEQ ID NO: 1013032 - DNA, 25 bp, Homo sapien
tcgggccggcccaatataaccctgc

SEQ ID NO: 1013033 - DNA, 25 bp, Homo sapien
tgccgcggctgcgtctcgcctccac

SEQ ID NO: 1013034 - DNA, 25 bp, Homo sapien
ggcccaatataaccctgcggcggct

SEQ ID NO: 1013035 - DNA, 25 bp, Homo sapien
ggcgagtccccgaggccgctgcgcc

SEQ ID NO: 1013036 - DNA, 25 bp, Homo sapien
cggaggcgagtccccgaggccgctg

SEQ ID NO: 1013037 - DNA, 25 bp, Homo sapien
ggaggcgagtccccgaggccgctgc

SEQ ID NO: 1013038 - DNA, 25 bp, Homo sapien
gaggcgagtccccgaggccgctgcg

SEQ ID NO: 1013039 - DNA, 25 bp, Homo sapien
ccttcggttcgacgttgagactttg

SEQ ID NO: 1013040 - DNA, 25 bp, Homo sapien
tagaaggctttcctgccggagagaa

SEQ ID NO: 1013041 - DNA, 25 bp, Homo sapien
tgccggatgatgtgcgtgccaccgt

SEQ ID NO: 1013042 - DNA, 25 bp, Homo sapien
gctgctcgttaaagagcccaggagg

SEQ ID NO: 1013043 - DNA, 25 bp, Homo sapien
tccggagtcctcttccgctgggctt

SEQ ID NO: 1013044 - DNA, 25 bp, Homo sapien
cctggtcttccgagatagtcacttt

SEQ ID NO: 1013045 - DNA, 25 bp, Homo sapien
tttccggagtcctcttccgctgggc

SEQ ID NO: 1013046 - DNA, 25 bp, Homo sapien
acttttccggagtcctcttccgctg

SEQ ID NO: 1013047 - DNA, 25 bp, Homo sapien
cttcgcgcagcctagagaagctggt

SEQ ID NO: 1013048 - DNA, 25 bp, Homo sapien
gcgcagcctagagaagctggtgcca

SEQ ID NO: 1013049 - DNA, 25 bp, Homo sapien
tcttccttcgcgcagcctagagaag

SEQ ID NO: 1013050 - DNA, 25 bp, Homo sapien
cggcgtcgtaccctcttccttcgcg

SEQ ID NO: 1013051 - DNA, 25 bp, Homo sapien
agcggggacggcgcgtcgctgccgc

SEQ ID NO: 1013052 - DNA, 25 bp, Homo sapien
gcggggacggcgcgtcgctgccgcc

SEQ ID NO: 1013053 - DNA, 25 bp, Homo sapien
cgcgcgagggacgaacacctccaac

SEQ ID NO: 1013054 - DNA, 25 bp, Homo sapien
ggccgcgcgagggacgaacacctcc

SEQ ID NO: 1013055 - DNA, 25 bp, Homo sapien
ccgcctcccgcactctgttcgccgt

SEQ ID NO: 1013056 - DNA, 25 bp, Homo sapien
gtcgccctgcgtatctctggcgccg

SEQ ID NO: 1013057 - DNA, 25 bp, Homo sapien
cagtccccatctgagcccagggagt

SEQ ID NO: 1013058 - DNA, 25 bp, Homo sapien
cggccgggctgttggccgcgcagtc

SEQ ID NO: 1013059 - DNA, 25 bp, Homo sapien
tgcgtgcaccctcgccgctccccgc

SEQ ID NO: 1013060 - DNA, 25 bp, Homo sapien
ctgcgtgcaccctcgccgctccccg

SEQ ID NO: 1013061 - DNA, 25 bp, Homo sapien
gttgatctccgccagcgtcaagcgc

SEQ ID NO: 1013062 - DNA, 25 bp, Homo sapien
agcccgtgtagctgccgcggaaaaa

SEQ ID NO: 1013063 - DNA, 25 bp, Homo sapien
cttgggccgccgcgtatatggcttg

SEQ ID NO: 1013064 - DNA, 25 bp, Homo sapien
cttgcccatgaggtactcgttgatc

SEQ ID NO: 1013065 - DNA, 25 bp, Homo sapien
aaggtgtactcgctgttggggttga

SEQ ID NO: 1013066 - DNA, 25 bp, Homo sapien
gggttgagcatccagtagttgtcct

SEQ ID NO: 1013067 - DNA, 25 bp, Homo sapien
gttgagcatccagtagttgtccttg

SEQ ID NO: 1013068 - DNA, 25 bp, Homo sapien
tgagcatccagtagttgtccttgcc

SEQ ID NO: 1013069 - DNA, 25 bp, Homo sapien
cgcggtggctgaggcgcttgcggcg

SEQ ID NO: 1013070 - DNA, 25 bp, Homo sapien
cgcggggaccggcgcgcggtggctg

SEQ ID NO: 1013071 - DNA, 25 bp, Homo sapien
gggcgagcgcatgcggggcgaggcc

SEQ ID NO: 1013072 - DNA, 25 bp, Homo sapien
gcgggcgagcgcatgcggggcgagg

SEQ ID NO: 1013073 - DNA, 25 bp, Homo sapien
gcgcggcgccccactgaagcgtcgt

SEQ ID NO: 1013074 - DNA, 25 bp, Homo sapien
cgggggccgtgtccctgaggcggcg

SEQ ID NO: 1013075 - DNA, 25 bp, Homo sapien
tgctgtcgatggcgaaggagctgga

SEQ ID NO: 1013076 - DNA, 25 bp, Homo sapien
gaagggcttgcgcaggatgctgtcg

SEQ ID NO: 1013077 - DNA, 25 bp, Homo sapien
ggcgcggtcggtggcacctcggcct

SEQ ID NO: 1013078 - DNA, 25 bp, Homo sapien
ccgggcctcggagtggcttggcggg

SEQ ID NO: 1013079 - DNA, 25 bp, Homo sapien
gggcggcgcggtcggtggcacctcg

SEQ ID NO: 1013080 - DNA, 25 bp, Homo sapien
ccgccgggagaggtgcaagcaggag

SEQ ID NO: 1013081 - DNA, 25 bp, Homo sapien
gaggagcaggcttcgcaaagaaact

SEQ ID NO: 1013082 - DNA, 25 bp, Homo sapien
gaagcctgggcgttaaagaaagaca

SEQ ID NO: 1013083 - DNA, 25 bp, Homo sapien
gaaatgccacatacgtacacggatg

SEQ ID NO: 1013084 - DNA, 25 bp, Homo sapien
attcaaagtgcaaagtccgcgcgcg

SEQ ID NO: 1013085 - DNA, 25 bp, Homo sapien
caaggagaccacagttagagaacca

SEQ ID NO: 1013086 - DNA, 25 bp, Homo sapien
cacagtgaagcatcggtcaatagca

SEQ ID NO: 1013087 - DNA, 25 bp, Homo sapien
taataaagctgtagcccgttgcctg

SEQ ID NO: 1013088 - DNA, 25 bp, Homo sapien
ctttcaaggcagtggtcctggcacc

SEQ ID NO: 1013089 - DNA, 25 bp, Homo sapien
cacaggcagccgacttggtccctgt

SEQ ID NO: 1013090 - DNA, 25 bp, Homo sapien
ccgcactggcgggaaccgtgctcta

SEQ ID NO: 1013091 - DNA, 25 bp, Homo sapien
tctaactggggaagctgatggcacc

SEQ ID NO: 1013092 - DNA, 25 bp, Homo sapien
gagtgcgtcgcttcccagagatgtt

SEQ ID NO: 1013093 - DNA, 25 bp, Homo sapien
gggaggcgcagggtgaccagggccc

SEQ ID NO: 1013094 - DNA, 25 bp, Homo sapien
accagggccctttggccacgcagcc

SEQ ID NO: 1013095 - DNA, 25 bp, Homo sapien
gcgcagggtgaccagggccctttgg

SEQ ID NO: 1013096 - DNA, 25 bp, Homo sapien
aggcgcagggtgaccagggcccttt

SEQ ID NO: 1013097 - DNA, 25 bp, Homo sapien
ttatccatagctaaaaggcttagag

SEQ ID NO: 1013098 - DNA, 25 bp, Homo sapien
caccccgggatggtcgaagctttca

SEQ ID NO: 1013099 - DNA, 25 bp, Homo sapien
gcttagagtccaccccgggatggtc

SEQ ID NO: 1013100 - DNA, 25 bp, Homo sapien
tagctaaaaggcttagagtccaccc

SEQ ID NO: 1013101 - DNA, 25 bp, Homo sapien
tggcccttgcgggggtttgtatctg

SEQ ID NO: 1013102 - DNA, 25 bp, Homo sapien
ccttgcgggggtttgtatctggcac

SEQ ID NO: 1013103 - DNA, 25 bp, Homo sapien
gcccttgcgggggtttgtatctggc

SEQ ID NO: 1013104 - DNA, 25 bp, Homo sapien
ctgtggcccttgcgggggtttgtat

SEQ ID NO: 1013105 - DNA, 25 bp, Homo sapien
tgatcacgatcctcttggaagatac

SEQ ID NO: 1013106 - DNA, 25 bp, Homo sapien
taataacgtcgaacagatacagtgc

SEQ ID NO: 1013107 - DNA, 25 bp, Homo sapien
tccttgccaatttgaaagaggtcct

SEQ ID NO: 1013108 - DNA, 25 bp, Homo sapien
aagaggtccttgaatccagggagag

SEQ ID NO: 1013109 - DNA, 25 bp, Homo sapien
ctctagtaggatgcgtcagggaagc

SEQ ID NO: 1013110 - DNA, 25 bp, Homo sapien
agagggcttgggctttcggctccta

SEQ ID NO: 1013111 - DNA, 25 bp, Homo sapien
tggagatccaacaatcaaggcttct

SEQ ID NO: 1013112 - DNA, 25 bp, Homo sapien
tgtttgaaccagtctgctccctggc

SEQ ID NO: 1013113 - DNA, 25 bp, Homo sapien
catgggaggttagctctgagttcca

SEQ ID NO: 1013114 - DNA, 25 bp, Homo sapien
gctctgagttccaagaataaagtaa

SEQ ID NO: 1013115 - DNA, 25 bp, Homo sapien
agctctgagttccaagaataaagta

SEQ ID NO: 1013116 - DNA, 25 bp, Homo sapien
cagcccatgcaccaggttgggtttt

SEQ ID NO: 1013117 - DNA, 25 bp, Homo sapien
tccaagtgtacaaacaggttgggtg

SEQ ID NO: 1013118 - DNA, 25 bp, Homo sapien
gttgggtggaggtttcaggtagaca

SEQ ID NO: 1013119 - DNA, 25 bp, Homo sapien
gcccatgcaccaggttgggttttcc

SEQ ID NO: 1013120 - DNA, 25 bp, Homo sapien
gcatggactcagaactgttgggaat

SEQ ID NO: 1013121 - DNA, 25 bp, Homo sapien
ggcatggactcagaactgttgggaa

SEQ ID NO: 1013122 - DNA, 25 bp, Homo sapien
tgggaatgttacaagttccctggcc

SEQ ID NO: 1013123 - DNA, 25 bp, Homo sapien
tgttgggaatgttacaagttccctg

SEQ ID NO: 1013124 - DNA, 25 bp, Homo sapien
aggaggatcctgcaaaatccagtat

SEQ ID NO: 1013125 - DNA, 25 bp, Homo sapien
ggcaaaatcagctgacgttggtgtc

SEQ ID NO: 1013126 - DNA, 25 bp, Homo sapien
tctgaatgaatcacggaggaggatc

SEQ ID NO: 1013127 - DNA, 25 bp, Homo sapien
ggtgtcagctcagccacggactctt

SEQ ID NO: 1013128 - DNA, 25 bp, Homo sapien
tacttagctactcccttaaggggca

SEQ ID NO: 1013129 - DNA, 25 bp, Homo sapien
gtcaaacatgctaagttgacagcat

SEQ ID NO: 1013130 - DNA, 25 bp, Homo sapien
ttacttttgtcaaacatgctaagtt

SEQ ID NO: 1013131 - DNA, 25 bp, Homo sapien
gcatttgctaaaatacttagctact

SEQ ID NO: 1013132 - DNA, 25 bp, Homo sapien
tgcacatgtgaagggttgtcagtga

SEQ ID NO: 1013133 - DNA, 25 bp, Homo sapien
aatgggcaaagttcagcacagtctg

SEQ ID NO: 1013134 - DNA, 25 bp, Homo sapien
catctccagaatggcgtgcacatgt

SEQ ID NO: 1013135 - DNA, 25 bp, Homo sapien
gttcaaatgtttatgacccatctcc

SEQ ID NO: 1013136 - DNA, 25 bp, Homo sapien
tttgctgtatgccttgagaagcatc

SEQ ID NO: 1013137 - DNA, 25 bp, Homo sapien
gctgtatgccttgagaagcatccct

SEQ ID NO: 1013138 - DNA, 25 bp, Homo sapien
tgtatgccttgagaagcatcccttt

SEQ ID NO: 1013139 - DNA, 25 bp, Homo sapien
tatgccttgagaagcatcccttttt

SEQ ID NO: 1013140 - DNA, 25 bp, Homo sapien
ttttgacttagttcctgagatagga

SEQ ID NO: 1013141 - DNA, 25 bp, Homo sapien
tttgacttagttcctgagataggaa

SEQ ID NO: 1013142 - DNA, 25 bp, Homo sapien
ttatgaggcagtaaatagcccctgt

SEQ ID NO: 1013143 - DNA, 25 bp, Homo sapien
tctgacatcatagtccacggcactt

SEQ ID NO: 1013144 - DNA, 25 bp, Homo sapien
cacggcacttaaaaacagcgggctg

SEQ ID NO: 1013145 - DNA, 25 bp, Homo sapien
tagcccctgtgtgcgtaatgaattc

SEQ ID NO: 1013146 - DNA, 25 bp, Homo sapien
gaaaggctggcaaatgttccctccc

SEQ ID NO: 1013147 - DNA, 25 bp, Homo sapien
aggctggcaaatgttccctccccca

SEQ ID NO: 1013148 - DNA, 25 bp, Homo sapien
cagaaaggctggcaaatgttccctc

SEQ ID NO: 1013149 - DNA, 25 bp, Homo sapien
actgcaggccgggtacacgcagtgg

SEQ ID NO: 1013150 - DNA, 25 bp, Homo sapien
ggacagaaagacagcgatttttaaa

SEQ ID NO: 1013151 - DNA, 25 bp, Homo sapien
tcgtctttcggtggctacagggaca

SEQ ID NO: 1013152 - DNA, 25 bp, Homo sapien
cgtctttcggtggctacagggacag

SEQ ID NO: 1013153 - DNA, 25 bp, Homo sapien
gtctttcggtggctacagggacaga

SEQ ID NO: 1013154 - DNA, 25 bp, Homo sapien
ggacgcaagcgtctttaggctttgc

SEQ ID NO: 1013155 - DNA, 25 bp, Homo sapien
cagttccgttatttggttctctgaa

SEQ ID NO: 1013156 - DNA, 25 bp, Homo sapien
catttgtaagttgtcccggagctcc

SEQ ID NO: 1013157 - DNA, 25 bp, Homo sapien
ggctttgctgaagaaacgatcattc

SEQ ID NO: 1013158 - DNA, 25 bp, Homo sapien
ccgcaacccctgcagccgaggccgg

SEQ ID NO: 1013159 - DNA, 25 bp, Homo sapien
gccggtgtgtgacccgcaggcgggc

SEQ ID NO: 1013160 - DNA, 25 bp, Homo sapien
aggccggccggtgtgtgacccgcag

SEQ ID NO: 1013161 - DNA, 25 bp, Homo sapien
cgaggccggccggtgtgtgacccgc

SEQ ID NO: 1013162 - DNA, 25 bp, Homo sapien
tttcccaagaaatcgccccatggca

SEQ ID NO: 1013163 - DNA, 25 bp, Homo sapien
ccctgactccaaggcgctgagagcc

SEQ ID NO: 1013164 - DNA, 25 bp, Homo sapien
aaggcgctgagagcccacgggcctt

SEQ ID NO: 1013165 - DNA, 25 bp, Homo sapien
gctgagagcccacgggcctttctgc

SEQ ID NO: 1013166 - DNA, 25 bp, Homo sapien
gcgggagggagggacacaagccctc

SEQ ID NO: 1013167 - DNA, 25 bp, Homo sapien
gagggagggacacaagccctccgcg

SEQ ID NO: 1013168 - DNA, 25 bp, Homo sapien
ggagggagggacacaagccctccgc

SEQ ID NO: 1013169 - DNA, 25 bp, Homo sapien
ggagggacacaagccctccgcggaa

SEQ ID NO: 1013170 - DNA, 25 bp, Homo sapien
aatataaatcagctctgacgtccaa

SEQ ID NO: 1013171 - DNA, 25 bp, Homo sapien
ttcagaaaaggaaacgtagctcttc

SEQ ID NO: 1013172 - DNA, 25 bp, Homo sapien
ttcctggcgcatcaaaactcccctc

SEQ ID NO: 1013173 - DNA, 25 bp, Homo sapien
ctccccgccgagctcaggatatggg

SEQ ID NO: 1013174 - DNA, 25 bp, Homo sapien
tgtttatttggatagagtcttccgc

SEQ ID NO: 1013175 - DNA, 25 bp, Homo sapien
tgggcacgactcgatgacccactgg

SEQ ID NO: 1013176 - DNA, 25 bp, Homo sapien
gctctccaaaggcttgtgtcccggt

SEQ ID NO: 1013177 - DNA, 25 bp, Homo sapien
gtcagggctctttttatagccacct

SEQ ID NO: 1013178 - DNA, 25 bp, Homo sapien
agaatacgatggaagctatggagcc

SEQ ID NO: 1013179 - DNA, 25 bp, Homo sapien
tccaggcaggaccagtgataacctt

SEQ ID NO: 1013180 - DNA, 25 bp, Homo sapien
gataaccttctatactagtagctcc

SEQ ID NO: 1013181 - DNA, 25 bp, Homo sapien
tggaagctatggagccagtttccag

SEQ ID NO: 1013182 - DNA, 25 bp, Homo sapien
gagcacccctggtacctacatggga

SEQ ID NO: 1013183 - DNA, 25 bp, Homo sapien
gctgaacaggcgtcgacagcttcct

SEQ ID NO: 1013184 - DNA, 25 bp, Homo sapien
catgggaatgtgtccgaaaatggct

SEQ ID NO: 1013185 - DNA, 25 bp, Homo sapien
gagaccgagtgtcagtttactgccc

SEQ ID NO: 1013186 - DNA, 25 bp, Homo sapien
ggtaacgtgccaatcctctctcttt

SEQ ID NO: 1013187 - DNA, 25 bp, Homo sapien
tgccagacgcccaaaggtaacgtgc

SEQ ID NO: 1013188 - DNA, 25 bp, Homo sapien
gccgctggcgatcgtggacgttttc

SEQ ID NO: 1013189 - DNA, 25 bp, Homo sapien
tgcaggctccccgacaattgttagg

SEQ ID NO: 1013190 - DNA, 25 bp, Homo sapien
tcgcaaaactcgaccacctctgact

SEQ ID NO: 1013191 - DNA, 25 bp, Homo sapien
cctctttccaattgagggatcacag

SEQ ID NO: 1013192 - DNA, 25 bp, Homo sapien
ggatcacagactcactccggttctg

SEQ ID NO: 1013193 - DNA, 25 bp, Homo sapien
tcctcgctcttcattcctctcgcgg

SEQ ID NO: 1013194 - DNA, 25 bp, Homo sapien
ctgccttgcgcaacggcctcccagg

SEQ ID NO: 1013195 - DNA, 25 bp, Homo sapien
tgcgcaacggcctcccaggccgcgg

SEQ ID NO: 1013196 - DNA, 25 bp, Homo sapien
gggccctgccttgcgcaacggcctc

SEQ ID NO: 1013197 - DNA, 25 bp, Homo sapien
cgggccctgccttgcgcaacggcct

SEQ ID NO: 1013198 - DNA, 25 bp, Homo sapien
gggcgggaggcaacgcccggcgcat

SEQ ID NO: 1013199 - DNA, 25 bp, Homo sapien
cgggcgggaggcaacgcccggcgca

SEQ ID NO: 1013200 - DNA, 25 bp, Homo sapien
agaagccctgcgagcgccctagccc

SEQ ID NO: 1013201 - DNA, 25 bp, Homo sapien
gggcgggaagcggaggcgccggagc

SEQ ID NO: 1013202 - DNA, 25 bp, Homo sapien
cgccggagcggggtcggcccagaag

SEQ ID NO: 1013203 - DNA, 25 bp, Homo sapien
ccgggccagcgcttcggcgtcgcct

SEQ ID NO: 1013204 - DNA, 25 bp, Homo sapien
ggaccgggctgcacgcgcggcggag

SEQ ID NO: 1013205 - DNA, 25 bp, Homo sapien
gcccgcgctcttgcaggcagccgag

SEQ ID NO: 1013206 - DNA, 25 bp, Homo sapien
gcgggctcatcagggcggcctggag

SEQ ID NO: 1013207 - DNA, 25 bp, Homo sapien
cgctggccgaattggaggaggacga

SEQ ID NO: 1013208 - DNA, 25 bp, Homo sapien
ctggccgggtcgatggtccagtagt

SEQ ID NO: 1013209 - DNA, 25 bp, Homo sapien
acatgaactcgctggccgggtcgat

SEQ ID NO: 1013210 - DNA, 25 bp, Homo sapien
atggtccagtagtggcccttgccgg

SEQ ID NO: 1013211 - DNA, 25 bp, Homo sapien
tcctcgaacatgaactcgctggccg

SEQ ID NO: 1013212 - DNA, 25 bp, Homo sapien
ggggcgcctggaagtcgaagccctg

SEQ ID NO: 1013213 - DNA, 25 bp, Homo sapien
agcagcgacgccccgaagcccaagc

SEQ ID NO: 1013214 - DNA, 25 bp, Homo sapien
gggcgcctggaagtcgaagccctgg

SEQ ID NO: 1013215 - DNA, 25 bp, Homo sapien
gggcagcagcgacgccccgaagccc

SEQ ID NO: 1013216 - DNA, 25 bp, Homo sapien
cggcgtcgtagcccgcgggcatcat

SEQ ID NO: 1013217 - DNA, 25 bp, Homo sapien
gctgtggcagccgagcggcgccgac

SEQ ID NO: 1013218 - DNA, 25 bp, Homo sapien
ggcatcatgtcgaggccgccgtagc

SEQ ID NO: 1013219 - DNA, 25 bp, Homo sapien
tagcccgcgggcatcatgtcgaggc

SEQ ID NO: 1013220 - DNA, 25 bp, Homo sapien
gctggccatgtaggtggaacccggg

SEQ ID NO: 1013221 - DNA, 25 bp, Homo sapien
ctggccatgtaggtggaacccgggt

SEQ ID NO: 1013222 - DNA, 25 bp, Homo sapien
ctgtccggcccgtagtcgccgccgc

SEQ ID NO: 1013223 - DNA, 25 bp, Homo sapien
ggcccgtagtcgccgccgccgccgc

SEQ ID NO: 1013224 - DNA, 25 bp, Homo sapien
tccggcccgtagtcgccgccgccgc

SEQ ID NO: 1013225 - DNA, 25 bp, Homo sapien
gccgccgccgccgcccccggccgca

SEQ ID NO: 1013226 - DNA, 25 bp, Homo sapien
cggggacgagggtaccgggctgctg

SEQ ID NO: 1013227 - DNA, 25 bp, Homo sapien
tccagtgcgccgcagggctcgtgta

SEQ ID NO: 1013228 - DNA, 25 bp, Homo sapien
aggcgccaggcgagctccagtgcgc

SEQ ID NO: 1013229 - DNA, 25 bp, Homo sapien
ttgaggtaaggcgaggcgccaggcg

SEQ ID NO: 1013230 - DNA, 25 bp, Homo sapien
tgtagggcgagtggcattcgatggc

SEQ ID NO: 1013231 - DNA, 25 bp, Homo sapien
ctgagaggtcctcgcgagcgttctg

SEQ ID NO: 1013232 - DNA, 25 bp, Homo sapien
tgctggagtgcaggcctgccgaggc

SEQ ID NO: 1013233 - DNA, 25 bp, Homo sapien
tgcaagtagctctgctccagcgagt

SEQ ID NO: 1013234 - DNA, 25 bp, Homo sapien
tcgcgagcgttctggtgcaagtagc

SEQ ID NO: 1013235 - DNA, 25 bp, Homo sapien
tgctcccacgaataagatgccggct

SEQ ID NO: 1013236 - DNA, 25 bp, Homo sapien
ggacaaaaggaactagacacagctt

SEQ ID NO: 1013237 - DNA, 25 bp, Homo sapien
caagttccccaaaggccagatgcct

SEQ ID NO: 1013238 - DNA, 25 bp, Homo sapien
gactctgaacgggagacctgcagtc

SEQ ID NO: 1013239 - DNA, 25 bp, Homo sapien
ctaagcctcagagtccgggttcaag

SEQ ID NO: 1013240 - DNA, 25 bp, Homo sapien
gcctcagagtccgggttcaagttga

SEQ ID NO: 1013241 - DNA, 25 bp, Homo sapien
aagcctcagagtccgggttcaagtt

SEQ ID NO: 1013242 - DNA, 25 bp, Homo sapien
tcagagtccgggttcaagttgagtg

SEQ ID NO: 1013243 - DNA, 25 bp, Homo sapien
aagtgctcgcagggcttaatggaga

SEQ ID NO: 1013244 - DNA, 25 bp, Homo sapien
cttaatggagaactccagggcagcc

SEQ ID NO: 1013245 - DNA, 25 bp, Homo sapien
agctccttcctgaagtgctcgcagg

SEQ ID NO: 1013246 - DNA, 25 bp, Homo sapien
gcggccgtcggcgctttgatgtgct

SEQ ID NO: 1013247 - DNA, 25 bp, Homo sapien
tcacatgacgcagggcttaatatcc

SEQ ID NO: 1013248 - DNA, 25 bp, Homo sapien
tacgacccgctagctgagggatgga

SEQ ID NO: 1013249 - DNA, 25 bp, Homo sapien
gaaatcttttctgtcacacactgga

SEQ ID NO: 1013250 - DNA, 25 bp, Homo sapien
taatatcctgacagacgctctggtg

SEQ ID NO: 1013251 - DNA, 25 bp, Homo sapien
gagagcggccatcgcttggcctctt

SEQ ID NO: 1013252 - DNA, 25 bp, Homo sapien
ggagagagcggccatcgcttggcct

SEQ ID NO: 1013253 - DNA, 25 bp, Homo sapien
gagcggccatcgcttggcctctttc

SEQ ID NO: 1013254 - DNA, 25 bp, Homo sapien
gagaggagagagcggccatcgcttg

SEQ ID NO: 1013255 - DNA, 25 bp, Homo sapien
gaccaacgcgatcctgggcattctg

SEQ ID NO: 1013256 - DNA, 25 bp, Homo sapien
taggcaaataacagtgaccaacgcg

SEQ ID NO: 1013257 - DNA, 25 bp, Homo sapien
gctatccgcgtgcatgtgacttgaa

SEQ ID NO: 1013258 - DNA, 25 bp, Homo sapien
ggtgtgtggcttactgctatccgcg

SEQ ID NO: 1013259 - DNA, 25 bp, Homo sapien
ctcccactcagctaggcaacaagaa

SEQ ID NO: 1013260 - DNA, 25 bp, Homo sapien
acacgttgatgccttacgcatggca

SEQ ID NO: 1013261 - DNA, 25 bp, Homo sapien
ttactgaaggcaacgaagatcccac

SEQ ID NO: 1013262 - DNA, 25 bp, Homo sapien
tacaagcaaagtgtgagtatacacg

SEQ ID NO: 1013263 - DNA, 25 bp, Homo sapien
tataaattacgaccatgccggctgc

SEQ ID NO: 1013264 - DNA, 25 bp, Homo sapien
caagttacgttcaagtgtttaggat

SEQ ID NO: 1013265 - DNA, 25 bp, Homo sapien
taaacacagcactgtggtcggagca

SEQ ID NO: 1013266 - DNA, 25 bp, Homo sapien
cggagcaaactctgaaactgacttc

SEQ ID NO: 1013267 - DNA, 25 bp, Homo sapien
ctttcagctcgtgggttggcactgg

SEQ ID NO: 1013268 - DNA, 25 bp, Homo sapien
gtccatgggtctttcagctcgtggg

SEQ ID NO: 1013269 - DNA, 25 bp, Homo sapien
cagaattcaggccaagccaagtaaa

SEQ ID NO: 1013270 - DNA, 25 bp, Homo sapien
ttcaggccaagccaagtaaaacaga

SEQ ID NO: 1013271 - DNA, 25 bp, Homo sapien
cactgctgctcagttgctccttggc

SEQ ID NO: 1013272 - DNA, 25 bp, Homo sapien
aggactcccagcccggcgacctgcc

SEQ ID NO: 1013273 - DNA, 25 bp, Homo sapien
cagagattcacatccgggtggagga

SEQ ID NO: 1013274 - DNA, 25 bp, Homo sapien
gctgctcagttgctccttggcagag

SEQ ID NO: 1013275 - DNA, 25 bp, Homo sapien
ttgtgttattcccagggcacagtaa

SEQ ID NO: 1013276 - DNA, 25 bp, Homo sapien
tgtgggcttcactgatctggcggcc

SEQ ID NO: 1013277 - DNA, 25 bp, Homo sapien
gtgggcttcactgatctggcggcca

SEQ ID NO: 1013278 - DNA, 25 bp, Homo sapien
tgggcttcactgatctggcggccag

SEQ ID NO: 1013279 - DNA, 25 bp, Homo sapien
gaaacatcatttcatcgagtcccaa

SEQ ID NO: 1013280 - DNA, 25 bp, Homo sapien
tgaagtcggcatgcttcccacagga

SEQ ID NO: 1013281 - DNA, 25 bp, Homo sapien
aaatgtacagtaaacccagagagct

SEQ ID NO: 1013282 - DNA, 25 bp, Homo sapien
tgtggaatgacgataaactagctgc

SEQ ID NO: 1013283 - DNA, 25 bp, Homo sapien
ggaagcagctgcgttacgaacatct

SEQ ID NO: 1013284 - DNA, 25 bp, Homo sapien
taagaatgccccgaagtgcgaggtg

SEQ ID NO: 1013285 - DNA, 25 bp, Homo sapien
gatgagccgtcacttgctgggattc

SEQ ID NO: 1013286 - DNA, 25 bp, Homo sapien
gcggcttctagcgttgccagatgta

SEQ ID NO: 1013287 - DNA, 25 bp, Homo sapien
aaggctctcccgctgaagaaaccgt

SEQ ID NO: 1013288 - DNA, 25 bp, Homo sapien
gaaaccgtctgcctttactgccaca

SEQ ID NO: 1013289 - DNA, 25 bp, Homo sapien
tttactgccacagacgggagtcctg

SEQ ID NO: 1013290 - DNA, 25 bp, Homo sapien
gagtggtgcacgtcacagtgccagc

SEQ ID NO: 1013291 - DNA, 25 bp, Homo sapien
gcttcacgtttcagtccttcacatg

SEQ ID NO: 1013292 - DNA, 25 bp, Homo sapien
tggccaggaaacagcccggggagga

SEQ ID NO: 1013293 - DNA, 25 bp, Homo sapien
cctaattctcgcctccattcatgaa

SEQ ID NO: 1013294 - DNA, 25 bp, Homo sapien
gaaaaccacacagcctaattctcgc

SEQ ID NO: 1013295 - DNA, 25 bp, Homo sapien
tggtctctggcagccctgttaggat

SEQ ID NO: 1013296 - DNA, 25 bp, Homo sapien
cagccctgttaggatcatattgtga

SEQ ID NO: 1013297 - DNA, 25 bp, Homo sapien
ccctgagaagcggtcatctgcatgg

SEQ ID NO: 1013298 - DNA, 25 bp, Homo sapien
tgagaagcggtcatctgcatggtct

SEQ ID NO: 1013299 - DNA, 25 bp, Homo sapien
atggaagggactcgaatgttgccga

SEQ ID NO: 1013300 - DNA, 25 bp, Homo sapien
tttcttatagctccatagctgtgct

SEQ ID NO: 1013301 - DNA, 25 bp, Homo sapien
gactcgaatgttgccgatgttcagc

SEQ ID NO: 1013302 - DNA, 25 bp, Homo sapien
atgttgccgatgttcagctgctgtg

SEQ ID NO: 1013303 - DNA, 25 bp, Homo sapien
gggtttttcctgtcatggatgccac

SEQ ID NO: 1013304 - DNA, 25 bp, Homo sapien
cttcagcgcctgggtttttcctgtc

SEQ ID NO: 1013305 - DNA, 25 bp, Homo sapien
tgggtttttcctgtcatggatgcca

SEQ ID NO: 1013306 - DNA, 25 bp, Homo sapien
agtcttcagcgcctgggtttttcct

SEQ ID NO: 1013307 - DNA, 25 bp, Homo sapien
ggcggcgccccgtgcattcccccag

SEQ ID NO: 1013308 - DNA, 25 bp, Homo sapien
gggcggcgccccgtgcattccccca

SEQ ID NO: 1013309 - DNA, 25 bp, Homo sapien
cggcgccccgtgcattcccccagca

SEQ ID NO: 1013310 - DNA, 25 bp, Homo sapien
ggcacatcacgtctgcaatgcagtt

SEQ ID NO: 1013311 - DNA, 25 bp, Homo sapien
gacatggaggtttgggtgtgtgaag

SEQ ID NO: 1013312 - DNA, 25 bp, Homo sapien
ctgtgtgaggcacatcacgtctgca

SEQ ID NO: 1013313 - DNA, 25 bp, Homo sapien
tcacgtctgcaatgcagttggagct

SEQ ID NO: 1013314 - DNA, 25 bp, Homo sapien
ttgcagagttgtgaggagctgtctc

SEQ ID NO: 1013315 - DNA, 25 bp, Homo sapien
ttctggaaggatcctagagttgcag

SEQ ID NO: 1013316 - DNA, 25 bp, Homo sapien
cagagttgtgaggagctgtctcttg

SEQ ID NO: 1013317 - DNA, 25 bp, Homo sapien
ggaaggatcctagagttgcagagtt

SEQ ID NO: 1013318 - DNA, 25 bp, Homo sapien
caatgaagtcttggggttcatttgt

SEQ ID NO: 1013319 - DNA, 25 bp, Homo sapien
tggggttcatttgttcctgctccat

SEQ ID NO: 1013320 - DNA, 25 bp, Homo sapien
tgtgcagctagacaatgaagtcttg

SEQ ID NO: 1013321 - DNA, 25 bp, Homo sapien
cttttgtgcagctagacaatgaagt

SEQ ID NO: 1013322 - DNA, 25 bp, Homo sapien
aaatggagaaaccttctgagtagat

SEQ ID NO: 1013323 - DNA, 25 bp, Homo sapien
cttctgagtagattaagggaggaca

SEQ ID NO: 1013324 - DNA, 25 bp, Homo sapien
ggagaaaccttctgagtagattaag

SEQ ID NO: 1013325 - DNA, 25 bp, Homo sapien
gaaaccttctgagtagattaaggga

SEQ ID NO: 1013326 - DNA, 25 bp, Homo sapien
ggcaagccagcaaggaaaagaaggc

SEQ ID NO: 1013327 - DNA, 25 bp, Homo sapien
aagccagcaaggaaaagaaggccat

SEQ ID NO: 1013328 - DNA, 25 bp, Homo sapien
tgggggcaagccagcaaggaaaaga

SEQ ID NO: 1013329 - DNA, 25 bp, Homo sapien
gtgggggcaagccagcaaggaaaag

SEQ ID NO: 1013330 - DNA, 25 bp, Homo sapien
tcaggttctgaacagtagctggcca

SEQ ID NO: 1013331 - DNA, 25 bp, Homo sapien
aggttctgaacagtagctggccaga

SEQ ID NO: 1013332 - DNA, 25 bp, Homo sapien
ttcaggttctgaacagtagctggcc

SEQ ID NO: 1013333 - DNA, 25 bp, Homo sapien
caggttctgaacagtagctggccag

SEQ ID NO: 1013334 - DNA, 25 bp, Homo sapien
ctgcccctgagtgcctgccatcatc

SEQ ID NO: 1013335 - DNA, 25 bp, Homo sapien
gtgcctgccatcatcccagaacacc

SEQ ID NO: 1013336 - DNA, 25 bp, Homo sapien
gcctgccatcatcccagaacaccgg

SEQ ID NO: 1013337 - DNA, 25 bp, Homo sapien
tgccatcatcccagaacaccggcat

SEQ ID NO: 1013338 - DNA, 25 bp, Homo sapien
gtgtgggatgcgacacgattagatc

SEQ ID NO: 1013339 - DNA, 25 bp, Homo sapien
tgggatgcgacacgattagatctgg

SEQ ID NO: 1013340 - DNA, 25 bp, Homo sapien
ctggtgtgggatgcgacacgattag

SEQ ID NO: 1013341 - DNA, 25 bp, Homo sapien
gatgcgacacgattagatctgggtt

SEQ ID NO: 1013342 - DNA, 25 bp, Homo sapien
catgtgagaacgatgacaaccattc

SEQ ID NO: 1013343 - DNA, 25 bp, Homo sapien
tcatgtgcctgggccccgatatgct

SEQ ID NO: 1013344 - DNA, 25 bp, Homo sapien
cctgggccccgatatgcttttggag

SEQ ID NO: 1013345 - DNA, 25 bp, Homo sapien
gggcttcccatgtgagaacgatgac

SEQ ID NO: 1013346 - DNA, 25 bp, Homo sapien
ctgagggtggggtgtagaaagtgag

SEQ ID NO: 1013347 - DNA, 25 bp, Homo sapien
aaagtgagacacccgagcacagctg

SEQ ID NO: 1013348 - DNA, 25 bp, Homo sapien
agtgagacacccgagcacagctggg

SEQ ID NO: 1013349 - DNA, 25 bp, Homo sapien
tgagacacccgagcacagctgggct

SEQ ID NO: 1013350 - DNA, 25 bp, Homo sapien
ccagttaactgcaagggtccagtga

SEQ ID NO: 1013351 - DNA, 25 bp, Homo sapien
gcagtgggacacttgacctccgtaa

SEQ ID NO: 1013352 - DNA, 25 bp, Homo sapien
ttatgagtcggcttggtcccaggtc

SEQ ID NO: 1013353 - DNA, 25 bp, Homo sapien
gggccgtttcccactagtattatga

SEQ ID NO: 1013354 - DNA, 25 bp, Homo sapien
tccttgtctcttaggacggaacatg

SEQ ID NO: 1013355 - DNA, 25 bp, Homo sapien
tggtttttccatgtctcggtctcct

SEQ ID NO: 1013356 - DNA, 25 bp, Homo sapien
gacggaacatgctgctggtttttcc

SEQ ID NO: 1013357 - DNA, 25 bp, Homo sapien
ttcaatcatgggtgtagcagcccat

SEQ ID NO: 1013358 - DNA, 25 bp, Homo sapien
ggcttcaatacaggccctcttgtgg

SEQ ID NO: 1013359 - DNA, 25 bp, Homo sapien
cagcccataggcttcaatacaggcc

SEQ ID NO: 1013360 - DNA, 25 bp, Homo sapien
tgctgctactgggattcccagccca

SEQ ID NO: 1013361 - DNA, 25 bp, Homo sapien
ccctcttgtggttttcatgcaagtc

SEQ ID NO: 1013362 - DNA, 25 bp, Homo sapien
atgggcaccgcgcactgcagggcag

SEQ ID NO: 1013363 - DNA, 25 bp, Homo sapien
gcctggtggcccgctgctcttcatg

SEQ ID NO: 1013364 - DNA, 25 bp, Homo sapien
gtgcagatacctgatgggtgtcacc

SEQ ID NO: 1013365 - DNA, 25 bp, Homo sapien
tccaaagcaggctggttcattcctt

SEQ ID NO: 1013366 - DNA, 25 bp, Homo sapien
tttgttggactgttgtttcaaagtg

SEQ ID NO: 1013367 - DNA, 25 bp, Homo sapien
aagtacatatacaatttgcaattgc

SEQ ID NO: 1013368 - DNA, 25 bp, Homo sapien
cggaaagtaccagtgttcagatttg

SEQ ID NO: 1013369 - DNA, 25 bp, Homo sapien
tccatgctgctatgaggccagatgt

SEQ ID NO: 1013370 - DNA, 25 bp, Homo sapien
ggattcgagaagtcctgtggaagta

SEQ ID NO: 1013371 - DNA, 25 bp, Homo sapien
cagaaactacagtggaggcgtcaac

SEQ ID NO: 1013372 - DNA, 25 bp, Homo sapien
tgtggaagtatttgtccctcctgtg

SEQ ID NO: 1013373 - DNA, 25 bp, Homo sapien
cacagcagtaatgtacactgtacag

SEQ ID NO: 1013374 - DNA, 25 bp, Homo sapien
tctgctcacagcagtaatgtacact

SEQ ID NO: 1013375 - DNA, 25 bp, Homo sapien
gacagtcgaagctgctgaagccctg

SEQ ID NO: 1013376 - DNA, 25 bp, Homo sapien
tgtacagataagacagtcgaagctg

SEQ ID NO: 1013377 - DNA, 25 bp, Homo sapien
ccatgaaccagctggatctgctcat

SEQ ID NO: 1013378 - DNA, 25 bp, Homo sapien
cccatgaaccagctggatctgctca

SEQ ID NO: 1013379 - DNA, 25 bp, Homo sapien
ctgcatgagggacccatgaaccagc

SEQ ID NO: 1013380 - DNA, 25 bp, Homo sapien
atgagggacccatgaaccagctgga

SEQ ID NO: 1013381 - DNA, 25 bp, Homo sapien
cagccccgggatgaacgtggcaacg

SEQ ID NO: 1013382 - DNA, 25 bp, Homo sapien
ctccagccccgggatgaacgtggca

SEQ ID NO: 1013383 - DNA, 25 bp, Homo sapien
gccccgggatgaacgtggcaacgtc

SEQ ID NO: 1013384 - DNA, 25 bp, Homo sapien
ccccgggatgaacgtggcaacgtct

SEQ ID NO: 1013385 - DNA, 25 bp, Homo sapien
tgcgtgagtgtgtgttgaccgaccc

SEQ ID NO: 1013386 - DNA, 25 bp, Homo sapien
ttgaccgaccccacggcgtgtgtct

SEQ ID NO: 1013387 - DNA, 25 bp, Homo sapien
taaaattaaagtaggcgttgccagc

SEQ ID NO: 1013388 - DNA, 25 bp, Homo sapien
tccttccgggccttggagcgtgtgc

SEQ ID NO: 1013389 - DNA, 25 bp, Homo sapien
actgatcagcacggggcttttgacg

SEQ ID NO: 1013390 - DNA, 25 bp, Homo sapien
actactgatcagcacggggcttttg

SEQ ID NO: 1013391 - DNA, 25 bp, Homo sapien
ctactgatcagcacggggcttttga

SEQ ID NO: 1013392 - DNA, 25 bp, Homo sapien
cgaaagagtggctcacgttcattcc

SEQ ID NO: 1013393 - DNA, 25 bp, Homo sapien
gttcattcccggtgagcgcccagga

SEQ ID NO: 1013394 - DNA, 25 bp, Homo sapien
gtgtgcgaaagagtggctcacgttc

SEQ ID NO: 1013395 - DNA, 25 bp, Homo sapien
gagtggctcacgttcattcccggtg

SEQ ID NO: 1013396 - DNA, 25 bp, Homo sapien
acggaccaccaggacatcacttcgg

SEQ ID NO: 1013397 - DNA, 25 bp, Homo sapien
tgtctgctggactttcctgtgtgct

SEQ ID NO: 1013398 - DNA, 25 bp, Homo sapien
ttgatgatgtttgtctgctggactt

SEQ ID NO: 1013399 - DNA, 25 bp, Homo sapien
ccgagagtggctgacgcagagtggc

SEQ ID NO: 1013400 - DNA, 25 bp, Homo sapien
ttatgcagctgacagaatgcccgac

SEQ ID NO: 1013401 - DNA, 25 bp, Homo sapien
aggaaggggcctgtgcaagtcgctg

SEQ ID NO: 1013402 - DNA, 25 bp, Homo sapien
gaaggggcctgtgcaagtcgctgat

SEQ ID NO: 1013403 - DNA, 25 bp, Homo sapien
ctgtgcaagtcgctgatgtcctctt

SEQ ID NO: 1013404 - DNA, 25 bp, Homo sapien
gggcctgtgcaagtcgctgatgtcc

SEQ ID NO: 1013405 - DNA, 25 bp, Homo sapien
cagttgatctaagtttggcatgggc

SEQ ID NO: 1013406 - DNA, 25 bp, Homo sapien
ggcacagcttctaagaaaacgaatt

SEQ ID NO: 1013407 - DNA, 25 bp, Homo sapien
gcatgggctgaaggccacacttgga

SEQ ID NO: 1013408 - DNA, 25 bp, Homo sapien
cacttggaacggctgcttggactgt

SEQ ID NO: 1013409 - DNA, 25 bp, Homo sapien
aatgattataccagtggatccaatc

SEQ ID NO: 1013410 - DNA, 25 bp, Homo sapien
acatcaagtcttgaaaatgattata

SEQ ID NO: 1013411 - DNA, 25 bp, Homo sapien
cttggtggcattgtaagtagttaaa

SEQ ID NO: 1013412 - DNA, 25 bp, Homo sapien
caatcatctcgctggtggaaattca

SEQ ID NO: 1013413 - DNA, 25 bp, Homo sapien
ctgcagaggaatgtcagacgggtct

SEQ ID NO: 1013414 - DNA, 25 bp, Homo sapien
gcaagtcccacagcggctgcagagg

SEQ ID NO: 1013415 - DNA, 25 bp, Homo sapien
acagcccggctgtcggctgctgtga

SEQ ID NO: 1013416 - DNA, 25 bp, Homo sapien
gacgggtctacagagacagcccggc

SEQ ID NO: 1013417 - DNA, 25 bp, Homo sapien
tcccggtttgtaggctccatcagct

SEQ ID NO: 1013418 - DNA, 25 bp, Homo sapien
gatgttcccggtttgtaggctccat

SEQ ID NO: 1013419 - DNA, 25 bp, Homo sapien
tgttcccggtttgtaggctccatca

SEQ ID NO: 1013420 - DNA, 25 bp, Homo sapien
gttcccggtttgtaggctccatcag

SEQ ID NO: 1013421 - DNA, 25 bp, Homo sapien
ttttccaatccacggagaggagcag

SEQ ID NO: 1013422 - DNA, 25 bp, Homo sapien
caaaattccctgaaggccaaacacg

SEQ ID NO: 1013423 - DNA, 25 bp, Homo sapien
caggaaaccgggactttcaatggtg

SEQ ID NO: 1013424 - DNA, 25 bp, Homo sapien
ggtggcgactaattcacctttttca

SEQ ID NO: 1013425 - DNA, 25 bp, Homo sapien
tttgtggtcagggacagtggcttca

SEQ ID NO: 1013426 - DNA, 25 bp, Homo sapien
ctatcagccaaaagctttgtggtca

SEQ ID NO: 1013427 - DNA, 25 bp, Homo sapien
ctttgtggtcagggacagtggcttc

SEQ ID NO: 1013428 - DNA, 25 bp, Homo sapien
tcagccaaaagctttgtggtcaggg

SEQ ID NO: 1013429 - DNA, 25 bp, Homo sapien
ttgactaacgtgtgtcccagctccc

SEQ ID NO: 1013430 - DNA, 25 bp, Homo sapien
tagtggctccacatggcggtgattc

SEQ ID NO: 1013431 - DNA, 25 bp, Homo sapien
gtgattcctccctcgtacaccttga

SEQ ID NO: 1013432 - DNA, 25 bp, Homo sapien
gagtactgtcactgagctccgggtg

SEQ ID NO: 1013433 - DNA, 25 bp, Homo sapien
gagtattccatgctaaagccaggag

SEQ ID NO: 1013434 - DNA, 25 bp, Homo sapien
ggtttcacatggatcctagcatttc

SEQ ID NO: 1013435 - DNA, 25 bp, Homo sapien
cagctacgttctgcagagtattcca

SEQ ID NO: 1013436 - DNA, 25 bp, Homo sapien
caggcatgtgaaacactcggttctt

SEQ ID NO: 1013437 - DNA, 25 bp, Homo sapien
cccccagtagggtgtcagaatgtgg

SEQ ID NO: 1013438 - DNA, 25 bp, Homo sapien
atgaaagcccccagtagggtgtcag

SEQ ID NO: 1013439 - DNA, 25 bp, Homo sapien
cttggcgggattgcccgagcctcag

SEQ ID NO: 1013440 - DNA, 25 bp, Homo sapien
gatacttggcgggattgcccgagcc

SEQ ID NO: 1013441 - DNA, 25 bp, Homo sapien
ggcactgcaggctctcgcacctggt

SEQ ID NO: 1013442 - DNA, 25 bp, Homo sapien
tcatttttcccttgggggcactgca

SEQ ID NO: 1013443 - DNA, 25 bp, Homo sapien
gggggcactgcaggctctcgcacct

SEQ ID NO: 1013444 - DNA, 25 bp, Homo sapien
cttgggggcactgcaggctctcgca

SEQ ID NO: 1013445 - DNA, 25 bp, Homo sapien
ccacgctggtgtttgtggagttcca

SEQ ID NO: 1013446 - DNA, 25 bp, Homo sapien
tccagaattgaatgtgggccacgct

SEQ ID NO: 1013447 - DNA, 25 bp, Homo sapien
tgagctgtgatgactgatgttgcca

SEQ ID NO: 1013448 - DNA, 25 bp, Homo sapien
tgtctgtgtggactcgaccctctgc

SEQ ID NO: 1013449 - DNA, 25 bp, Homo sapien
aacctcgtctcttccgcaggcagtt

SEQ ID NO: 1013450 - DNA, 25 bp, Homo sapien
tttccacgggcttccatgaggcagg

SEQ ID NO: 1013451 - DNA, 25 bp, Homo sapien
ggttttagacgacagaattctagcc

SEQ ID NO: 1013452 - DNA, 25 bp, Homo sapien
gtctcttccgcaggcagttttttcc

SEQ ID NO: 1013453 - DNA, 25 bp, Homo sapien
cagagaccagcttccatggcgaggt

SEQ ID NO: 1013454 - DNA, 25 bp, Homo sapien
atgaaacgcctgaatcccggtggga

SEQ ID NO: 1013455 - DNA, 25 bp, Homo sapien
tgcctcagttgtcgccatcggttat

SEQ ID NO: 1013456 - DNA, 25 bp, Homo sapien
tgcccaggtattgcctgactgcagt

SEQ ID NO: 1013457 - DNA, 25 bp, Homo sapien
gcagggggcggtgaggttgaaggac

SEQ ID NO: 1013458 - DNA, 25 bp, Homo sapien
tggcctgcctgcgcacggctggaga

SEQ ID NO: 1013459 - DNA, 25 bp, Homo sapien
ttgtcacacgagacacaggtggggg

SEQ ID NO: 1013460 - DNA, 25 bp, Homo sapien
gaaggacatttcagcatggacggct

SEQ ID NO: 1013461 - DNA, 25 bp, Homo sapien
tattcaacacagtatcctcaataaa

SEQ ID NO: 1013462 - DNA, 25 bp, Homo sapien
gcagctaggactgcgcgctattgtg

SEQ ID NO: 1013463 - DNA, 25 bp, Homo sapien
atcctcaataaagcagctaggactg

SEQ ID NO: 1013464 - DNA, 25 bp, Homo sapien
tgcgcgctattgtgtcgcaggcccc

SEQ ID NO: 1013465 - DNA, 25 bp, Homo sapien
cctggggatccccagtctgctggca

SEQ ID NO: 1013466 - DNA, 25 bp, Homo sapien
ctgctggcagacactttccgaccat

SEQ ID NO: 1013467 - DNA, 25 bp, Homo sapien
cagtctgctggcagacactttccga

SEQ ID NO: 1013468 - DNA, 25 bp, Homo sapien
gggatccccagtctgctggcagaca

SEQ ID NO: 1013469 - DNA, 25 bp, Homo sapien
gtgctgcgcttctgaactggaagta

SEQ ID NO: 1013470 - DNA, 25 bp, Homo sapien
ccggacccgctgtaggggaggcaga

SEQ ID NO: 1013471 - DNA, 25 bp, Homo sapien
ctcagtgctgcgcttctgaactgga

SEQ ID NO: 1013472 - DNA, 25 bp, Homo sapien
cctactcagtgctgcgcttctgaac

SEQ ID NO: 1013473 - DNA, 25 bp, Homo sapien
ttctgataacccactgccaatgggc

SEQ ID NO: 1013474 - DNA, 25 bp, Homo sapien
ccaacttcagtgactctaaagttag

SEQ ID NO: 1013475 - DNA, 25 bp, Homo sapien
ttaacagtggggcattgtataccaa

SEQ ID NO: 1013476 - DNA, 25 bp, Homo sapien
ccaatttaacagtggggcattgtat

SEQ ID NO: 1013477 - DNA, 25 bp, Homo sapien
taatacacacgatgaagtgcaggca

SEQ ID NO: 1013478 - DNA, 25 bp, Homo sapien
tgtctgcccggtccaatttctgccc

SEQ ID NO: 1013479 - DNA, 25 bp, Homo sapien
cacattccgtaaacgccgtgaaagg

SEQ ID NO: 1013480 - DNA, 25 bp, Homo sapien
tctgtgcggagctctatgtctgccc

SEQ ID NO: 1013481 - DNA, 25 bp, Homo sapien
tgcggtcttccctcgaagagccggg

SEQ ID NO: 1013482 - DNA, 25 bp, Homo sapien
tgtgtttagtctggcgctgaggtcc

SEQ ID NO: 1013483 - DNA, 25 bp, Homo sapien
ttctcctcaagaccagccgatgggt

SEQ ID NO: 1013484 - DNA, 25 bp, Homo sapien
cgtcgtgcgcaggaaggtgctttta

SEQ ID NO: 1013485 - DNA, 25 bp, Homo sapien
gccggggccggtgtttgcacctctc

SEQ ID NO: 1013486 - DNA, 25 bp, Homo sapien
gacctgagggccgacgcctccggga

SEQ ID NO: 1013487 - DNA, 25 bp, Homo sapien
cgacacccggctcggtgcagccggc

SEQ ID NO: 1013488 - DNA, 25 bp, Homo sapien
accgctggtcctcgcgagtgggtcg

SEQ ID NO: 1013489 - DNA, 25 bp, Homo sapien
tgtcgtcttgcattaacaatccgga

SEQ ID NO: 1013490 - DNA, 25 bp, Homo sapien
tgaatctttaactttggtgcccggc

SEQ ID NO: 1013491 - DNA, 25 bp, Homo sapien
ggtgcccggcttcaaaagactcagg

SEQ ID NO: 1013492 - DNA, 25 bp, Homo sapien
tcagagccgagctaagctgcaagag

SEQ ID NO: 1013493 - DNA, 25 bp, Homo sapien
caattcagccccgtccttagtagaa

SEQ ID NO: 1013494 - DNA, 25 bp, Homo sapien
tccaattcagccccgtccttagtag

SEQ ID NO: 1013495 - DNA, 25 bp, Homo sapien
ccaattcagccccgtccttagtaga

SEQ ID NO: 1013496 - DNA, 25 bp, Homo sapien
taaggcaattaaccccagagggcca

SEQ ID NO: 1013497 - DNA, 25 bp, Homo sapien
gaggatatccttgcatcaatgcccg

SEQ ID NO: 1013498 - DNA, 25 bp, Homo sapien
cagagggccactagaaaactgtcca

SEQ ID NO: 1013499 - DNA, 25 bp, Homo sapien
tcacagaccactggagcaaggtccg

SEQ ID NO: 1013500 - DNA, 25 bp, Homo sapien
ggttcagccctgaaagccgaactgt

SEQ ID NO: 1013501 - DNA, 25 bp, Homo sapien
tcagccctgaaagccgaactgtggg

SEQ ID NO: 1013502 - DNA, 25 bp, Homo sapien
ggcgagggcaggtagaaaccagctt

SEQ ID NO: 1013503 - DNA, 25 bp, Homo sapien
tgaaagccgaactgtgggctgcagt

SEQ ID NO: 1013504 - DNA, 25 bp, Homo sapien
tgagcttagctcgtgttgtgcggat

SEQ ID NO: 1013505 - DNA, 25 bp, Homo sapien
aatcacctctgtggtgtgcctagac

SEQ ID NO: 1013506 - DNA, 25 bp, Homo sapien
ggcagtccggaaaaatcactcccta

SEQ ID NO: 1013507 - DNA, 25 bp, Homo sapien
ttgtgcggattgtccccgtcacagc

SEQ ID NO: 1013508 - DNA, 25 bp, Homo sapien
gacacctcacgtacttgcagcctga

SEQ ID NO: 1013509 - DNA, 25 bp, Homo sapien
gaatgtggcgagcactccaggaaat

SEQ ID NO: 1013510 - DNA, 25 bp, Homo sapien
ggtacttcaatcatccgcttccgca

SEQ ID NO: 1013511 - DNA, 25 bp, Homo sapien
gagtgacgtcacagcgatgttcaaa

SEQ ID NO: 1013512 - DNA, 25 bp, Homo sapien
tcacccgcgaaggatgagcccgccc

SEQ ID NO: 1013513 - DNA, 25 bp, Homo sapien
gctgcgggccgccctgcttctcgcc

SEQ ID NO: 1013514 - DNA, 25 bp, Homo sapien
cgcgaaggatgagcccgccccgctg

SEQ ID NO: 1013515 - DNA, 25 bp, Homo sapien
aaggatgagcccgccccgctgcggg

SEQ ID NO: 1013516 - DNA, 25 bp, Homo sapien
agaaagaacaagcaggcgcccttct

SEQ ID NO: 1013517 - DNA, 25 bp, Homo sapien
cggcgcagcttccaggcgcaaacgg

SEQ ID NO: 1013518 - DNA, 25 bp, Homo sapien
gctgcgctgtgcgtccggctgcgct

SEQ ID NO: 1013519 - DNA, 25 bp, Homo sapien
gcggcagaccgccttgcaggaactc

SEQ ID NO: 1013520 - DNA, 25 bp, Homo sapien
tggacacggagtagcgcgcctgcat

SEQ ID NO: 1013521 - DNA, 25 bp, Homo sapien
ggccggcatggcggtgtagccgccc

SEQ ID NO: 1013522 - DNA, 25 bp, Homo sapien
tgctcgccgccgaggtagggcacca

SEQ ID NO: 1013523 - DNA, 25 bp, Homo sapien
gccgccgcgcggtagtagctctgct

SEQ ID NO: 1013524 - DNA, 25 bp, Homo sapien
gttcagggtgatcttcttgtccggg

SEQ ID NO: 1013525 - DNA, 25 bp, Homo sapien
atgccgcccgggtactgctcggcgt

SEQ ID NO: 1013526 - DNA, 25 bp, Homo sapien
ctgcggcgtgtagggcccgtaggcg

SEQ ID NO: 1013527 - DNA, 25 bp, Homo sapien
gcgcagggtgcgagtacacgctcat

SEQ ID NO: 1013528 - DNA, 25 bp, Homo sapien
ggctccttgaggtgcagcctgtcct

SEQ ID NO: 1013529 - DNA, 25 bp, Homo sapien
gggcggctccttgaggtgcagcctg

SEQ ID NO: 1013530 - DNA, 25 bp, Homo sapien
cgggggcggctccttgaggtgcagc

SEQ ID NO: 1013531 - DNA, 25 bp, Homo sapien
gcggctccttgaggtgcagcctgtc

SEQ ID NO: 1013532 - DNA, 25 bp, Homo sapien
gcggaccgggcgcgttgccgtcggc

SEQ ID NO: 1013533 - DNA, 25 bp, Homo sapien
tgcggaccgggcgcgttgccgtcgg

SEQ ID NO: 1013534 - DNA, 25 bp, Homo sapien
ttctcggtcttgatgtcctggatgc

SEQ ID NO: 1013535 - DNA, 25 bp, Homo sapien
ctcggtcttgatgtcctggatgcgc

SEQ ID NO: 1013536 - DNA, 25 bp, Homo sapien
cgttctcggtcttgatgtcctggat

SEQ ID NO: 1013537 - DNA, 25 bp, Homo sapien
tctcggtcttgatgtcctggatgcg

SEQ ID NO: 1013538 - DNA, 25 bp, Homo sapien
gctctcgatcttgggcaccgcggcg

SEQ ID NO: 1013539 - DNA, 25 bp, Homo sapien
ggggctctcgatcttgggcaccgcg

SEQ ID NO: 1013540 - DNA, 25 bp, Homo sapien
ctgagcggccgcgccgacggcaggc

SEQ ID NO: 1013541 - DNA, 25 bp, Homo sapien
gctgctgctgtcggggctctcgatc

SEQ ID NO: 1013542 - DNA, 25 bp, Homo sapien
agccctggctatggtgcggcggcgg

SEQ ID NO: 1013543 - DNA, 25 bp, Homo sapien
ccagaaggccggagctgagctccgc

SEQ ID NO: 1013544 - DNA, 25 bp, Homo sapien
ggccgccgaggccagaaggccggag

SEQ ID NO: 1013545 - DNA, 25 bp, Homo sapien
gacgtcatgatgttgtccacgctga

SEQ ID NO: 1013546 - DNA, 25 bp, Homo sapien
aggttgcagtggtaggtcccggcgc

SEQ ID NO: 1013547 - DNA, 25 bp, Homo sapien
gggtgcgatccccgcgcgcgaggac

SEQ ID NO: 1013548 - DNA, 25 bp, Homo sapien
tgcagggggagctgtagagggagct

SEQ ID NO: 1013549 - DNA, 25 bp, Homo sapien
agcgggggtgcgatccccgcgcgcg

SEQ ID NO: 1013550 - DNA, 25 bp, Homo sapien
ggcgcgccctgcaagtggcccccgc

SEQ ID NO: 1013551 - DNA, 25 bp, Homo sapien
gctcgccggccgcgtacaggctcat

SEQ ID NO: 1013552 - DNA, 25 bp, Homo sapien
gcagggggtcgtccacggccgagcc

SEQ ID NO: 1013553 - DNA, 25 bp, Homo sapien
accggaggcagagagtagtcgggca

SEQ ID NO: 1013554 - DNA, 25 bp, Homo sapien
gaggcggccttggtgggccgcaggg

SEQ ID NO: 1013555 - DNA, 25 bp, Homo sapien
gtgaggcggccttggtgggccgcag

SEQ ID NO: 1013556 - DNA, 25 bp, Homo sapien
gtgggccgcagggtggtggccggcc

SEQ ID NO: 1013557 - DNA, 25 bp, Homo sapien
tgaggcggccttggtgggccgcagg

SEQ ID NO: 1013558 - DNA, 25 bp, Homo sapien
cgccgcgctcgccaagtggcccagg

SEQ ID NO: 1013559 - DNA, 25 bp, Homo sapien
ccgccgcgctcgccaagtggcccag

SEQ ID NO: 1013560 - DNA, 25 bp, Homo sapien
gccgcgctcgccaagtggcccaggt

SEQ ID NO: 1013561 - DNA, 25 bp, Homo sapien
tctcccgcaccgagtggaagttctg

SEQ ID NO: 1013562 - DNA, 25 bp, Homo sapien
tggagagttgttcaagccgatcctc

SEQ ID NO: 1013563 - DNA, 25 bp, Homo sapien
tcgtagacgaaagctccggacgtgc

SEQ ID NO: 1013564 - DNA, 25 bp, Homo sapien
gctactattcccgttcactggagag

SEQ ID NO: 1013565 - DNA, 25 bp, Homo sapien
ttcgctggtgtggtgaatattctca

SEQ ID NO: 1013566 - DNA, 25 bp, Homo sapien
ggtccacgacatccaactacaaatt

SEQ ID NO: 1013567 - DNA, 25 bp, Homo sapien
cactttctggcgtttggtccacgac

SEQ ID NO: 1013568 - DNA, 25 bp, Homo sapien
aaataatatcttacaggtgagaggc

SEQ ID NO: 1013569 - DNA, 25 bp, Homo sapien
taagaccgcggctgattcatgggct

SEQ ID NO: 1013570 - DNA, 25 bp, Homo sapien
catggactagtcagagggtttctcc

SEQ ID NO: 1013571 - DNA, 25 bp, Homo sapien
caaagtctgattggcagggcagatc

SEQ ID NO: 1013572 - DNA, 25 bp, Homo sapien
cctctagataggagcggcagatagc

SEQ ID NO: 1013573 - DNA, 25 bp, Homo sapien
tgtcacccgtgagcaatgaagtgcc

SEQ ID NO: 1013574 - DNA, 25 bp, Homo sapien
gctgcgctcctaaacacacgtgcgt

SEQ ID NO: 1013575 - DNA, 25 bp, Homo sapien
aaggagctccaaacgcaaaccgaag

SEQ ID NO: 1013576 - DNA, 25 bp, Homo sapien
gccgccgcgggtaattacagctcat

SEQ ID NO: 1013577 - DNA, 25 bp, Homo sapien
gagagtggagagtcgcaggcacgtg

SEQ ID NO: 1013578 - DNA, 25 bp, Homo sapien
ggagcgggtcgactctttcccagct

SEQ ID NO: 1013579 - DNA, 25 bp, Homo sapien
tttccactgccgacctgggcctagg

SEQ ID NO: 1013580 - DNA, 25 bp, Homo sapien
actggagccccgcaaggaaggacag

SEQ ID NO: 1013581 - DNA, 25 bp, Homo sapien
tccgaataatgagcagaacttctct

SEQ ID NO: 1013582 - DNA, 25 bp, Homo sapien
tcttaaatcgggtgtgagaatcgaa

SEQ ID NO: 1013583 - DNA, 25 bp, Homo sapien
catagcttctaaacttgcacaggca

SEQ ID NO: 1013584 - DNA, 25 bp, Homo sapien
taagaagctttgctcgcgcacgcct

SEQ ID NO: 1013585 - DNA, 25 bp, Homo sapien
ggcccactggtacgggtaagaatca

SEQ ID NO: 1013586 - DNA, 25 bp, Homo sapien
tgcaaggacataaccgtagcgtggt

SEQ ID NO: 1013587 - DNA, 25 bp, Homo sapien
aggacataaccgtagcgtggtaagg

SEQ ID NO: 1013588 - DNA, 25 bp, Homo sapien
ggtaagaatcaaacttgcaaggaca

SEQ ID NO: 1013589 - DNA, 25 bp, Homo sapien
cagaaccttgggcaggtgaggcatg

SEQ ID NO: 1013590 - DNA, 25 bp, Homo sapien
ccttccacgccattcccattcctgc

SEQ ID NO: 1013591 - DNA, 25 bp, Homo sapien
gcacagaaccttgggcaggtgaggc

SEQ ID NO: 1013592 - DNA, 25 bp, Homo sapien
attcccattcctgcacagaaccttg

SEQ ID NO: 1013593 - DNA, 25 bp, Homo sapien
acagctccccggaagtccagccgtg

SEQ ID NO: 1013594 - DNA, 25 bp, Homo sapien
tttgaagcagtagtttcctcggggc

SEQ ID NO: 1013595 - DNA, 25 bp, Homo sapien
ttatagccacgagagagcataagca

SEQ ID NO: 1013596 - DNA, 25 bp, Homo sapien
tccagccgtgccttcacgggggaga

SEQ ID NO: 1013597 - DNA, 25 bp, Homo sapien
atcctgctggcactcgaggagctga

SEQ ID NO: 1013598 - DNA, 25 bp, Homo sapien
gctcataagtataaagttcaggatc

SEQ ID NO: 1013599 - DNA, 25 bp, Homo sapien
taagctgctcataagtataaagttc

SEQ ID NO: 1013600 - DNA, 25 bp, Homo sapien
ggagctgatcagtgttttcgagaaa

SEQ ID NO: 1013601 - DNA, 25 bp, Homo sapien
ttatctgctagcctgcccttgttgc

SEQ ID NO: 1013602 - DNA, 25 bp, Homo sapien
ccttatctgctagcctgcccttgtt

SEQ ID NO: 1013603 - DNA, 25 bp, Homo sapien
tccttatctgctagcctgcccttgt

SEQ ID NO: 1013604 - DNA, 25 bp, Homo sapien
atctgctagcctgcccttgttgcct

SEQ ID NO: 1013605 - DNA, 25 bp, Homo sapien
caaaatgagtccagtccaatctcca

SEQ ID NO: 1013606 - DNA, 25 bp, Homo sapien
gtctcaggatgtcccaaaatgagtc

SEQ ID NO: 1013607 - DNA, 25 bp, Homo sapien
cccagaagcccctgaatgacagcat

SEQ ID NO: 1013608 - DNA, 25 bp, Homo sapien
cagcatgtgagtagccaccagtttc

SEQ ID NO: 1013609 - DNA, 25 bp, Homo sapien
cttcactaacgtgacagtgacatag

SEQ ID NO: 1013610 - DNA, 25 bp, Homo sapien
ccatttatcttcactaacgtgacag

SEQ ID NO: 1013611 - DNA, 25 bp, Homo sapien
tatcttcactaacgtgacagtgaca

SEQ ID NO: 1013612 - DNA, 25 bp, Homo sapien
atttatcttcactaacgtgacagtg

SEQ ID NO: 1013613 - DNA, 25 bp, Homo sapien
gactcaggacgatggtcaccatgga

SEQ ID NO: 1013614 - DNA, 25 bp, Homo sapien
gtcaccatggaaccccgttctccaa

SEQ ID NO: 1013615 - DNA, 25 bp, Homo sapien
taaggactcaggacgatggtcacca

SEQ ID NO: 1013616 - DNA, 25 bp, Homo sapien
ttatgcataaggactcaggacgatg

SEQ ID NO: 1013617 - DNA, 25 bp, Homo sapien
aaaggaagtatggaccggctctgca

SEQ ID NO: 1013618 - DNA, 25 bp, Homo sapien
ctttaggagcagagatccgaggccc

SEQ ID NO: 1013619 - DNA, 25 bp, Homo sapien
agtatggaccggctctgcaggatgc

SEQ ID NO: 1013620 - DNA, 25 bp, Homo sapien
ggcccatcctgatcttcctgttgga

SEQ ID NO: 1013621 - DNA, 25 bp, Homo sapien
gcaagttactcactaagcctcagct

SEQ ID NO: 1013622 - DNA, 25 bp, Homo sapien
gcttgcagtgggtgcaaggctcaca

SEQ ID NO: 1013623 - DNA, 25 bp, Homo sapien
gagccaaagctgtcagagcttgcag

SEQ ID NO: 1013624 - DNA, 25 bp, Homo sapien
tcctaacctcgtgactctgggcaag

SEQ ID NO: 1013625 - DNA, 25 bp, Homo sapien
catccgtgggatattttagcgctga

SEQ ID NO: 1013626 - DNA, 25 bp, Homo sapien
tctgccatcaagacagcatccgtgg

SEQ ID NO: 1013627 - DNA, 25 bp, Homo sapien
gacagggtataagaatcaagcaggc

SEQ ID NO: 1013628 - DNA, 25 bp, Homo sapien
gaagctatgctaggcacagcacggg

SEQ ID NO: 1013629 - DNA, 25 bp, Homo sapien
ctcgagcatgccgtgcacatgccat

SEQ ID NO: 1013630 - DNA, 25 bp, Homo sapien
gcactcgagcatgccgtgcacatgc

SEQ ID NO: 1013631 - DNA, 25 bp, Homo sapien
cgggcactcgagcatgccgtgcaca

SEQ ID NO: 1013632 - DNA, 25 bp, Homo sapien
gtccccgggcactcgagcatgccgt

SEQ ID NO: 1013633 - DNA, 25 bp, Homo sapien
gtgacgctgcggtggccatgggcac

SEQ ID NO: 1013634 - DNA, 25 bp, Homo sapien
tgcttgctgtagacagggtgacgct

SEQ ID NO: 1013635 - DNA, 25 bp, Homo sapien
gagtgatgtcctcacatagaggcca

SEQ ID NO: 1013636 - DNA, 25 bp, Homo sapien
gaaagaagaatgcagccctggaatc

SEQ ID NO: 1013637 - DNA, 25 bp, Homo sapien
tcgagaagcccctgcaggtacagag

SEQ ID NO: 1013638 - DNA, 25 bp, Homo sapien
cagagcacccgagcatcagggatgt

SEQ ID NO: 1013639 - DNA, 25 bp, Homo sapien
gcaggtacagagcacccgagcatca

SEQ ID NO: 1013640 - DNA, 25 bp, Homo sapien
gtcgagaagcccctgcaggtacaga

SEQ ID NO: 1013641 - DNA, 25 bp, Homo sapien
ttactgagtacagatcataggcagc

SEQ ID NO: 1013642 - DNA, 25 bp, Homo sapien
catcagaaagcatgacgctggagag

SEQ ID NO: 1013643 - DNA, 25 bp, Homo sapien
ccaaggtagaacctgaaatgtccag

SEQ ID NO: 1013644 - DNA, 25 bp, Homo sapien
gaaatgtatccagcgtaacttccac

SEQ ID NO: 1013645 - DNA, 25 bp, Homo sapien
cggctgccctgaaagttaaaactct

SEQ ID NO: 1013646 - DNA, 25 bp, Homo sapien
tgcagttgctgatagtattggcacc

SEQ ID NO: 1013647 - DNA, 25 bp, Homo sapien
ctcttggtacgataaatgcagttgc

SEQ ID NO: 1013648 - DNA, 25 bp, Homo sapien
atagtattggcaccagtccccacga

SEQ ID NO: 1013649 - DNA, 25 bp, Homo sapien
gatactcttatgttcctcagcaagg

SEQ ID NO: 1013650 - DNA, 25 bp, Homo sapien
gccttcgggaaaatgcgacttcgca

SEQ ID NO: 1013651 - DNA, 25 bp, Homo sapien
gccgaatgccagcagtcggtgggat

SEQ ID NO: 1013652 - DNA, 25 bp, Homo sapien
cagagcgctgggctgtgtgggcgca

SEQ ID NO: 1013653 - DNA, 25 bp, Homo sapien
cagggtcctcggacagcctgtcagc

SEQ ID NO: 1013654 - DNA, 25 bp, Homo sapien
tcactcgctctctgtcagactctta

SEQ ID NO: 1013655 - DNA, 25 bp, Homo sapien
tgggttggaacgtggttgaggaaga

SEQ ID NO: 1013656 - DNA, 25 bp, Homo sapien
tctgtcagactcttactaactcttt

SEQ ID NO: 1013657 - DNA, 25 bp, Homo sapien
tcttcattagaaagaaacttaacca

SEQ ID NO: 1013658 - DNA, 25 bp, Homo sapien
tgtttgaatacggagagggtcccag

SEQ ID NO: 1013659 - DNA, 25 bp, Homo sapien
tcccagtcttcattagaaagaaact

SEQ ID NO: 1013660 - DNA, 25 bp, Homo sapien
gtccaatttactgataagtggggca

SEQ ID NO: 1013661 - DNA, 25 bp, Homo sapien
ccgcatgtgatgtggagataactgt

SEQ ID NO: 1013662 - DNA, 25 bp, Homo sapien
tcccgggatgtcagccgcatgtgat

SEQ ID NO: 1013663 - DNA, 25 bp, Homo sapien
cattcaccctgggacttgtgcatag

SEQ ID NO: 1013664 - DNA, 25 bp, Homo sapien
ataggccagactcccgggatgtcag

SEQ ID NO: 1013665 - DNA, 25 bp, Homo sapien
tttgaaatacctttacactgaggta

SEQ ID NO: 1013666 - DNA, 25 bp, Homo sapien
tcaatagccaggtacgatcactccc

SEQ ID NO: 1013667 - DNA, 25 bp, Homo sapien
agtaaacacctctaagatcagcctt

SEQ ID NO: 1013668 - DNA, 25 bp, Homo sapien
tacttatttggaaactcagccacaa

SEQ ID NO: 1013669 - DNA, 25 bp, Homo sapien
tgtgcctccagagtgtagactcaga

SEQ ID NO: 1013670 - DNA, 25 bp, Homo sapien
cttggctgaggaggctaagccccaa

SEQ ID NO: 1013671 - DNA, 25 bp, Homo sapien
tttaatcagggcagcaagacatttg

SEQ ID NO: 1013672 - DNA, 25 bp, Homo sapien
aaagcaccccagactatgatagcca

SEQ ID NO: 1013673 - DNA, 25 bp, Homo sapien
atgagcttcattgtctagaatttca

SEQ ID NO: 1013674 - DNA, 25 bp, Homo sapien
gaaatgagcttcattgtctagaatt

SEQ ID NO: 1013675 - DNA, 25 bp, Homo sapien
aaatgagcttcattgtctagaattt

SEQ ID NO: 1013676 - DNA, 25 bp, Homo sapien
aatgagcttcattgtctagaatttc

SEQ ID NO: 1013677 - DNA, 25 bp, Homo sapien
cctgagtctgtaggctcaagccttc

SEQ ID NO: 1013678 - DNA, 25 bp, Homo sapien
tttgcctgagtctgtaggctcaagc

SEQ ID NO: 1013679 - DNA, 25 bp, Homo sapien
gggagctgccatcagatctttgcct

SEQ ID NO: 1013680 - DNA, 25 bp, Homo sapien
cagatctttgcctgagtctgtaggc

SEQ ID NO: 1013681 - DNA, 25 bp, Homo sapien
gaagtttgctgttgtgagagctcaa

SEQ ID NO: 1013682 - DNA, 25 bp, Homo sapien
ccagttggactggaattcctttgaa

SEQ ID NO: 1013683 - DNA, 25 bp, Homo sapien
gagcatttactttggcacagtctct

SEQ ID NO: 1013684 - DNA, 25 bp, Homo sapien
tttgtaatgacggttccagttggac

SEQ ID NO: 1013685 - DNA, 25 bp, Homo sapien
cattatgtggctctggcggctcaag

SEQ ID NO: 1013686 - DNA, 25 bp, Homo sapien
tgcacctggaacatacgccgttcat

SEQ ID NO: 1013687 - DNA, 25 bp, Homo sapien
cgccgttcatgacactttgccttta

SEQ ID NO: 1013688 - DNA, 25 bp, Homo sapien
gaggatctcaaagggcctcagcagt

SEQ ID NO: 1013689 - DNA, 25 bp, Homo sapien
gtagtaagatgtcacccatggcagc

SEQ ID NO: 1013690 - DNA, 25 bp, Homo sapien
cacagcccaacaagtaccagcgtgt

SEQ ID NO: 1013691 - DNA, 25 bp, Homo sapien
tctgtagtaagatgtcacccatggc

SEQ ID NO: 1013692 - DNA, 25 bp, Homo sapien
tttatcacagcccaacaagtaccag

SEQ ID NO: 1013693 - DNA, 25 bp, Homo sapien
gacctctgtaggaccactttcttct

SEQ ID NO: 1013694 - DNA, 25 bp, Homo sapien
ctcagattctgacctctgtaggacc

SEQ ID NO: 1013695 - DNA, 25 bp, Homo sapien
cttgagccattttgggactgtagat

SEQ ID NO: 1013696 - DNA, 25 bp, Homo sapien
taatttcttacaacctcagattctg

SEQ ID NO: 1013697 - DNA, 25 bp, Homo sapien
tcatgtgggctgaccagaaatgcca

SEQ ID NO: 1013698 - DNA, 25 bp, Homo sapien
atgtgggctgaccagaaatgccagc

SEQ ID NO: 1013699 - DNA, 25 bp, Homo sapien
catgtgggctgaccagaaatgccag

SEQ ID NO: 1013700 - DNA, 25 bp, Homo sapien
aaggtgaccgttgaattagaattgt

SEQ ID NO: 1013701 - DNA, 25 bp, Homo sapien
ttgccaaggtgaccgttgaattaga

SEQ ID NO: 1013702 - DNA, 25 bp, Homo sapien
aatcctttgccaaggtgaccgttga

SEQ ID NO: 1013703 - DNA, 25 bp, Homo sapien
tcctttgccaaggtgaccgttgaat

SEQ ID NO: 1013704 - DNA, 25 bp, Homo sapien
tacttggagggtacatagcacgtgc

SEQ ID NO: 1013705 - DNA, 25 bp, Homo sapien
gatggccgcattgagtgatactaaa

SEQ ID NO: 1013706 - DNA, 25 bp, Homo sapien
tgtacataaagcacagcctacttgg

SEQ ID NO: 1013707 - DNA, 25 bp, Homo sapien
aacccttgccaagttgatggccgca

SEQ ID NO: 1013708 - DNA, 25 bp, Homo sapien
taaccacaaggtccttataggagga

SEQ ID NO: 1013709 - DNA, 25 bp, Homo sapien
ccacaccaagaacgtaagaggatcg

SEQ ID NO: 1013710 - DNA, 25 bp, Homo sapien
gggtgtaggcgcctctagaagctgg

SEQ ID NO: 1013711 - DNA, 25 bp, Homo sapien
gaggatcgacacgtattgttttaaa

SEQ ID NO: 1013712 - DNA, 25 bp, Homo sapien
acaaactatcagttaaaacatctgc

SEQ ID NO: 1013713 - DNA, 25 bp, Homo sapien
ttacaaactatcagttaaaacatct

SEQ ID NO: 1013714 - DNA, 25 bp, Homo sapien
tacaaactatcagttaaaacatctg

SEQ ID NO: 1013715 - DNA, 25 bp, Homo sapien
cagggcttaatgccccccagatgca

SEQ ID NO: 1013716 - DNA, 25 bp, Homo sapien
gcacctgttcttgcaagggccttcc

SEQ ID NO: 1013717 - DNA, 25 bp, Homo sapien
ccagatgcacctgttcttgcaaggg

SEQ ID NO: 1013718 - DNA, 25 bp, Homo sapien
gatgcacctgttcttgcaagggcct

SEQ ID NO: 1013719 - DNA, 25 bp, Homo sapien
gttttaggcatctgatcaatcagtg

SEQ ID NO: 1013720 - DNA, 25 bp, Homo sapien
gtaatgtggttaagcttctcaggaa

SEQ ID NO: 1013721 - DNA, 25 bp, Homo sapien
tctttaccaagttgatgagtagatc

SEQ ID NO: 1013722 - DNA, 25 bp, Homo sapien
gttgatgagtagatctgctgtgttc

SEQ ID NO: 1013723 - DNA, 25 bp, Homo sapien
gggccttgaagacgacctggcacat

SEQ ID NO: 1013724 - DNA, 25 bp, Homo sapien
gagggccttgaagacgacctggcac

SEQ ID NO: 1013725 - DNA, 25 bp, Homo sapien
ggaagaatgacatcggagggccttg

SEQ ID NO: 1013726 - DNA, 25 bp, Homo sapien
agaatgacatcggagggccttgaag

SEQ ID NO: 1013727 - DNA, 25 bp, Homo sapien
tgagggaggcagttggagctggagg

SEQ ID NO: 1013728 - DNA, 25 bp, Homo sapien
gagggaggcagttggagctggaggc

SEQ ID NO: 1013729 - DNA, 25 bp, Homo sapien
caaaatgagggaggcagttggagct

SEQ ID NO: 1013730 - DNA, 25 bp, Homo sapien
ctgcaaaatgagggaggcagttgga

SEQ ID NO: 1013731 - DNA, 25 bp, Homo sapien
gaggtgttgaggtgttccgtcacac

SEQ ID NO: 1013732 - DNA, 25 bp, Homo sapien
tcccggtgccttcgggatatctgtg

SEQ ID NO: 1013733 - DNA, 25 bp, Homo sapien
aggtgttccgtcacactcccggtgc

SEQ ID NO: 1013734 - DNA, 25 bp, Homo sapien
tgttgaggtgttccgtcacactccc

SEQ ID NO: 1013735 - DNA, 25 bp, Homo sapien
tcagatgaaagggaagcagctgcga

SEQ ID NO: 1013736 - DNA, 25 bp, Homo sapien
cagatgaaagggaagcagctgcgaa

SEQ ID NO: 1013737 - DNA, 25 bp, Homo sapien
agatgaaagggaagcagctgcgaag

SEQ ID NO: 1013738 - DNA, 25 bp, Homo sapien
cacactgggctcgtcaaatgcctgc

SEQ ID NO: 1013739 - DNA, 25 bp, Homo sapien
tattgatactgaagtaatagcctca

SEQ ID NO: 1013740 - DNA, 25 bp, Homo sapien
gaccttgtccagattgggagatacg

SEQ ID NO: 1013741 - DNA, 25 bp, Homo sapien
cagaaagttagatgtaagctggacc

SEQ ID NO: 1013742 - DNA, 25 bp, Homo sapien
caggatgctattgcagaagaacggc

SEQ ID NO: 1013743 - DNA, 25 bp, Homo sapien
tatccctagacctgtcgctgtggcc

SEQ ID NO: 1013744 - DNA, 25 bp, Homo sapien
gagcagggtcttcccctatagcagg

SEQ ID NO: 1013745 - DNA, 25 bp, Homo sapien
cagagtagccttaggtacctggtgc

SEQ ID NO: 1013746 - DNA, 25 bp, Homo sapien
ctgcccaagggcagccctcttcctc

SEQ ID NO: 1013747 - DNA, 25 bp, Homo sapien
tctgcaggttgtagtccccaggcat

SEQ ID NO: 1013748 - DNA, 25 bp, Homo sapien
cctcttcctccatgagtgtcactct

SEQ ID NO: 1013749 - DNA, 25 bp, Homo sapien
agtgtcactctgcaggttgtagtcc

SEQ ID NO: 1013750 - DNA, 25 bp, Homo sapien
gaactgggccagtccatctgacagc

SEQ ID NO: 1013751 - DNA, 25 bp, Homo sapien
tcagatttccctccgatgtgcacgc

SEQ ID NO: 1013752 - DNA, 25 bp, Homo sapien
acaggcctgtttccgagccagtcga

SEQ ID NO: 1013753 - DNA, 25 bp, Homo sapien
tctctggcccactgtgaagctgtca

SEQ ID NO: 1013754 - DNA, 25 bp, Homo sapien
cataaaactccccaccttcagccat

SEQ ID NO: 1013755 - DNA, 25 bp, Homo sapien
ttgtccataaaactccccaccttca

SEQ ID NO: 1013756 - DNA, 25 bp, Homo sapien
tccataaaactccccaccttcagcc

SEQ ID NO: 1013757 - DNA, 25 bp, Homo sapien
tgtccataaaactccccaccttcag

SEQ ID NO: 1013758 - DNA, 25 bp, Homo sapien
tgagcctggtgtatagtcaactccg

SEQ ID NO: 1013759 - DNA, 25 bp, Homo sapien
tccacgacggtagcagtgcagaggt

SEQ ID NO: 1013760 - DNA, 25 bp, Homo sapien
acggctttcgttggaggttgatgca

SEQ ID NO: 1013761 - DNA, 25 bp, Homo sapien
ggattctgaacggtcacggctttcg

SEQ ID NO: 1013762 - DNA, 25 bp, Homo sapien
ttttttaatgcgtgcacccctgagc

SEQ ID NO: 1013763 - DNA, 25 bp, Homo sapien
ccctgagcttacaaatgcttctttg

SEQ ID NO: 1013764 - DNA, 25 bp, Homo sapien
gcgtgcacccctgagcttacaaatg

SEQ ID NO: 1013765 - DNA, 25 bp, Homo sapien
ttaatgcgtgcacccctgagcttac

SEQ ID NO: 1013766 - DNA, 25 bp, Homo sapien
ctggaaaatcgcagactctatcaaa

SEQ ID NO: 1013767 - DNA, 25 bp, Homo sapien
gctggaaaatcgcagactctatcaa

SEQ ID NO: 1013768 - DNA, 25 bp, Homo sapien
actcatggaggacatgaggattgtc

SEQ ID NO: 1013769 - DNA, 25 bp, Homo sapien
tcatggaggacatgaggattgtctc

SEQ ID NO: 1013770 - DNA, 25 bp, Homo sapien
ctcatggaggacatgaggattgtct

SEQ ID NO: 1013771 - DNA, 25 bp, Homo sapien
catggaggacatgaggattgtctct

SEQ ID NO: 1013772 - DNA, 25 bp, Homo sapien
gggatgggaaacacaagagcgcttt

SEQ ID NO: 1013773 - DNA, 25 bp, Homo sapien
tgattgagtcatgcttgtgcagctg

SEQ ID NO: 1013774 - DNA, 25 bp, Homo sapien
tcagttagagggacaggttcgcatc

SEQ ID NO: 1013775 - DNA, 25 bp, Homo sapien
tgcttatacgctgttcttgggaggg

SEQ ID NO: 1013776 - DNA, 25 bp, Homo sapien
ctctgtccttcacccgggacctgaa

SEQ ID NO: 1013777 - DNA, 25 bp, Homo sapien
gagctctgtccttcacccgggacct

SEQ ID NO: 1013778 - DNA, 25 bp, Homo sapien
agcgagagtaagcagcgagagccca

SEQ ID NO: 1013779 - DNA, 25 bp, Homo sapien
gccagcgagagtaagcagcgagagc

SEQ ID NO: 1013780 - DNA, 25 bp, Homo sapien
cagggcccagagtagcacaacagca

SEQ ID NO: 1013781 - DNA, 25 bp, Homo sapien
caggccagggcccagagtagcacaa

SEQ ID NO: 1013782 - DNA, 25 bp, Homo sapien
aggccagggcccagagtagcacaac

SEQ ID NO: 1013783 - DNA, 25 bp, Homo sapien
gccagggcccagagtagcacaacag

SEQ ID NO: 1013784 - DNA, 25 bp, Homo sapien
acacgcaggcactcaagctcatcag

SEQ ID NO: 1013785 - DNA, 25 bp, Homo sapien
agttcaggcttcacacgcaggcact

SEQ ID NO: 1013786 - DNA, 25 bp, Homo sapien
acgcaggcactcaagctcatcaggc

SEQ ID NO: 1013787 - DNA, 25 bp, Homo sapien
tcaggcttcacacgcaggcactcaa

SEQ ID NO: 1013788 - DNA, 25 bp, Homo sapien
ggtggtcagccttagttcagtgttc

SEQ ID NO: 1013789 - DNA, 25 bp, Homo sapien
gaagtggcataagggtgtcaatcac

SEQ ID NO: 1013790 - DNA, 25 bp, Homo sapien
ttctgcagtctctagaagaagtggc

SEQ ID NO: 1013791 - DNA, 25 bp, Homo sapien
agactttgctctgacatccggccaa

SEQ ID NO: 1013792 - DNA, 25 bp, Homo sapien
cagctcagtggatgaacaaagaccc

SEQ ID NO: 1013793 - DNA, 25 bp, Homo sapien
taagaagccagtagagcaaaaccac

SEQ ID NO: 1013794 - DNA, 25 bp, Homo sapien
tcagacacatgatcaggagtaaatt

SEQ ID NO: 1013795 - DNA, 25 bp, Homo sapien
tatactctaccaaaacaagggaata

SEQ ID NO: 1013796 - DNA, 25 bp, Homo sapien
gctttcagatgcagaatcacatcca

SEQ ID NO: 1013797 - DNA, 25 bp, Homo sapien
ctttcagatgcagaatcacatccac

SEQ ID NO: 1013798 - DNA, 25 bp, Homo sapien
ctgtgctttcagatgcagaatcaca

SEQ ID NO: 1013799 - DNA, 25 bp, Homo sapien
gtgctttcagatgcagaatcacatc

SEQ ID NO: 1013800 - DNA, 25 bp, Homo sapien
cccgagtgtcacttttcaggagcag

SEQ ID NO: 1013801 - DNA, 25 bp, Homo sapien
gcacctggaagcagattgtatcccc

SEQ ID NO: 1013802 - DNA, 25 bp, Homo sapien
agcagattgtatcccccgagtgtca

SEQ ID NO: 1013803 - DNA, 25 bp, Homo sapien
tatcccccgagtgtcacttttcagg

SEQ ID NO: 1013804 - DNA, 25 bp, Homo sapien
agtgccgatgaaatttgccataaca

SEQ ID NO: 1013805 - DNA, 25 bp, Homo sapien
gttatgtcggctgcctgcatgaggt

SEQ ID NO: 1013806 - DNA, 25 bp, Homo sapien
taacactatgagttatgtcggctgc

SEQ ID NO: 1013807 - DNA, 25 bp, Homo sapien
gaaatttgccataacactatgagtt

SEQ ID NO: 1013808 - DNA, 25 bp, Homo sapien
ccttctcgactgcaaaacagtctta

SEQ ID NO: 1013809 - DNA, 25 bp, Homo sapien
gcaagaatgccgtatcaatcccaca

SEQ ID NO: 1013810 - DNA, 25 bp, Homo sapien
agcccagagacgttttttgccttct

SEQ ID NO: 1013811 - DNA, 25 bp, Homo sapien
agccagggttttgcaagaatgccgt

SEQ ID NO: 1013812 - DNA, 25 bp, Homo sapien
catcaactttgagtagtgagggagg

SEQ ID NO: 1013813 - DNA, 25 bp, Homo sapien
ttggattctgaccaaccattttggt

SEQ ID NO: 1013814 - DNA, 25 bp, Homo sapien
cctttatattcttgattggattctg

SEQ ID NO: 1013815 - DNA, 25 bp, Homo sapien
cattttggtttaagaagtcatcaac

SEQ ID NO: 1013816 - DNA, 25 bp, Homo sapien
tctgagaatggtacttgaaggaaaa

SEQ ID NO: 1013817 - DNA, 25 bp, Homo sapien
tggcaaacgttaccacgacacactt

SEQ ID NO: 1013818 - DNA, 25 bp, Homo sapien
tagcgtcttgatcaaattgacccag

SEQ ID NO: 1013819 - DNA, 25 bp, Homo sapien
tttgcataccagcattgcactggaa

SEQ ID NO: 1013820 - DNA, 25 bp, Homo sapien
tactgcttgtgtaatgggcacaaaa

SEQ ID NO: 1013821 - DNA, 25 bp, Homo sapien
ccagtgagtccggaacagccaagtt

SEQ ID NO: 1013822 - DNA, 25 bp, Homo sapien
tgagtccggaacagccaagttactg

SEQ ID NO: 1013823 - DNA, 25 bp, Homo sapien
gaacagccaagttactgcttgtgta

SEQ ID NO: 1013824 - DNA, 25 bp, Homo sapien
taagcatcgtgtatgcaagtaacag

SEQ ID NO: 1013825 - DNA, 25 bp, Homo sapien
agcaaaaaggccacattgtcatgga

SEQ ID NO: 1013826 - DNA, 25 bp, Homo sapien
caacactttgagtcgtgccattaag

SEQ ID NO: 1013827 - DNA, 25 bp, Homo sapien
gtatgcaagtaacagattaggaagc

SEQ ID NO: 1013828 - DNA, 25 bp, Homo sapien
tagcctgaaagaatatcgtgccttc

SEQ ID NO: 1013829 - DNA, 25 bp, Homo sapien
gatgtcgaagttcttgagagagtct

SEQ ID NO: 1013830 - DNA, 25 bp, Homo sapien
cagtccattgagtgcagtattcaca

SEQ ID NO: 1013831 - DNA, 25 bp, Homo sapien
gctttaactctttggcccctatggc

SEQ ID NO: 1013832 - DNA, 25 bp, Homo sapien
cagagaagttgacagacatttcctt

SEQ ID NO: 1013833 - DNA, 25 bp, Homo sapien
cacctactgccaatctgagggccat

SEQ ID NO: 1013834 - DNA, 25 bp, Homo sapien
cctgctttgtgcatgagtgggcctg

SEQ ID NO: 1013835 - DNA, 25 bp, Homo sapien
tgggcctgcctgcttgagaccagca

SEQ ID NO: 1013836 - DNA, 25 bp, Homo sapien
caaaggcaaaattaacaggtgcatt

SEQ ID NO: 1013837 - DNA, 25 bp, Homo sapien
gcaaaattaacaggtgcattcaggg

SEQ ID NO: 1013838 - DNA, 25 bp, Homo sapien
gttattgtaaggctcatcaaataca

SEQ ID NO: 1013839 - DNA, 25 bp, Homo sapien
ttgtaaggctcatcaaatacactga

SEQ ID NO: 1013840 - DNA, 25 bp, Homo sapien
agtactaaaagtctcgtagagtagg

SEQ ID NO: 1013841 - DNA, 25 bp, Homo sapien
tatagtctgttatcccagggattgg

SEQ ID NO: 1013842 - DNA, 25 bp, Homo sapien
gttgtttatagtctgttatcccagg

SEQ ID NO: 1013843 - DNA, 25 bp, Homo sapien
caacttgggtgttctgcggtttgca

SEQ ID NO: 1013844 - DNA, 25 bp, Homo sapien
gtgggtggagcctgtcgtttggaaa

SEQ ID NO: 1013845 - DNA, 25 bp, Homo sapien
tgcctgctccggatgtctgctgtgg

SEQ ID NO: 1013846 - DNA, 25 bp, Homo sapien
gagcctgtcgtttggaaagtgttca

SEQ ID NO: 1013847 - DNA, 25 bp, Homo sapien
gtgtgtgcctgctccggatgtctgc

SEQ ID NO: 1013848 - DNA, 25 bp, Homo sapien
cagggacccttgtgattccgtgtgg

SEQ ID NO: 1013849 - DNA, 25 bp, Homo sapien
tcgctcccttcagggacccttgtga

SEQ ID NO: 1013850 - DNA, 25 bp, Homo sapien
ctctttctcgctcccttcagggacc

SEQ ID NO: 1013851 - DNA, 25 bp, Homo sapien
gattccgtgtgggagcctctcctcc

SEQ ID NO: 1013852 - DNA, 25 bp, Homo sapien
taatgccccgctgagttttcatctg

SEQ ID NO: 1013853 - DNA, 25 bp, Homo sapien
cgctatggcccagaacaaagtagat

SEQ ID NO: 1013854 - DNA, 25 bp, Homo sapien
caaaactgcggtggttggagtgacc

SEQ ID NO: 1013855 - DNA, 25 bp, Homo sapien
tttgagggaactgcgtaatgccccg

SEQ ID NO: 1013856 - DNA, 25 bp, Homo sapien
gaatagtgctaaaggaccatggagg

SEQ ID NO: 1013857 - DNA, 25 bp, Homo sapien
cctgagatattaatccttgaaaaga

SEQ ID NO: 1013858 - DNA, 25 bp, Homo sapien
tgctgacacaaccttagctgccctg

SEQ ID NO: 1013859 - DNA, 25 bp, Homo sapien
tattccactcttgaccatgtccatg

SEQ ID NO: 1013860 - DNA, 25 bp, Homo sapien
tcaatacttggggagtagtaccagc

SEQ ID NO: 1013861 - DNA, 25 bp, Homo sapien
ggggagtagtaccagccctctctag

SEQ ID NO: 1013862 - DNA, 25 bp, Homo sapien
cctctcaatacttggggagtagtac

SEQ ID NO: 1013863 - DNA, 25 bp, Homo sapien
tacttggggagtagtaccagccctc

SEQ ID NO: 1013864 - DNA, 25 bp, Homo sapien
taaggaaggattctgttcacatcca

SEQ ID NO: 1013865 - DNA, 25 bp, Homo sapien
aaggaaggattctgttcacatccac

SEQ ID NO: 1013866 - DNA, 25 bp, Homo sapien
ggaaggattctgttcacatccacat

SEQ ID NO: 1013867 - DNA, 25 bp, Homo sapien
agatggacataaggaaggattctgt

SEQ ID NO: 1013868 - DNA, 25 bp, Homo sapien
acagcatatttggtgcgtttataac

SEQ ID NO: 1013869 - DNA, 25 bp, Homo sapien
aatggaaatctagtgacaagcaaag

SEQ ID NO: 1013870 - DNA, 25 bp, Homo sapien
tccctggtacaaagccatacagctg

SEQ ID NO: 1013871 - DNA, 25 bp, Homo sapien
gctggcccagttagaaagtttggtc

SEQ ID NO: 1013872 - DNA, 25 bp, Homo sapien
gactcctgggtaagtgctgcatctg

SEQ ID NO: 1013873 - DNA, 25 bp, Homo sapien
catcatttctgtcagcagcgccgaa

SEQ ID NO: 1013874 - DNA, 25 bp, Homo sapien
tagagggccattgtccaagcagcag

SEQ ID NO: 1013875 - DNA, 25 bp, Homo sapien
gtagcaccagggttccacgttggaa

SEQ ID NO: 1013876 - DNA, 25 bp, Homo sapien
tgacaatgtgagaagactcttctcg

SEQ ID NO: 1013877 - DNA, 25 bp, Homo sapien
ggattttgccttccccatcaagttc

SEQ ID NO: 1013878 - DNA, 25 bp, Homo sapien
tggaccagccgttctcttcttcacg

SEQ ID NO: 1013879 - DNA, 25 bp, Homo sapien
caagttcctacaacccaaacctgtg

SEQ ID NO: 1013880 - DNA, 25 bp, Homo sapien
aagttggagaacttcttagcttatt

SEQ ID NO: 1013881 - DNA, 25 bp, Homo sapien
acagatggatcacctcctcctctca

SEQ ID NO: 1013882 - DNA, 25 bp, Homo sapien
ctgggccacagatggatcacctcct

SEQ ID NO: 1013883 - DNA, 25 bp, Homo sapien
gccacagatggatcacctcctcctc

SEQ ID NO: 1013884 - DNA, 25 bp, Homo sapien
tgggccacagatggatcacctcctc

SEQ ID NO: 1013885 - DNA, 25 bp, Homo sapien
gacattgaccaggagctagaccttg

SEQ ID NO: 1013886 - DNA, 25 bp, Homo sapien
tatttctaaccattgtcagaaactg

SEQ ID NO: 1013887 - DNA, 25 bp, Homo sapien
cagaaactgcctgaatatctgaagg

SEQ ID NO: 1013888 - DNA, 25 bp, Homo sapien
tcttatgcagatcaacagttccaaa

SEQ ID NO: 1013889 - DNA, 25 bp, Homo sapien
agtaaaatggtcgcaggtttttcat

SEQ ID NO: 1013890 - DNA, 25 bp, Homo sapien
gcagaagtaaaatggtcgcaggttt

SEQ ID NO: 1013891 - DNA, 25 bp, Homo sapien
aagcagaagtaaaatggtcgcaggt

SEQ ID NO: 1013892 - DNA, 25 bp, Homo sapien
agcagaagtaaaatggtcgcaggtt

SEQ ID NO: 1013893 - DNA, 25 bp, Homo sapien
tctctggtgatgtggctcggactgt

SEQ ID NO: 1013894 - DNA, 25 bp, Homo sapien
tgtggctcggactgttttgcagctg

SEQ ID NO: 1013895 - DNA, 25 bp, Homo sapien
acagccagtctgaggcatccgaaat

SEQ ID NO: 1013896 - DNA, 25 bp, Homo sapien
gcatccgaaatcacaagcaaagagc

SEQ ID NO: 1013897 - DNA, 25 bp, Homo sapien
cctctgaccgagttagctaattgct

SEQ ID NO: 1013898 - DNA, 25 bp, Homo sapien
aaattcctgactgccatatgtgctg

SEQ ID NO: 1013899 - DNA, 25 bp, Homo sapien
gcttgagcgcatctataaattgcca

SEQ ID NO: 1013900 - DNA, 25 bp, Homo sapien
tgatatattgtaccccttttggacg

SEQ ID NO: 1013901 - DNA, 25 bp, Homo sapien
gggcaggatggttggcgatggaatt

SEQ ID NO: 1013902 - DNA, 25 bp, Homo sapien
cattcccttattgcacagtttagtt

SEQ ID NO: 1013903 - DNA, 25 bp, Homo sapien
gtggcattgcactcttcttccaaag

SEQ ID NO: 1013904 - DNA, 25 bp, Homo sapien
tggttggcgatggaattaaggatgt

SEQ ID NO: 1013905 - DNA, 25 bp, Homo sapien
gagtaatccgaatcttgttatttcc

SEQ ID NO: 1013906 - DNA, 25 bp, Homo sapien
gagaattagaggagtcccattgaaa

SEQ ID NO: 1013907 - DNA, 25 bp, Homo sapien
tgttatttccagtcaactcagttgg

SEQ ID NO: 1013908 - DNA, 25 bp, Homo sapien
aagtagatgctcttggtcatttgag

SEQ ID NO: 1013909 - DNA, 25 bp, Homo sapien
cagatcttgagtgatgtcttttgct

SEQ ID NO: 1013910 - DNA, 25 bp, Homo sapien
tggtcatcttgccagatcttgagtg

SEQ ID NO: 1013911 - DNA, 25 bp, Homo sapien
cagatctctcgctgactgttggtca

SEQ ID NO: 1013912 - DNA, 25 bp, Homo sapien
tctctcgctgactgttggtcatctt

SEQ ID NO: 1013913 - DNA, 25 bp, Homo sapien
agcctggtgagttcagaagactcct

SEQ ID NO: 1013914 - DNA, 25 bp, Homo sapien
ggtgagttcagaagactcctttgtt

SEQ ID NO: 1013915 - DNA, 25 bp, Homo sapien
tgcagcctggtgagttcagaagact

SEQ ID NO: 1013916 - DNA, 25 bp, Homo sapien
agtgcagcctggtgagttcagaaga

SEQ ID NO: 1013917 - DNA, 25 bp, Homo sapien
tctgaagacagcagtagtgaggatt

SEQ ID NO: 1013918 - DNA, 25 bp, Homo sapien
gaagacagcagtagtgaggatttga

SEQ ID NO: 1013919 - DNA, 25 bp, Homo sapien
gacagcagtagtgaggatttgattt

SEQ ID NO: 1013920 - DNA, 25 bp, Homo sapien
gcagtagtgaggatttgatttgata

SEQ ID NO: 1013921 - DNA, 25 bp, Homo sapien
ttagagtgtcatctccccgcaggaa

SEQ ID NO: 1013922 - DNA, 25 bp, Homo sapien
cttcctttagagtgtcatctccccg

SEQ ID NO: 1013923 - DNA, 25 bp, Homo sapien
ctttagagtgtcatctccccgcagg

SEQ ID NO: 1013924 - DNA, 25 bp, Homo sapien
tcctttagagtgtcatctccccgca

SEQ ID NO: 1013925 - DNA, 25 bp, Homo sapien
agttccatgggtcacctttattcca

SEQ ID NO: 1013926 - DNA, 25 bp, Homo sapien
tcttgaacggagtctactccttaaa

SEQ ID NO: 1013927 - DNA, 25 bp, Homo sapien
gcagctatagcaccaggctttcttg

SEQ ID NO: 1013928 - DNA, 25 bp, Homo sapien
gacgaaggtcttctctcttgaacgg

SEQ ID NO: 1013929 - DNA, 25 bp, Homo sapien
ccgttctctgacgtggatggttgct

SEQ ID NO: 1013930 - DNA, 25 bp, Homo sapien
cagcgcttcgccgttctctgacgtg

SEQ ID NO: 1013931 - DNA, 25 bp, Homo sapien
ctctgacgtggatggttgctgaaga

SEQ ID NO: 1013932 - DNA, 25 bp, Homo sapien
gctctgctaccagcgcttcgccgtt

SEQ ID NO: 1013933 - DNA, 25 bp, Homo sapien
catctaaaaggctcactggaaagca

SEQ ID NO: 1013934 - DNA, 25 bp, Homo sapien
gaatattgggcaccatgtggcgact

SEQ ID NO: 1013935 - DNA, 25 bp, Homo sapien
agccacggaaccagggagccacatc

SEQ ID NO: 1013936 - DNA, 25 bp, Homo sapien
tgtggcgactccaggcatgcttgcc

SEQ ID NO: 1013937 - DNA, 25 bp, Homo sapien
tagagtatcatagagatgtgaaaag

SEQ ID NO: 1013938 - DNA, 25 bp, Homo sapien
ttctaaaatcagtgagtgcatgtat

SEQ ID NO: 1013939 - DNA, 25 bp, Homo sapien
tttctaaaatcagtgagtgcatgta

SEQ ID NO: 1013940 - DNA, 25 bp, Homo sapien
gaaaaactagagtatcatagagatg

SEQ ID NO: 1013941 - DNA, 25 bp, Homo sapien
tgcctcccatggaagcaggctttca

SEQ ID NO: 1013942 - DNA, 25 bp, Homo sapien
gcctcccatggaagcaggctttcat

SEQ ID NO: 1013943 - DNA, 25 bp, Homo sapien
ctgcctcccatggaagcaggctttc

SEQ ID NO: 1013944 - DNA, 25 bp, Homo sapien
gaatcatcaagccttcgagcagcag

SEQ ID NO: 1013945 - DNA, 25 bp, Homo sapien
atcatcaagccttcgagcagcagtt

SEQ ID NO: 1013946 - DNA, 25 bp, Homo sapien
ttggaatcatcaagccttcgagcag

SEQ ID NO: 1013947 - DNA, 25 bp, Homo sapien
ctcttggaatcatcaagccttcgag

SEQ ID NO: 1013948 - DNA, 25 bp, Homo sapien
taactacggttatggaatcctgaag

SEQ ID NO: 1013949 - DNA, 25 bp, Homo sapien
gtgatcatgtgaccctcgccttgtg

SEQ ID NO: 1013950 - DNA, 25 bp, Homo sapien
ttgtgcctactgactcacccatggg

SEQ ID NO: 1013951 - DNA, 25 bp, Homo sapien
cttgatggataagcactgtatcact

SEQ ID NO: 1013952 - DNA, 25 bp, Homo sapien
gtgcacatcccacgggtagttgaga

SEQ ID NO: 1013953 - DNA, 25 bp, Homo sapien
ggtctgtgcacatcccacgggtagt

SEQ ID NO: 1013954 - DNA, 25 bp, Homo sapien
ctgtgcacatcccacgggtagttga

SEQ ID NO: 1013955 - DNA, 25 bp, Homo sapien
cacatcccacgggtagttgagatcc

SEQ ID NO: 1013956 - DNA, 25 bp, Homo sapien
tggcatcttgagtatgaacagcccc

SEQ ID NO: 1013957 - DNA, 25 bp, Homo sapien
tttggagaatctgcgctaatggcat

SEQ ID NO: 1013958 - DNA, 25 bp, Homo sapien
gcgctaatggcatcttgagtatgaa

SEQ ID NO: 1013959 - DNA, 25 bp, Homo sapien
ttgatagagcctggtgagcagctgg

SEQ ID NO: 1013960 - DNA, 25 bp, Homo sapien
gcagagcgatagtctgtgggtgcct

SEQ ID NO: 1013961 - DNA, 25 bp, Homo sapien
gagggtacaggttgcattccaggaa

SEQ ID NO: 1013962 - DNA, 25 bp, Homo sapien
caggaaggtgactcggctggcatcc

SEQ ID NO: 1013963 - DNA, 25 bp, Homo sapien
caggttgcattccaggaaggtgact

SEQ ID NO: 1013964 - DNA, 25 bp, Homo sapien
tagtgatgattttgcttatatcttc

SEQ ID NO: 1013965 - DNA, 25 bp, Homo sapien
catctaaatttagtgatgattttgc

SEQ ID NO: 1013966 - DNA, 25 bp, Homo sapien
tatcttcaatattcagtgcttcatc

SEQ ID NO: 1013967 - DNA, 25 bp, Homo sapien
tgcttcatctttatactcatgcact

SEQ ID NO: 1013968 - DNA, 25 bp, Homo sapien
tcccatatggatagttgagacttac

SEQ ID NO: 1013969 - DNA, 25 bp, Homo sapien
tgagttatttgtcctgcctagaagc

SEQ ID NO: 1013970 - DNA, 25 bp, Homo sapien
ttggatataccacttgccagtggga

SEQ ID NO: 1013971 - DNA, 25 bp, Homo sapien
tgaaggctcccaacactgagttatt

SEQ ID NO: 1013972 - DNA, 25 bp, Homo sapien
ttttgcttgccagtgtatcacacag

SEQ ID NO: 1013973 - DNA, 25 bp, Homo sapien
gtgtatcacacagttcttgttggtt

SEQ ID NO: 1013974 - DNA, 25 bp, Homo sapien
acagttcttgttggttttgagcttc

SEQ ID NO: 1013975 - DNA, 25 bp, Homo sapien
ttccttttgcttgccagtgtatcac

SEQ ID NO: 1013976 - DNA, 25 bp, Homo sapien
ccagacggcactggtacttccctgg

SEQ ID NO: 1013977 - DNA, 25 bp, Homo sapien
tacttgtccagacggcactggtact

SEQ ID NO: 1013978 - DNA, 25 bp, Homo sapien
tgttttcgtattatacttgtccaga

SEQ ID NO: 1013979 - DNA, 25 bp, Homo sapien
tattatacttgtccagacggcactg

SEQ ID NO: 1013980 - DNA, 25 bp, Homo sapien
cacgtatcagcctccagcattgagg

SEQ ID NO: 1013981 - DNA, 25 bp, Homo sapien
cagcctccagcattgagggaagcac

SEQ ID NO: 1013982 - DNA, 25 bp, Homo sapien
gcctccagcattgagggaagcacac

SEQ ID NO: 1013983 - DNA, 25 bp, Homo sapien
atcagcctccagcattgagggaagc

SEQ ID NO: 1013984 - DNA, 25 bp, Homo sapien
tgatggtaagtttagaagccttatc

SEQ ID NO: 1013985 - DNA, 25 bp, Homo sapien
ctgggtctttgttgatggtaagttt

SEQ ID NO: 1013986 - DNA, 25 bp, Homo sapien
ctttgttgatggtaagtttagaagc

SEQ ID NO: 1013987 - DNA, 25 bp, Homo sapien
tgttgatggtaagtttagaagcctt

SEQ ID NO: 1013988 - DNA, 25 bp, Homo sapien
tggaacatgttaaaggctactgtct

SEQ ID NO: 1013989 - DNA, 25 bp, Homo sapien
ggaacatgttaaaggctactgtctt

SEQ ID NO: 1013990 - DNA, 25 bp, Homo sapien
atggaacatgttaaaggctactgtc

SEQ ID NO: 1013991 - DNA, 25 bp, Homo sapien
gaacatgttaaaggctactgtcttc

SEQ ID NO: 1013992 - DNA, 25 bp, Homo sapien
taaggtgaaatctcccaacaaggaa

SEQ ID NO: 1013993 - DNA, 25 bp, Homo sapien
tgttttttcatcgtctgctttctgc

SEQ ID NO: 1013994 - DNA, 25 bp, Homo sapien
gacctgtgctgctacatctagcctt

SEQ ID NO: 1013995 - DNA, 25 bp, Homo sapien
aaactgaggttgctaagaatgaatc

SEQ ID NO: 1013996 - DNA, 25 bp, Homo sapien
ccacgtttttctccaaggacttcat

SEQ ID NO: 1013997 - DNA, 25 bp, Homo sapien
tccacgtttttctccaaggacttca

SEQ ID NO: 1013998 - DNA, 25 bp, Homo sapien
gcccaaaatgtgttcgctccttcct

SEQ ID NO: 1013999 - DNA, 25 bp, Homo sapien
ttgcccaaaatgtgttcgctccttc

SEQ ID NO: 1014000 - DNA, 25 bp, Homo sapien
catgcagccagtctcacacagagaa

SEQ ID NO: 1014001 - DNA, 25 bp, Homo sapien
ttcacttgttctgcccatgcagcca

SEQ ID NO: 1014002 - DNA, 25 bp, Homo sapien
ctgtgaatctctctatatctggctg

SEQ ID NO: 1014003 - DNA, 25 bp, Homo sapien
gtgaatctctctatatctggctgcc

SEQ ID NO: 1014004 - DNA, 25 bp, Homo sapien
ctctctatatctggctgcctttttt

SEQ ID NO: 1014005 - DNA, 25 bp, Homo sapien
atctctctatatctggctgcctttt

SEQ ID NO: 1014006 - DNA, 25 bp, Homo sapien
aactgtcttgtactctgctatttcc

SEQ ID NO: 1014007 - DNA, 25 bp, Homo sapien
taataactgtcttgtactctgctat

SEQ ID NO: 1014008 - DNA, 25 bp, Homo sapien
tgtcttgtactctgctatttcctta

SEQ ID NO: 1014009 - DNA, 25 bp, Homo sapien
tctaataactgtcttgtactctgct

SEQ ID NO: 1014010 - DNA, 25 bp, Homo sapien
agcatgtgtgcatcctgcaagccca

SEQ ID NO: 1014011 - DNA, 25 bp, Homo sapien
gaagatgtattgtttagtccactca

SEQ ID NO: 1014012 - DNA, 25 bp, Homo sapien
gaccttttgtcctgagcgacgaaga

SEQ ID NO: 1014013 - DNA, 25 bp, Homo sapien
tgaagatcaagcctttgtaaaccct

SEQ ID NO: 1014014 - DNA, 25 bp, Homo sapien
ttaatgattaacacctttcataatg

SEQ ID NO: 1014015 - DNA, 25 bp, Homo sapien
tgattaacacctttcataatgaagc

SEQ ID NO: 1014016 - DNA, 25 bp, Homo sapien
aacacctttcataatgaagccttcc

SEQ ID NO: 1014017 - DNA, 25 bp, Homo sapien
gattaacacctttcataatgaagcc

SEQ ID NO: 1014018 - DNA, 25 bp, Homo sapien
cagtcactgatccaaggagcatatt

SEQ ID NO: 1014019 - DNA, 25 bp, Homo sapien
atttcgggaggaattaatgctttgc

SEQ ID NO: 1014020 - DNA, 25 bp, Homo sapien
ccaaggagcatatttcgggaggaat

SEQ ID NO: 1014021 - DNA, 25 bp, Homo sapien
actgatccaaggagcatatttcggg

SEQ ID NO: 1014022 - DNA, 25 bp, Homo sapien
catatggtagtggccctcttccaag

SEQ ID NO: 1014023 - DNA, 25 bp, Homo sapien
ctcttccaagtgtttctgtgccagg

SEQ ID NO: 1014024 - DNA, 25 bp, Homo sapien
tccaagtgtttctgtgccaggggct

SEQ ID NO: 1014025 - DNA, 25 bp, Homo sapien
tcttccaagtgtttctgtgccaggg

SEQ ID NO: 1014026 - DNA, 25 bp, Homo sapien
ttgaaaaaggtgagatagttcctaa

SEQ ID NO: 1014027 - DNA, 25 bp, Homo sapien
aatcgaattgtaaagttatcaaagg

SEQ ID NO: 1014028 - DNA, 25 bp, Homo sapien
aaaggtgagatagttcctaatcgaa

SEQ ID NO: 1014029 - DNA, 25 bp, Homo sapien
ttcctaatcgaattgtaaagttatc

SEQ ID NO: 1014030 - DNA, 25 bp, Homo sapien
gaccttgggctccacgaatgctttg

SEQ ID NO: 1014031 - DNA, 25 bp, Homo sapien
tgttccctctagattgtgttttgac

SEQ ID NO: 1014032 - DNA, 25 bp, Homo sapien
gacaggtgggatattatttagggct

SEQ ID NO: 1014033 - DNA, 25 bp, Homo sapien
tggaagtgggccaaattgtttgaca

SEQ ID NO: 1014034 - DNA, 25 bp, Homo sapien
ctgatgacaccagaattaatcttcg

SEQ ID NO: 1014035 - DNA, 25 bp, Homo sapien
gtattgtaattcagctctgatgaca

SEQ ID NO: 1014036 - DNA, 25 bp, Homo sapien
atgacaccagaattaatcttcgcat

SEQ ID NO: 1014037 - DNA, 25 bp, Homo sapien
ggtattgtaattcagctctgatgac

SEQ ID NO: 1014038 - DNA, 25 bp, Homo sapien
tggtaattgagaggccaccttcgtt

SEQ ID NO: 1014039 - DNA, 25 bp, Homo sapien
tgagaggccaccttcgttgatatct

SEQ ID NO: 1014040 - DNA, 25 bp, Homo sapien
ggccaccttcgttgatatctttttg

SEQ ID NO: 1014041 - DNA, 25 bp, Homo sapien
tgggtggtaattgagaggccacctt

SEQ ID NO: 1014042 - DNA, 25 bp, Homo sapien
actctagttgaaagtctctctccat

SEQ ID NO: 1014043 - DNA, 25 bp, Homo sapien
ccatccacaaacaactctagttgaa

SEQ ID NO: 1014044 - DNA, 25 bp, Homo sapien
catccacaaacaactctagttgaaa

SEQ ID NO: 1014045 - DNA, 25 bp, Homo sapien
tccatccacaaacaactctagttga

SEQ ID NO: 1014046 - DNA, 25 bp, Homo sapien
agatttcaggcatttgtcaagggcc

SEQ ID NO: 1014047 - DNA, 25 bp, Homo sapien
gacatggatggattgcttggaattc

SEQ ID NO: 1014048 - DNA, 25 bp, Homo sapien
tcaaagtatgacatggatggattgc

SEQ ID NO: 1014049 - DNA, 25 bp, Homo sapien
gattgcttggaattctttcaaagcc

SEQ ID NO: 1014050 - DNA, 25 bp, Homo sapien
cttgctttgtcaaagtatgacatgg

SEQ ID NO: 1014051 - DNA, 25 bp, Homo sapien
gttgcagcggcaagcaatagcctgc

SEQ ID NO: 1014052 - DNA, 25 bp, Homo sapien
aagttgcagcggcaagcaatagcct

SEQ ID NO: 1014053 - DNA, 25 bp, Homo sapien
tgcagcggcaagcaatagcctgctg

SEQ ID NO: 1014054 - DNA, 25 bp, Homo sapien
gcggcaagcaatagcctgctgcctg

SEQ ID NO: 1014055 - DNA, 25 bp, Homo sapien
gcctgtgcaagcgaagctgtaacat

SEQ ID NO: 1014056 - DNA, 25 bp, Homo sapien
tccgataacgcagcagcctgtgcaa

SEQ ID NO: 1014057 - DNA, 25 bp, Homo sapien
tctgctggtgagcactggtggctcc

SEQ ID NO: 1014058 - DNA, 25 bp, Homo sapien
gagtgtgttttccactgaaacgcag

SEQ ID NO: 1014059 - DNA, 25 bp, Homo sapien
ggttgtaaatgcgtttatccagcct

SEQ ID NO: 1014060 - DNA, 25 bp, Homo sapien
taaagaatgaagtagggctgtagct

SEQ ID NO: 1014061 - DNA, 25 bp, Homo sapien
tttagttttcctatagccagtcaga

SEQ ID NO: 1014062 - DNA, 25 bp, Homo sapien
taattgcctgttcatcaactgccat

SEQ ID NO: 1014063 - DNA, 25 bp, Homo sapien
gaaaggccatagtcagcgcatccat

SEQ ID NO: 1014064 - DNA, 25 bp, Homo sapien
agcatcattgatgccggttggcaaa

SEQ ID NO: 1014065 - DNA, 25 bp, Homo sapien
aattaaccaccgtggacactgtggg

SEQ ID NO: 1014066 - DNA, 25 bp, Homo sapien
cctctggcagcgtaaggaattaacc

SEQ ID NO: 1014067 - DNA, 25 bp, Homo sapien
caggccttaaagtggtgcgcatgaa

SEQ ID NO: 1014068 - DNA, 25 bp, Homo sapien
ggtaaagaacaagcttcacgctcac

SEQ ID NO: 1014069 - DNA, 25 bp, Homo sapien
ttccctgcagtttgcagaccctcag

SEQ ID NO: 1014070 - DNA, 25 bp, Homo sapien
tgcgcatgaagctgtccggtatcaa

SEQ ID NO: 1014071 - DNA, 25 bp, Homo sapien
aatgtggatattgaagactttcctg

SEQ ID NO: 1014072 - DNA, 25 bp, Homo sapien
taacttctttctttcattgtggctc

SEQ ID NO: 1014073 - DNA, 25 bp, Homo sapien
tggctctttgcacctttttcatgga

SEQ ID NO: 1014074 - DNA, 25 bp, Homo sapien
cctttttcatggaagtctttgtgca

SEQ ID NO: 1014075 - DNA, 25 bp, Homo sapien
cattgtggctctttgcacctttttc

SEQ ID NO: 1014076 - DNA, 25 bp, Homo sapien
cttttcttactggatccagctccat

SEQ ID NO: 1014077 - DNA, 25 bp, Homo sapien
caactgcgttcttggtaccaaagac

SEQ ID NO: 1014078 - DNA, 25 bp, Homo sapien
cgttccaactgcgttcttggtacca

SEQ ID NO: 1014079 - DNA, 25 bp, Homo sapien
gctggcgttccaactgcgttcttgg

SEQ ID NO: 1014080 - DNA, 25 bp, Homo sapien
gcagtcttgaagtacccatttggtt

SEQ ID NO: 1014081 - DNA, 25 bp, Homo sapien
tcatttagaccacagatccagagga

SEQ ID NO: 1014082 - DNA, 25 bp, Homo sapien
ggaactgcttggtcagtccacctgc

SEQ ID NO: 1014083 - DNA, 25 bp, Homo sapien
tctatgcctatggtggtagccagcc

SEQ ID NO: 1014084 - DNA, 25 bp, Homo sapien
cttggatgagagtcaagcttgtgac

SEQ ID NO: 1014085 - DNA, 25 bp, Homo sapien
ggtaaaccaaactgagagaaatatg

SEQ ID NO: 1014086 - DNA, 25 bp, Homo sapien
tctctaaggagtagtttaggtctgc

SEQ ID NO: 1014087 - DNA, 25 bp, Homo sapien
gactgttggtgccataggtaaacca

SEQ ID NO: 1014088 - DNA, 25 bp, Homo sapien
ggttacatctcggatgtccatgtgg

SEQ ID NO: 1014089 - DNA, 25 bp, Homo sapien
ttacatctcggatgtccatgtggtg

SEQ ID NO: 1014090 - DNA, 25 bp, Homo sapien
atggttacatctcggatgtccatgt

SEQ ID NO: 1014091 - DNA, 25 bp, Homo sapien
tacatctcggatgtccatgtggtgt

SEQ ID NO: 1014092 - DNA, 25 bp, Homo sapien
agttggctgcgaaaaggggttgagg

SEQ ID NO: 1014093 - DNA, 25 bp, Homo sapien
ggagttggctgcgaaaaggggttga

SEQ ID NO: 1014094 - DNA, 25 bp, Homo sapien
gagttggctgcgaaaaggggttgag

SEQ ID NO: 1014095 - DNA, 25 bp, Homo sapien
agggaggtctgatgtgcgggtctca

SEQ ID NO: 1014096 - DNA, 25 bp, Homo sapien
tgcgggtctcagaatggtgcaaacc

SEQ ID NO: 1014097 - DNA, 25 bp, Homo sapien
aaccactgagctccctttccgtgag

SEQ ID NO: 1014098 - DNA, 25 bp, Homo sapien
cctggagtaggaaccactgagctcc

SEQ ID NO: 1014099 - DNA, 25 bp, Homo sapien
ccagctcgagtccacgtgctgagcg

SEQ ID NO: 1014100 - DNA, 25 bp, Homo sapien
tgctgagcgctcaggccaggtgggc

SEQ ID NO: 1014101 - DNA, 25 bp, Homo sapien
tgatgcttacagttgagagctgtgt

SEQ ID NO: 1014102 - DNA, 25 bp, Homo sapien
gtgcagagccagctcgagtccacgt

SEQ ID NO: 1014103 - DNA, 25 bp, Homo sapien
ctgcatatgttacaaaaaggggagt

SEQ ID NO: 1014104 - DNA, 25 bp, Homo sapien
tgcatatgttacaaaaaggggagta

SEQ ID NO: 1014105 - DNA, 25 bp, Homo sapien
ttttctctgaggtgttcgctccaac

SEQ ID NO: 1014106 - DNA, 25 bp, Homo sapien
tttctctgaggtgttcgctccaact

SEQ ID NO: 1014107 - DNA, 25 bp, Homo sapien
ctctttttctctgaggtgttcgctc

SEQ ID NO: 1014108 - DNA, 25 bp, Homo sapien
ctttttctctgaggtgttcgctcca

SEQ ID NO: 1014109 - DNA, 25 bp, Homo sapien
cactgatccggatgcaagccggaaa

SEQ ID NO: 1014110 - DNA, 25 bp, Homo sapien
tgtgctgtaatattgatcatctgtg

SEQ ID NO: 1014111 - DNA, 25 bp, Homo sapien
ggttggtttacagccaacacactga

SEQ ID NO: 1014112 - DNA, 25 bp, Homo sapien
tagcttactggataatcacaaaggc

SEQ ID NO: 1014113 - DNA, 25 bp, Homo sapien
acgtgccgagaaagggccgcacagc

SEQ ID NO: 1014114 - DNA, 25 bp, Homo sapien
cagcacaggcttgggccacgtgccg

SEQ ID NO: 1014115 - DNA, 25 bp, Homo sapien
gaaagggccgcacagccacaggttg

SEQ ID NO: 1014116 - DNA, 25 bp, Homo sapien
ttgtacttcactgcgtagacccagc

SEQ ID NO: 1014117 - DNA, 25 bp, Homo sapien
ttaattgtactctgcatgggagaaa

SEQ ID NO: 1014118 - DNA, 25 bp, Homo sapien
taattgtactctgcatgggagaaat

SEQ ID NO: 1014119 - DNA, 25 bp, Homo sapien
gacatcgctgttagtggagggctta

SEQ ID NO: 1014120 - DNA, 25 bp, Homo sapien
gccagggaaataattgggagcccaa

SEQ ID NO: 1014121 - DNA, 25 bp, Homo sapien
caaggaagtattttatctaggccag

SEQ ID NO: 1014122 - DNA, 25 bp, Homo sapien
aggaaacctgagattactgcttagg

SEQ ID NO: 1014123 - DNA, 25 bp, Homo sapien
ttgatcactccggaaggagagccca

SEQ ID NO: 1014124 - DNA, 25 bp, Homo sapien
ggtgccgtctctgtcactgcagtgc

SEQ ID NO: 1014125 - DNA, 25 bp, Homo sapien
ggagagcccatacccattcatcagt

SEQ ID NO: 1014126 - DNA, 25 bp, Homo sapien
gcccctggcagcacaaatttacatt

SEQ ID NO: 1014127 - DNA, 25 bp, Homo sapien
ctactgatcatagatgatatctcca

SEQ ID NO: 1014128 - DNA, 25 bp, Homo sapien
tagatgatatctccaaatgagagaa

SEQ ID NO: 1014129 - DNA, 25 bp, Homo sapien
catagatgatatctccaaatgagag

SEQ ID NO: 1014130 - DNA, 25 bp, Homo sapien
gatcatagatgatatctccaaatga

SEQ ID NO: 1014131 - DNA, 25 bp, Homo sapien
taccatatgctaatagggcctgccc

SEQ ID NO: 1014132 - DNA, 25 bp, Homo sapien
actgagtgaccgtaaacttcttgca

SEQ ID NO: 1014133 - DNA, 25 bp, Homo sapien
tgccctcgaggtcagaaaatttatg

SEQ ID NO: 1014134 - DNA, 25 bp, Homo sapien
cataccttcatttagagattactcc

SEQ ID NO: 1014135 - DNA, 25 bp, Homo sapien
gggagctccagctttgcatttgttt

SEQ ID NO: 1014136 - DNA, 25 bp, Homo sapien
tgaagaagtctagctcagaaggaca

SEQ ID NO: 1014137 - DNA, 25 bp, Homo sapien
cctgtatgtataggcatgggaagta

SEQ ID NO: 1014138 - DNA, 25 bp, Homo sapien
gatagattagtctcagttggcctga

SEQ ID NO: 1014139 - DNA, 25 bp, Homo sapien
gaggtcggctcagcgttcctcccag

SEQ ID NO: 1014140 - DNA, 25 bp, Homo sapien
ttcagcctaacggagaggtcggctc

SEQ ID NO: 1014141 - DNA, 25 bp, Homo sapien
agattcgggaggccactgcgtccag

SEQ ID NO: 1014142 - DNA, 25 bp, Homo sapien
catcctcgggcgatattagggtcct

SEQ ID NO: 1014143 - DNA, 25 bp, Homo sapien
tatttatcaaagtccatgaccccgg

SEQ ID NO: 1014144 - DNA, 25 bp, Homo sapien
cttgtacgctactgcccttcaggta

SEQ ID NO: 1014145 - DNA, 25 bp, Homo sapien
aaaccgggcttctcaaagggcactg

SEQ ID NO: 1014146 - DNA, 25 bp, Homo sapien
tgacccctgggtttgaaaattcaga

SEQ ID NO: 1014147 - DNA, 25 bp, Homo sapien
tgacccgggcagtcttttcaacatt

SEQ ID NO: 1014148 - DNA, 25 bp, Homo sapien
tcgttactggttccgagcctcagga

SEQ ID NO: 1014149 - DNA, 25 bp, Homo sapien
tgtgcactggcagtcctcagaagag

SEQ ID NO: 1014150 - DNA, 25 bp, Homo sapien
caaatccaacagatgtaagccggga

SEQ ID NO: 1014151 - DNA, 25 bp, Homo sapien
cagccctagtaactctgtgatttga

SEQ ID NO: 1014152 - DNA, 25 bp, Homo sapien
ctgaagttatcgattagggagagga

SEQ ID NO: 1014153 - DNA, 25 bp, Homo sapien
ggttccaggtctgctatacatactc

SEQ ID NO: 1014154 - DNA, 25 bp, Homo sapien
gcacgttatattgggcacagcccta

SEQ ID NO: 1014155 - DNA, 25 bp, Homo sapien
tatagctaagaaatattcctaacgg

SEQ ID NO: 1014156 - DNA, 25 bp, Homo sapien
cctcatagaacgcagaggagaggcc

SEQ ID NO: 1014157 - DNA, 25 bp, Homo sapien
aggtgtgaaaccagaccagtctatc

SEQ ID NO: 1014158 - DNA, 25 bp, Homo sapien
ctaacggacctcgaggagcgcgaga

SEQ ID NO: 1014159 - DNA, 25 bp, Homo sapien
gacatttctagcttatagcatgttc

SEQ ID NO: 1014160 - DNA, 25 bp, Homo sapien
gaaaatgagtatagttttagcatat

SEQ ID NO: 1014161 - DNA, 25 bp, Homo sapien
gcatattcccgtatatttcacagac

SEQ ID NO: 1014162 - DNA, 25 bp, Homo sapien
tgttcctctcaatggaagtgttccc

SEQ ID NO: 1014163 - DNA, 25 bp, Homo sapien
aaatgtgtcatatctcccataagta

SEQ ID NO: 1014164 - DNA, 25 bp, Homo sapien
gaaattgactggtgtcaacttccag

SEQ ID NO: 1014165 - DNA, 25 bp, Homo sapien
acttccagtgtttgtgtgataggag

SEQ ID NO: 1014166 - DNA, 25 bp, Homo sapien
tttgtgtgataggaggtctcaaaac

SEQ ID NO: 1014167 - DNA, 25 bp, Homo sapien
ctccatccatgctggccattagcat

SEQ ID NO: 1014168 - DNA, 25 bp, Homo sapien
gcacgctgccccacacatctcacac

SEQ ID NO: 1014169 - DNA, 25 bp, Homo sapien
tccatgctggccattagcatggttt

SEQ ID NO: 1014170 - DNA, 25 bp, Homo sapien
cgctgccccacacatctcacacgct

SEQ ID NO: 1014171 - DNA, 25 bp, Homo sapien
gctaggatcacacctctaaagcctg

SEQ ID NO: 1014172 - DNA, 25 bp, Homo sapien
gaatcaggcactttcctacactgta

SEQ ID NO: 1014173 - DNA, 25 bp, Homo sapien
gataaacaaccgcacagaaaatgca

SEQ ID NO: 1014174 - DNA, 25 bp, Homo sapien
tagaaggacagtgttatcatcttgc

SEQ ID NO: 1014175 - DNA, 25 bp, Homo sapien
ttagcaacaagacaagggtgatccc

SEQ ID NO: 1014176 - DNA, 25 bp, Homo sapien
gccctacagttaataccatgcttaa

SEQ ID NO: 1014177 - DNA, 25 bp, Homo sapien
acactcagcctactaagaatagagg

SEQ ID NO: 1014178 - DNA, 25 bp, Homo sapien
tagaagctttctggctaagattagc

SEQ ID NO: 1014179 - DNA, 25 bp, Homo sapien
taaggtagtccatcacatcaactgg

SEQ ID NO: 1014180 - DNA, 25 bp, Homo sapien
aaatcaattaaggtagtccatcaca

SEQ ID NO: 1014181 - DNA, 25 bp, Homo sapien
tgatcaacaggggtttatcccacat

SEQ ID NO: 1014182 - DNA, 25 bp, Homo sapien
aacaggggtttatcccacatgcata

SEQ ID NO: 1014183 - DNA, 25 bp, Homo sapien
gcaaactaaagctgacactgtataa

SEQ ID NO: 1014184 - DNA, 25 bp, Homo sapien
gactgaatatatgcatctacatctt

SEQ ID NO: 1014185 - DNA, 25 bp, Homo sapien
ctccagacttttgttaagcttttag

SEQ ID NO: 1014186 - DNA, 25 bp, Homo sapien
actggttcaaaaggaatgactgaat

SEQ ID NO: 1014187 - DNA, 25 bp, Homo sapien
taaagtgacctctgacagcacagga

SEQ ID NO: 1014188 - DNA, 25 bp, Homo sapien
tctaagacccttggaatttctggag

SEQ ID NO: 1014189 - DNA, 25 bp, Homo sapien
tatctgccccatttaattgtgaagc

SEQ ID NO: 1014190 - DNA, 25 bp, Homo sapien
gacatgacaagaaatagatacctgg

SEQ ID NO: 1014191 - DNA, 25 bp, Homo sapien
tcaatatacaacctggctgggtaca

SEQ ID NO: 1014192 - DNA, 25 bp, Homo sapien
atttcaatatacaacctggctgggt

SEQ ID NO: 1014193 - DNA, 25 bp, Homo sapien
caatatacaacctggctgggtacag

SEQ ID NO: 1014194 - DNA, 25 bp, Homo sapien
ttcaatatacaacctggctgggtac

SEQ ID NO: 1014195 - DNA, 25 bp, Homo sapien
gagatcctaagactcaccgaacaga

SEQ ID NO: 1014196 - DNA, 25 bp, Homo sapien
cagttcctgccatggtgagaagtgg

SEQ ID NO: 1014197 - DNA, 25 bp, Homo sapien
ctgtgtctaatactggtcaatggca

SEQ ID NO: 1014198 - DNA, 25 bp, Homo sapien
catgacacataacaggccctaaagg

SEQ ID NO: 1014199 - DNA, 25 bp, Homo sapien
cagagcagaggacttgcaaccaaga

SEQ ID NO: 1014200 - DNA, 25 bp, Homo sapien
cagttattaggggttgttaccacag

SEQ ID NO: 1014201 - DNA, 25 bp, Homo sapien
gacttgcaaccaagagcttaaaatt

SEQ ID NO: 1014202 - DNA, 25 bp, Homo sapien
gggttgttaccacaggaaggtgctg

SEQ ID NO: 1014203 - DNA, 25 bp, Homo sapien
gcatgtccagggtcttagggtctca

SEQ ID NO: 1014204 - DNA, 25 bp, Homo sapien
cactctggttaggacgactctgaca

SEQ ID NO: 1014205 - DNA, 25 bp, Homo sapien
taaaaacttgtggtccagctcgtcc

SEQ ID NO: 1014206 - DNA, 25 bp, Homo sapien
gaaaaagggtcttatcccagatgcc

SEQ ID NO: 1014207 - DNA, 25 bp, Homo sapien
gcacagcagaaatctctcctcgacc

SEQ ID NO: 1014208 - DNA, 25 bp, Homo sapien
acagcagaaatctctcctcgaccag

SEQ ID NO: 1014209 - DNA, 25 bp, Homo sapien
agcacagcagaaatctctcctcgac

SEQ ID NO: 1014210 - DNA, 25 bp, Homo sapien
cacagcagaaatctctcctcgacca

SEQ ID NO: 1014211 - DNA, 25 bp, Homo sapien
aagaggtagctggtttcttctccct

SEQ ID NO: 1014212 - DNA, 25 bp, Homo sapien
gaactggcagttcatctgtggattc

SEQ ID NO: 1014213 - DNA, 25 bp, Homo sapien
agtaacagacctgacctgttgcagg

SEQ ID NO: 1014214 - DNA, 25 bp, Homo sapien
ctctctttggatgtagcaggtttaa

SEQ ID NO: 1014215 - DNA, 25 bp, Homo sapien
tccagtagaccctgagatacttgaa

SEQ ID NO: 1014216 - DNA, 25 bp, Homo sapien
caaattgaactgctcatgaatcctc

SEQ ID NO: 1014217 - DNA, 25 bp, Homo sapien
cacctagtgttaggaaatctttcca

SEQ ID NO: 1014218 - DNA, 25 bp, Homo sapien
tccaccgttttaagcctttgcacaa

SEQ ID NO: 1014219 - DNA, 25 bp, Homo sapien
gccaccacgcccggccatgcctggc

SEQ ID NO: 1014220 - DNA, 25 bp, Homo sapien
caccacgcccggccatgcctggcta

SEQ ID NO: 1014221 - DNA, 25 bp, Homo sapien
accacgcccggccatgcctggctaa

SEQ ID NO: 1014222 - DNA, 25 bp, Homo sapien
agccaccacgcccggccatgcctgg

SEQ ID NO: 1014223 - DNA, 25 bp, Homo sapien
tttaggcaagtccaacaaagtatcg

SEQ ID NO: 1014224 - DNA, 25 bp, Homo sapien
gtgtgagatggcaaaaggcttcatt

SEQ ID NO: 1014225 - DNA, 25 bp, Homo sapien
caaagtatcgaggtcagtttctcac

SEQ ID NO: 1014226 - DNA, 25 bp, Homo sapien
gcacagcccgagaattcagcaaatg

SEQ ID NO: 1014227 - DNA, 25 bp, Homo sapien
tactactattttggtcttgtatggc

SEQ ID NO: 1014228 - DNA, 25 bp, Homo sapien
gagaacaaactgatacatgacccat

SEQ ID NO: 1014229 - DNA, 25 bp, Homo sapien
tttcaaaagtacacagtactctctt

SEQ ID NO: 1014230 - DNA, 25 bp, Homo sapien
taaacattatgcttcagtttgcata

SEQ ID NO: 1014231 - DNA, 25 bp, Homo sapien
cttggtacagagttctagatgggca

SEQ ID NO: 1014232 - DNA, 25 bp, Homo sapien
gcttgaatctgaggcttgtctttca

SEQ ID NO: 1014233 - DNA, 25 bp, Homo sapien
cccacatgttcagagagggacctca

SEQ ID NO: 1014234 - DNA, 25 bp, Homo sapien
cctcatgggaggtgaatgaattacg

SEQ ID NO: 1014235 - DNA, 25 bp, Homo sapien
tgcaagcttgatcccagaggagcac

SEQ ID NO: 1014236 - DNA, 25 bp, Homo sapien
gtgtctgtcgacctctactgggaag

SEQ ID NO: 1014237 - DNA, 25 bp, Homo sapien
tattaggtccgcttgttccggagcc

SEQ ID NO: 1014238 - DNA, 25 bp, Homo sapien
tctcattggtgttccaggtgccact

SEQ ID NO: 1014239 - DNA, 25 bp, Homo sapien
ttcatttatcaaatacagaagtctt

SEQ ID NO: 1014240 - DNA, 25 bp, Homo sapien
tctgtggaaaacgatgtggtatttt

SEQ ID NO: 1014241 - DNA, 25 bp, Homo sapien
caatgttttgtagttatcctcgtag

SEQ ID NO: 1014242 - DNA, 25 bp, Homo sapien
aggtacacagtcatatcatcggaaa

SEQ ID NO: 1014243 - DNA, 25 bp, Homo sapien
ttttttcgtggctgagtagttctcg

SEQ ID NO: 1014244 - DNA, 25 bp, Homo sapien
ttttatcccttatcctcatttcacc

SEQ ID NO: 1014245 - DNA, 25 bp, Homo sapien
gagagtttaatgtacctgtcacctg

SEQ ID NO: 1014246 - DNA, 25 bp, Homo sapien
acatggattaattgtatagttgaaa

SEQ ID NO: 1014247 - DNA, 25 bp, Homo sapien
tggattccctactgtaaggagctcc

SEQ ID NO: 1014248 - DNA, 25 bp, Homo sapien
tgagctggagtcatttgagagcccg

SEQ ID NO: 1014249 - DNA, 25 bp, Homo sapien
cgttttagtgtagtgtgaccatccc

SEQ ID NO: 1014250 - DNA, 25 bp, Homo sapien
aagtgtgtcgtttgcctttgctccc

SEQ ID NO: 1014251 - DNA, 25 bp, Homo sapien
tcaagtacgacgttccagtcaaaac

SEQ ID NO: 1014252 - DNA, 25 bp, Homo sapien
aaaaattctgcatcgcttggtcata

SEQ ID NO: 1014253 - DNA, 25 bp, Homo sapien
cttctgaattctggacgggtcaagt

SEQ ID NO: 1014254 - DNA, 25 bp, Homo sapien
taatttttcctggtcgtggcagaag

SEQ ID NO: 1014255 - DNA, 25 bp, Homo sapien
gagccattgggcctcaaccttagtt

SEQ ID NO: 1014256 - DNA, 25 bp, Homo sapien
cattgggcctcaaccttagtttctt

SEQ ID NO: 1014257 - DNA, 25 bp, Homo sapien
ccacgtgcttcaccctcccatcgtg

SEQ ID NO: 1014258 - DNA, 25 bp, Homo sapien
tgctcaggttggtcaaaaactcatg

SEQ ID NO: 1014259 - DNA, 25 bp, Homo sapien
tcaagatatcctagggtcctgggcc

SEQ ID NO: 1014260 - DNA, 25 bp, Homo sapien
taaatggagtctgtattagtacccc

SEQ ID NO: 1014261 - DNA, 25 bp, Homo sapien
tgtaagccgggtatcagtccagttt

SEQ ID NO: 1014262 - DNA, 25 bp, Homo sapien
tataaagttccctcgacacactgcg

SEQ ID NO: 1014263 - DNA, 25 bp, Homo sapien
gttgatttaaagatagcaggagtcc

SEQ ID NO: 1014264 - DNA, 25 bp, Homo sapien
tttaaagatagcaggagtccaaagt

SEQ ID NO: 1014265 - DNA, 25 bp, Homo sapien
atttaaagatagcaggagtccaaag

SEQ ID NO: 1014266 - DNA, 25 bp, Homo sapien
gcctgttgatttaaagatagcagga

SEQ ID NO: 1014267 - DNA, 25 bp, Homo sapien
gacccagcaaactgtagaggcctgg

SEQ ID NO: 1014268 - DNA, 25 bp, Homo sapien
tctcagaaagtaatgggacccagca

SEQ ID NO: 1014269 - DNA, 25 bp, Homo sapien
aagccaggtgctttctatgacaatg

SEQ ID NO: 1014270 - DNA, 25 bp, Homo sapien
tttgggagccttcccaagagacttg

SEQ ID NO: 1014271 - DNA, 25 bp, Homo sapien
caattgtgagacatcaccagaagct

SEQ ID NO: 1014272 - DNA, 25 bp, Homo sapien
aataagagaaaagtcctaatcccag

SEQ ID NO: 1014273 - DNA, 25 bp, Homo sapien
tcccagtggcaaactatgctgatgt

SEQ ID NO: 1014274 - DNA, 25 bp, Homo sapien
taataccacaggatgtcaacaattg

SEQ ID NO: 1014275 - DNA, 25 bp, Homo sapien
ggtttcactgtgtaaaagggcaagc

SEQ ID NO: 1014276 - DNA, 25 bp, Homo sapien
actggagtatggtgcacccttccaa

SEQ ID NO: 1014277 - DNA, 25 bp, Homo sapien
ggaatacattccacttataatcagc

SEQ ID NO: 1014278 - DNA, 25 bp, Homo sapien
tcctagggtagcatgcacaagatca

SEQ ID NO: 1014279 - DNA, 25 bp, Homo sapien
taattgaatcatgggggtggtttcc

SEQ ID NO: 1014280 - DNA, 25 bp, Homo sapien
gtgggagggacctggtgggagataa

SEQ ID NO: 1014281 - DNA, 25 bp, Homo sapien
ggacctggtgggagataattgaatc

SEQ ID NO: 1014282 - DNA, 25 bp, Homo sapien
tgtagctcccacaattcccacatgt

SEQ ID NO: 1014283 - DNA, 25 bp, Homo sapien
tcttatgactttccatcctcatagt

SEQ ID NO: 1014284 - DNA, 25 bp, Homo sapien
tggcctgtgtcattcttatgacttt

SEQ ID NO: 1014285 - DNA, 25 bp, Homo sapien
cctggcctgtgtcattcttatgact

SEQ ID NO: 1014286 - DNA, 25 bp, Homo sapien
cacctggcctgtgtcattcttatga

SEQ ID NO: 1014287 - DNA, 25 bp, Homo sapien
gtcttctgcctctggaacacccata

SEQ ID NO: 1014288 - DNA, 25 bp, Homo sapien
tttcagatgcaaggctcccttgagc

SEQ ID NO: 1014289 - DNA, 25 bp, Homo sapien
tcagtggaaagctgatcgaggactt

SEQ ID NO: 1014290 - DNA, 25 bp, Homo sapien
taacaatgcagatgcaccaagccag

SEQ ID NO: 1014291 - DNA, 25 bp, Homo sapien
ccttcttctcgagagccttttttgg

SEQ ID NO: 1014292 - DNA, 25 bp, Homo sapien
cccttcttctcgagagccttttttg

SEQ ID NO: 1014293 - DNA, 25 bp, Homo sapien
cttctcgagagccttttttggcttg

SEQ ID NO: 1014294 - DNA, 25 bp, Homo sapien
ttcttctcgagagccttttttggct

SEQ ID NO: 1014295 - DNA, 25 bp, Homo sapien
gttgcttgtgctttggatatcctat

SEQ ID NO: 1014296 - DNA, 25 bp, Homo sapien
gatccactttaagttgacgtttgta

SEQ ID NO: 1014297 - DNA, 25 bp, Homo sapien
ttcaggatattcaccccaaattgga

SEQ ID NO: 1014298 - DNA, 25 bp, Homo sapien
cagactcatatcctgaagcatttcc

SEQ ID NO: 1014299 - DNA, 25 bp, Homo sapien
ggcttaagtctacagtttccccaca

SEQ ID NO: 1014300 - DNA, 25 bp, Homo sapien
tattaggagacaaccaagggagcat

SEQ ID NO: 1014301 - DNA, 25 bp, Homo sapien
gcccaggcccaaggcttaagtctac

SEQ ID NO: 1014302 - DNA, 25 bp, Homo sapien
gacagtgatcagagcataaaaggaa

SEQ ID NO: 1014303 - DNA, 25 bp, Homo sapien
tagctagtagaaaaggaatggcatg

SEQ ID NO: 1014304 - DNA, 25 bp, Homo sapien
ggtattttgcaaactagattagcta

SEQ ID NO: 1014305 - DNA, 25 bp, Homo sapien
aatgaatcatgagttttgggttcac

SEQ ID NO: 1014306 - DNA, 25 bp, Homo sapien
gaggaactaatctgttgaactaact

SEQ ID NO: 1014307 - DNA, 25 bp, Homo sapien
aggccaggacaaagggtatcagcga

SEQ ID NO: 1014308 - DNA, 25 bp, Homo sapien
ggtgttgatgtctcttccctggaga

SEQ ID NO: 1014309 - DNA, 25 bp, Homo sapien
gggacatttcataggcaccaatacc

SEQ ID NO: 1014310 - DNA, 25 bp, Homo sapien
ttagcactgtaggttttcaagaaaa

SEQ ID NO: 1014311 - DNA, 25 bp, Homo sapien
ttcccccgtgggcaaacaaggtgca

SEQ ID NO: 1014312 - DNA, 25 bp, Homo sapien
aacaaggtgcatctcaagacaggcc

SEQ ID NO: 1014313 - DNA, 25 bp, Homo sapien
ttagttttcttgaagcacactaaat

SEQ ID NO: 1014314 - DNA, 25 bp, Homo sapien
agacagtcaccacccagtaaggaaa

SEQ ID NO: 1014315 - DNA, 25 bp, Homo sapien
tatgtaccagatcctgtgccaagtc

SEQ ID NO: 1014316 - DNA, 25 bp, Homo sapien
taaatcagtactggcttaagcctcc

SEQ ID NO: 1014317 - DNA, 25 bp, Homo sapien
taacttggtttacactgccagccag

SEQ ID NO: 1014318 - DNA, 25 bp, Homo sapien
gtatccaactattgctaatttctga

SEQ ID NO: 1014319 - DNA, 25 bp, Homo sapien
ggaagtatccaactattgctaattt

SEQ ID NO: 1014320 - DNA, 25 bp, Homo sapien
tctaactttgatggaatactttgta

SEQ ID NO: 1014321 - DNA, 25 bp, Homo sapien
tccccattatgcatgatgcttgaga

SEQ ID NO: 1014322 - DNA, 25 bp, Homo sapien
ttctgggtcccgtctattcatagtc

SEQ ID NO: 1014323 - DNA, 25 bp, Homo sapien
cagggaggttcactgccctattcta

SEQ ID NO: 1014324 - DNA, 25 bp, Homo sapien
taaaacaagattgcccatgagttga

SEQ ID NO: 1014325 - DNA, 25 bp, Homo sapien
tcaatgttgacgctgagtgatgggt

SEQ ID NO: 1014326 - DNA, 25 bp, Homo sapien
tttttcatagagacaagctctcacc

SEQ ID NO: 1014327 - DNA, 25 bp, Homo sapien
ggaatacaggtatacaccaccaagc

SEQ ID NO: 1014328 - DNA, 25 bp, Homo sapien
aagtacctgggaatacaggtataca

SEQ ID NO: 1014329 - DNA, 25 bp, Homo sapien
tcatagagacaagctctcaccatat

SEQ ID NO: 1014330 - DNA, 25 bp, Homo sapien
tactattgttaaacaggtgactagc

SEQ ID NO: 1014331 - DNA, 25 bp, Homo sapien
cacaaccttccttcaatctcaattg

SEQ ID NO: 1014332 - DNA, 25 bp, Homo sapien
caattgtccttgagatcaaatcaaa

SEQ ID NO: 1014333 - DNA, 25 bp, Homo sapien
ggatgtcatcctttagacactgcac

SEQ ID NO: 1014334 - DNA, 25 bp, Homo sapien
gagaatagcataatactcaggtaaa

SEQ ID NO: 1014335 - DNA, 25 bp, Homo sapien
tgtgttcaattttccccacacgcac

SEQ ID NO: 1014336 - DNA, 25 bp, Homo sapien
gccccaggtgttctggaacagtggt

SEQ ID NO: 1014337 - DNA, 25 bp, Homo sapien
cacttctacgtaattgttgcatgtt

SEQ ID NO: 1014338 - DNA, 25 bp, Homo sapien
gaaacccagaacaattgcccgagtg

SEQ ID NO: 1014339 - DNA, 25 bp, Homo sapien
gctggcccgggtttgcaggttcaaa

SEQ ID NO: 1014340 - DNA, 25 bp, Homo sapien
cacctgtgacatgttggctggcccg

SEQ ID NO: 1014341 - DNA, 25 bp, Homo sapien
gatccatgaattaacggtcccagaa

SEQ ID NO: 1014342 - DNA, 25 bp, Homo sapien
ttcagcagggctgctcagcgtggcc

SEQ ID NO: 1014343 - DNA, 25 bp, Homo sapien
gggagacgttcagcagggctgctca

SEQ ID NO: 1014344 - DNA, 25 bp, Homo sapien
gctgctcagcgtggcctgcacgcgc

SEQ ID NO: 1014345 - DNA, 25 bp, Homo sapien
cagggctgctcagcgtggcctgcac

SEQ ID NO: 1014346 - DNA, 25 bp, Homo sapien
gaagtcaagaagaaaggacaagtag

SEQ ID NO: 1014347 - DNA, 25 bp, Homo sapien
ggaagtcaagaagaaaggacaagta

SEQ ID NO: 1014348 - DNA, 25 bp, Homo sapien
aggaagtcaagaagaaaggacaagt

SEQ ID NO: 1014349 - DNA, 25 bp, Homo sapien
aacaaaagcctgcagccaattgcac

SEQ ID NO: 1014350 - DNA, 25 bp, Homo sapien
ggactgctgcaaacttctaaacaaa

SEQ ID NO: 1014351 - DNA, 25 bp, Homo sapien
gcaaggccagaagacacgttggtgc

SEQ ID NO: 1014352 - DNA, 25 bp, Homo sapien
tagcaaccaccagcaagggtgtgag

SEQ ID NO: 1014353 - DNA, 25 bp, Homo sapien
gcctcatgccctgtagaagacagtg

SEQ ID NO: 1014354 - DNA, 25 bp, Homo sapien
caggcaggaccgtgagacgtgtact

SEQ ID NO: 1014355 - DNA, 25 bp, Homo sapien
gcaaatgtctaggaaaagctgttaa

SEQ ID NO: 1014356 - DNA, 25 bp, Homo sapien
tctatcgcaaacacatatactgagg

SEQ ID NO: 1014357 - DNA, 25 bp, Homo sapien
ggaggtcgcaatggcaattgccaca

SEQ ID NO: 1014358 - DNA, 25 bp, Homo sapien
caggaggtcgcaatggcaattgcca

SEQ ID NO: 1014359 - DNA, 25 bp, Homo sapien
ccaggaggtcgcaatggcaattgcc

SEQ ID NO: 1014360 - DNA, 25 bp, Homo sapien
gaggtcgcaatggcaattgccacag

SEQ ID NO: 1014361 - DNA, 25 bp, Homo sapien
ttaggcatgctctcttaaccaggag

SEQ ID NO: 1014362 - DNA, 25 bp, Homo sapien
tgggccttaggcatgctctcttaac

SEQ ID NO: 1014363 - DNA, 25 bp, Homo sapien
taaccaggagagcaaccagatccat

SEQ ID NO: 1014364 - DNA, 25 bp, Homo sapien
caagaaccatgggccttaggcatgc

SEQ ID NO: 1014365 - DNA, 25 bp, Homo sapien
ttcatggaaggtgcgttttattttc

SEQ ID NO: 1014366 - DNA, 25 bp, Homo sapien
gggacacttcatggaaggtgcgttt

SEQ ID NO: 1014367 - DNA, 25 bp, Homo sapien
cacttcatggaaggtgcgttttatt

SEQ ID NO: 1014368 - DNA, 25 bp, Homo sapien
tctggggacacttcatggaaggtgc

SEQ ID NO: 1014369 - DNA, 25 bp, Homo sapien
taccatcaggtccaagtaatgtgcc

SEQ ID NO: 1014370 - DNA, 25 bp, Homo sapien
cactgggttgagactgcacattgga

SEQ ID NO: 1014371 - DNA, 25 bp, Homo sapien
gccctggccgttaaaccgataatga

SEQ ID NO: 1014372 - DNA, 25 bp, Homo sapien
tcctacgtgctttgtgagatatccc

SEQ ID NO: 1014373 - DNA, 25 bp, Homo sapien
agggtgtttccacaaacagacttcg

SEQ ID NO: 1014374 - DNA, 25 bp, Homo sapien
tttccacaaacagacttcgttccat

SEQ ID NO: 1014375 - DNA, 25 bp, Homo sapien
aaatcaggtccaagtaaacagaggg

SEQ ID NO: 1014376 - DNA, 25 bp, Homo sapien
gtgacttgttactttcaaaatcagg

SEQ ID NO: 1014377 - DNA, 25 bp, Homo sapien
tgtgtctcgttggagagaagaatgt

SEQ ID NO: 1014378 - DNA, 25 bp, Homo sapien
tcatgtgtctcgttggagagaagaa

SEQ ID NO: 1014379 - DNA, 25 bp, Homo sapien
agaatgtcttccaggaatcccggtc

SEQ ID NO: 1014380 - DNA, 25 bp, Homo sapien
agagaagaatgtcttccaggaatcc

SEQ ID NO: 1014381 - DNA, 25 bp, Homo sapien
tccttgccaggggctcctacttcat

SEQ ID NO: 1014382 - DNA, 25 bp, Homo sapien
ccttgccaggggctcctacttcatg

SEQ ID NO: 1014383 - DNA, 25 bp, Homo sapien
gaagcaggagcgagcgaggccatgg

SEQ ID NO: 1014384 - DNA, 25 bp, Homo sapien
aggagcgagcgaggccatggcagcc

SEQ ID NO: 1014385 - DNA, 25 bp, Homo sapien
ggtagtgggtagtctggtgacacgc

SEQ ID NO: 1014386 - DNA, 25 bp, Homo sapien
gcaggtgcaagcacaggtagtgggt

SEQ ID NO: 1014387 - DNA, 25 bp, Homo sapien
caagcacaggtagtgggtagtctgg

SEQ ID NO: 1014388 - DNA, 25 bp, Homo sapien
ggtgacacgccaggggacgatgctc

SEQ ID NO: 1014389 - DNA, 25 bp, Homo sapien
tcacacaggatgcatagtggtgcac

SEQ ID NO: 1014390 - DNA, 25 bp, Homo sapien
caggatgcatagtggtgcacagcaa

SEQ ID NO: 1014391 - DNA, 25 bp, Homo sapien
cacacaggatgcatagtggtgcaca

SEQ ID NO: 1014392 - DNA, 25 bp, Homo sapien
cacaggatgcatagtggtgcacagc

SEQ ID NO: 1014393 - DNA, 25 bp, Homo sapien
cccaggtcttgggaatacaatgagg

SEQ ID NO: 1014394 - DNA, 25 bp, Homo sapien
tatcatcgtatctgcgagacctgga

SEQ ID NO: 1014395 - DNA, 25 bp, Homo sapien
gagactccgggtattgccatgagca

SEQ ID NO: 1014396 - DNA, 25 bp, Homo sapien
gcttcttagacattcggcagtgcct

SEQ ID NO: 1014397 - DNA, 25 bp, Homo sapien
ggtgactaattcatttcagtttctc

SEQ ID NO: 1014398 - DNA, 25 bp, Homo sapien
ctggagaagcccctcaatcctggga

SEQ ID NO: 1014399 - DNA, 25 bp, Homo sapien
aatgtgatcatatagcacagggtca

SEQ ID NO: 1014400 - DNA, 25 bp, Homo sapien
aagactgggatagttgcttatccta

SEQ ID NO: 1014401 - DNA, 25 bp, Homo sapien
gatacacagtcactatggtagcctg

SEQ ID NO: 1014402 - DNA, 25 bp, Homo sapien
tgtctcttgtgtagttccctgccag

SEQ ID NO: 1014403 - DNA, 25 bp, Homo sapien
tcctatcatgagagatcctgagcca

SEQ ID NO: 1014404 - DNA, 25 bp, Homo sapien
ccccaatactatgaggagagatcct

SEQ ID NO: 1014405 - DNA, 25 bp, Homo sapien
gatctgagctacgtcttctggacaa

SEQ ID NO: 1014406 - DNA, 25 bp, Homo sapien
tctggacaatttgctggagcttctc

SEQ ID NO: 1014407 - DNA, 25 bp, Homo sapien
gggtcatggcgggtgaatccctcat

SEQ ID NO: 1014408 - DNA, 25 bp, Homo sapien
gtcagccttcacagatgatacagtt

SEQ ID NO: 1014409 - DNA, 25 bp, Homo sapien
atttgcacttgcttccttaggagct

SEQ ID NO: 1014410 - DNA, 25 bp, Homo sapien
tgcctttgggaccatttgcacttgc

SEQ ID NO: 1014411 - DNA, 25 bp, Homo sapien
tgcacttgcttccttaggagctctg

SEQ ID NO: 1014412 - DNA, 25 bp, Homo sapien
tttgcacttgcttccttaggagctc

SEQ ID NO: 1014413 - DNA, 25 bp, Homo sapien
tgaactaggtggaaagaatcgactg

SEQ ID NO: 1014414 - DNA, 25 bp, Homo sapien
gatgagttgactcctcaactggcca

SEQ ID NO: 1014415 - DNA, 25 bp, Homo sapien
gaatcgactgtcagaacctgcacag

SEQ ID NO: 1014416 - DNA, 25 bp, Homo sapien
cagtatgaggctgcaaattcttccc

SEQ ID NO: 1014417 - DNA, 25 bp, Homo sapien
taagattgcagggactatgcagctc

SEQ ID NO: 1014418 - DNA, 25 bp, Homo sapien
tatagccgttattcttggcacatgg

SEQ ID NO: 1014419 - DNA, 25 bp, Homo sapien
caagtcgagctaattctgaacggag

SEQ ID NO: 1014420 - DNA, 25 bp, Homo sapien
tggcacatggctgcagagcatcttc

SEQ ID NO: 1014421 - DNA, 25 bp, Homo sapien
tgtggtcttctcactacgctaggag

SEQ ID NO: 1014422 - DNA, 25 bp, Homo sapien
tgaaaggcaataaatcttcggcagc

SEQ ID NO: 1014423 - DNA, 25 bp, Homo sapien
tgttaaaaactgctgggacctcatt

SEQ ID NO: 1014424 - DNA, 25 bp, Homo sapien
cagcttgatgccagtggaccaggta

SEQ ID NO: 1014425 - DNA, 25 bp, Homo sapien
tggaaacagcggaggaacaacaact

SEQ ID NO: 1014426 - DNA, 25 bp, Homo sapien
taaataacatggagtgcgcaggcac

SEQ ID NO: 1014427 - DNA, 25 bp, Homo sapien
gcctctttctgaaaatgaatggtgt

SEQ ID NO: 1014428 - DNA, 25 bp, Homo sapien
ttttggacagactgcttgtttggaa

SEQ ID NO: 1014429 - DNA, 25 bp, Homo sapien
agtcctcagtgacctacaaagagac

SEQ ID NO: 1014430 - DNA, 25 bp, Homo sapien
cataaagcaagtcctcagtgaccta

SEQ ID NO: 1014431 - DNA, 25 bp, Homo sapien
aagcaagtcctcagtgacctacaaa

SEQ ID NO: 1014432 - DNA, 25 bp, Homo sapien
aagtcctcagtgacctacaaagaga

SEQ ID NO: 1014433 - DNA, 25 bp, Homo sapien
ccatgtgatgcccttgaagcttagt

SEQ ID NO: 1014434 - DNA, 25 bp, Homo sapien
catacactgaaggtctgattcctga

SEQ ID NO: 1014435 - DNA, 25 bp, Homo sapien
gcttggtcacgcttccttaacaaaa

SEQ ID NO: 1014436 - DNA, 25 bp, Homo sapien
aaaatacagtttcgaatagcaccaa

SEQ ID NO: 1014437 - DNA, 25 bp, Homo sapien
caatgacccgttgagtaggaagtgt

SEQ ID NO: 1014438 - DNA, 25 bp, Homo sapien
tgacaatgacccgttgagtaggaag

SEQ ID NO: 1014439 - DNA, 25 bp, Homo sapien
gcctaaggctaagccacaagcgagg

SEQ ID NO: 1014440 - DNA, 25 bp, Homo sapien
acaggtggagtgagcctaaggctaa

SEQ ID NO: 1014441 - DNA, 25 bp, Homo sapien
ctgggctttgggcttaggtcagcag

SEQ ID NO: 1014442 - DNA, 25 bp, Homo sapien
tttgagcaacactgaaggaccaggg

SEQ ID NO: 1014443 - DNA, 25 bp, Homo sapien
ctagctgacagctctcaactgggaa

SEQ ID NO: 1014444 - DNA, 25 bp, Homo sapien
tatggatcaacaaaccagagtccag

SEQ ID NO: 1014445 - DNA, 25 bp, Homo sapien
tatggcttctgggtaattccccaag

SEQ ID NO: 1014446 - DNA, 25 bp, Homo sapien
ggacctatgtcttacacgcaccctg

SEQ ID NO: 1014447 - DNA, 25 bp, Homo sapien
cactgggcggttctgaagcaaatcc

SEQ ID NO: 1014448 - DNA, 25 bp, Homo sapien
gaaaaacctggtagactcactgcca

SEQ ID NO: 1014449 - DNA, 25 bp, Homo sapien
caaggtcagttcaattttcagggcc

SEQ ID NO: 1014450 - DNA, 25 bp, Homo sapien
gtgactgcctggaccctagacggtg

SEQ ID NO: 1014451 - DNA, 25 bp, Homo sapien
caggtaggttcaggcttaagttcca

SEQ ID NO: 1014452 - DNA, 25 bp, Homo sapien
gatgctgatgatagcgagtctgtga

SEQ ID NO: 1014453 - DNA, 25 bp, Homo sapien
gagtgtttcccaaacgagatccagg

SEQ ID NO: 1014454 - DNA, 25 bp, Homo sapien
tagcgagtctgtgatctatcgtcca

SEQ ID NO: 1014455 - DNA, 25 bp, Homo sapien
gacataaacgtagtctaaagtcata

SEQ ID NO: 1014456 - DNA, 25 bp, Homo sapien
gatcacccactatatgctgagcacg

SEQ ID NO: 1014457 - DNA, 25 bp, Homo sapien
gtttcagttgaaccctaatagagag

SEQ ID NO: 1014458 - DNA, 25 bp, Homo sapien
tttgggccaaagtctacagccctct

SEQ ID NO: 1014459 - DNA, 25 bp, Homo sapien
tctggaatgactctaggatgacttt

SEQ ID NO: 1014460 - DNA, 25 bp, Homo sapien
cataaaatagactccctgactgcct

SEQ ID NO: 1014461 - DNA, 25 bp, Homo sapien
cactttcagaccgagttgtgacagc

SEQ ID NO: 1014462 - DNA, 25 bp, Homo sapien
aatcgatttaagaagcacagcaagc

SEQ ID NO: 1014463 - DNA, 25 bp, Homo sapien
gatggacatgggcttcgcagacctt

SEQ ID NO: 1014464 - DNA, 25 bp, Homo sapien
gaacggcaaccgaatctgctgctca

SEQ ID NO: 1014465 - DNA, 25 bp, Homo sapien
taacgcctgtgcttcgaacggcaac

SEQ ID NO: 1014466 - DNA, 25 bp, Homo sapien
ttatgttctgataccctaacgcctg

SEQ ID NO: 1014467 - DNA, 25 bp, Homo sapien
gctcattacgatgaccttcttcact

SEQ ID NO: 1014468 - DNA, 25 bp, Homo sapien
ggtcacagaagaagtctatgcggca

SEQ ID NO: 1014469 - DNA, 25 bp, Homo sapien
tctatgcggcacctttcagaaaacc

SEQ ID NO: 1014470 - DNA, 25 bp, Homo sapien
tccgcagtaacagtagtgacaaaca

SEQ ID NO: 1014471 - DNA, 25 bp, Homo sapien
cagaggttacgttgcccctgggcta

SEQ ID NO: 1014472 - DNA, 25 bp, Homo sapien
tgtcctgcggatgccagtggaactg

SEQ ID NO: 1014473 - DNA, 25 bp, Homo sapien
tcttcagcgtgtgagggaaacggct

SEQ ID NO: 1014474 - DNA, 25 bp, Homo sapien
gctgtgattggcctgtgctgtcctg

SEQ ID NO: 1014475 - DNA, 25 bp, Homo sapien
tcttcacagatcgtgtcttcagcgt

SEQ ID NO: 1014476 - DNA, 25 bp, Homo sapien
tgaagtggcgtcacctgcaacggtg

SEQ ID NO: 1014477 - DNA, 25 bp, Homo sapien
tcagagcggatgaatccgcccacac

SEQ ID NO: 1014478 - DNA, 25 bp, Homo sapien
cgctgatgtccaccaaagacgtaat

SEQ ID NO: 1014479 - DNA, 25 bp, Homo sapien
gcccacacccagtgttaagtgaagt

SEQ ID NO: 1014480 - DNA, 25 bp, Homo sapien
ggaaaacagttggatggtccctcaa

SEQ ID NO: 1014481 - DNA, 25 bp, Homo sapien
aaatcagcatcattagtgcctaggg

SEQ ID NO: 1014482 - DNA, 25 bp, Homo sapien
tgctccaacatggtcgcaccttgag

SEQ ID NO: 1014483 - DNA, 25 bp, Homo sapien
tagtgtatagttccacctccatgaa

SEQ ID NO: 1014484 - DNA, 25 bp, Homo sapien
tcatccaaggacattagcaagaaag

SEQ ID NO: 1014485 - DNA, 25 bp, Homo sapien
tggatcatccaaggacattagcaag

SEQ ID NO: 1014486 - DNA, 25 bp, Homo sapien
aaaagttgtggatcatccaaggaca

SEQ ID NO: 1014487 - DNA, 25 bp, Homo sapien
ttgtggatcatccaaggacattagc

SEQ ID NO: 1014488 - DNA, 25 bp, Homo sapien
gaggccgttggtttggacaaagcca

SEQ ID NO: 1014489 - DNA, 25 bp, Homo sapien
taaaagatgcccgagcctggaaaga

SEQ ID NO: 1014490 - DNA, 25 bp, Homo sapien
agaatggagtccctcgtgctcagcg

SEQ ID NO: 1014491 - DNA, 25 bp, Homo sapien
caagctcaactttgaaacaggtcgg

SEQ ID NO: 1014492 - DNA, 25 bp, Homo sapien
tgaatattgcttccaggcctgactg

SEQ ID NO: 1014493 - DNA, 25 bp, Homo sapien
gcagcctgcactctgtccggaaaaa

SEQ ID NO: 1014494 - DNA, 25 bp, Homo sapien
aggcactcaatgtcccagggcaagg

SEQ ID NO: 1014495 - DNA, 25 bp, Homo sapien
gaatcttctgtgttcgggccttcaa

SEQ ID NO: 1014496 - DNA, 25 bp, Homo sapien
gtgtgcgtgtcctccctgccggctg

SEQ ID NO: 1014497 - DNA, 25 bp, Homo sapien
ggctgatccgtgtgcgtgtcctccc

SEQ ID NO: 1014498 - DNA, 25 bp, Homo sapien
cagctccccagtgcacggtgtggtg

SEQ ID NO: 1014499 - DNA, 25 bp, Homo sapien
tgttcgctcccctggttgactcagc

SEQ ID NO: 1014500 - DNA, 25 bp, Homo sapien
cactttttgcacaaggcgaggagct

SEQ ID NO: 1014501 - DNA, 25 bp, Homo sapien
gacaaggaatgtctaacaaaagcac

SEQ ID NO: 1014502 - DNA, 25 bp, Homo sapien
tgctctgcggctcgatggctgcctt

SEQ ID NO: 1014503 - DNA, 25 bp, Homo sapien
cctttgtcattggatctgtgatgca

SEQ ID NO: 1014504 - DNA, 25 bp, Homo sapien
gttccaggccagtaaggaggggaca

SEQ ID NO: 1014505 - DNA, 25 bp, Homo sapien
ttccaggccagtaaggaggggacat

SEQ ID NO: 1014506 - DNA, 25 bp, Homo sapien
aagagtgagaggttccaggccagta

SEQ ID NO: 1014507 - DNA, 25 bp, Homo sapien
ctgaagagtgagaggttccaggcca

SEQ ID NO: 1014508 - DNA, 25 bp, Homo sapien
taaattcagcaaatgccaaggaggc

SEQ ID NO: 1014509 - DNA, 25 bp, Homo sapien
tgttttcttctcgattaaattcagc

SEQ ID NO: 1014510 - DNA, 25 bp, Homo sapien
ttcagcaaatgccaaggaggcccca

SEQ ID NO: 1014511 - DNA, 25 bp, Homo sapien
aggccctgcgctggcccacagtgcc

SEQ ID NO: 1014512 - DNA, 25 bp, Homo sapien
tgctctgggactttgctgggatgcc

SEQ ID NO: 1014513 - DNA, 25 bp, Homo sapien
tgcaagggccgcgtaaacagatgcc

SEQ ID NO: 1014514 - DNA, 25 bp, Homo sapien
taaatgcacgcccaggtgtgtggag

SEQ ID NO: 1014515 - DNA, 25 bp, Homo sapien
agtagatcaccacagccccattttg

SEQ ID NO: 1014516 - DNA, 25 bp, Homo sapien
tgagatccagctgacctatattggg

SEQ ID NO: 1014517 - DNA, 25 bp, Homo sapien
tccttagaatcgacaggctatgcct

SEQ ID NO: 1014518 - DNA, 25 bp, Homo sapien
gagcaagtccagcaaaagcttctag

SEQ ID NO: 1014519 - DNA, 25 bp, Homo sapien
aaattgtgatccatggagcaagtcc

SEQ ID NO: 1014520 - DNA, 25 bp, Homo sapien
ttgaatgtcgaacattctttcccag

SEQ ID NO: 1014521 - DNA, 25 bp, Homo sapien
cacggtgtgaaacagacccgtgaaa

SEQ ID NO: 1014522 - DNA, 25 bp, Homo sapien
ccgtgaaacgagacatcaaggatgc

SEQ ID NO: 1014523 - DNA, 25 bp, Homo sapien
aaggatgctgcttggaatagcttga

SEQ ID NO: 1014524 - DNA, 25 bp, Homo sapien
caaatagctgagatatgagagttac

SEQ ID NO: 1014525 - DNA, 25 bp, Homo sapien
gctgccaagacaaatagctgagata

SEQ ID NO: 1014526 - DNA, 25 bp, Homo sapien
tatgagagttacagctagcgctcac

SEQ ID NO: 1014527 - DNA, 25 bp, Homo sapien
cctgattctgtccagttagcaaaac

SEQ ID NO: 1014528 - DNA, 25 bp, Homo sapien
taacagttgacaaggtcagtccacc

SEQ ID NO: 1014529 - DNA, 25 bp, Homo sapien
gcaccacggctccaatttaacagtt

SEQ ID NO: 1014530 - DNA, 25 bp, Homo sapien
aatgttctaggcaacgcaccacggc

SEQ ID NO: 1014531 - DNA, 25 bp, Homo sapien
gcaggacagcatcctagttagatga

SEQ ID NO: 1014532 - DNA, 25 bp, Homo sapien
ttgtcttgggctccccgaatgcctt

SEQ ID NO: 1014533 - DNA, 25 bp, Homo sapien
ctccttcttatggtcagttgtccat

SEQ ID NO: 1014534 - DNA, 25 bp, Homo sapien
cctgaggctcccaatggtcttgtct

SEQ ID NO: 1014535 - DNA, 25 bp, Homo sapien
atgagaggtacagccgtccagcaca

SEQ ID NO: 1014536 - DNA, 25 bp, Homo sapien
tactagcacctgtctcacatggatg

SEQ ID NO: 1014537 - DNA, 25 bp, Homo sapien
tggttaccgcacatatcacagccct

SEQ ID NO: 1014538 - DNA, 25 bp, Homo sapien
cacatggatgctattaacgttaaat

SEQ ID NO: 1014539 - DNA, 25 bp, Homo sapien
taggagcttcttattttcccgtcca

SEQ ID NO: 1014540 - DNA, 25 bp, Homo sapien
caggctttatggactatgtggaccc

SEQ ID NO: 1014541 - DNA, 25 bp, Homo sapien
cagggatagcctgcaaacggatgag

SEQ ID NO: 1014542 - DNA, 25 bp, Homo sapien
tctgtggaccagtatgagcatcacc

SEQ ID NO: 1014543 - DNA, 25 bp, Homo sapien
ccagattgaccccagcctgtaggtg

SEQ ID NO: 1014544 - DNA, 25 bp, Homo sapien
taggatcacaacagacagcacgaat

SEQ ID NO: 1014545 - DNA, 25 bp, Homo sapien
gagagtcctctcagtgatagccagg

SEQ ID NO: 1014546 - DNA, 25 bp, Homo sapien
acaaattggcgggaggaagtacagc

SEQ ID NO: 1014547 - DNA, 25 bp, Homo sapien
cagctactgcaaaggaacgtgggaa

SEQ ID NO: 1014548 - DNA, 25 bp, Homo sapien
tgcacgagaccataatcccactggg

SEQ ID NO: 1014549 - DNA, 25 bp, Homo sapien
ctttagttatgggatttcagcaacc

SEQ ID NO: 1014550 - DNA, 25 bp, Homo sapien
aaactttgttatagacctgggcatg

SEQ ID NO: 1014551 - DNA, 25 bp, Homo sapien
tccccataggcatataaaaactttg

SEQ ID NO: 1014552 - DNA, 25 bp, Homo sapien
gaggtaggtattaggttgctaagtc

SEQ ID NO: 1014553 - DNA, 25 bp, Homo sapien
gctaagtctttatttgccaagtaaa

SEQ ID NO: 1014554 - DNA, 25 bp, Homo sapien
gattttatagatcagtatgatttac

SEQ ID NO: 1014555 - DNA, 25 bp, Homo sapien
gtcattatatcaacaaatctcatac

SEQ ID NO: 1014556 - DNA, 25 bp, Homo sapien
cggtctctcatctggaaggaatgct

SEQ ID NO: 1014557 - DNA, 25 bp, Homo sapien
cataggaggagcgatggaaactcac

SEQ ID NO: 1014558 - DNA, 25 bp, Homo sapien
cagtgtccgtagactggccaaagcc

SEQ ID NO: 1014559 - DNA, 25 bp, Homo sapien
aagggaactggaatgtacgctgagc

SEQ ID NO: 1014560 - DNA, 25 bp, Homo sapien
aagctgatgctgcagtgcccttcat

SEQ ID NO: 1014561 - DNA, 25 bp, Homo sapien
ataaatttatgtgacttccaggcgc

SEQ ID NO: 1014562 - DNA, 25 bp, Homo sapien
accgcaggcagtgtccatgtgagca

SEQ ID NO: 1014563 - DNA, 25 bp, Homo sapien
actttaagagcaacggattcggatc

SEQ ID NO: 1014564 - DNA, 25 bp, Homo sapien
catgaacgggagttaaattaggatt

SEQ ID NO: 1014565 - DNA, 25 bp, Homo sapien
gcccaacagggacgtcaggacccag

SEQ ID NO: 1014566 - DNA, 25 bp, Homo sapien
tcaatagtcatgaacgggagttaaa

SEQ ID NO: 1014567 - DNA, 25 bp, Homo sapien
caaacagaggcaacgggagttccag

SEQ ID NO: 1014568 - DNA, 25 bp, Homo sapien
tccagtttcttaatagggtcctcta

SEQ ID NO: 1014569 - DNA, 25 bp, Homo sapien
gctaatgccacggatagaaaaattc

SEQ ID NO: 1014570 - DNA, 25 bp, Homo sapien
atatctgaatggctaatgccacgga

SEQ ID NO: 1014571 - DNA, 25 bp, Homo sapien
agtttcttaatagggtcctctagca

SEQ ID NO: 1014572 - DNA, 25 bp, Homo sapien
attttgctgcttttgtaaaatgagt

SEQ ID NO: 1014573 - DNA, 25 bp, Homo sapien
tagattttgctgcttttgtaaaatg

SEQ ID NO: 1014574 - DNA, 25 bp, Homo sapien
tgtcagacttagattttgctgcttt

SEQ ID NO: 1014575 - DNA, 25 bp, Homo sapien
ctgtcagacttagattttgctgctt

SEQ ID NO: 1014576 - DNA, 25 bp, Homo sapien
agcagggatagcacgacctgaccca

SEQ ID NO: 1014577 - DNA, 25 bp, Homo sapien
gagcagggatagcacgacctgaccc

SEQ ID NO: 1014578 - DNA, 25 bp, Homo sapien
gcagggatagcacgacctgacccat

SEQ ID NO: 1014579 - DNA, 25 bp, Homo sapien
ttaaacccacacatgctaccacctg

SEQ ID NO: 1014580 - DNA, 25 bp, Homo sapien
acacatgctaccacctggacgacta

SEQ ID NO: 1014581 - DNA, 25 bp, Homo sapien
cacctggacgactagtgttttcatt

SEQ ID NO: 1014582 - DNA, 25 bp, Homo sapien
tgctaccacctggacgactagtgtt

SEQ ID NO: 1014583 - DNA, 25 bp, Homo sapien
cgagttgatgtaaaagatctgatgg

SEQ ID NO: 1014584 - DNA, 25 bp, Homo sapien
tggacggatttccaaataagcagtt

SEQ ID NO: 1014585 - DNA, 25 bp, Homo sapien
cacgaacgtggagcagagtgatgca

SEQ ID NO: 1014586 - DNA, 25 bp, Homo sapien
cacccaatggtgtggattgcagatt

SEQ ID NO: 1014587 - DNA, 25 bp, Homo sapien
ggcagcctttcgaatggtggttttg

SEQ ID NO: 1014588 - DNA, 25 bp, Homo sapien
gaatggtggttttggcacttcttcc

SEQ ID NO: 1014589 - DNA, 25 bp, Homo sapien
ttcccccagatggagcccagaagtg

SEQ ID NO: 1014590 - DNA, 25 bp, Homo sapien
ccagtccgactgaaaatacctcggg

SEQ ID NO: 1014591 - DNA, 25 bp, Homo sapien
ctccttagagagtgctgctgggcag

SEQ ID NO: 1014592 - DNA, 25 bp, Homo sapien
aaactccttagagagtgctgctggg

SEQ ID NO: 1014593 - DNA, 25 bp, Homo sapien
caggacgtgggccttcataaaagaa

SEQ ID NO: 1014594 - DNA, 25 bp, Homo sapien
gggccttcataaaagaagctctcag

SEQ ID NO: 1014595 - DNA, 25 bp, Homo sapien
ttcttcccagacatctgaaggcagc

SEQ ID NO: 1014596 - DNA, 25 bp, Homo sapien
tctgaaggcagcatttccatgagcc

SEQ ID NO: 1014597 - DNA, 25 bp, Homo sapien
ggcagcatttccatgagcctggtgg

SEQ ID NO: 1014598 - DNA, 25 bp, Homo sapien
tcttcccagacatctgaaggcagca

SEQ ID NO: 1014599 - DNA, 25 bp, Homo sapien
gccaccattgctgctgtgtgcctgt

SEQ ID NO: 1014600 - DNA, 25 bp, Homo sapien
gctgctgtgtgcctgtgtggctgcc

SEQ ID NO: 1014601 - DNA, 25 bp, Homo sapien
cattgctgctgtgtgcctgtgtggc

SEQ ID NO: 1014602 - DNA, 25 bp, Homo sapien
tgctgtgtgcctgtgtggctgccca

SEQ ID NO: 1014603 - DNA, 25 bp, Homo sapien
acacggcgccactcctgttgcggtc

SEQ ID NO: 1014604 - DNA, 25 bp, Homo sapien
acggcgccactcctgttgcggtcat

SEQ ID NO: 1014605 - DNA, 25 bp, Homo sapien
cacggcgccactcctgttgcggtca

SEQ ID NO: 1014606 - DNA, 25 bp, Homo sapien
ttgccggagcaatgtccaccagctt

SEQ ID NO: 1014607 - DNA, 25 bp, Homo sapien
ccagcttagacttctgcggttcaca

SEQ ID NO: 1014608 - DNA, 25 bp, Homo sapien
gacttctgcggttcacaatttaacc

SEQ ID NO: 1014609 - DNA, 25 bp, Homo sapien
ccccaaagtgagtgatgtagtatgt

SEQ ID NO: 1014610 - DNA, 25 bp, Homo sapien
cagtggctggctatgggaagggact

SEQ ID NO: 1014611 - DNA, 25 bp, Homo sapien
gttgatgcagagaacatcacagtgc

SEQ ID NO: 1014612 - DNA, 25 bp, Homo sapien
gcagtggctggctatgggaagggac

SEQ ID NO: 1014613 - DNA, 25 bp, Homo sapien
cacacgttctgtccatgttgatgca

SEQ ID NO: 1014614 - DNA, 25 bp, Homo sapien
ttacataaagggcattatggtgtac

SEQ ID NO: 1014615 - DNA, 25 bp, Homo sapien
taaagggcattatggtgtacattgc

SEQ ID NO: 1014616 - DNA, 25 bp, Homo sapien
tacataaagggcattatggtgtaca

SEQ ID NO: 1014617 - DNA, 25 bp, Homo sapien
cataaagggcattatggtgtacatt

SEQ ID NO: 1014618 - DNA, 25 bp, Homo sapien
cttgttaggtcgttttgctcccagc

SEQ ID NO: 1014619 - DNA, 25 bp, Homo sapien
caggatgctgcttccgcttagaaat

SEQ ID NO: 1014620 - DNA, 25 bp, Homo sapien
tctgctgcacgaatacacaatgacg

SEQ ID NO: 1014621 - DNA, 25 bp, Homo sapien
gaaattctgtctcaggtcttgtggc

SEQ ID NO: 1014622 - DNA, 25 bp, Homo sapien
ttcttttccagcagaaccaccttac

SEQ ID NO: 1014623 - DNA, 25 bp, Homo sapien
ttttccagcagaaccaccttactcc

SEQ ID NO: 1014624 - DNA, 25 bp, Homo sapien
cttcttttccagcagaaccacctta

SEQ ID NO: 1014625 - DNA, 25 bp, Homo sapien
tcttttccagcagaaccaccttact

SEQ ID NO: 1014626 - DNA, 25 bp, Homo sapien
agtcggcagggcacacgcttcctgg

SEQ ID NO: 1014627 - DNA, 25 bp, Homo sapien
ttctctgcgtactgctggcccctat

SEQ ID NO: 1014628 - DNA, 25 bp, Homo sapien
tttagctgttttccattagccccag

SEQ ID NO: 1014629 - DNA, 25 bp, Homo sapien
gtcccagccctgctttcgtggttct

SEQ ID NO: 1014630 - DNA, 25 bp, Homo sapien
ctgtgtggtctgaagggtttccctt

SEQ ID NO: 1014631 - DNA, 25 bp, Homo sapien
ttggcttcttttctttgccattcat

SEQ ID NO: 1014632 - DNA, 25 bp, Homo sapien
ccttggcttcttttctttgccattc

SEQ ID NO: 1014633 - DNA, 25 bp, Homo sapien
ccttttccttctggccttggcttct

SEQ ID NO: 1014634 - DNA, 25 bp, Homo sapien
tccttccggtcagcaggacttcagg

SEQ ID NO: 1014635 - DNA, 25 bp, Homo sapien
aggagatgtttgtgacgttccttcc

SEQ ID NO: 1014636 - DNA, 25 bp, Homo sapien
gtgacgttccttccggtcagcagga

SEQ ID NO: 1014637 - DNA, 25 bp, Homo sapien
gtttgtgacgttccttccggtcagc

SEQ ID NO: 1014638 - DNA, 25 bp, Homo sapien
gacattgtcaccaagggccacggca

SEQ ID NO: 1014639 - DNA, 25 bp, Homo sapien
tgtcaccaagggccacggcagcgtg

SEQ ID NO: 1014640 - DNA, 25 bp, Homo sapien
tcaccaagggccacggcagcgtgca

SEQ ID NO: 1014641 - DNA, 25 bp, Homo sapien
cattgtcaccaagggccacggcagc

SEQ ID NO: 1014642 - DNA, 25 bp, Homo sapien
gggcgtcgggaagaggctgcgggca

SEQ ID NO: 1014643 - DNA, 25 bp, Homo sapien
gtcgggaagaggctgcgggcagcgg

SEQ ID NO: 1014644 - DNA, 25 bp, Homo sapien
ctggggcgtcgggaagaggctgcgg

SEQ ID NO: 1014645 - DNA, 25 bp, Homo sapien
ggcgtcgggaagaggctgcgggcag

SEQ ID NO: 1014646 - DNA, 25 bp, Homo sapien
ttatcttttgatttataaagcgccg

SEQ ID NO: 1014647 - DNA, 25 bp, Homo sapien
taaagcgccgttcctcagcagattc

SEQ ID NO: 1014648 - DNA, 25 bp, Homo sapien
ccagctgcttccgagaaagctcgca

SEQ ID NO: 1014649 - DNA, 25 bp, Homo sapien
ctcgcagaagcgttcgtgcgcaggc

SEQ ID NO: 1014650 - DNA, 25 bp, Homo sapien
ccgagcggatgccaccccgtttcca

SEQ ID NO: 1014651 - DNA, 25 bp, Homo sapien
atgccaccccgtttccagcctccgg

SEQ ID NO: 1014652 - DNA, 25 bp, Homo sapien
cccgtttccagcctccggtgctcac

SEQ ID NO: 1014653 - DNA, 25 bp, Homo sapien
gagcggatgccaccccgtttccagc

SEQ ID NO: 1014654 - DNA, 25 bp, Homo sapien
tggtgaggaagcctggctcgcaccc

SEQ ID NO: 1014655 - DNA, 25 bp, Homo sapien
cagttacggtttctatgggatgagt

SEQ ID NO: 1014656 - DNA, 25 bp, Homo sapien
cgtcatttgctcagttacggtttct

SEQ ID NO: 1014657 - DNA, 25 bp, Homo sapien
ctcgcacccggcctgcgctctctcg

SEQ ID NO: 1014658 - DNA, 25 bp, Homo sapien
gacagtgatagtagtggtttcaata

SEQ ID NO: 1014659 - DNA, 25 bp, Homo sapien
tcttttgtgagctctgaactattca

SEQ ID NO: 1014660 - DNA, 25 bp, Homo sapien
caaagaagcacaaacgaccctttct

SEQ ID NO: 1014661 - DNA, 25 bp, Homo sapien
ttataaaatgccctgaaaggtcttg

SEQ ID NO: 1014662 - DNA, 25 bp, Homo sapien
cctgacacgctacaacgtgcatgag

SEQ ID NO: 1014663 - DNA, 25 bp, Homo sapien
ggaaaccctgacacgctacaacgtg

SEQ ID NO: 1014664 - DNA, 25 bp, Homo sapien
acgctacaacgtgcatgagcctggg

SEQ ID NO: 1014665 - DNA, 25 bp, Homo sapien
gacacgctacaacgtgcatgagcct

SEQ ID NO: 1014666 - DNA, 25 bp, Homo sapien
tgccgcaagcaagttcctctgggaa

SEQ ID NO: 1014667 - DNA, 25 bp, Homo sapien
tatagtagaggttgtgactccctgg

SEQ ID NO: 1014668 - DNA, 25 bp, Homo sapien
cattcacatactgtctaggcaggcc

SEQ ID NO: 1014669 - DNA, 25 bp, Homo sapien
tagattctgactaaggacgtccacg

SEQ ID NO: 1014670 - DNA, 25 bp, Homo sapien
cagccacagcaatagtccgaggttc

SEQ ID NO: 1014671 - DNA, 25 bp, Homo sapien
gagaccgtcgtgtggttgcccatcc

SEQ ID NO: 1014672 - DNA, 25 bp, Homo sapien
taaatgaggaggtgatctggacccc

SEQ ID NO: 1014673 - DNA, 25 bp, Homo sapien
ttattgagactggtcagccctccgc

SEQ ID NO: 1014674 - DNA, 25 bp, Homo sapien
tgtgtagccgatcccctctcctggc

SEQ ID NO: 1014675 - DNA, 25 bp, Homo sapien
taaggacctttatgccactatagct

SEQ ID NO: 1014676 - DNA, 25 bp, Homo sapien
gaaatttccttgagtccctgtgtag

SEQ ID NO: 1014677 - DNA, 25 bp, Homo sapien
tatgtaatgctgtgtgtttgactcc

SEQ ID NO: 1014678 - DNA, 25 bp, Homo sapien
ggccagtggaagacacagccacccc

SEQ ID NO: 1014679 - DNA, 25 bp, Homo sapien
tggccagtggaagacacagccaccc

SEQ ID NO: 1014680 - DNA, 25 bp, Homo sapien
ctggccagtggaagacacagccacc

SEQ ID NO: 1014681 - DNA, 25 bp, Homo sapien
aggctgtcacactactgttgctccc

SEQ ID NO: 1014682 - DNA, 25 bp, Homo sapien
aaggctgtcacactactgttgctcc

SEQ ID NO: 1014683 - DNA, 25 bp, Homo sapien
gaaggctgtcacactactgttgctc

SEQ ID NO: 1014684 - DNA, 25 bp, Homo sapien
gctacctattgtgtagtaatagtac

SEQ ID NO: 1014685 - DNA, 25 bp, Homo sapien
ttagtgattgctacctattgtgtag

SEQ ID NO: 1014686 - DNA, 25 bp, Homo sapien
tagtgattgctacctattgtgtagt

SEQ ID NO: 1014687 - DNA, 25 bp, Homo sapien
tattgtgtagtaatagtacagagac

SEQ ID NO: 1014688 - DNA, 25 bp, Homo sapien
cagaggacgcagacagcagcatttg

SEQ ID NO: 1014689 - DNA, 25 bp, Homo sapien
ggctgtgcagaggacgcagacagca

SEQ ID NO: 1014690 - DNA, 25 bp, Homo sapien
tgtgcagaggacgcagacagcagca

SEQ ID NO: 1014691 - DNA, 25 bp, Homo sapien
agaggacgcagacagcagcatttgg

SEQ ID NO: 1014692 - DNA, 25 bp, Homo sapien
caccttcccaccataaggaccggag

SEQ ID NO: 1014693 - DNA, 25 bp, Homo sapien
ataaggaccggagccactctggagg

SEQ ID NO: 1014694 - DNA, 25 bp, Homo sapien
cagggttgcattccaaggcgggcct

SEQ ID NO: 1014695 - DNA, 25 bp, Homo sapien
gcagttttgtccctagcgaccacaa

SEQ ID NO: 1014696 - DNA, 25 bp, Homo sapien
taggttatggcactcagcgaggtgc

SEQ ID NO: 1014697 - DNA, 25 bp, Homo sapien
tccacagacaaccaggctgtgtcca

SEQ ID NO: 1014698 - DNA, 25 bp, Homo sapien
gtgccccagtcctgcaccgtcagtt

SEQ ID NO: 1014699 - DNA, 25 bp, Homo sapien
ctggatccacagacaaccaggctgt

SEQ ID NO: 1014700 - DNA, 25 bp, Homo sapien
aggtgctgagctgtttggccctgac

SEQ ID NO: 1014701 - DNA, 25 bp, Homo sapien
atgaggtgctgagctgtttggccct

SEQ ID NO: 1014702 - DNA, 25 bp, Homo sapien
agtgtgatgaggtgctgagctgttt

SEQ ID NO: 1014703 - DNA, 25 bp, Homo sapien
tgatgaggtgctgagctgtttggcc

SEQ ID NO: 1014704 - DNA, 25 bp, Homo sapien
tcatctttgcagtcatcgtagcccc

SEQ ID NO: 1014705 - DNA, 25 bp, Homo sapien
ccccagtatcgcaagtgatagagca

SEQ ID NO: 1014706 - DNA, 25 bp, Homo sapien
gagcattcttgtgctatacacgcgt

SEQ ID NO: 1014707 - DNA, 25 bp, Homo sapien
ctatacacgcgtgagtttttgcaaa

SEQ ID NO: 1014708 - DNA, 25 bp, Homo sapien
attcagcatcggcactaagttttat

SEQ ID NO: 1014709 - DNA, 25 bp, Homo sapien
ttacttctaaattcagcatcggcac

SEQ ID NO: 1014710 - DNA, 25 bp, Homo sapien
ttctaaattcagcatcggcactaag

SEQ ID NO: 1014711 - DNA, 25 bp, Homo sapien
taaattcagcatcggcactaagttt

SEQ ID NO: 1014712 - DNA, 25 bp, Homo sapien
aggcagtcttgggtagcaggaagaa

SEQ ID NO: 1014713 - DNA, 25 bp, Homo sapien
caggaagaaggggtagatctctgag

SEQ ID NO: 1014714 - DNA, 25 bp, Homo sapien
atatgaggcagtcttgggtagcagg

SEQ ID NO: 1014715 - DNA, 25 bp, Homo sapien
gaagaaggggtagatctctgagctt

SEQ ID NO: 1014716 - DNA, 25 bp, Homo sapien
atgtgtatcgcccatctgtagcaga

SEQ ID NO: 1014717 - DNA, 25 bp, Homo sapien
tgtgtatcgcccatctgtagcagat

SEQ ID NO: 1014718 - DNA, 25 bp, Homo sapien
ctatgtgtatcgcccatctgtagca

SEQ ID NO: 1014719 - DNA, 25 bp, Homo sapien
gtgtatcgcccatctgtagcagatg

SEQ ID NO: 1014720 - DNA, 25 bp, Homo sapien
acagtggccctttcatccttcacgt

SEQ ID NO: 1014721 - DNA, 25 bp, Homo sapien
cacagtggccctttcatccttcacg

SEQ ID NO: 1014722 - DNA, 25 bp, Homo sapien
cagtggccctttcatccttcacgtt

SEQ ID NO: 1014723 - DNA, 25 bp, Homo sapien
aattggcactgattccccgggcgcc

SEQ ID NO: 1014724 - DNA, 25 bp, Homo sapien
ttggcactgattccccgggcgccat

SEQ ID NO: 1014725 - DNA, 25 bp, Homo sapien
tgcccataggactgaagcaggcaat

SEQ ID NO: 1014726 - DNA, 25 bp, Homo sapien
ggcaattggcactgattccccgggc

SEQ ID NO: 1014727 - DNA, 25 bp, Homo sapien
gcttgatccggttcgtgatgacccg

SEQ ID NO: 1014728 - DNA, 25 bp, Homo sapien
taagccaagcaacatccacagctgc

SEQ ID NO: 1014729 - DNA, 25 bp, Homo sapien
cagggaaggaacatataagccaagc

SEQ ID NO: 1014730 - DNA, 25 bp, Homo sapien
taggtagcgtgtgccttctctcgtc

SEQ ID NO: 1014731 - DNA, 25 bp, Homo sapien
catatcccaaccagggggtatccca

SEQ ID NO: 1014732 - DNA, 25 bp, Homo sapien
cttccatatcccaaccagggggtat

SEQ ID NO: 1014733 - DNA, 25 bp, Homo sapien
ttccatatcccaaccagggggtatc

SEQ ID NO: 1014734 - DNA, 25 bp, Homo sapien
tccatatcccaaccagggggtatcc

SEQ ID NO: 1014735 - DNA, 25 bp, Homo sapien
cactgaagagtcataattgtgtcct

SEQ ID NO: 1014736 - DNA, 25 bp, Homo sapien
tgttataacagcaaccagctggaga

SEQ ID NO: 1014737 - DNA, 25 bp, Homo sapien
gaaagtagcttaatcggactcacta

SEQ ID NO: 1014738 - DNA, 25 bp, Homo sapien
gacagagggagacgaaaaccacact

SEQ ID NO: 1014739 - DNA, 25 bp, Homo sapien
tagcaaccaaatgatgggaggcgcc

SEQ ID NO: 1014740 - DNA, 25 bp, Homo sapien
cgtgtgcaattacgtcctagacgga

SEQ ID NO: 1014741 - DNA, 25 bp, Homo sapien
aagtcaagggcggttcacctacagc

SEQ ID NO: 1014742 - DNA, 25 bp, Homo sapien
caagtacgcgagtgaaagaaatgct

SEQ ID NO: 1014743 - DNA, 25 bp, Homo sapien
gccgagaatacctcgcgcggcactt

SEQ ID NO: 1014744 - DNA, 25 bp, Homo sapien
tgtaagtaagtgtagtccgtggccg

SEQ ID NO: 1014745 - DNA, 25 bp, Homo sapien
ggaagtgtagtccgcggccattcgc

SEQ ID NO: 1014746 - DNA, 25 bp, Homo sapien
tttgccccaatcaccgccgagaata

SEQ ID NO: 1014747 - DNA, 25 bp, Homo sapien
ggaggccttcgatgccctccgctag

SEQ ID NO: 1014748 - DNA, 25 bp, Homo sapien
gggaaccagcaggacgctcgcgggc

SEQ ID NO: 1014749 - DNA, 25 bp, Homo sapien
gcagcaacccgtgcgcacgcggagg

SEQ ID NO: 1014750 - DNA, 25 bp, Homo sapien
ggagggcgccgctcatgcctcacgt

SEQ ID NO: 1014751 - DNA, 25 bp, Homo sapien
gctgcgaaaggaaggggtcgtcttc

SEQ ID NO: 1014752 - DNA, 25 bp, Homo sapien
agacagcggtccaggtgcgagttga

SEQ ID NO: 1014753 - DNA, 25 bp, Homo sapien
atgtgcgcggcgggcatcatctgct

SEQ ID NO: 1014754 - DNA, 25 bp, Homo sapien
ccttggcccgctccccggcgcggtg

SEQ ID NO: 1014755 - DNA, 25 bp, Homo sapien
gctggctgcttcagcgccgagctct

SEQ ID NO: 1014756 - DNA, 25 bp, Homo sapien
cctcgctgctctcggctgccgtcgg

SEQ ID NO: 1014757 - DNA, 25 bp, Homo sapien
ggcgcgtcgtagctctcgcggctct

SEQ ID NO: 1014758 - DNA, 25 bp, Homo sapien
tcgcggctctcggtctcgccgccgt

SEQ ID NO: 1014759 - DNA, 25 bp, Homo sapien
cttcggcagcgtccgcgtcccagtg

SEQ ID NO: 1014760 - DNA, 25 bp, Homo sapien
agctgcgcggagacgcgctccccgc

SEQ ID NO: 1014761 - DNA, 25 bp, Homo sapien
tcgccatcgccgtcgcccacggcct

SEQ ID NO: 1014762 - DNA, 25 bp, Homo sapien
cagtgccccgggtcgtcctcgccgt

SEQ ID NO: 1014763 - DNA, 25 bp, Homo sapien
gacgcatcgtgtcggccagcggctt

SEQ ID NO: 1014764 - DNA, 25 bp, Homo sapien
gtgtcaggacgcatcgtgtcggcca

SEQ ID NO: 1014765 - DNA, 25 bp, Homo sapien
ctgcagcgtgtcaggacgcatcgtg

SEQ ID NO: 1014766 - DNA, 25 bp, Homo sapien
cagcgtgtcaggacgcatcgtgtcg

SEQ ID NO: 1014767 - DNA, 25 bp, Homo sapien
agcgaggggatttcgttggtctcca

SEQ ID NO: 1014768 - DNA, 25 bp, Homo sapien
aggagcgagcgcagcagggtatcct

SEQ ID NO: 1014769 - DNA, 25 bp, Homo sapien
ccccacaggataagcgaggggattt

SEQ ID NO: 1014770 - DNA, 25 bp, Homo sapien
cagcagggtatcctggcccacggcc

SEQ ID NO: 1014771 - DNA, 25 bp, Homo sapien
accttatgctatgtttcttgctgtt

SEQ ID NO: 1014772 - DNA, 25 bp, Homo sapien
tgttttatgacatctcgcacatcat

SEQ ID NO: 1014773 - DNA, 25 bp, Homo sapien
ctgctgagatttattgaaccgatga

SEQ ID NO: 1014774 - DNA, 25 bp, Homo sapien
tgttgcagataatgtcacaaacctt

SEQ ID NO: 1014775 - DNA, 25 bp, Homo sapien
cccacattccacgtgaggaaggaaa

SEQ ID NO: 1014776 - DNA, 25 bp, Homo sapien
ccacattccacgtgaggaaggaaag

SEQ ID NO: 1014777 - DNA, 25 bp, Homo sapien
ttgccccaatcagagtgatcgtccc

SEQ ID NO: 1014778 - DNA, 25 bp, Homo sapien
cagagtgatcgtcccacattccacg

SEQ ID NO: 1014779 - DNA, 25 bp, Homo sapien
caagaacaatcactcgacagcggct

SEQ ID NO: 1014780 - DNA, 25 bp, Homo sapien
actcgacagcggctcagaagagcag

SEQ ID NO: 1014781 - DNA, 25 bp, Homo sapien
gaagcttctcaagaacaatcactcg

SEQ ID NO: 1014782 - DNA, 25 bp, Homo sapien
tgcctctactggaagcttctcaaga

SEQ ID NO: 1014783 - DNA, 25 bp, Homo sapien
gattcccagggagttgatcgctcgc

SEQ ID NO: 1014784 - DNA, 25 bp, Homo sapien
cagagggtcagtgggacggctagag

SEQ ID NO: 1014785 - DNA, 25 bp, Homo sapien
gatcgctcgcattaaaatagtcacc

SEQ ID NO: 1014786 - DNA, 25 bp, Homo sapien
gctagagtctaggacgtggattccc

SEQ ID NO: 1014787 - DNA, 25 bp, Homo sapien
tatagagctgtcaacagggattgga

SEQ ID NO: 1014788 - DNA, 25 bp, Homo sapien
gcaggtacttgtattcggaaatcac

SEQ ID NO: 1014789 - DNA, 25 bp, Homo sapien
caaagcacataatgtgtgccaggca

SEQ ID NO: 1014790 - DNA, 25 bp, Homo sapien
gaaaaaggctcttgatacctgggta

SEQ ID NO: 1014791 - DNA, 25 bp, Homo sapien
gagtatactgtgtgacaactcacaa

SEQ ID NO: 1014792 - DNA, 25 bp, Homo sapien
tccaaatccagtgccctgctcacct

SEQ ID NO: 1014793 - DNA, 25 bp, Homo sapien
agtgcaatcaagaacggctaagcgg

SEQ ID NO: 1014794 - DNA, 25 bp, Homo sapien
cggctaagcggcagcttgattagtt

SEQ ID NO: 1014795 - DNA, 25 bp, Homo sapien
tttatcctctatgaacatggcgggc

SEQ ID NO: 1014796 - DNA, 25 bp, Homo sapien
tcgggcgtcaccgtcactgaggtaa

SEQ ID NO: 1014797 - DNA, 25 bp, Homo sapien
taaaatgtgggatcgctgtaggccc

SEQ ID NO: 1014798 - DNA, 25 bp, Homo sapien
tgaggtaagccagggtgtctactgc

SEQ ID NO: 1014799 - DNA, 25 bp, Homo sapien
taataccaacatgcagatccacctg

SEQ ID NO: 1014800 - DNA, 25 bp, Homo sapien
gtgcacacacttctttccgtatggt

SEQ ID NO: 1014801 - DNA, 25 bp, Homo sapien
ggaatgcttccggaacccagtcagg

SEQ ID NO: 1014802 - DNA, 25 bp, Homo sapien
ccagtcaggcttccggaaatgagaa

SEQ ID NO: 1014803 - DNA, 25 bp, Homo sapien
tgcttcatgcctctcttcggaaagg

SEQ ID NO: 1014804 - DNA, 25 bp, Homo sapien
tactgccgttgtaaatgatcacaaa

SEQ ID NO: 1014805 - DNA, 25 bp, Homo sapien
actaccttctaaggtgaatgtgcag

SEQ ID NO: 1014806 - DNA, 25 bp, Homo sapien
ttcattgtcaagtgaatgcacaggc

SEQ ID NO: 1014807 - DNA, 25 bp, Homo sapien
gcagatggatgggtcagcccagcta

SEQ ID NO: 1014808 - DNA, 25 bp, Homo sapien
tctggccatcgtcccttaggtaagt

SEQ ID NO: 1014809 - DNA, 25 bp, Homo sapien
tcagagtgctatggacactggccga

SEQ ID NO: 1014810 - DNA, 25 bp, Homo sapien
catgtccacaatacgactggcgcca

SEQ ID NO: 1014811 - DNA, 25 bp, Homo sapien
tgttatagcccatctgttcctcagt

SEQ ID NO: 1014812 - DNA, 25 bp, Homo sapien
tgtggtcatttaaacctccttctgc

SEQ ID NO: 1014813 - DNA, 25 bp, Homo sapien
aaaagcaacggtgggcctgctcgga

SEQ ID NO: 1014814 - DNA, 25 bp, Homo sapien
tctgatatccgaagcctgtggtcat

SEQ ID NO: 1014815 - DNA, 25 bp, Homo sapien
gctgccttaaccgtgctctgagtgg

SEQ ID NO: 1014816 - DNA, 25 bp, Homo sapien
tggctgtcgacatggagtgcacgca

SEQ ID NO: 1014817 - DNA, 25 bp, Homo sapien
tcccagctggtggatttgccagaga

SEQ ID NO: 1014818 - DNA, 25 bp, Homo sapien
gggcttaatcccagtcctattcagg

SEQ ID NO: 1014819 - DNA, 25 bp, Homo sapien
tgacaagcctccgtgccacgtagag

SEQ ID NO: 1014820 - DNA, 25 bp, Homo sapien
gcggagatgcagttgtaatgctcct

SEQ ID NO: 1014821 - DNA, 25 bp, Homo sapien
tgagccccgcatggacttgtgcagg

SEQ ID NO: 1014822 - DNA, 25 bp, Homo sapien
cctcgagcatgcgagccagccagta

SEQ ID NO: 1014823 - DNA, 25 bp, Homo sapien
tcatggacataggactccgggaccc

SEQ ID NO: 1014824 - DNA, 25 bp, Homo sapien
ctcatggacataggactccgggacc

SEQ ID NO: 1014825 - DNA, 25 bp, Homo sapien
ccctcatggacataggactccggga

SEQ ID NO: 1014826 - DNA, 25 bp, Homo sapien
atggacataggactccgggaccctc

SEQ ID NO: 1014827 - DNA, 25 bp, Homo sapien
tacaccaggaaataaacgactgagc

SEQ ID NO: 1014828 - DNA, 25 bp, Homo sapien
caatcccatgtagcaaaacagcctg

SEQ ID NO: 1014829 - DNA, 25 bp, Homo sapien
ggagctgtccaaagaaaaccttgaa

SEQ ID NO: 1014830 - DNA, 25 bp, Homo sapien
caaaggagagtttcagtcatgacac

SEQ ID NO: 1014831 - DNA, 25 bp, Homo sapien
cttgtgttaacgcagacgggtctgc

SEQ ID NO: 1014832 - DNA, 25 bp, Homo sapien
ttcaggcatgcctataaaatgacag

SEQ ID NO: 1014833 - DNA, 25 bp, Homo sapien
tgacagccttggtaggcagcaaccg

SEQ ID NO: 1014834 - DNA, 25 bp, Homo sapien
ctcacattcaggcatgcctataaaa

SEQ ID NO: 1014835 - DNA, 25 bp, Homo sapien
tcatgaggtgaaacgagaggcaaac

SEQ ID NO: 1014836 - DNA, 25 bp, Homo sapien
caagcagcatactcagtgggtccaa

SEQ ID NO: 1014837 - DNA, 25 bp, Homo sapien
tcgttgacacagaaggtttccctct

SEQ ID NO: 1014838 - DNA, 25 bp, Homo sapien
gataaccacctacgacagacagaag

SEQ ID NO: 1014839 - DNA, 25 bp, Homo sapien
gtacacctcaatggactttggggct

SEQ ID NO: 1014840 - DNA, 25 bp, Homo sapien
tacacctcaatggactttggggctc

SEQ ID NO: 1014841 - DNA, 25 bp, Homo sapien
tcatcagcctagtgggcgcgttcct

SEQ ID NO: 1014842 - DNA, 25 bp, Homo sapien
tggtggttcctcaggcaggctttga

SEQ ID NO: 1014843 - DNA, 25 bp, Homo sapien
aggcaggtactcctgatccacaggc

SEQ ID NO: 1014844 - DNA, 25 bp, Homo sapien
tgtagcctttgccatagcccaaatc

SEQ ID NO: 1014845 - DNA, 25 bp, Homo sapien
gcacctcctctgcttgaagaaatct

SEQ ID NO: 1014846 - DNA, 25 bp, Homo sapien
tcagcacctcctctgcttgaagaaa

SEQ ID NO: 1014847 - DNA, 25 bp, Homo sapien
acctcctctgcttgaagaaatctac

SEQ ID NO: 1014848 - DNA, 25 bp, Homo sapien
cagcacctcctctgcttgaagaaat

SEQ ID NO: 1014849 - DNA, 25 bp, Homo sapien
tatggaactcttaaatttctggcac

SEQ ID NO: 1014850 - DNA, 25 bp, Homo sapien
aagcataaccgctgcaccgagtgca

SEQ ID NO: 1014851 - DNA, 25 bp, Homo sapien
tttattggctcgtaagacctttgca

SEQ ID NO: 1014852 - DNA, 25 bp, Homo sapien
tttattcgaaagaactgcgcctcca

SEQ ID NO: 1014853 - DNA, 25 bp, Homo sapien
caaatgcaatggtgacaacgctggt

SEQ ID NO: 1014854 - DNA, 25 bp, Homo sapien
gaaaaaatgggcatgggactactgg

SEQ ID NO: 1014855 - DNA, 25 bp, Homo sapien
taacactgacttcttaacttaagct

SEQ ID NO: 1014856 - DNA, 25 bp, Homo sapien
tggtacctagcatccaggcaggaaa

SEQ ID NO: 1014857 - DNA, 25 bp, Homo sapien
gagtggcgtattttgtgttcaggac

SEQ ID NO: 1014858 - DNA, 25 bp, Homo sapien
gcagtagggacaaataactcttaac

SEQ ID NO: 1014859 - DNA, 25 bp, Homo sapien
cacgacatgcaactaaggagaggga

SEQ ID NO: 1014860 - DNA, 25 bp, Homo sapien
catccttgtgggcatatgcacgaca

SEQ ID NO: 1014861 - DNA, 25 bp, Homo sapien
taaagctactagagggtacatgcca

SEQ ID NO: 1014862 - DNA, 25 bp, Homo sapien
gattgaaaggcccaacaagtaccca

SEQ ID NO: 1014863 - DNA, 25 bp, Homo sapien
ccagtaaggcgggatggagcatcca

SEQ ID NO: 1014864 - DNA, 25 bp, Homo sapien
tacatgccacctgtgccagaaagca

SEQ ID NO: 1014865 - DNA, 25 bp, Homo sapien
tacagttacagaaagttggctgctc

SEQ ID NO: 1014866 - DNA, 25 bp, Homo sapien
cgtgtccgcgttacacactgtgttc

SEQ ID NO: 1014867 - DNA, 25 bp, Homo sapien
tgccccgctgctggatacagcagaa

SEQ ID NO: 1014868 - DNA, 25 bp, Homo sapien
gcagaaagtgtgctgcaggctctcc

SEQ ID NO: 1014869 - DNA, 25 bp, Homo sapien
tgattacagtagtggcccggaagct

SEQ ID NO: 1014870 - DNA, 25 bp, Homo sapien
gatcacattctacatgccaagcatg

SEQ ID NO: 1014871 - DNA, 25 bp, Homo sapien
tgacgtctttgaggaaaacggcttc

SEQ ID NO: 1014872 - DNA, 25 bp, Homo sapien
tgaaactcagtcttggcctgaacct

SEQ ID NO: 1014873 - DNA, 25 bp, Homo sapien
ctgggccttgccctgcccacacagc

SEQ ID NO: 1014874 - DNA, 25 bp, Homo sapien
ggccccctgggccttgccctgccca

SEQ ID NO: 1014875 - DNA, 25 bp, Homo sapien
tgtcggccctcagccaggccccctg

SEQ ID NO: 1014876 - DNA, 25 bp, Homo sapien
agccaggccccctgggccttgccct

SEQ ID NO: 1014877 - DNA, 25 bp, Homo sapien
tatgactatgcttgccctcagaagg

SEQ ID NO: 1014878 - DNA, 25 bp, Homo sapien
tcagagcctactgtgactagagcac

SEQ ID NO: 1014879 - DNA, 25 bp, Homo sapien
ccagtacaagtgacaagagacccgc

SEQ ID NO: 1014880 - DNA, 25 bp, Homo sapien
caggttgctcaagcagatggccaca

SEQ ID NO: 1014881 - DNA, 25 bp, Homo sapien
ctttgtaccttctttagatcctagt

SEQ ID NO: 1014882 - DNA, 25 bp, Homo sapien
ttatctttgtaccttctttagatcc

SEQ ID NO: 1014883 - DNA, 25 bp, Homo sapien
cttatctttgtaccttctttagatc

SEQ ID NO: 1014884 - DNA, 25 bp, Homo sapien
tgtaccttctttagatcctagtaat

SEQ ID NO: 1014885 - DNA, 25 bp, Homo sapien
ccaagatgccttcagtgctctttgc

SEQ ID NO: 1014886 - DNA, 25 bp, Homo sapien
tgctggtggagaggcatcctcgctc

SEQ ID NO: 1014887 - DNA, 25 bp, Homo sapien
tgcacctggatcttttgctggtgga

SEQ ID NO: 1014888 - DNA, 25 bp, Homo sapien
tgctctttgcacctggatcttttgc

SEQ ID NO: 1014889 - DNA, 25 bp, Homo sapien
gacaccatcctatgttcaggcccta

SEQ ID NO: 1014890 - DNA, 25 bp, Homo sapien
catcgatgccacaagatccagcttc

SEQ ID NO: 1014891 - DNA, 25 bp, Homo sapien
ttcctaaaatccagccataccaaca

SEQ ID NO: 1014892 - DNA, 25 bp, Homo sapien
aacataccagtacaccaacggcctg

SEQ ID NO: 1014893 - DNA, 25 bp, Homo sapien
cccgaatagtgtccattatgcccaa

SEQ ID NO: 1014894 - DNA, 25 bp, Homo sapien
tgtgaacagacactgcatcaaagaa

SEQ ID NO: 1014895 - DNA, 25 bp, Homo sapien
gaagtgtgggctactagtgtactca

SEQ ID NO: 1014896 - DNA, 25 bp, Homo sapien
ctttactttcgtcctatgatgccca

SEQ ID NO: 1014897 - DNA, 25 bp, Homo sapien
tctgaatactggaaactgtgctcgt

SEQ ID NO: 1014898 - DNA, 25 bp, Homo sapien
agatccacgtattaatgtttctgaa

SEQ ID NO: 1014899 - DNA, 25 bp, Homo sapien
gaataagtatagtggagtccttgct

SEQ ID NO: 1014900 - DNA, 25 bp, Homo sapien
gctggggaccaggaataagtatagt

SEQ ID NO: 1014901 - DNA, 25 bp, Homo sapien
gcgtagattcttgaccatgtagtaa

SEQ ID NO: 1014902 - DNA, 25 bp, Homo sapien
tatatcctcctgatagccatgggaa

SEQ ID NO: 1014903 - DNA, 25 bp, Homo sapien
tggctctgttggctgtttacaccca

SEQ ID NO: 1014904 - DNA, 25 bp, Homo sapien
gaaaagaatacatccgatgcgtaga

SEQ ID NO: 1014905 - DNA, 25 bp, Homo sapien
gaacaactctaagccatggacaaag

SEQ ID NO: 1014906 - DNA, 25 bp, Homo sapien
taagacagttaccagagggaccagc

SEQ ID NO: 1014907 - DNA, 25 bp, Homo sapien
tgtactacactgaagggcctgcatg

SEQ ID NO: 1014908 - DNA, 25 bp, Homo sapien
gatgacgcagagatacagacaacag

SEQ ID NO: 1014909 - DNA, 25 bp, Homo sapien
aggaatccactccccagataaatgc

SEQ ID NO: 1014910 - DNA, 25 bp, Homo sapien
aatccactccccagataaatgcatt

SEQ ID NO: 1014911 - DNA, 25 bp, Homo sapien
gaatccactccccagataaatgcat

SEQ ID NO: 1014912 - DNA, 25 bp, Homo sapien
tccactccccagataaatgcattaa

SEQ ID NO: 1014913 - DNA, 25 bp, Homo sapien
tgacatcagatggcctctggaagct

SEQ ID NO: 1014914 - DNA, 25 bp, Homo sapien
ctccctgacatcagatggcctctgg

SEQ ID NO: 1014915 - DNA, 25 bp, Homo sapien
tccctgacatcagatggcctctgga

SEQ ID NO: 1014916 - DNA, 25 bp, Homo sapien
ctgacatcagatggcctctggaagc

SEQ ID NO: 1014917 - DNA, 25 bp, Homo sapien
acaaggatgaggagaaattctgggc

SEQ ID NO: 1014918 - DNA, 25 bp, Homo sapien
ctggacagacaaggatgaggagaaa

SEQ ID NO: 1014919 - DNA, 25 bp, Homo sapien
ggatgaggagaaattctgggcttac

SEQ ID NO: 1014920 - DNA, 25 bp, Homo sapien
aaggatgaggagaaattctgggctt

SEQ ID NO: 1014921 - DNA, 25 bp, Homo sapien
catcaaagccatccaggaggaccag

SEQ ID NO: 1014922 - DNA, 25 bp, Homo sapien
tccaggaggaccaggatggaggcca

SEQ ID NO: 1014923 - DNA, 25 bp, Homo sapien
agccaggcatcagctcatcaaagcc

SEQ ID NO: 1014924 - DNA, 25 bp, Homo sapien
tcagccaggcatcagctcatcaaag

SEQ ID NO: 1014925 - DNA, 25 bp, Homo sapien
tcttttattagtggtgaaagtgttc

SEQ ID NO: 1014926 - DNA, 25 bp, Homo sapien
gcctattaaagatattatccctctg

SEQ ID NO: 1014927 - DNA, 25 bp, Homo sapien
gcccagccctagttcagtatctttt

SEQ ID NO: 1014928 - DNA, 25 bp, Homo sapien
catacacctacttttctgcttcgtt

SEQ ID NO: 1014929 - DNA, 25 bp, Homo sapien
aactctctttgtacttggagggcac

SEQ ID NO: 1014930 - DNA, 25 bp, Homo sapien
tagatagtcctccaacaaccaaagg

SEQ ID NO: 1014931 - DNA, 25 bp, Homo sapien
tagttttgacaatgaccaggttgga

SEQ ID NO: 1014932 - DNA, 25 bp, Homo sapien
tctgggtgcccctcatagtgcagta

SEQ ID NO: 1014933 - DNA, 25 bp, Homo sapien
tggaaactccccatgtgcccaatgt

SEQ ID NO: 1014934 - DNA, 25 bp, Homo sapien
taaagtctcagcagttgtttcccgc

SEQ ID NO: 1014935 - DNA, 25 bp, Homo sapien
cagtaccacttgatctccagggaaa

SEQ ID NO: 1014936 - DNA, 25 bp, Homo sapien
tttaccacggatgctctcttcaggc

SEQ ID NO: 1014937 - DNA, 25 bp, Homo sapien
tccacttgcaggtagagtccaattc

SEQ ID NO: 1014938 - DNA, 25 bp, Homo sapien
ccctggtgggccagtgccctcagtg

SEQ ID NO: 1014939 - DNA, 25 bp, Homo sapien
gtctcttttgctaatgccatccctg

SEQ ID NO: 1014940 - DNA, 25 bp, Homo sapien
ttttgctaatgccatccctggtggg

SEQ ID NO: 1014941 - DNA, 25 bp, Homo sapien
ggtccatccatgtccaaagttccaa

SEQ ID NO: 1014942 - DNA, 25 bp, Homo sapien
ccatagtgttgtggcgtgggcaccc

SEQ ID NO: 1014943 - DNA, 25 bp, Homo sapien
gggcacccaccagtattgttttgta

SEQ ID NO: 1014944 - DNA, 25 bp, Homo sapien
tctagatttactgggagaggtccat

SEQ ID NO: 1014945 - DNA, 25 bp, Homo sapien
taacactgatatttggcaaactttc

SEQ ID NO: 1014946 - DNA, 25 bp, Homo sapien
tggccttttgcttctgcggacggct

SEQ ID NO: 1014947 - DNA, 25 bp, Homo sapien
gccttttgcttctgcggacggctct

SEQ ID NO: 1014948 - DNA, 25 bp, Homo sapien
ccttttgcttctgcggacggctctg

SEQ ID NO: 1014949 - DNA, 25 bp, Homo sapien
ctggccttttgcttctgcggacggc

SEQ ID NO: 1014950 - DNA, 25 bp, Homo sapien
tacatttcaattgctcatgggcagc

SEQ ID NO: 1014951 - DNA, 25 bp, Homo sapien
attgcggcttgattaataaaattca

SEQ ID NO: 1014952 - DNA, 25 bp, Homo sapien
attctgtaggaactatataaagaaa

SEQ ID NO: 1014953 - DNA, 25 bp, Homo sapien
aacagaagaatattgcggcttgatt

SEQ ID NO: 1014954 - DNA, 25 bp, Homo sapien
gtccctaatagactcagcagcccag

SEQ ID NO: 1014955 - DNA, 25 bp, Homo sapien
attttccaagtccctaatagactca

SEQ ID NO: 1014956 - DNA, 25 bp, Homo sapien
tggatctcgcactggggccgtgggt

SEQ ID NO: 1014957 - DNA, 25 bp, Homo sapien
ttccaagtccctaatagactcagca

SEQ ID NO: 1014958 - DNA, 25 bp, Homo sapien
cagtaagcgtgtctattctgaccat

SEQ ID NO: 1014959 - DNA, 25 bp, Homo sapien
tcatttttggagactttctggaagg

SEQ ID NO: 1014960 - DNA, 25 bp, Homo sapien
cagccattaggccagtaagcgtgtc

SEQ ID NO: 1014961 - DNA, 25 bp, Homo sapien
tctggaaggacaggccagccattag

SEQ ID NO: 1014962 - DNA, 25 bp, Homo sapien
tgacactccacagtgtgcctgcaac

SEQ ID NO: 1014963 - DNA, 25 bp, Homo sapien
acagtgtgcctgcaacccaagtggc

SEQ ID NO: 1014964 - DNA, 25 bp, Homo sapien
gcagtggtggcagttcagaaataaa

SEQ ID NO: 1014965 - DNA, 25 bp, Homo sapien
caagtggccttatccgtgcagtggt

SEQ ID NO: 1014966 - DNA, 25 bp, Homo sapien
gcagacttctctggaatgtcccaga

SEQ ID NO: 1014967 - DNA, 25 bp, Homo sapien
catcatgatgatgcggtgtgccaga

SEQ ID NO: 1014968 - DNA, 25 bp, Homo sapien
agtgtcctgcgcaacctgggcatga

SEQ ID NO: 1014969 - DNA, 25 bp, Homo sapien
tgtccaaggtcgtgcacaagtcttt

SEQ ID NO: 1014970 - DNA, 25 bp, Homo sapien
tacggagtgccgcattacaggtggc

SEQ ID NO: 1014971 - DNA, 25 bp, Homo sapien
gagtggccagctccgacacatttgt

SEQ ID NO: 1014972 - DNA, 25 bp, Homo sapien
ccaaacataggtgcaggtgggcagt

SEQ ID NO: 1014973 - DNA, 25 bp, Homo sapien
cagagccgacttggaggatctacgg

SEQ ID NO: 1014974 - DNA, 25 bp, Homo sapien
ggtcaggcctgatgcgatgagatct

SEQ ID NO: 1014975 - DNA, 25 bp, Homo sapien
tgctgtcaggaatactcagatgcga

SEQ ID NO: 1014976 - DNA, 25 bp, Homo sapien
gaccgtatctgagtaattgcatcca

SEQ ID NO: 1014977 - DNA, 25 bp, Homo sapien
ggcgtttgttctcatttcaggaccg

SEQ ID NO: 1014978 - DNA, 25 bp, Homo sapien
gtcttctccttctctgtcctctttg

SEQ ID NO: 1014979 - DNA, 25 bp, Homo sapien
ttctgtcttctccttctctgtcctc

SEQ ID NO: 1014980 - DNA, 25 bp, Homo sapien
ttctccttctctgtcctctttgcca

SEQ ID NO: 1014981 - DNA, 25 bp, Homo sapien
ctggttctctgtttcttctgtcttc

SEQ ID NO: 1014982 - DNA, 25 bp, Homo sapien
tatttattgtcacagccattcccct

SEQ ID NO: 1014983 - DNA, 25 bp, Homo sapien
cttatttattgtcacagccattccc

SEQ ID NO: 1014984 - DNA, 25 bp, Homo sapien
ttatttattgtcacagccattcccc

SEQ ID NO: 1014985 - DNA, 25 bp, Homo sapien
ttcaggcgcatgcttggaggatttc

SEQ ID NO: 1014986 - DNA, 25 bp, Homo sapien
tgctgaggtcgcacgttctctcctc

SEQ ID NO: 1014987 - DNA, 25 bp, Homo sapien
ttctctgttcatccgggagcgcggc

SEQ ID NO: 1014988 - DNA, 25 bp, Homo sapien
cagtgctccgtgctgaggtcgcacg

SEQ ID NO: 1014989 - DNA, 25 bp, Homo sapien
gatgcaagtctttcccggctcgtct

SEQ ID NO: 1014990 - DNA, 25 bp, Homo sapien
tactctcctactccgcgcaggaagt

SEQ ID NO: 1014991 - DNA, 25 bp, Homo sapien
ttcaggagccccgagccgcttttgt

SEQ ID NO: 1014992 - DNA, 25 bp, Homo sapien
cggagtccatgccttgctgtcggtg

SEQ ID NO: 1014993 - DNA, 25 bp, Homo sapien
agggaccctgcaaccgtcctccctg

SEQ ID NO: 1014994 - DNA, 25 bp, Homo sapien
gcggcggccgagggaccctgcaacc

SEQ ID NO: 1014995 - DNA, 25 bp, Homo sapien
gccgagggaccctgcaaccgtcctc

SEQ ID NO: 1014996 - DNA, 25 bp, Homo sapien
gcggccgagggaccctgcaaccgtc

SEQ ID NO: 1014997 - DNA, 25 bp, Homo sapien
agaggggcgggctctcgccaggcag

SEQ ID NO: 1014998 - DNA, 25 bp, Homo sapien
gaggggcgggctctcgccaggcagc

SEQ ID NO: 1014999 - DNA, 25 bp, Homo sapien
aggggcgggctctcgccaggcagca

SEQ ID NO: 1015000 - DNA, 25 bp, Homo sapien
ggggcgggctctcgccaggcagcag

SEQ ID NO: 1015001 - DNA, 25 bp, Homo sapien
aaaaaagcatcgaaacattctgtgg

SEQ ID NO: 1015002 - DNA, 25 bp, Homo sapien
agtggaaaggcttacatttgcagaa

SEQ ID NO: 1015003 - DNA, 25 bp, Homo sapien
aaaagcatcgaaacattctgtggca

SEQ ID NO: 1015004 - DNA, 25 bp, Homo sapien
tcctctgcgctgagcttggacttaa

SEQ ID NO: 1015005 - DNA, 25 bp, Homo sapien
ctttgctttctataatactggattg

SEQ ID NO: 1015006 - DNA, 25 bp, Homo sapien
catgttaacatttgcaacattttta

SEQ ID NO: 1015007 - DNA, 25 bp, Homo sapien
acacatgttaacatttgcaacattt

SEQ ID NO: 1015008 - DNA, 25 bp, Homo sapien
tctataatactggattgcttgagtt

SEQ ID NO: 1015009 - DNA, 25 bp, Homo sapien
cacaagctaagttgatttcagatct

SEQ ID NO: 1015010 - DNA, 25 bp, Homo sapien
gccattgaatacagcctgcactgct

SEQ ID NO: 1015011 - DNA, 25 bp, Homo sapien
tgacacactccctttcggtttcgtg

SEQ ID NO: 1015012 - DNA, 25 bp, Homo sapien
gcattggcctcaccacgcaacagga

SEQ ID NO: 1015013 - DNA, 25 bp, Homo sapien
ttcccaaggaaagcacgaatattcc

SEQ ID NO: 1015014 - DNA, 25 bp, Homo sapien
tgcccagccccttcattaaagacac

SEQ ID NO: 1015015 - DNA, 25 bp, Homo sapien
aatattcccccccgtgctcttaatg

SEQ ID NO: 1015016 - DNA, 25 bp, Homo sapien
tcttaatgcccagccccttcattaa

SEQ ID NO: 1015017 - DNA, 25 bp, Homo sapien
aaaatgctgcataaacgtggctggg

SEQ ID NO: 1015018 - DNA, 25 bp, Homo sapien
tgaagctggcgaaatccaagatggc

SEQ ID NO: 1015019 - DNA, 25 bp, Homo sapien
ccaagatggcgcctctgaagagcct

SEQ ID NO: 1015020 - DNA, 25 bp, Homo sapien
ttcttaggacgaaaccagctgaagc

SEQ ID NO: 1015021 - DNA, 25 bp, Homo sapien
cctcgagtcacggagcttgcaagct

SEQ ID NO: 1015022 - DNA, 25 bp, Homo sapien
gtcatcttgaagacatatgcgtgca

SEQ ID NO: 1015023 - DNA, 25 bp, Homo sapien
tgggaactggtgcaaagaatgactg

SEQ ID NO: 1015024 - DNA, 25 bp, Homo sapien
taaaggactcacttctccgcaaaaa

SEQ ID NO: 1015025 - DNA, 25 bp, Homo sapien
ctctgggtgctattaaccgggcgaa

SEQ ID NO: 1015026 - DNA, 25 bp, Homo sapien
gaaggagtcacgatggagtccgtct

SEQ ID NO: 1015027 - DNA, 25 bp, Homo sapien
tatcctaaggtgatggacgccgggc

SEQ ID NO: 1015028 - DNA, 25 bp, Homo sapien
caaggtagggtatcccactagaagc

SEQ ID NO: 1015029 - DNA, 25 bp, Homo sapien
tcaaggctacggtgagtcacaaaca

SEQ ID NO: 1015030 - DNA, 25 bp, Homo sapien
aaggctacggtgagtcacaaacaca

SEQ ID NO: 1015031 - DNA, 25 bp, Homo sapien
gctacggtgagtcacaaacacacca

SEQ ID NO: 1015032 - DNA, 25 bp, Homo sapien
agttcaaggctacggtgagtcacaa

SEQ ID NO: 1015033 - DNA, 25 bp, Homo sapien
aggctgcctctactcatggaggaag

SEQ ID NO: 1015034 - DNA, 25 bp, Homo sapien
ggctaatgactctgaatggttggaa

SEQ ID NO: 1015035 - DNA, 25 bp, Homo sapien
atgactctgaatggttggaaagttc

SEQ ID NO: 1015036 - DNA, 25 bp, Homo sapien
taatgactctgaatggttggaaagt

SEQ ID NO: 1015037 - DNA, 25 bp, Homo sapien
cgcgggactgcaggcctctttacgc

SEQ ID NO: 1015038 - DNA, 25 bp, Homo sapien
actgcaggcctctttacgcagcgcg

SEQ ID NO: 1015039 - DNA, 25 bp, Homo sapien
acggaccggtgccaacctaagcagc

SEQ ID NO: 1015040 - DNA, 25 bp, Homo sapien
ggtgccaacctaagcagcccggaac

SEQ ID NO: 1015041 - DNA, 25 bp, Homo sapien
gcgtctccccaaggaccgctctagg

SEQ ID NO: 1015042 - DNA, 25 bp, Homo sapien
gaccgctctaggagttgcgccaggt

SEQ ID NO: 1015043 - DNA, 25 bp, Homo sapien
gcactccccagtaggagccgcagga

SEQ ID NO: 1015044 - DNA, 25 bp, Homo sapien
agccgcaggactgggacccgcgtct

SEQ ID NO: 1015045 - DNA, 25 bp, Homo sapien
tatgtacagaatggtccctggcccg

SEQ ID NO: 1015046 - DNA, 25 bp, Homo sapien
atatggccggccagctgaaatccct

SEQ ID NO: 1015047 - DNA, 25 bp, Homo sapien
gagagccaagcacgatcctatgtac

SEQ ID NO: 1015048 - DNA, 25 bp, Homo sapien
aatatgactatgataccagcacccg

SEQ ID NO: 1015049 - DNA, 25 bp, Homo sapien
tgcccgaaatcatgttgtttgtatg

SEQ ID NO: 1015050 - DNA, 25 bp, Homo sapien
tctagacagggcatccattcttcag

SEQ ID NO: 1015051 - DNA, 25 bp, Homo sapien
tatcctgattcccaaagtgattgcc

SEQ ID NO: 1015052 - DNA, 25 bp, Homo sapien
ttccttggcccagtttacatgttta

SEQ ID NO: 1015053 - DNA, 25 bp, Homo sapien
agaaagcctgtttggctgaactgtg

SEQ ID NO: 1015054 - DNA, 25 bp, Homo sapien
cctgtttggctgaactgtggttcaa

SEQ ID NO: 1015055 - DNA, 25 bp, Homo sapien
aaaaaaagagtggatggtggtagat

SEQ ID NO: 1015056 - DNA, 25 bp, Homo sapien
aagcctgtttggctgaactgtggtt

SEQ ID NO: 1015057 - DNA, 25 bp, Homo sapien
agccaaaatggcgggtctggaaagg

SEQ ID NO: 1015058 - DNA, 25 bp, Homo sapien
caaaatggcgggtctggaaagggat

SEQ ID NO: 1015059 - DNA, 25 bp, Homo sapien
tgagccaaaatggcgggtctggaaa

SEQ ID NO: 1015060 - DNA, 25 bp, Homo sapien
gagccaaaatggcgggtctggaaag

SEQ ID NO: 1015061 - DNA, 25 bp, Homo sapien
gaaccggtaagttgcactataaatc

SEQ ID NO: 1015062 - DNA, 25 bp, Homo sapien
gatagtctgtatatcactaaaacag

SEQ ID NO: 1015063 - DNA, 25 bp, Homo sapien
gacatggttgtcttagcactgaggc

SEQ ID NO: 1015064 - DNA, 25 bp, Homo sapien
aaacagaagagttggccgccctgag

SEQ ID NO: 1015065 - DNA, 25 bp, Homo sapien
ggagaggtcacattcatcccttcaa

SEQ ID NO: 1015066 - DNA, 25 bp, Homo sapien
ccttcaaagcgcagggaggttccta

SEQ ID NO: 1015067 - DNA, 25 bp, Homo sapien
gcaacacttacaagaatgaacctaa

SEQ ID NO: 1015068 - DNA, 25 bp, Homo sapien
gtttaaggtacatcacagcaccgga

SEQ ID NO: 1015069 - DNA, 25 bp, Homo sapien
tgtctgtctgaaagtgctccaggca

SEQ ID NO: 1015070 - DNA, 25 bp, Homo sapien
cagtcagccttcttgtcgtcctggg

SEQ ID NO: 1015071 - DNA, 25 bp, Homo sapien
ccagctggactgtgggatgatgtta

SEQ ID NO: 1015072 - DNA, 25 bp, Homo sapien
taccctcaagaagcgaactcagctg

SEQ ID NO: 1015073 - DNA, 25 bp, Homo sapien
caggaatccacgtgtacaggtaagc

SEQ ID NO: 1015074 - DNA, 25 bp, Homo sapien
caagagggcagacagctctgatcac

SEQ ID NO: 1015075 - DNA, 25 bp, Homo sapien
gtgacttcaaatccttccccattcg

SEQ ID NO: 1015076 - DNA, 25 bp, Homo sapien
ggcactgtcactccccaagagggca

SEQ ID NO: 1015077 - DNA, 25 bp, Homo sapien
gcatctttagtgactgaatatcccc

SEQ ID NO: 1015078 - DNA, 25 bp, Homo sapien
ctgcaagaagtgaggtgggtgctga

SEQ ID NO: 1015079 - DNA, 25 bp, Homo sapien
gaggtgggtgctgaggagtgggctc

SEQ ID NO: 1015080 - DNA, 25 bp, Homo sapien
gtgggctccacccaggccaggtgcc

SEQ ID NO: 1015081 - DNA, 25 bp, Homo sapien
gtgggtgctgaggagtgggctccac

SEQ ID NO: 1015082 - DNA, 25 bp, Homo sapien
gactggaatcttgagcagggcctga

SEQ ID NO: 1015083 - DNA, 25 bp, Homo sapien
tggaatcttgagcagggcctgaatg

SEQ ID NO: 1015084 - DNA, 25 bp, Homo sapien
ctggaatcttgagcagggcctgaat

SEQ ID NO: 1015085 - DNA, 25 bp, Homo sapien
actggaatcttgagcagggcctgaa

SEQ ID NO: 1015086 - DNA, 25 bp, Homo sapien
cacacaaaagtggtgcttatcccca

SEQ ID NO: 1015087 - DNA, 25 bp, Homo sapien
cacgcatcgcgcatgttgtgtccaa

SEQ ID NO: 1015088 - DNA, 25 bp, Homo sapien
ggcttagtgtgaagacacgcatcgc

SEQ ID NO: 1015089 - DNA, 25 bp, Homo sapien
caatgcagagagtgtgactagggct

SEQ ID NO: 1015090 - DNA, 25 bp, Homo sapien
gctggggctttcctgcgtagtctct

SEQ ID NO: 1015091 - DNA, 25 bp, Homo sapien
ggctttcctgcgtagtctctcttca

SEQ ID NO: 1015092 - DNA, 25 bp, Homo sapien
tcctgcgtagtctctcttcagcgag

SEQ ID NO: 1015093 - DNA, 25 bp, Homo sapien
gcgtagtctctcttcagcgagtcca

SEQ ID NO: 1015094 - DNA, 25 bp, Homo sapien
aagagtctaactcccacctggaagg

SEQ ID NO: 1015095 - DNA, 25 bp, Homo sapien
gatagtttatacacttccacgtggc

SEQ ID NO: 1015096 - DNA, 25 bp, Homo sapien
gagggagtcgaaaggaacaatgaaa

SEQ ID NO: 1015097 - DNA, 25 bp, Homo sapien
aaaagtcttactccacaatagtgaa

SEQ ID NO: 1015098 - DNA, 25 bp, Homo sapien
tggggttcattcacttgagcccctg

SEQ ID NO: 1015099 - DNA, 25 bp, Homo sapien
tcattcacttgagcccctgctacag

SEQ ID NO: 1015100 - DNA, 25 bp, Homo sapien
ggttcattcacttgagcccctgcta

SEQ ID NO: 1015101 - DNA, 25 bp, Homo sapien
agcaaagacaggataggcagggccc

SEQ ID NO: 1015102 - DNA, 25 bp, Homo sapien
cattttggtttgtcacagccggtgg

SEQ ID NO: 1015103 - DNA, 25 bp, Homo sapien
tcagtggtgccaagggcgaaaatcc

SEQ ID NO: 1015104 - DNA, 25 bp, Homo sapien
aaggctctccatgttatatcgttag

SEQ ID NO: 1015105 - DNA, 25 bp, Homo sapien
tgcgttctaacacgaaaggctctcc

SEQ ID NO: 1015106 - DNA, 25 bp, Homo sapien
ggcttctgaagcagtattttcctca

SEQ ID NO: 1015107 - DNA, 25 bp, Homo sapien
gcttatatactgacttcgtctggga

SEQ ID NO: 1015108 - DNA, 25 bp, Homo sapien
tccaggcttatatactgacttcgtc

SEQ ID NO: 1015109 - DNA, 25 bp, Homo sapien
tatatactgacttcgtctgggaggc

SEQ ID NO: 1015110 - DNA, 25 bp, Homo sapien
gacccgctggtctcatgggaaggca

SEQ ID NO: 1015111 - DNA, 25 bp, Homo sapien
agaggactctaggaagagtcaggcc

SEQ ID NO: 1015112 - DNA, 25 bp, Homo sapien
acctttcagtgtggcacagttctgc

SEQ ID NO: 1015113 - DNA, 25 bp, Homo sapien
tgataacaaagaggactctaggaag

SEQ ID NO: 1015114 - DNA, 25 bp, Homo sapien
gcatagacaatgagtactttcttac

SEQ ID NO: 1015115 - DNA, 25 bp, Homo sapien
tgcatagacaatgagtactttctta

SEQ ID NO: 1015116 - DNA, 25 bp, Homo sapien
gtgcatagacaatgagtactttctt

SEQ ID NO: 1015117 - DNA, 25 bp, Homo sapien
tgtgcatagacaatgagtactttct

SEQ ID NO: 1015118 - DNA, 25 bp, Homo sapien
tgcctgctcagttcatctacagcca

SEQ ID NO: 1015119 - DNA, 25 bp, Homo sapien
aatcagacactgtgacggtgcagcc

SEQ ID NO: 1015120 - DNA, 25 bp, Homo sapien
caaggatccgttgaaagacttgggt

SEQ ID NO: 1015121 - DNA, 25 bp, Homo sapien
cggctcaaggttcatggcatacaaa

SEQ ID NO: 1015122 - DNA, 25 bp, Homo sapien
taggcttcgtgggtttccactccat

SEQ ID NO: 1015123 - DNA, 25 bp, Homo sapien
tcagtgatgtcgctagccagagacc

SEQ ID NO: 1015124 - DNA, 25 bp, Homo sapien
gaaatatcactaggtcagcctcccg

SEQ ID NO: 1015125 - DNA, 25 bp, Homo sapien
cagagacctttgcttgtaggcttcg

SEQ ID NO: 1015126 - DNA, 25 bp, Homo sapien
caatatattaattagagaaaaacaa

SEQ ID NO: 1015127 - DNA, 25 bp, Homo sapien
gattcaatatattaattagagaaaa

SEQ ID NO: 1015128 - DNA, 25 bp, Homo sapien
ttcaatatattaattagagaaaaac

SEQ ID NO: 1015129 - DNA, 25 bp, Homo sapien
ctgattcaatatattaattagagaa

SEQ ID NO: 1015130 - DNA, 25 bp, Homo sapien
gctcaaaacattgatgccacttcca

SEQ ID NO: 1015131 - DNA, 25 bp, Homo sapien
tgtaaccaggttacaatatttgctc

SEQ ID NO: 1015132 - DNA, 25 bp, Homo sapien
tttgctcagtaagtgtgcaactgtg

SEQ ID NO: 1015133 - DNA, 25 bp, Homo sapien
tgttgtaactaggtgttgtaaccag

SEQ ID NO: 1015134 - DNA, 25 bp, Homo sapien
gacaccaactaaagtcatgtttgta

SEQ ID NO: 1015135 - DNA, 25 bp, Homo sapien
tatggatttagacaccaactaaagt

SEQ ID NO: 1015136 - DNA, 25 bp, Homo sapien
gtcatgtttgtattccttagaccag

SEQ ID NO: 1015137 - DNA, 25 bp, Homo sapien
agtcatgtttgtattccttagacca

SEQ ID NO: 1015138 - DNA, 25 bp, Homo sapien
gacgaggagctgtgcgtaacaccag

SEQ ID NO: 1015139 - DNA, 25 bp, Homo sapien
gcagtctgtgatcaagccagtcaaa

SEQ ID NO: 1015140 - DNA, 25 bp, Homo sapien
gctgttacaggtagctctgcatccc

SEQ ID NO: 1015141 - DNA, 25 bp, Homo sapien
tctggtgattcggaatgaagcccac

SEQ ID NO: 1015142 - DNA, 25 bp, Homo sapien
tggagcaaaccggaatcgtagaatc

SEQ ID NO: 1015143 - DNA, 25 bp, Homo sapien
gcacgctgaaccagtacagcgggaa

SEQ ID NO: 1015144 - DNA, 25 bp, Homo sapien
caggatggctggcacgctgaaccag

SEQ ID NO: 1015145 - DNA, 25 bp, Homo sapien
ggaatcgtagaatcctgggatgtca

SEQ ID NO: 1015146 - DNA, 25 bp, Homo sapien
taagtggtagcaccattcatggtcc

SEQ ID NO: 1015147 - DNA, 25 bp, Homo sapien
gaagctctaacatgcccaggttgct

SEQ ID NO: 1015148 - DNA, 25 bp, Homo sapien
cagcagggaacatgcgtgtggacac

SEQ ID NO: 1015149 - DNA, 25 bp, Homo sapien
caccatgtgtgatggatacggccga

SEQ ID NO: 1015150 - DNA, 25 bp, Homo sapien
agggagaaagcagatgcatttgtgt

SEQ ID NO: 1015151 - DNA, 25 bp, Homo sapien
ctgcaagggagaaagcagatgcatt

SEQ ID NO: 1015152 - DNA, 25 bp, Homo sapien
gagaaagcagatgcatttgtgtgga

SEQ ID NO: 1015153 - DNA, 25 bp, Homo sapien
caagggagaaagcagatgcatttgt

SEQ ID NO: 1015154 - DNA, 25 bp, Homo sapien
ccattgactcctgtcttcgtgtaca

SEQ ID NO: 1015155 - DNA, 25 bp, Homo sapien
gagtggccacaggaagtatcgagaa

SEQ ID NO: 1015156 - DNA, 25 bp, Homo sapien
ggaagtatcgagaatctccattgac

SEQ ID NO: 1015157 - DNA, 25 bp, Homo sapien
cttcgtgtacatctcggccgtgcct

SEQ ID NO: 1015158 - DNA, 25 bp, Homo sapien
caagcactgccagagccatatggat

SEQ ID NO: 1015159 - DNA, 25 bp, Homo sapien
acgtatcacaacacacgcagggcca

SEQ ID NO: 1015160 - DNA, 25 bp, Homo sapien
agcatgcggccatcagaatgcaggg

SEQ ID NO: 1015161 - DNA, 25 bp, Homo sapien
tgtgctggctccataggccccttgc

SEQ ID NO: 1015162 - DNA, 25 bp, Homo sapien
cccagcttcagacaacatgacttta

SEQ ID NO: 1015163 - DNA, 25 bp, Homo sapien
gcttcagacaacatgactttattac

SEQ ID NO: 1015164 - DNA, 25 bp, Homo sapien
acaacatgactttattactggaaac

SEQ ID NO: 1015165 - DNA, 25 bp, Homo sapien
gcacccagcttcagacaacatgact

SEQ ID NO: 1015166 - DNA, 25 bp, Homo sapien
taaacttccctatggctttaggaca

SEQ ID NO: 1015167 - DNA, 25 bp, Homo sapien
gcaactgattcagatgccaaacatt

SEQ ID NO: 1015168 - DNA, 25 bp, Homo sapien
taatgttacaggcaactgaaagcta

SEQ ID NO: 1015169 - DNA, 25 bp, Homo sapien
cagccttgcataagagccgtgaaga

SEQ ID NO: 1015170 - DNA, 25 bp, Homo sapien
atccacagaagtgtaatgtgccatg

SEQ ID NO: 1015171 - DNA, 25 bp, Homo sapien
tcttcggatgcaatttcaggagcaa

SEQ ID NO: 1015172 - DNA, 25 bp, Homo sapien
cttcttcggatgcaatttcaggagc

SEQ ID NO: 1015173 - DNA, 25 bp, Homo sapien
aatccacagaagtgtaatgtgccat

SEQ ID NO: 1015174 - DNA, 25 bp, Homo sapien
ctgggcctcctagtgtgctgcttac

SEQ ID NO: 1015175 - DNA, 25 bp, Homo sapien
gcctcctagtgtgctgcttacgtga

SEQ ID NO: 1015176 - DNA, 25 bp, Homo sapien
gtgctgcttacgtgatgcccacgtg

SEQ ID NO: 1015177 - DNA, 25 bp, Homo sapien
ctagtgtgctgcttacgtgatgccc

SEQ ID NO: 1015178 - DNA, 25 bp, Homo sapien
gccacccaatattcccctgaaacag

SEQ ID NO: 1015179 - DNA, 25 bp, Homo sapien
ttcccctgaaacagtactggccatg

SEQ ID NO: 1015180 - DNA, 25 bp, Homo sapien
tcccctgaaacagtactggccatgt

SEQ ID NO: 1015181 - DNA, 25 bp, Homo sapien
ccagcgccacccaatattcccctga

SEQ ID NO: 1015182 - DNA, 25 bp, Homo sapien
tgcccttggctataaacctgtagag

SEQ ID NO: 1015183 - DNA, 25 bp, Homo sapien
gaaagtgtggtacacggacgccatg

SEQ ID NO: 1015184 - DNA, 25 bp, Homo sapien
gaacttagtcaatgtgcactgcctg

SEQ ID NO: 1015185 - DNA, 25 bp, Homo sapien
gatcaatagatgctgggaatccaaa

SEQ ID NO: 1015186 - DNA, 25 bp, Homo sapien
tgagcatgcatccatcagagggagg

SEQ ID NO: 1015187 - DNA, 25 bp, Homo sapien
gattacaggatggaataacactttc

SEQ ID NO: 1015188 - DNA, 25 bp, Homo sapien
gagaaagaaataggcctgtgcttat

SEQ ID NO: 1015189 - DNA, 25 bp, Homo sapien
taagggccaacgaaatcacttgagc

SEQ ID NO: 1015190 - DNA, 25 bp, Homo sapien
tgtagatagtcaccatgcttgcagc

SEQ ID NO: 1015191 - DNA, 25 bp, Homo sapien
tagcagacacaacccgaggcagggt

SEQ ID NO: 1015192 - DNA, 25 bp, Homo sapien
tgacaggactgaggacacactggca

SEQ ID NO: 1015193 - DNA, 25 bp, Homo sapien
cactggcaccttgcgtatcagctgg

SEQ ID NO: 1015194 - DNA, 25 bp, Homo sapien
tcagatgacacacacttggattctg

SEQ ID NO: 1015195 - DNA, 25 bp, Homo sapien
tccatgattcaagagttcagatgac

SEQ ID NO: 1015196 - DNA, 25 bp, Homo sapien
agagttcagatgacacacacttgga

SEQ ID NO: 1015197 - DNA, 25 bp, Homo sapien
tccatccatgattcaagagttcaga

SEQ ID NO: 1015198 - DNA, 25 bp, Homo sapien
caagctttggaaaaggccgcctggt

SEQ ID NO: 1015199 - DNA, 25 bp, Homo sapien
cagtgctgcttcaattccccgaagg

SEQ ID NO: 1015200 - DNA, 25 bp, Homo sapien
tctggtgtcgcttcttaaaaatggc

SEQ ID NO: 1015201 - DNA, 25 bp, Homo sapien
ggtttttgacctcacccagacacga

SEQ ID NO: 1015202 - DNA, 25 bp, Homo sapien
gctgcccacatggtgtgtcccgaat

SEQ ID NO: 1015203 - DNA, 25 bp, Homo sapien
tcataaacgcagtgtagaccagaaa

SEQ ID NO: 1015204 - DNA, 25 bp, Homo sapien
tgcaggcctttgtgacgactgttac

SEQ ID NO: 1015205 - DNA, 25 bp, Homo sapien
ctgccagtctccctgtaagggtgaa

SEQ ID NO: 1015206 - DNA, 25 bp, Homo sapien
cgtgcctggccgctaatctatgttt

SEQ ID NO: 1015207 - DNA, 25 bp, Homo sapien
gtgtttcaaatctggtcacttttga

SEQ ID NO: 1015208 - DNA, 25 bp, Homo sapien
cctggccgctaatctatgtttaatt

SEQ ID NO: 1015209 - DNA, 25 bp, Homo sapien
tgcctggccgctaatctatgtttaa

SEQ ID NO: 1015210 - DNA, 25 bp, Homo sapien
gacttatacatgacagtgaaatgaa

SEQ ID NO: 1015211 - DNA, 25 bp, Homo sapien
gaatacttgagttctcaccatttag

SEQ ID NO: 1015212 - DNA, 25 bp, Homo sapien
aacacaatatgcatccagatttatt

SEQ ID NO: 1015213 - DNA, 25 bp, Homo sapien
catttagctgaagacacagatcatt

SEQ ID NO: 1015214 - DNA, 25 bp, Homo sapien
gagagcccctttagattaaggccac

SEQ ID NO: 1015215 - DNA, 25 bp, Homo sapien
caagggttcagctttacaggagggc

SEQ ID NO: 1015216 - DNA, 25 bp, Homo sapien
ccataatatgcaagcagctggagtg

SEQ ID NO: 1015217 - DNA, 25 bp, Homo sapien
tactgcatggtgtggagctagcact

SEQ ID NO: 1015218 - DNA, 25 bp, Homo sapien
cctgtgtcttccagatgttctccct

SEQ ID NO: 1015219 - DNA, 25 bp, Homo sapien
tgtcttccagatgttctccctttcc

SEQ ID NO: 1015220 - DNA, 25 bp, Homo sapien
cagaacatgagaccctgtgtcttcc

SEQ ID NO: 1015221 - DNA, 25 bp, Homo sapien
agatgttctccctttccagactctt

SEQ ID NO: 1015222 - DNA, 25 bp, Homo sapien
gcacagggcagcactcgatgcactg

SEQ ID NO: 1015223 - DNA, 25 bp, Homo sapien
tcattgcaatgcatggtgcaccgag

SEQ ID NO: 1015224 - DNA, 25 bp, Homo sapien
ctgctgggtgaatgcctggctgtcc

SEQ ID NO: 1015225 - DNA, 25 bp, Homo sapien
tttcccaatggataagacagcctcc

SEQ ID NO: 1015226 - DNA, 25 bp, Homo sapien
tgtgcaggccacagttaccctgcgc

SEQ ID NO: 1015227 - DNA, 25 bp, Homo sapien
tctgcaaagcacatgtgggtcagct

SEQ ID NO: 1015228 - DNA, 25 bp, Homo sapien
ggaaagagtggtctgtgcaaaattt

SEQ ID NO: 1015229 - DNA, 25 bp, Homo sapien
tctaagccataactctttgccagct

SEQ ID NO: 1015230 - DNA, 25 bp, Homo sapien
taggttccccatagattgagagcga

SEQ ID NO: 1015231 - DNA, 25 bp, Homo sapien
tgctagtaatggagtcaacgccagc

SEQ ID NO: 1015232 - DNA, 25 bp, Homo sapien
cattcgtatctgtcttgtggcccca

SEQ ID NO: 1015233 - DNA, 25 bp, Homo sapien
aaagaactcgtgaagagcctggagc

SEQ ID NO: 1015234 - DNA, 25 bp, Homo sapien
tctgaagacaaggagaacatcatca

SEQ ID NO: 1015235 - DNA, 25 bp, Homo sapien
cactgtgagttacagcaaaatgaac

SEQ ID NO: 1015236 - DNA, 25 bp, Homo sapien
agcacatagaccaatcccagcagtg

SEQ ID NO: 1015237 - DNA, 25 bp, Homo sapien
tcccagcagtgcaccttaggatggg

SEQ ID NO: 1015238 - DNA, 25 bp, Homo sapien
cgggcggcttcgaggatcaggagga

SEQ ID NO: 1015239 - DNA, 25 bp, Homo sapien
tcttagtagcgtgacctcctcttca

SEQ ID NO: 1015240 - DNA, 25 bp, Homo sapien
caccactcaaaagacccagggaacg

SEQ ID NO: 1015241 - DNA, 25 bp, Homo sapien
tgtcctagaatctaccaccattcaa

SEQ ID NO: 1015242 - DNA, 25 bp, Homo sapien
acactccttgtgtcctctatcaggg

SEQ ID NO: 1015243 - DNA, 25 bp, Homo sapien
tgcggtgtggtgtaagcagccccat

SEQ ID NO: 1015244 - DNA, 25 bp, Homo sapien
gaagagacactgagtcacacgggct

SEQ ID NO: 1015245 - DNA, 25 bp, Homo sapien
gcagccccattttcccgcaaagtga

SEQ ID NO: 1015246 - DNA, 25 bp, Homo sapien
gagaagtaggttgggagcctgcggc

SEQ ID NO: 1015247 - DNA, 25 bp, Homo sapien
agcctgcggcgtccagggcctccgc

SEQ ID NO: 1015248 - DNA, 25 bp, Homo sapien
gcctccgcgcgaagaaacaaggcgt

SEQ ID NO: 1015249 - DNA, 25 bp, Homo sapien
gcctcttcaggaccgggttcagaac

SEQ ID NO: 1015250 - DNA, 25 bp, Homo sapien
tgccacctagtctccgtgtcgcgct

SEQ ID NO: 1015251 - DNA, 25 bp, Homo sapien
ggcgggcaccgccttttatatagta

SEQ ID NO: 1015252 - DNA, 25 bp, Homo sapien
gagcttttcccacacttgacgagca

SEQ ID NO: 1015253 - DNA, 25 bp, Homo sapien
tatatagtagcttgtgacgccacgg

SEQ ID NO: 1015254 - DNA, 25 bp, Homo sapien
aagtcacctcttcgcaaactcctgg

SEQ ID NO: 1015255 - DNA, 25 bp, Homo sapien
cgcacccgaccagaaagcggtgtct

SEQ ID NO: 1015256 - DNA, 25 bp, Homo sapien
ggcccttaggatccgcttaaagcca

SEQ ID NO: 1015257 - DNA, 25 bp, Homo sapien
ggccccacgtccatcacgggattaa

SEQ ID NO: 1015258 - DNA, 25 bp, Homo sapien
gaaaggcagagctattcactcagca

SEQ ID NO: 1015259 - DNA, 25 bp, Homo sapien
gaagactcggttgtgaattaaacac

SEQ ID NO: 1015260 - DNA, 25 bp, Homo sapien
tatgccaagcaggtactagatacaa

SEQ ID NO: 1015261 - DNA, 25 bp, Homo sapien
aaaaaatctctatgttctggccgtg

SEQ ID NO: 1015262 - DNA, 25 bp, Homo sapien
agctggcccgccgtccgcgtcgagc

SEQ ID NO: 1015263 - DNA, 25 bp, Homo sapien
cagccaagtcctgccgcgctccgtc

SEQ ID NO: 1015264 - DNA, 25 bp, Homo sapien
gcgtggactgttcgcgctgcctcct

SEQ ID NO: 1015265 - DNA, 25 bp, Homo sapien
gggtcccctggagtcgccgcgctcc

SEQ ID NO: 1015266 - DNA, 25 bp, Homo sapien
gcggcctccggaatgttccccgcgc

SEQ ID NO: 1015267 - DNA, 25 bp, Homo sapien
ctccggaatgttccccgcgcggtgc

SEQ ID NO: 1015268 - DNA, 25 bp, Homo sapien
ggtcaccgggactgagcccggcggc

SEQ ID NO: 1015269 - DNA, 25 bp, Homo sapien
tcaccgggactgagcccggcggcct

SEQ ID NO: 1015270 - DNA, 25 bp, Homo sapien
tttccgcggcaaacgtctggaggcc

SEQ ID NO: 1015271 - DNA, 25 bp, Homo sapien
gggattactccgacgccgcggcagc

SEQ ID NO: 1015272 - DNA, 25 bp, Homo sapien
caagcacccgagcgttactttcgtt

SEQ ID NO: 1015273 - DNA, 25 bp, Homo sapien
ggtgagggaagaagcggcggcggag

SEQ ID NO: 1015274 - DNA, 25 bp, Homo sapien
tacaacatgccctgaaaaatgccct

SEQ ID NO: 1015275 - DNA, 25 bp, Homo sapien
gaaggcctctagttgggtccactgg

SEQ ID NO: 1015276 - DNA, 25 bp, Homo sapien
cactgaatatcttaggaaggccttg

SEQ ID NO: 1015277 - DNA, 25 bp, Homo sapien
ggagcttagctcctgacccaagtca

SEQ ID NO: 1015278 - DNA, 25 bp, Homo sapien
gaagctcaagaacgcccaaaatggt

SEQ ID NO: 1015279 - DNA, 25 bp, Homo sapien
agctcaagaacgcccaaaatggtac

SEQ ID NO: 1015280 - DNA, 25 bp, Homo sapien
ctcaagaacgcccaaaatggtacca

SEQ ID NO: 1015281 - DNA, 25 bp, Homo sapien
caagaacgcccaaaatggtaccact

SEQ ID NO: 1015282 - DNA, 25 bp, Homo sapien
acacagagacaccttcccaaagcct

SEQ ID NO: 1015283 - DNA, 25 bp, Homo sapien
cactggatttcatcttaatgacatt

SEQ ID NO: 1015284 - DNA, 25 bp, Homo sapien
tcatcttaatgacattcaaggacat

SEQ ID NO: 1015285 - DNA, 25 bp, Homo sapien
tcaatgcagttgggccccttgtaca

SEQ ID NO: 1015286 - DNA, 25 bp, Homo sapien
cagagccagcgcctcaagagcctgg

SEQ ID NO: 1015287 - DNA, 25 bp, Homo sapien
gccagcgcctcaagagcctggtgca

SEQ ID NO: 1015288 - DNA, 25 bp, Homo sapien
agcgcctcaagagcctggtgcacac

SEQ ID NO: 1015289 - DNA, 25 bp, Homo sapien
tggtgcacacctccaacacatcact

SEQ ID NO: 1015290 - DNA, 25 bp, Homo sapien
tcgcctcctccaagagggcctcgtt

SEQ ID NO: 1015291 - DNA, 25 bp, Homo sapien
ccttcctctatgatgacgcccagga

SEQ ID NO: 1015292 - DNA, 25 bp, Homo sapien
ggagcttcaccacccggctgtgtct

SEQ ID NO: 1015293 - DNA, 25 bp, Homo sapien
tcggctttcagcacgtgcatcaggt

SEQ ID NO: 1015294 - DNA, 25 bp, Homo sapien
cccacggagcccaatcaaggcatag

SEQ ID NO: 1015295 - DNA, 25 bp, Homo sapien
aaggggagccataacagacagccag

SEQ ID NO: 1015296 - DNA, 25 bp, Homo sapien
tgcaaatttgatgctaacgagctgc

SEQ ID NO: 1015297 - DNA, 25 bp, Homo sapien
aattcaaactaccaagcaatttgca

SEQ ID NO: 1015298 - DNA, 25 bp, Homo sapien
ggcagagggtattcgtgttgtattt

SEQ ID NO: 1015299 - DNA, 25 bp, Homo sapien
cctaggattgtacctggaatgcttg

SEQ ID NO: 1015300 - DNA, 25 bp, Homo sapien
tcgtgttgtattttgttagtgtaaa

SEQ ID NO: 1015301 - DNA, 25 bp, Homo sapien
tatttaggactgtatctttagaacc

SEQ ID NO: 1015302 - DNA, 25 bp, Homo sapien
cttttacagaaagcggagtactcat

SEQ ID NO: 1015303 - DNA, 25 bp, Homo sapien
gtaagtagcacattccttcaatgat

SEQ ID NO: 1015304 - DNA, 25 bp, Homo sapien
tgtgtatcacgccttttccatgtaa

SEQ ID NO: 1015305 - DNA, 25 bp, Homo sapien
tgtggaagtcattatcaacaaggat

SEQ ID NO: 1015306 - DNA, 25 bp, Homo sapien
tcaggtccttgtgtatcacgccttt

SEQ ID NO: 1015307 - DNA, 25 bp, Homo sapien
aaaggaggcaaggccgaggtctgcg

SEQ ID NO: 1015308 - DNA, 25 bp, Homo sapien
aggaggcaaggccgaggtctgcgat

SEQ ID NO: 1015309 - DNA, 25 bp, Homo sapien
ttaaaggaggcaaggccgaggtctg

SEQ ID NO: 1015310 - DNA, 25 bp, Homo sapien
cttaaaggaggcaaggccgaggtct

SEQ ID NO: 1015311 - DNA, 25 bp, Homo sapien
ttgacgtcattcaggtgctcgggcg

SEQ ID NO: 1015312 - DNA, 25 bp, Homo sapien
tcttcttagcggtgccgtccacttc

SEQ ID NO: 1015313 - DNA, 25 bp, Homo sapien
tctgtgggctttgcgttgacgtcat

SEQ ID NO: 1015314 - DNA, 25 bp, Homo sapien
gccatgtagtagagggtgccgccat

SEQ ID NO: 1015315 - DNA, 25 bp, Homo sapien
tatttgcaaatatcgcccagagtac

SEQ ID NO: 1015316 - DNA, 25 bp, Homo sapien
ttatttgcaaatatcgcccagagta

SEQ ID NO: 1015317 - DNA, 25 bp, Homo sapien
cttatttgcaaatatcgcccagagt

SEQ ID NO: 1015318 - DNA, 25 bp, Homo sapien
tccttatttgcaaatatcgcccaga

SEQ ID NO: 1015319 - DNA, 25 bp, Homo sapien
gttacagagatcatgacgcatccca

SEQ ID NO: 1015320 - DNA, 25 bp, Homo sapien
aattcctcagtgtaactgcacactg

SEQ ID NO: 1015321 - DNA, 25 bp, Homo sapien
cacaaacctgactaaaaaggtccag

SEQ ID NO: 1015322 - DNA, 25 bp, Homo sapien
gaagagaagcaggatatcaacagac

SEQ ID NO: 1015323 - DNA, 25 bp, Homo sapien
ggtgacagaacttgaacaatactgc

SEQ ID NO: 1015324 - DNA, 25 bp, Homo sapien
aggaaggtgacagaacttgaacaat

SEQ ID NO: 1015325 - DNA, 25 bp, Homo sapien
gacagaacttgaacaatactgctca

SEQ ID NO: 1015326 - DNA, 25 bp, Homo sapien
gaacttgaacaatactgctcatttt

SEQ ID NO: 1015327 - DNA, 25 bp, Homo sapien
acaaagcaaagactttctttcaggt

SEQ ID NO: 1015328 - DNA, 25 bp, Homo sapien
ctacaaagcaaagactttctttcag

SEQ ID NO: 1015329 - DNA, 25 bp, Homo sapien
aaagcaaagactttctttcaggtct

SEQ ID NO: 1015330 - DNA, 25 bp, Homo sapien
agcaaagactttctttcaggtcttg

SEQ ID NO: 1015331 - DNA, 25 bp, Homo sapien
atttctcttgggcagtactcagtga

SEQ ID NO: 1015332 - DNA, 25 bp, Homo sapien
tcagtgatgtcatccacatctggcc

SEQ ID NO: 1015333 - DNA, 25 bp, Homo sapien
cttccggattcgcttcccagcagag

SEQ ID NO: 1015334 - DNA, 25 bp, Homo sapien
catgagactgataatttctcttggg

SEQ ID NO: 1015335 - DNA, 25 bp, Homo sapien
ttcacgtcctcttctacactttctt

SEQ ID NO: 1015336 - DNA, 25 bp, Homo sapien
cacgtcctcttctacactttcttct

SEQ ID NO: 1015337 - DNA, 25 bp, Homo sapien
acgtcctcttctacactttcttcta

SEQ ID NO: 1015338 - DNA, 25 bp, Homo sapien
tcacgtcctcttctacactttcttc

SEQ ID NO: 1015339 - DNA, 25 bp, Homo sapien
ctgcggttactaggtgcggcaggta

SEQ ID NO: 1015340 - DNA, 25 bp, Homo sapien
tgcggttactaggtgcggcaggtag

SEQ ID NO: 1015341 - DNA, 25 bp, Homo sapien
ctgcggttccgaggtgcggcaggta

SEQ ID NO: 1015342 - DNA, 25 bp, Homo sapien
tgcggttccgaggtgcggcaggtag

SEQ ID NO: 1015343 - DNA, 25 bp, Homo sapien
tctgcggttccgaggtgcggcaggt

SEQ ID NO: 1015344 - DNA, 25 bp, Homo sapien
cgcgctgcggttactaggtgcggca

SEQ ID NO: 1015345 - DNA, 25 bp, Homo sapien
cgctctgcggttactaggtgcggca

SEQ ID NO: 1015346 - DNA, 25 bp, Homo sapien
tgcggttccgaggtgcggcaggtag

SEQ ID NO: 1015347 - DNA, 25 bp, Homo sapien
gatccaagggatatttaaaagtata

SEQ ID NO: 1015348 - DNA, 25 bp, Homo sapien
gtatatttcgttacttctaaccaca

SEQ ID NO: 1015349 - DNA, 25 bp, Homo sapien
cccagcacatggtcagtttttgaaa

SEQ ID NO: 1015350 - DNA, 25 bp, Homo sapien
cataattgaaatatactcagaggac

SEQ ID NO: 1015351 - DNA, 25 bp, Homo sapien
ctatctctatttgagttagctttgc

SEQ ID NO: 1015352 - DNA, 25 bp, Homo sapien
gattcctccttattcatggatttca

SEQ ID NO: 1015353 - DNA, 25 bp, Homo sapien
tgtctgcaggacctatagtgattcc

SEQ ID NO: 1015354 - DNA, 25 bp, Homo sapien
tagttacaggaatattctaagtttc

SEQ ID NO: 1015355 - DNA, 25 bp, Homo sapien
aacagatttatctgcatctattgaa

SEQ ID NO: 1015356 - DNA, 25 bp, Homo sapien
aatttcttttctgacttgctagcat

SEQ ID NO: 1015357 - DNA, 25 bp, Homo sapien
cattttatcaacagatttatctgca

SEQ ID NO: 1015358 - DNA, 25 bp, Homo sapien
tctcatttaagaagacaatgtaata

SEQ ID NO: 1015359 - DNA, 25 bp, Homo sapien
ttggtatggtgtaaggtagaagccc

SEQ ID NO: 1015360 - DNA, 25 bp, Homo sapien
gtagatctatgggttttcaactcca

SEQ ID NO: 1015361 - DNA, 25 bp, Homo sapien
gggcatcctggctgatcttattctc

SEQ ID NO: 1015362 - DNA, 25 bp, Homo sapien
ggcaaacccttcactactagtcttg

SEQ ID NO: 1015363 - DNA, 25 bp, Homo sapien
tcacaactgcattttcgtttgaata

SEQ ID NO: 1015364 - DNA, 25 bp, Homo sapien
cacaactgcattttcgtttgaatac

SEQ ID NO: 1015365 - DNA, 25 bp, Homo sapien
cttcacaactgcattttcgtttgaa

SEQ ID NO: 1015366 - DNA, 25 bp, Homo sapien
caactgcattttcgtttgaatactc

SEQ ID NO: 1015367 - DNA, 25 bp, Homo sapien
gcttgaaggtactgccacacaatca

SEQ ID NO: 1015368 - DNA, 25 bp, Homo sapien
ggtactgccacacaatcaagttgaa

SEQ ID NO: 1015369 - DNA, 25 bp, Homo sapien
gaccggcttgaaggtactgccacac

SEQ ID NO: 1015370 - DNA, 25 bp, Homo sapien
gaatttgaccggcttgaaggtactg

SEQ ID NO: 1015371 - DNA, 25 bp, Homo sapien
cagatcaggtagctaagcggcttca

SEQ ID NO: 1015372 - DNA, 25 bp, Homo sapien
gaacactctatgactggtgagcaca

SEQ ID NO: 1015373 - DNA, 25 bp, Homo sapien
agtatccctacttgacctgagacca

SEQ ID NO: 1015374 - DNA, 25 bp, Homo sapien
tgtaccctggctgtaagtcactccg

SEQ ID NO: 1015375 - DNA, 25 bp, Homo sapien
tgggaactgtgcagtgaaccaggct

SEQ ID NO: 1015376 - DNA, 25 bp, Homo sapien
gaactgtgcagtgaaccaggctgtt

SEQ ID NO: 1015377 - DNA, 25 bp, Homo sapien
tccctgggaactgtgcagtgaacca

SEQ ID NO: 1015378 - DNA, 25 bp, Homo sapien
cctgggaactgtgcagtgaaccagg

SEQ ID NO: 1015379 - DNA, 25 bp, Homo sapien
gctgtttcgtctgcctgtccatgcg

SEQ ID NO: 1015380 - DNA, 25 bp, Homo sapien
cattctcttcttgtgggtgctccag

SEQ ID NO: 1015381 - DNA, 25 bp, Homo sapien
gtaagccacattctgtctgggctgc

SEQ ID NO: 1015382 - DNA, 25 bp, Homo sapien
cataaagatggtagttggcttcgtc

SEQ ID NO: 1015383 - DNA, 25 bp, Homo sapien
ttccctctgtattctgaaaattctc

SEQ ID NO: 1015384 - DNA, 25 bp, Homo sapien
cctctgtattctgaaaattctcgta

SEQ ID NO: 1015385 - DNA, 25 bp, Homo sapien
tgtattctgaaaattctcgtaaggt

SEQ ID NO: 1015386 - DNA, 25 bp, Homo sapien
tattctgaaaattctcgtaaggtct

SEQ ID NO: 1015387 - DNA, 25 bp, Homo sapien
gttccaaagccatgtgagctatata

SEQ ID NO: 1015388 - DNA, 25 bp, Homo sapien
tccaaagccatgtgagctatataat

SEQ ID NO: 1015389 - DNA, 25 bp, Homo sapien
ttccaaagccatgtgagctatataa

SEQ ID NO: 1015390 - DNA, 25 bp, Homo sapien
tgttccaaagccatgtgagctatat

SEQ ID NO: 1015391 - DNA, 25 bp, Homo sapien
atgcagactaggcatatgacttgga

SEQ ID NO: 1015392 - DNA, 25 bp, Homo sapien
ggtctcaggcactgggatattatgc

SEQ ID NO: 1015393 - DNA, 25 bp, Homo sapien
tcctagatagttggtctcaggcact

SEQ ID NO: 1015394 - DNA, 25 bp, Homo sapien
gcatggtgggtgtatttcctagata

SEQ ID NO: 1015395 - DNA, 25 bp, Homo sapien
aaaaaagacaagcttgtgactatcg

SEQ ID NO: 1015396 - DNA, 25 bp, Homo sapien
ttgtgactatcgaagacccatttac

SEQ ID NO: 1015397 - DNA, 25 bp, Homo sapien
caagcttgtgactatcgaagaccca

SEQ ID NO: 1015398 - DNA, 25 bp, Homo sapien
aaagacaagcttgtgactatcgaag

SEQ ID NO: 1015399 - DNA, 25 bp, Homo sapien
tgatgccctctgtccccattataac

SEQ ID NO: 1015400 - DNA, 25 bp, Homo sapien
tagccccagatgaaatactcccaga

SEQ ID NO: 1015401 - DNA, 25 bp, Homo sapien
caagtggtttggcagggtccattcc

SEQ ID NO: 1015402 - DNA, 25 bp, Homo sapien
gcaatttgcatctggcagctgatga

SEQ ID NO: 1015403 - DNA, 25 bp, Homo sapien
cataaaacctatggaagaaatcgag

SEQ ID NO: 1015404 - DNA, 25 bp, Homo sapien
tctgctcataggattatacatgact

SEQ ID NO: 1015405 - DNA, 25 bp, Homo sapien
gatactgcttaatgtctaatccaat

SEQ ID NO: 1015406 - DNA, 25 bp, Homo sapien
aaatcgaggatgtttgcataggacg

SEQ ID NO: 1015407 - DNA, 25 bp, Homo sapien
caaagatagcttggtacttagcagc

SEQ ID NO: 1015408 - DNA, 25 bp, Homo sapien
tccaatctgaatgccagtactattg

SEQ ID NO: 1015409 - DNA, 25 bp, Homo sapien
aatctccatataattgtaggctcca

SEQ ID NO: 1015410 - DNA, 25 bp, Homo sapien
tgtctagtagtgatgaactcgtccc

SEQ ID NO: 1015411 - DNA, 25 bp, Homo sapien
tttgcagaagtaacataagaaaact

SEQ ID NO: 1015412 - DNA, 25 bp, Homo sapien
aagattccactatgtccttctcaca

SEQ ID NO: 1015413 - DNA, 25 bp, Homo sapien
cacaagtaagaaagttcaaggttgc

SEQ ID NO: 1015414 - DNA, 25 bp, Homo sapien
ttgctaggcgttgagtccttccagg

SEQ ID NO: 1015415 - DNA, 25 bp, Homo sapien
tttacgggcacagtttttccagtgc

SEQ ID NO: 1015416 - DNA, 25 bp, Homo sapien
ggtgtttatccgtcagactagtggt

SEQ ID NO: 1015417 - DNA, 25 bp, Homo sapien
ctgtgtgaagcccagtttacgggca

SEQ ID NO: 1015418 - DNA, 25 bp, Homo sapien
cagtccatctcgctcatagtcatgg

SEQ ID NO: 1015419 - DNA, 25 bp, Homo sapien
gacgtaaatcaagctgctcagaagg

SEQ ID NO: 1015420 - DNA, 25 bp, Homo sapien
aacactggtggagcgcctgggccag

SEQ ID NO: 1015421 - DNA, 25 bp, Homo sapien
agttctggctgacgtaaatcaagct

SEQ ID NO: 1015422 - DNA, 25 bp, Homo sapien
cagaaggtcgatcctggaacactgg

SEQ ID NO: 1015423 - DNA, 25 bp, Homo sapien
gactgcacgtggttcttagagccta

SEQ ID NO: 1015424 - DNA, 25 bp, Homo sapien
gatccacgaagtctctgaacagggc

SEQ ID NO: 1015425 - DNA, 25 bp, Homo sapien
tgctctgaggcagccaactttctgg

SEQ ID NO: 1015426 - DNA, 25 bp, Homo sapien
taacaggagcctacgtgaagaagag

SEQ ID NO: 1015427 - DNA, 25 bp, Homo sapien
gaggaagccactcaacagtatcagc

SEQ ID NO: 1015428 - DNA, 25 bp, Homo sapien
tgttccgacagccagattgaccatc

SEQ ID NO: 1015429 - DNA, 25 bp, Homo sapien
cacaacagaattacccaggccgaga

SEQ ID NO: 1015430 - DNA, 25 bp, Homo sapien
tacacagagtaaaccgaggaagcca

SEQ ID NO: 1015431 - DNA, 25 bp, Homo sapien
taatgacggcgaaaggttaggaagc

SEQ ID NO: 1015432 - DNA, 25 bp, Homo sapien
aaggaggtctccgttaccagcaata

SEQ ID NO: 1015433 - DNA, 25 bp, Homo sapien
gactctatacttgcataatgacggc

SEQ ID NO: 1015434 - DNA, 25 bp, Homo sapien
aaaatctaccaagcaggactgtggg

SEQ ID NO: 1015435 - DNA, 25 bp, Homo sapien
ggctcgtggtttcgcagtcctggaa

SEQ ID NO: 1015436 - DNA, 25 bp, Homo sapien
gaccatggcctttccaggaggcgag

SEQ ID NO: 1015437 - DNA, 25 bp, Homo sapien
catgcgctaagaccaagcgcggtac

SEQ ID NO: 1015438 - DNA, 25 bp, Homo sapien
catgggcgaccgaaactcggctcgt

SEQ ID NO: 1015439 - DNA, 25 bp, Homo sapien
tgggacgtggatcccgggcttcagc

SEQ ID NO: 1015440 - DNA, 25 bp, Homo sapien
gcaggcgcaacacgccccggccgcc

SEQ ID NO: 1015441 - DNA, 25 bp, Homo sapien
cgtgggacgtggatcccgggcttca

SEQ ID NO: 1015442 - DNA, 25 bp, Homo sapien
cttcagcgctgagagaagcagccgc

SEQ ID NO: 1015443 - DNA, 25 bp, Homo sapien
cacatgtagatcagatcctctggga

SEQ ID NO: 1015444 - DNA, 25 bp, Homo sapien
taaggtacgagatcagcaagcaaag

SEQ ID NO: 1015445 - DNA, 25 bp, Homo sapien
gattaaagccttagcggtactcagg

SEQ ID NO: 1015446 - DNA, 25 bp, Homo sapien
caaagagaagacttagggctctcgg

SEQ ID NO: 1015447 - DNA, 25 bp, Homo sapien
gggaggacaaaagagaataaagcag

SEQ ID NO: 1015448 - DNA, 25 bp, Homo sapien
ggacaggtgggaggacaaaagagaa

SEQ ID NO: 1015449 - DNA, 25 bp, Homo sapien
gagaataaagcagattcctgggcat

SEQ ID NO: 1015450 - DNA, 25 bp, Homo sapien
acaaaagagaataaagcagattcct

SEQ ID NO: 1015451 - DNA, 25 bp, Homo sapien
gacagaattgggtagtaataaggtc

SEQ ID NO: 1015452 - DNA, 25 bp, Homo sapien
taaactataagctccttatctacag

SEQ ID NO: 1015453 - DNA, 25 bp, Homo sapien
agaaacaaacgtggaaacagatgtg

SEQ ID NO: 1015454 - DNA, 25 bp, Homo sapien
gaatacaggtacatctactcttaac

SEQ ID NO: 1015455 - DNA, 25 bp, Homo sapien
tggtgacattcccaaagatgagact

SEQ ID NO: 1015456 - DNA, 25 bp, Homo sapien
tagctgtagggtatcctgtgttgtc

SEQ ID NO: 1015457 - DNA, 25 bp, Homo sapien
acattcccaaagatgagactggtcc

SEQ ID NO: 1015458 - DNA, 25 bp, Homo sapien
ctgttctttagctgtagggtatcct

SEQ ID NO: 1015459 - DNA, 25 bp, Homo sapien
tagcaggactgcgtgatctccctct

SEQ ID NO: 1015460 - DNA, 25 bp, Homo sapien
ccactttggcagaggttaccgaggt

SEQ ID NO: 1015461 - DNA, 25 bp, Homo sapien
cagtctgctggtaatgcagctgaac

SEQ ID NO: 1015462 - DNA, 25 bp, Homo sapien
taatgcagctgaacgccattcacag

SEQ ID NO: 1015463 - DNA, 25 bp, Homo sapien
tcctatccgtggttctacatctgtg

SEQ ID NO: 1015464 - DNA, 25 bp, Homo sapien
catttacattgcatgagatatggta

SEQ ID NO: 1015465 - DNA, 25 bp, Homo sapien
tgccacgatccgctgaggctcagtc

SEQ ID NO: 1015466 - DNA, 25 bp, Homo sapien
caagtggaacctttttagcacttca

SEQ ID NO: 1015467 - DNA, 25 bp, Homo sapien
gttatcagcatgtaacatctgagag

SEQ ID NO: 1015468 - DNA, 25 bp, Homo sapien
ggaatcatgctaatactttacataa

SEQ ID NO: 1015469 - DNA, 25 bp, Homo sapien
cacatttgaagaccagtgccaagaa

SEQ ID NO: 1015470 - DNA, 25 bp, Homo sapien
agaacagtctaaaagaccaatttca

SEQ ID NO: 1015471 - DNA, 25 bp, Homo sapien
ctggaggggttctggccacggaagt

SEQ ID NO: 1015472 - DNA, 25 bp, Homo sapien
tggaggggttctggccacggaagta

SEQ ID NO: 1015473 - DNA, 25 bp, Homo sapien
tcatcagaacagtatgaaacagccc

SEQ ID NO: 1015474 - DNA, 25 bp, Homo sapien
caaggtggtgcaggatcattcaaca

SEQ ID NO: 1015475 - DNA, 25 bp, Homo sapien
ggacttctacctcaggccacaaatg

SEQ ID NO: 1015476 - DNA, 25 bp, Homo sapien
gaattctattagtgggcctgcaggg

SEQ ID NO: 1015477 - DNA, 25 bp, Homo sapien
ggttaccctcaggtgatcgctttca

SEQ ID NO: 1015478 - DNA, 25 bp, Homo sapien
aaaacagccacttggttaccctcag

SEQ ID NO: 1015479 - DNA, 25 bp, Homo sapien
cagccacttggttaccctcaggtga

SEQ ID NO: 1015480 - DNA, 25 bp, Homo sapien
cacttggttaccctcaggtgatcgc

SEQ ID NO: 1015481 - DNA, 25 bp, Homo sapien
aaagtctgctgggaaatcgcgatct

SEQ ID NO: 1015482 - DNA, 25 bp, Homo sapien
gagcttcttattgaggttcttgagc

SEQ ID NO: 1015483 - DNA, 25 bp, Homo sapien
aatgtccatagcctcgaggatccca

SEQ ID NO: 1015484 - DNA, 25 bp, Homo sapien
ggcgaccaccgtgaagagcttctta

SEQ ID NO: 1015485 - DNA, 25 bp, Homo sapien
tgacgtaggcgttggcgccccagat

SEQ ID NO: 1015486 - DNA, 25 bp, Homo sapien
gcagcaatgagtgcggttatgcccc

SEQ ID NO: 1015487 - DNA, 25 bp, Homo sapien
gcgccccagatcaccatcttgtgga

SEQ ID NO: 1015488 - DNA, 25 bp, Homo sapien
tatcatgctgtcttcgtcagtgacg

SEQ ID NO: 1015489 - DNA, 25 bp, Homo sapien
gcttgctggaggctaagcaactcct

SEQ ID NO: 1015490 - DNA, 25 bp, Homo sapien
tcctagcaacccctagatcctggtg

SEQ ID NO: 1015491 - DNA, 25 bp, Homo sapien
tagggtaacgcaggtcagtttcact

SEQ ID NO: 1015492 - DNA, 25 bp, Homo sapien
cttggacaaaaagctagtggcctga

SEQ ID NO: 1015493 - DNA, 25 bp, Homo sapien
gaacacggtggcaagaacttccaga

SEQ ID NO: 1015494 - DNA, 25 bp, Homo sapien
caggcacgtgtcagccagggaacag

SEQ ID NO: 1015495 - DNA, 25 bp, Homo sapien
gagcaaggagctgagtgaagctact

SEQ ID NO: 1015496 - DNA, 25 bp, Homo sapien
aaaaaacaacagtcgaacatgtggg

SEQ ID NO: 1015497 - DNA, 25 bp, Homo sapien
cttgcaggggaataactagatcttt

SEQ ID NO: 1015498 - DNA, 25 bp, Homo sapien
gaattctgtggcattgctgaagttg

SEQ ID NO: 1015499 - DNA, 25 bp, Homo sapien
aagttgcagtggttaatggaaaccg

SEQ ID NO: 1015500 - DNA, 25 bp, Homo sapien
ggaataactagatctttcacaaaac

SEQ ID NO: 1015501 - DNA, 25 bp, Homo sapien
ctccatttggaaacatctcggatgc

SEQ ID NO: 1015502 - DNA, 25 bp, Homo sapien
ctctcactccatttggaaacatctc

SEQ ID NO: 1015503 - DNA, 25 bp, Homo sapien
cactccatttggaaacatctcggat

SEQ ID NO: 1015504 - DNA, 25 bp, Homo sapien
tcactccatttggaaacatctcgga

SEQ ID NO: 1015505 - DNA, 25 bp, Homo sapien
taaactgtcttatgccatccaccca

SEQ ID NO: 1015506 - DNA, 25 bp, Homo sapien
ctgggagatgtttaaactgtcttat

SEQ ID NO: 1015507 - DNA, 25 bp, Homo sapien
tgtttaaactgtcttatgccatcca

SEQ ID NO: 1015508 - DNA, 25 bp, Homo sapien
gagatgtttaaactgtcttatgcca

SEQ ID NO: 1015509 - DNA, 25 bp, Homo sapien
gattacctaatggatcaaattggtc

SEQ ID NO: 1015510 - DNA, 25 bp, Homo sapien
tcaactcaaaccagaagagtaacat

SEQ ID NO: 1015511 - DNA, 25 bp, Homo sapien
ttgtaacaatgcactccaagattag

SEQ ID NO: 1015512 - DNA, 25 bp, Homo sapien
gttttggcagatgattcatgcagga

SEQ ID NO: 1015513 - DNA, 25 bp, Homo sapien
tcacgaaggccctcgctgtgagaca

SEQ ID NO: 1015514 - DNA, 25 bp, Homo sapien
caaatgtgccctctttaatggagaa

SEQ ID NO: 1015515 - DNA, 25 bp, Homo sapien
tacagcctctgtatcatgaacgtat

SEQ ID NO: 1015516 - DNA, 25 bp, Homo sapien
tttaagagcagagatttccagggcc

SEQ ID NO: 1015517 - DNA, 25 bp, Homo sapien
agatccattctaacagcaagccggg

SEQ ID NO: 1015518 - DNA, 25 bp, Homo sapien
cctgctaagtgagaagcggacctgc

SEQ ID NO: 1015519 - DNA, 25 bp, Homo sapien
cattctacgcggtcagaggaggcga

SEQ ID NO: 1015520 - DNA, 25 bp, Homo sapien
tacaacttgcgcacggtaaagcagc

SEQ ID NO: 1015521 - DNA, 25 bp, Homo sapien
cgtgagcctttcacgtgcttatgaa

SEQ ID NO: 1015522 - DNA, 25 bp, Homo sapien
gtgggaccagaggatccttctcacc

SEQ ID NO: 1015523 - DNA, 25 bp, Homo sapien
tctcaccgtgcacaatcaaggcggg

SEQ ID NO: 1015524 - DNA, 25 bp, Homo sapien
tgaagtcggcatgaaaccgtgggac

SEQ ID NO: 1015525 - DNA, 25 bp, Homo sapien
ggcccagacctctgtagagatggca

SEQ ID NO: 1015526 - DNA, 25 bp, Homo sapien
tccagacagaggagagtaactagcc

SEQ ID NO: 1015527 - DNA, 25 bp, Homo sapien
gaggactagggccatcttaccactg

SEQ ID NO: 1015528 - DNA, 25 bp, Homo sapien
gtgtgaatcttttccacctaagcca

SEQ ID NO: 1015529 - DNA, 25 bp, Homo sapien
tggcaaaccactgcgtccaggctgg

SEQ ID NO: 1015530 - DNA, 25 bp, Homo sapien
cagaggagctggcaaaccactgcgt

SEQ ID NO: 1015531 - DNA, 25 bp, Homo sapien
ggcagtccagaacggaagctgcagc

SEQ ID NO: 1015532 - DNA, 25 bp, Homo sapien
gaggcagtccagaacggaagctgca

SEQ ID NO: 1015533 - DNA, 25 bp, Homo sapien
ctgggatgccagtggtggggaactg

SEQ ID NO: 1015534 - DNA, 25 bp, Homo sapien
gggatgccagtggtggggaactgtc

SEQ ID NO: 1015535 - DNA, 25 bp, Homo sapien
gggaagaggagggctgggatgccag

SEQ ID NO: 1015536 - DNA, 25 bp, Homo sapien
gatgccagtggtggggaactgtcac

SEQ ID NO: 1015537 - DNA, 25 bp, Homo sapien
aatcctgtaacgagcccacaagcag

SEQ ID NO: 1015538 - DNA, 25 bp, Homo sapien
cagtaaatcctgtaacgagcccaca

SEQ ID NO: 1015539 - DNA, 25 bp, Homo sapien
gagcccacaagcagcgtgtggagct

SEQ ID NO: 1015540 - DNA, 25 bp, Homo sapien
tgtaacgagcccacaagcagcgtgt

SEQ ID NO: 1015541 - DNA, 25 bp, Homo sapien
tctggaaaggttcagaccacactgt

SEQ ID NO: 1015542 - DNA, 25 bp, Homo sapien
ccggaggctactttctgggcagtgt

SEQ ID NO: 1015543 - DNA, 25 bp, Homo sapien
agaaaaaggtactagactgggcacg

SEQ ID NO: 1015544 - DNA, 25 bp, Homo sapien
ttctgacgccatccaaacctggttg

SEQ ID NO: 1015545 - DNA, 25 bp, Homo sapien
tcagtgagtctgtaatccgcagagt

SEQ ID NO: 1015546 - DNA, 25 bp, Homo sapien
gggcagcaacatggcatatcacttc

SEQ ID NO: 1015547 - DNA, 25 bp, Homo sapien
tccgcagagtgccagtacgtacttt

SEQ ID NO: 1015548 - DNA, 25 bp, Homo sapien
tttgtgtttactggaacccaaagca

SEQ ID NO: 1015549 - DNA, 25 bp, Homo sapien
taggatcccagttgcctacacaagg

SEQ ID NO: 1015550 - DNA, 25 bp, Homo sapien
tatgggagacctgctctgaatgctg

SEQ ID NO: 1015551 - DNA, 25 bp, Homo sapien
gctgcgaggtcatagaaggtcacgt

SEQ ID NO: 1015552 - DNA, 25 bp, Homo sapien
caagtaacctgctgtggcgtgcctt

SEQ ID NO: 1015553 - DNA, 25 bp, Homo sapien
caagccgccagacaaatggctgtga

SEQ ID NO: 1015554 - DNA, 25 bp, Homo sapien
caaacacactgtcctcgtaaggctt

SEQ ID NO: 1015555 - DNA, 25 bp, Homo sapien
tgtcacggctcagcattgtagcaaa

SEQ ID NO: 1015556 - DNA, 25 bp, Homo sapien
aaatacatctgaatacaagccgcca

SEQ ID NO: 1015557 - DNA, 25 bp, Homo sapien
gagtttatgactacccttgaggttg

SEQ ID NO: 1015558 - DNA, 25 bp, Homo sapien
ccccatgaccactatcgaggagaaa

SEQ ID NO: 1015559 - DNA, 25 bp, Homo sapien
tcctaagaatatagtcagacacgtg

SEQ ID NO: 1015560 - DNA, 25 bp, Homo sapien
tttgactggaaaacggactgagagt

SEQ ID NO: 1015561 - DNA, 25 bp, Homo sapien
ctgcaaaacgcaaatgcaggttgtg

SEQ ID NO: 1015562 - DNA, 25 bp, Homo sapien
caaaacgcaaatgcaggttgtgttt

SEQ ID NO: 1015563 - DNA, 25 bp, Homo sapien
tttgccttctggcatcaaatgcagc

SEQ ID NO: 1015564 - DNA, 25 bp, Homo sapien
tgtgtttgccttctggcatcaaatg

SEQ ID NO: 1015565 - DNA, 25 bp, Homo sapien
ggaagtcttctgctaacttgttgaa

SEQ ID NO: 1015566 - DNA, 25 bp, Homo sapien
cattgtaggaagtcttctgctaact

SEQ ID NO: 1015567 - DNA, 25 bp, Homo sapien
gtaggaagtcttctgctaacttgtt

SEQ ID NO: 1015568 - DNA, 25 bp, Homo sapien
tcattgtaggaagtcttctgctaac

SEQ ID NO: 1015569 - DNA, 25 bp, Homo sapien
cacgaaggaaccaccaagactggag

SEQ ID NO: 1015570 - DNA, 25 bp, Homo sapien
cgtgcccagcctgaagctagaggct

SEQ ID NO: 1015571 - DNA, 25 bp, Homo sapien
tcaaaggcggagagtttcaaaggca

SEQ ID NO: 1015572 - DNA, 25 bp, Homo sapien
aaaggcatcatgttaacaggcagca

SEQ ID NO: 1015573 - DNA, 25 bp, Homo sapien
aaattatggcaggaattcacctgtt

SEQ ID NO: 1015574 - DNA, 25 bp, Homo sapien
tcatagctattgaagttagaggctt

SEQ ID NO: 1015575 - DNA, 25 bp, Homo sapien
taagacaatggtataacttgtcaca

SEQ ID NO: 1015576 - DNA, 25 bp, Homo sapien
ttcatcttagaaaatcggatttaat

SEQ ID NO: 1015577 - DNA, 25 bp, Homo sapien
caagtgaagcttgaacctctcagat

SEQ ID NO: 1015578 - DNA, 25 bp, Homo sapien
ggtaaagcaaacctgcccctatctg

SEQ ID NO: 1015579 - DNA, 25 bp, Homo sapien
cctctcagataaaaggtacagtaca

SEQ ID NO: 1015580 - DNA, 25 bp, Homo sapien
gaattgaggacctcgggcacggact

SEQ ID NO: 1015581 - DNA, 25 bp, Homo sapien
tattctttctctaaatgcttaagta

SEQ ID NO: 1015582 - DNA, 25 bp, Homo sapien
tctttctctaaatgcttaagtataa

SEQ ID NO: 1015583 - DNA, 25 bp, Homo sapien
ttctctaaatgcttaagtataaagt

SEQ ID NO: 1015584 - DNA, 25 bp, Homo sapien
tttattctttctctaaatgcttaag

SEQ ID NO: 1015585 - DNA, 25 bp, Homo sapien
tctacttgtaaactatggtgctcag

SEQ ID NO: 1015586 - DNA, 25 bp, Homo sapien
tgcctctgttagaaattcacactgt

SEQ ID NO: 1015587 - DNA, 25 bp, Homo sapien
tgaacttctgttgtcctcaagcatg

SEQ ID NO: 1015588 - DNA, 25 bp, Homo sapien
gatcaatcgtgcatccttagtgaac

SEQ ID NO: 1015589 - DNA, 25 bp, Homo sapien
gtccaccagctggtggaaaacacag

SEQ ID NO: 1015590 - DNA, 25 bp, Homo sapien
ccagctggtggaaaacacagatgaa

SEQ ID NO: 1015591 - DNA, 25 bp, Homo sapien
caccagctggtggaaaacacagatg

SEQ ID NO: 1015592 - DNA, 25 bp, Homo sapien
ccaccagctggtggaaaacacagat

SEQ ID NO: 1015593 - DNA, 25 bp, Homo sapien
catcagcaagatccgggaagagtac

SEQ ID NO: 1015594 - DNA, 25 bp, Homo sapien
gtcatgccctcacccaaggtgtcag

SEQ ID NO: 1015595 - DNA, 25 bp, Homo sapien
tccgggaagagtacccagaccgcat

SEQ ID NO: 1015596 - DNA, 25 bp, Homo sapien
gggaagagtacccagaccgcatcat

SEQ ID NO: 1015597 - DNA, 25 bp, Homo sapien
cactctctggggggcggcacggggt

SEQ ID NO: 1015598 - DNA, 25 bp, Homo sapien
ccactctctggggggcggcacgggg

SEQ ID NO: 1015599 - DNA, 25 bp, Homo sapien
ccagctggtggaaaacacagatgaa

SEQ ID NO: 1015600 - DNA, 25 bp, Homo sapien
gtccaccagctggtggaaaacacag

SEQ ID NO: 1015601 - DNA, 25 bp, Homo sapien
ccaccagctggtggaaaacacagat

SEQ ID NO: 1015602 - DNA, 25 bp, Homo sapien
caccagctggtggaaaacacagatg

SEQ ID NO: 1015603 - DNA, 25 bp, Homo sapien
agtacccagaccgcatcatgaactc

SEQ ID NO: 1015604 - DNA, 25 bp, Homo sapien
tacccagaccgcatcatgaactcct

SEQ ID NO: 1015605 - DNA, 25 bp, Homo sapien
tccgggaagagtacccagaccgcat

SEQ ID NO: 1015606 - DNA, 25 bp, Homo sapien
gggaagagtacccagaccgcatcat

SEQ ID NO: 1015607 - DNA, 25 bp, Homo sapien
gtttacccaaagatacctctgccag

SEQ ID NO: 1015608 - DNA, 25 bp, Homo sapien
taaacagttgttggccaaagactca

SEQ ID NO: 1015609 - DNA, 25 bp, Homo sapien
tgtcagagcctagaaaacggagcat

SEQ ID NO: 1015610 - DNA, 25 bp, Homo sapien
ctgagaacacttgccggcagcactt

SEQ ID NO: 1015611 - DNA, 25 bp, Homo sapien
gaaaactttctgtatgaatcctgtt

SEQ ID NO: 1015612 - DNA, 25 bp, Homo sapien
ctgtatgaatcctgttttcccactg

SEQ ID NO: 1015613 - DNA, 25 bp, Homo sapien
ctcttaatactctctgaaaactttc

SEQ ID NO: 1015614 - DNA, 25 bp, Homo sapien
tttctgtatgaatcctgttttccca

SEQ ID NO: 1015615 - DNA, 25 bp, Homo sapien
ggtgcatactggtcatgcgcggcca

SEQ ID NO: 1015616 - DNA, 25 bp, Homo sapien
cagaggacgatgtccagggaaaaac

SEQ ID NO: 1015617 - DNA, 25 bp, Homo sapien
aacagggactaaggcaagtctgagg

SEQ ID NO: 1015618 - DNA, 25 bp, Homo sapien
gactgcatggtctctcagaggacga

SEQ ID NO: 1015619 - DNA, 25 bp, Homo sapien
tcaggcatgcgttcagtaccctcgg

SEQ ID NO: 1015620 - DNA, 25 bp, Homo sapien
tcttggcatactggacgtgtggtac

SEQ ID NO: 1015621 - DNA, 25 bp, Homo sapien
tacaacctgtcaggcatgcgttcag

SEQ ID NO: 1015622 - DNA, 25 bp, Homo sapien
tgggattgtatccaagagcctcttg

SEQ ID NO: 1015623 - DNA, 25 bp, Homo sapien
gagggcgaggacgaggcgtagatgc

SEQ ID NO: 1015624 - DNA, 25 bp, Homo sapien
ccgggacgataacctggcagtggaa

SEQ ID NO: 1015625 - DNA, 25 bp, Homo sapien
ggaaagaagcatggtctactttagg

SEQ ID NO: 1015626 - DNA, 25 bp, Homo sapien
tactttaggtgtgcgctgggtctct

SEQ ID NO: 1015627 - DNA, 25 bp, Homo sapien
ctggcggtgaacatggtgcccttcc

SEQ ID NO: 1015628 - DNA, 25 bp, Homo sapien
aagctggcggtgaacatggtgccct

SEQ ID NO: 1015629 - DNA, 25 bp, Homo sapien
gctggcggtgaacatggtgcccttc

SEQ ID NO: 1015630 - DNA, 25 bp, Homo sapien
gggacctcaaccacctggtgtcggc

SEQ ID NO: 1015631 - DNA, 25 bp, Homo sapien
gtcatgccctcacccaaggtgtcag

SEQ ID NO: 1015632 - DNA, 25 bp, Homo sapien
tccgggaagagtacccagaccgcat

SEQ ID NO: 1015633 - DNA, 25 bp, Homo sapien
gggaagagtacccagaccgcatcat

SEQ ID NO: 1015634 - DNA, 25 bp, Homo sapien
catcagcaagatccgggaagagtac

SEQ ID NO: 1015635 - DNA, 25 bp, Homo sapien
agggagccgagctggtcgactcggt

SEQ ID NO: 1015636 - DNA, 25 bp, Homo sapien
agctggtcgactcggtcctggatgt

SEQ ID NO: 1015637 - DNA, 25 bp, Homo sapien
ccgagctggtcgactcggtcctgga

SEQ ID NO: 1015638 - DNA, 25 bp, Homo sapien
gagccgagctggtcgactcggtcct

SEQ ID NO: 1015639 - DNA, 25 bp, Homo sapien
acagccccagacaatgcgcacgccc

SEQ ID NO: 1015640 - DNA, 25 bp, Homo sapien
ccaccccggtcaggacgcgctggtg

SEQ ID NO: 1015641 - DNA, 25 bp, Homo sapien
agtcctccatcgttcccatccggtg

SEQ ID NO: 1015642 - DNA, 25 bp, Homo sapien
tggagcacctgacggcttctccaca

SEQ ID NO: 1015643 - DNA, 25 bp, Homo sapien
tctcgcgcgcgctgggctgcagttt

SEQ ID NO: 1015644 - DNA, 25 bp, Homo sapien
tgcagtttttagtcgtattccccac

SEQ ID NO: 1015645 - DNA, 25 bp, Homo sapien
tagagactgcggatctgaagggagg

SEQ ID NO: 1015646 - DNA, 25 bp, Homo sapien
ggacctccaggtcgccgcgatggaa

SEQ ID NO: 1015647 - DNA, 25 bp, Homo sapien
gccgggtaccagtctctttatgcga

SEQ ID NO: 1015648 - DNA, 25 bp, Homo sapien
cagatcttgggccaaaagtgtcccc

SEQ ID NO: 1015649 - DNA, 25 bp, Homo sapien
ttgaacacgcgttttcacccgggca

SEQ ID NO: 1015650 - DNA, 25 bp, Homo sapien
tagaccggttaacaagactggctgc

SEQ ID NO: 1015651 - DNA, 25 bp, Homo sapien
ctgcggaaggacagggctctgaggc

SEQ ID NO: 1015652 - DNA, 25 bp, Homo sapien
ggctctgaggctgccaccccgcagc

SEQ ID NO: 1015653 - DNA, 25 bp, Homo sapien
tctgaggctgccaccccgcagcccc

SEQ ID NO: 1015654 - DNA, 25 bp, Homo sapien
gggctctgaggctgccaccccgcag

SEQ ID NO: 1015655 - DNA, 25 bp, Homo sapien
ccgcactgcgctgcgttcgtgggct

SEQ ID NO: 1015656 - DNA, 25 bp, Homo sapien
gctcggggttttcgctgctggttcc

SEQ ID NO: 1015657 - DNA, 25 bp, Homo sapien
aagtgttcccgcactgcgctgcgtt

SEQ ID NO: 1015658 - DNA, 25 bp, Homo sapien
gaacaaagggcaagtgttcccgcac

SEQ ID NO: 1015659 - DNA, 25 bp, Homo sapien
tcacaacctccggggatgcgaaaac

SEQ ID NO: 1015660 - DNA, 25 bp, Homo sapien
cacaacctccggggatgcgaaaaca

SEQ ID NO: 1015661 - DNA, 25 bp, Homo sapien
aattcacaacctccggggatgcgaa

SEQ ID NO: 1015662 - DNA, 25 bp, Homo sapien
tcaaattcacaacctccggggatgc

SEQ ID NO: 1015663 - DNA, 25 bp, Homo sapien
taagtctgttgatttcgcaggccgc

SEQ ID NO: 1015664 - DNA, 25 bp, Homo sapien
gaaatggcgccctagaaaagccagg

SEQ ID NO: 1015665 - DNA, 25 bp, Homo sapien
aaagcactggtgagctgcggagaca

SEQ ID NO: 1015666 - DNA, 25 bp, Homo sapien
taggactcagcgtgcattccctggg

SEQ ID NO: 1015667 - DNA, 25 bp, Homo sapien
ccagaataaactgacaaacagccag

SEQ ID NO: 1015668 - DNA, 25 bp, Homo sapien
tttgtagcaggaatagcttccagaa

SEQ ID NO: 1015669 - DNA, 25 bp, Homo sapien
agacccctagcagcacctcgaaaga

SEQ ID NO: 1015670 - DNA, 25 bp, Homo sapien
gccagttccctgcaaggtaataatt

SEQ ID NO: 1015671 - DNA, 25 bp, Homo sapien
gaatgtcatgcctacatgacccctc

SEQ ID NO: 1015672 - DNA, 25 bp, Homo sapien
ctggcagaattttggtcgaatgtca

SEQ ID NO: 1015673 - DNA, 25 bp, Homo sapien
ttgtccatcagcacttcatcctcct

SEQ ID NO: 1015674 - DNA, 25 bp, Homo sapien
catcagtcagggtatgttggaaaca

SEQ ID NO: 1015675 - DNA, 25 bp, Homo sapien
tatttataccagtcctgaatcagct

SEQ ID NO: 1015676 - DNA, 25 bp, Homo sapien
ttcagaaccatgcatttctctcggt

SEQ ID NO: 1015677 - DNA, 25 bp, Homo sapien
gaggtcgttaagaatctctccactt

SEQ ID NO: 1015678 - DNA, 25 bp, Homo sapien
ctctcggtagaggtcgttaagaatc

SEQ ID NO: 1015679 - DNA, 25 bp, Homo sapien
gtggtgagatctcactgttggccat

SEQ ID NO: 1015680 - DNA, 25 bp, Homo sapien
ggggtggtgagatctcactgttggc

SEQ ID NO: 1015681 - DNA, 25 bp, Homo sapien
ctggggtggtgagatctcactgttg

SEQ ID NO: 1015682 - DNA, 25 bp, Homo sapien
ggtggtgagatctcactgttggcca

SEQ ID NO: 1015683 - DNA, 25 bp, Homo sapien
tgtcacgagccttctcaccacgagg

SEQ ID NO: 1015684 - DNA, 25 bp, Homo sapien
cgagccttctcaccacgaggatggt

SEQ ID NO: 1015685 - DNA, 25 bp, Homo sapien
tcgggccagctgtcacgagccttct

SEQ ID NO: 1015686 - DNA, 25 bp, Homo sapien
gggccagctgtcacgagccttctca

SEQ ID NO: 1015687 - DNA, 25 bp, Homo sapien
attgcaatgttctctaagtctggag

SEQ ID NO: 1015688 - DNA, 25 bp, Homo sapien
cagaccgcaaggaggcccggaagcc

SEQ ID NO: 1015689 - DNA, 25 bp, Homo sapien
acaggcagaccgcaaggaggcccgg

SEQ ID NO: 1015690 - DNA, 25 bp, Homo sapien
cattgcaatgttctctaagtctgga

SEQ ID NO: 1015691 - DNA, 25 bp, Homo sapien
attcgaagcagggaggacgttccgc

SEQ ID NO: 1015692 - DNA, 25 bp, Homo sapien
gcccactgtcacaccgaaggatggt

SEQ ID NO: 1015693 - DNA, 25 bp, Homo sapien
gctgtgagtcctcctgtaagccgcc

SEQ ID NO: 1015694 - DNA, 25 bp, Homo sapien
tctggaacctgacgacattctccta

SEQ ID NO: 1015695 - DNA, 25 bp, Homo sapien
gcaatacttccaaaggcctgtagga

SEQ ID NO: 1015696 - DNA, 25 bp, Homo sapien
caataaagggcaacgagcaggaaac

SEQ ID NO: 1015697 - DNA, 25 bp, Homo sapien
tgactgtcccattcaccaggaggag

SEQ ID NO: 1015698 - DNA, 25 bp, Homo sapien
aacatgggaaactgccgacctgagg

SEQ ID NO: 1015699 - DNA, 25 bp, Homo sapien
atatctgaaatctggaatgtgacag

SEQ ID NO: 1015700 - DNA, 25 bp, Homo sapien
agatatctgaaatctggaatgtgac

SEQ ID NO: 1015701 - DNA, 25 bp, Homo sapien
tcagatatctgaaatctggaatgtg

SEQ ID NO: 1015702 - DNA, 25 bp, Homo sapien
gatatctgaaatctggaatgtgaca

SEQ ID NO: 1015703 - DNA, 25 bp, Homo sapien
caggtgctgccctgcgcttggagca

SEQ ID NO: 1015704 - DNA, 25 bp, Homo sapien
cttcatcatggaaattcttggagca

SEQ ID NO: 1015705 - DNA, 25 bp, Homo sapien
gcttggagcaaagcctatctgaggc

SEQ ID NO: 1015706 - DNA, 25 bp, Homo sapien
cagctctcttcatcatggaaattct

SEQ ID NO: 1015707 - DNA, 25 bp, Homo sapien
gagcagatgcgtccattttttgaca

SEQ ID NO: 1015708 - DNA, 25 bp, Homo sapien
tacaaagagcagatgcgtccatttt

SEQ ID NO: 1015709 - DNA, 25 bp, Homo sapien
agagcagatgcgtccattttttgac

SEQ ID NO: 1015710 - DNA, 25 bp, Homo sapien
ttacaaagagcagatgcgtccattt

SEQ ID NO: 1015711 - DNA, 25 bp, Homo sapien
tgtccagagaatcagaaagcgccat

SEQ ID NO: 1015712 - DNA, 25 bp, Homo sapien
ctgtccagagaatcagaaagcgcca

SEQ ID NO: 1015713 - DNA, 25 bp, Homo sapien
tgtgctcctatgcagccaacttctt

SEQ ID NO: 1015714 - DNA, 25 bp, Homo sapien
gaatgaccaatacgtggtaagctgg

SEQ ID NO: 1015715 - DNA, 25 bp, Homo sapien
tacttccaccagagcgcacatgtaa

SEQ ID NO: 1015716 - DNA, 25 bp, Homo sapien
tgtaagccgtcagtatggccctgct

SEQ ID NO: 1015717 - DNA, 25 bp, Homo sapien
tccacaaagtgaacgcgtccagtac

SEQ ID NO: 1015718 - DNA, 25 bp, Homo sapien
gaagtcttgacacgttatagccagt

SEQ ID NO: 1015719 - DNA, 25 bp, Homo sapien
cttcaatcagctaggaggacccaaa

SEQ ID NO: 1015720 - DNA, 25 bp, Homo sapien
taccgaccggtggagagttcaaggc

SEQ ID NO: 1015721 - DNA, 25 bp, Homo sapien
agacccgatggagcgagcaccgaga

SEQ ID NO: 1015722 - DNA, 25 bp, Homo sapien
cgagcaccgagagaccgagcgcgct

SEQ ID NO: 1015723 - DNA, 25 bp, Homo sapien
gaccgagcgcgctttcgctttcggc

SEQ ID NO: 1015724 - DNA, 25 bp, Homo sapien
ccgagagaccgagcgcgctttcgct

SEQ ID NO: 1015725 - DNA, 25 bp, Homo sapien
cccacagcgccagacccgggtcctc

SEQ ID NO: 1015726 - DNA, 25 bp, Homo sapien
ggcccacagcgccagacccgggtcc

SEQ ID NO: 1015727 - DNA, 25 bp, Homo sapien
gcccacagcgccagacccgggtcct

SEQ ID NO: 1015728 - DNA, 25 bp, Homo sapien
ccacagcgccagacccgggtcctcg

SEQ ID NO: 1015729 - DNA, 25 bp, Homo sapien
acagcctcgcgctgaagttgtgcag

SEQ ID NO: 1015730 - DNA, 25 bp, Homo sapien
catgacgtggaagtggaccagctgc

SEQ ID NO: 1015731 - DNA, 25 bp, Homo sapien
acccacaggaacagcgagtccgtca

SEQ ID NO: 1015732 - DNA, 25 bp, Homo sapien
ctgcacatggccacggcgaggttgc

SEQ ID NO: 1015733 - DNA, 25 bp, Homo sapien
cagggtcagcgagtgccttgtgact

SEQ ID NO: 1015734 - DNA, 25 bp, Homo sapien
ctgtgcactggtgcctcgtgcccca

SEQ ID NO: 1015735 - DNA, 25 bp, Homo sapien
cttgtgactttgatacaaagggcac

SEQ ID NO: 1015736 - DNA, 25 bp, Homo sapien
ctttgatacaaagggcaccagccac

SEQ ID NO: 1015737 - DNA, 25 bp, Homo sapien
acacttctggcttccgggcttctga

SEQ ID NO: 1015738 - DNA, 25 bp, Homo sapien
cttctgattcttcacgacgatggca

SEQ ID NO: 1015739 - DNA, 25 bp, Homo sapien
gttcagagaggacaggcacaggtgc

SEQ ID NO: 1015740 - DNA, 25 bp, Homo sapien
tcttcacgacgatggcagtggcagg

SEQ ID NO: 1015741 - DNA, 25 bp, Homo sapien
tagaggtcgtgtcggaagtgtctcc

SEQ ID NO: 1015742 - DNA, 25 bp, Homo sapien
taggcgctgggcaaggccagtagag

SEQ ID NO: 1015743 - DNA, 25 bp, Homo sapien
tcgtgtcggaagtgtctccaaggag

SEQ ID NO: 1015744 - DNA, 25 bp, Homo sapien
ccagtagaggtcgtgtcggaagtgt

SEQ ID NO: 1015745 - DNA, 25 bp, Homo sapien
gccatgcagcgccagctgtgggtac

SEQ ID NO: 1015746 - DNA, 25 bp, Homo sapien
tgacaggcgagcatggaatgtgccc

SEQ ID NO: 1015747 - DNA, 25 bp, Homo sapien
tacggaaggcaactaaatcagctca

SEQ ID NO: 1015748 - DNA, 25 bp, Homo sapien
tcagctcatggactcaaggacacac

SEQ ID NO: 1015749 - DNA, 25 bp, Homo sapien
aacgtgcaaaggtctgtgcttccca

SEQ ID NO: 1015750 - DNA, 25 bp, Homo sapien
ctgaacggtatcacactgagtgagg

SEQ ID NO: 1015751 - DNA, 25 bp, Homo sapien
tgaacggtatcacactgagtgagga

SEQ ID NO: 1015752 - DNA, 25 bp, Homo sapien
tgggaagagtggagcattcagcctc

SEQ ID NO: 1015753 - DNA, 25 bp, Homo sapien
cccactctacgccacactcacaggc

SEQ ID NO: 1015754 - DNA, 25 bp, Homo sapien
tgacctttgcttaatccccactcta

SEQ ID NO: 1015755 - DNA, 25 bp, Homo sapien
tcatgacctttgcttaatccccact

SEQ ID NO: 1015756 - DNA, 25 bp, Homo sapien
caaaggcagctgttcggttattcca

SEQ ID NO: 1015757 - DNA, 25 bp, Homo sapien
tgtgactgacacagaggttcctgct

SEQ ID NO: 1015758 - DNA, 25 bp, Homo sapien
tggaacttgttcgagaggcagctgc

SEQ ID NO: 1015759 - DNA, 25 bp, Homo sapien
tgaaagttattcacggcctgccaga

SEQ ID NO: 1015760 - DNA, 25 bp, Homo sapien
gttctgaaggttatagctgacaaac

SEQ ID NO: 1015761 - DNA, 25 bp, Homo sapien
taatgcgaagttactgtctgtgttc

SEQ ID NO: 1015762 - DNA, 25 bp, Homo sapien
cctgttttctacaagtaatgcgaag

SEQ ID NO: 1015763 - DNA, 25 bp, Homo sapien
agttactgtctgtgttctgaaggtt

SEQ ID NO: 1015764 - DNA, 25 bp, Homo sapien
aattcaatccatttatttacacgta

SEQ ID NO: 1015765 - DNA, 25 bp, Homo sapien
cacgtacattgtacataagtttaca

SEQ ID NO: 1015766 - DNA, 25 bp, Homo sapien
aatccatttatttacacgtacattg

SEQ ID NO: 1015767 - DNA, 25 bp, Homo sapien
tatttacacgtacattgtacataag

SEQ ID NO: 1015768 - DNA, 25 bp, Homo sapien
caccaggtgggtcagtatgagcctt

SEQ ID NO: 1015769 - DNA, 25 bp, Homo sapien
gaagtatatactgcccactttgcct

SEQ ID NO: 1015770 - DNA, 25 bp, Homo sapien
taattgaggatgcacgtcacagtca

SEQ ID NO: 1015771 - DNA, 25 bp, Homo sapien
cacagtcatgtctgattgaaactct

SEQ ID NO: 1015772 - DNA, 25 bp, Homo sapien
tgaactgtcgttcacagctgcgtgt

SEQ ID NO: 1015773 - DNA, 25 bp, Homo sapien
ttctgaactgtcgttcacagctgcg

SEQ ID NO: 1015774 - DNA, 25 bp, Homo sapien
gctgagttctgaactgtcgttcaca

SEQ ID NO: 1015775 - DNA, 25 bp, Homo sapien
gtcgttcacagctgcgtgtctgcat

SEQ ID NO: 1015776 - DNA, 25 bp, Homo sapien
tacagctgtcctctcgtctagaagg

SEQ ID NO: 1015777 - DNA, 25 bp, Homo sapien
cataagtgggcctgtgaggtcacac

SEQ ID NO: 1015778 - DNA, 25 bp, Homo sapien
tgggaattctctgacggtgctcgtt

SEQ ID NO: 1015779 - DNA, 25 bp, Homo sapien
tggtgtgtcatgtctagcggcgaac

SEQ ID NO: 1015780 - DNA, 25 bp, Homo sapien
tttgtttactgagagtaagatcacc

SEQ ID NO: 1015781 - DNA, 25 bp, Homo sapien
acctgcatctggaagacgggctggt

SEQ ID NO: 1015782 - DNA, 25 bp, Homo sapien
gcatctggaagacgggctggtaaat

SEQ ID NO: 1015783 - DNA, 25 bp, Homo sapien
ttactgagagtaagatcacctgcat

SEQ ID NO: 1015784 - DNA, 25 bp, Homo sapien
ttggtggcaagggacagcactcaca

SEQ ID NO: 1015785 - DNA, 25 bp, Homo sapien
ccgacggtcggcaggtaatggctct

SEQ ID NO: 1015786 - DNA, 25 bp, Homo sapien
agtgctgcccgaaatctctaggaag

SEQ ID NO: 1015787 - DNA, 25 bp, Homo sapien
gaaatccggtaccaagtgagcaagg

SEQ ID NO: 1015788 - DNA, 25 bp, Homo sapien
tccatgggtctcttcgtgttcctcg

SEQ ID NO: 1015789 - DNA, 25 bp, Homo sapien
taggacacccaaggcgactaagaga

SEQ ID NO: 1015790 - DNA, 25 bp, Homo sapien
ctcgtttcaccccagaaagtggagg

SEQ ID NO: 1015791 - DNA, 25 bp, Homo sapien
caagggcaggcaccactttgtagca

SEQ ID NO: 1015792 - DNA, 25 bp, Homo sapien
gaaaaccagagaattgctcccacag

SEQ ID NO: 1015793 - DNA, 25 bp, Homo sapien
cagtatgatgtggttcaccaggcac

SEQ ID NO: 1015794 - DNA, 25 bp, Homo sapien
tgcccggccatatcaaggaatcttt

SEQ ID NO: 1015795 - DNA, 25 bp, Homo sapien
tgccctcctgtatgtgactcccgtg

SEQ ID NO: 1015796 - DNA, 25 bp, Homo sapien
aattttgtgctcctaaagcccaagg

SEQ ID NO: 1015797 - DNA, 25 bp, Homo sapien
tctagtaagaagtcggcctgcatat

SEQ ID NO: 1015798 - DNA, 25 bp, Homo sapien
ggttctctgtccgtaaatcaagcag

SEQ ID NO: 1015799 - DNA, 25 bp, Homo sapien
tctgacttctaaacacgggcgtatg

SEQ ID NO: 1015800 - DNA, 25 bp, Homo sapien
tataaaagaggagctagaacaggag

SEQ ID NO: 1015801 - DNA, 25 bp, Homo sapien
ccctcggccggctttagtgtccttg

SEQ ID NO: 1015802 - DNA, 25 bp, Homo sapien
ggaaccagacggagctgcccatgat

SEQ ID NO: 1015803 - DNA, 25 bp, Homo sapien
tcttcttcttcgctgggcatcttca

SEQ ID NO: 1015804 - DNA, 25 bp, Homo sapien
gcttatttagtgcttgcagttgcag

SEQ ID NO: 1015805 - DNA, 25 bp, Homo sapien
ggagagatgagtcaggagcttattt

SEQ ID NO: 1015806 - DNA, 25 bp, Homo sapien
agttgcaggatacctcaggccgacc

SEQ ID NO: 1015807 - DNA, 25 bp, Homo sapien
tagtgcttgcagttgcaggatacct

SEQ ID NO: 1015808 - DNA, 25 bp, Homo sapien
gcttgggtagcagaacacggctcta

SEQ ID NO: 1015809 - DNA, 25 bp, Homo sapien
gcagacataagaagggtccctcgag

SEQ ID NO: 1015810 - DNA, 25 bp, Homo sapien
ccctaagtgcccagaaaagctgcgt

SEQ ID NO: 1015811 - DNA, 25 bp, Homo sapien
catgtgcgtggtggtccgattcctc

SEQ ID NO: 1015812 - DNA, 25 bp, Homo sapien
gaaacctagaccctatccactggca

SEQ ID NO: 1015813 - DNA, 25 bp, Homo sapien
aggcacccgagcgaaacctgaactg

SEQ ID NO: 1015814 - DNA, 25 bp, Homo sapien
tggaaacttctgctgacggtgcacc

SEQ ID NO: 1015815 - DNA, 25 bp, Homo sapien
caaaagtgaactgagtcgagaccgt

SEQ ID NO: 1015816 - DNA, 25 bp, Homo sapien
gaatgtaacactgtgcgctggtgga

SEQ ID NO: 1015817 - DNA, 25 bp, Homo sapien
gctggagccgcacaagaaactcagt

SEQ ID NO: 1015818 - DNA, 25 bp, Homo sapien
tagttccaccccacaaggctaagaa

SEQ ID NO: 1015819 - DNA, 25 bp, Homo sapien
gaccccttggcctggtgaatgtaac

SEQ ID NO: 1015820 - DNA, 25 bp, Homo sapien
tttgtgaccctcctaccgctggatg

SEQ ID NO: 1015821 - DNA, 25 bp, Homo sapien
gagcagaaggatccctctagaggca

SEQ ID NO: 1015822 - DNA, 25 bp, Homo sapien
aataatggaccttgggagctgagag

SEQ ID NO: 1015823 - DNA, 25 bp, Homo sapien
tatttggtgcctcccatcatcgtgc

SEQ ID NO: 1015824 - DNA, 25 bp, Homo sapien
tcccaccaacatcatataagagttc

SEQ ID NO: 1015825 - DNA, 25 bp, Homo sapien
gcagaaggttttagtttctccagga

SEQ ID NO: 1015826 - DNA, 25 bp, Homo sapien
ttgagttcctcatatattctagatg

SEQ ID NO: 1015827 - DNA, 25 bp, Homo sapien
ggtcatgaggtaattctgtttgtag

SEQ ID NO: 1015828 - DNA, 25 bp, Homo sapien
tgttgcctttagacccaattggagg

SEQ ID NO: 1015829 - DNA, 25 bp, Homo sapien
tctgcctggtatgcataatgcaggg

SEQ ID NO: 1015830 - DNA, 25 bp, Homo sapien
tctctgggatccaatgcctggactg

SEQ ID NO: 1015831 - DNA, 25 bp, Homo sapien
gctccgtgggcccagataagaaagg

SEQ ID NO: 1015832 - DNA, 25 bp, Homo sapien
cctcagtctgccgtccagcatatga

SEQ ID NO: 1015833 - DNA, 25 bp, Homo sapien
cagctctcgctgatccgagatacgt

SEQ ID NO: 1015834 - DNA, 25 bp, Homo sapien
tacgtccatattggacgccagcagg

SEQ ID NO: 1015835 - DNA, 25 bp, Homo sapien
gggcctcagtctgccgtccagcata

SEQ ID NO: 1015836 - DNA, 25 bp, Homo sapien
cctctagtgcctgatgtgagtggaa

SEQ ID NO: 1015837 - DNA, 25 bp, Homo sapien
tgctgtagcaggtgtcagatccctt

SEQ ID NO: 1015838 - DNA, 25 bp, Homo sapien
gcttattgcacagagtacggtgtcc

SEQ ID NO: 1015839 - DNA, 25 bp, Homo sapien
agtggaatgtcaaggtgttcctccc

SEQ ID NO: 1015840 - DNA, 25 bp, Homo sapien
gtgaccgtggtgtaacccttcagaa

SEQ ID NO: 1015841 - DNA, 25 bp, Homo sapien
cctgtccctggtgagtgattggaga

SEQ ID NO: 1015842 - DNA, 25 bp, Homo sapien
ggttaagtgcaatccggagatgccc

SEQ ID NO: 1015843 - DNA, 25 bp, Homo sapien
tgtagttccgttttgtaatgttgcc

SEQ ID NO: 1015844 - DNA, 25 bp, Homo sapien
ccaaaggaataaggtgacttgccca

SEQ ID NO: 1015845 - DNA, 25 bp, Homo sapien
gggctcccaagagatttccaccata

SEQ ID NO: 1015846 - DNA, 25 bp, Homo sapien
gcccagggctacaaaattggcacac

SEQ ID NO: 1015847 - DNA, 25 bp, Homo sapien
gcaagaccttggtgccgttccacaa

SEQ ID NO: 1015848 - DNA, 25 bp, Homo sapien
gattgtaggtgaacctgcaactgga

SEQ ID NO: 1015849 - DNA, 25 bp, Homo sapien
gttatagattgtaggtgaacctgca

SEQ ID NO: 1015850 - DNA, 25 bp, Homo sapien
ggtgaacctgcaactggactccaag

SEQ ID NO: 1015851 - DNA, 25 bp, Homo sapien
ccaagtattcatccgcttataatat

SEQ ID NO: 1015852 - DNA, 25 bp, Homo sapien
tatttcgaaggctctgtgtgcctta

SEQ ID NO: 1015853 - DNA, 25 bp, Homo sapien
tttcgaaggctctgtgtgccttata

SEQ ID NO: 1015854 - DNA, 25 bp, Homo sapien
tcgaaggctctgtgtgccttatatt

SEQ ID NO: 1015855 - DNA, 25 bp, Homo sapien
tgtatttcgaaggctctgtgtgcct

SEQ ID NO: 1015856 - DNA, 25 bp, Homo sapien
actgttttacaacatcagacttttt

SEQ ID NO: 1015857 - DNA, 25 bp, Homo sapien
gtgaggctgctatcatagaggtgtg

SEQ ID NO: 1015858 - DNA, 25 bp, Homo sapien
ggagcagaagcgacagagtgccctt

SEQ ID NO: 1015859 - DNA, 25 bp, Homo sapien
ctcaggagcagaagcgacagagtgc

SEQ ID NO: 1015860 - DNA, 25 bp, Homo sapien
gaagcgacagagtgcccttgttcct

SEQ ID NO: 1015861 - DNA, 25 bp, Homo sapien
atgaaaaccatgcagtctccgggag

SEQ ID NO: 1015862 - DNA, 25 bp, Homo sapien
ttacagcaacaattaagcatgcggg

SEQ ID NO: 1015863 - DNA, 25 bp, Homo sapien
cggaagaggtgcgtcatgaaaacca

SEQ ID NO: 1015864 - DNA, 25 bp, Homo sapien
tctccgggagcttgaatcaataggc

SEQ ID NO: 1015865 - DNA, 25 bp, Homo sapien
gcctggtcctctcgtgtggtttgca

SEQ ID NO: 1015866 - DNA, 25 bp, Homo sapien
tgattgcactgatggacgcagatgc

SEQ ID NO: 1015867 - DNA, 25 bp, Homo sapien
cacttagttgtgaagcaggagcggc

SEQ ID NO: 1015868 - DNA, 25 bp, Homo sapien
ttttcacctgaaagtagacgccgtc

SEQ ID NO: 1015869 - DNA, 25 bp, Homo sapien
cacatgaatgatttatgctccagca

SEQ ID NO: 1015870 - DNA, 25 bp, Homo sapien
tccagcaagtggagccaagataggc

SEQ ID NO: 1015871 - DNA, 25 bp, Homo sapien
tgcacccagagactggacagggact

SEQ ID NO: 1015872 - DNA, 25 bp, Homo sapien
gtgatgcaaggaagatgggacacat

SEQ ID NO: 1015873 - DNA, 25 bp, Homo sapien
gacttgcagaagtaaacgtgtgtgc

SEQ ID NO: 1015874 - DNA, 25 bp, Homo sapien
acgtgtgtgcatgaggatggcggtc

SEQ ID NO: 1015875 - DNA, 25 bp, Homo sapien
ctggcctagtgactggctgtgctgc

SEQ ID NO: 1015876 - DNA, 25 bp, Homo sapien
gcttttgaaaagacatccagggact

SEQ ID NO: 1015877 - DNA, 25 bp, Homo sapien
tgatgtttgaagtcgttcctctcct

SEQ ID NO: 1015878 - DNA, 25 bp, Homo sapien
atttaaattcttaagcatgtgctgc

SEQ ID NO: 1015879 - DNA, 25 bp, Homo sapien
ttgctgagcattcaaatccctgttc

SEQ ID NO: 1015880 - DNA, 25 bp, Homo sapien
tgtgctgctgagcatcagtctttgt

SEQ ID NO: 1015881 - DNA, 25 bp, Homo sapien
tgatccgtagaatggatagcaccag

SEQ ID NO: 1015882 - DNA, 25 bp, Homo sapien
tagcaccagaaaaactgaggattgg

SEQ ID NO: 1015883 - DNA, 25 bp, Homo sapien
aacctgggtggtaagctgtgctctc

SEQ ID NO: 1015884 - DNA, 25 bp, Homo sapien
gaattgtcactttggaactggttgt

SEQ ID NO: 1015885 - DNA, 25 bp, Homo sapien
ctgggtacctcctttggacctctct

SEQ ID NO: 1015886 - DNA, 25 bp, Homo sapien
tcaggcttcagtcttggggttactt

SEQ ID NO: 1015887 - DNA, 25 bp, Homo sapien
ctccaccaaattgctcaggcttcag

SEQ ID NO: 1015888 - DNA, 25 bp, Homo sapien
aaattgctcaggcttcagtcttggg

SEQ ID NO: 1015889 - DNA, 25 bp, Homo sapien
gtgacccctgacttcacagcaggcc

SEQ ID NO: 1015890 - DNA, 25 bp, Homo sapien
tgacccctgacttcacagcaggcca

SEQ ID NO: 1015891 - DNA, 25 bp, Homo sapien
actcatcaaagggatccagtagagc

SEQ ID NO: 1015892 - DNA, 25 bp, Homo sapien
tacagccctttagactcatcaaagg

SEQ ID NO: 1015893 - DNA, 25 bp, Homo sapien
tcaaagggatccagtagagcttctg

SEQ ID NO: 1015894 - DNA, 25 bp, Homo sapien
ctttagactcatcaaagggatccag

SEQ ID NO: 1015895 - DNA, 25 bp, Homo sapien
taagtccatgagtggcgtggctgca

SEQ ID NO: 1015896 - DNA, 25 bp, Homo sapien
cagaggtcagccgtgatgatgctcc

SEQ ID NO: 1015897 - DNA, 25 bp, Homo sapien
gtggctgcacggtcaaacttcgggc

SEQ ID NO: 1015898 - DNA, 25 bp, Homo sapien
tgtgcagttcagctctcagaggtca

SEQ ID NO: 1015899 - DNA, 25 bp, Homo sapien
aactccatctgcctcgaggtggtcc

SEQ ID NO: 1015900 - DNA, 25 bp, Homo sapien
cctgtttggtgtggcctagatggga

SEQ ID NO: 1015901 - DNA, 25 bp, Homo sapien
tggacagtcatccacccagagcatc

SEQ ID NO: 1015902 - DNA, 25 bp, Homo sapien
ggtgtggcctagatgggaactccat

SEQ ID NO: 1015903 - DNA, 25 bp, Homo sapien
ttagagaaagtaaagcagcccacgc

SEQ ID NO: 1015904 - DNA, 25 bp, Homo sapien
agcccacgcataggagacctggaaa

SEQ ID NO: 1015905 - DNA, 25 bp, Homo sapien
aaggattcagtcaaccgacccaagg

SEQ ID NO: 1015906 - DNA, 25 bp, Homo sapien
tgaggcttcctcgatgctgtcatgc

SEQ ID NO: 1015907 - DNA, 25 bp, Homo sapien
ccagaagtccagatcccaagggctg

SEQ ID NO: 1015908 - DNA, 25 bp, Homo sapien
ttttaccatccaatcctgtcagcgg

SEQ ID NO: 1015909 - DNA, 25 bp, Homo sapien
gccccttggatgaggtcgctgccat

SEQ ID NO: 1015910 - DNA, 25 bp, Homo sapien
gatgtcacgtgtatctgctacccgg

SEQ ID NO: 1015911 - DNA, 25 bp, Homo sapien
cactgctgagccaataaggaggaag

SEQ ID NO: 1015912 - DNA, 25 bp, Homo sapien
gagcgggatcctgcaccttattaca

SEQ ID NO: 1015913 - DNA, 25 bp, Homo sapien
ttcaagacctggaggttcaagccag

SEQ ID NO: 1015914 - DNA, 25 bp, Homo sapien
ggctgaagatttgcccaggacaatg

SEQ ID NO: 1015915 - DNA, 25 bp, Homo sapien
tcacctcctggtgattgagcctttc

SEQ ID NO: 1015916 - DNA, 25 bp, Homo sapien
ctcacctcctggtgattgagccttt

SEQ ID NO: 1015917 - DNA, 25 bp, Homo sapien
ggttgagccgttgcctgaaacccga

SEQ ID NO: 1015918 - DNA, 25 bp, Homo sapien
tcagcatagcaataagtgaccggaa

SEQ ID NO: 1015919 - DNA, 25 bp, Homo sapien
tgtcgacatcactgaggaccccttg

SEQ ID NO: 1015920 - DNA, 25 bp, Homo sapien
ttgactcggatgtgtgcaaaggccc

SEQ ID NO: 1015921 - DNA, 25 bp, Homo sapien
catctttgcccgagggaaggcttcg

SEQ ID NO: 1015922 - DNA, 25 bp, Homo sapien
cccagtaccacgctctgaccttctg

SEQ ID NO: 1015923 - DNA, 25 bp, Homo sapien
tgatgttcgctagcgcctctcgtca

SEQ ID NO: 1015924 - DNA, 25 bp, Homo sapien
ccctggatgaccacgccagctgtgg

SEQ ID NO: 1015925 - DNA, 25 bp, Homo sapien
ggccacatgatgctgcttgagaatc

SEQ ID NO: 1015926 - DNA, 25 bp, Homo sapien
gccacagatggaagggacccaattc

SEQ ID NO: 1015927 - DNA, 25 bp, Homo sapien
ctgtgggatgaacggtcatggccac

SEQ ID NO: 1015928 - DNA, 25 bp, Homo sapien
ctggccacatgatgctgcttgagaa

SEQ ID NO: 1015929 - DNA, 25 bp, Homo sapien
gaaacacagcaataggatcacttcc

SEQ ID NO: 1015930 - DNA, 25 bp, Homo sapien
agtcttaacctgcacgtcccggatg

SEQ ID NO: 1015931 - DNA, 25 bp, Homo sapien
tcccggatggtggacaacagtagct

SEQ ID NO: 1015932 - DNA, 25 bp, Homo sapien
tcacatggtgtgagcagggcatctg

SEQ ID NO: 1015933 - DNA, 25 bp, Homo sapien
ctctttctgatgctgacacccatgg

SEQ ID NO: 1015934 - DNA, 25 bp, Homo sapien
ctgatgctgacacccatggaccttc

SEQ ID NO: 1015935 - DNA, 25 bp, Homo sapien
tgcacactccgatgcagcatcatca

SEQ ID NO: 1015936 - DNA, 25 bp, Homo sapien
tttctgatgctgacacccatggacc

SEQ ID NO: 1015937 - DNA, 25 bp, Homo sapien
gagagatggacatttctgaatgagg

SEQ ID NO: 1015938 - DNA, 25 bp, Homo sapien
gacgcagagagatggacatttctga

SEQ ID NO: 1015939 - DNA, 25 bp, Homo sapien
tccgctggtgaagacgcagagagat

SEQ ID NO: 1015940 - DNA, 25 bp, Homo sapien
ctgggtctctcggtccgctggtgaa

SEQ ID NO: 1015941 - DNA, 25 bp, Homo sapien
cctgcaggcttagaccttcgtgcat

SEQ ID NO: 1015942 - DNA, 25 bp, Homo sapien
gcctgcaggcttagaccttcgtgca

SEQ ID NO: 1015943 - DNA, 25 bp, Homo sapien
acccagctggcgtccgaccgctcac

SEQ ID NO: 1015944 - DNA, 25 bp, Homo sapien
ttattctcatccacccagctggcgt

SEQ ID NO: 1015945 - DNA, 25 bp, Homo sapien
catccacccagctggcgtccgaccg

SEQ ID NO: 1015946 - DNA, 25 bp, Homo sapien
gttattctcatccacccagctggcg

SEQ ID NO: 1015947 - DNA, 25 bp, Homo sapien
aaaccagaaattggtctttgccagt

SEQ ID NO: 1015948 - DNA, 25 bp, Homo sapien
cattaaaccagaaattggtctttgc

SEQ ID NO: 1015949 - DNA, 25 bp, Homo sapien
ccagtagtgaccaagtatatgtgtc

SEQ ID NO: 1015950 - DNA, 25 bp, Homo sapien
accaagtatatgtgtccaaagcaag

SEQ ID NO: 1015951 - DNA, 25 bp, Homo sapien
gggcacagtttactcctcaggtcct

SEQ ID NO: 1015952 - DNA, 25 bp, Homo sapien
actcctcaggtcctgtggatgcagc

SEQ ID NO: 1015953 - DNA, 25 bp, Homo sapien
gccataatggtgctttctgccttca

SEQ ID NO: 1015954 - DNA, 25 bp, Homo sapien
gacacgttcagtgcgagacttggag

SEQ ID NO: 1015955 - DNA, 25 bp, Homo sapien
ccagagagctcattaagggcaccag

SEQ ID NO: 1015956 - DNA, 25 bp, Homo sapien
ctccagagagctcattaagggcacc

SEQ ID NO: 1015957 - DNA, 25 bp, Homo sapien
tccagagagctcattaagggcacca

SEQ ID NO: 1015958 - DNA, 25 bp, Homo sapien
agagagctcattaagggcaccagaa

SEQ ID NO: 1015959 - DNA, 25 bp, Homo sapien
tgatgccgtgccaggagaactctgt

SEQ ID NO: 1015960 - DNA, 25 bp, Homo sapien
cgctggttgctgttccggatgagcc

SEQ ID NO: 1015961 - DNA, 25 bp, Homo sapien
gatgagcccacggacggatggtggc

SEQ ID NO: 1015962 - DNA, 25 bp, Homo sapien
ggcaactggcccagtgatgccgtgc

SEQ ID NO: 1015963 - DNA, 25 bp, Homo sapien
ttggtgcattgaactgatccatagt

SEQ ID NO: 1015964 - DNA, 25 bp, Homo sapien
tggtgcattgaactgatccatagtg

SEQ ID NO: 1015965 - DNA, 25 bp, Homo sapien
tggcagccagcttttggtgcattga

SEQ ID NO: 1015966 - DNA, 25 bp, Homo sapien
gaataaagtctccatgagctggtga

SEQ ID NO: 1015967 - DNA, 25 bp, Homo sapien
gaacacgatgaagatctgtgccgca

SEQ ID NO: 1015968 - DNA, 25 bp, Homo sapien
ccagatggatttggcgtggatgccc

SEQ ID NO: 1015969 - DNA, 25 bp, Homo sapien
tcacatttccatgagcccaaaaggg

SEQ ID NO: 1015970 - DNA, 25 bp, Homo sapien
ttttcaccttgtgacggtagaagcg

SEQ ID NO: 1015971 - DNA, 25 bp, Homo sapien
gtttccaagctctcctttttggcat

SEQ ID NO: 1015972 - DNA, 25 bp, Homo sapien
tgtttccaagctctcctttttggca

SEQ ID NO: 1015973 - DNA, 25 bp, Homo sapien
ccttgtgacggtagaagcgaatgtt

SEQ ID NO: 1015974 - DNA, 25 bp, Homo sapien
ccttccacagggcttttgatgattc

SEQ ID NO: 1015975 - DNA, 25 bp, Homo sapien
ttccttccacagggcttttgatgat

SEQ ID NO: 1015976 - DNA, 25 bp, Homo sapien
gggtctctgattaagggctgttatt

SEQ ID NO: 1015977 - DNA, 25 bp, Homo sapien
gtctctgattaagggctgttatttt

SEQ ID NO: 1015978 - DNA, 25 bp, Homo sapien
tttatgatgtgagttcgtggtcccc

SEQ ID NO: 1015979 - DNA, 25 bp, Homo sapien
tgctggcccaaaatccatgtaagac

SEQ ID NO: 1015980 - DNA, 25 bp, Homo sapien
gatgggcagtgccttgttttgcaca

SEQ ID NO: 1015981 - DNA, 25 bp, Homo sapien
gcggatggcagttcctgtttgcgat

SEQ ID NO: 1015982 - DNA, 25 bp, Homo sapien
ctggagttgcgcgtccagaccagaa

SEQ ID NO: 1015983 - DNA, 25 bp, Homo sapien
cagaagcaggggcatctagaccccc

SEQ ID NO: 1015984 - DNA, 25 bp, Homo sapien
ggcatctagacccccggctctgtgt

SEQ ID NO: 1015985 - DNA, 25 bp, Homo sapien
ggagttgcgcgtccagaccagaagc

SEQ ID NO: 1015986 - DNA, 25 bp, Homo sapien
tagttctcagagtcgcagggcaggt

SEQ ID NO: 1015987 - DNA, 25 bp, Homo sapien
agctgtacgaccctgcatttgcaga

SEQ ID NO: 1015988 - DNA, 25 bp, Homo sapien
ggtttgccgaaccacactgctgtgc

SEQ ID NO: 1015989 - DNA, 25 bp, Homo sapien
tgggagttgtttgaaccccagccca

SEQ ID NO: 1015990 - DNA, 25 bp, Homo sapien
tattccattgtcagactggactgcc

SEQ ID NO: 1015991 - DNA, 25 bp, Homo sapien
tatcacgaaatcttggcatgcacag

SEQ ID NO: 1015992 - DNA, 25 bp, Homo sapien
taactaatcacttaccgaggaagca

SEQ ID NO: 1015993 - DNA, 25 bp, Homo sapien
gcacagacatttgcacacgtgtaag

SEQ ID NO: 1015994 - DNA, 25 bp, Homo sapien
tgttttcacagttctaatcaaagtg

SEQ ID NO: 1015995 - DNA, 25 bp, Homo sapien
ttatttaatggaatctactattttc

SEQ ID NO: 1015996 - DNA, 25 bp, Homo sapien
tatcatatgatgactagttttcact

SEQ ID NO: 1015997 - DNA, 25 bp, Homo sapien
ctaataccgaactgacggccgggca

SEQ ID NO: 1015998 - DNA, 25 bp, Homo sapien
ccagaacgtggtcagcaaggtaagg

SEQ ID NO: 1015999 - DNA, 25 bp, Homo sapien
ggcttcagccagttctcggactcgt

SEQ ID NO: 1016000 - DNA, 25 bp, Homo sapien
tgtgtgtagggcattccgcattggc

SEQ ID NO: 1016001 - DNA, 25 bp, Homo sapien
ttacttgggtgtaaagggagcacca

SEQ ID NO: 1016002 - DNA, 25 bp, Homo sapien
ggtcagaactttgcatgtattagct

SEQ ID NO: 1016003 - DNA, 25 bp, Homo sapien
ttccaggcatggaggtcagaacttt

SEQ ID NO: 1016004 - DNA, 25 bp, Homo sapien
gcatggaggtcagaactttgcatgt

SEQ ID NO: 1016005 - DNA, 25 bp, Homo sapien
ccaggcatggaggtcagaactttgc

SEQ ID NO: 1016006 - DNA, 25 bp, Homo sapien
catttggtatgacttgcagcgtaca

SEQ ID NO: 1016007 - DNA, 25 bp, Homo sapien
tgcagtccaagaaagcacggtcctg

SEQ ID NO: 1016008 - DNA, 25 bp, Homo sapien
tatggtctgtgagctgcatttggcc

SEQ ID NO: 1016009 - DNA, 25 bp, Homo sapien
gggcttctcccacgtaaaaatgcac

SEQ ID NO: 1016010 - DNA, 25 bp, Homo sapien
atactctgggtctaataatctgcct

SEQ ID NO: 1016011 - DNA, 25 bp, Homo sapien
gtatactctgggtctaataatctgc

SEQ ID NO: 1016012 - DNA, 25 bp, Homo sapien
tactctgggtctaataatctgcctc

SEQ ID NO: 1016013 - DNA, 25 bp, Homo sapien
gtatcctcgtctccgtaatggtgca

SEQ ID NO: 1016014 - DNA, 25 bp, Homo sapien
aggcctgacagtttgtatcctcgtc

SEQ ID NO: 1016015 - DNA, 25 bp, Homo sapien
gcaatgatccttccttcgcgtaggg

SEQ ID NO: 1016016 - DNA, 25 bp, Homo sapien
atgatccttccttcgcgtagggtac

SEQ ID NO: 1016017 - DNA, 25 bp, Homo sapien
tagaaaagaggccaagaggtccctg

SEQ ID NO: 1016018 - DNA, 25 bp, Homo sapien
tctatgaaggagacttgcgctgctc

SEQ ID NO: 1016019 - DNA, 25 bp, Homo sapien
agaaaggcaactccacgtgggtggc

SEQ ID NO: 1016020 - DNA, 25 bp, Homo sapien
gctgctccaaggtatgtccaggatg

SEQ ID NO: 1016021 - DNA, 25 bp, Homo sapien
ctgctgagtccctgtgggttttccc

SEQ ID NO: 1016022 - DNA, 25 bp, Homo sapien
ctgagtccctgtgggttttccccat

SEQ ID NO: 1016023 - DNA, 25 bp, Homo sapien
ctgtgggttttccccattgggctag

SEQ ID NO: 1016024 - DNA, 25 bp, Homo sapien
gttttccccattgggctagttgtca

SEQ ID NO: 1016025 - DNA, 25 bp, Homo sapien
agttaatgcaatgactccccagaca

SEQ ID NO: 1016026 - DNA, 25 bp, Homo sapien
tctctcccagcgcatgtcgatgttc

SEQ ID NO: 1016027 - DNA, 25 bp, Homo sapien
tgcagccaatccagtgctgactcct

SEQ ID NO: 1016028 - DNA, 25 bp, Homo sapien
ccagacagtcatttcacgtgaaatg

SEQ ID NO: 1016029 - DNA, 25 bp, Homo sapien
tgaaggaaagtggcccgtggtctac

SEQ ID NO: 1016030 - DNA, 25 bp, Homo sapien
cacacagcggactgactgctcttct

SEQ ID NO: 1016031 - DNA, 25 bp, Homo sapien
ctaagtcccggccaacggcatcctg

SEQ ID NO: 1016032 - DNA, 25 bp, Homo sapien
gaacgcagctccaactccgctaagt

SEQ ID NO: 1016033 - DNA, 25 bp, Homo sapien
ttcctgctccaggatccaattcccc

SEQ ID NO: 1016034 - DNA, 25 bp, Homo sapien
ctgctccaggatccaattcccctcc

SEQ ID NO: 1016035 - DNA, 25 bp, Homo sapien
tcctgctccaggatccaattcccct

SEQ ID NO: 1016036 - DNA, 25 bp, Homo sapien
gctccaggatccaattcccctccat

SEQ ID NO: 1016037 - DNA, 25 bp, Homo sapien
agctgggcgtgcgtgatgtgtgcgc

SEQ ID NO: 1016038 - DNA, 25 bp, Homo sapien
ttatctgggtatgatttcacacacc

SEQ ID NO: 1016039 - DNA, 25 bp, Homo sapien
aattatctgggtatgatttcacaca

SEQ ID NO: 1016040 - DNA, 25 bp, Homo sapien
gggcgtgcgtgatgtgtgcgcctgt

SEQ ID NO: 1016041 - DNA, 25 bp, Homo sapien
tataaatcctgaatttcacactagg

SEQ ID NO: 1016042 - DNA, 25 bp, Homo sapien
aatcctgaatttcacactaggaaaa

SEQ ID NO: 1016043 - DNA, 25 bp, Homo sapien
actaggaaaacaagcttagtcagct

SEQ ID NO: 1016044 - DNA, 25 bp, Homo sapien
tattcagttagaagttagcagtgac

SEQ ID NO: 1016045 - DNA, 25 bp, Homo sapien
attttgtccttagacaacgggatct

SEQ ID NO: 1016046 - DNA, 25 bp, Homo sapien
aaagccgtatactctggcaaaatag

SEQ ID NO: 1016047 - DNA, 25 bp, Homo sapien
cctctgctttaaagccgtatactct

SEQ ID NO: 1016048 - DNA, 25 bp, Homo sapien
tgtccttagacaacgggatctgctg

SEQ ID NO: 1016049 - DNA, 25 bp, Homo sapien
acactgcacggtgccgcgtggtctg

SEQ ID NO: 1016050 - DNA, 25 bp, Homo sapien
tgccgcgtggtctgcagtcccactg

SEQ ID NO: 1016051 - DNA, 25 bp, Homo sapien
cacggtgccgcgtggtctgcagtcc

SEQ ID NO: 1016052 - DNA, 25 bp, Homo sapien
aagcacactgcacggtgccgcgtgg

SEQ ID NO: 1016053 - DNA, 25 bp, Homo sapien
gtctctgccagcaacctcctccgcc

SEQ ID NO: 1016054 - DNA, 25 bp, Homo sapien
ctctgccagcaacctcctccgcctg

SEQ ID NO: 1016055 - DNA, 25 bp, Homo sapien
tgccagcaacctcctccgcctgcat

SEQ ID NO: 1016056 - DNA, 25 bp, Homo sapien
tgtctctgccagcaacctcctccgc

SEQ ID NO: 1016057 - DNA, 25 bp, Homo sapien
gttccttccaatggatctggcaggc

SEQ ID NO: 1016058 - DNA, 25 bp, Homo sapien
gaaaatattcagagaatctgcggat

SEQ ID NO: 1016059 - DNA, 25 bp, Homo sapien
tgattatctgaccatcctgaaaata

SEQ ID NO: 1016060 - DNA, 25 bp, Homo sapien
ccatcctgaaaatattcagagaatc

SEQ ID NO: 1016061 - DNA, 25 bp, Homo sapien
ttcagagaatctgcggatgctcact

SEQ ID NO: 1016062 - DNA, 25 bp, Homo sapien
tggtaaaacacgggagcagtggtgt

SEQ ID NO: 1016063 - DNA, 25 bp, Homo sapien
agtggtaaaacacgggagcagtggt

SEQ ID NO: 1016064 - DNA, 25 bp, Homo sapien
gaagtggtaaaacacgggagcagtg

SEQ ID NO: 1016065 - DNA, 25 bp, Homo sapien
ggtaaaacacgggagcagtggtgtc

SEQ ID NO: 1016066 - DNA, 25 bp, Homo sapien
tggccacatcttcggctgtagtcac

SEQ ID NO: 1016067 - DNA, 25 bp, Homo sapien
gatggccacatcttcggctgtagtc

SEQ ID NO: 1016068 - DNA, 25 bp, Homo sapien
cacatcttcggctgtagtcacaggg

SEQ ID NO: 1016069 - DNA, 25 bp, Homo sapien
cctgcaggacactcttgaggcacaa

SEQ ID NO: 1016070 - DNA, 25 bp, Homo sapien
cccatggaacgtacaggaatgtgca

SEQ ID NO: 1016071 - DNA, 25 bp, Homo sapien
gaaaccagggttgatatccaaattc

SEQ ID NO: 1016072 - DNA, 25 bp, Homo sapien
tcatggtgtgagcagccctcttcag

SEQ ID NO: 1016073 - DNA, 25 bp, Homo sapien
aaagctgggcgagtccctgcaccag

SEQ ID NO: 1016074 - DNA, 25 bp, Homo sapien
tcagtggaagacgatgatccaagct

SEQ ID NO: 1016075 - DNA, 25 bp, Homo sapien
gaagacgatgatccaagctccatgg

SEQ ID NO: 1016076 - DNA, 25 bp, Homo sapien
agtggaagacgatgatccaagctcc

SEQ ID NO: 1016077 - DNA, 25 bp, Homo sapien
gacgatgatccaagctccatggagc

SEQ ID NO: 1016078 - DNA, 25 bp, Homo sapien
gctcccgttctgctctcaacggccc

SEQ ID NO: 1016079 - DNA, 25 bp, Homo sapien
tctcaacggcccctcgctgaaggga

SEQ ID NO: 1016080 - DNA, 25 bp, Homo sapien
ttctgctctcaacggcccctcgctg

SEQ ID NO: 1016081 - DNA, 25 bp, Homo sapien
ccgttctgctctcaacggcccctcg

SEQ ID NO: 1016082 - DNA, 25 bp, Homo sapien
ctccaaaatccaattgcctctgcaa

SEQ ID NO: 1016083 - DNA, 25 bp, Homo sapien
caaaatccaattgcctctgcaagtc

SEQ ID NO: 1016084 - DNA, 25 bp, Homo sapien
tccaaaatccaattgcctctgcaag

SEQ ID NO: 1016085 - DNA, 25 bp, Homo sapien
aatccaattgcctctgcaagtcctt

SEQ ID NO: 1016086 - DNA, 25 bp, Homo sapien
ctgtagtaagaatgaggaacacatg

SEQ ID NO: 1016087 - DNA, 25 bp, Homo sapien
gtaagaatgaggaacacatgtcccg

SEQ ID NO: 1016088 - DNA, 25 bp, Homo sapien
tgaggaacacatgtcccgctcctgc

SEQ ID NO: 1016089 - DNA, 25 bp, Homo sapien
gaatgaggaacacatgtcccgctcc

SEQ ID NO: 1016090 - DNA, 25 bp, Homo sapien
gtgcaccaatagcttgtacacaagc

SEQ ID NO: 1016091 - DNA, 25 bp, Homo sapien
gggaaatccatctatgtcctccgag

SEQ ID NO: 1016092 - DNA, 25 bp, Homo sapien
aagccagagaagacttgtgcaccaa

SEQ ID NO: 1016093 - DNA, 25 bp, Homo sapien
caaagccaagggttagccactgggg

SEQ ID NO: 1016094 - DNA, 25 bp, Homo sapien
tttctctttagtaccctctggatct

SEQ ID NO: 1016095 - DNA, 25 bp, Homo sapien
ctggccacccgtcctccctggcatt

SEQ ID NO: 1016096 - DNA, 25 bp, Homo sapien
ccatgcagctgtcccaactttctcc

SEQ ID NO: 1016097 - DNA, 25 bp, Homo sapien
tctttagtaccctctggatctttgt

SEQ ID NO: 1016098 - DNA, 25 bp, Homo sapien
gcttttgcagatgcgtctccactgt

SEQ ID NO: 1016099 - DNA, 25 bp, Homo sapien
ttttcagggcatacgggaggagata

SEQ ID NO: 1016100 - DNA, 25 bp, Homo sapien
catacgggaggagatagccctgcag

SEQ ID NO: 1016101 - DNA, 25 bp, Homo sapien
ccactgtggtcacgctttcaggagc

SEQ ID NO: 1016102 - DNA, 25 bp, Homo sapien
cataaaatctgccattactgctcat

SEQ ID NO: 1016103 - DNA, 25 bp, Homo sapien
ccaaactgcctcttcataaaatctg

SEQ ID NO: 1016104 - DNA, 25 bp, Homo sapien
aggccactcgccctccaaactgcct

SEQ ID NO: 1016105 - DNA, 25 bp, Homo sapien
cagcaggccactcgccctccaaact

SEQ ID NO: 1016106 - DNA, 25 bp, Homo sapien
tttaacactttcagctctcatgagg

SEQ ID NO: 1016107 - DNA, 25 bp, Homo sapien
aacactttcagctctcatgagggaa

SEQ ID NO: 1016108 - DNA, 25 bp, Homo sapien
cactttcagctctcatgagggaaca

SEQ ID NO: 1016109 - DNA, 25 bp, Homo sapien
ttcagctctcatgagggaacaggga

SEQ ID NO: 1016110 - DNA, 25 bp, Homo sapien
gagaactgtatgcagtcccatgtgg

SEQ ID NO: 1016111 - DNA, 25 bp, Homo sapien
aactgtatgcagtcccatgtgggca

SEQ ID NO: 1016112 - DNA, 25 bp, Homo sapien
ttggagaactgtatgcagtcccatg

SEQ ID NO: 1016113 - DNA, 25 bp, Homo sapien
gaactgtatgcagtcccatgtgggc

SEQ ID NO: 1016114 - DNA, 25 bp, Homo sapien
gagtcttccgtgagaaaccatcctt

SEQ ID NO: 1016115 - DNA, 25 bp, Homo sapien
aacacccacgctgtgctcactggga

SEQ ID NO: 1016116 - DNA, 25 bp, Homo sapien
tgctcactgggagatggcgagtctt

SEQ ID NO: 1016117 - DNA, 25 bp, Homo sapien
gagatggcgagtcttccgtgagaaa

SEQ ID NO: 1016118 - DNA, 25 bp, Homo sapien
agggagtatgggagtgcagtggaaa

SEQ ID NO: 1016119 - DNA, 25 bp, Homo sapien
atggggctattcttgtttaactctt

SEQ ID NO: 1016120 - DNA, 25 bp, Homo sapien
aagatggggctattcttgtttaact

SEQ ID NO: 1016121 - DNA, 25 bp, Homo sapien
gatggggctattcttgtttaactct

SEQ ID NO: 1016122 - DNA, 25 bp, Homo sapien
tcttggcttggcaacggtgacacca

SEQ ID NO: 1016123 - DNA, 25 bp, Homo sapien
taaaagcaaataaccaccaacaaca

SEQ ID NO: 1016124 - DNA, 25 bp, Homo sapien
gcagtgtcccctccttgtaaaagca

SEQ ID NO: 1016125 - DNA, 25 bp, Homo sapien
gggtgcatccgtgctcctcaaaaac

SEQ ID NO: 1016126 - DNA, 25 bp, Homo sapien
ctgtctagcgcctgagtcactgctg

SEQ ID NO: 1016127 - DNA, 25 bp, Homo sapien
cagggctgtctagcgcctgagtcac

SEQ ID NO: 1016128 - DNA, 25 bp, Homo sapien
tgtaattagcgacacacacaccagc

SEQ ID NO: 1016129 - DNA, 25 bp, Homo sapien
actgctgtaattagcgacacacaca

SEQ ID NO: 1016130 - DNA, 25 bp, Homo sapien
ctagtaattcttttgaagcgtgcac

SEQ ID NO: 1016131 - DNA, 25 bp, Homo sapien
ttcttttgaagcgtgcacatctggg

SEQ ID NO: 1016132 - DNA, 25 bp, Homo sapien
agtaattcttttgaagcgtgcacat

SEQ ID NO: 1016133 - DNA, 25 bp, Homo sapien
ttgaagcgtgcacatctgggggcca

SEQ ID NO: 1016134 - DNA, 25 bp, Homo sapien
tggtgggaaaggcgcgcagtgtcat

SEQ ID NO: 1016135 - DNA, 25 bp, Homo sapien
ctggtgggaaaggcgcgcagtgtca

SEQ ID NO: 1016136 - DNA, 25 bp, Homo sapien
gacacgatgtttgatctccacacag

SEQ ID NO: 1016137 - DNA, 25 bp, Homo sapien
ttccagacacgatgtttgatctcca

SEQ ID NO: 1016138 - DNA, 25 bp, Homo sapien
ccaatcaattccagacacgatgttt

SEQ ID NO: 1016139 - DNA, 25 bp, Homo sapien
acgatgtttgatctccacacaggaa

SEQ ID NO: 1016140 - DNA, 25 bp, Homo sapien
ttaggcggctgataatgagggcttc

SEQ ID NO: 1016141 - DNA, 25 bp, Homo sapien
tcagacgtcatttaggcggctgata

SEQ ID NO: 1016142 - DNA, 25 bp, Homo sapien
catttaggcggctgataatgagggc

SEQ ID NO: 1016143 - DNA, 25 bp, Homo sapien
ggctgataatgagggcttcgtttgc

SEQ ID NO: 1016144 - DNA, 25 bp, Homo sapien
acttcccggctacactctgtgggtt

SEQ ID NO: 1016145 - DNA, 25 bp, Homo sapien
tctgtgggtttcaggagtgacttct

SEQ ID NO: 1016146 - DNA, 25 bp, Homo sapien
ttgacttcccggctacactctgtgg

SEQ ID NO: 1016147 - DNA, 25 bp, Homo sapien
ggagtgacttctctaacaccttctg

SEQ ID NO: 1016148 - DNA, 25 bp, Homo sapien
tgaatctgctgtcgcactgtttgtt

SEQ ID NO: 1016149 - DNA, 25 bp, Homo sapien
agtgaatctgctgtcgcactgtttg

SEQ ID NO: 1016150 - DNA, 25 bp, Homo sapien
atctgctgtcgcactgtttgttgac

SEQ ID NO: 1016151 - DNA, 25 bp, Homo sapien
tcagtgaatctgctgtcgcactgtt

SEQ ID NO: 1016152 - DNA, 25 bp, Homo sapien
ctgtgttgtttaaagcatctcaatt

SEQ ID NO: 1016153 - DNA, 25 bp, Homo sapien
caatttcaaataggctagtaggtgg

SEQ ID NO: 1016154 - DNA, 25 bp, Homo sapien
aaagcacatggactttcctttggtt

SEQ ID NO: 1016155 - DNA, 25 bp, Homo sapien
cagctgcaaagcacatggactttcc

SEQ ID NO: 1016156 - DNA, 25 bp, Homo sapien
gactgagcgttggtggttcttccca

SEQ ID NO: 1016157 - DNA, 25 bp, Homo sapien
taaccgtgtgagcttggactgagcg

SEQ ID NO: 1016158 - DNA, 25 bp, Homo sapien
cctcttggtgaagtggcctagtgcc

SEQ ID NO: 1016159 - DNA, 25 bp, Homo sapien
ggcattgccgactagataaccgtgt

SEQ ID NO: 1016160 - DNA, 25 bp, Homo sapien
ctgtccggccgtgtcccaggccttg

SEQ ID NO: 1016161 - DNA, 25 bp, Homo sapien
tcccacttctccgagggctgccccg

SEQ ID NO: 1016162 - DNA, 25 bp, Homo sapien
cccaggagaccttcttttcgccact

SEQ ID NO: 1016163 - DNA, 25 bp, Homo sapien
ttcccacttctccgagggctgcccc

SEQ ID NO: 1016164 - DNA, 25 bp, Homo sapien
ggaactaacttgtaattctcaaaca

SEQ ID NO: 1016165 - DNA, 25 bp, Homo sapien
aacgcgccgctgagtcagttttcag

SEQ ID NO: 1016166 - DNA, 25 bp, Homo sapien
tacgggctgtgaggtcactcgattc

SEQ ID NO: 1016167 - DNA, 25 bp, Homo sapien
tcttccaactaggaacggcctcagt

SEQ ID NO: 1016168 - DNA, 25 bp, Homo sapien
gacatctgggtcgggtctgagtcca

SEQ ID NO: 1016169 - DNA, 25 bp, Homo sapien
gccttgggcctctaacatttccgcg

SEQ ID NO: 1016170 - DNA, 25 bp, Homo sapien
cagtcggaataaaagttggtcgtgg

SEQ ID NO: 1016171 - DNA, 25 bp, Homo sapien
ctgcaagtcactggcgcagtcggaa

SEQ ID NO: 1016172 - DNA, 25 bp, Homo sapien
cgccccagaccaggtgaggaaattt

SEQ ID NO: 1016173 - DNA, 25 bp, Homo sapien
agtgtatataaaaacatcatagaca

SEQ ID NO: 1016174 - DNA, 25 bp, Homo sapien
gcgttcatttaattagcaagtgtat

SEQ ID NO: 1016175 - DNA, 25 bp, Homo sapien
atcttgacctgttcaccgccccaga

SEQ ID NO: 1016176 - DNA, 25 bp, Homo sapien
cagcatacgccctatggagtggata

SEQ ID NO: 1016177 - DNA, 25 bp, Homo sapien
cacctagagtcaagagctgctggca

SEQ ID NO: 1016178 - DNA, 25 bp, Homo sapien
ggctcactgctcaatgtacacggaa

SEQ ID NO: 1016179 - DNA, 25 bp, Homo sapien
aatgttcgggttccagtcatgtccc

SEQ ID NO: 1016180 - DNA, 25 bp, Homo sapien
tgtcacgccacacattccaatctgg

SEQ ID NO: 1016181 - DNA, 25 bp, Homo sapien
aattccaccgctgatgtcttcttgc

SEQ ID NO: 1016182 - DNA, 25 bp, Homo sapien
gcaaaaatcctgcataccagcctgt

SEQ ID NO: 1016183 - DNA, 25 bp, Homo sapien
tgtaacaccataggtctccaactgg

SEQ ID NO: 1016184 - DNA, 25 bp, Homo sapien
tcagtggatatcacaatgttctgtt

SEQ ID NO: 1016185 - DNA, 25 bp, Homo sapien
tctgtttgataaagtcagttgcttc

SEQ ID NO: 1016186 - DNA, 25 bp, Homo sapien
tcaggtgctgctttatttgctcatt

SEQ ID NO: 1016187 - DNA, 25 bp, Homo sapien
tgcaagtcttagcaaaaagcctccc

SEQ ID NO: 1016188 - DNA, 25 bp, Homo sapien
cattatactgtaaaccacaatgaag

SEQ ID NO: 1016189 - DNA, 25 bp, Homo sapien
ccacaatgaagaacatcttatttat

SEQ ID NO: 1016190 - DNA, 25 bp, Homo sapien
ctgtaaaccacaatgaagaacatct

SEQ ID NO: 1016191 - DNA, 25 bp, Homo sapien
cacgctcagctcattgttttgtatt

SEQ ID NO: 1016192 - DNA, 25 bp, Homo sapien
catttcacggaaaggcaaatggagg

SEQ ID NO: 1016193 - DNA, 25 bp, Homo sapien
tttgtcctcacaacagtcgtgggct

SEQ ID NO: 1016194 - DNA, 25 bp, Homo sapien
catcaagtgagcagtttgagactat

SEQ ID NO: 1016195 - DNA, 25 bp, Homo sapien
tgggtaggaccaatagttagaagta

SEQ ID NO: 1016196 - DNA, 25 bp, Homo sapien
tatgtctccggcatcccctcctgca

SEQ ID NO: 1016197 - DNA, 25 bp, Homo sapien
ctatgtctccggcatcccctcctgc

SEQ ID NO: 1016198 - DNA, 25 bp, Homo sapien
tcctgcactccctacttgggtcaga

SEQ ID NO: 1016199 - DNA, 25 bp, Homo sapien
ctacttgggtcagaggtgtcagcat

SEQ ID NO: 1016200 - DNA, 25 bp, Homo sapien
ttatattggttgtgcaaatctcagc

SEQ ID NO: 1016201 - DNA, 25 bp, Homo sapien
aatctcagcaggtttggcaggacag

SEQ ID NO: 1016202 - DNA, 25 bp, Homo sapien
gcaggacaggaccgctgctgtcgtc

SEQ ID NO: 1016203 - DNA, 25 bp, Homo sapien
tgtgcaaatctcagcaggtttggca

SEQ ID NO: 1016204 - DNA, 25 bp, Homo sapien
tgaggccctgggcatatggtccgca

SEQ ID NO: 1016205 - DNA, 25 bp, Homo sapien
ccctgggcatatggtccgcactcag

SEQ ID NO: 1016206 - DNA, 25 bp, Homo sapien
tgggcatatggtccgcactcagcac

SEQ ID NO: 1016207 - DNA, 25 bp, Homo sapien
aggccctgggcatatggtccgcact

SEQ ID NO: 1016208 - DNA, 25 bp, Homo sapien
catccgtgagagctaaagatgcatt

SEQ ID NO: 1016209 - DNA, 25 bp, Homo sapien
gaaacaggatgccacttgtgcagac

SEQ ID NO: 1016210 - DNA, 25 bp, Homo sapien
tgcagactctggctgtggcaccgtg

SEQ ID NO: 1016211 - DNA, 25 bp, Homo sapien
acatgctgccgtggatctgtttggg

SEQ ID NO: 1016212 - DNA, 25 bp, Homo sapien
caagctggcctgcatagaggaagcg

SEQ ID NO: 1016213 - DNA, 25 bp, Homo sapien
ggctgtgagccctacagtggttgct

SEQ ID NO: 1016214 - DNA, 25 bp, Homo sapien
catagaggaagcgtgaaaggctttc

SEQ ID NO: 1016215 - DNA, 25 bp, Homo sapien
gctgtgagccctacagtggttgctt

SEQ ID NO: 1016216 - DNA, 25 bp, Homo sapien
tcgaaatggtcctcagttagatgcc

SEQ ID NO: 1016217 - DNA, 25 bp, Homo sapien
tcatgactgtcgaaatggtcctcag

SEQ ID NO: 1016218 - DNA, 25 bp, Homo sapien
tggtcctcagttagatgcctgccca

SEQ ID NO: 1016219 - DNA, 25 bp, Homo sapien
cttggttaacccactcatgactgtc

SEQ ID NO: 1016220 - DNA, 25 bp, Homo sapien
ccaggttgtctctttggcacacttt

SEQ ID NO: 1016221 - DNA, 25 bp, Homo sapien
atgattggcacaaatccttggcctg

SEQ ID NO: 1016222 - DNA, 25 bp, Homo sapien
cttggcctgtgaataaatgctggtg

SEQ ID NO: 1016223 - DNA, 25 bp, Homo sapien
gcacaaatccttggcctgtgaataa

SEQ ID NO: 1016224 - DNA, 25 bp, Homo sapien
tgtgttccctttgggactaagcttg

SEQ ID NO: 1016225 - DNA, 25 bp, Homo sapien
ctcatgcggaggggtgtgttccctt

SEQ ID NO: 1016226 - DNA, 25 bp, Homo sapien
tcatgcggaggggtgtgttcccttt

SEQ ID NO: 1016227 - DNA, 25 bp, Homo sapien
tccctttgggactaagcttgagtgt

SEQ ID NO: 1016228 - DNA, 25 bp, Homo sapien
ggccttcttccctgaatccgccata

SEQ ID NO: 1016229 - DNA, 25 bp, Homo sapien
cttggccacattcttattcatcagg

SEQ ID NO: 1016230 - DNA, 25 bp, Homo sapien
ctgaatccgccataccctgcctggc

SEQ ID NO: 1016231 - DNA, 25 bp, Homo sapien
ggccacattcttattcatcaggatt

SEQ ID NO: 1016232 - DNA, 25 bp, Homo sapien
gttcatcacagatattctggctttt

SEQ ID NO: 1016233 - DNA, 25 bp, Homo sapien
agttcatcacagatattctggcttt

SEQ ID NO: 1016234 - DNA, 25 bp, Homo sapien
caaaaacaagcactgtagtgagtaa

SEQ ID NO: 1016235 - DNA, 25 bp, Homo sapien
gcaaaaacaagcactgtagtgagta

SEQ ID NO: 1016236 - DNA, 25 bp, Homo sapien
caggcaccagctcgggagctgagaa

SEQ ID NO: 1016237 - DNA, 25 bp, Homo sapien
aaactcatctgcagaccgcaccagc

SEQ ID NO: 1016238 - DNA, 25 bp, Homo sapien
tctgcagaccgcaccagcttcacag

SEQ ID NO: 1016239 - DNA, 25 bp, Homo sapien
actcatctgcagaccgcaccagctt

SEQ ID NO: 1016240 - DNA, 25 bp, Homo sapien
catgcaaaggtggagagccgttcat

SEQ ID NO: 1016241 - DNA, 25 bp, Homo sapien
ccgttcatgaaaccctgtgattgta

SEQ ID NO: 1016242 - DNA, 25 bp, Homo sapien
gtatcctgtgcactcggctggacca

SEQ ID NO: 1016243 - DNA, 25 bp, Homo sapien
gccgtatcctgtgcactcggctgga

SEQ ID NO: 1016244 - DNA, 25 bp, Homo sapien
ggctggggtcctttccaaagagcca

SEQ ID NO: 1016245 - DNA, 25 bp, Homo sapien
tggggtcctttccaaagagccagga

SEQ ID NO: 1016246 - DNA, 25 bp, Homo sapien
tcctttccaaagagccaggactcat

SEQ ID NO: 1016247 - DNA, 25 bp, Homo sapien
ggtcctttccaaagagccaggactc

SEQ ID NO: 1016248 - DNA, 25 bp, Homo sapien
ctttgcagatgtggtgagagctggc

SEQ ID NO: 1016249 - DNA, 25 bp, Homo sapien
ggtctggcacagtctttgcagatgt

SEQ ID NO: 1016250 - DNA, 25 bp, Homo sapien
cagatgtggtgagagctggctgcat

SEQ ID NO: 1016251 - DNA, 25 bp, Homo sapien
taggggtctggcacagtctttgcag

SEQ ID NO: 1016252 - DNA, 25 bp, Homo sapien
cagtgcccatttcatgcagagctgc

SEQ ID NO: 1016253 - DNA, 25 bp, Homo sapien
ctcagtgcccatttcatgcagagct

SEQ ID NO: 1016254 - DNA, 25 bp, Homo sapien
tgccctaccacagtgcggccaccta

SEQ ID NO: 1016255 - DNA, 25 bp, Homo sapien
gtgcggccacctaattgtctctcct

SEQ ID NO: 1016256 - DNA, 25 bp, Homo sapien
aaacaggccaagattattccttctc

SEQ ID NO: 1016257 - DNA, 25 bp, Homo sapien
cgataaacaggccaagattattcct

SEQ ID NO: 1016258 - DNA, 25 bp, Homo sapien
cgttcgataaacaggccaagattat

SEQ ID NO: 1016259 - DNA, 25 bp, Homo sapien
gttcactctaatgggcagggatgat

SEQ ID NO: 1016260 - DNA, 25 bp, Homo sapien
agtgcccggtgggttgcctgggaca

SEQ ID NO: 1016261 - DNA, 25 bp, Homo sapien
agaagaggcattctcagcgtgctgc

SEQ ID NO: 1016262 - DNA, 25 bp, Homo sapien
gctggttggatggaactgttcactg

SEQ ID NO: 1016263 - DNA, 25 bp, Homo sapien
tgtatgagtgagtgcccggtgggtt

SEQ ID NO: 1016264 - DNA, 25 bp, Homo sapien
tcgttaggctggcactccttagggc

SEQ ID NO: 1016265 - DNA, 25 bp, Homo sapien
tctcataagggtgatcagatctgcc

SEQ ID NO: 1016266 - DNA, 25 bp, Homo sapien
taaaatcctcgtagccagggaaatg

SEQ ID NO: 1016267 - DNA, 25 bp, Homo sapien
tgaaaagatcagaggccacatgggc

SEQ ID NO: 1016268 - DNA, 25 bp, Homo sapien
gaattgtttgcctaaaccaaggcca

SEQ ID NO: 1016269 - DNA, 25 bp, Homo sapien
tacttaataggtacgtagtggcatc

SEQ ID NO: 1016270 - DNA, 25 bp, Homo sapien
tctaaatgttggacttcctctaaca

SEQ ID NO: 1016271 - DNA, 25 bp, Homo sapien
tgatgaacttcaatttatcggttgc

SEQ ID NO: 1016272 - DNA, 25 bp, Homo sapien
aaggtagcgagtgtcccacaggcac

SEQ ID NO: 1016273 - DNA, 25 bp, Homo sapien
ggtgaaggtagcgagtgtcccacag

SEQ ID NO: 1016274 - DNA, 25 bp, Homo sapien
gctgggtgaaggtagcgagtgtccc

SEQ ID NO: 1016275 - DNA, 25 bp, Homo sapien
tacagctgggtgaaggtagcgagtg

SEQ ID NO: 1016276 - DNA, 25 bp, Homo sapien
ggaggcgggccctgaggagagtgcc

SEQ ID NO: 1016277 - DNA, 25 bp, Homo sapien
cggggaggcgggccctgaggagagt

SEQ ID NO: 1016278 - DNA, 25 bp, Homo sapien
ccctgaggagagtgccaggctcctg

SEQ ID NO: 1016279 - DNA, 25 bp, Homo sapien
ggccctgaggagagtgccaggctcc

SEQ ID NO: 1016280 - DNA, 25 bp, Homo sapien
aagcaccctgtcgagcggagacacg

SEQ ID NO: 1016281 - DNA, 25 bp, Homo sapien
tgacctccacgagaaccacccacga

SEQ ID NO: 1016282 - DNA, 25 bp, Homo sapien
tgcccaagcaccctgtcgagcggag

SEQ ID NO: 1016283 - DNA, 25 bp, Homo sapien
cgggctctcgcgacagccgtggaca

SEQ ID NO: 1016284 - DNA, 25 bp, Homo sapien
gttgggctactgagcggacccttac

SEQ ID NO: 1016285 - DNA, 25 bp, Homo sapien
ggttgggctactgagcggaccctta

SEQ ID NO: 1016286 - DNA, 25 bp, Homo sapien
cagagagggttgggctactgagcgg

SEQ ID NO: 1016287 - DNA, 25 bp, Homo sapien
gagggttgggctactgagcggaccc

SEQ ID NO: 1016288 - DNA, 25 bp, Homo sapien
atgcaaatgcgaacggccccacgta

SEQ ID NO: 1016289 - DNA, 25 bp, Homo sapien
caataaatgcaaatgcgaacggccc

SEQ ID NO: 1016290 - DNA, 25 bp, Homo sapien
cacgtaacgggtggctgccatgcct

SEQ ID NO: 1016291 - DNA, 25 bp, Homo sapien
tgccatgcctgagcgcagcgctgaa

SEQ ID NO: 1016292 - DNA, 25 bp, Homo sapien
cctcacagggctttcggcagtgatg

SEQ ID NO: 1016293 - DNA, 25 bp, Homo sapien
gcaaagaggaaaaacgcggcaggta

SEQ ID NO: 1016294 - DNA, 25 bp, Homo sapien
ctgggccgacctgctagggtaacca

SEQ ID NO: 1016295 - DNA, 25 bp, Homo sapien
accaacctgacagtgtcaccaggca

SEQ ID NO: 1016296 - DNA, 25 bp, Homo sapien
cgcttcttgaggaggtgcatggcac

SEQ ID NO: 1016297 - DNA, 25 bp, Homo sapien
tcgtaatgcgccgagaacctcttgt

SEQ ID NO: 1016298 - DNA, 25 bp, Homo sapien
ttcatgtcgttcagggtcaccaggc

SEQ ID NO: 1016299 - DNA, 25 bp, Homo sapien
cacctgcgacttgaggatggtctcc

SEQ ID NO: 1016300 - DNA, 25 bp, Homo sapien
tcctccaggtgctggcgcttggcca

SEQ ID NO: 1016301 - DNA, 25 bp, Homo sapien
tccaggtgctggcgcttggccagct

SEQ ID NO: 1016302 - DNA, 25 bp, Homo sapien
tgctcctccaggtgctggcgcttgg

SEQ ID NO: 1016303 - DNA, 25 bp, Homo sapien
aggtgctggcgcttggccagctgcc

SEQ ID NO: 1016304 - DNA, 25 bp, Homo sapien
catcgaggtcgtctagtgcaaagga

SEQ ID NO: 1016305 - DNA, 25 bp, Homo sapien
ggtcatcgaggtcgtctagtgcaaa

SEQ ID NO: 1016306 - DNA, 25 bp, Homo sapien
ctggtcatcgaggtcgtctagtgca

SEQ ID NO: 1016307 - DNA, 25 bp, Homo sapien
tcatcgaggtcgtctagtgcaaagg

SEQ ID NO: 1016308 - DNA, 25 bp, Homo sapien
cgtgcacatcgaagctgaagagcgg

SEQ ID NO: 1016309 - DNA, 25 bp, Homo sapien
tcgccctggcgatgatgaagtcgta

SEQ ID NO: 1016310 - DNA, 25 bp, Homo sapien
ttagcggatggtgtacttgtcccac

SEQ ID NO: 1016311 - DNA, 25 bp, Homo sapien
tgcgactcgtccttctccatggtgg

SEQ ID NO: 1016312 - DNA, 25 bp, Homo sapien
ggaagaaatcaaggtcacgaaatca

SEQ ID NO: 1016313 - DNA, 25 bp, Homo sapien
cggtttccgctctggcaggcgggtg

SEQ ID NO: 1016314 - DNA, 25 bp, Homo sapien
tggggcctagaaatgagtgtctccc

SEQ ID NO: 1016315 - DNA, 25 bp, Homo sapien
tcaaggtcacgaaatcaagtgactg

SEQ ID NO: 1016316 - DNA, 25 bp, Homo sapien
gcagcaaatccaggtggcaacacta

SEQ ID NO: 1016317 - DNA, 25 bp, Homo sapien
cataaccaccaggtaaaaaatgtgc

SEQ ID NO: 1016318 - DNA, 25 bp, Homo sapien
aggaggctgtgtcgggaatcaaact

SEQ ID NO: 1016319 - DNA, 25 bp, Homo sapien
taacatcagcaatagcacaaccaat

SEQ ID NO: 1016320 - DNA, 25 bp, Homo sapien
gaagctttgatcctttgtggagtta

SEQ ID NO: 1016321 - DNA, 25 bp, Homo sapien
ctccctgcacaaagatgcattcgct

SEQ ID NO: 1016322 - DNA, 25 bp, Homo sapien
tgtggagttaaggtacaccaccctc

SEQ ID NO: 1016323 - DNA, 25 bp, Homo sapien
gaagctcatcatatcttgttcaaga

SEQ ID NO: 1016324 - DNA, 25 bp, Homo sapien
ggtgatcattttttactatggccaa

SEQ ID NO: 1016325 - DNA, 25 bp, Homo sapien
gggtgatcattttttactatggcca

SEQ ID NO: 1016326 - DNA, 25 bp, Homo sapien
ggggtgatcattttttactatggcc

SEQ ID NO: 1016327 - DNA, 25 bp, Homo sapien
aggggtgatcattttttactatggc

SEQ ID NO: 1016328 - DNA, 25 bp, Homo sapien
catgagacgagttgagttgccggct

SEQ ID NO: 1016329 - DNA, 25 bp, Homo sapien
tatggtgatcctcgaagcctgtgaa

SEQ ID NO: 1016330 - DNA, 25 bp, Homo sapien
gattgtcttgtccatcccgcaaaag

SEQ ID NO: 1016331 - DNA, 25 bp, Homo sapien
tgaggacgccgagaatttgaaaccc

SEQ ID NO: 1016332 - DNA, 25 bp, Homo sapien
ggcggccgggtgcccatcttcttgc

SEQ ID NO: 1016333 - DNA, 25 bp, Homo sapien
gggcggccgggtgcccatcttcttg

SEQ ID NO: 1016334 - DNA, 25 bp, Homo sapien
ccagtggattccacaggcgttgaat

SEQ ID NO: 1016335 - DNA, 25 bp, Homo sapien
ggcagctcctatctcccccagctcc

SEQ ID NO: 1016336 - DNA, 25 bp, Homo sapien
catagctttgtgttgcagaggagcc

SEQ ID NO: 1016337 - DNA, 25 bp, Homo sapien
caggcgttgaatatcggtagatcca

SEQ ID NO: 1016338 - DNA, 25 bp, Homo sapien
ttcaaggtcacacaaaggctcagtt

SEQ ID NO: 1016339 - DNA, 25 bp, Homo sapien
tgcgctgaacactcttcaaggtcac

SEQ ID NO: 1016340 - DNA, 25 bp, Homo sapien
caaggtcacacaaaggctcagtttg

SEQ ID NO: 1016341 - DNA, 25 bp, Homo sapien
cgctgcgctgaacactcttcaaggt

SEQ ID NO: 1016342 - DNA, 25 bp, Homo sapien
tctttctgcaaacggccttttctag

SEQ ID NO: 1016343 - DNA, 25 bp, Homo sapien
tgtggcccgttctgaatgtctgttc

SEQ ID NO: 1016344 - DNA, 25 bp, Homo sapien
aggttcctgtgtgcagactgtggcc

SEQ ID NO: 1016345 - DNA, 25 bp, Homo sapien
tgtgcagactgtggcccgttctgaa

SEQ ID NO: 1016346 - DNA, 25 bp, Homo sapien
ctcaccctaggtgccttaaattctg

SEQ ID NO: 1016347 - DNA, 25 bp, Homo sapien
gttgaatttcatatctcaccctagg

SEQ ID NO: 1016348 - DNA, 25 bp, Homo sapien
ggtgccttaaattctgtgtgtatgt

SEQ ID NO: 1016349 - DNA, 25 bp, Homo sapien
gaatttcatatctcaccctaggtgc

SEQ ID NO: 1016350 - DNA, 25 bp, Homo sapien
ccacattagggatgaggcagtcatc

SEQ ID NO: 1016351 - DNA, 25 bp, Homo sapien
ggaaataattatggcttgctcacaa

SEQ ID NO: 1016352 - DNA, 25 bp, Homo sapien
cttgtctggaaataattatggcttg

SEQ ID NO: 1016353 - DNA, 25 bp, Homo sapien
tttcctcttgcgaaactgagaagcc

SEQ ID NO: 1016354 - DNA, 25 bp, Homo sapien
tagcacatggctggatttaacaaca

SEQ ID NO: 1016355 - DNA, 25 bp, Homo sapien
ggcccctacattcggtcatatgtca

SEQ ID NO: 1016356 - DNA, 25 bp, Homo sapien
tgtacacttagacatgcctgcaacc

SEQ ID NO: 1016357 - DNA, 25 bp, Homo sapien
taagtcactgtcttgcaaaggtcag

SEQ ID NO: 1016358 - DNA, 25 bp, Homo sapien
tagggggcacaacgtggttgcacat

SEQ ID NO: 1016359 - DNA, 25 bp, Homo sapien
ctagggggcacaacgtggttgcaca

SEQ ID NO: 1016360 - DNA, 25 bp, Homo sapien
attaggtactaaagtctggtgagcc

SEQ ID NO: 1016361 - DNA, 25 bp, Homo sapien
gatgtctgtggcgtcaccctcttga

SEQ ID NO: 1016362 - DNA, 25 bp, Homo sapien
ctgatcggcacagaagcggatggaa

SEQ ID NO: 1016363 - DNA, 25 bp, Homo sapien
tcttgaagattgatcattttactgc

SEQ ID NO: 1016364 - DNA, 25 bp, Homo sapien
gcgtcaccctcttgaagattgatca

SEQ ID NO: 1016365 - DNA, 25 bp, Homo sapien
tgtaggagtgtcagagccacacgga

SEQ ID NO: 1016366 - DNA, 25 bp, Homo sapien
gttttacggcaaatccaagaagcat

SEQ ID NO: 1016367 - DNA, 25 bp, Homo sapien
caagaagcattctcgtgtaggagtg

SEQ ID NO: 1016368 - DNA, 25 bp, Homo sapien
cacggatgtttacacctgcgtcggg

SEQ ID NO: 1016369 - DNA, 25 bp, Homo sapien
cgagaagatccccggcttaattctt

SEQ ID NO: 1016370 - DNA, 25 bp, Homo sapien
agccagagtgagaacccaccggaag

SEQ ID NO: 1016371 - DNA, 25 bp, Homo sapien
gaagatccccggcttaattcttgaa

SEQ ID NO: 1016372 - DNA, 25 bp, Homo sapien
agatccccggcttaattcttgaagt

SEQ ID NO: 1016373 - DNA, 25 bp, Homo sapien
aggaagaatatcatgggtggccaga

SEQ ID NO: 1016374 - DNA, 25 bp, Homo sapien
tgatgcctgaaaattataccccggg

SEQ ID NO: 1016375 - DNA, 25 bp, Homo sapien
atcatgggtggccagaattctgacc

SEQ ID NO: 1016376 - DNA, 25 bp, Homo sapien
tggttgacagaaagtagcagtgaga

SEQ ID NO: 1016377 - DNA, 25 bp, Homo sapien
gcaggtcctgccgtcgctatggagc

SEQ ID NO: 1016378 - DNA, 25 bp, Homo sapien
tgctcctgactagctcatctctgct

SEQ ID NO: 1016379 - DNA, 25 bp, Homo sapien
ctgccgtcgctatggagcaggtctg

SEQ ID NO: 1016380 - DNA, 25 bp, Homo sapien
cccagagtctgaagatcatttctcc

SEQ ID NO: 1016381 - DNA, 25 bp, Homo sapien
caggctatggaatgaactctgccaa

SEQ ID NO: 1016382 - DNA, 25 bp, Homo sapien
ggctatggaatgaactctgccaaga

SEQ ID NO: 1016383 - DNA, 25 bp, Homo sapien
gctatggaatgaactctgccaagaa

SEQ ID NO: 1016384 - DNA, 25 bp, Homo sapien
ctatggaatgaactctgccaagaag

SEQ ID NO: 1016385 - DNA, 25 bp, Homo sapien
aataaagctcctcaaagccccattt

SEQ ID NO: 1016386 - DNA, 25 bp, Homo sapien
ccttcgttggaaaaatgaacggctg

SEQ ID NO: 1016387 - DNA, 25 bp, Homo sapien
aaaatgaacggctgctgttgccgag

SEQ ID NO: 1016388 - DNA, 25 bp, Homo sapien
agggcacatccggttggccgcctcg

SEQ ID NO: 1016389 - DNA, 25 bp, Homo sapien
acttcatgccctttctcaagagtgg

SEQ ID NO: 1016390 - DNA, 25 bp, Homo sapien
gatctgctcatcctgcgacattgtg

SEQ ID NO: 1016391 - DNA, 25 bp, Homo sapien
tcaagagtggcctgcaggtctttca

SEQ ID NO: 1016392 - DNA, 25 bp, Homo sapien
tgaagcatctgaaccatttgggaga

SEQ ID NO: 1016393 - DNA, 25 bp, Homo sapien
ggcagccttttgtggcttaacttgc

SEQ ID NO: 1016394 - DNA, 25 bp, Homo sapien
ggcttaacttgcacttttgcaggaa

SEQ ID NO: 1016395 - DNA, 25 bp, Homo sapien
gccttttgtggcttaacttgcactt

SEQ ID NO: 1016396 - DNA, 25 bp, Homo sapien
tgtcccactccccttgggcccatcc

SEQ ID NO: 1016397 - DNA, 25 bp, Homo sapien
tagtacgggacgttaatcagatttg

SEQ ID NO: 1016398 - DNA, 25 bp, Homo sapien
ttgtaggtgagtcttcttcagtttc

SEQ ID NO: 1016399 - DNA, 25 bp, Homo sapien
tctctgtgtttgtaggtgagtcttc

SEQ ID NO: 1016400 - DNA, 25 bp, Homo sapien
cagaggctggactctactggttttc

SEQ ID NO: 1016401 - DNA, 25 bp, Homo sapien
aacgaatcccgtttcaaatgccttg

SEQ ID NO: 1016402 - DNA, 25 bp, Homo sapien
gcaacgaatcccgtttcaaatgcct

SEQ ID NO: 1016403 - DNA, 25 bp, Homo sapien
atggtggcccaacccggcaacgaat

SEQ ID NO: 1016404 - DNA, 25 bp, Homo sapien
ccggcaacgaatcccgtttcaaatg

SEQ ID NO: 1016405 - DNA, 25 bp, Homo sapien
tcctggtccttgaggtgcttgtcca

SEQ ID NO: 1016406 - DNA, 25 bp, Homo sapien
gaagacagtggtagttttggagtcc

SEQ ID NO: 1016407 - DNA, 25 bp, Homo sapien
tatactgggaagaccgtgggtgaat

SEQ ID NO: 1016408 - DNA, 25 bp, Homo sapien
gggctcaaacctacggctctcattg

SEQ ID NO: 1016409 - DNA, 25 bp, Homo sapien
cagggacttccagcgtaggtataca

SEQ ID NO: 1016410 - DNA, 25 bp, Homo sapien
aacgatggactcgagcctttccggg

SEQ ID NO: 1016411 - DNA, 25 bp, Homo sapien
tggactgtgtttgaggaaacccagc

SEQ ID NO: 1016412 - DNA, 25 bp, Homo sapien
taccaacgtgtgaagagtacgcatt

SEQ ID NO: 1016413 - DNA, 25 bp, Homo sapien
gggttcctgccaccaactgagagga

SEQ ID NO: 1016414 - DNA, 25 bp, Homo sapien
ggttcctgccaccaactgagaggac

SEQ ID NO: 1016415 - DNA, 25 bp, Homo sapien
agggttcctgccaccaactgagagg

SEQ ID NO: 1016416 - DNA, 25 bp, Homo sapien
tgctttgcatgctttaaacgaggaa

SEQ ID NO: 1016417 - DNA, 25 bp, Homo sapien
cttgttgagtgggtcgtgtgtttct

SEQ ID NO: 1016418 - DNA, 25 bp, Homo sapien
tgatgaatgttttgcgaggaggtaa

SEQ ID NO: 1016419 - DNA, 25 bp, Homo sapien
tgaaggtcacccagcgcttgttgag

SEQ ID NO: 1016420 - DNA, 25 bp, Homo sapien
ctcacaaaatgagttccttgcaacc

SEQ ID NO: 1016421 - DNA, 25 bp, Homo sapien
gattcatcgctgctcacaaaatgag

SEQ ID NO: 1016422 - DNA, 25 bp, Homo sapien
gagttccttgcaacccattaaaatc

SEQ ID NO: 1016423 - DNA, 25 bp, Homo sapien
tgaagcagattcatcgctgctcaca

SEQ ID NO: 1016424 - DNA, 25 bp, Homo sapien
tgactggctcgcatgttccagaagg

SEQ ID NO: 1016425 - DNA, 25 bp, Homo sapien
ctggctcgcatgttccagaaggtga

SEQ ID NO: 1016426 - DNA, 25 bp, Homo sapien
tcagctagcgctgactggctcgcat

SEQ ID NO: 1016427 - DNA, 25 bp, Homo sapien
agcgctgactggctcgcatgttcca

SEQ ID NO: 1016428 - DNA, 25 bp, Homo sapien
actggccggctgagctgacctcttc

SEQ ID NO: 1016429 - DNA, 25 bp, Homo sapien
gggtgttctttagctaactctgcca

SEQ ID NO: 1016430 - DNA, 25 bp, Homo sapien
aaacagaaaagtgggaacagagcca

SEQ ID NO: 1016431 - DNA, 25 bp, Homo sapien
catctaatcggtcaattttctgaga

SEQ ID NO: 1016432 - DNA, 25 bp, Homo sapien
ggaacaccttcagcttccaacttca

SEQ ID NO: 1016433 - DNA, 25 bp, Homo sapien
ttggtcaactctgggatgtgtgcac

SEQ ID NO: 1016434 - DNA, 25 bp, Homo sapien
ttggtctttaagatgttcatcagtg

SEQ ID NO: 1016435 - DNA, 25 bp, Homo sapien
gtcgctgagcttttttggtctttaa

SEQ ID NO: 1016436 - DNA, 25 bp, Homo sapien
ttaagatgttcatcagtgctgggtg

SEQ ID NO: 1016437 - DNA, 25 bp, Homo sapien
gatgttcatcagtgctgggtgggaa

SEQ ID NO: 1016438 - DNA, 25 bp, Homo sapien
ctgggtgggaaggagccactagatg

SEQ ID NO: 1016439 - DNA, 25 bp, Homo sapien
ggtgggaaggagccactagatgcat

SEQ ID NO: 1016440 - DNA, 25 bp, Homo sapien
tgggtgggaaggagccactagatgc

SEQ ID NO: 1016441 - DNA, 25 bp, Homo sapien
gggtgggaaggagccactagatgca

SEQ ID NO: 1016442 - DNA, 25 bp, Homo sapien
gtcagtttctgtaagcgaaggttga

SEQ ID NO: 1016443 - DNA, 25 bp, Homo sapien
tcagtttctgtaagcgaaggttgag

SEQ ID NO: 1016444 - DNA, 25 bp, Homo sapien
cagtttctgtaagcgaaggttgaga

SEQ ID NO: 1016445 - DNA, 25 bp, Homo sapien
tctgcttgctgaaaccacagagtgg

SEQ ID NO: 1016446 - DNA, 25 bp, Homo sapien
ctgaaaccacagagtggttcttgag

SEQ ID NO: 1016447 - DNA, 25 bp, Homo sapien
ccacagagtggttcttgaggagttc

SEQ ID NO: 1016448 - DNA, 25 bp, Homo sapien
aaaccacagagtggttcttgaggag

SEQ ID NO: 1016449 - DNA, 25 bp, Homo sapien
ctgtcgaacctcttgatctaaagac

SEQ ID NO: 1016450 - DNA, 25 bp, Homo sapien
gaacctcttgatctaaagacatcaa

SEQ ID NO: 1016451 - DNA, 25 bp, Homo sapien
tgtcgaacctcttgatctaaagaca

SEQ ID NO: 1016452 - DNA, 25 bp, Homo sapien
tcgaacctcttgatctaaagacatc

SEQ ID NO: 1016453 - DNA, 25 bp, Homo sapien
gataggtaggccaattggaataggc

SEQ ID NO: 1016454 - DNA, 25 bp, Homo sapien
taggtaggccaattggaataggctt

SEQ ID NO: 1016455 - DNA, 25 bp, Homo sapien
ctgaggataggtaggccaattggaa

SEQ ID NO: 1016456 - DNA, 25 bp, Homo sapien
ggtaggccaattggaataggctttg

SEQ ID NO: 1016457 - DNA, 25 bp, Homo sapien
gatgcgtgtatctccttaattatat

SEQ ID NO: 1016458 - DNA, 25 bp, Homo sapien
tagttcttcagatgcgtgtatctcc

SEQ ID NO: 1016459 - DNA, 25 bp, Homo sapien
tcagatgcgtgtatctccttaatta

SEQ ID NO: 1016460 - DNA, 25 bp, Homo sapien
tcttcagatgcgtgtatctccttaa

SEQ ID NO: 1016461 - DNA, 25 bp, Homo sapien
gctgagggtatgttggccaatttga

SEQ ID NO: 1016462 - DNA, 25 bp, Homo sapien
gctcccctttcacatacagctgagg

SEQ ID NO: 1016463 - DNA, 25 bp, Homo sapien
tcctccaatatatcgaatgtttcat

SEQ ID NO: 1016464 - DNA, 25 bp, Homo sapien
tgagtaagcttttaatccttgccga

SEQ ID NO: 1016465 - DNA, 25 bp, Homo sapien
aatcatgaactgctcccaatgtaat

SEQ ID NO: 1016466 - DNA, 25 bp, Homo sapien
tatttagcacgacattgtgaaatac

SEQ ID NO: 1016467 - DNA, 25 bp, Homo sapien
tcatgaactgctcccaatgtaatta

SEQ ID NO: 1016468 - DNA, 25 bp, Homo sapien
tttctcctctcagtataggcagcaa

SEQ ID NO: 1016469 - DNA, 25 bp, Homo sapien
tattgacccttctcataaacagtag

SEQ ID NO: 1016470 - DNA, 25 bp, Homo sapien
tacttgtaatctgctctagagtgaa

SEQ ID NO: 1016471 - DNA, 25 bp, Homo sapien
taagcattgtcatcattctaaggat

SEQ ID NO: 1016472 - DNA, 25 bp, Homo sapien
taaatagattctcgtatgtggcaga

SEQ ID NO: 1016473 - DNA, 25 bp, Homo sapien
tatatgcagtaaacgccaactgaag

SEQ ID NO: 1016474 - DNA, 25 bp, Homo sapien
tgcttccagagccataagcacattt

SEQ ID NO: 1016475 - DNA, 25 bp, Homo sapien
tctagaataagccatttgctcagga

SEQ ID NO: 1016476 - DNA, 25 bp, Homo sapien
gatcaaaaggtcattccgagtaaat

SEQ ID NO: 1016477 - DNA, 25 bp, Homo sapien
tgaatgcacttggattgtacggagt

SEQ ID NO: 1016478 - DNA, 25 bp, Homo sapien
tgagagatatgtgccctttaaatgg

SEQ ID NO: 1016479 - DNA, 25 bp, Homo sapien
tataaactgaatcatgcgcctgtcc

SEQ ID NO: 1016480 - DNA, 25 bp, Homo sapien
gtcctcatttggcttcacgttagaa

SEQ ID NO: 1016481 - DNA, 25 bp, Homo sapien
cttcttgagagcactctcactgcct

SEQ ID NO: 1016482 - DNA, 25 bp, Homo sapien
gccttggtgataggggtcattttgc

SEQ ID NO: 1016483 - DNA, 25 bp, Homo sapien
tgaggagtgtggtggccttcttgag

SEQ ID NO: 1016484 - DNA, 25 bp, Homo sapien
tgagagcactctcactgccttggtg

SEQ ID NO: 1016485 - DNA, 25 bp, Homo sapien
gttcccatcatactgcggcagctga

SEQ ID NO: 1016486 - DNA, 25 bp, Homo sapien
acccttgctgggctctaactcgctg

SEQ ID NO: 1016487 - DNA, 25 bp, Homo sapien
tgggctctaactcgctgtctctttc

SEQ ID NO: 1016488 - DNA, 25 bp, Homo sapien
gatttctatattctgacatccagtt

SEQ ID NO: 1016489 - DNA, 25 bp, Homo sapien
tctcatccttttgattcaacttatt

SEQ ID NO: 1016490 - DNA, 25 bp, Homo sapien
aaagattgttctagtctttttcaat

SEQ ID NO: 1016491 - DNA, 25 bp, Homo sapien
gattgttctagtctttttcaatcct

SEQ ID NO: 1016492 - DNA, 25 bp, Homo sapien
tcttatgtgctattgaagtccttca

SEQ ID NO: 1016493 - DNA, 25 bp, Homo sapien
ataaagcggaggtcggccctgcttg

SEQ ID NO: 1016494 - DNA, 25 bp, Homo sapien
accaaagtgtacctgcccgaggctg

SEQ ID NO: 1016495 - DNA, 25 bp, Homo sapien
ctgtccgataaagcggaggtcggcc

SEQ ID NO: 1016496 - DNA, 25 bp, Homo sapien
ccctgcttgctgacgagaccgtaaa

SEQ ID NO: 1016497 - DNA, 25 bp, Homo sapien
ttgcttcccagccagagcgtctcat

SEQ ID NO: 1016498 - DNA, 25 bp, Homo sapien
tgtgaggtcgtttttcggagcagcc

SEQ ID NO: 1016499 - DNA, 25 bp, Homo sapien
ttctagctcgggcatctgcctcggg

SEQ ID NO: 1016500 - DNA, 25 bp, Homo sapien
taagtaggcgccagagttctagctc

SEQ ID NO: 1016501 - DNA, 25 bp, Homo sapien
tgccgcgcatgtgccgaccgtgtag

SEQ ID NO: 1016502 - DNA, 25 bp, Homo sapien
tgtgccgaccgtgtagggaagagct

SEQ ID NO: 1016503 - DNA, 25 bp, Homo sapien
cgcgctaagaatccggatataaaac

SEQ ID NO: 1016504 - DNA, 25 bp, Homo sapien
agctgggttctgagtccgcgctaag

SEQ ID NO: 1016505 - DNA, 25 bp, Homo sapien
tgaacttcctgactcctcggcggcg

SEQ ID NO: 1016506 - DNA, 25 bp, Homo sapien
aacttcctgactcctcggcggcggt

SEQ ID NO: 1016507 - DNA, 25 bp, Homo sapien
cttgaacttcctgactcctcggcgg

SEQ ID NO: 1016508 - DNA, 25 bp, Homo sapien
gactcctcggcggcggtggcggcgg

SEQ ID NO: 1016509 - DNA, 25 bp, Homo sapien
tcccgtagcgactgggtctccgcgg

SEQ ID NO: 1016510 - DNA, 25 bp, Homo sapien
tgctcccgtagcgactgggtctccg

SEQ ID NO: 1016511 - DNA, 25 bp, Homo sapien
ctggctgctcccgtagcgactgggt

SEQ ID NO: 1016512 - DNA, 25 bp, Homo sapien
gctgctcccgtagcgactgggtctc

SEQ ID NO: 1016513 - DNA, 25 bp, Homo sapien
aaacaatactgggtgactgctggac

SEQ ID NO: 1016514 - DNA, 25 bp, Homo sapien
gagatcaagtatcccgctagccaca

SEQ ID NO: 1016515 - DNA, 25 bp, Homo sapien
aaagacttagggcttggcccgcctg

SEQ ID NO: 1016516 - DNA, 25 bp, Homo sapien
tggtaaaaaagctgccggtaggcac

SEQ ID NO: 1016517 - DNA, 25 bp, Homo sapien
aaaatgagccccataccagactgga

SEQ ID NO: 1016518 - DNA, 25 bp, Homo sapien
tctttttgctggagacataccctct

SEQ ID NO: 1016519 - DNA, 25 bp, Homo sapien
tattgtccacaagttcaagtttccc

SEQ ID NO: 1016520 - DNA, 25 bp, Homo sapien
gagccagactcataaccttgcaaaa

SEQ ID NO: 1016521 - DNA, 25 bp, Homo sapien
attttaaccttatcatcagtaggag

SEQ ID NO: 1016522 - DNA, 25 bp, Homo sapien
cgatcgcgacttctactttcattta

SEQ ID NO: 1016523 - DNA, 25 bp, Homo sapien
ggagatctggccttaccaattttct

SEQ ID NO: 1016524 - DNA, 25 bp, Homo sapien
ttgagatcgccttctaagggtaggg

SEQ ID NO: 1016525 - DNA, 25 bp, Homo sapien
tctgtctttggatttacctcttaaa

SEQ ID NO: 1016526 - DNA, 25 bp, Homo sapien
cttgatttatcacgtggttttggag

SEQ ID NO: 1016527 - DNA, 25 bp, Homo sapien
tctttctaaggatcggctcttggct

SEQ ID NO: 1016528 - DNA, 25 bp, Homo sapien
agtggagacctgcttcttcttgatt

SEQ ID NO: 1016529 - DNA, 25 bp, Homo sapien
ctttatcagtttcagaccgttttga

SEQ ID NO: 1016530 - DNA, 25 bp, Homo sapien
aacccaattctatcatcaagctcag

SEQ ID NO: 1016531 - DNA, 25 bp, Homo sapien
caaagttaagagtttcagcctacac

SEQ ID NO: 1016532 - DNA, 25 bp, Homo sapien
aaggagtgccttagcaaactaggta

SEQ ID NO: 1016533 - DNA, 25 bp, Homo sapien
cagcctacactgttcatgaagtaat

SEQ ID NO: 1016534 - DNA, 25 bp, Homo sapien
tacaacaggcctttctacagcttaa

SEQ ID NO: 1016535 - DNA, 25 bp, Homo sapien
cacaagtacctttcagtgagtttta

SEQ ID NO: 1016536 - DNA, 25 bp, Homo sapien
gtcagattgtaaataggtttgtctc

SEQ ID NO: 1016537 - DNA, 25 bp, Homo sapien
tccaggtttggtcacaactattcaa

SEQ ID NO: 1016538 - DNA, 25 bp, Homo sapien
tattttggtgttattgcaggcaaac

SEQ ID NO: 1016539 - DNA, 25 bp, Homo sapien
cttactcaggtgactacagtgatat

SEQ ID NO: 1016540 - DNA, 25 bp, Homo sapien
tcataccggtaaagtcactgattct

SEQ ID NO: 1016541 - DNA, 25 bp, Homo sapien
taagaaaaggcacattagcctaaag

SEQ ID NO: 1016542 - DNA, 25 bp, Homo sapien
ggaacgagacctccttctaatggga

SEQ ID NO: 1016543 - DNA, 25 bp, Homo sapien
ttggagacctgctacgtctgagtgg

SEQ ID NO: 1016544 - DNA, 25 bp, Homo sapien
tactgaggatatcatctcgaggtcg

SEQ ID NO: 1016545 - DNA, 25 bp, Homo sapien
gagatctacttcttcttcgggttgg

SEQ ID NO: 1016546 - DNA, 25 bp, Homo sapien
tgaccagagtgcactcagaccatgc

SEQ ID NO: 1016547 - DNA, 25 bp, Homo sapien
gagagatatgtaaagatggctataa

SEQ ID NO: 1016548 - DNA, 25 bp, Homo sapien
tccatttctaggaatacagcataca

SEQ ID NO: 1016549 - DNA, 25 bp, Homo sapien
taacctattactgactacatatgct

SEQ ID NO: 1016550 - DNA, 25 bp, Homo sapien
agcaccacggttgtatacacaggca

SEQ ID NO: 1016551 - DNA, 25 bp, Homo sapien
atggggataaatacctactgtttct

SEQ ID NO: 1016552 - DNA, 25 bp, Homo sapien
attcgtacagcaccacggttgtata

SEQ ID NO: 1016553 - DNA, 25 bp, Homo sapien
taagaaattcttcccatggatatga

SEQ ID NO: 1016554 - DNA, 25 bp, Homo sapien
ttcgtctacgaccaccgcgtgatcg

SEQ ID NO: 1016555 - DNA, 25 bp, Homo sapien
accgccttcgcaagcgtgatctgct

SEQ ID NO: 1016556 - DNA, 25 bp, Homo sapien
tgcttctgctccttcgtctacgacc

SEQ ID NO: 1016557 - DNA, 25 bp, Homo sapien
gcgtgatcgagaccgccttcgcaag

SEQ ID NO: 1016558 - DNA, 25 bp, Homo sapien
ttatcatcagacgaagattcctgct

SEQ ID NO: 1016559 - DNA, 25 bp, Homo sapien
catcagacgaagattcctgctcaac

SEQ ID NO: 1016560 - DNA, 25 bp, Homo sapien
gacgaagattcctgctcaactttca

SEQ ID NO: 1016561 - DNA, 25 bp, Homo sapien
tcagacgaagattcctgctcaactt

SEQ ID NO: 1016562 - DNA, 25 bp, Homo sapien
tcaagaaagctatacccgtacttcc

SEQ ID NO: 1016563 - DNA, 25 bp, Homo sapien
tgtcagaaccgcctgaaagctcaag

SEQ ID NO: 1016564 - DNA, 25 bp, Homo sapien
ggatgtcagaaccgcctgaaagctc

SEQ ID NO: 1016565 - DNA, 25 bp, Homo sapien
cctgaaagctcaagaaagctatacc

SEQ ID NO: 1016566 - DNA, 25 bp, Homo sapien
ctgaacaattgcctgcctttggatt

SEQ ID NO: 1016567 - DNA, 25 bp, Homo sapien
gcctgcctttggattcttctctgtt

SEQ ID NO: 1016568 - DNA, 25 bp, Homo sapien
tctctgttctattagggcttcttca

SEQ ID NO: 1016569 - DNA, 25 bp, Homo sapien
ttcctctacatcaaagtcttcaagg

SEQ ID NO: 1016570 - DNA, 25 bp, Homo sapien
gatcgtgttctcgtactgctctggg

SEQ ID NO: 1016571 - DNA, 25 bp, Homo sapien
tcatctggagatggtgatcgtgttc

SEQ ID NO: 1016572 - DNA, 25 bp, Homo sapien
actctttaacatcagcagctactcg

SEQ ID NO: 1016573 - DNA, 25 bp, Homo sapien
actgaggcctcaaatgtatcaacat

SEQ ID NO: 1016574 - DNA, 25 bp, Homo sapien
agcagaagcaacatgtctaatcttt

SEQ ID NO: 1016575 - DNA, 25 bp, Homo sapien
tcaggatatgtgaactaataaaaac

SEQ ID NO: 1016576 - DNA, 25 bp, Homo sapien
aattcagagaaaagcgtcgccagga

SEQ ID NO: 1016577 - DNA, 25 bp, Homo sapien
attataaagttacagagctaacaat

SEQ ID NO: 1016578 - DNA, 25 bp, Homo sapien
tcaaaatacgcagcaaacatatcat

SEQ ID NO: 1016579 - DNA, 25 bp, Homo sapien
agattctgtaaacatatcaggtgcc

SEQ ID NO: 1016580 - DNA, 25 bp, Homo sapien
taaacatatcaggtgccaacaactt

SEQ ID NO: 1016581 - DNA, 25 bp, Homo sapien
tacgcagcaaacatatcatcagatt

SEQ ID NO: 1016582 - DNA, 25 bp, Homo sapien
gataatagccttctgcatcggtcca

SEQ ID NO: 1016583 - DNA, 25 bp, Homo sapien
ctctgaggttgggattctctttgaa

SEQ ID NO: 1016584 - DNA, 25 bp, Homo sapien
tgccagcggcccgaagacgagcact

SEQ ID NO: 1016585 - DNA, 25 bp, Homo sapien
tgcatcggtccagttatctctgagg

SEQ ID NO: 1016586 - DNA, 25 bp, Homo sapien
tgaatacaccttgcccagtgtagcc

SEQ ID NO: 1016587 - DNA, 25 bp, Homo sapien
tgtaacgtttatctaggacttcacc

SEQ ID NO: 1016588 - DNA, 25 bp, Homo sapien
ggctcgtacaacattactgaataca

SEQ ID NO: 1016589 - DNA, 25 bp, Homo sapien
tcttgcattatctctggctcgtaca

SEQ ID NO: 1016590 - DNA, 25 bp, Homo sapien
tgagaggctcgaataccagacaaag

SEQ ID NO: 1016591 - DNA, 25 bp, Homo sapien
agagtctcagacaatgaaatttgtc

SEQ ID NO: 1016592 - DNA, 25 bp, Homo sapien
gctgcttgtgatagaagtgcctgaa

SEQ ID NO: 1016593 - DNA, 25 bp, Homo sapien
taccagacaaagatgctgcttgtga

SEQ ID NO: 1016594 - DNA, 25 bp, Homo sapien
ttttaaggagtttcaatgccaggaa

SEQ ID NO: 1016595 - DNA, 25 bp, Homo sapien
tcaagatgtacagcgcagcttggct

SEQ ID NO: 1016596 - DNA, 25 bp, Homo sapien
ttggtgcacactttaaatctatcag

SEQ ID NO: 1016597 - DNA, 25 bp, Homo sapien
ttcactgtccgatttccaagaaaga

SEQ ID NO: 1016598 - DNA, 25 bp, Homo sapien
taaagcattccaggattggtgcaca

SEQ ID NO: 1016599 - DNA, 25 bp, Homo sapien
attctccaagttgcgaacacgaccc

SEQ ID NO: 1016600 - DNA, 25 bp, Homo sapien
ctccaagttgcgaacacgacccaaa

SEQ ID NO: 1016601 - DNA, 25 bp, Homo sapien
ggaattctccaagttgcgaacacga

SEQ ID NO: 1016602 - DNA, 25 bp, Homo sapien
gaattctccaagttgcgaacacgac

SEQ ID NO: 1016603 - DNA, 25 bp, Homo sapien
tttgcatattctttgacatgaacca

SEQ ID NO: 1016604 - DNA, 25 bp, Homo sapien
gaaattacgagctaaaggctttgga

SEQ ID NO: 1016605 - DNA, 25 bp, Homo sapien
tccacaatggtcacaaagacgctca

SEQ ID NO: 1016606 - DNA, 25 bp, Homo sapien
caaaaatcagctccgtcattaaggt

SEQ ID NO: 1016607 - DNA, 25 bp, Homo sapien
gcataacactatagccttaggcagt

SEQ ID NO: 1016608 - DNA, 25 bp, Homo sapien
cagacttaactttcagttgccagag

SEQ ID NO: 1016609 - DNA, 25 bp, Homo sapien
cacaaattccgagttgggacttgaa

SEQ ID NO: 1016610 - DNA, 25 bp, Homo sapien
tccgaagctgctatatgatcccaaa

SEQ ID NO: 1016611 - DNA, 25 bp, Homo sapien
tcaagccaggaataattaatacaaa

SEQ ID NO: 1016612 - DNA, 25 bp, Homo sapien
ggaatttaattcaagccaggaataa

SEQ ID NO: 1016613 - DNA, 25 bp, Homo sapien
agggaatttaattcaagccaggaat

SEQ ID NO: 1016614 - DNA, 25 bp, Homo sapien
aattcaagccaggaataattaatac

SEQ ID NO: 1016615 - DNA, 25 bp, Homo sapien
gccgacccaaaatcgcaaagcttta

SEQ ID NO: 1016616 - DNA, 25 bp, Homo sapien
gaagccgacccaaaatcgcaaagct

SEQ ID NO: 1016617 - DNA, 25 bp, Homo sapien
caacatgtgaagccgacccaaaatc

SEQ ID NO: 1016618 - DNA, 25 bp, Homo sapien
acatgtgaagccgacccaaaatcgc

SEQ ID NO: 1016619 - DNA, 25 bp, Homo sapien
tgcggtttccaccacatatgatggc

SEQ ID NO: 1016620 - DNA, 25 bp, Homo sapien
gtttccaccacatatgatggcccag

SEQ ID NO: 1016621 - DNA, 25 bp, Homo sapien
gacattaagtatgcggtttccacca

SEQ ID NO: 1016622 - DNA, 25 bp, Homo sapien
aaaacagtgcttagacattaagtat

SEQ ID NO: 1016623 - DNA, 25 bp, Homo sapien
tatggttcccttcctcatgaatgaa

SEQ ID NO: 1016624 - DNA, 25 bp, Homo sapien
gctatggttcccttcctcatgaatg

SEQ ID NO: 1016625 - DNA, 25 bp, Homo sapien
cttgctatggttcccttcctcatga

SEQ ID NO: 1016626 - DNA, 25 bp, Homo sapien
tgctatggttcccttcctcatgaat

SEQ ID NO: 1016627 - DNA, 25 bp, Homo sapien
cttcattccacctgaggaggatgaa

SEQ ID NO: 1016628 - DNA, 25 bp, Homo sapien
tgatcaagactcctgtcacaactac

SEQ ID NO: 1016629 - DNA, 25 bp, Homo sapien
ctcttgcccgacatgatcaagactc

SEQ ID NO: 1016630 - DNA, 25 bp, Homo sapien
gacatgatcaagactcctgtcacaa

SEQ ID NO: 1016631 - DNA, 25 bp, Homo sapien
tgcccgacatgatcaagactcctgt

SEQ ID NO: 1016632 - DNA, 25 bp, Homo sapien
gtcttctaaagtcgaggattttcca

SEQ ID NO: 1016633 - DNA, 25 bp, Homo sapien
gagcagtcttctaaagtcgaggatt

SEQ ID NO: 1016634 - DNA, 25 bp, Homo sapien
caagagcagtcttctaaagtcgagg

SEQ ID NO: 1016635 - DNA, 25 bp, Homo sapien
cagtcttctaaagtcgaggattttc

SEQ ID NO: 1016636 - DNA, 25 bp, Homo sapien
taatatacgaggatagagaaaactg

SEQ ID NO: 1016637 - DNA, 25 bp, Homo sapien
cttttctcatttcgcctttggtgga

SEQ ID NO: 1016638 - DNA, 25 bp, Homo sapien
aggtgctaatcagcctcaaccaagg

SEQ ID NO: 1016639 - DNA, 25 bp, Homo sapien
tggactataaccacaatcttcatgc

SEQ ID NO: 1016640 - DNA, 25 bp, Homo sapien
ttccagtatagagttcgtataaggt

SEQ ID NO: 1016641 - DNA, 25 bp, Homo sapien
tccagtatagagttcgtataaggtg

SEQ ID NO: 1016642 - DNA, 25 bp, Homo sapien
ctttgaacacaccttttcgaatcat

SEQ ID NO: 1016643 - DNA, 25 bp, Homo sapien
tatttcataggtaacagggagccaa

SEQ ID NO: 1016644 - DNA, 25 bp, Homo sapien
tttaagcagggataggaacatgacc

SEQ ID NO: 1016645 - DNA, 25 bp, Homo sapien
taggaattggtcgacagcaaaaagg

SEQ ID NO: 1016646 - DNA, 25 bp, Homo sapien
tccaaagaagatgtgacgagggcct

SEQ ID NO: 1016647 - DNA, 25 bp, Homo sapien
aatggtgctcataacagtaactttc

SEQ ID NO: 1016648 - DNA, 25 bp, Homo sapien
cttagttggattaatggtgctcata

SEQ ID NO: 1016649 - DNA, 25 bp, Homo sapien
tagttggattaatggtgctcataac

SEQ ID NO: 1016650 - DNA, 25 bp, Homo sapien
gattaatggtgctcataacagtaac

SEQ ID NO: 1016651 - DNA, 25 bp, Homo sapien
tagctggtgtactttcttacgttgg

SEQ ID NO: 1016652 - DNA, 25 bp, Homo sapien
tacgttggtcttcaggaagtctctg

SEQ ID NO: 1016653 - DNA, 25 bp, Homo sapien
aatctggtccaacaagtcctttagc

SEQ ID NO: 1016654 - DNA, 25 bp, Homo sapien
cctggttgatgctaattcgtttagc

SEQ ID NO: 1016655 - DNA, 25 bp, Homo sapien
caaacccttggagtttcttcatctt

SEQ ID NO: 1016656 - DNA, 25 bp, Homo sapien
tcaaacccttggagtttcttcatct

SEQ ID NO: 1016657 - DNA, 25 bp, Homo sapien
aaacccttggagtttcttcatcttg

SEQ ID NO: 1016658 - DNA, 25 bp, Homo sapien
aacccttggagtttcttcatcttgt

SEQ ID NO: 1016659 - DNA, 25 bp, Homo sapien
aaactgctgtgaaatttcttcagtc

SEQ ID NO: 1016660 - DNA, 25 bp, Homo sapien
aactgctgtgaaatttcttcagtct

SEQ ID NO: 1016661 - DNA, 25 bp, Homo sapien
ataaactgctgtgaaatttcttcag

SEQ ID NO: 1016662 - DNA, 25 bp, Homo sapien
tgctgtgaaatttcttcagtctttg

SEQ ID NO: 1016663 - DNA, 25 bp, Homo sapien
tgtgaactgcaaccatatacattag

SEQ ID NO: 1016664 - DNA, 25 bp, Homo sapien
gtctgctaagaacaaatcaaccacc

SEQ ID NO: 1016665 - DNA, 25 bp, Homo sapien
tatcatgcttcctcaaatttgctgg

SEQ ID NO: 1016666 - DNA, 25 bp, Homo sapien
ctaggaaaacgtgaatataaacagc

SEQ ID NO: 1016667 - DNA, 25 bp, Homo sapien
aggaacagacccctttcggcactga

SEQ ID NO: 1016668 - DNA, 25 bp, Homo sapien
cggcactgactacaccaagggcatg

SEQ ID NO: 1016669 - DNA, 25 bp, Homo sapien
ttcggcactgactacaccaagggca

SEQ ID NO: 1016670 - DNA, 25 bp, Homo sapien
ctttcggcactgactacaccaaggg

SEQ ID NO: 1016671 - DNA, 25 bp, Homo sapien
ctgaaggcgctctatccatcaagcg

SEQ ID NO: 1016672 - DNA, 25 bp, Homo sapien
taactatgccacagttgcaatgcca

SEQ ID NO: 1016673 - DNA, 25 bp, Homo sapien
caagatcagttatcacacatgcagg

SEQ ID NO: 1016674 - DNA, 25 bp, Homo sapien
cagagatgttgatggtttagcttac

SEQ ID NO: 1016675 - DNA, 25 bp, Homo sapien
gcatcgtttctatgtcactaggaac

SEQ ID NO: 1016676 - DNA, 25 bp, Homo sapien
cagaattaggcctcaacatttgtaa

SEQ ID NO: 1016677 - DNA, 25 bp, Homo sapien
gcctttaaatatgaggactttcaga

SEQ ID NO: 1016678 - DNA, 25 bp, Homo sapien
aaaatttcattacgttgtctagcct

SEQ ID NO: 1016679 - DNA, 25 bp, Homo sapien
gctgctttgttcaagagtggaaggt

SEQ ID NO: 1016680 - DNA, 25 bp, Homo sapien
agcagctgctttgttcaagagtgga

SEQ ID NO: 1016681 - DNA, 25 bp, Homo sapien
aaagcagctgctttgttcaagagtg

SEQ ID NO: 1016682 - DNA, 25 bp, Homo sapien
ttgttcaagagtggaaggtttatgc

SEQ ID NO: 1016683 - DNA, 25 bp, Homo sapien
cttcactttacaataagtgagtgtc

SEQ ID NO: 1016684 - DNA, 25 bp, Homo sapien
tttacaataagtgagtgtcaactgt

SEQ ID NO: 1016685 - DNA, 25 bp, Homo sapien
tacaataagtgagtgtcaactgttt

SEQ ID NO: 1016686 - DNA, 25 bp, Homo sapien
cactttacaataagtgagtgtcaac

SEQ ID NO: 1016687 - DNA, 25 bp, Homo sapien
tggtaattttggctaggtttacatc

SEQ ID NO: 1016688 - DNA, 25 bp, Homo sapien
tcctgaattataccccataacctac

SEQ ID NO: 1016689 - DNA, 25 bp, Homo sapien
taatctcactacactgaaagctgac

SEQ ID NO: 1016690 - DNA, 25 bp, Homo sapien
ggtttacctgacttaccagcactga

SEQ ID NO: 1016691 - DNA, 25 bp, Homo sapien
agaaggcgtcgaatggcctgtgccc

SEQ ID NO: 1016692 - DNA, 25 bp, Homo sapien
tcagaccccttggagaaggcgtcga

SEQ ID NO: 1016693 - DNA, 25 bp, Homo sapien
tgtctcagcaaatcagaccccttgg

SEQ ID NO: 1016694 - DNA, 25 bp, Homo sapien
agctggtgtctcagcaaatcagacc

SEQ ID NO: 1016695 - DNA, 25 bp, Homo sapien
tgtcttaaattgttgctaaatgttt

SEQ ID NO: 1016696 - DNA, 25 bp, Homo sapien
ccaagctgatttaaacgattttgtc

SEQ ID NO: 1016697 - DNA, 25 bp, Homo sapien
aaatgtttatctacacatgctgtca

SEQ ID NO: 1016698 - DNA, 25 bp, Homo sapien
tatctacacatgctgtcagaaataa

SEQ ID NO: 1016699 - DNA, 25 bp, Homo sapien
aaacagcaaagattacatatatttc

SEQ ID NO: 1016700 - DNA, 25 bp, Homo sapien
aaattctcttctaccatgttaataa

SEQ ID NO: 1016701 - DNA, 25 bp, Homo sapien
cagcaaagattacatatatttctga

SEQ ID NO: 1016702 - DNA, 25 bp, Homo sapien
ctcttctaccatgttaataatacaa

SEQ ID NO: 1016703 - DNA, 25 bp, Homo sapien
aaatgtgcatgcttgttgtaattag

SEQ ID NO: 1016704 - DNA, 25 bp, Homo sapien
aatgtgcatgcttgttgtaattagg

SEQ ID NO: 1016705 - DNA, 25 bp, Homo sapien
ttagtaagtctaaaccgtgaagaga

SEQ ID NO: 1016706 - DNA, 25 bp, Homo sapien
tgtctttaaatggagcaaaacccac

SEQ ID NO: 1016707 - DNA, 25 bp, Homo sapien
gacggggtgtaggttcagaggtggc

SEQ ID NO: 1016708 - DNA, 25 bp, Homo sapien
ttcatgtctttaaatggagcaaaac

SEQ ID NO: 1016709 - DNA, 25 bp, Homo sapien
caaattgtcaactactttgggtgaa

SEQ ID NO: 1016710 - DNA, 25 bp, Homo sapien
cacctgtgacgccttaattaaaagg

SEQ ID NO: 1016711 - DNA, 25 bp, Homo sapien
ggtgggaaaatcactacccatttca

SEQ ID NO: 1016712 - DNA, 25 bp, Homo sapien
ttcattaaggtagaatagctgcacc

SEQ ID NO: 1016713 - DNA, 25 bp, Homo sapien
agctcatgtcttctggttgtcatca

SEQ ID NO: 1016714 - DNA, 25 bp, Homo sapien
atgtcttctggttgtcatcatcttc

SEQ ID NO: 1016715 - DNA, 25 bp, Homo sapien
cttagctcatgtcttctggttgtca

SEQ ID NO: 1016716 - DNA, 25 bp, Homo sapien
catgtcttctggttgtcatcatctt

SEQ ID NO: 1016717 - DNA, 25 bp, Homo sapien
ttaataaatcttttataggacagaa

SEQ ID NO: 1016718 - DNA, 25 bp, Homo sapien
tttaataaatcttttataggacaga

SEQ ID NO: 1016719 - DNA, 25 bp, Homo sapien
taataaatcttttataggacagaaa

SEQ ID NO: 1016720 - DNA, 25 bp, Homo sapien
gagccgtacctaacacttctatgag

SEQ ID NO: 1016721 - DNA, 25 bp, Homo sapien
tctagtaggtcttgcagagttccaa

SEQ ID NO: 1016722 - DNA, 25 bp, Homo sapien
tctactttaagactggaacactggt

SEQ ID NO: 1016723 - DNA, 25 bp, Homo sapien
tacataagacagttgatagggttcc

SEQ ID NO: 1016724 - DNA, 25 bp, Homo sapien
ttcagtttcccagtaagtcaattag

SEQ ID NO: 1016725 - DNA, 25 bp, Homo sapien
tggaaaggttcttcagaacagtccc

SEQ ID NO: 1016726 - DNA, 25 bp, Homo sapien
gagtacacactgagcattttcagaa

SEQ ID NO: 1016727 - DNA, 25 bp, Homo sapien
tcagaaatcagcttccatatcttga

SEQ ID NO: 1016728 - DNA, 25 bp, Homo sapien
tccagtgactgttttgcttgttacc

SEQ ID NO: 1016729 - DNA, 25 bp, Homo sapien
tgcttgttaccttagagttctctaa

SEQ ID NO: 1016730 - DNA, 25 bp, Homo sapien
gattggtgcggaaaatattgtttgg

SEQ ID NO: 1016731 - DNA, 25 bp, Homo sapien
accctttaggtaccttgattgattg

SEQ ID NO: 1016732 - DNA, 25 bp, Homo sapien
aggatggccgagtgggctgcgcagc

SEQ ID NO: 1016733 - DNA, 25 bp, Homo sapien
gcctgaggcttgttgtcctcccctg

SEQ ID NO: 1016734 - DNA, 25 bp, Homo sapien
gaggctcaggctttcccgcgaggcc

SEQ ID NO: 1016735 - DNA, 25 bp, Homo sapien
aggccgaagaaggtccaggacgcct

SEQ ID NO: 1016736 - DNA, 25 bp, Homo sapien
gagcaggcggtgggaatggagggtg

SEQ ID NO: 1016737 - DNA, 25 bp, Homo sapien
ctggcttgatgtgagcaggcggtgg

SEQ ID NO: 1016738 - DNA, 25 bp, Homo sapien
gcaggcggtgggaatggagggtgga

SEQ ID NO: 1016739 - DNA, 25 bp, Homo sapien
cgggcggtgctcctggcttgatgtg

SEQ ID NO: 1016740 - DNA, 25 bp, Homo sapien
tgaaaatatcctgccaagtcatttg

SEQ ID NO: 1016741 - DNA, 25 bp, Homo sapien
gaaactccagtcttgcgtctggaca

SEQ ID NO: 1016742 - DNA, 25 bp, Homo sapien
cgtctggacatggaccatttctggg

SEQ ID NO: 1016743 - DNA, 25 bp, Homo sapien
tcatttggggatttgtggcagaaac

SEQ ID NO: 1016744 - DNA, 25 bp, Homo sapien
tgtgcagttgttctggcaagctttc

SEQ ID NO: 1016745 - DNA, 25 bp, Homo sapien
ttctgagagtcacaatggcccaggt

SEQ ID NO: 1016746 - DNA, 25 bp, Homo sapien
agctttctgatctcttattgcctgg

SEQ ID NO: 1016747 - DNA, 25 bp, Homo sapien
tattggtccggaaccctgcgtgttc

SEQ ID NO: 1016748 - DNA, 25 bp, Homo sapien
cttgtcaaggagtgaaaattttatc

SEQ ID NO: 1016749 - DNA, 25 bp, Homo sapien
gaaaattttatcacgctggagctgc

SEQ ID NO: 1016750 - DNA, 25 bp, Homo sapien
ctgctggctgttctcgtgatgctgg

SEQ ID NO: 1016751 - DNA, 25 bp, Homo sapien
tgggcacagttttccggcttcttac

SEQ ID NO: 1016752 - DNA, 25 bp, Homo sapien
tcaaaggggcgacacaaaacttctg

SEQ ID NO: 1016753 - DNA, 25 bp, Homo sapien
ctcaaaggggcgacacaaaacttct

SEQ ID NO: 1016754 - DNA, 25 bp, Homo sapien
gcagctcgtggaggttagacagcat

SEQ ID NO: 1016755 - DNA, 25 bp, Homo sapien
ttcttgtcctcttcactcttgcggg

SEQ ID NO: 1016756 - DNA, 25 bp, Homo sapien
tccatcaggtgattcggaagcagct

SEQ ID NO: 1016757 - DNA, 25 bp, Homo sapien
ggaataaagcgtctccatcaggtga

SEQ ID NO: 1016758 - DNA, 25 bp, Homo sapien
tctattttcagctatgccggtggga

SEQ ID NO: 1016759 - DNA, 25 bp, Homo sapien
gactgttgcggcctactgtaggagc

SEQ ID NO: 1016760 - DNA, 25 bp, Homo sapien
gggtgttccaataactgagacttga

SEQ ID NO: 1016761 - DNA, 25 bp, Homo sapien
tctcgctctgttataagcatgtcta

SEQ ID NO: 1016762 - DNA, 25 bp, Homo sapien
cggctttggggtcagattaatctct

SEQ ID NO: 1016763 - DNA, 25 bp, Homo sapien
caactgatgtcttgctaagattctt

SEQ ID NO: 1016764 - DNA, 25 bp, Homo sapien
gtgacatttcttccacccgtcagtt

SEQ ID NO: 1016765 - DNA, 25 bp, Homo sapien
tggacattggaggctctttcgtgtt

SEQ ID NO: 1016766 - DNA, 25 bp, Homo sapien
ttcacagtcgtttttctatcagtgt

SEQ ID NO: 1016767 - DNA, 25 bp, Homo sapien
ctcaatttcacagtcgtttttctat

SEQ ID NO: 1016768 - DNA, 25 bp, Homo sapien
gcattcaaatagtacttcatacttg

SEQ ID NO: 1016769 - DNA, 25 bp, Homo sapien
aatactgtacaatgcattcaaatag

SEQ ID NO: 1016770 - DNA, 25 bp, Homo sapien
ggctacgtcggcagctgcagcggtg

SEQ ID NO: 1016771 - DNA, 25 bp, Homo sapien
aggctacgtcggcagctgcagcggt

SEQ ID NO: 1016772 - DNA, 25 bp, Homo sapien
cgaggctacgtcggcagctgcagcg

SEQ ID NO: 1016773 - DNA, 25 bp, Homo sapien
gaggctacgtcggcagctgcagcgg

SEQ ID NO: 1016774 - DNA, 25 bp, Homo sapien
cacaattgtcattcggctgtagtaa

SEQ ID NO: 1016775 - DNA, 25 bp, Homo sapien
tgtagtaaaactggtagtatgattc

SEQ ID NO: 1016776 - DNA, 25 bp, Homo sapien
ttgtcattcggctgtagtaaaactg

SEQ ID NO: 1016777 - DNA, 25 bp, Homo sapien
tcggctgtagtaaaactggtagtat

SEQ ID NO: 1016778 - DNA, 25 bp, Homo sapien
ccatatacaggttgcactattccac

SEQ ID NO: 1016779 - DNA, 25 bp, Homo sapien
tcaggctttgtacagaagacaaaca

SEQ ID NO: 1016780 - DNA, 25 bp, Homo sapien
gcttgaaaagaacagttagtcctta

SEQ ID NO: 1016781 - DNA, 25 bp, Homo sapien
tcctcctcattgctaacctttaaaa

SEQ ID NO: 1016782 - DNA, 25 bp, Homo sapien
aagggagcaaaatggaaggaatagt

SEQ ID NO: 1016783 - DNA, 25 bp, Homo sapien
gagcaaaatggaaggaatagtatta

SEQ ID NO: 1016784 - DNA, 25 bp, Homo sapien
gggagcaaaatggaaggaatagtat

SEQ ID NO: 1016785 - DNA, 25 bp, Homo sapien
gtagcaagggagcaaaatggaagga

SEQ ID NO: 1016786 - DNA, 25 bp, Homo sapien
tgaatgccactatagcactttgacg

SEQ ID NO: 1016787 - DNA, 25 bp, Homo sapien
gcattacaggctgaagtcatgtctt

SEQ ID NO: 1016788 - DNA, 25 bp, Homo sapien
gacatgaatcgttgttgccaggaac

SEQ ID NO: 1016789 - DNA, 25 bp, Homo sapien
tgctgacagcctacagatcactgac

SEQ ID NO: 1016790 - DNA, 25 bp, Homo sapien
ctgcttgtattccttaggctgtgtc

SEQ ID NO: 1016791 - DNA, 25 bp, Homo sapien
tgcttgtattccttaggctgtgtct

SEQ ID NO: 1016792 - DNA, 25 bp, Homo sapien
cttgtattccttaggctgtgtcttc

SEQ ID NO: 1016793 - DNA, 25 bp, Homo sapien
tgtattccttaggctgtgtcttctg

SEQ ID NO: 1016794 - DNA, 25 bp, Homo sapien
cacaggaggaggtcatgaaggcttt

SEQ ID NO: 1016795 - DNA, 25 bp, Homo sapien
tcagcgttgccagtcataagcaggt

SEQ ID NO: 1016796 - DNA, 25 bp, Homo sapien
caagcagcgcgagatgagagccttt

SEQ ID NO: 1016797 - DNA, 25 bp, Homo sapien
actgccattcagacggatgccctgg

SEQ ID NO: 1016798 - DNA, 25 bp, Homo sapien
caaagtggtatttagttgagcaaaa

SEQ ID NO: 1016799 - DNA, 25 bp, Homo sapien
tgactttggacaagcatatttctct

SEQ ID NO: 1016800 - DNA, 25 bp, Homo sapien
gagggcccgttcttagtcatcaaag

SEQ ID NO: 1016801 - DNA, 25 bp, Homo sapien
taaactgcctccatccataggtggg

SEQ ID NO: 1016802 - DNA, 25 bp, Homo sapien
taggttctgatatacccagaaggca

SEQ ID NO: 1016803 - DNA, 25 bp, Homo sapien
ggttctgatatacccagaaggcact

SEQ ID NO: 1016804 - DNA, 25 bp, Homo sapien
tctgatatacccagaaggcactgtg

SEQ ID NO: 1016805 - DNA, 25 bp, Homo sapien
ggtaggttctgatatacccagaagg

SEQ ID NO: 1016806 - DNA, 25 bp, Homo sapien
tgcccacggagtttgtcctgtttta

SEQ ID NO: 1016807 - DNA, 25 bp, Homo sapien
aaggttggtaattgtggctacttca

SEQ ID NO: 1016808 - DNA, 25 bp, Homo sapien
tctcttgtttgatttgtgcaggaag

SEQ ID NO: 1016809 - DNA, 25 bp, Homo sapien
tgtagagtttcagcatcattcctat

SEQ ID NO: 1016810 - DNA, 25 bp, Homo sapien
tcatcgtccgttcaggaagctgcca

SEQ ID NO: 1016811 - DNA, 25 bp, Homo sapien
gcttattcattgaccatgggctgag

SEQ ID NO: 1016812 - DNA, 25 bp, Homo sapien
cattaagccattgtaaatggagtct

SEQ ID NO: 1016813 - DNA, 25 bp, Homo sapien
tggagtcttcaagatcttgatgtgc

SEQ ID NO: 1016814 - DNA, 25 bp, Homo sapien
gatcaatttacataccctgtgaaag

SEQ ID NO: 1016815 - DNA, 25 bp, Homo sapien
ggaccttgtaacatgcccaaaccag

SEQ ID NO: 1016816 - DNA, 25 bp, Homo sapien
ccaaatgggacgcatggaatgccct

SEQ ID NO: 1016817 - DNA, 25 bp, Homo sapien
tatttgacttgatcaacaaggccaa

SEQ ID NO: 1016818 - DNA, 25 bp, Homo sapien
tggcttggagactggcgcggcgttc

SEQ ID NO: 1016819 - DNA, 25 bp, Homo sapien
ctgtccaggcgaaggtcgccgccgt

SEQ ID NO: 1016820 - DNA, 25 bp, Homo sapien
tccgaggtaagcttggagtcccggc

SEQ ID NO: 1016821 - DNA, 25 bp, Homo sapien
atggtcgcccgcaggataccgctgt

SEQ ID NO: 1016822 - DNA, 25 bp, Homo sapien
agggcgctcagtgctccggcagcca

SEQ ID NO: 1016823 - DNA, 25 bp, Homo sapien
cagagctgaggtccgcccgagagag

SEQ ID NO: 1016824 - DNA, 25 bp, Homo sapien
gctcgcagttactcggagccaggcc

SEQ ID NO: 1016825 - DNA, 25 bp, Homo sapien
cagccacagggttcgcagagctgag

SEQ ID NO: 1016826 - DNA, 25 bp, Homo sapien
ttaaaaaatatttccatgacagctg

SEQ ID NO: 1016827 - DNA, 25 bp, Homo sapien
aaaatatttccatgacagctgtttc

SEQ ID NO: 1016828 - DNA, 25 bp, Homo sapien
aaaaaatatttccatgacagctgtt

SEQ ID NO: 1016829 - DNA, 25 bp, Homo sapien
aaatatttccatgacagctgtttca

SEQ ID NO: 1016830 - DNA, 25 bp, Homo sapien
tagaattcttcccaggatatgcccc

SEQ ID NO: 1016831 - DNA, 25 bp, Homo sapien
gagcatcccaagttcacctgaaatg

SEQ ID NO: 1016832 - DNA, 25 bp, Homo sapien
agaagaaagaaacgcccaggagact

SEQ ID NO: 1016833 - DNA, 25 bp, Homo sapien
tcaggacaggactaaccagtgggtg

SEQ ID NO: 1016834 - DNA, 25 bp, Homo sapien
atgtggaaaagcacgctctagaagg

SEQ ID NO: 1016835 - DNA, 25 bp, Homo sapien
gactcacaacttattatcaaatgtg

SEQ ID NO: 1016836 - DNA, 25 bp, Homo sapien
tcaaatgtggaaaagcacgctctag

SEQ ID NO: 1016837 - DNA, 25 bp, Homo sapien
ttaatgaaaaggtagcaactgactc

SEQ ID NO: 1016838 - DNA, 25 bp, Homo sapien
gtgaggaagtccaatggacaagtgg

SEQ ID NO: 1016839 - DNA, 25 bp, Homo sapien
atggacaagtggagtcccaaagcag

SEQ ID NO: 1016840 - DNA, 25 bp, Homo sapien
aatggacaagtggagtcccaaagca

SEQ ID NO: 1016841 - DNA, 25 bp, Homo sapien
cagactcttcacgaagagatggagg

SEQ ID NO: 1016842 - DNA, 25 bp, Homo sapien
ataactggacgttaaaaagagcctg

SEQ ID NO: 1016843 - DNA, 25 bp, Homo sapien
aaatgtgatcctcagtgttaaaggg

SEQ ID NO: 1016844 - DNA, 25 bp, Homo sapien
gcttttcagtatgcagggtcagtca

SEQ ID NO: 1016845 - DNA, 25 bp, Homo sapien
gagaactctagagaagcaggtgatt

SEQ ID NO: 1016846 - DNA, 25 bp, Homo sapien
ttgagaactctagagaagcaggtga

SEQ ID NO: 1016847 - DNA, 25 bp, Homo sapien
tgctcacaggagagcttgagaactc

SEQ ID NO: 1016848 - DNA, 25 bp, Homo sapien
tccagcaaagtttacaccgtttgac

SEQ ID NO: 1016849 - DNA, 25 bp, Homo sapien
gagaccgacttcacctgagcagaaa

SEQ ID NO: 1016850 - DNA, 25 bp, Homo sapien
cattatcagtatgtggccaacaggg

SEQ ID NO: 1016851 - DNA, 25 bp, Homo sapien
taacatccaggtgactatacccagg

SEQ ID NO: 1016852 - DNA, 25 bp, Homo sapien
gaccggtgttggtacaatgggcaca

SEQ ID NO: 1016853 - DNA, 25 bp, Homo sapien
gacattccacgtgagatttgggcgg

SEQ ID NO: 1016854 - DNA, 25 bp, Homo sapien
gcaaccgagggtactcacagaggca

SEQ ID NO: 1016855 - DNA, 25 bp, Homo sapien
cctctgaggaagtcccggtcagcat

SEQ ID NO: 1016856 - DNA, 25 bp, Homo sapien
gaagtgtaaagtggcttgcaagtcc

SEQ ID NO: 1016857 - DNA, 25 bp, Homo sapien
tgtgttggttcaggacagcatcagg

SEQ ID NO: 1016858 - DNA, 25 bp, Homo sapien
ccttgaagatcccaatgtgttggtt

SEQ ID NO: 1016859 - DNA, 25 bp, Homo sapien
gaatcagtgttgcttgaattccact

SEQ ID NO: 1016860 - DNA, 25 bp, Homo sapien
aactgaactcaaaggacccttgaag

SEQ ID NO: 1016861 - DNA, 25 bp, Homo sapien
tatgtagacaacatacgaacagaca

SEQ ID NO: 1016862 - DNA, 25 bp, Homo sapien
cgaagtcaacttggtattatgtaga

SEQ ID NO: 1016863 - DNA, 25 bp, Homo sapien
acacacgaacgaacaaacgaagtca

SEQ ID NO: 1016864 - DNA, 25 bp, Homo sapien
ggcccggtagctcaacaaaaacaca

SEQ ID NO: 1016865 - DNA, 25 bp, Homo sapien
aaggtaaacgtttcagcatcaggcc

SEQ ID NO: 1016866 - DNA, 25 bp, Homo sapien
tgtgtccagggttatgaatgtactc

SEQ ID NO: 1016867 - DNA, 25 bp, Homo sapien
aaaaagatattacccgagccaagca

SEQ ID NO: 1016868 - DNA, 25 bp, Homo sapien
aactcatggcttttagtgacagcat

SEQ ID NO: 1016869 - DNA, 25 bp, Homo sapien
gaaggtacgttccagagagcaaagg

SEQ ID NO: 1016870 - DNA, 25 bp, Homo sapien
cacagtctattggttggctcaggca

SEQ ID NO: 1016871 - DNA, 25 bp, Homo sapien
agttggcaaaccgaagagacacagc

SEQ ID NO: 1016872 - DNA, 25 bp, Homo sapien
gaactccaagtatgtgtgcgacctc

SEQ ID NO: 1016873 - DNA, 25 bp, Homo sapien
tctccatgctcttcaattgctgttt

SEQ ID NO: 1016874 - DNA, 25 bp, Homo sapien
gacctgcagcggctgaagtcctctc

SEQ ID NO: 1016875 - DNA, 25 bp, Homo sapien
caggacctgcagcggctgaagtcct

SEQ ID NO: 1016876 - DNA, 25 bp, Homo sapien
cctgcaatatcccagagggcaaaga

SEQ ID NO: 1016877 - DNA, 25 bp, Homo sapien
gagtttcccatcgtcctgtttgtcc

SEQ ID NO: 1016878 - DNA, 25 bp, Homo sapien
tgcaaggccctttaccatactgggt

SEQ ID NO: 1016879 - DNA, 25 bp, Homo sapien
ttctcctgagtttcccatcgtcctg

SEQ ID NO: 1016880 - DNA, 25 bp, Homo sapien
caaggccctttaccatactgggtga

SEQ ID NO: 1016881 - DNA, 25 bp, Homo sapien
caaaatggcggggtcctgcactgcg

SEQ ID NO: 1016882 - DNA, 25 bp, Homo sapien
tcagcaactccctcaatcatttgct

SEQ ID NO: 1016883 - DNA, 25 bp, Homo sapien
ccgtggctgcggtgaagacaaaatg

SEQ ID NO: 1016884 - DNA, 25 bp, Homo sapien
atcatttgctggcaggcactcgcga

SEQ ID NO: 1016885 - DNA, 25 bp, Homo sapien
ggctcctccaaccacttctgtttct

SEQ ID NO: 1016886 - DNA, 25 bp, Homo sapien
gctggctcctccaaccacttctgtt

SEQ ID NO: 1016887 - DNA, 25 bp, Homo sapien
ggctgctggctcctccaaccacttc

SEQ ID NO: 1016888 - DNA, 25 bp, Homo sapien
gctgctggctcctccaaccacttct

SEQ ID NO: 1016889 - DNA, 25 bp, Homo sapien
caatgcattctcaagcgaggaggca

SEQ ID NO: 1016890 - DNA, 25 bp, Homo sapien
gcagtctctgtaggaggaaattccc

SEQ ID NO: 1016891 - DNA, 25 bp, Homo sapien
tgctgatggcgtcccctttggcaca

SEQ ID NO: 1016892 - DNA, 25 bp, Homo sapien
tcagtagagacattcaacccggttt

SEQ ID NO: 1016893 - DNA, 25 bp, Homo sapien
gaagagtcatcaatttcaaactgca

SEQ ID NO: 1016894 - DNA, 25 bp, Homo sapien
gggggaagagtcatcaatttcaaac

SEQ ID NO: 1016895 - DNA, 25 bp, Homo sapien
agagtcatcaatttcaaactgcagg

SEQ ID NO: 1016896 - DNA, 25 bp, Homo sapien
gggaagagtcatcaatttcaaactg

SEQ ID NO: 1016897 - DNA, 25 bp, Homo sapien
agctcaggatcttataggagcagtc

SEQ ID NO: 1016898 - DNA, 25 bp, Homo sapien
caggatcttataggagcagtcctcc

SEQ ID NO: 1016899 - DNA, 25 bp, Homo sapien
tcttataggagcagtcctccccaca

SEQ ID NO: 1016900 - DNA, 25 bp, Homo sapien
ccagctcaggatcttataggagcag

SEQ ID NO: 1016901 - DNA, 25 bp, Homo sapien
cagtggcagcagccaccacagtgcc

SEQ ID NO: 1016902 - DNA, 25 bp, Homo sapien
gtggcagcagccaccacagtgccca

SEQ ID NO: 1016903 - DNA, 25 bp, Homo sapien
tggcagcagccaccacagtgcccac

SEQ ID NO: 1016904 - DNA, 25 bp, Homo sapien
agtggcagcagccaccacagtgccc

SEQ ID NO: 1016905 - DNA, 25 bp, Homo sapien
agagagaccaacagatctccaggag

SEQ ID NO: 1016906 - DNA, 25 bp, Homo sapien
gagaccaacagatctccaggagagc

SEQ ID NO: 1016907 - DNA, 25 bp, Homo sapien
gagagaccaacagatctccaggaga

SEQ ID NO: 1016908 - DNA, 25 bp, Homo sapien
acctttacgatcctccccaaagcag

SEQ ID NO: 1016909 - DNA, 25 bp, Homo sapien
gataattacctgagcgactaccgag

SEQ ID NO: 1016910 - DNA, 25 bp, Homo sapien
taatgtgtagttctctcagacagac

SEQ ID NO: 1016911 - DNA, 25 bp, Homo sapien
gactaccgagtgtttatcacccaca

SEQ ID NO: 1016912 - DNA, 25 bp, Homo sapien
taagatacgaaatctacgtgaaggc

SEQ ID NO: 1016913 - DNA, 25 bp, Homo sapien
tgcaatatttggtcaggcgtgaacc

SEQ ID NO: 1016914 - DNA, 25 bp, Homo sapien
tcttggaagcgactccgagcacttg

SEQ ID NO: 1016915 - DNA, 25 bp, Homo sapien
tccagctgcagcatcgtgggtcgat

SEQ ID NO: 1016916 - DNA, 25 bp, Homo sapien
gcgtgaaccgtttctccagatacag

SEQ ID NO: 1016917 - DNA, 25 bp, Homo sapien
atgactatgggacatttaggcaaga

SEQ ID NO: 1016918 - DNA, 25 bp, Homo sapien
ttattgtgttggcacatctattccc

SEQ ID NO: 1016919 - DNA, 25 bp, Homo sapien
aagagtataaagtgagccacaccca

SEQ ID NO: 1016920 - DNA, 25 bp, Homo sapien
agtgcaatggctactatgactatgg

SEQ ID NO: 1016921 - DNA, 25 bp, Homo sapien
gaaagccctgtcttaacttacataa

SEQ ID NO: 1016922 - DNA, 25 bp, Homo sapien
ttgaaagccctgtcttaacttacat

SEQ ID NO: 1016923 - DNA, 25 bp, Homo sapien
cttacataaggctatattaactatt

SEQ ID NO: 1016924 - DNA, 25 bp, Homo sapien
ctgtcttaacttacataaggctata

SEQ ID NO: 1016925 - DNA, 25 bp, Homo sapien
tagaacacgcccctttagcttgtat

SEQ ID NO: 1016926 - DNA, 25 bp, Homo sapien
ccctttagcttgtatgagtctgtta

SEQ ID NO: 1016927 - DNA, 25 bp, Homo sapien
cacgcccctttagcttgtatgagtc

SEQ ID NO: 1016928 - DNA, 25 bp, Homo sapien
agcttgtatgagtctgttattacca

SEQ ID NO: 1016929 - DNA, 25 bp, Homo sapien
gcttccacgtgcacctaattctctg

SEQ ID NO: 1016930 - DNA, 25 bp, Homo sapien
ccacgtgcacctaattctctgtttt

SEQ ID NO: 1016931 - DNA, 25 bp, Homo sapien
tctctgcttccacgtgcacctaatt

SEQ ID NO: 1016932 - DNA, 25 bp, Homo sapien
tctgcttccacgtgcacctaattct

SEQ ID NO: 1016933 - DNA, 25 bp, Homo sapien
tgagctgggcctatacctaagggac

SEQ ID NO: 1016934 - DNA, 25 bp, Homo sapien
gaggcatgcctcgtgagacactgac

SEQ ID NO: 1016935 - DNA, 25 bp, Homo sapien
gaggtttagccaagtccagacatga

SEQ ID NO: 1016936 - DNA, 25 bp, Homo sapien
tgctagtgcaagttgatgccctggg

SEQ ID NO: 1016937 - DNA, 25 bp, Homo sapien
gggaacagcttcgtcagactgcctg

SEQ ID NO: 1016938 - DNA, 25 bp, Homo sapien
cgcagagccgtgtctggccagattg

SEQ ID NO: 1016939 - DNA, 25 bp, Homo sapien
attgggagcgggaacagcttcgtca

SEQ ID NO: 1016940 - DNA, 25 bp, Homo sapien
gaccgcagagcgcaattacgcagag

SEQ ID NO: 1016941 - DNA, 25 bp, Homo sapien
ttaatcctgcgaggggtcctttaga

SEQ ID NO: 1016942 - DNA, 25 bp, Homo sapien
gtcctttagagtcggaaaattgatg

SEQ ID NO: 1016943 - DNA, 25 bp, Homo sapien
ttctccttgggccaaaacccagctc

SEQ ID NO: 1016944 - DNA, 25 bp, Homo sapien
tagagtcggaaaattgatggtccaa

SEQ ID NO: 1016945 - DNA, 25 bp, Homo sapien
taatcttcattgctatgtaaacagt

SEQ ID NO: 1016946 - DNA, 25 bp, Homo sapien
tgctcccttcaagacaacttatctg

SEQ ID NO: 1016947 - DNA, 25 bp, Homo sapien
aataacagggctgaatgactttgtg

SEQ ID NO: 1016948 - DNA, 25 bp, Homo sapien
gtgatgaataaagagggtggttggc

SEQ ID NO: 1016949 - DNA, 25 bp, Homo sapien
aattttcgcctcttgcctttggctg

SEQ ID NO: 1016950 - DNA, 25 bp, Homo sapien
tctctgggccttccctaattttcgc

SEQ ID NO: 1016951 - DNA, 25 bp, Homo sapien
attttcgcctcttgcctttggctgg

SEQ ID NO: 1016952 - DNA, 25 bp, Homo sapien
gccagtctctgggccttccctaatt

SEQ ID NO: 1016953 - DNA, 25 bp, Homo sapien
ttatttgccacaggtaaacctgctg

SEQ ID NO: 1016954 - DNA, 25 bp, Homo sapien
tgctgctaggtagatctgtcttcca

SEQ ID NO: 1016955 - DNA, 25 bp, Homo sapien
tgctaggtagatctgtcttccaaga

SEQ ID NO: 1016956 - DNA, 25 bp, Homo sapien
cacaggtaaacctgctgctaggtag

SEQ ID NO: 1016957 - DNA, 25 bp, Homo sapien
gaatgtgttgctatggagattttcc

SEQ ID NO: 1016958 - DNA, 25 bp, Homo sapien
gagccagaatgtgttgctatggaga

SEQ ID NO: 1016959 - DNA, 25 bp, Homo sapien
atggagattttccagcctaggatgc

SEQ ID NO: 1016960 - DNA, 25 bp, Homo sapien
taggatgctggatttcatctgtgtg

SEQ ID NO: 1016961 - DNA, 25 bp, Homo sapien
gctctgcaagggttatttgacttgc

SEQ ID NO: 1016962 - DNA, 25 bp, Homo sapien
tctgcaagggttatttgacttgcct

SEQ ID NO: 1016963 - DNA, 25 bp, Homo sapien
agctctgcaagggttatttgacttg

SEQ ID NO: 1016964 - DNA, 25 bp, Homo sapien
ctgcaagggttatttgacttgcctg

SEQ ID NO: 1016965 - DNA, 25 bp, Homo sapien
ggggatctggaggtctcttggtgtc

SEQ ID NO: 1016966 - DNA, 25 bp, Homo sapien
gatggggatctggaggtctcttggt

SEQ ID NO: 1016967 - DNA, 25 bp, Homo sapien
ggatctggaggtctcttggtgtctc

SEQ ID NO: 1016968 - DNA, 25 bp, Homo sapien
ccgatggggatctggaggtctcttg

SEQ ID NO: 1016969 - DNA, 25 bp, Homo sapien
agcactttaagttcaaacaaacctg

SEQ ID NO: 1016970 - DNA, 25 bp, Homo sapien
cctgagtgggcaggtcaaggtggat

SEQ ID NO: 1016971 - DNA, 25 bp, Homo sapien
ccttctctgacctcaacagttaggg

SEQ ID NO: 1016972 - DNA, 25 bp, Homo sapien
gagtgagaatgatatgtttcataca

SEQ ID NO: 1016973 - DNA, 25 bp, Homo sapien
gctctcagctgtaccaaggcttggt

SEQ ID NO: 1016974 - DNA, 25 bp, Homo sapien
ttgctgacctccaggtaaacctttc

SEQ ID NO: 1016975 - DNA, 25 bp, Homo sapien
tcccattgcatcattcgaacctgtg

SEQ ID NO: 1016976 - DNA, 25 bp, Homo sapien
tcattcgaacctgtggcagccacag

SEQ ID NO: 1016977 - DNA, 25 bp, Homo sapien
tgaagccatttactgacaccctccc

SEQ ID NO: 1016978 - DNA, 25 bp, Homo sapien
ctgcagatacaagggatacaaaatg

SEQ ID NO: 1016979 - DNA, 25 bp, Homo sapien
aagccatttactgacaccctccctg

SEQ ID NO: 1016980 - DNA, 25 bp, Homo sapien
atgaacatatctgtgtagccagcag

SEQ ID NO: 1016981 - DNA, 25 bp, Homo sapien
tgtgtctgggtgtagagcctttcct

SEQ ID NO: 1016982 - DNA, 25 bp, Homo sapien
tgtgtgtctgggtgtagagcctttc

SEQ ID NO: 1016983 - DNA, 25 bp, Homo sapien
gtctgggtgtagagcctttcctctg

SEQ ID NO: 1016984 - DNA, 25 bp, Homo sapien
tccttgtgtgtctgggtgtagagcc

SEQ ID NO: 1016985 - DNA, 25 bp, Homo sapien
ttgattgtccgatcattggctttcc

SEQ ID NO: 1016986 - DNA, 25 bp, Homo sapien
atcattggctttccacccactctgg

SEQ ID NO: 1016987 - DNA, 25 bp, Homo sapien
tgtccgatcattggctttccaccca

SEQ ID NO: 1016988 - DNA, 25 bp, Homo sapien
cccatttgattgtccgatcattggc

SEQ ID NO: 1016989 - DNA, 25 bp, Homo sapien
taagacctcgaggtttctctccctc

SEQ ID NO: 1016990 - DNA, 25 bp, Homo sapien
aagacctcgaggtttctctccctct

SEQ ID NO: 1016991 - DNA, 25 bp, Homo sapien
cattatggtgcaaggcctgtctaga

SEQ ID NO: 1016992 - DNA, 25 bp, Homo sapien
gcagaaggacgcagcttgtgccagt

SEQ ID NO: 1016993 - DNA, 25 bp, Homo sapien
gaatacagctatctaggcaggaagg

SEQ ID NO: 1016994 - DNA, 25 bp, Homo sapien
gacatgtcagggaacagtcagggca

SEQ ID NO: 1016995 - DNA, 25 bp, Homo sapien
tttatcccagttaacaaatgcccaa

SEQ ID NO: 1016996 - DNA, 25 bp, Homo sapien
aacattggaccaacttcggcagaga

SEQ ID NO: 1016997 - DNA, 25 bp, Homo sapien
gggaggtcatccttgccctttagta

SEQ ID NO: 1016998 - DNA, 25 bp, Homo sapien
gggagcacagatagtaatctgtgct

SEQ ID NO: 1016999 - DNA, 25 bp, Homo sapien
ctgactggagtcaatgaacggtctg

SEQ ID NO: 1017000 - DNA, 25 bp, Homo sapien
tcaatgaacggtctgtggacagaca

SEQ ID NO: 1017001 - DNA, 25 bp, Homo sapien
ggagtcaatgaacggtctgtggaca

SEQ ID NO: 1017002 - DNA, 25 bp, Homo sapien
tgaacggtctgtggacagacagcct

SEQ ID NO: 1017003 - DNA, 25 bp, Homo sapien
gaacttcgtccagctgaacttccct

SEQ ID NO: 1017004 - DNA, 25 bp, Homo sapien
ctttgtctcagtaggcatccccagg

SEQ ID NO: 1017005 - DNA, 25 bp, Homo sapien
acactatgagggtgaggaaaacaac

SEQ ID NO: 1017006 - DNA, 25 bp, Homo sapien
aggcctgtgaacttcgtccagctga

SEQ ID NO: 1017007 - DNA, 25 bp, Homo sapien
gaaggtgaaattcaggttgaagaaa

SEQ ID NO: 1017008 - DNA, 25 bp, Homo sapien
tgactatggactgtgcatgctgaca

SEQ ID NO: 1017009 - DNA, 25 bp, Homo sapien
tctcctctggaagtgtacaagggtt

SEQ ID NO: 1017010 - DNA, 25 bp, Homo sapien
ttgctctcctctggaagtgtacaag

SEQ ID NO: 1017011 - DNA, 25 bp, Homo sapien
ggccatagtcgggtctgaatgacta

SEQ ID NO: 1017012 - DNA, 25 bp, Homo sapien
ctggaataaatggagtcataaaaga

SEQ ID NO: 1017013 - DNA, 25 bp, Homo sapien
tgcggggtgaggctttctggaataa

SEQ ID NO: 1017014 - DNA, 25 bp, Homo sapien
ggatatcaggaagagctttgcgggg

SEQ ID NO: 1017015 - DNA, 25 bp, Homo sapien
tatcaggaagagctttgcggggtga

SEQ ID NO: 1017016 - DNA, 25 bp, Homo sapien
gttcagggtggtatggccgtagacg

SEQ ID NO: 1017017 - DNA, 25 bp, Homo sapien
gggcgttcagggtggtatggccgta

SEQ ID NO: 1017018 - DNA, 25 bp, Homo sapien
gcgttcagggtggtatggccgtaga

SEQ ID NO: 1017019 - DNA, 25 bp, Homo sapien
tcagacgagatcgggggcgttcagg

SEQ ID NO: 1017020 - DNA, 25 bp, Homo sapien
tagtgcaactgagatatctattaat

SEQ ID NO: 1017021 - DNA, 25 bp, Homo sapien
cctgtctgtagtgcaactgagatat

SEQ ID NO: 1017022 - DNA, 25 bp, Homo sapien
ttcctgtctgtagtgcaactgagat

SEQ ID NO: 1017023 - DNA, 25 bp, Homo sapien
tctgtagtgcaactgagatatctat

SEQ ID NO: 1017024 - DNA, 25 bp, Homo sapien
tttccacctgtcactagagacagaa

SEQ ID NO: 1017025 - DNA, 25 bp, Homo sapien
ttcttttccacctgtcactagagac

SEQ ID NO: 1017026 - DNA, 25 bp, Homo sapien
agcaataagtcgtttccctacatga

SEQ ID NO: 1017027 - DNA, 25 bp, Homo sapien
gcaataagtcgtttccctacatgag

SEQ ID NO: 1017028 - DNA, 25 bp, Homo sapien
aataagtcgtttccctacatgagat

SEQ ID NO: 1017029 - DNA, 25 bp, Homo sapien
caataagtcgtttccctacatgaga

SEQ ID NO: 1017030 - DNA, 25 bp, Homo sapien
taaaacttatacaggcattttctcc

SEQ ID NO: 1017031 - DNA, 25 bp, Homo sapien
ggaatgtcagcagtgacacctaggt

SEQ ID NO: 1017032 - DNA, 25 bp, Homo sapien
tctccctgcggaagcctaaagctct

SEQ ID NO: 1017033 - DNA, 25 bp, Homo sapien
gtgacacctaggtagcctctggcag

SEQ ID NO: 1017034 - DNA, 25 bp, Homo sapien
aaacaaagacaacgccagcccatct

SEQ ID NO: 1017035 - DNA, 25 bp, Homo sapien
acaaagacaacgccagcccatctgg

SEQ ID NO: 1017036 - DNA, 25 bp, Homo sapien
tggctgtgtcttactctgagccaaa

SEQ ID NO: 1017037 - DNA, 25 bp, Homo sapien
gccaaacaaagacaacgccagccca

SEQ ID NO: 1017038 - DNA, 25 bp, Homo sapien
ttgcagcatggccaatgatgaccag

SEQ ID NO: 1017039 - DNA, 25 bp, Homo sapien
cacagaacggcagagaaccaggtat

SEQ ID NO: 1017040 - DNA, 25 bp, Homo sapien
gcagagttttccgtggagctccagg

SEQ ID NO: 1017041 - DNA, 25 bp, Homo sapien
tatggtgcatcatcctaagagggag

SEQ ID NO: 1017042 - DNA, 25 bp, Homo sapien
gaattgctgattgcagagcacctct

SEQ ID NO: 1017043 - DNA, 25 bp, Homo sapien
tgtggaccatagcagaacacatctg

SEQ ID NO: 1017044 - DNA, 25 bp, Homo sapien
ccacatgcggtgtgatgcattctca

SEQ ID NO: 1017045 - DNA, 25 bp, Homo sapien
caggtgtgagaattcccacatggcc

SEQ ID NO: 1017046 - DNA, 25 bp, Homo sapien
gaggatggatcccagagcagcaaag

SEQ ID NO: 1017047 - DNA, 25 bp, Homo sapien
ttgatggctcctaacagtgccaggc

SEQ ID NO: 1017048 - DNA, 25 bp, Homo sapien
cacttaatccgaagaaaggaagcca

SEQ ID NO: 1017049 - DNA, 25 bp, Homo sapien
cattttcttagctgactgaagactg

SEQ ID NO: 1017050 - DNA, 25 bp, Homo sapien
ttgaaggcaataacacccactttgg

SEQ ID NO: 1017051 - DNA, 25 bp, Homo sapien
aaatagaaagtcaaaggcggctgtg

SEQ ID NO: 1017052 - DNA, 25 bp, Homo sapien
aatggtccttattgggcctgtctgg

SEQ ID NO: 1017053 - DNA, 25 bp, Homo sapien
caaagcagttaataccaatggtcct

SEQ ID NO: 1017054 - DNA, 25 bp, Homo sapien
ggagcacaacgtatcctttttcttc

SEQ ID NO: 1017055 - DNA, 25 bp, Homo sapien
ctgtggtcggagcacaacgtatcct

SEQ ID NO: 1017056 - DNA, 25 bp, Homo sapien
actccagagtatgctgggctgtggc

SEQ ID NO: 1017057 - DNA, 25 bp, Homo sapien
cttggcctgtggtcggagcacaacg

SEQ ID NO: 1017058 - DNA, 25 bp, Homo sapien
tctggactcaaccaaaccttctgct

SEQ ID NO: 1017059 - DNA, 25 bp, Homo sapien
ctctggactcaaccaaaccttctgc

SEQ ID NO: 1017060 - DNA, 25 bp, Homo sapien
tgtgggatcctgaatagctcttgtg

SEQ ID NO: 1017061 - DNA, 25 bp, Homo sapien
catgttttcgtggttgctgcactca

SEQ ID NO: 1017062 - DNA, 25 bp, Homo sapien
tcactggccataagtccgaagacat

SEQ ID NO: 1017063 - DNA, 25 bp, Homo sapien
gatggaaagtcctccgtgacactca

SEQ ID NO: 1017064 - DNA, 25 bp, Homo sapien
tgttgtacgcagctgaatgccatcc

SEQ ID NO: 1017065 - DNA, 25 bp, Homo sapien
ggaccaattttagatcggaagagcc

SEQ ID NO: 1017066 - DNA, 25 bp, Homo sapien
cccaggacgctgtagttttgagaaa

SEQ ID NO: 1017067 - DNA, 25 bp, Homo sapien
gggccagaaataagaccagacctag

SEQ ID NO: 1017068 - DNA, 25 bp, Homo sapien
tgtacctgatgaatccgctcatttc

SEQ ID NO: 1017069 - DNA, 25 bp, Homo sapien
gggacacagtttggatccataagat

SEQ ID NO: 1017070 - DNA, 25 bp, Homo sapien
gatgaatccgctcatttccccaggc

SEQ ID NO: 1017071 - DNA, 25 bp, Homo sapien
caggccccttgcatctaggggcagc

SEQ ID NO: 1017072 - DNA, 25 bp, Homo sapien
gggcaagaaaggctttatttcatat

SEQ ID NO: 1017073 - DNA, 25 bp, Homo sapien
tgctgtttcctgaccaaatgtagat

SEQ ID NO: 1017074 - DNA, 25 bp, Homo sapien
gcatattgcaggcaatgctgtttcc

SEQ ID NO: 1017075 - DNA, 25 bp, Homo sapien
gatttcgctcttctttattgacaga

SEQ ID NO: 1017076 - DNA, 25 bp, Homo sapien
tagattcaggattgcatccgcagca

SEQ ID NO: 1017077 - DNA, 25 bp, Homo sapien
tgccagggagtgagaaagtcaagct

SEQ ID NO: 1017078 - DNA, 25 bp, Homo sapien
tattgcccctaggactgctctgtgg

SEQ ID NO: 1017079 - DNA, 25 bp, Homo sapien
tcatggtccagagtagacttagggc

SEQ ID NO: 1017080 - DNA, 25 bp, Homo sapien
gcatgtttcatatgaacagaattat

SEQ ID NO: 1017081 - DNA, 25 bp, Homo sapien
cagcattatacaactgtcaccacaa

SEQ ID NO: 1017082 - DNA, 25 bp, Homo sapien
taatatgtggttccttgtgactagc

SEQ ID NO: 1017083 - DNA, 25 bp, Homo sapien
gaaaccctatgcccttcagtcatca

SEQ ID NO: 1017084 - DNA, 25 bp, Homo sapien
cattgacgttcggagctcagcagca

SEQ ID NO: 1017085 - DNA, 25 bp, Homo sapien
cactggtgacaatggtagctgctcc

SEQ ID NO: 1017086 - DNA, 25 bp, Homo sapien
aggctcatgggatgctggactgtca

SEQ ID NO: 1017087 - DNA, 25 bp, Homo sapien
gaatggctcgtagattggatcccac

SEQ ID NO: 1017088 - DNA, 25 bp, Homo sapien
tccatccagtcttagtgctagtgaa

SEQ ID NO: 1017089 - DNA, 25 bp, Homo sapien
ctaattaacctgcatccctttgatt

SEQ ID NO: 1017090 - DNA, 25 bp, Homo sapien
cagtcttagtgctagtgaatttctc

SEQ ID NO: 1017091 - DNA, 25 bp, Homo sapien
tcttagtgctagtgaatttctcagc

SEQ ID NO: 1017092 - DNA, 25 bp, Homo sapien
catgcttccggatgctactcaaggg

SEQ ID NO: 1017093 - DNA, 25 bp, Homo sapien
caactccccttgctctgaggtagaa

SEQ ID NO: 1017094 - DNA, 25 bp, Homo sapien
gagtcaggccctcgacgaatgcttt

SEQ ID NO: 1017095 - DNA, 25 bp, Homo sapien
tactcaagggtcgaacttcctgctc

SEQ ID NO: 1017096 - DNA, 25 bp, Homo sapien
tttcccagctaacgagcagctgctg

SEQ ID NO: 1017097 - DNA, 25 bp, Homo sapien
ccatttcccagctaacgagcagctg

SEQ ID NO: 1017098 - DNA, 25 bp, Homo sapien
ctgctgcccgaacactgaggagcgg

SEQ ID NO: 1017099 - DNA, 25 bp, Homo sapien
cagctgctgcccgaacactgaggag

SEQ ID NO: 1017100 - DNA, 25 bp, Homo sapien
gaagtaattcaccaggacagcagaa

SEQ ID NO: 1017101 - DNA, 25 bp, Homo sapien
gaggagaccagaagtaattcaccag

SEQ ID NO: 1017102 - DNA, 25 bp, Homo sapien
cagcagaaatggtggagtttagcat

SEQ ID NO: 1017103 - DNA, 25 bp, Homo sapien
gcaggatgaggagaccagaagtaat

SEQ ID NO: 1017104 - DNA, 25 bp, Homo sapien
taatatattctacaccttctccagg

SEQ ID NO: 1017105 - DNA, 25 bp, Homo sapien
ctaatatattctacaccttctccag

SEQ ID NO: 1017106 - DNA, 25 bp, Homo sapien
aggctgggaaggattctcaatgcac

SEQ ID NO: 1017107 - DNA, 25 bp, Homo sapien
tgggaaggattctcaatgcacagga

SEQ ID NO: 1017108 - DNA, 25 bp, Homo sapien
aggattctcaatgcacaggaaagtt

SEQ ID NO: 1017109 - DNA, 25 bp, Homo sapien
gaaggattctcaatgcacaggaaag

SEQ ID NO: 1017110 - DNA, 25 bp, Homo sapien
ttgggccatcgacaccaaccacatg

SEQ ID NO: 1017111 - DNA, 25 bp, Homo sapien
tgtatttgggccatcgacaccaacc

SEQ ID NO: 1017112 - DNA, 25 bp, Homo sapien
atcgacaccaaccacatgccgtgag

SEQ ID NO: 1017113 - DNA, 25 bp, Homo sapien
ctttgtatttgggccatcgacacca

SEQ ID NO: 1017114 - DNA, 25 bp, Homo sapien
agtctgagggctctgatatatacat

SEQ ID NO: 1017115 - DNA, 25 bp, Homo sapien
tcagtctgagggctctgatatatac

SEQ ID NO: 1017116 - DNA, 25 bp, Homo sapien
cagtctgagggctctgatatataca

SEQ ID NO: 1017117 - DNA, 25 bp, Homo sapien
ttgcggtccagcttccactggacac

SEQ ID NO: 1017118 - DNA, 25 bp, Homo sapien
caccgtgccactgcttttgttctct

SEQ ID NO: 1017119 - DNA, 25 bp, Homo sapien
tgcacccaccgtgccactgcttttg

SEQ ID NO: 1017120 - DNA, 25 bp, Homo sapien
tgtgtcttgcggtccagcttccact

SEQ ID NO: 1017121 - DNA, 25 bp, Homo sapien
tagacacagggtgaagtcagcacat

SEQ ID NO: 1017122 - DNA, 25 bp, Homo sapien
tgtagacacagggtgaagtcagcac

SEQ ID NO: 1017123 - DNA, 25 bp, Homo sapien
gtagacacagggtgaagtcagcaca

SEQ ID NO: 1017124 - DNA, 25 bp, Homo sapien
ctgagataagaagagtaagagtggg

SEQ ID NO: 1017125 - DNA, 25 bp, Homo sapien
gataagaagagtaagagtgggtgtg

SEQ ID NO: 1017126 - DNA, 25 bp, Homo sapien
aagagtaagagtgggtgtgcacatg

SEQ ID NO: 1017127 - DNA, 25 bp, Homo sapien
gcacatgtgtttgtgcacgtatgtg

SEQ ID NO: 1017128 - DNA, 25 bp, Homo sapien
atgttttgttattgcccattggaga

SEQ ID NO: 1017129 - DNA, 25 bp, Homo sapien
ttcatgactcctgcagcactctcat

SEQ ID NO: 1017130 - DNA, 25 bp, Homo sapien
catgactcctgcagcactctcattt

SEQ ID NO: 1017131 - DNA, 25 bp, Homo sapien
ttgcccattggagattctttcatga

SEQ ID NO: 1017132 - DNA, 25 bp, Homo sapien
ccagtcctgtgttttatgaggacac

SEQ ID NO: 1017133 - DNA, 25 bp, Homo sapien
catctttctggttttaagtgactcc

SEQ ID NO: 1017134 - DNA, 25 bp, Homo sapien
tcatctttaggactgggccagtcct

SEQ ID NO: 1017135 - DNA, 25 bp, Homo sapien
gttgagtaggcctctgttacacatt

SEQ ID NO: 1017136 - DNA, 25 bp, Homo sapien
aggagcagtgtttccaaggtgtttc

SEQ ID NO: 1017137 - DNA, 25 bp, Homo sapien
gatgttgagcgtgaaattacatgga

SEQ ID NO: 1017138 - DNA, 25 bp, Homo sapien
aagcctttggtgctgccgactggga

SEQ ID NO: 1017139 - DNA, 25 bp, Homo sapien
tgtccctgtttctggcagcgagggc

SEQ ID NO: 1017140 - DNA, 25 bp, Homo sapien
tctcctgcgggagtatacacactca

SEQ ID NO: 1017141 - DNA, 25 bp, Homo sapien
gatttcccacccgaaagagccaatg

SEQ ID NO: 1017142 - DNA, 25 bp, Homo sapien
taatctctaagaaccgtgacaccat

SEQ ID NO: 1017143 - DNA, 25 bp, Homo sapien
tgtttgctatcagaagtgacactgg

SEQ ID NO: 1017144 - DNA, 25 bp, Homo sapien
ggcacatcctgtgacaaattgagca

SEQ ID NO: 1017145 - DNA, 25 bp, Homo sapien
gcatccattgtgtgaggaattcctg

SEQ ID NO: 1017146 - DNA, 25 bp, Homo sapien
tgtgacaaattgagcatccattgtg

SEQ ID NO: 1017147 - DNA, 25 bp, Homo sapien
caaattgagcatccattgtgtgagg

SEQ ID NO: 1017148 - DNA, 25 bp, Homo sapien
cctgcaaacttctgatgggtttggt

SEQ ID NO: 1017149 - DNA, 25 bp, Homo sapien
tcccagctctaaacaaggacgtcct

SEQ ID NO: 1017150 - DNA, 25 bp, Homo sapien
agttcgcggaagcattggcaggcct

SEQ ID NO: 1017151 - DNA, 25 bp, Homo sapien
ggactctcctttgcgctgtttcgtg

SEQ ID NO: 1017152 - DNA, 25 bp, Homo sapien
ccgaggcctggcatgattggaagca

SEQ ID NO: 1017153 - DNA, 25 bp, Homo sapien
cctgagtctcatggtgaagttagag

SEQ ID NO: 1017154 - DNA, 25 bp, Homo sapien
gattgggaccaagcctgagattcca

SEQ ID NO: 1017155 - DNA, 25 bp, Homo sapien
tctctccttatgaacagcggtcttt

SEQ ID NO: 1017156 - DNA, 25 bp, Homo sapien
ccctgatagaagcaactcggcaatt

SEQ ID NO: 1017157 - DNA, 25 bp, Homo sapien
ttctgatcctacagcaagccagtga

SEQ ID NO: 1017158 - DNA, 25 bp, Homo sapien
tcaacaagcgtttagcagatgcctc

SEQ ID NO: 1017159 - DNA, 25 bp, Homo sapien
ggataacaggattccacagccttgc

SEQ ID NO: 1017160 - DNA, 25 bp, Homo sapien
tccaaacacttattcatctggttaa

SEQ ID NO: 1017161 - DNA, 25 bp, Homo sapien
cacttattcatctggttaagtttct

SEQ ID NO: 1017162 - DNA, 25 bp, Homo sapien
ccaaacacttattcatctggttaag

SEQ ID NO: 1017163 - DNA, 25 bp, Homo sapien
aaacacttattcatctggttaagtt

SEQ ID NO: 1017164 - DNA, 25 bp, Homo sapien
tctgtcacccccactcattggatgg

SEQ ID NO: 1017165 - DNA, 25 bp, Homo sapien
gcatcctttggtctaggctccatca

SEQ ID NO: 1017166 - DNA, 25 bp, Homo sapien
taggctccatcacctcatgcttggt

SEQ ID NO: 1017167 - DNA, 25 bp, Homo sapien
ttcagcaaagaccccttctaattct

SEQ ID NO: 1017168 - DNA, 25 bp, Homo sapien
tctccgcggctcttcgttcagggag

SEQ ID NO: 1017169 - DNA, 25 bp, Homo sapien
aggttggacccggaccaggccagag

SEQ ID NO: 1017170 - DNA, 25 bp, Homo sapien
ggccagcgtttcatctgggagaact

SEQ ID NO: 1017171 - DNA, 25 bp, Homo sapien
tcactgagttcttcggtctccgcgg

SEQ ID NO: 1017172 - DNA, 25 bp, Homo sapien
ttctgctctatggaaaccagggaga

SEQ ID NO: 1017173 - DNA, 25 bp, Homo sapien
caccttgacccagatttctgctcta

SEQ ID NO: 1017174 - DNA, 25 bp, Homo sapien
ccaaatcatagcaactcttgatcca

SEQ ID NO: 1017175 - DNA, 25 bp, Homo sapien
gagaggcgatgatgaacctggtcat

SEQ ID NO: 1017176 - DNA, 25 bp, Homo sapien
ttgagtttctgcaaggtctgatttt

SEQ ID NO: 1017177 - DNA, 25 bp, Homo sapien
gtttctgcaaggtctgattttattc

SEQ ID NO: 1017178 - DNA, 25 bp, Homo sapien
gagtttctgcaaggtctgattttat

SEQ ID NO: 1017179 - DNA, 25 bp, Homo sapien
ccagattgagtttctgcaaggtctg

SEQ ID NO: 1017180 - DNA, 25 bp, Homo sapien
gtgaatgcatgaggtgctgagctcc

SEQ ID NO: 1017181 - DNA, 25 bp, Homo sapien
ggtgaatgcatgaggtgctgagctc

SEQ ID NO: 1017182 - DNA, 25 bp, Homo sapien
tgttgattccgcctctgagcttgtt

SEQ ID NO: 1017183 - DNA, 25 bp, Homo sapien
tgtcttgttgattccgcctctgagc

SEQ ID NO: 1017184 - DNA, 25 bp, Homo sapien
gaggatgtgttcgtcagctgtcttg

SEQ ID NO: 1017185 - DNA, 25 bp, Homo sapien
agctccacaccggagagttcccagg

SEQ ID NO: 1017186 - DNA, 25 bp, Homo sapien
ttcctgtacatgcaccaggatcaag

SEQ ID NO: 1017187 - DNA, 25 bp, Homo sapien
tacatgcaccaggatcaagtgggta

SEQ ID NO: 1017188 - DNA, 25 bp, Homo sapien
taaaatactggataccggcagtctt

SEQ ID NO: 1017189 - DNA, 25 bp, Homo sapien
tcttcaggaatatcccggaacagga

SEQ ID NO: 1017190 - DNA, 25 bp, Homo sapien
agggtggcttttctgatgaggagct

SEQ ID NO: 1017191 - DNA, 25 bp, Homo sapien
tggaaagtggcctgagaaagggtgg

SEQ ID NO: 1017192 - DNA, 25 bp, Homo sapien
aaagggtggcttttctgatgaggag

SEQ ID NO: 1017193 - DNA, 25 bp, Homo sapien
gaaagggtggcttttctgatgagga

SEQ ID NO: 1017194 - DNA, 25 bp, Homo sapien
agtaattgtaatgggcactgagtgt

SEQ ID NO: 1017195 - DNA, 25 bp, Homo sapien
acttcagtaattgtaatgggcactg

SEQ ID NO: 1017196 - DNA, 25 bp, Homo sapien
ctaacttcagtaattgtaatgggca

SEQ ID NO: 1017197 - DNA, 25 bp, Homo sapien
catttgttcccgattccttttgaat

SEQ ID NO: 1017198 - DNA, 25 bp, Homo sapien
cacgatggcatgactgtcattgatc

SEQ ID NO: 1017199 - DNA, 25 bp, Homo sapien
tgttggcgtagtgtcctgagcccac

SEQ ID NO: 1017200 - DNA, 25 bp, Homo sapien
atgaaagaatgttggcgtagtgtcc

SEQ ID NO: 1017201 - DNA, 25 bp, Homo sapien
aagaatgttggcgtagtgtcctgag

SEQ ID NO: 1017202 - DNA, 25 bp, Homo sapien
ctgagcagccagttgccagcagatc

SEQ ID NO: 1017203 - DNA, 25 bp, Homo sapien
ggactgagcagccagttgccagcag

SEQ ID NO: 1017204 - DNA, 25 bp, Homo sapien
gactgagcagccagttgccagcaga

SEQ ID NO: 1017205 - DNA, 25 bp, Homo sapien
actgagcagccagttgccagcagat

SEQ ID NO: 1017206 - DNA, 25 bp, Homo sapien
gattatccaacctcccagtattggc

SEQ ID NO: 1017207 - DNA, 25 bp, Homo sapien
gaatttgattatccaacctcccagt

SEQ ID NO: 1017208 - DNA, 25 bp, Homo sapien
atccaacctcccagtattggcatag

SEQ ID NO: 1017209 - DNA, 25 bp, Homo sapien
ctgaatttgattatccaacctccca

SEQ ID NO: 1017210 - DNA, 25 bp, Homo sapien
agtaaacacgatggatggtgcatgt

SEQ ID NO: 1017211 - DNA, 25 bp, Homo sapien
cacgatggatggtgcatgttctcca

SEQ ID NO: 1017212 - DNA, 25 bp, Homo sapien
tgttctccagcaacttgaaacaatt

SEQ ID NO: 1017213 - DNA, 25 bp, Homo sapien
caacttgaaacaattcccgtacaag

SEQ ID NO: 1017214 - DNA, 25 bp, Homo sapien
cttcagtttgtggtcatgatatctt

SEQ ID NO: 1017215 - DNA, 25 bp, Homo sapien
tcagtttgtggtcatgatatctttc

SEQ ID NO: 1017216 - DNA, 25 bp, Homo sapien
agtttgtggtcatgatatctttcac

SEQ ID NO: 1017217 - DNA, 25 bp, Homo sapien
ctcttcagtttgtggtcatgatatc

SEQ ID NO: 1017218 - DNA, 25 bp, Homo sapien
cagggggaacttgatcttcctgcca

SEQ ID NO: 1017219 - DNA, 25 bp, Homo sapien
agatgcacttcttagtcttttcatc

SEQ ID NO: 1017220 - DNA, 25 bp, Homo sapien
aacttgatcttcctgccagtgcggc

SEQ ID NO: 1017221 - DNA, 25 bp, Homo sapien
gggaacttgatcttcctgccagtgc

SEQ ID NO: 1017222 - DNA, 25 bp, Homo sapien
tttagccacgatcaagtcatccagg

SEQ ID NO: 1017223 - DNA, 25 bp, Homo sapien
ctttagccacgatcaagtcatccag

SEQ ID NO: 1017224 - DNA, 25 bp, Homo sapien
tagccacgatcaagtcatccagggt

SEQ ID NO: 1017225 - DNA, 25 bp, Homo sapien
gccacgatcaagtcatccagggtta

SEQ ID NO: 1017226 - DNA, 25 bp, Homo sapien
tgtacagatttgccttgatgtcagc

SEQ ID NO: 1017227 - DNA, 25 bp, Homo sapien
gccttgatgtcagcatcagagaggt

SEQ ID NO: 1017228 - DNA, 25 bp, Homo sapien
ctgtacagatttgccttgatgtcag

SEQ ID NO: 1017229 - DNA, 25 bp, Homo sapien
ttgatgtcagcatcagagaggtcat

SEQ ID NO: 1017230 - DNA, 25 bp, Homo sapien
cttcatttgttgctttcattctacg

SEQ ID NO: 1017231 - DNA, 25 bp, Homo sapien
gagagacagcccctcaggggtgcct

SEQ ID NO: 1017232 - DNA, 25 bp, Homo sapien
gctttcattctacgttctcttaagg

SEQ ID NO: 1017233 - DNA, 25 bp, Homo sapien
tagagagacagcccctcaggggtgc

SEQ ID NO: 1017234 - DNA, 25 bp, Homo sapien
tgaactccatgtgtgttaccctcca

SEQ ID NO: 1017235 - DNA, 25 bp, Homo sapien
gcttagttccccgagatgagtctct

SEQ ID NO: 1017236 - DNA, 25 bp, Homo sapien
tgccttccgggaatgtccttaggta

SEQ ID NO: 1017237 - DNA, 25 bp, Homo sapien
agaaataggtcctctctcctcaagg

SEQ ID NO: 1017238 - DNA, 25 bp, Homo sapien
cacactgggctccatatgaatggca

SEQ ID NO: 1017239 - DNA, 25 bp, Homo sapien
gctgactttaaggcagggaatgttc

SEQ ID NO: 1017240 - DNA, 25 bp, Homo sapien
aatggcagctggtcgtctacttcac

SEQ ID NO: 1017241 - DNA, 25 bp, Homo sapien
tttaacttgggatcaaatgtgctct

SEQ ID NO: 1017242 - DNA, 25 bp, Homo sapien
ccgggggctctgtgttctctgatga

SEQ ID NO: 1017243 - DNA, 25 bp, Homo sapien
aattcttccgggggctctgtgttct

SEQ ID NO: 1017244 - DNA, 25 bp, Homo sapien
gggctctgtgttctctgatgaccac

SEQ ID NO: 1017245 - DNA, 25 bp, Homo sapien
ggggctctgtgttctctgatgacca

SEQ ID NO: 1017246 - DNA, 25 bp, Homo sapien
ttgggttgggccctcgtattgccag

SEQ ID NO: 1017247 - DNA, 25 bp, Homo sapien
ccaggctgacctgtggcttgcctga

SEQ ID NO: 1017248 - DNA, 25 bp, Homo sapien
gacctgtggcttgcctgaaatgtca

SEQ ID NO: 1017249 - DNA, 25 bp, Homo sapien
tgtttctcttcaggaataacttttg

SEQ ID NO: 1017250 - DNA, 25 bp, Homo sapien
ccagctgcagcagaacatctgttgg

SEQ ID NO: 1017251 - DNA, 25 bp, Homo sapien
ttatggtggatcctggatgagccag

SEQ ID NO: 1017252 - DNA, 25 bp, Homo sapien
tggatcctggatgagccagctgcag

SEQ ID NO: 1017253 - DNA, 25 bp, Homo sapien
ttggtaagttaaaagccccagctgc

SEQ ID NO: 1017254 - DNA, 25 bp, Homo sapien
taactggataatagaaaatcggatt

SEQ ID NO: 1017255 - DNA, 25 bp, Homo sapien
ggaaatgcactaatccaaacatcaa

SEQ ID NO: 1017256 - DNA, 25 bp, Homo sapien
ttcacaacggaaatgcactaatcca

SEQ ID NO: 1017257 - DNA, 25 bp, Homo sapien
aatcggatttcacaacggaaatgca

SEQ ID NO: 1017258 - DNA, 25 bp, Homo sapien
tgctggaattcctcgacaagtgtcc

SEQ ID NO: 1017259 - DNA, 25 bp, Homo sapien
caaagtgcacagaaagggctctgag

SEQ ID NO: 1017260 - DNA, 25 bp, Homo sapien
gaaagctaccctggtcactgaagcc

SEQ ID NO: 1017261 - DNA, 25 bp, Homo sapien
gagcccatgacatcgctttgaagga

SEQ ID NO: 1017262 - DNA, 25 bp, Homo sapien
agcagctgagtcaccgggagggaga

SEQ ID NO: 1017263 - DNA, 25 bp, Homo sapien
ctgagtcaccgggagggagacactc

SEQ ID NO: 1017264 - DNA, 25 bp, Homo sapien
aaagcacagcagctgagtcaccggg

SEQ ID NO: 1017265 - DNA, 25 bp, Homo sapien
gagtcaccgggagggagacactcat

SEQ ID NO: 1017266 - DNA, 25 bp, Homo sapien
gggctctgcttgatcatcatcaggc

SEQ ID NO: 1017267 - DNA, 25 bp, Homo sapien
tgatcatcatcaggcaggctactgc

SEQ ID NO: 1017268 - DNA, 25 bp, Homo sapien
gcagggctctgcttgatcatcatca

SEQ ID NO: 1017269 - DNA, 25 bp, Homo sapien
tctgcttgatcatcatcaggcaggc

SEQ ID NO: 1017270 - DNA, 25 bp, Homo sapien
cagggacatggcttttaccctgagg

SEQ ID NO: 1017271 - DNA, 25 bp, Homo sapien
gccctggattgtcactgcatgccta

SEQ ID NO: 1017272 - DNA, 25 bp, Homo sapien
taccctgaggttaggattgcaatgt

SEQ ID NO: 1017273 - DNA, 25 bp, Homo sapien
gattttgccatgctgtggcggaaca

SEQ ID NO: 1017274 - DNA, 25 bp, Homo sapien
tgtgccccgctttgctcactgctca

SEQ ID NO: 1017275 - DNA, 25 bp, Homo sapien
cccgctttgctcactgctcacggag

SEQ ID NO: 1017276 - DNA, 25 bp, Homo sapien
gctggggtctgaaggcccatctggt

SEQ ID NO: 1017277 - DNA, 25 bp, Homo sapien
tgctgtgccccgctttgctcactgc

SEQ ID NO: 1017278 - DNA, 25 bp, Homo sapien
agtgcaaatggcgagatctcggctc

SEQ ID NO: 1017279 - DNA, 25 bp, Homo sapien
actgcaacctctgcctcccagattc

SEQ ID NO: 1017280 - DNA, 25 bp, Homo sapien
ttgagtcagagttttactcttgtca

SEQ ID NO: 1017281 - DNA, 25 bp, Homo sapien
actcttgtcacccaggctggagtgc

SEQ ID NO: 1017282 - DNA, 25 bp, Homo sapien
gtttctgactcaagggccttgcact

SEQ ID NO: 1017283 - DNA, 25 bp, Homo sapien
tttctgactcaagggccttgcactg

SEQ ID NO: 1017284 - DNA, 25 bp, Homo sapien
cttgcactggtgagaaacagttcta

SEQ ID NO: 1017285 - DNA, 25 bp, Homo sapien
ggccttgcactggtgagaaacagtt

SEQ ID NO: 1017286 - DNA, 25 bp, Homo sapien
gggagaatgataactaaaacctgaa

SEQ ID NO: 1017287 - DNA, 25 bp, Homo sapien
gatggcaagttctaccgacgataag

SEQ ID NO: 1017288 - DNA, 25 bp, Homo sapien
caaacaattgatcatcgatggcaag

SEQ ID NO: 1017289 - DNA, 25 bp, Homo sapien
gacctgctcccgttgttgtaggcca

SEQ ID NO: 1017290 - DNA, 25 bp, Homo sapien
cgagctccggctggcacgctggctc

SEQ ID NO: 1017291 - DNA, 25 bp, Homo sapien
cggcgagctccggctggcacgctgg

SEQ ID NO: 1017292 - DNA, 25 bp, Homo sapien
cccggcgagctccggctggcacgct

SEQ ID NO: 1017293 - DNA, 25 bp, Homo sapien
ctccggctggcacgctggctccgcg

SEQ ID NO: 1017294 - DNA, 25 bp, Homo sapien
ccctctccggtgtagtgcagaaagc

SEQ ID NO: 1017295 - DNA, 25 bp, Homo sapien
tcctacttgcgaccaaaaaacctgc

SEQ ID NO: 1017296 - DNA, 25 bp, Homo sapien
gcagaaagcttcctacttgcgacca

SEQ ID NO: 1017297 - DNA, 25 bp, Homo sapien
aaaacctgccccggctactgagcat

SEQ ID NO: 1017298 - DNA, 25 bp, Homo sapien
cgcggccagtgcgggccggcggcgc

SEQ ID NO: 1017299 - DNA, 25 bp, Homo sapien
cgacactttgtttcagttgggtcct

SEQ ID NO: 1017300 - DNA, 25 bp, Homo sapien
cggccgacactttgtttcagttggg

SEQ ID NO: 1017301 - DNA, 25 bp, Homo sapien
gccgggcggccgacactttgtttca

SEQ ID NO: 1017302 - DNA, 25 bp, Homo sapien
cgggcggccgacactttgtttcagt

SEQ ID NO: 1017303 - DNA, 25 bp, Homo sapien
gcttctcggaacataagattcctgt

SEQ ID NO: 1017304 - DNA, 25 bp, Homo sapien
tataatctcgtggtttgggttcaag

SEQ ID NO: 1017305 - DNA, 25 bp, Homo sapien
cgcagagcctaagggtctgaaacac

SEQ ID NO: 1017306 - DNA, 25 bp, Homo sapien
acacagaagggcgtatccagaggct

SEQ ID NO: 1017307 - DNA, 25 bp, Homo sapien
tgagatacactaaagagctgggata

SEQ ID NO: 1017308 - DNA, 25 bp, Homo sapien
gtttctaacatgctaaaggtgccag

SEQ ID NO: 1017309 - DNA, 25 bp, Homo sapien
gcagagagcctactacaaatggaaa

SEQ ID NO: 1017310 - DNA, 25 bp, Homo sapien
ggtgccagtcaagtccaagtacata

SEQ ID NO: 1017311 - DNA, 25 bp, Homo sapien
gggccactaatccacagctcagctt

SEQ ID NO: 1017312 - DNA, 25 bp, Homo sapien
cagtccgtctctgcttctgaagcca

SEQ ID NO: 1017313 - DNA, 25 bp, Homo sapien
ggcatcattatggaaggtaacacag

SEQ ID NO: 1017314 - DNA, 25 bp, Homo sapien
cagcctaaatcaaggatctctggag

SEQ ID NO: 1017315 - DNA, 25 bp, Homo sapien
gggtgtaagacagttgagaacttcc

SEQ ID NO: 1017316 - DNA, 25 bp, Homo sapien
aagccaggtaacacaaacacaagtg

SEQ ID NO: 1017317 - DNA, 25 bp, Homo sapien
gtaagacagttgagaacttccctct

SEQ ID NO: 1017318 - DNA, 25 bp, Homo sapien
ccaggtaacacaaacacaagtgggc

SEQ ID NO: 1017319 - DNA, 25 bp, Homo sapien
caacgttgtacttgacggtcctagc

SEQ ID NO: 1017320 - DNA, 25 bp, Homo sapien
catgaaacccttccgaggagtcgcc

SEQ ID NO: 1017321 - DNA, 25 bp, Homo sapien
gagatacgagtaagggacatgcacc

SEQ ID NO: 1017322 - DNA, 25 bp, Homo sapien
cattactgagagagacgagatacga

SEQ ID NO: 1017323 - DNA, 25 bp, Homo sapien
tacaagcggctgcatatcacaggaa

SEQ ID NO: 1017324 - DNA, 25 bp, Homo sapien
caactatgctcaagctagggcggca

SEQ ID NO: 1017325 - DNA, 25 bp, Homo sapien
caagcagcacggtgaaaaagcagtc

SEQ ID NO: 1017326 - DNA, 25 bp, Homo sapien
taagatgctgaaatccctagctgac

SEQ ID NO: 1017327 - DNA, 25 bp, Homo sapien
tagatttcgcaacaatacaacaggc

SEQ ID NO: 1017328 - DNA, 25 bp, Homo sapien
caatgcatgagtattaggctccggc

SEQ ID NO: 1017329 - DNA, 25 bp, Homo sapien
tccggctgaagttagctggctccca

SEQ ID NO: 1017330 - DNA, 25 bp, Homo sapien
gcctgagggaaagagcacacagttc

SEQ ID NO: 1017331 - DNA, 25 bp, Homo sapien
tgtctatgcagcctcttcttaaata

SEQ ID NO: 1017332 - DNA, 25 bp, Homo sapien
tcctgtctatgcagcctcttcttaa

SEQ ID NO: 1017333 - DNA, 25 bp, Homo sapien
tatgcagcctcttcttaaatacaat

SEQ ID NO: 1017334 - DNA, 25 bp, Homo sapien
gttttcctgtctatgcagcctcttc

SEQ ID NO: 1017335 - DNA, 25 bp, Homo sapien
tgcacagccatgtctacgtcagagc

SEQ ID NO: 1017336 - DNA, 25 bp, Homo sapien
tcttaccagtgacagaccaaaagtc

SEQ ID NO: 1017337 - DNA, 25 bp, Homo sapien
gacttcttacgacaatgcacagcca

SEQ ID NO: 1017338 - DNA, 25 bp, Homo sapien
cacagaaggaattgggcaggcttca

SEQ ID NO: 1017339 - DNA, 25 bp, Homo sapien
ggctgttcgagcaaaccaaatctaa

SEQ ID NO: 1017340 - DNA, 25 bp, Homo sapien
caggatcacctcaatcaatgcagaa

SEQ ID NO: 1017341 - DNA, 25 bp, Homo sapien
gcaatgcatgctaaccaaaagtgat

SEQ ID NO: 1017342 - DNA, 25 bp, Homo sapien
caaaagtgataggttcatgcaaggc

SEQ ID NO: 1017343 - DNA, 25 bp, Homo sapien
ttcagcaggtcgattattaagctaa

SEQ ID NO: 1017344 - DNA, 25 bp, Homo sapien
agagaatggtaaagtccaacttaat

SEQ ID NO: 1017345 - DNA, 25 bp, Homo sapien
gagaatggtaaagtccaacttaata

SEQ ID NO: 1017346 - DNA, 25 bp, Homo sapien
tactttaaggctaccaaggcagaag

SEQ ID NO: 1017347 - DNA, 25 bp, Homo sapien
tcaacaaattggtctgcgggccaaa

SEQ ID NO: 1017348 - DNA, 25 bp, Homo sapien
tcaactcgtggaacaagggtcaaca

SEQ ID NO: 1017349 - DNA, 25 bp, Homo sapien
tgcaatagatagctgtggccaagaa

SEQ ID NO: 1017350 - DNA, 25 bp, Homo sapien
tcacagatctaagtggatctgagac

SEQ ID NO: 1017351 - DNA, 25 bp, Homo sapien
tgcagaaacctaatagggggctact

SEQ ID NO: 1017352 - DNA, 25 bp, Homo sapien
cagatctaagtggatctgagactac

SEQ ID NO: 1017353 - DNA, 25 bp, Homo sapien
taagtggatctgagactactgcaga

SEQ ID NO: 1017354 - DNA, 25 bp, Homo sapien
ggtctcattagttcacacagcaggg

SEQ ID NO: 1017355 - DNA, 25 bp, Homo sapien
tgggtctcattagttcacacagcag

SEQ ID NO: 1017356 - DNA, 25 bp, Homo sapien
ctgggtctcattagttcacacagca

SEQ ID NO: 1017357 - DNA, 25 bp, Homo sapien
gggtctcattagttcacacagcagg

SEQ ID NO: 1017358 - DNA, 25 bp, Homo sapien
tctcatgtgcctggtcattgatgca

SEQ ID NO: 1017359 - DNA, 25 bp, Homo sapien
gatcagctgtgatgcagtgcagact

SEQ ID NO: 1017360 - DNA, 25 bp, Homo sapien
tataataggaggcatacatcgggct

SEQ ID NO: 1017361 - DNA, 25 bp, Homo sapien
tctctcctgtgtcgaagaccttcat

SEQ ID NO: 1017362 - DNA, 25 bp, Homo sapien
gaacaggtgaatgacaactagggcc

SEQ ID NO: 1017363 - DNA, 25 bp, Homo sapien
cttcactaagaagggccaaactggc

SEQ ID NO: 1017364 - DNA, 25 bp, Homo sapien
gtatcagctctacaagaacaggtga

SEQ ID NO: 1017365 - DNA, 25 bp, Homo sapien
tccaggcaaccaaacgcaactgcgt

SEQ ID NO: 1017366 - DNA, 25 bp, Homo sapien
cacaccacacgaattatcgtgctgc

SEQ ID NO: 1017367 - DNA, 25 bp, Homo sapien
gtttttgtgcaaaagcagtggagaa

SEQ ID NO: 1017368 - DNA, 25 bp, Homo sapien
tgccaaaagtcagtactatctgttt

SEQ ID NO: 1017369 - DNA, 25 bp, Homo sapien
cagtagtgaccttagtgtctgcagt

SEQ ID NO: 1017370 - DNA, 25 bp, Homo sapien
tcctataggctgaaaggactccaga

SEQ ID NO: 1017371 - DNA, 25 bp, Homo sapien
acagaaagcataaagtcctataggc

SEQ ID NO: 1017372 - DNA, 25 bp, Homo sapien
aaatgggaaatatgtgagtaaatac

SEQ ID NO: 1017373 - DNA, 25 bp, Homo sapien
tgggaagaacggtaaagcactggaa

SEQ ID NO: 1017374 - DNA, 25 bp, Homo sapien
gaatttcccaaggtgtaatgcactc

SEQ ID NO: 1017375 - DNA, 25 bp, Homo sapien
tatcacgtggctttaatggaagggc

SEQ ID NO: 1017376 - DNA, 25 bp, Homo sapien
ccagatgcaagagggacaaggcaat

SEQ ID NO: 1017377 - DNA, 25 bp, Homo sapien
tccattttgaccaatgcgggcccca

SEQ ID NO: 1017378 - DNA, 25 bp, Homo sapien
ccttcacagagggagagtgcagtct

SEQ ID NO: 1017379 - DNA, 25 bp, Homo sapien
gatggctatggctcttaaaggtcta

SEQ ID NO: 1017380 - DNA, 25 bp, Homo sapien
tcactatgcttctaggaggaagaca

SEQ ID NO: 1017381 - DNA, 25 bp, Homo sapien
taaaggtctacagctcagttcaatc

SEQ ID NO: 1017382 - DNA, 25 bp, Homo sapien
ctaaaccagagtattcccgtttgct

SEQ ID NO: 1017383 - DNA, 25 bp, Homo sapien
tctgtttccttagagccgaggcagg

SEQ ID NO: 1017384 - DNA, 25 bp, Homo sapien
gaagcgggcagtatactaaaccaga

SEQ ID NO: 1017385 - DNA, 25 bp, Homo sapien
cttaaatcaatgtccactccagaag

SEQ ID NO: 1017386 - DNA, 25 bp, Homo sapien
ttacatctgcagttactataaaagc

SEQ ID NO: 1017387 - DNA, 25 bp, Homo sapien
aatctgttattacatctgcagttac

SEQ ID NO: 1017388 - DNA, 25 bp, Homo sapien
gttactataaaagcatcagcttgca

SEQ ID NO: 1017389 - DNA, 25 bp, Homo sapien
tgttattacatctgcagttactata

SEQ ID NO: 1017390 - DNA, 25 bp, Homo sapien
gcctggtcatcccagggttccagca

SEQ ID NO: 1017391 - DNA, 25 bp, Homo sapien
cagcagcgggcacccaggcaacagc

SEQ ID NO: 1017392 - DNA, 25 bp, Homo sapien
gctggagcagctcgaggcatctgca

SEQ ID NO: 1017393 - DNA, 25 bp, Homo sapien
gctgtgcctggtcatcccagggttc

SEQ ID NO: 1017394 - DNA, 25 bp, Homo sapien
gcttctccgtgtggcgtctgttgaa

SEQ ID NO: 1017395 - DNA, 25 bp, Homo sapien
tggtctttcccaatcacgagtgcct

SEQ ID NO: 1017396 - DNA, 25 bp, Homo sapien
tcgctaggtccatgttcttccggct

SEQ ID NO: 1017397 - DNA, 25 bp, Homo sapien
gttcacgaggtgctgttccggctcc

SEQ ID NO: 1017398 - DNA, 25 bp, Homo sapien
gctctgaaagccgtccactgcggtc

SEQ ID NO: 1017399 - DNA, 25 bp, Homo sapien
ttttccgctgccacttcgggtgcca

SEQ ID NO: 1017400 - DNA, 25 bp, Homo sapien
tccagtttctcagggctctcgctct

SEQ ID NO: 1017401 - DNA, 25 bp, Homo sapien
tagtgggtgtatcctgggcctgctc

SEQ ID NO: 1017402 - DNA, 25 bp, Homo sapien
tctgggatcaccacggagcctgagc

SEQ ID NO: 1017403 - DNA, 25 bp, Homo sapien
cgagccctctgggatcaccacggag

SEQ ID NO: 1017404 - DNA, 25 bp, Homo sapien
tcaaggcctgatctctagagaagga

SEQ ID NO: 1017405 - DNA, 25 bp, Homo sapien
tctagagaaggacccgagccctctg

SEQ ID NO: 1017406 - DNA, 25 bp, Homo sapien
taaggtacagcatgccactggagga

SEQ ID NO: 1017407 - DNA, 25 bp, Homo sapien
gctagagagcctgtaccctgtgtat

SEQ ID NO: 1017408 - DNA, 25 bp, Homo sapien
tagtagcacatgcagcgacaagagc

SEQ ID NO: 1017409 - DNA, 25 bp, Homo sapien
tatatagctgctcccaaccttaagg

SEQ ID NO: 1017410 - DNA, 25 bp, Homo sapien
tccatgcgggaaggatggcctgact

SEQ ID NO: 1017411 - DNA, 25 bp, Homo sapien
tagatgaagttgacctcaccccttg

SEQ ID NO: 1017412 - DNA, 25 bp, Homo sapien
cagtttcactcacttgacacagaag

SEQ ID NO: 1017413 - DNA, 25 bp, Homo sapien
gatggtaacttcaggccacagatcc

SEQ ID NO: 1017414 - DNA, 25 bp, Homo sapien
tgtgcctctggctacaaaccaagga

SEQ ID NO: 1017415 - DNA, 25 bp, Homo sapien
caaaggttagtatggctgccctgca

SEQ ID NO: 1017416 - DNA, 25 bp, Homo sapien
gtttcagtgcctacacatggtctcc

SEQ ID NO: 1017417 - DNA, 25 bp, Homo sapien
gaaagtggatgtcctgtaaccccta

SEQ ID NO: 1017418 - DNA, 25 bp, Homo sapien
tgcccacgtctgaaggttctgtagt

SEQ ID NO: 1017419 - DNA, 25 bp, Homo sapien
acccagtgtaggatccaggcctcat

SEQ ID NO: 1017420 - DNA, 25 bp, Homo sapien
tagagacagtcaagtgtctttgccc

SEQ ID NO: 1017421 - DNA, 25 bp, Homo sapien
actatacagttagcgcaggtttcaa

SEQ ID NO: 1017422 - DNA, 25 bp, Homo sapien
ggcttagtcactagtattccatgtc

SEQ ID NO: 1017423 - DNA, 25 bp, Homo sapien
aacgaggcttagtcactagtattcc

SEQ ID NO: 1017424 - DNA, 25 bp, Homo sapien
gagaaaacgaggcttagtcactagt

SEQ ID NO: 1017425 - DNA, 25 bp, Homo sapien
agagagaaaacgaggcttagtcact

SEQ ID NO: 1017426 - DNA, 25 bp, Homo sapien
actgctcagtatcgaagtcgttcat

SEQ ID NO: 1017427 - DNA, 25 bp, Homo sapien
tttcaactgctcagtatcgaagtcg

SEQ ID NO: 1017428 - DNA, 25 bp, Homo sapien
caactgctcagtatcgaagtcgttc

SEQ ID NO: 1017429 - DNA, 25 bp, Homo sapien
ttctttcaactgctcagtatcgaag

SEQ ID NO: 1017430 - DNA, 25 bp, Homo sapien
tctctgagggcggagcatgaagaat

SEQ ID NO: 1017431 - DNA, 25 bp, Homo sapien
tgtccaaatatgatccaatgtggtg

SEQ ID NO: 1017432 - DNA, 25 bp, Homo sapien
gaggagccaaataacctccctggca

SEQ ID NO: 1017433 - DNA, 25 bp, Homo sapien
ctttactagtagcattagcaatggc

SEQ ID NO: 1017434 - DNA, 25 bp, Homo sapien
tgccgagagtttgaaatcacagtag

SEQ ID NO: 1017435 - DNA, 25 bp, Homo sapien
gccgagagtttgaaatcacagtagt

SEQ ID NO: 1017436 - DNA, 25 bp, Homo sapien
ctgccgagagtttgaaatcacagta

SEQ ID NO: 1017437 - DNA, 25 bp, Homo sapien
agatgtctgtatgttggttgtccca

SEQ ID NO: 1017438 - DNA, 25 bp, Homo sapien
tctctgaggactttgtggataacaa

SEQ ID NO: 1017439 - DNA, 25 bp, Homo sapien
tgcctcacgctgaaacgcaatcgct

SEQ ID NO: 1017440 - DNA, 25 bp, Homo sapien
gatttagtgagttattctctgagga

SEQ ID NO: 1017441 - DNA, 25 bp, Homo sapien
tctctgtatctgtaggcactttctg

SEQ ID NO: 1017442 - DNA, 25 bp, Homo sapien
gatataggttaggttcaaatactcc

SEQ ID NO: 1017443 - DNA, 25 bp, Homo sapien
tactaggcactatcagcaatgagca

SEQ ID NO: 1017444 - DNA, 25 bp, Homo sapien
tagctactcacaaactactaggact

SEQ ID NO: 1017445 - DNA, 25 bp, Homo sapien
tgtctggacaaaactcaacctagct

SEQ ID NO: 1017446 - DNA, 25 bp, Homo sapien
atcaaggctcactgtgctctctaac

SEQ ID NO: 1017447 - DNA, 25 bp, Homo sapien
ttggcgtgcagtggtttaatcaagg

SEQ ID NO: 1017448 - DNA, 25 bp, Homo sapien
caaggctcactgtgctctctaactc

SEQ ID NO: 1017449 - DNA, 25 bp, Homo sapien
tttcaacctttttgtaagagatgga

SEQ ID NO: 1017450 - DNA, 25 bp, Homo sapien
tgctgtcatcggcagcggccgtgct

SEQ ID NO: 1017451 - DNA, 25 bp, Homo sapien
gcgctgagcagtaccagcttgctgt

SEQ ID NO: 1017452 - DNA, 25 bp, Homo sapien
tcaagtccacaacagaagacgctgc

SEQ ID NO: 1017453 - DNA, 25 bp, Homo sapien
tcctgtcatctgtcagacgtcgtat

SEQ ID NO: 1017454 - DNA, 25 bp, Homo sapien
ctcccaaatcctcttgcccctgggg

SEQ ID NO: 1017455 - DNA, 25 bp, Homo sapien
actgcttgggcagggcccccggtct

SEQ ID NO: 1017456 - DNA, 25 bp, Homo sapien
ctctcccaaatcctcttgcccctgg

SEQ ID NO: 1017457 - DNA, 25 bp, Homo sapien
ttgcccctggggcactgcttgggca

SEQ ID NO: 1017458 - DNA, 25 bp, Homo sapien
gagcccacgcatgtagtggctgtca

SEQ ID NO: 1017459 - DNA, 25 bp, Homo sapien
tacggaaatcctgaagacttgagat

SEQ ID NO: 1017460 - DNA, 25 bp, Homo sapien
tacaggccctacgtgaaggccacag

SEQ ID NO: 1017461 - DNA, 25 bp, Homo sapien
cagcagttgtggaccctagacttat

SEQ ID NO: 1017462 - DNA, 25 bp, Homo sapien
ggggaattactcaaaacattgcata

SEQ ID NO: 1017463 - DNA, 25 bp, Homo sapien
ttgcatatttgagcaaaggaaaagt

SEQ ID NO: 1017464 - DNA, 25 bp, Homo sapien
cattgcatatttgagcaaaggaaaa

SEQ ID NO: 1017465 - DNA, 25 bp, Homo sapien
ataaatggggaattactcaaaacat

SEQ ID NO: 1017466 - DNA, 25 bp, Homo sapien
tgggaaacataacggtagaacagcc

SEQ ID NO: 1017467 - DNA, 25 bp, Homo sapien
tagatgctcctagaccaatggctgg

SEQ ID NO: 1017468 - DNA, 25 bp, Homo sapien
tggctgggccattgactgctacaat

SEQ ID NO: 1017469 - DNA, 25 bp, Homo sapien
tagcccaaaccacatcgcaaagagg

SEQ ID NO: 1017470 - DNA, 25 bp, Homo sapien
agggcgtcggcacggcctgagaggt

SEQ ID NO: 1017471 - DNA, 25 bp, Homo sapien
gcctggtagggcgtcggcacggcct

SEQ ID NO: 1017472 - DNA, 25 bp, Homo sapien
tcggcacggcctgagaggtgccagt

SEQ ID NO: 1017473 - DNA, 25 bp, Homo sapien
cggcctgagaggtgccagtttggag

SEQ ID NO: 1017474 - DNA, 25 bp, Homo sapien
tcaaggtggtttagtatttgcccca

SEQ ID NO: 1017475 - DNA, 25 bp, Homo sapien
tagagtagggagaaacacggctgac

SEQ ID NO: 1017476 - DNA, 25 bp, Homo sapien
cagctcaagaggcaccagtacatct

SEQ ID NO: 1017477 - DNA, 25 bp, Homo sapien
taacggccatctcctcatgtgtgac

SEQ ID NO: 1017478 - DNA, 25 bp, Homo sapien
cagtggatttagaaacgcgacccga

SEQ ID NO: 1017479 - DNA, 25 bp, Homo sapien
tagtccttgtcacggcagatccaaa

SEQ ID NO: 1017480 - DNA, 25 bp, Homo sapien
tgtctgcggttcaatcacaaagggc

SEQ ID NO: 1017481 - DNA, 25 bp, Homo sapien
tagaaacccctgaactgacgagctt

SEQ ID NO: 1017482 - DNA, 25 bp, Homo sapien
aagctccttaatgcgaaccatcact

SEQ ID NO: 1017483 - DNA, 25 bp, Homo sapien
tcctgagtgaacgtcccgggccaaa

SEQ ID NO: 1017484 - DNA, 25 bp, Homo sapien
tgcgctgtcagcttccgtccactga

SEQ ID NO: 1017485 - DNA, 25 bp, Homo sapien
gtcagcttccgtccactgagcagca

SEQ ID NO: 1017486 - DNA, 25 bp, Homo sapien
aatgtgactgaaaggctttggaacc

SEQ ID NO: 1017487 - DNA, 25 bp, Homo sapien
taggacatttgctaacttgctgaca

SEQ ID NO: 1017488 - DNA, 25 bp, Homo sapien
tgctgacatttcagactgaagtcca

SEQ ID NO: 1017489 - DNA, 25 bp, Homo sapien
ccaaaaacaacttaggcccactgtg

SEQ ID NO: 1017490 - DNA, 25 bp, Homo sapien
ccgaactggacgtctgctctgctga

SEQ ID NO: 1017491 - DNA, 25 bp, Homo sapien
gccactgccgcatactggcgtggac

SEQ ID NO: 1017492 - DNA, 25 bp, Homo sapien
tcataatgagggttgcttgtctgcc

SEQ ID NO: 1017493 - DNA, 25 bp, Homo sapien
tgggctgtcggcacccagcctgtga

SEQ ID NO: 1017494 - DNA, 25 bp, Homo sapien
caagcagccagttagcagggtgcat

SEQ ID NO: 1017495 - DNA, 25 bp, Homo sapien
gtcgggcctaacatatgtataaagc

SEQ ID NO: 1017496 - DNA, 25 bp, Homo sapien
ccacatttacggaggcaatcatcaa

SEQ ID NO: 1017497 - DNA, 25 bp, Homo sapien
attttctcacaatatgtcgggccta

SEQ ID NO: 1017498 - DNA, 25 bp, Homo sapien
tcatcgatcttcctctgcaagtact

SEQ ID NO: 1017499 - DNA, 25 bp, Homo sapien
actcatcgatcttcctctgcaagta

SEQ ID NO: 1017500 - DNA, 25 bp, Homo sapien
catcccctgggccgagccccagatt

SEQ ID NO: 1017501 - DNA, 25 bp, Homo sapien
tcgatcttcctctgcaagtacttta

SEQ ID NO: 1017502 - DNA, 25 bp, Homo sapien
gcccgatcccggtgtcaccagtggg

SEQ ID NO: 1017503 - DNA, 25 bp, Homo sapien
gatcccggtgtcaccagtgggcagc

SEQ ID NO: 1017504 - DNA, 25 bp, Homo sapien
ccgatcccggtgtcaccagtgggca

SEQ ID NO: 1017505 - DNA, 25 bp, Homo sapien
cgatcccggtgtcaccagtgggcag

SEQ ID NO: 1017506 - DNA, 25 bp, Homo sapien
gtttcaggctgtgagaatggatcag

SEQ ID NO: 1017507 - DNA, 25 bp, Homo sapien
aactcctcgataataaatagcgtgg

SEQ ID NO: 1017508 - DNA, 25 bp, Homo sapien
cgataataaatagcgtggatgttcc

SEQ ID NO: 1017509 - DNA, 25 bp, Homo sapien
tccaagcgtaagctacgggtgagct

SEQ ID NO: 1017510 - DNA, 25 bp, Homo sapien
tacacactgtacagctctccgcgtg

SEQ ID NO: 1017511 - DNA, 25 bp, Homo sapien
cgaaaaggtaggtcccacagatgca

SEQ ID NO: 1017512 - DNA, 25 bp, Homo sapien
taataggcatctggagtctggaatc

SEQ ID NO: 1017513 - DNA, 25 bp, Homo sapien
tgtctatccacacagggcactcttg

SEQ ID NO: 1017514 - DNA, 25 bp, Homo sapien
ctccaggaggcccactggtcctggt

SEQ ID NO: 1017515 - DNA, 25 bp, Homo sapien
ggcccactggtcctggtgcgttcat

SEQ ID NO: 1017516 - DNA, 25 bp, Homo sapien
aggaggcccactggtcctggtgcgt

SEQ ID NO: 1017517 - DNA, 25 bp, Homo sapien
tctccaggaggcccactggtcctgg

SEQ ID NO: 1017518 - DNA, 25 bp, Homo sapien
ctgcaaacagactgaggacacacat

SEQ ID NO: 1017519 - DNA, 25 bp, Homo sapien
gaggacacacatgagtctgtttgca

SEQ ID NO: 1017520 - DNA, 25 bp, Homo sapien
aacagactgaggacacacatgagtc

SEQ ID NO: 1017521 - DNA, 25 bp, Homo sapien
atgagtctgtttgcattgccatggg

SEQ ID NO: 1017522 - DNA, 25 bp, Homo sapien
ctgcatcccgcaggtgcgggacttg

SEQ ID NO: 1017523 - DNA, 25 bp, Homo sapien
acttggcgaatggagggagggtgcc

SEQ ID NO: 1017524 - DNA, 25 bp, Homo sapien
caggtgcgggacttggcgaatggag

SEQ ID NO: 1017525 - DNA, 25 bp, Homo sapien
ccgcaggtgcgggacttggcgaatg

SEQ ID NO: 1017526 - DNA, 25 bp, Homo sapien
tccacaggccaagtcgaatccaaga

SEQ ID NO: 1017527 - DNA, 25 bp, Homo sapien
tgccaactgcttgccagacattcgc

SEQ ID NO: 1017528 - DNA, 25 bp, Homo sapien
acattcgcttaagacagctccacag

SEQ ID NO: 1017529 - DNA, 25 bp, Homo sapien
tcttctgccatacccaatttcttct

SEQ ID NO: 1017530 - DNA, 25 bp, Homo sapien
agaagaaaatgtcccacctgctcct

SEQ ID NO: 1017531 - DNA, 25 bp, Homo sapien
cccagaagaaaatgtcccacctgct

SEQ ID NO: 1017532 - DNA, 25 bp, Homo sapien
gaccccatccccagaagaaaatgtc

SEQ ID NO: 1017533 - DNA, 25 bp, Homo sapien
gctcgtcctggaccccatccccaga

SEQ ID NO: 1017534 - DNA, 25 bp, Homo sapien
tcacccactgaatactcacaaaatg

SEQ ID NO: 1017535 - DNA, 25 bp, Homo sapien
tctgtcacccactgaatactcacaa

SEQ ID NO: 1017536 - DNA, 25 bp, Homo sapien
cccactgaatactcacaaaatgtgc

SEQ ID NO: 1017537 - DNA, 25 bp, Homo sapien
ttttggtgaggtcaatatatgcttt

SEQ ID NO: 1017538 - DNA, 25 bp, Homo sapien
tggtgatgatatgctccaccacatc

SEQ ID NO: 1017539 - DNA, 25 bp, Homo sapien
gctccaccacatcctcagtgagttt

SEQ ID NO: 1017540 - DNA, 25 bp, Homo sapien
aatggtgatgatatgctccaccaca

SEQ ID NO: 1017541 - DNA, 25 bp, Homo sapien
cacatcctcagtgagttttcctgac

SEQ ID NO: 1017542 - DNA, 25 bp, Homo sapien
gtcccagaattggtgcggtccttta

SEQ ID NO: 1017543 - DNA, 25 bp, Homo sapien
tgaccttggacacaaaagtcccaga

SEQ ID NO: 1017544 - DNA, 25 bp, Homo sapien
tccatcgtcgacatcctcctgtctg

SEQ ID NO: 1017545 - DNA, 25 bp, Homo sapien
cctttattgacccaaatcttgttca

SEQ ID NO: 1017546 - DNA, 25 bp, Homo sapien
cagacgtatttcttcttggacatac

SEQ ID NO: 1017547 - DNA, 25 bp, Homo sapien
taggtatacaaactattaattaaca

SEQ ID NO: 1017548 - DNA, 25 bp, Homo sapien
aattaacagacaaggcctacagacg

SEQ ID NO: 1017549 - DNA, 25 bp, Homo sapien
aggtatacaaactattaattaacag

SEQ ID NO: 1017550 - DNA, 25 bp, Homo sapien
tataactacagggtgagtccggctg

SEQ ID NO: 1017551 - DNA, 25 bp, Homo sapien
ggtttgcgagaaatccaacttcggc

SEQ ID NO: 1017552 - DNA, 25 bp, Homo sapien
caccggcatcttgtgcagacgcact

SEQ ID NO: 1017553 - DNA, 25 bp, Homo sapien
tccggctgtcctcggcttttcgggc

SEQ ID NO: 1017554 - DNA, 25 bp, Homo sapien
tcggccagattactgatgtttataa

SEQ ID NO: 1017555 - DNA, 25 bp, Homo sapien
ccagattactgatgtttataatggc

SEQ ID NO: 1017556 - DNA, 25 bp, Homo sapien
ctgtgctcggccagattactgatgt

SEQ ID NO: 1017557 - DNA, 25 bp, Homo sapien
tgctcggccagattactgatgttta

SEQ ID NO: 1017558 - DNA, 25 bp, Homo sapien
caaagcacagactacagatgagctg

SEQ ID NO: 1017559 - DNA, 25 bp, Homo sapien
cagtgacgctatgctccatgcaggc

SEQ ID NO: 1017560 - DNA, 25 bp, Homo sapien
ctctatatctaagctgttggcacac

SEQ ID NO: 1017561 - DNA, 25 bp, Homo sapien
tgtagaggtccctcctcaaggcagc

SEQ ID NO: 1017562 - DNA, 25 bp, Homo sapien
cggcctgaggattcccctgactgtg

SEQ ID NO: 1017563 - DNA, 25 bp, Homo sapien
gcggcctgaggattcccctgactgt

SEQ ID NO: 1017564 - DNA, 25 bp, Homo sapien
ggagggcggcctgaggattcccctg

SEQ ID NO: 1017565 - DNA, 25 bp, Homo sapien
ggcggcctgaggattcccctgactg

SEQ ID NO: 1017566 - DNA, 25 bp, Homo sapien
ctggaggagactttagagctgagct

SEQ ID NO: 1017567 - DNA, 25 bp, Homo sapien
gaagtgacatcataaagctggagga

SEQ ID NO: 1017568 - DNA, 25 bp, Homo sapien
gttggacggcacagacggaacatct

SEQ ID NO: 1017569 - DNA, 25 bp, Homo sapien
tctcgatcgttacaggaagttccac

SEQ ID NO: 1017570 - DNA, 25 bp, Homo sapien
caatggcaaagctgttgaggtcccc

SEQ ID NO: 1017571 - DNA, 25 bp, Homo sapien
aagatagtgtgcaatggcaaagctg

SEQ ID NO: 1017572 - DNA, 25 bp, Homo sapien
tcttgtctgcaaagatagtgtgcaa

SEQ ID NO: 1017573 - DNA, 25 bp, Homo sapien
tgtgcaatggcaaagctgttgaggt

SEQ ID NO: 1017574 - DNA, 25 bp, Homo sapien
aggagtccttgtaggccagcctgta

SEQ ID NO: 1017575 - DNA, 25 bp, Homo sapien
tagaaagaaggccatcatttgccct

SEQ ID NO: 1017576 - DNA, 25 bp, Homo sapien
gtatttctcaggtcatggtggcaag

SEQ ID NO: 1017577 - DNA, 25 bp, Homo sapien
taaggcacctttgcagcaatgatgg

SEQ ID NO: 1017578 - DNA, 25 bp, Homo sapien
agattgggcagactgctagtgtttc

SEQ ID NO: 1017579 - DNA, 25 bp, Homo sapien
tgttacatagcaattggcaaccgga

SEQ ID NO: 1017580 - DNA, 25 bp, Homo sapien
tgttgagtcacgattacagcatgcc

SEQ ID NO: 1017581 - DNA, 25 bp, Homo sapien
tagtgtcactaggatctctgctttg

SEQ ID NO: 1017582 - DNA, 25 bp, Homo sapien
tgcgtgcccaggagaaagcataagg

SEQ ID NO: 1017583 - DNA, 25 bp, Homo sapien
cactcatctatggttggacattggg

SEQ ID NO: 1017584 - DNA, 25 bp, Homo sapien
gaaaatctcagagagctgccaatga

SEQ ID NO: 1017585 - DNA, 25 bp, Homo sapien
gcagctgctcttttacaaatcgtgg

SEQ ID NO: 1017586 - DNA, 25 bp, Homo sapien
tgttgtagcacgtggcgggacttcc

SEQ ID NO: 1017587 - DNA, 25 bp, Homo sapien
agagctactcagcaggactcctgtc

SEQ ID NO: 1017588 - DNA, 25 bp, Homo sapien
aataccgtattggtgttcacagtcc

SEQ ID NO: 1017589 - DNA, 25 bp, Homo sapien
caaggcagggtcatatgaactccca

SEQ ID NO: 1017590 - DNA, 25 bp, Homo sapien
tatccatgaccgttcaatgacccag

SEQ ID NO: 1017591 - DNA, 25 bp, Homo sapien
atggcaggattatagctcgctgcag

SEQ ID NO: 1017592 - DNA, 25 bp, Homo sapien
gtgcaatggcaggattatagctcgc

SEQ ID NO: 1017593 - DNA, 25 bp, Homo sapien
tgcaatggcaggattatagctcgct

SEQ ID NO: 1017594 - DNA, 25 bp, Homo sapien
caatggcaggattatagctcgctgc

SEQ ID NO: 1017595 - DNA, 25 bp, Homo sapien
gggtctctcaatattgcccatgcta

SEQ ID NO: 1017596 - DNA, 25 bp, Homo sapien
tgataaatcagggaaaacaagttgg

SEQ ID NO: 1017597 - DNA, 25 bp, Homo sapien
gcctggccatatagaggacttctaa

SEQ ID NO: 1017598 - DNA, 25 bp, Homo sapien
cacaagaagccagtagcagtgtcac

SEQ ID NO: 1017599 - DNA, 25 bp, Homo sapien
ggaggcttctaatccttcctgccat

SEQ ID NO: 1017600 - DNA, 25 bp, Homo sapien
gagcaagggaggcttctaatccttc

SEQ ID NO: 1017601 - DNA, 25 bp, Homo sapien
aagggaggcttctaatccttcctgc

SEQ ID NO: 1017602 - DNA, 25 bp, Homo sapien
tgcagctctgagcaagggaggcttc

SEQ ID NO: 1017603 - DNA, 25 bp, Homo sapien
gacggtgaatagacaacagaattgt

SEQ ID NO: 1017604 - DNA, 25 bp, Homo sapien
gttgatgtcgcatttccaaactgac

SEQ ID NO: 1017605 - DNA, 25 bp, Homo sapien
tgctccccagcggacgatggttgat

SEQ ID NO: 1017606 - DNA, 25 bp, Homo sapien
tactttgacctcatacagtgtgacg

SEQ ID NO: 1017607 - DNA, 25 bp, Homo sapien
taccacatctgcgttctaccacact

SEQ ID NO: 1017608 - DNA, 25 bp, Homo sapien
tgtttaaaactttgatgtgggccga

SEQ ID NO: 1017609 - DNA, 25 bp, Homo sapien
ggccgatgcggtggctatttctacc

SEQ ID NO: 1017610 - DNA, 25 bp, Homo sapien
aaaactttgatgtgggccgatgcgg

SEQ ID NO: 1017611 - DNA, 25 bp, Homo sapien
gttttgcacattgagattccctagg

SEQ ID NO: 1017612 - DNA, 25 bp, Homo sapien
gcaccaaaggaagagcactaaacca

SEQ ID NO: 1017613 - DNA, 25 bp, Homo sapien
tgcaagaattcactccctattggga

SEQ ID NO: 1017614 - DNA, 25 bp, Homo sapien
ggttgaactggatcacggttctgca

SEQ ID NO: 1017615 - DNA, 25 bp, Homo sapien
ggcacatggaggtatgcagatccca

SEQ ID NO: 1017616 - DNA, 25 bp, Homo sapien
gtcataattggttccggcactgcct

SEQ ID NO: 1017617 - DNA, 25 bp, Homo sapien
ttgcacagcccgagatagttcaggt

SEQ ID NO: 1017618 - DNA, 25 bp, Homo sapien
aaaaccaggccttacagcttccaga

SEQ ID NO: 1017619 - DNA, 25 bp, Homo sapien
cgtttgttcgtgttacctattgctg

SEQ ID NO: 1017620 - DNA, 25 bp, Homo sapien
ccgtttgttcgtgttacctattgct

SEQ ID NO: 1017621 - DNA, 25 bp, Homo sapien
gtttgttcgtgttacctattgctgc

SEQ ID NO: 1017622 - DNA, 25 bp, Homo sapien
ctccaagctttaccgtttgttcgtg

SEQ ID NO: 1017623 - DNA, 25 bp, Homo sapien
gcagcccatggggacttcgggtcct

SEQ ID NO: 1017624 - DNA, 25 bp, Homo sapien
tgcagcccatggggacttcgggtcc

SEQ ID NO: 1017625 - DNA, 25 bp, Homo sapien
cagcccatggggacttcgggtcctc

SEQ ID NO: 1017626 - DNA, 25 bp, Homo sapien
cttgcagcccatggggacttcgggt

SEQ ID NO: 1017627 - DNA, 25 bp, Homo sapien
tcagaagcagaaacggtgtgcaccc

SEQ ID NO: 1017628 - DNA, 25 bp, Homo sapien
cctgcaacagggatagagaatgaac

SEQ ID NO: 1017629 - DNA, 25 bp, Homo sapien
tatactacaggaggtctaaagctga

SEQ ID NO: 1017630 - DNA, 25 bp, Homo sapien
ggactgagctttgagcagccctgat

SEQ ID NO: 1017631 - DNA, 25 bp, Homo sapien
tgttccgcttcttgagtgcctcgaa

SEQ ID NO: 1017632 - DNA, 25 bp, Homo sapien
gaaatcttgcctacgcagaggctgg

SEQ ID NO: 1017633 - DNA, 25 bp, Homo sapien
agagctcgcgctcaaccttcagaga

SEQ ID NO: 1017634 - DNA, 25 bp, Homo sapien
catgaacttggcctgacggctctgc

SEQ ID NO: 1017635 - DNA, 25 bp, Homo sapien
ggagcctccggcttttagctgcggc

SEQ ID NO: 1017636 - DNA, 25 bp, Homo sapien
cccaggctcgacaagacaacgtagt

SEQ ID NO: 1017637 - DNA, 25 bp, Homo sapien
tggagacttaactaactcctcgggc

SEQ ID NO: 1017638 - DNA, 25 bp, Homo sapien
aagacaacgtagttccactttggag

SEQ ID NO: 1017639 - DNA, 25 bp, Homo sapien
aaacttagccgcgcccctatgggct

SEQ ID NO: 1017640 - DNA, 25 bp, Homo sapien
tcggaagggcgctggtcccggcgcc

SEQ ID NO: 1017641 - DNA, 25 bp, Homo sapien
gggcctatcccctagctgagcgtca

SEQ ID NO: 1017642 - DNA, 25 bp, Homo sapien
agcgtcaggactcggggtctccgaa

SEQ ID NO: 1017643 - DNA, 25 bp, Homo sapien
ctgcaagatggggtcggcgggcaag

SEQ ID NO: 1017644 - DNA, 25 bp, Homo sapien
cgggcaaggaaaaggagcgcgcgcg

SEQ ID NO: 1017645 - DNA, 25 bp, Homo sapien
gtcggcgggcaaggaaaaggagcgc

SEQ ID NO: 1017646 - DNA, 25 bp, Homo sapien
cggcggcggcattccagcagctcct

SEQ ID NO: 1017647 - DNA, 25 bp, Homo sapien
tcgccgcccagtgccaccgcctgtt

SEQ ID NO: 1017648 - DNA, 25 bp, Homo sapien
cgcccagtgccaccgcctgttgctg

SEQ ID NO: 1017649 - DNA, 25 bp, Homo sapien
ccgggccgagctgtgcgtcctccgc

SEQ ID NO: 1017650 - DNA, 25 bp, Homo sapien
gagctgtgcgtcctccgccccctcg

SEQ ID NO: 1017651 - DNA, 25 bp, Homo sapien
ggcacagcgagaagtggaagcactc

SEQ ID NO: 1017652 - DNA, 25 bp, Homo sapien
gctgaagtgcttcacgctggccagg

SEQ ID NO: 1017653 - DNA, 25 bp, Homo sapien
tcctcggcacgcatagggaagcttc

SEQ ID NO: 1017654 - DNA, 25 bp, Homo sapien
cggtaaaggtgtagcgcacggtcac

SEQ ID NO: 1017655 - DNA, 25 bp, Homo sapien
aaggccttagaaccatgcccgggag

SEQ ID NO: 1017656 - DNA, 25 bp, Homo sapien
taaagtgcgcacatcatcagctgac

SEQ ID NO: 1017657 - DNA, 25 bp, Homo sapien
gaagtttgggccctttcgcagtaga

SEQ ID NO: 1017658 - DNA, 25 bp, Homo sapien
taaacaacgtcaagtctgggcacac

SEQ ID NO: 1017659 - DNA, 25 bp, Homo sapien
cagaccaagattacctgatgatgca

SEQ ID NO: 1017660 - DNA, 25 bp, Homo sapien
aaatgttgctttattgccccacaaa

SEQ ID NO: 1017661 - DNA, 25 bp, Homo sapien
gaagccaattcaaacgggtgctatg

SEQ ID NO: 1017662 - DNA, 25 bp, Homo sapien
gccatagtcaaagggatatctccaa

SEQ ID NO: 1017663 - DNA, 25 bp, Homo sapien
tgtgagcaccaaaaaatgttcgtag

SEQ ID NO: 1017664 - DNA, 25 bp, Homo sapien
tgggctatccatcatctcgaacgat

SEQ ID NO: 1017665 - DNA, 25 bp, Homo sapien
gaggatctgtttagcagcacccagg

SEQ ID NO: 1017666 - DNA, 25 bp, Homo sapien
taccacttggttgcaccggaagcct

SEQ ID NO: 1017667 - DNA, 25 bp, Homo sapien
gtggcccgtgttgttcatgaggcat

SEQ ID NO: 1017668 - DNA, 25 bp, Homo sapien
cgtggcccgtgttgttcatgaggca

SEQ ID NO: 1017669 - DNA, 25 bp, Homo sapien
gcgtggcccgtgttgttcatgaggc

SEQ ID NO: 1017670 - DNA, 25 bp, Homo sapien
tgctgaccacagcgtggcccgtgtt

SEQ ID NO: 1017671 - DNA, 25 bp, Homo sapien
ccacagcagtaaaagcgaagtcagt

SEQ ID NO: 1017672 - DNA, 25 bp, Homo sapien
gacaccacagcagtaaaagcgaagt

SEQ ID NO: 1017673 - DNA, 25 bp, Homo sapien
gggggatcgttgacaccacagcagt

SEQ ID NO: 1017674 - DNA, 25 bp, Homo sapien
taaaagcgaagtcagtgtcgtgctg

SEQ ID NO: 1017675 - DNA, 25 bp, Homo sapien
cagacaaacggccaaaactgcaggt

SEQ ID NO: 1017676 - DNA, 25 bp, Homo sapien
accaaagagtaggcagacaaacggc

SEQ ID NO: 1017677 - DNA, 25 bp, Homo sapien
gccaaaactgcaggtctcctgtatg

SEQ ID NO: 1017678 - DNA, 25 bp, Homo sapien
tcagggccacatagcaaaccaaaga

SEQ ID NO: 1017679 - DNA, 25 bp, Homo sapien
cctgagcccagtacaacaaaggtga

SEQ ID NO: 1017680 - DNA, 25 bp, Homo sapien
tctgagacgagaactgccttggtga

SEQ ID NO: 1017681 - DNA, 25 bp, Homo sapien
ccggtgcccaaatctggctggtgga

SEQ ID NO: 1017682 - DNA, 25 bp, Homo sapien
gtgcaccctgcaacttatacctgag

SEQ ID NO: 1017683 - DNA, 25 bp, Homo sapien
tagccttggccagacattacactca

SEQ ID NO: 1017684 - DNA, 25 bp, Homo sapien
gcttgtaaaatcctgacatgtgtgg

SEQ ID NO: 1017685 - DNA, 25 bp, Homo sapien
gaagtcacaaagtactcatgcgtgt

SEQ ID NO: 1017686 - DNA, 25 bp, Homo sapien
catgcgtgtttacaacctggatgaa

SEQ ID NO: 1017687 - DNA, 25 bp, Homo sapien
tcagcacagacctaaaggagacctc

SEQ ID NO: 1017688 - DNA, 25 bp, Homo sapien
catgtcgcgtcaaagcgtctcagca

SEQ ID NO: 1017689 - DNA, 25 bp, Homo sapien
gcctgcttcccatgtcgcgtcaaag

SEQ ID NO: 1017690 - DNA, 25 bp, Homo sapien
ggctcattgctagaaactctgtggc

SEQ ID NO: 1017691 - DNA, 25 bp, Homo sapien
tggccgggacaccagtcacggatgt

SEQ ID NO: 1017692 - DNA, 25 bp, Homo sapien
gggacaccagtcacggatgtcttct

SEQ ID NO: 1017693 - DNA, 25 bp, Homo sapien
cacggatgtcttctgtgagcaagag

SEQ ID NO: 1017694 - DNA, 25 bp, Homo sapien
tgtgagcaagagctctttcatctgg

SEQ ID NO: 1017695 - DNA, 25 bp, Homo sapien
cccagccgaggtccaccttcagaac

SEQ ID NO: 1017696 - DNA, 25 bp, Homo sapien
atgtggcccagccgaggtccacctt

SEQ ID NO: 1017697 - DNA, 25 bp, Homo sapien
gcccagccgaggtccaccttcagaa

SEQ ID NO: 1017698 - DNA, 25 bp, Homo sapien
ccccatgtggcccagccgaggtcca

SEQ ID NO: 1017699 - DNA, 25 bp, Homo sapien
agtacgatcgctgctgtcagtctgg

SEQ ID NO: 1017700 - DNA, 25 bp, Homo sapien
agatctggtcatgcctttccccgaa

SEQ ID NO: 1017701 - DNA, 25 bp, Homo sapien
cagttcctttggaagagtacgatcg

SEQ ID NO: 1017702 - DNA, 25 bp, Homo sapien
tttccccgaaatccatggctttagc

SEQ ID NO: 1017703 - DNA, 25 bp, Homo sapien
aaagagaagggatttcaggaagcaa

SEQ ID NO: 1017704 - DNA, 25 bp, Homo sapien
aaaagagaagggatttcaggaagca

SEQ ID NO: 1017705 - DNA, 25 bp, Homo sapien
aagagaagggatttcaggaagcaaa

SEQ ID NO: 1017706 - DNA, 25 bp, Homo sapien
gagaagggatttcaggaagcaaaaa

SEQ ID NO: 1017707 - DNA, 25 bp, Homo sapien
cacttccggatgggtggtcctcgaa

SEQ ID NO: 1017708 - DNA, 25 bp, Homo sapien
tctgcattgagaagatcagccgtaa

SEQ ID NO: 1017709 - DNA, 25 bp, Homo sapien
tcacttccggatgggtggtcctcga

SEQ ID NO: 1017710 - DNA, 25 bp, Homo sapien
ctgcattgagaagatcagccgtaag

SEQ ID NO: 1017711 - DNA, 25 bp, Homo sapien
tttccattaccatgaaatgtgagca

SEQ ID NO: 1017712 - DNA, 25 bp, Homo sapien
tattactgtttaggctcatgatgtt

SEQ ID NO: 1017713 - DNA, 25 bp, Homo sapien
ccagatggcttcacagatacttata

SEQ ID NO: 1017714 - DNA, 25 bp, Homo sapien
gaatctaaaggatgcaacagcagga

SEQ ID NO: 1017715 - DNA, 25 bp, Homo sapien
atacccctccacggcacctttgctg

SEQ ID NO: 1017716 - DNA, 25 bp, Homo sapien
acccctccacggcacctttgctggc

SEQ ID NO: 1017717 - DNA, 25 bp, Homo sapien
ttgtccgtaatacccctccacggca

SEQ ID NO: 1017718 - DNA, 25 bp, Homo sapien
taatacccctccacggcacctttgc

SEQ ID NO: 1017719 - DNA, 25 bp, Homo sapien
ttcctgaatgcagcctgtgaggctt

SEQ ID NO: 1017720 - DNA, 25 bp, Homo sapien
tgtgaggcttgtgggtgttgactct

SEQ ID NO: 1017721 - DNA, 25 bp, Homo sapien
ctctttgcattctgtagccaggaga

SEQ ID NO: 1017722 - DNA, 25 bp, Homo sapien
cacctttcagggatggtgaagggtt

SEQ ID NO: 1017723 - DNA, 25 bp, Homo sapien
tgtcgatggtgcaactgtattcgca

SEQ ID NO: 1017724 - DNA, 25 bp, Homo sapien
tgcaactgtattcgcacttttccat

SEQ ID NO: 1017725 - DNA, 25 bp, Homo sapien
tctggcagctgtcgatggtgcaact

SEQ ID NO: 1017726 - DNA, 25 bp, Homo sapien
gagtcctctggcagctgtcgatggt

SEQ ID NO: 1017727 - DNA, 25 bp, Homo sapien
ccgtaaggatacatttgacagctgt

SEQ ID NO: 1017728 - DNA, 25 bp, Homo sapien
ttagtcacggaaataacctggtgcc

SEQ ID NO: 1017729 - DNA, 25 bp, Homo sapien
gaaataacctggtgccgtaaggata

SEQ ID NO: 1017730 - DNA, 25 bp, Homo sapien
ctggtgccgtaaggatacatttgac

SEQ ID NO: 1017731 - DNA, 25 bp, Homo sapien
ctgtgcccggcagacaattataatt

SEQ ID NO: 1017732 - DNA, 25 bp, Homo sapien
tctttgaattttgtgtcatgctgaa

SEQ ID NO: 1017733 - DNA, 25 bp, Homo sapien
gtgcccggcagacaattataatttt

SEQ ID NO: 1017734 - DNA, 25 bp, Homo sapien
tcatgctgaattcccactccaagac

SEQ ID NO: 1017735 - DNA, 25 bp, Homo sapien
tatgcctgttcacacgggtcacagg

SEQ ID NO: 1017736 - DNA, 25 bp, Homo sapien
gacttaggaacagtaaagctggtgc

SEQ ID NO: 1017737 - DNA, 25 bp, Homo sapien
cagacttaggaacagtaaagctggt

SEQ ID NO: 1017738 - DNA, 25 bp, Homo sapien
cagccgcacaccagggtatgcctgt

SEQ ID NO: 1017739 - DNA, 25 bp, Homo sapien
ctgcacaacttgttctcagtatcaa

SEQ ID NO: 1017740 - DNA, 25 bp, Homo sapien
cacaacttgttctcagtatcaactc

SEQ ID NO: 1017741 - DNA, 25 bp, Homo sapien
tgcacaacttgttctcagtatcaac

SEQ ID NO: 1017742 - DNA, 25 bp, Homo sapien
gcacaacttgttctcagtatcaact

SEQ ID NO: 1017743 - DNA, 25 bp, Homo sapien
gtttttcatgccgtatttcagacag

SEQ ID NO: 1017744 - DNA, 25 bp, Homo sapien
tgcacagcattgtgtagcacctagc

SEQ ID NO: 1017745 - DNA, 25 bp, Homo sapien
gacagcgtctgactcattaggatca

SEQ ID NO: 1017746 - DNA, 25 bp, Homo sapien
tcatgccgtatttcagacagcgtct

SEQ ID NO: 1017747 - DNA, 25 bp, Homo sapien
ggctcccggaatacaccagcaccct

SEQ ID NO: 1017748 - DNA, 25 bp, Homo sapien
gctcccggaatacaccagcaccctc

SEQ ID NO: 1017749 - DNA, 25 bp, Homo sapien
catgtgttgttgccagtgactaata

SEQ ID NO: 1017750 - DNA, 25 bp, Homo sapien
tcatgtgttgttgccagtgactaat

SEQ ID NO: 1017751 - DNA, 25 bp, Homo sapien
atgtgttgttgccagtgactaatag

SEQ ID NO: 1017752 - DNA, 25 bp, Homo sapien
aatagtaaggactgaccctgggtca

SEQ ID NO: 1017753 - DNA, 25 bp, Homo sapien
ttagaaggcaggacagtaagcagcc

SEQ ID NO: 1017754 - DNA, 25 bp, Homo sapien
tctttcaatgaagggcagcatcctc

SEQ ID NO: 1017755 - DNA, 25 bp, Homo sapien
tgtgataccgaagcagccactttct

SEQ ID NO: 1017756 - DNA, 25 bp, Homo sapien
ctctcttggctccgcttgacattgg

SEQ ID NO: 1017757 - DNA, 25 bp, Homo sapien
gacattggaggccccttgcactcca

SEQ ID NO: 1017758 - DNA, 25 bp, Homo sapien
cctagcgtgcgggacaccaccttct

SEQ ID NO: 1017759 - DNA, 25 bp, Homo sapien
ggcccaattaaccagtctccagctt

SEQ ID NO: 1017760 - DNA, 25 bp, Homo sapien
tgcacttgttctgcgccatggccag

SEQ ID NO: 1017761 - DNA, 25 bp, Homo sapien
ggaaagatcctagaccacaggccct

SEQ ID NO: 1017762 - DNA, 25 bp, Homo sapien
aaaagaccaatgtggcctgtgccga

SEQ ID NO: 1017763 - DNA, 25 bp, Homo sapien
ttttaagggcctatgctcagggacc

SEQ ID NO: 1017764 - DNA, 25 bp, Homo sapien
catcccctgagatcttcagatctgg

SEQ ID NO: 1017765 - DNA, 25 bp, Homo sapien
gagatcttcagatctggtccatccc

SEQ ID NO: 1017766 - DNA, 25 bp, Homo sapien
tcacccctctgcttttggctcccca

SEQ ID NO: 1017767 - DNA, 25 bp, Homo sapien
cacccctctgcttttggctccccat

SEQ ID NO: 1017768 - DNA, 25 bp, Homo sapien
tgacatgtcttgtaccacagcccac

SEQ ID NO: 1017769 - DNA, 25 bp, Homo sapien
cgcagatgggccctttgtgcctcat

SEQ ID NO: 1017770 - DNA, 25 bp, Homo sapien
gatgccatccgcttctcagaactac

SEQ ID NO: 1017771 - DNA, 25 bp, Homo sapien
acagcccacagtcagcgcagatggg

SEQ ID NO: 1017772 - DNA, 25 bp, Homo sapien
aatgcatagccatgcagtaacagga

SEQ ID NO: 1017773 - DNA, 25 bp, Homo sapien
ggatcagtgtcacatatgtgttgta

SEQ ID NO: 1017774 - DNA, 25 bp, Homo sapien
tgttgtaggcaaacaaagagctaat

SEQ ID NO: 1017775 - DNA, 25 bp, Homo sapien
taaagtcagcatgattcctttgtcc

SEQ ID NO: 1017776 - DNA, 25 bp, Homo sapien
aaggctatcttggtagttattctag

SEQ ID NO: 1017777 - DNA, 25 bp, Homo sapien
tatcttggtagttattctaggagca

SEQ ID NO: 1017778 - DNA, 25 bp, Homo sapien
tagttattctaggagcatgattagt

SEQ ID NO: 1017779 - DNA, 25 bp, Homo sapien
ccctaaaggctatcttggtagttat

SEQ ID NO: 1017780 - DNA, 25 bp, Homo sapien
acaggtgtggcctctgagacctcgg

SEQ ID NO: 1017781 - DNA, 25 bp, Homo sapien
cctctgagacctcggggaggagcct

SEQ ID NO: 1017782 - DNA, 25 bp, Homo sapien
ctacaggtgtggcctctgagacctc

SEQ ID NO: 1017783 - DNA, 25 bp, Homo sapien
tgagacctcggggaggagcctttct

SEQ ID NO: 1017784 - DNA, 25 bp, Homo sapien
tcccaaaggctctccgtgatgcaac

SEQ ID NO: 1017785 - DNA, 25 bp, Homo sapien
cacgggcggccagtcctcttatttc

SEQ ID NO: 1017786 - DNA, 25 bp, Homo sapien
gaaacacaaatgtctccgccaagac

SEQ ID NO: 1017787 - DNA, 25 bp, Homo sapien
tgatgcaactgcacgtccctcgaat

SEQ ID NO: 1017788 - DNA, 25 bp, Homo sapien
cattttgacagaaagcgggcctgcc

SEQ ID NO: 1017789 - DNA, 25 bp, Homo sapien
caaaatcagaagtacggcaggctcg

SEQ ID NO: 1017790 - DNA, 25 bp, Homo sapien
tgagcagagccggagtgccacagaa

SEQ ID NO: 1017791 - DNA, 25 bp, Homo sapien
gctcgttcgctctcacgggcaagaa

SEQ ID NO: 1017792 - DNA, 25 bp, Homo sapien
cagtaacttgcattaatgttgtagc

SEQ ID NO: 1017793 - DNA, 25 bp, Homo sapien
cttttcactctgatagcattctcta

SEQ ID NO: 1017794 - DNA, 25 bp, Homo sapien
tgttgtagctttgaggtgccgcata

SEQ ID NO: 1017795 - DNA, 25 bp, Homo sapien
tgaggtgccgcatatcatttcatat

SEQ ID NO: 1017796 - DNA, 25 bp, Homo sapien
cagaaatgtgagtctcagagaatcc

SEQ ID NO: 1017797 - DNA, 25 bp, Homo sapien
tacgggaacccttagcctccaatca

SEQ ID NO: 1017798 - DNA, 25 bp, Homo sapien
gttgttactgcccacaaatacggga

SEQ ID NO: 1017799 - DNA, 25 bp, Homo sapien
gaaatgtacccatgttatccaagaa

SEQ ID NO: 1017800 - DNA, 25 bp, Homo sapien
ctcccaagctggagtgcagtggtgc

SEQ ID NO: 1017801 - DNA, 25 bp, Homo sapien
gctccacctcccaacttcatgccat

SEQ ID NO: 1017802 - DNA, 25 bp, Homo sapien
agacagtctcgctgtgtctcccaag

SEQ ID NO: 1017803 - DNA, 25 bp, Homo sapien
caaaaattaatgtgagatggattaa

SEQ ID NO: 1017804 - DNA, 25 bp, Homo sapien
tttcctccttgatttgataatgcaa

SEQ ID NO: 1017805 - DNA, 25 bp, Homo sapien
ttctgcctgttctctgattgcattt

SEQ ID NO: 1017806 - DNA, 25 bp, Homo sapien
ctctgattgcatttcctccttgatt

SEQ ID NO: 1017807 - DNA, 25 bp, Homo sapien
attataatcatagtttttctgcctg

SEQ ID NO: 1017808 - DNA, 25 bp, Homo sapien
cggagtcgaaaggccacggagggag

SEQ ID NO: 1017809 - DNA, 25 bp, Homo sapien
gagtcgaaaggccacggagggaggc

SEQ ID NO: 1017810 - DNA, 25 bp, Homo sapien
agtcgaaaggccacggagggaggct

SEQ ID NO: 1017811 - DNA, 25 bp, Homo sapien
taagatggtgcactgtacaagccac

SEQ ID NO: 1017812 - DNA, 25 bp, Homo sapien
tgaggaccatgtacaaccaggcttc

SEQ ID NO: 1017813 - DNA, 25 bp, Homo sapien
gtactgccatagctgggaaccaccg

SEQ ID NO: 1017814 - DNA, 25 bp, Homo sapien
gagttcctctttgcaagatcatggg

SEQ ID NO: 1017815 - DNA, 25 bp, Homo sapien
ctattaatgcatttagcttcagaat

SEQ ID NO: 1017816 - DNA, 25 bp, Homo sapien
tcactattaatgcatttagcttcag

SEQ ID NO: 1017817 - DNA, 25 bp, Homo sapien
cactattaatgcatttagcttcaga

SEQ ID NO: 1017818 - DNA, 25 bp, Homo sapien
ccctcactattaatgcatttagctt

SEQ ID NO: 1017819 - DNA, 25 bp, Homo sapien
ccgcgcccaacctatcttgttataa

SEQ ID NO: 1017820 - DNA, 25 bp, Homo sapien
tactcaaaatcagacccaaaggtgg

SEQ ID NO: 1017821 - DNA, 25 bp, Homo sapien
ggctaatgagacacgtggctcatga

SEQ ID NO: 1017822 - DNA, 25 bp, Homo sapien
tggagatttaacaggctaatgagac

SEQ ID NO: 1017823 - DNA, 25 bp, Homo sapien
tacagactaagagtacatactggtt

SEQ ID NO: 1017824 - DNA, 25 bp, Homo sapien
agagtacatactggttttagggtga

SEQ ID NO: 1017825 - DNA, 25 bp, Homo sapien
tgagggggctttatcacaagcttgg

SEQ ID NO: 1017826 - DNA, 25 bp, Homo sapien
gcttggcatgtttccatgtgaggga

SEQ ID NO: 1017827 - DNA, 25 bp, Homo sapien
tatgaataagccctaaatccagtga

SEQ ID NO: 1017828 - DNA, 25 bp, Homo sapien
cagtgagttgcacatcagagggaac

SEQ ID NO: 1017829 - DNA, 25 bp, Homo sapien
tcagtcactagccaggtaccttgag

SEQ ID NO: 1017830 - DNA, 25 bp, Homo sapien
attcagccatattgggccagtctcc

SEQ ID NO: 1017831 - DNA, 25 bp, Homo sapien
caggttaaaagcagaaggttccagg

SEQ ID NO: 1017832 - DNA, 25 bp, Homo sapien
gctctttggcacaaaactgggcaaa

SEQ ID NO: 1017833 - DNA, 25 bp, Homo sapien
cagagactttagagatcgagcaggc

SEQ ID NO: 1017834 - DNA, 25 bp, Homo sapien
tcaacagggttaaggtaggagtcac

SEQ ID NO: 1017835 - DNA, 25 bp, Homo sapien
caaaactgcaggtgataacatggga

SEQ ID NO: 1017836 - DNA, 25 bp, Homo sapien
aaaacatcttggctggtgaacacat

SEQ ID NO: 1017837 - DNA, 25 bp, Homo sapien
tagaacactcagttggtgcccagag

SEQ ID NO: 1017838 - DNA, 25 bp, Homo sapien
tctgggaaaccttctagcaagtgac

SEQ ID NO: 1017839 - DNA, 25 bp, Homo sapien
gtgtgcatatgaaactctgtcgccc

SEQ ID NO: 1017840 - DNA, 25 bp, Homo sapien
caaatgaaagtgaaacaacgtgtgc

SEQ ID NO: 1017841 - DNA, 25 bp, Homo sapien
tgtgtcttctattccctgtcaagcc

SEQ ID NO: 1017842 - DNA, 25 bp, Homo sapien
caacgtgtgcatatgaaactctgtc

SEQ ID NO: 1017843 - DNA, 25 bp, Homo sapien
gctgtcaaaccccacccactgtctc

SEQ ID NO: 1017844 - DNA, 25 bp, Homo sapien
ctgttgatgttttgcagtgtaggca

SEQ ID NO: 1017845 - DNA, 25 bp, Homo sapien
ttttgcagtgtaggcaggtcaagag

SEQ ID NO: 1017846 - DNA, 25 bp, Homo sapien
tgatgttttgcagtgtaggcaggtc

SEQ ID NO: 1017847 - DNA, 25 bp, Homo sapien
aataattaaaagcagcttgcagcag

SEQ ID NO: 1017848 - DNA, 25 bp, Homo sapien
gaataattaaaagcagcttgcagca

SEQ ID NO: 1017849 - DNA, 25 bp, Homo sapien
attaaaagcagcttgcagcagaata

SEQ ID NO: 1017850 - DNA, 25 bp, Homo sapien
taattaaaagcagcttgcagcagaa

SEQ ID NO: 1017851 - DNA, 25 bp, Homo sapien
cttggacaatgtagtcttggaattt

SEQ ID NO: 1017852 - DNA, 25 bp, Homo sapien
ttggacaatgtagtcttggaatttg

SEQ ID NO: 1017853 - DNA, 25 bp, Homo sapien
cactgagtagatcagcttatattct

SEQ ID NO: 1017854 - DNA, 25 bp, Homo sapien
ctcaccaggtagacatatgcatggg

SEQ ID NO: 1017855 - DNA, 25 bp, Homo sapien
tactcaccaggtagacatatgcatg

SEQ ID NO: 1017856 - DNA, 25 bp, Homo sapien
tcaccaggtagacatatgcatgggc

SEQ ID NO: 1017857 - DNA, 25 bp, Homo sapien
ttactcaccaggtagacatatgcat

SEQ ID NO: 1017858 - DNA, 25 bp, Homo sapien
tccgattcaggtaatagttgtcccc

SEQ ID NO: 1017859 - DNA, 25 bp, Homo sapien
tcgtgaccactggagaaaggttgtc

SEQ ID NO: 1017860 - DNA, 25 bp, Homo sapien
gagtcgatctggtcacgcctgtaga

SEQ ID NO: 1017861 - DNA, 25 bp, Homo sapien
tcaaagttctgccaggtcgtgacca

SEQ ID NO: 1017862 - DNA, 25 bp, Homo sapien
taagattaggtcagagttagtacca

SEQ ID NO: 1017863 - DNA, 25 bp, Homo sapien
caacactttagttgaggttaggaat

SEQ ID NO: 1017864 - DNA, 25 bp, Homo sapien
ggtcagagttagtaccaacacttta

SEQ ID NO: 1017865 - DNA, 25 bp, Homo sapien
cattttgtttagagttaagattagg

SEQ ID NO: 1017866 - DNA, 25 bp, Homo sapien
tcttgctgaaatacacgttatagtg

SEQ ID NO: 1017867 - DNA, 25 bp, Homo sapien
ctaagtgtatagattactgtgactc

SEQ ID NO: 1017868 - DNA, 25 bp, Homo sapien
tctactccaactgtttgcaatgtat

SEQ ID NO: 1017869 - DNA, 25 bp, Homo sapien
cccaatttattactgttcactagag

SEQ ID NO: 1017870 - DNA, 25 bp, Homo sapien
tctcttgtttatgcgcagagcgaga

SEQ ID NO: 1017871 - DNA, 25 bp, Homo sapien
ttgtttatgcgcagagcgagaactt

SEQ ID NO: 1017872 - DNA, 25 bp, Homo sapien
tgtgtctcttgtttatgcgcagagc

SEQ ID NO: 1017873 - DNA, 25 bp, Homo sapien
cagagcgagaactttgttcaaagag

SEQ ID NO: 1017874 - DNA, 25 bp, Homo sapien
catgagcctggtaagcgtttgctta

SEQ ID NO: 1017875 - DNA, 25 bp, Homo sapien
ccaaaaagatgtgccatgagcctgg

SEQ ID NO: 1017876 - DNA, 25 bp, Homo sapien
tcaaactctacaagcttcacggcct

SEQ ID NO: 1017877 - DNA, 25 bp, Homo sapien
ggtaagcgtttgcttaagatcaaac

SEQ ID NO: 1017878 - DNA, 25 bp, Homo sapien
aacacaaccggcagaaacacaccag

SEQ ID NO: 1017879 - DNA, 25 bp, Homo sapien
ctcgtggcaacacaaccggcagaaa

SEQ ID NO: 1017880 - DNA, 25 bp, Homo sapien
agctcgtggcaacacaaccggcaga

SEQ ID NO: 1017881 - DNA, 25 bp, Homo sapien
gtggcaacacaaccggcagaaacac

SEQ ID NO: 1017882 - DNA, 25 bp, Homo sapien
aatacagcggacgtcacaaacacgg

SEQ ID NO: 1017883 - DNA, 25 bp, Homo sapien
acacggtcggggacaagctcacaca

SEQ ID NO: 1017884 - DNA, 25 bp, Homo sapien
tcacaaacacggcaaacacggtcgg

SEQ ID NO: 1017885 - DNA, 25 bp, Homo sapien
ctgagaggcaatacagcggacgtca

SEQ ID NO: 1017886 - DNA, 25 bp, Homo sapien
tctagttcatcagatgggcccaggt

SEQ ID NO: 1017887 - DNA, 25 bp, Homo sapien
ctagttcatcagatgggcccaggtt

SEQ ID NO: 1017888 - DNA, 25 bp, Homo sapien
tagttcatcagatgggcccaggttc

SEQ ID NO: 1017889 - DNA, 25 bp, Homo sapien
aaagggaagtagcagtctacccatc

SEQ ID NO: 1017890 - DNA, 25 bp, Homo sapien
gaagtagcagtctacccatcttatc

SEQ ID NO: 1017891 - DNA, 25 bp, Homo sapien
agcagtctacccatcttatctccag

SEQ ID NO: 1017892 - DNA, 25 bp, Homo sapien
tgtaaaagggaagtagcagtctacc

SEQ ID NO: 1017893 - DNA, 25 bp, Homo sapien
cattctccatgaaagttgatctcca

SEQ ID NO: 1017894 - DNA, 25 bp, Homo sapien
ctgaattgaccagttgttgttccat

SEQ ID NO: 1017895 - DNA, 25 bp, Homo sapien
cagccattctccatgaaagttgatc

SEQ ID NO: 1017896 - DNA, 25 bp, Homo sapien
catcaccccgcagccaagaacttcc

SEQ ID NO: 1017897 - DNA, 25 bp, Homo sapien
tattaagcaatggtcttacagaaaa

SEQ ID NO: 1017898 - DNA, 25 bp, Homo sapien
aattcaatcagcaacctcgtgtttc

SEQ ID NO: 1017899 - DNA, 25 bp, Homo sapien
ttttattaagcaatggtcttacaga

SEQ ID NO: 1017900 - DNA, 25 bp, Homo sapien
atttttattaagcaatggtcttaca

SEQ ID NO: 1017901 - DNA, 25 bp, Homo sapien
tgcagatggagagtacctaaaagta

SEQ ID NO: 1017902 - DNA, 25 bp, Homo sapien
ctgcagatggagagtacctaaaagt

SEQ ID NO: 1017903 - DNA, 25 bp, Homo sapien
gatggagagtacctaaaagtaagaa

SEQ ID NO: 1017904 - DNA, 25 bp, Homo sapien
cagatggagagtacctaaaagtaag

SEQ ID NO: 1017905 - DNA, 25 bp, Homo sapien
aactgcccacgaagcttccagccct

SEQ ID NO: 1017906 - DNA, 25 bp, Homo sapien
ttaaaactgcccacgaagcttccag

SEQ ID NO: 1017907 - DNA, 25 bp, Homo sapien
aaaactgcccacgaagcttccagcc

SEQ ID NO: 1017908 - DNA, 25 bp, Homo sapien
tttaaaactgcccacgaagcttcca

SEQ ID NO: 1017909 - DNA, 25 bp, Homo sapien
tgctaagcacttgagaggaatcccc

SEQ ID NO: 1017910 - DNA, 25 bp, Homo sapien
gaaattgtttctatcacaggcagga

SEQ ID NO: 1017911 - DNA, 25 bp, Homo sapien
ggtgatgaaccctgcctaaagagac

SEQ ID NO: 1017912 - DNA, 25 bp, Homo sapien
tatccccataatggaactctgaggg

SEQ ID NO: 1017913 - DNA, 25 bp, Homo sapien
tgttcacggacataacaacatggcc

SEQ ID NO: 1017914 - DNA, 25 bp, Homo sapien
gagctacttcttccgagcttggaga

SEQ ID NO: 1017915 - DNA, 25 bp, Homo sapien
caaagaagtctggaaaatacggcac

SEQ ID NO: 1017916 - DNA, 25 bp, Homo sapien
tcaatcccagcagccaatggatggg

SEQ ID NO: 1017917 - DNA, 25 bp, Homo sapien
gagagaaagcgaggaggcaggcaaa

SEQ ID NO: 1017918 - DNA, 25 bp, Homo sapien
agagaaagcgaggaggcaggcaaag

SEQ ID NO: 1017919 - DNA, 25 bp, Homo sapien
ggagagaaagcgaggaggcaggcaa

SEQ ID NO: 1017920 - DNA, 25 bp, Homo sapien
cttggtaccatctggggcacctggc

SEQ ID NO: 1017921 - DNA, 25 bp, Homo sapien
ttggtaccatctggggcacctggca

SEQ ID NO: 1017922 - DNA, 25 bp, Homo sapien
ggtaccatctggggcacctggcaac

SEQ ID NO: 1017923 - DNA, 25 bp, Homo sapien
tggtaccatctggggcacctggcaa

SEQ ID NO: 1017924 - DNA, 25 bp, Homo sapien
ccctggagactaacacatacccaag

SEQ ID NO: 1017925 - DNA, 25 bp, Homo sapien
ttccctggagactaacacataccca

SEQ ID NO: 1017926 - DNA, 25 bp, Homo sapien
gcttccctggagactaacacatacc

SEQ ID NO: 1017927 - DNA, 25 bp, Homo sapien
tggagactaacacatacccaagctt

SEQ ID NO: 1017928 - DNA, 25 bp, Homo sapien
gacacaggaagaggatatagcaacg

SEQ ID NO: 1017929 - DNA, 25 bp, Homo sapien
gggacagacaagatgctctctcagg

SEQ ID NO: 1017930 - DNA, 25 bp, Homo sapien
taagaatgggtaaccacctgtggca

SEQ ID NO: 1017931 - DNA, 25 bp, Homo sapien
tgaaatcttgagctaaccctggtac

SEQ ID NO: 1017932 - DNA, 25 bp, Homo sapien
acaggcaccggccaataagcggctc

SEQ ID NO: 1017933 - DNA, 25 bp, Homo sapien
gattacaggcaccggccaataagcg

SEQ ID NO: 1017934 - DNA, 25 bp, Homo sapien
ggattacaggcaccggccaataagc

SEQ ID NO: 1017935 - DNA, 25 bp, Homo sapien
ttacaggcaccggccaataagcggc

SEQ ID NO: 1017936 - DNA, 25 bp, Homo sapien
tccccgctgatgctcttgaacgata

SEQ ID NO: 1017937 - DNA, 25 bp, Homo sapien
gtaaaataagctccatcagacagtc

SEQ ID NO: 1017938 - DNA, 25 bp, Homo sapien
gacagtcagatggttaacttggccg

SEQ ID NO: 1017939 - DNA, 25 bp, Homo sapien
tggccgatctgattcaccctggcat

SEQ ID NO: 1017940 - DNA, 25 bp, Homo sapien
ggtgcgtgcagtcactccgctggtg

SEQ ID NO: 1017941 - DNA, 25 bp, Homo sapien
ctggtgcgtgcagtcactccgctgg

SEQ ID NO: 1017942 - DNA, 25 bp, Homo sapien
tggtgcgtgcagtcactccgctggt

SEQ ID NO: 1017943 - DNA, 25 bp, Homo sapien
tacatgtgtgcgagaaaacctgaac

SEQ ID NO: 1017944 - DNA, 25 bp, Homo sapien
taactgagccaagatattaaaagct

SEQ ID NO: 1017945 - DNA, 25 bp, Homo sapien
gagagttacttgtctcacctaaatg

SEQ ID NO: 1017946 - DNA, 25 bp, Homo sapien
cacaatcaggtgtgttacctttgac

SEQ ID NO: 1017947 - DNA, 25 bp, Homo sapien
gcttttgtgaggaaatacggcaata

SEQ ID NO: 1017948 - DNA, 25 bp, Homo sapien
tataatttgtcactccctactctgc

SEQ ID NO: 1017949 - DNA, 25 bp, Homo sapien
tatctgaccaaatgtggatgatgca

SEQ ID NO: 1017950 - DNA, 25 bp, Homo sapien
taccagtgtagcatagttacagtga

SEQ ID NO: 1017951 - DNA, 25 bp, Homo sapien
tccgcagttctgttggggttgcctg

SEQ ID NO: 1017952 - DNA, 25 bp, Homo sapien
agctccgcagttctgttggggttgc

SEQ ID NO: 1017953 - DNA, 25 bp, Homo sapien
tgttggggttgcctggaaggaggca

SEQ ID NO: 1017954 - DNA, 25 bp, Homo sapien
gctgcttcagctccgcagttctgtt

SEQ ID NO: 1017955 - DNA, 25 bp, Homo sapien
ggcaatgccaggagtagaaaaaggt

SEQ ID NO: 1017956 - DNA, 25 bp, Homo sapien
gcaatgccaggagtagaaaaaggta

SEQ ID NO: 1017957 - DNA, 25 bp, Homo sapien
atgccaggagtagaaaaaggtagag

SEQ ID NO: 1017958 - DNA, 25 bp, Homo sapien
caatgccaggagtagaaaaaggtag

SEQ ID NO: 1017959 - DNA, 25 bp, Homo sapien
taaacagtagttactatgacgttac

SEQ ID NO: 1017960 - DNA, 25 bp, Homo sapien
tatgacgttaccattcttatcaccc

SEQ ID NO: 1017961 - DNA, 25 bp, Homo sapien
gttaccattcttatcaccctggaca

SEQ ID NO: 1017962 - DNA, 25 bp, Homo sapien
gtagttactatgacgttaccattct

SEQ ID NO: 1017963 - DNA, 25 bp, Homo sapien
actcttgtgatctgtaatggtacag

SEQ ID NO: 1017964 - DNA, 25 bp, Homo sapien
tacgtgcccacttagacagcaataa

SEQ ID NO: 1017965 - DNA, 25 bp, Homo sapien
tctgtaatggtacagaaagccttcc

SEQ ID NO: 1017966 - DNA, 25 bp, Homo sapien
tggcagggccctgactagggcctac

SEQ ID NO: 1017967 - DNA, 25 bp, Homo sapien
tcaagcttctatgcccgtgcaggtg

SEQ ID NO: 1017968 - DNA, 25 bp, Homo sapien
ttctatgcccgtgcaggtgttctga

SEQ ID NO: 1017969 - DNA, 25 bp, Homo sapien
gcttctatgcccgtgcaggtgttct

SEQ ID NO: 1017970 - DNA, 25 bp, Homo sapien
aagcttctatgcccgtgcaggtgtt

SEQ ID NO: 1017971 - DNA, 25 bp, Homo sapien
tcattgagccttttaagatttattc

SEQ ID NO: 1017972 - DNA, 25 bp, Homo sapien
ttactagagggagttgttttaagca

SEQ ID NO: 1017973 - DNA, 25 bp, Homo sapien
aagatttattctcataaccaaattg

SEQ ID NO: 1017974 - DNA, 25 bp, Homo sapien
gagggagttgttttaagcagtagat

SEQ ID NO: 1017975 - DNA, 25 bp, Homo sapien
cctctacagcgtcagagagggaagc

SEQ ID NO: 1017976 - DNA, 25 bp, Homo sapien
gcctctacagcgtcagagagggaag

SEQ ID NO: 1017977 - DNA, 25 bp, Homo sapien
tgcctctacagcgtcagagagggaa

SEQ ID NO: 1017978 - DNA, 25 bp, Homo sapien
tgagggtgcccaatcttccacgctt

SEQ ID NO: 1017979 - DNA, 25 bp, Homo sapien
tacaaagacatccatgagggtgccc

SEQ ID NO: 1017980 - DNA, 25 bp, Homo sapien
atattccggactgccctcatgaacg

SEQ ID NO: 1017981 - DNA, 25 bp, Homo sapien
aaggcactgggcagccgctacaaag

SEQ ID NO: 1017982 - DNA, 25 bp, Homo sapien
ccagaagagacggatatcagggatg

SEQ ID NO: 1017983 - DNA, 25 bp, Homo sapien
ccagccgattcggtcttgagcacca

SEQ ID NO: 1017984 - DNA, 25 bp, Homo sapien
tgtcgtagaggatcatggctagcct

SEQ ID NO: 1017985 - DNA, 25 bp, Homo sapien
taatgttggatacacagaactgctt

SEQ ID NO: 1017986 - DNA, 25 bp, Homo sapien
aaaagccagaaaagtcaagaaggtg

SEQ ID NO: 1017987 - DNA, 25 bp, Homo sapien
ctggttacctaagcaacaggaaact

SEQ ID NO: 1017988 - DNA, 25 bp, Homo sapien
tgaatacttaggtaatagtatgatc

SEQ ID NO: 1017989 - DNA, 25 bp, Homo sapien
caagaaggtggattcccccaagagc

SEQ ID NO: 1017990 - DNA, 25 bp, Homo sapien
aataggattcccaaatggcttccag

SEQ ID NO: 1017991 - DNA, 25 bp, Homo sapien
ctgcttcttgcacaataggattccc

SEQ ID NO: 1017992 - DNA, 25 bp, Homo sapien
ggatccacaagttcatagctgccag

SEQ ID NO: 1017993 - DNA, 25 bp, Homo sapien
cacaagttcatagctgccagcaggc

SEQ ID NO: 1017994 - DNA, 25 bp, Homo sapien
taagccaccatggatagacacagaa

SEQ ID NO: 1017995 - DNA, 25 bp, Homo sapien
gacacagaattagtaagttctaata

SEQ ID NO: 1017996 - DNA, 25 bp, Homo sapien
ggatagacacagaattagtaagttc

SEQ ID NO: 1017997 - DNA, 25 bp, Homo sapien
cttgtaagccaccatggatagacac

SEQ ID NO: 1017998 - DNA, 25 bp, Homo sapien
cagtacccgctatcatccatttcat

SEQ ID NO: 1017999 - DNA, 25 bp, Homo sapien
gactgtaggatgcaatagtttttcc

SEQ ID NO: 1018000 - DNA, 25 bp, Homo sapien
tcagcagaagatagactgtaggatg

SEQ ID NO: 1018001 - DNA, 25 bp, Homo sapien
agtttttccagtacccgctatcatc

SEQ ID NO: 1018002 - DNA, 25 bp, Homo sapien
atcagaaggcaagcactctataacg

SEQ ID NO: 1018003 - DNA, 25 bp, Homo sapien
gaaggcaagcactctataacgccgt

SEQ ID NO: 1018004 - DNA, 25 bp, Homo sapien
gcaagcactctataacgccgttaaa

SEQ ID NO: 1018005 - DNA, 25 bp, Homo sapien
gtgacaatataatcagaaggcaagc

SEQ ID NO: 1018006 - DNA, 25 bp, Homo sapien
gatattggtatatcccactttccgg

SEQ ID NO: 1018007 - DNA, 25 bp, Homo sapien
gattccacagtcttgctctctatag

SEQ ID NO: 1018008 - DNA, 25 bp, Homo sapien
cactttccggatctatgtttatcag

SEQ ID NO: 1018009 - DNA, 25 bp, Homo sapien
gctctctatagttttagtaagcagt

SEQ ID NO: 1018010 - DNA, 25 bp, Homo sapien
atccctccacatgccgtataaagca

SEQ ID NO: 1018011 - DNA, 25 bp, Homo sapien
ctccacatgccgtataaagcatgtt

SEQ ID NO: 1018012 - DNA, 25 bp, Homo sapien
cctccacatgccgtataaagcatgt

SEQ ID NO: 1018013 - DNA, 25 bp, Homo sapien
tccctccacatgccgtataaagcat

SEQ ID NO: 1018014 - DNA, 25 bp, Homo sapien
gtcactgtaacctccatctctcggg

SEQ ID NO: 1018015 - DNA, 25 bp, Homo sapien
ggagagcagtggcatgctctcgggt

SEQ ID NO: 1018016 - DNA, 25 bp, Homo sapien
gagcagtggcatgctctcgggtcac

SEQ ID NO: 1018017 - DNA, 25 bp, Homo sapien
ggtcactgtaacctccatctctcgg

SEQ ID NO: 1018018 - DNA, 25 bp, Homo sapien
gtgcgatgcggagagttctgctgcc

SEQ ID NO: 1018019 - DNA, 25 bp, Homo sapien
ggaaactgcctgtgtgcgatgcgga

SEQ ID NO: 1018020 - DNA, 25 bp, Homo sapien
ctctgggacgatgttcagcttcttc

SEQ ID NO: 1018021 - DNA, 25 bp, Homo sapien
tctgggacgatgttcagcttcttca

SEQ ID NO: 1018022 - DNA, 25 bp, Homo sapien
tgtgctgcgaatatgaaacatttct

SEQ ID NO: 1018023 - DNA, 25 bp, Homo sapien
ttctgggcttttctcgctctgggcc

SEQ ID NO: 1018024 - DNA, 25 bp, Homo sapien
cctcgtggcaggcaaggagtactga

SEQ ID NO: 1018025 - DNA, 25 bp, Homo sapien
caaggagtactgactgtgctgcgaa

SEQ ID NO: 1018026 - DNA, 25 bp, Homo sapien
ggcccagctagcgaagtcacttgaa

SEQ ID NO: 1018027 - DNA, 25 bp, Homo sapien
gatagggactctatatgctgcaagg

SEQ ID NO: 1018028 - DNA, 25 bp, Homo sapien
aacttaagacgtgatttccagtggc

SEQ ID NO: 1018029 - DNA, 25 bp, Homo sapien
tcaccttatgcctgtgttggaagca

SEQ ID NO: 1018030 - DNA, 25 bp, Homo sapien
tttttttttggcacccatgctgttg

SEQ ID NO: 1018031 - DNA, 25 bp, Homo sapien
tctgtggaaagtgtaaagcattcca

SEQ ID NO: 1018032 - DNA, 25 bp, Homo sapien
tctgttctgtggaaagtgtaaagca

SEQ ID NO: 1018033 - DNA, 25 bp, Homo sapien
ttttttggcacccatgctgttgatt

SEQ ID NO: 1018034 - DNA, 25 bp, Homo sapien
ttcagaaatgccatcctgtgaatgg

SEQ ID NO: 1018035 - DNA, 25 bp, Homo sapien
cagaaatgccatcctgtgaatggcc

SEQ ID NO: 1018036 - DNA, 25 bp, Homo sapien
ctgtcattcagaaatgccatcctgt

SEQ ID NO: 1018037 - DNA, 25 bp, Homo sapien
aaatgccatcctgtgaatggccaca

SEQ ID NO: 1018038 - DNA, 25 bp, Homo sapien
tgtcactatgccactgcggaggagg

SEQ ID NO: 1018039 - DNA, 25 bp, Homo sapien
gtcactatgccactgcggaggaggt

SEQ ID NO: 1018040 - DNA, 25 bp, Homo sapien
tggaatctccttactgtgcacagtc

SEQ ID NO: 1018041 - DNA, 25 bp, Homo sapien
cacagtccctgttacattgcaggta

SEQ ID NO: 1018042 - DNA, 25 bp, Homo sapien
cagtccctgttacattgcaggtatt

SEQ ID NO: 1018043 - DNA, 25 bp, Homo sapien
tccacctctggaatctccttactgt

SEQ ID NO: 1018044 - DNA, 25 bp, Homo sapien
ttcatggctgtcttcctgagagact

SEQ ID NO: 1018045 - DNA, 25 bp, Homo sapien
catggctgtcttcctgagagactgc

SEQ ID NO: 1018046 - DNA, 25 bp, Homo sapien
tggctgtcttcctgagagactgcca

SEQ ID NO: 1018047 - DNA, 25 bp, Homo sapien
ggctgtcttcctgagagactgccat

SEQ ID NO: 1018048 - DNA, 25 bp, Homo sapien
cagagggcaaccagaatgaaatatc

SEQ ID NO: 1018049 - DNA, 25 bp, Homo sapien
tgaaatatcattgatcacagccgga

SEQ ID NO: 1018050 - DNA, 25 bp, Homo sapien
cattttctgcgtaattctcagaggg

SEQ ID NO: 1018051 - DNA, 25 bp, Homo sapien
atcattgatcacagccggatatttg

SEQ ID NO: 1018052 - DNA, 25 bp, Homo sapien
tctcctccaattgttcggactaagt

SEQ ID NO: 1018053 - DNA, 25 bp, Homo sapien
tccaattgttcggactaagtcatag

SEQ ID NO: 1018054 - DNA, 25 bp, Homo sapien
tcctccaattgttcggactaagtca

SEQ ID NO: 1018055 - DNA, 25 bp, Homo sapien
ccaattgttcggactaagtcataga

SEQ ID NO: 1018056 - DNA, 25 bp, Homo sapien
tacaagaaaatcgaagagatgagtc

SEQ ID NO: 1018057 - DNA, 25 bp, Homo sapien
aataaagccttaagagcatgaaaac

SEQ ID NO: 1018058 - DNA, 25 bp, Homo sapien
caatctgaagtgtaaagtctctatc

SEQ ID NO: 1018059 - DNA, 25 bp, Homo sapien
ggttgaatgtctatcccagcccctg

SEQ ID NO: 1018060 - DNA, 25 bp, Homo sapien
cacttttgacgctggcaagggtgaa

SEQ ID NO: 1018061 - DNA, 25 bp, Homo sapien
caagggtgaagctacggccatatca

SEQ ID NO: 1018062 - DNA, 25 bp, Homo sapien
tccagtgcgaaagggttactcatcc

SEQ ID NO: 1018063 - DNA, 25 bp, Homo sapien
cagtctttccagttagcatgcccat

SEQ ID NO: 1018064 - DNA, 25 bp, Homo sapien
tagaagtggtggtgcctaaatcagc

SEQ ID NO: 1018065 - DNA, 25 bp, Homo sapien
cagcatctgactcaagtggagccca

SEQ ID NO: 1018066 - DNA, 25 bp, Homo sapien
aatcagcagctacgtagttcaggtg

SEQ ID NO: 1018067 - DNA, 25 bp, Homo sapien
acgtggctaactagaccctgggcag

SEQ ID NO: 1018068 - DNA, 25 bp, Homo sapien
tcccagttatatgcatttggctgcc

SEQ ID NO: 1018069 - DNA, 25 bp, Homo sapien
ccttaaattgcaggaataacatgca

SEQ ID NO: 1018070 - DNA, 25 bp, Homo sapien
caagttagattgactatgacactgg

SEQ ID NO: 1018071 - DNA, 25 bp, Homo sapien
tatggatgacattactcctggtggt

SEQ ID NO: 1018072 - DNA, 25 bp, Homo sapien
gaaaacagggattccctcattcgta

SEQ ID NO: 1018073 - DNA, 25 bp, Homo sapien
ggattccctcattcgtaccaggcct

SEQ ID NO: 1018074 - DNA, 25 bp, Homo sapien
cagggattccctcattcgtaccagg

SEQ ID NO: 1018075 - DNA, 25 bp, Homo sapien
ctagaaaacagggattccctcattc

SEQ ID NO: 1018076 - DNA, 25 bp, Homo sapien
ctggggatgtctgagtctgagaact

SEQ ID NO: 1018077 - DNA, 25 bp, Homo sapien
cgtgtctgatgagtgccttttcctt

SEQ ID NO: 1018078 - DNA, 25 bp, Homo sapien
atttcctacgtgtctgatgagtgcc

SEQ ID NO: 1018079 - DNA, 25 bp, Homo sapien
gagaactcatttcctacgtgtctga

SEQ ID NO: 1018080 - DNA, 25 bp, Homo sapien
taggtggcgatgcacttgggatatc

SEQ ID NO: 1018081 - DNA, 25 bp, Homo sapien
caggtaggtggcgatgcacttggga

SEQ ID NO: 1018082 - DNA, 25 bp, Homo sapien
gatatctgagtatgaacattattac

SEQ ID NO: 1018083 - DNA, 25 bp, Homo sapien
gctctgcgggatactgggatccatg

SEQ ID NO: 1018084 - DNA, 25 bp, Homo sapien
gacgtataaacaccaggcaatgtgg

SEQ ID NO: 1018085 - DNA, 25 bp, Homo sapien
tgccggacaggcaatctgctacgag

SEQ ID NO: 1018086 - DNA, 25 bp, Homo sapien
tagaaagctaaagacccagtaattg

SEQ ID NO: 1018087 - DNA, 25 bp, Homo sapien
cagtgcagtgatgaaaagacgtata

SEQ ID NO: 1018088 - DNA, 25 bp, Homo sapien
cacccatggtaagtgtttaacccat

SEQ ID NO: 1018089 - DNA, 25 bp, Homo sapien
catttatgggacatcctgtgatccc

SEQ ID NO: 1018090 - DNA, 25 bp, Homo sapien
acagatgtgttacaacctgacatgg

SEQ ID NO: 1018091 - DNA, 25 bp, Homo sapien
tcacccatggtaagtgtttaaccca

SEQ ID NO: 1018092 - DNA, 25 bp, Homo sapien
tcacctgttctagacattcaccagg

SEQ ID NO: 1018093 - DNA, 25 bp, Homo sapien
cttgctcttcacctgttctagacat

SEQ ID NO: 1018094 - DNA, 25 bp, Homo sapien
gctcttcacctgttctagacattca

SEQ ID NO: 1018095 - DNA, 25 bp, Homo sapien
tcttcacctgttctagacattcacc

SEQ ID NO: 1018096 - DNA, 25 bp, Homo sapien
gaagttgtttacagctgtatacatc

SEQ ID NO: 1018097 - DNA, 25 bp, Homo sapien
tggaaagcaggcatctaaggtctgc

SEQ ID NO: 1018098 - DNA, 25 bp, Homo sapien
acatcattctcttatcgaatactgg

SEQ ID NO: 1018099 - DNA, 25 bp, Homo sapien
tctttgaagttgtttacagctgtat

SEQ ID NO: 1018100 - DNA, 25 bp, Homo sapien
gttgctgatgtctcctctccccgtc

SEQ ID NO: 1018101 - DNA, 25 bp, Homo sapien
tctccccgtcacttagtctctaatt

SEQ ID NO: 1018102 - DNA, 25 bp, Homo sapien
cacttagtctctaattactttatac

SEQ ID NO: 1018103 - DNA, 25 bp, Homo sapien
cttgggtctactgaaacctaactgc

SEQ ID NO: 1018104 - DNA, 25 bp, Homo sapien
tgttgcaactcttacttcgtggatc

SEQ ID NO: 1018105 - DNA, 25 bp, Homo sapien
tagcttacttctcgttttggtggaa

SEQ ID NO: 1018106 - DNA, 25 bp, Homo sapien
tgatgaccgcgcagctgaggctttg

SEQ ID NO: 1018107 - DNA, 25 bp, Homo sapien
taatacacacatgcttagaactgtg

SEQ ID NO: 1018108 - DNA, 25 bp, Homo sapien
gatgcttatttcagctgtcactcac

SEQ ID NO: 1018109 - DNA, 25 bp, Homo sapien
ccatgaaagttaatttcccctctag

SEQ ID NO: 1018110 - DNA, 25 bp, Homo sapien
cactctattgtctgggccagagtgc

SEQ ID NO: 1018111 - DNA, 25 bp, Homo sapien
gtattggaattacgggcctgtgagc

SEQ ID NO: 1018112 - DNA, 25 bp, Homo sapien
tgcagtggccattaaccagcaagtg

SEQ ID NO: 1018113 - DNA, 25 bp, Homo sapien
gatcactaacatgcctgctctggga

SEQ ID NO: 1018114 - DNA, 25 bp, Homo sapien
tcaagtgcggtacgctagacctgct

SEQ ID NO: 1018115 - DNA, 25 bp, Homo sapien
tcaacgcaaattcagggacctgcag

SEQ ID NO: 1018116 - DNA, 25 bp, Homo sapien
cataccaaggtgtgccaagagctgc

SEQ ID NO: 1018117 - DNA, 25 bp, Homo sapien
gagatcattatgctggcacccctgt

SEQ ID NO: 1018118 - DNA, 25 bp, Homo sapien
gaaacaagcatcatcgacatggcag

SEQ ID NO: 1018119 - DNA, 25 bp, Homo sapien
gcaaatctgtgaactacggcaccct

SEQ ID NO: 1018120 - DNA, 25 bp, Homo sapien
gagaggcgcaggctatgacctcttg

SEQ ID NO: 1018121 - DNA, 25 bp, Homo sapien
ctttgagaggcgcaggctatgacct

SEQ ID NO: 1018122 - DNA, 25 bp, Homo sapien
gcgcaggctatgacctcttgccttg

SEQ ID NO: 1018123 - DNA, 25 bp, Homo sapien
ctccctttgagaggcgcaggctatg

SEQ ID NO: 1018124 - DNA, 25 bp, Homo sapien
tggatccgtcatggcgcagtgagtt

SEQ ID NO: 1018125 - DNA, 25 bp, Homo sapien
tgttagaagggttgcctcagctccg

SEQ ID NO: 1018126 - DNA, 25 bp, Homo sapien
tggcaagacctcacatgttagaagg

SEQ ID NO: 1018127 - DNA, 25 bp, Homo sapien
tcccatatcacagcgagcgagaatc

SEQ ID NO: 1018128 - DNA, 25 bp, Homo sapien
gagaatgcggaagcactgtgccctc

SEQ ID NO: 1018129 - DNA, 25 bp, Homo sapien
cacctgtgtgaagcgccatgatctg

SEQ ID NO: 1018130 - DNA, 25 bp, Homo sapien
gccacttagcagaggaattttgcca

SEQ ID NO: 1018131 - DNA, 25 bp, Homo sapien
gatctgtggcttcagcacaccgcaa

SEQ ID NO: 1018132 - DNA, 25 bp, Homo sapien
ctggtaaagtccacataaagctcat

SEQ ID NO: 1018133 - DNA, 25 bp, Homo sapien
tctggtaaagtccacataaagctca

SEQ ID NO: 1018134 - DNA, 25 bp, Homo sapien
cttgtcttggtaagatgtaccttct

SEQ ID NO: 1018135 - DNA, 25 bp, Homo sapien
aagtactgacagaccaatgatggca

SEQ ID NO: 1018136 - DNA, 25 bp, Homo sapien
gcctgccacttcaagaactgacagt

SEQ ID NO: 1018137 - DNA, 25 bp, Homo sapien
tttcccaatacttaaggcattcctg

SEQ ID NO: 1018138 - DNA, 25 bp, Homo sapien
ttagataatgaaatgtgtcgacgct

SEQ ID NO: 1018139 - DNA, 25 bp, Homo sapien
tcttgccatcaagcctgggctggct

SEQ ID NO: 1018140 - DNA, 25 bp, Homo sapien
ggcccgatcagtgtagcccttgaca

SEQ ID NO: 1018141 - DNA, 25 bp, Homo sapien
aaggacatcctcgttgcactcagaa

SEQ ID NO: 1018142 - DNA, 25 bp, Homo sapien
tgggctggctatcccagtcgacctg

SEQ ID NO: 1018143 - DNA, 25 bp, Homo sapien
acaacttcataactagggtttagag

SEQ ID NO: 1018144 - DNA, 25 bp, Homo sapien
caacttcataactagggtttagagt

SEQ ID NO: 1018145 - DNA, 25 bp, Homo sapien
ctggagtccggctgacccatggcag

SEQ ID NO: 1018146 - DNA, 25 bp, Homo sapien
gaaagcttgatgtgtccggggatca

SEQ ID NO: 1018147 - DNA, 25 bp, Homo sapien
tgtccactcttctttccaagttctc

SEQ ID NO: 1018148 - DNA, 25 bp, Homo sapien
tctctaattctctcttgatgggccc

SEQ ID NO: 1018149 - DNA, 25 bp, Homo sapien
tttcacttgtgggtattccattcat

SEQ ID NO: 1018150 - DNA, 25 bp, Homo sapien
ttttcacttgtgggtattccattca

SEQ ID NO: 1018151 - DNA, 25 bp, Homo sapien
aaacgaaatcccattttcacttgtg

SEQ ID NO: 1018152 - DNA, 25 bp, Homo sapien
ggtaagcggtgagcaatcggaaaac

SEQ ID NO: 1018153 - DNA, 25 bp, Homo sapien
ggaaaacatagcatctggaaacggg

SEQ ID NO: 1018154 - DNA, 25 bp, Homo sapien
tttgcccaggtgaagcacgctttct

SEQ ID NO: 1018155 - DNA, 25 bp, Homo sapien
cgggggcttttgtggctccacgaca

SEQ ID NO: 1018156 - DNA, 25 bp, Homo sapien
tccccgctctcatcccgtagactga

SEQ ID NO: 1018157 - DNA, 25 bp, Homo sapien
ctcatcccgtagactgactttgttc

SEQ ID NO: 1018158 - DNA, 25 bp, Homo sapien
ttcagaattgtcatccctctccccg

SEQ ID NO: 1018159 - DNA, 25 bp, Homo sapien
cgctctcatcccgtagactgacttt

SEQ ID NO: 1018160 - DNA, 25 bp, Homo sapien
acagggttgtcctgccgcagtggtt

SEQ ID NO: 1018161 - DNA, 25 bp, Homo sapien
ggcttggtctctccacccctgttca

SEQ ID NO: 1018162 - DNA, 25 bp, Homo sapien
ctttgtggcagcttcgtccctaggc

SEQ ID NO: 1018163 - DNA, 25 bp, Homo sapien
ctgaattcgattcatgaggaggagg

SEQ ID NO: 1018164 - DNA, 25 bp, Homo sapien
tgttggtcgtgggtaacagaatttc

SEQ ID NO: 1018165 - DNA, 25 bp, Homo sapien
gaatttccaatccaaacagcttcaa

SEQ ID NO: 1018166 - DNA, 25 bp, Homo sapien
aacagaatttccaatccaaacagct

SEQ ID NO: 1018167 - DNA, 25 bp, Homo sapien
tggtcgtgggtaacagaatttccaa

SEQ ID NO: 1018168 - DNA, 25 bp, Homo sapien
ggaatgcgtgtaactccccgcaggc

SEQ ID NO: 1018169 - DNA, 25 bp, Homo sapien
gggtggaatgcgtgtaactccccgc

SEQ ID NO: 1018170 - DNA, 25 bp, Homo sapien
tggacctggattgcttcatgttctc

SEQ ID NO: 1018171 - DNA, 25 bp, Homo sapien
ggaggcagcacacagatgtggacct

SEQ ID NO: 1018172 - DNA, 25 bp, Homo sapien
caagggtacaagtagcaactgaagg

SEQ ID NO: 1018173 - DNA, 25 bp, Homo sapien
aactgaaggccggtttgtgcatcag

SEQ ID NO: 1018174 - DNA, 25 bp, Homo sapien
ctgccatcttgtctgatcaagggta

SEQ ID NO: 1018175 - DNA, 25 bp, Homo sapien
aaggccggtttgtgcatcaggtgca

SEQ ID NO: 1018176 - DNA, 25 bp, Homo sapien
tgtacaatcaccgtaggaagctggc

SEQ ID NO: 1018177 - DNA, 25 bp, Homo sapien
aatagggacctcttcagacggcgca

SEQ ID NO: 1018178 - DNA, 25 bp, Homo sapien
tgtccaggagcgatcagagcagttt

SEQ ID NO: 1018179 - DNA, 25 bp, Homo sapien
gacggcgcatgacctactgaaagag

SEQ ID NO: 1018180 - DNA, 25 bp, Homo sapien
ccaggagtgggagcttatgaaacta

SEQ ID NO: 1018181 - DNA, 25 bp, Homo sapien
tcatgaccgcataggcaaaacctcc

SEQ ID NO: 1018182 - DNA, 25 bp, Homo sapien
tgtgctccgaacaacagtactccag

SEQ ID NO: 1018183 - DNA, 25 bp, Homo sapien
caagagcaccaagactatccaaggg

SEQ ID NO: 1018184 - DNA, 25 bp, Homo sapien
agacacactggtcagttgatctcat

SEQ ID NO: 1018185 - DNA, 25 bp, Homo sapien
ggcaggtgctaagacacactggtca

SEQ ID NO: 1018186 - DNA, 25 bp, Homo sapien
gctaagacacactggtcagttgatc

SEQ ID NO: 1018187 - DNA, 25 bp, Homo sapien
ggtgctaagacacactggtcagttg

SEQ ID NO: 1018188 - DNA, 25 bp, Homo sapien
tctggaatacgtggagatgacagca

SEQ ID NO: 1018189 - DNA, 25 bp, Homo sapien
cctttatgacattggtgttgacttg

SEQ ID NO: 1018190 - DNA, 25 bp, Homo sapien
gatgacagcagtagggccttctatt

SEQ ID NO: 1018191 - DNA, 25 bp, Homo sapien
ttggcttgcatagaacagctgagta

SEQ ID NO: 1018192 - DNA, 25 bp, Homo sapien
ctgaagtatcagcaaggctccaggc

SEQ ID NO: 1018193 - DNA, 25 bp, Homo sapien
gtcaacccgcgtgtgcctccttcat

SEQ ID NO: 1018194 - DNA, 25 bp, Homo sapien
aaccgtgtttgtgaggcaaactgaa

SEQ ID NO: 1018195 - DNA, 25 bp, Homo sapien
caagcagacagggtcaggggtcaac

SEQ ID NO: 1018196 - DNA, 25 bp, Homo sapien
cattcgcttgactaaaggaggctgc

SEQ ID NO: 1018197 - DNA, 25 bp, Homo sapien
aacacaggtgagtgcgggatgaaca

SEQ ID NO: 1018198 - DNA, 25 bp, Homo sapien
aatttgatttcccaggccacgctct

SEQ ID NO: 1018199 - DNA, 25 bp, Homo sapien
gctaacaatctgcatcttatacagg

SEQ ID NO: 1018200 - DNA, 25 bp, Homo sapien
tccgttccatgtggcggtacgtgat

SEQ ID NO: 1018201 - DNA, 25 bp, Homo sapien
cggtagcagtggctggtcttgtgcg

SEQ ID NO: 1018202 - DNA, 25 bp, Homo sapien
tacgtgatgcggtagcagtggctgg

SEQ ID NO: 1018203 - DNA, 25 bp, Homo sapien
tctctgggacagagtccgttccatg

SEQ ID NO: 1018204 - DNA, 25 bp, Homo sapien
tttcagcaaatcctggagccccaag

SEQ ID NO: 1018205 - DNA, 25 bp, Homo sapien
atttatcaaaagatgattgatgccc

SEQ ID NO: 1018206 - DNA, 25 bp, Homo sapien
ccagttcacaaaccatatctttttc

SEQ ID NO: 1018207 - DNA, 25 bp, Homo sapien
tctgaaagtcctaaaactgatccat

SEQ ID NO: 1018208 - DNA, 25 bp, Homo sapien
ttcattagtgccctctttgaagcct

SEQ ID NO: 1018209 - DNA, 25 bp, Homo sapien
tcccttcacattggacgagagccct

SEQ ID NO: 1018210 - DNA, 25 bp, Homo sapien
ggcatttcattagtgccctctttga

SEQ ID NO: 1018211 - DNA, 25 bp, Homo sapien
gacgagagccctggcatttcattag

SEQ ID NO: 1018212 - DNA, 25 bp, Homo sapien
acttgttcaggacctgggcaaagcc

SEQ ID NO: 1018213 - DNA, 25 bp, Homo sapien
accagccaccgctgggagcatcaag

SEQ ID NO: 1018214 - DNA, 25 bp, Homo sapien
ccctgttcagctttgctgacttgtt

SEQ ID NO: 1018215 - DNA, 25 bp, Homo sapien
catcaagaccctgttcagctttgct

SEQ ID NO: 1018216 - DNA, 25 bp, Homo sapien
aaaaaattgaacttccagtgttgag

SEQ ID NO: 1018217 - DNA, 25 bp, Homo sapien
aaaattgaacttccagtgttgaggg

SEQ ID NO: 1018218 - DNA, 25 bp, Homo sapien
aaaaattgaacttccagtgttgagg

SEQ ID NO: 1018219 - DNA, 25 bp, Homo sapien
aaattgaacttccagtgttgagggg

SEQ ID NO: 1018220 - DNA, 25 bp, Homo sapien
cacatccctgttactagtgatggca

SEQ ID NO: 1018221 - DNA, 25 bp, Homo sapien
ccgggtcacatgaaggctaagcatg

SEQ ID NO: 1018222 - DNA, 25 bp, Homo sapien
acatgaaggctaagcatgtcctggg

SEQ ID NO: 1018223 - DNA, 25 bp, Homo sapien
tcacatgaaggctaagcatgtcctg

SEQ ID NO: 1018224 - DNA, 25 bp, Homo sapien
taagcatgtcctggggacactcaac

SEQ ID NO: 1018225 - DNA, 25 bp, Homo sapien
tgggagcatctgagatccgctcttc

SEQ ID NO: 1018226 - DNA, 25 bp, Homo sapien
tgtctcttgtgccctccagtgccga

SEQ ID NO: 1018227 - DNA, 25 bp, Homo sapien
ccagtgccgaggtcatgggctggca

SEQ ID NO: 1018228 - DNA, 25 bp, Homo sapien
ctggcagagcatgtggtctggaccc

SEQ ID NO: 1018229 - DNA, 25 bp, Homo sapien
gctgcgattatcatcttgttcaaag

SEQ ID NO: 1018230 - DNA, 25 bp, Homo sapien
cagctgcgattatcatcttgttcaa

SEQ ID NO: 1018231 - DNA, 25 bp, Homo sapien
gcagctgcgattatcatcttgttca

SEQ ID NO: 1018232 - DNA, 25 bp, Homo sapien
gagcagctgcgattatcatcttgtt

SEQ ID NO: 1018233 - DNA, 25 bp, Homo sapien
ggcgtttgacatactgtcgtaggct

SEQ ID NO: 1018234 - DNA, 25 bp, Homo sapien
tggtccggcgtttgacatactgtcg

SEQ ID NO: 1018235 - DNA, 25 bp, Homo sapien
ggtccggcgtttgacatactgtcgt

SEQ ID NO: 1018236 - DNA, 25 bp, Homo sapien
tccggcgtttgacatactgtcgtag

SEQ ID NO: 1018237 - DNA, 25 bp, Homo sapien
tgatgctgggttcacatgaccttgc

SEQ ID NO: 1018238 - DNA, 25 bp, Homo sapien
gaattcacgccaaaatccatgctag

SEQ ID NO: 1018239 - DNA, 25 bp, Homo sapien
caccagtgtgcggaatactcggtca

SEQ ID NO: 1018240 - DNA, 25 bp, Homo sapien
ccttttttcgggttgcatgaggcag

SEQ ID NO: 1018241 - DNA, 25 bp, Homo sapien
agctccaccaatagcacgagaggaa

SEQ ID NO: 1018242 - DNA, 25 bp, Homo sapien
caccaatagcacgagaggaagagtg

SEQ ID NO: 1018243 - DNA, 25 bp, Homo sapien
tccaccaatagcacgagaggaagag

SEQ ID NO: 1018244 - DNA, 25 bp, Homo sapien
ccaatagcacgagaggaagagtgag

SEQ ID NO: 1018245 - DNA, 25 bp, Homo sapien
cctgagctacactgaggatgaagtt

SEQ ID NO: 1018246 - DNA, 25 bp, Homo sapien
gggcatcctgagctacactgaggat

SEQ ID NO: 1018247 - DNA, 25 bp, Homo sapien
cgaaatgtgatggtatgagaagatg

SEQ ID NO: 1018248 - DNA, 25 bp, Homo sapien
ctgcgaaatgtgatggtatgagaag

SEQ ID NO: 1018249 - DNA, 25 bp, Homo sapien
ttcccacccataagagccatgttgg

SEQ ID NO: 1018250 - DNA, 25 bp, Homo sapien
tgttcccacccataagagccatgtt

SEQ ID NO: 1018251 - DNA, 25 bp, Homo sapien
ccacccataagagccatgttggtca

SEQ ID NO: 1018252 - DNA, 25 bp, Homo sapien
acccataagagccatgttggtcatg

SEQ ID NO: 1018253 - DNA, 25 bp, Homo sapien
ttgtgcagattccatggtgtgatgg

SEQ ID NO: 1018254 - DNA, 25 bp, Homo sapien
tgttgtgcagattccatggtgtgat

SEQ ID NO: 1018255 - DNA, 25 bp, Homo sapien
gctgttgtgcagattccatggtgtg

SEQ ID NO: 1018256 - DNA, 25 bp, Homo sapien
gtgctgttgtgcagattccatggtg

SEQ ID NO: 1018257 - DNA, 25 bp, Homo sapien
ctctggcaaaatggatattgtcatc

SEQ ID NO: 1018258 - DNA, 25 bp, Homo sapien
gatctcttcattggcctcaacttca

SEQ ID NO: 1018259 - DNA, 25 bp, Homo sapien
atgatctcttcattggcctcaactt

SEQ ID NO: 1018260 - DNA, 25 bp, Homo sapien
tcttcattggcctcaacttcatggt

SEQ ID NO: 1018261 - DNA, 25 bp, Homo sapien
tcatgcagtgtcagcttcatccagg

SEQ ID NO: 1018262 - DNA, 25 bp, Homo sapien
ccatatttgatacctggtcaccagg

SEQ ID NO: 1018263 - DNA, 25 bp, Homo sapien
ccaggatacaatggtgaaagtttga

SEQ ID NO: 1018264 - DNA, 25 bp, Homo sapien
tgaaagtttgagtcaatggatttgg

SEQ ID NO: 1018265 - DNA, 25 bp, Homo sapien
ccagacaatggcatattacttagca

SEQ ID NO: 1018266 - DNA, 25 bp, Homo sapien
tgtgaacctagaactgctcagaaaa

SEQ ID NO: 1018267 - DNA, 25 bp, Homo sapien
ccaaagagaattgagctgcaaagcc

SEQ ID NO: 1018268 - DNA, 25 bp, Homo sapien
gggcgaaagtacctgggatatctat

SEQ ID NO: 1018269 - DNA, 25 bp, Homo sapien
ttttccagtctgggctcccagtggt

SEQ ID NO: 1018270 - DNA, 25 bp, Homo sapien
ggtgttttccagtctgggctcccag

SEQ ID NO: 1018271 - DNA, 25 bp, Homo sapien
gtgttttccagtctgggctcccagt

SEQ ID NO: 1018272 - DNA, 25 bp, Homo sapien
tccagtctgggctcccagtggttcc

SEQ ID NO: 1018273 - DNA, 25 bp, Homo sapien
gagagtccttttggagtctgacctc

SEQ ID NO: 1018274 - DNA, 25 bp, Homo sapien
atcgtggtcatctcaactgctcttg

SEQ ID NO: 1018275 - DNA, 25 bp, Homo sapien
tctgcagccacgtcttcttaatcgt

SEQ ID NO: 1018276 - DNA, 25 bp, Homo sapien
tgttgcagccttctccaggtctctc

SEQ ID NO: 1018277 - DNA, 25 bp, Homo sapien
cggttcccacccatgccagagaggt

SEQ ID NO: 1018278 - DNA, 25 bp, Homo sapien
agagaggtcagtaggtggcctggat

SEQ ID NO: 1018279 - DNA, 25 bp, Homo sapien
ggttcccacccatgccagagaggtc

SEQ ID NO: 1018280 - DNA, 25 bp, Homo sapien
gcctgaaggtccgtcctaaggttga

SEQ ID NO: 1018281 - DNA, 25 bp, Homo sapien
cacggaggaagtggtgttcgctcga

SEQ ID NO: 1018282 - DNA, 25 bp, Homo sapien
aggaagtggtgttcgctcgatagtc

SEQ ID NO: 1018283 - DNA, 25 bp, Homo sapien
cggtgcgtgccacggaggaagtggt

SEQ ID NO: 1018284 - DNA, 25 bp, Homo sapien
agtggtgttcgctcgatagtcctga

SEQ ID NO: 1018285 - DNA, 25 bp, Homo sapien
ctaagtgtatgtgcccttcaatccc

SEQ ID NO: 1018286 - DNA, 25 bp, Homo sapien
tgtaatgcccgctggaccactggag

SEQ ID NO: 1018287 - DNA, 25 bp, Homo sapien
tggagagcccccatagagagcaaac

SEQ ID NO: 1018288 - DNA, 25 bp, Homo sapien
gggcttgcctgaactctcaggtcta

SEQ ID NO: 1018289 - DNA, 25 bp, Homo sapien
gggtttgtctgatctgtctggggtc

SEQ ID NO: 1018290 - DNA, 25 bp, Homo sapien
tgctaatggctgctcgggtttgtct

SEQ ID NO: 1018291 - DNA, 25 bp, Homo sapien
gcaaaggagtccatgcagctgctaa

SEQ ID NO: 1018292 - DNA, 25 bp, Homo sapien
gcagccccacagtgcaaaggagtcc

SEQ ID NO: 1018293 - DNA, 25 bp, Homo sapien
gaaacatatttgctgtccagagtga

SEQ ID NO: 1018294 - DNA, 25 bp, Homo sapien
tagcacctgtgttcaaatggattgg

SEQ ID NO: 1018295 - DNA, 25 bp, Homo sapien
tcttcacaggaacacagcgctgggc

SEQ ID NO: 1018296 - DNA, 25 bp, Homo sapien
aagctacccctttctcaatggccaa

SEQ ID NO: 1018297 - DNA, 25 bp, Homo sapien
gttcagattctacccattcacaaca

SEQ ID NO: 1018298 - DNA, 25 bp, Homo sapien
tctgcagttcagattctacccattc

SEQ ID NO: 1018299 - DNA, 25 bp, Homo sapien
cagttcagattctacccattcacaa

SEQ ID NO: 1018300 - DNA, 25 bp, Homo sapien
tgcagttcagattctacccattcac

SEQ ID NO: 1018301 - DNA, 25 bp, Homo sapien
aagggcacgcgacccccagcgcttc

SEQ ID NO: 1018302 - DNA, 25 bp, Homo sapien
gtgaccaggcctccggccaagggca

SEQ ID NO: 1018303 - DNA, 25 bp, Homo sapien
aggcaggctcgctccgccacaggcg

SEQ ID NO: 1018304 - DNA, 25 bp, Homo sapien
gcgggtgaccaggcctccggccaag

SEQ ID NO: 1018305 - DNA, 25 bp, Homo sapien
gacatggcggctccattccagacag

SEQ ID NO: 1018306 - DNA, 25 bp, Homo sapien
cgcttgagcaccagacatggcggct

SEQ ID NO: 1018307 - DNA, 25 bp, Homo sapien
cagagctggccgcttgagcaccaga

SEQ ID NO: 1018308 - DNA, 25 bp, Homo sapien
tggccgcttgagcaccagacatggc

SEQ ID NO: 1018309 - DNA, 25 bp, Homo sapien
agacagaccccaggcttagagaggc

SEQ ID NO: 1018310 - DNA, 25 bp, Homo sapien
agagacagaccccaggcttagagag

SEQ ID NO: 1018311 - DNA, 25 bp, Homo sapien
aggcagccaaccaggctgagtgagc

SEQ ID NO: 1018312 - DNA, 25 bp, Homo sapien
tagagaggcagccaaccaggctgag

SEQ ID NO: 1018313 - DNA, 25 bp, Homo sapien
gtcctggcactggaggctcttcatc

SEQ ID NO: 1018314 - DNA, 25 bp, Homo sapien
attggtcctggcactggaggctctt

SEQ ID NO: 1018315 - DNA, 25 bp, Homo sapien
ggtcctggcactggaggctcttcat

SEQ ID NO: 1018316 - DNA, 25 bp, Homo sapien
tggtcctggcactggaggctcttca

SEQ ID NO: 1018317 - DNA, 25 bp, Homo sapien
agtccactgttcctaacatctgcca

SEQ ID NO: 1018318 - DNA, 25 bp, Homo sapien
gtccactgttcctaacatctgccat

SEQ ID NO: 1018319 - DNA, 25 bp, Homo sapien
cagtccactgttcctaacatctgcc

SEQ ID NO: 1018320 - DNA, 25 bp, Homo sapien
tcagtccactgttcctaacatctgc

SEQ ID NO: 1018321 - DNA, 25 bp, Homo sapien
aggtgacttttcagcaagcattgga

SEQ ID NO: 1018322 - DNA, 25 bp, Homo sapien
ggtgacttttcagcaagcattggaa

SEQ ID NO: 1018323 - DNA, 25 bp, Homo sapien
caggtgacttttcagcaagcattgg

SEQ ID NO: 1018324 - DNA, 25 bp, Homo sapien
tccctgagagcttgaaggtctttgg

SEQ ID NO: 1018325 - DNA, 25 bp, Homo sapien
aaggtctttggtgtactgaggtcga

SEQ ID NO: 1018326 - DNA, 25 bp, Homo sapien
gtccagagcagagtccctgagagct

SEQ ID NO: 1018327 - DNA, 25 bp, Homo sapien
gtcgaagaacgctgacctctgacct

SEQ ID NO: 1018328 - DNA, 25 bp, Homo sapien
tgtgggctacatatgaacttctcag

SEQ ID NO: 1018329 - DNA, 25 bp, Homo sapien
gaaatattacacagttatgaaaatg

SEQ ID NO: 1018330 - DNA, 25 bp, Homo sapien
tgtcataaggcaatacttcagctta

SEQ ID NO: 1018331 - DNA, 25 bp, Homo sapien
catgctctagaatgtattaatctct

SEQ ID NO: 1018332 - DNA, 25 bp, Homo sapien
gctccaggcaatccataaggtgatg

SEQ ID NO: 1018333 - DNA, 25 bp, Homo sapien
gaaaattagatatatgctccaggca

SEQ ID NO: 1018334 - DNA, 25 bp, Homo sapien
gatgtgcttgatgaacaacgagaag

SEQ ID NO: 1018335 - DNA, 25 bp, Homo sapien
gaaattgggtgattcaaccaaggcc

SEQ ID NO: 1018336 - DNA, 25 bp, Homo sapien
gtagtttaagtctattgcaaaataa

SEQ ID NO: 1018337 - DNA, 25 bp, Homo sapien
tcatttaggtgaacaattagtagtt

SEQ ID NO: 1018338 - DNA, 25 bp, Homo sapien
attagtagtttaagtctattgcaaa

SEQ ID NO: 1018339 - DNA, 25 bp, Homo sapien
tagtagtttaagtctattgcaaaat

SEQ ID NO: 1018340 - DNA, 25 bp, Homo sapien
ttcttctagagcgtctccacttggt

SEQ ID NO: 1018341 - DNA, 25 bp, Homo sapien
ctttcttctagagcgtctccacttg

SEQ ID NO: 1018342 - DNA, 25 bp, Homo sapien
tcttctagagcgtctccacttggtc

SEQ ID NO: 1018343 - DNA, 25 bp, Homo sapien
ttctagagcgtctccacttggtcat

SEQ ID NO: 1018344 - DNA, 25 bp, Homo sapien
agtcatcaagttcatatgtttctcc

SEQ ID NO: 1018345 - DNA, 25 bp, Homo sapien
agcagcaacaggagataacccaagg

SEQ ID NO: 1018346 - DNA, 25 bp, Homo sapien
caggagataacccaaggagtgccaa

SEQ ID NO: 1018347 - DNA, 25 bp, Homo sapien
agataacccaaggagtgccaaggtg

SEQ ID NO: 1018348 - DNA, 25 bp, Homo sapien
gaaaagatgagagcgtgtgccggga

SEQ ID NO: 1018349 - DNA, 25 bp, Homo sapien
aggtgggtggagaaaagatgagagc

SEQ ID NO: 1018350 - DNA, 25 bp, Homo sapien
tgtgccgggatattcgggtacagct

SEQ ID NO: 1018351 - DNA, 25 bp, Homo sapien
gctgcccggaggttgtgagagctga

SEQ ID NO: 1018352 - DNA, 25 bp, Homo sapien
cagacaggcacatgaatggctctca

SEQ ID NO: 1018353 - DNA, 25 bp, Homo sapien
tcacgctcagtgtcaaaagtacctt

SEQ ID NO: 1018354 - DNA, 25 bp, Homo sapien
tcgggagggctggtaactctccatc

SEQ ID NO: 1018355 - DNA, 25 bp, Homo sapien
gttcagtgccaacgacagctcggga

SEQ ID NO: 1018356 - DNA, 25 bp, Homo sapien
cagcagtgtgccctcggtttcctag

SEQ ID NO: 1018357 - DNA, 25 bp, Homo sapien
cctggctggaagttgaaactgtctg

SEQ ID NO: 1018358 - DNA, 25 bp, Homo sapien
gtgcttctcggaggccaagttgatg

SEQ ID NO: 1018359 - DNA, 25 bp, Homo sapien
taatagcttcggtcggcacagaaca

SEQ ID NO: 1018360 - DNA, 25 bp, Homo sapien
tattttagtagtgtacattgcaccc

SEQ ID NO: 1018361 - DNA, 25 bp, Homo sapien
aatctatatgtccttgtctagctcc

SEQ ID NO: 1018362 - DNA, 25 bp, Homo sapien
tccagtcccaccaatgttacaaaag

SEQ ID NO: 1018363 - DNA, 25 bp, Homo sapien
caataagtgcccattgatgggcact

SEQ ID NO: 1018364 - DNA, 25 bp, Homo sapien
aagggtgagattgctgctgagagag

SEQ ID NO: 1018365 - DNA, 25 bp, Homo sapien
gagaagggtgagattgctgctgaga

SEQ ID NO: 1018366 - DNA, 25 bp, Homo sapien
tatcacattgtctaatgcatatata

SEQ ID NO: 1018367 - DNA, 25 bp, Homo sapien
acattgtctaatgcatatataattg

SEQ ID NO: 1018368 - DNA, 25 bp, Homo sapien
cagataaattgtgaatgtgcccaga

SEQ ID NO: 1018369 - DNA, 25 bp, Homo sapien
aggagggaacaacgaggcatcttgc

SEQ ID NO: 1018370 - DNA, 25 bp, Homo sapien
cactggctgacaggccttcttaagc

SEQ ID NO: 1018371 - DNA, 25 bp, Homo sapien
agtggatcggtgctgccagctcgct

SEQ ID NO: 1018372 - DNA, 25 bp, Homo sapien
caggtgagtaacatgtaggacccaa

SEQ ID NO: 1018373 - DNA, 25 bp, Homo sapien
tcacaggagtgggagaaatctacct

SEQ ID NO: 1018374 - DNA, 25 bp, Homo sapien
aataaaattttcatgggtcacagga

SEQ ID NO: 1018375 - DNA, 25 bp, Homo sapien
tccttatgtctgaaatcatgggctg

SEQ ID NO: 1018376 - DNA, 25 bp, Homo sapien
tgcaatgtgcgagcagtttggaaga

SEQ ID NO: 1018377 - DNA, 25 bp, Homo sapien
ttgtcacccgccttcggtggcccat

SEQ ID NO: 1018378 - DNA, 25 bp, Homo sapien
cacccgccttcggtggcccatactt

SEQ ID NO: 1018379 - DNA, 25 bp, Homo sapien
ctgcaactgaatttgtagctcttgg

SEQ ID NO: 1018380 - DNA, 25 bp, Homo sapien
aaggaactgacagtcagtcagaggg

SEQ ID NO: 1018381 - DNA, 25 bp, Homo sapien
gtggaggagctagatattgtgataa

SEQ ID NO: 1018382 - DNA, 25 bp, Homo sapien
cccagggtcggcgagctgcaacgtc

SEQ ID NO: 1018383 - DNA, 25 bp, Homo sapien
tgtgataagcgccaaggcacacagc

SEQ ID NO: 1018384 - DNA, 25 bp, Homo sapien
caatggtaagctatcctgttcaata

SEQ ID NO: 1018385 - DNA, 25 bp, Homo sapien
tttttgctgcccaagttgaatgtca

SEQ ID NO: 1018386 - DNA, 25 bp, Homo sapien
agctatcctgttcaatagttatttc

SEQ ID NO: 1018387 - DNA, 25 bp, Homo sapien
cccaagttgaatgtcaatggtaagc

SEQ ID NO: 1018388 - DNA, 25 bp, Homo sapien
agccacctgctggtagtgttgttct

SEQ ID NO: 1018389 - DNA, 25 bp, Homo sapien
ggagccacctgctggtagtgttgtt

SEQ ID NO: 1018390 - DNA, 25 bp, Homo sapien
gagccacctgctggtagtgttgttc

SEQ ID NO: 1018391 - DNA, 25 bp, Homo sapien
cttaaaaatagggatgcctgcatcc

SEQ ID NO: 1018392 - DNA, 25 bp, Homo sapien
ctcgggatgaccagaggagcttaaa

SEQ ID NO: 1018393 - DNA, 25 bp, Homo sapien
tccagaggctctgacataattggtc

SEQ ID NO: 1018394 - DNA, 25 bp, Homo sapien
acagcttgacagcacctcgggatga

SEQ ID NO: 1018395 - DNA, 25 bp, Homo sapien
ggtcctccagtgctgaccgacttgg

SEQ ID NO: 1018396 - DNA, 25 bp, Homo sapien
ccagtgctgaccgacttgggctacg

SEQ ID NO: 1018397 - DNA, 25 bp, Homo sapien
cctccagtgctgaccgacttgggct

SEQ ID NO: 1018398 - DNA, 25 bp, Homo sapien
ctgaggtcctccagtgctgaccgac

SEQ ID NO: 1018399 - DNA, 25 bp, Homo sapien
ctggcttcactatggggcttcaaca

SEQ ID NO: 1018400 - DNA, 25 bp, Homo sapien
tgctgggtctgaatgaaggcagccc

SEQ ID NO: 1018401 - DNA, 25 bp, Homo sapien
cagctgctgggtctgaatgaaggca

SEQ ID NO: 1018402 - DNA, 25 bp, Homo sapien
gggtctgaatgaaggcagccctggc

SEQ ID NO: 1018403 - DNA, 25 bp, Homo sapien
cgctgcccttgacgggcccagttgg

SEQ ID NO: 1018404 - DNA, 25 bp, Homo sapien
gagttcagatgagccacattaattc

SEQ ID NO: 1018405 - DNA, 25 bp, Homo sapien
ccagacttaatcgttttcttcagca

SEQ ID NO: 1018406 - DNA, 25 bp, Homo sapien
ctctgtatggtactcatgggctcca

SEQ ID NO: 1018407 - DNA, 25 bp, Homo sapien
gtattatccagcgtgaacttgagag

SEQ ID NO: 1018408 - DNA, 25 bp, Homo sapien
gtaggtattatccagcgtgaacttg

SEQ ID NO: 1018409 - DNA, 25 bp, Homo sapien
atgtaggtattatccagcgtgaact

SEQ ID NO: 1018410 - DNA, 25 bp, Homo sapien
aggtattatccagcgtgaacttgag

SEQ ID NO: 1018411 - DNA, 25 bp, Homo sapien
cttgtagtcccgccacaggatgttc

SEQ ID NO: 1018412 - DNA, 25 bp, Homo sapien
gtagtcccgccacaggatgttctct

SEQ ID NO: 1018413 - DNA, 25 bp, Homo sapien
ttgtagtcccgccacaggatgttct

SEQ ID NO: 1018414 - DNA, 25 bp, Homo sapien
gtcccgccacaggatgttctcttac

SEQ ID NO: 1018415 - DNA, 25 bp, Homo sapien
agcccatcatccacgtagatcttgc

SEQ ID NO: 1018416 - DNA, 25 bp, Homo sapien
gaaaacatcatatcgacatcttgct

SEQ ID NO: 1018417 - DNA, 25 bp, Homo sapien
acatcatatcgacatcttgctcgcc

SEQ ID NO: 1018418 - DNA, 25 bp, Homo sapien
aattttgctggttatcttgctgttc

SEQ ID NO: 1018419 - DNA, 25 bp, Homo sapien
gaatgatgaaaacatcatatcgaca

SEQ ID NO: 1018420 - DNA, 25 bp, Homo sapien
ctgcaggaatctcatctcgacggct

SEQ ID NO: 1018421 - DNA, 25 bp, Homo sapien
ggaatctcatctcgacggcttgtgg

SEQ ID NO: 1018422 - DNA, 25 bp, Homo sapien
catctcgacggcttgtggtggatca

SEQ ID NO: 1018423 - DNA, 25 bp, Homo sapien
cttccctgcaggaatctcatctcga

SEQ ID NO: 1018424 - DNA, 25 bp, Homo sapien
tcatcatcctctgagcaaggcagac

SEQ ID NO: 1018425 - DNA, 25 bp, Homo sapien
aatcatcatcctctgagcaaggcag

SEQ ID NO: 1018426 - DNA, 25 bp, Homo sapien
ccaatcatcatcctctgagcaaggc

SEQ ID NO: 1018427 - DNA, 25 bp, Homo sapien
cttggttgcaccacccaatcatcat

SEQ ID NO: 1018428 - DNA, 25 bp, Homo sapien
tgagtggcaagatgacaggcttccc

SEQ ID NO: 1018429 - DNA, 25 bp, Homo sapien
gagtggcaagatgacaggcttccca

SEQ ID NO: 1018430 - DNA, 25 bp, Homo sapien
agtggcaagatgacaggcttcccag

SEQ ID NO: 1018431 - DNA, 25 bp, Homo sapien
ctgagtggcaagatgacaggcttcc

SEQ ID NO: 1018432 - DNA, 25 bp, Homo sapien
ttccaccagaactgcattggccaca

SEQ ID NO: 1018433 - DNA, 25 bp, Homo sapien
gcttcttgatcacatcctctagcat

SEQ ID NO: 1018434 - DNA, 25 bp, Homo sapien
gtggagcttcttgatcacatcctct

SEQ ID NO: 1018435 - DNA, 25 bp, Homo sapien
agcttccaccagaactgcattggcc

SEQ ID NO: 1018436 - DNA, 25 bp, Homo sapien
ctcaaataattgcaagtggtagatg

SEQ ID NO: 1018437 - DNA, 25 bp, Homo sapien
cctcaaataattgcaagtggtagat

SEQ ID NO: 1018438 - DNA, 25 bp, Homo sapien
tcaaataattgcaagtggtagatgg

SEQ ID NO: 1018439 - DNA, 25 bp, Homo sapien
tcctcaaataattgcaagtggtaga

SEQ ID NO: 1018440 - DNA, 25 bp, Homo sapien
gtatctggccacctggtgggcacac

SEQ ID NO: 1018441 - DNA, 25 bp, Homo sapien
tgggcagtatctggccacctggtgg

SEQ ID NO: 1018442 - DNA, 25 bp, Homo sapien
gggcacgtgggcagtatctggccac

SEQ ID NO: 1018443 - DNA, 25 bp, Homo sapien
gcagtatctggccacctggtgggca

SEQ ID NO: 1018444 - DNA, 25 bp, Homo sapien
gcctggggatgccatgtcacaacaa

SEQ ID NO: 1018445 - DNA, 25 bp, Homo sapien
cacagggaagataccacggtacagg

SEQ ID NO: 1018446 - DNA, 25 bp, Homo sapien
gagctgcctggggatgccatgtcac

SEQ ID NO: 1018447 - DNA, 25 bp, Homo sapien
ataccacggtacaggtgggcctggc

SEQ ID NO: 1018448 - DNA, 25 bp, Homo sapien
tgaagaagcctcaggccttaccaac

SEQ ID NO: 1018449 - DNA, 25 bp, Homo sapien
gaagaagcctcaggccttaccaaca

SEQ ID NO: 1018450 - DNA, 25 bp, Homo sapien
ccacatcctcagcctagggctcctg

SEQ ID NO: 1018451 - DNA, 25 bp, Homo sapien
tccacatcctcagcctagggctcct

SEQ ID NO: 1018452 - DNA, 25 bp, Homo sapien
cagaggcggctgcagtagtggggga

SEQ ID NO: 1018453 - DNA, 25 bp, Homo sapien
aggcggctgcagtagtgggggaaaa

SEQ ID NO: 1018454 - DNA, 25 bp, Homo sapien
ggaaggtggagggtgaagtgtttgc

SEQ ID NO: 1018455 - DNA, 25 bp, Homo sapien
cggctgcagtagtgggggaaaatgg

SEQ ID NO: 1018456 - DNA, 25 bp, Homo sapien
taatagtggtgcaaacggctttaca

SEQ ID NO: 1018457 - DNA, 25 bp, Homo sapien
ggttagcaaccagtactcaagaagg

SEQ ID NO: 1018458 - DNA, 25 bp, Homo sapien
tggaagacccttctaactctggaaa

SEQ ID NO: 1018459 - DNA, 25 bp, Homo sapien
tatactcaggctgaacacatggagc

SEQ ID NO: 1018460 - DNA, 25 bp, Homo sapien
gaattccagcaacacatgcgtccct

SEQ ID NO: 1018461 - DNA, 25 bp, Homo sapien
attccccccacggattgaattccag

SEQ ID NO: 1018462 - DNA, 25 bp, Homo sapien
tgagtcgcagcccaatctgcattcc

SEQ ID NO: 1018463 - DNA, 25 bp, Homo sapien
cgctggaagctgcacggattcttaa

SEQ ID NO: 1018464 - DNA, 25 bp, Homo sapien
cattccggagtaaatgggcagaggc

SEQ ID NO: 1018465 - DNA, 25 bp, Homo sapien
cccgcatggccttaaagagaagtaa

SEQ ID NO: 1018466 - DNA, 25 bp, Homo sapien
tctgggttcagagaaatcgaaatct

SEQ ID NO: 1018467 - DNA, 25 bp, Homo sapien
agaagtaaacattccggagtaaatg

SEQ ID NO: 1018468 - DNA, 25 bp, Homo sapien
cacaggatgccggtgataagctcac

SEQ ID NO: 1018469 - DNA, 25 bp, Homo sapien
taagctcacctcttcaggaagccgc

SEQ ID NO: 1018470 - DNA, 25 bp, Homo sapien
aggaagccgcttcaagcagacctgc

SEQ ID NO: 1018471 - DNA, 25 bp, Homo sapien
gatttagaggaactgggcttgctcg

SEQ ID NO: 1018472 - DNA, 25 bp, Homo sapien
taccaatcagtgagcaagcaagcac

SEQ ID NO: 1018473 - DNA, 25 bp, Homo sapien
catgaaaaatgatgggctcctccta

SEQ ID NO: 1018474 - DNA, 25 bp, Homo sapien
tgtccacggacgaaacatacggtga

SEQ ID NO: 1018475 - DNA, 25 bp, Homo sapien
gctgttgttgatgcatccgtccaag

SEQ ID NO: 1018476 - DNA, 25 bp, Homo sapien
tatcctagctgcagcgtttgcacgg

SEQ ID NO: 1018477 - DNA, 25 bp, Homo sapien
tgcggccggacattttctggacacg

SEQ ID NO: 1018478 - DNA, 25 bp, Homo sapien
tagcgcgtcccagatcggtttttcc

SEQ ID NO: 1018479 - DNA, 25 bp, Homo sapien
tggcccctgcgatactgcaagatat

SEQ ID NO: 1018480 - DNA, 25 bp, Homo sapien
ggttgctccgatttgctcgtctgcg

SEQ ID NO: 1018481 - DNA, 25 bp, Homo sapien
ggaacagcaagcaatcaccgaggcc

SEQ ID NO: 1018482 - DNA, 25 bp, Homo sapien
tcgtctgcgggcgtacttgaacatg

SEQ ID NO: 1018483 - DNA, 25 bp, Homo sapien
cgtacttgaacatgaaggattggga

SEQ ID NO: 1018484 - DNA, 25 bp, Homo sapien
cactaacctatgagggtgagctggt

SEQ ID NO: 1018485 - DNA, 25 bp, Homo sapien
taagcctttgagactgttcctgagc

SEQ ID NO: 1018486 - DNA, 25 bp, Homo sapien
aaggctgcctgctatgtatttgcaa

SEQ ID NO: 1018487 - DNA, 25 bp, Homo sapien
tgttccaaggctactacagagaagg

SEQ ID NO: 1018488 - DNA, 25 bp, Homo sapien
ggtcaggttctaccctccatgtgag

SEQ ID NO: 1018489 - DNA, 25 bp, Homo sapien
ggagatttgctcaatacctggcctc

SEQ ID NO: 1018490 - DNA, 25 bp, Homo sapien
gaggtggccccatattaacaaattg

SEQ ID NO: 1018491 - DNA, 25 bp, Homo sapien
caggtgcaacactcaagtctattga

SEQ ID NO: 1018492 - DNA, 25 bp, Homo sapien
gcaattatcctacctcagtctccca

SEQ ID NO: 1018493 - DNA, 25 bp, Homo sapien
cccaccaccacgcccagataatttt

SEQ ID NO: 1018494 - DNA, 25 bp, Homo sapien
gcccaccaccacgcccagataattt

SEQ ID NO: 1018495 - DNA, 25 bp, Homo sapien
agcaattatcctacctcagtctccc

SEQ ID NO: 1018496 - DNA, 25 bp, Homo sapien
ggagccagagaccattatcttagca

SEQ ID NO: 1018497 - DNA, 25 bp, Homo sapien
caatggtagactggacacaatgcag

SEQ ID NO: 1018498 - DNA, 25 bp, Homo sapien
cacacagggtcctattggagggtgc

SEQ ID NO: 1018499 - DNA, 25 bp, Homo sapien
ttcgcaggaacacgaatggagccag

SEQ ID NO: 1018500 - DNA, 25 bp, Homo sapien
tgtagcacctagatgttgaagcgaa

SEQ ID NO: 1018501 - DNA, 25 bp, Homo sapien
gaaagagagtttgcagtccagagag

SEQ ID NO: 1018502 - DNA, 25 bp, Homo sapien
tgcacgttgcaatcatctgggaagc

SEQ ID NO: 1018503 - DNA, 25 bp, Homo sapien
tcagtggagcgcaaggagatcaaaa

SEQ ID NO: 1018504 - DNA, 25 bp, Homo sapien
gctgcatttggagtttggacaccac

SEQ ID NO: 1018505 - DNA, 25 bp, Homo sapien
gacggcattcttggtagtccaggag

SEQ ID NO: 1018506 - DNA, 25 bp, Homo sapien
tgtaagaagcttgcagcggcaggaa

SEQ ID NO: 1018507 - DNA, 25 bp, Homo sapien
caccactcagtttcaaggctctgga

SEQ ID NO: 1018508 - DNA, 25 bp, Homo sapien
ttgtgtctgttcatgagcatttctt

SEQ ID NO: 1018509 - DNA, 25 bp, Homo sapien
ggggctggatgtgctaaatgtgctg

SEQ ID NO: 1018510 - DNA, 25 bp, Homo sapien
tttgtgtctgttcatgagcatttct

SEQ ID NO: 1018511 - DNA, 25 bp, Homo sapien
tggatgtgctaaatgtgctgcccat

SEQ ID NO: 1018512 - DNA, 25 bp, Homo sapien
ctggccacggcttgatgagctgtgc

SEQ ID NO: 1018513 - DNA, 25 bp, Homo sapien
ataactgcgttcatgagttgctggc

SEQ ID NO: 1018514 - DNA, 25 bp, Homo sapien
tggccacggcttgatgagctgtgct

SEQ ID NO: 1018515 - DNA, 25 bp, Homo sapien
ggttctttgtgctttgataactgcg

SEQ ID NO: 1018516 - DNA, 25 bp, Homo sapien
gaagccattcgactatggcaggaga

SEQ ID NO: 1018517 - DNA, 25 bp, Homo sapien
tttatgtgtggaggtaaaggaagcc

SEQ ID NO: 1018518 - DNA, 25 bp, Homo sapien
gatgccccggcatgggtacaagctc

SEQ ID NO: 1018519 - DNA, 25 bp, Homo sapien
gagatgccccggcatgggtacaagc

SEQ ID NO: 1018520 - DNA, 25 bp, Homo sapien
gactttaggaccgaagaggatctta

SEQ ID NO: 1018521 - DNA, 25 bp, Homo sapien
ttgactatggaacacaatggggtcc

SEQ ID NO: 1018522 - DNA, 25 bp, Homo sapien
tatggaacacaatggggtccaaagg

SEQ ID NO: 1018523 - DNA, 25 bp, Homo sapien
tcctggactttaggaccgaagagga

SEQ ID NO: 1018524 - DNA, 25 bp, Homo sapien
agatgaagtaaatagaaaatcctct

SEQ ID NO: 1018525 - DNA, 25 bp, Homo sapien
gccgggataacaggccagatgaagt

SEQ ID NO: 1018526 - DNA, 25 bp, Homo sapien
gatgaagtaaatagaaaatcctctg

SEQ ID NO: 1018527 - DNA, 25 bp, Homo sapien
ggataacaggccagatgaagtaaat

SEQ ID NO: 1018528 - DNA, 25 bp, Homo sapien
ccagaatatgatcgttaaggattgg

SEQ ID NO: 1018529 - DNA, 25 bp, Homo sapien
tccaaccccacatggatgagggtat

SEQ ID NO: 1018530 - DNA, 25 bp, Homo sapien
ggcatctgcgtaacctcatctgaag

SEQ ID NO: 1018531 - DNA, 25 bp, Homo sapien
tgtttgccaggagaactaccagaat

SEQ ID NO: 1018532 - DNA, 25 bp, Homo sapien
acatctataaccaacaaaatccagg

SEQ ID NO: 1018533 - DNA, 25 bp, Homo sapien
catctataaccaacaaaatccaggt

SEQ ID NO: 1018534 - DNA, 25 bp, Homo sapien
ttacatctataaccaacaaaatcca

SEQ ID NO: 1018535 - DNA, 25 bp, Homo sapien
aattacatctataaccaacaaaatc

SEQ ID NO: 1018536 - DNA, 25 bp, Homo sapien
ctgtccctggcatgggttttcatct

SEQ ID NO: 1018537 - DNA, 25 bp, Homo sapien
tccctggcatgggttttcatctttc

SEQ ID NO: 1018538 - DNA, 25 bp, Homo sapien
gtccctggcatgggttttcatcttt

SEQ ID NO: 1018539 - DNA, 25 bp, Homo sapien
tgtccctggcatgggttttcatctt

SEQ ID NO: 1018540 - DNA, 25 bp, Homo sapien
gcttcactcaggagcaactgaacca

SEQ ID NO: 1018541 - DNA, 25 bp, Homo sapien
cctgtgaatagcgatggaacctgag

SEQ ID NO: 1018542 - DNA, 25 bp, Homo sapien
gaacctgaggattgggcttcactca

SEQ ID NO: 1018543 - DNA, 25 bp, Homo sapien
gaatagcgatggaacctgaggattg

SEQ ID NO: 1018544 - DNA, 25 bp, Homo sapien
tgcagagagcactcaattgtccttc

SEQ ID NO: 1018545 - DNA, 25 bp, Homo sapien
agctttggtatctccatacaagcga

SEQ ID NO: 1018546 - DNA, 25 bp, Homo sapien
catatgaggtcaaggagagaactgt

SEQ ID NO: 1018547 - DNA, 25 bp, Homo sapien
tatctccatacaagcgatagctgtc

SEQ ID NO: 1018548 - DNA, 25 bp, Homo sapien
tttcgagacactcgcagagggccca

SEQ ID NO: 1018549 - DNA, 25 bp, Homo sapien
gaggtgaccccgctcagctgtttgg

SEQ ID NO: 1018550 - DNA, 25 bp, Homo sapien
taggatgttagctttggcagcaaag

SEQ ID NO: 1018551 - DNA, 25 bp, Homo sapien
gggagcactgatatggagccttttt

SEQ ID NO: 1018552 - DNA, 25 bp, Homo sapien
tcaaggttgaagcattggccctcca

SEQ ID NO: 1018553 - DNA, 25 bp, Homo sapien
aaacatgccgagctgggtcaggaac

SEQ ID NO: 1018554 - DNA, 25 bp, Homo sapien
gaacagtcacacgtcatgtcagtgc

SEQ ID NO: 1018555 - DNA, 25 bp, Homo sapien
tacgctggagtggagcatagagtcc

SEQ ID NO: 1018556 - DNA, 25 bp, Homo sapien
cagtaactcttgtaattaaaatggg

SEQ ID NO: 1018557 - DNA, 25 bp, Homo sapien
tgaaagaactcatattaatccagct

SEQ ID NO: 1018558 - DNA, 25 bp, Homo sapien
gctcctgactcctaaaaaaacagta

SEQ ID NO: 1018559 - DNA, 25 bp, Homo sapien
aagaactcatattaatccagctcct

SEQ ID NO: 1018560 - DNA, 25 bp, Homo sapien
gggacttgatcaggccaaaaataca

SEQ ID NO: 1018561 - DNA, 25 bp, Homo sapien
tccccttttttcacagtggacagct

SEQ ID NO: 1018562 - DNA, 25 bp, Homo sapien
agctcctgccccaattttataacgg

SEQ ID NO: 1018563 - DNA, 25 bp, Homo sapien
taacgggactgtgcacccatttctc

SEQ ID NO: 1018564 - DNA, 25 bp, Homo sapien
gcaccttcaaggaagtccttctcag

SEQ ID NO: 1018565 - DNA, 25 bp, Homo sapien
tgagcaccttcaaggaagtccttct

SEQ ID NO: 1018566 - DNA, 25 bp, Homo sapien
ccttcaaggaagtccttctcagcac

SEQ ID NO: 1018567 - DNA, 25 bp, Homo sapien
tcaatgagcaccttcaaggaagtcc

SEQ ID NO: 1018568 - DNA, 25 bp, Homo sapien
catctttctgggagatcatgggcat

SEQ ID NO: 1018569 - DNA, 25 bp, Homo sapien
acatctttctgggagatcatgggca

SEQ ID NO: 1018570 - DNA, 25 bp, Homo sapien
tacatctttctgggagatcatgggc

SEQ ID NO: 1018571 - DNA, 25 bp, Homo sapien
gctgttcaaagcactccttgggtcc

SEQ ID NO: 1018572 - DNA, 25 bp, Homo sapien
tgtgagcaaaggtgaccaaaaagac

SEQ ID NO: 1018573 - DNA, 25 bp, Homo sapien
cttgggtccagccagattgccatac

SEQ ID NO: 1018574 - DNA, 25 bp, Homo sapien
cagactgggctaagttctgctgcta

SEQ ID NO: 1018575 - DNA, 25 bp, Homo sapien
cactatctttcttaaaacgatgtga

SEQ ID NO: 1018576 - DNA, 25 bp, Homo sapien
tagtagttgactcatgctgcaggaa

SEQ ID NO: 1018577 - DNA, 25 bp, Homo sapien
gctgctgccatcctaggttttgctg

SEQ ID NO: 1018578 - DNA, 25 bp, Homo sapien
gcagtagaaataagattgccccact

SEQ ID NO: 1018579 - DNA, 25 bp, Homo sapien
cagacttagcggatcaatggacaca

SEQ ID NO: 1018580 - DNA, 25 bp, Homo sapien
cagcagtgggtagatcttgagatta

SEQ ID NO: 1018581 - DNA, 25 bp, Homo sapien
tgagattaaatgtcacctccatgct

SEQ ID NO: 1018582 - DNA, 25 bp, Homo sapien
gaggactaattgctgtgctaacaag

SEQ ID NO: 1018583 - DNA, 25 bp, Homo sapien
tcagtgactgtgtgtcctagaaata

SEQ ID NO: 1018584 - DNA, 25 bp, Homo sapien
gactgtgtgtcctagaaatagcaca

SEQ ID NO: 1018585 - DNA, 25 bp, Homo sapien
aatcttgcaacatactcagtgactg

SEQ ID NO: 1018586 - DNA, 25 bp, Homo sapien
tagaggatttgaagatgttcaatct

SEQ ID NO: 1018587 - DNA, 25 bp, Homo sapien
ttggcttgtgtaagggtgtggagct

SEQ ID NO: 1018588 - DNA, 25 bp, Homo sapien
tggcttgtgtaagggtgtggagctc

SEQ ID NO: 1018589 - DNA, 25 bp, Homo sapien
tgttggcttgtgtaagggtgtggag

SEQ ID NO: 1018590 - DNA, 25 bp, Homo sapien
atgtgttggcttgtgtaagggtgtg

SEQ ID NO: 1018591 - DNA, 25 bp, Homo sapien
tttggtacatggaaggggatgggtg

SEQ ID NO: 1018592 - DNA, 25 bp, Homo sapien
gttgaaggtgagtgagaatttggta

SEQ ID NO: 1018593 - DNA, 25 bp, Homo sapien
tgaaggtgagtgagaatttggtaca

SEQ ID NO: 1018594 - DNA, 25 bp, Homo sapien
tttttggttgaaggtgagtgagaat

SEQ ID NO: 1018595 - DNA, 25 bp, Homo sapien
aattcagatttggagggcatggatc

SEQ ID NO: 1018596 - DNA, 25 bp, Homo sapien
ggatcttctgacagtaggggccatt

SEQ ID NO: 1018597 - DNA, 25 bp, Homo sapien
tcaattcagatttggagggcatgga

SEQ ID NO: 1018598 - DNA, 25 bp, Homo sapien
atttggagggcatggatcttctgac

SEQ ID NO: 1018599 - DNA, 25 bp, Homo sapien
cttggaccacttcttccacacaaac

SEQ ID NO: 1018600 - DNA, 25 bp, Homo sapien
tggaccacttcttccacacaaacat

SEQ ID NO: 1018601 - DNA, 25 bp, Homo sapien
ttggaccacttcttccacacaaaca

SEQ ID NO: 1018602 - DNA, 25 bp, Homo sapien
ggggatcggtatgcatgtttttcat

SEQ ID NO: 1018603 - DNA, 25 bp, Homo sapien
ctttggggatcggtatgcatgtttt

SEQ ID NO: 1018604 - DNA, 25 bp, Homo sapien
ttggggatcggtatgcatgtttttc

SEQ ID NO: 1018605 - DNA, 25 bp, Homo sapien
tggggatcggtatgcatgtttttca

SEQ ID NO: 1018606 - DNA, 25 bp, Homo sapien
ctagtttcttctcgctgagctgttt

SEQ ID NO: 1018607 - DNA, 25 bp, Homo sapien
cactaggtgagctgttgaagtcaga

SEQ ID NO: 1018608 - DNA, 25 bp, Homo sapien
ctgccctggtggcatagaacactag

SEQ ID NO: 1018609 - DNA, 25 bp, Homo sapien
cagagcagagtggactctagtttct

SEQ ID NO: 1018610 - DNA, 25 bp, Homo sapien
aggtcttgggccacatctactgtac

SEQ ID NO: 1018611 - DNA, 25 bp, Homo sapien
gaagcagttaagtattcttgttata

SEQ ID NO: 1018612 - DNA, 25 bp, Homo sapien
ttagaaggacgagagctcagttcca

SEQ ID NO: 1018613 - DNA, 25 bp, Homo sapien
tatctcctgttgtctgcagcaggct

SEQ ID NO: 1018614 - DNA, 25 bp, Homo sapien
gaagcatcatatgctgtttggcatc

SEQ ID NO: 1018615 - DNA, 25 bp, Homo sapien
gaacgtgaatcagcaatgttgtgca

SEQ ID NO: 1018616 - DNA, 25 bp, Homo sapien
tgtttggcatctgcacactgaccgg

SEQ ID NO: 1018617 - DNA, 25 bp, Homo sapien
cttatgtggagccaatcgaagcatc

SEQ ID NO: 1018618 - DNA, 25 bp, Homo sapien
tctgtgggagaactcagacacatca

SEQ ID NO: 1018619 - DNA, 25 bp, Homo sapien
atcattccccctccggctgttgagg

SEQ ID NO: 1018620 - DNA, 25 bp, Homo sapien
ctgctccagagtgtctgtgggagaa

SEQ ID NO: 1018621 - DNA, 25 bp, Homo sapien
ggagaactcagacacatcattcccc

SEQ ID NO: 1018622 - DNA, 25 bp, Homo sapien
aagaaccgtctcaggtttagcacca

SEQ ID NO: 1018623 - DNA, 25 bp, Homo sapien
cttgaaaaaccactgcgtcaccaaa

SEQ ID NO: 1018624 - DNA, 25 bp, Homo sapien
tgcgtcaccaaagaaccgtctcagg

SEQ ID NO: 1018625 - DNA, 25 bp, Homo sapien
actgcgtcaccaaagaaccgtctca

SEQ ID NO: 1018626 - DNA, 25 bp, Homo sapien
ccacgccatcgttcaaatcaatgct

SEQ ID NO: 1018627 - DNA, 25 bp, Homo sapien
caatgattgcaattagttggcacaa

SEQ ID NO: 1018628 - DNA, 25 bp, Homo sapien
caaaaacctcaggatgagatggcag

SEQ ID NO: 1018629 - DNA, 25 bp, Homo sapien
gtactaccacgccatcgttcaaatc

SEQ ID NO: 1018630 - DNA, 25 bp, Homo sapien
caaatttggatgtgttgtctaccag

SEQ ID NO: 1018631 - DNA, 25 bp, Homo sapien
tgtgttgtctaccaggtcagcaggc

SEQ ID NO: 1018632 - DNA, 25 bp, Homo sapien
tcttgcctgctgagtacttctcaaa

SEQ ID NO: 1018633 - DNA, 25 bp, Homo sapien
tcttcttgcctgctgagtacttctc

SEQ ID NO: 1018634 - DNA, 25 bp, Homo sapien
gatgcctgtagtcccgtaagctgac

SEQ ID NO: 1018635 - DNA, 25 bp, Homo sapien
ttgatcctgacttcggccaagagcc

SEQ ID NO: 1018636 - DNA, 25 bp, Homo sapien
gaagggccctagttgaagtcagcca

SEQ ID NO: 1018637 - DNA, 25 bp, Homo sapien
gtatatttaaccctgatgtccgtgg

SEQ ID NO: 1018638 - DNA, 25 bp, Homo sapien
caagcccgtgcacacccattctttt

SEQ ID NO: 1018639 - DNA, 25 bp, Homo sapien
gaaattgtcaagtggtctactggct

SEQ ID NO: 1018640 - DNA, 25 bp, Homo sapien
ggctgtctgctttgttagtgaccat

SEQ ID NO: 1018641 - DNA, 25 bp, Homo sapien
tagtgaccatctgcagacaaactgt

SEQ ID NO: 1018642 - DNA, 25 bp, Homo sapien
tgtcagagcagcacagtatttgcga

SEQ ID NO: 1018643 - DNA, 25 bp, Homo sapien
gcagcacagtatttgcgaccatata

SEQ ID NO: 1018644 - DNA, 25 bp, Homo sapien
cactgattttcaaaccatttgtttc

SEQ ID NO: 1018645 - DNA, 25 bp, Homo sapien
aatgatagtttctgtcagagcagca

SEQ ID NO: 1018646 - DNA, 25 bp, Homo sapien
tctgggtattctgtgtgataatcac

SEQ ID NO: 1018647 - DNA, 25 bp, Homo sapien
cgccatgttagtcatctgggtattc

SEQ ID NO: 1018648 - DNA, 25 bp, Homo sapien
catattggtaatctctagggcagtc

SEQ ID NO: 1018649 - DNA, 25 bp, Homo sapien
gcagtcaccttggtactcgccatgt

SEQ ID NO: 1018650 - DNA, 25 bp, Homo sapien
tctggccaccgccaaagccctaggg

SEQ ID NO: 1018651 - DNA, 25 bp, Homo sapien
ccgccaaagccctagggacggtgca

SEQ ID NO: 1018652 - DNA, 25 bp, Homo sapien
ccgccgcacttgctggctctggcca

SEQ ID NO: 1018653 - DNA, 25 bp, Homo sapien
ccctagggacggtgcactctggctg

SEQ ID NO: 1018654 - DNA, 25 bp, Homo sapien
attagtgggttgtaactaaatgtct

SEQ ID NO: 1018655 - DNA, 25 bp, Homo sapien
tgcattactccatctgccacggctt

SEQ ID NO: 1018656 - DNA, 25 bp, Homo sapien
agtgggttgtaactaaatgtctttg

SEQ ID NO: 1018657 - DNA, 25 bp, Homo sapien
tcttctgaagaggtctgatgaggtc

SEQ ID NO: 1018658 - DNA, 25 bp, Homo sapien
gaggtcttgttcagaattcttctga

SEQ ID NO: 1018659 - DNA, 25 bp, Homo sapien
tagggatgttgttgagttccctctc

SEQ ID NO: 1018660 - DNA, 25 bp, Homo sapien
tattctctggatcagactcttaggg

SEQ ID NO: 1018661 - DNA, 25 bp, Homo sapien
ggctttggccctattgtcactttcc

SEQ ID NO: 1018662 - DNA, 25 bp, Homo sapien
cagcagttgatagcacgagggctac

SEQ ID NO: 1018663 - DNA, 25 bp, Homo sapien
aatctggaatgaggctttggcccta

SEQ ID NO: 1018664 - DNA, 25 bp, Homo sapien
tttggctctgctcttaggtttggga

SEQ ID NO: 1018665 - DNA, 25 bp, Homo sapien
caggctgtgtatggacccagggacc

SEQ ID NO: 1018666 - DNA, 25 bp, Homo sapien
gctcttgatgcaggctgtgtatgga

SEQ ID NO: 1018667 - DNA, 25 bp, Homo sapien
ccaggtgaggctgtaaacttgggaa

SEQ ID NO: 1018668 - DNA, 25 bp, Homo sapien
aagacaaagcgcaggccaccatctg

SEQ ID NO: 1018669 - DNA, 25 bp, Homo sapien
ctctcccctcaccaaggcagttgga

SEQ ID NO: 1018670 - DNA, 25 bp, Homo sapien
tctcccctcaccaaggcagttggat

SEQ ID NO: 1018671 - DNA, 25 bp, Homo sapien
tcgctacagaccacgtgtgtgggcc

SEQ ID NO: 1018672 - DNA, 25 bp, Homo sapien
gtagagcacttccaagccgctgtcg

SEQ ID NO: 1018673 - DNA, 25 bp, Homo sapien
aagccgctgtcgctacagaccacgt

SEQ ID NO: 1018674 - DNA, 25 bp, Homo sapien
acttccaagccgctgtcgctacaga

SEQ ID NO: 1018675 - DNA, 25 bp, Homo sapien
ccccttccaatcataagtatttctg

SEQ ID NO: 1018676 - DNA, 25 bp, Homo sapien
atctcctcacatcttcgtgtatatg

SEQ ID NO: 1018677 - DNA, 25 bp, Homo sapien
cttccaatcataagtatttctgtca

SEQ ID NO: 1018678 - DNA, 25 bp, Homo sapien
ttccccttccaatcataagtatttc

SEQ ID NO: 1018679 - DNA, 25 bp, Homo sapien
cctgttggttctgctacatggcgag

SEQ ID NO: 1018680 - DNA, 25 bp, Homo sapien
ttaggcagaggtggacttaaaggcc

SEQ ID NO: 1018681 - DNA, 25 bp, Homo sapien
cccgtttggccactttgatggatga

SEQ ID NO: 1018682 - DNA, 25 bp, Homo sapien
caggcacatgtgacttgatgcaggc

SEQ ID NO: 1018683 - DNA, 25 bp, Homo sapien
tggtttcccgatagatcccaccacg

SEQ ID NO: 1018684 - DNA, 25 bp, Homo sapien
acgaatcccacagacggaggtgcaa

SEQ ID NO: 1018685 - DNA, 25 bp, Homo sapien
ctagaaccccagtcaaagctaatgg

SEQ ID NO: 1018686 - DNA, 25 bp, Homo sapien
tcagatattgccttacatggcatcc

SEQ ID NO: 1018687 - DNA, 25 bp, Homo sapien
acactgcagggtgctttggtatgaa

SEQ ID NO: 1018688 - DNA, 25 bp, Homo sapien
tttatgtagacaagaagactgccca

SEQ ID NO: 1018689 - DNA, 25 bp, Homo sapien
tagagatgcgagtgcacaaggacac

SEQ ID NO: 1018690 - DNA, 25 bp, Homo sapien
taaggacagagtcgggaggaccatc

SEQ ID NO: 1018691 - DNA, 25 bp, Homo sapien
ccaaagccaattcgccatttctttc

SEQ ID NO: 1018692 - DNA, 25 bp, Homo sapien
ccagggaagtcaaattcttcattcc

SEQ ID NO: 1018693 - DNA, 25 bp, Homo sapien
tatgtcaatgagatgaagccagggt

SEQ ID NO: 1018694 - DNA, 25 bp, Homo sapien
tgggtctgctggatgctccaactct

SEQ ID NO: 1018695 - DNA, 25 bp, Homo sapien
aaagcagagtggatacccagtggga

SEQ ID NO: 1018696 - DNA, 25 bp, Homo sapien
ttagcatgttgctgagaggccagcg

SEQ ID NO: 1018697 - DNA, 25 bp, Homo sapien
tgctaatgaattgtccgtggctgcc

SEQ ID NO: 1018698 - DNA, 25 bp, Homo sapien
gtatctccagggtgtggaatcccag

SEQ ID NO: 1018699 - DNA, 25 bp, Homo sapien
agtccagcttgtttctttgaaaggc

SEQ ID NO: 1018700 - DNA, 25 bp, Homo sapien
ttctgggaacttcacgtttgtcaac

SEQ ID NO: 1018701 - DNA, 25 bp, Homo sapien
tcagacacggccagatcttaacggt

SEQ ID NO: 1018702 - DNA, 25 bp, Homo sapien
caaaagctcttcataaaatcaagtc

SEQ ID NO: 1018703 - DNA, 25 bp, Homo sapien
tgtttgtaaggcagtcaaggttcac

SEQ ID NO: 1018704 - DNA, 25 bp, Homo sapien
tgaacttggacggattgtgttgcgt

SEQ ID NO: 1018705 - DNA, 25 bp, Homo sapien
gttcttctgcggctgtgaacttgga

SEQ ID NO: 1018706 - DNA, 25 bp, Homo sapien
tcaaggttcacactctcagcaattt

SEQ ID NO: 1018707 - DNA, 25 bp, Homo sapien
ccaagcacgatcttaggcatgaaaa

SEQ ID NO: 1018708 - DNA, 25 bp, Homo sapien
tgagcatcgactctctgccaagcac

SEQ ID NO: 1018709 - DNA, 25 bp, Homo sapien
catttggcgtcaatgaaggaactac

SEQ ID NO: 1018710 - DNA, 25 bp, Homo sapien
gaagaacgtggaagaacagcagagc

SEQ ID NO: 1018711 - DNA, 25 bp, Homo sapien
catgcttctccgctgccaatgtgga

SEQ ID NO: 1018712 - DNA, 25 bp, Homo sapien
ctggcttagggacagcgggaaccat

SEQ ID NO: 1018713 - DNA, 25 bp, Homo sapien
tggaagattggacgttagcacatgc

SEQ ID NO: 1018714 - DNA, 25 bp, Homo sapien
tccttctaagggagagcctggctta

SEQ ID NO: 1018715 - DNA, 25 bp, Homo sapien
caagcatgcttccaatagaggcacg

SEQ ID NO: 1018716 - DNA, 25 bp, Homo sapien
tacaagcatgcttccaatagaggca

SEQ ID NO: 1018717 - DNA, 25 bp, Homo sapien
gtattacaagcatgcttccaataga

SEQ ID NO: 1018718 - DNA, 25 bp, Homo sapien
agcatgcttccaatagaggcacgac

SEQ ID NO: 1018719 - DNA, 25 bp, Homo sapien
agaaaagccaaaatcttgtaatgga

SEQ ID NO: 1018720 - DNA, 25 bp, Homo sapien
gaaaagccaaaatcttgtaatggat

SEQ ID NO: 1018721 - DNA, 25 bp, Homo sapien
tggtggcttccaattctctcttttt

SEQ ID NO: 1018722 - DNA, 25 bp, Homo sapien
gtggcttccaattctctctttttct

SEQ ID NO: 1018723 - DNA, 25 bp, Homo sapien
cttccaattctctctttttctccat

SEQ ID NO: 1018724 - DNA, 25 bp, Homo sapien
ggtggtggcttccaattctctcttt

SEQ ID NO: 1018725 - DNA, 25 bp, Homo sapien
cagggaggtattgcagcacaggtgc

SEQ ID NO: 1018726 - DNA, 25 bp, Homo sapien
gtattgcagcacaggtgcacaggaa

SEQ ID NO: 1018727 - DNA, 25 bp, Homo sapien
ggaggtattgcagcacaggtgcaca

SEQ ID NO: 1018728 - DNA, 25 bp, Homo sapien
tgccagggaggtattgcagcacagg

SEQ ID NO: 1018729 - DNA, 25 bp, Homo sapien
agagctaggtcaagaaaaagctctt

SEQ ID NO: 1018730 - DNA, 25 bp, Homo sapien
gagagctaggtcaagaaaaagctct

SEQ ID NO: 1018731 - DNA, 25 bp, Homo sapien
cagatgggataggagaaattcaaaa

SEQ ID NO: 1018732 - DNA, 25 bp, Homo sapien
aacttgggcagagccgcctcacaga

SEQ ID NO: 1018733 - DNA, 25 bp, Homo sapien
aaagaaaacttgggcagagccgcct

SEQ ID NO: 1018734 - DNA, 25 bp, Homo sapien
tcaaaacagatgagccttgagacat

SEQ ID NO: 1018735 - DNA, 25 bp, Homo sapien
tgaatccaatgtgatgcttgcctta

SEQ ID NO: 1018736 - DNA, 25 bp, Homo sapien
ccaatgtgatgcttgccttaaagct

SEQ ID NO: 1018737 - DNA, 25 bp, Homo sapien
atccaatgtgatgcttgccttaaag

SEQ ID NO: 1018738 - DNA, 25 bp, Homo sapien
aatgtgatgcttgccttaaagctag

SEQ ID NO: 1018739 - DNA, 25 bp, Homo sapien
ggagttcggctaatgcaataagtaa

SEQ ID NO: 1018740 - DNA, 25 bp, Homo sapien
ggaaacttcgccttgttcaaccatc

SEQ ID NO: 1018741 - DNA, 25 bp, Homo sapien
cctgctacctgtaaggaaaaggtct

SEQ ID NO: 1018742 - DNA, 25 bp, Homo sapien
aaatatgcaggcttagaccaaaggc

SEQ ID NO: 1018743 - DNA, 25 bp, Homo sapien
atggggaaggcccaggcactgcttc

SEQ ID NO: 1018744 - DNA, 25 bp, Homo sapien
tggaagatggggaaggcccaggcac

SEQ ID NO: 1018745 - DNA, 25 bp, Homo sapien
ctggaagatggggaaggcccaggca

SEQ ID NO: 1018746 - DNA, 25 bp, Homo sapien
aagatggggaaggcccaggcactgc

SEQ ID NO: 1018747 - DNA, 25 bp, Homo sapien
tgggtatttcccgagagaaccagat

SEQ ID NO: 1018748 - DNA, 25 bp, Homo sapien
tctgggtatttcccgagagaaccag

SEQ ID NO: 1018749 - DNA, 25 bp, Homo sapien
ctctgggtatttcccgagagaacca

SEQ ID NO: 1018750 - DNA, 25 bp, Homo sapien
ctgggtatttcccgagagaaccaga

SEQ ID NO: 1018751 - DNA, 25 bp, Homo sapien
cacatgatttgtggttacacagatg

SEQ ID NO: 1018752 - DNA, 25 bp, Homo sapien
gcagctattgctagaaatgttttca

SEQ ID NO: 1018753 - DNA, 25 bp, Homo sapien
aagcatagatgatgttattcaatca

SEQ ID NO: 1018754 - DNA, 25 bp, Homo sapien
cacagatgtgtgacaattattggca

SEQ ID NO: 1018755 - DNA, 25 bp, Homo sapien
ctgaggaatagtaaattcaggatta

SEQ ID NO: 1018756 - DNA, 25 bp, Homo sapien
taaattcaggattattgacaggccc

SEQ ID NO: 1018757 - DNA, 25 bp, Homo sapien
gacaggcccagcatagtaaatctgc

SEQ ID NO: 1018758 - DNA, 25 bp, Homo sapien
caggattattgacaggcccagcata

SEQ ID NO: 1018759 - DNA, 25 bp, Homo sapien
tggcctatggataagttttaaactg

SEQ ID NO: 1018760 - DNA, 25 bp, Homo sapien
gtttttgcagggatggcctatggat

SEQ ID NO: 1018761 - DNA, 25 bp, Homo sapien
ttaatacaagaagtaagtaatatct

SEQ ID NO: 1018762 - DNA, 25 bp, Homo sapien
cagggatggcctatggataagtttt

SEQ ID NO: 1018763 - DNA, 25 bp, Homo sapien
cacactgggcaatatttgcttgagt

SEQ ID NO: 1018764 - DNA, 25 bp, Homo sapien
tgcttgagtaccatcagcggttgaa

SEQ ID NO: 1018765 - DNA, 25 bp, Homo sapien
gcagccggtgtagggagcccatttt

SEQ ID NO: 1018766 - DNA, 25 bp, Homo sapien
gctctctctgctgtacatgcgatgc

SEQ ID NO: 1018767 - DNA, 25 bp, Homo sapien
caggtcctatgaggactgtagaaga

SEQ ID NO: 1018768 - DNA, 25 bp, Homo sapien
ctatgaggactgtagaagagccatt

SEQ ID NO: 1018769 - DNA, 25 bp, Homo sapien
cagcagccacggagcggtgatgtgt

SEQ ID NO: 1018770 - DNA, 25 bp, Homo sapien
ctggcagccaggtcctatgaggact

SEQ ID NO: 1018771 - DNA, 25 bp, Homo sapien
agttccagcaaaacctggtattctc

SEQ ID NO: 1018772 - DNA, 25 bp, Homo sapien
cggtggaccgtttttcagtgtacag

SEQ ID NO: 1018773 - DNA, 25 bp, Homo sapien
gttccagcaaaacctggtattctcc

SEQ ID NO: 1018774 - DNA, 25 bp, Homo sapien
cttggaggtcccacgagatgcagct

SEQ ID NO: 1018775 - DNA, 25 bp, Homo sapien
cacagtaggttcagtcagaggagct

SEQ ID NO: 1018776 - DNA, 25 bp, Homo sapien
taaaattagcagctgcactctttgg

SEQ ID NO: 1018777 - DNA, 25 bp, Homo sapien
gccaagaggctccttagaaacagat

SEQ ID NO: 1018778 - DNA, 25 bp, Homo sapien
tctttattcttggtaactgtgagga

SEQ ID NO: 1018779 - DNA, 25 bp, Homo sapien
tcttggtaactgtgaggaagcactc

SEQ ID NO: 1018780 - DNA, 25 bp, Homo sapien
cttggtaactgtgaggaagcactcc

SEQ ID NO: 1018781 - DNA, 25 bp, Homo sapien
ttattcttggtaactgtgaggaagc

SEQ ID NO: 1018782 - DNA, 25 bp, Homo sapien
tatgcagcccaccatgcgatcagtg

SEQ ID NO: 1018783 - DNA, 25 bp, Homo sapien
tacggagagcatcgtagaagacaac

SEQ ID NO: 1018784 - DNA, 25 bp, Homo sapien
gctctggaagtagcatgggcaacat

SEQ ID NO: 1018785 - DNA, 25 bp, Homo sapien
taatgaatgcagtaatgaacgccag

SEQ ID NO: 1018786 - DNA, 25 bp, Homo sapien
cattctgcaagcctgcaactaaaac

SEQ ID NO: 1018787 - DNA, 25 bp, Homo sapien
ttctgcaagcctgcaactaaaacca

SEQ ID NO: 1018788 - DNA, 25 bp, Homo sapien
acattctgcaagcctgcaactaaaa

SEQ ID NO: 1018789 - DNA, 25 bp, Homo sapien
tctgcaagcctgcaactaaaaccat

SEQ ID NO: 1018790 - DNA, 25 bp, Homo sapien
gagagtccgtctggtaagctgtttt

SEQ ID NO: 1018791 - DNA, 25 bp, Homo sapien
cctcttaacgtggatttcagcctct

SEQ ID NO: 1018792 - DNA, 25 bp, Homo sapien
ctgtgttggcatgagagtccgtctg

SEQ ID NO: 1018793 - DNA, 25 bp, Homo sapien
cagcctctgtgttggcatgagagtc

SEQ ID NO: 1018794 - DNA, 25 bp, Homo sapien
taaactcggtgaagaaagaccactg

SEQ ID NO: 1018795 - DNA, 25 bp, Homo sapien
caagaaccttaattccacttggtga

SEQ ID NO: 1018796 - DNA, 25 bp, Homo sapien
ggctcctctgattctcgtttcctaa

SEQ ID NO: 1018797 - DNA, 25 bp, Homo sapien
cacttggtgaacagacgggaattct

SEQ ID NO: 1018798 - DNA, 25 bp, Homo sapien
tccgcaggacaatgagaagctgata

SEQ ID NO: 1018799 - DNA, 25 bp, Homo sapien
gattagatccaggaagcgtccgcag

SEQ ID NO: 1018800 - DNA, 25 bp, Homo sapien
gattttgccattggttactaccgcc

SEQ ID NO: 1018801 - DNA, 25 bp, Homo sapien
cctcctggctgaaattgtgaactac

SEQ ID NO: 1018802 - DNA, 25 bp, Homo sapien
agctcggattgtctagcagcttgga

SEQ ID NO: 1018803 - DNA, 25 bp, Homo sapien
ctcggattgtctagcagcttggatt

SEQ ID NO: 1018804 - DNA, 25 bp, Homo sapien
tggattgcttagtccccctttccac

SEQ ID NO: 1018805 - DNA, 25 bp, Homo sapien
cagcttggattgcttagtccccctt

SEQ ID NO: 1018806 - DNA, 25 bp, Homo sapien
gctttctatggaagctttcctgcag

SEQ ID NO: 1018807 - DNA, 25 bp, Homo sapien
tgctttctatggaagctttcctgca

SEQ ID NO: 1018808 - DNA, 25 bp, Homo sapien
gttatccaaacagtgcataacaaaa

SEQ ID NO: 1018809 - DNA, 25 bp, Homo sapien
ttggttcactggaaagacattcatt

SEQ ID NO: 1018810 - DNA, 25 bp, Homo sapien
cactgttatccaaacagtgcataac

SEQ ID NO: 1018811 - DNA, 25 bp, Homo sapien
ctttggttcactggaaagacattca

SEQ ID NO: 1018812 - DNA, 25 bp, Homo sapien
ttacatcatcactcaagaggctgcc

SEQ ID NO: 1018813 - DNA, 25 bp, Homo sapien
tgaaaagtcccattgaacaaggccc

SEQ ID NO: 1018814 - DNA, 25 bp, Homo sapien
gaacgtcattattactggcagtgcc

SEQ ID NO: 1018815 - DNA, 25 bp, Homo sapien
ggaacatcagtacggaaccatcgct

SEQ ID NO: 1018816 - DNA, 25 bp, Homo sapien
gcccagagctcagtccttcccccat

SEQ ID NO: 1018817 - DNA, 25 bp, Homo sapien
ggcccagagctcagtccttccccca

SEQ ID NO: 1018818 - DNA, 25 bp, Homo sapien
caggcccagagctcagtccttcccc

SEQ ID NO: 1018819 - DNA, 25 bp, Homo sapien
aggcccagagctcagtccttccccc

SEQ ID NO: 1018820 - DNA, 25 bp, Homo sapien
tgggagcagctgtccctcggggaga

SEQ ID NO: 1018821 - DNA, 25 bp, Homo sapien
aatgccagcgatggagagatagcga

SEQ ID NO: 1018822 - DNA, 25 bp, Homo sapien
ccgtatgaatgccagcgatggagag

SEQ ID NO: 1018823 - DNA, 25 bp, Homo sapien
aggccgtatgaatgccagcgatgga

SEQ ID NO: 1018824 - DNA, 25 bp, Homo sapien
cagctttagccttgtctcctgctca

SEQ ID NO: 1018825 - DNA, 25 bp, Homo sapien
agctttagccttgtctcctgctcac

SEQ ID NO: 1018826 - DNA, 25 bp, Homo sapien
tgcagctttagccttgtctcctgct

SEQ ID NO: 1018827 - DNA, 25 bp, Homo sapien
atgcagctttagccttgtctcctgc

SEQ ID NO: 1018828 - DNA, 25 bp, Homo sapien
gatgatacgtattccactgtgatga

SEQ ID NO: 1018829 - DNA, 25 bp, Homo sapien
agttgatccctctgaggcacctgga

SEQ ID NO: 1018830 - DNA, 25 bp, Homo sapien
tatttgcttgagtgcccttctggct

SEQ ID NO: 1018831 - DNA, 25 bp, Homo sapien
accttggtgctatgcgaaattctca

SEQ ID NO: 1018832 - DNA, 25 bp, Homo sapien
gctctggatatatcggtccctggca

SEQ ID NO: 1018833 - DNA, 25 bp, Homo sapien
tttgcctctgtgacgtggatgggac

SEQ ID NO: 1018834 - DNA, 25 bp, Homo sapien
gactgatcagagatcccaccgtgag

SEQ ID NO: 1018835 - DNA, 25 bp, Homo sapien
agagaccccatgagctcgtcaagct

SEQ ID NO: 1018836 - DNA, 25 bp, Homo sapien
gacgatgcatctctggttaagcccc

SEQ ID NO: 1018837 - DNA, 25 bp, Homo sapien
ccatgtgttgacctgggacttccag

SEQ ID NO: 1018838 - DNA, 25 bp, Homo sapien
gtgatttccgtaacagtcatgggtg

SEQ ID NO: 1018839 - DNA, 25 bp, Homo sapien
cctccagcatggtgagacgatgcat

SEQ ID NO: 1018840 - DNA, 25 bp, Homo sapien
caggccccggttttgcagttgtatt

SEQ ID NO: 1018841 - DNA, 25 bp, Homo sapien
gaaacccatttgagagcactgttgg

SEQ ID NO: 1018842 - DNA, 25 bp, Homo sapien
catgggcgcacgatggtcatttact

SEQ ID NO: 1018843 - DNA, 25 bp, Homo sapien
tgtatttgctgacctggcacatcgc

SEQ ID NO: 1018844 - DNA, 25 bp, Homo sapien
tgggaatctccctaagccatcagct

SEQ ID NO: 1018845 - DNA, 25 bp, Homo sapien
gaagtgtgcccctaacatggttgtg

SEQ ID NO: 1018846 - DNA, 25 bp, Homo sapien
ttctaggactagaaatgaagggcct

SEQ ID NO: 1018847 - DNA, 25 bp, Homo sapien
catcagcttacagtggagcggagcg

SEQ ID NO: 1018848 - DNA, 25 bp, Homo sapien
caatattgcctggactgcctgagct

SEQ ID NO: 1018849 - DNA, 25 bp, Homo sapien
gccacttttataggctcacaggcaa

SEQ ID NO: 1018850 - DNA, 25 bp, Homo sapien
gaagtcagtattaaggcttgagcag

SEQ ID NO: 1018851 - DNA, 25 bp, Homo sapien
gatgcagggcttattctattggaag

SEQ ID NO: 1018852 - DNA, 25 bp, Homo sapien
tgtattttcctccagcgagctcaga

SEQ ID NO: 1018853 - DNA, 25 bp, Homo sapien
cctggctggccacttcttgtagaaa

SEQ ID NO: 1018854 - DNA, 25 bp, Homo sapien
cctaagttgggagttactggtcaca

SEQ ID NO: 1018855 - DNA, 25 bp, Homo sapien
gttgaaatctgactgaatgagcctc

SEQ ID NO: 1018856 - DNA, 25 bp, Homo sapien
cacttatcttcctagcacgtgcggg

SEQ ID NO: 1018857 - DNA, 25 bp, Homo sapien
tgaattgggtcacctcagacgggca

SEQ ID NO: 1018858 - DNA, 25 bp, Homo sapien
cgctgtctgcgaatgggctctaggc

SEQ ID NO: 1018859 - DNA, 25 bp, Homo sapien
tctagcaaggcctgggtacgagctg

SEQ ID NO: 1018860 - DNA, 25 bp, Homo sapien
ggcactgcgcatggatactggctaa

SEQ ID NO: 1018861 - DNA, 25 bp, Homo sapien
tagtcagggctggtccacagaatgt

SEQ ID NO: 1018862 - DNA, 25 bp, Homo sapien
taagctccatgcttgcgtaaggcag

SEQ ID NO: 1018863 - DNA, 25 bp, Homo sapien
cagacaggtaagactaagaggcact

SEQ ID NO: 1018864 - DNA, 25 bp, Homo sapien
gaactttctcatggattgctttggg

SEQ ID NO: 1018865 - DNA, 25 bp, Homo sapien
aagtgggctgtacttagtgaattgc

SEQ ID NO: 1018866 - DNA, 25 bp, Homo sapien
aatgcagagccctatttcccttgcc

SEQ ID NO: 1018867 - DNA, 25 bp, Homo sapien
ttgccacacttattaacttacatgc

SEQ ID NO: 1018868 - DNA, 25 bp, Homo sapien
gttggactcatacagcatgtgtagc

SEQ ID NO: 1018869 - DNA, 25 bp, Homo sapien
tgtaatatacagtttcattgcccta

SEQ ID NO: 1018870 - DNA, 25 bp, Homo sapien
tattccactgtcttgatgcacgatg

SEQ ID NO: 1018871 - DNA, 25 bp, Homo sapien
catattgcgttttttagtactggat

SEQ ID NO: 1018872 - DNA, 25 bp, Homo sapien
tcctgtaccggcgtggtccatttgt

SEQ ID NO: 1018873 - DNA, 25 bp, Homo sapien
tcaacatcctgtaccggcgtggtcc

SEQ ID NO: 1018874 - DNA, 25 bp, Homo sapien
taccggcgtggtccatttgtaacag

SEQ ID NO: 1018875 - DNA, 25 bp, Homo sapien
ccctaaacggttgcttccatcaaca

SEQ ID NO: 1018876 - DNA, 25 bp, Homo sapien
cgtgggaattaggggagaggtcaag

SEQ ID NO: 1018877 - DNA, 25 bp, Homo sapien
gtgggaattaggggagaggtcaaga

SEQ ID NO: 1018878 - DNA, 25 bp, Homo sapien
tacgtgggaattaggggagaggtca

SEQ ID NO: 1018879 - DNA, 25 bp, Homo sapien
tattgtgcaggatgacgagggagcc

SEQ ID NO: 1018880 - DNA, 25 bp, Homo sapien
gggagaggactgtctcatcaccatg

SEQ ID NO: 1018881 - DNA, 25 bp, Homo sapien
tgtccctggcgcaagtggtccagag

SEQ ID NO: 1018882 - DNA, 25 bp, Homo sapien
aaggctaaggatgcagacttggtgt

SEQ ID NO: 1018883 - DNA, 25 bp, Homo sapien
acacaccagttgcatgcttattcct

SEQ ID NO: 1018884 - DNA, 25 bp, Homo sapien
gaaataggcatacacaatcgtgccc

SEQ ID NO: 1018885 - DNA, 25 bp, Homo sapien
gcatgcttattcctactctgtggct

SEQ ID NO: 1018886 - DNA, 25 bp, Homo sapien
gcatgagtaagtccccaagccattt

SEQ ID NO: 1018887 - DNA, 25 bp, Homo sapien
agtcctactggttcctctgcaaccg

SEQ ID NO: 1018888 - DNA, 25 bp, Homo sapien
gcaaccgccacccaagtcagcgcct

SEQ ID NO: 1018889 - DNA, 25 bp, Homo sapien
ggccgtgccagtcctactggttcct

SEQ ID NO: 1018890 - DNA, 25 bp, Homo sapien
cagcgcctgcaggagcgtggacact

SEQ ID NO: 1018891 - DNA, 25 bp, Homo sapien
tgcctttggaaccagagctgctgct

SEQ ID NO: 1018892 - DNA, 25 bp, Homo sapien
tatctgtgccctggaccacatgctc

SEQ ID NO: 1018893 - DNA, 25 bp, Homo sapien
gctgctatctgtgccctggaccaca

SEQ ID NO: 1018894 - DNA, 25 bp, Homo sapien
agctgctgctatctgtgccctggac

SEQ ID NO: 1018895 - DNA, 25 bp, Homo sapien
gagagaaggctttggcaggacgcac

SEQ ID NO: 1018896 - DNA, 25 bp, Homo sapien
gagagagaaggctttggcaggacgc

SEQ ID NO: 1018897 - DNA, 25 bp, Homo sapien
cttgagatgcagagagagaaggctt

SEQ ID NO: 1018898 - DNA, 25 bp, Homo sapien
cagagagagaaggctttggcaggac

SEQ ID NO: 1018899 - DNA, 25 bp, Homo sapien
gaaagtccccatggcccattttctg

SEQ ID NO: 1018900 - DNA, 25 bp, Homo sapien
agaggaaagtccccatggcccattt

SEQ ID NO: 1018901 - DNA, 25 bp, Homo sapien
ctctttcgtaatctattattgtgac

SEQ ID NO: 1018902 - DNA, 25 bp, Homo sapien
tccactctttcgtaatctattattg

SEQ ID NO: 1018903 - DNA, 25 bp, Homo sapien
acgctccgcgtttccttccctagca

SEQ ID NO: 1018904 - DNA, 25 bp, Homo sapien
tgccgggcattggagggacctcacg

SEQ ID NO: 1018905 - DNA, 25 bp, Homo sapien
gcagagctcaaacgacctgctgccg

SEQ ID NO: 1018906 - DNA, 25 bp, Homo sapien
cccttggacaggaggcgttgcaggt

SEQ ID NO: 1018907 - DNA, 25 bp, Homo sapien
gcgagaataatgagctgtgtaaaca

SEQ ID NO: 1018908 - DNA, 25 bp, Homo sapien
tggttgctatagcaactgcaaagcg

SEQ ID NO: 1018909 - DNA, 25 bp, Homo sapien
gaaactgacccctggtggttgctat

SEQ ID NO: 1018910 - DNA, 25 bp, Homo sapien
catgggtgtctacggcttttgtttt

SEQ ID NO: 1018911 - DNA, 25 bp, Homo sapien
gcttgtgcagaagaccctctttagt

SEQ ID NO: 1018912 - DNA, 25 bp, Homo sapien
gatacccggacacactgaaatgcat

SEQ ID NO: 1018913 - DNA, 25 bp, Homo sapien
cctctttagtcattgcttcaggcca

SEQ ID NO: 1018914 - DNA, 25 bp, Homo sapien
tcagaacaaaatttagatacccgga

SEQ ID NO: 1018915 - DNA, 25 bp, Homo sapien
gtaagtccgctgtccaaatacccga

SEQ ID NO: 1018916 - DNA, 25 bp, Homo sapien
ttctgaagagcggagcaagtactgc

SEQ ID NO: 1018917 - DNA, 25 bp, Homo sapien
gttgagtgtgctggataaacgagcc

SEQ ID NO: 1018918 - DNA, 25 bp, Homo sapien
taaacgagccctgtacaaagaggtc

SEQ ID NO: 1018919 - DNA, 25 bp, Homo sapien
tcacatgatttcttctggaagcact

SEQ ID NO: 1018920 - DNA, 25 bp, Homo sapien
cactgaagaggggttcttgtacccg

SEQ ID NO: 1018921 - DNA, 25 bp, Homo sapien
gatttcttctggaagcactgaagag

SEQ ID NO: 1018922 - DNA, 25 bp, Homo sapien
acatgatttcttctggaagcactga

SEQ ID NO: 1018923 - DNA, 25 bp, Homo sapien
agggctgtgtcgcagagcaaggcca

SEQ ID NO: 1018924 - DNA, 25 bp, Homo sapien
agagcaaggccagggcatcccaccc

SEQ ID NO: 1018925 - DNA, 25 bp, Homo sapien
ggagcagggctgtgtcgcagagcaa

SEQ ID NO: 1018926 - DNA, 25 bp, Homo sapien
gcaaggccagggcatcccaccccac

SEQ ID NO: 1018927 - DNA, 25 bp, Homo sapien
tcctggcagcagcaacgtggtaatg

SEQ ID NO: 1018928 - DNA, 25 bp, Homo sapien
cagcagcaacgtggtaatgcttctt

SEQ ID NO: 1018929 - DNA, 25 bp, Homo sapien
gcttggccccgcttttctccatgta

SEQ ID NO: 1018930 - DNA, 25 bp, Homo sapien
tctccatgtatttccaccagggtgc

SEQ ID NO: 1018931 - DNA, 25 bp, Homo sapien
agaggcatccatgtacccctgggac

SEQ ID NO: 1018932 - DNA, 25 bp, Homo sapien
tcatgacagaggcatccatgtaccc

SEQ ID NO: 1018933 - DNA, 25 bp, Homo sapien
atgtacccctgggacacgtcacggg

SEQ ID NO: 1018934 - DNA, 25 bp, Homo sapien
agcaccaggaaaggatctgcctttt

SEQ ID NO: 1018935 - DNA, 25 bp, Homo sapien
gccctcttgcacctgtactctgaaa

SEQ ID NO: 1018936 - DNA, 25 bp, Homo sapien
caggagcatctgcattgtgaacaca

SEQ ID NO: 1018937 - DNA, 25 bp, Homo sapien
aggagcatctgcattgtgaacacag

SEQ ID NO: 1018938 - DNA, 25 bp, Homo sapien
ggagcatctgcattgtgaacacagg

SEQ ID NO: 1018939 - DNA, 25 bp, Homo sapien
gagcatctgcattgtgaacacagga

SEQ ID NO: 1018940 - DNA, 25 bp, Homo sapien
aaggagcgcccctggcttaggaaca

SEQ ID NO: 1018941 - DNA, 25 bp, Homo sapien
gcccctggcttaggaacagctgaca

SEQ ID NO: 1018942 - DNA, 25 bp, Homo sapien
tttgtaactcaaggagcgcccctgg

SEQ ID NO: 1018943 - DNA, 25 bp, Homo sapien
gaacagctgacaactccacagctcc

SEQ ID NO: 1018944 - DNA, 25 bp, Homo sapien
gaacaccgagtgtagcattttccct

SEQ ID NO: 1018945 - DNA, 25 bp, Homo sapien
atgttttcccatgaacaccgagtgt

SEQ ID NO: 1018946 - DNA, 25 bp, Homo sapien
tttccctgtcttatcggccctagca

SEQ ID NO: 1018947 - DNA, 25 bp, Homo sapien
agccactcgatccaacctggagaga

SEQ ID NO: 1018948 - DNA, 25 bp, Homo sapien
ccctgagaagattgttgatggtcct

SEQ ID NO: 1018949 - DNA, 25 bp, Homo sapien
cctgagaagattgttgatggtcctc

SEQ ID NO: 1018950 - DNA, 25 bp, Homo sapien
acttttctggttgaaggcatcctta

SEQ ID NO: 1018951 - DNA, 25 bp, Homo sapien
ctaacttttctggttgaaggcatcc

SEQ ID NO: 1018952 - DNA, 25 bp, Homo sapien
cttttctggttgaaggcatccttag

SEQ ID NO: 1018953 - DNA, 25 bp, Homo sapien
taacttttctggttgaaggcatcct

SEQ ID NO: 1018954 - DNA, 25 bp, Homo sapien
caccacgggtttgcaataggtctca

SEQ ID NO: 1018955 - DNA, 25 bp, Homo sapien
aaaggtcatccgaggctgggctcct

SEQ ID NO: 1018956 - DNA, 25 bp, Homo sapien
tgtcacgcctggagctagtgtgccc

SEQ ID NO: 1018957 - DNA, 25 bp, Homo sapien
aaagtcctgagtccttgggtagctg

SEQ ID NO: 1018958 - DNA, 25 bp, Homo sapien
tcacactttggtaggcagttcttct

SEQ ID NO: 1018959 - DNA, 25 bp, Homo sapien
catgagctccccttcttccagggag

SEQ ID NO: 1018960 - DNA, 25 bp, Homo sapien
gggatgtggacaaccacatgagctc

SEQ ID NO: 1018961 - DNA, 25 bp, Homo sapien
tgactttcacaactcccaggatctc

SEQ ID NO: 1018962 - DNA, 25 bp, Homo sapien
gatgccgaaagggaagcgcttgctt

SEQ ID NO: 1018963 - DNA, 25 bp, Homo sapien
agggaagcgcttgcttgctccaagg

SEQ ID NO: 1018964 - DNA, 25 bp, Homo sapien
gccgaaagggaagcgcttgcttgct

SEQ ID NO: 1018965 - DNA, 25 bp, Homo sapien
gaaagggaagcgcttgcttgctcca

SEQ ID NO: 1018966 - DNA, 25 bp, Homo sapien
gactgagatgtttactggccagccc

SEQ ID NO: 1018967 - DNA, 25 bp, Homo sapien
tgaattatgagcacctgtccccatc

SEQ ID NO: 1018968 - DNA, 25 bp, Homo sapien
ttaaatttagcaacccacctcggca

SEQ ID NO: 1018969 - DNA, 25 bp, Homo sapien
cacagctgagggacggctattggcc

SEQ ID NO: 1018970 - DNA, 25 bp, Homo sapien
tggagtctgaaacgctaatcttgcc

SEQ ID NO: 1018971 - DNA, 25 bp, Homo sapien
tcacactacgaatgggacgagctgc

SEQ ID NO: 1018972 - DNA, 25 bp, Homo sapien
tccaggatgaactcatgggaagccc

SEQ ID NO: 1018973 - DNA, 25 bp, Homo sapien
catgacttagacagctatgggcctc

SEQ ID NO: 1018974 - DNA, 25 bp, Homo sapien
tgtagacctagtgacagcctgcgct

SEQ ID NO: 1018975 - DNA, 25 bp, Homo sapien
gaatacaacatctcgctgggacact

SEQ ID NO: 1018976 - DNA, 25 bp, Homo sapien
ttacatgttgtttagcggcagcagc

SEQ ID NO: 1018977 - DNA, 25 bp, Homo sapien
aaatgatggattgtgccgtcccggc

SEQ ID NO: 1018978 - DNA, 25 bp, Homo sapien
tctgaagtgactggccatctttgct

SEQ ID NO: 1018979 - DNA, 25 bp, Homo sapien
ctttaagacgttgacccaagagctc

SEQ ID NO: 1018980 - DNA, 25 bp, Homo sapien
tttgctgaagaataccgggtctcct

SEQ ID NO: 1018981 - DNA, 25 bp, Homo sapien
aaagtccctgcaagatctgaagtga

SEQ ID NO: 1018982 - DNA, 25 bp, Homo sapien
gctccagggtgcatccactacaaag

SEQ ID NO: 1018983 - DNA, 25 bp, Homo sapien
ccagctccagggtgcatccactaca

SEQ ID NO: 1018984 - DNA, 25 bp, Homo sapien
agctccagggtgcatccactacaaa

SEQ ID NO: 1018985 - DNA, 25 bp, Homo sapien
cagctccagggtgcatccactacaa

SEQ ID NO: 1018986 - DNA, 25 bp, Homo sapien
taattctttcagtcaatggttgttc

SEQ ID NO: 1018987 - DNA, 25 bp, Homo sapien
cagtcaatggttgttcttcaacctg

SEQ ID NO: 1018988 - DNA, 25 bp, Homo sapien
tctttcagtcaatggttgttcttca

SEQ ID NO: 1018989 - DNA, 25 bp, Homo sapien
caatggttgttcttcaacctgagca

SEQ ID NO: 1018990 - DNA, 25 bp, Homo sapien
agatctcggctaccccacatgaaag

SEQ ID NO: 1018991 - DNA, 25 bp, Homo sapien
tctagagaatcctccccagggagtt

SEQ ID NO: 1018992 - DNA, 25 bp, Homo sapien
gcaagatgcttccatgcacggattg

SEQ ID NO: 1018993 - DNA, 25 bp, Homo sapien
catgaaagaccagcgcagtggagga

SEQ ID NO: 1018994 - DNA, 25 bp, Homo sapien
gggggtcaggggagacaaggcagga

SEQ ID NO: 1018995 - DNA, 25 bp, Homo sapien
cgtcaccactgaatggtgggggtca

SEQ ID NO: 1018996 - DNA, 25 bp, Homo sapien
gtcttctccaaggagaggcaggaag

SEQ ID NO: 1018997 - DNA, 25 bp, Homo sapien
gcaggaggaaggagatgtcttctcc

SEQ ID NO: 1018998 - DNA, 25 bp, Homo sapien
gcagagaactcggactggaattgaa

SEQ ID NO: 1018999 - DNA, 25 bp, Homo sapien
tggcagagaactcggactggaattg

SEQ ID NO: 1019000 - DNA, 25 bp, Homo sapien
tgaaagggaaggacggccacaccca

SEQ ID NO: 1019001 - DNA, 25 bp, Homo sapien
agaactcggactggaattgaaaggg

SEQ ID NO: 1019002 - DNA, 25 bp, Homo sapien
tgacggttcgtgtcgtatctgaacg

SEQ ID NO: 1019003 - DNA, 25 bp, Homo sapien
aaagcagtctattctgtccagcggg

SEQ ID NO: 1019004 - DNA, 25 bp, Homo sapien
cttccccgagtgtgcccctttcatt

SEQ ID NO: 1019005 - DNA, 25 bp, Homo sapien
catccacaagctgtgtgacggttcg

SEQ ID NO: 1019006 - DNA, 25 bp, Homo sapien
catcttccgaaggtgcctggggtca

SEQ ID NO: 1019007 - DNA, 25 bp, Homo sapien
gagtgtgcctgctacccttaacaca

SEQ ID NO: 1019008 - DNA, 25 bp, Homo sapien
gggtcacggttatatttaacacaga

SEQ ID NO: 1019009 - DNA, 25 bp, Homo sapien
ggagggctccaaggagctccaagga

SEQ ID NO: 1019010 - DNA, 25 bp, Homo sapien
cacttgcttgtggaattggagagca

SEQ ID NO: 1019011 - DNA, 25 bp, Homo sapien
tctgaaggctgtggtgccgttgcct

SEQ ID NO: 1019012 - DNA, 25 bp, Homo sapien
aggcattgagcacaggtagtctgaa

SEQ ID NO: 1019013 - DNA, 25 bp, Homo sapien
taggagtcatactgtggcagaaatg

SEQ ID NO: 1019014 - DNA, 25 bp, Homo sapien
agtgaactcctcaagtaaaccgcct

SEQ ID NO: 1019015 - DNA, 25 bp, Homo sapien
ttacccaatagcagtgaactcctca

SEQ ID NO: 1019016 - DNA, 25 bp, Homo sapien
gcagtgaactcctcaagtaaaccgc

SEQ ID NO: 1019017 - DNA, 25 bp, Homo sapien
tagcagtgaactcctcaagtaaacc

SEQ ID NO: 1019018 - DNA, 25 bp, Homo sapien
ttaggaggacaagttgtagatttcc

SEQ ID NO: 1019019 - DNA, 25 bp, Homo sapien
ggaggacaagttgtagatttcctgt

SEQ ID NO: 1019020 - DNA, 25 bp, Homo sapien
attgaaattaggaggacaagttgta

SEQ ID NO: 1019021 - DNA, 25 bp, Homo sapien
aattaggaggacaagttgtagattt

SEQ ID NO: 1019022 - DNA, 25 bp, Homo sapien
ggatgggtggattccagtcaaacgt

SEQ ID NO: 1019023 - DNA, 25 bp, Homo sapien
caaacgtagtaattgtggagggagt

SEQ ID NO: 1019024 - DNA, 25 bp, Homo sapien
gaggatgtccaagagattccaggta

SEQ ID NO: 1019025 - DNA, 25 bp, Homo sapien
gatgtccaagagattccaggtaggg

SEQ ID NO: 1019026 - DNA, 25 bp, Homo sapien
tcttcatcagtataacagctagcaa

SEQ ID NO: 1019027 - DNA, 25 bp, Homo sapien
tataacagctagcaatgtacatctg

SEQ ID NO: 1019028 - DNA, 25 bp, Homo sapien
tcagtataacagctagcaatgtaca

SEQ ID NO: 1019029 - DNA, 25 bp, Homo sapien
catcagtataacagctagcaatgta

SEQ ID NO: 1019030 - DNA, 25 bp, Homo sapien
ggatgtttttaccaggccgcttctg

SEQ ID NO: 1019031 - DNA, 25 bp, Homo sapien
gtaaaatgttttcactcgtgctggg

SEQ ID NO: 1019032 - DNA, 25 bp, Homo sapien
gaaaggtgcagcttatcaccaggga

SEQ ID NO: 1019033 - DNA, 25 bp, Homo sapien
cagctcagaggtgttgtaaaatgtt

SEQ ID NO: 1019034 - DNA, 25 bp, Homo sapien
agctgctgttcgcagatggcctcac

SEQ ID NO: 1019035 - DNA, 25 bp, Homo sapien
ctgctgttcgcagatggcctcactg

SEQ ID NO: 1019036 - DNA, 25 bp, Homo sapien
tgctgttcgcagatggcctcactga

SEQ ID NO: 1019037 - DNA, 25 bp, Homo sapien
gctgttcgcagatggcctcactgag

SEQ ID NO: 1019038 - DNA, 25 bp, Homo sapien
aataatcttctccaggtcaaaatca

SEQ ID NO: 1019039 - DNA, 25 bp, Homo sapien
gatgccctacgaccattgtggatgc

SEQ ID NO: 1019040 - DNA, 25 bp, Homo sapien
cctacgaccattgtggatgcgctga

SEQ ID NO: 1019041 - DNA, 25 bp, Homo sapien
acgttatccctcatatattgatgcc

SEQ ID NO: 1019042 - DNA, 25 bp, Homo sapien
accattgtggatgcgctgaggctcc

SEQ ID NO: 1019043 - DNA, 25 bp, Homo sapien
agtcattgcccttcagttagtcatt

SEQ ID NO: 1019044 - DNA, 25 bp, Homo sapien
tcagccttagacagactcaggccca

SEQ ID NO: 1019045 - DNA, 25 bp, Homo sapien
taaagttccttaatctctacaggtc

SEQ ID NO: 1019046 - DNA, 25 bp, Homo sapien
gatatgcaggaggttttccaatgta

SEQ ID NO: 1019047 - DNA, 25 bp, Homo sapien
aggaaggaatgaacccactactgaa

SEQ ID NO: 1019048 - DNA, 25 bp, Homo sapien
gaagatctcttcagaggctccacct

SEQ ID NO: 1019049 - DNA, 25 bp, Homo sapien
aaggaatgaacccactactgaaagc

SEQ ID NO: 1019050 - DNA, 25 bp, Homo sapien
attatttcattcgacacctagaact

SEQ ID NO: 1019051 - DNA, 25 bp, Homo sapien
gcttcagagtcttcttgtaatgcat

SEQ ID NO: 1019052 - DNA, 25 bp, Homo sapien
ctattctgctgcttcagagtcttct

SEQ ID NO: 1019053 - DNA, 25 bp, Homo sapien
tattctgctgcttcagagtcttctt

SEQ ID NO: 1019054 - DNA, 25 bp, Homo sapien
tcagagtcttcttgtaatgcatttc

SEQ ID NO: 1019055 - DNA, 25 bp, Homo sapien
ggtgcaatcgtgactcattccagcc

SEQ ID NO: 1019056 - DNA, 25 bp, Homo sapien
ttttgcaaaaacggtcttgctatgt

SEQ ID NO: 1019057 - DNA, 25 bp, Homo sapien
gtggtgcaatcgtgactcattccag

SEQ ID NO: 1019058 - DNA, 25 bp, Homo sapien
tgcaatcgtgactcattccagcctc

SEQ ID NO: 1019059 - DNA, 25 bp, Homo sapien
ttctcttgactcacctgcagataga

SEQ ID NO: 1019060 - DNA, 25 bp, Homo sapien
tcttattggccaattagatgttgtt

SEQ ID NO: 1019061 - DNA, 25 bp, Homo sapien
ctgcagatagaacagtaaatctcat

SEQ ID NO: 1019062 - DNA, 25 bp, Homo sapien
gactcacctgcagatagaacagtaa

SEQ ID NO: 1019063 - DNA, 25 bp, Homo sapien
ccccatccaacagattcatttcatc

SEQ ID NO: 1019064 - DNA, 25 bp, Homo sapien
catccaacagattcatttcatccat

SEQ ID NO: 1019065 - DNA, 25 bp, Homo sapien
gaggaaaacatctaccattgtcttc

SEQ ID NO: 1019066 - DNA, 25 bp, Homo sapien
tgaggaaaacatctaccattgtctt

SEQ ID NO: 1019067 - DNA, 25 bp, Homo sapien
ctatttcagtctctcgtacatggcc

SEQ ID NO: 1019068 - DNA, 25 bp, Homo sapien
cattgccaggtctttctagcagccc

SEQ ID NO: 1019069 - DNA, 25 bp, Homo sapien
tttctagcagcccacaccttgcctt

SEQ ID NO: 1019070 - DNA, 25 bp, Homo sapien
gctccacccatattttgtaaaggct

SEQ ID NO: 1019071 - DNA, 25 bp, Homo sapien
caactctaggatatcagcttcaaac

SEQ ID NO: 1019072 - DNA, 25 bp, Homo sapien
catcattgcatccaagccaaactcg

SEQ ID NO: 1019073 - DNA, 25 bp, Homo sapien
ttggtaaatgtatggcagcccgggc

SEQ ID NO: 1019074 - DNA, 25 bp, Homo sapien
cagcccgggcgtgcatttggaagac

SEQ ID NO: 1019075 - DNA, 25 bp, Homo sapien
cagtcgctttatggtctcaggtaag

SEQ ID NO: 1019076 - DNA, 25 bp, Homo sapien
ttttcagtcgctttatggtctcagg

SEQ ID NO: 1019077 - DNA, 25 bp, Homo sapien
tggtctcaggtaagacccaagtcca

SEQ ID NO: 1019078 - DNA, 25 bp, Homo sapien
cgtgcgctttttcagtcgctttatg

SEQ ID NO: 1019079 - DNA, 25 bp, Homo sapien
agagaaaatgaaccaggctgccaaa

SEQ ID NO: 1019080 - DNA, 25 bp, Homo sapien
gctcgaatagccaaggacatagcat

SEQ ID NO: 1019081 - DNA, 25 bp, Homo sapien
tgtcaatgcacaaagctgtggctcg

SEQ ID NO: 1019082 - DNA, 25 bp, Homo sapien
gcatctttcgtacaggatttaggga

SEQ ID NO: 1019083 - DNA, 25 bp, Homo sapien
gaaatcaggtctttggcacttgaaa

SEQ ID NO: 1019084 - DNA, 25 bp, Homo sapien
cttgaaagctcatggaagtgtgttc

SEQ ID NO: 1019085 - DNA, 25 bp, Homo sapien
aaaaaggccacaaggttcttctgat

SEQ ID NO: 1019086 - DNA, 25 bp, Homo sapien
ggtacacgttgttccttggcagccc

SEQ ID NO: 1019087 - DNA, 25 bp, Homo sapien
cgaccatgcccggtagagtaagggg

SEQ ID NO: 1019088 - DNA, 25 bp, Homo sapien
catgcccggtagagtaaggggcttt

SEQ ID NO: 1019089 - DNA, 25 bp, Homo sapien
agcgaccatgcccggtagagtaagg

SEQ ID NO: 1019090 - DNA, 25 bp, Homo sapien
accatgcccggtagagtaaggggct

SEQ ID NO: 1019091 - DNA, 25 bp, Homo sapien
tcagagtcatttgagcaacctcggt

SEQ ID NO: 1019092 - DNA, 25 bp, Homo sapien
aattctgttagatgtggcccttgag

SEQ ID NO: 1019093 - DNA, 25 bp, Homo sapien
ccttgagatcagagagcgaagctag

SEQ ID NO: 1019094 - DNA, 25 bp, Homo sapien
acttcaaaatgcataccggccagcg

SEQ ID NO: 1019095 - DNA, 25 bp, Homo sapien
gtttctggatgtgattgggtgccaa

SEQ ID NO: 1019096 - DNA, 25 bp, Homo sapien
cagaagatgtccagaggtttctgga

SEQ ID NO: 1019097 - DNA, 25 bp, Homo sapien
tctggatgtgattgggtgccaacgt

SEQ ID NO: 1019098 - DNA, 25 bp, Homo sapien
gccacagaagatgtccagaggtttc

SEQ ID NO: 1019099 - DNA, 25 bp, Homo sapien
gttcaggagtcatgctatctaaacc

SEQ ID NO: 1019100 - DNA, 25 bp, Homo sapien
tgtttctcatttctagctaattaat

SEQ ID NO: 1019101 - DNA, 25 bp, Homo sapien
gctatctaaaccatgatgagatgcc

SEQ ID NO: 1019102 - DNA, 25 bp, Homo sapien
catttctagctaattaataaacttg

SEQ ID NO: 1019103 - DNA, 25 bp, Homo sapien
gggacgtgttactgagcggccgcgg

SEQ ID NO: 1019104 - DNA, 25 bp, Homo sapien
cagggtgaccgcagttgccatcccg

SEQ ID NO: 1019105 - DNA, 25 bp, Homo sapien
cgccccgactttagcagggtgaccg

SEQ ID NO: 1019106 - DNA, 25 bp, Homo sapien
acgtgttactgagcggccgcggcgg

SEQ ID NO: 1019107 - DNA, 25 bp, Homo sapien
catcacgtgttgctcctgcgagtct

SEQ ID NO: 1019108 - DNA, 25 bp, Homo sapien
cctgataagtagacacatcacgtgt

SEQ ID NO: 1019109 - DNA, 25 bp, Homo sapien
tagacacatcacgtgttgctcctgc

SEQ ID NO: 1019110 - DNA, 25 bp, Homo sapien
taagtagacacatcacgtgttgctc

SEQ ID NO: 1019111 - DNA, 25 bp, Homo sapien
cagggagagaccgaggagagatgca

SEQ ID NO: 1019112 - DNA, 25 bp, Homo sapien
caaaatggcgtttctggatgtgcaa

SEQ ID NO: 1019113 - DNA, 25 bp, Homo sapien
gcaaagttcatcaactccgcagtca

SEQ ID NO: 1019114 - DNA, 25 bp, Homo sapien
gagatgcaaacttgttccggaaaag

SEQ ID NO: 1019115 - DNA, 25 bp, Homo sapien
tcgggccggattcctgcgctcggac

SEQ ID NO: 1019116 - DNA, 25 bp, Homo sapien
cagagccggcggctcgggaaaggga

SEQ ID NO: 1019117 - DNA, 25 bp, Homo sapien
aatatggatgcgcatcaggtcctgc

SEQ ID NO: 1019118 - DNA, 25 bp, Homo sapien
ctcgcgctgggagctggttggcaga

SEQ ID NO: 1019119 - DNA, 25 bp, Homo sapien
gcgcttcccggcccgagaaggactc

SEQ ID NO: 1019120 - DNA, 25 bp, Homo sapien
gagggcgggcgccgtcatctccgcg

SEQ ID NO: 1019121 - DNA, 25 bp, Homo sapien
ggagggcgggcgccgtcatctccgc

SEQ ID NO: 1019122 - DNA, 25 bp, Homo sapien
cggcccgagaaggactcgaaagtat

SEQ ID NO: 1019123 - DNA, 25 bp, Homo sapien
ctgtggactcttgaagatagcacaa

SEQ ID NO: 1019124 - DNA, 25 bp, Homo sapien
tccaaagggcggaggtaaacacata

SEQ ID NO: 1019125 - DNA, 25 bp, Homo sapien
catcagtgtaaccaaagctcaaagc

SEQ ID NO: 1019126 - DNA, 25 bp, Homo sapien
tgtagagtagctcgaacccattcct

SEQ ID NO: 1019127 - DNA, 25 bp, Homo sapien
gtggctcatacctcatacctgtaat

SEQ ID NO: 1019128 - DNA, 25 bp, Homo sapien
cagtggctcatacctcatacctgta

SEQ ID NO: 1019129 - DNA, 25 bp, Homo sapien
agtggctcatacctcatacctgtaa

SEQ ID NO: 1019130 - DNA, 25 bp, Homo sapien
aataataacaccatgggaggccagg

SEQ ID NO: 1019131 - DNA, 25 bp, Homo sapien
gatgcaatatatcctctacgaggct

SEQ ID NO: 1019132 - DNA, 25 bp, Homo sapien
taaacttggtgcttaacacagtagc

SEQ ID NO: 1019133 - DNA, 25 bp, Homo sapien
tacgaggctttcaactatctttccc

SEQ ID NO: 1019134 - DNA, 25 bp, Homo sapien
cctgactaatccagcgtttcactgt

SEQ ID NO: 1019135 - DNA, 25 bp, Homo sapien
gactaatccagcgtttcactgtcag

SEQ ID NO: 1019136 - DNA, 25 bp, Homo sapien
tgttcgtaaaccctgactaatccag

SEQ ID NO: 1019137 - DNA, 25 bp, Homo sapien
taatccagcgtttcactgtcagagg

SEQ ID NO: 1019138 - DNA, 25 bp, Homo sapien
tcacaaaggagcaaggcacactggg

SEQ ID NO: 1019139 - DNA, 25 bp, Homo sapien
tgctccgatgccctcacaaaggagc

SEQ ID NO: 1019140 - DNA, 25 bp, Homo sapien
gttccataacttgctccgatgccct

SEQ ID NO: 1019141 - DNA, 25 bp, Homo sapien
gccagttccataacttgctccgatg

SEQ ID NO: 1019142 - DNA, 25 bp, Homo sapien
gattctatttccaccagacgctgcc

SEQ ID NO: 1019143 - DNA, 25 bp, Homo sapien
agagtcgtgacccagatgagggcac

SEQ ID NO: 1019144 - DNA, 25 bp, Homo sapien
ggcctcgggcacatgatgctccttt

SEQ ID NO: 1019145 - DNA, 25 bp, Homo sapien
taaggcagctccaccttttgaacag

SEQ ID NO: 1019146 - DNA, 25 bp, Homo sapien
caggcactatggcaagcgcttggga

SEQ ID NO: 1019147 - DNA, 25 bp, Homo sapien
tccttatctgtgtggcaaccctacc

SEQ ID NO: 1019148 - DNA, 25 bp, Homo sapien
tacccaaaatgagggcacatgcaga

SEQ ID NO: 1019149 - DNA, 25 bp, Homo sapien
tcaatatcgccacctgtgaaacagg

SEQ ID NO: 1019150 - DNA, 25 bp, Homo sapien
cacacactgtacccagaacaggatg

SEQ ID NO: 1019151 - DNA, 25 bp, Homo sapien
tacacacactgtacccagaacagga

SEQ ID NO: 1019152 - DNA, 25 bp, Homo sapien
acacacactgtacccagaacaggat

SEQ ID NO: 1019153 - DNA, 25 bp, Homo sapien
gttaacttcagtcaaaccagatctt

SEQ ID NO: 1019154 - DNA, 25 bp, Homo sapien
ggcccaactacctgatcaataacca

SEQ ID NO: 1019155 - DNA, 25 bp, Homo sapien
ttgagttaaacatcagaacctactg

SEQ ID NO: 1019156 - DNA, 25 bp, Homo sapien
gaatagctacacataggttatagca

SEQ ID NO: 1019157 - DNA, 25 bp, Homo sapien
gaacccgctgtccagctaaggagta

SEQ ID NO: 1019158 - DNA, 25 bp, Homo sapien
taaggagtaaaaggcgaggaccagc

SEQ ID NO: 1019159 - DNA, 25 bp, Homo sapien
acaccaccctaaggaacaactcttg

SEQ ID NO: 1019160 - DNA, 25 bp, Homo sapien
tccactttcaagtttagggacacca

SEQ ID NO: 1019161 - DNA, 25 bp, Homo sapien
ttccaggttcactttgccgcaggca

SEQ ID NO: 1019162 - DNA, 25 bp, Homo sapien
agcctatgggcgagggccaccgctc

SEQ ID NO: 1019163 - DNA, 25 bp, Homo sapien
tttgccgcaggcaagtgtctgcacc

SEQ ID NO: 1019164 - DNA, 25 bp, Homo sapien
ttttagaaaggagaggcaattatcc

SEQ ID NO: 1019165 - DNA, 25 bp, Homo sapien
cctctacacggtgagacgaagaaga

SEQ ID NO: 1019166 - DNA, 25 bp, Homo sapien
aatgcagatgtaacccagggccttc

SEQ ID NO: 1019167 - DNA, 25 bp, Homo sapien
tcataacctcgctgaaggacaacaa

SEQ ID NO: 1019168 - DNA, 25 bp, Homo sapien
taacagaaatgtatctccttgggag

SEQ ID NO: 1019169 - DNA, 25 bp, Homo sapien
agggcatggtaagcgggccacagac

SEQ ID NO: 1019170 - DNA, 25 bp, Homo sapien
catggtaagcgggccacagactgct

SEQ ID NO: 1019171 - DNA, 25 bp, Homo sapien
agagggcatggtaagcgggccacag

SEQ ID NO: 1019172 - DNA, 25 bp, Homo sapien
gacagagggcatggtaagcgggcca

SEQ ID NO: 1019173 - DNA, 25 bp, Homo sapien
gggcttatcagcttaggacacggga

SEQ ID NO: 1019174 - DNA, 25 bp, Homo sapien
tcaaaggttatctacacacgtggcc

SEQ ID NO: 1019175 - DNA, 25 bp, Homo sapien
taatatccaaatatcccagcacgga

SEQ ID NO: 1019176 - DNA, 25 bp, Homo sapien
gctgcgcactccaagctgaaatgca

SEQ ID NO: 1019177 - DNA, 25 bp, Homo sapien
tagttaaggagtaggctctggaacc

SEQ ID NO: 1019178 - DNA, 25 bp, Homo sapien
gggcctttcttctcataagcctgaa

SEQ ID NO: 1019179 - DNA, 25 bp, Homo sapien
ccagcagtggtaagtggcctgaccc

SEQ ID NO: 1019180 - DNA, 25 bp, Homo sapien
ccttagacagttagggaacctctca

SEQ ID NO: 1019181 - DNA, 25 bp, Homo sapien
tatactatgagtaagaagaagagaa

SEQ ID NO: 1019182 - DNA, 25 bp, Homo sapien
caaaaaatgggcagtcgggtcttat

SEQ ID NO: 1019183 - DNA, 25 bp, Homo sapien
tactaattaattagtcatctccaaa

SEQ ID NO: 1019184 - DNA, 25 bp, Homo sapien
tggattacggagcaaaggaccccag

SEQ ID NO: 1019185 - DNA, 25 bp, Homo sapien
ccatggtcacacagggtacatgtgc

SEQ ID NO: 1019186 - DNA, 25 bp, Homo sapien
catggtcacacagggtacatgtgca

SEQ ID NO: 1019187 - DNA, 25 bp, Homo sapien
gcccatggtcacacagggtacatgt

SEQ ID NO: 1019188 - DNA, 25 bp, Homo sapien
tggcccatggtcacacagggtacat

SEQ ID NO: 1019189 - DNA, 25 bp, Homo sapien
aacaaaacccctgggagctatcaga

SEQ ID NO: 1019190 - DNA, 25 bp, Homo sapien
aacggcaaccttgtgtctaactgca

SEQ ID NO: 1019191 - DNA, 25 bp, Homo sapien
cagagtgcaccagtgtgttttgaga

SEQ ID NO: 1019192 - DNA, 25 bp, Homo sapien
aaatggcaaagatgcggctggcaga

SEQ ID NO: 1019193 - DNA, 25 bp, Homo sapien
caaaaatgactagcaggcaggatgg

SEQ ID NO: 1019194 - DNA, 25 bp, Homo sapien
ttggaaagcccatgtgcagctggga

SEQ ID NO: 1019195 - DNA, 25 bp, Homo sapien
tcctggaggaagtgtgaggcacaca

SEQ ID NO: 1019196 - DNA, 25 bp, Homo sapien
gctctccaggcggtgattagttcac

SEQ ID NO: 1019197 - DNA, 25 bp, Homo sapien
tgccatcacacccatcacacttcat

SEQ ID NO: 1019198 - DNA, 25 bp, Homo sapien
ctctaatgttgccatcacacccatc

SEQ ID NO: 1019199 - DNA, 25 bp, Homo sapien
ctaatgttgccatcacacccatcac

SEQ ID NO: 1019200 - DNA, 25 bp, Homo sapien
tgttgccatcacacccatcacactt

SEQ ID NO: 1019201 - DNA, 25 bp, Homo sapien
ttagagcaggcccctacaccatggg

SEQ ID NO: 1019202 - DNA, 25 bp, Homo sapien
caccatggggcaccgtgagctgctt

SEQ ID NO: 1019203 - DNA, 25 bp, Homo sapien
gcacaggctttggtaagacaggagc

SEQ ID NO: 1019204 - DNA, 25 bp, Homo sapien
gctgcttcgtccaactctgatcttc

SEQ ID NO: 1019205 - DNA, 25 bp, Homo sapien
tcttggcttagggtccaggctatgc

SEQ ID NO: 1019206 - DNA, 25 bp, Homo sapien
tatgccttggatagggcggcaaccc

SEQ ID NO: 1019207 - DNA, 25 bp, Homo sapien
gacactaaaatggtctgagccagga

SEQ ID NO: 1019208 - DNA, 25 bp, Homo sapien
taaatgttccacgagggccatgcct

SEQ ID NO: 1019209 - DNA, 25 bp, Homo sapien
agtgaaatctaaactctgtcctaag

SEQ ID NO: 1019210 - DNA, 25 bp, Homo sapien
gtggaataagtttagatgcctagga

SEQ ID NO: 1019211 - DNA, 25 bp, Homo sapien
cctaaggtgatccaaaccgccccag

SEQ ID NO: 1019212 - DNA, 25 bp, Homo sapien
tgcctaggatgatggtagaggccct

SEQ ID NO: 1019213 - DNA, 25 bp, Homo sapien
cttgaacagacaggaacacccctat

SEQ ID NO: 1019214 - DNA, 25 bp, Homo sapien
gtaagagcttggaactgagtgtgcc

SEQ ID NO: 1019215 - DNA, 25 bp, Homo sapien
tccaataacgtcaagggcagcacca

SEQ ID NO: 1019216 - DNA, 25 bp, Homo sapien
gggagcttcgtgcatcctaatggca

SEQ ID NO: 1019217 - DNA, 25 bp, Homo sapien
gctgccctccttattggggggctga

SEQ ID NO: 1019218 - DNA, 25 bp, Homo sapien
cactcctggaacacacagtcggagc

SEQ ID NO: 1019219 - DNA, 25 bp, Homo sapien
tctttgtgttatcaagctgccctcc

SEQ ID NO: 1019220 - DNA, 25 bp, Homo sapien
caaacgtgggcagggtcacacctca

SEQ ID NO: 1019221 - DNA, 25 bp, Homo sapien
tacaatttcaacacgattttgcaac

SEQ ID NO: 1019222 - DNA, 25 bp, Homo sapien
catgtctggcctagttacaatttca

SEQ ID NO: 1019223 - DNA, 25 bp, Homo sapien
cacgattttgcaacaaagcctcagg

SEQ ID NO: 1019224 - DNA, 25 bp, Homo sapien
catgacaattaaacgggaggtaggg

SEQ ID NO: 1019225 - DNA, 25 bp, Homo sapien
aatgagtctgtgttgacctcttgtc

SEQ ID NO: 1019226 - DNA, 25 bp, Homo sapien
cctgctgtagctatcattcacacgg

SEQ ID NO: 1019227 - DNA, 25 bp, Homo sapien
tcacacggagtagaaaatgagtctg

SEQ ID NO: 1019228 - DNA, 25 bp, Homo sapien
tgatagactatgaaactttcccctg

SEQ ID NO: 1019229 - DNA, 25 bp, Homo sapien
ctgagtgtgcactaccaacaggact

SEQ ID NO: 1019230 - DNA, 25 bp, Homo sapien
cacgcccagagtgatggaagctttc

SEQ ID NO: 1019231 - DNA, 25 bp, Homo sapien
ttggcataccaaggacgaagtaacc

SEQ ID NO: 1019232 - DNA, 25 bp, Homo sapien
taagagatttaagaagccaacgcta

SEQ ID NO: 1019233 - DNA, 25 bp, Homo sapien
ggtttaagcttctaagaagcctctg

SEQ ID NO: 1019234 - DNA, 25 bp, Homo sapien
aagcttctaagaagcctctgctata

SEQ ID NO: 1019235 - DNA, 25 bp, Homo sapien
taagcttctaagaagcctctgctat

SEQ ID NO: 1019236 - DNA, 25 bp, Homo sapien
tttaagcttctaagaagcctctgct

SEQ ID NO: 1019237 - DNA, 25 bp, Homo sapien
ggaagataggtctgaaccttccaag

SEQ ID NO: 1019238 - DNA, 25 bp, Homo sapien
gtgttgatggaagataggtctgaac

SEQ ID NO: 1019239 - DNA, 25 bp, Homo sapien
accttccaagccagcgggcgaactt

SEQ ID NO: 1019240 - DNA, 25 bp, Homo sapien
tgaaccttccaagccagcgggcgaa

SEQ ID NO: 1019241 - DNA, 25 bp, Homo sapien
tccctacactcatgaccgccgacat

SEQ ID NO: 1019242 - DNA, 25 bp, Homo sapien
gacttgatcccctgggggctcccgc

SEQ ID NO: 1019243 - DNA, 25 bp, Homo sapien
tgccaatccgatttggtcctggagg

SEQ ID NO: 1019244 - DNA, 25 bp, Homo sapien
tggaggcttcgagggggacttgatc

SEQ ID NO: 1019245 - DNA, 25 bp, Homo sapien
tcatggattgaacccaccagaggtc

SEQ ID NO: 1019246 - DNA, 25 bp, Homo sapien
ggatagaaagctgaacggcagccct

SEQ ID NO: 1019247 - DNA, 25 bp, Homo sapien
cctgccatggccatcaagtgaagaa

SEQ ID NO: 1019248 - DNA, 25 bp, Homo sapien
aataagggcacttccaccaacatcg

SEQ ID NO: 1019249 - DNA, 25 bp, Homo sapien
ctggacaaatgcaagaccaccttct

SEQ ID NO: 1019250 - DNA, 25 bp, Homo sapien
tctccaaggatttagtatagtctca

SEQ ID NO: 1019251 - DNA, 25 bp, Homo sapien
tacatggatccagagttgaaatgag

SEQ ID NO: 1019252 - DNA, 25 bp, Homo sapien
gaggaagtcaactcgtattacatgg

SEQ ID NO: 1019253 - DNA, 25 bp, Homo sapien
tataggaactgggtacatattgtcc

SEQ ID NO: 1019254 - DNA, 25 bp, Homo sapien
cagcaaggtgtggagaaatgcatcc

SEQ ID NO: 1019255 - DNA, 25 bp, Homo sapien
taaccacggtctctgatctggaggc

SEQ ID NO: 1019256 - DNA, 25 bp, Homo sapien
tattcttcccgaaatgcctggcacc

SEQ ID NO: 1019257 - DNA, 25 bp, Homo sapien
caggacctccatttcaaaagcaaac

SEQ ID NO: 1019258 - DNA, 25 bp, Homo sapien
gaaacaatctggcacccttgtcagc

SEQ ID NO: 1019259 - DNA, 25 bp, Homo sapien
ggaactctaagctcacaccaatggg

SEQ ID NO: 1019260 - DNA, 25 bp, Homo sapien
cggctgtggctaatctctcctggaa

SEQ ID NO: 1019261 - DNA, 25 bp, Homo sapien
gtgataactaaccattccataatga

SEQ ID NO: 1019262 - DNA, 25 bp, Homo sapien
tatatgggaggaggtctacagaccc

SEQ ID NO: 1019263 - DNA, 25 bp, Homo sapien
caccttgcaatagacagcaggcaca

SEQ ID NO: 1019264 - DNA, 25 bp, Homo sapien
tgtgctgcaggccatcatacaggtc

SEQ ID NO: 1019265 - DNA, 25 bp, Homo sapien
gtgactcatgaactgacaccccagc

SEQ ID NO: 1019266 - DNA, 25 bp, Homo sapien
tggtgctgggtagtgcaaatcttct

SEQ ID NO: 1019267 - DNA, 25 bp, Homo sapien
aaatcttctcacacagggggcagtt

SEQ ID NO: 1019268 - DNA, 25 bp, Homo sapien
cgaatgtgcatggtcagctggtgct

SEQ ID NO: 1019269 - DNA, 25 bp, Homo sapien
tataggaagacttctcctctttcgt

SEQ ID NO: 1019270 - DNA, 25 bp, Homo sapien
tgagtggtcggctcctccagtgtct

SEQ ID NO: 1019271 - DNA, 25 bp, Homo sapien
tcccattggtggtaaatgactggcc

SEQ ID NO: 1019272 - DNA, 25 bp, Homo sapien
tgcaccagcatgtggcgatcgaggg

SEQ ID NO: 1019273 - DNA, 25 bp, Homo sapien
gctcagtgactttccgcagatgctg

SEQ ID NO: 1019274 - DNA, 25 bp, Homo sapien
tgcctgccaacctccaagtaccagc

SEQ ID NO: 1019275 - DNA, 25 bp, Homo sapien
ggccactgtcctgcctgccaacctc

SEQ ID NO: 1019276 - DNA, 25 bp, Homo sapien
caagtaccagccaaccccccaagca

SEQ ID NO: 1019277 - DNA, 25 bp, Homo sapien
aggccactgtcctgcctgccaacct

SEQ ID NO: 1019278 - DNA, 25 bp, Homo sapien
ctaggaccagattctgagaagggca

SEQ ID NO: 1019279 - DNA, 25 bp, Homo sapien
ggtgtggggtgtagaacgagcagac

SEQ ID NO: 1019280 - DNA, 25 bp, Homo sapien
aagggcaaatatgtaaaggacaaag

SEQ ID NO: 1019281 - DNA, 25 bp, Homo sapien
caaatatgtaaaggacaaaggactt

SEQ ID NO: 1019282 - DNA, 25 bp, Homo sapien
tggtcagtggttagggccaaaacgc

SEQ ID NO: 1019283 - DNA, 25 bp, Homo sapien
taggaggggcctctttaccaatgtg

SEQ ID NO: 1019284 - DNA, 25 bp, Homo sapien
caaaacgccactaggaggggcctct

SEQ ID NO: 1019285 - DNA, 25 bp, Homo sapien
gcctctttaccaatgtgcccacttg

SEQ ID NO: 1019286 - DNA, 25 bp, Homo sapien
caaattttcaacgtgggagcaactg

SEQ ID NO: 1019287 - DNA, 25 bp, Homo sapien
gttagtcatgaaagcttgcccctgc

SEQ ID NO: 1019288 - DNA, 25 bp, Homo sapien
tgttttggaagacgagcaccactca

SEQ ID NO: 1019289 - DNA, 25 bp, Homo sapien
aaaaaatcgtgcctatggctgcagg

SEQ ID NO: 1019290 - DNA, 25 bp, Homo sapien
tctgggaggtgtctataaagaccac

SEQ ID NO: 1019291 - DNA, 25 bp, Homo sapien
tggccagttagatcccacagtctct

SEQ ID NO: 1019292 - DNA, 25 bp, Homo sapien
gcaatactagggcaatacgtcccca

SEQ ID NO: 1019293 - DNA, 25 bp, Homo sapien
caagctttgcggctgatactgacgt

SEQ ID NO: 1019294 - DNA, 25 bp, Homo sapien
agcctggcatgaagtgtaaacccac

SEQ ID NO: 1019295 - DNA, 25 bp, Homo sapien
cagcctggcatgaagtgtaaaccca

SEQ ID NO: 1019296 - DNA, 25 bp, Homo sapien
tcagcctggcatgaagtgtaaaccc

SEQ ID NO: 1019297 - DNA, 25 bp, Homo sapien
tacaggaactttctgcggaccttcc

SEQ ID NO: 1019298 - DNA, 25 bp, Homo sapien
tatccaagcactggcttgctctgag

SEQ ID NO: 1019299 - DNA, 25 bp, Homo sapien
gggtaaagctcttagctatccaagc

SEQ ID NO: 1019300 - DNA, 25 bp, Homo sapien
ggcatggaagtcattagatttggga

SEQ ID NO: 1019301 - DNA, 25 bp, Homo sapien
tgtgagcaaacatgacacgagatta

SEQ ID NO: 1019302 - DNA, 25 bp, Homo sapien
tgaagggacttcaatcgaaaacact

SEQ ID NO: 1019303 - DNA, 25 bp, Homo sapien
gattatgaacagtgccacactgaag

SEQ ID NO: 1019304 - DNA, 25 bp, Homo sapien
gaaaacactccaacaatgaacactg

SEQ ID NO: 1019305 - DNA, 25 bp, Homo sapien
cttccagccgcttgatgagcaaaag

SEQ ID NO: 1019306 - DNA, 25 bp, Homo sapien
gcccacgggtgaactgcagggttgg

SEQ ID NO: 1019307 - DNA, 25 bp, Homo sapien
ccagccgcttgatgagcaaaagctg

SEQ ID NO: 1019308 - DNA, 25 bp, Homo sapien
cagcccacgggtgaactgcagggtt

SEQ ID NO: 1019309 - DNA, 25 bp, Homo sapien
ttcctcttggaggacaatcgcctac

SEQ ID NO: 1019310 - DNA, 25 bp, Homo sapien
gcactgttagggtccttctcatgga

SEQ ID NO: 1019311 - DNA, 25 bp, Homo sapien
tctctgactcggcatcgtgactcag

SEQ ID NO: 1019312 - DNA, 25 bp, Homo sapien
tcgcctacgtttcagaggagatgga

SEQ ID NO: 1019313 - DNA, 25 bp, Homo sapien
cccctgagcaggtgaatctgcactg

SEQ ID NO: 1019314 - DNA, 25 bp, Homo sapien
agcaggtgaatctgcactgggagcc

SEQ ID NO: 1019315 - DNA, 25 bp, Homo sapien
gaagtcccctgagcaggtgaatctg

SEQ ID NO: 1019316 - DNA, 25 bp, Homo sapien
ctgagcaggtgaatctgcactggga

SEQ ID NO: 1019317 - DNA, 25 bp, Homo sapien
tagtgggttatctgaatgggtctcc

SEQ ID NO: 1019318 - DNA, 25 bp, Homo sapien
tctccaagtcacctgactgcccgtc

SEQ ID NO: 1019319 - DNA, 25 bp, Homo sapien
aagtcacctgactgcccgtcttcta

SEQ ID NO: 1019320 - DNA, 25 bp, Homo sapien
catactgggcagtgaaagacttcat

SEQ ID NO: 1019321 - DNA, 25 bp, Homo sapien
aaagctgcacgcgtgtatggccctg

SEQ ID NO: 1019322 - DNA, 25 bp, Homo sapien
agtgaaccatgtgaacaccctgtgg

SEQ ID NO: 1019323 - DNA, 25 bp, Homo sapien
caagttcaatcactggagcccggtg

SEQ ID NO: 1019324 - DNA, 25 bp, Homo sapien
tggagctgcgaagcccctacaattg

SEQ ID NO: 1019325 - DNA, 25 bp, Homo sapien
cattcctgaacctgtgaagtttccc

SEQ ID NO: 1019326 - DNA, 25 bp, Homo sapien
acagggaggggccatatgccttttc

SEQ ID NO: 1019327 - DNA, 25 bp, Homo sapien
gaagtttcccaaatctctcagaact

SEQ ID NO: 1019328 - DNA, 25 bp, Homo sapien
ctcagaactagagggcctacacagg

SEQ ID NO: 1019329 - DNA, 25 bp, Homo sapien
taagcgggtagcatcccactgtggt

SEQ ID NO: 1019330 - DNA, 25 bp, Homo sapien
taacacctgatcctaagagctggca

SEQ ID NO: 1019331 - DNA, 25 bp, Homo sapien
gaaaatcctctaggtcggctagctg

SEQ ID NO: 1019332 - DNA, 25 bp, Homo sapien
aatgacgagcgtccagtgcaatgcc

SEQ ID NO: 1019333 - DNA, 25 bp, Homo sapien
catagcctgactccgcttcctcctc

SEQ ID NO: 1019334 - DNA, 25 bp, Homo sapien
ctccgattccaaacgccagctcgcc

SEQ ID NO: 1019335 - DNA, 25 bp, Homo sapien
gattccaaacgccagctcgccatag

SEQ ID NO: 1019336 - DNA, 25 bp, Homo sapien
gctcgccatagcctgactccgcttc

SEQ ID NO: 1019337 - DNA, 25 bp, Homo sapien
ctgctctcttgaacactccgtccct

SEQ ID NO: 1019338 - DNA, 25 bp, Homo sapien
tgctctcttgaacactccgtccctc

SEQ ID NO: 1019339 - DNA, 25 bp, Homo sapien
gctctcttgaacactccgtccctca

SEQ ID NO: 1019340 - DNA, 25 bp, Homo sapien
ctctcttgaacactccgtccctcac

SEQ ID NO: 1019341 - DNA, 25 bp, Homo sapien
aaaacatgactactagggccaggca

SEQ ID NO: 1019342 - DNA, 25 bp, Homo sapien
gaaaattccaaggacgtgcgtggcc

SEQ ID NO: 1019343 - DNA, 25 bp, Homo sapien
caatgaagtaccagacccggttggg

SEQ ID NO: 1019344 - DNA, 25 bp, Homo sapien
ggccgagtttcaccctcagcagtgg

SEQ ID NO: 1019345 - DNA, 25 bp, Homo sapien
cagtggagaatgcaggaaaaagaag

SEQ ID NO: 1019346 - DNA, 25 bp, Homo sapien
acagtggagaatgcaggaaaaagaa

SEQ ID NO: 1019347 - DNA, 25 bp, Homo sapien
cttggaacagtggagaatgcaggaa

SEQ ID NO: 1019348 - DNA, 25 bp, Homo sapien
tggagaatgcaggaaaaagaaggca

SEQ ID NO: 1019349 - DNA, 25 bp, Homo sapien
taggtggtaggcgtgtggtgaaggg

SEQ ID NO: 1019350 - DNA, 25 bp, Homo sapien
atcccgggtacatgaggagtcttgg

SEQ ID NO: 1019351 - DNA, 25 bp, Homo sapien
gatgacatttgacaagggtgggatc

SEQ ID NO: 1019352 - DNA, 25 bp, Homo sapien
ggtgggatcaatcccgggtacatga

SEQ ID NO: 1019353 - DNA, 25 bp, Homo sapien
gaagaacctgcgaaatacctgccga

SEQ ID NO: 1019354 - DNA, 25 bp, Homo sapien
tgactgttcaaccaaaccagcgtgg

SEQ ID NO: 1019355 - DNA, 25 bp, Homo sapien
taccattgtgacagctgagggacag

SEQ ID NO: 1019356 - DNA, 25 bp, Homo sapien
tgctgcgagcaacagtgatggccct

SEQ ID NO: 1019357 - DNA, 25 bp, Homo sapien
tcacagcagagttaaggtacttatc

SEQ ID NO: 1019358 - DNA, 25 bp, Homo sapien
gaaaagggaatctgcaatctgtagc

SEQ ID NO: 1019359 - DNA, 25 bp, Homo sapien
tgtagccagtaactgagcctagtac

SEQ ID NO: 1019360 - DNA, 25 bp, Homo sapien
cactgttaaaagcatcagccctgaa

SEQ ID NO: 1019361 - DNA, 25 bp, Homo sapien
tggtatggacattctctagagggag

SEQ ID NO: 1019362 - DNA, 25 bp, Homo sapien
cctatttaggcagggcacagatatc

SEQ ID NO: 1019363 - DNA, 25 bp, Homo sapien
gcattgaattaatggctgtctgtgc

SEQ ID NO: 1019364 - DNA, 25 bp, Homo sapien
tgtctgtgctacacagtctgcctat

SEQ ID NO: 1019365 - DNA, 25 bp, Homo sapien
cacagcgctaacatggtcagagaag

SEQ ID NO: 1019366 - DNA, 25 bp, Homo sapien
tggaaagggcacagcgctaacatgg

SEQ ID NO: 1019367 - DNA, 25 bp, Homo sapien
gctggtgaactccacgctgtcctga

SEQ ID NO: 1019368 - DNA, 25 bp, Homo sapien
aagtctgactcccacacgagctggt

SEQ ID NO: 1019369 - DNA, 25 bp, Homo sapien
gccgggaaccacgatcacagagagt

SEQ ID NO: 1019370 - DNA, 25 bp, Homo sapien
tatcaactgtaatgtccctggcggc

SEQ ID NO: 1019371 - DNA, 25 bp, Homo sapien
gactcccaggtcataaggtaagctc

SEQ ID NO: 1019372 - DNA, 25 bp, Homo sapien
cagaggtgaagcagctgcctgcact

SEQ ID NO: 1019373 - DNA, 25 bp, Homo sapien
tatatgaacaagcacaccagcggat

SEQ ID NO: 1019374 - DNA, 25 bp, Homo sapien
tgaaaagaagtgcatgctctcccag

SEQ ID NO: 1019375 - DNA, 25 bp, Homo sapien
tctgtctaactgcaaaactcatggg

SEQ ID NO: 1019376 - DNA, 25 bp, Homo sapien
taacagagtctaagcaaggtgatcc

SEQ ID NO: 1019377 - DNA, 25 bp, Homo sapien
tcctgtttctggacaccttcatacg

SEQ ID NO: 1019378 - DNA, 25 bp, Homo sapien
ttcatacgtagtaggtgatgaaggc

SEQ ID NO: 1019379 - DNA, 25 bp, Homo sapien
tctggacaccttcatacgtagtagg

SEQ ID NO: 1019380 - DNA, 25 bp, Homo sapien
cttaaatccctcctgtttctggaca

SEQ ID NO: 1019381 - DNA, 25 bp, Homo sapien
gcttggctactctccacttttgaga

SEQ ID NO: 1019382 - DNA, 25 bp, Homo sapien
gaatatttagtgtgactggcattaa

SEQ ID NO: 1019383 - DNA, 25 bp, Homo sapien
gaatttactgcacctctatggttgt

SEQ ID NO: 1019384 - DNA, 25 bp, Homo sapien
gagacttctgtactagtgcacagcc

SEQ ID NO: 1019385 - DNA, 25 bp, Homo sapien
gataacgaagtcagccacgaagcag

SEQ ID NO: 1019386 - DNA, 25 bp, Homo sapien
cagtgaaaacttttttgagttgaga

SEQ ID NO: 1019387 - DNA, 25 bp, Homo sapien
gtccacactgcatgtacatcagtga

SEQ ID NO: 1019388 - DNA, 25 bp, Homo sapien
gcagctgtgctcactttcaggaagc

SEQ ID NO: 1019389 - DNA, 25 bp, Homo sapien
agaggtttctctctccctgagttca

SEQ ID NO: 1019390 - DNA, 25 bp, Homo sapien
tttctctctccctgagttcactgga

SEQ ID NO: 1019391 - DNA, 25 bp, Homo sapien
ggtttctctctccctgagttcactg

SEQ ID NO: 1019392 - DNA, 25 bp, Homo sapien
tctctctccctgagttcactggatt

SEQ ID NO: 1019393 - DNA, 25 bp, Homo sapien
accatggccgacctgctcgctctcg

SEQ ID NO: 1019394 - DNA, 25 bp, Homo sapien
gatcctgaagccaccatggccgacc

SEQ ID NO: 1019395 - DNA, 25 bp, Homo sapien
tcgctctcgcctcgatcaggcatta

SEQ ID NO: 1019396 - DNA, 25 bp, Homo sapien
cctcgatcaggcattaatgggatca

SEQ ID NO: 1019397 - DNA, 25 bp, Homo sapien
gaatcctaagtcgtggaagccagca

SEQ ID NO: 1019398 - DNA, 25 bp, Homo sapien
caagcgcgttgtgacgcagcagtcc

SEQ ID NO: 1019399 - DNA, 25 bp, Homo sapien
cctcgatgtgttcgaaaggtgacac

SEQ ID NO: 1019400 - DNA, 25 bp, Homo sapien
tctgtatgaaaggtctgcccattgc

SEQ ID NO: 1019401 - DNA, 25 bp, Homo sapien
caaaacggtgttgctcgctgatgca

SEQ ID NO: 1019402 - DNA, 25 bp, Homo sapien
aactgtgagagaaccgcctagggaa

SEQ ID NO: 1019403 - DNA, 25 bp, Homo sapien
tctcgatatccttgcgggtggcctt

SEQ ID NO: 1019404 - DNA, 25 bp, Homo sapien
ttgcactggtatggcgagatgccca

SEQ ID NO: 1019405 - DNA, 25 bp, Homo sapien
ttgcagtcaccaagggcagcgcagc

SEQ ID NO: 1019406 - DNA, 25 bp, Homo sapien
cttgcagtcaccaagggcagcgcag

SEQ ID NO: 1019407 - DNA, 25 bp, Homo sapien
gccccgacgcctcagcggccggcgc

SEQ ID NO: 1019408 - DNA, 25 bp, Homo sapien
cgccccgacgcctcagcggccggcg

SEQ ID NO: 1019409 - DNA, 25 bp, Homo sapien
tgaagtccaccgcaaagctactggc

SEQ ID NO: 1019410 - DNA, 25 bp, Homo sapien
agggccaggcccttctgcgagaagt

SEQ ID NO: 1019411 - DNA, 25 bp, Homo sapien
ggctccaacttgatcgagacatggg

SEQ ID NO: 1019412 - DNA, 25 bp, Homo sapien
gctactggcgggctccaacttgatc

SEQ ID NO: 1019413 - DNA, 25 bp, Homo sapien
tgagtgttgtcctccgctgtctgca

SEQ ID NO: 1019414 - DNA, 25 bp, Homo sapien
tgtctgaagccgtggtgttactgcc

SEQ ID NO: 1019415 - DNA, 25 bp, Homo sapien
tgttactgccagtgcttgcgggccc

SEQ ID NO: 1019416 - DNA, 25 bp, Homo sapien
tgcaggcagttggtgtacgagttcc

SEQ ID NO: 1019417 - DNA, 25 bp, Homo sapien
tgaggcgacgccatgagtgatctga

SEQ ID NO: 1019418 - DNA, 25 bp, Homo sapien
aacgccccggatgaacacttagtag

SEQ ID NO: 1019419 - DNA, 25 bp, Homo sapien
cacttagtagaatgctgcccttgga

SEQ ID NO: 1019420 - DNA, 25 bp, Homo sapien
taccacctccggaagggatgaggcg

SEQ ID NO: 1019421 - DNA, 25 bp, Homo sapien
cttggggatggacaggttgatgggc

SEQ ID NO: 1019422 - DNA, 25 bp, Homo sapien
tttttgtaacaagatgacagcctga

SEQ ID NO: 1019423 - DNA, 25 bp, Homo sapien
ctctgtatttggcagaagtgtacac

SEQ ID NO: 1019424 - DNA, 25 bp, Homo sapien
cacaggactgggtacaaacggccaa

SEQ ID NO: 1019425 - DNA, 25 bp, Homo sapien
tacaaacggccaaagctgtctttta

SEQ ID NO: 1019426 - DNA, 25 bp, Homo sapien
tccagggggcgccattcatacagag

SEQ ID NO: 1019427 - DNA, 25 bp, Homo sapien
ttcatacagagcctgaaggtgtgga

SEQ ID NO: 1019428 - DNA, 25 bp, Homo sapien
tggctgtgtcacacgactccagggg

SEQ ID NO: 1019429 - DNA, 25 bp, Homo sapien
tacagagcctgaaggtgtggacctg

SEQ ID NO: 1019430 - DNA, 25 bp, Homo sapien
gccagaggggccacgtgttttccca

SEQ ID NO: 1019431 - DNA, 25 bp, Homo sapien
cagaggggccacgtgttttcccagg

SEQ ID NO: 1019432 - DNA, 25 bp, Homo sapien
ctgtgaatgcacagcaagggcctgg

SEQ ID NO: 1019433 - DNA, 25 bp, Homo sapien
cctgtgaatgcacagcaagggcctg

SEQ ID NO: 1019434 - DNA, 25 bp, Homo sapien
aaaaccatcaatgactaaaatgatc

SEQ ID NO: 1019435 - DNA, 25 bp, Homo sapien
tgtttattctcctgggatcattggc

SEQ ID NO: 1019436 - DNA, 25 bp, Homo sapien
tctcctgggatcattggcagttgtt

SEQ ID NO: 1019437 - DNA, 25 bp, Homo sapien
aaaaaaccatcaatgactaaaatga

SEQ ID NO: 1019438 - DNA, 25 bp, Homo sapien
tgggatccaacatcactctcttttg

SEQ ID NO: 1019439 - DNA, 25 bp, Homo sapien
taactccgtgtttgcgcaactggtg

SEQ ID NO: 1019440 - DNA, 25 bp, Homo sapien
tcagggaacaggtggtaactccgtg

SEQ ID NO: 1019441 - DNA, 25 bp, Homo sapien
gataagcccgtttcttctcagggaa

SEQ ID NO: 1019442 - DNA, 25 bp, Homo sapien
tgctacaattcttaaccgaactcct

SEQ ID NO: 1019443 - DNA, 25 bp, Homo sapien
tacaattcttaaccgaactcctctc

SEQ ID NO: 1019444 - DNA, 25 bp, Homo sapien
aattcttaaccgaactcctctctct

SEQ ID NO: 1019445 - DNA, 25 bp, Homo sapien
tttgctacaattcttaaccgaactc

SEQ ID NO: 1019446 - DNA, 25 bp, Homo sapien
taatcagtgccaactggcgggatat

SEQ ID NO: 1019447 - DNA, 25 bp, Homo sapien
gatggagaaccccagcagtccgagc

SEQ ID NO: 1019448 - DNA, 25 bp, Homo sapien
tggcgggatatctaagtggcctgca

SEQ ID NO: 1019449 - DNA, 25 bp, Homo sapien
ccccagcagtccgagcggatggagt

SEQ ID NO: 1019450 - DNA, 25 bp, Homo sapien
tccagcacggagttactaagactta

SEQ ID NO: 1019451 - DNA, 25 bp, Homo sapien
cttggtgctgaaccgaagctaagac

SEQ ID NO: 1019452 - DNA, 25 bp, Homo sapien
caccatggactgtgaccacaactaa

SEQ ID NO: 1019453 - DNA, 25 bp, Homo sapien
aattccgactcagctttgtgtctgc

SEQ ID NO: 1019454 - DNA, 25 bp, Homo sapien
cgaattaaaaacagccctatgtagg

SEQ ID NO: 1019455 - DNA, 25 bp, Homo sapien
aagggagagcttaaacactttcatg

SEQ ID NO: 1019456 - DNA, 25 bp, Homo sapien
taaaggcggccaccattaagggaga

SEQ ID NO: 1019457 - DNA, 25 bp, Homo sapien
cctgaggtgtagtccatgctgacat

SEQ ID NO: 1019458 - DNA, 25 bp, Homo sapien
taaggccaggtgctgtataaatccc

SEQ ID NO: 1019459 - DNA, 25 bp, Homo sapien
gataatggagagagatcacccggag

SEQ ID NO: 1019460 - DNA, 25 bp, Homo sapien
tcgggcccttcctttgcgcggataa

SEQ ID NO: 1019461 - DNA, 25 bp, Homo sapien
tcacccggagtacaatgaaaggcca

SEQ ID NO: 1019462 - DNA, 25 bp, Homo sapien
cttgaatcatttcaacagagagcat

SEQ ID NO: 1019463 - DNA, 25 bp, Homo sapien
aatgtctgggccacattccaaggaa

SEQ ID NO: 1019464 - DNA, 25 bp, Homo sapien
ctgggccacattccaaggaaaaact

SEQ ID NO: 1019465 - DNA, 25 bp, Homo sapien
ctagatgttcgtttttcttgaatca

SEQ ID NO: 1019466 - DNA, 25 bp, Homo sapien
cacctgttacatcccccaggaggac

SEQ ID NO: 1019467 - DNA, 25 bp, Homo sapien
atcccccaggaggaccaagatgacc

SEQ ID NO: 1019468 - DNA, 25 bp, Homo sapien
catcccccaggaggaccaagatgac

SEQ ID NO: 1019469 - DNA, 25 bp, Homo sapien
tgttacatcccccaggaggaccaag

SEQ ID NO: 1019470 - DNA, 25 bp, Homo sapien
gggcaagcacagcggggagggctca

SEQ ID NO: 1019471 - DNA, 25 bp, Homo sapien
ggagggctcagaggggcaccaccag

SEQ ID NO: 1019472 - DNA, 25 bp, Homo sapien
ggctcagaggggcaccaccaggtac

SEQ ID NO: 1019473 - DNA, 25 bp, Homo sapien
gaggggcaccaccaggtacgcccat

SEQ ID NO: 1019474 - DNA, 25 bp, Homo sapien
tcttcccacaggtgtcgcaggcgag

SEQ ID NO: 1019475 - DNA, 25 bp, Homo sapien
tgaggtgaggtctagcacttcgccc

SEQ ID NO: 1019476 - DNA, 25 bp, Homo sapien
tgtcgcaggcgagcttctgctcctg

SEQ ID NO: 1019477 - DNA, 25 bp, Homo sapien
aggctctggttgctcgacgcgtcct

SEQ ID NO: 1019478 - DNA, 25 bp, Homo sapien
tggcggccgtgcgccttccggtggc

SEQ ID NO: 1019479 - DNA, 25 bp, Homo sapien
cctggcggccgtgcgccttccggtg

SEQ ID NO: 1019480 - DNA, 25 bp, Homo sapien
ctggcggccgtgcgccttccggtgg

SEQ ID NO: 1019481 - DNA, 25 bp, Homo sapien
tcttgtcatcgtcgctcttctctga

SEQ ID NO: 1019482 - DNA, 25 bp, Homo sapien
tgaggaccttttctcggccgcgctc

SEQ ID NO: 1019483 - DNA, 25 bp, Homo sapien
tgtgtgggagcgcatgtgccgggtc

SEQ ID NO: 1019484 - DNA, 25 bp, Homo sapien
gaaccgcttgttgcacacgctgcag

SEQ ID NO: 1019485 - DNA, 25 bp, Homo sapien
acgtaagcaaacgttctctcggtgg

SEQ ID NO: 1019486 - DNA, 25 bp, Homo sapien
cggcaacgtaagcaaacgttctctc

SEQ ID NO: 1019487 - DNA, 25 bp, Homo sapien
caacgtaagcaaacgttctctcggt

SEQ ID NO: 1019488 - DNA, 25 bp, Homo sapien
agcaaacgttctctcggtggcctcc

SEQ ID NO: 1019489 - DNA, 25 bp, Homo sapien
tatatctctggactccatgagcata

SEQ ID NO: 1019490 - DNA, 25 bp, Homo sapien
tcaggtctttgtgtcaaagtaagcg

SEQ ID NO: 1019491 - DNA, 25 bp, Homo sapien
ggactccatgagcatattcaggtct

SEQ ID NO: 1019492 - DNA, 25 bp, Homo sapien
ttgtgtcaaagtaagcgcccctgct

SEQ ID NO: 1019493 - DNA, 25 bp, Homo sapien
cacatgtgttcactgcgggctgcag

SEQ ID NO: 1019494 - DNA, 25 bp, Homo sapien
agggcagagccgactgcgctgggtc

SEQ ID NO: 1019495 - DNA, 25 bp, Homo sapien
aagaatatccctcttctgagagcca

SEQ ID NO: 1019496 - DNA, 25 bp, Homo sapien
ttcacacgggcaagcgcagggcaga

SEQ ID NO: 1019497 - DNA, 25 bp, Homo sapien
ctctgtttgctggttcaagctgtca

SEQ ID NO: 1019498 - DNA, 25 bp, Homo sapien
tcagccagaggcctcttccttgaac

SEQ ID NO: 1019499 - DNA, 25 bp, Homo sapien
ccagcaaactgaggacggacaagct

SEQ ID NO: 1019500 - DNA, 25 bp, Homo sapien
aatgaggctcccaggctatgtgcgg

SEQ ID NO: 1019501 - DNA, 25 bp, Homo sapien
aaaaggcaccagtacccactgcacc

SEQ ID NO: 1019502 - DNA, 25 bp, Homo sapien
ggcaccagtacccactgcaccctgc

SEQ ID NO: 1019503 - DNA, 25 bp, Homo sapien
ttccattaaccaaaaggcaccagta

SEQ ID NO: 1019504 - DNA, 25 bp, Homo sapien
aaccaaaaggcaccagtacccactg

SEQ ID NO: 1019505 - DNA, 25 bp, Homo sapien
ggttcgctcgcaggtctgacatttg

SEQ ID NO: 1019506 - DNA, 25 bp, Homo sapien
ttccggctccgggtgacagccatgt

SEQ ID NO: 1019507 - DNA, 25 bp, Homo sapien
tggtggcgaaccaggctgtgcttca

SEQ ID NO: 1019508 - DNA, 25 bp, Homo sapien
cgctgtgggtggactcattctcgct

SEQ ID NO: 1019509 - DNA, 25 bp, Homo sapien
cacgagctgggaggcgccatcagct

SEQ ID NO: 1019510 - DNA, 25 bp, Homo sapien
ctctgggttaaggtcaccctggcca

SEQ ID NO: 1019511 - DNA, 25 bp, Homo sapien
gctgggaggcgccatcagctgtggc

SEQ ID NO: 1019512 - DNA, 25 bp, Homo sapien
tctctgggttaaggtcaccctggcc

SEQ ID NO: 1019513 - DNA, 25 bp, Homo sapien
tgttttccataggttaagacgccag

SEQ ID NO: 1019514 - DNA, 25 bp, Homo sapien
taaggctatggcactgagcgagcag

SEQ ID NO: 1019515 - DNA, 25 bp, Homo sapien
agtagaagagctaccacccgagggt

SEQ ID NO: 1019516 - DNA, 25 bp, Homo sapien
ggcactgaggaaaccccatgaagta

SEQ ID NO: 1019517 - DNA, 25 bp, Homo sapien
tggatgcatgcatcctcactccacc

SEQ ID NO: 1019518 - DNA, 25 bp, Homo sapien
gatgcctgttccctggatgcatgca

SEQ ID NO: 1019519 - DNA, 25 bp, Homo sapien
ggccctggcttcttgatgcctgttc

SEQ ID NO: 1019520 - DNA, 25 bp, Homo sapien
ttctccaaagtcatctctgcagtgc

SEQ ID NO: 1019521 - DNA, 25 bp, Homo sapien
agtgattattgcgagcggcagcccc

SEQ ID NO: 1019522 - DNA, 25 bp, Homo sapien
gactacgagggtacagatcaaggct

SEQ ID NO: 1019523 - DNA, 25 bp, Homo sapien
aagactgggaatacctcgctcacga

SEQ ID NO: 1019524 - DNA, 25 bp, Homo sapien
caccgcagcgtagagtttagtcaca

SEQ ID NO: 1019525 - DNA, 25 bp, Homo sapien
ttgcttaaatggtttgatacagaac

SEQ ID NO: 1019526 - DNA, 25 bp, Homo sapien
aacttgtgattctctgttcatgtgg

SEQ ID NO: 1019527 - DNA, 25 bp, Homo sapien
tgggctgaaatcactaggatcaatt

SEQ ID NO: 1019528 - DNA, 25 bp, Homo sapien
ccagttttgtacataacatgtagca

SEQ ID NO: 1019529 - DNA, 25 bp, Homo sapien
agaggcgaggcggacttcttaggca

SEQ ID NO: 1019530 - DNA, 25 bp, Homo sapien
aagaggcgaggcggacttcttaggc

SEQ ID NO: 1019531 - DNA, 25 bp, Homo sapien
gaggcgaggcggacttcttaggcat

SEQ ID NO: 1019532 - DNA, 25 bp, Homo sapien
acgtctttcaacagaggggcctgaa

SEQ ID NO: 1019533 - DNA, 25 bp, Homo sapien
tcaggcatgcggatcccccaagctc

SEQ ID NO: 1019534 - DNA, 25 bp, Homo sapien
cagggctagtacatctccacctgcc

SEQ ID NO: 1019535 - DNA, 25 bp, Homo sapien
atgtgtgttaaattctacgtctttc

SEQ ID NO: 1019536 - DNA, 25 bp, Homo sapien
ccgagtccgccatccaccttattct

SEQ ID NO: 1019537 - DNA, 25 bp, Homo sapien
ggagaatccacagccgtctctgcag

SEQ ID NO: 1019538 - DNA, 25 bp, Homo sapien
tttgagggggagaatccacagccgt

SEQ ID NO: 1019539 - DNA, 25 bp, Homo sapien
agtccgccatccaccttattctgaa

SEQ ID NO: 1019540 - DNA, 25 bp, Homo sapien
gaaggaacctctggagggccaagat

SEQ ID NO: 1019541 - DNA, 25 bp, Homo sapien
cactcgggtttaggcagtggctgag

SEQ ID NO: 1019542 - DNA, 25 bp, Homo sapien
gaatccacaaggatggcaaacaggc

SEQ ID NO: 1019543 - DNA, 25 bp, Homo sapien
gatcggcactctctaaagccatatg

SEQ ID NO: 1019544 - DNA, 25 bp, Homo sapien
gaggtgggcacatgcctcagaccag

SEQ ID NO: 1019545 - DNA, 25 bp, Homo sapien
gatgtctgcagtggacccacaagtc

SEQ ID NO: 1019546 - DNA, 25 bp, Homo sapien
caagaatgacgtgtgacccagaggt

SEQ ID NO: 1019547 - DNA, 25 bp, Homo sapien
gtagtccccaagctggctgcgcata

SEQ ID NO: 1019548 - DNA, 25 bp, Homo sapien
ctgagctccggtcccagaatcctcc

SEQ ID NO: 1019549 - DNA, 25 bp, Homo sapien
gggacccatgactttcacaggcaag

SEQ ID NO: 1019550 - DNA, 25 bp, Homo sapien
gatggtgtataccaggatcttgttc

SEQ ID NO: 1019551 - DNA, 25 bp, Homo sapien
tcctccggccttcccggcatgtggt

SEQ ID NO: 1019552 - DNA, 25 bp, Homo sapien
ccctaatgctgatggagagtgtcct

SEQ ID NO: 1019553 - DNA, 25 bp, Homo sapien
gatttataacttgcccagcacaggc

SEQ ID NO: 1019554 - DNA, 25 bp, Homo sapien
ggtcatgcgttctcccgtgagcagt

SEQ ID NO: 1019555 - DNA, 25 bp, Homo sapien
tcattgcgatggttgtgtcggtccc

SEQ ID NO: 1019556 - DNA, 25 bp, Homo sapien
tggatatccagctctggggggggcc

SEQ ID NO: 1019557 - DNA, 25 bp, Homo sapien
gagttgctggatatccagctctggg

SEQ ID NO: 1019558 - DNA, 25 bp, Homo sapien
ctggatatccagctctggggggggc

SEQ ID NO: 1019559 - DNA, 25 bp, Homo sapien
tgggagttgctggatatccagctct

SEQ ID NO: 1019560 - DNA, 25 bp, Homo sapien
ttctgggcatccatgcagtgccttg

SEQ ID NO: 1019561 - DNA, 25 bp, Homo sapien
cacttaggagcatttctgggcatcc

SEQ ID NO: 1019562 - DNA, 25 bp, Homo sapien
gccacttaggagcatttctgggcat

SEQ ID NO: 1019563 - DNA, 25 bp, Homo sapien
catcacccgtggggcttggtcacgt

SEQ ID NO: 1019564 - DNA, 25 bp, Homo sapien
agcccctgccacgtgatggttggaa

SEQ ID NO: 1019565 - DNA, 25 bp, Homo sapien
aaccgtgcgacccatgcagtagggc

SEQ ID NO: 1019566 - DNA, 25 bp, Homo sapien
tgctgtttctgggtggagatgtccc

SEQ ID NO: 1019567 - DNA, 25 bp, Homo sapien
gttggaacgcgtaccttagagcttc

SEQ ID NO: 1019568 - DNA, 25 bp, Homo sapien
ccttgatgcccgtccgatgagtgtg

SEQ ID NO: 1019569 - DNA, 25 bp, Homo sapien
tcatgggcggtacagcagtgactga

SEQ ID NO: 1019570 - DNA, 25 bp, Homo sapien
actgaacaacccattcccgggtctg

SEQ ID NO: 1019571 - DNA, 25 bp, Homo sapien
tggttatcctcaggctcccttgatg

SEQ ID NO: 1019572 - DNA, 25 bp, Homo sapien
cttgtccaggatcagggccttggca

SEQ ID NO: 1019573 - DNA, 25 bp, Homo sapien
ctttatgcccacaagagtccaagcc

SEQ ID NO: 1019574 - DNA, 25 bp, Homo sapien
gcatctaggtgagcacaagtgctcc

SEQ ID NO: 1019575 - DNA, 25 bp, Homo sapien
tatcagatcctgactcttctcttct

SEQ ID NO: 1019576 - DNA, 25 bp, Homo sapien
ccccaagtatggtgttttgtacaca

SEQ ID NO: 1019577 - DNA, 25 bp, Homo sapien
taacctcctgcttgaactagtctgc

SEQ ID NO: 1019578 - DNA, 25 bp, Homo sapien
taaagccaagatggaaacgagcact

SEQ ID NO: 1019579 - DNA, 25 bp, Homo sapien
tgaaatcgcatatagccccaagtat

SEQ ID NO: 1019580 - DNA, 25 bp, Homo sapien
tatggtcttctctctacagcgagga

SEQ ID NO: 1019581 - DNA, 25 bp, Homo sapien
tcttgtgcccgtctaattggacacc

SEQ ID NO: 1019582 - DNA, 25 bp, Homo sapien
ggataaccccgtctgtgtgcatcta

SEQ ID NO: 1019583 - DNA, 25 bp, Homo sapien
gaggaatctgttgactaactccagg

SEQ ID NO: 1019584 - DNA, 25 bp, Homo sapien
caaaaacaattagccgagcgaggtg

SEQ ID NO: 1019585 - DNA, 25 bp, Homo sapien
ttgtagtgagtcaaggttgcaccac

SEQ ID NO: 1019586 - DNA, 25 bp, Homo sapien
aacaaaaacaattagccgagcgagg

SEQ ID NO: 1019587 - DNA, 25 bp, Homo sapien
agaacaaaaacaattagccgagcga

SEQ ID NO: 1019588 - DNA, 25 bp, Homo sapien
agccctaaatagtctgattctgtga

SEQ ID NO: 1019589 - DNA, 25 bp, Homo sapien
tctgattctgtgacctacaaaccct

SEQ ID NO: 1019590 - DNA, 25 bp, Homo sapien
gaagtatcagccctaaatagtctga

SEQ ID NO: 1019591 - DNA, 25 bp, Homo sapien
tgagatatgcttgaagtatcagccc

SEQ ID NO: 1019592 - DNA, 25 bp, Homo sapien
gacagtgccctggccactaagcaaa

SEQ ID NO: 1019593 - DNA, 25 bp, Homo sapien
ctagcgtgggaattaggagacctct

SEQ ID NO: 1019594 - DNA, 25 bp, Homo sapien
cagtgccctggccactaagcaaagg

SEQ ID NO: 1019595 - DNA, 25 bp, Homo sapien
tggtatggtgtgctagcgtgggaat

SEQ ID NO: 1019596 - DNA, 25 bp, Homo sapien
gtagaaccctattactctttgaaga

SEQ ID NO: 1019597 - DNA, 25 bp, Homo sapien
tagtatggttcgtaagtattcctgg

SEQ ID NO: 1019598 - DNA, 25 bp, Homo sapien
cctggtgatacgctagtattggcaa

SEQ ID NO: 1019599 - DNA, 25 bp, Homo sapien
tctagttcacaattaggtagaaccc

SEQ ID NO: 1019600 - DNA, 25 bp, Homo sapien
tacggattttgcttaataggcacag

SEQ ID NO: 1019601 - DNA, 25 bp, Homo sapien
taaagtctccaaattgcagtcaaag

SEQ ID NO: 1019602 - DNA, 25 bp, Homo sapien
taggcacagtgaggcattaaaaaga

SEQ ID NO: 1019603 - DNA, 25 bp, Homo sapien
gcccggctcacagggtaaggcttct

SEQ ID NO: 1019604 - DNA, 25 bp, Homo sapien
aatgtctccttgatgaacagaatca

SEQ ID NO: 1019605 - DNA, 25 bp, Homo sapien
gatgaacagaatcatggtctttaaa

SEQ ID NO: 1019606 - DNA, 25 bp, Homo sapien
gaacagaatcatggtctttaaaaac

SEQ ID NO: 1019607 - DNA, 25 bp, Homo sapien
taaatgtctccttgatgaacagaat

SEQ ID NO: 1019608 - DNA, 25 bp, Homo sapien
ggcccactgttcactttttgaatgg

SEQ ID NO: 1019609 - DNA, 25 bp, Homo sapien
tacctccaacttagtaaaaagcagc

SEQ ID NO: 1019610 - DNA, 25 bp, Homo sapien
agaacaccttgcagctgacttgcaa

SEQ ID NO: 1019611 - DNA, 25 bp, Homo sapien
tagaactaaaatcaatgtttgcccc

SEQ ID NO: 1019612 - DNA, 25 bp, Homo sapien
gaatacctggtactaacgtaggcag

SEQ ID NO: 1019613 - DNA, 25 bp, Homo sapien
aagagaagttgccttggtccacaca

SEQ ID NO: 1019614 - DNA, 25 bp, Homo sapien
tatgaacaattaagaggctctcccc

SEQ ID NO: 1019615 - DNA, 25 bp, Homo sapien
tgtgtatcaaacctatccccggatg

SEQ ID NO: 1019616 - DNA, 25 bp, Homo sapien
tttagcttacgatgcagaaactgcc

SEQ ID NO: 1019617 - DNA, 25 bp, Homo sapien
tagatactcttatgtggtccaccag

SEQ ID NO: 1019618 - DNA, 25 bp, Homo sapien
ggtccaccagtggtacataacatga

SEQ ID NO: 1019619 - DNA, 25 bp, Homo sapien
gcatgtaacatatcagcagttatcc

SEQ ID NO: 1019620 - DNA, 25 bp, Homo sapien
taaagtaagactggaaagcttgctc

SEQ ID NO: 1019621 - DNA, 25 bp, Homo sapien
gatgcagtcttcaatcaaacagtta

SEQ ID NO: 1019622 - DNA, 25 bp, Homo sapien
acagttacagttattgaaagagagg

SEQ ID NO: 1019623 - DNA, 25 bp, Homo sapien
tagatggagaaacgtaagtgaaagt

SEQ ID NO: 1019624 - DNA, 25 bp, Homo sapien
gctgagcagccacgtcggcggcggt

SEQ ID NO: 1019625 - DNA, 25 bp, Homo sapien
tgcgcggtacgtgtcccgcccctcg

SEQ ID NO: 1019626 - DNA, 25 bp, Homo sapien
gagcccggatgaagagtaacgccat

SEQ ID NO: 1019627 - DNA, 25 bp, Homo sapien
ggcaaaggcccgtgcgcggtacgtg

SEQ ID NO: 1019628 - DNA, 25 bp, Homo sapien
ttgtatcttctcacaccttccttta

SEQ ID NO: 1019629 - DNA, 25 bp, Homo sapien
tcacaccttcctttataactcttca

SEQ ID NO: 1019630 - DNA, 25 bp, Homo sapien
gtatcttctcacaccttcctttata

SEQ ID NO: 1019631 - DNA, 25 bp, Homo sapien
ttctcacaccttcctttataactct

SEQ ID NO: 1019632 - DNA, 25 bp, Homo sapien
cttgaggatttgctccggcaatcat

SEQ ID NO: 1019633 - DNA, 25 bp, Homo sapien
tctccttgaggatttgctccggcaa

SEQ ID NO: 1019634 - DNA, 25 bp, Homo sapien
cgtatctccttgaggatttgctccg

SEQ ID NO: 1019635 - DNA, 25 bp, Homo sapien
tccttgaggatttgctccggcaatc

SEQ ID NO: 1019636 - DNA, 25 bp, Homo sapien
cctctggtctgtttggtctcttgtc

SEQ ID NO: 1019637 - DNA, 25 bp, Homo sapien
ctgtttggtctcttgtcctcttgac

SEQ ID NO: 1019638 - DNA, 25 bp, Homo sapien
ctggtctgtttggtctcttgtcctc

SEQ ID NO: 1019639 - DNA, 25 bp, Homo sapien
tcttgtcctcttgactctgacccat

SEQ ID NO: 1019640 - DNA, 25 bp, Homo sapien
aacagcgtagagttgcatacagacc

SEQ ID NO: 1019641 - DNA, 25 bp, Homo sapien
tgcatacagacctggagagggctct

SEQ ID NO: 1019642 - DNA, 25 bp, Homo sapien
cgtagagttgcatacagacctggag

SEQ ID NO: 1019643 - DNA, 25 bp, Homo sapien
cttaaacagcgtagagttgcataca

SEQ ID NO: 1019644 - DNA, 25 bp, Homo sapien
cctcgaagagtttaagatgtttgcc

SEQ ID NO: 1019645 - DNA, 25 bp, Homo sapien
actgttttgaaaatcggaggcccat

SEQ ID NO: 1019646 - DNA, 25 bp, Homo sapien
agaggagcccaagtctcctgtcacc

SEQ ID NO: 1019647 - DNA, 25 bp, Homo sapien
tttgcctatgccaagctcgcctgca

SEQ ID NO: 1019648 - DNA, 25 bp, Homo sapien
cagccaagtatgagctgtcctgtgg

SEQ ID NO: 1019649 - DNA, 25 bp, Homo sapien
aatgcctccgcgtaggtcctgggaa

SEQ ID NO: 1019650 - DNA, 25 bp, Homo sapien
gccaattgccaagctgagactctga

SEQ ID NO: 1019651 - DNA, 25 bp, Homo sapien
gagtatcgagtgatcacccagagga

SEQ ID NO: 1019652 - DNA, 25 bp, Homo sapien
tccagggaatcacctaaagagcttt

SEQ ID NO: 1019653 - DNA, 25 bp, Homo sapien
gtgtcatgagttcctgtctcccagg

SEQ ID NO: 1019654 - DNA, 25 bp, Homo sapien
aaatcccttaagaaccatgcagttg

SEQ ID NO: 1019655 - DNA, 25 bp, Homo sapien
tcattcatgcctaagaaaactaagg

SEQ ID NO: 1019656 - DNA, 25 bp, Homo sapien
tggtgtgtcgcggttcatcatggaa

SEQ ID NO: 1019657 - DNA, 25 bp, Homo sapien
ctacgttgacactgctgtgcgccat

SEQ ID NO: 1019658 - DNA, 25 bp, Homo sapien
cagaatgttcttggtgagaagggcc

SEQ ID NO: 1019659 - DNA, 25 bp, Homo sapien
tgtgtcgcggttcatcatggaaact

SEQ ID NO: 1019660 - DNA, 25 bp, Homo sapien
gcctacatcttcaaggcagtcagtg

SEQ ID NO: 1019661 - DNA, 25 bp, Homo sapien
agcctacatcttcaaggcagtcagt

SEQ ID NO: 1019662 - DNA, 25 bp, Homo sapien
cctacatcttcaaggcagtcagtga

SEQ ID NO: 1019663 - DNA, 25 bp, Homo sapien
gcttcccttggcacatcgtcgcgtg

SEQ ID NO: 1019664 - DNA, 25 bp, Homo sapien
agcatcctgggtgtttaactgtcaa

SEQ ID NO: 1019665 - DNA, 25 bp, Homo sapien
gctcctcttcacagttctgaccctg

SEQ ID NO: 1019666 - DNA, 25 bp, Homo sapien
tccttctgaccccttgccgttggct

SEQ ID NO: 1019667 - DNA, 25 bp, Homo sapien
gatatccgccttgcaaaccattcag

SEQ ID NO: 1019668 - DNA, 25 bp, Homo sapien
cgctctgcgatggaaaggaacggct

SEQ ID NO: 1019669 - DNA, 25 bp, Homo sapien
aaaggccttggcgtggatatccgcc

SEQ ID NO: 1019670 - DNA, 25 bp, Homo sapien
aggaacggctcagacggatgtaccc

SEQ ID NO: 1019671 - DNA, 25 bp, Homo sapien
tgtcagaggagtccgcgtcgtcgaa

SEQ ID NO: 1019672 - DNA, 25 bp, Homo sapien
agaggagtccgcgtcgtcgaattgc

SEQ ID NO: 1019673 - DNA, 25 bp, Homo sapien
agtccgcgtcgtcgaattgcccggg

SEQ ID NO: 1019674 - DNA, 25 bp, Homo sapien
ctgtcagaggagtccgcgtcgtcga

SEQ ID NO: 1019675 - DNA, 25 bp, Homo sapien
gagagacgctgagtgatgaaccact

SEQ ID NO: 1019676 - DNA, 25 bp, Homo sapien
gatgaaccactagtctccctctaaa

SEQ ID NO: 1019677 - DNA, 25 bp, Homo sapien
gtcaaggagagagccgtacccagag

SEQ ID NO: 1019678 - DNA, 25 bp, Homo sapien
taaaccgcaaacaagagtccacacc

SEQ ID NO: 1019679 - DNA, 25 bp, Homo sapien
tgagaaccgcagactcccttgacaa

SEQ ID NO: 1019680 - DNA, 25 bp, Homo sapien
acctgagaaccgcagactcccttga

SEQ ID NO: 1019681 - DNA, 25 bp, Homo sapien
cttgacaagtagctttcacttaact

SEQ ID NO: 1019682 - DNA, 25 bp, Homo sapien
ctctgccgcgtgaactgggagaaaa

SEQ ID NO: 1019683 - DNA, 25 bp, Homo sapien
gtcttgaaggtcttcaaacagaatg

SEQ ID NO: 1019684 - DNA, 25 bp, Homo sapien
tgtcttgaaggtcttcaaacagaat

SEQ ID NO: 1019685 - DNA, 25 bp, Homo sapien
tccattccagacataacccttggcg

SEQ ID NO: 1019686 - DNA, 25 bp, Homo sapien
gacataacccttggcgagttttcca

SEQ ID NO: 1019687 - DNA, 25 bp, Homo sapien
ttggcgagttttccaactccttcat

SEQ ID NO: 1019688 - DNA, 25 bp, Homo sapien
ctccttcatcccagtcccagtcatc

SEQ ID NO: 1019689 - DNA, 25 bp, Homo sapien
ccttacaaactcctaacacacttgg

SEQ ID NO: 1019690 - DNA, 25 bp, Homo sapien
cacttggtacttccagtatgagcag

SEQ ID NO: 1019691 - DNA, 25 bp, Homo sapien
gctccaggaagatgtaccatgttaa

SEQ ID NO: 1019692 - DNA, 25 bp, Homo sapien
gatgtaccatgttaatcctatggcc

SEQ ID NO: 1019693 - DNA, 25 bp, Homo sapien
aactgctgtcggaggtctgtcgatt

SEQ ID NO: 1019694 - DNA, 25 bp, Homo sapien
tttggctgaactgctgtcggaggtc

SEQ ID NO: 1019695 - DNA, 25 bp, Homo sapien
ttggctgaactgctgtcggaggtct

SEQ ID NO: 1019696 - DNA, 25 bp, Homo sapien
tgctgtcggaggtctgtcgatttgc

SEQ ID NO: 1019697 - DNA, 25 bp, Homo sapien
tctcaaatttccgtaagaccttgtc

SEQ ID NO: 1019698 - DNA, 25 bp, Homo sapien
caaatttccgtaagaccttgtctgc

SEQ ID NO: 1019699 - DNA, 25 bp, Homo sapien
attctcaaatttccgtaagaccttg

SEQ ID NO: 1019700 - DNA, 25 bp, Homo sapien
aatttccgtaagaccttgtctgctg

SEQ ID NO: 1019701 - DNA, 25 bp, Homo sapien
cggtgactttatttatgacggaatc

SEQ ID NO: 1019702 - DNA, 25 bp, Homo sapien
tatgacggaatcagtaacatttagc

SEQ ID NO: 1019703 - DNA, 25 bp, Homo sapien
ctttatttatgacggaatcagtaac

SEQ ID NO: 1019704 - DNA, 25 bp, Homo sapien
gacttttcggtgactttatttatga

SEQ ID NO: 1019705 - DNA, 25 bp, Homo sapien
ctgtctgccttatctttgatgcgat

SEQ ID NO: 1019706 - DNA, 25 bp, Homo sapien
tgtctgccttatctttgatgcgata

SEQ ID NO: 1019707 - DNA, 25 bp, Homo sapien
gtctgccttatctttgatgcgatac

SEQ ID NO: 1019708 - DNA, 25 bp, Homo sapien
gcaagatgtaggtctctaaactcga

SEQ ID NO: 1019709 - DNA, 25 bp, Homo sapien
aagcaagatgtaggtctctaaactc

SEQ ID NO: 1019710 - DNA, 25 bp, Homo sapien
aaaagcaagatgtaggtctctaaac

SEQ ID NO: 1019711 - DNA, 25 bp, Homo sapien
aagatgtaggtctctaaactcgaaa

SEQ ID NO: 1019712 - DNA, 25 bp, Homo sapien
catgactctaattcatccaatagtc

SEQ ID NO: 1019713 - DNA, 25 bp, Homo sapien
gaagggaaagcatcgcatggtggct

SEQ ID NO: 1019714 - DNA, 25 bp, Homo sapien
gaccatgactctaattcatccaata

SEQ ID NO: 1019715 - DNA, 25 bp, Homo sapien
ctgataatctctccaagaagggaaa

SEQ ID NO: 1019716 - DNA, 25 bp, Homo sapien
ttcttttcctgtgctaatgcagcca

SEQ ID NO: 1019717 - DNA, 25 bp, Homo sapien
tatgattcctctagtcaacatcttg

SEQ ID NO: 1019718 - DNA, 25 bp, Homo sapien
tgtgctaatgcagccatttatctct

SEQ ID NO: 1019719 - DNA, 25 bp, Homo sapien
tctctgttatgattcctctagtcaa

SEQ ID NO: 1019720 - DNA, 25 bp, Homo sapien
tgaacaccaaaatagaagttttata

SEQ ID NO: 1019721 - DNA, 25 bp, Homo sapien
ataaattttgattgctctgctctct

SEQ ID NO: 1019722 - DNA, 25 bp, Homo sapien
tttatcccgatctttgaacaccaaa

SEQ ID NO: 1019723 - DNA, 25 bp, Homo sapien
cacttacatatttatcccgatcttt

SEQ ID NO: 1019724 - DNA, 25 bp, Homo sapien
ccaactggagggaaaaatctgaact

SEQ ID NO: 1019725 - DNA, 25 bp, Homo sapien
caactggagggaaaaatctgaactt

SEQ ID NO: 1019726 - DNA, 25 bp, Homo sapien
aaatgtttattatttcaatcattcc

SEQ ID NO: 1019727 - DNA, 25 bp, Homo sapien
caatcattccattattattttaatg

SEQ ID NO: 1019728 - DNA, 25 bp, Homo sapien
ttcctttacaatagccatgacgaaa

SEQ ID NO: 1019729 - DNA, 25 bp, Homo sapien
tcctttacaatagccatgacgaaat

SEQ ID NO: 1019730 - DNA, 25 bp, Homo sapien
ctgattaagttcctcatttcttttt

SEQ ID NO: 1019731 - DNA, 25 bp, Homo sapien
tcctcatttctttttctgcccaagt

SEQ ID NO: 1019732 - DNA, 25 bp, Homo sapien
ctttttctgcccaagttttcaccat

SEQ ID NO: 1019733 - DNA, 25 bp, Homo sapien
ctcatttctttttctgcccaagttt

SEQ ID NO: 1019734 - DNA, 25 bp, Homo sapien
ggttctggacatggtatctctgctg

SEQ ID NO: 1019735 - DNA, 25 bp, Homo sapien
gacaagaacatgacttcttagcatt

SEQ ID NO: 1019736 - DNA, 25 bp, Homo sapien
taccgatgaaactcatgacaagaac

SEQ ID NO: 1019737 - DNA, 25 bp, Homo sapien
gtcatctttaccgatgaaactcatg

SEQ ID NO: 1019738 - DNA, 25 bp, Homo sapien
tgcaggtacaactcccgagccttgg

SEQ ID NO: 1019739 - DNA, 25 bp, Homo sapien
tcttctcatgtactgaatgacctgc

SEQ ID NO: 1019740 - DNA, 25 bp, Homo sapien
gagccttggattctgataactggac

SEQ ID NO: 1019741 - DNA, 25 bp, Homo sapien
tactgaatgacctgcaggtacaact

SEQ ID NO: 1019742 - DNA, 25 bp, Homo sapien
gtggtcgtgctccacggactgagac

SEQ ID NO: 1019743 - DNA, 25 bp, Homo sapien
gtcaatgatatacacgcctccaccg

SEQ ID NO: 1019744 - DNA, 25 bp, Homo sapien
tgacgttggcgcaatcctttctcaa

SEQ ID NO: 1019745 - DNA, 25 bp, Homo sapien
cacggactgagacacgtcaatgata

SEQ ID NO: 1019746 - DNA, 25 bp, Homo sapien
gcatcactgcaccaaacaatttagt

SEQ ID NO: 1019747 - DNA, 25 bp, Homo sapien
gagaaaattttacgccaacagctta

SEQ ID NO: 1019748 - DNA, 25 bp, Homo sapien
ttacataccatctcccagcaaatgg

SEQ ID NO: 1019749 - DNA, 25 bp, Homo sapien
caatgagctgtttcgaaaattgccg

SEQ ID NO: 1019750 - DNA, 25 bp, Homo sapien
gacagcaacactgtgcctcataaag

SEQ ID NO: 1019751 - DNA, 25 bp, Homo sapien
gcaacactgtgcctcataaagaaat

SEQ ID NO: 1019752 - DNA, 25 bp, Homo sapien
cagcaacactgtgcctcataaagaa

SEQ ID NO: 1019753 - DNA, 25 bp, Homo sapien
acagcaacactgtgcctcataaaga

SEQ ID NO: 1019754 - DNA, 25 bp, Homo sapien
aattcaaagagctcccgcacagtca

SEQ ID NO: 1019755 - DNA, 25 bp, Homo sapien
caaattcaaagagctcccgcacagt

SEQ ID NO: 1019756 - DNA, 25 bp, Homo sapien
gataagcatccatgttctcatgtgt

SEQ ID NO: 1019757 - DNA, 25 bp, Homo sapien
ctcatgtgtaatggatggatctgtg

SEQ ID NO: 1019758 - DNA, 25 bp, Homo sapien
ggatgtggagcgattaaaacccttg

SEQ ID NO: 1019759 - DNA, 25 bp, Homo sapien
taaacagtatggtgggttcctcaga

SEQ ID NO: 1019760 - DNA, 25 bp, Homo sapien
tggtgcagccactacagtaaacagt

SEQ ID NO: 1019761 - DNA, 25 bp, Homo sapien
gaaggtataagcaacccgtatgtcc

SEQ ID NO: 1019762 - DNA, 25 bp, Homo sapien
ccacatgatcttggctagaccgttc

SEQ ID NO: 1019763 - DNA, 25 bp, Homo sapien
tggctagaccgttcttccttggtcc

SEQ ID NO: 1019764 - DNA, 25 bp, Homo sapien
catccacatgatcttggctagaccg

SEQ ID NO: 1019765 - DNA, 25 bp, Homo sapien
tgatcttggctagaccgttcttcct

SEQ ID NO: 1019766 - DNA, 25 bp, Homo sapien
gatgcttggctaagctgtctgcaca

SEQ ID NO: 1019767 - DNA, 25 bp, Homo sapien
cagctgctacagtgaaaaaggtgga

SEQ ID NO: 1019768 - DNA, 25 bp, Homo sapien
ggaattacagttggcaagcgctgcc

SEQ ID NO: 1019769 - DNA, 25 bp, Homo sapien
gagagctgccgacaaacacagggca

SEQ ID NO: 1019770 - DNA, 25 bp, Homo sapien
ttatcttgttgggcattcatggcca

SEQ ID NO: 1019771 - DNA, 25 bp, Homo sapien
caatttcataattatgtccatatcc

SEQ ID NO: 1019772 - DNA, 25 bp, Homo sapien
taggaatatatgctcgcttaaacac

SEQ ID NO: 1019773 - DNA, 25 bp, Homo sapien
tgtccatatccctctcataattttt

SEQ ID NO: 1019774 - DNA, 25 bp, Homo sapien
aggcccagataggtttgggacagtc

SEQ ID NO: 1019775 - DNA, 25 bp, Homo sapien
ccagataggtttgggacagtcccct

SEQ ID NO: 1019776 - DNA, 25 bp, Homo sapien
ccctactacttttgaagagctgctt

SEQ ID NO: 1019777 - DNA, 25 bp, Homo sapien
tgggacagtcccctactacttttga

SEQ ID NO: 1019778 - DNA, 25 bp, Homo sapien
tgaaatattatctgccccacatcaa

SEQ ID NO: 1019779 - DNA, 25 bp, Homo sapien
gatagcaaacacaaactttgagccc

SEQ ID NO: 1019780 - DNA, 25 bp, Homo sapien
cataaggacctacgtaatcacctca

SEQ ID NO: 1019781 - DNA, 25 bp, Homo sapien
ctgtagcctaggctaaagtccaatg

SEQ ID NO: 1019782 - DNA, 25 bp, Homo sapien
cttcaatcctgtaacagtctggtat

SEQ ID NO: 1019783 - DNA, 25 bp, Homo sapien
tctgaatcagaacaagtcctttcct

SEQ ID NO: 1019784 - DNA, 25 bp, Homo sapien
cagagcactcagagcttccaatatc

SEQ ID NO: 1019785 - DNA, 25 bp, Homo sapien
acttgattttctaggagtgcaggga

SEQ ID NO: 1019786 - DNA, 25 bp, Homo sapien
tttttatcaatgtcagggtccgtgg

SEQ ID NO: 1019787 - DNA, 25 bp, Homo sapien
aatatccctaagaatgttattaaat

SEQ ID NO: 1019788 - DNA, 25 bp, Homo sapien
tatccctaagaatgttattaaatgt

SEQ ID NO: 1019789 - DNA, 25 bp, Homo sapien
agaaatatccctaagaatgttatta

SEQ ID NO: 1019790 - DNA, 25 bp, Homo sapien
atatccctaagaatgttattaaatg

SEQ ID NO: 1019791 - DNA, 25 bp, Homo sapien
gaagaataaaagtgagtgtaatgta

SEQ ID NO: 1019792 - DNA, 25 bp, Homo sapien
taaaagtgagtgtaatgtaaagaaa

SEQ ID NO: 1019793 - DNA, 25 bp, Homo sapien
ataaaagtgagtgtaatgtaaagaa

SEQ ID NO: 1019794 - DNA, 25 bp, Homo sapien
aagaataaaagtgagtgtaatgtaa

SEQ ID NO: 1019795 - DNA, 25 bp, Homo sapien
ctatttgccttttttcgtcttggct

SEQ ID NO: 1019796 - DNA, 25 bp, Homo sapien
atttgccttttttcgtcttggctgt

SEQ ID NO: 1019797 - DNA, 25 bp, Homo sapien
tatttgccttttttcgtcttggctg

SEQ ID NO: 1019798 - DNA, 25 bp, Homo sapien
acatttgaatccgtcttcacagaca

SEQ ID NO: 1019799 - DNA, 25 bp, Homo sapien
cacagacagtgccacgatgacaatc

SEQ ID NO: 1019800 - DNA, 25 bp, Homo sapien
tccagatgcagcttaagagttcagg

SEQ ID NO: 1019801 - DNA, 25 bp, Homo sapien
tcaacaccagacagagtcagtgact

SEQ ID NO: 1019802 - DNA, 25 bp, Homo sapien
ttatgaactgagaggtcctaactcc

SEQ ID NO: 1019803 - DNA, 25 bp, Homo sapien
aacatggccttataatcagatgacc

SEQ ID NO: 1019804 - DNA, 25 bp, Homo sapien
gctgaactgtgggtgaaattccctt

SEQ ID NO: 1019805 - DNA, 25 bp, Homo sapien
agatgggtctctggtgtgtacaaag

SEQ ID NO: 1019806 - DNA, 25 bp, Homo sapien
catgtcggagagtaagatcaaaaca

SEQ ID NO: 1019807 - DNA, 25 bp, Homo sapien
ctgaagataaactccccagatgtgt

SEQ ID NO: 1019808 - DNA, 25 bp, Homo sapien
gtcggagagtaagatcaaaacaaac

SEQ ID NO: 1019809 - DNA, 25 bp, Homo sapien
caaacacaagagttagaagatcctg

SEQ ID NO: 1019810 - DNA, 25 bp, Homo sapien
cctccacccatcaccgtttgctcta

SEQ ID NO: 1019811 - DNA, 25 bp, Homo sapien
acccatcaccgtttgctctacgcat

SEQ ID NO: 1019812 - DNA, 25 bp, Homo sapien
tgccctccacccatcaccgtttgct

SEQ ID NO: 1019813 - DNA, 25 bp, Homo sapien
tccccctggcttaggccagggcagg

SEQ ID NO: 1019814 - DNA, 25 bp, Homo sapien
acctgagcccacaagctgtgcactg

SEQ ID NO: 1019815 - DNA, 25 bp, Homo sapien
gcaactagatgctccatgaggctgc

SEQ ID NO: 1019816 - DNA, 25 bp, Homo sapien
atgaggctgccacgaaccgaaaaca

SEQ ID NO: 1019817 - DNA, 25 bp, Homo sapien
tgaccacttggcttacatgccagag

SEQ ID NO: 1019818 - DNA, 25 bp, Homo sapien
tgtacttgctcggaaaccaccgcag

SEQ ID NO: 1019819 - DNA, 25 bp, Homo sapien
caagcacgggtgtacttgctcggaa

SEQ ID NO: 1019820 - DNA, 25 bp, Homo sapien
gctcggaaaccaccgcagcaaagag

SEQ ID NO: 1019821 - DNA, 25 bp, Homo sapien
actgaaggcagcaagcacgggtgta

SEQ ID NO: 1019822 - DNA, 25 bp, Homo sapien
acattggctggcacaaagcccacac

SEQ ID NO: 1019823 - DNA, 25 bp, Homo sapien
agcgtccacccgcaggatccaaagg

SEQ ID NO: 1019824 - DNA, 25 bp, Homo sapien
acaaatgctggcttgctgggatgct

SEQ ID NO: 1019825 - DNA, 25 bp, Homo sapien
tccaaaggccccataatgtgccgaa

SEQ ID NO: 1019826 - DNA, 25 bp, Homo sapien
gacacttcgttttccatctagcaca

SEQ ID NO: 1019827 - DNA, 25 bp, Homo sapien
ctgttagtatttgcagacacttcgt

SEQ ID NO: 1019828 - DNA, 25 bp, Homo sapien
cacaggcggtgcatgtgctgccttc

SEQ ID NO: 1019829 - DNA, 25 bp, Homo sapien
ccagtgggcagcacttggcgtccca

SEQ ID NO: 1019830 - DNA, 25 bp, Homo sapien
caggggcaacccaagctgtgaagtc

SEQ ID NO: 1019831 - DNA, 25 bp, Homo sapien
tggcctcttggtccatccacagttt

SEQ ID NO: 1019832 - DNA, 25 bp, Homo sapien
ctcccaggggcaacccaagctgtga

SEQ ID NO: 1019833 - DNA, 25 bp, Homo sapien
gcaacccaagctgtgaagtctggcc

SEQ ID NO: 1019834 - DNA, 25 bp, Homo sapien
ctatgctggcgaactaccaaaggag

SEQ ID NO: 1019835 - DNA, 25 bp, Homo sapien
aacccaagagctgcctgattctcac

SEQ ID NO: 1019836 - DNA, 25 bp, Homo sapien
gcgaactaccaaaggagctcctctg

SEQ ID NO: 1019837 - DNA, 25 bp, Homo sapien
tccgggccttcaaacccaagagctg

SEQ ID NO: 1019838 - DNA, 25 bp, Homo sapien
caaaaagctaccgatgactgaatac

SEQ ID NO: 1019839 - DNA, 25 bp, Homo sapien
tatcattgtcatgaagtgaggacct

SEQ ID NO: 1019840 - DNA, 25 bp, Homo sapien
tgaggacctgtacgacctttaaagc

SEQ ID NO: 1019841 - DNA, 25 bp, Homo sapien
gctttttattatcatgggctggcaa

SEQ ID NO: 1019842 - DNA, 25 bp, Homo sapien
tgggcctcagccaagcggccgtgac

SEQ ID NO: 1019843 - DNA, 25 bp, Homo sapien
tcccaagatctcatctccaaggtgg

SEQ ID NO: 1019844 - DNA, 25 bp, Homo sapien
acctggccctcccaagatctcatct

SEQ ID NO: 1019845 - DNA, 25 bp, Homo sapien
caagatctcatctccaaggtgggcc

SEQ ID NO: 1019846 - DNA, 25 bp, Homo sapien
aagcctatgccaaggagccccagtt

SEQ ID NO: 1019847 - DNA, 25 bp, Homo sapien
gcctccttgtttgaaggcccctcat

SEQ ID NO: 1019848 - DNA, 25 bp, Homo sapien
agccagctttgcgatccccatggca

SEQ ID NO: 1019849 - DNA, 25 bp, Homo sapien
tgcctgggccgaaccacagctccca

SEQ ID NO: 1019850 - DNA, 25 bp, Homo sapien
tgagaagactccagcaccttgggtt

SEQ ID NO: 1019851 - DNA, 25 bp, Homo sapien
tagactataactagaggtgccgaca

SEQ ID NO: 1019852 - DNA, 25 bp, Homo sapien
aattcactgggaggtcattaggctg

SEQ ID NO: 1019853 - DNA, 25 bp, Homo sapien
ttggatgcaggcaggtaagacccac

SEQ ID NO: 1019854 - DNA, 25 bp, Homo sapien
tccaactgcttgtgccagagatctt

SEQ ID NO: 1019855 - DNA, 25 bp, Homo sapien
actgcttgtgccagagatctttcct

SEQ ID NO: 1019856 - DNA, 25 bp, Homo sapien
cttgtgccagagatctttcctaagc

SEQ ID NO: 1019857 - DNA, 25 bp, Homo sapien
cagagatctttcctaagcctacttc

SEQ ID NO: 1019858 - DNA, 25 bp, Homo sapien
tcaagtaactccgatgtcaggcccg

SEQ ID NO: 1019859 - DNA, 25 bp, Homo sapien
tgggtccactaatcagcctctcctg

SEQ ID NO: 1019860 - DNA, 25 bp, Homo sapien
tcaggcccgttgctcttagctgagc

SEQ ID NO: 1019861 - DNA, 25 bp, Homo sapien
tccttgggtccagccctagtcaagt

SEQ ID NO: 1019862 - DNA, 25 bp, Homo sapien
tttttaaatgtaccacgcttgctcg

SEQ ID NO: 1019863 - DNA, 25 bp, Homo sapien
cttgatggtctgtgctttttacgtc

SEQ ID NO: 1019864 - DNA, 25 bp, Homo sapien
aaatgtaccacgcttgctcggatgg

SEQ ID NO: 1019865 - DNA, 25 bp, Homo sapien
tggtctgtgctttttacgtcccgta

SEQ ID NO: 1019866 - DNA, 25 bp, Homo sapien
tgagatgcatcatttccaagctctt

SEQ ID NO: 1019867 - DNA, 25 bp, Homo sapien
ggcctgtatctgcagggtacatctg

SEQ ID NO: 1019868 - DNA, 25 bp, Homo sapien
gatgcatcatttccaagctcttgcc

SEQ ID NO: 1019869 - DNA, 25 bp, Homo sapien
catcatttccaagctcttgcctgtg

SEQ ID NO: 1019870 - DNA, 25 bp, Homo sapien
agtgaggaggcaaatgccatccttg

SEQ ID NO: 1019871 - DNA, 25 bp, Homo sapien
tgatggtagagcagcatccaagcca

SEQ ID NO: 1019872 - DNA, 25 bp, Homo sapien
ggtcgctggaaagacagattgagtc

SEQ ID NO: 1019873 - DNA, 25 bp, Homo sapien
catccttgatggtagagcagcatcc

SEQ ID NO: 1019874 - DNA, 25 bp, Homo sapien
cacaaagctgcctggtgtttatcat

SEQ ID NO: 1019875 - DNA, 25 bp, Homo sapien
ctcaaaccctcaagtgatgattcca

SEQ ID NO: 1019876 - DNA, 25 bp, Homo sapien
ttccacacaaagctgcctggtgttt

SEQ ID NO: 1019877 - DNA, 25 bp, Homo sapien
tctgctactcaaaccctcaagtgat

SEQ ID NO: 1019878 - DNA, 25 bp, Homo sapien
taaggatggctgctgccggcaattc

SEQ ID NO: 1019879 - DNA, 25 bp, Homo sapien
tgctgccggcaattctcattccaca

SEQ ID NO: 1019880 - DNA, 25 bp, Homo sapien
ggctgctgccggcaattctcattcc

SEQ ID NO: 1019881 - DNA, 25 bp, Homo sapien
ctctaaggatggctgctgccggcaa

SEQ ID NO: 1019882 - DNA, 25 bp, Homo sapien
aaggttacgtcctctgctgccttcc

SEQ ID NO: 1019883 - DNA, 25 bp, Homo sapien
cttctcctgccccaaaaacgggctg

SEQ ID NO: 1019884 - DNA, 25 bp, Homo sapien
ctgtttggcaaggttacgtcctctg

SEQ ID NO: 1019885 - DNA, 25 bp, Homo sapien
tgccccaaaaacgggctgtttggca

SEQ ID NO: 1019886 - DNA, 25 bp, Homo sapien
tgtatagcctgcagatctgatgttt

SEQ ID NO: 1019887 - DNA, 25 bp, Homo sapien
catggctgtgctggcaatgagaact

SEQ ID NO: 1019888 - DNA, 25 bp, Homo sapien
ggaaacccacgagccccatagagta

SEQ ID NO: 1019889 - DNA, 25 bp, Homo sapien
gcctgcagatctgatgtttactgta

SEQ ID NO: 1019890 - DNA, 25 bp, Homo sapien
tcttggccctgcttgtagtcactgt

SEQ ID NO: 1019891 - DNA, 25 bp, Homo sapien
gggctcttggccctgcttgtagtca

SEQ ID NO: 1019892 - DNA, 25 bp, Homo sapien
tagctctttagcctatcactgggct

SEQ ID NO: 1019893 - DNA, 25 bp, Homo sapien
ccctgcttgtagtcactgtctcctg

SEQ ID NO: 1019894 - DNA, 25 bp, Homo sapien
cagcttctgcttccacggcatctgg

SEQ ID NO: 1019895 - DNA, 25 bp, Homo sapien
cattaggatgccagtgcacggaggc

SEQ ID NO: 1019896 - DNA, 25 bp, Homo sapien
gcatctggctccgaatctggaccaa

SEQ ID NO: 1019897 - DNA, 25 bp, Homo sapien
agccacgacagcgtcagagcagctt

SEQ ID NO: 1019898 - DNA, 25 bp, Homo sapien
ttggcacaattattgttccttcttt

SEQ ID NO: 1019899 - DNA, 25 bp, Homo sapien
gtggccgcggctctttttggcacaa

SEQ ID NO: 1019900 - DNA, 25 bp, Homo sapien
tggcacaattattgttccttctttt

SEQ ID NO: 1019901 - DNA, 25 bp, Homo sapien
gccgcggctctttttggcacaatta

SEQ ID NO: 1019902 - DNA, 25 bp, Homo sapien
cttgggcacacatagggcacagttt

SEQ ID NO: 1019903 - DNA, 25 bp, Homo sapien
gcacacatagggcacagtttgtgca

SEQ ID NO: 1019904 - DNA, 25 bp, Homo sapien
acatagggcacagtttgtgcagcga

SEQ ID NO: 1019905 - DNA, 25 bp, Homo sapien
cacatagggcacagtttgtgcagcg

SEQ ID NO: 1019906 - DNA, 25 bp, Homo sapien
agtaacgtagctttacatacagctc

SEQ ID NO: 1019907 - DNA, 25 bp, Homo sapien
taacgtagctttacatacagctcgg

SEQ ID NO: 1019908 - DNA, 25 bp, Homo sapien
aacgtagctttacatacagctcggg

SEQ ID NO: 1019909 - DNA, 25 bp, Homo sapien
cgtagctttacatacagctcgggaa

SEQ ID NO: 1019910 - DNA, 25 bp, Homo sapien
tttacatggactttgctggcagttg

SEQ ID NO: 1019911 - DNA, 25 bp, Homo sapien
actcagctctttacatggactttgc

SEQ ID NO: 1019912 - DNA, 25 bp, Homo sapien
acatggactttgctggcagttgtgg

SEQ ID NO: 1019913 - DNA, 25 bp, Homo sapien
agctctttacatggactttgctggc

SEQ ID NO: 1019914 - DNA, 25 bp, Homo sapien
tagttctcgacagaccactgagtgc

SEQ ID NO: 1019915 - DNA, 25 bp, Homo sapien
cacagcaatgcggtttaggattcca

SEQ ID NO: 1019916 - DNA, 25 bp, Homo sapien
cactgagtgcagtttttctaaatct

SEQ ID NO: 1019917 - DNA, 25 bp, Homo sapien
taaaactgcttccacacgtataacc

SEQ ID NO: 1019918 - DNA, 25 bp, Homo sapien
caagaacacgaacggcttccagcta

SEQ ID NO: 1019919 - DNA, 25 bp, Homo sapien
cagctaccaaacatgcctgctctag

SEQ ID NO: 1019920 - DNA, 25 bp, Homo sapien
caggcatccccaagaacacgaacgg

SEQ ID NO: 1019921 - DNA, 25 bp, Homo sapien
gaacggcttccagctaccaaacatg

SEQ ID NO: 1019922 - DNA, 25 bp, Homo sapien
ttctgatacagtgcgtttccaaaat

SEQ ID NO: 1019923 - DNA, 25 bp, Homo sapien
cttctgatacagtgcgtttccaaaa

SEQ ID NO: 1019924 - DNA, 25 bp, Homo sapien
ctgatacagtgcgtttccaaaatgt

SEQ ID NO: 1019925 - DNA, 25 bp, Homo sapien
tgatacagtgcgtttccaaaatgtt

SEQ ID NO: 1019926 - DNA, 25 bp, Homo sapien
tggcgaagaaccctaggcagagatc

SEQ ID NO: 1019927 - DNA, 25 bp, Homo sapien
gagtaaagatttcaacgccaggtcc

SEQ ID NO: 1019928 - DNA, 25 bp, Homo sapien
caacttggtaccgatgagtgacgcg

SEQ ID NO: 1019929 - DNA, 25 bp, Homo sapien
tgttcacccaagtcagcggaggagg

SEQ ID NO: 1019930 - DNA, 25 bp, Homo sapien
aaggctcgcgaggtcgctgctcgct

SEQ ID NO: 1019931 - DNA, 25 bp, Homo sapien
cggctcagcgccgaggcataagcga

SEQ ID NO: 1019932 - DNA, 25 bp, Homo sapien
tcggcgggcaatcgggagagcggct

SEQ ID NO: 1019933 - DNA, 25 bp, Homo sapien
accgggcgggagtgcggaaggctcg

SEQ ID NO: 1019934 - DNA, 25 bp, Homo sapien
gccgctggtcacctcgtagcgcagg

SEQ ID NO: 1019935 - DNA, 25 bp, Homo sapien
ttgatccgcgggtgggagcctccgt

SEQ ID NO: 1019936 - DNA, 25 bp, Homo sapien
tcatgcggcccagagtgttgatccg

SEQ ID NO: 1019937 - DNA, 25 bp, Homo sapien
ccgggccagactcggcgcggatcat

SEQ ID NO: 1019938 - DNA, 25 bp, Homo sapien
cgtccgagttctggtcggtgatcac

SEQ ID NO: 1019939 - DNA, 25 bp, Homo sapien
tcacgccgcgccgagaatagtacat

SEQ ID NO: 1019940 - DNA, 25 bp, Homo sapien
gttctggtcggtgatcacgccgcgc

SEQ ID NO: 1019941 - DNA, 25 bp, Homo sapien
gccgcgccgagaatagtacatcctg

SEQ ID NO: 1019942 - DNA, 25 bp, Homo sapien
tgctcctggagagcaaagtcccatg

SEQ ID NO: 1019943 - DNA, 25 bp, Homo sapien
cctggagagcaaagtcccatgtctt

SEQ ID NO: 1019944 - DNA, 25 bp, Homo sapien
gagcaaagtcccatgtcttagtcat

SEQ ID NO: 1019945 - DNA, 25 bp, Homo sapien
ctggctacctgctcctggagagcaa

SEQ ID NO: 1019946 - DNA, 25 bp, Homo sapien
gggaagtgtgatctgattaacgaaa

SEQ ID NO: 1019947 - DNA, 25 bp, Homo sapien
ggaatgcacagaaatctaatccttt

SEQ ID NO: 1019948 - DNA, 25 bp, Homo sapien
aaaaagcttaagtgttggaacaatg

SEQ ID NO: 1019949 - DNA, 25 bp, Homo sapien
gaccgcgtctgatccttaaaacaag

SEQ ID NO: 1019950 - DNA, 25 bp, Homo sapien
gtgcctggacatcgtgccggtttga

SEQ ID NO: 1019951 - DNA, 25 bp, Homo sapien
tggttctggtgcctggacatcgtgc

SEQ ID NO: 1019952 - DNA, 25 bp, Homo sapien
tgcacgatgagctctgctcgcatca

SEQ ID NO: 1019953 - DNA, 25 bp, Homo sapien
caagcagtcggagcagttctgcagc

SEQ ID NO: 1019954 - DNA, 25 bp, Homo sapien
attggcctgggcaaaacactcatcc

SEQ ID NO: 1019955 - DNA, 25 bp, Homo sapien
ttttctggtaagcatcacagggctg

SEQ ID NO: 1019956 - DNA, 25 bp, Homo sapien
tccgagtcagttgtattccatctcc

SEQ ID NO: 1019957 - DNA, 25 bp, Homo sapien
tctctctgatcaagctgtcgaggat

SEQ ID NO: 1019958 - DNA, 25 bp, Homo sapien
ctttataaagggctcgcatttgctc

SEQ ID NO: 1019959 - DNA, 25 bp, Homo sapien
ctcgagggacactgatggctttata

SEQ ID NO: 1019960 - DNA, 25 bp, Homo sapien
cggactcgagggacactgatggctt

SEQ ID NO: 1019961 - DNA, 25 bp, Homo sapien
cactggtgacatgtttggtgaactc

SEQ ID NO: 1019962 - DNA, 25 bp, Homo sapien
cagccaggtgtatcgtatctgacct

SEQ ID NO: 1019963 - DNA, 25 bp, Homo sapien
tgacctgtccatcggcaaacacaaa

SEQ ID NO: 1019964 - DNA, 25 bp, Homo sapien
tcggcaaacacaaatcgggaaaaca

SEQ ID NO: 1019965 - DNA, 25 bp, Homo sapien
acaaaaacctggctcaggagtgcct

SEQ ID NO: 1019966 - DNA, 25 bp, Homo sapien
tggatgccccggtggctgttaatgt

SEQ ID NO: 1019967 - DNA, 25 bp, Homo sapien
gccagcgatagtcgccgatggagtt

SEQ ID NO: 1019968 - DNA, 25 bp, Homo sapien
caggtcggctttgattttgtccagc

SEQ ID NO: 1019969 - DNA, 25 bp, Homo sapien
gccccggtggctgttaatgtgctgc

SEQ ID NO: 1019970 - DNA, 25 bp, Homo sapien
tcctccaactggtagatagcagatt

SEQ ID NO: 1019971 - DNA, 25 bp, Homo sapien
ccaactggtagatagcagatttctc

SEQ ID NO: 1019972 - DNA, 25 bp, Homo sapien
cctcctccaactggtagatagcaga

SEQ ID NO: 1019973 - DNA, 25 bp, Homo sapien
actggtagatagcagatttctcgcg

SEQ ID NO: 1019974 - DNA, 25 bp, Homo sapien
taacaatatgcagtgactggtgttc

SEQ ID NO: 1019975 - DNA, 25 bp, Homo sapien
ataacaatatgcagtgactggtgtt

SEQ ID NO: 1019976 - DNA, 25 bp, Homo sapien
aaataacaatatgcagtgactggtg

SEQ ID NO: 1019977 - DNA, 25 bp, Homo sapien
aataacaatatgcagtgactggtgt

SEQ ID NO: 1019978 - DNA, 25 bp, Homo sapien
tgtcgctccagtcgtacagcagctc

SEQ ID NO: 1019979 - DNA, 25 bp, Homo sapien
cattgatccacatgatctccctgga

SEQ ID NO: 1019980 - DNA, 25 bp, Homo sapien
tcctgtttctgagcgatgttggtgt

SEQ ID NO: 1019981 - DNA, 25 bp, Homo sapien
cctggacgtggcctgaatgatgttc

SEQ ID NO: 1019982 - DNA, 25 bp, Homo sapien
cttgtttcagcttattgagctcttt

SEQ ID NO: 1019983 - DNA, 25 bp, Homo sapien
ttcttgtttcagcttattgagctct

SEQ ID NO: 1019984 - DNA, 25 bp, Homo sapien
tcttgtttcagcttattgagctctt

SEQ ID NO: 1019985 - DNA, 25 bp, Homo sapien
tgaacatcaatgcacttggtgatct

SEQ ID NO: 1019986 - DNA, 25 bp, Homo sapien
aatgcacttggtgatctgaagaatc

SEQ ID NO: 1019987 - DNA, 25 bp, Homo sapien
cacttggtgatctgaagaatccaac

SEQ ID NO: 1019988 - DNA, 25 bp, Homo sapien
gaacatcaatgcacttggtgatctg

SEQ ID NO: 1019989 - DNA, 25 bp, Homo sapien
ggcatgttcttgtcgcaggggtact

SEQ ID NO: 1019990 - DNA, 25 bp, Homo sapien
ctggagccccttcaggtatgcttca

SEQ ID NO: 1019991 - DNA, 25 bp, Homo sapien
tcaggtatgcttcagtagactgcgc

SEQ ID NO: 1019992 - DNA, 25 bp, Homo sapien
cttcagtagactgcgcctcttcaaa

SEQ ID NO: 1019993 - DNA, 25 bp, Homo sapien
gagagctctgagaataatgggttta

SEQ ID NO: 1019994 - DNA, 25 bp, Homo sapien
tctgggttacgaggcttcagctgta

SEQ ID NO: 1019995 - DNA, 25 bp, Homo sapien
tgcacctgacgcttgtattcaagga

SEQ ID NO: 1019996 - DNA, 25 bp, Homo sapien
tagacttgtttaccaagttctgcac

SEQ ID NO: 1019997 - DNA, 25 bp, Homo sapien
ccccacagagggaacaagcatgtca

SEQ ID NO: 1019998 - DNA, 25 bp, Homo sapien
tgggttcggaggagggatgatcagc

SEQ ID NO: 1019999 - DNA, 25 bp, Homo sapien
tgctgcgctcgttgttgtccttcag

SEQ ID NO: 1020000 - DNA, 25 bp, Homo sapien
aggatacactcatcccccttatgca

SEQ ID NO: 1020001 - DNA, 25 bp, Homo sapien
gatggcttcgtagtactgctcaatc

SEQ ID NO: 1020002 - DNA, 25 bp, Homo sapien
ctggttccacagagccaagatggct

SEQ ID NO: 1020003 - DNA, 25 bp, Homo sapien
tatgtcaatcatgcagtagtgccag

SEQ ID NO: 1020004 - DNA, 25 bp, Homo sapien
catgttgatgtagagctggttccac

SEQ ID NO: 1020005 - DNA, 25 bp, Homo sapien
taatgtaactcaaggtcggctatcg

SEQ ID NO: 1020006 - DNA, 25 bp, Homo sapien
cagggtctggtaatgcttctgggca

SEQ ID NO: 1020007 - DNA, 25 bp, Homo sapien
tctgggcatcggtgaactgagactg

SEQ ID NO: 1020008 - DNA, 25 bp, Homo sapien
tgagccttggctatttctgatgaac

SEQ ID NO: 1020009 - DNA, 25 bp, Homo sapien
gcagtgctctatctgcctgcgaatc

SEQ ID NO: 1020010 - DNA, 25 bp, Homo sapien
cttaagctcgttaattttcactgtg

SEQ ID NO: 1020011 - DNA, 25 bp, Homo sapien
actttattatggttgacatcttggc

SEQ ID NO: 1020012 - DNA, 25 bp, Homo sapien
tggtctgctagagggaggtttttga

SEQ ID NO: 1020013 - DNA, 25 bp, Homo sapien
tgtaaatagcagtacttttcagaac

SEQ ID NO: 1020014 - DNA, 25 bp, Homo sapien
gagaacctcagcaattgcttgtgaa

SEQ ID NO: 1020015 - DNA, 25 bp, Homo sapien
gaagttggcaagcatatctttaagc

SEQ ID NO: 1020016 - DNA, 25 bp, Homo sapien
tagtccaaatacttcattctgtaaa

SEQ ID NO: 1020017 - DNA, 25 bp, Homo sapien
cacagcggtaagcttccactttatc

SEQ ID NO: 1020018 - DNA, 25 bp, Homo sapien
cctcagtgagcctggcttcataaac

SEQ ID NO: 1020019 - DNA, 25 bp, Homo sapien
tggcttcataaacctttaacatgtc

SEQ ID NO: 1020020 - DNA, 25 bp, Homo sapien
ttcagtccacagcggtaagcttcca

SEQ ID NO: 1020021 - DNA, 25 bp, Homo sapien
tagttctgtcttcatagtggccaac

SEQ ID NO: 1020022 - DNA, 25 bp, Homo sapien
ttgcccaagtccagatcataaagtg

SEQ ID NO: 1020023 - DNA, 25 bp, Homo sapien
tatcctttgccagcggtctgtcagc

SEQ ID NO: 1020024 - DNA, 25 bp, Homo sapien
gtggccaacaacgacttcttcaagt

SEQ ID NO: 1020025 - DNA, 25 bp, Homo sapien
tagcatcatagagccacttgcagaa

SEQ ID NO: 1020026 - DNA, 25 bp, Homo sapien
gattctaaggaatcctggcggcgtt

SEQ ID NO: 1020027 - DNA, 25 bp, Homo sapien
tgctcattcaaaaaccgcatgactg

SEQ ID NO: 1020028 - DNA, 25 bp, Homo sapien
tgcagaaagcctgatagttatcacg

SEQ ID NO: 1020029 - DNA, 25 bp, Homo sapien
cttaattgaattggcgcaaagttca

SEQ ID NO: 1020030 - DNA, 25 bp, Homo sapien
gaattggcgcaaagttcagcaattt

SEQ ID NO: 1020031 - DNA, 25 bp, Homo sapien
gttcagcaattttttgtacttcctc

SEQ ID NO: 1020032 - DNA, 25 bp, Homo sapien
gcaattttttgtacttcctctgatt

SEQ ID NO: 1020033 - DNA, 25 bp, Homo sapien
cagtcctgaggtgtatgaggccagc

SEQ ID NO: 1020034 - DNA, 25 bp, Homo sapien
ccagaaggggactgaatcatggtcc

SEQ ID NO: 1020035 - DNA, 25 bp, Homo sapien
tccagtcctgaggtgtatgaggcca

SEQ ID NO: 1020036 - DNA, 25 bp, Homo sapien
tttccagtcctgaggtgtatgaggc

SEQ ID NO: 1020037 - DNA, 25 bp, Homo sapien
tctccagatcttgtaagtagttcaa

SEQ ID NO: 1020038 - DNA, 25 bp, Homo sapien
cagcatctcacttaagaacctgtaa

SEQ ID NO: 1020039 - DNA, 25 bp, Homo sapien
aatgtaccgagcatgaacatctgca

SEQ ID NO: 1020040 - DNA, 25 bp, Homo sapien
gcatctcacttaagaacctgtaata

SEQ ID NO: 1020041 - DNA, 25 bp, Homo sapien
ttcaatctcataagtcagtcgggtg

SEQ ID NO: 1020042 - DNA, 25 bp, Homo sapien
gagttggcatctcgggccagtctga

SEQ ID NO: 1020043 - DNA, 25 bp, Homo sapien
tatttggccgtagcacttgtctaga

SEQ ID NO: 1020044 - DNA, 25 bp, Homo sapien
tttgaactgggaacactctgcctgg

SEQ ID NO: 1020045 - DNA, 25 bp, Homo sapien
tttcatattcccagcggcgcttggc

SEQ ID NO: 1020046 - DNA, 25 bp, Homo sapien
tcctcagagcgctgctgcatgacct

SEQ ID NO: 1020047 - DNA, 25 bp, Homo sapien
tgaagggcgttttcttcagctcgcc

SEQ ID NO: 1020048 - DNA, 25 bp, Homo sapien
gacctgcttcagttctatctccaga

SEQ ID NO: 1020049 - DNA, 25 bp, Homo sapien
tgatctcctcatcataattgtttct

SEQ ID NO: 1020050 - DNA, 25 bp, Homo sapien
ctgattttttaagctaatgatctcc

SEQ ID NO: 1020051 - DNA, 25 bp, Homo sapien
tctcctcatcataattgtttcttac

SEQ ID NO: 1020052 - DNA, 25 bp, Homo sapien
ttttaagctaatgatctcctcatca

SEQ ID NO: 1020053 - DNA, 25 bp, Homo sapien
cttggtgatgttgatctcggtctca

SEQ ID NO: 1020054 - DNA, 25 bp, Homo sapien
gatggtggtcttggtgatgttgatc

SEQ ID NO: 1020055 - DNA, 25 bp, Homo sapien
ggatggtggtcttggtgatgttgat

SEQ ID NO: 1020056 - DNA, 25 bp, Homo sapien
tggtgatgttgatctcggtctcaaa

SEQ ID NO: 1020057 - DNA, 25 bp, Homo sapien
ttctctgtgagagactgcagcctct

SEQ ID NO: 1020058 - DNA, 25 bp, Homo sapien
agattgtctatctgagcccggtagc

SEQ ID NO: 1020059 - DNA, 25 bp, Homo sapien
ctttcatagtcgatcctcaggcgtg

SEQ ID NO: 1020060 - DNA, 25 bp, Homo sapien
tctggaaccgcgtgatatcctggtc

SEQ ID NO: 1020061 - DNA, 25 bp, Homo sapien
caatgaggtcccgagctatggcact

SEQ ID NO: 1020062 - DNA, 25 bp, Homo sapien
tgcaccccgaaggaatggctggatt

SEQ ID NO: 1020063 - DNA, 25 bp, Homo sapien
gacagtcagcttctcattccgatgg

SEQ ID NO: 1020064 - DNA, 25 bp, Homo sapien
tctaataagcgaataccgtggccct

SEQ ID NO: 1020065 - DNA, 25 bp, Homo sapien
gaggctgccggatcggtactgatca

SEQ ID NO: 1020066 - DNA, 25 bp, Homo sapien
tactgattcatgtcgggagctgcta

SEQ ID NO: 1020067 - DNA, 25 bp, Homo sapien
ttgtaggcctcctgaacagacattt

SEQ ID NO: 1020068 - DNA, 25 bp, Homo sapien
ggtgccgacaccatttttcaaggag

SEQ ID NO: 1020069 - DNA, 25 bp, Homo sapien
ctgacgctggatatggtggaaatct

SEQ ID NO: 1020070 - DNA, 25 bp, Homo sapien
gctgctccttatggttaaattcctg

SEQ ID NO: 1020071 - DNA, 25 bp, Homo sapien
tatggttaaattcctgacgctggat

SEQ ID NO: 1020072 - DNA, 25 bp, Homo sapien
aaagagctgctccttatggttaaat

SEQ ID NO: 1020073 - DNA, 25 bp, Homo sapien
agaagcctctgacccgtgatgctgt

SEQ ID NO: 1020074 - DNA, 25 bp, Homo sapien
ccgtgatgctgtcaacgatgccccg

SEQ ID NO: 1020075 - DNA, 25 bp, Homo sapien
gatgccccgctctataccttctgta

SEQ ID NO: 1020076 - DNA, 25 bp, Homo sapien
aagtgacagcttctggcccgtggtt

SEQ ID NO: 1020077 - DNA, 25 bp, Homo sapien
aggctttctgagcaggcttcagcct

SEQ ID NO: 1020078 - DNA, 25 bp, Homo sapien
catgtcttggtcaatcacaccctgg

SEQ ID NO: 1020079 - DNA, 25 bp, Homo sapien
ctggtggccatgtcttggtcaatca

SEQ ID NO: 1020080 - DNA, 25 bp, Homo sapien
ggctttctgagcaggcttcagcctg

SEQ ID NO: 1020081 - DNA, 25 bp, Homo sapien
tggccagcctcatacgggagccatt

SEQ ID NO: 1020082 - DNA, 25 bp, Homo sapien
ctcccgtgaggtactggaactccag

SEQ ID NO: 1020083 - DNA, 25 bp, Homo sapien
agcctcatacgggagccatttttct

SEQ ID NO: 1020084 - DNA, 25 bp, Homo sapien
ccgtgaggtactggaactccaggaa

SEQ ID NO: 1020085 - DNA, 25 bp, Homo sapien
tctatgaaccccttccggatggctt

SEQ ID NO: 1020086 - DNA, 25 bp, Homo sapien
tgtcttgcagcctctgtgcggcgcg

SEQ ID NO: 1020087 - DNA, 25 bp, Homo sapien
caggtcaggattttggcatagctgc

SEQ ID NO: 1020088 - DNA, 25 bp, Homo sapien
ggcttcttcggtgcttatcctccca

SEQ ID NO: 1020089 - DNA, 25 bp, Homo sapien
gaaggcgcagcccagtgatatcttc

SEQ ID NO: 1020090 - DNA, 25 bp, Homo sapien
aaggcgcagcccagtgatatcttct

SEQ ID NO: 1020091 - DNA, 25 bp, Homo sapien
aggcgcagcccagtgatatcttcta

SEQ ID NO: 1020092 - DNA, 25 bp, Homo sapien
tagtgcccaatagaactactgctaa

SEQ ID NO: 1020093 - DNA, 25 bp, Homo sapien
agcgagatccggagcgagatcccga

SEQ ID NO: 1020094 - DNA, 25 bp, Homo sapien
ccccggagccgaagacatgttgtaa

SEQ ID NO: 1020095 - DNA, 25 bp, Homo sapien
gaagaattccctgtggcgtcaaagc

SEQ ID NO: 1020096 - DNA, 25 bp, Homo sapien
aagtcaaggtatagcaaccactccc

SEQ ID NO: 1020097 - DNA, 25 bp, Homo sapien
gtcaaggtatagcaaccactcccaa

SEQ ID NO: 1020098 - DNA, 25 bp, Homo sapien
gaagtcaaggtatagcaaccactcc

SEQ ID NO: 1020099 - DNA, 25 bp, Homo sapien
caaggtatagcaaccactcccaact

SEQ ID NO: 1020100 - DNA, 25 bp, Homo sapien
tctgaaactaaaggagactcattcc

SEQ ID NO: 1020101 - DNA, 25 bp, Homo sapien
tgattagcacttcagacgcactgca

SEQ ID NO: 1020102 - DNA, 25 bp, Homo sapien
tatcactctactgcaagcaccggga

SEQ ID NO: 1020103 - DNA, 25 bp, Homo sapien
aaaagattgccgctgtcatgcacag

SEQ ID NO: 1020104 - DNA, 25 bp, Homo sapien
acaaatatttttagacctatgataa

SEQ ID NO: 1020105 - DNA, 25 bp, Homo sapien
caaatatttttagacctatgataaa

SEQ ID NO: 1020106 - DNA, 25 bp, Homo sapien
ctgagaagtaccgaaaggactaact

SEQ ID NO: 1020107 - DNA, 25 bp, Homo sapien
ccatcgggtacatgacaggcatctg

SEQ ID NO: 1020108 - DNA, 25 bp, Homo sapien
tctttccaaggactccatcgggtac

SEQ ID NO: 1020109 - DNA, 25 bp, Homo sapien
gacaggcatctgagaagtaccgaaa

SEQ ID NO: 1020110 - DNA, 25 bp, Homo sapien
tcagagcttcatgacaacattggca

SEQ ID NO: 1020111 - DNA, 25 bp, Homo sapien
gcttcatgacaacattggcacaagc

SEQ ID NO: 1020112 - DNA, 25 bp, Homo sapien
cagagcttcatgacaacattggcac

SEQ ID NO: 1020113 - DNA, 25 bp, Homo sapien
gcatttccatagttagctggttggt

SEQ ID NO: 1020114 - DNA, 25 bp, Homo sapien
tgcatttccatagttagctggttgg

SEQ ID NO: 1020115 - DNA, 25 bp, Homo sapien
atttgcatttccatagttagctggt

SEQ ID NO: 1020116 - DNA, 25 bp, Homo sapien
ttgcatttccatagttagctggttg

SEQ ID NO: 1020117 - DNA, 25 bp, Homo sapien
ccttttgcactttgtttacccatgt

SEQ ID NO: 1020118 - DNA, 25 bp, Homo sapien
tttgcactttgtttacccatgtgaa

SEQ ID NO: 1020119 - DNA, 25 bp, Homo sapien
gcactttgtttacccatgtgaagga

SEQ ID NO: 1020120 - DNA, 25 bp, Homo sapien
tccttttgcactttgtttacccatg

SEQ ID NO: 1020121 - DNA, 25 bp, Homo sapien
ggccacagtcgccacgtgacttgaa

SEQ ID NO: 1020122 - DNA, 25 bp, Homo sapien
accgcacgcgcaggcctctgggagc

SEQ ID NO: 1020123 - DNA, 25 bp, Homo sapien
cacccgccaagaggaagcggccgaa

SEQ ID NO: 1020124 - DNA, 25 bp, Homo sapien
aagcggccgaactgcagaccgcacg

SEQ ID NO: 1020125 - DNA, 25 bp, Homo sapien
ccacgaactcgttcagctcctcctg

SEQ ID NO: 1020126 - DNA, 25 bp, Homo sapien
agccgctctccacgaactcgttcag

SEQ ID NO: 1020127 - DNA, 25 bp, Homo sapien
tccccgggatccagactatctaggt

SEQ ID NO: 1020128 - DNA, 25 bp, Homo sapien
cagactatctaggtcccagcccagg

SEQ ID NO: 1020129 - DNA, 25 bp, Homo sapien
ggctgccagtgcggatctcccttct

SEQ ID NO: 1020130 - DNA, 25 bp, Homo sapien
tccgcggctgccagtgcggatctcc

SEQ ID NO: 1020131 - DNA, 25 bp, Homo sapien
gcggctgccagtgcggatctccctt

SEQ ID NO: 1020132 - DNA, 25 bp, Homo sapien
gctgccagtgcggatctcccttctt

SEQ ID NO: 1020133 - DNA, 25 bp, Homo sapien
gaacccagggacgtcagggttgctc

SEQ ID NO: 1020134 - DNA, 25 bp, Homo sapien
gtcccaggcgcccatcgcggctctg

SEQ ID NO: 1020135 - DNA, 25 bp, Homo sapien
gacgtcagggttgctccagggcccc

SEQ ID NO: 1020136 - DNA, 25 bp, Homo sapien
tcgatgtggagccttcgggagttcc

SEQ ID NO: 1020137 - DNA, 25 bp, Homo sapien
ccattttcctcaatctacaagatgc

SEQ ID NO: 1020138 - DNA, 25 bp, Homo sapien
gatgatttaggcatgtgatgattgg

SEQ ID NO: 1020139 - DNA, 25 bp, Homo sapien
gattggaatcgtatggacatatcac

SEQ ID NO: 1020140 - DNA, 25 bp, Homo sapien
tctacaagatgccatgtgctttgcc

SEQ ID NO: 1020141 - DNA, 25 bp, Homo sapien
tcaaagtaatcgaaggtatcttcac

SEQ ID NO: 1020142 - DNA, 25 bp, Homo sapien
cgaaggtatcttcacattttcatag

SEQ ID NO: 1020143 - DNA, 25 bp, Homo sapien
taatcgaaggtatcttcacattttc

SEQ ID NO: 1020144 - DNA, 25 bp, Homo sapien
caaagtaatcgaaggtatcttcaca

SEQ ID NO: 1020145 - DNA, 25 bp, Homo sapien
ttaattatctggaattgtgagtcct

SEQ ID NO: 1020146 - DNA, 25 bp, Homo sapien
ttcccaactgcagttctagcttgtt

SEQ ID NO: 1020147 - DNA, 25 bp, Homo sapien
aattatctggaattgtgagtcctta

SEQ ID NO: 1020148 - DNA, 25 bp, Homo sapien
gcagttctagcttgtttaattatct

SEQ ID NO: 1020149 - DNA, 25 bp, Homo sapien
tcacttaaactgtaatgccacttac

SEQ ID NO: 1020150 - DNA, 25 bp, Homo sapien
agaaaattagtaacatgcttatgag

SEQ ID NO: 1020151 - DNA, 25 bp, Homo sapien
aattagtaacatgcttatgagaaaa

SEQ ID NO: 1020152 - DNA, 25 bp, Homo sapien
aaaattagtaacatgcttatgagaa

SEQ ID NO: 1020153 - DNA, 25 bp, Homo sapien
gaagttgaaacgaagcaaattagcc

SEQ ID NO: 1020154 - DNA, 25 bp, Homo sapien
gactctggtgtatctcaacaggaaa

SEQ ID NO: 1020155 - DNA, 25 bp, Homo sapien
taaatcgccaggtaattccaaagga

SEQ ID NO: 1020156 - DNA, 25 bp, Homo sapien
ggatgaacccctagctaagatagtg

SEQ ID NO: 1020157 - DNA, 25 bp, Homo sapien
ggagaaactctttaacccagctcta

SEQ ID NO: 1020158 - DNA, 25 bp, Homo sapien
tgcatttcaacactctaaagagagg

SEQ ID NO: 1020159 - DNA, 25 bp, Homo sapien
tagcaagcaatctgagggtagctgt

SEQ ID NO: 1020160 - DNA, 25 bp, Homo sapien
caactcacttactgggtagcaagca

SEQ ID NO: 1020161 - DNA, 25 bp, Homo sapien
ccacttgtgcaaggacttagagcta

SEQ ID NO: 1020162 - DNA, 25 bp, Homo sapien
ttaagtagcagaaatcccacacctc

SEQ ID NO: 1020163 - DNA, 25 bp, Homo sapien
gaacatgagctactaaaggaatcct

SEQ ID NO: 1020164 - DNA, 25 bp, Homo sapien
gaggccatggtttaacacggctata

SEQ ID NO: 1020165 - DNA, 25 bp, Homo sapien
aatttgagaatcagagcgctttttc

SEQ ID NO: 1020166 - DNA, 25 bp, Homo sapien
tcatagagggcaagacgatcagctt

SEQ ID NO: 1020167 - DNA, 25 bp, Homo sapien
gtctacaaagagatcgctgtcattt

SEQ ID NO: 1020168 - DNA, 25 bp, Homo sapien
gattttggcagccaagtctacaaag

SEQ ID NO: 1020169 - DNA, 25 bp, Homo sapien
caggatttcaaggtaggattttgga

SEQ ID NO: 1020170 - DNA, 25 bp, Homo sapien
ttctgccaggatttcaaggtaggat

SEQ ID NO: 1020171 - DNA, 25 bp, Homo sapien
gccaggatttcaaggtaggattttg

SEQ ID NO: 1020172 - DNA, 25 bp, Homo sapien
ctgccaggatttcaaggtaggattt

SEQ ID NO: 1020173 - DNA, 25 bp, Homo sapien
gactggcgtcttcttttataatctc

SEQ ID NO: 1020174 - DNA, 25 bp, Homo sapien
tggctctataggactggcgtcttct

SEQ ID NO: 1020175 - DNA, 25 bp, Homo sapien
ttggttatgtgaacattcttggctc

SEQ ID NO: 1020176 - DNA, 25 bp, Homo sapien
acattcttggctctataggactggc

SEQ ID NO: 1020177 - DNA, 25 bp, Homo sapien
gaggtaagcaccgaacttcaggtaa

SEQ ID NO: 1020178 - DNA, 25 bp, Homo sapien
aggtaagcaccgaacttcaggtaag

SEQ ID NO: 1020179 - DNA, 25 bp, Homo sapien
ttttcggcatcatcctctgccttct

SEQ ID NO: 1020180 - DNA, 25 bp, Homo sapien
tcttgccaatgattgctgagttctt

SEQ ID NO: 1020181 - DNA, 25 bp, Homo sapien
cttgctcttcttgccaatgattgct

SEQ ID NO: 1020182 - DNA, 25 bp, Homo sapien
tgagttcttccatgtgcacatttat

SEQ ID NO: 1020183 - DNA, 25 bp, Homo sapien
tcccttctatgtcgtgaacactcag

SEQ ID NO: 1020184 - DNA, 25 bp, Homo sapien
cttccaccagactgccgtgaatcta

SEQ ID NO: 1020185 - DNA, 25 bp, Homo sapien
tcagcatccaaatagcttccaccag

SEQ ID NO: 1020186 - DNA, 25 bp, Homo sapien
tctactgaagctgatcgcctttctt

SEQ ID NO: 1020187 - DNA, 25 bp, Homo sapien
tcttctcgactcacagtttttatcc

SEQ ID NO: 1020188 - DNA, 25 bp, Homo sapien
tctcgactcacagtttttatcctta

SEQ ID NO: 1020189 - DNA, 25 bp, Homo sapien
tttccttcttctcgactcacagttt

SEQ ID NO: 1020190 - DNA, 25 bp, Homo sapien
tctttccttcttctcgactcacagt

SEQ ID NO: 1020191 - DNA, 25 bp, Homo sapien
ttggatgatgcagggttagacccac

SEQ ID NO: 1020192 - DNA, 25 bp, Homo sapien
catccaatcacgcatgtagagatct

SEQ ID NO: 1020193 - DNA, 25 bp, Homo sapien
cactagagtggtggttatttgaact

SEQ ID NO: 1020194 - DNA, 25 bp, Homo sapien
attttctcagcatggtctacaacag

SEQ ID NO: 1020195 - DNA, 25 bp, Homo sapien
caactataagctaggtagggtggca

SEQ ID NO: 1020196 - DNA, 25 bp, Homo sapien
tataattcagtccaccccagggttg

SEQ ID NO: 1020197 - DNA, 25 bp, Homo sapien
gaccgccacggaagagttctatgag

SEQ ID NO: 1020198 - DNA, 25 bp, Homo sapien
ggaactctaagtaactcaggctggc

SEQ ID NO: 1020199 - DNA, 25 bp, Homo sapien
gattattcctatttcagtttcgtct

SEQ ID NO: 1020200 - DNA, 25 bp, Homo sapien
ttattcctatttcagtttcgtctct

SEQ ID NO: 1020201 - DNA, 25 bp, Homo sapien
tgattattcctatttcagtttcgtc

SEQ ID NO: 1020202 - DNA, 25 bp, Homo sapien
cactttcaacagtaatatgctactt

SEQ ID NO: 1020203 - DNA, 25 bp, Homo sapien
tttatgactatggtgtctttcccca

SEQ ID NO: 1020204 - DNA, 25 bp, Homo sapien
tatgactatggtgtctttccccatc

SEQ ID NO: 1020205 - DNA, 25 bp, Homo sapien
ttttatgactatggtgtctttcccc

SEQ ID NO: 1020206 - DNA, 25 bp, Homo sapien
cttttatgactatggtgtctttccc

SEQ ID NO: 1020207 - DNA, 25 bp, Homo sapien
tcttgatcgtgatagtggctgcaca

SEQ ID NO: 1020208 - DNA, 25 bp, Homo sapien
ccagtgtagtggtaaacagtagtca

SEQ ID NO: 1020209 - DNA, 25 bp, Homo sapien
tgaagcctaacagccaatctgatcc

SEQ ID NO: 1020210 - DNA, 25 bp, Homo sapien
tgccaaagtctcacgtgaatgatct

SEQ ID NO: 1020211 - DNA, 25 bp, Homo sapien
taatggatgggcaagatggacagca

SEQ ID NO: 1020212 - DNA, 25 bp, Homo sapien
caagaaagctttgcgccagaaccgt

SEQ ID NO: 1020213 - DNA, 25 bp, Homo sapien
tactgaatataaccagtgccctggg

SEQ ID NO: 1020214 - DNA, 25 bp, Homo sapien
taacacctatgaggctgcaggcaca

SEQ ID NO: 1020215 - DNA, 25 bp, Homo sapien
aagagcgttagtttaataattcaca

SEQ ID NO: 1020216 - DNA, 25 bp, Homo sapien
gtttaataattcacacacctgcagg

SEQ ID NO: 1020217 - DNA, 25 bp, Homo sapien
cacctgcaggatcaattatagcaaa

SEQ ID NO: 1020218 - DNA, 25 bp, Homo sapien
aaaagcaagctacataaaaggaaat

SEQ ID NO: 1020219 - DNA, 25 bp, Homo sapien
aatgagagagaacaccgatctgaga

SEQ ID NO: 1020220 - DNA, 25 bp, Homo sapien
tcacaggagccagagtagaaaggat

SEQ ID NO: 1020221 - DNA, 25 bp, Homo sapien
gtcacaggagccagagtagaaagga

SEQ ID NO: 1020222 - DNA, 25 bp, Homo sapien
tgggcagagcatgcagaatgagaga

SEQ ID NO: 1020223 - DNA, 25 bp, Homo sapien
tgtgatgctctctagccgcacacgg

SEQ ID NO: 1020224 - DNA, 25 bp, Homo sapien
gcaccaggttggggtcttgtgatgc

SEQ ID NO: 1020225 - DNA, 25 bp, Homo sapien
cttgtgatgctctctagccgcacac

SEQ ID NO: 1020226 - DNA, 25 bp, Homo sapien
ggcaccaggttggggtcttgtgatg

SEQ ID NO: 1020227 - DNA, 25 bp, Homo sapien
tggcgctctttggaaccctgggctg

SEQ ID NO: 1020228 - DNA, 25 bp, Homo sapien
tcgttgtgcttctaggcgaagtgca

SEQ ID NO: 1020229 - DNA, 25 bp, Homo sapien
cctgagacccgtggcaatgtgggcc

SEQ ID NO: 1020230 - DNA, 25 bp, Homo sapien
gcgaagtgcatgttcttcgggaact

SEQ ID NO: 1020231 - DNA, 25 bp, Homo sapien
gtgtaacctggatgctagtatcttt

SEQ ID NO: 1020232 - DNA, 25 bp, Homo sapien
tcaattttggtgtctgtgactctcc

SEQ ID NO: 1020233 - DNA, 25 bp, Homo sapien
tatctttcaattttggtgtctgtga

SEQ ID NO: 1020234 - DNA, 25 bp, Homo sapien
taacctggatgctagtatctttcaa

SEQ ID NO: 1020235 - DNA, 25 bp, Homo sapien
caagcccaaaagtgaggtaagtagg

SEQ ID NO: 1020236 - DNA, 25 bp, Homo sapien
gagcggtacatttttgggagtcctc

SEQ ID NO: 1020237 - DNA, 25 bp, Homo sapien
gcattccattggaatagtcaagccc

SEQ ID NO: 1020238 - DNA, 25 bp, Homo sapien
caccaccatggtattagagatatca

SEQ ID NO: 1020239 - DNA, 25 bp, Homo sapien
catcttctctgacatgtaccacaaa

SEQ ID NO: 1020240 - DNA, 25 bp, Homo sapien
tcttctctgacatgtaccacaaatg

SEQ ID NO: 1020241 - DNA, 25 bp, Homo sapien
ttgtgacaatggagtcttcatcttc

SEQ ID NO: 1020242 - DNA, 25 bp, Homo sapien
ctctgacatgtaccacaaatgtaat

SEQ ID NO: 1020243 - DNA, 25 bp, Homo sapien
gaataaaacatcagtccaccatgcc

SEQ ID NO: 1020244 - DNA, 25 bp, Homo sapien
tgaattaaatgtctagctccttgag

SEQ ID NO: 1020245 - DNA, 25 bp, Homo sapien
tccttgagatcccattaaagctccc

SEQ ID NO: 1020246 - DNA, 25 bp, Homo sapien
accatgccccttcggctctgtgaat

SEQ ID NO: 1020247 - DNA, 25 bp, Homo sapien
cacattctcataccctttagaattt

SEQ ID NO: 1020248 - DNA, 25 bp, Homo sapien
tcacattctcataccctttagaatt

SEQ ID NO: 1020249 - DNA, 25 bp, Homo sapien
atcacattctcataccctttagaat

SEQ ID NO: 1020250 - DNA, 25 bp, Homo sapien
tccaatttaagcaaggttgagctgt

SEQ ID NO: 1020251 - DNA, 25 bp, Homo sapien
gaagcaatccagtcaagaacagcat

SEQ ID NO: 1020252 - DNA, 25 bp, Homo sapien
cagaaaagctggaactctcaagtcc

SEQ ID NO: 1020253 - DNA, 25 bp, Homo sapien
tgtaagaatgaatcccagaaaagct

SEQ ID NO: 1020254 - DNA, 25 bp, Homo sapien
aacgttcagtatgccattcagttcc

SEQ ID NO: 1020255 - DNA, 25 bp, Homo sapien
gtatcttgcactggccaaacgttca

SEQ ID NO: 1020256 - DNA, 25 bp, Homo sapien
atttcctccctctctagcgtcttct

SEQ ID NO: 1020257 - DNA, 25 bp, Homo sapien
tgcactggccaaacgttcagtatgc

SEQ ID NO: 1020258 - DNA, 25 bp, Homo sapien
gctcgagagtaacgcttgctctttc

SEQ ID NO: 1020259 - DNA, 25 bp, Homo sapien
atgccctgtaattcagctcgagagt

SEQ ID NO: 1020260 - DNA, 25 bp, Homo sapien
tgtaattcagctcgagagtaacgct

SEQ ID NO: 1020261 - DNA, 25 bp, Homo sapien
tgctctttcccgaacacacactgag

SEQ ID NO: 1020262 - DNA, 25 bp, Homo sapien
cagtcagccagtaagctttccatgc

SEQ ID NO: 1020263 - DNA, 25 bp, Homo sapien
cccttatcagtcagccagtaagctt

SEQ ID NO: 1020264 - DNA, 25 bp, Homo sapien
gagataactagtacatgctcaccct

SEQ ID NO: 1020265 - DNA, 25 bp, Homo sapien
tagtacatgctcacccttatcagtc

SEQ ID NO: 1020266 - DNA, 25 bp, Homo sapien
atgagctctccggttcactacagtt

SEQ ID NO: 1020267 - DNA, 25 bp, Homo sapien
ctgcagccctatgggtttacaggct

SEQ ID NO: 1020268 - DNA, 25 bp, Homo sapien
gcccctgcagccctatgggtttaca

SEQ ID NO: 1020269 - DNA, 25 bp, Homo sapien
cagttgccaaacgtttcctccttat

SEQ ID NO: 1020270 - DNA, 25 bp, Homo sapien
ctgcaaatttccgttggagccacgt

SEQ ID NO: 1020271 - DNA, 25 bp, Homo sapien
tccgttggagccacgtagaagtaag

SEQ ID NO: 1020272 - DNA, 25 bp, Homo sapien
gccacgtagaagtaagaattctcct

SEQ ID NO: 1020273 - DNA, 25 bp, Homo sapien
tagaagtaagaattctcctcttacc

SEQ ID NO: 1020274 - DNA, 25 bp, Homo sapien
aattgccaaacaacgactgagctca

SEQ ID NO: 1020275 - DNA, 25 bp, Homo sapien
tgtgctgacgcaactcagattttca

SEQ ID NO: 1020276 - DNA, 25 bp, Homo sapien
cagattttcaattgccaaacaacga

SEQ ID NO: 1020277 - DNA, 25 bp, Homo sapien
gggaagtgtgctgacgcaactcaga

SEQ ID NO: 1020278 - DNA, 25 bp, Homo sapien
catatttatgaggagagccaagcac

SEQ ID NO: 1020279 - DNA, 25 bp, Homo sapien
aatagagtcatacgtattcagcagg

SEQ ID NO: 1020280 - DNA, 25 bp, Homo sapien
cagtgtgtgtgcagcctctataagc

SEQ ID NO: 1020281 - DNA, 25 bp, Homo sapien
tctccagcatggaccaaagatgctc

SEQ ID NO: 1020282 - DNA, 25 bp, Homo sapien
aaacgcagcatgtgtggttttaggg

SEQ ID NO: 1020283 - DNA, 25 bp, Homo sapien
aacgcagcatgtgtggttttagggg

SEQ ID NO: 1020284 - DNA, 25 bp, Homo sapien
caaacgcagcatgtgtggttttagg

SEQ ID NO: 1020285 - DNA, 25 bp, Homo sapien
acaaacgcagcatgtgtggttttag

SEQ ID NO: 1020286 - DNA, 25 bp, Homo sapien
tctggttcaatctgatgctggtgcc

SEQ ID NO: 1020287 - DNA, 25 bp, Homo sapien
gaaacctgaggctatgctgagcatc

SEQ ID NO: 1020288 - DNA, 25 bp, Homo sapien
gagcatctgttgtcccactagtgat

SEQ ID NO: 1020289 - DNA, 25 bp, Homo sapien
ccactagtgatggtgatgggatgca

SEQ ID NO: 1020290 - DNA, 25 bp, Homo sapien
caaggatgaagactggaggaaacat

SEQ ID NO: 1020291 - DNA, 25 bp, Homo sapien
tctgcctctggcaaggatgaagact

SEQ ID NO: 1020292 - DNA, 25 bp, Homo sapien
tgagtctgcctctggcaaggatgaa

SEQ ID NO: 1020293 - DNA, 25 bp, Homo sapien
cctctggcaaggatgaagactggag

SEQ ID NO: 1020294 - DNA, 25 bp, Homo sapien
aaggaaagagtggggtctgtccctg

SEQ ID NO: 1020295 - DNA, 25 bp, Homo sapien
aggaaagagtggggtctgtccctgt

SEQ ID NO: 1020296 - DNA, 25 bp, Homo sapien
gctgcggtcaccagggcacactttg

SEQ ID NO: 1020297 - DNA, 25 bp, Homo sapien
actccccagcattggttaaagggag

SEQ ID NO: 1020298 - DNA, 25 bp, Homo sapien
gggctgcggtcaccagggcacactt

SEQ ID NO: 1020299 - DNA, 25 bp, Homo sapien
gcattggttaaagggagctcttcca

SEQ ID NO: 1020300 - DNA, 25 bp, Homo sapien
ttcgatcaagaagccggatgtggga

SEQ ID NO: 1020301 - DNA, 25 bp, Homo sapien
gacatttcatgcagatggccttcag

SEQ ID NO: 1020302 - DNA, 25 bp, Homo sapien
caatcaaacatctggttgcttggct

SEQ ID NO: 1020303 - DNA, 25 bp, Homo sapien
gatgtgggagccaatccaatcaaac

SEQ ID NO: 1020304 - DNA, 25 bp, Homo sapien
gatcgcagggccaccatgaagttta

SEQ ID NO: 1020305 - DNA, 25 bp, Homo sapien
tgccagtctattccgcgaggtttaa

SEQ ID NO: 1020306 - DNA, 25 bp, Homo sapien
caaacccgctcgcagaaaggatggg

SEQ ID NO: 1020307 - DNA, 25 bp, Homo sapien
gaggatcttgctttccgttcggcgg

SEQ ID NO: 1020308 - DNA, 25 bp, Homo sapien
ggcagcggggagcggggccgctcac

SEQ ID NO: 1020309 - DNA, 25 bp, Homo sapien
agcggggagcggggccgctcacgag

SEQ ID NO: 1020310 - DNA, 25 bp, Homo sapien
tgagtgggacccggggcagcgggga

SEQ ID NO: 1020311 - DNA, 25 bp, Homo sapien
ctgagtgggacccggggcagcgggg

SEQ ID NO: 1020312 - DNA, 25 bp, Homo sapien
gtccaggccaggtgcgtctgagtcc

SEQ ID NO: 1020313 - DNA, 25 bp, Homo sapien
tggctcctgcgagtcgcggcgcggt

SEQ ID NO: 1020314 - DNA, 25 bp, Homo sapien
gtcgcggcgcggtcactctgggcct

SEQ ID NO: 1020315 - DNA, 25 bp, Homo sapien
cctcgctggccgcacacgtgcgctg

SEQ ID NO: 1020316 - DNA, 25 bp, Homo sapien
tagagaggtggcgaaggggcgatca

SEQ ID NO: 1020317 - DNA, 25 bp, Homo sapien
tccttatctctcatggtcgtccggg

SEQ ID NO: 1020318 - DNA, 25 bp, Homo sapien
aaggggagcctcacagcctcgcgca

SEQ ID NO: 1020319 - DNA, 25 bp, Homo sapien
ctcagtccttatctctcatggtcgt

SEQ ID NO: 1020320 - DNA, 25 bp, Homo sapien
gtggcccttggcgtgagcagtcccc

SEQ ID NO: 1020321 - DNA, 25 bp, Homo sapien
agcggcggagcgaggccggagcgcg

SEQ ID NO: 1020322 - DNA, 25 bp, Homo sapien
ctctcggcgggctcgcttccccttc

SEQ ID NO: 1020323 - DNA, 25 bp, Homo sapien
agtccccgccacctctcggcgggct

SEQ ID NO: 1020324 - DNA, 25 bp, Homo sapien
tgagccgccggtacaggaagcccga

SEQ ID NO: 1020325 - DNA, 25 bp, Homo sapien
gcgtcttgagccgccggtacaggaa

SEQ ID NO: 1020326 - DNA, 25 bp, Homo sapien
gcccgaggaggactgcggcgacggc

SEQ ID NO: 1020327 - DNA, 25 bp, Homo sapien
ggaagcccgaggaggactgcggcga

SEQ ID NO: 1020328 - DNA, 25 bp, Homo sapien
gggctgcggctgttggaggccgtgc

SEQ ID NO: 1020329 - DNA, 25 bp, Homo sapien
ccgggggctgcggctgttggaggcc

SEQ ID NO: 1020330 - DNA, 25 bp, Homo sapien
tcctgctgccggagcgccgggggct

SEQ ID NO: 1020331 - DNA, 25 bp, Homo sapien
cggggccggtgcgggagccccagca

SEQ ID NO: 1020332 - DNA, 25 bp, Homo sapien
ccgtcctcgtcgttgtcggcggaca

SEQ ID NO: 1020333 - DNA, 25 bp, Homo sapien
gaccatgtccgcgtcgttgaggaag

SEQ ID NO: 1020334 - DNA, 25 bp, Homo sapien
ttgtacagatccagcatgaagaggg

SEQ ID NO: 1020335 - DNA, 25 bp, Homo sapien
aaggcgctgtcctgcgcgctggtca

SEQ ID NO: 1020336 - DNA, 25 bp, Homo sapien
ctgtcggattccctaaaagtctcgg

SEQ ID NO: 1020337 - DNA, 25 bp, Homo sapien
tgcagttgagttaacctggccagag

SEQ ID NO: 1020338 - DNA, 25 bp, Homo sapien
actcgggctggactctcctgctgca

SEQ ID NO: 1020339 - DNA, 25 bp, Homo sapien
tcaaagttcccagccgctgtcggat

SEQ ID NO: 1020340 - DNA, 25 bp, Homo sapien
acgtacaggaaaccaacaggactgt

SEQ ID NO: 1020341 - DNA, 25 bp, Homo sapien
tcacgtacaggaaaccaacaggact

SEQ ID NO: 1020342 - DNA, 25 bp, Homo sapien
caacaacaatcaacaaacgcagacg

SEQ ID NO: 1020343 - DNA, 25 bp, Homo sapien
acaacaatcaacaaacgcagacgtt

SEQ ID NO: 1020344 - DNA, 25 bp, Homo sapien
taccatcatgctctgtttgggccag

SEQ ID NO: 1020345 - DNA, 25 bp, Homo sapien
ccatcatgctctgtttgggccagct

SEQ ID NO: 1020346 - DNA, 25 bp, Homo sapien
ataccatcatgctctgtttgggcca

SEQ ID NO: 1020347 - DNA, 25 bp, Homo sapien
accatcatgctctgtttgggccagc

SEQ ID NO: 1020348 - DNA, 25 bp, Homo sapien
tgggccaactagcttcaaagacgcg

SEQ ID NO: 1020349 - DNA, 25 bp, Homo sapien
actgatgaagtttcccgtgggccaa

SEQ ID NO: 1020350 - DNA, 25 bp, Homo sapien
taaatcatctcccatacgcagggct

SEQ ID NO: 1020351 - DNA, 25 bp, Homo sapien
tgtcaccggtttgaactggcactga

SEQ ID NO: 1020352 - DNA, 25 bp, Homo sapien
tttaccaagacacctgatgctgcta

SEQ ID NO: 1020353 - DNA, 25 bp, Homo sapien
tacaggatttctcgattttttgctt

SEQ ID NO: 1020354 - DNA, 25 bp, Homo sapien
catcataacatagcaggaaattcac

SEQ ID NO: 1020355 - DNA, 25 bp, Homo sapien
tcaaaatggtggtactacaggtctt

SEQ ID NO: 1020356 - DNA, 25 bp, Homo sapien
gaattttcctgatactggcaatccg

SEQ ID NO: 1020357 - DNA, 25 bp, Homo sapien
catattggtgacgtggaatcctgat

SEQ ID NO: 1020358 - DNA, 25 bp, Homo sapien
gaaatctgcaggaaagcgctaagct

SEQ ID NO: 1020359 - DNA, 25 bp, Homo sapien
tggcaatccgagctaagcacagctt

SEQ ID NO: 1020360 - DNA, 25 bp, Homo sapien
ggcaagccgccttctatgactgatc

SEQ ID NO: 1020361 - DNA, 25 bp, Homo sapien
gactggatgccagaattgcgaggca

SEQ ID NO: 1020362 - DNA, 25 bp, Homo sapien
tctaaggcatcttaaagcttcaccc

SEQ ID NO: 1020363 - DNA, 25 bp, Homo sapien
ccaagggctgcgtttttcttcggtg

SEQ ID NO: 1020364 - DNA, 25 bp, Homo sapien
cagccaagtgctgaagggcataatg

SEQ ID NO: 1020365 - DNA, 25 bp, Homo sapien
gaagggcataatgttttgattgtca

SEQ ID NO: 1020366 - DNA, 25 bp, Homo sapien
ttttggtaacagtaatctgactcat

SEQ ID NO: 1020367 - DNA, 25 bp, Homo sapien
tcaaacaggttgtacatgatgcaaa

SEQ ID NO: 1020368 - DNA, 25 bp, Homo sapien
ggcggcttaaacatcaagccaacta

SEQ ID NO: 1020369 - DNA, 25 bp, Homo sapien
tagcaacatactcctatcccctgga

SEQ ID NO: 1020370 - DNA, 25 bp, Homo sapien
acatctgcgtcgcacggcggcttaa

SEQ ID NO: 1020371 - DNA, 25 bp, Homo sapien
cattgcaaaacggacttcagctggc

SEQ ID NO: 1020372 - DNA, 25 bp, Homo sapien
catggtactcggtcccattggcagt

SEQ ID NO: 1020373 - DNA, 25 bp, Homo sapien
agaggatgcaatggcagaaaggcat

SEQ ID NO: 1020374 - DNA, 25 bp, Homo sapien
aggcatggtactcggtcccattggc

SEQ ID NO: 1020375 - DNA, 25 bp, Homo sapien
aaaggcatggtactcggtcccattg

SEQ ID NO: 1020376 - DNA, 25 bp, Homo sapien
caggcatcagttgggcaaaatttcg

SEQ ID NO: 1020377 - DNA, 25 bp, Homo sapien
gaaacagcatcaggcatcagttggg

SEQ ID NO: 1020378 - DNA, 25 bp, Homo sapien
ggagcaggtacaagaaacagcacta

SEQ ID NO: 1020379 - DNA, 25 bp, Homo sapien
ttcgtaacagagcatctgctacgtt

SEQ ID NO: 1020380 - DNA, 25 bp, Homo sapien
ttggcccaggactatacctcctccg

SEQ ID NO: 1020381 - DNA, 25 bp, Homo sapien
caggtgaggctggaatgaccacgtc

SEQ ID NO: 1020382 - DNA, 25 bp, Homo sapien
actatacctcctccggcaggtgagg

SEQ ID NO: 1020383 - DNA, 25 bp, Homo sapien
gtgaggctggaatgaccacgtctct

SEQ ID NO: 1020384 - DNA, 25 bp, Homo sapien
tccagcttagccaaaagtccacaat

SEQ ID NO: 1020385 - DNA, 25 bp, Homo sapien
aacaccttgtgccttatctcaaaca

SEQ ID NO: 1020386 - DNA, 25 bp, Homo sapien
gtattcctcaatatagctgctatgg

SEQ ID NO: 1020387 - DNA, 25 bp, Homo sapien
gcaacactgttgagaggcgggacct

SEQ ID NO: 1020388 - DNA, 25 bp, Homo sapien
caagctcatggtgaacaccatgggt

SEQ ID NO: 1020389 - DNA, 25 bp, Homo sapien
gctcatggtgaacaccatgggtgtt

SEQ ID NO: 1020390 - DNA, 25 bp, Homo sapien
tcatggtgaacaccatgggtgttct

SEQ ID NO: 1020391 - DNA, 25 bp, Homo sapien
tggtgaacaccatgggtgttctgta

SEQ ID NO: 1020392 - DNA, 25 bp, Homo sapien
caataaacagggatgtattatggat

SEQ ID NO: 1020393 - DNA, 25 bp, Homo sapien
ttttaatcactaggagataattaca

SEQ ID NO: 1020394 - DNA, 25 bp, Homo sapien
tctgcatgatgctttgagagcatgc

SEQ ID NO: 1020395 - DNA, 25 bp, Homo sapien
ctaatgagcacatcttcctcctatt

SEQ ID NO: 1020396 - DNA, 25 bp, Homo sapien
tagagcttaaatccacccaggtgta

SEQ ID NO: 1020397 - DNA, 25 bp, Homo sapien
cagagggcaccatggttgcctggca

SEQ ID NO: 1020398 - DNA, 25 bp, Homo sapien
gggacacttcaataacgtactggat

SEQ ID NO: 1020399 - DNA, 25 bp, Homo sapien
ttgggcacccaccacaaatatttgc

SEQ ID NO: 1020400 - DNA, 25 bp, Homo sapien
ctatcagcaaaaaggaaggatggct

SEQ ID NO: 1020401 - DNA, 25 bp, Homo sapien
tgcgaatgagagcaacagaactccc

SEQ ID NO: 1020402 - DNA, 25 bp, Homo sapien
acatcagcaggcatcagggttgagg

SEQ ID NO: 1020403 - DNA, 25 bp, Homo sapien
cagaactcccagataggcctgtgga

SEQ ID NO: 1020404 - DNA, 25 bp, Homo sapien
tgaaagcagcagatgcgagcctgga

SEQ ID NO: 1020405 - DNA, 25 bp, Homo sapien
caatgtgttccctctggcaatccag

SEQ ID NO: 1020406 - DNA, 25 bp, Homo sapien
cacgagggtggcagtttggcttcat

SEQ ID NO: 1020407 - DNA, 25 bp, Homo sapien
tctaccaagcacagaagggactttc

SEQ ID NO: 1020408 - DNA, 25 bp, Homo sapien
tgtgacattactgatcccactggcc

SEQ ID NO: 1020409 - DNA, 25 bp, Homo sapien
caaaaccttggaattcgcagtagcc

SEQ ID NO: 1020410 - DNA, 25 bp, Homo sapien
acaaattagcttggcactccagcct

SEQ ID NO: 1020411 - DNA, 25 bp, Homo sapien
cataaataaaccttgagatggataa

SEQ ID NO: 1020412 - DNA, 25 bp, Homo sapien
ttggctgagatgtggcgaccatcac

SEQ ID NO: 1020413 - DNA, 25 bp, Homo sapien
cgctcagcgatgaagcactggattg

SEQ ID NO: 1020414 - DNA, 25 bp, Homo sapien
gaagtccaatagtatcagccaatgc

SEQ ID NO: 1020415 - DNA, 25 bp, Homo sapien
tatcgagtttctcagtgcgtcaccg

SEQ ID NO: 1020416 - DNA, 25 bp, Homo sapien
taactgcaggtgcttctctatcgag

SEQ ID NO: 1020417 - DNA, 25 bp, Homo sapien
attgcttgatatcaggccgttgctt

SEQ ID NO: 1020418 - DNA, 25 bp, Homo sapien
aatgccttctaaatggcctgttggc

SEQ ID NO: 1020419 - DNA, 25 bp, Homo sapien
tagtataggaccatctgcaccccat

SEQ ID NO: 1020420 - DNA, 25 bp, Homo sapien
cctgacctagagcaagctgaccgga

SEQ ID NO: 1020421 - DNA, 25 bp, Homo sapien
tggaatgtaccctctggatctctgt

SEQ ID NO: 1020422 - DNA, 25 bp, Homo sapien
ggggaccatgtgctcctatgctcag

SEQ ID NO: 1020423 - DNA, 25 bp, Homo sapien
tactgaaagggggaccatgtgctcc

SEQ ID NO: 1020424 - DNA, 25 bp, Homo sapien
tgaaagggggaccatgtgctcctat

SEQ ID NO: 1020425 - DNA, 25 bp, Homo sapien
aaagggggaccatgtgctcctatgc

SEQ ID NO: 1020426 - DNA, 25 bp, Homo sapien
tccgcattgtataagatacggacag

SEQ ID NO: 1020427 - DNA, 25 bp, Homo sapien
acagtgagctcagcgattattctgg

SEQ ID NO: 1020428 - DNA, 25 bp, Homo sapien
ttgtataagatacggacagtgagct

SEQ ID NO: 1020429 - DNA, 25 bp, Homo sapien
acatttatgaagtccgcattgtata

SEQ ID NO: 1020430 - DNA, 25 bp, Homo sapien
ctatgaaactctaatggggtagatc

SEQ ID NO: 1020431 - DNA, 25 bp, Homo sapien
atgaaactctaatggggtagatccg

SEQ ID NO: 1020432 - DNA, 25 bp, Homo sapien
tatgaaactctaatggggtagatcc

SEQ ID NO: 1020433 - DNA, 25 bp, Homo sapien
tgaaactctaatggggtagatccgg

SEQ ID NO: 1020434 - DNA, 25 bp, Homo sapien
tggctcttacaagttgctcttttaa

SEQ ID NO: 1020435 - DNA, 25 bp, Homo sapien
ctcttttaaaacggaagagctcttg

SEQ ID NO: 1020436 - DNA, 25 bp, Homo sapien
aaacggaagagctcttgtaccaaat

SEQ ID NO: 1020437 - DNA, 25 bp, Homo sapien
tgtaccaaatattgacactgtttgt

SEQ ID NO: 1020438 - DNA, 25 bp, Homo sapien
gaactgctgccctttgtatatcgaa

SEQ ID NO: 1020439 - DNA, 25 bp, Homo sapien
tcttccccgaccacaatcataagga

SEQ ID NO: 1020440 - DNA, 25 bp, Homo sapien
ggaagacagggagtatcaaccaaca

SEQ ID NO: 1020441 - DNA, 25 bp, Homo sapien
tattacgtaagagaatgaccctctg

SEQ ID NO: 1020442 - DNA, 25 bp, Homo sapien
acctggattgagtgcaagaggcaca

SEQ ID NO: 1020443 - DNA, 25 bp, Homo sapien
aacctggattgagtgcaagaggcac

SEQ ID NO: 1020444 - DNA, 25 bp, Homo sapien
ttctgtttagaacagctaatcttcc

SEQ ID NO: 1020445 - DNA, 25 bp, Homo sapien
gcaagtatatcccaacccaagaccc

SEQ ID NO: 1020446 - DNA, 25 bp, Homo sapien
tacatccctccaaatcagaccttcc

SEQ ID NO: 1020447 - DNA, 25 bp, Homo sapien
gctacatccctccaaatcagacctt

SEQ ID NO: 1020448 - DNA, 25 bp, Homo sapien
gccagcgctacatccctccaaatca

SEQ ID NO: 1020449 - DNA, 25 bp, Homo sapien
agcgctacatccctccaaatcagac

SEQ ID NO: 1020450 - DNA, 25 bp, Homo sapien
cccatagcaaccagtcgaaaggcgg

SEQ ID NO: 1020451 - DNA, 25 bp, Homo sapien
gaaaggcggacatagcaactaccat

SEQ ID NO: 1020452 - DNA, 25 bp, Homo sapien
tcaaccccatagcaaccagtcgaaa

SEQ ID NO: 1020453 - DNA, 25 bp, Homo sapien
caaccagtcgaaaggcggacatagc

SEQ ID NO: 1020454 - DNA, 25 bp, Homo sapien
ctttccctccgtagaggaaatcaga

SEQ ID NO: 1020455 - DNA, 25 bp, Homo sapien
cagtggtcgcaacatctaagaacag

SEQ ID NO: 1020456 - DNA, 25 bp, Homo sapien
gctggccaccagtggtcgcaacatc

SEQ ID NO: 1020457 - DNA, 25 bp, Homo sapien
atctaagaacagctgggctttccct

SEQ ID NO: 1020458 - DNA, 25 bp, Homo sapien
ggtttccagccagaacgactattta

SEQ ID NO: 1020459 - DNA, 25 bp, Homo sapien
tgtattaggaagtccagcaactgga

SEQ ID NO: 1020460 - DNA, 25 bp, Homo sapien
acacgaagcacatctttactgttaa

SEQ ID NO: 1020461 - DNA, 25 bp, Homo sapien
gattagtaaaatgcccctgccaacc

SEQ ID NO: 1020462 - DNA, 25 bp, Homo sapien
gctgttcccaacaattaggatggag

SEQ ID NO: 1020463 - DNA, 25 bp, Homo sapien
acccttttggtcacttgtatcattt

SEQ ID NO: 1020464 - DNA, 25 bp, Homo sapien
ggcttaagatccaaaacactctgaa

SEQ ID NO: 1020465 - DNA, 25 bp, Homo sapien
attgctgacgctggtgccttctgga

SEQ ID NO: 1020466 - DNA, 25 bp, Homo sapien
tctttgctctggtgattcacttcat

SEQ ID NO: 1020467 - DNA, 25 bp, Homo sapien
cattgtactttattattggtgtagc

SEQ ID NO: 1020468 - DNA, 25 bp, Homo sapien
tcctctaattcaaaacattgtactt

SEQ ID NO: 1020469 - DNA, 25 bp, Homo sapien
ttattggtgtagcaccagagagcac

SEQ ID NO: 1020470 - DNA, 25 bp, Homo sapien
cactcatactttaggcaagtttgct

SEQ ID NO: 1020471 - DNA, 25 bp, Homo sapien
gagcccgtgacactcatactttagg

SEQ ID NO: 1020472 - DNA, 25 bp, Homo sapien
aggccctgcagatgatctactctgc

SEQ ID NO: 1020473 - DNA, 25 bp, Homo sapien
tgtcgttttttagcaggaggccctg

SEQ ID NO: 1020474 - DNA, 25 bp, Homo sapien
ggttgtaacgacagcggccttttga

SEQ ID NO: 1020475 - DNA, 25 bp, Homo sapien
tcactaactggacttactctctggt

SEQ ID NO: 1020476 - DNA, 25 bp, Homo sapien
acatttctggctggacttccaaggg

SEQ ID NO: 1020477 - DNA, 25 bp, Homo sapien
gacactgcctatctcaaactacaaa

SEQ ID NO: 1020478 - DNA, 25 bp, Homo sapien
cttagaaaagatgcacggcttcctt

SEQ ID NO: 1020479 - DNA, 25 bp, Homo sapien
cggcttccttagtgtcatccacgag

SEQ ID NO: 1020480 - DNA, 25 bp, Homo sapien
gctgggagcccatatgtacgactaa

SEQ ID NO: 1020481 - DNA, 25 bp, Homo sapien
taagtgttgtgcaatgctgggagcc

SEQ ID NO: 1020482 - DNA, 25 bp, Homo sapien
cagtttccccgtttgacttcatagg

SEQ ID NO: 1020483 - DNA, 25 bp, Homo sapien
gtagtgaacagaccactggctggcc

SEQ ID NO: 1020484 - DNA, 25 bp, Homo sapien
ttcataggtggattaccaattaccc

SEQ ID NO: 1020485 - DNA, 25 bp, Homo sapien
gatcgggtagtgaacagaccactgg

SEQ ID NO: 1020486 - DNA, 25 bp, Homo sapien
caggaatctgggataagttgaactt

SEQ ID NO: 1020487 - DNA, 25 bp, Homo sapien
tgtgctgatgctcctgtaagacttg

SEQ ID NO: 1020488 - DNA, 25 bp, Homo sapien
gatgcggaattctgcagccgtcacc

SEQ ID NO: 1020489 - DNA, 25 bp, Homo sapien
gaacttgaactctttgtggtgtcgc

SEQ ID NO: 1020490 - DNA, 25 bp, Homo sapien
ttggggctttctcgagccttcatac

SEQ ID NO: 1020491 - DNA, 25 bp, Homo sapien
tttggggctttctcgagccttcata

SEQ ID NO: 1020492 - DNA, 25 bp, Homo sapien
ctttggggctttctcgagccttcat

SEQ ID NO: 1020493 - DNA, 25 bp, Homo sapien
ctcatcgtactcacatgctgcccct

SEQ ID NO: 1020494 - DNA, 25 bp, Homo sapien
taaacactcccatttacaacaccca

SEQ ID NO: 1020495 - DNA, 25 bp, Homo sapien
taaacaccatgcaataccatgaagt

SEQ ID NO: 1020496 - DNA, 25 bp, Homo sapien
atcttttaaacaccatgcaatacca

SEQ ID NO: 1020497 - DNA, 25 bp, Homo sapien
gcatcatcacaaggacacaatgatt

SEQ ID NO: 1020498 - DNA, 25 bp, Homo sapien
ttttaaacaccatgcaataccatga

SEQ ID NO: 1020499 - DNA, 25 bp, Homo sapien
ccggtacttcgtctttatcttgaga

SEQ ID NO: 1020500 - DNA, 25 bp, Homo sapien
ttccggtacttcgtctttatcttga

SEQ ID NO: 1020501 - DNA, 25 bp, Homo sapien
tccggtacttcgtctttatcttgag

SEQ ID NO: 1020502 - DNA, 25 bp, Homo sapien
cctagagctttacgcagtatcacca

SEQ ID NO: 1020503 - DNA, 25 bp, Homo sapien
ctagtacgaggcacagacaccaagc

SEQ ID NO: 1020504 - DNA, 25 bp, Homo sapien
gacaccaagcagcaattggtagcgg

SEQ ID NO: 1020505 - DNA, 25 bp, Homo sapien
gcagcaattggtagcggcctagagc

SEQ ID NO: 1020506 - DNA, 25 bp, Homo sapien
gactctgctaccgagtcactctggg

SEQ ID NO: 1020507 - DNA, 25 bp, Homo sapien
gaatttgcgttgttctgtggcacac

SEQ ID NO: 1020508 - DNA, 25 bp, Homo sapien
ggcacacttttgtaatcgtacaatg

SEQ ID NO: 1020509 - DNA, 25 bp, Homo sapien
tgtggagagcccagtttccatcccg

SEQ ID NO: 1020510 - DNA, 25 bp, Homo sapien
catgacatgaagcaattgcacctac

SEQ ID NO: 1020511 - DNA, 25 bp, Homo sapien
catcatgacatgaagcaattgcacc

SEQ ID NO: 1020512 - DNA, 25 bp, Homo sapien
ccatcatgacatgaagcaattgcac

SEQ ID NO: 1020513 - DNA, 25 bp, Homo sapien
tcatgacatgaagcaattgcaccta

SEQ ID NO: 1020514 - DNA, 25 bp, Homo sapien
acagattgctagtggccgtgatgtc

SEQ ID NO: 1020515 - DNA, 25 bp, Homo sapien
caacccacagattgctagtggccgt

SEQ ID NO: 1020516 - DNA, 25 bp, Homo sapien
tcttctgaggcccatactacacggg

SEQ ID NO: 1020517 - DNA, 25 bp, Homo sapien
ctacacgggtgtccaacaaaaacag

SEQ ID NO: 1020518 - DNA, 25 bp, Homo sapien
ctgcggctcgggggtggacgtggac

SEQ ID NO: 1020519 - DNA, 25 bp, Homo sapien
tgcggctcgggggtggacgtggact

SEQ ID NO: 1020520 - DNA, 25 bp, Homo sapien
gcggctcgggggtggacgtggactc

SEQ ID NO: 1020521 - DNA, 25 bp, Homo sapien
ggactgggtagagcgattacgactc

SEQ ID NO: 1020522 - DNA, 25 bp, Homo sapien
gctgcttgtcgtaagggccgtctct

SEQ ID NO: 1020523 - DNA, 25 bp, Homo sapien
gacctggtggtgcgcacgtgcacct

SEQ ID NO: 1020524 - DNA, 25 bp, Homo sapien
tgaagcactggagacccgcgccacg

SEQ ID NO: 1020525 - DNA, 25 bp, Homo sapien
gcacacagttcaggtctggccaatc

SEQ ID NO: 1020526 - DNA, 25 bp, Homo sapien
ggttggaggacgcaaccccagccaa

SEQ ID NO: 1020527 - DNA, 25 bp, Homo sapien
tctgtctgaggttgaggttgccaag

SEQ ID NO: 1020528 - DNA, 25 bp, Homo sapien
tgccaagggtaacaaaaatcctgga

SEQ ID NO: 1020529 - DNA, 25 bp, Homo sapien
ctctcttgccctttgaatgtgtctg

SEQ ID NO: 1020530 - DNA, 25 bp, Homo sapien
ggagaacacttctgaaggaccactc

SEQ ID NO: 1020531 - DNA, 25 bp, Homo sapien
ctcagctgacactcaggtagcagag

SEQ ID NO: 1020532 - DNA, 25 bp, Homo sapien
acactcaggtagcagagctggtttc

SEQ ID NO: 1020533 - DNA, 25 bp, Homo sapien
aaaatgtcacatcacgctgggcggt

SEQ ID NO: 1020534 - DNA, 25 bp, Homo sapien
tcctaactagctacgggactggctg

SEQ ID NO: 1020535 - DNA, 25 bp, Homo sapien
gcaatgcttccgagaaacaccagga

SEQ ID NO: 1020536 - DNA, 25 bp, Homo sapien
tccaaaatcacagggtagcaaccag

SEQ ID NO: 1020537 - DNA, 25 bp, Homo sapien
cagtcacgccagagtacaccacttt

SEQ ID NO: 1020538 - DNA, 25 bp, Homo sapien
ctccctgggagcacgccatggaaga

SEQ ID NO: 1020539 - DNA, 25 bp, Homo sapien
ccagatgtaggacgatccctggtgg

SEQ ID NO: 1020540 - DNA, 25 bp, Homo sapien
tggtggagaactatcaactccctgg

SEQ ID NO: 1020541 - DNA, 25 bp, Homo sapien
gccaaccaacatccagccttcattt

SEQ ID NO: 1020542 - DNA, 25 bp, Homo sapien
aagcccctggagaagtataacagag

SEQ ID NO: 1020543 - DNA, 25 bp, Homo sapien
ccctggagaagtataacagagccaa

SEQ ID NO: 1020544 - DNA, 25 bp, Homo sapien
gagaagtataacagagccaaccaac

SEQ ID NO: 1020545 - DNA, 25 bp, Homo sapien
gggttaattccatccagcatccttt

SEQ ID NO: 1020546 - DNA, 25 bp, Homo sapien
aagagccacgcacacagcgaagtgc

SEQ ID NO: 1020547 - DNA, 25 bp, Homo sapien
gggtcataccccacactaagcataa

SEQ ID NO: 1020548 - DNA, 25 bp, Homo sapien
tatctggccctcctgaagagccacg

SEQ ID NO: 1020549 - DNA, 25 bp, Homo sapien
cagctgcagtcaaggcccaatattg

SEQ ID NO: 1020550 - DNA, 25 bp, Homo sapien
gcaccagccgcccagaggcaatttt

SEQ ID NO: 1020551 - DNA, 25 bp, Homo sapien
tgccctgctgagacacaaagtctgt

SEQ ID NO: 1020552 - DNA, 25 bp, Homo sapien
gagagacattttcaagggctctggc

SEQ ID NO: 1020553 - DNA, 25 bp, Homo sapien
cgtgctagggaccaaaatctccatg

SEQ ID NO: 1020554 - DNA, 25 bp, Homo sapien
gcttgtgaagtaagcttcctccaaa

SEQ ID NO: 1020555 - DNA, 25 bp, Homo sapien
gcttcctccaaaataccgtctcgtg

SEQ ID NO: 1020556 - DNA, 25 bp, Homo sapien
tagcctgggattttccccatccaac

SEQ ID NO: 1020557 - DNA, 25 bp, Homo sapien
gaccgggaaggcatcacattcacat

SEQ ID NO: 1020558 - DNA, 25 bp, Homo sapien
gatttgctgcagtccaaacagggag

SEQ ID NO: 1020559 - DNA, 25 bp, Homo sapien
gcgtgggccgacttgcccagtacac

SEQ ID NO: 1020560 - DNA, 25 bp, Homo sapien
tcacatgatcagacaacgctactag

SEQ ID NO: 1020561 - DNA, 25 bp, Homo sapien
cctgcaggctgttttcaattcactg

SEQ ID NO: 1020562 - DNA, 25 bp, Homo sapien
ttggaaactcacatacagctcatgc

SEQ ID NO: 1020563 - DNA, 25 bp, Homo sapien
ggaaactcacatacagctcatgctt

SEQ ID NO: 1020564 - DNA, 25 bp, Homo sapien
ggtcttggaaactcacatacagctc

SEQ ID NO: 1020565 - DNA, 25 bp, Homo sapien
ggaagcacgtaggttgccagcaata

SEQ ID NO: 1020566 - DNA, 25 bp, Homo sapien
cccacggtgctcctgcggaagtagt

SEQ ID NO: 1020567 - DNA, 25 bp, Homo sapien
ccagcaatatgtgcttggacccaag

SEQ ID NO: 1020568 - DNA, 25 bp, Homo sapien
tgcacaggcaaggatacagacgcag

SEQ ID NO: 1020569 - DNA, 25 bp, Homo sapien
cgcgtggttggttgcattcatgtgt

SEQ ID NO: 1020570 - DNA, 25 bp, Homo sapien
atgtgtgcgttgagtgggaaggagc

SEQ ID NO: 1020571 - DNA, 25 bp, Homo sapien
caaggtctgcacaatcgcgtggttg

SEQ ID NO: 1020572 - DNA, 25 bp, Homo sapien
ctgcacaatcgcgtggttggttgca

SEQ ID NO: 1020573 - DNA, 25 bp, Homo sapien
ctgttccaaaacagaaggggagaag

SEQ ID NO: 1020574 - DNA, 25 bp, Homo sapien
ttgtcatcaaagtaaagaaccgaga

SEQ ID NO: 1020575 - DNA, 25 bp, Homo sapien
gaaccgagatggcatttagcttagt

SEQ ID NO: 1020576 - DNA, 25 bp, Homo sapien
ggagttgtcatcaaagtaaagaacc

SEQ ID NO: 1020577 - DNA, 25 bp, Homo sapien
cttagttggcgcacagcacggtttg

SEQ ID NO: 1020578 - DNA, 25 bp, Homo sapien
gaaccagctgatcctttagccaaga

SEQ ID NO: 1020579 - DNA, 25 bp, Homo sapien
cagatgtaatctaggaatccaaggc

SEQ ID NO: 1020580 - DNA, 25 bp, Homo sapien
tcttcctgggtaataaggcactggc

SEQ ID NO: 1020581 - DNA, 25 bp, Homo sapien
cagttaccagaccttatgctacaga

SEQ ID NO: 1020582 - DNA, 25 bp, Homo sapien
ggacttctgggaatgaactgaacag

SEQ ID NO: 1020583 - DNA, 25 bp, Homo sapien
cgaacatacaacagcaatgactgag

SEQ ID NO: 1020584 - DNA, 25 bp, Homo sapien
atgactgagacaagggcgccccgtg

SEQ ID NO: 1020585 - DNA, 25 bp, Homo sapien
aacaaaactccagcacgaacataca

SEQ ID NO: 1020586 - DNA, 25 bp, Homo sapien
gagcattgccttcacgtgttacacg

SEQ ID NO: 1020587 - DNA, 25 bp, Homo sapien
taaccctgtggcgtggtatgctgta

SEQ ID NO: 1020588 - DNA, 25 bp, Homo sapien
cattcttataagctgggcaccctca

SEQ ID NO: 1020589 - DNA, 25 bp, Homo sapien
ttactgaaaaggtactagagccggc

SEQ ID NO: 1020590 - DNA, 25 bp, Homo sapien
tagagaagcacaactgtcaagagtc

SEQ ID NO: 1020591 - DNA, 25 bp, Homo sapien
tgcatcacgagtcttgtattccaag

SEQ ID NO: 1020592 - DNA, 25 bp, Homo sapien
tattaatcacgtatggttcacagat

SEQ ID NO: 1020593 - DNA, 25 bp, Homo sapien
cacaacttcagctttgcatcacgag

SEQ ID NO: 1020594 - DNA, 25 bp, Homo sapien
gaagggccctaactagagttctaga

SEQ ID NO: 1020595 - DNA, 25 bp, Homo sapien
tcatgttaacacgaagccagagccc

SEQ ID NO: 1020596 - DNA, 25 bp, Homo sapien
tctcccttgggaataagcacataca

SEQ ID NO: 1020597 - DNA, 25 bp, Homo sapien
ccacttatactgtctgtctgaggca

SEQ ID NO: 1020598 - DNA, 25 bp, Homo sapien
tacctgcccacgagttctggaaagg

SEQ ID NO: 1020599 - DNA, 25 bp, Homo sapien
tggaagataccttcacggccgctgc

SEQ ID NO: 1020600 - DNA, 25 bp, Homo sapien
agaggttagccgtgatgaaagcagc

SEQ ID NO: 1020601 - DNA, 25 bp, Homo sapien
gaaagcagcgttacttctgaccgtg

SEQ ID NO: 1020602 - DNA, 25 bp, Homo sapien
ctttgagactaaaatagcgttgagg

SEQ ID NO: 1020603 - DNA, 25 bp, Homo sapien
ctaaaatagcgttgagggaaatgaa

SEQ ID NO: 1020604 - DNA, 25 bp, Homo sapien
gagactaaaatagcgttgagggaaa

SEQ ID NO: 1020605 - DNA, 25 bp, Homo sapien
gactaaaatagcgttgagggaaatg

SEQ ID NO: 1020606 - DNA, 25 bp, Homo sapien
tttagaaattgtgtggcatctgccc

SEQ ID NO: 1020607 - DNA, 25 bp, Homo sapien
taaaccagttagcacagttcaccat

SEQ ID NO: 1020608 - DNA, 25 bp, Homo sapien
taagcacaggacttgaacgaaccat

SEQ ID NO: 1020609 - DNA, 25 bp, Homo sapien
tcaagtatcaaaaaggaggatcccc

SEQ ID NO: 1020610 - DNA, 25 bp, Homo sapien
gaaaccaggttcgtggctatcccac

SEQ ID NO: 1020611 - DNA, 25 bp, Homo sapien
caggctgagctactgagtggtttaa

SEQ ID NO: 1020612 - DNA, 25 bp, Homo sapien
tctcaggttgattgtacacagcact

SEQ ID NO: 1020613 - DNA, 25 bp, Homo sapien
gatgggaaaaaggtacgtctgcact

SEQ ID NO: 1020614 - DNA, 25 bp, Homo sapien
tctgatgtcttgaggatccacccat

SEQ ID NO: 1020615 - DNA, 25 bp, Homo sapien
tcccttcctgaagagcgttagcggg

SEQ ID NO: 1020616 - DNA, 25 bp, Homo sapien
aagacacaagtgtgaccgtccctgg

SEQ ID NO: 1020617 - DNA, 25 bp, Homo sapien
tgcggaacacaccttgtgggagcct

SEQ ID NO: 1020618 - DNA, 25 bp, Homo sapien
atggggattttctccctgcagtctc

SEQ ID NO: 1020619 - DNA, 25 bp, Homo sapien
gcaatactttgtttgggcttgtacc

SEQ ID NO: 1020620 - DNA, 25 bp, Homo sapien
tggaggcttggtaatagcggaaatc

SEQ ID NO: 1020621 - DNA, 25 bp, Homo sapien
ccctgtggcccagtctccatcacct

SEQ ID NO: 1020622 - DNA, 25 bp, Homo sapien
gacgactgtacctgcctgagtccag

SEQ ID NO: 1020623 - DNA, 25 bp, Homo sapien
tgcagaagctccaagaacagattat

SEQ ID NO: 1020624 - DNA, 25 bp, Homo sapien
tgacttgagcgagctttgactcctc

SEQ ID NO: 1020625 - DNA, 25 bp, Homo sapien
ggaaggaacctctgtgaccatcact

SEQ ID NO: 1020626 - DNA, 25 bp, Homo sapien
ggtgtctttcctcttaacctgctga

SEQ ID NO: 1020627 - DNA, 25 bp, Homo sapien
cctgctgaccatctgtggcctgaga

SEQ ID NO: 1020628 - DNA, 25 bp, Homo sapien
ctggctgtggtgtctttcctcttaa

SEQ ID NO: 1020629 - DNA, 25 bp, Homo sapien
gagaaactgttgctttcaaagttca

SEQ ID NO: 1020630 - DNA, 25 bp, Homo sapien
tggaatgttcgttccaggaatagtc

SEQ ID NO: 1020631 - DNA, 25 bp, Homo sapien
actggccctgcttggctggaatgtt

SEQ ID NO: 1020632 - DNA, 25 bp, Homo sapien
ctcccttgagatgacggctttccag

SEQ ID NO: 1020633 - DNA, 25 bp, Homo sapien
gtatctctgtttgcacagaagggcc

SEQ ID NO: 1020634 - DNA, 25 bp, Homo sapien
actgagagccccattgtcccctgga

SEQ ID NO: 1020635 - DNA, 25 bp, Homo sapien
acctgatactcaatgtgcttgtact

SEQ ID NO: 1020636 - DNA, 25 bp, Homo sapien
caatgtgcttgtactcttgccttgt

SEQ ID NO: 1020637 - DNA, 25 bp, Homo sapien
gaaaggactgagagccccattgtcc

SEQ ID NO: 1020638 - DNA, 25 bp, Homo sapien
atcctgctgctgtagattttttgcc

SEQ ID NO: 1020639 - DNA, 25 bp, Homo sapien
gtgaaagcccacgtgtgattaaggg

SEQ ID NO: 1020640 - DNA, 25 bp, Homo sapien
ttatcctgctgctgtagattttttg

SEQ ID NO: 1020641 - DNA, 25 bp, Homo sapien
tttcagctgccgtggagtggtgaaa

SEQ ID NO: 1020642 - DNA, 25 bp, Homo sapien
caagtaggaccaacaatacctggca

SEQ ID NO: 1020643 - DNA, 25 bp, Homo sapien
acctggcacaacactttggtaagtt

SEQ ID NO: 1020644 - DNA, 25 bp, Homo sapien
taagttgtaaggctgagagcaaggt

SEQ ID NO: 1020645 - DNA, 25 bp, Homo sapien
cggcgagtcaaatgggaggtcagca

SEQ ID NO: 1020646 - DNA, 25 bp, Homo sapien
atgaagtacattatgtttcacattc

SEQ ID NO: 1020647 - DNA, 25 bp, Homo sapien
tatgaagtacattatgtttcacatt

SEQ ID NO: 1020648 - DNA, 25 bp, Homo sapien
tattaacaatgtgtatatgaagtac

SEQ ID NO: 1020649 - DNA, 25 bp, Homo sapien
taacaatgtgtatatgaagtacatt

SEQ ID NO: 1020650 - DNA, 25 bp, Homo sapien
tattcaggctattactgcgtttcag

SEQ ID NO: 1020651 - DNA, 25 bp, Homo sapien
tcttaaccttgtattcaggctatta

SEQ ID NO: 1020652 - DNA, 25 bp, Homo sapien
cttaaccttgtattcaggctattac

SEQ ID NO: 1020653 - DNA, 25 bp, Homo sapien
cttgtattcaggctattactgcgtt

SEQ ID NO: 1020654 - DNA, 25 bp, Homo sapien
ttgggaaagggatgtagggaggcat

SEQ ID NO: 1020655 - DNA, 25 bp, Homo sapien
cttgggaaagggatgtagggaggca

SEQ ID NO: 1020656 - DNA, 25 bp, Homo sapien
tcatcccacggaagagcttcctgtc

SEQ ID NO: 1020657 - DNA, 25 bp, Homo sapien
tcctgtcattcacacaagcatgtgc

SEQ ID NO: 1020658 - DNA, 25 bp, Homo sapien
gcatgtgcacagctttcctgccagt

SEQ ID NO: 1020659 - DNA, 25 bp, Homo sapien
aaagccataattttaggacacaaga

SEQ ID NO: 1020660 - DNA, 25 bp, Homo sapien
ctcgggtccaggtcacttgttatgt

SEQ ID NO: 1020661 - DNA, 25 bp, Homo sapien
gcagatggtccctcttgctttggtt

SEQ ID NO: 1020662 - DNA, 25 bp, Homo sapien
tgtgtgagatcggaaaagcccctcc

SEQ ID NO: 1020663 - DNA, 25 bp, Homo sapien
tttggtgtgggcctcgctgctgacc

SEQ ID NO: 1020664 - DNA, 25 bp, Homo sapien
ctgaaaaatagaacccaggaaggtg

SEQ ID NO: 1020665 - DNA, 25 bp, Homo sapien
ggtcggctgggacagactgcgggca

SEQ ID NO: 1020666 - DNA, 25 bp, Homo sapien
cactttgtgcgtcttttgtgggata

SEQ ID NO: 1020667 - DNA, 25 bp, Homo sapien
gataggaaggagtggtccgggcaga

SEQ ID NO: 1020668 - DNA, 25 bp, Homo sapien
acgggatccagagcgccgcgcactt

SEQ ID NO: 1020669 - DNA, 25 bp, Homo sapien
agcaagcacctgtacacggccgaca

SEQ ID NO: 1020670 - DNA, 25 bp, Homo sapien
acatgttcacgcacgggatccagag

SEQ ID NO: 1020671 - DNA, 25 bp, Homo sapien
gccgcgcacttcgtcatgttcttcg

SEQ ID NO: 1020672 - DNA, 25 bp, Homo sapien
tcgttacttcgtgtgttcaccgccg

SEQ ID NO: 1020673 - DNA, 25 bp, Homo sapien
cctcatcgttacttcgtgtgttcac

SEQ ID NO: 1020674 - DNA, 25 bp, Homo sapien
tcaccgccgctctgagcagagcggg

SEQ ID NO: 1020675 - DNA, 25 bp, Homo sapien
acttcgtgtgttcaccgccgctctg

SEQ ID NO: 1020676 - DNA, 25 bp, Homo sapien
cacttgggaagcgggtttcatcacc

SEQ ID NO: 1020677 - DNA, 25 bp, Homo sapien
ccagtcagtcctgctaggtgccttc

SEQ ID NO: 1020678 - DNA, 25 bp, Homo sapien
tagtaaccggcataaatgagggcac

SEQ ID NO: 1020679 - DNA, 25 bp, Homo sapien
gagttcagccatagcaggcgtgctg

SEQ ID NO: 1020680 - DNA, 25 bp, Homo sapien
agggcacagtaggaccccagtcagt

SEQ ID NO: 1020681 - DNA, 25 bp, Homo sapien
gatgtcatctgtgttcggcagcttg

SEQ ID NO: 1020682 - DNA, 25 bp, Homo sapien
taatttccactgtgagccctgcgca

SEQ ID NO: 1020683 - DNA, 25 bp, Homo sapien
aagctaatggctccttgtcgtgacc

SEQ ID NO: 1020684 - DNA, 25 bp, Homo sapien
gccataaatgggatctaagcttaca

SEQ ID NO: 1020685 - DNA, 25 bp, Homo sapien
cactgctgtaacaggatgataatca

SEQ ID NO: 1020686 - DNA, 25 bp, Homo sapien
gatcacaaagatgggtgagagccca

SEQ ID NO: 1020687 - DNA, 25 bp, Homo sapien
cggaaggtgacggaatccattctgc

SEQ ID NO: 1020688 - DNA, 25 bp, Homo sapien
aaatagtacattgtgttgttgacac

SEQ ID NO: 1020689 - DNA, 25 bp, Homo sapien
cagaaggttctggatactctcaaca

SEQ ID NO: 1020690 - DNA, 25 bp, Homo sapien
tcctctatgtgtccttgctgtccag

SEQ ID NO: 1020691 - DNA, 25 bp, Homo sapien
tcaacattgacaccaaagagagcat

SEQ ID NO: 1020692 - DNA, 25 bp, Homo sapien
gtatccactaccatccctggaaaag

SEQ ID NO: 1020693 - DNA, 25 bp, Homo sapien
caggaaattccgaagaatttcagtt

SEQ ID NO: 1020694 - DNA, 25 bp, Homo sapien
ttcctaaagtgggagattgtaagat

SEQ ID NO: 1020695 - DNA, 25 bp, Homo sapien
agaatttcagttcctaaagtgggag

SEQ ID NO: 1020696 - DNA, 25 bp, Homo sapien
tttcagttcctaaagtgggagattg

SEQ ID NO: 1020697 - DNA, 25 bp, Homo sapien
atcccttgctgcatcgggatcaggg

SEQ ID NO: 1020698 - DNA, 25 bp, Homo sapien
cacccgcttctgtatgtgaatcact

SEQ ID NO: 1020699 - DNA, 25 bp, Homo sapien
tgctgccctgagaggcctcggtgtt

SEQ ID NO: 1020700 - DNA, 25 bp, Homo sapien
cactctgagtatttacatcctttga

SEQ ID NO: 1020701 - DNA, 25 bp, Homo sapien
tgccattgtctagaagccctagggt

SEQ ID NO: 1020702 - DNA, 25 bp, Homo sapien
ggtacagatgggacgtgatgccatt

SEQ ID NO: 1020703 - DNA, 25 bp, Homo sapien
tggatactgcgtcctttgggccagc

SEQ ID NO: 1020704 - DNA, 25 bp, Homo sapien
ttgggccagccatctagggtacaga

SEQ ID NO: 1020705 - DNA, 25 bp, Homo sapien
cagaggagactttccgctttcacag

SEQ ID NO: 1020706 - DNA, 25 bp, Homo sapien
ggaatcgaatcttctccacgtgtct

SEQ ID NO: 1020707 - DNA, 25 bp, Homo sapien
taagctcaagctgactgcttggacc

SEQ ID NO: 1020708 - DNA, 25 bp, Homo sapien
tgcttggaccctgcgtcaggaaaaa

SEQ ID NO: 1020709 - DNA, 25 bp, Homo sapien
tgggcatgccagaggcataaggcac

SEQ ID NO: 1020710 - DNA, 25 bp, Homo sapien
atgggcatgccagaggcataaggca

SEQ ID NO: 1020711 - DNA, 25 bp, Homo sapien
taatgcctaactggatggcaccttt

SEQ ID NO: 1020712 - DNA, 25 bp, Homo sapien
gtaatgcctaactggatggcacctt

SEQ ID NO: 1020713 - DNA, 25 bp, Homo sapien
ctctggtttggtactcaggctcccc

SEQ ID NO: 1020714 - DNA, 25 bp, Homo sapien
gtttggtactcaggctccccacagt

SEQ ID NO: 1020715 - DNA, 25 bp, Homo sapien
ggaaccactagctccagagctacag

SEQ ID NO: 1020716 - DNA, 25 bp, Homo sapien
aaccactagctccagagctacagag

SEQ ID NO: 1020717 - DNA, 25 bp, Homo sapien
ccactagctccagagctacagagtt

SEQ ID NO: 1020718 - DNA, 25 bp, Homo sapien
actagctccagagctacagagttca

SEQ ID NO: 1020719 - DNA, 25 bp, Homo sapien
ttggagtgtcttaataatgagttca

SEQ ID NO: 1020720 - DNA, 25 bp, Homo sapien
tgttggagtgtcttaataatgagtt

SEQ ID NO: 1020721 - DNA, 25 bp, Homo sapien
gagggttctggctgaggttcaagta

SEQ ID NO: 1020722 - DNA, 25 bp, Homo sapien
agggttctggctgaggttcaagtag

SEQ ID NO: 1020723 - DNA, 25 bp, Homo sapien
agccagaggctatagtccattatct

SEQ ID NO: 1020724 - DNA, 25 bp, Homo sapien
gccagaggctatagtccattatctt

SEQ ID NO: 1020725 - DNA, 25 bp, Homo sapien
cttgaagagtgtcgctgcttaaggg

SEQ ID NO: 1020726 - DNA, 25 bp, Homo sapien
ctttgagtgtcgattgacacttgaa

SEQ ID NO: 1020727 - DNA, 25 bp, Homo sapien
ttgacacttgaagagtgtcgctgct

SEQ ID NO: 1020728 - DNA, 25 bp, Homo sapien
tcgattgacacttgaagagtgtcgc

SEQ ID NO: 1020729 - DNA, 25 bp, Homo sapien
actggagcccgtatgcagagagaaa

SEQ ID NO: 1020730 - DNA, 25 bp, Homo sapien
gtccccatcatgtaccacggctttc

SEQ ID NO: 1020731 - DNA, 25 bp, Homo sapien
cacttgcacctttatcacttgtgac

SEQ ID NO: 1020732 - DNA, 25 bp, Homo sapien
tggctccacttgcacctttatcact

SEQ ID NO: 1020733 - DNA, 25 bp, Homo sapien
tcctccaaaggtggattctgaggtc

SEQ ID NO: 1020734 - DNA, 25 bp, Homo sapien
gtggattctgaggtctgaggtaaaa

SEQ ID NO: 1020735 - DNA, 25 bp, Homo sapien
gtaaaacatcagaacgaccaaggtg

SEQ ID NO: 1020736 - DNA, 25 bp, Homo sapien
tgaggtaaaacatcagaacgaccaa

SEQ ID NO: 1020737 - DNA, 25 bp, Homo sapien
ggtcctcaactgtccaaggcactaa

SEQ ID NO: 1020738 - DNA, 25 bp, Homo sapien
tatgggctaacctactgtcaaggca

SEQ ID NO: 1020739 - DNA, 25 bp, Homo sapien
ggttagccagttgaaaatccgtgcc

SEQ ID NO: 1020740 - DNA, 25 bp, Homo sapien
tcaccgaggcaagaatccactgtct

SEQ ID NO: 1020741 - DNA, 25 bp, Homo sapien
caccacacacggctgctggactctg

SEQ ID NO: 1020742 - DNA, 25 bp, Homo sapien
tgctggactctggatgctgccgttt

SEQ ID NO: 1020743 - DNA, 25 bp, Homo sapien
gatgctgccgtttctactagcagcc

SEQ ID NO: 1020744 - DNA, 25 bp, Homo sapien
ccctggcactaatgccacaatgtat

SEQ ID NO: 1020745 - DNA, 25 bp, Homo sapien
ttgggaaactgccaagtaaagtatg

SEQ ID NO: 1020746 - DNA, 25 bp, Homo sapien
tgaggtaatgtagtcttgtgctgcg

SEQ ID NO: 1020747 - DNA, 25 bp, Homo sapien
ggagcaaaaccagaacgtccaaaga

SEQ ID NO: 1020748 - DNA, 25 bp, Homo sapien
gaaactgccaagtaaagtatgaggt

SEQ ID NO: 1020749 - DNA, 25 bp, Homo sapien
tactcaactcgatgaagctgtctgt

SEQ ID NO: 1020750 - DNA, 25 bp, Homo sapien
tagtcttcatagctacctcagaggg

SEQ ID NO: 1020751 - DNA, 25 bp, Homo sapien
tgtgacgcacttaagccctaatggg

SEQ ID NO: 1020752 - DNA, 25 bp, Homo sapien
ctcagagggaaatcgccagccatga

SEQ ID NO: 1020753 - DNA, 25 bp, Homo sapien
gaagagtcagtgacaaaagctaaaa

SEQ ID NO: 1020754 - DNA, 25 bp, Homo sapien
caccatgccccaagggacagcgagt

SEQ ID NO: 1020755 - DNA, 25 bp, Homo sapien
agtcagtgacaaaagctaaaagcag

SEQ ID NO: 1020756 - DNA, 25 bp, Homo sapien
accatgccccaagggacagcgagtg

SEQ ID NO: 1020757 - DNA, 25 bp, Homo sapien
gctttctgggtcttcgtaaatcctc

SEQ ID NO: 1020758 - DNA, 25 bp, Homo sapien
gaagcttaggtatcgatgtcgtgtc

SEQ ID NO: 1020759 - DNA, 25 bp, Homo sapien
gtcgtgtctcttcattccgcctcaa

SEQ ID NO: 1020760 - DNA, 25 bp, Homo sapien
tcccggaaagatagaccattctctg

SEQ ID NO: 1020761 - DNA, 25 bp, Homo sapien
agtgtggcgactgcagaaaattgac

SEQ ID NO: 1020762 - DNA, 25 bp, Homo sapien
gaaaattgacaatgcctgcctgtgt

SEQ ID NO: 1020763 - DNA, 25 bp, Homo sapien
atcaatcatttgctggtacctggac

SEQ ID NO: 1020764 - DNA, 25 bp, Homo sapien
tatccgctactgtaggcttgacagg

SEQ ID NO: 1020765 - DNA, 25 bp, Homo sapien
gaactgtaggtatagacttcttaga

SEQ ID NO: 1020766 - DNA, 25 bp, Homo sapien
attgattagctcagagaactgtagg

SEQ ID NO: 1020767 - DNA, 25 bp, Homo sapien
caatatactctttgttagtcagaat

SEQ ID NO: 1020768 - DNA, 25 bp, Homo sapien
cattcatttctatacagggttaaca

SEQ ID NO: 1020769 - DNA, 25 bp, Homo sapien
tctccatgtctcgaagggtcttctt

SEQ ID NO: 1020770 - DNA, 25 bp, Homo sapien
tgtaggtctccatgtctcgaagggt

SEQ ID NO: 1020771 - DNA, 25 bp, Homo sapien
ccatgtctcgaagggtcttcttgtc

SEQ ID NO: 1020772 - DNA, 25 bp, Homo sapien
gatgttgtaggtctccatgtctcga

SEQ ID NO: 1020773 - DNA, 25 bp, Homo sapien
cacagcgtgcagagagtgctggaaa

SEQ ID NO: 1020774 - DNA, 25 bp, Homo sapien
taaggagctaaaagtcttggagtcc

SEQ ID NO: 1020775 - DNA, 25 bp, Homo sapien
tgatcattactaagaactttttggg

SEQ ID NO: 1020776 - DNA, 25 bp, Homo sapien
tagggctgttcctacacttaaggag

SEQ ID NO: 1020777 - DNA, 25 bp, Homo sapien
ttctctgaatgcagtgagttttaca

SEQ ID NO: 1020778 - DNA, 25 bp, Homo sapien
tgttgaggaggtgtggtcataccat

SEQ ID NO: 1020779 - DNA, 25 bp, Homo sapien
gattcattgaagatgtgttgaggag

SEQ ID NO: 1020780 - DNA, 25 bp, Homo sapien
aaatggctgattcattgaagatgtg

SEQ ID NO: 1020781 - DNA, 25 bp, Homo sapien
ctgtcctcccagctattgggaggct

SEQ ID NO: 1020782 - DNA, 25 bp, Homo sapien
agtccagggtgggagtattgcttga

SEQ ID NO: 1020783 - DNA, 25 bp, Homo sapien
ccaggacttcaggagtccagggtgg

SEQ ID NO: 1020784 - DNA, 25 bp, Homo sapien
tgtgcacctgtcctcccagctattg

SEQ ID NO: 1020785 - DNA, 25 bp, Homo sapien
tggacctccagccattacatgtgca

SEQ ID NO: 1020786 - DNA, 25 bp, Homo sapien
ccatgctcggcctacaaggtggctt

SEQ ID NO: 1020787 - DNA, 25 bp, Homo sapien
ggcagttaggaaatagctagcagtc

SEQ ID NO: 1020788 - DNA, 25 bp, Homo sapien
catttcatgtagcaaaaaggaaggc

SEQ ID NO: 1020789 - DNA, 25 bp, Homo sapien
tttttatgtcaaaattcaattgcta

SEQ ID NO: 1020790 - DNA, 25 bp, Homo sapien
acttgtgtctgaatgttttatttgt

SEQ ID NO: 1020791 - DNA, 25 bp, Homo sapien
cttgtgtctgaatgttttatttgtt

SEQ ID NO: 1020792 - DNA, 25 bp, Homo sapien
ttttatgtcaaaattcaattgctat

SEQ ID NO: 1020793 - DNA, 25 bp, Homo sapien
attcctttatacaaggtgccttttg

SEQ ID NO: 1020794 - DNA, 25 bp, Homo sapien
tcctttatacaaggtgccttttgta

SEQ ID NO: 1020795 - DNA, 25 bp, Homo sapien
ttttcagcttatcagataaaaatga

SEQ ID NO: 1020796 - DNA, 25 bp, Homo sapien
tatacaaggtgccttttgtaacaaa

SEQ ID NO: 1020797 - DNA, 25 bp, Homo sapien
ggaaatcctgacatgtgctgcatgc

SEQ ID NO: 1020798 - DNA, 25 bp, Homo sapien
catggaggaactttacattcagtga

SEQ ID NO: 1020799 - DNA, 25 bp, Homo sapien
gaaacaaggtagaatcgtggttgcc

SEQ ID NO: 1020800 - DNA, 25 bp, Homo sapien
gtttgtacgctcctgttcacagcag

SEQ ID NO: 1020801 - DNA, 25 bp, Homo sapien
gtctaacaggattgactactatagc

SEQ ID NO: 1020802 - DNA, 25 bp, Homo sapien
cagcagtggttagaatacagggtca

SEQ ID NO: 1020803 - DNA, 25 bp, Homo sapien
atagcagctcatctagtcaagcaag

SEQ ID NO: 1020804 - DNA, 25 bp, Homo sapien
gaaaaagcaatcgttcagcagtggt

SEQ ID NO: 1020805 - DNA, 25 bp, Homo sapien
tatttaagttaacctgaagcctaga

SEQ ID NO: 1020806 - DNA, 25 bp, Homo sapien
cagccctgtgattggtggcagagta

SEQ ID NO: 1020807 - DNA, 25 bp, Homo sapien
tgttcagcctaagatcagccctgtg

SEQ ID NO: 1020808 - DNA, 25 bp, Homo sapien
cctagaaaggttaagtgttcagcct

SEQ ID NO: 1020809 - DNA, 25 bp, Homo sapien
caaggtttggattcagccggtctcc

SEQ ID NO: 1020810 - DNA, 25 bp, Homo sapien
tactataactagatggtccagactg

SEQ ID NO: 1020811 - DNA, 25 bp, Homo sapien
cagagctaggtaggaaatacttttc

SEQ ID NO: 1020812 - DNA, 25 bp, Homo sapien
aagtgatctgatcctaccctttgac

SEQ ID NO: 1020813 - DNA, 25 bp, Homo sapien
aagaagaccaagctagggaaccctg

SEQ ID NO: 1020814 - DNA, 25 bp, Homo sapien
gcaagtatgaaccatgctactcaga

SEQ ID NO: 1020815 - DNA, 25 bp, Homo sapien
tactcagaatggcacgtaaaagctg

SEQ ID NO: 1020816 - DNA, 25 bp, Homo sapien
gaaccctgggatcaatcaaaaactc

SEQ ID NO: 1020817 - DNA, 25 bp, Homo sapien
tagaacacctagtacaatgctttgc

SEQ ID NO: 1020818 - DNA, 25 bp, Homo sapien
gctcattgcatttctgaccagtgtg

SEQ ID NO: 1020819 - DNA, 25 bp, Homo sapien
tccagctttacatgaggacctttgt

SEQ ID NO: 1020820 - DNA, 25 bp, Homo sapien
aagattttcaaacttcatgtgcccc

SEQ ID NO: 1020821 - DNA, 25 bp, Homo sapien
tccatctcctatacaggacatccat

SEQ ID NO: 1020822 - DNA, 25 bp, Homo sapien
agagttccatctcctatacaggaca

SEQ ID NO: 1020823 - DNA, 25 bp, Homo sapien
gttccatctcctatacaggacatcc

SEQ ID NO: 1020824 - DNA, 25 bp, Homo sapien
gagttccatctcctatacaggacat

SEQ ID NO: 1020825 - DNA, 25 bp, Homo sapien
cgatctgcaaattgaagtgacacaa

SEQ ID NO: 1020826 - DNA, 25 bp, Homo sapien
gatgagattgtcaaatcaatctcag

SEQ ID NO: 1020827 - DNA, 25 bp, Homo sapien
taagaaaagtagctgccaataatgg

SEQ ID NO: 1020828 - DNA, 25 bp, Homo sapien
gtgaattagagattctgctcagtgt

SEQ ID NO: 1020829 - DNA, 25 bp, Homo sapien
gagcccacctggttcgtgctgacct

SEQ ID NO: 1020830 - DNA, 25 bp, Homo sapien
gcccacctggttcgtgctgacctca

SEQ ID NO: 1020831 - DNA, 25 bp, Homo sapien
cagagcccacctggttcgtgctgac

SEQ ID NO: 1020832 - DNA, 25 bp, Homo sapien
gctggctggacccaagctcagagcc

SEQ ID NO: 1020833 - DNA, 25 bp, Homo sapien
ggctctgtgggcttctagcataata

SEQ ID NO: 1020834 - DNA, 25 bp, Homo sapien
tctagcataataaccgcctttctcc

SEQ ID NO: 1020835 - DNA, 25 bp, Homo sapien
tgtgggctctgtgggcttctagcat

SEQ ID NO: 1020836 - DNA, 25 bp, Homo sapien
tgtgggcttctagcataataaccgc

SEQ ID NO: 1020837 - DNA, 25 bp, Homo sapien
acatttataatgtcaggcaccgggc

SEQ ID NO: 1020838 - DNA, 25 bp, Homo sapien
caccataagtaagttcattccgaca

SEQ ID NO: 1020839 - DNA, 25 bp, Homo sapien
taactcttctgccaccataagtaag

SEQ ID NO: 1020840 - DNA, 25 bp, Homo sapien
cattccgacataatctctactagag

SEQ ID NO: 1020841 - DNA, 25 bp, Homo sapien
cctgggtctgttgtcgcagcaggtc

SEQ ID NO: 1020842 - DNA, 25 bp, Homo sapien
ctcctcctttcttgccccattctcc

SEQ ID NO: 1020843 - DNA, 25 bp, Homo sapien
gcagcctgggtctgttgtcgcagca

SEQ ID NO: 1020844 - DNA, 25 bp, Homo sapien
tgggtctgttgtcgcagcaggtccc

SEQ ID NO: 1020845 - DNA, 25 bp, Homo sapien
gcagactttgaggagacttgacatc

SEQ ID NO: 1020846 - DNA, 25 bp, Homo sapien
tccaagtcccagtaggatttcctgc

SEQ ID NO: 1020847 - DNA, 25 bp, Homo sapien
ttcctgcagactttgaggagacttg

SEQ ID NO: 1020848 - DNA, 25 bp, Homo sapien
ctttgaggagacttgacatccagag

SEQ ID NO: 1020849 - DNA, 25 bp, Homo sapien
gggacaaaggaccatcctggtcctc

SEQ ID NO: 1020850 - DNA, 25 bp, Homo sapien
tccctttgattaatttgagaggact

SEQ ID NO: 1020851 - DNA, 25 bp, Homo sapien
ggacaaaggaccatcctggtcctcg

SEQ ID NO: 1020852 - DNA, 25 bp, Homo sapien
ttcctatccctttgattaatttgag

SEQ ID NO: 1020853 - DNA, 25 bp, Homo sapien
tcagctgggtttaacgcaacgggtc

SEQ ID NO: 1020854 - DNA, 25 bp, Homo sapien
taaaaggccagatgacacgaagggc

SEQ ID NO: 1020855 - DNA, 25 bp, Homo sapien
gcctgaacccaaataagtggagctt

SEQ ID NO: 1020856 - DNA, 25 bp, Homo sapien
ttaaacagcagcagcgtgtgccctc

SEQ ID NO: 1020857 - DNA, 25 bp, Homo sapien
gaacttttcttgaccactctagtct

SEQ ID NO: 1020858 - DNA, 25 bp, Homo sapien
cagccaatagggagcctctgtgcca

SEQ ID NO: 1020859 - DNA, 25 bp, Homo sapien
ctctagtctagtccacaaagttctc

SEQ ID NO: 1020860 - DNA, 25 bp, Homo sapien
tagtcaagaaagctcctaaatcctg

SEQ ID NO: 1020861 - DNA, 25 bp, Homo sapien
cagtctgcaagaacatagcttaagg

SEQ ID NO: 1020862 - DNA, 25 bp, Homo sapien
tctacaaaactgaatccttggtgga

SEQ ID NO: 1020863 - DNA, 25 bp, Homo sapien
caatcgagagatcttgctaatgtcc

SEQ ID NO: 1020864 - DNA, 25 bp, Homo sapien
aaagacccattactcctgtgcctcg

SEQ ID NO: 1020865 - DNA, 25 bp, Homo sapien
aaacaccagctggtctcgtagctcg

SEQ ID NO: 1020866 - DNA, 25 bp, Homo sapien
cagctggtctcgtagctcgcatact

SEQ ID NO: 1020867 - DNA, 25 bp, Homo sapien
tggtctcgtagctcgcatactagag

SEQ ID NO: 1020868 - DNA, 25 bp, Homo sapien
tctcgtagctcgcatactagaggct

SEQ ID NO: 1020869 - DNA, 25 bp, Homo sapien
tcagctcggttaggcgcattggcaa

SEQ ID NO: 1020870 - DNA, 25 bp, Homo sapien
caatgtgaggagcatgcgaaagccc

SEQ ID NO: 1020871 - DNA, 25 bp, Homo sapien
tgagccctcgtcctatacctgtgtc

SEQ ID NO: 1020872 - DNA, 25 bp, Homo sapien
gtttgattccctccaatacgctggc

SEQ ID NO: 1020873 - DNA, 25 bp, Homo sapien
gaggagtggaccctctgctcagaca

SEQ ID NO: 1020874 - DNA, 25 bp, Homo sapien
gacataaagtatctgccaggatatt

SEQ ID NO: 1020875 - DNA, 25 bp, Homo sapien
acatgacataaagtatctgccagga

SEQ ID NO: 1020876 - DNA, 25 bp, Homo sapien
gatattgctgcaaaggtatgccggg

SEQ ID NO: 1020877 - DNA, 25 bp, Homo sapien
cattttttccagtagcctggggctt

SEQ ID NO: 1020878 - DNA, 25 bp, Homo sapien
cttggggcagaacaatgcagttcat

SEQ ID NO: 1020879 - DNA, 25 bp, Homo sapien
tggggcttggggcagaacaatgcag

SEQ ID NO: 1020880 - DNA, 25 bp, Homo sapien
gggcttggggcagaacaatgcagtt

SEQ ID NO: 1020881 - DNA, 25 bp, Homo sapien
tcccctttcacctcgctctctctag

SEQ ID NO: 1020882 - DNA, 25 bp, Homo sapien
cccactcatcccctttcacctcgct

SEQ ID NO: 1020883 - DNA, 25 bp, Homo sapien
ttcacctcgctctctctagcgcgcg

SEQ ID NO: 1020884 - DNA, 25 bp, Homo sapien
actcatcccctttcacctcgctctc

SEQ ID NO: 1020885 - DNA, 25 bp, Homo sapien
cacaaaacgaggcagttggaaaaga

SEQ ID NO: 1020886 - DNA, 25 bp, Homo sapien
tggaaaagatgtagaccccgttcca

SEQ ID NO: 1020887 - DNA, 25 bp, Homo sapien
caagttgtcagcatcaaaagaacac

SEQ ID NO: 1020888 - DNA, 25 bp, Homo sapien
tttttagatatgtctgctgcctttt

SEQ ID NO: 1020889 - DNA, 25 bp, Homo sapien
gagtgtgtaccatgccctatttgaa

SEQ ID NO: 1020890 - DNA, 25 bp, Homo sapien
gaaattgcatcttaagtgaggttac

SEQ ID NO: 1020891 - DNA, 25 bp, Homo sapien
tcagtaattgggctaaatgtaatca

SEQ ID NO: 1020892 - DNA, 25 bp, Homo sapien
aatgtaatcatcgacggaggctgca

SEQ ID NO: 1020893 - DNA, 25 bp, Homo sapien
tcactgtgcagcatttgtgaagaga

SEQ ID NO: 1020894 - DNA, 25 bp, Homo sapien
cactgtgcagcatttgtgaagagag

SEQ ID NO: 1020895 - DNA, 25 bp, Homo sapien
gctgcatcacaacgtaacagatcgg

SEQ ID NO: 1020896 - DNA, 25 bp, Homo sapien
ggcatgttgcagtctcgtgttttca

SEQ ID NO: 1020897 - DNA, 25 bp, Homo sapien
ttccagtcttgagaaaaccaatcca

SEQ ID NO: 1020898 - DNA, 25 bp, Homo sapien
gagcaagaacccactacctcgaaag

SEQ ID NO: 1020899 - DNA, 25 bp, Homo sapien
taaacatcaatcaagtcaaggtggt

SEQ ID NO: 1020900 - DNA, 25 bp, Homo sapien
gacagctgagaatatgtaatctgca

SEQ ID NO: 1020901 - DNA, 25 bp, Homo sapien
ggtgaacataccattgacagctgag

SEQ ID NO: 1020902 - DNA, 25 bp, Homo sapien
caaggtggttgatagcattgttctg

SEQ ID NO: 1020903 - DNA, 25 bp, Homo sapien
tcataatcatcatcagtctcaccat

SEQ ID NO: 1020904 - DNA, 25 bp, Homo sapien
tcagtgaagctgcacatcataatca

SEQ ID NO: 1020905 - DNA, 25 bp, Homo sapien
acctcagtgaagctgcacatcataa

SEQ ID NO: 1020906 - DNA, 25 bp, Homo sapien
gtgaagctgcacatcataatcatca

SEQ ID NO: 1020907 - DNA, 25 bp, Homo sapien
tctttctctccttccatccctttgg

SEQ ID NO: 1020908 - DNA, 25 bp, Homo sapien
ctctccttccatccctttggaaggg

SEQ ID NO: 1020909 - DNA, 25 bp, Homo sapien
tttctctccttccatccctttggaa

SEQ ID NO: 1020910 - DNA, 25 bp, Homo sapien
tctctccttccatccctttggaagg

SEQ ID NO: 1020911 - DNA, 25 bp, Homo sapien
gggtccttcttgtgacctggcaaag

SEQ ID NO: 1020912 - DNA, 25 bp, Homo sapien
ccactcccagctccggcgggtcctt

SEQ ID NO: 1020913 - DNA, 25 bp, Homo sapien
cgggtccttcttgtgacctggcaaa

SEQ ID NO: 1020914 - DNA, 25 bp, Homo sapien
cccagctccggcgggtccttcttgt

SEQ ID NO: 1020915 - DNA, 25 bp, Homo sapien
aactcttgaacacctgttaagtcag

SEQ ID NO: 1020916 - DNA, 25 bp, Homo sapien
ttaagtcagccagttgtgtgaaatc

SEQ ID NO: 1020917 - DNA, 25 bp, Homo sapien
ttgaacacctgttaagtcagccagt

SEQ ID NO: 1020918 - DNA, 25 bp, Homo sapien
ccagttgtgtgaaatcagcatacgt

SEQ ID NO: 1020919 - DNA, 25 bp, Homo sapien
ttcccttcctgcaagaaaaattgga

SEQ ID NO: 1020920 - DNA, 25 bp, Homo sapien
aggttttcggaaagagaggcttgag

SEQ ID NO: 1020921 - DNA, 25 bp, Homo sapien
gaggaggggacaatgtaataattgt

SEQ ID NO: 1020922 - DNA, 25 bp, Homo sapien
cggtccccagatgttaccaaagcat

SEQ ID NO: 1020923 - DNA, 25 bp, Homo sapien
tccaaattcattagatgatgatcag

SEQ ID NO: 1020924 - DNA, 25 bp, Homo sapien
gaggagacttgactaatggaagccc

SEQ ID NO: 1020925 - DNA, 25 bp, Homo sapien
tccttaagaacaagcaaccaagttg

SEQ ID NO: 1020926 - DNA, 25 bp, Homo sapien
aggaaaccatggatagatgctctcc

SEQ ID NO: 1020927 - DNA, 25 bp, Homo sapien
actggtgaccgccatagtcacagca

SEQ ID NO: 1020928 - DNA, 25 bp, Homo sapien
tgaccgccatagtcacagcacaggt

SEQ ID NO: 1020929 - DNA, 25 bp, Homo sapien
cagaggcaccattggtgacaatagg

SEQ ID NO: 1020930 - DNA, 25 bp, Homo sapien
ttggtgacaataggggtgacagcac

SEQ ID NO: 1020931 - DNA, 25 bp, Homo sapien
ttcactcagggtcagtttccgatac

SEQ ID NO: 1020932 - DNA, 25 bp, Homo sapien
cagtttccgataccatagtttagct

SEQ ID NO: 1020933 - DNA, 25 bp, Homo sapien
atagtttagcttcatccacttccat

SEQ ID NO: 1020934 - DNA, 25 bp, Homo sapien
aggggacgcggtgagctctgccatg

SEQ ID NO: 1020935 - DNA, 25 bp, Homo sapien
gagaatacggtgagcccaaaggtga

SEQ ID NO: 1020936 - DNA, 25 bp, Homo sapien
agaatacggtgagcccaaaggtgag

SEQ ID NO: 1020937 - DNA, 25 bp, Homo sapien
cagagaatacggtgagcccaaaggt

SEQ ID NO: 1020938 - DNA, 25 bp, Homo sapien
gggcagagaatacggtgagcccaaa

SEQ ID NO: 1020939 - DNA, 25 bp, Homo sapien
cccaccatagttaggagggaagaat

SEQ ID NO: 1020940 - DNA, 25 bp, Homo sapien
ttgcatacccgagccatccctgatt

SEQ ID NO: 1020941 - DNA, 25 bp, Homo sapien
tgggtcccaccatagttaggaggga

SEQ ID NO: 1020942 - DNA, 25 bp, Homo sapien
cagagggatggtctagtttgcatac

SEQ ID NO: 1020943 - DNA, 25 bp, Homo sapien
tccaccggtgatccctggactggaa

SEQ ID NO: 1020944 - DNA, 25 bp, Homo sapien
catgaggtgtcaggcgggtgggact

SEQ ID NO: 1020945 - DNA, 25 bp, Homo sapien
tagactaatgggtctccaccggtga

SEQ ID NO: 1020946 - DNA, 25 bp, Homo sapien
caaggtgtccttctggtgagcatga

SEQ ID NO: 1020947 - DNA, 25 bp, Homo sapien
tatcgtatcagaagatgcaacggca

SEQ ID NO: 1020948 - DNA, 25 bp, Homo sapien
tattgacgatctatcgtatcagaag

SEQ ID NO: 1020949 - DNA, 25 bp, Homo sapien
agaagatcctatttaaattaggaag

SEQ ID NO: 1020950 - DNA, 25 bp, Homo sapien
cattcagtgttagaaggatttcatg

SEQ ID NO: 1020951 - DNA, 25 bp, Homo sapien
ttgagacgattgtgacttgcatccc

SEQ ID NO: 1020952 - DNA, 25 bp, Homo sapien
gcatttttatgttctccgggagctc

SEQ ID NO: 1020953 - DNA, 25 bp, Homo sapien
caaaggtgttctagcatgcatgcag

SEQ ID NO: 1020954 - DNA, 25 bp, Homo sapien
tgactggaacagacgctgtcgaggt

SEQ ID NO: 1020955 - DNA, 25 bp, Homo sapien
gccctgtgccttcttgctatttctc

SEQ ID NO: 1020956 - DNA, 25 bp, Homo sapien
ctgactgatcagtgaagcaagagag

SEQ ID NO: 1020957 - DNA, 25 bp, Homo sapien
tccttgaaatttcttgagtgaattc

SEQ ID NO: 1020958 - DNA, 25 bp, Homo sapien
caactgctcctcagataaactgctc

SEQ ID NO: 1020959 - DNA, 25 bp, Homo sapien
gaacagcactgtccctctgtagtgt

SEQ ID NO: 1020960 - DNA, 25 bp, Homo sapien
ttggagcctgacagtgccggcccca

SEQ ID NO: 1020961 - DNA, 25 bp, Homo sapien
actataacctaaggctgctttgccc

SEQ ID NO: 1020962 - DNA, 25 bp, Homo sapien
gtatttgtttgtatctgcgtctgca

SEQ ID NO: 1020963 - DNA, 25 bp, Homo sapien
tcccaagtcgttggcccaagttgct

SEQ ID NO: 1020964 - DNA, 25 bp, Homo sapien
gtctatcaagctggagacatctttt

SEQ ID NO: 1020965 - DNA, 25 bp, Homo sapien
tatagccctgttgtctatcaagctg

SEQ ID NO: 1020966 - DNA, 25 bp, Homo sapien
tgtggcctggcgttcctggagattg

SEQ ID NO: 1020967 - DNA, 25 bp, Homo sapien
tggcctggcgttcctggagattgca

SEQ ID NO: 1020968 - DNA, 25 bp, Homo sapien
gcctggcgttcctggagattgcaaa

SEQ ID NO: 1020969 - DNA, 25 bp, Homo sapien
tggcgttcctggagattgcaaaaac

SEQ ID NO: 1020970 - DNA, 25 bp, Homo sapien
aggccctctcaggtaccacagaaag

SEQ ID NO: 1020971 - DNA, 25 bp, Homo sapien
agaaagagcagctgcctgagtttcc

SEQ ID NO: 1020972 - DNA, 25 bp, Homo sapien
gaaagagcagctgcctgagtttccc

SEQ ID NO: 1020973 - DNA, 25 bp, Homo sapien
gtgcaggccctctcaggtaccacag

SEQ ID NO: 1020974 - DNA, 25 bp, Homo sapien
gagttagttctcaaaccctgatctg

SEQ ID NO: 1020975 - DNA, 25 bp, Homo sapien
cattggacgggtcatgaatggttga

SEQ ID NO: 1020976 - DNA, 25 bp, Homo sapien
aaaggacatagcttggccacttggc

SEQ ID NO: 1020977 - DNA, 25 bp, Homo sapien
cacttggctgcaatgcctgtagtat

SEQ ID NO: 1020978 - DNA, 25 bp, Homo sapien
cacctctaaggagtccttttgcatt

SEQ ID NO: 1020979 - DNA, 25 bp, Homo sapien
ccttgtcacctctaaggagtccttt

SEQ ID NO: 1020980 - DNA, 25 bp, Homo sapien
ctccctggaagagtctatggtcaca

SEQ ID NO: 1020981 - DNA, 25 bp, Homo sapien
tctgcctttgtcaaactgccttgtc

SEQ ID NO: 1020982 - DNA, 25 bp, Homo sapien
tggtagctgcaattgtcttcagggc

SEQ ID NO: 1020983 - DNA, 25 bp, Homo sapien
tccttgcaatgtttcatatccttac

SEQ ID NO: 1020984 - DNA, 25 bp, Homo sapien
tgtttcatatccttacttttcacgc

SEQ ID NO: 1020985 - DNA, 25 bp, Homo sapien
ctaacaattaatgggctggtagctg

SEQ ID NO: 1020986 - DNA, 25 bp, Homo sapien
gtccaggtaaataagctggcaatga

SEQ ID NO: 1020987 - DNA, 25 bp, Homo sapien
agacgtccaggtaaataagctggca

SEQ ID NO: 1020988 - DNA, 25 bp, Homo sapien
gacgtccaggtaaataagctggcaa

SEQ ID NO: 1020989 - DNA, 25 bp, Homo sapien
tcagtactccatgcggttctgcagc

SEQ ID NO: 1020990 - DNA, 25 bp, Homo sapien
catcgcaggtctggtttactatccg

SEQ ID NO: 1020991 - DNA, 25 bp, Homo sapien
tttactatccgagctccaggagcct

SEQ ID NO: 1020992 - DNA, 25 bp, Homo sapien
ctatgaagaccactcattgacgaca

SEQ ID NO: 1020993 - DNA, 25 bp, Homo sapien
ctcattgacgacatcatcgcaggtc

SEQ ID NO: 1020994 - DNA, 25 bp, Homo sapien
tctttgagtgtgatattcgttccat

SEQ ID NO: 1020995 - DNA, 25 bp, Homo sapien
gaagcttgtgctcctaccggaccct

SEQ ID NO: 1020996 - DNA, 25 bp, Homo sapien
tattttcctccacggaagcttgtgc

SEQ ID NO: 1020997 - DNA, 25 bp, Homo sapien
gctgttctttgagtgtgatattcgt

SEQ ID NO: 1020998 - DNA, 25 bp, Homo sapien
tcaagagagccacgtctagcagact

SEQ ID NO: 1020999 - DNA, 25 bp, Homo sapien
gaggcattgctatcccatttgtgga

SEQ ID NO: 1021000 - DNA, 25 bp, Homo sapien
caagaaagtcaaggacgctggcaca

SEQ ID NO: 1021001 - DNA, 25 bp, Homo sapien
gaaatggaccatgtgttgcaagact

SEQ ID NO: 1021002 - DNA, 25 bp, Homo sapien
cggccttggggtacgcgtgccttcg

SEQ ID NO: 1021003 - DNA, 25 bp, Homo sapien
acgcgtgccttcggggcctttcctg

SEQ ID NO: 1021004 - DNA, 25 bp, Homo sapien
cgtgccttcggggcctttcctgtgt

SEQ ID NO: 1021005 - DNA, 25 bp, Homo sapien
gcgtgccttcggggcctttcctgtg

SEQ ID NO: 1021006 - DNA, 25 bp, Homo sapien
gtaaaggctgaaaggcgaccctcgc

SEQ ID NO: 1021007 - DNA, 25 bp, Homo sapien
aggctgaaaggcgaccctcgcaccg

SEQ ID NO: 1021008 - DNA, 25 bp, Homo sapien
ggtagaggtaaaggctgaaaggcga

SEQ ID NO: 1021009 - DNA, 25 bp, Homo sapien
tagaggtaaaggctgaaaggcgacc

SEQ ID NO: 1021010 - DNA, 25 bp, Homo sapien
cagagcgccgatgggataatgagat

SEQ ID NO: 1021011 - DNA, 25 bp, Homo sapien
agggtagccggcagctgaaacccga

SEQ ID NO: 1021012 - DNA, 25 bp, Homo sapien
cgtaaagtcgcctctctcgtgggca

SEQ ID NO: 1021013 - DNA, 25 bp, Homo sapien
attctccagcagatcggcgctcacc

SEQ ID NO: 1021014 - DNA, 25 bp, Homo sapien
gaccacggttgctgcagctacagga

SEQ ID NO: 1021015 - DNA, 25 bp, Homo sapien
tcatttagatcaagtagcacgcaga

SEQ ID NO: 1021016 - DNA, 25 bp, Homo sapien
tgagttataacgtcagaagcaaccc

SEQ ID NO: 1021017 - DNA, 25 bp, Homo sapien
tttatgaggttgcaaggaccacggt

SEQ ID NO: 1021018 - DNA, 25 bp, Homo sapien
gaatgcagaaagctatgctcacggc

SEQ ID NO: 1021019 - DNA, 25 bp, Homo sapien
cacggctactgcaattgtccaggca

SEQ ID NO: 1021020 - DNA, 25 bp, Homo sapien
taacaccagcctaacaacgttggca

SEQ ID NO: 1021021 - DNA, 25 bp, Homo sapien
cagggagctcatacgcatagtttac

SEQ ID NO: 1021022 - DNA, 25 bp, Homo sapien
agctactgctggaatgtgtgaagtc

SEQ ID NO: 1021023 - DNA, 25 bp, Homo sapien
aatgtgatcaagaagtgaattaacc

SEQ ID NO: 1021024 - DNA, 25 bp, Homo sapien
gaagagggattgagctgtccactca

SEQ ID NO: 1021025 - DNA, 25 bp, Homo sapien
tctgagggacgccaggcaataccat

SEQ ID NO: 1021026 - DNA, 25 bp, Homo sapien
caaagagcagcgaggaaataatgtg

SEQ ID NO: 1021027 - DNA, 25 bp, Homo sapien
tatatagccaagcagtttaaatgtc

SEQ ID NO: 1021028 - DNA, 25 bp, Homo sapien
tggttaaccttatcagtaaagcact

SEQ ID NO: 1021029 - DNA, 25 bp, Homo sapien
cattagaatttcatccactctgcag

SEQ ID NO: 1021030 - DNA, 25 bp, Homo sapien
taaatgtcaggagaactatgatgag

SEQ ID NO: 1021031 - DNA, 25 bp, Homo sapien
taagttttatattggtgatggcaca

SEQ ID NO: 1021032 - DNA, 25 bp, Homo sapien
aagttttatattggtgatggcacaa

SEQ ID NO: 1021033 - DNA, 25 bp, Homo sapien
ttatattggtgatggcacaaacaat

SEQ ID NO: 1021034 - DNA, 25 bp, Homo sapien
ttttatattggtgatggcacaaaca

SEQ ID NO: 1021035 - DNA, 25 bp, Homo sapien
cacagagtagaatcacaacttggaa

SEQ ID NO: 1021036 - DNA, 25 bp, Homo sapien
gcattgtggctgagatctaaaagca

SEQ ID NO: 1021037 - DNA, 25 bp, Homo sapien
ttttctccacctgaaagcctatagg

SEQ ID NO: 1021038 - DNA, 25 bp, Homo sapien
tttgtgatgatcaaagcccggagag

SEQ ID NO: 1021039 - DNA, 25 bp, Homo sapien
ccggagcttctctgttaactggata

SEQ ID NO: 1021040 - DNA, 25 bp, Homo sapien
gatgatatgttatttggcacgtaac

SEQ ID NO: 1021041 - DNA, 25 bp, Homo sapien
gcttacttgatctcatagagtagga

SEQ ID NO: 1021042 - DNA, 25 bp, Homo sapien
tgttagccacaacgtttcatatgta

SEQ ID NO: 1021043 - DNA, 25 bp, Homo sapien
aaataagtcacatgggacctttggt

SEQ ID NO: 1021044 - DNA, 25 bp, Homo sapien
ggtttgtagtctaaaccactgcaat

SEQ ID NO: 1021045 - DNA, 25 bp, Homo sapien
aaaatattgctaagaaatgccaaca

SEQ ID NO: 1021046 - DNA, 25 bp, Homo sapien
tcaacatgtaggcatatctcagagt

SEQ ID NO: 1021047 - DNA, 25 bp, Homo sapien
tttcatgcccatcgttcgccttctg

SEQ ID NO: 1021048 - DNA, 25 bp, Homo sapien
gcagtagacgtgtccggtgtcccat

SEQ ID NO: 1021049 - DNA, 25 bp, Homo sapien
tctgcagtagacgtgtccggtgtcc

SEQ ID NO: 1021050 - DNA, 25 bp, Homo sapien
catcgttcgccttctgcagtagacg

SEQ ID NO: 1021051 - DNA, 25 bp, Homo sapien
gacttgtttcatcttgcacttaaga

SEQ ID NO: 1021052 - DNA, 25 bp, Homo sapien
cagaaagacttgtttcatcttgcac

SEQ ID NO: 1021053 - DNA, 25 bp, Homo sapien
gtttcatcttgcacttaagagttca

SEQ ID NO: 1021054 - DNA, 25 bp, Homo sapien
ttgcacttaagagttcaatgacatc

SEQ ID NO: 1021055 - DNA, 25 bp, Homo sapien
tccccttctcgttcaggcacctggt

SEQ ID NO: 1021056 - DNA, 25 bp, Homo sapien
gagttcaactttctggctccctgaa

SEQ ID NO: 1021057 - DNA, 25 bp, Homo sapien
tcaggcacctggtagagttcaactt

SEQ ID NO: 1021058 - DNA, 25 bp, Homo sapien
ccctgaagcttgcacagggccctga

SEQ ID NO: 1021059 - DNA, 25 bp, Homo sapien
cctgggaaactgtaagatggacgct

SEQ ID NO: 1021060 - DNA, 25 bp, Homo sapien
tctgggtctgtaattgagggctgct

SEQ ID NO: 1021061 - DNA, 25 bp, Homo sapien
gagacacagtcatcagcaattggaa

SEQ ID NO: 1021062 - DNA, 25 bp, Homo sapien
taaggacacccgtgatgtgggcagc

SEQ ID NO: 1021063 - DNA, 25 bp, Homo sapien
gcactcttacccctcaagatggcaa

SEQ ID NO: 1021064 - DNA, 25 bp, Homo sapien
tgtctgtacgtatgcgcatgtatat

SEQ ID NO: 1021065 - DNA, 25 bp, Homo sapien
caaggagactccaaatcattgcact

SEQ ID NO: 1021066 - DNA, 25 bp, Homo sapien
ggtagtcagcatcccatattaatct

SEQ ID NO: 1021067 - DNA, 25 bp, Homo sapien
tatcctttttagtgccctttgagag

SEQ ID NO: 1021068 - DNA, 25 bp, Homo sapien
cagtatcctttttagtgccctttga

SEQ ID NO: 1021069 - DNA, 25 bp, Homo sapien
ctttttagtgccctttgagagcctc

SEQ ID NO: 1021070 - DNA, 25 bp, Homo sapien
ttttagtgccctttgagagcctctc

SEQ ID NO: 1021071 - DNA, 25 bp, Homo sapien
gaatgagagtctgctctgattccaa

SEQ ID NO: 1021072 - DNA, 25 bp, Homo sapien
tttagacaaatgaaggatcagcgtg

SEQ ID NO: 1021073 - DNA, 25 bp, Homo sapien
gatatgtacccaacaagttgtcaga

SEQ ID NO: 1021074 - DNA, 25 bp, Homo sapien
tcccagcactcttttcttagaaagg

SEQ ID NO: 1021075 - DNA, 25 bp, Homo sapien
catccaaatgttacttatgcagcga

SEQ ID NO: 1021076 - DNA, 25 bp, Homo sapien
gaatcaagcacagcgtagaaattca

SEQ ID NO: 1021077 - DNA, 25 bp, Homo sapien
caccaaggtcttgatcctgtaactc

SEQ ID NO: 1021078 - DNA, 25 bp, Homo sapien
tatacagtgtctgctctcacgtggt

SEQ ID NO: 1021079 - DNA, 25 bp, Homo sapien
tattggtagagtggaagaatcagag

SEQ ID NO: 1021080 - DNA, 25 bp, Homo sapien
gagcaatgccttgggatttatttct

SEQ ID NO: 1021081 - DNA, 25 bp, Homo sapien
cagagcaagattaaagtgctcatcc

SEQ ID NO: 1021082 - DNA, 25 bp, Homo sapien
ggatggtattttcctcaccagctaa

SEQ ID NO: 1021083 - DNA, 25 bp, Homo sapien
caatcagcaatagagccacaaatac

SEQ ID NO: 1021084 - DNA, 25 bp, Homo sapien
tggtcacataagttcacttctatac

SEQ ID NO: 1021085 - DNA, 25 bp, Homo sapien
cagccaagatttctggttccccggg

SEQ ID NO: 1021086 - DNA, 25 bp, Homo sapien
caacagccaagatttctggttcccc

SEQ ID NO: 1021087 - DNA, 25 bp, Homo sapien
gattcaacagtatagttgttcttag

SEQ ID NO: 1021088 - DNA, 25 bp, Homo sapien
caacagtatagttgttcttaggaac

SEQ ID NO: 1021089 - DNA, 25 bp, Homo sapien
ctagctagattcaacagtatagttg

SEQ ID NO: 1021090 - DNA, 25 bp, Homo sapien
gctagattcaacagtatagttgttc

SEQ ID NO: 1021091 - DNA, 25 bp, Homo sapien
cagtgtataagggtagggctgaaac

SEQ ID NO: 1021092 - DNA, 25 bp, Homo sapien
catggtcagtgtataagggtagggc

SEQ ID NO: 1021093 - DNA, 25 bp, Homo sapien
taagggtagggctgaaaccaagaca

SEQ ID NO: 1021094 - DNA, 25 bp, Homo sapien
gccatggtcagtgtataagggtagg

SEQ ID NO: 1021095 - DNA, 25 bp, Homo sapien
tacgatacaggaactcaataagcat

SEQ ID NO: 1021096 - DNA, 25 bp, Homo sapien
gccatatactaaatgtgcagagagt

SEQ ID NO: 1021097 - DNA, 25 bp, Homo sapien
tgaagacaaggcaactacccacttt

SEQ ID NO: 1021098 - DNA, 25 bp, Homo sapien
aggtgctgctagtgtggccctgaca

SEQ ID NO: 1021099 - DNA, 25 bp, Homo sapien
tccacagacaccaagaggtcaagaa

SEQ ID NO: 1021100 - DNA, 25 bp, Homo sapien
ttgaaatattatcagtgttcatcag

SEQ ID NO: 1021101 - DNA, 25 bp, Homo sapien
gacaatacagaaagggtggcttctt

SEQ ID NO: 1021102 - DNA, 25 bp, Homo sapien
caggccaagggtgatttctaaatta

SEQ ID NO: 1021103 - DNA, 25 bp, Homo sapien
ctcctccaaattgcagtagttcatc

SEQ ID NO: 1021104 - DNA, 25 bp, Homo sapien
cttgatgtagtcctaccaacaggca

SEQ ID NO: 1021105 - DNA, 25 bp, Homo sapien
ctaccaacaggcagaggatttctct

SEQ ID NO: 1021106 - DNA, 25 bp, Homo sapien
cctccaaattgcagtagttcatcat

SEQ ID NO: 1021107 - DNA, 25 bp, Homo sapien
tctatttttatgatgtgtttataca

SEQ ID NO: 1021108 - DNA, 25 bp, Homo sapien
ccttctgggctctctggtcttgttt

SEQ ID NO: 1021109 - DNA, 25 bp, Homo sapien
tctgggctctctggtcttgttttat

SEQ ID NO: 1021110 - DNA, 25 bp, Homo sapien
gggctctctggtcttgttttatcta

SEQ ID NO: 1021111 - DNA, 25 bp, Homo sapien
aaatgtccacgatcagagttcctgc

SEQ ID NO: 1021112 - DNA, 25 bp, Homo sapien
tctggaggttgaaatgtccacgatc

SEQ ID NO: 1021113 - DNA, 25 bp, Homo sapien
ctcgtgacgactcttcctggcttgc

SEQ ID NO: 1021114 - DNA, 25 bp, Homo sapien
gttcctgcatggtctggttctcgtg

SEQ ID NO: 1021115 - DNA, 25 bp, Homo sapien
tctttgataacaacataattcaggg

SEQ ID NO: 1021116 - DNA, 25 bp, Homo sapien
tgtgcttagtttattgccaggaaac

SEQ ID NO: 1021117 - DNA, 25 bp, Homo sapien
gagaaagtacaaatttgccacaggt

SEQ ID NO: 1021118 - DNA, 25 bp, Homo sapien
gaatattccggcctttacttcagag

SEQ ID NO: 1021119 - DNA, 25 bp, Homo sapien
gcctgcaagcagtgacatagatgtt

SEQ ID NO: 1021120 - DNA, 25 bp, Homo sapien
tagcagccacaaacggaggtggttt

SEQ ID NO: 1021121 - DNA, 25 bp, Homo sapien
tatagcaaatacattagcagccaca

SEQ ID NO: 1021122 - DNA, 25 bp, Homo sapien
aaccttttggtttacataatgcctg

SEQ ID NO: 1021123 - DNA, 25 bp, Homo sapien
tgctgggcctcatggataggagact

SEQ ID NO: 1021124 - DNA, 25 bp, Homo sapien
aacacagtgaccttttcaagcataa

SEQ ID NO: 1021125 - DNA, 25 bp, Homo sapien
agatagaataaatgtatgcccagtg

SEQ ID NO: 1021126 - DNA, 25 bp, Homo sapien
taagagtacccagaacagtacctag

SEQ ID NO: 1021127 - DNA, 25 bp, Homo sapien
cttcccaaatttgccctggactcac

SEQ ID NO: 1021128 - DNA, 25 bp, Homo sapien
caaatttgccctggactcactgatg

SEQ ID NO: 1021129 - DNA, 25 bp, Homo sapien
ccaaatttgccctggactcactgat

SEQ ID NO: 1021130 - DNA, 25 bp, Homo sapien
tcccaaatttgccctggactcactg

SEQ ID NO: 1021131 - DNA, 25 bp, Homo sapien
tctttgaatgcaatgttaccttcac

SEQ ID NO: 1021132 - DNA, 25 bp, Homo sapien
gatgaataccgaaatgccttttagc

SEQ ID NO: 1021133 - DNA, 25 bp, Homo sapien
taccgaaatgccttttagcttctcc

SEQ ID NO: 1021134 - DNA, 25 bp, Homo sapien
ggcatagagatgaataccgaaatgc

SEQ ID NO: 1021135 - DNA, 25 bp, Homo sapien
gggctttactcaatacaagggtagc

SEQ ID NO: 1021136 - DNA, 25 bp, Homo sapien
tctacgaaacacattgggctttact

SEQ ID NO: 1021137 - DNA, 25 bp, Homo sapien
caccagatttaatggaacgcaatgg

SEQ ID NO: 1021138 - DNA, 25 bp, Homo sapien
catggcagaattgactaagtcttcc

SEQ ID NO: 1021139 - DNA, 25 bp, Homo sapien
aatgcaaaggtttgcttgcacttgt

SEQ ID NO: 1021140 - DNA, 25 bp, Homo sapien
actcccaaagcagggtctaatgcaa

SEQ ID NO: 1021141 - DNA, 25 bp, Homo sapien
tctgagcctggattactcccaaagc

SEQ ID NO: 1021142 - DNA, 25 bp, Homo sapien
caaagcagggtctaatgcaaaggtt

SEQ ID NO: 1021143 - DNA, 25 bp, Homo sapien
cagttttcagcattgacaaaatccc

SEQ ID NO: 1021144 - DNA, 25 bp, Homo sapien
taacagttttcagcattgacaaaat

SEQ ID NO: 1021145 - DNA, 25 bp, Homo sapien
agttttcagcattgacaaaatcccc

SEQ ID NO: 1021146 - DNA, 25 bp, Homo sapien
ttgtccaggccgaaggtgatagagt

SEQ ID NO: 1021147 - DNA, 25 bp, Homo sapien
gaggcacagtgcttgtccaggccga

SEQ ID NO: 1021148 - DNA, 25 bp, Homo sapien
cagtgcttgtccaggccgaaggtga

SEQ ID NO: 1021149 - DNA, 25 bp, Homo sapien
atatgaggcacagtgcttgtccagg

SEQ ID NO: 1021150 - DNA, 25 bp, Homo sapien
ccattgtatgagagttgccccaggg

SEQ ID NO: 1021151 - DNA, 25 bp, Homo sapien
cattgatgccatcctccattgtatg

SEQ ID NO: 1021152 - DNA, 25 bp, Homo sapien
gccacattgagcgatgagcagctcc

SEQ ID NO: 1021153 - DNA, 25 bp, Homo sapien
ccccaggggagccacattgagcgat

SEQ ID NO: 1021154 - DNA, 25 bp, Homo sapien
gatcttgaccaccacttttgccagg

SEQ ID NO: 1021155 - DNA, 25 bp, Homo sapien
taaacttgactggaccaagggtgcc

SEQ ID NO: 1021156 - DNA, 25 bp, Homo sapien
gcaaacgggaccactagagctcagt

SEQ ID NO: 1021157 - DNA, 25 bp, Homo sapien
tacaacattcgctctcctgggtctc

SEQ ID NO: 1021158 - DNA, 25 bp, Homo sapien
ccaggatcatggagcggagtactta

SEQ ID NO: 1021159 - DNA, 25 bp, Homo sapien
cactgagaagatggcctggccgact

SEQ ID NO: 1021160 - DNA, 25 bp, Homo sapien
tgttttgtagcacttcaccccagga

SEQ ID NO: 1021161 - DNA, 25 bp, Homo sapien
ctttctatctacaacagccgtggga

SEQ ID NO: 1021162 - DNA, 25 bp, Homo sapien
ccagacacactttgtgcgtggccat

SEQ ID NO: 1021163 - DNA, 25 bp, Homo sapien
tgggccaagacacatgcagctaaac

SEQ ID NO: 1021164 - DNA, 25 bp, Homo sapien
gcagctaaacaccaatccagacaca

SEQ ID NO: 1021165 - DNA, 25 bp, Homo sapien
caatccagacacactttgtgcgtgg

SEQ ID NO: 1021166 - DNA, 25 bp, Homo sapien
tagaaactgttaatcccttttcgca

SEQ ID NO: 1021167 - DNA, 25 bp, Homo sapien
ggaaagccagtaagattcattaacc

SEQ ID NO: 1021168 - DNA, 25 bp, Homo sapien
gattcattaaccattaaagcttcag

SEQ ID NO: 1021169 - DNA, 25 bp, Homo sapien
gcaaccagtcacaggaaagccagta

SEQ ID NO: 1021170 - DNA, 25 bp, Homo sapien
caatctaggagattgaaactaatta

SEQ ID NO: 1021171 - DNA, 25 bp, Homo sapien
tgctctctcctcacatggatgagcc

SEQ ID NO: 1021172 - DNA, 25 bp, Homo sapien
tgccctataggactaattctacaac

SEQ ID NO: 1021173 - DNA, 25 bp, Homo sapien
tttttggtgttactggcataagttg

SEQ ID NO: 1021174 - DNA, 25 bp, Homo sapien
ggaatgagtgggtatgacttgtttc

SEQ ID NO: 1021175 - DNA, 25 bp, Homo sapien
ctgttggttaacttaggaatgagtg

SEQ ID NO: 1021176 - DNA, 25 bp, Homo sapien
tgttggttaacttaggaatgagtgg

SEQ ID NO: 1021177 - DNA, 25 bp, Homo sapien
tccatcgtgtcatcctcagaaagcc

SEQ ID NO: 1021178 - DNA, 25 bp, Homo sapien
tttgaggctgccgaatgttttccac

SEQ ID NO: 1021179 - DNA, 25 bp, Homo sapien
tcaacaagaccgctctttgaggctg

SEQ ID NO: 1021180 - DNA, 25 bp, Homo sapien
caccgcagttttagagctattggag

SEQ ID NO: 1021181 - DNA, 25 bp, Homo sapien
ggacctatcctatagcaaatccctc

SEQ ID NO: 1021182 - DNA, 25 bp, Homo sapien
ccctccataccatgatgttgctaag

SEQ ID NO: 1021183 - DNA, 25 bp, Homo sapien
ggaaaataactccttgggcataaga

SEQ ID NO: 1021184 - DNA, 25 bp, Homo sapien
aagcaagaatattcaggacctatcc

SEQ ID NO: 1021185 - DNA, 25 bp, Homo sapien
actttcctcaacagagagcagctgc

SEQ ID NO: 1021186 - DNA, 25 bp, Homo sapien
tcaaagagtgttgcctggtcattct

SEQ ID NO: 1021187 - DNA, 25 bp, Homo sapien
cacaagtgtttacatgcgctgcaca

SEQ ID NO: 1021188 - DNA, 25 bp, Homo sapien
gcgggttgacaagagattaaaggca

SEQ ID NO: 1021189 - DNA, 25 bp, Homo sapien
tatatgaaactgtcctagagcttct

SEQ ID NO: 1021190 - DNA, 25 bp, Homo sapien
gatacatagttattcaggctaagaa

SEQ ID NO: 1021191 - DNA, 25 bp, Homo sapien
tagagcttctattttaaacctcagg

SEQ ID NO: 1021192 - DNA, 25 bp, Homo sapien
gaagcacatacaaggccttaaataa

SEQ ID NO: 1021193 - DNA, 25 bp, Homo sapien
gaacttgaaatcctataactggttc

SEQ ID NO: 1021194 - DNA, 25 bp, Homo sapien
aacttgaaatcctataactggttct

SEQ ID NO: 1021195 - DNA, 25 bp, Homo sapien
gctgaggtgcaaaagttttctttct

SEQ ID NO: 1021196 - DNA, 25 bp, Homo sapien
caaacttagagcttctgagcctttg

SEQ ID NO: 1021197 - DNA, 25 bp, Homo sapien
ggtgaggagatcaaagcagcaacaa

SEQ ID NO: 1021198 - DNA, 25 bp, Homo sapien
tagagcttctgagcctttgcaaaat

SEQ ID NO: 1021199 - DNA, 25 bp, Homo sapien
cacactcgtgttctgatgtaattca

SEQ ID NO: 1021200 - DNA, 25 bp, Homo sapien
tatgagcgatgttgtctaggagaga

SEQ ID NO: 1021201 - DNA, 25 bp, Homo sapien
ctgccagttttgatcgatagtttaa

SEQ ID NO: 1021202 - DNA, 25 bp, Homo sapien
gcttgaaccgtccattatgagcgat

SEQ ID NO: 1021203 - DNA, 25 bp, Homo sapien
ggaccacgcgtgtgtaagcaccaag

SEQ ID NO: 1021204 - DNA, 25 bp, Homo sapien
caagggccactatccagtttgacac

SEQ ID NO: 1021205 - DNA, 25 bp, Homo sapien
taggtatttgcccacttcattagga

SEQ ID NO: 1021206 - DNA, 25 bp, Homo sapien
ttcattaggaaacaggaccacgcgt

SEQ ID NO: 1021207 - DNA, 25 bp, Homo sapien
gcccgtcctgtagctgttggtataa

SEQ ID NO: 1021208 - DNA, 25 bp, Homo sapien
ccagaaggtgcgtgaatggaactgt

SEQ ID NO: 1021209 - DNA, 25 bp, Homo sapien
ggtaccaagtccagtgatccccagt

SEQ ID NO: 1021210 - DNA, 25 bp, Homo sapien
gagaagtcctctttccacgaagcat

SEQ ID NO: 1021211 - DNA, 25 bp, Homo sapien
agccgccaagcaaacatgtcatctt

SEQ ID NO: 1021212 - DNA, 25 bp, Homo sapien
taattagatccaggtaatacactgg

SEQ ID NO: 1021213 - DNA, 25 bp, Homo sapien
cagctggagatgagataattagatc

SEQ ID NO: 1021214 - DNA, 25 bp, Homo sapien
ggttccatggaaacccctctgtcag

SEQ ID NO: 1021215 - DNA, 25 bp, Homo sapien
tttatcagtcttcctattgacagtc

SEQ ID NO: 1021216 - DNA, 25 bp, Homo sapien
atcagtcttcctattgacagtctga

SEQ ID NO: 1021217 - DNA, 25 bp, Homo sapien
tatcagtcttcctattgacagtctg

SEQ ID NO: 1021218 - DNA, 25 bp, Homo sapien
ttatcagtcttcctattgacagtct

SEQ ID NO: 1021219 - DNA, 25 bp, Homo sapien
cattgatgatgactcgatttcctct

SEQ ID NO: 1021220 - DNA, 25 bp, Homo sapien
ttgatgatgactcgatttcctctcg

SEQ ID NO: 1021221 - DNA, 25 bp, Homo sapien
gatgatgactcgatttcctctcgca

SEQ ID NO: 1021222 - DNA, 25 bp, Homo sapien
ccattgatgatgactcgatttcctc

SEQ ID NO: 1021223 - DNA, 25 bp, Homo sapien
tgtttggtcactcctccatccttgg

SEQ ID NO: 1021224 - DNA, 25 bp, Homo sapien
gttcctctcattgttttccctactc

SEQ ID NO: 1021225 - DNA, 25 bp, Homo sapien
ctactcttatcatcctgtttggtca

SEQ ID NO: 1021226 - DNA, 25 bp, Homo sapien
tctgttcctctcattgttttcccta

SEQ ID NO: 1021227 - DNA, 25 bp, Homo sapien
gatgaagccagacttctggagcagc

SEQ ID NO: 1021228 - DNA, 25 bp, Homo sapien
actgctctgactagctaggcccttg

SEQ ID NO: 1021229 - DNA, 25 bp, Homo sapien
agctgttacttctcctgtggtgtga

SEQ ID NO: 1021230 - DNA, 25 bp, Homo sapien
gtagcactaaataccctccaagggc

SEQ ID NO: 1021231 - DNA, 25 bp, Homo sapien
gatcaaccatgcttcctgttcagag

SEQ ID NO: 1021232 - DNA, 25 bp, Homo sapien
tattcaagagatcaaccaagccttc

SEQ ID NO: 1021233 - DNA, 25 bp, Homo sapien
aagccttcagcacagatcaaccatg

SEQ ID NO: 1021234 - DNA, 25 bp, Homo sapien
catctctcagtttattcaagagatc

SEQ ID NO: 1021235 - DNA, 25 bp, Homo sapien
agtcttcagaggagattcactgtgc

SEQ ID NO: 1021236 - DNA, 25 bp, Homo sapien
gagtgctacaatggaaggtactcac

SEQ ID NO: 1021237 - DNA, 25 bp, Homo sapien
ttcaagttgtaaccctaagaccaga

SEQ ID NO: 1021238 - DNA, 25 bp, Homo sapien
cactgatcatggtccaaggaagatg

SEQ ID NO: 1021239 - DNA, 25 bp, Homo sapien
gatacatgtatcattaagcagctgc

SEQ ID NO: 1021240 - DNA, 25 bp, Homo sapien
tagtgtaatcaagtctgttctgccc

SEQ ID NO: 1021241 - DNA, 25 bp, Homo sapien
gctgctatggatgcctgaggaaact

SEQ ID NO: 1021242 - DNA, 25 bp, Homo sapien
tgaaaaatggcccagaattattgtg

SEQ ID NO: 1021243 - DNA, 25 bp, Homo sapien
tttcattatcaatacaagggaaggc

SEQ ID NO: 1021244 - DNA, 25 bp, Homo sapien
actctcatggaggagagaatggccc

SEQ ID NO: 1021245 - DNA, 25 bp, Homo sapien
tgtgggctgcattaccgctaaagca

SEQ ID NO: 1021246 - DNA, 25 bp, Homo sapien
agggctcctaaatttactacaatgg

SEQ ID NO: 1021247 - DNA, 25 bp, Homo sapien
gatcctttggtactttggctgcctg

SEQ ID NO: 1021248 - DNA, 25 bp, Homo sapien
ttctagttcaattacaacaccagga

SEQ ID NO: 1021249 - DNA, 25 bp, Homo sapien
attttctagttcaattacaacacca

SEQ ID NO: 1021250 - DNA, 25 bp, Homo sapien
tttctagttcaattacaacaccagg

SEQ ID NO: 1021251 - DNA, 25 bp, Homo sapien
tctagttcaattacaacaccaggat

SEQ ID NO: 1021252 - DNA, 25 bp, Homo sapien
tgctgtgttcccaagtgtctggcct

SEQ ID NO: 1021253 - DNA, 25 bp, Homo sapien
ggaatgtaactgcagggtgacctct

SEQ ID NO: 1021254 - DNA, 25 bp, Homo sapien
caagcgtgctgatgtagccatgaag

SEQ ID NO: 1021255 - DNA, 25 bp, Homo sapien
gagtgtccgtgacaacctccagtag

SEQ ID NO: 1021256 - DNA, 25 bp, Homo sapien
tgtaggattgttttagtattggcat

SEQ ID NO: 1021257 - DNA, 25 bp, Homo sapien
catcattcgtgacaaagggtagtta

SEQ ID NO: 1021258 - DNA, 25 bp, Homo sapien
tttctggaggaagcgttcatcattc

SEQ ID NO: 1021259 - DNA, 25 bp, Homo sapien
aaagggtagttattttgtgtgatgc

SEQ ID NO: 1021260 - DNA, 25 bp, Homo sapien
ttagaatttccagacagccgtatct

SEQ ID NO: 1021261 - DNA, 25 bp, Homo sapien
tacgcatttatcataacacttgaaa

SEQ ID NO: 1021262 - DNA, 25 bp, Homo sapien
aaaggcccaagaccaacgacctcat

SEQ ID NO: 1021263 - DNA, 25 bp, Homo sapien
tgtgagtttgcctccctcttagtaa

SEQ ID NO: 1021264 - DNA, 25 bp, Homo sapien
taagccaaacccagccgaaagttca

SEQ ID NO: 1021265 - DNA, 25 bp, Homo sapien
gatatacaaactcagctgtcagttc

SEQ ID NO: 1021266 - DNA, 25 bp, Homo sapien
cagatatacaaactcagctgtcagt

SEQ ID NO: 1021267 - DNA, 25 bp, Homo sapien
atatacaaactcagctgtcagttct

SEQ ID NO: 1021268 - DNA, 25 bp, Homo sapien
ttcagatatacaaactcagctgtca

SEQ ID NO: 1021269 - DNA, 25 bp, Homo sapien
cagaggcagttttacgtatttcttc

SEQ ID NO: 1021270 - DNA, 25 bp, Homo sapien
taatcttttctatgtgggtatcaaa

SEQ ID NO: 1021271 - DNA, 25 bp, Homo sapien
ccatctgatgtttaaactccataca

SEQ ID NO: 1021272 - DNA, 25 bp, Homo sapien
ttaatgtaaattcttcagaggcagt

SEQ ID NO: 1021273 - DNA, 25 bp, Homo sapien
tagcgcaaggcttaaatacaaggaa

SEQ ID NO: 1021274 - DNA, 25 bp, Homo sapien
gatatggtttagtaagcttcagctg

SEQ ID NO: 1021275 - DNA, 25 bp, Homo sapien
tcagctgataccaggttctaaggtc

SEQ ID NO: 1021276 - DNA, 25 bp, Homo sapien
aaattgctcctaatctctgctcaag

SEQ ID NO: 1021277 - DNA, 25 bp, Homo sapien
gcttccttagcggttatcaactgct

SEQ ID NO: 1021278 - DNA, 25 bp, Homo sapien
gcaatttcataatcagcggccctgg

SEQ ID NO: 1021279 - DNA, 25 bp, Homo sapien
ggttgaaccgccattgttatgaaga

SEQ ID NO: 1021280 - DNA, 25 bp, Homo sapien
ggactgacataaagctacagggaag

SEQ ID NO: 1021281 - DNA, 25 bp, Homo sapien
ttctatctcatttcctcctaaactc

SEQ ID NO: 1021282 - DNA, 25 bp, Homo sapien
cttgcatcttctatctcatttcctc

SEQ ID NO: 1021283 - DNA, 25 bp, Homo sapien
tcttctatctcatttcctcctaaac

SEQ ID NO: 1021284 - DNA, 25 bp, Homo sapien
gcatcttctatctcatttcctccta

SEQ ID NO: 1021285 - DNA, 25 bp, Homo sapien
aatttgtagtaaagtcagtgattcc

SEQ ID NO: 1021286 - DNA, 25 bp, Homo sapien
tgttactagtttgttgtcactaatt

SEQ ID NO: 1021287 - DNA, 25 bp, Homo sapien
attgttactagtttgttgtcactaa

SEQ ID NO: 1021288 - DNA, 25 bp, Homo sapien
ttactagtttgttgtcactaatttg

SEQ ID NO: 1021289 - DNA, 25 bp, Homo sapien
ttaaatgctgtttcatcttagttga

SEQ ID NO: 1021290 - DNA, 25 bp, Homo sapien
ctttttctgatagaacgttcctgat

SEQ ID NO: 1021291 - DNA, 25 bp, Homo sapien
tctgatagaacgttcctgattttct

SEQ ID NO: 1021292 - DNA, 25 bp, Homo sapien
ttccctgatacttcacccagcgagt

SEQ ID NO: 1021293 - DNA, 25 bp, Homo sapien
tctgacagaacgtccctgatgttct

SEQ ID NO: 1021294 - DNA, 25 bp, Homo sapien
gggcatagatgtaacgatgttcaga

SEQ ID NO: 1021295 - DNA, 25 bp, Homo sapien
gaatttggaaattcctgggcataga

SEQ ID NO: 1021296 - DNA, 25 bp, Homo sapien
cattccagagcatttcaatctgtag

SEQ ID NO: 1021297 - DNA, 25 bp, Homo sapien
tcaaactctagctgtatcatttggt

SEQ ID NO: 1021298 - DNA, 25 bp, Homo sapien
agtgatcaccagaaacatactcctt

SEQ ID NO: 1021299 - DNA, 25 bp, Homo sapien
tgatcaccagaaacatactccttga

SEQ ID NO: 1021300 - DNA, 25 bp, Homo sapien
tcaccagaaacatactccttgatgg

SEQ ID NO: 1021301 - DNA, 25 bp, Homo sapien
ccagaaacatactccttgatggatg

SEQ ID NO: 1021302 - DNA, 25 bp, Homo sapien
ccccgaattggtggcgtcttagtct

SEQ ID NO: 1021303 - DNA, 25 bp, Homo sapien
tatagtcccaatgtgccccgaattg

SEQ ID NO: 1021304 - DNA, 25 bp, Homo sapien
gagtgaagctacaaacctcgccggt

SEQ ID NO: 1021305 - DNA, 25 bp, Homo sapien
tgtggaaagacaaccgatgaagcca

SEQ ID NO: 1021306 - DNA, 25 bp, Homo sapien
aaggtgtcctttgagctatttgagt

SEQ ID NO: 1021307 - DNA, 25 bp, Homo sapien
aacaggaaacagcgtcggaagtcag

SEQ ID NO: 1021308 - DNA, 25 bp, Homo sapien
aacagcgtcggaagtcagggaaggt

SEQ ID NO: 1021309 - DNA, 25 bp, Homo sapien
gaaggtgtcctttgagctatttgag

SEQ ID NO: 1021310 - DNA, 25 bp, Homo sapien
ctcttgtgtattttctgctggttaa

SEQ ID NO: 1021311 - DNA, 25 bp, Homo sapien
aaataatgcacactgttgccaagaa

SEQ ID NO: 1021312 - DNA, 25 bp, Homo sapien
catatgccaaaaggtagccctggga

SEQ ID NO: 1021313 - DNA, 25 bp, Homo sapien
ctaatcttcttgagtagaaccaatt

SEQ ID NO: 1021314 - DNA, 25 bp, Homo sapien
gcagaagctccaatcctacttggaa

SEQ ID NO: 1021315 - DNA, 25 bp, Homo sapien
ggttttcaaggtcagtgtcaggtca

SEQ ID NO: 1021316 - DNA, 25 bp, Homo sapien
tatgccgccaggagtgcttggaact

SEQ ID NO: 1021317 - DNA, 25 bp, Homo sapien
catagagtttatcgtcaagacaggc

SEQ ID NO: 1021318 - DNA, 25 bp, Homo sapien
cattaacaagatgatagattggagg

SEQ ID NO: 1021319 - DNA, 25 bp, Homo sapien
ccatagaaataacattaacaagatg

SEQ ID NO: 1021320 - DNA, 25 bp, Homo sapien
gatgatagattggaggtaataacat

SEQ ID NO: 1021321 - DNA, 25 bp, Homo sapien
tagctgtcaagcctgttttcaggtt

SEQ ID NO: 1021322 - DNA, 25 bp, Homo sapien
tggcacaaagagattggcacatttc

SEQ ID NO: 1021323 - DNA, 25 bp, Homo sapien
cttggcacaaagagattggcacatt

SEQ ID NO: 1021324 - DNA, 25 bp, Homo sapien
ttggcacaaagagattggcacattt

SEQ ID NO: 1021325 - DNA, 25 bp, Homo sapien
tcttggcacaaagagattggcacat

SEQ ID NO: 1021326 - DNA, 25 bp, Homo sapien
tcagtacatagagtatccagtacat

SEQ ID NO: 1021327 - DNA, 25 bp, Homo sapien
tccagacaattggacttagctaggg

SEQ ID NO: 1021328 - DNA, 25 bp, Homo sapien
catagaggcctcatgtactggaggt

SEQ ID NO: 1021329 - DNA, 25 bp, Homo sapien
tgcaagatgtccagacaattggact

SEQ ID NO: 1021330 - DNA, 25 bp, Homo sapien
gactagagcgtggaaaatcaacaga

SEQ ID NO: 1021331 - DNA, 25 bp, Homo sapien
atcaacagagaaccgcccggtgcct

SEQ ID NO: 1021332 - DNA, 25 bp, Homo sapien
gggccttggcaaatttatagactcc

SEQ ID NO: 1021333 - DNA, 25 bp, Homo sapien
tagccctgtaaaagagagcacattt

SEQ ID NO: 1021334 - DNA, 25 bp, Homo sapien
gcccctactagaatgacaccgtgaa

SEQ ID NO: 1021335 - DNA, 25 bp, Homo sapien
catgtttctgtgtaacctcgaaggc

SEQ ID NO: 1021336 - DNA, 25 bp, Homo sapien
gattcatggcgggactcaaatggta

SEQ ID NO: 1021337 - DNA, 25 bp, Homo sapien
caacggaaaggtagttaggcagcct

SEQ ID NO: 1021338 - DNA, 25 bp, Homo sapien
gccgcggaacgtctgtgccagcact

SEQ ID NO: 1021339 - DNA, 25 bp, Homo sapien
ctgtgccagcactttcgcatcatta

SEQ ID NO: 1021340 - DNA, 25 bp, Homo sapien
ctgaggccgcggaacgtctgtgcca

SEQ ID NO: 1021341 - DNA, 25 bp, Homo sapien
gcactttcgcatcattatcaatcat

SEQ ID NO: 1021342 - DNA, 25 bp, Homo sapien
catgagagcattgtgcatacaagga

SEQ ID NO: 1021343 - DNA, 25 bp, Homo sapien
gagcattgtgcatacaaggaggagc

SEQ ID NO: 1021344 - DNA, 25 bp, Homo sapien
gcattgtgcatacaaggaggagctt

SEQ ID NO: 1021345 - DNA, 25 bp, Homo sapien
gagagcattgtgcatacaaggagga

SEQ ID NO: 1021346 - DNA, 25 bp, Homo sapien
acaggggccagaagatgaacaatgg

SEQ ID NO: 1021347 - DNA, 25 bp, Homo sapien
cacgggaagtctgggctaagagaca

SEQ ID NO: 1021348 - DNA, 25 bp, Homo sapien
attaagttacatgcagacaacaggg

SEQ ID NO: 1021349 - DNA, 25 bp, Homo sapien
tgcctggttgtggtattaagttaca

SEQ ID NO: 1021350 - DNA, 25 bp, Homo sapien
aagtcggccgtcgtcttctgcagct

SEQ ID NO: 1021351 - DNA, 25 bp, Homo sapien
tcggccgtcgtcttctgcagctctg

SEQ ID NO: 1021352 - DNA, 25 bp, Homo sapien
tgtgatccaagtcggccgtcgtctt

SEQ ID NO: 1021353 - DNA, 25 bp, Homo sapien
tccaagtcggccgtcgtcttctgca

SEQ ID NO: 1021354 - DNA, 25 bp, Homo sapien
ctgtctgtcgacccagctggaggca

SEQ ID NO: 1021355 - DNA, 25 bp, Homo sapien
gcccctgtctgtcgacccagctgga

SEQ ID NO: 1021356 - DNA, 25 bp, Homo sapien
ccctgtctgtcgacccagctggagg

SEQ ID NO: 1021357 - DNA, 25 bp, Homo sapien
ccagcccctgtctgtcgacccagct

SEQ ID NO: 1021358 - DNA, 25 bp, Homo sapien
ttattatagaaagggcagtagcaga

SEQ ID NO: 1021359 - DNA, 25 bp, Homo sapien
aaaggcaggagtgaacttccacaca

SEQ ID NO: 1021360 - DNA, 25 bp, Homo sapien
ccctgggaagatctcacggatggcc

SEQ ID NO: 1021361 - DNA, 25 bp, Homo sapien
tagtccagggcagctaactttagtt

SEQ ID NO: 1021362 - DNA, 25 bp, Homo sapien
ctctaaaaatagtcatgctgagagc

SEQ ID NO: 1021363 - DNA, 25 bp, Homo sapien
aaacgtctcggggtcagtgactgcc

SEQ ID NO: 1021364 - DNA, 25 bp, Homo sapien
gggtctctaaaaatagtcatgctga

SEQ ID NO: 1021365 - DNA, 25 bp, Homo sapien
tgcaggatgcaaacgtctcggggtc

SEQ ID NO: 1021366 - DNA, 25 bp, Homo sapien
tgtggctttcccgttgcagtgagag

SEQ ID NO: 1021367 - DNA, 25 bp, Homo sapien
cggaggagcctttgcccgcgtgtca

SEQ ID NO: 1021368 - DNA, 25 bp, Homo sapien
ggcacttgatgtcggatctcttcaa

SEQ ID NO: 1021369 - DNA, 25 bp, Homo sapien
atctcttcaacaagctggtcatgag

SEQ ID NO: 1021370 - DNA, 25 bp, Homo sapien
gtcagggatcgactgaggctctgag

SEQ ID NO: 1021371 - DNA, 25 bp, Homo sapien
cggtgctgggtcagggatcgactga

SEQ ID NO: 1021372 - DNA, 25 bp, Homo sapien
ggtgctgggtcagggatcgactgag

SEQ ID NO: 1021373 - DNA, 25 bp, Homo sapien
cagggatcgactgaggctctgagct

SEQ ID NO: 1021374 - DNA, 25 bp, Homo sapien
ttccaacctttagagacatcccagc

SEQ ID NO: 1021375 - DNA, 25 bp, Homo sapien
caaggccttctaacgttggtggaag

SEQ ID NO: 1021376 - DNA, 25 bp, Homo sapien
gggtcggattctaggccattcattc

SEQ ID NO: 1021377 - DNA, 25 bp, Homo sapien
tctgtcatggaacacttaagccgct

SEQ ID NO: 1021378 - DNA, 25 bp, Homo sapien
gtatggaaagggtgcctggcaggta

SEQ ID NO: 1021379 - DNA, 25 bp, Homo sapien
agaaatgttgcaccttctctgaact

SEQ ID NO: 1021380 - DNA, 25 bp, Homo sapien
ggtcagaaatgttgcaccttctctg

SEQ ID NO: 1021381 - DNA, 25 bp, Homo sapien
aagcaccttgtagggggtcagaaat

SEQ ID NO: 1021382 - DNA, 25 bp, Homo sapien
aattttgatgcttaggtcagagtcc

SEQ ID NO: 1021383 - DNA, 25 bp, Homo sapien
aagctaccagatataggaagaaggg

SEQ ID NO: 1021384 - DNA, 25 bp, Homo sapien
tgtagcataagaaaataccgtctgc

SEQ ID NO: 1021385 - DNA, 25 bp, Homo sapien
tttggaatcacaggacgctgagtga

SEQ ID NO: 1021386 - DNA, 25 bp, Homo sapien
cccactgtggaactgaggagctagg

SEQ ID NO: 1021387 - DNA, 25 bp, Homo sapien
cgatacacatgtacaagttttgtca

SEQ ID NO: 1021388 - DNA, 25 bp, Homo sapien
ggtttctcataaaactccctgatag

SEQ ID NO: 1021389 - DNA, 25 bp, Homo sapien
taggcaggaaatatcgcagacctag

SEQ ID NO: 1021390 - DNA, 25 bp, Homo sapien
cacgctgcagccagcgagacagtgg

SEQ ID NO: 1021391 - DNA, 25 bp, Homo sapien
cacacgctgcagccagcgagacagt

SEQ ID NO: 1021392 - DNA, 25 bp, Homo sapien
gctgcagccagcgagacagtggcat

SEQ ID NO: 1021393 - DNA, 25 bp, Homo sapien
tctggtaaggggaccacacgctgca

SEQ ID NO: 1021394 - DNA, 25 bp, Homo sapien
aggtgctgccccgagaaggatgcat

SEQ ID NO: 1021395 - DNA, 25 bp, Homo sapien
cccgatgctgctgactataggtaag

SEQ ID NO: 1021396 - DNA, 25 bp, Homo sapien
actataggtaagtctgagcaaatct

SEQ ID NO: 1021397 - DNA, 25 bp, Homo sapien
aagtctttcctgacccccgatgctg

SEQ ID NO: 1021398 - DNA, 25 bp, Homo sapien
ctacagagggcaggcccttcagctc

SEQ ID NO: 1021399 - DNA, 25 bp, Homo sapien
cctacagagggcaggcccttcagct

SEQ ID NO: 1021400 - DNA, 25 bp, Homo sapien
aggggcacagggcaattcaggggtg

SEQ ID NO: 1021401 - DNA, 25 bp, Homo sapien
cagcacaggaacaaagacggcaggg

SEQ ID NO: 1021402 - DNA, 25 bp, Homo sapien
caggaacaaagacggcaggggcaca

SEQ ID NO: 1021403 - DNA, 25 bp, Homo sapien
ggcacagggcaattcaggggtgcag

SEQ ID NO: 1021404 - DNA, 25 bp, Homo sapien
cgtcgtccacgtaagaaacagtcac

SEQ ID NO: 1021405 - DNA, 25 bp, Homo sapien
cacaacgtcgtccacgtaagaaaca

SEQ ID NO: 1021406 - DNA, 25 bp, Homo sapien
catgttcaacacaacgtcgtccacg

SEQ ID NO: 1021407 - DNA, 25 bp, Homo sapien
tcaacacaacgtcgtccacgtaaga

SEQ ID NO: 1021408 - DNA, 25 bp, Homo sapien
tagataccgcagaattatttactct

SEQ ID NO: 1021409 - DNA, 25 bp, Homo sapien
gataattcccatgtagaacacagag

SEQ ID NO: 1021410 - DNA, 25 bp, Homo sapien
caatacaaatttagataccgcagaa

SEQ ID NO: 1021411 - DNA, 25 bp, Homo sapien
aagagcttgaaagtccaatcaatac

SEQ ID NO: 1021412 - DNA, 25 bp, Homo sapien
gcagtgactacaacctctagtttgt

SEQ ID NO: 1021413 - DNA, 25 bp, Homo sapien
caggtagctatggatataagcccac

SEQ ID NO: 1021414 - DNA, 25 bp, Homo sapien
tacctactctattagggccacaaaa

SEQ ID NO: 1021415 - DNA, 25 bp, Homo sapien
cacaagcaagtttcatgacataagg

SEQ ID NO: 1021416 - DNA, 25 bp, Homo sapien
gcatcgtaaactgacaaagctcaag

SEQ ID NO: 1021417 - DNA, 25 bp, Homo sapien
cagggctttgcacacgtattacata

SEQ ID NO: 1021418 - DNA, 25 bp, Homo sapien
aactgaaatagcatcgtaaactgac

SEQ ID NO: 1021419 - DNA, 25 bp, Homo sapien
tcttcctgcaatcactcaaatctga

SEQ ID NO: 1021420 - DNA, 25 bp, Homo sapien
ggtccactgaatcagatagaaggga

SEQ ID NO: 1021421 - DNA, 25 bp, Homo sapien
tccactgaatcagatagaagggaag

SEQ ID NO: 1021422 - DNA, 25 bp, Homo sapien
ttggtccactgaatcagatagaagg

SEQ ID NO: 1021423 - DNA, 25 bp, Homo sapien
acttggtccactgaatcagatagaa

SEQ ID NO: 1021424 - DNA, 25 bp, Homo sapien
tgatgtgagccgacgaagtgaagaa

SEQ ID NO: 1021425 - DNA, 25 bp, Homo sapien
gatgtgagccgacgaagtgaagaat

SEQ ID NO: 1021426 - DNA, 25 bp, Homo sapien
aacaaaaccactacggtgatgtgag

SEQ ID NO: 1021427 - DNA, 25 bp, Homo sapien
cactacggtgatgtgagccgacgaa

SEQ ID NO: 1021428 - DNA, 25 bp, Homo sapien
gtcgtctccatagaatttaaaatat

SEQ ID NO: 1021429 - DNA, 25 bp, Homo sapien
taaaatatgttgattcagccttctc

SEQ ID NO: 1021430 - DNA, 25 bp, Homo sapien
ttatgtcgtctccatagaatttaaa

SEQ ID NO: 1021431 - DNA, 25 bp, Homo sapien
tatgtcgtctccatagaatttaaaa

SEQ ID NO: 1021432 - DNA, 25 bp, Homo sapien
ggaagagactacagcaattttcaca

SEQ ID NO: 1021433 - DNA, 25 bp, Homo sapien
tggaagagactacagcaattttcac

SEQ ID NO: 1021434 - DNA, 25 bp, Homo sapien
ctggaagagactacagcaattttca

SEQ ID NO: 1021435 - DNA, 25 bp, Homo sapien
tcaatgagtgagaggttggctagca

SEQ ID NO: 1021436 - DNA, 25 bp, Homo sapien
caacataaataggaaggtctggagt

SEQ ID NO: 1021437 - DNA, 25 bp, Homo sapien
ggtttccaaacacgattcctccata

SEQ ID NO: 1021438 - DNA, 25 bp, Homo sapien
tgaaggtgggagtcagataccactg

SEQ ID NO: 1021439 - DNA, 25 bp, Homo sapien
tttgcgctggctgaaaaagtcagta

SEQ ID NO: 1021440 - DNA, 25 bp, Homo sapien
acaaggcagcccttgaaagagatga

SEQ ID NO: 1021441 - DNA, 25 bp, Homo sapien
atattgctatatatctgtcaaagcc

SEQ ID NO: 1021442 - DNA, 25 bp, Homo sapien
gacagccataatgccgacacatgcg

SEQ ID NO: 1021443 - DNA, 25 bp, Homo sapien
tggacagagctttggacgacttatc

SEQ ID NO: 1021444 - DNA, 25 bp, Homo sapien
taaaaactatcgacctcattgggac

SEQ ID NO: 1021445 - DNA, 25 bp, Homo sapien
caatgaccataatatctagcctgta

SEQ ID NO: 1021446 - DNA, 25 bp, Homo sapien
gattaccctaggaaggtcacaataa

SEQ ID NO: 1021447 - DNA, 25 bp, Homo sapien
aaaactttacactagaatgtgcatc

SEQ ID NO: 1021448 - DNA, 25 bp, Homo sapien
ctaaaactttacactagaatgtgca

SEQ ID NO: 1021449 - DNA, 25 bp, Homo sapien
taaaactttacactagaatgtgcat

SEQ ID NO: 1021450 - DNA, 25 bp, Homo sapien
tactgcttatgagcagttataccac

SEQ ID NO: 1021451 - DNA, 25 bp, Homo sapien
gcagttataccacagacgtctagga

SEQ ID NO: 1021452 - DNA, 25 bp, Homo sapien
ctactgcttatgagcagttatacca

SEQ ID NO: 1021453 - DNA, 25 bp, Homo sapien
cagttataccacagacgtctaggac

SEQ ID NO: 1021454 - DNA, 25 bp, Homo sapien
caaaaagaagtccatgcaagctgtt

SEQ ID NO: 1021455 - DNA, 25 bp, Homo sapien
tgttaacttactggcagaaacagcc

SEQ ID NO: 1021456 - DNA, 25 bp, Homo sapien
tcattggtcacagggtctgatgcag

SEQ ID NO: 1021457 - DNA, 25 bp, Homo sapien
tcaatcataggtgcatcccaagagg

SEQ ID NO: 1021458 - DNA, 25 bp, Homo sapien
caggagaacacggccgcagagtgac

SEQ ID NO: 1021459 - DNA, 25 bp, Homo sapien
ggagaacacggccgcagagtgacct

SEQ ID NO: 1021460 - DNA, 25 bp, Homo sapien
agaacacggccgcagagtgaccttc

SEQ ID NO: 1021461 - DNA, 25 bp, Homo sapien
taccaggagaacacggccgcagagt

SEQ ID NO: 1021462 - DNA, 25 bp, Homo sapien
ggccaccggatgtggtccttgtctg

SEQ ID NO: 1021463 - DNA, 25 bp, Homo sapien
ccgcctgctgaagatcatgagcgcc

SEQ ID NO: 1021464 - DNA, 25 bp, Homo sapien
ccgccagggcctggtgccgcctgct

SEQ ID NO: 1021465 - DNA, 25 bp, Homo sapien
ccttgtctgatttgttggggctgcg

SEQ ID NO: 1021466 - DNA, 25 bp, Homo sapien
ctggaaggccaggttgtatttctgc

SEQ ID NO: 1021467 - DNA, 25 bp, Homo sapien
gctgacggtccggttatcctggttg

SEQ ID NO: 1021468 - DNA, 25 bp, Homo sapien
cagcatctggctgacggtccggtta

SEQ ID NO: 1021469 - DNA, 25 bp, Homo sapien
gaaggccaggttgtatttctgcatc

SEQ ID NO: 1021470 - DNA, 25 bp, Homo sapien
tgtgctcttcgtcactcgctatgac

SEQ ID NO: 1021471 - DNA, 25 bp, Homo sapien
ctcttcgtcactcgctatgacctcg

SEQ ID NO: 1021472 - DNA, 25 bp, Homo sapien
ttcgtcactcgctatgacctcgctg

SEQ ID NO: 1021473 - DNA, 25 bp, Homo sapien
tgctcttcgtcactcgctatgacct

SEQ ID NO: 1021474 - DNA, 25 bp, Homo sapien
tggggtcctccagtgtggggtccat

SEQ ID NO: 1021475 - DNA, 25 bp, Homo sapien
catttgggcgcggtggggtcctcca

SEQ ID NO: 1021476 - DNA, 25 bp, Homo sapien
ttgcatttgggcgcggtggggtcct

SEQ ID NO: 1021477 - DNA, 25 bp, Homo sapien
gcgcggtggggtcctccagtgtggg

SEQ ID NO: 1021478 - DNA, 25 bp, Homo sapien
gccggcactggtccagggtacatgc

SEQ ID NO: 1021479 - DNA, 25 bp, Homo sapien
tccagggtacatgcagtgaagagga

SEQ ID NO: 1021480 - DNA, 25 bp, Homo sapien
gcactggtccagggtacatgcagtg

SEQ ID NO: 1021481 - DNA, 25 bp, Homo sapien
ccagggtacatgcagtgaagaggac

SEQ ID NO: 1021482 - DNA, 25 bp, Homo sapien
gtgtgcatagtgggcctggagggcg

SEQ ID NO: 1021483 - DNA, 25 bp, Homo sapien
agatgtgtgcatagtgggcctggag

SEQ ID NO: 1021484 - DNA, 25 bp, Homo sapien
gaagatgtgtgcatagtgggcctgg

SEQ ID NO: 1021485 - DNA, 25 bp, Homo sapien
ggggaagatgtgtgcatagtgggcc

SEQ ID NO: 1021486 - DNA, 25 bp, Homo sapien
ccccaactggcaccactgctgcccc

SEQ ID NO: 1021487 - DNA, 25 bp, Homo sapien
ggatctttggggttgcccacctgcc

SEQ ID NO: 1021488 - DNA, 25 bp, Homo sapien
tgggatctttggggttgcccacctg

SEQ ID NO: 1021489 - DNA, 25 bp, Homo sapien
gggatctttggggttgcccacctgc

SEQ ID NO: 1021490 - DNA, 25 bp, Homo sapien
cggaggagggaaactgcccagcttt

SEQ ID NO: 1021491 - DNA, 25 bp, Homo sapien
aaggtcccacaattcatggtatgta

SEQ ID NO: 1021492 - DNA, 25 bp, Homo sapien
cccacaattcatggtatgtacaggg

SEQ ID NO: 1021493 - DNA, 25 bp, Homo sapien
gaaactgcccagctttcccccggca

SEQ ID NO: 1021494 - DNA, 25 bp, Homo sapien
aatgaaaaatatcgcccacgatcaa

SEQ ID NO: 1021495 - DNA, 25 bp, Homo sapien
gcacaatgaaaaatatcgcccacga

SEQ ID NO: 1021496 - DNA, 25 bp, Homo sapien
tatcgcccacgatcaacgtgttctg

SEQ ID NO: 1021497 - DNA, 25 bp, Homo sapien
atatcgcccacgatcaacgtgttct

SEQ ID NO: 1021498 - DNA, 25 bp, Homo sapien
agtgtgagcccttgcctcacaccgg

SEQ ID NO: 1021499 - DNA, 25 bp, Homo sapien
acagaggtcagcgtgagccccttgc

SEQ ID NO: 1021500 - DNA, 25 bp, Homo sapien
gaggtcagtgtgagcccttgcctca

SEQ ID NO: 1021501 - DNA, 25 bp, Homo sapien
tcccacgctgagagaggtcagtgtg

SEQ ID NO: 1021502 - DNA, 25 bp, Homo sapien
accggcccctcccacgctgagagag

SEQ ID NO: 1021503 - DNA, 25 bp, Homo sapien
aggtcagcgtgagccccttgcctca

SEQ ID NO: 1021504 - DNA, 25 bp, Homo sapien
ctcccacgcggacagaggtcagcgt

SEQ ID NO: 1021505 - DNA, 25 bp, Homo sapien
gtgtgagccccttgtctcacaccgg

SEQ ID NO: 1021506 - DNA, 25 bp, Homo sapien
tcttgaagcccaaaacttcctcaaa

SEQ ID NO: 1021507 - DNA, 25 bp, Homo sapien
aaaacttcctcaaatcaggcttttg

SEQ ID NO: 1021508 - DNA, 25 bp, Homo sapien
ttcctcaaatcaggcttttgcccaa

SEQ ID NO: 1021509 - DNA, 25 bp, Homo sapien
ttgaagcccaaaacttcctcaaatc

SEQ ID NO: 1021510 - DNA, 25 bp, Homo sapien
cctcacagcagattcttcacgccca

SEQ ID NO: 1021511 - DNA, 25 bp, Homo sapien
tgcctcacagcagattcttcacgcc

SEQ ID NO: 1021512 - DNA, 25 bp, Homo sapien
ctcacagcagattcttcacgcccag

SEQ ID NO: 1021513 - DNA, 25 bp, Homo sapien
gcagattcttcacgcccagcttcta

SEQ ID NO: 1021514 - DNA, 25 bp, Homo sapien
gaacgcaccctgttgtgaaccgtgc

SEQ ID NO: 1021515 - DNA, 25 bp, Homo sapien
aacgcaccctgttgtgaaccgtgca

SEQ ID NO: 1021516 - DNA, 25 bp, Homo sapien
tcactatagctttggccttctgaga

SEQ ID NO: 1021517 - DNA, 25 bp, Homo sapien
gggctaaatcgattgtctcacctca

SEQ ID NO: 1021518 - DNA, 25 bp, Homo sapien
aactcctgggctaaatcgattgtct

SEQ ID NO: 1021519 - DNA, 25 bp, Homo sapien
tcctgggctaaatcgattgtctcac

SEQ ID NO: 1021520 - DNA, 25 bp, Homo sapien
ttggacaaaagagcctgatcctgtc

SEQ ID NO: 1021521 - DNA, 25 bp, Homo sapien
ggacaaaagagcctgatcctgtctc

SEQ ID NO: 1021522 - DNA, 25 bp, Homo sapien
caaaagagcctgatcctgtctcaaa

SEQ ID NO: 1021523 - DNA, 25 bp, Homo sapien
gacaaaagagcctgatcctgtctca

SEQ ID NO: 1021524 - DNA, 25 bp, Homo sapien
tagagttccaactactagggaagct

SEQ ID NO: 1021525 - DNA, 25 bp, Homo sapien
ctgagatgagaggataccttgagct

SEQ ID NO: 1021526 - DNA, 25 bp, Homo sapien
tggtgttgtgcacctagagttccaa

SEQ ID NO: 1021527 - DNA, 25 bp, Homo sapien
taataactggtgtggtgttgtgcac

SEQ ID NO: 1021528 - DNA, 25 bp, Homo sapien
acatctggctagtttcttttatttt

SEQ ID NO: 1021529 - DNA, 25 bp, Homo sapien
accacatctggctagtttcttttat

SEQ ID NO: 1021530 - DNA, 25 bp, Homo sapien
aggctggccacaaattcctggtctc

SEQ ID NO: 1021531 - DNA, 25 bp, Homo sapien
atagatggggtcttgttgtgttggc

SEQ ID NO: 1021532 - DNA, 25 bp, Homo sapien
catgtgccaccatgcccagctaatt

SEQ ID NO: 1021533 - DNA, 25 bp, Homo sapien
gcatgtgccaccatgcccagctaat

SEQ ID NO: 1021534 - DNA, 25 bp, Homo sapien
cggctcagcgcaacctccaccttct

SEQ ID NO: 1021535 - DNA, 25 bp, Homo sapien
tctgggttcaagcaattctcctgcc

SEQ ID NO: 1021536 - DNA, 25 bp, Homo sapien
ctgattgcttcatcagcgaggagct

SEQ ID NO: 1021537 - DNA, 25 bp, Homo sapien
ggtgaaggagttttcctgttgctcc

SEQ ID NO: 1021538 - DNA, 25 bp, Homo sapien
ttcctgattgcttcatcagcgagga

SEQ ID NO: 1021539 - DNA, 25 bp, Homo sapien
ttagctcaactcgagccatttcctg

SEQ ID NO: 1021540 - DNA, 25 bp, Homo sapien
atggcttgagcccgtgaattcaaga

SEQ ID NO: 1021541 - DNA, 25 bp, Homo sapien
ctcaggaggctcagctaggaggatg

SEQ ID NO: 1021542 - DNA, 25 bp, Homo sapien
gaggctcagctaggaggatggcttg

SEQ ID NO: 1021543 - DNA, 25 bp, Homo sapien
ggatggcttgagcccgtgaattcaa

SEQ ID NO: 1021544 - DNA, 25 bp, Homo sapien
ggtgtttatggaggcatgattgata

SEQ ID NO: 1021545 - DNA, 25 bp, Homo sapien
ttgtgtttagcaacacagaagctct

SEQ ID NO: 1021546 - DNA, 25 bp, Homo sapien
tcactggccattggtagttaagtca

SEQ ID NO: 1021547 - DNA, 25 bp, Homo sapien
tagttaagtcaatctccagttcctt

SEQ ID NO: 1021548 - DNA, 25 bp, Homo sapien
aaaaaatgagctacacgttgcagtg

SEQ ID NO: 1021549 - DNA, 25 bp, Homo sapien
tgagctacacgttgcagtgcacacc

SEQ ID NO: 1021550 - DNA, 25 bp, Homo sapien
tgctaagagcaagactgcatttctt

SEQ ID NO: 1021551 - DNA, 25 bp, Homo sapien
ctttgctaagagcaagactgcattt

SEQ ID NO: 1021552 - DNA, 25 bp, Homo sapien
tttgtgttatatgtggattccacag

SEQ ID NO: 1021553 - DNA, 25 bp, Homo sapien
tgaaaacttgagtatgcgtggattt

SEQ ID NO: 1021554 - DNA, 25 bp, Homo sapien
ctttgaaaacttgagtatgcgtgga

SEQ ID NO: 1021555 - DNA, 25 bp, Homo sapien
ggactgactttgaaaacttgagtat

SEQ ID NO: 1021556 - DNA, 25 bp, Homo sapien
aatggcgcaaccttgctggtcactg

SEQ ID NO: 1021557 - DNA, 25 bp, Homo sapien
ttcccgcctcgactcctgatatcaa

SEQ ID NO: 1021558 - DNA, 25 bp, Homo sapien
gaaggctttctactaatggaattcc

SEQ ID NO: 1021559 - DNA, 25 bp, Homo sapien
tatgtagaaggccttcccaaaggaa

SEQ ID NO: 1021560 - DNA, 25 bp, Homo sapien
ctcacgattctgtggctggaccatt

SEQ ID NO: 1021561 - DNA, 25 bp, Homo sapien
gcagggactgtgctggtcttacctg

SEQ ID NO: 1021562 - DNA, 25 bp, Homo sapien
tgctggtcttacctgagcagacctg

SEQ ID NO: 1021563 - DNA, 25 bp, Homo sapien
cagcttttgcccaaatcttagtgac

SEQ ID NO: 1021564 - DNA, 25 bp, Homo sapien
gtgaaggaagtcagctacagacagc

SEQ ID NO: 1021565 - DNA, 25 bp, Homo sapien
acttttagatctagagtgatgtcag

SEQ ID NO: 1021566 - DNA, 25 bp, Homo sapien
agctgatgcacaggcctcccagtgc

SEQ ID NO: 1021567 - DNA, 25 bp, Homo sapien
cacgcctggtccaagaacccaactt

SEQ ID NO: 1021568 - DNA, 25 bp, Homo sapien
cttcagcactgggaattgtgatcca

SEQ ID NO: 1021569 - DNA, 25 bp, Homo sapien
aggatttattttccgttctcacagg

SEQ ID NO: 1021570 - DNA, 25 bp, Homo sapien
atttattttccgttctcacaggttg

SEQ ID NO: 1021571 - DNA, 25 bp, Homo sapien
tgggaattgtgatccaaagcttttc

SEQ ID NO: 1021572 - DNA, 25 bp, Homo sapien
tgctcagtaacacggacagctccct

SEQ ID NO: 1021573 - DNA, 25 bp, Homo sapien
catggagaatcaccttaaatggcaa

SEQ ID NO: 1021574 - DNA, 25 bp, Homo sapien
cagtaggatctttgtgttgctgaga

SEQ ID NO: 1021575 - DNA, 25 bp, Homo sapien
tattgtgaagcacagttagagcaga

SEQ ID NO: 1021576 - DNA, 25 bp, Homo sapien
ttttctgtattaaaggccactgctt

SEQ ID NO: 1021577 - DNA, 25 bp, Homo sapien
gttctccatcatctgttgtgggtca

SEQ ID NO: 1021578 - DNA, 25 bp, Homo sapien
ttctgtattaaaggccactgctttc

SEQ ID NO: 1021579 - DNA, 25 bp, Homo sapien
atcatctgttgtgggtcacttgtgc

SEQ ID NO: 1021580 - DNA, 25 bp, Homo sapien
ggcagtttgcgctatcccatcccgg

SEQ ID NO: 1021581 - DNA, 25 bp, Homo sapien
agtttgcgctatcccatcccggccc

SEQ ID NO: 1021582 - DNA, 25 bp, Homo sapien
ttgcgctatcccatcccggcccatt

SEQ ID NO: 1021583 - DNA, 25 bp, Homo sapien
gggcagtttgcgctatcccatcccg

SEQ ID NO: 1021584 - DNA, 25 bp, Homo sapien
ggtgagcctgcgcaaatcattcatt

SEQ ID NO: 1021585 - DNA, 25 bp, Homo sapien
tacccagttaatatccagagcactg

SEQ ID NO: 1021586 - DNA, 25 bp, Homo sapien
catacattcagtcggaagtgtgtga

SEQ ID NO: 1021587 - DNA, 25 bp, Homo sapien
tgtgagtagagacaaacatgggctt

SEQ ID NO: 1021588 - DNA, 25 bp, Homo sapien
ctcagaaggccaaagctatagtgag

SEQ ID NO: 1021589 - DNA, 25 bp, Homo sapien
tcagaaggccaaagctatagtgagc

SEQ ID NO: 1021590 - DNA, 25 bp, Homo sapien
tctcagaaggccaaagctatagtga

SEQ ID NO: 1021591 - DNA, 25 bp, Homo sapien
cttgagtcactgtgaggtcacctac

SEQ ID NO: 1021592 - DNA, 25 bp, Homo sapien
gagtcactgtgaggtcacctactgg

SEQ ID NO: 1021593 - DNA, 25 bp, Homo sapien
tcactccctcactcgacaccgctca

SEQ ID NO: 1021594 - DNA, 25 bp, Homo sapien
tcactgtgaggtcacctactggaaa

SEQ ID NO: 1021595 - DNA, 25 bp, Homo sapien
acagatcaataggtattagactctc

SEQ ID NO: 1021596 - DNA, 25 bp, Homo sapien
gatcaataggtattagactctcata

SEQ ID NO: 1021597 - DNA, 25 bp, Homo sapien
tcccgcaactggatgttcccacctg

SEQ ID NO: 1021598 - DNA, 25 bp, Homo sapien
tgttcccacctgagcgtgatgggag

SEQ ID NO: 1021599 - DNA, 25 bp, Homo sapien
ctgggccaaaagatgtaagcacatt

SEQ ID NO: 1021600 - DNA, 25 bp, Homo sapien
gccaaaagatgtaagcacatttgca

SEQ ID NO: 1021601 - DNA, 25 bp, Homo sapien
tgggccaaaagatgtaagcacattt

SEQ ID NO: 1021602 - DNA, 25 bp, Homo sapien
ggccaaaagatgtaagcacatttgc

SEQ ID NO: 1021603 - DNA, 25 bp, Homo sapien
gtagggtatgggcctaaataggcca

SEQ ID NO: 1021604 - DNA, 25 bp, Homo sapien
tagggtatgggcctaaataggccat

SEQ ID NO: 1021605 - DNA, 25 bp, Homo sapien
agggtatgggcctaaataggccatt

SEQ ID NO: 1021606 - DNA, 25 bp, Homo sapien
gggtatgggcctaaataggccattg

SEQ ID NO: 1021607 - DNA, 25 bp, Homo sapien
tggcacatgcctcgaggatgggagg

SEQ ID NO: 1021608 - DNA, 25 bp, Homo sapien
gcacatgcctcgaggatgggaggca

SEQ ID NO: 1021609 - DNA, 25 bp, Homo sapien
ggcacatgcctcgaggatgggaggc

SEQ ID NO: 1021610 - DNA, 25 bp, Homo sapien
ccacgtatacgaaaattccaaatgt

SEQ ID NO: 1021611 - DNA, 25 bp, Homo sapien
cctctggaatccacgtatacgaaaa

SEQ ID NO: 1021612 - DNA, 25 bp, Homo sapien
gcagtcagctgcgatagcactacta

SEQ ID NO: 1021613 - DNA, 25 bp, Homo sapien
acccctctggaatccacgtatacga

SEQ ID NO: 1021614 - DNA, 25 bp, Homo sapien
ctcctgctgtgtggctccttgcggc

SEQ ID NO: 1021615 - DNA, 25 bp, Homo sapien
attagtgggcgtgttaagcttgttt

SEQ ID NO: 1021616 - DNA, 25 bp, Homo sapien
agaattagtgggcgtgttaagcttg

SEQ ID NO: 1021617 - DNA, 25 bp, Homo sapien
taatgtagaattagtgggcgtgtta

SEQ ID NO: 1021618 - DNA, 25 bp, Homo sapien
tgtagaattagtgggcgtgttaagc

SEQ ID NO: 1021619 - DNA, 25 bp, Homo sapien
gtagggtatgggcctaaataggcca

SEQ ID NO: 1021620 - DNA, 25 bp, Homo sapien
tagggtatgggcctaaataggccat

SEQ ID NO: 1021621 - DNA, 25 bp, Homo sapien
gggtatgggcctaaataggccattg

SEQ ID NO: 1021622 - DNA, 25 bp, Homo sapien
agggtatgggcctaaataggccatt

SEQ ID NO: 1021623 - DNA, 25 bp, Homo sapien
agagtctaacttgagtaagttttgg

SEQ ID NO: 1021624 - DNA, 25 bp, Homo sapien
ctgtgaggcagacgttgggactgca

SEQ ID NO: 1021625 - DNA, 25 bp, Homo sapien
ctagagagtctaacttgagtaagtt

SEQ ID NO: 1021626 - DNA, 25 bp, Homo sapien
gggactagagagtctaacttgagta

SEQ ID NO: 1021627 - DNA, 25 bp, Homo sapien
actgggccaaaaaaggctgttgtga

SEQ ID NO: 1021628 - DNA, 25 bp, Homo sapien
aactgggccaaaaaaggctgttgtg

SEQ ID NO: 1021629 - DNA, 25 bp, Homo sapien
gcctcacagtcatgagttgggccta

SEQ ID NO: 1021630 - DNA, 25 bp, Homo sapien
tggcctcacagtcatgagttgggcc

SEQ ID NO: 1021631 - DNA, 25 bp, Homo sapien
ggaaatggcctcacagtcatgagtt

SEQ ID NO: 1021632 - DNA, 25 bp, Homo sapien
aatggcctcacagtcatgagttggg

SEQ ID NO: 1021633 - DNA, 25 bp, Homo sapien
aaaggcaggagcttcgcctgaggat

SEQ ID NO: 1021634 - DNA, 25 bp, Homo sapien
gcctgaggatgccacagtgagacac

SEQ ID NO: 1021635 - DNA, 25 bp, Homo sapien
ggtctggagggtccactgtgaggca

SEQ ID NO: 1021636 - DNA, 25 bp, Homo sapien
tggagaggctgccgaaaggcaggag

SEQ ID NO: 1021637 - DNA, 25 bp, Homo sapien
aatcgggcctggagacccaaccagg

SEQ ID NO: 1021638 - DNA, 25 bp, Homo sapien
acaacttgggcctgcggcggtcgcc

SEQ ID NO: 1021639 - DNA, 25 bp, Homo sapien
cctggagacccaaccaggaagaaga

SEQ ID NO: 1021640 - DNA, 25 bp, Homo sapien
ggagacccaaccaggaagaagagct

SEQ ID NO: 1021641 - DNA, 25 bp, Homo sapien
tcccacctcccagcaaacaagctct

SEQ ID NO: 1021642 - DNA, 25 bp, Homo sapien
cacctcccagcaaacaagctctttt

SEQ ID NO: 1021643 - DNA, 25 bp, Homo sapien
tctcccacctcccagcaaacaagct

SEQ ID NO: 1021644 - DNA, 25 bp, Homo sapien
catctcccacctcccagcaaacaag

SEQ ID NO: 1021645 - DNA, 25 bp, Homo sapien
gccaacttaaggaggcctggcctct

SEQ ID NO: 1021646 - DNA, 25 bp, Homo sapien
tgagaggccaacttaaggaggcctg

SEQ ID NO: 1021647 - DNA, 25 bp, Homo sapien
aaggcctgctcctcttatctatacc

SEQ ID NO: 1021648 - DNA, 25 bp, Homo sapien
gaacacgttgatcgtgggcgatatt

SEQ ID NO: 1021649 - DNA, 25 bp, Homo sapien
gggactgatgactgcatgatcttct

SEQ ID NO: 1021650 - DNA, 25 bp, Homo sapien
tgggactgatgactgcatgatcttc

SEQ ID NO: 1021651 - DNA, 25 bp, Homo sapien
ccaaagcccaacacccccaagtgtg

SEQ ID NO: 1021652 - DNA, 25 bp, Homo sapien
caaagcccaacacccccaagtgtgc

SEQ ID NO: 1021653 - DNA, 25 bp, Homo sapien
agcagtgtggctgaacacctaaaag

SEQ ID NO: 1021654 - DNA, 25 bp, Homo sapien
tcaaacaaacccaaatcatcacagt

SEQ ID NO: 1021655 - DNA, 25 bp, Homo sapien
actcaggagtaaacactcagatatg

SEQ ID NO: 1021656 - DNA, 25 bp, Homo sapien
tcatcacagtagagcacgatcttaa

SEQ ID NO: 1021657 - DNA, 25 bp, Homo sapien
tgtctttctttgtatcggtgctcag

SEQ ID NO: 1021658 - DNA, 25 bp, Homo sapien
tctttgtatcggtgctcagctgagt

SEQ ID NO: 1021659 - DNA, 25 bp, Homo sapien
ttgaatcattttaagatgctcgaac

SEQ ID NO: 1021660 - DNA, 25 bp, Homo sapien
tctttctttgtatcggtgctcagct

SEQ ID NO: 1021661 - DNA, 25 bp, Homo sapien
gatgggatgtagaatgataaggctc

SEQ ID NO: 1021662 - DNA, 25 bp, Homo sapien
gccctgctaggagttcacgctttag

SEQ ID NO: 1021663 - DNA, 25 bp, Homo sapien
aaagacaaactcacaggaagatggg

SEQ ID NO: 1021664 - DNA, 25 bp, Homo sapien
tgagaactgcaattagagttaaatg

SEQ ID NO: 1021665 - DNA, 25 bp, Homo sapien
acagctgataatttattagttaggc

SEQ ID NO: 1021666 - DNA, 25 bp, Homo sapien
tagactacacaatgagttaagaatg

SEQ ID NO: 1021667 - DNA, 25 bp, Homo sapien
ataagctcaccaatatactatgtac

SEQ ID NO: 1021668 - DNA, 25 bp, Homo sapien
cccaacgtttagactacacaatgag

SEQ ID NO: 1021669 - DNA, 25 bp, Homo sapien
cttagaaaccacctcagctttctcc

SEQ ID NO: 1021670 - DNA, 25 bp, Homo sapien
tgttaatgtataagagatgtagatt

SEQ ID NO: 1021671 - DNA, 25 bp, Homo sapien
tcaggtacttaaagttagctccaaa

SEQ ID NO: 1021672 - DNA, 25 bp, Homo sapien
ttgttaatgtataagagatgtagat

SEQ ID NO: 1021673 - DNA, 25 bp, Homo sapien
attgttaatgtataagagatgtaga

SEQ ID NO: 1021674 - DNA, 25 bp, Homo sapien
cttaataagaggaattcatatggat

SEQ ID NO: 1021675 - DNA, 25 bp, Homo sapien
aataagaggaattcatatggatcag

SEQ ID NO: 1021676 - DNA, 25 bp, Homo sapien
ttcttaataagaggaattcatatgg

SEQ ID NO: 1021677 - DNA, 25 bp, Homo sapien
ttttcttaataagaggaattcatat

SEQ ID NO: 1021678 - DNA, 25 bp, Homo sapien
tcagttgtttagttacaagatagaa

SEQ ID NO: 1021679 - DNA, 25 bp, Homo sapien
accatctacgctaagacataaaatt

SEQ ID NO: 1021680 - DNA, 25 bp, Homo sapien
tggccttgtaagaaagcaaattaac

SEQ ID NO: 1021681 - DNA, 25 bp, Homo sapien
aattaacttctaacatacaaagcct

SEQ ID NO: 1021682 - DNA, 25 bp, Homo sapien
ttacatccatgagcctgataaaagt

SEQ ID NO: 1021683 - DNA, 25 bp, Homo sapien
agtatgtatatgcagtgactcagca

SEQ ID NO: 1021684 - DNA, 25 bp, Homo sapien
gaaaatcttgtccattactggttaa

SEQ ID NO: 1021685 - DNA, 25 bp, Homo sapien
tcaagagaaacttacaggagtggac

SEQ ID NO: 1021686 - DNA, 25 bp, Homo sapien
gattcaaggtgtgaaggtaacatca

SEQ ID NO: 1021687 - DNA, 25 bp, Homo sapien
gcatgtttgctagaactcacctgta

SEQ ID NO: 1021688 - DNA, 25 bp, Homo sapien
ctgtaacagtgcaattaaacgttct

SEQ ID NO: 1021689 - DNA, 25 bp, Homo sapien
tcacctgtaaaattgtctgagcaac

SEQ ID NO: 1021690 - DNA, 25 bp, Homo sapien
gcacataactaaactataaatcttc

SEQ ID NO: 1021691 - DNA, 25 bp, Homo sapien
gaaaataggtacatacaaaatatca

SEQ ID NO: 1021692 - DNA, 25 bp, Homo sapien
tatacagcacataactaaactataa

SEQ ID NO: 1021693 - DNA, 25 bp, Homo sapien
catacaaaatatcacatagagagaa

SEQ ID NO: 1021694 - DNA, 25 bp, Homo sapien
gaaaaggataagtcacaagtcacat

SEQ ID NO: 1021695 - DNA, 25 bp, Homo sapien
tatagcctaggagtcattctaacag

SEQ ID NO: 1021696 - DNA, 25 bp, Homo sapien
tcacctttggaataattaggacacg

SEQ ID NO: 1021697 - DNA, 25 bp, Homo sapien
tatgaatccactctaagccatagtc

SEQ ID NO: 1021698 - DNA, 25 bp, Homo sapien
cactgattagttctttctctaattc

SEQ ID NO: 1021699 - DNA, 25 bp, Homo sapien
ctccttcacactgattagttctttc

SEQ ID NO: 1021700 - DNA, 25 bp, Homo sapien
aattctccttcacactgattagttc

SEQ ID NO: 1021701 - DNA, 25 bp, Homo sapien
ttctccttcacactgattagttctt

SEQ ID NO: 1021702 - DNA, 25 bp, Homo sapien
gaaaatggggaggaaattgtgatta

SEQ ID NO: 1021703 - DNA, 25 bp, Homo sapien
tgggctgtggctaaaattatgagaa

SEQ ID NO: 1021704 - DNA, 25 bp, Homo sapien
ctgggctgtggctaaaattatgaga

SEQ ID NO: 1021705 - DNA, 25 bp, Homo sapien
aagctgtccaacacattagggccac

SEQ ID NO: 1021706 - DNA, 25 bp, Homo sapien
tccatctgtgaattagggtgtggcc

SEQ ID NO: 1021707 - DNA, 25 bp, Homo sapien
gtaatgcttgccacatagagcacag

SEQ ID NO: 1021708 - DNA, 25 bp, Homo sapien
gaactgcaatctgtaggtgtcggta

SEQ ID NO: 1021709 - DNA, 25 bp, Homo sapien
agatcctcttgtaaatcactagctg

SEQ ID NO: 1021710 - DNA, 25 bp, Homo sapien
ttatgagatcctcttgtaaatcact

SEQ ID NO: 1021711 - DNA, 25 bp, Homo sapien
tgagatcctcttgtaaatcactagc

SEQ ID NO: 1021712 - DNA, 25 bp, Homo sapien
atgagatcctcttgtaaatcactag

SEQ ID NO: 1021713 - DNA, 25 bp, Homo sapien
tcttttgctccttgtaacttcctac

SEQ ID NO: 1021714 - DNA, 25 bp, Homo sapien
tacagtgttgtcagcatccacatac

SEQ ID NO: 1021715 - DNA, 25 bp, Homo sapien
ttcctacagtgttgtcagcatccac

SEQ ID NO: 1021716 - DNA, 25 bp, Homo sapien
gtgttgtcagcatccacatacttct

SEQ ID NO: 1021717 - DNA, 25 bp, Homo sapien
gcagacctagtgcatggctccacac

SEQ ID NO: 1021718 - DNA, 25 bp, Homo sapien
cagacctagtgcatggctccacact

SEQ ID NO: 1021719 - DNA, 25 bp, Homo sapien
agagtcaagatccacgctcagctcc

SEQ ID NO: 1021720 - DNA, 25 bp, Homo sapien
aacaccaagcatgcccccgattttg

SEQ ID NO: 1021721 - DNA, 25 bp, Homo sapien
atgcccccgattttgcatgtcccag

SEQ ID NO: 1021722 - DNA, 25 bp, Homo sapien
catgtcccagccaattcagagtcaa

SEQ ID NO: 1021723 - DNA, 25 bp, Homo sapien
gcctggatcgtttgaaatggtcatc

SEQ ID NO: 1021724 - DNA, 25 bp, Homo sapien
gaaatggtcatccatcctttggccc

SEQ ID NO: 1021725 - DNA, 25 bp, Homo sapien
cctggcttagcctggatcgtttgaa

SEQ ID NO: 1021726 - DNA, 25 bp, Homo sapien
ggtcatccatcctttggccccaata

SEQ ID NO: 1021727 - DNA, 25 bp, Homo sapien
tctgtccctcgatccttgcaacgta

SEQ ID NO: 1021728 - DNA, 25 bp, Homo sapien
tattcattggccacttgctgcacgc

SEQ ID NO: 1021729 - DNA, 25 bp, Homo sapien
ggcacagcagcttctaccttatgga

SEQ ID NO: 1021730 - DNA, 25 bp, Homo sapien
gctgcaaggatgctcagaaaaccag

SEQ ID NO: 1021731 - DNA, 25 bp, Homo sapien
gacggtgtcttactcatctgctctc

SEQ ID NO: 1021732 - DNA, 25 bp, Homo sapien
catgtgtccctaagaatctgagagc

SEQ ID NO: 1021733 - DNA, 25 bp, Homo sapien
cgcttactacctggcacttattggg

SEQ ID NO: 1021734 - DNA, 25 bp, Homo sapien
gaggtcatgaccagtagaaatctca

SEQ ID NO: 1021735 - DNA, 25 bp, Homo sapien
tggccagcctttcatgcctgcttca

SEQ ID NO: 1021736 - DNA, 25 bp, Homo sapien
aggtcagccgcagagcccggggcac

SEQ ID NO: 1021737 - DNA, 25 bp, Homo sapien
ggccagcctttcatgcctgcttcat

SEQ ID NO: 1021738 - DNA, 25 bp, Homo sapien
caggtcagccgcagagcccggggca

SEQ ID NO: 1021739 - DNA, 25 bp, Homo sapien
cggccggcgcacgcgggttctctgt

SEQ ID NO: 1021740 - DNA, 25 bp, Homo sapien
ccggcgcacgcgggttctctgtggc

SEQ ID NO: 1021741 - DNA, 25 bp, Homo sapien
gccggcgcacgcgggttctctgtgg

SEQ ID NO: 1021742 - DNA, 25 bp, Homo sapien
ggccggcgcacgcgggttctctgtg

SEQ ID NO: 1021743 - DNA, 25 bp, Homo sapien
ccggcgcacgcgggttctctgtggc

SEQ ID NO: 1021744 - DNA, 25 bp, Homo sapien
cggccggcgcacgcgggttctctgt

SEQ ID NO: 1021745 - DNA, 25 bp, Homo sapien
gccggcgcacgcgggttctctgtgg

SEQ ID NO: 1021746 - DNA, 25 bp, Homo sapien
ggccggcgcacgcgggttctctgtg

SEQ ID NO: 1021747 - DNA, 25 bp, Homo sapien
cagagagtatgcaagcacgaccacg

SEQ ID NO: 1021748 - DNA, 25 bp, Homo sapien
ggttcacacagcacgttttctgctc

SEQ ID NO: 1021749 - DNA, 25 bp, Homo sapien
tctgctccatcacgtgtatggggca

SEQ ID NO: 1021750 - DNA, 25 bp, Homo sapien
atgcaagcacgaccacgtcaacagg

SEQ ID NO: 1021751 - DNA, 25 bp, Homo sapien
tctggggcagcccggaaccaccaga

SEQ ID NO: 1021752 - DNA, 25 bp, Homo sapien
gcagcccggaaccaccagaggtcag

SEQ ID NO: 1021753 - DNA, 25 bp, Homo sapien
ctggggcccttgcaccaggcaggag

SEQ ID NO: 1021754 - DNA, 25 bp, Homo sapien
gggcagcccggaaccaccagaggtc

SEQ ID NO: 1021755 - DNA, 25 bp, Homo sapien
cagtgttgttgacagggtagggtgc

SEQ ID NO: 1021756 - DNA, 25 bp, Homo sapien
acgactacccagagtcagagctgcc

SEQ ID NO: 1021757 - DNA, 25 bp, Homo sapien
ctgagagttccccagggtcacgact

SEQ ID NO: 1021758 - DNA, 25 bp, Homo sapien
taaacaggagcatgcaacccccgtg

SEQ ID NO: 1021759 - DNA, 25 bp, Homo sapien
gcactccaacatgggatagtgagcc

SEQ ID NO: 1021760 - DNA, 25 bp, Homo sapien
gcgcacgcgcggtcggctcggcgag

SEQ ID NO: 1021761 - DNA, 25 bp, Homo sapien
tcagcacggacgaggagggagccgc

SEQ ID NO: 1021762 - DNA, 25 bp, Homo sapien
cgctcagcacggacgaggagggagc

SEQ ID NO: 1021763 - DNA, 25 bp, Homo sapien
gtcggctcggcgaggagccggtctc

SEQ ID NO: 1021764 - DNA, 25 bp, Homo sapien
cttgatctaatgtgaatagactgag

SEQ ID NO: 1021765 - DNA, 25 bp, Homo sapien
gtctagatttgtcttcgtctctgag

SEQ ID NO: 1021766 - DNA, 25 bp, Homo sapien
ggtctgtctagatttgtcttcgtct

SEQ ID NO: 1021767 - DNA, 25 bp, Homo sapien
aatgtgaatagactgagtgggaacc

SEQ ID NO: 1021768 - DNA, 25 bp, Homo sapien
tgttataagtagcttgattgtcata

SEQ ID NO: 1021769 - DNA, 25 bp, Homo sapien
tcatacagcatccaacgacgcatat

SEQ ID NO: 1021770 - DNA, 25 bp, Homo sapien
gcttgattgtcatacagcatccaac

SEQ ID NO: 1021771 - DNA, 25 bp, Homo sapien
agcatccaacgacgcatatttcctt

SEQ ID NO: 1021772 - DNA, 25 bp, Homo sapien
agtcccggagatggcacacagcctt

SEQ ID NO: 1021773 - DNA, 25 bp, Homo sapien
gcctctccgtgcagtcccggagatg

SEQ ID NO: 1021774 - DNA, 25 bp, Homo sapien
atcaccgctaggagcactctgagaa

SEQ ID NO: 1021775 - DNA, 25 bp, Homo sapien
gcacgaaccgcaatgagctgggctc

SEQ ID NO: 1021776 - DNA, 25 bp, Homo sapien
atttcaggatgaggtattcggagct

SEQ ID NO: 1021777 - DNA, 25 bp, Homo sapien
aggatgaggtattcggagctgtgtc

SEQ ID NO: 1021778 - DNA, 25 bp, Homo sapien
tcaggatgaggtattcggagctgtg

SEQ ID NO: 1021779 - DNA, 25 bp, Homo sapien
tttcaggatgaggtattcggagctg

SEQ ID NO: 1021780 - DNA, 25 bp, Homo sapien
caatcccaagcaccataatgtggaa

SEQ ID NO: 1021781 - DNA, 25 bp, Homo sapien
gatgaccacagctacagggctaggt

SEQ ID NO: 1021782 - DNA, 25 bp, Homo sapien
gtgcacacaattagtaaccgtagcg

SEQ ID NO: 1021783 - DNA, 25 bp, Homo sapien
aaccgtagcgatatacgtgtacacg

SEQ ID NO: 1021784 - DNA, 25 bp, Homo sapien
gaggcccagctgagtttggatcata

SEQ ID NO: 1021785 - DNA, 25 bp, Homo sapien
taggctcaggtggaacagcctcaac

SEQ ID NO: 1021786 - DNA, 25 bp, Homo sapien
gaatatccttaagataaggccccag

SEQ ID NO: 1021787 - DNA, 25 bp, Homo sapien
gagcatttccggttcccctgctgtg

SEQ ID NO: 1021788 - DNA, 25 bp, Homo sapien
tcacaggtgggcagcaggtctaaca

SEQ ID NO: 1021789 - DNA, 25 bp, Homo sapien
cacaggtgggcagcaggtctaacac

SEQ ID NO: 1021790 - DNA, 25 bp, Homo sapien
cagccacagaatcgtgagcaaataa

SEQ ID NO: 1021791 - DNA, 25 bp, Homo sapien
cgtgagcaaataagtgatgcttaag

SEQ ID NO: 1021792 - DNA, 25 bp, Homo sapien
tgccaacccagttgaccgcagacat

SEQ ID NO: 1021793 - DNA, 25 bp, Homo sapien
ccgcagacatgcaggtctgctcagg

SEQ ID NO: 1021794 - DNA, 25 bp, Homo sapien
aatggcccgtcctggtactctgctc

SEQ ID NO: 1021795 - DNA, 25 bp, Homo sapien
agggtgctcaatggcccgtcctggt

SEQ ID NO: 1021796 - DNA, 25 bp, Homo sapien
tactctgctctacactggttgtagg

SEQ ID NO: 1021797 - DNA, 25 bp, Homo sapien
aacaccagggtgctcaatggcccgt

SEQ ID NO: 1021798 - DNA, 25 bp, Homo sapien
tgggccgcctgaaggtgggtgacat

SEQ ID NO: 1021799 - DNA, 25 bp, Homo sapien
ccgcctgaaggtgggtgacatgcgg

SEQ ID NO: 1021800 - DNA, 25 bp, Homo sapien
ttgggccgcctgaaggtgggtgaca

SEQ ID NO: 1021801 - DNA, 25 bp, Homo sapien
ggccgcctgaaggtgggtgacatgc

SEQ ID NO: 1021802 - DNA, 25 bp, Homo sapien
cttgttctctttatcaggacaaatc

SEQ ID NO: 1021803 - DNA, 25 bp, Homo sapien
gccttgttctctttatcaggacaaa

SEQ ID NO: 1021804 - DNA, 25 bp, Homo sapien
gttctctttatcaggacaaatcagg

SEQ ID NO: 1021805 - DNA, 25 bp, Homo sapien
atgccttgttctctttatcaggaca

SEQ ID NO: 1021806 - DNA, 25 bp, Homo sapien
taaggacacacctgagaaaagaaca

SEQ ID NO: 1021807 - DNA, 25 bp, Homo sapien
aggacacacctgagaaaagaacaga

SEQ ID NO: 1021808 - DNA, 25 bp, Homo sapien
ttaaggacacacctgagaaaagaac

SEQ ID NO: 1021809 - DNA, 25 bp, Homo sapien
ggttgtggccagctgagttgtgcat

SEQ ID NO: 1021810 - DNA, 25 bp, Homo sapien
tgggcacccttttcctggttgtggc

SEQ ID NO: 1021811 - DNA, 25 bp, Homo sapien
aatggccccactgaagcagctctga

SEQ ID NO: 1021812 - DNA, 25 bp, Homo sapien
tactgcttgggagcctggaaatggc

SEQ ID NO: 1021813 - DNA, 25 bp, Homo sapien
ccaatgcaaaaagcatactgccttc

SEQ ID NO: 1021814 - DNA, 25 bp, Homo sapien
aatgcaaaaagcatactgccttctc

SEQ ID NO: 1021815 - DNA, 25 bp, Homo sapien
cacccaatgcaaaaagcatactgcc

SEQ ID NO: 1021816 - DNA, 25 bp, Homo sapien
ttccacccaatgcaaaaagcatact

SEQ ID NO: 1021817 - DNA, 25 bp, Homo sapien
agtcatggaaaagccagcggggacc

SEQ ID NO: 1021818 - DNA, 25 bp, Homo sapien
cacagcaatacatgttagcaacttt

SEQ ID NO: 1021819 - DNA, 25 bp, Homo sapien
ataagtcaatacagtagtaagagtc

SEQ ID NO: 1021820 - DNA, 25 bp, Homo sapien
cttttatatatactaaggtttcaca

SEQ ID NO: 1021821 - DNA, 25 bp, Homo sapien
ctgctggccacagagaacccgcgtg

SEQ ID NO: 1021822 - DNA, 25 bp, Homo sapien
tgctggccacagagaacccgcgtgc

SEQ ID NO: 1021823 - DNA, 25 bp, Homo sapien
ctggccacagagaacccgcgtgtgc

SEQ ID NO: 1021824 - DNA, 25 bp, Homo sapien
tgctggccacagagaacccgcgtgt

SEQ ID NO: 1021825 - DNA, 25 bp, Homo sapien
tccctgtcacagtcagtttggggac

SEQ ID NO: 1021826 - DNA, 25 bp, Homo sapien
agtcagtttggggactgatcctcca

SEQ ID NO: 1021827 - DNA, 25 bp, Homo sapien
ttctcctttgtgactcccctgccat

SEQ ID NO: 1021828 - DNA, 25 bp, Homo sapien
tcacagtcagtttggggactgatcc

SEQ ID NO: 1021829 - DNA, 25 bp, Homo sapien
tcagactcccaatctgaggtccaat

SEQ ID NO: 1021830 - DNA, 25 bp, Homo sapien
gactcccaatctgaggtccaatgct

SEQ ID NO: 1021831 - DNA, 25 bp, Homo sapien
agactcccaatctgaggtccaatgc

SEQ ID NO: 1021832 - DNA, 25 bp, Homo sapien
tcccaatctgaggtccaatgctctc

SEQ ID NO: 1021833 - DNA, 25 bp, Homo sapien
ctgatacgctaccgtgggcacaggc

SEQ ID NO: 1021834 - DNA, 25 bp, Homo sapien
tgatacgctaccgtgggcacaggcg

SEQ ID NO: 1021835 - DNA, 25 bp, Homo sapien
catataagtaatgctagggtgagtg

SEQ ID NO: 1021836 - DNA, 25 bp, Homo sapien
tgtatgagttggtcgtagcggaatc

SEQ ID NO: 1021837 - DNA, 25 bp, Homo sapien
tgtaatgggtatggagacatatcat

SEQ ID NO: 1021838 - DNA, 25 bp, Homo sapien
ggtatgctgttcgaattcataagaa

SEQ ID NO: 1021839 - DNA, 25 bp, Homo sapien
tatcaaagtaactcttttatcagac

SEQ ID NO: 1021840 - DNA, 25 bp, Homo sapien
ttaaactcctattatttactctatc

SEQ ID NO: 1021841 - DNA, 25 bp, Homo sapien
aactcttttatcagacatatttctt

SEQ ID NO: 1021842 - DNA, 25 bp, Homo sapien
aaactcctattatttactctatcaa

SEQ ID NO: 1021843 - DNA, 25 bp, Homo sapien
cattttcggggtatgggcccgatag

SEQ ID NO: 1021844 - DNA, 25 bp, Homo sapien
atagcttatttagctgaccttactt

SEQ ID NO: 1021845 - DNA, 25 bp, Homo sapien
ggcccgatagcttatttagctgacc

SEQ ID NO: 1021846 - DNA, 25 bp, Homo sapien
tagtacgggaaggatataaccaaca

SEQ ID NO: 1021847 - DNA, 25 bp, Homo sapien
gcagcttctgtggaacgagggttta

SEQ ID NO: 1021848 - DNA, 25 bp, Homo sapien
agcgctgtgatgagtgtgcctgcaa

SEQ ID NO: 1021849 - DNA, 25 bp, Homo sapien
taaaaaatcagtgcgagcttagcgc

SEQ ID NO: 1021850 - DNA, 25 bp, Homo sapien
cttgcgtgaggaaatacttgatggc

SEQ ID NO: 1021851 - DNA, 25 bp, Homo sapien
aatggcccatttgggcaaaaagccg

SEQ ID NO: 1021852 - DNA, 25 bp, Homo sapien
tagaagtagaggttaaggagggtga

SEQ ID NO: 1021853 - DNA, 25 bp, Homo sapien
tgatgaggctattgttttttgtgaa

SEQ ID NO: 1021854 - DNA, 25 bp, Homo sapien
ttttgtgaattcttcgataatggcc

SEQ ID NO: 1021855 - DNA, 25 bp, Homo sapien
tggtaagggcgatgagtgtggggag

SEQ ID NO: 1021856 - DNA, 25 bp, Homo sapien
gtggtaagggcgatgagtgtgggga

SEQ ID NO: 1021857 - DNA, 25 bp, Homo sapien
aattaagtattgcaacttactgagg

SEQ ID NO: 1021858 - DNA, 25 bp, Homo sapien
aagtattgcaacttactgagggctt

SEQ ID NO: 1021859 - DNA, 25 bp, Homo sapien
ggaactagtcagttgccaaagcctc

SEQ ID NO: 1021860 - DNA, 25 bp, Homo sapien
gactgctgtgattaggacggatcag

SEQ ID NO: 1021861 - DNA, 25 bp, Homo sapien
tggtcgttacctagaaggttgcctg

SEQ ID NO: 1021862 - DNA, 25 bp, Homo sapien
cagaagcttatgttgtttatgcggg

SEQ ID NO: 1021863 - DNA, 25 bp, Homo sapien
gtcgaagaaggtggtgttgaggtta

SEQ ID NO: 1021864 - DNA, 25 bp, Homo sapien
cgaagaaggtggtgttgaggttacg

SEQ ID NO: 1021865 - DNA, 25 bp, Homo sapien
tgggtcgaagaaggtggtgttgagg

SEQ ID NO: 1021866 - DNA, 25 bp, Homo sapien
ctgggtcgaagaaggtggtgttgag

SEQ ID NO: 1021867 - DNA, 25 bp, Homo sapien
ccgaaaaatcagaataggtgttggt

SEQ ID NO: 1021868 - DNA, 25 bp, Homo sapien
tgaccgaaaaatcagaataggtgtt

SEQ ID NO: 1021869 - DNA, 25 bp, Homo sapien
aacttcagggtgaccgaaaaatcag

SEQ ID NO: 1021870 - DNA, 25 bp, Homo sapien
ggtgaccgaaaaatcagaataggtg

SEQ ID NO: 1021871 - DNA, 25 bp, Homo sapien
ggaagccaattgatatcatagctca

SEQ ID NO: 1021872 - DNA, 25 bp, Homo sapien
gcttccgtggagtgtggcgagtcag

SEQ ID NO: 1021873 - DNA, 25 bp, Homo sapien
tcacacgataaaccctaggaagcca

SEQ ID NO: 1021874 - DNA, 25 bp, Homo sapien
gagtgtggcgagtcagctaaatact

SEQ ID NO: 1021875 - DNA, 25 bp, Homo sapien
ggcattccggataggccgagaaagt

SEQ ID NO: 1021876 - DNA, 25 bp, Homo sapien
ggggggcatccatatagtcactcca

SEQ ID NO: 1021877 - DNA, 25 bp, Homo sapien
tagattttatgtatacgggttcttc

SEQ ID NO: 1021878 - DNA, 25 bp, Homo sapien
tatgtatacgggttcttcgaatgtg

SEQ ID NO: 1021879 - DNA, 25 bp, Homo sapien
agatatataggatttagcctataat

SEQ ID NO: 1021880 - DNA, 25 bp, Homo sapien
taagatatataggatttagcctata

SEQ ID NO: 1021881 - DNA, 25 bp, Homo sapien
ttatgaaatggtttttctaatatct

SEQ ID NO: 1021882 - DNA, 25 bp, Homo sapien
agttatgaaatggtttttctaatat

SEQ ID NO: 1021883 - DNA, 25 bp, Homo sapien
gttgaagattagtccgccgtagtcg

SEQ ID NO: 1021884 - DNA, 25 bp, Homo sapien
tactactcgattgtcaacgtcaagg

SEQ ID NO: 1021885 - DNA, 25 bp, Homo sapien
cgggcaggatagttcagacggtttc

SEQ ID NO: 1021886 - DNA, 25 bp, Homo sapien
tatttcctgagcgtctgagatgtta

SEQ ID NO: 1021887 - DNA, 25 bp, Homo sapien
aaagaggtgttggttctcttaatct

SEQ ID NO: 1021888 - DNA, 25 bp, Homo sapien
taaagaggtgttggttctcttaatc

SEQ ID NO: 1021889 - DNA, 25 bp, Homo sapien
tgtaaagaggtgttggttctcttaa

SEQ ID NO: 1021890 - DNA, 25 bp, Homo sapien
tccgaggaggttagttgtggcaata

SEQ ID NO: 1021891 - DNA, 25 bp, Homo sapien
cgaaagcctataatcactgcgcccg

SEQ ID NO: 1021892 - DNA, 25 bp, Homo sapien
ctagtataagagatcaggttcgtcc

SEQ ID NO: 1021893 - DNA, 25 bp, Homo sapien
tggccatggctaggtttatagatag

SEQ ID NO: 1021894 - DNA, 25 bp, Homo sapien
tggcgcttccaattaggtgcatgag

SEQ ID NO: 1021895 - DNA, 25 bp, Homo sapien
taggattatcccgtatcgaaggcct

SEQ ID NO: 1021896 - DNA, 25 bp, Homo sapien
gattaaggcgacagcgatttctagg

SEQ ID NO: 1021897 - DNA, 25 bp, Homo sapien
aatcacatggctaggccggaggtca

SEQ ID NO: 1021898 - DNA, 25 bp, Homo sapien
atgcatgatcttccactgtgcctcc

SEQ ID NO: 1021899 - DNA, 25 bp, Homo sapien
ctgtgtgcaggagaaagctctcagg

SEQ ID NO: 1021900 - DNA, 25 bp, Homo sapien
tctcaggctctggcagaggagtccc

SEQ ID NO: 1021901 - DNA, 25 bp, Homo sapien
cccaggggaaggatgcatgatcttc

SEQ ID NO: 1021902 - DNA, 25 bp, Homo sapien
tctgggcgtcctgtggtggctacca

SEQ ID NO: 1021903 - DNA, 25 bp, Homo sapien
acccagtagctagagaagtgctgga

SEQ ID NO: 1021904 - DNA, 25 bp, Homo sapien
cagaggctttggtgagtcattgtca

SEQ ID NO: 1021905 - DNA, 25 bp, Homo sapien
taaaacgtgctctgggcgtcctgtg

SEQ ID NO: 1021906 - DNA, 25 bp, Homo sapien
tagaagggtaaattaatgtctcatt

SEQ ID NO: 1021907 - DNA, 25 bp, Homo sapien
gtgatagagattagaagggtaaatt

SEQ ID NO: 1021908 - DNA, 25 bp, Homo sapien
gggtaaattaatgtctcatttacca

SEQ ID NO: 1021909 - DNA, 25 bp, Homo sapien
gattagaagggtaaattaatgtctc

SEQ ID NO: 1021910 - DNA, 25 bp, Homo sapien
acagggtgtcgccatgttgacgagg

SEQ ID NO: 1021911 - DNA, 25 bp, Homo sapien
gagacagggtgtcgccatgttgacg

SEQ ID NO: 1021912 - DNA, 25 bp, Homo sapien
agacagggtgtcgccatgttgacga

SEQ ID NO: 1021913 - DNA, 25 bp, Homo sapien
cagggtgtcgccatgttgacgaggc

SEQ ID NO: 1021914 - DNA, 25 bp, Homo sapien
ttacttttcgtcatgtcatatagtt

SEQ ID NO: 1021915 - DNA, 25 bp, Homo sapien
tacttttcgtcatgtcatatagttt

SEQ ID NO: 1021916 - DNA, 25 bp, Homo sapien
ctgtgggggttcagccctggctgac

SEQ ID NO: 1021917 - DNA, 25 bp, Homo sapien
ggttcagccctggctgacacagggc

SEQ ID NO: 1021918 - DNA, 25 bp, Homo sapien
ttcagccctggctgacacagggctg

SEQ ID NO: 1021919 - DNA, 25 bp, Homo sapien
tgggggttcagccctggctgacaca

SEQ ID NO: 1021920 - DNA, 25 bp, Homo sapien
gcccatagcagtgtcctgttgtgtc

SEQ ID NO: 1021921 - DNA, 25 bp, Homo sapien
acactgagactgcccatagcagtgt

SEQ ID NO: 1021922 - DNA, 25 bp, Homo sapien
agactgcccatagcagtgtcctgtt

SEQ ID NO: 1021923 - DNA, 25 bp, Homo sapien
gtagtagttacaacactgagactgc

SEQ ID NO: 1021924 - DNA, 25 bp, Homo sapien
cagtccataggcttctggttgtaaa

SEQ ID NO: 1021925 - DNA, 25 bp, Homo sapien
gaaactctgtgagtccaacagggcg

SEQ ID NO: 1021926 - DNA, 25 bp, Homo sapien
gtccaacagggcgataatagaagca

SEQ ID NO: 1021927 - DNA, 25 bp, Homo sapien
caacagggcgataatagaagcaact

SEQ ID NO: 1021928 - DNA, 25 bp, Homo sapien
tctgtgagtccaacagggcgataat

SEQ ID NO: 1021929 - DNA, 25 bp, Homo sapien
cataggcggtaattccccaggccgt

SEQ ID NO: 1021930 - DNA, 25 bp, Homo sapien
ctggcattctcggatctccaaggca

SEQ ID NO: 1021931 - DNA, 25 bp, Homo sapien
tctcagtctggcattctcggatctc

SEQ ID NO: 1021932 - DNA, 25 bp, Homo sapien
ggtaattccccaggccgtgtgatct

SEQ ID NO: 1021933 - DNA, 25 bp, Homo sapien
gaggccagagactctgagtgactgg

SEQ ID NO: 1021934 - DNA, 25 bp, Homo sapien
tggttggaggccagagactctgagt

SEQ ID NO: 1021935 - DNA, 25 bp, Homo sapien
ggccagagactctgagtgactggca

SEQ ID NO: 1021936 - DNA, 25 bp, Homo sapien
ttggaggccagagactctgagtgac

SEQ ID NO: 1021937 - DNA, 25 bp, Homo sapien
tccagcagggactcccctgaggggc

SEQ ID NO: 1021938 - DNA, 25 bp, Homo sapien
agcagggactcccctgaggggccca

SEQ ID NO: 1021939 - DNA, 25 bp, Homo sapien
gcagggactcccctgaggggcccag

SEQ ID NO: 1021940 - DNA, 25 bp, Homo sapien
tgtccagcagggactcccctgaggg

SEQ ID NO: 1021941 - DNA, 25 bp, Homo sapien
ccttgtctgatttgttggggctgcg

SEQ ID NO: 1021942 - DNA, 25 bp, Homo sapien
ggccaccggatgtggtccttgtctg

SEQ ID NO: 1021943 - DNA, 25 bp, Homo sapien
tgccgcctgctgaagatcatgagcg

SEQ ID NO: 1021944 - DNA, 25 bp, Homo sapien
gagtccttttccttgcgcagggcac

SEQ ID NO: 1021945 - DNA, 25 bp, Homo sapien
ctggaaggccaggttgtatttctgc

SEQ ID NO: 1021946 - DNA, 25 bp, Homo sapien
cagcatctggctgacggtccggtta

SEQ ID NO: 1021947 - DNA, 25 bp, Homo sapien
gctgacggtccggttatcctggttg

SEQ ID NO: 1021948 - DNA, 25 bp, Homo sapien
gaaggccaggttgtatttctgcatc

SEQ ID NO: 1021949 - DNA, 25 bp, Homo sapien
ctcgctatgacctcgctggccatgt

SEQ ID NO: 1021950 - DNA, 25 bp, Homo sapien
tcgtcactcgctatgacctcgctgg

SEQ ID NO: 1021951 - DNA, 25 bp, Homo sapien
tcctcgtcactcgctatgacctcgc

SEQ ID NO: 1021952 - DNA, 25 bp, Homo sapien
tcgctatgacctcgctggccatgtg

SEQ ID NO: 1021953 - DNA, 25 bp, Homo sapien
agggccggcactggtccagggtacg

SEQ ID NO: 1021954 - DNA, 25 bp, Homo sapien
ctgagcctgtcctcggcttctccac

SEQ ID NO: 1021955 - DNA, 25 bp, Homo sapien
ccggcactggtccagggtacgtgca

SEQ ID NO: 1021956 - DNA, 25 bp, Homo sapien
agtgaagaggacagcgccttctcgg

SEQ ID NO: 1021957 - DNA, 25 bp, Homo sapien
agatgtgtgcatagtgggcctggag

SEQ ID NO: 1021958 - DNA, 25 bp, Homo sapien
ggggaagatgtgtgcatagtgggcc

SEQ ID NO: 1021959 - DNA, 25 bp, Homo sapien
gtgtgcatagtgggcctggagggcg

SEQ ID NO: 1021960 - DNA, 25 bp, Homo sapien
gaagatgtgtgcatagtgggcctgg

SEQ ID NO: 1021961 - DNA, 25 bp, Homo sapien
gcacaatgaaaaatatcgcccacga

SEQ ID NO: 1021962 - DNA, 25 bp, Homo sapien
aatgaaaaatatcgcccacgatcaa

SEQ ID NO: 1021963 - DNA, 25 bp, Homo sapien
aacaggtttaatgacggtcatggca

SEQ ID NO: 1021964 - DNA, 25 bp, Homo sapien
tttaatgacggtcatggcaactttt

SEQ ID NO: 1021965 - DNA, 25 bp, Homo sapien
ggtgcaaaacttcctcgagtcagcc

SEQ ID NO: 1021966 - DNA, 25 bp, Homo sapien
gcaaaacttcctcgagtcagcctct

SEQ ID NO: 1021967 - DNA, 25 bp, Homo sapien
caggtgcaaaacttcctcgagtcag

SEQ ID NO: 1021968 - DNA, 25 bp, Homo sapien
tgcaaaacttcctcgagtcagcctc

SEQ ID NO: 1021969 - DNA, 25 bp, Homo sapien
gtctacaaacgcaggcgggagctga

SEQ ID NO: 1021970 - DNA, 25 bp, Homo sapien
tcggggtctacaaacgcaggcggga

SEQ ID NO: 1021971 - DNA, 25 bp, Homo sapien
aaaagagcttgtttgctgggaggtg

SEQ ID NO: 1021972 - DNA, 25 bp, Homo sapien
agagcttgtttgctgggaggtggga

SEQ ID NO: 1021973 - DNA, 25 bp, Homo sapien
tgtcatgtcacgacatactgccgct

SEQ ID NO: 1021974 - DNA, 25 bp, Homo sapien
gtatgtcatgtcacgacatactgcc

SEQ ID NO: 1021975 - DNA, 25 bp, Homo sapien
tcatgtcacgacatactgccgctgc

SEQ ID NO: 1021976 - DNA, 25 bp, Homo sapien
gtcacgacatactgccgctgcacga

SEQ ID NO: 1021977 - DNA, 25 bp, Homo sapien
gtatgtcatgtcacgacatactgcc

SEQ ID NO: 1021978 - DNA, 25 bp, Homo sapien
tcatgtcacgacatactgccgctgc

SEQ ID NO: 1021979 - DNA, 25 bp, Homo sapien
gtcacgacatactgccgctgcacga

SEQ ID NO: 1021980 - DNA, 25 bp, Homo sapien
tgtcatgtcacgacatactgccgct

SEQ ID NO: 1021981 - DNA, 25 bp, Homo sapien
gtatgtcatgtcacgacatactgcc

SEQ ID NO: 1021982 - DNA, 25 bp, Homo sapien
tcatgtcacgacatactgccgctgc

SEQ ID NO: 1021983 - DNA, 25 bp, Homo sapien
gtcacgacatactgccgctgcacga

SEQ ID NO: 1021984 - DNA, 25 bp, Homo sapien
tgtcatgtcacgacatactgccgct

SEQ ID NO: 1021985 - DNA, 25 bp, Homo sapien
tgtgacgaaatgccagctgaggcac

SEQ ID NO: 1021986 - DNA, 25 bp, Homo sapien
ggttgctgcccttgaccactgtgaa

SEQ ID NO: 1021987 - DNA, 25 bp, Homo sapien
gaagggtcgttttggatgcacttga

SEQ ID NO: 1021988 - DNA, 25 bp, Homo sapien
accactgtgaagactggtgtgggaa

SEQ ID NO: 1021989 - DNA, 25 bp, Homo sapien
tagagttccaactactagggaagct

SEQ ID NO: 1021990 - DNA, 25 bp, Homo sapien
ctgagatgagaggataccttgagct

SEQ ID NO: 1021991 - DNA, 25 bp, Homo sapien
taataactggtgtggtgttgtgcac

SEQ ID NO: 1021992 - DNA, 25 bp, Homo sapien
tggtgttgtgcacctagagttccaa

SEQ ID NO: 1021993 - DNA, 25 bp, Homo sapien
acatctggctagtttcttttatttt

SEQ ID NO: 1021994 - DNA, 25 bp, Homo sapien
accacatctggctagtttcttttat

SEQ ID NO: 1021995 - DNA, 25 bp, Homo sapien
aggctggccacaaattcctggtctc

SEQ ID NO: 1021996 - DNA, 25 bp, Homo sapien
atagatggggtcttgttgtgttggc

SEQ ID NO: 1021997 - DNA, 25 bp, Homo sapien
gcatcgtgacactcagtgaattttg

SEQ ID NO: 1021998 - DNA, 25 bp, Homo sapien
tcgtgacactcagtgaattttgttt

SEQ ID NO: 1021999 - DNA, 25 bp, Homo sapien
caggtaagcatcgtgacactcagtg

SEQ ID NO: 1022000 - DNA, 25 bp, Homo sapien
taagcatcgtgacactcagtgaatt

SEQ ID NO: 1022001 - DNA, 25 bp, Homo sapien
caggtgtatgccacccaggtcttgc

SEQ ID NO: 1022002 - DNA, 25 bp, Homo sapien
ggaaggatccaaattctccttagct

SEQ ID NO: 1022003 - DNA, 25 bp, Homo sapien
taccctgcctactgagaaccaaagg

SEQ ID NO: 1022004 - DNA, 25 bp, Homo sapien
tcatcctaccaagtagtagggacca

SEQ ID NO: 1022005 - DNA, 25 bp, Homo sapien
ggttggcgcgcagcgcctgctagcg

SEQ ID NO: 1022006 - DNA, 25 bp, Homo sapien
gcgatcggttgcaccttctgcgaca

SEQ ID NO: 1022007 - DNA, 25 bp, Homo sapien
gcgcgacagtgcgatcggttgcacc

SEQ ID NO: 1022008 - DNA, 25 bp, Homo sapien
agtgcgatcggttgcaccttctgcg

SEQ ID NO: 1022009 - DNA, 25 bp, Homo sapien
tgcagctggcgctggccattgagga

SEQ ID NO: 1022010 - DNA, 25 bp, Homo sapien
tcagatgaggcgagtgggcggccgg

SEQ ID NO: 1022011 - DNA, 25 bp, Homo sapien
cagatgaggcgagtgggcggccggg

SEQ ID NO: 1022012 - DNA, 25 bp, Homo sapien
agctggcgctggccattgaggagct

SEQ ID NO: 1022013 - DNA, 25 bp, Homo sapien
aggaccgtcagaggtcaagctcagg

SEQ ID NO: 1022014 - DNA, 25 bp, Homo sapien
gcccagccgactgcttatattttta

SEQ ID NO: 1022015 - DNA, 25 bp, Homo sapien
caaagacttaatgctattacaaagg

SEQ ID NO: 1022016 - DNA, 25 bp, Homo sapien
ggtttcagtgaaaccatgctggcca

SEQ ID NO: 1022017 - DNA, 25 bp, Homo sapien
agttacaacacgtgctttgtgtgta

SEQ ID NO: 1022018 - DNA, 25 bp, Homo sapien
tattccagcttatcatcaattaaaa

SEQ ID NO: 1022019 - DNA, 25 bp, Homo sapien
aatgaaagttacaacacgtgctttg

SEQ ID NO: 1022020 - DNA, 25 bp, Homo sapien
taatattattccagcttatcatcaa

SEQ ID NO: 1022021 - DNA, 25 bp, Homo sapien
tgctgttaaacctatctggtaatat

SEQ ID NO: 1022022 - DNA, 25 bp, Homo sapien
ttaccaactttatggaatttgctgt

SEQ ID NO: 1022023 - DNA, 25 bp, Homo sapien
ctgttaaacctatctggtaatatct

SEQ ID NO: 1022024 - DNA, 25 bp, Homo sapien
accaactttatggaatttgctgtta

SEQ ID NO: 1022025 - DNA, 25 bp, Homo sapien
tctgtgctctagctttgaaattacc

SEQ ID NO: 1022026 - DNA, 25 bp, Homo sapien
tgttgaggtgttgcagctcccaggc

SEQ ID NO: 1022027 - DNA, 25 bp, Homo sapien
ccaagttctaggtagcaggtgtgct

SEQ ID NO: 1022028 - DNA, 25 bp, Homo sapien
tcccaggccctttccgtgaacagag

SEQ ID NO: 1022029 - DNA, 25 bp, Homo sapien
tattaatatgatgtcatgaattcct

SEQ ID NO: 1022030 - DNA, 25 bp, Homo sapien
tgtcatgaattcctttcttcactgg

SEQ ID NO: 1022031 - DNA, 25 bp, Homo sapien
gtcatgaattcctttcttcactggg

SEQ ID NO: 1022032 - DNA, 25 bp, Homo sapien
ttatattaatatgatgtcatgaatt

SEQ ID NO: 1022033 - DNA, 25 bp, Homo sapien
caatgaatcttcagaccccactcaa

SEQ ID NO: 1022034 - DNA, 25 bp, Homo sapien
tattacctgttgactagaacattct

SEQ ID NO: 1022035 - DNA, 25 bp, Homo sapien
tgagcttactactaccaatgaatct

SEQ ID NO: 1022036 - DNA, 25 bp, Homo sapien
taagcatttagatttcatgcctctt

SEQ ID NO: 1022037 - DNA, 25 bp, Homo sapien
agttttattgtgatatatctaggta

SEQ ID NO: 1022038 - DNA, 25 bp, Homo sapien
tattgtgatatatctaggtatgatt

SEQ ID NO: 1022039 - DNA, 25 bp, Homo sapien
tagaaactctgaggtcaagttttat

SEQ ID NO: 1022040 - DNA, 25 bp, Homo sapien
actctgaggtcaagttttattgtga

SEQ ID NO: 1022041 - DNA, 25 bp, Homo sapien
tctgaaaaaggagtcagtgaaggga

SEQ ID NO: 1022042 - DNA, 25 bp, Homo sapien
ctgagtctgaaaaaggagtcagtga

SEQ ID NO: 1022043 - DNA, 25 bp, Homo sapien
gggtgggtagtggacaattacagtc

SEQ ID NO: 1022044 - DNA, 25 bp, Homo sapien
gagtctgaaaaaggagtcagtgaag

SEQ ID NO: 1022045 - DNA, 25 bp, Homo sapien
ccttaggtacgccagtggtcacgtg

SEQ ID NO: 1022046 - DNA, 25 bp, Homo sapien
caaagtggagtgtgtcccaactgca

SEQ ID NO: 1022047 - DNA, 25 bp, Homo sapien
cctgtgtgcagatcaatgtaccttg

SEQ ID NO: 1022048 - DNA, 25 bp, Homo sapien
tcttgttggaggcataaaatggccc

SEQ ID NO: 1022049 - DNA, 25 bp, Homo sapien
ggcaccctcacaggtctgtgcatct

SEQ ID NO: 1022050 - DNA, 25 bp, Homo sapien
tgctgccttccaagcagggccttgc

SEQ ID NO: 1022051 - DNA, 25 bp, Homo sapien
cttgcttggcttatctgtgctcctg

SEQ ID NO: 1022052 - DNA, 25 bp, Homo sapien
tgcattgttgcatggctgtcccggc

SEQ ID NO: 1022053 - DNA, 25 bp, Homo sapien
gcagatttgactcagccttgtggaa

SEQ ID NO: 1022054 - DNA, 25 bp, Homo sapien
ccagcagggtgttctcgataggtac

SEQ ID NO: 1022055 - DNA, 25 bp, Homo sapien
ctttagatatttacacactggccag

SEQ ID NO: 1022056 - DNA, 25 bp, Homo sapien
tgcaggctggacttccccggtgttt

SEQ ID NO: 1022057 - DNA, 25 bp, Homo sapien
ctgctgcttgtccatgctggctggt

SEQ ID NO: 1022058 - DNA, 25 bp, Homo sapien
atgctgtggttctaggtccagacat

SEQ ID NO: 1022059 - DNA, 25 bp, Homo sapien
gctgtggttctaggtccagacatgc

SEQ ID NO: 1022060 - DNA, 25 bp, Homo sapien
tgctgtggttctaggtccagacatg

SEQ ID NO: 1022061 - DNA, 25 bp, Homo sapien
tccctggaatcttaggaaccaggac

SEQ ID NO: 1022062 - DNA, 25 bp, Homo sapien
ggaaccaggacctaacaaggctgag

SEQ ID NO: 1022063 - DNA, 25 bp, Homo sapien
accagaactaggactgggtgctggt

SEQ ID NO: 1022064 - DNA, 25 bp, Homo sapien
ggtgtccctgcaccacgtcatgtct

SEQ ID NO: 1022065 - DNA, 25 bp, Homo sapien
tatttaaaccaagcatggactcctg

SEQ ID NO: 1022066 - DNA, 25 bp, Homo sapien
tgtggttcctgcctacctgtacata

SEQ ID NO: 1022067 - DNA, 25 bp, Homo sapien
tacatatctgagtcaacagcagggc

SEQ ID NO: 1022068 - DNA, 25 bp, Homo sapien
catgaacccctgatgctgatgggaa

SEQ ID NO: 1022069 - DNA, 25 bp, Homo sapien
atgtatagtaggcttccttacctca

SEQ ID NO: 1022070 - DNA, 25 bp, Homo sapien
gtatagtaggcttccttacctcagg

SEQ ID NO: 1022071 - DNA, 25 bp, Homo sapien
tatagtaggcttccttacctcaggg

SEQ ID NO: 1022072 - DNA, 25 bp, Homo sapien
atagtaggcttccttacctcagggg

SEQ ID NO: 1022073 - DNA, 25 bp, Homo sapien
agaggtgtcctgacttgagtttcga

SEQ ID NO: 1022074 - DNA, 25 bp, Homo sapien
agctcaatcttgagcagtgaggcca

SEQ ID NO: 1022075 - DNA, 25 bp, Homo sapien
taacagcccagtatccagcattgcc

SEQ ID NO: 1022076 - DNA, 25 bp, Homo sapien
tttttgcagcccaacgtttcagtgg

SEQ ID NO: 1022077 - DNA, 25 bp, Homo sapien
cacaattgctgcgtgtgctcatggc

SEQ ID NO: 1022078 - DNA, 25 bp, Homo sapien
attgctgcgtgtgctcatggcttgg

SEQ ID NO: 1022079 - DNA, 25 bp, Homo sapien
tgccacaattgctgcgtgtgctcat

SEQ ID NO: 1022080 - DNA, 25 bp, Homo sapien
ccaaccacagcggaccaagggcagg

SEQ ID NO: 1022081 - DNA, 25 bp, Homo sapien
gagtatcatcagagaccaagcttgg

SEQ ID NO: 1022082 - DNA, 25 bp, Homo sapien
gcttctcggagctggaaagaatcca

SEQ ID NO: 1022083 - DNA, 25 bp, Homo sapien
cgtccatagatgagagctggccgag

SEQ ID NO: 1022084 - DNA, 25 bp, Homo sapien
taaaacctgcggaactcactccatg

SEQ ID NO: 1022085 - DNA, 25 bp, Homo sapien
cagattatgatccagaggccaagcc

SEQ ID NO: 1022086 - DNA, 25 bp, Homo sapien
tgtggtctacggctgcccctggaca

SEQ ID NO: 1022087 - DNA, 25 bp, Homo sapien
tttgtgtataaagttctcatggaac

SEQ ID NO: 1022088 - DNA, 25 bp, Homo sapien
agctgattcccgcacagacctcggg

SEQ ID NO: 1022089 - DNA, 25 bp, Homo sapien
taagagtgacttgccgacctgaaca

SEQ ID NO: 1022090 - DNA, 25 bp, Homo sapien
aagactggccggtatgcaactccca

SEQ ID NO: 1022091 - DNA, 25 bp, Homo sapien
aataacgttgcctttcagcggtggt

SEQ ID NO: 1022092 - DNA, 25 bp, Homo sapien
ttgtaggtcacgcagtccagggatg

SEQ ID NO: 1022093 - DNA, 25 bp, Homo sapien
aagatgcagcccacaaactgtatag

SEQ ID NO: 1022094 - DNA, 25 bp, Homo sapien
cgtttagggacaatgcactgtcaga

SEQ ID NO: 1022095 - DNA, 25 bp, Homo sapien
tgtgttctgcccaactgtataatgc

SEQ ID NO: 1022096 - DNA, 25 bp, Homo sapien
gaccatgattagagaaactgtgcat

SEQ ID NO: 1022097 - DNA, 25 bp, Homo sapien
tttcaaccggcggagacactggcag

SEQ ID NO: 1022098 - DNA, 25 bp, Homo sapien
agaacccgacgcagacacgcgcttt

SEQ ID NO: 1022099 - DNA, 25 bp, Homo sapien
gaacgcactccaacagaacccgacg

SEQ ID NO: 1022100 - DNA, 25 bp, Homo sapien
actggcagggccagaaacgcgcgca

SEQ ID NO: 1022101 - DNA, 25 bp, Homo sapien
agatcatgccattgtgacaggagag

SEQ ID NO: 1022102 - DNA, 25 bp, Homo sapien
tcatgccattgtgacaggagagaaa

SEQ ID NO: 1022103 - DNA, 25 bp, Homo sapien
gagatcatgccattgtgacaggaga

SEQ ID NO: 1022104 - DNA, 25 bp, Homo sapien
gatcatgccattgtgacaggagaga

SEQ ID NO: 1022105 - DNA, 25 bp, Homo sapien
cgcttctacatagattcatcgtgtt

SEQ ID NO: 1022106 - DNA, 25 bp, Homo sapien
catagattcatcgtgtttatttatg

SEQ ID NO: 1022107 - DNA, 25 bp, Homo sapien
gcttctacatagattcatcgtgttt

SEQ ID NO: 1022108 - DNA, 25 bp, Homo sapien
catcgtgtttatttatgacttcttc

SEQ ID NO: 1022109 - DNA, 25 bp, Homo sapien
catgtctgacagatggccttgctgg

SEQ ID NO: 1022110 - DNA, 25 bp, Homo sapien
gttcagctagcaagaaattctctcc

SEQ ID NO: 1022111 - DNA, 25 bp, Homo sapien
tggcctccatccttttacagacaga

SEQ ID NO: 1022112 - DNA, 25 bp, Homo sapien
tcaagtgttaatcctactgggttcc

SEQ ID NO: 1022113 - DNA, 25 bp, Homo sapien
atttctgtatgttatgcgtccaata

SEQ ID NO: 1022114 - DNA, 25 bp, Homo sapien
aattccatacttattgtcctatgca

SEQ ID NO: 1022115 - DNA, 25 bp, Homo sapien
tacttattgtcctatgcagttgctt

SEQ ID NO: 1022116 - DNA, 25 bp, Homo sapien
tgcgtccaataatacaattccatac

SEQ ID NO: 1022117 - DNA, 25 bp, Homo sapien
gcttttcacaaacgcgtgtcactgg

SEQ ID NO: 1022118 - DNA, 25 bp, Homo sapien
tgtaccgaggtttaaccctgtggca

SEQ ID NO: 1022119 - DNA, 25 bp, Homo sapien
agcagggtctcgcttctgtaccgag

SEQ ID NO: 1022120 - DNA, 25 bp, Homo sapien
gactgtgattcttgaggccatgacc

SEQ ID NO: 1022121 - DNA, 25 bp, Homo sapien
taatgtgagtacaggaggcccaagg

SEQ ID NO: 1022122 - DNA, 25 bp, Homo sapien
tgtcaccgagggtcttaccacaatg

SEQ ID NO: 1022123 - DNA, 25 bp, Homo sapien
gacaagagggccacccatggttgct

SEQ ID NO: 1022124 - DNA, 25 bp, Homo sapien
gaagcatttcttgtcccgagagaca

SEQ ID NO: 1022125 - DNA, 25 bp, Homo sapien
tggtgacagcacacagtcagcaaag

SEQ ID NO: 1022126 - DNA, 25 bp, Homo sapien
tccagaggatgacgtgcagcttccc

SEQ ID NO: 1022127 - DNA, 25 bp, Homo sapien
agggaaactctaatccgtcaaccag

SEQ ID NO: 1022128 - DNA, 25 bp, Homo sapien
taattgcacagcatcccacagtgag

SEQ ID NO: 1022129 - DNA, 25 bp, Homo sapien
aggcagagctgatttgatcacgagc

SEQ ID NO: 1022130 - DNA, 25 bp, Homo sapien
ctcagtgaaactgcctccatggtgg

SEQ ID NO: 1022131 - DNA, 25 bp, Homo sapien
tgtgttcaaatgctggaacattctt

SEQ ID NO: 1022132 - DNA, 25 bp, Homo sapien
taaatggtgccatgagcacggcctc

SEQ ID NO: 1022133 - DNA, 25 bp, Homo sapien
cattttagatcccaggttagcttgc

SEQ ID NO: 1022134 - DNA, 25 bp, Homo sapien
caggcctgcaaagggaccaacatct

SEQ ID NO: 1022135 - DNA, 25 bp, Homo sapien
tggttagcaatcatcacacacagca

SEQ ID NO: 1022136 - DNA, 25 bp, Homo sapien
taaaggccctgtctacaaatctagt

SEQ ID NO: 1022137 - DNA, 25 bp, Homo sapien
gaaccaaggtaacgaactgactgct

SEQ ID NO: 1022138 - DNA, 25 bp, Homo sapien
gcaggcactcaacggtaggatttta

SEQ ID NO: 1022139 - DNA, 25 bp, Homo sapien
tgcaagcatcgtctgagaaccaagg

SEQ ID NO: 1022140 - DNA, 25 bp, Homo sapien
gaatcgcatggcgttgttgcaagca

SEQ ID NO: 1022141 - DNA, 25 bp, Homo sapien
ggtcttcagagagcagaccttttca

SEQ ID NO: 1022142 - DNA, 25 bp, Homo sapien
tttcatattcgaggatatttcatcc

SEQ ID NO: 1022143 - DNA, 25 bp, Homo sapien
tcatccttcagggatacttctctta

SEQ ID NO: 1022144 - DNA, 25 bp, Homo sapien
gcagcaaaaagcagactgagacagt

SEQ ID NO: 1022145 - DNA, 25 bp, Homo sapien
tgtccccaaagttcaggtgttagaa

SEQ ID NO: 1022146 - DNA, 25 bp, Homo sapien
aatttaaccccagtgcaaccatgct

SEQ ID NO: 1022147 - DNA, 25 bp, Homo sapien
tgagtttgggcagcctgaccagctg

SEQ ID NO: 1022148 - DNA, 25 bp, Homo sapien
caaccatgctgagcgggagccttaa

SEQ ID NO: 1022149 - DNA, 25 bp, Homo sapien
tgggacttgcccttaggccgagaag

SEQ ID NO: 1022150 - DNA, 25 bp, Homo sapien
gagaaggcctagatgcgtccgtcat

SEQ ID NO: 1022151 - DNA, 25 bp, Homo sapien
gcacaaaccaccgagtcaggatcct

SEQ ID NO: 1022152 - DNA, 25 bp, Homo sapien
tcgcttgccgagaaaacactgccaa

SEQ ID NO: 1022153 - DNA, 25 bp, Homo sapien
ggtcattactcatcttgcgcagcca

SEQ ID NO: 1022154 - DNA, 25 bp, Homo sapien
taaaaactatgatcccagacgcaca

SEQ ID NO: 1022155 - DNA, 25 bp, Homo sapien
tcctcaaccgtgaagtggcgacgtg

SEQ ID NO: 1022156 - DNA, 25 bp, Homo sapien
tcattttatggcaggacactggcag

SEQ ID NO: 1022157 - DNA, 25 bp, Homo sapien
tcctgggtcgtccaagagcaataat

SEQ ID NO: 1022158 - DNA, 25 bp, Homo sapien
gagcgcgattctccaacacactggg

SEQ ID NO: 1022159 - DNA, 25 bp, Homo sapien
tactggctggcctatgtcctgggtc

SEQ ID NO: 1022160 - DNA, 25 bp, Homo sapien
gacaggtcaagtcacctccagagtg

SEQ ID NO: 1022161 - DNA, 25 bp, Homo sapien
gataatcactgacctgagcccgttc

SEQ ID NO: 1022162 - DNA, 25 bp, Homo sapien
agtcacggaagccaactgggaacca

SEQ ID NO: 1022163 - DNA, 25 bp, Homo sapien
tgggaaccaacgagggcaacagtta

SEQ ID NO: 1022164 - DNA, 25 bp, Homo sapien
cacagggcgttgataaggcactagc

SEQ ID NO: 1022165 - DNA, 25 bp, Homo sapien
aatccagtccttaaacaggatcata

SEQ ID NO: 1022166 - DNA, 25 bp, Homo sapien
cttgtgacttttaacctctaagtag

SEQ ID NO: 1022167 - DNA, 25 bp, Homo sapien
gcctcatccatacacccttgtgact

SEQ ID NO: 1022168 - DNA, 25 bp, Homo sapien
gtagttatcctaaatccagtcctta

SEQ ID NO: 1022169 - DNA, 25 bp, Homo sapien
catgttgatcagaagccttgacagc

SEQ ID NO: 1022170 - DNA, 25 bp, Homo sapien
ctcatgttgatcagaagccttgaca

SEQ ID NO: 1022171 - DNA, 25 bp, Homo sapien
ttgatcagaagccttgacagcaagc

SEQ ID NO: 1022172 - DNA, 25 bp, Homo sapien
gatcagaagccttgacagcaagcct

SEQ ID NO: 1022173 - DNA, 25 bp, Homo sapien
tcatcagtttaccacacggcggtca

SEQ ID NO: 1022174 - DNA, 25 bp, Homo sapien
ggttcatcagtttaccacacggcgg

SEQ ID NO: 1022175 - DNA, 25 bp, Homo sapien
ttcatcagtttaccacacggcggtc

SEQ ID NO: 1022176 - DNA, 25 bp, Homo sapien
catcagtttaccacacggcggtcat

SEQ ID NO: 1022177 - DNA, 25 bp, Homo sapien
catcagtttaccacacggcggtcat

SEQ ID NO: 1022178 - DNA, 25 bp, Homo sapien
tcatcagtttaccacacggcggtca

SEQ ID NO: 1022179 - DNA, 25 bp, Homo sapien
ggttcatcagtttaccacacggcgg

SEQ ID NO: 1022180 - DNA, 25 bp, Homo sapien
ttcatcagtttaccacacggcggtc

SEQ ID NO: 1022181 - DNA, 25 bp, Homo sapien
taggagcttacagaggactagagga

SEQ ID NO: 1022182 - DNA, 25 bp, Homo sapien
tgctgtgacgactggcaatgtcctc

SEQ ID NO: 1022183 - DNA, 25 bp, Homo sapien
tcgcacctctaagaaatctgctggc

SEQ ID NO: 1022184 - DNA, 25 bp, Homo sapien
tagagaggagctattgcagctgctg

SEQ ID NO: 1022185 - DNA, 25 bp, Homo sapien
tctcagtaagatggcttggctcaca

SEQ ID NO: 1022186 - DNA, 25 bp, Homo sapien
aaatatgactcagaagacctcggtg

SEQ ID NO: 1022187 - DNA, 25 bp, Homo sapien
tggaatcgcttggtacgctgtggaa

SEQ ID NO: 1022188 - DNA, 25 bp, Homo sapien
tgatttgcctacctaatgtcggaga

SEQ ID NO: 1022189 - DNA, 25 bp, Homo sapien
ggctcagagcctacacttgctgggt

SEQ ID NO: 1022190 - DNA, 25 bp, Homo sapien
ggatgtcacccggaattgcccaatt

SEQ ID NO: 1022191 - DNA, 25 bp, Homo sapien
tgacaacaccgcaaccaaggaagag

SEQ ID NO: 1022192 - DNA, 25 bp, Homo sapien
gaattgcccaattctggccctgaca

SEQ ID NO: 1022193 - DNA, 25 bp, Homo sapien
gctgcccagcgtgatggctgtgtcc

SEQ ID NO: 1022194 - DNA, 25 bp, Homo sapien
ccagcccagctgacggattggccat

SEQ ID NO: 1022195 - DNA, 25 bp, Homo sapien
tgtccagcccagctgacggattggc

SEQ ID NO: 1022196 - DNA, 25 bp, Homo sapien
agctgcccagcgtgatggctgtgtc

SEQ ID NO: 1022197 - DNA, 25 bp, Homo sapien
caagaacacgggttgtccagtgggt

SEQ ID NO: 1022198 - DNA, 25 bp, Homo sapien
cgttaagaaaatccccagcaggtgg

SEQ ID NO: 1022199 - DNA, 25 bp, Homo sapien
gacaaggcgtctgtggcccatagta

SEQ ID NO: 1022200 - DNA, 25 bp, Homo sapien
gggaccctgcatccctgaggtggct

SEQ ID NO: 1022201 - DNA, 25 bp, Homo sapien
tggaacagactggaacccaatggaa

SEQ ID NO: 1022202 - DNA, 25 bp, Homo sapien
tgtgctgaagaaggtccaatccgag

SEQ ID NO: 1022203 - DNA, 25 bp, Homo sapien
cagaggcgtcctcgaagagaaggcc

SEQ ID NO: 1022204 - DNA, 25 bp, Homo sapien
ttagaggctcaagggcatgactgga

SEQ ID NO: 1022205 - DNA, 25 bp, Homo sapien
agctgctacgtctctcacctaggag

SEQ ID NO: 1022206 - DNA, 25 bp, Homo sapien
cgggcactcagcgtttcagcaagct

SEQ ID NO: 1022207 - DNA, 25 bp, Homo sapien
gctgctatgagaacgggctgtgcca

SEQ ID NO: 1022208 - DNA, 25 bp, Homo sapien
gacttggtcgttaacatccctctga

SEQ ID NO: 1022209 - DNA, 25 bp, Homo sapien
aaggaaatttattgcacaagaatgg

SEQ ID NO: 1022210 - DNA, 25 bp, Homo sapien
agaaattatcaagttaactgatgtg

SEQ ID NO: 1022211 - DNA, 25 bp, Homo sapien
gaaattatcaagttaactgatgtgt

SEQ ID NO: 1022212 - DNA, 25 bp, Homo sapien
tttattgcacaagaatgggaagaaa

SEQ ID NO: 1022213 - DNA, 25 bp, Homo sapien
tgatccccgggggtcctgcccactc

SEQ ID NO: 1022214 - DNA, 25 bp, Homo sapien
tcctgatccccgggggtcctgccca

SEQ ID NO: 1022215 - DNA, 25 bp, Homo sapien
gctgttgcaagttccggataccaat

SEQ ID NO: 1022216 - DNA, 25 bp, Homo sapien
tgagagcttcggtggaaaccaggcc

SEQ ID NO: 1022217 - DNA, 25 bp, Homo sapien
gaatatctcacatgatcacctgaag

SEQ ID NO: 1022218 - DNA, 25 bp, Homo sapien
ggtttggcagaagcacccgatgcct

SEQ ID NO: 1022219 - DNA, 25 bp, Homo sapien
cttggagagtacaaaacaggcgcga

SEQ ID NO: 1022220 - DNA, 25 bp, Homo sapien
gatgtctaaagtccattgtgccgct

SEQ ID NO: 1022221 - DNA, 25 bp, Homo sapien
gccagcgagtagagaagtccggctt

SEQ ID NO: 1022222 - DNA, 25 bp, Homo sapien
cagggaactgtctaaggccacgacc

SEQ ID NO: 1022223 - DNA, 25 bp, Homo sapien
tatcatcatctctatctaccatcta

SEQ ID NO: 1022224 - DNA, 25 bp, Homo sapien
tctacctatacataaatcacctatg

SEQ ID NO: 1022225 - DNA, 25 bp, Homo sapien
tcaatcacctatatactatcaacct

SEQ ID NO: 1022226 - DNA, 25 bp, Homo sapien
tatcacatctatctactatctagct

SEQ ID NO: 1022227 - DNA, 25 bp, Homo sapien
catgagaggccgtcctcttggggtt

SEQ ID NO: 1022228 - DNA, 25 bp, Homo sapien
gataggggtcagatgggtgacagcc

SEQ ID NO: 1022229 - DNA, 25 bp, Homo sapien
gccacatgagaggccgtcctcttgg

SEQ ID NO: 1022230 - DNA, 25 bp, Homo sapien
ctctgggatgggcttgaaagatgtc

SEQ ID NO: 1022231 - DNA, 25 bp, Homo sapien
tgcatacggtcgtgacaagcccggt

SEQ ID NO: 1022232 - DNA, 25 bp, Homo sapien
ctaaactcttctgcgtggcagctgg

SEQ ID NO: 1022233 - DNA, 25 bp, Homo sapien
cctgaggagctcatgaaagcggtgt

SEQ ID NO: 1022234 - DNA, 25 bp, Homo sapien
gaatgcttgggtgttaccctgcccc

SEQ ID NO: 1022235 - DNA, 25 bp, Homo sapien
gggcctctggttgacagactgcaga

SEQ ID NO: 1022236 - DNA, 25 bp, Homo sapien
cctccacgtaaactctctagaaggg

SEQ ID NO: 1022237 - DNA, 25 bp, Homo sapien
gcagcgatgcccgtggtagcctcca

SEQ ID NO: 1022238 - DNA, 25 bp, Homo sapien
ctttgccttcacttgtgtaggttcg

SEQ ID NO: 1022239 - DNA, 25 bp, Homo sapien
tctgaaatccttttatgcctggcct

SEQ ID NO: 1022240 - DNA, 25 bp, Homo sapien
ctaatatagctgtgacccagatgct

SEQ ID NO: 1022241 - DNA, 25 bp, Homo sapien
acatgtctgaaacttggtatctggg

SEQ ID NO: 1022242 - DNA, 25 bp, Homo sapien
cacttccttatggaccgaaattctg

SEQ ID NO: 1022243 - DNA, 25 bp, Homo sapien
gttgcgggccgtggagccgcggccc

SEQ ID NO: 1022244 - DNA, 25 bp, Homo sapien
ctgttgcgggccgtggagccgcggc

SEQ ID NO: 1022245 - DNA, 25 bp, Homo sapien
tgctgttgcgggccgtggagccgcg

SEQ ID NO: 1022246 - DNA, 25 bp, Homo sapien
tgttgcgggccgtggagccgcggcc

SEQ ID NO: 1022247 - DNA, 25 bp, Homo sapien
actccatcagctcggtgccttctgt

SEQ ID NO: 1022248 - DNA, 25 bp, Homo sapien
tcagctcggtgccttctgtgtagtg

SEQ ID NO: 1022249 - DNA, 25 bp, Homo sapien
catcagctcggtgccttctgtgtag

SEQ ID NO: 1022250 - DNA, 25 bp, Homo sapien
gctcggtgccttctgtgtagtgtcc

SEQ ID NO: 1022251 - DNA, 25 bp, Homo sapien
ctaggccacctcctcctcagcatac

SEQ ID NO: 1022252 - DNA, 25 bp, Homo sapien
tctttctagaatggaggcctcaccg

SEQ ID NO: 1022253 - DNA, 25 bp, Homo sapien
ttctagaatggaggcctcaccgcag

SEQ ID NO: 1022254 - DNA, 25 bp, Homo sapien
tcaccgcagtctctgttaaaggcct

SEQ ID NO: 1022255 - DNA, 25 bp, Homo sapien
cgcagtctctgttaaaggcctccat

SEQ ID NO: 1022256 - DNA, 25 bp, Homo sapien
ctggataggaacagcttctccgcct

SEQ ID NO: 1022257 - DNA, 25 bp, Homo sapien
ctgacggacagcgtgaagccccccg

SEQ ID NO: 1022258 - DNA, 25 bp, Homo sapien
ggacagcgtgaagccccccgggctg

SEQ ID NO: 1022259 - DNA, 25 bp, Homo sapien
tggataggaacagcttctccgcctc

SEQ ID NO: 1022260 - DNA, 25 bp, Homo sapien
ccaagtcctcgtgtccaggaagctg

SEQ ID NO: 1022261 - DNA, 25 bp, Homo sapien
agctgcccaccggtcctccaggagg

SEQ ID NO: 1022262 - DNA, 25 bp, Homo sapien
atcggccccccgcaccaagtcctcg

SEQ ID NO: 1022263 - DNA, 25 bp, Homo sapien
aggaagctgcccaccggtcctccag

SEQ ID NO: 1022264 - DNA, 25 bp, Homo sapien
gagcccctgactcaatgagccctcc

SEQ ID NO: 1022265 - DNA, 25 bp, Homo sapien
ctgcctgtccccagggccctcacag

SEQ ID NO: 1022266 - DNA, 25 bp, Homo sapien
ctgtccccagggccctcacagggga

SEQ ID NO: 1022267 - DNA, 25 bp, Homo sapien
cagggccctcacaggggaggaaagg

SEQ ID NO: 1022268 - DNA, 25 bp, Homo sapien
tccccagggccctcacaggggagga

SEQ ID NO: 1022269 - DNA, 25 bp, Homo sapien
tggcaacacggtcgcagccacggag

SEQ ID NO: 1022270 - DNA, 25 bp, Homo sapien
ggctctggcaacacggtcgcagcca

SEQ ID NO: 1022271 - DNA, 25 bp, Homo sapien
ccaggctctggcaacacggtcgcag

SEQ ID NO: 1022272 - DNA, 25 bp, Homo sapien
agctcaatgggaaccccgctgcact

SEQ ID NO: 1022273 - DNA, 25 bp, Homo sapien
gctctgactcatgtgcaccaggaag

SEQ ID NO: 1022274 - DNA, 25 bp, Homo sapien
acccttgcgtcagcgctgacagcgg

SEQ ID NO: 1022275 - DNA, 25 bp, Homo sapien
ccccaggatcgctctgactcatgtg

SEQ ID NO: 1022276 - DNA, 25 bp, Homo sapien
tccttgccagacaggcgcccgtggt

SEQ ID NO: 1022277 - DNA, 25 bp, Homo sapien
gccaaggccgcccgcccttcccaga

SEQ ID NO: 1022278 - DNA, 25 bp, Homo sapien
ccgcccttcccagaggccgccccag

SEQ ID NO: 1022279 - DNA, 25 bp, Homo sapien
tggccaaggccgcccgcccttccca

SEQ ID NO: 1022280 - DNA, 25 bp, Homo sapien
cttcccagaggccgccccagctcgc

SEQ ID NO: 1022281 - DNA, 25 bp, Homo sapien
ttctcatccggccgtgggggtggcg

SEQ ID NO: 1022282 - DNA, 25 bp, Homo sapien
ctcatccggccgtgggggtggcggt

SEQ ID NO: 1022283 - DNA, 25 bp, Homo sapien
tcatccggccgtgggggtggcggtg

SEQ ID NO: 1022284 - DNA, 25 bp, Homo sapien
atccggccgtgggggtggcggtgag

SEQ ID NO: 1022285 - DNA, 25 bp, Homo sapien
ctgctacaccgggtctccgagggtg

SEQ ID NO: 1022286 - DNA, 25 bp, Homo sapien
ttgaggtgcacaaccgcccccacct

SEQ ID NO: 1022287 - DNA, 25 bp, Homo sapien
tacaccgggtctccgagggtgtcaa

SEQ ID NO: 1022288 - DNA, 25 bp, Homo sapien
gggctcttcctgctacaccgggtct

SEQ ID NO: 1022289 - DNA, 25 bp, Homo sapien
ctggccttcccgctggcatcagtgg

SEQ ID NO: 1022290 - DNA, 25 bp, Homo sapien
caggctccgagcactgatcctcgtg

SEQ ID NO: 1022291 - DNA, 25 bp, Homo sapien
gcactgatcctcgtggccttgaggg

SEQ ID NO: 1022292 - DNA, 25 bp, Homo sapien
ggcatcagtggccctgctactcctg

SEQ ID NO: 1022293 - DNA, 25 bp, Homo sapien
agaagactgaccctccttatcctgc

SEQ ID NO: 1022294 - DNA, 25 bp, Homo sapien
cacttagaagactgaccctccttat

SEQ ID NO: 1022295 - DNA, 25 bp, Homo sapien
ttagaagactgaccctccttatcct

SEQ ID NO: 1022296 - DNA, 25 bp, Homo sapien
cttagaagactgaccctccttatcc

SEQ ID NO: 1022297 - DNA, 25 bp, Homo sapien
agaagaaaacgctgatgcctgccgc

SEQ ID NO: 1022298 - DNA, 25 bp, Homo sapien
aaaacgctgatgcctgccgccttct

SEQ ID NO: 1022299 - DNA, 25 bp, Homo sapien
agaaaacgctgatgcctgccgcctt

SEQ ID NO: 1022300 - DNA, 25 bp, Homo sapien
gaagaaaacgctgatgcctgccgcc

SEQ ID NO: 1022301 - DNA, 25 bp, Homo sapien
aaattagatacagcgatgatcatga

SEQ ID NO: 1022302 - DNA, 25 bp, Homo sapien
actctgttgcattaataatataacc

SEQ ID NO: 1022303 - DNA, 25 bp, Homo sapien
aagaggggagccttctgtcatgccc

SEQ ID NO: 1022304 - DNA, 25 bp, Homo sapien
gcgatgatcatgaacaattatccat

SEQ ID NO: 1022305 - DNA, 25 bp, Homo sapien
cttccgagggtacaggaaccggcat

SEQ ID NO: 1022306 - DNA, 25 bp, Homo sapien
tacaggaaccggcattcctgctgct

SEQ ID NO: 1022307 - DNA, 25 bp, Homo sapien
agggtacaggaaccggcattcctgc

SEQ ID NO: 1022308 - DNA, 25 bp, Homo sapien
tgcccctccttccgagggtacagga

SEQ ID NO: 1022309 - DNA, 25 bp, Homo sapien
ttgtagtgattcttgggcttgttct

SEQ ID NO: 1022310 - DNA, 25 bp, Homo sapien
caggcccgacgggtgacgccctggc

SEQ ID NO: 1022311 - DNA, 25 bp, Homo sapien
agagatggagggtccagggtatgca

SEQ ID NO: 1022312 - DNA, 25 bp, Homo sapien
ccagggtatgcaagggggagcctca

SEQ ID NO: 1022313 - DNA, 25 bp, Homo sapien
ctcaggtcagcggtggcagatgctc

SEQ ID NO: 1022314 - DNA, 25 bp, Homo sapien
gcggtggcagatgctcggcctgccc

SEQ ID NO: 1022315 - DNA, 25 bp, Homo sapien
ttctccagggcacagctcgtgggcc

SEQ ID NO: 1022316 - DNA, 25 bp, Homo sapien
tcagttctccagggcacagctcgtg

SEQ ID NO: 1022317 - DNA, 25 bp, Homo sapien
agttctccagggcacagctcgtggg

SEQ ID NO: 1022318 - DNA, 25 bp, Homo sapien
gttctccagggcacagctcgtgggc

SEQ ID NO: 1022319 - DNA, 25 bp, Homo sapien
ctgaaagggaatgaggccaactgct

SEQ ID NO: 1022320 - DNA, 25 bp, Homo sapien
tgaaagggaatgaggccaactgctg

SEQ ID NO: 1022321 - DNA, 25 bp, Homo sapien
ggcagggccacaagggatgtccacc

SEQ ID NO: 1022322 - DNA, 25 bp, Homo sapien
cccacgcgggctgtgcaggtgcagg

SEQ ID NO: 1022323 - DNA, 25 bp, Homo sapien
ctgcccctgccatggcccggctcct

SEQ ID NO: 1022324 - DNA, 25 bp, Homo sapien
gtgcacttcagctgcggcggggcgg

SEQ ID NO: 1022325 - DNA, 25 bp, Homo sapien
tcctcggcttccgggacgaggtgaa

SEQ ID NO: 1022326 - DNA, 25 bp, Homo sapien
ttcggctggccggactacggcgtcc

SEQ ID NO: 1022327 - DNA, 25 bp, Homo sapien
ggacgaggtgaaccgggcccagagc

SEQ ID NO: 1022328 - DNA, 25 bp, Homo sapien
cggcgtcctcggcttccgggacgag

SEQ ID NO: 1022329 - DNA, 25 bp, Homo sapien
tggcccagaaagcagccaccgtggc

SEQ ID NO: 1022330 - DNA, 25 bp, Homo sapien
ctggtgcaccgtggcccagaaagca

SEQ ID NO: 1022331 - DNA, 25 bp, Homo sapien
ccatctccctggtggtcatgacgat

SEQ ID NO: 1022332 - DNA, 25 bp, Homo sapien
tccatctccctggtggtcatgacga

SEQ ID NO: 1022333 - DNA, 25 bp, Homo sapien
acgcaggtgtgtacgtgcagccacg

SEQ ID NO: 1022334 - DNA, 25 bp, Homo sapien
ctgcagagacgcaggtgtgtacgtg

SEQ ID NO: 1022335 - DNA, 25 bp, Homo sapien
cagagacgcaggtgtgtacgtgcag

SEQ ID NO: 1022336 - DNA, 25 bp, Homo sapien
ttgggcagccgaagatgcacggggt

SEQ ID NO: 1022337 - DNA, 25 bp, Homo sapien
ttgctggcagcacctcggcaccccg

SEQ ID NO: 1022338 - DNA, 25 bp, Homo sapien
ctggcagcacctcggcaccccgccc

SEQ ID NO: 1022339 - DNA, 25 bp, Homo sapien
gcagcacctcggcaccccgcccctg

SEQ ID NO: 1022340 - DNA, 25 bp, Homo sapien
tgctggcagcacctcggcaccccgc

SEQ ID NO: 1022341 - DNA, 25 bp, Homo sapien
ccgaactcttggctgccgggcagct

SEQ ID NO: 1022342 - DNA, 25 bp, Homo sapien
gcccttgccgaggacgcgcatgtgc

SEQ ID NO: 1022343 - DNA, 25 bp, Homo sapien
gtgcacacggccgaactcttggctg

SEQ ID NO: 1022344 - DNA, 25 bp, Homo sapien
agctcccgcacgcagtagccctggg

SEQ ID NO: 1022345 - DNA, 25 bp, Homo sapien
cggacgccgtagtccggccagccga

SEQ ID NO: 1022346 - DNA, 25 bp, Homo sapien
gcccggacgccgtagtccggccagc

SEQ ID NO: 1022347 - DNA, 25 bp, Homo sapien
tgctgcaccgtacgctgtggctcct

SEQ ID NO: 1022348 - DNA, 25 bp, Homo sapien
ggaagccgaggacgccggcgggatc

SEQ ID NO: 1022349 - DNA, 25 bp, Homo sapien
catgggcccggcccgcggcttgctg

SEQ ID NO: 1022350 - DNA, 25 bp, Homo sapien
ggcccggcccgcggcttgctgctct

SEQ ID NO: 1022351 - DNA, 25 bp, Homo sapien
cccggcccgcggcttgctgctctgg

SEQ ID NO: 1022352 - DNA, 25 bp, Homo sapien
gcttgctgctctgggcccggttcac

SEQ ID NO: 1022353 - DNA, 25 bp, Homo sapien
atggtgcccgtgcatccgatgcccc

SEQ ID NO: 1022354 - DNA, 25 bp, Homo sapien
tgatggtgcccgtgcatccgatgcc

SEQ ID NO: 1022355 - DNA, 25 bp, Homo sapien
ggtgcccgtgcatccgatgccccca

SEQ ID NO: 1022356 - DNA, 25 bp, Homo sapien
gatgatggtgcccgtgcatccgatg

SEQ ID NO: 1022357 - DNA, 25 bp, Homo sapien
gcctgcggatgacgtccaccaggat

SEQ ID NO: 1022358 - DNA, 25 bp, Homo sapien
ctgcggatgacgtccaccaggatgt

SEQ ID NO: 1022359 - DNA, 25 bp, Homo sapien
gccctgcctgcggatgacgtccacc

SEQ ID NO: 1022360 - DNA, 25 bp, Homo sapien
ctgcctgcggatgacgtccaccagg

SEQ ID NO: 1022361 - DNA, 25 bp, Homo sapien
ccggtagcggtggggtcgtcctgag

SEQ ID NO: 1022362 - DNA, 25 bp, Homo sapien
cggtagcggtggggtcgtcctgagg

SEQ ID NO: 1022363 - DNA, 25 bp, Homo sapien
agcggtggggtcgtcctgaggggtg

SEQ ID NO: 1022364 - DNA, 25 bp, Homo sapien
ctgcggacaagcgcgcttggggagg

SEQ ID NO: 1022365 - DNA, 25 bp, Homo sapien
gatggggggaaggtgccggcaggca

SEQ ID NO: 1022366 - DNA, 25 bp, Homo sapien
gggaaggtgccggcaggcaggggcg

SEQ ID NO: 1022367 - DNA, 25 bp, Homo sapien
tggggggaaggtgccggcaggcagg

SEQ ID NO: 1022368 - DNA, 25 bp, Homo sapien
ttcgggacgtcggtgtcgcagtcca

SEQ ID NO: 1022369 - DNA, 25 bp, Homo sapien
tcgtcttcgggacgtcggtgtcgca

SEQ ID NO: 1022370 - DNA, 25 bp, Homo sapien
agtgctgccgccaaaccagctggat

SEQ ID NO: 1022371 - DNA, 25 bp, Homo sapien
aaaccagctggatcgtcttcgggac

SEQ ID NO: 1022372 - DNA, 25 bp, Homo sapien
cgccccggatgtgccgctgcagcgc

SEQ ID NO: 1022373 - DNA, 25 bp, Homo sapien
ccgctgcagcgccaggtacgtgaac

SEQ ID NO: 1022374 - DNA, 25 bp, Homo sapien
atgtgccgctgcagcgccaggtacg

SEQ ID NO: 1022375 - DNA, 25 bp, Homo sapien
tcgccccggatgtgccgctgcagcg

SEQ ID NO: 1022376 - DNA, 25 bp, Homo sapien
cacgttttggttctcgcgctcctga

SEQ ID NO: 1022377 - DNA, 25 bp, Homo sapien
gttctcgcgctcctgaggcggctcg

SEQ ID NO: 1022378 - DNA, 25 bp, Homo sapien
gcggcgcccacgttttggttctcgc

SEQ ID NO: 1022379 - DNA, 25 bp, Homo sapien
agccgggggctgcaacccgattagc

SEQ ID NO: 1022380 - DNA, 25 bp, Homo sapien
ggcagacccgcacggagtggccgag

SEQ ID NO: 1022381 - DNA, 25 bp, Homo sapien
ggccacatcccagaccacgggagca

SEQ ID NO: 1022382 - DNA, 25 bp, Homo sapien
gcaggccggagctgcggtgagggca

SEQ ID NO: 1022383 - DNA, 25 bp, Homo sapien
cacatcccagaccacgggagcaggc

SEQ ID NO: 1022384 - DNA, 25 bp, Homo sapien
tcagcctccccccacggagtcccca

SEQ ID NO: 1022385 - DNA, 25 bp, Homo sapien
cagcctccccccacggagtccccat

SEQ ID NO: 1022386 - DNA, 25 bp, Homo sapien
gcacagagtccccatagcctcagcc

SEQ ID NO: 1022387 - DNA, 25 bp, Homo sapien
agtgtcagccgggagcccagagtga

SEQ ID NO: 1022388 - DNA, 25 bp, Homo sapien
gacctcagtgccaggatattcccag

SEQ ID NO: 1022389 - DNA, 25 bp, Homo sapien
cctccggcacgagtgtcagccggga

SEQ ID NO: 1022390 - DNA, 25 bp, Homo sapien
tgcctccggcacgagtgtcagccgg

SEQ ID NO: 1022391 - DNA, 25 bp, Homo sapien
agtgccaggtgtgacccgtaaccga

SEQ ID NO: 1022392 - DNA, 25 bp, Homo sapien
gccaggtgtgacccgtaaccgaggc

SEQ ID NO: 1022393 - DNA, 25 bp, Homo sapien
cagtgccaggtgtgacccgtaaccg

SEQ ID NO: 1022394 - DNA, 25 bp, Homo sapien
gtgccaggtgtgacccgtaaccgag

SEQ ID NO: 1022395 - DNA, 25 bp, Homo sapien
ggcagcgaggggcacgccctcctca

SEQ ID NO: 1022396 - DNA, 25 bp, Homo sapien
ggcacgccctcctcactgggcacag

SEQ ID NO: 1022397 - DNA, 25 bp, Homo sapien
actgggcacaggagggacacactga

SEQ ID NO: 1022398 - DNA, 25 bp, Homo sapien
acaggagggacacactgagctgggc

SEQ ID NO: 1022399 - DNA, 25 bp, Homo sapien
ctgcgcactcgcgattggcccttgg

SEQ ID NO: 1022400 - DNA, 25 bp, Homo sapien
cactcgcgattggcccttgggcagc

SEQ ID NO: 1022401 - DNA, 25 bp, Homo sapien
tgcgcactcgcgattggcccttggg

SEQ ID NO: 1022402 - DNA, 25 bp, Homo sapien
cgcactcgcgattggcccttgggca

SEQ ID NO: 1022403 - DNA, 25 bp, Homo sapien
tggaggataaaatcggaaacaggca

SEQ ID NO: 1022404 - DNA, 25 bp, Homo sapien
gctgggcgtctggtttggaggataa

SEQ ID NO: 1022405 - DNA, 25 bp, Homo sapien
aaaatcggaaacaggcacgaacagc

SEQ ID NO: 1022406 - DNA, 25 bp, Homo sapien
ggataaaatcggaaacaggcacgaa

SEQ ID NO: 1022407 - DNA, 25 bp, Homo sapien
cctgtgacgcgggagcccccagact

SEQ ID NO: 1022408 - DNA, 25 bp, Homo sapien
tgggccacgcccctgtgacgcggga

SEQ ID NO: 1022409 - DNA, 25 bp, Homo sapien
tgtgacgcgggagcccccagactcc

SEQ ID NO: 1022410 - DNA, 25 bp, Homo sapien
cacgcccctgtgacgcgggagcccc

SEQ ID NO: 1022411 - DNA, 25 bp, Homo sapien
aaaacccccagcctgaggtttgcag

SEQ ID NO: 1022412 - DNA, 25 bp, Homo sapien
ccagcctgaggtttgcagccaggga

SEQ ID NO: 1022413 - DNA, 25 bp, Homo sapien
ccctggcccaagaagtgtcctgggg

SEQ ID NO: 1022414 - DNA, 25 bp, Homo sapien
gagtatctgggggagcattggctct

SEQ ID NO: 1022415 - DNA, 25 bp, Homo sapien
ccccagctcggagtgaggtgggaca

SEQ ID NO: 1022416 - DNA, 25 bp, Homo sapien
tgcgtttccatcggccggccgggct

SEQ ID NO: 1022417 - DNA, 25 bp, Homo sapien
gacagagtgtgggtgtgcgtttcca

SEQ ID NO: 1022418 - DNA, 25 bp, Homo sapien
ccagctcggagtgaggtgggacaga

SEQ ID NO: 1022419 - DNA, 25 bp, Homo sapien
ccagcgggaacgtgggggcactggg

SEQ ID NO: 1022420 - DNA, 25 bp, Homo sapien
tgggccagcgggaacgtgggggcac

SEQ ID NO: 1022421 - DNA, 25 bp, Homo sapien
cagcgggaacgtgggggcactgggt

SEQ ID NO: 1022422 - DNA, 25 bp, Homo sapien
ggccagcgggaacgtgggggcactg

SEQ ID NO: 1022423 - DNA, 25 bp, Homo sapien
cacgctcctttgcgaagtccactgt

SEQ ID NO: 1022424 - DNA, 25 bp, Homo sapien
gaagtccactgtgggtgccatcatg

SEQ ID NO: 1022425 - DNA, 25 bp, Homo sapien
gcgaagtccactgtgggtgccatca

SEQ ID NO: 1022426 - DNA, 25 bp, Homo sapien
cccacgctcctttgcgaagtccact

SEQ ID NO: 1022427 - DNA, 25 bp, Homo sapien
acgccctgcggcaccggcaccgtct

SEQ ID NO: 1022428 - DNA, 25 bp, Homo sapien
agacgccctgcggcaccggcaccgt

SEQ ID NO: 1022429 - DNA, 25 bp, Homo sapien
tcagacgccctgcggcaccggcacc

SEQ ID NO: 1022430 - DNA, 25 bp, Homo sapien
cgccctgcggcaccggcaccgtctg

SEQ ID NO: 1022431 - DNA, 25 bp, Homo sapien
caaggctgccctggcgctgagtcct

SEQ ID NO: 1022432 - DNA, 25 bp, Homo sapien
agctctgtggccccgctcggatccg

SEQ ID NO: 1022433 - DNA, 25 bp, Homo sapien
aattcattgtgcagaaaagtcctcc

SEQ ID NO: 1022434 - DNA, 25 bp, Homo sapien
cggagttcctgggagaaaggcgccg

SEQ ID NO: 1022435 - DNA, 25 bp, Homo sapien
tcaccgcaggtgtgacagcgtttgc

SEQ ID NO: 1022436 - DNA, 25 bp, Homo sapien
tcactcaacatatgaagagccagga

SEQ ID NO: 1022437 - DNA, 25 bp, Homo sapien
tatcaattgtgttatgacctagctg

SEQ ID NO: 1022438 - DNA, 25 bp, Homo sapien
aaaatgtgagccattctcgaaggga

SEQ ID NO: 1022439 - DNA, 25 bp, Homo sapien
ggcagaggcttcagcgagctgagat

SEQ ID NO: 1022440 - DNA, 25 bp, Homo sapien
agaggcttcagcgagctgagattgc

SEQ ID NO: 1022441 - DNA, 25 bp, Homo sapien
gcagaggcttcagcgagctgagatt

SEQ ID NO: 1022442 - DNA, 25 bp, Homo sapien
gctttttggctccaatgagattttc

SEQ ID NO: 1022443 - DNA, 25 bp, Homo sapien
catgtgtttagttactaaggcataa

SEQ ID NO: 1022444 - DNA, 25 bp, Homo sapien
aattttcatcccattatttagcttt

SEQ ID NO: 1022445 - DNA, 25 bp, Homo sapien
cacacctgccctgaaaccagttctt

SEQ ID NO: 1022446 - DNA, 25 bp, Homo sapien
gcaggcgtgagggtagcgggttggg

SEQ ID NO: 1022447 - DNA, 25 bp, Homo sapien
cggcccgagggacgttccctgcgcg

SEQ ID NO: 1022448 - DNA, 25 bp, Homo sapien
ccgggtcggcgcagggagtgcgaga

SEQ ID NO: 1022449 - DNA, 25 bp, Homo sapien
ggcagacaaaggtcggcggccctgg

SEQ ID NO: 1022450 - DNA, 25 bp, Homo sapien
gccttctccgatgaagccgaagccg

SEQ ID NO: 1022451 - DNA, 25 bp, Homo sapien
cagtcccgcacccaaggcagggtct

SEQ ID NO: 1022452 - DNA, 25 bp, Homo sapien
gagcgtcctgagaccgcagagccct

SEQ ID NO: 1022453 - DNA, 25 bp, Homo sapien
gcagagccctgacccgtccgagagg

SEQ ID NO: 1022454 - DNA, 25 bp, Homo sapien
tgtttgccgaaagctgcgggcgccg

SEQ ID NO: 1022455 - DNA, 25 bp, Homo sapien
tttgccgaaagctgcgggcgccgcg

SEQ ID NO: 1022456 - DNA, 25 bp, Homo sapien
gtttgccgaaagctgcgggcgccgc

SEQ ID NO: 1022457 - DNA, 25 bp, Homo sapien
atgtttgccgaaagctgcgggcgcc

SEQ ID NO: 1022458 - DNA, 25 bp, Homo sapien
actgacttcacagacgcacagggag

SEQ ID NO: 1022459 - DNA, 25 bp, Homo sapien
ctgacttcacagacgcacagggagg

SEQ ID NO: 1022460 - DNA, 25 bp, Homo sapien
cacgccggtgccgccccgggagcag

SEQ ID NO: 1022461 - DNA, 25 bp, Homo sapien
cgccggtgccgccccgggagcagct

SEQ ID NO: 1022462 - DNA, 25 bp, Homo sapien
cggtgccgccccgggagcagctcac

SEQ ID NO: 1022463 - DNA, 25 bp, Homo sapien
ccggtgccgccccgggagcagctca

SEQ ID NO: 1022464 - DNA, 25 bp, Homo sapien
gctggctttccgacacccaaaccag

SEQ ID NO: 1022465 - DNA, 25 bp, Homo sapien
cactcatcaacaagtcaaagcgcga

SEQ ID NO: 1022466 - DNA, 25 bp, Homo sapien
tcaaagcgcgaaccctgtgggtgca

SEQ ID NO: 1022467 - DNA, 25 bp, Homo sapien
tgcagcagccggacctcgggtgtgc

SEQ ID NO: 1022468 - DNA, 25 bp, Homo sapien
ctgggtggccggtggcttcccgtgg

SEQ ID NO: 1022469 - DNA, 25 bp, Homo sapien
gtggccggtggcttcccgtggccgc

SEQ ID NO: 1022470 - DNA, 25 bp, Homo sapien
tgggtggccggtggcttcccgtggc

SEQ ID NO: 1022471 - DNA, 25 bp, Homo sapien
tctgggtggccggtggcttcccgtg

SEQ ID NO: 1022472 - DNA, 25 bp, Homo sapien
cctgacaccacacaggagccgggtg

SEQ ID NO: 1022473 - DNA, 25 bp, Homo sapien
gtatcggccccccagacctggccac

SEQ ID NO: 1022474 - DNA, 25 bp, Homo sapien
ggcctgccggcatgccagagcccct

SEQ ID NO: 1022475 - DNA, 25 bp, Homo sapien
tgggcgtagcccgtggtatcggccc

SEQ ID NO: 1022476 - DNA, 25 bp, Homo sapien
gcagactcgtcctttaactgagttt

SEQ ID NO: 1022477 - DNA, 25 bp, Homo sapien
ccaaaagcagactcgtcctttaact

SEQ ID NO: 1022478 - DNA, 25 bp, Homo sapien
aaagcagactcgtcctttaactgag

SEQ ID NO: 1022479 - DNA, 25 bp, Homo sapien
ctcgtcctttaactgagtttcgctg

SEQ ID NO: 1022480 - DNA, 25 bp, Homo sapien
agtcagcacgagcaccagacctggg

SEQ ID NO: 1022481 - DNA, 25 bp, Homo sapien
agggccctgcggctgaacgtggcca

SEQ ID NO: 1022482 - DNA, 25 bp, Homo sapien
tgtgcttgtccgaggctcaggcctg

SEQ ID NO: 1022483 - DNA, 25 bp, Homo sapien
cttgtctccagccacggtggaggag

SEQ ID NO: 1022484 - DNA, 25 bp, Homo sapien
ccaggcctggtcccgcatgatatgt

SEQ ID NO: 1022485 - DNA, 25 bp, Homo sapien
cccgcatgatatgtttgaatgccag

SEQ ID NO: 1022486 - DNA, 25 bp, Homo sapien
cctggtcccgcatgatatgtttgaa

SEQ ID NO: 1022487 - DNA, 25 bp, Homo sapien
tgatatgtttgaatgccagaacccg

SEQ ID NO: 1022488 - DNA, 25 bp, Homo sapien
cattcacaggccccgaggaactctg

SEQ ID NO: 1022489 - DNA, 25 bp, Homo sapien
ttcacaggccccgaggaactctggg

SEQ ID NO: 1022490 - DNA, 25 bp, Homo sapien
aggaactctggggccttcgcagcca

SEQ ID NO: 1022491 - DNA, 25 bp, Homo sapien
cccgaggaactctggggccttcgca

SEQ ID NO: 1022492 - DNA, 25 bp, Homo sapien
tctggcagccgatgctcacatccat

SEQ ID NO: 1022493 - DNA, 25 bp, Homo sapien
ctcgttctggcagccgatgctcaca

SEQ ID NO: 1022494 - DNA, 25 bp, Homo sapien
gcttcctctcgttctggcagccgat

SEQ ID NO: 1022495 - DNA, 25 bp, Homo sapien
tgctcacatccataacagtgtctgt

SEQ ID NO: 1022496 - DNA, 25 bp, Homo sapien
tgggcacccttgtcgtacctgacaa

SEQ ID NO: 1022497 - DNA, 25 bp, Homo sapien
taggaggccgcatgggcaccctcct

SEQ ID NO: 1022498 - DNA, 25 bp, Homo sapien
ggagggcgttcaccggcttcccata

SEQ ID NO: 1022499 - DNA, 25 bp, Homo sapien
tacctgacaaccctgtgtagattcc

SEQ ID NO: 1022500 - DNA, 25 bp, Homo sapien
gggcggcgctcgctccggccgcgcc

SEQ ID NO: 1022501 - DNA, 25 bp, Homo sapien
ccgggcggcgctcgctccggccgcg

SEQ ID NO: 1022502 - DNA, 25 bp, Homo sapien
gcggcgctcgctccggccgcgccct

SEQ ID NO: 1022503 - DNA, 25 bp, Homo sapien
gctcccccagctctcggtgggcgcc

SEQ ID NO: 1022504 - DNA, 25 bp, Homo sapien
ctgcttcccccggatgcagctcagg

SEQ ID NO: 1022505 - DNA, 25 bp, Homo sapien
cctgcttcccccggatgcagctcag

SEQ ID NO: 1022506 - DNA, 25 bp, Homo sapien
tgcttcccccggatgcagctcagga

SEQ ID NO: 1022507 - DNA, 25 bp, Homo sapien
tcgggccagcgttgaagcctgagct

SEQ ID NO: 1022508 - DNA, 25 bp, Homo sapien
atttcccgcacctttgtctggtggg

SEQ ID NO: 1022509 - DNA, 25 bp, Homo sapien
agcgccgcgaagaacaaagccgggt

SEQ ID NO: 1022510 - DNA, 25 bp, Homo sapien
gaggctaaactaaccgcctcagcgc

SEQ ID NO: 1022511 - DNA, 25 bp, Homo sapien
ttgctaatatcaggggtgagccggc

SEQ ID NO: 1022512 - DNA, 25 bp, Homo sapien
ccctccctgcgccaagacgcttggg

SEQ ID NO: 1022513 - DNA, 25 bp, Homo sapien
gcattttccgaagacacaagggtgt

SEQ ID NO: 1022514 - DNA, 25 bp, Homo sapien
ggacctggctgacggggatccctcc

SEQ ID NO: 1022515 - DNA, 25 bp, Homo sapien
gagcaggacacttcagcgaccgtta

SEQ ID NO: 1022516 - DNA, 25 bp, Homo sapien
cacaagttcgtatgagagcaggaca

SEQ ID NO: 1022517 - DNA, 25 bp, Homo sapien
gaggcttgaatttgaggcgacccac

SEQ ID NO: 1022518 - DNA, 25 bp, Homo sapien
catgtggcaccagtaaagccgggtc

SEQ ID NO: 1022519 - DNA, 25 bp, Homo sapien
cagtgaggtcatgaggatcagccat

SEQ ID NO: 1022520 - DNA, 25 bp, Homo sapien
gggtcagtgaggtcatgaggatcag

SEQ ID NO: 1022521 - DNA, 25 bp, Homo sapien
gtcagtgaggtcatgaggatcagcc

SEQ ID NO: 1022522 - DNA, 25 bp, Homo sapien
caggggggtcagtgaggtcatgagg

SEQ ID NO: 1022523 - DNA, 25 bp, Homo sapien
ccagccctcggccttctgggagccc

SEQ ID NO: 1022524 - DNA, 25 bp, Homo sapien
ggagccctcctggggggtcagccat

SEQ ID NO: 1022525 - DNA, 25 bp, Homo sapien
tgggagccctcctggggggtcagcc

SEQ ID NO: 1022526 - DNA, 25 bp, Homo sapien
ccccagccctcggccttctgggagc

SEQ ID NO: 1022527 - DNA, 25 bp, Homo sapien
gctgtgcttccaaagtgcgcccaga

SEQ ID NO: 1022528 - DNA, 25 bp, Homo sapien
tgggtcctcgcagctaaaggcactg

SEQ ID NO: 1022529 - DNA, 25 bp, Homo sapien
caaagtgcgcccagaaccctgggtc

SEQ ID NO: 1022530 - DNA, 25 bp, Homo sapien
ggctggtgccacgacgcccactggc

SEQ ID NO: 1022531 - DNA, 25 bp, Homo sapien
cttccgctgcgggtcacgggctgtc

SEQ ID NO: 1022532 - DNA, 25 bp, Homo sapien
ctgcttccgctgcgggtcacgggct

SEQ ID NO: 1022533 - DNA, 25 bp, Homo sapien
tgcttccgctgcgggtcacgggctg

SEQ ID NO: 1022534 - DNA, 25 bp, Homo sapien
tcctgcttccgctgcgggtcacggg

SEQ ID NO: 1022535 - DNA, 25 bp, Homo sapien
gcaggacccgggtcacatgatgagc

SEQ ID NO: 1022536 - DNA, 25 bp, Homo sapien
gacgccctcgcaggttccgggccag

SEQ ID NO: 1022537 - DNA, 25 bp, Homo sapien
aggttccgggccaggacgtcgcacg

SEQ ID NO: 1022538 - DNA, 25 bp, Homo sapien
tccatcagcccgggacgtgcctggg

SEQ ID NO: 1022539 - DNA, 25 bp, Homo sapien
tgggcctgacgctcttatcctgaaa

SEQ ID NO: 1022540 - DNA, 25 bp, Homo sapien
gctcttatcctgaaactcgggtgtc

SEQ ID NO: 1022541 - DNA, 25 bp, Homo sapien
ttatcctgaaactcgggtgtccatg

SEQ ID NO: 1022542 - DNA, 25 bp, Homo sapien
tgacgctcttatcctgaaactcggg

SEQ ID NO: 1022543 - DNA, 25 bp, Homo sapien
cccctcctccaagggagggctgcag

SEQ ID NO: 1022544 - DNA, 25 bp, Homo sapien
tccccctcctccaagggagggctgc

SEQ ID NO: 1022545 - DNA, 25 bp, Homo sapien
gggtctctgaccagcccccacgcct

SEQ ID NO: 1022546 - DNA, 25 bp, Homo sapien
gggctgcagacactccccatcctca

SEQ ID NO: 1022547 - DNA, 25 bp, Homo sapien
agcccccctccattgccagccttgc

SEQ ID NO: 1022548 - DNA, 25 bp, Homo sapien
cccctccattgccagccttgcagcc

SEQ ID NO: 1022549 - DNA, 25 bp, Homo sapien
ccctccattgccagccttgcagccc

SEQ ID NO: 1022550 - DNA, 25 bp, Homo sapien
cccccctccattgccagccttgcag

SEQ ID NO: 1022551 - DNA, 25 bp, Homo sapien
caggtccggtgggtgacaggacacc

SEQ ID NO: 1022552 - DNA, 25 bp, Homo sapien
ccctcaggtccggtgggtgacagga

SEQ ID NO: 1022553 - DNA, 25 bp, Homo sapien
tgggtgacaggacacccggggtcag

SEQ ID NO: 1022554 - DNA, 25 bp, Homo sapien
ctgccctcaggtccggtgggtgaca

SEQ ID NO: 1022555 - DNA, 25 bp, Homo sapien
ggagcctcaagggacggtcggtgac

SEQ ID NO: 1022556 - DNA, 25 bp, Homo sapien
gcaccatgggccctgggtaactgct

SEQ ID NO: 1022557 - DNA, 25 bp, Homo sapien
aagggacggtcggtgaccctcagca

SEQ ID NO: 1022558 - DNA, 25 bp, Homo sapien
tgggccctgggtaactgctccccag

SEQ ID NO: 1022559 - DNA, 25 bp, Homo sapien
gtcacctccacgtgttgtctgctgg

SEQ ID NO: 1022560 - DNA, 25 bp, Homo sapien
ccgagcattcttgagagcctggcct

SEQ ID NO: 1022561 - DNA, 25 bp, Homo sapien
tggctgggcccgagcattcttgaga

SEQ ID NO: 1022562 - DNA, 25 bp, Homo sapien
gcctgggcttggcagtgccaccgtc

SEQ ID NO: 1022563 - DNA, 25 bp, Homo sapien
cgtgtggagagcgtggatccctgat

SEQ ID NO: 1022564 - DNA, 25 bp, Homo sapien
gatccctgatgggatgatagagctg

SEQ ID NO: 1022565 - DNA, 25 bp, Homo sapien
cctgagaggatgatagagctgggtc

SEQ ID NO: 1022566 - DNA, 25 bp, Homo sapien
gatccccgatgggatgatagagctg

SEQ ID NO: 1022567 - DNA, 25 bp, Homo sapien
gtccctgagaggatgatagaactgg

SEQ ID NO: 1022568 - DNA, 25 bp, Homo sapien
ctgagaggataatagagccaggtca

SEQ ID NO: 1022569 - DNA, 25 bp, Homo sapien
ggtccctgagaggataatagagcca

SEQ ID NO: 1022570 - DNA, 25 bp, Homo sapien
gaggataatagagccaggtcatgtg

SEQ ID NO: 1022571 - DNA, 25 bp, Homo sapien
ccctgagaggataatagagccaggt

SEQ ID NO: 1022572 - DNA, 25 bp, Homo sapien
tggctgggcccgaggtctcgctggg

SEQ ID NO: 1022573 - DNA, 25 bp, Homo sapien
gacaaaggccctttgtgctctggct

SEQ ID NO: 1022574 - DNA, 25 bp, Homo sapien
gtccccgtttcttgggccagactgc

SEQ ID NO: 1022575 - DNA, 25 bp, Homo sapien
cctgatggcaccagacacaggaagc

SEQ ID NO: 1022576 - DNA, 25 bp, Homo sapien
gctgccaaaggttccggcctggtcc

SEQ ID NO: 1022577 - DNA, 25 bp, Homo sapien
acttggtgtcggaatctccaggaac

SEQ ID NO: 1022578 - DNA, 25 bp, Homo sapien
ctgccaaaggttccggcctggtcct

SEQ ID NO: 1022579 - DNA, 25 bp, Homo sapien
ctgcacttggtgtcggaatctccag

SEQ ID NO: 1022580 - DNA, 25 bp, Homo sapien
cctccgctctgtccgggtcccagga

SEQ ID NO: 1022581 - DNA, 25 bp, Homo sapien
cctggtcggacggagcaggtggccc

SEQ ID NO: 1022582 - DNA, 25 bp, Homo sapien
tggtccacgctgctcgtgcacacgg

SEQ ID NO: 1022583 - DNA, 25 bp, Homo sapien
tctggaaggactggtgcctggtcgg

SEQ ID NO: 1022584 - DNA, 25 bp, Homo sapien
tcaggtaggtgcaggggtgtggggg

SEQ ID NO: 1022585 - DNA, 25 bp, Homo sapien
ccgacaggttccactgctgcggccg

SEQ ID NO: 1022586 - DNA, 25 bp, Homo sapien
gccccgacaggttccactgctgcgg

SEQ ID NO: 1022587 - DNA, 25 bp, Homo sapien
ccccgacaggttccactgctgcggc

SEQ ID NO: 1022588 - DNA, 25 bp, Homo sapien
gaaacccagccgcatctgcgcaggg

SEQ ID NO: 1022589 - DNA, 25 bp, Homo sapien
aaacccagccgcatctgcgcagggg

SEQ ID NO: 1022590 - DNA, 25 bp, Homo sapien
ccgaaacccagccgcatctgcgcag

SEQ ID NO: 1022591 - DNA, 25 bp, Homo sapien
cccagccgcatctgcgcaggggccc

SEQ ID NO: 1022592 - DNA, 25 bp, Homo sapien
gtgcccggaagacgcagcccgtggg

SEQ ID NO: 1022593 - DNA, 25 bp, Homo sapien
cccgtgcccggaagacgcagcccgt

SEQ ID NO: 1022594 - DNA, 25 bp, Homo sapien
tgcccgtgcccggaagacgcagccc

SEQ ID NO: 1022595 - DNA, 25 bp, Homo sapien
tgtgcccgtgcccggaagacgcagc

SEQ ID NO: 1022596 - DNA, 25 bp, Homo sapien
gtgcagggctccgccgtcatcatta

SEQ ID NO: 1022597 - DNA, 25 bp, Homo sapien
ctgcccagtaagatggccacggctg

SEQ ID NO: 1022598 - DNA, 25 bp, Homo sapien
gggctccgccgtcatcattaccagg

SEQ ID NO: 1022599 - DNA, 25 bp, Homo sapien
acctgactccatccaatgctgccca

SEQ ID NO: 1022600 - DNA, 25 bp, Homo sapien
ccaaggcgggggcactggtctgctc

SEQ ID NO: 1022601 - DNA, 25 bp, Homo sapien
cctggggctgctgacccgggaccaa

SEQ ID NO: 1022602 - DNA, 25 bp, Homo sapien
cgggggcactggtctgctcggtggc

SEQ ID NO: 1022603 - DNA, 25 bp, Homo sapien
ggcactggtctgctcggtggccggc

SEQ ID NO: 1022604 - DNA, 25 bp, Homo sapien
gcgggtcacctttgaacatcgttac

SEQ ID NO: 1022605 - DNA, 25 bp, Homo sapien
gcactgtccggtaagatgctcacag

SEQ ID NO: 1022606 - DNA, 25 bp, Homo sapien
gtgttagagtcaagctgggaaatcc

SEQ ID NO: 1022607 - DNA, 25 bp, Homo sapien
ttgaacatcgttaccagacagtgtt

SEQ ID NO: 1022608 - DNA, 25 bp, Homo sapien
tgcagaacgagcccccgaggcactt

SEQ ID NO: 1022609 - DNA, 25 bp, Homo sapien
gtctgcagaacgagcccccgaggca

SEQ ID NO: 1022610 - DNA, 25 bp, Homo sapien
ctgggtctgcagaacgagcccccga

SEQ ID NO: 1022611 - DNA, 25 bp, Homo sapien
aacgagcccccgaggcacttccctg

SEQ ID NO: 1022612 - DNA, 25 bp, Homo sapien
ccatcggccggcggtggtgtgggtg

SEQ ID NO: 1022613 - DNA, 25 bp, Homo sapien
catgtctggtaagacgcccatcggc

SEQ ID NO: 1022614 - DNA, 25 bp, Homo sapien
tggtgtgggtggcctccgggtcctg

SEQ ID NO: 1022615 - DNA, 25 bp, Homo sapien
tgtctggtaagacgcccatcggccg

SEQ ID NO: 1022616 - DNA, 25 bp, Homo sapien
agacagtattagacagagggccagg

SEQ ID NO: 1022617 - DNA, 25 bp, Homo sapien
catgagagccccagaccgggcggct

SEQ ID NO: 1022618 - DNA, 25 bp, Homo sapien
tgcggatgggcacaggccatagtga

SEQ ID NO: 1022619 - DNA, 25 bp, Homo sapien
gctctctcctctaacggtgatcagg

SEQ ID NO: 1022620 - DNA, 25 bp, Homo sapien
tcaggcagcggatggacggttttac

SEQ ID NO: 1022621 - DNA, 25 bp, Homo sapien
ggtggggcacaagagccccagaccc

SEQ ID NO: 1022622 - DNA, 25 bp, Homo sapien
accccggcggctttgcactgatggg

SEQ ID NO: 1022623 - DNA, 25 bp, Homo sapien
gtggggcacaagagccccagacccc

SEQ ID NO: 1022624 - DNA, 25 bp, Homo sapien
tccctatcccatggtcttgcagctg

SEQ ID NO: 1022625 - DNA, 25 bp, Homo sapien
acagctccagatgacacctcgtgag

SEQ ID NO: 1022626 - DNA, 25 bp, Homo sapien
aggtcaacctgcagatcccggcttg

SEQ ID NO: 1022627 - DNA, 25 bp, Homo sapien
tggccgctgagacgctgtgacattg

SEQ ID NO: 1022628 - DNA, 25 bp, Homo sapien
gggtggcactccaagttcttcccca

SEQ ID NO: 1022629 - DNA, 25 bp, Homo sapien
ttccccacacacgtcgctcaggcgg

SEQ ID NO: 1022630 - DNA, 25 bp, Homo sapien
tgcggtctggtgaggtggacgccac

SEQ ID NO: 1022631 - DNA, 25 bp, Homo sapien
acacgtcgctcaggcggcagcagca

SEQ ID NO: 1022632 - DNA, 25 bp, Homo sapien
tgttggatgagctcaggctcacagg

SEQ ID NO: 1022633 - DNA, 25 bp, Homo sapien
gcgtgaactgcagactttattacta

SEQ ID NO: 1022634 - DNA, 25 bp, Homo sapien
gctctccaggtgtgtccaaaccttg

SEQ ID NO: 1022635 - DNA, 25 bp, Homo sapien
tttgttcccggtgcttatggagagg

SEQ ID NO: 1022636 - DNA, 25 bp, Homo sapien
ccagccggaacccagaggtgagctt

SEQ ID NO: 1022637 - DNA, 25 bp, Homo sapien
gagtggcggggccagcccgggaagc

SEQ ID NO: 1022638 - DNA, 25 bp, Homo sapien
tgagcttgggttttcggaggatggg

SEQ ID NO: 1022639 - DNA, 25 bp, Homo sapien
cccgggaagccgggctgagggctga

SEQ ID NO: 1022640 - DNA, 25 bp, Homo sapien
gcccagcccacaaggtcctgggagc

SEQ ID NO: 1022641 - DNA, 25 bp, Homo sapien
ctgcccagcccacaaggtcctggga

SEQ ID NO: 1022642 - DNA, 25 bp, Homo sapien
tgcccagcccacaaggtcctgggag

SEQ ID NO: 1022643 - DNA, 25 bp, Homo sapien
ttgttcgaagagctggtgcctcccg

SEQ ID NO: 1022644 - DNA, 25 bp, Homo sapien
gttcgaagagctggtgcctcccggc

SEQ ID NO: 1022645 - DNA, 25 bp, Homo sapien
tcgaagagctggtgcctcccggccg

SEQ ID NO: 1022646 - DNA, 25 bp, Homo sapien
attgttcgaagagctggtgcctccc

SEQ ID NO: 1022647 - DNA, 25 bp, Homo sapien
aagaccggcaggagacggcaccccg

SEQ ID NO: 1022648 - DNA, 25 bp, Homo sapien
gaaaagaccggcaggagacggcacc

SEQ ID NO: 1022649 - DNA, 25 bp, Homo sapien
acggcaccccggtaggatgaacaga

SEQ ID NO: 1022650 - DNA, 25 bp, Homo sapien
caggagacggcaccccggtaggatg

SEQ ID NO: 1022651 - DNA, 25 bp, Homo sapien
tcctttatagcggtgggacttggga

SEQ ID NO: 1022652 - DNA, 25 bp, Homo sapien
tgtggaggacggttgtgacgcccct

SEQ ID NO: 1022653 - DNA, 25 bp, Homo sapien
cttgggaagccggtgacgcccggtg

SEQ ID NO: 1022654 - DNA, 25 bp, Homo sapien
cggcgtggaaacttggtgcacgacc

SEQ ID NO: 1022655 - DNA, 25 bp, Homo sapien
agctctgccccaaacatcattcgtg

SEQ ID NO: 1022656 - DNA, 25 bp, Homo sapien
tatggacagggcagcgtgtggaaga

SEQ ID NO: 1022657 - DNA, 25 bp, Homo sapien
cattcgtgccgggatgatatggaca

SEQ ID NO: 1022658 - DNA, 25 bp, Homo sapien
caaacatcattcgtgccgggatgat

SEQ ID NO: 1022659 - DNA, 25 bp, Homo sapien
cacagcggctgggagcagcagcctc

SEQ ID NO: 1022660 - DNA, 25 bp, Homo sapien
ctgcacagcggctgggagcagcagc

SEQ ID NO: 1022661 - DNA, 25 bp, Homo sapien
tgcacagcggctgggagcagcagcc

SEQ ID NO: 1022662 - DNA, 25 bp, Homo sapien
cagcggctgggagcagcagcctctc

SEQ ID NO: 1022663 - DNA, 25 bp, Homo sapien
cacctgcacggtggcagcctctctc

SEQ ID NO: 1022664 - DNA, 25 bp, Homo sapien
ccacctgcacggtggcagcctctct

SEQ ID NO: 1022665 - DNA, 25 bp, Homo sapien
ctgcacagcgtcagcctctttccac

SEQ ID NO: 1022666 - DNA, 25 bp, Homo sapien
agcctctttccacctgcacagcgtc

SEQ ID NO: 1022667 - DNA, 25 bp, Homo sapien
ctgcacagcgtcagcctctctccac

SEQ ID NO: 1022668 - DNA, 25 bp, Homo sapien
cctctttccacctgcacagcgtcag

SEQ ID NO: 1022669 - DNA, 25 bp, Homo sapien
aggagacatccgtccctccgggaag

SEQ ID NO: 1022670 - DNA, 25 bp, Homo sapien
ctccgggaagcctggaagactctca

SEQ ID NO: 1022671 - DNA, 25 bp, Homo sapien
ggaaaaggtgaggagacatccgtcc

SEQ ID NO: 1022672 - DNA, 25 bp, Homo sapien
cctggaagactctcacaggagtgag

SEQ ID NO: 1022673 - DNA, 25 bp, Homo sapien
gaggctcccagccgggaattccagg

SEQ ID NO: 1022674 - DNA, 25 bp, Homo sapien
aggctcccagccgggaattccagga

SEQ ID NO: 1022675 - DNA, 25 bp, Homo sapien
ggaggctcccagccgggaattccag

SEQ ID NO: 1022676 - DNA, 25 bp, Homo sapien
aagatgccgctctgaccctcctgtg

SEQ ID NO: 1022677 - DNA, 25 bp, Homo sapien
cgcgcggcccgaggccccagtgctt

SEQ ID NO: 1022678 - DNA, 25 bp, Homo sapien
ctgaagggaagatgccgctctgacc

SEQ ID NO: 1022679 - DNA, 25 bp, Homo sapien
cctgtgggacctccgcgcggcccga

SEQ ID NO: 1022680 - DNA, 25 bp, Homo sapien
ctcttgcccctcttgaagccggctc

SEQ ID NO: 1022681 - DNA, 25 bp, Homo sapien
tcttgaagccggctcgggtccgagt

SEQ ID NO: 1022682 - DNA, 25 bp, Homo sapien
gtgcagctgtggtccattggccggg

SEQ ID NO: 1022683 - DNA, 25 bp, Homo sapien
cgggtgcagctgtggtccattggcc

SEQ ID NO: 1022684 - DNA, 25 bp, Homo sapien
tgtcatgggtgacccaaggggccat

SEQ ID NO: 1022685 - DNA, 25 bp, Homo sapien
gggcaggggtcacaatgtccatgat

SEQ ID NO: 1022686 - DNA, 25 bp, Homo sapien
ggtcacaatgtccatgatgatgtca

SEQ ID NO: 1022687 - DNA, 25 bp, Homo sapien
ccatgatgatgtcatgggtgaccca

SEQ ID NO: 1022688 - DNA, 25 bp, Homo sapien
cgggctgtgaggccggtgctgggtg

SEQ ID NO: 1022689 - DNA, 25 bp, Homo sapien
gtgcagacgtgacgcagggatggtc

SEQ ID NO: 1022690 - DNA, 25 bp, Homo sapien
tgctgggtgcagacgtgacgcaggg

SEQ ID NO: 1022691 - DNA, 25 bp, Homo sapien
gggtgcagacgtgacgcagggatgg

SEQ ID NO: 1022692 - DNA, 25 bp, Homo sapien
ctgccggcaggttccaggtgggggt

SEQ ID NO: 1022693 - DNA, 25 bp, Homo sapien
gaggtcgcccctccgaccctcctca

SEQ ID NO: 1022694 - DNA, 25 bp, Homo sapien
gcagggggcagggaggtcgcccctc

SEQ ID NO: 1022695 - DNA, 25 bp, Homo sapien
ggtgggggtggggagcttggagcag

SEQ ID NO: 1022696 - DNA, 25 bp, Homo sapien
cgtgaccaccctccagggccaggct

SEQ ID NO: 1022697 - DNA, 25 bp, Homo sapien
gggccgtgaccaccctccagggcca

SEQ ID NO: 1022698 - DNA, 25 bp, Homo sapien
gccgtgaccaccctccagggccagg

SEQ ID NO: 1022699 - DNA, 25 bp, Homo sapien
tgaccaccctccagggccaggcttc

SEQ ID NO: 1022700 - DNA, 25 bp, Homo sapien
tgtcatccgagtctgcaggccggtg

SEQ ID NO: 1022701 - DNA, 25 bp, Homo sapien
gcccggcggcgttagtgtcatccga

SEQ ID NO: 1022702 - DNA, 25 bp, Homo sapien
ctccaatgtagaagaagggccccgg

SEQ ID NO: 1022703 - DNA, 25 bp, Homo sapien
tccatctgcgtcgtggtctggctgg

SEQ ID NO: 1022704 - DNA, 25 bp, Homo sapien
tcccggcggctgtcatggatgcgct

SEQ ID NO: 1022705 - DNA, 25 bp, Homo sapien
tcagcgtgtagtcgtcccggcggct

SEQ ID NO: 1022706 - DNA, 25 bp, Homo sapien
ctcacaccacttcagcgtgtagtcg

SEQ ID NO: 1022707 - DNA, 25 bp, Homo sapien
gctgtctcggctcttgacctcacac

SEQ ID NO: 1022708 - DNA, 25 bp, Homo sapien
agaggccagggctcgtgtggaggga

SEQ ID NO: 1022709 - DNA, 25 bp, Homo sapien
ttgctggccttgctcatggcccgtg

SEQ ID NO: 1022710 - DNA, 25 bp, Homo sapien
gagcttgttgttgggaagctggtac

SEQ ID NO: 1022711 - DNA, 25 bp, Homo sapien
ttgttgttgggaagctggtacagca

SEQ ID NO: 1022712 - DNA, 25 bp, Homo sapien
ctcatggcccgtgcccgtccccgaa

SEQ ID NO: 1022713 - DNA, 25 bp, Homo sapien
aggggtggggcgggtgcaggggcag

SEQ ID NO: 1022714 - DNA, 25 bp, Homo sapien
aggggcaggcgtaggggcgggcgca

SEQ ID NO: 1022715 - DNA, 25 bp, Homo sapien
gggcgcagggacgggggcaggggca

SEQ ID NO: 1022716 - DNA, 25 bp, Homo sapien
ggcaggggcaggcgtaggggcgggc

SEQ ID NO: 1022717 - DNA, 25 bp, Homo sapien
gcagcccaggggacagagggcctgg

SEQ ID NO: 1022718 - DNA, 25 bp, Homo sapien
cagcccaggggacagagggcctgga

SEQ ID NO: 1022719 - DNA, 25 bp, Homo sapien
tgcagcccaggggacagagggcctg

SEQ ID NO: 1022720 - DNA, 25 bp, Homo sapien
agcccaggggacagagggcctggac

SEQ ID NO: 1022721 - DNA, 25 bp, Homo sapien
tgggcttgtccacgggaggtcctcc

SEQ ID NO: 1022722 - DNA, 25 bp, Homo sapien
gcttgtccacgggaggtcctccagg

SEQ ID NO: 1022723 - DNA, 25 bp, Homo sapien
cttgtccacgggaggtcctccaggg

SEQ ID NO: 1022724 - DNA, 25 bp, Homo sapien
cgggcgctgctgcgtccttttccag

SEQ ID NO: 1022725 - DNA, 25 bp, Homo sapien
gcctctctctcgtgtttgaggtcca

SEQ ID NO: 1022726 - DNA, 25 bp, Homo sapien
gaaaaaggcctctctctcgtgtttg

SEQ ID NO: 1022727 - DNA, 25 bp, Homo sapien
aaaaggcctctctctcgtgtttgag

SEQ ID NO: 1022728 - DNA, 25 bp, Homo sapien
tctcgtgtttgaggtccaggcggta

SEQ ID NO: 1022729 - DNA, 25 bp, Homo sapien
gatggggtcgtcctccatgctccgg

SEQ ID NO: 1022730 - DNA, 25 bp, Homo sapien
ggttccggagcaggaagatgccttt

SEQ ID NO: 1022731 - DNA, 25 bp, Homo sapien
cccggaacggcgtcttgtggtggat

SEQ ID NO: 1022732 - DNA, 25 bp, Homo sapien
tgggcttgcagatccatatctgggt

SEQ ID NO: 1022733 - DNA, 25 bp, Homo sapien
agggcataaccgcagtaggagcctg

SEQ ID NO: 1022734 - DNA, 25 bp, Homo sapien
tgctccagggcataaccgcagtagg

SEQ ID NO: 1022735 - DNA, 25 bp, Homo sapien
tccagggcataaccgcagtaggagc

SEQ ID NO: 1022736 - DNA, 25 bp, Homo sapien
ggtgctccagggcataaccgcagta

SEQ ID NO: 1022737 - DNA, 25 bp, Homo sapien
gagcatagccgtggccaaagaagat

SEQ ID NO: 1022738 - DNA, 25 bp, Homo sapien
cgtaaaggctaagggtgaggcgagc

SEQ ID NO: 1022739 - DNA, 25 bp, Homo sapien
aagtggccgccgaggtcgctggaat

SEQ ID NO: 1022740 - DNA, 25 bp, Homo sapien
caggtaggagcgcacgtcaaacttt

SEQ ID NO: 1022741 - DNA, 25 bp, Homo sapien
caggctgcacgctgagggctacagg

SEQ ID NO: 1022742 - DNA, 25 bp, Homo sapien
tctgagccctttcaccagctaacgg

SEQ ID NO: 1022743 - DNA, 25 bp, Homo sapien
cagctaacggggtccctgccacgcc

SEQ ID NO: 1022744 - DNA, 25 bp, Homo sapien
cagaaaactcagctgcggcttggga

SEQ ID NO: 1022745 - DNA, 25 bp, Homo sapien
gcacacggtgcctggagactggctc

SEQ ID NO: 1022746 - DNA, 25 bp, Homo sapien
acacggtgcctggagactggctccc

SEQ ID NO: 1022747 - DNA, 25 bp, Homo sapien
gggcacacggtgcctggagactggc

SEQ ID NO: 1022748 - DNA, 25 bp, Homo sapien
gggggcacacggtgcctggagactg

SEQ ID NO: 1022749 - DNA, 25 bp, Homo sapien
gcacacggtgcctggagactggctc

SEQ ID NO: 1022750 - DNA, 25 bp, Homo sapien
gggcacacggtgcctggagactggc

SEQ ID NO: 1022751 - DNA, 25 bp, Homo sapien
acacggtgcctggagactggctccc

SEQ ID NO: 1022752 - DNA, 25 bp, Homo sapien
gggggcacacggtgcctggagactg

SEQ ID NO: 1022753 - DNA, 25 bp, Homo sapien
cggttgaggtgttccatgctccaca

SEQ ID NO: 1022754 - DNA, 25 bp, Homo sapien
cgggccttccagaacgtgtcactga

SEQ ID NO: 1022755 - DNA, 25 bp, Homo sapien
ttgagggtggtgaagacccagtcct

SEQ ID NO: 1022756 - DNA, 25 bp, Homo sapien
gtgaagacccagtccttggcgaggc

SEQ ID NO: 1022757 - DNA, 25 bp, Homo sapien
cagactggagggcacagtggacgca

SEQ ID NO: 1022758 - DNA, 25 bp, Homo sapien
ccagactggagggcacagtggacgc

SEQ ID NO: 1022759 - DNA, 25 bp, Homo sapien
agactggagggcacagtggacgcac

SEQ ID NO: 1022760 - DNA, 25 bp, Homo sapien
gctgtcactgaagccgagctgtccc

SEQ ID NO: 1022761 - DNA, 25 bp, Homo sapien
tttggttccacacggtcaggtcaca

SEQ ID NO: 1022762 - DNA, 25 bp, Homo sapien
cacgccacggacatctgtgtgcctg

SEQ ID NO: 1022763 - DNA, 25 bp, Homo sapien
aggcactgccagctaagtgagcaga

SEQ ID NO: 1022764 - DNA, 25 bp, Homo sapien
ctggcccgggggctgctgttggccc

SEQ ID NO: 1022765 - DNA, 25 bp, Homo sapien
tggcccgggggctgctgttggccct

SEQ ID NO: 1022766 - DNA, 25 bp, Homo sapien
ggcccgggggctgctgttggccctg

SEQ ID NO: 1022767 - DNA, 25 bp, Homo sapien
gcccgggggctgctgttggccctgc

SEQ ID NO: 1022768 - DNA, 25 bp, Homo sapien
gtccgggcctgcacgggcagctgct

SEQ ID NO: 1022769 - DNA, 25 bp, Homo sapien
ctagggagagtccgggcctgcacgg

SEQ ID NO: 1022770 - DNA, 25 bp, Homo sapien
gagagtccgggcctgcacgggcagc

SEQ ID NO: 1022771 - DNA, 25 bp, Homo sapien
gagtccgggcctgcacgggcagctg

SEQ ID NO: 1022772 - DNA, 25 bp, Homo sapien
ggctgtttgaagtaccccacaggta

SEQ ID NO: 1022773 - DNA, 25 bp, Homo sapien
cctgtgggtgaggaaggaccatccc

SEQ ID NO: 1022774 - DNA, 25 bp, Homo sapien
gctcaagggcctttgctgctagggc

SEQ ID NO: 1022775 - DNA, 25 bp, Homo sapien
aattaggacactccaccgcacatgg

SEQ ID NO: 1022776 - DNA, 25 bp, Homo sapien
tttcactctgctggatttggcaatt

SEQ ID NO: 1022777 - DNA, 25 bp, Homo sapien
tcccaaagtgcaatggatttttatt

SEQ ID NO: 1022778 - DNA, 25 bp, Homo sapien
aagaaacataagtgtaattttcact

SEQ ID NO: 1022779 - DNA, 25 bp, Homo sapien
tgattcgcttgcctcagcatcttga

SEQ ID NO: 1022780 - DNA, 25 bp, Homo sapien
ctacactcataccaactggagtgtt

SEQ ID NO: 1022781 - DNA, 25 bp, Homo sapien
tacactgatatgaacaactggagtg

SEQ ID NO: 1022782 - DNA, 25 bp, Homo sapien
tgtctacactgatatgaacaactgg

SEQ ID NO: 1022783 - DNA, 25 bp, Homo sapien
ggagtgtctacactgatatgaacaa

SEQ ID NO: 1022784 - DNA, 25 bp, Homo sapien
agcctcacaggttcacagccagaaa

SEQ ID NO: 1022785 - DNA, 25 bp, Homo sapien
tgcccacacgttcgtgcactcagcc

SEQ ID NO: 1022786 - DNA, 25 bp, Homo sapien
actcaacaaactcgtgcagctcctg

SEQ ID NO: 1022787 - DNA, 25 bp, Homo sapien
cacagccagaaactcactcaacaaa

SEQ ID NO: 1022788 - DNA, 25 bp, Homo sapien
ctgatcacaccccaggtctgaacag

SEQ ID NO: 1022789 - DNA, 25 bp, Homo sapien
tgatcacaccccaggtctgaacagc

SEQ ID NO: 1022790 - DNA, 25 bp, Homo sapien
ctgcggcccgtaggccctgatcaca

SEQ ID NO: 1022791 - DNA, 25 bp, Homo sapien
aggcatcctggctgcggcccgtagg

SEQ ID NO: 1022792 - DNA, 25 bp, Homo sapien
ccagcttgggcttggcggccagaaa

SEQ ID NO: 1022793 - DNA, 25 bp, Homo sapien
aatcaggaagtcacagccaatgagg

SEQ ID NO: 1022794 - DNA, 25 bp, Homo sapien
agttgtcatcaatcaggaagtcaca

SEQ ID NO: 1022795 - DNA, 25 bp, Homo sapien
caatgaggtcaaagtaacccagctt

SEQ ID NO: 1022796 - DNA, 25 bp, Homo sapien
catctgtctactgtgccccccgccg

SEQ ID NO: 1022797 - DNA, 25 bp, Homo sapien
gcatctgtctactgtgccccccgcc

SEQ ID NO: 1022798 - DNA, 25 bp, Homo sapien
cctgcctccttgcatctgtctactg

SEQ ID NO: 1022799 - DNA, 25 bp, Homo sapien
gcctccttgcatctgtctactgtgc

SEQ ID NO: 1022800 - DNA, 25 bp, Homo sapien
cagggtctcgatgaccacacctggg

SEQ ID NO: 1022801 - DNA, 25 bp, Homo sapien
tcaggacctcgcagttggtgtgcag

SEQ ID NO: 1022802 - DNA, 25 bp, Homo sapien
tctcgatgaccacacctgggatgac

SEQ ID NO: 1022803 - DNA, 25 bp, Homo sapien
cagggctgggttagaattcatctcc

SEQ ID NO: 1022804 - DNA, 25 bp, Homo sapien
gcaacatcttctggccgcgcaggct

SEQ ID NO: 1022805 - DNA, 25 bp, Homo sapien
cgttgtgcaggagcacgaagcggcg

SEQ ID NO: 1022806 - DNA, 25 bp, Homo sapien
acgaagcggcgctgggacagcagag

SEQ ID NO: 1022807 - DNA, 25 bp, Homo sapien
ctcttccggaaggtctcgagcacca

SEQ ID NO: 1022808 - DNA, 25 bp, Homo sapien
gacgctgcggcaccaagggaggtgg

SEQ ID NO: 1022809 - DNA, 25 bp, Homo sapien
gggctttataggtccctgagggcag

SEQ ID NO: 1022810 - DNA, 25 bp, Homo sapien
gggcatgcggcatgggtggcccgga

SEQ ID NO: 1022811 - DNA, 25 bp, Homo sapien
gggaaggctcttgcgccgggtgcct

SEQ ID NO: 1022812 - DNA, 25 bp, Homo sapien
ggagggaccggcgacttggccgtga

SEQ ID NO: 1022813 - DNA, 25 bp, Homo sapien
accggcgacttggccgtgaccgtgt

SEQ ID NO: 1022814 - DNA, 25 bp, Homo sapien
gagggaccggcgacttggccgtgac

SEQ ID NO: 1022815 - DNA, 25 bp, Homo sapien
gcaggaggagggaccggcgacttgg

SEQ ID NO: 1022816 - DNA, 25 bp, Homo sapien
ctgtccctgtggagcgcagggtggc

SEQ ID NO: 1022817 - DNA, 25 bp, Homo sapien
tggccagagaccacagccgacggtg

SEQ ID NO: 1022818 - DNA, 25 bp, Homo sapien
acagccgacggtgccttctagcagt

SEQ ID NO: 1022819 - DNA, 25 bp, Homo sapien
tgctgtccctgtggagcgcagggtg

SEQ ID NO: 1022820 - DNA, 25 bp, Homo sapien
tgggggtgtaaccacacgcgccaca

SEQ ID NO: 1022821 - DNA, 25 bp, Homo sapien
ggaggggagctggacggttccaatg

SEQ ID NO: 1022822 - DNA, 25 bp, Homo sapien
ggtgtaaccacacgcgccacaggga

SEQ ID NO: 1022823 - DNA, 25 bp, Homo sapien
ggagctggacggttccaatgtcacc

SEQ ID NO: 1022824 - DNA, 25 bp, Homo sapien
tctgctgacgtcgtggggcccctga

SEQ ID NO: 1022825 - DNA, 25 bp, Homo sapien
tgctgacgtcgtggggcccctgagc

SEQ ID NO: 1022826 - DNA, 25 bp, Homo sapien
ctgctgacgtcgtggggcccctgag

SEQ ID NO: 1022827 - DNA, 25 bp, Homo sapien
gcggcaaaggttccattgtcccctc

SEQ ID NO: 1022828 - DNA, 25 bp, Homo sapien
tcctcatgggttctggcggtgacac

SEQ ID NO: 1022829 - DNA, 25 bp, Homo sapien
tccattgtcccctcgggctcaggtg

SEQ ID NO: 1022830 - DNA, 25 bp, Homo sapien
tctggcggtgacacatccagtcagg

SEQ ID NO: 1022831 - DNA, 25 bp, Homo sapien
gccgttgttcctgggttctctggaa

SEQ ID NO: 1022832 - DNA, 25 bp, Homo sapien
tgaacttctcgtgtccccgaggagt

SEQ ID NO: 1022833 - DNA, 25 bp, Homo sapien
tccatgctgttgtgacctcgcagac

SEQ ID NO: 1022834 - DNA, 25 bp, Homo sapien
cctcgcagacgggtgcttacgggct

SEQ ID NO: 1022835 - DNA, 25 bp, Homo sapien
gggtccgaggtctctttagctgaaa

SEQ ID NO: 1022836 - DNA, 25 bp, Homo sapien
ggtctctttagctgaaacagacacg

SEQ ID NO: 1022837 - DNA, 25 bp, Homo sapien
gtccgaggtctctttagctgaaaca

SEQ ID NO: 1022838 - DNA, 25 bp, Homo sapien
ccgaggtctctttagctgaaacaga

SEQ ID NO: 1022839 - DNA, 25 bp, Homo sapien
ccatgaagaactctgttgaatggat

SEQ ID NO: 1022840 - DNA, 25 bp, Homo sapien
gacactccggctaccgtggctggtg

SEQ ID NO: 1022841 - DNA, 25 bp, Homo sapien
gaaacacatgaagcctcatggaagg

SEQ ID NO: 1022842 - DNA, 25 bp, Homo sapien
aacagcgcacgctgcccacggctgt

SEQ ID NO: 1022843 - DNA, 25 bp, Homo sapien
cccctgccggtgtcgtggaagtggg

SEQ ID NO: 1022844 - DNA, 25 bp, Homo sapien
aaatgcaaatatttgttgtgacaag

SEQ ID NO: 1022845 - DNA, 25 bp, Homo sapien
gcagctgccgctgagaaaatgcaaa

SEQ ID NO: 1022846 - DNA, 25 bp, Homo sapien
caggtcccgcagctgccgctgagaa

SEQ ID NO: 1022847 - DNA, 25 bp, Homo sapien
aaatatttgttgtgacaagaatcac

SEQ ID NO: 1022848 - DNA, 25 bp, Homo sapien
ccgaggaggtgctcaagtacagcga

SEQ ID NO: 1022849 - DNA, 25 bp, Homo sapien
agtacagcgagttcttcacgggcag

SEQ ID NO: 1022850 - DNA, 25 bp, Homo sapien
taaacttcgctggaaatgagtagcc

SEQ ID NO: 1022851 - DNA, 25 bp, Homo sapien
gaaatcgtggcatctcacttctgag

SEQ ID NO: 1022852 - DNA, 25 bp, Homo sapien
taagtcatccgcctactgcagtctc

SEQ ID NO: 1022853 - DNA, 25 bp, Homo sapien
attttttgtacggatagattctgcc

SEQ ID NO: 1022854 - DNA, 25 bp, Homo sapien
ctcttggacttaagtcatccgccta

SEQ ID NO: 1022855 - DNA, 25 bp, Homo sapien
cggatagattctgccgtgttggccg

SEQ ID NO: 1022856 - DNA, 25 bp, Homo sapien
tggacgcgtctgcacggcctgccaa

SEQ ID NO: 1022857 - DNA, 25 bp, Homo sapien
ctcgagagagagtagccaacaggga

SEQ ID NO: 1022858 - DNA, 25 bp, Homo sapien
gggcagtccttctgatggacgcgtc

SEQ ID NO: 1022859 - DNA, 25 bp, Homo sapien
gagatggacgggcacctcaatcgcg

SEQ ID NO: 1022860 - DNA, 25 bp, Homo sapien
gcttgtacccctcttggtttgtggc

SEQ ID NO: 1022861 - DNA, 25 bp, Homo sapien
gcagactgcactgacttcaggacca

SEQ ID NO: 1022862 - DNA, 25 bp, Homo sapien
ggaactcaggcttgtacccctcttg

SEQ ID NO: 1022863 - DNA, 25 bp, Homo sapien
cctcttggtttgtggcagactgcac

SEQ ID NO: 1022864 - DNA, 25 bp, Homo sapien
aggccgacgacgctggcctccccgg

SEQ ID NO: 1022865 - DNA, 25 bp, Homo sapien
gccggcacgtctggtctcctactgg

SEQ ID NO: 1022866 - DNA, 25 bp, Homo sapien
gccgccggcacgtctggtctcctac

SEQ ID NO: 1022867 - DNA, 25 bp, Homo sapien
gggcagggacaggccgacgacgctg

SEQ ID NO: 1022868 - DNA, 25 bp, Homo sapien
ttgggctggggcatcgtccgtccgc

SEQ ID NO: 1022869 - DNA, 25 bp, Homo sapien
ctggggcatcgtccgtccgctcggc

SEQ ID NO: 1022870 - DNA, 25 bp, Homo sapien
agccctggcgagactccgccgccac

SEQ ID NO: 1022871 - DNA, 25 bp, Homo sapien
ggctggggcatcgtccgtccgctcg

SEQ ID NO: 1022872 - DNA, 25 bp, Homo sapien
cgcgccgggccggcggcccaggccg

SEQ ID NO: 1022873 - DNA, 25 bp, Homo sapien
gcgcccgcgccgggccggcggccca

SEQ ID NO: 1022874 - DNA, 25 bp, Homo sapien
gccggcggcccaggccggactcgcg

SEQ ID NO: 1022875 - DNA, 25 bp, Homo sapien
ggccggcggcccaggccggactcgc

SEQ ID NO: 1022876 - DNA, 25 bp, Homo sapien
cacagcgccagcgtgcccaggccta

SEQ ID NO: 1022877 - DNA, 25 bp, Homo sapien
ggaggcgggctgcggcccgacatcg

SEQ ID NO: 1022878 - DNA, 25 bp, Homo sapien
gcgtgcccaggcctagcgccgcccg

SEQ ID NO: 1022879 - DNA, 25 bp, Homo sapien
ctgcggcccgacatcgccctggggt

SEQ ID NO: 1022880 - DNA, 25 bp, Homo sapien
gtgcccacggcaaagcgcgcccaca

SEQ ID NO: 1022881 - DNA, 25 bp, Homo sapien
aaagcgcgcccacacgtcgcccggg

SEQ ID NO: 1022882 - DNA, 25 bp, Homo sapien
cgcaagccacgtgctgcggatcacg

SEQ ID NO: 1022883 - DNA, 25 bp, Homo sapien
cacgtgctgcggatcacgctgcggc

SEQ ID NO: 1022884 - DNA, 25 bp, Homo sapien
agcaccttggccgtgaggttttcgt

SEQ ID NO: 1022885 - DNA, 25 bp, Homo sapien
tgaggttttcgtaggcgtcgcgcag

SEQ ID NO: 1022886 - DNA, 25 bp, Homo sapien
caccttggccgtgaggttttcgtag

SEQ ID NO: 1022887 - DNA, 25 bp, Homo sapien
agcaggtccccgtgccgcgcctgct

SEQ ID NO: 1022888 - DNA, 25 bp, Homo sapien
tccagccgcgcgaaggagtcgtcgt

SEQ ID NO: 1022889 - DNA, 25 bp, Homo sapien
agaagaagccccagtagaggcggcg

SEQ ID NO: 1022890 - DNA, 25 bp, Homo sapien
aggagtcgtcgtccgccttgagcac

SEQ ID NO: 1022891 - DNA, 25 bp, Homo sapien
ccgagaagaagccccagtagaggcg

SEQ ID NO: 1022892 - DNA, 25 bp, Homo sapien
ggctctgcttgtgcgtcaccaggta

SEQ ID NO: 1022893 - DNA, 25 bp, Homo sapien
gcaggtagtagtcgcagagttgcca

SEQ ID NO: 1022894 - DNA, 25 bp, Homo sapien
cagtcgtacacgtaggacaggcgca

SEQ ID NO: 1022895 - DNA, 25 bp, Homo sapien
caccaggtactggttgctgcagccg

SEQ ID NO: 1022896 - DNA, 25 bp, Homo sapien
gaaacgccactgataagagacacgg

SEQ ID NO: 1022897 - DNA, 25 bp, Homo sapien
tgcgtttaaacacgggcagcagcgg

SEQ ID NO: 1022898 - DNA, 25 bp, Homo sapien
ctttggcaaggaccgcagtgttcgc

SEQ ID NO: 1022899 - DNA, 25 bp, Homo sapien
tgttaaagtacgtgagagacgggcc

SEQ ID NO: 1022900 - DNA, 25 bp, Homo sapien
tccatggggttctcagcaagccctc

SEQ ID NO: 1022901 - DNA, 25 bp, Homo sapien
ttggttcgaatcccgctctccactg

SEQ ID NO: 1022902 - DNA, 25 bp, Homo sapien
ccatggggttctcagcaagccctct

SEQ ID NO: 1022903 - DNA, 25 bp, Homo sapien
gtccatggggttctcagcaagccct

SEQ ID NO: 1022904 - DNA, 25 bp, Homo sapien
tgtaggtcagaagtggttgcaaact

SEQ ID NO: 1022905 - DNA, 25 bp, Homo sapien
tgcaaactggatttttagactcttc

SEQ ID NO: 1022906 - DNA, 25 bp, Homo sapien
tccacagcggccaattcttcagagc

SEQ ID NO: 1022907 - DNA, 25 bp, Homo sapien
cttcagagccacaaagaactgggcg

SEQ ID NO: 1022908 - DNA, 25 bp, Homo sapien
agtgttccgagctgtccatcagggc

SEQ ID NO: 1022909 - DNA, 25 bp, Homo sapien
ggtctggagtgttccgagctgtcca

SEQ ID NO: 1022910 - DNA, 25 bp, Homo sapien
ccgagctgtccatcagggccggcat

SEQ ID NO: 1022911 - DNA, 25 bp, Homo sapien
ctggagtgttccgagctgtccatca

SEQ ID NO: 1022912 - DNA, 25 bp, Homo sapien
tccctggtgggttcccaagcgtcat

SEQ ID NO: 1022913 - DNA, 25 bp, Homo sapien
gtccctggtgggttcccaagcgtca

SEQ ID NO: 1022914 - DNA, 25 bp, Homo sapien
tgtgggcgctgtgccgtgtccccag

SEQ ID NO: 1022915 - DNA, 25 bp, Homo sapien
ctccaccaccttcacgagcggacac

SEQ ID NO: 1022916 - DNA, 25 bp, Homo sapien
tgtgtgggcgctgtgccgtgtcccc

SEQ ID NO: 1022917 - DNA, 25 bp, Homo sapien
accaccttcacgagcggacacgggg

SEQ ID NO: 1022918 - DNA, 25 bp, Homo sapien
ggcagggcaccgtggtcctttgcca

SEQ ID NO: 1022919 - DNA, 25 bp, Homo sapien
cagggcaccgtggtcctttgccatt

SEQ ID NO: 1022920 - DNA, 25 bp, Homo sapien
acagcagagcactccgggtctgagg

SEQ ID NO: 1022921 - DNA, 25 bp, Homo sapien
gagcactccgggtctgagggagctg

SEQ ID NO: 1022922 - DNA, 25 bp, Homo sapien
ccccttaaaagttgatattctgcag

SEQ ID NO: 1022923 - DNA, 25 bp, Homo sapien
ctctgtgagcgcatgcccaggcctg

SEQ ID NO: 1022924 - DNA, 25 bp, Homo sapien
caggaaagaagaggcgtttcctgtg

SEQ ID NO: 1022925 - DNA, 25 bp, Homo sapien
cctgtgttctggcaacctcgagctt

SEQ ID NO: 1022926 - DNA, 25 bp, Homo sapien
acagggaatcgcgtcgctggagcca

SEQ ID NO: 1022927 - DNA, 25 bp, Homo sapien
ggtccccacagggaatcgcgtcgct

SEQ ID NO: 1022928 - DNA, 25 bp, Homo sapien
cagggaatcgcgtcgctggagccat

SEQ ID NO: 1022929 - DNA, 25 bp, Homo sapien
cccacagggaatcgcgtcgctggag

SEQ ID NO: 1022930 - DNA, 25 bp, Homo sapien
gtgagacaagcccagcccgcacgcg

SEQ ID NO: 1022931 - DNA, 25 bp, Homo sapien
aggcgggcgtgagacaagcccagcc

SEQ ID NO: 1022932 - DNA, 25 bp, Homo sapien
ccggaggcgggcgtgagacaagccc

SEQ ID NO: 1022933 - DNA, 25 bp, Homo sapien
ctgtccggaggcgggcgtgagacaa

SEQ ID NO: 1022934 - DNA, 25 bp, Homo sapien
tctgttccgtgacttcgcctgggtg

SEQ ID NO: 1022935 - DNA, 25 bp, Homo sapien
taccgcaggtgcatcgcgtcgaggt

SEQ ID NO: 1022936 - DNA, 25 bp, Homo sapien
ccgggtgttcgctgtccacggaaca

SEQ ID NO: 1022937 - DNA, 25 bp, Homo sapien
cgctgtccacggaacatggcagagg

SEQ ID NO: 1022938 - DNA, 25 bp, Homo sapien
cacaagtcgcccttgactgcggcgg

SEQ ID NO: 1022939 - DNA, 25 bp, Homo sapien
tctctgaattccttatgtccggtgg

SEQ ID NO: 1022940 - DNA, 25 bp, Homo sapien
ccttgggtacctgcagagccttttc

SEQ ID NO: 1022941 - DNA, 25 bp, Homo sapien
tgtccggtgggccagaagcccgtcc

SEQ ID NO: 1022942 - DNA, 25 bp, Homo sapien
tccagaacgggattcagctgctcaa

SEQ ID NO: 1022943 - DNA, 25 bp, Homo sapien
gcagcctttgcttacacggtcaagt

SEQ ID NO: 1022944 - DNA, 25 bp, Homo sapien
ggcgccctggcgaacttgtttgtga

SEQ ID NO: 1022945 - DNA, 25 bp, Homo sapien
aaatgcaaacttgctgccgaccgcg

SEQ ID NO: 1022946 - DNA, 25 bp, Homo sapien
gcaacacgaagactgcagcccttga

SEQ ID NO: 1022947 - DNA, 25 bp, Homo sapien
cactgtcgtggagactgctttgctc

SEQ ID NO: 1022948 - DNA, 25 bp, Homo sapien
ccttcctagaaaagacaactggcag

SEQ ID NO: 1022949 - DNA, 25 bp, Homo sapien
aaggcggtaccagttgcacagacgg

SEQ ID NO: 1022950 - DNA, 25 bp, Homo sapien
tcacggatttccacccggacacgtg

SEQ ID NO: 1022951 - DNA, 25 bp, Homo sapien
ggctcctgagcttcatggtggagaa

SEQ ID NO: 1022952 - DNA, 25 bp, Homo sapien
caccctgggcagtatagagacgtcg

SEQ ID NO: 1022953 - DNA, 25 bp, Homo sapien
acgtggaacccggcctggtctgtct

SEQ ID NO: 1022954 - DNA, 25 bp, Homo sapien
tgatcactcccaacgggaggtttaa

SEQ ID NO: 1022955 - DNA, 25 bp, Homo sapien
gtggctattatcatggaaaactaat

SEQ ID NO: 1022956 - DNA, 25 bp, Homo sapien
aacctcccagtatctatatgatcac

SEQ ID NO: 1022957 - DNA, 25 bp, Homo sapien
tatctatatgatcactcccaacggg

SEQ ID NO: 1022958 - DNA, 25 bp, Homo sapien
tatgtcgtccgaggcccagagatga

SEQ ID NO: 1022959 - DNA, 25 bp, Homo sapien
ggcccagagatgaccccttatgaag

SEQ ID NO: 1022960 - DNA, 25 bp, Homo sapien
ctatgtcgtccgaggcccagagatg

SEQ ID NO: 1022961 - DNA, 25 bp, Homo sapien
gtccgaggcccagagatgacccctt

SEQ ID NO: 1022962 - DNA, 25 bp, Homo sapien
gactaccttcgcattaagaaagacc

SEQ ID NO: 1022963 - DNA, 25 bp, Homo sapien
ggtgccttacatctgtgccgagccc

SEQ ID NO: 1022964 - DNA, 25 bp, Homo sapien
aagaaagacccggtgccttacatct

SEQ ID NO: 1022965 - DNA, 25 bp, Homo sapien
agtaagagggctccgaccacggcaa

SEQ ID NO: 1022966 - DNA, 25 bp, Homo sapien
tccttaggcagaggaacccgctggg

SEQ ID NO: 1022967 - DNA, 25 bp, Homo sapien
aggcaggactgtaaccccatccctg

SEQ ID NO: 1022968 - DNA, 25 bp, Homo sapien
gcctgaggggagatccctggcccat

SEQ ID NO: 1022969 - DNA, 25 bp, Homo sapien
aggggagatccctggcccattggct

SEQ ID NO: 1022970 - DNA, 25 bp, Homo sapien
gttagcttcagggtgagtgtcgaaa

SEQ ID NO: 1022971 - DNA, 25 bp, Homo sapien
gtgagtgtcgaaaggacagcctgtg

SEQ ID NO: 1022972 - DNA, 25 bp, Homo sapien
cctgtgtggcggtgctgcttggggt

SEQ ID NO: 1022973 - DNA, 25 bp, Homo sapien
acttgaattgtccagtgaattattt

SEQ ID NO: 1022974 - DNA, 25 bp, Homo sapien
gacgcttctccgttcgcgcccgccg

SEQ ID NO: 1022975 - DNA, 25 bp, Homo sapien
tgcgcgacgcttctccgttcgcgcc

SEQ ID NO: 1022976 - DNA, 25 bp, Homo sapien
ccctgcgcgacgcttctccgttcgc

SEQ ID NO: 1022977 - DNA, 25 bp, Homo sapien
cgcgacgcttctccgttcgcgcccg

SEQ ID NO: 1022978 - DNA, 25 bp, Homo sapien
ctcgactacggcgagcctgagcgcg

SEQ ID NO: 1022979 - DNA, 25 bp, Homo sapien
cgcagcgacagggagaggtgagcgc

SEQ ID NO: 1022980 - DNA, 25 bp, Homo sapien
ctgcggcgggttcggtgggcccaat

SEQ ID NO: 1022981 - DNA, 25 bp, Homo sapien
aagcagaagctaggctggttccgcc

SEQ ID NO: 1022982 - DNA, 25 bp, Homo sapien
gcgtgggagcggaggacaaggcggg

SEQ ID NO: 1022983 - DNA, 25 bp, Homo sapien
aaagagatgccacgcgtgtcactct

SEQ ID NO: 1022984 - DNA, 25 bp, Homo sapien
atgccacgcgtgtcactctcgggtc

SEQ ID NO: 1022985 - DNA, 25 bp, Homo sapien
ccctgaacgagagagctctgagctc

SEQ ID NO: 1022986 - DNA, 25 bp, Homo sapien
ctctcccaatgtgtctggggtcaga

SEQ ID NO: 1022987 - DNA, 25 bp, Homo sapien
tggagaggacgcagcgccccgcgct

SEQ ID NO: 1022988 - DNA, 25 bp, Homo sapien
gtggagaggacgcagcgccccgcgc

SEQ ID NO: 1022989 - DNA, 25 bp, Homo sapien
tcccaatgtgtctggggtcagagag

SEQ ID NO: 1022990 - DNA, 25 bp, Homo sapien
ctgagatgttctccgaaggtggagc

SEQ ID NO: 1022991 - DNA, 25 bp, Homo sapien
agacccaccaaggtgtcccagaggg

SEQ ID NO: 1022992 - DNA, 25 bp, Homo sapien
gcgggactgaccctcaatattcagc

SEQ ID NO: 1022993 - DNA, 25 bp, Homo sapien
tgtggttgttcctgagaggcagtca

SEQ ID NO: 1022994 - DNA, 25 bp, Homo sapien
tgtgctggtgcctgtatctgcggcc

SEQ ID NO: 1022995 - DNA, 25 bp, Homo sapien
tatctgcggccggtgtggcttccct

SEQ ID NO: 1022996 - DNA, 25 bp, Homo sapien
ctcacataactttccatgctgtgaa

SEQ ID NO: 1022997 - DNA, 25 bp, Homo sapien
agccgtgagtgtgcatgcgagtgga

SEQ ID NO: 1022998 - DNA, 25 bp, Homo sapien
ggcaagacgtgctggccacacctgt

SEQ ID NO: 1022999 - DNA, 25 bp, Homo sapien
ttgagcctcgctgcagtcttcccag

SEQ ID NO: 1023000 - DNA, 25 bp, Homo sapien
ctgagttgagcctcgctgcagtctt

SEQ ID NO: 1023001 - DNA, 25 bp, Homo sapien
cccacaggtgtgctgtcatcgcaca

SEQ ID NO: 1023002 - DNA, 25 bp, Homo sapien
gcttgtgccgatcccactggccaag

SEQ ID NO: 1023003 - DNA, 25 bp, Homo sapien
catcggctctatggctagaggcctg

SEQ ID NO: 1023004 - DNA, 25 bp, Homo sapien
ctagctgcttgtgccgatcccactg

SEQ ID NO: 1023005 - DNA, 25 bp, Homo sapien
actggccaaggccatcggctctatg

SEQ ID NO: 1023006 - DNA, 25 bp, Homo sapien
tctctgaggcttgtgacctggtggc

SEQ ID NO: 1023007 - DNA, 25 bp, Homo sapien
gataagaccttcatctgcacaacgc

SEQ ID NO: 1023008 - DNA, 25 bp, Homo sapien
catttatagttgattctctctgagg

SEQ ID NO: 1023009 - DNA, 25 bp, Homo sapien
tgcacaacgccatactgtaaccaga

SEQ ID NO: 1023010 - DNA, 25 bp, Homo sapien
taaggtgcgtgtgggctgccttcta

SEQ ID NO: 1023011 - DNA, 25 bp, Homo sapien
ttctggtgcaatagacaggcagccc

SEQ ID NO: 1023012 - DNA, 25 bp, Homo sapien
gatggacccctggtcttagccatgg

SEQ ID NO: 1023013 - DNA, 25 bp, Homo sapien
tcagccctgggacggttctggtgca

SEQ ID NO: 1023014 - DNA, 25 bp, Homo sapien
gatggcaggcgcctggcatctgtgg

SEQ ID NO: 1023015 - DNA, 25 bp, Homo sapien
ctcctatcccagagccccgtttcct

SEQ ID NO: 1023016 - DNA, 25 bp, Homo sapien
tggcaggcgcctggcatctgtggga

SEQ ID NO: 1023017 - DNA, 25 bp, Homo sapien
aggcgcctggcatctgtgggacccc

SEQ ID NO: 1023018 - DNA, 25 bp, Homo sapien
gggccgctgaggtggccgggccaca

SEQ ID NO: 1023019 - DNA, 25 bp, Homo sapien
gagcggtgttgtcttctgtgacagc

SEQ ID NO: 1023020 - DNA, 25 bp, Homo sapien
ccacaggtaacgagggagcggtgtt

SEQ ID NO: 1023021 - DNA, 25 bp, Homo sapien
tccttgggccgctgaggtggccggg

SEQ ID NO: 1023022 - DNA, 25 bp, Homo sapien
ggccaggccccattgaccgagcatg

SEQ ID NO: 1023023 - DNA, 25 bp, Homo sapien
aagacggccaggccccattgaccga

SEQ ID NO: 1023024 - DNA, 25 bp, Homo sapien
cattgaccgagcatggctgtgagct

SEQ ID NO: 1023025 - DNA, 25 bp, Homo sapien
ctggctccctttgggcccatgcctc

SEQ ID NO: 1023026 - DNA, 25 bp, Homo sapien
ggcgaacccagctcccggcatgtgg

SEQ ID NO: 1023027 - DNA, 25 bp, Homo sapien
gtggggcgaacccagctcccggcat

SEQ ID NO: 1023028 - DNA, 25 bp, Homo sapien
ggggcgaacccagctcccggcatgt

SEQ ID NO: 1023029 - DNA, 25 bp, Homo sapien
gcgaacccagctcccggcatgtggg

SEQ ID NO: 1023030 - DNA, 25 bp, Homo sapien
agccacagagcacatgtccagcact

SEQ ID NO: 1023031 - DNA, 25 bp, Homo sapien
gccacagagcacatgtccagcactg

SEQ ID NO: 1023032 - DNA, 25 bp, Homo sapien
cctgtatcgggccagagagtaggca

SEQ ID NO: 1023033 - DNA, 25 bp, Homo sapien
tgtcccacacccctgtatcgggcca

SEQ ID NO: 1023034 - DNA, 25 bp, Homo sapien
gggacaaggtcctaggtgcttgcca

SEQ ID NO: 1023035 - DNA, 25 bp, Homo sapien
ggcacacatggcccgggcggctact

SEQ ID NO: 1023036 - DNA, 25 bp, Homo sapien
cccgggcggctacttggcaggcggg

SEQ ID NO: 1023037 - DNA, 25 bp, Homo sapien
gacaaggtcctaggtgcttgccaga

SEQ ID NO: 1023038 - DNA, 25 bp, Homo sapien
tctgggcagctttgtgcgtgggccg

SEQ ID NO: 1023039 - DNA, 25 bp, Homo sapien
atctgggcagctttgtgcgtgggcc

SEQ ID NO: 1023040 - DNA, 25 bp, Homo sapien
agctgatttccttgagtgccagatg

SEQ ID NO: 1023041 - DNA, 25 bp, Homo sapien
gtgcctctccaagctcgcggcaggg

SEQ ID NO: 1023042 - DNA, 25 bp, Homo sapien
ctgatttccttgagtgccagatggg

SEQ ID NO: 1023043 - DNA, 25 bp, Homo sapien
gggtgcctctccaagctcgcggcag

SEQ ID NO: 1023044 - DNA, 25 bp, Homo sapien
ctgtgtggccttcccgagttactca

SEQ ID NO: 1023045 - DNA, 25 bp, Homo sapien
cacagcttcgtcactggctgtgtgg

SEQ ID NO: 1023046 - DNA, 25 bp, Homo sapien
ggctgtgtggccttcccgagttact

SEQ ID NO: 1023047 - DNA, 25 bp, Homo sapien
gtgaatcacagcttcgtcactggct

SEQ ID NO: 1023048 - DNA, 25 bp, Homo sapien
gagaggaaagccatgctggagtcac

SEQ ID NO: 1023049 - DNA, 25 bp, Homo sapien
gaggaaagccatgctggagtcaccc

SEQ ID NO: 1023050 - DNA, 25 bp, Homo sapien
ggaaagccatgctggagtcacccag

SEQ ID NO: 1023051 - DNA, 25 bp, Homo sapien
ggagaggaaagccatgctggagtca

SEQ ID NO: 1023052 - DNA, 25 bp, Homo sapien
ctgccggctctggaaggaagcagct

SEQ ID NO: 1023053 - DNA, 25 bp, Homo sapien
ggaagcagctgccaccggtgacgtc

SEQ ID NO: 1023054 - DNA, 25 bp, Homo sapien
ggaaggaagcagctgccaccggtga

SEQ ID NO: 1023055 - DNA, 25 bp, Homo sapien
aaggaagcagctgccaccggtgacg

SEQ ID NO: 1023056 - DNA, 25 bp, Homo sapien
ggcagctggcagctctgaagcagga

SEQ ID NO: 1023057 - DNA, 25 bp, Homo sapien
tggcagctctgaagcaggatggagc

SEQ ID NO: 1023058 - DNA, 25 bp, Homo sapien
tgcgggggcagctggcagctctgaa

SEQ ID NO: 1023059 - DNA, 25 bp, Homo sapien
cagctggcagctctgaagcaggatg

SEQ ID NO: 1023060 - DNA, 25 bp, Homo sapien
tcccgtccatgcttcggtgctcagc

SEQ ID NO: 1023061 - DNA, 25 bp, Homo sapien
gagagcccccccgtgtggctgcttc

SEQ ID NO: 1023062 - DNA, 25 bp, Homo sapien
attctcccgtccatgcttcggtgct

SEQ ID NO: 1023063 - DNA, 25 bp, Homo sapien
cgtccatgcttcggtgctcagccat

SEQ ID NO: 1023064 - DNA, 25 bp, Homo sapien
gatgacctgccccattgccaccatg

SEQ ID NO: 1023065 - DNA, 25 bp, Homo sapien
actatgtacccgcaatgggacacag

SEQ ID NO: 1023066 - DNA, 25 bp, Homo sapien
acccgcaatgggacacagccttctt

SEQ ID NO: 1023067 - DNA, 25 bp, Homo sapien
acacactatgtacccgcaatgggac

SEQ ID NO: 1023068 - DNA, 25 bp, Homo sapien
gtggccccattgagctgagtaccgg

SEQ ID NO: 1023069 - DNA, 25 bp, Homo sapien
acaccgctcggcactgtggctcggg

SEQ ID NO: 1023070 - DNA, 25 bp, Homo sapien
tccaggaagcgtctggcctggacac

SEQ ID NO: 1023071 - DNA, 25 bp, Homo sapien
gcctggacaccgctcggcactgtgg

SEQ ID NO: 1023072 - DNA, 25 bp, Homo sapien
cctctggggagccacaggcccaggc

SEQ ID NO: 1023073 - DNA, 25 bp, Homo sapien
tctggggagccacaggcccaggcga

SEQ ID NO: 1023074 - DNA, 25 bp, Homo sapien
ctggggagccacaggcccaggcgat

SEQ ID NO: 1023075 - DNA, 25 bp, Homo sapien
ggcctctggggagccacaggcccag

SEQ ID NO: 1023076 - DNA, 25 bp, Homo sapien
gttgtgctgagtgggtctgtgctgc

SEQ ID NO: 1023077 - DNA, 25 bp, Homo sapien
agcgttgtgctgagtgggtctgtgc

SEQ ID NO: 1023078 - DNA, 25 bp, Homo sapien
ctgtttgcaggcagcgttgtgctga

SEQ ID NO: 1023079 - DNA, 25 bp, Homo sapien
gcagcgttgtgctgagtgggtctgt

SEQ ID NO: 1023080 - DNA, 25 bp, Homo sapien
ggcagcaggactcagagaacagggt

SEQ ID NO: 1023081 - DNA, 25 bp, Homo sapien
gggcagcaggactcagagaacaggg

SEQ ID NO: 1023082 - DNA, 25 bp, Homo sapien
ctggggcagcaggactcagagaaca

SEQ ID NO: 1023083 - DNA, 25 bp, Homo sapien
tggggcagcaggactcagagaacag

SEQ ID NO: 1023084 - DNA, 25 bp, Homo sapien
ggatacacccgtccctgacacgtct

SEQ ID NO: 1023085 - DNA, 25 bp, Homo sapien
cagggtgctctgacactgcgccctt

SEQ ID NO: 1023086 - DNA, 25 bp, Homo sapien
tgctcggtcgctcggacaagcccct

SEQ ID NO: 1023087 - DNA, 25 bp, Homo sapien
cctgacacgtctcagtgtagccttg

SEQ ID NO: 1023088 - DNA, 25 bp, Homo sapien
tctgtcagccaccagtgccccgccc

SEQ ID NO: 1023089 - DNA, 25 bp, Homo sapien
atgtctgtcagccaccagtgccccg

SEQ ID NO: 1023090 - DNA, 25 bp, Homo sapien
gtcagccaccagtgccccgccctac

SEQ ID NO: 1023091 - DNA, 25 bp, Homo sapien
tcatgtctgtcagccaccagtgccc

SEQ ID NO: 1023092 - DNA, 25 bp, Homo sapien
cagggcccggcctgcacccactcag

SEQ ID NO: 1023093 - DNA, 25 bp, Homo sapien
tgcacccactcaggcctccctaccc

SEQ ID NO: 1023094 - DNA, 25 bp, Homo sapien
tgtgtgcagagtggcctcagcaggg

SEQ ID NO: 1023095 - DNA, 25 bp, Homo sapien
ctgtgtgcagagtggcctcagcagg

SEQ ID NO: 1023096 - DNA, 25 bp, Homo sapien
ggcctggggggcgtctgggctgcag

SEQ ID NO: 1023097 - DNA, 25 bp, Homo sapien
ctgatggtggccccggcctgggggg

SEQ ID NO: 1023098 - DNA, 25 bp, Homo sapien
tgatggtggccccggcctggggggc

SEQ ID NO: 1023099 - DNA, 25 bp, Homo sapien
cccggcctggggggcgtctgggctg

SEQ ID NO: 1023100 - DNA, 25 bp, Homo sapien
ctcccggaacgaggcgggcagctcc

SEQ ID NO: 1023101 - DNA, 25 bp, Homo sapien
atggtggcattggtgcagaagaagg

SEQ ID NO: 1023102 - DNA, 25 bp, Homo sapien
ggcggatggcgccgtggatggtggc

SEQ ID NO: 1023103 - DNA, 25 bp, Homo sapien
gatggcgccgtggatggtggcattg

SEQ ID NO: 1023104 - DNA, 25 bp, Homo sapien
cggatggcgccgtggatggtggcat

SEQ ID NO: 1023105 - DNA, 25 bp, Homo sapien
ccaggacgtcgtcttgaggcggttc

SEQ ID NO: 1023106 - DNA, 25 bp, Homo sapien
tgggttcccgtcacacagggtgacc

SEQ ID NO: 1023107 - DNA, 25 bp, Homo sapien
tgacgctcaaagaggagccccagct

SEQ ID NO: 1023108 - DNA, 25 bp, Homo sapien
agtgcacagagacggccatgaggac

SEQ ID NO: 1023109 - DNA, 25 bp, Homo sapien
ggtggcattgaccacacagagcccc

SEQ ID NO: 1023110 - DNA, 25 bp, Homo sapien
aggtttgggaggtcacagtgaccag

SEQ ID NO: 1023111 - DNA, 25 bp, Homo sapien
ggcttcggttagagacggtcacagg

SEQ ID NO: 1023112 - DNA, 25 bp, Homo sapien
tcacagtgaccaggagggtggcatt

SEQ ID NO: 1023113 - DNA, 25 bp, Homo sapien
cccctccttggcagtccgagaggtc

SEQ ID NO: 1023114 - DNA, 25 bp, Homo sapien
agccccctccttggcagtccgagag

SEQ ID NO: 1023115 - DNA, 25 bp, Homo sapien
actgagccccctccttggcagtccg

SEQ ID NO: 1023116 - DNA, 25 bp, Homo sapien
ctccttggcagtccgagaggtccgg

SEQ ID NO: 1023117 - DNA, 25 bp, Homo sapien
cagtgcctcccctactcgggacgcc

SEQ ID NO: 1023118 - DNA, 25 bp, Homo sapien
tgcctcccctactcgggacgcccag

SEQ ID NO: 1023119 - DNA, 25 bp, Homo sapien
cagtgtgtgctgtcgggacagcagt

SEQ ID NO: 1023120 - DNA, 25 bp, Homo sapien
cagcagtgcctcccctactcgggac

SEQ ID NO: 1023121 - DNA, 25 bp, Homo sapien
agcctctgcagacggatctcccggt

SEQ ID NO: 1023122 - DNA, 25 bp, Homo sapien
gggacagtggcggagagggcggctc

SEQ ID NO: 1023123 - DNA, 25 bp, Homo sapien
tgacgttgtacagggagtcaatgtt

SEQ ID NO: 1023124 - DNA, 25 bp, Homo sapien
ctccagatggcggaggaccggactc

SEQ ID NO: 1023125 - DNA, 25 bp, Homo sapien
tccaggccatcgtaactgcaggaga

SEQ ID NO: 1023126 - DNA, 25 bp, Homo sapien
catagtggaagtggtaccagtcctg

SEQ ID NO: 1023127 - DNA, 25 bp, Homo sapien
tagcctcggtaaaagcagtcgccgc

SEQ ID NO: 1023128 - DNA, 25 bp, Homo sapien
tggacagccgccacgcctgacgtgt

SEQ ID NO: 1023129 - DNA, 25 bp, Homo sapien
cggaaagttcctccggccagccttg

SEQ ID NO: 1023130 - DNA, 25 bp, Homo sapien
ctgcggaaagttcctccggccagcc

SEQ ID NO: 1023131 - DNA, 25 bp, Homo sapien
gttcctccggccagccttgggtggc

SEQ ID NO: 1023132 - DNA, 25 bp, Homo sapien
ttgaatgtcggctgcccgcgcccgt

SEQ ID NO: 1023133 - DNA, 25 bp, Homo sapien
agacgccatcgaccgtgtagcagct

SEQ ID NO: 1023134 - DNA, 25 bp, Homo sapien
atcgaccgtgtagcagctgccgtag

SEQ ID NO: 1023135 - DNA, 25 bp, Homo sapien
cgctgagctgtccagacgccatcga

SEQ ID NO: 1023136 - DNA, 25 bp, Homo sapien
tgtccagacgccatcgaccgtgtag

SEQ ID NO: 1023137 - DNA, 25 bp, Homo sapien
gggctggtgtgaggccacctgacct

SEQ ID NO: 1023138 - DNA, 25 bp, Homo sapien
ggtgtgaggccacctgacctgcacc

SEQ ID NO: 1023139 - DNA, 25 bp, Homo sapien
caagggctggtgtgaggccacctga

SEQ ID NO: 1023140 - DNA, 25 bp, Homo sapien
ctggtgtgaggccacctgacctgca

SEQ ID NO: 1023141 - DNA, 25 bp, Homo sapien
gaagggcgtgtggttacggccgtga

SEQ ID NO: 1023142 - DNA, 25 bp, Homo sapien
catgaccctgatgccggccagcgtg

SEQ ID NO: 1023143 - DNA, 25 bp, Homo sapien
acggccgtgaaccatgaccctgatg

SEQ ID NO: 1023144 - DNA, 25 bp, Homo sapien
atggtggcctccgtccctggccgga

SEQ ID NO: 1023145 - DNA, 25 bp, Homo sapien
aggtgttgtgtagcagctccacctc

SEQ ID NO: 1023146 - DNA, 25 bp, Homo sapien
taggggctcccgagccggtgcacct

SEQ ID NO: 1023147 - DNA, 25 bp, Homo sapien
ggtgtaggaggtgttgtgtagcagc

SEQ ID NO: 1023148 - DNA, 25 bp, Homo sapien
taggaggtgttgtgtagcagctcca

SEQ ID NO: 1023149 - DNA, 25 bp, Homo sapien
gtggaggtagtagccacaggagcag

SEQ ID NO: 1023150 - DNA, 25 bp, Homo sapien
gggcagagctgcagtactcagcccc

SEQ ID NO: 1023151 - DNA, 25 bp, Homo sapien
gccgggcagagctgcagtactcagc

SEQ ID NO: 1023152 - DNA, 25 bp, Homo sapien
gaggtagtagccacaggagcaggtc

SEQ ID NO: 1023153 - DNA, 25 bp, Homo sapien
ctggtagaggcggtagaagcagtgt

SEQ ID NO: 1023154 - DNA, 25 bp, Homo sapien
tggtagaggcggtagaagcagtgtc

SEQ ID NO: 1023155 - DNA, 25 bp, Homo sapien
caggggagccggtgggtctccaggt

SEQ ID NO: 1023156 - DNA, 25 bp, Homo sapien
gtacaggggagccggtgggtctcca

SEQ ID NO: 1023157 - DNA, 25 bp, Homo sapien
gggcagcgggaggtacaggggagcc

SEQ ID NO: 1023158 - DNA, 25 bp, Homo sapien
ggcagcgggaggtacaggggagccg

SEQ ID NO: 1023159 - DNA, 25 bp, Homo sapien
aggccacctggaggtcccagtggag

SEQ ID NO: 1023160 - DNA, 25 bp, Homo sapien
agctgacttggcggaaggccacctg

SEQ ID NO: 1023161 - DNA, 25 bp, Homo sapien
aggtcccagtggagagcttgaatgc

SEQ ID NO: 1023162 - DNA, 25 bp, Homo sapien
tcccagtggagagcttgaatgcaga

SEQ ID NO: 1023163 - DNA, 25 bp, Homo sapien
acggctcccccatgcccccggccat

SEQ ID NO: 1023164 - DNA, 25 bp, Homo sapien
cagacggaaggtttgctgtggccac

SEQ ID NO: 1023165 - DNA, 25 bp, Homo sapien
aaggtttgctgtggccacggctccc

SEQ ID NO: 1023166 - DNA, 25 bp, Homo sapien
ctgcagacggaaggtttgctgtggc

SEQ ID NO: 1023167 - DNA, 25 bp, Homo sapien
gttcacctagcgtggccagagtcca

SEQ ID NO: 1023168 - DNA, 25 bp, Homo sapien
cctgttcacctagcgtggccagagt

SEQ ID NO: 1023169 - DNA, 25 bp, Homo sapien
gcccctgttcacctagcgtggccag

SEQ ID NO: 1023170 - DNA, 25 bp, Homo sapien
tgttcacctagcgtggccagagtcc

SEQ ID NO: 1023171 - DNA, 25 bp, Homo sapien
gctcctggtagacgatgttgatttt

SEQ ID NO: 1023172 - DNA, 25 bp, Homo sapien
gtagacgatgttgattttggccagg

SEQ ID NO: 1023173 - DNA, 25 bp, Homo sapien
cctggtagacgatgttgattttggc

SEQ ID NO: 1023174 - DNA, 25 bp, Homo sapien
gagcggtagttgagctcctggtaga

SEQ ID NO: 1023175 - DNA, 25 bp, Homo sapien
tgggctccgggtcatctgacgtgcc

SEQ ID NO: 1023176 - DNA, 25 bp, Homo sapien
gggcagaagcatcgagcagcagctc

SEQ ID NO: 1023177 - DNA, 25 bp, Homo sapien
ctggcttgatgctggacgcccctga

SEQ ID NO: 1023178 - DNA, 25 bp, Homo sapien
gcggccgcctagcaccagggtgagg

SEQ ID NO: 1023179 - DNA, 25 bp, Homo sapien
cagagtctcaaggggctggggccca

SEQ ID NO: 1023180 - DNA, 25 bp, Homo sapien
agactcccgccagaacccctggaag

SEQ ID NO: 1023181 - DNA, 25 bp, Homo sapien
agcccagctctcttcggctgagact

SEQ ID NO: 1023182 - DNA, 25 bp, Homo sapien
tcttcggctgagactcccgccagaa

SEQ ID NO: 1023183 - DNA, 25 bp, Homo sapien
caaggaccaggccaagagatcgcac

SEQ ID NO: 1023184 - DNA, 25 bp, Homo sapien
ccaagagatcgcacagccctggcag

SEQ ID NO: 1023185 - DNA, 25 bp, Homo sapien
aggccaagagatcgcacagccctgg

SEQ ID NO: 1023186 - DNA, 25 bp, Homo sapien
aggaccaggccaagagatcgcacag

SEQ ID NO: 1023187 - DNA, 25 bp, Homo sapien
ccccacggccgcgtgtgctgcttcc

SEQ ID NO: 1023188 - DNA, 25 bp, Homo sapien
cccaggcagtgtaggtggtttgacc

SEQ ID NO: 1023189 - DNA, 25 bp, Homo sapien
accagaggcgccgacatgcccggtg

SEQ ID NO: 1023190 - DNA, 25 bp, Homo sapien
gtggtttgaccagaggcgccgacat

SEQ ID NO: 1023191 - DNA, 25 bp, Homo sapien
cagacacacggagcatgggtacatc

SEQ ID NO: 1023192 - DNA, 25 bp, Homo sapien
ctgaggtggctaggcttgacacacg

SEQ ID NO: 1023193 - DNA, 25 bp, Homo sapien
catcagacgtgtggacatgcagaca

SEQ ID NO: 1023194 - DNA, 25 bp, Homo sapien
tgacacacgtacacaggtgcatcag

SEQ ID NO: 1023195 - DNA, 25 bp, Homo sapien
cagagcagcccaagtgtgtccgtgg

SEQ ID NO: 1023196 - DNA, 25 bp, Homo sapien
caagtgtgtccgtggggcctgcctt

SEQ ID NO: 1023197 - DNA, 25 bp, Homo sapien
tcagagcagcccaagtgtgtccgtg

SEQ ID NO: 1023198 - DNA, 25 bp, Homo sapien
gcccaagtgtgtccgtggggcctgc

SEQ ID NO: 1023199 - DNA, 25 bp, Homo sapien
ggagtgggcagccttatccatgagc

SEQ ID NO: 1023200 - DNA, 25 bp, Homo sapien
gagggggcaacaggccgtggagctg

SEQ ID NO: 1023201 - DNA, 25 bp, Homo sapien
tgggagtgggcagccttatccatga

SEQ ID NO: 1023202 - DNA, 25 bp, Homo sapien
tgggcagccttatccatgagcccca

SEQ ID NO: 1023203 - DNA, 25 bp, Homo sapien
gttgtgtgcacaccgagtctgcatg

SEQ ID NO: 1023204 - DNA, 25 bp, Homo sapien
ggcgtgtacacctgcgtgaactaca

SEQ ID NO: 1023205 - DNA, 25 bp, Homo sapien
gacatttggcaaacgacaatggagg

SEQ ID NO: 1023206 - DNA, 25 bp, Homo sapien
tccatcattcgtggcgtgcaggcgt

SEQ ID NO: 1023207 - DNA, 25 bp, Homo sapien
agcccagccggtggcgtcagaggcg

SEQ ID NO: 1023208 - DNA, 25 bp, Homo sapien
ggagcccagccggtggcgtcagagg

SEQ ID NO: 1023209 - DNA, 25 bp, Homo sapien
ccagccggtggcgtcagaggcggcc

SEQ ID NO: 1023210 - DNA, 25 bp, Homo sapien
ccggtggcgtcagaggcggcctcca

SEQ ID NO: 1023211 - DNA, 25 bp, Homo sapien
ggaagtacacaagatagcgcgcgcg

SEQ ID NO: 1023212 - DNA, 25 bp, Homo sapien
gagcctgaggccggcgccgaactca

SEQ ID NO: 1023213 - DNA, 25 bp, Homo sapien
agcctgaggccggcgccgaactcat

SEQ ID NO: 1023214 - DNA, 25 bp, Homo sapien
gtacacaagatagcgcgcgcgcacg

SEQ ID NO: 1023215 - DNA, 25 bp, Homo sapien
ctgccctggggtctccgccgccgtc

SEQ ID NO: 1023216 - DNA, 25 bp, Homo sapien
cctggggtctccgccgccgtctgag

SEQ ID NO: 1023217 - DNA, 25 bp, Homo sapien
tggggtctccgccgccgtctgaggc

SEQ ID NO: 1023218 - DNA, 25 bp, Homo sapien
ctgcgggcagaagcgggcggaggtt

SEQ ID NO: 1023219 - DNA, 25 bp, Homo sapien
tctggaccccgacggcgcgctgagt

SEQ ID NO: 1023220 - DNA, 25 bp, Homo sapien
acggcgcgctgagtgcccctgacgg

SEQ ID NO: 1023221 - DNA, 25 bp, Homo sapien
caggtagttctggaccccgacggcg

SEQ ID NO: 1023222 - DNA, 25 bp, Homo sapien
ctccaggtagttctggaccccgacg

SEQ ID NO: 1023223 - DNA, 25 bp, Homo sapien
gagatggtgaacctgaccggctcca

SEQ ID NO: 1023224 - DNA, 25 bp, Homo sapien
ggctccacggaattcagccgctcgg

SEQ ID NO: 1023225 - DNA, 25 bp, Homo sapien
tgcgccgcgttgctcagggcgtgga

SEQ ID NO: 1023226 - DNA, 25 bp, Homo sapien
tgagcggcgctggacgtccaggtgc

SEQ ID NO: 1023227 - DNA, 25 bp, Homo sapien
agtccagcataggttgcgttcaaac

SEQ ID NO: 1023228 - DNA, 25 bp, Homo sapien
tcatcacgccggtgacagccagtgg

SEQ ID NO: 1023229 - DNA, 25 bp, Homo sapien
agtggccaggcggtacaggtaggtc

SEQ ID NO: 1023230 - DNA, 25 bp, Homo sapien
tgcgttcaaacaccggcagctcatc

SEQ ID NO: 1023231 - DNA, 25 bp, Homo sapien
gccccctccccgctgtcagggccac

SEQ ID NO: 1023232 - DNA, 25 bp, Homo sapien
agcggactggaaggcgctgaagtcg

SEQ ID NO: 1023233 - DNA, 25 bp, Homo sapien
caccgggctgccagcggactggaag

SEQ ID NO: 1023234 - DNA, 25 bp, Homo sapien
agacccggcgcagcgttcgcacggg

SEQ ID NO: 1023235 - DNA, 25 bp, Homo sapien
gaagtcgtgtgtgccgaggaggtgc

SEQ ID NO: 1023236 - DNA, 25 bp, Homo sapien
ctcctcgggggtgaccaaggggctg

SEQ ID NO: 1023237 - DNA, 25 bp, Homo sapien
ggggtgaccaaggggctggcttggc

SEQ ID NO: 1023238 - DNA, 25 bp, Homo sapien
ctgctctcctcgggggtgaccaagg

SEQ ID NO: 1023239 - DNA, 25 bp, Homo sapien
ctcgggggtgaccaaggggctggct

SEQ ID NO: 1023240 - DNA, 25 bp, Homo sapien
cagagaaacaatgcttgggcaagga

SEQ ID NO: 1023241 - DNA, 25 bp, Homo sapien
gaggttctggtcagaagctgccacc

SEQ ID NO: 1023242 - DNA, 25 bp, Homo sapien
taaagacgagcctggttcccactag

SEQ ID NO: 1023243 - DNA, 25 bp, Homo sapien
ggcaccagtgagacctttccagtag

SEQ ID NO: 1023244 - DNA, 25 bp, Homo sapien
tcaaactccaggttccagaaccgca

SEQ ID NO: 1023245 - DNA, 25 bp, Homo sapien
actccaggttccagaaccgcagctt

SEQ ID NO: 1023246 - DNA, 25 bp, Homo sapien
ctgtctatacaggaaagactggctc

SEQ ID NO: 1023247 - DNA, 25 bp, Homo sapien
ggaaagactggctctcaaactccag

SEQ ID NO: 1023248 - DNA, 25 bp, Homo sapien
ccctggggacggccccagaacagag

SEQ ID NO: 1023249 - DNA, 25 bp, Homo sapien
tgacccagagccgcccacgacccag

SEQ ID NO: 1023250 - DNA, 25 bp, Homo sapien
ctggggacggccccagaacagagcc

SEQ ID NO: 1023251 - DNA, 25 bp, Homo sapien
agccgcccacgacccagagccaaga

SEQ ID NO: 1023252 - DNA, 25 bp, Homo sapien
agagccgcccgtgacccaccagcac

SEQ ID NO: 1023253 - DNA, 25 bp, Homo sapien
cagagccgcccgtgacccaccagca

SEQ ID NO: 1023254 - DNA, 25 bp, Homo sapien
gagccgcccgtgacccaccagcaca

SEQ ID NO: 1023255 - DNA, 25 bp, Homo sapien
gtgacccagagccgcccgtgaccca

SEQ ID NO: 1023256 - DNA, 25 bp, Homo sapien
tgacccagagccgcccgtgacccac

SEQ ID NO: 1023257 - DNA, 25 bp, Homo sapien
tgtgacccagagccgcccgtgaccc

SEQ ID NO: 1023258 - DNA, 25 bp, Homo sapien
ctgtgacccagagccgcccgtgacc

SEQ ID NO: 1023259 - DNA, 25 bp, Homo sapien
tgacttgaggaataagccgtgggct

SEQ ID NO: 1023260 - DNA, 25 bp, Homo sapien
cgaggttcccgtacagcactgactt

SEQ ID NO: 1023261 - DNA, 25 bp, Homo sapien
tcttggctctccagaatcgtcttca

SEQ ID NO: 1023262 - DNA, 25 bp, Homo sapien
tacacgtgtctggtgcttgcccagg

SEQ ID NO: 1023263 - DNA, 25 bp, Homo sapien
caggagcttctcgtgcctgtttttc

SEQ ID NO: 1023264 - DNA, 25 bp, Homo sapien
actgggcacatgacaggagcttctc

SEQ ID NO: 1023265 - DNA, 25 bp, Homo sapien
ctgggcacatgacaggagcttctcg

SEQ ID NO: 1023266 - DNA, 25 bp, Homo sapien
agcttctcgtgcctgtttttcttac

SEQ ID NO: 1023267 - DNA, 25 bp, Homo sapien
ggctcccgaactgtggcccctgcag

SEQ ID NO: 1023268 - DNA, 25 bp, Homo sapien
ccgtggctcccgaactgtggcccct

SEQ ID NO: 1023269 - DNA, 25 bp, Homo sapien
gtggctcccgaactgtggcccctgc

SEQ ID NO: 1023270 - DNA, 25 bp, Homo sapien
tcatccgtggctcccgaactgtggc

SEQ ID NO: 1023271 - DNA, 25 bp, Homo sapien
tgtgactgccctggcttgaccagca

SEQ ID NO: 1023272 - DNA, 25 bp, Homo sapien
ggcagggaggctactgtggagacca

SEQ ID NO: 1023273 - DNA, 25 bp, Homo sapien
gcctggtgtggcctaactttggctt

SEQ ID NO: 1023274 - DNA, 25 bp, Homo sapien
ctaactttggcttgagtgtccaggg

SEQ ID NO: 1023275 - DNA, 25 bp, Homo sapien
tctcttcttggtgtacatggctgtg

SEQ ID NO: 1023276 - DNA, 25 bp, Homo sapien
tcttcttggtgtacatggctgtgtc

SEQ ID NO: 1023277 - DNA, 25 bp, Homo sapien
ctcttcttggtgtacatggctgtgt

SEQ ID NO: 1023278 - DNA, 25 bp, Homo sapien
agcagtttccagtaaaagctgaaca

SEQ ID NO: 1023279 - DNA, 25 bp, Homo sapien
cagtttccagtaaaagctgaacaaa

SEQ ID NO: 1023280 - DNA, 25 bp, Homo sapien
tggttagggcaggtggtcctagaca

SEQ ID NO: 1023281 - DNA, 25 bp, Homo sapien
ttagggcaggtggtcctagacagca

SEQ ID NO: 1023282 - DNA, 25 bp, Homo sapien
ggtgccctgggtgaacagaccctgc

SEQ ID NO: 1023283 - DNA, 25 bp, Homo sapien
gtgccctgggtgaacagaccctgca

SEQ ID NO: 1023284 - DNA, 25 bp, Homo sapien
acacgcggacgccaagggcatcatg

SEQ ID NO: 1023285 - DNA, 25 bp, Homo sapien
tggcctctgtagctggaggtcaaga

SEQ ID NO: 1023286 - DNA, 25 bp, Homo sapien
acgccccgtggcctctgtagctgga

SEQ ID NO: 1023287 - DNA, 25 bp, Homo sapien
gcaggtggagtacatgtcattcagc

SEQ ID NO: 1023288 - DNA, 25 bp, Homo sapien
aggtgcggacgaagccctggccagg

SEQ ID NO: 1023289 - DNA, 25 bp, Homo sapien
ctcaggtgcggacgaagccctggcc

SEQ ID NO: 1023290 - DNA, 25 bp, Homo sapien
caggtgcggacgaagccctggccag

SEQ ID NO: 1023291 - DNA, 25 bp, Homo sapien
tcaggtgcggacgaagccctggcca

SEQ ID NO: 1023292 - DNA, 25 bp, Homo sapien
tgtattcaaagtccacgctggaaac

SEQ ID NO: 1023293 - DNA, 25 bp, Homo sapien
cgttgcccgtcccttgtgaactgga

SEQ ID NO: 1023294 - DNA, 25 bp, Homo sapien
tgtttttaccgagatggagtcccgc

SEQ ID NO: 1023295 - DNA, 25 bp, Homo sapien
cgcacccggcaagttttaaatgaat

SEQ ID NO: 1023296 - DNA, 25 bp, Homo sapien
ctgagcaggagccttggtttttggt

SEQ ID NO: 1023297 - DNA, 25 bp, Homo sapien
tttggtgcttgtgctctgatgggct

SEQ ID NO: 1023298 - DNA, 25 bp, Homo sapien
gacatgtatcctcagcctgtttaga

SEQ ID NO: 1023299 - DNA, 25 bp, Homo sapien
aacaacgttctgtctctgggcatgg

SEQ ID NO: 1023300 - DNA, 25 bp, Homo sapien
tttttgacagtgtctcactttgtta

SEQ ID NO: 1023301 - DNA, 25 bp, Homo sapien
gacagtgtctcactttgttacccag

SEQ ID NO: 1023302 - DNA, 25 bp, Homo sapien
ttttgacagtgtctcactttgttac

SEQ ID NO: 1023303 - DNA, 25 bp, Homo sapien
ttttttttgacagtgtctcactttg

SEQ ID NO: 1023304 - DNA, 25 bp, Homo sapien
tgctggaggactaccgcaagatcgc

SEQ ID NO: 1023305 - DNA, 25 bp, Homo sapien
caagatcgccgtagacaagaagggc

SEQ ID NO: 1023306 - DNA, 25 bp, Homo sapien
cttcagcgagatggtgggctacgac

SEQ ID NO: 1023307 - DNA, 25 bp, Homo sapien
actgactcttcggtactcgggatga

SEQ ID NO: 1023308 - DNA, 25 bp, Homo sapien
aagttgcagcgaggtggttgcgcct

SEQ ID NO: 1023309 - DNA, 25 bp, Homo sapien
ttgcagcgaggtggttgcgcctgcg

SEQ ID NO: 1023310 - DNA, 25 bp, Homo sapien
ggaagttgcagcgaggtggttgcgc

SEQ ID NO: 1023311 - DNA, 25 bp, Homo sapien
agcgaggtggttgcgcctgcgcagt

SEQ ID NO: 1023312 - DNA, 25 bp, Homo sapien
ctaggccgtagccgccgtgcgggcc

SEQ ID NO: 1023313 - DNA, 25 bp, Homo sapien
taggccgtagccgccgtgcgggccc

SEQ ID NO: 1023314 - DNA, 25 bp, Homo sapien
cctcggcgacttccggaccgtgcgg

SEQ ID NO: 1023315 - DNA, 25 bp, Homo sapien
ggctccgtcctgcgcgggagccggg

SEQ ID NO: 1023316 - DNA, 25 bp, Homo sapien
gctccggccctctaggacgacgtcc

SEQ ID NO: 1023317 - DNA, 25 bp, Homo sapien
cccgctccggccctctaggacgacg

SEQ ID NO: 1023318 - DNA, 25 bp, Homo sapien
gggcttcagatggcaccggactgga

SEQ ID NO: 1023319 - DNA, 25 bp, Homo sapien
cagatggcaccggactggatgggca

SEQ ID NO: 1023320 - DNA, 25 bp, Homo sapien
ggaagggggcttcagatggcaccgg

SEQ ID NO: 1023321 - DNA, 25 bp, Homo sapien
ttcagatggcaccggactggatggg

SEQ ID NO: 1023322 - DNA, 25 bp, Homo sapien
ctgcccagattcgagccagtggcaa

SEQ ID NO: 1023323 - DNA, 25 bp, Homo sapien
gattcgagccagtggcaaacagaag

SEQ ID NO: 1023324 - DNA, 25 bp, Homo sapien
ggaaggtgacccaggacacctccag

SEQ ID NO: 1023325 - DNA, 25 bp, Homo sapien
agggcagcccaacggcccaaggtca

SEQ ID NO: 1023326 - DNA, 25 bp, Homo sapien
accagatattctgcgggccttgcct

SEQ ID NO: 1023327 - DNA, 25 bp, Homo sapien
gaaagatgcagtcccatagacttcc

SEQ ID NO: 1023328 - DNA, 25 bp, Homo sapien
tgcagtcccatagacttccagcacg

SEQ ID NO: 1023329 - DNA, 25 bp, Homo sapien
tcaccagatattctgcgggccttgc

SEQ ID NO: 1023330 - DNA, 25 bp, Homo sapien
ccacaggttgggttgcatgcttggc

SEQ ID NO: 1023331 - DNA, 25 bp, Homo sapien
ggttgctcagcaccctaggactggg

SEQ ID NO: 1023332 - DNA, 25 bp, Homo sapien
cattccacctcgaccaggaagaggg

SEQ ID NO: 1023333 - DNA, 25 bp, Homo sapien
gaacctgagagtcagctgcattcca

SEQ ID NO: 1023334 - DNA, 25 bp, Homo sapien
tggggagtgcgagcagccatctggg

SEQ ID NO: 1023335 - DNA, 25 bp, Homo sapien
ggtgcatggggagtgcgagcagcca

SEQ ID NO: 1023336 - DNA, 25 bp, Homo sapien
agtgcgagcagccatctggggtggg

SEQ ID NO: 1023337 - DNA, 25 bp, Homo sapien
catggggagtgcgagcagccatctg

SEQ ID NO: 1023338 - DNA, 25 bp, Homo sapien
ttgataggaacggaaatacagtagg

SEQ ID NO: 1023339 - DNA, 25 bp, Homo sapien
ttttgataggaacggaaatacagta

SEQ ID NO: 1023340 - DNA, 25 bp, Homo sapien
taggaacggaaatacagtagggctg

SEQ ID NO: 1023341 - DNA, 25 bp, Homo sapien
gataggaacggaaatacagtagggc

SEQ ID NO: 1023342 - DNA, 25 bp, Homo sapien
catcgagacactgcttgaaactgac

SEQ ID NO: 1023343 - DNA, 25 bp, Homo sapien
tgaaacctgtctccgagtcatccat

SEQ ID NO: 1023344 - DNA, 25 bp, Homo sapien
ttccttctcatcgagacactgcttg

SEQ ID NO: 1023345 - DNA, 25 bp, Homo sapien
gattgaaacctgtctccgagtcatc

SEQ ID NO: 1023346 - DNA, 25 bp, Homo sapien
agggagcggggctcgagtcctcgcc

SEQ ID NO: 1023347 - DNA, 25 bp, Homo sapien
aagggagcggggctcgagtcctcgc

SEQ ID NO: 1023348 - DNA, 25 bp, Homo sapien
agcggggctcgagtcctcgcccagg

SEQ ID NO: 1023349 - DNA, 25 bp, Homo sapien
ggagcggggctcgagtcctcgccca

SEQ ID NO: 1023350 - DNA, 25 bp, Homo sapien
tgaggcgctccatgatccgcagctt

SEQ ID NO: 1023351 - DNA, 25 bp, Homo sapien
cgtccttggagatgaatgagaagat

SEQ ID NO: 1023352 - DNA, 25 bp, Homo sapien
tgcaggctgcggtagtgctcgctct

SEQ ID NO: 1023353 - DNA, 25 bp, Homo sapien
ttctgggagacgttgtagacacgct

SEQ ID NO: 1023354 - DNA, 25 bp, Homo sapien
gacacatcggctggcagaaaggaga

SEQ ID NO: 1023355 - DNA, 25 bp, Homo sapien
gctgcgcacgcgtgtaataggccga

SEQ ID NO: 1023356 - DNA, 25 bp, Homo sapien
catagattgcactctggaagctcgc

SEQ ID NO: 1023357 - DNA, 25 bp, Homo sapien
catttcactgggtgtagcagagtcc

SEQ ID NO: 1023358 - DNA, 25 bp, Homo sapien
ttcatcctaagttgctgtgacaggc

SEQ ID NO: 1023359 - DNA, 25 bp, Homo sapien
ccttcatcctaagttgctgtgacag

SEQ ID NO: 1023360 - DNA, 25 bp, Homo sapien
ccccttcatcctaagttgctgtgac

SEQ ID NO: 1023361 - DNA, 25 bp, Homo sapien
tgctgggccgtgtccggctgcggag

SEQ ID NO: 1023362 - DNA, 25 bp, Homo sapien
ggcagcagatccgacttgttgttga

SEQ ID NO: 1023363 - DNA, 25 bp, Homo sapien
gtgaccatggcgagctctgacgagt

SEQ ID NO: 1023364 - DNA, 25 bp, Homo sapien
caggctccgagcacgtatcaaagag

SEQ ID NO: 1023365 - DNA, 25 bp, Homo sapien
gtatcaaagaggtcgtagcccaggc

SEQ ID NO: 1023366 - DNA, 25 bp, Homo sapien
ggggcatgaggaagaagctgaagaa

SEQ ID NO: 1023367 - DNA, 25 bp, Homo sapien
ctggggcatgaggaagaagctgaag

SEQ ID NO: 1023368 - DNA, 25 bp, Homo sapien
tggggcatgaggaagaagctgaaga

SEQ ID NO: 1023369 - DNA, 25 bp, Homo sapien
gggcatgaggaagaagctgaagaac

SEQ ID NO: 1023370 - DNA, 25 bp, Homo sapien
ccagggccaggtgcgtcttcacgta

SEQ ID NO: 1023371 - DNA, 25 bp, Homo sapien
cagcagctccatgctagcaccgtag

SEQ ID NO: 1023372 - DNA, 25 bp, Homo sapien
gtcagctgcacacggtcgctgggca

SEQ ID NO: 1023373 - DNA, 25 bp, Homo sapien
ctcgtgcgcgatgcagatgccgcgt

SEQ ID NO: 1023374 - DNA, 25 bp, Homo sapien
tgatttagccctgcgctcacgttct

SEQ ID NO: 1023375 - DNA, 25 bp, Homo sapien
aacgtctggtggtgatttagccctg

SEQ ID NO: 1023376 - DNA, 25 bp, Homo sapien
ttagccctgcgctcacgttctgcag

SEQ ID NO: 1023377 - DNA, 25 bp, Homo sapien
ctgcgtagacagagaacgtctggtg

SEQ ID NO: 1023378 - DNA, 25 bp, Homo sapien
cggggtcctgcgcggggcagcctga

SEQ ID NO: 1023379 - DNA, 25 bp, Homo sapien
ggcgttgcactgaagagtgttgtgc

SEQ ID NO: 1023380 - DNA, 25 bp, Homo sapien
ctgaggcgttgcactgaagagtgtt

SEQ ID NO: 1023381 - DNA, 25 bp, Homo sapien
gggcagcctgaggcgttgcactgaa

SEQ ID NO: 1023382 - DNA, 25 bp, Homo sapien
aaggtcaggttgtacatgttctcca

SEQ ID NO: 1023383 - DNA, 25 bp, Homo sapien
agacgtgtgccagcggatcttcagg

SEQ ID NO: 1023384 - DNA, 25 bp, Homo sapien
agcttcaggtcgtactccatgtcca

SEQ ID NO: 1023385 - DNA, 25 bp, Homo sapien
gttgaacctgcccacgtcgtggagc

SEQ ID NO: 1023386 - DNA, 25 bp, Homo sapien
tgcgcacaggcctggggtctggctc

SEQ ID NO: 1023387 - DNA, 25 bp, Homo sapien
cacaggcctggggtctggctctgct

SEQ ID NO: 1023388 - DNA, 25 bp, Homo sapien
ctgcgcacaggcctggggtctggct

SEQ ID NO: 1023389 - DNA, 25 bp, Homo sapien
aggcctggggtctggctctgctcgg

SEQ ID NO: 1023390 - DNA, 25 bp, Homo sapien
ctgccgcgagcaccgggacacgggc

SEQ ID NO: 1023391 - DNA, 25 bp, Homo sapien
gccgcgagcaccgggacacgggctt

SEQ ID NO: 1023392 - DNA, 25 bp, Homo sapien
tgccgcgagcaccgggacacgggct

SEQ ID NO: 1023393 - DNA, 25 bp, Homo sapien
cagcaggagtggaaccccttgaccc

SEQ ID NO: 1023394 - DNA, 25 bp, Homo sapien
tccacacagtcgtagcagcaggagt

SEQ ID NO: 1023395 - DNA, 25 bp, Homo sapien
gagtggaaccccttgacccggcgca

SEQ ID NO: 1023396 - DNA, 25 bp, Homo sapien
gtagctgcccgcctcgcagtccaca

SEQ ID NO: 1023397 - DNA, 25 bp, Homo sapien
cccgcctgccgggaaggcggctcac

SEQ ID NO: 1023398 - DNA, 25 bp, Homo sapien
ccccgcctgccgggaaggcggctca

SEQ ID NO: 1023399 - DNA, 25 bp, Homo sapien
cggaagcagcgtgtgcttcgctccg

SEQ ID NO: 1023400 - DNA, 25 bp, Homo sapien
ccacaaaaggtgcaggcgatgtcgt

SEQ ID NO: 1023401 - DNA, 25 bp, Homo sapien
atgccaggaaccgagacctgcggcg

SEQ ID NO: 1023402 - DNA, 25 bp, Homo sapien
tgggctgtcccgatggtgaacgaac

SEQ ID NO: 1023403 - DNA, 25 bp, Homo sapien
aggacgctgaggcagaccaggccca

SEQ ID NO: 1023404 - DNA, 25 bp, Homo sapien
gaggacgctgaggcagaccaggccc

SEQ ID NO: 1023405 - DNA, 25 bp, Homo sapien
ggtaccaggtgcacagtgcgacctc

SEQ ID NO: 1023406 - DNA, 25 bp, Homo sapien
ggcacaaaggagacccaggtgatga

SEQ ID NO: 1023407 - DNA, 25 bp, Homo sapien
gcctccgtgggcagcatgtgccagt

SEQ ID NO: 1023408 - DNA, 25 bp, Homo sapien
gaggcagttctgactccacgaagat

SEQ ID NO: 1023409 - DNA, 25 bp, Homo sapien
ctgatttcctgtgttcccgtcattc

SEQ ID NO: 1023410 - DNA, 25 bp, Homo sapien
tgttcccgtcattctggccttgggc

SEQ ID NO: 1023411 - DNA, 25 bp, Homo sapien
gttcccgtcattctggccttgggca

SEQ ID NO: 1023412 - DNA, 25 bp, Homo sapien
tcccgtcattctggccttgggcatc

SEQ ID NO: 1023413 - DNA, 25 bp, Homo sapien
cttttcctgagctcacggtgtgggt

SEQ ID NO: 1023414 - DNA, 25 bp, Homo sapien
ctccgggcctctttccagaacagtg

SEQ ID NO: 1023415 - DNA, 25 bp, Homo sapien
tgggacatggtcaggtcggcagggc

SEQ ID NO: 1023416 - DNA, 25 bp, Homo sapien
aacctagagcgggagggtctctgta

SEQ ID NO: 1023417 - DNA, 25 bp, Homo sapien
acagtcatgatgctgtctacccact

SEQ ID NO: 1023418 - DNA, 25 bp, Homo sapien
gacagtcatgatgctgtctacccac

SEQ ID NO: 1023419 - DNA, 25 bp, Homo sapien
tgacagtcatgatgctgtctaccca

SEQ ID NO: 1023420 - DNA, 25 bp, Homo sapien
cagtcatgatgctgtctacccactg

SEQ ID NO: 1023421 - DNA, 25 bp, Homo sapien
tgtccatggtgctggctccggggtc

SEQ ID NO: 1023422 - DNA, 25 bp, Homo sapien
gtgctggccgtggtgctggaccccg

SEQ ID NO: 1023423 - DNA, 25 bp, Homo sapien
tccggggtcctggtggtcggtgctg

SEQ ID NO: 1023424 - DNA, 25 bp, Homo sapien
ctggtgggcagttttctgtccatgg

SEQ ID NO: 1023425 - DNA, 25 bp, Homo sapien
cgtttaattttatgggacagatgtg

SEQ ID NO: 1023426 - DNA, 25 bp, Homo sapien
ccttctctccggctgggctgccttg

SEQ ID NO: 1023427 - DNA, 25 bp, Homo sapien
tctgaccggagaccctgtgtgggcc

SEQ ID NO: 1023428 - DNA, 25 bp, Homo sapien
gcctggcggcgtgctggcgtcagat

SEQ ID NO: 1023429 - DNA, 25 bp, Homo sapien
gaggaggcgaccctgtcatctgtcc

SEQ ID NO: 1023430 - DNA, 25 bp, Homo sapien
tcaggtggcccgtccttggtgagtg

SEQ ID NO: 1023431 - DNA, 25 bp, Homo sapien
tccggcaacagtctgaaagtacgtg

SEQ ID NO: 1023432 - DNA, 25 bp, Homo sapien
acgagagagggctggacatcctgcc

SEQ ID NO: 1023433 - DNA, 25 bp, Homo sapien
cccacgggcccacagccagcggcgc

SEQ ID NO: 1023434 - DNA, 25 bp, Homo sapien
cacgggcccacagccagcggcgcgc

SEQ ID NO: 1023435 - DNA, 25 bp, Homo sapien
gcgcgcgtcgcatgcgccggatcat

SEQ ID NO: 1023436 - DNA, 25 bp, Homo sapien
gcggcgcgcgtcgcatgcgccggat

SEQ ID NO: 1023437 - DNA, 25 bp, Homo sapien
gggcccgatagatgccagttccatc

SEQ ID NO: 1023438 - DNA, 25 bp, Homo sapien
tagatgccagttccatctcgccggc

SEQ ID NO: 1023439 - DNA, 25 bp, Homo sapien
gatgccagttccatctcgccggctt

SEQ ID NO: 1023440 - DNA, 25 bp, Homo sapien
ccgatagatgccagttccatctcgc

SEQ ID NO: 1023441 - DNA, 25 bp, Homo sapien
tcagccaccttgatagtcactgggc

SEQ ID NO: 1023442 - DNA, 25 bp, Homo sapien
gggactccaggcaccatctgttctc

SEQ ID NO: 1023443 - DNA, 25 bp, Homo sapien
ttgcatctgctggtggacctgccac

SEQ ID NO: 1023444 - DNA, 25 bp, Homo sapien
ccccagggacctgctgacttgaatg

SEQ ID NO: 1023445 - DNA, 25 bp, Homo sapien
tgcctgccaagtacatcgacctaga

SEQ ID NO: 1023446 - DNA, 25 bp, Homo sapien
agtgctgggacacgagggcacaggc

SEQ ID NO: 1023447 - DNA, 25 bp, Homo sapien
gacatccagctaggtgaggcagtgc

SEQ ID NO: 1023448 - DNA, 25 bp, Homo sapien
acctcacctgggaccaacgatggca

SEQ ID NO: 1023449 - DNA, 25 bp, Homo sapien
ggcgcgcggccacaacgtcatcaat

SEQ ID NO: 1023450 - DNA, 25 bp, Homo sapien
gcgcggccacaacgtcatcaatgtc

SEQ ID NO: 1023451 - DNA, 25 bp, Homo sapien
gcggccacaacgtcatcaatgtcat

SEQ ID NO: 1023452 - DNA, 25 bp, Homo sapien
ggccacaacgtcatcaatgtcatcg

SEQ ID NO: 1023453 - DNA, 25 bp, Homo sapien
tcactgcgtatcgagccgctggagg

SEQ ID NO: 1023454 - DNA, 25 bp, Homo sapien
cggatgcctttgagcgcggtgactt

SEQ ID NO: 1023455 - DNA, 25 bp, Homo sapien
ttttctgcgcgaccgcgtggctgtg

SEQ ID NO: 1023456 - DNA, 25 bp, Homo sapien
gctcaacaggtggtgcactgggacc

SEQ ID NO: 1023457 - DNA, 25 bp, Homo sapien
cctgcaacctgcaccatcactactg

SEQ ID NO: 1023458 - DNA, 25 bp, Homo sapien
acgagagcctggccgtccgcctgga

SEQ ID NO: 1023459 - DNA, 25 bp, Homo sapien
atcactactgccacctctacgagag

SEQ ID NO: 1023460 - DNA, 25 bp, Homo sapien
tactgccacctctacgagagcctgg

SEQ ID NO: 1023461 - DNA, 25 bp, Homo sapien
tcggccttcgacgacggcaacttct

SEQ ID NO: 1023462 - DNA, 25 bp, Homo sapien
aacttctcgctgctcatccgcggtg

SEQ ID NO: 1023463 - DNA, 25 bp, Homo sapien
cttcgacgacggcaacttctcgctg

SEQ ID NO: 1023464 - DNA, 25 bp, Homo sapien
tctcgctgctcatccgcggtgcggg

SEQ ID NO: 1023465 - DNA, 25 bp, Homo sapien
ggatgtgaattggaaactgtcccgg

SEQ ID NO: 1023466 - DNA, 25 bp, Homo sapien
cagcctagattcagagtggatgccg

SEQ ID NO: 1023467 - DNA, 25 bp, Homo sapien
cgaggcggcctacgacaatgagagt

SEQ ID NO: 1023468 - DNA, 25 bp, Homo sapien
cccgcttccggtcagagaaagtcca

SEQ ID NO: 1023469 - DNA, 25 bp, Homo sapien
gccaaccctttattgggatcagggc

SEQ ID NO: 1023470 - DNA, 25 bp, Homo sapien
tgcatacaggtttccctcagggaat

SEQ ID NO: 1023471 - DNA, 25 bp, Homo sapien
ctttattgggatcagggcgttctgc

SEQ ID NO: 1023472 - DNA, 25 bp, Homo sapien
gtttctctctcgccaaggaggctgc

SEQ ID NO: 1023473 - DNA, 25 bp, Homo sapien
ttagagccgagtgggacaaagcctg

SEQ ID NO: 1023474 - DNA, 25 bp, Homo sapien
gacaaaaccgcccatctgagcttgg

SEQ ID NO: 1023475 - DNA, 25 bp, Homo sapien
ttcagttagactttggccagcctcc

SEQ ID NO: 1023476 - DNA, 25 bp, Homo sapien
tttctggagagagacttagagccga

SEQ ID NO: 1023477 - DNA, 25 bp, Homo sapien
gaagaggcacaggtcactggccctg

SEQ ID NO: 1023478 - DNA, 25 bp, Homo sapien
ggtgacctggtcactaccaggcctg

SEQ ID NO: 1023479 - DNA, 25 bp, Homo sapien
tctgtggctgtttcccactgagggc

SEQ ID NO: 1023480 - DNA, 25 bp, Homo sapien
gggcctgatggcctcatcagccttt

SEQ ID NO: 1023481 - DNA, 25 bp, Homo sapien
tgtgattggccaacaccgtcttagc

SEQ ID NO: 1023482 - DNA, 25 bp, Homo sapien
tccccacagcgagttttcagaatcc

SEQ ID NO: 1023483 - DNA, 25 bp, Homo sapien
gaatacggtttgtcctcgagcctaa

SEQ ID NO: 1023484 - DNA, 25 bp, Homo sapien
gaaaactgtgctaacgcttccgatg

SEQ ID NO: 1023485 - DNA, 25 bp, Homo sapien
gctgtagcgggtggaagtgcgcttc

SEQ ID NO: 1023486 - DNA, 25 bp, Homo sapien
ggtctggaggctgtagcgggtggaa

SEQ ID NO: 1023487 - DNA, 25 bp, Homo sapien
aggaagcgtcttgtggggccccagc

SEQ ID NO: 1023488 - DNA, 25 bp, Homo sapien
gtggaagtgcgcttccccagaccac

SEQ ID NO: 1023489 - DNA, 25 bp, Homo sapien
gcagatcaagttcgagaaagacctg

SEQ ID NO: 1023490 - DNA, 25 bp, Homo sapien
agacctgaggcgcatctggctgaag

SEQ ID NO: 1023491 - DNA, 25 bp, Homo sapien
gggcaaatgagtctggcgccgccct

SEQ ID NO: 1023492 - DNA, 25 bp, Homo sapien
caagatctacctgcggggcaaatga

SEQ ID NO: 1023493 - DNA, 25 bp, Homo sapien
cacacctggttaggagtgcgggtct

SEQ ID NO: 1023494 - DNA, 25 bp, Homo sapien
gatgaaccaccacaagtaccggaag

SEQ ID NO: 1023495 - DNA, 25 bp, Homo sapien
aagctggtgaagaagacgcggttcc

SEQ ID NO: 1023496 - DNA, 25 bp, Homo sapien
gcaaaaacgtgctgaagatccgccg

SEQ ID NO: 1023497 - DNA, 25 bp, Homo sapien
gcacttgtgttccagctcccctggg

SEQ ID NO: 1023498 - DNA, 25 bp, Homo sapien
ccctgggacctgtggccgccgccca

SEQ ID NO: 1023499 - DNA, 25 bp, Homo sapien
aacgggcacttgtgttccagctccc

SEQ ID NO: 1023500 - DNA, 25 bp, Homo sapien
ctgaacgggcacttgtgttccagct

SEQ ID NO: 1023501 - DNA, 25 bp, Homo sapien
tcgcggcgggaccagacgccccagt

SEQ ID NO: 1023502 - DNA, 25 bp, Homo sapien
gagaagggaagcgagggtcgcggcg

SEQ ID NO: 1023503 - DNA, 25 bp, Homo sapien
cccgcgactactgaaggcgctgccg

SEQ ID NO: 1023504 - DNA, 25 bp, Homo sapien
ggcccgcccgcgactactgaaggcg

SEQ ID NO: 1023505 - DNA, 25 bp, Homo sapien
ggtccagccgagagggtccgggcgc

SEQ ID NO: 1023506 - DNA, 25 bp, Homo sapien
gggcgcgagctgtgttggaagcaaa

SEQ ID NO: 1023507 - DNA, 25 bp, Homo sapien
ttctgggacctttcggtgcgtccga

SEQ ID NO: 1023508 - DNA, 25 bp, Homo sapien
gtccgggcgccaggcaacgcgattc

SEQ ID NO: 1023509 - DNA, 25 bp, Homo sapien
cggtcaatttgagccgcgtcgaggt

SEQ ID NO: 1023510 - DNA, 25 bp, Homo sapien
gctgtgcgtaggaaccgccgggtgg

SEQ ID NO: 1023511 - DNA, 25 bp, Homo sapien
agggcggccgcagaacggtcaattt

SEQ ID NO: 1023512 - DNA, 25 bp, Homo sapien
gcgaggacgccagcgggcgctgtgc

SEQ ID NO: 1023513 - DNA, 25 bp, Homo sapien
ttgcctccgtaagggaccaggcgga

SEQ ID NO: 1023514 - DNA, 25 bp, Homo sapien
cgcgcgaggactgggaccgtgattc

SEQ ID NO: 1023515 - DNA, 25 bp, Homo sapien
ggactgggaccgtgattccactaac

SEQ ID NO: 1023516 - DNA, 25 bp, Homo sapien
gaggaaccgcgcgaggactgggacc

SEQ ID NO: 1023517 - DNA, 25 bp, Homo sapien
gtagtcttgagcccgcacttccgtc

SEQ ID NO: 1023518 - DNA, 25 bp, Homo sapien
gaaacgattctggacctgcgggtat

SEQ ID NO: 1023519 - DNA, 25 bp, Homo sapien
gacctgcgggtatatccagggcccg

SEQ ID NO: 1023520 - DNA, 25 bp, Homo sapien
tggtccggaaacgattctggacctg

SEQ ID NO: 1023521 - DNA, 25 bp, Homo sapien
gaaatagctctagacgcttccgcct

SEQ ID NO: 1023522 - DNA, 25 bp, Homo sapien
cttccgccttccacgtaactccact

SEQ ID NO: 1023523 - DNA, 25 bp, Homo sapien
tccacgtaactccacttccgttgcc

SEQ ID NO: 1023524 - DNA, 25 bp, Homo sapien
aatagctctagacgcttccgccttc

SEQ ID NO: 1023525 - DNA, 25 bp, Homo sapien
cacttcctgctaagcgtccctggaa

SEQ ID NO: 1023526 - DNA, 25 bp, Homo sapien
ctttccacttcctgctaagcgtccc

SEQ ID NO: 1023527 - DNA, 25 bp, Homo sapien
caaggcaagtctccgagcaggccca

SEQ ID NO: 1023528 - DNA, 25 bp, Homo sapien
tcctgctaagcgtccctggaagacc

SEQ ID NO: 1023529 - DNA, 25 bp, Homo sapien
ccagccgggtgaagacaaacacagg

SEQ ID NO: 1023530 - DNA, 25 bp, Homo sapien
accagtctgctcatttacggccaaa

SEQ ID NO: 1023531 - DNA, 25 bp, Homo sapien
tcatttacggccaaatccactaggg

SEQ ID NO: 1023532 - DNA, 25 bp, Homo sapien
ggaggcaccagtctgctcatttacg

SEQ ID NO: 1023533 - DNA, 25 bp, Homo sapien
ctgctcacacaagcatctggcgctt

SEQ ID NO: 1023534 - DNA, 25 bp, Homo sapien
ctagtctagttccagctcatctagc

SEQ ID NO: 1023535 - DNA, 25 bp, Homo sapien
tgctcacacaagcatctggcgcttc

SEQ ID NO: 1023536 - DNA, 25 bp, Homo sapien
gtctagttccagctcatctagcttg

SEQ ID NO: 1023537 - DNA, 25 bp, Homo sapien
agggtccccattccaaacatagctc

SEQ ID NO: 1023538 - DNA, 25 bp, Homo sapien
ggggtgcaggccctaccacctggga

SEQ ID NO: 1023539 - DNA, 25 bp, Homo sapien
agggggtgcaggccctaccacctgg

SEQ ID NO: 1023540 - DNA, 25 bp, Homo sapien
gggtgcaggccctaccacctgggac

SEQ ID NO: 1023541 - DNA, 25 bp, Homo sapien
gcagggggtgcaggccctaccacct

SEQ ID NO: 1023542 - DNA, 25 bp, Homo sapien
catcctgccggcaccttcacggctc

SEQ ID NO: 1023543 - DNA, 25 bp, Homo sapien
ctgccggcaccttcacggctccaca

SEQ ID NO: 1023544 - DNA, 25 bp, Homo sapien
gcttccatcctgccggcaccttcac

SEQ ID NO: 1023545 - DNA, 25 bp, Homo sapien
gccggcaccttcacggctccacagg

SEQ ID NO: 1023546 - DNA, 25 bp, Homo sapien
gcaggtcttgccccatatctcgtct

SEQ ID NO: 1023547 - DNA, 25 bp, Homo sapien
ccatatctcgtcttcccaggggagg

SEQ ID NO: 1023548 - DNA, 25 bp, Homo sapien
gggtgctgcccagcatccacgaggc

SEQ ID NO: 1023549 - DNA, 25 bp, Homo sapien
cgtctggtgcggtgggtgggtatct

SEQ ID NO: 1023550 - DNA, 25 bp, Homo sapien
agaccaggggctcccccgtgccaca

SEQ ID NO: 1023551 - DNA, 25 bp, Homo sapien
accaggggctcccccgtgccacaga

SEQ ID NO: 1023552 - DNA, 25 bp, Homo sapien
caggggctcccccgtgccacagaag

SEQ ID NO: 1023553 - DNA, 25 bp, Homo sapien
aggggctcccccgtgccacagaagc

SEQ ID NO: 1023554 - DNA, 25 bp, Homo sapien
tcccggcctcgatccaagagcattg

SEQ ID NO: 1023555 - DNA, 25 bp, Homo sapien
ctggagctctggcaactggagcctg

SEQ ID NO: 1023556 - DNA, 25 bp, Homo sapien
tctgctccgaagtggctcaggtccc

SEQ ID NO: 1023557 - DNA, 25 bp, Homo sapien
tcagcatccggaaagtgagggtcgc

SEQ ID NO: 1023558 - DNA, 25 bp, Homo sapien
cagggacagcggcatcttcagccaa

SEQ ID NO: 1023559 - DNA, 25 bp, Homo sapien
gctggctctagactggtggtacgca

SEQ ID NO: 1023560 - DNA, 25 bp, Homo sapien
tctgctgtccaagcgctttggtgca

SEQ ID NO: 1023561 - DNA, 25 bp, Homo sapien
caatcaaagggtagcctctgagggt

SEQ ID NO: 1023562 - DNA, 25 bp, Homo sapien
tctactctaggtggccatggctacc

SEQ ID NO: 1023563 - DNA, 25 bp, Homo sapien
ctaccgggcaggtgttgttccagcg

SEQ ID NO: 1023564 - DNA, 25 bp, Homo sapien
tccttcgtgaagcactccatggagg

SEQ ID NO: 1023565 - DNA, 25 bp, Homo sapien
tactcgatgactttcggccgcgaag

SEQ ID NO: 1023566 - DNA, 25 bp, Homo sapien
cgctcggggcgcacaggcaggcgct

SEQ ID NO: 1023567 - DNA, 25 bp, Homo sapien
ccgcgatccggggtctctgtgcgaa

SEQ ID NO: 1023568 - DNA, 25 bp, Homo sapien
ggcaggcgctctcagcacggcaccc

SEQ ID NO: 1023569 - DNA, 25 bp, Homo sapien
gggtctctgtgcgaacgtgggcatc

SEQ ID NO: 1023570 - DNA, 25 bp, Homo sapien
ggctgagtgttgaaggcaagacttt

SEQ ID NO: 1023571 - DNA, 25 bp, Homo sapien
tgaaggcaagactttgcaggagtct

SEQ ID NO: 1023572 - DNA, 25 bp, Homo sapien
gagtctggcgttaatacgcatcccc

SEQ ID NO: 1023573 - DNA, 25 bp, Homo sapien
ctgtagggacgtcgaggccacgttt

SEQ ID NO: 1023574 - DNA, 25 bp, Homo sapien
gaggatcagcgatgtcaagacgtta

SEQ ID NO: 1023575 - DNA, 25 bp, Homo sapien
tgaaccttgaggtacttaggcctcc

SEQ ID NO: 1023576 - DNA, 25 bp, Homo sapien
tgtccaagctccttcacacgtagat

SEQ ID NO: 1023577 - DNA, 25 bp, Homo sapien
tctccctggcgtttgtgaggtcctg

SEQ ID NO: 1023578 - DNA, 25 bp, Homo sapien
tgcacagctgtggtcgatcgcagga

SEQ ID NO: 1023579 - DNA, 25 bp, Homo sapien
tgtactagtcctggcaaaggttccg

SEQ ID NO: 1023580 - DNA, 25 bp, Homo sapien
cggtaactgcagcaacagatacctc

SEQ ID NO: 1023581 - DNA, 25 bp, Homo sapien
caggtgatgaaaaaccgtgaaccca

SEQ ID NO: 1023582 - DNA, 25 bp, Homo sapien
tcatggcagagctagtggacagctg

SEQ ID NO: 1023583 - DNA, 25 bp, Homo sapien
gaatttgagcccgtctgagctgggc

SEQ ID NO: 1023584 - DNA, 25 bp, Homo sapien
tgttacccataacaggcggtgagga

SEQ ID NO: 1023585 - DNA, 25 bp, Homo sapien
gagtaaagctgtaaccataccgtgt

SEQ ID NO: 1023586 - DNA, 25 bp, Homo sapien
cacttgctagagatggcttcaggcc

SEQ ID NO: 1023587 - DNA, 25 bp, Homo sapien
tgtaggagcgcctaaactgagtgcc

SEQ ID NO: 1023588 - DNA, 25 bp, Homo sapien
caataacagacatgagggatggccc

SEQ ID NO: 1023589 - DNA, 25 bp, Homo sapien
gaatcctgtgggaacgtgcccttca

SEQ ID NO: 1023590 - DNA, 25 bp, Homo sapien
tcagcatcctgcctggaagtcctct

SEQ ID NO: 1023591 - DNA, 25 bp, Homo sapien
gggccgacatcaggactggagtcca

SEQ ID NO: 1023592 - DNA, 25 bp, Homo sapien
tgaccaaggaccctgaacaaggtgt

SEQ ID NO: 1023593 - DNA, 25 bp, Homo sapien
gcaggcacttccaggttggcttaaa

SEQ ID NO: 1023594 - DNA, 25 bp, Homo sapien
tggtcattatgctagtccctctgct

SEQ ID NO: 1023595 - DNA, 25 bp, Homo sapien
caaagatcttcagggtaggcttagg

SEQ ID NO: 1023596 - DNA, 25 bp, Homo sapien
gagtgatttctgatgacatagcagg

SEQ ID NO: 1023597 - DNA, 25 bp, Homo sapien
tggagcgaacggatggtttatgcaa

SEQ ID NO: 1023598 - DNA, 25 bp, Homo sapien
tccataaactgaaaatcctgcaggt

SEQ ID NO: 1023599 - DNA, 25 bp, Homo sapien
caaagtgttgtgcagagccactgca

SEQ ID NO: 1023600 - DNA, 25 bp, Homo sapien
tgagtgtccccatcgctcaggaaat

SEQ ID NO: 1023601 - DNA, 25 bp, Homo sapien
gagttttgctagtttccgaggctgg

SEQ ID NO: 1023602 - DNA, 25 bp, Homo sapien
gggctgccgcccgaggacacctgct

SEQ ID NO: 1023603 - DNA, 25 bp, Homo sapien
ggcatagagtccacgggctgagcca

SEQ ID NO: 1023604 - DNA, 25 bp, Homo sapien
ccactctgcggacgcagtgggccga

SEQ ID NO: 1023605 - DNA, 25 bp, Homo sapien
gccccaggcgctgcctgaacttgga

SEQ ID NO: 1023606 - DNA, 25 bp, Homo sapien
ttcggcctcacaacatgaggaagtg

SEQ ID NO: 1023607 - DNA, 25 bp, Homo sapien
aaagtggacgtttccaagcaggcca

SEQ ID NO: 1023608 - DNA, 25 bp, Homo sapien
gtgtccaggcacgaaggccctgagc

SEQ ID NO: 1023609 - DNA, 25 bp, Homo sapien
gtgtagccccgtcccgtggagacca

SEQ ID NO: 1023610 - DNA, 25 bp, Homo sapien
acactcgcgggtggccgagctgctg

SEQ ID NO: 1023611 - DNA, 25 bp, Homo sapien
tcacgccgctgcactgggccgctgc

SEQ ID NO: 1023612 - DNA, 25 bp, Homo sapien
cgcaccgcgctgcacgaggccgcct

SEQ ID NO: 1023613 - DNA, 25 bp, Homo sapien
gctcgctccgggacgggcctcacgc

SEQ ID NO: 1023614 - DNA, 25 bp, Homo sapien
tgtgtgggtcctacaagcattgcag

SEQ ID NO: 1023615 - DNA, 25 bp, Homo sapien
gaacgtctctgcagaatcactccag

SEQ ID NO: 1023616 - DNA, 25 bp, Homo sapien
tcgaggtccattctagccgctgtac

SEQ ID NO: 1023617 - DNA, 25 bp, Homo sapien
ctgtacccctgggaagctggcgtga

SEQ ID NO: 1023618 - DNA, 25 bp, Homo sapien
tccgcctgcgtctcagagtggatga

SEQ ID NO: 1023619 - DNA, 25 bp, Homo sapien
tcaaagggcttgactccggtagctg

SEQ ID NO: 1023620 - DNA, 25 bp, Homo sapien
cacaaagacctcatttcaaagggct

SEQ ID NO: 1023621 - DNA, 25 bp, Homo sapien
gtagctgccccatcagtagctgcca

SEQ ID NO: 1023622 - DNA, 25 bp, Homo sapien
ccaccctgggcacgtcagggctgag

SEQ ID NO: 1023623 - DNA, 25 bp, Homo sapien
tgaggcctggtggtcgggaggtccc

SEQ ID NO: 1023624 - DNA, 25 bp, Homo sapien
gccccgaccaccctgggcacgtcag

SEQ ID NO: 1023625 - DNA, 25 bp, Homo sapien
agggctgaggcctggtggtcgggag

SEQ ID NO: 1023626 - DNA, 25 bp, Homo sapien
atcccaggtagacgacggcggccgc

SEQ ID NO: 1023627 - DNA, 25 bp, Homo sapien
cctcgagtggcacaggaatcccagg

SEQ ID NO: 1023628 - DNA, 25 bp, Homo sapien
gcacaggaatcccaggtagacgacg

SEQ ID NO: 1023629 - DNA, 25 bp, Homo sapien
cggccgcgggcaggagcaccagcag

SEQ ID NO: 1023630 - DNA, 25 bp, Homo sapien
ggacagagctgtcccttgggtgaaa

SEQ ID NO: 1023631 - DNA, 25 bp, Homo sapien
gagctgtcccttgggtgaaaaacaa

SEQ ID NO: 1023632 - DNA, 25 bp, Homo sapien
gggcacacgtgtctctgaggacaag

SEQ ID NO: 1023633 - DNA, 25 bp, Homo sapien
ggctgccagggaggggcacacgtgt

SEQ ID NO: 1023634 - DNA, 25 bp, Homo sapien
cagcccccgtgccagcagaaagggg

SEQ ID NO: 1023635 - DNA, 25 bp, Homo sapien
agcccgaacacgatgagcgccgcgg

SEQ ID NO: 1023636 - DNA, 25 bp, Homo sapien
gcggcagcgagagaagcccgaacac

SEQ ID NO: 1023637 - DNA, 25 bp, Homo sapien
gcagcgagagaagcccgaacacgat

SEQ ID NO: 1023638 - DNA, 25 bp, Homo sapien
aagcccgaacacgatgagcgccgcg

SEQ ID NO: 1023639 - DNA, 25 bp, Homo sapien
gcgcagagttgctcgtcctcgtcgg

SEQ ID NO: 1023640 - DNA, 25 bp, Homo sapien
cgcagagttgctcgtcctcgtcggg

SEQ ID NO: 1023641 - DNA, 25 bp, Homo sapien
agttgctcgtcctcgtcggggcgcc

SEQ ID NO: 1023642 - DNA, 25 bp, Homo sapien
cagagttgctcgtcctcgtcggggc

SEQ ID NO: 1023643 - DNA, 25 bp, Homo sapien
tgtgagctcggcacagctaggacgc

SEQ ID NO: 1023644 - DNA, 25 bp, Homo sapien
gagatcttagtgtctcccggagaga

SEQ ID NO: 1023645 - DNA, 25 bp, Homo sapien
cgttgtggacctgtggcttacacca

SEQ ID NO: 1023646 - DNA, 25 bp, Homo sapien
tgtctgaatgcgagcctggccatag

SEQ ID NO: 1023647 - DNA, 25 bp, Homo sapien
acctggggtctgaccggaagctggc

SEQ ID NO: 1023648 - DNA, 25 bp, Homo sapien
cctggggtctgaccggaagctggct

SEQ ID NO: 1023649 - DNA, 25 bp, Homo sapien
gacctggggtctgaccggaagctgg

SEQ ID NO: 1023650 - DNA, 25 bp, Homo sapien
gcggacggccagcactcgactttgc

SEQ ID NO: 1023651 - DNA, 25 bp, Homo sapien
gcaggtgagacaccgcggggccgtg

SEQ ID NO: 1023652 - DNA, 25 bp, Homo sapien
gatgcgccgcgggagaacggatggg

SEQ ID NO: 1023653 - DNA, 25 bp, Homo sapien
agaacggatggggctccacaggctt

SEQ ID NO: 1023654 - DNA, 25 bp, Homo sapien
agatggttggttgaggccctgtcca

SEQ ID NO: 1023655 - DNA, 25 bp, Homo sapien
cacactgggcctgttacccatatac

SEQ ID NO: 1023656 - DNA, 25 bp, Homo sapien
gaagacaggaattcgagagagactc

SEQ ID NO: 1023657 - DNA, 25 bp, Homo sapien
tgttacccatataccctacccagtg

SEQ ID NO: 1023658 - DNA, 25 bp, Homo sapien
gcgcacgagcggaccccgacacgca

SEQ ID NO: 1023659 - DNA, 25 bp, Homo sapien
gctgcagggcgcgtcaccgcgcgga

SEQ ID NO: 1023660 - DNA, 25 bp, Homo sapien
acagaccccggagaggcgcgcacga

SEQ ID NO: 1023661 - DNA, 25 bp, Homo sapien
cggcgcgagcggagggccacgcgca

SEQ ID NO: 1023662 - DNA, 25 bp, Homo sapien
ggccgagcgccgtccaggggagcat

SEQ ID NO: 1023663 - DNA, 25 bp, Homo sapien
cagcgccagccgcaagctcagggcc

SEQ ID NO: 1023664 - DNA, 25 bp, Homo sapien
agggccaggccgagcgccgtccagg

SEQ ID NO: 1023665 - DNA, 25 bp, Homo sapien
cgccagccgcaagctcagggccagg

SEQ ID NO: 1023666 - DNA, 25 bp, Homo sapien
aaacagctgttccttggcatagacc

SEQ ID NO: 1023667 - DNA, 25 bp, Homo sapien
ggtgtcacccatgcgctgggcagaa

SEQ ID NO: 1023668 - DNA, 25 bp, Homo sapien
gaactcggtgtatggccgactgccc

SEQ ID NO: 1023669 - DNA, 25 bp, Homo sapien
cccgggagaactcgtagtgagagac

SEQ ID NO: 1023670 - DNA, 25 bp, Homo sapien
tcggccggtgctgacaatgaacacg

SEQ ID NO: 1023671 - DNA, 25 bp, Homo sapien
catccacgtccacaaagtgcaggtg

SEQ ID NO: 1023672 - DNA, 25 bp, Homo sapien
gagcccctcagctcttggacaatga

SEQ ID NO: 1023673 - DNA, 25 bp, Homo sapien
atgaacacggtgacgcccaggtcct

SEQ ID NO: 1023674 - DNA, 25 bp, Homo sapien
ctgggccctgcctcctcccgcatac

SEQ ID NO: 1023675 - DNA, 25 bp, Homo sapien
ctagggctccctgggccctgcctcc

SEQ ID NO: 1023676 - DNA, 25 bp, Homo sapien
ctccctgggccctgcctcctcccgc

SEQ ID NO: 1023677 - DNA, 25 bp, Homo sapien
cctgggccctgcctcctcccgcata

SEQ ID NO: 1023678 - DNA, 25 bp, Homo sapien
tggggattctcagaacgtgccttgg

SEQ ID NO: 1023679 - DNA, 25 bp, Homo sapien
ggtcagggaacagcggtcagttcct

SEQ ID NO: 1023680 - DNA, 25 bp, Homo sapien
ctcaaagacggcagagtccacggtg

SEQ ID NO: 1023681 - DNA, 25 bp, Homo sapien
attggaggccccactaggaaagacg

SEQ ID NO: 1023682 - DNA, 25 bp, Homo sapien
ggaagccgctggacgtgatctccgt

SEQ ID NO: 1023683 - DNA, 25 bp, Homo sapien
agatccagtccgtggcgttccctgg

SEQ ID NO: 1023684 - DNA, 25 bp, Homo sapien
tagtagcccgagtctgcggtcagca

SEQ ID NO: 1023685 - DNA, 25 bp, Homo sapien
ctcaggaggcgcacgttggactcag

SEQ ID NO: 1023686 - DNA, 25 bp, Homo sapien
gggagggcggcgagctgcgtggggg

SEQ ID NO: 1023687 - DNA, 25 bp, Homo sapien
ggcgagctgcgtgggggccggccca

SEQ ID NO: 1023688 - DNA, 25 bp, Homo sapien
ggcggcgagctgcgtgggggccggc

SEQ ID NO: 1023689 - DNA, 25 bp, Homo sapien
gagggcggcgagctgcgtgggggcc

SEQ ID NO: 1023690 - DNA, 25 bp, Homo sapien
agcggcccgaactgcacgtggtagc

SEQ ID NO: 1023691 - DNA, 25 bp, Homo sapien
gaactgcacgtggtagccgagcgcc

SEQ ID NO: 1023692 - DNA, 25 bp, Homo sapien
agcgctggggcccaactcacgcgga

SEQ ID NO: 1023693 - DNA, 25 bp, Homo sapien
cccgaactgcacgtggtagccgagc

SEQ ID NO: 1023694 - DNA, 25 bp, Homo sapien
agcggaaggcggcggtcacggtcac

SEQ ID NO: 1023695 - DNA, 25 bp, Homo sapien
ttacggctcacggctggcggtcccc

SEQ ID NO: 1023696 - DNA, 25 bp, Homo sapien
ggccgtcgggcgtgcaggccttggc

SEQ ID NO: 1023697 - DNA, 25 bp, Homo sapien
tacggctcacggctggcggtccccg

SEQ ID NO: 1023698 - DNA, 25 bp, Homo sapien
cgggccgtcgggcgtgcaggccttg

SEQ ID NO: 1023699 - DNA, 25 bp, Homo sapien
gtctgccgggttgggcgcctccgct

SEQ ID NO: 1023700 - DNA, 25 bp, Homo sapien
ccctcaggtaggcgccggccctctc

SEQ ID NO: 1023701 - DNA, 25 bp, Homo sapien
cacccgtctgccgggttgggcgcct

SEQ ID NO: 1023702 - DNA, 25 bp, Homo sapien
ctcaggtaggcgccggccctctcgg

SEQ ID NO: 1023703 - DNA, 25 bp, Homo sapien
ctatcaacgtccaggacccaagctg

SEQ ID NO: 1023704 - DNA, 25 bp, Homo sapien
aacagtcctgggtctgacgctctca

SEQ ID NO: 1023705 - DNA, 25 bp, Homo sapien
cttggggcccggtcttcacacgtgg

SEQ ID NO: 1023706 - DNA, 25 bp, Homo sapien
gacgctctcaattatcacccacgga

SEQ ID NO: 1023707 - DNA, 25 bp, Homo sapien
tgaataaaaggtgcacatgaggacc

SEQ ID NO: 1023708 - DNA, 25 bp, Homo sapien
taaagcatcctagcgagactgcagg

SEQ ID NO: 1023709 - DNA, 25 bp, Homo sapien
cccaaaaggcggagacgttcacaag

SEQ ID NO: 1023710 - DNA, 25 bp, Homo sapien
agactgcaggctcggtgtacatctg

SEQ ID NO: 1023711 - DNA, 25 bp, Homo sapien
cggtgcagggtgtggctttgccagc

SEQ ID NO: 1023712 - DNA, 25 bp, Homo sapien
ccccatgcggtgcagggtgtggctt

SEQ ID NO: 1023713 - DNA, 25 bp, Homo sapien
gagggagcccgcgtggccctgggcc

SEQ ID NO: 1023714 - DNA, 25 bp, Homo sapien
gaaaggggcagtggaccccatgcgg

SEQ ID NO: 1023715 - DNA, 25 bp, Homo sapien
gttcttgggagacggtgccaaggcc

SEQ ID NO: 1023716 - DNA, 25 bp, Homo sapien
gaaggtggcccctggcacaatgccc

SEQ ID NO: 1023717 - DNA, 25 bp, Homo sapien
tgagaccacctcaatgctgcagttc

SEQ ID NO: 1023718 - DNA, 25 bp, Homo sapien
gagggagggactgagaccacctcaa

SEQ ID NO: 1023719 - DNA, 25 bp, Homo sapien
gccggccctccatgaatggtgacca

SEQ ID NO: 1023720 - DNA, 25 bp, Homo sapien
cagccggccctccatgaatggtgac

SEQ ID NO: 1023721 - DNA, 25 bp, Homo sapien
cccagccggccctccatgaatggtg

SEQ ID NO: 1023722 - DNA, 25 bp, Homo sapien
agccggccctccatgaatggtgacc

SEQ ID NO: 1023723 - DNA, 25 bp, Homo sapien
aaggagatcctacccctccagagga

SEQ ID NO: 1023724 - DNA, 25 bp, Homo sapien
tctccgtgaggccttgtgctgtgct

SEQ ID NO: 1023725 - DNA, 25 bp, Homo sapien
tcagatctgccaacactccggagaa

SEQ ID NO: 1023726 - DNA, 25 bp, Homo sapien
tcacgtgaccgtgggctcagatctg

SEQ ID NO: 1023727 - DNA, 25 bp, Homo sapien
cgtggccgggcccttggcaaggaag

SEQ ID NO: 1023728 - DNA, 25 bp, Homo sapien
tgcatgtcgaaaagcgtgcagtggc

SEQ ID NO: 1023729 - DNA, 25 bp, Homo sapien
caaggaagtcctggcgggtatcagc

SEQ ID NO: 1023730 - DNA, 25 bp, Homo sapien
tgcagtggccttgtgacgtggccgg

SEQ ID NO: 1023731 - DNA, 25 bp, Homo sapien
ggcctcgcacaacctgtcagggact

SEQ ID NO: 1023732 - DNA, 25 bp, Homo sapien
ggtctcctcgaagtacccagggctc

SEQ ID NO: 1023733 - DNA, 25 bp, Homo sapien
cagccagcgtgaaatcctcaggttg

SEQ ID NO: 1023734 - DNA, 25 bp, Homo sapien
tgccacgtggatcacaaccttgtcg

SEQ ID NO: 1023735 - DNA, 25 bp, Homo sapien
acagctgtctggagagcttcacgtg

SEQ ID NO: 1023736 - DNA, 25 bp, Homo sapien
tccgtcatcgctcacagaggcatgg

SEQ ID NO: 1023737 - DNA, 25 bp, Homo sapien
aggcatgggcccgaatttcagcccc

SEQ ID NO: 1023738 - DNA, 25 bp, Homo sapien
tctccgtccagtggccagcaatggg

SEQ ID NO: 1023739 - DNA, 25 bp, Homo sapien
agcagcgtggcccacgcttggacac

SEQ ID NO: 1023740 - DNA, 25 bp, Homo sapien
gacttggtttattaccgtcactata

SEQ ID NO: 1023741 - DNA, 25 bp, Homo sapien
ggcgacctgcttccctaggtggctc

SEQ ID NO: 1023742 - DNA, 25 bp, Homo sapien
tccccagaaatctggactgagaccc

SEQ ID NO: 1023743 - DNA, 25 bp, Homo sapien
caccgtgctgggctccatcaaggtt

SEQ ID NO: 1023744 - DNA, 25 bp, Homo sapien
ccaccgtgctgggctccatcaaggt

SEQ ID NO: 1023745 - DNA, 25 bp, Homo sapien
accgtgctgggctccatcaaggttt

SEQ ID NO: 1023746 - DNA, 25 bp, Homo sapien
ccgtgctgggctccatcaaggtttt

SEQ ID NO: 1023747 - DNA, 25 bp, Homo sapien
gcatcaggtctcaacattttccggg

SEQ ID NO: 1023748 - DNA, 25 bp, Homo sapien
taggatacacggatgccgctgggca

SEQ ID NO: 1023749 - DNA, 25 bp, Homo sapien
gatctgctatcaagaacgtgcgggc

SEQ ID NO: 1023750 - DNA, 25 bp, Homo sapien
ttcaacagaaagtcaggcgatggct

SEQ ID NO: 1023751 - DNA, 25 bp, Homo sapien
tttgagcttggactgttgctccaac

SEQ ID NO: 1023752 - DNA, 25 bp, Homo sapien
gttgctccaactgcagcgtctgctc

SEQ ID NO: 1023753 - DNA, 25 bp, Homo sapien
gcatctgcgccagattcagggcgtc

SEQ ID NO: 1023754 - DNA, 25 bp, Homo sapien
tgctcctgcatctgcgccagattca

SEQ ID NO: 1023755 - DNA, 25 bp, Homo sapien
tccgtaaatcctcattgacaagttg

SEQ ID NO: 1023756 - DNA, 25 bp, Homo sapien
gaatccttccccaaacaaggtgcca

SEQ ID NO: 1023757 - DNA, 25 bp, Homo sapien
aatccttccccaaacaaggtgccag

SEQ ID NO: 1023758 - DNA, 25 bp, Homo sapien
cgtggctgtcactttgtcccggtct

SEQ ID NO: 1023759 - DNA, 25 bp, Homo sapien
actttgtcccggtctgtcacaaagg

SEQ ID NO: 1023760 - DNA, 25 bp, Homo sapien
ccagccctgttttatgagtatgttt

SEQ ID NO: 1023761 - DNA, 25 bp, Homo sapien
agcaggtccagtttgggcttgttcc

SEQ ID NO: 1023762 - DNA, 25 bp, Homo sapien
gggcttgttccatgctgggagagcg

SEQ ID NO: 1023763 - DNA, 25 bp, Homo sapien
ctgggagagcgccaggacctgtgca

SEQ ID NO: 1023764 - DNA, 25 bp, Homo sapien
cttgttccatgctgggagagcgcca

SEQ ID NO: 1023765 - DNA, 25 bp, Homo sapien
acagccacgcggttacaggaggcag

SEQ ID NO: 1023766 - DNA, 25 bp, Homo sapien
gctggccccacaggaacccgaattc

SEQ ID NO: 1023767 - DNA, 25 bp, Homo sapien
ccacagccacgcggttacaggaggc

SEQ ID NO: 1023768 - DNA, 25 bp, Homo sapien
tgagggagaagcacagggccgtgtg

SEQ ID NO: 1023769 - DNA, 25 bp, Homo sapien
accgtgatgcgggacgtctccctca

SEQ ID NO: 1023770 - DNA, 25 bp, Homo sapien
cattcttggctgagtagaccccgac

SEQ ID NO: 1023771 - DNA, 25 bp, Homo sapien
agcggccagtgacggctgtcgcatt

SEQ ID NO: 1023772 - DNA, 25 bp, Homo sapien
gacgtctccctcactagggacggct

SEQ ID NO: 1023773 - DNA, 25 bp, Homo sapien
ctccagcacgtcctggggtcgactg

SEQ ID NO: 1023774 - DNA, 25 bp, Homo sapien
ccagcacgtcctggggtcgactgag

SEQ ID NO: 1023775 - DNA, 25 bp, Homo sapien
gtcctggggtcgactgaggagccgc

SEQ ID NO: 1023776 - DNA, 25 bp, Homo sapien
ctaagcacaacaccctccagcacgt

SEQ ID NO: 1023777 - DNA, 25 bp, Homo sapien
atgttccttgtcattatggcgatgt

SEQ ID NO: 1023778 - DNA, 25 bp, Homo sapien
tccttgtcattatggcgatgtcgcg

SEQ ID NO: 1023779 - DNA, 25 bp, Homo sapien
tccatgcctgagtgcagggcgagtt

SEQ ID NO: 1023780 - DNA, 25 bp, Homo sapien
cgtccccgcctgtcatgatggcgta

SEQ ID NO: 1023781 - DNA, 25 bp, Homo sapien
gcctgtcatgatggcgtagtccatg

SEQ ID NO: 1023782 - DNA, 25 bp, Homo sapien
gccggctggtattggcccagtcaaa

SEQ ID NO: 1023783 - DNA, 25 bp, Homo sapien
caccagggtccacactcaggggact

SEQ ID NO: 1023784 - DNA, 25 bp, Homo sapien
ccctgagccaagtatcccactggca

SEQ ID NO: 1023785 - DNA, 25 bp, Homo sapien
gccctgagccaagtatcccactggc

SEQ ID NO: 1023786 - DNA, 25 bp, Homo sapien
gctggtggccgcttagagtccacac

SEQ ID NO: 1023787 - DNA, 25 bp, Homo sapien
gaagcagactctgccccgcaggctt

SEQ ID NO: 1023788 - DNA, 25 bp, Homo sapien
ctgacagaagctgatccaccgacag

SEQ ID NO: 1023789 - DNA, 25 bp, Homo sapien
gactctgccccgcaggcttcacccc

SEQ ID NO: 1023790 - DNA, 25 bp, Homo sapien
tcgcttccgaaggaaggcgtccgct

SEQ ID NO: 1023791 - DNA, 25 bp, Homo sapien
cttccgaaggaaggcgtccgcttca

SEQ ID NO: 1023792 - DNA, 25 bp, Homo sapien
tggctcgcttccgaaggaaggcgtc

SEQ ID NO: 1023793 - DNA, 25 bp, Homo sapien
cgaaggaaggcgtccgcttcatcca

SEQ ID NO: 1023794 - DNA, 25 bp, Homo sapien
ggccctgaggtcctcgcttatcttc

SEQ ID NO: 1023795 - DNA, 25 bp, Homo sapien
gccctgaggtcctcgcttatcttct

SEQ ID NO: 1023796 - DNA, 25 bp, Homo sapien
gctggcccgtgcggtacaggaaggc

SEQ ID NO: 1023797 - DNA, 25 bp, Homo sapien
ctggcccgtgcggtacaggaaggcg

SEQ ID NO: 1023798 - DNA, 25 bp, Homo sapien
gagcagggatgcgggacccagagtc

SEQ ID NO: 1023799 - DNA, 25 bp, Homo sapien
ccatcacgtcgatgcaggcattgat

SEQ ID NO: 1023800 - DNA, 25 bp, Homo sapien
tcgatgcaggcattgatggcccagt

SEQ ID NO: 1023801 - DNA, 25 bp, Homo sapien
cccagtcgaactgctcggggtggca

SEQ ID NO: 1023802 - DNA, 25 bp, Homo sapien
catactcgttaagatacattctcac

SEQ ID NO: 1023803 - DNA, 25 bp, Homo sapien
agctcccacaccacgaggtggaggc

SEQ ID NO: 1023804 - DNA, 25 bp, Homo sapien
ttcccaagtgggccggccaaggcag

SEQ ID NO: 1023805 - DNA, 25 bp, Homo sapien
agcagctcccacaccacgaggtgga

SEQ ID NO: 1023806 - DNA, 25 bp, Homo sapien
gttcccaagtgggccggccaaggca

SEQ ID NO: 1023807 - DNA, 25 bp, Homo sapien
gtcagccgagcgatctctaagcact

SEQ ID NO: 1023808 - DNA, 25 bp, Homo sapien
gccctctgtcagccgagcgatctct

SEQ ID NO: 1023809 - DNA, 25 bp, Homo sapien
cctctgtcagccgagcgatctctaa

SEQ ID NO: 1023810 - DNA, 25 bp, Homo sapien
tctgtcagccgagcgatctctaagc

SEQ ID NO: 1023811 - DNA, 25 bp, Homo sapien
cggccagctgtgcgatcttccggca

SEQ ID NO: 1023812 - DNA, 25 bp, Homo sapien
ggccagctgtgcgatcttccggcat

SEQ ID NO: 1023813 - DNA, 25 bp, Homo sapien
agcgatgcctgtgcatggccagggt

SEQ ID NO: 1023814 - DNA, 25 bp, Homo sapien
cagcgatgcctgtgcatggccaggg

SEQ ID NO: 1023815 - DNA, 25 bp, Homo sapien
tgtgctgctagatcgagtgaccaga

SEQ ID NO: 1023816 - DNA, 25 bp, Homo sapien
tgctagatcgagtgaccagattgtc

SEQ ID NO: 1023817 - DNA, 25 bp, Homo sapien
cataatgtgctgctagatcgagtga

SEQ ID NO: 1023818 - DNA, 25 bp, Homo sapien
gagtgaccagattgtcacacagact

SEQ ID NO: 1023819 - DNA, 25 bp, Homo sapien
tttcaaataatctggctgacttgac

SEQ ID NO: 1023820 - DNA, 25 bp, Homo sapien
taatacagctccctacataccccgg

SEQ ID NO: 1023821 - DNA, 25 bp, Homo sapien
cgttcaaatcaaggtagttggctac

SEQ ID NO: 1023822 - DNA, 25 bp, Homo sapien
taccccggctcctacgttcaaatca

SEQ ID NO: 1023823 - DNA, 25 bp, Homo sapien
ggggatgaccacgtggtgcccgtcc

SEQ ID NO: 1023824 - DNA, 25 bp, Homo sapien
atggggatgaccacgtggtgcccgt

SEQ ID NO: 1023825 - DNA, 25 bp, Homo sapien
tggggatgaccacgtggtgcccgtc

SEQ ID NO: 1023826 - DNA, 25 bp, Homo sapien
catggggatgaccacgtggtgcccg

SEQ ID NO: 1023827 - DNA, 25 bp, Homo sapien
cacaacaccgtcaccacgatagaac

SEQ ID NO: 1023828 - DNA, 25 bp, Homo sapien
tcccacaacaccgtcaccacgatag

SEQ ID NO: 1023829 - DNA, 25 bp, Homo sapien
ccatcctcccacaacaccgtcacca

SEQ ID NO: 1023830 - DNA, 25 bp, Homo sapien
accatcctcccacaacaccgtcacc

SEQ ID NO: 1023831 - DNA, 25 bp, Homo sapien
ctggacaaagtcttgcacgcaggcg

SEQ ID NO: 1023832 - DNA, 25 bp, Homo sapien
tggacaaagtcttgcacgcaggcgt

SEQ ID NO: 1023833 - DNA, 25 bp, Homo sapien
gacaaagtcttgcacgcaggcgtcc

SEQ ID NO: 1023834 - DNA, 25 bp, Homo sapien
ggacaaagtcttgcacgcaggcgtc

SEQ ID NO: 1023835 - DNA, 25 bp, Homo sapien
agccaatagacacagcggtgcggcc

SEQ ID NO: 1023836 - DNA, 25 bp, Homo sapien
accccgccccgtgtcagccaataga

SEQ ID NO: 1023837 - DNA, 25 bp, Homo sapien
tacggggagtatttcctaaatgtgc

SEQ ID NO: 1023838 - DNA, 25 bp, Homo sapien
gagtatttcctaaatgtgcggggcc

SEQ ID NO: 1023839 - DNA, 25 bp, Homo sapien
tgctgcagtgcaattccatggtctc

SEQ ID NO: 1023840 - DNA, 25 bp, Homo sapien
gagttccccagccatagtcagacgc

SEQ ID NO: 1023841 - DNA, 25 bp, Homo sapien
aaaaccaaatgagttccccagccat

SEQ ID NO: 1023842 - DNA, 25 bp, Homo sapien
caattccatggtctcagctcagtgc

SEQ ID NO: 1023843 - DNA, 25 bp, Homo sapien
ctcccggcgacggaaatgcgtaagg

SEQ ID NO: 1023844 - DNA, 25 bp, Homo sapien
ggcgacggaaatgcgtaagggacac

SEQ ID NO: 1023845 - DNA, 25 bp, Homo sapien
cttcctcccggcgacggaaatgcgt

SEQ ID NO: 1023846 - DNA, 25 bp, Homo sapien
cgacggaaatgcgtaagggacacgc

SEQ ID NO: 1023847 - DNA, 25 bp, Homo sapien
cacccgagtctgactcgggcgcggc

SEQ ID NO: 1023848 - DNA, 25 bp, Homo sapien
cccacccgagtctgactcgggcgcg

SEQ ID NO: 1023849 - DNA, 25 bp, Homo sapien
cccccacccgagtctgactcgggcg

SEQ ID NO: 1023850 - DNA, 25 bp, Homo sapien
gggcgcggctgggagcagcctccac

SEQ ID NO: 1023851 - DNA, 25 bp, Homo sapien
cttgttaacgccgaagagccacgac

SEQ ID NO: 1023852 - DNA, 25 bp, Homo sapien
tgttaacgccgaagagccacgacat

SEQ ID NO: 1023853 - DNA, 25 bp, Homo sapien
ggcccttgttaacgccgaagagcca

SEQ ID NO: 1023854 - DNA, 25 bp, Homo sapien
cccttgttaacgccgaagagccacg

SEQ ID NO: 1023855 - DNA, 25 bp, Homo sapien
cctcggccccgggctgcgcgggcgg

SEQ ID NO: 1023856 - DNA, 25 bp, Homo sapien
ctgcgcgggcggcaaaggcggcggc

SEQ ID NO: 1023857 - DNA, 25 bp, Homo sapien
ccgccctcggccccgggctgcgcgg

SEQ ID NO: 1023858 - DNA, 25 bp, Homo sapien
ggctgcgcgggcggcaaaggcggcg

SEQ ID NO: 1023859 - DNA, 25 bp, Homo sapien
tccaggccggtggggtcgaagttgc

SEQ ID NO: 1023860 - DNA, 25 bp, Homo sapien
ccaggccggtggggtcgaagttgct

SEQ ID NO: 1023861 - DNA, 25 bp, Homo sapien
tgcaaacgggtgacggaaagagtcc

SEQ ID NO: 1023862 - DNA, 25 bp, Homo sapien
tgacggaaagagtccgatcctcccg

SEQ ID NO: 1023863 - DNA, 25 bp, Homo sapien
cgggtgacggaaagagtccgatcct

SEQ ID NO: 1023864 - DNA, 25 bp, Homo sapien
gaaagagtccgatcctcccggcacg

SEQ ID NO: 1023865 - DNA, 25 bp, Homo sapien
gcagagcggactgcgggtcaggagc

SEQ ID NO: 1023866 - DNA, 25 bp, Homo sapien
aacaaaagcctgatggagggctccc

SEQ ID NO: 1023867 - DNA, 25 bp, Homo sapien
ggactggagcaactcagaggcacag

SEQ ID NO: 1023868 - DNA, 25 bp, Homo sapien
agggcagaccaaggcactggcaacg

SEQ ID NO: 1023869 - DNA, 25 bp, Homo sapien
ctgggataatgtactgctgtgactt

SEQ ID NO: 1023870 - DNA, 25 bp, Homo sapien
gttgctccaactgcagcgtctgctc

SEQ ID NO: 1023871 - DNA, 25 bp, Homo sapien
tttgagcttggactgttgctccaac

SEQ ID NO: 1023872 - DNA, 25 bp, Homo sapien
actgcagcgtctgctcctgcatctg

SEQ ID NO: 1023873 - DNA, 25 bp, Homo sapien
tgcatctgcgccagattcagggcct

SEQ ID NO: 1023874 - DNA, 25 bp, Homo sapien
cagcagagaagcctgcgaaggcccc

SEQ ID NO: 1023875 - DNA, 25 bp, Homo sapien
gcaggtgctcacttttggactgtga

SEQ ID NO: 1023876 - DNA, 25 bp, Homo sapien
gatcaggccctggaggaatccagac

SEQ ID NO: 1023877 - DNA, 25 bp, Homo sapien
tgagggcagagctcgtgcccattct

SEQ ID NO: 1023878 - DNA, 25 bp, Homo sapien
gtgtctgcacagctccggcacggca

SEQ ID NO: 1023879 - DNA, 25 bp, Homo sapien
gacagccgctcctgtgtctgcacag

SEQ ID NO: 1023880 - DNA, 25 bp, Homo sapien
ggcacggcagagactccgtgcccag

SEQ ID NO: 1023881 - DNA, 25 bp, Homo sapien
cagactagtgtgtgcagcaggttca

SEQ ID NO: 1023882 - DNA, 25 bp, Homo sapien
cccggatctgctcgctcttgagctg

SEQ ID NO: 1023883 - DNA, 25 bp, Homo sapien
agcctgcgcccggatctgctcgctc

SEQ ID NO: 1023884 - DNA, 25 bp, Homo sapien
tggtgctgccgggtctcctcgctca

SEQ ID NO: 1023885 - DNA, 25 bp, Homo sapien
tgcgcccggatctgctcgctcttga

SEQ ID NO: 1023886 - DNA, 25 bp, Homo sapien
aggtcttaggcgtttgtgcaaggcc

SEQ ID NO: 1023887 - DNA, 25 bp, Homo sapien
cagctctaatggctgactccagagt

SEQ ID NO: 1023888 - DNA, 25 bp, Homo sapien
tgcaaggccgttccgagggcagctc

SEQ ID NO: 1023889 - DNA, 25 bp, Homo sapien
tccctcgcggcctcttgcgctctta

SEQ ID NO: 1023890 - DNA, 25 bp, Homo sapien
ggcggcaaagacacatctcagccgg

SEQ ID NO: 1023891 - DNA, 25 bp, Homo sapien
cagtctgggccgactgggcggagcg

SEQ ID NO: 1023892 - DNA, 25 bp, Homo sapien
agaagagggcggcaaagacacatct

SEQ ID NO: 1023893 - DNA, 25 bp, Homo sapien
aaagacacatctcagccgggagctg

SEQ ID NO: 1023894 - DNA, 25 bp, Homo sapien
cagttggtcctcgtagcgctgccgg

SEQ ID NO: 1023895 - DNA, 25 bp, Homo sapien
gctgcttcagttggtcctcgtagcg

SEQ ID NO: 1023896 - DNA, 25 bp, Homo sapien
ccgggccagcttgtcttgatactgg

SEQ ID NO: 1023897 - DNA, 25 bp, Homo sapien
ccagcttgtcttgatactgggccct

SEQ ID NO: 1023898 - DNA, 25 bp, Homo sapien
tcgccgcatggcttcctgcttctgc

SEQ ID NO: 1023899 - DNA, 25 bp, Homo sapien
ttccgtaaattctcctcattgagaa

SEQ ID NO: 1023900 - DNA, 25 bp, Homo sapien
ctgcttccgtaaattctcctcattg

SEQ ID NO: 1023901 - DNA, 25 bp, Homo sapien
catggcttcctgcttctgcacggac

SEQ ID NO: 1023902 - DNA, 25 bp, Homo sapien
tcctgccctccctgaacagatcctg

SEQ ID NO: 1023903 - DNA, 25 bp, Homo sapien
gcaggcctcgcccactgcactggta

SEQ ID NO: 1023904 - DNA, 25 bp, Homo sapien
gcgtccactcgcagacagaggtgtc

SEQ ID NO: 1023905 - DNA, 25 bp, Homo sapien
ctgaacagatcctggcgtccactcg

SEQ ID NO: 1023906 - DNA, 25 bp, Homo sapien
gcagcatctcattcttgtgccgcag

SEQ ID NO: 1023907 - DNA, 25 bp, Homo sapien
gatctgctcgcggatgatgtctgca

SEQ ID NO: 1023908 - DNA, 25 bp, Homo sapien
cggatgatgtctgcattctcccgct

SEQ ID NO: 1023909 - DNA, 25 bp, Homo sapien
tccaagacggtctgacggtgctcgg

SEQ ID NO: 1023910 - DNA, 25 bp, Homo sapien
actttgtcccggtctgtcacaaagg

SEQ ID NO: 1023911 - DNA, 25 bp, Homo sapien
gaatccttccccaaacaaggtgcca

SEQ ID NO: 1023912 - DNA, 25 bp, Homo sapien
cgtggctgtcactttgtcccggtct

SEQ ID NO: 1023913 - DNA, 25 bp, Homo sapien
aatccttccccaaacaaggtgccag

SEQ ID NO: 1023914 - DNA, 25 bp, Homo sapien
ctgccagccctgttttatgaatatg

SEQ ID NO: 1023915 - DNA, 25 bp, Homo sapien
ccagccctgttttatgaatatgttt

SEQ ID NO: 1023916 - DNA, 25 bp, Homo sapien
tgccagccctgttttatgaatatgt

SEQ ID NO: 1023917 - DNA, 25 bp, Homo sapien
agccctgttttatgaatatgtttac

SEQ ID NO: 1023918 - DNA, 25 bp, Homo sapien
caggaggcccccacatgctgcctct

SEQ ID NO: 1023919 - DNA, 25 bp, Homo sapien
gaggcccccacatgctgcctctcag

SEQ ID NO: 1023920 - DNA, 25 bp, Homo sapien
aggaggcccccacatgctgcctctc

SEQ ID NO: 1023921 - DNA, 25 bp, Homo sapien
tccaggaggcccccacatgctgcct

SEQ ID NO: 1023922 - DNA, 25 bp, Homo sapien
ctacagggctgtgcagagccggcag

SEQ ID NO: 1023923 - DNA, 25 bp, Homo sapien
cagggctgtgcagagccggcaggga

SEQ ID NO: 1023924 - DNA, 25 bp, Homo sapien
gctgtgcagagccggcagggacagg

SEQ ID NO: 1023925 - DNA, 25 bp, Homo sapien
gggctgtgcagagccggcagggaca

SEQ ID NO: 1023926 - DNA, 25 bp, Homo sapien
ttctctcgccaagaatggagtgcag

SEQ ID NO: 1023927 - DNA, 25 bp, Homo sapien
agcagccgagcccagcaggtacaac

SEQ ID NO: 1023928 - DNA, 25 bp, Homo sapien
gtacaacgtgggtttgctctgtgct

SEQ ID NO: 1023929 - DNA, 25 bp, Homo sapien
tttcactcttaccaggatgatctcg

SEQ ID NO: 1023930 - DNA, 25 bp, Homo sapien
taaagcctcgctcttttgtgcccag

SEQ ID NO: 1023931 - DNA, 25 bp, Homo sapien
acccaagaggcgaagctgacagtga

SEQ ID NO: 1023932 - DNA, 25 bp, Homo sapien
tgcacttgagcagcacacttgaaag

SEQ ID NO: 1023933 - DNA, 25 bp, Homo sapien
ggagctgcttaatgcgcccttgact

SEQ ID NO: 1023934 - DNA, 25 bp, Homo sapien
agcataaatcctagaaagcctcggt

SEQ ID NO: 1023935 - DNA, 25 bp, Homo sapien
tggcagcataaatcctagaaagcct

SEQ ID NO: 1023936 - DNA, 25 bp, Homo sapien
tcctagaaagcctcggtcgctgagc

SEQ ID NO: 1023937 - DNA, 25 bp, Homo sapien
aaatcctagaaagcctcggtcgctg

SEQ ID NO: 1023938 - DNA, 25 bp, Homo sapien
ctagagcaggagacgcacggggctg

SEQ ID NO: 1023939 - DNA, 25 bp, Homo sapien
aggagacgcacggggctgcccccac

SEQ ID NO: 1023940 - DNA, 25 bp, Homo sapien
gagacaccgcactggcgcaccggcc

SEQ ID NO: 1023941 - DNA, 25 bp, Homo sapien
gcagcagagacaccgcactggcgca

SEQ ID NO: 1023942 - DNA, 25 bp, Homo sapien
tgcagcagagacaccgcactggcgc

SEQ ID NO: 1023943 - DNA, 25 bp, Homo sapien
gcagagacaccgcactggcgcaccg

SEQ ID NO: 1023944 - DNA, 25 bp, Homo sapien
accgtgatgcgggacgtctccctca

SEQ ID NO: 1023945 - DNA, 25 bp, Homo sapien
cattcttggctgagtagaccccgac

SEQ ID NO: 1023946 - DNA, 25 bp, Homo sapien
agcggccagtgacggctgtcgcatt

SEQ ID NO: 1023947 - DNA, 25 bp, Homo sapien
gacgtctccctcactagggacggct

SEQ ID NO: 1023948 - DNA, 25 bp, Homo sapien
ctaagcacaacaccctccagcacgt

SEQ ID NO: 1023949 - DNA, 25 bp, Homo sapien
ctccagcacgtcctggggtcgactg

SEQ ID NO: 1023950 - DNA, 25 bp, Homo sapien
gtcctggggtcgactgaggagccgc

SEQ ID NO: 1023951 - DNA, 25 bp, Homo sapien
ccagcacgtcctggggtcgactgag

SEQ ID NO: 1023952 - DNA, 25 bp, Homo sapien
cagtccaagcagttgcatctcagga

SEQ ID NO: 1023953 - DNA, 25 bp, Homo sapien
aggacccaaaagctcctgggcgcca

SEQ ID NO: 1023954 - DNA, 25 bp, Homo sapien
tctgcacccacggaagcctcggtga

SEQ ID NO: 1023955 - DNA, 25 bp, Homo sapien
tcgtgggcagcctatctatccccgg

SEQ ID NO: 1023956 - DNA, 25 bp, Homo sapien
ttggcaaacagcgtcttcccggtgc

SEQ ID NO: 1023957 - DNA, 25 bp, Homo sapien
cttggcaaacagcgtcttcccggtg

SEQ ID NO: 1023958 - DNA, 25 bp, Homo sapien
tggcaaacagcgtcttcccggtgcc

SEQ ID NO: 1023959 - DNA, 25 bp, Homo sapien
cgtccccgcctgtcatgatggcgta

SEQ ID NO: 1023960 - DNA, 25 bp, Homo sapien
tccatgcctgagtgcagggcgagtt

SEQ ID NO: 1023961 - DNA, 25 bp, Homo sapien
gcctgtcatgatggcgtagtccatg

SEQ ID NO: 1023962 - DNA, 25 bp, Homo sapien
gccggctggtattggcccagtcaaa

SEQ ID NO: 1023963 - DNA, 25 bp, Homo sapien
ccctgagccaagtatcccactggca

SEQ ID NO: 1023964 - DNA, 25 bp, Homo sapien
gccctgagccaagtatcccactggc

SEQ ID NO: 1023965 - DNA, 25 bp, Homo sapien
caccagggtccacactcaggggact

SEQ ID NO: 1023966 - DNA, 25 bp, Homo sapien
ctgtgaacgagagagaggccaagca

SEQ ID NO: 1023967 - DNA, 25 bp, Homo sapien
gagtgacgccaggagcagcccacag

SEQ ID NO: 1023968 - DNA, 25 bp, Homo sapien
gatccccacggggtcaggctctgcc

SEQ ID NO: 1023969 - DNA, 25 bp, Homo sapien
gccaagcaaggcgagagtgacgcca

SEQ ID NO: 1023970 - DNA, 25 bp, Homo sapien
tggctcgcttccgaaggaaggcgtc

SEQ ID NO: 1023971 - DNA, 25 bp, Homo sapien
gtggctcgcttccgaaggaaggcgt

SEQ ID NO: 1023972 - DNA, 25 bp, Homo sapien
agtggctcgcttccgaaggaaggcg

SEQ ID NO: 1023973 - DNA, 25 bp, Homo sapien
ctgtgttggcccatgtggtacagga

SEQ ID NO: 1023974 - DNA, 25 bp, Homo sapien
tgctgtgttggcccatgtggtacag

SEQ ID NO: 1023975 - DNA, 25 bp, Homo sapien
gctgtgttggcccatgtggtacagg

SEQ ID NO: 1023976 - DNA, 25 bp, Homo sapien
tgtgttggcccatgtggtacaggaa

SEQ ID NO: 1023977 - DNA, 25 bp, Homo sapien
tctgggcggcagcaatcagaccacc

SEQ ID NO: 1023978 - DNA, 25 bp, Homo sapien
ggcacaggaccgcagaaatctaggg

SEQ ID NO: 1023979 - DNA, 25 bp, Homo sapien
cgcacagggccgtgaagacaggact

SEQ ID NO: 1023980 - DNA, 25 bp, Homo sapien
acatagggccggtcaccctactggg

SEQ ID NO: 1023981 - DNA, 25 bp, Homo sapien
ggagcccaacgtgcctgaagagtca

SEQ ID NO: 1023982 - DNA, 25 bp, Homo sapien
gacccaggagcccaacgtgcctgaa

SEQ ID NO: 1023983 - DNA, 25 bp, Homo sapien
ctccagggagcgtcgaacggcagca

SEQ ID NO: 1023984 - DNA, 25 bp, Homo sapien
cccaacgtgcctgaagagtcagcca

SEQ ID NO: 1023985 - DNA, 25 bp, Homo sapien
cggcagcttgtgagcacaggaaaca

SEQ ID NO: 1023986 - DNA, 25 bp, Homo sapien
cctgataggcagtgccgggaacacc

SEQ ID NO: 1023987 - DNA, 25 bp, Homo sapien
ctgtcaagattatggccatgcgagc

SEQ ID NO: 1023988 - DNA, 25 bp, Homo sapien
ttgggagaatctaaagcggcagctt

SEQ ID NO: 1023989 - DNA, 25 bp, Homo sapien
ctcctgctgcggcaggtcgaagtgg

SEQ ID NO: 1023990 - DNA, 25 bp, Homo sapien
gatggcacagtcgaactgctcaggc

SEQ ID NO: 1023991 - DNA, 25 bp, Homo sapien
cagtcgaactgctcaggcagattgc

SEQ ID NO: 1023992 - DNA, 25 bp, Homo sapien
gttgtcaaaatgcagtctcaccagg

SEQ ID NO: 1023993 - DNA, 25 bp, Homo sapien
ggggccgggtgaggcgggacactca

SEQ ID NO: 1023994 - DNA, 25 bp, Homo sapien
gggccgggtgaggcgggacactcac

SEQ ID NO: 1023995 - DNA, 25 bp, Homo sapien
gaaggagttcccaagtgaggcagcc

SEQ ID NO: 1023996 - DNA, 25 bp, Homo sapien
ggaccccacaccatgaggtggaggc

SEQ ID NO: 1023997 - DNA, 25 bp, Homo sapien
ggccgcggaccccacaccatgaggt

SEQ ID NO: 1023998 - DNA, 25 bp, Homo sapien
agctggcctacacccatgccatatg

SEQ ID NO: 1023999 - DNA, 25 bp, Homo sapien
cgtagtcaaactgggccagcttcag

SEQ ID NO: 1024000 - DNA, 25 bp, Homo sapien
gcacttcctcccgtagtcaaactgg

SEQ ID NO: 1024001 - DNA, 25 bp, Homo sapien
ttcctcccgtagtcaaactgggcca

SEQ ID NO: 1024002 - DNA, 25 bp, Homo sapien
tcccgtagtcaaactgggccagctt

SEQ ID NO: 1024003 - DNA, 25 bp, Homo sapien
catcctcccacaacactgtcaccat

SEQ ID NO: 1024004 - DNA, 25 bp, Homo sapien
tcccacaacactgtcaccatgacag

SEQ ID NO: 1024005 - DNA, 25 bp, Homo sapien
cagcacaccatcctcccacaacact

SEQ ID NO: 1024006 - DNA, 25 bp, Homo sapien
cacaacactgtcaccatgacagaac

SEQ ID NO: 1024007 - DNA, 25 bp, Homo sapien
tcttctgtcggtactgctggacagc

SEQ ID NO: 1024008 - DNA, 25 bp, Homo sapien
catcttctgtcggtactgctggaca

SEQ ID NO: 1024009 - DNA, 25 bp, Homo sapien
tctgtcggtactgctggacagcatc

SEQ ID NO: 1024010 - DNA, 25 bp, Homo sapien
cttctgtcggtactgctggacagca

SEQ ID NO: 1024011 - DNA, 25 bp, Homo sapien
cgcgcccaggcccctccgccttcag

SEQ ID NO: 1024012 - DNA, 25 bp, Homo sapien
ccgcgcccaggcccctccgccttca

SEQ ID NO: 1024013 - DNA, 25 bp, Homo sapien
gtctcgccttggactccggataggg

SEQ ID NO: 1024014 - DNA, 25 bp, Homo sapien
tccatgaggtgagggtctcgccttg

SEQ ID NO: 1024015 - DNA, 25 bp, Homo sapien
gctccatgaggtgagggtctcgcct

SEQ ID NO: 1024016 - DNA, 25 bp, Homo sapien
aggtgagggtctcgccttggactcc

SEQ ID NO: 1024017 - DNA, 25 bp, Homo sapien
tgcatctcccaagagtgtctcgagg

SEQ ID NO: 1024018 - DNA, 25 bp, Homo sapien
ctgtgagccagacggaaaatgcatc

SEQ ID NO: 1024019 - DNA, 25 bp, Homo sapien
agccagacggaaaatgcatctccca

SEQ ID NO: 1024020 - DNA, 25 bp, Homo sapien
ctccccctgtgagccagacggaaaa

SEQ ID NO: 1024021 - DNA, 25 bp, Homo sapien
tgtggtcatgaagtcaccgctggcc

SEQ ID NO: 1024022 - DNA, 25 bp, Homo sapien
cttgagccaagacagggacgcagct

SEQ ID NO: 1024023 - DNA, 25 bp, Homo sapien
gaaaccccgagcagtgtcagtcaat

SEQ ID NO: 1024024 - DNA, 25 bp, Homo sapien
gcattcagaccccaactcggatgtg

SEQ ID NO: 1024025 - DNA, 25 bp, Homo sapien
ggtttcctgtctgagagtcctccag

SEQ ID NO: 1024026 - DNA, 25 bp, Homo sapien
aaggtttcctgtctgagagtcctcc

SEQ ID NO: 1024027 - DNA, 25 bp, Homo sapien
aggtttcctgtctgagagtcctcca

SEQ ID NO: 1024028 - DNA, 25 bp, Homo sapien
tgggcattatagcaagactcggtct

SEQ ID NO: 1024029 - DNA, 25 bp, Homo sapien
tgtttcatcgaccaatatgaggctc

SEQ ID NO: 1024030 - DNA, 25 bp, Homo sapien
tctgctctccgatgggaccgttgcg

SEQ ID NO: 1024031 - DNA, 25 bp, Homo sapien
aatttttagcattagcgggcgtggt

SEQ ID NO: 1024032 - DNA, 25 bp, Homo sapien
gcatctgtgccacattcagggcgtc

SEQ ID NO: 1024033 - DNA, 25 bp, Homo sapien
tttgagcttggactgttgctccaac

SEQ ID NO: 1024034 - DNA, 25 bp, Homo sapien
gttgctccaactgcagcgtctgctc

SEQ ID NO: 1024035 - DNA, 25 bp, Homo sapien
agcgtctgctcctgcatctgtgcca

SEQ ID NO: 1024036 - DNA, 25 bp, Homo sapien
caccaccactgtgagcagtgcagga

SEQ ID NO: 1024037 - DNA, 25 bp, Homo sapien
actgtgagcagtgcaggatgagcat

SEQ ID NO: 1024038 - DNA, 25 bp, Homo sapien
caccactgtgagcagtgcaggatga

SEQ ID NO: 1024039 - DNA, 25 bp, Homo sapien
ctgtgagcagtgcaggatgagcatc

SEQ ID NO: 1024040 - DNA, 25 bp, Homo sapien
ctatcactggagatggctcacactc

SEQ ID NO: 1024041 - DNA, 25 bp, Homo sapien
agccactgtgtgtgggtggcaagcc

SEQ ID NO: 1024042 - DNA, 25 bp, Homo sapien
ctgtgtgtgggtggcaagccaacca

SEQ ID NO: 1024043 - DNA, 25 bp, Homo sapien
gtgtgggtggcaagccaaccaggtg

SEQ ID NO: 1024044 - DNA, 25 bp, Homo sapien
gtggcaagccaaccaggtgctgagg

SEQ ID NO: 1024045 - DNA, 25 bp, Homo sapien
cctcccacaacaccgtcgccacgat

SEQ ID NO: 1024046 - DNA, 25 bp, Homo sapien
cctgccatggggatgaccacgtggt

SEQ ID NO: 1024047 - DNA, 25 bp, Homo sapien
gggatgaccacgtggtgcccgtccc

SEQ ID NO: 1024048 - DNA, 25 bp, Homo sapien
gtcgccacgatagaacctgccatgg

SEQ ID NO: 1024049 - DNA, 25 bp, Homo sapien
acagcatcttgcacgcgggtgtcca

SEQ ID NO: 1024050 - DNA, 25 bp, Homo sapien
gcatcttgcacgcgggtgtccatca

SEQ ID NO: 1024051 - DNA, 25 bp, Homo sapien
atcttgcacgcgggtgtccatcatg

SEQ ID NO: 1024052 - DNA, 25 bp, Homo sapien
cagcatcttgcacgcgggtgtccat

SEQ ID NO: 1024053 - DNA, 25 bp, Homo sapien
ggatgagggttgctcgtcctcgggc

SEQ ID NO: 1024054 - DNA, 25 bp, Homo sapien
tcaggatgagggttgctcgtcctcg

SEQ ID NO: 1024055 - DNA, 25 bp, Homo sapien
caggatgagggttgctcgtcctcgg

SEQ ID NO: 1024056 - DNA, 25 bp, Homo sapien
gatgagggttgctcgtcctcgggcc

SEQ ID NO: 1024057 - DNA, 25 bp, Homo sapien
gagccagcggggcgggagcggcgaa

SEQ ID NO: 1024058 - DNA, 25 bp, Homo sapien
ccagcggggcgggagcggcgaagca

SEQ ID NO: 1024059 - DNA, 25 bp, Homo sapien
cagcggggcgggagcggcgaagcat

SEQ ID NO: 1024060 - DNA, 25 bp, Homo sapien
ctttgggagccagcggggcgggagc

SEQ ID NO: 1024061 - DNA, 25 bp, Homo sapien
agcgacggcgccgcgactgccgaac

SEQ ID NO: 1024062 - DNA, 25 bp, Homo sapien
gacggcgccgcgactgccgaacagg

SEQ ID NO: 1024063 - DNA, 25 bp, Homo sapien
gcgacggcgccgcgactgccgaaca

SEQ ID NO: 1024064 - DNA, 25 bp, Homo sapien
cgacggcgccgcgactgccgaacag

SEQ ID NO: 1024065 - DNA, 25 bp, Homo sapien
cgatagaagcgcgtaagggacacgc

SEQ ID NO: 1024066 - DNA, 25 bp, Homo sapien
ccggcgatagaagcgcgtaagggac

SEQ ID NO: 1024067 - DNA, 25 bp, Homo sapien
cttcctcccggcgatagaagcgcgt

SEQ ID NO: 1024068 - DNA, 25 bp, Homo sapien
attggccccgaggacagtgacgcca

SEQ ID NO: 1024069 - DNA, 25 bp, Homo sapien
gccgcgagccggtggtcaccgccac

SEQ ID NO: 1024070 - DNA, 25 bp, Homo sapien
cgcgccgcgagccggtggtcaccgc

SEQ ID NO: 1024071 - DNA, 25 bp, Homo sapien
cgccgcgagccggtggtcaccgcca

SEQ ID NO: 1024072 - DNA, 25 bp, Homo sapien
gcgccgcgagccggtggtcaccgcc

SEQ ID NO: 1024073 - DNA, 25 bp, Homo sapien
cttggggcccttgttaatgccgaag

SEQ ID NO: 1024074 - DNA, 25 bp, Homo sapien
gcccttgttaatgccgaagagccac

SEQ ID NO: 1024075 - DNA, 25 bp, Homo sapien
tgttaatgccgaagagccacgacat

SEQ ID NO: 1024076 - DNA, 25 bp, Homo sapien
ccttgttaatgccgaagagccacga

SEQ ID NO: 1024077 - DNA, 25 bp, Homo sapien
tccaggccggtggggtcgaagttgc

SEQ ID NO: 1024078 - DNA, 25 bp, Homo sapien
ccaggccggtggggtcgaagttgct

SEQ ID NO: 1024079 - DNA, 25 bp, Homo sapien
ctgccgacagcggcgaggagcggca

SEQ ID NO: 1024080 - DNA, 25 bp, Homo sapien
ccgacagcggcgaggagcggcaagg

SEQ ID NO: 1024081 - DNA, 25 bp, Homo sapien
gccgacagcggcgaggagcggcaag

SEQ ID NO: 1024082 - DNA, 25 bp, Homo sapien
gacagcggcgaggagcggcaagggc

SEQ ID NO: 1024083 - DNA, 25 bp, Homo sapien
cgggtgacggaaagagtccgatcct

SEQ ID NO: 1024084 - DNA, 25 bp, Homo sapien
tgcaaacgggtgacggaaagagtcc

SEQ ID NO: 1024085 - DNA, 25 bp, Homo sapien
gaaagagtccgatcctcccggcacg

SEQ ID NO: 1024086 - DNA, 25 bp, Homo sapien
tgacggaaagagtccgatcctcccg

SEQ ID NO: 1024087 - DNA, 25 bp, Homo sapien
ggactggagcaactcagaggcacag

SEQ ID NO: 1024088 - DNA, 25 bp, Homo sapien
gcagagcggactgcgggtcaggagc

SEQ ID NO: 1024089 - DNA, 25 bp, Homo sapien
agggcagaccaaggcactggcaacg

SEQ ID NO: 1024090 - DNA, 25 bp, Homo sapien
aacaaaagcctgatggagggctccc

SEQ ID NO: 1024091 - DNA, 25 bp, Homo sapien
agattcagggcgtccttggcataac

SEQ ID NO: 1024092 - DNA, 25 bp, Homo sapien
gtgccagattcagggcgtccttggc

SEQ ID NO: 1024093 - DNA, 25 bp, Homo sapien
tctgtgccagattcagggcgtcctt

SEQ ID NO: 1024094 - DNA, 25 bp, Homo sapien
gcgtctgctcctgcatctgtgccag

SEQ ID NO: 1024095 - DNA, 25 bp, Homo sapien
atgcccgaaccccatgtgcgccccg

SEQ ID NO: 1024096 - DNA, 25 bp, Homo sapien
ccgaaccccatgtgcgccccggcct

SEQ ID NO: 1024097 - DNA, 25 bp, Homo sapien
atctccatgcccgaaccccatgtgc

SEQ ID NO: 1024098 - DNA, 25 bp, Homo sapien
accaatctccatgcccgaaccccat

SEQ ID NO: 1024099 - DNA, 25 bp, Homo sapien
agagcacagcactcaccagctggca

SEQ ID NO: 1024100 - DNA, 25 bp, Homo sapien
gcccagactagtgtgtgcagcaggc

SEQ ID NO: 1024101 - DNA, 25 bp, Homo sapien
tgacagccgctcctgtgtctgcacg

SEQ ID NO: 1024102 - DNA, 25 bp, Homo sapien
ggcacggcagagactccatgcccag

SEQ ID NO: 1024103 - DNA, 25 bp, Homo sapien
agcctgcgcccggatctgctcgctc

SEQ ID NO: 1024104 - DNA, 25 bp, Homo sapien
cccggatctgctcgctcttgagctg

SEQ ID NO: 1024105 - DNA, 25 bp, Homo sapien
tgcgcccggatctgctcgctcttga

SEQ ID NO: 1024106 - DNA, 25 bp, Homo sapien
tggtgctgccgggtctcctcgctca

SEQ ID NO: 1024107 - DNA, 25 bp, Homo sapien
cagctctaatggctgactccagagt

SEQ ID NO: 1024108 - DNA, 25 bp, Homo sapien
tgcaaggccgttccgagggcagctc

SEQ ID NO: 1024109 - DNA, 25 bp, Homo sapien
aggtcttaggcgtttgtgcaaggcc

SEQ ID NO: 1024110 - DNA, 25 bp, Homo sapien
gctgactccagagtgccccgggacc

SEQ ID NO: 1024111 - DNA, 25 bp, Homo sapien
cagttggtcctcgtagcgctgccgg

SEQ ID NO: 1024112 - DNA, 25 bp, Homo sapien
ccgggccagcttgtcttgatactgg

SEQ ID NO: 1024113 - DNA, 25 bp, Homo sapien
gctgcttcagttggtcctcgtagcg

SEQ ID NO: 1024114 - DNA, 25 bp, Homo sapien
ccagcttgtcttgatactgggccct

SEQ ID NO: 1024115 - DNA, 25 bp, Homo sapien
tcgccgcatggcttcctgcttctgc

SEQ ID NO: 1024116 - DNA, 25 bp, Homo sapien
ttccgtaaattctcctcattgagaa

SEQ ID NO: 1024117 - DNA, 25 bp, Homo sapien
ctgcttccgtaaattctcctcattg

SEQ ID NO: 1024118 - DNA, 25 bp, Homo sapien
catggcttcctgcttctgcacggac

SEQ ID NO: 1024119 - DNA, 25 bp, Homo sapien
gcgtccactcgcagacagaggtgtc

SEQ ID NO: 1024120 - DNA, 25 bp, Homo sapien
ctgaacagatcctggcgtccactcg

SEQ ID NO: 1024121 - DNA, 25 bp, Homo sapien
tcctgccctccctgaacagatcctg

SEQ ID NO: 1024122 - DNA, 25 bp, Homo sapien
gcaggcctcgcccactgcactggta

SEQ ID NO: 1024123 - DNA, 25 bp, Homo sapien
gcagcatctcattcttgtgccgcag

SEQ ID NO: 1024124 - DNA, 25 bp, Homo sapien
gatctgctcgcggatgatgtctgca

SEQ ID NO: 1024125 - DNA, 25 bp, Homo sapien
cggatgatgtctgcattctcccgct

SEQ ID NO: 1024126 - DNA, 25 bp, Homo sapien
tccaagacggtctgacggtgctcgg

SEQ ID NO: 1024127 - DNA, 25 bp, Homo sapien
aatccttccccaaacaaggtgccag

SEQ ID NO: 1024128 - DNA, 25 bp, Homo sapien
gaatccttccccaaacaaggtgcca

SEQ ID NO: 1024129 - DNA, 25 bp, Homo sapien
ccagccctgttttatgagtatgttt

SEQ ID NO: 1024130 - DNA, 25 bp, Homo sapien
agcataaatcctagaaagcctcggt

SEQ ID NO: 1024131 - DNA, 25 bp, Homo sapien
tggcagcataaatcctagaaagcct

SEQ ID NO: 1024132 - DNA, 25 bp, Homo sapien
tcctagaaagcctcggtcgctgagc

SEQ ID NO: 1024133 - DNA, 25 bp, Homo sapien
aaatcctagaaagcctcggtcgctg

SEQ ID NO: 1024134 - DNA, 25 bp, Homo sapien
gaagcggccggcgacaagcgtggca

SEQ ID NO: 1024135 - DNA, 25 bp, Homo sapien
ggccggcgacaagcgtggcattctt

SEQ ID NO: 1024136 - DNA, 25 bp, Homo sapien
ctcgatgaagcggccggcgacaagc

SEQ ID NO: 1024137 - DNA, 25 bp, Homo sapien
agcggccggcgacaagcgtggcatt

SEQ ID NO: 1024138 - DNA, 25 bp, Homo sapien
cacacacgctcggtaacacgcagaa

SEQ ID NO: 1024139 - DNA, 25 bp, Homo sapien
gggaagcgccatcgggtcacctgcc

SEQ ID NO: 1024140 - DNA, 25 bp, Homo sapien
cgctcggtaacacgcagaaacggag

SEQ ID NO: 1024141 - DNA, 25 bp, Homo sapien
acggaacagccaccaacgcgcacac

SEQ ID NO: 1024142 - DNA, 25 bp, Homo sapien
actgagcacaacaccctccagcgcg

SEQ ID NO: 1024143 - DNA, 25 bp, Homo sapien
ctccagcgcgtcctggggtcgactg

SEQ ID NO: 1024144 - DNA, 25 bp, Homo sapien
acaacaccctccagcgcgtcctggg

SEQ ID NO: 1024145 - DNA, 25 bp, Homo sapien
tccagcgcgtcctggggtcgactga

SEQ ID NO: 1024146 - DNA, 25 bp, Homo sapien
gcctgggtgcagactcggctcctcg

SEQ ID NO: 1024147 - DNA, 25 bp, Homo sapien
acactgtgcacccatggaagcctca

SEQ ID NO: 1024148 - DNA, 25 bp, Homo sapien
tcaggggcagcctatctatccccag

SEQ ID NO: 1024149 - DNA, 25 bp, Homo sapien
atccccagcacggtccaagcagtcg

SEQ ID NO: 1024150 - DNA, 25 bp, Homo sapien
cttggcaaacagcgtcttcccggtg

SEQ ID NO: 1024151 - DNA, 25 bp, Homo sapien
tggcaaacagcgtcttcccggtgcc

SEQ ID NO: 1024152 - DNA, 25 bp, Homo sapien
ttggcaaacagcgtcttcccggtgc

SEQ ID NO: 1024153 - DNA, 25 bp, Homo sapien
tccatgcctgagtgcagggcgagtt

SEQ ID NO: 1024154 - DNA, 25 bp, Homo sapien
cgtccccgcctgtcatgatggcgta

SEQ ID NO: 1024155 - DNA, 25 bp, Homo sapien
gcctgtcatgatggcgtagtccatg

SEQ ID NO: 1024156 - DNA, 25 bp, Homo sapien
gccggctggtattggcccagtcaaa

SEQ ID NO: 1024157 - DNA, 25 bp, Homo sapien
gccctgagccaagtatcccactggc

SEQ ID NO: 1024158 - DNA, 25 bp, Homo sapien
caccagggtccacactcaggggact

SEQ ID NO: 1024159 - DNA, 25 bp, Homo sapien
ccctgagccaagtatcccactggca

SEQ ID NO: 1024160 - DNA, 25 bp, Homo sapien
gacagccgaggccacaagggtgccc

SEQ ID NO: 1024161 - DNA, 25 bp, Homo sapien
tcgtggttccaacgaggacagccga

SEQ ID NO: 1024162 - DNA, 25 bp, Homo sapien
cctattgaagggagtgtgccatgct

SEQ ID NO: 1024163 - DNA, 25 bp, Homo sapien
agggtgccaaccatgagcatcgtgg

SEQ ID NO: 1024164 - DNA, 25 bp, Homo sapien
tggccgcttagagtccacgacaggg

SEQ ID NO: 1024165 - DNA, 25 bp, Homo sapien
cgcttagagtccacgacagggacag

SEQ ID NO: 1024166 - DNA, 25 bp, Homo sapien
actggtggccgcttagagtccacga

SEQ ID NO: 1024167 - DNA, 25 bp, Homo sapien
gcactggtggccgcttagagtccac

SEQ ID NO: 1024168 - DNA, 25 bp, Homo sapien
gggcgacgaactccgccccacaggc

SEQ ID NO: 1024169 - DNA, 25 bp, Homo sapien
ggcgacgaactccgccccacaggct

SEQ ID NO: 1024170 - DNA, 25 bp, Homo sapien
aagcaggcagatccccacggggtca

SEQ ID NO: 1024171 - DNA, 25 bp, Homo sapien
gccaagcagggcgagagtgacacca

SEQ ID NO: 1024172 - DNA, 25 bp, Homo sapien
gcagggcgagagtgacaccaggagc

SEQ ID NO: 1024173 - DNA, 25 bp, Homo sapien
tctgccccatcagcagccctaagtc

SEQ ID NO: 1024174 - DNA, 25 bp, Homo sapien
tcgcttccgaaggaaggcgtccgct

SEQ ID NO: 1024175 - DNA, 25 bp, Homo sapien
cgaaggaaggcgtccgcttcatcca

SEQ ID NO: 1024176 - DNA, 25 bp, Homo sapien
cttccgaaggaaggcgtccgcttca

SEQ ID NO: 1024177 - DNA, 25 bp, Homo sapien
tggctcgcttccgaaggaaggcgtc

SEQ ID NO: 1024178 - DNA, 25 bp, Homo sapien
gtggccagaggcttagtgacactca

SEQ ID NO: 1024179 - DNA, 25 bp, Homo sapien
tgtggccagaggcttagtgacactc

SEQ ID NO: 1024180 - DNA, 25 bp, Homo sapien
tggccagaggcttagtgacactcac

SEQ ID NO: 1024181 - DNA, 25 bp, Homo sapien
acagccacagcagaaagtcccacag

SEQ ID NO: 1024182 - DNA, 25 bp, Homo sapien
gccctgaggtcctcgcttatcttct

SEQ ID NO: 1024183 - DNA, 25 bp, Homo sapien
ctggcccgtgcggtacaggaaggcg

SEQ ID NO: 1024184 - DNA, 25 bp, Homo sapien
gctggcccgtgcggtacaggaaggc

SEQ ID NO: 1024185 - DNA, 25 bp, Homo sapien
ggccctgaggtcctcgcttatcttc

SEQ ID NO: 1024186 - DNA, 25 bp, Homo sapien
gaccatctcattgatgcggtcattg

SEQ ID NO: 1024187 - DNA, 25 bp, Homo sapien
gaagtggaccatctcattgatgcgg

SEQ ID NO: 1024188 - DNA, 25 bp, Homo sapien
tcgaagtggaccatctcattgatgc

SEQ ID NO: 1024189 - DNA, 25 bp, Homo sapien
agtggaccatctcattgatgcggtc

SEQ ID NO: 1024190 - DNA, 25 bp, Homo sapien
tccttctgtggccggcttaagaaca

SEQ ID NO: 1024191 - DNA, 25 bp, Homo sapien
ttctgtggccggcttaagaacatac

SEQ ID NO: 1024192 - DNA, 25 bp, Homo sapien
tgctttccttctgtggccggcttaa

SEQ ID NO: 1024193 - DNA, 25 bp, Homo sapien
ctttccttctgtggccggcttaaga

SEQ ID NO: 1024194 - DNA, 25 bp, Homo sapien
gcacttcctcccgtagtcaaactgg

SEQ ID NO: 1024195 - DNA, 25 bp, Homo sapien
cgtagtcaaactgggccagcttcag

SEQ ID NO: 1024196 - DNA, 25 bp, Homo sapien
ttcctcccgtagtcaaactgggcca

SEQ ID NO: 1024197 - DNA, 25 bp, Homo sapien
tcccgtagtcaaactgggccagctt

SEQ ID NO: 1024198 - DNA, 25 bp, Homo sapien
gggtgactgtcagccaccgacatgg

SEQ ID NO: 1024199 - DNA, 25 bp, Homo sapien
tacggcgatgccagactggcctcca

SEQ ID NO: 1024200 - DNA, 25 bp, Homo sapien
ccgggtgactgtcagccaccgacat

SEQ ID NO: 1024201 - DNA, 25 bp, Homo sapien
gcaaagctcgggctacggcgatgcc

SEQ ID NO: 1024202 - DNA, 25 bp, Homo sapien
ggtgtccccgaagaacaactggctg

SEQ ID NO: 1024203 - DNA, 25 bp, Homo sapien
agaacaactggctgtgggacaacca

SEQ ID NO: 1024204 - DNA, 25 bp, Homo sapien
ccgaagaacaactggctgtgggaca

SEQ ID NO: 1024205 - DNA, 25 bp, Homo sapien
tccccgaagaacaactggctgtggg

SEQ ID NO: 1024206 - DNA, 25 bp, Homo sapien
ccacactcctgtgagtcctggctcc

SEQ ID NO: 1024207 - DNA, 25 bp, Homo sapien
cccaaagaccaaagctttctggatg

SEQ ID NO: 1024208 - DNA, 25 bp, Homo sapien
agctttctggatggccacgcccaca

SEQ ID NO: 1024209 - DNA, 25 bp, Homo sapien
gaccaaagctttctggatggccacg

SEQ ID NO: 1024210 - DNA, 25 bp, Homo sapien
cagactctgcggaccccagaggtgg

SEQ ID NO: 1024211 - DNA, 25 bp, Homo sapien
gcttcattaagctgtcacacgttca

SEQ ID NO: 1024212 - DNA, 25 bp, Homo sapien
ggaaccaggttgttacacagactct

SEQ ID NO: 1024213 - DNA, 25 bp, Homo sapien
caaatcaaggtactcggctgcttca

SEQ ID NO: 1024214 - DNA, 25 bp, Homo sapien
caccgcgcccgtccagccccagtta

SEQ ID NO: 1024215 - DNA, 25 bp, Homo sapien
ccgcgcccgtccagccccagttatt

SEQ ID NO: 1024216 - DNA, 25 bp, Homo sapien
accgcgcccgtccagccccagttat

SEQ ID NO: 1024217 - DNA, 25 bp, Homo sapien
gccaccgcgcccgtccagccccagt

SEQ ID NO: 1024218 - DNA, 25 bp, Homo sapien
cagagccgcaccaccactgtgggtc

SEQ ID NO: 1024219 - DNA, 25 bp, Homo sapien
ggggcccaggactgctcaacatcat

SEQ ID NO: 1024220 - DNA, 25 bp, Homo sapien
ggtccggggcccaggactgctcaac

SEQ ID NO: 1024221 - DNA, 25 bp, Homo sapien
gcaccaccactgtgggtccggggcc

SEQ ID NO: 1024222 - DNA, 25 bp, Homo sapien
ggagacactgaccagagccgcaccg

SEQ ID NO: 1024223 - DNA, 25 bp, Homo sapien
agccgcaccgccactgtgggtcagg

SEQ ID NO: 1024224 - DNA, 25 bp, Homo sapien
tcaggggccccggagtgcaggagac

SEQ ID NO: 1024225 - DNA, 25 bp, Homo sapien
cggagtgcaggagacactgaccaga

SEQ ID NO: 1024226 - DNA, 25 bp, Homo sapien
ccgggagcgcaggagacactgaccg

SEQ ID NO: 1024227 - DNA, 25 bp, Homo sapien
gggagcgcaggagacactgaccgga

SEQ ID NO: 1024228 - DNA, 25 bp, Homo sapien
cgggagcgcaggagacactgaccgg

SEQ ID NO: 1024229 - DNA, 25 bp, Homo sapien
catggggatgaccacgtggtgcccg

SEQ ID NO: 1024230 - DNA, 25 bp, Homo sapien
ggggatgaccacgtggtgcccgtcc

SEQ ID NO: 1024231 - DNA, 25 bp, Homo sapien
tggggatgaccacgtggtgcccgtc

SEQ ID NO: 1024232 - DNA, 25 bp, Homo sapien
atggggatgaccacgtggtgcccgt

SEQ ID NO: 1024233 - DNA, 25 bp, Homo sapien
cctcccacaacaccgtcgccacgac

SEQ ID NO: 1024234 - DNA, 25 bp, Homo sapien
tcccacaacaccgtcgccacgacgg

SEQ ID NO: 1024235 - DNA, 25 bp, Homo sapien
atcctcccacaacaccgtcgccacg

SEQ ID NO: 1024236 - DNA, 25 bp, Homo sapien
ccacaacaccgtcgccacgacggaa

SEQ ID NO: 1024237 - DNA, 25 bp, Homo sapien
atcttgcacgcgggtgtccatcatg

SEQ ID NO: 1024238 - DNA, 25 bp, Homo sapien
cagcatcttgcacgcgggtgtccat

SEQ ID NO: 1024239 - DNA, 25 bp, Homo sapien
acagcatcttgcacgcgggtgtcca

SEQ ID NO: 1024240 - DNA, 25 bp, Homo sapien
gcatcttgcacgcgggtgtccatca

SEQ ID NO: 1024241 - DNA, 25 bp, Homo sapien
gagggctcgtccccacgcccaggcc

SEQ ID NO: 1024242 - DNA, 25 bp, Homo sapien
tggggagggctcgtccccacgccca

SEQ ID NO: 1024243 - DNA, 25 bp, Homo sapien
ggagggctcgtccccacgcccaggc

SEQ ID NO: 1024244 - DNA, 25 bp, Homo sapien
cgagaacaaagacatcacctgcctg

SEQ ID NO: 1024245 - DNA, 25 bp, Homo sapien
cgtgagctgtggatctccctgtgga

SEQ ID NO: 1024246 - DNA, 25 bp, Homo sapien
aaagatcggggcatgccggccacag

SEQ ID NO: 1024247 - DNA, 25 bp, Homo sapien
caccagtgtgtgaaagatcggggca

SEQ ID NO: 1024248 - DNA, 25 bp, Homo sapien
tgctgcggcgtgttaggaatgacct

SEQ ID NO: 1024249 - DNA, 25 bp, Homo sapien
gacaacggtttgtgtgcacttcccg

SEQ ID NO: 1024250 - DNA, 25 bp, Homo sapien
tacctgtgtcttcgtgtgcctgcct

SEQ ID NO: 1024251 - DNA, 25 bp, Homo sapien
gctggtgacggtagcattacccaaa

SEQ ID NO: 1024252 - DNA, 25 bp, Homo sapien
tggtcaatgtggacatccaggacaa

SEQ ID NO: 1024253 - DNA, 25 bp, Homo sapien
tcaggtttcctcgaaccatcagccg

SEQ ID NO: 1024254 - DNA, 25 bp, Homo sapien
gccagcctgtgcacgtggtcaatgt

SEQ ID NO: 1024255 - DNA, 25 bp, Homo sapien
ttttggagcctctgacgtctgtgtc

SEQ ID NO: 1024256 - DNA, 25 bp, Homo sapien
ggcactcactggcaccgtggttttg

SEQ ID NO: 1024257 - DNA, 25 bp, Homo sapien
tgctgccggaattcaggtgggatct

SEQ ID NO: 1024258 - DNA, 25 bp, Homo sapien
tgctctgagcctttgcctcgtggca

SEQ ID NO: 1024259 - DNA, 25 bp, Homo sapien
gggatcttgcgtccctgtgagctca

SEQ ID NO: 1024260 - DNA, 25 bp, Homo sapien
ggatttccccatgacttgaagagca

SEQ ID NO: 1024261 - DNA, 25 bp, Homo sapien
ttgaagagcaggctctcgcacgcag

SEQ ID NO: 1024262 - DNA, 25 bp, Homo sapien
tgagcctgtctattgaaggccccgc

SEQ ID NO: 1024263 - DNA, 25 bp, Homo sapien
ggtttctgttccgatggcgcctctc

SEQ ID NO: 1024264 - DNA, 25 bp, Homo sapien
gttccctttgcagcctctggggtcc

SEQ ID NO: 1024265 - DNA, 25 bp, Homo sapien
ctgttccctttgcagcctctggggt

SEQ ID NO: 1024266 - DNA, 25 bp, Homo sapien
tccctttgcagcctctggggtcctc

SEQ ID NO: 1024267 - DNA, 25 bp, Homo sapien
tgctgttccctttgcagcctctggg

SEQ ID NO: 1024268 - DNA, 25 bp, Homo sapien
cccctccctgaccagtggggatggg

SEQ ID NO: 1024269 - DNA, 25 bp, Homo sapien
gcaggatgggagctcgggaagcagc

SEQ ID NO: 1024270 - DNA, 25 bp, Homo sapien
agctcgggaagcagcgcccagtgca

SEQ ID NO: 1024271 - DNA, 25 bp, Homo sapien
aagcagcgcccagtgcagcagctgt

SEQ ID NO: 1024272 - DNA, 25 bp, Homo sapien
ggcgatgtgacgttggcgtaaggat

SEQ ID NO: 1024273 - DNA, 25 bp, Homo sapien
cagagataggttgggccgttggcgt

SEQ ID NO: 1024274 - DNA, 25 bp, Homo sapien
cgaatcgggaccctggtcgagaaag

SEQ ID NO: 1024275 - DNA, 25 bp, Homo sapien
ggcaaaacgttcaggatgtccctgg

SEQ ID NO: 1024276 - DNA, 25 bp, Homo sapien
tgcatggggtgagcacaggcctcgg

SEQ ID NO: 1024277 - DNA, 25 bp, Homo sapien
ctgcatggggtgagcacaggcctcg

SEQ ID NO: 1024278 - DNA, 25 bp, Homo sapien
atggggtgagcacaggcctcgggcc

SEQ ID NO: 1024279 - DNA, 25 bp, Homo sapien
ggtgagcacaggcctcgggccccac

SEQ ID NO: 1024280 - DNA, 25 bp, Homo sapien
gatcccctgaattggaaggttcctg

SEQ ID NO: 1024281 - DNA, 25 bp, Homo sapien
gcattatggacaggatctgagtcac

SEQ ID NO: 1024282 - DNA, 25 bp, Homo sapien
ccacaccgggccattgttgggaaag

SEQ ID NO: 1024283 - DNA, 25 bp, Homo sapien
cacacgtgtagcagagtgccgggtc

SEQ ID NO: 1024284 - DNA, 25 bp, Homo sapien
cactgacgtagtctggtggtcccca

SEQ ID NO: 1024285 - DNA, 25 bp, Homo sapien
ttgtcaagagaatgtcacactggtg

SEQ ID NO: 1024286 - DNA, 25 bp, Homo sapien
actggtgacatccttcagatgcggc

SEQ ID NO: 1024287 - DNA, 25 bp, Homo sapien
gatccctgcttgagacagtccatag

SEQ ID NO: 1024288 - DNA, 25 bp, Homo sapien
cattctaactccccgggatgttctg

SEQ ID NO: 1024289 - DNA, 25 bp, Homo sapien
cgggatgttctggtcccactaaggc

SEQ ID NO: 1024290 - DNA, 25 bp, Homo sapien
ggatgttctggtcccactaaggccc

SEQ ID NO: 1024291 - DNA, 25 bp, Homo sapien
tccccgggatgttctggtcccacta

SEQ ID NO: 1024292 - DNA, 25 bp, Homo sapien
gatgagtcatacgtgcagggaagat

SEQ ID NO: 1024293 - DNA, 25 bp, Homo sapien
cagcacttagcatgctctgggatga

SEQ ID NO: 1024294 - DNA, 25 bp, Homo sapien
gccagccacggtttgcaaaggagag

SEQ ID NO: 1024295 - DNA, 25 bp, Homo sapien
gacttgacgtcaaggaagtctctgc

SEQ ID NO: 1024296 - DNA, 25 bp, Homo sapien
ctttcttggccgaggtgccactgcc

SEQ ID NO: 1024297 - DNA, 25 bp, Homo sapien
actcggctgttcttgtcacccacat

SEQ ID NO: 1024298 - DNA, 25 bp, Homo sapien
ggagctgccgtccacgcttgtggca

SEQ ID NO: 1024299 - DNA, 25 bp, Homo sapien
cctgcagcactggttcctcctttct

SEQ ID NO: 1024300 - DNA, 25 bp, Homo sapien
gctggtggtcatttgagggtctgga

SEQ ID NO: 1024301 - DNA, 25 bp, Homo sapien
ctgtgccttcgtcttcaagaggtag

SEQ ID NO: 1024302 - DNA, 25 bp, Homo sapien
gccttcgtcttcaagaggtagccca

SEQ ID NO: 1024303 - DNA, 25 bp, Homo sapien
catctgagatgacagaggtagaacg

SEQ ID NO: 1024304 - DNA, 25 bp, Homo sapien
ttcccggagtctggtttagggctgc

SEQ ID NO: 1024305 - DNA, 25 bp, Homo sapien
ttagggctgcgtgctcaagagtctg

SEQ ID NO: 1024306 - DNA, 25 bp, Homo sapien
cttcccatcgccctggaggaggctt

SEQ ID NO: 1024307 - DNA, 25 bp, Homo sapien
tcttaggcggtgcatgaccacgcag

SEQ ID NO: 1024308 - DNA, 25 bp, Homo sapien
tatgtctggcaaaacctagaactgc

SEQ ID NO: 1024309 - DNA, 25 bp, Homo sapien
ggagtggcccctgaaagtatgtctg

SEQ ID NO: 1024310 - DNA, 25 bp, Homo sapien
attaattaggtagccaggagtggcc

SEQ ID NO: 1024311 - DNA, 25 bp, Homo sapien
cactgcaagtcagtgtaagtcccca

SEQ ID NO: 1024312 - DNA, 25 bp, Homo sapien
taatggttatgacaatcagtgcccg

SEQ ID NO: 1024313 - DNA, 25 bp, Homo sapien
tagttttcagaacggaggccaggcc

SEQ ID NO: 1024314 - DNA, 25 bp, Homo sapien
tagattctgatggacgcaacaccag

SEQ ID NO: 1024315 - DNA, 25 bp, Homo sapien
tcagtgcccgggtttttgaccaggc

SEQ ID NO: 1024316 - DNA, 25 bp, Homo sapien
tattcctggtgcacgtcggatcgtc

SEQ ID NO: 1024317 - DNA, 25 bp, Homo sapien
tcagcgtccgatcctttggaacagg

SEQ ID NO: 1024318 - DNA, 25 bp, Homo sapien
ttggaacagggactcacgtgaagct

SEQ ID NO: 1024319 - DNA, 25 bp, Homo sapien
gatcgtccacgggttagttccagtg

SEQ ID NO: 1024320 - DNA, 25 bp, Homo sapien
tagttttcacttgctgggtgttgcc

SEQ ID NO: 1024321 - DNA, 25 bp, Homo sapien
gggtgttgccccattatccgcatag

SEQ ID NO: 1024322 - DNA, 25 bp, Homo sapien
tgcagaggcacgtgtatgtccgtag

SEQ ID NO: 1024323 - DNA, 25 bp, Homo sapien
tactcatcttcggaggtgcgcgtgg

SEQ ID NO: 1024324 - DNA, 25 bp, Homo sapien
gtcatgaatcgctgctattgtgcca

SEQ ID NO: 1024325 - DNA, 25 bp, Homo sapien
tgtttcacgtacactagatgagcac

SEQ ID NO: 1024326 - DNA, 25 bp, Homo sapien
tatctagggatgtaaggactgacgc

SEQ ID NO: 1024327 - DNA, 25 bp, Homo sapien
gaacacgggtttgtagtcatgaatc

SEQ ID NO: 1024328 - DNA, 25 bp, Homo sapien
tggtggcattggcgctgagtgccca

SEQ ID NO: 1024329 - DNA, 25 bp, Homo sapien
agactggtggcattggcgctgagtg

SEQ ID NO: 1024330 - DNA, 25 bp, Homo sapien
tcacagcacagcttgtggcttgtgt

SEQ ID NO: 1024331 - DNA, 25 bp, Homo sapien
cagcacagcttgtggcttgtgtcca

SEQ ID NO: 1024332 - DNA, 25 bp, Homo sapien
agagtggccagtggccgttgctggc

SEQ ID NO: 1024333 - DNA, 25 bp, Homo sapien
gagtggccagtggccgttgctggca

SEQ ID NO: 1024334 - DNA, 25 bp, Homo sapien
ggttctccttggtgatcctttgttc

SEQ ID NO: 1024335 - DNA, 25 bp, Homo sapien
ggaataacaaatgggctggagacct

SEQ ID NO: 1024336 - DNA, 25 bp, Homo sapien
ccttggtgatcctttgttcaagatt

SEQ ID NO: 1024337 - DNA, 25 bp, Homo sapien
aattggaataacaaatgggctggag

SEQ ID NO: 1024338 - DNA, 25 bp, Homo sapien
aaccagaaccggagcatggaggcgc

SEQ ID NO: 1024339 - DNA, 25 bp, Homo sapien
ctcgagcaaccagaaccggagcatg

SEQ ID NO: 1024340 - DNA, 25 bp, Homo sapien
cggtggtgtgctcgagcaaccagaa

SEQ ID NO: 1024341 - DNA, 25 bp, Homo sapien
gcatggaggcgcacaacatcctcag

SEQ ID NO: 1024342 - DNA, 25 bp, Homo sapien
gaatgacacactcgcgttgactgga

SEQ ID NO: 1024343 - DNA, 25 bp, Homo sapien
aatgcgggaatgtctgtgggcctcc

SEQ ID NO: 1024344 - DNA, 25 bp, Homo sapien
caggtcggccctcgcatttaaacgt

SEQ ID NO: 1024345 - DNA, 25 bp, Homo sapien
gaggaagatcctagtcgacgtgcac

SEQ ID NO: 1024346 - DNA, 25 bp, Homo sapien
ctttgtcagtaacccggcgttgaga

SEQ ID NO: 1024347 - DNA, 25 bp, Homo sapien
cacggattcttaacctctggtgcag

SEQ ID NO: 1024348 - DNA, 25 bp, Homo sapien
tggacgaggtgcaaagtgacgcttt

SEQ ID NO: 1024349 - DNA, 25 bp, Homo sapien
ctggctaggagaggtctgcacagtt

SEQ ID NO: 1024350 - DNA, 25 bp, Homo sapien
cctcttgcaggtggtttccttggga

SEQ ID NO: 1024351 - DNA, 25 bp, Homo sapien
tgcctttggcgttgggcacttgtgt

SEQ ID NO: 1024352 - DNA, 25 bp, Homo sapien
actcccagggggaggtctgagttct

SEQ ID NO: 1024353 - DNA, 25 bp, Homo sapien
ttttggaagcggagtgtcccctgca

SEQ ID NO: 1024354 - DNA, 25 bp, Homo sapien
taggcgaatcgtaaaacggagggca

SEQ ID NO: 1024355 - DNA, 25 bp, Homo sapien
gctgcgcttcgtccacatcgataac

SEQ ID NO: 1024356 - DNA, 25 bp, Homo sapien
agaacgaaaatgagcggatctggga

SEQ ID NO: 1024357 - DNA, 25 bp, Homo sapien
cacatcgataacagatgtttcctgg

SEQ ID NO: 1024358 - DNA, 25 bp, Homo sapien
tagaaggggtcgctgaggcaggagt

SEQ ID NO: 1024359 - DNA, 25 bp, Homo sapien
tcgctgaggcaggagtaggaaggct

SEQ ID NO: 1024360 - DNA, 25 bp, Homo sapien
ggagtaggaaggctttccactccac

SEQ ID NO: 1024361 - DNA, 25 bp, Homo sapien
aggcaggagtaggaaggctttccac

SEQ ID NO: 1024362 - DNA, 25 bp, Homo sapien
acctggatccgccagcgctgtgcca

SEQ ID NO: 1024363 - DNA, 25 bp, Homo sapien
tgcgcgtcatttccggtcccgcggg

SEQ ID NO: 1024364 - DNA, 25 bp, Homo sapien
cgaggagcccgatgcagggttctgc

SEQ ID NO: 1024365 - DNA, 25 bp, Homo sapien
gcagggttctgcgcgtcatttccgg

SEQ ID NO: 1024366 - DNA, 25 bp, Homo sapien
agagcagcggcgctatctcgcctca

SEQ ID NO: 1024367 - DNA, 25 bp, Homo sapien
cacgcgccacgagacccgggtaatt

SEQ ID NO: 1024368 - DNA, 25 bp, Homo sapien
ccaggtcggagagcagcggcgctat

SEQ ID NO: 1024369 - DNA, 25 bp, Homo sapien
aggcacgcgccacgagacccgggta

SEQ ID NO: 1024370 - DNA, 25 bp, Homo sapien
aatagctaagaagtaaatgatcaat

SEQ ID NO: 1024371 - DNA, 25 bp, Homo sapien
attgtcaaagggcagaaaccgatga

SEQ ID NO: 1024372 - DNA, 25 bp, Homo sapien
taatcaaactagaacataatcaaag

SEQ ID NO: 1024373 - DNA, 25 bp, Homo sapien
gactcaaggaagaatataaatagct

SEQ ID NO: 1024374 - DNA, 25 bp, Homo sapien
ctgatgaggacaaattgcaggggca

SEQ ID NO: 1024375 - DNA, 25 bp, Homo sapien
gctgatgaggacaaattgcaggggc

SEQ ID NO: 1024376 - DNA, 25 bp, Homo sapien
tgatgaggacaaattgcaggggcat

SEQ ID NO: 1024377 - DNA, 25 bp, Homo sapien
ctgctgatgaggacaaattgcaggg

SEQ ID NO: 1024378 - DNA, 25 bp, Homo sapien
aattccagccgctcatctgaacaca

SEQ ID NO: 1024379 - DNA, 25 bp, Homo sapien
ccagcgcccagcgttagggctggaa

SEQ ID NO: 1024380 - DNA, 25 bp, Homo sapien
agagagggaccagcgcccagcgtta

SEQ ID NO: 1024381 - DNA, 25 bp, Homo sapien
tggaagacggcagtgttcagaattc

SEQ ID NO: 1024382 - DNA, 25 bp, Homo sapien
ggcacaggggaagcccagccgtggg

SEQ ID NO: 1024383 - DNA, 25 bp, Homo sapien
gggcacaggggaagcccagccgtgg

SEQ ID NO: 1024384 - DNA, 25 bp, Homo sapien
tgggcacaggggaagcccagccgtg

SEQ ID NO: 1024385 - DNA, 25 bp, Homo sapien
ctgggcacaggggaagcccagccgt

SEQ ID NO: 1024386 - DNA, 25 bp, Homo sapien
agccggcctggcttgaagtccgcca

SEQ ID NO: 1024387 - DNA, 25 bp, Homo sapien
tctgtggacttgagcgtccaaaaac

SEQ ID NO: 1024388 - DNA, 25 bp, Homo sapien
ggacttgagcgtccaaaaaccctga

SEQ ID NO: 1024389 - DNA, 25 bp, Homo sapien
gccggcctggcttgaagtccgccat

SEQ ID NO: 1024390 - DNA, 25 bp, Homo sapien
cctgggcacgttctccgaggcatgt

SEQ ID NO: 1024391 - DNA, 25 bp, Homo sapien
aagacgttctcctctgcccgtgagg

SEQ ID NO: 1024392 - DNA, 25 bp, Homo sapien
ctggagatcgataaggaaggcacaa

SEQ ID NO: 1024393 - DNA, 25 bp, Homo sapien
tctgcccgtgaggagcttcccgcag

SEQ ID NO: 1024394 - DNA, 25 bp, Homo sapien
gaccctggtgtcctggttactgctg

SEQ ID NO: 1024395 - DNA, 25 bp, Homo sapien
cggcgcccgcgtcttccacgggcac

SEQ ID NO: 1024396 - DNA, 25 bp, Homo sapien
ccggcgcccgcgtcttccacgggca

SEQ ID NO: 1024397 - DNA, 25 bp, Homo sapien
gaggccgtggtcggaccctggtgtc

SEQ ID NO: 1024398 - DNA, 25 bp, Homo sapien
cagcagctgtggagcacgtggatgc

SEQ ID NO: 1024399 - DNA, 25 bp, Homo sapien
cagctgtggagcacgtggatgctgc

SEQ ID NO: 1024400 - DNA, 25 bp, Homo sapien
gctgtggagcacgtggatgctgcct

SEQ ID NO: 1024401 - DNA, 25 bp, Homo sapien
tgtggagcacgtggatgctgcctac

SEQ ID NO: 1024402 - DNA, 25 bp, Homo sapien
gagggactcaacacgctgattctcc

SEQ ID NO: 1024403 - DNA, 25 bp, Homo sapien
tttcacactaacacagcgagggact

SEQ ID NO: 1024404 - DNA, 25 bp, Homo sapien
ctaacacagcgagggactcaacacg

SEQ ID NO: 1024405 - DNA, 25 bp, Homo sapien
gcgagggactcaacacgctgattct

SEQ ID NO: 1024406 - DNA, 25 bp, Homo sapien
gggctagtgatcgtgatccctttta

SEQ ID NO: 1024407 - DNA, 25 bp, Homo sapien
gggaagggagtcgtctgccattcaa

SEQ ID NO: 1024408 - DNA, 25 bp, Homo sapien
tcagtgcgatcctgatggtccggga

SEQ ID NO: 1024409 - DNA, 25 bp, Homo sapien
ttctgcaagacgctgtcctcaggga

SEQ ID NO: 1024410 - DNA, 25 bp, Homo sapien
cgagaggcccagcgcagcgacgtct

SEQ ID NO: 1024411 - DNA, 25 bp, Homo sapien
aagaaagcgtgcgtgggaggcatcg

SEQ ID NO: 1024412 - DNA, 25 bp, Homo sapien
agcgcagcgacgtctcccttcaggg

SEQ ID NO: 1024413 - DNA, 25 bp, Homo sapien
catcggtgacggtccccaggaccaa

SEQ ID NO: 1024414 - DNA, 25 bp, Homo sapien
gtgaggttgaagtggtcccagcgca

SEQ ID NO: 1024415 - DNA, 25 bp, Homo sapien
gaggttgaagtggtcccagcgcagc

SEQ ID NO: 1024416 - DNA, 25 bp, Homo sapien
tgaggttgaagtggtcccagcgcag

SEQ ID NO: 1024417 - DNA, 25 bp, Homo sapien
gctcagcaggttccgcgggaaggag

SEQ ID NO: 1024418 - DNA, 25 bp, Homo sapien
tcccgcgggctcagcaggttccgcg

SEQ ID NO: 1024419 - DNA, 25 bp, Homo sapien
aagctgaagggggacacgtcgctcc

SEQ ID NO: 1024420 - DNA, 25 bp, Homo sapien
acgtcgctccacatgcggaaggcgg

SEQ ID NO: 1024421 - DNA, 25 bp, Homo sapien
ggtcgctgggctgctcgggggccac

SEQ ID NO: 1024422 - DNA, 25 bp, Homo sapien
ctatccggaggtcgctgggctgctc

SEQ ID NO: 1024423 - DNA, 25 bp, Homo sapien
tccggaggtcgctgggctgctcggg

SEQ ID NO: 1024424 - DNA, 25 bp, Homo sapien
gaggtcgctgggctgctcgggggcc

SEQ ID NO: 1024425 - DNA, 25 bp, Homo sapien
aggccgggcgcgcagggccgggccg

SEQ ID NO: 1024426 - DNA, 25 bp, Homo sapien
aagcagtggtgcagcgcggagacca

SEQ ID NO: 1024427 - DNA, 25 bp, Homo sapien
gcgcggagaccaggcagtccgtgtg

SEQ ID NO: 1024428 - DNA, 25 bp, Homo sapien
gggccgtcgaagcagtggtgcagcg

SEQ ID NO: 1024429 - DNA, 25 bp, Homo sapien
tccgtgtggttgatcgggtagaagc

SEQ ID NO: 1024430 - DNA, 25 bp, Homo sapien
ctttcttccagctgtagcgcgtggg

SEQ ID NO: 1024431 - DNA, 25 bp, Homo sapien
aaggtccctcctgccgtctgcccca

SEQ ID NO: 1024432 - DNA, 25 bp, Homo sapien
gtctgccccaaagcccgaccgcggc

SEQ ID NO: 1024433 - DNA, 25 bp, Homo sapien
tgccgtctgccccaaagcccgaccg

SEQ ID NO: 1024434 - DNA, 25 bp, Homo sapien
ccgaccgcggcagcccactgtgctg

SEQ ID NO: 1024435 - DNA, 25 bp, Homo sapien
cgggggtcagcgcctgggagccccg

SEQ ID NO: 1024436 - DNA, 25 bp, Homo sapien
gccccgggggtcagcgcctgggagc

SEQ ID NO: 1024437 - DNA, 25 bp, Homo sapien
acagctcgtcctgggacaacgcctt

SEQ ID NO: 1024438 - DNA, 25 bp, Homo sapien
tggccgatctcgtgggccgccacgt

SEQ ID NO: 1024439 - DNA, 25 bp, Homo sapien
ttccagccgcgcagcgtggcgttca

SEQ ID NO: 1024440 - DNA, 25 bp, Homo sapien
cgcccggccgtgttgtgagtgcatc

SEQ ID NO: 1024441 - DNA, 25 bp, Homo sapien
ctgtcgggagcgtggggagcacggc

SEQ ID NO: 1024442 - DNA, 25 bp, Homo sapien
gggagcgtggggagcacggcctggc

SEQ ID NO: 1024443 - DNA, 25 bp, Homo sapien
cgtggggagcacggcctggctcagg

SEQ ID NO: 1024444 - DNA, 25 bp, Homo sapien
gtggggagcacggcctggctcagga

SEQ ID NO: 1024445 - DNA, 25 bp, Homo sapien
cgtagcagaagtcgcagctgctggg

SEQ ID NO: 1024446 - DNA, 25 bp, Homo sapien
cacacgaacagcctgtcgaggcatc

SEQ ID NO: 1024447 - DNA, 25 bp, Homo sapien
tgagccgccggcgagcgtcgcagaa

SEQ ID NO: 1024448 - DNA, 25 bp, Homo sapien
gggcagagcctcttcatgagccgcc

SEQ ID NO: 1024449 - DNA, 25 bp, Homo sapien
aaagagccccgtcagtgccccctca

SEQ ID NO: 1024450 - DNA, 25 bp, Homo sapien
ccccctcagccccgaccatggccaa

SEQ ID NO: 1024451 - DNA, 25 bp, Homo sapien
gaaagagccccgtcagtgccccctc

SEQ ID NO: 1024452 - DNA, 25 bp, Homo sapien
cctcagccccgaccatggccaaggc

SEQ ID NO: 1024453 - DNA, 25 bp, Homo sapien
ctggccgcagcggaaggtcacgttc

SEQ ID NO: 1024454 - DNA, 25 bp, Homo sapien
tgtggaggatcttctggccgcagcg

SEQ ID NO: 1024455 - DNA, 25 bp, Homo sapien
cagcggaaggtcacgttcctgccct

SEQ ID NO: 1024456 - DNA, 25 bp, Homo sapien
gaaggtcacgttcctgccctcgggc

SEQ ID NO: 1024457 - DNA, 25 bp, Homo sapien
tgccccaaggccgcccgcgggctgc

SEQ ID NO: 1024458 - DNA, 25 bp, Homo sapien
cctgccccaaggccgcccgcgggct

SEQ ID NO: 1024459 - DNA, 25 bp, Homo sapien
ctgccccaaggccgcccgcgggctg

SEQ ID NO: 1024460 - DNA, 25 bp, Homo sapien
attgacggcgttggcgatgatgctc

SEQ ID NO: 1024461 - DNA, 25 bp, Homo sapien
tgatgctcaggtgcgcctcgcccag

SEQ ID NO: 1024462 - DNA, 25 bp, Homo sapien
tcattgacggcgttggcgatgatgc

SEQ ID NO: 1024463 - DNA, 25 bp, Homo sapien
cattgacggcgttggcgatgatgct

SEQ ID NO: 1024464 - DNA, 25 bp, Homo sapien
aggtggtcagcacgcgctgctggcg

SEQ ID NO: 1024465 - DNA, 25 bp, Homo sapien
gctggcggcgcaccacgcaggtgta

SEQ ID NO: 1024466 - DNA, 25 bp, Homo sapien
gtaggtggtcagcacgcgctgctgg

SEQ ID NO: 1024467 - DNA, 25 bp, Homo sapien
tgctggcggcgcaccacgcaggtgt

SEQ ID NO: 1024468 - DNA, 25 bp, Homo sapien
acaggccacccagagtacgtgacat

SEQ ID NO: 1024469 - DNA, 25 bp, Homo sapien
cttagtgctgctgagcgtaggcgtc

SEQ ID NO: 1024470 - DNA, 25 bp, Homo sapien
tgcgtgggcgggttatgtaggcacc

SEQ ID NO: 1024471 - DNA, 25 bp, Homo sapien
tgagcgcctctgccccttagtgctg

SEQ ID NO: 1024472 - DNA, 25 bp, Homo sapien
gctgaacctcaagtgtgcgggactg

SEQ ID NO: 1024473 - DNA, 25 bp, Homo sapien
ggctgaacctcaagtgtgcgggact

SEQ ID NO: 1024474 - DNA, 25 bp, Homo sapien
aacctcaagtgtgcgggactgaacc

SEQ ID NO: 1024475 - DNA, 25 bp, Homo sapien
tgaacctcaagtgtgcgggactgaa

SEQ ID NO: 1024476 - DNA, 25 bp, Homo sapien
tctttcttccgagcaggcctcggag

SEQ ID NO: 1024477 - DNA, 25 bp, Homo sapien
ccctcgcttccgcggacagtctcat

SEQ ID NO: 1024478 - DNA, 25 bp, Homo sapien
cgaggtctttcttccgagcaggcct

SEQ ID NO: 1024479 - DNA, 25 bp, Homo sapien
cgggggcgagcgacaccctcgcttc

SEQ ID NO: 1024480 - DNA, 25 bp, Homo sapien
caggtgtgggagcgcgacgagaact

SEQ ID NO: 1024481 - DNA, 25 bp, Homo sapien
cgtaggggtgagttccgactgggcg

SEQ ID NO: 1024482 - DNA, 25 bp, Homo sapien
tggcgagcgccggttgctgtttctt

SEQ ID NO: 1024483 - DNA, 25 bp, Homo sapien
ttctggcgagcgccggttgctgttt

SEQ ID NO: 1024484 - DNA, 25 bp, Homo sapien
ggcgagcgccggttgctgtttcttc

SEQ ID NO: 1024485 - DNA, 25 bp, Homo sapien
tgttttatgcgtcatcatcccgcgc

SEQ ID NO: 1024486 - DNA, 25 bp, Homo sapien
atcatcccgcgcagacacaggaagt

SEQ ID NO: 1024487 - DNA, 25 bp, Homo sapien
aggaagtgccgcacagagcgagccc

SEQ ID NO: 1024488 - DNA, 25 bp, Homo sapien
gtcctggacctgagcaagcgctgtt

SEQ ID NO: 1024489 - DNA, 25 bp, Homo sapien
caggtaaatggagcgcgctccaccc

SEQ ID NO: 1024490 - DNA, 25 bp, Homo sapien
ctgaggcgcctcacgaggtaaccag

SEQ ID NO: 1024491 - DNA, 25 bp, Homo sapien
agcaggtaaatggagcgcgctccac

SEQ ID NO: 1024492 - DNA, 25 bp, Homo sapien
cacgaggtaaccagcaggtaaatgg

SEQ ID NO: 1024493 - DNA, 25 bp, Homo sapien
ctttcgaaggcctggaagtatttca

SEQ ID NO: 1024494 - DNA, 25 bp, Homo sapien
gaacagagactatcatcagcaaata

SEQ ID NO: 1024495 - DNA, 25 bp, Homo sapien
gctcctgggtgatcactcagacggg

SEQ ID NO: 1024496 - DNA, 25 bp, Homo sapien
aaatccttgtcccaaatccggtgag

SEQ ID NO: 1024497 - DNA, 25 bp, Homo sapien
catggtcgtggtctgtgcctttgta

SEQ ID NO: 1024498 - DNA, 25 bp, Homo sapien
caccgggtgtggttacttccactgg

SEQ ID NO: 1024499 - DNA, 25 bp, Homo sapien
gaattgggtcatcggcttctttaca

SEQ ID NO: 1024500 - DNA, 25 bp, Homo sapien
gagcttctaggaacacaccgggtgt

SEQ ID NO: 1024501 - DNA, 25 bp, Homo sapien
gatttcctgtgtaacgctgctctgg

SEQ ID NO: 1024502 - DNA, 25 bp, Homo sapien
tagcaaataggttgatttcctgtgt

SEQ ID NO: 1024503 - DNA, 25 bp, Homo sapien
tgatttcctgtgtaacgctgctctg

SEQ ID NO: 1024504 - DNA, 25 bp, Homo sapien
atttcctgtgtaacgctgctctggg

SEQ ID NO: 1024505 - DNA, 25 bp, Homo sapien
cttggaatttccagccgcacagaat

SEQ ID NO: 1024506 - DNA, 25 bp, Homo sapien
ttggaatttccagccgcacagaatc

SEQ ID NO: 1024507 - DNA, 25 bp, Homo sapien
ttccagccgcacagaatctggtgcc

SEQ ID NO: 1024508 - DNA, 25 bp, Homo sapien
aatttccagccgcacagaatctggt

SEQ ID NO: 1024509 - DNA, 25 bp, Homo sapien
aacactattagaaaatgctctggag

SEQ ID NO: 1024510 - DNA, 25 bp, Homo sapien
gcctctttgaagattgtggtctggc

SEQ ID NO: 1024511 - DNA, 25 bp, Homo sapien
gacagattgaaagcaactcccaggg

SEQ ID NO: 1024512 - DNA, 25 bp, Homo sapien
catcgagaatatggctgccggcctc

SEQ ID NO: 1024513 - DNA, 25 bp, Homo sapien
ggcacccatggtcacttcactggtt

SEQ ID NO: 1024514 - DNA, 25 bp, Homo sapien
tggtcccgagtctcatttccctgcc

SEQ ID NO: 1024515 - DNA, 25 bp, Homo sapien
cagcctttgagacccagagctccag

SEQ ID NO: 1024516 - DNA, 25 bp, Homo sapien
tgctctttaggcctttggcacccat

SEQ ID NO: 1024517 - DNA, 25 bp, Homo sapien
tgtccggttccccacgtgagccttg

SEQ ID NO: 1024518 - DNA, 25 bp, Homo sapien
tgttgatggtttgggttacgtggcg

SEQ ID NO: 1024519 - DNA, 25 bp, Homo sapien
ggttccccacgtgagccttgggcag

SEQ ID NO: 1024520 - DNA, 25 bp, Homo sapien
tcatcatctagcacctgtccggttc

SEQ ID NO: 1024521 - DNA, 25 bp, Homo sapien
tttgcaaagggtacttcctgtcacc

SEQ ID NO: 1024522 - DNA, 25 bp, Homo sapien
tgctgggattctagcacccgacctc

SEQ ID NO: 1024523 - DNA, 25 bp, Homo sapien
tgcccagcctcctacctgtggtggt

SEQ ID NO: 1024524 - DNA, 25 bp, Homo sapien
tttttgcacggtcctaacactgtgt

SEQ ID NO: 1024525 - DNA, 25 bp, Homo sapien
ccctgcaccgagtcgccttgtccat

SEQ ID NO: 1024526 - DNA, 25 bp, Homo sapien
ctgcaccgagtcgccttgtccatgg

SEQ ID NO: 1024527 - DNA, 25 bp, Homo sapien
gcaccgagtcgccttgtccatggcg

SEQ ID NO: 1024528 - DNA, 25 bp, Homo sapien
aggccctgcaccgagtcgccttgtc

SEQ ID NO: 1024529 - DNA, 25 bp, Homo sapien
ctccagccatggtcgatgagatgtt

SEQ ID NO: 1024530 - DNA, 25 bp, Homo sapien
ttgataccatttagcaaaaagaagt

SEQ ID NO: 1024531 - DNA, 25 bp, Homo sapien
gaaaatcttgataccatttagcaaa

SEQ ID NO: 1024532 - DNA, 25 bp, Homo sapien
gatgttagaaaaccaactctcttgc

SEQ ID NO: 1024533 - DNA, 25 bp, Homo sapien
cctcgctgctgtaataatcagttcc

SEQ ID NO: 1024534 - DNA, 25 bp, Homo sapien
cgctgctgtaataatcagttccctg

SEQ ID NO: 1024535 - DNA, 25 bp, Homo sapien
tccctcgctgctgtaataatcagtt

SEQ ID NO: 1024536 - DNA, 25 bp, Homo sapien
ttccctcgctgctgtaataatcagt

SEQ ID NO: 1024537 - DNA, 25 bp, Homo sapien
gctgtacctgcccatgataactttc

SEQ ID NO: 1024538 - DNA, 25 bp, Homo sapien
agctgctgtacctgcccatgataac

SEQ ID NO: 1024539 - DNA, 25 bp, Homo sapien
gctgctgtacctgcccatgataact

SEQ ID NO: 1024540 - DNA, 25 bp, Homo sapien
tacctgcccatgataactttctcac

SEQ ID NO: 1024541 - DNA, 25 bp, Homo sapien
ctaagcaatagacgacatacttacc

SEQ ID NO: 1024542 - DNA, 25 bp, Homo sapien
attttcctctaagcaatagacgaca

SEQ ID NO: 1024543 - DNA, 25 bp, Homo sapien
ctgtcggagcgtggatcctgggacg

SEQ ID NO: 1024544 - DNA, 25 bp, Homo sapien
tcggagcgtggatcctgggacgctt

SEQ ID NO: 1024545 - DNA, 25 bp, Homo sapien
aagaccgagtcctcgaggattgcga

SEQ ID NO: 1024546 - DNA, 25 bp, Homo sapien
tcctcgaggattgcgacgtgcgcag

SEQ ID NO: 1024547 - DNA, 25 bp, Homo sapien
gaccgagtcctcgaggattgcgacg

SEQ ID NO: 1024548 - DNA, 25 bp, Homo sapien
cgagtcctcgaggattgcgacgtgc

SEQ ID NO: 1024549 - DNA, 25 bp, Homo sapien
cttatcgataccagaaaaagtttgg

SEQ ID NO: 1024550 - DNA, 25 bp, Homo sapien
cgaatgaacccttgtgagctgctgt

SEQ ID NO: 1024551 - DNA, 25 bp, Homo sapien
tatcgataccagaaaaagtttggac

SEQ ID NO: 1024552 - DNA, 25 bp, Homo sapien
tgctgggctttgtccgaatgaaccc

SEQ ID NO: 1024553 - DNA, 25 bp, Homo sapien
tttgttttttcactgtgagtatacg

SEQ ID NO: 1024554 - DNA, 25 bp, Homo sapien
agcctgttgggtagctgggacctca

SEQ ID NO: 1024555 - DNA, 25 bp, Homo sapien
cagtgcagtggcgaggtcacgactc

SEQ ID NO: 1024556 - DNA, 25 bp, Homo sapien
tggcgaggtcacgactcactgcaac

SEQ ID NO: 1024557 - DNA, 25 bp, Homo sapien
atcaggctctcggtgggttctgcgt

SEQ ID NO: 1024558 - DNA, 25 bp, Homo sapien
ttggtgctgcgtgctcggtgctcgg

SEQ ID NO: 1024559 - DNA, 25 bp, Homo sapien
gctgggtgccggtactgatgctgag

SEQ ID NO: 1024560 - DNA, 25 bp, Homo sapien
tgcggcggagactgcatcaggctct

SEQ ID NO: 1024561 - DNA, 25 bp, Homo sapien
gcgggggcgttgtgggccgcggcgc

SEQ ID NO: 1024562 - DNA, 25 bp, Homo sapien
tctcctcccgtctgcctggagtaga

SEQ ID NO: 1024563 - DNA, 25 bp, Homo sapien
acgctgagcgcgccgtgtttctcct

SEQ ID NO: 1024564 - DNA, 25 bp, Homo sapien
cgggcggaaccaacgggcagccgcg

SEQ ID NO: 1024565 - DNA, 25 bp, Homo sapien
agtaacgctaggaaaacgctcgacg

SEQ ID NO: 1024566 - DNA, 25 bp, Homo sapien
aaaacgctcgacgaagctccggagc

SEQ ID NO: 1024567 - DNA, 25 bp, Homo sapien
cccgcgggtgtctgctccggatgtc

SEQ ID NO: 1024568 - DNA, 25 bp, Homo sapien
gtctgctccggatgtcccgcggcag

SEQ ID NO: 1024569 - DNA, 25 bp, Homo sapien
gatgttctcaactaggaaaacagtt

SEQ ID NO: 1024570 - DNA, 25 bp, Homo sapien
cgatgttctcaactaggaaaacagt

SEQ ID NO: 1024571 - DNA, 25 bp, Homo sapien
aagaagcaagcccacttcgaggagg

SEQ ID NO: 1024572 - DNA, 25 bp, Homo sapien
tgctcccaggaaggtagtttaaatc

SEQ ID NO: 1024573 - DNA, 25 bp, Homo sapien
cccgtgagcgactggtttgagagcc

SEQ ID NO: 1024574 - DNA, 25 bp, Homo sapien
cagtgcctgcattggaacgtccgga

SEQ ID NO: 1024575 - DNA, 25 bp, Homo sapien
tccggtttgtgagtcatttgacccc

SEQ ID NO: 1024576 - DNA, 25 bp, Homo sapien
cgagttctgtccatcaaggtgccca

SEQ ID NO: 1024577 - DNA, 25 bp, Homo sapien
agacgcggcctcgtcatcctagggc

SEQ ID NO: 1024578 - DNA, 25 bp, Homo sapien
tcgagctgaaggtcagagccaacga

SEQ ID NO: 1024579 - DNA, 25 bp, Homo sapien
ggcatcaagcaaagagtggcccagc

SEQ ID NO: 1024580 - DNA, 25 bp, Homo sapien
tgactaacgtggtaatgggaatccc

SEQ ID NO: 1024581 - DNA, 25 bp, Homo sapien
cagaggatcctagggacagagtcac

SEQ ID NO: 1024582 - DNA, 25 bp, Homo sapien
taaagtccgttcatgcagggaggta

SEQ ID NO: 1024583 - DNA, 25 bp, Homo sapien
caacttggaactagctggctggcgc

SEQ ID NO: 1024584 - DNA, 25 bp, Homo sapien
gcagcagctttctcgattgggcaac

SEQ ID NO: 1024585 - DNA, 25 bp, Homo sapien
gctacctcgcgagccacatgtgtga

SEQ ID NO: 1024586 - DNA, 25 bp, Homo sapien
ttagtgggacggtcacactcctggg

SEQ ID NO: 1024587 - DNA, 25 bp, Homo sapien
cgcggcagcgcgcatgcgtggcggg

SEQ ID NO: 1024588 - DNA, 25 bp, Homo sapien
cagcgcgcatgcgtggcgggtgcgc

SEQ ID NO: 1024589 - DNA, 25 bp, Homo sapien
gcgcgcatgcgtggcgggtgcgcct

SEQ ID NO: 1024590 - DNA, 25 bp, Homo sapien
tgcgtggcgggtgcgcctgcgcagt

SEQ ID NO: 1024591 - DNA, 25 bp, Homo sapien
ccggcagacgcgcgggacgccccac

SEQ ID NO: 1024592 - DNA, 25 bp, Homo sapien
tgacagtgactcgagagctgagaac

SEQ ID NO: 1024593 - DNA, 25 bp, Homo sapien
cagccaccagttcagcaagtgcggg

SEQ ID NO: 1024594 - DNA, 25 bp, Homo sapien
gtgggacccgcagttccaacaaaca

SEQ ID NO: 1024595 - DNA, 25 bp, Homo sapien
ctgagaactgggtatagggcacatt

SEQ ID NO: 1024596 - DNA, 25 bp, Homo sapien
cagagagcaggtatgcgggtgtggg

SEQ ID NO: 1024597 - DNA, 25 bp, Homo sapien
gagagcaggtatgcgggtgtgggga

SEQ ID NO: 1024598 - DNA, 25 bp, Homo sapien
accagagagcaggtatgcgggtgtg

SEQ ID NO: 1024599 - DNA, 25 bp, Homo sapien
ccagagagcaggtatgcgggtgtgg

SEQ ID NO: 1024600 - DNA, 25 bp, Homo sapien
tttccagtcacccttggtgccctgt

SEQ ID NO: 1024601 - DNA, 25 bp, Homo sapien
ggaagacttggccaggccgtgttcc

SEQ ID NO: 1024602 - DNA, 25 bp, Homo sapien
ccttggtgccctgtacttcactgtg

SEQ ID NO: 1024603 - DNA, 25 bp, Homo sapien
ccaggccgtgttccgtgtctctgga

SEQ ID NO: 1024604 - DNA, 25 bp, Homo sapien
aaaactgtgctgtgaccttgcggta

SEQ ID NO: 1024605 - DNA, 25 bp, Homo sapien
catagcagcagtagtggcttctcca

SEQ ID NO: 1024606 - DNA, 25 bp, Homo sapien
gttttcaagagagatgcctgtcctg

SEQ ID NO: 1024607 - DNA, 25 bp, Homo sapien
caaaagtgcatatgggactcagtcc

SEQ ID NO: 1024608 - DNA, 25 bp, Homo sapien
atttttttgatagtggcctttgctt

SEQ ID NO: 1024609 - DNA, 25 bp, Homo sapien
tttgatagtggcctttgcttctttt

SEQ ID NO: 1024610 - DNA, 25 bp, Homo sapien
agccactgcgtctgatgatagtttt

SEQ ID NO: 1024611 - DNA, 25 bp, Homo sapien
aagccactgcgtctgatgatagttt

SEQ ID NO: 1024612 - DNA, 25 bp, Homo sapien
ggttcaccgagacatgggcccttaa

SEQ ID NO: 1024613 - DNA, 25 bp, Homo sapien
gggcccttaaccaacttgtcagcaa

SEQ ID NO: 1024614 - DNA, 25 bp, Homo sapien
aaacggaagcccacttaaatgctag

SEQ ID NO: 1024615 - DNA, 25 bp, Homo sapien
cagacccctagtcacgcagttggtg

SEQ ID NO: 1024616 - DNA, 25 bp, Homo sapien
aaatttttaatatccttgtgagtgc

SEQ ID NO: 1024617 - DNA, 25 bp, Homo sapien
taatggagctgatggtctgtcatgg

SEQ ID NO: 1024618 - DNA, 25 bp, Homo sapien
tccttgtgagtgcttatttgactta

SEQ ID NO: 1024619 - DNA, 25 bp, Homo sapien
tagatgtcattgtgcttaaagacac

SEQ ID NO: 1024620 - DNA, 25 bp, Homo sapien
gatggtcacgttttctcgtctctcc

SEQ ID NO: 1024621 - DNA, 25 bp, Homo sapien
ggtcacgttttctcgtctctcctgc

SEQ ID NO: 1024622 - DNA, 25 bp, Homo sapien
gtgatggtcacgttttctcgtctct

SEQ ID NO: 1024623 - DNA, 25 bp, Homo sapien
ggaatgtgatggtcacgttttctcg

SEQ ID NO: 1024624 - DNA, 25 bp, Homo sapien
gaataaaagccaatggcagatatgg

SEQ ID NO: 1024625 - DNA, 25 bp, Homo sapien
cagatatgggtcatcaggaagacta

SEQ ID NO: 1024626 - DNA, 25 bp, Homo sapien
tatgggtcatcaggaagactagaca

SEQ ID NO: 1024627 - DNA, 25 bp, Homo sapien
caatggcagatatgggtcatcagga

SEQ ID NO: 1024628 - DNA, 25 bp, Homo sapien
tttgaagacttctgagcggaggagt

SEQ ID NO: 1024629 - DNA, 25 bp, Homo sapien
tagtggtcagagttcggcagagacc

SEQ ID NO: 1024630 - DNA, 25 bp, Homo sapien
gcagagaccaccaaagttgtctggg

SEQ ID NO: 1024631 - DNA, 25 bp, Homo sapien
ttctaggcttacttgactccctggg

SEQ ID NO: 1024632 - DNA, 25 bp, Homo sapien
tgttcccttctcaggtactccaccc

SEQ ID NO: 1024633 - DNA, 25 bp, Homo sapien
gttccacagtgtaccagccacctgg

SEQ ID NO: 1024634 - DNA, 25 bp, Homo sapien
aggtactccacccattgtccctttg

SEQ ID NO: 1024635 - DNA, 25 bp, Homo sapien
cagttccacagtgtaccagccacct

SEQ ID NO: 1024636 - DNA, 25 bp, Homo sapien
tctgggctggactcatcactgtggt

SEQ ID NO: 1024637 - DNA, 25 bp, Homo sapien
tccatctgctgttggagcacgaacc

SEQ ID NO: 1024638 - DNA, 25 bp, Homo sapien
cgtcatcgggaagggtgtagctcca

SEQ ID NO: 1024639 - DNA, 25 bp, Homo sapien
tcagaatcagattggactccgtccc

SEQ ID NO: 1024640 - DNA, 25 bp, Homo sapien
gcatgcctctaatcctggctacttg

SEQ ID NO: 1024641 - DNA, 25 bp, Homo sapien
gacaggagaattgattgaacctgag

SEQ ID NO: 1024642 - DNA, 25 bp, Homo sapien
agccgggctttgtggtgcatgcctc

SEQ ID NO: 1024643 - DNA, 25 bp, Homo sapien
cctgagaggtggaggttgcagtgag

SEQ ID NO: 1024644 - DNA, 25 bp, Homo sapien
tatctcctaatgctttccgtcccct

SEQ ID NO: 1024645 - DNA, 25 bp, Homo sapien
tcctaatgctttccgtcccctctcc

SEQ ID NO: 1024646 - DNA, 25 bp, Homo sapien
atctcctaatgctttccgtcccctc

SEQ ID NO: 1024647 - DNA, 25 bp, Homo sapien
tctcctaatgctttccgtcccctct

SEQ ID NO: 1024648 - DNA, 25 bp, Homo sapien
ttgggtatgagtaatcccatcaccc

SEQ ID NO: 1024649 - DNA, 25 bp, Homo sapien
tatcatgcccctgtctaatagtccc

SEQ ID NO: 1024650 - DNA, 25 bp, Homo sapien
acagtcagttttccaactcttgcca

SEQ ID NO: 1024651 - DNA, 25 bp, Homo sapien
tattgcatgatgctcaagtttgggt

SEQ ID NO: 1024652 - DNA, 25 bp, Homo sapien
tgcacatatgtatcaaagtctggaa

SEQ ID NO: 1024653 - DNA, 25 bp, Homo sapien
cctttattggcatgaagagatgacc

SEQ ID NO: 1024654 - DNA, 25 bp, Homo sapien
taaattaaggcagacttggaatggc

SEQ ID NO: 1024655 - DNA, 25 bp, Homo sapien
cacaatacagtaaatggttgggcat

SEQ ID NO: 1024656 - DNA, 25 bp, Homo sapien
tctgaactatagttcaaaggcagga

SEQ ID NO: 1024657 - DNA, 25 bp, Homo sapien
catgagggtagagaacttcatgttt

SEQ ID NO: 1024658 - DNA, 25 bp, Homo sapien
atgcttgtccaacctgaggcctgtg

SEQ ID NO: 1024659 - DNA, 25 bp, Homo sapien
tatgaatgcctagtcatgcttgtcc

SEQ ID NO: 1024660 - DNA, 25 bp, Homo sapien
ttgttgggattcacgggaggaggaa

SEQ ID NO: 1024661 - DNA, 25 bp, Homo sapien
tggctgtgattgttgggattcacgg

SEQ ID NO: 1024662 - DNA, 25 bp, Homo sapien
gatggacctgtgttgctggtgctgc

SEQ ID NO: 1024663 - DNA, 25 bp, Homo sapien
tgatggacctgtgttgctggtgctg

SEQ ID NO: 1024664 - DNA, 25 bp, Homo sapien
tgctgccagcatttgttccactgac

SEQ ID NO: 1024665 - DNA, 25 bp, Homo sapien
acagggatggatcgaggctgctgcc

SEQ ID NO: 1024666 - DNA, 25 bp, Homo sapien
tttgtgggaactgaagagtgttgtc

SEQ ID NO: 1024667 - DNA, 25 bp, Homo sapien
gtgttgtcctcggtagcttccacag

SEQ ID NO: 1024668 - DNA, 25 bp, Homo sapien
tggaccaggttgacgattgataaga

SEQ ID NO: 1024669 - DNA, 25 bp, Homo sapien
ggaccaggttgacgattgataagac

SEQ ID NO: 1024670 - DNA, 25 bp, Homo sapien
tctggaccaggttgacgattgataa

SEQ ID NO: 1024671 - DNA, 25 bp, Homo sapien
ggtctggaccaggttgacgattgat

SEQ ID NO: 1024672 - DNA, 25 bp, Homo sapien
tggccccaatttagcaccttactgg

SEQ ID NO: 1024673 - DNA, 25 bp, Homo sapien
ggctgtgagccatagtagaatgcat

SEQ ID NO: 1024674 - DNA, 25 bp, Homo sapien
gaatgcatgtgatccagggccttgc

SEQ ID NO: 1024675 - DNA, 25 bp, Homo sapien
tgaattcatggtctaatagggagcc

SEQ ID NO: 1024676 - DNA, 25 bp, Homo sapien
acgcactgagcccaagcgcgagtct

SEQ ID NO: 1024677 - DNA, 25 bp, Homo sapien
tgcaggaagcgatctcgcccgcggt

SEQ ID NO: 1024678 - DNA, 25 bp, Homo sapien
gcagcggtacccgaaggcagcagca

SEQ ID NO: 1024679 - DNA, 25 bp, Homo sapien
ctgctcgcagcagcgcgaggagcca

SEQ ID NO: 1024680 - DNA, 25 bp, Homo sapien
tgaggacaccaagcctggaagccag

SEQ ID NO: 1024681 - DNA, 25 bp, Homo sapien
gggcgggttccatggacgttctgga

SEQ ID NO: 1024682 - DNA, 25 bp, Homo sapien
gacatgtggccttcttgacttcgtt

SEQ ID NO: 1024683 - DNA, 25 bp, Homo sapien
ccatggacgttctggaggcttctga

SEQ ID NO: 1024684 - DNA, 25 bp, Homo sapien
gagaatacaacagggccctggagca

SEQ ID NO: 1024685 - DNA, 25 bp, Homo sapien
tctggaagccgcacttactgtgtgt

SEQ ID NO: 1024686 - DNA, 25 bp, Homo sapien
gatcccgggctctgcatgacattct

SEQ ID NO: 1024687 - DNA, 25 bp, Homo sapien
aaggaaaacgtcagctgagagaggc

SEQ ID NO: 1024688 - DNA, 25 bp, Homo sapien
cagctgttctccgatgaccccgtgt

SEQ ID NO: 1024689 - DNA, 25 bp, Homo sapien
gttctccgatgaccccgtgtgcctg

SEQ ID NO: 1024690 - DNA, 25 bp, Homo sapien
ggctggtggagcagcggttaagagt

SEQ ID NO: 1024691 - DNA, 25 bp, Homo sapien
ggtggagcagcggttaagagtgggc

SEQ ID NO: 1024692 - DNA, 25 bp, Homo sapien
cacggcttctgggtctacaggcagg

SEQ ID NO: 1024693 - DNA, 25 bp, Homo sapien
ctgtctgtgcacggcttctgggtct

SEQ ID NO: 1024694 - DNA, 25 bp, Homo sapien
tgtgcacggcttctgggtctacagg

SEQ ID NO: 1024695 - DNA, 25 bp, Homo sapien
gtctgtgcacggcttctgggtctac

SEQ ID NO: 1024696 - DNA, 25 bp, Homo sapien
gccccagagaacagctgtagccttc

SEQ ID NO: 1024697 - DNA, 25 bp, Homo sapien
tgtagccttcctgccaaggggccac

SEQ ID NO: 1024698 - DNA, 25 bp, Homo sapien
tgcagggcattgtgccagccacact

SEQ ID NO: 1024699 - DNA, 25 bp, Homo sapien
gggcattgtgccagccacactctca

SEQ ID NO: 1024700 - DNA, 25 bp, Homo sapien
gcaggcaggttggactctgggtcca

SEQ ID NO: 1024701 - DNA, 25 bp, Homo sapien
agcctcgttcgaatgtgacagcagc

SEQ ID NO: 1024702 - DNA, 25 bp, Homo sapien
tgtgagtttcccttccggactccca

SEQ ID NO: 1024703 - DNA, 25 bp, Homo sapien
gatttcgagcactgcgaacacggcg

SEQ ID NO: 1024704 - DNA, 25 bp, Homo sapien
cgtcaccccgcttggagtgggagct

SEQ ID NO: 1024705 - DNA, 25 bp, Homo sapien
cataaagccgggctgtgcctcagct

SEQ ID NO: 1024706 - DNA, 25 bp, Homo sapien
taaagccgggctgtgcctcagcttc

SEQ ID NO: 1024707 - DNA, 25 bp, Homo sapien
tgggttccataaagccgggctgtgc

SEQ ID NO: 1024708 - DNA, 25 bp, Homo sapien
tcagctgggttccataaagccgggc

SEQ ID NO: 1024709 - DNA, 25 bp, Homo sapien
ctgagggtccaccattcagggagga

SEQ ID NO: 1024710 - DNA, 25 bp, Homo sapien
tatcaacatgccaccgtggagcaca

SEQ ID NO: 1024711 - DNA, 25 bp, Homo sapien
ggtttctcagggaaacctgatctcc

SEQ ID NO: 1024712 - DNA, 25 bp, Homo sapien
gcccaggctggtccgtatcaacatg

SEQ ID NO: 1024713 - DNA, 25 bp, Homo sapien
cagtgagatttcttgttgaagaccc

SEQ ID NO: 1024714 - DNA, 25 bp, Homo sapien
agtgagatttcttgttgaagaccca

SEQ ID NO: 1024715 - DNA, 25 bp, Homo sapien
gtgagatttcttgttgaagacccat

SEQ ID NO: 1024716 - DNA, 25 bp, Homo sapien
agaggtgcggccctccagcaggtct

SEQ ID NO: 1024717 - DNA, 25 bp, Homo sapien
cccagaggtgcggccctccagcagg

SEQ ID NO: 1024718 - DNA, 25 bp, Homo sapien
ctgttccccgtgctgttccctcttc

SEQ ID NO: 1024719 - DNA, 25 bp, Homo sapien
tccctcttcactggaccaagctcca

SEQ ID NO: 1024720 - DNA, 25 bp, Homo sapien
cctgaagatgggcaccgaaggctaa

SEQ ID NO: 1024721 - DNA, 25 bp, Homo sapien
cctgaccctgaagatgggcaccgaa

SEQ ID NO: 1024722 - DNA, 25 bp, Homo sapien
aagatgggcaccgaaggctaagtgc

SEQ ID NO: 1024723 - DNA, 25 bp, Homo sapien
aaagggctgagacatggcgggaccc

SEQ ID NO: 1024724 - DNA, 25 bp, Homo sapien
ttatgggtgggaaatcctgccggcc

SEQ ID NO: 1024725 - DNA, 25 bp, Homo sapien
tccaagagccttttatgggtgggaa

SEQ ID NO: 1024726 - DNA, 25 bp, Homo sapien
ccggggtccagattccaagagcctt

SEQ ID NO: 1024727 - DNA, 25 bp, Homo sapien
tggcagctgagttttagctgggcct

SEQ ID NO: 1024728 - DNA, 25 bp, Homo sapien
tgtcggtggttgtctgacaggattc

SEQ ID NO: 1024729 - DNA, 25 bp, Homo sapien
tggttgtctgacaggattctgcagg

SEQ ID NO: 1024730 - DNA, 25 bp, Homo sapien
ggtggttgtctgacaggattctgca

SEQ ID NO: 1024731 - DNA, 25 bp, Homo sapien
catgtcggtggttgtctgacaggat

SEQ ID NO: 1024732 - DNA, 25 bp, Homo sapien
agctttcagaaagggctgctccacc

SEQ ID NO: 1024733 - DNA, 25 bp, Homo sapien
catctgggagccagctttcagaaag

SEQ ID NO: 1024734 - DNA, 25 bp, Homo sapien
tgggagccagctttcagaaagggct

SEQ ID NO: 1024735 - DNA, 25 bp, Homo sapien
gctgctgcccatctgggagccagct

SEQ ID NO: 1024736 - DNA, 25 bp, Homo sapien
gccagcgtgcgagggaacagcagca

SEQ ID NO: 1024737 - DNA, 25 bp, Homo sapien
agccagcgtgcgagggaacagcagc

SEQ ID NO: 1024738 - DNA, 25 bp, Homo sapien
gtcgaacatctcaaagactcccttg

SEQ ID NO: 1024739 - DNA, 25 bp, Homo sapien
gggttgatacccagcaggctcatga

SEQ ID NO: 1024740 - DNA, 25 bp, Homo sapien
gccattgaggccagctcactcttgg

SEQ ID NO: 1024741 - DNA, 25 bp, Homo sapien
ttgatctgctcagccgacaggcgct

SEQ ID NO: 1024742 - DNA, 25 bp, Homo sapien
tgccaggaaaccatcgcagttgaag

SEQ ID NO: 1024743 - DNA, 25 bp, Homo sapien
gtcaaagacacggaatgccgccctc

SEQ ID NO: 1024744 - DNA, 25 bp, Homo sapien
tgttccagtcaatgtagcccttgcc

SEQ ID NO: 1024745 - DNA, 25 bp, Homo sapien
ggtaaactcccattagtgccaggaa

SEQ ID NO: 1024746 - DNA, 25 bp, Homo sapien
ttcatcatctgctccgcctccacct

SEQ ID NO: 1024747 - DNA, 25 bp, Homo sapien
tccacctcgttgaggggctcccctg

SEQ ID NO: 1024748 - DNA, 25 bp, Homo sapien
ctcccctgcgttcattagcacgtac

SEQ ID NO: 1024749 - DNA, 25 bp, Homo sapien
tccttgtcggcctccttcatcatct

SEQ ID NO: 1024750 - DNA, 25 bp, Homo sapien
aaggactcccccgtcatcatggcca

SEQ ID NO: 1024751 - DNA, 25 bp, Homo sapien
ttgaaggactcccccgtcatcatgg

SEQ ID NO: 1024752 - DNA, 25 bp, Homo sapien
ggactcccccgtcatcatggccaca

SEQ ID NO: 1024753 - DNA, 25 bp, Homo sapien
actcccccgtcatcatggccacaaa

SEQ ID NO: 1024754 - DNA, 25 bp, Homo sapien
ggcagcagccttcccgggcaggcct

SEQ ID NO: 1024755 - DNA, 25 bp, Homo sapien
aggggcagcagccttcccgggcagg

SEQ ID NO: 1024756 - DNA, 25 bp, Homo sapien
tggaacatttattttacacggagcc

SEQ ID NO: 1024757 - DNA, 25 bp, Homo sapien
ggctggaacatttattttacacgga

SEQ ID NO: 1024758 - DNA, 25 bp, Homo sapien
tgaacggcatcctgtgtggcaagca

SEQ ID NO: 1024759 - DNA, 25 bp, Homo sapien
taccaggactctgtgctcgtgcaca

SEQ ID NO: 1024760 - DNA, 25 bp, Homo sapien
gccagtgtcatcacgggaggcgtca

SEQ ID NO: 1024761 - DNA, 25 bp, Homo sapien
cagagtcaggccgatttgaagacac

SEQ ID NO: 1024762 - DNA, 25 bp, Homo sapien
tacttggtgatccagtattctgttc

SEQ ID NO: 1024763 - DNA, 25 bp, Homo sapien
taatgagtatgaagctgactggtag

SEQ ID NO: 1024764 - DNA, 25 bp, Homo sapien
tattctgttctagtagtagttgaac

SEQ ID NO: 1024765 - DNA, 25 bp, Homo sapien
taaacacctaaatgttaatgagtat

SEQ ID NO: 1024766 - DNA, 25 bp, Homo sapien
aggctcctggcatcctcgacagtgt

SEQ ID NO: 1024767 - DNA, 25 bp, Homo sapien
cagtgttcagagtcctcggctcacc

SEQ ID NO: 1024768 - DNA, 25 bp, Homo sapien
cctatgcacccgcatgggctggggc

SEQ ID NO: 1024769 - DNA, 25 bp, Homo sapien
gacagtaccactgcctaggcggctt

SEQ ID NO: 1024770 - DNA, 25 bp, Homo sapien
tagcacgacacggactaatgacctg

SEQ ID NO: 1024771 - DNA, 25 bp, Homo sapien
tcattggtctgcacagtgagcccgc

SEQ ID NO: 1024772 - DNA, 25 bp, Homo sapien
gaaatgtgcaactaacatggccagg

SEQ ID NO: 1024773 - DNA, 25 bp, Homo sapien
tcatatcccagcgacttgtgagagg

SEQ ID NO: 1024774 - DNA, 25 bp, Homo sapien
ttttggagtcctcttagaacaaggc

SEQ ID NO: 1024775 - DNA, 25 bp, Homo sapien
gggctacgacttgctttttggagtc

SEQ ID NO: 1024776 - DNA, 25 bp, Homo sapien
aaggccgggtgagaacatcagctgc

SEQ ID NO: 1024777 - DNA, 25 bp, Homo sapien
cctcttagaacaaggccgggtgaga

SEQ ID NO: 1024778 - DNA, 25 bp, Homo sapien
tcacaccgcaacacccggcgaggaa

SEQ ID NO: 1024779 - DNA, 25 bp, Homo sapien
aggaagcgccctccaactctccctt

SEQ ID NO: 1024780 - DNA, 25 bp, Homo sapien
tgaagacagcacacactcaccagtc

SEQ ID NO: 1024781 - DNA, 25 bp, Homo sapien
ctctccctttcgtgctcggccccgg

SEQ ID NO: 1024782 - DNA, 25 bp, Homo sapien
tgtggaggtcctcgcccactagagg

SEQ ID NO: 1024783 - DNA, 25 bp, Homo sapien
gtgtggaggtcctcgcccactagag

SEQ ID NO: 1024784 - DNA, 25 bp, Homo sapien
cacgtgtggaggtcctcgcccacta

SEQ ID NO: 1024785 - DNA, 25 bp, Homo sapien
acgtgtggaggtcctcgcccactag

SEQ ID NO: 1024786 - DNA, 25 bp, Homo sapien
gtgacacgtgtggaggtcctcgccc

SEQ ID NO: 1024787 - DNA, 25 bp, Homo sapien
gacacgtgtggaggtcctcgcccac

SEQ ID NO: 1024788 - DNA, 25 bp, Homo sapien
cctggtgacacgtgtggaggtcctc

SEQ ID NO: 1024789 - DNA, 25 bp, Homo sapien
acctggcctggtgacacgtgtggag

SEQ ID NO: 1024790 - DNA, 25 bp, Homo sapien
ttgctgagagttacctggcctggtg

SEQ ID NO: 1024791 - DNA, 25 bp, Homo sapien
agagttacctggcctggtgacacac

SEQ ID NO: 1024792 - DNA, 25 bp, Homo sapien
tgagagttacctggcctggtgacac

SEQ ID NO: 1024793 - DNA, 25 bp, Homo sapien
gctgagagttacctggcctggtgac

SEQ ID NO: 1024794 - DNA, 25 bp, Homo sapien
cacctggcctggtgacacgtgtgga

SEQ ID NO: 1024795 - DNA, 25 bp, Homo sapien
gtcacctggcctggtgacacgtgtg

SEQ ID NO: 1024796 - DNA, 25 bp, Homo sapien
tcacctggcctggtgacacgtgtgg

SEQ ID NO: 1024797 - DNA, 25 bp, Homo sapien
tcctggctgcgtttggtgaagtcaa

SEQ ID NO: 1024798 - DNA, 25 bp, Homo sapien
gagccggagaaaccgcaatcctggc

SEQ ID NO: 1024799 - DNA, 25 bp, Homo sapien
ctcttaaacaactgagacagccgag

SEQ ID NO: 1024800 - DNA, 25 bp, Homo sapien
tcaagtgactcctgtgctaacgttt

SEQ ID NO: 1024801 - DNA, 25 bp, Homo sapien
cctccaggagccacggaggtcaatg

SEQ ID NO: 1024802 - DNA, 25 bp, Homo sapien
caggagccacggaggtcaatgcatg

SEQ ID NO: 1024803 - DNA, 25 bp, Homo sapien
ccagaggggatgaggacgtggcctg

SEQ ID NO: 1024804 - DNA, 25 bp, Homo sapien
ggatgaggacgtggcctggcctcca

SEQ ID NO: 1024805 - DNA, 25 bp, Homo sapien
ctccgcttgcccagactgggagaca

SEQ ID NO: 1024806 - DNA, 25 bp, Homo sapien
tggccggctcctccgcttgcccaga

SEQ ID NO: 1024807 - DNA, 25 bp, Homo sapien
gcttgcccagactgggagacactgg

SEQ ID NO: 1024808 - DNA, 25 bp, Homo sapien
tccgcttgcccagactgggagacac

SEQ ID NO: 1024809 - DNA, 25 bp, Homo sapien
gatcctcttggttgggacccattgg

SEQ ID NO: 1024810 - DNA, 25 bp, Homo sapien
cattggttttaggtccttggctgcc

SEQ ID NO: 1024811 - DNA, 25 bp, Homo sapien
ggagggccccgatgaaatggcccat

SEQ ID NO: 1024812 - DNA, 25 bp, Homo sapien
ctctgggatcctcttggttgggacc

SEQ ID NO: 1024813 - DNA, 25 bp, Homo sapien
gggatgaagcctgaacggaggaagc

SEQ ID NO: 1024814 - DNA, 25 bp, Homo sapien
tgaacggaggaagccagtgccggag

SEQ ID NO: 1024815 - DNA, 25 bp, Homo sapien
cggggatgaagcctgaacggaggaa

SEQ ID NO: 1024816 - DNA, 25 bp, Homo sapien
ggggatgaagcctgaacggaggaag

SEQ ID NO: 1024817 - DNA, 25 bp, Homo sapien
gactccggagattcaggggaccctg

SEQ ID NO: 1024818 - DNA, 25 bp, Homo sapien
attcaggggaccctggtaccagagg

SEQ ID NO: 1024819 - DNA, 25 bp, Homo sapien
tcttcgggcccagtggactcaatgg

SEQ ID NO: 1024820 - DNA, 25 bp, Homo sapien
atgaagctgcgacccaggagccacg

SEQ ID NO: 1024821 - DNA, 25 bp, Homo sapien
acagggactctactgtccaccagcc

SEQ ID NO: 1024822 - DNA, 25 bp, Homo sapien
ccggctcggtctctcaggaactaca

SEQ ID NO: 1024823 - DNA, 25 bp, Homo sapien
gtcaccagcccctacagggactcta

SEQ ID NO: 1024824 - DNA, 25 bp, Homo sapien
ggtctctcaggaactacaccgtcca

SEQ ID NO: 1024825 - DNA, 25 bp, Homo sapien
gacgtgtgcaagcttccagtccctc

SEQ ID NO: 1024826 - DNA, 25 bp, Homo sapien
acgtgtgcaagcttccagtccctca

SEQ ID NO: 1024827 - DNA, 25 bp, Homo sapien
ggtggggagtcgagggtgcgggctg

SEQ ID NO: 1024828 - DNA, 25 bp, Homo sapien
gtggggagtcgagggtgcgggctgg

SEQ ID NO: 1024829 - DNA, 25 bp, Homo sapien
ctggtggggagtcgagggtgcgggc

SEQ ID NO: 1024830 - DNA, 25 bp, Homo sapien
tggtggggagtcgagggtgcgggct

SEQ ID NO: 1024831 - DNA, 25 bp, Homo sapien
gggcaagaaacaagggtggagccag

SEQ ID NO: 1024832 - DNA, 25 bp, Homo sapien
agggcaagaaacaagggtggagcca

SEQ ID NO: 1024833 - DNA, 25 bp, Homo sapien
ttcatgaaaatgacttgtcccgagg

SEQ ID NO: 1024834 - DNA, 25 bp, Homo sapien
taaggtgaaaggaaggtgccaactg

SEQ ID NO: 1024835 - DNA, 25 bp, Homo sapien
tcgcctcgaagacgactaaggtgaa

SEQ ID NO: 1024836 - DNA, 25 bp, Homo sapien
gacttgtcccgaggaaacatcgcct

SEQ ID NO: 1024837 - DNA, 25 bp, Homo sapien
tggaaaccacattctgcagcgattt

SEQ ID NO: 1024838 - DNA, 25 bp, Homo sapien
ctgcagcgattttcactcagtttgg

SEQ ID NO: 1024839 - DNA, 25 bp, Homo sapien
cattctgcagcgattttcactcagt

SEQ ID NO: 1024840 - DNA, 25 bp, Homo sapien
ctggaacccgcaccctgtaacccag

SEQ ID NO: 1024841 - DNA, 25 bp, Homo sapien
tccgcctgaggctcgttcatcctca

SEQ ID NO: 1024842 - DNA, 25 bp, Homo sapien
acgtcagaggttcgcgggccgcctc

SEQ ID NO: 1024843 - DNA, 25 bp, Homo sapien
attgcaatggagcacgtcagaggtt

SEQ ID NO: 1024844 - DNA, 25 bp, Homo sapien
caatggagcacgtcagaggttcgcg

SEQ ID NO: 1024845 - DNA, 25 bp, Homo sapien
gaggaaacgtgtggggtcccattca

SEQ ID NO: 1024846 - DNA, 25 bp, Homo sapien
agcatgggcctctgggttggactga

SEQ ID NO: 1024847 - DNA, 25 bp, Homo sapien
attcacctccgctccaagcggcggc

SEQ ID NO: 1024848 - DNA, 25 bp, Homo sapien
cacagtcccccatgccgggacctca

SEQ ID NO: 1024849 - DNA, 25 bp, Homo sapien
gatccacaggcagcccaccgaagag

SEQ ID NO: 1024850 - DNA, 25 bp, Homo sapien
agcccaccgaagagaacgtcacagt

SEQ ID NO: 1024851 - DNA, 25 bp, Homo sapien
gaagagaacgtcacagtcaccacaa

SEQ ID NO: 1024852 - DNA, 25 bp, Homo sapien
gaacgtcacagtcaccacaaatcac

SEQ ID NO: 1024853 - DNA, 25 bp, Homo sapien
ggccctggtcgcctctgacaaaggg

SEQ ID NO: 1024854 - DNA, 25 bp, Homo sapien
acttccgagtttctggctgacaccc

SEQ ID NO: 1024855 - DNA, 25 bp, Homo sapien
caaaggggctatcggatgctgcctc

SEQ ID NO: 1024856 - DNA, 25 bp, Homo sapien
tgcctctgtgccacttccgagtttc

SEQ ID NO: 1024857 - DNA, 25 bp, Homo sapien
tgcatccggggtccctccttccacg

SEQ ID NO: 1024858 - DNA, 25 bp, Homo sapien
gtcctcccaggccacgacggagcgt

SEQ ID NO: 1024859 - DNA, 25 bp, Homo sapien
acgacggagcgtcctcctggagaaa

SEQ ID NO: 1024860 - DNA, 25 bp, Homo sapien
caggccacgacggagcgtcctcctg

SEQ ID NO: 1024861 - DNA, 25 bp, Homo sapien
ggccgtaacattctttccataagaa

SEQ ID NO: 1024862 - DNA, 25 bp, Homo sapien
ggaggcacccaggccgtaacattct

SEQ ID NO: 1024863 - DNA, 25 bp, Homo sapien
agaaaagctgaaacccaacggcagg

SEQ ID NO: 1024864 - DNA, 25 bp, Homo sapien
agctgaaacccaacggcaggcggct

SEQ ID NO: 1024865 - DNA, 25 bp, Homo sapien
caaggaatgcctagcgggttggaac

SEQ ID NO: 1024866 - DNA, 25 bp, Homo sapien
tgaatcaaccgtgcctgtcacgaag

SEQ ID NO: 1024867 - DNA, 25 bp, Homo sapien
gagtgtccgagttggtgaatatacc

SEQ ID NO: 1024868 - DNA, 25 bp, Homo sapien
ccctaggaatcctggagtgcggtaa

SEQ ID NO: 1024869 - DNA, 25 bp, Homo sapien
tgggacaagggccaaagcctccagt

SEQ ID NO: 1024870 - DNA, 25 bp, Homo sapien
tcagcagccgttcaggaaagtgccc

SEQ ID NO: 1024871 - DNA, 25 bp, Homo sapien
tgtcctccgccccaccgtcctcaaa

SEQ ID NO: 1024872 - DNA, 25 bp, Homo sapien
gccccaccgtcctcaaatgctgctg

SEQ ID NO: 1024873 - DNA, 25 bp, Homo sapien
gacccctcatgtggctctacccacg

SEQ ID NO: 1024874 - DNA, 25 bp, Homo sapien
ggcggccacactttcggcccctgtg

SEQ ID NO: 1024875 - DNA, 25 bp, Homo sapien
ctaaccagcctacggcaggtcctgg

SEQ ID NO: 1024876 - DNA, 25 bp, Homo sapien
aagacagggcgcatcctgccctaac

SEQ ID NO: 1024877 - DNA, 25 bp, Homo sapien
cggacaggatccaccacgggacggc

SEQ ID NO: 1024878 - DNA, 25 bp, Homo sapien
tgatcctcatggtgtcacggcctcg

SEQ ID NO: 1024879 - DNA, 25 bp, Homo sapien
tccgcacagggatagttcaaacggg

SEQ ID NO: 1024880 - DNA, 25 bp, Homo sapien
acagtggagccgtgaagtcacccca

SEQ ID NO: 1024881 - DNA, 25 bp, Homo sapien
agccacgagcccacgcagggtgcag

SEQ ID NO: 1024882 - DNA, 25 bp, Homo sapien
tggcagccacgagcccacgcagggt

SEQ ID NO: 1024883 - DNA, 25 bp, Homo sapien
gcgtggcagccacgagcccacgcag

SEQ ID NO: 1024884 - DNA, 25 bp, Homo sapien
aaggatatgagaaaggtgtaaagaa

SEQ ID NO: 1024885 - DNA, 25 bp, Homo sapien
cctgttaaagcgcttggcttggaag

SEQ ID NO: 1024886 - DNA, 25 bp, Homo sapien
tggccgttggcacggtacagcttcc

SEQ ID NO: 1024887 - DNA, 25 bp, Homo sapien
catcttctggctccccggcggtaga

SEQ ID NO: 1024888 - DNA, 25 bp, Homo sapien
ctggctccccggcggtagatagatt

SEQ ID NO: 1024889 - DNA, 25 bp, Homo sapien
tcactcaggagcttgtcctgcatcc

SEQ ID NO: 1024890 - DNA, 25 bp, Homo sapien
tcagtcactcaggagcttgtcctgc

SEQ ID NO: 1024891 - DNA, 25 bp, Homo sapien
agtcactcaggagcttgtcctgcat

SEQ ID NO: 1024892 - DNA, 25 bp, Homo sapien
tcaggagcttgtcctgcatcctcac

SEQ ID NO: 1024893 - DNA, 25 bp, Homo sapien
cgcccagaagggctgtacctccaca

SEQ ID NO: 1024894 - DNA, 25 bp, Homo sapien
tcacacgcccagaagggctgtacct

SEQ ID NO: 1024895 - DNA, 25 bp, Homo sapien
ggctgtacctccacagcagagcggg

SEQ ID NO: 1024896 - DNA, 25 bp, Homo sapien
gaagggctgtacctccacagcagag

SEQ ID NO: 1024897 - DNA, 25 bp, Homo sapien
caagacctctgattccgggccaatc

SEQ ID NO: 1024898 - DNA, 25 bp, Homo sapien
ggagttttgccccagtcggcacctg

SEQ ID NO: 1024899 - DNA, 25 bp, Homo sapien
aggaccgtgggctctattcgaagga

SEQ ID NO: 1024900 - DNA, 25 bp, Homo sapien
gggccaatctagcttaatgccggca

SEQ ID NO: 1024901 - DNA, 25 bp, Homo sapien
aaaagaggacactgagccgggcaac

SEQ ID NO: 1024902 - DNA, 25 bp, Homo sapien
ttccacacctataccttctcaaaag

SEQ ID NO: 1024903 - DNA, 25 bp, Homo sapien
gggcgccaggcttgcccaagcttga

SEQ ID NO: 1024904 - DNA, 25 bp, Homo sapien
gcaacaggtggccccggcaccttgt

SEQ ID NO: 1024905 - DNA, 25 bp, Homo sapien
tgggaacagagcgtcaggcccaggc

SEQ ID NO: 1024906 - DNA, 25 bp, Homo sapien
ctgcaggtgggaacagagcgtcagg

SEQ ID NO: 1024907 - DNA, 25 bp, Homo sapien
tatggaccagcagtttgcagttgat

SEQ ID NO: 1024908 - DNA, 25 bp, Homo sapien
gccgtggcagcgcttatggaccagc

SEQ ID NO: 1024909 - DNA, 25 bp, Homo sapien
atatcctctcgctgcactgaccgca

SEQ ID NO: 1024910 - DNA, 25 bp, Homo sapien
tgcagttgatgcacctgtagccttg

SEQ ID NO: 1024911 - DNA, 25 bp, Homo sapien
tcaggaagatgggtcctatccaaga

SEQ ID NO: 1024912 - DNA, 25 bp, Homo sapien
gtcctatccaagactgccgcctgag

SEQ ID NO: 1024913 - DNA, 25 bp, Homo sapien
agactgccgcctgagtctcacgctg

SEQ ID NO: 1024914 - DNA, 25 bp, Homo sapien
gatgggtcctatccaagactgccgc

SEQ ID NO: 1024915 - DNA, 25 bp, Homo sapien
tcagggggccattctaagggcctct

SEQ ID NO: 1024916 - DNA, 25 bp, Homo sapien
taaccaagcatcagggggccattct

SEQ ID NO: 1024917 - DNA, 25 bp, Homo sapien
tgtcagtaaccaagcatcagggggc

SEQ ID NO: 1024918 - DNA, 25 bp, Homo sapien
cattctaagggcctctgggttccgc

SEQ ID NO: 1024919 - DNA, 25 bp, Homo sapien
tatgattctgcagacggaggtggcc

SEQ ID NO: 1024920 - DNA, 25 bp, Homo sapien
tttgcacaatgcttggtcatctccc

SEQ ID NO: 1024921 - DNA, 25 bp, Homo sapien
tccaccaagtgctttatacaacggg

SEQ ID NO: 1024922 - DNA, 25 bp, Homo sapien
gcaggccatgacctttccaccaagt

SEQ ID NO: 1024923 - DNA, 25 bp, Homo sapien
cgttcttgtcgtctactggaggctc

SEQ ID NO: 1024924 - DNA, 25 bp, Homo sapien
ctcggaaggaaggtcggcgtcctcg

SEQ ID NO: 1024925 - DNA, 25 bp, Homo sapien
aggaaggtcggcgtcctcgttcttg

SEQ ID NO: 1024926 - DNA, 25 bp, Homo sapien
tcggcgtcctcgttcttgtcgtcta

SEQ ID NO: 1024927 - DNA, 25 bp, Homo sapien
taatgctgtcatgcttccgggatga

SEQ ID NO: 1024928 - DNA, 25 bp, Homo sapien
aatgctgtcatgcttccgggatgag

SEQ ID NO: 1024929 - DNA, 25 bp, Homo sapien
ttaatgctgtcatgcttccgggatg

SEQ ID NO: 1024930 - DNA, 25 bp, Homo sapien
ggtttatggtgcagagctggccaca

SEQ ID NO: 1024931 - DNA, 25 bp, Homo sapien
gaagattagttagcaacaccccgga

SEQ ID NO: 1024932 - DNA, 25 bp, Homo sapien
cacaattcggaaggcatggtgcaga

SEQ ID NO: 1024933 - DNA, 25 bp, Homo sapien
tttacgagcagaggctgagaacgca

SEQ ID NO: 1024934 - DNA, 25 bp, Homo sapien
gcccaagcccctgagagattttgat

SEQ ID NO: 1024935 - DNA, 25 bp, Homo sapien
gattaggtcaaagtcctgcagccca

SEQ ID NO: 1024936 - DNA, 25 bp, Homo sapien
ccgcgcccgatgactctgattaggt

SEQ ID NO: 1024937 - DNA, 25 bp, Homo sapien
caccaggagaaccttggcgtagctc

SEQ ID NO: 1024938 - DNA, 25 bp, Homo sapien
catggattaattccgctaaagcccg

SEQ ID NO: 1024939 - DNA, 25 bp, Homo sapien
tctcgtgcatggattaattccgcta

SEQ ID NO: 1024940 - DNA, 25 bp, Homo sapien
gggccccatgagaagcggcacctac

SEQ ID NO: 1024941 - DNA, 25 bp, Homo sapien
ctaggtctctcgtgcatggattaat

SEQ ID NO: 1024942 - DNA, 25 bp, Homo sapien
ccccgcagggacgtcggcgttggca

SEQ ID NO: 1024943 - DNA, 25 bp, Homo sapien
cccgcagggacgtcggcgttggcat

SEQ ID NO: 1024944 - DNA, 25 bp, Homo sapien
gaagcaggagtgtaatccgaccagg

SEQ ID NO: 1024945 - DNA, 25 bp, Homo sapien
ctggaagcaggagtgtaatccgacc

SEQ ID NO: 1024946 - DNA, 25 bp, Homo sapien
gcaggagtgtaatccgaccaggaag

SEQ ID NO: 1024947 - DNA, 25 bp, Homo sapien
caggagtgtaatccgaccaggaagg

SEQ ID NO: 1024948 - DNA, 25 bp, Homo sapien
acggcaccgcacgtagagcaggtcg

SEQ ID NO: 1024949 - DNA, 25 bp, Homo sapien
caggacggcaccgcacgtagagcag

SEQ ID NO: 1024950 - DNA, 25 bp, Homo sapien
cgtagagcaggtcggggaacggccg

SEQ ID NO: 1024951 - DNA, 25 bp, Homo sapien
ggacggcaccgcacgtagagcaggt

SEQ ID NO: 1024952 - DNA, 25 bp, Homo sapien
ttaggaggcgtaagcagccagaaaa

SEQ ID NO: 1024953 - DNA, 25 bp, Homo sapien
tggtcaccacaagcctcgtccacac

SEQ ID NO: 1024954 - DNA, 25 bp, Homo sapien
cgccacgctgaagcacacgatgggg

SEQ ID NO: 1024955 - DNA, 25 bp, Homo sapien
cgctgaagcacacgatggggcactg

SEQ ID NO: 1024956 - DNA, 25 bp, Homo sapien
ggcctggtcaccacaagcctcgtcc

SEQ ID NO: 1024957 - DNA, 25 bp, Homo sapien
tccgggaagcaggggagcagaagga

SEQ ID NO: 1024958 - DNA, 25 bp, Homo sapien
ggagcagaaggaaaggggacagagc

SEQ ID NO: 1024959 - DNA, 25 bp, Homo sapien
agcagaaggaaaggggacagagccg

SEQ ID NO: 1024960 - DNA, 25 bp, Homo sapien
cgggaagcaggggagcagaaggaaa

SEQ ID NO: 1024961 - DNA, 25 bp, Homo sapien
ccctgggcgtattcccaaatcgcaa

SEQ ID NO: 1024962 - DNA, 25 bp, Homo sapien
agggatggcagtcagggcggaaaga

SEQ ID NO: 1024963 - DNA, 25 bp, Homo sapien
ggcgtattcccaaatcgcaagggat

SEQ ID NO: 1024964 - DNA, 25 bp, Homo sapien
cccaaatcgcaagggatggcagtca

SEQ ID NO: 1024965 - DNA, 25 bp, Homo sapien
gcttaaactgaagcgatttctcgtt

SEQ ID NO: 1024966 - DNA, 25 bp, Homo sapien
gaagcgatttctcgttttggagact

SEQ ID NO: 1024967 - DNA, 25 bp, Homo sapien
aactgaagcgatttctcgttttgga

SEQ ID NO: 1024968 - DNA, 25 bp, Homo sapien
aaatagcttaaactgaagcgatttc

SEQ ID NO: 1024969 - DNA, 25 bp, Homo sapien
agcccctcaccttcctggagccagg

SEQ ID NO: 1024970 - DNA, 25 bp, Homo sapien
gggaggcagcccctcaccttcctgg

SEQ ID NO: 1024971 - DNA, 25 bp, Homo sapien
ctcaccttcctggagccaggagaca

SEQ ID NO: 1024972 - DNA, 25 bp, Homo sapien
ccctcaccttcctggagccaggaga

SEQ ID NO: 1024973 - DNA, 25 bp, Homo sapien
tgctggcaggcctcggatttctcca

SEQ ID NO: 1024974 - DNA, 25 bp, Homo sapien
gaaatgcactcgagcactggagggc

SEQ ID NO: 1024975 - DNA, 25 bp, Homo sapien
caaacacgggtgtcctcaacatgaa

SEQ ID NO: 1024976 - DNA, 25 bp, Homo sapien
ggctcacgtgcaaaggcaaacacgg

SEQ ID NO: 1024977 - DNA, 25 bp, Homo sapien
attcctgactcggagagcaggacgg

SEQ ID NO: 1024978 - DNA, 25 bp, Homo sapien
agattcctgactcggagagcaggac

SEQ ID NO: 1024979 - DNA, 25 bp, Homo sapien
tcctgactcggagagcaggacggac

SEQ ID NO: 1024980 - DNA, 25 bp, Homo sapien
tcagattcctgactcggagagcagg

SEQ ID NO: 1024981 - DNA, 25 bp, Homo sapien
ccggaatgaaggaggtggcccgtca

SEQ ID NO: 1024982 - DNA, 25 bp, Homo sapien
ttcttgcatggggacagcaccgcag

SEQ ID NO: 1024983 - DNA, 25 bp, Homo sapien
gccactgtgtgtggacttgggaagt

SEQ ID NO: 1024984 - DNA, 25 bp, Homo sapien
gggctggagcgaggcagtttcttgc

SEQ ID NO: 1024985 - DNA, 25 bp, Homo sapien
gccccacagaagcggccttcgtggg

SEQ ID NO: 1024986 - DNA, 25 bp, Homo sapien
tcccgcaggttcagtcttgcaaaga

SEQ ID NO: 1024987 - DNA, 25 bp, Homo sapien
tgcagtcacctcggcagacggcggc

SEQ ID NO: 1024988 - DNA, 25 bp, Homo sapien
agacggcggcctccttagacagaag

SEQ ID NO: 1024989 - DNA, 25 bp, Homo sapien
gaacatcaggtccccgccgttgacg

SEQ ID NO: 1024990 - DNA, 25 bp, Homo sapien
acatcaggtccccgccgttgacgta

SEQ ID NO: 1024991 - DNA, 25 bp, Homo sapien
aacatcaggtccccgccgttgacgt

SEQ ID NO: 1024992 - DNA, 25 bp, Homo sapien
cacatgccgtagtctgtgagcttga

SEQ ID NO: 1024993 - DNA, 25 bp, Homo sapien
ttgatgtgcccgtccgcatccagga

SEQ ID NO: 1024994 - DNA, 25 bp, Homo sapien
gcatccaggaggacgttgtccagct

SEQ ID NO: 1024995 - DNA, 25 bp, Homo sapien
gatccccctctcgtgcaggaagttg

SEQ ID NO: 1024996 - DNA, 25 bp, Homo sapien
taattcggggttccgcagaaagtgc

SEQ ID NO: 1024997 - DNA, 25 bp, Homo sapien
tccgcagaaagtgctcgttgtgtca

SEQ ID NO: 1024998 - DNA, 25 bp, Homo sapien
aagtgctcgttgtgtcaccagggcc

SEQ ID NO: 1024999 - DNA, 25 bp, Homo sapien
tctccccgcaggatttcgggggcga

SEQ ID NO: 1025000 - DNA, 25 bp, Homo sapien
cttggaaaaggtagtcctctgtgtt

SEQ ID NO: 1025001 - DNA, 25 bp, Homo sapien
tgatgatgtcgaacggggagcgccc

SEQ ID NO: 1025002 - DNA, 25 bp, Homo sapien
agcgcccaccagtccacgctgaacc

SEQ ID NO: 1025003 - DNA, 25 bp, Homo sapien
tctgtgttcatgtccgggttgtcgg

SEQ ID NO: 1025004 - DNA, 25 bp, Homo sapien
tacgctttgcatggcactgccgctc

SEQ ID NO: 1025005 - DNA, 25 bp, Homo sapien
caggaggaatggttcccggtacgct

SEQ ID NO: 1025006 - DNA, 25 bp, Homo sapien
gaatggttcccggtacgctttgcat

SEQ ID NO: 1025007 - DNA, 25 bp, Homo sapien
tcccggtacgctttgcatggcactg

SEQ ID NO: 1025008 - DNA, 25 bp, Homo sapien
cagcctcggtcaaggacatgctggg

SEQ ID NO: 1025009 - DNA, 25 bp, Homo sapien
tccaggtgggaaggagcccatgatg

SEQ ID NO: 1025010 - DNA, 25 bp, Homo sapien
gcggagacagccgcgttcccagatc

SEQ ID NO: 1025011 - DNA, 25 bp, Homo sapien
tgtgctttcagctcggtacagcctc

SEQ ID NO: 1025012 - DNA, 25 bp, Homo sapien
gatccggatgggcttctccaggatc

SEQ ID NO: 1025013 - DNA, 25 bp, Homo sapien
tgggaggctttgacggacaggaacc

SEQ ID NO: 1025014 - DNA, 25 bp, Homo sapien
cgggggatccggatgggcttctcca

SEQ ID NO: 1025015 - DNA, 25 bp, Homo sapien
ttaaaacatgggaggctttgacgga

SEQ ID NO: 1025016 - DNA, 25 bp, Homo sapien
cccagtctatgctgcggaagaacgc

SEQ ID NO: 1025017 - DNA, 25 bp, Homo sapien
aacgcgtgggacttgatgtcagaaa

SEQ ID NO: 1025018 - DNA, 25 bp, Homo sapien
ccagtctatgctgcggaagaacgcg

SEQ ID NO: 1025019 - DNA, 25 bp, Homo sapien
aagaacgcgtgggacttgatgtcag

SEQ ID NO: 1025020 - DNA, 25 bp, Homo sapien
cagattataggggttggaggggttg

SEQ ID NO: 1025021 - DNA, 25 bp, Homo sapien
caccagattataggggttggagggg

SEQ ID NO: 1025022 - DNA, 25 bp, Homo sapien
ggtcaggacgcatgtgccgctagct

SEQ ID NO: 1025023 - DNA, 25 bp, Homo sapien
gaggacgaaatgtgtctccccatcc

SEQ ID NO: 1025024 - DNA, 25 bp, Homo sapien
gggccatgtcaaagaccagcccggc

SEQ ID NO: 1025025 - DNA, 25 bp, Homo sapien
cagcacagtcgagggttgccaggaa

SEQ ID NO: 1025026 - DNA, 25 bp, Homo sapien
aagcaaacgcccttctctaggccgg

SEQ ID NO: 1025027 - DNA, 25 bp, Homo sapien
tcaagccgtgaacgctgcgactgct

SEQ ID NO: 1025028 - DNA, 25 bp, Homo sapien
gctgataaaaccggccatgaaacca

SEQ ID NO: 1025029 - DNA, 25 bp, Homo sapien
cgtgaacgctgcgactgctggtcct

SEQ ID NO: 1025030 - DNA, 25 bp, Homo sapien
gtactgacctcatacggccagctgg

SEQ ID NO: 1025031 - DNA, 25 bp, Homo sapien
tagtttctaccgaatgcaccctgct

SEQ ID NO: 1025032 - DNA, 25 bp, Homo sapien
ggaaacaaattccacagacgctcct

SEQ ID NO: 1025033 - DNA, 25 bp, Homo sapien
cagtagctctgcaaccatttacaca

SEQ ID NO: 1025034 - DNA, 25 bp, Homo sapien
ggtgctggtgggccccatacggtgg

SEQ ID NO: 1025035 - DNA, 25 bp, Homo sapien
gtgctggtgggccccatacggtggt

SEQ ID NO: 1025036 - DNA, 25 bp, Homo sapien
gggcagggttggactcacactcaga

SEQ ID NO: 1025037 - DNA, 25 bp, Homo sapien
gccaagggtggcttcatggtctcct

SEQ ID NO: 1025038 - DNA, 25 bp, Homo sapien
tggtctccttgagttccggctcggg

SEQ ID NO: 1025039 - DNA, 25 bp, Homo sapien
cagattagacagtgctccgaagaga

SEQ ID NO: 1025040 - DNA, 25 bp, Homo sapien
cttccgagagacagcccgcggcaag

SEQ ID NO: 1025041 - DNA, 25 bp, Homo sapien
ttccgagagacagcccgcggcaagt

SEQ ID NO: 1025042 - DNA, 25 bp, Homo sapien
cagcccgcggcaagtgtgtgccaga

SEQ ID NO: 1025043 - DNA, 25 bp, Homo sapien
agacagcccgcggcaagtgtgtgcc

SEQ ID NO: 1025044 - DNA, 25 bp, Homo sapien
cagggtgatggaagccgcccctgtg

SEQ ID NO: 1025045 - DNA, 25 bp, Homo sapien
tgatggaagccgcccctgtgggcag

SEQ ID NO: 1025046 - DNA, 25 bp, Homo sapien
ggtgggaagccagggccgctgacta

SEQ ID NO: 1025047 - DNA, 25 bp, Homo sapien
ggtgatggaagccgcccctgtgggc

SEQ ID NO: 1025048 - DNA, 25 bp, Homo sapien
gccaaaccggaggactcaggattag

SEQ ID NO: 1025049 - DNA, 25 bp, Homo sapien
ccggaggactcaggattaggagcct

SEQ ID NO: 1025050 - DNA, 25 bp, Homo sapien
acagccaaaccggaggactcaggat

SEQ ID NO: 1025051 - DNA, 25 bp, Homo sapien
caaaccggaggactcaggattagga

SEQ ID NO: 1025052 - DNA, 25 bp, Homo sapien
gctgggaccatgctgggaaatccat

SEQ ID NO: 1025053 - DNA, 25 bp, Homo sapien
caccacctttcacatcagtggggag

SEQ ID NO: 1025054 - DNA, 25 bp, Homo sapien
ccacctttcacatcagtggggagct

SEQ ID NO: 1025055 - DNA, 25 bp, Homo sapien
gggagctgggaccatgctgggaaat

SEQ ID NO: 1025056 - DNA, 25 bp, Homo sapien
ggaaagtcctgaggctcccaccaca

SEQ ID NO: 1025057 - DNA, 25 bp, Homo sapien
gggaaagtcctgaggctcccaccac

SEQ ID NO: 1025058 - DNA, 25 bp, Homo sapien
ctgtcgcacgtgggaaagtcctgag

SEQ ID NO: 1025059 - DNA, 25 bp, Homo sapien
tgtccacgtcgtccgggcgtctgtg

SEQ ID NO: 1025060 - DNA, 25 bp, Homo sapien
tccacatcgtctgggtgtccacgtc

SEQ ID NO: 1025061 - DNA, 25 bp, Homo sapien
gcatccacatcgtctgtgcgtccat

SEQ ID NO: 1025062 - DNA, 25 bp, Homo sapien
cgtccatgtcgtctgtgcgtccaca

SEQ ID NO: 1025063 - DNA, 25 bp, Homo sapien
tgagtcgtccgtgcatccatgtcat

SEQ ID NO: 1025064 - DNA, 25 bp, Homo sapien
agtcatctgtggatctgagtcgtcc

SEQ ID NO: 1025065 - DNA, 25 bp, Homo sapien
cccagtcatctgtgcgtttgagtca

SEQ ID NO: 1025066 - DNA, 25 bp, Homo sapien
gggatctgagtcatccgtgcgtcca

SEQ ID NO: 1025067 - DNA, 25 bp, Homo sapien
acagggggcccgttccgtgtcaatg

SEQ ID NO: 1025068 - DNA, 25 bp, Homo sapien
cccgttccgtgtcaatggggctggg

SEQ ID NO: 1025069 - DNA, 25 bp, Homo sapien
tgagatacaacagggggcccgttcc

SEQ ID NO: 1025070 - DNA, 25 bp, Homo sapien
ctgagatacaacagggggcccgttc

SEQ ID NO: 1025071 - DNA, 25 bp, Homo sapien
tgcgcccaacccatggacgtcctgg

SEQ ID NO: 1025072 - DNA, 25 bp, Homo sapien
tgcgtttgaatgcacgctggcccca

SEQ ID NO: 1025073 - DNA, 25 bp, Homo sapien
caggtcggacgctgtggcagtaaca

SEQ ID NO: 1025074 - DNA, 25 bp, Homo sapien
tggcctctcagagcagtgcgtttga

SEQ ID NO: 1025075 - DNA, 25 bp, Homo sapien
caaaagccttcagtgcccatctctg

SEQ ID NO: 1025076 - DNA, 25 bp, Homo sapien
acgtgggctccaggtcgggacccat

SEQ ID NO: 1025077 - DNA, 25 bp, Homo sapien
cctcttgctcaaaagccttcagtgc

SEQ ID NO: 1025078 - DNA, 25 bp, Homo sapien
catctctgcagctggcacgtgggct

SEQ ID NO: 1025079 - DNA, 25 bp, Homo sapien
cattcactcactccctcgctctcta

SEQ ID NO: 1025080 - DNA, 25 bp, Homo sapien
cggccctctttagcccactcattca

SEQ ID NO: 1025081 - DNA, 25 bp, Homo sapien
actctctaacccactctctctcatt

SEQ ID NO: 1025082 - DNA, 25 bp, Homo sapien
tcattcccttgctcgttctctagcc

SEQ ID NO: 1025083 - DNA, 25 bp, Homo sapien
gcaacagtgtagagaggtggaacct

SEQ ID NO: 1025084 - DNA, 25 bp, Homo sapien
ggaatgcagtgtttgggcgccatct

SEQ ID NO: 1025085 - DNA, 25 bp, Homo sapien
ggtgccacaacacatacgggtgagg

SEQ ID NO: 1025086 - DNA, 25 bp, Homo sapien
agaaattacccaggctcgctcaggt

SEQ ID NO: 1025087 - DNA, 25 bp, Homo sapien
caatctgcctagtatttgactgcca

SEQ ID NO: 1025088 - DNA, 25 bp, Homo sapien
gggcatcatccctaccagattgagt

SEQ ID NO: 1025089 - DNA, 25 bp, Homo sapien
gattgagtgttttgcacgcacttca

SEQ ID NO: 1025090 - DNA, 25 bp, Homo sapien
cacaaaatgaaacagtgagaaagtc

SEQ ID NO: 1025091 - DNA, 25 bp, Homo sapien
aatggagggagcgcctgcttcttct

SEQ ID NO: 1025092 - DNA, 25 bp, Homo sapien
agctgcacgggctcgctggtgaact

SEQ ID NO: 1025093 - DNA, 25 bp, Homo sapien
tccagaccgtagtcgtctgtgatct

SEQ ID NO: 1025094 - DNA, 25 bp, Homo sapien
ggtgaactgtgtgtcaaagttgtcc

SEQ ID NO: 1025095 - DNA, 25 bp, Homo sapien
aagccttcgaactctgactggtcga

SEQ ID NO: 1025096 - DNA, 25 bp, Homo sapien
cgactcctcggtggacagcaataat

SEQ ID NO: 1025097 - DNA, 25 bp, Homo sapien
cctcggtggacagcaataatgggtt

SEQ ID NO: 1025098 - DNA, 25 bp, Homo sapien
gactggtcgatcctctttatggcat

SEQ ID NO: 1025099 - DNA, 25 bp, Homo sapien
gatacagttaaagggtcaatcacgc

SEQ ID NO: 1025100 - DNA, 25 bp, Homo sapien
ctggcatgcatatgcggtggttaag

SEQ ID NO: 1025101 - DNA, 25 bp, Homo sapien
gtgtccacgacagagacgcacgcgg

SEQ ID NO: 1025102 - DNA, 25 bp, Homo sapien
catatgcggtggttaaggatacagt

SEQ ID NO: 1025103 - DNA, 25 bp, Homo sapien
tggccgccctcggagccgtgcccag

SEQ ID NO: 1025104 - DNA, 25 bp, Homo sapien
gtctcggcgcaagcgtctgtccctg

SEQ ID NO: 1025105 - DNA, 25 bp, Homo sapien
ttccctctgcggtctcggcgcaagc

SEQ ID NO: 1025106 - DNA, 25 bp, Homo sapien
cagcagcgcccgctgacgcttccct

SEQ ID NO: 1025107 - DNA, 25 bp, Homo sapien
ttcctggcggagcaggtcagtgcat

SEQ ID NO: 1025108 - DNA, 25 bp, Homo sapien
gacgcaggcacagcagcaagttcct

SEQ ID NO: 1025109 - DNA, 25 bp, Homo sapien
tgcatcgagttctgtttccgtggaa

SEQ ID NO: 1025110 - DNA, 25 bp, Homo sapien
tgtgcaccttggaaaccgcatgaca

SEQ ID NO: 1025111 - DNA, 25 bp, Homo sapien
ctacgtgtgggttgcgtctgagatg

SEQ ID NO: 1025112 - DNA, 25 bp, Homo sapien
cactcacggaaaaaaggcatcagag

SEQ ID NO: 1025113 - DNA, 25 bp, Homo sapien
aggcgccactcacggaaaaaaggca

SEQ ID NO: 1025114 - DNA, 25 bp, Homo sapien
tgagatgtggggcaggcgccactca

SEQ ID NO: 1025115 - DNA, 25 bp, Homo sapien
ctgtgtcccgctggctcctaagctg

SEQ ID NO: 1025116 - DNA, 25 bp, Homo sapien
tgtgtccccacaggtacttcaactc

SEQ ID NO: 1025117 - DNA, 25 bp, Homo sapien
ggaaacaattcttgattgcggtgtg

SEQ ID NO: 1025118 - DNA, 25 bp, Homo sapien
tcttgattgcggtgtgtccccacag

SEQ ID NO: 1025119 - DNA, 25 bp, Homo sapien
ctgcaggaagaacaacaggaactta

SEQ ID NO: 1025120 - DNA, 25 bp, Homo sapien
tgcaggaagaacaacaggaacttac

SEQ ID NO: 1025121 - DNA, 25 bp, Homo sapien
tagaccacagcggctgggacacact

SEQ ID NO: 1025122 - DNA, 25 bp, Homo sapien
ctagaccacagcggctgggacacac

SEQ ID NO: 1025123 - DNA, 25 bp, Homo sapien
tgtgaatccaccatgtcgtgctgag

SEQ ID NO: 1025124 - DNA, 25 bp, Homo sapien
cgtcgtgaccggagccattagcaaa

SEQ ID NO: 1025125 - DNA, 25 bp, Homo sapien
tgagtgtcatccacaggagagccgg

SEQ ID NO: 1025126 - DNA, 25 bp, Homo sapien
caagagggctgcgtggcaatttcca

SEQ ID NO: 1025127 - DNA, 25 bp, Homo sapien
aaagcagcgtcttcagggagcttcc

SEQ ID NO: 1025128 - DNA, 25 bp, Homo sapien
agagccgggctttgcgggctcagct

SEQ ID NO: 1025129 - DNA, 25 bp, Homo sapien
aggttctggagagccgggctttgcg

SEQ ID NO: 1025130 - DNA, 25 bp, Homo sapien
tgagtggagcacagaaagcagcgtc

SEQ ID NO: 1025131 - DNA, 25 bp, Homo sapien
gtcaccacacccagcgacttttagt

SEQ ID NO: 1025132 - DNA, 25 bp, Homo sapien
ccagcctctggtggcgttctttttg

SEQ ID NO: 1025133 - DNA, 25 bp, Homo sapien
ttgtacagatggaggggtcttgcca

SEQ ID NO: 1025134 - DNA, 25 bp, Homo sapien
agccccagcctctggtggcgttctt

SEQ ID NO: 1025135 - DNA, 25 bp, Homo sapien
ggcccagtgcttggccgaaagcaca

SEQ ID NO: 1025136 - DNA, 25 bp, Homo sapien
ccggaggtccagacggtgctctctg

SEQ ID NO: 1025137 - DNA, 25 bp, Homo sapien
gaaagcacagaagacgtgacgtggt

SEQ ID NO: 1025138 - DNA, 25 bp, Homo sapien
tctctgcggccagcatgccgcggag

SEQ ID NO: 1025139 - DNA, 25 bp, Homo sapien
tggtctgccgggtgcatgagcccct

SEQ ID NO: 1025140 - DNA, 25 bp, Homo sapien
ggtctgccgggtgcatgagcccctg

SEQ ID NO: 1025141 - DNA, 25 bp, Homo sapien
gtggtctgccgggtgcatgagcccc

SEQ ID NO: 1025142 - DNA, 25 bp, Homo sapien
caggcgccagaatcccatagagagg

SEQ ID NO: 1025143 - DNA, 25 bp, Homo sapien
caattctctgacgtgagctgcacat

SEQ ID NO: 1025144 - DNA, 25 bp, Homo sapien
tgacggcgtccttctccgtggtgag

SEQ ID NO: 1025145 - DNA, 25 bp, Homo sapien
gatgagcgcgttctcaagctgagca

SEQ ID NO: 1025146 - DNA, 25 bp, Homo sapien
gatagaaggtggctgcgctcagaca

SEQ ID NO: 1025147 - DNA, 25 bp, Homo sapien
ctgcaggactcggatgggttttctc

SEQ ID NO: 1025148 - DNA, 25 bp, Homo sapien
tagaaggtggctgcgctcagacacc

SEQ ID NO: 1025149 - DNA, 25 bp, Homo sapien
cagggcgctgacctgcaggactcgg

SEQ ID NO: 1025150 - DNA, 25 bp, Homo sapien
taggcccaagtctaggctgaagccg

SEQ ID NO: 1025151 - DNA, 25 bp, Homo sapien
gcagatcaggccaggacaaagctct

SEQ ID NO: 1025152 - DNA, 25 bp, Homo sapien
gatgacctcggttcagatcttagca

SEQ ID NO: 1025153 - DNA, 25 bp, Homo sapien
tactgagcagaagcgtcacggacag

SEQ ID NO: 1025154 - DNA, 25 bp, Homo sapien
gctggatttgacaaactatgtagaa

SEQ ID NO: 1025155 - DNA, 25 bp, Homo sapien
cagaggaccgtcaaatgctggattt

SEQ ID NO: 1025156 - DNA, 25 bp, Homo sapien
ggtgttctccgggtcacccagagga

SEQ ID NO: 1025157 - DNA, 25 bp, Homo sapien
ccatttctcacagccttggtgttct

SEQ ID NO: 1025158 - DNA, 25 bp, Homo sapien
cacttgatcgtaagggagagccggt

SEQ ID NO: 1025159 - DNA, 25 bp, Homo sapien
ccttggtgtgtctggaatgcttcaa

SEQ ID NO: 1025160 - DNA, 25 bp, Homo sapien
cgtcaatgaagtcaggtccaggcct

SEQ ID NO: 1025161 - DNA, 25 bp, Homo sapien
gggacaagccccatatctttgggaa

SEQ ID NO: 1025162 - DNA, 25 bp, Homo sapien
tgtctggcgacctctgggcccttgg

SEQ ID NO: 1025163 - DNA, 25 bp, Homo sapien
taatgggcggcaggtttcagagctt

SEQ ID NO: 1025164 - DNA, 25 bp, Homo sapien
gataacccaaactgcccagtgcctg

SEQ ID NO: 1025165 - DNA, 25 bp, Homo sapien
acaccttcccgagagtgcgtcatgg

SEQ ID NO: 1025166 - DNA, 25 bp, Homo sapien
ggtggagcagcagccgtctgtggag

SEQ ID NO: 1025167 - DNA, 25 bp, Homo sapien
cagcgcccggcacctgatccctgca

SEQ ID NO: 1025168 - DNA, 25 bp, Homo sapien
gcacctggaatcccccgccaggtcc

SEQ ID NO: 1025169 - DNA, 25 bp, Homo sapien
cgggccgttcctaccggctgcttca

SEQ ID NO: 1025170 - DNA, 25 bp, Homo sapien
cactgggcccatcttagcgatgaag

SEQ ID NO: 1025171 - DNA, 25 bp, Homo sapien
tactgcgcacggtgagcccggagct

SEQ ID NO: 1025172 - DNA, 25 bp, Homo sapien
tggatcacgaggtgccttcactgcc

SEQ ID NO: 1025173 - DNA, 25 bp, Homo sapien
ctgggcaaggcccaacaactctgtg

SEQ ID NO: 1025174 - DNA, 25 bp, Homo sapien
tactggtggacatgagtcttcggag

SEQ ID NO: 1025175 - DNA, 25 bp, Homo sapien
acactgcattcagggccaaccctaa

SEQ ID NO: 1025176 - DNA, 25 bp, Homo sapien
ttgcttccgagcgaggccactttct

SEQ ID NO: 1025177 - DNA, 25 bp, Homo sapien
tatatcggcacagaccttgcttccg

SEQ ID NO: 1025178 - DNA, 25 bp, Homo sapien
agccaccgcgcccagactttttgtt

SEQ ID NO: 1025179 - DNA, 25 bp, Homo sapien
tggagttttgctctgtcacccaggc

SEQ ID NO: 1025180 - DNA, 25 bp, Homo sapien
ttttttgagttggagttttgctctg

SEQ ID NO: 1025181 - DNA, 25 bp, Homo sapien
cctccttcacgctttgtttcttaag

SEQ ID NO: 1025182 - DNA, 25 bp, Homo sapien
cagggtctcccggatggcagattcc

SEQ ID NO: 1025183 - DNA, 25 bp, Homo sapien
cccggatggcagattcctgtagcct

SEQ ID NO: 1025184 - DNA, 25 bp, Homo sapien
ccgtatggcccgttagagacagggt

SEQ ID NO: 1025185 - DNA, 25 bp, Homo sapien
gccgtggcctggggctcgtgggcca

SEQ ID NO: 1025186 - DNA, 25 bp, Homo sapien
ctcctcctggacagagtgcaggtca

SEQ ID NO: 1025187 - DNA, 25 bp, Homo sapien
tggacttcgacaggaaacagtgccc

SEQ ID NO: 1025188 - DNA, 25 bp, Homo sapien
tgtggacttcgacaggaaacagtgc

SEQ ID NO: 1025189 - DNA, 25 bp, Homo sapien
aatgtggacttcgacaggaaacagt

SEQ ID NO: 1025190 - DNA, 25 bp, Homo sapien
aaatgtggacttcgacaggaaacag

SEQ ID NO: 1025191 - DNA, 25 bp, Homo sapien
tgagtaatgtttaacttggaagggc

SEQ ID NO: 1025192 - DNA, 25 bp, Homo sapien
tcttgtcgccatgagtaatgtttaa

SEQ ID NO: 1025193 - DNA, 25 bp, Homo sapien
ctcccagcaccttccgcacgcgggt

SEQ ID NO: 1025194 - DNA, 25 bp, Homo sapien
gggctcttgtcgccatgagtaatgt

SEQ ID NO: 1025195 - DNA, 25 bp, Homo sapien
taaacaggcacattcgtgactccaa

SEQ ID NO: 1025196 - DNA, 25 bp, Homo sapien
cgtgactccaaagggcgaggcaaga

SEQ ID NO: 1025197 - DNA, 25 bp, Homo sapien
catgggggttacataaacaggcaca

SEQ ID NO: 1025198 - DNA, 25 bp, Homo sapien
ctggccgagcatgggggttacataa

SEQ ID NO: 1025199 - DNA, 25 bp, Homo sapien
ctggcacagagctggagtgactggc

SEQ ID NO: 1025200 - DNA, 25 bp, Homo sapien
ggggagggctctcgcctggcccggc

SEQ ID NO: 1025201 - DNA, 25 bp, Homo sapien
gaggggagggctctcgcctggcccg

SEQ ID NO: 1025202 - DNA, 25 bp, Homo sapien
ccagtcccacccctagcctggcaca

SEQ ID NO: 1025203 - DNA, 25 bp, Homo sapien
gctgcagcagggatgtgcgtccact

SEQ ID NO: 1025204 - DNA, 25 bp, Homo sapien
ggatgtgcgtccactgaagcgcctc

SEQ ID NO: 1025205 - DNA, 25 bp, Homo sapien
tgtgctccctggatggaacctggct

SEQ ID NO: 1025206 - DNA, 25 bp, Homo sapien
acagaggccccgtgagcgtttcagt

SEQ ID NO: 1025207 - DNA, 25 bp, Homo sapien
ctgagccttccggtctccatggcga

SEQ ID NO: 1025208 - DNA, 25 bp, Homo sapien
gcggcaatgacgtcatctctccctt

SEQ ID NO: 1025209 - DNA, 25 bp, Homo sapien
catggcgacgcctccaaacagcaga

SEQ ID NO: 1025210 - DNA, 25 bp, Homo sapien
aaacagcagattccaggcggcaatg

SEQ ID NO: 1025211 - DNA, 25 bp, Homo sapien
agctgtcgggcaggctgcaacctga

SEQ ID NO: 1025212 - DNA, 25 bp, Homo sapien
tccattcggccctgctgagcttgag

SEQ ID NO: 1025213 - DNA, 25 bp, Homo sapien
tgaggcttctgactgcagccctgca

SEQ ID NO: 1025214 - DNA, 25 bp, Homo sapien
aggaggtacacattctccattcggc

SEQ ID NO: 1025215 - DNA, 25 bp, Homo sapien
ggccagtcgcccacgcgggccacca

SEQ ID NO: 1025216 - DNA, 25 bp, Homo sapien
ccaggccagtcgcccacgcgggcca

SEQ ID NO: 1025217 - DNA, 25 bp, Homo sapien
aggccagtcgcccacgcgggccacc

SEQ ID NO: 1025218 - DNA, 25 bp, Homo sapien
gcccaggccagtcgcccacgcgggc

SEQ ID NO: 1025219 - DNA, 25 bp, Homo sapien
ggtgtctcccgcctgctggccttcc

SEQ ID NO: 1025220 - DNA, 25 bp, Homo sapien
ggggtgtctcccgcctgctggcctt

SEQ ID NO: 1025221 - DNA, 25 bp, Homo sapien
tggggggtgtctcccgcctgctggc

SEQ ID NO: 1025222 - DNA, 25 bp, Homo sapien
tgtctcccgcctgctggccttccac

SEQ ID NO: 1025223 - DNA, 25 bp, Homo sapien
agcagccacgcctagagggagccac

SEQ ID NO: 1025224 - DNA, 25 bp, Homo sapien
aagggtcagagcagccacgcctaga

SEQ ID NO: 1025225 - DNA, 25 bp, Homo sapien
accaagggtcagagcagccacgcct

SEQ ID NO: 1025226 - DNA, 25 bp, Homo sapien
tcagagcagccacgcctagagggag

SEQ ID NO: 1025227 - DNA, 25 bp, Homo sapien
ctccttgtcctcacactccacactg

SEQ ID NO: 1025228 - DNA, 25 bp, Homo sapien
tctccttgtcctcacactccacact

SEQ ID NO: 1025229 - DNA, 25 bp, Homo sapien
ttcccattcactccgttggccccca

SEQ ID NO: 1025230 - DNA, 25 bp, Homo sapien
attcactccgttggcccccacaatt

SEQ ID NO: 1025231 - DNA, 25 bp, Homo sapien
tcaagccttggcagggcggggagcg

SEQ ID NO: 1025232 - DNA, 25 bp, Homo sapien
gttggacagtcggccgggtggtctc

SEQ ID NO: 1025233 - DNA, 25 bp, Homo sapien
cgaagttggacagtcggccgggtgg

SEQ ID NO: 1025234 - DNA, 25 bp, Homo sapien
ccgaagttggacagtcggccgggtg

SEQ ID NO: 1025235 - DNA, 25 bp, Homo sapien
ccgtggagcgctgagacgtctttcg

SEQ ID NO: 1025236 - DNA, 25 bp, Homo sapien
ccggggccgtggagcgctgagacgt

SEQ ID NO: 1025237 - DNA, 25 bp, Homo sapien
ctgagacgtctttcggggtcggatc

SEQ ID NO: 1025238 - DNA, 25 bp, Homo sapien
ggtcggatcggccggccctccacgc

SEQ ID NO: 1025239 - DNA, 25 bp, Homo sapien
cgcggcctcgcccgggggcgcgaag

SEQ ID NO: 1025240 - DNA, 25 bp, Homo sapien
ggccgatcacggccgcggcctcgcc

SEQ ID NO: 1025241 - DNA, 25 bp, Homo sapien
gccgcggcctcgcccgggggcgcga

SEQ ID NO: 1025242 - DNA, 25 bp, Homo sapien
atcacggccgcggcctcgcccgggg

SEQ ID NO: 1025243 - DNA, 25 bp, Homo sapien
cgctcccgctcccgcgcgcccgggc

SEQ ID NO: 1025244 - DNA, 25 bp, Homo sapien
ggtgcgctccggctcccccggccgc

SEQ ID NO: 1025245 - DNA, 25 bp, Homo sapien
cccggccgctcccgctcccgcgcgc

SEQ ID NO: 1025246 - DNA, 25 bp, Homo sapien
gtgcgctccggctcccccggccgct

SEQ ID NO: 1025247 - DNA, 25 bp, Homo sapien
ctcatggagctcaggtggaactgct

SEQ ID NO: 1025248 - DNA, 25 bp, Homo sapien
ccgggtgcggctggaaacagccgcg

SEQ ID NO: 1025249 - DNA, 25 bp, Homo sapien
tggaaacagccgcggccgcctgccg

SEQ ID NO: 1025250 - DNA, 25 bp, Homo sapien
ctgcagccccgggtgcggctggaaa

SEQ ID NO: 1025251 - DNA, 25 bp, Homo sapien
ctccttggcgctctccttcttgtag

SEQ ID NO: 1025252 - DNA, 25 bp, Homo sapien
ccttggcgctctccttcttgtaggc

SEQ ID NO: 1025253 - DNA, 25 bp, Homo sapien
ctcctgcgcccagcgcgccgagaaa

SEQ ID NO: 1025254 - DNA, 25 bp, Homo sapien
gcccagcgcgccgagaaagcggccg

SEQ ID NO: 1025255 - DNA, 25 bp, Homo sapien
ggtgcagcacgggcggcggctcggt

SEQ ID NO: 1025256 - DNA, 25 bp, Homo sapien
ggcaggtgcagcacgggcggcggct

SEQ ID NO: 1025257 - DNA, 25 bp, Homo sapien
tgcagcacgggcggcggctcggtgg

SEQ ID NO: 1025258 - DNA, 25 bp, Homo sapien
ggcgggcaggtgcagcacgggcggc

SEQ ID NO: 1025259 - DNA, 25 bp, Homo sapien
cagtagatgtggagctcgtcgcaca

SEQ ID NO: 1025260 - DNA, 25 bp, Homo sapien
gagaagtcgcgcagcaccgagttga

SEQ ID NO: 1025261 - DNA, 25 bp, Homo sapien
atctgcggcagacacaggcgcttct

SEQ ID NO: 1025262 - DNA, 25 bp, Homo sapien
cacaccgcgttgatctgctgcagcg

SEQ ID NO: 1025263 - DNA, 25 bp, Homo sapien
cacgagggcgccgagaagggcagga

SEQ ID NO: 1025264 - DNA, 25 bp, Homo sapien
cgctcggcgtccgtcttggtgatga

SEQ ID NO: 1025265 - DNA, 25 bp, Homo sapien
tagagcagcgcgttgcacaggcgct

SEQ ID NO: 1025266 - DNA, 25 bp, Homo sapien
ctcgtggtacacgcggacgctgcgc

SEQ ID NO: 1025267 - DNA, 25 bp, Homo sapien
ccacgaacttgtgcggcgggtacat

SEQ ID NO: 1025268 - DNA, 25 bp, Homo sapien
ccagtggcaggtccggttctccagg

SEQ ID NO: 1025269 - DNA, 25 bp, Homo sapien
agttggccgagtcgaagccccagtg

SEQ ID NO: 1025270 - DNA, 25 bp, Homo sapien
tccagggccttgtgcgagtgcacca

SEQ ID NO: 1025271 - DNA, 25 bp, Homo sapien
cttgttgccatagtcgaatttctcc

SEQ ID NO: 1025272 - DNA, 25 bp, Homo sapien
ccgccgcttgtacttgttgccatag

SEQ ID NO: 1025273 - DNA, 25 bp, Homo sapien
gaatttctccttcacgtcgtccagg

SEQ ID NO: 1025274 - DNA, 25 bp, Homo sapien
tccttgcccgtgtaatcctggctca

SEQ ID NO: 1025275 - DNA, 25 bp, Homo sapien
tggccctgccagtcggaacactctg

SEQ ID NO: 1025276 - DNA, 25 bp, Homo sapien
tgccagtcggaacactctgaatttc

SEQ ID NO: 1025277 - DNA, 25 bp, Homo sapien
gccagtcggaacactctgaatttcc

SEQ ID NO: 1025278 - DNA, 25 bp, Homo sapien
ccctgccagtcggaacactctgaat

SEQ ID NO: 1025279 - DNA, 25 bp, Homo sapien
gctgggtgccttcggggcgaggaca

SEQ ID NO: 1025280 - DNA, 25 bp, Homo sapien
ttcggggcgaggacagccaccttca

SEQ ID NO: 1025281 - DNA, 25 bp, Homo sapien
tggcccagctggacctaacttccct

SEQ ID NO: 1025282 - DNA, 25 bp, Homo sapien
cgtggcccagctggacctaacttcc

SEQ ID NO: 1025283 - DNA, 25 bp, Homo sapien
ggacaaggggccgcgtcccaggcag

SEQ ID NO: 1025284 - DNA, 25 bp, Homo sapien
tgcgggacaaggggccgcgtcccag

SEQ ID NO: 1025285 - DNA, 25 bp, Homo sapien
acaaggggccgcgtcccaggcagca

SEQ ID NO: 1025286 - DNA, 25 bp, Homo sapien
gacaaggggccgcgtcccaggcagc

SEQ ID NO: 1025287 - DNA, 25 bp, Homo sapien
aggatcctgccacggcccaagggaa

SEQ ID NO: 1025288 - DNA, 25 bp, Homo sapien
gcacggaaagcgcttggctgacgtt

SEQ ID NO: 1025289 - DNA, 25 bp, Homo sapien
gggaagcacggcaccaccctgttat

SEQ ID NO: 1025290 - DNA, 25 bp, Homo sapien
caccctgttatcagcctgcacggaa

SEQ ID NO: 1025291 - DNA, 25 bp, Homo sapien
ctgagctgcgtttctctgaaacaag

SEQ ID NO: 1025292 - DNA, 25 bp, Homo sapien
gttccagcagaagccgcagttggtc

SEQ ID NO: 1025293 - DNA, 25 bp, Homo sapien
ttctttctaagtcagccgccgacgt

SEQ ID NO: 1025294 - DNA, 25 bp, Homo sapien
ctagaacaggagctgtttctttcta

SEQ ID NO: 1025295 - DNA, 25 bp, Homo sapien
ggacgtgtacaccttcagcaccaca

SEQ ID NO: 1025296 - DNA, 25 bp, Homo sapien
tgcacacagctctcactcggtgagt

SEQ ID NO: 1025297 - DNA, 25 bp, Homo sapien
caggtggcctcagtggacgtgtaca

SEQ ID NO: 1025298 - DNA, 25 bp, Homo sapien
ccgctgacagcggaggttctgcaca

SEQ ID NO: 1025299 - DNA, 25 bp, Homo sapien
aggcaccggtgcacaagagcagaca

SEQ ID NO: 1025300 - DNA, 25 bp, Homo sapien
gtgcacaagagcagacacgacgcga

SEQ ID NO: 1025301 - DNA, 25 bp, Homo sapien
acagcctctccgtgaggcaccggtg

SEQ ID NO: 1025302 - DNA, 25 bp, Homo sapien
agagcagacacgacgcgaccaaggc

SEQ ID NO: 1025303 - DNA, 25 bp, Homo sapien
gatcctggcccacccggataaagtc

SEQ ID NO: 1025304 - DNA, 25 bp, Homo sapien
cctggcccacccggataaagtccat

SEQ ID NO: 1025305 - DNA, 25 bp, Homo sapien
cagggatcctggcccacccggataa

SEQ ID NO: 1025306 - DNA, 25 bp, Homo sapien
tcctggcccacccggataaagtcca

SEQ ID NO: 1025307 - DNA, 25 bp, Homo sapien
acagaaggtcaacttgggcatcaaa

SEQ ID NO: 1025308 - DNA, 25 bp, Homo sapien
gactagaacggacagtaagtgactc

SEQ ID NO: 1025309 - DNA, 25 bp, Homo sapien
gactctttccgaacacggtccgcag

SEQ ID NO: 1025310 - DNA, 25 bp, Homo sapien
tcaaaactgtgactagaacggacag

SEQ ID NO: 1025311 - DNA, 25 bp, Homo sapien
cccacacagaggcagtaaccgttac

SEQ ID NO: 1025312 - DNA, 25 bp, Homo sapien
gtaaccgttacacaggcgagggctc

SEQ ID NO: 1025313 - DNA, 25 bp, Homo sapien
gagcaggtctcccactgcccggcgc

SEQ ID NO: 1025314 - DNA, 25 bp, Homo sapien
gggatgagcctcgatggccccacac

SEQ ID NO: 1025315 - DNA, 25 bp, Homo sapien
tggccaacaacaaccagactcgaga

SEQ ID NO: 1025316 - DNA, 25 bp, Homo sapien
gaaaatggtcgacattcacgaggaa

SEQ ID NO: 1025317 - DNA, 25 bp, Homo sapien
ctccagagacgaggccagataagcc

SEQ ID NO: 1025318 - DNA, 25 bp, Homo sapien
agataagccggttcagccacgctgt

SEQ ID NO: 1025319 - DNA, 25 bp, Homo sapien
gtgccacggcgcgtctgggcacagc

SEQ ID NO: 1025320 - DNA, 25 bp, Homo sapien
ctggcaaagaccagcatcactccca

SEQ ID NO: 1025321 - DNA, 25 bp, Homo sapien
atcactcccacgtgccacggcgcgt

SEQ ID NO: 1025322 - DNA, 25 bp, Homo sapien
tcctcagatctctcaccggggggtg

SEQ ID NO: 1025323 - DNA, 25 bp, Homo sapien
tcacctttcacggagcagctaaaaa

SEQ ID NO: 1025324 - DNA, 25 bp, Homo sapien
aaactggagattccaaccctccaca

SEQ ID NO: 1025325 - DNA, 25 bp, Homo sapien
tgaatggacccgttctttacaagac

SEQ ID NO: 1025326 - DNA, 25 bp, Homo sapien
attctcaatcgagccaggccacagc

SEQ ID NO: 1025327 - DNA, 25 bp, Homo sapien
ttctctcgagtgtggaaataaagac

SEQ ID NO: 1025328 - DNA, 25 bp, Homo sapien
gaaataaagaccctcagtcagcagc

SEQ ID NO: 1025329 - DNA, 25 bp, Homo sapien
ctgctccgcgggcactgactgctgg

SEQ ID NO: 1025330 - DNA, 25 bp, Homo sapien
tcagacggacgaaagccttccacag

SEQ ID NO: 1025331 - DNA, 25 bp, Homo sapien
ggacagctgtgaggacgctggccgg

SEQ ID NO: 1025332 - DNA, 25 bp, Homo sapien
gggaccatgggacggctcttccaga

SEQ ID NO: 1025333 - DNA, 25 bp, Homo sapien
cactcttccacggatgcgctgggac

SEQ ID NO: 1025334 - DNA, 25 bp, Homo sapien
tggccgggtactccagagggccaca

SEQ ID NO: 1025335 - DNA, 25 bp, Homo sapien
ggaacataaggctgcgtgtcctgtt

SEQ ID NO: 1025336 - DNA, 25 bp, Homo sapien
catgtggctcatttagtaagtgcac

SEQ ID NO: 1025337 - DNA, 25 bp, Homo sapien
tagtaagtgcacacgcgctgggaag

SEQ ID NO: 1025338 - DNA, 25 bp, Homo sapien
gtgcacacgcgctgggaagatgtcc

SEQ ID NO: 1025339 - DNA, 25 bp, Homo sapien
ttcagcttttggtatgccatggact

SEQ ID NO: 1025340 - DNA, 25 bp, Homo sapien
gcttttggtatgccatggactcctt

SEQ ID NO: 1025341 - DNA, 25 bp, Homo sapien
gcagcaagaatggggagcgtccctg

SEQ ID NO: 1025342 - DNA, 25 bp, Homo sapien
cagcttttggtatgccatggactcc

SEQ ID NO: 1025343 - DNA, 25 bp, Homo sapien
tagtctatatagctaaaaatcttcc

SEQ ID NO: 1025344 - DNA, 25 bp, Homo sapien
caaaaaacactctgggtccgagtag

SEQ ID NO: 1025345 - DNA, 25 bp, Homo sapien
atacctacgcaaatacctttcagaa

SEQ ID NO: 1025346 - DNA, 25 bp, Homo sapien
tgtgtaacacaaaccagtaactctc

SEQ ID NO: 1025347 - DNA, 25 bp, Homo sapien
attcagcgatgtttttaaacctgct

SEQ ID NO: 1025348 - DNA, 25 bp, Homo sapien
cagcgatgtttttaaacctgctgcc

SEQ ID NO: 1025349 - DNA, 25 bp, Homo sapien
aacctgctgccacggagcgtgattt

SEQ ID NO: 1025350 - DNA, 25 bp, Homo sapien
taaacctgctgccacggagcgtgat

SEQ ID NO: 1025351 - DNA, 25 bp, Homo sapien
tgttcataatcaattcccgctgaaa

SEQ ID NO: 1025352 - DNA, 25 bp, Homo sapien
ttgttcataatcaattcccgctgaa

SEQ ID NO: 1025353 - DNA, 25 bp, Homo sapien
gtgctggctcgatgcagttgctcgc

SEQ ID NO: 1025354 - DNA, 25 bp, Homo sapien
gttcagtgctggctcgatgcagttg

SEQ ID NO: 1025355 - DNA, 25 bp, Homo sapien
cagtgctggctcgatgcagttgctc

SEQ ID NO: 1025356 - DNA, 25 bp, Homo sapien
tcagtgctggctcgatgcagttgct

SEQ ID NO: 1025357 - DNA, 25 bp, Homo sapien
gatgttattaagagcgatatggaca

SEQ ID NO: 1025358 - DNA, 25 bp, Homo sapien
agatgttattaagagcgatatggac

SEQ ID NO: 1025359 - DNA, 25 bp, Homo sapien
cagatgttattaagagcgatatgga

SEQ ID NO: 1025360 - DNA, 25 bp, Homo sapien
cagacccaagggacctgggtagatt

SEQ ID NO: 1025361 - DNA, 25 bp, Homo sapien
caggacagtgaaggtaaggcccagc

SEQ ID NO: 1025362 - DNA, 25 bp, Homo sapien
cagagaccagtgggagcagcacttt

SEQ ID NO: 1025363 - DNA, 25 bp, Homo sapien
cagcaagagtcgtctccagatcaca

SEQ ID NO: 1025364 - DNA, 25 bp, Homo sapien
gggaagggatgaagcgatgccccga

SEQ ID NO: 1025365 - DNA, 25 bp, Homo sapien
gatgggcgggaacaggcgagaggcc

SEQ ID NO: 1025366 - DNA, 25 bp, Homo sapien
cacacacacaagacttggagagcag

SEQ ID NO: 1025367 - DNA, 25 bp, Homo sapien
cttcagccctccctcgtctcaccca

SEQ ID NO: 1025368 - DNA, 25 bp, Homo sapien
ttctcgggcgtcctctctctgaaga

SEQ ID NO: 1025369 - DNA, 25 bp, Homo sapien
tcgggcgtcctctctatgaagatct

SEQ ID NO: 1025370 - DNA, 25 bp, Homo sapien
ctctcgggcgtcctctctctgaaga

SEQ ID NO: 1025371 - DNA, 25 bp, Homo sapien
tctcgggcgtcctctctatgaagat

SEQ ID NO: 1025372 - DNA, 25 bp, Homo sapien
ctctcgggcgtcctctctctgaaga

SEQ ID NO: 1025373 - DNA, 25 bp, Homo sapien
ttctcgggcgtcctctctctgaaga

SEQ ID NO: 1025374 - DNA, 25 bp, Homo sapien
cgcctgtcttctcgggcgtcctctc

SEQ ID NO: 1025375 - DNA, 25 bp, Homo sapien
cctctcgggcgtcctctctctgaag

SEQ ID NO: 1025376 - DNA, 25 bp, Homo sapien
ccttggggcagcttcgaaccagagc

SEQ ID NO: 1025377 - DNA, 25 bp, Homo sapien
gcaccccacatgcacttgaggggca

SEQ ID NO: 1025378 - DNA, 25 bp, Homo sapien
gctggatggcccctcgtggtaccca

SEQ ID NO: 1025379 - DNA, 25 bp, Homo sapien
cagcttcgaaccagagcagtgctgc

SEQ ID NO: 1025380 - DNA, 25 bp, Homo sapien
cgccagcgggtcagctttgctgcct

SEQ ID NO: 1025381 - DNA, 25 bp, Homo sapien
tctcgccatgaaaaccgacacaaca

SEQ ID NO: 1025382 - DNA, 25 bp, Homo sapien
ccagcagacgcccacgatgttttct

SEQ ID NO: 1025383 - DNA, 25 bp, Homo sapien
cgggtcagctttgctgcctcggcct

SEQ ID NO: 1025384 - DNA, 25 bp, Homo sapien
ccatttctcaccaaattggaatttt

SEQ ID NO: 1025385 - DNA, 25 bp, Homo sapien
cactgctatttggacttggataaaa

SEQ ID NO: 1025386 - DNA, 25 bp, Homo sapien
tggaatttttcctgtccaaggccaa

SEQ ID NO: 1025387 - DNA, 25 bp, Homo sapien
catttggacattatccatcctggct

SEQ ID NO: 1025388 - DNA, 25 bp, Homo sapien
gacagacgagaaacagccctgaaag

SEQ ID NO: 1025389 - DNA, 25 bp, Homo sapien
acagacgagaaacagccctgaaagc

SEQ ID NO: 1025390 - DNA, 25 bp, Homo sapien
cagacgagaaacagccctgaaagca

SEQ ID NO: 1025391 - DNA, 25 bp, Homo sapien
aaaatgccagcaggccaacaacagc

SEQ ID NO: 1025392 - DNA, 25 bp, Homo sapien
cccaaaaatgccagcaggccaacaa

SEQ ID NO: 1025393 - DNA, 25 bp, Homo sapien
gaccccaaaaatgccagcaggccaa

SEQ ID NO: 1025394 - DNA, 25 bp, Homo sapien
ccccactatcaccagcctgagggca

SEQ ID NO: 1025395 - DNA, 25 bp, Homo sapien
ctcagtgacaggtgcatgcgattcg

SEQ ID NO: 1025396 - DNA, 25 bp, Homo sapien
atgcgattcgggaaaaccaggcggc

SEQ ID NO: 1025397 - DNA, 25 bp, Homo sapien
aagctgaccacactgacagctcagt

SEQ ID NO: 1025398 - DNA, 25 bp, Homo sapien
tccacttcccgggtgggtgcagcaa

SEQ ID NO: 1025399 - DNA, 25 bp, Homo sapien
tgagccaccaggtctcctgcagaac

SEQ ID NO: 1025400 - DNA, 25 bp, Homo sapien
caccaggtctcctgcagaacatgac

SEQ ID NO: 1025401 - DNA, 25 bp, Homo sapien
caaccactgctcctcggggaggggc

SEQ ID NO: 1025402 - DNA, 25 bp, Homo sapien
cctgagggcctgagccaccaggtct

SEQ ID NO: 1025403 - DNA, 25 bp, Homo sapien
acaaacagccatggccactgagaca

SEQ ID NO: 1025404 - DNA, 25 bp, Homo sapien
caaacagccatggccactgagacag

SEQ ID NO: 1025405 - DNA, 25 bp, Homo sapien
acagccatggccactgagacaggtg

SEQ ID NO: 1025406 - DNA, 25 bp, Homo sapien
caggagaggtggcctgtaatgggca

SEQ ID NO: 1025407 - DNA, 25 bp, Homo sapien
accagccctcgaagactggctggca

SEQ ID NO: 1025408 - DNA, 25 bp, Homo sapien
ggcatctggccgcctgccaccctca

SEQ ID NO: 1025409 - DNA, 25 bp, Homo sapien
tgaccagccctcgaagactggctgg

SEQ ID NO: 1025410 - DNA, 25 bp, Homo sapien
acagaagcggcacaggatgctgcgg

SEQ ID NO: 1025411 - DNA, 25 bp, Homo sapien
gagaaaaatgcggaacacagaagcg

SEQ ID NO: 1025412 - DNA, 25 bp, Homo sapien
aaatgcggaacacagaagcggcaca

SEQ ID NO: 1025413 - DNA, 25 bp, Homo sapien
gaaaaatgcggaacacagaagcggc

SEQ ID NO: 1025414 - DNA, 25 bp, Homo sapien
cctccgatgctactgaaggtaaatg

SEQ ID NO: 1025415 - DNA, 25 bp, Homo sapien
tgccaccctcgccaaagattgaggg

SEQ ID NO: 1025416 - DNA, 25 bp, Homo sapien
tgcattcgcagctcgtctgggtccc

SEQ ID NO: 1025417 - DNA, 25 bp, Homo sapien
acaggcctttccatccagaatgaga

SEQ ID NO: 1025418 - DNA, 25 bp, Homo sapien
ttagccagaggtcccccaggggaca

SEQ ID NO: 1025419 - DNA, 25 bp, Homo sapien
tagccagaggtcccccaggggacac

SEQ ID NO: 1025420 - DNA, 25 bp, Homo sapien
tcactttcggaatccgaaaattagc

SEQ ID NO: 1025421 - DNA, 25 bp, Homo sapien
ttcggaatccgaaaattagccagag

SEQ ID NO: 1025422 - DNA, 25 bp, Homo sapien
tggaggaagtccacgggcccaaatg

SEQ ID NO: 1025423 - DNA, 25 bp, Homo sapien
ctggaggaagtccacgggcccaaat

SEQ ID NO: 1025424 - DNA, 25 bp, Homo sapien
ggcccaaatggtgccgacatcctcg

SEQ ID NO: 1025425 - DNA, 25 bp, Homo sapien
agtccacgggcccaaatggtgccga

SEQ ID NO: 1025426 - DNA, 25 bp, Homo sapien
gcacggagtttcaaggtgccagctg

SEQ ID NO: 1025427 - DNA, 25 bp, Homo sapien
acacaacgcagtgcccaagaacagg

SEQ ID NO: 1025428 - DNA, 25 bp, Homo sapien
gcagcggaaacacgaggacacgcag

SEQ ID NO: 1025429 - DNA, 25 bp, Homo sapien
acaggtagacggtcccagaggccgg

SEQ ID NO: 1025430 - DNA, 25 bp, Homo sapien
ttttctagaaatgtcgccctgcccg

SEQ ID NO: 1025431 - DNA, 25 bp, Homo sapien
cagcctgatggtcactgagtgccaa

SEQ ID NO: 1025432 - DNA, 25 bp, Homo sapien
agctatcaggctcaaaccccatggg

SEQ ID NO: 1025433 - DNA, 25 bp, Homo sapien
caaaaatgtgagaagcagctagcgg

SEQ ID NO: 1025434 - DNA, 25 bp, Homo sapien
taacacagttacatcgcccagcaat

SEQ ID NO: 1025435 - DNA, 25 bp, Homo sapien
aaaacagtctggcaggtcctcggaa

SEQ ID NO: 1025436 - DNA, 25 bp, Homo sapien
cggcgtacacgcaggttactgaaaa

SEQ ID NO: 1025437 - DNA, 25 bp, Homo sapien
caggaacccctatgcattgctaaga

SEQ ID NO: 1025438 - DNA, 25 bp, Homo sapien
gactgaaccgtctgtagagccgagg

SEQ ID NO: 1025439 - DNA, 25 bp, Homo sapien
gcaaagactgtttctgtgcacggcc

SEQ ID NO: 1025440 - DNA, 25 bp, Homo sapien
tgtgcacggcctccttaaaccattt

SEQ ID NO: 1025441 - DNA, 25 bp, Homo sapien
cacggtatgctctcatgtccctggc

SEQ ID NO: 1025442 - DNA, 25 bp, Homo sapien
gccgggaagtcctgcagacgcagat

SEQ ID NO: 1025443 - DNA, 25 bp, Homo sapien
ggcgcagatgttgtaggcaccaaga

SEQ ID NO: 1025444 - DNA, 25 bp, Homo sapien
gagcgccaattcgtctctgtacagg

SEQ ID NO: 1025445 - DNA, 25 bp, Homo sapien
gatggctgccaccaataggcaacgc

SEQ ID NO: 1025446 - DNA, 25 bp, Homo sapien
tctgttcaacttgcagcccagcaac

SEQ ID NO: 1025447 - DNA, 25 bp, Homo sapien
ccacagggaacttcgcagagtgaag

SEQ ID NO: 1025448 - DNA, 25 bp, Homo sapien
ccagttttctgttcaacttgcagcc

SEQ ID NO: 1025449 - DNA, 25 bp, Homo sapien
ttcgcagagtgaagaaaaccagttt

SEQ ID NO: 1025450 - DNA, 25 bp, Homo sapien
ggccagggacgctcctggtcttcag

SEQ ID NO: 1025451 - DNA, 25 bp, Homo sapien
gagccaggacgagccttcggagaca

SEQ ID NO: 1025452 - DNA, 25 bp, Homo sapien
gccagggacgctcctggtcttcagg

SEQ ID NO: 1025453 - DNA, 25 bp, Homo sapien
tcagggagccaggacgagccttcgg

SEQ ID NO: 1025454 - DNA, 25 bp, Homo sapien
ccccgagcccaatccgctcagtggg

SEQ ID NO: 1025455 - DNA, 25 bp, Homo sapien
gccaacgcctgagaacacggctctg

SEQ ID NO: 1025456 - DNA, 25 bp, Homo sapien
ctccatgagagccaacgcctgagaa

SEQ ID NO: 1025457 - DNA, 25 bp, Homo sapien
tggccgaggaccctgcagatctgga

SEQ ID NO: 1025458 - DNA, 25 bp, Homo sapien
actcagagactccttgaggggaaag

SEQ ID NO: 1025459 - DNA, 25 bp, Homo sapien
aaagccacaacagccggcgctgact

SEQ ID NO: 1025460 - DNA, 25 bp, Homo sapien
tgaggggaaagagtcagatgcctca

SEQ ID NO: 1025461 - DNA, 25 bp, Homo sapien
cgctgactccgggagactcagagac

SEQ ID NO: 1025462 - DNA, 25 bp, Homo sapien
gagaaagataagtgctcgggcgcac

SEQ ID NO: 1025463 - DNA, 25 bp, Homo sapien
ggctcacggctgtggatggtttttt

SEQ ID NO: 1025464 - DNA, 25 bp, Homo sapien
agcccctgaaggctcacggctgtgg

SEQ ID NO: 1025465 - DNA, 25 bp, Homo sapien
aaagataagtgctcgggcgcacagg

SEQ ID NO: 1025466 - DNA, 25 bp, Homo sapien
tctaggagaagacgctgcatcagga

SEQ ID NO: 1025467 - DNA, 25 bp, Homo sapien
ggagaagacgctgcatcaggaacca

SEQ ID NO: 1025468 - DNA, 25 bp, Homo sapien
gactctaggagaagacgctgcatca

SEQ ID NO: 1025469 - DNA, 25 bp, Homo sapien
tccaggactctaggagaagacgctg

SEQ ID NO: 1025470 - DNA, 25 bp, Homo sapien
tcagaaccaggtgttgtgtgtcagg

SEQ ID NO: 1025471 - DNA, 25 bp, Homo sapien
taaagagtgggcattctggctgccc

SEQ ID NO: 1025472 - DNA, 25 bp, Homo sapien
gcagtctccgtaaaatgggccattc

SEQ ID NO: 1025473 - DNA, 25 bp, Homo sapien
ggagcctggctcctacaggatggca

SEQ ID NO: 1025474 - DNA, 25 bp, Homo sapien
ctgggaagggcagctgcggcacagg

SEQ ID NO: 1025475 - DNA, 25 bp, Homo sapien
gacggatgcgtctgggaagggcagc

SEQ ID NO: 1025476 - DNA, 25 bp, Homo sapien
atgcgtctgggaagggcagctgcgg

SEQ ID NO: 1025477 - DNA, 25 bp, Homo sapien
gaggggacaccgtgtccctgtgggc

SEQ ID NO: 1025478 - DNA, 25 bp, Homo sapien
agctcaaccagccacagcacggcga

SEQ ID NO: 1025479 - DNA, 25 bp, Homo sapien
ccacagcacggcgagagccactcac

SEQ ID NO: 1025480 - DNA, 25 bp, Homo sapien
actcagctcaaccagccacagcacg

SEQ ID NO: 1025481 - DNA, 25 bp, Homo sapien
tcaaccagccacagcacggcgagag

SEQ ID NO: 1025482 - DNA, 25 bp, Homo sapien
tctccgagagaacagagtggacctt

SEQ ID NO: 1025483 - DNA, 25 bp, Homo sapien
gttcactttgcataaaggcccttag

SEQ ID NO: 1025484 - DNA, 25 bp, Homo sapien
tccggccacaaacgaccctgagtgg

SEQ ID NO: 1025485 - DNA, 25 bp, Homo sapien
gctgagggacaagtcatctccgaga

SEQ ID NO: 1025486 - DNA, 25 bp, Homo sapien
cggcttgtccttttcggaaggcgcg

SEQ ID NO: 1025487 - DNA, 25 bp, Homo sapien
aagagccggccaaggtccgcagcca

SEQ ID NO: 1025488 - DNA, 25 bp, Homo sapien
cagccagctggacggcttgtccttt

SEQ ID NO: 1025489 - DNA, 25 bp, Homo sapien
tctgttttgggtcttatggaggccg

SEQ ID NO: 1025490 - DNA, 25 bp, Homo sapien
ggaccagggtcggaaagcagagagg

SEQ ID NO: 1025491 - DNA, 25 bp, Homo sapien
gcgctggcgagggtgaacacagccc

SEQ ID NO: 1025492 - DNA, 25 bp, Homo sapien
tcggaaagcagagaggcgctggcga

SEQ ID NO: 1025493 - DNA, 25 bp, Homo sapien
cagagaggcgctggcgagggtgaac

SEQ ID NO: 1025494 - DNA, 25 bp, Homo sapien
gagagctctttctcactcgctgaca

SEQ ID NO: 1025495 - DNA, 25 bp, Homo sapien
tgggccggcggtgcgagggccacgt

SEQ ID NO: 1025496 - DNA, 25 bp, Homo sapien
tgggcgccacggctgtctcaaagct

SEQ ID NO: 1025497 - DNA, 25 bp, Homo sapien
ccgaggctgggtgcaagtggcgaga

SEQ ID NO: 1025498 - DNA, 25 bp, Homo sapien
agtcagcttccgcttccgaggctgg

SEQ ID NO: 1025499 - DNA, 25 bp, Homo sapien
attcctccctgctttcaacttccac

SEQ ID NO: 1025500 - DNA, 25 bp, Homo sapien
gggagacgcgccgctcccggaggaa

SEQ ID NO: 1025501 - DNA, 25 bp, Homo sapien
cagggagacgcgccgctcccggagg

SEQ ID NO: 1025502 - DNA, 25 bp, Homo sapien
ggagacgcgccgctcccggaggaac

SEQ ID NO: 1025503 - DNA, 25 bp, Homo sapien
agggagacgcgccgctcccggagga

SEQ ID NO: 1025504 - DNA, 25 bp, Homo sapien
taaaggacggggaagagagcgagga

SEQ ID NO: 1025505 - DNA, 25 bp, Homo sapien
ggcggagctggatgaggtaaaggac

SEQ ID NO: 1025506 - DNA, 25 bp, Homo sapien
ttggcggagctggatgaggtaaagg

SEQ ID NO: 1025507 - DNA, 25 bp, Homo sapien
cggagctggatgaggtaaaggacgg

SEQ ID NO: 1025508 - DNA, 25 bp, Homo sapien
gccgcagcatcagggacggccgagg

SEQ ID NO: 1025509 - DNA, 25 bp, Homo sapien
cagcatcagggacggccgagggcag

SEQ ID NO: 1025510 - DNA, 25 bp, Homo sapien
gagggcagggcacgcgcacccgggg

SEQ ID NO: 1025511 - DNA, 25 bp, Homo sapien
gggccgcagcatcagggacggccga

SEQ ID NO: 1025512 - DNA, 25 bp, Homo sapien
ctgcttcacgcgcatcttgaccacc

SEQ ID NO: 1025513 - DNA, 25 bp, Homo sapien
ttcacgcgcatcttgaccacctcat

SEQ ID NO: 1025514 - DNA, 25 bp, Homo sapien
cctcctgcttcacgcgcatcttgac

SEQ ID NO: 1025515 - DNA, 25 bp, Homo sapien
cacgcgcatcttgaccacctcatgc

SEQ ID NO: 1025516 - DNA, 25 bp, Homo sapien
tcttgctggcggagcgcgtgaacac

SEQ ID NO: 1025517 - DNA, 25 bp, Homo sapien
ccaggtcttgctggcggagcgcgtg

SEQ ID NO: 1025518 - DNA, 25 bp, Homo sapien
tggcggagcgcgtgaacacccactc

SEQ ID NO: 1025519 - DNA, 25 bp, Homo sapien
gacgccaggtcttgctggcggagcg

SEQ ID NO: 1025520 - DNA, 25 bp, Homo sapien
gacgccgccgaggtgtgaatttagc

SEQ ID NO: 1025521 - DNA, 25 bp, Homo sapien
ttgtgttgtgctaaagcccacgccg

SEQ ID NO: 1025522 - DNA, 25 bp, Homo sapien
tcagacatcgcaccatctgagggcc

SEQ ID NO: 1025523 - DNA, 25 bp, Homo sapien
cagaatcaaggacaacagtggcggg

SEQ ID NO: 1025524 - DNA, 25 bp, Homo sapien
gcttcaggcgcagccgtgactcgtt

SEQ ID NO: 1025525 - DNA, 25 bp, Homo sapien
tccttccgcaggttacgcttggcct

SEQ ID NO: 1025526 - DNA, 25 bp, Homo sapien
tcttctcgttctcggcgcggagacg

SEQ ID NO: 1025527 - DNA, 25 bp, Homo sapien
ccttcttggccacgcgtaggaactc

SEQ ID NO: 1025528 - DNA, 25 bp, Homo sapien
tgctcccggtccgcctccgcgtgct

SEQ ID NO: 1025529 - DNA, 25 bp, Homo sapien
ggtccgcctccgcgtgctgcagctt

SEQ ID NO: 1025530 - DNA, 25 bp, Homo sapien
gctccagctccgcagcgccctcgct

SEQ ID NO: 1025531 - DNA, 25 bp, Homo sapien
tccagctccgcagcgccctcgctgc

SEQ ID NO: 1025532 - DNA, 25 bp, Homo sapien
tgcacccgcgttgtcggcggcgctg

SEQ ID NO: 1025533 - DNA, 25 bp, Homo sapien
ctgcacccgcgttgtcggcggcgct

SEQ ID NO: 1025534 - DNA, 25 bp, Homo sapien
ccctgcacccgcgttgtcggcggcg

SEQ ID NO: 1025535 - DNA, 25 bp, Homo sapien
cccccctgcacccgcgttgtcggcg

SEQ ID NO: 1025536 - DNA, 25 bp, Homo sapien
ttgcagtgggttccaaaactacatg

SEQ ID NO: 1025537 - DNA, 25 bp, Homo sapien
aacactcgcttggtaataggcacgg

SEQ ID NO: 1025538 - DNA, 25 bp, Homo sapien
cagtagaaaattttgcagtgggttc

SEQ ID NO: 1025539 - DNA, 25 bp, Homo sapien
taggcacggtaagacgttgtgctgt

SEQ ID NO: 1025540 - DNA, 25 bp, Homo sapien
tgtcctcacgcagccgcgggcagat

SEQ ID NO: 1025541 - DNA, 25 bp, Homo sapien
agctgtgatggcttccccgggtggg

SEQ ID NO: 1025542 - DNA, 25 bp, Homo sapien
gtgtaaatgttagaatgttccagca

SEQ ID NO: 1025543 - DNA, 25 bp, Homo sapien
actccgttgcgggtcttcagatggc

SEQ ID NO: 1025544 - DNA, 25 bp, Homo sapien
gttcgagctcatctcgcacgcggca

SEQ ID NO: 1025545 - DNA, 25 bp, Homo sapien
cagtaaggcgggcagtgttcgagct

SEQ ID NO: 1025546 - DNA, 25 bp, Homo sapien
agcgctggcatcgacggcggcgtgg

SEQ ID NO: 1025547 - DNA, 25 bp, Homo sapien
tgcacttcctggtacccgtggggac

SEQ ID NO: 1025548 - DNA, 25 bp, Homo sapien
caaagtgcagttctaaatatacgtt

SEQ ID NO: 1025549 - DNA, 25 bp, Homo sapien
tgcagaggagccgaagaccgtcccc

SEQ ID NO: 1025550 - DNA, 25 bp, Homo sapien
ccgacgcaggtcagtgcctcgtggt

SEQ ID NO: 1025551 - DNA, 25 bp, Homo sapien
caaaatgaagggagcgacgtttgcc

SEQ ID NO: 1025552 - DNA, 25 bp, Homo sapien
caatcacttagatgaagggcctcac

SEQ ID NO: 1025553 - DNA, 25 bp, Homo sapien
taactgtaggataggtagccgcctc

SEQ ID NO: 1025554 - DNA, 25 bp, Homo sapien
tagccgcctcttgtctactgggaaa

SEQ ID NO: 1025555 - DNA, 25 bp, Homo sapien
gaaaagaaacggactcgcacctgtg

SEQ ID NO: 1025556 - DNA, 25 bp, Homo sapien
gcctccatgaaattggcatgcggca

SEQ ID NO: 1025557 - DNA, 25 bp, Homo sapien
tgtgcctccatgaaattggcatgcg

SEQ ID NO: 1025558 - DNA, 25 bp, Homo sapien
cctccatgaaattggcatgcggcat

SEQ ID NO: 1025559 - DNA, 25 bp, Homo sapien
tgcctccatgaaattggcatgcggc

SEQ ID NO: 1025560 - DNA, 25 bp, Homo sapien
gcccatgcctttctcggaccacaac

SEQ ID NO: 1025561 - DNA, 25 bp, Homo sapien
cctttctcggaccacaacccagatg

SEQ ID NO: 1025562 - DNA, 25 bp, Homo sapien
cagatgacctatgagggcctggatg

SEQ ID NO: 1025563 - DNA, 25 bp, Homo sapien
atgcctttctcggaccacaacccag

SEQ ID NO: 1025564 - DNA, 25 bp, Homo sapien
gtcagaggccgggtcgcctggagca

SEQ ID NO: 1025565 - DNA, 25 bp, Homo sapien
aggccgggtcgcctggagcaggacc

SEQ ID NO: 1025566 - DNA, 25 bp, Homo sapien
tgtgcagaggctacgagaacagagt

SEQ ID NO: 1025567 - DNA, 25 bp, Homo sapien
agctgtgcagaggctacgagaacag

SEQ ID NO: 1025568 - DNA, 25 bp, Homo sapien
gtgggtggagtagacagggcagttt

SEQ ID NO: 1025569 - DNA, 25 bp, Homo sapien
cgctgtgggtggagtagacagggca

SEQ ID NO: 1025570 - DNA, 25 bp, Homo sapien
tggccatgtgcgtcactgagaccgg

SEQ ID NO: 1025571 - DNA, 25 bp, Homo sapien
gctgggcgggcatccagtccccaaa

SEQ ID NO: 1025572 - DNA, 25 bp, Homo sapien
ttggcacccctatacctaagagtgt

SEQ ID NO: 1025573 - DNA, 25 bp, Homo sapien
acccctatacctaagagtgtccttg

SEQ ID NO: 1025574 - DNA, 25 bp, Homo sapien
tatacctaagagtgtccttgggaca

SEQ ID NO: 1025575 - DNA, 25 bp, Homo sapien
tgggcacttggcacccctataccta

SEQ ID NO: 1025576 - DNA, 25 bp, Homo sapien
caggaagggccagaaggttccgaca

SEQ ID NO: 1025577 - DNA, 25 bp, Homo sapien
gcactggccagggtacacgggaccc

SEQ ID NO: 1025578 - DNA, 25 bp, Homo sapien
accaaggcctctagacggccctcga

SEQ ID NO: 1025579 - DNA, 25 bp, Homo sapien
acacccctggtctctcgttctagat

SEQ ID NO: 1025580 - DNA, 25 bp, Homo sapien
cgcagggcggtgtccatctgcaact

SEQ ID NO: 1025581 - DNA, 25 bp, Homo sapien
ggtgtccatctgcaactggtagcct

SEQ ID NO: 1025582 - DNA, 25 bp, Homo sapien
gggcggtgtccatctgcaactggta

SEQ ID NO: 1025583 - DNA, 25 bp, Homo sapien
tgtccatctgcaactggtagcctgg

SEQ ID NO: 1025584 - DNA, 25 bp, Homo sapien
ggccgcgaatctggggggcgccgcc

SEQ ID NO: 1025585 - DNA, 25 bp, Homo sapien
gctggccgcgaatctggggggcgcc

SEQ ID NO: 1025586 - DNA, 25 bp, Homo sapien
ccgccggaatccagcgctggccgcg

SEQ ID NO: 1025587 - DNA, 25 bp, Homo sapien
gaatccagcgctggccgcgaatctg

SEQ ID NO: 1025588 - DNA, 25 bp, Homo sapien
ctccccagcaacgacttggcggctg

SEQ ID NO: 1025589 - DNA, 25 bp, Homo sapien
ccccagcaacgacttggcggctggg

SEQ ID NO: 1025590 - DNA, 25 bp, Homo sapien
tccccagcaacgacttggcggctgg

SEQ ID NO: 1025591 - DNA, 25 bp, Homo sapien
ccagcaacgacttggcggctggggc

SEQ ID NO: 1025592 - DNA, 25 bp, Homo sapien
caggagagaggacacgcatgggctc

SEQ ID NO: 1025593 - DNA, 25 bp, Homo sapien
acaggagagaggacacgcatgggct

SEQ ID NO: 1025594 - DNA, 25 bp, Homo sapien
gacaggagagaggacacgcatgggc

SEQ ID NO: 1025595 - DNA, 25 bp, Homo sapien
ggacaggagagaggacacgcatggg

SEQ ID NO: 1025596 - DNA, 25 bp, Homo sapien
cgtcgagcatgtcccctgctagggc

SEQ ID NO: 1025597 - DNA, 25 bp, Homo sapien
acccacacgtcgagcatgtcccctg

SEQ ID NO: 1025598 - DNA, 25 bp, Homo sapien
tcatccacccacacgtcgagcatgt

SEQ ID NO: 1025599 - DNA, 25 bp, Homo sapien
acacgtcgagcatgtcccctgctag

SEQ ID NO: 1025600 - DNA, 25 bp, Homo sapien
cactcgtgaaaatgctggacactcc

SEQ ID NO: 1025601 - DNA, 25 bp, Homo sapien
agggcctcccggatgacagagcccc

SEQ ID NO: 1025602 - DNA, 25 bp, Homo sapien
tgacctctggcggtggcactcgtga

SEQ ID NO: 1025603 - DNA, 25 bp, Homo sapien
tgctggacactccttctccttgtac

SEQ ID NO: 1025604 - DNA, 25 bp, Homo sapien
caaagcctctccctcttcgctcctg

SEQ ID NO: 1025605 - DNA, 25 bp, Homo sapien
cccaaagcctctccctcttcgctcc

SEQ ID NO: 1025606 - DNA, 25 bp, Homo sapien
tcccaaagcctctccctcttcgctc

SEQ ID NO: 1025607 - DNA, 25 bp, Homo sapien
ccaaagcctctccctcttcgctcct

SEQ ID NO: 1025608 - DNA, 25 bp, Homo sapien
gggctcctccggacctggtgggcat

SEQ ID NO: 1025609 - DNA, 25 bp, Homo sapien
ccaacacagcgggacatgagctggg

SEQ ID NO: 1025610 - DNA, 25 bp, Homo sapien
tgggctcctccggacctggtgggca

SEQ ID NO: 1025611 - DNA, 25 bp, Homo sapien
ctgccaacacagcgggacatgagct

SEQ ID NO: 1025612 - DNA, 25 bp, Homo sapien
gtggccatgccacgtgaccgtctga

SEQ ID NO: 1025613 - DNA, 25 bp, Homo sapien
ggtggccatgccacgtgaccgtctg

SEQ ID NO: 1025614 - DNA, 25 bp, Homo sapien
gggtggccatgccacgtgaccgtct

SEQ ID NO: 1025615 - DNA, 25 bp, Homo sapien
tgtggtcccaaaggcctggagcaag

SEQ ID NO: 1025616 - DNA, 25 bp, Homo sapien
acggcagccatggtctcccaggctt

SEQ ID NO: 1025617 - DNA, 25 bp, Homo sapien
cagatgtggtcccaaaggcctggag

SEQ ID NO: 1025618 - DNA, 25 bp, Homo sapien
gagcaagtggtgacggccaccagcc

SEQ ID NO: 1025619 - DNA, 25 bp, Homo sapien
tggacagacttgctgccgccgagca

SEQ ID NO: 1025620 - DNA, 25 bp, Homo sapien
ggacagacttgctgccgccgagcag

SEQ ID NO: 1025621 - DNA, 25 bp, Homo sapien
tgggcctgcgtccgggactgggcgc

SEQ ID NO: 1025622 - DNA, 25 bp, Homo sapien
ggactgggcgctgattcccgggcag

SEQ ID NO: 1025623 - DNA, 25 bp, Homo sapien
ccgggactgggcgctgattcccggg

SEQ ID NO: 1025624 - DNA, 25 bp, Homo sapien
gggactgggcgctgattcccgggca

SEQ ID NO: 1025625 - DNA, 25 bp, Homo sapien
gcaaacacagaagcccggggccgtc

SEQ ID NO: 1025626 - DNA, 25 bp, Homo sapien
ttatcacagcaaaaccccgggcagg

SEQ ID NO: 1025627 - DNA, 25 bp, Homo sapien
ggcaggcatcggtgtcccctgtgct

SEQ ID NO: 1025628 - DNA, 25 bp, Homo sapien
agcccggggccgtcagcttccttgg

SEQ ID NO: 1025629 - DNA, 25 bp, Homo sapien
tgcatcttgccgtccatcgaggctg

SEQ ID NO: 1025630 - DNA, 25 bp, Homo sapien
ccacgacaggaaatccagcgctgtt

SEQ ID NO: 1025631 - DNA, 25 bp, Homo sapien
ccttcgtggctgacaggtgcatctt

SEQ ID NO: 1025632 - DNA, 25 bp, Homo sapien
tgttttctccacacgggtgcggcgg

SEQ ID NO: 1025633 - DNA, 25 bp, Homo sapien
tgtgttgagcggcgtcctctgggat

SEQ ID NO: 1025634 - DNA, 25 bp, Homo sapien
ttccagtgtgttgagcggcgtcctc

SEQ ID NO: 1025635 - DNA, 25 bp, Homo sapien
ccagtgtgttgagcggcgtcctctg

SEQ ID NO: 1025636 - DNA, 25 bp, Homo sapien
tttaattcccaatcagcagcctcgg

SEQ ID NO: 1025637 - DNA, 25 bp, Homo sapien
gcccagggcggcttcatcacagcca

SEQ ID NO: 1025638 - DNA, 25 bp, Homo sapien
tgcggccatcctcgaggctcccaga

SEQ ID NO: 1025639 - DNA, 25 bp, Homo sapien
agctgcggccatcctcgaggctccc

SEQ ID NO: 1025640 - DNA, 25 bp, Homo sapien
agagcccagggcggcttcatcacag

SEQ ID NO: 1025641 - DNA, 25 bp, Homo sapien
catgcgagggtcgtgtccatccttg

SEQ ID NO: 1025642 - DNA, 25 bp, Homo sapien
tgaagctctccagacagtttacaga

SEQ ID NO: 1025643 - DNA, 25 bp, Homo sapien
gaggcgctttttccacgctccggtg

SEQ ID NO: 1025644 - DNA, 25 bp, Homo sapien
gagtacgtgctcatgatccgcgacg

SEQ ID NO: 1025645 - DNA, 25 bp, Homo sapien
gctgcggcagcacacctaggtaggt

SEQ ID NO: 1025646 - DNA, 25 bp, Homo sapien
agcaggctgcggcagcacacctagg

SEQ ID NO: 1025647 - DNA, 25 bp, Homo sapien
gcctgaggggagagccacggaggag

SEQ ID NO: 1025648 - DNA, 25 bp, Homo sapien
gtgtcgtctccacaggcctgagggg

SEQ ID NO: 1025649 - DNA, 25 bp, Homo sapien
cagaggactctccccgtcctgccca

SEQ ID NO: 1025650 - DNA, 25 bp, Homo sapien
ggttccgaggtgcagagagctgggt

SEQ ID NO: 1025651 - DNA, 25 bp, Homo sapien
agaggactctccccgtcctgcccat

SEQ ID NO: 1025652 - DNA, 25 bp, Homo sapien
tgtggaaatggggtggtcggtccca

SEQ ID NO: 1025653 - DNA, 25 bp, Homo sapien
ccgctcctaagtcgctccctgcagg

SEQ ID NO: 1025654 - DNA, 25 bp, Homo sapien
tcctttcccagtcatggcactccca

SEQ ID NO: 1025655 - DNA, 25 bp, Homo sapien
ttgctgagacttccgccgctcctaa

SEQ ID NO: 1025656 - DNA, 25 bp, Homo sapien
gccctccgggatcttctcagttgca

SEQ ID NO: 1025657 - DNA, 25 bp, Homo sapien
cctgcttccctgacccagatcctgc

SEQ ID NO: 1025658 - DNA, 25 bp, Homo sapien
ccacctgcttccctgacccagatcc

SEQ ID NO: 1025659 - DNA, 25 bp, Homo sapien
cacctgcttccctgacccagatcct

SEQ ID NO: 1025660 - DNA, 25 bp, Homo sapien
acctgcttccctgacccagatcctg

SEQ ID NO: 1025661 - DNA, 25 bp, Homo sapien
gcttcctcacgtgcagggactgcct

SEQ ID NO: 1025662 - DNA, 25 bp, Homo sapien
ggcccagcttcctcacgtgcaggga

SEQ ID NO: 1025663 - DNA, 25 bp, Homo sapien
ccagcttcctcacgtgcagggactg

SEQ ID NO: 1025664 - DNA, 25 bp, Homo sapien
gggcccagcttcctcacgtgcaggg

SEQ ID NO: 1025665 - DNA, 25 bp, Homo sapien
ctgtaggatttaagtttgtcgacgg

SEQ ID NO: 1025666 - DNA, 25 bp, Homo sapien
ctggggtccggcaaagcctgttctc

SEQ ID NO: 1025667 - DNA, 25 bp, Homo sapien
gcctgttctccccactcgaaatgaa

SEQ ID NO: 1025668 - DNA, 25 bp, Homo sapien
tctccccactcgaaatgaagtcatt

SEQ ID NO: 1025669 - DNA, 25 bp, Homo sapien
tgttctccccactcgaaatgaagtc

SEQ ID NO: 1025670 - DNA, 25 bp, Homo sapien
cgtcagggcggccaattcggccaat

SEQ ID NO: 1025671 - DNA, 25 bp, Homo sapien
aatgggccattctggtcaccgccag

SEQ ID NO: 1025672 - DNA, 25 bp, Homo sapien
tgtgcttctaaaagccgcacgggcc

SEQ ID NO: 1025673 - DNA, 25 bp, Homo sapien
cagcaccttgttagccttgcagagg

SEQ ID NO: 1025674 - DNA, 25 bp, Homo sapien
gcacacagaagcctgtgacgggctc

SEQ ID NO: 1025675 - DNA, 25 bp, Homo sapien
agctctgctcggtggctcgctgctg

SEQ ID NO: 1025676 - DNA, 25 bp, Homo sapien
agaggtcccttgctcggcctgcact

SEQ ID NO: 1025677 - DNA, 25 bp, Homo sapien
tccgggtagacagggtcaagggcca

SEQ ID NO: 1025678 - DNA, 25 bp, Homo sapien
cccagctctaacttcatgcccaggt

SEQ ID NO: 1025679 - DNA, 25 bp, Homo sapien
gaacgtgtccgcgtcatggactgga

SEQ ID NO: 1025680 - DNA, 25 bp, Homo sapien
ggtcaaggcacaccaaagccgtgca

SEQ ID NO: 1025681 - DNA, 25 bp, Homo sapien
tggcagcaaactggcctcaggccca

SEQ ID NO: 1025682 - DNA, 25 bp, Homo sapien
tgggaaagcagtcacaaaaccaccg

SEQ ID NO: 1025683 - DNA, 25 bp, Homo sapien
gcccaagaatccaagctctgacctt

SEQ ID NO: 1025684 - DNA, 25 bp, Homo sapien
cccaaggcttgggcccaagaatcca

SEQ ID NO: 1025685 - DNA, 25 bp, Homo sapien
cttgggcccaagaatccaagctctg

SEQ ID NO: 1025686 - DNA, 25 bp, Homo sapien
ttcctccctcgtctgccacaaagag

SEQ ID NO: 1025687 - DNA, 25 bp, Homo sapien
caggcccagaggacgaaggacaccg

SEQ ID NO: 1025688 - DNA, 25 bp, Homo sapien
cgacccgttcctccctcgtctgcca

SEQ ID NO: 1025689 - DNA, 25 bp, Homo sapien
cagaggacgaaggacaccgacccgt

SEQ ID NO: 1025690 - DNA, 25 bp, Homo sapien
caagtcgctgcctcaccatgtgccc

SEQ ID NO: 1025691 - DNA, 25 bp, Homo sapien
tgccaagtcgctgcctcaccatgtg

SEQ ID NO: 1025692 - DNA, 25 bp, Homo sapien
caggagaggggtcccgagtggctct

SEQ ID NO: 1025693 - DNA, 25 bp, Homo sapien
aggagaggggtcccgagtggctctg

SEQ ID NO: 1025694 - DNA, 25 bp, Homo sapien
caggcacgctctgaccctgcgaagc

SEQ ID NO: 1025695 - DNA, 25 bp, Homo sapien
ggcacgctctgaccctgcgaagccc

SEQ ID NO: 1025696 - DNA, 25 bp, Homo sapien
aggcacgctctgaccctgcgaagcc

SEQ ID NO: 1025697 - DNA, 25 bp, Homo sapien
tcaggcacgctctgaccctgcgaag

SEQ ID NO: 1025698 - DNA, 25 bp, Homo sapien
caggaggctccaaacaatagaaatg

SEQ ID NO: 1025699 - DNA, 25 bp, Homo sapien
atcagagcctgtcactgtcatccag

SEQ ID NO: 1025700 - DNA, 25 bp, Homo sapien
tgtcatccaggaggctccaaacaat

SEQ ID NO: 1025701 - DNA, 25 bp, Homo sapien
tcaaagcccacatcagagcctgtca

SEQ ID NO: 1025702 - DNA, 25 bp, Homo sapien
cagttgccatcgctggggaccccct

SEQ ID NO: 1025703 - DNA, 25 bp, Homo sapien
agttgccatcgctggggaccccctt

SEQ ID NO: 1025704 - DNA, 25 bp, Homo sapien
gtccccagttgccatcgctggggac

SEQ ID NO: 1025705 - DNA, 25 bp, Homo sapien
cccagttgccatcgctggggacccc

SEQ ID NO: 1025706 - DNA, 25 bp, Homo sapien
ctgagggtgatgttggaacgtctta

SEQ ID NO: 1025707 - DNA, 25 bp, Homo sapien
aaccgtggcaacctccgcgctgagg

SEQ ID NO: 1025708 - DNA, 25 bp, Homo sapien
tccacttcgctccagaaccgtggca

SEQ ID NO: 1025709 - DNA, 25 bp, Homo sapien
tcttatttcagcagaaagaaggctt

SEQ ID NO: 1025710 - DNA, 25 bp, Homo sapien
cactttgtacgataacttcagaagc

SEQ ID NO: 1025711 - DNA, 25 bp, Homo sapien
ccctctgtccggctctgagtcatgg

SEQ ID NO: 1025712 - DNA, 25 bp, Homo sapien
ccagggaagaggtccggcaaggtgg

SEQ ID NO: 1025713 - DNA, 25 bp, Homo sapien
gccttcgatgccactcacgcatggg

SEQ ID NO: 1025714 - DNA, 25 bp, Homo sapien
gggcctggcagtgctacgggcacag

SEQ ID NO: 1025715 - DNA, 25 bp, Homo sapien
gggctcggagtccagcaacagctgc

SEQ ID NO: 1025716 - DNA, 25 bp, Homo sapien
gctgccacctcaaatcgggactctg

SEQ ID NO: 1025717 - DNA, 25 bp, Homo sapien
catgcagggccgtaaccggccggtt

SEQ ID NO: 1025718 - DNA, 25 bp, Homo sapien
ggctcagccactgaccatccttgta

SEQ ID NO: 1025719 - DNA, 25 bp, Homo sapien
gacagctccgagctgctcgtaggaa

SEQ ID NO: 1025720 - DNA, 25 bp, Homo sapien
tgctcgtaggaacgtgggctctgat

SEQ ID NO: 1025721 - DNA, 25 bp, Homo sapien
taaaagagacagcagggtgggccct

SEQ ID NO: 1025722 - DNA, 25 bp, Homo sapien
ctggtggctttgtctgaggtctcat

SEQ ID NO: 1025723 - DNA, 25 bp, Homo sapien
cctggtggctttgtctgaggtctca

SEQ ID NO: 1025724 - DNA, 25 bp, Homo sapien
tcctggtggctttgtctgaggtctc

SEQ ID NO: 1025725 - DNA, 25 bp, Homo sapien
gaggcctgaaagaaacttgggccag

SEQ ID NO: 1025726 - DNA, 25 bp, Homo sapien
ctacagggcacagacatcaggccag

SEQ ID NO: 1025727 - DNA, 25 bp, Homo sapien
ccagagagcttcaggccagaagata

SEQ ID NO: 1025728 - DNA, 25 bp, Homo sapien
agtcccttccgaggactctcctgag

SEQ ID NO: 1025729 - DNA, 25 bp, Homo sapien
acaggggggccggctttagccatca

SEQ ID NO: 1025730 - DNA, 25 bp, Homo sapien
aggggggccggctttagccatcatc

SEQ ID NO: 1025731 - DNA, 25 bp, Homo sapien
caggggggccggctttagccatcat

SEQ ID NO: 1025732 - DNA, 25 bp, Homo sapien
gacaggggggccggctttagccatc

SEQ ID NO: 1025733 - DNA, 25 bp, Homo sapien
aagcggcagcggaatgcccctggcc

SEQ ID NO: 1025734 - DNA, 25 bp, Homo sapien
aagtgggagaaagcggcagcggaat

SEQ ID NO: 1025735 - DNA, 25 bp, Homo sapien
gagaaagcggcagcggaatgcccct

SEQ ID NO: 1025736 - DNA, 25 bp, Homo sapien
gggagaaagcggcagcggaatgccc

SEQ ID NO: 1025737 - DNA, 25 bp, Homo sapien
tcagtgccggactgagggaacagtc

SEQ ID NO: 1025738 - DNA, 25 bp, Homo sapien
tgcaccccaaggctcagtaaacggg

SEQ ID NO: 1025739 - DNA, 25 bp, Homo sapien
gcactttgagtttgggggcctttga

SEQ ID NO: 1025740 - DNA, 25 bp, Homo sapien
cttgacagcgttgggaggccctggg

SEQ ID NO: 1025741 - DNA, 25 bp, Homo sapien
tacagtcccaccagtaatgcatgaa

SEQ ID NO: 1025742 - DNA, 25 bp, Homo sapien
ctgtttttccaaaattgctgcagca

SEQ ID NO: 1025743 - DNA, 25 bp, Homo sapien
aattgctgcagcattttacagtccc

SEQ ID NO: 1025744 - DNA, 25 bp, Homo sapien
agtcccaccagtaatgcatgaaggt

SEQ ID NO: 1025745 - DNA, 25 bp, Homo sapien
gggcagatcccttctcagatgcagg

SEQ ID NO: 1025746 - DNA, 25 bp, Homo sapien
agtcttgtgggtactgcctggcgca

SEQ ID NO: 1025747 - DNA, 25 bp, Homo sapien
ttggtccgccgagtctagatgcaga

SEQ ID NO: 1025748 - DNA, 25 bp, Homo sapien
cgtcatggagtacaaagccggcgga

SEQ ID NO: 1025749 - DNA, 25 bp, Homo sapien
ggtaacgactgcgggccacgggaca

SEQ ID NO: 1025750 - DNA, 25 bp, Homo sapien
cgactgcgggccacgggacaggtcg

SEQ ID NO: 1025751 - DNA, 25 bp, Homo sapien
aacgactgcgggccacgggacaggt

SEQ ID NO: 1025752 - DNA, 25 bp, Homo sapien
gtaacgactgcgggccacgggacag

SEQ ID NO: 1025753 - DNA, 25 bp, Homo sapien
tcgcagctccgctacggccgagccg

SEQ ID NO: 1025754 - DNA, 25 bp, Homo sapien
cacttccgctccgtcctccgcggcg

SEQ ID NO: 1025755 - DNA, 25 bp, Homo sapien
tccgctacggccgagccgcggtctc

SEQ ID NO: 1025756 - DNA, 25 bp, Homo sapien
ctccgggaagctgcagcgagcactt

SEQ ID NO: 1025757 - DNA, 25 bp, Homo sapien
gcagagaccatgaggacgtgccaga

SEQ ID NO: 1025758 - DNA, 25 bp, Homo sapien
tggcgtccgggagcattgacagtct

SEQ ID NO: 1025759 - DNA, 25 bp, Homo sapien
gactctctatgtgccttgttccagg

SEQ ID NO: 1025760 - DNA, 25 bp, Homo sapien
cgtgccagaaagtgtaagactctct

SEQ ID NO: 1025761 - DNA, 25 bp, Homo sapien
ggaagtccattacatagtagacagc

SEQ ID NO: 1025762 - DNA, 25 bp, Homo sapien
agtccattacatagtagacagccca

SEQ ID NO: 1025763 - DNA, 25 bp, Homo sapien
cattacatagtagacagcccatcaa

SEQ ID NO: 1025764 - DNA, 25 bp, Homo sapien
tacatagtagacagcccatcaatta

SEQ ID NO: 1025765 - DNA, 25 bp, Homo sapien
attttctcctgctagaatgaagctc

SEQ ID NO: 1025766 - DNA, 25 bp, Homo sapien
ttttctcctgctagaatgaagctcc

SEQ ID NO: 1025767 - DNA, 25 bp, Homo sapien
tcccttgtctggttcggggctgggc

SEQ ID NO: 1025768 - DNA, 25 bp, Homo sapien
ttctcctgctagaatgaagctcctt

SEQ ID NO: 1025769 - DNA, 25 bp, Homo sapien
catcagcatgttcgcagtgggcagg

SEQ ID NO: 1025770 - DNA, 25 bp, Homo sapien
caactgatgcgctgaagtgatccag

SEQ ID NO: 1025771 - DNA, 25 bp, Homo sapien
aagactaaagagttgccctggccca

SEQ ID NO: 1025772 - DNA, 25 bp, Homo sapien
ccaaagggtgttctctaggcaaagc

SEQ ID NO: 1025773 - DNA, 25 bp, Homo sapien
ctgtgctaagcggctgtgaggcctt

SEQ ID NO: 1025774 - DNA, 25 bp, Homo sapien
gtgctaagcggctgtgaggccttca

SEQ ID NO: 1025775 - DNA, 25 bp, Homo sapien
gaggccttcagcaaaccctctgagc

SEQ ID NO: 1025776 - DNA, 25 bp, Homo sapien
tgagcacgcagccagcctcagtttc

SEQ ID NO: 1025777 - DNA, 25 bp, Homo sapien
caagcggaggtaacgtatctgctcc

SEQ ID NO: 1025778 - DNA, 25 bp, Homo sapien
tgctcaagtgaagggcatcatgacc

SEQ ID NO: 1025779 - DNA, 25 bp, Homo sapien
catttcaccaagtctcaaacagtgg

SEQ ID NO: 1025780 - DNA, 25 bp, Homo sapien
ggacctgccgctcttcggtaaagca

SEQ ID NO: 1025781 - DNA, 25 bp, Homo sapien
gccccaggagcagccttgctggcca

SEQ ID NO: 1025782 - DNA, 25 bp, Homo sapien
tgcgtgggcgggactgtccacccca

SEQ ID NO: 1025783 - DNA, 25 bp, Homo sapien
ctgcgtgggcgggactgtccacccc

SEQ ID NO: 1025784 - DNA, 25 bp, Homo sapien
cactggccccaggagcagccttgct

SEQ ID NO: 1025785 - DNA, 25 bp, Homo sapien
agcacaggccgcattttcattccca

SEQ ID NO: 1025786 - DNA, 25 bp, Homo sapien
caggagcacaggccgcattttcatt

SEQ ID NO: 1025787 - DNA, 25 bp, Homo sapien
agaggaagggcagcgtgagacgcat

SEQ ID NO: 1025788 - DNA, 25 bp, Homo sapien
cagcgtgagacgcatgggcccagga

SEQ ID NO: 1025789 - DNA, 25 bp, Homo sapien
tgaattgttcgggaaaaagtagcag

SEQ ID NO: 1025790 - DNA, 25 bp, Homo sapien
gcattcacgggtgtgaaatcctggc

SEQ ID NO: 1025791 - DNA, 25 bp, Homo sapien
actgtcaagtaggtttcttccacat

SEQ ID NO: 1025792 - DNA, 25 bp, Homo sapien
aaaaagcattcacgggtgtgaaatc

SEQ ID NO: 1025793 - DNA, 25 bp, Homo sapien
tgtcaagtaggtttcttccacattc

SEQ ID NO: 1025794 - DNA, 25 bp, Homo sapien
ggtttcccatggacggattctccca

SEQ ID NO: 1025795 - DNA, 25 bp, Homo sapien
tctgtacaccaccgaaggtttccca

SEQ ID NO: 1025796 - DNA, 25 bp, Homo sapien
cccatggacggattctcccacactg

SEQ ID NO: 1025797 - DNA, 25 bp, Homo sapien
tgtacaccaccgaaggtttcccatg

SEQ ID NO: 1025798 - DNA, 25 bp, Homo sapien
tatgtttgatagaccacgtgtggcc

SEQ ID NO: 1025799 - DNA, 25 bp, Homo sapien
tgagcctgaggcgaagtaacttctc

SEQ ID NO: 1025800 - DNA, 25 bp, Homo sapien
taacttctccatcaggaacaccagc

SEQ ID NO: 1025801 - DNA, 25 bp, Homo sapien
cagtgaagagaacgctgtcttcagg

SEQ ID NO: 1025802 - DNA, 25 bp, Homo sapien
gacagaaccgccgagctgacacggg

SEQ ID NO: 1025803 - DNA, 25 bp, Homo sapien
ggcaggtggggctaccagcaccggg

SEQ ID NO: 1025804 - DNA, 25 bp, Homo sapien
agcccacacaagagcctctcaccct

SEQ ID NO: 1025805 - DNA, 25 bp, Homo sapien
tctcaccctcaaggacagaaccgcc

SEQ ID NO: 1025806 - DNA, 25 bp, Homo sapien
tcaaaggcagctctaggtccctcac

SEQ ID NO: 1025807 - DNA, 25 bp, Homo sapien
aaaggcagctctaggtccctcactc

SEQ ID NO: 1025808 - DNA, 25 bp, Homo sapien
aggcagctctaggtccctcactcac

SEQ ID NO: 1025809 - DNA, 25 bp, Homo sapien
ttcaaaggcagctctaggtccctca

SEQ ID NO: 1025810 - DNA, 25 bp, Homo sapien
acagcccttatcgtcacatctcaag

SEQ ID NO: 1025811 - DNA, 25 bp, Homo sapien
agcacagcccttatcgtcacatctc

SEQ ID NO: 1025812 - DNA, 25 bp, Homo sapien
ccttatcgtcacatctcaagtcagc

SEQ ID NO: 1025813 - DNA, 25 bp, Homo sapien
gcccttatcgtcacatctcaagtca

SEQ ID NO: 1025814 - DNA, 25 bp, Homo sapien
tgcagcaggtaaactcgaatcatgt

SEQ ID NO: 1025815 - DNA, 25 bp, Homo sapien
gacccatcgcacagccgtgtagggt

SEQ ID NO: 1025816 - DNA, 25 bp, Homo sapien
gctcaggcccagtgtcacgacccat

SEQ ID NO: 1025817 - DNA, 25 bp, Homo sapien
gacttgtctagccaggactgataaa

SEQ ID NO: 1025818 - DNA, 25 bp, Homo sapien
gatttagatggtagatccccaaggc

SEQ ID NO: 1025819 - DNA, 25 bp, Homo sapien
aagaaaagctatgaaaagatttaga

SEQ ID NO: 1025820 - DNA, 25 bp, Homo sapien
gtagatccccaaggcataggtcaca

SEQ ID NO: 1025821 - DNA, 25 bp, Homo sapien
tagatggtagatccccaaggcatag

SEQ ID NO: 1025822 - DNA, 25 bp, Homo sapien
tggcattagagtcccggcggtctct

SEQ ID NO: 1025823 - DNA, 25 bp, Homo sapien
gacccgacccgatgctggcattaga

SEQ ID NO: 1025824 - DNA, 25 bp, Homo sapien
caggagctgcgtaagtcttccaata

SEQ ID NO: 1025825 - DNA, 25 bp, Homo sapien
ttccaatagtggagcacgaagcacc

SEQ ID NO: 1025826 - DNA, 25 bp, Homo sapien
cagtcaggcatgaactcagggcccc

SEQ ID NO: 1025827 - DNA, 25 bp, Homo sapien
agcaggttcccccagaacgaggagg

SEQ ID NO: 1025828 - DNA, 25 bp, Homo sapien
tggccaccacgtcctggaatgcagt

SEQ ID NO: 1025829 - DNA, 25 bp, Homo sapien
cagggagctgcgtgtgggttttccc

SEQ ID NO: 1025830 - DNA, 25 bp, Homo sapien
tgaaggggcggaattcctcgttctg

SEQ ID NO: 1025831 - DNA, 25 bp, Homo sapien
ttggtgggtagcgaaggaccgtcat

SEQ ID NO: 1025832 - DNA, 25 bp, Homo sapien
cggaattcctcgttctgtttggtgg

SEQ ID NO: 1025833 - DNA, 25 bp, Homo sapien
tttaaactctgggagccttcgaatg

SEQ ID NO: 1025834 - DNA, 25 bp, Homo sapien
aaagtcaaggcgtggagccccacga

SEQ ID NO: 1025835 - DNA, 25 bp, Homo sapien
tccatctgcggctgcaaagtcaagg

SEQ ID NO: 1025836 - DNA, 25 bp, Homo sapien
ggcctgcgatctggagagaaaccca

SEQ ID NO: 1025837 - DNA, 25 bp, Homo sapien
caggctgtgtcttgtggaccatcca

SEQ ID NO: 1025838 - DNA, 25 bp, Homo sapien
gagagaaggttagcgccgcatctgc

SEQ ID NO: 1025839 - DNA, 25 bp, Homo sapien
tccagccttgcagctgcaccgaccg

SEQ ID NO: 1025840 - DNA, 25 bp, Homo sapien
tgcaccgaccgtccccgcaaacaga

SEQ ID NO: 1025841 - DNA, 25 bp, Homo sapien
gccagcaccgggcacctgccggccg

SEQ ID NO: 1025842 - DNA, 25 bp, Homo sapien
aatcggccagaacaccgggacgttg

SEQ ID NO: 1025843 - DNA, 25 bp, Homo sapien
gaagtacatcaccagaatcggccag

SEQ ID NO: 1025844 - DNA, 25 bp, Homo sapien
cgttgaaagcgtcgaagaaagtaca

SEQ ID NO: 1025845 - DNA, 25 bp, Homo sapien
aaggatgcccttggtagccgcatgc

SEQ ID NO: 1025846 - DNA, 25 bp, Homo sapien
tgaaaccccatcaatcccagtgctt

SEQ ID NO: 1025847 - DNA, 25 bp, Homo sapien
tccccaaatctgagcggccaaaggt

SEQ ID NO: 1025848 - DNA, 25 bp, Homo sapien
tcagacaagtggaatcggagcccca

SEQ ID NO: 1025849 - DNA, 25 bp, Homo sapien
tgcttcgtgagcctcccgtggagga

SEQ ID NO: 1025850 - DNA, 25 bp, Homo sapien
ctcttcccatgtgtgaacgggatgt

SEQ ID NO: 1025851 - DNA, 25 bp, Homo sapien
cccatgtgtgaacgggatgtaccgg

SEQ ID NO: 1025852 - DNA, 25 bp, Homo sapien
atgtgtgaacgggatgtaccggtac

SEQ ID NO: 1025853 - DNA, 25 bp, Homo sapien
cttcccatgtgtgaacgggatgtac

SEQ ID NO: 1025854 - DNA, 25 bp, Homo sapien
ctagctggcgaaggccttgccggca

SEQ ID NO: 1025855 - DNA, 25 bp, Homo sapien
gctggcgaaggccttgccggcatcc

SEQ ID NO: 1025856 - DNA, 25 bp, Homo sapien
gaaggccttgccggcatcctccttg

SEQ ID NO: 1025857 - DNA, 25 bp, Homo sapien
tggcgaaggccttgccggcatcctc

SEQ ID NO: 1025858 - DNA, 25 bp, Homo sapien
gttacaaatcattgaagctcctttt

SEQ ID NO: 1025859 - DNA, 25 bp, Homo sapien
ccctcgtaatcaactactttatgtg

SEQ ID NO: 1025860 - DNA, 25 bp, Homo sapien
tgttcttgcaacacgtgaggcagcc

SEQ ID NO: 1025861 - DNA, 25 bp, Homo sapien
cattgttaacaatggctcaaaactg

SEQ ID NO: 1025862 - DNA, 25 bp, Homo sapien
aatccatgcgatttggtttaagcgc

SEQ ID NO: 1025863 - DNA, 25 bp, Homo sapien
cgatttggtttaagcgccagtttct

SEQ ID NO: 1025864 - DNA, 25 bp, Homo sapien
aaaagaaatccatgcgatttggttt

SEQ ID NO: 1025865 - DNA, 25 bp, Homo sapien
ggtttaagcgccagtttcttctaga

SEQ ID NO: 1025866 - DNA, 25 bp, Homo sapien
cgttaagttctttcggacacgcagg

SEQ ID NO: 1025867 - DNA, 25 bp, Homo sapien
ttagaaccccacacagttacttgac

SEQ ID NO: 1025868 - DNA, 25 bp, Homo sapien
ttccatccgtgagaaacacttgaac

SEQ ID NO: 1025869 - DNA, 25 bp, Homo sapien
gaatcaggctagatcatccctcggg

SEQ ID NO: 1025870 - DNA, 25 bp, Homo sapien
ttccctgctgacgtaaaacacctgg

SEQ ID NO: 1025871 - DNA, 25 bp, Homo sapien
tgacatgcaagtgggttccgcctct

SEQ ID NO: 1025872 - DNA, 25 bp, Homo sapien
taaaatgcctcgagggcgtgtgcca

SEQ ID NO: 1025873 - DNA, 25 bp, Homo sapien
cactggctatcttgggtcagggaca

SEQ ID NO: 1025874 - DNA, 25 bp, Homo sapien
ttcagccagtgcagtgagaacagca

SEQ ID NO: 1025875 - DNA, 25 bp, Homo sapien
ctcagcctgagacgcacagagaggt

SEQ ID NO: 1025876 - DNA, 25 bp, Homo sapien
caatacacgtcaaggtcgcttccag

SEQ ID NO: 1025877 - DNA, 25 bp, Homo sapien
acctccgtcggaagcatttggcaca

SEQ ID NO: 1025878 - DNA, 25 bp, Homo sapien
gtgcttttcgcgcaggattactggg

SEQ ID NO: 1025879 - DNA, 25 bp, Homo sapien
tgagagcccgcgcagctcaaagggc

SEQ ID NO: 1025880 - DNA, 25 bp, Homo sapien
aagacccaagcgaaagcctccgtct

SEQ ID NO: 1025881 - DNA, 25 bp, Homo sapien
ccagccgtaaatgggcctgcagcgt

SEQ ID NO: 1025882 - DNA, 25 bp, Homo sapien
gcactgtttcccacggaggctccag

SEQ ID NO: 1025883 - DNA, 25 bp, Homo sapien
cactgtttcccacggaggctccagg

SEQ ID NO: 1025884 - DNA, 25 bp, Homo sapien
cttgggcctccctcgtgggtcctct

SEQ ID NO: 1025885 - DNA, 25 bp, Homo sapien
ttgggcctccctcgtgggtcctctc

SEQ ID NO: 1025886 - DNA, 25 bp, Homo sapien
tgggcctccctcgtgggtcctctcc

SEQ ID NO: 1025887 - DNA, 25 bp, Homo sapien
agcttgggcctccctcgtgggtcct

SEQ ID NO: 1025888 - DNA, 25 bp, Homo sapien
gcacagcccaggctatgcagtgctc

SEQ ID NO: 1025889 - DNA, 25 bp, Homo sapien
tgctcgcaggacagggccggactct

SEQ ID NO: 1025890 - DNA, 25 bp, Homo sapien
agcccaggctatgcagtgctcgcag

SEQ ID NO: 1025891 - DNA, 25 bp, Homo sapien
ccaggctatgcagtgctcgcaggac

SEQ ID NO: 1025892 - DNA, 25 bp, Homo sapien
ggacagccaagtcgaggccatgtgc

SEQ ID NO: 1025893 - DNA, 25 bp, Homo sapien
aaaggagaggccgtcataagcgcac

SEQ ID NO: 1025894 - DNA, 25 bp, Homo sapien
cgtcataagcgcacaggtcaggtgt

SEQ ID NO: 1025895 - DNA, 25 bp, Homo sapien
acagccaagtcgaggccatgtgcaa

SEQ ID NO: 1025896 - DNA, 25 bp, Homo sapien
agcccaaggcctccactgtggattg

SEQ ID NO: 1025897 - DNA, 25 bp, Homo sapien
ggccaaccaggaatggcacggctga

SEQ ID NO: 1025898 - DNA, 25 bp, Homo sapien
gatagatggatttacggatggatag

SEQ ID NO: 1025899 - DNA, 25 bp, Homo sapien
tggattgaagctcgaccgtgcagac

SEQ ID NO: 1025900 - DNA, 25 bp, Homo sapien
aaactcaaggaccagcaaataggac

SEQ ID NO: 1025901 - DNA, 25 bp, Homo sapien
gggaaactcaaggaccagcaaatag

SEQ ID NO: 1025902 - DNA, 25 bp, Homo sapien
gaaactcaaggaccagcaaatagga

SEQ ID NO: 1025903 - DNA, 25 bp, Homo sapien
ggaaactcaaggaccagcaaatagg

SEQ ID NO: 1025904 - DNA, 25 bp, Homo sapien
tgaactttgagttggcaagagccga

SEQ ID NO: 1025905 - DNA, 25 bp, Homo sapien
tggcttgagggtcccagtccagctt

SEQ ID NO: 1025906 - DNA, 25 bp, Homo sapien
tacggacagcttcagattaatcccc

SEQ ID NO: 1025907 - DNA, 25 bp, Homo sapien
caaggatgaatatggtggagcccac

SEQ ID NO: 1025908 - DNA, 25 bp, Homo sapien
taccaaagctcagttccgtgcaggg

SEQ ID NO: 1025909 - DNA, 25 bp, Homo sapien
ggcctcggctcagatacagtgtcct

SEQ ID NO: 1025910 - DNA, 25 bp, Homo sapien
aaaggctctgatgggtgacaccctg

SEQ ID NO: 1025911 - DNA, 25 bp, Homo sapien
ggagaacagaaagctgccgcagcaa

SEQ ID NO: 1025912 - DNA, 25 bp, Homo sapien
caaccgtgtcaggaagtgcgaggct

SEQ ID NO: 1025913 - DNA, 25 bp, Homo sapien
tggcctggccgcacagggagacaaa

SEQ ID NO: 1025914 - DNA, 25 bp, Homo sapien
ctggcctggccgcacagggagacaa

SEQ ID NO: 1025915 - DNA, 25 bp, Homo sapien
gaccccacaaccgtgtcaggaagtg

SEQ ID NO: 1025916 - DNA, 25 bp, Homo sapien
ctggagcccgcctggctacgcccac

SEQ ID NO: 1025917 - DNA, 25 bp, Homo sapien
cacgctgtgtcccttggatcgcgag

SEQ ID NO: 1025918 - DNA, 25 bp, Homo sapien
agggccagcgagtccaagccggctc

SEQ ID NO: 1025919 - DNA, 25 bp, Homo sapien
agctcccagcagaggtaccggaggc

SEQ ID NO: 1025920 - DNA, 25 bp, Homo sapien
tgtttcaatacctgcggtggcccct

SEQ ID NO: 1025921 - DNA, 25 bp, Homo sapien
gcagtgggagtgcaggagccgtgcc

SEQ ID NO: 1025922 - DNA, 25 bp, Homo sapien
ctgagcagttcctgcggcagtggga

SEQ ID NO: 1025923 - DNA, 25 bp, Homo sapien
tccccgaggcggctggaatgagcac

SEQ ID NO: 1025924 - DNA, 25 bp, Homo sapien
gagaccggcaggttcctgagcagtt

SEQ ID NO: 1025925 - DNA, 25 bp, Homo sapien
ctccaatcggcacagacctagactt

SEQ ID NO: 1025926 - DNA, 25 bp, Homo sapien
caatcggcacagacctagacttggc

SEQ ID NO: 1025927 - DNA, 25 bp, Homo sapien
gcacagacctagacttggctggccc

SEQ ID NO: 1025928 - DNA, 25 bp, Homo sapien
tcggcacagacctagacttggctgg

SEQ ID NO: 1025929 - DNA, 25 bp, Homo sapien
caccacatcacccgccaactcctca

SEQ ID NO: 1025930 - DNA, 25 bp, Homo sapien
ctttctggccaccttttccttggtg

SEQ ID NO: 1025931 - DNA, 25 bp, Homo sapien
ttctggccaccttttccttggtgcc

SEQ ID NO: 1025932 - DNA, 25 bp, Homo sapien
tttccaccacatcacccgccaactc

SEQ ID NO: 1025933 - DNA, 25 bp, Homo sapien
tctgctcagcctccctgcccagaac

SEQ ID NO: 1025934 - DNA, 25 bp, Homo sapien
cctctgctcagcctccctgcccaga

SEQ ID NO: 1025935 - DNA, 25 bp, Homo sapien
agcctctgctcagcctccctgccca

SEQ ID NO: 1025936 - DNA, 25 bp, Homo sapien
cagcctctgctcagcctccctgccc

SEQ ID NO: 1025937 - DNA, 25 bp, Homo sapien
cttgtcggggtgtagcctgggccag

SEQ ID NO: 1025938 - DNA, 25 bp, Homo sapien
cggggtgtagcctgggccagcagcg

SEQ ID NO: 1025939 - DNA, 25 bp, Homo sapien
tgtcggggtgtagcctgggccagca

SEQ ID NO: 1025940 - DNA, 25 bp, Homo sapien
tcccttgtcggggtgtagcctgggc

SEQ ID NO: 1025941 - DNA, 25 bp, Homo sapien
cgggcagaatgttggcgctcaagaa

SEQ ID NO: 1025942 - DNA, 25 bp, Homo sapien
agcaactgaaagctgggactggctg

SEQ ID NO: 1025943 - DNA, 25 bp, Homo sapien
gggagccatcatggagggactgagg

SEQ ID NO: 1025944 - DNA, 25 bp, Homo sapien
ccacgggcagaatgttggcgctcaa

SEQ ID NO: 1025945 - DNA, 25 bp, Homo sapien
catcactgcccaccgcttcagggct

SEQ ID NO: 1025946 - DNA, 25 bp, Homo sapien
ttgtggggtcctcaccgcctcatct

SEQ ID NO: 1025947 - DNA, 25 bp, Homo sapien
gagagagtcggcagccaggtgccag

SEQ ID NO: 1025948 - DNA, 25 bp, Homo sapien
cttcagggctgagggtgtgagccag

SEQ ID NO: 1025949 - DNA, 25 bp, Homo sapien
ctctgagttcagtggggccccacat

SEQ ID NO: 1025950 - DNA, 25 bp, Homo sapien
atccaagctgttcgatcctcccaga

SEQ ID NO: 1025951 - DNA, 25 bp, Homo sapien
ctttgctggctcagtattagggggc

SEQ ID NO: 1025952 - DNA, 25 bp, Homo sapien
ttcgatcctcccagagggaaacacg

SEQ ID NO: 1025953 - DNA, 25 bp, Homo sapien
tcaaagagctcggtgcacatacatc

SEQ ID NO: 1025954 - DNA, 25 bp, Homo sapien
cagcagctcgtcgagtttcctgggt

SEQ ID NO: 1025955 - DNA, 25 bp, Homo sapien
gatgcctgtgaaggaacctcctgcg

SEQ ID NO: 1025956 - DNA, 25 bp, Homo sapien
gatgttgatggcagcagctcgtcga

SEQ ID NO: 1025957 - DNA, 25 bp, Homo sapien
ggcggctcccgcgtccattgtctcc

SEQ ID NO: 1025958 - DNA, 25 bp, Homo sapien
tcccgcgtccattgtctccgtggcg

SEQ ID NO: 1025959 - DNA, 25 bp, Homo sapien
gcatcgccccgccagctcgggcggc

SEQ ID NO: 1025960 - DNA, 25 bp, Homo sapien
tctgcggggcggctcccgcgtccat

SEQ ID NO: 1025961 - DNA, 25 bp, Homo sapien
aggaggaaggagccccagcccagac

SEQ ID NO: 1025962 - DNA, 25 bp, Homo sapien
aggaaggagccccagcccagactca

SEQ ID NO: 1025963 - DNA, 25 bp, Homo sapien
gaaggagccccagcccagactcagc

SEQ ID NO: 1025964 - DNA, 25 bp, Homo sapien
ccagactcagcccagccctggggag

SEQ ID NO: 1025965 - DNA, 25 bp, Homo sapien
ctgcctgaagctggccccggaaagg

SEQ ID NO: 1025966 - DNA, 25 bp, Homo sapien
ctgaagctggccccggaaaggtgct

SEQ ID NO: 1025967 - DNA, 25 bp, Homo sapien
tggccccggaaaggtgcttgtgcat

SEQ ID NO: 1025968 - DNA, 25 bp, Homo sapien
aagctggccccggaaaggtgcttgt

SEQ ID NO: 1025969 - DNA, 25 bp, Homo sapien
aggccttgccgcagagcacatgcat

SEQ ID NO: 1025970 - DNA, 25 bp, Homo sapien
catcctctgtattccccggttcccg

SEQ ID NO: 1025971 - DNA, 25 bp, Homo sapien
atacatcctctgtattccccggttc

SEQ ID NO: 1025972 - DNA, 25 bp, Homo sapien
tcaggccttgccgcagagcacatgc

SEQ ID NO: 1025973 - DNA, 25 bp, Homo sapien
gtcagcaaagcgttcctgacaaggg

SEQ ID NO: 1025974 - DNA, 25 bp, Homo sapien
tcctgacaagggtcacctttgcctg

SEQ ID NO: 1025975 - DNA, 25 bp, Homo sapien
tcagcaaagcgttcctgacaagggt

SEQ ID NO: 1025976 - DNA, 25 bp, Homo sapien
ggtcacctttgcctgggtttggctg

SEQ ID NO: 1025977 - DNA, 25 bp, Homo sapien
cctccatgtcgtggtgctccagaca

SEQ ID NO: 1025978 - DNA, 25 bp, Homo sapien
ccctccatgtcgtggtgctccagac

SEQ ID NO: 1025979 - DNA, 25 bp, Homo sapien
cagcaaaggagccacgtacaacagt

SEQ ID NO: 1025980 - DNA, 25 bp, Homo sapien
tgcagagccactgatcctgggatgc

SEQ ID NO: 1025981 - DNA, 25 bp, Homo sapien
gacgaaacgagcattctggaggccc

SEQ ID NO: 1025982 - DNA, 25 bp, Homo sapien
gccgctccctaagaatggagtgagg

SEQ ID NO: 1025983 - DNA, 25 bp, Homo sapien
gtgggggtgctgaatctgcattttc

SEQ ID NO: 1025984 - DNA, 25 bp, Homo sapien
ccagggggatgtgaagctgctacag

SEQ ID NO: 1025985 - DNA, 25 bp, Homo sapien
gctgctacagctccgaccaggactc

SEQ ID NO: 1025986 - DNA, 25 bp, Homo sapien
gaatctgcattttcctccgtccagg

SEQ ID NO: 1025987 - DNA, 25 bp, Homo sapien
ccagacagcgtgtgctgggtggccg

SEQ ID NO: 1025988 - DNA, 25 bp, Homo sapien
ggccctgccccaaattgcacctcaa

SEQ ID NO: 1025989 - DNA, 25 bp, Homo sapien
attgcacctcaagtcctatttccag

SEQ ID NO: 1025990 - DNA, 25 bp, Homo sapien
tcctggagcgcactcggcccagctg

SEQ ID NO: 1025991 - DNA, 25 bp, Homo sapien
gggcttcctccagaagccctactgg

SEQ ID NO: 1025992 - DNA, 25 bp, Homo sapien
gagtagaggggcttcctccagaagc

SEQ ID NO: 1025993 - DNA, 25 bp, Homo sapien
ctggagtagaggggcttcctccaga

SEQ ID NO: 1025994 - DNA, 25 bp, Homo sapien
ggcttcctccagaagccctactggg

SEQ ID NO: 1025995 - DNA, 25 bp, Homo sapien
acatgttggtgggtcgcggctctct

SEQ ID NO: 1025996 - DNA, 25 bp, Homo sapien
ataggacatgttggtgggtcgcggc

SEQ ID NO: 1025997 - DNA, 25 bp, Homo sapien
tccacggtgataggacatgttggtg

SEQ ID NO: 1025998 - DNA, 25 bp, Homo sapien
catggcgcagactcccacagggctg

SEQ ID NO: 1025999 - DNA, 25 bp, Homo sapien
gggctccctgctgccaacggtggct

SEQ ID NO: 1026000 - DNA, 25 bp, Homo sapien
gctccctgctgccaacggtggctga

SEQ ID NO: 1026001 - DNA, 25 bp, Homo sapien
tccctgctgccaacggtggctgacc

SEQ ID NO: 1026002 - DNA, 25 bp, Homo sapien
cctgctgccaacggtggctgaccct

SEQ ID NO: 1026003 - DNA, 25 bp, Homo sapien
aagagcacgttagggtcccaggccg

SEQ ID NO: 1026004 - DNA, 25 bp, Homo sapien
ggtggggccaactcgctgcccagcc

SEQ ID NO: 1026005 - DNA, 25 bp, Homo sapien
gaggggtcccattggcctgtcctgc

SEQ ID NO: 1026006 - DNA, 25 bp, Homo sapien
gggccaagagcacgttagggtccca

SEQ ID NO: 1026007 - DNA, 25 bp, Homo sapien
tggttccaggctcagcaatgcagtg

SEQ ID NO: 1026008 - DNA, 25 bp, Homo sapien
acacggcggccaccgtggttccagg

SEQ ID NO: 1026009 - DNA, 25 bp, Homo sapien
caggctcagcaatgcagtgggggct

SEQ ID NO: 1026010 - DNA, 25 bp, Homo sapien
gcggccaccgtggttccaggctcag

SEQ ID NO: 1026011 - DNA, 25 bp, Homo sapien
ttcagccaagatgaaatacttccac

SEQ ID NO: 1026012 - DNA, 25 bp, Homo sapien
agccaagatgaaatacttccacggg

SEQ ID NO: 1026013 - DNA, 25 bp, Homo sapien
cagccaagatgaaatacttccacgg

SEQ ID NO: 1026014 - DNA, 25 bp, Homo sapien
ctttcagccaagatgaaatacttcc

SEQ ID NO: 1026015 - DNA, 25 bp, Homo sapien
gctgctcacggtggccgctcccaaa

SEQ ID NO: 1026016 - DNA, 25 bp, Homo sapien
ctgctgctcacggtggccgctccca

SEQ ID NO: 1026017 - DNA, 25 bp, Homo sapien
ctcctgctgctcacggtggccgctc

SEQ ID NO: 1026018 - DNA, 25 bp, Homo sapien
tgctcacggtggccgctcccaaagg

SEQ ID NO: 1026019 - DNA, 25 bp, Homo sapien
tgtagcacggtgggggatgggcggc

SEQ ID NO: 1026020 - DNA, 25 bp, Homo sapien
gcttgtagcacggtgggggatgggc

SEQ ID NO: 1026021 - DNA, 25 bp, Homo sapien
tagcacggtgggggatgggcggccc

SEQ ID NO: 1026022 - DNA, 25 bp, Homo sapien
gcacggtgggggatgggcggcccag

SEQ ID NO: 1026023 - DNA, 25 bp, Homo sapien
acggcgcccacagaccacatctcga

SEQ ID NO: 1026024 - DNA, 25 bp, Homo sapien
cacatctcgagcacagtgggggcac

SEQ ID NO: 1026025 - DNA, 25 bp, Homo sapien
caagcagcaccacacggggaagggc

SEQ ID NO: 1026026 - DNA, 25 bp, Homo sapien
cagacttgcgttttggcaaattgtc

SEQ ID NO: 1026027 - DNA, 25 bp, Homo sapien
tcatctttgcaatgggcgataacag

SEQ ID NO: 1026028 - DNA, 25 bp, Homo sapien
catctttgcaatgggcgataacagg

SEQ ID NO: 1026029 - DNA, 25 bp, Homo sapien
acagggcggactggaaacatatgcc

SEQ ID NO: 1026030 - DNA, 25 bp, Homo sapien
gataacagggcggactggaaacata

SEQ ID NO: 1026031 - DNA, 25 bp, Homo sapien
cccgccaccgttgcccaaagtcctg

SEQ ID NO: 1026032 - DNA, 25 bp, Homo sapien
ctggaagccatagcagccctcccca

SEQ ID NO: 1026033 - DNA, 25 bp, Homo sapien
gggctgcacacaggaacaaggaccc

SEQ ID NO: 1026034 - DNA, 25 bp, Homo sapien
actggggtgcactttcctctgctgg

SEQ ID NO: 1026035 - DNA, 25 bp, Homo sapien
actcggtgcattgctggttcagccc

SEQ ID NO: 1026036 - DNA, 25 bp, Homo sapien
gacacggtccactcggtgcattgct

SEQ ID NO: 1026037 - DNA, 25 bp, Homo sapien
taaagggacacggtccactcggtgc

SEQ ID NO: 1026038 - DNA, 25 bp, Homo sapien
caagtaaagggacacggtccactcg

SEQ ID NO: 1026039 - DNA, 25 bp, Homo sapien
ctcaacaggtatggagggtgaagac

SEQ ID NO: 1026040 - DNA, 25 bp, Homo sapien
cccacggcacggctcaacaggtatg

SEQ ID NO: 1026041 - DNA, 25 bp, Homo sapien
tccacccacggcacggctcaacagg

SEQ ID NO: 1026042 - DNA, 25 bp, Homo sapien
acggcacggctcaacaggtatggag

SEQ ID NO: 1026043 - DNA, 25 bp, Homo sapien
ggctgtgagacctgctctccgcaga

SEQ ID NO: 1026044 - DNA, 25 bp, Homo sapien
gtggctgtgagacctgctctccgca

SEQ ID NO: 1026045 - DNA, 25 bp, Homo sapien
tggctgtgagacctgctctccgcag

SEQ ID NO: 1026046 - DNA, 25 bp, Homo sapien
ggtcagacactgaggaaaccgcttc

SEQ ID NO: 1026047 - DNA, 25 bp, Homo sapien
ctgaggaaaccgcttccttcaggga

SEQ ID NO: 1026048 - DNA, 25 bp, Homo sapien
cagacactgaggaaaccgcttcctt

SEQ ID NO: 1026049 - DNA, 25 bp, Homo sapien
tgaggaaaccgcttccttcagggag

SEQ ID NO: 1026050 - DNA, 25 bp, Homo sapien
gcagccaggactcggggtgagccac

SEQ ID NO: 1026051 - DNA, 25 bp, Homo sapien
ggtgcagccaggactcggggtgagc

SEQ ID NO: 1026052 - DNA, 25 bp, Homo sapien
gaggctgtgggtaccagggtgcagc

SEQ ID NO: 1026053 - DNA, 25 bp, Homo sapien
agggtgcagccaggactcggggtga

SEQ ID NO: 1026054 - DNA, 25 bp, Homo sapien
cctcctgggaccgggatggttcatg

SEQ ID NO: 1026055 - DNA, 25 bp, Homo sapien
gaccgggatggttcatgttccacac

SEQ ID NO: 1026056 - DNA, 25 bp, Homo sapien
tgggaccgggatggttcatgttcca

SEQ ID NO: 1026057 - DNA, 25 bp, Homo sapien
ctgggagccgctcccagcacgcgcc

SEQ ID NO: 1026058 - DNA, 25 bp, Homo sapien
cttacacctgggtgccgccccaggc

SEQ ID NO: 1026059 - DNA, 25 bp, Homo sapien
ccccggatggaccaagatgccttgg

SEQ ID NO: 1026060 - DNA, 25 bp, Homo sapien
agttgccccggatggaccaagatgc

SEQ ID NO: 1026061 - DNA, 25 bp, Homo sapien
ttgccccggatggaccaagatgcct

SEQ ID NO: 1026062 - DNA, 25 bp, Homo sapien
gtagttgccccggatggaccaagat

SEQ ID NO: 1026063 - DNA, 25 bp, Homo sapien
ttcgtggggtgcctcggtttcagct

SEQ ID NO: 1026064 - DNA, 25 bp, Homo sapien
gttctgtcctacatatgtctccaag

SEQ ID NO: 1026065 - DNA, 25 bp, Homo sapien
agattctcggctgcagccccgttca

SEQ ID NO: 1026066 - DNA, 25 bp, Homo sapien
aaacgcttcccgatgacctgctgca

SEQ ID NO: 1026067 - DNA, 25 bp, Homo sapien
ccagggcctgtgtccgcctggctgg

SEQ ID NO: 1026068 - DNA, 25 bp, Homo sapien
cagggcctgtgtccgcctggctggg

SEQ ID NO: 1026069 - DNA, 25 bp, Homo sapien
agggtcccagggcctgtgtccgcct

SEQ ID NO: 1026070 - DNA, 25 bp, Homo sapien
gcactgccaagggtcattgaggtga

SEQ ID NO: 1026071 - DNA, 25 bp, Homo sapien
gatggtgacggtgacggctgcagcc

SEQ ID NO: 1026072 - DNA, 25 bp, Homo sapien
gcgtgctgctacaccccttcctgtg

SEQ ID NO: 1026073 - DNA, 25 bp, Homo sapien
gggaggccgagttccagcagtagct

SEQ ID NO: 1026074 - DNA, 25 bp, Homo sapien
gtgccaatcccagttaccggcacgg

SEQ ID NO: 1026075 - DNA, 25 bp, Homo sapien
gagggacaccgggccctgtgctggc

SEQ ID NO: 1026076 - DNA, 25 bp, Homo sapien
gcgcagagcccatgccgatcgcagc

SEQ ID NO: 1026077 - DNA, 25 bp, Homo sapien
ggccggcgggtgccaatcccagtta

SEQ ID NO: 1026078 - DNA, 25 bp, Homo sapien
ccctgaggacgcacagcaactgcag

SEQ ID NO: 1026079 - DNA, 25 bp, Homo sapien
gctcagggccacctttgccaacctc

SEQ ID NO: 1026080 - DNA, 25 bp, Homo sapien
cagagtgtaactccagggaaccctg

SEQ ID NO: 1026081 - DNA, 25 bp, Homo sapien
ccacctttgccaacctcgatcaggg

SEQ ID NO: 1026082 - DNA, 25 bp, Homo sapien
cctcggcggcacgtggagtctgtaa

SEQ ID NO: 1026083 - DNA, 25 bp, Homo sapien
aggaactgggacgccatcgtcatca

SEQ ID NO: 1026084 - DNA, 25 bp, Homo sapien
tcattagctgtgcagatggagggct

SEQ ID NO: 1026085 - DNA, 25 bp, Homo sapien
tctgtaaggactgttctgctggctc

SEQ ID NO: 1026086 - DNA, 25 bp, Homo sapien
tggcagccacggtgggggagccttt

SEQ ID NO: 1026087 - DNA, 25 bp, Homo sapien
cctgaaaagtcaccagatggagcct

SEQ ID NO: 1026088 - DNA, 25 bp, Homo sapien
gagggagccaggctcgtggcagcca

SEQ ID NO: 1026089 - DNA, 25 bp, Homo sapien
gcctttcctgaaaagtcaccagatg

SEQ ID NO: 1026090 - DNA, 25 bp, Homo sapien
cagccaccgtccaggacaccccaga

SEQ ID NO: 1026091 - DNA, 25 bp, Homo sapien
ctctctgaaggcaggtgcacggcct

SEQ ID NO: 1026092 - DNA, 25 bp, Homo sapien
ggccttgcccccagccaccgtccag

SEQ ID NO: 1026093 - DNA, 25 bp, Homo sapien
gaaggcaggtgcacggccttgcccc

SEQ ID NO: 1026094 - DNA, 25 bp, Homo sapien
tccaccttccaccggccccagagca

SEQ ID NO: 1026095 - DNA, 25 bp, Homo sapien
cctccaccttccaccggccccagag

SEQ ID NO: 1026096 - DNA, 25 bp, Homo sapien
accttccaccggccccagagcaggg

SEQ ID NO: 1026097 - DNA, 25 bp, Homo sapien
caccttccaccggccccagagcagg

SEQ ID NO: 1026098 - DNA, 25 bp, Homo sapien
cagggccaccaagagtccctgaggc

SEQ ID NO: 1026099 - DNA, 25 bp, Homo sapien
accaagagtccctgaggcagccgca

SEQ ID NO: 1026100 - DNA, 25 bp, Homo sapien
ggccaccaagagtccctgaggcagc

SEQ ID NO: 1026101 - DNA, 25 bp, Homo sapien
aagagtccctgaggcagccgcatcc

SEQ ID NO: 1026102 - DNA, 25 bp, Homo sapien
gcagggacctcgaagtcctcctccc

SEQ ID NO: 1026103 - DNA, 25 bp, Homo sapien
tctgtccctgtgaggccatgatcca

SEQ ID NO: 1026104 - DNA, 25 bp, Homo sapien
atgatccaacacgtagcaggcgctg

SEQ ID NO: 1026105 - DNA, 25 bp, Homo sapien
agagcactgcctgaccccgggacat

SEQ ID NO: 1026106 - DNA, 25 bp, Homo sapien
gtcctggtcgggcagatataggctc

SEQ ID NO: 1026107 - DNA, 25 bp, Homo sapien
tggtcgggcagatataggctccgtc

SEQ ID NO: 1026108 - DNA, 25 bp, Homo sapien
ccggcagtcctggtcgggcagatat

SEQ ID NO: 1026109 - DNA, 25 bp, Homo sapien
cggcagtcctggtcgggcagatata

SEQ ID NO: 1026110 - DNA, 25 bp, Homo sapien
gcagtcagcacagagccaacccagg

SEQ ID NO: 1026111 - DNA, 25 bp, Homo sapien
tgctctcggcggaagcaggtcagca

SEQ ID NO: 1026112 - DNA, 25 bp, Homo sapien
aggtcagcaggcgtttctgggctct

SEQ ID NO: 1026113 - DNA, 25 bp, Homo sapien
tgccgtggaattagattagggagcc

SEQ ID NO: 1026114 - DNA, 25 bp, Homo sapien
aggacagggaggtgccagggctggg

SEQ ID NO: 1026115 - DNA, 25 bp, Homo sapien
acagggaggtgccagggctgggcat

SEQ ID NO: 1026116 - DNA, 25 bp, Homo sapien
gcagagcccaggacagggaggtgcc

SEQ ID NO: 1026117 - DNA, 25 bp, Homo sapien
cagagcccaggacagggaggtgcca

SEQ ID NO: 1026118 - DNA, 25 bp, Homo sapien
acaaggactggaaggttccgggcag

SEQ ID NO: 1026119 - DNA, 25 bp, Homo sapien
gaaggttccgggcagctgctcgcct

SEQ ID NO: 1026120 - DNA, 25 bp, Homo sapien
tccagcaacaaggactggaaggttc

SEQ ID NO: 1026121 - DNA, 25 bp, Homo sapien
aggctctactggctccagcaacaag

SEQ ID NO: 1026122 - DNA, 25 bp, Homo sapien
cagggcacgtttgtccccacattct

SEQ ID NO: 1026123 - DNA, 25 bp, Homo sapien
tccacggtcaccgagctgtggcgga

SEQ ID NO: 1026124 - DNA, 25 bp, Homo sapien
atgcccagggcacgtttgtccccac

SEQ ID NO: 1026125 - DNA, 25 bp, Homo sapien
tttctccacggtcaccgagctgtgg

SEQ ID NO: 1026126 - DNA, 25 bp, Homo sapien
cagcgctggcgacaggacctccgtg

SEQ ID NO: 1026127 - DNA, 25 bp, Homo sapien
gcagtggcagcgctggcgacaggac

SEQ ID NO: 1026128 - DNA, 25 bp, Homo sapien
attggcctgaccgtcacctgctgtc

SEQ ID NO: 1026129 - DNA, 25 bp, Homo sapien
ctggcattggcctgaccgtcacctg

SEQ ID NO: 1026130 - DNA, 25 bp, Homo sapien
acggaggccacagaggcccaccggc

SEQ ID NO: 1026131 - DNA, 25 bp, Homo sapien
tcacggaggccacagaggcccaccg

SEQ ID NO: 1026132 - DNA, 25 bp, Homo sapien
ctgcttcacggaggccacagaggcc

SEQ ID NO: 1026133 - DNA, 25 bp, Homo sapien
cttcacggaggccacagaggcccac

SEQ ID NO: 1026134 - DNA, 25 bp, Homo sapien
tcgggggagggccatggaccagaca

SEQ ID NO: 1026135 - DNA, 25 bp, Homo sapien
cgccagccaggccaccgttcccttg

SEQ ID NO: 1026136 - DNA, 25 bp, Homo sapien
tgccactctgaagacagcaccacac

SEQ ID NO: 1026137 - DNA, 25 bp, Homo sapien
gagctgccactctgaagacagcacc

SEQ ID NO: 1026138 - DNA, 25 bp, Homo sapien
ctgccactctgaagacagcaccaca

SEQ ID NO: 1026139 - DNA, 25 bp, Homo sapien
agctgccactctgaagacagcacca

SEQ ID NO: 1026140 - DNA, 25 bp, Homo sapien
cctcgcaggagagacacggccgtca

SEQ ID NO: 1026141 - DNA, 25 bp, Homo sapien
ggcacagccactcctcgcaggagag

SEQ ID NO: 1026142 - DNA, 25 bp, Homo sapien
ctcgcaggagagacacggccgtcag

SEQ ID NO: 1026143 - DNA, 25 bp, Homo sapien
ctcgttcttgcgtgagggcctccag

SEQ ID NO: 1026144 - DNA, 25 bp, Homo sapien
gtagtagaagcggaccaggcccttg

SEQ ID NO: 1026145 - DNA, 25 bp, Homo sapien
tgcaggagcggtgctcgtccaggta

SEQ ID NO: 1026146 - DNA, 25 bp, Homo sapien
tcttggccttctcgttcttgcgtga

SEQ ID NO: 1026147 - DNA, 25 bp, Homo sapien
cagggactctgatttgtccccaccc

SEQ ID NO: 1026148 - DNA, 25 bp, Homo sapien
gtcgtgtccccccagggactctgat

SEQ ID NO: 1026149 - DNA, 25 bp, Homo sapien
ggactctgatttgtccccaccccag

SEQ ID NO: 1026150 - DNA, 25 bp, Homo sapien
gtccccccagggactctgatttgtc

SEQ ID NO: 1026151 - DNA, 25 bp, Homo sapien
tgaagatctgcgagactgcacagcc

SEQ ID NO: 1026152 - DNA, 25 bp, Homo sapien
cgcgctcaggtgcatcgaggctctt

SEQ ID NO: 1026153 - DNA, 25 bp, Homo sapien
agcacgtctccacgttccaaggaag

SEQ ID NO: 1026154 - DNA, 25 bp, Homo sapien
caaagtggctacacgcttggcaact

SEQ ID NO: 1026155 - DNA, 25 bp, Homo sapien
agcgctggaagacctccgactgccg

SEQ ID NO: 1026156 - DNA, 25 bp, Homo sapien
aagctgccgtcagggtagcgctgga

SEQ ID NO: 1026157 - DNA, 25 bp, Homo sapien
gtcagggtagcgctggaagacctcc

SEQ ID NO: 1026158 - DNA, 25 bp, Homo sapien
ggtagcgctggaagacctccgactg

SEQ ID NO: 1026159 - DNA, 25 bp, Homo sapien
tccagcgactcgcggtggctgccgt

SEQ ID NO: 1026160 - DNA, 25 bp, Homo sapien
aggtccagcgactcgcggtggctgc

SEQ ID NO: 1026161 - DNA, 25 bp, Homo sapien
ggtggctgccgtggtagatgctgaa

SEQ ID NO: 1026162 - DNA, 25 bp, Homo sapien
cggtggctgccgtggtagatgctga

SEQ ID NO: 1026163 - DNA, 25 bp, Homo sapien
gccaggctgtcctcgtcgctgatgc

SEQ ID NO: 1026164 - DNA, 25 bp, Homo sapien
ggccagtgacccaggtgcgcgccac

SEQ ID NO: 1026165 - DNA, 25 bp, Homo sapien
ctcgtcgctgatgccggccatgagg

SEQ ID NO: 1026166 - DNA, 25 bp, Homo sapien
ctgatgccggccatgaggtagcgca

SEQ ID NO: 1026167 - DNA, 25 bp, Homo sapien
gtccctgggtctgcattgcccgata

SEQ ID NO: 1026168 - DNA, 25 bp, Homo sapien
gtgtgacccggcaaaggacaggccc

SEQ ID NO: 1026169 - DNA, 25 bp, Homo sapien
tgggtctgcattgcccgataggtgc

SEQ ID NO: 1026170 - DNA, 25 bp, Homo sapien
ttccccagtgtgtgacccggcaaag

SEQ ID NO: 1026171 - DNA, 25 bp, Homo sapien
ttaggggccaacagcgatccatggg

SEQ ID NO: 1026172 - DNA, 25 bp, Homo sapien
ggccaacagcgatccatgggcccag

SEQ ID NO: 1026173 - DNA, 25 bp, Homo sapien
cgagttaggggccaacagcgatcca

SEQ ID NO: 1026174 - DNA, 25 bp, Homo sapien
tggtgccgagttaggggccaacagc

SEQ ID NO: 1026175 - DNA, 25 bp, Homo sapien
gttcttgtcggcctcgtcaaacgtc

SEQ ID NO: 1026176 - DNA, 25 bp, Homo sapien
cggcctcgtcaaacgtctgcttcag

SEQ ID NO: 1026177 - DNA, 25 bp, Homo sapien
tcacgttgagcttgtgcagcagctg

SEQ ID NO: 1026178 - DNA, 25 bp, Homo sapien
caggacctcgccaatgctcaggctg

SEQ ID NO: 1026179 - DNA, 25 bp, Homo sapien
tggtgtacccccctcgaggctgcgg

SEQ ID NO: 1026180 - DNA, 25 bp, Homo sapien
ctgctgcgcatcagactgggccctg

SEQ ID NO: 1026181 - DNA, 25 bp, Homo sapien
gggaaagtaacgagctgctgcgcat

SEQ ID NO: 1026182 - DNA, 25 bp, Homo sapien
gggtggttgggcgagggcggcatgg

SEQ ID NO: 1026183 - DNA, 25 bp, Homo sapien
tgcaatgcaaggccttgggtcccca

SEQ ID NO: 1026184 - DNA, 25 bp, Homo sapien
gcaatgcaaggccttgggtccccat

SEQ ID NO: 1026185 - DNA, 25 bp, Homo sapien
ctgcaatgcaaggccttgggtcccc

SEQ ID NO: 1026186 - DNA, 25 bp, Homo sapien
ggtcccggcgggtggacatcatctt

SEQ ID NO: 1026187 - DNA, 25 bp, Homo sapien
gagcaggtagaggtcccggcgggtg

SEQ ID NO: 1026188 - DNA, 25 bp, Homo sapien
ctcttcaaaacccagcgtcccttgg

SEQ ID NO: 1026189 - DNA, 25 bp, Homo sapien
ccttggtggtcatccgtgtccgctt

SEQ ID NO: 1026190 - DNA, 25 bp, Homo sapien
tgcttggctgccccatagagcgcac

SEQ ID NO: 1026191 - DNA, 25 bp, Homo sapien
ctgcttggctgccccatagagcgca

SEQ ID NO: 1026192 - DNA, 25 bp, Homo sapien
gcttggctgccccatagagcgcacc

SEQ ID NO: 1026193 - DNA, 25 bp, Homo sapien
tctgggcatggctcaaactgctcga

SEQ ID NO: 1026194 - DNA, 25 bp, Homo sapien
gatgtcctggcagctctcgagggtc

SEQ ID NO: 1026195 - DNA, 25 bp, Homo sapien
tggctcaaactgctcgatgatgtcc

SEQ ID NO: 1026196 - DNA, 25 bp, Homo sapien
gcagccccttactcttgttttctgg

SEQ ID NO: 1026197 - DNA, 25 bp, Homo sapien
tccacccgtgactgggacatgagct

SEQ ID NO: 1026198 - DNA, 25 bp, Homo sapien
acatgagctggtcacccacgaggta

SEQ ID NO: 1026199 - DNA, 25 bp, Homo sapien
aagtagtggctcagcggctgcgtca

SEQ ID NO: 1026200 - DNA, 25 bp, Homo sapien
gctgcgtcatgtcctggtgcacatg

SEQ ID NO: 1026201 - DNA, 25 bp, Homo sapien
ttcaatgacgtctttgaagaggatc

SEQ ID NO: 1026202 - DNA, 25 bp, Homo sapien
atttgttgatggtttcaatgacgtc

SEQ ID NO: 1026203 - DNA, 25 bp, Homo sapien
gaagtcagagtgtagccatggtgca

SEQ ID NO: 1026204 - DNA, 25 bp, Homo sapien
atggtgcacaatgggctccccgtcg

SEQ ID NO: 1026205 - DNA, 25 bp, Homo sapien
gcagtggttttcgatggacaggatc

SEQ ID NO: 1026206 - DNA, 25 bp, Homo sapien
tgcagtggttttcgatggacaggat

SEQ ID NO: 1026207 - DNA, 25 bp, Homo sapien
ccattgaggagcttgcagtcatcgt

SEQ ID NO: 1026208 - DNA, 25 bp, Homo sapien
catcgtcaatctcatcagcactgtc

SEQ ID NO: 1026209 - DNA, 25 bp, Homo sapien
gagcttgcagtcatcgtcaatctca

SEQ ID NO: 1026210 - DNA, 25 bp, Homo sapien
cagtcatcgtcaatctcatcagcac

SEQ ID NO: 1026211 - DNA, 25 bp, Homo sapien
cttgcgtccgagctttccagatggg

SEQ ID NO: 1026212 - DNA, 25 bp, Homo sapien
tgagggaatccagtttcctcttagc

SEQ ID NO: 1026213 - DNA, 25 bp, Homo sapien
tctacacgctttcgattggtggatg

SEQ ID NO: 1026214 - DNA, 25 bp, Homo sapien
gaatcttcgactctttgatgaggga

SEQ ID NO: 1026215 - DNA, 25 bp, Homo sapien
ctggctgtcgggggggcctgtcggc

SEQ ID NO: 1026216 - DNA, 25 bp, Homo sapien
gtcgggggggcctgtcggcatcagg

SEQ ID NO: 1026217 - DNA, 25 bp, Homo sapien
cccacaggctggctgtcgggggggc

SEQ ID NO: 1026218 - DNA, 25 bp, Homo sapien
ggcctgtcggcatcaggggtgtcac

SEQ ID NO: 1026219 - DNA, 25 bp, Homo sapien
ctccatgtggaaacttccccacgtg

SEQ ID NO: 1026220 - DNA, 25 bp, Homo sapien
tccatgtggaaacttccccacgtgg

SEQ ID NO: 1026221 - DNA, 25 bp, Homo sapien
ctgagggccattcgctccatgtgga

SEQ ID NO: 1026222 - DNA, 25 bp, Homo sapien
agggccattcgctccatgtggaaac

SEQ ID NO: 1026223 - DNA, 25 bp, Homo sapien
ctggacgcgttggaaatcagggcac

SEQ ID NO: 1026224 - DNA, 25 bp, Homo sapien
tggaaatcagggcacgtcgcgtccg

SEQ ID NO: 1026225 - DNA, 25 bp, Homo sapien
atcagggcacgtcgcgtccgcaggc

SEQ ID NO: 1026226 - DNA, 25 bp, Homo sapien
cgttggaaatcagggcacgtcgcgt

SEQ ID NO: 1026227 - DNA, 25 bp, Homo sapien
cacagcaaacagctccgactgctgc

SEQ ID NO: 1026228 - DNA, 25 bp, Homo sapien
gctctcatgaccacagacactcggc

SEQ ID NO: 1026229 - DNA, 25 bp, Homo sapien
acactgctgcaaagaggccactgta

SEQ ID NO: 1026230 - DNA, 25 bp, Homo sapien
tcggcgctcagccacgccacagcaa

SEQ ID NO: 1026231 - DNA, 25 bp, Homo sapien
gcttcccacgacgaggcggccattg

SEQ ID NO: 1026232 - DNA, 25 bp, Homo sapien
gaggcggccattgcgtctgctggcc

SEQ ID NO: 1026233 - DNA, 25 bp, Homo sapien
gagaagcttcccacgacgaggcggc

SEQ ID NO: 1026234 - DNA, 25 bp, Homo sapien
attgcgtctgctggccccggcatcc

SEQ ID NO: 1026235 - DNA, 25 bp, Homo sapien
gagtcctgaccctcatctccctcct

SEQ ID NO: 1026236 - DNA, 25 bp, Homo sapien
cacgctggccgccttcttcagcttg

SEQ ID NO: 1026237 - DNA, 25 bp, Homo sapien
ctcccggggagtcctgaccctcatc

SEQ ID NO: 1026238 - DNA, 25 bp, Homo sapien
tcggctctggcctcccggggagtcc

SEQ ID NO: 1026239 - DNA, 25 bp, Homo sapien
cacccagctccgtgagacgggctcc

SEQ ID NO: 1026240 - DNA, 25 bp, Homo sapien
ccagctccgtgagacgggctccagg

SEQ ID NO: 1026241 - DNA, 25 bp, Homo sapien
ctccgtgagacgggctccagggctc

SEQ ID NO: 1026242 - DNA, 25 bp, Homo sapien
caggtgcagggggtcagaacccctc

SEQ ID NO: 1026243 - DNA, 25 bp, Homo sapien
cctccatctctatgtcgtgggtggc

SEQ ID NO: 1026244 - DNA, 25 bp, Homo sapien
agggcccgggacagcttcatggtct

SEQ ID NO: 1026245 - DNA, 25 bp, Homo sapien
tggccacggacttggtgtacttcac

SEQ ID NO: 1026246 - DNA, 25 bp, Homo sapien
ccatctctatgtcgtgggtggccac

SEQ ID NO: 1026247 - DNA, 25 bp, Homo sapien
ctggttgaagcgtaggtactgcgcc

SEQ ID NO: 1026248 - DNA, 25 bp, Homo sapien
ctcgctgaaggacgacacctgccag

SEQ ID NO: 1026249 - DNA, 25 bp, Homo sapien
tgctggagtccacacggtaggagga

SEQ ID NO: 1026250 - DNA, 25 bp, Homo sapien
ctgctgcagaatctggtgggccttg

SEQ ID NO: 1026251 - DNA, 25 bp, Homo sapien
agtacgtagccgcagccaccgttgg

SEQ ID NO: 1026252 - DNA, 25 bp, Homo sapien
cccaggcttgagtacgtagccgcag

SEQ ID NO: 1026253 - DNA, 25 bp, Homo sapien
ccctctgactggtagttcagggcaa

SEQ ID NO: 1026254 - DNA, 25 bp, Homo sapien
cgttggcgctgaacttggctcggtt

SEQ ID NO: 1026255 - DNA, 25 bp, Homo sapien
ccttctttgcaacgctagcaaggag

SEQ ID NO: 1026256 - DNA, 25 bp, Homo sapien
cagaggtggaagtagctggtccaca

SEQ ID NO: 1026257 - DNA, 25 bp, Homo sapien
gacaagtcctgccatgaatctcatg

SEQ ID NO: 1026258 - DNA, 25 bp, Homo sapien
tccacagcaggagtagcctggtcta

SEQ ID NO: 1026259 - DNA, 25 bp, Homo sapien
gatcacctttgtggctaccgcagca

SEQ ID NO: 1026260 - DNA, 25 bp, Homo sapien
gagccgaggaggtcacatggcttct

SEQ ID NO: 1026261 - DNA, 25 bp, Homo sapien
tgtggctaccgcagcatgtgggaca

SEQ ID NO: 1026262 - DNA, 25 bp, Homo sapien
agtatggatcacctttgtggctacc

SEQ ID NO: 1026263 - DNA, 25 bp, Homo sapien
ccccacataggagactggagccggt

SEQ ID NO: 1026264 - DNA, 25 bp, Homo sapien
gcccccacataggagactggagccg

SEQ ID NO: 1026265 - DNA, 25 bp, Homo sapien
cccccacataggagactggagccgg

SEQ ID NO: 1026266 - DNA, 25 bp, Homo sapien
ctgatgatccggagcaccagctgct

SEQ ID NO: 1026267 - DNA, 25 bp, Homo sapien
gagtcgcgcggcttgggaagctgct

SEQ ID NO: 1026268 - DNA, 25 bp, Homo sapien
gccactgatgatccggagcaccagc

SEQ ID NO: 1026269 - DNA, 25 bp, Homo sapien
ccccagcatggagtcgcgcggcttg

SEQ ID NO: 1026270 - DNA, 25 bp, Homo sapien
ttgtcgtccaccacgcgggtctgct

SEQ ID NO: 1026271 - DNA, 25 bp, Homo sapien
tcgtccaccacgcgggtctgctccc

SEQ ID NO: 1026272 - DNA, 25 bp, Homo sapien
gtccaccacgcgggtctgctccctg

SEQ ID NO: 1026273 - DNA, 25 bp, Homo sapien
cgttgtcgtccaccacgcgggtctg

SEQ ID NO: 1026274 - DNA, 25 bp, Homo sapien
tggtcccagacgaggaagcggacca

SEQ ID NO: 1026275 - DNA, 25 bp, Homo sapien
gccaatgaagtcacgcccgatggga

SEQ ID NO: 1026276 - DNA, 25 bp, Homo sapien
aggaagcggaccagcgcgatctccg

SEQ ID NO: 1026277 - DNA, 25 bp, Homo sapien
cccgatgggatcgtggtcccagacg

SEQ ID NO: 1026278 - DNA, 25 bp, Homo sapien
gcacgaagatggaggcctcttccat

SEQ ID NO: 1026279 - DNA, 25 bp, Homo sapien
ccttctaggtacacgtgtctgtagc

SEQ ID NO: 1026280 - DNA, 25 bp, Homo sapien
acatgcacgaagatggaggcctctt

SEQ ID NO: 1026281 - DNA, 25 bp, Homo sapien
tccatcccttctaggtacacgtgtc

SEQ ID NO: 1026282 - DNA, 25 bp, Homo sapien
gcgacagtctccaaatgctaccagg

SEQ ID NO: 1026283 - DNA, 25 bp, Homo sapien
gctgaaccctggatctgcctcgtaa

SEQ ID NO: 1026284 - DNA, 25 bp, Homo sapien
gaagccgactgcaagaccaaagaga

SEQ ID NO: 1026285 - DNA, 25 bp, Homo sapien
tgatccacgtcacatgagcgacagt

SEQ ID NO: 1026286 - DNA, 25 bp, Homo sapien
ccaacagcctgagggtccgagatgg

SEQ ID NO: 1026287 - DNA, 25 bp, Homo sapien
catggtgatactcgtgccctaggaa

SEQ ID NO: 1026288 - DNA, 25 bp, Homo sapien
gcagatgcgttcagatggccagcac

SEQ ID NO: 1026289 - DNA, 25 bp, Homo sapien
tgggaggcgaactcagaaccaacag

SEQ ID NO: 1026290 - DNA, 25 bp, Homo sapien
tctttccctccggaggagagacctc

SEQ ID NO: 1026291 - DNA, 25 bp, Homo sapien
aggagagacctcgagccccagcctg

SEQ ID NO: 1026292 - DNA, 25 bp, Homo sapien
ttccctccggaggagagacctcgag

SEQ ID NO: 1026293 - DNA, 25 bp, Homo sapien
tccggaggagagacctcgagcccca

SEQ ID NO: 1026294 - DNA, 25 bp, Homo sapien
ggcatgtggggcccttgaggggcat

SEQ ID NO: 1026295 - DNA, 25 bp, Homo sapien
ctgtccagggcatgtggggcccttg

SEQ ID NO: 1026296 - DNA, 25 bp, Homo sapien
gtccagggcatgtggggcccttgag

SEQ ID NO: 1026297 - DNA, 25 bp, Homo sapien
ccagggcatgtggggcccttgaggg

SEQ ID NO: 1026298 - DNA, 25 bp, Homo sapien
tccggcagaaactgccctcgcctga

SEQ ID NO: 1026299 - DNA, 25 bp, Homo sapien
ccttccggcagaaactgccctcgcc

SEQ ID NO: 1026300 - DNA, 25 bp, Homo sapien
ttccggcagaaactgccctcgcctg

SEQ ID NO: 1026301 - DNA, 25 bp, Homo sapien
ccggcagaaactgccctcgcctgac

SEQ ID NO: 1026302 - DNA, 25 bp, Homo sapien
gggtccctagggcagctctgcctgg

SEQ ID NO: 1026303 - DNA, 25 bp, Homo sapien
gaaggagcccatgtagctgttgcca

SEQ ID NO: 1026304 - DNA, 25 bp, Homo sapien
acgtgccatgcgtgtctcggtccga

SEQ ID NO: 1026305 - DNA, 25 bp, Homo sapien
cagatctaagtacacatggcccacc

SEQ ID NO: 1026306 - DNA, 25 bp, Homo sapien
gagccgggctttgggcctcggagga

SEQ ID NO: 1026307 - DNA, 25 bp, Homo sapien
tgactgtccagcgagccgggctttg

SEQ ID NO: 1026308 - DNA, 25 bp, Homo sapien
cagcagcatgactgtccagcgagcc

SEQ ID NO: 1026309 - DNA, 25 bp, Homo sapien
agcatgactgtccagcgagccgggc

SEQ ID NO: 1026310 - DNA, 25 bp, Homo sapien
ctgtgtcccgtgtacccaggaccag

SEQ ID NO: 1026311 - DNA, 25 bp, Homo sapien
ggagcctgtgtcccgtgtacccagg

SEQ ID NO: 1026312 - DNA, 25 bp, Homo sapien
ggggggcaccacatcgtctgccacc

SEQ ID NO: 1026313 - DNA, 25 bp, Homo sapien
gtgtcccgtgtacccaggaccagct

SEQ ID NO: 1026314 - DNA, 25 bp, Homo sapien
ggctgctggcgaatggctgcctgcc

SEQ ID NO: 1026315 - DNA, 25 bp, Homo sapien
ttctccccgggatagcgtgagggtc

SEQ ID NO: 1026316 - DNA, 25 bp, Homo sapien
acacttcatgcatgtggcggccatc

SEQ ID NO: 1026317 - DNA, 25 bp, Homo sapien
gagtccgaggacatggagccgctac

SEQ ID NO: 1026318 - DNA, 25 bp, Homo sapien
agagccacgagcacgagcacacgag

SEQ ID NO: 1026319 - DNA, 25 bp, Homo sapien
ggcgacaccgtccacgcagaagcag

SEQ ID NO: 1026320 - DNA, 25 bp, Homo sapien
ctatgggccacaggcaagccaaggg

SEQ ID NO: 1026321 - DNA, 25 bp, Homo sapien
agcagagtgccacggagacagtgcc

SEQ ID NO: 1026322 - DNA, 25 bp, Homo sapien
gttcttcccagcctgtcgggcctca

SEQ ID NO: 1026323 - DNA, 25 bp, Homo sapien
tgggaatgggatggtacgtggcccc

SEQ ID NO: 1026324 - DNA, 25 bp, Homo sapien
gggccatgcaggtcgccagccgccc

SEQ ID NO: 1026325 - DNA, 25 bp, Homo sapien
tgagtttggggaagcgcccagccgg

SEQ ID NO: 1026326 - DNA, 25 bp, Homo sapien
cacatcagacttcccagtagggacc

SEQ ID NO: 1026327 - DNA, 25 bp, Homo sapien
cagacttcccagtagggacccctgg

SEQ ID NO: 1026328 - DNA, 25 bp, Homo sapien
tgcccacatcagacttcccagtagg

SEQ ID NO: 1026329 - DNA, 25 bp, Homo sapien
tcccagtagggacccctggagcctg

SEQ ID NO: 1026330 - DNA, 25 bp, Homo sapien
caaagcagcgaagccctggggccca

SEQ ID NO: 1026331 - DNA, 25 bp, Homo sapien
caggctaaggagacacccttctagt

SEQ ID NO: 1026332 - DNA, 25 bp, Homo sapien
gggcgggctccgtgtatgtccctcc

SEQ ID NO: 1026333 - DNA, 25 bp, Homo sapien
agggaatctactccacgcagcactc

SEQ ID NO: 1026334 - DNA, 25 bp, Homo sapien
tgtcactcgccgctctcagttccta

SEQ ID NO: 1026335 - DNA, 25 bp, Homo sapien
ctgtcactcgccgctctcagttcct

SEQ ID NO: 1026336 - DNA, 25 bp, Homo sapien
gtcactcgccgctctcagttcctaa

SEQ ID NO: 1026337 - DNA, 25 bp, Homo sapien
ggagtcggatcagggtggtgtcccc

SEQ ID NO: 1026338 - DNA, 25 bp, Homo sapien
cctgtgccgagggtcgccaggccca

SEQ ID NO: 1026339 - DNA, 25 bp, Homo sapien
gtccacgccctgtgccgcacacggg

SEQ ID NO: 1026340 - DNA, 25 bp, Homo sapien
ccgggcgcggcacactcggtgtccc

SEQ ID NO: 1026341 - DNA, 25 bp, Homo sapien
gtggggggagtggccgctgcgtgga

SEQ ID NO: 1026342 - DNA, 25 bp, Homo sapien
gggctcctcagcgatggtttccagg

SEQ ID NO: 1026343 - DNA, 25 bp, Homo sapien
gcgggctcctcagcgatggtttcca

SEQ ID NO: 1026344 - DNA, 25 bp, Homo sapien
cgggctcctcagcgatggtttccag

SEQ ID NO: 1026345 - DNA, 25 bp, Homo sapien
gtatgggggccgtccctgagaagag

SEQ ID NO: 1026346 - DNA, 25 bp, Homo sapien
tgtggggtatgggggccgtccctga

SEQ ID NO: 1026347 - DNA, 25 bp, Homo sapien
ctgtggggtatgggggccgtccctg

SEQ ID NO: 1026348 - DNA, 25 bp, Homo sapien
gggccctctcgtatgccccgccggc

SEQ ID NO: 1026349 - DNA, 25 bp, Homo sapien
tcctcagtgtcctctagggggcttg

SEQ ID NO: 1026350 - DNA, 25 bp, Homo sapien
cgttgcacggccgaggcctgctgtc

SEQ ID NO: 1026351 - DNA, 25 bp, Homo sapien
gggcttgccacattggctccgggtc

SEQ ID NO: 1026352 - DNA, 25 bp, Homo sapien
tcttcacccttctaatcacgggcag

SEQ ID NO: 1026353 - DNA, 25 bp, Homo sapien
ttcacccttctaatcacgggcaggt

SEQ ID NO: 1026354 - DNA, 25 bp, Homo sapien
tcactcttcacccttctaatcacgg

SEQ ID NO: 1026355 - DNA, 25 bp, Homo sapien
cccttctaatcacgggcaggtggcc

SEQ ID NO: 1026356 - DNA, 25 bp, Homo sapien
aggaaacgctgtctcggtggccaca

SEQ ID NO: 1026357 - DNA, 25 bp, Homo sapien
caggttttcagcagccgcggatgct

SEQ ID NO: 1026358 - DNA, 25 bp, Homo sapien
ggctccagcgaggttctcacggctg

SEQ ID NO: 1026359 - DNA, 25 bp, Homo sapien
tgctctgtcagggtgtcccgtctca

SEQ ID NO: 1026360 - DNA, 25 bp, Homo sapien
tccagagccgcccaggttcccacca

SEQ ID NO: 1026361 - DNA, 25 bp, Homo sapien
cctccagagccgcccaggttcccac

SEQ ID NO: 1026362 - DNA, 25 bp, Homo sapien
gcctccagagccgcccaggttccca

SEQ ID NO: 1026363 - DNA, 25 bp, Homo sapien
ctccagagccgcccaggttcccacc

SEQ ID NO: 1026364 - DNA, 25 bp, Homo sapien
cagccagggggacacagttttgggg

SEQ ID NO: 1026365 - DNA, 25 bp, Homo sapien
gggggcctggctgccctgtttcctg

SEQ ID NO: 1026366 - DNA, 25 bp, Homo sapien
acacagttttgggggcctggctgcc

SEQ ID NO: 1026367 - DNA, 25 bp, Homo sapien
gggcctggctgccctgtttcctgag

SEQ ID NO: 1026368 - DNA, 25 bp, Homo sapien
tttctctatgtacagatcctaaaac

SEQ ID NO: 1026369 - DNA, 25 bp, Homo sapien
tctatgtacagatcctaaaacgccg

SEQ ID NO: 1026370 - DNA, 25 bp, Homo sapien
tgtacagatcctaaaacgccgggaa

SEQ ID NO: 1026371 - DNA, 25 bp, Homo sapien
tatgtacagatcctaaaacgccggg

SEQ ID NO: 1026372 - DNA, 25 bp, Homo sapien
ggccgacgtggaccctgctaggaac

SEQ ID NO: 1026373 - DNA, 25 bp, Homo sapien
caattcctgactcgagagcctggga

SEQ ID NO: 1026374 - DNA, 25 bp, Homo sapien
gaaaggagccctcgacatcgatcac

SEQ ID NO: 1026375 - DNA, 25 bp, Homo sapien
tccgggccagaagaaccaactcagc

SEQ ID NO: 1026376 - DNA, 25 bp, Homo sapien
gcacgaacttctcggacagcaggga

SEQ ID NO: 1026377 - DNA, 25 bp, Homo sapien
ccaatatgtagactggccgctccct

SEQ ID NO: 1026378 - DNA, 25 bp, Homo sapien
ctgagactccccagtactcggtgga

SEQ ID NO: 1026379 - DNA, 25 bp, Homo sapien
tcagcataaaccgtggagtcctttc

SEQ ID NO: 1026380 - DNA, 25 bp, Homo sapien
acgggcagctggtgagcccccattt

SEQ ID NO: 1026381 - DNA, 25 bp, Homo sapien
tccgtccacgggcagctggtgagcc

SEQ ID NO: 1026382 - DNA, 25 bp, Homo sapien
ccacgggcagctggtgagcccccat

SEQ ID NO: 1026383 - DNA, 25 bp, Homo sapien
cactccgtccacgggcagctggtga

SEQ ID NO: 1026384 - DNA, 25 bp, Homo sapien
cctgctgctcgggttctgaggcaca

SEQ ID NO: 1026385 - DNA, 25 bp, Homo sapien
ttgtcacaccgaggcggattctctt

SEQ ID NO: 1026386 - DNA, 25 bp, Homo sapien
gagttcatcctgctagctgggttcc

SEQ ID NO: 1026387 - DNA, 25 bp, Homo sapien
cagcaatggcgctgagttcctctgc

SEQ ID NO: 1026388 - DNA, 25 bp, Homo sapien
caggcctggtgggtctatgactgaa

SEQ ID NO: 1026389 - DNA, 25 bp, Homo sapien
tcccctcggctttgcctggacagct

SEQ ID NO: 1026390 - DNA, 25 bp, Homo sapien
ctttattcggcaaaaatgtcagtca

SEQ ID NO: 1026391 - DNA, 25 bp, Homo sapien
tgaaattggccagaccgcattctgg

SEQ ID NO: 1026392 - DNA, 25 bp, Homo sapien
cgtcacgagggactcactggtgcct

SEQ ID NO: 1026393 - DNA, 25 bp, Homo sapien
gactgcatcacgtccagcagcagga

SEQ ID NO: 1026394 - DNA, 25 bp, Homo sapien
actggcgtcgtcacgtgggtcacga

SEQ ID NO: 1026395 - DNA, 25 bp, Homo sapien
cacgaggttccatgtgatgcaggga

SEQ ID NO: 1026396 - DNA, 25 bp, Homo sapien
caagcacaggcggtgcgtgacagac

SEQ ID NO: 1026397 - DNA, 25 bp, Homo sapien
cagggctgcacactttctagttggg

SEQ ID NO: 1026398 - DNA, 25 bp, Homo sapien
gacgactctggaggacgtatctgag

SEQ ID NO: 1026399 - DNA, 25 bp, Homo sapien
tgtgagtgcaccagggaaacagcag

SEQ ID NO: 1026400 - DNA, 25 bp, Homo sapien
cagccgtgtcaatgcagatggctgg

SEQ ID NO: 1026401 - DNA, 25 bp, Homo sapien
ctgcgggcagccgtgtcaatgcaga

SEQ ID NO: 1026402 - DNA, 25 bp, Homo sapien
ggcagtgatatcctgcgggcagccg

SEQ ID NO: 1026403 - DNA, 25 bp, Homo sapien
tgctggtaatggtgggccccgggat

SEQ ID NO: 1026404 - DNA, 25 bp, Homo sapien
tcaccagcggtggaccccagcttcc

SEQ ID NO: 1026405 - DNA, 25 bp, Homo sapien
ccctccccgctcaccagcggtggac

SEQ ID NO: 1026406 - DNA, 25 bp, Homo sapien
ctgcacaccgtccactagcctgaca

SEQ ID NO: 1026407 - DNA, 25 bp, Homo sapien
tccactagcctgacagctgcccaaa

SEQ ID NO: 1026408 - DNA, 25 bp, Homo sapien
ggctcagccatttcacgttcctgtg

SEQ ID NO: 1026409 - DNA, 25 bp, Homo sapien
tgaaacgccctaataggacctcctg

SEQ ID NO: 1026410 - DNA, 25 bp, Homo sapien
gcaacctgcctctcagaaggccgtg

SEQ ID NO: 1026411 - DNA, 25 bp, Homo sapien
aacactgagtattgtcctgcaacct

SEQ ID NO: 1026412 - DNA, 25 bp, Homo sapien
ttggatgtggacattgtgctgtgac

SEQ ID NO: 1026413 - DNA, 25 bp, Homo sapien
tcctttaaaggacgctgcgctgtgt

SEQ ID NO: 1026414 - DNA, 25 bp, Homo sapien
ctgtgttctgcgtggagttcagctc

SEQ ID NO: 1026415 - DNA, 25 bp, Homo sapien
tcttcgtgtggctggttctgaagcc

SEQ ID NO: 1026416 - DNA, 25 bp, Homo sapien
attttcctttagaggacgttgtgat

SEQ ID NO: 1026417 - DNA, 25 bp, Homo sapien
cctttagaggacgttgtgattgtca

SEQ ID NO: 1026418 - DNA, 25 bp, Homo sapien
agggtccacgcctgacaattccact

SEQ ID NO: 1026419 - DNA, 25 bp, Homo sapien
gcctgacaattccactgtggctgcc

SEQ ID NO: 1026420 - DNA, 25 bp, Homo sapien
gagttcaaaggtgaaatgttctttc

SEQ ID NO: 1026421 - DNA, 25 bp, Homo sapien
gcgtggtctatttttgacagacaga

SEQ ID NO: 1026422 - DNA, 25 bp, Homo sapien
ttttgtagcttaatagacaaggtct

SEQ ID NO: 1026423 - DNA, 25 bp, Homo sapien
tccacaggcggaggccaccgagcgt

SEQ ID NO: 1026424 - DNA, 25 bp, Homo sapien
cgggtacaaacccaaacagtgcaga

SEQ ID NO: 1026425 - DNA, 25 bp, Homo sapien
ttcccgtgcaaaagcgacacaggcg

SEQ ID NO: 1026426 - DNA, 25 bp, Homo sapien
caatggtggttcacgtgtctctcca

SEQ ID NO: 1026427 - DNA, 25 bp, Homo sapien
tgagaccggctgtccaatggcagag

SEQ ID NO: 1026428 - DNA, 25 bp, Homo sapien
tcctctgagcctctttgcgctcttt

SEQ ID NO: 1026429 - DNA, 25 bp, Homo sapien
tgcgctctttggctgcgtgctttct

SEQ ID NO: 1026430 - DNA, 25 bp, Homo sapien
tcgtcaggacgcagcgtctctccag

SEQ ID NO: 1026431 - DNA, 25 bp, Homo sapien
gacagggatgctgtgtcgtcaggac

SEQ ID NO: 1026432 - DNA, 25 bp, Homo sapien
tctcccgccggggaatccttcatct

SEQ ID NO: 1026433 - DNA, 25 bp, Homo sapien
ccgccggggaatccttcatctggga

SEQ ID NO: 1026434 - DNA, 25 bp, Homo sapien
tcccgccggggaatccttcatctgg

SEQ ID NO: 1026435 - DNA, 25 bp, Homo sapien
tgtctcccgccggggaatccttcat

SEQ ID NO: 1026436 - DNA, 25 bp, Homo sapien
cttttcatggtgagataacacacag

SEQ ID NO: 1026437 - DNA, 25 bp, Homo sapien
gcctaggtgacttttcatggtgaga

SEQ ID NO: 1026438 - DNA, 25 bp, Homo sapien
gcctggcctaggtgacttttcatgg

SEQ ID NO: 1026439 - DNA, 25 bp, Homo sapien
cacaggcatggtgagcagcatggca

SEQ ID NO: 1026440 - DNA, 25 bp, Homo sapien
caccttgctgcaaacgctgtgactt

SEQ ID NO: 1026441 - DNA, 25 bp, Homo sapien
tgcaaacgctgtgacttccgagagc

SEQ ID NO: 1026442 - DNA, 25 bp, Homo sapien
ttgctgcaaacgctgtgacttccga

SEQ ID NO: 1026443 - DNA, 25 bp, Homo sapien
gagccaccttgctgcaaacgctgtg

SEQ ID NO: 1026444 - DNA, 25 bp, Homo sapien
actttccatgatgaccgttgagtga

SEQ ID NO: 1026445 - DNA, 25 bp, Homo sapien
tttccatgatgaccgttgagtgaga

SEQ ID NO: 1026446 - DNA, 25 bp, Homo sapien
tttcactttccatgatgaccgttga

SEQ ID NO: 1026447 - DNA, 25 bp, Homo sapien
tccatgatgaccgttgagtgagaga

SEQ ID NO: 1026448 - DNA, 25 bp, Homo sapien
ctgtgagcttgtctctcctccgtgg

SEQ ID NO: 1026449 - DNA, 25 bp, Homo sapien
ctctcctccgtgggaggagccgcac

SEQ ID NO: 1026450 - DNA, 25 bp, Homo sapien
tgtctctcctccgtgggaggagccg

SEQ ID NO: 1026451 - DNA, 25 bp, Homo sapien
tgtgagcttgtctctcctccgtggg

SEQ ID NO: 1026452 - DNA, 25 bp, Homo sapien
tgcggaagtccccatggtgacagtc

SEQ ID NO: 1026453 - DNA, 25 bp, Homo sapien
ctgtctgggaaagcaccaggccctg

SEQ ID NO: 1026454 - DNA, 25 bp, Homo sapien
cgcagggaggcggaagtccttgttt

SEQ ID NO: 1026455 - DNA, 25 bp, Homo sapien
aggccctgcggaagtccccatggtg

SEQ ID NO: 1026456 - DNA, 25 bp, Homo sapien
tggttctctcgtttaggttccaatc

SEQ ID NO: 1026457 - DNA, 25 bp, Homo sapien
gttctctcgtttaggttccaatcag

SEQ ID NO: 1026458 - DNA, 25 bp, Homo sapien
tctctcgtttaggttccaatcagct

SEQ ID NO: 1026459 - DNA, 25 bp, Homo sapien
ggttctctcgtttaggttccaatca

SEQ ID NO: 1026460 - DNA, 25 bp, Homo sapien
ccactcagtagcatgaaggtgggag

SEQ ID NO: 1026461 - DNA, 25 bp, Homo sapien
agatttcaccggcatccctgggctg

SEQ ID NO: 1026462 - DNA, 25 bp, Homo sapien
ccagagatttcaccggcatccctgg

SEQ ID NO: 1026463 - DNA, 25 bp, Homo sapien
cagtcatttcatgtaagcttgtcca

SEQ ID NO: 1026464 - DNA, 25 bp, Homo sapien
tcaggtttcttgtcggccacgggtg

SEQ ID NO: 1026465 - DNA, 25 bp, Homo sapien
catattggtcggctcttgctaggct

SEQ ID NO: 1026466 - DNA, 25 bp, Homo sapien
caaaacaactcgcaagcctgggtcg

SEQ ID NO: 1026467 - DNA, 25 bp, Homo sapien
taatagtgactatgccagagcagcc

SEQ ID NO: 1026468 - DNA, 25 bp, Homo sapien
tccaggccaagcctcgagatcgcgg

SEQ ID NO: 1026469 - DNA, 25 bp, Homo sapien
atcgcggcgccaaatcctgggtccg

SEQ ID NO: 1026470 - DNA, 25 bp, Homo sapien
aagcctcgagatcgcggcgccaaat

SEQ ID NO: 1026471 - DNA, 25 bp, Homo sapien
ctcccgcctcctcaatccgggcctt

SEQ ID NO: 1026472 - DNA, 25 bp, Homo sapien
ctcccggctcctcgctcctggatcc

SEQ ID NO: 1026473 - DNA, 25 bp, Homo sapien
ccgctcccggctcctcgctcctgga

SEQ ID NO: 1026474 - DNA, 25 bp, Homo sapien
cccggctcctcgctcctggatcccc

SEQ ID NO: 1026475 - DNA, 25 bp, Homo sapien
ctgttccccgctcccggctcctcgc

SEQ ID NO: 1026476 - DNA, 25 bp, Homo sapien
cggccgctgccagccctggttcccg

SEQ ID NO: 1026477 - DNA, 25 bp, Homo sapien
ggcggccgctgccagccctggttcc

SEQ ID NO: 1026478 - DNA, 25 bp, Homo sapien
cgctgccagccctggttcccggctc

SEQ ID NO: 1026479 - DNA, 25 bp, Homo sapien
ccgctgccagccctggttcccggct

SEQ ID NO: 1026480 - DNA, 25 bp, Homo sapien
atgcacgcgcccacgcgagcaaggt

SEQ ID NO: 1026481 - DNA, 25 bp, Homo sapien
cgcgagcaaggtccaccgtgctcat

SEQ ID NO: 1026482 - DNA, 25 bp, Homo sapien
atgcttcaggatgcacgcgcccacg

SEQ ID NO: 1026483 - DNA, 25 bp, Homo sapien
cccggtcaccgcatgcttcaggatg

SEQ ID NO: 1026484 - DNA, 25 bp, Homo sapien
gctgggtcatgggcgcgccccgttg

SEQ ID NO: 1026485 - DNA, 25 bp, Homo sapien
tgggcgcgccccgttgcccccagcc

SEQ ID NO: 1026486 - DNA, 25 bp, Homo sapien
tgggtcatgggcgcgccccgttgcc

SEQ ID NO: 1026487 - DNA, 25 bp, Homo sapien
gcggctgggtcatgggcgcgccccg

SEQ ID NO: 1026488 - DNA, 25 bp, Homo sapien
aggtcctgggcgatccagcggcaca

SEQ ID NO: 1026489 - DNA, 25 bp, Homo sapien
tcccgcgaagtagtcgccgtccagg

SEQ ID NO: 1026490 - DNA, 25 bp, Homo sapien
cagacccagggcctcgggccctacg

SEQ ID NO: 1026491 - DNA, 25 bp, Homo sapien
cccaccaggcgcacgccgtgttggt

SEQ ID NO: 1026492 - DNA, 25 bp, Homo sapien
tgcttgctctcatccaggtagagct

SEQ ID NO: 1026493 - DNA, 25 bp, Homo sapien
cgcttgaagcctagctccttgtaaa

SEQ ID NO: 1026494 - DNA, 25 bp, Homo sapien
cttgtaaagctgcttgctctcatcc

SEQ ID NO: 1026495 - DNA, 25 bp, Homo sapien
cttgaagcctagctccttgtaaagc

SEQ ID NO: 1026496 - DNA, 25 bp, Homo sapien
caggtcgcttggccaaactccggag

SEQ ID NO: 1026497 - DNA, 25 bp, Homo sapien
ctgcgaagacaccaggtcgcttggc

SEQ ID NO: 1026498 - DNA, 25 bp, Homo sapien
agccacatcacgcacgggcttcccc

SEQ ID NO: 1026499 - DNA, 25 bp, Homo sapien
cacatcacgcacgggcttccccaga

SEQ ID NO: 1026500 - DNA, 25 bp, Homo sapien
ccacatcacgcacgggcttccccag

SEQ ID NO: 1026501 - DNA, 25 bp, Homo sapien
gccacatcacgcacgggcttcccca

SEQ ID NO: 1026502 - DNA, 25 bp, Homo sapien
gtcaatcctagaagaaaggctcctg

SEQ ID NO: 1026503 - DNA, 25 bp, Homo sapien
caatcctagaagaaaggctcctggg

SEQ ID NO: 1026504 - DNA, 25 bp, Homo sapien
ctgagtcaatcctagaagaaaggct

SEQ ID NO: 1026505 - DNA, 25 bp, Homo sapien
ggcctgtacacccttgacccgcaca

SEQ ID NO: 1026506 - DNA, 25 bp, Homo sapien
ttgctgaccaccagcagccctccgc

SEQ ID NO: 1026507 - DNA, 25 bp, Homo sapien
tgaccaccagcagccctccgctctg

SEQ ID NO: 1026508 - DNA, 25 bp, Homo sapien
agttcccctggatgccaacagcctt

SEQ ID NO: 1026509 - DNA, 25 bp, Homo sapien
tgcagcaggtccccagacaagttcc

SEQ ID NO: 1026510 - DNA, 25 bp, Homo sapien
cacccggctacccagatgagtgagc

SEQ ID NO: 1026511 - DNA, 25 bp, Homo sapien
cagcgggcaggcagtcacggcaccc

SEQ ID NO: 1026512 - DNA, 25 bp, Homo sapien
gctgtgatgagactgacaagccaga

SEQ ID NO: 1026513 - DNA, 25 bp, Homo sapien
agaaccaggccacattgcggcggag

SEQ ID NO: 1026514 - DNA, 25 bp, Homo sapien
gacgaaatgcaggagcactttatca

SEQ ID NO: 1026515 - DNA, 25 bp, Homo sapien
cgaaatgcaggagcactttatcacc

SEQ ID NO: 1026516 - DNA, 25 bp, Homo sapien
aaatgcaggagcactttatcaccac

SEQ ID NO: 1026517 - DNA, 25 bp, Homo sapien
ctggacgaaatgcaggagcacttta

SEQ ID NO: 1026518 - DNA, 25 bp, Homo sapien
gctggcacagacctccgcagagatg

SEQ ID NO: 1026519 - DNA, 25 bp, Homo sapien
gcacagacctccgcagagatgccca

SEQ ID NO: 1026520 - DNA, 25 bp, Homo sapien
tggcacagacctccgcagagatgcc

SEQ ID NO: 1026521 - DNA, 25 bp, Homo sapien
tcgctggcacagacctccgcagaga

SEQ ID NO: 1026522 - DNA, 25 bp, Homo sapien
ccggaacagttcttccaagtggact

SEQ ID NO: 1026523 - DNA, 25 bp, Homo sapien
ttttaatggctcgttgctgccggcg

SEQ ID NO: 1026524 - DNA, 25 bp, Homo sapien
gtggacttccagcacacctagggca

SEQ ID NO: 1026525 - DNA, 25 bp, Homo sapien
atcaggagaggttcggcatcccgac

SEQ ID NO: 1026526 - DNA, 25 bp, Homo sapien
cagagaaagtcgcagagcaggaaga

SEQ ID NO: 1026527 - DNA, 25 bp, Homo sapien
caggtggaatcaagcccatctctgc

SEQ ID NO: 1026528 - DNA, 25 bp, Homo sapien
aaaggtggccaagaagctggacaca

SEQ ID NO: 1026529 - DNA, 25 bp, Homo sapien
ctgagggcccaacagtgagcaaggc

SEQ ID NO: 1026530 - DNA, 25 bp, Homo sapien
ctagggagtgcagagagggctgcag

SEQ ID NO: 1026531 - DNA, 25 bp, Homo sapien
ggagtgcagagagggctgcagttgt

SEQ ID NO: 1026532 - DNA, 25 bp, Homo sapien
agagagggctgcagttgtcatcggc

SEQ ID NO: 1026533 - DNA, 25 bp, Homo sapien
tgcagagagggctgcagttgtcatc

SEQ ID NO: 1026534 - DNA, 25 bp, Homo sapien
cacccagggatgagcagtgtccagt

SEQ ID NO: 1026535 - DNA, 25 bp, Homo sapien
taaacaggtagcagtggtcttgggc

SEQ ID NO: 1026536 - DNA, 25 bp, Homo sapien
taatcacggagaacttaaaatggcc

SEQ ID NO: 1026537 - DNA, 25 bp, Homo sapien
tagggtccaatgctagggccagcag

SEQ ID NO: 1026538 - DNA, 25 bp, Homo sapien
acatctctccaggcagttgacagcc

SEQ ID NO: 1026539 - DNA, 25 bp, Homo sapien
atctctccaggcagttgacagccat

SEQ ID NO: 1026540 - DNA, 25 bp, Homo sapien
catacatctctccaggcagttgaca

SEQ ID NO: 1026541 - DNA, 25 bp, Homo sapien
tcccatacatctctccaggcagttg

SEQ ID NO: 1026542 - DNA, 25 bp, Homo sapien
aattcggccacaagccaggtctgaa

SEQ ID NO: 1026543 - DNA, 25 bp, Homo sapien
tcggccacaagccaggtctgaaggt

SEQ ID NO: 1026544 - DNA, 25 bp, Homo sapien
cacaagccaggtctgaaggtagcca

SEQ ID NO: 1026545 - DNA, 25 bp, Homo sapien
gggaaattcggccacaagccaggtc

SEQ ID NO: 1026546 - DNA, 25 bp, Homo sapien
ctcggtgtatgcagcatgcggcact

SEQ ID NO: 1026547 - DNA, 25 bp, Homo sapien
caggctcacatctgaactgcagcat

SEQ ID NO: 1026548 - DNA, 25 bp, Homo sapien
gcatgcggcactttctccctgtttc

SEQ ID NO: 1026549 - DNA, 25 bp, Homo sapien
ggccctgtcaggctcacatctgaac

SEQ ID NO: 1026550 - DNA, 25 bp, Homo sapien
tcagttgtcctaatttgttctggat

SEQ ID NO: 1026551 - DNA, 25 bp, Homo sapien
gcaggcatgaaggaggcatgaactc

SEQ ID NO: 1026552 - DNA, 25 bp, Homo sapien
tgaactcgcctcttcagttgtccta

SEQ ID NO: 1026553 - DNA, 25 bp, Homo sapien
tgaaggaggcatgaactcgcctctt

SEQ ID NO: 1026554 - DNA, 25 bp, Homo sapien
tcaacaaggctacgggaaatcctat

SEQ ID NO: 1026555 - DNA, 25 bp, Homo sapien
gctacgggaaatcctatgttgggaa

SEQ ID NO: 1026556 - DNA, 25 bp, Homo sapien
atcctatgttgggaatgccgtggga

SEQ ID NO: 1026557 - DNA, 25 bp, Homo sapien
ccccatcaacaaggctacgggaaat

SEQ ID NO: 1026558 - DNA, 25 bp, Homo sapien
tgttccacgcagtcacatcacctgt

SEQ ID NO: 1026559 - DNA, 25 bp, Homo sapien
gggatgtgctgttccacgcagtcac

SEQ ID NO: 1026560 - DNA, 25 bp, Homo sapien
catgccatcggatgcccaccttggg

SEQ ID NO: 1026561 - DNA, 25 bp, Homo sapien
tccatgccatcggatgcccaccttg

SEQ ID NO: 1026562 - DNA, 25 bp, Homo sapien
tggggatgtgggttgccgttcctgg

SEQ ID NO: 1026563 - DNA, 25 bp, Homo sapien
ctggggatgtgggttgccgttcctg

SEQ ID NO: 1026564 - DNA, 25 bp, Homo sapien
ggggatgtgggttgccgttcctggc

SEQ ID NO: 1026565 - DNA, 25 bp, Homo sapien
gggatgtgggttgccgttcctggct

SEQ ID NO: 1026566 - DNA, 25 bp, Homo sapien
ggctgtcagatgctccccctggagg

SEQ ID NO: 1026567 - DNA, 25 bp, Homo sapien
ggctgtcagatgctcccctggaggt

SEQ ID NO: 1026568 - DNA, 25 bp, Homo sapien
gggtgttgctccaggctgtcagatg

SEQ ID NO: 1026569 - DNA, 25 bp, Homo sapien
tgtggggtgctgttccaggatgtca

SEQ ID NO: 1026570 - DNA, 25 bp, Homo sapien
tcgccccgtcatgcctgtgaatttg

SEQ ID NO: 1026571 - DNA, 25 bp, Homo sapien
catgtgggagtgacggtaggagcag

SEQ ID NO: 1026572 - DNA, 25 bp, Homo sapien
gaatttgtgcatccaggatatgggc

SEQ ID NO: 1026573 - DNA, 25 bp, Homo sapien
caggacgttggagggctagcatgtg

SEQ ID NO: 1026574 - DNA, 25 bp, Homo sapien
aggctgctggaccagggcaccaagt

SEQ ID NO: 1026575 - DNA, 25 bp, Homo sapien
aaaggaaaagcaatcctggaggcca

SEQ ID NO: 1026576 - DNA, 25 bp, Homo sapien
gaggccaggaggacgacagcctcca

SEQ ID NO: 1026577 - DNA, 25 bp, Homo sapien
ccagaggccatgcttgctgctgcag

SEQ ID NO: 1026578 - DNA, 25 bp, Homo sapien
tcttgggtactagcctgagctgtct

SEQ ID NO: 1026579 - DNA, 25 bp, Homo sapien
acaagaggctgtcacaagggagacc

SEQ ID NO: 1026580 - DNA, 25 bp, Homo sapien
gctgtctgccctgatgcttcgctgg

SEQ ID NO: 1026581 - DNA, 25 bp, Homo sapien
tactcaacaggatgcacggcaggga

SEQ ID NO: 1026582 - DNA, 25 bp, Homo sapien
taacataatctagtaataaccagtg

SEQ ID NO: 1026583 - DNA, 25 bp, Homo sapien
cataatctagtaataaccagtgggt

SEQ ID NO: 1026584 - DNA, 25 bp, Homo sapien
tactaacataatctagtaataacca

SEQ ID NO: 1026585 - DNA, 25 bp, Homo sapien
tctagtaataaccagtgggtgtagg

SEQ ID NO: 1026586 - DNA, 25 bp, Homo sapien
gtgctgcgggaggaggcccgtggga

SEQ ID NO: 1026587 - DNA, 25 bp, Homo sapien
ggtggtgctgcgggaggaggcccgt

SEQ ID NO: 1026588 - DNA, 25 bp, Homo sapien
tggtgctgcgggaggaggcccgtgg

SEQ ID NO: 1026589 - DNA, 25 bp, Homo sapien
tgctggtggtgctgcgggaggaggc

SEQ ID NO: 1026590 - DNA, 25 bp, Homo sapien
ggagtggcctgtgccagttgctggt

SEQ ID NO: 1026591 - DNA, 25 bp, Homo sapien
tccccctgtgccaggagtggcctgt

SEQ ID NO: 1026592 - DNA, 25 bp, Homo sapien
cttgataaggccacctccccctgtg

SEQ ID NO: 1026593 - DNA, 25 bp, Homo sapien
ctgtgccagttgctggtgcttgccc

SEQ ID NO: 1026594 - DNA, 25 bp, Homo sapien
tgctggcggagccttgggccaggcc

SEQ ID NO: 1026595 - DNA, 25 bp, Homo sapien
ggccaggcccacacatgaccgtgct

SEQ ID NO: 1026596 - DNA, 25 bp, Homo sapien
acacatgaccgtgctcagcaggccc

SEQ ID NO: 1026597 - DNA, 25 bp, Homo sapien
ccatgtggcacttcccaggccaagg

SEQ ID NO: 1026598 - DNA, 25 bp, Homo sapien
ggccgggcagatacatcactcgagg

SEQ ID NO: 1026599 - DNA, 25 bp, Homo sapien
gggccgggcagatacatcactcgag

SEQ ID NO: 1026600 - DNA, 25 bp, Homo sapien
ggggccgggcagatacatcactcga

SEQ ID NO: 1026601 - DNA, 25 bp, Homo sapien
gccagggagtccacgcgcttctcag

SEQ ID NO: 1026602 - DNA, 25 bp, Homo sapien
tggaacccaggccataggttcagct

SEQ ID NO: 1026603 - DNA, 25 bp, Homo sapien
ccaggaggctctcgctcaggcagat

SEQ ID NO: 1026604 - DNA, 25 bp, Homo sapien
gatccaaggaatcggactcgcctgc

SEQ ID NO: 1026605 - DNA, 25 bp, Homo sapien
gaaggaggcagtacgtcccgtaatg

SEQ ID NO: 1026606 - DNA, 25 bp, Homo sapien
gcagtacgtcccgtaatgccgtgct

SEQ ID NO: 1026607 - DNA, 25 bp, Homo sapien
cccgtaatgccgtgctgtggcctgc

SEQ ID NO: 1026608 - DNA, 25 bp, Homo sapien
tacgtcccgtaatgccgtgctgtgg

SEQ ID NO: 1026609 - DNA, 25 bp, Homo sapien
gctggacacgtggtcctcgcctgga

SEQ ID NO: 1026610 - DNA, 25 bp, Homo sapien
gctgatgaagttacggtagcagcgt

SEQ ID NO: 1026611 - DNA, 25 bp, Homo sapien
ctgagctcggggaaccgacaaccct

SEQ ID NO: 1026612 - DNA, 25 bp, Homo sapien
aaccctcagtcgtgtgcacagcagg

SEQ ID NO: 1026613 - DNA, 25 bp, Homo sapien
cggtaactgctgtgggtcccctgat

SEQ ID NO: 1026614 - DNA, 25 bp, Homo sapien
ttgggcgcatttaccgagacaagcc

SEQ ID NO: 1026615 - DNA, 25 bp, Homo sapien
caggttaagaggagccacgtgagcc

SEQ ID NO: 1026616 - DNA, 25 bp, Homo sapien
ggtcactcgtcttagtgcccaaggc

SEQ ID NO: 1026617 - DNA, 25 bp, Homo sapien
ccggcgtcccacgataccatgccac

SEQ ID NO: 1026618 - DNA, 25 bp, Homo sapien
agcagactaaacagaggccgcagcc

SEQ ID NO: 1026619 - DNA, 25 bp, Homo sapien
gccgcagcccacttccaaggactcc

SEQ ID NO: 1026620 - DNA, 25 bp, Homo sapien
ggactcctgtgtcccggcgtcccac

SEQ ID NO: 1026621 - DNA, 25 bp, Homo sapien
aggaaggacaaagaggtgcgtgtgt

SEQ ID NO: 1026622 - DNA, 25 bp, Homo sapien
aggacaaagaggtgcgtgtgtttga

SEQ ID NO: 1026623 - DNA, 25 bp, Homo sapien
gaaggacaaagaggtgcgtgtgttt

SEQ ID NO: 1026624 - DNA, 25 bp, Homo sapien
ggacaaagaggtgcgtgtgtttgag

SEQ ID NO: 1026625 - DNA, 25 bp, Homo sapien
cctggagggcctggaggcttctaca

SEQ ID NO: 1026626 - DNA, 25 bp, Homo sapien
cctggggcccccagccagccctgag

SEQ ID NO: 1026627 - DNA, 25 bp, Homo sapien
ggagggcctggaggcttctacaaca

SEQ ID NO: 1026628 - DNA, 25 bp, Homo sapien
cagccctgagccctggagggcctgg

SEQ ID NO: 1026629 - DNA, 25 bp, Homo sapien
agcaggggtaggaagagtgtgggcc

SEQ ID NO: 1026630 - DNA, 25 bp, Homo sapien
agctgacactcctggcccagtgaga

SEQ ID NO: 1026631 - DNA, 25 bp, Homo sapien
aagacctgaagcagtggggccccca

SEQ ID NO: 1026632 - DNA, 25 bp, Homo sapien
acactcctggcccagtgagagcagg

SEQ ID NO: 1026633 - DNA, 25 bp, Homo sapien
tcaaacatggagaatcggtcacggg

SEQ ID NO: 1026634 - DNA, 25 bp, Homo sapien
cgtggacgcagatgcgctgactcca

SEQ ID NO: 1026635 - DNA, 25 bp, Homo sapien
agccccataggcacacgcttgggcg

SEQ ID NO: 1026636 - DNA, 25 bp, Homo sapien
aagtagtggagtcagtcgtggacgc

SEQ ID NO: 1026637 - DNA, 25 bp, Homo sapien
aattcggcctgagcggtaattcggg

SEQ ID NO: 1026638 - DNA, 25 bp, Homo sapien
taattcggcctgagcggtaattcgg

SEQ ID NO: 1026639 - DNA, 25 bp, Homo sapien
aattcgggctgagcggtaattcggc

SEQ ID NO: 1026640 - DNA, 25 bp, Homo sapien
gtaattcgggctgagcggtaattcg

SEQ ID NO: 1026641 - DNA, 25 bp, Homo sapien
gcctctccgctgacttggggtcact

SEQ ID NO: 1026642 - DNA, 25 bp, Homo sapien
ggagaaaccgaggcccctgaagtga

SEQ ID NO: 1026643 - DNA, 25 bp, Homo sapien
gaagtgaaggcaggtcctggagcca

SEQ ID NO: 1026644 - DNA, 25 bp, Homo sapien
tctccgctgacttggggtcactgcc

SEQ ID NO: 1026645 - DNA, 25 bp, Homo sapien
ctgggggccccacggcaccgctgct

SEQ ID NO: 1026646 - DNA, 25 bp, Homo sapien
ggggccccacggcaccgctgctcac

SEQ ID NO: 1026647 - DNA, 25 bp, Homo sapien
ggccccacggcaccgctgctcaccc

SEQ ID NO: 1026648 - DNA, 25 bp, Homo sapien
tcctgggggccccacggcaccgctg

SEQ ID NO: 1026649 - DNA, 25 bp, Homo sapien
gctgtcctcggctgttacctttgtg

SEQ ID NO: 1026650 - DNA, 25 bp, Homo sapien
tctacctttcgcagcaaaattcttc

SEQ ID NO: 1026651 - DNA, 25 bp, Homo sapien
agtggaatcacttctctacctttcg

SEQ ID NO: 1026652 - DNA, 25 bp, Homo sapien
cttctcagtagccacgcagcgtgaa

SEQ ID NO: 1026653 - DNA, 25 bp, Homo sapien
catggacacgatgtggaggtgtata

SEQ ID NO: 1026654 - DNA, 25 bp, Homo sapien
atgtggaggtgtatacagtggatga

SEQ ID NO: 1026655 - DNA, 25 bp, Homo sapien
tggaggtgtatacagtggataagat

SEQ ID NO: 1026656 - DNA, 25 bp, Homo sapien
gacacgatgtggaggtgtatacagt

SEQ ID NO: 1026657 - DNA, 25 bp, Homo sapien
gggtgtccaccatggatacgatgtg

SEQ ID NO: 1026658 - DNA, 25 bp, Homo sapien
gtgtccgccatggatacgatgtgga

SEQ ID NO: 1026659 - DNA, 25 bp, Homo sapien
tccgccatggatacgatgtggaggt

SEQ ID NO: 1026660 - DNA, 25 bp, Homo sapien
tgtccgccatggatacgatgtggag

SEQ ID NO: 1026661 - DNA, 25 bp, Homo sapien
gctggcgcacttgaccccgcagcct

SEQ ID NO: 1026662 - DNA, 25 bp, Homo sapien
tggcgcacttgaccccgcagcctcc

SEQ ID NO: 1026663 - DNA, 25 bp, Homo sapien
cagccaccgctggcgcacttgaccc

SEQ ID NO: 1026664 - DNA, 25 bp, Homo sapien
accgctggcgcacttgaccccgcag

SEQ ID NO: 1026665 - DNA, 25 bp, Homo sapien
cgtctccaagcgggcgtctggaata

SEQ ID NO: 1026666 - DNA, 25 bp, Homo sapien
tctccaagcgggcgtctggaataat

SEQ ID NO: 1026667 - DNA, 25 bp, Homo sapien
tccaagcgggcgtctggaataatga

SEQ ID NO: 1026668 - DNA, 25 bp, Homo sapien
caagcgggcgtctggaataatgaga

SEQ ID NO: 1026669 - DNA, 25 bp, Homo sapien
gggcccggaggcgtccggtgctgcc

SEQ ID NO: 1026670 - DNA, 25 bp, Homo sapien
tcccaggaggatcttcgggaagatg

SEQ ID NO: 1026671 - DNA, 25 bp, Homo sapien
aggcgtccggtgctgcctcaggtcc

SEQ ID NO: 1026672 - DNA, 25 bp, Homo sapien
cagcgtcacatgagccaggaaagtc

SEQ ID NO: 1026673 - DNA, 25 bp, Homo sapien
tccggagcacagacaatgaggacaa

SEQ ID NO: 1026674 - DNA, 25 bp, Homo sapien
atctccacgtctgtcacccagcact

SEQ ID NO: 1026675 - DNA, 25 bp, Homo sapien
attggccgttccatgcccagcatct

SEQ ID NO: 1026676 - DNA, 25 bp, Homo sapien
cctccattggccgttccatgcccag

SEQ ID NO: 1026677 - DNA, 25 bp, Homo sapien
gatggggccaacggtggtggagggc

SEQ ID NO: 1026678 - DNA, 25 bp, Homo sapien
tgggatggggccaacggtggtggag

SEQ ID NO: 1026679 - DNA, 25 bp, Homo sapien
tggggccaacggtggtggagggcac

SEQ ID NO: 1026680 - DNA, 25 bp, Homo sapien
gtgggatggggccaacggtggtgga

SEQ ID NO: 1026681 - DNA, 25 bp, Homo sapien
caatacatgcctgccggtgcgtgca

SEQ ID NO: 1026682 - DNA, 25 bp, Homo sapien
aatacatgcctgccggtgcgtgcac

SEQ ID NO: 1026683 - DNA, 25 bp, Homo sapien
tcaatacatgcctgccggtgcgtgc

SEQ ID NO: 1026684 - DNA, 25 bp, Homo sapien
tacatgcctgccggtgcgtgcacac

SEQ ID NO: 1026685 - DNA, 25 bp, Homo sapien
tcatgctgtgtcctcggggccctgg

SEQ ID NO: 1026686 - DNA, 25 bp, Homo sapien
tggcggctgcctcccagatcctggc

SEQ ID NO: 1026687 - DNA, 25 bp, Homo sapien
ctgtgaccacgctccccactcacac

SEQ ID NO: 1026688 - DNA, 25 bp, Homo sapien
ctggcagagtttcccaaagcttgat

SEQ ID NO: 1026689 - DNA, 25 bp, Homo sapien
ctggcctcggcactcagggtatccg

SEQ ID NO: 1026690 - DNA, 25 bp, Homo sapien
actcagccagggttgaccccaacag

SEQ ID NO: 1026691 - DNA, 25 bp, Homo sapien
tcagccagggttgaccccaacagtc

SEQ ID NO: 1026692 - DNA, 25 bp, Homo sapien
gctgaaccagcaacgtccacactca

SEQ ID NO: 1026693 - DNA, 25 bp, Homo sapien
tgggaaagtcagagtcgggcaggtc

SEQ ID NO: 1026694 - DNA, 25 bp, Homo sapien
aggccttgccacagcgacttcatca

SEQ ID NO: 1026695 - DNA, 25 bp, Homo sapien
ttcatcatggagacccccgctacag

SEQ ID NO: 1026696 - DNA, 25 bp, Homo sapien
ctagggtgggaaagtcagagtcggg

SEQ ID NO: 1026697 - DNA, 25 bp, Homo sapien
agagtagcacgaaggggtcctcgct

SEQ ID NO: 1026698 - DNA, 25 bp, Homo sapien
atggccagcacagggccgagaccca

SEQ ID NO: 1026699 - DNA, 25 bp, Homo sapien
ctaggagctgtccctttccatggcc

SEQ ID NO: 1026700 - DNA, 25 bp, Homo sapien
ccactgattgctggggagagtagca

SEQ ID NO: 1026701 - DNA, 25 bp, Homo sapien
cactcagctagcactcactcagagg

SEQ ID NO: 1026702 - DNA, 25 bp, Homo sapien
gatttgtcccgttgctacctggtta

SEQ ID NO: 1026703 - DNA, 25 bp, Homo sapien
ggttgtactattgataagggtctca

SEQ ID NO: 1026704 - DNA, 25 bp, Homo sapien
tgaggccgcatctcctgaaaacaac

SEQ ID NO: 1026705 - DNA, 25 bp, Homo sapien
caggcatgcactaatgcaggctccc

SEQ ID NO: 1026706 - DNA, 25 bp, Homo sapien
gaaactgccatgcatgtaacaggca

SEQ ID NO: 1026707 - DNA, 25 bp, Homo sapien
ggccaccaccgtcactgtctggaaa

SEQ ID NO: 1026708 - DNA, 25 bp, Homo sapien
caggctccccgaagggtgactgtgc

SEQ ID NO: 1026709 - DNA, 25 bp, Homo sapien
agcctggtggcagcaacccacggtc

SEQ ID NO: 1026710 - DNA, 25 bp, Homo sapien
gtggcagcaacccacggtcccaagg

SEQ ID NO: 1026711 - DNA, 25 bp, Homo sapien
aggccataaggatgagcctggtggc

SEQ ID NO: 1026712 - DNA, 25 bp, Homo sapien
caggaggccataaggatgagcctgg

SEQ ID NO: 1026713 - DNA, 25 bp, Homo sapien
cagcctctgcgatgtcagaggtctt

SEQ ID NO: 1026714 - DNA, 25 bp, Homo sapien
tcatggcagatatacctgctgtgtg

SEQ ID NO: 1026715 - DNA, 25 bp, Homo sapien
tgctttgccagcctctgcgatgtca

SEQ ID NO: 1026716 - DNA, 25 bp, Homo sapien
gcagatatacctgctgtgtggaacc

SEQ ID NO: 1026717 - DNA, 25 bp, Homo sapien
ttcctcggcgcccatgaggagtcag

SEQ ID NO: 1026718 - DNA, 25 bp, Homo sapien
cgcccatgaggagtcagcgcgtgct

SEQ ID NO: 1026719 - DNA, 25 bp, Homo sapien
catgaggagtcagcgcgtgctctag

SEQ ID NO: 1026720 - DNA, 25 bp, Homo sapien
ctagggacaggggacgtctagccca

SEQ ID NO: 1026721 - DNA, 25 bp, Homo sapien
gctgccccgcctcggccccacgttc

SEQ ID NO: 1026722 - DNA, 25 bp, Homo sapien
acagacaaagacatatgtgagcatg

SEQ ID NO: 1026723 - DNA, 25 bp, Homo sapien
tcagaagagctctgacggtggtagt

SEQ ID NO: 1026724 - DNA, 25 bp, Homo sapien
agcatgtgcagacacgggtgcctga

SEQ ID NO: 1026725 - DNA, 25 bp, Homo sapien
ccgtaatgagaatggtctgggcctg

SEQ ID NO: 1026726 - DNA, 25 bp, Homo sapien
agggctttggcctccgtctgcgcac

SEQ ID NO: 1026727 - DNA, 25 bp, Homo sapien
tcgcaggggtccagctggccgtaat

SEQ ID NO: 1026728 - DNA, 25 bp, Homo sapien
cacgggacttcacggtgctgtagaa

SEQ ID NO: 1026729 - DNA, 25 bp, Homo sapien
cctgagcacggttccccacgggtgg

SEQ ID NO: 1026730 - DNA, 25 bp, Homo sapien
tcctgagcacggttccccacgggtg

SEQ ID NO: 1026731 - DNA, 25 bp, Homo sapien
caggtcctgagcacggttccccacg

SEQ ID NO: 1026732 - DNA, 25 bp, Homo sapien
tgggcacagcctcgccactgaacac

SEQ ID NO: 1026733 - DNA, 25 bp, Homo sapien
ggcccggagccgctcattagcgcct

SEQ ID NO: 1026734 - DNA, 25 bp, Homo sapien
gacacccgacctctgtgcctgccca

SEQ ID NO: 1026735 - DNA, 25 bp, Homo sapien
ctgtgtgagccgcatctcctgcggg

SEQ ID NO: 1026736 - DNA, 25 bp, Homo sapien
tctgggccgacacccgacctctgtg

SEQ ID NO: 1026737 - DNA, 25 bp, Homo sapien
ctgccgagggggttctgcatttcca

SEQ ID NO: 1026738 - DNA, 25 bp, Homo sapien
cgggaagcatagcccaccctgcagg

SEQ ID NO: 1026739 - DNA, 25 bp, Homo sapien
ctgtctccagcttaggcttccccag

SEQ ID NO: 1026740 - DNA, 25 bp, Homo sapien
agcacggcccgggaagcatagccca

SEQ ID NO: 1026741 - DNA, 25 bp, Homo sapien
aaaagcagggccgtgagccatgcgg

SEQ ID NO: 1026742 - DNA, 25 bp, Homo sapien
caagacaaaagcagggccgtgagcc

SEQ ID NO: 1026743 - DNA, 25 bp, Homo sapien
tgagccatgcggctgccaagtgcct

SEQ ID NO: 1026744 - DNA, 25 bp, Homo sapien
aagcagggccgtgagccatgcggct

SEQ ID NO: 1026745 - DNA, 25 bp, Homo sapien
tccgagttgaagtcctccttgggcc

SEQ ID NO: 1026746 - DNA, 25 bp, Homo sapien
ggtctcggttcctgatgtctcctcc

SEQ ID NO: 1026747 - DNA, 25 bp, Homo sapien
tccgggcctcgcttggcaatctgtc

SEQ ID NO: 1026748 - DNA, 25 bp, Homo sapien
ccggctttggctgagaacagtgtca

SEQ ID NO: 1026749 - DNA, 25 bp, Homo sapien
tggtgggcaggttcctcgccggcat

SEQ ID NO: 1026750 - DNA, 25 bp, Homo sapien
gggatggtgggcaggttcctcgccg

SEQ ID NO: 1026751 - DNA, 25 bp, Homo sapien
ggtggggatggtgggcaggttcctc

SEQ ID NO: 1026752 - DNA, 25 bp, Homo sapien
gatggtgggcaggttcctcgccggc

SEQ ID NO: 1026753 - DNA, 25 bp, Homo sapien
tctggagtccagggggaagccagac

SEQ ID NO: 1026754 - DNA, 25 bp, Homo sapien
gagtccagggggaagccagactcac

SEQ ID NO: 1026755 - DNA, 25 bp, Homo sapien
tggagtccagggggaagccagactc

SEQ ID NO: 1026756 - DNA, 25 bp, Homo sapien
ctctggagtccagggggaagccaga

SEQ ID NO: 1026757 - DNA, 25 bp, Homo sapien
tgctccatgaccacaaagggtgtga

SEQ ID NO: 1026758 - DNA, 25 bp, Homo sapien
gctccatgaccacaaagggtgtgac

SEQ ID NO: 1026759 - DNA, 25 bp, Homo sapien
gtgatacggggatgctggaaaagaa

SEQ ID NO: 1026760 - DNA, 25 bp, Homo sapien
agaaactgattttcatccaccatat

SEQ ID NO: 1026761 - DNA, 25 bp, Homo sapien
cagtgatacggggatgctggaaaag

SEQ ID NO: 1026762 - DNA, 25 bp, Homo sapien
ttcatccaccatattgggagctgct

SEQ ID NO: 1026763 - DNA, 25 bp, Homo sapien
tccaaaccggtggttcccatcgctg

SEQ ID NO: 1026764 - DNA, 25 bp, Homo sapien
tgtgcgtgcacacggatgtgcattt

SEQ ID NO: 1026765 - DNA, 25 bp, Homo sapien
ttttcccgaggttggaattgtgcca

SEQ ID NO: 1026766 - DNA, 25 bp, Homo sapien
taagccctcccgcattgattacatt

SEQ ID NO: 1026767 - DNA, 25 bp, Homo sapien
ccacattgcatcgtaagggttagat

SEQ ID NO: 1026768 - DNA, 25 bp, Homo sapien
cacgagccctggcaagccgctgggt

SEQ ID NO: 1026769 - DNA, 25 bp, Homo sapien
tgggtccttctcgtagcttcgtgtg

SEQ ID NO: 1026770 - DNA, 25 bp, Homo sapien
gaggatgcggcaaacaccacgagcc

SEQ ID NO: 1026771 - DNA, 25 bp, Homo sapien
ctggtcctggtcccaggatgccatc

SEQ ID NO: 1026772 - DNA, 25 bp, Homo sapien
tggtcctggtcccaggatgccatcc

SEQ ID NO: 1026773 - DNA, 25 bp, Homo sapien
gggcaggccgttcggtcctgggcac

SEQ ID NO: 1026774 - DNA, 25 bp, Homo sapien
gccgttcggtcctgggcactctgac

SEQ ID NO: 1026775 - DNA, 25 bp, Homo sapien
aggccgttcggtcctgggcactctg

SEQ ID NO: 1026776 - DNA, 25 bp, Homo sapien
gcaggccgttcggtcctgggcactc

SEQ ID NO: 1026777 - DNA, 25 bp, Homo sapien
gctggtcaccctgtcctgaggctca

SEQ ID NO: 1026778 - DNA, 25 bp, Homo sapien
tggtcaccctgtcctgaggctcagt

SEQ ID NO: 1026779 - DNA, 25 bp, Homo sapien
ctggtcaccctgtcctgaggctcag

SEQ ID NO: 1026780 - DNA, 25 bp, Homo sapien
accctgtcctgaggctcagtcccat

SEQ ID NO: 1026781 - DNA, 25 bp, Homo sapien
tagtggcttgtctggggccgtccag

SEQ ID NO: 1026782 - DNA, 25 bp, Homo sapien
cgttaccatgtagtggcttgtctgg

SEQ ID NO: 1026783 - DNA, 25 bp, Homo sapien
gttaccatgtagtggcttgtctggg

SEQ ID NO: 1026784 - DNA, 25 bp, Homo sapien
atgtagtggcttgtctggggccgtc

SEQ ID NO: 1026785 - DNA, 25 bp, Homo sapien
gtcaacagtgactcgggccattcaa

SEQ ID NO: 1026786 - DNA, 25 bp, Homo sapien
gggccattcaaccaggtccctggag

SEQ ID NO: 1026787 - DNA, 25 bp, Homo sapien
caaacgccgtcaacagtgactcggg

SEQ ID NO: 1026788 - DNA, 25 bp, Homo sapien
ctcctggtgttcaaacgccgtcaac

SEQ ID NO: 1026789 - DNA, 25 bp, Homo sapien
agaagctgcagctgtccggcaccca

SEQ ID NO: 1026790 - DNA, 25 bp, Homo sapien
aaacagaagctgcagctgtccggca

SEQ ID NO: 1026791 - DNA, 25 bp, Homo sapien
acagaagctgcagctgtccggcacc

SEQ ID NO: 1026792 - DNA, 25 bp, Homo sapien
agaaacagaagctgcagctgtccgg

SEQ ID NO: 1026793 - DNA, 25 bp, Homo sapien
tggcggtcccaatgcacctcgcatg

SEQ ID NO: 1026794 - DNA, 25 bp, Homo sapien
gggctggcggtcccaatgcacctcg

SEQ ID NO: 1026795 - DNA, 25 bp, Homo sapien
tcccaatgcacctcgcatggcaggg

SEQ ID NO: 1026796 - DNA, 25 bp, Homo sapien
ggtcccaatgcacctcgcatggcag

SEQ ID NO: 1026797 - DNA, 25 bp, Homo sapien
atcgcacagaaccacaagctgcaca

SEQ ID NO: 1026798 - DNA, 25 bp, Homo sapien
acaagctgcacatgtgggcttctcc

SEQ ID NO: 1026799 - DNA, 25 bp, Homo sapien
atccactgtccactccaggaggaca

SEQ ID NO: 1026800 - DNA, 25 bp, Homo sapien
aaccacaagctgcacatgtgggctt

SEQ ID NO: 1026801 - DNA, 25 bp, Homo sapien
aacaaagccttgtgggtagatgccg

SEQ ID NO: 1026802 - DNA, 25 bp, Homo sapien
catgtagcgtgcagctgtcacacca

SEQ ID NO: 1026803 - DNA, 25 bp, Homo sapien
ccgcacagctccaggtattgataat

SEQ ID NO: 1026804 - DNA, 25 bp, Homo sapien
acaaagacagccttgttgctgcttt

SEQ ID NO: 1026805 - DNA, 25 bp, Homo sapien
taaaaaataccagcaattcctgggc

SEQ ID NO: 1026806 - DNA, 25 bp, Homo sapien
ctaaaaaataccagcaattcctggg

SEQ ID NO: 1026807 - DNA, 25 bp, Homo sapien
ggctggacgatgcaccagcctctgc

SEQ ID NO: 1026808 - DNA, 25 bp, Homo sapien
ctgggctggacgatgcaccagcctc

SEQ ID NO: 1026809 - DNA, 25 bp, Homo sapien
aggcggggcactccgcacacgtgca

SEQ ID NO: 1026810 - DNA, 25 bp, Homo sapien
gcatcctagagaggaaggcggtccc

SEQ ID NO: 1026811 - DNA, 25 bp, Homo sapien
gaggaaggcggtccccacggcttca

SEQ ID NO: 1026812 - DNA, 25 bp, Homo sapien
ctgccctgagcatcctagagaggaa

SEQ ID NO: 1026813 - DNA, 25 bp, Homo sapien
caaccaggtgtcttttggcagctgg

SEQ ID NO: 1026814 - DNA, 25 bp, Homo sapien
caggtgtcttttggcagctggcctc

SEQ ID NO: 1026815 - DNA, 25 bp, Homo sapien
accaggtgtcttttggcagctggcc

SEQ ID NO: 1026816 - DNA, 25 bp, Homo sapien
ccaaccaggtgtcttttggcagctg

SEQ ID NO: 1026817 - DNA, 25 bp, Homo sapien
atcttccttcttgatggggacacct

SEQ ID NO: 1026818 - DNA, 25 bp, Homo sapien
tcttccttcttgatggggacacctc

SEQ ID NO: 1026819 - DNA, 25 bp, Homo sapien
gaacggaaggcctgctccccacggc

SEQ ID NO: 1026820 - DNA, 25 bp, Homo sapien
ggaaggcctgctccccacggctcgg

SEQ ID NO: 1026821 - DNA, 25 bp, Homo sapien
tgaggctatgattgggctcacggct

SEQ ID NO: 1026822 - DNA, 25 bp, Homo sapien
agcggtgggccctgcttgaggctat

SEQ ID NO: 1026823 - DNA, 25 bp, Homo sapien
cacggctgccgcaggtctgtgaatt

SEQ ID NO: 1026824 - DNA, 25 bp, Homo sapien
tcacggctgccgcaggtctgtgaat

SEQ ID NO: 1026825 - DNA, 25 bp, Homo sapien
cagcctcagtcactcggctggtggg

SEQ ID NO: 1026826 - DNA, 25 bp, Homo sapien
tccctgggcgtccagcacccgaggg

SEQ ID NO: 1026827 - DNA, 25 bp, Homo sapien
agcatggtgcgagcccccgtgccat

SEQ ID NO: 1026828 - DNA, 25 bp, Homo sapien
gctggccggacgcaggtcccgtgct

SEQ ID NO: 1026829 - DNA, 25 bp, Homo sapien
tgatcacgcgtgctggtgtcctctc

SEQ ID NO: 1026830 - DNA, 25 bp, Homo sapien
gctaccagggcactgcaataactca

SEQ ID NO: 1026831 - DNA, 25 bp, Homo sapien
ccgcggtgtgtaactcgagaagcat

SEQ ID NO: 1026832 - DNA, 25 bp, Homo sapien
aagtgttgggactgattgatcacgc

SEQ ID NO: 1026833 - DNA, 25 bp, Homo sapien
tccgcagcaggcaacgaccaggcgc

SEQ ID NO: 1026834 - DNA, 25 bp, Homo sapien
cgcagcaggcaacgaccaggcgcat

SEQ ID NO: 1026835 - DNA, 25 bp, Homo sapien
gggtggccccgcatgtgcagcccca

SEQ ID NO: 1026836 - DNA, 25 bp, Homo sapien
cagctccgcagcaggcaacgaccag

SEQ ID NO: 1026837 - DNA, 25 bp, Homo sapien
gagcaatgcggccacttctcaacac

SEQ ID NO: 1026838 - DNA, 25 bp, Homo sapien
ggccacttctcaacacgcactggaa

SEQ ID NO: 1026839 - DNA, 25 bp, Homo sapien
acgcactggaagaccaccaggcctg

SEQ ID NO: 1026840 - DNA, 25 bp, Homo sapien
gacacagagcaatgcggccacttct

SEQ ID NO: 1026841 - DNA, 25 bp, Homo sapien
tattgaaagatccacccggatgatc

SEQ ID NO: 1026842 - DNA, 25 bp, Homo sapien
tgggcagccagtattgctcagcttg

SEQ ID NO: 1026843 - DNA, 25 bp, Homo sapien
gaacaagagctcattcatcacccag

SEQ ID NO: 1026844 - DNA, 25 bp, Homo sapien
gatggcccaggctattattgaaaga

SEQ ID NO: 1026845 - DNA, 25 bp, Homo sapien
ctccttctgagtctgcacactcggc

SEQ ID NO: 1026846 - DNA, 25 bp, Homo sapien
tcggctccacgcagtcactcagagt

SEQ ID NO: 1026847 - DNA, 25 bp, Homo sapien
ttctgagtctgcacactcggctcca

SEQ ID NO: 1026848 - DNA, 25 bp, Homo sapien
ctcggctccacgcagtcactcagag

SEQ ID NO: 1026849 - DNA, 25 bp, Homo sapien
gattctgccaataacagctgtggag

SEQ ID NO: 1026850 - DNA, 25 bp, Homo sapien
ttctcttgagggattctgccaataa

SEQ ID NO: 1026851 - DNA, 25 bp, Homo sapien
tttctcttgagggattctgccaata

SEQ ID NO: 1026852 - DNA, 25 bp, Homo sapien
ctgccaataacagctgtggagcagc

SEQ ID NO: 1026853 - DNA, 25 bp, Homo sapien
tctgtgacagatgaggtggccattc

SEQ ID NO: 1026854 - DNA, 25 bp, Homo sapien
gaaggagacatttcaggctccccac

SEQ ID NO: 1026855 - DNA, 25 bp, Homo sapien
cacccagcttctgaggatctgccat

SEQ ID NO: 1026856 - DNA, 25 bp, Homo sapien
atttccagggaccatgcttccacct

SEQ ID NO: 1026857 - DNA, 25 bp, Homo sapien
tcacggttctgagcctgggagtctg

SEQ ID NO: 1026858 - DNA, 25 bp, Homo sapien
ctctcacggttctgagcctgggagt

SEQ ID NO: 1026859 - DNA, 25 bp, Homo sapien
atcaggcccaacaccggggggtctg

SEQ ID NO: 1026860 - DNA, 25 bp, Homo sapien
cctgggagtctgagatcaggcccaa

SEQ ID NO: 1026861 - DNA, 25 bp, Homo sapien
ggaggtggatggacgtgggtgtccc

SEQ ID NO: 1026862 - DNA, 25 bp, Homo sapien
aggtggatggacgtgggtgtccccg

SEQ ID NO: 1026863 - DNA, 25 bp, Homo sapien
cagctggaggtggatggacgtgggt

SEQ ID NO: 1026864 - DNA, 25 bp, Homo sapien
ctggaggtggatggacgtgggtgtc

SEQ ID NO: 1026865 - DNA, 25 bp, Homo sapien
cctggccactgtctggggctggcac

SEQ ID NO: 1026866 - DNA, 25 bp, Homo sapien
ctaccaccaaggaggcctggccact

SEQ ID NO: 1026867 - DNA, 25 bp, Homo sapien
cactgtctggggctggcaccacgtg

SEQ ID NO: 1026868 - DNA, 25 bp, Homo sapien
taccaccaaggaggcctggccactg

SEQ ID NO: 1026869 - DNA, 25 bp, Homo sapien
gacgctggctccgtcaccgtcgtat

SEQ ID NO: 1026870 - DNA, 25 bp, Homo sapien
tcactgggctgaagaattgtctgcc

SEQ ID NO: 1026871 - DNA, 25 bp, Homo sapien
tcaccgtcgtatctgggtttgctgt

SEQ ID NO: 1026872 - DNA, 25 bp, Homo sapien
tggctcggtagacgcttctgtcctg

SEQ ID NO: 1026873 - DNA, 25 bp, Homo sapien
ggaacgtgctccgatgctttctaga

SEQ ID NO: 1026874 - DNA, 25 bp, Homo sapien
catcacagagggtctgcatccttgg

SEQ ID NO: 1026875 - DNA, 25 bp, Homo sapien
gattgctaaggtttcgagtctcaca

SEQ ID NO: 1026876 - DNA, 25 bp, Homo sapien
ggaagtgcgtcagtgtcgcccaata

SEQ ID NO: 1026877 - DNA, 25 bp, Homo sapien
tgggacaggatctgggaggctctct

SEQ ID NO: 1026878 - DNA, 25 bp, Homo sapien
ctgggacaggatctgggaggctctc

SEQ ID NO: 1026879 - DNA, 25 bp, Homo sapien
ggcaggcaccatcccgaccctgctc

SEQ ID NO: 1026880 - DNA, 25 bp, Homo sapien
cgaccctgctcctgttcgatagcag

SEQ ID NO: 1026881 - DNA, 25 bp, Homo sapien
ctgttcgatagcaggcacgggcaga

SEQ ID NO: 1026882 - DNA, 25 bp, Homo sapien
agagggtgccccccttgaacgccat

SEQ ID NO: 1026883 - DNA, 25 bp, Homo sapien
tgacacgtggttttgtgggccccac

SEQ ID NO: 1026884 - DNA, 25 bp, Homo sapien
tagacacgaggtacagacgcatatg

SEQ ID NO: 1026885 - DNA, 25 bp, Homo sapien
tagacacgcgcggtacactcgttgt

SEQ ID NO: 1026886 - DNA, 25 bp, Homo sapien
gatgggcagtctagacacgtggtac

SEQ ID NO: 1026887 - DNA, 25 bp, Homo sapien
tggtggccccctctgtgtgtcctgc

SEQ ID NO: 1026888 - DNA, 25 bp, Homo sapien
ctgctggtggccccctctgtgtgtc

SEQ ID NO: 1026889 - DNA, 25 bp, Homo sapien
gctggtggccccctctgtgtgtcct

SEQ ID NO: 1026890 - DNA, 25 bp, Homo sapien
tcagctcctgctggtggccccctct

SEQ ID NO: 1026891 - DNA, 25 bp, Homo sapien
ctagaaaaccagcttctctggcccc

SEQ ID NO: 1026892 - DNA, 25 bp, Homo sapien
tctggggtgacaacacttccctttg

SEQ ID NO: 1026893 - DNA, 25 bp, Homo sapien
tagaaaaccagcttctctggcccct

SEQ ID NO: 1026894 - DNA, 25 bp, Homo sapien
tgagctgcaacttctggggtgacaa

SEQ ID NO: 1026895 - DNA, 25 bp, Homo sapien
tgtgatgcaataggggatcccacag

SEQ ID NO: 1026896 - DNA, 25 bp, Homo sapien
accgtgcccgggagccctgcatcct

SEQ ID NO: 1026897 - DNA, 25 bp, Homo sapien
ctcaaggcagggctagcaccgtgcc

SEQ ID NO: 1026898 - DNA, 25 bp, Homo sapien
agccctccagggccgctttgtgatg

SEQ ID NO: 1026899 - DNA, 25 bp, Homo sapien
tttgatgtcgtccacgagacccttg

SEQ ID NO: 1026900 - DNA, 25 bp, Homo sapien
tgcatgaggagctccgtgatgtccc

SEQ ID NO: 1026901 - DNA, 25 bp, Homo sapien
tggagaccatattcgagagcccggg

SEQ ID NO: 1026902 - DNA, 25 bp, Homo sapien
tccgacaggtagaaagcgggcacgc

SEQ ID NO: 1026903 - DNA, 25 bp, Homo sapien
cggtcggggggagccgtgatcttga

SEQ ID NO: 1026904 - DNA, 25 bp, Homo sapien
gtcggggggagccgtgatcttgatg

SEQ ID NO: 1026905 - DNA, 25 bp, Homo sapien
caccggtcggggggagccgtgatct

SEQ ID NO: 1026906 - DNA, 25 bp, Homo sapien
cggggggagccgtgatcttgatggg

SEQ ID NO: 1026907 - DNA, 25 bp, Homo sapien
gaagctactcagagaggtgacgatg

SEQ ID NO: 1026908 - DNA, 25 bp, Homo sapien
caccacggaggtcccaaactccttg

SEQ ID NO: 1026909 - DNA, 25 bp, Homo sapien
ggtgacgatggaggctccaatccag

SEQ ID NO: 1026910 - DNA, 25 bp, Homo sapien
ccacatctgcttgaagctactcaga

SEQ ID NO: 1026911 - DNA, 25 bp, Homo sapien
ttccggcattggtcctttattgaac

SEQ ID NO: 1026912 - DNA, 25 bp, Homo sapien
ccggcattggtcctttattgaacat

SEQ ID NO: 1026913 - DNA, 25 bp, Homo sapien
cacggtacccaacgagaagcggcct

SEQ ID NO: 1026914 - DNA, 25 bp, Homo sapien
tccggcattggtcctttattgaaca

SEQ ID NO: 1026915 - DNA, 25 bp, Homo sapien
gaaccaattctcatgttctctgggc

SEQ ID NO: 1026916 - DNA, 25 bp, Homo sapien
gtctcaggagaaccaattctcatgt

SEQ ID NO: 1026917 - DNA, 25 bp, Homo sapien
ccaattctcatgttctctgggctct

SEQ ID NO: 1026918 - DNA, 25 bp, Homo sapien
tcaggagaaccaattctcatgttct

SEQ ID NO: 1026919 - DNA, 25 bp, Homo sapien
tctcgtggaacctgctcctgagggt

SEQ ID NO: 1026920 - DNA, 25 bp, Homo sapien
ctggcctgatcctcccctagtgtgg

SEQ ID NO: 1026921 - DNA, 25 bp, Homo sapien
caagggatcatggcgcctccattgg

SEQ ID NO: 1026922 - DNA, 25 bp, Homo sapien
tgagcatggggtagccctgagcacc

SEQ ID NO: 1026923 - DNA, 25 bp, Homo sapien
tgcctgggaggagcgtttgtaccga

SEQ ID NO: 1026924 - DNA, 25 bp, Homo sapien
cagcttcccaccactccgagtaggg

SEQ ID NO: 1026925 - DNA, 25 bp, Homo sapien
aggcggaacgcagctcagcagagca

SEQ ID NO: 1026926 - DNA, 25 bp, Homo sapien
tttgtaccgagctccctgtaggtgg

SEQ ID NO: 1026927 - DNA, 25 bp, Homo sapien
taggagttcaagtgggttcccgcca

SEQ ID NO: 1026928 - DNA, 25 bp, Homo sapien
ctggcccaagcctcccctagtgtgg

SEQ ID NO: 1026929 - DNA, 25 bp, Homo sapien
tgggttcccgccagcagccgctgga

SEQ ID NO: 1026930 - DNA, 25 bp, Homo sapien
agcccctggtggcagaggtgtcctg

SEQ ID NO: 1026931 - DNA, 25 bp, Homo sapien
ttgtgccccgacctcggcccacggc

SEQ ID NO: 1026932 - DNA, 25 bp, Homo sapien
gctctgcgttgggtgggagccttga

SEQ ID NO: 1026933 - DNA, 25 bp, Homo sapien
ggagccttgagagcagggagtccat

SEQ ID NO: 1026934 - DNA, 25 bp, Homo sapien
tcttggggtcatcaccgggtccgcc

SEQ ID NO: 1026935 - DNA, 25 bp, Homo sapien
ctggtgacagttttgcccacattgg

SEQ ID NO: 1026936 - DNA, 25 bp, Homo sapien
ggctttgcacaatggcctggtgaca

SEQ ID NO: 1026937 - DNA, 25 bp, Homo sapien
ctgaaagtaaatgtggaggagggaa

SEQ ID NO: 1026938 - DNA, 25 bp, Homo sapien
gctcctggctttgcacaatggcctg

SEQ ID NO: 1026939 - DNA, 25 bp, Homo sapien
cagaaagccgaaagccgtggccaga

SEQ ID NO: 1026940 - DNA, 25 bp, Homo sapien
agaaagccgaaagccgtggccagat

SEQ ID NO: 1026941 - DNA, 25 bp, Homo sapien
tcaccgaaggacagtgccccggaca

SEQ ID NO: 1026942 - DNA, 25 bp, Homo sapien
ggccacagcgcacagggatcagcac

SEQ ID NO: 1026943 - DNA, 25 bp, Homo sapien
agcgcacagggatcagcacgtactg

SEQ ID NO: 1026944 - DNA, 25 bp, Homo sapien
atcagcacgtactggcagatcatgg

SEQ ID NO: 1026945 - DNA, 25 bp, Homo sapien
tctgcattgtttcccatgccgggca

SEQ ID NO: 1026946 - DNA, 25 bp, Homo sapien
gacaatgtctgcattgtttcccatg

SEQ ID NO: 1026947 - DNA, 25 bp, Homo sapien
gcattgtttcccatgccgggcattg

SEQ ID NO: 1026948 - DNA, 25 bp, Homo sapien
aatgtctgcattgtttcccatgccg

SEQ ID NO: 1026949 - DNA, 25 bp, Homo sapien
ctggagtcgacgctggctcctaccc

SEQ ID NO: 1026950 - DNA, 25 bp, Homo sapien
aattcccggtaacagccaagcctgg

SEQ ID NO: 1026951 - DNA, 25 bp, Homo sapien
tgcactgtgaattcccggtaacagc

SEQ ID NO: 1026952 - DNA, 25 bp, Homo sapien
tgggctcctgtcagaatctcaggac

SEQ ID NO: 1026953 - DNA, 25 bp, Homo sapien
ctggagatggccggcaggaaaaggg

SEQ ID NO: 1026954 - DNA, 25 bp, Homo sapien
aagtggagcgtgttcccctcacctc

SEQ ID NO: 1026955 - DNA, 25 bp, Homo sapien
ctgtggagggtcagcctcgtccggg

SEQ ID NO: 1026956 - DNA, 25 bp, Homo sapien
ggtcagcctcgtccgggaccggctc

SEQ ID NO: 1026957 - DNA, 25 bp, Homo sapien
gtgcacgaagtggagcgtgttcccc

SEQ ID NO: 1026958 - DNA, 25 bp, Homo sapien
tggctgcggtgactttccccgccat

SEQ ID NO: 1026959 - DNA, 25 bp, Homo sapien
tgggctggctgcggtgactttcccc

SEQ ID NO: 1026960 - DNA, 25 bp, Homo sapien
ggctggctgcggtgactttccccgc

SEQ ID NO: 1026961 - DNA, 25 bp, Homo sapien
gggctggctgcggtgactttccccg

SEQ ID NO: 1026962 - DNA, 25 bp, Homo sapien
agaagccaggctcaggatccccctc

SEQ ID NO: 1026963 - DNA, 25 bp, Homo sapien
gaagccaggctcaggatccccctca

SEQ ID NO: 1026964 - DNA, 25 bp, Homo sapien
aagccaggctcaggatccccctcat

SEQ ID NO: 1026965 - DNA, 25 bp, Homo sapien
gagccaggcggatatcactgagcag

SEQ ID NO: 1026966 - DNA, 25 bp, Homo sapien
tcatagagaaacagcccatcaggag

SEQ ID NO: 1026967 - DNA, 25 bp, Homo sapien
tcaggaggagccaggcggatatcac

SEQ ID NO: 1026968 - DNA, 25 bp, Homo sapien
gcactgtcgtgtcctggttctgggc

SEQ ID NO: 1026969 - DNA, 25 bp, Homo sapien
cgctgtgctcaggggagtgggaggc

SEQ ID NO: 1026970 - DNA, 25 bp, Homo sapien
ctgtgctcaggggagtgggaggcag

SEQ ID NO: 1026971 - DNA, 25 bp, Homo sapien
gtgctcaggggagtgggaggcagac

SEQ ID NO: 1026972 - DNA, 25 bp, Homo sapien
cccgctgtgctcaggggagtgggag

SEQ ID NO: 1026973 - DNA, 25 bp, Homo sapien
ccctgtttgtgcaggtgcagagctg

SEQ ID NO: 1026974 - DNA, 25 bp, Homo sapien
agccctgtttgtgcaggtgcagagc

SEQ ID NO: 1026975 - DNA, 25 bp, Homo sapien
cctgtttgtgcaggtgcagagctgg

SEQ ID NO: 1026976 - DNA, 25 bp, Homo sapien
tcagccctgtttgtgcaggtgcaga

SEQ ID NO: 1026977 - DNA, 25 bp, Homo sapien
accggcttgcacgatgccgtggcca

SEQ ID NO: 1026978 - DNA, 25 bp, Homo sapien
agagattgagactgtgaacctgaac

SEQ ID NO: 1026979 - DNA, 25 bp, Homo sapien
tgatctcctcccgttgggcccagga

SEQ ID NO: 1026980 - DNA, 25 bp, Homo sapien
tcctgcgcagatgtcgggagtatct

SEQ ID NO: 1026981 - DNA, 25 bp, Homo sapien
tgatactaaaaggtctaagggcaat

SEQ ID NO: 1026982 - DNA, 25 bp, Homo sapien
tggccagacttagaagcggagagca

SEQ ID NO: 1026983 - DNA, 25 bp, Homo sapien
caggtcaggcattgaggagtcccgt

SEQ ID NO: 1026984 - DNA, 25 bp, Homo sapien
agatcagatgcaagtcctccctggg

SEQ ID NO: 1026985 - DNA, 25 bp, Homo sapien
ccgccgcctcggcgcgggattgggg

SEQ ID NO: 1026986 - DNA, 25 bp, Homo sapien
cggcgcgggattggggggctctcct

SEQ ID NO: 1026987 - DNA, 25 bp, Homo sapien
cgcctcggcgcgggattggggggct

SEQ ID NO: 1026988 - DNA, 25 bp, Homo sapien
cctcggcgcgggattggggggctct

SEQ ID NO: 1026989 - DNA, 25 bp, Homo sapien
tgtcggctcgcggaatctctctcct

SEQ ID NO: 1026990 - DNA, 25 bp, Homo sapien
ggtgtcggctcgcggaatctctctc

SEQ ID NO: 1026991 - DNA, 25 bp, Homo sapien
gtcggctcgcggaatctctctcctc

SEQ ID NO: 1026992 - DNA, 25 bp, Homo sapien
gtgtcggctcgcggaatctctctcc

SEQ ID NO: 1026993 - DNA, 25 bp, Homo sapien
ttggctagcttcctcgccctcgcct

SEQ ID NO: 1026994 - DNA, 25 bp, Homo sapien
ttttggctagcttcctcgccctcgc

SEQ ID NO: 1026995 - DNA, 25 bp, Homo sapien
cttcctcgccctcgccttggatcgc

SEQ ID NO: 1026996 - DNA, 25 bp, Homo sapien
tagcttcctcgccctcgccttggat

SEQ ID NO: 1026997 - DNA, 25 bp, Homo sapien
tagcgcccactatttcaaaagcccg

SEQ ID NO: 1026998 - DNA, 25 bp, Homo sapien
acgccaaaggcggtgctctagcgcc

SEQ ID NO: 1026999 - DNA, 25 bp, Homo sapien
gagcgaaagagaaagtaagaccgag

SEQ ID NO: 1027000 - DNA, 25 bp, Homo sapien
caaaagcccggaatatgatttgacc

SEQ ID NO: 1027001 - DNA, 25 bp, Homo sapien
ttttccctggtgcacagagcgcggg

SEQ ID NO: 1027002 - DNA, 25 bp, Homo sapien
gaggactaacccacctgaactgagg

SEQ ID NO: 1027003 - DNA, 25 bp, Homo sapien
gactcgggtaatggactatggtccc

SEQ ID NO: 1027004 - DNA, 25 bp, Homo sapien
ctttctcgttccagcttagggccca

SEQ ID NO: 1027005 - DNA, 25 bp, Homo sapien
agtgtgacagctaatgcaataatga

SEQ ID NO: 1027006 - DNA, 25 bp, Homo sapien
gtgtgacagctaatgcaataatgat

SEQ ID NO: 1027007 - DNA, 25 bp, Homo sapien
cagtgtgacagctaatgcaataatg

SEQ ID NO: 1027008 - DNA, 25 bp, Homo sapien
tgtgacagctaatgcaataatgatt

SEQ ID NO: 1027009 - DNA, 25 bp, Homo sapien
cgccatcagcgcggaaaacgcgcat

SEQ ID NO: 1027010 - DNA, 25 bp, Homo sapien
ggttcgtttcaacacaggctccacg

SEQ ID NO: 1027011 - DNA, 25 bp, Homo sapien
cgtgtgcaggttcggaaacggcacc

SEQ ID NO: 1027012 - DNA, 25 bp, Homo sapien
tccacggcctccactctgagaggtg

SEQ ID NO: 1027013 - DNA, 25 bp, Homo sapien
ggaccaggacttcatattcgcccca

SEQ ID NO: 1027014 - DNA, 25 bp, Homo sapien
tcatattcgccccaaacattcagct

SEQ ID NO: 1027015 - DNA, 25 bp, Homo sapien
ggcccacgggagacctcgccagcag

SEQ ID NO: 1027016 - DNA, 25 bp, Homo sapien
ccaggaggcccgtggaccaggactt

SEQ ID NO: 1027017 - DNA, 25 bp, Homo sapien
attctccaaagcgtcctcaccttta

SEQ ID NO: 1027018 - DNA, 25 bp, Homo sapien
ttttattctccaaagcgtcctcacc

SEQ ID NO: 1027019 - DNA, 25 bp, Homo sapien
ttattctccaaagcgtcctcacctt

SEQ ID NO: 1027020 - DNA, 25 bp, Homo sapien
ttctccaaagcgtcctcacctttac

SEQ ID NO: 1027021 - DNA, 25 bp, Homo sapien
ttaatgcccggagccgtcggagaca

SEQ ID NO: 1027022 - DNA, 25 bp, Homo sapien
cctccggtgagcgtcatttttggtc

SEQ ID NO: 1027023 - DNA, 25 bp, Homo sapien
aaatgttttacggactgatatgacc

SEQ ID NO: 1027024 - DNA, 25 bp, Homo sapien
gtcggagacagtcacgccaacttcc

SEQ ID NO: 1027025 - DNA, 25 bp, Homo sapien
gcccgccaggaccgcagtcccaggc

SEQ ID NO: 1027026 - DNA, 25 bp, Homo sapien
cccatgcttcagatcgaatgtccct

SEQ ID NO: 1027027 - DNA, 25 bp, Homo sapien
ggtctgcctgacaccagatccaggg

SEQ ID NO: 1027028 - DNA, 25 bp, Homo sapien
tgcttcagatcgaatgtccctttga

SEQ ID NO: 1027029 - DNA, 25 bp, Homo sapien
catgcttcagatcgaatgtcccttt

SEQ ID NO: 1027030 - DNA, 25 bp, Homo sapien
ggtaacaccaagcatgcagcagtgc

SEQ ID NO: 1027031 - DNA, 25 bp, Homo sapien
gtgctctctgagcctggtgtccatg

SEQ ID NO: 1027032 - DNA, 25 bp, Homo sapien
ccaggcacagtcgtggtgctctctg

SEQ ID NO: 1027033 - DNA, 25 bp, Homo sapien
ccatgtctacaagcaggtaacacca

SEQ ID NO: 1027034 - DNA, 25 bp, Homo sapien
tgccaccacttctgctcggcacttc

SEQ ID NO: 1027035 - DNA, 25 bp, Homo sapien
tttacttccaagtcgttccgctctg

SEQ ID NO: 1027036 - DNA, 25 bp, Homo sapien
ggagcccacgtctctgcagggtgat

SEQ ID NO: 1027037 - DNA, 25 bp, Homo sapien
tccgctctgacaattccgtggctgc

SEQ ID NO: 1027038 - DNA, 25 bp, Homo sapien
tgtggctgcacttaactcgaattta

SEQ ID NO: 1027039 - DNA, 25 bp, Homo sapien
cggccaagctttatagcgtcccggc

SEQ ID NO: 1027040 - DNA, 25 bp, Homo sapien
ccagtggaagtgacggccaagcttt

SEQ ID NO: 1027041 - DNA, 25 bp, Homo sapien
acctgctgggggcttagaagggcag

SEQ ID NO: 1027042 - DNA, 25 bp, Homo sapien
ctctgaacctgctgggggcttagaa

SEQ ID NO: 1027043 - DNA, 25 bp, Homo sapien
ctatggctccgacttggccagggga

SEQ ID NO: 1027044 - DNA, 25 bp, Homo sapien
gggagagcgtggacaagggatggtg

SEQ ID NO: 1027045 - DNA, 25 bp, Homo sapien
acttggccaggggagagcgtggaca

SEQ ID NO: 1027046 - DNA, 25 bp, Homo sapien
aagggatggtgcacagagcctcctg

SEQ ID NO: 1027047 - DNA, 25 bp, Homo sapien
ggcccatctttgtccatgagagcct

SEQ ID NO: 1027048 - DNA, 25 bp, Homo sapien
tctggcccatctttgtccatgagag

SEQ ID NO: 1027049 - DNA, 25 bp, Homo sapien
ttgtccatgagagccttcaggtcct

SEQ ID NO: 1027050 - DNA, 25 bp, Homo sapien
atctttgtccatgagagccttcagg

SEQ ID NO: 1027051 - DNA, 25 bp, Homo sapien
atggggatgcggttttgaggattca

SEQ ID NO: 1027052 - DNA, 25 bp, Homo sapien
tggggatgcggttttgaggattcat

SEQ ID NO: 1027053 - DNA, 25 bp, Homo sapien
tgagaatctggtaacaggtacaggt

SEQ ID NO: 1027054 - DNA, 25 bp, Homo sapien
ggtctccttgttcaggcaatggttt

SEQ ID NO: 1027055 - DNA, 25 bp, Homo sapien
aggtacaggtctccttgttcaggca

SEQ ID NO: 1027056 - DNA, 25 bp, Homo sapien
gagaatctggtaacaggtacaggtc

SEQ ID NO: 1027057 - DNA, 25 bp, Homo sapien
agcagccacatatggggtaggaagc

SEQ ID NO: 1027058 - DNA, 25 bp, Homo sapien
gcagccacatatggggtaggaagca

SEQ ID NO: 1027059 - DNA, 25 bp, Homo sapien
taacagtcatgctcagagacccgga

SEQ ID NO: 1027060 - DNA, 25 bp, Homo sapien
taaggcgatgcccaatggcctgggc

SEQ ID NO: 1027061 - DNA, 25 bp, Homo sapien
ctcagagacccggaacaaagagcca

SEQ ID NO: 1027062 - DNA, 25 bp, Homo sapien
ttttggcggtatgcgaggttatcac

SEQ ID NO: 1027063 - DNA, 25 bp, Homo sapien
cccaggaatgcacagcgagggccag

SEQ ID NO: 1027064 - DNA, 25 bp, Homo sapien
tgttcagtgagcgttcatgaagtgg

SEQ ID NO: 1027065 - DNA, 25 bp, Homo sapien
tcactaggggtttgtagcccagagg

SEQ ID NO: 1027066 - DNA, 25 bp, Homo sapien
gtgagcgttcatgaagtggccactg

SEQ ID NO: 1027067 - DNA, 25 bp, Homo sapien
gatgattgtgacaccttcacggggt

SEQ ID NO: 1027068 - DNA, 25 bp, Homo sapien
tggtttcgagtcactggtccagtga

SEQ ID NO: 1027069 - DNA, 25 bp, Homo sapien
aaacacccgccatcagagaaatggg

SEQ ID NO: 1027070 - DNA, 25 bp, Homo sapien
aaggaaaggtggtttcgagtcactg

SEQ ID NO: 1027071 - DNA, 25 bp, Homo sapien
tcctgagcactaagggggcactgcc

SEQ ID NO: 1027072 - DNA, 25 bp, Homo sapien
cttttgggacaatctgttggcatcc

SEQ ID NO: 1027073 - DNA, 25 bp, Homo sapien
ggacaatctgttggcatcctgagca

SEQ ID NO: 1027074 - DNA, 25 bp, Homo sapien
ctaagggggcactgcctctgaaggt

SEQ ID NO: 1027075 - DNA, 25 bp, Homo sapien
gtggaccggatcagcacacttagcc

SEQ ID NO: 1027076 - DNA, 25 bp, Homo sapien
aaacgtggaccggatcagcacactt

SEQ ID NO: 1027077 - DNA, 25 bp, Homo sapien
ctgcaaaacgtggaccggatcagca

SEQ ID NO: 1027078 - DNA, 25 bp, Homo sapien
cacacttagccccaaggcgacaaaa

SEQ ID NO: 1027079 - DNA, 25 bp, Homo sapien
tcttgcccagaaccgggcaatctct

SEQ ID NO: 1027080 - DNA, 25 bp, Homo sapien
aatctctggcctccttcgatttaga

SEQ ID NO: 1027081 - DNA, 25 bp, Homo sapien
tctggcctccttcgatttagaccca

SEQ ID NO: 1027082 - DNA, 25 bp, Homo sapien
aatggctcccctgccgtcttgccca

SEQ ID NO: 1027083 - DNA, 25 bp, Homo sapien
gtgaattatcgtggcgctgtccagt

SEQ ID NO: 1027084 - DNA, 25 bp, Homo sapien
tatcgtggcgctgtccagtgattgg

SEQ ID NO: 1027085 - DNA, 25 bp, Homo sapien
attatcgtggcgctgtccagtgatt

SEQ ID NO: 1027086 - DNA, 25 bp, Homo sapien
ggagtgaattatcgtggcgctgtcc

SEQ ID NO: 1027087 - DNA, 25 bp, Homo sapien
atttcgagtacatgatttatcttgc

SEQ ID NO: 1027088 - DNA, 25 bp, Homo sapien
cgagtacatgatttatcttgctggg

SEQ ID NO: 1027089 - DNA, 25 bp, Homo sapien
ttcgagtacatgatttatcttgctg

SEQ ID NO: 1027090 - DNA, 25 bp, Homo sapien
ttaatttcgagtacatgatttatct

SEQ ID NO: 1027091 - DNA, 25 bp, Homo sapien
gtggtccacgcaagtgggaaggccc

SEQ ID NO: 1027092 - DNA, 25 bp, Homo sapien
tgcaggaatgcggcccggccagggc

SEQ ID NO: 1027093 - DNA, 25 bp, Homo sapien
ccagcagcgtgggttggagctgcag

SEQ ID NO: 1027094 - DNA, 25 bp, Homo sapien
aacatcaatccccaggcgaaggcca

SEQ ID NO: 1027095 - DNA, 25 bp, Homo sapien
ctaactccttcgattccagagcttc

SEQ ID NO: 1027096 - DNA, 25 bp, Homo sapien
aactccttcgattccagagcttctg

SEQ ID NO: 1027097 - DNA, 25 bp, Homo sapien
ctccttcgattccagagcttctgag

SEQ ID NO: 1027098 - DNA, 25 bp, Homo sapien
actccttcgattccagagcttctga

SEQ ID NO: 1027099 - DNA, 25 bp, Homo sapien
gatgccaacctgtagccataggaga

SEQ ID NO: 1027100 - DNA, 25 bp, Homo sapien
gcaccccgaggatgccaacctgtag

SEQ ID NO: 1027101 - DNA, 25 bp, Homo sapien
tagccataggagatgccgtgtggaa

SEQ ID NO: 1027102 - DNA, 25 bp, Homo sapien
cccgaggatgccaacctgtagccat

SEQ ID NO: 1027103 - DNA, 25 bp, Homo sapien
gaggtcagcctgaccatcgtctggc

SEQ ID NO: 1027104 - DNA, 25 bp, Homo sapien
tgaccatcgtctggccagagctcgg

SEQ ID NO: 1027105 - DNA, 25 bp, Homo sapien
cagagctcgggcatagacccgcagt

SEQ ID NO: 1027106 - DNA, 25 bp, Homo sapien
aggccacaccgtgtctgccatcaga

SEQ ID NO: 1027107 - DNA, 25 bp, Homo sapien
aggaagccctgcctcttgtagccgg

SEQ ID NO: 1027108 - DNA, 25 bp, Homo sapien
tagccggtgaatctgtggcaccacc

SEQ ID NO: 1027109 - DNA, 25 bp, Homo sapien
cttgcatggatttccggcaccagga

SEQ ID NO: 1027110 - DNA, 25 bp, Homo sapien
cctgcattccaagtggaaacatgaa

SEQ ID NO: 1027111 - DNA, 25 bp, Homo sapien
aagctccagcgcagagacgcaaggg

SEQ ID NO: 1027112 - DNA, 25 bp, Homo sapien
agaagctccagcgcagagacgcaag

SEQ ID NO: 1027113 - DNA, 25 bp, Homo sapien
agctccagcgcagagacgcaagggc

SEQ ID NO: 1027114 - DNA, 25 bp, Homo sapien
ctccagcgcagagacgcaagggcag

SEQ ID NO: 1027115 - DNA, 25 bp, Homo sapien
cagatcccggagagaacaagtctct

SEQ ID NO: 1027116 - DNA, 25 bp, Homo sapien
cctcagacattcagacacagctcct

SEQ ID NO: 1027117 - DNA, 25 bp, Homo sapien
ggagcccctggaatggcagatcccg

SEQ ID NO: 1027118 - DNA, 25 bp, Homo sapien
ggaatggcagatcccggagagaaca

SEQ ID NO: 1027119 - DNA, 25 bp, Homo sapien
cattttttccactcgtataatgatc

SEQ ID NO: 1027120 - DNA, 25 bp, Homo sapien
tcttcctcttgcgggcacttgagtt

SEQ ID NO: 1027121 - DNA, 25 bp, Homo sapien
aggcttaaacttctccacgcggcca

SEQ ID NO: 1027122 - DNA, 25 bp, Homo sapien
tcgtataatgatcctttcttcctct

SEQ ID NO: 1027123 - DNA, 25 bp, Homo sapien
caggcctcgggctcccgtgcaagcg

SEQ ID NO: 1027124 - DNA, 25 bp, Homo sapien
cgtgcaagcgctccgcctcttgccc

SEQ ID NO: 1027125 - DNA, 25 bp, Homo sapien
gctggttctcattcccagccgccgc

SEQ ID NO: 1027126 - DNA, 25 bp, Homo sapien
ttgcacaccgctgccctgagcacca

SEQ ID NO: 1027127 - DNA, 25 bp, Homo sapien
ggtcctgtcggctttcctgagggcc

SEQ ID NO: 1027128 - DNA, 25 bp, Homo sapien
tggctttgccatgatggcagaagag

SEQ ID NO: 1027129 - DNA, 25 bp, Homo sapien
tggagacagacacgttcctgggaac

SEQ ID NO: 1027130 - DNA, 25 bp, Homo sapien
cgttcctgggaacctgataccaagg

SEQ ID NO: 1027131 - DNA, 25 bp, Homo sapien
acagccgcatctcctgagtccagct

SEQ ID NO: 1027132 - DNA, 25 bp, Homo sapien
gaaaaagatgttgccaccctcacag

SEQ ID NO: 1027133 - DNA, 25 bp, Homo sapien
ctcggagctcggacttgatgtctcg

SEQ ID NO: 1027134 - DNA, 25 bp, Homo sapien
tgtctcgccactggggcaatgccct

SEQ ID NO: 1027135 - DNA, 25 bp, Homo sapien
ttaggcaaagagaaactcgccagaa

SEQ ID NO: 1027136 - DNA, 25 bp, Homo sapien
gaaactcgccagaactgtagttggt

SEQ ID NO: 1027137 - DNA, 25 bp, Homo sapien
gaactgtagttggtttgggtcagct

SEQ ID NO: 1027138 - DNA, 25 bp, Homo sapien
tggtttgggtcagctgatcaggttt

SEQ ID NO: 1027139 - DNA, 25 bp, Homo sapien
ctgtcccttcctgcgcacctgcagc

SEQ ID NO: 1027140 - DNA, 25 bp, Homo sapien
tgactgtccctcgttgagggctgtc

SEQ ID NO: 1027141 - DNA, 25 bp, Homo sapien
agctcctccggccttgccctgtcca

SEQ ID NO: 1027142 - DNA, 25 bp, Homo sapien
ctgtctggaccccaggtgctgcctg

SEQ ID NO: 1027143 - DNA, 25 bp, Homo sapien
cgtggccgatcaccctctgggttcc

SEQ ID NO: 1027144 - DNA, 25 bp, Homo sapien
tctgggttcccgagtgagagtcctc

SEQ ID NO: 1027145 - DNA, 25 bp, Homo sapien
tcaccctctgggttcccgagtgaga

SEQ ID NO: 1027146 - DNA, 25 bp, Homo sapien
ttcccgagtgagagtcctcggccct

SEQ ID NO: 1027147 - DNA, 25 bp, Homo sapien
caccgtccttcgggctttgtcctgg

SEQ ID NO: 1027148 - DNA, 25 bp, Homo sapien
tcgggctttgtcctggagggtgcgg

SEQ ID NO: 1027149 - DNA, 25 bp, Homo sapien
ctccaccaccagaagccggttacca

SEQ ID NO: 1027150 - DNA, 25 bp, Homo sapien
tccaccaccagaagccggttaccac

SEQ ID NO: 1027151 - DNA, 25 bp, Homo sapien
gggctgtaaaccaggtcagttccca

SEQ ID NO: 1027152 - DNA, 25 bp, Homo sapien
ctgtaaaccaggtcagttcccagca

SEQ ID NO: 1027153 - DNA, 25 bp, Homo sapien
tccactgtttataactccaagttcc

SEQ ID NO: 1027154 - DNA, 25 bp, Homo sapien
aggagaagcgtccactgtttataac

SEQ ID NO: 1027155 - DNA, 25 bp, Homo sapien
tgggatgactccttccgaggtcctt

SEQ ID NO: 1027156 - DNA, 25 bp, Homo sapien
gtgaaatgggatgactccttccgag

SEQ ID NO: 1027157 - DNA, 25 bp, Homo sapien
caccccatctgtccggtgatgggac

SEQ ID NO: 1027158 - DNA, 25 bp, Homo sapien
ccaccccatctgtccggtgatggga

SEQ ID NO: 1027159 - DNA, 25 bp, Homo sapien
ccaggtcagcgtggggagaagagct

SEQ ID NO: 1027160 - DNA, 25 bp, Homo sapien
aggaaaggccctgctctcggtccct

SEQ ID NO: 1027161 - DNA, 25 bp, Homo sapien
ggccaggtcagcgtggggagaagag

SEQ ID NO: 1027162 - DNA, 25 bp, Homo sapien
ctgttgcaggaaaggccctgctctc

SEQ ID NO: 1027163 - DNA, 25 bp, Homo sapien
gttcttcgggaccttgccacatcca

SEQ ID NO: 1027164 - DNA, 25 bp, Homo sapien
gggaccttgccacatccaatctgac

SEQ ID NO: 1027165 - DNA, 25 bp, Homo sapien
ctgcagcagaccttgagtgtccagg

SEQ ID NO: 1027166 - DNA, 25 bp, Homo sapien
gtttgccgcagagaaggaagcctgc

SEQ ID NO: 1027167 - DNA, 25 bp, Homo sapien
tccctttgacgggagcagctccctt

SEQ ID NO: 1027168 - DNA, 25 bp, Homo sapien
tccttccctttgacgggagcagctc

SEQ ID NO: 1027169 - DNA, 25 bp, Homo sapien
cctttcctgctaacaggaccagggt

SEQ ID NO: 1027170 - DNA, 25 bp, Homo sapien
ctaacaggaccagggtcaggtgcat

SEQ ID NO: 1027171 - DNA, 25 bp, Homo sapien
acggaggcgggacccctcatgggct

SEQ ID NO: 1027172 - DNA, 25 bp, Homo sapien
ggaggcgggacccctcatgggctgt

SEQ ID NO: 1027173 - DNA, 25 bp, Homo sapien
gaggcgggacccctcatgggctgtg

SEQ ID NO: 1027174 - DNA, 25 bp, Homo sapien
aggcgggacccctcatgggctgtgg

SEQ ID NO: 1027175 - DNA, 25 bp, Homo sapien
caatgtggatgacggttttgccgag

SEQ ID NO: 1027176 - DNA, 25 bp, Homo sapien
tgacggttttgccgagggaagccca

SEQ ID NO: 1027177 - DNA, 25 bp, Homo sapien
tcaatgtggatgacggttttgccga

SEQ ID NO: 1027178 - DNA, 25 bp, Homo sapien
tggatgacggttttgccgagggaag

SEQ ID NO: 1027179 - DNA, 25 bp, Homo sapien
gggcaggtaggtgacttgtgatgac

SEQ ID NO: 1027180 - DNA, 25 bp, Homo sapien
agggcaggtaggtgacttgtgatga

SEQ ID NO: 1027181 - DNA, 25 bp, Homo sapien
ggcaggtaggtgacttgtgatgaca

SEQ ID NO: 1027182 - DNA, 25 bp, Homo sapien
ttcactcgattttgcaaatctgctc

SEQ ID NO: 1027183 - DNA, 25 bp, Homo sapien
gcacagccagatgttttcactcgat

SEQ ID NO: 1027184 - DNA, 25 bp, Homo sapien
gctccaggtctaagacatcgctgtt

SEQ ID NO: 1027185 - DNA, 25 bp, Homo sapien
tcagctgctgcttgttagcacagcc

SEQ ID NO: 1027186 - DNA, 25 bp, Homo sapien
gcttttgtgcatcccgttcgacggc

SEQ ID NO: 1027187 - DNA, 25 bp, Homo sapien
gcctttggatgacgccgcaggtgag

SEQ ID NO: 1027188 - DNA, 25 bp, Homo sapien
caggtgaggaggatccctgtgcttt

SEQ ID NO: 1027189 - DNA, 25 bp, Homo sapien
tcaacgtctgggtgccacacgcctt

SEQ ID NO: 1027190 - DNA, 25 bp, Homo sapien
ttgatgtggtggcagctcagggtct

SEQ ID NO: 1027191 - DNA, 25 bp, Homo sapien
tgccccggccagggggcagttgatg

SEQ ID NO: 1027192 - DNA, 25 bp, Homo sapien
ccggccagggggcagttgatgtggt

SEQ ID NO: 1027193 - DNA, 25 bp, Homo sapien
gatgtggtggcagctcagggtctgg

SEQ ID NO: 1027194 - DNA, 25 bp, Homo sapien
ggacctctccaggacgtcagcctga

SEQ ID NO: 1027195 - DNA, 25 bp, Homo sapien
ctgaccccgggctgaccgggctgcc

SEQ ID NO: 1027196 - DNA, 25 bp, Homo sapien
accttgcgaatttctgtgacccggg

SEQ ID NO: 1027197 - DNA, 25 bp, Homo sapien
tcacaccttgcgaatttctgtgacc

SEQ ID NO: 1027198 - DNA, 25 bp, Homo sapien
gcagctatggcaagatgcccccaga

SEQ ID NO: 1027199 - DNA, 25 bp, Homo sapien
cagctatggcaagatgcccccagag

SEQ ID NO: 1027200 - DNA, 25 bp, Homo sapien
agctatggcaagatgcccccagagc

SEQ ID NO: 1027201 - DNA, 25 bp, Homo sapien
cagcagctatggcaagatgccccca

SEQ ID NO: 1027202 - DNA, 25 bp, Homo sapien
agaacaccaggaaacccagcttggg

SEQ ID NO: 1027203 - DNA, 25 bp, Homo sapien
cttaagaacaccaggaaacccagct

SEQ ID NO: 1027204 - DNA, 25 bp, Homo sapien
caccaggaaacccagcttgggccat

SEQ ID NO: 1027205 - DNA, 25 bp, Homo sapien
taagaacaccaggaaacccagcttg

SEQ ID NO: 1027206 - DNA, 25 bp, Homo sapien
ggtcagcccacatctcaaccagggc

SEQ ID NO: 1027207 - DNA, 25 bp, Homo sapien
actgcgtgaagctggaatggtgccc

SEQ ID NO: 1027208 - DNA, 25 bp, Homo sapien
gccagtgcaggatgcccggccgact

SEQ ID NO: 1027209 - DNA, 25 bp, Homo sapien
accaaggtctcctcgccagtgcagg

SEQ ID NO: 1027210 - DNA, 25 bp, Homo sapien
tagcagtttttatacttgctaccca

SEQ ID NO: 1027211 - DNA, 25 bp, Homo sapien
ctggtagaggagtgagaacggcctg

SEQ ID NO: 1027212 - DNA, 25 bp, Homo sapien
ctagcagtttttatacttgctaccc

SEQ ID NO: 1027213 - DNA, 25 bp, Homo sapien
ttgctacccactaccccctgaccca

SEQ ID NO: 1027214 - DNA, 25 bp, Homo sapien
gggtcggttcacacaaaatctccat

SEQ ID NO: 1027215 - DNA, 25 bp, Homo sapien
cctagagcttggtacccacatggag

SEQ ID NO: 1027216 - DNA, 25 bp, Homo sapien
cagtctgtttctaccagggatggcg

SEQ ID NO: 1027217 - DNA, 25 bp, Homo sapien
aagtcctcgcggagaccatgctaat

SEQ ID NO: 1027218 - DNA, 25 bp, Homo sapien
tttagcaatgtgttgtaaatctcct

SEQ ID NO: 1027219 - DNA, 25 bp, Homo sapien
cttccccaagaatatcggtgatgaa

SEQ ID NO: 1027220 - DNA, 25 bp, Homo sapien
aaatggtcctggattatgacagagc

SEQ ID NO: 1027221 - DNA, 25 bp, Homo sapien
gagcacctcgattagagaccacagt

SEQ ID NO: 1027222 - DNA, 25 bp, Homo sapien
gctgagcccggcaggtgctaacact

SEQ ID NO: 1027223 - DNA, 25 bp, Homo sapien
ctgggaccaccatctgggcgactgg

SEQ ID NO: 1027224 - DNA, 25 bp, Homo sapien
ggcaggtccccagatcaaatgctgt

SEQ ID NO: 1027225 - DNA, 25 bp, Homo sapien
tggatttcatctgccggatctggcc

SEQ ID NO: 1027226 - DNA, 25 bp, Homo sapien
cccattcaatcgacaccagggcagg

SEQ ID NO: 1027227 - DNA, 25 bp, Homo sapien
ggagctcagaaatgcccggctgccc

SEQ ID NO: 1027228 - DNA, 25 bp, Homo sapien
tactggaggcgcaaatgatcccaca

SEQ ID NO: 1027229 - DNA, 25 bp, Homo sapien
gaatgcccggtgagttcatcaatga

SEQ ID NO: 1027230 - DNA, 25 bp, Homo sapien
acgggctcgccgctgtcaatcctaa

SEQ ID NO: 1027231 - DNA, 25 bp, Homo sapien
tctgctccctgattcgcctccatcg

SEQ ID NO: 1027232 - DNA, 25 bp, Homo sapien
cgccgctgtcaatcctaaatgattc

SEQ ID NO: 1027233 - DNA, 25 bp, Homo sapien
tgattcgcctccatcggcgcacggg

SEQ ID NO: 1027234 - DNA, 25 bp, Homo sapien
cgagcctggctccgcgttttccaca

SEQ ID NO: 1027235 - DNA, 25 bp, Homo sapien
gagcctggctccgcgttttccacac

SEQ ID NO: 1027236 - DNA, 25 bp, Homo sapien
cactcctgcggaggtgccgctttga

SEQ ID NO: 1027237 - DNA, 25 bp, Homo sapien
tgcctgtgtggcttcgatggtcgca

SEQ ID NO: 1027238 - DNA, 25 bp, Homo sapien
gatggtcgcacaggcgtcaccaggt

SEQ ID NO: 1027239 - DNA, 25 bp, Homo sapien
cggaggtgccgctttgaccctggac

SEQ ID NO: 1027240 - DNA, 25 bp, Homo sapien
gacgacacaggcttcagggcgcagc

SEQ ID NO: 1027241 - DNA, 25 bp, Homo sapien
gccggacgtttgcatggtgtgtaat

SEQ ID NO: 1027242 - DNA, 25 bp, Homo sapien
ctttatacttaagccgctggccgga

SEQ ID NO: 1027243 - DNA, 25 bp, Homo sapien
gtaattcatgaagcggcggcctctg

SEQ ID NO: 1027244 - DNA, 25 bp, Homo sapien
gctgggaaatcgttcccagaagctg

SEQ ID NO: 1027245 - DNA, 25 bp, Homo sapien
aagctgtcggcccaacgtcacggct

SEQ ID NO: 1027246 - DNA, 25 bp, Homo sapien
cgcctgggtccgagcgagctgggaa

SEQ ID NO: 1027247 - DNA, 25 bp, Homo sapien
aacgtcacggctgacatccatcatg

SEQ ID NO: 1027248 - DNA, 25 bp, Homo sapien
tgttgggtccacaacggaatggtgt

SEQ ID NO: 1027249 - DNA, 25 bp, Homo sapien
catgcaccttgttgggtccacaacg

SEQ ID NO: 1027250 - DNA, 25 bp, Homo sapien
gcaccttgttgggtccacaacggaa

SEQ ID NO: 1027251 - DNA, 25 bp, Homo sapien
ccttgttgggtccacaacggaatgg

SEQ ID NO: 1027252 - DNA, 25 bp, Homo sapien
ccccaggccgcgctgtggttccctt

SEQ ID NO: 1027253 - DNA, 25 bp, Homo sapien
ctgtggttccctttccagccgtcat

SEQ ID NO: 1027254 - DNA, 25 bp, Homo sapien
gctgtggttccctttccagccgtca

SEQ ID NO: 1027255 - DNA, 25 bp, Homo sapien
aggccgcgctgtggttccctttcca

SEQ ID NO: 1027256 - DNA, 25 bp, Homo sapien
gagtgagtcctctggcttctcccca

SEQ ID NO: 1027257 - DNA, 25 bp, Homo sapien
ccgagtgagtcctctggcttctccc

SEQ ID NO: 1027258 - DNA, 25 bp, Homo sapien
cgagtgagtcctctggcttctcccc

SEQ ID NO: 1027259 - DNA, 25 bp, Homo sapien
agtgagtcctctggcttctccccac

SEQ ID NO: 1027260 - DNA, 25 bp, Homo sapien
ctctcccacgcaggcctgaattccc

SEQ ID NO: 1027261 - DNA, 25 bp, Homo sapien
cagctttgagttctgcggatgacgg

SEQ ID NO: 1027262 - DNA, 25 bp, Homo sapien
cggatgacggatttccggaatggct

SEQ ID NO: 1027263 - DNA, 25 bp, Homo sapien
cagaaattcctctcacgtaaagggc

SEQ ID NO: 1027264 - DNA, 25 bp, Homo sapien
gctgacccgagcgtggcccatggac

SEQ ID NO: 1027265 - DNA, 25 bp, Homo sapien
acaaaggcgttagctcgccgctgac

SEQ ID NO: 1027266 - DNA, 25 bp, Homo sapien
tggcccatggacacggcagccaggg

SEQ ID NO: 1027267 - DNA, 25 bp, Homo sapien
ctgacaaaggcgttagctcgccgct

SEQ ID NO: 1027268 - DNA, 25 bp, Homo sapien
taggcagtgaattaacgacagtccc

SEQ ID NO: 1027269 - DNA, 25 bp, Homo sapien
ctgccacgaggtgtgcacagtccac

SEQ ID NO: 1027270 - DNA, 25 bp, Homo sapien
gcgcgggccgcggtcattaggcagt

SEQ ID NO: 1027271 - DNA, 25 bp, Homo sapien
atcacccgattactcggagcgcgcg

SEQ ID NO: 1027272 - DNA, 25 bp, Homo sapien
gcttgcacctggagctcggctcgct

SEQ ID NO: 1027273 - DNA, 25 bp, Homo sapien
cagcagcataaggacatcgtggagc

SEQ ID NO: 1027274 - DNA, 25 bp, Homo sapien
ctttgtgctcgggaggcgcctgatc

SEQ ID NO: 1027275 - DNA, 25 bp, Homo sapien
tccaagcagggcgacaagaggttct

SEQ ID NO: 1027276 - DNA, 25 bp, Homo sapien
gaagccgaattgtcattagggcccg

SEQ ID NO: 1027277 - DNA, 25 bp, Homo sapien
gccgaattgtcattagggcccggga

SEQ ID NO: 1027278 - DNA, 25 bp, Homo sapien
gctgatgaagccgaattgtcattag

SEQ ID NO: 1027279 - DNA, 25 bp, Homo sapien
ctgcagggctgatgaagccgaattg

SEQ ID NO: 1027280 - DNA, 25 bp, Homo sapien
tgaggttgcattcagtctcacctgg

SEQ ID NO: 1027281 - DNA, 25 bp, Homo sapien
tcgagatgtgaacgcctgaggttgc

SEQ ID NO: 1027282 - DNA, 25 bp, Homo sapien
taaacttactgatcagttcaggcca

SEQ ID NO: 1027283 - DNA, 25 bp, Homo sapien
gacagagaacgcctccatcacaact

SEQ ID NO: 1027284 - DNA, 25 bp, Homo sapien
aaacaccgggccatcattcttgtaa

SEQ ID NO: 1027285 - DNA, 25 bp, Homo sapien
cgagccttgcaagtctgtttttaac

SEQ ID NO: 1027286 - DNA, 25 bp, Homo sapien
tgcccagaggcagcaagacgccgcg

SEQ ID NO: 1027287 - DNA, 25 bp, Homo sapien
ttgtaaaacccagccatggccgagc

SEQ ID NO: 1027288 - DNA, 25 bp, Homo sapien
gtctgtgtagatgtggcctccaaaa

SEQ ID NO: 1027289 - DNA, 25 bp, Homo sapien
cgtcttattgccacgtgctcctcat

SEQ ID NO: 1027290 - DNA, 25 bp, Homo sapien
ttcaagtctaaagctgcccctgcaa

SEQ ID NO: 1027291 - DNA, 25 bp, Homo sapien
gaccaaacccttgccgtcttattgc

SEQ ID NO: 1027292 - DNA, 25 bp, Homo sapien
ctctaaggagaccagaacttttaag

SEQ ID NO: 1027293 - DNA, 25 bp, Homo sapien
ttctgtggctgcctcgaggacccgt

SEQ ID NO: 1027294 - DNA, 25 bp, Homo sapien
gctgcctcgaggacccgtgaaagtg

SEQ ID NO: 1027295 - DNA, 25 bp, Homo sapien
gatctagatctttccacgcaagccc

SEQ ID NO: 1027296 - DNA, 25 bp, Homo sapien
gcaccctgtcgttggctgcggaaac

SEQ ID NO: 1027297 - DNA, 25 bp, Homo sapien
catcaatgggcaccgagggtgctca

SEQ ID NO: 1027298 - DNA, 25 bp, Homo sapien
agcgccggggactcgggcatcaatg

SEQ ID NO: 1027299 - DNA, 25 bp, Homo sapien
actcgggcatcaatgggcaccgagg

SEQ ID NO: 1027300 - DNA, 25 bp, Homo sapien
ggactcgggcatcaatgggcaccga

SEQ ID NO: 1027301 - DNA, 25 bp, Homo sapien
ggagacaacgcagcgtcaacctctg

SEQ ID NO: 1027302 - DNA, 25 bp, Homo sapien
gcagcgtcaacctctgcagcacgtg

SEQ ID NO: 1027303 - DNA, 25 bp, Homo sapien
gacaacgcagcgtcaacctctgcag

SEQ ID NO: 1027304 - DNA, 25 bp, Homo sapien
taaaggagacaacgcagcgtcaacc

SEQ ID NO: 1027305 - DNA, 25 bp, Homo sapien
atggaggactctcggagctcgaagt

SEQ ID NO: 1027306 - DNA, 25 bp, Homo sapien
agctcgaagtctgctgggatcggaa

SEQ ID NO: 1027307 - DNA, 25 bp, Homo sapien
tcccggttgggctcatacatattat

SEQ ID NO: 1027308 - DNA, 25 bp, Homo sapien
gatgggcgacatggcactgtcctcg

SEQ ID NO: 1027309 - DNA, 25 bp, Homo sapien
gagacgacacgcacgcatgggttgt

SEQ ID NO: 1027310 - DNA, 25 bp, Homo sapien
gaaattcaggaccatcagagacgac

SEQ ID NO: 1027311 - DNA, 25 bp, Homo sapien
tgctctggccgagctcactgcaggg

SEQ ID NO: 1027312 - DNA, 25 bp, Homo sapien
taaataaataccgtggacattacag

SEQ ID NO: 1027313 - DNA, 25 bp, Homo sapien
tggtgactctcccaatgcctgcaac

SEQ ID NO: 1027314 - DNA, 25 bp, Homo sapien
tccacagcgtcagggaacattggtg

SEQ ID NO: 1027315 - DNA, 25 bp, Homo sapien
gaaggcagtgcatccttccacagcg

SEQ ID NO: 1027316 - DNA, 25 bp, Homo sapien
cgggacgggcaggaaggcagtgcat

SEQ ID NO: 1027317 - DNA, 25 bp, Homo sapien
cgtgaaattacggtgctgataagcc

SEQ ID NO: 1027318 - DNA, 25 bp, Homo sapien
tgataagccggaatggactttagag

SEQ ID NO: 1027319 - DNA, 25 bp, Homo sapien
aatcttagctctgctcgtgaaatta

SEQ ID NO: 1027320 - DNA, 25 bp, Homo sapien
cggtgctgataagccggaatggact

SEQ ID NO: 1027321 - DNA, 25 bp, Homo sapien
ttagacggcacacaccatccttcac

SEQ ID NO: 1027322 - DNA, 25 bp, Homo sapien
ctttagacggcacacaccatccttc

SEQ ID NO: 1027323 - DNA, 25 bp, Homo sapien
gacggcacacaccatccttcacctg

SEQ ID NO: 1027324 - DNA, 25 bp, Homo sapien
agacggcacacaccatccttcacct

SEQ ID NO: 1027325 - DNA, 25 bp, Homo sapien
tagggatcagtgtgggattccttcc

SEQ ID NO: 1027326 - DNA, 25 bp, Homo sapien
cactggttcagaaacggagccacgg

SEQ ID NO: 1027327 - DNA, 25 bp, Homo sapien
cctctctagaaactgtagggatcag

SEQ ID NO: 1027328 - DNA, 25 bp, Homo sapien
gaattcggagacttccctggtggcc

SEQ ID NO: 1027329 - DNA, 25 bp, Homo sapien
tggctgcacttccacgacatggctg

SEQ ID NO: 1027330 - DNA, 25 bp, Homo sapien
tggatcatccacacagaggtcgggt

SEQ ID NO: 1027331 - DNA, 25 bp, Homo sapien
tgttctcctggaccccaataggcct

SEQ ID NO: 1027332 - DNA, 25 bp, Homo sapien
gcattgacctctaagatcggtggcc

SEQ ID NO: 1027333 - DNA, 25 bp, Homo sapien
tatcaagaatggtttcagcatctcc

SEQ ID NO: 1027334 - DNA, 25 bp, Homo sapien
tgaactctatggcagtcacggatga

SEQ ID NO: 1027335 - DNA, 25 bp, Homo sapien
ggcagtcacggatgactggctacag

SEQ ID NO: 1027336 - DNA, 25 bp, Homo sapien
gactggctacaggaacctgtcccct

SEQ ID NO: 1027337 - DNA, 25 bp, Homo sapien
gagcagaaaggagcggttttcctct

SEQ ID NO: 1027338 - DNA, 25 bp, Homo sapien
ggagcagaaaggagcggttttcctc

SEQ ID NO: 1027339 - DNA, 25 bp, Homo sapien
gcagaaaggagcggttttcctcttg

SEQ ID NO: 1027340 - DNA, 25 bp, Homo sapien
agaaaggagcggttttcctcttgag

SEQ ID NO: 1027341 - DNA, 25 bp, Homo sapien
caagctcgacagaggccagtttatg

SEQ ID NO: 1027342 - DNA, 25 bp, Homo sapien
ctcgccgtagacttaggccagcgca

SEQ ID NO: 1027343 - DNA, 25 bp, Homo sapien
taggccagcgcactcagcatggctg

SEQ ID NO: 1027344 - DNA, 25 bp, Homo sapien
agcatggctgccaagctcgacagag

SEQ ID NO: 1027345 - DNA, 25 bp, Homo sapien
cctgtgctagctccgtggatccggg

SEQ ID NO: 1027346 - DNA, 25 bp, Homo sapien
tagctccgtggatccgggggacctc

SEQ ID NO: 1027347 - DNA, 25 bp, Homo sapien
ggcctgtgctagctccgtggatccg

SEQ ID NO: 1027348 - DNA, 25 bp, Homo sapien
gctagctccgtggatccgggggacc

SEQ ID NO: 1027349 - DNA, 25 bp, Homo sapien
ggagactccgccggtctgggtccat

SEQ ID NO: 1027350 - DNA, 25 bp, Homo sapien
ccagggagactccgccggtctgggt

SEQ ID NO: 1027351 - DNA, 25 bp, Homo sapien
gggagactccgccggtctgggtcca

SEQ ID NO: 1027352 - DNA, 25 bp, Homo sapien
cagggagactccgccggtctgggtc

SEQ ID NO: 1027353 - DNA, 25 bp, Homo sapien
tgtgctggtcctgcgtgaccaggtc

SEQ ID NO: 1027354 - DNA, 25 bp, Homo sapien
ggtcctgcgtgaccaggtcccaggc

SEQ ID NO: 1027355 - DNA, 25 bp, Homo sapien
gctggtcctgcgtgaccaggtccca

SEQ ID NO: 1027356 - DNA, 25 bp, Homo sapien
ctgtgctggtcctgcgtgaccaggt

SEQ ID NO: 1027357 - DNA, 25 bp, Homo sapien
agcttctcccagtgacacccaggaa

SEQ ID NO: 1027358 - DNA, 25 bp, Homo sapien
tgtcatccagggagcttctcccagt

SEQ ID NO: 1027359 - DNA, 25 bp, Homo sapien
gggagcttctcccagtgacacccag

SEQ ID NO: 1027360 - DNA, 25 bp, Homo sapien
ctgtcatccagggagcttctcccag

SEQ ID NO: 1027361 - DNA, 25 bp, Homo sapien
ggggagcagtggacgccctccaggg

SEQ ID NO: 1027362 - DNA, 25 bp, Homo sapien
gggagcagtggacgccctccagggt

SEQ ID NO: 1027363 - DNA, 25 bp, Homo sapien
ctggggagcagtggacgccctccag

SEQ ID NO: 1027364 - DNA, 25 bp, Homo sapien
tggggagcagtggacgccctccagg

SEQ ID NO: 1027365 - DNA, 25 bp, Homo sapien
ttccccttgggcctccctcacctca

SEQ ID NO: 1027366 - DNA, 25 bp, Homo sapien
ctgcaacagcccctccttccccttg

SEQ ID NO: 1027367 - DNA, 25 bp, Homo sapien
tccccttgggcctccctcacctcac

SEQ ID NO: 1027368 - DNA, 25 bp, Homo sapien
tgcaacagcccctccttccccttgg

SEQ ID NO: 1027369 - DNA, 25 bp, Homo sapien
agcaccagcaccattggttggcagg

SEQ ID NO: 1027370 - DNA, 25 bp, Homo sapien
ctgaagccgaccacaggccgaagga

SEQ ID NO: 1027371 - DNA, 25 bp, Homo sapien
cctcctgaagccgaccacaggccga

SEQ ID NO: 1027372 - DNA, 25 bp, Homo sapien
gcaccagcaccattggttggcaggg

SEQ ID NO: 1027373 - DNA, 25 bp, Homo sapien
tcagaccggagcacgttttctcttc

SEQ ID NO: 1027374 - DNA, 25 bp, Homo sapien
cagaccggagcacgttttctcttct

SEQ ID NO: 1027375 - DNA, 25 bp, Homo sapien
tggggccgattgcccacttggagcc

SEQ ID NO: 1027376 - DNA, 25 bp, Homo sapien
ggtggggccgattgcccacttggag

SEQ ID NO: 1027377 - DNA, 25 bp, Homo sapien
gtggggccgattgcccacttggagc

SEQ ID NO: 1027378 - DNA, 25 bp, Homo sapien
agctgtgtcctgtgatccgacactt

SEQ ID NO: 1027379 - DNA, 25 bp, Homo sapien
ccttgcattggagcatgccaccggc

SEQ ID NO: 1027380 - DNA, 25 bp, Homo sapien
tggccttgcattggagcatgccacc

SEQ ID NO: 1027381 - DNA, 25 bp, Homo sapien
gccttgcattggagcatgccaccgg

SEQ ID NO: 1027382 - DNA, 25 bp, Homo sapien
tctgagcagccaccccgtgcttctt

SEQ ID NO: 1027383 - DNA, 25 bp, Homo sapien
tgaatctgagcagccaccccgtgct

SEQ ID NO: 1027384 - DNA, 25 bp, Homo sapien
atctgagcagccaccccgtgcttct

SEQ ID NO: 1027385 - DNA, 25 bp, Homo sapien
tcatgaatctgagcagccaccccgt

SEQ ID NO: 1027386 - DNA, 25 bp, Homo sapien
ggacccagtcctgcgaaggcgtgca

SEQ ID NO: 1027387 - DNA, 25 bp, Homo sapien
atgtctgcggcatttaagtgaatcc

SEQ ID NO: 1027388 - DNA, 25 bp, Homo sapien
gggtttatgtctgcggcatttaagt

SEQ ID NO: 1027389 - DNA, 25 bp, Homo sapien
acccagtcctgcgaaggcgtgcagg

SEQ ID NO: 1027390 - DNA, 25 bp, Homo sapien
tgggatactgcgaagagcccacggc

SEQ ID NO: 1027391 - DNA, 25 bp, Homo sapien
tggaaaaagagagaacgccggctct

SEQ ID NO: 1027392 - DNA, 25 bp, Homo sapien
gcccacggctcgaaacagagacttg

SEQ ID NO: 1027393 - DNA, 25 bp, Homo sapien
tggaggaagagcaaactcgacccac

SEQ ID NO: 1027394 - DNA, 25 bp, Homo sapien
agggatgatatgtacaggccgaagc

SEQ ID NO: 1027395 - DNA, 25 bp, Homo sapien
ggtactggttctggagggatgggcc

SEQ ID NO: 1027396 - DNA, 25 bp, Homo sapien
gggatgggccatggcgaggagcccc

SEQ ID NO: 1027397 - DNA, 25 bp, Homo sapien
tatgtacaggccgaagccctgcgtt

SEQ ID NO: 1027398 - DNA, 25 bp, Homo sapien
atgcgcgttcctccttgggccacag

SEQ ID NO: 1027399 - DNA, 25 bp, Homo sapien
agggggatgcgcgttcctccttggg

SEQ ID NO: 1027400 - DNA, 25 bp, Homo sapien
ctgcagggggatgcgcgttcctcct

SEQ ID NO: 1027401 - DNA, 25 bp, Homo sapien
gagctgcagggggatgcgcgttcct

SEQ ID NO: 1027402 - DNA, 25 bp, Homo sapien
agcatcctctagtgatttcatctca

SEQ ID NO: 1027403 - DNA, 25 bp, Homo sapien
tcttgaggccctcggctagacagca

SEQ ID NO: 1027404 - DNA, 25 bp, Homo sapien
agcacactgggtgcccgaaagcatc

SEQ ID NO: 1027405 - DNA, 25 bp, Homo sapien
agttgccagtggaggccagtctgtc

SEQ ID NO: 1027406 - DNA, 25 bp, Homo sapien
catgtgcacacaaatcgtgatggcg

SEQ ID NO: 1027407 - DNA, 25 bp, Homo sapien
tgatggcgctcaagacgtaaccacc

SEQ ID NO: 1027408 - DNA, 25 bp, Homo sapien
taaccacccgttttcaagactgcca

SEQ ID NO: 1027409 - DNA, 25 bp, Homo sapien
ctattttcggcatgtgcacacaaat

SEQ ID NO: 1027410 - DNA, 25 bp, Homo sapien
gagcagcctcgacgccctcatctgt

SEQ ID NO: 1027411 - DNA, 25 bp, Homo sapien
ccgctgtccatgacgacggggaaga

SEQ ID NO: 1027412 - DNA, 25 bp, Homo sapien
ccgctgtccctgacgacggagaagg

SEQ ID NO: 1027413 - DNA, 25 bp, Homo sapien
aaacagcaacgctgcctggcccatc

SEQ ID NO: 1027414 - DNA, 25 bp, Homo sapien
ctgccctggaggatgccttcagggg

SEQ ID NO: 1027415 - DNA, 25 bp, Homo sapien
ctgaccaacacggaatgttcctccg

SEQ ID NO: 1027416 - DNA, 25 bp, Homo sapien
caacacggaatgttcctccgacctt

SEQ ID NO: 1027417 - DNA, 25 bp, Homo sapien
tgccctggaggatgccttcaggggc

SEQ ID NO: 1027418 - DNA, 25 bp, Homo sapien
gactcgcatttctgagttccgcaaa

SEQ ID NO: 1027419 - DNA, 25 bp, Homo sapien
agcaagcatttgtggactcgcattt

SEQ ID NO: 1027420 - DNA, 25 bp, Homo sapien
aaacttgcaagccaaggaggccaga

SEQ ID NO: 1027421 - DNA, 25 bp, Homo sapien
tctgagttccgcaaacttgcaagcc

SEQ ID NO: 1027422 - DNA, 25 bp, Homo sapien
agatccgaaagtggatccatatccg

SEQ ID NO: 1027423 - DNA, 25 bp, Homo sapien
ggatccatatccgagcagaatatgg

SEQ ID NO: 1027424 - DNA, 25 bp, Homo sapien
aacctttcaagatccgaaagtggat

SEQ ID NO: 1027425 - DNA, 25 bp, Homo sapien
gaaagtggatccatatccgagcaga

SEQ ID NO: 1027426 - DNA, 25 bp, Homo sapien
ggagaaggatgctggcggaatggtt

SEQ ID NO: 1027427 - DNA, 25 bp, Homo sapien
agaaggatgctggcggaatggtttt

SEQ ID NO: 1027428 - DNA, 25 bp, Homo sapien
gagaaggatgctggcggaatggttt

SEQ ID NO: 1027429 - DNA, 25 bp, Homo sapien
gaaggatgctggcggaatggttttc

SEQ ID NO: 1027430 - DNA, 25 bp, Homo sapien
gtgaccatactggagaggaagcatc

SEQ ID NO: 1027431 - DNA, 25 bp, Homo sapien
gcatcaaagctaccgcagaggaagg

SEQ ID NO: 1027432 - DNA, 25 bp, Homo sapien
gatttgagctctgaaagcccctgtc

SEQ ID NO: 1027433 - DNA, 25 bp, Homo sapien
gcccctctgttggtgaccatactgg

SEQ ID NO: 1027434 - DNA, 25 bp, Homo sapien
tgggcctcgaggcacagggtccggc

SEQ ID NO: 1027435 - DNA, 25 bp, Homo sapien
cgcctgtcttgcggctgcttggcct

SEQ ID NO: 1027436 - DNA, 25 bp, Homo sapien
tcccgcctgtcttgcggctgcttgg

SEQ ID NO: 1027437 - DNA, 25 bp, Homo sapien
ctgtcttgcggctgcttggcctgga

SEQ ID NO: 1027438 - DNA, 25 bp, Homo sapien
tggtctcagagcttccgagggcctg

SEQ ID NO: 1027439 - DNA, 25 bp, Homo sapien
atgaggagaaagttctgcgaggctg

SEQ ID NO: 1027440 - DNA, 25 bp, Homo sapien
cctcccgtagccagctcaggaactg

SEQ ID NO: 1027441 - DNA, 25 bp, Homo sapien
tccagcacgagaaagggaagcagcg

SEQ ID NO: 1027442 - DNA, 25 bp, Homo sapien
ggaagcagcggccagtccaagagcc

SEQ ID NO: 1027443 - DNA, 25 bp, Homo sapien
tcacttccagcacgagaaagggaag

SEQ ID NO: 1027444 - DNA, 25 bp, Homo sapien
aatgcggtggtcagacaagcgcccc

SEQ ID NO: 1027445 - DNA, 25 bp, Homo sapien
cctcattgccaatgcggtggtcaga

SEQ ID NO: 1027446 - DNA, 25 bp, Homo sapien
ccccaggccattagcatatttgtgg

SEQ ID NO: 1027447 - DNA, 25 bp, Homo sapien
tgccaatgcggtggtcagacaagcg

SEQ ID NO: 1027448 - DNA, 25 bp, Homo sapien
agggccccgagcagggaacagcact

SEQ ID NO: 1027449 - DNA, 25 bp, Homo sapien
cactgggatgcagcatcttcgcccc

SEQ ID NO: 1027450 - DNA, 25 bp, Homo sapien
aagccaggccgctctgcttccaggg

SEQ ID NO: 1027451 - DNA, 25 bp, Homo sapien
ccctctttggccaatgagagaagcc

SEQ ID NO: 1027452 - DNA, 25 bp, Homo sapien
acctgctaaaagctgattccaaggc

SEQ ID NO: 1027453 - DNA, 25 bp, Homo sapien
ttctgaagtagcttcgttggaccca

SEQ ID NO: 1027454 - DNA, 25 bp, Homo sapien
gtctagaacctgctaaaagctgatt

SEQ ID NO: 1027455 - DNA, 25 bp, Homo sapien
aagatgtgggtctgagtctagaacc

SEQ ID NO: 1027456 - DNA, 25 bp, Homo sapien
cagcgggaggtggacggagcccggt

SEQ ID NO: 1027457 - DNA, 25 bp, Homo sapien
gcgggaggtggacggagcccggtgc

SEQ ID NO: 1027458 - DNA, 25 bp, Homo sapien
gaggtggacggagcccggtgcggag

SEQ ID NO: 1027459 - DNA, 25 bp, Homo sapien
ggacggagcccggtgcggaggaggc

SEQ ID NO: 1027460 - DNA, 25 bp, Homo sapien
aatggatcccagaaggtttctctcc

SEQ ID NO: 1027461 - DNA, 25 bp, Homo sapien
cgcttagggctctggagttctggcg

SEQ ID NO: 1027462 - DNA, 25 bp, Homo sapien
agcttgctgtttggtgccacaaatg

SEQ ID NO: 1027463 - DNA, 25 bp, Homo sapien
gtttctctcccgtcaaaattatctg

SEQ ID NO: 1027464 - DNA, 25 bp, Homo sapien
aaaagtcagcaaagaggccacgtac

SEQ ID NO: 1027465 - DNA, 25 bp, Homo sapien
ttctccaaaaagtcagcaaagaggc

SEQ ID NO: 1027466 - DNA, 25 bp, Homo sapien
cctctgttctccaaaaagtcagcaa

SEQ ID NO: 1027467 - DNA, 25 bp, Homo sapien
ctccaaaaagtcagcaaagaggcca

SEQ ID NO: 1027468 - DNA, 25 bp, Homo sapien
ggcctgagccgcgttgcggaaccgc

SEQ ID NO: 1027469 - DNA, 25 bp, Homo sapien
ctgagccgcgttgcggaaccgcctg

SEQ ID NO: 1027470 - DNA, 25 bp, Homo sapien
gggcctgagccgcgttgcggaaccg

SEQ ID NO: 1027471 - DNA, 25 bp, Homo sapien
ctggggcctgagccgcgttgcggaa

SEQ ID NO: 1027472 - DNA, 25 bp, Homo sapien
accggcgcccgatggcaacagagaa

SEQ ID NO: 1027473 - DNA, 25 bp, Homo sapien
gagcccagcgtggaaccacggaaga

SEQ ID NO: 1027474 - DNA, 25 bp, Homo sapien
gtctctctggatcctctgggcacgg

SEQ ID NO: 1027475 - DNA, 25 bp, Homo sapien
tgggctcccggctgtctctctggat

SEQ ID NO: 1027476 - DNA, 25 bp, Homo sapien
cacttgcacttttggtcgcctgatc

SEQ ID NO: 1027477 - DNA, 25 bp, Homo sapien
tagttgaaggcgttacatgcgacgc

SEQ ID NO: 1027478 - DNA, 25 bp, Homo sapien
tcttgcctttctggcggagtctgac

SEQ ID NO: 1027479 - DNA, 25 bp, Homo sapien
caacaccggccccaatagttgaagg

SEQ ID NO: 1027480 - DNA, 25 bp, Homo sapien
aattgacgagctggcgttcccagtc

SEQ ID NO: 1027481 - DNA, 25 bp, Homo sapien
tgcaattgacgagctggcgttccca

SEQ ID NO: 1027482 - DNA, 25 bp, Homo sapien
caaggtgcaattgacgagctggcgt

SEQ ID NO: 1027483 - DNA, 25 bp, Homo sapien
acgagctggcgttcccagtcacagt

SEQ ID NO: 1027484 - DNA, 25 bp, Homo sapien
gggcgacacttccacgtccgtcagt

SEQ ID NO: 1027485 - DNA, 25 bp, Homo sapien
tggggcgacacttccacgtccgtca

SEQ ID NO: 1027486 - DNA, 25 bp, Homo sapien
gcgacacttccacgtccgtcagtat

SEQ ID NO: 1027487 - DNA, 25 bp, Homo sapien
acacttccacgtccgtcagtatttg

SEQ ID NO: 1027488 - DNA, 25 bp, Homo sapien
gccccgccaggagctccgaggacgc

SEQ ID NO: 1027489 - DNA, 25 bp, Homo sapien
tggggagctgagacggcgcagggcg

SEQ ID NO: 1027490 - DNA, 25 bp, Homo sapien
agctgggatggcggtcgccccgcca

SEQ ID NO: 1027491 - DNA, 25 bp, Homo sapien
gagctgagacggcgcagggcgagct

SEQ ID NO: 1027492 - DNA, 25 bp, Homo sapien
taacagcactcggtaggcactgact

SEQ ID NO: 1027493 - DNA, 25 bp, Homo sapien
gaatccagttgtaattctgacagaa

SEQ ID NO: 1027494 - DNA, 25 bp, Homo sapien
tcaagcccatatgctgcgtcacgga

SEQ ID NO: 1027495 - DNA, 25 bp, Homo sapien
tctgacagaattgtaacagcactcg

SEQ ID NO: 1027496 - DNA, 25 bp, Homo sapien
ctgagctccctgcagtcgcggcggt

SEQ ID NO: 1027497 - DNA, 25 bp, Homo sapien
ggctctggtaccctgcgctgagctc

SEQ ID NO: 1027498 - DNA, 25 bp, Homo sapien
aacgcccccgatgctggctctggta

SEQ ID NO: 1027499 - DNA, 25 bp, Homo sapien
gagctccctgcagtcgcggcggtgc

SEQ ID NO: 1027500 - DNA, 25 bp, Homo sapien
acggtgtttattgcggaggctgaaa

SEQ ID NO: 1027501 - DNA, 25 bp, Homo sapien
atcctccagacgctgacggtgttta

SEQ ID NO: 1027502 - DNA, 25 bp, Homo sapien
tggcaaacactcgaatcctccagac

SEQ ID NO: 1027503 - DNA, 25 bp, Homo sapien
aaaaactatgagttgatggcccagg

SEQ ID NO: 1027504 - DNA, 25 bp, Homo sapien
cgagcgcaccagagcgagcgcgggc

SEQ ID NO: 1027505 - DNA, 25 bp, Homo sapien
agggcacgcatagggcaccagggcg

SEQ ID NO: 1027506 - DNA, 25 bp, Homo sapien
catagggcaccagggcgagcgcacc

SEQ ID NO: 1027507 - DNA, 25 bp, Homo sapien
ggacggcgagggcacgcatagggca

SEQ ID NO: 1027508 - DNA, 25 bp, Homo sapien
tgactttttgggaagcgccggtgac

SEQ ID NO: 1027509 - DNA, 25 bp, Homo sapien
ccaatgtgactttttgggaagcgcc

SEQ ID NO: 1027510 - DNA, 25 bp, Homo sapien
cacagccaatgtgactttttgggaa

SEQ ID NO: 1027511 - DNA, 25 bp, Homo sapien
ccgacccacagccaatgtgactttt

SEQ ID NO: 1027512 - DNA, 25 bp, Homo sapien
tcccgcagatgtttgctctccagga

SEQ ID NO: 1027513 - DNA, 25 bp, Homo sapien
tatctcccgcagatgtttgctctcc

SEQ ID NO: 1027514 - DNA, 25 bp, Homo sapien
gattatctcccgcagatgtttgctc

SEQ ID NO: 1027515 - DNA, 25 bp, Homo sapien
gcagatgtttgctctccaggagccc

SEQ ID NO: 1027516 - DNA, 25 bp, Homo sapien
ccagaggcattttgcccgggccggg

SEQ ID NO: 1027517 - DNA, 25 bp, Homo sapien
gaaacctctggactcctcgttacca

SEQ ID NO: 1027518 - DNA, 25 bp, Homo sapien
ccaggaaacctctggactcctcgtt

SEQ ID NO: 1027519 - DNA, 25 bp, Homo sapien
ggactcctcgttaccagaggcattt

SEQ ID NO: 1027520 - DNA, 25 bp, Homo sapien
tccccagacaagccgcaacagttgt

SEQ ID NO: 1027521 - DNA, 25 bp, Homo sapien
ccgcaacagttgtgaaaacgggatc

SEQ ID NO: 1027522 - DNA, 25 bp, Homo sapien
caagccgcaacagttgtgaaaacgg

SEQ ID NO: 1027523 - DNA, 25 bp, Homo sapien
ggagcctcaggagcaatgcggcctc

SEQ ID NO: 1027524 - DNA, 25 bp, Homo sapien
cccggcctggacaccgttatgcaga

SEQ ID NO: 1027525 - DNA, 25 bp, Homo sapien
aatgcccgcacagggacaccgctgg

SEQ ID NO: 1027526 - DNA, 25 bp, Homo sapien
gacaccgttatgcagaggagcagct

SEQ ID NO: 1027527 - DNA, 25 bp, Homo sapien
agagctggccctcggagccgggagc

SEQ ID NO: 1027528 - DNA, 25 bp, Homo sapien
tggccacgggattggcttcaggtgt

SEQ ID NO: 1027529 - DNA, 25 bp, Homo sapien
tccaccctgtactgttggtgtggcc

SEQ ID NO: 1027530 - DNA, 25 bp, Homo sapien
ccacgggattggctttgggcacaag

SEQ ID NO: 1027531 - DNA, 25 bp, Homo sapien
ggttggcttcgggtgtcagtgcggc

SEQ ID NO: 1027532 - DNA, 25 bp, Homo sapien
aatcccgttagcataagaagaggcc

SEQ ID NO: 1027533 - DNA, 25 bp, Homo sapien
taatgaatcccgttagcataagaag

SEQ ID NO: 1027534 - DNA, 25 bp, Homo sapien
ccgttagcataagaagaggccaacg

SEQ ID NO: 1027535 - DNA, 25 bp, Homo sapien
aggtggagtaatgaatcccgttagc

SEQ ID NO: 1027536 - DNA, 25 bp, Homo sapien
accatcgtggcagcaccccgcaggt

SEQ ID NO: 1027537 - DNA, 25 bp, Homo sapien
atcgtggcagcaccccgcaggtgtc

SEQ ID NO: 1027538 - DNA, 25 bp, Homo sapien
ccagcaccatcgtggcagcaccccg

SEQ ID NO: 1027539 - DNA, 25 bp, Homo sapien
ctcccagcaccatcgtggcagcacc

SEQ ID NO: 1027540 - DNA, 25 bp, Homo sapien
gtgttgtctgtgtgttgtcattact

SEQ ID NO: 1027541 - DNA, 25 bp, Homo sapien
tgtctgtgtgttgtcattactgcac

SEQ ID NO: 1027542 - DNA, 25 bp, Homo sapien
gttgtctgtgtgttgtcattactgc

SEQ ID NO: 1027543 - DNA, 25 bp, Homo sapien
gtctgtgtgttgtcattactgcacc

SEQ ID NO: 1027544 - DNA, 25 bp, Homo sapien
accgtcgcggcagcacaccgcaggt

SEQ ID NO: 1027545 - DNA, 25 bp, Homo sapien
caccgtcgcggcagcacaccgcagg

SEQ ID NO: 1027546 - DNA, 25 bp, Homo sapien
tctcaggccaggctttcccatcccc

SEQ ID NO: 1027547 - DNA, 25 bp, Homo sapien
ccaggctttcccatccccgggcact

SEQ ID NO: 1027548 - DNA, 25 bp, Homo sapien
aggctttcccatccccgggcactca

SEQ ID NO: 1027549 - DNA, 25 bp, Homo sapien
ggccaggctttcccatccccgggca

SEQ ID NO: 1027550 - DNA, 25 bp, Homo sapien
gacacctcctttggtatccatcttg

SEQ ID NO: 1027551 - DNA, 25 bp, Homo sapien
tattagatgagacacctcctttggt

SEQ ID NO: 1027552 - DNA, 25 bp, Homo sapien
tccctggagttgtggtcagggctgt

SEQ ID NO: 1027553 - DNA, 25 bp, Homo sapien
tcacgttccaactattagatgagac

SEQ ID NO: 1027554 - DNA, 25 bp, Homo sapien
cttctgactcggcttaggatccacg

SEQ ID NO: 1027555 - DNA, 25 bp, Homo sapien
gattccacttctgactcggcttagg

SEQ ID NO: 1027556 - DNA, 25 bp, Homo sapien
gactcggcttaggatccacgtcatg

SEQ ID NO: 1027557 - DNA, 25 bp, Homo sapien
ctcggcttaggatccacgtcatgga

SEQ ID NO: 1027558 - DNA, 25 bp, Homo sapien
ctcccacgtgtgtgcaaacgggcac

SEQ ID NO: 1027559 - DNA, 25 bp, Homo sapien
ggctgttttgcacccgcgttgcttg

SEQ ID NO: 1027560 - DNA, 25 bp, Homo sapien
caaacgggcaccctgttagattcgg

SEQ ID NO: 1027561 - DNA, 25 bp, Homo sapien
cccgcgttgcttgcgaacggcaggc

SEQ ID NO: 1027562 - DNA, 25 bp, Homo sapien
tgtcctcctccaggactatgctcct

SEQ ID NO: 1027563 - DNA, 25 bp, Homo sapien
cttcctccaggactgtcttccgcct

SEQ ID NO: 1027564 - DNA, 25 bp, Homo sapien
tcctcgccgactgtcctccttctgg

SEQ ID NO: 1027565 - DNA, 25 bp, Homo sapien
ctccaggactgtcttccgcctgatt

SEQ ID NO: 1027566 - DNA, 25 bp, Homo sapien
caggactgtcttccgcctgattgtc

SEQ ID NO: 1027567 - DNA, 25 bp, Homo sapien
agcatttcctcccaccgcatatccc

SEQ ID NO: 1027568 - DNA, 25 bp, Homo sapien
ccggggccccacactggcgtgaatg

SEQ ID NO: 1027569 - DNA, 25 bp, Homo sapien
ccccacactggcgtgaatgtccagt

SEQ ID NO: 1027570 - DNA, 25 bp, Homo sapien
acactggcgtgaatgtccagtctct

SEQ ID NO: 1027571 - DNA, 25 bp, Homo sapien
ccttgattggcggaaatgcttcgtt

SEQ ID NO: 1027572 - DNA, 25 bp, Homo sapien
gtttagctgtgggaagtagcctcct

SEQ ID NO: 1027573 - DNA, 25 bp, Homo sapien
gatatctgtataagaggactggggc

SEQ ID NO: 1027574 - DNA, 25 bp, Homo sapien
gttccttcctcgagggatatctgta

SEQ ID NO: 1027575 - DNA, 25 bp, Homo sapien
gatgagcaggatccggtctgagagc

SEQ ID NO: 1027576 - DNA, 25 bp, Homo sapien
agcaggatccggtctgagagcccct

SEQ ID NO: 1027577 - DNA, 25 bp, Homo sapien
gcaggatgagcaggatccggtctga

SEQ ID NO: 1027578 - DNA, 25 bp, Homo sapien
tgagcaggatccggtctgagagccc

SEQ ID NO: 1027579 - DNA, 25 bp, Homo sapien
agcagaggctgcacgactctagccg

SEQ ID NO: 1027580 - DNA, 25 bp, Homo sapien
tgcacgactctagccgccgtgccca

SEQ ID NO: 1027581 - DNA, 25 bp, Homo sapien
gacagagtccagcgcgtgcctgtgg

SEQ ID NO: 1027582 - DNA, 25 bp, Homo sapien
agtccagcgcgtgcctgtgggccgg

SEQ ID NO: 1027583 - DNA, 25 bp, Homo sapien
tcacaggcatctcatagggaacttt

SEQ ID NO: 1027584 - DNA, 25 bp, Homo sapien
tagggaactttcgaatcttcctgaa

SEQ ID NO: 1027585 - DNA, 25 bp, Homo sapien
gatgcagccaacacacaggttaccc

SEQ ID NO: 1027586 - DNA, 25 bp, Homo sapien
tcctgaacgaatgcagaactgaggc

SEQ ID NO: 1027587 - DNA, 25 bp, Homo sapien
gagccagccagatccgtgctcctgc

SEQ ID NO: 1027588 - DNA, 25 bp, Homo sapien
gagtccaaccttgctgtcggtacat

SEQ ID NO: 1027589 - DNA, 25 bp, Homo sapien
ggatgctcagagtccaaccttgctg

SEQ ID NO: 1027590 - DNA, 25 bp, Homo sapien
tgctcagagtccaaccttgctgtcg

SEQ ID NO: 1027591 - DNA, 25 bp, Homo sapien
gagtgcctgacaactgtttgtccgg

SEQ ID NO: 1027592 - DNA, 25 bp, Homo sapien
tgacaactgtttgtccggaagtcct

SEQ ID NO: 1027593 - DNA, 25 bp, Homo sapien
gggcatgccgagtgcctgacaactg

SEQ ID NO: 1027594 - DNA, 25 bp, Homo sapien
tgccgagtgcctgacaactgtttgt

SEQ ID NO: 1027595 - DNA, 25 bp, Homo sapien
actaggttggcctcagggtccaggc

SEQ ID NO: 1027596 - DNA, 25 bp, Homo sapien
caaacggattggtgatggcaaacac

SEQ ID NO: 1027597 - DNA, 25 bp, Homo sapien
gaagtgctgaacttgaccaagccca

SEQ ID NO: 1027598 - DNA, 25 bp, Homo sapien
ggtgatttacaaggcggctggcgct

SEQ ID NO: 1027599 - DNA, 25 bp, Homo sapien
gacatgccaggtgtccggtggtggg

SEQ ID NO: 1027600 - DNA, 25 bp, Homo sapien
gggtctgagaagctcttgccagaga

SEQ ID NO: 1027601 - DNA, 25 bp, Homo sapien
aggtggacatgccaggtgtccggtg

SEQ ID NO: 1027602 - DNA, 25 bp, Homo sapien
tggggtctgagaagctcttgccaga

SEQ ID NO: 1027603 - DNA, 25 bp, Homo sapien
tctccctgtgaaatgcggccatgca

SEQ ID NO: 1027604 - DNA, 25 bp, Homo sapien
gtaactcagcagtttacactctccc

SEQ ID NO: 1027605 - DNA, 25 bp, Homo sapien
gccccagccggggtgagaaacctga

SEQ ID NO: 1027606 - DNA, 25 bp, Homo sapien
aacctgagggtgtgcgaggctccat

SEQ ID NO: 1027607 - DNA, 25 bp, Homo sapien
tcaaggtgagggcgttcccttccag

SEQ ID NO: 1027608 - DNA, 25 bp, Homo sapien
agccgtgggacatagagcccagaga

SEQ ID NO: 1027609 - DNA, 25 bp, Homo sapien
aggtgagggcgttcccttccagccg

SEQ ID NO: 1027610 - DNA, 25 bp, Homo sapien
caaggtgagggcgttcccttccagc

SEQ ID NO: 1027611 - DNA, 25 bp, Homo sapien
caagccccagaggtttggctctcag

SEQ ID NO: 1027612 - DNA, 25 bp, Homo sapien
tcagaagccttctctagtgcatggc

SEQ ID NO: 1027613 - DNA, 25 bp, Homo sapien
agccttctctagtgcatggcccaca

SEQ ID NO: 1027614 - DNA, 25 bp, Homo sapien
ccccagaggtttggctctcagaagc

SEQ ID NO: 1027615 - DNA, 25 bp, Homo sapien
cactgtccccaaggattaaagagcc

SEQ ID NO: 1027616 - DNA, 25 bp, Homo sapien
tgtccccaaggattaaagagcccat

SEQ ID NO: 1027617 - DNA, 25 bp, Homo sapien
gtcactgtccccaaggattaaagag

SEQ ID NO: 1027618 - DNA, 25 bp, Homo sapien
ctgtccccaaggattaaagagccca

SEQ ID NO: 1027619 - DNA, 25 bp, Homo sapien
ctcctgctgtatctagagaattcca

SEQ ID NO: 1027620 - DNA, 25 bp, Homo sapien
tctagagaattccagagcattggcc

SEQ ID NO: 1027621 - DNA, 25 bp, Homo sapien
tgctgtatctagagaattccagagc

SEQ ID NO: 1027622 - DNA, 25 bp, Homo sapien
ctagagaattccagagcattggccc

SEQ ID NO: 1027623 - DNA, 25 bp, Homo sapien
ctcctccacaactgtggtgctaggg

SEQ ID NO: 1027624 - DNA, 25 bp, Homo sapien
cacagacgccgggcaccagggacat

SEQ ID NO: 1027625 - DNA, 25 bp, Homo sapien
caacacagttcactcgattggtcag

SEQ ID NO: 1027626 - DNA, 25 bp, Homo sapien
ggtcagaagtgcacaggagggcaga

SEQ ID NO: 1027627 - DNA, 25 bp, Homo sapien
catcatccgtttctcaacacagttc

SEQ ID NO: 1027628 - DNA, 25 bp, Homo sapien
agtgtctgtgggaacctcttctggg

SEQ ID NO: 1027629 - DNA, 25 bp, Homo sapien
ctgggacaggtcctttgtaaatctt

SEQ ID NO: 1027630 - DNA, 25 bp, Homo sapien
tgccggactctgcacgtgtggttcc

SEQ ID NO: 1027631 - DNA, 25 bp, Homo sapien
gcctgcggagatgcggctgacattt

SEQ ID NO: 1027632 - DNA, 25 bp, Homo sapien
tgcggggcaactgcaggtccccgtc

SEQ ID NO: 1027633 - DNA, 25 bp, Homo sapien
ggctgcggggcaactgcaggtcccc

SEQ ID NO: 1027634 - DNA, 25 bp, Homo sapien
ggggcaactgcaggtccccgtccca

SEQ ID NO: 1027635 - DNA, 25 bp, Homo sapien
gggcaactgcaggtccccgtcccat

SEQ ID NO: 1027636 - DNA, 25 bp, Homo sapien
tctcagtcctgttctgataggcgaa

SEQ ID NO: 1027637 - DNA, 25 bp, Homo sapien
gggttcccttctcgcatcctggatc

SEQ ID NO: 1027638 - DNA, 25 bp, Homo sapien
tcctgttctgataggcgaagctgcc

SEQ ID NO: 1027639 - DNA, 25 bp, Homo sapien
tctgataggcgaagctgccagcagt

SEQ ID NO: 1027640 - DNA, 25 bp, Homo sapien
cagatggcccagcggtctttggagc

SEQ ID NO: 1027641 - DNA, 25 bp, Homo sapien
atgtgcagtgatgctgtgatgtccc

SEQ ID NO: 1027642 - DNA, 25 bp, Homo sapien
ctgattatgtgcagtgatgctgtga

SEQ ID NO: 1027643 - DNA, 25 bp, Homo sapien
tatcactgattatgtgcagtgatgc

SEQ ID NO: 1027644 - DNA, 25 bp, Homo sapien
tgttctccagcaagattataagtgg

SEQ ID NO: 1027645 - DNA, 25 bp, Homo sapien
gctgtgaatgtacgtggccttggta

SEQ ID NO: 1027646 - DNA, 25 bp, Homo sapien
caggctgagccgctcttgctgtgaa

SEQ ID NO: 1027647 - DNA, 25 bp, Homo sapien
gaagcgaggctcagatcaaggaggg

SEQ ID NO: 1027648 - DNA, 25 bp, Homo sapien
caccagggccccgatagccgggcac

SEQ ID NO: 1027649 - DNA, 25 bp, Homo sapien
ccagggccccgatagccgggcacca

SEQ ID NO: 1027650 - DNA, 25 bp, Homo sapien
ggccccgatagccgggcaccatcat

SEQ ID NO: 1027651 - DNA, 25 bp, Homo sapien
agggccccgatagccgggcaccatc

SEQ ID NO: 1027652 - DNA, 25 bp, Homo sapien
cagtgcaccagggaatatcgcctga

SEQ ID NO: 1027653 - DNA, 25 bp, Homo sapien
ccaccattagtgttcccagaaagcc

SEQ ID NO: 1027654 - DNA, 25 bp, Homo sapien
gcctgacgacggaatcaggtttctt

SEQ ID NO: 1027655 - DNA, 25 bp, Homo sapien
cctccaccattagtgttcccagaaa

SEQ ID NO: 1027656 - DNA, 25 bp, Homo sapien
cgatgtctaaggctccgtgggcagc

SEQ ID NO: 1027657 - DNA, 25 bp, Homo sapien
cattcctttccaacagtcgctctgg

SEQ ID NO: 1027658 - DNA, 25 bp, Homo sapien
gcatttcatagacagcgcggtcaca

SEQ ID NO: 1027659 - DNA, 25 bp, Homo sapien
gcgctgactcatcgtgacggcgagt

SEQ ID NO: 1027660 - DNA, 25 bp, Homo sapien
ccaggtctgtgtccgaggaccctga

SEQ ID NO: 1027661 - DNA, 25 bp, Homo sapien
tgccaggtcgctcggctgttcggat

SEQ ID NO: 1027662 - DNA, 25 bp, Homo sapien
gtacagtcttttggccaggaatgag

SEQ ID NO: 1027663 - DNA, 25 bp, Homo sapien
gaatgagggcatgagcgagtgagct

SEQ ID NO: 1027664 - DNA, 25 bp, Homo sapien
cccactcccttcagcaggtgcagac

SEQ ID NO: 1027665 - DNA, 25 bp, Homo sapien
caccttcaggtctgggtgttctgtg

SEQ ID NO: 1027666 - DNA, 25 bp, Homo sapien
tatgaggcctggtctcaaggcgaga

SEQ ID NO: 1027667 - DNA, 25 bp, Homo sapien
tgttctgtggcccacgatccaatcc

SEQ ID NO: 1027668 - DNA, 25 bp, Homo sapien
aggtttctgcctctggtcagatttc

SEQ ID NO: 1027669 - DNA, 25 bp, Homo sapien
caaccagtagggactgtttagttca

SEQ ID NO: 1027670 - DNA, 25 bp, Homo sapien
cctgagacctagctccccagggtgg

SEQ ID NO: 1027671 - DNA, 25 bp, Homo sapien
ggcaccaaccagtagggactgttta

SEQ ID NO: 1027672 - DNA, 25 bp, Homo sapien
ccctgagacctagctccccagggtg

SEQ ID NO: 1027673 - DNA, 25 bp, Homo sapien
cttgggcacgcctggctgtagcgtc

SEQ ID NO: 1027674 - DNA, 25 bp, Homo sapien
cctggctgtagcgtcagggtccctg

SEQ ID NO: 1027675 - DNA, 25 bp, Homo sapien
cacgcctggctgtagcgtcagggtc

SEQ ID NO: 1027676 - DNA, 25 bp, Homo sapien
tggctgtagcgtcagggtccctgca

SEQ ID NO: 1027677 - DNA, 25 bp, Homo sapien
caatggcaccgtttccagaagaaca

SEQ ID NO: 1027678 - DNA, 25 bp, Homo sapien
taacgccctcgtgggagtcatggga

SEQ ID NO: 1027679 - DNA, 25 bp, Homo sapien
tgcgaaaggacgtgatttgctcaag

SEQ ID NO: 1027680 - DNA, 25 bp, Homo sapien
gtcttgggccctgaaagctgcactg

SEQ ID NO: 1027681 - DNA, 25 bp, Homo sapien
catgcatcaggccagagtggccgcc

SEQ ID NO: 1027682 - DNA, 25 bp, Homo sapien
cactgtcacctttagagatggtggc

SEQ ID NO: 1027683 - DNA, 25 bp, Homo sapien
tccgcctgatgagacggcagccgca

SEQ ID NO: 1027684 - DNA, 25 bp, Homo sapien
agccgcacgtcctgagcagacggtc

SEQ ID NO: 1027685 - DNA, 25 bp, Homo sapien
ggacaaagtccaggcagtgtgtttg

SEQ ID NO: 1027686 - DNA, 25 bp, Homo sapien
tggacaaagtccaggcagtgtgttt

SEQ ID NO: 1027687 - DNA, 25 bp, Homo sapien
gtgggcaagctgcagctgggtgtag

SEQ ID NO: 1027688 - DNA, 25 bp, Homo sapien
aggaatgcagccttcgttttcagga

SEQ ID NO: 1027689 - DNA, 25 bp, Homo sapien
cctaacagttaggtccccgttcatg

SEQ ID NO: 1027690 - DNA, 25 bp, Homo sapien
ccttcgttttcaggagggcacagca

SEQ ID NO: 1027691 - DNA, 25 bp, Homo sapien
taggtgtatccagccatgaagagca

SEQ ID NO: 1027692 - DNA, 25 bp, Homo sapien
ccagttcaggacctgcgtaactacg

SEQ ID NO: 1027693 - DNA, 25 bp, Homo sapien
gggaaggtctcgcatccagagaaga

SEQ ID NO: 1027694 - DNA, 25 bp, Homo sapien
tgcgtaactacggttccccagcagg

SEQ ID NO: 1027695 - DNA, 25 bp, Homo sapien
ccagagaagacccagttcaggacct

SEQ ID NO: 1027696 - DNA, 25 bp, Homo sapien
gaggtcttttgccatcagtccccat

SEQ ID NO: 1027697 - DNA, 25 bp, Homo sapien
gccgaggtcttttgccatcagtccc

SEQ ID NO: 1027698 - DNA, 25 bp, Homo sapien
ccgccgaggtcttttgccatcagtc

SEQ ID NO: 1027699 - DNA, 25 bp, Homo sapien
cgaggtcttttgccatcagtcccca

SEQ ID NO: 1027700 - DNA, 25 bp, Homo sapien
cctccactgtgggagattttctgta

SEQ ID NO: 1027701 - DNA, 25 bp, Homo sapien
attccagctgcatccgaagccgcgg

SEQ ID NO: 1027702 - DNA, 25 bp, Homo sapien
tctgcctggtgacgggaaagggaac

SEQ ID NO: 1027703 - DNA, 25 bp, Homo sapien
ccagtggagaattcggggctctgcc

SEQ ID NO: 1027704 - DNA, 25 bp, Homo sapien
tcgtgttccaatcggagatgtttct

SEQ ID NO: 1027705 - DNA, 25 bp, Homo sapien
gaaggatggtctgtgtcgtgttcca

SEQ ID NO: 1027706 - DNA, 25 bp, Homo sapien
ttccaatcggagatgtttctgagct

SEQ ID NO: 1027707 - DNA, 25 bp, Homo sapien
ggtctgtgtcgtgttccaatcggag

SEQ ID NO: 1027708 - DNA, 25 bp, Homo sapien
tcagctctgatcgcgcacacgtggc

SEQ ID NO: 1027709 - DNA, 25 bp, Homo sapien
tctgatcgcgcacacgtggcgatat

SEQ ID NO: 1027710 - DNA, 25 bp, Homo sapien
gctctgatcgcgcacacgtggcgat

SEQ ID NO: 1027711 - DNA, 25 bp, Homo sapien
gatcgcgcacacgtggcgatatttg

SEQ ID NO: 1027712 - DNA, 25 bp, Homo sapien
actcctgtcccgatgggcgtgctgg

SEQ ID NO: 1027713 - DNA, 25 bp, Homo sapien
cactcggtcagttggactcctgtcc

SEQ ID NO: 1027714 - DNA, 25 bp, Homo sapien
gtggccacagcactcggtcagttgg

SEQ ID NO: 1027715 - DNA, 25 bp, Homo sapien
ttggactcctgtcccgatgggcgtg

SEQ ID NO: 1027716 - DNA, 25 bp, Homo sapien
acagggtccccgaaaacatgctgct

SEQ ID NO: 1027717 - DNA, 25 bp, Homo sapien
agcgtgcagaaggcagcgctcgcca

SEQ ID NO: 1027718 - DNA, 25 bp, Homo sapien
cagcgctcgccaggtgggaacagca

SEQ ID NO: 1027719 - DNA, 25 bp, Homo sapien
cttccttccgaagcaacgtgtcctg

SEQ ID NO: 1027720 - DNA, 25 bp, Homo sapien
gtggtggaatacagtggggctttgg

SEQ ID NO: 1027721 - DNA, 25 bp, Homo sapien
gaatacagtggggctttggggtgtg

SEQ ID NO: 1027722 - DNA, 25 bp, Homo sapien
ctgtggtggaatacagtggggcttt

SEQ ID NO: 1027723 - DNA, 25 bp, Homo sapien
tacagtggggctttggggtgtgggc

SEQ ID NO: 1027724 - DNA, 25 bp, Homo sapien
cagagcccccagtattccctctcct

SEQ ID NO: 1027725 - DNA, 25 bp, Homo sapien
gagcccccagtattccctctccttg

SEQ ID NO: 1027726 - DNA, 25 bp, Homo sapien
catggatcaccccatggtccagagc

SEQ ID NO: 1027727 - DNA, 25 bp, Homo sapien
cccatggatcaccccatggtccaga

SEQ ID NO: 1027728 - DNA, 25 bp, Homo sapien
caagaggagggccttgtgcaaagat

SEQ ID NO: 1027729 - DNA, 25 bp, Homo sapien
ggccttgtgcaaagatggccccttt

SEQ ID NO: 1027730 - DNA, 25 bp, Homo sapien
ctgcattggagctttctcaagagga

SEQ ID NO: 1027731 - DNA, 25 bp, Homo sapien
tggtgactgcattggagctttctca

SEQ ID NO: 1027732 - DNA, 25 bp, Homo sapien
tgcggccgattacccggaatttgaa

SEQ ID NO: 1027733 - DNA, 25 bp, Homo sapien
ggtgggtccctgtctgctatcctga

SEQ ID NO: 1027734 - DNA, 25 bp, Homo sapien
aatgattctgaactgcatccgccaa

SEQ ID NO: 1027735 - DNA, 25 bp, Homo sapien
taaagcagcacaacacggtttacgg

SEQ ID NO: 1027736 - DNA, 25 bp, Homo sapien
ctggatccctttcaggtcctcacca

SEQ ID NO: 1027737 - DNA, 25 bp, Homo sapien
tggatccctttcaggtcctcaccag

SEQ ID NO: 1027738 - DNA, 25 bp, Homo sapien
gtcctcaccagccacgttcagacat

SEQ ID NO: 1027739 - DNA, 25 bp, Homo sapien
caggtcctcaccagccacgttcaga

SEQ ID NO: 1027740 - DNA, 25 bp, Homo sapien
cagtccggctggttgtgtggagaag

SEQ ID NO: 1027741 - DNA, 25 bp, Homo sapien
caaatggttctttataatgattcta

SEQ ID NO: 1027742 - DNA, 25 bp, Homo sapien
tggaacgaatcagcccatcctttct

SEQ ID NO: 1027743 - DNA, 25 bp, Homo sapien
ccagggcccgtgaactggaacgaat

SEQ ID NO: 1027744 - DNA, 25 bp, Homo sapien
ggattcttggtgcagacaatgttgt

SEQ ID NO: 1027745 - DNA, 25 bp, Homo sapien
ttcttggtgcagacaatgttgtctt

SEQ ID NO: 1027746 - DNA, 25 bp, Homo sapien
ggtgcagacaatgttgtctttggat

SEQ ID NO: 1027747 - DNA, 25 bp, Homo sapien
aaggattcttggtgcagacaatgtt

SEQ ID NO: 1027748 - DNA, 25 bp, Homo sapien
actggtgaaggccattggtgcaaaa

SEQ ID NO: 1027749 - DNA, 25 bp, Homo sapien
gaggtggaagcatccatgtctggtc

SEQ ID NO: 1027750 - DNA, 25 bp, Homo sapien
tagctggtaagtcattccccgagcc

SEQ ID NO: 1027751 - DNA, 25 bp, Homo sapien
catctgggcaatttggactggtgaa

SEQ ID NO: 1027752 - DNA, 25 bp, Homo sapien
cagagacggatttccatggctgcgt

SEQ ID NO: 1027753 - DNA, 25 bp, Homo sapien
acggatttccatggctgcgtagatg

SEQ ID NO: 1027754 - DNA, 25 bp, Homo sapien
agacggatttccatggctgcgtaga

SEQ ID NO: 1027755 - DNA, 25 bp, Homo sapien
acagagacggatttccatggctgcg

SEQ ID NO: 1027756 - DNA, 25 bp, Homo sapien
agggagcgcacagccctcggcagcc

SEQ ID NO: 1027757 - DNA, 25 bp, Homo sapien
cacagcccaggttccggagttctgc

SEQ ID NO: 1027758 - DNA, 25 bp, Homo sapien
gatgccgtggagctctgagggagcg

SEQ ID NO: 1027759 - DNA, 25 bp, Homo sapien
tggaccccagatgccgtggagctct

SEQ ID NO: 1027760 - DNA, 25 bp, Homo sapien
tttgtagcctcttggggccacagac

SEQ ID NO: 1027761 - DNA, 25 bp, Homo sapien
ctcttggggccacagacaccttcga

SEQ ID NO: 1027762 - DNA, 25 bp, Homo sapien
tggggccacagacaccttcgaaaat

SEQ ID NO: 1027763 - DNA, 25 bp, Homo sapien
ttggggccacagacaccttcgaaaa

SEQ ID NO: 1027764 - DNA, 25 bp, Homo sapien
ggaacgccgcagcatccatcatcag

SEQ ID NO: 1027765 - DNA, 25 bp, Homo sapien
caggtgggaacgccgcagcatccat

SEQ ID NO: 1027766 - DNA, 25 bp, Homo sapien
gccccgtccagggtgtgcgtgcagg

SEQ ID NO: 1027767 - DNA, 25 bp, Homo sapien
cccgtccagggtgtgcgtgcaggtg

SEQ ID NO: 1027768 - DNA, 25 bp, Homo sapien
tctcttctgggctggtcctccaggt

SEQ ID NO: 1027769 - DNA, 25 bp, Homo sapien
ctaatttgtgggctctcttctgggc

SEQ ID NO: 1027770 - DNA, 25 bp, Homo sapien
gggctctcttctgggctggtcctcc

SEQ ID NO: 1027771 - DNA, 25 bp, Homo sapien
ctctcttctgggctggtcctccagg

SEQ ID NO: 1027772 - DNA, 25 bp, Homo sapien
gcaggaaaccgctggaaaggcccgc

SEQ ID NO: 1027773 - DNA, 25 bp, Homo sapien
caagccagagctgtggtcggcagcc

SEQ ID NO: 1027774 - DNA, 25 bp, Homo sapien
tgactgctgatgcgcagcaggaaac

SEQ ID NO: 1027775 - DNA, 25 bp, Homo sapien
ggaaaggcccgccaagccagagctg

SEQ ID NO: 1027776 - DNA, 25 bp, Homo sapien
ccagggcagtgggagattcactcaa

SEQ ID NO: 1027777 - DNA, 25 bp, Homo sapien
cagggttggccgtgaattctgtcca

SEQ ID NO: 1027778 - DNA, 25 bp, Homo sapien
tcttatttcagagacggcagcggca

SEQ ID NO: 1027779 - DNA, 25 bp, Homo sapien
cactcggaactgtaggtgggcctgt

SEQ ID NO: 1027780 - DNA, 25 bp, Homo sapien
ccctccgggcatcagcggggctccc

SEQ ID NO: 1027781 - DNA, 25 bp, Homo sapien
accctccgggcatcagcggggctcc

SEQ ID NO: 1027782 - DNA, 25 bp, Homo sapien
cttctcactgcccaggtcttcggag

SEQ ID NO: 1027783 - DNA, 25 bp, Homo sapien
tctcactgcccaggtcttcggagat

SEQ ID NO: 1027784 - DNA, 25 bp, Homo sapien
ttctcactgcccaggtcttcggaga

SEQ ID NO: 1027785 - DNA, 25 bp, Homo sapien
tgaggttctggtcatcgcaggagca

SEQ ID NO: 1027786 - DNA, 25 bp, Homo sapien
ccgcctgatttgcatccacgcagaa

SEQ ID NO: 1027787 - DNA, 25 bp, Homo sapien
cgccacacggatgtacttgagccag

SEQ ID NO: 1027788 - DNA, 25 bp, Homo sapien
atcgcaggagcacgccacacggatg

SEQ ID NO: 1027789 - DNA, 25 bp, Homo sapien
gaaatctcatgtatgaccccaagat

SEQ ID NO: 1027790 - DNA, 25 bp, Homo sapien
gtatgaccccaagatattacaggaa

SEQ ID NO: 1027791 - DNA, 25 bp, Homo sapien
ctacgcgggaatgttccgtgacgtg

SEQ ID NO: 1027792 - DNA, 25 bp, Homo sapien
tgttccgtgacgtggtcttcacaca

SEQ ID NO: 1027793 - DNA, 25 bp, Homo sapien
aaagtcgagagccttgaatcacttt

SEQ ID NO: 1027794 - DNA, 25 bp, Homo sapien
gtaaagtcgagagccttgaatcact

SEQ ID NO: 1027795 - DNA, 25 bp, Homo sapien
aagtcgagagccttgaatcactttc

SEQ ID NO: 1027796 - DNA, 25 bp, Homo sapien
ctgtaaagtcgagagccttgaatca

SEQ ID NO: 1027797 - DNA, 25 bp, Homo sapien
ccacagccaaggggacggcaaatga

SEQ ID NO: 1027798 - DNA, 25 bp, Homo sapien
gcgggacctccctggagtttgctct

SEQ ID NO: 1027799 - DNA, 25 bp, Homo sapien
cagccaaggggacggcaaatgaggg

SEQ ID NO: 1027800 - DNA, 25 bp, Homo sapien
tgcgggacctccctggagtttgctc

SEQ ID NO: 1027801 - DNA, 25 bp, Homo sapien
tagtagcgtagattcatgtccccat

SEQ ID NO: 1027802 - DNA, 25 bp, Homo sapien
agaacgagcttgtccagcggagcaa

SEQ ID NO: 1027803 - DNA, 25 bp, Homo sapien
gcggagcaactgctcgatggagatt

SEQ ID NO: 1027804 - DNA, 25 bp, Homo sapien
ccacggaagtcctggtagtagcgta

SEQ ID NO: 1027805 - DNA, 25 bp, Homo sapien
tatgcgcctcaagcccaattttcct

SEQ ID NO: 1027806 - DNA, 25 bp, Homo sapien
ggacgactaaggacacactctgcaa

SEQ ID NO: 1027807 - DNA, 25 bp, Homo sapien
gaaagaccgtccttctatgcgcctc

SEQ ID NO: 1027808 - DNA, 25 bp, Homo sapien
cattactatagtttgcatctcacaa

SEQ ID NO: 1027809 - DNA, 25 bp, Homo sapien
tcagccccacgccatagggatagct

SEQ ID NO: 1027810 - DNA, 25 bp, Homo sapien
tctcattgccagatgagaacgtgga

SEQ ID NO: 1027811 - DNA, 25 bp, Homo sapien
tggagaggacggtccgattcccatg

SEQ ID NO: 1027812 - DNA, 25 bp, Homo sapien
tagggatagctcttgttcatggaga

SEQ ID NO: 1027813 - DNA, 25 bp, Homo sapien
gatcattcttaaatagcttcgtcta

SEQ ID NO: 1027814 - DNA, 25 bp, Homo sapien
tcttaaatagcttcgtctagtaaag

SEQ ID NO: 1027815 - DNA, 25 bp, Homo sapien
cttgatcattcttaaatagcttcgt

SEQ ID NO: 1027816 - DNA, 25 bp, Homo sapien
aatagcttcgtctagtaaagtgagc

SEQ ID NO: 1027817 - DNA, 25 bp, Homo sapien
aaaacacgtgaaagcagccagtgga

SEQ ID NO: 1027818 - DNA, 25 bp, Homo sapien
tcccaaaagcagattcccctggtga

SEQ ID NO: 1027819 - DNA, 25 bp, Homo sapien
agccagtggaatcggaattctttga

SEQ ID NO: 1027820 - DNA, 25 bp, Homo sapien
gcagattcccctggtgacccggtct

SEQ ID NO: 1027821 - DNA, 25 bp, Homo sapien
caatgtccttaatgactttatagta

SEQ ID NO: 1027822 - DNA, 25 bp, Homo sapien
tgtgcccagggggtagacgccttcc

SEQ ID NO: 1027823 - DNA, 25 bp, Homo sapien
tcctcacctggctcaatgtccttaa

SEQ ID NO: 1027824 - DNA, 25 bp, Homo sapien
gggtagacgccttccttcacgtgca

SEQ ID NO: 1027825 - DNA, 25 bp, Homo sapien
gggaaactcacttgtcccatctcta

SEQ ID NO: 1027826 - DNA, 25 bp, Homo sapien
gctcatctgtgtgggactggaattt

SEQ ID NO: 1027827 - DNA, 25 bp, Homo sapien
cctctcagctgtacttgggtgtgga

SEQ ID NO: 1027828 - DNA, 25 bp, Homo sapien
ggaattttctcaggcatcctctcag

SEQ ID NO: 1027829 - DNA, 25 bp, Homo sapien
tgctcagagggaccggcgtggagcc

SEQ ID NO: 1027830 - DNA, 25 bp, Homo sapien
gcttgcgttcctgttcacttgcggg

SEQ ID NO: 1027831 - DNA, 25 bp, Homo sapien
ctcccaaagtaaagcagttaggctc

SEQ ID NO: 1027832 - DNA, 25 bp, Homo sapien
cagcgccggaaacggccaggaggga

SEQ ID NO: 1027833 - DNA, 25 bp, Homo sapien
ttccccgtggtctgaatcacttgtg

SEQ ID NO: 1027834 - DNA, 25 bp, Homo sapien
aatgggcctcgcattcttgacagag

SEQ ID NO: 1027835 - DNA, 25 bp, Homo sapien
acttgtgtgaaaatgggcctcgcat

SEQ ID NO: 1027836 - DNA, 25 bp, Homo sapien
gcatctgaaagtggcttccccgtgg

SEQ ID NO: 1027837 - DNA, 25 bp, Homo sapien
gcttaagagaatctgggcactgaag

SEQ ID NO: 1027838 - DNA, 25 bp, Homo sapien
cctcagggcttaagagaatctgggc

SEQ ID NO: 1027839 - DNA, 25 bp, Homo sapien
gggcttaagagaatctgggcactga

SEQ ID NO: 1027840 - DNA, 25 bp, Homo sapien
tcagggcttaagagaatctgggcac

SEQ ID NO: 1027841 - DNA, 25 bp, Homo sapien
ggagggatccttggacagggtgcac

SEQ ID NO: 1027842 - DNA, 25 bp, Homo sapien
agggatccttggacagggtgcacag

SEQ ID NO: 1027843 - DNA, 25 bp, Homo sapien
gagggatccttggacagggtgcaca

SEQ ID NO: 1027844 - DNA, 25 bp, Homo sapien
tctttggacagaggtaagtatctgg

SEQ ID NO: 1027845 - DNA, 25 bp, Homo sapien
gccagatgtgatttttggtgccgtc

SEQ ID NO: 1027846 - DNA, 25 bp, Homo sapien
tgccagcttgccagatgtgattttt

SEQ ID NO: 1027847 - DNA, 25 bp, Homo sapien
gccaaccaaggtacagatgccagct

SEQ ID NO: 1027848 - DNA, 25 bp, Homo sapien
cagtccttgcactcgtgggcttggc

SEQ ID NO: 1027849 - DNA, 25 bp, Homo sapien
tgtacttcttatggcgccgcaggtc

SEQ ID NO: 1027850 - DNA, 25 bp, Homo sapien
gcttggactggaagagttcgtcaca

SEQ ID NO: 1027851 - DNA, 25 bp, Homo sapien
tcgtcacagcggaacgtgggctcct

SEQ ID NO: 1027852 - DNA, 25 bp, Homo sapien
ggccttgggacactggtcgcatttg

SEQ ID NO: 1027853 - DNA, 25 bp, Homo sapien
ttttcacattcgaagcgtttgccgc

SEQ ID NO: 1027854 - DNA, 25 bp, Homo sapien
tttgccgctgtcgtgggacatctgg

SEQ ID NO: 1027855 - DNA, 25 bp, Homo sapien
ggtcgcatttgtactcgcgctcctc

SEQ ID NO: 1027856 - DNA, 25 bp, Homo sapien
cccacgtgctgcgagcggatgtgcc

SEQ ID NO: 1027857 - DNA, 25 bp, Homo sapien
cttgaggccggaggacgtggcgaag

SEQ ID NO: 1027858 - DNA, 25 bp, Homo sapien
tatgaaaggcttcaccgtgctgtgg

SEQ ID NO: 1027859 - DNA, 25 bp, Homo sapien
ccgtgctgtggatatgcttgtgctg

SEQ ID NO: 1027860 - DNA, 25 bp, Homo sapien
gcaggcggccaggctgggcgaccac

SEQ ID NO: 1027861 - DNA, 25 bp, Homo sapien
aggcggccaggctgggcgaccactc

SEQ ID NO: 1027862 - DNA, 25 bp, Homo sapien
gcggccaggctgggcgaccactcac

SEQ ID NO: 1027863 - DNA, 25 bp, Homo sapien
ccggagggcaggcggccaggctggg

SEQ ID NO: 1027864 - DNA, 25 bp, Homo sapien
cccgaccgccacggcatccgcgcac

SEQ ID NO: 1027865 - DNA, 25 bp, Homo sapien
gctggaacgcctctcatcgaacagg

SEQ ID NO: 1027866 - DNA, 25 bp, Homo sapien
tggtcttttattcagggctggcccc

SEQ ID NO: 1027867 - DNA, 25 bp, Homo sapien
tctgctgagactgtcacgtgcaggg

SEQ ID NO: 1027868 - DNA, 25 bp, Homo sapien
ccagcccctgtgaggtgaagcaagg

SEQ ID NO: 1027869 - DNA, 25 bp, Homo sapien
tgaagacccccttctgcagttgcac

SEQ ID NO: 1027870 - DNA, 25 bp, Homo sapien
gcctgaagacccccttctgcagttg

SEQ ID NO: 1027871 - DNA, 25 bp, Homo sapien
cccttctgcagttgcaccaaaggac

SEQ ID NO: 1027872 - DNA, 25 bp, Homo sapien
gcaccaaaggacactgtgcagtggc

SEQ ID NO: 1027873 - DNA, 25 bp, Homo sapien
acaggtgagcgccttggtgggaaag

SEQ ID NO: 1027874 - DNA, 25 bp, Homo sapien
cgccttggtgggaaagacaccacca

SEQ ID NO: 1027875 - DNA, 25 bp, Homo sapien
gagcgccttggtgggaaagacacca

SEQ ID NO: 1027876 - DNA, 25 bp, Homo sapien
ggtgagcgccttggtgggaaagaca

SEQ ID NO: 1027877 - DNA, 25 bp, Homo sapien
ttgacacagacagttcctgaggttc

SEQ ID NO: 1027878 - DNA, 25 bp, Homo sapien
gatcccggactttggggctcctggc

SEQ ID NO: 1027879 - DNA, 25 bp, Homo sapien
gcagtactcaactaccctttggaga

SEQ ID NO: 1027880 - DNA, 25 bp, Homo sapien
cagcctctgggttgacacagacagt

SEQ ID NO: 1027881 - DNA, 25 bp, Homo sapien
ggaaagtactcgttgaagcccaggc

SEQ ID NO: 1027882 - DNA, 25 bp, Homo sapien
gtgcatccgcttgtgccggcacagg

SEQ ID NO: 1027883 - DNA, 25 bp, Homo sapien
gccgcccggcgtgtaatggttcttg

SEQ ID NO: 1027884 - DNA, 25 bp, Homo sapien
gcgtgtaggacttgtggcagacctc

SEQ ID NO: 1027885 - DNA, 25 bp, Homo sapien
tccccgtggtggtgttgacgtcctc

SEQ ID NO: 1027886 - DNA, 25 bp, Homo sapien
atagaagacaggcacctcggccacg

SEQ ID NO: 1027887 - DNA, 25 bp, Homo sapien
aggcggctctcgaacttctcctcgg

SEQ ID NO: 1027888 - DNA, 25 bp, Homo sapien
tccgacatgtcgctgctcctggtct

SEQ ID NO: 1027889 - DNA, 25 bp, Homo sapien
gtaggggagcgagcccagcttcttc

SEQ ID NO: 1027890 - DNA, 25 bp, Homo sapien
caaagtacttctcggcaatggatgc

SEQ ID NO: 1027891 - DNA, 25 bp, Homo sapien
catgaagccggggccaaagtacttc

SEQ ID NO: 1027892 - DNA, 25 bp, Homo sapien
acttctcggcaatggatgcgatggc

SEQ ID NO: 1027893 - DNA, 25 bp, Homo sapien
gcccgccgccgttttggctggcacg

SEQ ID NO: 1027894 - DNA, 25 bp, Homo sapien
ctgccgatgctcaggtccagcggct

SEQ ID NO: 1027895 - DNA, 25 bp, Homo sapien
gttttggctggcacgggcccggctg

SEQ ID NO: 1027896 - DNA, 25 bp, Homo sapien
ccttgaccagcaagttgtgggcgag

SEQ ID NO: 1027897 - DNA, 25 bp, Homo sapien
tccccatagacgtggttcttgcggg

SEQ ID NO: 1027898 - DNA, 25 bp, Homo sapien
aagggcgagggcttggcgtagtgga

SEQ ID NO: 1027899 - DNA, 25 bp, Homo sapien
ggcgcccagcttgcgttccccatag

SEQ ID NO: 1027900 - DNA, 25 bp, Homo sapien
tgcgttccccatagacgtggttctt

SEQ ID NO: 1027901 - DNA, 25 bp, Homo sapien
tctgacttctgcaggtagaggctgg

SEQ ID NO: 1027902 - DNA, 25 bp, Homo sapien
caggaagcactcagcccaggcccct

SEQ ID NO: 1027903 - DNA, 25 bp, Homo sapien
gcccaggcccctctgacttctgcag

SEQ ID NO: 1027904 - DNA, 25 bp, Homo sapien
gaggggcaggaagcactcagcccag

SEQ ID NO: 1027905 - DNA, 25 bp, Homo sapien
actctccctcagtggttccctcaca

SEQ ID NO: 1027906 - DNA, 25 bp, Homo sapien
ctagacggaccctccctgtcaccac

SEQ ID NO: 1027907 - DNA, 25 bp, Homo sapien
gccttggggatgtcgggagcccagc

SEQ ID NO: 1027908 - DNA, 25 bp, Homo sapien
tccaaggtcccctcgagggccttca

SEQ ID NO: 1027909 - DNA, 25 bp, Homo sapien
gtctgtgaccttccgcttttctacc

SEQ ID NO: 1027910 - DNA, 25 bp, Homo sapien
cttcagggctcccacggggtctgtg

SEQ ID NO: 1027911 - DNA, 25 bp, Homo sapien
cacggggtctgtgaccttccgcttt

SEQ ID NO: 1027912 - DNA, 25 bp, Homo sapien
tcagggctcccacggggtctgtgac

SEQ ID NO: 1027913 - DNA, 25 bp, Homo sapien
gccaccctgtgatatctgctgtgtg

SEQ ID NO: 1027914 - DNA, 25 bp, Homo sapien
accctgtgatatctgctgtgtgcca

SEQ ID NO: 1027915 - DNA, 25 bp, Homo sapien
gatgggccaccctgtgatatctgct

SEQ ID NO: 1027916 - DNA, 25 bp, Homo sapien
aggagatgggccaccctgtgatatc

SEQ ID NO: 1027917 - DNA, 25 bp, Homo sapien
gtatcgctccttgcccttcctgagg

SEQ ID NO: 1027918 - DNA, 25 bp, Homo sapien
gagctgcccgagtccgccttcatgg

SEQ ID NO: 1027919 - DNA, 25 bp, Homo sapien
cttctctgtcatggtctctatggct

SEQ ID NO: 1027920 - DNA, 25 bp, Homo sapien
tctgtcatggtctctatggctgaca

SEQ ID NO: 1027921 - DNA, 25 bp, Homo sapien
cagtgtgcgtcctcaggtgtctggt

SEQ ID NO: 1027922 - DNA, 25 bp, Homo sapien
agtgtgcgtcctcaggtgtctggtg

SEQ ID NO: 1027923 - DNA, 25 bp, Homo sapien
tgtctggtgagattggctgatctgg

SEQ ID NO: 1027924 - DNA, 25 bp, Homo sapien
ccagtccattcatggagggcttggg

SEQ ID NO: 1027925 - DNA, 25 bp, Homo sapien
gccctggatgttgccacttgttggc

SEQ ID NO: 1027926 - DNA, 25 bp, Homo sapien
gagcctcagtttgccagtccattca

SEQ ID NO: 1027927 - DNA, 25 bp, Homo sapien
gggctgccctggatgttgccacttg

SEQ ID NO: 1027928 - DNA, 25 bp, Homo sapien
tggtgcgttctcgtgctcgtgcttc

SEQ ID NO: 1027929 - DNA, 25 bp, Homo sapien
aagcagcggttgcacaggtggcact

SEQ ID NO: 1027930 - DNA, 25 bp, Homo sapien
ttgttgtggatgttccggacgtgcc

SEQ ID NO: 1027931 - DNA, 25 bp, Homo sapien
gccggtccaggttggtctgctgccc

SEQ ID NO: 1027932 - DNA, 25 bp, Homo sapien
taagagtcttctttctcgtctaaaa

SEQ ID NO: 1027933 - DNA, 25 bp, Homo sapien
tctgatttccgagaaataagagtct

SEQ ID NO: 1027934 - DNA, 25 bp, Homo sapien
tctgttcgcgttgatgcttggttca

SEQ ID NO: 1027935 - DNA, 25 bp, Homo sapien
tggttcatctcactattggcaataa

SEQ ID NO: 1027936 - DNA, 25 bp, Homo sapien
cccccactgcgcctatctggatgtg

SEQ ID NO: 1027937 - DNA, 25 bp, Homo sapien
cactgcgcctatctggatgtgttag

SEQ ID NO: 1027938 - DNA, 25 bp, Homo sapien
tgaggcccccactgcgcctatctgg

SEQ ID NO: 1027939 - DNA, 25 bp, Homo sapien
cccactgcgcctatctggatgtgtt

SEQ ID NO: 1027940 - DNA, 25 bp, Homo sapien
ggatccgaattccaccatcgttctg

SEQ ID NO: 1027941 - DNA, 25 bp, Homo sapien
ttgcacagagcatgcgccgacattc

SEQ ID NO: 1027942 - DNA, 25 bp, Homo sapien
tacggagccctggtatcccaggttg

SEQ ID NO: 1027943 - DNA, 25 bp, Homo sapien
cagagtaagtgaggcctacggagcc

SEQ ID NO: 1027944 - DNA, 25 bp, Homo sapien
gctgcaccctagctcggggtcctgg

SEQ ID NO: 1027945 - DNA, 25 bp, Homo sapien
agtgcggccgggctgcaccctagct

SEQ ID NO: 1027946 - DNA, 25 bp, Homo sapien
tctcctgcagtgcggccgggctgca

SEQ ID NO: 1027947 - DNA, 25 bp, Homo sapien
ggtcctggtgggtctcctgcagcgc

SEQ ID NO: 1027948 - DNA, 25 bp, Homo sapien
gccctctcgatgacacgaggacata

SEQ ID NO: 1027949 - DNA, 25 bp, Homo sapien
ttgttggtgaggtgccctcgggtgg

SEQ ID NO: 1027950 - DNA, 25 bp, Homo sapien
tcgatgacacgaggacatacccctc

SEQ ID NO: 1027951 - DNA, 25 bp, Homo sapien
gcctgtgccctctcgatgacacgag

SEQ ID NO: 1027952 - DNA, 25 bp, Homo sapien
cctcggtcctggtcgcctgtgttgg

SEQ ID NO: 1027953 - DNA, 25 bp, Homo sapien
gggccaagagcgtcctgtacacaca

SEQ ID NO: 1027954 - DNA, 25 bp, Homo sapien
ttgggggccaagagcgtcctgtaca

SEQ ID NO: 1027955 - DNA, 25 bp, Homo sapien
ggcttgaggagagttcctcggtcct

SEQ ID NO: 1027956 - DNA, 25 bp, Homo sapien
gaggacgtgggcactggcccgagag

SEQ ID NO: 1027957 - DNA, 25 bp, Homo sapien
ccctcagggcagacttcagggggaa

SEQ ID NO: 1027958 - DNA, 25 bp, Homo sapien
ttcaggctgacaactcgaggacgtg

SEQ ID NO: 1027959 - DNA, 25 bp, Homo sapien
gggaaggaattcaggctgacaactc

SEQ ID NO: 1027960 - DNA, 25 bp, Homo sapien
ggcactgccgtccacgatctgcatg

SEQ ID NO: 1027961 - DNA, 25 bp, Homo sapien
gggcactgccgtccacgatctgcat

SEQ ID NO: 1027962 - DNA, 25 bp, Homo sapien
tgggcactgccgtccacgatctgca

SEQ ID NO: 1027963 - DNA, 25 bp, Homo sapien
tcgggtgcgggggacacggtgtcat

SEQ ID NO: 1027964 - DNA, 25 bp, Homo sapien
ctcgggtgcgggggacacggtgtca

SEQ ID NO: 1027965 - DNA, 25 bp, Homo sapien
cgggtgcgggggacacggtgtcatc

SEQ ID NO: 1027966 - DNA, 25 bp, Homo sapien
ccagggaggcggctggctcctcatc

SEQ ID NO: 1027967 - DNA, 25 bp, Homo sapien
gcccacggccagggaggcggctggc

SEQ ID NO: 1027968 - DNA, 25 bp, Homo sapien
cttcgggtgtggtcaaagcccacgg

SEQ ID NO: 1027969 - DNA, 25 bp, Homo sapien
tcgggtgtggtcaaagcccacggcc

SEQ ID NO: 1027970 - DNA, 25 bp, Homo sapien
aaagctaacagaccgccttcgtggt

SEQ ID NO: 1027971 - DNA, 25 bp, Homo sapien
cccaaaagtcggcatcggctccaaa

SEQ ID NO: 1027972 - DNA, 25 bp, Homo sapien
taagcacatctttaacttcaaatgc

SEQ ID NO: 1027973 - DNA, 25 bp, Homo sapien
tctaaggtggaattaagcacatctt

SEQ ID NO: 1027974 - DNA, 25 bp, Homo sapien
gagaggagtgctggctgtcctctgg

SEQ ID NO: 1027975 - DNA, 25 bp, Homo sapien
gggccacggcgggagaggagtgctg

SEQ ID NO: 1027976 - DNA, 25 bp, Homo sapien
ggagaggagtgctggctgtcctctg

SEQ ID NO: 1027977 - DNA, 25 bp, Homo sapien
ctaggagggccacggcgggagagga

SEQ ID NO: 1027978 - DNA, 25 bp, Homo sapien
gaggatgcagcgtgggggcgtttgc

SEQ ID NO: 1027979 - DNA, 25 bp, Homo sapien
cctgctgcgccccagcttgcgggag

SEQ ID NO: 1027980 - DNA, 25 bp, Homo sapien
gggcgtttgcgtgaccagagcttcc

SEQ ID NO: 1027981 - DNA, 25 bp, Homo sapien
cagcttgcgggagggcggtggtcgc

SEQ ID NO: 1027982 - DNA, 25 bp, Homo sapien
tgtggagaggagtgtcttcggaaag

SEQ ID NO: 1027983 - DNA, 25 bp, Homo sapien
gtgtcttcggaaagggacagcatca

SEQ ID NO: 1027984 - DNA, 25 bp, Homo sapien
ggagtgtcttcggaaagggacagca

SEQ ID NO: 1027985 - DNA, 25 bp, Homo sapien
gagaggagtgtcttcggaaagggac

SEQ ID NO: 1027986 - DNA, 25 bp, Homo sapien
cgacgtggctccagtgaccttcaac

SEQ ID NO: 1027987 - DNA, 25 bp, Homo sapien
gctccagtgaccttcaaccaagcgt

SEQ ID NO: 1027988 - DNA, 25 bp, Homo sapien
aaatgctccagactccgacgtggct

SEQ ID NO: 1027989 - DNA, 25 bp, Homo sapien
gaccttcaaccaagcgtccagagaa

SEQ ID NO: 1027990 - DNA, 25 bp, Homo sapien
gagactctacgactgctttagggac

SEQ ID NO: 1027991 - DNA, 25 bp, Homo sapien
gactctgcagtcaatacggttacca

SEQ ID NO: 1027992 - DNA, 25 bp, Homo sapien
aagaatacacccaggcacagtgcgg

SEQ ID NO: 1027993 - DNA, 25 bp, Homo sapien
tcccaggcagactcgggtttgcaaa

SEQ ID NO: 1027994 - DNA, 25 bp, Homo sapien
ctcaagctgtgtctcgccaagaacc

SEQ ID NO: 1027995 - DNA, 25 bp, Homo sapien
aagaacccgcaggaagagcgacgtg

SEQ ID NO: 1027996 - DNA, 25 bp, Homo sapien
atccggagtctcaggcacaggtgcg

SEQ ID NO: 1027997 - DNA, 25 bp, Homo sapien
aagaagttgcgtcccaagagaggga

SEQ ID NO: 1027998 - DNA, 25 bp, Homo sapien
tctggtaaacggcagcagggacagc

SEQ ID NO: 1027999 - DNA, 25 bp, Homo sapien
gaggaatccctttcactgtgatccg

SEQ ID NO: 1028000 - DNA, 25 bp, Homo sapien
cctgaggagatgtccacacgtgaca

SEQ ID NO: 1028001 - DNA, 25 bp, Homo sapien
gcggcttgcaccactcctgtttgta

SEQ ID NO: 1028002 - DNA, 25 bp, Homo sapien
caggtgggtcctgtcttgcctcgtt

SEQ ID NO: 1028003 - DNA, 25 bp, Homo sapien
cacaggtgggtcctgtcttgcctcg

SEQ ID NO: 1028004 - DNA, 25 bp, Homo sapien
ggtgggtcctgtcttgcctcgttgt

SEQ ID NO: 1028005 - DNA, 25 bp, Homo sapien
gtgggtcctgtcttgcctcgttgtg

SEQ ID NO: 1028006 - DNA, 25 bp, Homo sapien
atcctggatccttcccgacacgcca

SEQ ID NO: 1028007 - DNA, 25 bp, Homo sapien
gggatgttgtggaaacgcgtgagaa

SEQ ID NO: 1028008 - DNA, 25 bp, Homo sapien
ggaaacgcgtgagaaggcctgagca

SEQ ID NO: 1028009 - DNA, 25 bp, Homo sapien
tggatccttcccgacacgccagctg

SEQ ID NO: 1028010 - DNA, 25 bp, Homo sapien
tgctgaaaagacacgctgagggctc

SEQ ID NO: 1028011 - DNA, 25 bp, Homo sapien
gcctcctgaaaacgccaagtgctgg

SEQ ID NO: 1028012 - DNA, 25 bp, Homo sapien
gaggaggcctccttcggaatttcca

SEQ ID NO: 1028013 - DNA, 25 bp, Homo sapien
tgacttaaaacgtgcaaccaggact

SEQ ID NO: 1028014 - DNA, 25 bp, Homo sapien
ggggacgtcggctcgctgggggctg

SEQ ID NO: 1028015 - DNA, 25 bp, Homo sapien
gacgtcggctcgctgggggctgggg

SEQ ID NO: 1028016 - DNA, 25 bp, Homo sapien
acgtcggctcgctgggggctggggt

SEQ ID NO: 1028017 - DNA, 25 bp, Homo sapien
gggacgtcggctcgctgggggctgg

SEQ ID NO: 1028018 - DNA, 25 bp, Homo sapien
gatatcttgggtcccactcatgaag

SEQ ID NO: 1028019 - DNA, 25 bp, Homo sapien
tcccactcatgaagggtctgccagg

SEQ ID NO: 1028020 - DNA, 25 bp, Homo sapien
tgaagtcagtgatatcttgggtccc

SEQ ID NO: 1028021 - DNA, 25 bp, Homo sapien
gttgaagtcagtgatatcttgggtc

SEQ ID NO: 1028022 - DNA, 25 bp, Homo sapien
agctgcacgcgtggccttgtaaagg

SEQ ID NO: 1028023 - DNA, 25 bp, Homo sapien
ggacagctgcacgcgtggccttgta

SEQ ID NO: 1028024 - DNA, 25 bp, Homo sapien
acagctgcacgcgtggccttgtaaa

SEQ ID NO: 1028025 - DNA, 25 bp, Homo sapien
tgcacgcgtggccttgtaaaggaag

SEQ ID NO: 1028026 - DNA, 25 bp, Homo sapien
gacgtggaggtcttggccagtcggg

SEQ ID NO: 1028027 - DNA, 25 bp, Homo sapien
tttgcagacgctcatggggaagcgg

SEQ ID NO: 1028028 - DNA, 25 bp, Homo sapien
cggggaaggcagaggacgccagggc

SEQ ID NO: 1028029 - DNA, 25 bp, Homo sapien
cagaggacgccagggcccttggaat

SEQ ID NO: 1028030 - DNA, 25 bp, Homo sapien
taattgggaactgcgcctctttcgc

SEQ ID NO: 1028031 - DNA, 25 bp, Homo sapien
cagtggcaatgcacgtgacgctgaa

SEQ ID NO: 1028032 - DNA, 25 bp, Homo sapien
catggcttttgatacccggctgacc

SEQ ID NO: 1028033 - DNA, 25 bp, Homo sapien
taaattacgactctgacaccagggc

SEQ ID NO: 1028034 - DNA, 25 bp, Homo sapien
ctgtcctgcagccgcttcgctcctg

SEQ ID NO: 1028035 - DNA, 25 bp, Homo sapien
tccgcttcctgcgcggtctggctgg

SEQ ID NO: 1028036 - DNA, 25 bp, Homo sapien
gcgcgctggcggtgcagcttccagc

SEQ ID NO: 1028037 - DNA, 25 bp, Homo sapien
ctgcggccccgcaggtgggcgctgg

SEQ ID NO: 1028038 - DNA, 25 bp, Homo sapien
cctcattgccctgaaggacatcccc

SEQ ID NO: 1028039 - DNA, 25 bp, Homo sapien
ccctcattgccctgaaggacatccc

SEQ ID NO: 1028040 - DNA, 25 bp, Homo sapien
ctcattgccctgaaggacatcccca

SEQ ID NO: 1028041 - DNA, 25 bp, Homo sapien
tggtcaatgagcaagtgacgctgcc

SEQ ID NO: 1028042 - DNA, 25 bp, Homo sapien
agcaagtgacgctgcctctccgtgc

SEQ ID NO: 1028043 - DNA, 25 bp, Homo sapien
catgtggtcaatgagcaagtgacgc

SEQ ID NO: 1028044 - DNA, 25 bp, Homo sapien
cccaggcatgtggtcaatgagcaag

SEQ ID NO: 1028045 - DNA, 25 bp, Homo sapien
gtagacatctctgtagcccgatccc

SEQ ID NO: 1028046 - DNA, 25 bp, Homo sapien
gcgggagctgccctgtagacatctc

SEQ ID NO: 1028047 - DNA, 25 bp, Homo sapien
gagctgccctgtagacatctctgta

SEQ ID NO: 1028048 - DNA, 25 bp, Homo sapien
gccctgtagacatctctgtagcccg

SEQ ID NO: 1028049 - DNA, 25 bp, Homo sapien
gagagtccagtatgacacctggcca

SEQ ID NO: 1028050 - DNA, 25 bp, Homo sapien
agtcaccagcccgagagtccagtat

SEQ ID NO: 1028051 - DNA, 25 bp, Homo sapien
ggtggcagcccacagtcccacgtac

SEQ ID NO: 1028052 - DNA, 25 bp, Homo sapien
ccagcccgagagtccagtatgacac

SEQ ID NO: 1028053 - DNA, 25 bp, Homo sapien
tctctgtgctcaggacgatgggcca

SEQ ID NO: 1028054 - DNA, 25 bp, Homo sapien
tggaaggcggcatcgtctctaacac

SEQ ID NO: 1028055 - DNA, 25 bp, Homo sapien
agctccgagtggaagcggtgtccca

SEQ ID NO: 1028056 - DNA, 25 bp, Homo sapien
tcttagggatcagctgttgggtgcc

SEQ ID NO: 1028057 - DNA, 25 bp, Homo sapien
gcaggtgttgcccacggcgattctg

SEQ ID NO: 1028058 - DNA, 25 bp, Homo sapien
gaagctgtgcccaatagatgtcagc

SEQ ID NO: 1028059 - DNA, 25 bp, Homo sapien
ctcggctccacatgcgaagctgtgc

SEQ ID NO: 1028060 - DNA, 25 bp, Homo sapien
gagagacacagaaaccgcagctgtc

SEQ ID NO: 1028061 - DNA, 25 bp, Homo sapien
gtgcccacgtttcctccccagcgtc

SEQ ID NO: 1028062 - DNA, 25 bp, Homo sapien
tgtgcccacgtttcctccccagcgt

SEQ ID NO: 1028063 - DNA, 25 bp, Homo sapien
tgtcaagcagctttggtgaccccga

SEQ ID NO: 1028064 - DNA, 25 bp, Homo sapien
tcagggctacatgaacagaccagcc

SEQ ID NO: 1028065 - DNA, 25 bp, Homo sapien
gagaccagtttcaactggagcccag

SEQ ID NO: 1028066 - DNA, 25 bp, Homo sapien
gcctctggaaggaccctgtcaagca

SEQ ID NO: 1028067 - DNA, 25 bp, Homo sapien
ggaggccccaacacatggctcccct

SEQ ID NO: 1028068 - DNA, 25 bp, Homo sapien
ttcagcctcgaagagtccgggcaga

SEQ ID NO: 1028069 - DNA, 25 bp, Homo sapien
gggccggtgccctctgatctggcct

SEQ ID NO: 1028070 - DNA, 25 bp, Homo sapien
ccccaacacggccactgtaggctgg

SEQ ID NO: 1028071 - DNA, 25 bp, Homo sapien
ggtagcaggcacctccctatgtcaa

SEQ ID NO: 1028072 - DNA, 25 bp, Homo sapien
atttggacccaggtagcaggcacct

SEQ ID NO: 1028073 - DNA, 25 bp, Homo sapien
ccaggtagcaggcacctccctatgt

SEQ ID NO: 1028074 - DNA, 25 bp, Homo sapien
tttggacccaggtagcaggcacctc

SEQ ID NO: 1028075 - DNA, 25 bp, Homo sapien
acctgaaatgggctggtcccggctc

SEQ ID NO: 1028076 - DNA, 25 bp, Homo sapien
caaccagccttaccctgagacgtgg

SEQ ID NO: 1028077 - DNA, 25 bp, Homo sapien
catgcctgtccacaaagcttctggg

SEQ ID NO: 1028078 - DNA, 25 bp, Homo sapien
gatttccgtagaggagacctgggta

SEQ ID NO: 1028079 - DNA, 25 bp, Homo sapien
gatgtcgtcatcagactcctggctg

SEQ ID NO: 1028080 - DNA, 25 bp, Homo sapien
tgaccacaatggtggcgtccacctt

SEQ ID NO: 1028081 - DNA, 25 bp, Homo sapien
tggaggactcatcgaggatgtcgtc

SEQ ID NO: 1028082 - DNA, 25 bp, Homo sapien
cgggccggtagctcttgaccacaat

SEQ ID NO: 1028083 - DNA, 25 bp, Homo sapien
aacaaggagccccattgtaccacag

SEQ ID NO: 1028084 - DNA, 25 bp, Homo sapien
tggtgggtggttgcagtgccagccc

SEQ ID NO: 1028085 - DNA, 25 bp, Homo sapien
cagggtacgcagcaccatggtgtgt

SEQ ID NO: 1028086 - DNA, 25 bp, Homo sapien
gccagcccctctgaatggcgaacaa

SEQ ID NO: 1028087 - DNA, 25 bp, Homo sapien
ccgctcctcagtggagagctggtcc

SEQ ID NO: 1028088 - DNA, 25 bp, Homo sapien
tccgctcctcagtggagagctggtc

SEQ ID NO: 1028089 - DNA, 25 bp, Homo sapien
tcctgccttttccgctcctcagtgg

SEQ ID NO: 1028090 - DNA, 25 bp, Homo sapien
atctgggtcacggtcgcccgcagct

SEQ ID NO: 1028091 - DNA, 25 bp, Homo sapien
gtgctccatctgggtcacggtcgcc

SEQ ID NO: 1028092 - DNA, 25 bp, Homo sapien
gctgtgctggtaggagaactccgac

SEQ ID NO: 1028093 - DNA, 25 bp, Homo sapien
aactccgacgtgaggatctcgaaca

SEQ ID NO: 1028094 - DNA, 25 bp, Homo sapien
ggtcatcacactccgcgggagccag

SEQ ID NO: 1028095 - DNA, 25 bp, Homo sapien
cacactccgcgggagccagcagctg

SEQ ID NO: 1028096 - DNA, 25 bp, Homo sapien
agaggtcatcacactccgcgggagc

SEQ ID NO: 1028097 - DNA, 25 bp, Homo sapien
catcacactccgcgggagccagcag

SEQ ID NO: 1028098 - DNA, 25 bp, Homo sapien
tccaggccctgcaaccagagctcag

SEQ ID NO: 1028099 - DNA, 25 bp, Homo sapien
aggccctgcaaccagagctcaggtc

SEQ ID NO: 1028100 - DNA, 25 bp, Homo sapien
ctccaggccctgcaaccagagctca

SEQ ID NO: 1028101 - DNA, 25 bp, Homo sapien
cctccaggccctgcaaccagagctc

SEQ ID NO: 1028102 - DNA, 25 bp, Homo sapien
cgccccagggcagcaatctaaagcc

SEQ ID NO: 1028103 - DNA, 25 bp, Homo sapien
tcccgccccagggcagcaatctaaa

SEQ ID NO: 1028104 - DNA, 25 bp, Homo sapien
aggaggccggagcttcccgccccag

SEQ ID NO: 1028105 - DNA, 25 bp, Homo sapien
gaggaggccggagcttcccgcccca

SEQ ID NO: 1028106 - DNA, 25 bp, Homo sapien
cactgtgaatgccaggagctgtcgg

SEQ ID NO: 1028107 - DNA, 25 bp, Homo sapien
gattccccagacagttcactgtgaa

SEQ ID NO: 1028108 - DNA, 25 bp, Homo sapien
cccaaatagcgatgattccccagac

SEQ ID NO: 1028109 - DNA, 25 bp, Homo sapien
atagcgatgattccccagacagttc

SEQ ID NO: 1028110 - DNA, 25 bp, Homo sapien
tgagcagggccacgacatgcgtacg

SEQ ID NO: 1028111 - DNA, 25 bp, Homo sapien
ccaggccggtcagcagctcatatgg

SEQ ID NO: 1028112 - DNA, 25 bp, Homo sapien
gctgcttgcccttgagaatccccag

SEQ ID NO: 1028113 - DNA, 25 bp, Homo sapien
ccccgtggacgaggacccagcaggt

SEQ ID NO: 1028114 - DNA, 25 bp, Homo sapien
gcactggtgccgtccctctgttgtc

SEQ ID NO: 1028115 - DNA, 25 bp, Homo sapien
gtgccacgggcctggtggtcgggcc

SEQ ID NO: 1028116 - DNA, 25 bp, Homo sapien
catacatggacgtggcaggagctga

SEQ ID NO: 1028117 - DNA, 25 bp, Homo sapien
ctgccacgatcccacgcactggtgc

SEQ ID NO: 1028118 - DNA, 25 bp, Homo sapien
acctcgttggagcagtaggcgatgt

SEQ ID NO: 1028119 - DNA, 25 bp, Homo sapien
cctcgttggagcagtaggcgatgta

SEQ ID NO: 1028120 - DNA, 25 bp, Homo sapien
tgatgtcctcgaccagcacctgggc

SEQ ID NO: 1028121 - DNA, 25 bp, Homo sapien
ccaggatgtcactgatgtcctcgac

SEQ ID NO: 1028122 - DNA, 25 bp, Homo sapien
cacgccggccgcctctcaatctctc

SEQ ID NO: 1028123 - DNA, 25 bp, Homo sapien
gcacgccggccgcctctcaatctct

SEQ ID NO: 1028124 - DNA, 25 bp, Homo sapien
agggcctctcggaaggcggcgttgc

SEQ ID NO: 1028125 - DNA, 25 bp, Homo sapien
cctctcggaaggcggcgttgctgct

SEQ ID NO: 1028126 - DNA, 25 bp, Homo sapien
aggggcagccgggtcacccgctgca

SEQ ID NO: 1028127 - DNA, 25 bp, Homo sapien
gcagccgggtcacccgctgcatggg

SEQ ID NO: 1028128 - DNA, 25 bp, Homo sapien
gtcacccgctgcatggggaggatca

SEQ ID NO: 1028129 - DNA, 25 bp, Homo sapien
tcacccgctgcatggggaggatcag

SEQ ID NO: 1028130 - DNA, 25 bp, Homo sapien
ggttaataaagccatcttaggatcg

SEQ ID NO: 1028131 - DNA, 25 bp, Homo sapien
ttacaatatcataggccaagcctgg

SEQ ID NO: 1028132 - DNA, 25 bp, Homo sapien
ggagaaggtcacaagcacgtaatgc

SEQ ID NO: 1028133 - DNA, 25 bp, Homo sapien
ggaccccaggatggtatgcccggcc

SEQ ID NO: 1028134 - DNA, 25 bp, Homo sapien
cacgtacagcccctgaacggcctct

SEQ ID NO: 1028135 - DNA, 25 bp, Homo sapien
cacagcacgtacagcccctgaacgg

SEQ ID NO: 1028136 - DNA, 25 bp, Homo sapien
agcacgtacagcccctgaacggcct

SEQ ID NO: 1028137 - DNA, 25 bp, Homo sapien
acagcacgtacagcccctgaacggc

SEQ ID NO: 1028138 - DNA, 25 bp, Homo sapien
caacagacatgggacagaaagtccc

SEQ ID NO: 1028139 - DNA, 25 bp, Homo sapien
acaacagacatgggacagaaagtcc

SEQ ID NO: 1028140 - DNA, 25 bp, Homo sapien
tcagtgcacggctggcagccttgta

SEQ ID NO: 1028141 - DNA, 25 bp, Homo sapien
ggctggcagccttgtacctttcgga

SEQ ID NO: 1028142 - DNA, 25 bp, Homo sapien
ccttgtacctttcggagtggccctg

SEQ ID NO: 1028143 - DNA, 25 bp, Homo sapien
gctgatggccttcagtgcacggctg

SEQ ID NO: 1028144 - DNA, 25 bp, Homo sapien
catggttcccgtgtgagaggctggt

SEQ ID NO: 1028145 - DNA, 25 bp, Homo sapien
ctgcagggcatggttcccgtgtgag

SEQ ID NO: 1028146 - DNA, 25 bp, Homo sapien
ggcatggttcccgtgtgagaggctg

SEQ ID NO: 1028147 - DNA, 25 bp, Homo sapien
cagggcatggttcccgtgtgagagg

SEQ ID NO: 1028148 - DNA, 25 bp, Homo sapien
gcgtgtacatctgctccatgcgctc

SEQ ID NO: 1028149 - DNA, 25 bp, Homo sapien
gggccccctcgttgcactgcctcac

SEQ ID NO: 1028150 - DNA, 25 bp, Homo sapien
ttgaccttgctgaagtccagctgtg

SEQ ID NO: 1028151 - DNA, 25 bp, Homo sapien
tgtgtgcagcgtgtacatctgctcc

SEQ ID NO: 1028152 - DNA, 25 bp, Homo sapien
tgtccgtggccctgagtgagggtgg

SEQ ID NO: 1028153 - DNA, 25 bp, Homo sapien
ttgtccgtggccctgagtgagggtg

SEQ ID NO: 1028154 - DNA, 25 bp, Homo sapien
ttggttgtccgtggccctgagtgag

SEQ ID NO: 1028155 - DNA, 25 bp, Homo sapien
ggttgtccgtggccctgagtgaggg

SEQ ID NO: 1028156 - DNA, 25 bp, Homo sapien
ggggacagagccgggaggcggagat

SEQ ID NO: 1028157 - DNA, 25 bp, Homo sapien
tcttccactaagaacagctctccgc

SEQ ID NO: 1028158 - DNA, 25 bp, Homo sapien
acatcgttgaacaggaaaaggtagc

SEQ ID NO: 1028159 - DNA, 25 bp, Homo sapien
aaaaggtagcacgttggccggctgg

SEQ ID NO: 1028160 - DNA, 25 bp, Homo sapien
tggccggctggcaatttttcgaaaa

SEQ ID NO: 1028161 - DNA, 25 bp, Homo sapien
ccagggccagcggtccagtgtccat

SEQ ID NO: 1028162 - DNA, 25 bp, Homo sapien
ccagcggtccagtgtccatggagtg

SEQ ID NO: 1028163 - DNA, 25 bp, Homo sapien
ccccgagtgtcacgtagagcatgtg

SEQ ID NO: 1028164 - DNA, 25 bp, Homo sapien
atgtgccgagtggaagccgcgcctc

SEQ ID NO: 1028165 - DNA, 25 bp, Homo sapien
aggcagccacggacgggctccaaga

SEQ ID NO: 1028166 - DNA, 25 bp, Homo sapien
gagttcccgcgtcccacagaacaga

SEQ ID NO: 1028167 - DNA, 25 bp, Homo sapien
tcgtggctatcaccggcagacccag

SEQ ID NO: 1028168 - DNA, 25 bp, Homo sapien
ggctttcgagtcctcctcgtggcta

SEQ ID NO: 1028169 - DNA, 25 bp, Homo sapien
gcagtcggtgggacggtcccaccca

SEQ ID NO: 1028170 - DNA, 25 bp, Homo sapien
ggagacacgggcagtcggtgggacg

SEQ ID NO: 1028171 - DNA, 25 bp, Homo sapien
gacacgggcagtcggtgggacggtc

SEQ ID NO: 1028172 - DNA, 25 bp, Homo sapien
cagtcggtgggacggtcccacccag

SEQ ID NO: 1028173 - DNA, 25 bp, Homo sapien
agctcagacggctctatcttctcca

SEQ ID NO: 1028174 - DNA, 25 bp, Homo sapien
ctgttgcgaagcagggtcacctgga

SEQ ID NO: 1028175 - DNA, 25 bp, Homo sapien
cacggaggagctacggttgccgccc

SEQ ID NO: 1028176 - DNA, 25 bp, Homo sapien
tgtggttcatctgggcgtagtcctg

SEQ ID NO: 1028177 - DNA, 25 bp, Homo sapien
tctcactgtgtgtgagcgccacgat

SEQ ID NO: 1028178 - DNA, 25 bp, Homo sapien
ctgtctctcactgtgtgtgagcgcc

SEQ ID NO: 1028179 - DNA, 25 bp, Homo sapien
ctcctttgctggagaggccctgcca

SEQ ID NO: 1028180 - DNA, 25 bp, Homo sapien
ctgccactgtctctcactgtgtgtg

SEQ ID NO: 1028181 - DNA, 25 bp, Homo sapien
gggctacagtgggggccaaagtgcc

SEQ ID NO: 1028182 - DNA, 25 bp, Homo sapien
ggccaaagtgccagccacggcagag

SEQ ID NO: 1028183 - DNA, 25 bp, Homo sapien
tgctgcagaaccaggaccacgtccg

SEQ ID NO: 1028184 - DNA, 25 bp, Homo sapien
ctgcagtgtgacctcgtctgcttgc

SEQ ID NO: 1028185 - DNA, 25 bp, Homo sapien
ccttggtgatctccacctggggcag

SEQ ID NO: 1028186 - DNA, 25 bp, Homo sapien
cttgcttcgcgaagaaggccttggt

SEQ ID NO: 1028187 - DNA, 25 bp, Homo sapien
tctccgtcccggagcctctcgccat

SEQ ID NO: 1028188 - DNA, 25 bp, Homo sapien
ccgtctctccgtcccggagcctctc

SEQ ID NO: 1028189 - DNA, 25 bp, Homo sapien
cccggagcctctcgccatagagcca

SEQ ID NO: 1028190 - DNA, 25 bp, Homo sapien
ccgtcccggagcctctcgccataga

SEQ ID NO: 1028191 - DNA, 25 bp, Homo sapien
ggacattgccctccacggccacacg

SEQ ID NO: 1028192 - DNA, 25 bp, Homo sapien
tgatgaagcgggcaaagtcctcggg

SEQ ID NO: 1028193 - DNA, 25 bp, Homo sapien
agacgctccatcctgcggacattgc

SEQ ID NO: 1028194 - DNA, 25 bp, Homo sapien
acggccacacggctggtgatgaagc

SEQ ID NO: 1028195 - DNA, 25 bp, Homo sapien
taatcgctattggtgcctcctgtgc

SEQ ID NO: 1028196 - DNA, 25 bp, Homo sapien
tcctgtgcccatcagtccaggtgga

SEQ ID NO: 1028197 - DNA, 25 bp, Homo sapien
tccgtgaagtgtctggagcccggca

SEQ ID NO: 1028198 - DNA, 25 bp, Homo sapien
cacttgctgattggagacaggctgt

SEQ ID NO: 1028199 - DNA, 25 bp, Homo sapien
aacactggcctgaccgaatggactg

SEQ ID NO: 1028200 - DNA, 25 bp, Homo sapien
tcccacaaaggcagcggaaacttgg

SEQ ID NO: 1028201 - DNA, 25 bp, Homo sapien
gatcgaatgcaaggacggtttcaca

SEQ ID NO: 1028202 - DNA, 25 bp, Homo sapien
tcacatcagaaaatgcgtcggtgca

SEQ ID NO: 1028203 - DNA, 25 bp, Homo sapien
gcaccttgcaagactgattttttaa

SEQ ID NO: 1028204 - DNA, 25 bp, Homo sapien
gcctcgtggctttaattcacatttc

SEQ ID NO: 1028205 - DNA, 25 bp, Homo sapien
gagcagctatgtaccaataacttgg

SEQ ID NO: 1028206 - DNA, 25 bp, Homo sapien
gcaggtgcagaataatggaacgctt

SEQ ID NO: 1028207 - DNA, 25 bp, Homo sapien
tgggctttagtgttaccattactga

SEQ ID NO: 1028208 - DNA, 25 bp, Homo sapien
gagtagtgtacattctgcccatgaa

SEQ ID NO: 1028209 - DNA, 25 bp, Homo sapien
tacatggacatagcatatggtggaa

SEQ ID NO: 1028210 - DNA, 25 bp, Homo sapien
tacagggtacacatgcagttttgtt

SEQ ID NO: 1028211 - DNA, 25 bp, Homo sapien
cagtgagcttggttgctcacagaca

SEQ ID NO: 1028212 - DNA, 25 bp, Homo sapien
aagctgatgaatggaccgctgtggg

SEQ ID NO: 1028213 - DNA, 25 bp, Homo sapien
taaaaccagccaaggtagctgaggc

SEQ ID NO: 1028214 - DNA, 25 bp, Homo sapien
taggactctctctcccttaagaagg

SEQ ID NO: 1028215 - DNA, 25 bp, Homo sapien
cacggtagtggcttcagcagggcca

SEQ ID NO: 1028216 - DNA, 25 bp, Homo sapien
gttgctgcggtgaacacaataaaca

SEQ ID NO: 1028217 - DNA, 25 bp, Homo sapien
gctgttgctgcggtgaacacaataa

SEQ ID NO: 1028218 - DNA, 25 bp, Homo sapien
gcccctggagccacggtagtggctt

SEQ ID NO: 1028219 - DNA, 25 bp, Homo sapien
gctggcgaaaatctgcctggttcag

SEQ ID NO: 1028220 - DNA, 25 bp, Homo sapien
gctgcatatcccagcgctggcgaaa

SEQ ID NO: 1028221 - DNA, 25 bp, Homo sapien
tggttcagctttccgggaatccgtg

SEQ ID NO: 1028222 - DNA, 25 bp, Homo sapien
tccgtggcacaggatatatgcgacg

SEQ ID NO: 1028223 - DNA, 25 bp, Homo sapien
gaggtccctccagatgaaacacgct

SEQ ID NO: 1028224 - DNA, 25 bp, Homo sapien
tgactctggaccctagccttggaca

SEQ ID NO: 1028225 - DNA, 25 bp, Homo sapien
tggttttccgtgacaccctgcagag

SEQ ID NO: 1028226 - DNA, 25 bp, Homo sapien
tgccttgggttgagcagcactcctg

SEQ ID NO: 1028227 - DNA, 25 bp, Homo sapien
agcccatgtttccacatcggtgctg

SEQ ID NO: 1028228 - DNA, 25 bp, Homo sapien
gactgggggtgtctcagcccatgtt

SEQ ID NO: 1028229 - DNA, 25 bp, Homo sapien
acaggacagtgcaggcactggacgt

SEQ ID NO: 1028230 - DNA, 25 bp, Homo sapien
gggatgccagctttccctcgcccag

SEQ ID NO: 1028231 - DNA, 25 bp, Homo sapien
cgagcttctgttggcactaactggt

SEQ ID NO: 1028232 - DNA, 25 bp, Homo sapien
cactaactggtgagttgttggcaat

SEQ ID NO: 1028233 - DNA, 25 bp, Homo sapien
tgcacattacggtcataaatgatgt

SEQ ID NO: 1028234 - DNA, 25 bp, Homo sapien
ggcaatgagttgcacattacggtca

SEQ ID NO: 1028235 - DNA, 25 bp, Homo sapien
ctagcacgcaggtccactgggacaa

SEQ ID NO: 1028236 - DNA, 25 bp, Homo sapien
ctgagaaggtgacatgtgtgacgct

SEQ ID NO: 1028237 - DNA, 25 bp, Homo sapien
cacggtgcatggctcggtggccttt

SEQ ID NO: 1028238 - DNA, 25 bp, Homo sapien
gtagactccgagtgcctgaccttcc

SEQ ID NO: 1028239 - DNA, 25 bp, Homo sapien
tttgaaggatgcatcggaggtcatg

SEQ ID NO: 1028240 - DNA, 25 bp, Homo sapien
gtgacctctgagttggtgtctttga

SEQ ID NO: 1028241 - DNA, 25 bp, Homo sapien
tgtctttgaaggatgcatcggaggt

SEQ ID NO: 1028242 - DNA, 25 bp, Homo sapien
agttggtgtctttgaaggatgcatc

SEQ ID NO: 1028243 - DNA, 25 bp, Homo sapien
gggtttaggcagcagcccagaaggc

SEQ ID NO: 1028244 - DNA, 25 bp, Homo sapien
tgggtttaggcagcagcccagaagg

SEQ ID NO: 1028245 - DNA, 25 bp, Homo sapien
ggtgggtttaggcagcagcccagaa

SEQ ID NO: 1028246 - DNA, 25 bp, Homo sapien
ctggtgggtttaggcagcagcccag

SEQ ID NO: 1028247 - DNA, 25 bp, Homo sapien
tgcaggcatctgtggccgtgctcca

SEQ ID NO: 1028248 - DNA, 25 bp, Homo sapien
tctgtggccgtgctccagataaaca

SEQ ID NO: 1028249 - DNA, 25 bp, Homo sapien
tccagataaacacggagggctgaag

SEQ ID NO: 1028250 - DNA, 25 bp, Homo sapien
gccgtgctccagataaacacggagg

SEQ ID NO: 1028251 - DNA, 25 bp, Homo sapien
tgactgcctagaaccaggacgctgg

SEQ ID NO: 1028252 - DNA, 25 bp, Homo sapien
taatagccttcagcgtcagcggtga

SEQ ID NO: 1028253 - DNA, 25 bp, Homo sapien
cgttctcagttaaggccaagccggg

SEQ ID NO: 1028254 - DNA, 25 bp, Homo sapien
gatggcagcatttccgacagggcgt

SEQ ID NO: 1028255 - DNA, 25 bp, Homo sapien
ctcctcctgaggtgtcgtcttagtg

SEQ ID NO: 1028256 - DNA, 25 bp, Homo sapien
aggtgtcgtcttagtgcccctgccc

SEQ ID NO: 1028257 - DNA, 25 bp, Homo sapien
tcctgaggtgtcgtcttagtgcccc

SEQ ID NO: 1028258 - DNA, 25 bp, Homo sapien
cgtctcctcctgaggtgtcgtctta

SEQ ID NO: 1028259 - DNA, 25 bp, Homo sapien
tgctgtttcactgacgggttcagct

SEQ ID NO: 1028260 - DNA, 25 bp, Homo sapien
gctgtttcactgacgggttcagctc

SEQ ID NO: 1028261 - DNA, 25 bp, Homo sapien
ctgcctttggatgccgccgctggcc

SEQ ID NO: 1028262 - DNA, 25 bp, Homo sapien
gcatgagcggcagcaggcacctgac

SEQ ID NO: 1028263 - DNA, 25 bp, Homo sapien
aggaggagcttctggcatgagcggc

SEQ ID NO: 1028264 - DNA, 25 bp, Homo sapien
cgctggcccggctttccaggtcttg

SEQ ID NO: 1028265 - DNA, 25 bp, Homo sapien
tttcttcttggacagatgctcagaa

SEQ ID NO: 1028266 - DNA, 25 bp, Homo sapien
cagaaggatgccagctcagtcttcc

SEQ ID NO: 1028267 - DNA, 25 bp, Homo sapien
tcagaaggatgccagctcagtcttc

SEQ ID NO: 1028268 - DNA, 25 bp, Homo sapien
cttggacagatgctcagaaggatgc

SEQ ID NO: 1028269 - DNA, 25 bp, Homo sapien
ccacggactccagctggttccaggg

SEQ ID NO: 1028270 - DNA, 25 bp, Homo sapien
ccctggccacggactccagctggtt

SEQ ID NO: 1028271 - DNA, 25 bp, Homo sapien
tggccacggactccagctggttcca

SEQ ID NO: 1028272 - DNA, 25 bp, Homo sapien
agggccagccaggatcccgtgagtc

SEQ ID NO: 1028273 - DNA, 25 bp, Homo sapien
cactcctgctgtaacaggtggagcc

SEQ ID NO: 1028274 - DNA, 25 bp, Homo sapien
tgctgtaacaggtggagcccacccc

SEQ ID NO: 1028275 - DNA, 25 bp, Homo sapien
gccactcctgctgtaacaggtggag

SEQ ID NO: 1028276 - DNA, 25 bp, Homo sapien
cctgctgtaacaggtggagcccacc

SEQ ID NO: 1028277 - DNA, 25 bp, Homo sapien
ggacgtgaagtacctgcatccttgt

SEQ ID NO: 1028278 - DNA, 25 bp, Homo sapien
attctccggtctgtgagcgcgtgtg

SEQ ID NO: 1028279 - DNA, 25 bp, Homo sapien
cggcaggctcggcagtttttaacat

SEQ ID NO: 1028280 - DNA, 25 bp, Homo sapien
gagcgcgtgtggttgggacagggac

SEQ ID NO: 1028281 - DNA, 25 bp, Homo sapien
agggctgggcatccctcggtgctcc

SEQ ID NO: 1028282 - DNA, 25 bp, Homo sapien
tagattagacggttttccctgagcc

SEQ ID NO: 1028283 - DNA, 25 bp, Homo sapien
ccggacggcgcctcatagattagac

SEQ ID NO: 1028284 - DNA, 25 bp, Homo sapien
ctgagcctgtgcaaacgacgtctgc

SEQ ID NO: 1028285 - DNA, 25 bp, Homo sapien
tagggctgagctttcgatgtttgtt

SEQ ID NO: 1028286 - DNA, 25 bp, Homo sapien
ttcctgagagcctgtggagacaccc

SEQ ID NO: 1028287 - DNA, 25 bp, Homo sapien
gatagggctgagctttcgatgtttg

SEQ ID NO: 1028288 - DNA, 25 bp, Homo sapien
atagggctgagctttcgatgtttgt

SEQ ID NO: 1028289 - DNA, 25 bp, Homo sapien
tggagctgtcacctcggtgacattg

SEQ ID NO: 1028290 - DNA, 25 bp, Homo sapien
tgtcacctcggtgacattggaccag

SEQ ID NO: 1028291 - DNA, 25 bp, Homo sapien
cacctcggtgacattggaccaggag

SEQ ID NO: 1028292 - DNA, 25 bp, Homo sapien
gagctgtcacctcggtgacattgga

SEQ ID NO: 1028293 - DNA, 25 bp, Homo sapien
caccagcagtgatggtgagggcgtt

SEQ ID NO: 1028294 - DNA, 25 bp, Homo sapien
gatggtgagggcgttgcgtcctggg

SEQ ID NO: 1028295 - DNA, 25 bp, Homo sapien
gtccccgaccatccaggcctggtgt

SEQ ID NO: 1028296 - DNA, 25 bp, Homo sapien
ggtccccgaccatccaggcctggtg

SEQ ID NO: 1028297 - DNA, 25 bp, Homo sapien
cacaagctcccccgggtctgtgact

SEQ ID NO: 1028298 - DNA, 25 bp, Homo sapien
cgggtctgtgactctgtccctgcgg

SEQ ID NO: 1028299 - DNA, 25 bp, Homo sapien
aagctcccccgggtctgtgactctg

SEQ ID NO: 1028300 - DNA, 25 bp, Homo sapien
ctgactttgaatccagacctggctc

SEQ ID NO: 1028301 - DNA, 25 bp, Homo sapien
agccgctaagcatgacgctggcctc

SEQ ID NO: 1028302 - DNA, 25 bp, Homo sapien
ccagcaccgccaaagaatgaaacgt

SEQ ID NO: 1028303 - DNA, 25 bp, Homo sapien
tctttggaggaaccaaggaatgttc

SEQ ID NO: 1028304 - DNA, 25 bp, Homo sapien
gccaaagaatgaaacgtcccaggaa

SEQ ID NO: 1028305 - DNA, 25 bp, Homo sapien
tcgaggaaggcggtccagtgaggag

SEQ ID NO: 1028306 - DNA, 25 bp, Homo sapien
gagtgggggccatacccctgctttg

SEQ ID NO: 1028307 - DNA, 25 bp, Homo sapien
gcatggctgagggttttaagggagt

SEQ ID NO: 1028308 - DNA, 25 bp, Homo sapien
tggggagctacctctggacattgga

SEQ ID NO: 1028309 - DNA, 25 bp, Homo sapien
ccccctggtggccttgagaggccag

SEQ ID NO: 1028310 - DNA, 25 bp, Homo sapien
ccttcttgccgcgtgctcagggtgg

SEQ ID NO: 1028311 - DNA, 25 bp, Homo sapien
agagcaggcaccaggacccgggggg

SEQ ID NO: 1028312 - DNA, 25 bp, Homo sapien
ctcccttcttgccgcgtgctcaggg

SEQ ID NO: 1028313 - DNA, 25 bp, Homo sapien
acggaatgccgagcgtggctggagc

SEQ ID NO: 1028314 - DNA, 25 bp, Homo sapien
agtgcctgccctggacggaatgccg

SEQ ID NO: 1028315 - DNA, 25 bp, Homo sapien
agagttggaaggcacctggatgtcc

SEQ ID NO: 1028316 - DNA, 25 bp, Homo sapien
ctgccctggacggaatgccgagcgt

SEQ ID NO: 1028317 - DNA, 25 bp, Homo sapien
gaatgaggctctgcaagcgaggggc

SEQ ID NO: 1028318 - DNA, 25 bp, Homo sapien
gggctgcgtgcttctggaatctgtt

SEQ ID NO: 1028319 - DNA, 25 bp, Homo sapien
gattcctggggcgatacccatgccc

SEQ ID NO: 1028320 - DNA, 25 bp, Homo sapien
cccccttcccatggagtaatgaatg

SEQ ID NO: 1028321 - DNA, 25 bp, Homo sapien
ccagtgccaaccctgttcagggagg

SEQ ID NO: 1028322 - DNA, 25 bp, Homo sapien
tcctcgaggtctgcctgtgacgctg

SEQ ID NO: 1028323 - DNA, 25 bp, Homo sapien
tggctgccaaagtgggccccaggtt

SEQ ID NO: 1028324 - DNA, 25 bp, Homo sapien
aggttggccggcgtcctgtgcccac

SEQ ID NO: 1028325 - DNA, 25 bp, Homo sapien
tccagagcggcctgtgaacagctcg

SEQ ID NO: 1028326 - DNA, 25 bp, Homo sapien
cagtgatggacttggtattggcctt

SEQ ID NO: 1028327 - DNA, 25 bp, Homo sapien
ttggtattggcctttggcccttgac

SEQ ID NO: 1028328 - DNA, 25 bp, Homo sapien
gctgtgcctgttccacttcacagat

SEQ ID NO: 1028329 - DNA, 25 bp, Homo sapien
cacttcacagatggggatactgagc

SEQ ID NO: 1028330 - DNA, 25 bp, Homo sapien
tttgggtgcagccaagcagaaggtt

SEQ ID NO: 1028331 - DNA, 25 bp, Homo sapien
tgggtgcagccaagcagaaggtttc

SEQ ID NO: 1028332 - DNA, 25 bp, Homo sapien
ctttgggtgcagccaagcagaaggt

SEQ ID NO: 1028333 - DNA, 25 bp, Homo sapien
ggtgcagccaagcagaaggtttcca

SEQ ID NO: 1028334 - DNA, 25 bp, Homo sapien
tgggcccggggctcagcatccacag

SEQ ID NO: 1028335 - DNA, 25 bp, Homo sapien
ggtgcctgggcccggggctcagcat

SEQ ID NO: 1028336 - DNA, 25 bp, Homo sapien
ctgggcccggggctcagcatccaca

SEQ ID NO: 1028337 - DNA, 25 bp, Homo sapien
tgcctgggcccggggctcagcatcc

SEQ ID NO: 1028338 - DNA, 25 bp, Homo sapien
gggaactcggcgtctcgtggaggct

SEQ ID NO: 1028339 - DNA, 25 bp, Homo sapien
gcgtctcgtggaggctcagtgtcca

SEQ ID NO: 1028340 - DNA, 25 bp, Homo sapien
actcggcgtctcgtggaggctcagt

SEQ ID NO: 1028341 - DNA, 25 bp, Homo sapien
cctgtgggggaactcggcgtctcgt

SEQ ID NO: 1028342 - DNA, 25 bp, Homo sapien
tgtaaatgggactcccgcacaggcc

SEQ ID NO: 1028343 - DNA, 25 bp, Homo sapien
gccaaggcgactggttgagtaaccg

SEQ ID NO: 1028344 - DNA, 25 bp, Homo sapien
ccttgctgaactgtcgttgtcctca

SEQ ID NO: 1028345 - DNA, 25 bp, Homo sapien
ccgcacaggccctgaagaccaggtt

SEQ ID NO: 1028346 - DNA, 25 bp, Homo sapien
cagggaccccgctgtcagtatggtg

SEQ ID NO: 1028347 - DNA, 25 bp, Homo sapien
agggaccccgctgtcagtatggtga

SEQ ID NO: 1028348 - DNA, 25 bp, Homo sapien
gcagctgaatgcagcgccagcctct

SEQ ID NO: 1028349 - DNA, 25 bp, Homo sapien
tgttttcacggtggccgttgtgtgc

SEQ ID NO: 1028350 - DNA, 25 bp, Homo sapien
gagcaagtccatgggtagccctcct

SEQ ID NO: 1028351 - DNA, 25 bp, Homo sapien
tagagcctcgtagtatttttccacc

SEQ ID NO: 1028352 - DNA, 25 bp, Homo sapien
caaggagcatccacaggtctctcac

SEQ ID NO: 1028353 - DNA, 25 bp, Homo sapien
tctcggtttggagcgcagctttgcg

SEQ ID NO: 1028354 - DNA, 25 bp, Homo sapien
ggtggctgcgcgttgtctggtggct

SEQ ID NO: 1028355 - DNA, 25 bp, Homo sapien
ttgtctggtggctgcgcgttgtctg

SEQ ID NO: 1028356 - DNA, 25 bp, Homo sapien
tctggtggctgtgcgttgtctggtg

SEQ ID NO: 1028357 - DNA, 25 bp, Homo sapien
tgtctggtggctgcgcgttgtctgg

SEQ ID NO: 1028358 - DNA, 25 bp, Homo sapien
tggcagcaccatttaccttgggcac

SEQ ID NO: 1028359 - DNA, 25 bp, Homo sapien
gttcggacccactcctcttgctggg

SEQ ID NO: 1028360 - DNA, 25 bp, Homo sapien
ccacttttatcctggtccggtgcca

SEQ ID NO: 1028361 - DNA, 25 bp, Homo sapien
tgcccatgtttcagccggagtctcc

SEQ ID NO: 1028362 - DNA, 25 bp, Homo sapien
attcctccttcacggcggacagcag

SEQ ID NO: 1028363 - DNA, 25 bp, Homo sapien
ttcacggcggacagcagaataaatg

SEQ ID NO: 1028364 - DNA, 25 bp, Homo sapien
ggagattcctccttcacggcggaca

SEQ ID NO: 1028365 - DNA, 25 bp, Homo sapien
tccttcacggcggacagcagaataa

SEQ ID NO: 1028366 - DNA, 25 bp, Homo sapien
tgagggtcagaaaacacctttagca

SEQ ID NO: 1028367 - DNA, 25 bp, Homo sapien
gagggtcagaaaacacctttagcat

SEQ ID NO: 1028368 - DNA, 25 bp, Homo sapien
tcgttggtgttgacgtgaggactgc

SEQ ID NO: 1028369 - DNA, 25 bp, Homo sapien
gggcagtcgttggtgttgacgtgag

SEQ ID NO: 1028370 - DNA, 25 bp, Homo sapien
gatgtgaggaacagaccggggcggt

SEQ ID NO: 1028371 - DNA, 25 bp, Homo sapien
gttgacgtgaggactgctgcgggca

SEQ ID NO: 1028372 - DNA, 25 bp, Homo sapien
gcacgtgctgggtgttgctggattt

SEQ ID NO: 1028373 - DNA, 25 bp, Homo sapien
ctgcacgtgctgggtgttgctggat

SEQ ID NO: 1028374 - DNA, 25 bp, Homo sapien
cacgtgctgggtgttgctggatttt

SEQ ID NO: 1028375 - DNA, 25 bp, Homo sapien
tgcacgtgctgggtgttgctggatt

SEQ ID NO: 1028376 - DNA, 25 bp, Homo sapien
caggcctgtgtgtccggggttggag

SEQ ID NO: 1028377 - DNA, 25 bp, Homo sapien
tgctgcccccgaggttggagggagg

SEQ ID NO: 1028378 - DNA, 25 bp, Homo sapien
gctgtggaggccccgctcctctctg

SEQ ID NO: 1028379 - DNA, 25 bp, Homo sapien
tgtgtgtaggtgctgctaaggtggc

SEQ ID NO: 1028380 - DNA, 25 bp, Homo sapien
tgtaggtgctgctaaggtggctggg

SEQ ID NO: 1028381 - DNA, 25 bp, Homo sapien
agcacccgctgtggaggccccgctc

SEQ ID NO: 1028382 - DNA, 25 bp, Homo sapien
gtggtctctcggccgtggatccagt

SEQ ID NO: 1028383 - DNA, 25 bp, Homo sapien
cccaggtggtctctcggccgtggat

SEQ ID NO: 1028384 - DNA, 25 bp, Homo sapien
aggtggtctctcggccgtggatcca

SEQ ID NO: 1028385 - DNA, 25 bp, Homo sapien
tgcccctcgccgtgtggggcccagg

SEQ ID NO: 1028386 - DNA, 25 bp, Homo sapien
ctttcggatgggtttgaggatcaag

SEQ ID NO: 1028387 - DNA, 25 bp, Homo sapien
cagggctgtgtacgagggctggcag

SEQ ID NO: 1028388 - DNA, 25 bp, Homo sapien
cgtgagcgctcaggtggtgtcttgc

SEQ ID NO: 1028389 - DNA, 25 bp, Homo sapien
tctttggcaagtcatgacagaagca

SEQ ID NO: 1028390 - DNA, 25 bp, Homo sapien
ttaagactggactgtgcctttctgg

SEQ ID NO: 1028391 - DNA, 25 bp, Homo sapien
cacacgtgcatgatggaacgtccag

SEQ ID NO: 1028392 - DNA, 25 bp, Homo sapien
ggagcccctgagtttgtgtatttct

SEQ ID NO: 1028393 - DNA, 25 bp, Homo sapien
catgatggaacgtccagccggatgg

SEQ ID NO: 1028394 - DNA, 25 bp, Homo sapien
atggccgcggatccaacaggtgctg

SEQ ID NO: 1028395 - DNA, 25 bp, Homo sapien
ccaagtatccagtccggttagaaat

SEQ ID NO: 1028396 - DNA, 25 bp, Homo sapien
ggaccttgaggtccaagtatccagt

SEQ ID NO: 1028397 - DNA, 25 bp, Homo sapien
ccggttagaaatggccgcggatcca

SEQ ID NO: 1028398 - DNA, 25 bp, Homo sapien
aagccggttgccagggtgtcgcgga

SEQ ID NO: 1028399 - DNA, 25 bp, Homo sapien
gtgacccgccctgcaagtgggatgc

SEQ ID NO: 1028400 - DNA, 25 bp, Homo sapien
ccttcggccttctggagcgcaggtg

SEQ ID NO: 1028401 - DNA, 25 bp, Homo sapien
atcttggagccccttggcccgcggg

SEQ ID NO: 1028402 - DNA, 25 bp, Homo sapien
ccgaccctgacgccgacgcgaccgc

SEQ ID NO: 1028403 - DNA, 25 bp, Homo sapien
gacgccgacgcgaccgccgtcgccg

SEQ ID NO: 1028404 - DNA, 25 bp, Homo sapien
tgacgccgacgcgaccgccgtcgcc

SEQ ID NO: 1028405 - DNA, 25 bp, Homo sapien
ccctgacgccgacgcgaccgccgtc

SEQ ID NO: 1028406 - DNA, 25 bp, Homo sapien
cgccgtggggctcgtaccggccgag

SEQ ID NO: 1028407 - DNA, 25 bp, Homo sapien
agtccaccgagtcccgcagttgcag

SEQ ID NO: 1028408 - DNA, 25 bp, Homo sapien
gccagcaccgccgtggggctcgtac

SEQ ID NO: 1028409 - DNA, 25 bp, Homo sapien
ctcgtaccggccgagtccaccgagt

SEQ ID NO: 1028410 - DNA, 25 bp, Homo sapien
gaacacgaagtactccttgacgcgg

SEQ ID NO: 1028411 - DNA, 25 bp, Homo sapien
acgaagtactccttgacgcgggcgc

SEQ ID NO: 1028412 - DNA, 25 bp, Homo sapien
aagtactccttgacgcgggcgcggc

SEQ ID NO: 1028413 - DNA, 25 bp, Homo sapien
ccggaacacgaagtactccttgacg

SEQ ID NO: 1028414 - DNA, 25 bp, Homo sapien
agccacactccctggatctcgccgt

SEQ ID NO: 1028415 - DNA, 25 bp, Homo sapien
actccctggatctcgccgtcctcca

SEQ ID NO: 1028416 - DNA, 25 bp, Homo sapien
ctggatctcgccgtcctccacgggc

SEQ ID NO: 1028417 - DNA, 25 bp, Homo sapien
atctcgccgtcctccacgggccgca

SEQ ID NO: 1028418 - DNA, 25 bp, Homo sapien
gggactgctccgtgaccagcaccag

SEQ ID NO: 1028419 - DNA, 25 bp, Homo sapien
tctactgcgttgagcgctatccgca

SEQ ID NO: 1028420 - DNA, 25 bp, Homo sapien
tgaagtcgtatttacagataagcag

SEQ ID NO: 1028421 - DNA, 25 bp, Homo sapien
tccgtaggaaatggtgtctactgcg

SEQ ID NO: 1028422 - DNA, 25 bp, Homo sapien
gcacgttggtagaccagggattcca

SEQ ID NO: 1028423 - DNA, 25 bp, Homo sapien
ctgtgaaagtggcatagggcacgtt

SEQ ID NO: 1028424 - DNA, 25 bp, Homo sapien
catctgtttatgaaggaaggacgac

SEQ ID NO: 1028425 - DNA, 25 bp, Homo sapien
tcatctgcgccagccatcgggtgtt

SEQ ID NO: 1028426 - DNA, 25 bp, Homo sapien
tgagtcccacgtaggtctcgatgag

SEQ ID NO: 1028427 - DNA, 25 bp, Homo sapien
catggagtagcccagtttcgcctcg

SEQ ID NO: 1028428 - DNA, 25 bp, Homo sapien
tttcgcctcgttgttaatgaaggac

SEQ ID NO: 1028429 - DNA, 25 bp, Homo sapien
tattttgcccctggtcatggagtag

SEQ ID NO: 1028430 - DNA, 25 bp, Homo sapien
tgttttcagcaacctaggcaagcgc

SEQ ID NO: 1028431 - DNA, 25 bp, Homo sapien
tttccaaaagagcagcgggtcacca

SEQ ID NO: 1028432 - DNA, 25 bp, Homo sapien
catgctggcctgatacggttccttg

SEQ ID NO: 1028433 - DNA, 25 bp, Homo sapien
taattgtgctgagatccctaaaggt

SEQ ID NO: 1028434 - DNA, 25 bp, Homo sapien
gccacaccgtttgcttaaagctaca

SEQ ID NO: 1028435 - DNA, 25 bp, Homo sapien
cgaagcccgggcatgtttagtgtga

SEQ ID NO: 1028436 - DNA, 25 bp, Homo sapien
gccagtgcgtgaagcttatcgacag

SEQ ID NO: 1028437 - DNA, 25 bp, Homo sapien
cacgagcaagctgcgcagatacagg

SEQ ID NO: 1028438 - DNA, 25 bp, Homo sapien
gtctttatgaacacagaggctagag

SEQ ID NO: 1028439 - DNA, 25 bp, Homo sapien
ctttatgaacacagaggctagagtc

SEQ ID NO: 1028440 - DNA, 25 bp, Homo sapien
ttatgaacacagaggctagagtccc

SEQ ID NO: 1028441 - DNA, 25 bp, Homo sapien
tttatgaacacagaggctagagtcc

SEQ ID NO: 1028442 - DNA, 25 bp, Homo sapien
agcggggccactaggtccccttctg

SEQ ID NO: 1028443 - DNA, 25 bp, Homo sapien
gcggggccactaggtccccttctga

SEQ ID NO: 1028444 - DNA, 25 bp, Homo sapien
ccgttcgaggattagcggggccact

SEQ ID NO: 1028445 - DNA, 25 bp, Homo sapien
gaggattagcggggccactaggtcc

SEQ ID NO: 1028446 - DNA, 25 bp, Homo sapien
acgcagggccgaagcaggtccggcg

SEQ ID NO: 1028447 - DNA, 25 bp, Homo sapien
cgcgcgggaaggcagcgcgggccac

SEQ ID NO: 1028448 - DNA, 25 bp, Homo sapien
ccctaggcgggttatatgggcgcgg

SEQ ID NO: 1028449 - DNA, 25 bp, Homo sapien
ttttggcgcgcgtcgctcctgcaga

SEQ ID NO: 1028450 - DNA, 25 bp, Homo sapien
ctgcgtccccttcgcgggcgcgcga

SEQ ID NO: 1028451 - DNA, 25 bp, Homo sapien
ccgggcatcggcgtccgtcccggct

SEQ ID NO: 1028452 - DNA, 25 bp, Homo sapien
gggcatcggcgtccgtcccggctgg

SEQ ID NO: 1028453 - DNA, 25 bp, Homo sapien
tggcgcgggccccggtttcgctgcg

SEQ ID NO: 1028454 - DNA, 25 bp, Homo sapien
tcagtagaaagccatattgtgcgcc

SEQ ID NO: 1028455 - DNA, 25 bp, Homo sapien
tgtgcgccccatattagattcttgt

SEQ ID NO: 1028456 - DNA, 25 bp, Homo sapien
tacactctagccttgagcgacggag

SEQ ID NO: 1028457 - DNA, 25 bp, Homo sapien
gatgtctacaaactggacgggttcc

SEQ ID NO: 1028458 - DNA, 25 bp, Homo sapien
ggagtctcgcattgttgcacgatct

SEQ ID NO: 1028459 - DNA, 25 bp, Homo sapien
ggaggctgtgcagccagaccccact

SEQ ID NO: 1028460 - DNA, 25 bp, Homo sapien
gctgtgcagccagaccccactctga

SEQ ID NO: 1028461 - DNA, 25 bp, Homo sapien
gcagccagaccccactctgaccagc

SEQ ID NO: 1028462 - DNA, 25 bp, Homo sapien
agggaggctgtgcagccagacccca

SEQ ID NO: 1028463 - DNA, 25 bp, Homo sapien
caggcatctgggagtactgggcatg

SEQ ID NO: 1028464 - DNA, 25 bp, Homo sapien
gcaggcatctgggagtactgggcat

SEQ ID NO: 1028465 - DNA, 25 bp, Homo sapien
ggcatctgggagtactgggcatgag

SEQ ID NO: 1028466 - DNA, 25 bp, Homo sapien
aggcatctgggagtactgggcatga

SEQ ID NO: 1028467 - DNA, 25 bp, Homo sapien
ggcgtgtggaccagccggaagccct

SEQ ID NO: 1028468 - DNA, 25 bp, Homo sapien
agccggaagccctgggcagatgcat

SEQ ID NO: 1028469 - DNA, 25 bp, Homo sapien
gtggaccagccggaagccctgggca

SEQ ID NO: 1028470 - DNA, 25 bp, Homo sapien
gtgcaggcgtgtggaccagccggaa

SEQ ID NO: 1028471 - DNA, 25 bp, Homo sapien
ggctgaggggcggtccgtgagccat

SEQ ID NO: 1028472 - DNA, 25 bp, Homo sapien
ggcgggagctgatagaagcctgtgg

SEQ ID NO: 1028473 - DNA, 25 bp, Homo sapien
cgggagctgatagaagcctgtggct

SEQ ID NO: 1028474 - DNA, 25 bp, Homo sapien
caggcgggagctgatagaagcctgt

SEQ ID NO: 1028475 - DNA, 25 bp, Homo sapien
ggagctgatagaagcctgtggctgc

SEQ ID NO: 1028476 - DNA, 25 bp, Homo sapien
tgcccacggccagcgggggtgcagg

SEQ ID NO: 1028477 - DNA, 25 bp, Homo sapien
gggggtgcaggccatggcctggaac

SEQ ID NO: 1028478 - DNA, 25 bp, Homo sapien
ctgcccacggccagcgggggtgcag

SEQ ID NO: 1028479 - DNA, 25 bp, Homo sapien
agcgggggtgcaggccatggcctgg

SEQ ID NO: 1028480 - DNA, 25 bp, Homo sapien
cgccggcctccgagggcagctcgct

SEQ ID NO: 1028481 - DNA, 25 bp, Homo sapien
acgccggcctccgagggcagctcgc

SEQ ID NO: 1028482 - DNA, 25 bp, Homo sapien
cacgccggcctccgagggcagctcg

SEQ ID NO: 1028483 - DNA, 25 bp, Homo sapien
tccagaggtgctcaaacgtggtgcc

SEQ ID NO: 1028484 - DNA, 25 bp, Homo sapien
gagagctccagaggtgctcaaacgt

SEQ ID NO: 1028485 - DNA, 25 bp, Homo sapien
ctcaaacgtggtgcccccatcaggg

SEQ ID NO: 1028486 - DNA, 25 bp, Homo sapien
gctccagaggtgctcaaacgtggtg

SEQ ID NO: 1028487 - DNA, 25 bp, Homo sapien
catgacagatgtagtcatgccctcc

SEQ ID NO: 1028488 - DNA, 25 bp, Homo sapien
gccctccaggtggaagacgtccatg

SEQ ID NO: 1028489 - DNA, 25 bp, Homo sapien
cagatgtagtcatgccctccaggtg

SEQ ID NO: 1028490 - DNA, 25 bp, Homo sapien
gacgtccatgctggaatccgttccg

SEQ ID NO: 1028491 - DNA, 25 bp, Homo sapien
acctcccggcacagtcgaggcctgg

SEQ ID NO: 1028492 - DNA, 25 bp, Homo sapien
tgccatccacctcccggcacagtcg

SEQ ID NO: 1028493 - DNA, 25 bp, Homo sapien
atccacctcccggcacagtcgaggc

SEQ ID NO: 1028494 - DNA, 25 bp, Homo sapien
ccacctcccggcacagtcgaggcct

SEQ ID NO: 1028495 - DNA, 25 bp, Homo sapien
cgcgcagacactgtcgagtgtttcc

SEQ ID NO: 1028496 - DNA, 25 bp, Homo sapien
gaacacgcgcagacactgtcgagtg

SEQ ID NO: 1028497 - DNA, 25 bp, Homo sapien
ccataacacgggactagaacacgcg

SEQ ID NO: 1028498 - DNA, 25 bp, Homo sapien
gggactagaacacgcgcagacactg

SEQ ID NO: 1028499 - DNA, 25 bp, Homo sapien
caggacaggggggaacgacgctgcc

SEQ ID NO: 1028500 - DNA, 25 bp, Homo sapien
cgacgctgccgcaggccacggcact

SEQ ID NO: 1028501 - DNA, 25 bp, Homo sapien
gggaacgacgctgccgcaggccacg

SEQ ID NO: 1028502 - DNA, 25 bp, Homo sapien
ctgggccgcaggacaggggggaacg

SEQ ID NO: 1028503 - DNA, 25 bp, Homo sapien
cggggattccgcctgactttccgca

SEQ ID NO: 1028504 - DNA, 25 bp, Homo sapien
attccgcctgactttccgcaggacc

SEQ ID NO: 1028505 - DNA, 25 bp, Homo sapien
ggattccgcctgactttccgcagga

SEQ ID NO: 1028506 - DNA, 25 bp, Homo sapien
gggattccgcctgactttccgcagg

SEQ ID NO: 1028507 - DNA, 25 bp, Homo sapien
gcatggagaggaggggctcacagga

SEQ ID NO: 1028508 - DNA, 25 bp, Homo sapien
tgcatggagaggaggggctcacagg

SEQ ID NO: 1028509 - DNA, 25 bp, Homo sapien
aggaggggctcacaggaggttcgac

SEQ ID NO: 1028510 - DNA, 25 bp, Homo sapien
gagaggaggggctcacaggaggttc

SEQ ID NO: 1028511 - DNA, 25 bp, Homo sapien
gaactcggtggtccgccaggaccag

SEQ ID NO: 1028512 - DNA, 25 bp, Homo sapien
tgccccctgcgcggggaactcggtg

SEQ ID NO: 1028513 - DNA, 25 bp, Homo sapien
cctgcgcggggaactcggtggtccg

SEQ ID NO: 1028514 - DNA, 25 bp, Homo sapien
gcgcggggaactcggtggtccgcca

SEQ ID NO: 1028515 - DNA, 25 bp, Homo sapien
tcagcttgcccggtgatgtgttgga

SEQ ID NO: 1028516 - DNA, 25 bp, Homo sapien
tgatgtgttggaccgcaccaaggag

SEQ ID NO: 1028517 - DNA, 25 bp, Homo sapien
tcatgagtattcatccaagtccggg

SEQ ID NO: 1028518 - DNA, 25 bp, Homo sapien
tccggggcaggcctcagcttgcccg

SEQ ID NO: 1028519 - DNA, 25 bp, Homo sapien
tggcattttcgcttttcccatctcc

SEQ ID NO: 1028520 - DNA, 25 bp, Homo sapien
gcgggccgtttgttggcattttcgc

SEQ ID NO: 1028521 - DNA, 25 bp, Homo sapien
tttgttggcattttcgcttttccca

SEQ ID NO: 1028522 - DNA, 25 bp, Homo sapien
cttttcccatctcccttagttctgt

SEQ ID NO: 1028523 - DNA, 25 bp, Homo sapien
aggcaggagccgaggatgctgggga

SEQ ID NO: 1028524 - DNA, 25 bp, Homo sapien
gcaggagccgaggatgctggggaac

SEQ ID NO: 1028525 - DNA, 25 bp, Homo sapien
aggagccgaggatgctggggaacat

SEQ ID NO: 1028526 - DNA, 25 bp, Homo sapien
ctagtgaggcaggagccgaggatgc

SEQ ID NO: 1028527 - DNA, 25 bp, Homo sapien
cgtggaccgagcgggagaggctccg

SEQ ID NO: 1028528 - DNA, 25 bp, Homo sapien
tggccgcccggcagcgtggaccgag

SEQ ID NO: 1028529 - DNA, 25 bp, Homo sapien
ggaccgagcgggagaggctccgcag

SEQ ID NO: 1028530 - DNA, 25 bp, Homo sapien
gggtcacggtcgtggccgcccggca

SEQ ID NO: 1028531 - DNA, 25 bp, Homo sapien
cagggaactggtgtcccgtgggacg

SEQ ID NO: 1028532 - DNA, 25 bp, Homo sapien
gaactggtgtcccgtgggacgaggc

SEQ ID NO: 1028533 - DNA, 25 bp, Homo sapien
ctggtgtcccgtgggacgaggcatg

SEQ ID NO: 1028534 - DNA, 25 bp, Homo sapien
aactggtgtcccgtgggacgaggca

SEQ ID NO: 1028535 - DNA, 25 bp, Homo sapien
gtgccgtgcggggtcaccgacgtac

SEQ ID NO: 1028536 - DNA, 25 bp, Homo sapien
tggcgaggtgccgtgcggggtcacc

SEQ ID NO: 1028537 - DNA, 25 bp, Homo sapien
gcgaggtgccgtgcggggtcaccga

SEQ ID NO: 1028538 - DNA, 25 bp, Homo sapien
cgtgcggggtcaccgacgtacagca

SEQ ID NO: 1028539 - DNA, 25 bp, Homo sapien
tcggaaactctgagcctggaccaag

SEQ ID NO: 1028540 - DNA, 25 bp, Homo sapien
ccaaagccaaggagcatcagagacc

SEQ ID NO: 1028541 - DNA, 25 bp, Homo sapien
cagggcagctcggaaactctgagcc

SEQ ID NO: 1028542 - DNA, 25 bp, Homo sapien
agagacccccgagcacgaggcagaa

SEQ ID NO: 1028543 - DNA, 25 bp, Homo sapien
ctagggtgcactgagctcctggcag

SEQ ID NO: 1028544 - DNA, 25 bp, Homo sapien
gctgacaagaagcaccgtctgccac

SEQ ID NO: 1028545 - DNA, 25 bp, Homo sapien
cacacccaagcccaggagcaaagat

SEQ ID NO: 1028546 - DNA, 25 bp, Homo sapien
aagaagcaccgtctgccactgctgt

SEQ ID NO: 1028547 - DNA, 25 bp, Homo sapien
tgagcaaattccctgatgagggcgg

SEQ ID NO: 1028548 - DNA, 25 bp, Homo sapien
gcagcagcagccgagtggacaccag

SEQ ID NO: 1028549 - DNA, 25 bp, Homo sapien
ggggcttgggatcaaaagtggtctc

SEQ ID NO: 1028550 - DNA, 25 bp, Homo sapien
gcaggggcttgggatcaaaagtggt

SEQ ID NO: 1028551 - DNA, 25 bp, Homo sapien
agcgtgcaggggcttgggatcaaaa

SEQ ID NO: 1028552 - DNA, 25 bp, Homo sapien
cgtgcaggggcttgggatcaaaagt

SEQ ID NO: 1028553 - DNA, 25 bp, Homo sapien
ctccgatggccctcggtgataagcg

SEQ ID NO: 1028554 - DNA, 25 bp, Homo sapien
cctcggtgataagcggacattggag

SEQ ID NO: 1028555 - DNA, 25 bp, Homo sapien
cgatggccctcggtgataagcggac

SEQ ID NO: 1028556 - DNA, 25 bp, Homo sapien
tggccctcggtgataagcggacatt

SEQ ID NO: 1028557 - DNA, 25 bp, Homo sapien
ttccaggtgaccagcggtggccttc

SEQ ID NO: 1028558 - DNA, 25 bp, Homo sapien
tccaggtgaccagcggtggccttcc

SEQ ID NO: 1028559 - DNA, 25 bp, Homo sapien
ggcccggggatggcctcagggatgc

SEQ ID NO: 1028560 - DNA, 25 bp, Homo sapien
gtctgagacctgcttacgaccacgg

SEQ ID NO: 1028561 - DNA, 25 bp, Homo sapien
ttgtggtctgcacacgacccttcac

SEQ ID NO: 1028562 - DNA, 25 bp, Homo sapien
tggaagcctgcacttgtggtctgca

SEQ ID NO: 1028563 - DNA, 25 bp, Homo sapien
aagaggcctctgaggtgtctgagac

SEQ ID NO: 1028564 - DNA, 25 bp, Homo sapien
tgaggcggaatagactctctgcaca

SEQ ID NO: 1028565 - DNA, 25 bp, Homo sapien
atcagcctcccggtgccagggtttc

SEQ ID NO: 1028566 - DNA, 25 bp, Homo sapien
cagccgttgatgaggcggaatagac

SEQ ID NO: 1028567 - DNA, 25 bp, Homo sapien
gggatccacccagccgttgatgagg

SEQ ID NO: 1028568 - DNA, 25 bp, Homo sapien
gaggccgcgcggctgctcatctggt

SEQ ID NO: 1028569 - DNA, 25 bp, Homo sapien
gtgctgctcagcagattgaactggg

SEQ ID NO: 1028570 - DNA, 25 bp, Homo sapien
tgctgctcagcagattgaactgggc

SEQ ID NO: 1028571 - DNA, 25 bp, Homo sapien
ctcatctggtccatggtgctgctca

SEQ ID NO: 1028572 - DNA, 25 bp, Homo sapien
ctgctggaaagtgacctcaaagtgg

SEQ ID NO: 1028573 - DNA, 25 bp, Homo sapien
caggcgccggcgacatggtgtcgaa

SEQ ID NO: 1028574 - DNA, 25 bp, Homo sapien
aggtggctgacttggccgtgctgga

SEQ ID NO: 1028575 - DNA, 25 bp, Homo sapien
cgtagggcgagtgggtgggcacgct

SEQ ID NO: 1028576 - DNA, 25 bp, Homo sapien
gggaatgcggccgccctgcatggac

SEQ ID NO: 1028577 - DNA, 25 bp, Homo sapien
gaatgcggccgccctgcatggactt

SEQ ID NO: 1028578 - DNA, 25 bp, Homo sapien
tgcatggacttcagggggccagcac

SEQ ID NO: 1028579 - DNA, 25 bp, Homo sapien
ccctgcatggacttcagggggccag

SEQ ID NO: 1028580 - DNA, 25 bp, Homo sapien
gagccttctcttagcccggagccag

SEQ ID NO: 1028581 - DNA, 25 bp, Homo sapien
agcgagtccgggctgagccttctct

SEQ ID NO: 1028582 - DNA, 25 bp, Homo sapien
tgagccttctcttagcccggagcca

SEQ ID NO: 1028583 - DNA, 25 bp, Homo sapien
gccttctcttagcccggagccagca

SEQ ID NO: 1028584 - DNA, 25 bp, Homo sapien
ttgtctgccagtgccccgagcaggg

SEQ ID NO: 1028585 - DNA, 25 bp, Homo sapien
gccgtgtcgccaggcttctccgagg

SEQ ID NO: 1028586 - DNA, 25 bp, Homo sapien
gggcgagctgcccattgctgagcat

SEQ ID NO: 1028587 - DNA, 25 bp, Homo sapien
cacgcctggtctccatctgtgctgg

SEQ ID NO: 1028588 - DNA, 25 bp, Homo sapien
gcacagcgggaagtacagcagtctc

SEQ ID NO: 1028589 - DNA, 25 bp, Homo sapien
cttgttgtggggtcagtctggcttc

SEQ ID NO: 1028590 - DNA, 25 bp, Homo sapien
gaggtgaccactgatgtacagtgtc

SEQ ID NO: 1028591 - DNA, 25 bp, Homo sapien
ggtcagtctggcttccctggaggtg

SEQ ID NO: 1028592 - DNA, 25 bp, Homo sapien
tgtgagtgccggtggcagtcaggca

SEQ ID NO: 1028593 - DNA, 25 bp, Homo sapien
cctttgaggcgtgaatccaggcaca

SEQ ID NO: 1028594 - DNA, 25 bp, Homo sapien
tgctgaatccctccaggtgtctgtc

SEQ ID NO: 1028595 - DNA, 25 bp, Homo sapien
cagccatcgggtcatttgggctcca

SEQ ID NO: 1028596 - DNA, 25 bp, Homo sapien
gggcagcgtttcacgacgtcggtca

SEQ ID NO: 1028597 - DNA, 25 bp, Homo sapien
ttgtaaacaggcatggcccggatgg

SEQ ID NO: 1028598 - DNA, 25 bp, Homo sapien
cacgtgctccgctttcttgtaaaca

SEQ ID NO: 1028599 - DNA, 25 bp, Homo sapien
aagtccctcccgagctcgtggttgg

SEQ ID NO: 1028600 - DNA, 25 bp, Homo sapien
gtcatccacatactgcgagagatta

SEQ ID NO: 1028601 - DNA, 25 bp, Homo sapien
gattattgccttccacgcggatgag

SEQ ID NO: 1028602 - DNA, 25 bp, Homo sapien
cctgccggtgacagggtcatccaca

SEQ ID NO: 1028603 - DNA, 25 bp, Homo sapien
cgcggatgaggtggctggctggagc

SEQ ID NO: 1028604 - DNA, 25 bp, Homo sapien
ggatggtggtgaattccgtccccac

SEQ ID NO: 1028605 - DNA, 25 bp, Homo sapien
agttgtacaggatggtggtgaattc

SEQ ID NO: 1028606 - DNA, 25 bp, Homo sapien
catgaagttgtacaggatggtggtg

SEQ ID NO: 1028607 - DNA, 25 bp, Homo sapien
tacaggatggtggtgaattccgtcc

SEQ ID NO: 1028608 - DNA, 25 bp, Homo sapien
tgcaggaccggccttgagagccctc

SEQ ID NO: 1028609 - DNA, 25 bp, Homo sapien
agagcacccagtgccggcagcgagt

SEQ ID NO: 1028610 - DNA, 25 bp, Homo sapien
gagagccctcggtcaccacagagca

SEQ ID NO: 1028611 - DNA, 25 bp, Homo sapien
ccagtgccggcagcgagtgttcccg

SEQ ID NO: 1028612 - DNA, 25 bp, Homo sapien
atcagcttttcggtcgcggccagga

SEQ ID NO: 1028613 - DNA, 25 bp, Homo sapien
tcttggcggagctctcgttcagggc

SEQ ID NO: 1028614 - DNA, 25 bp, Homo sapien
tgctgctcccggtagtggtcctcat

SEQ ID NO: 1028615 - DNA, 25 bp, Homo sapien
agatgcggccctcaaaggaccggcg

SEQ ID NO: 1028616 - DNA, 25 bp, Homo sapien
catgccgccgcttcttcacaccggc

SEQ ID NO: 1028617 - DNA, 25 bp, Homo sapien
ctgaaggtagtacgtgtcctcgtct

SEQ ID NO: 1028618 - DNA, 25 bp, Homo sapien
agtacgtgtcctcgtctccatgccg

SEQ ID NO: 1028619 - DNA, 25 bp, Homo sapien
tcttcacaccggcaccaagggcggg

SEQ ID NO: 1028620 - DNA, 25 bp, Homo sapien
gctgctgctgccgataggagtccac

SEQ ID NO: 1028621 - DNA, 25 bp, Homo sapien
tgccgataggagtccaccagtggct

SEQ ID NO: 1028622 - DNA, 25 bp, Homo sapien
gtggctgcggcaccaactccatcag

SEQ ID NO: 1028623 - DNA, 25 bp, Homo sapien
taggagtccaccagtggctgcggca

SEQ ID NO: 1028624 - DNA, 25 bp, Homo sapien
atgcccccgtgcaccttgttcatgg

SEQ ID NO: 1028625 - DNA, 25 bp, Homo sapien
ttgttcatgggcgagaggaccggcc

SEQ ID NO: 1028626 - DNA, 25 bp, Homo sapien
ccccaggttgggtgtagctgccgaa

SEQ ID NO: 1028627 - DNA, 25 bp, Homo sapien
ccaccagctggttgacggagggcag

SEQ ID NO: 1028628 - DNA, 25 bp, Homo sapien
tgtaagggcaatcgcagctggcact

SEQ ID NO: 1028629 - DNA, 25 bp, Homo sapien
ggtgcttgctcacggcactgggaac

SEQ ID NO: 1028630 - DNA, 25 bp, Homo sapien
gcactgggttgtaagggcaatcgca

SEQ ID NO: 1028631 - DNA, 25 bp, Homo sapien
gggaacatgcttggtcctgcccaca

SEQ ID NO: 1028632 - DNA, 25 bp, Homo sapien
tcatctcgccgttggctggcactgc

SEQ ID NO: 1028633 - DNA, 25 bp, Homo sapien
tctcgccgttggctggcactgcgtg

SEQ ID NO: 1028634 - DNA, 25 bp, Homo sapien
gctgctcatctcgccgttggctggc

SEQ ID NO: 1028635 - DNA, 25 bp, Homo sapien
tgggaccccgagaccatggactggg

SEQ ID NO: 1028636 - DNA, 25 bp, Homo sapien
ccttgggaggtgaaatactcgatgc

SEQ ID NO: 1028637 - DNA, 25 bp, Homo sapien
caggtggtaaatgctctgtaaccct

SEQ ID NO: 1028638 - DNA, 25 bp, Homo sapien
gttctgcaggtggtaaatgctctgt

SEQ ID NO: 1028639 - DNA, 25 bp, Homo sapien
tcgatgcagtttggacaccccaatc

SEQ ID NO: 1028640 - DNA, 25 bp, Homo sapien
gacctgggccgcggcactggctggg

SEQ ID NO: 1028641 - DNA, 25 bp, Homo sapien
tggtctgggacgggccttggacctg

SEQ ID NO: 1028642 - DNA, 25 bp, Homo sapien
gggatggtctgggacgggccttgga

SEQ ID NO: 1028643 - DNA, 25 bp, Homo sapien
ggacctgggccgcggcactggctgg

SEQ ID NO: 1028644 - DNA, 25 bp, Homo sapien
ccctgagccgccgatggagatggtg

SEQ ID NO: 1028645 - DNA, 25 bp, Homo sapien
gccagatggtcatgcggtactgctc

SEQ ID NO: 1028646 - DNA, 25 bp, Homo sapien
gcacgcggaagtgcacggcctccat

SEQ ID NO: 1028647 - DNA, 25 bp, Homo sapien
tgcgcggtgctgtagtcgtggccct

SEQ ID NO: 1028648 - DNA, 25 bp, Homo sapien
gcaagacgcagttagggacattccc

SEQ ID NO: 1028649 - DNA, 25 bp, Homo sapien
gatgacagtctctaggatgaagcct

SEQ ID NO: 1028650 - DNA, 25 bp, Homo sapien
gcctcctgaggcagttttggacaca

SEQ ID NO: 1028651 - DNA, 25 bp, Homo sapien
tcatgggcgctaggttgaactccaa

SEQ ID NO: 1028652 - DNA, 25 bp, Homo sapien
actgccaccgcctagaaaggaaagc

SEQ ID NO: 1028653 - DNA, 25 bp, Homo sapien
ttccctgactgccaccgcctagaaa

SEQ ID NO: 1028654 - DNA, 25 bp, Homo sapien
cccctacacctacctcagtctgttc

SEQ ID NO: 1028655 - DNA, 25 bp, Homo sapien
ctgactgccaccgcctagaaaggaa

SEQ ID NO: 1028656 - DNA, 25 bp, Homo sapien
cgtcacacccgtgaggccccccagg

SEQ ID NO: 1028657 - DNA, 25 bp, Homo sapien
gcctcgtcacacccgtgaggccccc

SEQ ID NO: 1028658 - DNA, 25 bp, Homo sapien
gggcctcgtcacacccgtgaggccc

SEQ ID NO: 1028659 - DNA, 25 bp, Homo sapien
ctcgtcacacccgtgaggcccccca

SEQ ID NO: 1028660 - DNA, 25 bp, Homo sapien
gtctcggcttgcgtgggtgagggct

SEQ ID NO: 1028661 - DNA, 25 bp, Homo sapien
tctgggtggtgtctcggcttgcgtg

SEQ ID NO: 1028662 - DNA, 25 bp, Homo sapien
gtggtgtctcggcttgcgtgggtga

SEQ ID NO: 1028663 - DNA, 25 bp, Homo sapien
tgggtggtgtctcggcttgcgtggg

SEQ ID NO: 1028664 - DNA, 25 bp, Homo sapien
cggcaacaccagtcgctgcttttaa

SEQ ID NO: 1028665 - DNA, 25 bp, Homo sapien
gccacttagcaagatggagtcctga

SEQ ID NO: 1028666 - DNA, 25 bp, Homo sapien
taggggaagctcctagcccttagga

SEQ ID NO: 1028667 - DNA, 25 bp, Homo sapien
tgggggctgtgtctaaccttgctgt

SEQ ID NO: 1028668 - DNA, 25 bp, Homo sapien
gactcagggtggacaggtaacgtac

SEQ ID NO: 1028669 - DNA, 25 bp, Homo sapien
tcttacacgaaaaacacggatggga

SEQ ID NO: 1028670 - DNA, 25 bp, Homo sapien
gatggaaccctagaagctaagcggc

SEQ ID NO: 1028671 - DNA, 25 bp, Homo sapien
tggaactgaagcacatctgcgctgg

SEQ ID NO: 1028672 - DNA, 25 bp, Homo sapien
gggaactcggcggagcttcctggcg

SEQ ID NO: 1028673 - DNA, 25 bp, Homo sapien
aactcggcggagcttcctggcggca

SEQ ID NO: 1028674 - DNA, 25 bp, Homo sapien
tgtgggggaactcggcggagcttcc

SEQ ID NO: 1028675 - DNA, 25 bp, Homo sapien
ctgtgggggaactcggcggagcttc

SEQ ID NO: 1028676 - DNA, 25 bp, Homo sapien
cttgtgctgaaagcactcacatttc

SEQ ID NO: 1028677 - DNA, 25 bp, Homo sapien
ccttgtgctgaaagcactcacattt

SEQ ID NO: 1028678 - DNA, 25 bp, Homo sapien
ttgtgctgaaagcactcacatttct

SEQ ID NO: 1028679 - DNA, 25 bp, Homo sapien
tctttggatgtgaacgcgggaatga

SEQ ID NO: 1028680 - DNA, 25 bp, Homo sapien
ccttccttcgaagggtagtgccttg

SEQ ID NO: 1028681 - DNA, 25 bp, Homo sapien
gaacgcgggaatgaacagtggctgt

SEQ ID NO: 1028682 - DNA, 25 bp, Homo sapien
tgaatctaggcttcctctttggatg

SEQ ID NO: 1028683 - DNA, 25 bp, Homo sapien
ttttcttgaagaatccgattttgtg

SEQ ID NO: 1028684 - DNA, 25 bp, Homo sapien
gaagaatccgattttgtgcatagta

SEQ ID NO: 1028685 - DNA, 25 bp, Homo sapien
atatgtgtgtggtatgaaaagccca

SEQ ID NO: 1028686 - DNA, 25 bp, Homo sapien
tgtgtgtggtatgaaaagcccatat

SEQ ID NO: 1028687 - DNA, 25 bp, Homo sapien
agcagtcgtggtgaaaccggtcagc

SEQ ID NO: 1028688 - DNA, 25 bp, Homo sapien
ggtgaaaccggtcagctgtggacct

SEQ ID NO: 1028689 - DNA, 25 bp, Homo sapien
ggccgtggagcagtcgtggtgaaac

SEQ ID NO: 1028690 - DNA, 25 bp, Homo sapien
cttccgggtgaccgtggccgtggag

SEQ ID NO: 1028691 - DNA, 25 bp, Homo sapien
tgtctggctccgcagtgttgggttt

SEQ ID NO: 1028692 - DNA, 25 bp, Homo sapien
ctccgcagtgttgggttttgtcctg

SEQ ID NO: 1028693 - DNA, 25 bp, Homo sapien
cttcacatgccccaacaagaggaag

SEQ ID NO: 1028694 - DNA, 25 bp, Homo sapien
gaggaagactgtctggctccgcagt

SEQ ID NO: 1028695 - DNA, 25 bp, Homo sapien
tcctttggggttctgtgcgtgtacc

SEQ ID NO: 1028696 - DNA, 25 bp, Homo sapien
cctttggggttctgtgcgtgtacca

SEQ ID NO: 1028697 - DNA, 25 bp, Homo sapien
ctcctttggggttctgtgcgtgtac

SEQ ID NO: 1028698 - DNA, 25 bp, Homo sapien
ctttggggttctgtgcgtgtaccat

SEQ ID NO: 1028699 - DNA, 25 bp, Homo sapien
ctgggtgtgtgggtcccaaggcgtg

SEQ ID NO: 1028700 - DNA, 25 bp, Homo sapien
aggtcgtcagccgggttgattccgc

SEQ ID NO: 1028701 - DNA, 25 bp, Homo sapien
ccgcaggttagatagaggtcgttag

SEQ ID NO: 1028702 - DNA, 25 bp, Homo sapien
ttccgcaggttagatagaggtcgtt

SEQ ID NO: 1028703 - DNA, 25 bp, Homo sapien
gtcagccgggttgattccgcaggtt

SEQ ID NO: 1028704 - DNA, 25 bp, Homo sapien
tgagctctccagagcacaggtggag

SEQ ID NO: 1028705 - DNA, 25 bp, Homo sapien
tctgagctctccagagcacaggtgg

SEQ ID NO: 1028706 - DNA, 25 bp, Homo sapien
gctctgagctctccagagcacaggt

SEQ ID NO: 1028707 - DNA, 25 bp, Homo sapien
ctgctctgagctctccagagcacag

SEQ ID NO: 1028708 - DNA, 25 bp, Homo sapien
tcctttgctaggcactttgatccgg

SEQ ID NO: 1028709 - DNA, 25 bp, Homo sapien
tggagtagttgtttgctgcccgccg

SEQ ID NO: 1028710 - DNA, 25 bp, Homo sapien
tctgaaatcgtgagggatgctctcc

SEQ ID NO: 1028711 - DNA, 25 bp, Homo sapien
caagcaagtttgtgtcagccacgcc

SEQ ID NO: 1028712 - DNA, 25 bp, Homo sapien
tgcagtgggaggagatcagcttcca

SEQ ID NO: 1028713 - DNA, 25 bp, Homo sapien
agatcagcttccagagctccaggtc

SEQ ID NO: 1028714 - DNA, 25 bp, Homo sapien
acctgctggctggtgcagtgggagg

SEQ ID NO: 1028715 - DNA, 25 bp, Homo sapien
tggctggtgcagtgggaggagatca

SEQ ID NO: 1028716 - DNA, 25 bp, Homo sapien
ttcccgtggatctctcttcagcctg

SEQ ID NO: 1028717 - DNA, 25 bp, Homo sapien
tccttaggtaacatgaggcgtggga

SEQ ID NO: 1028718 - DNA, 25 bp, Homo sapien
atgtggacctgaatgaggacaggcc

SEQ ID NO: 1028719 - DNA, 25 bp, Homo sapien
caggcccggcttttcccgtggatct

SEQ ID NO: 1028720 - DNA, 25 bp, Homo sapien
gtgcggtttccattctgggcaccgg

SEQ ID NO: 1028721 - DNA, 25 bp, Homo sapien
tgcgtggcttttggtgcggtttcca

SEQ ID NO: 1028722 - DNA, 25 bp, Homo sapien
tagcggctgatggtctggaccgact

SEQ ID NO: 1028723 - DNA, 25 bp, Homo sapien
gacttgctgagcgtgcgtggctttt

SEQ ID NO: 1028724 - DNA, 25 bp, Homo sapien
acagtgggacatggatgtggccctg

SEQ ID NO: 1028725 - DNA, 25 bp, Homo sapien
cagtcaggatgcgtggggaagaccc

SEQ ID NO: 1028726 - DNA, 25 bp, Homo sapien
gttccattttggacatgaagccggt

SEQ ID NO: 1028727 - DNA, 25 bp, Homo sapien
aagccggtgaggctggcggcatcct

SEQ ID NO: 1028728 - DNA, 25 bp, Homo sapien
gttgtcaatctctccggacaaatcg

SEQ ID NO: 1028729 - DNA, 25 bp, Homo sapien
gtccacgttcgtgtctgagccccgc

SEQ ID NO: 1028730 - DNA, 25 bp, Homo sapien
tctccggacaaatcggcctcagtgg

SEQ ID NO: 1028731 - DNA, 25 bp, Homo sapien
tcaatctctccggacaaatcggcct

SEQ ID NO: 1028732 - DNA, 25 bp, Homo sapien
cagatgctcttactgaagggaagga

SEQ ID NO: 1028733 - DNA, 25 bp, Homo sapien
ttccgcaagtaatcgaactcgcaga

SEQ ID NO: 1028734 - DNA, 25 bp, Homo sapien
tctcgtggatgactgagaggtacca

SEQ ID NO: 1028735 - DNA, 25 bp, Homo sapien
tgctggtgaccggactcaaagtctg

SEQ ID NO: 1028736 - DNA, 25 bp, Homo sapien
tctgagttccatgccggcgtaactg

SEQ ID NO: 1028737 - DNA, 25 bp, Homo sapien
catgcgtgccggtgagtctgagttc

SEQ ID NO: 1028738 - DNA, 25 bp, Homo sapien
tctctgaagcagatactgtgggtgc

SEQ ID NO: 1028739 - DNA, 25 bp, Homo sapien
taaccagatactagaaccagagcct

SEQ ID NO: 1028740 - DNA, 25 bp, Homo sapien
tcctgcctggggacatggatgtctc

SEQ ID NO: 1028741 - DNA, 25 bp, Homo sapien
gacatggatgtctcttggcctttgc

SEQ ID NO: 1028742 - DNA, 25 bp, Homo sapien
ctgaacctgtatctccagctcagac

SEQ ID NO: 1028743 - DNA, 25 bp, Homo sapien
ttcttctgaacctgtatctccagct

SEQ ID NO: 1028744 - DNA, 25 bp, Homo sapien
tgaaaacaaccgtcttagagctctg

SEQ ID NO: 1028745 - DNA, 25 bp, Homo sapien
ccgtcttagagctctgcgctgtgcc

SEQ ID NO: 1028746 - DNA, 25 bp, Homo sapien
gggcctgtgtgtcactagcagcttt

SEQ ID NO: 1028747 - DNA, 25 bp, Homo sapien
cagctttggacgctttgaaaacaac

SEQ ID NO: 1028748 - DNA, 25 bp, Homo sapien
ctgcaagacgcccgtgggaccctca

SEQ ID NO: 1028749 - DNA, 25 bp, Homo sapien
cttcagcgaagcgtctgagagctgc

SEQ ID NO: 1028750 - DNA, 25 bp, Homo sapien
ctgcccagcttcagcgaagcgtctg

SEQ ID NO: 1028751 - DNA, 25 bp, Homo sapien
tcagcgaagcgtctgagagctgctc

SEQ ID NO: 1028752 - DNA, 25 bp, Homo sapien
tgcccagcttcagcgaagcgtctga

SEQ ID NO: 1028753 - DNA, 25 bp, Homo sapien
cctccccaggcacccgtgtcctcca

SEQ ID NO: 1028754 - DNA, 25 bp, Homo sapien
ccggtgccgcagactcctcctgcat

SEQ ID NO: 1028755 - DNA, 25 bp, Homo sapien
ccgtgtcctccaccccatcgggctc

SEQ ID NO: 1028756 - DNA, 25 bp, Homo sapien
cctctccggtgccgcagactcctcc

SEQ ID NO: 1028757 - DNA, 25 bp, Homo sapien
ctcgcttccctcctcatgcacggat

SEQ ID NO: 1028758 - DNA, 25 bp, Homo sapien
tcatgcacggatcccatctggctca

SEQ ID NO: 1028759 - DNA, 25 bp, Homo sapien
ctgagtcctcatccctgtccccttc

SEQ ID NO: 1028760 - DNA, 25 bp, Homo sapien
ttccctcctcatgcacggatcccat

SEQ ID NO: 1028761 - DNA, 25 bp, Homo sapien
tccaggatgacctgctcgtactcct

SEQ ID NO: 1028762 - DNA, 25 bp, Homo sapien
caggatgacctgctcgtactcctcc

SEQ ID NO: 1028763 - DNA, 25 bp, Homo sapien
agtccaggatgacctgctcgtactc

SEQ ID NO: 1028764 - DNA, 25 bp, Homo sapien
ggatgacctgctcgtactcctccag

SEQ ID NO: 1028765 - DNA, 25 bp, Homo sapien
tgtagctgctgcctccgctctcgga

SEQ ID NO: 1028766 - DNA, 25 bp, Homo sapien
gtagctgctgcctccgctctcggag

SEQ ID NO: 1028767 - DNA, 25 bp, Homo sapien
ccttctgcagcgtctcattttccgt

SEQ ID NO: 1028768 - DNA, 25 bp, Homo sapien
tttccgtattgatctttcgcagctg

SEQ ID NO: 1028769 - DNA, 25 bp, Homo sapien
gtcggaggagctggttgtccttttc

SEQ ID NO: 1028770 - DNA, 25 bp, Homo sapien
cttggtgtttcttatcttctcggag

SEQ ID NO: 1028771 - DNA, 25 bp, Homo sapien
ctgtcggaggagctggttgtccttt

SEQ ID NO: 1028772 - DNA, 25 bp, Homo sapien
tgtccttttcaatgagccccatcat

SEQ ID NO: 1028773 - DNA, 25 bp, Homo sapien
tctgagatgacacagtcccgcttgg

SEQ ID NO: 1028774 - DNA, 25 bp, Homo sapien
tgagatgacacagtcccgcttggtg

SEQ ID NO: 1028775 - DNA, 25 bp, Homo sapien
gatgacacagtcccgcttggtgagc

SEQ ID NO: 1028776 - DNA, 25 bp, Homo sapien
gagatgacacagtcccgcttggtga

SEQ ID NO: 1028777 - DNA, 25 bp, Homo sapien
agggccacgcgggtgtgctgctctg

SEQ ID NO: 1028778 - DNA, 25 bp, Homo sapien
acgcgggtgtgctgctctgcctgct

SEQ ID NO: 1028779 - DNA, 25 bp, Homo sapien
ctctccagggccacgcgggtgtgct

SEQ ID NO: 1028780 - DNA, 25 bp, Homo sapien
gccacgcgggtgtgctgctctgcct

SEQ ID NO: 1028781 - DNA, 25 bp, Homo sapien
tggatgctggtgtacacggcagaac

SEQ ID NO: 1028782 - DNA, 25 bp, Homo sapien
cacagaccccggttctacctcggtg

SEQ ID NO: 1028783 - DNA, 25 bp, Homo sapien
ccagcgtacacagaccccggttcta

SEQ ID NO: 1028784 - DNA, 25 bp, Homo sapien
gtgtacacggcagaaccagcccgag

SEQ ID NO: 1028785 - DNA, 25 bp, Homo sapien
ccagaaggcgttctcgtcttctgct

SEQ ID NO: 1028786 - DNA, 25 bp, Homo sapien
cagaaggcgttctcgtcttctgctg

SEQ ID NO: 1028787 - DNA, 25 bp, Homo sapien
agaaggcgttctcgtcttctgctgc

SEQ ID NO: 1028788 - DNA, 25 bp, Homo sapien
gacttggtcccggagatgctaaagg

SEQ ID NO: 1028789 - DNA, 25 bp, Homo sapien
tgatcttattccttaacctctcgag

SEQ ID NO: 1028790 - DNA, 25 bp, Homo sapien
gtcattgtcagagatctcgttggcc

SEQ ID NO: 1028791 - DNA, 25 bp, Homo sapien
ggcctggatgatcttattccttaac

SEQ ID NO: 1028792 - DNA, 25 bp, Homo sapien
ggggggcactttgacgcctttctgc

SEQ ID NO: 1028793 - DNA, 25 bp, Homo sapien
ggggcactttgacgcctttctgctt

SEQ ID NO: 1028794 - DNA, 25 bp, Homo sapien
tgattatagtagtcgcttctctctg

SEQ ID NO: 1028795 - DNA, 25 bp, Homo sapien
tcagctgattatagtagtcgcttct

SEQ ID NO: 1028796 - DNA, 25 bp, Homo sapien
tggatttgctggtcaggaaggcctc

SEQ ID NO: 1028797 - DNA, 25 bp, Homo sapien
ggatttgctggtcaggaaggcctct

SEQ ID NO: 1028798 - DNA, 25 bp, Homo sapien
ttcttggatttgctggtcaggaagg

SEQ ID NO: 1028799 - DNA, 25 bp, Homo sapien
cttggatttgctggtcaggaaggcc

SEQ ID NO: 1028800 - DNA, 25 bp, Homo sapien
gcgggtggttctggagctgggcccc

SEQ ID NO: 1028801 - DNA, 25 bp, Homo sapien
tctgagtctgagagcaggacgcatg

SEQ ID NO: 1028802 - DNA, 25 bp, Homo sapien
gctgaccgtatttgggggcctggct

SEQ ID NO: 1028803 - DNA, 25 bp, Homo sapien
tggttctggagctgggccccggcct

SEQ ID NO: 1028804 - DNA, 25 bp, Homo sapien
ccatgcggggaagggctagggccgc

SEQ ID NO: 1028805 - DNA, 25 bp, Homo sapien
cggggaggcgcctggtccagaaggg

SEQ ID NO: 1028806 - DNA, 25 bp, Homo sapien
cggggccatgcggggaagggctagg

SEQ ID NO: 1028807 - DNA, 25 bp, Homo sapien
cggggctctaggccgcccagccccg

SEQ ID NO: 1028808 - DNA, 25 bp, Homo sapien
gaaggtggcggggctagagtggtgg

SEQ ID NO: 1028809 - DNA, 25 bp, Homo sapien
gaggtgtctggtccggaaggtggcg

SEQ ID NO: 1028810 - DNA, 25 bp, Homo sapien
aaggtggcggggctagagtggtggg

SEQ ID NO: 1028811 - DNA, 25 bp, Homo sapien
tgtctggtccggaaggtggcggggc

SEQ ID NO: 1028812 - DNA, 25 bp, Homo sapien
ctgtgtccccgcgtctctgggctcc

SEQ ID NO: 1028813 - DNA, 25 bp, Homo sapien
tgtccccgcgtctctgggctccgca

SEQ ID NO: 1028814 - DNA, 25 bp, Homo sapien
ccccgcgtctctgggctccgcaggg

SEQ ID NO: 1028815 - DNA, 25 bp, Homo sapien
tgtgtccccgcgtctctgggctccg

SEQ ID NO: 1028816 - DNA, 25 bp, Homo sapien
tgcccactgcggccgcaccgggaag

SEQ ID NO: 1028817 - DNA, 25 bp, Homo sapien
ctgcccactgcggccgcaccgggaa

SEQ ID NO: 1028818 - DNA, 25 bp, Homo sapien
cagccacaaggagccgggcaaggag

SEQ ID NO: 1028819 - DNA, 25 bp, Homo sapien
agttctcagccagcgaggccgcgca

SEQ ID NO: 1028820 - DNA, 25 bp, Homo sapien
agccgatcttgctaagggccgggaa

SEQ ID NO: 1028821 - DNA, 25 bp, Homo sapien
taaaggtgaccggagaagccgatct

SEQ ID NO: 1028822 - DNA, 25 bp, Homo sapien
ctgaggtgcggcagacgcctcgagc

SEQ ID NO: 1028823 - DNA, 25 bp, Homo sapien
gagaaccttgcctgagggctggggc

SEQ ID NO: 1028824 - DNA, 25 bp, Homo sapien
ccagcggcccgcacctcccagcggg

SEQ ID NO: 1028825 - DNA, 25 bp, Homo sapien
tggccagcggcccgcacctcccagc

SEQ ID NO: 1028826 - DNA, 25 bp, Homo sapien
cctggccagcggcccgcacctccca

SEQ ID NO: 1028827 - DNA, 25 bp, Homo sapien
tctgaggctgctgttaggagagggg

SEQ ID NO: 1028828 - DNA, 25 bp, Homo sapien
ctctgaggctgctgttaggagaggg

SEQ ID NO: 1028829 - DNA, 25 bp, Homo sapien
ctgaggctgctgttaggagaggggc

SEQ ID NO: 1028830 - DNA, 25 bp, Homo sapien
ttctcggtggggagatcaagacagg

SEQ ID NO: 1028831 - DNA, 25 bp, Homo sapien
ctcggtggggagatcaagacaggtg

SEQ ID NO: 1028832 - DNA, 25 bp, Homo sapien
cttctcggtggggagatcaagacag

SEQ ID NO: 1028833 - DNA, 25 bp, Homo sapien
tctcggtggggagatcaagacaggt

SEQ ID NO: 1028834 - DNA, 25 bp, Homo sapien
cctcccacctactatagtggacgtg

SEQ ID NO: 1028835 - DNA, 25 bp, Homo sapien
acagcccctaggctgactccgtccc

SEQ ID NO: 1028836 - DNA, 25 bp, Homo sapien
acctactatagtggacgtggctctc

SEQ ID NO: 1028837 - DNA, 25 bp, Homo sapien
cctaggctgactccgtccctgctgc

SEQ ID NO: 1028838 - DNA, 25 bp, Homo sapien
ctgagctgctggaccgtgggctccc

SEQ ID NO: 1028839 - DNA, 25 bp, Homo sapien
cccctaagtggactgtggccgttgg

SEQ ID NO: 1028840 - DNA, 25 bp, Homo sapien
aaggccaaaggctgcggtttgctga

SEQ ID NO: 1028841 - DNA, 25 bp, Homo sapien
gagtcaagaggaagctctccccgcc

SEQ ID NO: 1028842 - DNA, 25 bp, Homo sapien
tgcacttgtgcacatagtagcctgt

SEQ ID NO: 1028843 - DNA, 25 bp, Homo sapien
tagcccaggatgaagatgatccaga

SEQ ID NO: 1028844 - DNA, 25 bp, Homo sapien
gcgatgcccagcttgcccgtgcaca

SEQ ID NO: 1028845 - DNA, 25 bp, Homo sapien
agcttgcccgtgcacagcctctggg

SEQ ID NO: 1028846 - DNA, 25 bp, Homo sapien
cagccccccgcgtgcatgcggggca

SEQ ID NO: 1028847 - DNA, 25 bp, Homo sapien
gtgtgcggccagccccccgcgtgca

SEQ ID NO: 1028848 - DNA, 25 bp, Homo sapien
cccccgcgtgcatgcggggcagcat

SEQ ID NO: 1028849 - DNA, 25 bp, Homo sapien
cggccagccccccgcgtgcatgcgg

SEQ ID NO: 1028850 - DNA, 25 bp, Homo sapien
acttaatgcctctgtacacaggctc

SEQ ID NO: 1028851 - DNA, 25 bp, Homo sapien
gtagacccgggtcctccctggcagc

SEQ ID NO: 1028852 - DNA, 25 bp, Homo sapien
agccgccggccccaagagggacaca

SEQ ID NO: 1028853 - DNA, 25 bp, Homo sapien
caaggagtacttggagggaccaggc

SEQ ID NO: 1028854 - DNA, 25 bp, Homo sapien
tgactgtagaactgggacagctccc

SEQ ID NO: 1028855 - DNA, 25 bp, Homo sapien
ttcagggagggtaccagctggctac

SEQ ID NO: 1028856 - DNA, 25 bp, Homo sapien
ccccaaaggcggatgatgtggagtc

SEQ ID NO: 1028857 - DNA, 25 bp, Homo sapien
tgtgggttacttgagtgcctggccc

SEQ ID NO: 1028858 - DNA, 25 bp, Homo sapien
tttttaagatgtatgtattcgttgt

SEQ ID NO: 1028859 - DNA, 25 bp, Homo sapien
catcaaagtgattttacggtttttg

SEQ ID NO: 1028860 - DNA, 25 bp, Homo sapien
gattctgtcgtaaagtgatgctatg

SEQ ID NO: 1028861 - DNA, 25 bp, Homo sapien
gctatgttgtcgttacaacatcaaa

SEQ ID NO: 1028862 - DNA, 25 bp, Homo sapien
gcggaggtttctatgcggcaatgct

SEQ ID NO: 1028863 - DNA, 25 bp, Homo sapien
tcccagtgctggaaaggacgggccc

SEQ ID NO: 1028864 - DNA, 25 bp, Homo sapien
tctcagatactgaagccgatgcagt

SEQ ID NO: 1028865 - DNA, 25 bp, Homo sapien
gcctgaaggtggtgtacccgtccaa

SEQ ID NO: 1028866 - DNA, 25 bp, Homo sapien
ccaataaccaacagtgagaagacaa

SEQ ID NO: 1028867 - DNA, 25 bp, Homo sapien
taccttcacttgctggatggaaatg

SEQ ID NO: 1028868 - DNA, 25 bp, Homo sapien
ttcccatacagataccttcacttgc

SEQ ID NO: 1028869 - DNA, 25 bp, Homo sapien
tacccgtgtcttgtggatgcagacg

SEQ ID NO: 1028870 - DNA, 25 bp, Homo sapien
agtgaggtggctaatcataggcgca

SEQ ID NO: 1028871 - DNA, 25 bp, Homo sapien
tagcgtagacactccattggcacag

SEQ ID NO: 1028872 - DNA, 25 bp, Homo sapien
caccatagtgatgacagacttagcg

SEQ ID NO: 1028873 - DNA, 25 bp, Homo sapien
ccaggagctcaccatagtgatgaca

SEQ ID NO: 1028874 - DNA, 25 bp, Homo sapien
cacaaagtgagtgcctggctggccg

SEQ ID NO: 1028875 - DNA, 25 bp, Homo sapien
ttgcagggtctgctgaagagtctcc

SEQ ID NO: 1028876 - DNA, 25 bp, Homo sapien
ccagccaagggtgaagtgtggacac

SEQ ID NO: 1028877 - DNA, 25 bp, Homo sapien
tctgtgttacagaccaagctccacg

SEQ ID NO: 1028878 - DNA, 25 bp, Homo sapien
tgttaagggaccaagaatcaagtac

SEQ ID NO: 1028879 - DNA, 25 bp, Homo sapien
cgcccggcccaatcatgtgtttttg

SEQ ID NO: 1028880 - DNA, 25 bp, Homo sapien
tagtggctattgagagttttacagg

SEQ ID NO: 1028881 - DNA, 25 bp, Homo sapien
tgatcctaccagtgattagtggcta

SEQ ID NO: 1028882 - DNA, 25 bp, Homo sapien
ttctgcttgcctcgctgatgttgca

SEQ ID NO: 1028883 - DNA, 25 bp, Homo sapien
gcttctgcttgcctcgctgatgttg

SEQ ID NO: 1028884 - DNA, 25 bp, Homo sapien
cagggcttctgcttgcctcgctgat

SEQ ID NO: 1028885 - DNA, 25 bp, Homo sapien
gggcttctgcttgcctcgctgatgt

SEQ ID NO: 1028886 - DNA, 25 bp, Homo sapien
ctttgctcagaggcgcttcactttc

SEQ ID NO: 1028887 - DNA, 25 bp, Homo sapien
gcttcactttctccacactttcgaa

SEQ ID NO: 1028888 - DNA, 25 bp, Homo sapien
ctgtgacaggcatcagctccctgct

SEQ ID NO: 1028889 - DNA, 25 bp, Homo sapien
tccctgctggaactgaggtagacac

SEQ ID NO: 1028890 - DNA, 25 bp, Homo sapien
tgccgtcagctctcgtgcaaacgat

SEQ ID NO: 1028891 - DNA, 25 bp, Homo sapien
tcaggccttccttagaatcagagaa

SEQ ID NO: 1028892 - DNA, 25 bp, Homo sapien
gctaaccaaagatcctgcgtgcagt

SEQ ID NO: 1028893 - DNA, 25 bp, Homo sapien
gacctggccgcactgtacattaagc

SEQ ID NO: 1028894 - DNA, 25 bp, Homo sapien
catgccagcactaggaaaagtgtag

SEQ ID NO: 1028895 - DNA, 25 bp, Homo sapien
cgccatggagtcatcgctgcctggg

SEQ ID NO: 1028896 - DNA, 25 bp, Homo sapien
aaagtgtagtgagggatgagaccgc

SEQ ID NO: 1028897 - DNA, 25 bp, Homo sapien
gagatgtactctggcatttgtcggg

SEQ ID NO: 1028898 - DNA, 25 bp, Homo sapien
aaagtgaggcccgacgcggtcttgt

SEQ ID NO: 1028899 - DNA, 25 bp, Homo sapien
gacaccacattaccttactcagaag

SEQ ID NO: 1028900 - DNA, 25 bp, Homo sapien
ggtcttgtgcgcaggcgtcgcccca

SEQ ID NO: 1028901 - DNA, 25 bp, Homo sapien
aagcaaaggcgcgacgccacctggt

SEQ ID NO: 1028902 - DNA, 25 bp, Homo sapien
tgcagatgtcctcaagccctctggg

SEQ ID NO: 1028903 - DNA, 25 bp, Homo sapien
tgctcagatccgtcctcgccctggc

SEQ ID NO: 1028904 - DNA, 25 bp, Homo sapien
cacaggccgggtgccgatcccggaa

SEQ ID NO: 1028905 - DNA, 25 bp, Homo sapien
tgcccagctgctcagatccgtcctc

SEQ ID NO: 1028906 - DNA, 25 bp, Homo sapien
tcacgctcttgggcttctggagcat

SEQ ID NO: 1028907 - DNA, 25 bp, Homo sapien
cttcacgctcttgggcttctggagc

SEQ ID NO: 1028908 - DNA, 25 bp, Homo sapien
ttcacgctcttgggcttctggagca

SEQ ID NO: 1028909 - DNA, 25 bp, Homo sapien
agccacgccgaacttcctcgggctg

SEQ ID NO: 1028910 - DNA, 25 bp, Homo sapien
ctggaagcggagacagcccttgcgc

SEQ ID NO: 1028911 - DNA, 25 bp, Homo sapien
gaagcggagacagcccttgcgcagc

SEQ ID NO: 1028912 - DNA, 25 bp, Homo sapien
gctccggccagccacgccgaacttc

SEQ ID NO: 1028913 - DNA, 25 bp, Homo sapien
aagtaatcttccgtcagctccgtgc

SEQ ID NO: 1028914 - DNA, 25 bp, Homo sapien
cacagccgggaaccgcgctcaggga

SEQ ID NO: 1028915 - DNA, 25 bp, Homo sapien
agctccgtgccatcctcgtacaggc

SEQ ID NO: 1028916 - DNA, 25 bp, Homo sapien
agctcggcgttgtcgggaacactgg

SEQ ID NO: 1028917 - DNA, 25 bp, Homo sapien
gcatcacagtgatacattttccagc

SEQ ID NO: 1028918 - DNA, 25 bp, Homo sapien
ccccagggggcatcacagtgataca

SEQ ID NO: 1028919 - DNA, 25 bp, Homo sapien
ccagggggcatcacagtgatacatt

SEQ ID NO: 1028920 - DNA, 25 bp, Homo sapien
caccccagggggcatcacagtgata

SEQ ID NO: 1028921 - DNA, 25 bp, Homo sapien
gagtgtgagactatcctgggaaaca

SEQ ID NO: 1028922 - DNA, 25 bp, Homo sapien
gtgtgagactatcctgggaaacatg

SEQ ID NO: 1028923 - DNA, 25 bp, Homo sapien
caggagtgtgagactatcctgggaa

SEQ ID NO: 1028924 - DNA, 25 bp, Homo sapien
ggagtgtgagactatcctgggaaac

SEQ ID NO: 1028925 - DNA, 25 bp, Homo sapien
ggctgtaccttgaccctgatgctgg

SEQ ID NO: 1028926 - DNA, 25 bp, Homo sapien
gacatggagaacatatcagcagttg

SEQ ID NO: 1028927 - DNA, 25 bp, Homo sapien
tcagcagttgctacgggctagggat

SEQ ID NO: 1028928 - DNA, 25 bp, Homo sapien
tgctggtcacaggaatctacatggg

SEQ ID NO: 1028929 - DNA, 25 bp, Homo sapien
tctctctaacatccccgttctgggt

SEQ ID NO: 1028930 - DNA, 25 bp, Homo sapien
ggtatttcctatgaatggaacccta

SEQ ID NO: 1028931 - DNA, 25 bp, Homo sapien
ggaaccctactgtatgtgcaggctt

SEQ ID NO: 1028932 - DNA, 25 bp, Homo sapien
ttcctcttcatggtgagtacttcca

SEQ ID NO: 1028933 - DNA, 25 bp, Homo sapien
aggactcagacttgaggtgtcccgg

SEQ ID NO: 1028934 - DNA, 25 bp, Homo sapien
ctcagacttgaggtgtcccgggtct

SEQ ID NO: 1028935 - DNA, 25 bp, Homo sapien
actcagacttgaggtgtcccgggtc

SEQ ID NO: 1028936 - DNA, 25 bp, Homo sapien
gactcagacttgaggtgtcccgggt

SEQ ID NO: 1028937 - DNA, 25 bp, Homo sapien
agcctctgaccacatcttcccccat

SEQ ID NO: 1028938 - DNA, 25 bp, Homo sapien
cacaagaagagcctctgaccacatc

SEQ ID NO: 1028939 - DNA, 25 bp, Homo sapien
aagagcctctgaccacatcttcccc

SEQ ID NO: 1028940 - DNA, 25 bp, Homo sapien
tcacaagaagagcctctgaccacat

SEQ ID NO: 1028941 - DNA, 25 bp, Homo sapien
caaacaaaaggtgccggtccagcag

SEQ ID NO: 1028942 - DNA, 25 bp, Homo sapien
caaaaggtgccggtccagcagaaga

SEQ ID NO: 1028943 - DNA, 25 bp, Homo sapien
gacaaacaaaaggtgccggtccagc

SEQ ID NO: 1028944 - DNA, 25 bp, Homo sapien
aggtgccggtccagcagaagacaca

SEQ ID NO: 1028945 - DNA, 25 bp, Homo sapien
ctcgtgaaatgcactgaggaagcgc

SEQ ID NO: 1028946 - DNA, 25 bp, Homo sapien
cccacctgtggctcgtgaaatgcac

SEQ ID NO: 1028947 - DNA, 25 bp, Homo sapien
tgtggctcgtgaaatgcactgagga

SEQ ID NO: 1028948 - DNA, 25 bp, Homo sapien
gaaatgcactgaggaagcgcctgat

SEQ ID NO: 1028949 - DNA, 25 bp, Homo sapien
gcgatgttctggctgacgttgtgca

SEQ ID NO: 1028950 - DNA, 25 bp, Homo sapien
gcccgggtctcggccgcgatgttct

SEQ ID NO: 1028951 - DNA, 25 bp, Homo sapien
tctcggccgcgatgttctggctgac

SEQ ID NO: 1028952 - DNA, 25 bp, Homo sapien
atgttctggctgacgttgtgcagga

SEQ ID NO: 1028953 - DNA, 25 bp, Homo sapien
ctcaacccacgagggtacaggccag

SEQ ID NO: 1028954 - DNA, 25 bp, Homo sapien
ccacgagggtacaggccagcccttc

SEQ ID NO: 1028955 - DNA, 25 bp, Homo sapien
cccacctcaacccacgagggtacag

SEQ ID NO: 1028956 - DNA, 25 bp, Homo sapien
cacctcaacccacgagggtacaggc

SEQ ID NO: 1028957 - DNA, 25 bp, Homo sapien
ggccccacctgagtccttgctgggt

SEQ ID NO: 1028958 - DNA, 25 bp, Homo sapien
ctgccctggactctggccccacctg

SEQ ID NO: 1028959 - DNA, 25 bp, Homo sapien
ctgagtccttgctgggtacctttcc

SEQ ID NO: 1028960 - DNA, 25 bp, Homo sapien
cacctgagtccttgctgggtacctt

SEQ ID NO: 1028961 - DNA, 25 bp, Homo sapien
gttgcggtgagccaagatcacgcca

SEQ ID NO: 1028962 - DNA, 25 bp, Homo sapien
aggcagagggtgcagggaggcagag

SEQ ID NO: 1028963 - DNA, 25 bp, Homo sapien
gaggcagagggtgcagggaggcaga

SEQ ID NO: 1028964 - DNA, 25 bp, Homo sapien
acacgcagcggagtgaacagacgga

SEQ ID NO: 1028965 - DNA, 25 bp, Homo sapien
gacagtgtggtatctacacgcagcg

SEQ ID NO: 1028966 - DNA, 25 bp, Homo sapien
aacagacggagcgtggcatgtacac

SEQ ID NO: 1028967 - DNA, 25 bp, Homo sapien
tacacgcagtggactgtcatttggc

SEQ ID NO: 1028968 - DNA, 25 bp, Homo sapien
gcagggcagaatatgagggtcatac

SEQ ID NO: 1028969 - DNA, 25 bp, Homo sapien
agaatatgagggtcatactgcttca

SEQ ID NO: 1028970 - DNA, 25 bp, Homo sapien
caagcagggcagaatatgagggtca

SEQ ID NO: 1028971 - DNA, 25 bp, Homo sapien
tatgagggtcatactgcttcatctt

SEQ ID NO: 1028972 - DNA, 25 bp, Homo sapien
acttgctctgaaatcgggactccaa

SEQ ID NO: 1028973 - DNA, 25 bp, Homo sapien
gacttgctctgaaatcgggactcca

SEQ ID NO: 1028974 - DNA, 25 bp, Homo sapien
agacttgctctgaaatcgggactcc

SEQ ID NO: 1028975 - DNA, 25 bp, Homo sapien
cagacttgctctgaaatcgggactc

SEQ ID NO: 1028976 - DNA, 25 bp, Homo sapien
ccttggctcctctgtcgaagtagct

SEQ ID NO: 1028977 - DNA, 25 bp, Homo sapien
gctgccattgtactgcatggaccgg

SEQ ID NO: 1028978 - DNA, 25 bp, Homo sapien
ttgtactgcatggaccggagcctct

SEQ ID NO: 1028979 - DNA, 25 bp, Homo sapien
cgaagtagctgccattgtactgcat

SEQ ID NO: 1028980 - DNA, 25 bp, Homo sapien
aagcagctgtccatgtcaaagggac

SEQ ID NO: 1028981 - DNA, 25 bp, Homo sapien
agcagctgtccatgtcaaagggacc

SEQ ID NO: 1028982 - DNA, 25 bp, Homo sapien
gtgctgaagaggatcctgctctccc

SEQ ID NO: 1028983 - DNA, 25 bp, Homo sapien
tgctctccctgttactgtaggggtt

SEQ ID NO: 1028984 - DNA, 25 bp, Homo sapien
ccaggtgctgaagaggatcctgctc

SEQ ID NO: 1028985 - DNA, 25 bp, Homo sapien
tgtaggggttgatggagtgtcttga

SEQ ID NO: 1028986 - DNA, 25 bp, Homo sapien
cagtgagccatgatcctgccactgc

SEQ ID NO: 1028987 - DNA, 25 bp, Homo sapien
tgagccatgatcctgccactgcact

SEQ ID NO: 1028988 - DNA, 25 bp, Homo sapien
ggccaggagttcagggcttcagtga

SEQ ID NO: 1028989 - DNA, 25 bp, Homo sapien
aggccaggagttcagggcttcagtg

SEQ ID NO: 1028990 - DNA, 25 bp, Homo sapien
ttgaatgtccccatctgaaatgctg

SEQ ID NO: 1028991 - DNA, 25 bp, Homo sapien
gttgaatgtccccatctgaaatgct

SEQ ID NO: 1028992 - DNA, 25 bp, Homo sapien
tgaatgtccccatctgaaatgctgg

SEQ ID NO: 1028993 - DNA, 25 bp, Homo sapien
aggttgaatgtccccatctgaaatg

SEQ ID NO: 1028994 - DNA, 25 bp, Homo sapien
cacaagtgttttccctcggggcaag

SEQ ID NO: 1028995 - DNA, 25 bp, Homo sapien
ttcacatgcgtgtggtaaaggtgcg

SEQ ID NO: 1028996 - DNA, 25 bp, Homo sapien
gtatgtagacgttaaattcacatgc

SEQ ID NO: 1028997 - DNA, 25 bp, Homo sapien
gctctgcagaccacagcgtgggcca

SEQ ID NO: 1028998 - DNA, 25 bp, Homo sapien
acgtatgtagacgttaaattcacat

SEQ ID NO: 1028999 - DNA, 25 bp, Homo sapien
atcaaatccgaacccacgaagagcc

SEQ ID NO: 1029000 - DNA, 25 bp, Homo sapien
ctgggcatccgcaggaatcaaatcc

SEQ ID NO: 1029001 - DNA, 25 bp, Homo sapien
caaagtacacgaccaacaaggcagg

SEQ ID NO: 1029002 - DNA, 25 bp, Homo sapien
tcatccgcagaacgcagggtgtacg

SEQ ID NO: 1029003 - DNA, 25 bp, Homo sapien
tgttgcctggtgcacaccggggctg

SEQ ID NO: 1029004 - DNA, 25 bp, Homo sapien
tgtgtctgatggagggtggcctagg

SEQ ID NO: 1029005 - DNA, 25 bp, Homo sapien
cccgttatctaatgctgcagaagca

SEQ ID NO: 1029006 - DNA, 25 bp, Homo sapien
tgagcccgttatctaatgctgcaga

SEQ ID NO: 1029007 - DNA, 25 bp, Homo sapien
gggttccagtccctgatacaggccc

SEQ ID NO: 1029008 - DNA, 25 bp, Homo sapien
tgcaaagtaaggttagagacatcat

SEQ ID NO: 1029009 - DNA, 25 bp, Homo sapien
aaagtaaggttagagacatcatttt

SEQ ID NO: 1029010 - DNA, 25 bp, Homo sapien
gcaaagtaaggttagagacatcatt

SEQ ID NO: 1029011 - DNA, 25 bp, Homo sapien
ctgcaaagtaaggttagagacatca

SEQ ID NO: 1029012 - DNA, 25 bp, Homo sapien
tccaccagtgtaggaatgatggtgc

SEQ ID NO: 1029013 - DNA, 25 bp, Homo sapien
ccagtgtaggaatgatggtgcgttt

SEQ ID NO: 1029014 - DNA, 25 bp, Homo sapien
caccagtgtaggaatgatggtgcgt

SEQ ID NO: 1029015 - DNA, 25 bp, Homo sapien
cttccaccagtgtaggaatgatggt

SEQ ID NO: 1029016 - DNA, 25 bp, Homo sapien
tttccgcacaggctgcttccgcttc

SEQ ID NO: 1029017 - DNA, 25 bp, Homo sapien
tgcttccgcttcaaccttgtctggg

SEQ ID NO: 1029018 - DNA, 25 bp, Homo sapien
acagttgagcttgtgggtggttttc

SEQ ID NO: 1029019 - DNA, 25 bp, Homo sapien
tgtctggggtttgtagattctgctt

SEQ ID NO: 1029020 - DNA, 25 bp, Homo sapien
aatgatgcccacgtcaggcctcaaa

SEQ ID NO: 1029021 - DNA, 25 bp, Homo sapien
tgttaaaatgatgcccacgtcaggc

SEQ ID NO: 1029022 - DNA, 25 bp, Homo sapien
caggcctcaaacaaagaccaggacg

SEQ ID NO: 1029023 - DNA, 25 bp, Homo sapien
caaagaccaggacgtggtgtgtacg

SEQ ID NO: 1029024 - DNA, 25 bp, Homo sapien
tactgacccgtatgaccaggtactc

SEQ ID NO: 1029025 - DNA, 25 bp, Homo sapien
tgtccctcaagcaaggtggccaact

SEQ ID NO: 1029026 - DNA, 25 bp, Homo sapien
ccatttttggcctagaaaacagcag

SEQ ID NO: 1029027 - DNA, 25 bp, Homo sapien
cgtggttcaacgtgatagctgttca

SEQ ID NO: 1029028 - DNA, 25 bp, Homo sapien
tatgatccgagatgatagtaacgct

SEQ ID NO: 1029029 - DNA, 25 bp, Homo sapien
tagtaacgctgaccaacggagcagg

SEQ ID NO: 1029030 - DNA, 25 bp, Homo sapien
tcagatccgcgtgtttccttccaga

SEQ ID NO: 1029031 - DNA, 25 bp, Homo sapien
tgacgtagaaaatgagccctctgta

SEQ ID NO: 1029032 - DNA, 25 bp, Homo sapien
ctgtggctctgcctacagcgcttcc

SEQ ID NO: 1029033 - DNA, 25 bp, Homo sapien
ctggcgcaggccgactgtggctctg

SEQ ID NO: 1029034 - DNA, 25 bp, Homo sapien
cctggcgcaggccgactgtggctct

SEQ ID NO: 1029035 - DNA, 25 bp, Homo sapien
actgtggctctgcctacagcgcttc

SEQ ID NO: 1029036 - DNA, 25 bp, Homo sapien
tcctggtggtgacgagaattttgcc

SEQ ID NO: 1029037 - DNA, 25 bp, Homo sapien
gaattttgccatcctctaagcagac

SEQ ID NO: 1029038 - DNA, 25 bp, Homo sapien
tcctctaagcagacttcagtgaggt

SEQ ID NO: 1029039 - DNA, 25 bp, Homo sapien
taaatgacagcacctatcctggtgg

SEQ ID NO: 1029040 - DNA, 25 bp, Homo sapien
gccactacgcccggcacgggtccat

SEQ ID NO: 1029041 - DNA, 25 bp, Homo sapien
cagtgggcttaatgagagggatctt

SEQ ID NO: 1029042 - DNA, 25 bp, Homo sapien
cacttcagctcagtagctttggtca

SEQ ID NO: 1029043 - DNA, 25 bp, Homo sapien
taaagacagctcttcacttcagctc

SEQ ID NO: 1029044 - DNA, 25 bp, Homo sapien
ttatacacgtacatacatgatgatg

SEQ ID NO: 1029045 - DNA, 25 bp, Homo sapien
tagagatggcctgtccgtgccaaaa

SEQ ID NO: 1029046 - DNA, 25 bp, Homo sapien
cagggctacagacagaggatgtgca

SEQ ID NO: 1029047 - DNA, 25 bp, Homo sapien
gaattacagaagcttgtccctaaga

SEQ ID NO: 1029048 - DNA, 25 bp, Homo sapien
tcgcttagcaaagactagagatggc

SEQ ID NO: 1029049 - DNA, 25 bp, Homo sapien
taccgtggagaacgccaagatcctg

SEQ ID NO: 1029050 - DNA, 25 bp, Homo sapien
aaagcacgaagttgttcggcagcca

SEQ ID NO: 1029051 - DNA, 25 bp, Homo sapien
tcttcagcgcgcttgaaagcacgaa

SEQ ID NO: 1029052 - DNA, 25 bp, Homo sapien
tctggtgagccctgttaccgtggag

SEQ ID NO: 1029053 - DNA, 25 bp, Homo sapien
gctgtctccacaaagatgataaaat

SEQ ID NO: 1029054 - DNA, 25 bp, Homo sapien
ccacagctgtctccacaaagatgat

SEQ ID NO: 1029055 - DNA, 25 bp, Homo sapien
gatttacacattcgggccacagctg

SEQ ID NO: 1029056 - DNA, 25 bp, Homo sapien
tcatttggatttacacattcgggcc

SEQ ID NO: 1029057 - DNA, 25 bp, Homo sapien
gtcccggtccacttgggaggctctg

SEQ ID NO: 1029058 - DNA, 25 bp, Homo sapien
ggtccacttgggaggctctgagctg

SEQ ID NO: 1029059 - DNA, 25 bp, Homo sapien
ccacttgggaggctctgagctgcat

SEQ ID NO: 1029060 - DNA, 25 bp, Homo sapien
tcccggtccacttgggaggctctga

SEQ ID NO: 1029061 - DNA, 25 bp, Homo sapien
ggaatcacatgacgagggtgctgca

SEQ ID NO: 1029062 - DNA, 25 bp, Homo sapien
actgtgattggctgtgctgacgtcg

SEQ ID NO: 1029063 - DNA, 25 bp, Homo sapien
tcacactcatgaggagccggaaggt

SEQ ID NO: 1029064 - DNA, 25 bp, Homo sapien
tggctgcggtgctcacactcatgag

SEQ ID NO: 1029065 - DNA, 25 bp, Homo sapien
ttcaaatatggcgaacacagaagct

SEQ ID NO: 1029066 - DNA, 25 bp, Homo sapien
agggacgcgccctcatgaacatggc

SEQ ID NO: 1029067 - DNA, 25 bp, Homo sapien
cgggcgtgggaaacatagcggctac

SEQ ID NO: 1029068 - DNA, 25 bp, Homo sapien
tctctcaggcctgccacgggcgtgg

SEQ ID NO: 1029069 - DNA, 25 bp, Homo sapien
ctcgctcaaacatggcggccacagg

SEQ ID NO: 1029070 - DNA, 25 bp, Homo sapien
ccacaggtgcaccaagggaagcgcc

SEQ ID NO: 1029071 - DNA, 25 bp, Homo sapien
tcgctcaaacatggcggccacaggt

SEQ ID NO: 1029072 - DNA, 25 bp, Homo sapien
gcaccaagggaagcgccgttcacga

SEQ ID NO: 1029073 - DNA, 25 bp, Homo sapien
ctcagcggcggccaaagaggacgca

SEQ ID NO: 1029074 - DNA, 25 bp, Homo sapien
ggcgtggccgccgtgtgtccatcca

SEQ ID NO: 1029075 - DNA, 25 bp, Homo sapien
gtggccgccgtgtgtccatccagac

SEQ ID NO: 1029076 - DNA, 25 bp, Homo sapien
cggccaaagaggacgcatcacagca

SEQ ID NO: 1029077 - DNA, 25 bp, Homo sapien
agccagccctggactgcgcagccac

SEQ ID NO: 1029078 - DNA, 25 bp, Homo sapien
ggagccagccctggactgcgcagcc

SEQ ID NO: 1029079 - DNA, 25 bp, Homo sapien
ctgggagccagccctggactgcgca

SEQ ID NO: 1029080 - DNA, 25 bp, Homo sapien
tgggagccagccctggactgcgcag

SEQ ID NO: 1029081 - DNA, 25 bp, Homo sapien
gtgaatgagtggatgcgccatgctc

SEQ ID NO: 1029082 - DNA, 25 bp, Homo sapien
gatagcaccggagaaacggtcctgg

SEQ ID NO: 1029083 - DNA, 25 bp, Homo sapien
agaaacggtcctggcctgccacggg

SEQ ID NO: 1029084 - DNA, 25 bp, Homo sapien
tggatgcgccatgctctgggatagc

SEQ ID NO: 1029085 - DNA, 25 bp, Homo sapien
ggccctacagtgtttgtcaaaggca

SEQ ID NO: 1029086 - DNA, 25 bp, Homo sapien
tataaaaggccatatgcaagagagg

SEQ ID NO: 1029087 - DNA, 25 bp, Homo sapien
tggcctcagttaacgggtctaccga

SEQ ID NO: 1029088 - DNA, 25 bp, Homo sapien
gcaagagaggccctgtcatcataca

SEQ ID NO: 1029089 - DNA, 25 bp, Homo sapien
cagacggctgtcctaccacagggtt

SEQ ID NO: 1029090 - DNA, 25 bp, Homo sapien
tttgcccagctaagtcgggtggacc

SEQ ID NO: 1029091 - DNA, 25 bp, Homo sapien
tctccgctgtgtccttcattcaagg

SEQ ID NO: 1029092 - DNA, 25 bp, Homo sapien
gaggagctgcgatactttccaacag

SEQ ID NO: 1029093 - DNA, 25 bp, Homo sapien
catgggtcatgaccgcctggagacc

SEQ ID NO: 1029094 - DNA, 25 bp, Homo sapien
tactgatcagtctacaaagcgggct

SEQ ID NO: 1029095 - DNA, 25 bp, Homo sapien
aaagcgggctacaagagtccagtgg

SEQ ID NO: 1029096 - DNA, 25 bp, Homo sapien
cagcacgttgtaggatatatgaagc

SEQ ID NO: 1029097 - DNA, 25 bp, Homo sapien
tcagtcatcgtcacatcctcctgag

SEQ ID NO: 1029098 - DNA, 25 bp, Homo sapien
cagtcatcgtcacatcctcctgagg

SEQ ID NO: 1029099 - DNA, 25 bp, Homo sapien
ctcagtcagctgctctaggcaggtc

SEQ ID NO: 1029100 - DNA, 25 bp, Homo sapien
acatcctcctgaggatttctcagtc

SEQ ID NO: 1029101 - DNA, 25 bp, Homo sapien
agcgtggtcatcacaccaaccttca

SEQ ID NO: 1029102 - DNA, 25 bp, Homo sapien
ttgtgggcagcgtggtcatcacacc

SEQ ID NO: 1029103 - DNA, 25 bp, Homo sapien
ggcagcgtggtcatcacaccaacct

SEQ ID NO: 1029104 - DNA, 25 bp, Homo sapien
ctgttgtgggcagcgtggtcatcac

SEQ ID NO: 1029105 - DNA, 25 bp, Homo sapien
ccacgtgtcccgagcagagtgaggt

SEQ ID NO: 1029106 - DNA, 25 bp, Homo sapien
acagggagacccagcttgaaccctc

SEQ ID NO: 1029107 - DNA, 25 bp, Homo sapien
gacctcagttattcagcgtcaggag

SEQ ID NO: 1029108 - DNA, 25 bp, Homo sapien
gcaacacaacaattaggagagggac

SEQ ID NO: 1029109 - DNA, 25 bp, Homo sapien
catccgtgggtgacaagtttgagag

SEQ ID NO: 1029110 - DNA, 25 bp, Homo sapien
gagggaagggaggttctgagctttg

SEQ ID NO: 1029111 - DNA, 25 bp, Homo sapien
ggaagggaggttctgagctttggag

SEQ ID NO: 1029112 - DNA, 25 bp, Homo sapien
ccagcatccgtgggtgacaagtttg

SEQ ID NO: 1029113 - DNA, 25 bp, Homo sapien
ggcagatcttgaaaagtgcccccat

SEQ ID NO: 1029114 - DNA, 25 bp, Homo sapien
atcgcacggccaaggcggtgagtcc

SEQ ID NO: 1029115 - DNA, 25 bp, Homo sapien
ggtgagtcccgctccactaaggcag

SEQ ID NO: 1029116 - DNA, 25 bp, Homo sapien
tcctccaaccgaaaaacaccagcag

SEQ ID NO: 1029117 - DNA, 25 bp, Homo sapien
ctggcctccaccgcccacccagcac

SEQ ID NO: 1029118 - DNA, 25 bp, Homo sapien
cacccagcacccctggggactgtcc

SEQ ID NO: 1029119 - DNA, 25 bp, Homo sapien
cccacccagcacccctggggactgt

SEQ ID NO: 1029120 - DNA, 25 bp, Homo sapien
cgcccacccagcacccctggggact

SEQ ID NO: 1029121 - DNA, 25 bp, Homo sapien
ggtaagtatccatgcaagggtgcgg

SEQ ID NO: 1029122 - DNA, 25 bp, Homo sapien
tgaggacccacgcaggggcgcagga

SEQ ID NO: 1029123 - DNA, 25 bp, Homo sapien
aggggtgcaggaggtaagtatccat

SEQ ID NO: 1029124 - DNA, 25 bp, Homo sapien
tccatgcaagggtgcgggaggtgaa

SEQ ID NO: 1029125 - DNA, 25 bp, Homo sapien
ttgctgacctcggtgcagatcaacc

SEQ ID NO: 1029126 - DNA, 25 bp, Homo sapien
ggcccctggctgtcgtgaacgccat

SEQ ID NO: 1029127 - DNA, 25 bp, Homo sapien
agcattttgctgacctcggtgcaga

SEQ ID NO: 1029128 - DNA, 25 bp, Homo sapien
ggatgtgccagcctcgatttccttc

SEQ ID NO: 1029129 - DNA, 25 bp, Homo sapien
agaagggggaccgtagcattatttg

SEQ ID NO: 1029130 - DNA, 25 bp, Homo sapien
ctggtgtgcgggagtggactcaggc

SEQ ID NO: 1029131 - DNA, 25 bp, Homo sapien
ggagctggtgtgcgggagtggactc

SEQ ID NO: 1029132 - DNA, 25 bp, Homo sapien
gctggtgtgcgggagtggactcagg

SEQ ID NO: 1029133 - DNA, 25 bp, Homo sapien
tagccattctgcgaattccacttca

SEQ ID NO: 1029134 - DNA, 25 bp, Homo sapien
tccacttcacgctgacatcacaaag

SEQ ID NO: 1029135 - DNA, 25 bp, Homo sapien
ttctgcgaattccacttcacgctga

SEQ ID NO: 1029136 - DNA, 25 bp, Homo sapien
gaattccacttcacgctgacatcac

SEQ ID NO: 1029137 - DNA, 25 bp, Homo sapien
catctcggctgcttccaagtcgtgg

SEQ ID NO: 1029138 - DNA, 25 bp, Homo sapien
catagggtgtgtagcctttccagat

SEQ ID NO: 1029139 - DNA, 25 bp, Homo sapien
tcatggtctgcatggacgtgccaca

SEQ ID NO: 1029140 - DNA, 25 bp, Homo sapien
tcgtggtgattgtaaatgacgctgc

SEQ ID NO: 1029141 - DNA, 25 bp, Homo sapien
gaaggtaccttgttagtctcaagac

SEQ ID NO: 1029142 - DNA, 25 bp, Homo sapien
tacgtaatgactaaaccaagctgcg

SEQ ID NO: 1029143 - DNA, 25 bp, Homo sapien
gggaccttccgagagaatgcaccgt

SEQ ID NO: 1029144 - DNA, 25 bp, Homo sapien
tactccattacagagcacgggacct

SEQ ID NO: 1029145 - DNA, 25 bp, Homo sapien
ctgccagaatctgttgctgttcccc

SEQ ID NO: 1029146 - DNA, 25 bp, Homo sapien
tgccagaatctgttgctgttcccca

SEQ ID NO: 1029147 - DNA, 25 bp, Homo sapien
caagctgtggttcaggacaagccca

SEQ ID NO: 1029148 - DNA, 25 bp, Homo sapien
tctggtcccaacacaaggtgagcag

SEQ ID NO: 1029149 - DNA, 25 bp, Homo sapien
gacagaagccacctcttgagcacag

SEQ ID NO: 1029150 - DNA, 25 bp, Homo sapien
tttgctgccatgtgactagactctg

SEQ ID NO: 1029151 - DNA, 25 bp, Homo sapien
tgtagtacagcagtttccgatggtc

SEQ ID NO: 1029152 - DNA, 25 bp, Homo sapien
gtagtacagcagtttccgatggtca

SEQ ID NO: 1029153 - DNA, 25 bp, Homo sapien
tagtacagcagtttccgatggtcat

SEQ ID NO: 1029154 - DNA, 25 bp, Homo sapien
tttgtagtacagcagtttccgatgg

SEQ ID NO: 1029155 - DNA, 25 bp, Homo sapien
gtggtcacgatacagcctcagcaga

SEQ ID NO: 1029156 - DNA, 25 bp, Homo sapien
tatatattttcatgcccacaggagg

SEQ ID NO: 1029157 - DNA, 25 bp, Homo sapien
caaactcggtggctgacatcaacaa

SEQ ID NO: 1029158 - DNA, 25 bp, Homo sapien
cagaaagaaacccatgcgcaggagg

SEQ ID NO: 1029159 - DNA, 25 bp, Homo sapien
ccagccctgtgctagaatccaggga

SEQ ID NO: 1029160 - DNA, 25 bp, Homo sapien
cctgtgctagaatccagggacacaa

SEQ ID NO: 1029161 - DNA, 25 bp, Homo sapien
ggccagccctgtgctagaatccagg

SEQ ID NO: 1029162 - DNA, 25 bp, Homo sapien
agccctgtgctagaatccagggaca

SEQ ID NO: 1029163 - DNA, 25 bp, Homo sapien
taaggtgatgcttcttatcctcggg

SEQ ID NO: 1029164 - DNA, 25 bp, Homo sapien
tacctccggaccaataactagtgtc

SEQ ID NO: 1029165 - DNA, 25 bp, Homo sapien
cagcatattccaagcaggctctgag

SEQ ID NO: 1029166 - DNA, 25 bp, Homo sapien
catctgataatgctccgtaaggtga

SEQ ID NO: 1029167 - DNA, 25 bp, Homo sapien
aaggcaaagaagaaacaagcacctt

SEQ ID NO: 1029168 - DNA, 25 bp, Homo sapien
tggcagaaggcaaagaagaaacaag

SEQ ID NO: 1029169 - DNA, 25 bp, Homo sapien
gaaggcaaagaagaaacaagcacct

SEQ ID NO: 1029170 - DNA, 25 bp, Homo sapien
cagaaggcaaagaagaaacaagcac

SEQ ID NO: 1029171 - DNA, 25 bp, Homo sapien
gccaaggtcgtcagttacctccacg

SEQ ID NO: 1029172 - DNA, 25 bp, Homo sapien
ggctcctgtccgctgggcgtgcttt

SEQ ID NO: 1029173 - DNA, 25 bp, Homo sapien
ctcagggtcactgcgtgtggccaca

SEQ ID NO: 1029174 - DNA, 25 bp, Homo sapien
acaggtgggccctgcacagttccag

SEQ ID NO: 1029175 - DNA, 25 bp, Homo sapien
agtggccccacagtggtcctgcagg

SEQ ID NO: 1029176 - DNA, 25 bp, Homo sapien
ccggaccaccccacagggtggcagt

SEQ ID NO: 1029177 - DNA, 25 bp, Homo sapien
acagggtggcagtggccccacagtg

SEQ ID NO: 1029178 - DNA, 25 bp, Homo sapien
tggcagtggccccacagtggtcctg

SEQ ID NO: 1029179 - DNA, 25 bp, Homo sapien
ggagaagacggtgtccatgctcctc

SEQ ID NO: 1029180 - DNA, 25 bp, Homo sapien
agaagacggtgtccatgctcctcgg

SEQ ID NO: 1029181 - DNA, 25 bp, Homo sapien
gagaagacggtgtccatgctcctcg

SEQ ID NO: 1029182 - DNA, 25 bp, Homo sapien
gggaacaggtcattgccgatgtgat

SEQ ID NO: 1029183 - DNA, 25 bp, Homo sapien
tcattgccgatgtgatctggtgaag

SEQ ID NO: 1029184 - DNA, 25 bp, Homo sapien
tctggtgaaggatctccagatgaga

SEQ ID NO: 1029185 - DNA, 25 bp, Homo sapien
gatttatccaggattatccagatgg

SEQ ID NO: 1029186 - DNA, 25 bp, Homo sapien
gcgtgctccgccgttgtcttgagaa

SEQ ID NO: 1029187 - DNA, 25 bp, Homo sapien
gaaaggctgattctcaacattccgg

SEQ ID NO: 1029188 - DNA, 25 bp, Homo sapien
gacaccgtcgatagcaaagcactgc

SEQ ID NO: 1029189 - DNA, 25 bp, Homo sapien
catctgcaagctttgagactaaggc

SEQ ID NO: 1029190 - DNA, 25 bp, Homo sapien
cactaacaacagagagaacgcacgg

SEQ ID NO: 1029191 - DNA, 25 bp, Homo sapien
catctggcaaaagggtgacgtcacc

SEQ ID NO: 1029192 - DNA, 25 bp, Homo sapien
tatcctacacgagaagttagacggg

SEQ ID NO: 1029193 - DNA, 25 bp, Homo sapien
caatcggataagagtctgtcacgcc

SEQ ID NO: 1029194 - DNA, 25 bp, Homo sapien
tgctcagcgtgacagacggctgcaa

SEQ ID NO: 1029195 - DNA, 25 bp, Homo sapien
gagactggcgatcttgacaaaatag

SEQ ID NO: 1029196 - DNA, 25 bp, Homo sapien
ggataaatgtccttccaaagccgga

SEQ ID NO: 1029197 - DNA, 25 bp, Homo sapien
taatagaccgtgagtctcagacact

SEQ ID NO: 1029198 - DNA, 25 bp, Homo sapien
tatgtacttcctaatttccttgatc

SEQ ID NO: 1029199 - DNA, 25 bp, Homo sapien
gtacttcctaatttccttgatcatt

SEQ ID NO: 1029200 - DNA, 25 bp, Homo sapien
cactctatgtacttcctaatttcct

SEQ ID NO: 1029201 - DNA, 25 bp, Homo sapien
gttacactctatgtacttcctaatt

SEQ ID NO: 1029202 - DNA, 25 bp, Homo sapien
aatatccctgttacactccagggcc

SEQ ID NO: 1029203 - DNA, 25 bp, Homo sapien
cagcaggcatgcaatatccctgtta

SEQ ID NO: 1029204 - DNA, 25 bp, Homo sapien
tgcattctccacccctgtttgcagt

SEQ ID NO: 1029205 - DNA, 25 bp, Homo sapien
ggcatgcaatatccctgttacactc

SEQ ID NO: 1029206 - DNA, 25 bp, Homo sapien
cttaactggacttactccgaccctg

SEQ ID NO: 1029207 - DNA, 25 bp, Homo sapien
actggacttactccgaccctgccca

SEQ ID NO: 1029208 - DNA, 25 bp, Homo sapien
taactggacttactccgaccctgcc

SEQ ID NO: 1029209 - DNA, 25 bp, Homo sapien
ctggacttactccgaccctgcccat

SEQ ID NO: 1029210 - DNA, 25 bp, Homo sapien
ccagaaccagggtctcagggccctc

SEQ ID NO: 1029211 - DNA, 25 bp, Homo sapien
cagcagtgtctgactgtggaaacca

SEQ ID NO: 1029212 - DNA, 25 bp, Homo sapien
tctctgtcaggcgtttccccagatc

SEQ ID NO: 1029213 - DNA, 25 bp, Homo sapien
gtctctgccgccaccggtcattcag

SEQ ID NO: 1029214 - DNA, 25 bp, Homo sapien
gggcttcccggaaggcactgtctcg

SEQ ID NO: 1029215 - DNA, 25 bp, Homo sapien
tcgtgggacctctgccaagttgaag

SEQ ID NO: 1029216 - DNA, 25 bp, Homo sapien
agttgccacttccttgggcttcccg

SEQ ID NO: 1029217 - DNA, 25 bp, Homo sapien
caccagggaacatcccaagttgcca

SEQ ID NO: 1029218 - DNA, 25 bp, Homo sapien
tgggtgtgtgcagggtgggccgagc

SEQ ID NO: 1029219 - DNA, 25 bp, Homo sapien
ctgggtgtgtgcagggtgggccgag

SEQ ID NO: 1029220 - DNA, 25 bp, Homo sapien
ggtgtgtgcagggtgggccgagccc

SEQ ID NO: 1029221 - DNA, 25 bp, Homo sapien
gtgtgtgcagggtgggccgagccct

SEQ ID NO: 1029222 - DNA, 25 bp, Homo sapien
gagaacgtgaaagtgctgccaaacg

SEQ ID NO: 1029223 - DNA, 25 bp, Homo sapien
caaacgcaaggggttcttgtggctg

SEQ ID NO: 1029224 - DNA, 25 bp, Homo sapien
ggccattctcgtgtggctttgagaa

SEQ ID NO: 1029225 - DNA, 25 bp, Homo sapien
tcttggagggccattctcgtgtggc

SEQ ID NO: 1029226 - DNA, 25 bp, Homo sapien
taaaagcgcgtccttacacggcatg

SEQ ID NO: 1029227 - DNA, 25 bp, Homo sapien
cagacgctcgatgttcaaggtggga

SEQ ID NO: 1029228 - DNA, 25 bp, Homo sapien
gaagggcacaccgagcttggaatac

SEQ ID NO: 1029229 - DNA, 25 bp, Homo sapien
gaacagggacgcttttcgtaagatg

SEQ ID NO: 1029230 - DNA, 25 bp, Homo sapien
ggatttgtgtgggaaaatgtcagct

SEQ ID NO: 1029231 - DNA, 25 bp, Homo sapien
aatgtcagctctgagcccatcactc

SEQ ID NO: 1029232 - DNA, 25 bp, Homo sapien
ctggggatttgtgtgggaaaatgtc

SEQ ID NO: 1029233 - DNA, 25 bp, Homo sapien
tgtcagctctgagcccatcactcat

SEQ ID NO: 1029234 - DNA, 25 bp, Homo sapien
acacagtagcttcaccctgaaaggg

SEQ ID NO: 1029235 - DNA, 25 bp, Homo sapien
ggccctgagagtctgtaaggcacca

SEQ ID NO: 1029236 - DNA, 25 bp, Homo sapien
caccacctttgctcggcacacagta

SEQ ID NO: 1029237 - DNA, 25 bp, Homo sapien
gagtctgtaaggcaccacctttgct

SEQ ID NO: 1029238 - DNA, 25 bp, Homo sapien
gggcagctttatcaccagctgggag

SEQ ID NO: 1029239 - DNA, 25 bp, Homo sapien
cagggcagctttatcaccagctggg

SEQ ID NO: 1029240 - DNA, 25 bp, Homo sapien
cctctgcctcaagctaaatttcctc

SEQ ID NO: 1029241 - DNA, 25 bp, Homo sapien
tctgcctcaagctaaatttcctctc

SEQ ID NO: 1029242 - DNA, 25 bp, Homo sapien
tgcctcaagctaaatttcctctcac

SEQ ID NO: 1029243 - DNA, 25 bp, Homo sapien
ctctgcctcaagctaaatttcctct

SEQ ID NO: 1029244 - DNA, 25 bp, Homo sapien
actccgcaaggccccagagcactgg

SEQ ID NO: 1029245 - DNA, 25 bp, Homo sapien
agccagagctcctgcgccactccgc

SEQ ID NO: 1029246 - DNA, 25 bp, Homo sapien
tcctgcgccactccgcaaggcccca

SEQ ID NO: 1029247 - DNA, 25 bp, Homo sapien
gagctcctgcgccactccgcaaggc

SEQ ID NO: 1029248 - DNA, 25 bp, Homo sapien
gcaggcagcgaagaccagcattgaa

SEQ ID NO: 1029249 - DNA, 25 bp, Homo sapien
cagcgaagaccagcattgaagaatt

SEQ ID NO: 1029250 - DNA, 25 bp, Homo sapien
gagtcgcaggcagcgaagaccagca

SEQ ID NO: 1029251 - DNA, 25 bp, Homo sapien
aatttctcactgaagccactttcag

SEQ ID NO: 1029252 - DNA, 25 bp, Homo sapien
ttctcagcttgcttttccctcccac

SEQ ID NO: 1029253 - DNA, 25 bp, Homo sapien
tgttctcagcttgcttttccctccc

SEQ ID NO: 1029254 - DNA, 25 bp, Homo sapien
gctgttctcagcttgcttttccctc

SEQ ID NO: 1029255 - DNA, 25 bp, Homo sapien
ctagacaaccttgcagctgttctca

SEQ ID NO: 1029256 - DNA, 25 bp, Homo sapien
aggggtagcttccggctccatgctg

SEQ ID NO: 1029257 - DNA, 25 bp, Homo sapien
catcccggaaaaagcaggggaagcg

SEQ ID NO: 1029258 - DNA, 25 bp, Homo sapien
aaaagcaggggaagcggaagctgct

SEQ ID NO: 1029259 - DNA, 25 bp, Homo sapien
aggccctgagagtccccatcccgga

SEQ ID NO: 1029260 - DNA, 25 bp, Homo sapien
ccggggtgaccgcactgggccgagg

SEQ ID NO: 1029261 - DNA, 25 bp, Homo sapien
ccgcactgggccgaggctgttactg

SEQ ID NO: 1029262 - DNA, 25 bp, Homo sapien
tgaccgcactgggccgaggctgtta

SEQ ID NO: 1029263 - DNA, 25 bp, Homo sapien
gggtgaccgcactgggccgaggctg

SEQ ID NO: 1029264 - DNA, 25 bp, Homo sapien
ctgctgtgaacccactggtggaggc

SEQ ID NO: 1029265 - DNA, 25 bp, Homo sapien
ctgtgaacccactggtggaggcccc

SEQ ID NO: 1029266 - DNA, 25 bp, Homo sapien
tgcctctggtgtccatcccgatttc

SEQ ID NO: 1029267 - DNA, 25 bp, Homo sapien
catccgctgggctgtgccttgctgg

SEQ ID NO: 1029268 - DNA, 25 bp, Homo sapien
gaagccacttggccttgattactga

SEQ ID NO: 1029269 - DNA, 25 bp, Homo sapien
tgattactgagcctgtgggtgccct

SEQ ID NO: 1029270 - DNA, 25 bp, Homo sapien
tgaagccacttggccttgattactg

SEQ ID NO: 1029271 - DNA, 25 bp, Homo sapien
ccttgattactgagcctgtgggtgc

SEQ ID NO: 1029272 - DNA, 25 bp, Homo sapien
aaagagcttcctcgagagcccccgg

SEQ ID NO: 1029273 - DNA, 25 bp, Homo sapien
tgcaaccagctgctaacacaaagag

SEQ ID NO: 1029274 - DNA, 25 bp, Homo sapien
aagggtcctttgtcagacaagtcaa

SEQ ID NO: 1029275 - DNA, 25 bp, Homo sapien
ctagctgctgtgtgcaagtccccca

SEQ ID NO: 1029276 - DNA, 25 bp, Homo sapien
tgccaatcacctctaagtcagagac

SEQ ID NO: 1029277 - DNA, 25 bp, Homo sapien
tgccccatctgccaatcacctctaa

SEQ ID NO: 1029278 - DNA, 25 bp, Homo sapien
agtggggtgggccatgactgacagg

SEQ ID NO: 1029279 - DNA, 25 bp, Homo sapien
tgcaggaggagtaacacagtggggt

SEQ ID NO: 1029280 - DNA, 25 bp, Homo sapien
gagtcacagccatgctcccaactga

SEQ ID NO: 1029281 - DNA, 25 bp, Homo sapien
tgcctggttccaggccagagtcaca

SEQ ID NO: 1029282 - DNA, 25 bp, Homo sapien
ctctctgcagccagcgagtgggaag

SEQ ID NO: 1029283 - DNA, 25 bp, Homo sapien
gaagggctttcctcttgcctggttc

SEQ ID NO: 1029284 - DNA, 25 bp, Homo sapien
caagtaaccggggagctcaccaagc

SEQ ID NO: 1029285 - DNA, 25 bp, Homo sapien
cctcagaggtgtatgctgctgtcac

SEQ ID NO: 1029286 - DNA, 25 bp, Homo sapien
ctcagaggtgtatgctgctgtcacc

SEQ ID NO: 1029287 - DNA, 25 bp, Homo sapien
gaagcaggatccaagtaaccgggga

SEQ ID NO: 1029288 - DNA, 25 bp, Homo sapien
agcactgagctcttactggcactgt

SEQ ID NO: 1029289 - DNA, 25 bp, Homo sapien
ggtatatagcactgtcccaaggccc

SEQ ID NO: 1029290 - DNA, 25 bp, Homo sapien
agacccggtgccactgtcaagactg

SEQ ID NO: 1029291 - DNA, 25 bp, Homo sapien
tcttgcacatgggtgggtatatagc

SEQ ID NO: 1029292 - DNA, 25 bp, Homo sapien
tggtagacagcaccacatcgtggga

SEQ ID NO: 1029293 - DNA, 25 bp, Homo sapien
tctccaggagtgaaccagcagaatg

SEQ ID NO: 1029294 - DNA, 25 bp, Homo sapien
tagaagcttactctggacctctctc

SEQ ID NO: 1029295 - DNA, 25 bp, Homo sapien
cgtgggataaatctgtctccttggt

SEQ ID NO: 1029296 - DNA, 25 bp, Homo sapien
taaatctaagtgggcgaaagtgttg

SEQ ID NO: 1029297 - DNA, 25 bp, Homo sapien
ggattctgccccagtacaacgttga

SEQ ID NO: 1029298 - DNA, 25 bp, Homo sapien
tctaagtgggcgaaagtgttgccca

SEQ ID NO: 1029299 - DNA, 25 bp, Homo sapien
tgccccagtacaacgttgatttggt

SEQ ID NO: 1029300 - DNA, 25 bp, Homo sapien
ggcttttgaaactccagtctgagtc

SEQ ID NO: 1029301 - DNA, 25 bp, Homo sapien
gatccaggagtgcttcaatgctgcc

SEQ ID NO: 1029302 - DNA, 25 bp, Homo sapien
cacaaaacctagaaggcgagggctt

SEQ ID NO: 1029303 - DNA, 25 bp, Homo sapien
aatgctgcctgcacctctagttcag

SEQ ID NO: 1029304 - DNA, 25 bp, Homo sapien
tagaccccaaataccctaatggcca

SEQ ID NO: 1029305 - DNA, 25 bp, Homo sapien
ctctctgtcttcatagaccccaaat

SEQ ID NO: 1029306 - DNA, 25 bp, Homo sapien
ttcatagaccccaaataccctaatg

SEQ ID NO: 1029307 - DNA, 25 bp, Homo sapien
tgtcttcatagaccccaaataccct

SEQ ID NO: 1029308 - DNA, 25 bp, Homo sapien
caaattcctgagcactcgtaaggtg

SEQ ID NO: 1029309 - DNA, 25 bp, Homo sapien
actgcacgtgcatgaatccaaacag

SEQ ID NO: 1029310 - DNA, 25 bp, Homo sapien
cagggacgaaccaggccagatcttc

SEQ ID NO: 1029311 - DNA, 25 bp, Homo sapien
tttacccctagagggacttgtgctc

SEQ ID NO: 1029312 - DNA, 25 bp, Homo sapien
ttggtaatggctgcttcacagggag

SEQ ID NO: 1029313 - DNA, 25 bp, Homo sapien
gcttggtaatggctgcttcacaggg

SEQ ID NO: 1029314 - DNA, 25 bp, Homo sapien
agggagcttggtaatggctgcttca

SEQ ID NO: 1029315 - DNA, 25 bp, Homo sapien
ggagcttggtaatggctgcttcaca

SEQ ID NO: 1029316 - DNA, 25 bp, Homo sapien
ctgaatatgtcctgatatttctgct

SEQ ID NO: 1029317 - DNA, 25 bp, Homo sapien
tgccacatccccgaagaacacaaac

SEQ ID NO: 1029318 - DNA, 25 bp, Homo sapien
agtctgcccattccatctgccacat

SEQ ID NO: 1029319 - DNA, 25 bp, Homo sapien
aatatgtcctgatatttctgctgtg

SEQ ID NO: 1029320 - DNA, 25 bp, Homo sapien
ctctggcatctttctttgaaaggtt

SEQ ID NO: 1029321 - DNA, 25 bp, Homo sapien
gcatctttctttgaaaggttttctg

SEQ ID NO: 1029322 - DNA, 25 bp, Homo sapien
tggcatctttctttgaaaggttttc

SEQ ID NO: 1029323 - DNA, 25 bp, Homo sapien
atgctctggcatctttctttgaaag

SEQ ID NO: 1029324 - DNA, 25 bp, Homo sapien
ctcttctatggagaagctcaggggc

SEQ ID NO: 1029325 - DNA, 25 bp, Homo sapien
ttctatggagaagctcaggggctca

SEQ ID NO: 1029326 - DNA, 25 bp, Homo sapien
cttctatggagaagctcaggggctc

SEQ ID NO: 1029327 - DNA, 25 bp, Homo sapien
tcttctatggagaagctcaggggct

SEQ ID NO: 1029328 - DNA, 25 bp, Homo sapien
gcatccgggcatcttgctcacacag

SEQ ID NO: 1029329 - DNA, 25 bp, Homo sapien
atatggctgtcagaaggacctcaga

SEQ ID NO: 1029330 - DNA, 25 bp, Homo sapien
tgagttcgaatcctggtgtcccagc

SEQ ID NO: 1029331 - DNA, 25 bp, Homo sapien
gctcacacaggcaggatttaataaa

SEQ ID NO: 1029332 - DNA, 25 bp, Homo sapien
gacgaagtacacatcttccaagaga

SEQ ID NO: 1029333 - DNA, 25 bp, Homo sapien
gaggcctcggatgctcaaaactgtg

SEQ ID NO: 1029334 - DNA, 25 bp, Homo sapien
acggtgtgtaaggacgaagtacaca

SEQ ID NO: 1029335 - DNA, 25 bp, Homo sapien
cacatcagactcgaaacggtgtgta

SEQ ID NO: 1029336 - DNA, 25 bp, Homo sapien
agaagacgtccaggccactacgaaa

SEQ ID NO: 1029337 - DNA, 25 bp, Homo sapien
cagccacacgctgtcagtggcaggg

SEQ ID NO: 1029338 - DNA, 25 bp, Homo sapien
atcggtgggccctccctagagaaga

SEQ ID NO: 1029339 - DNA, 25 bp, Homo sapien
tgtttttcttgctccacgcccggtc

SEQ ID NO: 1029340 - DNA, 25 bp, Homo sapien
aggaggccttccagcgggctcctcc

SEQ ID NO: 1029341 - DNA, 25 bp, Homo sapien
caggaggccttccagcgggctcctc

SEQ ID NO: 1029342 - DNA, 25 bp, Homo sapien
ttgttctaatacaggccttgcagcc

SEQ ID NO: 1029343 - DNA, 25 bp, Homo sapien
tcttccagaggttttcacctgagca

SEQ ID NO: 1029344 - DNA, 25 bp, Homo sapien
cagacacttccacgggagtctccgt

SEQ ID NO: 1029345 - DNA, 25 bp, Homo sapien
ccagaagcatccgctcttccagagg

SEQ ID NO: 1029346 - DNA, 25 bp, Homo sapien
gatcaacaggctcccggcccacatc

SEQ ID NO: 1029347 - DNA, 25 bp, Homo sapien
gagggatcaacaggctcccggccca

SEQ ID NO: 1029348 - DNA, 25 bp, Homo sapien
agagggatcaacaggctcccggccc

SEQ ID NO: 1029349 - DNA, 25 bp, Homo sapien
gggatcaacaggctcccggcccaca

SEQ ID NO: 1029350 - DNA, 25 bp, Homo sapien
catccctgtgatattgcagcagctg

SEQ ID NO: 1029351 - DNA, 25 bp, Homo sapien
tccctgtgatattgcagcagctgca

SEQ ID NO: 1029352 - DNA, 25 bp, Homo sapien
gggtgatgacgttctctgaggaact

SEQ ID NO: 1029353 - DNA, 25 bp, Homo sapien
tcacgggtgatgacgttctctgagg

SEQ ID NO: 1029354 - DNA, 25 bp, Homo sapien
aggagataagtgacccccgccccat

SEQ ID NO: 1029355 - DNA, 25 bp, Homo sapien
ggatgtcggattcaggctgcctgcc

SEQ ID NO: 1029356 - DNA, 25 bp, Homo sapien
cagggatgtcggattcaggctgcct

SEQ ID NO: 1029357 - DNA, 25 bp, Homo sapien
ccacccgcagggatgtcggattcag

SEQ ID NO: 1029358 - DNA, 25 bp, Homo sapien
gaggctccagggtaaaccagacgct

SEQ ID NO: 1029359 - DNA, 25 bp, Homo sapien
ccctctggaggaaggttctctcgca

SEQ ID NO: 1029360 - DNA, 25 bp, Homo sapien
tgctaaagtcggctccctctggagg

SEQ ID NO: 1029361 - DNA, 25 bp, Homo sapien
aagtgctcgttgtaccccgagaggg

SEQ ID NO: 1029362 - DNA, 25 bp, Homo sapien
aagtcattgacttggagtttcagaa

SEQ ID NO: 1029363 - DNA, 25 bp, Homo sapien
cacattaagaatctgaccctgaaga

SEQ ID NO: 1029364 - DNA, 25 bp, Homo sapien
gactctttagctggggataaggact

SEQ ID NO: 1029365 - DNA, 25 bp, Homo sapien
cctgaagactctttagctggggata

SEQ ID NO: 1029366 - DNA, 25 bp, Homo sapien
tgtatcttaggtctaatagagagtg

SEQ ID NO: 1029367 - DNA, 25 bp, Homo sapien
taggtctaatagagagtgagagaag

SEQ ID NO: 1029368 - DNA, 25 bp, Homo sapien
tcaatgtatcttaggtctaatagag

SEQ ID NO: 1029369 - DNA, 25 bp, Homo sapien
ctaatagagagtgagagaaggattt

SEQ ID NO: 1029370 - DNA, 25 bp, Homo sapien
actctccaggcttttcttggtgctc

SEQ ID NO: 1029371 - DNA, 25 bp, Homo sapien
ctcccccactctccaggcttttctt

SEQ ID NO: 1029372 - DNA, 25 bp, Homo sapien
gtggccctcagagagggagcctcct

SEQ ID NO: 1029373 - DNA, 25 bp, Homo sapien
ggccctcagagagggagcctcctcc

SEQ ID NO: 1029374 - DNA, 25 bp, Homo sapien
gagcagcagaaacagcccagagcag

SEQ ID NO: 1029375 - DNA, 25 bp, Homo sapien
gcagaaacagcccagagcagcaaaa

SEQ ID NO: 1029376 - DNA, 25 bp, Homo sapien
ccgatgtggggggagcagcagaaac

SEQ ID NO: 1029377 - DNA, 25 bp, Homo sapien
tgccgatgtggggggagcagcagaa

SEQ ID NO: 1029378 - DNA, 25 bp, Homo sapien
agaaccggaaccaccgtgagaagtg

SEQ ID NO: 1029379 - DNA, 25 bp, Homo sapien
tgggagaaccggaaccaccgtgaga

SEQ ID NO: 1029380 - DNA, 25 bp, Homo sapien
tgtgcgataacacactgggagaacc

SEQ ID NO: 1029381 - DNA, 25 bp, Homo sapien
catgagcagctgtgcgataacacac

SEQ ID NO: 1029382 - DNA, 25 bp, Homo sapien
catgcactctgcctgtcggaagacg

SEQ ID NO: 1029383 - DNA, 25 bp, Homo sapien
ccatgcatgcactctgcctgtcgga

SEQ ID NO: 1029384 - DNA, 25 bp, Homo sapien
aattcaggagcgtgtccacattccc

SEQ ID NO: 1029385 - DNA, 25 bp, Homo sapien
acattccccatgcatgcactctgcc

SEQ ID NO: 1029386 - DNA, 25 bp, Homo sapien
agggtaccgtcagctcgcagctcct

SEQ ID NO: 1029387 - DNA, 25 bp, Homo sapien
tctgctccactcttccaccagaggg

SEQ ID NO: 1029388 - DNA, 25 bp, Homo sapien
cagagggtaccgtcagctcgcagct

SEQ ID NO: 1029389 - DNA, 25 bp, Homo sapien
ttccaccagagggtaccgtcagctc

SEQ ID NO: 1029390 - DNA, 25 bp, Homo sapien
gctcctggtgctcatcctccgtggg

SEQ ID NO: 1029391 - DNA, 25 bp, Homo sapien
gtgctcctggtgctcatcctccgtg

SEQ ID NO: 1029392 - DNA, 25 bp, Homo sapien
agtgctcctggtgctcatcctccgt

SEQ ID NO: 1029393 - DNA, 25 bp, Homo sapien
tcctggtgctcatcctccgtgggcc

SEQ ID NO: 1029394 - DNA, 25 bp, Homo sapien
ttcaagggagaagggcttagcgtac

SEQ ID NO: 1029395 - DNA, 25 bp, Homo sapien
cttagcgtacagttggtgggtcacc

SEQ ID NO: 1029396 - DNA, 25 bp, Homo sapien
tcaaggagtaggtgaaatttcgtta

SEQ ID NO: 1029397 - DNA, 25 bp, Homo sapien
catgaattctgtggcgagaagggca

SEQ ID NO: 1029398 - DNA, 25 bp, Homo sapien
ttgcctttgatttggcatttccgaa

SEQ ID NO: 1029399 - DNA, 25 bp, Homo sapien
catttccgaacaatcactgggagaa

SEQ ID NO: 1029400 - DNA, 25 bp, Homo sapien
cctttgatttggcatttccgaacaa

SEQ ID NO: 1029401 - DNA, 25 bp, Homo sapien
gatttggcatttccgaacaatcact

SEQ ID NO: 1029402 - DNA, 25 bp, Homo sapien
gtctttcacaacacacgatgacaac

SEQ ID NO: 1029403 - DNA, 25 bp, Homo sapien
tcacaacacacgatgacaacagctc

SEQ ID NO: 1029404 - DNA, 25 bp, Homo sapien
ggtcccttgtgaacacaatgtgtct

SEQ ID NO: 1029405 - DNA, 25 bp, Homo sapien
ttcacgggggtcattgcatccaggt

SEQ ID NO: 1029406 - DNA, 25 bp, Homo sapien
caagacagaagcagcccccggagct

SEQ ID NO: 1029407 - DNA, 25 bp, Homo sapien
agcccgttggctggagatatccttc

SEQ ID NO: 1029408 - DNA, 25 bp, Homo sapien
cggagcccgttggctggagatatcc

SEQ ID NO: 1029409 - DNA, 25 bp, Homo sapien
ccaagacagaagcagcccccggagc

SEQ ID NO: 1029410 - DNA, 25 bp, Homo sapien
ccaatgcactgtccgtccaacagaa

SEQ ID NO: 1029411 - DNA, 25 bp, Homo sapien
actgtccgtccaacagaagacctgc

SEQ ID NO: 1029412 - DNA, 25 bp, Homo sapien
ccccaccaatgcactgtccgtccaa

SEQ ID NO: 1029413 - DNA, 25 bp, Homo sapien
gcagagtccgggttggacccagccc

SEQ ID NO: 1029414 - DNA, 25 bp, Homo sapien
acatctgagagctggatgggcccaa

SEQ ID NO: 1029415 - DNA, 25 bp, Homo sapien
ctgttctcggtgacatctgagagct

SEQ ID NO: 1029416 - DNA, 25 bp, Homo sapien
cctgttctcggtgacatctgagagc

SEQ ID NO: 1029417 - DNA, 25 bp, Homo sapien
gagagctggatgggcccaattcctc

SEQ ID NO: 1029418 - DNA, 25 bp, Homo sapien
tggaatcggatacgtgagtgcagcc

SEQ ID NO: 1029419 - DNA, 25 bp, Homo sapien
gccgcatgtccactgttttaatggc

SEQ ID NO: 1029420 - DNA, 25 bp, Homo sapien
aagccagctggaatcggatacgtga

SEQ ID NO: 1029421 - DNA, 25 bp, Homo sapien
gatacgtgagtgcagccgcatgtcc

SEQ ID NO: 1029422 - DNA, 25 bp, Homo sapien
cagagaagggcggtgcagttctgca

SEQ ID NO: 1029423 - DNA, 25 bp, Homo sapien
ggagccggcccagagaagggcggtg

SEQ ID NO: 1029424 - DNA, 25 bp, Homo sapien
gagaagggcggtgcagttctgcagg

SEQ ID NO: 1029425 - DNA, 25 bp, Homo sapien
cggcccagagaagggcggtgcagtt

SEQ ID NO: 1029426 - DNA, 25 bp, Homo sapien
tccaaatgattacactagttctcca

SEQ ID NO: 1029427 - DNA, 25 bp, Homo sapien
aatgattacactagttctccagcaa

SEQ ID NO: 1029428 - DNA, 25 bp, Homo sapien
cagaaatgaagccattcgactgaac

SEQ ID NO: 1029429 - DNA, 25 bp, Homo sapien
gccattcgactgaacccaattttta

SEQ ID NO: 1029430 - DNA, 25 bp, Homo sapien
gcaaatgaaaccagacaaaagagta

SEQ ID NO: 1029431 - DNA, 25 bp, Homo sapien
gaatgaatctcaggcacataacact

SEQ ID NO: 1029432 - DNA, 25 bp, Homo sapien
tctgtgatggtagaagtctcattgg

SEQ ID NO: 1029433 - DNA, 25 bp, Homo sapien
tgtagtggtcacatgggcatatgca

SEQ ID NO: 1029434 - DNA, 25 bp, Homo sapien
tgtggccccacaatctggaacgtgc

SEQ ID NO: 1029435 - DNA, 25 bp, Homo sapien
gccccacaatctggaacgtgcggct

SEQ ID NO: 1029436 - DNA, 25 bp, Homo sapien
tcatgtggccccacaatctggaacg

SEQ ID NO: 1029437 - DNA, 25 bp, Homo sapien
acaatctggaacgtgcggctcccat

SEQ ID NO: 1029438 - DNA, 25 bp, Homo sapien
tgcccatcagttacaacagcatcag

SEQ ID NO: 1029439 - DNA, 25 bp, Homo sapien
cccatcagttacaacagcatcagct

SEQ ID NO: 1029440 - DNA, 25 bp, Homo sapien
ctctgcccatcagttacaacagcat

SEQ ID NO: 1029441 - DNA, 25 bp, Homo sapien
atcagttacaacagcatcagcttct

SEQ ID NO: 1029442 - DNA, 25 bp, Homo sapien
taaagacaacttcaggcaattggag

SEQ ID NO: 1029443 - DNA, 25 bp, Homo sapien
caatcggcaatctgcaggccaggga

SEQ ID NO: 1029444 - DNA, 25 bp, Homo sapien
gagtaattcaggagactgggattgt

SEQ ID NO: 1029445 - DNA, 25 bp, Homo sapien
gagaacctgcttggataaagacaac

SEQ ID NO: 1029446 - DNA, 25 bp, Homo sapien
atgaacctcgggcaaagccatattt

SEQ ID NO: 1029447 - DNA, 25 bp, Homo sapien
cgccatgaacctcgggcaaagccat

SEQ ID NO: 1029448 - DNA, 25 bp, Homo sapien
gaccgccatgaacctcgggcaaagc

SEQ ID NO: 1029449 - DNA, 25 bp, Homo sapien
ggtggaccgccatgaacctcgggca

SEQ ID NO: 1029450 - DNA, 25 bp, Homo sapien
tgtgtcacccacatgatgcacacac

SEQ ID NO: 1029451 - DNA, 25 bp, Homo sapien
gggcaagccttgagtctccacattc

SEQ ID NO: 1029452 - DNA, 25 bp, Homo sapien
actgggcaagccttgagtctccaca

SEQ ID NO: 1029453 - DNA, 25 bp, Homo sapien
ctgggcaagccttgagtctccacat

SEQ ID NO: 1029454 - DNA, 25 bp, Homo sapien
tgggcaagccttgagtctccacatt

SEQ ID NO: 1029455 - DNA, 25 bp, Homo sapien
gacaggacagcagccctcatgacac

SEQ ID NO: 1029456 - DNA, 25 bp, Homo sapien
gtgaggacaggacagcagccctcat

SEQ ID NO: 1029457 - DNA, 25 bp, Homo sapien
aggacaggacagcagccctcatgac

SEQ ID NO: 1029458 - DNA, 25 bp, Homo sapien
tcatctcggctgtgaggacaggaca

SEQ ID NO: 1029459 - DNA, 25 bp, Homo sapien
tcacactggtggcgggggaaagaaa

SEQ ID NO: 1029460 - DNA, 25 bp, Homo sapien
gtacatgtgcccagcgtgcaggtta

SEQ ID NO: 1029461 - DNA, 25 bp, Homo sapien
atgctctccctgcccccacccaccc

SEQ ID NO: 1029462 - DNA, 25 bp, Homo sapien
atgtgcccagcgtgcaggttagtta

SEQ ID NO: 1029463 - DNA, 25 bp, Homo sapien
tacatgtgcccagcgtgcaggttag

SEQ ID NO: 1029464 - DNA, 25 bp, Homo sapien
gaaatgaacgcccttcatcctttat

SEQ ID NO: 1029465 - DNA, 25 bp, Homo sapien
agttgtcagcaagatcctcttttga

SEQ ID NO: 1029466 - DNA, 25 bp, Homo sapien
cagaccaaagctctggaagttgcag

SEQ ID NO: 1029467 - DNA, 25 bp, Homo sapien
gttttatttggtggctgaaacttgc

SEQ ID NO: 1029468 - DNA, 25 bp, Homo sapien
tgcagtgccgagttttgactctgag

SEQ ID NO: 1029469 - DNA, 25 bp, Homo sapien
cactttcgcggggccagacaccagc

SEQ ID NO: 1029470 - DNA, 25 bp, Homo sapien
gcacgctgcagtgccgagttttgac

SEQ ID NO: 1029471 - DNA, 25 bp, Homo sapien
cgctgcagtgccgagttttgactct

SEQ ID NO: 1029472 - DNA, 25 bp, Homo sapien
gtgcacctgttttcgaggcaatgct

SEQ ID NO: 1029473 - DNA, 25 bp, Homo sapien
cctgagaggtccagtgtgcacctgt

SEQ ID NO: 1029474 - DNA, 25 bp, Homo sapien
aatgctaacatctggtagctctggg

SEQ ID NO: 1029475 - DNA, 25 bp, Homo sapien
ttcagagtcatcagactgggctcca

SEQ ID NO: 1029476 - DNA, 25 bp, Homo sapien
gggccctcctggcttcgacactcct

SEQ ID NO: 1029477 - DNA, 25 bp, Homo sapien
cctttctttgtgtttcgaggcactg

SEQ ID NO: 1029478 - DNA, 25 bp, Homo sapien
ttctttgtgtttcgaggcactgtcc

SEQ ID NO: 1029479 - DNA, 25 bp, Homo sapien
ccctcctggcttcgacactccttca

SEQ ID NO: 1029480 - DNA, 25 bp, Homo sapien
gagatgttcaaaagcaggccggact

SEQ ID NO: 1029481 - DNA, 25 bp, Homo sapien
cagacgggcttttcctcggaaggat

SEQ ID NO: 1029482 - DNA, 25 bp, Homo sapien
tcttgcttcccatgcagcacgtggc

SEQ ID NO: 1029483 - DNA, 25 bp, Homo sapien
ggcgataacagccagacgggctttt

SEQ ID NO: 1029484 - DNA, 25 bp, Homo sapien
tattttaatgacaaccacaggcttt

SEQ ID NO: 1029485 - DNA, 25 bp, Homo sapien
taatgacaaccacaggctttgcggc

SEQ ID NO: 1029486 - DNA, 25 bp, Homo sapien
tgcggcaaagtttaccccctgtaga

SEQ ID NO: 1029487 - DNA, 25 bp, Homo sapien
atgacaaccacaggctttgcggcaa

SEQ ID NO: 1029488 - DNA, 25 bp, Homo sapien
cagggtggtgatccgagccaaaatc

SEQ ID NO: 1029489 - DNA, 25 bp, Homo sapien
ccgagccaaaatcgcggaaatagta

SEQ ID NO: 1029490 - DNA, 25 bp, Homo sapien
caaaatcgcggaaatagtatgcgct

SEQ ID NO: 1029491 - DNA, 25 bp, Homo sapien
cggaaatagtatgcgctcggcatcc

SEQ ID NO: 1029492 - DNA, 25 bp, Homo sapien
ggccatctgttaacagccgccgcag

SEQ ID NO: 1029493 - DNA, 25 bp, Homo sapien
tcctgagctgcggaaagctgcctca

SEQ ID NO: 1029494 - DNA, 25 bp, Homo sapien
agctgcggaaagctgcctcaaccat

SEQ ID NO: 1029495 - DNA, 25 bp, Homo sapien
gccgccgcagtgagcggcatcctga

SEQ ID NO: 1029496 - DNA, 25 bp, Homo sapien
aggtgaatgaagagatatctcttgg

SEQ ID NO: 1029497 - DNA, 25 bp, Homo sapien
aatgaagagatatctcttggctgca

SEQ ID NO: 1029498 - DNA, 25 bp, Homo sapien
ggtgaatgaagagatatctcttggc

SEQ ID NO: 1029499 - DNA, 25 bp, Homo sapien
tgaatgaagagatatctcttggctg

SEQ ID NO: 1029500 - DNA, 25 bp, Homo sapien
agcccaatcagggactggttgtctt

SEQ ID NO: 1029501 - DNA, 25 bp, Homo sapien
ctaggtgaccatcctgctaggacac

SEQ ID NO: 1029502 - DNA, 25 bp, Homo sapien
ccaatcagggactggttgtcttcaa

SEQ ID NO: 1029503 - DNA, 25 bp, Homo sapien
ctaggacactcgtgggtttcactgg

SEQ ID NO: 1029504 - DNA, 25 bp, Homo sapien
ggcttgcaaaacaggggacaactgc

SEQ ID NO: 1029505 - DNA, 25 bp, Homo sapien
ccaggatgtcctcgcagcacaaggg

SEQ ID NO: 1029506 - DNA, 25 bp, Homo sapien
agcacaagggggcttgcaaaacagg

SEQ ID NO: 1029507 - DNA, 25 bp, Homo sapien
tgtcctcgcagcacaagggggcttg

SEQ ID NO: 1029508 - DNA, 25 bp, Homo sapien
cagcacacggaggcttcattgctca

SEQ ID NO: 1029509 - DNA, 25 bp, Homo sapien
agcacacggaggcttcattgctcac

SEQ ID NO: 1029510 - DNA, 25 bp, Homo sapien
tcagcacacggaggcttcattgctc

SEQ ID NO: 1029511 - DNA, 25 bp, Homo sapien
gccctgactccacttgggaaaatga

SEQ ID NO: 1029512 - DNA, 25 bp, Homo sapien
ttttgccatgaacagcggggctcga

SEQ ID NO: 1029513 - DNA, 25 bp, Homo sapien
ggctcgaagtttatgcttccgagca

SEQ ID NO: 1029514 - DNA, 25 bp, Homo sapien
tgggctgggcatcaatcctcaactc

SEQ ID NO: 1029515 - DNA, 25 bp, Homo sapien
gcccctccagggagaacgatggccc

SEQ ID NO: 1029516 - DNA, 25 bp, Homo sapien
ccctccagggagaacgatggcccag

SEQ ID NO: 1029517 - DNA, 25 bp, Homo sapien
cctccagggagaacgatggcccagg

SEQ ID NO: 1029518 - DNA, 25 bp, Homo sapien
cccctccagggagaacgatggccca

SEQ ID NO: 1029519 - DNA, 25 bp, Homo sapien
aggacatgacctcagtggccttcaa

SEQ ID NO: 1029520 - DNA, 25 bp, Homo sapien
cagacccaggaggacatgacctcag

SEQ ID NO: 1029521 - DNA, 25 bp, Homo sapien
aaagtcctgtctcctgaggaaagcc

SEQ ID NO: 1029522 - DNA, 25 bp, Homo sapien
ccttcaatgcacaaggctctttctt

SEQ ID NO: 1029523 - DNA, 25 bp, Homo sapien
ctggggactcctggatgtcagcccc

SEQ ID NO: 1029524 - DNA, 25 bp, Homo sapien
ggatgtcagccccaagttgctggtt

SEQ ID NO: 1029525 - DNA, 25 bp, Homo sapien
gactcctggatgtcagccccaagtt

SEQ ID NO: 1029526 - DNA, 25 bp, Homo sapien
aagttgctggttcattttctggttc

SEQ ID NO: 1029527 - DNA, 25 bp, Homo sapien
gtaaatgtagatgaatttgtgtcca

SEQ ID NO: 1029528 - DNA, 25 bp, Homo sapien
aatgtagatgaatttgtgtccagcc

SEQ ID NO: 1029529 - DNA, 25 bp, Homo sapien
tgtagatgaatttgtgtccagccgc

SEQ ID NO: 1029530 - DNA, 25 bp, Homo sapien
agatgaatttgtgtccagccgcttc

SEQ ID NO: 1029531 - DNA, 25 bp, Homo sapien
tcaggagccacacgtggcagtagtt

SEQ ID NO: 1029532 - DNA, 25 bp, Homo sapien
gaaagggctgtgtgaaggtattggg

SEQ ID NO: 1029533 - DNA, 25 bp, Homo sapien
agcgacacccatggagggaaagggc

SEQ ID NO: 1029534 - DNA, 25 bp, Homo sapien
tagttttagggccagcgacacccat

SEQ ID NO: 1029535 - DNA, 25 bp, Homo sapien
gatggtcaggccgttaacagtctct

SEQ ID NO: 1029536 - DNA, 25 bp, Homo sapien
tggcagagtttaaccggcgcatgac

SEQ ID NO: 1029537 - DNA, 25 bp, Homo sapien
tgacctcctaagtacattgcgctgg

SEQ ID NO: 1029538 - DNA, 25 bp, Homo sapien
gactgtcactcaaatggatctgcct

SEQ ID NO: 1029539 - DNA, 25 bp, Homo sapien
ctaaacgaaaagaaggcgctccgtg

SEQ ID NO: 1029540 - DNA, 25 bp, Homo sapien
ctctaaacgaaaagaaggcgctccg

SEQ ID NO: 1029541 - DNA, 25 bp, Homo sapien
tgctctaaacgaaaagaaggcgctc

SEQ ID NO: 1029542 - DNA, 25 bp, Homo sapien
caatgctctaaacgaaaagaaggcg

SEQ ID NO: 1029543 - DNA, 25 bp, Homo sapien
cataggatgcttctaatgtggagac

SEQ ID NO: 1029544 - DNA, 25 bp, Homo sapien
tcagtacgattccaaatgtgtgggt

SEQ ID NO: 1029545 - DNA, 25 bp, Homo sapien
aagactcatgacctcatgcaggagg

SEQ ID NO: 1029546 - DNA, 25 bp, Homo sapien
ggcatgatgtgatatcctcaacaat

SEQ ID NO: 1029547 - DNA, 25 bp, Homo sapien
cacttgccaagtccaataggcatga

SEQ ID NO: 1029548 - DNA, 25 bp, Homo sapien
tcctggagaccttgtgcatcctgta

SEQ ID NO: 1029549 - DNA, 25 bp, Homo sapien
cctggagaccttgtgcatcctgtat

SEQ ID NO: 1029550 - DNA, 25 bp, Homo sapien
ctcctggagaccttgtgcatcctgt

SEQ ID NO: 1029551 - DNA, 25 bp, Homo sapien
caagcgacagtgacaaaagccctaa

SEQ ID NO: 1029552 - DNA, 25 bp, Homo sapien
gaaatgatgctccaggtgctcacgt

SEQ ID NO: 1029553 - DNA, 25 bp, Homo sapien
tatctcgccgagaactaatgccctt

SEQ ID NO: 1029554 - DNA, 25 bp, Homo sapien
taggacatttccgttgaccaagtgc

SEQ ID NO: 1029555 - DNA, 25 bp, Homo sapien
gagcctgagaggtcttccgacctgg

SEQ ID NO: 1029556 - DNA, 25 bp, Homo sapien
gggagaggttactgtcaggataaac

SEQ ID NO: 1029557 - DNA, 25 bp, Homo sapien
ggtcagcctccctagaaacagagcc

SEQ ID NO: 1029558 - DNA, 25 bp, Homo sapien
tccagctaggagcattgtcagcagg

SEQ ID NO: 1029559 - DNA, 25 bp, Homo sapien
gagtctccccagtataggcttcccg

SEQ ID NO: 1029560 - DNA, 25 bp, Homo sapien
tcggacgtcaaagatcaaggcgtgg

SEQ ID NO: 1029561 - DNA, 25 bp, Homo sapien
agaggtcaggttcctagggctgcca

SEQ ID NO: 1029562 - DNA, 25 bp, Homo sapien
tcatagttcttgaggtcggacgtca

SEQ ID NO: 1029563 - DNA, 25 bp, Homo sapien
agaggcaacgggccctttgcacagg

SEQ ID NO: 1029564 - DNA, 25 bp, Homo sapien
ttttgaaaacatgaccagatcgctg

SEQ ID NO: 1029565 - DNA, 25 bp, Homo sapien
acatgaccagatcgctgcagagaga

SEQ ID NO: 1029566 - DNA, 25 bp, Homo sapien
cagagaggagtcatcacaaggggcc

SEQ ID NO: 1029567 - DNA, 25 bp, Homo sapien
ttggtggcaacaggtaaaggtgtct

SEQ ID NO: 1029568 - DNA, 25 bp, Homo sapien
gtggcaacaggtaaaggtgtctcat

SEQ ID NO: 1029569 - DNA, 25 bp, Homo sapien
tggtggcaacaggtaaaggtgtctc

SEQ ID NO: 1029570 - DNA, 25 bp, Homo sapien
ggtggcaacaggtaaaggtgtctca

SEQ ID NO: 1029571 - DNA, 25 bp, Homo sapien
ttttcatccaaattgaggatctgag

SEQ ID NO: 1029572 - DNA, 25 bp, Homo sapien
acccagcaggtcccttttggagcaa

SEQ ID NO: 1029573 - DNA, 25 bp, Homo sapien
gggactgcagatgcgtcacactgga

SEQ ID NO: 1029574 - DNA, 25 bp, Homo sapien
cccatgggactgcagatgcgtcaca

SEQ ID NO: 1029575 - DNA, 25 bp, Homo sapien
catacatttgggagatactgactct

SEQ ID NO: 1029576 - DNA, 25 bp, Homo sapien
tgtcatgaagacacatcccacggct

SEQ ID NO: 1029577 - DNA, 25 bp, Homo sapien
aggattcagaggcactgccattcct

SEQ ID NO: 1029578 - DNA, 25 bp, Homo sapien
gactctctggtccaattgcaccagg

SEQ ID NO: 1029579 - DNA, 25 bp, Homo sapien
tatcatccccgttttctgatgagga

SEQ ID NO: 1029580 - DNA, 25 bp, Homo sapien
ggatgctggcgtctgaaagtttgaa

SEQ ID NO: 1029581 - DNA, 25 bp, Homo sapien
tgctggcgtctgaaagtttgaaaaa

SEQ ID NO: 1029582 - DNA, 25 bp, Homo sapien
atccccgttttctgatgaggatgct

SEQ ID NO: 1029583 - DNA, 25 bp, Homo sapien
cagttcctcactgtagcagctgatg

SEQ ID NO: 1029584 - DNA, 25 bp, Homo sapien
tcacagttcctcactgtagcagctg

SEQ ID NO: 1029585 - DNA, 25 bp, Homo sapien
agttcctcactgtagcagctgatgg

SEQ ID NO: 1029586 - DNA, 25 bp, Homo sapien
cacagttcctcactgtagcagctga

SEQ ID NO: 1029587 - DNA, 25 bp, Homo sapien
ttgcattgcccactccccaacgctg

SEQ ID NO: 1029588 - DNA, 25 bp, Homo sapien
ttgcgtgtccatcaatccatgcaca

SEQ ID NO: 1029589 - DNA, 25 bp, Homo sapien
tctttgcgtgtccatcaatccatgc

SEQ ID NO: 1029590 - DNA, 25 bp, Homo sapien
catgctccattccttgcattgccca

SEQ ID NO: 1029591 - DNA, 25 bp, Homo sapien
tccaggtttcgattgttgaatggga

SEQ ID NO: 1029592 - DNA, 25 bp, Homo sapien
ttctccaggtttcgattgttgaatg

SEQ ID NO: 1029593 - DNA, 25 bp, Homo sapien
tttcgattgttgaatgggagaggct

SEQ ID NO: 1029594 - DNA, 25 bp, Homo sapien
caggtttcgattgttgaatgggaga

SEQ ID NO: 1029595 - DNA, 25 bp, Homo sapien
gtgagacgatacctccgggacaact

SEQ ID NO: 1029596 - DNA, 25 bp, Homo sapien
gagacgatacctccgggacaacttg

SEQ ID NO: 1029597 - DNA, 25 bp, Homo sapien
aggtgagacgatacctccgggacaa

SEQ ID NO: 1029598 - DNA, 25 bp, Homo sapien
caggtgagacgatacctccgggaca

SEQ ID NO: 1029599 - DNA, 25 bp, Homo sapien
ccaaagctgtcgtggtgacgatggt

SEQ ID NO: 1029600 - DNA, 25 bp, Homo sapien
tggccaaagctgtcgtggtgacgat

SEQ ID NO: 1029601 - DNA, 25 bp, Homo sapien
gctatccctcccgttttctccgcca

SEQ ID NO: 1029602 - DNA, 25 bp, Homo sapien
tggaccaagcatcctcggcagagat

SEQ ID NO: 1029603 - DNA, 25 bp, Homo sapien
ggagcacggcatccatttcctctgg

SEQ ID NO: 1029604 - DNA, 25 bp, Homo sapien
gagtcttatggagcacggcatccat

SEQ ID NO: 1029605 - DNA, 25 bp, Homo sapien
ctctgagtcttatggagcacggcat

SEQ ID NO: 1029606 - DNA, 25 bp, Homo sapien
tttcctctggtctccatcaatgttc

SEQ ID NO: 1029607 - DNA, 25 bp, Homo sapien
ttaatcctcagtcaaaatcccttcg

SEQ ID NO: 1029608 - DNA, 25 bp, Homo sapien
cctggacgtgtagtcaaagacacat

SEQ ID NO: 1029609 - DNA, 25 bp, Homo sapien
cccttcgcttggttccctggacgtg

SEQ ID NO: 1029610 - DNA, 25 bp, Homo sapien
cagtcaaaatcccttcgcttggttc

SEQ ID NO: 1029611 - DNA, 25 bp, Homo sapien
tgtgactttcctttcagacacactg

SEQ ID NO: 1029612 - DNA, 25 bp, Homo sapien
ctgtgactttcctttcagacacact

SEQ ID NO: 1029613 - DNA, 25 bp, Homo sapien
ctccagagtccaagctgaggatgca

SEQ ID NO: 1029614 - DNA, 25 bp, Homo sapien
cctggaaggctggtgcacctcgatt

SEQ ID NO: 1029615 - DNA, 25 bp, Homo sapien
gaatgatgcattcttcccagtaaaa

SEQ ID NO: 1029616 - DNA, 25 bp, Homo sapien
tcacgacctgccctcgaatgatgca

SEQ ID NO: 1029617 - DNA, 25 bp, Homo sapien
gatgacggtattgcagctcctttga

SEQ ID NO: 1029618 - DNA, 25 bp, Homo sapien
ctcaggcctcttgacgggctggatg

SEQ ID NO: 1029619 - DNA, 25 bp, Homo sapien
gactcaggcctcttgacgggctgga

SEQ ID NO: 1029620 - DNA, 25 bp, Homo sapien
cctcttgacgggctggatggtatcg

SEQ ID NO: 1029621 - DNA, 25 bp, Homo sapien
tcttgacgggctggatggtatcgaa

SEQ ID NO: 1029622 - DNA, 25 bp, Homo sapien
tttgtaaataggagcaagcgtggag

SEQ ID NO: 1029623 - DNA, 25 bp, Homo sapien
aactttttgtaaataggagcaagcg

SEQ ID NO: 1029624 - DNA, 25 bp, Homo sapien
gctgcacgtctttcccgttctgcaa

SEQ ID NO: 1029625 - DNA, 25 bp, Homo sapien
tctggaaagagctgcacgtctttcc

SEQ ID NO: 1029626 - DNA, 25 bp, Homo sapien
attgctgtctcctcttctgcagaag

SEQ ID NO: 1029627 - DNA, 25 bp, Homo sapien
tctcctcttctgcagaagcacttcc

SEQ ID NO: 1029628 - DNA, 25 bp, Homo sapien
ctgtctcctcttctgcagaagcact

SEQ ID NO: 1029629 - DNA, 25 bp, Homo sapien
tcctcttctgcagaagcacttcctc

SEQ ID NO: 1029630 - DNA, 25 bp, Homo sapien
tgagcagcaaatgcccctccaatgt

SEQ ID NO: 1029631 - DNA, 25 bp, Homo sapien
ggccttcatgttgtgatcgatcaaa

SEQ ID NO: 1029632 - DNA, 25 bp, Homo sapien
tatgcatcaaacatggcagctccgt

SEQ ID NO: 1029633 - DNA, 25 bp, Homo sapien
gccagactttagagcagagtgcctg

SEQ ID NO: 1029634 - DNA, 25 bp, Homo sapien
tcataaccgtcaaaactgtcctgtc

SEQ ID NO: 1029635 - DNA, 25 bp, Homo sapien
cttgatagatgggttgctcgcatga

SEQ ID NO: 1029636 - DNA, 25 bp, Homo sapien
caggagtgggcatgccagtttgcca

SEQ ID NO: 1029637 - DNA, 25 bp, Homo sapien
aaagtcagatctcggtcccagtcca

SEQ ID NO: 1029638 - DNA, 25 bp, Homo sapien
ggctctgtgagctcttgtctccact

SEQ ID NO: 1029639 - DNA, 25 bp, Homo sapien
catcctgcggaaggctctgtgagct

SEQ ID NO: 1029640 - DNA, 25 bp, Homo sapien
tctcatcctgcggaaggctctgtga

SEQ ID NO: 1029641 - DNA, 25 bp, Homo sapien
atgctctcatcctgcggaaggctct

SEQ ID NO: 1029642 - DNA, 25 bp, Homo sapien
aactttctccagcaccaggtcagac

SEQ ID NO: 1029643 - DNA, 25 bp, Homo sapien
ctgcaactttctccagcaccaggtc

SEQ ID NO: 1029644 - DNA, 25 bp, Homo sapien
caactttctccagcaccaggtcaga

SEQ ID NO: 1029645 - DNA, 25 bp, Homo sapien
ctcctggtcttcactgcaactttct

SEQ ID NO: 1029646 - DNA, 25 bp, Homo sapien
cttttttgaacacaagacactattt

SEQ ID NO: 1029647 - DNA, 25 bp, Homo sapien
ccttttttgaacacaagacactatt

SEQ ID NO: 1029648 - DNA, 25 bp, Homo sapien
agctgggttgggcacacgtggacat

SEQ ID NO: 1029649 - DNA, 25 bp, Homo sapien
tgtgtgcctatggtttgtgcactat

SEQ ID NO: 1029650 - DNA, 25 bp, Homo sapien
cgtggacatgttcaattcctgataa

SEQ ID NO: 1029651 - DNA, 25 bp, Homo sapien
ctgtgtgcctatggtttgtgcacta

SEQ ID NO: 1029652 - DNA, 25 bp, Homo sapien
ctagatcctgaggttctcgtacaag

SEQ ID NO: 1029653 - DNA, 25 bp, Homo sapien
gctactagtgacatgcatccaggac

SEQ ID NO: 1029654 - DNA, 25 bp, Homo sapien
ttagaattgagagcgagtgatgcac

SEQ ID NO: 1029655 - DNA, 25 bp, Homo sapien
caggactagttatttgatggtgcca

SEQ ID NO: 1029656 - DNA, 25 bp, Homo sapien
tatttgtatcacctaggctttgcca

SEQ ID NO: 1029657 - DNA, 25 bp, Homo sapien
tctccatacctacccacgagcccct

SEQ ID NO: 1029658 - DNA, 25 bp, Homo sapien
cttagggatgtggatatgttctgtc

SEQ ID NO: 1029659 - DNA, 25 bp, Homo sapien
gatgtggatatgttctgtcatctgt

SEQ ID NO: 1029660 - DNA, 25 bp, Homo sapien
acctacccacgagcccctccaggag

SEQ ID NO: 1029661 - DNA, 25 bp, Homo sapien
taatcacgcctgagctagagcagac

SEQ ID NO: 1029662 - DNA, 25 bp, Homo sapien
tgcactcagccaccaactaggagac

SEQ ID NO: 1029663 - DNA, 25 bp, Homo sapien
tgaagatacatcacacctgcagaat

SEQ ID NO: 1029664 - DNA, 25 bp, Homo sapien
tatgcactccattctaccttcagga

SEQ ID NO: 1029665 - DNA, 25 bp, Homo sapien
caaggagcccttgatgagaaggcca

SEQ ID NO: 1029666 - DNA, 25 bp, Homo sapien
gcgaggttctctgtggtcggcacac

SEQ ID NO: 1029667 - DNA, 25 bp, Homo sapien
caaacattgcgattttattaagcag

SEQ ID NO: 1029668 - DNA, 25 bp, Homo sapien
gcagtccaagaactttcctagcttg

SEQ ID NO: 1029669 - DNA, 25 bp, Homo sapien
agatgcgtctctcccaaatacaagt

SEQ ID NO: 1029670 - DNA, 25 bp, Homo sapien
ctgtgttctggtgccagtcccagag

SEQ ID NO: 1029671 - DNA, 25 bp, Homo sapien
gaaatccacacacgtgttaccctgg

SEQ ID NO: 1029672 - DNA, 25 bp, Homo sapien
ctgccggttcgggaacactccaaag

SEQ ID NO: 1029673 - DNA, 25 bp, Homo sapien
ccttgcgttcccgtgggactgccgt

SEQ ID NO: 1029674 - DNA, 25 bp, Homo sapien
tcccgtgggactgccgttcctttga

SEQ ID NO: 1029675 - DNA, 25 bp, Homo sapien
ttgagtgaggtttatggttctgttg

SEQ ID NO: 1029676 - DNA, 25 bp, Homo sapien
gactgccgttcctttgagtgaggtt

SEQ ID NO: 1029677 - DNA, 25 bp, Homo sapien
tctggaggcgcagggctgattctat

SEQ ID NO: 1029678 - DNA, 25 bp, Homo sapien
tatgccgcggattctgtcggaacac

SEQ ID NO: 1029679 - DNA, 25 bp, Homo sapien
ttgttaaggagctcgcaggtggccc

SEQ ID NO: 1029680 - DNA, 25 bp, Homo sapien
cattgttaaggagctcgcaggcgtt

SEQ ID NO: 1029681 - DNA, 25 bp, Homo sapien
gccagccaagcgactcaggccgggc

SEQ ID NO: 1029682 - DNA, 25 bp, Homo sapien
gagctgccgccagccaagcgactca

SEQ ID NO: 1029683 - DNA, 25 bp, Homo sapien
ggatccgcggatcttggcttcatca

SEQ ID NO: 1029684 - DNA, 25 bp, Homo sapien
accctcggtggatccgcggatcttg

SEQ ID NO: 1029685 - DNA, 25 bp, Homo sapien
tgcacaggtgaccagggatttttct

SEQ ID NO: 1029686 - DNA, 25 bp, Homo sapien
ctgcacaggtgaccagggatttttc

SEQ ID NO: 1029687 - DNA, 25 bp, Homo sapien
tctgcacaggtgaccagggattttt

SEQ ID NO: 1029688 - DNA, 25 bp, Homo sapien
gcacaggtgaccagggatttttctc

SEQ ID NO: 1029689 - DNA, 25 bp, Homo sapien
tggcccagggggtcgatagtcatta

SEQ ID NO: 1029690 - DNA, 25 bp, Homo sapien
gtgaaaggagagtcagcctcagaat

SEQ ID NO: 1029691 - DNA, 25 bp, Homo sapien
cattagcactggtgaaaggagagtc

SEQ ID NO: 1029692 - DNA, 25 bp, Homo sapien
gggtcgatagtcattagcactggtg

SEQ ID NO: 1029693 - DNA, 25 bp, Homo sapien
accttctgggaggggtgagacagac

SEQ ID NO: 1029694 - DNA, 25 bp, Homo sapien
caccttctgggaggggtgagacaga

SEQ ID NO: 1029695 - DNA, 25 bp, Homo sapien
gcctgtcgcaagttcaagggtggtc

SEQ ID NO: 1029696 - DNA, 25 bp, Homo sapien
cgagctgtgataggagtaccaggaa

SEQ ID NO: 1029697 - DNA, 25 bp, Homo sapien
cctcagcggggcctgtcgcaagttc

SEQ ID NO: 1029698 - DNA, 25 bp, Homo sapien
tcgcaagttcaagggtggtcggcat

SEQ ID NO: 1029699 - DNA, 25 bp, Homo sapien
caaaggtgtgacttctgctgtgggc

SEQ ID NO: 1029700 - DNA, 25 bp, Homo sapien
tccacctcaaaggtgtgacttctgc

SEQ ID NO: 1029701 - DNA, 25 bp, Homo sapien
cattccacctcaaaggtgtgacttc

SEQ ID NO: 1029702 - DNA, 25 bp, Homo sapien
cctcaaaggtgtgacttctgctgtg

SEQ ID NO: 1029703 - DNA, 25 bp, Homo sapien
gccactgtgggagggcatctctgcc

SEQ ID NO: 1029704 - DNA, 25 bp, Homo sapien
tctcctgaaggacgcatgggccagg

SEQ ID NO: 1029705 - DNA, 25 bp, Homo sapien
accgggctgaaaggctctcctgaag

SEQ ID NO: 1029706 - DNA, 25 bp, Homo sapien
gaatctggaggagccatgtacagct

SEQ ID NO: 1029707 - DNA, 25 bp, Homo sapien
tggcaaaggcgaggcggaggctgct

SEQ ID NO: 1029708 - DNA, 25 bp, Homo sapien
ggcggccgtctggcaggactttctg

SEQ ID NO: 1029709 - DNA, 25 bp, Homo sapien
tgggcggccgtctggcaggactttc

SEQ ID NO: 1029710 - DNA, 25 bp, Homo sapien
ccctgggcggccgtctggcaggact

SEQ ID NO: 1029711 - DNA, 25 bp, Homo sapien
ctgggcggccgtctggcaggacttt

SEQ ID NO: 1029712 - DNA, 25 bp, Homo sapien
aggtagagggtaattgagcagaaaa

SEQ ID NO: 1029713 - DNA, 25 bp, Homo sapien
gtagagggtaattgagcagaaaagc

SEQ ID NO: 1029714 - DNA, 25 bp, Homo sapien
ggtagagggtaattgagcagaaaag

SEQ ID NO: 1029715 - DNA, 25 bp, Homo sapien
gctgctgtccttggacttgaagaag

SEQ ID NO: 1029716 - DNA, 25 bp, Homo sapien
aagcagcagctctggtggcatacag

SEQ ID NO: 1029717 - DNA, 25 bp, Homo sapien
cagcagctctggtggcatacaggca

SEQ ID NO: 1029718 - DNA, 25 bp, Homo sapien
ctctggtggcatacaggcaacccac

SEQ ID NO: 1029719 - DNA, 25 bp, Homo sapien
cagctctggtggcatacaggcaacc

SEQ ID NO: 1029720 - DNA, 25 bp, Homo sapien
gggcgacagcgcaggcggggcctcc

SEQ ID NO: 1029721 - DNA, 25 bp, Homo sapien
tctgagcgctcgctctgcagacggc

SEQ ID NO: 1029722 - DNA, 25 bp, Homo sapien
atcggcgccactcaagttgcccggg

SEQ ID NO: 1029723 - DNA, 25 bp, Homo sapien
gcgctgccgctcacggtgcgtgtct

SEQ ID NO: 1029724 - DNA, 25 bp, Homo sapien
ctgtcgcggcgcagcaaagggctgg

SEQ ID NO: 1029725 - DNA, 25 bp, Homo sapien
tcacgtttcggggagcggggcctca

SEQ ID NO: 1029726 - DNA, 25 bp, Homo sapien
cacgtttcggggagcggggcctcag

SEQ ID NO: 1029727 - DNA, 25 bp, Homo sapien
gagtcctaaaagctgttgaatccac

SEQ ID NO: 1029728 - DNA, 25 bp, Homo sapien
ctgagtcctaaaagctgttgaatcc

SEQ ID NO: 1029729 - DNA, 25 bp, Homo sapien
gtcctaaaagctgttgaatccacat

SEQ ID NO: 1029730 - DNA, 25 bp, Homo sapien
tgagtcctaaaagctgttgaatcca

SEQ ID NO: 1029731 - DNA, 25 bp, Homo sapien
cgtctggtcattcacaaagccttgg

SEQ ID NO: 1029732 - DNA, 25 bp, Homo sapien
cattcacaaagccttggaaggtctt

SEQ ID NO: 1029733 - DNA, 25 bp, Homo sapien
ccagtgtggggacccgtctggtcat

SEQ ID NO: 1029734 - DNA, 25 bp, Homo sapien
gaagcaggtcggagctgaagaccag

SEQ ID NO: 1029735 - DNA, 25 bp, Homo sapien
aatgtttgtggactgcgcgtttgac

SEQ ID NO: 1029736 - DNA, 25 bp, Homo sapien
gcacagccgctgacactagatagat

SEQ ID NO: 1029737 - DNA, 25 bp, Homo sapien
gattcacccggagcgcaatgtttgt

SEQ ID NO: 1029738 - DNA, 25 bp, Homo sapien
tcaagcatgattgtccccgaggagt

SEQ ID NO: 1029739 - DNA, 25 bp, Homo sapien
gaatggaccttcgagtcctggaaac

SEQ ID NO: 1029740 - DNA, 25 bp, Homo sapien
gaacagtttagcaccgttggatcag

SEQ ID NO: 1029741 - DNA, 25 bp, Homo sapien
tcagatcacttagcacaaagcctgg

SEQ ID NO: 1029742 - DNA, 25 bp, Homo sapien
cacagaggtcagcataaggagcacg

SEQ ID NO: 1029743 - DNA, 25 bp, Homo sapien
gaacaccagaattcctacgtaagga

SEQ ID NO: 1029744 - DNA, 25 bp, Homo sapien
cgtaaggaattgtcatggacttcag

SEQ ID NO: 1029745 - DNA, 25 bp, Homo sapien
cctacgtaaggaattgtcatggact

SEQ ID NO: 1029746 - DNA, 25 bp, Homo sapien
attcctacgtaaggaattgtcatgg

SEQ ID NO: 1029747 - DNA, 25 bp, Homo sapien
gtggcaattttgcacactgtccgtg

SEQ ID NO: 1029748 - DNA, 25 bp, Homo sapien
gggctttaccaaacactgcgggcat

SEQ ID NO: 1029749 - DNA, 25 bp, Homo sapien
actgtccgtgctgctgaaaacacgg

SEQ ID NO: 1029750 - DNA, 25 bp, Homo sapien
gctgctgaaaacacgggcttccaaa

SEQ ID NO: 1029751 - DNA, 25 bp, Homo sapien
tggtgatgactcagaaagcaggcgc

SEQ ID NO: 1029752 - DNA, 25 bp, Homo sapien
aacactcataaaggccgatgtgcag

SEQ ID NO: 1029753 - DNA, 25 bp, Homo sapien
gaaagcaggcgctcagaacactcat

SEQ ID NO: 1029754 - DNA, 25 bp, Homo sapien
gatgtgcagcttcctagacccaggc

SEQ ID NO: 1029755 - DNA, 25 bp, Homo sapien
acctcacgggcactccatcagctct

SEQ ID NO: 1029756 - DNA, 25 bp, Homo sapien
cagctctgacccctcggcagaagtg

SEQ ID NO: 1029757 - DNA, 25 bp, Homo sapien
tgacccctcggcagaagtggagatt

SEQ ID NO: 1029758 - DNA, 25 bp, Homo sapien
aggaagtgggcagcccaacctcacg

SEQ ID NO: 1029759 - DNA, 25 bp, Homo sapien
ggctcgagtcatcacaatccaggtg

SEQ ID NO: 1029760 - DNA, 25 bp, Homo sapien
cagggacgttcactctacgattcag

SEQ ID NO: 1029761 - DNA, 25 bp, Homo sapien
cagtttggcactgaacagctgtggc

SEQ ID NO: 1029762 - DNA, 25 bp, Homo sapien
gcacggagctctcgttcttctcaga

SEQ ID NO: 1029763 - DNA, 25 bp, Homo sapien
tcttgtctttgtcagcgagtgggaa

SEQ ID NO: 1029764 - DNA, 25 bp, Homo sapien
tctttgtcagcgagtgggaaatgca

SEQ ID NO: 1029765 - DNA, 25 bp, Homo sapien
ttgtcagcgagtgggaaatgcatcc

SEQ ID NO: 1029766 - DNA, 25 bp, Homo sapien
cttgtctttgtcagcgagtgggaaa

SEQ ID NO: 1029767 - DNA, 25 bp, Homo sapien
cactggtgtcgccccatgctccaca

SEQ ID NO: 1029768 - DNA, 25 bp, Homo sapien
gggcactggtgtcgccccatgctcc

SEQ ID NO: 1029769 - DNA, 25 bp, Homo sapien
ggcactggtgtcgccccatgctcca

SEQ ID NO: 1029770 - DNA, 25 bp, Homo sapien
tgggcactggtgtcgccccatgctc

SEQ ID NO: 1029771 - DNA, 25 bp, Homo sapien
gggtctggatgggcgcatcccctcc

SEQ ID NO: 1029772 - DNA, 25 bp, Homo sapien
agggtctggatgggcgcatcccctc

SEQ ID NO: 1029773 - DNA, 25 bp, Homo sapien
ttgaaacaagaggtcacacaagtag

SEQ ID NO: 1029774 - DNA, 25 bp, Homo sapien
cttgaaacaagaggtcacacaagta

SEQ ID NO: 1029775 - DNA, 25 bp, Homo sapien
agccaagaggcgcagaaagcagccg

SEQ ID NO: 1029776 - DNA, 25 bp, Homo sapien
gctcctggttgtggctccatgacga

SEQ ID NO: 1029777 - DNA, 25 bp, Homo sapien
tgccagtggccattccacgggctcc

SEQ ID NO: 1029778 - DNA, 25 bp, Homo sapien
tccatgacgaagagagggcgtagct

SEQ ID NO: 1029779 - DNA, 25 bp, Homo sapien
tgctgacgacagaagcacagggcac

SEQ ID NO: 1029780 - DNA, 25 bp, Homo sapien
aaagcactggccctgctgacgacag

SEQ ID NO: 1029781 - DNA, 25 bp, Homo sapien
tgtcacctaaagcactggccctgct

SEQ ID NO: 1029782 - DNA, 25 bp, Homo sapien
actggccctgctgacgacagaagca

SEQ ID NO: 1029783 - DNA, 25 bp, Homo sapien
catccgatggcaagcaccagtgtct

SEQ ID NO: 1029784 - DNA, 25 bp, Homo sapien
ggagttagctccgactctcctccag

SEQ ID NO: 1029785 - DNA, 25 bp, Homo sapien
ccagcaccagggcttttggtcaaga

SEQ ID NO: 1029786 - DNA, 25 bp, Homo sapien
tcagcgggtgggtcgcttttgccat

SEQ ID NO: 1029787 - DNA, 25 bp, Homo sapien
ccagccatcgcagcccaccctttcc

SEQ ID NO: 1029788 - DNA, 25 bp, Homo sapien
tccagccatcgcagcccaccctttc

SEQ ID NO: 1029789 - DNA, 25 bp, Homo sapien
cagccatcgcagcccaccctttcct

SEQ ID NO: 1029790 - DNA, 25 bp, Homo sapien
gctcccctagggctggaacttccaa

SEQ ID NO: 1029791 - DNA, 25 bp, Homo sapien
gcactgtaggttgggtaattccttc

SEQ ID NO: 1029792 - DNA, 25 bp, Homo sapien
cccctaatgagatcatcgcatccgg

SEQ ID NO: 1029793 - DNA, 25 bp, Homo sapien
gagatcatcgcatccggaagctgtt

SEQ ID NO: 1029794 - DNA, 25 bp, Homo sapien
cgtctccctgggttcccaagtggag

SEQ ID NO: 1029795 - DNA, 25 bp, Homo sapien
cgggcataagccgtctccctgggtt

SEQ ID NO: 1029796 - DNA, 25 bp, Homo sapien
agtgtctagagcagatgcagcccgg

SEQ ID NO: 1029797 - DNA, 25 bp, Homo sapien
gttcccaagtggagtgtctagagca

SEQ ID NO: 1029798 - DNA, 25 bp, Homo sapien
caagtccttgcaaggttccctctgc

SEQ ID NO: 1029799 - DNA, 25 bp, Homo sapien
tcactggctgcggtttccaagtcct

SEQ ID NO: 1029800 - DNA, 25 bp, Homo sapien
ggctgcggtttccaagtccttgcaa

SEQ ID NO: 1029801 - DNA, 25 bp, Homo sapien
ttccaagtccttgcaaggttccctc

SEQ ID NO: 1029802 - DNA, 25 bp, Homo sapien
tgcacagcttaatctcctgccggct

SEQ ID NO: 1029803 - DNA, 25 bp, Homo sapien
actgcacagcttaatctcctgccgg

SEQ ID NO: 1029804 - DNA, 25 bp, Homo sapien
tgactgcacagcttaatctcctgcc

SEQ ID NO: 1029805 - DNA, 25 bp, Homo sapien
gcacagcttaatctcctgccggctg

SEQ ID NO: 1029806 - DNA, 25 bp, Homo sapien
gagactgaaggatagcaacggcgct

SEQ ID NO: 1029807 - DNA, 25 bp, Homo sapien
gagtctgcagcaactttggggcacg

SEQ ID NO: 1029808 - DNA, 25 bp, Homo sapien
acagccttcgcaggtgcttggagga

SEQ ID NO: 1029809 - DNA, 25 bp, Homo sapien
cctgggcaacgtgcccgcgagcatt

SEQ ID NO: 1029810 - DNA, 25 bp, Homo sapien
agctgataatgcctgggaccccagg

SEQ ID NO: 1029811 - DNA, 25 bp, Homo sapien
ccaggaagggttgtgaaccttcacg

SEQ ID NO: 1029812 - DNA, 25 bp, Homo sapien
tcacgaagggttccacggtcaagcc

SEQ ID NO: 1029813 - DNA, 25 bp, Homo sapien
caggaagggttgtgaaccttcacga

SEQ ID NO: 1029814 - DNA, 25 bp, Homo sapien
gacagcggtctggcccagtccactc

SEQ ID NO: 1029815 - DNA, 25 bp, Homo sapien
gcggtctggcccagtccactccaag

SEQ ID NO: 1029816 - DNA, 25 bp, Homo sapien
agcggtctggcccagtccactccaa

SEQ ID NO: 1029817 - DNA, 25 bp, Homo sapien
tctggcccagtccactccaaggcat

SEQ ID NO: 1029818 - DNA, 25 bp, Homo sapien
gagccccaggacgccccagacggaa

SEQ ID NO: 1029819 - DNA, 25 bp, Homo sapien
cgggagccccaggacgccccagacg

SEQ ID NO: 1029820 - DNA, 25 bp, Homo sapien
ggagccccaggacgccccagacgga

SEQ ID NO: 1029821 - DNA, 25 bp, Homo sapien
agccccaggacgccccagacggaag

SEQ ID NO: 1029822 - DNA, 25 bp, Homo sapien
gggaggagcactccctgcaactcac

SEQ ID NO: 1029823 - DNA, 25 bp, Homo sapien
agggaggagcactccctgcaactca

SEQ ID NO: 1029824 - DNA, 25 bp, Homo sapien
ttcagctcagatgtgaaaatggcct

SEQ ID NO: 1029825 - DNA, 25 bp, Homo sapien
ctcccgctcgctgataagatgtgag

SEQ ID NO: 1029826 - DNA, 25 bp, Homo sapien
gatgtgagttccaccaggaagagaa

SEQ ID NO: 1029827 - DNA, 25 bp, Homo sapien
taggtgggatgcgagatttcagctc

SEQ ID NO: 1029828 - DNA, 25 bp, Homo sapien
agcagaaagaatagacacagacata

SEQ ID NO: 1029829 - DNA, 25 bp, Homo sapien
cagaaagaatagacacagacatatt

SEQ ID NO: 1029830 - DNA, 25 bp, Homo sapien
gcagaaagaatagacacagacatat

SEQ ID NO: 1029831 - DNA, 25 bp, Homo sapien
cctcgttgaagaagacccgtgcttc

SEQ ID NO: 1029832 - DNA, 25 bp, Homo sapien
gaagacccgtgcttctacgatcaat

SEQ ID NO: 1029833 - DNA, 25 bp, Homo sapien
tacgatcaatagttcacagggcacc

SEQ ID NO: 1029834 - DNA, 25 bp, Homo sapien
gaggtctccgcctcctcgttgaaga

SEQ ID NO: 1029835 - DNA, 25 bp, Homo sapien
agggcaaatcctgcgcaaccctgag

SEQ ID NO: 1029836 - DNA, 25 bp, Homo sapien
agaaagggcaaatcctgcgcaaccc

SEQ ID NO: 1029837 - DNA, 25 bp, Homo sapien
aaatcctgcgcaaccctgaggaggg

SEQ ID NO: 1029838 - DNA, 25 bp, Homo sapien
gcaaatcctgcgcaaccctgaggag

SEQ ID NO: 1029839 - DNA, 25 bp, Homo sapien
actcagggaaatgagatctgctccg

SEQ ID NO: 1029840 - DNA, 25 bp, Homo sapien
cctaaagtttattgacgcgaagtgt

SEQ ID NO: 1029841 - DNA, 25 bp, Homo sapien
gatctgctccggataaacctaaagt

SEQ ID NO: 1029842 - DNA, 25 bp, Homo sapien
tgcagtgccggtgccctttgaaacc

SEQ ID NO: 1029843 - DNA, 25 bp, Homo sapien
ggcatcgctttaaatgctctgcatg

SEQ ID NO: 1029844 - DNA, 25 bp, Homo sapien
tcgctttaaatgctctgcatgggaa

SEQ ID NO: 1029845 - DNA, 25 bp, Homo sapien
cagagcccggcatgcatatcgtaaa

SEQ ID NO: 1029846 - DNA, 25 bp, Homo sapien
gcatatcgtaaacaggcatcgcttt

SEQ ID NO: 1029847 - DNA, 25 bp, Homo sapien
agtatccaggcatggcttccgaggg

SEQ ID NO: 1029848 - DNA, 25 bp, Homo sapien
caggtccacggcgagctgaaacatg

SEQ ID NO: 1029849 - DNA, 25 bp, Homo sapien
gaaacatggctatcagtatccaggc

SEQ ID NO: 1029850 - DNA, 25 bp, Homo sapien
cacggcgagctgaaacatggctatc

SEQ ID NO: 1029851 - DNA, 25 bp, Homo sapien
accgcggcaggagccagaactccgg

SEQ ID NO: 1029852 - DNA, 25 bp, Homo sapien
cgcggcaggagccagaactccggcc

SEQ ID NO: 1029853 - DNA, 25 bp, Homo sapien
ggcaggagccagaactccggccccg

SEQ ID NO: 1029854 - DNA, 25 bp, Homo sapien
caggagccagaactccggccccggg

SEQ ID NO: 1029855 - DNA, 25 bp, Homo sapien
cgggacccgcgctggctgtccactc

SEQ ID NO: 1029856 - DNA, 25 bp, Homo sapien
ggccgggacccgcgctggctgtcca

SEQ ID NO: 1029857 - DNA, 25 bp, Homo sapien
ccgggacccgcgctggctgtccact

SEQ ID NO: 1029858 - DNA, 25 bp, Homo sapien
cggggccgggacccgcgctggctgt

SEQ ID NO: 1029859 - DNA, 25 bp, Homo sapien
acgaggacgaagaggcgagggaagg

SEQ ID NO: 1029860 - DNA, 25 bp, Homo sapien
ggcccccaggcgatgaactcagtct

SEQ ID NO: 1029861 - DNA, 25 bp, Homo sapien
ggcccgtctggctcgaggcatctgc

SEQ ID NO: 1029862 - DNA, 25 bp, Homo sapien
tggagtcgaagctgctgagaccgtc

SEQ ID NO: 1029863 - DNA, 25 bp, Homo sapien
actggtggaaggctccgttgtgcta

SEQ ID NO: 1029864 - DNA, 25 bp, Homo sapien
gacttccccgttgttgctgggactg

SEQ ID NO: 1029865 - DNA, 25 bp, Homo sapien
gaaccccttagtctgcagcgtcatg

SEQ ID NO: 1029866 - DNA, 25 bp, Homo sapien
tcttccgtgtttgtaggatggagac

SEQ ID NO: 1029867 - DNA, 25 bp, Homo sapien
tgtctgagaagtgtgagtagtgttc

SEQ ID NO: 1029868 - DNA, 25 bp, Homo sapien
tccaccaaatgttgggggcgcaggt

SEQ ID NO: 1029869 - DNA, 25 bp, Homo sapien
gaagtgtgagtagtgttcacgttcc

SEQ ID NO: 1029870 - DNA, 25 bp, Homo sapien
gtagtgttcacgttccaccaaatgt

SEQ ID NO: 1029871 - DNA, 25 bp, Homo sapien
gctgctggatgtcacgaatacgtga

SEQ ID NO: 1029872 - DNA, 25 bp, Homo sapien
cttagaaatgcatgagtgaattcca

SEQ ID NO: 1029873 - DNA, 25 bp, Homo sapien
gacaaagcaaacttggaaatcatcc

SEQ ID NO: 1029874 - DNA, 25 bp, Homo sapien
gctcccactcggtgacaaggacaaa

SEQ ID NO: 1029875 - DNA, 25 bp, Homo sapien
tgaacaggtcaacaagtaaaggcac

SEQ ID NO: 1029876 - DNA, 25 bp, Homo sapien
ggaaaggcatatcctacaagggtgt

SEQ ID NO: 1029877 - DNA, 25 bp, Homo sapien
ccaggtagaggagagtgttcattaa

SEQ ID NO: 1029878 - DNA, 25 bp, Homo sapien
acaagggtgtgtttcgtgcagccgc

SEQ ID NO: 1029879 - DNA, 25 bp, Homo sapien
tggcattcgcaggtgcccgcggcca

SEQ ID NO: 1029880 - DNA, 25 bp, Homo sapien
ggccaccacacgtgacctctgtgtg

SEQ ID NO: 1029881 - DNA, 25 bp, Homo sapien
tccttgagccttcctcatcccggcc

SEQ ID NO: 1029882 - DNA, 25 bp, Homo sapien
accgcccatggttccgcctggcatt

SEQ ID NO: 1029883 - DNA, 25 bp, Homo sapien
ctttcgctgtagacggacccctggg

SEQ ID NO: 1029884 - DNA, 25 bp, Homo sapien
agttgtgcctgagggtctgtcctgc

SEQ ID NO: 1029885 - DNA, 25 bp, Homo sapien
cacggcgacagcaagagcaggctgt

SEQ ID NO: 1029886 - DNA, 25 bp, Homo sapien
tccacggagcacagggttattcagg

SEQ ID NO: 1029887 - DNA, 25 bp, Homo sapien
gtcacgcaaaatgttcacacctttc

SEQ ID NO: 1029888 - DNA, 25 bp, Homo sapien
acgcaaaatgttcacacctttctga

SEQ ID NO: 1029889 - DNA, 25 bp, Homo sapien
aaaatgttcacacctttctgaagtc

SEQ ID NO: 1029890 - DNA, 25 bp, Homo sapien
ctgtcacgcaaaatgttcacacctt

SEQ ID NO: 1029891 - DNA, 25 bp, Homo sapien
cggaggagtcgagaaacaacattgc

SEQ ID NO: 1029892 - DNA, 25 bp, Homo sapien
aggctgagctccatcacgcggctca

SEQ ID NO: 1029893 - DNA, 25 bp, Homo sapien
gtgtaagcaaagcaggacggctccc

SEQ ID NO: 1029894 - DNA, 25 bp, Homo sapien
caagcacgcggagctcatacgtgta

SEQ ID NO: 1029895 - DNA, 25 bp, Homo sapien
gacgttgaaatctgacccagtgggt

SEQ ID NO: 1029896 - DNA, 25 bp, Homo sapien
gacccagtgggtcggtcagtcgtca

SEQ ID NO: 1029897 - DNA, 25 bp, Homo sapien
ctcatcaggcaacttgacgttgaaa

SEQ ID NO: 1029898 - DNA, 25 bp, Homo sapien
ggtcggtcagtcgtcaacatcacca

SEQ ID NO: 1029899 - DNA, 25 bp, Homo sapien
tgcagccaccaaggggtaatctgtg

SEQ ID NO: 1029900 - DNA, 25 bp, Homo sapien
attccccagggagccgtggaatccg

SEQ ID NO: 1029901 - DNA, 25 bp, Homo sapien
ccagggagccgtggaatccgtacag

SEQ ID NO: 1029902 - DNA, 25 bp, Homo sapien
caccaaggggtaatctgtgggtgca

SEQ ID NO: 1029903 - DNA, 25 bp, Homo sapien
tccatgcgaggatcccacagatctg

SEQ ID NO: 1029904 - DNA, 25 bp, Homo sapien
gacagcagctgcatccatgcgagga

SEQ ID NO: 1029905 - DNA, 25 bp, Homo sapien
gaagacagaggcatataagcgcatg

SEQ ID NO: 1029906 - DNA, 25 bp, Homo sapien
tccggaagccggcagtggagaagac

SEQ ID NO: 1029907 - DNA, 25 bp, Homo sapien
ctgcattctcttgtctactggacat

SEQ ID NO: 1029908 - DNA, 25 bp, Homo sapien
ggaaattccaagctcctcaaccaca

SEQ ID NO: 1029909 - DNA, 25 bp, Homo sapien
tctgcattctcttgtctactggaca

SEQ ID NO: 1029910 - DNA, 25 bp, Homo sapien
tgcattctcttgtctactggacatc

SEQ ID NO: 1029911 - DNA, 25 bp, Homo sapien
cgccgtaaaagaaggagaagattca

SEQ ID NO: 1029912 - DNA, 25 bp, Homo sapien
ctgattagtgcacagggcccttcca

SEQ ID NO: 1029913 - DNA, 25 bp, Homo sapien
gcagcaatgatataaaacgccgtaa

SEQ ID NO: 1029914 - DNA, 25 bp, Homo sapien
ttcatggtaggctctctggttggca

SEQ ID NO: 1029915 - DNA, 25 bp, Homo sapien
gcttagcttgggagacattgaccca

SEQ ID NO: 1029916 - DNA, 25 bp, Homo sapien
tgctgaatcttggtccagacaagcc

SEQ ID NO: 1029917 - DNA, 25 bp, Homo sapien
tagaccctccgtaaacatttgtgag

SEQ ID NO: 1029918 - DNA, 25 bp, Homo sapien
gaaagagcttagcttgggagacatt

SEQ ID NO: 1029919 - DNA, 25 bp, Homo sapien
tgtaataagatcaggccctgaagat

SEQ ID NO: 1029920 - DNA, 25 bp, Homo sapien
tatggttatatttgtggtggtttgt

SEQ ID NO: 1029921 - DNA, 25 bp, Homo sapien
ttgatgtggaagtttgtaatccatc

SEQ ID NO: 1029922 - DNA, 25 bp, Homo sapien
aaatgaagctgaatcaaatacgggc

SEQ ID NO: 1029923 - DNA, 25 bp, Homo sapien
gtaccagtttgattccttcgatggc

SEQ ID NO: 1029924 - DNA, 25 bp, Homo sapien
ttgattccttcgatggctcttagaa

SEQ ID NO: 1029925 - DNA, 25 bp, Homo sapien
gatggctcttagaactatttcagcc

SEQ ID NO: 1029926 - DNA, 25 bp, Homo sapien
ccttcgatggctcttagaactattt

SEQ ID NO: 1029927 - DNA, 25 bp, Homo sapien
tgacacccacatgcacgatggcaga

SEQ ID NO: 1029928 - DNA, 25 bp, Homo sapien
ccaaaaccttctgcaacatttgccg

SEQ ID NO: 1029929 - DNA, 25 bp, Homo sapien
gctctggtcatgagctgtttgctga

SEQ ID NO: 1029930 - DNA, 25 bp, Homo sapien
cactggaatcggcaggacagggaca

SEQ ID NO: 1029931 - DNA, 25 bp, Homo sapien
gacaagagttgtgatgagagcagct

SEQ ID NO: 1029932 - DNA, 25 bp, Homo sapien
aagacaagagttgtgatgagagcag

SEQ ID NO: 1029933 - DNA, 25 bp, Homo sapien
agacaagagttgtgatgagagcagc

SEQ ID NO: 1029934 - DNA, 25 bp, Homo sapien
taagacaagagttgtgatgagagca

SEQ ID NO: 1029935 - DNA, 25 bp, Homo sapien
gtctccccgcattgggggccatttc

SEQ ID NO: 1029936 - DNA, 25 bp, Homo sapien
acgtctccccgcattgggggccatt

SEQ ID NO: 1029937 - DNA, 25 bp, Homo sapien
ggacgtctccccgcattgggggcca

SEQ ID NO: 1029938 - DNA, 25 bp, Homo sapien
gaggacgtctccccgcattgggggc

SEQ ID NO: 1029939 - DNA, 25 bp, Homo sapien
cagggactcgacgaagcaagaatcg

SEQ ID NO: 1029940 - DNA, 25 bp, Homo sapien
ctgtccagggactcgacgaagcaag

SEQ ID NO: 1029941 - DNA, 25 bp, Homo sapien
tcgacgaagcaagaatcgaggcccc

SEQ ID NO: 1029942 - DNA, 25 bp, Homo sapien
gactcgacgaagcaagaatcgaggc

SEQ ID NO: 1029943 - DNA, 25 bp, Homo sapien
cactgcagggtctcgttataggccg

SEQ ID NO: 1029944 - DNA, 25 bp, Homo sapien
gacgcactcgtgagaacactgcagg

SEQ ID NO: 1029945 - DNA, 25 bp, Homo sapien
gagtgcagcgtctcatcggtgtaca

SEQ ID NO: 1029946 - DNA, 25 bp, Homo sapien
tccgacgagtgttcccgctttgggc

SEQ ID NO: 1029947 - DNA, 25 bp, Homo sapien
ggccacaggaataagatgccgatca

SEQ ID NO: 1029948 - DNA, 25 bp, Homo sapien
tcaaaccatttctcagacacgaagg

SEQ ID NO: 1029949 - DNA, 25 bp, Homo sapien
ataagatgccgatcagaagaggagg

SEQ ID NO: 1029950 - DNA, 25 bp, Homo sapien
cagcaggagatttcaaaccatttct

SEQ ID NO: 1029951 - DNA, 25 bp, Homo sapien
gcgtctgccctgcccccaggaggta

SEQ ID NO: 1029952 - DNA, 25 bp, Homo sapien
tgaaacagacacacggcgtctgccc

SEQ ID NO: 1029953 - DNA, 25 bp, Homo sapien
cgtgaaacagacacacggcgtctgc

SEQ ID NO: 1029954 - DNA, 25 bp, Homo sapien
tctgccctgcccccaggaggtaaaa

SEQ ID NO: 1029955 - DNA, 25 bp, Homo sapien
ctgcaagaaaacgaacttggctgac

SEQ ID NO: 1029956 - DNA, 25 bp, Homo sapien
agaaaacgaacttggctgactttgg

SEQ ID NO: 1029957 - DNA, 25 bp, Homo sapien
aagaaaacgaacttggctgactttg

SEQ ID NO: 1029958 - DNA, 25 bp, Homo sapien
gcaagaaaacgaacttggctgactt

SEQ ID NO: 1029959 - DNA, 25 bp, Homo sapien
tatgactttgcaggctccgttcaga

SEQ ID NO: 1029960 - DNA, 25 bp, Homo sapien
aattagtccgagagccaatgcaggc

SEQ ID NO: 1029961 - DNA, 25 bp, Homo sapien
tccgttcagaacgaagcggccttgg

SEQ ID NO: 1029962 - DNA, 25 bp, Homo sapien
ccagaacgtgttggaatctatcaca

SEQ ID NO: 1029963 - DNA, 25 bp, Homo sapien
catgtgaaagtctcccgtgtgaagg

SEQ ID NO: 1029964 - DNA, 25 bp, Homo sapien
tcaaaacaccggatgaggctcagag

SEQ ID NO: 1029965 - DNA, 25 bp, Homo sapien
taagacccgtccctaatggcatgaa

SEQ ID NO: 1029966 - DNA, 25 bp, Homo sapien
gagataaaaatcctcgggccaccag

SEQ ID NO: 1029967 - DNA, 25 bp, Homo sapien
tttatcggttcactgacacggaggg

SEQ ID NO: 1029968 - DNA, 25 bp, Homo sapien
attaaatggcagcacgccgagggcg

SEQ ID NO: 1029969 - DNA, 25 bp, Homo sapien
gccgagggcgcgacaagtctgtggg

SEQ ID NO: 1029970 - DNA, 25 bp, Homo sapien
tgcagagcccgatcactccctttat

SEQ ID NO: 1029971 - DNA, 25 bp, Homo sapien
aaggcagtcacccataggcatgagc

SEQ ID NO: 1029972 - DNA, 25 bp, Homo sapien
cctttcgggtcagtacatggcacat

SEQ ID NO: 1029973 - DNA, 25 bp, Homo sapien
aatagatttggcctagagcgtcctg

SEQ ID NO: 1029974 - DNA, 25 bp, Homo sapien
tgtgagtttcccaccggcaaacaga

SEQ ID NO: 1029975 - DNA, 25 bp, Homo sapien
tagttctggcccaagatagtaagtc

SEQ ID NO: 1029976 - DNA, 25 bp, Homo sapien
caccaaccgtctagcaaatgcaggc

SEQ ID NO: 1029977 - DNA, 25 bp, Homo sapien
gaaagaacatgctcacctgtggaac

SEQ ID NO: 1029978 - DNA, 25 bp, Homo sapien
taatatgtgtgtgacgtgagttgcc

SEQ ID NO: 1029979 - DNA, 25 bp, Homo sapien
gaaaacttctttaatccagtctatg

SEQ ID NO: 1029980 - DNA, 25 bp, Homo sapien
agtctatgcttgtatgacacacacg

SEQ ID NO: 1029981 - DNA, 25 bp, Homo sapien
ctacgtaaatgtgaacgtggctgtt

SEQ ID NO: 1029982 - DNA, 25 bp, Homo sapien
caggcccgtttgtaagcaaccagct

SEQ ID NO: 1029983 - DNA, 25 bp, Homo sapien
gagtttatcttcctagcaggcggca

SEQ ID NO: 1029984 - DNA, 25 bp, Homo sapien
cgtgggccaagtcgctgacgttgaa

SEQ ID NO: 1029985 - DNA, 25 bp, Homo sapien
tatcctccttgagacctggctgacc

SEQ ID NO: 1029986 - DNA, 25 bp, Homo sapien
gaatcacggcatgttttggaatagc

SEQ ID NO: 1029987 - DNA, 25 bp, Homo sapien
gactcttagacagatgccccatggg

SEQ ID NO: 1029988 - DNA, 25 bp, Homo sapien
ttatttgaacgcactaggagcatcc

SEQ ID NO: 1029989 - DNA, 25 bp, Homo sapien
caaacaatgatactagggctcctca

SEQ ID NO: 1029990 - DNA, 25 bp, Homo sapien
gctgctgccctatagaaaaccttgt

SEQ ID NO: 1029991 - DNA, 25 bp, Homo sapien
tgaggcttagctccagccggcccag

SEQ ID NO: 1029992 - DNA, 25 bp, Homo sapien
gagacagctgatgtgagagcttcac

SEQ ID NO: 1029993 - DNA, 25 bp, Homo sapien
gcttcacctttaagtccacatcagg

SEQ ID NO: 1029994 - DNA, 25 bp, Homo sapien
ggcttagctccagccggcccagaga

SEQ ID NO: 1029995 - DNA, 25 bp, Homo sapien
cgggggttgagttggctggtgtctc

SEQ ID NO: 1029996 - DNA, 25 bp, Homo sapien
gccgggggttgagttggctggtgtc

SEQ ID NO: 1029997 - DNA, 25 bp, Homo sapien
ggggttgagttggctggtgtctccc

SEQ ID NO: 1029998 - DNA, 25 bp, Homo sapien
aggccgggggttgagttggctggtg

SEQ ID NO: 1029999 - DNA, 25 bp, Homo sapien
ctttttagtagaactagtggaagat

SEQ ID NO: 1030000 - DNA, 25 bp, Homo sapien
gtgtgcccatgaacttccctttata

SEQ ID NO: 1030001 - DNA, 25 bp, Homo sapien
aagagagagtgtgtgcccatgaact

SEQ ID NO: 1030002 - DNA, 25 bp, Homo sapien
tgcccatgaacttccctttataaaa

SEQ ID NO: 1030003 - DNA, 25 bp, Homo sapien
gagagagtgtgtgcccatgaacttc

SEQ ID NO: 1030004 - DNA, 25 bp, Homo sapien
cagcccccgggttgcggatacaagt

SEQ ID NO: 1030005 - DNA, 25 bp, Homo sapien
gtccatggagcagatcagccctcat

SEQ ID NO: 1030006 - DNA, 25 bp, Homo sapien
ggtccatggagcagatcagccctca

SEQ ID NO: 1030007 - DNA, 25 bp, Homo sapien
gagaggcatcaactgcaccggtaga

SEQ ID NO: 1030008 - DNA, 25 bp, Homo sapien
cggtagaatgcctgcatggcatgtc

SEQ ID NO: 1030009 - DNA, 25 bp, Homo sapien
gatttcatggacaagtctggtgcct

SEQ ID NO: 1030010 - DNA, 25 bp, Homo sapien
ccgtggaggccgtgatgaagctcaa

SEQ ID NO: 1030011 - DNA, 25 bp, Homo sapien
gaagcccagtgagcggcttgttcag

SEQ ID NO: 1030012 - DNA, 25 bp, Homo sapien
cagggtggagacatagtggcttgag

SEQ ID NO: 1030013 - DNA, 25 bp, Homo sapien
aagccttgtctggatgcagggtgga

SEQ ID NO: 1030014 - DNA, 25 bp, Homo sapien
gcttgagaagcccagtgagcggctt

SEQ ID NO: 1030015 - DNA, 25 bp, Homo sapien
acgtagttccgcacacactctcgca

SEQ ID NO: 1030016 - DNA, 25 bp, Homo sapien
cagacacactctccacacgtagttc

SEQ ID NO: 1030017 - DNA, 25 bp, Homo sapien
cacatggtcactgacggaactccca

SEQ ID NO: 1030018 - DNA, 25 bp, Homo sapien
catggtcactgacggaactcccaga

SEQ ID NO: 1030019 - DNA, 25 bp, Homo sapien
gacacagacattccgtggccccagt

SEQ ID NO: 1030020 - DNA, 25 bp, Homo sapien
cacagacattccgtggccccagtaa

SEQ ID NO: 1030021 - DNA, 25 bp, Homo sapien
cagacattccgtggccccagtaaca

SEQ ID NO: 1030022 - DNA, 25 bp, Homo sapien
agacacagacattccgtggccccag

SEQ ID NO: 1030023 - DNA, 25 bp, Homo sapien
tgacgtcccagagaaggtagacgag

SEQ ID NO: 1030024 - DNA, 25 bp, Homo sapien
ctaagaggaggacggctcactctca

SEQ ID NO: 1030025 - DNA, 25 bp, Homo sapien
cccggctgtcgtcctggcagcatga

SEQ ID NO: 1030026 - DNA, 25 bp, Homo sapien
tagacgaggggtttacttctgcctc

SEQ ID NO: 1030027 - DNA, 25 bp, Homo sapien
ggagctgttagcacctgaatcccag

SEQ ID NO: 1030028 - DNA, 25 bp, Homo sapien
aacgctgatgggagctgttagcacc

SEQ ID NO: 1030029 - DNA, 25 bp, Homo sapien
gatgggagctgttagcacctgaatc

SEQ ID NO: 1030030 - DNA, 25 bp, Homo sapien
gaaaacgctgatgggagctgttagc

SEQ ID NO: 1030031 - DNA, 25 bp, Homo sapien
ccagtccaatgtaacgatcctgagg

SEQ ID NO: 1030032 - DNA, 25 bp, Homo sapien
gatgaacgcatttatccagttttgg

SEQ ID NO: 1030033 - DNA, 25 bp, Homo sapien
acgatcctgaggaatctttgtcccc

SEQ ID NO: 1030034 - DNA, 25 bp, Homo sapien
ctttgtcccccagatgaacgcattt

SEQ ID NO: 1030035 - DNA, 25 bp, Homo sapien
cagacattaacagacaattgcagca

SEQ ID NO: 1030036 - DNA, 25 bp, Homo sapien
ccaggtgcacctctggcagacatta

SEQ ID NO: 1030037 - DNA, 25 bp, Homo sapien
gacaattgcagcatggcagacacta

SEQ ID NO: 1030038 - DNA, 25 bp, Homo sapien
ctagcggacgactgcagctctctct

SEQ ID NO: 1030039 - DNA, 25 bp, Homo sapien
aagcgctccactggtatcagccata

SEQ ID NO: 1030040 - DNA, 25 bp, Homo sapien
tcttgggaatagagagataaaaacc

SEQ ID NO: 1030041 - DNA, 25 bp, Homo sapien
ctccaaagcgctccactggtatcag

SEQ ID NO: 1030042 - DNA, 25 bp, Homo sapien
tccactggtatcagccataccttgc

SEQ ID NO: 1030043 - DNA, 25 bp, Homo sapien
aagctgccagacagtaggctgaatg

SEQ ID NO: 1030044 - DNA, 25 bp, Homo sapien
caagctgccagacagtaggctgaat

SEQ ID NO: 1030045 - DNA, 25 bp, Homo sapien
agctgccagacagtaggctgaatgc

SEQ ID NO: 1030046 - DNA, 25 bp, Homo sapien
cagtctcacctaaggctcagggtcc

SEQ ID NO: 1030047 - DNA, 25 bp, Homo sapien
ggtagaattccattcctggtgcatg

SEQ ID NO: 1030048 - DNA, 25 bp, Homo sapien
tgcatgtatgactgactgaggccct

SEQ ID NO: 1030049 - DNA, 25 bp, Homo sapien
tctgtgggttgggagtctaaacatc

SEQ ID NO: 1030050 - DNA, 25 bp, Homo sapien
agaaggagaagtgagatgcccctcc

SEQ ID NO: 1030051 - DNA, 25 bp, Homo sapien
ggagaagtgagatgcccctcctcat

SEQ ID NO: 1030052 - DNA, 25 bp, Homo sapien
agcagaaggagaagtgagatgcccc

SEQ ID NO: 1030053 - DNA, 25 bp, Homo sapien
cagcatgcacagctccagcacagct

SEQ ID NO: 1030054 - DNA, 25 bp, Homo sapien
gagctctgcaaaatgtccccttggc

SEQ ID NO: 1030055 - DNA, 25 bp, Homo sapien
agctctgcaaaatgtccccttggca

SEQ ID NO: 1030056 - DNA, 25 bp, Homo sapien
gctctgcaaaatgtccccttggcac

SEQ ID NO: 1030057 - DNA, 25 bp, Homo sapien
cccttggcacctggaatccggatcc

SEQ ID NO: 1030058 - DNA, 25 bp, Homo sapien
tccagcctcggccttaatgtgtcca

SEQ ID NO: 1030059 - DNA, 25 bp, Homo sapien
cggtaacgtaacacccagagctcca

SEQ ID NO: 1030060 - DNA, 25 bp, Homo sapien
tcttcttgtactggcgatgataaac

SEQ ID NO: 1030061 - DNA, 25 bp, Homo sapien
taaattcttcccctgtttgtgccat

SEQ ID NO: 1030062 - DNA, 25 bp, Homo sapien
cagtgaaccgaggatcgtggatcag

SEQ ID NO: 1030063 - DNA, 25 bp, Homo sapien
ataagagacccctaacctcaaagca

SEQ ID NO: 1030064 - DNA, 25 bp, Homo sapien
cattgttgccaatgcataagagacc

SEQ ID NO: 1030065 - DNA, 25 bp, Homo sapien
gatcagcatctttgcattgttgcca

SEQ ID NO: 1030066 - DNA, 25 bp, Homo sapien
tacaaaaggtgaggaattttctctc

SEQ ID NO: 1030067 - DNA, 25 bp, Homo sapien
tctctacaaaaggtgaggaattttc

SEQ ID NO: 1030068 - DNA, 25 bp, Homo sapien
caaaaggtgaggaattttctctcat

SEQ ID NO: 1030069 - DNA, 25 bp, Homo sapien
tctacaaaaggtgaggaattttctc

SEQ ID NO: 1030070 - DNA, 25 bp, Homo sapien
tcagggcgatgattaaggtagaagc

SEQ ID NO: 1030071 - DNA, 25 bp, Homo sapien
cattagtttcctgttgccccgagag

SEQ ID NO: 1030072 - DNA, 25 bp, Homo sapien
tcattgagccatcattaccgagccc

SEQ ID NO: 1030073 - DNA, 25 bp, Homo sapien
tctgagtcccacagcggttcttgca

SEQ ID NO: 1030074 - DNA, 25 bp, Homo sapien
gcctctgacaattaatgccagttga

SEQ ID NO: 1030075 - DNA, 25 bp, Homo sapien
ggctgaaatgccaccgacaacgaat

SEQ ID NO: 1030076 - DNA, 25 bp, Homo sapien
gacaacgaatctcatcccgctgata

SEQ ID NO: 1030077 - DNA, 25 bp, Homo sapien
gcagaggtccagcagaaaggctgaa

SEQ ID NO: 1030078 - DNA, 25 bp, Homo sapien
ttttctcggtgagatcccaggcgct

SEQ ID NO: 1030079 - DNA, 25 bp, Homo sapien
taatcgggcccctgccaaaatgata

SEQ ID NO: 1030080 - DNA, 25 bp, Homo sapien
cagtagcagagaagccgaattgaca

SEQ ID NO: 1030081 - DNA, 25 bp, Homo sapien
ttgcagcgaagtgaaggcagcagcc

SEQ ID NO: 1030082 - DNA, 25 bp, Homo sapien
aattctgacagcctgcagacctgct

SEQ ID NO: 1030083 - DNA, 25 bp, Homo sapien
ttctgacagcctgcagacctgctac

SEQ ID NO: 1030084 - DNA, 25 bp, Homo sapien
acagcctgcagacctgctacctcct

SEQ ID NO: 1030085 - DNA, 25 bp, Homo sapien
agcctgcagacctgctacctcctgc

SEQ ID NO: 1030086 - DNA, 25 bp, Homo sapien
gaggatcgtccatgtttgcatagca

SEQ ID NO: 1030087 - DNA, 25 bp, Homo sapien
cgaggaaccgaaagcacaaagtgtc

SEQ ID NO: 1030088 - DNA, 25 bp, Homo sapien
tttagcgcaggacacaaaagtctga

SEQ ID NO: 1030089 - DNA, 25 bp, Homo sapien
tgacaaatgatgagctaggaaccgc

SEQ ID NO: 1030090 - DNA, 25 bp, Homo sapien
cagagaccgaggaagtggatggaca

SEQ ID NO: 1030091 - DNA, 25 bp, Homo sapien
atgaaggtggcagctcgccctgtgg

SEQ ID NO: 1030092 - DNA, 25 bp, Homo sapien
gaccgaggaagtggatggacacaga

SEQ ID NO: 1030093 - DNA, 25 bp, Homo sapien
gaaggtggcagctcgccctgtggcc

SEQ ID NO: 1030094 - DNA, 25 bp, Homo sapien
ccatccaggccaatttcagggaggg

SEQ ID NO: 1030095 - DNA, 25 bp, Homo sapien
ttttacggaagtcgtccaagccatc

SEQ ID NO: 1030096 - DNA, 25 bp, Homo sapien
tagatcgtcacgttggttttacgga

SEQ ID NO: 1030097 - DNA, 25 bp, Homo sapien
gaaggttttccatgatggtagatcg

SEQ ID NO: 1030098 - DNA, 25 bp, Homo sapien
aacagttggcatctataaggccatc

SEQ ID NO: 1030099 - DNA, 25 bp, Homo sapien
gtgtgatccacagctcgacctgcat

SEQ ID NO: 1030100 - DNA, 25 bp, Homo sapien
cctgcatggggacaacagttggcat

SEQ ID NO: 1030101 - DNA, 25 bp, Homo sapien
tgatccacagctcgacctgcatggg

SEQ ID NO: 1030102 - DNA, 25 bp, Homo sapien
agtgtgcagaagcaagacaccattg

SEQ ID NO: 1030103 - DNA, 25 bp, Homo sapien
gtgtgcagaagcaagacaccattgg

SEQ ID NO: 1030104 - DNA, 25 bp, Homo sapien
tgtgcagaagcaagacaccattgga

SEQ ID NO: 1030105 - DNA, 25 bp, Homo sapien
tgccaagcctagttgaagttgcttc

SEQ ID NO: 1030106 - DNA, 25 bp, Homo sapien
gaaacagtcatgctggtttagctca

SEQ ID NO: 1030107 - DNA, 25 bp, Homo sapien
catgcacggcttttgtctcattgtg

SEQ ID NO: 1030108 - DNA, 25 bp, Homo sapien
ttctcatctgacctctcacacatgc

SEQ ID NO: 1030109 - DNA, 25 bp, Homo sapien
cacctctccatcagcatccctgtac

SEQ ID NO: 1030110 - DNA, 25 bp, Homo sapien
ccacctctccatcagcatccctgta

SEQ ID NO: 1030111 - DNA, 25 bp, Homo sapien
aaggctgtttgtggagtgatgtggc

SEQ ID NO: 1030112 - DNA, 25 bp, Homo sapien
aggctgtttgtggagtgatgtggct

SEQ ID NO: 1030113 - DNA, 25 bp, Homo sapien
gagcagagtaagagcctcaaggctg

SEQ ID NO: 1030114 - DNA, 25 bp, Homo sapien
tgagcagagtaagagcctcaaggct

SEQ ID NO: 1030115 - DNA, 25 bp, Homo sapien
ctggcgagtgggtagaaggtcccca

SEQ ID NO: 1030116 - DNA, 25 bp, Homo sapien
ctcatttgaacaggacagctcccca

SEQ ID NO: 1030117 - DNA, 25 bp, Homo sapien
gtccccagcagatacggatggcatc

SEQ ID NO: 1030118 - DNA, 25 bp, Homo sapien
gcagaaattagggatacatcaggtt

SEQ ID NO: 1030119 - DNA, 25 bp, Homo sapien
gacactgatgtcatgcggactctgt

SEQ ID NO: 1030120 - DNA, 25 bp, Homo sapien
atgaggacactgacatccatgaaag

SEQ ID NO: 1030121 - DNA, 25 bp, Homo sapien
ggaggacactgatgtcatgcggact

SEQ ID NO: 1030122 - DNA, 25 bp, Homo sapien
catccatgaaagtacactgatgtcc

SEQ ID NO: 1030123 - DNA, 25 bp, Homo sapien
ggtgcagaaatcactcagagcaggg

SEQ ID NO: 1030124 - DNA, 25 bp, Homo sapien
tcaagggatgctgatgaaggataag

SEQ ID NO: 1030125 - DNA, 25 bp, Homo sapien
ctgtggagcatgtcttggaggtagc

SEQ ID NO: 1030126 - DNA, 25 bp, Homo sapien
ggctgcggggtgcagaaatcactca

SEQ ID NO: 1030127 - DNA, 25 bp, Homo sapien
tgaagtccacgtgcattagtgtgca

SEQ ID NO: 1030128 - DNA, 25 bp, Homo sapien
tgcaccggccttgtgatattcccat

SEQ ID NO: 1030129 - DNA, 25 bp, Homo sapien
gtgacagagatttcgctgaagtcca

SEQ ID NO: 1030130 - DNA, 25 bp, Homo sapien
cacgtgcattagtgtgcaccggcct

SEQ ID NO: 1030131 - DNA, 25 bp, Homo sapien
gcagcccggctgggtgaaggaaaca

SEQ ID NO: 1030132 - DNA, 25 bp, Homo sapien
cagcccggctgggtgaaggaaacac

SEQ ID NO: 1030133 - DNA, 25 bp, Homo sapien
agcagcccggctgggtgaaggaaac

SEQ ID NO: 1030134 - DNA, 25 bp, Homo sapien
cttttcttgaggacttgaatttgct

SEQ ID NO: 1030135 - DNA, 25 bp, Homo sapien
tttcttgaggacttgaatttgcttt

SEQ ID NO: 1030136 - DNA, 25 bp, Homo sapien
ttttcttgaggacttgaatttgctt

SEQ ID NO: 1030137 - DNA, 25 bp, Homo sapien
cgcacacacggaaggaaccaggggt

SEQ ID NO: 1030138 - DNA, 25 bp, Homo sapien
ccaatctggcgagaaagtgagaaag

SEQ ID NO: 1030139 - DNA, 25 bp, Homo sapien
caggggtccaatctggcgagaaagt

SEQ ID NO: 1030140 - DNA, 25 bp, Homo sapien
gaaccaggggtccaatctggcgaga

SEQ ID NO: 1030141 - DNA, 25 bp, Homo sapien
gacatcccacacgatgtcccaggaa

SEQ ID NO: 1030142 - DNA, 25 bp, Homo sapien
gatcggggagcagaactcaggttcc

SEQ ID NO: 1030143 - DNA, 25 bp, Homo sapien
cacacgatgtcccaggaattcacac

SEQ ID NO: 1030144 - DNA, 25 bp, Homo sapien
gctccttcaagcatcgcctgtggga

SEQ ID NO: 1030145 - DNA, 25 bp, Homo sapien
gtaagaacaggctccttgttcctcc

SEQ ID NO: 1030146 - DNA, 25 bp, Homo sapien
tgtgagtaagaacaggctccttgtt

SEQ ID NO: 1030147 - DNA, 25 bp, Homo sapien
gccaccaaggggaatgtgagtaaga

SEQ ID NO: 1030148 - DNA, 25 bp, Homo sapien
aaggggaatgtgagtaagaacaggc

SEQ ID NO: 1030149 - DNA, 25 bp, Homo sapien
gaaaaaggttcgaacatgcagcaga

SEQ ID NO: 1030150 - DNA, 25 bp, Homo sapien
gaagtgaaaaaggttcgaacatgca

SEQ ID NO: 1030151 - DNA, 25 bp, Homo sapien
ggttcgaacatgcagcagattgaat

SEQ ID NO: 1030152 - DNA, 25 bp, Homo sapien
tctatccctgtaccgctgttgggga

SEQ ID NO: 1030153 - DNA, 25 bp, Homo sapien
tatagagtttgaccttaattgtagg

SEQ ID NO: 1030154 - DNA, 25 bp, Homo sapien
gatgggtttatagagtttgacctta

SEQ ID NO: 1030155 - DNA, 25 bp, Homo sapien
agagtttgaccttaattgtaggtgc

SEQ ID NO: 1030156 - DNA, 25 bp, Homo sapien
gttgatgatgggtttatagagtttg

SEQ ID NO: 1030157 - DNA, 25 bp, Homo sapien
gcagctgcaaaacgatggcgcccac

SEQ ID NO: 1030158 - DNA, 25 bp, Homo sapien
agctgcaaaacgatggcgcccacca

SEQ ID NO: 1030159 - DNA, 25 bp, Homo sapien
cagctgcaaaacgatggcgcccacc

SEQ ID NO: 1030160 - DNA, 25 bp, Homo sapien
ggtgggtgatgtgggcatgaagcat

SEQ ID NO: 1030161 - DNA, 25 bp, Homo sapien
tggtgggtgatgtgggcatgaagca

SEQ ID NO: 1030162 - DNA, 25 bp, Homo sapien
gcaggaatgacctctgcccaggcag

SEQ ID NO: 1030163 - DNA, 25 bp, Homo sapien
tctgcccaggcagcagcgtccaggg

SEQ ID NO: 1030164 - DNA, 25 bp, Homo sapien
ctgcaggaatgacctctgcccaggc

SEQ ID NO: 1030165 - DNA, 25 bp, Homo sapien
aggaatgacctctgcccaggcagca

SEQ ID NO: 1030166 - DNA, 25 bp, Homo sapien
caaagtgccacgttctcatgctcat

SEQ ID NO: 1030167 - DNA, 25 bp, Homo sapien
gaaagtctagcaggcaatggcctgg

SEQ ID NO: 1030168 - DNA, 25 bp, Homo sapien
gaagacggacagatgaacctcaaag

SEQ ID NO: 1030169 - DNA, 25 bp, Homo sapien
tatcctcgtcataagagttttcctt

SEQ ID NO: 1030170 - DNA, 25 bp, Homo sapien
catctcccggtatctcttggtgcct

SEQ ID NO: 1030171 - DNA, 25 bp, Homo sapien
gaggaggactctgtgtgacaatgcc

SEQ ID NO: 1030172 - DNA, 25 bp, Homo sapien
gctcaggaaaatgctctctggagga

SEQ ID NO: 1030173 - DNA, 25 bp, Homo sapien
tggtgcctcgaggaaactgtttgct

SEQ ID NO: 1030174 - DNA, 25 bp, Homo sapien
gcccctcgctgtccactgtggtcac

SEQ ID NO: 1030175 - DNA, 25 bp, Homo sapien
cccctcgctgtccactgtggtcact

SEQ ID NO: 1030176 - DNA, 25 bp, Homo sapien
cagcataggtaggtgtaatagctac

SEQ ID NO: 1030177 - DNA, 25 bp, Homo sapien
gggcagcataggtaggtgtaatagc

SEQ ID NO: 1030178 - DNA, 25 bp, Homo sapien
tgttgtctccgtgtgagatttcctc

SEQ ID NO: 1030179 - DNA, 25 bp, Homo sapien
cattgcttgtgctttcctgacaggc

SEQ ID NO: 1030180 - DNA, 25 bp, Homo sapien
cagtttgacacgcacattgcttgtg

SEQ ID NO: 1030181 - DNA, 25 bp, Homo sapien
tctgttgtctccgtgtgagatttcc

SEQ ID NO: 1030182 - DNA, 25 bp, Homo sapien
cgtctactgatataataccagctta

SEQ ID NO: 1030183 - DNA, 25 bp, Homo sapien
aataaacgtctactgatataatacc

SEQ ID NO: 1030184 - DNA, 25 bp, Homo sapien
gacttgtaaaataaacgtctactga

SEQ ID NO: 1030185 - DNA, 25 bp, Homo sapien
tttagctagttttgctttaagataa

SEQ ID NO: 1030186 - DNA, 25 bp, Homo sapien
agccaccctcctaccctgtacaggg

SEQ ID NO: 1030187 - DNA, 25 bp, Homo sapien
cctaccctgtacaggggagctggaa

SEQ ID NO: 1030188 - DNA, 25 bp, Homo sapien
agctggaaggcaagatccagaagtc

SEQ ID NO: 1030189 - DNA, 25 bp, Homo sapien
ctggaaggcaagatccagaagtcca

SEQ ID NO: 1030190 - DNA, 25 bp, Homo sapien
caccagtctggtgatttttatggga

SEQ ID NO: 1030191 - DNA, 25 bp, Homo sapien
ctggtgatttttatgggattcgttt

SEQ ID NO: 1030192 - DNA, 25 bp, Homo sapien
gtctggtgatttttatgggattcgt

SEQ ID NO: 1030193 - DNA, 25 bp, Homo sapien
gtcaccagtctggtgatttttatgg

SEQ ID NO: 1030194 - DNA, 25 bp, Homo sapien
cattttagatgttcccgggctatta

SEQ ID NO: 1030195 - DNA, 25 bp, Homo sapien
ccattttagatgttcccgggctatt

SEQ ID NO: 1030196 - DNA, 25 bp, Homo sapien
tagatgttcccgggctattacttta

SEQ ID NO: 1030197 - DNA, 25 bp, Homo sapien
cccacgtgcgtcttcctcctgggtg

SEQ ID NO: 1030198 - DNA, 25 bp, Homo sapien
cttgcagaggctctcgcttgcgttc

SEQ ID NO: 1030199 - DNA, 25 bp, Homo sapien
gtctatctctcgtgccgccccacgt

SEQ ID NO: 1030200 - DNA, 25 bp, Homo sapien
cctcctgggtggaaacgcggcagct

SEQ ID NO: 1030201 - DNA, 25 bp, Homo sapien
gtgagatactggtgaccgccctctg

SEQ ID NO: 1030202 - DNA, 25 bp, Homo sapien
tgaccgccctctgacgtctctccat

SEQ ID NO: 1030203 - DNA, 25 bp, Homo sapien
ccagcccctgtgcagtgagatactg

SEQ ID NO: 1030204 - DNA, 25 bp, Homo sapien
cctgtgcagtgagatactggtgacc

SEQ ID NO: 1030205 - DNA, 25 bp, Homo sapien
atggtgatggacaccctctggtgcc

SEQ ID NO: 1030206 - DNA, 25 bp, Homo sapien
tgatggacaccctctggtgcctttc

SEQ ID NO: 1030207 - DNA, 25 bp, Homo sapien
gtgatggacaccctctggtgccttt

SEQ ID NO: 1030208 - DNA, 25 bp, Homo sapien
tggtgatggacaccctctggtgcct

SEQ ID NO: 1030209 - DNA, 25 bp, Homo sapien
tccgtcctccccgcccgttcatcca

SEQ ID NO: 1030210 - DNA, 25 bp, Homo sapien
ccgtcctccccgcccgttcatccat

SEQ ID NO: 1030211 - DNA, 25 bp, Homo sapien
cagtccgtcctccccgcccgttcat

SEQ ID NO: 1030212 - DNA, 25 bp, Homo sapien
tggaacatcattagcatccttcttc

SEQ ID NO: 1030213 - DNA, 25 bp, Homo sapien
caacacttggaacatcattagcatc

SEQ ID NO: 1030214 - DNA, 25 bp, Homo sapien
ggccagagaaccgtcaacacttgga

SEQ ID NO: 1030215 - DNA, 25 bp, Homo sapien
gaaccgtcaacacttggaacatcat

SEQ ID NO: 1030216 - DNA, 25 bp, Homo sapien
acgagagagtctccgaacagctgtc

SEQ ID NO: 1030217 - DNA, 25 bp, Homo sapien
gacacacgagagagtctccgaacag

SEQ ID NO: 1030218 - DNA, 25 bp, Homo sapien
aatgttggacacacgagagagtctc

SEQ ID NO: 1030219 - DNA, 25 bp, Homo sapien
caatgttggacacacgagagagtct

SEQ ID NO: 1030220 - DNA, 25 bp, Homo sapien
tatcttatctgaaacacgcaggttc

SEQ ID NO: 1030221 - DNA, 25 bp, Homo sapien
aggtatccaagaggtatcttatctg

SEQ ID NO: 1030222 - DNA, 25 bp, Homo sapien
atccaagaggtatcttatctgaaac

SEQ ID NO: 1030223 - DNA, 25 bp, Homo sapien
gaggtatcttatctgaaacacgcag

SEQ ID NO: 1030224 - DNA, 25 bp, Homo sapien
gactatcccttggtggatttgaaga

SEQ ID NO: 1030225 - DNA, 25 bp, Homo sapien
gcaagctgccttgttgtttgagctc

SEQ ID NO: 1030226 - DNA, 25 bp, Homo sapien
ctgcagtgtcttaagaagactatcc

SEQ ID NO: 1030227 - DNA, 25 bp, Homo sapien
tttgagctctcatttggagagggct

SEQ ID NO: 1030228 - DNA, 25 bp, Homo sapien
accattttagatgcttccatttcag

SEQ ID NO: 1030229 - DNA, 25 bp, Homo sapien
tcaagccaccattttagatgcttcc

SEQ ID NO: 1030230 - DNA, 25 bp, Homo sapien
agccaccattttagatgcttccatt

SEQ ID NO: 1030231 - DNA, 25 bp, Homo sapien
caccattttagatgcttccatttca

SEQ ID NO: 1030232 - DNA, 25 bp, Homo sapien
gggccatccccggagcttctgggct

SEQ ID NO: 1030233 - DNA, 25 bp, Homo sapien
ggtcatggagggaacaatcaagatg

SEQ ID NO: 1030234 - DNA, 25 bp, Homo sapien
ctgcagagggccatccccggagctt

SEQ ID NO: 1030235 - DNA, 25 bp, Homo sapien
ctgggctggcagatatatgggtcat

SEQ ID NO: 1030236 - DNA, 25 bp, Homo sapien
gtcttcaggctgatgatcaaaaaca

SEQ ID NO: 1030237 - DNA, 25 bp, Homo sapien
gctgatgatcaaaaacactgactct

SEQ ID NO: 1030238 - DNA, 25 bp, Homo sapien
cttcttatccaatttgttcagtttg

SEQ ID NO: 1030239 - DNA, 25 bp, Homo sapien
ttgtgaataagccttcttatccaat

SEQ ID NO: 1030240 - DNA, 25 bp, Homo sapien
gtagattggaccattttcaagagcc

SEQ ID NO: 1030241 - DNA, 25 bp, Homo sapien
tgtagattggaccattttcaagagc

SEQ ID NO: 1030242 - DNA, 25 bp, Homo sapien
atgtagattggaccattttcaagag

SEQ ID NO: 1030243 - DNA, 25 bp, Homo sapien
ggaggatgtcatggctatcattaac

SEQ ID NO: 1030244 - DNA, 25 bp, Homo sapien
catgaaactcaattgtagatcaatt

SEQ ID NO: 1030245 - DNA, 25 bp, Homo sapien
ctcaattgtagatcaattggcaggg

SEQ ID NO: 1030246 - DNA, 25 bp, Homo sapien
tcaatatatctgttctgggtagtac

SEQ ID NO: 1030247 - DNA, 25 bp, Homo sapien
caatatatctgttctgggtagtaca

SEQ ID NO: 1030248 - DNA, 25 bp, Homo sapien
gctgcatagcattgttcatagggca

SEQ ID NO: 1030249 - DNA, 25 bp, Homo sapien
agaaactgaattcctgatgaccaaa

SEQ ID NO: 1030250 - DNA, 25 bp, Homo sapien
tgaaagacccacgtggaaactgcag

SEQ ID NO: 1030251 - DNA, 25 bp, Homo sapien
tgaccaaatgaagcgctgaaagacc

SEQ ID NO: 1030252 - DNA, 25 bp, Homo sapien
tcaaaaagcatccacaaaaactccc

SEQ ID NO: 1030253 - DNA, 25 bp, Homo sapien
gcatccacaaaaactcccttatctg

SEQ ID NO: 1030254 - DNA, 25 bp, Homo sapien
aaactcccttatctgcaaggcaggc

SEQ ID NO: 1030255 - DNA, 25 bp, Homo sapien
caaaaactcccttatctgcaaggca

SEQ ID NO: 1030256 - DNA, 25 bp, Homo sapien
tgtgcttggaaaatgtgccaccagc

SEQ ID NO: 1030257 - DNA, 25 bp, Homo sapien
gaatcttctgttggcatcatagccg

SEQ ID NO: 1030258 - DNA, 25 bp, Homo sapien
tagccgctcatcaaacttctcagtg

SEQ ID NO: 1030259 - DNA, 25 bp, Homo sapien
tacgaggcaccgagttttggcccca

SEQ ID NO: 1030260 - DNA, 25 bp, Homo sapien
agtcttgagttgttgaaggtgaaag

SEQ ID NO: 1030261 - DNA, 25 bp, Homo sapien
tgagttgttgaaggtgaaagcactg

SEQ ID NO: 1030262 - DNA, 25 bp, Homo sapien
cttgagttgttgaaggtgaaagcac

SEQ ID NO: 1030263 - DNA, 25 bp, Homo sapien
ctaaagtcttgagttgttgaaggtg

SEQ ID NO: 1030264 - DNA, 25 bp, Homo sapien
tggaatgactggcccacagaaccca

SEQ ID NO: 1030265 - DNA, 25 bp, Homo sapien
ctggaatgactggcccacagaaccc

SEQ ID NO: 1030266 - DNA, 25 bp, Homo sapien
ggaatgactggcccacagaacccat

SEQ ID NO: 1030267 - DNA, 25 bp, Homo sapien
atatggccggtgcttcagcctgcct

SEQ ID NO: 1030268 - DNA, 25 bp, Homo sapien
cttccatgtgtaaaacagcatatgg

SEQ ID NO: 1030269 - DNA, 25 bp, Homo sapien
tgtttgagatgtaatcgaaaggact

SEQ ID NO: 1030270 - DNA, 25 bp, Homo sapien
tgtaatcgaaaggactatttccaga

SEQ ID NO: 1030271 - DNA, 25 bp, Homo sapien
gcttagtgccgtccaaactcttggt

SEQ ID NO: 1030272 - DNA, 25 bp, Homo sapien
tgtcgttttaaaccagaagccactg

SEQ ID NO: 1030273 - DNA, 25 bp, Homo sapien
gagaagctttttgccagatgtcgtt

SEQ ID NO: 1030274 - DNA, 25 bp, Homo sapien
atccagttcttggtggtagcatgaa

SEQ ID NO: 1030275 - DNA, 25 bp, Homo sapien
ttttccaacccattatcattagctt

SEQ ID NO: 1030276 - DNA, 25 bp, Homo sapien
ccaacccattatcattagctttgga

SEQ ID NO: 1030277 - DNA, 25 bp, Homo sapien
ttttttccaacccattatcattagc

SEQ ID NO: 1030278 - DNA, 25 bp, Homo sapien
ttccaacccattatcattagctttg

SEQ ID NO: 1030279 - DNA, 25 bp, Homo sapien
gaaaccacagtcatgagctcttccc

SEQ ID NO: 1030280 - DNA, 25 bp, Homo sapien
tgggccccacacggatgaaaccaca

SEQ ID NO: 1030281 - DNA, 25 bp, Homo sapien
ggccccacacggatgaaaccacagt

SEQ ID NO: 1030282 - DNA, 25 bp, Homo sapien
ccccacacggatgaaaccacagtca

SEQ ID NO: 1030283 - DNA, 25 bp, Homo sapien
gtcatgtccttgaatcggaagcccc

SEQ ID NO: 1030284 - DNA, 25 bp, Homo sapien
gtccttgaatcggaagccccaagaa

SEQ ID NO: 1030285 - DNA, 25 bp, Homo sapien
caatccggatccttttgtcatgtcc

SEQ ID NO: 1030286 - DNA, 25 bp, Homo sapien
ccatctgaatcacattcagccaatc

SEQ ID NO: 1030287 - DNA, 25 bp, Homo sapien
ttcgcgcttcactgagagccgctgc

SEQ ID NO: 1030288 - DNA, 25 bp, Homo sapien
ctggaacctgggcttcgcgcttcac

SEQ ID NO: 1030289 - DNA, 25 bp, Homo sapien
ctgggcttcgcgcttcactgagagc

SEQ ID NO: 1030290 - DNA, 25 bp, Homo sapien
gaacctgggcttcgcgcttcactga

SEQ ID NO: 1030291 - DNA, 25 bp, Homo sapien
cagcttgtagtgagaattcagctgc

SEQ ID NO: 1030292 - DNA, 25 bp, Homo sapien
catatggtgccagccacgccgcatg

SEQ ID NO: 1030293 - DNA, 25 bp, Homo sapien
tatgctgagcgaatttgtcttccaa

SEQ ID NO: 1030294 - DNA, 25 bp, Homo sapien
ggtggttcaacctggtcctgtgact

SEQ ID NO: 1030295 - DNA, 25 bp, Homo sapien
cttcctggccacagtcaacaggacc

SEQ ID NO: 1030296 - DNA, 25 bp, Homo sapien
tcctggccacagtcaacaggaccag

SEQ ID NO: 1030297 - DNA, 25 bp, Homo sapien
ttcctggccacagtcaacaggacca

SEQ ID NO: 1030298 - DNA, 25 bp, Homo sapien
cacatcaaaattcacagggcagaga

SEQ ID NO: 1030299 - DNA, 25 bp, Homo sapien
ccacatcaaaattcacagggcagag

SEQ ID NO: 1030300 - DNA, 25 bp, Homo sapien
gacatgagagcaatgggcaatttcc

SEQ ID NO: 1030301 - DNA, 25 bp, Homo sapien
ctcttaatgtgacatgagagcaatg

SEQ ID NO: 1030302 - DNA, 25 bp, Homo sapien
tcgatttgtgcccaaggtgcagagg

SEQ ID NO: 1030303 - DNA, 25 bp, Homo sapien
atggcccctatcatgcggtacagca

SEQ ID NO: 1030304 - DNA, 25 bp, Homo sapien
tgttttatatattccaaagagtttc

SEQ ID NO: 1030305 - DNA, 25 bp, Homo sapien
tccccaggaatccaatctcgatttg

SEQ ID NO: 1030306 - DNA, 25 bp, Homo sapien
tctgggtcccatggaacatcgaccc

SEQ ID NO: 1030307 - DNA, 25 bp, Homo sapien
ggtcccatggaacatcgaccctgca

SEQ ID NO: 1030308 - DNA, 25 bp, Homo sapien
gcagctcatgagccaggattgcctt

SEQ ID NO: 1030309 - DNA, 25 bp, Homo sapien
aacatcgaccctgcagctcatgagc

SEQ ID NO: 1030310 - DNA, 25 bp, Homo sapien
ctgcccccagttatacctgctggat

SEQ ID NO: 1030311 - DNA, 25 bp, Homo sapien
atcttgggtgctcctctcatggggc

SEQ ID NO: 1030312 - DNA, 25 bp, Homo sapien
caaacaaggggagcgtctgcagctg

SEQ ID NO: 1030313 - DNA, 25 bp, Homo sapien
atcttccaaacaaggggagcgtctg

SEQ ID NO: 1030314 - DNA, 25 bp, Homo sapien
gttccgaatcctaatggcaaccaag

SEQ ID NO: 1030315 - DNA, 25 bp, Homo sapien
gaactgtaaattgaactggccatct

SEQ ID NO: 1030316 - DNA, 25 bp, Homo sapien
gagagaggtgatctttccccgggtc

SEQ ID NO: 1030317 - DNA, 25 bp, Homo sapien
tggctcctgaaagtactgttccgaa

SEQ ID NO: 1030318 - DNA, 25 bp, Homo sapien
gcatcctgcgtattcacaatgagtg

SEQ ID NO: 1030319 - DNA, 25 bp, Homo sapien
caaggtcaagttgacgacgcacaac

SEQ ID NO: 1030320 - DNA, 25 bp, Homo sapien
gacgcacaacatcttgcatcctgcg

SEQ ID NO: 1030321 - DNA, 25 bp, Homo sapien
catgaggaatccaaagaggattaac

SEQ ID NO: 1030322 - DNA, 25 bp, Homo sapien
cctgttactccgtgcttctcgccca

SEQ ID NO: 1030323 - DNA, 25 bp, Homo sapien
tcctgttactccgtgcttctcgccc

SEQ ID NO: 1030324 - DNA, 25 bp, Homo sapien
ctgttactccgtgcttctcgcccat

SEQ ID NO: 1030325 - DNA, 25 bp, Homo sapien
gaatggtgttctccaccccagttct

SEQ ID NO: 1030326 - DNA, 25 bp, Homo sapien
gaggtctaatggctgaatggtgttc

SEQ ID NO: 1030327 - DNA, 25 bp, Homo sapien
accactgtgcataggaactctcagg

SEQ ID NO: 1030328 - DNA, 25 bp, Homo sapien
ttctgctttattcttccggacgcct

SEQ ID NO: 1030329 - DNA, 25 bp, Homo sapien
tgtagtgagagggagaaatgccagc

SEQ ID NO: 1030330 - DNA, 25 bp, Homo sapien
ctgtagtgagagggagaaatgccag

SEQ ID NO: 1030331 - DNA, 25 bp, Homo sapien
tagtgagagggagaaatgccagcag

SEQ ID NO: 1030332 - DNA, 25 bp, Homo sapien
gtagtgagagggagaaatgccagca

SEQ ID NO: 1030333 - DNA, 25 bp, Homo sapien
tttggtgtctcctctgtgataacca

SEQ ID NO: 1030334 - DNA, 25 bp, Homo sapien
ttggtgtctcctctgtgataaccaa

SEQ ID NO: 1030335 - DNA, 25 bp, Homo sapien
gaacaattgaactgcattgcagagt

SEQ ID NO: 1030336 - DNA, 25 bp, Homo sapien
ttgaactgcattgcagagttggaga

SEQ ID NO: 1030337 - DNA, 25 bp, Homo sapien
gaactgcattgcagagttggagagt

SEQ ID NO: 1030338 - DNA, 25 bp, Homo sapien
caattgaactgcattgcagagttgg

SEQ ID NO: 1030339 - DNA, 25 bp, Homo sapien
aggcactgtttgtccttcggtggca

SEQ ID NO: 1030340 - DNA, 25 bp, Homo sapien
ctgtttgtccttcggtggcaagcag

SEQ ID NO: 1030341 - DNA, 25 bp, Homo sapien
gggcacagccatgcaaggcccagca

SEQ ID NO: 1030342 - DNA, 25 bp, Homo sapien
gcactgtttgtccttcggtggcaag

SEQ ID NO: 1030343 - DNA, 25 bp, Homo sapien
gccagtgcccatgaagttgggcggc

SEQ ID NO: 1030344 - DNA, 25 bp, Homo sapien
tgcccatgaagttgggcggctttga

SEQ ID NO: 1030345 - DNA, 25 bp, Homo sapien
agtgcccatgaagttgggcggcttt

SEQ ID NO: 1030346 - DNA, 25 bp, Homo sapien
tgggccagtgcccatgaagttgggc

SEQ ID NO: 1030347 - DNA, 25 bp, Homo sapien
gaactgccacccatttgctgccggt

SEQ ID NO: 1030348 - DNA, 25 bp, Homo sapien
tcaaggcagtgtcgcagagctctgt

SEQ ID NO: 1030349 - DNA, 25 bp, Homo sapien
ctagctgcgtgtgcagttatgagga

SEQ ID NO: 1030350 - DNA, 25 bp, Homo sapien
gaaacagccttccacgcggtctctg

SEQ ID NO: 1030351 - DNA, 25 bp, Homo sapien
cactaggaatcggaggttggcttcc

SEQ ID NO: 1030352 - DNA, 25 bp, Homo sapien
caggaaatgcgaactccttccggca

SEQ ID NO: 1030353 - DNA, 25 bp, Homo sapien
tctgcatctgtggaactgcggtcac

SEQ ID NO: 1030354 - DNA, 25 bp, Homo sapien
atccgggtcacctccttttgtcagc

SEQ ID NO: 1030355 - DNA, 25 bp, Homo sapien
cagaatgggccaggataggcgggaa

SEQ ID NO: 1030356 - DNA, 25 bp, Homo sapien
ccaccctgtccttgggacatgggcg

SEQ ID NO: 1030357 - DNA, 25 bp, Homo sapien
caggataggcgggaaccccgtgtcg

SEQ ID NO: 1030358 - DNA, 25 bp, Homo sapien
tgggacatgggcgaggcaatttccc

SEQ ID NO: 1030359 - DNA, 25 bp, Homo sapien
aatgcactgatgtaggcaaagtgcc

SEQ ID NO: 1030360 - DNA, 25 bp, Homo sapien
tcatagatcccaatgcactgatgta

SEQ ID NO: 1030361 - DNA, 25 bp, Homo sapien
tcccaatgcactgatgtaggcaaag

SEQ ID NO: 1030362 - DNA, 25 bp, Homo sapien
tagatcccaatgcactgatgtaggc

SEQ ID NO: 1030363 - DNA, 25 bp, Homo sapien
gggctggaatcgagcttgttgtttc

SEQ ID NO: 1030364 - DNA, 25 bp, Homo sapien
aggtggaactgccatctttgtccca

SEQ ID NO: 1030365 - DNA, 25 bp, Homo sapien
ggaatcgagcttgttgtttctcctc

SEQ ID NO: 1030366 - DNA, 25 bp, Homo sapien
ttctcctcttcattagtgtcctcga

SEQ ID NO: 1030367 - DNA, 25 bp, Homo sapien
tcctcaggatcattaggagaggcat

SEQ ID NO: 1030368 - DNA, 25 bp, Homo sapien
caggatcattaggagaggcattaac

SEQ ID NO: 1030369 - DNA, 25 bp, Homo sapien
gatcattaggagaggcattaacatc

SEQ ID NO: 1030370 - DNA, 25 bp, Homo sapien
aatgtcctcaggatcattaggagag

SEQ ID NO: 1030371 - DNA, 25 bp, Homo sapien
aattctgcgttgtgtttctttacca

SEQ ID NO: 1030372 - DNA, 25 bp, Homo sapien
cctgaattctgcgttgtgtttcttt

SEQ ID NO: 1030373 - DNA, 25 bp, Homo sapien
tgaattctgcgttgtgtttctttac

SEQ ID NO: 1030374 - DNA, 25 bp, Homo sapien
attctgcgttgtgtttctttaccat

SEQ ID NO: 1030375 - DNA, 25 bp, Homo sapien
tcacaactttgcttgaacgtcccct

SEQ ID NO: 1030376 - DNA, 25 bp, Homo sapien
ccttttctgagaggacttttctaag

SEQ ID NO: 1030377 - DNA, 25 bp, Homo sapien
caacggatgtagaagggcagccctt

SEQ ID NO: 1030378 - DNA, 25 bp, Homo sapien
gacttttctaagcaacggatgtaga

SEQ ID NO: 1030379 - DNA, 25 bp, Homo sapien
cattaggcagtgaggccacgagctc

SEQ ID NO: 1030380 - DNA, 25 bp, Homo sapien
tgaggtggaggccactctaaccctg

SEQ ID NO: 1030381 - DNA, 25 bp, Homo sapien
tcaagtacgtgttgatgtcggacga

SEQ ID NO: 1030382 - DNA, 25 bp, Homo sapien
tgttgctgtaatgcactacgcctgc

SEQ ID NO: 1030383 - DNA, 25 bp, Homo sapien
aacagtgatgcttgcagcctgcagc

SEQ ID NO: 1030384 - DNA, 25 bp, Homo sapien
actgtaggtggtcaacagtgatgct

SEQ ID NO: 1030385 - DNA, 25 bp, Homo sapien
gcagagtcactgacacactgtaggt

SEQ ID NO: 1030386 - DNA, 25 bp, Homo sapien
gtcactgacacactgtaggtggtca

SEQ ID NO: 1030387 - DNA, 25 bp, Homo sapien
gctgtccatcctttgcatgtccaga

SEQ ID NO: 1030388 - DNA, 25 bp, Homo sapien
tgtccatcctttgcatgtccagaga

SEQ ID NO: 1030389 - DNA, 25 bp, Homo sapien
ctgtccatcctttgcatgtccagag

SEQ ID NO: 1030390 - DNA, 25 bp, Homo sapien
tgctgtccatcctttgcatgtccag

SEQ ID NO: 1030391 - DNA, 25 bp, Homo sapien
tctcctgagcaaacttggcaccatt

SEQ ID NO: 1030392 - DNA, 25 bp, Homo sapien
cattgatcaccttttgattcaagtc

SEQ ID NO: 1030393 - DNA, 25 bp, Homo sapien
tgatcaccttttgattcaagtcttt

SEQ ID NO: 1030394 - DNA, 25 bp, Homo sapien
aatcaatctcctgagcaaacttggc

SEQ ID NO: 1030395 - DNA, 25 bp, Homo sapien
tgactgaaggttcttccagtttctt

SEQ ID NO: 1030396 - DNA, 25 bp, Homo sapien
cttccagtttcttgaacacctgatt

SEQ ID NO: 1030397 - DNA, 25 bp, Homo sapien
agctctgactgaaggttcttccagt

SEQ ID NO: 1030398 - DNA, 25 bp, Homo sapien
agtttcttgaacacctgattcgtac

SEQ ID NO: 1030399 - DNA, 25 bp, Homo sapien
gtactgttggaggtgtgaccggata

SEQ ID NO: 1030400 - DNA, 25 bp, Homo sapien
tactgttggaggtgtgaccggataa

SEQ ID NO: 1030401 - DNA, 25 bp, Homo sapien
tgtgaccggataagtgtgagtatgg

SEQ ID NO: 1030402 - DNA, 25 bp, Homo sapien
accggataagtgtgagtatgggact

SEQ ID NO: 1030403 - DNA, 25 bp, Homo sapien
tgaccgaggtggaatgtggtccctg

SEQ ID NO: 1030404 - DNA, 25 bp, Homo sapien
aggtgaccgaggtggaatgtggtcc

SEQ ID NO: 1030405 - DNA, 25 bp, Homo sapien
ggtgaccgaggtggaatgtggtccc

SEQ ID NO: 1030406 - DNA, 25 bp, Homo sapien
gtgaccgaggtggaatgtggtccct

SEQ ID NO: 1030407 - DNA, 25 bp, Homo sapien
gaaaacagaggccatatgctgttta

SEQ ID NO: 1030408 - DNA, 25 bp, Homo sapien
gacatgtgttctcgcactggaccat

SEQ ID NO: 1030409 - DNA, 25 bp, Homo sapien
ggcctgagcacaagatgtagagaac

SEQ ID NO: 1030410 - DNA, 25 bp, Homo sapien
tcgcactggaccatggcatcctgga

SEQ ID NO: 1030411 - DNA, 25 bp, Homo sapien
gcatcatagatgcccgggatgctgg

SEQ ID NO: 1030412 - DNA, 25 bp, Homo sapien
gctggggacatcaatcagcatcata

SEQ ID NO: 1030413 - DNA, 25 bp, Homo sapien
agcatcatagatgcccgggatgctg

SEQ ID NO: 1030414 - DNA, 25 bp, Homo sapien
tcagcatcatagatgcccgggatgc

SEQ ID NO: 1030415 - DNA, 25 bp, Homo sapien
cagggcagcttgaggtactcccttc

SEQ ID NO: 1030416 - DNA, 25 bp, Homo sapien
gggcagcttgaggtactcccttcat

SEQ ID NO: 1030417 - DNA, 25 bp, Homo sapien
ggctttgaaggaagcgggagtgtgg

SEQ ID NO: 1030418 - DNA, 25 bp, Homo sapien
cagagggagatttgtcagggcagct

SEQ ID NO: 1030419 - DNA, 25 bp, Homo sapien
ctcctccggcaccttctcctccttc

SEQ ID NO: 1030420 - DNA, 25 bp, Homo sapien
ctcctcctccggcaccttctcctcc

SEQ ID NO: 1030421 - DNA, 25 bp, Homo sapien
cctcctcctcctccggcaccttctc

SEQ ID NO: 1030422 - DNA, 25 bp, Homo sapien
tcctcctcctccggcaccttctcct

SEQ ID NO: 1030423 - DNA, 25 bp, Homo sapien
gctgaatcagcccaacttcccctag

SEQ ID NO: 1030424 - DNA, 25 bp, Homo sapien
gaatcagcccaacttcccctagagc

SEQ ID NO: 1030425 - DNA, 25 bp, Homo sapien
tagagctgaatcagcccaacttccc

SEQ ID NO: 1030426 - DNA, 25 bp, Homo sapien
ctagagctgaatcagcccaacttcc

SEQ ID NO: 1030427 - DNA, 25 bp, Homo sapien
gggccccagccatatccatgggaat

SEQ ID NO: 1030428 - DNA, 25 bp, Homo sapien
catccaccctgctgcgatgagaggg

SEQ ID NO: 1030429 - DNA, 25 bp, Homo sapien
agcctcgtgcccctgtgtctatggg

SEQ ID NO: 1030430 - DNA, 25 bp, Homo sapien
ggctggccaccaaggaggttcctct

SEQ ID NO: 1030431 - DNA, 25 bp, Homo sapien
tggacgaggacccacaggtgcattt

SEQ ID NO: 1030432 - DNA, 25 bp, Homo sapien
gtggacgaggacccacaggtgcatt

SEQ ID NO: 1030433 - DNA, 25 bp, Homo sapien
tgtggacgaggacccacaggtgcat

SEQ ID NO: 1030434 - DNA, 25 bp, Homo sapien
ggacgaggacccacaggtgcatttc

SEQ ID NO: 1030435 - DNA, 25 bp, Homo sapien
cgggtggcgatgttggatgagtgac

SEQ ID NO: 1030436 - DNA, 25 bp, Homo sapien
ggtggcgatgttggatgagtgacca

SEQ ID NO: 1030437 - DNA, 25 bp, Homo sapien
cctcgggtggcgatgttggatgagt

SEQ ID NO: 1030438 - DNA, 25 bp, Homo sapien
tggcgatgttggatgagtgaccatt

SEQ ID NO: 1030439 - DNA, 25 bp, Homo sapien
gctgggcccactcagctctgctgag

SEQ ID NO: 1030440 - DNA, 25 bp, Homo sapien
ctgctgcatccacagccatgaagtt

SEQ ID NO: 1030441 - DNA, 25 bp, Homo sapien
tgcatccacagccatgaagttcttt

SEQ ID NO: 1030442 - DNA, 25 bp, Homo sapien
cacagccatgaagttctttgcccca

SEQ ID NO: 1030443 - DNA, 25 bp, Homo sapien
tcccctgtgcctgctgaatggttgg

SEQ ID NO: 1030444 - DNA, 25 bp, Homo sapien
gaacagcccataacctgggagcttg

SEQ ID NO: 1030445 - DNA, 25 bp, Homo sapien
gtcatctgcattcgttagcgcccca

SEQ ID NO: 1030446 - DNA, 25 bp, Homo sapien
taccacgacttaactgacttaactg

SEQ ID NO: 1030447 - DNA, 25 bp, Homo sapien
gagcttgcagaacagccctttctgc

SEQ ID NO: 1030448 - DNA, 25 bp, Homo sapien
cttcccatggttactcagccgcggg

SEQ ID NO: 1030449 - DNA, 25 bp, Homo sapien
agccgcggggttgccctcagcaagt

SEQ ID NO: 1030450 - DNA, 25 bp, Homo sapien
tcttctggggatagttcccatctcc

SEQ ID NO: 1030451 - DNA, 25 bp, Homo sapien
aagttgctgagctgagccgccatgg

SEQ ID NO: 1030452 - DNA, 25 bp, Homo sapien
gcacctccgctgtgcttttggccaa

SEQ ID NO: 1030453 - DNA, 25 bp, Homo sapien
tctgggagctcgctgttcacggcac

SEQ ID NO: 1030454 - DNA, 25 bp, Homo sapien
ctggatttgcacctccgctgtgctt

SEQ ID NO: 1030455 - DNA, 25 bp, Homo sapien
gggagctcgctgttcacggcacctg

SEQ ID NO: 1030456 - DNA, 25 bp, Homo sapien
cgagcgtgggctgccacttgctggg

SEQ ID NO: 1030457 - DNA, 25 bp, Homo sapien
gctgggtcactgtccgggttaagga

SEQ ID NO: 1030458 - DNA, 25 bp, Homo sapien
tgtcgttagtggagacaatgcaggt

SEQ ID NO: 1030459 - DNA, 25 bp, Homo sapien
taaggacgctgtcgttagtggagac

SEQ ID NO: 1030460 - DNA, 25 bp, Homo sapien
gccaggagggttgcggagaatcgaa

SEQ ID NO: 1030461 - DNA, 25 bp, Homo sapien
tattcactgtcacaatgccggcagc

SEQ ID NO: 1030462 - DNA, 25 bp, Homo sapien
ccatgtgactctttttgatgatagt

SEQ ID NO: 1030463 - DNA, 25 bp, Homo sapien
cgaaggggcgtgaacagctttgcac

SEQ ID NO: 1030464 - DNA, 25 bp, Homo sapien
gagggatccgtcctattgacacaga

SEQ ID NO: 1030465 - DNA, 25 bp, Homo sapien
taggacaaaatgtggcagacggctc

SEQ ID NO: 1030466 - DNA, 25 bp, Homo sapien
tgctggcgctggatgaaaagtcctt

SEQ ID NO: 1030467 - DNA, 25 bp, Homo sapien
gatggacatgttttccgcgggcagc

SEQ ID NO: 1030468 - DNA, 25 bp, Homo sapien
ggcctggacgtgtctgtgcccacct

SEQ ID NO: 1030469 - DNA, 25 bp, Homo sapien
tctcgtcgttggaaggaacgcgcca

SEQ ID NO: 1030470 - DNA, 25 bp, Homo sapien
cgcgccaggagatgtcgaacaggta

SEQ ID NO: 1030471 - DNA, 25 bp, Homo sapien
ttgccatgagccgtaagatccgatc

SEQ ID NO: 1030472 - DNA, 25 bp, Homo sapien
atcctccggccttgtgggaaccctg

SEQ ID NO: 1030473 - DNA, 25 bp, Homo sapien
tgcccagggagaacgcgtttgctct

SEQ ID NO: 1030474 - DNA, 25 bp, Homo sapien
tggccatcctccggccttgtgggaa

SEQ ID NO: 1030475 - DNA, 25 bp, Homo sapien
tagggtggccgcgtgtgctggcgtt

SEQ ID NO: 1030476 - DNA, 25 bp, Homo sapien
cagcctggaagatgtatcctgtcct

SEQ ID NO: 1030477 - DNA, 25 bp, Homo sapien
tccttgtagagtggatatagcagcc

SEQ ID NO: 1030478 - DNA, 25 bp, Homo sapien
gccggctccctgagcgtttccttaa

SEQ ID NO: 1030479 - DNA, 25 bp, Homo sapien
tcactgttggcccagaacagccggc

SEQ ID NO: 1030480 - DNA, 25 bp, Homo sapien
gcagactgtcccctgagagtcacca

SEQ ID NO: 1030481 - DNA, 25 bp, Homo sapien
gacttgttagggaaatctgtgtccc

SEQ ID NO: 1030482 - DNA, 25 bp, Homo sapien
catggctagaggacgaattatcgat

SEQ ID NO: 1030483 - DNA, 25 bp, Homo sapien
gagtcaccacttggacatggctaga

SEQ ID NO: 1030484 - DNA, 25 bp, Homo sapien
gccccagaagaagagtgcttgcttc

SEQ ID NO: 1030485 - DNA, 25 bp, Homo sapien
agccaagacgtggattcctgggagc

SEQ ID NO: 1030486 - DNA, 25 bp, Homo sapien
gtagccaccggagagccaagacgtg

SEQ ID NO: 1030487 - DNA, 25 bp, Homo sapien
gctgagtggcgagctcagggcctgg

SEQ ID NO: 1030488 - DNA, 25 bp, Homo sapien
tgctttgctgtgcagggcagttttc

SEQ ID NO: 1030489 - DNA, 25 bp, Homo sapien
tatggggctcagctgaatggtggaa

SEQ ID NO: 1030490 - DNA, 25 bp, Homo sapien
agcttctgggcctgctttgctgtgc

SEQ ID NO: 1030491 - DNA, 25 bp, Homo sapien
ctcagctgaatggtggaagcttctg

SEQ ID NO: 1030492 - DNA, 25 bp, Homo sapien
tgtgtctcatcctcaggggctggcg

SEQ ID NO: 1030493 - DNA, 25 bp, Homo sapien
ctggatcctgaccgcttgtgtgtct

SEQ ID NO: 1030494 - DNA, 25 bp, Homo sapien
tcctgaccgcttgtgtgtctcatcc

SEQ ID NO: 1030495 - DNA, 25 bp, Homo sapien
ggctggcggcgcaagctctatgtca

SEQ ID NO: 1030496 - DNA, 25 bp, Homo sapien
caccttgcagggacccagagcccac

SEQ ID NO: 1030497 - DNA, 25 bp, Homo sapien
tcagccttgtccttgcaccttgcag

SEQ ID NO: 1030498 - DNA, 25 bp, Homo sapien
cagccttgtccttgcaccttgcagg

SEQ ID NO: 1030499 - DNA, 25 bp, Homo sapien
ttgcaccttgcagggacccagagcc

SEQ ID NO: 1030500 - DNA, 25 bp, Homo sapien
cagtggccacccccgaaggttcagg

SEQ ID NO: 1030501 - DNA, 25 bp, Homo sapien
tagccgctcttgagggtgagctgcc

SEQ ID NO: 1030502 - DNA, 25 bp, Homo sapien
cgctcttgagggtgagctgccatga

SEQ ID NO: 1030503 - DNA, 25 bp, Homo sapien
ggcgtgtagccgctcttgagggtga

SEQ ID NO: 1030504 - DNA, 25 bp, Homo sapien
cctgccggcgtgtccagaaaaaggc

SEQ ID NO: 1030505 - DNA, 25 bp, Homo sapien
ggcaaggcctttggttctggcggca

SEQ ID NO: 1030506 - DNA, 25 bp, Homo sapien
caaggcctttggttctggcggcagc

SEQ ID NO: 1030507 - DNA, 25 bp, Homo sapien
agaaaaaggcaccttggcaaggcct

SEQ ID NO: 1030508 - DNA, 25 bp, Homo sapien
cctgtttcagcaaggtaatcctcca

SEQ ID NO: 1030509 - DNA, 25 bp, Homo sapien
tagcacttggaacaattccaggtcc

SEQ ID NO: 1030510 - DNA, 25 bp, Homo sapien
tcctgatacgtttgcaaagtcacag

SEQ ID NO: 1030511 - DNA, 25 bp, Homo sapien
tccaggtccttgtggttcctgatac

SEQ ID NO: 1030512 - DNA, 25 bp, Homo sapien
agttccctcatcttgagctgtaaca

SEQ ID NO: 1030513 - DNA, 25 bp, Homo sapien
gagctgtaacaacctcttgaggtat

SEQ ID NO: 1030514 - DNA, 25 bp, Homo sapien
ccttgtatgatctgctgatattggg

SEQ ID NO: 1030515 - DNA, 25 bp, Homo sapien
tgaggtataacttccactccaaact

SEQ ID NO: 1030516 - DNA, 25 bp, Homo sapien
ctgggagccccttgccacaggtgta

SEQ ID NO: 1030517 - DNA, 25 bp, Homo sapien
ccttgccacaggtgtagaagcctga

SEQ ID NO: 1030518 - DNA, 25 bp, Homo sapien
aagcctgagacaccgggaaggacat

SEQ ID NO: 1030519 - DNA, 25 bp, Homo sapien
acaggtgtagaagcctgagacaccg

SEQ ID NO: 1030520 - DNA, 25 bp, Homo sapien
agtgtgagcgtgggctgtctcttcc

SEQ ID NO: 1030521 - DNA, 25 bp, Homo sapien
gtctctgtcttcaagtgtgagcgtg

SEQ ID NO: 1030522 - DNA, 25 bp, Homo sapien
tctttgcaactgggtgttgtcatct

SEQ ID NO: 1030523 - DNA, 25 bp, Homo sapien
ggatcaagggactctagaacaaccc

SEQ ID NO: 1030524 - DNA, 25 bp, Homo sapien
ccagtgtctgatgggcacaagaaat

SEQ ID NO: 1030525 - DNA, 25 bp, Homo sapien
gatgggcacaagaaatgatggcccc

SEQ ID NO: 1030526 - DNA, 25 bp, Homo sapien
cgcgtaactgagtaacctggaaagg

SEQ ID NO: 1030527 - DNA, 25 bp, Homo sapien
aaatgatggccccacgcgtaactga

SEQ ID NO: 1030528 - DNA, 25 bp, Homo sapien
cagatgctcttccacggatttgtga

SEQ ID NO: 1030529 - DNA, 25 bp, Homo sapien
gaatctgtagggaatgatgcggctt

SEQ ID NO: 1030530 - DNA, 25 bp, Homo sapien
tgctcttccacggatttgtgaatct

SEQ ID NO: 1030531 - DNA, 25 bp, Homo sapien
tctgtagggaatgatgcggcttgca

SEQ ID NO: 1030532 - DNA, 25 bp, Homo sapien
tcaagcatgcttgacgatatcgcat

SEQ ID NO: 1030533 - DNA, 25 bp, Homo sapien
tgacgatatcgcatttctgcacctt

SEQ ID NO: 1030534 - DNA, 25 bp, Homo sapien
atttctgcacctttcgaggagacgt

SEQ ID NO: 1030535 - DNA, 25 bp, Homo sapien
ttctgcacctttcgaggagacgtgg

SEQ ID NO: 1030536 - DNA, 25 bp, Homo sapien
agttgccattgtccccaccaccgag

SEQ ID NO: 1030537 - DNA, 25 bp, Homo sapien
gttgccattgtccccaccaccgaga

SEQ ID NO: 1030538 - DNA, 25 bp, Homo sapien
tcagttgccattgtccccaccaccg

SEQ ID NO: 1030539 - DNA, 25 bp, Homo sapien
ctcagttgccattgtccccaccacc

SEQ ID NO: 1030540 - DNA, 25 bp, Homo sapien
aagacaggatctggagacaagggtt

SEQ ID NO: 1030541 - DNA, 25 bp, Homo sapien
tgcgtctggaaatgcgctttcttct

SEQ ID NO: 1030542 - DNA, 25 bp, Homo sapien
aagggttccagcccagttcggtcat

SEQ ID NO: 1030543 - DNA, 25 bp, Homo sapien
atgagcaaggttgcgtctggaaatg

SEQ ID NO: 1030544 - DNA, 25 bp, Homo sapien
ccattggtgcattccaggctccatc

SEQ ID NO: 1030545 - DNA, 25 bp, Homo sapien
agttccatgtggactcgcttctcta

SEQ ID NO: 1030546 - DNA, 25 bp, Homo sapien
gtgcattccaggctccatccagttc

SEQ ID NO: 1030547 - DNA, 25 bp, Homo sapien
gttccatgtggactcgcttctctac

SEQ ID NO: 1030548 - DNA, 25 bp, Homo sapien
ggtttcaggatgaacgcccattccc

SEQ ID NO: 1030549 - DNA, 25 bp, Homo sapien
gagacgtctgtgtgcgctggctctg

SEQ ID NO: 1030550 - DNA, 25 bp, Homo sapien
agacgtctgtgtgcgctggctctgg

SEQ ID NO: 1030551 - DNA, 25 bp, Homo sapien
aggatgaacgcccattccctgtgct

SEQ ID NO: 1030552 - DNA, 25 bp, Homo sapien
ggagaagcggtgctgagctgagcta

SEQ ID NO: 1030553 - DNA, 25 bp, Homo sapien
ggtggagaagcggtgctgagctgag

SEQ ID NO: 1030554 - DNA, 25 bp, Homo sapien
tgctgagctgagctagcagagcccg

SEQ ID NO: 1030555 - DNA, 25 bp, Homo sapien
gaagcggtgctgagctgagctagca

SEQ ID NO: 1030556 - DNA, 25 bp, Homo sapien
tcaatcccgaatcctcaggaagagt

SEQ ID NO: 1030557 - DNA, 25 bp, Homo sapien
agccctccttatccacgacacactt

SEQ ID NO: 1030558 - DNA, 25 bp, Homo sapien
ccctccttatccacgacacacttaa

SEQ ID NO: 1030559 - DNA, 25 bp, Homo sapien
gccctccttatccacgacacactta

SEQ ID NO: 1030560 - DNA, 25 bp, Homo sapien
actatgtatgaaaaatctgcttaaa

SEQ ID NO: 1030561 - DNA, 25 bp, Homo sapien
tatgtatgaaaaatctgcttaaata

SEQ ID NO: 1030562 - DNA, 25 bp, Homo sapien
ctatactaatctgacaaagtaaact

SEQ ID NO: 1030563 - DNA, 25 bp, Homo sapien
tatactaatctgacaaagtaaactt

SEQ ID NO: 1030564 - DNA, 25 bp, Homo sapien
gaagttggacgaaaacataggagca

SEQ ID NO: 1030565 - DNA, 25 bp, Homo sapien
ggtaaggagcctctgagtacgtctc

SEQ ID NO: 1030566 - DNA, 25 bp, Homo sapien
tccagcggctgttgtgcgacgtcag

SEQ ID NO: 1030567 - DNA, 25 bp, Homo sapien
caggaagcagtttgttgaagttgga

SEQ ID NO: 1030568 - DNA, 25 bp, Homo sapien
ttctgctcaggctgccccacgattc

SEQ ID NO: 1030569 - DNA, 25 bp, Homo sapien
agcatagacacagggctgtgtctcc

SEQ ID NO: 1030570 - DNA, 25 bp, Homo sapien
gctgccccacgattccctgtgggct

SEQ ID NO: 1030571 - DNA, 25 bp, Homo sapien
cttcctcttcagcatagacacaggg

SEQ ID NO: 1030572 - DNA, 25 bp, Homo sapien
gaaattgagaggcaactccagattt

SEQ ID NO: 1030573 - DNA, 25 bp, Homo sapien
agggcaacctgtcccgcatcgtgtg

SEQ ID NO: 1030574 - DNA, 25 bp, Homo sapien
gagaggcaactccagatttattggc

SEQ ID NO: 1030575 - DNA, 25 bp, Homo sapien
tcgtgtgcattaacccgctcggcat

SEQ ID NO: 1030576 - DNA, 25 bp, Homo sapien
atctgaatttgatggtgcccttctt

SEQ ID NO: 1030577 - DNA, 25 bp, Homo sapien
ccatctgaatttgatggtgcccttc

SEQ ID NO: 1030578 - DNA, 25 bp, Homo sapien
catctgaatttgatggtgcccttct

SEQ ID NO: 1030579 - DNA, 25 bp, Homo sapien
attctctgcaggcagccacgtttcc

SEQ ID NO: 1030580 - DNA, 25 bp, Homo sapien
aggcagccacgtttcctttcagctg

SEQ ID NO: 1030581 - DNA, 25 bp, Homo sapien
gtcatcactgccaacttccacccat

SEQ ID NO: 1030582 - DNA, 25 bp, Homo sapien
tgccaacttccacccatcccattct

SEQ ID NO: 1030583 - DNA, 25 bp, Homo sapien
taggaccgtatattagaagctgcag

SEQ ID NO: 1030584 - DNA, 25 bp, Homo sapien
cacaggatggagtgtgtgccgcctc

SEQ ID NO: 1030585 - DNA, 25 bp, Homo sapien
tgctaagaggcacatcacggagcgt

SEQ ID NO: 1030586 - DNA, 25 bp, Homo sapien
cgatggtgccttcgtgtaggtgcta

SEQ ID NO: 1030587 - DNA, 25 bp, Homo sapien
ccacagggaaaagccatgtacccca

SEQ ID NO: 1030588 - DNA, 25 bp, Homo sapien
cagggaaaagccatgtaccccagtc

SEQ ID NO: 1030589 - DNA, 25 bp, Homo sapien
cacagggaaaagccatgtaccccag

SEQ ID NO: 1030590 - DNA, 25 bp, Homo sapien
acagggaaaagccatgtaccccagt

SEQ ID NO: 1030591 - DNA, 25 bp, Homo sapien
ttggaaaccattatcagaaagaacc

SEQ ID NO: 1030592 - DNA, 25 bp, Homo sapien
ccatggacacgatggccacggagat

SEQ ID NO: 1030593 - DNA, 25 bp, Homo sapien
ttgccatggacacgatggccacgga

SEQ ID NO: 1030594 - DNA, 25 bp, Homo sapien
gaaagaaccactgaggtgggagagc

SEQ ID NO: 1030595 - DNA, 25 bp, Homo sapien
cccaggcttgtgttccagaagagct

SEQ ID NO: 1030596 - DNA, 25 bp, Homo sapien
ccaaggctcccaggcttgtgttcca

SEQ ID NO: 1030597 - DNA, 25 bp, Homo sapien
agggtggcccgaagtcagtgctcct

SEQ ID NO: 1030598 - DNA, 25 bp, Homo sapien
tgctcctatagtccccgctctggta

SEQ ID NO: 1030599 - DNA, 25 bp, Homo sapien
ctgacattcttgtggtggttcactc

SEQ ID NO: 1030600 - DNA, 25 bp, Homo sapien
agacacatggatccagtacagtctt

SEQ ID NO: 1030601 - DNA, 25 bp, Homo sapien
cacatggatccagtacagtcttcac

SEQ ID NO: 1030602 - DNA, 25 bp, Homo sapien
acatggatccagtacagtcttcaca

SEQ ID NO: 1030603 - DNA, 25 bp, Homo sapien
ttggggtgcaggcggctagaaccgg

SEQ ID NO: 1030604 - DNA, 25 bp, Homo sapien
gtgcaggcggctagaaccgggtcct

SEQ ID NO: 1030605 - DNA, 25 bp, Homo sapien
tggggtgcaggcggctagaaccggg

SEQ ID NO: 1030606 - DNA, 25 bp, Homo sapien
gggtgcaggcggctagaaccgggtc

SEQ ID NO: 1030607 - DNA, 25 bp, Homo sapien
gatgcagttcattgtgcagaggatt

SEQ ID NO: 1030608 - DNA, 25 bp, Homo sapien
tcagatgcagttcattgtgcagagg

SEQ ID NO: 1030609 - DNA, 25 bp, Homo sapien
cagttcattgtgcagaggatttgag

SEQ ID NO: 1030610 - DNA, 25 bp, Homo sapien
gttcattgtgcagaggatttgagca

SEQ ID NO: 1030611 - DNA, 25 bp, Homo sapien
cttgactacgggagggctttggact

SEQ ID NO: 1030612 - DNA, 25 bp, Homo sapien
atgacctaagccgtcaaaaacaggg

SEQ ID NO: 1030613 - DNA, 25 bp, Homo sapien
ggaagtgatgacctaagccgtcaaa

SEQ ID NO: 1030614 - DNA, 25 bp, Homo sapien
aaacaggggctttagcttgactacg

SEQ ID NO: 1030615 - DNA, 25 bp, Homo sapien
tgtgcatcagcccattgaaggctcc

SEQ ID NO: 1030616 - DNA, 25 bp, Homo sapien
aaggctcctacacccccttgaagat

SEQ ID NO: 1030617 - DNA, 25 bp, Homo sapien
gtcttctgagttggcagttgctctg

SEQ ID NO: 1030618 - DNA, 25 bp, Homo sapien
caagcaggcctctttagggccctct

SEQ ID NO: 1030619 - DNA, 25 bp, Homo sapien
gggaagccaggagatacgctccacg

SEQ ID NO: 1030620 - DNA, 25 bp, Homo sapien
gatgggcccaagtgaagggttgtgg

SEQ ID NO: 1030621 - DNA, 25 bp, Homo sapien
gctccacgtctgagcaggtgctctg

SEQ ID NO: 1030622 - DNA, 25 bp, Homo sapien
caggagatacgctccacgtctgagc

SEQ ID NO: 1030623 - DNA, 25 bp, Homo sapien
ctggtgactggaggatccgatggca

SEQ ID NO: 1030624 - DNA, 25 bp, Homo sapien
ctggaggatccgatggcagatggca

SEQ ID NO: 1030625 - DNA, 25 bp, Homo sapien
tgactggaggatccgatggcagatg

SEQ ID NO: 1030626 - DNA, 25 bp, Homo sapien
ggtgactggaggatccgatggcaga

SEQ ID NO: 1030627 - DNA, 25 bp, Homo sapien
ctggtgcgtggaagcgtctccacta

SEQ ID NO: 1030628 - DNA, 25 bp, Homo sapien
gaagcgtctccactacgtggctggc

SEQ ID NO: 1030629 - DNA, 25 bp, Homo sapien
tctccactacgtggctggcctcaga

SEQ ID NO: 1030630 - DNA, 25 bp, Homo sapien
tgggggttgaacacctgctgctcgg

SEQ ID NO: 1030631 - DNA, 25 bp, Homo sapien
tttctcgatggggttggtctcctga

SEQ ID NO: 1030632 - DNA, 25 bp, Homo sapien
acctttggggtgtaatgattgcctt

SEQ ID NO: 1030633 - DNA, 25 bp, Homo sapien
gtctcctgagaaagggctgcaaacc

SEQ ID NO: 1030634 - DNA, 25 bp, Homo sapien
gggctgcaaaccacaccacgtgtgc

SEQ ID NO: 1030635 - DNA, 25 bp, Homo sapien
tccatgcgtcttctgccagtcggca

SEQ ID NO: 1030636 - DNA, 25 bp, Homo sapien
agaacagtcgacaccccaacgtggt

SEQ ID NO: 1030637 - DNA, 25 bp, Homo sapien
gaaatttcattgtggtacaagtctg

SEQ ID NO: 1030638 - DNA, 25 bp, Homo sapien
cctgggtgggcttaatcttgtccat

SEQ ID NO: 1030639 - DNA, 25 bp, Homo sapien
tgttcttgggatgaccgcctggctt

SEQ ID NO: 1030640 - DNA, 25 bp, Homo sapien
tctgtgacgttgtggccatgaggcc

SEQ ID NO: 1030641 - DNA, 25 bp, Homo sapien
ctggctttgtgctgcaggcctcgaa

SEQ ID NO: 1030642 - DNA, 25 bp, Homo sapien
cagtaggcctctgcagacgtgggtt

SEQ ID NO: 1030643 - DNA, 25 bp, Homo sapien
ttgatccctttctgtacttccacgc

SEQ ID NO: 1030644 - DNA, 25 bp, Homo sapien
tgtacgtttatctgctacccaggga

SEQ ID NO: 1030645 - DNA, 25 bp, Homo sapien
ggtctgcaaatgttcgaagtccatg

SEQ ID NO: 1030646 - DNA, 25 bp, Homo sapien
tctgtgttggtcatgctgagagctc

SEQ ID NO: 1030647 - DNA, 25 bp, Homo sapien
ttctttgggccagaggttgcatctt

SEQ ID NO: 1030648 - DNA, 25 bp, Homo sapien
tctttgggccagaggttgcatcttg

SEQ ID NO: 1030649 - DNA, 25 bp, Homo sapien
gtattctttgggccagaggttgcat

SEQ ID NO: 1030650 - DNA, 25 bp, Homo sapien
tattctttgggccagaggttgcatc

SEQ ID NO: 1030651 - DNA, 25 bp, Homo sapien
tattgaagctgtcagtcacccctgg

SEQ ID NO: 1030652 - DNA, 25 bp, Homo sapien
tcctggcaggaatgcatttattgaa

SEQ ID NO: 1030653 - DNA, 25 bp, Homo sapien
cctccgtgtggtaatgctattttcc

SEQ ID NO: 1030654 - DNA, 25 bp, Homo sapien
tactttccaaagcacctccgtgtgg

SEQ ID NO: 1030655 - DNA, 25 bp, Homo sapien
cggtgggggacagtgcggtatttat

SEQ ID NO: 1030656 - DNA, 25 bp, Homo sapien
ctgtgatggtgcctttcctggcgga

SEQ ID NO: 1030657 - DNA, 25 bp, Homo sapien
atggtgcctttcctggcggaggaca

SEQ ID NO: 1030658 - DNA, 25 bp, Homo sapien
acagtgcggtatttatctgatgatg

SEQ ID NO: 1030659 - DNA, 25 bp, Homo sapien
caggggtttggcccgtgaactgaca

SEQ ID NO: 1030660 - DNA, 25 bp, Homo sapien
aactcagtcacgtagggtccctggg

SEQ ID NO: 1030661 - DNA, 25 bp, Homo sapien
gtgggaactcagtcacgtagggtcc

SEQ ID NO: 1030662 - DNA, 25 bp, Homo sapien
cgtgaactgacagagatgtggggcc

SEQ ID NO: 1030663 - DNA, 25 bp, Homo sapien
gcacctcgccaagttctgtgcatgc

SEQ ID NO: 1030664 - DNA, 25 bp, Homo sapien
ctgtgcatgcaaagacaaacacgct

SEQ ID NO: 1030665 - DNA, 25 bp, Homo sapien
taacgacgggcaggcacctcgccaa

SEQ ID NO: 1030666 - DNA, 25 bp, Homo sapien
catgcaaagacaaacacgctgtctc

SEQ ID NO: 1030667 - DNA, 25 bp, Homo sapien
acaccccagatgctgacagactgca

SEQ ID NO: 1030668 - DNA, 25 bp, Homo sapien
tttttcctgatagccctgacacccc

SEQ ID NO: 1030669 - DNA, 25 bp, Homo sapien
gcccccagcagacagtctctgtgtt

SEQ ID NO: 1030670 - DNA, 25 bp, Homo sapien
ttcctgatagccctgacaccccaga

SEQ ID NO: 1030671 - DNA, 25 bp, Homo sapien
tgtggcttccctgctgaagtgtcct

SEQ ID NO: 1030672 - DNA, 25 bp, Homo sapien
gcttccctgctgaagtgtccttcac

SEQ ID NO: 1030673 - DNA, 25 bp, Homo sapien
cattcctctgtgtattccagctgtg

SEQ ID NO: 1030674 - DNA, 25 bp, Homo sapien
ccctgctgaagtgtccttcacactg

SEQ ID NO: 1030675 - DNA, 25 bp, Homo sapien
gggggccctggctctttgaggggca

SEQ ID NO: 1030676 - DNA, 25 bp, Homo sapien
tgggggccctggctctttgaggggc

SEQ ID NO: 1030677 - DNA, 25 bp, Homo sapien
ctgggggccctggctctttgagggg

SEQ ID NO: 1030678 - DNA, 25 bp, Homo sapien
accgtccggagcctcttctggtcgg

SEQ ID NO: 1030679 - DNA, 25 bp, Homo sapien
taataaagtgacattcagcctgagc

SEQ ID NO: 1030680 - DNA, 25 bp, Homo sapien
tgtagcttaatggtgcacctcgagg

SEQ ID NO: 1030681 - DNA, 25 bp, Homo sapien
cactgggatgccgtagattgcaggc

SEQ ID NO: 1030682 - DNA, 25 bp, Homo sapien
gccttatggaacagacaagaactga

SEQ ID NO: 1030683 - DNA, 25 bp, Homo sapien
gaactgaggagattttcaccgctgc

SEQ ID NO: 1030684 - DNA, 25 bp, Homo sapien
ttttcaccgctgctggagtaccgga

SEQ ID NO: 1030685 - DNA, 25 bp, Homo sapien
gagcacagacatcccaacccgggct

SEQ ID NO: 1030686 - DNA, 25 bp, Homo sapien
gaatcccaggggctacagagcagca

SEQ ID NO: 1030687 - DNA, 25 bp, Homo sapien
gaagatgcttgtgaccttggtgcct

SEQ ID NO: 1030688 - DNA, 25 bp, Homo sapien
tgtcctgaagacctgtttacttgtt

SEQ ID NO: 1030689 - DNA, 25 bp, Homo sapien
aagatgcttgtgaccttggtgcctg

SEQ ID NO: 1030690 - DNA, 25 bp, Homo sapien
agatgcttgtgaccttggtgcctgg

SEQ ID NO: 1030691 - DNA, 25 bp, Homo sapien
gctgcagatctgtgcggatggccac

SEQ ID NO: 1030692 - DNA, 25 bp, Homo sapien
tcaggagggagccacggtacccctg

SEQ ID NO: 1030693 - DNA, 25 bp, Homo sapien
cgggaatcgcccagaatgcacaggc

SEQ ID NO: 1030694 - DNA, 25 bp, Homo sapien
ggatggccacgggaatcgcccagaa

SEQ ID NO: 1030695 - DNA, 25 bp, Homo sapien
ccaggcttatgtgaggcatgggctc

SEQ ID NO: 1030696 - DNA, 25 bp, Homo sapien
tggttgctcatcaccaaaggagcgc

SEQ ID NO: 1030697 - DNA, 25 bp, Homo sapien
tcctcacctcaggaatggaggattg

SEQ ID NO: 1030698 - DNA, 25 bp, Homo sapien
aggagcgcagaaccagagagccctt

SEQ ID NO: 1030699 - DNA, 25 bp, Homo sapien
caatcctggtgcattggcagctccg

SEQ ID NO: 1030700 - DNA, 25 bp, Homo sapien
tccagagacgtctcccagtaattgg

SEQ ID NO: 1030701 - DNA, 25 bp, Homo sapien
gcaggactgggagtacccgaggccc

SEQ ID NO: 1030702 - DNA, 25 bp, Homo sapien
aggcaaaggccagagacgctgggct

SEQ ID NO: 1030703 - DNA, 25 bp, Homo sapien
ggggcccaggacaccatgggaggga

SEQ ID NO: 1030704 - DNA, 25 bp, Homo sapien
gggcccaggacaccatgggagggag

SEQ ID NO: 1030705 - DNA, 25 bp, Homo sapien
gcccaggacaccatgggagggaggg

SEQ ID NO: 1030706 - DNA, 25 bp, Homo sapien
caggggcccaggacaccatgggagg

SEQ ID NO: 1030707 - DNA, 25 bp, Homo sapien
tgtgacgtccccacccacgtggtgt

SEQ ID NO: 1030708 - DNA, 25 bp, Homo sapien
tccttcctcccgtggattcgggagc

SEQ ID NO: 1030709 - DNA, 25 bp, Homo sapien
cttgggctgagtgactgagccatga

SEQ ID NO: 1030710 - DNA, 25 bp, Homo sapien
cacgtggtgtttgtgctcggcttga

SEQ ID NO: 1030711 - DNA, 25 bp, Homo sapien
ggaggggtccttctcagagggaaga

SEQ ID NO: 1030712 - DNA, 25 bp, Homo sapien
agaggaggggtccttctcagaggga

SEQ ID NO: 1030713 - DNA, 25 bp, Homo sapien
tacagacagaggaggggtccttctc

SEQ ID NO: 1030714 - DNA, 25 bp, Homo sapien
ctacagacagaggaggggtccttct

SEQ ID NO: 1030715 - DNA, 25 bp, Homo sapien
gggcgttctgccagccgcgctttct

SEQ ID NO: 1030716 - DNA, 25 bp, Homo sapien
gcatttccgggctgaactgtttccc

SEQ ID NO: 1030717 - DNA, 25 bp, Homo sapien
agcgcttgtccccagcaggaaaatg

SEQ ID NO: 1030718 - DNA, 25 bp, Homo sapien
gccgcgctttctcatggactgctgt

SEQ ID NO: 1030719 - DNA, 25 bp, Homo sapien
tgacatcaggctgaataagaggcat

SEQ ID NO: 1030720 - DNA, 25 bp, Homo sapien
ccagggccacgtgccggggctggaa

SEQ ID NO: 1030721 - DNA, 25 bp, Homo sapien
ccacgtgccggggctggaagggtga

SEQ ID NO: 1030722 - DNA, 25 bp, Homo sapien
tggtgacatcaggctgaataagagg

SEQ ID NO: 1030723 - DNA, 25 bp, Homo sapien
tcctgaacgtgtaaagggcggaagc

SEQ ID NO: 1030724 - DNA, 25 bp, Homo sapien
gagtctccgtctccagaatgctggg

SEQ ID NO: 1030725 - DNA, 25 bp, Homo sapien
gctcctgttttggtgtgaaatccca

SEQ ID NO: 1030726 - DNA, 25 bp, Homo sapien
tctgatgagtgtgggctgtcttgcc

SEQ ID NO: 1030727 - DNA, 25 bp, Homo sapien
cattaggaaatgtggccctattggg

SEQ ID NO: 1030728 - DNA, 25 bp, Homo sapien
cttgcccattaggaaatgtggccct

SEQ ID NO: 1030729 - DNA, 25 bp, Homo sapien
ggaaatgtggccctattgggatctg

SEQ ID NO: 1030730 - DNA, 25 bp, Homo sapien
aaatgtggccctattgggatctgga

SEQ ID NO: 1030731 - DNA, 25 bp, Homo sapien
tgggcttccggctgttctgtgtctc

SEQ ID NO: 1030732 - DNA, 25 bp, Homo sapien
cagactccagcactggcgcctcatc

SEQ ID NO: 1030733 - DNA, 25 bp, Homo sapien
ttgggcttccggctgttctgtgtct

SEQ ID NO: 1030734 - DNA, 25 bp, Homo sapien
tgccagactccagcactggcgcctc

SEQ ID NO: 1030735 - DNA, 25 bp, Homo sapien
tgagccagtagtgagcccactttgc

SEQ ID NO: 1030736 - DNA, 25 bp, Homo sapien
cagaggtctcaatgagcatctgagc

SEQ ID NO: 1030737 - DNA, 25 bp, Homo sapien
ggcagagtttagtctgcagacggct

SEQ ID NO: 1030738 - DNA, 25 bp, Homo sapien
tcaggtcccgttgccagaggtgggg

SEQ ID NO: 1030739 - DNA, 25 bp, Homo sapien
tctttgatgagaggcggtgcattca

SEQ ID NO: 1030740 - DNA, 25 bp, Homo sapien
ggctggcatgcagacgggcctccgt

SEQ ID NO: 1030741 - DNA, 25 bp, Homo sapien
ttcatccgatccgacgggcggcttg

SEQ ID NO: 1030742 - DNA, 25 bp, Homo sapien
gggcggcttggcatcgggcaacggg

SEQ ID NO: 1030743 - DNA, 25 bp, Homo sapien
tttgcaggcctggattgaaagtcaa

SEQ ID NO: 1030744 - DNA, 25 bp, Homo sapien
atattttgcaggcctggattgaaag

SEQ ID NO: 1030745 - DNA, 25 bp, Homo sapien
agatattttgcaggcctggattgaa

SEQ ID NO: 1030746 - DNA, 25 bp, Homo sapien
attttgcaggcctggattgaaagtc

SEQ ID NO: 1030747 - DNA, 25 bp, Homo sapien
gtccacgcaccagtaatgccctgtg

SEQ ID NO: 1030748 - DNA, 25 bp, Homo sapien
taatcccctgtatccacacaccagg

SEQ ID NO: 1030749 - DNA, 25 bp, Homo sapien
gtaatcccctgtatccacacaccag

SEQ ID NO: 1030750 - DNA, 25 bp, Homo sapien
taatcccctgtatccacacaccagt

SEQ ID NO: 1030751 - DNA, 25 bp, Homo sapien
tctcccgtatccacacaccagtaat

SEQ ID NO: 1030752 - DNA, 25 bp, Homo sapien
cctcgtcatgggaaagcgtgtgctg

SEQ ID NO: 1030753 - DNA, 25 bp, Homo sapien
agtgtggtgtccaggctagccaggt

SEQ ID NO: 1030754 - DNA, 25 bp, Homo sapien
aatttaggggactgagcgatgttct

SEQ ID NO: 1030755 - DNA, 25 bp, Homo sapien
tgagcgatgttctccgcgggtggca

SEQ ID NO: 1030756 - DNA, 25 bp, Homo sapien
gggcactgggccgtaaggctggacg

SEQ ID NO: 1030757 - DNA, 25 bp, Homo sapien
taaggctggacgaggccctgtgttg

SEQ ID NO: 1030758 - DNA, 25 bp, Homo sapien
tgccctgtgcgggaggcgcttctcc

SEQ ID NO: 1030759 - DNA, 25 bp, Homo sapien
ctccctcggcatggacgggccggat

SEQ ID NO: 1030760 - DNA, 25 bp, Homo sapien
tgggtgctctggctttccgggaaag

SEQ ID NO: 1030761 - DNA, 25 bp, Homo sapien
ctgggtgctctggctttccgggaaa

SEQ ID NO: 1030762 - DNA, 25 bp, Homo sapien
ggctgggtgctctggctttccggga

SEQ ID NO: 1030763 - DNA, 25 bp, Homo sapien
gctgggtgctctggctttccgggaa

SEQ ID NO: 1030764 - DNA, 25 bp, Homo sapien
ggaaggaaacggcaggccctgtcac

SEQ ID NO: 1030765 - DNA, 25 bp, Homo sapien
tgggaaggaaacggcaggccctgtc

SEQ ID NO: 1030766 - DNA, 25 bp, Homo sapien
ccatgggaaggaaacggcaggccct

SEQ ID NO: 1030767 - DNA, 25 bp, Homo sapien
atgggaaggaaacggcaggccctgt

SEQ ID NO: 1030768 - DNA, 25 bp, Homo sapien
ttggtcaacattggttttggccagg

SEQ ID NO: 1030769 - DNA, 25 bp, Homo sapien
tggtttggtcaacattggttttggc

SEQ ID NO: 1030770 - DNA, 25 bp, Homo sapien
ttggccagggccattcccggaaatc

SEQ ID NO: 1030771 - DNA, 25 bp, Homo sapien
gggccattcccggaaatcttctgat

SEQ ID NO: 1030772 - DNA, 25 bp, Homo sapien
ctcttcctaaggatggccggagcgc

SEQ ID NO: 1030773 - DNA, 25 bp, Homo sapien
atgcaggctctacaaggccccaggg

SEQ ID NO: 1030774 - DNA, 25 bp, Homo sapien
ccggagcgccaagaggcaagtcaaa

SEQ ID NO: 1030775 - DNA, 25 bp, Homo sapien
tcctcgggccaagccggaagttgct

SEQ ID NO: 1030776 - DNA, 25 bp, Homo sapien
agctcaaccattggcggcctggcca

SEQ ID NO: 1030777 - DNA, 25 bp, Homo sapien
ccaccaggttcatcttgagatccgg

SEQ ID NO: 1030778 - DNA, 25 bp, Homo sapien
aggcacacagctcaaccattggcgg

SEQ ID NO: 1030779 - DNA, 25 bp, Homo sapien
gttcatcttgagatccggctgcccg

SEQ ID NO: 1030780 - DNA, 25 bp, Homo sapien
gggcccggatgcaggtggtcaggct

SEQ ID NO: 1030781 - DNA, 25 bp, Homo sapien
ttctgccctgctcgatggctccgag

SEQ ID NO: 1030782 - DNA, 25 bp, Homo sapien
tggctccgagcaatgtaactgccac

SEQ ID NO: 1030783 - DNA, 25 bp, Homo sapien
tgctcgatggctccgagcaatgtaa

SEQ ID NO: 1030784 - DNA, 25 bp, Homo sapien
gcgagagtcgcctttgtcctgatgt

SEQ ID NO: 1030785 - DNA, 25 bp, Homo sapien
tccctagtctgggttctcggagagt

SEQ ID NO: 1030786 - DNA, 25 bp, Homo sapien
gactttctccgcaaaccagctcggg

SEQ ID NO: 1030787 - DNA, 25 bp, Homo sapien
tgctgatcaggagctctgcggttca

SEQ ID NO: 1030788 - DNA, 25 bp, Homo sapien
tcaactagcgaacagctcgagccat

SEQ ID NO: 1030789 - DNA, 25 bp, Homo sapien
tcgagccatttgacattggccagga

SEQ ID NO: 1030790 - DNA, 25 bp, Homo sapien
gaggcgtctggcctgaacctctaag

SEQ ID NO: 1030791 - DNA, 25 bp, Homo sapien
taagccgagcagaaatgttcactgt

SEQ ID NO: 1030792 - DNA, 25 bp, Homo sapien
tcgcctgcacactggccggatgctg

SEQ ID NO: 1030793 - DNA, 25 bp, Homo sapien
acagccatcgcctgcacactggccg

SEQ ID NO: 1030794 - DNA, 25 bp, Homo sapien
agcctcgccacacagccatcgcctg

SEQ ID NO: 1030795 - DNA, 25 bp, Homo sapien
aggctcggagatcccagcctcgcca

SEQ ID NO: 1030796 - DNA, 25 bp, Homo sapien
acccgtcacggtctgtcgggcggcg

SEQ ID NO: 1030797 - DNA, 25 bp, Homo sapien
ccgtcacggtctgtcgggcggcgct

SEQ ID NO: 1030798 - DNA, 25 bp, Homo sapien
gtcacggtctgtcgggcggcgctga

SEQ ID NO: 1030799 - DNA, 25 bp, Homo sapien
gacccgtcacggtctgtcgggcggc

SEQ ID NO: 1030800 - DNA, 25 bp, Homo sapien
tcggcgcgggccacatccctcagct

SEQ ID NO: 1030801 - DNA, 25 bp, Homo sapien
tgtctgccattttcggcgcgggcca

SEQ ID NO: 1030802 - DNA, 25 bp, Homo sapien
tcagctcctgcgtctctgctgcgaa

SEQ ID NO: 1030803 - DNA, 25 bp, Homo sapien
cttgttgtctgccattttcggcgcg

SEQ ID NO: 1030804 - DNA, 25 bp, Homo sapien
tatgcttagagccattggtcccacg

SEQ ID NO: 1030805 - DNA, 25 bp, Homo sapien
tggtcccacggccacatctgtgggc

SEQ ID NO: 1030806 - DNA, 25 bp, Homo sapien
ctccgtggggacagtcgatgccgta

SEQ ID NO: 1030807 - DNA, 25 bp, Homo sapien
cccacgtgcctcaggcagggatatg

SEQ ID NO: 1030808 - DNA, 25 bp, Homo sapien
tgctgttccccgtcgtaccacgcga

SEQ ID NO: 1030809 - DNA, 25 bp, Homo sapien
tccctgtccactccgtctggctctc

SEQ ID NO: 1030810 - DNA, 25 bp, Homo sapien
gtcgtaccacgcgagggcaaggcct

SEQ ID NO: 1030811 - DNA, 25 bp, Homo sapien
agggcaaggcctgccccgttagcct

SEQ ID NO: 1030812 - DNA, 25 bp, Homo sapien
agccacatgtgggttccatccagcc

SEQ ID NO: 1030813 - DNA, 25 bp, Homo sapien
tcatggaagaggctccggggagtcc

SEQ ID NO: 1030814 - DNA, 25 bp, Homo sapien
cacatgtgggttccatccagccctg

SEQ ID NO: 1030815 - DNA, 25 bp, Homo sapien
caggaagccacatgtgggttccatc

SEQ ID NO: 1030816 - DNA, 25 bp, Homo sapien
tggtgccccgggattgctcgttaga

SEQ ID NO: 1030817 - DNA, 25 bp, Homo sapien
tcgttagagggcctgagcaaagccc

SEQ ID NO: 1030818 - DNA, 25 bp, Homo sapien
aagaggcgcatttcttctcggccca

SEQ ID NO: 1030819 - DNA, 25 bp, Homo sapien
tagaggtcatcagtcatctcgggct

SEQ ID NO: 1030820 - DNA, 25 bp, Homo sapien
ccagttctcccgtgcgttatgggta

SEQ ID NO: 1030821 - DNA, 25 bp, Homo sapien
tacccacatctgtcccgtggttcgg

SEQ ID NO: 1030822 - DNA, 25 bp, Homo sapien
cgtggttcggatccagttctcccgt

SEQ ID NO: 1030823 - DNA, 25 bp, Homo sapien
gcgttatgggtatccacgtgtttgg

SEQ ID NO: 1030824 - DNA, 25 bp, Homo sapien
gctgttcctcagtgaccagccgttc

SEQ ID NO: 1030825 - DNA, 25 bp, Homo sapien
gccaccggctgtctcaaacctctga

SEQ ID NO: 1030826 - DNA, 25 bp, Homo sapien
gctgagaggccgccttagagcagag

SEQ ID NO: 1030827 - DNA, 25 bp, Homo sapien
cgtcggttatctccagcatggcaag

SEQ ID NO: 1030828 - DNA, 25 bp, Homo sapien
ctggtgtgtccccctgcagggttgg

SEQ ID NO: 1030829 - DNA, 25 bp, Homo sapien
gccccattctgctctagtgggcctg

SEQ ID NO: 1030830 - DNA, 25 bp, Homo sapien
tagctgctctagccccattctgctc

SEQ ID NO: 1030831 - DNA, 25 bp, Homo sapien
ccccattctgctctagtgggcctgg

SEQ ID NO: 1030832 - DNA, 25 bp, Homo sapien
gaaaccactgccgtagtcttggaac

SEQ ID NO: 1030833 - DNA, 25 bp, Homo sapien
ataacccacgtgaaactcctgcgag

SEQ ID NO: 1030834 - DNA, 25 bp, Homo sapien
taggaggccaactcgggccctgtgt

SEQ ID NO: 1030835 - DNA, 25 bp, Homo sapien
tcttgctgttgctcggcagagggca

SEQ ID NO: 1030836 - DNA, 25 bp, Homo sapien
ttaggagaccgctgctttctgcctc

SEQ ID NO: 1030837 - DNA, 25 bp, Homo sapien
tgtctaacttcttaggagaccgctg

SEQ ID NO: 1030838 - DNA, 25 bp, Homo sapien
gattcctcgtgtctaacttcttagg

SEQ ID NO: 1030839 - DNA, 25 bp, Homo sapien
tcgctgcccgagattcctcgtgtct

SEQ ID NO: 1030840 - DNA, 25 bp, Homo sapien
ggtcgtcggacatgcaaatcaggat

SEQ ID NO: 1030841 - DNA, 25 bp, Homo sapien
ttcacgccagtcacattaccattgg

SEQ ID NO: 1030842 - DNA, 25 bp, Homo sapien
caaagcgcagccctcgacttgggct

SEQ ID NO: 1030843 - DNA, 25 bp, Homo sapien
tctgattggctattgttcacgccag

SEQ ID NO: 1030844 - DNA, 25 bp, Homo sapien
gacaaaggagtgcttccatatcccc

SEQ ID NO: 1030845 - DNA, 25 bp, Homo sapien
tgaacatggcgggtcacccgtcacc

SEQ ID NO: 1030846 - DNA, 25 bp, Homo sapien
tcaggcattcgatggagctcaggtg

SEQ ID NO: 1030847 - DNA, 25 bp, Homo sapien
tcccacgccacgacaaaggagtgct

SEQ ID NO: 1030848 - DNA, 25 bp, Homo sapien
ggatttacaagtcctgttttgggca

SEQ ID NO: 1030849 - DNA, 25 bp, Homo sapien
tgtaggagcaaagggacaacatggc

SEQ ID NO: 1030850 - DNA, 25 bp, Homo sapien
tccttcaaggagcaaagcaccctgt

SEQ ID NO: 1030851 - DNA, 25 bp, Homo sapien
cccactgccttgtaagcacgaagga

SEQ ID NO: 1030852 - DNA, 25 bp, Homo sapien
agcaagaaccacttccggatgatga

SEQ ID NO: 1030853 - DNA, 25 bp, Homo sapien
gaggaggcgcagaggtggcgcggct

SEQ ID NO: 1030854 - DNA, 25 bp, Homo sapien
cacagcaagaaccacttccggatga

SEQ ID NO: 1030855 - DNA, 25 bp, Homo sapien
gatgatgactgcgtttcagagcctg

SEQ ID NO: 1030856 - DNA, 25 bp, Homo sapien
cagggtcctggctgatttggttcca

SEQ ID NO: 1030857 - DNA, 25 bp, Homo sapien
gacgtttctgtctcacggtgctgga

SEQ ID NO: 1030858 - DNA, 25 bp, Homo sapien
caaggcactagtcctgtcgtgaggc

SEQ ID NO: 1030859 - DNA, 25 bp, Homo sapien
gctggtaaatccaacatcagggtcc

SEQ ID NO: 1030860 - DNA, 25 bp, Homo sapien
caagctatcttgttatcttagtgag

SEQ ID NO: 1030861 - DNA, 25 bp, Homo sapien
ttgccaggtagccaagctatcttgt

SEQ ID NO: 1030862 - DNA, 25 bp, Homo sapien
agtgagcttgggaatgccataatga

SEQ ID NO: 1030863 - DNA, 25 bp, Homo sapien
tcttgttatcttagtgagcttggga

SEQ ID NO: 1030864 - DNA, 25 bp, Homo sapien
caaggccattttccgagcactcagg

SEQ ID NO: 1030865 - DNA, 25 bp, Homo sapien
gctcctgaacgggaacgaccggaga

SEQ ID NO: 1030866 - DNA, 25 bp, Homo sapien
atctgctgcaaagcacgcgccttgg

SEQ ID NO: 1030867 - DNA, 25 bp, Homo sapien
aagcacgcgccttgggaccacagca

SEQ ID NO: 1030868 - DNA, 25 bp, Homo sapien
agtgctgcacagacggcacgacccg

SEQ ID NO: 1030869 - DNA, 25 bp, Homo sapien
gggtggtgggtaccccagtgctgca

SEQ ID NO: 1030870 - DNA, 25 bp, Homo sapien
gcacgacccgcagtgagtcagggct

SEQ ID NO: 1030871 - DNA, 25 bp, Homo sapien
agggctgccgcaggctgctcactca

SEQ ID NO: 1030872 - DNA, 25 bp, Homo sapien
tgccaggcaacttggactcacagct

SEQ ID NO: 1030873 - DNA, 25 bp, Homo sapien
gtaaccatatcctgtaagactgctg

SEQ ID NO: 1030874 - DNA, 25 bp, Homo sapien
aaggctggtttgcagatccccgagg

SEQ ID NO: 1030875 - DNA, 25 bp, Homo sapien
catttttatagacgtgaccagccac

SEQ ID NO: 1030876 - DNA, 25 bp, Homo sapien
gggaactgtacaccgtttgatgacc

SEQ ID NO: 1030877 - DNA, 25 bp, Homo sapien
tttctccggagggtgcaatgcccac

SEQ ID NO: 1030878 - DNA, 25 bp, Homo sapien
tgatgaccacattacaaggaactgc

SEQ ID NO: 1030879 - DNA, 25 bp, Homo sapien
ccgagaagtgttgacccgaggtcag

SEQ ID NO: 1030880 - DNA, 25 bp, Homo sapien
aggtccagcggtgcccatcgtatcg

SEQ ID NO: 1030881 - DNA, 25 bp, Homo sapien
gacctcttcgttgctaggtccagcg

SEQ ID NO: 1030882 - DNA, 25 bp, Homo sapien
caaggttgcggtgacctcttcgttg

SEQ ID NO: 1030883 - DNA, 25 bp, Homo sapien
ttcgttgctaggtccagcggtgccc

SEQ ID NO: 1030884 - DNA, 25 bp, Homo sapien
atccagacttgctcggttttttaca

SEQ ID NO: 1030885 - DNA, 25 bp, Homo sapien
tatccagacttgctcggttttttac

SEQ ID NO: 1030886 - DNA, 25 bp, Homo sapien
gccggggagcccgtcgttgattctg

SEQ ID NO: 1030887 - DNA, 25 bp, Homo sapien
gagcccgtcgttgattctggataca

SEQ ID NO: 1030888 - DNA, 25 bp, Homo sapien
tgtagatcatcccgggggagcccgt

SEQ ID NO: 1030889 - DNA, 25 bp, Homo sapien
gatcatcccgggggagcccgtctgc

SEQ ID NO: 1030890 - DNA, 25 bp, Homo sapien
gattatccggaaaggtctggcttcc

SEQ ID NO: 1030891 - DNA, 25 bp, Homo sapien
tgtggctgtcacagacacgggctct

SEQ ID NO: 1030892 - DNA, 25 bp, Homo sapien
tttccgtggtgaacctccgagtgag

SEQ ID NO: 1030893 - DNA, 25 bp, Homo sapien
tcagcgctgtttatggtgcagacag

SEQ ID NO: 1030894 - DNA, 25 bp, Homo sapien
tgtcttttgggactcccataccgag

SEQ ID NO: 1030895 - DNA, 25 bp, Homo sapien
tcttttgggactcccataccgagta

SEQ ID NO: 1030896 - DNA, 25 bp, Homo sapien
agctgtcttttgggactcccatacc

SEQ ID NO: 1030897 - DNA, 25 bp, Homo sapien
aactggagctgtcttttgggactcc

SEQ ID NO: 1030898 - DNA, 25 bp, Homo sapien
ccgtgcatgcggaggaagctctcca

SEQ ID NO: 1030899 - DNA, 25 bp, Homo sapien
gcagactctcgctgtacgtcatgga

SEQ ID NO: 1030900 - DNA, 25 bp, Homo sapien
tacttcatgcctgtgcgctgggcgg

SEQ ID NO: 1030901 - DNA, 25 bp, Homo sapien
agccgtccagggaaaggccgtgcat

SEQ ID NO: 1030902 - DNA, 25 bp, Homo sapien
agatttggagacagaggcccacaga

SEQ ID NO: 1030903 - DNA, 25 bp, Homo sapien
tgtgcctggccatgactggtgttct

SEQ ID NO: 1030904 - DNA, 25 bp, Homo sapien
cacagagagaaaatggccatgggac

SEQ ID NO: 1030905 - DNA, 25 bp, Homo sapien
gcctcaggaatagctgggatcatag

SEQ ID NO: 1030906 - DNA, 25 bp, Homo sapien
caggtgatgctaggacaaggcctcc

SEQ ID NO: 1030907 - DNA, 25 bp, Homo sapien
cgcatcagatggtgggagacttgac

SEQ ID NO: 1030908 - DNA, 25 bp, Homo sapien
ttccaactctaggagcccagaaagg

SEQ ID NO: 1030909 - DNA, 25 bp, Homo sapien
gacaggacatgtgagccttgcccag

SEQ ID NO: 1030910 - DNA, 25 bp, Homo sapien
gtggaattccaggagtgtccttctc

SEQ ID NO: 1030911 - DNA, 25 bp, Homo sapien
caggagagcgcatcagcggtgccca

SEQ ID NO: 1030912 - DNA, 25 bp, Homo sapien
gaaggtgggatccatgtggaattcc

SEQ ID NO: 1030913 - DNA, 25 bp, Homo sapien
gttcaaggccaagtcagccagcagg

SEQ ID NO: 1030914 - DNA, 25 bp, Homo sapien
gcttcacgctggtgtcaccggcaca

SEQ ID NO: 1030915 - DNA, 25 bp, Homo sapien
gtcggcccagccgatcctcagggcc

SEQ ID NO: 1030916 - DNA, 25 bp, Homo sapien
gctccgagcaaacgaaggacacctg

SEQ ID NO: 1030917 - DNA, 25 bp, Homo sapien
tgtcaccggcacacgggaggctctg

SEQ ID NO: 1030918 - DNA, 25 bp, Homo sapien
caggagacccgcaggccagacttgc

SEQ ID NO: 1030919 - DNA, 25 bp, Homo sapien
tgctggctatgggtccaggaggtct

SEQ ID NO: 1030920 - DNA, 25 bp, Homo sapien
aagccagattatcccgtcggtgctc

SEQ ID NO: 1030921 - DNA, 25 bp, Homo sapien
gtgtccttagtgtgtgtggacagct

SEQ ID NO: 1030922 - DNA, 25 bp, Homo sapien
agattatcccgtcggtgctcagacc

SEQ ID NO: 1030923 - DNA, 25 bp, Homo sapien
gtgatctggcctccgaaggtcaccc

SEQ ID NO: 1030924 - DNA, 25 bp, Homo sapien
ctggcctccgaaggtcacccatgtt

SEQ ID NO: 1030925 - DNA, 25 bp, Homo sapien
ctcatcggtgatctggcctccgaag

SEQ ID NO: 1030926 - DNA, 25 bp, Homo sapien
catcggtgatctggcctccgaaggt

SEQ ID NO: 1030927 - DNA, 25 bp, Homo sapien
tggcgagcccgtgctgggttctggg

SEQ ID NO: 1030928 - DNA, 25 bp, Homo sapien
aagcgttgaggcaaagagcaccagg

SEQ ID NO: 1030929 - DNA, 25 bp, Homo sapien
ggcaaagagcaccaggtggaacccc

SEQ ID NO: 1030930 - DNA, 25 bp, Homo sapien
agcactggccgcaagcgttgaggca

SEQ ID NO: 1030931 - DNA, 25 bp, Homo sapien
ccgcaagcgttgaggcaaagagcac

SEQ ID NO: 1030932 - DNA, 25 bp, Homo sapien
tgtgccttccgagtacatgggatcg

SEQ ID NO: 1030933 - DNA, 25 bp, Homo sapien
aaagtgcggccgacaaagactgggt

SEQ ID NO: 1030934 - DNA, 25 bp, Homo sapien
gctgaactctgggacatcctcatga

SEQ ID NO: 1030935 - DNA, 25 bp, Homo sapien
catgagatcagaaatgcggcctccc

SEQ ID NO: 1030936 - DNA, 25 bp, Homo sapien
gaatgactgcccgagctaaatgcgc

SEQ ID NO: 1030937 - DNA, 25 bp, Homo sapien
aggacgcgattgtgctccatgagca

SEQ ID NO: 1030938 - DNA, 25 bp, Homo sapien
gatggagcaactgacatcccacagc

SEQ ID NO: 1030939 - DNA, 25 bp, Homo sapien
tgtgcatcagactttgctccatggc

SEQ ID NO: 1030940 - DNA, 25 bp, Homo sapien
ttgccggctgcgtagacttctgctg

SEQ ID NO: 1030941 - DNA, 25 bp, Homo sapien
tagacttctgctgtatcgaagaggt

SEQ ID NO: 1030942 - DNA, 25 bp, Homo sapien
gctgcgtagacttctgctgtatcga

SEQ ID NO: 1030943 - DNA, 25 bp, Homo sapien
cttctgctgtatcgaagaggttgat

SEQ ID NO: 1030944 - DNA, 25 bp, Homo sapien
atgatgtttcccagtaccacttcag

SEQ ID NO: 1030945 - DNA, 25 bp, Homo sapien
gatgtttcccagtaccacttcagcc

SEQ ID NO: 1030946 - DNA, 25 bp, Homo sapien
tcctttcttcttaatgatgtttccc

SEQ ID NO: 1030947 - DNA, 25 bp, Homo sapien
ttcttaatgatgtttcccagtacca

SEQ ID NO: 1030948 - DNA, 25 bp, Homo sapien
gagaggctgagacgccgcgaagatc

SEQ ID NO: 1030949 - DNA, 25 bp, Homo sapien
gctccggagaggctgagacgccgcg

SEQ ID NO: 1030950 - DNA, 25 bp, Homo sapien
cctcttacagatgggaacagtgagc

SEQ ID NO: 1030951 - DNA, 25 bp, Homo sapien
tacagatgggaacagtgagctccgg

SEQ ID NO: 1030952 - DNA, 25 bp, Homo sapien
ccgatctgcgacctttgggctccat

SEQ ID NO: 1030953 - DNA, 25 bp, Homo sapien
tgctcagcccagttggtcccaaggt

SEQ ID NO: 1030954 - DNA, 25 bp, Homo sapien
cttcccagaggagtgtgacacgtcc

SEQ ID NO: 1030955 - DNA, 25 bp, Homo sapien
tcaggatagccctgccggaacggtc

SEQ ID NO: 1030956 - DNA, 25 bp, Homo sapien
ggcccaactttataactgcttctga

SEQ ID NO: 1030957 - DNA, 25 bp, Homo sapien
caaatttgatgggacaagaggaagg

SEQ ID NO: 1030958 - DNA, 25 bp, Homo sapien
gatcagagttgccaaaaaacaaatt

SEQ ID NO: 1030959 - DNA, 25 bp, Homo sapien
gagggaggcccaactttataactgc

SEQ ID NO: 1030960 - DNA, 25 bp, Homo sapien
ggtggtgatgacgaggctggaccgc

SEQ ID NO: 1030961 - DNA, 25 bp, Homo sapien
tttccgccccagaagatcttggtgg

SEQ ID NO: 1030962 - DNA, 25 bp, Homo sapien
cttggtggtgatgacgaggctggac

SEQ ID NO: 1030963 - DNA, 25 bp, Homo sapien
ttccgccccagaagatcttggtggt

SEQ ID NO: 1030964 - DNA, 25 bp, Homo sapien
ggacaggccccgctccgtctccgcc

SEQ ID NO: 1030965 - DNA, 25 bp, Homo sapien
cttcgattatgtgcttcctggacag

SEQ ID NO: 1030966 - DNA, 25 bp, Homo sapien
cgattatgtgcttcctggacaggcc

SEQ ID NO: 1030967 - DNA, 25 bp, Homo sapien
tggacaggccccgctccgtctccgc

SEQ ID NO: 1030968 - DNA, 25 bp, Homo sapien
tttggcctccgaggatgatcccaca

SEQ ID NO: 1030969 - DNA, 25 bp, Homo sapien
ctgaggtgcccgagcgcgtcctcac

SEQ ID NO: 1030970 - DNA, 25 bp, Homo sapien
gggccctgaggtgcccgagcgcgtc

SEQ ID NO: 1030971 - DNA, 25 bp, Homo sapien
tgatcccacaggtatgggggccctg

SEQ ID NO: 1030972 - DNA, 25 bp, Homo sapien
tccacgtactccagctgcagtcgct

SEQ ID NO: 1030973 - DNA, 25 bp, Homo sapien
tgcagtcgctccagggaagctttca

SEQ ID NO: 1030974 - DNA, 25 bp, Homo sapien
ttggcaaacaccacatccacgtact

SEQ ID NO: 1030975 - DNA, 25 bp, Homo sapien
gtccgggcggttggcaaacaccaca

SEQ ID NO: 1030976 - DNA, 25 bp, Homo sapien
tgacttggaggaactaaatgggtcc

SEQ ID NO: 1030977 - DNA, 25 bp, Homo sapien
ggctgggggcactgtgtaccttcta

SEQ ID NO: 1030978 - DNA, 25 bp, Homo sapien
tgtgtaccttctatgatgaatgtcc

SEQ ID NO: 1030979 - DNA, 25 bp, Homo sapien
aatgtccttgacttggaggaactaa

SEQ ID NO: 1030980 - DNA, 25 bp, Homo sapien
cagggagatcgacacctgcccttgg

SEQ ID NO: 1030981 - DNA, 25 bp, Homo sapien
aggcccagggagatcgacacctgcc

SEQ ID NO: 1030982 - DNA, 25 bp, Homo sapien
agggagatcgacacctgcccttggg

SEQ ID NO: 1030983 - DNA, 25 bp, Homo sapien
ggcccagggagatcgacacctgccc

SEQ ID NO: 1030984 - DNA, 25 bp, Homo sapien
gacgtgggtcatggcgcggacggtc

SEQ ID NO: 1030985 - DNA, 25 bp, Homo sapien
ccatggagctccagcgtgacgtgcc

SEQ ID NO: 1030986 - DNA, 25 bp, Homo sapien
gtgacgtgccccagtacatggccat

SEQ ID NO: 1030987 - DNA, 25 bp, Homo sapien
tcccctggttgatgacgtgggtcat

SEQ ID NO: 1030988 - DNA, 25 bp, Homo sapien
ggtccagttatgagcagcccaggct

SEQ ID NO: 1030989 - DNA, 25 bp, Homo sapien
agggcaccaaggtgtccccggagca

SEQ ID NO: 1030990 - DNA, 25 bp, Homo sapien
cacagcctggatgttaatcttggcc

SEQ ID NO: 1030991 - DNA, 25 bp, Homo sapien
ccccaggccggagggtccagttatg

SEQ ID NO: 1030992 - DNA, 25 bp, Homo sapien
ctccactttctcacgctggaacatg

SEQ ID NO: 1030993 - DNA, 25 bp, Homo sapien
catgtggtactcagcctgctcgcag

SEQ ID NO: 1030994 - DNA, 25 bp, Homo sapien
tggaacatgtggtactcagcctgct

SEQ ID NO: 1030995 - DNA, 25 bp, Homo sapien
tcacgctggaacatgtggtactcag

SEQ ID NO: 1030996 - DNA, 25 bp, Homo sapien
gatgccactgtcgtacttgccagaa

SEQ ID NO: 1030997 - DNA, 25 bp, Homo sapien
cactgtcgtacttgccagaaacaat

SEQ ID NO: 1030998 - DNA, 25 bp, Homo sapien
agggtgggatgccactgtcgtactt

SEQ ID NO: 1030999 - DNA, 25 bp, Homo sapien
tcaaggaggctcttgagtagggtgg

SEQ ID NO: 1031000 - DNA, 25 bp, Homo sapien
gaagtgcaaagactgtggtgctggc

SEQ ID NO: 1031001 - DNA, 25 bp, Homo sapien
cgggcacgggctggtggatgagcgg

SEQ ID NO: 1031002 - DNA, 25 bp, Homo sapien
ccaggcctctcaagtaggggagagt

SEQ ID NO: 1031003 - DNA, 25 bp, Homo sapien
cagggggccgatgggctcattcctt

SEQ ID NO: 1031004 - DNA, 25 bp, Homo sapien
ggcgctcggcgatggcctgcagctc

SEQ ID NO: 1031005 - DNA, 25 bp, Homo sapien
ctcctcactgaggatcttgtccttc

SEQ ID NO: 1031006 - DNA, 25 bp, Homo sapien
cccaggcgctcggcgatggcctgca

SEQ ID NO: 1031007 - DNA, 25 bp, Homo sapien
agcttggcttgctggcgccggccct

SEQ ID NO: 1031008 - DNA, 25 bp, Homo sapien
tgagctggtccgcattggaggcccc

SEQ ID NO: 1031009 - DNA, 25 bp, Homo sapien
aggagcacggagctgactccctcat

SEQ ID NO: 1031010 - DNA, 25 bp, Homo sapien
tccatgagctggtccgcattggagg

SEQ ID NO: 1031011 - DNA, 25 bp, Homo sapien
gagcacggagctgactccctcattc

SEQ ID NO: 1031012 - DNA, 25 bp, Homo sapien
tcttccagatggtcggctggccagg

SEQ ID NO: 1031013 - DNA, 25 bp, Homo sapien
tagaaccttcctgaagggtggtggc

SEQ ID NO: 1031014 - DNA, 25 bp, Homo sapien
aatggaaactccaggccaaatgctg

SEQ ID NO: 1031015 - DNA, 25 bp, Homo sapien
acatctgggctccatctgaggcaga

SEQ ID NO: 1031016 - DNA, 25 bp, Homo sapien
aatctcgtggataatggaagatgac

SEQ ID NO: 1031017 - DNA, 25 bp, Homo sapien
tgctgtagggtttattgcccaaaat

SEQ ID NO: 1031018 - DNA, 25 bp, Homo sapien
tggaagatgacagtttcggaaggac

SEQ ID NO: 1031019 - DNA, 25 bp, Homo sapien
aaatactatcaatctcgtggataat

SEQ ID NO: 1031020 - DNA, 25 bp, Homo sapien
taaatacggtggctgtgtcgcggtc

SEQ ID NO: 1031021 - DNA, 25 bp, Homo sapien
tgcagttagctgaggaaccacggta

SEQ ID NO: 1031022 - DNA, 25 bp, Homo sapien
cagctcgagcttggtaggcatggcc

SEQ ID NO: 1031023 - DNA, 25 bp, Homo sapien
ggacctgggatctgagcacaaagct

SEQ ID NO: 1031024 - DNA, 25 bp, Homo sapien
tcaagcagcgattggagcccaagca

SEQ ID NO: 1031025 - DNA, 25 bp, Homo sapien
ttgtctggtcttcgcccacgggagg

SEQ ID NO: 1031026 - DNA, 25 bp, Homo sapien
gctcccctgtgagccgtggcttgtc

SEQ ID NO: 1031027 - DNA, 25 bp, Homo sapien
gaggctgtagccaacacaatcacct

SEQ ID NO: 1031028 - DNA, 25 bp, Homo sapien
ggtttttgctgctggtagaatcagg

SEQ ID NO: 1031029 - DNA, 25 bp, Homo sapien
gtccgtatgtttggcgtctttgggc

SEQ ID NO: 1031030 - DNA, 25 bp, Homo sapien
gtggtgtccgtatgtttggcgtctt

SEQ ID NO: 1031031 - DNA, 25 bp, Homo sapien
ctggtagaatcagggtcctcgggca

SEQ ID NO: 1031032 - DNA, 25 bp, Homo sapien
ggtgtgcacatatccctttgtgtcc

SEQ ID NO: 1031033 - DNA, 25 bp, Homo sapien
tctggcttttagtggtcgtcagtaa

SEQ ID NO: 1031034 - DNA, 25 bp, Homo sapien
cgtcagtaacgctgatgggaaggat

SEQ ID NO: 1031035 - DNA, 25 bp, Homo sapien
tgggtgtgcacatatccctttgtgt

SEQ ID NO: 1031036 - DNA, 25 bp, Homo sapien
tgaggtttagctcgctacagtgact

SEQ ID NO: 1031037 - DNA, 25 bp, Homo sapien
tacagtctccctggttctatccttt

SEQ ID NO: 1031038 - DNA, 25 bp, Homo sapien
caacttcatcctcggtaggtttgtg

SEQ ID NO: 1031039 - DNA, 25 bp, Homo sapien
ggcaggccacgtaggattaaccgtg

SEQ ID NO: 1031040 - DNA, 25 bp, Homo sapien
tccagagcgtcttttccccaagtgt

SEQ ID NO: 1031041 - DNA, 25 bp, Homo sapien
tttgggcacagacatcgcagatccg

SEQ ID NO: 1031042 - DNA, 25 bp, Homo sapien
cttctgagcgggagttttgggcaca

SEQ ID NO: 1031043 - DNA, 25 bp, Homo sapien
catcttcacctttaacgaccgaggg

SEQ ID NO: 1031044 - DNA, 25 bp, Homo sapien
ggctgtcactgaactctgtgtagaa

SEQ ID NO: 1031045 - DNA, 25 bp, Homo sapien
actttgccagcaaatgccgttttct

SEQ ID NO: 1031046 - DNA, 25 bp, Homo sapien
tagttgtgctgttttgccgcagtga

SEQ ID NO: 1031047 - DNA, 25 bp, Homo sapien
ggtagtgtcaacttgaattccatca

SEQ ID NO: 1031048 - DNA, 25 bp, Homo sapien
gatttaatgtcagtggtgtgccaca

SEQ ID NO: 1031049 - DNA, 25 bp, Homo sapien
aaaatgcgggtttctgggccattcg

SEQ ID NO: 1031050 - DNA, 25 bp, Homo sapien
gagagggtgactttaccgaactgac

SEQ ID NO: 1031051 - DNA, 25 bp, Homo sapien
gaaatagctgcctcatgccacttag

SEQ ID NO: 1031052 - DNA, 25 bp, Homo sapien
gtgagacaccaactctctacaacag

SEQ ID NO: 1031053 - DNA, 25 bp, Homo sapien
gctggagcctaggatgtcaaggctt

SEQ ID NO: 1031054 - DNA, 25 bp, Homo sapien
ccatagtgagacaccaactctctac

SEQ ID NO: 1031055 - DNA, 25 bp, Homo sapien
accaactctctacaacagcaaaaca

SEQ ID NO: 1031056 - DNA, 25 bp, Homo sapien
tactgggcgtccacttaattaaggc

SEQ ID NO: 1031057 - DNA, 25 bp, Homo sapien
tgatcagtgagctttctccgcccgt

SEQ ID NO: 1031058 - DNA, 25 bp, Homo sapien
tgatcccagcgttttctccagcgtg

SEQ ID NO: 1031059 - DNA, 25 bp, Homo sapien
tgagtgtcctgagagcagcccgttt

SEQ ID NO: 1031060 - DNA, 25 bp, Homo sapien
acgccaaggctccagggacggtgcc

SEQ ID NO: 1031061 - DNA, 25 bp, Homo sapien
gtgcaaggatcggactggcccctgc

SEQ ID NO: 1031062 - DNA, 25 bp, Homo sapien
tctgctttgcgcactggttccggcc

SEQ ID NO: 1031063 - DNA, 25 bp, Homo sapien
cctgcccggcatgacagagtccgga

SEQ ID NO: 1031064 - DNA, 25 bp, Homo sapien
ctgccgaggagtagccggccctgga

SEQ ID NO: 1031065 - DNA, 25 bp, Homo sapien
aggagtagccggccctggaagttca

SEQ ID NO: 1031066 - DNA, 25 bp, Homo sapien
cctggaagttcaggcccgcaccggg

SEQ ID NO: 1031067 - DNA, 25 bp, Homo sapien
tagccggccctggaagttcaggccc

SEQ ID NO: 1031068 - DNA, 25 bp, Homo sapien
tccagcgctcttagtgcggctccgg

SEQ ID NO: 1031069 - DNA, 25 bp, Homo sapien
ccgctttgctgggagctaccggtcc

SEQ ID NO: 1031070 - DNA, 25 bp, Homo sapien
tgggagctaccggtcctccgagcct

SEQ ID NO: 1031071 - DNA, 25 bp, Homo sapien
cgctctgagacaccgcgcggtcgct

SEQ ID NO: 1031072 - DNA, 25 bp, Homo sapien
agtggggagccgctagggcccaggt

SEQ ID NO: 1031073 - DNA, 25 bp, Homo sapien
acgcacggagccccgcttgagctcc

SEQ ID NO: 1031074 - DNA, 25 bp, Homo sapien
cgcgccctccctatcgcgcctggac

SEQ ID NO: 1031075 - DNA, 25 bp, Homo sapien
gcctggacccgactgggcgtccaga

SEQ ID NO: 1031076 - DNA, 25 bp, Homo sapien
ctgcagcgacagcgcaagcgggcgg

SEQ ID NO: 1031077 - DNA, 25 bp, Homo sapien
gcagccggcacagaagtcgtggaaa

SEQ ID NO: 1031078 - DNA, 25 bp, Homo sapien
agcgggcacaccagcgggtggatgc

SEQ ID NO: 1031079 - DNA, 25 bp, Homo sapien
agaagtcgtggaaacagtccagaag

SEQ ID NO: 1031080 - DNA, 25 bp, Homo sapien
agtccagaagacacgggcgctcgta

SEQ ID NO: 1031081 - DNA, 25 bp, Homo sapien
gtccaccggcgggagcccgctggga

SEQ ID NO: 1031082 - DNA, 25 bp, Homo sapien
gcctccacgccatcccctgagctgt

SEQ ID NO: 1031083 - DNA, 25 bp, Homo sapien
acagttggcacagcgcaccgcctcc

SEQ ID NO: 1031084 - DNA, 25 bp, Homo sapien
gggacccttcagcaccgtctggtgt

SEQ ID NO: 1031085 - DNA, 25 bp, Homo sapien
cctgccgcccctgcctgctcgctgc

SEQ ID NO: 1031086 - DNA, 25 bp, Homo sapien
gccctgccgcccctgcctgctcgct

SEQ ID NO: 1031087 - DNA, 25 bp, Homo sapien
tgccgcccctgcctgctcgctgcac

SEQ ID NO: 1031088 - DNA, 25 bp, Homo sapien
ccgccctgccgcccctgcctgctcg

SEQ ID NO: 1031089 - DNA, 25 bp, Homo sapien
tccactgccaggtcgtcctctgaag

SEQ ID NO: 1031090 - DNA, 25 bp, Homo sapien
caaggtgccctagggaggtgctgga

SEQ ID NO: 1031091 - DNA, 25 bp, Homo sapien
catgtgcaagcattggggactgtgc

SEQ ID NO: 1031092 - DNA, 25 bp, Homo sapien
cattggggactgtgcaaccgggtac

SEQ ID NO: 1031093 - DNA, 25 bp, Homo sapien
ctctccccagatcgaatggccttag

SEQ ID NO: 1031094 - DNA, 25 bp, Homo sapien
ctcagtctccccaccggtataatgg

SEQ ID NO: 1031095 - DNA, 25 bp, Homo sapien
tccccagatcgaatggccttagcct

SEQ ID NO: 1031096 - DNA, 25 bp, Homo sapien
tcagtctccccaccggtataatggg

SEQ ID NO: 1031097 - DNA, 25 bp, Homo sapien
tgggctgtagctgcttctatgccac

SEQ ID NO: 1031098 - DNA, 25 bp, Homo sapien
caggcctgcaaactggactgcccct

SEQ ID NO: 1031099 - DNA, 25 bp, Homo sapien
ttctatgccacttgggtagcagagg

SEQ ID NO: 1031100 - DNA, 25 bp, Homo sapien
ggtccacaactccaccctgaattgg

SEQ ID NO: 1031101 - DNA, 25 bp, Homo sapien
cagccctggtatggacgcatgcaat

SEQ ID NO: 1031102 - DNA, 25 bp, Homo sapien
ccagaacgctggagcttttgcccca

SEQ ID NO: 1031103 - DNA, 25 bp, Homo sapien
tagtggccgaaaggtggtgtacacc

SEQ ID NO: 1031104 - DNA, 25 bp, Homo sapien
tgggattcccgatacattttctggc

SEQ ID NO: 1031105 - DNA, 25 bp, Homo sapien
ggtgcgcagctaaacgcagcccttt

SEQ ID NO: 1031106 - DNA, 25 bp, Homo sapien
actgcgcgtgtttgtcccagccgtg

SEQ ID NO: 1031107 - DNA, 25 bp, Homo sapien
gtaatccaggcacttggcgctctga

SEQ ID NO: 1031108 - DNA, 25 bp, Homo sapien
ggcgctctgatatacccactttaca

SEQ ID NO: 1031109 - DNA, 25 bp, Homo sapien
acgtcgcggcttcgctgacccaggg

SEQ ID NO: 1031110 - DNA, 25 bp, Homo sapien
tgtccgcacgtgttgcagaagtacg

SEQ ID NO: 1031111 - DNA, 25 bp, Homo sapien
tgacccagggccacgatgtcgtggc

SEQ ID NO: 1031112 - DNA, 25 bp, Homo sapien
aacatgcgtgctcggtgcgtctcgt

SEQ ID NO: 1031113 - DNA, 25 bp, Homo sapien
aacaagaggtagggctctgcgtgca

SEQ ID NO: 1031114 - DNA, 25 bp, Homo sapien
cttgtcggtggagaacaagaggtag

SEQ ID NO: 1031115 - DNA, 25 bp, Homo sapien
aagaggtagggctctgcgtgcagcg

SEQ ID NO: 1031116 - DNA, 25 bp, Homo sapien
agaacaagaggtagggctctgcgtg

SEQ ID NO: 1031117 - DNA, 25 bp, Homo sapien
gtcgcggaagcagcggatgcacaac

SEQ ID NO: 1031118 - DNA, 25 bp, Homo sapien
ggaagcagcggatgcacaacagcaa

SEQ ID NO: 1031119 - DNA, 25 bp, Homo sapien
ctgcatgtcgcggaagcagcggatg

SEQ ID NO: 1031120 - DNA, 25 bp, Homo sapien
catgtcgcggaagcagcggatgcac

SEQ ID NO: 1031121 - DNA, 25 bp, Homo sapien
cctcccctcgcgtcccctgtacgca

SEQ ID NO: 1031122 - DNA, 25 bp, Homo sapien
ctcccctcgcgtcccctgtacgcac

SEQ ID NO: 1031123 - DNA, 25 bp, Homo sapien
agaaggcggcgggtgaggcccgctc

SEQ ID NO: 1031124 - DNA, 25 bp, Homo sapien
ggtgaggcccgctccagcggccccc

SEQ ID NO: 1031125 - DNA, 25 bp, Homo sapien
acgtaagccgattccaggtccacgc

SEQ ID NO: 1031126 - DNA, 25 bp, Homo sapien
gccctgcacgtaagccgattccagg

SEQ ID NO: 1031127 - DNA, 25 bp, Homo sapien
gccgattccaggtccacgcagtgtg

SEQ ID NO: 1031128 - DNA, 25 bp, Homo sapien
attccaggtccacgcagtgtgcccg

SEQ ID NO: 1031129 - DNA, 25 bp, Homo sapien
gggcgtggtcaggctcgcgatcgcc

SEQ ID NO: 1031130 - DNA, 25 bp, Homo sapien
ggcgtggtcaggctcgcgatcgccg

SEQ ID NO: 1031131 - DNA, 25 bp, Homo sapien
cgatggcctcccgcgtggccgtctg

SEQ ID NO: 1031132 - DNA, 25 bp, Homo sapien
cagcgcgatggcctcccgcgtggcc

SEQ ID NO: 1031133 - DNA, 25 bp, Homo sapien
cgcgtggccgtctgcagggccttca

SEQ ID NO: 1031134 - DNA, 25 bp, Homo sapien
gcgtggccgtctgcagggccttcac

SEQ ID NO: 1031135 - DNA, 25 bp, Homo sapien
ctgcatgctgccgaagagggcgtgg

SEQ ID NO: 1031136 - DNA, 25 bp, Homo sapien
ccgaagagggcgtggatagcgtcct

SEQ ID NO: 1031137 - DNA, 25 bp, Homo sapien
tcctcggcggcgctgtgccgcacct

SEQ ID NO: 1031138 - DNA, 25 bp, Homo sapien
gcgtggatagcgtcctcctcctcgg

SEQ ID NO: 1031139 - DNA, 25 bp, Homo sapien
gcagcagcgctttcctctctgccag

SEQ ID NO: 1031140 - DNA, 25 bp, Homo sapien
cctgcagcagcagcgctttcctctc

SEQ ID NO: 1031141 - DNA, 25 bp, Homo sapien
gcagcagcagcgctttcctctctgc

SEQ ID NO: 1031142 - DNA, 25 bp, Homo sapien
cacagcctgcagcagcagcgctttc

SEQ ID NO: 1031143 - DNA, 25 bp, Homo sapien
caaggtggccaagtgagagagctgc

SEQ ID NO: 1031144 - DNA, 25 bp, Homo sapien
agcaaggtggccaagtgagagagct

SEQ ID NO: 1031145 - DNA, 25 bp, Homo sapien
gcaaggtggccaagtgagagagctg

SEQ ID NO: 1031146 - DNA, 25 bp, Homo sapien
aaggtggccaagtgagagagctgct

SEQ ID NO: 1031147 - DNA, 25 bp, Homo sapien
ggtccaggaactcagccttgttggc

SEQ ID NO: 1031148 - DNA, 25 bp, Homo sapien
gaactcagccttgttggccaagctg

SEQ ID NO: 1031149 - DNA, 25 bp, Homo sapien
caggaactcagccttgttggccaag

SEQ ID NO: 1031150 - DNA, 25 bp, Homo sapien
ctcagccttgttggccaagctgagg

SEQ ID NO: 1031151 - DNA, 25 bp, Homo sapien
tcttctgggactcacccggacaaac

SEQ ID NO: 1031152 - DNA, 25 bp, Homo sapien
gggactgtaggctcatgcccccttc

SEQ ID NO: 1031153 - DNA, 25 bp, Homo sapien
gtgaccctaacaggtttgcagatga

SEQ ID NO: 1031154 - DNA, 25 bp, Homo sapien
gacttggtgtcccttagcagcgcca

SEQ ID NO: 1031155 - DNA, 25 bp, Homo sapien
gccttaggtggtgcggccgcgtgac

SEQ ID NO: 1031156 - DNA, 25 bp, Homo sapien
tgcggccgcgtgacgatgccctgca

SEQ ID NO: 1031157 - DNA, 25 bp, Homo sapien
ctctgaataggccttaggtggtgcg

SEQ ID NO: 1031158 - DNA, 25 bp, Homo sapien
cttgctgctctgaataggccttagg

SEQ ID NO: 1031159 - DNA, 25 bp, Homo sapien
tgggcagcgggatggggtcatgagg

SEQ ID NO: 1031160 - DNA, 25 bp, Homo sapien
agcgggatggggtcatgaggtggcc

SEQ ID NO: 1031161 - DNA, 25 bp, Homo sapien
ggatggggtcatgaggtggcctcca

SEQ ID NO: 1031162 - DNA, 25 bp, Homo sapien
atggggtcatgaggtggcctccact

SEQ ID NO: 1031163 - DNA, 25 bp, Homo sapien
agcgcgcgaattcagctcggtggtc

SEQ ID NO: 1031164 - DNA, 25 bp, Homo sapien
cagacagcgcgcgaattcagctcgg

SEQ ID NO: 1031165 - DNA, 25 bp, Homo sapien
gtggctccagacagcgcgcgaattc

SEQ ID NO: 1031166 - DNA, 25 bp, Homo sapien
cgcgaattcagctcggtggtcactg

SEQ ID NO: 1031167 - DNA, 25 bp, Homo sapien
gccttggggcctaagccccctgcca

SEQ ID NO: 1031168 - DNA, 25 bp, Homo sapien
gcgccttggggcctaagccccctgc

SEQ ID NO: 1031169 - DNA, 25 bp, Homo sapien
cagcgtgggcttttggacgggtgac

SEQ ID NO: 1031170 - DNA, 25 bp, Homo sapien
gcgaagggcgtgttctcgccctccg

SEQ ID NO: 1031171 - DNA, 25 bp, Homo sapien
gcggcagtgctctgcgaagggcgtg

SEQ ID NO: 1031172 - DNA, 25 bp, Homo sapien
gctgatggaccggtgcagcgtgggc

SEQ ID NO: 1031173 - DNA, 25 bp, Homo sapien
gccctctaaggaggcgtgctccgag

SEQ ID NO: 1031174 - DNA, 25 bp, Homo sapien
gatctccgccttgatgagcgagtgg

SEQ ID NO: 1031175 - DNA, 25 bp, Homo sapien
cagggacttgtgcaggacgtctccc

SEQ ID NO: 1031176 - DNA, 25 bp, Homo sapien
ccgaggcgatctgcacgtccagttg

SEQ ID NO: 1031177 - DNA, 25 bp, Homo sapien
tgctcattagccactcgctgatagg

SEQ ID NO: 1031178 - DNA, 25 bp, Homo sapien
tcataaatctcctgctcattagcca

SEQ ID NO: 1031179 - DNA, 25 bp, Homo sapien
tagccactcgctgataggcttcctc

SEQ ID NO: 1031180 - DNA, 25 bp, Homo sapien
ctcgctgataggcttcctcccaaat

SEQ ID NO: 1031181 - DNA, 25 bp, Homo sapien
gatttgcatctggttagtggccgac

SEQ ID NO: 1031182 - DNA, 25 bp, Homo sapien
catttgaggccagttagcagctggg

SEQ ID NO: 1031183 - DNA, 25 bp, Homo sapien
cactcggcagccaactgtctggaac

SEQ ID NO: 1031184 - DNA, 25 bp, Homo sapien
ctagtatgtgggttagctcagggac

SEQ ID NO: 1031185 - DNA, 25 bp, Homo sapien
cagatttttactcaagccaggcacc

SEQ ID NO: 1031186 - DNA, 25 bp, Homo sapien
gccaggcaccacgtaaatatcccga

SEQ ID NO: 1031187 - DNA, 25 bp, Homo sapien
gacctctaattaaagagggaggcac

SEQ ID NO: 1031188 - DNA, 25 bp, Homo sapien
cgaccatttccatgatgacctctaa

SEQ ID NO: 1031189 - DNA, 25 bp, Homo sapien
acgtagggcgtgatctgcttggtga

SEQ ID NO: 1031190 - DNA, 25 bp, Homo sapien
cggacgtagggcgtgatctgcttgg

SEQ ID NO: 1031191 - DNA, 25 bp, Homo sapien
caccttggcaatggagcggacgtag

SEQ ID NO: 1031192 - DNA, 25 bp, Homo sapien
cttcaccttggcaatggagcggacg

SEQ ID NO: 1031193 - DNA, 25 bp, Homo sapien
ccccatgcacattctgaagagtctc

SEQ ID NO: 1031194 - DNA, 25 bp, Homo sapien
ccaggctgtagattgtcgtgcctca

SEQ ID NO: 1031195 - DNA, 25 bp, Homo sapien
cacccaggctgtagattgtcgtgcc

SEQ ID NO: 1031196 - DNA, 25 bp, Homo sapien
cagcccccatgcacattctgaagag

SEQ ID NO: 1031197 - DNA, 25 bp, Homo sapien
tgaatatggcgatgctcacgagtgc

SEQ ID NO: 1031198 - DNA, 25 bp, Homo sapien
tggactcgcagacctggagtgaagt

SEQ ID NO: 1031199 - DNA, 25 bp, Homo sapien
catccacaaagtggctgctctgaag

SEQ ID NO: 1031200 - DNA, 25 bp, Homo sapien
tggagcaagagcagactcagtggat

SEQ ID NO: 1031201 - DNA, 25 bp, Homo sapien
tgaactcgcggtgcctgtagacatc

SEQ ID NO: 1031202 - DNA, 25 bp, Homo sapien
tgaagactaacatggctaggcacgg

SEQ ID NO: 1031203 - DNA, 25 bp, Homo sapien
gccccgcggtgatgggaatcataga

SEQ ID NO: 1031204 - DNA, 25 bp, Homo sapien
tctgcgggaggacgtcaagcattct

SEQ ID NO: 1031205 - DNA, 25 bp, Homo sapien
gtcgtcgtgcgtgttctgtagactc

SEQ ID NO: 1031206 - DNA, 25 bp, Homo sapien
tgaggccgcgttgttcctgctgtcg

SEQ ID NO: 1031207 - DNA, 25 bp, Homo sapien
actgctcatccacgggtgcctgaaa

SEQ ID NO: 1031208 - DNA, 25 bp, Homo sapien
tctctgactgctcatccacgggtgc

SEQ ID NO: 1031209 - DNA, 25 bp, Homo sapien
gagtttcctttgtcgtcctgttggc

SEQ ID NO: 1031210 - DNA, 25 bp, Homo sapien
agtcccctagcataagcacgtgcag

SEQ ID NO: 1031211 - DNA, 25 bp, Homo sapien
tgtcgtaggtgttaatgcacagccg

SEQ ID NO: 1031212 - DNA, 25 bp, Homo sapien
tcatttcagtgacccgagtccccta

SEQ ID NO: 1031213 - DNA, 25 bp, Homo sapien
tatccctgcactaaaatccacttgg

SEQ ID NO: 1031214 - DNA, 25 bp, Homo sapien
taaagggacagcctcatgtaagccc

SEQ ID NO: 1031215 - DNA, 25 bp, Homo sapien
ccacttgggccaaagcactcagaat

SEQ ID NO: 1031216 - DNA, 25 bp, Homo sapien
gcatctgagctaataaatggcggct

SEQ ID NO: 1031217 - DNA, 25 bp, Homo sapien
gaagttgtaactgagaccatctgcc

SEQ ID NO: 1031218 - DNA, 25 bp, Homo sapien
tcctttgcaatagggcaggtgccac

SEQ ID NO: 1031219 - DNA, 25 bp, Homo sapien
catttgctaagtcgggtgttccctc

SEQ ID NO: 1031220 - DNA, 25 bp, Homo sapien
tgctatcaacggaagtcggactcag

SEQ ID NO: 1031221 - DNA, 25 bp, Homo sapien
tcagtgcccctgaagtagcaggtgc

SEQ ID NO: 1031222 - DNA, 25 bp, Homo sapien
caaccacagtgtgattgtctgggat

SEQ ID NO: 1031223 - DNA, 25 bp, Homo sapien
gctgccatgttagcacgtagaccca

SEQ ID NO: 1031224 - DNA, 25 bp, Homo sapien
gcctttagcctcaaacgacgtgtgt

SEQ ID NO: 1031225 - DNA, 25 bp, Homo sapien
taagatctcgccaacagctagctgc

SEQ ID NO: 1031226 - DNA, 25 bp, Homo sapien
caggaagctgcgttagccgatcagg

SEQ ID NO: 1031227 - DNA, 25 bp, Homo sapien
cagggcccgtggagaatcaggttaa

SEQ ID NO: 1031228 - DNA, 25 bp, Homo sapien
tataaatttagcagtggcagggccc

SEQ ID NO: 1031229 - DNA, 25 bp, Homo sapien
ttatatataccaaagaggcttacgg

SEQ ID NO: 1031230 - DNA, 25 bp, Homo sapien
caaagaggcttacgggttcattgat

SEQ ID NO: 1031231 - DNA, 25 bp, Homo sapien
ataccaaagaggcttacgggttcat

SEQ ID NO: 1031232 - DNA, 25 bp, Homo sapien
gaggcttacgggttcattgattggt

SEQ ID NO: 1031233 - DNA, 25 bp, Homo sapien
catttggttaattgtgccagatacc

SEQ ID NO: 1031234 - DNA, 25 bp, Homo sapien
gccactaaacctttccgtgcctaga

SEQ ID NO: 1031235 - DNA, 25 bp, Homo sapien
taatactcagatgtgggagcgacat

SEQ ID NO: 1031236 - DNA, 25 bp, Homo sapien
ggagcgacatcaatgaaatctgtac

SEQ ID NO: 1031237 - DNA, 25 bp, Homo sapien
taggcggctcaaaggagcatcagtt

SEQ ID NO: 1031238 - DNA, 25 bp, Homo sapien
tacttcctcataggatgctttggcc

SEQ ID NO: 1031239 - DNA, 25 bp, Homo sapien
cctgtgcgtggccttaaacattgag

SEQ ID NO: 1031240 - DNA, 25 bp, Homo sapien
tcctgttgtcagtgataggcggctc

SEQ ID NO: 1031241 - DNA, 25 bp, Homo sapien
caaccacgtggtacagaatgaaaaa

SEQ ID NO: 1031242 - DNA, 25 bp, Homo sapien
gagtgtacgcttggtttcggcatcc

SEQ ID NO: 1031243 - DNA, 25 bp, Homo sapien
cggcatccttcttacgtcgggtggt

SEQ ID NO: 1031244 - DNA, 25 bp, Homo sapien
gattacctggctcagtgtcacaggg

SEQ ID NO: 1031245 - DNA, 25 bp, Homo sapien
gtgagccaccgcgctcggctcgttt

SEQ ID NO: 1031246 - DNA, 25 bp, Homo sapien
agccaccgcgctcggctcgtttcaa

SEQ ID NO: 1031247 - DNA, 25 bp, Homo sapien
ctcaaatgattcgccagcctcggcc

SEQ ID NO: 1031248 - DNA, 25 bp, Homo sapien
cgtgagccaccgcgctcggctcgtt

SEQ ID NO: 1031249 - DNA, 25 bp, Homo sapien
aaaacctaatataggcagggcgcgg

SEQ ID NO: 1031250 - DNA, 25 bp, Homo sapien
gctttgcctcctgctatttaaaaac

SEQ ID NO: 1031251 - DNA, 25 bp, Homo sapien
ggatcacaccgaaaagctttgcctc

SEQ ID NO: 1031252 - DNA, 25 bp, Homo sapien
tttccccaagtgaagtcaggatcac

SEQ ID NO: 1031253 - DNA, 25 bp, Homo sapien
agtgctttgtgaggctgattggagg

SEQ ID NO: 1031254 - DNA, 25 bp, Homo sapien
caggagttccagactgccgcactcc

SEQ ID NO: 1031255 - DNA, 25 bp, Homo sapien
ggagttccagactgccgcactccag

SEQ ID NO: 1031256 - DNA, 25 bp, Homo sapien
ccagtgctttgtgaggctgattgga

SEQ ID NO: 1031257 - DNA, 25 bp, Homo sapien
ttctcctccagcgcagctctctgag

SEQ ID NO: 1031258 - DNA, 25 bp, Homo sapien
cctccagcgcagctctctgagctac

SEQ ID NO: 1031259 - DNA, 25 bp, Homo sapien
tcctccagcgcagctctctgagcta

SEQ ID NO: 1031260 - DNA, 25 bp, Homo sapien
ctcctccagcgcagctctctgagct

SEQ ID NO: 1031261 - DNA, 25 bp, Homo sapien
tctgtgccagagaaataaggatccc

SEQ ID NO: 1031262 - DNA, 25 bp, Homo sapien
caccaagtttagcacgttttctgag

SEQ ID NO: 1031263 - DNA, 25 bp, Homo sapien
gtcacaaagctaggccgcagaggtg

SEQ ID NO: 1031264 - DNA, 25 bp, Homo sapien
taaacatggtactggagctaggcgc

SEQ ID NO: 1031265 - DNA, 25 bp, Homo sapien
tgaaggtgcgatgagtgccctctgg

SEQ ID NO: 1031266 - DNA, 25 bp, Homo sapien
gatgtcctgagtctgtgggagacca

SEQ ID NO: 1031267 - DNA, 25 bp, Homo sapien
actggcgacagtcacaggagctctc

SEQ ID NO: 1031268 - DNA, 25 bp, Homo sapien
agaccacaggaaactggcgacagtc

SEQ ID NO: 1031269 - DNA, 25 bp, Homo sapien
taggtgtgttgtccccaagcatgga

SEQ ID NO: 1031270 - DNA, 25 bp, Homo sapien
gatgcccatgtgtgcttagatctgc

SEQ ID NO: 1031271 - DNA, 25 bp, Homo sapien
tattactctacaaccccgagtggca

SEQ ID NO: 1031272 - DNA, 25 bp, Homo sapien
gacagattcggcaactccagcaact

SEQ ID NO: 1031273 - DNA, 25 bp, Homo sapien
gggaatggcagtgggttcaccctat

SEQ ID NO: 1031274 - DNA, 25 bp, Homo sapien
ctggagggggaatggcagtgggttc

SEQ ID NO: 1031275 - DNA, 25 bp, Homo sapien
agctggagggggaatggcagtgggt

SEQ ID NO: 1031276 - DNA, 25 bp, Homo sapien
gagggggaatggcagtgggttcacc

SEQ ID NO: 1031277 - DNA, 25 bp, Homo sapien
gagtctgggcatcctcgcacagcct

SEQ ID NO: 1031278 - DNA, 25 bp, Homo sapien
ctgagtctgggcatcctcgcacagc

SEQ ID NO: 1031279 - DNA, 25 bp, Homo sapien
gggcatcctcgcacagcctcaggca

SEQ ID NO: 1031280 - DNA, 25 bp, Homo sapien
tctgggcatcctcgcacagcctcag

SEQ ID NO: 1031281 - DNA, 25 bp, Homo sapien
agcgtggagaatcgcgccacgccct

SEQ ID NO: 1031282 - DNA, 25 bp, Homo sapien
cgccaagcagcgtggagaatcgcgc

SEQ ID NO: 1031283 - DNA, 25 bp, Homo sapien
ccaagcagcgtggagaatcgcgcca

SEQ ID NO: 1031284 - DNA, 25 bp, Homo sapien
aagcagcgtggagaatcgcgccacg

SEQ ID NO: 1031285 - DNA, 25 bp, Homo sapien
gttatacccgcaacgccgcattagt

SEQ ID NO: 1031286 - DNA, 25 bp, Homo sapien
gccaagtccttgataccctggagtg

SEQ ID NO: 1031287 - DNA, 25 bp, Homo sapien
cactgactatgacagggctctgggc

SEQ ID NO: 1031288 - DNA, 25 bp, Homo sapien
tgaagatgccaaggcgacgcctctt

SEQ ID NO: 1031289 - DNA, 25 bp, Homo sapien
ttcggaagttgccggggaggctgcc

SEQ ID NO: 1031290 - DNA, 25 bp, Homo sapien
tttcggaagttgccggggaggctgc

SEQ ID NO: 1031291 - DNA, 25 bp, Homo sapien
ctttcggaagttgccggggaggctg

SEQ ID NO: 1031292 - DNA, 25 bp, Homo sapien
acattgatgcgtgcccggcgctttt

SEQ ID NO: 1031293 - DNA, 25 bp, Homo sapien
gtttctccagcagcgacttgagctg

SEQ ID NO: 1031294 - DNA, 25 bp, Homo sapien
tgctccagtgacacattgatgcgtg

SEQ ID NO: 1031295 - DNA, 25 bp, Homo sapien
ctggtgcgagtagtgtttctccagc

SEQ ID NO: 1031296 - DNA, 25 bp, Homo sapien
ccttctccaatttgcgcttccggat

SEQ ID NO: 1031297 - DNA, 25 bp, Homo sapien
gccttctccaatttgcgcttccgga

SEQ ID NO: 1031298 - DNA, 25 bp, Homo sapien
tcggccttctccaatttgcgcttcc

SEQ ID NO: 1031299 - DNA, 25 bp, Homo sapien
cggccttctccaatttgcgcttccg

SEQ ID NO: 1031300 - DNA, 25 bp, Homo sapien
gcggaagcccgacggttgctcggct

SEQ ID NO: 1031301 - DNA, 25 bp, Homo sapien
ggaagcccgacggttgctcggctcc

SEQ ID NO: 1031302 - DNA, 25 bp, Homo sapien
ctgcggaagcccgacggttgctcgg

SEQ ID NO: 1031303 - DNA, 25 bp, Homo sapien
cagctgcggaagcccgacggttgct

SEQ ID NO: 1031304 - DNA, 25 bp, Homo sapien
cagcgcaggccgctgccgacctcat

SEQ ID NO: 1031305 - DNA, 25 bp, Homo sapien
ccgacctcatctccgcgccgaagga

SEQ ID NO: 1031306 - DNA, 25 bp, Homo sapien
tctccgcgccgaaggagctggctca

SEQ ID NO: 1031307 - DNA, 25 bp, Homo sapien
tcatctccgcgccgaaggagctggc

SEQ ID NO: 1031308 - DNA, 25 bp, Homo sapien
agcaggagcccagacggcaggggtg

SEQ ID NO: 1031309 - DNA, 25 bp, Homo sapien
tgcaagggcggaacagcgcgggcgc

SEQ ID NO: 1031310 - DNA, 25 bp, Homo sapien
ggtgcaagggcggaacagcgcgggc

SEQ ID NO: 1031311 - DNA, 25 bp, Homo sapien
aagggcggaacagcgcgggcgcctc

SEQ ID NO: 1031312 - DNA, 25 bp, Homo sapien
ggacgctggcggacgagccagggag

SEQ ID NO: 1031313 - DNA, 25 bp, Homo sapien
gcgactcgacgctggctgcggcggg

SEQ ID NO: 1031314 - DNA, 25 bp, Homo sapien
ggactctcggcgcagcgactcgacg

SEQ ID NO: 1031315 - DNA, 25 bp, Homo sapien
gcccagcccgggactctcggcgcag

SEQ ID NO: 1031316 - DNA, 25 bp, Homo sapien
gtcactgtgggcgtgctgaaaatag

SEQ ID NO: 1031317 - DNA, 25 bp, Homo sapien
tgtgtcgcgagaccaaatagggagc

SEQ ID NO: 1031318 - DNA, 25 bp, Homo sapien
tagggagcgccttcagttcaggtca

SEQ ID NO: 1031319 - DNA, 25 bp, Homo sapien
gaaaatagtccctgtgtcgcgagac

SEQ ID NO: 1031320 - DNA, 25 bp, Homo sapien
gtggattatgcccagacgcgcagac

SEQ ID NO: 1031321 - DNA, 25 bp, Homo sapien
cttggaagtcaagaggatcccgggt

SEQ ID NO: 1031322 - DNA, 25 bp, Homo sapien
gaggcaccgggttcacttttgcagc

SEQ ID NO: 1031323 - DNA, 25 bp, Homo sapien
gcaccgcttgcgaaggaggtccttg

SEQ ID NO: 1031324 - DNA, 25 bp, Homo sapien
cagggattggattctccggcagccc

SEQ ID NO: 1031325 - DNA, 25 bp, Homo sapien
ctccgagagccgtccagggattgga

SEQ ID NO: 1031326 - DNA, 25 bp, Homo sapien
gccgtccagggattggattctccgg

SEQ ID NO: 1031327 - DNA, 25 bp, Homo sapien
ggattggattctccggcagccctag

SEQ ID NO: 1031328 - DNA, 25 bp, Homo sapien
tcccaccaccgaagtccgtgcgcag

SEQ ID NO: 1031329 - DNA, 25 bp, Homo sapien
cctcccaccaccgaagtccgtgcgc

SEQ ID NO: 1031330 - DNA, 25 bp, Homo sapien
ccaccaccgaagtccgtgcgcagca

SEQ ID NO: 1031331 - DNA, 25 bp, Homo sapien
accaccgaagtccgtgcgcagcagt

SEQ ID NO: 1031332 - DNA, 25 bp, Homo sapien
tattctgaattacaaggtgtcggga

SEQ ID NO: 1031333 - DNA, 25 bp, Homo sapien
cacaacccaagctgcccctcgctgg

SEQ ID NO: 1031334 - DNA, 25 bp, Homo sapien
gagagggtgccaggatctctgaccc

SEQ ID NO: 1031335 - DNA, 25 bp, Homo sapien
ggtgccaggatctctgaccccacaa

SEQ ID NO: 1031336 - DNA, 25 bp, Homo sapien
tgtcttcagacaaatgctcaggtcc

SEQ ID NO: 1031337 - DNA, 25 bp, Homo sapien
cctgagttcttctggtagtgtgaca

SEQ ID NO: 1031338 - DNA, 25 bp, Homo sapien
ctcaggtcccaccagcgagtgagga

SEQ ID NO: 1031339 - DNA, 25 bp, Homo sapien
cttctggtagtgtgacatttttggg

SEQ ID NO: 1031340 - DNA, 25 bp, Homo sapien
gttgtcttcatagcacacccagagc

SEQ ID NO: 1031341 - DNA, 25 bp, Homo sapien
tagttttttgacaacggagcatttc

SEQ ID NO: 1031342 - DNA, 25 bp, Homo sapien
catatccaacggcaatacttgcagg

SEQ ID NO: 1031343 - DNA, 25 bp, Homo sapien
tccaatcctgcggtttttacaaaca

SEQ ID NO: 1031344 - DNA, 25 bp, Homo sapien
gtgacttgctggctatgaatgccca

SEQ ID NO: 1031345 - DNA, 25 bp, Homo sapien
tgctacacagtgttgtcccgagcgc

SEQ ID NO: 1031346 - DNA, 25 bp, Homo sapien
tgggcagaaaccctcgggaatgctt

SEQ ID NO: 1031347 - DNA, 25 bp, Homo sapien
gaatgcttccgagcacgctgtaggg

SEQ ID NO: 1031348 - DNA, 25 bp, Homo sapien
gcccaccctacagctcttgctctgc

SEQ ID NO: 1031349 - DNA, 25 bp, Homo sapien
ctctgcctgctacagggtcttcaag

SEQ ID NO: 1031350 - DNA, 25 bp, Homo sapien
acagggtcttcaaggtaggcaggaa

SEQ ID NO: 1031351 - DNA, 25 bp, Homo sapien
tgctacagggtcttcaaggtaggca

SEQ ID NO: 1031352 - DNA, 25 bp, Homo sapien
tctgtggagggcagatactccacca

SEQ ID NO: 1031353 - DNA, 25 bp, Homo sapien
ccaggtcctgttgccttgtcgccca

SEQ ID NO: 1031354 - DNA, 25 bp, Homo sapien
gaggcgcctgagtgcgatccagcct

SEQ ID NO: 1031355 - DNA, 25 bp, Homo sapien
ctagagggaggacccgagccgaggg

SEQ ID NO: 1031356 - DNA, 25 bp, Homo sapien
cctctcctcaggccggacctggctc

SEQ ID NO: 1031357 - DNA, 25 bp, Homo sapien
ctctcctcaggccggacctggctcc

SEQ ID NO: 1031358 - DNA, 25 bp, Homo sapien
tctcctcaggccggacctggctcct

SEQ ID NO: 1031359 - DNA, 25 bp, Homo sapien
gaggaggttgcagagctaccgtctt

SEQ ID NO: 1031360 - DNA, 25 bp, Homo sapien
gcttagcctcctcgaggattcggga

SEQ ID NO: 1031361 - DNA, 25 bp, Homo sapien
ggttgtgctgcgctaaccaaagccc

SEQ ID NO: 1031362 - DNA, 25 bp, Homo sapien
ggattcgggatcattacctcggcgg

SEQ ID NO: 1031363 - DNA, 25 bp, Homo sapien
gactggcctagactccattcaaggg

SEQ ID NO: 1031364 - DNA, 25 bp, Homo sapien
taaaacacgcatgtttcagggctcc

SEQ ID NO: 1031365 - DNA, 25 bp, Homo sapien
cacaaatatttaccgccgcgcggag

SEQ ID NO: 1031366 - DNA, 25 bp, Homo sapien
tcttagggccgatcttagcgagagc

SEQ ID NO: 1031367 - DNA, 25 bp, Homo sapien
agagagagagtcacgggtgactcct

SEQ ID NO: 1031368 - DNA, 25 bp, Homo sapien
aacatatgggtgcaatacgtattaa

SEQ ID NO: 1031369 - DNA, 25 bp, Homo sapien
tcctgctctataccttctagttggg

SEQ ID NO: 1031370 - DNA, 25 bp, Homo sapien
cactcttcttggagcttgggataca

SEQ ID NO: 1031371 - DNA, 25 bp, Homo sapien
caatgggcctaatagagaatggctg

SEQ ID NO: 1031372 - DNA, 25 bp, Homo sapien
tcgcttccgttgagaggtacccgct

SEQ ID NO: 1031373 - DNA, 25 bp, Homo sapien
ttagatcattgcgtgtgtggcatga

SEQ ID NO: 1031374 - DNA, 25 bp, Homo sapien
gtaagcatgtacactattccccagg

SEQ ID NO: 1031375 - DNA, 25 bp, Homo sapien
ggtacccgctatcctgagttttgtg

SEQ ID NO: 1031376 - DNA, 25 bp, Homo sapien
caaaaaactagcgggtgaaatgatt

SEQ ID NO: 1031377 - DNA, 25 bp, Homo sapien
gcactaagctgctgggaacccatct

SEQ ID NO: 1031378 - DNA, 25 bp, Homo sapien
tcaggcttgggacaggcgcctacct

SEQ ID NO: 1031379 - DNA, 25 bp, Homo sapien
gaaatgattcagtgacctaaggaca

SEQ ID NO: 1031380 - DNA, 25 bp, Homo sapien
cgccatgcacgtgttcttgcgggcc

SEQ ID NO: 1031381 - DNA, 25 bp, Homo sapien
ccaggacgccatgcacgtgttcttg

SEQ ID NO: 1031382 - DNA, 25 bp, Homo sapien
gtgcggcgccgcgactccgcactca

SEQ ID NO: 1031383 - DNA, 25 bp, Homo sapien
gaggagcccgcggtgcggccgtcgg

SEQ ID NO: 1031384 - DNA, 25 bp, Homo sapien
gcagcgcgtccagcgggtcgcgcag

SEQ ID NO: 1031385 - DNA, 25 bp, Homo sapien
ccgcgtggtgcacgggcagcgcgtc

SEQ ID NO: 1031386 - DNA, 25 bp, Homo sapien
agcgacctcagcacgtccagctcgc

SEQ ID NO: 1031387 - DNA, 25 bp, Homo sapien
aggcctgcggcgtgcagcgacctca

SEQ ID NO: 1031388 - DNA, 25 bp, Homo sapien
gccggtggcggaggcgtcgtgggcc

SEQ ID NO: 1031389 - DNA, 25 bp, Homo sapien
tgtggcgccgttgcgggcgcgggcc

SEQ ID NO: 1031390 - DNA, 25 bp, Homo sapien
tcgtgggccggtgtggcgccgttgc

SEQ ID NO: 1031391 - DNA, 25 bp, Homo sapien
cggaggcgtcgtgggccggtgtggc

SEQ ID NO: 1031392 - DNA, 25 bp, Homo sapien
ctgcactctgcagccgccctgcgac

SEQ ID NO: 1031393 - DNA, 25 bp, Homo sapien
ctctgcagccgccctgcgacagcag

SEQ ID NO: 1031394 - DNA, 25 bp, Homo sapien
tgcagccgccctgcgacagcagcca

SEQ ID NO: 1031395 - DNA, 25 bp, Homo sapien
gcactctgcagccgccctgcgacag

SEQ ID NO: 1031396 - DNA, 25 bp, Homo sapien
tgactcccagggactcagggaatgc

SEQ ID NO: 1031397 - DNA, 25 bp, Homo sapien
gttgtcacggcaggagactggcacc

SEQ ID NO: 1031398 - DNA, 25 bp, Homo sapien
tggttgtcacggcaggagactggca

SEQ ID NO: 1031399 - DNA, 25 bp, Homo sapien
tcacggcaggagactggcaccaggc

SEQ ID NO: 1031400 - DNA, 25 bp, Homo sapien
accgccatgatgcaagagccagttc

SEQ ID NO: 1031401 - DNA, 25 bp, Homo sapien
tggataggcagggcgcccatgtctg

SEQ ID NO: 1031402 - DNA, 25 bp, Homo sapien
taggcagggcgcccatgtctgtggc

SEQ ID NO: 1031403 - DNA, 25 bp, Homo sapien
tccccaccgccatgatgcaagagcc

SEQ ID NO: 1031404 - DNA, 25 bp, Homo sapien
cgtggcaccgttcttggtttgggca

SEQ ID NO: 1031405 - DNA, 25 bp, Homo sapien
gcaccgttcttggtttgggcattca

SEQ ID NO: 1031406 - DNA, 25 bp, Homo sapien
acgccaggtacaggggcgtggcacc

SEQ ID NO: 1031407 - DNA, 25 bp, Homo sapien
tggcccatctgcgccgcggcgtgca

SEQ ID NO: 1031408 - DNA, 25 bp, Homo sapien
acaggctcacgtcggtgcagctcac

SEQ ID NO: 1031409 - DNA, 25 bp, Homo sapien
agctccccgttctcggcggcgtcgt

SEQ ID NO: 1031410 - DNA, 25 bp, Homo sapien
gtcagccgagatctccccgccgtgc

SEQ ID NO: 1031411 - DNA, 25 bp, Homo sapien
ggtcccgccccacaggtcagccgag

SEQ ID NO: 1031412 - DNA, 25 bp, Homo sapien
ctctagctccccgttctcggcggcg

SEQ ID NO: 1031413 - DNA, 25 bp, Homo sapien
tgtggccgttgaagtccgacaggtc

SEQ ID NO: 1031414 - DNA, 25 bp, Homo sapien
tggctgtggccgttgaagtccgaca

SEQ ID NO: 1031415 - DNA, 25 bp, Homo sapien
gctccgcgccgttcactaccaggat

SEQ ID NO: 1031416 - DNA, 25 bp, Homo sapien
ccgttcactaccaggatctggcagc

SEQ ID NO: 1031417 - DNA, 25 bp, Homo sapien
gaatagtgtttgctgtcctatgacc

SEQ ID NO: 1031418 - DNA, 25 bp, Homo sapien
tcctatgaccgctagcagctgcatc

SEQ ID NO: 1031419 - DNA, 25 bp, Homo sapien
taacggagattacacctttaaggca

SEQ ID NO: 1031420 - DNA, 25 bp, Homo sapien
ccagcttatataccctagtgacaga

SEQ ID NO: 1031421 - DNA, 25 bp, Homo sapien
ttttgtgcctaactttctttatctg

SEQ ID NO: 1031422 - DNA, 25 bp, Homo sapien
cctccctgacttactagctatttcg

SEQ ID NO: 1031423 - DNA, 25 bp, Homo sapien
cctgctgcctaccgcaggaatcagg

SEQ ID NO: 1031424 - DNA, 25 bp, Homo sapien
tcgggagagtcacctatgctttttg

SEQ ID NO: 1031425 - DNA, 25 bp, Homo sapien
gccatgctgcccctgctgccggcaa

SEQ ID NO: 1031426 - DNA, 25 bp, Homo sapien
ctgcccctgctgccggcaagcccgc

SEQ ID NO: 1031427 - DNA, 25 bp, Homo sapien
atgctgcccctgctgccggcaagcc

SEQ ID NO: 1031428 - DNA, 25 bp, Homo sapien
attgccatgctgcccctgctgccgg

SEQ ID NO: 1031429 - DNA, 25 bp, Homo sapien
ggctgcttagcctccagctctgcgg

SEQ ID NO: 1031430 - DNA, 25 bp, Homo sapien
tgcttagcctccagctctgcggatg

SEQ ID NO: 1031431 - DNA, 25 bp, Homo sapien
gcttagcctccagctctgcggatgg

SEQ ID NO: 1031432 - DNA, 25 bp, Homo sapien
tagcctccagctctgcggatggatc

SEQ ID NO: 1031433 - DNA, 25 bp, Homo sapien
gaggctttggtgtgtctagagggca

SEQ ID NO: 1031434 - DNA, 25 bp, Homo sapien
ggtctactccttgggagtacggatg

SEQ ID NO: 1031435 - DNA, 25 bp, Homo sapien
gaagaccaggcactccggtttggag

SEQ ID NO: 1031436 - DNA, 25 bp, Homo sapien
gatggccacatccaatctttgcagg

SEQ ID NO: 1031437 - DNA, 25 bp, Homo sapien
tcagcatgtccatgtagctctgtat

SEQ ID NO: 1031438 - DNA, 25 bp, Homo sapien
cagcatgtccatgtagctctgtatg

SEQ ID NO: 1031439 - DNA, 25 bp, Homo sapien
tgggggcagttgggtgcctgggggc

SEQ ID NO: 1031440 - DNA, 25 bp, Homo sapien
tgtctccacgtggcggagtttgttc

SEQ ID NO: 1031441 - DNA, 25 bp, Homo sapien
tctccacgtggcggagtttgttctt

SEQ ID NO: 1031442 - DNA, 25 bp, Homo sapien
ctgtctccacgtggcggagtttgtt

SEQ ID NO: 1031443 - DNA, 25 bp, Homo sapien
gtctccacgtggcggagtttgttct

SEQ ID NO: 1031444 - DNA, 25 bp, Homo sapien
ttttatgaattggccctggggtggc

SEQ ID NO: 1031445 - DNA, 25 bp, Homo sapien
cttttatgaattggccctggggtgg

SEQ ID NO: 1031446 - DNA, 25 bp, Homo sapien
gctgtgcacctggctgtgggggcgg

SEQ ID NO: 1031447 - DNA, 25 bp, Homo sapien
gggggcggcaggacccgacacctgc

SEQ ID NO: 1031448 - DNA, 25 bp, Homo sapien
ctgtgcacctggctgtgggggcggc

SEQ ID NO: 1031449 - DNA, 25 bp, Homo sapien
ctggggactcgcggccagcggccgt

SEQ ID NO: 1031450 - DNA, 25 bp, Homo sapien
ttcctagaccccctggttctcacag

SEQ ID NO: 1031451 - DNA, 25 bp, Homo sapien
gactcgcggccagcggccgtcgagg

SEQ ID NO: 1031452 - DNA, 25 bp, Homo sapien
agctgacttcctagaccccctggtt

SEQ ID NO: 1031453 - DNA, 25 bp, Homo sapien
gcagcccgtcgtggccgtcacagga

SEQ ID NO: 1031454 - DNA, 25 bp, Homo sapien
cgtcgtggccgtcacaggagctcag

SEQ ID NO: 1031455 - DNA, 25 bp, Homo sapien
ccgtcgtggccgtcacaggagctca

SEQ ID NO: 1031456 - DNA, 25 bp, Homo sapien
ctccgcagcccgtcgtggccgtcac

SEQ ID NO: 1031457 - DNA, 25 bp, Homo sapien
agcggcccagctgccggtagtagtc

SEQ ID NO: 1031458 - DNA, 25 bp, Homo sapien
cggaggggccttcgagtgagccgcg

SEQ ID NO: 1031459 - DNA, 25 bp, Homo sapien
gagcggaggggccttcgagtgagcc

SEQ ID NO: 1031460 - DNA, 25 bp, Homo sapien
gccttcgagtgagccgcgggcggca

SEQ ID NO: 1031461 - DNA, 25 bp, Homo sapien
aggggccttcgagtgagccgcgggc

SEQ ID NO: 1031462 - DNA, 25 bp, Homo sapien
gccgttaggaacatggttcccagga

SEQ ID NO: 1031463 - DNA, 25 bp, Homo sapien
ctcgcggcctccggcaggggcggcg

SEQ ID NO: 1031464 - DNA, 25 bp, Homo sapien
gggcggcggtggcagctccctggac

SEQ ID NO: 1031465 - DNA, 25 bp, Homo sapien
gtgggggcggcggtggcagctccct

SEQ ID NO: 1031466 - DNA, 25 bp, Homo sapien
gggggcggcggtggcagctccctgg

SEQ ID NO: 1031467 - DNA, 25 bp, Homo sapien
aggagcggcgctgcccgcagccagg

SEQ ID NO: 1031468 - DNA, 25 bp, Homo sapien
ggaggagcggcgctgcccgcagcca

SEQ ID NO: 1031469 - DNA, 25 bp, Homo sapien
cgaggaggagcggcgctgcccgcag

SEQ ID NO: 1031470 - DNA, 25 bp, Homo sapien
gaggaggagcggcgctgcccgcagc

SEQ ID NO: 1031471 - DNA, 25 bp, Homo sapien
tctgcccttagcttcagccctgctg

SEQ ID NO: 1031472 - DNA, 25 bp, Homo sapien
tctctgcccttagcttcagccctgc

SEQ ID NO: 1031473 - DNA, 25 bp, Homo sapien
ccccatgagggtggtccatcgagtt

SEQ ID NO: 1031474 - DNA, 25 bp, Homo sapien
catgagggtggtccatcgagttcct

SEQ ID NO: 1031475 - DNA, 25 bp, Homo sapien
gagaagtgacagcggagttaggagg

SEQ ID NO: 1031476 - DNA, 25 bp, Homo sapien
gaagtgacagcggagttaggaggga

SEQ ID NO: 1031477 - DNA, 25 bp, Homo sapien
ggagagaagtgacagcggagttagg

SEQ ID NO: 1031478 - DNA, 25 bp, Homo sapien
gagagaagtgacagcggagttagga

SEQ ID NO: 1031479 - DNA, 25 bp, Homo sapien
cttcctgtgcctcaggactctcact

SEQ ID NO: 1031480 - DNA, 25 bp, Homo sapien
tcttcctgtgcctcaggactctcac

SEQ ID NO: 1031481 - DNA, 25 bp, Homo sapien
ttcctgtgcctcaggactctcactt

SEQ ID NO: 1031482 - DNA, 25 bp, Homo sapien
gtatgaggtgcaaggccccacccat

SEQ ID NO: 1031483 - DNA, 25 bp, Homo sapien
tgagggtaggtatgaggtgcaaggc

SEQ ID NO: 1031484 - DNA, 25 bp, Homo sapien
ggtaggtatgaggtgcaaggcccca

SEQ ID NO: 1031485 - DNA, 25 bp, Homo sapien
ggtatgagggtaggtatgaggtgca

SEQ ID NO: 1031486 - DNA, 25 bp, Homo sapien
ggaataaaatgggccgacagctctt

SEQ ID NO: 1031487 - DNA, 25 bp, Homo sapien
gataatatggaaacacccagggcag

SEQ ID NO: 1031488 - DNA, 25 bp, Homo sapien
agacacattggttgcaagccgggag

SEQ ID NO: 1031489 - DNA, 25 bp, Homo sapien
ccagcttagccagaggaggcaaatg

SEQ ID NO: 1031490 - DNA, 25 bp, Homo sapien
ccgggagcacctttatggcaaagca

SEQ ID NO: 1031491 - DNA, 25 bp, Homo sapien
cagccacctgacctttgtcccaggt

SEQ ID NO: 1031492 - DNA, 25 bp, Homo sapien
gctccaaaacactacctggaatcag

SEQ ID NO: 1031493 - DNA, 25 bp, Homo sapien
gaggcccctgggagttcatggtggc

SEQ ID NO: 1031494 - DNA, 25 bp, Homo sapien
gtggctcttgggcatatgtccccgc

SEQ ID NO: 1031495 - DNA, 25 bp, Homo sapien
ggagatgaggcactggccagggtgg

SEQ ID NO: 1031496 - DNA, 25 bp, Homo sapien
aggcaggagatgaggcactggccag

SEQ ID NO: 1031497 - DNA, 25 bp, Homo sapien
caggagatgaggcactggccagggt

SEQ ID NO: 1031498 - DNA, 25 bp, Homo sapien
ctatgcggaggcaggagatgaggca

SEQ ID NO: 1031499 - DNA, 25 bp, Homo sapien
ctcttgcctgccttaatctcagcca

SEQ ID NO: 1031500 - DNA, 25 bp, Homo sapien
atctcagccagtagctccgagttgt

SEQ ID NO: 1031501 - DNA, 25 bp, Homo sapien
cagccagtagctccgagttgtcgcc

SEQ ID NO: 1031502 - DNA, 25 bp, Homo sapien
cttaatctcagccagtagctccgag

SEQ ID NO: 1031503 - DNA, 25 bp, Homo sapien
tgagaacactgtggtcagccccttg

SEQ ID NO: 1031504 - DNA, 25 bp, Homo sapien
gagaacactgtggtcagccccttgc

SEQ ID NO: 1031505 - DNA, 25 bp, Homo sapien
ctgagaacactgtggtcagcccctt

SEQ ID NO: 1031506 - DNA, 25 bp, Homo sapien
gagcgcccggtggcctagggccagg

SEQ ID NO: 1031507 - DNA, 25 bp, Homo sapien
agcgcccggtggcctagggccaggg

SEQ ID NO: 1031508 - DNA, 25 bp, Homo sapien
gcgcccggtggcctagggccaggga

SEQ ID NO: 1031509 - DNA, 25 bp, Homo sapien
tgagcgcccggtggcctagggccag

SEQ ID NO: 1031510 - DNA, 25 bp, Homo sapien
cccggcgcaggagtagtgggcggca

SEQ ID NO: 1031511 - DNA, 25 bp, Homo sapien
ccggcgcaggagtagtgggcggcac

SEQ ID NO: 1031512 - DNA, 25 bp, Homo sapien
ttgagcagcggctgaaaccccgcag

SEQ ID NO: 1031513 - DNA, 25 bp, Homo sapien
agcagcggctgaaaccccgcagctg

SEQ ID NO: 1031514 - DNA, 25 bp, Homo sapien
tgtgctcgcgggagtacctccagcc

SEQ ID NO: 1031515 - DNA, 25 bp, Homo sapien
gaggatggcgttgtgctcgcgggag

SEQ ID NO: 1031516 - DNA, 25 bp, Homo sapien
atggcgttgtgctcgcgggagtacc

SEQ ID NO: 1031517 - DNA, 25 bp, Homo sapien
ttgctgctcgatgcggaggatgtcg

SEQ ID NO: 1031518 - DNA, 25 bp, Homo sapien
caccagctgagcgagtgcgagcgac

SEQ ID NO: 1031519 - DNA, 25 bp, Homo sapien
cccgtgtcagcggtcagcagctccg

SEQ ID NO: 1031520 - DNA, 25 bp, Homo sapien
catgttcttgagcaacgtggagatc

SEQ ID NO: 1031521 - DNA, 25 bp, Homo sapien
cgtggagatcttgctgcaccaggcg

SEQ ID NO: 1031522 - DNA, 25 bp, Homo sapien
ttgcggcgcggacagcgcgcgggcg

SEQ ID NO: 1031523 - DNA, 25 bp, Homo sapien
gcgcgcgggcgccgcgccccgtgcg

SEQ ID NO: 1031524 - DNA, 25 bp, Homo sapien
cttgcggcgcggacagcgcgcgggc

SEQ ID NO: 1031525 - DNA, 25 bp, Homo sapien
cgcgggcgccgcgccccgtgcgcgc

SEQ ID NO: 1031526 - DNA, 25 bp, Homo sapien
gagcgggccgccacgtagtcctcct

SEQ ID NO: 1031527 - DNA, 25 bp, Homo sapien
agagcgggccgccacgtagtcctcc

SEQ ID NO: 1031528 - DNA, 25 bp, Homo sapien
gtcctcctccaagatgggctcccgg

SEQ ID NO: 1031529 - DNA, 25 bp, Homo sapien
cacgtagtcctcctccaagatgggc

SEQ ID NO: 1031530 - DNA, 25 bp, Homo sapien
gcctggcgatcctgtacctcgggcg

SEQ ID NO: 1031531 - DNA, 25 bp, Homo sapien
agcagtccgcgtaggcgcgcctggg

SEQ ID NO: 1031532 - DNA, 25 bp, Homo sapien
gatcctgtacctcgggcgggcccag

SEQ ID NO: 1031533 - DNA, 25 bp, Homo sapien
ctgtgggcctcgctgttgctcgccg

SEQ ID NO: 1031534 - DNA, 25 bp, Homo sapien
ctggggccaatacaggccgtgcgcc

SEQ ID NO: 1031535 - DNA, 25 bp, Homo sapien
aatacaggccgtgcgccaggcccgg

SEQ ID NO: 1031536 - DNA, 25 bp, Homo sapien
ggccaatacaggccgtgcgccaggc

SEQ ID NO: 1031537 - DNA, 25 bp, Homo sapien
tggggccaatacaggccgtgcgcca

SEQ ID NO: 1031538 - DNA, 25 bp, Homo sapien
gcccagtcggtcgaacatctcgtag

SEQ ID NO: 1031539 - DNA, 25 bp, Homo sapien
tggctgcccagtcggtcgaacatct

SEQ ID NO: 1031540 - DNA, 25 bp, Homo sapien
ggtggctgcccagtcggtcgaacat

SEQ ID NO: 1031541 - DNA, 25 bp, Homo sapien
ctgcccagtcggtcgaacatctcgt

SEQ ID NO: 1031542 - DNA, 25 bp, Homo sapien
atggagcagcctcttcggtccgctc

SEQ ID NO: 1031543 - DNA, 25 bp, Homo sapien
ggtgcctgaggtcctcgaagccgtc

SEQ ID NO: 1031544 - DNA, 25 bp, Homo sapien
tcgcctgttcttcgggggccggctc

SEQ ID NO: 1031545 - DNA, 25 bp, Homo sapien
cgtttccgaagaaccggtgcctgag

SEQ ID NO: 1031546 - DNA, 25 bp, Homo sapien
agacaccagttccaaggggtcttcg

SEQ ID NO: 1031547 - DNA, 25 bp, Homo sapien
tcagacaccagttccaaggggtctt

SEQ ID NO: 1031548 - DNA, 25 bp, Homo sapien
caccagttccaaggggtcttcggcg

SEQ ID NO: 1031549 - DNA, 25 bp, Homo sapien
ctcagacaccagttccaaggggtct

SEQ ID NO: 1031550 - DNA, 25 bp, Homo sapien
agaagctgcggtcgatgtagcggca

SEQ ID NO: 1031551 - DNA, 25 bp, Homo sapien
tgtcctcgttgctgaactcgcccat

SEQ ID NO: 1031552 - DNA, 25 bp, Homo sapien
ggcagatgtcctcgttgctgaactc

SEQ ID NO: 1031553 - DNA, 25 bp, Homo sapien
gtagcggcagatgtcctcgttgctg

SEQ ID NO: 1031554 - DNA, 25 bp, Homo sapien
taagacgctcgagggtgaactgaga

SEQ ID NO: 1031555 - DNA, 25 bp, Homo sapien
agcccgccacgatgggacctcagag

SEQ ID NO: 1031556 - DNA, 25 bp, Homo sapien
gtccaggcccacgttaagacgctcg

SEQ ID NO: 1031557 - DNA, 25 bp, Homo sapien
tctggagggcgtcagacaggcgtcc

SEQ ID NO: 1031558 - DNA, 25 bp, Homo sapien
gtcccgcctccaggcgggcatgctg

SEQ ID NO: 1031559 - DNA, 25 bp, Homo sapien
cttcttccgcaggaggtcccgcctc

SEQ ID NO: 1031560 - DNA, 25 bp, Homo sapien
cagcttcttccgcaggaggtcccgc

SEQ ID NO: 1031561 - DNA, 25 bp, Homo sapien
cttccagcttcttccgcaggaggtc

SEQ ID NO: 1031562 - DNA, 25 bp, Homo sapien
caaagacttacttttacaagaggag

SEQ ID NO: 1031563 - DNA, 25 bp, Homo sapien
catctgtggctctcattacatttct

SEQ ID NO: 1031564 - DNA, 25 bp, Homo sapien
gcagggactgagtaaccgggaacaa

SEQ ID NO: 1031565 - DNA, 25 bp, Homo sapien
tctgagggccagacaatcaaggtga

SEQ ID NO: 1031566 - DNA, 25 bp, Homo sapien
gcttgctctcatcgtagcccagcgt

SEQ ID NO: 1031567 - DNA, 25 bp, Homo sapien
cagggcgccagcttgctctcatcgt

SEQ ID NO: 1031568 - DNA, 25 bp, Homo sapien
gtagcccagcgtccgcagcttctct

SEQ ID NO: 1031569 - DNA, 25 bp, Homo sapien
ggcgccagcttgctctcatcgtagc

SEQ ID NO: 1031570 - DNA, 25 bp, Homo sapien
ttagcgatgtcccccttcttcagga

SEQ ID NO: 1031571 - DNA, 25 bp, Homo sapien
gcgatgtcccccttcttcaggatga

SEQ ID NO: 1031572 - DNA, 25 bp, Homo sapien
agcgatgtcccccttcttcaggatg

SEQ ID NO: 1031573 - DNA, 25 bp, Homo sapien
cgatgtcccccttcttcaggatgac

SEQ ID NO: 1031574 - DNA, 25 bp, Homo sapien
catttgttgttgtttgcgtcagcag

SEQ ID NO: 1031575 - DNA, 25 bp, Homo sapien
gcgtcagcagcttgggcactttttc

SEQ ID NO: 1031576 - DNA, 25 bp, Homo sapien
tatgtaagtcggcatgcaaataagc

SEQ ID NO: 1031577 - DNA, 25 bp, Homo sapien
tgcactccagtgttgccaagggctg

SEQ ID NO: 1031578 - DNA, 25 bp, Homo sapien
agagcaagtcgcggccacagcgagt

SEQ ID NO: 1031579 - DNA, 25 bp, Homo sapien
cgagaaggagagagcaagtcgcggc

SEQ ID NO: 1031580 - DNA, 25 bp, Homo sapien
cccgagaaggagagagcaagtcgcg

SEQ ID NO: 1031581 - DNA, 25 bp, Homo sapien
aaggagagagcaagtcgcggccaca

SEQ ID NO: 1031582 - DNA, 25 bp, Homo sapien
ttgcagaagccctaagtacggttac

SEQ ID NO: 1031583 - DNA, 25 bp, Homo sapien
ttattaagccgctggcacggccctg

SEQ ID NO: 1031584 - DNA, 25 bp, Homo sapien
gacatttctcaacttctcggccgga

SEQ ID NO: 1031585 - DNA, 25 bp, Homo sapien
ccaaggcgaagaagcacgaacgaat

SEQ ID NO: 1031586 - DNA, 25 bp, Homo sapien
gagtgccaggtcagccaatgtgtca

SEQ ID NO: 1031587 - DNA, 25 bp, Homo sapien
ggccgacacccgctgtggctgtaag

SEQ ID NO: 1031588 - DNA, 25 bp, Homo sapien
gacacccgctgtggctgtaagccag

SEQ ID NO: 1031589 - DNA, 25 bp, Homo sapien
agccaggctggtttgtggagtgcca

SEQ ID NO: 1031590 - DNA, 25 bp, Homo sapien
gggcactacctgaaggccccttgca

SEQ ID NO: 1031591 - DNA, 25 bp, Homo sapien
tgcttggcagggagttcctaaggac

SEQ ID NO: 1031592 - DNA, 25 bp, Homo sapien
ctgcggcaactccacctgccttgtg

SEQ ID NO: 1031593 - DNA, 25 bp, Homo sapien
taattctgaatgtgcccgctgccag

SEQ ID NO: 1031594 - DNA, 25 bp, Homo sapien
aggtgtgactgtgccggtgacttcc

SEQ ID NO: 1031595 - DNA, 25 bp, Homo sapien
cttccacaagaagattggtctgttt

SEQ ID NO: 1031596 - DNA, 25 bp, Homo sapien
gcggcactcgtagccccaggtgtga

SEQ ID NO: 1031597 - DNA, 25 bp, Homo sapien
tgactgtgccggtgacttccacaag

SEQ ID NO: 1031598 - DNA, 25 bp, Homo sapien
tggccgccctttccgatctcgttaa

SEQ ID NO: 1031599 - DNA, 25 bp, Homo sapien
ccaggcagagcattatcagtgtccc

SEQ ID NO: 1031600 - DNA, 25 bp, Homo sapien
ccctgtcccaagagcctcggtgaag

SEQ ID NO: 1031601 - DNA, 25 bp, Homo sapien
cagggcgtagcccttccactgagag

SEQ ID NO: 1031602 - DNA, 25 bp, Homo sapien
gccctggctctaccttgaagtggtt

SEQ ID NO: 1031603 - DNA, 25 bp, Homo sapien
tgccgcctaatgagctcaggtctag

SEQ ID NO: 1031604 - DNA, 25 bp, Homo sapien
cacctggtcggactcggttgggctc

SEQ ID NO: 1031605 - DNA, 25 bp, Homo sapien
cagcgcttcgcgtgttctacttggc

SEQ ID NO: 1031606 - DNA, 25 bp, Homo sapien
cagggctgaatctgcccagttccca

SEQ ID NO: 1031607 - DNA, 25 bp, Homo sapien
gatggagcttgccatgggaagcact

SEQ ID NO: 1031608 - DNA, 25 bp, Homo sapien
ggcacttgagttcagggcggcctcc

SEQ ID NO: 1031609 - DNA, 25 bp, Homo sapien
acttgccacggatgggccacggatg

SEQ ID NO: 1031610 - DNA, 25 bp, Homo sapien
cccagtctgatgagacctctctcag

SEQ ID NO: 1031611 - DNA, 25 bp, Homo sapien
tgggtccggtggacggccgctcctg

SEQ ID NO: 1031612 - DNA, 25 bp, Homo sapien
agtgcctcagatggctccacggaga

SEQ ID NO: 1031613 - DNA, 25 bp, Homo sapien
cccgagttcgacagcggtcctttca

SEQ ID NO: 1031614 - DNA, 25 bp, Homo sapien
aaggcgaggacagtggcacttcagc

SEQ ID NO: 1031615 - DNA, 25 bp, Homo sapien
ccctaccatcatgcggaaaagcagc

SEQ ID NO: 1031616 - DNA, 25 bp, Homo sapien
gacagtggcacttcagctgccagct

SEQ ID NO: 1031617 - DNA, 25 bp, Homo sapien
agctcccctaccatcatgcggaaaa

SEQ ID NO: 1031618 - DNA, 25 bp, Homo sapien
cgcaagaacatgtcggagttcctgg

SEQ ID NO: 1031619 - DNA, 25 bp, Homo sapien
gccgcaagaacatgtcggagttcct

SEQ ID NO: 1031620 - DNA, 25 bp, Homo sapien
tggccgccgccgcaagaacatgtcg

SEQ ID NO: 1031621 - DNA, 25 bp, Homo sapien
gccgccgcaagaacatgtcggagtt

SEQ ID NO: 1031622 - DNA, 25 bp, Homo sapien
tttgagtagatacagtgggactcct

SEQ ID NO: 1031623 - DNA, 25 bp, Homo sapien
cagggcccactctagctgcacatgg

SEQ ID NO: 1031624 - DNA, 25 bp, Homo sapien
gagtagatacagtgggactcctctt

SEQ ID NO: 1031625 - DNA, 25 bp, Homo sapien
ctttgaacagggcccactctagctg

SEQ ID NO: 1031626 - DNA, 25 bp, Homo sapien
ggtgtctccggacgcctagcagcct

SEQ ID NO: 1031627 - DNA, 25 bp, Homo sapien
cggctgagatgtccccgccaattct

SEQ ID NO: 1031628 - DNA, 25 bp, Homo sapien
gtcgtgcccgcgacggtgatagcca

SEQ ID NO: 1031629 - DNA, 25 bp, Homo sapien
caattcttggcgctttgtgtctggg

SEQ ID NO: 1031630 - DNA, 25 bp, Homo sapien
tgacactgtgaggtgtctcagctgg

SEQ ID NO: 1031631 - DNA, 25 bp, Homo sapien
cagttaacagatgaacttttgtatc

SEQ ID NO: 1031632 - DNA, 25 bp, Homo sapien
catagtaatcactgacactgtgagg

SEQ ID NO: 1031633 - DNA, 25 bp, Homo sapien
tatgtatggtttctgttcagctctt

SEQ ID NO: 1031634 - DNA, 25 bp, Homo sapien
agtctccggcatgtagaaacggtca

SEQ ID NO: 1031635 - DNA, 25 bp, Homo sapien
caagatcatggataagacagcaggc

SEQ ID NO: 1031636 - DNA, 25 bp, Homo sapien
taagagatgtagcacagtctccggc

SEQ ID NO: 1031637 - DNA, 25 bp, Homo sapien
gctactcacggtcatgctggaggga

SEQ ID NO: 1031638 - DNA, 25 bp, Homo sapien
catagtggccactctgacggttgag

SEQ ID NO: 1031639 - DNA, 25 bp, Homo sapien
gagcctcgctggctgaattcgcagc

SEQ ID NO: 1031640 - DNA, 25 bp, Homo sapien
gttgagtggccttgctgcaatcaca

SEQ ID NO: 1031641 - DNA, 25 bp, Homo sapien
cttgaaaggagcctcgctggctgaa

SEQ ID NO: 1031642 - DNA, 25 bp, Homo sapien
ttgtgcggggcccattgccagtctt

SEQ ID NO: 1031643 - DNA, 25 bp, Homo sapien
tgttatccttgtgcggggcccattg

SEQ ID NO: 1031644 - DNA, 25 bp, Homo sapien
tccttgtgcggggcccattgccagt

SEQ ID NO: 1031645 - DNA, 25 bp, Homo sapien
tatccttgtgcggggcccattgcca

SEQ ID NO: 1031646 - DNA, 25 bp, Homo sapien
aaatggctgagtgttagctcatgcc

SEQ ID NO: 1031647 - DNA, 25 bp, Homo sapien
ttatatgaaaaatggctgagtgtta

SEQ ID NO: 1031648 - DNA, 25 bp, Homo sapien
tatgaaaaatggctgagtgttagct

SEQ ID NO: 1031649 - DNA, 25 bp, Homo sapien
gaaaaatggctgagtgttagctcat

SEQ ID NO: 1031650 - DNA, 25 bp, Homo sapien
gtctcagagtctgtatttataagtt

SEQ ID NO: 1031651 - DNA, 25 bp, Homo sapien
ggtctcagagtctgtatttataagt

SEQ ID NO: 1031652 - DNA, 25 bp, Homo sapien
aagaggagacacttggtctcagagt

SEQ ID NO: 1031653 - DNA, 25 bp, Homo sapien
gaggagacacttggtctcagagtct

SEQ ID NO: 1031654 - DNA, 25 bp, Homo sapien
agcacgcatggaaccaccgtaggct

SEQ ID NO: 1031655 - DNA, 25 bp, Homo sapien
tgccttcagcacttttacaatgatg

SEQ ID NO: 1031656 - DNA, 25 bp, Homo sapien
gttctcctcctcgagaaggaaagca

SEQ ID NO: 1031657 - DNA, 25 bp, Homo sapien
cacgcatggaaccaccgtaggctct

SEQ ID NO: 1031658 - DNA, 25 bp, Homo sapien
caaggagtggcctctaaggaggcca

SEQ ID NO: 1031659 - DNA, 25 bp, Homo sapien
atggccaaggagtggcctctaagga

SEQ ID NO: 1031660 - DNA, 25 bp, Homo sapien
cagctgccggatgcttcctaacttc

SEQ ID NO: 1031661 - DNA, 25 bp, Homo sapien
taaatagaaggcagctgccggatgc

SEQ ID NO: 1031662 - DNA, 25 bp, Homo sapien
gaagactccgtgctatggcaggcaa

SEQ ID NO: 1031663 - DNA, 25 bp, Homo sapien
tccgtgctatggcaggcaaaggccc

SEQ ID NO: 1031664 - DNA, 25 bp, Homo sapien
aagtcaggagaagactccgtgctat

SEQ ID NO: 1031665 - DNA, 25 bp, Homo sapien
ggccgaccaggcgagccgtgcagag

SEQ ID NO: 1031666 - DNA, 25 bp, Homo sapien
gggtcacctcgggtctgtgcctcac

SEQ ID NO: 1031667 - DNA, 25 bp, Homo sapien
ctgtcacacagggtcacctcgggtc

SEQ ID NO: 1031668 - DNA, 25 bp, Homo sapien
tcacacagggtcacctcgggtctgt

SEQ ID NO: 1031669 - DNA, 25 bp, Homo sapien
cacagggtcacctcgggtctgtgcc

SEQ ID NO: 1031670 - DNA, 25 bp, Homo sapien
ggggtgcacccacacgtccagctca

SEQ ID NO: 1031671 - DNA, 25 bp, Homo sapien
atccgcttcggcccaggtgatccac

SEQ ID NO: 1031672 - DNA, 25 bp, Homo sapien
ctcgcccggccaaaacctcaggctt

SEQ ID NO: 1031673 - DNA, 25 bp, Homo sapien
ccatccgcttcggcccaggtgatcc

SEQ ID NO: 1031674 - DNA, 25 bp, Homo sapien
aagacccagaggatttctcagactc

SEQ ID NO: 1031675 - DNA, 25 bp, Homo sapien
caaagacccagaggatttctcagac

SEQ ID NO: 1031676 - DNA, 25 bp, Homo sapien
tgccaaagacccagaggatttctca

SEQ ID NO: 1031677 - DNA, 25 bp, Homo sapien
acctgccaaagacccagaggatttc

SEQ ID NO: 1031678 - DNA, 25 bp, Homo sapien
gagacagctgagaaggacaaaggcc

SEQ ID NO: 1031679 - DNA, 25 bp, Homo sapien
gaacctttgaggtcatcggtccagt

SEQ ID NO: 1031680 - DNA, 25 bp, Homo sapien
tcaagctcagtaggaggaacaagct

SEQ ID NO: 1031681 - DNA, 25 bp, Homo sapien
caacttcaacaagggctctcaagct

SEQ ID NO: 1031682 - DNA, 25 bp, Homo sapien
gaggtggtagccatgctcattgaag

SEQ ID NO: 1031683 - DNA, 25 bp, Homo sapien
gaagaggtggtagccatgctcattg

SEQ ID NO: 1031684 - DNA, 25 bp, Homo sapien
ctggaagaggtggtagccatgctca

SEQ ID NO: 1031685 - DNA, 25 bp, Homo sapien
tggaagaggtggtagccatgctcat

SEQ ID NO: 1031686 - DNA, 25 bp, Homo sapien
tcagcgtggcatacacattggcaga

SEQ ID NO: 1031687 - DNA, 25 bp, Homo sapien
agctctatgtggtgttgccctggca

SEQ ID NO: 1031688 - DNA, 25 bp, Homo sapien
cagcagggccgtggagttgtttatc

SEQ ID NO: 1031689 - DNA, 25 bp, Homo sapien
tcatacagctggtaccccagggtga

SEQ ID NO: 1031690 - DNA, 25 bp, Homo sapien
aaagagggatactgccgcttcacgc

SEQ ID NO: 1031691 - DNA, 25 bp, Homo sapien
ccttgaaagcaatgcagatcccctg

SEQ ID NO: 1031692 - DNA, 25 bp, Homo sapien
tgccagtcaggttggtcagcaccac

SEQ ID NO: 1031693 - DNA, 25 bp, Homo sapien
cacagcccggtatgcgttgtaggca

SEQ ID NO: 1031694 - DNA, 25 bp, Homo sapien
accatgtggaggaaccgaggaccgt

SEQ ID NO: 1031695 - DNA, 25 bp, Homo sapien
ttatgtttagctgaactggagacca

SEQ ID NO: 1031696 - DNA, 25 bp, Homo sapien
accgtgaaggtccacttgggtccat

SEQ ID NO: 1031697 - DNA, 25 bp, Homo sapien
tgttgtcattaaacgccacagtgtc

SEQ ID NO: 1031698 - DNA, 25 bp, Homo sapien
agcagtgatggaaacccgtaaccac

SEQ ID NO: 1031699 - DNA, 25 bp, Homo sapien
gacagtcgctggaacacacagactt

SEQ ID NO: 1031700 - DNA, 25 bp, Homo sapien
aaccactcgctggtgcccttcaaga

SEQ ID NO: 1031701 - DNA, 25 bp, Homo sapien
gcccttcaagacagtcgctggaaca

SEQ ID NO: 1031702 - DNA, 25 bp, Homo sapien
aaacaccacagtgcgcgggaagcag

SEQ ID NO: 1031703 - DNA, 25 bp, Homo sapien
aggtctggcttccctcaggtgccca

SEQ ID NO: 1031704 - DNA, 25 bp, Homo sapien
gctcacgcaaagccaaaaacaccac

SEQ ID NO: 1031705 - DNA, 25 bp, Homo sapien
ccagcagcacccaagaggtgtgctc

SEQ ID NO: 1031706 - DNA, 25 bp, Homo sapien
ggagcccagcataagaaagcacagg

SEQ ID NO: 1031707 - DNA, 25 bp, Homo sapien
tgccagggagcccagcataagaaag

SEQ ID NO: 1031708 - DNA, 25 bp, Homo sapien
ccagcataagaaagcacaggcggcc

SEQ ID NO: 1031709 - DNA, 25 bp, Homo sapien
cagggagcccagcataagaaagcac

SEQ ID NO: 1031710 - DNA, 25 bp, Homo sapien
gctggtattccctagcaggcagtgg

SEQ ID NO: 1031711 - DNA, 25 bp, Homo sapien
tgtgcactcaagcatcaccagatgg

SEQ ID NO: 1031712 - DNA, 25 bp, Homo sapien
gggccgctgagctgatcatcacaaa

SEQ ID NO: 1031713 - DNA, 25 bp, Homo sapien
gaatgagcgaactgtcaggcaggac

SEQ ID NO: 1031714 - DNA, 25 bp, Homo sapien
caggacacgaagttgaagagcaggc

SEQ ID NO: 1031715 - DNA, 25 bp, Homo sapien
ctctggcaagtccttacccaggtag

SEQ ID NO: 1031716 - DNA, 25 bp, Homo sapien
gctgaaggtgacacatttggcctcg

SEQ ID NO: 1031717 - DNA, 25 bp, Homo sapien
tcatgttggccgcaggcaggtactt

SEQ ID NO: 1031718 - DNA, 25 bp, Homo sapien
gccgctgctcaggctgctcagccca

SEQ ID NO: 1031719 - DNA, 25 bp, Homo sapien
ctgctcaggctgctcagcccagcca

SEQ ID NO: 1031720 - DNA, 25 bp, Homo sapien
cgaagccgctgctcaggctgctcag

SEQ ID NO: 1031721 - DNA, 25 bp, Homo sapien
cgctgctcaggctgctcagcccagc

SEQ ID NO: 1031722 - DNA, 25 bp, Homo sapien
gatcacgtagcacttaggcagaaaa

SEQ ID NO: 1031723 - DNA, 25 bp, Homo sapien
cagaggatcacgtagcacttaggca

SEQ ID NO: 1031724 - DNA, 25 bp, Homo sapien
cgcctcgtgtagtcctgaatggagg

SEQ ID NO: 1031725 - DNA, 25 bp, Homo sapien
ggcggcagaggatcacgtagcactt

SEQ ID NO: 1031726 - DNA, 25 bp, Homo sapien
gcgatgcccaaagacctcccggaca

SEQ ID NO: 1031727 - DNA, 25 bp, Homo sapien
gaccttcgaccctcagggcagagaa

SEQ ID NO: 1031728 - DNA, 25 bp, Homo sapien
ttcacttctttattggcagcccgga

SEQ ID NO: 1031729 - DNA, 25 bp, Homo sapien
taggctctcccaggcgcttacacgt

SEQ ID NO: 1031730 - DNA, 25 bp, Homo sapien
ccctgttcttttggcgctgggcccg

SEQ ID NO: 1031731 - DNA, 25 bp, Homo sapien
ccccgcagagaacggccaatgggat

SEQ ID NO: 1031732 - DNA, 25 bp, Homo sapien
ccggacgtgacgtcaaagcgtgcag

SEQ ID NO: 1031733 - DNA, 25 bp, Homo sapien
gaagcgtagagcttctagctccggc

SEQ ID NO: 1031734 - DNA, 25 bp, Homo sapien
tggccccctgctccgtcgcctccac

SEQ ID NO: 1031735 - DNA, 25 bp, Homo sapien
ccccctgctccgtcgcctccacagc

SEQ ID NO: 1031736 - DNA, 25 bp, Homo sapien
ctgctccgtcgcctccacagcccac

SEQ ID NO: 1031737 - DNA, 25 bp, Homo sapien
actggccccctgctccgtcgcctcc

SEQ ID NO: 1031738 - DNA, 25 bp, Homo sapien
ctaagcgagggtatgcaagagaaag

SEQ ID NO: 1031739 - DNA, 25 bp, Homo sapien
taagcgagggtatgcaagagaaagc

SEQ ID NO: 1031740 - DNA, 25 bp, Homo sapien
aagcgagggtatgcaagagaaagct

SEQ ID NO: 1031741 - DNA, 25 bp, Homo sapien
agcgagggtatgcaagagaaagctc

SEQ ID NO: 1031742 - DNA, 25 bp, Homo sapien
ggaggcagaagtgacaccccggcca

SEQ ID NO: 1031743 - DNA, 25 bp, Homo sapien
agggaggcagaagtgacaccccggc

SEQ ID NO: 1031744 - DNA, 25 bp, Homo sapien
cagggaggcagaagtgacaccccgg

SEQ ID NO: 1031745 - DNA, 25 bp, Homo sapien
aggcagaagtgacaccccggccagc

SEQ ID NO: 1031746 - DNA, 25 bp, Homo sapien
cagtcctcgggtttcttgtcctcaa

SEQ ID NO: 1031747 - DNA, 25 bp, Homo sapien
ctgatcccggttccctgaggtgaga

SEQ ID NO: 1031748 - DNA, 25 bp, Homo sapien
acactgtgctggacgaaggagccgt

SEQ ID NO: 1031749 - DNA, 25 bp, Homo sapien
cactgaagttttgggcttgaagctc

SEQ ID NO: 1031750 - DNA, 25 bp, Homo sapien
ctctatttgtctccccagtcccaac

SEQ ID NO: 1031751 - DNA, 25 bp, Homo sapien
cctctatttgtctccccagtcccaa

SEQ ID NO: 1031752 - DNA, 25 bp, Homo sapien
tatttgtctccccagtcccaacacc

SEQ ID NO: 1031753 - DNA, 25 bp, Homo sapien
tctatttgtctccccagtcccaaca

SEQ ID NO: 1031754 - DNA, 25 bp, Homo sapien
ctagagcacaataggcagcaggagg

SEQ ID NO: 1031755 - DNA, 25 bp, Homo sapien
tcaggaaggtggcaaccgtgaacag

SEQ ID NO: 1031756 - DNA, 25 bp, Homo sapien
gggtggcgtcaccaaatgaatcagc

SEQ ID NO: 1031757 - DNA, 25 bp, Homo sapien
ggcagagcatctgaatcttggattc

SEQ ID NO: 1031758 - DNA, 25 bp, Homo sapien
tgacatgtggggcattcgaccggca

SEQ ID NO: 1031759 - DNA, 25 bp, Homo sapien
gaccggcaccgctgtaccttttctg

SEQ ID NO: 1031760 - DNA, 25 bp, Homo sapien
cagggctttcggattacatttgact

SEQ ID NO: 1031761 - DNA, 25 bp, Homo sapien
tcagacatgtaatcgccatccccat

SEQ ID NO: 1031762 - DNA, 25 bp, Homo sapien
gcccaaggggattctccacgatgat

SEQ ID NO: 1031763 - DNA, 25 bp, Homo sapien
actccaaagcagtgccgcccaaggg

SEQ ID NO: 1031764 - DNA, 25 bp, Homo sapien
ccaggagacacgtggttcctcacca

SEQ ID NO: 1031765 - DNA, 25 bp, Homo sapien
tttggctaacgtatctgaggaactg

SEQ ID NO: 1031766 - DNA, 25 bp, Homo sapien
gaaggacctttaagtcagacctcag

SEQ ID NO: 1031767 - DNA, 25 bp, Homo sapien
tgcagtggcaagaagctcacacagg

SEQ ID NO: 1031768 - DNA, 25 bp, Homo sapien
cagagcttcaaacccatggccagat

SEQ ID NO: 1031769 - DNA, 25 bp, Homo sapien
ggtttcagttcaggagccagaagga

SEQ ID NO: 1031770 - DNA, 25 bp, Homo sapien
ccatctctccctcacccagggcccc

SEQ ID NO: 1031771 - DNA, 25 bp, Homo sapien
gggggctgagagggtttcccatctc

SEQ ID NO: 1031772 - DNA, 25 bp, Homo sapien
ctccctcacccagggccccctctgg

SEQ ID NO: 1031773 - DNA, 25 bp, Homo sapien
gggctgagagggtttcccatctctc

SEQ ID NO: 1031774 - DNA, 25 bp, Homo sapien
tccgagcggttcatgcaattccggg

SEQ ID NO: 1031775 - DNA, 25 bp, Homo sapien
gcggttcatgcaattccgggcttca

SEQ ID NO: 1031776 - DNA, 25 bp, Homo sapien
ctgttccgagcggttcatgcaattc

SEQ ID NO: 1031777 - DNA, 25 bp, Homo sapien
ggttcatgcaattccgggcttcatg

SEQ ID NO: 1031778 - DNA, 25 bp, Homo sapien
gcatggacctcatgacatccaagga

SEQ ID NO: 1031779 - DNA, 25 bp, Homo sapien
gagtttacagtacccctctcagaca

SEQ ID NO: 1031780 - DNA, 25 bp, Homo sapien
gagagggcaacacataacctgcctg

SEQ ID NO: 1031781 - DNA, 25 bp, Homo sapien
ttcccggatggcacgaagacagaga

SEQ ID NO: 1031782 - DNA, 25 bp, Homo sapien
ctggcagtgtgaggggcaagcaggg

SEQ ID NO: 1031783 - DNA, 25 bp, Homo sapien
ggccggcatcagcgggggcctctgc

SEQ ID NO: 1031784 - DNA, 25 bp, Homo sapien
cagggccggcatcagcgggggcctc

SEQ ID NO: 1031785 - DNA, 25 bp, Homo sapien
ggggcaagcagggccggcatcagcg

SEQ ID NO: 1031786 - DNA, 25 bp, Homo sapien
ccttcggcggaatgtctcctggcac

SEQ ID NO: 1031787 - DNA, 25 bp, Homo sapien
cttcggcggaatgtctcctggcaca

SEQ ID NO: 1031788 - DNA, 25 bp, Homo sapien
catctcccctgtgtgagacaccatg

SEQ ID NO: 1031789 - DNA, 25 bp, Homo sapien
tgtgtgagacaccatgtgcacccgc

SEQ ID NO: 1031790 - DNA, 25 bp, Homo sapien
tgagacaccatgtgcacccgcagct

SEQ ID NO: 1031791 - DNA, 25 bp, Homo sapien
agggcatctcccctgtgtgagacac

SEQ ID NO: 1031792 - DNA, 25 bp, Homo sapien
aggacccctgatctggtgtgaagga

SEQ ID NO: 1031793 - DNA, 25 bp, Homo sapien
tgacagcaccccacgtaaagggctc

SEQ ID NO: 1031794 - DNA, 25 bp, Homo sapien
ggatgccaagcctgtcctccatgga

SEQ ID NO: 1031795 - DNA, 25 bp, Homo sapien
tgagatgattctgggaggacccctg

SEQ ID NO: 1031796 - DNA, 25 bp, Homo sapien
ccatgaagtttgatcatgtggctct

SEQ ID NO: 1031797 - DNA, 25 bp, Homo sapien
gctccatgaagtttgatcatgtggc

SEQ ID NO: 1031798 - DNA, 25 bp, Homo sapien
tccatgaagtttgatcatgtggctc

SEQ ID NO: 1031799 - DNA, 25 bp, Homo sapien
gggctccatgaagtttgatcatgtg

SEQ ID NO: 1031800 - DNA, 25 bp, Homo sapien
ggagggaccagggccagggtgagag

SEQ ID NO: 1031801 - DNA, 25 bp, Homo sapien
agggctgcctgggagacccacaagc

SEQ ID NO: 1031802 - DNA, 25 bp, Homo sapien
gagggagggaccagggccagggtga

SEQ ID NO: 1031803 - DNA, 25 bp, Homo sapien
ggctgcctgggagacccacaagcac

SEQ ID NO: 1031804 - DNA, 25 bp, Homo sapien
ccgagacaggaagcacttggcacag

SEQ ID NO: 1031805 - DNA, 25 bp, Homo sapien
gtccgagacaggaagcacttggcac

SEQ ID NO: 1031806 - DNA, 25 bp, Homo sapien
ctgtccgagacaggaagcacttggc

SEQ ID NO: 1031807 - DNA, 25 bp, Homo sapien
gagacaggaagcacttggcacaggt

SEQ ID NO: 1031808 - DNA, 25 bp, Homo sapien
cggtgcttgaaagcttcatgcagct

SEQ ID NO: 1031809 - DNA, 25 bp, Homo sapien
tctgcaggccattccggctcgaggc

SEQ ID NO: 1031810 - DNA, 25 bp, Homo sapien
gcatctgcaggccattccggctcga

SEQ ID NO: 1031811 - DNA, 25 bp, Homo sapien
aggccattccggctcgaggcccggt

SEQ ID NO: 1031812 - DNA, 25 bp, Homo sapien
gaactcacatacgtgtggcctctca

SEQ ID NO: 1031813 - DNA, 25 bp, Homo sapien
cagaactcacatacgtgtggcctct

SEQ ID NO: 1031814 - DNA, 25 bp, Homo sapien
tgcagaactcacatacgtgtggcct

SEQ ID NO: 1031815 - DNA, 25 bp, Homo sapien
ctcacatacgtgtggcctctcattc

SEQ ID NO: 1031816 - DNA, 25 bp, Homo sapien
gcacaaggcaagagctcagcctgtg

SEQ ID NO: 1031817 - DNA, 25 bp, Homo sapien
acaaggcaagagctcagcctgtggc

SEQ ID NO: 1031818 - DNA, 25 bp, Homo sapien
ctgcaggcacaaggcaagagctcag

SEQ ID NO: 1031819 - DNA, 25 bp, Homo sapien
gcctgtggccttggcctcaggatgg

SEQ ID NO: 1031820 - DNA, 25 bp, Homo sapien
ggccggccctcctgatggcggctgg

SEQ ID NO: 1031821 - DNA, 25 bp, Homo sapien
ctcagtgaagcgctgttcacagaac

SEQ ID NO: 1031822 - DNA, 25 bp, Homo sapien
tcacagaactcgcaactgaagggcc

SEQ ID NO: 1031823 - DNA, 25 bp, Homo sapien
aaggtcttgccgcatatctggcaga

SEQ ID NO: 1031824 - DNA, 25 bp, Homo sapien
tcagagaccctccaactcggatgag

SEQ ID NO: 1031825 - DNA, 25 bp, Homo sapien
caagaaaggagcgtttcctcctcag

SEQ ID NO: 1031826 - DNA, 25 bp, Homo sapien
cagggtcactactgcacaggacacc

SEQ ID NO: 1031827 - DNA, 25 bp, Homo sapien
gggcacaaaagaggttcacaggcaa

SEQ ID NO: 1031828 - DNA, 25 bp, Homo sapien
ccttgtgccgtctgacgtgcacacg

SEQ ID NO: 1031829 - DNA, 25 bp, Homo sapien
actcggtgcactcaaacttcctcac

SEQ ID NO: 1031830 - DNA, 25 bp, Homo sapien
gccgtctgacgtgcacacgcagttg

SEQ ID NO: 1031831 - DNA, 25 bp, Homo sapien
tgtcgggtaaacttgtagccacact

SEQ ID NO: 1031832 - DNA, 25 bp, Homo sapien
ctcagaactttgggggatcctaggg

SEQ ID NO: 1031833 - DNA, 25 bp, Homo sapien
gctcagaactttgggggatcctagg

SEQ ID NO: 1031834 - DNA, 25 bp, Homo sapien
tgcacacagtctctggccggggagc

SEQ ID NO: 1031835 - DNA, 25 bp, Homo sapien
tctcgtcctcgatgatcaggttgcg

SEQ ID NO: 1031836 - DNA, 25 bp, Homo sapien
gctgccgcgggttgtagttctctac

SEQ ID NO: 1031837 - DNA, 25 bp, Homo sapien
gggccggtgaagctctcctctgcac

SEQ ID NO: 1031838 - DNA, 25 bp, Homo sapien
agctgtgatgatgagggagggctcc

SEQ ID NO: 1031839 - DNA, 25 bp, Homo sapien
gacagcagctgtgatgatgagggag

SEQ ID NO: 1031840 - DNA, 25 bp, Homo sapien
ctcggggacagcagctgtgatgatg

SEQ ID NO: 1031841 - DNA, 25 bp, Homo sapien
gctgtgatgatgagggagggctcca

SEQ ID NO: 1031842 - DNA, 25 bp, Homo sapien
agccacacggtttattgaggggtgg

SEQ ID NO: 1031843 - DNA, 25 bp, Homo sapien
aagccacacggtttattgaggggtg

SEQ ID NO: 1031844 - DNA, 25 bp, Homo sapien
ccaggcttgtgtcggccactcagat

SEQ ID NO: 1031845 - DNA, 25 bp, Homo sapien
tatgtaataaaggacgccctccctc

SEQ ID NO: 1031846 - DNA, 25 bp, Homo sapien
ttggcagctgccgtactccaggctt

SEQ ID NO: 1031847 - DNA, 25 bp, Homo sapien
tacaaggttggctacgccctcaatc

SEQ ID NO: 1031848 - DNA, 25 bp, Homo sapien
cggtgaggcatctgttccccacaag

SEQ ID NO: 1031849 - DNA, 25 bp, Homo sapien
gacaaggttcccttgggcttgcacc

SEQ ID NO: 1031850 - DNA, 25 bp, Homo sapien
tccttaaggaatccagggacgggca

SEQ ID NO: 1031851 - DNA, 25 bp, Homo sapien
gaggtgcctccccacttggttggaa

SEQ ID NO: 1031852 - DNA, 25 bp, Homo sapien
gttttctgatttgggcctgtgctgc

SEQ ID NO: 1031853 - DNA, 25 bp, Homo sapien
tgggaatacagaaaaaccgtactca

SEQ ID NO: 1031854 - DNA, 25 bp, Homo sapien
attgatttaatcactggacttacgc

SEQ ID NO: 1031855 - DNA, 25 bp, Homo sapien
cttacgcaagatgggtaagctgacc

SEQ ID NO: 1031856 - DNA, 25 bp, Homo sapien
tactcaatcctcaactatggaaaca

SEQ ID NO: 1031857 - DNA, 25 bp, Homo sapien
tggaccgcagagtatccgacagctg

SEQ ID NO: 1031858 - DNA, 25 bp, Homo sapien
ccgacagctgtacgtgtggaaggct

SEQ ID NO: 1031859 - DNA, 25 bp, Homo sapien
gcagtgtgtaaacgctggaccgcag

SEQ ID NO: 1031860 - DNA, 25 bp, Homo sapien
gtttggcgctggcatcgactggtac

SEQ ID NO: 1031861 - DNA, 25 bp, Homo sapien
cccagttcggctcgtgtctcgggag

SEQ ID NO: 1031862 - DNA, 25 bp, Homo sapien
tctgtgaccccggactggcggttcc

SEQ ID NO: 1031863 - DNA, 25 bp, Homo sapien
gcgcgtcgcttctcaagctctgtga

SEQ ID NO: 1031864 - DNA, 25 bp, Homo sapien
cgaccggagtggacgatgcagctcc

SEQ ID NO: 1031865 - DNA, 25 bp, Homo sapien
ggcggcggcgcaagagtcagagtcc

SEQ ID NO: 1031866 - DNA, 25 bp, Homo sapien
gcggcggcgcaagagtcagagtcca

SEQ ID NO: 1031867 - DNA, 25 bp, Homo sapien
cggcggcgcaagagtcagagtccat

SEQ ID NO: 1031868 - DNA, 25 bp, Homo sapien
tattaagactttatgccaagaatgc

SEQ ID NO: 1031869 - DNA, 25 bp, Homo sapien
tatcaggcgaagctctaataactac

SEQ ID NO: 1031870 - DNA, 25 bp, Homo sapien
ttagtttccacaggcctatcaggcg

SEQ ID NO: 1031871 - DNA, 25 bp, Homo sapien
tcagagagcagaaagaggagtatta

SEQ ID NO: 1031872 - DNA, 25 bp, Homo sapien
gatgtagccagcataggccaagaca

SEQ ID NO: 1031873 - DNA, 25 bp, Homo sapien
ctccttcggataagggatgtagcca

SEQ ID NO: 1031874 - DNA, 25 bp, Homo sapien
gccaagacaaaggtgcagaatttgt

SEQ ID NO: 1031875 - DNA, 25 bp, Homo sapien
gaatttgttgaagtcttccacggtc

SEQ ID NO: 1031876 - DNA, 25 bp, Homo sapien
gatgtctgagaaacccgcgtcccag

SEQ ID NO: 1031877 - DNA, 25 bp, Homo sapien
gtggctaaagcagcggtcagagact

SEQ ID NO: 1031878 - DNA, 25 bp, Homo sapien
tcgctgtcaatggtaccagcagtgc

SEQ ID NO: 1031879 - DNA, 25 bp, Homo sapien
caagggcactgaggacgcgatgtct

SEQ ID NO: 1031880 - DNA, 25 bp, Homo sapien
tttcccaggcgcatcactgtccctg

SEQ ID NO: 1031881 - DNA, 25 bp, Homo sapien
ctttcccaggcgcatcactgtccct

SEQ ID NO: 1031882 - DNA, 25 bp, Homo sapien
aggcgcatcactgtccctgcgcttc

SEQ ID NO: 1031883 - DNA, 25 bp, Homo sapien
aggggtcagcggcttccagcttcag

SEQ ID NO: 1031884 - DNA, 25 bp, Homo sapien
gggtctccacgtaggggtcagcggc

SEQ ID NO: 1031885 - DNA, 25 bp, Homo sapien
tcagcggcttccagcttcagcaagc

SEQ ID NO: 1031886 - DNA, 25 bp, Homo sapien
gcaaggtgggactcgtgggggtctc

SEQ ID NO: 1031887 - DNA, 25 bp, Homo sapien
cagtggcacaagatccactcgaggg

SEQ ID NO: 1031888 - DNA, 25 bp, Homo sapien
acctgctttccctgccggacgatag

SEQ ID NO: 1031889 - DNA, 25 bp, Homo sapien
cactcgagggagtatcggagtccca

SEQ ID NO: 1031890 - DNA, 25 bp, Homo sapien
gacctgatcaggtgacacagtggca

SEQ ID NO: 1031891 - DNA, 25 bp, Homo sapien
cacacaccaccacactcgactattg

SEQ ID NO: 1031892 - DNA, 25 bp, Homo sapien
acaccaccacactcgactattgttt

SEQ ID NO: 1031893 - DNA, 25 bp, Homo sapien
agcctcaaactcctgcagtcaagcc

SEQ ID NO: 1031894 - DNA, 25 bp, Homo sapien
tcaaactcctgcagtcaagccatcc

SEQ ID NO: 1031895 - DNA, 25 bp, Homo sapien
gagtcccggcacttttggcagacaa

SEQ ID NO: 1031896 - DNA, 25 bp, Homo sapien
gaatccaggtgtggcactcattaca

SEQ ID NO: 1031897 - DNA, 25 bp, Homo sapien
tggatttccggattttcgcacagga

SEQ ID NO: 1031898 - DNA, 25 bp, Homo sapien
tcgcacaggacaggtgaatccaggt

SEQ ID NO: 1031899 - DNA, 25 bp, Homo sapien
gtccaggaacagcttccgggagccc

SEQ ID NO: 1031900 - DNA, 25 bp, Homo sapien
gagcccgtccgcgagcggttggaac

SEQ ID NO: 1031901 - DNA, 25 bp, Homo sapien
cagtccaggaacagcttccgggagc

SEQ ID NO: 1031902 - DNA, 25 bp, Homo sapien
caggaacagcttccgggagcccgtc

SEQ ID NO: 1031903 - DNA, 25 bp, Homo sapien
ggtcaccggctatgtacagtttcta

SEQ ID NO: 1031904 - DNA, 25 bp, Homo sapien
tggcactgagcccaatcagcgggaa

SEQ ID NO: 1031905 - DNA, 25 bp, Homo sapien
taaatggcagggatctgcccgcacc

SEQ ID NO: 1031906 - DNA, 25 bp, Homo sapien
tctggctggcaaaggtcgcattcgg

SEQ ID NO: 1031907 - DNA, 25 bp, Homo sapien
gaaactgagttatgaacacgggcca

SEQ ID NO: 1031908 - DNA, 25 bp, Homo sapien
gccaaagccaatgggagggcctact

SEQ ID NO: 1031909 - DNA, 25 bp, Homo sapien
tggacaggcgttatctcagggtaga

SEQ ID NO: 1031910 - DNA, 25 bp, Homo sapien
atttcagagaaagccggagcccctc

SEQ ID NO: 1031911 - DNA, 25 bp, Homo sapien
cagaacgcaatcgcctgaaccttga

SEQ ID NO: 1031912 - DNA, 25 bp, Homo sapien
agaacgcaatcgcctgaaccttgaa

SEQ ID NO: 1031913 - DNA, 25 bp, Homo sapien
cgcatagccactcacaggcttggac

SEQ ID NO: 1031914 - DNA, 25 bp, Homo sapien
gggctttgaattgtgaataggtctg

SEQ ID NO: 1031915 - DNA, 25 bp, Homo sapien
ccattcgccaatgctggtcgccttt

SEQ ID NO: 1031916 - DNA, 25 bp, Homo sapien
ttgctttgagcacccaaccaggacg

SEQ ID NO: 1031917 - DNA, 25 bp, Homo sapien
gctccgggccccaattcaggcccga

SEQ ID NO: 1031918 - DNA, 25 bp, Homo sapien
tgctccgggccccaattcaggcccg

SEQ ID NO: 1031919 - DNA, 25 bp, Homo sapien
gtgctccgggccccaattcaggccc

SEQ ID NO: 1031920 - DNA, 25 bp, Homo sapien
aggtggtgacgggcctggctcgcct

SEQ ID NO: 1031921 - DNA, 25 bp, Homo sapien
ctggctgcccccaacaaagatggcg

SEQ ID NO: 1031922 - DNA, 25 bp, Homo sapien
tgcccccaacaaagatggcggcggc

SEQ ID NO: 1031923 - DNA, 25 bp, Homo sapien
tggctgcccccaacaaagatggcgg

SEQ ID NO: 1031924 - DNA, 25 bp, Homo sapien
ggcctggctgcccccaacaaagatg

SEQ ID NO: 1031925 - DNA, 25 bp, Homo sapien
tgcggctgctgtagcggttgcagca

SEQ ID NO: 1031926 - DNA, 25 bp, Homo sapien
ctgctgtagcggttgcagcactgcc

SEQ ID NO: 1031927 - DNA, 25 bp, Homo sapien
cggctgctgtagcggttgcagcact

SEQ ID NO: 1031928 - DNA, 25 bp, Homo sapien
cctgcggctgctgtagcggttgcag

SEQ ID NO: 1031929 - DNA, 25 bp, Homo sapien
cgcccggcgcgccaaggcctcggag

SEQ ID NO: 1031930 - DNA, 25 bp, Homo sapien
caaggcctcggagtcggtccgcggg

SEQ ID NO: 1031931 - DNA, 25 bp, Homo sapien
cccgcccggcgcgccaaggcctcgg

SEQ ID NO: 1031932 - DNA, 25 bp, Homo sapien
gcccggcgcgccaaggcctcggagt

SEQ ID NO: 1031933 - DNA, 25 bp, Homo sapien
caggatagggttccctttgggcagg

SEQ ID NO: 1031934 - DNA, 25 bp, Homo sapien
tcttctcgggggtagtgatgtttta

SEQ ID NO: 1031935 - DNA, 25 bp, Homo sapien
cgaatgaactgcaatccactctgat

SEQ ID NO: 1031936 - DNA, 25 bp, Homo sapien
tccactctgatagcgggcaggatag

SEQ ID NO: 1031937 - DNA, 25 bp, Homo sapien
aggaaggagtttcatgttggagata

SEQ ID NO: 1031938 - DNA, 25 bp, Homo sapien
gaaagccatgcagtaaggtttgcct

SEQ ID NO: 1031939 - DNA, 25 bp, Homo sapien
gcctgtagatggtaaaattgagaag

SEQ ID NO: 1031940 - DNA, 25 bp, Homo sapien
ggaggctctagacagaggtgagatg

SEQ ID NO: 1031941 - DNA, 25 bp, Homo sapien
cgcctcagagtcattcggaattttc

SEQ ID NO: 1031942 - DNA, 25 bp, Homo sapien
attcggaattttcacatcactacag

SEQ ID NO: 1031943 - DNA, 25 bp, Homo sapien
ggcccagcaaggctggacccagcgc

SEQ ID NO: 1031944 - DNA, 25 bp, Homo sapien
gagtcattcggaattttcacatcac

SEQ ID NO: 1031945 - DNA, 25 bp, Homo sapien
ttgggcttgaagttgccccggccga

SEQ ID NO: 1031946 - DNA, 25 bp, Homo sapien
gtcctgaaaggcgaacaccgtgggc

SEQ ID NO: 1031947 - DNA, 25 bp, Homo sapien
gttcttgcggtttccaaaggcgctg

SEQ ID NO: 1031948 - DNA, 25 bp, Homo sapien
cgctgaagcactctggccggaagtg

SEQ ID NO: 1031949 - DNA, 25 bp, Homo sapien
cataaatccaccaatgcagggagct

SEQ ID NO: 1031950 - DNA, 25 bp, Homo sapien
tgggtgcccctgtggcctatcatgc

SEQ ID NO: 1031951 - DNA, 25 bp, Homo sapien
cctgtggcttgtcccgccactgccc

SEQ ID NO: 1031952 - DNA, 25 bp, Homo sapien
tgtggcctatcatgcgatctcaagg

SEQ ID NO: 1031953 - DNA, 25 bp, Homo sapien
ccaggcagcgtcctgggtgtggggc

SEQ ID NO: 1031954 - DNA, 25 bp, Homo sapien
tgccaggcagcgtcctgggtgtggg

SEQ ID NO: 1031955 - DNA, 25 bp, Homo sapien
caggcagcgtcctgggtgtggggcc

SEQ ID NO: 1031956 - DNA, 25 bp, Homo sapien
gccaggcagcgtcctgggtgtgggg

SEQ ID NO: 1031957 - DNA, 25 bp, Homo sapien
actggggtggggcccacaaagcaga

SEQ ID NO: 1031958 - DNA, 25 bp, Homo sapien
gctggcagaggccgtacccagcttc

SEQ ID NO: 1031959 - DNA, 25 bp, Homo sapien
gagctggcagaggccgtacccagct

SEQ ID NO: 1031960 - DNA, 25 bp, Homo sapien
tggcagaggccgtacccagcttctc

SEQ ID NO: 1031961 - DNA, 25 bp, Homo sapien
agctggcatttcctctctcactggc

SEQ ID NO: 1031962 - DNA, 25 bp, Homo sapien
actggcagggtctgtgttctccctc

SEQ ID NO: 1031963 - DNA, 25 bp, Homo sapien
ctctcactggcagggtctgtgttct

SEQ ID NO: 1031964 - DNA, 25 bp, Homo sapien
gagctggcatttcctctctcactgg

SEQ ID NO: 1031965 - DNA, 25 bp, Homo sapien
ctgttttacgtggccttcggcattt

SEQ ID NO: 1031966 - DNA, 25 bp, Homo sapien
gccttcggcatttgggggcaactga

SEQ ID NO: 1031967 - DNA, 25 bp, Homo sapien
gtgcagtgtccatgtttctcccagg

SEQ ID NO: 1031968 - DNA, 25 bp, Homo sapien
caactgaagctcttcaagtgcagtg

SEQ ID NO: 1031969 - DNA, 25 bp, Homo sapien
tgtgtccaaccacagaccacctttg

SEQ ID NO: 1031970 - DNA, 25 bp, Homo sapien
ccagatgtgcccacaccatggtgga

SEQ ID NO: 1031971 - DNA, 25 bp, Homo sapien
tctcatggtgggtgctcactggttt

SEQ ID NO: 1031972 - DNA, 25 bp, Homo sapien
tgagagcctagagctgcatcaccag

SEQ ID NO: 1031973 - DNA, 25 bp, Homo sapien
agcttggctactgtctcgatccccg

SEQ ID NO: 1031974 - DNA, 25 bp, Homo sapien
ggagtcactccttagaaccccgagc

SEQ ID NO: 1031975 - DNA, 25 bp, Homo sapien
cgatctttgctctgcgtgtgctgaa

SEQ ID NO: 1031976 - DNA, 25 bp, Homo sapien
gaaagacactttattacactgccca

SEQ ID NO: 1031977 - DNA, 25 bp, Homo sapien
aattagacaaaataggaagtcagtt

SEQ ID NO: 1031978 - DNA, 25 bp, Homo sapien
attagacaaaataggaagtcagttt

SEQ ID NO: 1031979 - DNA, 25 bp, Homo sapien
cagtgacaatactagagggcagtgg

SEQ ID NO: 1031980 - DNA, 25 bp, Homo sapien
agtgacaatactagagggcagtggt

SEQ ID NO: 1031981 - DNA, 25 bp, Homo sapien
tgagaaataaatagaccccaagtta

SEQ ID NO: 1031982 - DNA, 25 bp, Homo sapien
ctgagaaataaatagaccccaagtt

SEQ ID NO: 1031983 - DNA, 25 bp, Homo sapien
cttcacgtgaagctggggttccatt

SEQ ID NO: 1031984 - DNA, 25 bp, Homo sapien
acaaggcttcacgtgaagctggggt

SEQ ID NO: 1031985 - DNA, 25 bp, Homo sapien
ggcttcacgtgaagctggggttcca

SEQ ID NO: 1031986 - DNA, 25 bp, Homo sapien
tcacgtgaagctggggttccatttt

SEQ ID NO: 1031987 - DNA, 25 bp, Homo sapien
tctgagtaacggctaagaacctcct

SEQ ID NO: 1031988 - DNA, 25 bp, Homo sapien
tgcagtcgactgtacagaaggcact

SEQ ID NO: 1031989 - DNA, 25 bp, Homo sapien
taaagttacgtgaggcctgtctctc

SEQ ID NO: 1031990 - DNA, 25 bp, Homo sapien
tgcagtccacgctgaacatgggaaa

SEQ ID NO: 1031991 - DNA, 25 bp, Homo sapien
aggcagacgaaggagggttgcccga

SEQ ID NO: 1031992 - DNA, 25 bp, Homo sapien
gcagacgaaggagggttgcccgagc

SEQ ID NO: 1031993 - DNA, 25 bp, Homo sapien
gggaggcagacgaaggagggttgcc

SEQ ID NO: 1031994 - DNA, 25 bp, Homo sapien
cgaaggagggttgcccgagcccagg

SEQ ID NO: 1031995 - DNA, 25 bp, Homo sapien
ctgaaattcgagaggagtttgagcg

SEQ ID NO: 1031996 - DNA, 25 bp, Homo sapien
ttctgtgcataggttgtggaaagga

SEQ ID NO: 1031997 - DNA, 25 bp, Homo sapien
gagaacccctgctgaaattcgagag

SEQ ID NO: 1031998 - DNA, 25 bp, Homo sapien
cctgctgaaattcgagaggagtttg

SEQ ID NO: 1031999 - DNA, 25 bp, Homo sapien
aatgtaacagagagaaagtaatttt

SEQ ID NO: 1032000 - DNA, 25 bp, Homo sapien
ttttctcctacagggtttgagtcca

SEQ ID NO: 1032001 - DNA, 25 bp, Homo sapien
tttctcctacagggtttgagtccag

SEQ ID NO: 1032002 - DNA, 25 bp, Homo sapien
tgagtccaggattttaattctcagc

SEQ ID NO: 1032003 - DNA, 25 bp, Homo sapien
gtgctccagcctgggcaacagagcg

SEQ ID NO: 1032004 - DNA, 25 bp, Homo sapien
agcagagatcgcaccactgtgctcc

SEQ ID NO: 1032005 - DNA, 25 bp, Homo sapien
tgaagcaggagaatctctgctggga

SEQ ID NO: 1032006 - DNA, 25 bp, Homo sapien
ggtggaggttgccgtgagcagagat

SEQ ID NO: 1032007 - DNA, 25 bp, Homo sapien
ggaggccactatgtagggctttgca

SEQ ID NO: 1032008 - DNA, 25 bp, Homo sapien
taacaatgggatagagggaggccac

SEQ ID NO: 1032009 - DNA, 25 bp, Homo sapien
tggaagttctatgcttcaacgctag

SEQ ID NO: 1032010 - DNA, 25 bp, Homo sapien
gaatggaggcaccagtacttcttag

SEQ ID NO: 1032011 - DNA, 25 bp, Homo sapien
tgcttccagtagcgtgctggggcct

SEQ ID NO: 1032012 - DNA, 25 bp, Homo sapien
cctgcttccagtagcgtgctggggc

SEQ ID NO: 1032013 - DNA, 25 bp, Homo sapien
catcctgcttccagtagcgtgctgg

SEQ ID NO: 1032014 - DNA, 25 bp, Homo sapien
gcatcctgcttccagtagcgtgctg

SEQ ID NO: 1032015 - DNA, 25 bp, Homo sapien
gtcgctccacgcttcatgagtcagg

SEQ ID NO: 1032016 - DNA, 25 bp, Homo sapien
aaagtccccggtgacatgttcagaa

SEQ ID NO: 1032017 - DNA, 25 bp, Homo sapien
tatggatacacattccaaagtcccc

SEQ ID NO: 1032018 - DNA, 25 bp, Homo sapien
aacggaactccatgacaggcaaaaa

SEQ ID NO: 1032019 - DNA, 25 bp, Homo sapien
gacagagccgcgattaattgagacg

SEQ ID NO: 1032020 - DNA, 25 bp, Homo sapien
tgccagggcagaagtccagctatgt

SEQ ID NO: 1032021 - DNA, 25 bp, Homo sapien
gaggtcttcggcttcagcaaacgga

SEQ ID NO: 1032022 - DNA, 25 bp, Homo sapien
gagctttcgggtcatggcagagaca

SEQ ID NO: 1032023 - DNA, 25 bp, Homo sapien
gaagaggttagagcgctcacacatc

SEQ ID NO: 1032024 - DNA, 25 bp, Homo sapien
gatgaagaggttagagcgctcacac

SEQ ID NO: 1032025 - DNA, 25 bp, Homo sapien
acagatgaagaggttagagcgctca

SEQ ID NO: 1032026 - DNA, 25 bp, Homo sapien
cttagagaagcattgcaaggggact

SEQ ID NO: 1032027 - DNA, 25 bp, Homo sapien
gccatgtcattagccaccagaagct

SEQ ID NO: 1032028 - DNA, 25 bp, Homo sapien
gctcagcgggatttatgggatctcc

SEQ ID NO: 1032029 - DNA, 25 bp, Homo sapien
ggagatagtcgcgttcaaagcatca

SEQ ID NO: 1032030 - DNA, 25 bp, Homo sapien
gatgacaagtgtctccacagcagac

SEQ ID NO: 1032031 - DNA, 25 bp, Homo sapien
ctgaatctgggtggtctccggaagt

SEQ ID NO: 1032032 - DNA, 25 bp, Homo sapien
cagcactaggagaatccgagctctt

SEQ ID NO: 1032033 - DNA, 25 bp, Homo sapien
tgaatctgggtggtctccggaagta

SEQ ID NO: 1032034 - DNA, 25 bp, Homo sapien
ccctgccaagaggcaaaacagtgct

SEQ ID NO: 1032035 - DNA, 25 bp, Homo sapien
ttggctccgtctcccccttggcaac

SEQ ID NO: 1032036 - DNA, 25 bp, Homo sapien
gctccgtctcccccttggcaactga

SEQ ID NO: 1032037 - DNA, 25 bp, Homo sapien
gttggctccgtctcccccttggcaa

SEQ ID NO: 1032038 - DNA, 25 bp, Homo sapien
ctgttggctccgtctcccccttggc

SEQ ID NO: 1032039 - DNA, 25 bp, Homo sapien
gggacgcgccgggatctccgggatc

SEQ ID NO: 1032040 - DNA, 25 bp, Homo sapien
tcattggcacgctggggcttttccc

SEQ ID NO: 1032041 - DNA, 25 bp, Homo sapien
ggctgaggtccgcaggggtgccgcg

SEQ ID NO: 1032042 - DNA, 25 bp, Homo sapien
cggggaagccgctgctggcgcgtgg

SEQ ID NO: 1032043 - DNA, 25 bp, Homo sapien
actcatcgctcccgccgccaatcgc

SEQ ID NO: 1032044 - DNA, 25 bp, Homo sapien
caatcgccccgcaccaggggtctca

SEQ ID NO: 1032045 - DNA, 25 bp, Homo sapien
cccgcaccaggggtctcactactct

SEQ ID NO: 1032046 - DNA, 25 bp, Homo sapien
caccaggggtctcactactctccgg

SEQ ID NO: 1032047 - DNA, 25 bp, Homo sapien
ccacgcacagctcccgttgggccgt

SEQ ID NO: 1032048 - DNA, 25 bp, Homo sapien
gcacagctcccgttgggccgtgcgg

SEQ ID NO: 1032049 - DNA, 25 bp, Homo sapien
cgcacagctcccgttgggccgtgcg

SEQ ID NO: 1032050 - DNA, 25 bp, Homo sapien
acgcacagctcccgttgggccgtgc

SEQ ID NO: 1032051 - DNA, 25 bp, Homo sapien
gcttgttttcggcagccatttcccc

SEQ ID NO: 1032052 - DNA, 25 bp, Homo sapien
cttccggcttgttttcggcagccat

SEQ ID NO: 1032053 - DNA, 25 bp, Homo sapien
ttgttttcggcagccatttcccctc

SEQ ID NO: 1032054 - DNA, 25 bp, Homo sapien
ccgagcgcgcgcctcgtaccgccgc

SEQ ID NO: 1032055 - DNA, 25 bp, Homo sapien
tattatcactcccaaatgatttgat

SEQ ID NO: 1032056 - DNA, 25 bp, Homo sapien
caagtgcccagaaaaccaacagggc

SEQ ID NO: 1032057 - DNA, 25 bp, Homo sapien
tcccaaatgatttgatatccaagtg

SEQ ID NO: 1032058 - DNA, 25 bp, Homo sapien
ccaacagggcacatatatcctcaga

SEQ ID NO: 1032059 - DNA, 25 bp, Homo sapien
cagtatattgctgcaactgttctgt

SEQ ID NO: 1032060 - DNA, 25 bp, Homo sapien
tacaagcggtcaactaaggtccaaa

SEQ ID NO: 1032061 - DNA, 25 bp, Homo sapien
gaaattccatatctccgacttcatt

SEQ ID NO: 1032062 - DNA, 25 bp, Homo sapien
ccgacttcatttccttacacaatag

SEQ ID NO: 1032063 - DNA, 25 bp, Homo sapien
tatggcatcttgattaatgtccgtc

SEQ ID NO: 1032064 - DNA, 25 bp, Homo sapien
catcttgattaatgtccgtctcccc

SEQ ID NO: 1032065 - DNA, 25 bp, Homo sapien
ttcatatggcatcttgattaatgtc

SEQ ID NO: 1032066 - DNA, 25 bp, Homo sapien
ccgtctcccccttagctccataagg

SEQ ID NO: 1032067 - DNA, 25 bp, Homo sapien
aaacaatcaaccaaaagcctagatt

SEQ ID NO: 1032068 - DNA, 25 bp, Homo sapien
aatcaaccaaaagcctagatttctg

SEQ ID NO: 1032069 - DNA, 25 bp, Homo sapien
acaatcaaccaaaagcctagatttc

SEQ ID NO: 1032070 - DNA, 25 bp, Homo sapien
caatcaaccaaaagcctagatttct

SEQ ID NO: 1032071 - DNA, 25 bp, Homo sapien
cagtaggtgctagttccgcagaata

SEQ ID NO: 1032072 - DNA, 25 bp, Homo sapien
cacagtaggtgctagttccgcagaa

SEQ ID NO: 1032073 - DNA, 25 bp, Homo sapien
taggtgctagttccgcagaatacac

SEQ ID NO: 1032074 - DNA, 25 bp, Homo sapien
gtgctagttccgcagaatacacttt

SEQ ID NO: 1032075 - DNA, 25 bp, Homo sapien
tcaagcagctttttcggtaaaaaga

SEQ ID NO: 1032076 - DNA, 25 bp, Homo sapien
agtgttccagcggtgcctctctttt

SEQ ID NO: 1032077 - DNA, 25 bp, Homo sapien
ggtgcctctcttttggtaaacttga

SEQ ID NO: 1032078 - DNA, 25 bp, Homo sapien
aacttgaacatttcggcagacattc

SEQ ID NO: 1032079 - DNA, 25 bp, Homo sapien
ggcaggagaacagcgtgaacttggg

SEQ ID NO: 1032080 - DNA, 25 bp, Homo sapien
gaggtggagcttgcagtgagccgag

SEQ ID NO: 1032081 - DNA, 25 bp, Homo sapien
gagaacagcgtgaacttgggaggtg

SEQ ID NO: 1032082 - DNA, 25 bp, Homo sapien
aggagaacagcgtgaacttgggagg

SEQ ID NO: 1032083 - DNA, 25 bp, Homo sapien
tcttgatcacttttctggatctttc

SEQ ID NO: 1032084 - DNA, 25 bp, Homo sapien
ctcttgatcacttttctggatcttt

SEQ ID NO: 1032085 - DNA, 25 bp, Homo sapien
cttgatcacttttctggatctttcc

SEQ ID NO: 1032086 - DNA, 25 bp, Homo sapien
tataaacggagatgccagagggttc

SEQ ID NO: 1032087 - DNA, 25 bp, Homo sapien
tttgtggtcccgttctagcagctgc

SEQ ID NO: 1032088 - DNA, 25 bp, Homo sapien
tactatggtacaactacagccccag

SEQ ID NO: 1032089 - DNA, 25 bp, Homo sapien
caccattacttcctgagggccgagg

SEQ ID NO: 1032090 - DNA, 25 bp, Homo sapien
gatccctgtcgatccacttccatag

SEQ ID NO: 1032091 - DNA, 25 bp, Homo sapien
tctgagtgccaaacattgtaaataa

SEQ ID NO: 1032092 - DNA, 25 bp, Homo sapien
ttcagtaacattgtcttaaatcctc

SEQ ID NO: 1032093 - DNA, 25 bp, Homo sapien
ataacttcactatctggatccctgt

SEQ ID NO: 1032094 - DNA, 25 bp, Homo sapien
cctaggctggagtactttggtggga

SEQ ID NO: 1032095 - DNA, 25 bp, Homo sapien
tcactgcaatatctgccttctgggt

SEQ ID NO: 1032096 - DNA, 25 bp, Homo sapien
ctcccggcctcaactgatctgccca

SEQ ID NO: 1032097 - DNA, 25 bp, Homo sapien
tggagtactttggtgggatcttggc

SEQ ID NO: 1032098 - DNA, 25 bp, Homo sapien
ggtcttcacttttccacgcatctta

SEQ ID NO: 1032099 - DNA, 25 bp, Homo sapien
taaagctgccatgcaggatcatttc

SEQ ID NO: 1032100 - DNA, 25 bp, Homo sapien
tctattattccctttagtgcaggtc

SEQ ID NO: 1032101 - DNA, 25 bp, Homo sapien
tctcttctgccaaagaccaatcttt

SEQ ID NO: 1032102 - DNA, 25 bp, Homo sapien
tagcagggtacctccagtgagacac

SEQ ID NO: 1032103 - DNA, 25 bp, Homo sapien
aagttccactagtatgacatgccag

SEQ ID NO: 1032104 - DNA, 25 bp, Homo sapien
gaagagcttttgtgtggcgccctag

SEQ ID NO: 1032105 - DNA, 25 bp, Homo sapien
tgttaattgtatggcgtccagctcc

SEQ ID NO: 1032106 - DNA, 25 bp, Homo sapien
tgaaagttgctcacatctatcctac

SEQ ID NO: 1032107 - DNA, 25 bp, Homo sapien
cagtagtctgtagcaactatctcca

SEQ ID NO: 1032108 - DNA, 25 bp, Homo sapien
tgttgagttaacgaatgccttctct

SEQ ID NO: 1032109 - DNA, 25 bp, Homo sapien
caaaacacatgtccttgtcctacag

SEQ ID NO: 1032110 - DNA, 25 bp, Homo sapien
gggcttgacacgaggaatatctaca

SEQ ID NO: 1032111 - DNA, 25 bp, Homo sapien
tcggtccgagtgttagtgccctaaa

SEQ ID NO: 1032112 - DNA, 25 bp, Homo sapien
caagaagcgagtagtgtaacacgag

SEQ ID NO: 1032113 - DNA, 25 bp, Homo sapien
gttttgaaacatgaagctaccaccc

SEQ ID NO: 1032114 - DNA, 25 bp, Homo sapien
gaaatccaaaaggacggctgcatca

SEQ ID NO: 1032115 - DNA, 25 bp, Homo sapien
caaaaggacggctgcatcatgatct

SEQ ID NO: 1032116 - DNA, 25 bp, Homo sapien
ggatcaaaggtgaagggtcacacat

SEQ ID NO: 1032117 - DNA, 25 bp, Homo sapien
aggtaatgcaggtcaggggatcaaa

SEQ ID NO: 1032118 - DNA, 25 bp, Homo sapien
caaatttatcactcaaaggggtatc

SEQ ID NO: 1032119 - DNA, 25 bp, Homo sapien
ggtatctctatttgaggaaatcagc

SEQ ID NO: 1032120 - DNA, 25 bp, Homo sapien
gaaatgttacagcttgtacaccaaa

SEQ ID NO: 1032121 - DNA, 25 bp, Homo sapien
cagcgtgttacactttgaaagatga

SEQ ID NO: 1032122 - DNA, 25 bp, Homo sapien
taaaaggatgaaaacacagattaca

SEQ ID NO: 1032123 - DNA, 25 bp, Homo sapien
tttaaaaggatgaaaacacagatta

SEQ ID NO: 1032124 - DNA, 25 bp, Homo sapien
aaaaggatgaaaacacagattacac

SEQ ID NO: 1032125 - DNA, 25 bp, Homo sapien
ttaaaaggatgaaaacacagattac

SEQ ID NO: 1032126 - DNA, 25 bp, Homo sapien
cagtcatgaaattgcatatggcaga

SEQ ID NO: 1032127 - DNA, 25 bp, Homo sapien
taaggagtatcttgccagttcaaag

SEQ ID NO: 1032128 - DNA, 25 bp, Homo sapien
tgtggcagctaagactaataaattc

SEQ ID NO: 1032129 - DNA, 25 bp, Homo sapien
tctgaagatgtataatgtggcagct

SEQ ID NO: 1032130 - DNA, 25 bp, Homo sapien
tgtgcaattaaaacatcagcattaa

SEQ ID NO: 1032131 - DNA, 25 bp, Homo sapien
tccatttcagtactcatttagcagc

SEQ ID NO: 1032132 - DNA, 25 bp, Homo sapien
caaagaggacttaaatccatttcag

SEQ ID NO: 1032133 - DNA, 25 bp, Homo sapien
tactcatttagcagcttcagctgtg

SEQ ID NO: 1032134 - DNA, 25 bp, Homo sapien
aaaaagttgctcctgactactggga

SEQ ID NO: 1032135 - DNA, 25 bp, Homo sapien
tttcaggcatccaagtatactaggc

SEQ ID NO: 1032136 - DNA, 25 bp, Homo sapien
aatggaggcaacaagcagtcatggc

SEQ ID NO: 1032137 - DNA, 25 bp, Homo sapien
tggtaaacatgccagcacaactgtg

SEQ ID NO: 1032138 - DNA, 25 bp, Homo sapien
cccaggggagccgattccaacagca

SEQ ID NO: 1032139 - DNA, 25 bp, Homo sapien
caggggagccgattccaacagcagg

SEQ ID NO: 1032140 - DNA, 25 bp, Homo sapien
ccaggggagccgattccaacagcag

SEQ ID NO: 1032141 - DNA, 25 bp, Homo sapien
ccccaggggagccgattccaacagc

SEQ ID NO: 1032142 - DNA, 25 bp, Homo sapien
gtgtgactacctcaacagataccag

SEQ ID NO: 1032143 - DNA, 25 bp, Homo sapien
tgccaacggcacagccataggatga

SEQ ID NO: 1032144 - DNA, 25 bp, Homo sapien
gctagtccaaagcaggttacctgac

SEQ ID NO: 1032145 - DNA, 25 bp, Homo sapien
tcagcacaccggttatgcctgccaa

SEQ ID NO: 1032146 - DNA, 25 bp, Homo sapien
gactttgtggacatgtgctcagcta

SEQ ID NO: 1032147 - DNA, 25 bp, Homo sapien
ctttgtggacatgtgctcagctaaa

SEQ ID NO: 1032148 - DNA, 25 bp, Homo sapien
gatcagccacactacatggcaggca

SEQ ID NO: 1032149 - DNA, 25 bp, Homo sapien
cagccacactacatggcaggcactg

SEQ ID NO: 1032150 - DNA, 25 bp, Homo sapien
tcgcagcagctatgcggtcacattg

SEQ ID NO: 1032151 - DNA, 25 bp, Homo sapien
tctagaggcaggcagttaatcgcag

SEQ ID NO: 1032152 - DNA, 25 bp, Homo sapien
cagttaatcgcagcagctatgcggt

SEQ ID NO: 1032153 - DNA, 25 bp, Homo sapien
caggcagttaatcgcagcagctatg

SEQ ID NO: 1032154 - DNA, 25 bp, Homo sapien
ttctgaggagcatcacacagcgtga

SEQ ID NO: 1032155 - DNA, 25 bp, Homo sapien
tcctgatcgtgcagcaatagcgttg

SEQ ID NO: 1032156 - DNA, 25 bp, Homo sapien
aatagcgttgccgacttttccttca

SEQ ID NO: 1032157 - DNA, 25 bp, Homo sapien
cacagcgtgatggtaaccacggcca

SEQ ID NO: 1032158 - DNA, 25 bp, Homo sapien
gataagaaccatctgcctggtctgg

SEQ ID NO: 1032159 - DNA, 25 bp, Homo sapien
tttgcaagatcgaaaagccacggct

SEQ ID NO: 1032160 - DNA, 25 bp, Homo sapien
tactgctataccgtggcaatgcctg

SEQ ID NO: 1032161 - DNA, 25 bp, Homo sapien
tcttgtgatctacgagctgggctgt

SEQ ID NO: 1032162 - DNA, 25 bp, Homo sapien
cattaaggtcactgtgacatggctg

SEQ ID NO: 1032163 - DNA, 25 bp, Homo sapien
tatgagagaagtcgtcttctgtcac

SEQ ID NO: 1032164 - DNA, 25 bp, Homo sapien
aacggaactagaacaaatcgctggg

SEQ ID NO: 1032165 - DNA, 25 bp, Homo sapien
tcctggaaaagtgctaagatatgag

SEQ ID NO: 1032166 - DNA, 25 bp, Homo sapien
tccatccacccataaccacgtgcag

SEQ ID NO: 1032167 - DNA, 25 bp, Homo sapien
cttgaaggtatgttaccccactgtc

SEQ ID NO: 1032168 - DNA, 25 bp, Homo sapien
tgaaggtatgttaccccactgtcac

SEQ ID NO: 1032169 - DNA, 25 bp, Homo sapien
ggcttgaaggtatgttaccccactg

SEQ ID NO: 1032170 - DNA, 25 bp, Homo sapien
ttaacataaaatacgagttcctctg

SEQ ID NO: 1032171 - DNA, 25 bp, Homo sapien
cagcttctgacttgttttccattgc

SEQ ID NO: 1032172 - DNA, 25 bp, Homo sapien
ataaaatacgagttcctctggaatc

SEQ ID NO: 1032173 - DNA, 25 bp, Homo sapien
gcagcttctgacttgttttccattg

SEQ ID NO: 1032174 - DNA, 25 bp, Homo sapien
gaaaagagcatgctgcgagaagagc

SEQ ID NO: 1032175 - DNA, 25 bp, Homo sapien
tgtgagtaaaacatcgccttcaggc

SEQ ID NO: 1032176 - DNA, 25 bp, Homo sapien
gtgcccaatgcgcagaggccagtga

SEQ ID NO: 1032177 - DNA, 25 bp, Homo sapien
gagctgtgggcttcttacaaggaaa

SEQ ID NO: 1032178 - DNA, 25 bp, Homo sapien
gtggagggttctgtctcatttgctt

SEQ ID NO: 1032179 - DNA, 25 bp, Homo sapien
tggagggttctgtctcatttgcttc

SEQ ID NO: 1032180 - DNA, 25 bp, Homo sapien
ggagggttctgtctcatttgcttcc

SEQ ID NO: 1032181 - DNA, 25 bp, Homo sapien
tcctgggccagtttcatagattaga

SEQ ID NO: 1032182 - DNA, 25 bp, Homo sapien
gaagctgaaggcaagccccagatct

SEQ ID NO: 1032183 - DNA, 25 bp, Homo sapien
caaaactgggtctcatacaatggtc

SEQ ID NO: 1032184 - DNA, 25 bp, Homo sapien
tagagactctctgcttaagcacagg

SEQ ID NO: 1032185 - DNA, 25 bp, Homo sapien
ggagacatctgggtaaaggcaaact

SEQ ID NO: 1032186 - DNA, 25 bp, Homo sapien
tacgtatacagatgaacaggtatgt

SEQ ID NO: 1032187 - DNA, 25 bp, Homo sapien
aatgggtcaaaaccgtcgcttctat

SEQ ID NO: 1032188 - DNA, 25 bp, Homo sapien
agatgaacaggtatgtatctacccc

SEQ ID NO: 1032189 - DNA, 25 bp, Homo sapien
gaactgtcttaaagccagacatggg

SEQ ID NO: 1032190 - DNA, 25 bp, Homo sapien
aagctctccctacgaattctgccag

SEQ ID NO: 1032191 - DNA, 25 bp, Homo sapien
tttcattccaatgtgtcagccctca

SEQ ID NO: 1032192 - DNA, 25 bp, Homo sapien
tgctgcgcccatgaacaagtgtgtg

SEQ ID NO: 1032193 - DNA, 25 bp, Homo sapien
ggagctccttcgtaataactccgga

SEQ ID NO: 1032194 - DNA, 25 bp, Homo sapien
ttcgtaataactccggatgaggcaa

SEQ ID NO: 1032195 - DNA, 25 bp, Homo sapien
accaggaggcgtgtgcacagagccc

SEQ ID NO: 1032196 - DNA, 25 bp, Homo sapien
aggctgcggagctccttcgtaataa

SEQ ID NO: 1032197 - DNA, 25 bp, Homo sapien
gtcctatgcactgaagatacaaggg

SEQ ID NO: 1032198 - DNA, 25 bp, Homo sapien
ggtggtaactgactggaaaacatac

SEQ ID NO: 1032199 - DNA, 25 bp, Homo sapien
ctgatgagacaggtggtaactgact

SEQ ID NO: 1032200 - DNA, 25 bp, Homo sapien
gcgtttatttagactctgcactgtg

SEQ ID NO: 1032201 - DNA, 25 bp, Homo sapien
aaaagttatggactggtggctagcc

SEQ ID NO: 1032202 - DNA, 25 bp, Homo sapien
tcaccaggagtaccgaccaggtagg

SEQ ID NO: 1032203 - DNA, 25 bp, Homo sapien
taattaatctctgtgggaaagacac

SEQ ID NO: 1032204 - DNA, 25 bp, Homo sapien
caagacgtttgtgggcagaaaatca

SEQ ID NO: 1032205 - DNA, 25 bp, Homo sapien
cctacattaatgtgagggaggcaga

SEQ ID NO: 1032206 - DNA, 25 bp, Homo sapien
aataggtcggtgtgtttgtgcccag

SEQ ID NO: 1032207 - DNA, 25 bp, Homo sapien
cactgatggaaatcctgtgctccag

SEQ ID NO: 1032208 - DNA, 25 bp, Homo sapien
ccagtgtcccaaaagcagtacgaga

SEQ ID NO: 1032209 - DNA, 25 bp, Homo sapien
aaggcatgcctttgaatcgcacaga

SEQ ID NO: 1032210 - DNA, 25 bp, Homo sapien
taattaagcctgaggcccgtaagag

SEQ ID NO: 1032211 - DNA, 25 bp, Homo sapien
aaagcttcctgacaagcccacagag

SEQ ID NO: 1032212 - DNA, 25 bp, Homo sapien
cagcagtgattctttcaggcagtac

SEQ ID NO: 1032213 - DNA, 25 bp, Homo sapien
actgataaacaagttcaccaaggtt

SEQ ID NO: 1032214 - DNA, 25 bp, Homo sapien
aacttatactctgaaaactatatat

SEQ ID NO: 1032215 - DNA, 25 bp, Homo sapien
gctctgattcgtgggttttgtcttg

SEQ ID NO: 1032216 - DNA, 25 bp, Homo sapien
atccaaggcgctctgattcgtgggt

SEQ ID NO: 1032217 - DNA, 25 bp, Homo sapien
gaagtttgtcatttagcataagaag

SEQ ID NO: 1032218 - DNA, 25 bp, Homo sapien
gtgggttttgtcttgaagtttgtca

SEQ ID NO: 1032219 - DNA, 25 bp, Homo sapien
gaagccatggggtatgtccactcct

SEQ ID NO: 1032220 - DNA, 25 bp, Homo sapien
tgggttttgttcacgaaagaccaca

SEQ ID NO: 1032221 - DNA, 25 bp, Homo sapien
tgttcacgaaagaccacaccctgtc

SEQ ID NO: 1032222 - DNA, 25 bp, Homo sapien
gtccactcctgggttttgttcacga

SEQ ID NO: 1032223 - DNA, 25 bp, Homo sapien
gggatgcgctccagaaatctgttgt

SEQ ID NO: 1032224 - DNA, 25 bp, Homo sapien
attttctgggtgacggacttcagta

SEQ ID NO: 1032225 - DNA, 25 bp, Homo sapien
acttcagtaataggcctggagctgg

SEQ ID NO: 1032226 - DNA, 25 bp, Homo sapien
ggaaattcatcagagaacctgtccg

SEQ ID NO: 1032227 - DNA, 25 bp, Homo sapien
tcatagaactaactgatgtcatggg

SEQ ID NO: 1032228 - DNA, 25 bp, Homo sapien
ggaaacttaactgcatcgcagccca

SEQ ID NO: 1032229 - DNA, 25 bp, Homo sapien
gagttggtttccacggcttacaaca

SEQ ID NO: 1032230 - DNA, 25 bp, Homo sapien
tgtaaaacaggctcatcatagaact

SEQ ID NO: 1032231 - DNA, 25 bp, Homo sapien
tgcctccaggcactgactgtttcgt

SEQ ID NO: 1032232 - DNA, 25 bp, Homo sapien
catgatcagattgatcttcctggaa

SEQ ID NO: 1032233 - DNA, 25 bp, Homo sapien
tggaaccccaactcaattaggtcaa

SEQ ID NO: 1032234 - DNA, 25 bp, Homo sapien
aaagtctgactccaacagctttgct

SEQ ID NO: 1032235 - DNA, 25 bp, Homo sapien
tcccgagagcctggctttcacgtgg

SEQ ID NO: 1032236 - DNA, 25 bp, Homo sapien
acagatgctctactgctcccgagag

SEQ ID NO: 1032237 - DNA, 25 bp, Homo sapien
tctctgaaaggtagattccataaag

SEQ ID NO: 1032238 - DNA, 25 bp, Homo sapien
acgtggatctgctctctctgaaagg

SEQ ID NO: 1032239 - DNA, 25 bp, Homo sapien
cagtctatcacagtggaacctggca

SEQ ID NO: 1032240 - DNA, 25 bp, Homo sapien
agggcccagacaacgcagacagtct

SEQ ID NO: 1032241 - DNA, 25 bp, Homo sapien
catcctgtccctagagcgaggacca

SEQ ID NO: 1032242 - DNA, 25 bp, Homo sapien
gggtggcccctgaacactcgattct

SEQ ID NO: 1032243 - DNA, 25 bp, Homo sapien
ctgatatgccctgtatggttctcta

SEQ ID NO: 1032244 - DNA, 25 bp, Homo sapien
tgtatggttctctaagaacctcctc

SEQ ID NO: 1032245 - DNA, 25 bp, Homo sapien
tatgccctgtatggttctctaagaa

SEQ ID NO: 1032246 - DNA, 25 bp, Homo sapien
tggttctctaagaacctcctctgag

SEQ ID NO: 1032247 - DNA, 25 bp, Homo sapien
gaagacatctgaccagaccctgaag

SEQ ID NO: 1032248 - DNA, 25 bp, Homo sapien
cggaagacatctgaccagaccctga

SEQ ID NO: 1032249 - DNA, 25 bp, Homo sapien
accagaccctgaagacacacaggac

SEQ ID NO: 1032250 - DNA, 25 bp, Homo sapien
ctgaccagaccctgaagacacacag

SEQ ID NO: 1032251 - DNA, 25 bp, Homo sapien
gccactgaaaggaaccaactgttga

SEQ ID NO: 1032252 - DNA, 25 bp, Homo sapien
ttgacacatacaccaactcagacgg

SEQ ID NO: 1032253 - DNA, 25 bp, Homo sapien
tgtggataagacaggacgcgtaccc

SEQ ID NO: 1032254 - DNA, 25 bp, Homo sapien
aagaccaacccatggtggcagagca

SEQ ID NO: 1032255 - DNA, 25 bp, Homo sapien
cttgttttccatctcgatgaacatt

SEQ ID NO: 1032256 - DNA, 25 bp, Homo sapien
ttccatctcgatgaacatttttacc

SEQ ID NO: 1032257 - DNA, 25 bp, Homo sapien
aaggcaaaggtcaaaaggctcacag

SEQ ID NO: 1032258 - DNA, 25 bp, Homo sapien
cctgtcctctaacgattctaaagca

SEQ ID NO: 1032259 - DNA, 25 bp, Homo sapien
tgtttgaatttcataacctgccttc

SEQ ID NO: 1032260 - DNA, 25 bp, Homo sapien
gccattaatagatgaaaggtgtttg

SEQ ID NO: 1032261 - DNA, 25 bp, Homo sapien
agagtgtgacttgattataggccac

SEQ ID NO: 1032262 - DNA, 25 bp, Homo sapien
cattaatagatgaaaggtgtttgga

SEQ ID NO: 1032263 - DNA, 25 bp, Homo sapien
aggtggttagccattcttcgtgttt

SEQ ID NO: 1032264 - DNA, 25 bp, Homo sapien
gtggttagccattcttcgtgtttct

SEQ ID NO: 1032265 - DNA, 25 bp, Homo sapien
tcttaggggaggtggttagccattc

SEQ ID NO: 1032266 - DNA, 25 bp, Homo sapien
gccattcttcgtgtttctcaaatgt

SEQ ID NO: 1032267 - DNA, 25 bp, Homo sapien
ctcataggctggcaccatgccggga

SEQ ID NO: 1032268 - DNA, 25 bp, Homo sapien
gatgccttaaaggtgaccaacaggt

SEQ ID NO: 1032269 - DNA, 25 bp, Homo sapien
caaacttgctgctgtgcaatgcatc

SEQ ID NO: 1032270 - DNA, 25 bp, Homo sapien
tgtctaggacaaagaaccccatgga

SEQ ID NO: 1032271 - DNA, 25 bp, Homo sapien
gatgccacactttctgagggtaaac

SEQ ID NO: 1032272 - DNA, 25 bp, Homo sapien
gccccacatgcaaaggccggaagag

SEQ ID NO: 1032273 - DNA, 25 bp, Homo sapien
gggtaaactgagagccccacatgca

SEQ ID NO: 1032274 - DNA, 25 bp, Homo sapien
gttgctgcttctcgtgctgatgcca

SEQ ID NO: 1032275 - DNA, 25 bp, Homo sapien
tgggtcacagcagtggtgccttccc

SEQ ID NO: 1032276 - DNA, 25 bp, Homo sapien
gacacccgtggtctatgtatatgta

SEQ ID NO: 1032277 - DNA, 25 bp, Homo sapien
cacacagaggcacacgttggttctg

SEQ ID NO: 1032278 - DNA, 25 bp, Homo sapien
tctggcttatcaactagtgttagac

SEQ ID NO: 1032279 - DNA, 25 bp, Homo sapien
ggatgagggtgcttctaaatgagat

SEQ ID NO: 1032280 - DNA, 25 bp, Homo sapien
gactcaggagggcatgagggttgat

SEQ ID NO: 1032281 - DNA, 25 bp, Homo sapien
tgtgtcaatctaactgggccacgaa

SEQ ID NO: 1032282 - DNA, 25 bp, Homo sapien
gggtaaaatgttatgtgtcaatcta

SEQ ID NO: 1032283 - DNA, 25 bp, Homo sapien
tactcctgggttttgaaaggatctc

SEQ ID NO: 1032284 - DNA, 25 bp, Homo sapien
tccaggttggtttgtaacagcacag

SEQ ID NO: 1032285 - DNA, 25 bp, Homo sapien
acttaatgtcgctggtactcctggg

SEQ ID NO: 1032286 - DNA, 25 bp, Homo sapien
gaaagagacagcgatccaggtgcta

SEQ ID NO: 1032287 - DNA, 25 bp, Homo sapien
taggaacgctgataggaatcatcca

SEQ ID NO: 1032288 - DNA, 25 bp, Homo sapien
gccaggacaaacaggtcatccacag

SEQ ID NO: 1032289 - DNA, 25 bp, Homo sapien
cagagtgatgcccttgagtaaaaga

SEQ ID NO: 1032290 - DNA, 25 bp, Homo sapien
gatagggtatgaacaataggaacgc

SEQ ID NO: 1032291 - DNA, 25 bp, Homo sapien
catgcccagcagatcttcagtatat

SEQ ID NO: 1032292 - DNA, 25 bp, Homo sapien
atgcccagcagatcttcagtatatt

SEQ ID NO: 1032293 - DNA, 25 bp, Homo sapien
gcccagcagatcttcagtatatttt

SEQ ID NO: 1032294 - DNA, 25 bp, Homo sapien
aatgtttggtagagctattcctccc

SEQ ID NO: 1032295 - DNA, 25 bp, Homo sapien
gctattgcgtcctcaaactggttat

SEQ ID NO: 1032296 - DNA, 25 bp, Homo sapien
gaatatccttgccttgatcctggtc

SEQ ID NO: 1032297 - DNA, 25 bp, Homo sapien
taatacctccagtacaattgtggga

SEQ ID NO: 1032298 - DNA, 25 bp, Homo sapien
acacatctggcgcacaatggataag

SEQ ID NO: 1032299 - DNA, 25 bp, Homo sapien
tcaccctgggagtaccaccttcagg

SEQ ID NO: 1032300 - DNA, 25 bp, Homo sapien
ggtatatctcccgtgccaggtaagc

SEQ ID NO: 1032301 - DNA, 25 bp, Homo sapien
ggtcaacacatctggcgcacaatgg

SEQ ID NO: 1032302 - DNA, 25 bp, Homo sapien
cctgttgtagagtatcattgagcca

SEQ ID NO: 1032303 - DNA, 25 bp, Homo sapien
ggtcctctctggtcgttttcccatc

SEQ ID NO: 1032304 - DNA, 25 bp, Homo sapien
tccctggaccttgagtttcatgtgg

SEQ ID NO: 1032305 - DNA, 25 bp, Homo sapien
catgtggtcctctctggtcgttttc

SEQ ID NO: 1032306 - DNA, 25 bp, Homo sapien
cagtttcactgaaaacttgaatgga

SEQ ID NO: 1032307 - DNA, 25 bp, Homo sapien
gtttcactgaaaacttgaatggaga

SEQ ID NO: 1032308 - DNA, 25 bp, Homo sapien
caatccagtttcactgaaaacttga

SEQ ID NO: 1032309 - DNA, 25 bp, Homo sapien
tccagtttcactgaaaacttgaatg

SEQ ID NO: 1032310 - DNA, 25 bp, Homo sapien
tgtgacagccatgaaaccaacagcc

SEQ ID NO: 1032311 - DNA, 25 bp, Homo sapien
gaaactcttcgttgtttacaggcaa

SEQ ID NO: 1032312 - DNA, 25 bp, Homo sapien
gccgggcttctagctttaaggcagt

SEQ ID NO: 1032313 - DNA, 25 bp, Homo sapien
gcaagtcacgccttaagagccgaga

SEQ ID NO: 1032314 - DNA, 25 bp, Homo sapien
ggattaagcgttgcttctgctgcac

SEQ ID NO: 1032315 - DNA, 25 bp, Homo sapien
ctgctgcacagcatgtagacgggta

SEQ ID NO: 1032316 - DNA, 25 bp, Homo sapien
cacagcatgtagacgggtaaggaat

SEQ ID NO: 1032317 - DNA, 25 bp, Homo sapien
taaaaggattaagcgttgcttctgc

SEQ ID NO: 1032318 - DNA, 25 bp, Homo sapien
gaaggtcagtagtgatgttctccct

SEQ ID NO: 1032319 - DNA, 25 bp, Homo sapien
tgtgatccaacaacatgagatgtct

SEQ ID NO: 1032320 - DNA, 25 bp, Homo sapien
ccagggaattcatatgacccttggt

SEQ ID NO: 1032321 - DNA, 25 bp, Homo sapien
tcttgagtaaactgcagtcatttca

SEQ ID NO: 1032322 - DNA, 25 bp, Homo sapien
gctaagacttactcctggactctca

SEQ ID NO: 1032323 - DNA, 25 bp, Homo sapien
gttaattggctattcatatatcttc

SEQ ID NO: 1032324 - DNA, 25 bp, Homo sapien
taaagtcactagatttattcccatg

SEQ ID NO: 1032325 - DNA, 25 bp, Homo sapien
aatatattttcgtgtgttaattggc

SEQ ID NO: 1032326 - DNA, 25 bp, Homo sapien
tggcagacaggacggaatttgcttc

SEQ ID NO: 1032327 - DNA, 25 bp, Homo sapien
ttcccttcacagtgttggtctccag

SEQ ID NO: 1032328 - DNA, 25 bp, Homo sapien
tccaagaacagggtccacatcttga

SEQ ID NO: 1032329 - DNA, 25 bp, Homo sapien
ggttcctgtccatccagttccaaga

SEQ ID NO: 1032330 - DNA, 25 bp, Homo sapien
agctgctgccagcttccaggtccca

SEQ ID NO: 1032331 - DNA, 25 bp, Homo sapien
ctaagctgctgccagcttccaggtc

SEQ ID NO: 1032332 - DNA, 25 bp, Homo sapien
taagctgctgccagcttccaggtcc

SEQ ID NO: 1032333 - DNA, 25 bp, Homo sapien
ctgctgccagcttccaggtcccaga

SEQ ID NO: 1032334 - DNA, 25 bp, Homo sapien
ctagccccttgttaagttgcccagg

SEQ ID NO: 1032335 - DNA, 25 bp, Homo sapien
tgtgttccattcaggatatgccagt

SEQ ID NO: 1032336 - DNA, 25 bp, Homo sapien
tcagacaggacacctgcgtgtggat

SEQ ID NO: 1032337 - DNA, 25 bp, Homo sapien
tatgccagttgactggtcaccgaca

SEQ ID NO: 1032338 - DNA, 25 bp, Homo sapien
tctaaccgatcaagtagcagagatg

SEQ ID NO: 1032339 - DNA, 25 bp, Homo sapien
caacgcaggtttgttatgccagagt

SEQ ID NO: 1032340 - DNA, 25 bp, Homo sapien
ggttagacaggcaaccaacgcaggt

SEQ ID NO: 1032341 - DNA, 25 bp, Homo sapien
cagacaccgggctcaaaaaattgat

SEQ ID NO: 1032342 - DNA, 25 bp, Homo sapien
tatatggctctcaggtgcagaccca

SEQ ID NO: 1032343 - DNA, 25 bp, Homo sapien
gataaatgcccgataggaatgtgct

SEQ ID NO: 1032344 - DNA, 25 bp, Homo sapien
tgttcagggccgagatcactcagct

SEQ ID NO: 1032345 - DNA, 25 bp, Homo sapien
tccccagagcgagatgtatatggct

SEQ ID NO: 1032346 - DNA, 25 bp, Homo sapien
ctggcatgactctataggtggcatt

SEQ ID NO: 1032347 - DNA, 25 bp, Homo sapien
taggtggcattgtcattggtgtaca

SEQ ID NO: 1032348 - DNA, 25 bp, Homo sapien
tgtggaagggggtgcactctcttct

SEQ ID NO: 1032349 - DNA, 25 bp, Homo sapien
tgtcattggtgtacacttgtttctg

SEQ ID NO: 1032350 - DNA, 25 bp, Homo sapien
tgagaacggactagtccaatagaca

SEQ ID NO: 1032351 - DNA, 25 bp, Homo sapien
catgtaagacatacctgcttcctct

SEQ ID NO: 1032352 - DNA, 25 bp, Homo sapien
agtgtgtagcgcctccctgttctct

SEQ ID NO: 1032353 - DNA, 25 bp, Homo sapien
gtctcgtcataggagtgagttctca

SEQ ID NO: 1032354 - DNA, 25 bp, Homo sapien
cgtggcgtcactaagaaggcagaac

SEQ ID NO: 1032355 - DNA, 25 bp, Homo sapien
agaacaattcactagctctgcgcag

SEQ ID NO: 1032356 - DNA, 25 bp, Homo sapien
cagtccccggatgaaaggcattcct

SEQ ID NO: 1032357 - DNA, 25 bp, Homo sapien
tccagctcctgagtgcgtggcgtca

SEQ ID NO: 1032358 - DNA, 25 bp, Homo sapien
actcaagatcacctggtgtggcttc

SEQ ID NO: 1032359 - DNA, 25 bp, Homo sapien
ccctgaaccatctgtaggctccacc

SEQ ID NO: 1032360 - DNA, 25 bp, Homo sapien
tcaaaaagcaggtctcactcaagat

SEQ ID NO: 1032361 - DNA, 25 bp, Homo sapien
cactcatgcacacttccaaatttcc

SEQ ID NO: 1032362 - DNA, 25 bp, Homo sapien
agtcttgggcaacatgtcagctttg

SEQ ID NO: 1032363 - DNA, 25 bp, Homo sapien
cagctttgactgaactcccaaaaac

SEQ ID NO: 1032364 - DNA, 25 bp, Homo sapien
cccctctagtcttgggcaacatgtc

SEQ ID NO: 1032365 - DNA, 25 bp, Homo sapien
acatgtcagctttgactgaactccc

SEQ ID NO: 1032366 - DNA, 25 bp, Homo sapien
tcaaatcaaataaagttgctgctgt

SEQ ID NO: 1032367 - DNA, 25 bp, Homo sapien
ctgttgttgggtggaccagtccctg

SEQ ID NO: 1032368 - DNA, 25 bp, Homo sapien
ctgcccccgcggagagctggctggg

SEQ ID NO: 1032369 - DNA, 25 bp, Homo sapien
gctgtagcaagaggtgaggacatgg

SEQ ID NO: 1032370 - DNA, 25 bp, Homo sapien
tgctgtcccctaaaggacctgcaat

SEQ ID NO: 1032371 - DNA, 25 bp, Homo sapien
tcacccatattgcacgaaggagagc

SEQ ID NO: 1032372 - DNA, 25 bp, Homo sapien
tttgtgcttattggcatcaagcagg

SEQ ID NO: 1032373 - DNA, 25 bp, Homo sapien
ctaaaggacctgcaatggcctcacc

SEQ ID NO: 1032374 - DNA, 25 bp, Homo sapien
gccattatcctccacaaagtgatga

SEQ ID NO: 1032375 - DNA, 25 bp, Homo sapien
gatgactactgattaagaacagccc

SEQ ID NO: 1032376 - DNA, 25 bp, Homo sapien
caaattctagcaatgttcctgcaga

SEQ ID NO: 1032377 - DNA, 25 bp, Homo sapien
cagacgcacgcagacaggctttgtc

SEQ ID NO: 1032378 - DNA, 25 bp, Homo sapien
cagctccgtctccacccttgtctct

SEQ ID NO: 1032379 - DNA, 25 bp, Homo sapien
tccgtctccacccttgtctctgtgg

SEQ ID NO: 1032380 - DNA, 25 bp, Homo sapien
tctccacccttgtctctgtggggca

SEQ ID NO: 1032381 - DNA, 25 bp, Homo sapien
tccacccttgtctctgtggggcagt

SEQ ID NO: 1032382 - DNA, 25 bp, Homo sapien
cacactccaacatgtgcggctgcat

SEQ ID NO: 1032383 - DNA, 25 bp, Homo sapien
ctgtgacgccacgtaggtatccacg

SEQ ID NO: 1032384 - DNA, 25 bp, Homo sapien
gccacgtaggtatccacggcacact

SEQ ID NO: 1032385 - DNA, 25 bp, Homo sapien
tatccacggcacactccaacatgtg

SEQ ID NO: 1032386 - DNA, 25 bp, Homo sapien
ctgagctccttcctgttggggcccc

SEQ ID NO: 1032387 - DNA, 25 bp, Homo sapien
gagctccttcctgttggggccccca

SEQ ID NO: 1032388 - DNA, 25 bp, Homo sapien
tgagctccttcctgttggggccccc

SEQ ID NO: 1032389 - DNA, 25 bp, Homo sapien
agtggggtagggcagcacctgagca

SEQ ID NO: 1032390 - DNA, 25 bp, Homo sapien
ctgcaagcccaggactgtcagtggg

SEQ ID NO: 1032391 - DNA, 25 bp, Homo sapien
aagcccaggactgtcagtggggtag

SEQ ID NO: 1032392 - DNA, 25 bp, Homo sapien
ctggactgcaagcccaggactgtca

SEQ ID NO: 1032393 - DNA, 25 bp, Homo sapien
atggaggaatggacatagcagccgt

SEQ ID NO: 1032394 - DNA, 25 bp, Homo sapien
aatggacatagcagccgtacaagca

SEQ ID NO: 1032395 - DNA, 25 bp, Homo sapien
ccagtagcacctccggtggaaggtg

SEQ ID NO: 1032396 - DNA, 25 bp, Homo sapien
tgaaggagccagtagcacctccggt

SEQ ID NO: 1032397 - DNA, 25 bp, Homo sapien
tgtataggggcacctcggcatcagc

SEQ ID NO: 1032398 - DNA, 25 bp, Homo sapien
tataacaccaaagataccagggctg

SEQ ID NO: 1032399 - DNA, 25 bp, Homo sapien
gccacgtccccactcttggtggctg

SEQ ID NO: 1032400 - DNA, 25 bp, Homo sapien
ctcctgagccatgcacggtggtgag

SEQ ID NO: 1032401 - DNA, 25 bp, Homo sapien
ggccatgttgaagctgcatgcactg

SEQ ID NO: 1032402 - DNA, 25 bp, Homo sapien
tggggagcttgcatggccatgttga

SEQ ID NO: 1032403 - DNA, 25 bp, Homo sapien
ctgcatgcactggtctggtgaggct

SEQ ID NO: 1032404 - DNA, 25 bp, Homo sapien
ctgtggggagcttgcatggccatgt

SEQ ID NO: 1032405 - DNA, 25 bp, Homo sapien
actgttgttattgctactggtgaca

SEQ ID NO: 1032406 - DNA, 25 bp, Homo sapien
ttgctactggtgacaggatgaggat

SEQ ID NO: 1032407 - DNA, 25 bp, Homo sapien
cttgcccgcagccttcgatgactgt

SEQ ID NO: 1032408 - DNA, 25 bp, Homo sapien
ccgcagccttcgatgactgttgtta

SEQ ID NO: 1032409 - DNA, 25 bp, Homo sapien
cactcgtccacacggcgggagcaga

SEQ ID NO: 1032410 - DNA, 25 bp, Homo sapien
agtacccactcgtccacacggcggg

SEQ ID NO: 1032411 - DNA, 25 bp, Homo sapien
ggctctggccacatagcagacgttg

SEQ ID NO: 1032412 - DNA, 25 bp, Homo sapien
catagcagacgttggccgccgcagt

SEQ ID NO: 1032413 - DNA, 25 bp, Homo sapien
tcttagttccctcttggtggccaca

SEQ ID NO: 1032414 - DNA, 25 bp, Homo sapien
tgaagagtagccgataaccgtggag

SEQ ID NO: 1032415 - DNA, 25 bp, Homo sapien
gtggccacaactctttgctccatgg

SEQ ID NO: 1032416 - DNA, 25 bp, Homo sapien
atggttaactgaggagcttgaagag

SEQ ID NO: 1032417 - DNA, 25 bp, Homo sapien
ctggttttcttgcatgtgaggccac

SEQ ID NO: 1032418 - DNA, 25 bp, Homo sapien
tgaggccacggagtgtggtagctgt

SEQ ID NO: 1032419 - DNA, 25 bp, Homo sapien
ggttttcttgcatgtgaggccacgg

SEQ ID NO: 1032420 - DNA, 25 bp, Homo sapien
ggccacggagtgtggtagctgttgc

SEQ ID NO: 1032421 - DNA, 25 bp, Homo sapien
aattgctttggctcaaaaatcattt

SEQ ID NO: 1032422 - DNA, 25 bp, Homo sapien
aaattgctttggctcaaaaatcatt

SEQ ID NO: 1032423 - DNA, 25 bp, Homo sapien
caaattgctttggctcaaaaatcat

SEQ ID NO: 1032424 - DNA, 25 bp, Homo sapien
tctggtccggagatcccgggaacaa

SEQ ID NO: 1032425 - DNA, 25 bp, Homo sapien
cgcccttctgttggacttttctcag

SEQ ID NO: 1032426 - DNA, 25 bp, Homo sapien
tctttggcgagcattctccctccag

SEQ ID NO: 1032427 - DNA, 25 bp, Homo sapien
cagctgtgagggcacatctggtccg

SEQ ID NO: 1032428 - DNA, 25 bp, Homo sapien
ttaggcccatacgtccaggttggtg

SEQ ID NO: 1032429 - DNA, 25 bp, Homo sapien
tctggaagggccagcaattaggccc

SEQ ID NO: 1032430 - DNA, 25 bp, Homo sapien
agcaattaggcccatacgtccaggt

SEQ ID NO: 1032431 - DNA, 25 bp, Homo sapien
tccacttgtactctggaagggccag

SEQ ID NO: 1032432 - DNA, 25 bp, Homo sapien
tgtataacgcctggcagtgtctgct

SEQ ID NO: 1032433 - DNA, 25 bp, Homo sapien
agtcatgtataacgcctggcagtgt

SEQ ID NO: 1032434 - DNA, 25 bp, Homo sapien
cccatttccacagtcatgtataacg

SEQ ID NO: 1032435 - DNA, 25 bp, Homo sapien
gaaggtctgtttggcaggtgcacag

SEQ ID NO: 1032436 - DNA, 25 bp, Homo sapien
gatgctccctgtggtccgcaaggcc

SEQ ID NO: 1032437 - DNA, 25 bp, Homo sapien
ctctcggactgtgagcccgctgtgg

SEQ ID NO: 1032438 - DNA, 25 bp, Homo sapien
agtgtcctctcggactgtgagcccg

SEQ ID NO: 1032439 - DNA, 25 bp, Homo sapien
tgtcctctcggactgtgagcccgct

SEQ ID NO: 1032440 - DNA, 25 bp, Homo sapien
ggtccttcttagctgatggccactg

SEQ ID NO: 1032441 - DNA, 25 bp, Homo sapien
gaaggttctggagcgtgtgcactcc

SEQ ID NO: 1032442 - DNA, 25 bp, Homo sapien
cacttggagaagagggctcttttac

SEQ ID NO: 1032443 - DNA, 25 bp, Homo sapien
ctccaggccaaggagaccacacttg

SEQ ID NO: 1032444 - DNA, 25 bp, Homo sapien
tgtggagttgaacccccctgtgtct

SEQ ID NO: 1032445 - DNA, 25 bp, Homo sapien
accagggcagaccttgtggatcaga

SEQ ID NO: 1032446 - DNA, 25 bp, Homo sapien
cgtgtggagttgaacccccctgtgt

SEQ ID NO: 1032447 - DNA, 25 bp, Homo sapien
cagggcagaccttgtggatcagagt

SEQ ID NO: 1032448 - DNA, 25 bp, Homo sapien
tggttctcattccagcttgttctca

SEQ ID NO: 1032449 - DNA, 25 bp, Homo sapien
gatttctaccgcaaacttgtccctg

SEQ ID NO: 1032450 - DNA, 25 bp, Homo sapien
catgtgaggagctggacccagggtc

SEQ ID NO: 1032451 - DNA, 25 bp, Homo sapien
atcttggggatttctaccgcaaact

SEQ ID NO: 1032452 - DNA, 25 bp, Homo sapien
agaccgtgtcggctggtgtgcccag

SEQ ID NO: 1032453 - DNA, 25 bp, Homo sapien
tttccaggtattgttgcccagctgg

SEQ ID NO: 1032454 - DNA, 25 bp, Homo sapien
cgtgtcggctggtgtgcccaggcgg

SEQ ID NO: 1032455 - DNA, 25 bp, Homo sapien
gcccaggcgggggtatgcttctacc

SEQ ID NO: 1032456 - DNA, 25 bp, Homo sapien
cactcccggtaattgggtttagatg

SEQ ID NO: 1032457 - DNA, 25 bp, Homo sapien
cacggtggaggctgccacacgcact

SEQ ID NO: 1032458 - DNA, 25 bp, Homo sapien
cacttgaacgaggaatgaatggcca

SEQ ID NO: 1032459 - DNA, 25 bp, Homo sapien
cacacgcacttgaacgaggaatgaa

SEQ ID NO: 1032460 - DNA, 25 bp, Homo sapien
caggcaccgataggggatcaaggac

SEQ ID NO: 1032461 - DNA, 25 bp, Homo sapien
tgccaggagcccagtcgtggccctg

SEQ ID NO: 1032462 - DNA, 25 bp, Homo sapien
gccaggagcccagtcgtggccctgg

SEQ ID NO: 1032463 - DNA, 25 bp, Homo sapien
ctgccaggagcccagtcgtggccct

SEQ ID NO: 1032464 - DNA, 25 bp, Homo sapien
cctggagctgttggtcccgctccag

SEQ ID NO: 1032465 - DNA, 25 bp, Homo sapien
tggagctgttggtcccgctccaggg

SEQ ID NO: 1032466 - DNA, 25 bp, Homo sapien
gcctggagctgttggtcccgctcca

SEQ ID NO: 1032467 - DNA, 25 bp, Homo sapien
agctgttggtcccgctccaggggca

SEQ ID NO: 1032468 - DNA, 25 bp, Homo sapien
atatcatcggaaccggcccaaggag

SEQ ID NO: 1032469 - DNA, 25 bp, Homo sapien
gtgtggccttttactatagtcataa

SEQ ID NO: 1032470 - DNA, 25 bp, Homo sapien
tcaacttgagctgacaaggagaggg

SEQ ID NO: 1032471 - DNA, 25 bp, Homo sapien
tttgatagccttccctgatgtgtgg

SEQ ID NO: 1032472 - DNA, 25 bp, Homo sapien
cagagggcctacaggcgagggcaga

SEQ ID NO: 1032473 - DNA, 25 bp, Homo sapien
ctgagcgatggctggcaagggcttc

SEQ ID NO: 1032474 - DNA, 25 bp, Homo sapien
tcagagggcctacaggcgagggcag

SEQ ID NO: 1032475 - DNA, 25 bp, Homo sapien
agagggcctacaggcgagggcagag

SEQ ID NO: 1032476 - DNA, 25 bp, Homo sapien
aggtgggacgatggttccactagaa

SEQ ID NO: 1032477 - DNA, 25 bp, Homo sapien
gctgatcatgaaggccttggcaggc

SEQ ID NO: 1032478 - DNA, 25 bp, Homo sapien
ccactagaaaggaggctgatcatga

SEQ ID NO: 1032479 - DNA, 25 bp, Homo sapien
tggcaggcttgggttctatccccac

SEQ ID NO: 1032480 - DNA, 25 bp, Homo sapien
gggccgcaaggcttgccgcagtcct

SEQ ID NO: 1032481 - DNA, 25 bp, Homo sapien
tccttcttgtcggtgttgatggagc

SEQ ID NO: 1032482 - DNA, 25 bp, Homo sapien
tcgatggccggcacgttcaggtagt

SEQ ID NO: 1032483 - DNA, 25 bp, Homo sapien
tgagctcttctttcgtccatttcgc

SEQ ID NO: 1032484 - DNA, 25 bp, Homo sapien
agaggctcacgaggcccctcctgat

SEQ ID NO: 1032485 - DNA, 25 bp, Homo sapien
gcttcccggtgctcggcagcatttt

SEQ ID NO: 1032486 - DNA, 25 bp, Homo sapien
tcctgatgaagcgcgggaagctgac

SEQ ID NO: 1032487 - DNA, 25 bp, Homo sapien
gcagcattttgaagaggctcacgag

SEQ ID NO: 1032488 - DNA, 25 bp, Homo sapien
ccccggccatatggatggggcctct

SEQ ID NO: 1032489 - DNA, 25 bp, Homo sapien
ctccccggccatatggatggggcct

SEQ ID NO: 1032490 - DNA, 25 bp, Homo sapien
tctcttggaacttttgctggggccc

SEQ ID NO: 1032491 - DNA, 25 bp, Homo sapien
ggctgctccccggccatatggatgg

SEQ ID NO: 1032492 - DNA, 25 bp, Homo sapien
ggtagggggacaaggagagcgtcga

SEQ ID NO: 1032493 - DNA, 25 bp, Homo sapien
tagggggacaaggagagcgtcgaca

SEQ ID NO: 1032494 - DNA, 25 bp, Homo sapien
agccgctaaccctcgcagcactggc

SEQ ID NO: 1032495 - DNA, 25 bp, Homo sapien
tctgtgaagggctctagaaggtagg

SEQ ID NO: 1032496 - DNA, 25 bp, Homo sapien
ttccctaaagtcagagtgcacgagg

SEQ ID NO: 1032497 - DNA, 25 bp, Homo sapien
tgcacgaggcggctcttccaggggt

SEQ ID NO: 1032498 - DNA, 25 bp, Homo sapien
ccagggagtggaccgcatagagttc

SEQ ID NO: 1032499 - DNA, 25 bp, Homo sapien
tccctaaagtcagagtgcacgaggc

SEQ ID NO: 1032500 - DNA, 25 bp, Homo sapien
tgtcagagcccgtgggtgcagaggg

SEQ ID NO: 1032501 - DNA, 25 bp, Homo sapien
gcaggggggctgtcagagcccgtgg

SEQ ID NO: 1032502 - DNA, 25 bp, Homo sapien
ggctgtcagagcccgtgggtgcaga

SEQ ID NO: 1032503 - DNA, 25 bp, Homo sapien
agagaggcaggggggctgtcagagc

SEQ ID NO: 1032504 - DNA, 25 bp, Homo sapien
agaggcagttgtgggtccgcggctg

SEQ ID NO: 1032505 - DNA, 25 bp, Homo sapien
ggctgtcgaggatctgctgcaccag

SEQ ID NO: 1032506 - DNA, 25 bp, Homo sapien
agctgttccaccgagaagcctgagc

SEQ ID NO: 1032507 - DNA, 25 bp, Homo sapien
gttcccattgctgcaggtccacttg

SEQ ID NO: 1032508 - DNA, 25 bp, Homo sapien
gctgtggctgtgctcgtgcttgccc

SEQ ID NO: 1032509 - DNA, 25 bp, Homo sapien
gcttgccctccgacacgtcattgtg

SEQ ID NO: 1032510 - DNA, 25 bp, Homo sapien
tggctccaccttgggcgagatgatg

SEQ ID NO: 1032511 - DNA, 25 bp, Homo sapien
ttacacttgtgatgcacgctgccgc

SEQ ID NO: 1032512 - DNA, 25 bp, Homo sapien
ggtcgctgttgagcccgctgctgat

SEQ ID NO: 1032513 - DNA, 25 bp, Homo sapien
tggtgcaggagcacgggcttggcca

SEQ ID NO: 1032514 - DNA, 25 bp, Homo sapien
gctctggtgcaggagcacgggcttg

SEQ ID NO: 1032515 - DNA, 25 bp, Homo sapien
caccatgtccgggtcgctgttgagc

SEQ ID NO: 1032516 - DNA, 25 bp, Homo sapien
tctccggctgcaggtagtgctcaga

SEQ ID NO: 1032517 - DNA, 25 bp, Homo sapien
gaggaccagctcttcggacacgttg

SEQ ID NO: 1032518 - DNA, 25 bp, Homo sapien
acatgaacaccgtggcgctctggga

SEQ ID NO: 1032519 - DNA, 25 bp, Homo sapien
tctgctgctcgaaggaggtgtcctc

SEQ ID NO: 1032520 - DNA, 25 bp, Homo sapien
tgccaggctgccattgcgttcctgt

SEQ ID NO: 1032521 - DNA, 25 bp, Homo sapien
tcagcagcttttggttgtgggtaac

SEQ ID NO: 1032522 - DNA, 25 bp, Homo sapien
ccgccctcgtgtggcgagctgctga

SEQ ID NO: 1032523 - DNA, 25 bp, Homo sapien
gtggcttatgcgcattttccaaatc

SEQ ID NO: 1032524 - DNA, 25 bp, Homo sapien
tggcttcttgccacgggcctgtgat

SEQ ID NO: 1032525 - DNA, 25 bp, Homo sapien
caaacaggcagctgtagttattgct

SEQ ID NO: 1032526 - DNA, 25 bp, Homo sapien
gcctgtgatgaggaccttcactcct

SEQ ID NO: 1032527 - DNA, 25 bp, Homo sapien
caccccaggctgaatcagggatgca

SEQ ID NO: 1032528 - DNA, 25 bp, Homo sapien
gggaggcccataatccagcaccggg

SEQ ID NO: 1032529 - DNA, 25 bp, Homo sapien
tgctgggagggtgtcgggaggccca

SEQ ID NO: 1032530 - DNA, 25 bp, Homo sapien
agggtgtcgggaggcccataatcca

SEQ ID NO: 1032531 - DNA, 25 bp, Homo sapien
cataatccagcaccgggggccacag

SEQ ID NO: 1032532 - DNA, 25 bp, Homo sapien
cttctctgggacaatgtgtcccagc

SEQ ID NO: 1032533 - DNA, 25 bp, Homo sapien
gcttctctgggacaatgtgtcccag

SEQ ID NO: 1032534 - DNA, 25 bp, Homo sapien
ggcttctctgggacaatgtgtccca

SEQ ID NO: 1032535 - DNA, 25 bp, Homo sapien
acaatgtgtcccagcttggggtcgg

SEQ ID NO: 1032536 - DNA, 25 bp, Homo sapien
tatagagtcgaggaagccgtccaag

SEQ ID NO: 1032537 - DNA, 25 bp, Homo sapien
tcattgaccggtggccgctgtccat

SEQ ID NO: 1032538 - DNA, 25 bp, Homo sapien
aaaaccagctcattgaccggtggcc

SEQ ID NO: 1032539 - DNA, 25 bp, Homo sapien
gcagatcccagtcccgatgggaaaa

SEQ ID NO: 1032540 - DNA, 25 bp, Homo sapien
tagggtcacaagaccagtgtcatgg

SEQ ID NO: 1032541 - DNA, 25 bp, Homo sapien
ggctttgtactcaaacaccaccgag

SEQ ID NO: 1032542 - DNA, 25 bp, Homo sapien
ttgttgaaggcaacttgtagggtca

SEQ ID NO: 1032543 - DNA, 25 bp, Homo sapien
agagcccgggctttgtactcaaaca

SEQ ID NO: 1032544 - DNA, 25 bp, Homo sapien
gagctgccatagtcatgcacactct

SEQ ID NO: 1032545 - DNA, 25 bp, Homo sapien
aaggagccatctggcccgcaggtgg

SEQ ID NO: 1032546 - DNA, 25 bp, Homo sapien
gagcctgcatctgcccgagtcctgg

SEQ ID NO: 1032547 - DNA, 25 bp, Homo sapien
ggcgtcctccacagagtcaactttg

SEQ ID NO: 1032548 - DNA, 25 bp, Homo sapien
agtccccggagcctaacctgcgcgg

SEQ ID NO: 1032549 - DNA, 25 bp, Homo sapien
tgcgcggcttcttcactgcgcttct

SEQ ID NO: 1032550 - DNA, 25 bp, Homo sapien
tgcctgcgaactcctcaaaacacgc

SEQ ID NO: 1032551 - DNA, 25 bp, Homo sapien
tgaactccccgacaccgcggagtcc

SEQ ID NO: 1032552 - DNA, 25 bp, Homo sapien
cagtgggaggcacgcgatctcctgg

SEQ ID NO: 1032553 - DNA, 25 bp, Homo sapien
cactgtggaaggctgtgactctgag

SEQ ID NO: 1032554 - DNA, 25 bp, Homo sapien
ccttctgctgaacgagcagtggatg

SEQ ID NO: 1032555 - DNA, 25 bp, Homo sapien
ttggcaagaccaacaccagaggtgc

SEQ ID NO: 1032556 - DNA, 25 bp, Homo sapien
ctctgggactcagaacagatgtggg

SEQ ID NO: 1032557 - DNA, 25 bp, Homo sapien
tgtgggacatctccacgagcccagg

SEQ ID NO: 1032558 - DNA, 25 bp, Homo sapien
gctccccagcggggagccatgaaga

SEQ ID NO: 1032559 - DNA, 25 bp, Homo sapien
gtctctgggactcagaacagatgtg

SEQ ID NO: 1032560 - DNA, 25 bp, Homo sapien
ggcaggcttccggtgaatctgcacg

SEQ ID NO: 1032561 - DNA, 25 bp, Homo sapien
aggtctgataccaacacagtgtttg

SEQ ID NO: 1032562 - DNA, 25 bp, Homo sapien
gattcttgcacccagcaacaaccag

SEQ ID NO: 1032563 - DNA, 25 bp, Homo sapien
tccaccaggtctgataccaacacag

SEQ ID NO: 1032564 - DNA, 25 bp, Homo sapien
cttgctcaggaccactaggaattca

SEQ ID NO: 1032565 - DNA, 25 bp, Homo sapien
ctaaggatgtcagcccattgctggc

SEQ ID NO: 1032566 - DNA, 25 bp, Homo sapien
gagatggattctgggagcccaatcc

SEQ ID NO: 1032567 - DNA, 25 bp, Homo sapien
cccagtaaaggctaaggatgtcagc

SEQ ID NO: 1032568 - DNA, 25 bp, Homo sapien
agaactggtccttctgcatgagggc

SEQ ID NO: 1032569 - DNA, 25 bp, Homo sapien
cagaactggtccttctgcatgaggg

SEQ ID NO: 1032570 - DNA, 25 bp, Homo sapien
tggtggcaactctgtgccagaaggt

SEQ ID NO: 1032571 - DNA, 25 bp, Homo sapien
tcctggtggcaactctgtgccagaa

SEQ ID NO: 1032572 - DNA, 25 bp, Homo sapien
caactctgtgccagaaggtgttttg

SEQ ID NO: 1032573 - DNA, 25 bp, Homo sapien
ctgtccctcctggtggcaactctgt

SEQ ID NO: 1032574 - DNA, 25 bp, Homo sapien
ttacaaccccgcacagcaaatggag

SEQ ID NO: 1032575 - DNA, 25 bp, Homo sapien
ccattgggaggacacttgaccgaga

SEQ ID NO: 1032576 - DNA, 25 bp, Homo sapien
acacttgaccgagaggagagcattg

SEQ ID NO: 1032577 - DNA, 25 bp, Homo sapien
ggacacttgaccgagaggagagcat

SEQ ID NO: 1032578 - DNA, 25 bp, Homo sapien
ctgcgccggaactgcgcccgagccg

SEQ ID NO: 1032579 - DNA, 25 bp, Homo sapien
gctcggcgcggggactgcgccggaa

SEQ ID NO: 1032580 - DNA, 25 bp, Homo sapien
cgcggagccgctcggcgcggggact

SEQ ID NO: 1032581 - DNA, 25 bp, Homo sapien
tgcgccggaactgcgcccgagccgc

SEQ ID NO: 1032582 - DNA, 25 bp, Homo sapien
cctgctgagctcggctcctgctcgt

SEQ ID NO: 1032583 - DNA, 25 bp, Homo sapien
ctgagctcggctcctgctcgtcagg

SEQ ID NO: 1032584 - DNA, 25 bp, Homo sapien
ccggacctgctgagctcggctcctg

SEQ ID NO: 1032585 - DNA, 25 bp, Homo sapien
tgctgagctcggctcctgctcgtca

SEQ ID NO: 1032586 - DNA, 25 bp, Homo sapien
aaagtgcagagattagaggtgaaag

SEQ ID NO: 1032587 - DNA, 25 bp, Homo sapien
gactgtaggcatgcaacgccacacc

SEQ ID NO: 1032588 - DNA, 25 bp, Homo sapien
gcagagattagaggtgaaagccacc

SEQ ID NO: 1032589 - DNA, 25 bp, Homo sapien
agtgcagagattagaggtgaaagcc

SEQ ID NO: 1032590 - DNA, 25 bp, Homo sapien
tatgtaagccagtctgaggtggagt

SEQ ID NO: 1032591 - DNA, 25 bp, Homo sapien
tgtgagccaacacacggccaagttc

SEQ ID NO: 1032592 - DNA, 25 bp, Homo sapien
cacttgcagcattagaatttatcta

SEQ ID NO: 1032593 - DNA, 25 bp, Homo sapien
tgacagtagcaataaactgtcttgc

SEQ ID NO: 1032594 - DNA, 25 bp, Homo sapien
gactataaattccaagactagcgag

SEQ ID NO: 1032595 - DNA, 25 bp, Homo sapien
cgagcaaagcgtacgacggttccat

SEQ ID NO: 1032596 - DNA, 25 bp, Homo sapien
caagactagcgagcaaagcgtacga

SEQ ID NO: 1032597 - DNA, 25 bp, Homo sapien
aattccaagactagcgagcaaagcg

SEQ ID NO: 1032598 - DNA, 25 bp, Homo sapien
gaaaacacgttgtgattctgtacca

SEQ ID NO: 1032599 - DNA, 25 bp, Homo sapien
aaaatcaatcatgcccacgctcgct

SEQ ID NO: 1032600 - DNA, 25 bp, Homo sapien
ggtcacctatccatgtacataagag

SEQ ID NO: 1032601 - DNA, 25 bp, Homo sapien
tacacatgttagaattgggtcacct

SEQ ID NO: 1032602 - DNA, 25 bp, Homo sapien
ggcagagcaggaggaagagtgaggt

SEQ ID NO: 1032603 - DNA, 25 bp, Homo sapien
gcagagcaggaggaagagtgaggtt

SEQ ID NO: 1032604 - DNA, 25 bp, Homo sapien
agagcaggaggaagagtgaggttgt

SEQ ID NO: 1032605 - DNA, 25 bp, Homo sapien
agcaggaggaagagtgaggttgtgt

SEQ ID NO: 1032606 - DNA, 25 bp, Homo sapien
gctgggaccccgtcatctcggccat

SEQ ID NO: 1032607 - DNA, 25 bp, Homo sapien
ctccgctcgcctgtttgtgctgctg

SEQ ID NO: 1032608 - DNA, 25 bp, Homo sapien
catctgctccagtcgttccaggatg

SEQ ID NO: 1032609 - DNA, 25 bp, Homo sapien
gctccagtcgttccaggatggacat

SEQ ID NO: 1032610 - DNA, 25 bp, Homo sapien
cagcaggctcggctcatcatcttct

SEQ ID NO: 1032611 - DNA, 25 bp, Homo sapien
ctttgagtggatcaagtgcttggac

SEQ ID NO: 1032612 - DNA, 25 bp, Homo sapien
gagtagggtcattccgcggaaagtc

SEQ ID NO: 1032613 - DNA, 25 bp, Homo sapien
cagcggccaggtggagtagggtcat

SEQ ID NO: 1032614 - DNA, 25 bp, Homo sapien
ggtcaatgctatccgcgtgctttgt

SEQ ID NO: 1032615 - DNA, 25 bp, Homo sapien
tggtccacattcaaggggtcaactt

SEQ ID NO: 1032616 - DNA, 25 bp, Homo sapien
ttccaggtcaatgctatccgcgtgc

SEQ ID NO: 1032617 - DNA, 25 bp, Homo sapien
aggagtacaggagaagtggtccaca

SEQ ID NO: 1032618 - DNA, 25 bp, Homo sapien
tgggctcttcgcttgcaggacagtg

SEQ ID NO: 1032619 - DNA, 25 bp, Homo sapien
ggtgcttgcaataacagtgactccc

SEQ ID NO: 1032620 - DNA, 25 bp, Homo sapien
gacggtcccacttgtacagcacgac

SEQ ID NO: 1032621 - DNA, 25 bp, Homo sapien
aggcagccttcctagagagtcggga

SEQ ID NO: 1032622 - DNA, 25 bp, Homo sapien
gagggttcagaacgaggtcttctca

SEQ ID NO: 1032623 - DNA, 25 bp, Homo sapien
tttctgcactatcacggtaggaccc

SEQ ID NO: 1032624 - DNA, 25 bp, Homo sapien
cactcattggttcccgtggacgcac

SEQ ID NO: 1032625 - DNA, 25 bp, Homo sapien
tcctacaggctgagatccagaggct

SEQ ID NO: 1032626 - DNA, 25 bp, Homo sapien
ctaatggtggcagggtctgttcttt

SEQ ID NO: 1032627 - DNA, 25 bp, Homo sapien
ttctcctgcttgattcggtcaggtg

SEQ ID NO: 1032628 - DNA, 25 bp, Homo sapien
tctttccaatcctgaggactccatg

SEQ ID NO: 1032629 - DNA, 25 bp, Homo sapien
taatgtgttctgccaaggtcatcat

SEQ ID NO: 1032630 - DNA, 25 bp, Homo sapien
ccgctagataactggccagccagct

SEQ ID NO: 1032631 - DNA, 25 bp, Homo sapien
ggaaggcagtcagcatccgctagat

SEQ ID NO: 1032632 - DNA, 25 bp, Homo sapien
gcactgggaaggcagtcagcatccg

SEQ ID NO: 1032633 - DNA, 25 bp, Homo sapien
tcagcatccgctagataactggcca

SEQ ID NO: 1032634 - DNA, 25 bp, Homo sapien
agaaggggttagaggctcgttatat

SEQ ID NO: 1032635 - DNA, 25 bp, Homo sapien
ggggttagaggctcgttatatgcac

SEQ ID NO: 1032636 - DNA, 25 bp, Homo sapien
ggttagaggctcgttatatgcactt

SEQ ID NO: 1032637 - DNA, 25 bp, Homo sapien
aaggggttagaggctcgttatatgc

SEQ ID NO: 1032638 - DNA, 25 bp, Homo sapien
ttctcactggtagatgcactcagga

SEQ ID NO: 1032639 - DNA, 25 bp, Homo sapien
tctcgaaagcgatttcactgacggg

SEQ ID NO: 1032640 - DNA, 25 bp, Homo sapien
attctgaccaatccgcggcggaggg

SEQ ID NO: 1032641 - DNA, 25 bp, Homo sapien
gaaagctgtctggacaagcctggca

SEQ ID NO: 1032642 - DNA, 25 bp, Homo sapien
agcattgttctgtgccggaaaagcc

SEQ ID NO: 1032643 - DNA, 25 bp, Homo sapien
ctaaccatggatgggcccttgtccc

SEQ ID NO: 1032644 - DNA, 25 bp, Homo sapien
cattcccgccctggcctaaccatgg

SEQ ID NO: 1032645 - DNA, 25 bp, Homo sapien
gcattgttctgtgccggaaaagccc

SEQ ID NO: 1032646 - DNA, 25 bp, Homo sapien
gtaacaacgctgaataacagcagca

SEQ ID NO: 1032647 - DNA, 25 bp, Homo sapien
tcttgctgttcccgcaagggtcggc

SEQ ID NO: 1032648 - DNA, 25 bp, Homo sapien
tctgtaacaacgctgaataacagca

SEQ ID NO: 1032649 - DNA, 25 bp, Homo sapien
ttttctgtaacaacgctgaataaca

SEQ ID NO: 1032650 - DNA, 25 bp, Homo sapien
agtttccttctgtggtgcaaaactg

SEQ ID NO: 1032651 - DNA, 25 bp, Homo sapien
tccttctgtggtgcaaaactgaggt

SEQ ID NO: 1032652 - DNA, 25 bp, Homo sapien
aggatcttcagtggccttgggtggg

SEQ ID NO: 1032653 - DNA, 25 bp, Homo sapien
cttgggtggggcacagtttccttct

SEQ ID NO: 1032654 - DNA, 25 bp, Homo sapien
tattaatgtcgaaacccactccagc

SEQ ID NO: 1032655 - DNA, 25 bp, Homo sapien
tggtccccagacgacagaggaactg

SEQ ID NO: 1032656 - DNA, 25 bp, Homo sapien
cacagggctcacaggaactggctta

SEQ ID NO: 1032657 - DNA, 25 bp, Homo sapien
gaactgtgcttaggtggcctggcaa

SEQ ID NO: 1032658 - DNA, 25 bp, Homo sapien
ggcgagcctgccgtcttttgccaca

SEQ ID NO: 1032659 - DNA, 25 bp, Homo sapien
tttgctctggataaggatggcagcc

SEQ ID NO: 1032660 - DNA, 25 bp, Homo sapien
tacttttggatgagcacagcagccc

SEQ ID NO: 1032661 - DNA, 25 bp, Homo sapien
tctgttgtacaatcacagccgtccg

SEQ ID NO: 1032662 - DNA, 25 bp, Homo sapien
tattcaaaaccagactcagcacagg

SEQ ID NO: 1032663 - DNA, 25 bp, Homo sapien
gtcagagttctcttccctagggagc

SEQ ID NO: 1032664 - DNA, 25 bp, Homo sapien
gccaccatgcctaaaacgttctgga

SEQ ID NO: 1032665 - DNA, 25 bp, Homo sapien
tcagcacaggtgtacttatcagcca

SEQ ID NO: 1032666 - DNA, 25 bp, Homo sapien
ctcattatttttcgagcagcttgat

SEQ ID NO: 1032667 - DNA, 25 bp, Homo sapien
ttatttttcgagcagcttgatcctg

SEQ ID NO: 1032668 - DNA, 25 bp, Homo sapien
acagcggcgaagaaacctcattatt

SEQ ID NO: 1032669 - DNA, 25 bp, Homo sapien
cagcggcgaagaaacctcattattt

SEQ ID NO: 1032670 - DNA, 25 bp, Homo sapien
cagaatgtataaacaaggactagtg

SEQ ID NO: 1032671 - DNA, 25 bp, Homo sapien
tatctgcagggggattagctttaca

SEQ ID NO: 1032672 - DNA, 25 bp, Homo sapien
ctattgtaatttgggacgtctgccc

SEQ ID NO: 1032673 - DNA, 25 bp, Homo sapien
ggtcagggttgcttcatcattctcc

SEQ ID NO: 1032674 - DNA, 25 bp, Homo sapien
gaaaaacacgggcatgaatctccat

SEQ ID NO: 1032675 - DNA, 25 bp, Homo sapien
catggttaccagcactccaagggta

SEQ ID NO: 1032676 - DNA, 25 bp, Homo sapien
tctgtttggacacgcgctagcatag

SEQ ID NO: 1032677 - DNA, 25 bp, Homo sapien
tggcgattacatgaccagcagaggg

SEQ ID NO: 1032678 - DNA, 25 bp, Homo sapien
gagacgctagtcttcataaagaaat

SEQ ID NO: 1032679 - DNA, 25 bp, Homo sapien
agctccatgagaagatgctgcatcc

SEQ ID NO: 1032680 - DNA, 25 bp, Homo sapien
aaattcctctggcttagctccatga

SEQ ID NO: 1032681 - DNA, 25 bp, Homo sapien
cctggataaagaacacaaaccactt

SEQ ID NO: 1032682 - DNA, 25 bp, Homo sapien
cacagggcgagtgaacattagcttc

SEQ ID NO: 1032683 - DNA, 25 bp, Homo sapien
caaagccggcaatcatatggtatag

SEQ ID NO: 1032684 - DNA, 25 bp, Homo sapien
ggtattataaactgcacagctcctg

SEQ ID NO: 1032685 - DNA, 25 bp, Homo sapien
aaagtaaatgttgctgaggcacagg

SEQ ID NO: 1032686 - DNA, 25 bp, Homo sapien
tttgtacagcctatggtccaccagg

SEQ ID NO: 1032687 - DNA, 25 bp, Homo sapien
ttgtacagcctatggtccaccaggg

SEQ ID NO: 1032688 - DNA, 25 bp, Homo sapien
gtacagcctatggtccaccaggggg

SEQ ID NO: 1032689 - DNA, 25 bp, Homo sapien
cttttgtacagcctatggtccacca

SEQ ID NO: 1032690 - DNA, 25 bp, Homo sapien
ctgttgctttgagagctgcaatagc

SEQ ID NO: 1032691 - DNA, 25 bp, Homo sapien
cacagagcatgttgtctgcaattta

SEQ ID NO: 1032692 - DNA, 25 bp, Homo sapien
gcaatagcttgtggggaatttagga

SEQ ID NO: 1032693 - DNA, 25 bp, Homo sapien
aataagaatgacacagagcatgttg

SEQ ID NO: 1032694 - DNA, 25 bp, Homo sapien
tcacattgctaagggatgctgctgt

SEQ ID NO: 1032695 - DNA, 25 bp, Homo sapien
cacattgctaagggatgctgctgta

SEQ ID NO: 1032696 - DNA, 25 bp, Homo sapien
ggttaaagcaaatccactgaggtca

SEQ ID NO: 1032697 - DNA, 25 bp, Homo sapien
gcttcttggaaataaccggcaggtg

SEQ ID NO: 1032698 - DNA, 25 bp, Homo sapien
caagatgattactaccctcgcaggt

SEQ ID NO: 1032699 - DNA, 25 bp, Homo sapien
gaatttactggccagaacgcagcac

SEQ ID NO: 1032700 - DNA, 25 bp, Homo sapien
gatgctttacatgcacaattacaaa

SEQ ID NO: 1032701 - DNA, 25 bp, Homo sapien
cattgggcgccaactactgtgtgga

SEQ ID NO: 1032702 - DNA, 25 bp, Homo sapien
gagttcttcaacagatccattgatt

SEQ ID NO: 1032703 - DNA, 25 bp, Homo sapien
tgtggaactgccataagcgaccgtg

SEQ ID NO: 1032704 - DNA, 25 bp, Homo sapien
agggagatgggtgggacggcgcggc

SEQ ID NO: 1032705 - DNA, 25 bp, Homo sapien
agttgggaccggaggccagggagat

SEQ ID NO: 1032706 - DNA, 25 bp, Homo sapien
cgcggcgcggggcaaagacgtcact

SEQ ID NO: 1032707 - DNA, 25 bp, Homo sapien
gcagagaagcgaagttgggaccgga

SEQ ID NO: 1032708 - DNA, 25 bp, Homo sapien
aagccgcccgcgtcgcgtagcgtca

SEQ ID NO: 1032709 - DNA, 25 bp, Homo sapien
cggccggcggcaactgggcagtatg

SEQ ID NO: 1032710 - DNA, 25 bp, Homo sapien
cagtatggcggtcccagcgcgagct

SEQ ID NO: 1032711 - DNA, 25 bp, Homo sapien
cagccccggcctgcgtccgagtggc

SEQ ID NO: 1032712 - DNA, 25 bp, Homo sapien
cagggccgaggtcctttctttcgca

SEQ ID NO: 1032713 - DNA, 25 bp, Homo sapien
tagctaggcaaggagctcttcggcc

SEQ ID NO: 1032714 - DNA, 25 bp, Homo sapien
tctgagtcttaccactggaagcagg

SEQ ID NO: 1032715 - DNA, 25 bp, Homo sapien
tgcaacgtgctttcgcttaagagag

SEQ ID NO: 1032716 - DNA, 25 bp, Homo sapien
cagaatgccctttttccaatatgga

SEQ ID NO: 1032717 - DNA, 25 bp, Homo sapien
cacgataggtaagctctactgtcct

SEQ ID NO: 1032718 - DNA, 25 bp, Homo sapien
tgaagtatctgatcccacgataggt

SEQ ID NO: 1032719 - DNA, 25 bp, Homo sapien
tgaaacttgttctaaggcacacatc

SEQ ID NO: 1032720 - DNA, 25 bp, Homo sapien
tgaagtcttcgattactgccagtgg

SEQ ID NO: 1032721 - DNA, 25 bp, Homo sapien
tctgctgaagtcttcgattactgcc

SEQ ID NO: 1032722 - DNA, 25 bp, Homo sapien
tcttcgattactgccagtggcagca

SEQ ID NO: 1032723 - DNA, 25 bp, Homo sapien
ttttgtgtctgctgaagtcttcgat

SEQ ID NO: 1032724 - DNA, 25 bp, Homo sapien
aatgttatgagcaggtttctatcac

SEQ ID NO: 1032725 - DNA, 25 bp, Homo sapien
acaggaaaacaagcgtgaaacctag

SEQ ID NO: 1032726 - DNA, 25 bp, Homo sapien
tatttctcctgagctaaatgttatg

SEQ ID NO: 1032727 - DNA, 25 bp, Homo sapien
ctcctgagctaaatgttatgagcag

SEQ ID NO: 1032728 - DNA, 25 bp, Homo sapien
caaaagatggaggtcctctagctca

SEQ ID NO: 1032729 - DNA, 25 bp, Homo sapien
gaagaactggtcttggcttgagcaa

SEQ ID NO: 1032730 - DNA, 25 bp, Homo sapien
tgtcggacagtgacggcttttagga

SEQ ID NO: 1032731 - DNA, 25 bp, Homo sapien
tgtggttctccacatacggcgcaga

SEQ ID NO: 1032732 - DNA, 25 bp, Homo sapien
cttatataccaaaatcaagaacaac

SEQ ID NO: 1032733 - DNA, 25 bp, Homo sapien
cccacctcaccctatatacaaaaag

SEQ ID NO: 1032734 - DNA, 25 bp, Homo sapien
atcaaagaacattatcaggccaggt

SEQ ID NO: 1032735 - DNA, 25 bp, Homo sapien
tgtggattcttatataccaaaatca

SEQ ID NO: 1032736 - DNA, 25 bp, Homo sapien
gggaaaatccacaactaatatcatg

SEQ ID NO: 1032737 - DNA, 25 bp, Homo sapien
cactttagaaaaaatgggctcactc

SEQ ID NO: 1032738 - DNA, 25 bp, Homo sapien
gttctgaacagagcaattagtcaag

SEQ ID NO: 1032739 - DNA, 25 bp, Homo sapien
cactgccactcaatactgtactgga

SEQ ID NO: 1032740 - DNA, 25 bp, Homo sapien
ttcctcttcaacttggctgcgctcg

SEQ ID NO: 1032741 - DNA, 25 bp, Homo sapien
tgcacggtcgtctaactcagagagc

SEQ ID NO: 1032742 - DNA, 25 bp, Homo sapien
ttcaaattgagaagcgcctgcctgc

SEQ ID NO: 1032743 - DNA, 25 bp, Homo sapien
tgcctgcagtgcgtctgcacggtcg

SEQ ID NO: 1032744 - DNA, 25 bp, Homo sapien
ccattatctgtagcctgttaattct

SEQ ID NO: 1032745 - DNA, 25 bp, Homo sapien
aagtccattatctgtagcctgttaa

SEQ ID NO: 1032746 - DNA, 25 bp, Homo sapien
ctcccagagtcgtgaaagtccatta

SEQ ID NO: 1032747 - DNA, 25 bp, Homo sapien
tcgtgaaagtccattatctgtagcc

SEQ ID NO: 1032748 - DNA, 25 bp, Homo sapien
ccagaacagtaatcccgattgccca

SEQ ID NO: 1032749 - DNA, 25 bp, Homo sapien
gaacagtaatcccgattgcccacat

SEQ ID NO: 1032750 - DNA, 25 bp, Homo sapien
cagaacagtaatcccgattgcccac

SEQ ID NO: 1032751 - DNA, 25 bp, Homo sapien
aaccagaacagtaatcccgattgcc

SEQ ID NO: 1032752 - DNA, 25 bp, Homo sapien
tggtctgtgaacacatggagaagac

SEQ ID NO: 1032753 - DNA, 25 bp, Homo sapien
cctagccaaaactaacatttcggag

SEQ ID NO: 1032754 - DNA, 25 bp, Homo sapien
ggagaagacttttccaatcagttta

SEQ ID NO: 1032755 - DNA, 25 bp, Homo sapien
tttaatctgagttcttgtacacaaa

SEQ ID NO: 1032756 - DNA, 25 bp, Homo sapien
agaaggaggagagatgcaaaaaggc

SEQ ID NO: 1032757 - DNA, 25 bp, Homo sapien
aaggaggagagatgcaaaaaggcag

SEQ ID NO: 1032758 - DNA, 25 bp, Homo sapien
ctaagaaggaggagagatgcaaaaa

SEQ ID NO: 1032759 - DNA, 25 bp, Homo sapien
taagaaggaggagagatgcaaaaag

SEQ ID NO: 1032760 - DNA, 25 bp, Homo sapien
taaatacagcgagagtcagtagtgc

SEQ ID NO: 1032761 - DNA, 25 bp, Homo sapien
caaatgacaagggtaactaactggg

SEQ ID NO: 1032762 - DNA, 25 bp, Homo sapien
gagggttctcttctagggaatcaga

SEQ ID NO: 1032763 - DNA, 25 bp, Homo sapien
tctggaacttaagaaggcctcttca

SEQ ID NO: 1032764 - DNA, 25 bp, Homo sapien
aatggaagctgtgtcctggtgcgcc

SEQ ID NO: 1032765 - DNA, 25 bp, Homo sapien
cacaggtggtcttacttgaggctac

SEQ ID NO: 1032766 - DNA, 25 bp, Homo sapien
ggtttctgagtcagacccggccaga

SEQ ID NO: 1032767 - DNA, 25 bp, Homo sapien
gaccctgcgctgaaggtggactaat

SEQ ID NO: 1032768 - DNA, 25 bp, Homo sapien
cagatagaagcgaggtatttctggg

SEQ ID NO: 1032769 - DNA, 25 bp, Homo sapien
tatttctgggttaatgcaggagcca

SEQ ID NO: 1032770 - DNA, 25 bp, Homo sapien
tgggtaagttcccagctaagtgcac

SEQ ID NO: 1032771 - DNA, 25 bp, Homo sapien
agttcccagctaagtgcacagatag

SEQ ID NO: 1032772 - DNA, 25 bp, Homo sapien
taaacactttatttaggtgattaca

SEQ ID NO: 1032773 - DNA, 25 bp, Homo sapien
tataaacactttatttaggtgatta

SEQ ID NO: 1032774 - DNA, 25 bp, Homo sapien
gcccttggccccgcgcacagccgct

SEQ ID NO: 1032775 - DNA, 25 bp, Homo sapien
cgcccttggccccgcgcacagccgc

SEQ ID NO: 1032776 - DNA, 25 bp, Homo sapien
aaatggaacagacagtccgacgcca

SEQ ID NO: 1032777 - DNA, 25 bp, Homo sapien
gtggctcggaagcgccacgctccgg

SEQ ID NO: 1032778 - DNA, 25 bp, Homo sapien
tgccccaactttcccgcgcgccgag

SEQ ID NO: 1032779 - DNA, 25 bp, Homo sapien
cggggaggcgggtggctcggaagcg

SEQ ID NO: 1032780 - DNA, 25 bp, Homo sapien
tgcttctcgctcactttgcagtcag

SEQ ID NO: 1032781 - DNA, 25 bp, Homo sapien
acattttcaaaacccggagctcgct

SEQ ID NO: 1032782 - DNA, 25 bp, Homo sapien
ccgccatggcgttagtgagaacagg

SEQ ID NO: 1032783 - DNA, 25 bp, Homo sapien
agctcgctcgactttcaggactccg

SEQ ID NO: 1032784 - DNA, 25 bp, Homo sapien
tgtccgccaatttcctctgcagatg

SEQ ID NO: 1032785 - DNA, 25 bp, Homo sapien
cgattcttcgcccagggcctcgtcc

SEQ ID NO: 1032786 - DNA, 25 bp, Homo sapien
tctgcagatggaactcggggctcca

SEQ ID NO: 1032787 - DNA, 25 bp, Homo sapien
tgtggctgctgtccgccaatttcct

SEQ ID NO: 1032788 - DNA, 25 bp, Homo sapien
ttggtttattgcgtctctccgaggg

SEQ ID NO: 1032789 - DNA, 25 bp, Homo sapien
tagttgagggcatctagagtgcttg

SEQ ID NO: 1032790 - DNA, 25 bp, Homo sapien
tggacacagcggagagcatagttga

SEQ ID NO: 1032791 - DNA, 25 bp, Homo sapien
ggacaaccatgataagttcttcaga

SEQ ID NO: 1032792 - DNA, 25 bp, Homo sapien
ccactcctctggctgcttgtatgag

SEQ ID NO: 1032793 - DNA, 25 bp, Homo sapien
caattaagacacgaatggaatcggt

SEQ ID NO: 1032794 - DNA, 25 bp, Homo sapien
tatgagtcctggtgcattcgtagga

SEQ ID NO: 1032795 - DNA, 25 bp, Homo sapien
aattatttgtctgactgagacccca

SEQ ID NO: 1032796 - DNA, 25 bp, Homo sapien
tagtttggtaaattcctgatatatc

SEQ ID NO: 1032797 - DNA, 25 bp, Homo sapien
gagaaaaagtgtttacaatggttca

SEQ ID NO: 1032798 - DNA, 25 bp, Homo sapien
ggtaaattcctgatatatcattact

SEQ ID NO: 1032799 - DNA, 25 bp, Homo sapien
agtgtttacaatggttcatttttag

SEQ ID NO: 1032800 - DNA, 25 bp, Homo sapien
catatcatatatgaagcactgaggt

SEQ ID NO: 1032801 - DNA, 25 bp, Homo sapien
ttttcggatgagaacacctcagtgc

SEQ ID NO: 1032802 - DNA, 25 bp, Homo sapien
tggatcacaggaagcaagatacatt

SEQ ID NO: 1032803 - DNA, 25 bp, Homo sapien
gacaacagtatctttaggaaaccat

SEQ ID NO: 1032804 - DNA, 25 bp, Homo sapien
gctcacatctgcctgaggtgctcca

SEQ ID NO: 1032805 - DNA, 25 bp, Homo sapien
ttctgaagcgatagtggccagctcc

SEQ ID NO: 1032806 - DNA, 25 bp, Homo sapien
ggccagctcctcaagactgtacatg

SEQ ID NO: 1032807 - DNA, 25 bp, Homo sapien
tgctccattctgactgagaatctgg

SEQ ID NO: 1032808 - DNA, 25 bp, Homo sapien
taaaagcctacatctagagcaggcc

SEQ ID NO: 1032809 - DNA, 25 bp, Homo sapien
gaatgctaaggagctagaagcacct

SEQ ID NO: 1032810 - DNA, 25 bp, Homo sapien
tcataaccaaagtcactgagctgca

SEQ ID NO: 1032811 - DNA, 25 bp, Homo sapien
ttttctctggcaagggcggagaagc

SEQ ID NO: 1032812 - DNA, 25 bp, Homo sapien
ctataacatccagttgttacaactt

SEQ ID NO: 1032813 - DNA, 25 bp, Homo sapien
tgcaaactgtgccatacacctgggt

SEQ ID NO: 1032814 - DNA, 25 bp, Homo sapien
taatactagggattgcgcacgttcc

SEQ ID NO: 1032815 - DNA, 25 bp, Homo sapien
taagacctgcacttcacctactgaa

SEQ ID NO: 1032816 - DNA, 25 bp, Homo sapien
cggtgttctcgtcatcaacgcagat

SEQ ID NO: 1032817 - DNA, 25 bp, Homo sapien
gaggtgcaagcaggtcaacaaagtg

SEQ ID NO: 1032818 - DNA, 25 bp, Homo sapien
acaaagtgagaagacgccaggacat

SEQ ID NO: 1032819 - DNA, 25 bp, Homo sapien
tcagaaatgtgcactaaccttccag

SEQ ID NO: 1032820 - DNA, 25 bp, Homo sapien
gcagtgtgcgcgtagaataccctca

SEQ ID NO: 1032821 - DNA, 25 bp, Homo sapien
taagaaaaaccagatagtgtgcatg

SEQ ID NO: 1032822 - DNA, 25 bp, Homo sapien
gaaacagagccttcatagcaactaa

SEQ ID NO: 1032823 - DNA, 25 bp, Homo sapien
tcatcacgtgactttctataacagg

SEQ ID NO: 1032824 - DNA, 25 bp, Homo sapien
gatagacatctgaacattggtcctg

SEQ ID NO: 1032825 - DNA, 25 bp, Homo sapien
aagtcttcagttataggaaccatgg

SEQ ID NO: 1032826 - DNA, 25 bp, Homo sapien
tgttttctcacaaccctcatgccaa

SEQ ID NO: 1032827 - DNA, 25 bp, Homo sapien
cttttgggcatttgttcactgaaac

SEQ ID NO: 1032828 - DNA, 25 bp, Homo sapien
gggactgaaatttctgcccagtgtt

SEQ ID NO: 1032829 - DNA, 25 bp, Homo sapien
cggatcctgcagaaaaaaggtttca

SEQ ID NO: 1032830 - DNA, 25 bp, Homo sapien
accggagcacattcataccgtgcag

SEQ ID NO: 1032831 - DNA, 25 bp, Homo sapien
aaaaggtttcaccggagcacattca

SEQ ID NO: 1032832 - DNA, 25 bp, Homo sapien
gtttcaccggagcacattcataccg

SEQ ID NO: 1032833 - DNA, 25 bp, Homo sapien
tcctaagagttcctggatcaccctg

SEQ ID NO: 1032834 - DNA, 25 bp, Homo sapien
tgaatacaacggcaatctcccgctt

SEQ ID NO: 1032835 - DNA, 25 bp, Homo sapien
aaacacttcgtgcagaagtcactgc

SEQ ID NO: 1032836 - DNA, 25 bp, Homo sapien
acccctcagataccggtgtggctca

SEQ ID NO: 1032837 - DNA, 25 bp, Homo sapien
cacacactacagaatcttctcccac

SEQ ID NO: 1032838 - DNA, 25 bp, Homo sapien
tgatgaccttgcttcccatttcacc

SEQ ID NO: 1032839 - DNA, 25 bp, Homo sapien
accacacactacagaatcttctccc

SEQ ID NO: 1032840 - DNA, 25 bp, Homo sapien
ccacacactacagaatcttctccca

SEQ ID NO: 1032841 - DNA, 25 bp, Homo sapien
ttccgattccaattctggctgggca

SEQ ID NO: 1032842 - DNA, 25 bp, Homo sapien
ccagagtgaatcttttcaaccacag

SEQ ID NO: 1032843 - DNA, 25 bp, Homo sapien
ctgggcagggtgatgtacatgaatc

SEQ ID NO: 1032844 - DNA, 25 bp, Homo sapien
cacagtgagacagcaaggttccgat

SEQ ID NO: 1032845 - DNA, 25 bp, Homo sapien
ctacttcaagaaaaacacaccctgg

SEQ ID NO: 1032846 - DNA, 25 bp, Homo sapien
tgtgtgtggtggtgaagattctttt

SEQ ID NO: 1032847 - DNA, 25 bp, Homo sapien
catctacttcaagaaaaacacaccc

SEQ ID NO: 1032848 - DNA, 25 bp, Homo sapien
cttttattcactgggatccgaggag

SEQ ID NO: 1032849 - DNA, 25 bp, Homo sapien
ctttttggtgtatggcaaccatcag

SEQ ID NO: 1032850 - DNA, 25 bp, Homo sapien
gatcgatgttccaatcaggtcctga

SEQ ID NO: 1032851 - DNA, 25 bp, Homo sapien
catcagagaacgatcttcagggtgc

SEQ ID NO: 1032852 - DNA, 25 bp, Homo sapien
tgaggtaggtaacccagcaaaggca

SEQ ID NO: 1032853 - DNA, 25 bp, Homo sapien
gaactttatgccgaccaatgatgaa

SEQ ID NO: 1032854 - DNA, 25 bp, Homo sapien
atcttccggctccagggattcacaa

SEQ ID NO: 1032855 - DNA, 25 bp, Homo sapien
gagaatgttcaaagggaggatgccc

SEQ ID NO: 1032856 - DNA, 25 bp, Homo sapien
cacaaagctggaccaactggaatcc

SEQ ID NO: 1032857 - DNA, 25 bp, Homo sapien
gtgtcaattgagtcagagggcagtc

SEQ ID NO: 1032858 - DNA, 25 bp, Homo sapien
tagtttatgtgtcaattgagtcaga

SEQ ID NO: 1032859 - DNA, 25 bp, Homo sapien
gagggcagtcaataagctaaggaat

SEQ ID NO: 1032860 - DNA, 25 bp, Homo sapien
gggcagtcaataagctaaggaatat

SEQ ID NO: 1032861 - DNA, 25 bp, Homo sapien
aagcaggtgttcacgaagggaccag

SEQ ID NO: 1032862 - DNA, 25 bp, Homo sapien
tgacaggcactgtactatactagtt

SEQ ID NO: 1032863 - DNA, 25 bp, Homo sapien
gaactgatgtttacttgggaccttc

SEQ ID NO: 1032864 - DNA, 25 bp, Homo sapien
gaatggcacacatgccaacagagag

SEQ ID NO: 1032865 - DNA, 25 bp, Homo sapien
tatgtctttgtcattatcgttcatc

SEQ ID NO: 1032866 - DNA, 25 bp, Homo sapien
aattttggtagcaaaaacatcctca

SEQ ID NO: 1032867 - DNA, 25 bp, Homo sapien
attttggtagcaaaaacatcctcat

SEQ ID NO: 1032868 - DNA, 25 bp, Homo sapien
gaggaggcgatgctgacaagctgct

SEQ ID NO: 1032869 - DNA, 25 bp, Homo sapien
ctgctccgccttcgtctcctccaca

SEQ ID NO: 1032870 - DNA, 25 bp, Homo sapien
caggctcccgtagccgctggacacg

SEQ ID NO: 1032871 - DNA, 25 bp, Homo sapien
tgctcctgcgacccgctgctcccca

SEQ ID NO: 1032872 - DNA, 25 bp, Homo sapien
taagatgtcaccacattcagaaccg

SEQ ID NO: 1032873 - DNA, 25 bp, Homo sapien
cagtttcctgcaccatgccacagta

SEQ ID NO: 1032874 - DNA, 25 bp, Homo sapien
cacgatgcctgtataagaatgtgac

SEQ ID NO: 1032875 - DNA, 25 bp, Homo sapien
ccgaggtagtacagaaaacacgatg

SEQ ID NO: 1032876 - DNA, 25 bp, Homo sapien
cccgtcactggcttgaatgatgatt

SEQ ID NO: 1032877 - DNA, 25 bp, Homo sapien
cactggcatagacctgctgcaaggt

SEQ ID NO: 1032878 - DNA, 25 bp, Homo sapien
accattcggttctgtgcgtgtcccc

SEQ ID NO: 1032879 - DNA, 25 bp, Homo sapien
gactcaatgtagagctgctgaccca

SEQ ID NO: 1032880 - DNA, 25 bp, Homo sapien
cacagggtcatgactttatgctcac

SEQ ID NO: 1032881 - DNA, 25 bp, Homo sapien
tatgctcacgaatcacatacatgac

SEQ ID NO: 1032882 - DNA, 25 bp, Homo sapien
acgtctatgcagagagtgacagccc

SEQ ID NO: 1032883 - DNA, 25 bp, Homo sapien
taattcttcagtaaaagtgaactgc

SEQ ID NO: 1032884 - DNA, 25 bp, Homo sapien
tcaggctgtcggtgcactggaatcc

SEQ ID NO: 1032885 - DNA, 25 bp, Homo sapien
cattgtgccttcgagagggtctgtc

SEQ ID NO: 1032886 - DNA, 25 bp, Homo sapien
tagattttaggcctgctggctgctc

SEQ ID NO: 1032887 - DNA, 25 bp, Homo sapien
catcctgtgtgtgctattagagcca

SEQ ID NO: 1032888 - DNA, 25 bp, Homo sapien
gctggttttgctttagtccattatc

SEQ ID NO: 1032889 - DNA, 25 bp, Homo sapien
tgagtactcagtgtctacctccaaa

SEQ ID NO: 1032890 - DNA, 25 bp, Homo sapien
tcaaatacagtataaggaactaata

SEQ ID NO: 1032891 - DNA, 25 bp, Homo sapien
ccctctgtagtattgttgtcacaaa

SEQ ID NO: 1032892 - DNA, 25 bp, Homo sapien
attttctggatacctctgttactga

SEQ ID NO: 1032893 - DNA, 25 bp, Homo sapien
tatggctagagaataaacagctctg

SEQ ID NO: 1032894 - DNA, 25 bp, Homo sapien
taagactgttctatgttcctaagga

SEQ ID NO: 1032895 - DNA, 25 bp, Homo sapien
ctctctgacctgtggattatttgta

SEQ ID NO: 1032896 - DNA, 25 bp, Homo sapien
cgttcctcaaatcctcacagggctc

SEQ ID NO: 1032897 - DNA, 25 bp, Homo sapien
gttcctcaaatcctcacagggctca

SEQ ID NO: 1032898 - DNA, 25 bp, Homo sapien
gggctcagtgtacacactattgttt

SEQ ID NO: 1032899 - DNA, 25 bp, Homo sapien
gtgtacacactattgtttttcagtg

SEQ ID NO: 1032900 - DNA, 25 bp, Homo sapien
gacactgtcgatacagttgatctgt

SEQ ID NO: 1032901 - DNA, 25 bp, Homo sapien
ctgatgacactgtcgatacagttga

SEQ ID NO: 1032902 - DNA, 25 bp, Homo sapien
gatgacactgtcgatacagttgatc

SEQ ID NO: 1032903 - DNA, 25 bp, Homo sapien
tgacactgtcgatacagttgatctg

SEQ ID NO: 1032904 - DNA, 25 bp, Homo sapien
ggtatccaaacttgcggtctcatac

SEQ ID NO: 1032905 - DNA, 25 bp, Homo sapien
tggtatccaaacttgcggtctcata

SEQ ID NO: 1032906 - DNA, 25 bp, Homo sapien
atggtatccaaacttgcggtctcat

SEQ ID NO: 1032907 - DNA, 25 bp, Homo sapien
gtatttgtacaggagatacactttc

SEQ ID NO: 1032908 - DNA, 25 bp, Homo sapien
gttgtatttgtacaggagatacact

SEQ ID NO: 1032909 - DNA, 25 bp, Homo sapien
aagaagttgtatttgtacaggagat

SEQ ID NO: 1032910 - DNA, 25 bp, Homo sapien
cttgtaaggcttggacatcatctgc

SEQ ID NO: 1032911 - DNA, 25 bp, Homo sapien
ctatggaccgtccatttgttggcat

SEQ ID NO: 1032912 - DNA, 25 bp, Homo sapien
catttgttggcatttctgatttagg

SEQ ID NO: 1032913 - DNA, 25 bp, Homo sapien
ggtatggctgggatttgcaaaccag

SEQ ID NO: 1032914 - DNA, 25 bp, Homo sapien
catttctgatttaggtatggctggg

SEQ ID NO: 1032915 - DNA, 25 bp, Homo sapien
ccgaccccaagctcagcatcgccgt

SEQ ID NO: 1032916 - DNA, 25 bp, Homo sapien
taaccgcattggcttatgcccgacc

SEQ ID NO: 1032917 - DNA, 25 bp, Homo sapien
ggtgctgctgtaaccgcattggctt

SEQ ID NO: 1032918 - DNA, 25 bp, Homo sapien
gcattggcttatgcccgaccccaag

SEQ ID NO: 1032919 - DNA, 25 bp, Homo sapien
tgtgcgctgacagaacagccgctgt

SEQ ID NO: 1032920 - DNA, 25 bp, Homo sapien
tatcaacataattctgctcttcctt

SEQ ID NO: 1032921 - DNA, 25 bp, Homo sapien
gctgtgagccccacgtgtttaaatt

SEQ ID NO: 1032922 - DNA, 25 bp, Homo sapien
gggtgatgacaggatcttttctcgg

SEQ ID NO: 1032923 - DNA, 25 bp, Homo sapien
tataagtagctgacgaatgagcatt

SEQ ID NO: 1032924 - DNA, 25 bp, Homo sapien
gtagctgacgaatgagcatttgcca

SEQ ID NO: 1032925 - DNA, 25 bp, Homo sapien
cgaatgagcatttgccaatactacc

SEQ ID NO: 1032926 - DNA, 25 bp, Homo sapien
aggtagttataagtagctgacgaat

SEQ ID NO: 1032927 - DNA, 25 bp, Homo sapien
cagggctgtgcgttctgatgcgctc

SEQ ID NO: 1032928 - DNA, 25 bp, Homo sapien
cgaccgcgtctgcttggaagtagaa

SEQ ID NO: 1032929 - DNA, 25 bp, Homo sapien
agccggtgttcgagctgctgctgtc

SEQ ID NO: 1032930 - DNA, 25 bp, Homo sapien
aggtcgggctcgaggtgtgcggaga

SEQ ID NO: 1032931 - DNA, 25 bp, Homo sapien
ggtcaggcaggaaaacggtcataaa

SEQ ID NO: 1032932 - DNA, 25 bp, Homo sapien
gaatggacatggcaaaaacgatggc

SEQ ID NO: 1032933 - DNA, 25 bp, Homo sapien
ttctcttccgggtgaggtcgcggct

SEQ ID NO: 1032934 - DNA, 25 bp, Homo sapien
aaacgatggcgacaacagaggacag

SEQ ID NO: 1032935 - DNA, 25 bp, Homo sapien
ctgaagggggtgggtccagagttgg

SEQ ID NO: 1032936 - DNA, 25 bp, Homo sapien
tgaagggggtgggtccagagttgga

SEQ ID NO: 1032937 - DNA, 25 bp, Homo sapien
gggggtgggtccagagttggactca

SEQ ID NO: 1032938 - DNA, 25 bp, Homo sapien
gaagtaagtttaactgcaagggtga

SEQ ID NO: 1032939 - DNA, 25 bp, Homo sapien
tactcagtttgtgggcacgtgttcc

SEQ ID NO: 1032940 - DNA, 25 bp, Homo sapien
caagggtgagctgcttctcgaagta

SEQ ID NO: 1032941 - DNA, 25 bp, Homo sapien
tctcgaagtaatgaacgggtgcccc

SEQ ID NO: 1032942 - DNA, 25 bp, Homo sapien
agtgttgaaaatgagcatcacttac

SEQ ID NO: 1032943 - DNA, 25 bp, Homo sapien
tgagtgttgaaaatgagcatcactt

SEQ ID NO: 1032944 - DNA, 25 bp, Homo sapien
gagtgttgaaaatgagcatcactta

SEQ ID NO: 1032945 - DNA, 25 bp, Homo sapien
ttgagtgttgaaaatgagcatcact

SEQ ID NO: 1032946 - DNA, 25 bp, Homo sapien
accccgtggacagtgcaccggtagt

SEQ ID NO: 1032947 - DNA, 25 bp, Homo sapien
gtgcaccggtagtagcaggactgct

SEQ ID NO: 1032948 - DNA, 25 bp, Homo sapien
cgtggacagtgcaccggtagtagca

SEQ ID NO: 1032949 - DNA, 25 bp, Homo sapien
gacagtgcaccggtagtagcaggac

SEQ ID NO: 1032950 - DNA, 25 bp, Homo sapien
ggacagagcgctggcagtaggatgg

SEQ ID NO: 1032951 - DNA, 25 bp, Homo sapien
gtggacagagcgctggcagtaggat

SEQ ID NO: 1032952 - DNA, 25 bp, Homo sapien
tggacagagcgctggcagtaggatg

SEQ ID NO: 1032953 - DNA, 25 bp, Homo sapien
ctgtggacagagcgctggcagtagg

SEQ ID NO: 1032954 - DNA, 25 bp, Homo sapien
taggatgggatggagtcctgctggg

SEQ ID NO: 1032955 - DNA, 25 bp, Homo sapien
cctgctgggaggcaatcccatggac

SEQ ID NO: 1032956 - DNA, 25 bp, Homo sapien
gaggcaatcccatggacagtgtgct

SEQ ID NO: 1032957 - DNA, 25 bp, Homo sapien
cccgtggacagaacagtggcagtag

SEQ ID NO: 1032958 - DNA, 25 bp, Homo sapien
taaggtatatactgctgtcgctgct

SEQ ID NO: 1032959 - DNA, 25 bp, Homo sapien
gtaaggtatatactgctgtcgctgc

SEQ ID NO: 1032960 - DNA, 25 bp, Homo sapien
ctagtaaggtatatactgctgtcgc

SEQ ID NO: 1032961 - DNA, 25 bp, Homo sapien
tagtaaggtatatactgctgtcgct

SEQ ID NO: 1032962 - DNA, 25 bp, Homo sapien
tctgtacgtcctgagattgctgccc

SEQ ID NO: 1032963 - DNA, 25 bp, Homo sapien
tacgtcctgagattgctgcccattt

SEQ ID NO: 1032964 - DNA, 25 bp, Homo sapien
cctgagattgctgcccattttggga

SEQ ID NO: 1032965 - DNA, 25 bp, Homo sapien
tcttttttctgtacgtcctgagatt

SEQ ID NO: 1032966 - DNA, 25 bp, Homo sapien
ctctcaggtacctggtatgtcatga

SEQ ID NO: 1032967 - DNA, 25 bp, Homo sapien
tatgtcatgagaatgcgctcaggtg

SEQ ID NO: 1032968 - DNA, 25 bp, Homo sapien
tgcgctcaggtgtctgccgtatcat

SEQ ID NO: 1032969 - DNA, 25 bp, Homo sapien
tgccgtatcattctccagatgggct

SEQ ID NO: 1032970 - DNA, 25 bp, Homo sapien
tagtcctgaataagacacagggttc

SEQ ID NO: 1032971 - DNA, 25 bp, Homo sapien
cagggttcttttcccgtcatctagg

SEQ ID NO: 1032972 - DNA, 25 bp, Homo sapien
caaacaaacagaatcttaatagtcc

SEQ ID NO: 1032973 - DNA, 25 bp, Homo sapien
cattttctaacacatgaggcataca

SEQ ID NO: 1032974 - DNA, 25 bp, Homo sapien
ctagcttttccaggtcttcttttag

SEQ ID NO: 1032975 - DNA, 25 bp, Homo sapien
gctgcctcatactttctagcttttc

SEQ ID NO: 1032976 - DNA, 25 bp, Homo sapien
tccttttgcccatgagaaaactggg

SEQ ID NO: 1032977 - DNA, 25 bp, Homo sapien
caggtcttcttttagtacaacttct

SEQ ID NO: 1032978 - DNA, 25 bp, Homo sapien
tttcttgagtgacagtctggctttg

SEQ ID NO: 1032979 - DNA, 25 bp, Homo sapien
tcttgagtgacagtctggctttgaa

SEQ ID NO: 1032980 - DNA, 25 bp, Homo sapien
tgagtgacagtctggctttgaatcc

SEQ ID NO: 1032981 - DNA, 25 bp, Homo sapien
ttgaatgtcgatttcttgagtgaca

SEQ ID NO: 1032982 - DNA, 25 bp, Homo sapien
ctgaaaatatttcattatagttcat

SEQ ID NO: 1032983 - DNA, 25 bp, Homo sapien
gaaaatatttcattatagttcattc

SEQ ID NO: 1032984 - DNA, 25 bp, Homo sapien
aatatttcattatagttcattcttt

SEQ ID NO: 1032985 - DNA, 25 bp, Homo sapien
gtctgaaaatatttcattatagttc

SEQ ID NO: 1032986 - DNA, 25 bp, Homo sapien
caggcgagttacttgatgtcaatgt

SEQ ID NO: 1032987 - DNA, 25 bp, Homo sapien
aagcaggcgagttacttgatgtcaa

SEQ ID NO: 1032988 - DNA, 25 bp, Homo sapien
gcaggcgagttacttgatgtcaatg

SEQ ID NO: 1032989 - DNA, 25 bp, Homo sapien
ggcgagttacttgatgtcaatgtca

SEQ ID NO: 1032990 - DNA, 25 bp, Homo sapien
ccgcaccatcagctgaatcttcatt

SEQ ID NO: 1032991 - DNA, 25 bp, Homo sapien
accacaggatgtggccgcaccatca

SEQ ID NO: 1032992 - DNA, 25 bp, Homo sapien
aacctgaccacaggatgtggccgca

SEQ ID NO: 1032993 - DNA, 25 bp, Homo sapien
cgcaccatcagctgaatcttcattt

SEQ ID NO: 1032994 - DNA, 25 bp, Homo sapien
caacctgtaggtggcatttcttcaa

SEQ ID NO: 1032995 - DNA, 25 bp, Homo sapien
caactacaaaaagagcctaactggc

SEQ ID NO: 1032996 - DNA, 25 bp, Homo sapien
gctaatgtgttgtgagaaaaccgga

SEQ ID NO: 1032997 - DNA, 25 bp, Homo sapien
gaaacttacaagaataggcccatgg

SEQ ID NO: 1032998 - DNA, 25 bp, Homo sapien
acacagaagtatgtaagaatgatac

SEQ ID NO: 1032999 - DNA, 25 bp, Homo sapien
tgatactagcttttacattacttgt

SEQ ID NO: 1033000 - DNA, 25 bp, Homo sapien
tgccagtcagacctgtggtagggct

SEQ ID NO: 1033001 - DNA, 25 bp, Homo sapien
tggtagggctggagcgacctctttt

SEQ ID NO: 1033002 - DNA, 25 bp, Homo sapien
tagaaagcggtgactgatggagcct

SEQ ID NO: 1033003 - DNA, 25 bp, Homo sapien
agacacaactacaaacgccatagaa

SEQ ID NO: 1033004 - DNA, 25 bp, Homo sapien
ctgtgggcgaggacaactgggctcg

SEQ ID NO: 1033005 - DNA, 25 bp, Homo sapien
aacgccatagaaagcggtgactgat

SEQ ID NO: 1033006 - DNA, 25 bp, Homo sapien
tgacagttctgcgacaagcaccagt

SEQ ID NO: 1033007 - DNA, 25 bp, Homo sapien
caacctgggagtgcgtgaatgcgtc

SEQ ID NO: 1033008 - DNA, 25 bp, Homo sapien
tgcgcaatgatcctgatagctacgg

SEQ ID NO: 1033009 - DNA, 25 bp, Homo sapien
tactccataaaacgtgtgctaaggc

SEQ ID NO: 1033010 - DNA, 25 bp, Homo sapien
cataaattttgacctctgaccaaag

SEQ ID NO: 1033011 - DNA, 25 bp, Homo sapien
tacccaactgaaatattactaatga

SEQ ID NO: 1033012 - DNA, 25 bp, Homo sapien
tgaagtgtcactcaattgcaaaatg

SEQ ID NO: 1033013 - DNA, 25 bp, Homo sapien
gcaaaatgatttccattcatacagc

SEQ ID NO: 1033014 - DNA, 25 bp, Homo sapien
ctttccaggcccggtaccatggtca

SEQ ID NO: 1033015 - DNA, 25 bp, Homo sapien
tccaggcccggtaccatggtcagcc

SEQ ID NO: 1033016 - DNA, 25 bp, Homo sapien
agtaatagagccctttccaggcccg

SEQ ID NO: 1033017 - DNA, 25 bp, Homo sapien
tttccaggcccggtaccatggtcag

SEQ ID NO: 1033018 - DNA, 25 bp, Homo sapien
gaagacaggcttgtggactgtggtg

SEQ ID NO: 1033019 - DNA, 25 bp, Homo sapien
cgacagggacatgggccttccggcc

SEQ ID NO: 1033020 - DNA, 25 bp, Homo sapien
ttgtcaagtcagttccctgaggtcc

SEQ ID NO: 1033021 - DNA, 25 bp, Homo sapien
ctgggggtacccttgtcaagtcagt

SEQ ID NO: 1033022 - DNA, 25 bp, Homo sapien
taggtcaccaggatggtgatggaca

SEQ ID NO: 1033023 - DNA, 25 bp, Homo sapien
gtcaccaggatggtgatggacattt

SEQ ID NO: 1033024 - DNA, 25 bp, Homo sapien
ctaggtcaccaggatggtgatggac

SEQ ID NO: 1033025 - DNA, 25 bp, Homo sapien
ggtcaccaggatggtgatggacatt

SEQ ID NO: 1033026 - DNA, 25 bp, Homo sapien
tactttcctacttttagtctctaca

SEQ ID NO: 1033027 - DNA, 25 bp, Homo sapien
tgttatgtgtgattacattcattat

SEQ ID NO: 1033028 - DNA, 25 bp, Homo sapien
agattgaatctcagtgttatgtgtg

SEQ ID NO: 1033029 - DNA, 25 bp, Homo sapien
attgaatctcagtgttatgtgtgat

SEQ ID NO: 1033030 - DNA, 25 bp, Homo sapien
tggtaccggcatccatattggtgtt

SEQ ID NO: 1033031 - DNA, 25 bp, Homo sapien
ttgctgttgggttggtaccggcatc

SEQ ID NO: 1033032 - DNA, 25 bp, Homo sapien
tgttgggttagtactggtgttgata

SEQ ID NO: 1033033 - DNA, 25 bp, Homo sapien
catattggtgttctcactgttggtg

SEQ ID NO: 1033034 - DNA, 25 bp, Homo sapien
catgcatgctttggtttgtaaatcg

SEQ ID NO: 1033035 - DNA, 25 bp, Homo sapien
gaggaacttgccctctataaaaaca

SEQ ID NO: 1033036 - DNA, 25 bp, Homo sapien
gactattagctcttgaggagagtct

SEQ ID NO: 1033037 - DNA, 25 bp, Homo sapien
ggagttccgtagcaggcatgcatgc

SEQ ID NO: 1033038 - DNA, 25 bp, Homo sapien
gctggaactacaaggaagggccacc

SEQ ID NO: 1033039 - DNA, 25 bp, Homo sapien
ttctgcatgcgtttctccttttgct

SEQ ID NO: 1033040 - DNA, 25 bp, Homo sapien
tacatgggtgtatgagtgtcaacac

SEQ ID NO: 1033041 - DNA, 25 bp, Homo sapien
ctgtgttttgcaggacactctccgc

SEQ ID NO: 1033042 - DNA, 25 bp, Homo sapien
gacgtcgactgcgttgctcttcctg

SEQ ID NO: 1033043 - DNA, 25 bp, Homo sapien
accgcactcctgtgtttgacctgaa

SEQ ID NO: 1033044 - DNA, 25 bp, Homo sapien
tcaccgcactcctgtgtttgacctg

SEQ ID NO: 1033045 - DNA, 25 bp, Homo sapien
cgcactcctgtgtttgacctgaagt

SEQ ID NO: 1033046 - DNA, 25 bp, Homo sapien
gcactcctgtgtttgacctgaagtc

SEQ ID NO: 1033047 - DNA, 25 bp, Homo sapien
ctctctctcgggttgtttatggaaa

SEQ ID NO: 1033048 - DNA, 25 bp, Homo sapien
taaccacctcgttggtggctcattg

SEQ ID NO: 1033049 - DNA, 25 bp, Homo sapien
gaagcaaggcttagcttggacagcg

SEQ ID NO: 1033050 - DNA, 25 bp, Homo sapien
agtctctgatgttttaaccacctcg

SEQ ID NO: 1033051 - DNA, 25 bp, Homo sapien
aggctcagcaaagaacgacgacgat

SEQ ID NO: 1033052 - DNA, 25 bp, Homo sapien
tgctgggcccagattcgttctggtg

SEQ ID NO: 1033053 - DNA, 25 bp, Homo sapien
agattcgttctggtgaccgcagccc

SEQ ID NO: 1033054 - DNA, 25 bp, Homo sapien
gaacgacgacgatttgcctgttccc

SEQ ID NO: 1033055 - DNA, 25 bp, Homo sapien
tgcgccctggagtcgctttgcctca

SEQ ID NO: 1033056 - DNA, 25 bp, Homo sapien
aggtcacttcctttagagcgtcgcg

SEQ ID NO: 1033057 - DNA, 25 bp, Homo sapien
cgtcgcgtgtgggtctctgcgccct

SEQ ID NO: 1033058 - DNA, 25 bp, Homo sapien
tccgacgtaaatgcgccgggtgctg

SEQ ID NO: 1033059 - DNA, 25 bp, Homo sapien
cacgcgcgccgtccggcctccctca

SEQ ID NO: 1033060 - DNA, 25 bp, Homo sapien
gccagcacgcacgcgcgccgtccgg

SEQ ID NO: 1033061 - DNA, 25 bp, Homo sapien
cgcacgcgcgccgtccggcctccct

SEQ ID NO: 1033062 - DNA, 25 bp, Homo sapien
agcacgcacgcgcgccgtccggcct

SEQ ID NO: 1033063 - DNA, 25 bp, Homo sapien
cacaccaggctgaaaatgaacgcac

SEQ ID NO: 1033064 - DNA, 25 bp, Homo sapien
cccacaccaggctgaaaatgaacgc

SEQ ID NO: 1033065 - DNA, 25 bp, Homo sapien
ccacaccaggctgaaaatgaacgca

SEQ ID NO: 1033066 - DNA, 25 bp, Homo sapien
ctgcggacgcggcgccccggcccgt

SEQ ID NO: 1033067 - DNA, 25 bp, Homo sapien
tgggaggccggaagcgagggcggcc

SEQ ID NO: 1033068 - DNA, 25 bp, Homo sapien
tcaaatccaacgccagcgacagggc

SEQ ID NO: 1033069 - DNA, 25 bp, Homo sapien
gcgacagggcccgactgggaggccg

SEQ ID NO: 1033070 - DNA, 25 bp, Homo sapien
agcgggacaccgtccagcacaggga

SEQ ID NO: 1033071 - DNA, 25 bp, Homo sapien
ttccatgccggcgagaggttaggca

SEQ ID NO: 1033072 - DNA, 25 bp, Homo sapien
agcgttgccaccacgctggcggtca

SEQ ID NO: 1033073 - DNA, 25 bp, Homo sapien
agagtttaataaaacggctagccag

SEQ ID NO: 1033074 - DNA, 25 bp, Homo sapien
gattctggacgcttcagcgttgcca

SEQ ID NO: 1033075 - DNA, 25 bp, Homo sapien
aacgacagcagctcaacgaggttcc

SEQ ID NO: 1033076 - DNA, 25 bp, Homo sapien
ggagttctcactgccaacgacagca

SEQ ID NO: 1033077 - DNA, 25 bp, Homo sapien
gatggaaatcccctcactgaagtca

SEQ ID NO: 1033078 - DNA, 25 bp, Homo sapien
acatctgtctctctgcgcggagttc

SEQ ID NO: 1033079 - DNA, 25 bp, Homo sapien
aaatggagacggtcatccctgtaga

SEQ ID NO: 1033080 - DNA, 25 bp, Homo sapien
atggagacggtcatccctgtagatg

SEQ ID NO: 1033081 - DNA, 25 bp, Homo sapien
aatggagacggtcatccctgtagat

SEQ ID NO: 1033082 - DNA, 25 bp, Homo sapien
gaaatggagacggtcatccctgtag

SEQ ID NO: 1033083 - DNA, 25 bp, Homo sapien
tggagacggtcatccctgtagatgt

SEQ ID NO: 1033084 - DNA, 25 bp, Homo sapien
ggaaatggagacggtcatccctgta

SEQ ID NO: 1033085 - DNA, 25 bp, Homo sapien
tggtcatcctggctaaaggagcaga

SEQ ID NO: 1033086 - DNA, 25 bp, Homo sapien
tctgctcctttagccaggatgacca

SEQ ID NO: 1033087 - DNA, 25 bp, Homo sapien
ctacagggatgaccgtctccatttc

SEQ ID NO: 1033088 - DNA, 25 bp, Homo sapien
tacagggatgaccgtctccatttcc

SEQ ID NO: 1033089 - DNA, 25 bp, Homo sapien
atctacagggatgaccgtctccatt

SEQ ID NO: 1033090 - DNA, 25 bp, Homo sapien
tctacagggatgaccgtctccattt

SEQ ID NO: 1033091 - DNA, 25 bp, Homo sapien
acatctacagggatgaccgtctcca

SEQ ID NO: 1033092 - DNA, 25 bp, Homo sapien
catctacagggatgaccgtctccat

SEQ ID NO: 1033093 - DNA, 25 bp, Homo sapien
ccctgtagatgtcatgaggcgagct

SEQ ID NO: 1033094 - DNA, 25 bp, Homo sapien
gacggtcatccctgtagatgtcatg

SEQ ID NO: 1033095 - DNA, 25 bp, Homo sapien
atggcttccaaaagagctctggtca

SEQ ID NO: 1033096 - DNA, 25 bp, Homo sapien
tggtcatcctggctaaaggagcaga

SEQ ID NO: 1033097 - DNA, 25 bp, Homo sapien
gaaatggagacggtcatccctgtag

SEQ ID NO: 1033098 - DNA, 25 bp, Homo sapien
tggagacggtcatccctgtagatgt

SEQ ID NO: 1033099 - DNA, 25 bp, Homo sapien
tctgctcctttagccaggatgacca

SEQ ID NO: 1033100 - DNA, 25 bp, Homo sapien
tctacagggatgaccgtctccattt

SEQ ID NO: 1033101 - DNA, 25 bp, Homo sapien
catgacatctacagggatgaccgtc

SEQ ID NO: 1033102 - DNA, 25 bp, Homo sapien
acatctacagggatgaccgtctcca

SEQ ID NO: 1033103 - DNA, 25 bp, Homo sapien
tgaccagagctcttttggaagccat

SEQ ID NO: 1033104 - DNA, 25 bp, Homo sapien
agctcgcctcatgacatctacaggg

SEQ ID NO: 1033105 - DNA, 25 bp, Homo sapien
agtacagtgtagccgtgatgtggtc

SEQ ID NO: 1033106 - DNA, 25 bp, Homo sapien
acagtgtagccgtgatgtggtcatt

SEQ ID NO: 1033107 - DNA, 25 bp, Homo sapien
cagtacagtgtagccgtgatgtggt

SEQ ID NO: 1033108 - DNA, 25 bp, Homo sapien
tacagtgtagccgtgatgtggtcat

SEQ ID NO: 1033109 - DNA, 25 bp, Homo sapien
gtacagtgtagccgtgatgtggtca

SEQ ID NO: 1033110 - DNA, 25 bp, Homo sapien
cagtgtagccgtgatgtggtcattt

SEQ ID NO: 1033111 - DNA, 25 bp, Homo sapien
aatgaccacatcacggctacactgt

SEQ ID NO: 1033112 - DNA, 25 bp, Homo sapien
gaccacatcacggctacactgtact

SEQ ID NO: 1033113 - DNA, 25 bp, Homo sapien
atgaccacatcacggctacactgta

SEQ ID NO: 1033114 - DNA, 25 bp, Homo sapien
aaatgaccacatcacggctacactg

SEQ ID NO: 1033115 - DNA, 25 bp, Homo sapien
tgaccacatcacggctacactgtac

SEQ ID NO: 1033116 - DNA, 25 bp, Homo sapien
accacatcacggctacactgtactg

SEQ ID NO: 1033117 - DNA, 25 bp, Homo sapien
ctgctactctgcagcgtggacatcc

SEQ ID NO: 1033118 - DNA, 25 bp, Homo sapien
gaaggagattatactacccctgcta

SEQ ID NO: 1033119 - DNA, 25 bp, Homo sapien
cagcgtggacatccttgcatgtcac

SEQ ID NO: 1033120 - DNA, 25 bp, Homo sapien
tacccctgctactctgcagcgtgga

SEQ ID NO: 1033121 - DNA, 25 bp, Homo sapien
ttatactacccctgctactctgcag

SEQ ID NO: 1033122 - DNA, 25 bp, Homo sapien
ggagattatactacccctgctactc

SEQ ID NO: 1033123 - DNA, 25 bp, Homo sapien
gtgacatgcaaggatgtccacgctg

SEQ ID NO: 1033124 - DNA, 25 bp, Homo sapien
agtgacatgcaaggatgtccacgct

SEQ ID NO: 1033125 - DNA, 25 bp, Homo sapien
ggatgtccacgctgcagagtagcag

SEQ ID NO: 1033126 - DNA, 25 bp, Homo sapien
tagcaggggtagtataatctccttc

SEQ ID NO: 1033127 - DNA, 25 bp, Homo sapien
atgtccacgctgcagagtagcaggg

SEQ ID NO: 1033128 - DNA, 25 bp, Homo sapien
gatgtccacgctgcagagtagcagg

SEQ ID NO: 1033129 - DNA, 25 bp, Homo sapien
tctgggcgcacagaatttatctgag

SEQ ID NO: 1033130 - DNA, 25 bp, Homo sapien
gaccatatgatgtggtggttctacc

SEQ ID NO: 1033131 - DNA, 25 bp, Homo sapien
tatgatgtggtggttctaccaggag

SEQ ID NO: 1033132 - DNA, 25 bp, Homo sapien
caggaggtaatctgggcgcacagaa

SEQ ID NO: 1033133 - DNA, 25 bp, Homo sapien
tctaccaggaggtaatctgggcgca

SEQ ID NO: 1033134 - DNA, 25 bp, Homo sapien
catatgatgtggtggttctaccagg

SEQ ID NO: 1033135 - DNA, 25 bp, Homo sapien
gattacctcctggtagaaccaccac

SEQ ID NO: 1033136 - DNA, 25 bp, Homo sapien
tgtgcgcccagattacctcctggta

SEQ ID NO: 1033137 - DNA, 25 bp, Homo sapien
tcagataaattctgtgcgcccagat

SEQ ID NO: 1033138 - DNA, 25 bp, Homo sapien
ggtagaaccaccacatcatatggtc

SEQ ID NO: 1033139 - DNA, 25 bp, Homo sapien
ctcctggtagaaccaccacatcata

SEQ ID NO: 1033140 - DNA, 25 bp, Homo sapien
ctggtagaaccaccacatcatatgg

SEQ ID NO: 1033141 - DNA, 25 bp, Homo sapien
ggaagggcctgatagccgccatctg

SEQ ID NO: 1033142 - DNA, 25 bp, Homo sapien
ccggaagggcctgatagccgccatc

SEQ ID NO: 1033143 - DNA, 25 bp, Homo sapien
gaagggcctgatagccgccatctgt

SEQ ID NO: 1033144 - DNA, 25 bp, Homo sapien
cggaagggcctgatagccgccatct

SEQ ID NO: 1033145 - DNA, 25 bp, Homo sapien
aagggcctgatagccgccatctgtg

SEQ ID NO: 1033146 - DNA, 25 bp, Homo sapien
ggcctgatagccgccatctgtgcag

SEQ ID NO: 1033147 - DNA, 25 bp, Homo sapien
cacagatggcggctatcaggccctt

SEQ ID NO: 1033148 - DNA, 25 bp, Homo sapien
cagatggcggctatcaggcccttcc

SEQ ID NO: 1033149 - DNA, 25 bp, Homo sapien
acagatggcggctatcaggcccttc

SEQ ID NO: 1033150 - DNA, 25 bp, Homo sapien
agatggcggctatcaggcccttccg

SEQ ID NO: 1033151 - DNA, 25 bp, Homo sapien
gatggcggctatcaggcccttccgg

SEQ ID NO: 1033152 - DNA, 25 bp, Homo sapien
ctgcacagatggcggctatcaggcc

SEQ ID NO: 1033153 - DNA, 25 bp, Homo sapien
tcataaagcatgcagggcatctgtg

SEQ ID NO: 1033154 - DNA, 25 bp, Homo sapien
ttaaatatttgtcagggccgggcgc

SEQ ID NO: 1033155 - DNA, 25 bp, Homo sapien
tcagtaccgagtgatcttgggcacc

SEQ ID NO: 1033156 - DNA, 25 bp, Homo sapien
taaggccctctggaattcagtaaac

SEQ ID NO: 1033157 - DNA, 25 bp, Homo sapien
caaggacatttggtgcttcgcagat

SEQ ID NO: 1033158 - DNA, 25 bp, Homo sapien
tggtgctttccgctggcttctcggg

SEQ ID NO: 1033159 - DNA, 25 bp, Homo sapien
gcgcccggccctgacaaatatttaa

SEQ ID NO: 1033160 - DNA, 25 bp, Homo sapien
tgagacaatcagaaacgcccgagaa

SEQ ID NO: 1033161 - DNA, 25 bp, Homo sapien
taaggtacaaagagaagaggacatc

SEQ ID NO: 1033162 - DNA, 25 bp, Homo sapien
caagatcactcggtactgagacaat

SEQ ID NO: 1033163 - DNA, 25 bp, Homo sapien
gctgtttactgaattccagagggcc

SEQ ID NO: 1033164 - DNA, 25 bp, Homo sapien
gcagataatgcggtgcccaagatca

SEQ ID NO: 1033165 - DNA, 25 bp, Homo sapien
gcacttgcaaggtcaaagcagatgc

SEQ ID NO: 1033166 - DNA, 25 bp, Homo sapien
tcaaaagaagttatgggccagaggt

SEQ ID NO: 1033167 - DNA, 25 bp, Homo sapien
gggacttgatacattcgagtatcag

SEQ ID NO: 1033168 - DNA, 25 bp, Homo sapien
gcagagtgacaccatgtctttcaaa

SEQ ID NO: 1033169 - DNA, 25 bp, Homo sapien
tacattcgagtatcagtggttctca

SEQ ID NO: 1033170 - DNA, 25 bp, Homo sapien
tttggtgcacttgcaaggtcaaagc

SEQ ID NO: 1033171 - DNA, 25 bp, Homo sapien
tttgaaagacatggtgtcactctgc

SEQ ID NO: 1033172 - DNA, 25 bp, Homo sapien
gcatctgctttgaccttgcaagtgc

SEQ ID NO: 1033173 - DNA, 25 bp, Homo sapien
tgatactcgaatgtatcaagtcccc

SEQ ID NO: 1033174 - DNA, 25 bp, Homo sapien
acctctggcccataacttcttttga

SEQ ID NO: 1033175 - DNA, 25 bp, Homo sapien
tgagaaccactgatactcgaatgta

SEQ ID NO: 1033176 - DNA, 25 bp, Homo sapien
gctttgaccttgcaagtgcaccaaa

SEQ ID NO: 1033177 - DNA, 25 bp, Homo sapien
catgtcagtttgtcctgtgccacaa

SEQ ID NO: 1033178 - DNA, 25 bp, Homo sapien
cacatgtcagtttgtcctgtgccac

SEQ ID NO: 1033179 - DNA, 25 bp, Homo sapien
aaagtaaaaaccacatgtcagtttg

SEQ ID NO: 1033180 - DNA, 25 bp, Homo sapien
tgtcagtttgtcctgtgccacaaaa

SEQ ID NO: 1033181 - DNA, 25 bp, Homo sapien
aaccacatgtcagtttgtcctgtgc

SEQ ID NO: 1033182 - DNA, 25 bp, Homo sapien
aaaaaccacatgtcagtttgtcctg

SEQ ID NO: 1033183 - DNA, 25 bp, Homo sapien
cctggcaggtcttgtacgtgggctt

SEQ ID NO: 1033184 - DNA, 25 bp, Homo sapien
cgtgggcttactacaagagtcacca

SEQ ID NO: 1033185 - DNA, 25 bp, Homo sapien
gaaagtcacagatccttgagtttgg

SEQ ID NO: 1033186 - DNA, 25 bp, Homo sapien
gagtcaccactagccttttgacctg

SEQ ID NO: 1033187 - DNA, 25 bp, Homo sapien
caagcctcagtcctagattctttga

SEQ ID NO: 1033188 - DNA, 25 bp, Homo sapien
ctgccctgaggctcaggtaattatc

SEQ ID NO: 1033189 - DNA, 25 bp, Homo sapien
gataattacctgagcctcagggcag

SEQ ID NO: 1033190 - DNA, 25 bp, Homo sapien
tagtaagcccacgtacaagacctgc

SEQ ID NO: 1033191 - DNA, 25 bp, Homo sapien
aaaaccaaactcaaggatctgtgac

SEQ ID NO: 1033192 - DNA, 25 bp, Homo sapien
tggtgactcttgtagtaagcccacg

SEQ ID NO: 1033193 - DNA, 25 bp, Homo sapien
caggtcaaaaggctagtggtgactc

SEQ ID NO: 1033194 - DNA, 25 bp, Homo sapien
tcaaagaatctaggactgaggcttg

SEQ ID NO: 1033195 - DNA, 25 bp, Homo sapien
ttttgtggcacaggacaaactgaca

SEQ ID NO: 1033196 - DNA, 25 bp, Homo sapien
gcacaggacaaactgacatgtggtt

SEQ ID NO: 1033197 - DNA, 25 bp, Homo sapien
tgtggcacaggacaaactgacatgt

SEQ ID NO: 1033198 - DNA, 25 bp, Homo sapien
caaactgacatgtggtttttacttt

SEQ ID NO: 1033199 - DNA, 25 bp, Homo sapien
tggcacaggacaaactgacatgtgg

SEQ ID NO: 1033200 - DNA, 25 bp, Homo sapien
ttgtggcacaggacaaactgacatg

SEQ ID NO: 1033201 - DNA, 25 bp, Homo sapien
agttacaacacaccctcttgctaaa

SEQ ID NO: 1033202 - DNA, 25 bp, Homo sapien
ctcatgaaataggttttggaagtaa

SEQ ID NO: 1033203 - DNA, 25 bp, Homo sapien
gttacaacacaccctcttgctaaag

SEQ ID NO: 1033204 - DNA, 25 bp, Homo sapien
tcatgaaataggttttggaagtaaa

SEQ ID NO: 1033205 - DNA, 25 bp, Homo sapien
tttacttccaaaacctatttcatga

SEQ ID NO: 1033206 - DNA, 25 bp, Homo sapien
tttagcaagagggtgtgttgtaact

SEQ ID NO: 1033207 - DNA, 25 bp, Homo sapien
ttacttccaaaacctatttcatgag

SEQ ID NO: 1033208 - DNA, 25 bp, Homo sapien
ctttagcaagagggtgtgttgtaac

SEQ ID NO: 1033209 - DNA, 25 bp, Homo sapien
gctaaagacaaaatgatgaatggag

SEQ ID NO: 1033210 - DNA, 25 bp, Homo sapien
agtaaagttacaacacaccctcttg

SEQ ID NO: 1033211 - DNA, 25 bp, Homo sapien
agttacaacacaccctcttgctaaa

SEQ ID NO: 1033212 - DNA, 25 bp, Homo sapien
ctcatgaaataggttttggaagtaa

SEQ ID NO: 1033213 - DNA, 25 bp, Homo sapien
tactgctctgttggctcatgaaata

SEQ ID NO: 1033214 - DNA, 25 bp, Homo sapien
aacacaccctcttgctaaagacaaa

SEQ ID NO: 1033215 - DNA, 25 bp, Homo sapien
tttagcaagagggtgtgttgtaact

SEQ ID NO: 1033216 - DNA, 25 bp, Homo sapien
tcattttgtctttagcaagagggtg

SEQ ID NO: 1033217 - DNA, 25 bp, Homo sapien
aacctatttcatgagccaacagagc

SEQ ID NO: 1033218 - DNA, 25 bp, Homo sapien
tatttcatgagccaacagagcagta

SEQ ID NO: 1033219 - DNA, 25 bp, Homo sapien
ttacttccaaaacctatttcatgag

SEQ ID NO: 1033220 - DNA, 25 bp, Homo sapien
tccattcatcattttgtctttagca

SEQ ID NO: 1033221 - DNA, 25 bp, Homo sapien
gttgcccaagcagtacttaaactcc

SEQ ID NO: 1033222 - DNA, 25 bp, Homo sapien
ttgcccaagcagtacttaaactcct

SEQ ID NO: 1033223 - DNA, 25 bp, Homo sapien
ctatgttgcccaagcagtacttaaa

SEQ ID NO: 1033224 - DNA, 25 bp, Homo sapien
gcccaagcagtacttaaactcctgg

SEQ ID NO: 1033225 - DNA, 25 bp, Homo sapien
ccaagcagtacttaaactcctgggc

SEQ ID NO: 1033226 - DNA, 25 bp, Homo sapien
tatgttgcccaagcagtacttaaac

SEQ ID NO: 1033227 - DNA, 25 bp, Homo sapien
aggagtttaagtactgcttgggcaa

SEQ ID NO: 1033228 - DNA, 25 bp, Homo sapien
ggagtttaagtactgcttgggcaac

SEQ ID NO: 1033229 - DNA, 25 bp, Homo sapien
ccaggagtttaagtactgcttgggc

SEQ ID NO: 1033230 - DNA, 25 bp, Homo sapien
caggagtttaagtactgcttgggca

SEQ ID NO: 1033231 - DNA, 25 bp, Homo sapien
tttaagtactgcttgggcaacatag

SEQ ID NO: 1033232 - DNA, 25 bp, Homo sapien
gcccaggagtttaagtactgcttgg

SEQ ID NO: 1033233 - DNA, 25 bp, Homo sapien
gatgtcaccttttctgtttctactt

SEQ ID NO: 1033234 - DNA, 25 bp, Homo sapien
tcaccttttctgtttctactttgca

SEQ ID NO: 1033235 - DNA, 25 bp, Homo sapien
gtcaccttttctgtttctactttgc

SEQ ID NO: 1033236 - DNA, 25 bp, Homo sapien
caccttttctgtttctactttgcag

SEQ ID NO: 1033237 - DNA, 25 bp, Homo sapien
atgtcaccttttctgtttctacttt

SEQ ID NO: 1033238 - DNA, 25 bp, Homo sapien
tgtcaccttttctgtttctactttg

SEQ ID NO: 1033239 - DNA, 25 bp, Homo sapien
caaagtagaaacagaaaaggtgaca

SEQ ID NO: 1033240 - DNA, 25 bp, Homo sapien
ctgcaaagtagaaacagaaaaggtg

SEQ ID NO: 1033241 - DNA, 25 bp, Homo sapien
aagtagaaacagaaaaggtgacatc

SEQ ID NO: 1033242 - DNA, 25 bp, Homo sapien
aaagtagaaacagaaaaggtgacat

SEQ ID NO: 1033243 - DNA, 25 bp, Homo sapien
tgcaaagtagaaacagaaaaggtga

SEQ ID NO: 1033244 - DNA, 25 bp, Homo sapien
gcaaagtagaaacagaaaaggtgac

SEQ ID NO: 1033245 - DNA, 25 bp, Homo sapien
cgagtttgcgcttgcaattgttgaa

SEQ ID NO: 1033246 - DNA, 25 bp, Homo sapien
tttgcgcttgcaattgttgaagccc

SEQ ID NO: 1033247 - DNA, 25 bp, Homo sapien
tgattcttacaagccgggggcctgg

SEQ ID NO: 1033248 - DNA, 25 bp, Homo sapien
cagcttcgagtttgcgcttgcaatt

SEQ ID NO: 1033249 - DNA, 25 bp, Homo sapien
cgtgtggaaaaagacggcctgattc

SEQ ID NO: 1033250 - DNA, 25 bp, Homo sapien
gacggcctgattcttacaagccggg

SEQ ID NO: 1033251 - DNA, 25 bp, Homo sapien
tacacctactctgagaatcgtgtgg

SEQ ID NO: 1033252 - DNA, 25 bp, Homo sapien
acctactctgagaatcgtgtggaaa

SEQ ID NO: 1033253 - DNA, 25 bp, Homo sapien
ttacacctactctgagaatcgtgtg

SEQ ID NO: 1033254 - DNA, 25 bp, Homo sapien
acacctactctgagaatcgtgtgga

SEQ ID NO: 1033255 - DNA, 25 bp, Homo sapien
cacctactctgagaatcgtgtggaa

SEQ ID NO: 1033256 - DNA, 25 bp, Homo sapien
cctactctgagaatcgtgtggaaaa

SEQ ID NO: 1033257 - DNA, 25 bp, Homo sapien
ttccacacgattctcagagtaggtg

SEQ ID NO: 1033258 - DNA, 25 bp, Homo sapien
ccacacgattctcagagtaggtgta

SEQ ID NO: 1033259 - DNA, 25 bp, Homo sapien
tccacacgattctcagagtaggtgt

SEQ ID NO: 1033260 - DNA, 25 bp, Homo sapien
cacacgattctcagagtaggtgtaa

SEQ ID NO: 1033261 - DNA, 25 bp, Homo sapien
tttccacacgattctcagagtaggt

SEQ ID NO: 1033262 - DNA, 25 bp, Homo sapien
ttttccacacgattctcagagtagg

SEQ ID NO: 1033263 - DNA, 25 bp, Homo sapien
caggcccccggcttgtaagaatcag

SEQ ID NO: 1033264 - DNA, 25 bp, Homo sapien
aattgcaagcgcaaactcgaagctg

SEQ ID NO: 1033265 - DNA, 25 bp, Homo sapien
gaatcaggccgtctttttccacacg

SEQ ID NO: 1033266 - DNA, 25 bp, Homo sapien
gggcttcaacaattgcaagcgcaaa

SEQ ID NO: 1033267 - DNA, 25 bp, Homo sapien
cccggcttgtaagaatcaggccgtc

SEQ ID NO: 1033268 - DNA, 25 bp, Homo sapien
ttcaacaattgcaagcgcaaactcg

SEQ ID NO: 1033269 - DNA, 25 bp, Homo sapien
tttctcagcctacaaattgtgtcta

SEQ ID NO: 1033270 - DNA, 25 bp, Homo sapien
cttactacttttgcggaagtatgga

SEQ ID NO: 1033271 - DNA, 25 bp, Homo sapien
tcagaagtcgctgtccttactactt

SEQ ID NO: 1033272 - DNA, 25 bp, Homo sapien
caaattgtgtctatacatttctaag

SEQ ID NO: 1033273 - DNA, 25 bp, Homo sapien
tactacttttgcggaagtatggaag

SEQ ID NO: 1033274 - DNA, 25 bp, Homo sapien
ttactacttttgcggaagtatggaa

SEQ ID NO: 1033275 - DNA, 25 bp, Homo sapien
aggaatccattctcactgtgttcgc

SEQ ID NO: 1033276 - DNA, 25 bp, Homo sapien
aatccattctcactgtgttcgctct

SEQ ID NO: 1033277 - DNA, 25 bp, Homo sapien
gaatccattctcactgtgttcgctc

SEQ ID NO: 1033278 - DNA, 25 bp, Homo sapien
atccattctcactgtgttcgctcta

SEQ ID NO: 1033279 - DNA, 25 bp, Homo sapien
taggaatccattctcactgtgttcg

SEQ ID NO: 1033280 - DNA, 25 bp, Homo sapien
ggaatccattctcactgtgttcgct

SEQ ID NO: 1033281 - DNA, 25 bp, Homo sapien
gcgaacacagtgagaatggattcct

SEQ ID NO: 1033282 - DNA, 25 bp, Homo sapien
agcgaacacagtgagaatggattcc

SEQ ID NO: 1033283 - DNA, 25 bp, Homo sapien
cgaacacagtgagaatggattccta

SEQ ID NO: 1033284 - DNA, 25 bp, Homo sapien
gaacacagtgagaatggattcctaa

SEQ ID NO: 1033285 - DNA, 25 bp, Homo sapien
gagcgaacacagtgagaatggattc

SEQ ID NO: 1033286 - DNA, 25 bp, Homo sapien
tagagcgaacacagtgagaatggat

SEQ ID NO: 1033287 - DNA, 25 bp, Homo sapien
ttccatacttccgcaaaagtagtaa

SEQ ID NO: 1033288 - DNA, 25 bp, Homo sapien
cttagaaatgtatagacacaatttg

SEQ ID NO: 1033289 - DNA, 25 bp, Homo sapien
tagacacaatttgtaggctgagaaa

SEQ ID NO: 1033290 - DNA, 25 bp, Homo sapien
tccatacttccgcaaaagtagtaag

SEQ ID NO: 1033291 - DNA, 25 bp, Homo sapien
cttccatacttccgcaaaagtagta

SEQ ID NO: 1033292 - DNA, 25 bp, Homo sapien
aagtagtaaggacagcgacttctga

SEQ ID NO: 1033293 - DNA, 25 bp, Homo sapien
tgaaattaaattccgtatcaccttc

SEQ ID NO: 1033294 - DNA, 25 bp, Homo sapien
tgtgaaattaaattccgtatcacct

SEQ ID NO: 1033295 - DNA, 25 bp, Homo sapien
ttgtgaaattaaattccgtatcacc

SEQ ID NO: 1033296 - DNA, 25 bp, Homo sapien
tgttttgtctctcatttcttttgtg

SEQ ID NO: 1033297 - DNA, 25 bp, Homo sapien
tgtttcttgttttgtctctcatttc

SEQ ID NO: 1033298 - DNA, 25 bp, Homo sapien
gaaattaaattccgtatcaccttca

SEQ ID NO: 1033299 - DNA, 25 bp, Homo sapien
gaaggtgatacggaatttaatttca

SEQ ID NO: 1033300 - DNA, 25 bp, Homo sapien
taatttcacaaaagaaatgagagac

SEQ ID NO: 1033301 - DNA, 25 bp, Homo sapien
caaaagaaatgagagacaaaacaag

SEQ ID NO: 1033302 - DNA, 25 bp, Homo sapien
ggtgatacggaatttaatttcacaa

SEQ ID NO: 1033303 - DNA, 25 bp, Homo sapien
tgaaggtgatacggaatttaatttc

SEQ ID NO: 1033304 - DNA, 25 bp, Homo sapien
gaaatgagagacaaaacaagaaaca

SEQ ID NO: 1033305 - DNA, 25 bp, Homo sapien
aataaaagaacagtgaccacatttt

SEQ ID NO: 1033306 - DNA, 25 bp, Homo sapien
agaacagtgaccacattttacacag

SEQ ID NO: 1033307 - DNA, 25 bp, Homo sapien
gcaaggaggaaaggcatacaaacag

SEQ ID NO: 1033308 - DNA, 25 bp, Homo sapien
ctcttaactgtccatatggcactga

SEQ ID NO: 1033309 - DNA, 25 bp, Homo sapien
gcagctcttaactgtccatatggca

SEQ ID NO: 1033310 - DNA, 25 bp, Homo sapien
acagaatttaagaggcttgtgattt

SEQ ID NO: 1033311 - DNA, 25 bp, Homo sapien
aaatcacaagcctcttaaattctgt

SEQ ID NO: 1033312 - DNA, 25 bp, Homo sapien
tgtttgtatgcctttcctccttgct

SEQ ID NO: 1033313 - DNA, 25 bp, Homo sapien
ctgtgtaaaatgtggtcactgttct

SEQ ID NO: 1033314 - DNA, 25 bp, Homo sapien
tcagtgccatatggacagttaagag

SEQ ID NO: 1033315 - DNA, 25 bp, Homo sapien
tgccatatggacagttaagagctgc

SEQ ID NO: 1033316 - DNA, 25 bp, Homo sapien
catatggacagttaagagctgcaaa

SEQ ID NO: 1033317 - DNA, 25 bp, Homo sapien
ggtcacacggccagtggtaaacagg

SEQ ID NO: 1033318 - DNA, 25 bp, Homo sapien
gggtcacacggccagtggtaaacag

SEQ ID NO: 1033319 - DNA, 25 bp, Homo sapien
ctgggtcacacggccagtggtaaac

SEQ ID NO: 1033320 - DNA, 25 bp, Homo sapien
gtcacacggccagtggtaaacaggg

SEQ ID NO: 1033321 - DNA, 25 bp, Homo sapien
tgattctaggtctgaaaggtttcct

SEQ ID NO: 1033322 - DNA, 25 bp, Homo sapien
aatttgatagcctgattttgaggat

SEQ ID NO: 1033323 - DNA, 25 bp, Homo sapien
tccataactgattctaggtctgaaa

SEQ ID NO: 1033324 - DNA, 25 bp, Homo sapien
agcctgattttgaggatatgttttc

SEQ ID NO: 1033325 - DNA, 25 bp, Homo sapien
taattctgtccttgcctaatcccca

SEQ ID NO: 1033326 - DNA, 25 bp, Homo sapien
tacatcagtgtgtacgaagacaagt

SEQ ID NO: 1033327 - DNA, 25 bp, Homo sapien
aagaggtgttaccatccacccggcg

SEQ ID NO: 1033328 - DNA, 25 bp, Homo sapien
cacccggcgtgcattataattctgt

SEQ ID NO: 1033329 - DNA, 25 bp, Homo sapien
ttagtacaggcagaaaactacctgg

SEQ ID NO: 1033330 - DNA, 25 bp, Homo sapien
gatcagccctagaaccatgagacct

SEQ ID NO: 1033331 - DNA, 25 bp, Homo sapien
ggcaaggaagtcactgtcaccgaga

SEQ ID NO: 1033332 - DNA, 25 bp, Homo sapien
tgtctcacgtgatggaagctggctg

SEQ ID NO: 1033333 - DNA, 25 bp, Homo sapien
gagtgaatcgtgtctttctggcccg

SEQ ID NO: 1033334 - DNA, 25 bp, Homo sapien
aggagcctctaattacacgtctggt

SEQ ID NO: 1033335 - DNA, 25 bp, Homo sapien
aaaagttcttggctgggcagaagcc

SEQ ID NO: 1033336 - DNA, 25 bp, Homo sapien
ggctcagacgcgtgataagacttgt

SEQ ID NO: 1033337 - DNA, 25 bp, Homo sapien
aagttccagatcacgcaggcccgtg

SEQ ID NO: 1033338 - DNA, 25 bp, Homo sapien
gaagacttaatggacagaggctact

SEQ ID NO: 1033339 - DNA, 25 bp, Homo sapien
tgcactgtcatgacgcactgcctga

SEQ ID NO: 1033340 - DNA, 25 bp, Homo sapien
tgggtgccactgaaagatcctaagc

SEQ ID NO: 1033341 - DNA, 25 bp, Homo sapien
gaagtagctcatcgtagtgcgggcc

SEQ ID NO: 1033342 - DNA, 25 bp, Homo sapien
caggcaatcttttccatggagggca

SEQ ID NO: 1033343 - DNA, 25 bp, Homo sapien
tataaccatagaccatagctgcagg

SEQ ID NO: 1033344 - DNA, 25 bp, Homo sapien
caagagaacctttgtcaccgagtaa

SEQ ID NO: 1033345 - DNA, 25 bp, Homo sapien
cgaagcttccgtgggtgtggacaaa

SEQ ID NO: 1033346 - DNA, 25 bp, Homo sapien
tgcatattttgataccccagctgtt

SEQ ID NO: 1033347 - DNA, 25 bp, Homo sapien
ggtggaattcctaactagctcagat

SEQ ID NO: 1033348 - DNA, 25 bp, Homo sapien
tcaaatatgatgttcctggcaggcg

SEQ ID NO: 1033349 - DNA, 25 bp, Homo sapien
tctggatgagcgatcttcaaacgtg

SEQ ID NO: 1033350 - DNA, 25 bp, Homo sapien
cattgaaatttagaggcaggtcacc

SEQ ID NO: 1033351 - DNA, 25 bp, Homo sapien
ccaaggcaatttctgcagaggcgat

SEQ ID NO: 1033352 - DNA, 25 bp, Homo sapien
cccatgctagcaagtaggaagttcg

SEQ ID NO: 1033353 - DNA, 25 bp, Homo sapien
tgtcctcaagctaaaggcatatgat

SEQ ID NO: 1033354 - DNA, 25 bp, Homo sapien
tattattgggcagtcgcctcactcc

SEQ ID NO: 1033355 - DNA, 25 bp, Homo sapien
gaaagctacactgttaaccactgaa

SEQ ID NO: 1033356 - DNA, 25 bp, Homo sapien
catgaatgatgccaagatctacagg

SEQ ID NO: 1033357 - DNA, 25 bp, Homo sapien
cccgggatacgtccccgcagcaccg

SEQ ID NO: 1033358 - DNA, 25 bp, Homo sapien
cgcagcaccgggaccgcaggagcgg

SEQ ID NO: 1033359 - DNA, 25 bp, Homo sapien
caccgggaccgcaggagcggacggg

SEQ ID NO: 1033360 - DNA, 25 bp, Homo sapien
cgagcgcccgggatacgtccccgca

SEQ ID NO: 1033361 - DNA, 25 bp, Homo sapien
cgggcctggggacgccgcgaagtgc

SEQ ID NO: 1033362 - DNA, 25 bp, Homo sapien
cccctcggctggccggggccatgca

SEQ ID NO: 1033363 - DNA, 25 bp, Homo sapien
cgccttctccacgccggctgtggtc

SEQ ID NO: 1033364 - DNA, 25 bp, Homo sapien
ggctgtggtcgtcgcgcggcccctc

SEQ ID NO: 1033365 - DNA, 25 bp, Homo sapien
cggagacgcctctccgggagacaaa

SEQ ID NO: 1033366 - DNA, 25 bp, Homo sapien
tgcagcgccgcgatacgccacggtg

SEQ ID NO: 1033367 - DNA, 25 bp, Homo sapien
ggcccggcgcaacgcctcggccacg

SEQ ID NO: 1033368 - DNA, 25 bp, Homo sapien
tctccgggagacaaagccggctccc

SEQ ID NO: 1033369 - DNA, 25 bp, Homo sapien
ctcagttcgggcaggaacagcggcc

SEQ ID NO: 1033370 - DNA, 25 bp, Homo sapien
aaagctcggcgttgagaggctccca

SEQ ID NO: 1033371 - DNA, 25 bp, Homo sapien
gcttctgaggaaagctcggcgttga

SEQ ID NO: 1033372 - DNA, 25 bp, Homo sapien
gaaatcccgcgcgaagcgcgatgtg

SEQ ID NO: 1033373 - DNA, 25 bp, Homo sapien
atattccaacgcagtcagaggagcc

SEQ ID NO: 1033374 - DNA, 25 bp, Homo sapien
gggctcaacctcgagcaggaccttt

SEQ ID NO: 1033375 - DNA, 25 bp, Homo sapien
tggaaacccacagcgaccctgaagg

SEQ ID NO: 1033376 - DNA, 25 bp, Homo sapien
gccgcaagcccagtcgagagcggct

SEQ ID NO: 1033377 - DNA, 25 bp, Homo sapien
gcctctccaaagccaaaagacgtcg

SEQ ID NO: 1033378 - DNA, 25 bp, Homo sapien
tggcgccccgagaaacctcctccca

SEQ ID NO: 1033379 - DNA, 25 bp, Homo sapien
agacgtcggggccagctcaggtcgc

SEQ ID NO: 1033380 - DNA, 25 bp, Homo sapien
ctctccaaagccaaaagacgtcggg

SEQ ID NO: 1033381 - DNA, 25 bp, Homo sapien
ggctagaggtcagcgacaggtctct

SEQ ID NO: 1033382 - DNA, 25 bp, Homo sapien
gatcagtgtctaactatcaggcatt

SEQ ID NO: 1033383 - DNA, 25 bp, Homo sapien
taaactaccccaattagctagtgat

SEQ ID NO: 1033384 - DNA, 25 bp, Homo sapien
gataataaggccagaatctcattcc

SEQ ID NO: 1033385 - DNA, 25 bp, Homo sapien
tgaaagaagggcaagtgaaaagtga

SEQ ID NO: 1033386 - DNA, 25 bp, Homo sapien
aaagaagggcaagtgaaaagtgaca

SEQ ID NO: 1033387 - DNA, 25 bp, Homo sapien
ctgaaagaagggcaagtgaaaagtg

SEQ ID NO: 1033388 - DNA, 25 bp, Homo sapien
gaaagaagggcaagtgaaaagtgac

SEQ ID NO: 1033389 - DNA, 25 bp, Homo sapien
tttctgagccagaacctcacccttg

SEQ ID NO: 1033390 - DNA, 25 bp, Homo sapien
cacgacttgtggcatttctttgaga

SEQ ID NO: 1033391 - DNA, 25 bp, Homo sapien
tgttctcactccaaagacagcttct

SEQ ID NO: 1033392 - DNA, 25 bp, Homo sapien
agtgtctgtgattctaaggtttctg

SEQ ID NO: 1033393 - DNA, 25 bp, Homo sapien
ccaaaatgtatatgttcttctacag

SEQ ID NO: 1033394 - DNA, 25 bp, Homo sapien
accaaaatgtatatgttcttctaca

SEQ ID NO: 1033395 - DNA, 25 bp, Homo sapien
atttaataaggacctgtccagcatg

SEQ ID NO: 1033396 - DNA, 25 bp, Homo sapien
tataaatttaataaggacctgtcca

SEQ ID NO: 1033397 - DNA, 25 bp, Homo sapien
tacagtgaatttggcttcctcggac

SEQ ID NO: 1033398 - DNA, 25 bp, Homo sapien
cttcatttacagtgaatttggcttc

SEQ ID NO: 1033399 - DNA, 25 bp, Homo sapien
tcatttacagtgaatttggcttcct

SEQ ID NO: 1033400 - DNA, 25 bp, Homo sapien
cagtgaatttggcttcctcggacat

SEQ ID NO: 1033401 - DNA, 25 bp, Homo sapien
gtttcccaagctgactatagctcaa

SEQ ID NO: 1033402 - DNA, 25 bp, Homo sapien
ttttattggtattcctatggctgga

SEQ ID NO: 1033403 - DNA, 25 bp, Homo sapien
ctggactacattgtgagtataaaac

SEQ ID NO: 1033404 - DNA, 25 bp, Homo sapien
taatatgccatttgaaatagacttg

SEQ ID NO: 1033405 - DNA, 25 bp, Homo sapien
cctttatagttcaacatggcatgcc

SEQ ID NO: 1033406 - DNA, 25 bp, Homo sapien
tgccaagggttgaactgaaaactat

SEQ ID NO: 1033407 - DNA, 25 bp, Homo sapien
gaaaactattccagctgcatttacc

SEQ ID NO: 1033408 - DNA, 25 bp, Homo sapien
aattgccaaacagggccacggctcc

SEQ ID NO: 1033409 - DNA, 25 bp, Homo sapien
taacaagccataaatctgtactggt

SEQ ID NO: 1033410 - DNA, 25 bp, Homo sapien
tgttcacactgtaacccacgtattt

SEQ ID NO: 1033411 - DNA, 25 bp, Homo sapien
taacctttggtgttctgtatgaatg

SEQ ID NO: 1033412 - DNA, 25 bp, Homo sapien
ttatcattgagtgcgggaaaccatg

SEQ ID NO: 1033413 - DNA, 25 bp, Homo sapien
caggagggaccagttggtctccacc

SEQ ID NO: 1033414 - DNA, 25 bp, Homo sapien
aactggcaggagggaccagttggtc

SEQ ID NO: 1033415 - DNA, 25 bp, Homo sapien
tcaagatacgcaactggcaggaggg

SEQ ID NO: 1033416 - DNA, 25 bp, Homo sapien
gttcaagatacgcaactggcaggag

SEQ ID NO: 1033417 - DNA, 25 bp, Homo sapien
catcgtttttcttcatggagcagaa

SEQ ID NO: 1033418 - DNA, 25 bp, Homo sapien
tataacatcgtttttcttcatggag

SEQ ID NO: 1033419 - DNA, 25 bp, Homo sapien
ggatatataacatcgtttttcttca

SEQ ID NO: 1033420 - DNA, 25 bp, Homo sapien
aacatcgtttttcttcatggagcag

SEQ ID NO: 1033421 - DNA, 25 bp, Homo sapien
ttggtgatcaaaacaagtgtgtagc

SEQ ID NO: 1033422 - DNA, 25 bp, Homo sapien
gtgatcaaaacaagtgtgtagcaca

SEQ ID NO: 1033423 - DNA, 25 bp, Homo sapien
tatttggtgatcaaaacaagtgtgt

SEQ ID NO: 1033424 - DNA, 25 bp, Homo sapien
gtttatttggtgatcaaaacaagtg

SEQ ID NO: 1033425 - DNA, 25 bp, Homo sapien
tggaaatttgaagcaaccacagcca

SEQ ID NO: 1033426 - DNA, 25 bp, Homo sapien
gcttcccttgcaactggtccccatg

SEQ ID NO: 1033427 - DNA, 25 bp, Homo sapien
caactggtccccatgacctggaaat

SEQ ID NO: 1033428 - DNA, 25 bp, Homo sapien
cctggaaatttgaagcaaccacagc

SEQ ID NO: 1033429 - DNA, 25 bp, Homo sapien
tataggttccctatgctcatccaca

SEQ ID NO: 1033430 - DNA, 25 bp, Homo sapien
taaatataggttccctatgctcatc

SEQ ID NO: 1033431 - DNA, 25 bp, Homo sapien
cttaaatataggttccctatgctca

SEQ ID NO: 1033432 - DNA, 25 bp, Homo sapien
aatataggttccctatgctcatcca

SEQ ID NO: 1033433 - DNA, 25 bp, Homo sapien
ccagcatggtctgacttggttacta

SEQ ID NO: 1033434 - DNA, 25 bp, Homo sapien
ggttcacccaatatacattcaatag

SEQ ID NO: 1033435 - DNA, 25 bp, Homo sapien
tggttactatgacctacggatctcc

SEQ ID NO: 1033436 - DNA, 25 bp, Homo sapien
tataatcaacacctcagacagcatc

SEQ ID NO: 1033437 - DNA, 25 bp, Homo sapien
ggcaggcgcgtctggcatccagtgt

SEQ ID NO: 1033438 - DNA, 25 bp, Homo sapien
tgattccaaagcgtgcagcggtgtc

SEQ ID NO: 1033439 - DNA, 25 bp, Homo sapien
gtcattgccttctgtgattccaaag

SEQ ID NO: 1033440 - DNA, 25 bp, Homo sapien
ccagtgttacattctgtggtgtcat

SEQ ID NO: 1033441 - DNA, 25 bp, Homo sapien
tgtcatctgtatcgtcccacatgtg

SEQ ID NO: 1033442 - DNA, 25 bp, Homo sapien
gtgtcatctgtatcgtcccacatgt

SEQ ID NO: 1033443 - DNA, 25 bp, Homo sapien
gtcatctgtatcgtcccacatgtgg

SEQ ID NO: 1033444 - DNA, 25 bp, Homo sapien
tcatctgtatcgtcccacatgtggc

SEQ ID NO: 1033445 - DNA, 25 bp, Homo sapien
actgccatcgatcaacatgacattg

SEQ ID NO: 1033446 - DNA, 25 bp, Homo sapien
attgttctcgaagggctcgcagtgg

SEQ ID NO: 1033447 - DNA, 25 bp, Homo sapien
aacatgacattgttctcgaagggct

SEQ ID NO: 1033448 - DNA, 25 bp, Homo sapien
tcactgccatcgatcaacatgacat

SEQ ID NO: 1033449 - DNA, 25 bp, Homo sapien
ggaactatggcacggttttgctctc

SEQ ID NO: 1033450 - DNA, 25 bp, Homo sapien
accagtgctgtagccgcatgatccg

SEQ ID NO: 1033451 - DNA, 25 bp, Homo sapien
tctttgccctccttatggaactatg

SEQ ID NO: 1033452 - DNA, 25 bp, Homo sapien
atgatccgcctgttcctcagcgtgg

SEQ ID NO: 1033453 - DNA, 25 bp, Homo sapien
tatctgtaggaagcacaccctgaag

SEQ ID NO: 1033454 - DNA, 25 bp, Homo sapien
tctggctggcaactgactcttcact

SEQ ID NO: 1033455 - DNA, 25 bp, Homo sapien
gcccttcttaggagtttcccatgag

SEQ ID NO: 1033456 - DNA, 25 bp, Homo sapien
acagatagtaagtgggaggcacccc

SEQ ID NO: 1033457 - DNA, 25 bp, Homo sapien
cacactctggagctgattccaagag

SEQ ID NO: 1033458 - DNA, 25 bp, Homo sapien
cagtccagacctgcacactctggag

SEQ ID NO: 1033459 - DNA, 25 bp, Homo sapien
tccagacctgcacactctggagctg

SEQ ID NO: 1033460 - DNA, 25 bp, Homo sapien
gacctgcacactctggagctgattc

SEQ ID NO: 1033461 - DNA, 25 bp, Homo sapien
tgtgccttcagtggccattgttggc

SEQ ID NO: 1033462 - DNA, 25 bp, Homo sapien
cctcgtccaccacatagagcctttt

SEQ ID NO: 1033463 - DNA, 25 bp, Homo sapien
tgttctgaggcctggcggctccagt

SEQ ID NO: 1033464 - DNA, 25 bp, Homo sapien
gctccagtttccccgttcttgagtc

SEQ ID NO: 1033465 - DNA, 25 bp, Homo sapien
cggaggcgccggcaaaagcagctgc

SEQ ID NO: 1033466 - DNA, 25 bp, Homo sapien
ggaggcgccggcaaaagcagctgct

SEQ ID NO: 1033467 - DNA, 25 bp, Homo sapien
gcggaggcgccggcaaaagcagctg

SEQ ID NO: 1033468 - DNA, 25 bp, Homo sapien
aggctcccgagggatgtgcaggtgg

SEQ ID NO: 1033469 - DNA, 25 bp, Homo sapien
tgaggctcccgagggatgtgcaggt

SEQ ID NO: 1033470 - DNA, 25 bp, Homo sapien
gaggctcccgagggatgtgcaggtg

SEQ ID NO: 1033471 - DNA, 25 bp, Homo sapien
ggctcccgagggatgtgcaggtgga

SEQ ID NO: 1033472 - DNA, 25 bp, Homo sapien
ggacctcaatttccaacgtggtgag

SEQ ID NO: 1033473 - DNA, 25 bp, Homo sapien
agcatgcccagttcatcatggcttg

SEQ ID NO: 1033474 - DNA, 25 bp, Homo sapien
tctgctgatggcttcgtgaaaaagt

SEQ ID NO: 1033475 - DNA, 25 bp, Homo sapien
ttcgtgaaaaagtggaggcaagttg

SEQ ID NO: 1033476 - DNA, 25 bp, Homo sapien
ccctggaggtgcatgctgaaggtca

SEQ ID NO: 1033477 - DNA, 25 bp, Homo sapien
gactccctggaggtgcatgctgaag

SEQ ID NO: 1033478 - DNA, 25 bp, Homo sapien
aactacgataagactccctggaggt

SEQ ID NO: 1033479 - DNA, 25 bp, Homo sapien
ttttgttccaactacgataagactc

SEQ ID NO: 1033480 - DNA, 25 bp, Homo sapien
taaaacttaggcctcctgcgtcagc

SEQ ID NO: 1033481 - DNA, 25 bp, Homo sapien
aaagtcactccgcttgtgcaaaggt

SEQ ID NO: 1033482 - DNA, 25 bp, Homo sapien
cctgtaatcactgcgcatggaggcg

SEQ ID NO: 1033483 - DNA, 25 bp, Homo sapien
ccaggaaggagtgaatgggtcccac

SEQ ID NO: 1033484 - DNA, 25 bp, Homo sapien
tctccaggccgatgcgttgggatgc

SEQ ID NO: 1033485 - DNA, 25 bp, Homo sapien
ggcttctcgggcttttgtagtcatg

SEQ ID NO: 1033486 - DNA, 25 bp, Homo sapien
gttggccaccgaagcccaaggccaa

SEQ ID NO: 1033487 - DNA, 25 bp, Homo sapien
ccgatgcgttgggatgctgactttt

SEQ ID NO: 1033488 - DNA, 25 bp, Homo sapien
agaaaagccagattccacataaatc

SEQ ID NO: 1033489 - DNA, 25 bp, Homo sapien
aggaacgtcgatgctatcagaaaag

SEQ ID NO: 1033490 - DNA, 25 bp, Homo sapien
cacgggaaggaacgtcgatgctatc

SEQ ID NO: 1033491 - DNA, 25 bp, Homo sapien
aaacagactcagaaggcacgggaag

SEQ ID NO: 1033492 - DNA, 25 bp, Homo sapien
tccatggataagttcctccttgtcc

SEQ ID NO: 1033493 - DNA, 25 bp, Homo sapien
tgtccttcagtgtcctgttcaacac

SEQ ID NO: 1033494 - DNA, 25 bp, Homo sapien
ccttgtccttcagtgtcctgttcaa

SEQ ID NO: 1033495 - DNA, 25 bp, Homo sapien
ctaccccctccatggataagttcct

SEQ ID NO: 1033496 - DNA, 25 bp, Homo sapien
tccatagttactgggaaacaggtgg

SEQ ID NO: 1033497 - DNA, 25 bp, Homo sapien
ctcacagttctactcgttgtaaact

SEQ ID NO: 1033498 - DNA, 25 bp, Homo sapien
tctactcgttgtaaactggaaatgg

SEQ ID NO: 1033499 - DNA, 25 bp, Homo sapien
cagttctactcgttgtaaactggaa

SEQ ID NO: 1033500 - DNA, 25 bp, Homo sapien
ctcgttgtaaactggaaatggtcca

SEQ ID NO: 1033501 - DNA, 25 bp, Homo sapien
tgtttcagccctgaagtgtgcctga

SEQ ID NO: 1033502 - DNA, 25 bp, Homo sapien
catctctgggaaagttgtttcagcc

SEQ ID NO: 1033503 - DNA, 25 bp, Homo sapien
agattcctgcggactctgattccga

SEQ ID NO: 1033504 - DNA, 25 bp, Homo sapien
tgttccccatacgagtcacaggaat

SEQ ID NO: 1033505 - DNA, 25 bp, Homo sapien
gagcagatgaccgtgctcgaggatt

SEQ ID NO: 1033506 - DNA, 25 bp, Homo sapien
gcagatgaccgtgctcgaggattcc

SEQ ID NO: 1033507 - DNA, 25 bp, Homo sapien
agcagatgaccgtgctcgaggattc

SEQ ID NO: 1033508 - DNA, 25 bp, Homo sapien
cagatgaccgtgctcgaggattcca

SEQ ID NO: 1033509 - DNA, 25 bp, Homo sapien
ggcgagtcacccaatgctgcagaat

SEQ ID NO: 1033510 - DNA, 25 bp, Homo sapien
tccacccacagacgggtttgctgga

SEQ ID NO: 1033511 - DNA, 25 bp, Homo sapien
tgcagaatctcagcctcacactata

SEQ ID NO: 1033512 - DNA, 25 bp, Homo sapien
tggcttcagccaaatccgagtttct

SEQ ID NO: 1033513 - DNA, 25 bp, Homo sapien
cctgatgccacgtccacccatctac

SEQ ID NO: 1033514 - DNA, 25 bp, Homo sapien
tcctgatgccacgtccacccatcta

SEQ ID NO: 1033515 - DNA, 25 bp, Homo sapien
tgcaggtcctcctgatgccacgtcc

SEQ ID NO: 1033516 - DNA, 25 bp, Homo sapien
aggtcctcctgatgccacgtccacc

SEQ ID NO: 1033517 - DNA, 25 bp, Homo sapien
tctttgtcgctagctagggaggcat

SEQ ID NO: 1033518 - DNA, 25 bp, Homo sapien
tgttggcaaagcacagttaccagcc

SEQ ID NO: 1033519 - DNA, 25 bp, Homo sapien
tctgtttgggtctcagtgagcagcc

SEQ ID NO: 1033520 - DNA, 25 bp, Homo sapien
tagtaagtatctctcccctgtgacc

SEQ ID NO: 1033521 - DNA, 25 bp, Homo sapien
agagaccgccgtgctcttcgctgaa

SEQ ID NO: 1033522 - DNA, 25 bp, Homo sapien
cctttccagagaccgccgtgctctt

SEQ ID NO: 1033523 - DNA, 25 bp, Homo sapien
tgtacttgcttcagccaacatccgc

SEQ ID NO: 1033524 - DNA, 25 bp, Homo sapien
gccaacatccgccaggtcatgctgg

SEQ ID NO: 1033525 - DNA, 25 bp, Homo sapien
tcagaaaggagagacgcaaatgaac

SEQ ID NO: 1033526 - DNA, 25 bp, Homo sapien
caatgcagagttgctagtaaacttc

SEQ ID NO: 1033527 - DNA, 25 bp, Homo sapien
cactactacacgtgactagtcttaa

SEQ ID NO: 1033528 - DNA, 25 bp, Homo sapien
aaacttctaggattggtagctctac

SEQ ID NO: 1033529 - DNA, 25 bp, Homo sapien
tatgtccatctagcactttatcatt

SEQ ID NO: 1033530 - DNA, 25 bp, Homo sapien
ctatgtccatctagcactttatcat

SEQ ID NO: 1033531 - DNA, 25 bp, Homo sapien
tgtccatctagcactttatcatttg

SEQ ID NO: 1033532 - DNA, 25 bp, Homo sapien
tccatctagcactttatcatttgcc

SEQ ID NO: 1033533 - DNA, 25 bp, Homo sapien
gtcgctgccaactttccagcttaaa

SEQ ID NO: 1033534 - DNA, 25 bp, Homo sapien
aacgacgtcgctgccaactttccag

SEQ ID NO: 1033535 - DNA, 25 bp, Homo sapien
tcgaaacgacgtcgctgccaacttt

SEQ ID NO: 1033536 - DNA, 25 bp, Homo sapien
tcatttcgaaacgacgtcgctgcca

SEQ ID NO: 1033537 - DNA, 25 bp, Homo sapien
ggacaattaattgccacacactttc

SEQ ID NO: 1033538 - DNA, 25 bp, Homo sapien
tctttcaggtgctgggaactccttg

SEQ ID NO: 1033539 - DNA, 25 bp, Homo sapien
tgctttatacaatttccaaccttta

SEQ ID NO: 1033540 - DNA, 25 bp, Homo sapien
tgggaactccttggcaacacacgtt

SEQ ID NO: 1033541 - DNA, 25 bp, Homo sapien
ttttcggcttcactcgggctcggta

SEQ ID NO: 1033542 - DNA, 25 bp, Homo sapien
gatgaatccgcctcttacagcgcat

SEQ ID NO: 1033543 - DNA, 25 bp, Homo sapien
gctcggtatttcagcggccaacaga

SEQ ID NO: 1033544 - DNA, 25 bp, Homo sapien
cctacgccctttggtgttaatgaca

SEQ ID NO: 1033545 - DNA, 25 bp, Homo sapien
gggtggagacggcaggcatccctgt

SEQ ID NO: 1033546 - DNA, 25 bp, Homo sapien
ctgtgggtggagacggcaggcatcc

SEQ ID NO: 1033547 - DNA, 25 bp, Homo sapien
tgggtggagacggcaggcatccctg

SEQ ID NO: 1033548 - DNA, 25 bp, Homo sapien
gtgggtggagacggcaggcatccct

SEQ ID NO: 1033549 - DNA, 25 bp, Homo sapien
ccgagtagcccgtgacctgggacct

SEQ ID NO: 1033550 - DNA, 25 bp, Homo sapien
ctgggacctccagaagtcctgtggg

SEQ ID NO: 1033551 - DNA, 25 bp, Homo sapien
tccagaagtcctgtggggccacgct

SEQ ID NO: 1033552 - DNA, 25 bp, Homo sapien
gaagagggcatctcccggcggggtg

SEQ ID NO: 1033553 - DNA, 25 bp, Homo sapien
gggagggacgaatgcacttcctcct

SEQ ID NO: 1033554 - DNA, 25 bp, Homo sapien
tcgtttgaagttgttggcccggtga

SEQ ID NO: 1033555 - DNA, 25 bp, Homo sapien
cccggtgactgaggtgtcgtgtcac

SEQ ID NO: 1033556 - DNA, 25 bp, Homo sapien
cctcctcttggggtgtcgtttgaag

SEQ ID NO: 1033557 - DNA, 25 bp, Homo sapien
agctggtcgggcaggcccatctgca

SEQ ID NO: 1033558 - DNA, 25 bp, Homo sapien
gaactcgatgccaaagagaatgcag

SEQ ID NO: 1033559 - DNA, 25 bp, Homo sapien
gagaatgcagccgttgaaaagcagc

SEQ ID NO: 1033560 - DNA, 25 bp, Homo sapien
gtctccatggcgtagctgaactcga

SEQ ID NO: 1033561 - DNA, 25 bp, Homo sapien
ggtcactccaagcacccaacagagg

SEQ ID NO: 1033562 - DNA, 25 bp, Homo sapien
accttgaggtacaccggtcactcca

SEQ ID NO: 1033563 - DNA, 25 bp, Homo sapien
tccaaaccttgaggtacaccggtca

SEQ ID NO: 1033564 - DNA, 25 bp, Homo sapien
tgaggtacaccggtcactccaagca

SEQ ID NO: 1033565 - DNA, 25 bp, Homo sapien
gagtcggcgctaaagtccatcagca

SEQ ID NO: 1033566 - DNA, 25 bp, Homo sapien
ccggccattcagcaagagcgagagg

SEQ ID NO: 1033567 - DNA, 25 bp, Homo sapien
gtcagccagggcgatgccaatgtcc

SEQ ID NO: 1033568 - DNA, 25 bp, Homo sapien
gggctgcacacgtccatcatgtagg

SEQ ID NO: 1033569 - DNA, 25 bp, Homo sapien
aagtgcagcagtgagggttggggaa

SEQ ID NO: 1033570 - DNA, 25 bp, Homo sapien
actgactgtgggcaatcaatcgaga

SEQ ID NO: 1033571 - DNA, 25 bp, Homo sapien
tgtgggcaatcaatcgagataactc

SEQ ID NO: 1033572 - DNA, 25 bp, Homo sapien
gcagcagtgagggttggggaaagag

SEQ ID NO: 1033573 - DNA, 25 bp, Homo sapien
gtttgagttcccttctgcgggagga

SEQ ID NO: 1033574 - DNA, 25 bp, Homo sapien
gagacagggtttgagttcccttctg

SEQ ID NO: 1033575 - DNA, 25 bp, Homo sapien
tgagttcccttctgcgggaggagaa

SEQ ID NO: 1033576 - DNA, 25 bp, Homo sapien
cagggtttgagttcccttctgcggg

SEQ ID NO: 1033577 - DNA, 25 bp, Homo sapien
agaagtccacggtcctggcggtaga

SEQ ID NO: 1033578 - DNA, 25 bp, Homo sapien
gttttatcccagtggattccgccga

SEQ ID NO: 1033579 - DNA, 25 bp, Homo sapien
gacgctgtctatgttggccgtgcca

SEQ ID NO: 1033580 - DNA, 25 bp, Homo sapien
tgccaaaggatgaggcgaactcgct

SEQ ID NO: 1033581 - DNA, 25 bp, Homo sapien
gatgacctcggcttagaggtgtcca

SEQ ID NO: 1033582 - DNA, 25 bp, Homo sapien
gctgcgtccgggatggccaaggtct

SEQ ID NO: 1033583 - DNA, 25 bp, Homo sapien
gcttagaggtgtccaaggagcccac

SEQ ID NO: 1033584 - DNA, 25 bp, Homo sapien
agaatccctgatgacctcggcttag

SEQ ID NO: 1033585 - DNA, 25 bp, Homo sapien
ccccgaatgccaccctctgagcctc

SEQ ID NO: 1033586 - DNA, 25 bp, Homo sapien
agcctcagctcccccgacatttgct

SEQ ID NO: 1033587 - DNA, 25 bp, Homo sapien
gggacccccgaatgccaccctctga

SEQ ID NO: 1033588 - DNA, 25 bp, Homo sapien
acccccgaatgccaccctctgagcc

SEQ ID NO: 1033589 - DNA, 25 bp, Homo sapien
ccataacagccgggaatttcttcct

SEQ ID NO: 1033590 - DNA, 25 bp, Homo sapien
aaagcacttgataacacccccataa

SEQ ID NO: 1033591 - DNA, 25 bp, Homo sapien
ataacagccgggaatttcttcctgg

SEQ ID NO: 1033592 - DNA, 25 bp, Homo sapien
ggtcaaagcacttgataacaccccc

SEQ ID NO: 1033593 - DNA, 25 bp, Homo sapien
gccaccaggaacctcaacagatgtc

SEQ ID NO: 1033594 - DNA, 25 bp, Homo sapien
cttggtgccaccaggaacctcaaca

SEQ ID NO: 1033595 - DNA, 25 bp, Homo sapien
ttggtgccaccaggaacctcaacag

SEQ ID NO: 1033596 - DNA, 25 bp, Homo sapien
ggtgccaccaggaacctcaacagat

SEQ ID NO: 1033597 - DNA, 25 bp, Homo sapien
cttgataaggatggactttcctggc

SEQ ID NO: 1033598 - DNA, 25 bp, Homo sapien
ctttccagacgggagctcgctgtgt

SEQ ID NO: 1033599 - DNA, 25 bp, Homo sapien
cagtgatttccagttcctcaaaccc

SEQ ID NO: 1033600 - DNA, 25 bp, Homo sapien
gacggtgccctcaacctgagcgatt

SEQ ID NO: 1033601 - DNA, 25 bp, Homo sapien
tcgctctcatacttcacgccgttga

SEQ ID NO: 1033602 - DNA, 25 bp, Homo sapien
acgccgttgagcaggatattggcca

SEQ ID NO: 1033603 - DNA, 25 bp, Homo sapien
tagcgccttgggcatgttgcagatg

SEQ ID NO: 1033604 - DNA, 25 bp, Homo sapien
cagaggcgccccacggacagaggct

SEQ ID NO: 1033605 - DNA, 25 bp, Homo sapien
tctgatacgcctctgatgtgtgcgg

SEQ ID NO: 1033606 - DNA, 25 bp, Homo sapien
gaagagcaacatcccctcgaatgag

SEQ ID NO: 1033607 - DNA, 25 bp, Homo sapien
catgaagtctgtgtagaagagcaac

SEQ ID NO: 1033608 - DNA, 25 bp, Homo sapien
gaaggcgtagatacacatgccccag

SEQ ID NO: 1033609 - DNA, 25 bp, Homo sapien
tgatagtaatcgcagagcagcgagt

SEQ ID NO: 1033610 - DNA, 25 bp, Homo sapien
taaaatcccgtaggttatgcagagc

SEQ ID NO: 1033611 - DNA, 25 bp, Homo sapien
tccccaggccgaaggcgagataggc

SEQ ID NO: 1033612 - DNA, 25 bp, Homo sapien
agcagcgagtaaggcaaggtgcaca

SEQ ID NO: 1033613 - DNA, 25 bp, Homo sapien
gggagttcagccaagagtttaacaa

SEQ ID NO: 1033614 - DNA, 25 bp, Homo sapien
tttttcagcgccaacatgcacaggg

SEQ ID NO: 1033615 - DNA, 25 bp, Homo sapien
cccagaggaagaaacgtgtcagcga

SEQ ID NO: 1033616 - DNA, 25 bp, Homo sapien
caatatttgtgttcggagagatgac

SEQ ID NO: 1033617 - DNA, 25 bp, Homo sapien
taaatgacaaacagggaggagtaca

SEQ ID NO: 1033618 - DNA, 25 bp, Homo sapien
tgctcctcgtctgcagcgtcgctgg

SEQ ID NO: 1033619 - DNA, 25 bp, Homo sapien
ggagaagtacatcaccccgttggca

SEQ ID NO: 1033620 - DNA, 25 bp, Homo sapien
tctgagccaggaagtactggcagct

SEQ ID NO: 1033621 - DNA, 25 bp, Homo sapien
gccctttggtcctcactggtcggcc

SEQ ID NO: 1033622 - DNA, 25 bp, Homo sapien
ttccagtaggcagccagtccccctg

SEQ ID NO: 1033623 - DNA, 25 bp, Homo sapien
tttggtcctcactggtcggcctgct

SEQ ID NO: 1033624 - DNA, 25 bp, Homo sapien
caggcgcgtgtccggagtcgaggct

SEQ ID NO: 1033625 - DNA, 25 bp, Homo sapien
cacgcagcaggcacatggtgtccat

SEQ ID NO: 1033626 - DNA, 25 bp, Homo sapien
ccaggcccagcgacgcctgcacgca

SEQ ID NO: 1033627 - DNA, 25 bp, Homo sapien
caggcccagcgacgcctgcacgcag

SEQ ID NO: 1033628 - DNA, 25 bp, Homo sapien
cccagcgacgcctgcacgcagcagg

SEQ ID NO: 1033629 - DNA, 25 bp, Homo sapien
gagccagggtaggtgtcatggaaga

SEQ ID NO: 1033630 - DNA, 25 bp, Homo sapien
ggctcaggcccgtgtttacagcccc

SEQ ID NO: 1033631 - DNA, 25 bp, Homo sapien
ccagggtaggtgtcatggaagacta

SEQ ID NO: 1033632 - DNA, 25 bp, Homo sapien
gggagccagggtaggtgtcatggaa

SEQ ID NO: 1033633 - DNA, 25 bp, Homo sapien
taaacacaggaaccgattgtggccc

SEQ ID NO: 1033634 - DNA, 25 bp, Homo sapien
gcgggtggctggctcgggaagatgg

SEQ ID NO: 1033635 - DNA, 25 bp, Homo sapien
gggctggcaacgtggcgggtggctg

SEQ ID NO: 1033636 - DNA, 25 bp, Homo sapien
gaagatgggctgggctctgtttggt

SEQ ID NO: 1033637 - DNA, 25 bp, Homo sapien
ggaatggtccagggttagcccaaca

SEQ ID NO: 1033638 - DNA, 25 bp, Homo sapien
cagggaatgccaccttaccctgtcc

SEQ ID NO: 1033639 - DNA, 25 bp, Homo sapien
aatggtccagggttagcccaacagc

SEQ ID NO: 1033640 - DNA, 25 bp, Homo sapien
tccagggaatgccaccttaccctgt

SEQ ID NO: 1033641 - DNA, 25 bp, Homo sapien
ctgcaggataaagcaagccctttct

SEQ ID NO: 1033642 - DNA, 25 bp, Homo sapien
taaggaggatctgccagatgagcca

SEQ ID NO: 1033643 - DNA, 25 bp, Homo sapien
tggccatccggttggactgatacgg

SEQ ID NO: 1033644 - DNA, 25 bp, Homo sapien
cctcctaaggaggatctgccagatg

SEQ ID NO: 1033645 - DNA, 25 bp, Homo sapien
gccaagggatgcagccgcacatttg

SEQ ID NO: 1033646 - DNA, 25 bp, Homo sapien
tggaaacgcatcctcagcttgagca

SEQ ID NO: 1033647 - DNA, 25 bp, Homo sapien
gaaatggtgctgtcctccagcagca

SEQ ID NO: 1033648 - DNA, 25 bp, Homo sapien
taaccagacatctgctgggtggacg

SEQ ID NO: 1033649 - DNA, 25 bp, Homo sapien
aagagggccgggaatgctaaccaga

SEQ ID NO: 1033650 - DNA, 25 bp, Homo sapien
tctccgggactgtgccccttaggaa

SEQ ID NO: 1033651 - DNA, 25 bp, Homo sapien
gtctccgggactgtgccccttagga

SEQ ID NO: 1033652 - DNA, 25 bp, Homo sapien
tccaggcgctgtcttggtgggtctc

SEQ ID NO: 1033653 - DNA, 25 bp, Homo sapien
ggctggaatccaggcgctgtcttgg

SEQ ID NO: 1033654 - DNA, 25 bp, Homo sapien
gcccgcaggctggccacaggagccc

SEQ ID NO: 1033655 - DNA, 25 bp, Homo sapien
cactgcctcgctcaggacctgagaa

SEQ ID NO: 1033656 - DNA, 25 bp, Homo sapien
gcttcgccatgcaaagacccgagtg

SEQ ID NO: 1033657 - DNA, 25 bp, Homo sapien
acccgagtggcgcacacgatgacgg

SEQ ID NO: 1033658 - DNA, 25 bp, Homo sapien
cagggtccgccacgtggtaaagact

SEQ ID NO: 1033659 - DNA, 25 bp, Homo sapien
tatatatgagtagtttgccatgaga

SEQ ID NO: 1033660 - DNA, 25 bp, Homo sapien
ctcggatttgctacgtttctatata

SEQ ID NO: 1033661 - DNA, 25 bp, Homo sapien
cagtagacacccagaaatcgtgact

SEQ ID NO: 1033662 - DNA, 25 bp, Homo sapien
gagataacacagtgtaaacagtaga

SEQ ID NO: 1033663 - DNA, 25 bp, Homo sapien
tcttgttcggtgtcctcgaggttga

SEQ ID NO: 1033664 - DNA, 25 bp, Homo sapien
tgtgtgtgtccgtatcttgttcggt

SEQ ID NO: 1033665 - DNA, 25 bp, Homo sapien
gtcctcgaggttgagcttcactcca

SEQ ID NO: 1033666 - DNA, 25 bp, Homo sapien
tgtctttgaagcccaaccactcggt

SEQ ID NO: 1033667 - DNA, 25 bp, Homo sapien
tacagtttgtttaggaggccctgac

SEQ ID NO: 1033668 - DNA, 25 bp, Homo sapien
ctcgacccgaaaccctcaccagata

SEQ ID NO: 1033669 - DNA, 25 bp, Homo sapien
gaaaccctcaccagataaactacag

SEQ ID NO: 1033670 - DNA, 25 bp, Homo sapien
actacagtttgtttaggaggccctg

SEQ ID NO: 1033671 - DNA, 25 bp, Homo sapien
tatcccaaggcgaagcgctgagatt

SEQ ID NO: 1033672 - DNA, 25 bp, Homo sapien
tccaaagaagagtcgagtcctctga

SEQ ID NO: 1033673 - DNA, 25 bp, Homo sapien
catgaaccttttgtcgtgggacttc

SEQ ID NO: 1033674 - DNA, 25 bp, Homo sapien
tctgtgcttgaaagccgtccgaagg

SEQ ID NO: 1033675 - DNA, 25 bp, Homo sapien
ccaagaattgtaggacagagaccac

SEQ ID NO: 1033676 - DNA, 25 bp, Homo sapien
gaaacttagtgagtcctggactgga

SEQ ID NO: 1033677 - DNA, 25 bp, Homo sapien
gactggtttggatctccctgcatga

SEQ ID NO: 1033678 - DNA, 25 bp, Homo sapien
caaagggatgtgttagaaggctgcc

SEQ ID NO: 1033679 - DNA, 25 bp, Homo sapien
gagatagttgaaagacgtgtgccac

SEQ ID NO: 1033680 - DNA, 25 bp, Homo sapien
ggcagaaagtatatgttctggaaaa

SEQ ID NO: 1033681 - DNA, 25 bp, Homo sapien
caagtgtttactgaacccctggaat

SEQ ID NO: 1033682 - DNA, 25 bp, Homo sapien
gcacagttgtaggtgctggcagaac

SEQ ID NO: 1033683 - DNA, 25 bp, Homo sapien
gtcccaacagcctccacgggagcag

SEQ ID NO: 1033684 - DNA, 25 bp, Homo sapien
ttctccatgaatgccaacctgcctc

SEQ ID NO: 1033685 - DNA, 25 bp, Homo sapien
tcagtcagcgctgcagtcccaacag

SEQ ID NO: 1033686 - DNA, 25 bp, Homo sapien
cgctgcagcctctgactgggtcggc

SEQ ID NO: 1033687 - DNA, 25 bp, Homo sapien
ttttcactggcccataagaaataaa

SEQ ID NO: 1033688 - DNA, 25 bp, Homo sapien
catgtggattgcgttttcactggcc

SEQ ID NO: 1033689 - DNA, 25 bp, Homo sapien
agccacttccaaacatcggcatgtg

SEQ ID NO: 1033690 - DNA, 25 bp, Homo sapien
tccaaacatcggcatgtggattgcg

SEQ ID NO: 1033691 - DNA, 25 bp, Homo sapien
ttttataaggtgaccctgacggatg

SEQ ID NO: 1033692 - DNA, 25 bp, Homo sapien
tgaccctgacggatgtcactttgat

SEQ ID NO: 1033693 - DNA, 25 bp, Homo sapien
taaggtgaccctgacggatgtcact

SEQ ID NO: 1033694 - DNA, 25 bp, Homo sapien
atattttataaggtgaccctgacgg

SEQ ID NO: 1033695 - DNA, 25 bp, Homo sapien
cacagtcacagattcggagatccat

SEQ ID NO: 1033696 - DNA, 25 bp, Homo sapien
agaatccgtggagcccatatcacag

SEQ ID NO: 1033697 - DNA, 25 bp, Homo sapien
gagaatccgtggagcccatatcaca

SEQ ID NO: 1033698 - DNA, 25 bp, Homo sapien
cagtcacagtcacagattcggagat

SEQ ID NO: 1033699 - DNA, 25 bp, Homo sapien
gagagtctcgaggaggttccttaac

SEQ ID NO: 1033700 - DNA, 25 bp, Homo sapien
agctgttctcactcggagttctgag

SEQ ID NO: 1033701 - DNA, 25 bp, Homo sapien
gcgaggcagcccaggtttctagata

SEQ ID NO: 1033702 - DNA, 25 bp, Homo sapien
aatttgctcaaggtcgtgcagccag

SEQ ID NO: 1033703 - DNA, 25 bp, Homo sapien
tgagcatgtgtgccggctccttttt

SEQ ID NO: 1033704 - DNA, 25 bp, Homo sapien
catgtgtgccggctcctttttggca

SEQ ID NO: 1033705 - DNA, 25 bp, Homo sapien
tgtgtgccggctcctttttggcact

SEQ ID NO: 1033706 - DNA, 25 bp, Homo sapien
agcatgtgtgccggctcctttttgg

SEQ ID NO: 1033707 - DNA, 25 bp, Homo sapien
ggtgaacttagttctgagtttctgg

SEQ ID NO: 1033708 - DNA, 25 bp, Homo sapien
aaggtgaacttagttctgagtttct

SEQ ID NO: 1033709 - DNA, 25 bp, Homo sapien
gtgaacttagttctgagtttctggt

SEQ ID NO: 1033710 - DNA, 25 bp, Homo sapien
aggtgaacttagttctgagtttctg

SEQ ID NO: 1033711 - DNA, 25 bp, Homo sapien
tttctgagcacgtcagcacatctct

SEQ ID NO: 1033712 - DNA, 25 bp, Homo sapien
ttaatgcccctttaagatacaggtg

SEQ ID NO: 1033713 - DNA, 25 bp, Homo sapien
gagaagcatgttccttttctgagca

SEQ ID NO: 1033714 - DNA, 25 bp, Homo sapien
tacctcatggcatccagagaagcat

SEQ ID NO: 1033715 - DNA, 25 bp, Homo sapien
tctgctcttctgtatgccgtcgttc

SEQ ID NO: 1033716 - DNA, 25 bp, Homo sapien
ttgtcagatgtgtcacaggatgcct

SEQ ID NO: 1033717 - DNA, 25 bp, Homo sapien
cagaagatgtgccaaaggcctctct

SEQ ID NO: 1033718 - DNA, 25 bp, Homo sapien
gtgacgactggccagaagatgtgcc

SEQ ID NO: 1033719 - DNA, 25 bp, Homo sapien
gtgggtagttaatggaatggctgtc

SEQ ID NO: 1033720 - DNA, 25 bp, Homo sapien
cattcaaggtgggtagttaatggaa

SEQ ID NO: 1033721 - DNA, 25 bp, Homo sapien
tgctaatatttcttggggaacaaag

SEQ ID NO: 1033722 - DNA, 25 bp, Homo sapien
tctggaatccattcaaggtgggtag

SEQ ID NO: 1033723 - DNA, 25 bp, Homo sapien
acattttaatgttccctgagtaggg

SEQ ID NO: 1033724 - DNA, 25 bp, Homo sapien
ggcttagctggcatatgggaacaaa

SEQ ID NO: 1033725 - DNA, 25 bp, Homo sapien
tattgatgcaaaatagagacgtcag

SEQ ID NO: 1033726 - DNA, 25 bp, Homo sapien
gaataaaggtccaagaatagcaaga

SEQ ID NO: 1033727 - DNA, 25 bp, Homo sapien
ttgactccctgaaaggctgacctct

SEQ ID NO: 1033728 - DNA, 25 bp, Homo sapien
tgtaatgaaaattccgggctcttgg

SEQ ID NO: 1033729 - DNA, 25 bp, Homo sapien
tccacatgctgggtttttgactccc

SEQ ID NO: 1033730 - DNA, 25 bp, Homo sapien
caaattttggttgtacagcagggca

SEQ ID NO: 1033731 - DNA, 25 bp, Homo sapien
cacggcaggagtcattttttatagc

SEQ ID NO: 1033732 - DNA, 25 bp, Homo sapien
agtaggcatttgtgcgtcccagagg

SEQ ID NO: 1033733 - DNA, 25 bp, Homo sapien
gctcagagacttcagtgcgaaacag

SEQ ID NO: 1033734 - DNA, 25 bp, Homo sapien
aagtcctccctgttgtttaatgtgg

SEQ ID NO: 1033735 - DNA, 25 bp, Homo sapien
tgggcttctggctataggctgctca

SEQ ID NO: 1033736 - DNA, 25 bp, Homo sapien
cacggtgcatactggagggaaacca

SEQ ID NO: 1033737 - DNA, 25 bp, Homo sapien
caagtgccgaacaatgtagtgtgga

SEQ ID NO: 1033738 - DNA, 25 bp, Homo sapien
cattgttctgatctcgtcccttgga

SEQ ID NO: 1033739 - DNA, 25 bp, Homo sapien
tcgggagcaatattaagctggagac

SEQ ID NO: 1033740 - DNA, 25 bp, Homo sapien
acagtctgtggaattttttatcccg

SEQ ID NO: 1033741 - DNA, 25 bp, Homo sapien
tgaaccaccacagagggtgtcggga

SEQ ID NO: 1033742 - DNA, 25 bp, Homo sapien
tctttgctgtatgagtgaaccacca

SEQ ID NO: 1033743 - DNA, 25 bp, Homo sapien
agtctgaactatagggatatttgcc

SEQ ID NO: 1033744 - DNA, 25 bp, Homo sapien
cagtggtccagttttcgtgagggta

SEQ ID NO: 1033745 - DNA, 25 bp, Homo sapien
ggtaatctatgagagactggctgat

SEQ ID NO: 1033746 - DNA, 25 bp, Homo sapien
tattcccttgtgtaagtgaagtacg

SEQ ID NO: 1033747 - DNA, 25 bp, Homo sapien
tagccaagaggtgttcccaaagtgt

SEQ ID NO: 1033748 - DNA, 25 bp, Homo sapien
gacaatgtgatctaccccagcttgg

SEQ ID NO: 1033749 - DNA, 25 bp, Homo sapien
ttagacaaattcagctggcactggg

SEQ ID NO: 1033750 - DNA, 25 bp, Homo sapien
tcctcagtgacctgccgttgcttgt

SEQ ID NO: 1033751 - DNA, 25 bp, Homo sapien
tgtcttttccactagcctctttgct

SEQ ID NO: 1033752 - DNA, 25 bp, Homo sapien
agttctctggttgtcttttccacta

SEQ ID NO: 1033753 - DNA, 25 bp, Homo sapien
tttgagctagttctctggttgtctt

SEQ ID NO: 1033754 - DNA, 25 bp, Homo sapien
tcttttccactagcctctttgctga

SEQ ID NO: 1033755 - DNA, 25 bp, Homo sapien
gtctgccttcctgggcagactgcag

SEQ ID NO: 1033756 - DNA, 25 bp, Homo sapien
tcctgggcagactgcagctccttga

SEQ ID NO: 1033757 - DNA, 25 bp, Homo sapien
cttcctgggcagactgcagctcctt

SEQ ID NO: 1033758 - DNA, 25 bp, Homo sapien
ctgtctgccttcctgggcagactgc

SEQ ID NO: 1033759 - DNA, 25 bp, Homo sapien
taatctacacttaggccacactgcc

SEQ ID NO: 1033760 - DNA, 25 bp, Homo sapien
agtgtgccagtagttgaggtcctca

SEQ ID NO: 1033761 - DNA, 25 bp, Homo sapien
tagacccctctcagctaggtgctca

SEQ ID NO: 1033762 - DNA, 25 bp, Homo sapien
tctgattactgaggtggagtgtgcc

SEQ ID NO: 1033763 - DNA, 25 bp, Homo sapien
gcctttattgtgtaggcctctttta

SEQ ID NO: 1033764 - DNA, 25 bp, Homo sapien
ttagatgtcacttggtatcaagccc

SEQ ID NO: 1033765 - DNA, 25 bp, Homo sapien
tttactggacctgttagatgtcact

SEQ ID NO: 1033766 - DNA, 25 bp, Homo sapien
cacatgctgcctttattgtgtaggc

SEQ ID NO: 1033767 - DNA, 25 bp, Homo sapien
gatggtgatacgaaattcagctcaa

SEQ ID NO: 1033768 - DNA, 25 bp, Homo sapien
tcagctcaatagtggaaaactatag

SEQ ID NO: 1033769 - DNA, 25 bp, Homo sapien
gtaggtaggtaacttttgatggtga

SEQ ID NO: 1033770 - DNA, 25 bp, Homo sapien
ttctctactagggacttgtaggtag

SEQ ID NO: 1033771 - DNA, 25 bp, Homo sapien
ttcagtggagccatgggtctgttcc

SEQ ID NO: 1033772 - DNA, 25 bp, Homo sapien
tgtagtttgcttactagcagatctg

SEQ ID NO: 1033773 - DNA, 25 bp, Homo sapien
gttcctcttacccactgcctgtgtg

SEQ ID NO: 1033774 - DNA, 25 bp, Homo sapien
tttgcttactagcagatctgcctgc

SEQ ID NO: 1033775 - DNA, 25 bp, Homo sapien
tcttctgcctggcatccatgttccc

SEQ ID NO: 1033776 - DNA, 25 bp, Homo sapien
ttctgcctggcatccatgttccctt

SEQ ID NO: 1033777 - DNA, 25 bp, Homo sapien
catccatgttcccttttttcaccct

SEQ ID NO: 1033778 - DNA, 25 bp, Homo sapien
ggcatccatgttcccttttttcacc

SEQ ID NO: 1033779 - DNA, 25 bp, Homo sapien
tcactggcatgacgtggccctgtag

SEQ ID NO: 1033780 - DNA, 25 bp, Homo sapien
ctgtagttggcagagcccttgcaaa

SEQ ID NO: 1033781 - DNA, 25 bp, Homo sapien
cagggaggagaccagtgcagtcact

SEQ ID NO: 1033782 - DNA, 25 bp, Homo sapien
gcatgccgaacaggaaactccatga

SEQ ID NO: 1033783 - DNA, 25 bp, Homo sapien
tctgcactgagagtccaagtaatca

SEQ ID NO: 1033784 - DNA, 25 bp, Homo sapien
tgcttggttacagtttgccaggcac

SEQ ID NO: 1033785 - DNA, 25 bp, Homo sapien
tctaggaccaaaaacaatacccatg

SEQ ID NO: 1033786 - DNA, 25 bp, Homo sapien
tgccaggcactctgaagattacaca

SEQ ID NO: 1033787 - DNA, 25 bp, Homo sapien
aaaggtctacccaggctcaggagga

SEQ ID NO: 1033788 - DNA, 25 bp, Homo sapien
cagagagacccacctgtcaatgaag

SEQ ID NO: 1033789 - DNA, 25 bp, Homo sapien
tctccagcgtggtgactttaggcaa

SEQ ID NO: 1033790 - DNA, 25 bp, Homo sapien
ggcttaggctttcacgaggttgcag

SEQ ID NO: 1033791 - DNA, 25 bp, Homo sapien
taggcaagccggactgtttaatctg

SEQ ID NO: 1033792 - DNA, 25 bp, Homo sapien
tttaggaatggctccaccgtgcagg

SEQ ID NO: 1033793 - DNA, 25 bp, Homo sapien
attctgcatggggatagccatcctg

SEQ ID NO: 1033794 - DNA, 25 bp, Homo sapien
cagccattctgcatggggatagcca

SEQ ID NO: 1033795 - DNA, 25 bp, Homo sapien
tgcatggggatagccatcctgcatg

SEQ ID NO: 1033796 - DNA, 25 bp, Homo sapien
atcctgcatggggtaggcgggagac

SEQ ID NO: 1033797 - DNA, 25 bp, Homo sapien
tatcagatgacacttccactaggac

SEQ ID NO: 1033798 - DNA, 25 bp, Homo sapien
cctggtagccttccagatgggagcg

SEQ ID NO: 1033799 - DNA, 25 bp, Homo sapien
tgactttccgcaatctatcagatga

SEQ ID NO: 1033800 - DNA, 25 bp, Homo sapien
cacgtaagtgcccagaaaccttgtt

SEQ ID NO: 1033801 - DNA, 25 bp, Homo sapien
agttacatacggcaagatcttccat

SEQ ID NO: 1033802 - DNA, 25 bp, Homo sapien
cttggtggaacagcagttacatacg

SEQ ID NO: 1033803 - DNA, 25 bp, Homo sapien
cagcagttacatacggcaagatctt

SEQ ID NO: 1033804 - DNA, 25 bp, Homo sapien
ggaacagcagttacatacggcaaga

SEQ ID NO: 1033805 - DNA, 25 bp, Homo sapien
aagtactgagctatcaggaagcagc

SEQ ID NO: 1033806 - DNA, 25 bp, Homo sapien
ttgccatcttcactagagtgccagc

SEQ ID NO: 1033807 - DNA, 25 bp, Homo sapien
cccttaggtagaagtagtgatggcc

SEQ ID NO: 1033808 - DNA, 25 bp, Homo sapien
tccgaagtacctttatataggtgaa

SEQ ID NO: 1033809 - DNA, 25 bp, Homo sapien
ttggttcaccaaaaggccggaatgc

SEQ ID NO: 1033810 - DNA, 25 bp, Homo sapien
gccggaatgccacagggattaatga

SEQ ID NO: 1033811 - DNA, 25 bp, Homo sapien
cctggtagcaggcacataagatttt

SEQ ID NO: 1033812 - DNA, 25 bp, Homo sapien
gcagccatgctctctaacaaacgga

SEQ ID NO: 1033813 - DNA, 25 bp, Homo sapien
gcgatctacgcttactgcgagctct

SEQ ID NO: 1033814 - DNA, 25 bp, Homo sapien
gtgcgatctacgcttactgcgagct

SEQ ID NO: 1033815 - DNA, 25 bp, Homo sapien
atctacgcttactgcgagctctgcc

SEQ ID NO: 1033816 - DNA, 25 bp, Homo sapien
tgcagtgagtggtgcgatctacgct

SEQ ID NO: 1033817 - DNA, 25 bp, Homo sapien
cagggttttgagaacagaccgggca

SEQ ID NO: 1033818 - DNA, 25 bp, Homo sapien
gttttgagaacagaccgggcaacat

SEQ ID NO: 1033819 - DNA, 25 bp, Homo sapien
gctgaggtgggggtccctttgagcc

SEQ ID NO: 1033820 - DNA, 25 bp, Homo sapien
aaataaaaatcaagcaggaatgttt

SEQ ID NO: 1033821 - DNA, 25 bp, Homo sapien
tcttgtctttcaccttcagctcata

SEQ ID NO: 1033822 - DNA, 25 bp, Homo sapien
tctttcaccttcagctcatattctg

SEQ ID NO: 1033823 - DNA, 25 bp, Homo sapien
cagctcatattctgacagtttttct

SEQ ID NO: 1033824 - DNA, 25 bp, Homo sapien
tgtacttcttgtctttcaccttcag

SEQ ID NO: 1033825 - DNA, 25 bp, Homo sapien
ccacatcctggaaatgggtgccgct

SEQ ID NO: 1033826 - DNA, 25 bp, Homo sapien
gaagtcactcatgcctcccagagct

SEQ ID NO: 1033827 - DNA, 25 bp, Homo sapien
cactcagtgccctgaatcttcttgg

SEQ ID NO: 1033828 - DNA, 25 bp, Homo sapien
gccgattcgtggaagaagtcactca

SEQ ID NO: 1033829 - DNA, 25 bp, Homo sapien
agctggctggcatggtggtagtgtg

SEQ ID NO: 1033830 - DNA, 25 bp, Homo sapien
tagtgtgggtgacttttccacggga

SEQ ID NO: 1033831 - DNA, 25 bp, Homo sapien
acttttccacgggagagagtgtgaa

SEQ ID NO: 1033832 - DNA, 25 bp, Homo sapien
ggtgtggccgctggggtacgctgcc

SEQ ID NO: 1033833 - DNA, 25 bp, Homo sapien
gctggtcagtggtaatatttcttaa

SEQ ID NO: 1033834 - DNA, 25 bp, Homo sapien
tccaatgataaagaagctggtcagt

SEQ ID NO: 1033835 - DNA, 25 bp, Homo sapien
gaaaactatgatggttgagtttgtt

SEQ ID NO: 1033836 - DNA, 25 bp, Homo sapien
tttttcaaaagtatgccgtgttcca

SEQ ID NO: 1033837 - DNA, 25 bp, Homo sapien
tctatgtaaaagagaccctggtcct

SEQ ID NO: 1033838 - DNA, 25 bp, Homo sapien
ccctgcccggtatcagtgttagaga

SEQ ID NO: 1033839 - DNA, 25 bp, Homo sapien
tatgctgttctctataccgtgacca

SEQ ID NO: 1033840 - DNA, 25 bp, Homo sapien
taggatttttcctaggccaggctca

SEQ ID NO: 1033841 - DNA, 25 bp, Homo sapien
cacagctgaataccaggcagttggt

SEQ ID NO: 1033842 - DNA, 25 bp, Homo sapien
acagctgaataccaggcagttggtt

SEQ ID NO: 1033843 - DNA, 25 bp, Homo sapien
caggcagttggttgagtagtgagtt

SEQ ID NO: 1033844 - DNA, 25 bp, Homo sapien
cagctgaataccaggcagttggttg

SEQ ID NO: 1033845 - DNA, 25 bp, Homo sapien
ctccagtgtgttcctggttggatgt

SEQ ID NO: 1033846 - DNA, 25 bp, Homo sapien
tctcataggtggttaactgttttct

SEQ ID NO: 1033847 - DNA, 25 bp, Homo sapien
cttctcataggtggttaactgtttt

SEQ ID NO: 1033848 - DNA, 25 bp, Homo sapien
ttctcataggtggttaactgttttc

SEQ ID NO: 1033849 - DNA, 25 bp, Homo sapien
tccgtgacgttgcttctgctggagg

SEQ ID NO: 1033850 - DNA, 25 bp, Homo sapien
tggagggccgggaatgcccttcacg

SEQ ID NO: 1033851 - DNA, 25 bp, Homo sapien
agctccgtgacgttgcttctgctgg

SEQ ID NO: 1033852 - DNA, 25 bp, Homo sapien
aatgcccttcacgtcccacctgtca

SEQ ID NO: 1033853 - DNA, 25 bp, Homo sapien
tgaaaaatgccttacgctatgatga

SEQ ID NO: 1033854 - DNA, 25 bp, Homo sapien
tacgtgtgaacctcccagaaaaggc

SEQ ID NO: 1033855 - DNA, 25 bp, Homo sapien
aaaggtcagtatcacccagttacac

SEQ ID NO: 1033856 - DNA, 25 bp, Homo sapien
gtccttcaaggtaggcctgcaaaat

SEQ ID NO: 1033857 - DNA, 25 bp, Homo sapien
taagctgtatatgaacacaagtttt

SEQ ID NO: 1033858 - DNA, 25 bp, Homo sapien
cacaagttttatactagtatagaga

SEQ ID NO: 1033859 - DNA, 25 bp, Homo sapien
agtatagagatccacatcagttaac

SEQ ID NO: 1033860 - DNA, 25 bp, Homo sapien
tggatgttacattggctaaactcac

SEQ ID NO: 1033861 - DNA, 25 bp, Homo sapien
catttagggaagtgatacgttagta

SEQ ID NO: 1033862 - DNA, 25 bp, Homo sapien
gataactgaatagaacaggttgtaa

SEQ ID NO: 1033863 - DNA, 25 bp, Homo sapien
tacgttagtaataggcattgagtgg

SEQ ID NO: 1033864 - DNA, 25 bp, Homo sapien
ttgagcaggattgtgataggacctg

SEQ ID NO: 1033865 - DNA, 25 bp, Homo sapien
tagatttaggtctagcccagagctt

SEQ ID NO: 1033866 - DNA, 25 bp, Homo sapien
taacaccttcactgctacgaccttg

SEQ ID NO: 1033867 - DNA, 25 bp, Homo sapien
taggtccagtgatcccttgccagtg

SEQ ID NO: 1033868 - DNA, 25 bp, Homo sapien
ttagtacttgtgcactgaggactcc

SEQ ID NO: 1033869 - DNA, 25 bp, Homo sapien
ggatctgaacagcaaccaggagacc

SEQ ID NO: 1033870 - DNA, 25 bp, Homo sapien
gcacagttcctgttctcgtggatct

SEQ ID NO: 1033871 - DNA, 25 bp, Homo sapien
tctgcagcctgagaagggttggctt

SEQ ID NO: 1033872 - DNA, 25 bp, Homo sapien
ggtaaatgtggcacagttcctgttc

SEQ ID NO: 1033873 - DNA, 25 bp, Homo sapien
gttcgtttatttgtgagagtgtctc

SEQ ID NO: 1033874 - DNA, 25 bp, Homo sapien
tgttcgtttatttgtgagagtgtct

SEQ ID NO: 1033875 - DNA, 25 bp, Homo sapien
ttcgtttatttgtgagagtgtctca

SEQ ID NO: 1033876 - DNA, 25 bp, Homo sapien
ggcaggctgcacttgaaatgttatt

SEQ ID NO: 1033877 - DNA, 25 bp, Homo sapien
cgctcattgtactccggcaggcgct

SEQ ID NO: 1033878 - DNA, 25 bp, Homo sapien
tccctgggaccagtgaaagatggtt

SEQ ID NO: 1033879 - DNA, 25 bp, Homo sapien
tccagagcagttgagcgctcattgt

SEQ ID NO: 1033880 - DNA, 25 bp, Homo sapien
tatcctgatagctattggtggtcat

SEQ ID NO: 1033881 - DNA, 25 bp, Homo sapien
agggaatgtatgtctatctcctttc

SEQ ID NO: 1033882 - DNA, 25 bp, Homo sapien
tcctttcgaagtttatcctgatagc

SEQ ID NO: 1033883 - DNA, 25 bp, Homo sapien
cctctgatgaaatttagggaatgta

SEQ ID NO: 1033884 - DNA, 25 bp, Homo sapien
tgtagaaacgggcaccctgcttcag

SEQ ID NO: 1033885 - DNA, 25 bp, Homo sapien
gctctttggtgtagaaacgggcacc

SEQ ID NO: 1033886 - DNA, 25 bp, Homo sapien
ttcttcattttgccgctctttggtg

SEQ ID NO: 1033887 - DNA, 25 bp, Homo sapien
ttggtgtagaaacgggcaccctgct

SEQ ID NO: 1033888 - DNA, 25 bp, Homo sapien
cctttggggaagtactgctgacctt

SEQ ID NO: 1033889 - DNA, 25 bp, Homo sapien
ttggggtgcattcctgtcctttggg

SEQ ID NO: 1033890 - DNA, 25 bp, Homo sapien
aatagtgggtaattggccgggctca

SEQ ID NO: 1033891 - DNA, 25 bp, Homo sapien
aagtactgctgacctttaagaatag

SEQ ID NO: 1033892 - DNA, 25 bp, Homo sapien
ggcagtggtttcagtaagcccaaat

SEQ ID NO: 1033893 - DNA, 25 bp, Homo sapien
taaacaagtgtgtaataaactcaca

SEQ ID NO: 1033894 - DNA, 25 bp, Homo sapien
actgtgcccagctcgaatagactgc

SEQ ID NO: 1033895 - DNA, 25 bp, Homo sapien
agcccaaattctactactgcattcc

SEQ ID NO: 1033896 - DNA, 25 bp, Homo sapien
gggtgtagttggaataacaatttca

SEQ ID NO: 1033897 - DNA, 25 bp, Homo sapien
cagcatcagtattaagattaatttc

SEQ ID NO: 1033898 - DNA, 25 bp, Homo sapien
gagcacctactgtgcttcaacacac

SEQ ID NO: 1033899 - DNA, 25 bp, Homo sapien
gcacctactgtgcttcaacacacag

SEQ ID NO: 1033900 - DNA, 25 bp, Homo sapien
tctttctcaggagcttgatcttcag

SEQ ID NO: 1033901 - DNA, 25 bp, Homo sapien
tcagctctgtgaaattcctttgctt

SEQ ID NO: 1033902 - DNA, 25 bp, Homo sapien
cttcagctctgtgaaattcctttgc

SEQ ID NO: 1033903 - DNA, 25 bp, Homo sapien
agggtttctggcacagcaggaacca

SEQ ID NO: 1033904 - DNA, 25 bp, Homo sapien
gtgatagtgctttgctttttcataa

SEQ ID NO: 1033905 - DNA, 25 bp, Homo sapien
tttgctttttcataaataagcttct

SEQ ID NO: 1033906 - DNA, 25 bp, Homo sapien
gatagtgctttgctttttcataaat

SEQ ID NO: 1033907 - DNA, 25 bp, Homo sapien
tgctttttcataaataagcttcttc

SEQ ID NO: 1033908 - DNA, 25 bp, Homo sapien
ctgcaggtacacagaagttgccagc

SEQ ID NO: 1033909 - DNA, 25 bp, Homo sapien
tgggttctgcaggtacacagaagtt

SEQ ID NO: 1033910 - DNA, 25 bp, Homo sapien
aggtacacagaagttgccagctttt

SEQ ID NO: 1033911 - DNA, 25 bp, Homo sapien
aaaggccaatttgggttctgcaggt

SEQ ID NO: 1033912 - DNA, 25 bp, Homo sapien
ctgaagatttgataaaggcgaagaa

SEQ ID NO: 1033913 - DNA, 25 bp, Homo sapien
tgaagatttgataaaggcgaagaag

SEQ ID NO: 1033914 - DNA, 25 bp, Homo sapien
acttcagatttgggttcccccatgt

SEQ ID NO: 1033915 - DNA, 25 bp, Homo sapien
tgggttcccccatgtaatatatggc

SEQ ID NO: 1033916 - DNA, 25 bp, Homo sapien
tcagatttgggttcccccatgtaat

SEQ ID NO: 1033917 - DNA, 25 bp, Homo sapien
cagatttgggttcccccatgtaata

SEQ ID NO: 1033918 - DNA, 25 bp, Homo sapien
ttagatctcatgaatcagatcctcc

SEQ ID NO: 1033919 - DNA, 25 bp, Homo sapien
atcagatcctccatgcagatgatgc

SEQ ID NO: 1033920 - DNA, 25 bp, Homo sapien
cagatcctccatgcagatgatgcca

SEQ ID NO: 1033921 - DNA, 25 bp, Homo sapien
gatcctccatgcagatgatgccata

SEQ ID NO: 1033922 - DNA, 25 bp, Homo sapien
gaaccatagattctttccccatgag

SEQ ID NO: 1033923 - DNA, 25 bp, Homo sapien
tccccatgagtgagggcaaaacata

SEQ ID NO: 1033924 - DNA, 25 bp, Homo sapien
gatggcagaccttgtagatcaaaca

SEQ ID NO: 1033925 - DNA, 25 bp, Homo sapien
catgaggatcattaagatggcagac

SEQ ID NO: 1033926 - DNA, 25 bp, Homo sapien
aatttgattttggtagcccatgtgg

SEQ ID NO: 1033927 - DNA, 25 bp, Homo sapien
aaattctaggtctcttttgatggag

SEQ ID NO: 1033928 - DNA, 25 bp, Homo sapien
gatggagcatcctatttagtattac

SEQ ID NO: 1033929 - DNA, 25 bp, Homo sapien
caatgttctatcagctgtgggagga

SEQ ID NO: 1033930 - DNA, 25 bp, Homo sapien
tagaacacatagtatcctattgcat

SEQ ID NO: 1033931 - DNA, 25 bp, Homo sapien
gaacttgacgttttaggattctgca

SEQ ID NO: 1033932 - DNA, 25 bp, Homo sapien
tatacgtgggatcatacagtatctg

SEQ ID NO: 1033933 - DNA, 25 bp, Homo sapien
ggctgttaggaataccattttgcgt

SEQ ID NO: 1033934 - DNA, 25 bp, Homo sapien
ctgttttgcaattgagcgtagtggg

SEQ ID NO: 1033935 - DNA, 25 bp, Homo sapien
tgttctaagttctttatggctgttt

SEQ ID NO: 1033936 - DNA, 25 bp, Homo sapien
tcttcatgtctgttgaacttgtgta

SEQ ID NO: 1033937 - DNA, 25 bp, Homo sapien
gcgtagtgggtgtacagtttcacac

SEQ ID NO: 1033938 - DNA, 25 bp, Homo sapien
taagggtcaagtgaggtactgctga

SEQ ID NO: 1033939 - DNA, 25 bp, Homo sapien
caattagacattgaaccttctccta

SEQ ID NO: 1033940 - DNA, 25 bp, Homo sapien
tgacgatgcttgtatgtcagtacag

SEQ ID NO: 1033941 - DNA, 25 bp, Homo sapien
tcctaaggcgcttgtcttccagtag

SEQ ID NO: 1033942 - DNA, 25 bp, Homo sapien
aaacagggtggtcattaaggtcatc

SEQ ID NO: 1033943 - DNA, 25 bp, Homo sapien
gaatcgtttagtccattatcagagg

SEQ ID NO: 1033944 - DNA, 25 bp, Homo sapien
gaggagctgaccttatggtggaaac

SEQ ID NO: 1033945 - DNA, 25 bp, Homo sapien
tactaattttccatggtcccaggtc

SEQ ID NO: 1033946 - DNA, 25 bp, Homo sapien
gggaatgaccccttacagtcatcct

SEQ ID NO: 1033947 - DNA, 25 bp, Homo sapien
tactccgttacaggtgaaaacactg

SEQ ID NO: 1033948 - DNA, 25 bp, Homo sapien
aaataagtacccattctgtgtcagg

SEQ ID NO: 1033949 - DNA, 25 bp, Homo sapien
cattattgagaaggtaaggccctaa

SEQ ID NO: 1033950 - DNA, 25 bp, Homo sapien
tttctgattgtaaaattagtatatg

SEQ ID NO: 1033951 - DNA, 25 bp, Homo sapien
ttagcaaatagaagttcctaatagt

SEQ ID NO: 1033952 - DNA, 25 bp, Homo sapien
agcaaatagaagttcctaatagttt

SEQ ID NO: 1033953 - DNA, 25 bp, Homo sapien
tagcaaatagaagttcctaatagtt

SEQ ID NO: 1033954 - DNA, 25 bp, Homo sapien
gattactgtgttatgaatgataaac

SEQ ID NO: 1033955 - DNA, 25 bp, Homo sapien
gaaaataggaagaatgattactgtg

SEQ ID NO: 1033956 - DNA, 25 bp, Homo sapien
tgcaacgagccagtatcacaccacc

SEQ ID NO: 1033957 - DNA, 25 bp, Homo sapien
aaattagaaagttactgagctattt

SEQ ID NO: 1033958 - DNA, 25 bp, Homo sapien
gctgtcagtttgtggggatagtggt

SEQ ID NO: 1033959 - DNA, 25 bp, Homo sapien
acagctgtcagtttgtggggatagt

SEQ ID NO: 1033960 - DNA, 25 bp, Homo sapien
gtggggatagtggtcaaatccagcc

SEQ ID NO: 1033961 - DNA, 25 bp, Homo sapien
cagctgtcagtttgtggggatagtg

SEQ ID NO: 1033962 - DNA, 25 bp, Homo sapien
aaggaacagactggtttggccagaa

SEQ ID NO: 1033963 - DNA, 25 bp, Homo sapien
gaacagactggtttggccagaacca

SEQ ID NO: 1033964 - DNA, 25 bp, Homo sapien
tcaaagaaggaacagactggtttgg

SEQ ID NO: 1033965 - DNA, 25 bp, Homo sapien
cagactggtttggccagaaccatag

SEQ ID NO: 1033966 - DNA, 25 bp, Homo sapien
tagcctgaagcaagaatatgatgac

SEQ ID NO: 1033967 - DNA, 25 bp, Homo sapien
gcctgaagcaagaatatgatgacag

SEQ ID NO: 1033968 - DNA, 25 bp, Homo sapien
tcacattgtactctcatattgtagc

SEQ ID NO: 1033969 - DNA, 25 bp, Homo sapien
tactctcatattgtagcctgaagca

SEQ ID NO: 1033970 - DNA, 25 bp, Homo sapien
caggactagtcaagggctctctcat

SEQ ID NO: 1033971 - DNA, 25 bp, Homo sapien
gcctcgatcttgagggtccaagtga

SEQ ID NO: 1033972 - DNA, 25 bp, Homo sapien
gacatcatattacttaagctccagg

SEQ ID NO: 1033973 - DNA, 25 bp, Homo sapien
tgcagaagaccccaacaattagtct

SEQ ID NO: 1033974 - DNA, 25 bp, Homo sapien
gtcagagagtacagttaatataaga

SEQ ID NO: 1033975 - DNA, 25 bp, Homo sapien
tactagcttcaagtttgggttggaa

SEQ ID NO: 1033976 - DNA, 25 bp, Homo sapien
tatagctaacttgttggtgtgccaa

SEQ ID NO: 1033977 - DNA, 25 bp, Homo sapien
gattgcataggccaatttaatgaac

SEQ ID NO: 1033978 - DNA, 25 bp, Homo sapien
tgcccgcgccgggtcgtgtgctttc

SEQ ID NO: 1033979 - DNA, 25 bp, Homo sapien
ctgggccgcgaacacctcactattg

SEQ ID NO: 1033980 - DNA, 25 bp, Homo sapien
cactattgatggtgtagcgctttag

SEQ ID NO: 1033981 - DNA, 25 bp, Homo sapien
cgcgccgggtcgtgtgctttctttt

SEQ ID NO: 1033982 - DNA, 25 bp, Homo sapien
accccgagacgctcgccccgctggg

SEQ ID NO: 1033983 - DNA, 25 bp, Homo sapien
tgttcccacagacgctcgcgagcaa

SEQ ID NO: 1033984 - DNA, 25 bp, Homo sapien
gcgagcaaccctccgcgctccggag

SEQ ID NO: 1033985 - DNA, 25 bp, Homo sapien
ggaggtgccgctgttcccacagacg

SEQ ID NO: 1033986 - DNA, 25 bp, Homo sapien
ggcgggtcggtgcagcagctccgcc

SEQ ID NO: 1033987 - DNA, 25 bp, Homo sapien
gggagtgggcggcgggtcggtgcag

SEQ ID NO: 1033988 - DNA, 25 bp, Homo sapien
tgtaccaatggaggggcgcgatact

SEQ ID NO: 1033989 - DNA, 25 bp, Homo sapien
ctgtaccaatggaggggcgcgatac

SEQ ID NO: 1033990 - DNA, 25 bp, Homo sapien
agcctgtttgacttggtgttgttgg

SEQ ID NO: 1033991 - DNA, 25 bp, Homo sapien
tgggctgatggcggcgcagtgtcgg

SEQ ID NO: 1033992 - DNA, 25 bp, Homo sapien
gggagccaggttggtggatctgggc

SEQ ID NO: 1033993 - DNA, 25 bp, Homo sapien
gtttggggtccagttggttcagcat

SEQ ID NO: 1033994 - DNA, 25 bp, Homo sapien
cagtgtcggaagagggcgtgggttt

SEQ ID NO: 1033995 - DNA, 25 bp, Homo sapien
caaagctcggtgagatgaatggagc

SEQ ID NO: 1033996 - DNA, 25 bp, Homo sapien
taaagggagattcccggacagcaca

SEQ ID NO: 1033997 - DNA, 25 bp, Homo sapien
tccttgtcaacactctctcctgtgt

SEQ ID NO: 1033998 - DNA, 25 bp, Homo sapien
actcagagccagagtgaagccagcc

SEQ ID NO: 1033999 - DNA, 25 bp, Homo sapien
tttactgttgcaagtggactgtacc

SEQ ID NO: 1034000 - DNA, 25 bp, Homo sapien
gagcttccttcagccgccagggggc

SEQ ID NO: 1034001 - DNA, 25 bp, Homo sapien
ctggctggcgcaggtttactgttgc

SEQ ID NO: 1034002 - DNA, 25 bp, Homo sapien
gtggtccaggtccagacgcgcccag

SEQ ID NO: 1034003 - DNA, 25 bp, Homo sapien
aggcaagcccttcggtcacctgttg

SEQ ID NO: 1034004 - DNA, 25 bp, Homo sapien
ttccaccaagtgtctagagtcatgt

SEQ ID NO: 1034005 - DNA, 25 bp, Homo sapien
gcagtcgtgtaattggcccaagtca

SEQ ID NO: 1034006 - DNA, 25 bp, Homo sapien
cacaggctagatccccggtggtttt

SEQ ID NO: 1034007 - DNA, 25 bp, Homo sapien
aagaggcccatgatcttagtgatga

SEQ ID NO: 1034008 - DNA, 25 bp, Homo sapien
tcttagtgatgagctacatgagcct

SEQ ID NO: 1034009 - DNA, 25 bp, Homo sapien
cccatgatcttagtgatgagctaca

SEQ ID NO: 1034010 - DNA, 25 bp, Homo sapien
gtgatgagctacatgagcctgtggt

SEQ ID NO: 1034011 - DNA, 25 bp, Homo sapien
ttgggcatagaacccctaaaatagc

SEQ ID NO: 1034012 - DNA, 25 bp, Homo sapien
caatatagtacctgtctgggcatgg

SEQ ID NO: 1034013 - DNA, 25 bp, Homo sapien
ctcctgagccagttaaattacccta

SEQ ID NO: 1034014 - DNA, 25 bp, Homo sapien
aaatgagctagatactcctcctgag

SEQ ID NO: 1034015 - DNA, 25 bp, Homo sapien
tggggccagagtttcgcccgcacca

SEQ ID NO: 1034016 - DNA, 25 bp, Homo sapien
cccgcctcaagtccgcgggacgtca

SEQ ID NO: 1034017 - DNA, 25 bp, Homo sapien
tctgcccgcctcaagtccgcgggac

SEQ ID NO: 1034018 - DNA, 25 bp, Homo sapien
cgcaccactacagggccgctgggga

SEQ ID NO: 1034019 - DNA, 25 bp, Homo sapien
gaaaacgaagtgatcatctcagccc

SEQ ID NO: 1034020 - DNA, 25 bp, Homo sapien
cacaagaatccaggtaggtttgatc

SEQ ID NO: 1034021 - DNA, 25 bp, Homo sapien
tatgacccgtcttgaactttgagaa

SEQ ID NO: 1034022 - DNA, 25 bp, Homo sapien
ctttgagaaattccccgggtctgtg

SEQ ID NO: 1034023 - DNA, 25 bp, Homo sapien
aagttcttgcttcttactcactgga

SEQ ID NO: 1034024 - DNA, 25 bp, Homo sapien
taaccaacgccatggaaacctgtct

SEQ ID NO: 1034025 - DNA, 25 bp, Homo sapien
tatggtctcaataggccttaatttt

SEQ ID NO: 1034026 - DNA, 25 bp, Homo sapien
gaaagcaaatactatggtctcaata

SEQ ID NO: 1034027 - DNA, 25 bp, Homo sapien
cgaggactaggggaatgaacaatct

SEQ ID NO: 1034028 - DNA, 25 bp, Homo sapien
gaccaggctgcgttagttggtcctc

SEQ ID NO: 1034029 - DNA, 25 bp, Homo sapien
gctgcgttagttggtcctctggcac

SEQ ID NO: 1034030 - DNA, 25 bp, Homo sapien
cttggaaagtggagacgatcagatg

SEQ ID NO: 1034031 - DNA, 25 bp, Homo sapien
tggtggcggtgacggtggcgggatg

SEQ ID NO: 1034032 - DNA, 25 bp, Homo sapien
ggtggtggcggtgacggtggcggga

SEQ ID NO: 1034033 - DNA, 25 bp, Homo sapien
tggcggtgacggtggcgggatgtag

SEQ ID NO: 1034034 - DNA, 25 bp, Homo sapien
cggtgacggtggcgggatgtaggtg

SEQ ID NO: 1034035 - DNA, 25 bp, Homo sapien
gcagacaaccttgcagaccttctct

SEQ ID NO: 1034036 - DNA, 25 bp, Homo sapien
ccttgcagaccttctctgtggttcg

SEQ ID NO: 1034037 - DNA, 25 bp, Homo sapien
acaaccttgcagaccttctctgtgg

SEQ ID NO: 1034038 - DNA, 25 bp, Homo sapien
agacaaccttgcagaccttctctgt

SEQ ID NO: 1034039 - DNA, 25 bp, Homo sapien
cagctttctgggcctggtctgtttt

SEQ ID NO: 1034040 - DNA, 25 bp, Homo sapien
gtctgttttggcatctccactttct

SEQ ID NO: 1034041 - DNA, 25 bp, Homo sapien
ttcagctttctgggcctggtctgtt

SEQ ID NO: 1034042 - DNA, 25 bp, Homo sapien
tggcatctccactttctgcagggct

SEQ ID NO: 1034043 - DNA, 25 bp, Homo sapien
caacagatgcctgggattaaaggag

SEQ ID NO: 1034044 - DNA, 25 bp, Homo sapien
gtcccaacagatgcctgggattaaa

SEQ ID NO: 1034045 - DNA, 25 bp, Homo sapien
cagatgcctgggattaaaggagtta

SEQ ID NO: 1034046 - DNA, 25 bp, Homo sapien
tgcctgggattaaaggagttaagtc

SEQ ID NO: 1034047 - DNA, 25 bp, Homo sapien
agtatactcctggtcgtgtggcggt

SEQ ID NO: 1034048 - DNA, 25 bp, Homo sapien
tatactcctggtcgtgtggcggtga

SEQ ID NO: 1034049 - DNA, 25 bp, Homo sapien
gtagtatactcctggtcgtgtggcg

SEQ ID NO: 1034050 - DNA, 25 bp, Homo sapien
tactcctggtcgtgtggcggtgaat

SEQ ID NO: 1034051 - DNA, 25 bp, Homo sapien
ctcccacgtcaatttcatatccggt

SEQ ID NO: 1034052 - DNA, 25 bp, Homo sapien
atttcatatccggtcagtccatggg

SEQ ID NO: 1034053 - DNA, 25 bp, Homo sapien
gtcaatttcatatccggtcagtcca

SEQ ID NO: 1034054 - DNA, 25 bp, Homo sapien
tcatatccggtcagtccatgggttt

SEQ ID NO: 1034055 - DNA, 25 bp, Homo sapien
aatttacaattgatctgcccagctg

SEQ ID NO: 1034056 - DNA, 25 bp, Homo sapien
caatttacaattgatctgcccagct

SEQ ID NO: 1034057 - DNA, 25 bp, Homo sapien
taacaatttacaattgatctgccca

SEQ ID NO: 1034058 - DNA, 25 bp, Homo sapien
acaatttacaattgatctgcccagc

SEQ ID NO: 1034059 - DNA, 25 bp, Homo sapien
gattccggcgaagctcttcttttaa

SEQ ID NO: 1034060 - DNA, 25 bp, Homo sapien
actgattccggcgaagctcttcttt

SEQ ID NO: 1034061 - DNA, 25 bp, Homo sapien
tgaagactgattccggcgaagctct

SEQ ID NO: 1034062 - DNA, 25 bp, Homo sapien
gactgattccggcgaagctcttctt

SEQ ID NO: 1034063 - DNA, 25 bp, Homo sapien
ctgagtaggtccagtcagacacatg

SEQ ID NO: 1034064 - DNA, 25 bp, Homo sapien
taactttcctgtggcaactgctggc

SEQ ID NO: 1034065 - DNA, 25 bp, Homo sapien
ggaggccaaaaagacaacgaggtca

SEQ ID NO: 1034066 - DNA, 25 bp, Homo sapien
cacggaggcaccttccagaaagcag

SEQ ID NO: 1034067 - DNA, 25 bp, Homo sapien
ttggtgctaacctctaactttcctg

SEQ ID NO: 1034068 - DNA, 25 bp, Homo sapien
ggctgcgcccactctggaggaacct

SEQ ID NO: 1034069 - DNA, 25 bp, Homo sapien
ctaagacaggaaagacacagttcaa

SEQ ID NO: 1034070 - DNA, 25 bp, Homo sapien
gctgcctggctgcgcccactctgga

SEQ ID NO: 1034071 - DNA, 25 bp, Homo sapien
agacaggaaagacacagttcaaggg

SEQ ID NO: 1034072 - DNA, 25 bp, Homo sapien
ctgtcatattgagccccttcaagga

SEQ ID NO: 1034073 - DNA, 25 bp, Homo sapien
tgcctgggtctcatagcctgtcata

SEQ ID NO: 1034074 - DNA, 25 bp, Homo sapien
gtggccagtgcgcttcgtccagtgc

SEQ ID NO: 1034075 - DNA, 25 bp, Homo sapien
ttgataggcgactgtctctggcccc

SEQ ID NO: 1034076 - DNA, 25 bp, Homo sapien
tggaaattgggaggcgggagccgct

SEQ ID NO: 1034077 - DNA, 25 bp, Homo sapien
aagcgttgcccatagagatcctcca

SEQ ID NO: 1034078 - DNA, 25 bp, Homo sapien
tcaatgattgcttcccaccagctgt

SEQ ID NO: 1034079 - DNA, 25 bp, Homo sapien
acgaagcccgcactcagcaagcgtt

SEQ ID NO: 1034080 - DNA, 25 bp, Homo sapien
tgtgaactttgggtccactctaatg

SEQ ID NO: 1034081 - DNA, 25 bp, Homo sapien
aaggaacaggcttccggaccacaga

SEQ ID NO: 1034082 - DNA, 25 bp, Homo sapien
tgagaaccccaaaggaacaggcttc

SEQ ID NO: 1034083 - DNA, 25 bp, Homo sapien
taatgtccgacatgctgtcgtgtga

SEQ ID NO: 1034084 - DNA, 25 bp, Homo sapien
gcttgctgaaaagtagccaatggca

SEQ ID NO: 1034085 - DNA, 25 bp, Homo sapien
gattcaaagtttgtagattagcttt

SEQ ID NO: 1034086 - DNA, 25 bp, Homo sapien
gtcaactttactgttaagcttagtg

SEQ ID NO: 1034087 - DNA, 25 bp, Homo sapien
caaatctttaatacgtcatgtcaac

SEQ ID NO: 1034088 - DNA, 25 bp, Homo sapien
tcagccactgtcatgcgcatggtgg

SEQ ID NO: 1034089 - DNA, 25 bp, Homo sapien
tatgtatacagtgccgtcagccact

SEQ ID NO: 1034090 - DNA, 25 bp, Homo sapien
ctgggctatgtatacagtgccgtca

SEQ ID NO: 1034091 - DNA, 25 bp, Homo sapien
agtgccgtcagccactgtcatgcgc

SEQ ID NO: 1034092 - DNA, 25 bp, Homo sapien
tgctcagagccgctgatctccgagg

SEQ ID NO: 1034093 - DNA, 25 bp, Homo sapien
agagccgctgatctccgaggacgca

SEQ ID NO: 1034094 - DNA, 25 bp, Homo sapien
tcgatcacatgtctgatcccgtcca

SEQ ID NO: 1034095 - DNA, 25 bp, Homo sapien
tgtctgatcccgtccacggtgtgct

SEQ ID NO: 1034096 - DNA, 25 bp, Homo sapien
tatatcatagctcttgtatttagaa

SEQ ID NO: 1034097 - DNA, 25 bp, Homo sapien
tcaacgaaggctgccagtacagcca

SEQ ID NO: 1034098 - DNA, 25 bp, Homo sapien
aaccatccggcgcatcttgggctat

SEQ ID NO: 1034099 - DNA, 25 bp, Homo sapien
ccggcgcatcttgggctatatcata

SEQ ID NO: 1034100 - DNA, 25 bp, Homo sapien
gatgttggccagatgagaaatgaag

SEQ ID NO: 1034101 - DNA, 25 bp, Homo sapien
gttgctgtaataagtgttttcaggg

SEQ ID NO: 1034102 - DNA, 25 bp, Homo sapien
aatgaagttgctgtaataagtgttt

SEQ ID NO: 1034103 - DNA, 25 bp, Homo sapien
tgaagttgctgtaataagtgttttc

SEQ ID NO: 1034104 - DNA, 25 bp, Homo sapien
gcagcatgtcctgaacgtcaaggcc

SEQ ID NO: 1034105 - DNA, 25 bp, Homo sapien
ccagtggacgttctcagtgcaggga

SEQ ID NO: 1034106 - DNA, 25 bp, Homo sapien
taggtgtagtagtgctggaggttcc

SEQ ID NO: 1034107 - DNA, 25 bp, Homo sapien
aaaatctgccagcacaaaccagtgg

SEQ ID NO: 1034108 - DNA, 25 bp, Homo sapien
gattccaccactctgtggttcaggg

SEQ ID NO: 1034109 - DNA, 25 bp, Homo sapien
tcttgttgcggtgatccagtaagga

SEQ ID NO: 1034110 - DNA, 25 bp, Homo sapien
cctgcggtaatcgttgtggatggtc

SEQ ID NO: 1034111 - DNA, 25 bp, Homo sapien
gggaagttggattccaccactctgt

SEQ ID NO: 1034112 - DNA, 25 bp, Homo sapien
ccttatatcaccagaagagatgggt

SEQ ID NO: 1034113 - DNA, 25 bp, Homo sapien
ctccttcccttatatcaccagaaga

SEQ ID NO: 1034114 - DNA, 25 bp, Homo sapien
ctactgaaatgactctccttccctt

SEQ ID NO: 1034115 - DNA, 25 bp, Homo sapien
tactgaaatgactctccttccctta

SEQ ID NO: 1034116 - DNA, 25 bp, Homo sapien
tcagttcaatgctcttcttaagtag

SEQ ID NO: 1034117 - DNA, 25 bp, Homo sapien
tcaatcttatgtaggtaaaactgga

SEQ ID NO: 1034118 - DNA, 25 bp, Homo sapien
gaatttcctcaatcttatgtaggta

SEQ ID NO: 1034119 - DNA, 25 bp, Homo sapien
gctcttcttaagtagtcaagaattt

SEQ ID NO: 1034120 - DNA, 25 bp, Homo sapien
tctaatgctaaaggaaaggtcaggc

SEQ ID NO: 1034121 - DNA, 25 bp, Homo sapien
ggtgatgtctaactcagatcccgtc

SEQ ID NO: 1034122 - DNA, 25 bp, Homo sapien
gatcccgtctcatgaactgaagcca

SEQ ID NO: 1034123 - DNA, 25 bp, Homo sapien
ttcttagacaaggtagggtgcggct

SEQ ID NO: 1034124 - DNA, 25 bp, Homo sapien
tgcagtaagtcgttaaagactgagt

SEQ ID NO: 1034125 - DNA, 25 bp, Homo sapien
gcagtaagtcgttaaagactgagtt

SEQ ID NO: 1034126 - DNA, 25 bp, Homo sapien
cagtaagtcgttaaagactgagttc

SEQ ID NO: 1034127 - DNA, 25 bp, Homo sapien
tggagaccaccatgattccacccag

SEQ ID NO: 1034128 - DNA, 25 bp, Homo sapien
cctcctacaggacatattctttcta

SEQ ID NO: 1034129 - DNA, 25 bp, Homo sapien
tattctttctagagccactgtgcag

SEQ ID NO: 1034130 - DNA, 25 bp, Homo sapien
tgtgcagccgcttccataggcgagc

SEQ ID NO: 1034131 - DNA, 25 bp, Homo sapien
cttagtttcacatggaagtcccggc

SEQ ID NO: 1034132 - DNA, 25 bp, Homo sapien
gcaaacacttagtttcacatggaag

SEQ ID NO: 1034133 - DNA, 25 bp, Homo sapien
tgggctctgcaaacacttagtttca

SEQ ID NO: 1034134 - DNA, 25 bp, Homo sapien
ggctctgcaaacacttagtttcaca

SEQ ID NO: 1034135 - DNA, 25 bp, Homo sapien
ccttgtagccaacaggttgtagcac

SEQ ID NO: 1034136 - DNA, 25 bp, Homo sapien
cactcaaaacacatggactgagaac

SEQ ID NO: 1034137 - DNA, 25 bp, Homo sapien
tatcccggaaaacaatccttgtagc

SEQ ID NO: 1034138 - DNA, 25 bp, Homo sapien
ggttgtagcacgctgacacatccca

SEQ ID NO: 1034139 - DNA, 25 bp, Homo sapien
acactgtcttttggcgtttgtgcac

SEQ ID NO: 1034140 - DNA, 25 bp, Homo sapien
tcgtgggtggaaggtagccgccatc

SEQ ID NO: 1034141 - DNA, 25 bp, Homo sapien
ggtcgtgggtggaaggtagccgcca

SEQ ID NO: 1034142 - DNA, 25 bp, Homo sapien
gtcgtgggtggaaggtagccgccat

SEQ ID NO: 1034143 - DNA, 25 bp, Homo sapien
taaagatcgaggggagatggcctct

SEQ ID NO: 1034144 - DNA, 25 bp, Homo sapien
agatggcctctgaagaatgcccgaa

SEQ ID NO: 1034145 - DNA, 25 bp, Homo sapien
ccttaaagatcgaggggagatggcc

SEQ ID NO: 1034146 - DNA, 25 bp, Homo sapien
atggcctctgaagaatgcccgaatc

SEQ ID NO: 1034147 - DNA, 25 bp, Homo sapien
gagaaacagccggtctttaggtggc

SEQ ID NO: 1034148 - DNA, 25 bp, Homo sapien
tcataaagccaggtaggcccagggg

SEQ ID NO: 1034149 - DNA, 25 bp, Homo sapien
aaacagccggtctttaggtggctgg

SEQ ID NO: 1034150 - DNA, 25 bp, Homo sapien
agcaggtgtcacttgggaggtagag

SEQ ID NO: 1034151 - DNA, 25 bp, Homo sapien
tgcaactagggagctttcggcttgg

SEQ ID NO: 1034152 - DNA, 25 bp, Homo sapien
catttctgcggaccaatgtcaggca

SEQ ID NO: 1034153 - DNA, 25 bp, Homo sapien
cactggcaacgtgtgtcttatcaac

SEQ ID NO: 1034154 - DNA, 25 bp, Homo sapien
tggtgggtgcaaagacgaaattcgt

SEQ ID NO: 1034155 - DNA, 25 bp, Homo sapien
tcctggtaacataacaacaacagtt

SEQ ID NO: 1034156 - DNA, 25 bp, Homo sapien
caacctttgtgtggctcctggtaac

SEQ ID NO: 1034157 - DNA, 25 bp, Homo sapien
gacactgagtcagaattcttcatcc

SEQ ID NO: 1034158 - DNA, 25 bp, Homo sapien
ccagaaatacctgtctaggaaggtg

SEQ ID NO: 1034159 - DNA, 25 bp, Homo sapien
gaggagcacgtgcagtacgtgacgg

SEQ ID NO: 1034160 - DNA, 25 bp, Homo sapien
tgagcgccggcgtgccggaggagca

SEQ ID NO: 1034161 - DNA, 25 bp, Homo sapien
tactactacgcggaccagatctacc

SEQ ID NO: 1034162 - DNA, 25 bp, Homo sapien
cacgtgcagtacgtgacggccggca

SEQ ID NO: 1034163 - DNA, 25 bp, Homo sapien
gcgggcttcatctccgtgctgaagc

SEQ ID NO: 1034164 - DNA, 25 bp, Homo sapien
gccgagatccggcaggaggatgagg

SEQ ID NO: 1034165 - DNA, 25 bp, Homo sapien
tgaggcagagaaggccgcgggcttc

SEQ ID NO: 1034166 - DNA, 25 bp, Homo sapien
ttccggatgcgctcgctgcgctggc

SEQ ID NO: 1034167 - DNA, 25 bp, Homo sapien
ttgacgttgctgtggtctgtaaccg

SEQ ID NO: 1034168 - DNA, 25 bp, Homo sapien
tgctgtggtctgtaaccgtgtccat

SEQ ID NO: 1034169 - DNA, 25 bp, Homo sapien
tgaattcatggaagacttccccttg

SEQ ID NO: 1034170 - DNA, 25 bp, Homo sapien
tggtaggaccggtgaattcatggaa

SEQ ID NO: 1034171 - DNA, 25 bp, Homo sapien
ccagcactggtaggtcactgtggtg

SEQ ID NO: 1034172 - DNA, 25 bp, Homo sapien
cttccagtatgggtacaacgtggct

SEQ ID NO: 1034173 - DNA, 25 bp, Homo sapien
aacgtggctgctgtcaactccccag

SEQ ID NO: 1034174 - DNA, 25 bp, Homo sapien
taggtcactgtggtgagcaagatgt

SEQ ID NO: 1034175 - DNA, 25 bp, Homo sapien
ggcccgccaggcagagggactggct

SEQ ID NO: 1034176 - DNA, 25 bp, Homo sapien
gagggactggctgagcggcccgcag

SEQ ID NO: 1034177 - DNA, 25 bp, Homo sapien
aggcagagggactggctgagcggcc

SEQ ID NO: 1034178 - DNA, 25 bp, Homo sapien
tgagcggcccgcagcctggcgtcat

SEQ ID NO: 1034179 - DNA, 25 bp, Homo sapien
cattatatataagctggctcctgca

SEQ ID NO: 1034180 - DNA, 25 bp, Homo sapien
gagagtggtctcattaggaaagaac

SEQ ID NO: 1034181 - DNA, 25 bp, Homo sapien
cctatcgccccaggcgagagggatt

SEQ ID NO: 1034182 - DNA, 25 bp, Homo sapien
ttaaaggtcccataagcacattcct

SEQ ID NO: 1034183 - DNA, 25 bp, Homo sapien
gggctgcctggtgcaagattgcacc

SEQ ID NO: 1034184 - DNA, 25 bp, Homo sapien
gcctggtgcaagattgcacccacaa

SEQ ID NO: 1034185 - DNA, 25 bp, Homo sapien
tgcaagattgcacccacaactgggc

SEQ ID NO: 1034186 - DNA, 25 bp, Homo sapien
ggtgcaagattgcacccacaactgg

SEQ ID NO: 1034187 - DNA, 25 bp, Homo sapien
cctcgcctggcctgtcatgagtttt

SEQ ID NO: 1034188 - DNA, 25 bp, Homo sapien
ctcgcctggcctgtcatgagtttta

SEQ ID NO: 1034189 - DNA, 25 bp, Homo sapien
ggtggtgggcgccagcgtgatgcca

SEQ ID NO: 1034190 - DNA, 25 bp, Homo sapien
ggctcccacagacgtccttgtcttt

SEQ ID NO: 1034191 - DNA, 25 bp, Homo sapien
ctgagtggctgtgtgtttaccacgc

SEQ ID NO: 1034192 - DNA, 25 bp, Homo sapien
agtggctgtgtgtttaccacgccca

SEQ ID NO: 1034193 - DNA, 25 bp, Homo sapien
ctttcatgtggtgtgcctgagtggc

SEQ ID NO: 1034194 - DNA, 25 bp, Homo sapien
ccttggtccatggataaggagatct

SEQ ID NO: 1034195 - DNA, 25 bp, Homo sapien
cacttttatctacagaatcaaagca

SEQ ID NO: 1034196 - DNA, 25 bp, Homo sapien
cctcaaattgatagggaatcgcaag

SEQ ID NO: 1034197 - DNA, 25 bp, Homo sapien
gcaagatcaaacctaatgtacacca

SEQ ID NO: 1034198 - DNA, 25 bp, Homo sapien
aggagttaccactgaacgaaactgg

SEQ ID NO: 1034199 - DNA, 25 bp, Homo sapien
tccaggaggttgacggcatctaggc

SEQ ID NO: 1034200 - DNA, 25 bp, Homo sapien
taatactgtctatggattgtgccaa

SEQ ID NO: 1034201 - DNA, 25 bp, Homo sapien
tcacacagaggccattaatttaggg

SEQ ID NO: 1034202 - DNA, 25 bp, Homo sapien
cagtgagtgctccagatcttgttcc

SEQ ID NO: 1034203 - DNA, 25 bp, Homo sapien
gaggtgacgccaaacgtaagtgtct

SEQ ID NO: 1034204 - DNA, 25 bp, Homo sapien
ttctttgcacctcaccaattgcggg

SEQ ID NO: 1034205 - DNA, 25 bp, Homo sapien
tctagtacctttcacacaggccagg

SEQ ID NO: 1034206 - DNA, 25 bp, Homo sapien
agctctgagtcttctggattccagc

SEQ ID NO: 1034207 - DNA, 25 bp, Homo sapien
ctgagtcttctggattccagcgtcc

SEQ ID NO: 1034208 - DNA, 25 bp, Homo sapien
agagctctgagtcttctggattcca

SEQ ID NO: 1034209 - DNA, 25 bp, Homo sapien
ctctgagtcttctggattccagcgt

SEQ ID NO: 1034210 - DNA, 25 bp, Homo sapien
ctgctgtgacgatgacgggatgatg

SEQ ID NO: 1034211 - DNA, 25 bp, Homo sapien
cgatgacgggatgatgagaactgtc

SEQ ID NO: 1034212 - DNA, 25 bp, Homo sapien
gatgatgagaactgtcatcgctcct

SEQ ID NO: 1034213 - DNA, 25 bp, Homo sapien
gaactgtcatcgctccttctcattc

SEQ ID NO: 1034214 - DNA, 25 bp, Homo sapien
cattaaggtctaagccagggctggg

SEQ ID NO: 1034215 - DNA, 25 bp, Homo sapien
cctgctagcaggagagggaatctta

SEQ ID NO: 1034216 - DNA, 25 bp, Homo sapien
tataacgcagcgcaatccttgagtg

SEQ ID NO: 1034217 - DNA, 25 bp, Homo sapien
tagaagccagttacgggtcttgccc

SEQ ID NO: 1034218 - DNA, 25 bp, Homo sapien
aattttaaaggtggtatctcactct

SEQ ID NO: 1034219 - DNA, 25 bp, Homo sapien
ccgcctcagctcaacctgttttctt

SEQ ID NO: 1034220 - DNA, 25 bp, Homo sapien
ctcccgcctcagctcaacctgtttt

SEQ ID NO: 1034221 - DNA, 25 bp, Homo sapien
gcctcagctcaacctgttttcttat

SEQ ID NO: 1034222 - DNA, 25 bp, Homo sapien
ggactttacatgtgcaccacaccca

SEQ ID NO: 1034223 - DNA, 25 bp, Homo sapien
ttttcgtaggggcagtgtctcatta

SEQ ID NO: 1034224 - DNA, 25 bp, Homo sapien
tttcgtaggggcagtgtctcattat

SEQ ID NO: 1034225 - DNA, 25 bp, Homo sapien
ttcgtaggggcagtgtctcattatg

SEQ ID NO: 1034226 - DNA, 25 bp, Homo sapien
agatgccgctgtcccgtcggtctgg

SEQ ID NO: 1034227 - DNA, 25 bp, Homo sapien
cccagctccccggatcccgggctgg

SEQ ID NO: 1034228 - DNA, 25 bp, Homo sapien
ttcaggtggaggagatgccgctgtc

SEQ ID NO: 1034229 - DNA, 25 bp, Homo sapien
aggagatgccgctgtcccgtcggtc

SEQ ID NO: 1034230 - DNA, 25 bp, Homo sapien
cggctccccagcgccgcgcgccggc

SEQ ID NO: 1034231 - DNA, 25 bp, Homo sapien
ctccccagcgccgcgcgccggccat

SEQ ID NO: 1034232 - DNA, 25 bp, Homo sapien
ggctccccagcgccgcgcgccggcc

SEQ ID NO: 1034233 - DNA, 25 bp, Homo sapien
ccggctccccagcgccgcgcgccgg

SEQ ID NO: 1034234 - DNA, 25 bp, Homo sapien
ggagccaccgagagatttgctgtcc

SEQ ID NO: 1034235 - DNA, 25 bp, Homo sapien
accgagagatttgctgtccgcttga

SEQ ID NO: 1034236 - DNA, 25 bp, Homo sapien
tgtccgcttgatactggggcacggt

SEQ ID NO: 1034237 - DNA, 25 bp, Homo sapien
gctgtccgcttgatactggggcacg

SEQ ID NO: 1034238 - DNA, 25 bp, Homo sapien
cgaggagggcttgtttctgatgaaa

SEQ ID NO: 1034239 - DNA, 25 bp, Homo sapien
tgcgaggagggcttgtttctgatga

SEQ ID NO: 1034240 - DNA, 25 bp, Homo sapien
gcgaggagggcttgtttctgatgaa

SEQ ID NO: 1034241 - DNA, 25 bp, Homo sapien
tcgtgagtccaaggagaatccgccc

SEQ ID NO: 1034242 - DNA, 25 bp, Homo sapien
ccctttcgttttgcgcaggtggaga

SEQ ID NO: 1034243 - DNA, 25 bp, Homo sapien
atctcgcgggcccagttcggagtcc

SEQ ID NO: 1034244 - DNA, 25 bp, Homo sapien
gaatccgccctttcgttttgcgcag

SEQ ID NO: 1034245 - DNA, 25 bp, Homo sapien
ctcccagtgccggaggaatgagtcc

SEQ ID NO: 1034246 - DNA, 25 bp, Homo sapien
tcccagtgccggaggaatgagtccc

SEQ ID NO: 1034247 - DNA, 25 bp, Homo sapien
atcgtcttctcccagtgccggagga

SEQ ID NO: 1034248 - DNA, 25 bp, Homo sapien
tcttctcccagtgccggaggaatga

SEQ ID NO: 1034249 - DNA, 25 bp, Homo sapien
gggcccaggatggatacagccttag

SEQ ID NO: 1034250 - DNA, 25 bp, Homo sapien
caactaatgacggatggccacctct

SEQ ID NO: 1034251 - DNA, 25 bp, Homo sapien
tctggagacgggaaccaggccttct

SEQ ID NO: 1034252 - DNA, 25 bp, Homo sapien
gctgttactgatggccgcaactaat

SEQ ID NO: 1034253 - DNA, 25 bp, Homo sapien
aaggaccccggtaagttggctgatg

SEQ ID NO: 1034254 - DNA, 25 bp, Homo sapien
tccttcaagtgactgcagaccgcag

SEQ ID NO: 1034255 - DNA, 25 bp, Homo sapien
agctttaagaatgccgtactgcgaa

SEQ ID NO: 1034256 - DNA, 25 bp, Homo sapien
cagagtctgagcgtctggttcccac

SEQ ID NO: 1034257 - DNA, 25 bp, Homo sapien
taggtcgtgctaagacccagtcatc

SEQ ID NO: 1034258 - DNA, 25 bp, Homo sapien
tcatcctggtgtgagagtactgcca

SEQ ID NO: 1034259 - DNA, 25 bp, Homo sapien
ccgcagctacaagggaccaggtgtg

SEQ ID NO: 1034260 - DNA, 25 bp, Homo sapien
tttcttgtttccgtgctgaccgcag

SEQ ID NO: 1034261 - DNA, 25 bp, Homo sapien
atttagaagtcggagcgcacacgct

SEQ ID NO: 1034262 - DNA, 25 bp, Homo sapien
gacaatgggagtacctgcctccggg

SEQ ID NO: 1034263 - DNA, 25 bp, Homo sapien
catctgtagaatgagcggctcggtc

SEQ ID NO: 1034264 - DNA, 25 bp, Homo sapien
tagtaagcggaagcttggacccgtg

SEQ ID NO: 1034265 - DNA, 25 bp, Homo sapien
ctcctcttccgcagggcccgtcact

SEQ ID NO: 1034266 - DNA, 25 bp, Homo sapien
cgacactccgataccgcccgcggag

SEQ ID NO: 1034267 - DNA, 25 bp, Homo sapien
aagtgcgcgtgtcacgcggccacgc

SEQ ID NO: 1034268 - DNA, 25 bp, Homo sapien
ccgtcactccgacaagtgcgcgtgt

SEQ ID NO: 1034269 - DNA, 25 bp, Homo sapien
tctggctaagcattcaaggttgggt

SEQ ID NO: 1034270 - DNA, 25 bp, Homo sapien
tgccaaagattaagcaggtcccggg

SEQ ID NO: 1034271 - DNA, 25 bp, Homo sapien
gaaacgctatgtgaaacccgagggc

SEQ ID NO: 1034272 - DNA, 25 bp, Homo sapien
tgcctttcatgagccatgggcctgt

SEQ ID NO: 1034273 - DNA, 25 bp, Homo sapien
tgaggtcatcgtatctgtcagcaaa

SEQ ID NO: 1034274 - DNA, 25 bp, Homo sapien
tacaggaacttcctaattggcctcc

SEQ ID NO: 1034275 - DNA, 25 bp, Homo sapien
taaatgacaactctatctttccagg

SEQ ID NO: 1034276 - DNA, 25 bp, Homo sapien
tctccgtctggattactacaggaac

SEQ ID NO: 1034277 - DNA, 25 bp, Homo sapien
cctattatccgggaactgccctcca

SEQ ID NO: 1034278 - DNA, 25 bp, Homo sapien
tataaggcaaatgagtgcttcgagc

SEQ ID NO: 1034279 - DNA, 25 bp, Homo sapien
acttttctataaggcaaatgagtgc

SEQ ID NO: 1034280 - DNA, 25 bp, Homo sapien
aaatgagtgcttcgagccttgacct

SEQ ID NO: 1034281 - DNA, 25 bp, Homo sapien
gctaattaaatcagggagatgccct

SEQ ID NO: 1034282 - DNA, 25 bp, Homo sapien
gcaaataccatcaacccaaggtggg

SEQ ID NO: 1034283 - DNA, 25 bp, Homo sapien
gagccttagcatccacatttcttca

SEQ ID NO: 1034284 - DNA, 25 bp, Homo sapien
cagtgaagactgagatgatacattt

SEQ ID NO: 1034285 - DNA, 25 bp, Homo sapien
taaccaagtagtcggcgtgtgccag

SEQ ID NO: 1034286 - DNA, 25 bp, Homo sapien
agtctcaaatggtttcatgcgccca

SEQ ID NO: 1034287 - DNA, 25 bp, Homo sapien
tccggaatactgagcagcgagcacc

SEQ ID NO: 1034288 - DNA, 25 bp, Homo sapien
cagcagttctcatcaaaggagggca

SEQ ID NO: 1034289 - DNA, 25 bp, Homo sapien
catggccaaagggtttctcaaggac

SEQ ID NO: 1034290 - DNA, 25 bp, Homo sapien
cagctactgttgatgttgcgggcaa

SEQ ID NO: 1034291 - DNA, 25 bp, Homo sapien
ccagcaggattatggagacatgtcc

SEQ ID NO: 1034292 - DNA, 25 bp, Homo sapien
taagtaatggtccacccggtacatc

SEQ ID NO: 1034293 - DNA, 25 bp, Homo sapien
tggcaggctccatgctgatgctcac

SEQ ID NO: 1034294 - DNA, 25 bp, Homo sapien
cctggcaggctccatgctgatgctc

SEQ ID NO: 1034295 - DNA, 25 bp, Homo sapien
ctagccctggcaggctccatgctga

SEQ ID NO: 1034296 - DNA, 25 bp, Homo sapien
gccctggcaggctccatgctgatgc

SEQ ID NO: 1034297 - DNA, 25 bp, Homo sapien
catgtgtcacccaggaggttaaccc

SEQ ID NO: 1034298 - DNA, 25 bp, Homo sapien
caggacttaaggtcctactgctccc

SEQ ID NO: 1034299 - DNA, 25 bp, Homo sapien
tgttgccaaccttctggctcaaaac

SEQ ID NO: 1034300 - DNA, 25 bp, Homo sapien
aggaggttaacccatgctcctgccc

SEQ ID NO: 1034301 - DNA, 25 bp, Homo sapien
caagggcctccaaggcattttgagt

SEQ ID NO: 1034302 - DNA, 25 bp, Homo sapien
agggcctccaaggcattttgagtga

SEQ ID NO: 1034303 - DNA, 25 bp, Homo sapien
ccccaagggcctccaaggcattttg

SEQ ID NO: 1034304 - DNA, 25 bp, Homo sapien
cccaagggcctccaaggcattttga

SEQ ID NO: 1034305 - DNA, 25 bp, Homo sapien
gccatgtctctgtcctcaacaactg

SEQ ID NO: 1034306 - DNA, 25 bp, Homo sapien
tgccataaacaagtgaaaacctccc

SEQ ID NO: 1034307 - DNA, 25 bp, Homo sapien
tttcttctcatcttgccataaacaa

SEQ ID NO: 1034308 - DNA, 25 bp, Homo sapien
ttctgaggacccctatttaggaatc

SEQ ID NO: 1034309 - DNA, 25 bp, Homo sapien
gcggttctggtctcggaaaggcagg

SEQ ID NO: 1034310 - DNA, 25 bp, Homo sapien
tcagcatccacggtctctttcatga

SEQ ID NO: 1034311 - DNA, 25 bp, Homo sapien
tggtgccggttccagaggccgtcca

SEQ ID NO: 1034312 - DNA, 25 bp, Homo sapien
cgtccaaagccttgcggttctggtc

SEQ ID NO: 1034313 - DNA, 25 bp, Homo sapien
ctcatgggcagcaatggctacttgg

SEQ ID NO: 1034314 - DNA, 25 bp, Homo sapien
gcaatggctacttgggctttgcagc

SEQ ID NO: 1034315 - DNA, 25 bp, Homo sapien
tggaccatacgctcctcatgggcag

SEQ ID NO: 1034316 - DNA, 25 bp, Homo sapien
ttctctggaccatacgctcctcatg

SEQ ID NO: 1034317 - DNA, 25 bp, Homo sapien
ctttcatatcttccgtgtttctttc

SEQ ID NO: 1034318 - DNA, 25 bp, Homo sapien
aatccaaaagtacctttgctaggat

SEQ ID NO: 1034319 - DNA, 25 bp, Homo sapien
tgctaggataatcgggcctgcaatc

SEQ ID NO: 1034320 - DNA, 25 bp, Homo sapien
tcatatcttccgtgtttctttcttc

SEQ ID NO: 1034321 - DNA, 25 bp, Homo sapien
ctgctgagtgagctcctggcccctt

SEQ ID NO: 1034322 - DNA, 25 bp, Homo sapien
accggccctgctgagtgagctcctg

SEQ ID NO: 1034323 - DNA, 25 bp, Homo sapien
acagctctgcagagggggcgggaag

SEQ ID NO: 1034324 - DNA, 25 bp, Homo sapien
ggaaccggccctgctgagtgagctc

SEQ ID NO: 1034325 - DNA, 25 bp, Homo sapien
ggctggatccttgaatggtggtaca

SEQ ID NO: 1034326 - DNA, 25 bp, Homo sapien
gaagcagaagcacgaaagaggtact

SEQ ID NO: 1034327 - DNA, 25 bp, Homo sapien
aagatgaagctgtctgcgacctcca

SEQ ID NO: 1034328 - DNA, 25 bp, Homo sapien
gtgaaatcagtgaggcagcctttgc

SEQ ID NO: 1034329 - DNA, 25 bp, Homo sapien
ggaggatctaaagagaggccagaac

SEQ ID NO: 1034330 - DNA, 25 bp, Homo sapien
gagaggccagaacatcagatctccc

SEQ ID NO: 1034331 - DNA, 25 bp, Homo sapien
agatctccccgaggtgcaccaaaac

SEQ ID NO: 1034332 - DNA, 25 bp, Homo sapien
cccagcccgcacattcatcctgcat

SEQ ID NO: 1034333 - DNA, 25 bp, Homo sapien
tgcgcacctgctcactgtaagactg

SEQ ID NO: 1034334 - DNA, 25 bp, Homo sapien
gaagacctgaagcttgtgccgcagc

SEQ ID NO: 1034335 - DNA, 25 bp, Homo sapien
tgaggacctccgtcagatggttctg

SEQ ID NO: 1034336 - DNA, 25 bp, Homo sapien
tctggaggacgtcgcgaatgacacc

SEQ ID NO: 1034337 - DNA, 25 bp, Homo sapien
tcatcccaggaaggcgtcgtagtcc

SEQ ID NO: 1034338 - DNA, 25 bp, Homo sapien
tcttgaacaagatccgagcgtagcc

SEQ ID NO: 1034339 - DNA, 25 bp, Homo sapien
gacatcaggatgaaaggcacgccct

SEQ ID NO: 1034340 - DNA, 25 bp, Homo sapien
cgtagtaatcggacagagggctgcc

SEQ ID NO: 1034341 - DNA, 25 bp, Homo sapien
aacaggacatcctagactcggcggc

SEQ ID NO: 1034342 - DNA, 25 bp, Homo sapien
caaaggcatcgggacaaggcttgtc

SEQ ID NO: 1034343 - DNA, 25 bp, Homo sapien
tggtgtgaacaagagccccggcttg

SEQ ID NO: 1034344 - DNA, 25 bp, Homo sapien
tattgagagcggaaacacccatccg

SEQ ID NO: 1034345 - DNA, 25 bp, Homo sapien
tttatgggcccctaagtgcacacgt

SEQ ID NO: 1034346 - DNA, 25 bp, Homo sapien
gaatgcgttcagttcagccagcgga

SEQ ID NO: 1034347 - DNA, 25 bp, Homo sapien
tggaatcattggtccccaccaggga

SEQ ID NO: 1034348 - DNA, 25 bp, Homo sapien
gagtaagttctaagggagccccatg

SEQ ID NO: 1034349 - DNA, 25 bp, Homo sapien
ggctagagggtacacttcggcaaag

SEQ ID NO: 1034350 - DNA, 25 bp, Homo sapien
gaaacatgatccagatgcagcaggc

SEQ ID NO: 1034351 - DNA, 25 bp, Homo sapien
tccggcacaggtaaagatgagctcc

SEQ ID NO: 1034352 - DNA, 25 bp, Homo sapien
gaaatgcgtctgaaagcccttgcca

SEQ ID NO: 1034353 - DNA, 25 bp, Homo sapien
aataaacgttacatttgacatagaa

SEQ ID NO: 1034354 - DNA, 25 bp, Homo sapien
aaataaacgttacatttgacataga

SEQ ID NO: 1034355 - DNA, 25 bp, Homo sapien
gcctgactgatagcatgagcttagt

SEQ ID NO: 1034356 - DNA, 25 bp, Homo sapien
gattaatattctcatccgagtgctt

SEQ ID NO: 1034357 - DNA, 25 bp, Homo sapien
aggcctcatacagtgaatgctgaag

SEQ ID NO: 1034358 - DNA, 25 bp, Homo sapien
aatttttcctcccaacgatgcttct

SEQ ID NO: 1034359 - DNA, 25 bp, Homo sapien
gccgcagggagcgaagtcgcctcct

SEQ ID NO: 1034360 - DNA, 25 bp, Homo sapien
ttcctgctgcgagcgcgcaggctgc

SEQ ID NO: 1034361 - DNA, 25 bp, Homo sapien
cgcgacttctgtgcggaggagaaaa

SEQ ID NO: 1034362 - DNA, 25 bp, Homo sapien
gcaggctgcccgagcgcgacttctg

SEQ ID NO: 1034363 - DNA, 25 bp, Homo sapien
gtgttacaatcaccagctcatgtga

SEQ ID NO: 1034364 - DNA, 25 bp, Homo sapien
ggccctaccacgtctttaggactca

SEQ ID NO: 1034365 - DNA, 25 bp, Homo sapien
gactcactgcaggacaccgcaggct

SEQ ID NO: 1034366 - DNA, 25 bp, Homo sapien
gactgtcccccactatatgcagtga

SEQ ID NO: 1034367 - DNA, 25 bp, Homo sapien
ttccccgccttggtgagcaacatgc

SEQ ID NO: 1034368 - DNA, 25 bp, Homo sapien
cgccttggtgagcaacatgccacgg

SEQ ID NO: 1034369 - DNA, 25 bp, Homo sapien
ttggtgagcaacatgccacggccag

SEQ ID NO: 1034370 - DNA, 25 bp, Homo sapien
acggccagggcagcgcacacatgtc

SEQ ID NO: 1034371 - DNA, 25 bp, Homo sapien
cttcctctgtgtatcaaggaacaac

SEQ ID NO: 1034372 - DNA, 25 bp, Homo sapien
atcaaggaacaacttagatgcacgg

SEQ ID NO: 1034373 - DNA, 25 bp, Homo sapien
atgcacggagcgaggccactataca

SEQ ID NO: 1034374 - DNA, 25 bp, Homo sapien
acaacttagatgcacggagcgaggc

SEQ ID NO: 1034375 - DNA, 25 bp, Homo sapien
tcggctcggcgggaactagaatgtt

SEQ ID NO: 1034376 - DNA, 25 bp, Homo sapien
tgtttcatccagacgctcaaagccg

SEQ ID NO: 1034377 - DNA, 25 bp, Homo sapien
aaggtcagccttggtacccagtgcc

SEQ ID NO: 1034378 - DNA, 25 bp, Homo sapien
ccagggcacttcgtgagagcgaaaa

SEQ ID NO: 1034379 - DNA, 25 bp, Homo sapien
aaagcatttgtctggtctggatccg

SEQ ID NO: 1034380 - DNA, 25 bp, Homo sapien
tctggatccgacaagaccgtgctgg

SEQ ID NO: 1034381 - DNA, 25 bp, Homo sapien
aagtccagggccacaagcgtttttg

SEQ ID NO: 1034382 - DNA, 25 bp, Homo sapien
acttgtcgcaaacacgactgtctgg

SEQ ID NO: 1034383 - DNA, 25 bp, Homo sapien
gctgaccaagggtggcttagcctca

SEQ ID NO: 1034384 - DNA, 25 bp, Homo sapien
agacggctgatgatcaggctgctgt

SEQ ID NO: 1034385 - DNA, 25 bp, Homo sapien
gaagacggctgatgatcaggctgct

SEQ ID NO: 1034386 - DNA, 25 bp, Homo sapien
agcagctgaccaagggtggcttagc

SEQ ID NO: 1034387 - DNA, 25 bp, Homo sapien
cagagtcgagtagttgcggcagaca

SEQ ID NO: 1034388 - DNA, 25 bp, Homo sapien
tagagagtcacaaacgcatcagcat

SEQ ID NO: 1034389 - DNA, 25 bp, Homo sapien
gatgacagtttggaggacctccgaa

SEQ ID NO: 1034390 - DNA, 25 bp, Homo sapien
tcccgcaggacagaaacgcaaggtt

SEQ ID NO: 1034391 - DNA, 25 bp, Homo sapien
tacagagtcaatacagagatggtgc

SEQ ID NO: 1034392 - DNA, 25 bp, Homo sapien
cagtaatgagatcgcacgttgcacc

SEQ ID NO: 1034393 - DNA, 25 bp, Homo sapien
cataagaatgagtgccggctaggca

SEQ ID NO: 1034394 - DNA, 25 bp, Homo sapien
ccctggtgcgtgagcccataagaat

SEQ ID NO: 1034395 - DNA, 25 bp, Homo sapien
cctccacggatattggctcagggcc

SEQ ID NO: 1034396 - DNA, 25 bp, Homo sapien
acggatattggctcagggccccggt

SEQ ID NO: 1034397 - DNA, 25 bp, Homo sapien
tccacggatattggctcagggcccc

SEQ ID NO: 1034398 - DNA, 25 bp, Homo sapien
gcagcctccacggatattggctcag

SEQ ID NO: 1034399 - DNA, 25 bp, Homo sapien
ggctgtctcccaggtctccatgagc

SEQ ID NO: 1034400 - DNA, 25 bp, Homo sapien
cagggccttggctgtctcccaggtc

SEQ ID NO: 1034401 - DNA, 25 bp, Homo sapien
ctgggcaggggcaccccacaaaggg

SEQ ID NO: 1034402 - DNA, 25 bp, Homo sapien
gtcctggggagcccacggccagggc

SEQ ID NO: 1034403 - DNA, 25 bp, Homo sapien
ccagagcccccatacagtcacgaac

SEQ ID NO: 1034404 - DNA, 25 bp, Homo sapien
agggtgtccacgctcctgttctgtg

SEQ ID NO: 1034405 - DNA, 25 bp, Homo sapien
cagggtgtccacgctcctgttctgt

SEQ ID NO: 1034406 - DNA, 25 bp, Homo sapien
gggtgtccacgctcctgttctgtgg

SEQ ID NO: 1034407 - DNA, 25 bp, Homo sapien
agcaaggcgggagcgcccccaggaa

SEQ ID NO: 1034408 - DNA, 25 bp, Homo sapien
gcctgccttgcctgggctggatcag

SEQ ID NO: 1034409 - DNA, 25 bp, Homo sapien
ggagcaagctccaccgtctccaagg

SEQ ID NO: 1034410 - DNA, 25 bp, Homo sapien
gaagcggcccttggttaccactggc

SEQ ID NO: 1034411 - DNA, 25 bp, Homo sapien
tggatcagccctggccggagcaagc

SEQ ID NO: 1034412 - DNA, 25 bp, Homo sapien
ggagttctcgaatattctaggcaag

SEQ ID NO: 1034413 - DNA, 25 bp, Homo sapien
tctcgaatattctaggcaagtgcct

SEQ ID NO: 1034414 - DNA, 25 bp, Homo sapien
gaatattctaggcaagtgcctggga

SEQ ID NO: 1034415 - DNA, 25 bp, Homo sapien
gggacctggagttctcgaatattct

SEQ ID NO: 1034416 - DNA, 25 bp, Homo sapien
ctgtagaagccatcagtcactcggg

SEQ ID NO: 1034417 - DNA, 25 bp, Homo sapien
tgtagaagccatcagtcactcgggg

SEQ ID NO: 1034418 - DNA, 25 bp, Homo sapien
gtagaagccatcagtcactcggggt

SEQ ID NO: 1034419 - DNA, 25 bp, Homo sapien
cataaacaggctgccgatccccttg

SEQ ID NO: 1034420 - DNA, 25 bp, Homo sapien
caggctgccgatccccttgcccaga

SEQ ID NO: 1034421 - DNA, 25 bp, Homo sapien
ataaacaggctgccgatccccttgc

SEQ ID NO: 1034422 - DNA, 25 bp, Homo sapien
aaacaggctgccgatccccttgccc

SEQ ID NO: 1034423 - DNA, 25 bp, Homo sapien
ctgaaccagccacatctagaggccg

SEQ ID NO: 1034424 - DNA, 25 bp, Homo sapien
gaaccagccacatctagaggccgac

SEQ ID NO: 1034425 - DNA, 25 bp, Homo sapien
tgaaccagccacatctagaggccga

SEQ ID NO: 1034426 - DNA, 25 bp, Homo sapien
ctttcagagggctcgaatcagtgga

SEQ ID NO: 1034427 - DNA, 25 bp, Homo sapien
tatcgcagctgtagcttagtcaggg

SEQ ID NO: 1034428 - DNA, 25 bp, Homo sapien
tgggaaaccagcatgatagtcaaac

SEQ ID NO: 1034429 - DNA, 25 bp, Homo sapien
tggagccatggcctgggaaaccagc

SEQ ID NO: 1034430 - DNA, 25 bp, Homo sapien
ctgttgaaggaacggctacaccctc

SEQ ID NO: 1034431 - DNA, 25 bp, Homo sapien
tgtggtggtgttttaggaagaggtc

SEQ ID NO: 1034432 - DNA, 25 bp, Homo sapien
ggtctgttgaaggaacggctacacc

SEQ ID NO: 1034433 - DNA, 25 bp, Homo sapien
gaggtctgttgaaggaacggctaca

SEQ ID NO: 1034434 - DNA, 25 bp, Homo sapien
cagaaacaccggtggctgttccacc

SEQ ID NO: 1034435 - DNA, 25 bp, Homo sapien
cagccatttaaggttgtctgggtcc

SEQ ID NO: 1034436 - DNA, 25 bp, Homo sapien
agagccgcgtgaccctactggattt

SEQ ID NO: 1034437 - DNA, 25 bp, Homo sapien
tactggatttctcggtggcagcctg

SEQ ID NO: 1034438 - DNA, 25 bp, Homo sapien
tcggccagcttcgaacagccattta

SEQ ID NO: 1034439 - DNA, 25 bp, Homo sapien
tgtcacacacttacctaaaactcag

SEQ ID NO: 1034440 - DNA, 25 bp, Homo sapien
agcttctgctcgtttgtctgtcaca

SEQ ID NO: 1034441 - DNA, 25 bp, Homo sapien
ttccaagctcatgcgccgagacagt

SEQ ID NO: 1034442 - DNA, 25 bp, Homo sapien
agggctggcgttattgcatttccac

SEQ ID NO: 1034443 - DNA, 25 bp, Homo sapien
ggaccacatggctgtgagggatggg

SEQ ID NO: 1034444 - DNA, 25 bp, Homo sapien
ccacatggctgtgagggatgggagt

SEQ ID NO: 1034445 - DNA, 25 bp, Homo sapien
cccagcccaggccttggaccacatg

SEQ ID NO: 1034446 - DNA, 25 bp, Homo sapien
ccagcccaggccttggaccacatgg

SEQ ID NO: 1034447 - DNA, 25 bp, Homo sapien
cggaaagacaaacaaccggtgagca

SEQ ID NO: 1034448 - DNA, 25 bp, Homo sapien
gaaagacaaacaaccggtgagcagg

SEQ ID NO: 1034449 - DNA, 25 bp, Homo sapien
ggaaagacaaacaaccggtgagcag

SEQ ID NO: 1034450 - DNA, 25 bp, Homo sapien
aaagacaaacaaccggtgagcagga

SEQ ID NO: 1034451 - DNA, 25 bp, Homo sapien
caggagacctctgcaagctgcgcag

SEQ ID NO: 1034452 - DNA, 25 bp, Homo sapien
gaattcctaatgagggctgccagga

SEQ ID NO: 1034453 - DNA, 25 bp, Homo sapien
cgtggtctcgtctccagtattctga

SEQ ID NO: 1034454 - DNA, 25 bp, Homo sapien
caaggcaaactcatcaatctcgtgg

SEQ ID NO: 1034455 - DNA, 25 bp, Homo sapien
gactttgcccctgatagcgtccgtg

SEQ ID NO: 1034456 - DNA, 25 bp, Homo sapien
ccggatgccggtgaaagatgagctt

SEQ ID NO: 1034457 - DNA, 25 bp, Homo sapien
gatcgagtccgttcaagtagcgcat

SEQ ID NO: 1034458 - DNA, 25 bp, Homo sapien
tagcgcattcggatctcacagtggc

SEQ ID NO: 1034459 - DNA, 25 bp, Homo sapien
tggatggagctttccagcccacttg

SEQ ID NO: 1034460 - DNA, 25 bp, Homo sapien
gcacggtgcccctacacatgggctg

SEQ ID NO: 1034461 - DNA, 25 bp, Homo sapien
cttgcaggcggtagaagggactcat

SEQ ID NO: 1034462 - DNA, 25 bp, Homo sapien
tcaggactgtatctcagagcccact

SEQ ID NO: 1034463 - DNA, 25 bp, Homo sapien
tggttccatttccgaggtgacttcc

SEQ ID NO: 1034464 - DNA, 25 bp, Homo sapien
gctggttccatttccgaggtgactt

SEQ ID NO: 1034465 - DNA, 25 bp, Homo sapien
tgctggttccatttccgaggtgact

SEQ ID NO: 1034466 - DNA, 25 bp, Homo sapien
tgacttccccggggaggctacctgc

SEQ ID NO: 1034467 - DNA, 25 bp, Homo sapien
accgagcgacggcacaaatccatga

SEQ ID NO: 1034468 - DNA, 25 bp, Homo sapien
cagggccaggcgcaccgagcgacgg

SEQ ID NO: 1034469 - DNA, 25 bp, Homo sapien
gtagaggaggtaggccttgagggaa

SEQ ID NO: 1034470 - DNA, 25 bp, Homo sapien
ggcagcgtgtggatctcccccaggc

SEQ ID NO: 1034471 - DNA, 25 bp, Homo sapien
cggatgccggtccaaggtgcagggt

SEQ ID NO: 1034472 - DNA, 25 bp, Homo sapien
tcgcgctggcggtatgatggcgaac

SEQ ID NO: 1034473 - DNA, 25 bp, Homo sapien
accaggtggctgtcgcgctggcggt

SEQ ID NO: 1034474 - DNA, 25 bp, Homo sapien
ctctgtccatggctacggatgccgg

SEQ ID NO: 1034475 - DNA, 25 bp, Homo sapien
gggttgtatacggacggcatgcagg

SEQ ID NO: 1034476 - DNA, 25 bp, Homo sapien
cctgtgttggaatcggtccttgtcc

SEQ ID NO: 1034477 - DNA, 25 bp, Homo sapien
ggctttcgtaggagtttattctctg

SEQ ID NO: 1034478 - DNA, 25 bp, Homo sapien
gctgccttctgctgatgtcgggaag

SEQ ID NO: 1034479 - DNA, 25 bp, Homo sapien
ccaccccgagcagattggagctcaa

SEQ ID NO: 1034480 - DNA, 25 bp, Homo sapien
ccgtcccaccccgagcagattggag

SEQ ID NO: 1034481 - DNA, 25 bp, Homo sapien
gtcccaccccgagcagattggagct

SEQ ID NO: 1034482 - DNA, 25 bp, Homo sapien
accccgagcagattggagctcaatg

SEQ ID NO: 1034483 - DNA, 25 bp, Homo sapien
gagacatacttgtgcctgggcacgt

SEQ ID NO: 1034484 - DNA, 25 bp, Homo sapien
gagcttctgaggatgcacttgggaa

SEQ ID NO: 1034485 - DNA, 25 bp, Homo sapien
gggcgggcgaggcatacatatccca

SEQ ID NO: 1034486 - DNA, 25 bp, Homo sapien
gaagacacccagattgcacgtgagg

SEQ ID NO: 1034487 - DNA, 25 bp, Homo sapien
aaaaatatactccactgtaagattt

SEQ ID NO: 1034488 - DNA, 25 bp, Homo sapien
gagagctagagggtcacccggcatc

SEQ ID NO: 1034489 - DNA, 25 bp, Homo sapien
cataagctgggatctgtacaaggga

SEQ ID NO: 1034490 - DNA, 25 bp, Homo sapien
tcacccggcatctgtgaggacggct

SEQ ID NO: 1034491 - DNA, 25 bp, Homo sapien
acggctgggtcaaggccataagctg

SEQ ID NO: 1034492 - DNA, 25 bp, Homo sapien
tcctttattaggttactgactatta

SEQ ID NO: 1034493 - DNA, 25 bp, Homo sapien
gctctgggctggtaggaaagaaggg

SEQ ID NO: 1034494 - DNA, 25 bp, Homo sapien
ttcaaaactgtacaagccacaaggc

SEQ ID NO: 1034495 - DNA, 25 bp, Homo sapien
ggttactgactattatcaaccatca

SEQ ID NO: 1034496 - DNA, 25 bp, Homo sapien
tgcatgggccgtggcttgtagaccc

SEQ ID NO: 1034497 - DNA, 25 bp, Homo sapien
tgaaggatagccctcaaggtttccc

SEQ ID NO: 1034498 - DNA, 25 bp, Homo sapien
ttgatgccttgatcggcagctcggg

SEQ ID NO: 1034499 - DNA, 25 bp, Homo sapien
tgtagacccgaatgttgtctccaag

SEQ ID NO: 1034500 - DNA, 25 bp, Homo sapien
tactattacgcactctgccctgaag

SEQ ID NO: 1034501 - DNA, 25 bp, Homo sapien
tgggtactattacgcactctgccct

SEQ ID NO: 1034502 - DNA, 25 bp, Homo sapien
ggtactattacgcactctgccctga

SEQ ID NO: 1034503 - DNA, 25 bp, Homo sapien
agtgggtactattacgcactctgcc

SEQ ID NO: 1034504 - DNA, 25 bp, Homo sapien
agcaagttgtaaaaacccaattcag

SEQ ID NO: 1034505 - DNA, 25 bp, Homo sapien
catctggcagctgcttcaaatagtt

SEQ ID NO: 1034506 - DNA, 25 bp, Homo sapien
tctgtctgaagttggagtcgctcgc

SEQ ID NO: 1034507 - DNA, 25 bp, Homo sapien
aacccaattcagacacaacatctgg

SEQ ID NO: 1034508 - DNA, 25 bp, Homo sapien
ccggaaggcggccctggctttcagt

SEQ ID NO: 1034509 - DNA, 25 bp, Homo sapien
ttcattctgcatcgcccggaaggcg

SEQ ID NO: 1034510 - DNA, 25 bp, Homo sapien
ctggctttcagtgtggagtcctcca

SEQ ID NO: 1034511 - DNA, 25 bp, Homo sapien
agttcattctgcatcgcccggaagg

SEQ ID NO: 1034512 - DNA, 25 bp, Homo sapien
gtttctcagctccaaacagaaaagt

SEQ ID NO: 1034513 - DNA, 25 bp, Homo sapien
gacccgtttctcagctccaaacaga

SEQ ID NO: 1034514 - DNA, 25 bp, Homo sapien
cccgtttctcagctccaaacagaaa

SEQ ID NO: 1034515 - DNA, 25 bp, Homo sapien
ggacccgtttctcagctccaaacag

SEQ ID NO: 1034516 - DNA, 25 bp, Homo sapien
agcctgcctccgagggtgacccatg

SEQ ID NO: 1034517 - DNA, 25 bp, Homo sapien
gcctgcctccgagggtgacccatgg

SEQ ID NO: 1034518 - DNA, 25 bp, Homo sapien
tgacccatggggaacgagcgaaact

SEQ ID NO: 1034519 - DNA, 25 bp, Homo sapien
gggaacgagcgaaactgttcaatgc

SEQ ID NO: 1034520 - DNA, 25 bp, Homo sapien
aggatgggccggagcactggattag

SEQ ID NO: 1034521 - DNA, 25 bp, Homo sapien
caggatgggccggagcactggatta

SEQ ID NO: 1034522 - DNA, 25 bp, Homo sapien
tattgaatacttgggcagagaggca

SEQ ID NO: 1034523 - DNA, 25 bp, Homo sapien
tcagtctctgtgtcacgacgtgggt

SEQ ID NO: 1034524 - DNA, 25 bp, Homo sapien
caggaggctttcactcgctcctctt

SEQ ID NO: 1034525 - DNA, 25 bp, Homo sapien
cctcttctaacatcagtactattga

SEQ ID NO: 1034526 - DNA, 25 bp, Homo sapien
tgttttagctcttcccgtgtgttgg

SEQ ID NO: 1034527 - DNA, 25 bp, Homo sapien
aaatgtaaaatgctcaggcctgtgt

SEQ ID NO: 1034528 - DNA, 25 bp, Homo sapien
gcaacaagtcaagagacctgccggt

SEQ ID NO: 1034529 - DNA, 25 bp, Homo sapien
tgtttcgtaacccacttgcatctcc

SEQ ID NO: 1034530 - DNA, 25 bp, Homo sapien
gcagcagcatgacagccaggtagcc

SEQ ID NO: 1034531 - DNA, 25 bp, Homo sapien
cagcagcatgacagccaggtagcca

SEQ ID NO: 1034532 - DNA, 25 bp, Homo sapien
acagtgacctgaaaggacacagttc

SEQ ID NO: 1034533 - DNA, 25 bp, Homo sapien
ttcctggagagctaggacagtgacc

SEQ ID NO: 1034534 - DNA, 25 bp, Homo sapien
ctgaccctgcaacccctggtgcttt

SEQ ID NO: 1034535 - DNA, 25 bp, Homo sapien
tgtctgccaccggaccaagtgctgg

SEQ ID NO: 1034536 - DNA, 25 bp, Homo sapien
ggtttgagggcggcctcggactgca

SEQ ID NO: 1034537 - DNA, 25 bp, Homo sapien
atctcagtgacagcggggatcctgc

SEQ ID NO: 1034538 - DNA, 25 bp, Homo sapien
gagacagggacttcaaagggctccc

SEQ ID NO: 1034539 - DNA, 25 bp, Homo sapien
tagcaaacaaggatgatgcggaagc

SEQ ID NO: 1034540 - DNA, 25 bp, Homo sapien
caggaaaggtggctacacttttctg

SEQ ID NO: 1034541 - DNA, 25 bp, Homo sapien
gaaaggtggctacacttttctgagc

SEQ ID NO: 1034542 - DNA, 25 bp, Homo sapien
cttttctgagctttgcgagtgtttg

SEQ ID NO: 1034543 - DNA, 25 bp, Homo sapien
gagctttgcgagtgtttgtccatac

SEQ ID NO: 1034544 - DNA, 25 bp, Homo sapien
cactgaccttggactcgggaacaga

SEQ ID NO: 1034545 - DNA, 25 bp, Homo sapien
gaaagggcacccatgacatcctctg

SEQ ID NO: 1034546 - DNA, 25 bp, Homo sapien
ggtgctgattttaccccatccaggg

SEQ ID NO: 1034547 - DNA, 25 bp, Homo sapien
cctgaagctggtgtattcctggact

SEQ ID NO: 1034548 - DNA, 25 bp, Homo sapien
ctgtgcagagcacggctgaaaactc

SEQ ID NO: 1034549 - DNA, 25 bp, Homo sapien
gaagaacactgggttggcacccggc

SEQ ID NO: 1034550 - DNA, 25 bp, Homo sapien
cacccggcaatttgggacagcagct

SEQ ID NO: 1034551 - DNA, 25 bp, Homo sapien
ttttctggagcgcacagcttgggaa

SEQ ID NO: 1034552 - DNA, 25 bp, Homo sapien
tcaaggtcttgactcttgactgatg

SEQ ID NO: 1034553 - DNA, 25 bp, Homo sapien
tgcagagtgacttcgtacaagccat

SEQ ID NO: 1034554 - DNA, 25 bp, Homo sapien
tgtttccccgcaaaagctgacattg

SEQ ID NO: 1034555 - DNA, 25 bp, Homo sapien
tgccttttcagttcaaggtcttgac

SEQ ID NO: 1034556 - DNA, 25 bp, Homo sapien
atatcccatttagaaagaccgccag

SEQ ID NO: 1034557 - DNA, 25 bp, Homo sapien
gaacctggggcgatggaaacctcta

SEQ ID NO: 1034558 - DNA, 25 bp, Homo sapien
cgatggaaacctctacaaatatccc

SEQ ID NO: 1034559 - DNA, 25 bp, Homo sapien
tatcccatttagaaagaccgccagc

SEQ ID NO: 1034560 - DNA, 25 bp, Homo sapien
cacagctggtcgagtctgtggttgt

SEQ ID NO: 1034561 - DNA, 25 bp, Homo sapien
tgttcgacgcttccacagctggtcg

SEQ ID NO: 1034562 - DNA, 25 bp, Homo sapien
ctgggtttcctgttcgacgcttcca

SEQ ID NO: 1034563 - DNA, 25 bp, Homo sapien
tggttgtggtttgtctgtctcgggc

SEQ ID NO: 1034564 - DNA, 25 bp, Homo sapien
caccttgcgggcagatatccgagaa

SEQ ID NO: 1034565 - DNA, 25 bp, Homo sapien
gcagatatccgagaatcagagttca

SEQ ID NO: 1034566 - DNA, 25 bp, Homo sapien
cagtttcccgctggctttctcggag

SEQ ID NO: 1034567 - DNA, 25 bp, Homo sapien
tgaactagagaagtcctccgcgatg

SEQ ID NO: 1034568 - DNA, 25 bp, Homo sapien
gatgatattgctgatgcttattttc

SEQ ID NO: 1034569 - DNA, 25 bp, Homo sapien
tcacttggagatgatattgctgatg

SEQ ID NO: 1034570 - DNA, 25 bp, Homo sapien
tggagatgatattgctgatgcttat

SEQ ID NO: 1034571 - DNA, 25 bp, Homo sapien
cacttggagatgatattgctgatgc

SEQ ID NO: 1034572 - DNA, 25 bp, Homo sapien
gagaatctccaaatatgtcaatcgg

SEQ ID NO: 1034573 - DNA, 25 bp, Homo sapien
cagccctaaccctggttgagtggaa

SEQ ID NO: 1034574 - DNA, 25 bp, Homo sapien
gagtggaaataacatggacgtttcc

SEQ ID NO: 1034575 - DNA, 25 bp, Homo sapien
attgaatcagataccagcagcccta

SEQ ID NO: 1034576 - DNA, 25 bp, Homo sapien
agaatgtacgacaccaagagtctgt

SEQ ID NO: 1034577 - DNA, 25 bp, Homo sapien
catcgactgtcagatgaatcagctg

SEQ ID NO: 1034578 - DNA, 25 bp, Homo sapien
gaagtccagcccatttgagtcccaa

SEQ ID NO: 1034579 - DNA, 25 bp, Homo sapien
aaatgatgttgcgtcaggcagaggc

SEQ ID NO: 1034580 - DNA, 25 bp, Homo sapien
cagtctgagccaatcttcccagttc

SEQ ID NO: 1034581 - DNA, 25 bp, Homo sapien
cagccgatacgtagtttggaactca

SEQ ID NO: 1034582 - DNA, 25 bp, Homo sapien
cgtagtttggaactcagtctgagcc

SEQ ID NO: 1034583 - DNA, 25 bp, Homo sapien
ctcagtctgagccaatcttcccagt

SEQ ID NO: 1034584 - DNA, 25 bp, Homo sapien
gccaccatgcggctgttactgggct

SEQ ID NO: 1034585 - DNA, 25 bp, Homo sapien
tgtccccaggcccaatagccgccac

SEQ ID NO: 1034586 - DNA, 25 bp, Homo sapien
tgcggctgttactgggctcccatgg

SEQ ID NO: 1034587 - DNA, 25 bp, Homo sapien
accatgcggctgttactgggctccc

SEQ ID NO: 1034588 - DNA, 25 bp, Homo sapien
ggacacaagtcagctcatggcaata

SEQ ID NO: 1034589 - DNA, 25 bp, Homo sapien
aggacatcaatcatattgggttggg

SEQ ID NO: 1034590 - DNA, 25 bp, Homo sapien
gtaaacactgctcactgaagccctg

SEQ ID NO: 1034591 - DNA, 25 bp, Homo sapien
taaatacagtcacatgccgaggtac

SEQ ID NO: 1034592 - DNA, 25 bp, Homo sapien
cttccaccacgaaaaaatcagagat

SEQ ID NO: 1034593 - DNA, 25 bp, Homo sapien
tcttccaccacgaaaaaatcagaga

SEQ ID NO: 1034594 - DNA, 25 bp, Homo sapien
ctcttccaccacgaaaaaatcagag

SEQ ID NO: 1034595 - DNA, 25 bp, Homo sapien
ggaaaacaattcgacaacaatgccg

SEQ ID NO: 1034596 - DNA, 25 bp, Homo sapien
acaattcgacaacaatgccgagcgc

SEQ ID NO: 1034597 - DNA, 25 bp, Homo sapien
ccgggaaaacaattcgacaacaatg

SEQ ID NO: 1034598 - DNA, 25 bp, Homo sapien
gcgagcccgggaaaacaattcgaca

SEQ ID NO: 1034599 - DNA, 25 bp, Homo sapien
tgcctgcggcaagctgcctgctgca

SEQ ID NO: 1034600 - DNA, 25 bp, Homo sapien
ggtggctgtgcaaactcgggcttca

SEQ ID NO: 1034601 - DNA, 25 bp, Homo sapien
gaggtgccaagagatcactcggagg

SEQ ID NO: 1034602 - DNA, 25 bp, Homo sapien
gatcactcggagggaatgtactgag

SEQ ID NO: 1034603 - DNA, 25 bp, Homo sapien
gcagttctatctgaggacctttggg

SEQ ID NO: 1034604 - DNA, 25 bp, Homo sapien
ttaaatgccgcagtgcgggcccaga

SEQ ID NO: 1034605 - DNA, 25 bp, Homo sapien
tgaagttgcctgtgcaaagccgggt

SEQ ID NO: 1034606 - DNA, 25 bp, Homo sapien
ggcccagagatgacgtttccagcag

SEQ ID NO: 1034607 - DNA, 25 bp, Homo sapien
gactgcagttcgtgactgccctgtg

SEQ ID NO: 1034608 - DNA, 25 bp, Homo sapien
gctcctttgtggctccttggtgtcc

SEQ ID NO: 1034609 - DNA, 25 bp, Homo sapien
cttggtgtccccatcttcgttctga

SEQ ID NO: 1034610 - DNA, 25 bp, Homo sapien
ctggaaggactgcagttcgtgactg

SEQ ID NO: 1034611 - DNA, 25 bp, Homo sapien
gcttcacagtacttgagccaccttt

SEQ ID NO: 1034612 - DNA, 25 bp, Homo sapien
cagtacttgagccacctttgtggtt

SEQ ID NO: 1034613 - DNA, 25 bp, Homo sapien
cacctttgtggttttgaatggcgac

SEQ ID NO: 1034614 - DNA, 25 bp, Homo sapien
cacagtacttgagccacctttgtgg

SEQ ID NO: 1034615 - DNA, 25 bp, Homo sapien
gctggctggcggctgaggctggagc

SEQ ID NO: 1034616 - DNA, 25 bp, Homo sapien
cctgccgctgctgggtgtcaccctt

SEQ ID NO: 1034617 - DNA, 25 bp, Homo sapien
tgctgggtgtcacccttccctgctg

SEQ ID NO: 1034618 - DNA, 25 bp, Homo sapien
gggtgtcacccttccctgctggctg

SEQ ID NO: 1034619 - DNA, 25 bp, Homo sapien
cagagcagcagcctgtggccctgga

SEQ ID NO: 1034620 - DNA, 25 bp, Homo sapien
gcagcagcctgtggccctggagggg

SEQ ID NO: 1034621 - DNA, 25 bp, Homo sapien
tttcagagcagcagcctgtggccct

SEQ ID NO: 1034622 - DNA, 25 bp, Homo sapien
ttttcagagcagcagcctgtggccc

SEQ ID NO: 1034623 - DNA, 25 bp, Homo sapien
ttttcatgagatctcgtcgagcaag

SEQ ID NO: 1034624 - DNA, 25 bp, Homo sapien
tctccagaggccagttcctgtattt

SEQ ID NO: 1034625 - DNA, 25 bp, Homo sapien
caagctctagtgaggtgccagggac

SEQ ID NO: 1034626 - DNA, 25 bp, Homo sapien
ccagggacgtcttgttcagaggtga

SEQ ID NO: 1034627 - DNA, 25 bp, Homo sapien
ggccctccagtagcttccgggccat

SEQ ID NO: 1034628 - DNA, 25 bp, Homo sapien
atttaccacgttccaagcactggga

SEQ ID NO: 1034629 - DNA, 25 bp, Homo sapien
accacgttccaagcactgggagagg

SEQ ID NO: 1034630 - DNA, 25 bp, Homo sapien
agagcatttaccacgttccaagcac

SEQ ID NO: 1034631 - DNA, 25 bp, Homo sapien
gtttgtgtgggtttgcagcctcggt

SEQ ID NO: 1034632 - DNA, 25 bp, Homo sapien
tttgtgtgggtttgcagcctcggtc

SEQ ID NO: 1034633 - DNA, 25 bp, Homo sapien
cgtttgtgtgggtttgcagcctcgg

SEQ ID NO: 1034634 - DNA, 25 bp, Homo sapien
ccgtttgtgtgggtttgcagcctcg

SEQ ID NO: 1034635 - DNA, 25 bp, Homo sapien
tctgttctgtcgggagtgaccacct

SEQ ID NO: 1034636 - DNA, 25 bp, Homo sapien
ggatctgttctgtcgggagtgacca

SEQ ID NO: 1034637 - DNA, 25 bp, Homo sapien
gatctgttctgtcgggagtgaccac

SEQ ID NO: 1034638 - DNA, 25 bp, Homo sapien
ctgttctgtcgggagtgaccacctc

SEQ ID NO: 1034639 - DNA, 25 bp, Homo sapien
gccaacaggtgaaggtgagctgacc

SEQ ID NO: 1034640 - DNA, 25 bp, Homo sapien
ggcatgaatcccaggacatactgag

SEQ ID NO: 1034641 - DNA, 25 bp, Homo sapien
gactggattctggaggcaactggcc

SEQ ID NO: 1034642 - DNA, 25 bp, Homo sapien
tgagctgacccgcagctgggcggtg

SEQ ID NO: 1034643 - DNA, 25 bp, Homo sapien
tggccaccgtggacacgtgctgccc

SEQ ID NO: 1034644 - DNA, 25 bp, Homo sapien
ccgtggacacgtgctgcccttcttg

SEQ ID NO: 1034645 - DNA, 25 bp, Homo sapien
gacaagctctcagtgtcagtggcca

SEQ ID NO: 1034646 - DNA, 25 bp, Homo sapien
agctctcagtgtcagtggccaccgt

SEQ ID NO: 1034647 - DNA, 25 bp, Homo sapien
gacagaaagtttagggttgtcagga

SEQ ID NO: 1034648 - DNA, 25 bp, Homo sapien
gggagaattgagagtaacagctaag

SEQ ID NO: 1034649 - DNA, 25 bp, Homo sapien
tctgtgagtctactaaaaatcatac

SEQ ID NO: 1034650 - DNA, 25 bp, Homo sapien
gatatggcttcttttagagtgatga

SEQ ID NO: 1034651 - DNA, 25 bp, Homo sapien
gtgacagtgtttggggaatcttgca

SEQ ID NO: 1034652 - DNA, 25 bp, Homo sapien
tcttgcagaagtcccgcatcctcag

SEQ ID NO: 1034653 - DNA, 25 bp, Homo sapien
agtgaaacagtcccaggtgacagtg

SEQ ID NO: 1034654 - DNA, 25 bp, Homo sapien
tgtttggggaatcttgcagaagtcc

SEQ ID NO: 1034655 - DNA, 25 bp, Homo sapien
gaagagattcagttccagagtctgc

SEQ ID NO: 1034656 - DNA, 25 bp, Homo sapien
gacaggattgcagaagagattcagt

SEQ ID NO: 1034657 - DNA, 25 bp, Homo sapien
agccaaccgtgtggacaggattgca

SEQ ID NO: 1034658 - DNA, 25 bp, Homo sapien
aaagccaaccgtgtggacaggattg

SEQ ID NO: 1034659 - DNA, 25 bp, Homo sapien
tgtggacccaaatttcgagcgctca

SEQ ID NO: 1034660 - DNA, 25 bp, Homo sapien
gggtgtggacccaaatttcgagcgc

SEQ ID NO: 1034661 - DNA, 25 bp, Homo sapien
ggtgtggacccaaatttcgagcgct

SEQ ID NO: 1034662 - DNA, 25 bp, Homo sapien
gtggacccaaatttcgagcgctcat

SEQ ID NO: 1034663 - DNA, 25 bp, Homo sapien
gcctcaccggcctctgcggcgcgag

SEQ ID NO: 1034664 - DNA, 25 bp, Homo sapien
cctcaccggcctctgcggcgcgagc

SEQ ID NO: 1034665 - DNA, 25 bp, Homo sapien
ggcgagagcgcgtggcggctcgagg

SEQ ID NO: 1034666 - DNA, 25 bp, Homo sapien
ccggtggcgagagcgcgtggcggct

SEQ ID NO: 1034667 - DNA, 25 bp, Homo sapien
cgcccggtggcgagagcgcgtggcg

SEQ ID NO: 1034668 - DNA, 25 bp, Homo sapien
gtcgccgcccggtggcgagagcgcg

SEQ ID NO: 1034669 - DNA, 25 bp, Homo sapien
ccgccggcgaagaggtgaagcagcg

SEQ ID NO: 1034670 - DNA, 25 bp, Homo sapien
ccggcgaagaggtgaagcagcgtgt

SEQ ID NO: 1034671 - DNA, 25 bp, Homo sapien
ccttctgctggccgcccgtcgccat

SEQ ID NO: 1034672 - DNA, 25 bp, Homo sapien
aagaggtgaagcagcgtgttctcct

SEQ ID NO: 1034673 - DNA, 25 bp, Homo sapien
gggaggacgggcggcggggcacagc

SEQ ID NO: 1034674 - DNA, 25 bp, Homo sapien
cggcggggcacagccgccctcgggg

SEQ ID NO: 1034675 - DNA, 25 bp, Homo sapien
acgggcggcggggcacagccgccct

SEQ ID NO: 1034676 - DNA, 25 bp, Homo sapien
ggcggcggggcacagccgccctcgg

SEQ ID NO: 1034677 - DNA, 25 bp, Homo sapien
gccactgactcttcagaatggggaa

SEQ ID NO: 1034678 - DNA, 25 bp, Homo sapien
cggccactgactcttcagaatgggg

SEQ ID NO: 1034679 - DNA, 25 bp, Homo sapien
ccactgactcttcagaatggggaaa

SEQ ID NO: 1034680 - DNA, 25 bp, Homo sapien
actgactcttcagaatggggaaaag

SEQ ID NO: 1034681 - DNA, 25 bp, Homo sapien
gtgtggccgcaagcatcaccgttca

SEQ ID NO: 1034682 - DNA, 25 bp, Homo sapien
cgcgtgtggccgcaagcatcaccgt

SEQ ID NO: 1034683 - DNA, 25 bp, Homo sapien
ttgctgacgtccaacgtccgcagac

SEQ ID NO: 1034684 - DNA, 25 bp, Homo sapien
gcagacctttttgcccgtccggatg

SEQ ID NO: 1034685 - DNA, 25 bp, Homo sapien
gtctccgctggaaaaaaggtgcctg

SEQ ID NO: 1034686 - DNA, 25 bp, Homo sapien
tatctgtaagactccgaaaggaccc

SEQ ID NO: 1034687 - DNA, 25 bp, Homo sapien
taccttctattctcggcgggaggtg

SEQ ID NO: 1034688 - DNA, 25 bp, Homo sapien
caaaaattcctgtgccaggccgatg

SEQ ID NO: 1034689 - DNA, 25 bp, Homo sapien
taggaggagaatctggcagccagag

SEQ ID NO: 1034690 - DNA, 25 bp, Homo sapien
catcacaaggtataaggctggtgcc

SEQ ID NO: 1034691 - DNA, 25 bp, Homo sapien
gccctaggaggagaatctggcagcc

SEQ ID NO: 1034692 - DNA, 25 bp, Homo sapien
cctaggaggagaatctggcagccag

SEQ ID NO: 1034693 - DNA, 25 bp, Homo sapien
tttggaagctgtcttttctttcttg

SEQ ID NO: 1034694 - DNA, 25 bp, Homo sapien
gtcttttctttcttgagtctccaat

SEQ ID NO: 1034695 - DNA, 25 bp, Homo sapien
ctgtcttttctttcttgagtctcca

SEQ ID NO: 1034696 - DNA, 25 bp, Homo sapien
cttttctttcttgagtctccaattg

SEQ ID NO: 1034697 - DNA, 25 bp, Homo sapien
tgtgttcgataacgtaactccaaat

SEQ ID NO: 1034698 - DNA, 25 bp, Homo sapien
aaatctatttgtgttcgataacgta

SEQ ID NO: 1034699 - DNA, 25 bp, Homo sapien
tgaaaaagagcttctgggtaaatcc

SEQ ID NO: 1034700 - DNA, 25 bp, Homo sapien
gataacgtaactccaaatcattgaa

SEQ ID NO: 1034701 - DNA, 25 bp, Homo sapien
tgaacctgaggatagtagactgtcc

SEQ ID NO: 1034702 - DNA, 25 bp, Homo sapien
aagtgaaaatagcaccaactgtgcc

SEQ ID NO: 1034703 - DNA, 25 bp, Homo sapien
tgaaagagtccaggtgtcacggatg

SEQ ID NO: 1034704 - DNA, 25 bp, Homo sapien
gactgcaaccgtgtcttaatgactt

SEQ ID NO: 1034705 - DNA, 25 bp, Homo sapien
tatattcaactcctaagttcagcct

SEQ ID NO: 1034706 - DNA, 25 bp, Homo sapien
ccaagaatccgtttgagagatctga

SEQ ID NO: 1034707 - DNA, 25 bp, Homo sapien
tgccactttacaaacacctttctga

SEQ ID NO: 1034708 - DNA, 25 bp, Homo sapien
ttgcattggcccttcaaagtgctag

SEQ ID NO: 1034709 - DNA, 25 bp, Homo sapien
tagaggcatttttccgcagcaacac

SEQ ID NO: 1034710 - DNA, 25 bp, Homo sapien
gcacttaaggttgatctagctcaca

SEQ ID NO: 1034711 - DNA, 25 bp, Homo sapien
gatcacacggtaatcctatgcctaa

SEQ ID NO: 1034712 - DNA, 25 bp, Homo sapien
cattcccgcctgcaatgtaaaaggg

SEQ ID NO: 1034713 - DNA, 25 bp, Homo sapien
cttgatggtgcaactccaaccaaat

SEQ ID NO: 1034714 - DNA, 25 bp, Homo sapien
ggtgcaactccaaccaaatttggac

SEQ ID NO: 1034715 - DNA, 25 bp, Homo sapien
caaccaaatttggacccaagcctct

SEQ ID NO: 1034716 - DNA, 25 bp, Homo sapien
gatggtgcaactccaaccaaatttg

SEQ ID NO: 1034717 - DNA, 25 bp, Homo sapien
ttttgggtgactcgggaacacacag

SEQ ID NO: 1034718 - DNA, 25 bp, Homo sapien
ccttgactaccgcaaagtggtcccg

SEQ ID NO: 1034719 - DNA, 25 bp, Homo sapien
taggagcattgcctgtgagcagcga

SEQ ID NO: 1034720 - DNA, 25 bp, Homo sapien
catctatgaataaggcacaccccag

SEQ ID NO: 1034721 - DNA, 25 bp, Homo sapien
ttggctttggagtaacatgcaaagt

SEQ ID NO: 1034722 - DNA, 25 bp, Homo sapien
gctgttaggcacgaaaatgccatta

SEQ ID NO: 1034723 - DNA, 25 bp, Homo sapien
ggagtaacatgcaaagtatacagcc

SEQ ID NO: 1034724 - DNA, 25 bp, Homo sapien
ccattaaattgctctttggctttgg

SEQ ID NO: 1034725 - DNA, 25 bp, Homo sapien
tctagctgcattcgggttttaacca

SEQ ID NO: 1034726 - DNA, 25 bp, Homo sapien
cgggttttaaccatccatataggat

SEQ ID NO: 1034727 - DNA, 25 bp, Homo sapien
gctgcattcgggttttaaccatcca

SEQ ID NO: 1034728 - DNA, 25 bp, Homo sapien
ttctgttctagctgcattcgggttt

SEQ ID NO: 1034729 - DNA, 25 bp, Homo sapien
ctgcctcctttctttagaggcagct

SEQ ID NO: 1034730 - DNA, 25 bp, Homo sapien
tcagagtggactggctggaagtttc

SEQ ID NO: 1034731 - DNA, 25 bp, Homo sapien
agagtggactggctggaagtttcca

SEQ ID NO: 1034732 - DNA, 25 bp, Homo sapien
tgcctcctttctttagaggcagctg

SEQ ID NO: 1034733 - DNA, 25 bp, Homo sapien
tcttgagcaccatcattaggcagaa

SEQ ID NO: 1034734 - DNA, 25 bp, Homo sapien
gactcttgaaggtctagtggcaccc

SEQ ID NO: 1034735 - DNA, 25 bp, Homo sapien
cacaacaggtgacagcatgaccagg

SEQ ID NO: 1034736 - DNA, 25 bp, Homo sapien
tctcagctgatggacgcatttatcc

SEQ ID NO: 1034737 - DNA, 25 bp, Homo sapien
tttcacagtagacacggcaaagccc

SEQ ID NO: 1034738 - DNA, 25 bp, Homo sapien
ttcacagtagacacggcaaagccca

SEQ ID NO: 1034739 - DNA, 25 bp, Homo sapien
tcacagtagacacggcaaagcccac

SEQ ID NO: 1034740 - DNA, 25 bp, Homo sapien
cacagtagacacggcaaagcccacc

SEQ ID NO: 1034741 - DNA, 25 bp, Homo sapien
cattcacagtaactgtgcatctctt

SEQ ID NO: 1034742 - DNA, 25 bp, Homo sapien
tgttaccccaccgtgtggcactcca

SEQ ID NO: 1034743 - DNA, 25 bp, Homo sapien
ggccattcacagtaactgtgcatct

SEQ ID NO: 1034744 - DNA, 25 bp, Homo sapien
cccaccgtgtggcactccagagcct

SEQ ID NO: 1034745 - DNA, 25 bp, Homo sapien
cctcctggataacaatgtcggtggg

SEQ ID NO: 1034746 - DNA, 25 bp, Homo sapien
tgatcgtgttctgcacataactacc

SEQ ID NO: 1034747 - DNA, 25 bp, Homo sapien
taccaacagttcgaacggtagccag

SEQ ID NO: 1034748 - DNA, 25 bp, Homo sapien
cccatcctcctggataacaatgtcg

SEQ ID NO: 1034749 - DNA, 25 bp, Homo sapien
aaggattaaattcatctttctaggc

SEQ ID NO: 1034750 - DNA, 25 bp, Homo sapien
tcaaggattaaattcatctttctag

SEQ ID NO: 1034751 - DNA, 25 bp, Homo sapien
gattaaattcatctttctaggcttg

SEQ ID NO: 1034752 - DNA, 25 bp, Homo sapien
ggattaaattcatctttctaggctt

SEQ ID NO: 1034753 - DNA, 25 bp, Homo sapien
cttgactcaagatttctacactcac

SEQ ID NO: 1034754 - DNA, 25 bp, Homo sapien
tcctgatatccttaactgttgtggc

SEQ ID NO: 1034755 - DNA, 25 bp, Homo sapien
accgagtccagcctaaccatgcttt

SEQ ID NO: 1034756 - DNA, 25 bp, Homo sapien
gcctaaccatgctttcttgactcaa

SEQ ID NO: 1034757 - DNA, 25 bp, Homo sapien
gctgtcatgtgccttgtagggttta

SEQ ID NO: 1034758 - DNA, 25 bp, Homo sapien
cacccttggcgctattcacatttgg

SEQ ID NO: 1034759 - DNA, 25 bp, Homo sapien
tgtctccaaacttaaatgctgaatg

SEQ ID NO: 1034760 - DNA, 25 bp, Homo sapien
aaaaacactcacctaagttgtggca

SEQ ID NO: 1034761 - DNA, 25 bp, Homo sapien
taaacgtaacgagcacactggagtg

SEQ ID NO: 1034762 - DNA, 25 bp, Homo sapien
ggtaaacgtaacgagcacactggag

SEQ ID NO: 1034763 - DNA, 25 bp, Homo sapien
ctggtaaacgtaacgagcacactgg

SEQ ID NO: 1034764 - DNA, 25 bp, Homo sapien
gtaaacgtaacgagcacactggagt

SEQ ID NO: 1034765 - DNA, 25 bp, Homo sapien
ttgcagaagaggctaatggagcttc

SEQ ID NO: 1034766 - DNA, 25 bp, Homo sapien
tatagaagccacgaatgccttcggt

SEQ ID NO: 1034767 - DNA, 25 bp, Homo sapien
agcagattatagtttcggaaattcc

SEQ ID NO: 1034768 - DNA, 25 bp, Homo sapien
ggaaattccagcatacgaggcagtt

SEQ ID NO: 1034769 - DNA, 25 bp, Homo sapien
cccacaaacaacaaacgtgacagct

SEQ ID NO: 1034770 - DNA, 25 bp, Homo sapien
tcaatgtgcgcctcagaagtctaga

SEQ ID NO: 1034771 - DNA, 25 bp, Homo sapien
gaagtctagatatacccacaaacaa

SEQ ID NO: 1034772 - DNA, 25 bp, Homo sapien
tgcagggatcctgcgcctcaatgtg

SEQ ID NO: 1034773 - DNA, 25 bp, Homo sapien
tactttacgccacatattaaatggg

SEQ ID NO: 1034774 - DNA, 25 bp, Homo sapien
cacagcacacaactttaaaactgtc

SEQ ID NO: 1034775 - DNA, 25 bp, Homo sapien
gagagaaagacctactttacgccac

SEQ ID NO: 1034776 - DNA, 25 bp, Homo sapien
taaatggggaacgaatccacagcac

SEQ ID NO: 1034777 - DNA, 25 bp, Homo sapien
gtacttggtgccctcttcccggagc

SEQ ID NO: 1034778 - DNA, 25 bp, Homo sapien
accaggcgcgccgtctggacaaaag

SEQ ID NO: 1034779 - DNA, 25 bp, Homo sapien
aaagacttgtacttggtgccctctt

SEQ ID NO: 1034780 - DNA, 25 bp, Homo sapien
gcgccgtctggacaaaagacttgta

SEQ ID NO: 1034781 - DNA, 25 bp, Homo sapien
tagacaacacaatggcagtatttgg

SEQ ID NO: 1034782 - DNA, 25 bp, Homo sapien
caacacaatggcagtatttgggatc

SEQ ID NO: 1034783 - DNA, 25 bp, Homo sapien
taagtagacaacacaatggcagtat

SEQ ID NO: 1034784 - DNA, 25 bp, Homo sapien
ctcataagtagacaacacaatggca

SEQ ID NO: 1034785 - DNA, 25 bp, Homo sapien
tacggtcttctaacaggtacacaat

SEQ ID NO: 1034786 - DNA, 25 bp, Homo sapien
agtacggtcttctaacaggtacaca

SEQ ID NO: 1034787 - DNA, 25 bp, Homo sapien
tgagtacggtcttctaacaggtaca

SEQ ID NO: 1034788 - DNA, 25 bp, Homo sapien
acggtcttctaacaggtacacaatt

SEQ ID NO: 1034789 - DNA, 25 bp, Homo sapien
tcttctagagcacaattttccggcc

SEQ ID NO: 1034790 - DNA, 25 bp, Homo sapien
ttctagagcacaattttccggcctg

SEQ ID NO: 1034791 - DNA, 25 bp, Homo sapien
tattcttctagagcacaattttccg

SEQ ID NO: 1034792 - DNA, 25 bp, Homo sapien
gttttattcttctagagcacaattt

SEQ ID NO: 1034793 - DNA, 25 bp, Homo sapien
tgtccaacaggtgatatgaaccaga

SEQ ID NO: 1034794 - DNA, 25 bp, Homo sapien
taatttagttggtgcttaaccctga

SEQ ID NO: 1034795 - DNA, 25 bp, Homo sapien
tttatggcctttcctgtttcagtct

SEQ ID NO: 1034796 - DNA, 25 bp, Homo sapien
ttccagaaagcatgaatccaaaagg

SEQ ID NO: 1034797 - DNA, 25 bp, Homo sapien
tctgacgggtgagccatagtcctac

SEQ ID NO: 1034798 - DNA, 25 bp, Homo sapien
ggagccaggccattgataaaacagt

SEQ ID NO: 1034799 - DNA, 25 bp, Homo sapien
tccggaactatatccaggagccagg

SEQ ID NO: 1034800 - DNA, 25 bp, Homo sapien
cagggctaaagacctcagtgggaat

SEQ ID NO: 1034801 - DNA, 25 bp, Homo sapien
cactagagtcaagaaccccagttaa

SEQ ID NO: 1034802 - DNA, 25 bp, Homo sapien
cagaagcttcactaaagtcactcat

SEQ ID NO: 1034803 - DNA, 25 bp, Homo sapien
agggtgtctgcaagtaaacctgaaa

SEQ ID NO: 1034804 - DNA, 25 bp, Homo sapien
gacttctacgtagttgttggagcaa

SEQ ID NO: 1034805 - DNA, 25 bp, Homo sapien
gcttctggccagtagtctgagacca

SEQ ID NO: 1034806 - DNA, 25 bp, Homo sapien
ggtggtactttcctgtggtccaagc

SEQ ID NO: 1034807 - DNA, 25 bp, Homo sapien
tgaggaggtaagatcgcttctggcc

SEQ ID NO: 1034808 - DNA, 25 bp, Homo sapien
ccagcttcagtgatcgagtgatacc

SEQ ID NO: 1034809 - DNA, 25 bp, Homo sapien
ggacgcggggcggcgacgcgcgcct

SEQ ID NO: 1034810 - DNA, 25 bp, Homo sapien
gacgcggggcggcgacgcgcgcctc

SEQ ID NO: 1034811 - DNA, 25 bp, Homo sapien
acgcggggcggcgacgcgcgcctcc

SEQ ID NO: 1034812 - DNA, 25 bp, Homo sapien
ctccgcgcgatccggtagagcaaca

SEQ ID NO: 1034813 - DNA, 25 bp, Homo sapien
cggccgcggcgcacgccgtgacccc

SEQ ID NO: 1034814 - DNA, 25 bp, Homo sapien
atccggtagagcaacacgccggccg

SEQ ID NO: 1034815 - DNA, 25 bp, Homo sapien
gcgcgatccggtagagcaacacgcc

SEQ ID NO: 1034816 - DNA, 25 bp, Homo sapien
tgacttccagaatgaggctctgctg

SEQ ID NO: 1034817 - DNA, 25 bp, Homo sapien
agggccgttacaggggactctgact

SEQ ID NO: 1034818 - DNA, 25 bp, Homo sapien
aggctgcatcctctttgtccccaaa

SEQ ID NO: 1034819 - DNA, 25 bp, Homo sapien
ggctctgctgcatatcctctgggag

SEQ ID NO: 1034820 - DNA, 25 bp, Homo sapien
cccgtccacaagcccaacatacaca

SEQ ID NO: 1034821 - DNA, 25 bp, Homo sapien
gccccgtccacaagcccaacataca

SEQ ID NO: 1034822 - DNA, 25 bp, Homo sapien
tgccccgtccacaagcccaacatac

SEQ ID NO: 1034823 - DNA, 25 bp, Homo sapien
ctgccccgtccacaagcccaacata

SEQ ID NO: 1034824 - DNA, 25 bp, Homo sapien
ctctcccacagtgcctttgggggtg

SEQ ID NO: 1034825 - DNA, 25 bp, Homo sapien
ctgccagggggtcctctcccacagt

SEQ ID NO: 1034826 - DNA, 25 bp, Homo sapien
gggtcctctcccacagtgcctttgg

SEQ ID NO: 1034827 - DNA, 25 bp, Homo sapien
tcccacagtgcctttgggggtgagc

SEQ ID NO: 1034828 - DNA, 25 bp, Homo sapien
aaggaccgctgcatcttgtcaacag

SEQ ID NO: 1034829 - DNA, 25 bp, Homo sapien
acagcatggagacagcgggcaaggc

SEQ ID NO: 1034830 - DNA, 25 bp, Homo sapien
cagaggacaaggaccgctgcatctt

SEQ ID NO: 1034831 - DNA, 25 bp, Homo sapien
caagccctcacagaggacaaggacc

SEQ ID NO: 1034832 - DNA, 25 bp, Homo sapien
gaagccgttgtactgctcgcagtgg

SEQ ID NO: 1034833 - DNA, 25 bp, Homo sapien
gcagttgcggttcccatagggcacc

SEQ ID NO: 1034834 - DNA, 25 bp, Homo sapien
ccagcgtatcctggttgcagaacca

SEQ ID NO: 1034835 - DNA, 25 bp, Homo sapien
cagaaccagcagttgaccatcgtgt

SEQ ID NO: 1034836 - DNA, 25 bp, Homo sapien
ggatcggcttgttgtagtcgccgtt

SEQ ID NO: 1034837 - DNA, 25 bp, Homo sapien
ttcaggtgctccaagtactgggcgg

SEQ ID NO: 1034838 - DNA, 25 bp, Homo sapien
tgctgcggctgcgaagggtcgcgca

SEQ ID NO: 1034839 - DNA, 25 bp, Homo sapien
ggtggttgcacctcttgcacagcag

SEQ ID NO: 1034840 - DNA, 25 bp, Homo sapien
tctggtcggcctcccggcgcttgaa

SEQ ID NO: 1034841 - DNA, 25 bp, Homo sapien
gcggttctggtgcttgatgtagtac

SEQ ID NO: 1034842 - DNA, 25 bp, Homo sapien
ggcacggccggcacagcttgtacat

SEQ ID NO: 1034843 - DNA, 25 bp, Homo sapien
tgtagtactccacagccgcttggca

SEQ ID NO: 1034844 - DNA, 25 bp, Homo sapien
ggagtaggcccagcaactgccgcca

SEQ ID NO: 1034845 - DNA, 25 bp, Homo sapien
gccacgacgcccgtctggtggctct

SEQ ID NO: 1034846 - DNA, 25 bp, Homo sapien
gtgagtaggcccagtgccacgacgc

SEQ ID NO: 1034847 - DNA, 25 bp, Homo sapien
cgctggccccatacagcgcggtggt

SEQ ID NO: 1034848 - DNA, 25 bp, Homo sapien
gtgcagaaggcatcgatcctccgga

SEQ ID NO: 1034849 - DNA, 25 bp, Homo sapien
tccttgtggccacagccgccgtgaa

SEQ ID NO: 1034850 - DNA, 25 bp, Homo sapien
tgaacttgagcgtgtctagccagct

SEQ ID NO: 1034851 - DNA, 25 bp, Homo sapien
caggcagcacaaagatgtggtgctg

SEQ ID NO: 1034852 - DNA, 25 bp, Homo sapien
gggcctgagcatccgtgtgtcctcc

SEQ ID NO: 1034853 - DNA, 25 bp, Homo sapien
cagggcagactgactcttcgaggca

SEQ ID NO: 1034854 - DNA, 25 bp, Homo sapien
cagtgaaagggccattggccagaga

SEQ ID NO: 1034855 - DNA, 25 bp, Homo sapien
tcagagccagcaaacggcgtggtga

SEQ ID NO: 1034856 - DNA, 25 bp, Homo sapien
ctgcacggtcagggcacgccagggg

SEQ ID NO: 1034857 - DNA, 25 bp, Homo sapien
gcacggtcagggcacgccaggggcc

SEQ ID NO: 1034858 - DNA, 25 bp, Homo sapien
tgcacggtcagggcacgccaggggc

SEQ ID NO: 1034859 - DNA, 25 bp, Homo sapien
ccagcctgtagccactgtcaccacc

SEQ ID NO: 1034860 - DNA, 25 bp, Homo sapien
tcggcctccttcacggctccaccac

SEQ ID NO: 1034861 - DNA, 25 bp, Homo sapien
ggggactcgggagggtcttggagca

SEQ ID NO: 1034862 - DNA, 25 bp, Homo sapien
cacaggtgctcctcaggggtgaggc

SEQ ID NO: 1034863 - DNA, 25 bp, Homo sapien
gcagctcggcctccttcacggctcc

SEQ ID NO: 1034864 - DNA, 25 bp, Homo sapien
tgtgagctgctacccaatcactggg

SEQ ID NO: 1034865 - DNA, 25 bp, Homo sapien
catctggaaggtgaactcgtgctca

SEQ ID NO: 1034866 - DNA, 25 bp, Homo sapien
cctagaaggtctgatggccatccca

SEQ ID NO: 1034867 - DNA, 25 bp, Homo sapien
ttcgagacgcaagcaacagcatggc

SEQ ID NO: 1034868 - DNA, 25 bp, Homo sapien
tctgattccatttggcgggacagcg

SEQ ID NO: 1034869 - DNA, 25 bp, Homo sapien
gaaggctccacctctacacagaaga

SEQ ID NO: 1034870 - DNA, 25 bp, Homo sapien
tgtcgtcatgttagaattctgattc

SEQ ID NO: 1034871 - DNA, 25 bp, Homo sapien
acagcgcagcgacttcagggaatga

SEQ ID NO: 1034872 - DNA, 25 bp, Homo sapien
aaaggccggcagagtctcctgggaa

SEQ ID NO: 1034873 - DNA, 25 bp, Homo sapien
ggaaaaggccggcagagtctcctgg

SEQ ID NO: 1034874 - DNA, 25 bp, Homo sapien
gtggggaaaaggccggcagagtctc

SEQ ID NO: 1034875 - DNA, 25 bp, Homo sapien
ctggtggggaaaaggccggcagagt

SEQ ID NO: 1034876 - DNA, 25 bp, Homo sapien
agcctccgacactcgggtgagggat

SEQ ID NO: 1034877 - DNA, 25 bp, Homo sapien
ctggagagcctccgacactcgggtg

SEQ ID NO: 1034878 - DNA, 25 bp, Homo sapien
agagcctccgacactcgggtgaggg

SEQ ID NO: 1034879 - DNA, 25 bp, Homo sapien
tccgacactcgggtgagggatggcc

SEQ ID NO: 1034880 - DNA, 25 bp, Homo sapien
ggagaccggaagagctgctggttgg

SEQ ID NO: 1034881 - DNA, 25 bp, Homo sapien
ctcgagtcagagagggtatggttcc

SEQ ID NO: 1034882 - DNA, 25 bp, Homo sapien
aggagggtgaggtccgtcgaggaga

SEQ ID NO: 1034883 - DNA, 25 bp, Homo sapien
agtcagagagggtatggttcccaga

SEQ ID NO: 1034884 - DNA, 25 bp, Homo sapien
ctaccgctgaacagatagccggagt

SEQ ID NO: 1034885 - DNA, 25 bp, Homo sapien
gatggtgggcggctaccgctgaaca

SEQ ID NO: 1034886 - DNA, 25 bp, Homo sapien
ggctaccgctgaacagatagccgga

SEQ ID NO: 1034887 - DNA, 25 bp, Homo sapien
gggcggctaccgctgaacagatagc

SEQ ID NO: 1034888 - DNA, 25 bp, Homo sapien
caggaaactccccagatcgagacac

SEQ ID NO: 1034889 - DNA, 25 bp, Homo sapien
gggcagctccccgacagaagagaga

SEQ ID NO: 1034890 - DNA, 25 bp, Homo sapien
ggggcagctccccgacagaagagag

SEQ ID NO: 1034891 - DNA, 25 bp, Homo sapien
ggcagctccccgacagaagagagaa

SEQ ID NO: 1034892 - DNA, 25 bp, Homo sapien
aggggcagctccccgacagaagaga

SEQ ID NO: 1034893 - DNA, 25 bp, Homo sapien
ctgccgttgtgaggcgagtgctcat

SEQ ID NO: 1034894 - DNA, 25 bp, Homo sapien
ttctgtcccttcaggttgagccggg

SEQ ID NO: 1034895 - DNA, 25 bp, Homo sapien
ctccatggtgaagaggctgccgttg

SEQ ID NO: 1034896 - DNA, 25 bp, Homo sapien
cagggcgtgcttcacgtcctgcagg

SEQ ID NO: 1034897 - DNA, 25 bp, Homo sapien
gttccaagaaacagaggaccctgaa

SEQ ID NO: 1034898 - DNA, 25 bp, Homo sapien
gatgtgttttcgatcagttccaaga

SEQ ID NO: 1034899 - DNA, 25 bp, Homo sapien
tggcaatgcgtgatgtgttttcgat

SEQ ID NO: 1034900 - DNA, 25 bp, Homo sapien
ttcgatcagttccaagaaacagagg

SEQ ID NO: 1034901 - DNA, 25 bp, Homo sapien
ggtgtgtttctcagtggcgctcatg

SEQ ID NO: 1034902 - DNA, 25 bp, Homo sapien
agagaagggtgtgtttctcagtggc

SEQ ID NO: 1034903 - DNA, 25 bp, Homo sapien
aagggtgtgtttctcagtggcgctc

SEQ ID NO: 1034904 - DNA, 25 bp, Homo sapien
gtgtttctcagtggcgctcatggct

SEQ ID NO: 1034905 - DNA, 25 bp, Homo sapien
ccaccacacaggtagatgactggga

SEQ ID NO: 1034906 - DNA, 25 bp, Homo sapien
aagagtcgtcctctttcttgatgga

SEQ ID NO: 1034907 - DNA, 25 bp, Homo sapien
gatggagcggttgctgcaggcactg

SEQ ID NO: 1034908 - DNA, 25 bp, Homo sapien
cctctttccagcttggatctcaggt

SEQ ID NO: 1034909 - DNA, 25 bp, Homo sapien
gcgttggcggccaagctcacggcca

SEQ ID NO: 1034910 - DNA, 25 bp, Homo sapien
ggctctggtacagaaacaccgaggt

SEQ ID NO: 1034911 - DNA, 25 bp, Homo sapien
aaacaccgaggtgaacagggcgttg

SEQ ID NO: 1034912 - DNA, 25 bp, Homo sapien
tcagcgcaggctctggtacagaaac

SEQ ID NO: 1034913 - DNA, 25 bp, Homo sapien
tgctcagccctgcagtccgttaggt

SEQ ID NO: 1034914 - DNA, 25 bp, Homo sapien
caaagatgtgactacgcctgtgggc

SEQ ID NO: 1034915 - DNA, 25 bp, Homo sapien
tccaggaaggtcaacagaggtcaca

SEQ ID NO: 1034916 - DNA, 25 bp, Homo sapien
gggcgctccgcattctcagggtaat

SEQ ID NO: 1034917 - DNA, 25 bp, Homo sapien
cagtgagtctcagaatccaccgaga

SEQ ID NO: 1034918 - DNA, 25 bp, Homo sapien
ggcgctgcctccgagttggaaccat

SEQ ID NO: 1034919 - DNA, 25 bp, Homo sapien
cacacgcctgctatacagaaatggg

SEQ ID NO: 1034920 - DNA, 25 bp, Homo sapien
ccctgaatggcagagtgaagaccct

SEQ ID NO: 1034921 - DNA, 25 bp, Homo sapien
tgcccaagcaaacgaatacagacag

SEQ ID NO: 1034922 - DNA, 25 bp, Homo sapien
aaacgaatacagacagccagcaggc

SEQ ID NO: 1034923 - DNA, 25 bp, Homo sapien
cccgagctgcccaagcaaacgaata

SEQ ID NO: 1034924 - DNA, 25 bp, Homo sapien
caagcaaacgaatacagacagccag

SEQ ID NO: 1034925 - DNA, 25 bp, Homo sapien
ccagaaaggtgaccccagagcttgt

SEQ ID NO: 1034926 - DNA, 25 bp, Homo sapien
ggatggccgtcctgttactcccgtg

SEQ ID NO: 1034927 - DNA, 25 bp, Homo sapien
agagcttgtgctgtgacaccctggc

SEQ ID NO: 1034928 - DNA, 25 bp, Homo sapien
gcatggagccgtgcagcagctctaa

SEQ ID NO: 1034929 - DNA, 25 bp, Homo sapien
agctcctgatgggaagccgtcccag

SEQ ID NO: 1034930 - DNA, 25 bp, Homo sapien
ctcagaggcgtttgtggctcccgct

SEQ ID NO: 1034931 - DNA, 25 bp, Homo sapien
ggcactgggccagaatgacagccca

SEQ ID NO: 1034932 - DNA, 25 bp, Homo sapien
tcccaacatcttgaggacccgaggt

SEQ ID NO: 1034933 - DNA, 25 bp, Homo sapien
gaaattgcaaatcttatgagccccg

SEQ ID NO: 1034934 - DNA, 25 bp, Homo sapien
ggccaatcttaaattatacaatagt

SEQ ID NO: 1034935 - DNA, 25 bp, Homo sapien
gctggtaatcatttataactacacc

SEQ ID NO: 1034936 - DNA, 25 bp, Homo sapien
atgttacttacaggagcaactggag

SEQ ID NO: 1034937 - DNA, 25 bp, Homo sapien
atggaaactggtcctctctactgat

SEQ ID NO: 1034938 - DNA, 25 bp, Homo sapien
cacacaaagttggttaaacaggaga

SEQ ID NO: 1034939 - DNA, 25 bp, Homo sapien
ggtcctctctactgattccacttct

SEQ ID NO: 1034940 - DNA, 25 bp, Homo sapien
tgttactcaatttaccctcctggaa

SEQ ID NO: 1034941 - DNA, 25 bp, Homo sapien
tcagagtgaggaccgcactgaggac

SEQ ID NO: 1034942 - DNA, 25 bp, Homo sapien
tggatcagtccaatcccggaggcat

SEQ ID NO: 1034943 - DNA, 25 bp, Homo sapien
tatcaccagacagacgtgggtccag

SEQ ID NO: 1034944 - DNA, 25 bp, Homo sapien
cagctactctgagctggagagtgca

SEQ ID NO: 1034945 - DNA, 25 bp, Homo sapien
tggtggcctctaaaaagatacgtcc

SEQ ID NO: 1034946 - DNA, 25 bp, Homo sapien
gcacctagtgtgaggagtaacccca

SEQ ID NO: 1034947 - DNA, 25 bp, Homo sapien
tagagatggttactttttcccagga

SEQ ID NO: 1034948 - DNA, 25 bp, Homo sapien
atcctaatcccaggccggaggcgat

SEQ ID NO: 1034949 - DNA, 25 bp, Homo sapien
tgagactgcagtgagccataactgt

SEQ ID NO: 1034950 - DNA, 25 bp, Homo sapien
ctgagccctggaggttgagactgca

SEQ ID NO: 1034951 - DNA, 25 bp, Homo sapien
actgcagtgagccataactgtgcca

SEQ ID NO: 1034952 - DNA, 25 bp, Homo sapien
agactgcagtgagccataactgtgc

SEQ ID NO: 1034953 - DNA, 25 bp, Homo sapien
gcgcgagtgagcctcgagggaggga

SEQ ID NO: 1034954 - DNA, 25 bp, Homo sapien
ctcggagcgactgcgctgggcgcga

SEQ ID NO: 1034955 - DNA, 25 bp, Homo sapien
gccgccaacccgcacactccacttc

SEQ ID NO: 1034956 - DNA, 25 bp, Homo sapien
gccgctcggagcgactgcgctgggc

SEQ ID NO: 1034957 - DNA, 25 bp, Homo sapien
gtggaccccgctgccgtacagagga

SEQ ID NO: 1034958 - DNA, 25 bp, Homo sapien
gctgagcgcttccagtatcctcgcg

SEQ ID NO: 1034959 - DNA, 25 bp, Homo sapien
tgtgagcgcagctgaaaccccgctg

SEQ ID NO: 1034960 - DNA, 25 bp, Homo sapien
ctggtcctctagtcagcgctcggag

SEQ ID NO: 1034961 - DNA, 25 bp, Homo sapien
caaaaagatccgtgaatgggccagg

SEQ ID NO: 1034962 - DNA, 25 bp, Homo sapien
tctaatggcacgactgtccacgctg

SEQ ID NO: 1034963 - DNA, 25 bp, Homo sapien
cagcaaagcgggtccaggtttaaag

SEQ ID NO: 1034964 - DNA, 25 bp, Homo sapien
ttgtggccatcaccgaagccggagt

SEQ ID NO: 1034965 - DNA, 25 bp, Homo sapien
taatcccagtactttgggaggccaa

SEQ ID NO: 1034966 - DNA, 25 bp, Homo sapien
tggttcacgcctgtaatcccagtac

SEQ ID NO: 1034967 - DNA, 25 bp, Homo sapien
gaaaatgagggtaggctgggtgcag

SEQ ID NO: 1034968 - DNA, 25 bp, Homo sapien
gctggattctgtagcgcccaacaaa

SEQ ID NO: 1034969 - DNA, 25 bp, Homo sapien
ctccctgaccaaacgagagctgctg

SEQ ID NO: 1034970 - DNA, 25 bp, Homo sapien
caatgcctcgtttgcaaagatgcca

SEQ ID NO: 1034971 - DNA, 25 bp, Homo sapien
cctaggactgactctggcactatga

SEQ ID NO: 1034972 - DNA, 25 bp, Homo sapien
ttattagatacagaaacggcaagct

SEQ ID NO: 1034973 - DNA, 25 bp, Homo sapien
tacaaatgctactgacaggacccac

SEQ ID NO: 1034974 - DNA, 25 bp, Homo sapien
ggcaaacggcaaagctcctaagtac

SEQ ID NO: 1034975 - DNA, 25 bp, Homo sapien
ggcaagctacgttaatgaaaatggc

SEQ ID NO: 1034976 - DNA, 25 bp, Homo sapien
gaggatcagagtccaagacgccaac

SEQ ID NO: 1034977 - DNA, 25 bp, Homo sapien
tgcccactcttgctgtagaggatca

SEQ ID NO: 1034978 - DNA, 25 bp, Homo sapien
tccatcagacacaaggaccttcaag

SEQ ID NO: 1034979 - DNA, 25 bp, Homo sapien
ccttcaagagcaaggaactaggctg

SEQ ID NO: 1034980 - DNA, 25 bp, Homo sapien
ggagagtcacccaaagacgcaggaa

SEQ ID NO: 1034981 - DNA, 25 bp, Homo sapien
caacagagtctgtggatgaaagagc

SEQ ID NO: 1034982 - DNA, 25 bp, Homo sapien
tcttacagaggtgtcacagggtcag

SEQ ID NO: 1034983 - DNA, 25 bp, Homo sapien
tcatacgacagagaagctagaggtt

SEQ ID NO: 1034984 - DNA, 25 bp, Homo sapien
gctgtgctttcacagatcccgggag

SEQ ID NO: 1034985 - DNA, 25 bp, Homo sapien
tgtgctttcacagatcccgggagag

SEQ ID NO: 1034986 - DNA, 25 bp, Homo sapien
cctggctgtgctttcacagatcccg

SEQ ID NO: 1034987 - DNA, 25 bp, Homo sapien
gctttcacagatcccgggagagggc

SEQ ID NO: 1034988 - DNA, 25 bp, Homo sapien
ctttgccacaggggaacgcagagga

SEQ ID NO: 1034989 - DNA, 25 bp, Homo sapien
aaggtggtttgaagaacactccttg

SEQ ID NO: 1034990 - DNA, 25 bp, Homo sapien
aagcggggtgcgagcaccagaatca

SEQ ID NO: 1034991 - DNA, 25 bp, Homo sapien
ggaggaagcggggtgcgagcaccag

SEQ ID NO: 1034992 - DNA, 25 bp, Homo sapien
attccacttgatcggcctttcttgc

SEQ ID NO: 1034993 - DNA, 25 bp, Homo sapien
cacttgatcggcctttcttgccatc

SEQ ID NO: 1034994 - DNA, 25 bp, Homo sapien
tcacattccacttgatcggcctttc

SEQ ID NO: 1034995 - DNA, 25 bp, Homo sapien
ttgccatctgcgtcaatgccacccc

SEQ ID NO: 1034996 - DNA, 25 bp, Homo sapien
gctttagaatcaatgagtgtcatcc

SEQ ID NO: 1034997 - DNA, 25 bp, Homo sapien
ggcagattaaagatgctttagaatc

SEQ ID NO: 1034998 - DNA, 25 bp, Homo sapien
atcaatgagtgtcatcccgccctgg

SEQ ID NO: 1034999 - DNA, 25 bp, Homo sapien
taaagatgctttagaatcaatgagt

SEQ ID NO: 1035000 - DNA, 25 bp, Homo sapien
ttcctctgggtgtgctagtcctaca

SEQ ID NO: 1035001 - DNA, 25 bp, Homo sapien
cacttccccattcattcgctcctag

SEQ ID NO: 1035002 - DNA, 25 bp, Homo sapien
gctagtcctacagagaagtcttcct

SEQ ID NO: 1035003 - DNA, 25 bp, Homo sapien
cattcattcgctcctagcaccaatt

SEQ ID NO: 1035004 - DNA, 25 bp, Homo sapien
cccagggtggcttgtggctcctact

SEQ ID NO: 1035005 - DNA, 25 bp, Homo sapien
acaggagcacgcacagcaaatcatc

SEQ ID NO: 1035006 - DNA, 25 bp, Homo sapien
ttgtggctcctactactccgggcca

SEQ ID NO: 1035007 - DNA, 25 bp, Homo sapien
gaacatacacatccacgaaagccag

SEQ ID NO: 1035008 - DNA, 25 bp, Homo sapien
gttgttacttcccagatgacagttg

SEQ ID NO: 1035009 - DNA, 25 bp, Homo sapien
tgcgttgttacttcccagatgacag

SEQ ID NO: 1035010 - DNA, 25 bp, Homo sapien
tgttacttcccagatgacagttgtc

SEQ ID NO: 1035011 - DNA, 25 bp, Homo sapien
cctgcgttgttacttcccagatgac

SEQ ID NO: 1035012 - DNA, 25 bp, Homo sapien
agggaagttcaggtagacccctgtg

SEQ ID NO: 1035013 - DNA, 25 bp, Homo sapien
gaagtcaaccacaacgctctgattc

SEQ ID NO: 1035014 - DNA, 25 bp, Homo sapien
aggaagtcaaccacaacgctctgat

SEQ ID NO: 1035015 - DNA, 25 bp, Homo sapien
agtcaaccacaacgctctgattctc

SEQ ID NO: 1035016 - DNA, 25 bp, Homo sapien
tgcacgtcacacagacgccgttgct

SEQ ID NO: 1035017 - DNA, 25 bp, Homo sapien
cactgagcatgtggaagagcggctc

SEQ ID NO: 1035018 - DNA, 25 bp, Homo sapien
atgagcttcttcacgcggtcgccct

SEQ ID NO: 1035019 - DNA, 25 bp, Homo sapien
gctcttgctgctccgctgtctggtt

SEQ ID NO: 1035020 - DNA, 25 bp, Homo sapien
catcttggcgcgaaagtcgttcact

SEQ ID NO: 1035021 - DNA, 25 bp, Homo sapien
gaaagtcgttcacttctgggtcgca

SEQ ID NO: 1035022 - DNA, 25 bp, Homo sapien
gcctcctcgcagaattggcacatct

SEQ ID NO: 1035023 - DNA, 25 bp, Homo sapien
cacaaggagtcaaactcgtggaggc

SEQ ID NO: 1035024 - DNA, 25 bp, Homo sapien
gcagggggaaactgtactgcagcca

SEQ ID NO: 1035025 - DNA, 25 bp, Homo sapien
ccaggtttgagccgagggctccagc

SEQ ID NO: 1035026 - DNA, 25 bp, Homo sapien
gcccccaggtttgagccgagggctc

SEQ ID NO: 1035027 - DNA, 25 bp, Homo sapien
cagggggaaactgtactgcagccag

SEQ ID NO: 1035028 - DNA, 25 bp, Homo sapien
acagagcagcctggatgccgcaggc

SEQ ID NO: 1035029 - DNA, 25 bp, Homo sapien
cagagcagcctggatgccgcaggcc

SEQ ID NO: 1035030 - DNA, 25 bp, Homo sapien
agagcagcctggatgccgcaggcca

SEQ ID NO: 1035031 - DNA, 25 bp, Homo sapien
cacagggcagggttgcctatttgcc

SEQ ID NO: 1035032 - DNA, 25 bp, Homo sapien
ggtcagtcctctgccctcgaggccc

SEQ ID NO: 1035033 - DNA, 25 bp, Homo sapien
cagggttgcctatttgcccccaagg

SEQ ID NO: 1035034 - DNA, 25 bp, Homo sapien
cagggcagggttgcctatttgcccc

SEQ ID NO: 1035035 - DNA, 25 bp, Homo sapien
ggctgccggaacactgtggccttct

SEQ ID NO: 1035036 - DNA, 25 bp, Homo sapien
cagcggctgccggaacactgtggcc

SEQ ID NO: 1035037 - DNA, 25 bp, Homo sapien
cagggcacaggccatcagcgccagc

SEQ ID NO: 1035038 - DNA, 25 bp, Homo sapien
agcgtgtagtcttccggctgctcca

SEQ ID NO: 1035039 - DNA, 25 bp, Homo sapien
ggaactggcagagcgggtagctgcc

SEQ ID NO: 1035040 - DNA, 25 bp, Homo sapien
ctggaactggcagagcgggtagctg

SEQ ID NO: 1035041 - DNA, 25 bp, Homo sapien
tggaactggcagagcgggtagctgc

SEQ ID NO: 1035042 - DNA, 25 bp, Homo sapien
gaggaggaatggaccatggtcaggt

SEQ ID NO: 1035043 - DNA, 25 bp, Homo sapien
ctgctcatcccgcatggcgaggatg

SEQ ID NO: 1035044 - DNA, 25 bp, Homo sapien
gaggggtcaacccactgtgcaggca

SEQ ID NO: 1035045 - DNA, 25 bp, Homo sapien
atggtcaggtgaggggtcaacccac

SEQ ID NO: 1035046 - DNA, 25 bp, Homo sapien
tcttcgcaggaatgggaggtggttt

SEQ ID NO: 1035047 - DNA, 25 bp, Homo sapien
gaggtggtttggcacgcggtttctg

SEQ ID NO: 1035048 - DNA, 25 bp, Homo sapien
cttcttcgcaggaatgggaggtggt

SEQ ID NO: 1035049 - DNA, 25 bp, Homo sapien
ggtggtttggcacgcggtttctgga

SEQ ID NO: 1035050 - DNA, 25 bp, Homo sapien
ccagggaccacagggacacagagga

SEQ ID NO: 1035051 - DNA, 25 bp, Homo sapien
ctgctccagggaccacagggacaca

SEQ ID NO: 1035052 - DNA, 25 bp, Homo sapien
tccagggaccacagggacacagagg

SEQ ID NO: 1035053 - DNA, 25 bp, Homo sapien
gggaccacagggacacagaggaagg

SEQ ID NO: 1035054 - DNA, 25 bp, Homo sapien
tcatccgctcgtcggcgttcacttt

SEQ ID NO: 1035055 - DNA, 25 bp, Homo sapien
ccgctcgtcggcgttcactttgctg

SEQ ID NO: 1035056 - DNA, 25 bp, Homo sapien
tcgtcggcgttcactttgctgccct

SEQ ID NO: 1035057 - DNA, 25 bp, Homo sapien
ttcatccgctcgtcggcgttcactt

SEQ ID NO: 1035058 - DNA, 25 bp, Homo sapien
gatgttgatgtcgaactccagccgc

SEQ ID NO: 1035059 - DNA, 25 bp, Homo sapien
gacttcttcttggtggagcgagcct

SEQ ID NO: 1035060 - DNA, 25 bp, Homo sapien
catctcgttgccgtggaaaagcccg

SEQ ID NO: 1035061 - DNA, 25 bp, Homo sapien
ggacaccgtcttgcacagcatctcg

SEQ ID NO: 1035062 - DNA, 25 bp, Homo sapien
ggacggagggccacatgtagaggca

SEQ ID NO: 1035063 - DNA, 25 bp, Homo sapien
cggtcttaagctggtccttgtagtc

SEQ ID NO: 1035064 - DNA, 25 bp, Homo sapien
ggccacatgtagaggcagcgttccc

SEQ ID NO: 1035065 - DNA, 25 bp, Homo sapien
cagcgttccccggtcttaagctggt

SEQ ID NO: 1035066 - DNA, 25 bp, Homo sapien
gggcagcggcgctatccgtgttggg

SEQ ID NO: 1035067 - DNA, 25 bp, Homo sapien
cacagtgcccgtggggttcagcagc

SEQ ID NO: 1035068 - DNA, 25 bp, Homo sapien
gtgcggggccacctcgggcaggcag

SEQ ID NO: 1035069 - DNA, 25 bp, Homo sapien
ggttactgcgcacagtgcccgtggg

SEQ ID NO: 1035070 - DNA, 25 bp, Homo sapien
ttgccaccccaatcatccttgaggg

SEQ ID NO: 1035071 - DNA, 25 bp, Homo sapien
gcattgccaccccaatcatccttga

SEQ ID NO: 1035072 - DNA, 25 bp, Homo sapien
cttgagggggcgctgtcctctgcat

SEQ ID NO: 1035073 - DNA, 25 bp, Homo sapien
ccaggccgggcattgccaccccaat

SEQ ID NO: 1035074 - DNA, 25 bp, Homo sapien
cggctgcactcagcgtccccagggg

SEQ ID NO: 1035075 - DNA, 25 bp, Homo sapien
acggctgcactcagcgtccccaggg

SEQ ID NO: 1035076 - DNA, 25 bp, Homo sapien
aacggctgcactcagcgtccccagg

SEQ ID NO: 1035077 - DNA, 25 bp, Homo sapien
ggctgcactcagcgtccccaggggc

SEQ ID NO: 1035078 - DNA, 25 bp, Homo sapien
ctcctcggtgacatgcacacactcg

SEQ ID NO: 1035079 - DNA, 25 bp, Homo sapien
ctcctcctcggtgacatgcacacac

SEQ ID NO: 1035080 - DNA, 25 bp, Homo sapien
cacactcgctgtgtcgccccagctc

SEQ ID NO: 1035081 - DNA, 25 bp, Homo sapien
cggtgacatgcacacactcgctgtg

SEQ ID NO: 1035082 - DNA, 25 bp, Homo sapien
cgggctagcgcctccgggaagtgct

SEQ ID NO: 1035083 - DNA, 25 bp, Homo sapien
gtccttctcgtgctcatacagctcc

SEQ ID NO: 1035084 - DNA, 25 bp, Homo sapien
cctccgggaagtgctcctggacttc

SEQ ID NO: 1035085 - DNA, 25 bp, Homo sapien
gccgctccaggatttcccgcagctg

SEQ ID NO: 1035086 - DNA, 25 bp, Homo sapien
cagcgacttgatggcgaaggagcct

SEQ ID NO: 1035087 - DNA, 25 bp, Homo sapien
cctacgtggcaatcggggaagctga

SEQ ID NO: 1035088 - DNA, 25 bp, Homo sapien
gcaatcggggaagctgaagtctagc

SEQ ID NO: 1035089 - DNA, 25 bp, Homo sapien
acttgatggcgaaggagcctacgtg

SEQ ID NO: 1035090 - DNA, 25 bp, Homo sapien
gactcgtacttgagcacctgcacca

SEQ ID NO: 1035091 - DNA, 25 bp, Homo sapien
gcagtccaggtaggactcgtacttg

SEQ ID NO: 1035092 - DNA, 25 bp, Homo sapien
gcccggtccagcaggaatttggtca

SEQ ID NO: 1035093 - DNA, 25 bp, Homo sapien
cagggcccggtccagcaggaatttg

SEQ ID NO: 1035094 - DNA, 25 bp, Homo sapien
cctccaggatgaggccgaagcgcag

SEQ ID NO: 1035095 - DNA, 25 bp, Homo sapien
gcagggccaccgacggcacgtgcat

SEQ ID NO: 1035096 - DNA, 25 bp, Homo sapien
gaagcgcagggccaccgacggcacg

SEQ ID NO: 1035097 - DNA, 25 bp, Homo sapien
ccaccgacggcacgtgcatctcgga

SEQ ID NO: 1035098 - DNA, 25 bp, Homo sapien
gggccttcagtttgctcagtgcttc

SEQ ID NO: 1035099 - DNA, 25 bp, Homo sapien
cagcttgacgaagtcattcagggcc

SEQ ID NO: 1035100 - DNA, 25 bp, Homo sapien
cacaagtgcatcagctccttggtct

SEQ ID NO: 1035101 - DNA, 25 bp, Homo sapien
gagagggcctctaggtaggcctcct

SEQ ID NO: 1035102 - DNA, 25 bp, Homo sapien
cttggagtccatgaaggtgcactgc

SEQ ID NO: 1035103 - DNA, 25 bp, Homo sapien
tcttaaagatgatgcccacgctgcc

SEQ ID NO: 1035104 - DNA, 25 bp, Homo sapien
tcctcgttgctgtacatgatccaca

SEQ ID NO: 1035105 - DNA, 25 bp, Homo sapien
gggcttcatcttggagtccatgaag

SEQ ID NO: 1035106 - DNA, 25 bp, Homo sapien
ctgcttccacaggacgtccatgagc

SEQ ID NO: 1035107 - DNA, 25 bp, Homo sapien
caagggctgtccctgaggccacttg

SEQ ID NO: 1035108 - DNA, 25 bp, Homo sapien
aagagggacgggcaaatggcatggt

SEQ ID NO: 1035109 - DNA, 25 bp, Homo sapien
cgggcaaatggcatggtcaagggct

SEQ ID NO: 1035110 - DNA, 25 bp, Homo sapien
gaaactcatggtgccccaaaaagcc

SEQ ID NO: 1035111 - DNA, 25 bp, Homo sapien
tgaacggagtaccacctcaatgagg

SEQ ID NO: 1035112 - DNA, 25 bp, Homo sapien
tggacttcagccagttgagcagggc

SEQ ID NO: 1035113 - DNA, 25 bp, Homo sapien
cagggcatccttgttgaaggcggct

SEQ ID NO: 1035114 - DNA, 25 bp, Homo sapien
ctcaatgaggcctgtgcggtccccg

SEQ ID NO: 1035115 - DNA, 25 bp, Homo sapien
gcccagcacatatgtggccacacaa

SEQ ID NO: 1035116 - DNA, 25 bp, Homo sapien
tcctcaatggctcgatccagggcct

SEQ ID NO: 1035117 - DNA, 25 bp, Homo sapien
ccagcacatatgtggccacacaata

SEQ ID NO: 1035118 - DNA, 25 bp, Homo sapien
agagggtgaactcctcaatggctcg

SEQ ID NO: 1035119 - DNA, 25 bp, Homo sapien
gctcgcggttgattccaaacttggt

SEQ ID NO: 1035120 - DNA, 25 bp, Homo sapien
acacgctcgcggttgattccaaact

SEQ ID NO: 1035121 - DNA, 25 bp, Homo sapien
cgctcgcggttgattccaaacttgg

SEQ ID NO: 1035122 - DNA, 25 bp, Homo sapien
tcgcggttgattccaaacttggtct

SEQ ID NO: 1035123 - DNA, 25 bp, Homo sapien
tggatgtctttggagcagctgagct

SEQ ID NO: 1035124 - DNA, 25 bp, Homo sapien
cgccgcaggatggtgtaggcccttt

SEQ ID NO: 1035125 - DNA, 25 bp, Homo sapien
tgtaggccctttcacagtagccccg

SEQ ID NO: 1035126 - DNA, 25 bp, Homo sapien
ccgcccgcatcagggcaaagaggtg

SEQ ID NO: 1035127 - DNA, 25 bp, Homo sapien
gttttccagctctcacggagggctt

SEQ ID NO: 1035128 - DNA, 25 bp, Homo sapien
agccagttcactttggttttccagc

SEQ ID NO: 1035129 - DNA, 25 bp, Homo sapien
tttggacacgttgtgggccagccag

SEQ ID NO: 1035130 - DNA, 25 bp, Homo sapien
ctgttgtctttggacacgttgtggg

SEQ ID NO: 1035131 - DNA, 25 bp, Homo sapien
tccctcgggaggagaacagtctttg

SEQ ID NO: 1035132 - DNA, 25 bp, Homo sapien
tgaatctagagggtaccccggctgc

SEQ ID NO: 1035133 - DNA, 25 bp, Homo sapien
tgcttttgccttcatgcgtgaccgg

SEQ ID NO: 1035134 - DNA, 25 bp, Homo sapien
tcagtctagggaggatacacagggt

SEQ ID NO: 1035135 - DNA, 25 bp, Homo sapien
ttaaataaataacgcgcacgcacgg

SEQ ID NO: 1035136 - DNA, 25 bp, Homo sapien
caagggtccacgatgtacaaagtca

SEQ ID NO: 1035137 - DNA, 25 bp, Homo sapien
catttcggccagtaggtgtgcagac

SEQ ID NO: 1035138 - DNA, 25 bp, Homo sapien
catttcgaaacaggcagacggtcta

SEQ ID NO: 1035139 - DNA, 25 bp, Homo sapien
tgtgagaatattagattgttatagc

SEQ ID NO: 1035140 - DNA, 25 bp, Homo sapien
gattgttatagcagtttctaagtgc

SEQ ID NO: 1035141 - DNA, 25 bp, Homo sapien
ttctggaatgtgtgagaatattaga

SEQ ID NO: 1035142 - DNA, 25 bp, Homo sapien
tgttatagcagtttctaagtgctta

SEQ ID NO: 1035143 - DNA, 25 bp, Homo sapien
gaaccaaaagttctctgcatctgtg

SEQ ID NO: 1035144 - DNA, 25 bp, Homo sapien
cagggaaccaaaagttctctgcatc

SEQ ID NO: 1035145 - DNA, 25 bp, Homo sapien
aagtcgagtcctcggcccaggttga

SEQ ID NO: 1035146 - DNA, 25 bp, Homo sapien
aggtcactggccctcctgtgaatga

SEQ ID NO: 1035147 - DNA, 25 bp, Homo sapien
aaaaaatgccctattgcactccagc

SEQ ID NO: 1035148 - DNA, 25 bp, Homo sapien
acactcagacccaccagatcaaggt

SEQ ID NO: 1035149 - DNA, 25 bp, Homo sapien
aaaacctgtgtattctgggcccaca

SEQ ID NO: 1035150 - DNA, 25 bp, Homo sapien
ctcagacccaccagatcaaggtttt

SEQ ID NO: 1035151 - DNA, 25 bp, Homo sapien
tgtttgagttcaacggcacccaggc

SEQ ID NO: 1035152 - DNA, 25 bp, Homo sapien
atcccggatggcgtcgtgtcggtca

SEQ ID NO: 1035153 - DNA, 25 bp, Homo sapien
tggatccctcaactggaccatgggc

SEQ ID NO: 1035154 - DNA, 25 bp, Homo sapien
atggccacgacagcgaccaggtgtt

SEQ ID NO: 1035155 - DNA, 25 bp, Homo sapien
cagcagcctttagtgcttcagtagc

SEQ ID NO: 1035156 - DNA, 25 bp, Homo sapien
agcagcctttagtgcttcagtagcc

SEQ ID NO: 1035157 - DNA, 25 bp, Homo sapien
tcagcagcctttagtgcttcagtag

SEQ ID NO: 1035158 - DNA, 25 bp, Homo sapien
gaggctctctgctggagaggctgcc

SEQ ID NO: 1035159 - DNA, 25 bp, Homo sapien
ctctgctggagaggctgccacatca

SEQ ID NO: 1035160 - DNA, 25 bp, Homo sapien
aggctctctgctggagaggctgcca

SEQ ID NO: 1035161 - DNA, 25 bp, Homo sapien
tgctggagaggctgccacatcacac

SEQ ID NO: 1035162 - DNA, 25 bp, Homo sapien
tggaaggattgtgctaaagcctttg

SEQ ID NO: 1035163 - DNA, 25 bp, Homo sapien
tggaaatctcactgctgtaggtgga

SEQ ID NO: 1035164 - DNA, 25 bp, Homo sapien
ctggaaggattgtgctaaagccttt

SEQ ID NO: 1035165 - DNA, 25 bp, Homo sapien
aaatctcactgctgtaggtggacat

SEQ ID NO: 1035166 - DNA, 25 bp, Homo sapien
tgggccaaatctggttgttgcttag

SEQ ID NO: 1035167 - DNA, 25 bp, Homo sapien
tttctgcgtatgaggttttcactct

SEQ ID NO: 1035168 - DNA, 25 bp, Homo sapien
ggtgttttctgcgtatgaggttttc

SEQ ID NO: 1035169 - DNA, 25 bp, Homo sapien
ggccaaatctggttgttgcttaggc

SEQ ID NO: 1035170 - DNA, 25 bp, Homo sapien
gaatatagacctcagtattacccat

SEQ ID NO: 1035171 - DNA, 25 bp, Homo sapien
aaagtcgttcgaatatagacctcag

SEQ ID NO: 1035172 - DNA, 25 bp, Homo sapien
cgttttttcagaagtaacgatgtgg

SEQ ID NO: 1035173 - DNA, 25 bp, Homo sapien
cgatgtggaaaaaagtcgttcgaat

SEQ ID NO: 1035174 - DNA, 25 bp, Homo sapien
ccagtgttagaaatctccgtctctg

SEQ ID NO: 1035175 - DNA, 25 bp, Homo sapien
gctgtttttctgacggtcatttaga

SEQ ID NO: 1035176 - DNA, 25 bp, Homo sapien
tgctacccctggtgccttggtgctg

SEQ ID NO: 1035177 - DNA, 25 bp, Homo sapien
tcatttagaccgtggagggttagat

SEQ ID NO: 1035178 - DNA, 25 bp, Homo sapien
agcgcgcgtagggacgcggagttga

SEQ ID NO: 1035179 - DNA, 25 bp, Homo sapien
gtagggacgcggagttgaggctctc

SEQ ID NO: 1035180 - DNA, 25 bp, Homo sapien
gggagcgcgcgtagggacgcggagt

SEQ ID NO: 1035181 - DNA, 25 bp, Homo sapien
agcccgggagcgcgcgtagggacgc

SEQ ID NO: 1035182 - DNA, 25 bp, Homo sapien
agaagctccttgtaaggacctgagg

SEQ ID NO: 1035183 - DNA, 25 bp, Homo sapien
cagaagctccttgtaaggacctgag

SEQ ID NO: 1035184 - DNA, 25 bp, Homo sapien
ccagaagctccttgtaaggacctga

SEQ ID NO: 1035185 - DNA, 25 bp, Homo sapien
cttgtcacgatcacaggccttgctt

SEQ ID NO: 1035186 - DNA, 25 bp, Homo sapien
ttttgtaacaatgatgaccccggcc

SEQ ID NO: 1035187 - DNA, 25 bp, Homo sapien
aaagtcaaagtgttgctgtggctcc

SEQ ID NO: 1035188 - DNA, 25 bp, Homo sapien
cagcctgtccttgtcacgatcacag

SEQ ID NO: 1035189 - DNA, 25 bp, Homo sapien
tggagtcaggtgtcgaggccacatt

SEQ ID NO: 1035190 - DNA, 25 bp, Homo sapien
atgctggtagatgctgaggccccta

SEQ ID NO: 1035191 - DNA, 25 bp, Homo sapien
tagccctggttagctgacagtcagc

SEQ ID NO: 1035192 - DNA, 25 bp, Homo sapien
gattcgagcatcaggctaagaccct

SEQ ID NO: 1035193 - DNA, 25 bp, Homo sapien
gctctggagttctctcatcggaggc

SEQ ID NO: 1035194 - DNA, 25 bp, Homo sapien
gagttctctcatcggaggcccatgc

SEQ ID NO: 1035195 - DNA, 25 bp, Homo sapien
acagtaggtcccggccagctctgga

SEQ ID NO: 1035196 - DNA, 25 bp, Homo sapien
tctggagttctctcatcggaggccc

SEQ ID NO: 1035197 - DNA, 25 bp, Homo sapien
agcttctcccagtgtgagaccccaa

SEQ ID NO: 1035198 - DNA, 25 bp, Homo sapien
gcgggatttatgtgcactgcctgca

SEQ ID NO: 1035199 - DNA, 25 bp, Homo sapien
gtcgtcttgaacgagcagcccaggg

SEQ ID NO: 1035200 - DNA, 25 bp, Homo sapien
aaagggattgctgaggcaccgtcca

SEQ ID NO: 1035201 - DNA, 25 bp, Homo sapien
gattggctgcttaaactggaaagga

SEQ ID NO: 1035202 - DNA, 25 bp, Homo sapien
caggtgttctgctgatatcaacagc

SEQ ID NO: 1035203 - DNA, 25 bp, Homo sapien
aaaaatttgcgcctcggtatctggc

SEQ ID NO: 1035204 - DNA, 25 bp, Homo sapien
tggcatcaagggagacaccagtggt

SEQ ID NO: 1035205 - DNA, 25 bp, Homo sapien
ttgtcctgttcgcaagccaatgctg

SEQ ID NO: 1035206 - DNA, 25 bp, Homo sapien
tgatggcgttttccaggtcggagac

SEQ ID NO: 1035207 - DNA, 25 bp, Homo sapien
tacagcagggttgcaagccttgtcc

SEQ ID NO: 1035208 - DNA, 25 bp, Homo sapien
aaagcccttggaacaccctggatgc

SEQ ID NO: 1035209 - DNA, 25 bp, Homo sapien
ctccccaagaaagggattttgatag

SEQ ID NO: 1035210 - DNA, 25 bp, Homo sapien
ttattcagtaatgttgtgtactatt

SEQ ID NO: 1035211 - DNA, 25 bp, Homo sapien
gagatcatgtattgaattttattca

SEQ ID NO: 1035212 - DNA, 25 bp, Homo sapien
caagaaagggattttgatagagatc

SEQ ID NO: 1035213 - DNA, 25 bp, Homo sapien
ttttcaaggtggtgttggatattct

SEQ ID NO: 1035214 - DNA, 25 bp, Homo sapien
ttatgccagtaccacccagtctcgt

SEQ ID NO: 1035215 - DNA, 25 bp, Homo sapien
gtaccacccagtctcgttgaccttg

SEQ ID NO: 1035216 - DNA, 25 bp, Homo sapien
atgccagtaccacccagtctcgttg

SEQ ID NO: 1035217 - DNA, 25 bp, Homo sapien
cagttgtcccaccacacatttgttc

SEQ ID NO: 1035218 - DNA, 25 bp, Homo sapien
ctttgagtgctgattgtaccactgc

SEQ ID NO: 1035219 - DNA, 25 bp, Homo sapien
cagggagggtcgctttgaccccatc

SEQ ID NO: 1035220 - DNA, 25 bp, Homo sapien
gaacagatgcccgaatggcctcaga

SEQ ID NO: 1035221 - DNA, 25 bp, Homo sapien
cccaagaaaagcgaggaatgtgctg

SEQ ID NO: 1035222 - DNA, 25 bp, Homo sapien
gagggtcgctttgaccccagctgct

SEQ ID NO: 1035223 - DNA, 25 bp, Homo sapien
tgccgtgttcaccatcacacatgag

SEQ ID NO: 1035224 - DNA, 25 bp, Homo sapien
agcccctcgggaccagggtctgtgc

SEQ ID NO: 1035225 - DNA, 25 bp, Homo sapien
ggtggcatgatctccatgttacagc

SEQ ID NO: 1035226 - DNA, 25 bp, Homo sapien
cagtcttaccaccttatgttggcag

SEQ ID NO: 1035227 - DNA, 25 bp, Homo sapien
gatgtggactagctgggccatgaca

SEQ ID NO: 1035228 - DNA, 25 bp, Homo sapien
tcagactgtggaagcaaggtcccct

SEQ ID NO: 1035229 - DNA, 25 bp, Homo sapien
taaagcagtgctctcgacctggcaa

SEQ ID NO: 1035230 - DNA, 25 bp, Homo sapien
taagccagagtacgtgtcagctgct

SEQ ID NO: 1035231 - DNA, 25 bp, Homo sapien
gacagcgaggcatatccttgtgcga

SEQ ID NO: 1035232 - DNA, 25 bp, Homo sapien
cagcatctgattaggaaggcaaggc

SEQ ID NO: 1035233 - DNA, 25 bp, Homo sapien
ggtgctaatcagctggcccttcaag

SEQ ID NO: 1035234 - DNA, 25 bp, Homo sapien
tgtcactgtatgtggcactcccggt

SEQ ID NO: 1035235 - DNA, 25 bp, Homo sapien
tggttgtgttgtagtgtagaaactt

SEQ ID NO: 1035236 - DNA, 25 bp, Homo sapien
tgttgtagtgtagaaacttctgtaa

SEQ ID NO: 1035237 - DNA, 25 bp, Homo sapien
tgtgttgtagtgtagaaacttctgt

SEQ ID NO: 1035238 - DNA, 25 bp, Homo sapien
ttgtgttgtagtgtagaaacttctg

SEQ ID NO: 1035239 - DNA, 25 bp, Homo sapien
cagttgtccacgatgccacttgctc

SEQ ID NO: 1035240 - DNA, 25 bp, Homo sapien
tcagttgtccacgatgccacttgct

SEQ ID NO: 1035241 - DNA, 25 bp, Homo sapien
aatccagagtgggactctttagact

SEQ ID NO: 1035242 - DNA, 25 bp, Homo sapien
agtgggactctttagactgggtgcc

SEQ ID NO: 1035243 - DNA, 25 bp, Homo sapien
ggactctttagactgggtgccattg

SEQ ID NO: 1035244 - DNA, 25 bp, Homo sapien
tctttagactgggtgccattggcca

SEQ ID NO: 1035245 - DNA, 25 bp, Homo sapien
ttaaatgacttataaactgtgtttc

SEQ ID NO: 1035246 - DNA, 25 bp, Homo sapien
gaaaagtgagtaaattctatgcaat

SEQ ID NO: 1035247 - DNA, 25 bp, Homo sapien
cattctaagcaccataggatatatt

SEQ ID NO: 1035248 - DNA, 25 bp, Homo sapien
aacaaccattctaagcaccatagga

SEQ ID NO: 1035249 - DNA, 25 bp, Homo sapien
cactgtactggctgacaaagtgaga

SEQ ID NO: 1035250 - DNA, 25 bp, Homo sapien
atattttgtttatccggtatctgtt

SEQ ID NO: 1035251 - DNA, 25 bp, Homo sapien
tccggtatctgttgatgatttgggt

SEQ ID NO: 1035252 - DNA, 25 bp, Homo sapien
aatggaattgctgcgtttgttgttg

SEQ ID NO: 1035253 - DNA, 25 bp, Homo sapien
taccacaccgggacatcatcatatt

SEQ ID NO: 1035254 - DNA, 25 bp, Homo sapien
gcctcccaaggtgtaacttctagat

SEQ ID NO: 1035255 - DNA, 25 bp, Homo sapien
tattcaggcagctatcagccaggcc

SEQ ID NO: 1035256 - DNA, 25 bp, Homo sapien
tgtaattgcttccatgacaggaacc

SEQ ID NO: 1035257 - DNA, 25 bp, Homo sapien
caaccaggtcagcttcggacaaggt

SEQ ID NO: 1035258 - DNA, 25 bp, Homo sapien
gattttcctcaaagaccctctcggc

SEQ ID NO: 1035259 - DNA, 25 bp, Homo sapien
aagcctctgggtttgacgccatccc

SEQ ID NO: 1035260 - DNA, 25 bp, Homo sapien
ttccaagcctctgggtttgacgcca

SEQ ID NO: 1035261 - DNA, 25 bp, Homo sapien
gccatccctcaaggcgtgtccggat

SEQ ID NO: 1035262 - DNA, 25 bp, Homo sapien
gcccggacgccagcgagtggaacat

SEQ ID NO: 1035263 - DNA, 25 bp, Homo sapien
cagcgagtggaacatctcggtcgca

SEQ ID NO: 1035264 - DNA, 25 bp, Homo sapien
ggtcgcactctcattggttccaggg

SEQ ID NO: 1035265 - DNA, 25 bp, Homo sapien
aagtgcgtgcgtccagcggaagtgc

SEQ ID NO: 1035266 - DNA, 25 bp, Homo sapien
cctcactgtccgccggcccgagtgc

SEQ ID NO: 1035267 - DNA, 25 bp, Homo sapien
cgccctcactgtccgccggcccgag

SEQ ID NO: 1035268 - DNA, 25 bp, Homo sapien
tcactgtccgccggcccgagtgcta

SEQ ID NO: 1035269 - DNA, 25 bp, Homo sapien
cgcgccctcactgtccgccggcccg

SEQ ID NO: 1035270 - DNA, 25 bp, Homo sapien
tccttgccccaaacctgaatatgag

SEQ ID NO: 1035271 - DNA, 25 bp, Homo sapien
gaatccatctgttccgaaggtcaga

SEQ ID NO: 1035272 - DNA, 25 bp, Homo sapien
taaaggtgccagacctcaagactct

SEQ ID NO: 1035273 - DNA, 25 bp, Homo sapien
tatatctaggacaaaaagcgaccag

SEQ ID NO: 1035274 - DNA, 25 bp, Homo sapien
cgttctcttcgacttgagtgtgcag

SEQ ID NO: 1035275 - DNA, 25 bp, Homo sapien
tcgttctcttcgacttgagtgtgca

SEQ ID NO: 1035276 - DNA, 25 bp, Homo sapien
taaacaaggtcaatttattgcttct

SEQ ID NO: 1035277 - DNA, 25 bp, Homo sapien
tctttaagaatgtagtggggccgga

SEQ ID NO: 1035278 - DNA, 25 bp, Homo sapien
ttaagaatgtagtggggccggacac

SEQ ID NO: 1035279 - DNA, 25 bp, Homo sapien
gcttctttaagaatgtagtggggcc

SEQ ID NO: 1035280 - DNA, 25 bp, Homo sapien
ggaattaaaggtgtgtgccactatg

SEQ ID NO: 1035281 - DNA, 25 bp, Homo sapien
cagtagctggaattaaaggtgtgtg

SEQ ID NO: 1035282 - DNA, 25 bp, Homo sapien
ctcctcctggattaaagcaattctt

SEQ ID NO: 1035283 - DNA, 25 bp, Homo sapien
ctatgcctggataattttggtattt

SEQ ID NO: 1035284 - DNA, 25 bp, Homo sapien
gggtcctccttgtcttgctccaggt

SEQ ID NO: 1035285 - DNA, 25 bp, Homo sapien
ctgggtcctccttgtcttgctccag

SEQ ID NO: 1035286 - DNA, 25 bp, Homo sapien
ctccttgtcttgctccaggtgctct

SEQ ID NO: 1035287 - DNA, 25 bp, Homo sapien
tcctccttgtcttgctccaggtgct

SEQ ID NO: 1035288 - DNA, 25 bp, Homo sapien
gcctgagtgatagggtgagactctg

SEQ ID NO: 1035289 - DNA, 25 bp, Homo sapien
tcacgcctcagcactccagcctgag

SEQ ID NO: 1035290 - DNA, 25 bp, Homo sapien
tgagatcacgcctcagcactccagc

SEQ ID NO: 1035291 - DNA, 25 bp, Homo sapien
ccagcctgagtgatagggtgagact

SEQ ID NO: 1035292 - DNA, 25 bp, Homo sapien
tgcctggccgcttgaagcattttta

SEQ ID NO: 1035293 - DNA, 25 bp, Homo sapien
taaacacatcaatagttatatgcta

SEQ ID NO: 1035294 - DNA, 25 bp, Homo sapien
gtgcctggccgcttgaagcattttt

SEQ ID NO: 1035295 - DNA, 25 bp, Homo sapien
agttatatgctacttttggtttaca

SEQ ID NO: 1035296 - DNA, 25 bp, Homo sapien
ccttgttcctttatgtgtaacctgc

SEQ ID NO: 1035297 - DNA, 25 bp, Homo sapien
atattatcttatccctagtactctg

SEQ ID NO: 1035298 - DNA, 25 bp, Homo sapien
gctggcattcaacattgctgttgaa

SEQ ID NO: 1035299 - DNA, 25 bp, Homo sapien
aagtctgaggtcattctaatccttg

SEQ ID NO: 1035300 - DNA, 25 bp, Homo sapien
actacctacctcctgattgttgtga

SEQ ID NO: 1035301 - DNA, 25 bp, Homo sapien
gaaaataatactacctacctcctga

SEQ ID NO: 1035302 - DNA, 25 bp, Homo sapien
aaaactgtgacacctcccttgttgt

SEQ ID NO: 1035303 - DNA, 25 bp, Homo sapien
cacaagcaaggagaaccacttcagt

SEQ ID NO: 1035304 - DNA, 25 bp, Homo sapien
tgggattgaatgaaccacaagcaag

SEQ ID NO: 1035305 - DNA, 25 bp, Homo sapien
gcaaggagaaccacttcagtcttct

SEQ ID NO: 1035306 - DNA, 25 bp, Homo sapien
ggtgatgggattgaatgaaccacaa

SEQ ID NO: 1035307 - DNA, 25 bp, Homo sapien
ccagctcaaacaacctgaggtgcat

SEQ ID NO: 1035308 - DNA, 25 bp, Homo sapien
ctgttccattcatgtagtccttggc

SEQ ID NO: 1035309 - DNA, 25 bp, Homo sapien
tggccagctcaaacaacctgaggtg

SEQ ID NO: 1035310 - DNA, 25 bp, Homo sapien
gttccattcatgtagtccttggcca

SEQ ID NO: 1035311 - DNA, 25 bp, Homo sapien
ctgcacccggctggttctctagtct

SEQ ID NO: 1035312 - DNA, 25 bp, Homo sapien
tccacccatttagaattcttggtag

SEQ ID NO: 1035313 - DNA, 25 bp, Homo sapien
catgatgacccggtgataggcagga

SEQ ID NO: 1035314 - DNA, 25 bp, Homo sapien
ttgactagaatcttgtgtttcagtc

SEQ ID NO: 1035315 - DNA, 25 bp, Homo sapien
actagaatcttgtgtttcagtccac

SEQ ID NO: 1035316 - DNA, 25 bp, Homo sapien
tcttttgactagaatcttgtgtttc

SEQ ID NO: 1035317 - DNA, 25 bp, Homo sapien
ttttgactagaatcttgtgtttcag

SEQ ID NO: 1035318 - DNA, 25 bp, Homo sapien
cttcacttcatgcaactaacaaggg

SEQ ID NO: 1035319 - DNA, 25 bp, Homo sapien
tctccttcacttcatgcaactaaca

SEQ ID NO: 1035320 - DNA, 25 bp, Homo sapien
taacaaggggcattttccagacacc

SEQ ID NO: 1035321 - DNA, 25 bp, Homo sapien
agctccaagtgccttttattctcct

SEQ ID NO: 1035322 - DNA, 25 bp, Homo sapien
cagcacatccgattcatagataaac

SEQ ID NO: 1035323 - DNA, 25 bp, Homo sapien
agcccgagtaacacatatgagccca

SEQ ID NO: 1035324 - DNA, 25 bp, Homo sapien
ccgagtaacacatatgagcccatag

SEQ ID NO: 1035325 - DNA, 25 bp, Homo sapien
catagttggccacgatttgggtgat

SEQ ID NO: 1035326 - DNA, 25 bp, Homo sapien
cagtgtttctctgcaaaggggccag

SEQ ID NO: 1035327 - DNA, 25 bp, Homo sapien
ctatgtcttagcttctgcagtgttt

SEQ ID NO: 1035328 - DNA, 25 bp, Homo sapien
tatgtcttagcttctgcagtgtttc

SEQ ID NO: 1035329 - DNA, 25 bp, Homo sapien
tttctctgcaaaggggccaggatga

SEQ ID NO: 1035330 - DNA, 25 bp, Homo sapien
actcccagattgtttcagatcccca

SEQ ID NO: 1035331 - DNA, 25 bp, Homo sapien
tattaactcccagattgtttcagat

SEQ ID NO: 1035332 - DNA, 25 bp, Homo sapien
tgtgcccagacgatttttactaaac

SEQ ID NO: 1035333 - DNA, 25 bp, Homo sapien
atgggaagtctgaaatatcatgctg

SEQ ID NO: 1035334 - DNA, 25 bp, Homo sapien
aacttattttagcttaccattgatt

SEQ ID NO: 1035335 - DNA, 25 bp, Homo sapien
aaacttattttagcttaccattgat

SEQ ID NO: 1035336 - DNA, 25 bp, Homo sapien
tattttagcttaccattgattttta

SEQ ID NO: 1035337 - DNA, 25 bp, Homo sapien
cttattttagcttaccattgatttt

SEQ ID NO: 1035338 - DNA, 25 bp, Homo sapien
caaaattatgctattacgtggcagc

SEQ ID NO: 1035339 - DNA, 25 bp, Homo sapien
tatgagaatgttagaggaatgggcc

SEQ ID NO: 1035340 - DNA, 25 bp, Homo sapien
aaaggctctccatcatccgaatgaa

SEQ ID NO: 1035341 - DNA, 25 bp, Homo sapien
ctgttgttagatcctcatgatggcc

SEQ ID NO: 1035342 - DNA, 25 bp, Homo sapien
ggtggagactgtgtacgcagcctca

SEQ ID NO: 1035343 - DNA, 25 bp, Homo sapien
aagctcagctcaccatttataccag

SEQ ID NO: 1035344 - DNA, 25 bp, Homo sapien
ctcacagctgagtggatgccgtggt

SEQ ID NO: 1035345 - DNA, 25 bp, Homo sapien
tataccagtcccctgattttgccgt

SEQ ID NO: 1035346 - DNA, 25 bp, Homo sapien
ccttccgtgaggactgaatacgtcg

SEQ ID NO: 1035347 - DNA, 25 bp, Homo sapien
gaatacgtcggactcatctccatca

SEQ ID NO: 1035348 - DNA, 25 bp, Homo sapien
gattccactgttctagttccaagga

SEQ ID NO: 1035349 - DNA, 25 bp, Homo sapien
gttccaaggaattgctaacactggg

SEQ ID NO: 1035350 - DNA, 25 bp, Homo sapien
agccaccgcactggacttagtacac

SEQ ID NO: 1035351 - DNA, 25 bp, Homo sapien
caccgcactggacttagtacacttg

SEQ ID NO: 1035352 - DNA, 25 bp, Homo sapien
cactggacttagtacacttgttttg

SEQ ID NO: 1035353 - DNA, 25 bp, Homo sapien
gtttgttgagagggagtttttgctc

SEQ ID NO: 1035354 - DNA, 25 bp, Homo sapien
aaggcaactttcaagagggcaaaca

SEQ ID NO: 1035355 - DNA, 25 bp, Homo sapien
tggggagccctcattggggacccac

SEQ ID NO: 1035356 - DNA, 25 bp, Homo sapien
caactttcaagagggcaaacaggga

SEQ ID NO: 1035357 - DNA, 25 bp, Homo sapien
caagagggcaaacagggatgtaaat

SEQ ID NO: 1035358 - DNA, 25 bp, Homo sapien
gactcctcttcaaagctacaccatg

SEQ ID NO: 1035359 - DNA, 25 bp, Homo sapien
tatttctgccgtccaaccgtagtct

SEQ ID NO: 1035360 - DNA, 25 bp, Homo sapien
gaagtcaagccacttatttctgccg

SEQ ID NO: 1035361 - DNA, 25 bp, Homo sapien
ccgtagtctccaatatccagctgct

SEQ ID NO: 1035362 - DNA, 25 bp, Homo sapien
caagtaccgctgaggtcggcgggca

SEQ ID NO: 1035363 - DNA, 25 bp, Homo sapien
ctagggccagcatgtagccctcgaa

SEQ ID NO: 1035364 - DNA, 25 bp, Homo sapien
cagcatgtagccctcgaagttgtcg

SEQ ID NO: 1035365 - DNA, 25 bp, Homo sapien
gtagccctcgaagttgtcgctgctg

SEQ ID NO: 1035366 - DNA, 25 bp, Homo sapien
tgagccgagatcccgccattgcact

SEQ ID NO: 1035367 - DNA, 25 bp, Homo sapien
ccggggagacggaagttgcggtgag

SEQ ID NO: 1035368 - DNA, 25 bp, Homo sapien
ccagcctgggcaacaagagcaaaac

SEQ ID NO: 1035369 - DNA, 25 bp, Homo sapien
ctgggcaacaagagcaaaactccat

SEQ ID NO: 1035370 - DNA, 25 bp, Homo sapien
ctattttacgagtggcaaagtcaat

SEQ ID NO: 1035371 - DNA, 25 bp, Homo sapien
attttacgagtggcaaagtcaatac

SEQ ID NO: 1035372 - DNA, 25 bp, Homo sapien
tattttacgagtggcaaagtcaata

SEQ ID NO: 1035373 - DNA, 25 bp, Homo sapien
tcacaaagtagttccttaggctgct

SEQ ID NO: 1035374 - DNA, 25 bp, Homo sapien
gaatccccattctgctcaatcactt

SEQ ID NO: 1035375 - DNA, 25 bp, Homo sapien
gttcgtgtggatggtaaaagaatcc

SEQ ID NO: 1035376 - DNA, 25 bp, Homo sapien
ttaggctgctgttcgtgtggatggt

SEQ ID NO: 1035377 - DNA, 25 bp, Homo sapien
cgatccaatgggtccagcctctgtt

SEQ ID NO: 1035378 - DNA, 25 bp, Homo sapien
ggagtttgtctccttcgatccaatg

SEQ ID NO: 1035379 - DNA, 25 bp, Homo sapien
tgtctccttcgatccaatgggtcca

SEQ ID NO: 1035380 - DNA, 25 bp, Homo sapien
caggtgagcctgtcattgtcccaga

SEQ ID NO: 1035381 - DNA, 25 bp, Homo sapien
tcaggctctctggaatgtctgtttg

SEQ ID NO: 1035382 - DNA, 25 bp, Homo sapien
ctggaatgtctgtttgcacacttga

SEQ ID NO: 1035383 - DNA, 25 bp, Homo sapien
atgtctgtttgcacacttgaccttc

SEQ ID NO: 1035384 - DNA, 25 bp, Homo sapien
gaatgtctgtttgcacacttgacct

SEQ ID NO: 1035385 - DNA, 25 bp, Homo sapien
gatgacttcaggttacacgctgtgt

SEQ ID NO: 1035386 - DNA, 25 bp, Homo sapien
gtttattgaagctgagcagtttccc

SEQ ID NO: 1035387 - DNA, 25 bp, Homo sapien
acgagtcctcgtcgccaaatgggat

SEQ ID NO: 1035388 - DNA, 25 bp, Homo sapien
gataaacgtctgttcagtctgcaat

SEQ ID NO: 1035389 - DNA, 25 bp, Homo sapien
tgagcaggtcgaggaaatatcaaaa

SEQ ID NO: 1035390 - DNA, 25 bp, Homo sapien
gagcaggtcgaggaaatatcaaaag

SEQ ID NO: 1035391 - DNA, 25 bp, Homo sapien
gcaaaactcttatctgtggagaacc

SEQ ID NO: 1035392 - DNA, 25 bp, Homo sapien
aagcaaaactcttatctgtggagaa

SEQ ID NO: 1035393 - DNA, 25 bp, Homo sapien
tctttgaaagggatcacgtgacccc

SEQ ID NO: 1035394 - DNA, 25 bp, Homo sapien
tcgactgcagagtggataccccgag

SEQ ID NO: 1035395 - DNA, 25 bp, Homo sapien
tcttcgtgatagtggcgcggtagct

SEQ ID NO: 1035396 - DNA, 25 bp, Homo sapien
tacagggttgtcttaaggcgccact

SEQ ID NO: 1035397 - DNA, 25 bp, Homo sapien
tcattccatccaaaattgttcttta

SEQ ID NO: 1035398 - DNA, 25 bp, Homo sapien
cattccatccaaaattgttctttaa

SEQ ID NO: 1035399 - DNA, 25 bp, Homo sapien
cagtggcatccaatactgtccaggg

SEQ ID NO: 1035400 - DNA, 25 bp, Homo sapien
ccaatactgtccagggggtcggcat

SEQ ID NO: 1035401 - DNA, 25 bp, Homo sapien
gcatccaatactgtccagggggtcg

SEQ ID NO: 1035402 - DNA, 25 bp, Homo sapien
tcagtggcatccaatactgtccagg

SEQ ID NO: 1035403 - DNA, 25 bp, Homo sapien
tgtccttcagactcttacagaagag

SEQ ID NO: 1035404 - DNA, 25 bp, Homo sapien
ccatgatggccccttccgggagagc

SEQ ID NO: 1035405 - DNA, 25 bp, Homo sapien
agagcaggtgccctacagtgtagtc

SEQ ID NO: 1035406 - DNA, 25 bp, Homo sapien
tcccaaggctcgactgtgccagaaa

SEQ ID NO: 1035407 - DNA, 25 bp, Homo sapien
actgaatagaacaggactggctccc

SEQ ID NO: 1035408 - DNA, 25 bp, Homo sapien
tgttattgtacaactgcccacagga

SEQ ID NO: 1035409 - DNA, 25 bp, Homo sapien
cacagggacctgacgactgaataga

SEQ ID NO: 1035410 - DNA, 25 bp, Homo sapien
gagcaatacctaggccataccgtaa

SEQ ID NO: 1035411 - DNA, 25 bp, Homo sapien
gtccactttatgaaaactcactggg

SEQ ID NO: 1035412 - DNA, 25 bp, Homo sapien
taaccatcacttgtaggagcaaaat

SEQ ID NO: 1035413 - DNA, 25 bp, Homo sapien
aacagatttacccatgtcccctgag

SEQ ID NO: 1035414 - DNA, 25 bp, Homo sapien
ctactaacagcagggcatctccaaa

SEQ ID NO: 1035415 - DNA, 25 bp, Homo sapien
ctgtccaccagcaagtcgtgcaagg

SEQ ID NO: 1035416 - DNA, 25 bp, Homo sapien
tggttggctgagaggtctgtccacc

SEQ ID NO: 1035417 - DNA, 25 bp, Homo sapien
caagtcgtgcaaggcgcctccgtcg

SEQ ID NO: 1035418 - DNA, 25 bp, Homo sapien
gttggctgagaggtctgtccaccag

SEQ ID NO: 1035419 - DNA, 25 bp, Homo sapien
cctggggctgatgccgctatgggag

SEQ ID NO: 1035420 - DNA, 25 bp, Homo sapien
ggacattgagaccaagactctgaga

SEQ ID NO: 1035421 - DNA, 25 bp, Homo sapien
atgccgctatgggaggccccggagg

SEQ ID NO: 1035422 - DNA, 25 bp, Homo sapien
gctgatgccgctatgggaggccccg

SEQ ID NO: 1035423 - DNA, 25 bp, Homo sapien
gatgcacctattggggaggtagctg

SEQ ID NO: 1035424 - DNA, 25 bp, Homo sapien
ctgatgcacctattggggaggtagc

SEQ ID NO: 1035425 - DNA, 25 bp, Homo sapien
tgatgcacctattggggaggtagct

SEQ ID NO: 1035426 - DNA, 25 bp, Homo sapien
cttgtcatcagagataatacctaaa

SEQ ID NO: 1035427 - DNA, 25 bp, Homo sapien
atcttgtcatcagagataataccta

SEQ ID NO: 1035428 - DNA, 25 bp, Homo sapien
tcttgtcatcagagataatacctaa

SEQ ID NO: 1035429 - DNA, 25 bp, Homo sapien
gacagtcctggatatcaagcatcag

SEQ ID NO: 1035430 - DNA, 25 bp, Homo sapien
tagtctacactgatacctaacgaga

SEQ ID NO: 1035431 - DNA, 25 bp, Homo sapien
gacgaggaaatctgcaattagaggt

SEQ ID NO: 1035432 - DNA, 25 bp, Homo sapien
taacagatgttttggttgaaccaca

SEQ ID NO: 1035433 - DNA, 25 bp, Homo sapien
aaccaggcgcacatacaggtaggca

SEQ ID NO: 1035434 - DNA, 25 bp, Homo sapien
actgaggctgatggaggttccctgc

SEQ ID NO: 1035435 - DNA, 25 bp, Homo sapien
tgtagtgcactaggatcacgcctat

SEQ ID NO: 1035436 - DNA, 25 bp, Homo sapien
tttgtgcataacaagaaccaggcgc

SEQ ID NO: 1035437 - DNA, 25 bp, Homo sapien
aaataataaaatacggtcaggcgtg

SEQ ID NO: 1035438 - DNA, 25 bp, Homo sapien
aataataaaatacggtcaggcgtgg

SEQ ID NO: 1035439 - DNA, 25 bp, Homo sapien
gacattttcttagcagctaatttcc

SEQ ID NO: 1035440 - DNA, 25 bp, Homo sapien
gcaagatgatagttcaaggcagcct

SEQ ID NO: 1035441 - DNA, 25 bp, Homo sapien
acttctgcctcaatgctgattataa

SEQ ID NO: 1035442 - DNA, 25 bp, Homo sapien
gtacagtggcaagatgatagttcaa

SEQ ID NO: 1035443 - DNA, 25 bp, Homo sapien
gcgagctgctgagagaactgactcc

SEQ ID NO: 1035444 - DNA, 25 bp, Homo sapien
catcgatatccatgctctgggaacg

SEQ ID NO: 1035445 - DNA, 25 bp, Homo sapien
gactgagattgcgtttcaaggctat

SEQ ID NO: 1035446 - DNA, 25 bp, Homo sapien
tcaaggctattagagggcgagctgc

SEQ ID NO: 1035447 - DNA, 25 bp, Homo sapien
gcaagttctcaatgtaaattacctt

SEQ ID NO: 1035448 - DNA, 25 bp, Homo sapien
tgttctttgtggtacgttctgggta

SEQ ID NO: 1035449 - DNA, 25 bp, Homo sapien
caagttctcaatgtaaattaccttt

SEQ ID NO: 1035450 - DNA, 25 bp, Homo sapien
agcaagttctcaatgtaaattacct

SEQ ID NO: 1035451 - DNA, 25 bp, Homo sapien
gtctgatgagagtgaagcatcctta

SEQ ID NO: 1035452 - DNA, 25 bp, Homo sapien
tctgatgagagtgaagcatccttac

SEQ ID NO: 1035453 - DNA, 25 bp, Homo sapien
aagtctgatgagagtgaagcatcct

SEQ ID NO: 1035454 - DNA, 25 bp, Homo sapien
aaagtctgatgagagtgaagcatcc

SEQ ID NO: 1035455 - DNA, 25 bp, Homo sapien
aaatatcagttaatcaggaaaggaa

SEQ ID NO: 1035456 - DNA, 25 bp, Homo sapien
taaaatatcagttaatcaggaaagg

SEQ ID NO: 1035457 - DNA, 25 bp, Homo sapien
aggaaaatgataatggtccatcttt

SEQ ID NO: 1035458 - DNA, 25 bp, Homo sapien
aaatgataatggtccatcttttttc

SEQ ID NO: 1035459 - DNA, 25 bp, Homo sapien
aaatccgcacaatgtcactgtagct

SEQ ID NO: 1035460 - DNA, 25 bp, Homo sapien
tataaatccgcacaatgtcactgta

SEQ ID NO: 1035461 - DNA, 25 bp, Homo sapien
tttataaatccgcacaatgtcactg

SEQ ID NO: 1035462 - DNA, 25 bp, Homo sapien
taaatccgcacaatgtcactgtagc

SEQ ID NO: 1035463 - DNA, 25 bp, Homo sapien
attcctgaatccacatccacctggg

SEQ ID NO: 1035464 - DNA, 25 bp, Homo sapien
tttcaattcctgaatccacatccac

SEQ ID NO: 1035465 - DNA, 25 bp, Homo sapien
aattcctgaatccacatccacctgg

SEQ ID NO: 1035466 - DNA, 25 bp, Homo sapien
tcaattcctgaatccacatccacct

SEQ ID NO: 1035467 - DNA, 25 bp, Homo sapien
tgaggctccgcttttctcttcgatc

SEQ ID NO: 1035468 - DNA, 25 bp, Homo sapien
ttatcactgaggctccgcttttctc

SEQ ID NO: 1035469 - DNA, 25 bp, Homo sapien
tatcactgaggctccgcttttctct

SEQ ID NO: 1035470 - DNA, 25 bp, Homo sapien
ggctccgcttttctcttcgatcatt

SEQ ID NO: 1035471 - DNA, 25 bp, Homo sapien
cggtccttccaagagacacggaaga

SEQ ID NO: 1035472 - DNA, 25 bp, Homo sapien
tgtcccggtccttccaagagacacg

SEQ ID NO: 1035473 - DNA, 25 bp, Homo sapien
tcagacacttcagggcccgaggaag

SEQ ID NO: 1035474 - DNA, 25 bp, Homo sapien
ttacagaccagctgtaaggcctgct

SEQ ID NO: 1035475 - DNA, 25 bp, Homo sapien
gagccagtgtttagcaagagatttc

SEQ ID NO: 1035476 - DNA, 25 bp, Homo sapien
gctggcaccaaaggaagccacgctg

SEQ ID NO: 1035477 - DNA, 25 bp, Homo sapien
gatttctgtctggtgaccgtgctgc

SEQ ID NO: 1035478 - DNA, 25 bp, Homo sapien
tcatctctggtctgagtggacatca

SEQ ID NO: 1035479 - DNA, 25 bp, Homo sapien
tgggagccggactactttcatagag

SEQ ID NO: 1035480 - DNA, 25 bp, Homo sapien
ccatcacgggaacagagctccagaa

SEQ ID NO: 1035481 - DNA, 25 bp, Homo sapien
gtgaggcaagagacgggcccatcac

SEQ ID NO: 1035482 - DNA, 25 bp, Homo sapien
gagtgggagccggactactttcata

SEQ ID NO: 1035483 - DNA, 25 bp, Homo sapien
gaggggagtggaaggcacagccaac

SEQ ID NO: 1035484 - DNA, 25 bp, Homo sapien
agtggaaggcacagccaactggctg

SEQ ID NO: 1035485 - DNA, 25 bp, Homo sapien
ggagtggaaggcacagccaactggc

SEQ ID NO: 1035486 - DNA, 25 bp, Homo sapien
ggggagtggaaggcacagccaactg

SEQ ID NO: 1035487 - DNA, 25 bp, Homo sapien
ggcttcccgcagcagttccagaggc

SEQ ID NO: 1035488 - DNA, 25 bp, Homo sapien
cgcagcagttccagaggctgcactg

SEQ ID NO: 1035489 - DNA, 25 bp, Homo sapien
agttccagaggctgcactgtgagga

SEQ ID NO: 1035490 - DNA, 25 bp, Homo sapien
tcccgcagcagttccagaggctgca

SEQ ID NO: 1035491 - DNA, 25 bp, Homo sapien
ccatgggtgagtgacagtgtagggg

SEQ ID NO: 1035492 - DNA, 25 bp, Homo sapien
catgggtgagtgacagtgtaggggc

SEQ ID NO: 1035493 - DNA, 25 bp, Homo sapien
gtgagtgacagtgtaggggcgatac

SEQ ID NO: 1035494 - DNA, 25 bp, Homo sapien
tgggtgagtgacagtgtaggggcga

SEQ ID NO: 1035495 - DNA, 25 bp, Homo sapien
tcgacagaatggagacgcctgagga

SEQ ID NO: 1035496 - DNA, 25 bp, Homo sapien
acagaatggagacgcctgaggacgc

SEQ ID NO: 1035497 - DNA, 25 bp, Homo sapien
ctcgacagaatggagacgcctgagg

SEQ ID NO: 1035498 - DNA, 25 bp, Homo sapien
cgacagaatggagacgcctgaggac

SEQ ID NO: 1035499 - DNA, 25 bp, Homo sapien
gctgctgggcctctgtctggaactg

SEQ ID NO: 1035500 - DNA, 25 bp, Homo sapien
ctctgtctggaactgctggcgggca

SEQ ID NO: 1035501 - DNA, 25 bp, Homo sapien
ctgtctggaactgctggcgggcact

SEQ ID NO: 1035502 - DNA, 25 bp, Homo sapien
tctggaactgctggcgggcactgct

SEQ ID NO: 1035503 - DNA, 25 bp, Homo sapien
gggcgtctgctcgtggcactgggtg

SEQ ID NO: 1035504 - DNA, 25 bp, Homo sapien
aggaggggcgtctgctcgtggcact

SEQ ID NO: 1035505 - DNA, 25 bp, Homo sapien
gcgtctgctcgtggcactgggtgag

SEQ ID NO: 1035506 - DNA, 25 bp, Homo sapien
tctgctcgtggcactgggtgaggcg

SEQ ID NO: 1035507 - DNA, 25 bp, Homo sapien
ataagctgccaaaatctggatgatc

SEQ ID NO: 1035508 - DNA, 25 bp, Homo sapien
ctataagctgccaaaatctggatga

SEQ ID NO: 1035509 - DNA, 25 bp, Homo sapien
tataagctgccaaaatctggatgat

SEQ ID NO: 1035510 - DNA, 25 bp, Homo sapien
gtacatatgaaggtctgttacagga

SEQ ID NO: 1035511 - DNA, 25 bp, Homo sapien
cacacggtaattctcacttcactca

SEQ ID NO: 1035512 - DNA, 25 bp, Homo sapien
gccactcgcgcaaaaagcagttctt

SEQ ID NO: 1035513 - DNA, 25 bp, Homo sapien
gaagtctgcaaaacattacagaagg

SEQ ID NO: 1035514 - DNA, 25 bp, Homo sapien
caagcgttaagtgtcaatggtcaaa

SEQ ID NO: 1035515 - DNA, 25 bp, Homo sapien
tgatcacaagtaagaaaagtggcca

SEQ ID NO: 1035516 - DNA, 25 bp, Homo sapien
caagctgacttgcaaggcggcagat

SEQ ID NO: 1035517 - DNA, 25 bp, Homo sapien
tcctaaaggtgccagagtaaatcat

SEQ ID NO: 1035518 - DNA, 25 bp, Homo sapien
catacggattaattacgacaggaaa

SEQ ID NO: 1035519 - DNA, 25 bp, Homo sapien
tgtactaggagtaaccagacgtggg

SEQ ID NO: 1035520 - DNA, 25 bp, Homo sapien
caggccacataacaaatctggtgtt

SEQ ID NO: 1035521 - DNA, 25 bp, Homo sapien
tgttacctgaagctagaacctccat

SEQ ID NO: 1035522 - DNA, 25 bp, Homo sapien
ttataagggactgacaaaatagccc

SEQ ID NO: 1035523 - DNA, 25 bp, Homo sapien
gaaagcctgttaggatccctgtaca

SEQ ID NO: 1035524 - DNA, 25 bp, Homo sapien
catttcagggacctaagaagggctg

SEQ ID NO: 1035525 - DNA, 25 bp, Homo sapien
taagcattggaagggacatcacagg

SEQ ID NO: 1035526 - DNA, 25 bp, Homo sapien
gaaatggtcactgtaggaatcccaa

SEQ ID NO: 1035527 - DNA, 25 bp, Homo sapien
tgtaggaatcccaattacttgctcc

SEQ ID NO: 1035528 - DNA, 25 bp, Homo sapien
ccaattacttgctccaccagaggct

SEQ ID NO: 1035529 - DNA, 25 bp, Homo sapien
tctttgcaggtttcaatggtgaaat

SEQ ID NO: 1035530 - DNA, 25 bp, Homo sapien
tttcctctattccaactcggtcgaa

SEQ ID NO: 1035531 - DNA, 25 bp, Homo sapien
tattccaactcggtcgaaacactcg

SEQ ID NO: 1035532 - DNA, 25 bp, Homo sapien
aacactcgatgaggtagttcagcat

SEQ ID NO: 1035533 - DNA, 25 bp, Homo sapien
tcggtcgaaacactcgatgaggtag

SEQ ID NO: 1035534 - DNA, 25 bp, Homo sapien
cactgtgagcggatgttgctcagaa

SEQ ID NO: 1035535 - DNA, 25 bp, Homo sapien
tgttagggagccttgtagtactaaa

SEQ ID NO: 1035536 - DNA, 25 bp, Homo sapien
gtactaaagcagtatgggatatgca

SEQ ID NO: 1035537 - DNA, 25 bp, Homo sapien
gatatgcactgtgagcggatgttgc

SEQ ID NO: 1035538 - DNA, 25 bp, Homo sapien
gagattcctacacagcatatacggc

SEQ ID NO: 1035539 - DNA, 25 bp, Homo sapien
gaatgaagccatatgggagattcct

SEQ ID NO: 1035540 - DNA, 25 bp, Homo sapien
tgagtggttctcaccagttcctgaa

SEQ ID NO: 1035541 - DNA, 25 bp, Homo sapien
catatacggcactaggaaggacggc

SEQ ID NO: 1035542 - DNA, 25 bp, Homo sapien
gaaaccttcaagactacgtacacag

SEQ ID NO: 1035543 - DNA, 25 bp, Homo sapien
ggatcctggctgcttcttttacaaa

SEQ ID NO: 1035544 - DNA, 25 bp, Homo sapien
gagagttcacttacccttctagaga

SEQ ID NO: 1035545 - DNA, 25 bp, Homo sapien
cacctggctttacacaatgagatac

SEQ ID NO: 1035546 - DNA, 25 bp, Homo sapien
gaataaagtaggctcaatatacccc

SEQ ID NO: 1035547 - DNA, 25 bp, Homo sapien
gaactactcgattcctcaaatggta

SEQ ID NO: 1035548 - DNA, 25 bp, Homo sapien
taaaaaatgcaggacttctctgtcc

SEQ ID NO: 1035549 - DNA, 25 bp, Homo sapien
tggtcactgggctgattttatatag

SEQ ID NO: 1035550 - DNA, 25 bp, Homo sapien
ggtgaactctaatactctgacagga

SEQ ID NO: 1035551 - DNA, 25 bp, Homo sapien
aacccatacatttggagcctgttga

SEQ ID NO: 1035552 - DNA, 25 bp, Homo sapien
aactctccaggagtcgttgctctac

SEQ ID NO: 1035553 - DNA, 25 bp, Homo sapien
tcagccagagtgttgacctgttctt

SEQ ID NO: 1035554 - DNA, 25 bp, Homo sapien
cagaaatataagtttaagagaatct

SEQ ID NO: 1035555 - DNA, 25 bp, Homo sapien
ttaagagaatctaagagtgggaagt

SEQ ID NO: 1035556 - DNA, 25 bp, Homo sapien
gagaatctaagagtgggaagtatgt

SEQ ID NO: 1035557 - DNA, 25 bp, Homo sapien
atctaagagtgggaagtatgtcaaa

SEQ ID NO: 1035558 - DNA, 25 bp, Homo sapien
gagggagcactctttggcagcaaga

SEQ ID NO: 1035559 - DNA, 25 bp, Homo sapien
taaagtagtcactgtcgagggagca

SEQ ID NO: 1035560 - DNA, 25 bp, Homo sapien
catgagggggtatttaaagtagtca

SEQ ID NO: 1035561 - DNA, 25 bp, Homo sapien
caagagccaggccttgtaaaatggg

SEQ ID NO: 1035562 - DNA, 25 bp, Homo sapien
ctatggtatgctcattgctaggaga

SEQ ID NO: 1035563 - DNA, 25 bp, Homo sapien
gatgtaccaggctgctaactgtctt

SEQ ID NO: 1035564 - DNA, 25 bp, Homo sapien
tctgcatggccaacacagtgatttc

SEQ ID NO: 1035565 - DNA, 25 bp, Homo sapien
gaaaacaaggttgatctcatggacc

SEQ ID NO: 1035566 - DNA, 25 bp, Homo sapien
gattccaacgtatggcacagcagga

SEQ ID NO: 1035567 - DNA, 25 bp, Homo sapien
tagtgcaggagttcacaaacgtggc

SEQ ID NO: 1035568 - DNA, 25 bp, Homo sapien
tctagaagttgctacatgagccgaa

SEQ ID NO: 1035569 - DNA, 25 bp, Homo sapien
gaaggaagcgttctcactgcctagt

SEQ ID NO: 1035570 - DNA, 25 bp, Homo sapien
cagggtgtgtcttcccaaacttggt

SEQ ID NO: 1035571 - DNA, 25 bp, Homo sapien
tggtttcacagagctcacctagtgc

SEQ ID NO: 1035572 - DNA, 25 bp, Homo sapien
acagggtgtgtcttcccaaacttgg

SEQ ID NO: 1035573 - DNA, 25 bp, Homo sapien
cagccaggacttaaggatttcggca

SEQ ID NO: 1035574 - DNA, 25 bp, Homo sapien
ccctaagtaagagagtctctgcagc

SEQ ID NO: 1035575 - DNA, 25 bp, Homo sapien
tcggcaaccacaaccgcaaagaagc

SEQ ID NO: 1035576 - DNA, 25 bp, Homo sapien
gaaagcccctaagtaagagagtctc

SEQ ID NO: 1035577 - DNA, 25 bp, Homo sapien
ccacacgagtgttttccagggtaat

SEQ ID NO: 1035578 - DNA, 25 bp, Homo sapien
gattggctaaccacacgagtgtttt

SEQ ID NO: 1035579 - DNA, 25 bp, Homo sapien
ccagggtaatggcaggccctgagaa

SEQ ID NO: 1035580 - DNA, 25 bp, Homo sapien
tctaagtaatgctgcaatgattggc

SEQ ID NO: 1035581 - DNA, 25 bp, Homo sapien
tttcgccatttaacaaaatactatg

SEQ ID NO: 1035582 - DNA, 25 bp, Homo sapien
cagccgccatgtaactgagagcagc

SEQ ID NO: 1035583 - DNA, 25 bp, Homo sapien
tcttcatattggcattgacgacagc

SEQ ID NO: 1035584 - DNA, 25 bp, Homo sapien
tgagagcagcctcacgggtttcgcc

SEQ ID NO: 1035585 - DNA, 25 bp, Homo sapien
ataaatccatctgtagacaccaatc

SEQ ID NO: 1035586 - DNA, 25 bp, Homo sapien
taaatccatctgtagacaccaatct

SEQ ID NO: 1035587 - DNA, 25 bp, Homo sapien
cataaatccatctgtagacaccaat

SEQ ID NO: 1035588 - DNA, 25 bp, Homo sapien
ttcacacgcgtctcatcattgggaa

SEQ ID NO: 1035589 - DNA, 25 bp, Homo sapien
cacatcttccatcgttgcattcaca

SEQ ID NO: 1035590 - DNA, 25 bp, Homo sapien
taatccgacatcttgggtgaaaaat

SEQ ID NO: 1035591 - DNA, 25 bp, Homo sapien
tcattgggaagagtaatccgacatc

SEQ ID NO: 1035592 - DNA, 25 bp, Homo sapien
gggcagtgttttaatgaccgagtca

SEQ ID NO: 1035593 - DNA, 25 bp, Homo sapien
tatggtgaggtggtaacaatctgtg

SEQ ID NO: 1035594 - DNA, 25 bp, Homo sapien
gaccgagtcacgaacacagtactca

SEQ ID NO: 1035595 - DNA, 25 bp, Homo sapien
gaggaactactagcacacagacaag

SEQ ID NO: 1035596 - DNA, 25 bp, Homo sapien
attgagctcccggatagcccggagt

SEQ ID NO: 1035597 - DNA, 25 bp, Homo sapien
gaatttcggctcagaaaatggaggc

SEQ ID NO: 1035598 - DNA, 25 bp, Homo sapien
tagcccggagtctgcggatatagcg

SEQ ID NO: 1035599 - DNA, 25 bp, Homo sapien
tagcgacggcaactaggcagaatag

SEQ ID NO: 1035600 - DNA, 25 bp, Homo sapien
tgattatacctaccagagaccctga

SEQ ID NO: 1035601 - DNA, 25 bp, Homo sapien
taccggattggctcatgaccccaaa

SEQ ID NO: 1035602 - DNA, 25 bp, Homo sapien
tattatgcaaccaactagttgaccc

SEQ ID NO: 1035603 - DNA, 25 bp, Homo sapien
gtgacctatactgaatgaagctgag

SEQ ID NO: 1035604 - DNA, 25 bp, Homo sapien
tgtaagacctagttttcaccaagat

SEQ ID NO: 1035605 - DNA, 25 bp, Homo sapien
tagaggctgctaaatctccaaaagc

SEQ ID NO: 1035606 - DNA, 25 bp, Homo sapien
aaaggctattttactaacggcatcg

SEQ ID NO: 1035607 - DNA, 25 bp, Homo sapien
aatggatggcactacagatttggtg

SEQ ID NO: 1035608 - DNA, 25 bp, Homo sapien
agttttacagcgcttcagcatttcg

SEQ ID NO: 1035609 - DNA, 25 bp, Homo sapien
gcttcagcatttcgcggtgtctagt

SEQ ID NO: 1035610 - DNA, 25 bp, Homo sapien
catttcgcggtgtctagttgccagt

SEQ ID NO: 1035611 - DNA, 25 bp, Homo sapien
cttaagctgagttttacagcgcttc

SEQ ID NO: 1035612 - DNA, 25 bp, Homo sapien
tatgaggctggtctataattattcc

SEQ ID NO: 1035613 - DNA, 25 bp, Homo sapien
taatcacagcagaagcatatctatc

SEQ ID NO: 1035614 - DNA, 25 bp, Homo sapien
gccaagggaggtgatgttaaactga

SEQ ID NO: 1035615 - DNA, 25 bp, Homo sapien
ggacactaaactgctcactcaaggc

SEQ ID NO: 1035616 - DNA, 25 bp, Homo sapien
gcagagatttcagtcgtgtgccacc

SEQ ID NO: 1035617 - DNA, 25 bp, Homo sapien
tggcagagatttcagtcgtgtgcca

SEQ ID NO: 1035618 - DNA, 25 bp, Homo sapien
ggcagagatttcagtcgtgtgccac

SEQ ID NO: 1035619 - DNA, 25 bp, Homo sapien
ctctcgtcaagtaggccagcatcag

SEQ ID NO: 1035620 - DNA, 25 bp, Homo sapien
ctcaggaagctctcgtcaagtaggc

SEQ ID NO: 1035621 - DNA, 25 bp, Homo sapien
agcacaggccttgcaccgtaccagt

SEQ ID NO: 1035622 - DNA, 25 bp, Homo sapien
cacaggccttgcaccgtaccagttt

SEQ ID NO: 1035623 - DNA, 25 bp, Homo sapien
taattacagggaaaacacctatcaa

SEQ ID NO: 1035624 - DNA, 25 bp, Homo sapien
taggagggcctaatattatctccag

SEQ ID NO: 1035625 - DNA, 25 bp, Homo sapien
aaataacaggtgttgacatttgcct

SEQ ID NO: 1035626 - DNA, 25 bp, Homo sapien
cctggacccagtgcttaggagggcc

SEQ ID NO: 1035627 - DNA, 25 bp, Homo sapien
caggcaacgctgcaaataccttggg

SEQ ID NO: 1035628 - DNA, 25 bp, Homo sapien
caacatcttctacataaaactcagg

SEQ ID NO: 1035629 - DNA, 25 bp, Homo sapien
tacataaaactcaggcaacgctgca

SEQ ID NO: 1035630 - DNA, 25 bp, Homo sapien
aaactcaggcaacgctgcaaatacc

SEQ ID NO: 1035631 - DNA, 25 bp, Homo sapien
aaacttctgggttcgtggctgaaca

SEQ ID NO: 1035632 - DNA, 25 bp, Homo sapien
gaacagcagggttggtcataaacat

SEQ ID NO: 1035633 - DNA, 25 bp, Homo sapien
tcatcagggaaggtaccaacaactt

SEQ ID NO: 1035634 - DNA, 25 bp, Homo sapien
tgagtacagggctcataaagcgcct

SEQ ID NO: 1035635 - DNA, 25 bp, Homo sapien
ctgggatgacaggcgccgcccgcca

SEQ ID NO: 1035636 - DNA, 25 bp, Homo sapien
ctcggcctcctgagtagctgggatg

SEQ ID NO: 1035637 - DNA, 25 bp, Homo sapien
tcctaggttcactcgattctcgtgc

SEQ ID NO: 1035638 - DNA, 25 bp, Homo sapien
gcccgccacacccagctaatttttg

SEQ ID NO: 1035639 - DNA, 25 bp, Homo sapien
ccacatgcactctttgtagttggct

SEQ ID NO: 1035640 - DNA, 25 bp, Homo sapien
gaaacaagggacttaggaccttgca

SEQ ID NO: 1035641 - DNA, 25 bp, Homo sapien
gctggaacgcagcagcaagatcata

SEQ ID NO: 1035642 - DNA, 25 bp, Homo sapien
gattattagctggagtcaccgtgcc

SEQ ID NO: 1035643 - DNA, 25 bp, Homo sapien
tggcgaggctcatctcgatctcttg

SEQ ID NO: 1035644 - DNA, 25 bp, Homo sapien
ttggcgaggctcatctcgatctctt

SEQ ID NO: 1035645 - DNA, 25 bp, Homo sapien
gttggcgaggctcatctcgatctct

SEQ ID NO: 1035646 - DNA, 25 bp, Homo sapien
atctgccttagactccagagaagct

SEQ ID NO: 1035647 - DNA, 25 bp, Homo sapien
attttggccagactaagcctccaac

SEQ ID NO: 1035648 - DNA, 25 bp, Homo sapien
aaataatgctgtggagaacatcact

SEQ ID NO: 1035649 - DNA, 25 bp, Homo sapien
tcagctgttgtctcgtagctccaaa

SEQ ID NO: 1035650 - DNA, 25 bp, Homo sapien
aatttatatctgagggtcccatctg

SEQ ID NO: 1035651 - DNA, 25 bp, Homo sapien
taaagggcatctgcgaggttgctgc

SEQ ID NO: 1035652 - DNA, 25 bp, Homo sapien
tcagggaccaggacctaatcagcca

SEQ ID NO: 1035653 - DNA, 25 bp, Homo sapien
aatcagccaggtcttcacatggagg

SEQ ID NO: 1035654 - DNA, 25 bp, Homo sapien
gaacttgtcataaaactcactggtg

SEQ ID NO: 1035655 - DNA, 25 bp, Homo sapien
ctcactggtggctccggtatgctca

SEQ ID NO: 1035656 - DNA, 25 bp, Homo sapien
gccatggtgagctatgttttgccaa

SEQ ID NO: 1035657 - DNA, 25 bp, Homo sapien
tatgatagcgaattgtgaacttgtc

SEQ ID NO: 1035658 - DNA, 25 bp, Homo sapien
aaggcaattatattgtacatggtca

SEQ ID NO: 1035659 - DNA, 25 bp, Homo sapien
atattgtacatggtcatacatctcc

SEQ ID NO: 1035660 - DNA, 25 bp, Homo sapien
tggaaaggcaattatattgtacatg

SEQ ID NO: 1035661 - DNA, 25 bp, Homo sapien
gcaattatattgtacatggtcatac

SEQ ID NO: 1035662 - DNA, 25 bp, Homo sapien
cacttcatggattcgcttcagagac

SEQ ID NO: 1035663 - DNA, 25 bp, Homo sapien
ttcatcgagcaaaaacgtcgtgtcg

SEQ ID NO: 1035664 - DNA, 25 bp, Homo sapien
cgtcgtgtcgtttatcaacatgttt

SEQ ID NO: 1035665 - DNA, 25 bp, Homo sapien
tatagcgaacaaactgcttcccgga

SEQ ID NO: 1035666 - DNA, 25 bp, Homo sapien
catcctcgagcaggggccatggtaa

SEQ ID NO: 1035667 - DNA, 25 bp, Homo sapien
ctgcattgttccaatgttagtatac

SEQ ID NO: 1035668 - DNA, 25 bp, Homo sapien
aaaggatggaatgctttatgaattt

SEQ ID NO: 1035669 - DNA, 25 bp, Homo sapien
gcattgttccaatgttagtatacgt

SEQ ID NO: 1035670 - DNA, 25 bp, Homo sapien
taataagagctgtttgactcatgga

SEQ ID NO: 1035671 - DNA, 25 bp, Homo sapien
gctgtttgactcatggatacaatca

SEQ ID NO: 1035672 - DNA, 25 bp, Homo sapien
tgactcatggatacaatcaggtact

SEQ ID NO: 1035673 - DNA, 25 bp, Homo sapien
taagagctgtttgactcatggatac

SEQ ID NO: 1035674 - DNA, 25 bp, Homo sapien
ctctggcgcactttcctccttcaac

SEQ ID NO: 1035675 - DNA, 25 bp, Homo sapien
tttcctccttcaactctgccatggg

SEQ ID NO: 1035676 - DNA, 25 bp, Homo sapien
actttcctccttcaactctgccatg

SEQ ID NO: 1035677 - DNA, 25 bp, Homo sapien
ctggcgcactttcctccttcaactc

SEQ ID NO: 1035678 - DNA, 25 bp, Homo sapien
gtgcccggccctctattattattgt

SEQ ID NO: 1035679 - DNA, 25 bp, Homo sapien
cgtgcccggccctctattattattg

SEQ ID NO: 1035680 - DNA, 25 bp, Homo sapien
accgtgcccggccctctattattat

SEQ ID NO: 1035681 - DNA, 25 bp, Homo sapien
gcccggccctctattattattgtta

SEQ ID NO: 1035682 - DNA, 25 bp, Homo sapien
cctgcttcgtgaggatgtggaacat

SEQ ID NO: 1035683 - DNA, 25 bp, Homo sapien
catgtccacggtttcggtggccagg

SEQ ID NO: 1035684 - DNA, 25 bp, Homo sapien
aagctgagactgacgagcctgctgc

SEQ ID NO: 1035685 - DNA, 25 bp, Homo sapien
taagagcgggacacacgctcatcct

SEQ ID NO: 1035686 - DNA, 25 bp, Homo sapien
gatctgagctagtcagtaaagaagg

SEQ ID NO: 1035687 - DNA, 25 bp, Homo sapien
cataacaggacagagttggtcattc

SEQ ID NO: 1035688 - DNA, 25 bp, Homo sapien
tacagtgtacagatggctcaggtct

SEQ ID NO: 1035689 - DNA, 25 bp, Homo sapien
tcaggtctatgagcaggccttaaaa

SEQ ID NO: 1035690 - DNA, 25 bp, Homo sapien
caattcatgctgttgagacaagtga

SEQ ID NO: 1035691 - DNA, 25 bp, Homo sapien
cacaggataataggacaattcatgc

SEQ ID NO: 1035692 - DNA, 25 bp, Homo sapien
aaaagttttgagtcagctcttccag

SEQ ID NO: 1035693 - DNA, 25 bp, Homo sapien
tacaggtgctgtgtatcataagctg

SEQ ID NO: 1035694 - DNA, 25 bp, Homo sapien
caactttcaggtcacggcacttggg

SEQ ID NO: 1035695 - DNA, 25 bp, Homo sapien
aagtaaatatccgtcagttggtcca

SEQ ID NO: 1035696 - DNA, 25 bp, Homo sapien
tcagcaatggctttcgcgaaccgag

SEQ ID NO: 1035697 - DNA, 25 bp, Homo sapien
gaaccgagcacagtccagctgtaag

SEQ ID NO: 1035698 - DNA, 25 bp, Homo sapien
gatcacgcagggacagcttagccta

SEQ ID NO: 1035699 - DNA, 25 bp, Homo sapien
gactgaggatatgggttcaaggcca

SEQ ID NO: 1035700 - DNA, 25 bp, Homo sapien
tatgggatgactagaagatcacgca

SEQ ID NO: 1035701 - DNA, 25 bp, Homo sapien
tcacaggagacccacggaataaagg

SEQ ID NO: 1035702 - DNA, 25 bp, Homo sapien
aacctagatggcgtggcctacacca

SEQ ID NO: 1035703 - DNA, 25 bp, Homo sapien
tcatgtgtcgctctgagaaatgtct

SEQ ID NO: 1035704 - DNA, 25 bp, Homo sapien
gggactgtactgaatcctgtcggca

SEQ ID NO: 1035705 - DNA, 25 bp, Homo sapien
ccacgtcgaggctctatggtatagc

SEQ ID NO: 1035706 - DNA, 25 bp, Homo sapien
ggtgtggaccccacctcaatgggta

SEQ ID NO: 1035707 - DNA, 25 bp, Homo sapien
gaccccacctcaatgggtaagtgct

SEQ ID NO: 1035708 - DNA, 25 bp, Homo sapien
gtttctaaatcagtgcagtattata

SEQ ID NO: 1035709 - DNA, 25 bp, Homo sapien
caatgggtaagtgcttcccttttct

SEQ ID NO: 1035710 - DNA, 25 bp, Homo sapien
tgtccatggaactggcgtctgccca

SEQ ID NO: 1035711 - DNA, 25 bp, Homo sapien
tctgcccataaagacacagtctagg

SEQ ID NO: 1035712 - DNA, 25 bp, Homo sapien
ttcatggacgacagatatgcagtct

SEQ ID NO: 1035713 - DNA, 25 bp, Homo sapien
caggaccaatgtggtatcccacttc

SEQ ID NO: 1035714 - DNA, 25 bp, Homo sapien
tctgcgcgtgcgttcttggccacta

SEQ ID NO: 1035715 - DNA, 25 bp, Homo sapien
tcatcaggagcgtcgctgtagtcga

SEQ ID NO: 1035716 - DNA, 25 bp, Homo sapien
cactttctcggcgagcagcttaaat

SEQ ID NO: 1035717 - DNA, 25 bp, Homo sapien
ggatttgatccctgccttccgcatc

SEQ ID NO: 1035718 - DNA, 25 bp, Homo sapien
caaaagaaatcagcatgaaaacgac

SEQ ID NO: 1035719 - DNA, 25 bp, Homo sapien
tcaaaagaaatcagcatgaaaacga

SEQ ID NO: 1035720 - DNA, 25 bp, Homo sapien
ttctttgtcttaggacttctgggaa

SEQ ID NO: 1035721 - DNA, 25 bp, Homo sapien
gaaaatgtgaatccccacttgcaaa

SEQ ID NO: 1035722 - DNA, 25 bp, Homo sapien
tgaaaatgtgaatccccacttgcaa

SEQ ID NO: 1035723 - DNA, 25 bp, Homo sapien
tgtcttaggacttctgggaattctt

SEQ ID NO: 1035724 - DNA, 25 bp, Homo sapien
tgagcaggtgccgcaggatgatgga

SEQ ID NO: 1035725 - DNA, 25 bp, Homo sapien
tgatggagcggtccatgatggtgcc

SEQ ID NO: 1035726 - DNA, 25 bp, Homo sapien
gggtctgtcatgagggtgtccatca

SEQ ID NO: 1035727 - DNA, 25 bp, Homo sapien
tccagcatgctctctgtcagcgtct

SEQ ID NO: 1035728 - DNA, 25 bp, Homo sapien
tatctcttggtactgacgccagcgc

SEQ ID NO: 1035729 - DNA, 25 bp, Homo sapien
aaaaaggaggattaatgccccagat

SEQ ID NO: 1035730 - DNA, 25 bp, Homo sapien
cctcattgagccgaagactccagaa

SEQ ID NO: 1035731 - DNA, 25 bp, Homo sapien
tgggtctttgctacagagtgtcata

SEQ ID NO: 1035732 - DNA, 25 bp, Homo sapien
tcatccacgcctgaatctgctcttt

SEQ ID NO: 1035733 - DNA, 25 bp, Homo sapien
tgtttctctctcatccacgcctgaa

SEQ ID NO: 1035734 - DNA, 25 bp, Homo sapien
tctcatccacgcctgaatctgctct

SEQ ID NO: 1035735 - DNA, 25 bp, Homo sapien
ttagtgatcgctgttctgtttctct

SEQ ID NO: 1035736 - DNA, 25 bp, Homo sapien
tagcagagggtgggcggcggaacgg

SEQ ID NO: 1035737 - DNA, 25 bp, Homo sapien
agcagagggtgggcggcggaacggt

SEQ ID NO: 1035738 - DNA, 25 bp, Homo sapien
ctagcagagggtgggcggcggaacg

SEQ ID NO: 1035739 - DNA, 25 bp, Homo sapien
cttctgcttgcctcgttggccttgg

SEQ ID NO: 1035740 - DNA, 25 bp, Homo sapien
gcgtttgctcgctctgggtgggcct

SEQ ID NO: 1035741 - DNA, 25 bp, Homo sapien
tgcttgcctcgttggccttggctgt

SEQ ID NO: 1035742 - DNA, 25 bp, Homo sapien
tggcctccaacacatgaacggcagc

SEQ ID NO: 1035743 - DNA, 25 bp, Homo sapien
ttagcagcaaaatgtccaaggttct

SEQ ID NO: 1035744 - DNA, 25 bp, Homo sapien
aatccacagcagtgcaagtagggtc

SEQ ID NO: 1035745 - DNA, 25 bp, Homo sapien
cccaggattaacacttggtagcagg

SEQ ID NO: 1035746 - DNA, 25 bp, Homo sapien
tgccccaaactgtgacatacgaagg

SEQ ID NO: 1035747 - DNA, 25 bp, Homo sapien
ttttattaatcatgtcatctaacac

SEQ ID NO: 1035748 - DNA, 25 bp, Homo sapien
tcttgccttttttattaatcatgtc

SEQ ID NO: 1035749 - DNA, 25 bp, Homo sapien
aatatcttgccttttttattaatca

SEQ ID NO: 1035750 - DNA, 25 bp, Homo sapien
ccttttttattaatcatgtcatcta

SEQ ID NO: 1035751 - DNA, 25 bp, Homo sapien
tgttgaaaccggcagacatactccc

SEQ ID NO: 1035752 - DNA, 25 bp, Homo sapien
gctgctcctcagatgccgaagagag

SEQ ID NO: 1035753 - DNA, 25 bp, Homo sapien
tcttatacttgtgtgcgcgtgtggc

SEQ ID NO: 1035754 - DNA, 25 bp, Homo sapien
cgaagagaggcttatcacaaggacc

SEQ ID NO: 1035755 - DNA, 25 bp, Homo sapien
taaattgttgccagaggaggaacgt

SEQ ID NO: 1035756 - DNA, 25 bp, Homo sapien
ccaagcctaggctgtaaaagggcaa

SEQ ID NO: 1035757 - DNA, 25 bp, Homo sapien
tctcacgggaaggaaataaggcatc

SEQ ID NO: 1035758 - DNA, 25 bp, Homo sapien
tctcacagagtgacgttgacctccc

SEQ ID NO: 1035759 - DNA, 25 bp, Homo sapien
gcttggtgaacaattcctgggctgt

SEQ ID NO: 1035760 - DNA, 25 bp, Homo sapien
gaacaaggaactggtgacatatgcc

SEQ ID NO: 1035761 - DNA, 25 bp, Homo sapien
gacatatgcctggttggatctcaga

SEQ ID NO: 1035762 - DNA, 25 bp, Homo sapien
gaatggttttcccatgcctgtccca

SEQ ID NO: 1035763 - DNA, 25 bp, Homo sapien
cgctatctcggttccctgtaagctt

SEQ ID NO: 1035764 - DNA, 25 bp, Homo sapien
taccgaattgtacatctatgtttca

SEQ ID NO: 1035765 - DNA, 25 bp, Homo sapien
catataataatttaccgaattgtac

SEQ ID NO: 1035766 - DNA, 25 bp, Homo sapien
tatctcggttccctgtaagcttcgc

SEQ ID NO: 1035767 - DNA, 25 bp, Homo sapien
cctcgcgaaactccgcccgcagtcg

SEQ ID NO: 1035768 - DNA, 25 bp, Homo sapien
ccgcttcggccctcgcgaaactccg

SEQ ID NO: 1035769 - DNA, 25 bp, Homo sapien
tcgccggcgcgggacaccgccccga

SEQ ID NO: 1035770 - DNA, 25 bp, Homo sapien
cccgagctgggcctctgcgcgtcac

SEQ ID NO: 1035771 - DNA, 25 bp, Homo sapien
ggaggacggggagctgctccgacgc

SEQ ID NO: 1035772 - DNA, 25 bp, Homo sapien
gacgcgcgcgggcgcctcccaggac

SEQ ID NO: 1035773 - DNA, 25 bp, Homo sapien
cctcccaggaccgctgccgtcacac

SEQ ID NO: 1035774 - DNA, 25 bp, Homo sapien
acggggagctgctccgacgcgcgcg

SEQ ID NO: 1035775 - DNA, 25 bp, Homo sapien
cacgcagcagcccggcaccgcatcg

SEQ ID NO: 1035776 - DNA, 25 bp, Homo sapien
gcagcggccgccgcgagccgcaggg

SEQ ID NO: 1035777 - DNA, 25 bp, Homo sapien
cgccgcgagccgcagggcgccgctc

SEQ ID NO: 1035778 - DNA, 25 bp, Homo sapien
tcagcgcgagcagcggccgccgcga

SEQ ID NO: 1035779 - DNA, 25 bp, Homo sapien
ggccgccgcgagccgcagggcgccg

SEQ ID NO: 1035780 - DNA, 25 bp, Homo sapien
agccgcggcgcgcgggggcgcgggg

SEQ ID NO: 1035781 - DNA, 25 bp, Homo sapien
gcgcggggggccgggcaccgacgca

SEQ ID NO: 1035782 - DNA, 25 bp, Homo sapien
aggagccgcggcgcgcgggggcgcg

SEQ ID NO: 1035783 - DNA, 25 bp, Homo sapien
tcaacaggagccgcggcgcgcgggg

SEQ ID NO: 1035784 - DNA, 25 bp, Homo sapien
ctcagccgcgctgcagaccgacggg

SEQ ID NO: 1035785 - DNA, 25 bp, Homo sapien
agccgcgctgcagaccgacgggcgg

SEQ ID NO: 1035786 - DNA, 25 bp, Homo sapien
gcgctgcagaccgacgggcggaccg

SEQ ID NO: 1035787 - DNA, 25 bp, Homo sapien
gctgcagaccgacgggcggaccggg

SEQ ID NO: 1035788 - DNA, 25 bp, Homo sapien
ccccgggctgcaacgtgcgcggagc

SEQ ID NO: 1035789 - DNA, 25 bp, Homo sapien
gcctggcagcgcgggggaaacggag

SEQ ID NO: 1035790 - DNA, 25 bp, Homo sapien
ggagggccggtgcagggcactgcgg

SEQ ID NO: 1035791 - DNA, 25 bp, Homo sapien
gccccagccgaccgctggacgccgg

SEQ ID NO: 1035792 - DNA, 25 bp, Homo sapien
gaagctccattctggcgttaggggc

SEQ ID NO: 1035793 - DNA, 25 bp, Homo sapien
tggaagctcatttagcaatcaagga

SEQ ID NO: 1035794 - DNA, 25 bp, Homo sapien
gaagctcatttagcaatcaaggaaa

SEQ ID NO: 1035795 - DNA, 25 bp, Homo sapien
cttggaagctcatttagcaatcaag

SEQ ID NO: 1035796 - DNA, 25 bp, Homo sapien
atttacatagtcattgacatctgcc

SEQ ID NO: 1035797 - DNA, 25 bp, Homo sapien
tttacatagtcattgacatctgcca

SEQ ID NO: 1035798 - DNA, 25 bp, Homo sapien
catagtcattgacatctgccaagat

SEQ ID NO: 1035799 - DNA, 25 bp, Homo sapien
tacatagtcattgacatctgccaag

SEQ ID NO: 1035800 - DNA, 25 bp, Homo sapien
ctcagatatgccactgactcatggc

SEQ ID NO: 1035801 - DNA, 25 bp, Homo sapien
tagaggaatagtttccctcccaaca

SEQ ID NO: 1035802 - DNA, 25 bp, Homo sapien
cttcaaagatccctcagatatgcca

SEQ ID NO: 1035803 - DNA, 25 bp, Homo sapien
gaggaatagtttccctcccaacaga

SEQ ID NO: 1035804 - DNA, 25 bp, Homo sapien
tcttttgaagttacagccaagtttc

SEQ ID NO: 1035805 - DNA, 25 bp, Homo sapien
cttcttttgaagttacagccaagtt

SEQ ID NO: 1035806 - DNA, 25 bp, Homo sapien
ccaccttcactgaggctcccgacat

SEQ ID NO: 1035807 - DNA, 25 bp, Homo sapien
agccaccttcactgaggctcccgac

SEQ ID NO: 1035808 - DNA, 25 bp, Homo sapien
acagccaccttcactgaggctcccg

SEQ ID NO: 1035809 - DNA, 25 bp, Homo sapien
ccggacagccaccttcactgaggct

SEQ ID NO: 1035810 - DNA, 25 bp, Homo sapien
ttgccttgcatctgaatgatgcatt

SEQ ID NO: 1035811 - DNA, 25 bp, Homo sapien
tctctcgagaattgaagggccttac

SEQ ID NO: 1035812 - DNA, 25 bp, Homo sapien
gcatttggattccttgctggtctct

SEQ ID NO: 1035813 - DNA, 25 bp, Homo sapien
gatgcatttggattccttgctggtc

SEQ ID NO: 1035814 - DNA, 25 bp, Homo sapien
tatcccaaccaagattgggcactgg

SEQ ID NO: 1035815 - DNA, 25 bp, Homo sapien
cgctgtgcggcatttggtttagaaa

SEQ ID NO: 1035816 - DNA, 25 bp, Homo sapien
tgtatgcgtgaatgaaaaagcctat

SEQ ID NO: 1035817 - DNA, 25 bp, Homo sapien
tatttgtatcagttacgctgtgcgg

SEQ ID NO: 1035818 - DNA, 25 bp, Homo sapien
tccagcctaaatgcattactttcta

SEQ ID NO: 1035819 - DNA, 25 bp, Homo sapien
gtccagcctaaatgcattactttct

SEQ ID NO: 1035820 - DNA, 25 bp, Homo sapien
acatggaatcagcacgtaggctttg

SEQ ID NO: 1035821 - DNA, 25 bp, Homo sapien
tttgtctaggacaagtcgccacttt

SEQ ID NO: 1035822 - DNA, 25 bp, Homo sapien
tgtctaggacaagtcgccacttttc

SEQ ID NO: 1035823 - DNA, 25 bp, Homo sapien
cagcacgtaggctttgtctaggaca

SEQ ID NO: 1035824 - DNA, 25 bp, Homo sapien
taggaatagtcgaagctgaaggact

SEQ ID NO: 1035825 - DNA, 25 bp, Homo sapien
gctgaaggactttggagcttccttt

SEQ ID NO: 1035826 - DNA, 25 bp, Homo sapien
tgaggtatgagaccagtaggaatag

SEQ ID NO: 1035827 - DNA, 25 bp, Homo sapien
cagtaggaatagtcgaagctgaagg

SEQ ID NO: 1035828 - DNA, 25 bp, Homo sapien
gcgtgtaagagcatttccttgccaa

SEQ ID NO: 1035829 - DNA, 25 bp, Homo sapien
cagacattatatccctcaaaggcgt

SEQ ID NO: 1035830 - DNA, 25 bp, Homo sapien
tgtacacacggttttgagatgcaaa

SEQ ID NO: 1035831 - DNA, 25 bp, Homo sapien
gccaatgtcattgtacacacggttt

SEQ ID NO: 1035832 - DNA, 25 bp, Homo sapien
ctctacagagtaagacatttcttca

SEQ ID NO: 1035833 - DNA, 25 bp, Homo sapien
ttggcaagggcacaatgggtgctta

SEQ ID NO: 1035834 - DNA, 25 bp, Homo sapien
tgggtgcttacaccctcctagtgtg

SEQ ID NO: 1035835 - DNA, 25 bp, Homo sapien
tacaccctcctagtgtgactgaaaa

SEQ ID NO: 1035836 - DNA, 25 bp, Homo sapien
catttggcaattcaaatgtattatt

SEQ ID NO: 1035837 - DNA, 25 bp, Homo sapien
tgaatcagaaagacattgtgaaccc

SEQ ID NO: 1035838 - DNA, 25 bp, Homo sapien
aaacacaggatggataattactttc

SEQ ID NO: 1035839 - DNA, 25 bp, Homo sapien
ggtatgagccccaaaacagcttctt

SEQ ID NO: 1035840 - DNA, 25 bp, Homo sapien
gacttcatgaaagagccagggtaaa

SEQ ID NO: 1035841 - DNA, 25 bp, Homo sapien
caagaagtgggtgttcacgcacacg

SEQ ID NO: 1035842 - DNA, 25 bp, Homo sapien
cgcacacgcaaattacccttgtttt

SEQ ID NO: 1035843 - DNA, 25 bp, Homo sapien
gcaaatctcgtactctttcacagta

SEQ ID NO: 1035844 - DNA, 25 bp, Homo sapien
ggaagtaactgccaacttggacaga

SEQ ID NO: 1035845 - DNA, 25 bp, Homo sapien
gaatcaattactaccacagccgcat

SEQ ID NO: 1035846 - DNA, 25 bp, Homo sapien
tactgccttatttgtgagcccatca

SEQ ID NO: 1035847 - DNA, 25 bp, Homo sapien
gaagatacttaacactctgaagccc

SEQ ID NO: 1035848 - DNA, 25 bp, Homo sapien
tgagagttgaaatggacagcaggct

SEQ ID NO: 1035849 - DNA, 25 bp, Homo sapien
ggaacggctacttgtttcattcatg

SEQ ID NO: 1035850 - DNA, 25 bp, Homo sapien
gtctcattatcgtgtttcttctggg

SEQ ID NO: 1035851 - DNA, 25 bp, Homo sapien
aaacaatcgtaaacacagcgtggga

SEQ ID NO: 1035852 - DNA, 25 bp, Homo sapien
ggaaaggttggtctcattatcgtgt

SEQ ID NO: 1035853 - DNA, 25 bp, Homo sapien
aatgaattaccaggaaagctatgat

SEQ ID NO: 1035854 - DNA, 25 bp, Homo sapien
tgtagattcgacatcatgggagaag

SEQ ID NO: 1035855 - DNA, 25 bp, Homo sapien
ttaattttgtagattcgacatcatg

SEQ ID NO: 1035856 - DNA, 25 bp, Homo sapien
gaaagctatgattatgggattaaca

SEQ ID NO: 1035857 - DNA, 25 bp, Homo sapien
gttcacttcctgctagatccaccaa

SEQ ID NO: 1035858 - DNA, 25 bp, Homo sapien
ctttggcaccagttgaatcagctcg

SEQ ID NO: 1035859 - DNA, 25 bp, Homo sapien
ctttaatcgagtccctttggcacca

SEQ ID NO: 1035860 - DNA, 25 bp, Homo sapien
gatccaccaagctgattttactgac

SEQ ID NO: 1035861 - DNA, 25 bp, Homo sapien
taagagacttattaatatttgctcc

SEQ ID NO: 1035862 - DNA, 25 bp, Homo sapien
tgtaagagacttattaatatttgct

SEQ ID NO: 1035863 - DNA, 25 bp, Homo sapien
agagacttattaatatttgctcctt

SEQ ID NO: 1035864 - DNA, 25 bp, Homo sapien
gttgtaagagacttattaatatttg

SEQ ID NO: 1035865 - DNA, 25 bp, Homo sapien
tgtgttatacctagtatcttatctg

SEQ ID NO: 1035866 - DNA, 25 bp, Homo sapien
actgtgttatacctagtatcttatc

SEQ ID NO: 1035867 - DNA, 25 bp, Homo sapien
tgttatacctagtatcttatctgaa

SEQ ID NO: 1035868 - DNA, 25 bp, Homo sapien
gtcaaactgtgttatacctagtatc

SEQ ID NO: 1035869 - DNA, 25 bp, Homo sapien
tgctctagtttttacagatctatat

SEQ ID NO: 1035870 - DNA, 25 bp, Homo sapien
ctctagtttttacagatctatattt

SEQ ID NO: 1035871 - DNA, 25 bp, Homo sapien
gctctagtttttacagatctatatt

SEQ ID NO: 1035872 - DNA, 25 bp, Homo sapien
aacccgtgaatagttgggacactat

SEQ ID NO: 1035873 - DNA, 25 bp, Homo sapien
gcctttcagtcattcagattagtgg

SEQ ID NO: 1035874 - DNA, 25 bp, Homo sapien
cacagacctcaagggagaattaagc

SEQ ID NO: 1035875 - DNA, 25 bp, Homo sapien
gaaagtcatttccaatagcaggttc

SEQ ID NO: 1035876 - DNA, 25 bp, Homo sapien
cacaggaccattatcacacttacca

SEQ ID NO: 1035877 - DNA, 25 bp, Homo sapien
taccatacccaacgtgcagcttcaa

SEQ ID NO: 1035878 - DNA, 25 bp, Homo sapien
cagttgagagagcagtataatgagc

SEQ ID NO: 1035879 - DNA, 25 bp, Homo sapien
gacccattttgaagtcagttgcgga

SEQ ID NO: 1035880 - DNA, 25 bp, Homo sapien
aaggagccaagtaagtacagaatcc

SEQ ID NO: 1035881 - DNA, 25 bp, Homo sapien
tttctcgaaggagccaagtaagtac

SEQ ID NO: 1035882 - DNA, 25 bp, Homo sapien
tcgaaggagccaagtaagtacagaa

SEQ ID NO: 1035883 - DNA, 25 bp, Homo sapien
aattttctcgaaggagccaagtaag

SEQ ID NO: 1035884 - DNA, 25 bp, Homo sapien
ctcagagtgctcaaagtctcatcgt

SEQ ID NO: 1035885 - DNA, 25 bp, Homo sapien
tcagagcagcaaccattgcagtccg

SEQ ID NO: 1035886 - DNA, 25 bp, Homo sapien
tcatcgtagttgatatccgcggggc

SEQ ID NO: 1035887 - DNA, 25 bp, Homo sapien
aaccattgcagtccgagaattgcca

SEQ ID NO: 1035888 - DNA, 25 bp, Homo sapien
taatttgttttgcacgatctgcata

SEQ ID NO: 1035889 - DNA, 25 bp, Homo sapien
attcacgaaccagtttggcattggg

SEQ ID NO: 1035890 - DNA, 25 bp, Homo sapien
ccctgagcacgaagaaggtccttca

SEQ ID NO: 1035891 - DNA, 25 bp, Homo sapien
tcctcattgataacagcattgcatt

SEQ ID NO: 1035892 - DNA, 25 bp, Homo sapien
taagaacgctgaataagaaccctga

SEQ ID NO: 1035893 - DNA, 25 bp, Homo sapien
ttactgccacgacactaatccagag

SEQ ID NO: 1035894 - DNA, 25 bp, Homo sapien
gaatctagagatcatttccattggg

SEQ ID NO: 1035895 - DNA, 25 bp, Homo sapien
taatccagagcaacccatgaaacaa

SEQ ID NO: 1035896 - DNA, 25 bp, Homo sapien
gagaacttctgaataagccactgga

SEQ ID NO: 1035897 - DNA, 25 bp, Homo sapien
aatacgagaagggtcaaagttcagg

SEQ ID NO: 1035898 - DNA, 25 bp, Homo sapien
cactggataggcacatcacggagat

SEQ ID NO: 1035899 - DNA, 25 bp, Homo sapien
caaacggtattcatctaaactcgga

SEQ ID NO: 1035900 - DNA, 25 bp, Homo sapien
gagtaatcatcgatcaatggatcaa

SEQ ID NO: 1035901 - DNA, 25 bp, Homo sapien
cagagtaatcatcgatcaatggatc

SEQ ID NO: 1035902 - DNA, 25 bp, Homo sapien
ccagagtaatcatcgatcaatggat

SEQ ID NO: 1035903 - DNA, 25 bp, Homo sapien
ttccagagtaatcatcgatcaatgg

SEQ ID NO: 1035904 - DNA, 25 bp, Homo sapien
gtctttcaggaaatgccgcagctgc

SEQ ID NO: 1035905 - DNA, 25 bp, Homo sapien
gagctgttgcagtccaagagtcact

SEQ ID NO: 1035906 - DNA, 25 bp, Homo sapien
taggtccaatggtcacatgcaagcc

SEQ ID NO: 1035907 - DNA, 25 bp, Homo sapien
tagcctaacagtacaaccatgggtc

SEQ ID NO: 1035908 - DNA, 25 bp, Homo sapien
atggccagggcgttgattctcagag

SEQ ID NO: 1035909 - DNA, 25 bp, Homo sapien
attctcagaggctagcaagtatcta

SEQ ID NO: 1035910 - DNA, 25 bp, Homo sapien
ctgtggaaaaatggccagggcgttg

SEQ ID NO: 1035911 - DNA, 25 bp, Homo sapien
gattctcagaggctagcaagtatct

SEQ ID NO: 1035912 - DNA, 25 bp, Homo sapien
ctccaggtgtagacatgatcctctc

SEQ ID NO: 1035913 - DNA, 25 bp, Homo sapien
ggtgtagacatgatcctctcttgaa

SEQ ID NO: 1035914 - DNA, 25 bp, Homo sapien
atactggtcacagacgtcaagccca

SEQ ID NO: 1035915 - DNA, 25 bp, Homo sapien
cacctgactactgagtgagcaggaa

SEQ ID NO: 1035916 - DNA, 25 bp, Homo sapien
tccatatgctgagtcgaaatcttag

SEQ ID NO: 1035917 - DNA, 25 bp, Homo sapien
tgccagcctatgaactgcccatgca

SEQ ID NO: 1035918 - DNA, 25 bp, Homo sapien
taatctgttactctgccttgccagc

SEQ ID NO: 1035919 - DNA, 25 bp, Homo sapien
ccttgtggagctacatagaatacct

SEQ ID NO: 1035920 - DNA, 25 bp, Homo sapien
cggcccacactgtacttttgaagta

SEQ ID NO: 1035921 - DNA, 25 bp, Homo sapien
caaagcagatgatgctgtcacagtc

SEQ ID NO: 1035922 - DNA, 25 bp, Homo sapien
tctctatcgtccttgcatgaatggc

SEQ ID NO: 1035923 - DNA, 25 bp, Homo sapien
taccctagcactcttgaacacaatg

SEQ ID NO: 1035924 - DNA, 25 bp, Homo sapien
tgccctggcgctacggatgaaagat

SEQ ID NO: 1035925 - DNA, 25 bp, Homo sapien
tgcaaagcaacatggtcactgacgc

SEQ ID NO: 1035926 - DNA, 25 bp, Homo sapien
caggtctgcccgaaagaaattctca

SEQ ID NO: 1035927 - DNA, 25 bp, Homo sapien
cacttggcagttagggagaaatttc

SEQ ID NO: 1035928 - DNA, 25 bp, Homo sapien
cctctgttttacgaagcttctcttc

SEQ ID NO: 1035929 - DNA, 25 bp, Homo sapien
ttcccaagtttcattcaactcagca

SEQ ID NO: 1035930 - DNA, 25 bp, Homo sapien
attcaactcagcaatgatcttctct

SEQ ID NO: 1035931 - DNA, 25 bp, Homo sapien
cattctgatggcctctgttttacga

SEQ ID NO: 1035932 - DNA, 25 bp, Homo sapien
ccatcttcccgaatggcaactccca

SEQ ID NO: 1035933 - DNA, 25 bp, Homo sapien
gcaactcccatctcagccaacaaag

SEQ ID NO: 1035934 - DNA, 25 bp, Homo sapien
ctagggttcctccatcttcccgaat

SEQ ID NO: 1035935 - DNA, 25 bp, Homo sapien
tggcaactcccatctcagccaacaa

SEQ ID NO: 1035936 - DNA, 25 bp, Homo sapien
caaaaagtgtctctgtctgattagg

SEQ ID NO: 1035937 - DNA, 25 bp, Homo sapien
gaccatgctctaagatgaaatcaga

SEQ ID NO: 1035938 - DNA, 25 bp, Homo sapien
ggctgcctttgtactataagaccat

SEQ ID NO: 1035939 - DNA, 25 bp, Homo sapien
gaagtgccccagtaacaaagacaaa

SEQ ID NO: 1035940 - DNA, 25 bp, Homo sapien
tacagatgatcaatttggagcaggg

SEQ ID NO: 1035941 - DNA, 25 bp, Homo sapien
acagatgatcaatttggagcagggc

SEQ ID NO: 1035942 - DNA, 25 bp, Homo sapien
gcactcagacattagtgggtcttca

SEQ ID NO: 1035943 - DNA, 25 bp, Homo sapien
ggtcttcattgaggttaacaagatg

SEQ ID NO: 1035944 - DNA, 25 bp, Homo sapien
cattagtgggtcttcattgaggtta

SEQ ID NO: 1035945 - DNA, 25 bp, Homo sapien
cttgtaattccatctttgatgtaat

SEQ ID NO: 1035946 - DNA, 25 bp, Homo sapien
ctcactccggaagatacaatgctct

SEQ ID NO: 1035947 - DNA, 25 bp, Homo sapien
gccccgctcagcactatgtcctggc

SEQ ID NO: 1035948 - DNA, 25 bp, Homo sapien
cgctgttgcttctctcactccggaa

SEQ ID NO: 1035949 - DNA, 25 bp, Homo sapien
agcactatgtcctggcgccgctcag

SEQ ID NO: 1035950 - DNA, 25 bp, Homo sapien
caccctcttgccatttacgtaggtt

SEQ ID NO: 1035951 - DNA, 25 bp, Homo sapien
tgccatttacgtaggtttctgagcg

SEQ ID NO: 1035952 - DNA, 25 bp, Homo sapien
tacgtaggtttctgagcgctcacag

SEQ ID NO: 1035953 - DNA, 25 bp, Homo sapien
tgagcgctcacagggctctaaggtc

SEQ ID NO: 1035954 - DNA, 25 bp, Homo sapien
gaagctccctctgggcaaatgtcca

SEQ ID NO: 1035955 - DNA, 25 bp, Homo sapien
gtcttctctcgctcagctcgtgctt

SEQ ID NO: 1035956 - DNA, 25 bp, Homo sapien
ggctcagagggggtctcagcagaag

SEQ ID NO: 1035957 - DNA, 25 bp, Homo sapien
gagtcttctctcgctcagctcgtgc

SEQ ID NO: 1035958 - DNA, 25 bp, Homo sapien
ttgtataagatctccatttcctgta

SEQ ID NO: 1035959 - DNA, 25 bp, Homo sapien
cctttttgtataagatctccatttc

SEQ ID NO: 1035960 - DNA, 25 bp, Homo sapien
ctcctttttgtataagatctccatt

SEQ ID NO: 1035961 - DNA, 25 bp, Homo sapien
ttttgtataagatctccatttcctg

SEQ ID NO: 1035962 - DNA, 25 bp, Homo sapien
cagggaaagtatgggaacaagctgc

SEQ ID NO: 1035963 - DNA, 25 bp, Homo sapien
agggaaagtatgggaacaagctgcc

SEQ ID NO: 1035964 - DNA, 25 bp, Homo sapien
agaagcaatttgggtgagtactgct

SEQ ID NO: 1035965 - DNA, 25 bp, Homo sapien
tgagacagaagcaatttgggtgagt

SEQ ID NO: 1035966 - DNA, 25 bp, Homo sapien
tcattgagacagaagcaatttgggt

SEQ ID NO: 1035967 - DNA, 25 bp, Homo sapien
gacagaagcaatttgggtgagtact

SEQ ID NO: 1035968 - DNA, 25 bp, Homo sapien
caggctaaggctaccgggagattta

SEQ ID NO: 1035969 - DNA, 25 bp, Homo sapien
tcattctccattaaggaaattaaag

SEQ ID NO: 1035970 - DNA, 25 bp, Homo sapien
ttttcaggctaaggctaccgggaga

SEQ ID NO: 1035971 - DNA, 25 bp, Homo sapien
ctccattaaggaaattaaagaatag

SEQ ID NO: 1035972 - DNA, 25 bp, Homo sapien
catatgcataagtaaacaaagaggg

SEQ ID NO: 1035973 - DNA, 25 bp, Homo sapien
cagaccatcagaggcatgttattag

SEQ ID NO: 1035974 - DNA, 25 bp, Homo sapien
taatagagcttaattacacctgtcc

SEQ ID NO: 1035975 - DNA, 25 bp, Homo sapien
taaattgatggatgttaacgctctc

SEQ ID NO: 1035976 - DNA, 25 bp, Homo sapien
caatggtttgcaacttgctgggagg

SEQ ID NO: 1035977 - DNA, 25 bp, Homo sapien
tgtcagaatcgtccccgctatcaga

SEQ ID NO: 1035978 - DNA, 25 bp, Homo sapien
cactgcttgggaggccacatttttt

SEQ ID NO: 1035979 - DNA, 25 bp, Homo sapien
cagagaagtaatcagtttccagctc

SEQ ID NO: 1035980 - DNA, 25 bp, Homo sapien
ttggaatctttactcaagcgccttc

SEQ ID NO: 1035981 - DNA, 25 bp, Homo sapien
aattttaagatctgagattgtgacc

SEQ ID NO: 1035982 - DNA, 25 bp, Homo sapien
gccttctttggggtatctgatacat

SEQ ID NO: 1035983 - DNA, 25 bp, Homo sapien
ctgagattgtgacccacttggaatc

SEQ ID NO: 1035984 - DNA, 25 bp, Homo sapien
aatctcctgccgactgtgcctgaag

SEQ ID NO: 1035985 - DNA, 25 bp, Homo sapien
tatgatgatatgtgtcccaggactc

SEQ ID NO: 1035986 - DNA, 25 bp, Homo sapien
cctatgaggtacattctgccgacga

SEQ ID NO: 1035987 - DNA, 25 bp, Homo sapien
gaatttgctcttgcctcatccagcg

SEQ ID NO: 1035988 - DNA, 25 bp, Homo sapien
cgcggaggtgtcacaaactggctac

SEQ ID NO: 1035989 - DNA, 25 bp, Homo sapien
ctgtctcctcatccgcggaggtgtc

SEQ ID NO: 1035990 - DNA, 25 bp, Homo sapien
actggctacagtggctgggtttgtc

SEQ ID NO: 1035991 - DNA, 25 bp, Homo sapien
agctttgagattgggtgctgagaac

SEQ ID NO: 1035992 - DNA, 25 bp, Homo sapien
taataagaactcaaggccaaaggta

SEQ ID NO: 1035993 - DNA, 25 bp, Homo sapien
gctgtagtttttcacaccgtttgga

SEQ ID NO: 1035994 - DNA, 25 bp, Homo sapien
gcatagtgcccacacgcaaaggaaa

SEQ ID NO: 1035995 - DNA, 25 bp, Homo sapien
aacatgaagtcaggcaatttcggac

SEQ ID NO: 1035996 - DNA, 25 bp, Homo sapien
tcctgatgcaagtttgtggtttcct

SEQ ID NO: 1035997 - DNA, 25 bp, Homo sapien
tgggttcacccgtcctgatgcaagt

SEQ ID NO: 1035998 - DNA, 25 bp, Homo sapien
tgccaaacttacacccaactggcat

SEQ ID NO: 1035999 - DNA, 25 bp, Homo sapien
cctgggctgggttcacccgtcctga

SEQ ID NO: 1036000 - DNA, 25 bp, Homo sapien
gaatgaaaatatatggacctaccct

SEQ ID NO: 1036001 - DNA, 25 bp, Homo sapien
cacctgggattaacagatgaagcac

SEQ ID NO: 1036002 - DNA, 25 bp, Homo sapien
taatatgggccataccaagagctca

SEQ ID NO: 1036003 - DNA, 25 bp, Homo sapien
tttgcactgtgcctaagacggcccc

SEQ ID NO: 1036004 - DNA, 25 bp, Homo sapien
cagagatcgggtttcaacctgcttc

SEQ ID NO: 1036005 - DNA, 25 bp, Homo sapien
ctgcagccagagatcgggtttcaac

SEQ ID NO: 1036006 - DNA, 25 bp, Homo sapien
gcagccagagatcgggtttcaacct

SEQ ID NO: 1036007 - DNA, 25 bp, Homo sapien
gccagagatcgggtttcaacctgct

SEQ ID NO: 1036008 - DNA, 25 bp, Homo sapien
tcttcttcctcctcttcagttgttt

SEQ ID NO: 1036009 - DNA, 25 bp, Homo sapien
taagtcccgtaatgaagtaaactga

SEQ ID NO: 1036010 - DNA, 25 bp, Homo sapien
cccagagtaagtcccgtaatgaagt

SEQ ID NO: 1036011 - DNA, 25 bp, Homo sapien
ggtacacggcattgccccagagtaa

SEQ ID NO: 1036012 - DNA, 25 bp, Homo sapien
ggcattggcctcctttaggtacacg

SEQ ID NO: 1036013 - DNA, 25 bp, Homo sapien
gacgatacaatcatacccaatggga

SEQ ID NO: 1036014 - DNA, 25 bp, Homo sapien
gacaaatggttttcagcaagcaagc

SEQ ID NO: 1036015 - DNA, 25 bp, Homo sapien
ccaatgggaaagaggtcgaatgtgc

SEQ ID NO: 1036016 - DNA, 25 bp, Homo sapien
aaaatatggccacctgttagcagtc

SEQ ID NO: 1036017 - DNA, 25 bp, Homo sapien
accactgtgcgagggaaaggcctgt

SEQ ID NO: 1036018 - DNA, 25 bp, Homo sapien
tacagtgtgtcagtcagcagaacaa

SEQ ID NO: 1036019 - DNA, 25 bp, Homo sapien
caaatcctggacttctactgctacc

SEQ ID NO: 1036020 - DNA, 25 bp, Homo sapien
caaagaccaatagtgtgttgctcca

SEQ ID NO: 1036021 - DNA, 25 bp, Homo sapien
aaaacaaccagcctttatgaatgtt

SEQ ID NO: 1036022 - DNA, 25 bp, Homo sapien
caaccagcctttatgaatgttttca

SEQ ID NO: 1036023 - DNA, 25 bp, Homo sapien
aataaaacaaccagcctttatgaat

SEQ ID NO: 1036024 - DNA, 25 bp, Homo sapien
aacaaccagcctttatgaatgtttt

SEQ ID NO: 1036025 - DNA, 25 bp, Homo sapien
ttgaaccagtggaaccgatcataga

SEQ ID NO: 1036026 - DNA, 25 bp, Homo sapien
cagtcacagtggtttcgctttcgtc

SEQ ID NO: 1036027 - DNA, 25 bp, Homo sapien
tcatagaagggatcgctgccagtca

SEQ ID NO: 1036028 - DNA, 25 bp, Homo sapien
cgctttcgtcttgggcactggaggc

SEQ ID NO: 1036029 - DNA, 25 bp, Homo sapien
gcgtcatccacgaatgcctcatcat

SEQ ID NO: 1036030 - DNA, 25 bp, Homo sapien
tccatctcatcttgctgctcgtcag

SEQ ID NO: 1036031 - DNA, 25 bp, Homo sapien
gggtcatgcccgtcactgaagagat

SEQ ID NO: 1036032 - DNA, 25 bp, Homo sapien
tcagccagctcagtgatgtcggaat

SEQ ID NO: 1036033 - DNA, 25 bp, Homo sapien
tatccaaaattgtgcaagcagggag

SEQ ID NO: 1036034 - DNA, 25 bp, Homo sapien
agacaggcatccgttttaggtaaag

SEQ ID NO: 1036035 - DNA, 25 bp, Homo sapien
ccaaagatccgtagataggctcagt

SEQ ID NO: 1036036 - DNA, 25 bp, Homo sapien
tgaacccactacgtttgactcttag

SEQ ID NO: 1036037 - DNA, 25 bp, Homo sapien
aaatgtagtcaagggcaaaaatgga

SEQ ID NO: 1036038 - DNA, 25 bp, Homo sapien
caatcttgtgaatcacaaaaacagg

SEQ ID NO: 1036039 - DNA, 25 bp, Homo sapien
tgccaataggagaaatccaatcttg

SEQ ID NO: 1036040 - DNA, 25 bp, Homo sapien
tacaagtgatttatattggcaatta

SEQ ID NO: 1036041 - DNA, 25 bp, Homo sapien
taattctatggcagggacatcagct

SEQ ID NO: 1036042 - DNA, 25 bp, Homo sapien
caagtgtgggagcattgaaggccat

SEQ ID NO: 1036043 - DNA, 25 bp, Homo sapien
tactttgacctagcagactgaagga

SEQ ID NO: 1036044 - DNA, 25 bp, Homo sapien
tgttaccagaatatagcccttagct

SEQ ID NO: 1036045 - DNA, 25 bp, Homo sapien
caaacaaaaccaagtgacatacatg

SEQ ID NO: 1036046 - DNA, 25 bp, Homo sapien
tatgctgatcttcgaacataagaca

SEQ ID NO: 1036047 - DNA, 25 bp, Homo sapien
taaaaactggtggtcacaaagctag

SEQ ID NO: 1036048 - DNA, 25 bp, Homo sapien
aagctagagtgttcattccaattag

SEQ ID NO: 1036049 - DNA, 25 bp, Homo sapien
ctgcgatggcctgtacagccacacg

SEQ ID NO: 1036050 - DNA, 25 bp, Homo sapien
cagaaatccccgcacttcacctttc

SEQ ID NO: 1036051 - DNA, 25 bp, Homo sapien
ggcctgtacagccacacgcagaaat

SEQ ID NO: 1036052 - DNA, 25 bp, Homo sapien
gcacgggatacagcagattgctcag

SEQ ID NO: 1036053 - DNA, 25 bp, Homo sapien
ttttagctgttcctgactgtcgaat

SEQ ID NO: 1036054 - DNA, 25 bp, Homo sapien
gctgttcctgactgtcgaattccag

SEQ ID NO: 1036055 - DNA, 25 bp, Homo sapien
tagctgttcctgactgtcgaattcc

SEQ ID NO: 1036056 - DNA, 25 bp, Homo sapien
ctgttcctgactgtcgaattccaga

SEQ ID NO: 1036057 - DNA, 25 bp, Homo sapien
tcctccaaggacagaccagaacgag

SEQ ID NO: 1036058 - DNA, 25 bp, Homo sapien
ggagtgatgacctcagaactctgac

SEQ ID NO: 1036059 - DNA, 25 bp, Homo sapien
ccaagtcattaattcgactgatttc

SEQ ID NO: 1036060 - DNA, 25 bp, Homo sapien
gaactctgaccctgtccttccacaa

SEQ ID NO: 1036061 - DNA, 25 bp, Homo sapien
gaagatatctgcatactctgggagg

SEQ ID NO: 1036062 - DNA, 25 bp, Homo sapien
tactctgggaggattccactggcct

SEQ ID NO: 1036063 - DNA, 25 bp, Homo sapien
ccagtttcaggtggttgccaatctc

SEQ ID NO: 1036064 - DNA, 25 bp, Homo sapien
gttactcggaaagtgaaggcactgc

SEQ ID NO: 1036065 - DNA, 25 bp, Homo sapien
taaaaagactcgtgaacaatgcatt

SEQ ID NO: 1036066 - DNA, 25 bp, Homo sapien
cttttccatattgcacagagggcat

SEQ ID NO: 1036067 - DNA, 25 bp, Homo sapien
tgaccctgatcacttagctatatgg

SEQ ID NO: 1036068 - DNA, 25 bp, Homo sapien
caagagcccaatgtggatcctacag

SEQ ID NO: 1036069 - DNA, 25 bp, Homo sapien
atgcttcatcatggcgatgcaaaaa

SEQ ID NO: 1036070 - DNA, 25 bp, Homo sapien
gaatgcttcatcatggcgatgcaaa

SEQ ID NO: 1036071 - DNA, 25 bp, Homo sapien
ttctgcacatgataaaaggccaggg

SEQ ID NO: 1036072 - DNA, 25 bp, Homo sapien
ttttgaggggctccgtggagaatgc

SEQ ID NO: 1036073 - DNA, 25 bp, Homo sapien
ctgtaacacagacaagaaggcttgc

SEQ ID NO: 1036074 - DNA, 25 bp, Homo sapien
gcagacgaacccacattcactaggc

SEQ ID NO: 1036075 - DNA, 25 bp, Homo sapien
tgtggatgacctcaccactctagcc

SEQ ID NO: 1036076 - DNA, 25 bp, Homo sapien
gcttgctgctcaggccgctgtggat

SEQ ID NO: 1036077 - DNA, 25 bp, Homo sapien
gacttcaaatacaataggcttggtt

SEQ ID NO: 1036078 - DNA, 25 bp, Homo sapien
gctgctgataatgcccaaagacttc

SEQ ID NO: 1036079 - DNA, 25 bp, Homo sapien
ccacaaatgattcagtgatctccac

SEQ ID NO: 1036080 - DNA, 25 bp, Homo sapien
gctgataatgcccaaagacttcaaa

SEQ ID NO: 1036081 - DNA, 25 bp, Homo sapien
ataccatcaaaaatgtttgcttatc

SEQ ID NO: 1036082 - DNA, 25 bp, Homo sapien
caataccatcaaaaatgtttgctta

SEQ ID NO: 1036083 - DNA, 25 bp, Homo sapien
aacaataccatcaaaaatgtttgct

SEQ ID NO: 1036084 - DNA, 25 bp, Homo sapien
accatcaaaaatgtttgcttatctg

SEQ ID NO: 1036085 - DNA, 25 bp, Homo sapien
acgtgcctatctcaagacattctat

SEQ ID NO: 1036086 - DNA, 25 bp, Homo sapien
tatgtatagcttctgaaagcaggga

SEQ ID NO: 1036087 - DNA, 25 bp, Homo sapien
caacattaacgtaaacagaactggc

SEQ ID NO: 1036088 - DNA, 25 bp, Homo sapien
tgacagtacagaaggcaacaacatt

SEQ ID NO: 1036089 - DNA, 25 bp, Homo sapien
gggtggagggaagaatcggcggcac

SEQ ID NO: 1036090 - DNA, 25 bp, Homo sapien
aagaatcggcggcacggctgaggcg

SEQ ID NO: 1036091 - DNA, 25 bp, Homo sapien
gaatcggcggcacggctgaggcgga

SEQ ID NO: 1036092 - DNA, 25 bp, Homo sapien
ggagggaagaatcggcggcacggct

SEQ ID NO: 1036093 - DNA, 25 bp, Homo sapien
taggaacagagtgattatcaaaatc

SEQ ID NO: 1036094 - DNA, 25 bp, Homo sapien
gaatttggcgaataggcaatgagga

SEQ ID NO: 1036095 - DNA, 25 bp, Homo sapien
gacagttatgggaagttacatgcaa

SEQ ID NO: 1036096 - DNA, 25 bp, Homo sapien
aaagaaatgcctagtcccctgacag

SEQ ID NO: 1036097 - DNA, 25 bp, Homo sapien
acatagccagacacgagaaaccgaa

SEQ ID NO: 1036098 - DNA, 25 bp, Homo sapien
aatcagctcaatctttctctcatgg

SEQ ID NO: 1036099 - DNA, 25 bp, Homo sapien
tggcaatagcggaggatgcaagcac

SEQ ID NO: 1036100 - DNA, 25 bp, Homo sapien
aaaaggcggcaatgggtcagcctca

SEQ ID NO: 1036101 - DNA, 25 bp, Homo sapien
gctgcttaacctctgggagtctgtc

SEQ ID NO: 1036102 - DNA, 25 bp, Homo sapien
ttaactgtactgatgctatgtgact

SEQ ID NO: 1036103 - DNA, 25 bp, Homo sapien
cctcatttataaactgtagacccta

SEQ ID NO: 1036104 - DNA, 25 bp, Homo sapien
tagcctactatcttgaaaagcaatc

SEQ ID NO: 1036105 - DNA, 25 bp, Homo sapien
agctcaagcaatctgtccgactcag

SEQ ID NO: 1036106 - DNA, 25 bp, Homo sapien
ctgagaccaaaggcgtgcaccaccg

SEQ ID NO: 1036107 - DNA, 25 bp, Homo sapien
aaatgctgggattacaggtgcgagc

SEQ ID NO: 1036108 - DNA, 25 bp, Homo sapien
ggattacaggtgcgagccaccatac

SEQ ID NO: 1036109 - DNA, 25 bp, Homo sapien
acccagagaaacaccaatataaact

SEQ ID NO: 1036110 - DNA, 25 bp, Homo sapien
gatttcaatgcaaaagacccagaga

SEQ ID NO: 1036111 - DNA, 25 bp, Homo sapien
tggtccaagactactcagcaaaaat

SEQ ID NO: 1036112 - DNA, 25 bp, Homo sapien
aagagtcagaggaaagatttcaatg

SEQ ID NO: 1036113 - DNA, 25 bp, Homo sapien
tcaaaccaaaccaggaggtcatact

SEQ ID NO: 1036114 - DNA, 25 bp, Homo sapien
tccagttcactgatctcaaaccaaa

SEQ ID NO: 1036115 - DNA, 25 bp, Homo sapien
caggaggtcatacttgctcatgctc

SEQ ID NO: 1036116 - DNA, 25 bp, Homo sapien
caaaccaggaggtcatacttgctca

SEQ ID NO: 1036117 - DNA, 25 bp, Homo sapien
tgtcccctggcaaggcaagcctgct

SEQ ID NO: 1036118 - DNA, 25 bp, Homo sapien
aatgtcccctggcaaggcaagcctg

SEQ ID NO: 1036119 - DNA, 25 bp, Homo sapien
cccctggcaaggcaagcctgctgtg

SEQ ID NO: 1036120 - DNA, 25 bp, Homo sapien
caaaaatgtcccctggcaaggcaag

SEQ ID NO: 1036121 - DNA, 25 bp, Homo sapien
taccaccagttcacgaacatctttc

SEQ ID NO: 1036122 - DNA, 25 bp, Homo sapien
catctttccaatggagctcgctccc

SEQ ID NO: 1036123 - DNA, 25 bp, Homo sapien
tcactgtgatccttcgctggatgcc

SEQ ID NO: 1036124 - DNA, 25 bp, Homo sapien
ccttctcatggataatggtcactgt

SEQ ID NO: 1036125 - DNA, 25 bp, Homo sapien
aacaggaatacagagtttcaaactc

SEQ ID NO: 1036126 - DNA, 25 bp, Homo sapien
ccctggtaactgagttagttagttg

SEQ ID NO: 1036127 - DNA, 25 bp, Homo sapien
taacatatcactaatgacagagcga

SEQ ID NO: 1036128 - DNA, 25 bp, Homo sapien
tgtgtttccgaatatggtcttctac

SEQ ID NO: 1036129 - DNA, 25 bp, Homo sapien
gagaacataatctcccttccaacga

SEQ ID NO: 1036130 - DNA, 25 bp, Homo sapien
gaattggccagtacccgtgactctg

SEQ ID NO: 1036131 - DNA, 25 bp, Homo sapien
cacccagcttatttgtagagagaca

SEQ ID NO: 1036132 - DNA, 25 bp, Homo sapien
tgctgccccagacaagagagaacat

SEQ ID NO: 1036133 - DNA, 25 bp, Homo sapien
caagttaacactagcggatgcagca

SEQ ID NO: 1036134 - DNA, 25 bp, Homo sapien
ggttccaactcctaccacctgtgag

SEQ ID NO: 1036135 - DNA, 25 bp, Homo sapien
tcagttccctcatatgtcaagcgag

SEQ ID NO: 1036136 - DNA, 25 bp, Homo sapien
gacgttaaggacttggcctccagtg

SEQ ID NO: 1036137 - DNA, 25 bp, Homo sapien
atccacctcaggcttattccgaata

SEQ ID NO: 1036138 - DNA, 25 bp, Homo sapien
tatttagggagaggatggcatcaac

SEQ ID NO: 1036139 - DNA, 25 bp, Homo sapien
cacctcaggcttattccgaatacga

SEQ ID NO: 1036140 - DNA, 25 bp, Homo sapien
tacttggcagaaataatatttaggg

SEQ ID NO: 1036141 - DNA, 25 bp, Homo sapien
ctaacggtgtaccaattaacgcctg

SEQ ID NO: 1036142 - DNA, 25 bp, Homo sapien
gcaagtgtggacttcttcacactgc

SEQ ID NO: 1036143 - DNA, 25 bp, Homo sapien
ggtgtaccaattaacgcctgcaagt

SEQ ID NO: 1036144 - DNA, 25 bp, Homo sapien
ccaattaacgcctgcaagtgtggac

SEQ ID NO: 1036145 - DNA, 25 bp, Homo sapien
ctaggaatatccttatcaagaaaga

SEQ ID NO: 1036146 - DNA, 25 bp, Homo sapien
taggaatatccttatcaagaaagag

SEQ ID NO: 1036147 - DNA, 25 bp, Homo sapien
aggaatatccttatcaagaaagagc

SEQ ID NO: 1036148 - DNA, 25 bp, Homo sapien
tacactggcaattcttgagaggtgg

SEQ ID NO: 1036149 - DNA, 25 bp, Homo sapien
gatttctcaagatgttctgaacagc

SEQ ID NO: 1036150 - DNA, 25 bp, Homo sapien
tagggttacaaacagggctgaatcc

SEQ ID NO: 1036151 - DNA, 25 bp, Homo sapien
tcctgtatgcctcctaaggtggtga

SEQ ID NO: 1036152 - DNA, 25 bp, Homo sapien
taatactgggtgacgacatccactg

SEQ ID NO: 1036153 - DNA, 25 bp, Homo sapien
ttctcagacccctatgacaagtgga

SEQ ID NO: 1036154 - DNA, 25 bp, Homo sapien
agatgccacttgagaactgactgta

SEQ ID NO: 1036155 - DNA, 25 bp, Homo sapien
tctgttagaatacccaccaaaggtg

SEQ ID NO: 1036156 - DNA, 25 bp, Homo sapien
gataagtgagtatggacagaaactg

SEQ ID NO: 1036157 - DNA, 25 bp, Homo sapien
taaattgttaacactagagccagac

SEQ ID NO: 1036158 - DNA, 25 bp, Homo sapien
caatcttcacatcacaagagggcta

SEQ ID NO: 1036159 - DNA, 25 bp, Homo sapien
gagggctaaacatcattcaatccag

SEQ ID NO: 1036160 - DNA, 25 bp, Homo sapien
tctaggtaggccgacaaggtcatgt

SEQ ID NO: 1036161 - DNA, 25 bp, Homo sapien
cacagcctcaaagcggtagaaggtc

SEQ ID NO: 1036162 - DNA, 25 bp, Homo sapien
catagggtgtcactcggttcagaag

SEQ ID NO: 1036163 - DNA, 25 bp, Homo sapien
gagttatgcagagagctatcccaca

SEQ ID NO: 1036164 - DNA, 25 bp, Homo sapien
agtgcaggcagagtactgtgactag

SEQ ID NO: 1036165 - DNA, 25 bp, Homo sapien
gtgcaggcagagtactgtgactaga

SEQ ID NO: 1036166 - DNA, 25 bp, Homo sapien
aagtgcaggcagagtactgtgacta

SEQ ID NO: 1036167 - DNA, 25 bp, Homo sapien
ggtgactttgagtagccgctgccaa

SEQ ID NO: 1036168 - DNA, 25 bp, Homo sapien
tgccaaagaggctacgcagagagcg

SEQ ID NO: 1036169 - DNA, 25 bp, Homo sapien
cgcagagagcgtggtggtgagatct

SEQ ID NO: 1036170 - DNA, 25 bp, Homo sapien
atctcgggagtagaagaccatgcac

SEQ ID NO: 1036171 - DNA, 25 bp, Homo sapien
tgtctgacattttgcataagctgag

SEQ ID NO: 1036172 - DNA, 25 bp, Homo sapien
ggactacctgtgtctgacattttgc

SEQ ID NO: 1036173 - DNA, 25 bp, Homo sapien
ttcgtaaatgccagtgactcgattc

SEQ ID NO: 1036174 - DNA, 25 bp, Homo sapien
cataagctgagttcgtaaatgccag

SEQ ID NO: 1036175 - DNA, 25 bp, Homo sapien
gggccgccagcctgctaagttctct

SEQ ID NO: 1036176 - DNA, 25 bp, Homo sapien
tcttctccccgcacatatgccactg

SEQ ID NO: 1036177 - DNA, 25 bp, Homo sapien
ccgcacatatgccactgacgtatct

SEQ ID NO: 1036178 - DNA, 25 bp, Homo sapien
tgccactgacgtatctaagattttt

SEQ ID NO: 1036179 - DNA, 25 bp, Homo sapien
atctgaacaaccctgcccctggata

SEQ ID NO: 1036180 - DNA, 25 bp, Homo sapien
tgcatctgaacaaccctgcccctgg

SEQ ID NO: 1036181 - DNA, 25 bp, Homo sapien
aatcttgtccgagagttcttgcatc

SEQ ID NO: 1036182 - DNA, 25 bp, Homo sapien
tttggcaatcttgtccgagagttct

SEQ ID NO: 1036183 - DNA, 25 bp, Homo sapien
acaaagctcgttaagacctcaggag

SEQ ID NO: 1036184 - DNA, 25 bp, Homo sapien
tactactgctatagcaaacacaaag

SEQ ID NO: 1036185 - DNA, 25 bp, Homo sapien
ctgagaagatcaatactactgctat

SEQ ID NO: 1036186 - DNA, 25 bp, Homo sapien
gcaaacacaaagctcgttaagacct

SEQ ID NO: 1036187 - DNA, 25 bp, Homo sapien
cagcagcaaaaagtggcgggttttt

SEQ ID NO: 1036188 - DNA, 25 bp, Homo sapien
gcagcagcaaaaagtggcgggtttt

SEQ ID NO: 1036189 - DNA, 25 bp, Homo sapien
ggggatgctgtcaccaagtctctca

SEQ ID NO: 1036190 - DNA, 25 bp, Homo sapien
ctgggggataacgagtcgctcaggg

SEQ ID NO: 1036191 - DNA, 25 bp, Homo sapien
gggatgctgtcaccaagtctctcac

SEQ ID NO: 1036192 - DNA, 25 bp, Homo sapien
gataacgagtcgctcagggatttgg

SEQ ID NO: 1036193 - DNA, 25 bp, Homo sapien
ggtgctgagggtcccactgctgagg

SEQ ID NO: 1036194 - DNA, 25 bp, Homo sapien
gagaggagatactggtggaggtgct

SEQ ID NO: 1036195 - DNA, 25 bp, Homo sapien
aggagatactggtggaggtgctgag

SEQ ID NO: 1036196 - DNA, 25 bp, Homo sapien
ctgagaggagatactggtggaggtg

SEQ ID NO: 1036197 - DNA, 25 bp, Homo sapien
caggctttcgatgtctcctgaatca

SEQ ID NO: 1036198 - DNA, 25 bp, Homo sapien
tgtgatggcgctttcaaaggtagtg

SEQ ID NO: 1036199 - DNA, 25 bp, Homo sapien
cactgctctcgctaggtgtgatggc

SEQ ID NO: 1036200 - DNA, 25 bp, Homo sapien
gaatcatagccactgctctcgctag

SEQ ID NO: 1036201 - DNA, 25 bp, Homo sapien
gaagagaaagagaagtgcaagctga

SEQ ID NO: 1036202 - DNA, 25 bp, Homo sapien
gagaaagagaagtgcaagctgaaca

SEQ ID NO: 1036203 - DNA, 25 bp, Homo sapien
aagaagagaaagagaagtgcaagct

SEQ ID NO: 1036204 - DNA, 25 bp, Homo sapien
agagaaagagaagtgcaagctgaac

SEQ ID NO: 1036205 - DNA, 25 bp, Homo sapien
aagtgtgggtgagaagttgcaggca

SEQ ID NO: 1036206 - DNA, 25 bp, Homo sapien
gtcactgacgctgccgtgcacctgg

SEQ ID NO: 1036207 - DNA, 25 bp, Homo sapien
cttacagtcactgacgctgccgtgc

SEQ ID NO: 1036208 - DNA, 25 bp, Homo sapien
gctgaattctctgttgaaagtgtgg

SEQ ID NO: 1036209 - DNA, 25 bp, Homo sapien
agccaccgcagccagccccccagtc

SEQ ID NO: 1036210 - DNA, 25 bp, Homo sapien
gagccaccgcagccagccccccagt

SEQ ID NO: 1036211 - DNA, 25 bp, Homo sapien
cgtccaattggagagatatcagaca

SEQ ID NO: 1036212 - DNA, 25 bp, Homo sapien
tctgatccagagagttgctcctaga

SEQ ID NO: 1036213 - DNA, 25 bp, Homo sapien
tgaaactggactcagagggatcccg

SEQ ID NO: 1036214 - DNA, 25 bp, Homo sapien
tcctagagtctaccagagagggaca

SEQ ID NO: 1036215 - DNA, 25 bp, Homo sapien
tccacagctgggacaatctgaaact

SEQ ID NO: 1036216 - DNA, 25 bp, Homo sapien
tcctgctcgggccaaatatggtgtt

SEQ ID NO: 1036217 - DNA, 25 bp, Homo sapien
tgagaaattcgttttttcctgctcg

SEQ ID NO: 1036218 - DNA, 25 bp, Homo sapien
caatatctggaacaagattgagaaa

SEQ ID NO: 1036219 - DNA, 25 bp, Homo sapien
gaaaataatcgtgctgaggaccatc

SEQ ID NO: 1036220 - DNA, 25 bp, Homo sapien
gatgcattatgagacccaactggag

SEQ ID NO: 1036221 - DNA, 25 bp, Homo sapien
taatacggcaaaagcgaaaccgtgc

SEQ ID NO: 1036222 - DNA, 25 bp, Homo sapien
gaaaccgtgccatggcaacatgctg

SEQ ID NO: 1036223 - DNA, 25 bp, Homo sapien
cgacggacgacaacaaaatgtttag

SEQ ID NO: 1036224 - DNA, 25 bp, Homo sapien
ccagttactgtaaagaggctccttg

SEQ ID NO: 1036225 - DNA, 25 bp, Homo sapien
atgaagacataaggccgacggacga

SEQ ID NO: 1036226 - DNA, 25 bp, Homo sapien
gacaggttaatgattccacgctcca

SEQ ID NO: 1036227 - DNA, 25 bp, Homo sapien
gaaggcatacaaccagtcgttcatg

SEQ ID NO: 1036228 - DNA, 25 bp, Homo sapien
cgtattgtgccagctagaagtgggt

SEQ ID NO: 1036229 - DNA, 25 bp, Homo sapien
atgtctttgtcattgagggcctgca

SEQ ID NO: 1036230 - DNA, 25 bp, Homo sapien
aggaccccacggtgctttgtgcaga

SEQ ID NO: 1036231 - DNA, 25 bp, Homo sapien
tatttcgactggctcgggcatctgc

SEQ ID NO: 1036232 - DNA, 25 bp, Homo sapien
ttagtatttcgactggctcgggcat

SEQ ID NO: 1036233 - DNA, 25 bp, Homo sapien
agtatttcgactggctcgggcatct

SEQ ID NO: 1036234 - DNA, 25 bp, Homo sapien
gctcgggcatctgcgggaaagcttt

SEQ ID NO: 1036235 - DNA, 25 bp, Homo sapien
ggagattcaccagatcccctcagag

SEQ ID NO: 1036236 - DNA, 25 bp, Homo sapien
ttatctctcgaaggcgagtgagggc

SEQ ID NO: 1036237 - DNA, 25 bp, Homo sapien
aagtgaaacactcccgccttgtgga

SEQ ID NO: 1036238 - DNA, 25 bp, Homo sapien
tgtttccacaccagatggagaggag

SEQ ID NO: 1036239 - DNA, 25 bp, Homo sapien
tgatgatctcggaagccagatgacc

SEQ ID NO: 1036240 - DNA, 25 bp, Homo sapien
tctctgatgatctcggaagccagat

SEQ ID NO: 1036241 - DNA, 25 bp, Homo sapien
tatcttctctgatgatctcggaagc

SEQ ID NO: 1036242 - DNA, 25 bp, Homo sapien
cagacttatcttctctgatgatctc

SEQ ID NO: 1036243 - DNA, 25 bp, Homo sapien
gaaagagtaccgatgagtgtgcaca

SEQ ID NO: 1036244 - DNA, 25 bp, Homo sapien
tactgtccattggaacccgagcggg

SEQ ID NO: 1036245 - DNA, 25 bp, Homo sapien
aaaaatccgccatagagtttccgcg

SEQ ID NO: 1036246 - DNA, 25 bp, Homo sapien
aagcccctggcctttgctgcgtgaa

SEQ ID NO: 1036247 - DNA, 25 bp, Homo sapien
ggtccctgctcagtccttcctgtaa

SEQ ID NO: 1036248 - DNA, 25 bp, Homo sapien
atccagtgttcccagatgtaaccac

SEQ ID NO: 1036249 - DNA, 25 bp, Homo sapien
ccatctcccatcgtcttattttttg

SEQ ID NO: 1036250 - DNA, 25 bp, Homo sapien
gacttcttacacctttcagttaaca

SEQ ID NO: 1036251 - DNA, 25 bp, Homo sapien
caagcaatcattccacgttagcttc

SEQ ID NO: 1036252 - DNA, 25 bp, Homo sapien
ctcaagcaatcattccacgttagct

SEQ ID NO: 1036253 - DNA, 25 bp, Homo sapien
tcattccacgttagcttccagagta

SEQ ID NO: 1036254 - DNA, 25 bp, Homo sapien
gcaatcattccacgttagcttccag

SEQ ID NO: 1036255 - DNA, 25 bp, Homo sapien
tgtaaagcaacataccagtaagggc

SEQ ID NO: 1036256 - DNA, 25 bp, Homo sapien
cctcccagggtggaatcctagtttg

SEQ ID NO: 1036257 - DNA, 25 bp, Homo sapien
catgttaaggttctaatcagcagta

SEQ ID NO: 1036258 - DNA, 25 bp, Homo sapien
gaaaactacagtaagctggcttggg

SEQ ID NO: 1036259 - DNA, 25 bp, Homo sapien
ggatttgggacctcagccttacagg

SEQ ID NO: 1036260 - DNA, 25 bp, Homo sapien
tttgtctgtggttaaggccttcctc

SEQ ID NO: 1036261 - DNA, 25 bp, Homo sapien
gcatgctgcaataatagatcctgtg

SEQ ID NO: 1036262 - DNA, 25 bp, Homo sapien
tccagagtccgccagaaagtagtca

SEQ ID NO: 1036263 - DNA, 25 bp, Homo sapien
gggaaaaaggccatgttgactgttg

SEQ ID NO: 1036264 - DNA, 25 bp, Homo sapien
tactgggcctatcatggattttcaa

SEQ ID NO: 1036265 - DNA, 25 bp, Homo sapien
ttaaagtctatgctgagttaaatgt

SEQ ID NO: 1036266 - DNA, 25 bp, Homo sapien
tcttgtgattcttgattgcatggta

SEQ ID NO: 1036267 - DNA, 25 bp, Homo sapien
taatccacttatagaaaacttccat

SEQ ID NO: 1036268 - DNA, 25 bp, Homo sapien
aagtacacatttggatgacctttaa

SEQ ID NO: 1036269 - DNA, 25 bp, Homo sapien
cccttgggcctatttgtagtcagtc

SEQ ID NO: 1036270 - DNA, 25 bp, Homo sapien
gagtggtattccattaatgcaattg

SEQ ID NO: 1036271 - DNA, 25 bp, Homo sapien
gagcgccgagcacctagatgacatt

SEQ ID NO: 1036272 - DNA, 25 bp, Homo sapien
ttacagtttaccaggcactcggacg

SEQ ID NO: 1036273 - DNA, 25 bp, Homo sapien
ttagaccatccgaggcaaacgtgcc

SEQ ID NO: 1036274 - DNA, 25 bp, Homo sapien
tgtagccatagcaactcacgcagga

SEQ ID NO: 1036275 - DNA, 25 bp, Homo sapien
aggaaagagtcagcaccgctcgacg

SEQ ID NO: 1036276 - DNA, 25 bp, Homo sapien
gctcgacgcgctgcaacccaggggt

SEQ ID NO: 1036277 - DNA, 25 bp, Homo sapien
gtccttccacatttggccgtgactg

SEQ ID NO: 1036278 - DNA, 25 bp, Homo sapien
atttggccgtgactgggagtctgca

SEQ ID NO: 1036279 - DNA, 25 bp, Homo sapien
acaaagccgtggtcattcatgttca

SEQ ID NO: 1036280 - DNA, 25 bp, Homo sapien
ggccaatccgatcagcgcgatgtca

SEQ ID NO: 1036281 - DNA, 25 bp, Homo sapien
catgacggccaatccgatcagcgcg

SEQ ID NO: 1036282 - DNA, 25 bp, Homo sapien
cacaaagccgtggtcattcatgttc

SEQ ID NO: 1036283 - DNA, 25 bp, Homo sapien
cattcgggctgtgaacctcacggac

SEQ ID NO: 1036284 - DNA, 25 bp, Homo sapien
caggactaagttcgggatcggcccg

SEQ ID NO: 1036285 - DNA, 25 bp, Homo sapien
aaatgccacgagcagcaacagagca

SEQ ID NO: 1036286 - DNA, 25 bp, Homo sapien
taaagcgcccgggaaccagagagaa

SEQ ID NO: 1036287 - DNA, 25 bp, Homo sapien
cctttgcctcattggccaagaaatc

SEQ ID NO: 1036288 - DNA, 25 bp, Homo sapien
tccctttgcctcattggccaagaaa

SEQ ID NO: 1036289 - DNA, 25 bp, Homo sapien
ccctttgcctcattggccaagaaat

SEQ ID NO: 1036290 - DNA, 25 bp, Homo sapien
tggcatactggttacaaatccttct

SEQ ID NO: 1036291 - DNA, 25 bp, Homo sapien
tggaaacaaccccactgttgacacg

SEQ ID NO: 1036292 - DNA, 25 bp, Homo sapien
cctaggattccctaaggagatcttg

SEQ ID NO: 1036293 - DNA, 25 bp, Homo sapien
tgttgacacgactcctctagaaagg

SEQ ID NO: 1036294 - DNA, 25 bp, Homo sapien
atttcctccgtcaatgatgatgtca

SEQ ID NO: 1036295 - DNA, 25 bp, Homo sapien
ttcagaatttcctccgtcaatgatg

SEQ ID NO: 1036296 - DNA, 25 bp, Homo sapien
tgtggtgtccctatattcagaattt

SEQ ID NO: 1036297 - DNA, 25 bp, Homo sapien
gatgatgtcaccagtatccaacaat

SEQ ID NO: 1036298 - DNA, 25 bp, Homo sapien
ggaacctggaagaatctggactgaa

SEQ ID NO: 1036299 - DNA, 25 bp, Homo sapien
agaatctggactgaagaacacttac

SEQ ID NO: 1036300 - DNA, 25 bp, Homo sapien
agaatgttctcggaacctggaagaa

SEQ ID NO: 1036301 - DNA, 25 bp, Homo sapien
tgttctcggaacctggaagaatctg

SEQ ID NO: 1036302 - DNA, 25 bp, Homo sapien
cctggcatgagcgatgggccatacc

SEQ ID NO: 1036303 - DNA, 25 bp, Homo sapien
gttccctcctggcatgagcgatggg

SEQ ID NO: 1036304 - DNA, 25 bp, Homo sapien
tgagcgatgggccataccgggcccc

SEQ ID NO: 1036305 - DNA, 25 bp, Homo sapien
agcgatgggccataccgggcccctt

SEQ ID NO: 1036306 - DNA, 25 bp, Homo sapien
cacagctcagcacgcggatatatta

SEQ ID NO: 1036307 - DNA, 25 bp, Homo sapien
tttaggattagggatgaagacagcc

SEQ ID NO: 1036308 - DNA, 25 bp, Homo sapien
ggaaaccgcagagcttcactgaact

SEQ ID NO: 1036309 - DNA, 25 bp, Homo sapien
aaccaggcagcgtttttgagagcta

SEQ ID NO: 1036310 - DNA, 25 bp, Homo sapien
ggactatcggactgagactacagac

SEQ ID NO: 1036311 - DNA, 25 bp, Homo sapien
ctggtgggccctcaaagcagactgg

SEQ ID NO: 1036312 - DNA, 25 bp, Homo sapien
tgtgctaagttctcaaggtcaactg

SEQ ID NO: 1036313 - DNA, 25 bp, Homo sapien
tggaagtgcccacaaaaagataatg

SEQ ID NO: 1036314 - DNA, 25 bp, Homo sapien
ttttgcagcaatgccttggaagatg

SEQ ID NO: 1036315 - DNA, 25 bp, Homo sapien
gcaatgccttggaagatggtcttga

SEQ ID NO: 1036316 - DNA, 25 bp, Homo sapien
gcagcaatgccttggaagatggtct

SEQ ID NO: 1036317 - DNA, 25 bp, Homo sapien
tgccttggaagatggtcttgatgtg

SEQ ID NO: 1036318 - DNA, 25 bp, Homo sapien
gtacagcatttttgatacaagaatc

SEQ ID NO: 1036319 - DNA, 25 bp, Homo sapien
gcgacacatcagagaagtccacatc

SEQ ID NO: 1036320 - DNA, 25 bp, Homo sapien
gaggccttcagagaaacaggcgaca

SEQ ID NO: 1036321 - DNA, 25 bp, Homo sapien
caacaagcaccaagaggccttcaga

SEQ ID NO: 1036322 - DNA, 25 bp, Homo sapien
tatcccgttgtgcaccatcttcacg

SEQ ID NO: 1036323 - DNA, 25 bp, Homo sapien
tcccgttgtgcaccatcttcacgaa

SEQ ID NO: 1036324 - DNA, 25 bp, Homo sapien
atcccgttgtgcaccatcttcacga

SEQ ID NO: 1036325 - DNA, 25 bp, Homo sapien
cccgttgtgcaccatcttcacgaag

SEQ ID NO: 1036326 - DNA, 25 bp, Homo sapien
tatgtggagtgacacagtgcctgac

SEQ ID NO: 1036327 - DNA, 25 bp, Homo sapien
ttcggtgtctgtggcaaagtgagca

SEQ ID NO: 1036328 - DNA, 25 bp, Homo sapien
taacagtttccctcaaattaggctg

SEQ ID NO: 1036329 - DNA, 25 bp, Homo sapien
taagctacgctaaatggtggtgatg

SEQ ID NO: 1036330 - DNA, 25 bp, Homo sapien
gatggtaagacacgactagaaagcg

SEQ ID NO: 1036331 - DNA, 25 bp, Homo sapien
gagtctgtaaatcacatcccattgg

SEQ ID NO: 1036332 - DNA, 25 bp, Homo sapien
tggcatatagtaaagcactcgtgtg

SEQ ID NO: 1036333 - DNA, 25 bp, Homo sapien
catacttaacgagaaggccttggcc

SEQ ID NO: 1036334 - DNA, 25 bp, Homo sapien
cacaggagagaaccatgttagagga

SEQ ID NO: 1036335 - DNA, 25 bp, Homo sapien
gctaacccagagtcagttgtgtttg

SEQ ID NO: 1036336 - DNA, 25 bp, Homo sapien
tgtccaatgtccacgctgaccaatg

SEQ ID NO: 1036337 - DNA, 25 bp, Homo sapien
caatgctcacggttgccagcaggct

SEQ ID NO: 1036338 - DNA, 25 bp, Homo sapien
gcggagatggcggtccacttccctg

SEQ ID NO: 1036339 - DNA, 25 bp, Homo sapien
tgagggtgacgggtacgccgtattc

SEQ ID NO: 1036340 - DNA, 25 bp, Homo sapien
ccatcggtgtcttggaacttgagaa

SEQ ID NO: 1036341 - DNA, 25 bp, Homo sapien
tacgccgtattccagggcggagatg

SEQ ID NO: 1036342 - DNA, 25 bp, Homo sapien
gaatcaaaagcagcgtcagcctctc

SEQ ID NO: 1036343 - DNA, 25 bp, Homo sapien
gctaaagagggctgaagagattctc

SEQ ID NO: 1036344 - DNA, 25 bp, Homo sapien
tgcccggccctgttattcatgaact

SEQ ID NO: 1036345 - DNA, 25 bp, Homo sapien
gcaaaaggcactctgaaagctaaag

SEQ ID NO: 1036346 - DNA, 25 bp, Homo sapien
tcagtatagccgtaatcattcaagt

SEQ ID NO: 1036347 - DNA, 25 bp, Homo sapien
tctcagggaactaacagaggacttt

SEQ ID NO: 1036348 - DNA, 25 bp, Homo sapien
gacttgctcaactgacaacttatag

SEQ ID NO: 1036349 - DNA, 25 bp, Homo sapien
gctatggcttgagactgctaaccct

SEQ ID NO: 1036350 - DNA, 25 bp, Homo sapien
aagaggaaacagattactgtcaggc

SEQ ID NO: 1036351 - DNA, 25 bp, Homo sapien
cttccgaatgtcctccaggaatgat

SEQ ID NO: 1036352 - DNA, 25 bp, Homo sapien
tgtctaccagtcttattctcatcag

SEQ ID NO: 1036353 - DNA, 25 bp, Homo sapien
taccagtcttattctcatcagcagt

SEQ ID NO: 1036354 - DNA, 25 bp, Homo sapien
gagtgaccgccttatgtctaccagt

SEQ ID NO: 1036355 - DNA, 25 bp, Homo sapien
taggattgccattaggagagtgacc

SEQ ID NO: 1036356 - DNA, 25 bp, Homo sapien
cacatcagggcgatgccaccataat

SEQ ID NO: 1036357 - DNA, 25 bp, Homo sapien
cgatgccaccataattgagagtcca

SEQ ID NO: 1036358 - DNA, 25 bp, Homo sapien
cagggcgatgccaccataattgaga

SEQ ID NO: 1036359 - DNA, 25 bp, Homo sapien
ggcgatgccaccataattgagagtc

SEQ ID NO: 1036360 - DNA, 25 bp, Homo sapien
gaagttccgggtttcgatcaaatgc

SEQ ID NO: 1036361 - DNA, 25 bp, Homo sapien
aagttccgggtttcgatcaaatgca

SEQ ID NO: 1036362 - DNA, 25 bp, Homo sapien
agttccgggtttcgatcaaatgcat

SEQ ID NO: 1036363 - DNA, 25 bp, Homo sapien
gcatctcatgtctgtacccgtcata

SEQ ID NO: 1036364 - DNA, 25 bp, Homo sapien
aagcatctcatgtctgtacccgtca

SEQ ID NO: 1036365 - DNA, 25 bp, Homo sapien
ctcatgtctgtacccgtcatagaag

SEQ ID NO: 1036366 - DNA, 25 bp, Homo sapien
ggaagcatctcatgtctgtacccgt

SEQ ID NO: 1036367 - DNA, 25 bp, Homo sapien
ggtcaggacagtccatggcgcacgc

SEQ ID NO: 1036368 - DNA, 25 bp, Homo sapien
tcaggacagtccatggcgcacgccc

SEQ ID NO: 1036369 - DNA, 25 bp, Homo sapien
ttggtcaggacagtccatggcgcac

SEQ ID NO: 1036370 - DNA, 25 bp, Homo sapien
tggtcaggacagtccatggcgcacg

SEQ ID NO: 1036371 - DNA, 25 bp, Homo sapien
ggtttggccaagagttcataggtgt

SEQ ID NO: 1036372 - DNA, 25 bp, Homo sapien
tgtggataaactgccctggtttggc

SEQ ID NO: 1036373 - DNA, 25 bp, Homo sapien
gtgtggataaactgccctggtttgg

SEQ ID NO: 1036374 - DNA, 25 bp, Homo sapien
tggccaagagttcataggtgtgagc

SEQ ID NO: 1036375 - DNA, 25 bp, Homo sapien
tgaacagaaaatagggcaaagggcc

SEQ ID NO: 1036376 - DNA, 25 bp, Homo sapien
ttccagttgatcagagtgcgcaaac

SEQ ID NO: 1036377 - DNA, 25 bp, Homo sapien
gtctgatgtagcttttattgagtaa

SEQ ID NO: 1036378 - DNA, 25 bp, Homo sapien
agagtgcgcaaacacccttcctgtc

SEQ ID NO: 1036379 - DNA, 25 bp, Homo sapien
tggccgaggtgagactaagaatctg

SEQ ID NO: 1036380 - DNA, 25 bp, Homo sapien
cagtgaacgtccatgtacccattgc

SEQ ID NO: 1036381 - DNA, 25 bp, Homo sapien
cagtgtattaaagcccctggtgtgt

SEQ ID NO: 1036382 - DNA, 25 bp, Homo sapien
gaatgtcacgcacagcttgccagga

SEQ ID NO: 1036383 - DNA, 25 bp, Homo sapien
taggtgcaaagcgtgttccagtcgg

SEQ ID NO: 1036384 - DNA, 25 bp, Homo sapien
tgattcagcgcctggcacaacgctg

SEQ ID NO: 1036385 - DNA, 25 bp, Homo sapien
tgtagaggatgcgtagcccacgatt

SEQ ID NO: 1036386 - DNA, 25 bp, Homo sapien
cgaaacacgtgtgcgcataggtgca

SEQ ID NO: 1036387 - DNA, 25 bp, Homo sapien
tggtaagagaatcgctgctgctcct

SEQ ID NO: 1036388 - DNA, 25 bp, Homo sapien
taagagaatcgctgctgctcctcgg

SEQ ID NO: 1036389 - DNA, 25 bp, Homo sapien
ctgttggtaagagaatcgctgctgc

SEQ ID NO: 1036390 - DNA, 25 bp, Homo sapien
tgttggtaagagaatcgctgctgct

SEQ ID NO: 1036391 - DNA, 25 bp, Homo sapien
aaggccagaaggtggcctctcgccg

SEQ ID NO: 1036392 - DNA, 25 bp, Homo sapien
gaggattcatcgcaaggccagaagg

SEQ ID NO: 1036393 - DNA, 25 bp, Homo sapien
gaaggggaaaccgaggattcatcgc

SEQ ID NO: 1036394 - DNA, 25 bp, Homo sapien
gcacgctcccctagaaccgcttcct

SEQ ID NO: 1036395 - DNA, 25 bp, Homo sapien
tgaaaggaacgaatgggatgcccgc

SEQ ID NO: 1036396 - DNA, 25 bp, Homo sapien
tatgcccggcgctgatgaaaggaac

SEQ ID NO: 1036397 - DNA, 25 bp, Homo sapien
taatgccgacgttgtaccctcacga

SEQ ID NO: 1036398 - DNA, 25 bp, Homo sapien
cgtacgggcgtcacctggaatgtct

SEQ ID NO: 1036399 - DNA, 25 bp, Homo sapien
tgcacgtgatgacagctgaacccac

SEQ ID NO: 1036400 - DNA, 25 bp, Homo sapien
agctgaacccacaagggcataaaat

SEQ ID NO: 1036401 - DNA, 25 bp, Homo sapien
ctgcacgtgatgacagctgaaccca

SEQ ID NO: 1036402 - DNA, 25 bp, Homo sapien
gatgacagctgaacccacaagggca

SEQ ID NO: 1036403 - DNA, 25 bp, Homo sapien
tccgcctcggggccgaagacacagc

SEQ ID NO: 1036404 - DNA, 25 bp, Homo sapien
ctccgcctcggggccgaagacacag

SEQ ID NO: 1036405 - DNA, 25 bp, Homo sapien
aatatttcacgggtaaggctgcaaa

SEQ ID NO: 1036406 - DNA, 25 bp, Homo sapien
cacgggtaaggctgcaaataagagc

SEQ ID NO: 1036407 - DNA, 25 bp, Homo sapien
aaggctgcaaataagagcttttcac

SEQ ID NO: 1036408 - DNA, 25 bp, Homo sapien
atcaaaatatttcacgggtaaggct

SEQ ID NO: 1036409 - DNA, 25 bp, Homo sapien
atgcaacttcctcgcaaagacaacc

SEQ ID NO: 1036410 - DNA, 25 bp, Homo sapien
tatagtgaactgctgcctttagcct

SEQ ID NO: 1036411 - DNA, 25 bp, Homo sapien
caatgcaacttcctcgcaaagacaa

SEQ ID NO: 1036412 - DNA, 25 bp, Homo sapien
ccacagtatagtgaactgctgcctt

SEQ ID NO: 1036413 - DNA, 25 bp, Homo sapien
gccgcaatggtctgtttgctgaact

SEQ ID NO: 1036414 - DNA, 25 bp, Homo sapien
ggaaagtcagctccgaaatggccgc

SEQ ID NO: 1036415 - DNA, 25 bp, Homo sapien
ccgaaatggccgcaatggtctgttt

SEQ ID NO: 1036416 - DNA, 25 bp, Homo sapien
cacactgtcggaaagtcagctccga

SEQ ID NO: 1036417 - DNA, 25 bp, Homo sapien
ttgcaaacatttcaaggtctttggc

SEQ ID NO: 1036418 - DNA, 25 bp, Homo sapien
aacatttcaaggtctttggcaaaat

SEQ ID NO: 1036419 - DNA, 25 bp, Homo sapien
acatttcaaggtctttggcaaaatt

SEQ ID NO: 1036420 - DNA, 25 bp, Homo sapien
cttgcaaacatttcaaggtctttgg

SEQ ID NO: 1036421 - DNA, 25 bp, Homo sapien
gtcggataatcaagttctctaccca

SEQ ID NO: 1036422 - DNA, 25 bp, Homo sapien
aaagctacacagacgcagtgtcgga

SEQ ID NO: 1036423 - DNA, 25 bp, Homo sapien
atggagaggccccaaaaagctacac

SEQ ID NO: 1036424 - DNA, 25 bp, Homo sapien
cacagacgcagtgtcggataatcaa

SEQ ID NO: 1036425 - DNA, 25 bp, Homo sapien
cacttgggactgaataacttgggtt

SEQ ID NO: 1036426 - DNA, 25 bp, Homo sapien
gcagaaccatgattagagacaagcc

SEQ ID NO: 1036427 - DNA, 25 bp, Homo sapien
tttaatacaggcaccagcattcagg

SEQ ID NO: 1036428 - DNA, 25 bp, Homo sapien
aatcaccgtgattgaaggaggcgtc

SEQ ID NO: 1036429 - DNA, 25 bp, Homo sapien
cagaagcaagtcaccaaaatgtttg

SEQ ID NO: 1036430 - DNA, 25 bp, Homo sapien
tcacggtcagacttcaaactagcag

SEQ ID NO: 1036431 - DNA, 25 bp, Homo sapien
gggcattaagcaaaagtgacacaaa

SEQ ID NO: 1036432 - DNA, 25 bp, Homo sapien
gatctctaagtagcccatcctttta

SEQ ID NO: 1036433 - DNA, 25 bp, Homo sapien
agtgttaattgtggttcttttcgca

SEQ ID NO: 1036434 - DNA, 25 bp, Homo sapien
gtgttaattgtggttcttttcgcat

SEQ ID NO: 1036435 - DNA, 25 bp, Homo sapien
tgttaattgtggttcttttcgcatg

SEQ ID NO: 1036436 - DNA, 25 bp, Homo sapien
gttaattgtggttcttttcgcatgt

SEQ ID NO: 1036437 - DNA, 25 bp, Homo sapien
gcacacaggtgcgttctaggcaaca

SEQ ID NO: 1036438 - DNA, 25 bp, Homo sapien
ttacactcagtcaggaaagctcccc

SEQ ID NO: 1036439 - DNA, 25 bp, Homo sapien
tcttcacctgaacaacggaggcttg

SEQ ID NO: 1036440 - DNA, 25 bp, Homo sapien
aaagccactagcctgggatgaccag

SEQ ID NO: 1036441 - DNA, 25 bp, Homo sapien
gtgcttttcgttctaggttaatctg

SEQ ID NO: 1036442 - DNA, 25 bp, Homo sapien
gcttttcgttctaggttaatctgag

SEQ ID NO: 1036443 - DNA, 25 bp, Homo sapien
cttttcgttctaggttaatctgagc

SEQ ID NO: 1036444 - DNA, 25 bp, Homo sapien
ttttcgttctaggttaatctgagca

SEQ ID NO: 1036445 - DNA, 25 bp, Homo sapien
tgcactttccaagcggcgagggact

SEQ ID NO: 1036446 - DNA, 25 bp, Homo sapien
ggctgcactttccaagcggcgaggg

SEQ ID NO: 1036447 - DNA, 25 bp, Homo sapien
gctgcactttccaagcggcgaggga

SEQ ID NO: 1036448 - DNA, 25 bp, Homo sapien
ctgcactttccaagcggcgagggac

SEQ ID NO: 1036449 - DNA, 25 bp, Homo sapien
tgcagccatatgcatttctaggtgg

SEQ ID NO: 1036450 - DNA, 25 bp, Homo sapien
catatgcatttctaggtggctctac

SEQ ID NO: 1036451 - DNA, 25 bp, Homo sapien
ctttgcagccatatgcatttctagg

SEQ ID NO: 1036452 - DNA, 25 bp, Homo sapien
gtttcctttgcagccatatgcattt

SEQ ID NO: 1036453 - DNA, 25 bp, Homo sapien
gaattcagcacaaaaagcaccctag

SEQ ID NO: 1036454 - DNA, 25 bp, Homo sapien
tatataccatttgatcacacaccat

SEQ ID NO: 1036455 - DNA, 25 bp, Homo sapien
tcattctctaaaactagctttggca

SEQ ID NO: 1036456 - DNA, 25 bp, Homo sapien
gagacctgggagtattttgcttaag

SEQ ID NO: 1036457 - DNA, 25 bp, Homo sapien
catttagcctagaaaattacatcaa

SEQ ID NO: 1036458 - DNA, 25 bp, Homo sapien
ttcatctttcagagattgccattta

SEQ ID NO: 1036459 - DNA, 25 bp, Homo sapien
ctttcagagattgccatttagccta

SEQ ID NO: 1036460 - DNA, 25 bp, Homo sapien
gccatttagcctagaaaattacatc

SEQ ID NO: 1036461 - DNA, 25 bp, Homo sapien
tgtgcccatgtgaaagtatgactga

SEQ ID NO: 1036462 - DNA, 25 bp, Homo sapien
tatgcctatagcaggcaggaagccg

SEQ ID NO: 1036463 - DNA, 25 bp, Homo sapien
taaaattagcctaggataaggagct

SEQ ID NO: 1036464 - DNA, 25 bp, Homo sapien
tcagtgcccacaaaagcgctctggg

SEQ ID NO: 1036465 - DNA, 25 bp, Homo sapien
gtgggtattttaagcccaatctcca

SEQ ID NO: 1036466 - DNA, 25 bp, Homo sapien
tggtgggtattttaagcccaatctc

SEQ ID NO: 1036467 - DNA, 25 bp, Homo sapien
tgggtattttaagcccaatctccag

SEQ ID NO: 1036468 - DNA, 25 bp, Homo sapien
ggtattttaagcccaatctccagct

SEQ ID NO: 1036469 - DNA, 25 bp, Homo sapien
tgggctgactggagcttctctccca

SEQ ID NO: 1036470 - DNA, 25 bp, Homo sapien
ttctctcccaccctgctgctgctct

SEQ ID NO: 1036471 - DNA, 25 bp, Homo sapien
tgtgggctgactggagcttctctcc

SEQ ID NO: 1036472 - DNA, 25 bp, Homo sapien
cttgtgggctgactggagcttctct

SEQ ID NO: 1036473 - DNA, 25 bp, Homo sapien
cggtggccgtggccccggagagcag

SEQ ID NO: 1036474 - DNA, 25 bp, Homo sapien
cagcggtggccgtggccccggagag

SEQ ID NO: 1036475 - DNA, 25 bp, Homo sapien
agcggtggccgtggccccggagagc

SEQ ID NO: 1036476 - DNA, 25 bp, Homo sapien
gcggtggccgtggccccggagagca

SEQ ID NO: 1036477 - DNA, 25 bp, Homo sapien
aaaagatgctccatagcgataagcc

SEQ ID NO: 1036478 - DNA, 25 bp, Homo sapien
ggttttgctccatactctgctaagg

SEQ ID NO: 1036479 - DNA, 25 bp, Homo sapien
tcagcaatctggctcaggcagcaag

SEQ ID NO: 1036480 - DNA, 25 bp, Homo sapien
aatgatctaaaagactaccctggag

SEQ ID NO: 1036481 - DNA, 25 bp, Homo sapien
tcctctcctatgaggggcccggcac

SEQ ID NO: 1036482 - DNA, 25 bp, Homo sapien
gtccactcaaaccaccaagcgagga

SEQ ID NO: 1036483 - DNA, 25 bp, Homo sapien
cactcaaaccaccaagcgaggaaag

SEQ ID NO: 1036484 - DNA, 25 bp, Homo sapien
tcaaaccaccaagcgaggaaagtca

SEQ ID NO: 1036485 - DNA, 25 bp, Homo sapien
cagattgctgggggggtgcgccttc

SEQ ID NO: 1036486 - DNA, 25 bp, Homo sapien
ctgcagggcattctgtcccggcgcg

SEQ ID NO: 1036487 - DNA, 25 bp, Homo sapien
agaagaagttcctgcagggcattct

SEQ ID NO: 1036488 - DNA, 25 bp, Homo sapien
cagggcattctgtcccggcgcgcag

SEQ ID NO: 1036489 - DNA, 25 bp, Homo sapien
tatttgcaggaggagaaggtcttcc

SEQ ID NO: 1036490 - DNA, 25 bp, Homo sapien
ttatttgcaggaggagaaggtcttc

SEQ ID NO: 1036491 - DNA, 25 bp, Homo sapien
cattttattcaggtctgtcattaca

SEQ ID NO: 1036492 - DNA, 25 bp, Homo sapien
tacattttattcaggtctgtcatta

SEQ ID NO: 1036493 - DNA, 25 bp, Homo sapien
tctgtcattacacttgcgtgagcat

SEQ ID NO: 1036494 - DNA, 25 bp, Homo sapien
ttacacttgcgtgagcattcatggg

SEQ ID NO: 1036495 - DNA, 25 bp, Homo sapien
cacgtcagtattgggcattattgga

SEQ ID NO: 1036496 - DNA, 25 bp, Homo sapien
agcacagtccagtcgaaccacaaaa

SEQ ID NO: 1036497 - DNA, 25 bp, Homo sapien
ttccaaattactcaagacacgtcag

SEQ ID NO: 1036498 - DNA, 25 bp, Homo sapien
cacagtccagtcgaaccacaaaaaa

SEQ ID NO: 1036499 - DNA, 25 bp, Homo sapien
ataagatgttattctgaactcttaa

SEQ ID NO: 1036500 - DNA, 25 bp, Homo sapien
ttaaaactggtacataacagcaagt

SEQ ID NO: 1036501 - DNA, 25 bp, Homo sapien
cattaagctactaattaaaactggt

SEQ ID NO: 1036502 - DNA, 25 bp, Homo sapien
gaataatcattttgctcttcgagcc

SEQ ID NO: 1036503 - DNA, 25 bp, Homo sapien
gagtatcagtttcacaggcatgtca

SEQ ID NO: 1036504 - DNA, 25 bp, Homo sapien
tagggagctgttctggtgccaaatc

SEQ ID NO: 1036505 - DNA, 25 bp, Homo sapien
tcgtgcaatcacaaggctgcaagga

SEQ ID NO: 1036506 - DNA, 25 bp, Homo sapien
taaggaccttggacatgatctagtc

SEQ ID NO: 1036507 - DNA, 25 bp, Homo sapien
tgagcccacagattaatgcatagat

SEQ ID NO: 1036508 - DNA, 25 bp, Homo sapien
aatgatatcagacaacactcgtgca

SEQ ID NO: 1036509 - DNA, 25 bp, Homo sapien
tggagtcctctatcaaagagtcaga

SEQ ID NO: 1036510 - DNA, 25 bp, Homo sapien
tatagtagacagtggagagtggttc

SEQ ID NO: 1036511 - DNA, 25 bp, Homo sapien
gagaaaaatcctagtacctaacata

SEQ ID NO: 1036512 - DNA, 25 bp, Homo sapien
tcagagctctatcccagatgtgtaa

SEQ ID NO: 1036513 - DNA, 25 bp, Homo sapien
gagtctaacctctcagttagtctaa

SEQ ID NO: 1036514 - DNA, 25 bp, Homo sapien
tctaaggctccaagcttgaaagggt

SEQ ID NO: 1036515 - DNA, 25 bp, Homo sapien
agggttaaatgaagtactatatttg

SEQ ID NO: 1036516 - DNA, 25 bp, Homo sapien
tctcagttagtctaaggctccaagc

SEQ ID NO: 1036517 - DNA, 25 bp, Homo sapien
agctgagatcctgccactgggctcc

SEQ ID NO: 1036518 - DNA, 25 bp, Homo sapien
gagctgagatcctgccactgggctc

SEQ ID NO: 1036519 - DNA, 25 bp, Homo sapien
tgagatcctgccactgggctccagc

SEQ ID NO: 1036520 - DNA, 25 bp, Homo sapien
ctccagcctgggtgacagaatgaga

SEQ ID NO: 1036521 - DNA, 25 bp, Homo sapien
ggccaacgtgacaaaacccagtcta

SEQ ID NO: 1036522 - DNA, 25 bp, Homo sapien
attagccaggcgtgatggtgggcac

SEQ ID NO: 1036523 - DNA, 25 bp, Homo sapien
aaaatacaaaaattagccaggcgtg

SEQ ID NO: 1036524 - DNA, 25 bp, Homo sapien
caacgtgacaaaacccagtctacta

SEQ ID NO: 1036525 - DNA, 25 bp, Homo sapien
ggaggtggaggtgagccgaaattgt

SEQ ID NO: 1036526 - DNA, 25 bp, Homo sapien
aagtggaggtggaggtgagccgaaa

SEQ ID NO: 1036527 - DNA, 25 bp, Homo sapien
caggaagtggaggtggaggtgagcc

SEQ ID NO: 1036528 - DNA, 25 bp, Homo sapien
ccaggaagtggaggtggaggtgagc

SEQ ID NO: 1036529 - DNA, 25 bp, Homo sapien
gcagggaaaaggtgatgagtcatca

SEQ ID NO: 1036530 - DNA, 25 bp, Homo sapien
tctacagtacactccttgcagggaa

SEQ ID NO: 1036531 - DNA, 25 bp, Homo sapien
aaagaaatatcacaataggccgggc

SEQ ID NO: 1036532 - DNA, 25 bp, Homo sapien
tatgcatgcttagaggaaaacagaa

SEQ ID NO: 1036533 - DNA, 25 bp, Homo sapien
aataaagtaattgtcagcttaggca

SEQ ID NO: 1036534 - DNA, 25 bp, Homo sapien
taaagtaattgtcagcttaggcaac

SEQ ID NO: 1036535 - DNA, 25 bp, Homo sapien
aagtaattgtcagcttaggcaacat

SEQ ID NO: 1036536 - DNA, 25 bp, Homo sapien
taaataaagtaattgtcagcttagg

SEQ ID NO: 1036537 - DNA, 25 bp, Homo sapien
ctgggacataaagaagacggagact

SEQ ID NO: 1036538 - DNA, 25 bp, Homo sapien
tgttattggtagacaccctcagcct

SEQ ID NO: 1036539 - DNA, 25 bp, Homo sapien
ggagcatctcagcaagcaaggcctc

SEQ ID NO: 1036540 - DNA, 25 bp, Homo sapien
gacctgcagaatcctaagcgagcca

SEQ ID NO: 1036541 - DNA, 25 bp, Homo sapien
cctgggtgggtgctacttctgattc

SEQ ID NO: 1036542 - DNA, 25 bp, Homo sapien
ggtcagagaagatctatagtccgtc

SEQ ID NO: 1036543 - DNA, 25 bp, Homo sapien
gatcgtcgcctgctggctaagacca

SEQ ID NO: 1036544 - DNA, 25 bp, Homo sapien
cgtcctgaggtctgtcaatgtcaca

SEQ ID NO: 1036545 - DNA, 25 bp, Homo sapien
cctgcctcgaagacctgaggagcaa

SEQ ID NO: 1036546 - DNA, 25 bp, Homo sapien
gaatctggcgagatccggactctaa

SEQ ID NO: 1036547 - DNA, 25 bp, Homo sapien
tttgctgcggaacgaactacatctc

SEQ ID NO: 1036548 - DNA, 25 bp, Homo sapien
gactctaaagccgtgtctgctgcgc

SEQ ID NO: 1036549 - DNA, 25 bp, Homo sapien
tgaggcctgactaatcaaccgccgc

SEQ ID NO: 1036550 - DNA, 25 bp, Homo sapien
cgccgctgggcgaggtttctcccag

SEQ ID NO: 1036551 - DNA, 25 bp, Homo sapien
ttctgaggcctgactaatcaaccgc

SEQ ID NO: 1036552 - DNA, 25 bp, Homo sapien
ggcctgactaatcaaccgccgctgg

SEQ ID NO: 1036553 - DNA, 25 bp, Homo sapien
tggctcggctgctctgcctgctccg

SEQ ID NO: 1036554 - DNA, 25 bp, Homo sapien
ggctgctctgcctgctccgaggacg

SEQ ID NO: 1036555 - DNA, 25 bp, Homo sapien
gctgctctgcctgctccgaggacgc

SEQ ID NO: 1036556 - DNA, 25 bp, Homo sapien
gctctgcctgctccgaggacgccat

SEQ ID NO: 1036557 - DNA, 25 bp, Homo sapien
tctcgaggcagcacattttcacttc

SEQ ID NO: 1036558 - DNA, 25 bp, Homo sapien
ctctcgaggcagcacattttcactt

SEQ ID NO: 1036559 - DNA, 25 bp, Homo sapien
agagcagagggcggctacttcaaac

SEQ ID NO: 1036560 - DNA, 25 bp, Homo sapien
gcggctacttcaaacaatctagaag

SEQ ID NO: 1036561 - DNA, 25 bp, Homo sapien
gagggcggctacttcaaacaatcta

SEQ ID NO: 1036562 - DNA, 25 bp, Homo sapien
cagagggcggctacttcaaacaatc

SEQ ID NO: 1036563 - DNA, 25 bp, Homo sapien
ttaaagaccactgaggcgctcgcac

SEQ ID NO: 1036564 - DNA, 25 bp, Homo sapien
tttaaagaccactgaggcgctcgca

SEQ ID NO: 1036565 - DNA, 25 bp, Homo sapien
tctttaaagaccactgaggcgctcg

SEQ ID NO: 1036566 - DNA, 25 bp, Homo sapien
gttctttaaagaccactgaggcgct

SEQ ID NO: 1036567 - DNA, 25 bp, Homo sapien
caatcacacaattactgaccaggca

SEQ ID NO: 1036568 - DNA, 25 bp, Homo sapien
ggcctcttccctatccatagtctaa

SEQ ID NO: 1036569 - DNA, 25 bp, Homo sapien
cagcgttgggaatgacaatcacaca

SEQ ID NO: 1036570 - DNA, 25 bp, Homo sapien
tccatagtctaagaagacagcgttg

SEQ ID NO: 1036571 - DNA, 25 bp, Homo sapien
ggaattcagacgtgttcatacccgc

SEQ ID NO: 1036572 - DNA, 25 bp, Homo sapien
cgtaactggtgacgtaacagcaggt

SEQ ID NO: 1036573 - DNA, 25 bp, Homo sapien
ggaaagccttcgtacacactggaat

SEQ ID NO: 1036574 - DNA, 25 bp, Homo sapien
caaaagagtgaaacgaggccaccgt

SEQ ID NO: 1036575 - DNA, 25 bp, Homo sapien
gcagagagaagatttgtggagcaac

SEQ ID NO: 1036576 - DNA, 25 bp, Homo sapien
gtgtcggccccatctctagactgtt

SEQ ID NO: 1036577 - DNA, 25 bp, Homo sapien
gactgttcagacaaactcataatgg

SEQ ID NO: 1036578 - DNA, 25 bp, Homo sapien
gcaacaagcataaatctcggttata

SEQ ID NO: 1036579 - DNA, 25 bp, Homo sapien
caagagcctggtgagtacgttccat

SEQ ID NO: 1036580 - DNA, 25 bp, Homo sapien
gcaccaagagcctggtgagtacgtt

SEQ ID NO: 1036581 - DNA, 25 bp, Homo sapien
accaagagcctggtgagtacgttcc

SEQ ID NO: 1036582 - DNA, 25 bp, Homo sapien
ctgccttgttcagagcaccaagagc

SEQ ID NO: 1036583 - DNA, 25 bp, Homo sapien
gctgccttaactctgacaatgagga

SEQ ID NO: 1036584 - DNA, 25 bp, Homo sapien
aagcaggtgaactttgctgccttaa

SEQ ID NO: 1036585 - DNA, 25 bp, Homo sapien
tgaggaatttgtggatgttgataga

SEQ ID NO: 1036586 - DNA, 25 bp, Homo sapien
tttgtggatgttgatagaaacacag

SEQ ID NO: 1036587 - DNA, 25 bp, Homo sapien
cctgctgatctataattggtgggtc

SEQ ID NO: 1036588 - DNA, 25 bp, Homo sapien
tagtaatgagtaagtaatggccacg

SEQ ID NO: 1036589 - DNA, 25 bp, Homo sapien
ggagctaccaattatcttgaggccc

SEQ ID NO: 1036590 - DNA, 25 bp, Homo sapien
tattatacaaagctgcttcggcagg

SEQ ID NO: 1036591 - DNA, 25 bp, Homo sapien
tttctgtaacagtcaatatgacagc

SEQ ID NO: 1036592 - DNA, 25 bp, Homo sapien
gaaaatagaaacgtccctatagcaa

SEQ ID NO: 1036593 - DNA, 25 bp, Homo sapien
aatatgacagctcccggcaatacgg

SEQ ID NO: 1036594 - DNA, 25 bp, Homo sapien
cctatagcaatcaatatagcagcca

SEQ ID NO: 1036595 - DNA, 25 bp, Homo sapien
ggtgagcggatgaattagcattaat

SEQ ID NO: 1036596 - DNA, 25 bp, Homo sapien
cactctagtgaggatataaacgcgc

SEQ ID NO: 1036597 - DNA, 25 bp, Homo sapien
cgcgctgtgggaatctacagattta

SEQ ID NO: 1036598 - DNA, 25 bp, Homo sapien
tggctactcattaccattctttaac

SEQ ID NO: 1036599 - DNA, 25 bp, Homo sapien
taatgtctacaacccttcctgttca

SEQ ID NO: 1036600 - DNA, 25 bp, Homo sapien
atgtctacaacccttcctgttcatt

SEQ ID NO: 1036601 - DNA, 25 bp, Homo sapien
ttaatgtctacaacccttcctgttc

SEQ ID NO: 1036602 - DNA, 25 bp, Homo sapien
tgtctacaacccttcctgttcatta

SEQ ID NO: 1036603 - DNA, 25 bp, Homo sapien
gtcactggtcaaggctggacaagca

SEQ ID NO: 1036604 - DNA, 25 bp, Homo sapien
ctactgctggggtgaaatgcagagt

SEQ ID NO: 1036605 - DNA, 25 bp, Homo sapien
ctggtcaaggctggacaagcaacag

SEQ ID NO: 1036606 - DNA, 25 bp, Homo sapien
cctactgctggggtgaaatgcagag

SEQ ID NO: 1036607 - DNA, 25 bp, Homo sapien
gcgggaggatcacttcggccggaag

SEQ ID NO: 1036608 - DNA, 25 bp, Homo sapien
cagtaagccgtgtttgcacactgca

SEQ ID NO: 1036609 - DNA, 25 bp, Homo sapien
tcacttcggccggaaggtgaaggct

SEQ ID NO: 1036610 - DNA, 25 bp, Homo sapien
ctgcagtaagccgtgtttgcacact

SEQ ID NO: 1036611 - DNA, 25 bp, Homo sapien
gatgctttcagcttgatgggctcca

SEQ ID NO: 1036612 - DNA, 25 bp, Homo sapien
gatcaattcatttaacgctgccctg

SEQ ID NO: 1036613 - DNA, 25 bp, Homo sapien
caagtccatagtgcgtctacagtga

SEQ ID NO: 1036614 - DNA, 25 bp, Homo sapien
catgcagaaattgggttagacccgt

SEQ ID NO: 1036615 - DNA, 25 bp, Homo sapien
taaaggtgaacactggcctcactgt

SEQ ID NO: 1036616 - DNA, 25 bp, Homo sapien
ttcaatcaaatatggcagcgcttcc

SEQ ID NO: 1036617 - DNA, 25 bp, Homo sapien
gcaagagccgacttcatgaacacgt

SEQ ID NO: 1036618 - DNA, 25 bp, Homo sapien
taaaggccacggtaatgcaagagcc

SEQ ID NO: 1036619 - DNA, 25 bp, Homo sapien
tatacgctgcgaagctttactcacg

SEQ ID NO: 1036620 - DNA, 25 bp, Homo sapien
caaatactgtcatgaacctggcctc

SEQ ID NO: 1036621 - DNA, 25 bp, Homo sapien
cagtcgctgatacctgggccagaga

SEQ ID NO: 1036622 - DNA, 25 bp, Homo sapien
tatgggcttaggtcaaggacaagac

SEQ ID NO: 1036623 - DNA, 25 bp, Homo sapien
taatgttgaagcaaaaacgcagtga

SEQ ID NO: 1036624 - DNA, 25 bp, Homo sapien
ttaacctgatggctaaaaactccac

SEQ ID NO: 1036625 - DNA, 25 bp, Homo sapien
gctacctggaaaagtgctcacaatc

SEQ ID NO: 1036626 - DNA, 25 bp, Homo sapien
tagcgctcgagtggcagagctacct

SEQ ID NO: 1036627 - DNA, 25 bp, Homo sapien
caggcgacaggcaaatcacatattt

SEQ ID NO: 1036628 - DNA, 25 bp, Homo sapien
tatttaacagcatcgacatcactac

SEQ ID NO: 1036629 - DNA, 25 bp, Homo sapien
acatatttaacagcatcgacatcac

SEQ ID NO: 1036630 - DNA, 25 bp, Homo sapien
tgtctgaaaatgcaggcgacaggca

SEQ ID NO: 1036631 - DNA, 25 bp, Homo sapien
tgtcaaatctaatccctctgccgag

SEQ ID NO: 1036632 - DNA, 25 bp, Homo sapien
agcttcaggcctgcgacgatccttc

SEQ ID NO: 1036633 - DNA, 25 bp, Homo sapien
gagctgattcttcatactccccggc

SEQ ID NO: 1036634 - DNA, 25 bp, Homo sapien
taaatgaaaggcgatgttgtttccc

SEQ ID NO: 1036635 - DNA, 25 bp, Homo sapien
gtagaaacttcactgccgtggcaat

SEQ ID NO: 1036636 - DNA, 25 bp, Homo sapien
tggcggacccgggaattctgtagaa

SEQ ID NO: 1036637 - DNA, 25 bp, Homo sapien
tgtagaaacttcactgccgtggcaa

SEQ ID NO: 1036638 - DNA, 25 bp, Homo sapien
tgggctctggcggacccgggaattc

SEQ ID NO: 1036639 - DNA, 25 bp, Homo sapien
tgtaggccgtgctgcacagccctgt

SEQ ID NO: 1036640 - DNA, 25 bp, Homo sapien
cctgtaggccgtgctgcacagccct

SEQ ID NO: 1036641 - DNA, 25 bp, Homo sapien
cccctgtaggccgtgctgcacagcc

SEQ ID NO: 1036642 - DNA, 25 bp, Homo sapien
cagtccccctgtaggccgtgctgca

SEQ ID NO: 1036643 - DNA, 25 bp, Homo sapien
taacctaagctagtcatcctgcagc

SEQ ID NO: 1036644 - DNA, 25 bp, Homo sapien
tcttgccgctccattgtcaggaaag

SEQ ID NO: 1036645 - DNA, 25 bp, Homo sapien
tgagtgggcagctctaggaagtcct

SEQ ID NO: 1036646 - DNA, 25 bp, Homo sapien
tacccgaatcgtgtcatcttgccgc

SEQ ID NO: 1036647 - DNA, 25 bp, Homo sapien
ttccagcaaggaggcggttttgcta

SEQ ID NO: 1036648 - DNA, 25 bp, Homo sapien
agcaaggaggcggttttgctaccgg

SEQ ID NO: 1036649 - DNA, 25 bp, Homo sapien
cttccaggaacagtagaaggataag

SEQ ID NO: 1036650 - DNA, 25 bp, Homo sapien
acttccaggaacagtagaaggataa

SEQ ID NO: 1036651 - DNA, 25 bp, Homo sapien
ctctagcccactaccaaggttggga

SEQ ID NO: 1036652 - DNA, 25 bp, Homo sapien
tctagcccactaccaaggttgggac

SEQ ID NO: 1036653 - DNA, 25 bp, Homo sapien
ggaccgccaggtttcttcaagttca

SEQ ID NO: 1036654 - DNA, 25 bp, Homo sapien
cactaccaaggttgggaccgccagg

SEQ ID NO: 1036655 - DNA, 25 bp, Homo sapien
ctctgcactggacccacactagggc

SEQ ID NO: 1036656 - DNA, 25 bp, Homo sapien
gcactggacccacactagggcaggg

SEQ ID NO: 1036657 - DNA, 25 bp, Homo sapien
ctgcactggacccacactagggcag

SEQ ID NO: 1036658 - DNA, 25 bp, Homo sapien
tgcactggacccacactagggcagg

SEQ ID NO: 1036659 - DNA, 25 bp, Homo sapien
aatcatcctcaggaacaagcgcggc

SEQ ID NO: 1036660 - DNA, 25 bp, Homo sapien
tcctcaggaacaagcgcggctgcca

SEQ ID NO: 1036661 - DNA, 25 bp, Homo sapien
tgcctgctccgcacgagcagctcct

SEQ ID NO: 1036662 - DNA, 25 bp, Homo sapien
tgctccgcacgagcagctcctcgct

SEQ ID NO: 1036663 - DNA, 25 bp, Homo sapien
tagctgccgtaggtctcgtcctgga

SEQ ID NO: 1036664 - DNA, 25 bp, Homo sapien
ctagctgccgtaggtctcgtcctgg

SEQ ID NO: 1036665 - DNA, 25 bp, Homo sapien
agctgccgtaggtctcgtcctggat

SEQ ID NO: 1036666 - DNA, 25 bp, Homo sapien
tttttcctcacacgccaatccagcg

SEQ ID NO: 1036667 - DNA, 25 bp, Homo sapien
tgagcctcccctcactaacgaaggc

SEQ ID NO: 1036668 - DNA, 25 bp, Homo sapien
taatattgggtcctaaccccagctc

SEQ ID NO: 1036669 - DNA, 25 bp, Homo sapien
cagcgactggcacatgcgtctctgc

SEQ ID NO: 1036670 - DNA, 25 bp, Homo sapien
tacatacagagttcggtactagccg

SEQ ID NO: 1036671 - DNA, 25 bp, Homo sapien
gggactaacgcacccataatttgcg

SEQ ID NO: 1036672 - DNA, 25 bp, Homo sapien
ggtcaagagccaatcttcacagaag

SEQ ID NO: 1036673 - DNA, 25 bp, Homo sapien
taggtgcactcatggacaatttgga

SEQ ID NO: 1036674 - DNA, 25 bp, Homo sapien
ttgggagaggtggtgagtccattca

SEQ ID NO: 1036675 - DNA, 25 bp, Homo sapien
atttgggagaggtggtgagtccatt

SEQ ID NO: 1036676 - DNA, 25 bp, Homo sapien
tttgggagaggtggtgagtccattc

SEQ ID NO: 1036677 - DNA, 25 bp, Homo sapien
taacagtaagagattagagcatgcc

SEQ ID NO: 1036678 - DNA, 25 bp, Homo sapien
tactgaggaccattagtgagttacc

SEQ ID NO: 1036679 - DNA, 25 bp, Homo sapien
caagctgtggaatgaccaacctagc

SEQ ID NO: 1036680 - DNA, 25 bp, Homo sapien
caattccgcgtgtgacttataaagc

SEQ ID NO: 1036681 - DNA, 25 bp, Homo sapien
gaggcagcatgttcacagtatcacc

SEQ ID NO: 1036682 - DNA, 25 bp, Homo sapien
tatagggagacatggagcagcttcc

SEQ ID NO: 1036683 - DNA, 25 bp, Homo sapien
tgctaacagcgctgagcactggcag

SEQ ID NO: 1036684 - DNA, 25 bp, Homo sapien
tcgcctcgtgctcggtggaatgtcc

SEQ ID NO: 1036685 - DNA, 25 bp, Homo sapien
cagagaccgacaaagtgcgtgagag

SEQ ID NO: 1036686 - DNA, 25 bp, Homo sapien
taatagaaaccctgcacagagaccg

SEQ ID NO: 1036687 - DNA, 25 bp, Homo sapien
gacgattatcacactgtcgccagcg

SEQ ID NO: 1036688 - DNA, 25 bp, Homo sapien
caatgaagccgtagaagaaacagcc

SEQ ID NO: 1036689 - DNA, 25 bp, Homo sapien
gataggtcagtaaacaagataccac

SEQ ID NO: 1036690 - DNA, 25 bp, Homo sapien
cagatatcctacaaactgatgatgg

SEQ ID NO: 1036691 - DNA, 25 bp, Homo sapien
tactacataaactggaagctccgtg

SEQ ID NO: 1036692 - DNA, 25 bp, Homo sapien
ttaacaagttagatctgtcagccct

SEQ ID NO: 1036693 - DNA, 25 bp, Homo sapien
tagcatttgctcactgtatccagcc

SEQ ID NO: 1036694 - DNA, 25 bp, Homo sapien
cctaagctctgggatcactagtgtg

SEQ ID NO: 1036695 - DNA, 25 bp, Homo sapien
tgtctaggagtgcagctcaagctac

SEQ ID NO: 1036696 - DNA, 25 bp, Homo sapien
tcttgttgacgcataaaactggcct

SEQ ID NO: 1036697 - DNA, 25 bp, Homo sapien
tgagccttgctcttgtacatattaa

SEQ ID NO: 1036698 - DNA, 25 bp, Homo sapien
cttgggcgatacgagcaaaattcca

SEQ ID NO: 1036699 - DNA, 25 bp, Homo sapien
agcttgggcgatacgagcaaaattc

SEQ ID NO: 1036700 - DNA, 25 bp, Homo sapien
aagtgagccttgctcttgtacatat

SEQ ID NO: 1036701 - DNA, 25 bp, Homo sapien
cagcagttagtctagcatgtgaggg

SEQ ID NO: 1036702 - DNA, 25 bp, Homo sapien
agtccaaggtgtttatcgaatcgcc

SEQ ID NO: 1036703 - DNA, 25 bp, Homo sapien
tgtccaggctgggtatagcagatca

SEQ ID NO: 1036704 - DNA, 25 bp, Homo sapien
tagtcctagggaaaatgccatagcc

SEQ ID NO: 1036705 - DNA, 25 bp, Homo sapien
cattgtcccgtgtgctacactgtct

SEQ ID NO: 1036706 - DNA, 25 bp, Homo sapien
agtttcactgtgatacacctcgatg

SEQ ID NO: 1036707 - DNA, 25 bp, Homo sapien
tgctttttgggagtactgctgtcac

SEQ ID NO: 1036708 - DNA, 25 bp, Homo sapien
cactgtctctgattatgagtcagcc

SEQ ID NO: 1036709 - DNA, 25 bp, Homo sapien
acagctaggaatgttcggtagtcca

SEQ ID NO: 1036710 - DNA, 25 bp, Homo sapien
cacttaatagctatgagtcaggtcc

SEQ ID NO: 1036711 - DNA, 25 bp, Homo sapien
tacttttatagatcaatgcctggca

SEQ ID NO: 1036712 - DNA, 25 bp, Homo sapien
cctccactagaagcataacatagtg

SEQ ID NO: 1036713 - DNA, 25 bp, Homo sapien
tatctgcccagtcattggctcttgg

SEQ ID NO: 1036714 - DNA, 25 bp, Homo sapien
ggtcaaagtgctgccatggagccaa

SEQ ID NO: 1036715 - DNA, 25 bp, Homo sapien
aacataggacatcccggtgccctag

SEQ ID NO: 1036716 - DNA, 25 bp, Homo sapien
tgtctccagatcacaactagttatc

SEQ ID NO: 1036717 - DNA, 25 bp, Homo sapien
tggttaaagggacaggacgccctgc

SEQ ID NO: 1036718 - DNA, 25 bp, Homo sapien
gccgctggctgcaaatgaagataat

SEQ ID NO: 1036719 - DNA, 25 bp, Homo sapien
ccaaaaggagcattcagttgcattc

SEQ ID NO: 1036720 - DNA, 25 bp, Homo sapien
ggctgatggtcactggtacactacg

SEQ ID NO: 1036721 - DNA, 25 bp, Homo sapien
tctggtcggcagctctccattagag

SEQ ID NO: 1036722 - DNA, 25 bp, Homo sapien
gagcttttccacatctggtcggcag

SEQ ID NO: 1036723 - DNA, 25 bp, Homo sapien
ggtcggcagctctccattagaggcc

SEQ ID NO: 1036724 - DNA, 25 bp, Homo sapien
agccgagagcttttccacatctggt

SEQ ID NO: 1036725 - DNA, 25 bp, Homo sapien
ctcaggaagtagctgtgtgtacaaa

SEQ ID NO: 1036726 - DNA, 25 bp, Homo sapien
tgttccaggaatcccaacatccaag

SEQ ID NO: 1036727 - DNA, 25 bp, Homo sapien
ctcaagtatgaaaggagcggtcaca

SEQ ID NO: 1036728 - DNA, 25 bp, Homo sapien
gaacagaatgaaatgtggcgctcaa

SEQ ID NO: 1036729 - DNA, 25 bp, Homo sapien
tgctggaaggccatatcaatctctt

SEQ ID NO: 1036730 - DNA, 25 bp, Homo sapien
aggacgaaggctcatcggcagcagt

SEQ ID NO: 1036731 - DNA, 25 bp, Homo sapien
ctgggcccaaggacgaaggctcatc

SEQ ID NO: 1036732 - DNA, 25 bp, Homo sapien
gcagtgcccgactgctggaaggcca

SEQ ID NO: 1036733 - DNA, 25 bp, Homo sapien
tactgccaagatcacacctgcctag

SEQ ID NO: 1036734 - DNA, 25 bp, Homo sapien
gaaggcctttttggctctactgcca

SEQ ID NO: 1036735 - DNA, 25 bp, Homo sapien
taagatccgtaacacagacagcaga

SEQ ID NO: 1036736 - DNA, 25 bp, Homo sapien
caagtccggagaagagaaggccttt

SEQ ID NO: 1036737 - DNA, 25 bp, Homo sapien
gacctgttcggtattaagccactgg

SEQ ID NO: 1036738 - DNA, 25 bp, Homo sapien
tccaagtagccgagagacctgttcg

SEQ ID NO: 1036739 - DNA, 25 bp, Homo sapien
gatgttttaggccaactctgtgatc

SEQ ID NO: 1036740 - DNA, 25 bp, Homo sapien
tgttctgagtaagaagtttccaagt

SEQ ID NO: 1036741 - DNA, 25 bp, Homo sapien
tgacaccttgggtctaccttatggc

SEQ ID NO: 1036742 - DNA, 25 bp, Homo sapien
cttgcctaagactagcgttctggga

SEQ ID NO: 1036743 - DNA, 25 bp, Homo sapien
tgccccttctagaaagccttgccta

SEQ ID NO: 1036744 - DNA, 25 bp, Homo sapien
gagggcttccctctacgatgaacag

SEQ ID NO: 1036745 - DNA, 25 bp, Homo sapien
gatcctccaaggcacgcgggagagc

SEQ ID NO: 1036746 - DNA, 25 bp, Homo sapien
gcgaacacctttctggagcggccat

SEQ ID NO: 1036747 - DNA, 25 bp, Homo sapien
gggagagccccgtctccactgcgaa

SEQ ID NO: 1036748 - DNA, 25 bp, Homo sapien
agttcacaaagtgctcccacgtcca

SEQ ID NO: 1036749 - DNA, 25 bp, Homo sapien
cttagtgcagaaccccgatcagcac

SEQ ID NO: 1036750 - DNA, 25 bp, Homo sapien
tgatgatggccagggcgccgtaatc

SEQ ID NO: 1036751 - DNA, 25 bp, Homo sapien
ggccagggcgccgtaatctcgccat

SEQ ID NO: 1036752 - DNA, 25 bp, Homo sapien
cttgtagagctggtgaaagccaaat

SEQ ID NO: 1036753 - DNA, 25 bp, Homo sapien
tctcgccatcgggagcctgcgggac

SEQ ID NO: 1036754 - DNA, 25 bp, Homo sapien
gaggactctggcgttcgtgtcacat

SEQ ID NO: 1036755 - DNA, 25 bp, Homo sapien
tactgctcattacagccagggcatt

SEQ ID NO: 1036756 - DNA, 25 bp, Homo sapien
tcttcttggtgcttgtatacagtca

SEQ ID NO: 1036757 - DNA, 25 bp, Homo sapien
aactacaagtggcagctccgtgtga

SEQ ID NO: 1036758 - DNA, 25 bp, Homo sapien
gctcagagagaccggcctccatcct

SEQ ID NO: 1036759 - DNA, 25 bp, Homo sapien
ctgtcctctcggccgcccaggatga

SEQ ID NO: 1036760 - DNA, 25 bp, Homo sapien
tctgtcctctcggccgcccaggatg

SEQ ID NO: 1036761 - DNA, 25 bp, Homo sapien
agagagaccggcctccatcctctcc

SEQ ID NO: 1036762 - DNA, 25 bp, Homo sapien
gggtgacttgatggagtcattaatc

SEQ ID NO: 1036763 - DNA, 25 bp, Homo sapien
tgtgaacagattctcagagcagata

SEQ ID NO: 1036764 - DNA, 25 bp, Homo sapien
ggtgacttgatggagtcattaatct

SEQ ID NO: 1036765 - DNA, 25 bp, Homo sapien
ttgcaaatgtgaacagattctcaga

SEQ ID NO: 1036766 - DNA, 25 bp, Homo sapien
cagctcgtgggcaagctcctggatc

SEQ ID NO: 1036767 - DNA, 25 bp, Homo sapien
ctcgtgggcaagctcctggatcttc

SEQ ID NO: 1036768 - DNA, 25 bp, Homo sapien
gcgagggtcgtctgtaactgagtca

SEQ ID NO: 1036769 - DNA, 25 bp, Homo sapien
ctcctggacggaggcgagggtcgtc

SEQ ID NO: 1036770 - DNA, 25 bp, Homo sapien
ggccctgtgcagcagagacaggtac

SEQ ID NO: 1036771 - DNA, 25 bp, Homo sapien
tggagggccctgtgcagcagagaca

SEQ ID NO: 1036772 - DNA, 25 bp, Homo sapien
gcctggagggccctgtgcagcagag

SEQ ID NO: 1036773 - DNA, 25 bp, Homo sapien
gggccctgtgcagcagagacaggta

SEQ ID NO: 1036774 - DNA, 25 bp, Homo sapien
caggatccagttggtggatgtggtg

SEQ ID NO: 1036775 - DNA, 25 bp, Homo sapien
acttgagttcgttgatattctggga

SEQ ID NO: 1036776 - DNA, 25 bp, Homo sapien
caaggagttaatttcggacttgagt

SEQ ID NO: 1036777 - DNA, 25 bp, Homo sapien
aatttcggacttgagttcgttgata

SEQ ID NO: 1036778 - DNA, 25 bp, Homo sapien
tgtatttcaaaacttgtgtgccaca

SEQ ID NO: 1036779 - DNA, 25 bp, Homo sapien
aacttgtgtgccacagaccgtcacc

SEQ ID NO: 1036780 - DNA, 25 bp, Homo sapien
ttcaaaacttgtgtgccacagaccg

SEQ ID NO: 1036781 - DNA, 25 bp, Homo sapien
tggctcaagctgtccctgaccaggt

SEQ ID NO: 1036782 - DNA, 25 bp, Homo sapien
tccttcccaggcgaggacgacgtgg

SEQ ID NO: 1036783 - DNA, 25 bp, Homo sapien
tgacaggtgagatgtcgctgctgct

SEQ ID NO: 1036784 - DNA, 25 bp, Homo sapien
gacggtgacttgactgggatctgcc

SEQ ID NO: 1036785 - DNA, 25 bp, Homo sapien
acgtggactcgttgctgacaggtga

SEQ ID NO: 1036786 - DNA, 25 bp, Homo sapien
ctcgtccacatggctcacatcatca

SEQ ID NO: 1036787 - DNA, 25 bp, Homo sapien
tcgtccacatggctcacatcatcat

SEQ ID NO: 1036788 - DNA, 25 bp, Homo sapien
ctagtcccgctcactctcgttgctg

SEQ ID NO: 1036789 - DNA, 25 bp, Homo sapien
cccgctcactctcgttgctggcgcc

SEQ ID NO: 1036790 - DNA, 25 bp, Homo sapien
tagtcccgctcactctcgttgctgg

SEQ ID NO: 1036791 - DNA, 25 bp, Homo sapien
gctcactctcgttgctggcgccctc

SEQ ID NO: 1036792 - DNA, 25 bp, Homo sapien
caggtggacagaagtgtgactcccc

SEQ ID NO: 1036793 - DNA, 25 bp, Homo sapien
gctgaaccattacacggcaagcggg

SEQ ID NO: 1036794 - DNA, 25 bp, Homo sapien
tctcgccatgggattagctgaacca

SEQ ID NO: 1036795 - DNA, 25 bp, Homo sapien
tagctctggccatgcgtggtgtcac

SEQ ID NO: 1036796 - DNA, 25 bp, Homo sapien
cagactctgtcctcaaaagccgaat

SEQ ID NO: 1036797 - DNA, 25 bp, Homo sapien
tacttctgccccattccgaatattt

SEQ ID NO: 1036798 - DNA, 25 bp, Homo sapien
tccctgaaatcacgccagactctgt

SEQ ID NO: 1036799 - DNA, 25 bp, Homo sapien
aagggctgttttccctggtccagca

SEQ ID NO: 1036800 - DNA, 25 bp, Homo sapien
cacaggtagcgttggtctaggacca

SEQ ID NO: 1036801 - DNA, 25 bp, Homo sapien
cccatccactgtcacgggaggtggc

SEQ ID NO: 1036802 - DNA, 25 bp, Homo sapien
ctggccccacaggtagcgttggtct

SEQ ID NO: 1036803 - DNA, 25 bp, Homo sapien
catccactgtcacgggaggtggccc

SEQ ID NO: 1036804 - DNA, 25 bp, Homo sapien
gataattcctgggtccgtagccacc

SEQ ID NO: 1036805 - DNA, 25 bp, Homo sapien
gatccaatccggatgctggcgcgac

SEQ ID NO: 1036806 - DNA, 25 bp, Homo sapien
tcttgacacttccaactgatggccg

SEQ ID NO: 1036807 - DNA, 25 bp, Homo sapien
gagtgtccaccagacctagcctgga

SEQ ID NO: 1036808 - DNA, 25 bp, Homo sapien
acagaccagttttgtccccgggctg

SEQ ID NO: 1036809 - DNA, 25 bp, Homo sapien
tgggtcgtcggacaaaggccctgca

SEQ ID NO: 1036810 - DNA, 25 bp, Homo sapien
gcctggccagaagggtagcctcctc

SEQ ID NO: 1036811 - DNA, 25 bp, Homo sapien
tgacaccaaggcctgggtcgtcgga

SEQ ID NO: 1036812 - DNA, 25 bp, Homo sapien
gtggggtgacgggaggagttgggca

SEQ ID NO: 1036813 - DNA, 25 bp, Homo sapien
ttaaaatcgcccccaatcggctggc

SEQ ID NO: 1036814 - DNA, 25 bp, Homo sapien
ccatgacccagctacaccggtgggg

SEQ ID NO: 1036815 - DNA, 25 bp, Homo sapien
atcgcccccaatcggctggccatga

SEQ ID NO: 1036816 - DNA, 25 bp, Homo sapien
gcacggagcgtacctgattcaacag

SEQ ID NO: 1036817 - DNA, 25 bp, Homo sapien
cctcggcacctggttattaagaact

SEQ ID NO: 1036818 - DNA, 25 bp, Homo sapien
cgtgaaacccgagctgaacagcgtg

SEQ ID NO: 1036819 - DNA, 25 bp, Homo sapien
aaagaagaagatgccgacagtgcgg

SEQ ID NO: 1036820 - DNA, 25 bp, Homo sapien
tgggcatgtcgcagatggactcgca

SEQ ID NO: 1036821 - DNA, 25 bp, Homo sapien
agtctggacggctccctgtcgctgg

SEQ ID NO: 1036822 - DNA, 25 bp, Homo sapien
cgcaagcacgagaagcaggagcgcg

SEQ ID NO: 1036823 - DNA, 25 bp, Homo sapien
atggactcgcacaagcgcaagcacg

SEQ ID NO: 1036824 - DNA, 25 bp, Homo sapien
tagcgagtaaggacccgaggtgaca

SEQ ID NO: 1036825 - DNA, 25 bp, Homo sapien
gccagcctcgggcatagcgagtaag

SEQ ID NO: 1036826 - DNA, 25 bp, Homo sapien
ttggccacccatttagatgatgctg

SEQ ID NO: 1036827 - DNA, 25 bp, Homo sapien
gcactgcatggcatttggccaccca

SEQ ID NO: 1036828 - DNA, 25 bp, Homo sapien
gattcaggactgtctgcgtcggctg

SEQ ID NO: 1036829 - DNA, 25 bp, Homo sapien
cgatttgtcttatgtggaagttgcc

SEQ ID NO: 1036830 - DNA, 25 bp, Homo sapien
ggaaggctcggaccccacgctggat

SEQ ID NO: 1036831 - DNA, 25 bp, Homo sapien
cttgggccgggcatctctcaggttc

SEQ ID NO: 1036832 - DNA, 25 bp, Homo sapien
ggtgccctgcagttaccaggcagga

SEQ ID NO: 1036833 - DNA, 25 bp, Homo sapien
ggaggcctagggcagctctcagatc

SEQ ID NO: 1036834 - DNA, 25 bp, Homo sapien
cttgcatccccacggagggcttggg

SEQ ID NO: 1036835 - DNA, 25 bp, Homo sapien
cacagtcaccgtggagcatcaggga

SEQ ID NO: 1036836 - DNA, 25 bp, Homo sapien
tgggccggaccctgtggtgacactc

SEQ ID NO: 1036837 - DNA, 25 bp, Homo sapien
ccctgtggtgacactcggggttgta

SEQ ID NO: 1036838 - DNA, 25 bp, Homo sapien
ttgggccggaccctgtggtgacact

SEQ ID NO: 1036839 - DNA, 25 bp, Homo sapien
gacactcggggttgtagtatggaaa

SEQ ID NO: 1036840 - DNA, 25 bp, Homo sapien
gccctgggggtccaagttcagctcc

SEQ ID NO: 1036841 - DNA, 25 bp, Homo sapien
ggggtccaagttcagctccttcctc

SEQ ID NO: 1036842 - DNA, 25 bp, Homo sapien
ctgtgggtccctggtgtccagaaga

SEQ ID NO: 1036843 - DNA, 25 bp, Homo sapien
cctggtgtccagaagacaggccctg

SEQ ID NO: 1036844 - DNA, 25 bp, Homo sapien
gatggggatgagggtaatggataaa

SEQ ID NO: 1036845 - DNA, 25 bp, Homo sapien
aatattcctggtgtggacggccctg

SEQ ID NO: 1036846 - DNA, 25 bp, Homo sapien
agtacagtggttcggccaagggcat

SEQ ID NO: 1036847 - DNA, 25 bp, Homo sapien
catatttgtggtgagtgctgctaac

SEQ ID NO: 1036848 - DNA, 25 bp, Homo sapien
agctggagctggtttgtgtgacttg

SEQ ID NO: 1036849 - DNA, 25 bp, Homo sapien
tgccgatgtcgtcctaattcaccag

SEQ ID NO: 1036850 - DNA, 25 bp, Homo sapien
ctagcagccagtttttatgagaggg

SEQ ID NO: 1036851 - DNA, 25 bp, Homo sapien
caagggctggatcaatctggacgtc

SEQ ID NO: 1036852 - DNA, 25 bp, Homo sapien
gccccgagatgacagcaaatttaca

SEQ ID NO: 1036853 - DNA, 25 bp, Homo sapien
gatggaccagacagactactcaacg

SEQ ID NO: 1036854 - DNA, 25 bp, Homo sapien
gggcgactgtctcaaggtaaaggaa

SEQ ID NO: 1036855 - DNA, 25 bp, Homo sapien
acaaggctgtgtcggatgatcaagc

SEQ ID NO: 1036856 - DNA, 25 bp, Homo sapien
catgggccctggctattgaaaccaa

SEQ ID NO: 1036857 - DNA, 25 bp, Homo sapien
ccccagcattgtctgcgctggcggg

SEQ ID NO: 1036858 - DNA, 25 bp, Homo sapien
ctgaaaacgtgatcagaggcggccc

SEQ ID NO: 1036859 - DNA, 25 bp, Homo sapien
gcggcatccctttcggacttcaaag

SEQ ID NO: 1036860 - DNA, 25 bp, Homo sapien
gaggcggcccggtgtagggcaggcc

SEQ ID NO: 1036861 - DNA, 25 bp, Homo sapien
acagaatatttctccgggaaagtgc

SEQ ID NO: 1036862 - DNA, 25 bp, Homo sapien
gtgcccgtttccatgacgctgcccc

SEQ ID NO: 1036863 - DNA, 25 bp, Homo sapien
gacgctgcccctgttgtctatgccg

SEQ ID NO: 1036864 - DNA, 25 bp, Homo sapien
cagaatatttctccgggaaagtgcc

SEQ ID NO: 1036865 - DNA, 25 bp, Homo sapien
gaaggattcgttaggataatggaac

SEQ ID NO: 1036866 - DNA, 25 bp, Homo sapien
aatccccccggatgtaatgagctga

SEQ ID NO: 1036867 - DNA, 25 bp, Homo sapien
cttgggagcggcacatgattgccgt

SEQ ID NO: 1036868 - DNA, 25 bp, Homo sapien
tgattgccgtcttgatgaaatcccc

SEQ ID NO: 1036869 - DNA, 25 bp, Homo sapien
agcctgattagagagtctgccctgg

SEQ ID NO: 1036870 - DNA, 25 bp, Homo sapien
cttaattctgtcagagcgctgggga

SEQ ID NO: 1036871 - DNA, 25 bp, Homo sapien
agattagaattgacatcctgggagc

SEQ ID NO: 1036872 - DNA, 25 bp, Homo sapien
gaaactttgggatgttgtcggacaa

SEQ ID NO: 1036873 - DNA, 25 bp, Homo sapien
agtgtttagcgatggcgatgatgat

SEQ ID NO: 1036874 - DNA, 25 bp, Homo sapien
gccacgctggcaggtagccagttgc

SEQ ID NO: 1036875 - DNA, 25 bp, Homo sapien
aggtagccagttgccctgtttctcc

SEQ ID NO: 1036876 - DNA, 25 bp, Homo sapien
ttgatgcccgcatggaaccagtcct

SEQ ID NO: 1036877 - DNA, 25 bp, Homo sapien
ccttgatgcccgcatggaaccagtc

SEQ ID NO: 1036878 - DNA, 25 bp, Homo sapien
tgtgaccgctggatgagcttcctgg

SEQ ID NO: 1036879 - DNA, 25 bp, Homo sapien
gaaatgtgaccgctggatgagcttc

SEQ ID NO: 1036880 - DNA, 25 bp, Homo sapien
aatgtgaccgctggatgagcttcct

SEQ ID NO: 1036881 - DNA, 25 bp, Homo sapien
ttagagggaaatgtgaccgctggat

SEQ ID NO: 1036882 - DNA, 25 bp, Homo sapien
tggtcactccttggtcttaacacgt

SEQ ID NO: 1036883 - DNA, 25 bp, Homo sapien
gttctcgccgtatccatccagggct

SEQ ID NO: 1036884 - DNA, 25 bp, Homo sapien
gccctgtgtccacggtcaccgggct

SEQ ID NO: 1036885 - DNA, 25 bp, Homo sapien
ccctgggcagtgacatggtcactcc

SEQ ID NO: 1036886 - DNA, 25 bp, Homo sapien
ccaggatcatcctctctggggtctc

SEQ ID NO: 1036887 - DNA, 25 bp, Homo sapien
ctgtccagggttccccaggatcatc

SEQ ID NO: 1036888 - DNA, 25 bp, Homo sapien
cccaggatcatcctctctggggtct

SEQ ID NO: 1036889 - DNA, 25 bp, Homo sapien
ttccccaggatcatcctctctgggg

SEQ ID NO: 1036890 - DNA, 25 bp, Homo sapien
cgcacagcgccagggcctagtaaag

SEQ ID NO: 1036891 - DNA, 25 bp, Homo sapien
aaagacgctggcgagggctccattc

SEQ ID NO: 1036892 - DNA, 25 bp, Homo sapien
ggtgtttcctctggccggattggca

SEQ ID NO: 1036893 - DNA, 25 bp, Homo sapien
gtgcccggtgtttcctctggccgga

SEQ ID NO: 1036894 - DNA, 25 bp, Homo sapien
gtcccatgggcccttagagtaaatg

SEQ ID NO: 1036895 - DNA, 25 bp, Homo sapien
ggatagcccacagtatgtggcaggc

SEQ ID NO: 1036896 - DNA, 25 bp, Homo sapien
gtgtctgagtcctcccgtgtgcggc

SEQ ID NO: 1036897 - DNA, 25 bp, Homo sapien
gcctggtgccaatggggatagccca

SEQ ID NO: 1036898 - DNA, 25 bp, Homo sapien
tcccgtggtccataaaatgatggtg

SEQ ID NO: 1036899 - DNA, 25 bp, Homo sapien
ccataaaatgatggtgcgtggttgt

SEQ ID NO: 1036900 - DNA, 25 bp, Homo sapien
tttcccgtggtccataaaatgatgg

SEQ ID NO: 1036901 - DNA, 25 bp, Homo sapien
cttttcccgtggtccataaaatgat

SEQ ID NO: 1036902 - DNA, 25 bp, Homo sapien
tgctaagggcaactcaaaagtgttc

SEQ ID NO: 1036903 - DNA, 25 bp, Homo sapien
cgccctcaagggatgcctctggaaa

SEQ ID NO: 1036904 - DNA, 25 bp, Homo sapien
gagatgtaattaacccgtcgccatg

SEQ ID NO: 1036905 - DNA, 25 bp, Homo sapien
tttgtgatgccgtaaattaccgccg

SEQ ID NO: 1036906 - DNA, 25 bp, Homo sapien
tgtggccactgggacatcgttcatg

SEQ ID NO: 1036907 - DNA, 25 bp, Homo sapien
agtaccgcccatcagcaacaggtgg

SEQ ID NO: 1036908 - DNA, 25 bp, Homo sapien
tacgtgtgtgttctctaggacctga

SEQ ID NO: 1036909 - DNA, 25 bp, Homo sapien
ggcaggtgcgattctgaagcgtcca

SEQ ID NO: 1036910 - DNA, 25 bp, Homo sapien
cagccaggacgtgaggtctggtcct

SEQ ID NO: 1036911 - DNA, 25 bp, Homo sapien
tcacttcaccgctccggtgggctgg

SEQ ID NO: 1036912 - DNA, 25 bp, Homo sapien
tgaggtctggtccttgagttctgtg

SEQ ID NO: 1036913 - DNA, 25 bp, Homo sapien
tgtgtcctctctcacttcaccgctc

SEQ ID NO: 1036914 - DNA, 25 bp, Homo sapien
ctcgtgaatgcacccgtcccgcagc

SEQ ID NO: 1036915 - DNA, 25 bp, Homo sapien
cagctgcaggttgcaccgcacgctg

SEQ ID NO: 1036916 - DNA, 25 bp, Homo sapien
cccctcgtgaatgcacccgtcccgc

SEQ ID NO: 1036917 - DNA, 25 bp, Homo sapien
ctgcaggttgcaccgcacgctgtac

SEQ ID NO: 1036918 - DNA, 25 bp, Homo sapien
caggcatgagcgattgtgccctgaa

SEQ ID NO: 1036919 - DNA, 25 bp, Homo sapien
ttcctacccgcaatttgcagtttct

SEQ ID NO: 1036920 - DNA, 25 bp, Homo sapien
ttactaagcacttcctacccgcaat

SEQ ID NO: 1036921 - DNA, 25 bp, Homo sapien
ggggggaccctcagccctatcttca

SEQ ID NO: 1036922 - DNA, 25 bp, Homo sapien
tgtctcggaaccaccgagcagccgt

SEQ ID NO: 1036923 - DNA, 25 bp, Homo sapien
cagtgtgtctcggaaccaccgagca

SEQ ID NO: 1036924 - DNA, 25 bp, Homo sapien
tcggaaccaccgagcagccgtggtg

SEQ ID NO: 1036925 - DNA, 25 bp, Homo sapien
gagccagtgtgtctcggaaccaccg

SEQ ID NO: 1036926 - DNA, 25 bp, Homo sapien
gaggtattgacttgcagccgtggac

SEQ ID NO: 1036927 - DNA, 25 bp, Homo sapien
gcttctgtctgtttgggacatcacg

SEQ ID NO: 1036928 - DNA, 25 bp, Homo sapien
tgacagcctgatccacattattccc

SEQ ID NO: 1036929 - DNA, 25 bp, Homo sapien
gcatgaagcctaatcgtgtgcttga

SEQ ID NO: 1036930 - DNA, 25 bp, Homo sapien
catcggcagggatcctaatagtgtc

SEQ ID NO: 1036931 - DNA, 25 bp, Homo sapien
tagtgtcgccacacacaaaggtgtg

SEQ ID NO: 1036932 - DNA, 25 bp, Homo sapien
acaccatctgtgagggccaggttgg

SEQ ID NO: 1036933 - DNA, 25 bp, Homo sapien
caaaggtgtgaattgccccagtacc

SEQ ID NO: 1036934 - DNA, 25 bp, Homo sapien
ccgggtcatatagagcgtcgttggt

SEQ ID NO: 1036935 - DNA, 25 bp, Homo sapien
cgtgccgggtcatatagagcgtcgt

SEQ ID NO: 1036936 - DNA, 25 bp, Homo sapien
tcatatagagcgtcgttggtgagct

SEQ ID NO: 1036937 - DNA, 25 bp, Homo sapien
ccacgtgccgggtcatatagagcgt

SEQ ID NO: 1036938 - DNA, 25 bp, Homo sapien
gctaataattgtgcgaagggtgcgt

SEQ ID NO: 1036939 - DNA, 25 bp, Homo sapien
tacaacaactgcgtagccattggct

SEQ ID NO: 1036940 - DNA, 25 bp, Homo sapien
gaagggtgcgttggttgcagagtca

SEQ ID NO: 1036941 - DNA, 25 bp, Homo sapien
tcttttattaggtacaacaactgcg

SEQ ID NO: 1036942 - DNA, 25 bp, Homo sapien
gaagtcttaggcatcgtctccgtct

SEQ ID NO: 1036943 - DNA, 25 bp, Homo sapien
cggaacctagggagattagcaggct

SEQ ID NO: 1036944 - DNA, 25 bp, Homo sapien
tgtctaagggcccatggaggtttcg

SEQ ID NO: 1036945 - DNA, 25 bp, Homo sapien
tgcactttctgaccgggatccatgg

SEQ ID NO: 1036946 - DNA, 25 bp, Homo sapien
tgatgccagggtcgtggccctcctc

SEQ ID NO: 1036947 - DNA, 25 bp, Homo sapien
ggctccctgaatcctgtgcaggcct

SEQ ID NO: 1036948 - DNA, 25 bp, Homo sapien
tcagtcaagacacttgtgagattcc

SEQ ID NO: 1036949 - DNA, 25 bp, Homo sapien
gaccctcctgtgactagggttggag

SEQ ID NO: 1036950 - DNA, 25 bp, Homo sapien
cttggcagtcagtgccgctcccggt

SEQ ID NO: 1036951 - DNA, 25 bp, Homo sapien
gggcttggcagcagctaactgggct

SEQ ID NO: 1036952 - DNA, 25 bp, Homo sapien
ggctccccccaggtgtcacgtggct

SEQ ID NO: 1036953 - DNA, 25 bp, Homo sapien
tgccgctcccggtttgtctctgtct

SEQ ID NO: 1036954 - DNA, 25 bp, Homo sapien
ccggcacacctgaagatccgaggct

SEQ ID NO: 1036955 - DNA, 25 bp, Homo sapien
cggcacacctgaagatccgaggctg

SEQ ID NO: 1036956 - DNA, 25 bp, Homo sapien
agtgtccatgaatccaaaagctaga

SEQ ID NO: 1036957 - DNA, 25 bp, Homo sapien
gagaaacttggccgggactttctca

SEQ ID NO: 1036958 - DNA, 25 bp, Homo sapien
ccttcacattgagccgaatggtccc

SEQ ID NO: 1036959 - DNA, 25 bp, Homo sapien
gccgaatggtcccagacattgtagt

SEQ ID NO: 1036960 - DNA, 25 bp, Homo sapien
tgcttatcgatcactgcctgtctgg

SEQ ID NO: 1036961 - DNA, 25 bp, Homo sapien
tgtcaaaccagagatgccagtttcc

SEQ ID NO: 1036962 - DNA, 25 bp, Homo sapien
caggatggctggagcttcttgccac

SEQ ID NO: 1036963 - DNA, 25 bp, Homo sapien
ctggatgtgtctcgtgtcagagccc

SEQ ID NO: 1036964 - DNA, 25 bp, Homo sapien
gatgcggtggtttgaccaataagag

SEQ ID NO: 1036965 - DNA, 25 bp, Homo sapien
ccgcatgagctcagaggattttgtg

SEQ ID NO: 1036966 - DNA, 25 bp, Homo sapien
gggctgaatggcaattcttccttcc

SEQ ID NO: 1036967 - DNA, 25 bp, Homo sapien
ggaatgatgcggtggtttgaccaat

SEQ ID NO: 1036968 - DNA, 25 bp, Homo sapien
aatgccaagagctgtgaacgctgcg

SEQ ID NO: 1036969 - DNA, 25 bp, Homo sapien
tgtacaaattatcatcccgaggatg

SEQ ID NO: 1036970 - DNA, 25 bp, Homo sapien
tagggtctgcccaggaatatcacga

SEQ ID NO: 1036971 - DNA, 25 bp, Homo sapien
gacggaataaatacggtgtcacctg

SEQ ID NO: 1036972 - DNA, 25 bp, Homo sapien
cctctccttggggtaatgagaaaat

SEQ ID NO: 1036973 - DNA, 25 bp, Homo sapien
cagagcgttgtcgtgggccttttgc

SEQ ID NO: 1036974 - DNA, 25 bp, Homo sapien
gctaagtgctttgagatattcagat

SEQ ID NO: 1036975 - DNA, 25 bp, Homo sapien
ttgtaccattttcccgaatgacctc

SEQ ID NO: 1036976 - DNA, 25 bp, Homo sapien
cctgcctggggtcctcctggtgttt

SEQ ID NO: 1036977 - DNA, 25 bp, Homo sapien
ctggggtcctcctggtgtttttgct

SEQ ID NO: 1036978 - DNA, 25 bp, Homo sapien
ggtcctcctggtgtttttgctgctg

SEQ ID NO: 1036979 - DNA, 25 bp, Homo sapien
ctgcctggggtcctcctggtgtttt

SEQ ID NO: 1036980 - DNA, 25 bp, Homo sapien
cttagaggatctgcgaggttctgca

SEQ ID NO: 1036981 - DNA, 25 bp, Homo sapien
tggacactaggtggcttagaggatc

SEQ ID NO: 1036982 - DNA, 25 bp, Homo sapien
gtgggctcctctgtgcgatgcctct

SEQ ID NO: 1036983 - DNA, 25 bp, Homo sapien
aggttctgcagagcggcagcggctg

SEQ ID NO: 1036984 - DNA, 25 bp, Homo sapien
cccgagcgcaaagcgccgggtttgc

SEQ ID NO: 1036985 - DNA, 25 bp, Homo sapien
ggctgcgctccacgtgcccggaggg

SEQ ID NO: 1036986 - DNA, 25 bp, Homo sapien
ggcgctgggccgttcggcgcccgag

SEQ ID NO: 1036987 - DNA, 25 bp, Homo sapien
tgagccggggctgcgctccacgtgc

SEQ ID NO: 1036988 - DNA, 25 bp, Homo sapien
tagtatttcataatcaccccattcg

SEQ ID NO: 1036989 - DNA, 25 bp, Homo sapien
tttgttgtgaatgaacagcgaggtg

SEQ ID NO: 1036990 - DNA, 25 bp, Homo sapien
tttcctccccacgaagcgccgagaa

SEQ ID NO: 1036991 - DNA, 25 bp, Homo sapien
gaacagcgaggtgaaatagtatttc

SEQ ID NO: 1036992 - DNA, 25 bp, Homo sapien
aaccataactgtcacaccaaaggca

SEQ ID NO: 1036993 - DNA, 25 bp, Homo sapien
ggttgttggtaaccataactgtcac

SEQ ID NO: 1036994 - DNA, 25 bp, Homo sapien
taactgtcacaccaaaggcacttgt

SEQ ID NO: 1036995 - DNA, 25 bp, Homo sapien
caaaggcacttgtcttcatgacatt

SEQ ID NO: 1036996 - DNA, 25 bp, Homo sapien
gcagcccctgcgatcttgcttttcc

SEQ ID NO: 1036997 - DNA, 25 bp, Homo sapien
gagcctgttgcaaagtcggacaaac

SEQ ID NO: 1036998 - DNA, 25 bp, Homo sapien
caaagtcggacaaaccctggcttgc

SEQ ID NO: 1036999 - DNA, 25 bp, Homo sapien
ccagtactggggctcagtgcagccc

SEQ ID NO: 1037000 - DNA, 25 bp, Homo sapien
cacgaggtcatgcaactaggaagcg

SEQ ID NO: 1037001 - DNA, 25 bp, Homo sapien
tattgagcgatcactaggtgccagg

SEQ ID NO: 1037002 - DNA, 25 bp, Homo sapien
tgccaggcaccataagaggagcttt

SEQ ID NO: 1037003 - DNA, 25 bp, Homo sapien
cacaacaggccttgcggagattcat

SEQ ID NO: 1037004 - DNA, 25 bp, Homo sapien
tgatgtcctacacgcaggaaaagcc

SEQ ID NO: 1037005 - DNA, 25 bp, Homo sapien
gggaccaggtgatgtcctacacgca

SEQ ID NO: 1037006 - DNA, 25 bp, Homo sapien
gacagggaccaggtgatgtcctaca

SEQ ID NO: 1037007 - DNA, 25 bp, Homo sapien
caggtgatgtcctacacgcaggaaa

SEQ ID NO: 1037008 - DNA, 25 bp, Homo sapien
gtccccagagcacctccagggaggg

SEQ ID NO: 1037009 - DNA, 25 bp, Homo sapien
tgggtccccagagcacctccaggga

SEQ ID NO: 1037010 - DNA, 25 bp, Homo sapien
ccagggaggggacgcagcctcccat

SEQ ID NO: 1037011 - DNA, 25 bp, Homo sapien
tccagggaggggacgcagcctccca

SEQ ID NO: 1037012 - DNA, 25 bp, Homo sapien
agggtccctgatgcttagagggcct

SEQ ID NO: 1037013 - DNA, 25 bp, Homo sapien
cctgatgcttagagggcctgggccc

SEQ ID NO: 1037014 - DNA, 25 bp, Homo sapien
ggaagggtctcacaaccgctgccca

SEQ ID NO: 1037015 - DNA, 25 bp, Homo sapien
ggacacccacggtagtgtcctcagc

SEQ ID NO: 1037016 - DNA, 25 bp, Homo sapien
tctgcccccagtgtgtgaattccca

SEQ ID NO: 1037017 - DNA, 25 bp, Homo sapien
gatggagtgtctgcccccagtgtgt

SEQ ID NO: 1037018 - DNA, 25 bp, Homo sapien
caggggatggagtgtctgcccccag

SEQ ID NO: 1037019 - DNA, 25 bp, Homo sapien
gtctgcccccagtgtgtgaattccc

SEQ ID NO: 1037020 - DNA, 25 bp, Homo sapien
tattcttgagtgtgctgaaatcttc

SEQ ID NO: 1037021 - DNA, 25 bp, Homo sapien
tcttgagtgtgctgaaatcttctga

SEQ ID NO: 1037022 - DNA, 25 bp, Homo sapien
gtgtgctgaaatcttctgaccctcc

SEQ ID NO: 1037023 - DNA, 25 bp, Homo sapien
ctgctattcttgagtgtgctgaaat

SEQ ID NO: 1037024 - DNA, 25 bp, Homo sapien
gcaaagctgccttgggtgccttgct

SEQ ID NO: 1037025 - DNA, 25 bp, Homo sapien
agcaaagctgccttgggtgccttgc

SEQ ID NO: 1037026 - DNA, 25 bp, Homo sapien
aaagctgccttgggtgccttgctac

SEQ ID NO: 1037027 - DNA, 25 bp, Homo sapien
caaagctgccttgggtgccttgcta

SEQ ID NO: 1037028 - DNA, 25 bp, Homo sapien
cggagccagtggtgaggtcgagcaa

SEQ ID NO: 1037029 - DNA, 25 bp, Homo sapien
cagtggtgaggtcgagcaaactgga

SEQ ID NO: 1037030 - DNA, 25 bp, Homo sapien
agtggtgaggtcgagcaaactggag

SEQ ID NO: 1037031 - DNA, 25 bp, Homo sapien
agccagtggtgaggtcgagcaaact

SEQ ID NO: 1037032 - DNA, 25 bp, Homo sapien
caggaagcggtaattgaggggtaga

SEQ ID NO: 1037033 - DNA, 25 bp, Homo sapien
ttagaaaatcaacaccgccaggaag

SEQ ID NO: 1037034 - DNA, 25 bp, Homo sapien
agaaaatcaacaccgccaggaagtg

SEQ ID NO: 1037035 - DNA, 25 bp, Homo sapien
ggatgtgcccgtgctgcctttgttc

SEQ ID NO: 1037036 - DNA, 25 bp, Homo sapien
cttgcttggccttgaccgtgtggga

SEQ ID NO: 1037037 - DNA, 25 bp, Homo sapien
ggttaacatacacccacacgcatgc

SEQ ID NO: 1037038 - DNA, 25 bp, Homo sapien
gacgtgcggctgtctgggccaaggg

SEQ ID NO: 1037039 - DNA, 25 bp, Homo sapien
tgggagcctgtggacgtgcggctgt

SEQ ID NO: 1037040 - DNA, 25 bp, Homo sapien
ccaggcaggcagcgaaagtgagcca

SEQ ID NO: 1037041 - DNA, 25 bp, Homo sapien
gctcaagacctacttctgccttttg

SEQ ID NO: 1037042 - DNA, 25 bp, Homo sapien
acccaagtctagctcaagacctact

SEQ ID NO: 1037043 - DNA, 25 bp, Homo sapien
tttgcaaaccctgcagccgtaaggg

SEQ ID NO: 1037044 - DNA, 25 bp, Homo sapien
tagctggggatgaactctccacacc

SEQ ID NO: 1037045 - DNA, 25 bp, Homo sapien
ggaaactgacactcatggtggtcga

SEQ ID NO: 1037046 - DNA, 25 bp, Homo sapien
taacgtgcttcccttgttggttctc

SEQ ID NO: 1037047 - DNA, 25 bp, Homo sapien
atgttttcgtgctgtaacgtgcttc

SEQ ID NO: 1037048 - DNA, 25 bp, Homo sapien
gaaactgacactcatggtggtcgaa

SEQ ID NO: 1037049 - DNA, 25 bp, Homo sapien
atggcaggaattctggctggccctt

SEQ ID NO: 1037050 - DNA, 25 bp, Homo sapien
tctgcccgctgatcagggggccagt

SEQ ID NO: 1037051 - DNA, 25 bp, Homo sapien
gcccttgttctgcccgctgatcagg

SEQ ID NO: 1037052 - DNA, 25 bp, Homo sapien
caagcatatccctgcaatggcagga

SEQ ID NO: 1037053 - DNA, 25 bp, Homo sapien
ttgatggtgtgagcagaaagatcca

SEQ ID NO: 1037054 - DNA, 25 bp, Homo sapien
tcagaagaacatccttgatggtgtg

SEQ ID NO: 1037055 - DNA, 25 bp, Homo sapien
tgaggggctcgtgtacctgcagcaa

SEQ ID NO: 1037056 - DNA, 25 bp, Homo sapien
acagtgaggggctcgtgtacctgca

SEQ ID NO: 1037057 - DNA, 25 bp, Homo sapien
caggcttgaagaacaggcgactgcg

SEQ ID NO: 1037058 - DNA, 25 bp, Homo sapien
cacaggcatcttaggggacactcca

SEQ ID NO: 1037059 - DNA, 25 bp, Homo sapien
caggcgactgcgtgcaggctgatcc

SEQ ID NO: 1037060 - DNA, 25 bp, Homo sapien
cctgttagcaggactggcaggcttg

SEQ ID NO: 1037061 - DNA, 25 bp, Homo sapien
gcgaatatgatgtttaattagcaat

SEQ ID NO: 1037062 - DNA, 25 bp, Homo sapien
atggaagggaggccattaggaaatt

SEQ ID NO: 1037063 - DNA, 25 bp, Homo sapien
gcaataccaataaattaataggaga

SEQ ID NO: 1037064 - DNA, 25 bp, Homo sapien
taataggagaatcttgctgcggttc

SEQ ID NO: 1037065 - DNA, 25 bp, Homo sapien
acttccagccgtccccagatgtacc

SEQ ID NO: 1037066 - DNA, 25 bp, Homo sapien
ggacaagagcacagggaaggtcttc

SEQ ID NO: 1037067 - DNA, 25 bp, Homo sapien
agggaaggtcttccgcatcgtcaaa

SEQ ID NO: 1037068 - DNA, 25 bp, Homo sapien
tcttccgcatcgtcaaagtccttgc

SEQ ID NO: 1037069 - DNA, 25 bp, Homo sapien
gatgctccggaaaaacaggccagag

SEQ ID NO: 1037070 - DNA, 25 bp, Homo sapien
gagccctctccgtttgtcacatttt

SEQ ID NO: 1037071 - DNA, 25 bp, Homo sapien
gcctggcacaggtgcgtgtgtagtg

SEQ ID NO: 1037072 - DNA, 25 bp, Homo sapien
caggtgcgtgtgtagtggtggtgga

SEQ ID NO: 1037073 - DNA, 25 bp, Homo sapien
cagggaacatgagtcctccctcact

SEQ ID NO: 1037074 - DNA, 25 bp, Homo sapien
caggcctgccgaactccctcgggac

SEQ ID NO: 1037075 - DNA, 25 bp, Homo sapien
ctccctcacttagtctgaattctgc

SEQ ID NO: 1037076 - DNA, 25 bp, Homo sapien
gggactcctgccctacggccaggcc

SEQ ID NO: 1037077 - DNA, 25 bp, Homo sapien
ggtggatctcgggctgcctctccag

SEQ ID NO: 1037078 - DNA, 25 bp, Homo sapien
gaggctctgggtggatctcgggctg

SEQ ID NO: 1037079 - DNA, 25 bp, Homo sapien
aggctctgggtggatctcgggctgc

SEQ ID NO: 1037080 - DNA, 25 bp, Homo sapien
gtggatctcgggctgcctctccagg

SEQ ID NO: 1037081 - DNA, 25 bp, Homo sapien
ggacacccgccatgccccggtcctc

SEQ ID NO: 1037082 - DNA, 25 bp, Homo sapien
gcccccgaaggagtcaggttctgag

SEQ ID NO: 1037083 - DNA, 25 bp, Homo sapien
tgctgacagaccactggggacaccc

SEQ ID NO: 1037084 - DNA, 25 bp, Homo sapien
gcacggaagggagggccggtgcctc

SEQ ID NO: 1037085 - DNA, 25 bp, Homo sapien
tcatcatcgggagattccaggcctc

SEQ ID NO: 1037086 - DNA, 25 bp, Homo sapien
tccaggcctcttatagggtggctcg

SEQ ID NO: 1037087 - DNA, 25 bp, Homo sapien
tattgaaaaatactaggatttagca

SEQ ID NO: 1037088 - DNA, 25 bp, Homo sapien
tatagggtggctcgatatgggtttc

SEQ ID NO: 1037089 - DNA, 25 bp, Homo sapien
tcctggtgtatgtgaactgggcaca

SEQ ID NO: 1037090 - DNA, 25 bp, Homo sapien
gatcctggtgtatgtgaactgggca

SEQ ID NO: 1037091 - DNA, 25 bp, Homo sapien
tatgccgagcttgggggctgcccct

SEQ ID NO: 1037092 - DNA, 25 bp, Homo sapien
gccaccgcaggctgtggctatgccg

SEQ ID NO: 1037093 - DNA, 25 bp, Homo sapien
cgtgccagtggccaggcctcatata

SEQ ID NO: 1037094 - DNA, 25 bp, Homo sapien
tcagcaccgtagaggcaccatgaat

SEQ ID NO: 1037095 - DNA, 25 bp, Homo sapien
ccactgcagaggaccgtcaggagga

SEQ ID NO: 1037096 - DNA, 25 bp, Homo sapien
acttgcagaccaaggcggtggcgca

SEQ ID NO: 1037097 - DNA, 25 bp, Homo sapien
cacccagagacggtagcaggaagca

SEQ ID NO: 1037098 - DNA, 25 bp, Homo sapien
gccccagccgccaaaaggtaatgag

SEQ ID NO: 1037099 - DNA, 25 bp, Homo sapien
gaagcaggatgattagaaccaaacg

SEQ ID NO: 1037100 - DNA, 25 bp, Homo sapien
caaaatccggcccagtgtggcatca

SEQ ID NO: 1037101 - DNA, 25 bp, Homo sapien
gccacaggccattagttttaggcgc

SEQ ID NO: 1037102 - DNA, 25 bp, Homo sapien
ttttaggcgctgtcagagacacctg

SEQ ID NO: 1037103 - DNA, 25 bp, Homo sapien
ggatagagcccattaaacatttctg

SEQ ID NO: 1037104 - DNA, 25 bp, Homo sapien
tcagagaattagtcacagcggccag

SEQ ID NO: 1037105 - DNA, 25 bp, Homo sapien
cttccttccctgcttagagttctcc

SEQ ID NO: 1037106 - DNA, 25 bp, Homo sapien
ttccctgcttagagttctccagggc

SEQ ID NO: 1037107 - DNA, 25 bp, Homo sapien
ccttccctgcttagagttctccagg

SEQ ID NO: 1037108 - DNA, 25 bp, Homo sapien
cagggcttcccacaattttttatgg

SEQ ID NO: 1037109 - DNA, 25 bp, Homo sapien
cgtaacgtagcagatggtttcggcc

SEQ ID NO: 1037110 - DNA, 25 bp, Homo sapien
taacgtagcagatggtttcggccga

SEQ ID NO: 1037111 - DNA, 25 bp, Homo sapien
ccccacgtaacgtagcagatggttt

SEQ ID NO: 1037112 - DNA, 25 bp, Homo sapien
tagcagatggtttcggccgaccaac

SEQ ID NO: 1037113 - DNA, 25 bp, Homo sapien
cctagcgccattttgtgggagcgaa

SEQ ID NO: 1037114 - DNA, 25 bp, Homo sapien
gccctagcgccattttgtgggagcg

SEQ ID NO: 1037115 - DNA, 25 bp, Homo sapien
cggccctagcgccattttgtgggag

SEQ ID NO: 1037116 - DNA, 25 bp, Homo sapien
ggccctagcgccattttgtgggagc

SEQ ID NO: 1037117 - DNA, 25 bp, Homo sapien
ccctagcgccattttgtgggagcga

SEQ ID NO: 1037118 - DNA, 25 bp, Homo sapien
tagcgccattttgtgggagcgaagc

SEQ ID NO: 1037119 - DNA, 25 bp, Homo sapien
cgctcccacaaaatggcgctagggc

SEQ ID NO: 1037120 - DNA, 25 bp, Homo sapien
gcttcgctcccacaaaatggcgcta

SEQ ID NO: 1037121 - DNA, 25 bp, Homo sapien
ttcgctcccacaaaatggcgctagg

SEQ ID NO: 1037122 - DNA, 25 bp, Homo sapien
tcgctcccacaaaatggcgctaggg

SEQ ID NO: 1037123 - DNA, 25 bp, Homo sapien
gctcccacaaaatggcgctagggcc

SEQ ID NO: 1037124 - DNA, 25 bp, Homo sapien
ctcccacaaaatggcgctagggccg

SEQ ID NO: 1037125 - DNA, 25 bp, Homo sapien
tggctgggctgcgcttgggtccgtc

SEQ ID NO: 1037126 - DNA, 25 bp, Homo sapien
gtggctgggctgcgcttgggtccgt

SEQ ID NO: 1037127 - DNA, 25 bp, Homo sapien
acggacccaagcgcagcccagccac

SEQ ID NO: 1037128 - DNA, 25 bp, Homo sapien
gacggacccaagcgcagcccagcca

SEQ ID NO: 1037129 - DNA, 25 bp, Homo sapien
gctgcgcttgggtccgtcgctgctt

SEQ ID NO: 1037130 - DNA, 25 bp, Homo sapien
tcgctgcttcggtgtccctgtcggg

SEQ ID NO: 1037131 - DNA, 25 bp, Homo sapien
gtcgggcttcccagcagcggcctag

SEQ ID NO: 1037132 - DNA, 25 bp, Homo sapien
ttcggtgtccctgtcgggcttccca

SEQ ID NO: 1037133 - DNA, 25 bp, Homo sapien
ttgggtccgtcgctgcttcggtgtc

SEQ ID NO: 1037134 - DNA, 25 bp, Homo sapien
gtggctgggctgcgcttgggtccgt

SEQ ID NO: 1037135 - DNA, 25 bp, Homo sapien
ctaggccgctgctgggaagcccgac

SEQ ID NO: 1037136 - DNA, 25 bp, Homo sapien
accgaagcagcgacggacccaagcg

SEQ ID NO: 1037137 - DNA, 25 bp, Homo sapien
tgggaagcccgacagggacaccgaa

SEQ ID NO: 1037138 - DNA, 25 bp, Homo sapien
acagggacaccgaagcagcgacgga

SEQ ID NO: 1037139 - DNA, 25 bp, Homo sapien
aagcccgacagggacaccgaagcag

SEQ ID NO: 1037140 - DNA, 25 bp, Homo sapien
gaagcagcgacggacccaagcgcag

SEQ ID NO: 1037141 - DNA, 25 bp, Homo sapien
gaaataccatcggaagacgatggga

SEQ ID NO: 1037142 - DNA, 25 bp, Homo sapien
ttgaaataccatcggaagacgatgg

SEQ ID NO: 1037143 - DNA, 25 bp, Homo sapien
aataccatcggaagacgatgggacg

SEQ ID NO: 1037144 - DNA, 25 bp, Homo sapien
taccatcggaagacgatgggacggt

SEQ ID NO: 1037145 - DNA, 25 bp, Homo sapien
catcggaagacgatgggacggtgct

SEQ ID NO: 1037146 - DNA, 25 bp, Homo sapien
attgaaataccatcggaagacgatg

SEQ ID NO: 1037147 - DNA, 25 bp, Homo sapien
catcgtcttccgatggtatttcaat

SEQ ID NO: 1037148 - DNA, 25 bp, Homo sapien
accgtcccatcgtcttccgatggta

SEQ ID NO: 1037149 - DNA, 25 bp, Homo sapien
agcaccgtcccatcgtcttccgatg

SEQ ID NO: 1037150 - DNA, 25 bp, Homo sapien
ccatcgtcttccgatggtatttcaa

SEQ ID NO: 1037151 - DNA, 25 bp, Homo sapien
cgtcccatcgtcttccgatggtatt

SEQ ID NO: 1037152 - DNA, 25 bp, Homo sapien
tcccatcgtcttccgatggtatttc

SEQ ID NO: 1037153 - DNA, 25 bp, Homo sapien
ggtttttgtaatcatgctgaagtgt

SEQ ID NO: 1037154 - DNA, 25 bp, Homo sapien
ttttgtaatcatgctgaagtgtgtt

SEQ ID NO: 1037155 - DNA, 25 bp, Homo sapien
gtttttgtaatcatgctgaagtgtg

SEQ ID NO: 1037156 - DNA, 25 bp, Homo sapien
tttttgtaatcatgctgaagtgtgt

SEQ ID NO: 1037157 - DNA, 25 bp, Homo sapien
tggtttttgtaatcatgctgaagtg

SEQ ID NO: 1037158 - DNA, 25 bp, Homo sapien
aacacacttcagcatgattacaaaa

SEQ ID NO: 1037159 - DNA, 25 bp, Homo sapien
cacttcagcatgattacaaaaacca

SEQ ID NO: 1037160 - DNA, 25 bp, Homo sapien
cacacttcagcatgattacaaaaac

SEQ ID NO: 1037161 - DNA, 25 bp, Homo sapien
acacttcagcatgattacaaaaacc

SEQ ID NO: 1037162 - DNA, 25 bp, Homo sapien
acacacttcagcatgattacaaaaa

SEQ ID NO: 1037163 - DNA, 25 bp, Homo sapien
tgtaatcatgctgaagtgtgttcag

SEQ ID NO: 1037164 - DNA, 25 bp, Homo sapien
ggtttttgtaatcatgctgaagtgt

SEQ ID NO: 1037165 - DNA, 25 bp, Homo sapien
ttttgtaatcatgctgaagtgtgtt

SEQ ID NO: 1037166 - DNA, 25 bp, Homo sapien
gtttttgtaatcatgctgaagtgtg

SEQ ID NO: 1037167 - DNA, 25 bp, Homo sapien
tttttgtaatcatgctgaagtgtgt

SEQ ID NO: 1037168 - DNA, 25 bp, Homo sapien
tggtttttgtaatcatgctgaagtg

SEQ ID NO: 1037169 - DNA, 25 bp, Homo sapien
ctgaacacacttcagcatgattaca

SEQ ID NO: 1037170 - DNA, 25 bp, Homo sapien
tgaacacacttcagcatgattacaa

SEQ ID NO: 1037171 - DNA, 25 bp, Homo sapien
aacacacttcagcatgattacaaaa

SEQ ID NO: 1037172 - DNA, 25 bp, Homo sapien
cacttcagcatgattacaaaaacca

SEQ ID NO: 1037173 - DNA, 25 bp, Homo sapien
cacacttcagcatgattacaaaaac

SEQ ID NO: 1037174 - DNA, 25 bp, Homo sapien
acacttcagcatgattacaaaaacc

SEQ ID NO: 1037175 - DNA, 25 bp, Homo sapien
tgtgtctcatccatggatcttagcc

SEQ ID NO: 1037176 - DNA, 25 bp, Homo sapien
cagtgttagacaagtttggaagacc

SEQ ID NO: 1037177 - DNA, 25 bp, Homo sapien
tggtggcagaatgtctcctgaaact

SEQ ID NO: 1037178 - DNA, 25 bp, Homo sapien
gaagaccacgagtctaaatttatgg

SEQ ID NO: 1037179 - DNA, 25 bp, Homo sapien
gccaagttgatgataaatttcagga

SEQ ID NO: 1037180 - DNA, 25 bp, Homo sapien
atggatcttagcctcttttggtggc

SEQ ID NO: 1037181 - DNA, 25 bp, Homo sapien
tttaaaatgatctacaatccccagt

SEQ ID NO: 1037182 - DNA, 25 bp, Homo sapien
agtttcaggagacattctgccacca

SEQ ID NO: 1037183 - DNA, 25 bp, Homo sapien
gccaccaaaagaggctaagatccat

SEQ ID NO: 1037184 - DNA, 25 bp, Homo sapien
ggtcttccaaacttgtctaacactg

SEQ ID NO: 1037185 - DNA, 25 bp, Homo sapien
cataaatttagactcgtggtcttcc

SEQ ID NO: 1037186 - DNA, 25 bp, Homo sapien
gctaagatccatggatgagacacac

SEQ ID NO: 1037187 - DNA, 25 bp, Homo sapien
gattactttaagctgaggtcgcgcc

SEQ ID NO: 1037188 - DNA, 25 bp, Homo sapien
ggcgcgacctcagcttaaagtaatc

SEQ ID NO: 1037189 - DNA, 25 bp, Homo sapien
cacaaaatctctggatgtggtggtg

SEQ ID NO: 1037190 - DNA, 25 bp, Homo sapien
tactttaagctgaggtcgcgccgct

SEQ ID NO: 1037191 - DNA, 25 bp, Homo sapien
cgctacactccaacctgtgacagag

SEQ ID NO: 1037192 - DNA, 25 bp, Homo sapien
cctgggaggcggagattactttaag

SEQ ID NO: 1037193 - DNA, 25 bp, Homo sapien
ttaagctgaggtcgcgccgctacac

SEQ ID NO: 1037194 - DNA, 25 bp, Homo sapien
gattactttaagctgaggtcgcgcc

SEQ ID NO: 1037195 - DNA, 25 bp, Homo sapien
ggcgcgacctcagcttaaagtaatc

SEQ ID NO: 1037196 - DNA, 25 bp, Homo sapien
cacaggttggagtgtagcggcgcga

SEQ ID NO: 1037197 - DNA, 25 bp, Homo sapien
gtgtagcggcgcgacctcagcttaa

SEQ ID NO: 1037198 - DNA, 25 bp, Homo sapien
gcttaaagtaatctccgcctcccag

SEQ ID NO: 1037199 - DNA, 25 bp, Homo sapien
gctctgtcacaggttggagtgtagc

SEQ ID NO: 1037200 - DNA, 25 bp, Homo sapien
tagcggcgcgacctcagcttaaagt

SEQ ID NO: 1037201 - DNA, 25 bp, Homo sapien
ttgcagagaggggagattgcgccac

SEQ ID NO: 1037202 - DNA, 25 bp, Homo sapien
gcagagaggggagattgcgccactg

SEQ ID NO: 1037203 - DNA, 25 bp, Homo sapien
gttgcagagaggggagattgcgcca

SEQ ID NO: 1037204 - DNA, 25 bp, Homo sapien
tgcagagaggggagattgcgccact

SEQ ID NO: 1037205 - DNA, 25 bp, Homo sapien
agaggttgcagagaggggagattgc

SEQ ID NO: 1037206 - DNA, 25 bp, Homo sapien
aggttgcagagaggggagattgcgc

SEQ ID NO: 1037207 - DNA, 25 bp, Homo sapien
cagtggcgcaatctcccctctctgc

SEQ ID NO: 1037208 - DNA, 25 bp, Homo sapien
tggcgcaatctcccctctctgcaac

SEQ ID NO: 1037209 - DNA, 25 bp, Homo sapien
gcaatctcccctctctgcaacctct

SEQ ID NO: 1037210 - DNA, 25 bp, Homo sapien
gtggcgcaatctcccctctctgcaa

SEQ ID NO: 1037211 - DNA, 25 bp, Homo sapien
agtggcgcaatctcccctctctgca

SEQ ID NO: 1037212 - DNA, 25 bp, Homo sapien
gcgcaatctcccctctctgcaacct

SEQ ID NO: 1037213 - DNA, 25 bp, Homo sapien
ccgcgcccagccagttatgtttttt

SEQ ID NO: 1037214 - DNA, 25 bp, Homo sapien
tatagacggcgtttcaccatcttgg

SEQ ID NO: 1037215 - DNA, 25 bp, Homo sapien
gcgcccagccagttatgttttttta

SEQ ID NO: 1037216 - DNA, 25 bp, Homo sapien
cgcgcccagccagttatgttttttt

SEQ ID NO: 1037217 - DNA, 25 bp, Homo sapien
accgcgcccagccagttatgttttt

SEQ ID NO: 1037218 - DNA, 25 bp, Homo sapien
tagacggcgtttcaccatcttggcc

SEQ ID NO: 1037219 - DNA, 25 bp, Homo sapien
taaaaaaacataactggctgggcgc

SEQ ID NO: 1037220 - DNA, 25 bp, Homo sapien
aaaaaacataactggctgggcgcgg

SEQ ID NO: 1037221 - DNA, 25 bp, Homo sapien
aaaaacataactggctgggcgcggt

SEQ ID NO: 1037222 - DNA, 25 bp, Homo sapien
ccaagatggtgaaacgccgtctata

SEQ ID NO: 1037223 - DNA, 25 bp, Homo sapien
aaaaaaacataactggctgggcgcg

SEQ ID NO: 1037224 - DNA, 25 bp, Homo sapien
ggccaagatggtgaaacgccgtcta

SEQ ID NO: 1037225 - DNA, 25 bp, Homo sapien
tccgatttaatagtgttgggtctcc

SEQ ID NO: 1037226 - DNA, 25 bp, Homo sapien
ggagacccaacactattaaatcgga

SEQ ID NO: 1037227 - DNA, 25 bp, Homo sapien
cttaagactggtcattcaaaggggt

SEQ ID NO: 1037228 - DNA, 25 bp, Homo sapien
cgttttacggaatatgaaacacaag

SEQ ID NO: 1037229 - DNA, 25 bp, Homo sapien
tgttcgttttacggaatatgaaaca

SEQ ID NO: 1037230 - DNA, 25 bp, Homo sapien
tcgttttacggaatatgaaacacaa

SEQ ID NO: 1037231 - DNA, 25 bp, Homo sapien
tgtttcatattccgtaaaacgaaca

SEQ ID NO: 1037232 - DNA, 25 bp, Homo sapien
acccctttgaatgaccagtcttaag

SEQ ID NO: 1037233 - DNA, 25 bp, Homo sapien
ttgtgtttcatattccgtaaaacga

SEQ ID NO: 1037234 - DNA, 25 bp, Homo sapien
cttgtgtttcatattccgtaaaacg

SEQ ID NO: 1037235 - DNA, 25 bp, Homo sapien
cacagcgacatatgatagatggacg

SEQ ID NO: 1037236 - DNA, 25 bp, Homo sapien
gtcaagaaagatcttaagactggtc

SEQ ID NO: 1037237 - DNA, 25 bp, Homo sapien
cgttttacggaatatgaaacacaag

SEQ ID NO: 1037238 - DNA, 25 bp, Homo sapien
gatggtgtgactgcaaacttcctaa

SEQ ID NO: 1037239 - DNA, 25 bp, Homo sapien
gatcttaagactggtcattcaaagg

SEQ ID NO: 1037240 - DNA, 25 bp, Homo sapien
tagatggacgatggtgtgactgcaa

SEQ ID NO: 1037241 - DNA, 25 bp, Homo sapien
gaccagtcttaagatctttcttgac

SEQ ID NO: 1037242 - DNA, 25 bp, Homo sapien
taggaagtttgcagtcacaccatcg

SEQ ID NO: 1037243 - DNA, 25 bp, Homo sapien
ccatctatcatatgtcgctgtgaca

SEQ ID NO: 1037244 - DNA, 25 bp, Homo sapien
tcatattccgtaaaacgaacaaagc

SEQ ID NO: 1037245 - DNA, 25 bp, Homo sapien
acccctttgaatgaccagtcttaag

SEQ ID NO: 1037246 - DNA, 25 bp, Homo sapien
cttgtgtttcatattccgtaaaacg

SEQ ID NO: 1037247 - DNA, 25 bp, Homo sapien
ccaagatgagcctttgagaagcaga

SEQ ID NO: 1037248 - DNA, 25 bp, Homo sapien
acagaggacatgactgaggatgagc

SEQ ID NO: 1037249 - DNA, 25 bp, Homo sapien
ggcgctgtacagaggacatgactga

SEQ ID NO: 1037250 - DNA, 25 bp, Homo sapien
gatggatgtcttcatccccaagcca

SEQ ID NO: 1037251 - DNA, 25 bp, Homo sapien
gcgggagttcttctctcagtacggg

SEQ ID NO: 1037252 - DNA, 25 bp, Homo sapien
gatgagctgcgggagttcttctctc

SEQ ID NO: 1037253 - DNA, 25 bp, Homo sapien
tcagtcatgtcctctgtacagcgcc

SEQ ID NO: 1037254 - DNA, 25 bp, Homo sapien
tctgcaaatgtaacaaaggcaaagg

SEQ ID NO: 1037255 - DNA, 25 bp, Homo sapien
tcacatccccgtactgagagaagaa

SEQ ID NO: 1037256 - DNA, 25 bp, Homo sapien
tgtacagcgccccacaaacactttt

SEQ ID NO: 1037257 - DNA, 25 bp, Homo sapien
gatgaagacatccatcacatccccg

SEQ ID NO: 1037258 - DNA, 25 bp, Homo sapien
tgagagaagaactcccgcagctcat

SEQ ID NO: 1037259 - DNA, 25 bp, Homo sapien
tgaaaatcgactgaaatatcactgc

SEQ ID NO: 1037260 - DNA, 25 bp, Homo sapien
gaatcagtggtttaatcttctttgt

SEQ ID NO: 1037261 - DNA, 25 bp, Homo sapien
tcgactgaaatatcactgctgctgt

SEQ ID NO: 1037262 - DNA, 25 bp, Homo sapien
gcctatgtcttttgaaaatcgactg

SEQ ID NO: 1037263 - DNA, 25 bp, Homo sapien
tgttgtctaggctgccaggctagtc

SEQ ID NO: 1037264 - DNA, 25 bp, Homo sapien
gcttgtaatctaagttttgttgcta

SEQ ID NO: 1037265 - DNA, 25 bp, Homo sapien
tagcaacaaaacttagattacaagc

SEQ ID NO: 1037266 - DNA, 25 bp, Homo sapien
cagtcgattttcaaaagacataggc

SEQ ID NO: 1037267 - DNA, 25 bp, Homo sapien
gactagcctggcagcctagacaaca

SEQ ID NO: 1037268 - DNA, 25 bp, Homo sapien
cagcagcagtgatatttcagtcgat

SEQ ID NO: 1037269 - DNA, 25 bp, Homo sapien
gcaatgaacactcatttcatttaaa

SEQ ID NO: 1037270 - DNA, 25 bp, Homo sapien
acaaagaagattaaaccactgattc

SEQ ID NO: 1037271 - DNA, 25 bp, Homo sapien
aatcagcgttcatatatccaatgcc

SEQ ID NO: 1037272 - DNA, 25 bp, Homo sapien
gatcattaaaggaatcagcgttcat

SEQ ID NO: 1037273 - DNA, 25 bp, Homo sapien
aaaggaatcagcgttcatatatcca

SEQ ID NO: 1037274 - DNA, 25 bp, Homo sapien
gacttgatcattaaaggaatcagcg

SEQ ID NO: 1037275 - DNA, 25 bp, Homo sapien
cagcgttcatatatccaatgccgaa

SEQ ID NO: 1037276 - DNA, 25 bp, Homo sapien
attgcgcagtctctttgtggagagg

SEQ ID NO: 1037277 - DNA, 25 bp, Homo sapien
cctctccacaaagagactgcgcaat

SEQ ID NO: 1037278 - DNA, 25 bp, Homo sapien
cggcattggatatatgaacgctgat

SEQ ID NO: 1037279 - DNA, 25 bp, Homo sapien
taatgatcaagtcctctccacaaag

SEQ ID NO: 1037280 - DNA, 25 bp, Homo sapien
gaacgctgattcctttaatgatcaa

SEQ ID NO: 1037281 - DNA, 25 bp, Homo sapien
gatatatgaacgctgattcctttaa

SEQ ID NO: 1037282 - DNA, 25 bp, Homo sapien
ttcggcattggatatatgaacgctg

SEQ ID NO: 1037283 - DNA, 25 bp, Homo sapien
cacaatagcaatagacagttagaaa

SEQ ID NO: 1037284 - DNA, 25 bp, Homo sapien
caatagacagttagaaagaagtgga

SEQ ID NO: 1037285 - DNA, 25 bp, Homo sapien
caatagcaatagacagttagaaaga

SEQ ID NO: 1037286 - DNA, 25 bp, Homo sapien
agcacaatagcaatagacagttaga

SEQ ID NO: 1037287 - DNA, 25 bp, Homo sapien
tagcaatagacagttagaaagaagt

SEQ ID NO: 1037288 - DNA, 25 bp, Homo sapien
gcacaatagcaatagacagttagaa

SEQ ID NO: 1037289 - DNA, 25 bp, Homo sapien
tctttctaactgtctattgctattg

SEQ ID NO: 1037290 - DNA, 25 bp, Homo sapien
ttctaactgtctattgctattgtgc

SEQ ID NO: 1037291 - DNA, 25 bp, Homo sapien
aatcttccacttctttctaactgtc

SEQ ID NO: 1037292 - DNA, 25 bp, Homo sapien
tccacttctttctaactgtctattg

SEQ ID NO: 1037293 - DNA, 25 bp, Homo sapien
acttctttctaactgtctattgcta

SEQ ID NO: 1037294 - DNA, 25 bp, Homo sapien
tctaactgtctattgctattgtgct

SEQ ID NO: 1037295 - DNA, 25 bp, Homo sapien
gggaaacaatcaaggtagtaatatg

SEQ ID NO: 1037296 - DNA, 25 bp, Homo sapien
aacaatcaaggtagtaatatgggtg

SEQ ID NO: 1037297 - DNA, 25 bp, Homo sapien
acaatcaaggtagtaatatgggtgg

SEQ ID NO: 1037298 - DNA, 25 bp, Homo sapien
caatcaaggtagtaatatgggtggt

SEQ ID NO: 1037299 - DNA, 25 bp, Homo sapien
gaaacaatcaaggtagtaatatggg

SEQ ID NO: 1037300 - DNA, 25 bp, Homo sapien
ttgggaaacaatcaaggtagtaata

SEQ ID NO: 1037301 - DNA, 25 bp, Homo sapien
ccatattactaccttgattgtttcc

SEQ ID NO: 1037302 - DNA, 25 bp, Homo sapien
cccatattactaccttgattgtttc

SEQ ID NO: 1037303 - DNA, 25 bp, Homo sapien
accacccatattactaccttgattg

SEQ ID NO: 1037304 - DNA, 25 bp, Homo sapien
tattactaccttgattgtttcccaa

SEQ ID NO: 1037305 - DNA, 25 bp, Homo sapien
cacccatattactaccttgattgtt

SEQ ID NO: 1037306 - DNA, 25 bp, Homo sapien
catattactaccttgattgtttccc

SEQ ID NO: 1037307 - DNA, 25 bp, Homo sapien
tctgctattaccaaatccaccctga

SEQ ID NO: 1037308 - DNA, 25 bp, Homo sapien
tataagagttatttccagaaccgaa

SEQ ID NO: 1037309 - DNA, 25 bp, Homo sapien
tacccgatgggcctgactggttctg

SEQ ID NO: 1037310 - DNA, 25 bp, Homo sapien
gttctgctggctggctaacatgccc

SEQ ID NO: 1037311 - DNA, 25 bp, Homo sapien
taatgctgaacgcaccaaagttcat

SEQ ID NO: 1037312 - DNA, 25 bp, Homo sapien
actgctctgtagtgctgcctgggcg

SEQ ID NO: 1037313 - DNA, 25 bp, Homo sapien
gcagggtcgggcagtggttttaatg

SEQ ID NO: 1037314 - DNA, 25 bp, Homo sapien
tgcagggtcgggcagtggttttaat

SEQ ID NO: 1037315 - DNA, 25 bp, Homo sapien
cattaaaaccactgcccgaccctgc

SEQ ID NO: 1037316 - DNA, 25 bp, Homo sapien
attaaaaccactgcccgaccctgca

SEQ ID NO: 1037317 - DNA, 25 bp, Homo sapien
aggctttggctcaagcatggattct

SEQ ID NO: 1037318 - DNA, 25 bp, Homo sapien
gggatcagcatccaatgcagggtcg

SEQ ID NO: 1037319 - DNA, 25 bp, Homo sapien
cagtggttttaatggaggctttggc

SEQ ID NO: 1037320 - DNA, 25 bp, Homo sapien
ctctaattctggtgcagcaattggt

SEQ ID NO: 1037321 - DNA, 25 bp, Homo sapien
tggctctaattctggtgcagcaatt

SEQ ID NO: 1037322 - DNA, 25 bp, Homo sapien
agcatccaatgcagggtcgggcagt

SEQ ID NO: 1037323 - DNA, 25 bp, Homo sapien
actgcccgaccctgcattggatgct

SEQ ID NO: 1037324 - DNA, 25 bp, Homo sapien
gcattggatgctgatccccaaccaa

SEQ ID NO: 1037325 - DNA, 25 bp, Homo sapien
aattgctgcaccagaattagagcca

SEQ ID NO: 1037326 - DNA, 25 bp, Homo sapien
agaatccatgcttgagccaaagcct

SEQ ID NO: 1037327 - DNA, 25 bp, Homo sapien
tccccagccagaagacttagaatcc

SEQ ID NO: 1037328 - DNA, 25 bp, Homo sapien
accaattgctgcaccagaattagag

SEQ ID NO: 1037329 - DNA, 25 bp, Homo sapien
tgtttgcctgattggtaaaccaaca

SEQ ID NO: 1037330 - DNA, 25 bp, Homo sapien
tgcatgttcaaaacggaaaccattg

SEQ ID NO: 1037331 - DNA, 25 bp, Homo sapien
caaaattggtttgttcagtgtggag

SEQ ID NO: 1037332 - DNA, 25 bp, Homo sapien
cagtgtggagtatattcagcagtat

SEQ ID NO: 1037333 - DNA, 25 bp, Homo sapien
ccttttaggagatcatggtgtcaca

SEQ ID NO: 1037334 - DNA, 25 bp, Homo sapien
taatttgaaccccaccatatggatt

SEQ ID NO: 1037335 - DNA, 25 bp, Homo sapien
ggttgtggttggttggtatagaatg

SEQ ID NO: 1037336 - DNA, 25 bp, Homo sapien
ttgtggttggttggtatagaatggt

SEQ ID NO: 1037337 - DNA, 25 bp, Homo sapien
gttgtggttggttggtatagaatgg

SEQ ID NO: 1037338 - DNA, 25 bp, Homo sapien
cattctataccaaccaaccacaacc

SEQ ID NO: 1037339 - DNA, 25 bp, Homo sapien
ccattctataccaaccaaccacaac

SEQ ID NO: 1037340 - DNA, 25 bp, Homo sapien
accattctataccaaccaaccacaa

SEQ ID NO: 1037341 - DNA, 25 bp, Homo sapien
gaatatactccacactgaacaaacc

SEQ ID NO: 1037342 - DNA, 25 bp, Homo sapien
atgtagttctaatcaatggtttccg

SEQ ID NO: 1037343 - DNA, 25 bp, Homo sapien
gttggtttaccaatcaggcaaacag

SEQ ID NO: 1037344 - DNA, 25 bp, Homo sapien
tgtgacaccatgatctcctaaaagg

SEQ ID NO: 1037345 - DNA, 25 bp, Homo sapien
caatggtttccgttttgaacatgca

SEQ ID NO: 1037346 - DNA, 25 bp, Homo sapien
aagaattcacttgacaagtccaggg

SEQ ID NO: 1037347 - DNA, 25 bp, Homo sapien
ttcaaatgtttatggaagaagcact

SEQ ID NO: 1037348 - DNA, 25 bp, Homo sapien
tcaaatgtttatggaagaagcactt

SEQ ID NO: 1037349 - DNA, 25 bp, Homo sapien
agtgcttcttccataaacatttgaa

SEQ ID NO: 1037350 - DNA, 25 bp, Homo sapien
aagtgcttcttccataaacatttga

SEQ ID NO: 1037351 - DNA, 25 bp, Homo sapien
cacttcattgaaagtagtgctgtaa

SEQ ID NO: 1037352 - DNA, 25 bp, Homo sapien
tagtgctgtaaatattctgccatag

SEQ ID NO: 1037353 - DNA, 25 bp, Homo sapien
tgtttatggaagaagcacttcattg

SEQ ID NO: 1037354 - DNA, 25 bp, Homo sapien
aagtagtgctgtaaatattctgcca

SEQ ID NO: 1037355 - DNA, 25 bp, Homo sapien
gtagtgctgtaaatattctgccata

SEQ ID NO: 1037356 - DNA, 25 bp, Homo sapien
caaatgtttatggaagaagcacttc

SEQ ID NO: 1037357 - DNA, 25 bp, Homo sapien
caatgaagtgcttcttccataaaca

SEQ ID NO: 1037358 - DNA, 25 bp, Homo sapien
tggcagaatatttacagcactactt

SEQ ID NO: 1037359 - DNA, 25 bp, Homo sapien
ctatggcagaatatttacagcacta

SEQ ID NO: 1037360 - DNA, 25 bp, Homo sapien
tacagcactactttcaatgaagtgc

SEQ ID NO: 1037361 - DNA, 25 bp, Homo sapien
gaagtgcttcttccataaacatttg

SEQ ID NO: 1037362 - DNA, 25 bp, Homo sapien
tatggcagaatatttacagcactac

SEQ ID NO: 1037363 - DNA, 25 bp, Homo sapien
ttcgtcatcacgcatcacaggccgc

SEQ ID NO: 1037364 - DNA, 25 bp, Homo sapien
tcacgcatcacaggccgcgtctttg

SEQ ID NO: 1037365 - DNA, 25 bp, Homo sapien
cgcatcacaggccgcgtctttgacg

SEQ ID NO: 1037366 - DNA, 25 bp, Homo sapien
cacgcatcacaggccgcgtctttga

SEQ ID NO: 1037367 - DNA, 25 bp, Homo sapien
atcacgcatcacaggccgcgtcttt

SEQ ID NO: 1037368 - DNA, 25 bp, Homo sapien
acgcatcacaggccgcgtctttgac

SEQ ID NO: 1037369 - DNA, 25 bp, Homo sapien
aaagacgcggcctgtgatgcgtgat

SEQ ID NO: 1037370 - DNA, 25 bp, Homo sapien
tcaaagacgcggcctgtgatgcgtg

SEQ ID NO: 1037371 - DNA, 25 bp, Homo sapien
cgcggcctgtgatgcgtgatgacga

SEQ ID NO: 1037372 - DNA, 25 bp, Homo sapien
caaagacgcggcctgtgatgcgtga

SEQ ID NO: 1037373 - DNA, 25 bp, Homo sapien
cgtcaaagacgcggcctgtgatgcg

SEQ ID NO: 1037374 - DNA, 25 bp, Homo sapien
gcggcctgtgatgcgtgatgacgaa

SEQ ID NO: 1037375 - DNA, 25 bp, Homo sapien
tgaaaccttgtgtgggattgatggt

SEQ ID NO: 1037376 - DNA, 25 bp, Homo sapien
tgccgaggcatgaaaggctagtatg

SEQ ID NO: 1037377 - DNA, 25 bp, Homo sapien
gaaggctgtctgaacttttgaaacc

SEQ ID NO: 1037378 - DNA, 25 bp, Homo sapien
gatgtgtctctcaatcctgtggctt

SEQ ID NO: 1037379 - DNA, 25 bp, Homo sapien
gagacttggtggtgcataatggata

SEQ ID NO: 1037380 - DNA, 25 bp, Homo sapien
ctagtatgagcgagaaaaggagaga

SEQ ID NO: 1037381 - DNA, 25 bp, Homo sapien
tatccattatgcaccaccaagtctc

SEQ ID NO: 1037382 - DNA, 25 bp, Homo sapien
catcaatcccacacaaggtttcaaa

SEQ ID NO: 1037383 - DNA, 25 bp, Homo sapien
catactagcctttcatgcctcggca

SEQ ID NO: 1037384 - DNA, 25 bp, Homo sapien
ggtttcaaaagttcagacagccttc

SEQ ID NO: 1037385 - DNA, 25 bp, Homo sapien
caaagccacaggattgagagacaca

SEQ ID NO: 1037386 - DNA, 25 bp, Homo sapien
cacatctcgccaagttaaaaaatat

SEQ ID NO: 1037387 - DNA, 25 bp, Homo sapien
ctgtgaatgctgtatggtgtgtgtt

SEQ ID NO: 1037388 - DNA, 25 bp, Homo sapien
gaatgctgtatggtgtgtgttctct

SEQ ID NO: 1037389 - DNA, 25 bp, Homo sapien
tgaatgctgtatggtgtgtgttctc

SEQ ID NO: 1037390 - DNA, 25 bp, Homo sapien
ctgctgtgaatgctgtatggtgtgt

SEQ ID NO: 1037391 - DNA, 25 bp, Homo sapien
aactgctgtgaatgctgtatggtgt

SEQ ID NO: 1037392 - DNA, 25 bp, Homo sapien
actgctgtgaatgctgtatggtgtg

SEQ ID NO: 1037393 - DNA, 25 bp, Homo sapien
acacaccatacagcattcacagcag

SEQ ID NO: 1037394 - DNA, 25 bp, Homo sapien
gagaacacacaccatacagcattca

SEQ ID NO: 1037395 - DNA, 25 bp, Homo sapien
aacacacaccatacagcattcacag

SEQ ID NO: 1037396 - DNA, 25 bp, Homo sapien
agagaacacacaccatacagcattc

SEQ ID NO: 1037397 - DNA, 25 bp, Homo sapien
cacaccatacagcattcacagcagt

SEQ ID NO: 1037398 - DNA, 25 bp, Homo sapien
gaacacacaccatacagcattcaca

SEQ ID NO: 1037399 - DNA, 25 bp, Homo sapien
tggatgctttttataagagttgtca

SEQ ID NO: 1037400 - DNA, 25 bp, Homo sapien
tgacaactcttataaaaagcatcca

SEQ ID NO: 1037401 - DNA, 25 bp, Homo sapien
gttcaccagtgagctcaggtgtctc

SEQ ID NO: 1037402 - DNA, 25 bp, Homo sapien
tgtctgttagctacccataagaatg

SEQ ID NO: 1037403 - DNA, 25 bp, Homo sapien
cccataagaatgctgtttgctgcag

SEQ ID NO: 1037404 - DNA, 25 bp, Homo sapien
taagagttgtcattgttggaaattc

SEQ ID NO: 1037405 - DNA, 25 bp, Homo sapien
tgtctcaaagaagggtggaagttct

SEQ ID NO: 1037406 - DNA, 25 bp, Homo sapien
accagtgagctcaggtgtctcaaag

SEQ ID NO: 1037407 - DNA, 25 bp, Homo sapien
caatgacaactcttataaaaagcat

SEQ ID NO: 1037408 - DNA, 25 bp, Homo sapien
taagaatttccaacaatgacaactc

SEQ ID NO: 1037409 - DNA, 25 bp, Homo sapien
gagacacctgagctcactggtgaac

SEQ ID NO: 1037410 - DNA, 25 bp, Homo sapien
cattcttatgggtagctaacagaca

SEQ ID NO: 1037411 - DNA, 25 bp, Homo sapien
agaacttccacccttctttgagaca

SEQ ID NO: 1037412 - DNA, 25 bp, Homo sapien
ctttgagacacctgagctcactggt

SEQ ID NO: 1037413 - DNA, 25 bp, Homo sapien
aattcatagcagttaattccccttt

SEQ ID NO: 1037414 - DNA, 25 bp, Homo sapien
aagaattcatagcagttaattcccc

SEQ ID NO: 1037415 - DNA, 25 bp, Homo sapien
gaattcatagcagttaattcccctt

SEQ ID NO: 1037416 - DNA, 25 bp, Homo sapien
caaagaattcatagcagttaattcc

SEQ ID NO: 1037417 - DNA, 25 bp, Homo sapien
tgcaaagaattcatagcagttaatt

SEQ ID NO: 1037418 - DNA, 25 bp, Homo sapien
attcatagcagttaattcccctttt

SEQ ID NO: 1037419 - DNA, 25 bp, Homo sapien
ggaattaactgctatgaattctttg

SEQ ID NO: 1037420 - DNA, 25 bp, Homo sapien
aaaaggggaattaactgctatgaat

SEQ ID NO: 1037421 - DNA, 25 bp, Homo sapien
aattaactgctatgaattctttgca

SEQ ID NO: 1037422 - DNA, 25 bp, Homo sapien
aaggggaattaactgctatgaattc

SEQ ID NO: 1037423 - DNA, 25 bp, Homo sapien
gggaattaactgctatgaattcttt

SEQ ID NO: 1037424 - DNA, 25 bp, Homo sapien
gaattaactgctatgaattctttgc

SEQ ID NO: 1037425 - DNA, 25 bp, Homo sapien
gacccttttgagatggaactttcat

SEQ ID NO: 1037426 - DNA, 25 bp, Homo sapien
ggcagtagtttattttgcttcaaat

SEQ ID NO: 1037427 - DNA, 25 bp, Homo sapien
catagcagttaattccccttttttg

SEQ ID NO: 1037428 - DNA, 25 bp, Homo sapien
gaactttcataaagtttcttggcag

SEQ ID NO: 1037429 - DNA, 25 bp, Homo sapien
gaattcatagcagttaattcccctt

SEQ ID NO: 1037430 - DNA, 25 bp, Homo sapien
ccctgaatgcaaagaattcatagca

SEQ ID NO: 1037431 - DNA, 25 bp, Homo sapien
tgctatgaattctttgcattcaggg

SEQ ID NO: 1037432 - DNA, 25 bp, Homo sapien
gaaagttccatctcaaaagggtcaa

SEQ ID NO: 1037433 - DNA, 25 bp, Homo sapien
gaaactttatgaaagttccatctca

SEQ ID NO: 1037434 - DNA, 25 bp, Homo sapien
aattaactgctatgaattctttgca

SEQ ID NO: 1037435 - DNA, 25 bp, Homo sapien
taaactactgccaagaaactttatg

SEQ ID NO: 1037436 - DNA, 25 bp, Homo sapien
tatttgaagcaaaataaactactgc

SEQ ID NO: 1037437 - DNA, 25 bp, Homo sapien
tgcattgacacctgatacccagact

SEQ ID NO: 1037438 - DNA, 25 bp, Homo sapien
tttgaataagtctgggtgaccgcac

SEQ ID NO: 1037439 - DNA, 25 bp, Homo sapien
caaatggattcatcacctgtcatgc

SEQ ID NO: 1037440 - DNA, 25 bp, Homo sapien
ggattcatcacctgtcatgcattga

SEQ ID NO: 1037441 - DNA, 25 bp, Homo sapien
taagtctgggtgaccgcacctaaaa

SEQ ID NO: 1037442 - DNA, 25 bp, Homo sapien
cacctgatacccagacttaattggt

SEQ ID NO: 1037443 - DNA, 25 bp, Homo sapien
gcatgacaggtgatgaatccatttg

SEQ ID NO: 1037444 - DNA, 25 bp, Homo sapien
tcaatgcatgacaggtgatgaatcc

SEQ ID NO: 1037445 - DNA, 25 bp, Homo sapien
ggtgcggtcacccagacttattcaa

SEQ ID NO: 1037446 - DNA, 25 bp, Homo sapien
ccaattaagtctgggtatcaggtgt

SEQ ID NO: 1037447 - DNA, 25 bp, Homo sapien
gtctgggtatcaggtgtcaatgcat

SEQ ID NO: 1037448 - DNA, 25 bp, Homo sapien
ttttaggtgcggtcacccagactta

SEQ ID NO: 1037449 - DNA, 25 bp, Homo sapien
tgtgcatttgggtgatgttctattt

SEQ ID NO: 1037450 - DNA, 25 bp, Homo sapien
gtgcatttgggtgatgttctattta

SEQ ID NO: 1037451 - DNA, 25 bp, Homo sapien
tgcatttgggtgatgttctatttac

SEQ ID NO: 1037452 - DNA, 25 bp, Homo sapien
gtaaatagaacatcacccaaatgca

SEQ ID NO: 1037453 - DNA, 25 bp, Homo sapien
taaatagaacatcacccaaatgcac

SEQ ID NO: 1037454 - DNA, 25 bp, Homo sapien
aaatagaacatcacccaaatgcaca

SEQ ID NO: 1037455 - DNA, 25 bp, Homo sapien
cctccggctttttcttagtgcctct

SEQ ID NO: 1037456 - DNA, 25 bp, Homo sapien
tgcatttgggtgatgttctatttac

SEQ ID NO: 1037457 - DNA, 25 bp, Homo sapien
tagtgcctctgtgcatttgggtgat

SEQ ID NO: 1037458 - DNA, 25 bp, Homo sapien
tttcttagtgcctctgtgcatttgg

SEQ ID NO: 1037459 - DNA, 25 bp, Homo sapien
ctctgtgcatttgggtgatgttcta

SEQ ID NO: 1037460 - DNA, 25 bp, Homo sapien
tcttagtgcctctgtgcatttgggt

SEQ ID NO: 1037461 - DNA, 25 bp, Homo sapien
gtaaatagaacatcacccaaatgca

SEQ ID NO: 1037462 - DNA, 25 bp, Homo sapien
cagaggcactaagaaaaagccggag

SEQ ID NO: 1037463 - DNA, 25 bp, Homo sapien
taaatagaacatcacccaaatgcac

SEQ ID NO: 1037464 - DNA, 25 bp, Homo sapien
aaatagaacatcacccaaatgcaca

SEQ ID NO: 1037465 - DNA, 25 bp, Homo sapien
ccaaatgcacagaggcactaagaaa

SEQ ID NO: 1037466 - DNA, 25 bp, Homo sapien
tagaacatcacccaaatgcacagag

SEQ ID NO: 1037467 - DNA, 25 bp, Homo sapien
tgaaaagggaatatcagcaccttcc

SEQ ID NO: 1037468 - DNA, 25 bp, Homo sapien
atggcctgtgtaaatctccattggg

SEQ ID NO: 1037469 - DNA, 25 bp, Homo sapien
gcaccttcctagtttgggatttgaa

SEQ ID NO: 1037470 - DNA, 25 bp, Homo sapien
gcaaagcatatcaattgaaaaggga

SEQ ID NO: 1037471 - DNA, 25 bp, Homo sapien
taaatctccattgggaagtcatgcc

SEQ ID NO: 1037472 - DNA, 25 bp, Homo sapien
gggaagtcatgccttctaaaaagat

SEQ ID NO: 1037473 - DNA, 25 bp, Homo sapien
tcccttttcaattgatatgctttgc

SEQ ID NO: 1037474 - DNA, 25 bp, Homo sapien
cccaatggagatttacacaggccat

SEQ ID NO: 1037475 - DNA, 25 bp, Homo sapien
tcaaatcccaaactaggaaggtgct

SEQ ID NO: 1037476 - DNA, 25 bp, Homo sapien
tgctacaaagcattagaaaataatc

SEQ ID NO: 1037477 - DNA, 25 bp, Homo sapien
ggaaggtgctgatattcccttttca

SEQ ID NO: 1037478 - DNA, 25 bp, Homo sapien
tagaaggcatgacttcccaatggag

SEQ ID NO: 1037479 - DNA, 25 bp, Homo sapien
taagaattagggtgggttgtctgtc

SEQ ID NO: 1037480 - DNA, 25 bp, Homo sapien
aaccctgtaccatctgaattttgca

SEQ ID NO: 1037481 - DNA, 25 bp, Homo sapien
gagttgagctcattttctagttgga

SEQ ID NO: 1037482 - DNA, 25 bp, Homo sapien
catcctttagacttgtaatcgccac

SEQ ID NO: 1037483 - DNA, 25 bp, Homo sapien
gaaatccattaagaggcctgatagc

SEQ ID NO: 1037484 - DNA, 25 bp, Homo sapien
caaattatcttgtgcctgaaatcca

SEQ ID NO: 1037485 - DNA, 25 bp, Homo sapien
tccaactagaaaatgagctcaactc

SEQ ID NO: 1037486 - DNA, 25 bp, Homo sapien
gggcattaggtaaactaccaacaca

SEQ ID NO: 1037487 - DNA, 25 bp, Homo sapien
tgcaaaattcagatggtacagggtt

SEQ ID NO: 1037488 - DNA, 25 bp, Homo sapien
caatgtggcgattacaagtctaaag

SEQ ID NO: 1037489 - DNA, 25 bp, Homo sapien
gctatcaggcctcttaatggatttc

SEQ ID NO: 1037490 - DNA, 25 bp, Homo sapien
tggatttcaggcacaagataatttg

SEQ ID NO: 1037491 - DNA, 25 bp, Homo sapien
tactcagcagcagtaacatggtaac

SEQ ID NO: 1037492 - DNA, 25 bp, Homo sapien
atggtaacacttaaaatggtactcg

SEQ ID NO: 1037493 - DNA, 25 bp, Homo sapien
aagactaaactgacaagccttcaag

SEQ ID NO: 1037494 - DNA, 25 bp, Homo sapien
catggtaacacttaaaatggtactc

SEQ ID NO: 1037495 - DNA, 25 bp, Homo sapien
actcagcagcagtaacatggtaaca

SEQ ID NO: 1037496 - DNA, 25 bp, Homo sapien
acatggtaacacttaaaatggtact

SEQ ID NO: 1037497 - DNA, 25 bp, Homo sapien
cttgaaggcttgtcagtttagtctt

SEQ ID NO: 1037498 - DNA, 25 bp, Homo sapien
cgagtaccattttaagtgttaccat

SEQ ID NO: 1037499 - DNA, 25 bp, Homo sapien
tgttaccatgttactgctgctgagt

SEQ ID NO: 1037500 - DNA, 25 bp, Homo sapien
agtaccattttaagtgttaccatgt

SEQ ID NO: 1037501 - DNA, 25 bp, Homo sapien
gagtaccattttaagtgttaccatg

SEQ ID NO: 1037502 - DNA, 25 bp, Homo sapien
gttaccatgttactgctgctgagta

SEQ ID NO: 1037503 - DNA, 25 bp, Homo sapien
gaaggctttcaatgttgagtggcct

SEQ ID NO: 1037504 - DNA, 25 bp, Homo sapien
tcaacggcatggtttaatcccttct

SEQ ID NO: 1037505 - DNA, 25 bp, Homo sapien
gtaagttaacttgtcaacggcatgg

SEQ ID NO: 1037506 - DNA, 25 bp, Homo sapien
tatggtactgcatagatacgggtat

SEQ ID NO: 1037507 - DNA, 25 bp, Homo sapien
cagttactggtcatagaaggctttc

SEQ ID NO: 1037508 - DNA, 25 bp, Homo sapien
ctatttggtcaatctaaatgcattc

SEQ ID NO: 1037509 - DNA, 25 bp, Homo sapien
taaaccatgccgttgacaagttaac

SEQ ID NO: 1037510 - DNA, 25 bp, Homo sapien
gaaagccttctatgaccagtaactg

SEQ ID NO: 1037511 - DNA, 25 bp, Homo sapien
taaatacccgtatctatgcagtacc

SEQ ID NO: 1037512 - DNA, 25 bp, Homo sapien
aggccactcaacattgaaagccttc

SEQ ID NO: 1037513 - DNA, 25 bp, Homo sapien
gaatgcatttagattgaccaaatag

SEQ ID NO: 1037514 - DNA, 25 bp, Homo sapien
tgtaaagaagggattaaaccatgcc

SEQ ID NO: 1037515 - DNA, 25 bp, Homo sapien
gtttagtgtctggagtcttactgga

SEQ ID NO: 1037516 - DNA, 25 bp, Homo sapien
gtgtctggagtcttactggaaaaac

SEQ ID NO: 1037517 - DNA, 25 bp, Homo sapien
ctggagtcttactggaaaaacacga

SEQ ID NO: 1037518 - DNA, 25 bp, Homo sapien
tagtgtctggagtcttactggaaaa

SEQ ID NO: 1037519 - DNA, 25 bp, Homo sapien
aaacacgatttctttttatatgtga

SEQ ID NO: 1037520 - DNA, 25 bp, Homo sapien
tggagtcttactggaaaaacacgat

SEQ ID NO: 1037521 - DNA, 25 bp, Homo sapien
tcacatataaaaagaaatcgtgttt

SEQ ID NO: 1037522 - DNA, 25 bp, Homo sapien
gtttttccagtaagactccagacac

SEQ ID NO: 1037523 - DNA, 25 bp, Homo sapien
tcgtgtttttccagtaagactccag

SEQ ID NO: 1037524 - DNA, 25 bp, Homo sapien
atcgtgtttttccagtaagactcca

SEQ ID NO: 1037525 - DNA, 25 bp, Homo sapien
tccagtaagactccagacactaaac

SEQ ID NO: 1037526 - DNA, 25 bp, Homo sapien
tttccagtaagactccagacactaa

SEQ ID NO: 1037527 - DNA, 25 bp, Homo sapien
gaagttgtacttcatatgcacaaga

SEQ ID NO: 1037528 - DNA, 25 bp, Homo sapien
catatgcacaagagaaatgaggcca

SEQ ID NO: 1037529 - DNA, 25 bp, Homo sapien
aattgagtctcaagaagttgtactt

SEQ ID NO: 1037530 - DNA, 25 bp, Homo sapien
gactcacagtaagcttttacatgga

SEQ ID NO: 1037531 - DNA, 25 bp, Homo sapien
gagaaatgaggccaagactcacagt

SEQ ID NO: 1037532 - DNA, 25 bp, Homo sapien
tgaggccaagactcacagtaagctt

SEQ ID NO: 1037533 - DNA, 25 bp, Homo sapien
gaagtacaacttcttgagactcaat

SEQ ID NO: 1037534 - DNA, 25 bp, Homo sapien
taaaagcttactgtgagtcttggcc

SEQ ID NO: 1037535 - DNA, 25 bp, Homo sapien
gcttactgtgagtcttggcctcatt

SEQ ID NO: 1037536 - DNA, 25 bp, Homo sapien
tccatgtaaaagcttactgtgagtc

SEQ ID NO: 1037537 - DNA, 25 bp, Homo sapien
tggcctcatttctcttgtgcatatg

SEQ ID NO: 1037538 - DNA, 25 bp, Homo sapien
tctcttgtgcatatgaagtacaact

SEQ ID NO: 1037539 - DNA, 25 bp, Homo sapien
tgcgtgtctgcagtcaaggattctt

SEQ ID NO: 1037540 - DNA, 25 bp, Homo sapien
ggcagttgttgctccacccaaaaaa

SEQ ID NO: 1037541 - DNA, 25 bp, Homo sapien
cagcgacgtggctcgagaagcattc

SEQ ID NO: 1037542 - DNA, 25 bp, Homo sapien
gacataaaccacgagagtgacagtc

SEQ ID NO: 1037543 - DNA, 25 bp, Homo sapien
aaaaacatgatgcatccgccctgga

SEQ ID NO: 1037544 - DNA, 25 bp, Homo sapien
gaatgggcaccctgaaaagactatc

SEQ ID NO: 1037545 - DNA, 25 bp, Homo sapien
gcagcaggtgcacttttatatgaca

SEQ ID NO: 1037546 - DNA, 25 bp, Homo sapien
ccagtttgtggactatcagcccgca

SEQ ID NO: 1037547 - DNA, 25 bp, Homo sapien
gcaagtacactaccacaacagcaaa

SEQ ID NO: 1037548 - DNA, 25 bp, Homo sapien
tgtatttggctaacacaacgtctgt

SEQ ID NO: 1037549 - DNA, 25 bp, Homo sapien
caacgtctgtaggtattaatgcaag

SEQ ID NO: 1037550 - DNA, 25 bp, Homo sapien
gggtcctagccacaactgcaacatt

SEQ ID NO: 1037551 - DNA, 25 bp, Homo sapien
gttactattctatgttaaaatgcta

SEQ ID NO: 1037552 - DNA, 25 bp, Homo sapien
gaattggctccaaagataatagttg

SEQ ID NO: 1037553 - DNA, 25 bp, Homo sapien
ttcaacatctagtttttaaacatca

SEQ ID NO: 1037554 - DNA, 25 bp, Homo sapien
ttaaacatcaatgcaatctgccttt

SEQ ID NO: 1037555 - DNA, 25 bp, Homo sapien
gcccagatcgcaccattatactcta

SEQ ID NO: 1037556 - DNA, 25 bp, Homo sapien
agcccagatcgcaccattatactct

SEQ ID NO: 1037557 - DNA, 25 bp, Homo sapien
gggcaacagtagtgaaattccatat

SEQ ID NO: 1037558 - DNA, 25 bp, Homo sapien
cctgggcaacagtagtgaaattcca

SEQ ID NO: 1037559 - DNA, 25 bp, Homo sapien
cagcatggagaaaccccgtctctaa

SEQ ID NO: 1037560 - DNA, 25 bp, Homo sapien
tctctaataaaaatacaaaattagc

SEQ ID NO: 1037561 - DNA, 25 bp, Homo sapien
aaattagccgggtgtggtggtacat

SEQ ID NO: 1037562 - DNA, 25 bp, Homo sapien
gtgggtcacctgaggccagcctgac

SEQ ID NO: 1037563 - DNA, 25 bp, Homo sapien
cagaggttgttaggtgctgactgca

SEQ ID NO: 1037564 - DNA, 25 bp, Homo sapien
aacatggtaatgcagagacctccta

SEQ ID NO: 1037565 - DNA, 25 bp, Homo sapien
tatgtcccactgatgctcaagaatc

SEQ ID NO: 1037566 - DNA, 25 bp, Homo sapien
gctgatggattctggacgagctcca

SEQ ID NO: 1037567 - DNA, 25 bp, Homo sapien
caggcacctagcaattctttagcgg

SEQ ID NO: 1037568 - DNA, 25 bp, Homo sapien
tgctctcacccataaacaacgctgt

SEQ ID NO: 1037569 - DNA, 25 bp, Homo sapien
tggaggctgcaaaacgtgtcaaaac

SEQ ID NO: 1037570 - DNA, 25 bp, Homo sapien
cgaactgcgtgtggaacaattagca

SEQ ID NO: 1037571 - DNA, 25 bp, Homo sapien
acacccagctaattagtggagacgg

SEQ ID NO: 1037572 - DNA, 25 bp, Homo sapien
cacccagctaattagtggagacggg

SEQ ID NO: 1037573 - DNA, 25 bp, Homo sapien
gcacccagccaaatgtttttgttaa

SEQ ID NO: 1037574 - DNA, 25 bp, Homo sapien
tgcacccagccaaatgtttttgtta

SEQ ID NO: 1037575 - DNA, 25 bp, Homo sapien
ctgcacccagccaaatgtttttgtt

SEQ ID NO: 1037576 - DNA, 25 bp, Homo sapien
cccgtctggcaaggtaagaactgct

SEQ ID NO: 1037577 - DNA, 25 bp, Homo sapien
tgatccaaataaacagaccccgtct

SEQ ID NO: 1037578 - DNA, 25 bp, Homo sapien
gattttagcacgctggtggcgcctg

SEQ ID NO: 1037579 - DNA, 25 bp, Homo sapien
tcttcccaagggcagacagtactga

SEQ ID NO: 1037580 - DNA, 25 bp, Homo sapien
tgaatgcgacattgacgagacctgc

SEQ ID NO: 1037581 - DNA, 25 bp, Homo sapien
aaagaatggctgttgcacacccgct

SEQ ID NO: 1037582 - DNA, 25 bp, Homo sapien
tgtttcagccaagtgccagatacgg

SEQ ID NO: 1037583 - DNA, 25 bp, Homo sapien
gatacggcgatgaatgaagcccctg

SEQ ID NO: 1037584 - DNA, 25 bp, Homo sapien
cgtcaagtcacagccagtgcaagta

SEQ ID NO: 1037585 - DNA, 25 bp, Homo sapien
gctatccaatcatcccaaccagtgg

SEQ ID NO: 1037586 - DNA, 25 bp, Homo sapien
gaatgttctctttggacctcacgac

SEQ ID NO: 1037587 - DNA, 25 bp, Homo sapien
cctgactgtcccgaagaggttggga

SEQ ID NO: 1037588 - DNA, 25 bp, Homo sapien
tcacaacagcctatgaagtacctgg

SEQ ID NO: 1037589 - DNA, 25 bp, Homo sapien
cacaagttaggtgggtcagcccaaa

SEQ ID NO: 1037590 - DNA, 25 bp, Homo sapien
tgggtcagcccaaagaggttaagga

SEQ ID NO: 1037591 - DNA, 25 bp, Homo sapien
gacaccagtggccccttttctactg

SEQ ID NO: 1037592 - DNA, 25 bp, Homo sapien
ttcttatacaccaataacagagagc

SEQ ID NO: 1037593 - DNA, 25 bp, Homo sapien
tccaccttacaagggacgtgaagga

SEQ ID NO: 1037594 - DNA, 25 bp, Homo sapien
atccaccttacaagggacgtgaagg

SEQ ID NO: 1037595 - DNA, 25 bp, Homo sapien
tatacaccaataacagagagccaaa

SEQ ID NO: 1037596 - DNA, 25 bp, Homo sapien
atggggcctcggaaacggacactga

SEQ ID NO: 1037597 - DNA, 25 bp, Homo sapien
gggcgtcccgcttgcgagcctaagt

SEQ ID NO: 1037598 - DNA, 25 bp, Homo sapien
caaatgtggaaagccgtctcgcatc

SEQ ID NO: 1037599 - DNA, 25 bp, Homo sapien
ttgcgagcctaagtccatggaggcc

SEQ ID NO: 1037600 - DNA, 25 bp, Homo sapien
ctgtcggcgaccagcgcaaccaaat

SEQ ID NO: 1037601 - DNA, 25 bp, Homo sapien
agcccagggtcctgtcggcgaccag

SEQ ID NO: 1037602 - DNA, 25 bp, Homo sapien
cccggacgccgacagctttgtgaag

SEQ ID NO: 1037603 - DNA, 25 bp, Homo sapien
aaatccgacggagagatggtgctgc

SEQ ID NO: 1037604 - DNA, 25 bp, Homo sapien
tcggccgacaagctctcgcgagacg

SEQ ID NO: 1037605 - DNA, 25 bp, Homo sapien
atgcgtggtgcgcacgcgtcccgtc

SEQ ID NO: 1037606 - DNA, 25 bp, Homo sapien
acaagctctcgcgagacgagccgtg

SEQ ID NO: 1037607 - DNA, 25 bp, Homo sapien
cgagacgagccgtgcaggctgaaaa

SEQ ID NO: 1037608 - DNA, 25 bp, Homo sapien
cagagcgctcgaaagtgccacccta

SEQ ID NO: 1037609 - DNA, 25 bp, Homo sapien
tcgaaagtgccaccctaatcgcagg

SEQ ID NO: 1037610 - DNA, 25 bp, Homo sapien
gaaagtgccaccctaatcgcaggct

SEQ ID NO: 1037611 - DNA, 25 bp, Homo sapien
gcgctcgaaagtgccaccctaatcg

SEQ ID NO: 1037612 - DNA, 25 bp, Homo sapien
tgataattcggtgcctccctcacaa

SEQ ID NO: 1037613 - DNA, 25 bp, Homo sapien
gatgtctgcaggaaacaacgtctgc

SEQ ID NO: 1037614 - DNA, 25 bp, Homo sapien
ggagctagacgctttcttcaggagc

SEQ ID NO: 1037615 - DNA, 25 bp, Homo sapien
tgaattgtattaagggcatcccatc

SEQ ID NO: 1037616 - DNA, 25 bp, Homo sapien
ttcaagacctgaccgctagtaggga

SEQ ID NO: 1037617 - DNA, 25 bp, Homo sapien
ggttcccaggacagtgaaacatagt

SEQ ID NO: 1037618 - DNA, 25 bp, Homo sapien
ggtttattcagatcgctggcagcct

SEQ ID NO: 1037619 - DNA, 25 bp, Homo sapien
cacaaggcttgatttggttcccagg

SEQ ID NO: 1037620 - DNA, 25 bp, Homo sapien
cttatggtgcggtcccttgtggtca

SEQ ID NO: 1037621 - DNA, 25 bp, Homo sapien
gactggcagaaaatccttatggtgc

SEQ ID NO: 1037622 - DNA, 25 bp, Homo sapien
tgtggtcagccctcatgaagacatg

SEQ ID NO: 1037623 - DNA, 25 bp, Homo sapien
cagcgtatcgtagaggactggcaga

SEQ ID NO: 1037624 - DNA, 25 bp, Homo sapien
gggagtcaggagtctaaatgttctg

SEQ ID NO: 1037625 - DNA, 25 bp, Homo sapien
gagtcaggagtctaaatgttctggg

SEQ ID NO: 1037626 - DNA, 25 bp, Homo sapien
agtcaggagtctaaatgttctggga

SEQ ID NO: 1037627 - DNA, 25 bp, Homo sapien
gtcaggagtctaaatgttctgggaa

SEQ ID NO: 1037628 - DNA, 25 bp, Homo sapien
aacttaagctgtgagagaatgacca

SEQ ID NO: 1037629 - DNA, 25 bp, Homo sapien
aaacttaagctgtgagagaatgacc

SEQ ID NO: 1037630 - DNA, 25 bp, Homo sapien
cttaagctgtgagagaatgaccaat

SEQ ID NO: 1037631 - DNA, 25 bp, Homo sapien
ctaaacttaagctgtgagagaatga

SEQ ID NO: 1037632 - DNA, 25 bp, Homo sapien
catcaggccatggtttcttgccaca

SEQ ID NO: 1037633 - DNA, 25 bp, Homo sapien
tcttgccacatgctgtccgagctgg

SEQ ID NO: 1037634 - DNA, 25 bp, Homo sapien
ttctctgatcggcagataccctgac

SEQ ID NO: 1037635 - DNA, 25 bp, Homo sapien
aacttgtccccgagcgacgagagat

SEQ ID NO: 1037636 - DNA, 25 bp, Homo sapien
aggagagagttacagtcgggcatat

SEQ ID NO: 1037637 - DNA, 25 bp, Homo sapien
cgggcatatggggtaagtgtcaact

SEQ ID NO: 1037638 - DNA, 25 bp, Homo sapien
ggcaggagagagttacagtcgggca

SEQ ID NO: 1037639 - DNA, 25 bp, Homo sapien
ggcatatggggtaagtgtcaactat

SEQ ID NO: 1037640 - DNA, 25 bp, Homo sapien
cgatgagaaattggataatacctcc

SEQ ID NO: 1037641 - DNA, 25 bp, Homo sapien
gatgttaaagttttggatgccatac

SEQ ID NO: 1037642 - DNA, 25 bp, Homo sapien
cctctcaagccattcagttctggga

SEQ ID NO: 1037643 - DNA, 25 bp, Homo sapien
gccatacatttctgtcttcgatgag

SEQ ID NO: 1037644 - DNA, 25 bp, Homo sapien
gatagaggtgaacaggtacaatgag

SEQ ID NO: 1037645 - DNA, 25 bp, Homo sapien
caatgagggaaggtctagaagggtc

SEQ ID NO: 1037646 - DNA, 25 bp, Homo sapien
cccgataattacttggtctttctgg

SEQ ID NO: 1037647 - DNA, 25 bp, Homo sapien
aacctcttcacctttcctggatgtc

SEQ ID NO: 1037648 - DNA, 25 bp, Homo sapien
tgttgacaagtaagataaagttgga

SEQ ID NO: 1037649 - DNA, 25 bp, Homo sapien
gaagtaattaactggctgacatgct

SEQ ID NO: 1037650 - DNA, 25 bp, Homo sapien
tgacatgctgggagcggtgtgcctg

SEQ ID NO: 1037651 - DNA, 25 bp, Homo sapien
gccagagccttggaaatgtgacagc

SEQ ID NO: 1037652 - DNA, 25 bp, Homo sapien
tttgcaaatgtctagcccagctggg

SEQ ID NO: 1037653 - DNA, 25 bp, Homo sapien
gttgtagtcagcgtgggtccttccc

SEQ ID NO: 1037654 - DNA, 25 bp, Homo sapien
ccatgttatggagccactcaggcag

SEQ ID NO: 1037655 - DNA, 25 bp, Homo sapien
ttttagtaacgagactctggcccca

SEQ ID NO: 1037656 - DNA, 25 bp, Homo sapien
tctcaaagcttgagtctctgacagg

SEQ ID NO: 1037657 - DNA, 25 bp, Homo sapien
ttccaagcccgaatgctccacaagt

SEQ ID NO: 1037658 - DNA, 25 bp, Homo sapien
gaaccttacgctttcactctgaggg

SEQ ID NO: 1037659 - DNA, 25 bp, Homo sapien
ggtagcctatagctttccttccaag

SEQ ID NO: 1037660 - DNA, 25 bp, Homo sapien
caatttggttgttcatctcggagta

SEQ ID NO: 1037661 - DNA, 25 bp, Homo sapien
tcagcaggctgctaaggttggcaac

SEQ ID NO: 1037662 - DNA, 25 bp, Homo sapien
tcctcacagcagttggccgctttga

SEQ ID NO: 1037663 - DNA, 25 bp, Homo sapien
ccacgatgaaaatgcagagccaggt

SEQ ID NO: 1037664 - DNA, 25 bp, Homo sapien
caggaagtcatcaggaggaagctta

SEQ ID NO: 1037665 - DNA, 25 bp, Homo sapien
gagggaagagcagtcgtagatggca

SEQ ID NO: 1037666 - DNA, 25 bp, Homo sapien
gaggaagcttatacactccagagat

SEQ ID NO: 1037667 - DNA, 25 bp, Homo sapien
gagatgcggtagttcttctggtaga

SEQ ID NO: 1037668 - DNA, 25 bp, Homo sapien
gaagcagaggggatactctggtgag

SEQ ID NO: 1037669 - DNA, 25 bp, Homo sapien
tgaagcagaggggatactctggtga

SEQ ID NO: 1037670 - DNA, 25 bp, Homo sapien
cagtcccggtagaaggagacaaggc

SEQ ID NO: 1037671 - DNA, 25 bp, Homo sapien
ggagacaaggccactttttcgtctc

SEQ ID NO: 1037672 - DNA, 25 bp, Homo sapien
ggtggatgtgttcgttccccagcca

SEQ ID NO: 1037673 - DNA, 25 bp, Homo sapien
atctctacacgcagccgggttggct

SEQ ID NO: 1037674 - DNA, 25 bp, Homo sapien
aaagtggctatactcagcgtagcgc

SEQ ID NO: 1037675 - DNA, 25 bp, Homo sapien
tgcccaaaacaaagtggctatactc

SEQ ID NO: 1037676 - DNA, 25 bp, Homo sapien
cagcgtagcgcaggttgccctccca

SEQ ID NO: 1037677 - DNA, 25 bp, Homo sapien
ctgttgagttcattgcccaaaacaa

SEQ ID NO: 1037678 - DNA, 25 bp, Homo sapien
cttgtccaagcagttgtcattgtcc

SEQ ID NO: 1037679 - DNA, 25 bp, Homo sapien
tgtagttccccaggaagaggcgata

SEQ ID NO: 1037680 - DNA, 25 bp, Homo sapien
gcgtcgttccccacattgccagtgt

SEQ ID NO: 1037681 - DNA, 25 bp, Homo sapien
tttgcggagctgtgcacacttgtcc

SEQ ID NO: 1037682 - DNA, 25 bp, Homo sapien
aacagacccagtgctagtaagttga

SEQ ID NO: 1037683 - DNA, 25 bp, Homo sapien
ggcatgagaaacagacccagtgcta

SEQ ID NO: 1037684 - DNA, 25 bp, Homo sapien
gaaacagacccagtgctagtaagtt

SEQ ID NO: 1037685 - DNA, 25 bp, Homo sapien
ctggcatgagaaacagacccagtgc

SEQ ID NO: 1037686 - DNA, 25 bp, Homo sapien
tgccatccaggtgcttattgtgctc

SEQ ID NO: 1037687 - DNA, 25 bp, Homo sapien
tggagtctgtgcagcagttgtacca

SEQ ID NO: 1037688 - DNA, 25 bp, Homo sapien
gtacactccattgaggttggagtct

SEQ ID NO: 1037689 - DNA, 25 bp, Homo sapien
gcttgaagtcttctgggcggatttt

SEQ ID NO: 1037690 - DNA, 25 bp, Homo sapien
tctgatcgccagatgcagtgccctg

SEQ ID NO: 1037691 - DNA, 25 bp, Homo sapien
cagtgctgtacatgaccaaggcgag

SEQ ID NO: 1037692 - DNA, 25 bp, Homo sapien
tgtgccggcatccatgagagactct

SEQ ID NO: 1037693 - DNA, 25 bp, Homo sapien
tactgctatgtcagggatcttgggc

SEQ ID NO: 1037694 - DNA, 25 bp, Homo sapien
attttgaaagtgtttattgtagaag

SEQ ID NO: 1037695 - DNA, 25 bp, Homo sapien
tcacattttgaaagtgtttattgta

SEQ ID NO: 1037696 - DNA, 25 bp, Homo sapien
cacattttgaaagtgtttattgtag

SEQ ID NO: 1037697 - DNA, 25 bp, Homo sapien
tgaaagtgtttattgtagaaggaaa

SEQ ID NO: 1037698 - DNA, 25 bp, Homo sapien
tctctagattgttccaatgctagta

SEQ ID NO: 1037699 - DNA, 25 bp, Homo sapien
ttctctagattgttccaatgctagt

SEQ ID NO: 1037700 - DNA, 25 bp, Homo sapien
ctctagattgttccaatgctagtat

SEQ ID NO: 1037701 - DNA, 25 bp, Homo sapien
tctagattgttccaatgctagtata

SEQ ID NO: 1037702 - DNA, 25 bp, Homo sapien
gcctttcttgcggtcttggtcatca

SEQ ID NO: 1037703 - DNA, 25 bp, Homo sapien
gctctcgggctctaagtgaacctgg

SEQ ID NO: 1037704 - DNA, 25 bp, Homo sapien
tgctccgtgaggcacatttccttgc

SEQ ID NO: 1037705 - DNA, 25 bp, Homo sapien
ggttctttggattggccccgcactg

SEQ ID NO: 1037706 - DNA, 25 bp, Homo sapien
tagttggaggttgcattctcacggc

SEQ ID NO: 1037707 - DNA, 25 bp, Homo sapien
ccaaagttggctgtcagagaggtct

SEQ ID NO: 1037708 - DNA, 25 bp, Homo sapien
gatagccttagcatccctactgtgt

SEQ ID NO: 1037709 - DNA, 25 bp, Homo sapien
aagtgttctagcctactctgcaggg

SEQ ID NO: 1037710 - DNA, 25 bp, Homo sapien
gaggccttggccgaagccgcgcggt

SEQ ID NO: 1037711 - DNA, 25 bp, Homo sapien
cgaagccgcgcggtgagtctagggc

SEQ ID NO: 1037712 - DNA, 25 bp, Homo sapien
gaagcggcggtaccggtgctggcgg

SEQ ID NO: 1037713 - DNA, 25 bp, Homo sapien
gcagggggcctgaagcggcggtacc

SEQ ID NO: 1037714 - DNA, 25 bp, Homo sapien
gagctttctatgctggccaaaccca

SEQ ID NO: 1037715 - DNA, 25 bp, Homo sapien
agagctttctatgctggccaaaccc

SEQ ID NO: 1037716 - DNA, 25 bp, Homo sapien
caatctggttgttgaacattacaac

SEQ ID NO: 1037717 - DNA, 25 bp, Homo sapien
attacaacttcaccactcaacacag

SEQ ID NO: 1037718 - DNA, 25 bp, Homo sapien
ttctttaggccgccagagccgccat

SEQ ID NO: 1037719 - DNA, 25 bp, Homo sapien
ccccgcgttagagcccacggctgag

SEQ ID NO: 1037720 - DNA, 25 bp, Homo sapien
cgcggccgccttctttaggccgcca

SEQ ID NO: 1037721 - DNA, 25 bp, Homo sapien
cccagccccgcgttagagcccacgg

SEQ ID NO: 1037722 - DNA, 25 bp, Homo sapien
cagcagggcccgaccttccttcggt

SEQ ID NO: 1037723 - DNA, 25 bp, Homo sapien
acagggctggtgtggcggcaaggtc

SEQ ID NO: 1037724 - DNA, 25 bp, Homo sapien
taaaagtgagccacgcacagtgacc

SEQ ID NO: 1037725 - DNA, 25 bp, Homo sapien
gtcttacaccccacgaggccaagcg

SEQ ID NO: 1037726 - DNA, 25 bp, Homo sapien
tagaggaagactccgaaccggacga

SEQ ID NO: 1037727 - DNA, 25 bp, Homo sapien
ggctccaagattcggtccacaagtg

SEQ ID NO: 1037728 - DNA, 25 bp, Homo sapien
tccaaagtagataagagccaagtgc

SEQ ID NO: 1037729 - DNA, 25 bp, Homo sapien
cagacgcagcccaacgtgtagagga

SEQ ID NO: 1037730 - DNA, 25 bp, Homo sapien
tgcggccagaaaatccagagagttg

SEQ ID NO: 1037731 - DNA, 25 bp, Homo sapien
ggtaaatccttagactgtgcaggtg

SEQ ID NO: 1037732 - DNA, 25 bp, Homo sapien
ccaaggctggaaatttagggactgt

SEQ ID NO: 1037733 - DNA, 25 bp, Homo sapien
cttccggctgaaaatggtaaatcct

SEQ ID NO: 1037734 - DNA, 25 bp, Homo sapien
ccagcgggccaaaagtgatgaggat

SEQ ID NO: 1037735 - DNA, 25 bp, Homo sapien
gtaggcgaacatcacagccagcggg

SEQ ID NO: 1037736 - DNA, 25 bp, Homo sapien
gtctcccagagccacgtacttgaat

SEQ ID NO: 1037737 - DNA, 25 bp, Homo sapien
gatggcgtaggcgaacatcacagcc

SEQ ID NO: 1037738 - DNA, 25 bp, Homo sapien
tgaaggcctggcttcgaaactgtct

SEQ ID NO: 1037739 - DNA, 25 bp, Homo sapien
caggaggttgagcttggcagtcctc

SEQ ID NO: 1037740 - DNA, 25 bp, Homo sapien
cctgctggtgccagaatgatgccaa

SEQ ID NO: 1037741 - DNA, 25 bp, Homo sapien
gacatagaaaagtcccagcaggagg

SEQ ID NO: 1037742 - DNA, 25 bp, Homo sapien
tgggagtgaccaccaaggcatacgt

SEQ ID NO: 1037743 - DNA, 25 bp, Homo sapien
tctcaggcagcgtatctcaggacac

SEQ ID NO: 1037744 - DNA, 25 bp, Homo sapien
tgcagaactgatagccccgatggga

SEQ ID NO: 1037745 - DNA, 25 bp, Homo sapien
tgagaatggcctactccaaggagag

SEQ ID NO: 1037746 - DNA, 25 bp, Homo sapien
caacaaccagttactgactgcctgc

SEQ ID NO: 1037747 - DNA, 25 bp, Homo sapien
gcctgctctgttgcaccatgcactg

SEQ ID NO: 1037748 - DNA, 25 bp, Homo sapien
ctgacagctgatgtgatgcagtggt

SEQ ID NO: 1037749 - DNA, 25 bp, Homo sapien
caaactctcacacctgtcagtcagc

SEQ ID NO: 1037750 - DNA, 25 bp, Homo sapien
ggcaggtctagaaggcaggtcacta

SEQ ID NO: 1037751 - DNA, 25 bp, Homo sapien
tgaacccgaagagttgagtatcctg

SEQ ID NO: 1037752 - DNA, 25 bp, Homo sapien
tattctatggttcacgtgtgtcaac

SEQ ID NO: 1037753 - DNA, 25 bp, Homo sapien
gagtatcctgtgtcctgaacatgca

SEQ ID NO: 1037754 - DNA, 25 bp, Homo sapien
caaggcaagtgtcagctggaaggcc

SEQ ID NO: 1037755 - DNA, 25 bp, Homo sapien
ggaaggccctcattggtgaccatgg

SEQ ID NO: 1037756 - DNA, 25 bp, Homo sapien
gagcaggctctcagtaaaggtcttt

SEQ ID NO: 1037757 - DNA, 25 bp, Homo sapien
taaggatctctagggacaagtgtct

SEQ ID NO: 1037758 - DNA, 25 bp, Homo sapien
tctgggaggatacaacattcaaacc

SEQ ID NO: 1037759 - DNA, 25 bp, Homo sapien
tctgccttggtaggaaagtctaaga

SEQ ID NO: 1037760 - DNA, 25 bp, Homo sapien
tctgggagcatagagatctggtctt

SEQ ID NO: 1037761 - DNA, 25 bp, Homo sapien
gaggactctactctcgtgacctaat

SEQ ID NO: 1037762 - DNA, 25 bp, Homo sapien
cacagccacatgtaagaccacctgt

SEQ ID NO: 1037763 - DNA, 25 bp, Homo sapien
ttgaatgaacctggactgcagccca

SEQ ID NO: 1037764 - DNA, 25 bp, Homo sapien
tgtacctagagattcctaaagcctc

SEQ ID NO: 1037765 - DNA, 25 bp, Homo sapien
gatgttatctttcccttgtacctag

SEQ ID NO: 1037766 - DNA, 25 bp, Homo sapien
cccaaatgtccataagtgtacacac

SEQ ID NO: 1037767 - DNA, 25 bp, Homo sapien
aaatgtccataagtgtacacacata

SEQ ID NO: 1037768 - DNA, 25 bp, Homo sapien
ccaaatgtccataagtgtacacaca

SEQ ID NO: 1037769 - DNA, 25 bp, Homo sapien
ccccaaatgtccataagtgtacaca
